United States Patent Application Publication US 2018/0305689 A1 - sequence listing, part 157

SEQ ID NO: 2261579 - RNA, 19 nt, Artificial Sequence
  Description of Artificial Sequence: Synthetic oligonucleotide
  Antisense strand to SEQ ID NO: 2261578
ucuuaaagggaccacgcgg

SEQ ID NO: 2261580 - RNA, 19 nt, Artificial Sequence
  Description of Artificial Sequence: Synthetic oligonucleotide
  Sense strand starting at position 3108 of SEQ ID NO: 1884384
uccuucuuuggguguggaa

SEQ ID NO: 2261581 - RNA, 19 nt, Artificial Sequence
  Description of Artificial Sequence: Synthetic oligonucleotide
  Antisense strand to SEQ ID NO: 2261580
uuccacacccaaagaagga

SEQ ID NO: 2261582 - RNA, 19 nt, Artificial Sequence
  Description of Artificial Sequence: Synthetic oligonucleotide
  Sense strand starting at position 3976 of SEQ ID NO: 1884384
ggaggacagucccaugcau

SEQ ID NO: 2261583 - RNA, 19 nt, Artificial Sequence
  Description of Artificial Sequence: Synthetic oligonucleotide
  Antisense strand to SEQ ID NO: 2261582
augcaugggacuguccucc

SEQ ID NO: 2261584 - RNA, 19 nt, Artificial Sequence
  Description of Artificial Sequence: Synthetic oligonucleotide
  Sense strand starting at position 186 of SEQ ID NO: 1884385
ggcgaagccgauuagucua

SEQ ID NO: 2261585 - RNA, 19 nt, Artificial Sequence
  Description of Artificial Sequence: Synthetic oligonucleotide
  Antisense strand to SEQ ID NO: 2261584
uagacuaaucggcuucgcc

SEQ ID NO: 2261586 - RNA, 19 nt, Artificial Sequence
  Description of Artificial Sequence: Synthetic oligonucleotide
  Sense strand starting at position 424 of SEQ ID NO: 1884385
uuuaaaucgcaauacuaga

SEQ ID NO: 2261587 - RNA, 19 nt, Artificial Sequence
  Description of Artificial Sequence: Synthetic oligonucleotide
  Antisense strand to SEQ ID NO: 2261586
ucuaguauugcgauuuaaa

SEQ ID NO: 2261588 - RNA, 19 nt, Artificial Sequence
  Description of Artificial Sequence: Synthetic oligonucleotide
  Sense strand starting at position 493 of SEQ ID NO: 1884385
ccgugauccuuguugcaaa

SEQ ID NO: 2261589 - RNA, 19 nt, Artificial Sequence
  Description of Artificial Sequence: Synthetic oligonucleotide
  Antisense strand to SEQ ID NO: 2261588
uuugcaacaaggaucacgg

SEQ ID NO: 2261590 - RNA, 19 nt, Artificial Sequence
  Description of Artificial Sequence: Synthetic oligonucleotide
  Sense strand starting at position 556 of SEQ ID NO: 1884385
uguagaaauagcugcagaa

SEQ ID NO: 2261591 - RNA, 19 nt, Artificial Sequence
  Description of Artificial Sequence: Synthetic oligonucleotide
  Antisense strand to SEQ ID NO: 2261590
uucugcagcuauuucuaca

SEQ ID NO: 2261592 - RNA, 19 nt, Artificial Sequence
  Description of Artificial Sequence: Synthetic oligonucleotide
  Sense strand starting at position 584 of SEQ ID NO: 1884385
ccugcagcccuagaguuaa

SEQ ID NO: 2261593 - RNA, 19 nt, Artificial Sequence
  Description of Artificial Sequence: Synthetic oligonucleotide
  Antisense strand to SEQ ID NO: 2261592
uuaacucuagggcugcagg

SEQ ID NO: 2261594 - RNA, 19 nt, Artificial Sequence
  Description of Artificial Sequence: Synthetic oligonucleotide
  Sense strand starting at position 612 of SEQ ID NO: 1884385
gguggaacccucgaauucu

SEQ ID NO: 2261595 - RNA, 19 nt, Artificial Sequence
  Description of Artificial Sequence: Synthetic oligonucleotide
  Antisense strand to SEQ ID NO: 2261594
agaauucgaggguuccacc

SEQ ID NO: 2261596 - RNA, 19 nt, Artificial Sequence
  Description of Artificial Sequence: Synthetic oligonucleotide
  Sense strand starting at position 656 of SEQ ID NO: 1884385
acugcauucgcuggaggaa

SEQ ID NO: 2261597 - RNA, 19 nt, Artificial Sequence
  Description of Artificial Sequence: Synthetic oligonucleotide
  Antisense strand to SEQ ID NO: 2261596
uuccuccagcgaaugcagu

SEQ ID NO: 2261598 - RNA, 19 nt, Artificial Sequence
  Description of Artificial Sequence: Synthetic oligonucleotide
  Sense strand starting at position 657 of SEQ ID NO: 1884385
cugcauucgcuggaggaaa

SEQ ID NO: 2261599 - RNA, 19 nt, Artificial Sequence
  Description of Artificial Sequence: Synthetic oligonucleotide
  Antisense strand to SEQ ID NO: 2261598
uuuccuccagcgaaugcag

SEQ ID NO: 2261600 - RNA, 19 nt, Artificial Sequence
  Description of Artificial Sequence: Synthetic oligonucleotide
  Sense strand starting at position 659 of SEQ ID NO: 1884385
gcauucgcuggaggaaaua

SEQ ID NO: 2261601 - RNA, 19 nt, Artificial Sequence
  Description of Artificial Sequence: Synthetic oligonucleotide
  Antisense strand to SEQ ID NO: 2261600
uauuuccuccagcgaaugc

SEQ ID NO: 2261602 - RNA, 19 nt, Artificial Sequence
  Description of Artificial Sequence: Synthetic oligonucleotide
  Sense strand starting at position 671 of SEQ ID NO: 1884385
ggaaauaucacaggcugca

SEQ ID NO: 2261603 - RNA, 19 nt, Artificial Sequence
  Description of Artificial Sequence: Synthetic oligonucleotide
  Antisense strand to SEQ ID NO: 2261602
ugcagccugugauauuucc

SEQ ID NO: 2261604 - RNA, 19 nt, Artificial Sequence
  Description of Artificial Sequence: Synthetic oligonucleotide
  Sense strand starting at position 788 of SEQ ID NO: 1884385
ccgggucucuccuuacaaa

SEQ ID NO: 2261605 - RNA, 19 nt, Artificial Sequence
  Description of Artificial Sequence: Synthetic oligonucleotide
  Antisense strand to SEQ ID NO: 2261604
uuuguaaggagagacccgg

SEQ ID NO: 2261606 - RNA, 19 nt, Artificial Sequence
  Description of Artificial Sequence: Synthetic oligonucleotide
  Sense strand starting at position 789 of SEQ ID NO: 1884385
cgggucucuccuuacaaau

SEQ ID NO: 2261607 - RNA, 19 nt, Artificial Sequence
  Description of Artificial Sequence: Synthetic oligonucleotide
  Antisense strand to SEQ ID NO: 2261606
auuuguaaggagagacccg

SEQ ID NO: 2261608 - RNA, 19 nt, Artificial Sequence
  Description of Artificial Sequence: Synthetic oligonucleotide
  Sense strand starting at position 1030 of SEQ ID NO: 1884385
cuuagagaucccugacugu

SEQ ID NO: 2261609 - RNA, 19 nt, Artificial Sequence
  Description of Artificial Sequence: Synthetic oligonucleotide
  Antisense strand to SEQ ID NO: 2261608
acagucagggaucucuaag

SEQ ID NO: 2261610 - RNA, 19 nt, Artificial Sequence
  Description of Artificial Sequence: Synthetic oligonucleotide
  Sense strand starting at position 1060 of SEQ ID NO: 1884385
cggucucccuauuuguuaa

SEQ ID NO: 2261611 - RNA, 19 nt, Artificial Sequence
  Description of Artificial Sequence: Synthetic oligonucleotide
  Antisense strand to SEQ ID NO: 2261610
uuaacaaauagggagaccg

SEQ ID NO: 2261612 - RNA, 19 nt, Artificial Sequence
  Description of Artificial Sequence: Synthetic oligonucleotide
  Sense strand starting at position 1377 of SEQ ID NO: 1884385
agaacuggaccucgaguuu

SEQ ID NO: 2261613 - RNA, 19 nt, Artificial Sequence
  Description of Artificial Sequence: Synthetic oligonucleotide
  Antisense strand to SEQ ID NO: 2261612
aaacucgagguccaguucu

SEQ ID NO: 2261614 - RNA, 19 nt, Artificial Sequence
  Description of Artificial Sequence: Synthetic oligonucleotide
  Sense strand starting at position 1442 of SEQ ID NO: 1884385
ggccuaucauauccuuguu

SEQ ID NO: 2261615 - RNA, 19 nt, Artificial Sequence
  Description of Artificial Sequence: Synthetic oligonucleotide
  Antisense strand to SEQ ID NO: 2261614
aacaaggauaugauaggcc

SEQ ID NO: 2261616 - RNA, 19 nt, Artificial Sequence
  Description of Artificial Sequence: Synthetic oligonucleotide
  Sense strand starting at position 2064 of SEQ ID NO: 1884385
gagccaugagccugaguca

SEQ ID NO: 2261617 - RNA, 19 nt, Artificial Sequence
  Description of Artificial Sequence: Synthetic oligonucleotide
  Antisense strand to SEQ ID NO: 2261616
ugacucaggcucauggcuc

SEQ ID NO: 2261618 - RNA, 19 nt, Artificial Sequence
  Description of Artificial Sequence: Synthetic oligonucleotide
  Sense strand starting at position 2118 of SEQ ID NO: 1884385
ggagguuacucucaggaag

SEQ ID NO: 2261619 - RNA, 19 nt, Artificial Sequence
  Description of Artificial Sequence: Synthetic oligonucleotide
  Antisense strand to SEQ ID NO: 2261618
cuuccugagaguaaccucc

SEQ ID NO: 2261620 - RNA, 19 nt, Artificial Sequence
  Description of Artificial Sequence: Synthetic oligonucleotide
  Sense strand starting at position 2252 of SEQ ID NO: 1884385
gucagucuguucuuaccua

SEQ ID NO: 2261621 - RNA, 19 nt, Artificial Sequence
  Description of Artificial Sequence: Synthetic oligonucleotide
  Antisense strand to SEQ ID NO: 2261620
uagguaagaacagacugac

SEQ ID NO: 2261622 - RNA, 19 nt, Artificial Sequence
  Description of Artificial Sequence: Synthetic oligonucleotide
  Sense strand starting at position 2453 of SEQ ID NO: 1884385
caagaacugucaguggcuu

SEQ ID NO: 2261623 - RNA, 19 nt, Artificial Sequence
  Description of Artificial Sequence: Synthetic oligonucleotide
  Antisense strand to SEQ ID NO: 2261622
aagccacugacaguucuug

SEQ ID NO: 2261624 - RNA, 19 nt, Artificial Sequence
  Description of Artificial Sequence: Synthetic oligonucleotide
  Sense strand starting at position 3014 of SEQ ID NO: 1884385
gggccuguauucuugcuga

SEQ ID NO: 2261625 - RNA, 19 nt, Artificial Sequence
  Description of Artificial Sequence: Synthetic oligonucleotide
  Antisense strand to SEQ ID NO: 2261624
ucagcaagaauacaggccc

SEQ ID NO: 2261626 - RNA, 19 nt, Artificial Sequence
  Description of Artificial Sequence: Synthetic oligonucleotide
  Sense strand starting at position 3017 of SEQ ID NO: 1884385
ccuguauucuugcugauuc

SEQ ID NO: 2261627 - RNA, 19 nt, Artificial Sequence
  Description of Artificial Sequence: Synthetic oligonucleotide
  Antisense strand to SEQ ID NO: 2261626
gaaucagcaagaauacagg

SEQ ID NO: 2261628 - RNA, 19 nt, Artificial Sequence
  Description of Artificial Sequence: Synthetic oligonucleotide
  Sense strand starting at position 3019 of SEQ ID NO: 1884385
uguauucuugcugauucca

SEQ ID NO: 2261629 - RNA, 19 nt, Artificial Sequence
  Description of Artificial Sequence: Synthetic oligonucleotide
  Antisense strand to SEQ ID NO: 2261628
uggaaucagcaagaauaca

SEQ ID NO: 2261630 - RNA, 19 nt, Artificial Sequence
  Description of Artificial Sequence: Synthetic oligonucleotide
  Sense strand starting at position 3117 of SEQ ID NO: 1884385
uugguaagcccuugaguau

SEQ ID NO: 2261631 - RNA, 19 nt, Artificial Sequence
  Description of Artificial Sequence: Synthetic oligonucleotide
  Antisense strand to SEQ ID NO: 2261630
auacucaagggcuuaccaa

SEQ ID NO: 2261632 - RNA, 19 nt, Artificial Sequence
  Description of Artificial Sequence: Synthetic oligonucleotide
  Sense strand starting at position 3118 of SEQ ID NO: 1884385
ugguaagcccuugaguaug

SEQ ID NO: 2261633 - RNA, 19 nt, Artificial Sequence
  Description of Artificial Sequence: Synthetic oligonucleotide
  Antisense strand to SEQ ID NO: 2261632
cauacucaagggcuuacca

SEQ ID NO: 2261634 - RNA, 19 nt, Artificial Sequence
  Description of Artificial Sequence: Synthetic oligonucleotide
  Sense strand starting at position 3123 of SEQ ID NO: 1884385
agcccuugaguaugccaaa

SEQ ID NO: 2261635 - RNA, 19 nt, Artificial Sequence
  Description of Artificial Sequence: Synthetic oligonucleotide
  Antisense strand to SEQ ID NO: 2261634
uuuggcauacucaagggcu

SEQ ID NO: 2261636 - RNA, 19 nt, Artificial Sequence
  Description of Artificial Sequence: Synthetic oligonucleotide
  Sense strand starting at position 3154 of SEQ ID NO: 1884385
uucugauaggaaugucuuu

SEQ ID NO: 2261637 - RNA, 19 nt, Artificial Sequence
  Description of Artificial Sequence: Synthetic oligonucleotide
  Antisense strand to SEQ ID NO: 2261636
aaagacauuccuaucagaa

SEQ ID NO: 2261638 - RNA, 19 nt, Artificial Sequence
  Description of Artificial Sequence: Synthetic oligonucleotide
  Sense strand starting at position 3198 of SEQ ID NO: 1884385
cugacuuaauguuaaugaa

SEQ ID NO: 2261639 - RNA, 19 nt, Artificial Sequence
  Description of Artificial Sequence: Synthetic oligonucleotide
  Antisense strand to SEQ ID NO: 2261638
uucauuaacauuaagucag

SEQ ID NO: 2261640 - RNA, 19 nt, Artificial Sequence
  Description of Artificial Sequence: Synthetic oligonucleotide
  Sense strand starting at position 3244 of SEQ ID NO: 1884385
gagccagucaugggaaaga

SEQ ID NO: 2261641 - RNA, 19 nt, Artificial Sequence
  Description of Artificial Sequence: Synthetic oligonucleotide
  Antisense strand to SEQ ID NO: 2261640
ucuuucccaugacuggcuc

SEQ ID NO: 2261642 - RNA, 19 nt, Artificial Sequence
  Description of Artificial Sequence: Synthetic oligonucleotide
  Sense strand starting at position 3262 of SEQ ID NO: 1884385
accaaaugauuagggaauu

SEQ ID NO: 2261643 - RNA, 19 nt, Artificial Sequence
  Description of Artificial Sequence: Synthetic oligonucleotide
  Antisense strand to SEQ ID NO: 2261642
aauucccuaaucauuuggu

SEQ ID NO: 2261644 - RNA, 19 nt, Artificial Sequence
  Description of Artificial Sequence: Synthetic oligonucleotide
  Sense strand starting at position 3263 of SEQ ID NO: 1884385
ccaaaugauuagggaauua

SEQ ID NO: 2261645 - RNA, 19 nt, Artificial Sequence
  Description of Artificial Sequence: Synthetic oligonucleotide
  Antisense strand to SEQ ID NO: 2261644
uaauucccuaaucauuugg

SEQ ID NO: 2261646 - RNA, 19 nt, Artificial Sequence
  Description of Artificial Sequence: Synthetic oligonucleotide
  Sense strand starting at position 3276 of SEQ ID NO: 1884385
gaauuagagggcuggaacu

SEQ ID NO: 2261647 - RNA, 19 nt, Artificial Sequence
  Description of Artificial Sequence: Synthetic oligonucleotide
  Antisense strand to SEQ ID NO: 2261646
aguuccagcccucuaauuc

SEQ ID NO: 2261648 - RNA, 19 nt, Artificial Sequence
  Description of Artificial Sequence: Synthetic oligonucleotide
  Sense strand starting at position 3308 of SEQ ID NO: 1884385
gguggauggcuuuacuuac

SEQ ID NO: 2261649 - RNA, 19 nt, Artificial Sequence
  Description of Artificial Sequence: Synthetic oligonucleotide
  Antisense strand to SEQ ID NO: 2261648
guaaguaaagccauccacc

SEQ ID NO: 2261650 - RNA, 19 nt, Artificial Sequence
  Description of Artificial Sequence: Synthetic oligonucleotide
  Sense strand starting at position 3365 of SEQ ID NO: 1884385
auagauccauaacugaguu

SEQ ID NO: 2261651 - RNA, 19 nt, Artificial Sequence
  Description of Artificial Sequence: Synthetic oligonucleotide
  Antisense strand to SEQ ID NO: 2261650
aacucaguuauggaucuau

SEQ ID NO: 2261652 - RNA, 19 nt, Artificial Sequence
  Description of Artificial Sequence: Synthetic oligonucleotide
  Sense strand starting at position 3573 of SEQ ID NO: 1884385
augcuugcauguucuaaca

SEQ ID NO: 2261653 - RNA, 19 nt, Artificial Sequence
  Description of Artificial Sequence: Synthetic oligonucleotide
  Antisense strand to SEQ ID NO: 2261652
uguuagaacaugcaagcau

SEQ ID NO: 2261654 - RNA, 19 nt, Artificial Sequence
  Description of Artificial Sequence: Synthetic oligonucleotide
  Sense strand starting at position 3613 of SEQ ID NO: 1884385
cuaagaucacucuagguuc

SEQ ID NO: 2261655 - RNA, 19 nt, Artificial Sequence
  Description of Artificial Sequence: Synthetic oligonucleotide
  Antisense strand to SEQ ID NO: 2261654
gaaccuagagugaucuuag

SEQ ID NO: 2261656 - RNA, 19 nt, Artificial Sequence
  Description of Artificial Sequence: Synthetic oligonucleotide
  Sense strand starting at position 3712 of SEQ ID NO: 1884385
ggcagauugccacaguguu

SEQ ID NO: 2261657 - RNA, 19 nt, Artificial Sequence
  Description of Artificial Sequence: Synthetic oligonucleotide
  Antisense strand to SEQ ID NO: 2261656
aacacuguggcaaucugcc

SEQ ID NO: 2261658 - RNA, 19 nt, Artificial Sequence
  Description of Artificial Sequence: Synthetic oligonucleotide
  Sense strand starting at position 3734 of SEQ ID NO: 1884385
cgguuucucagucuuugca

SEQ ID NO: 2261659 - RNA, 19 nt, Artificial Sequence
  Description of Artificial Sequence: Synthetic oligonucleotide
  Antisense strand to SEQ ID NO: 2261658
ugcaaagacugagaaaccg

SEQ ID NO: 2261660 - RNA, 19 nt, Artificial Sequence
  Description of Artificial Sequence: Synthetic oligonucleotide
  Sense strand starting at position 3748 of SEQ ID NO: 1884385
uugcaacaguguucucagu

SEQ ID NO: 2261661 - RNA, 19 nt, Artificial Sequence
  Description of Artificial Sequence: Synthetic oligonucleotide
  Antisense strand to SEQ ID NO: 2261660
acugagaacacuguugcaa

SEQ ID NO: 2261662 - RNA, 19 nt, Artificial Sequence
  Description of Artificial Sequence: Synthetic oligonucleotide
  Sense strand starting at position 3750 of SEQ ID NO: 1884385
gcaacaguguucucaguca

SEQ ID NO: 2261663 - RNA, 19 nt, Artificial Sequence
  Description of Artificial Sequence: Synthetic oligonucleotide
  Antisense strand to SEQ ID NO: 2261662
ugacugagaacacuguugc

SEQ ID NO: 2261664 - RNA, 19 nt, Artificial Sequence
  Description of Artificial Sequence: Synthetic oligonucleotide
  Sense strand starting at position 2010 of SEQ ID NO: 1884386
gcucuuuccgcgucucaga

SEQ ID NO: 2261665 - RNA, 19 nt, Artificial Sequence
  Description of Artificial Sequence: Synthetic oligonucleotide
  Antisense strand to SEQ ID NO: 2261664
ucugagacgcggaaagagc

SEQ ID NO: 2261666 - RNA, 19 nt, Artificial Sequence
  Description of Artificial Sequence: Synthetic oligonucleotide
  Sense strand starting at position 2091 of SEQ ID NO: 1884386
gggagaaaucccggcggca

SEQ ID NO: 2261667 - RNA, 19 nt, Artificial Sequence
  Description of Artificial Sequence: Synthetic oligonucleotide
  Antisense strand to SEQ ID NO: 2261666
ugccgccgggauuucuccc

SEQ ID NO: 2261668 - RNA, 19 nt, Artificial Sequence
  Description of Artificial Sequence: Synthetic oligonucleotide
  Sense strand starting at position 2895 of SEQ ID NO: 1884386
gcagcuagguguugauacu

SEQ ID NO: 2261669 - RNA, 19 nt, Artificial Sequence
  Description of Artificial Sequence: Synthetic oligonucleotide
  Antisense strand to SEQ ID NO: 2261668
aguaucaacaccuagcugc

SEQ ID NO: 2261670 - RNA, 19 nt, Artificial Sequence
  Description of Artificial Sequence: Synthetic oligonucleotide
  Sense strand starting at position 2901 of SEQ ID NO: 1884386
agguguugauacucuacua

SEQ ID NO: 2261671 - RNA, 19 nt, Artificial Sequence
  Description of Artificial Sequence: Synthetic oligonucleotide
  Antisense strand to SEQ ID NO: 2261670
uaguagaguaucaacaccu

SEQ ID NO: 2261672 - RNA, 19 nt, Artificial Sequence
  Description of Artificial Sequence: Synthetic oligonucleotide
  Sense strand starting at position 2959 of SEQ ID NO: 1884386
gaacgcagcgcuguugaau

SEQ ID NO: 2261673 - RNA, 19 nt, Artificial Sequence
  Description of Artificial Sequence: Synthetic oligonucleotide
  Antisense strand to SEQ ID NO: 2261672
auucaacagcgcugcguuc

SEQ ID NO: 2261674 - RNA, 19 nt, Artificial Sequence
  Description of Artificial Sequence: Synthetic oligonucleotide
  Sense strand starting at position 2960 of SEQ ID NO: 1884386
aacgcagcgcuguugaauu

SEQ ID NO: 2261675 - RNA, 19 nt, Artificial Sequence
  Description of Artificial Sequence: Synthetic oligonucleotide
  Antisense strand to SEQ ID NO: 2261674
aauucaacagcgcugcguu

SEQ ID NO: 2261676 - RNA, 19 nt, Artificial Sequence
  Description of Artificial Sequence: Synthetic oligonucleotide
  Sense strand starting at position 3033 of SEQ ID NO: 1884386
caaucaaugugcguguaca

SEQ ID NO: 2261677 - RNA, 19 nt, Artificial Sequence
  Description of Artificial Sequence: Synthetic oligonucleotide
  Antisense strand to SEQ ID NO: 2261676
uguacacgcacauugauug

SEQ ID NO: 2261678 - RNA, 19 nt, Artificial Sequence
  Description of Artificial Sequence: Synthetic oligonucleotide
  Sense strand starting at position 3034 of SEQ ID NO: 1884386
aaucaaugugcguguacac

SEQ ID NO: 2261679 - RNA, 19 nt, Artificial Sequence
  Description of Artificial Sequence: Synthetic oligonucleotide
  Antisense strand to SEQ ID NO: 2261678
guguacacgcacauugauu

SEQ ID NO: 2261680 - RNA, 19 nt, Artificial Sequence
  Description of Artificial Sequence: Synthetic oligonucleotide
  Sense strand starting at position 3041 of SEQ ID NO: 1884386
gugcguguacacuuaagca

SEQ ID NO: 2261681 - RNA, 19 nt, Artificial Sequence
  Description of Artificial Sequence: Synthetic oligonucleotide
  Antisense strand to SEQ ID NO: 2261680
ugcuuaaguguacacgcac

SEQ ID NO: 2261682 - RNA, 19 nt, Artificial Sequence
  Description of Artificial Sequence: Synthetic oligonucleotide
  Sense strand starting at position 3068 of SEQ ID NO: 1884386
gguggcuuugugcugucau

SEQ ID NO: 2261683 - RNA, 19 nt, Artificial Sequence
  Description of Artificial Sequence: Synthetic oligonucleotide
  Antisense strand to SEQ ID NO: 2261682
augacagcacaaagccacc

SEQ ID NO: 2261684 - RNA, 19 nt, Artificial Sequence
  Description of Artificial Sequence: Synthetic oligonucleotide
  Sense strand starting at position 3069 of SEQ ID NO: 1884386
guggcuuugugcugucauc

SEQ ID NO: 2261685 - RNA, 19 nt, Artificial Sequence
  Description of Artificial Sequence: Synthetic oligonucleotide
  Antisense strand to SEQ ID NO: 2261684
gaugacagcacaaagccac

SEQ ID NO: 2261686 - RNA, 19 nt, Artificial Sequence
  Description of Artificial Sequence: Synthetic oligonucleotide
  Sense strand starting at position 3071 of SEQ ID NO: 1884386
ggcuuugugcugucaucga

SEQ ID NO: 2261687 - RNA, 19 nt, Artificial Sequence
  Description of Artificial Sequence: Synthetic oligonucleotide
  Antisense strand to SEQ ID NO: 2261686
ucgaugacagcacaaagcc

SEQ ID NO: 2261688 - RNA, 19 nt, Artificial Sequence
  Description of Artificial Sequence: Synthetic oligonucleotide
  Sense strand starting at position 3075 of SEQ ID NO: 1884386
uugugcugucaucgaggau

SEQ ID NO: 2261689 - RNA, 19 nt, Artificial Sequence
  Description of Artificial Sequence: Synthetic oligonucleotide
  Antisense strand to SEQ ID NO: 2261688
auccucgaugacagcacaa

SEQ ID NO: 2261690 - RNA, 19 nt, Artificial Sequence
  Description of Artificial Sequence: Synthetic oligonucleotide
  Sense strand starting at position 3076 of SEQ ID NO: 1884386
ugugcugucaucgaggauu

SEQ ID NO: 2261691 - RNA, 19 nt, Artificial Sequence
  Description of Artificial Sequence: Synthetic oligonucleotide
  Antisense strand to SEQ ID NO: 2261690
aauccucgaugacagcaca

SEQ ID NO: 2261692 - RNA, 19 nt, Artificial Sequence
  Description of Artificial Sequence: Synthetic oligonucleotide
  Sense strand starting at position 3078 of SEQ ID NO: 1884386
ugcugucaucgaggauuag

SEQ ID NO: 2261693 - RNA, 19 nt, Artificial Sequence
  Description of Artificial Sequence: Synthetic oligonucleotide
  Antisense strand to SEQ ID NO: 2261692
cuaauccucgaugacagca

SEQ ID NO: 2261694 - RNA, 19 nt, Artificial Sequence
  Description of Artificial Sequence: Synthetic oligonucleotide
  Sense strand starting at position 3079 of SEQ ID NO: 1884386
gcugucaucgaggauuaga

SEQ ID NO: 2261695 - RNA, 19 nt, Artificial Sequence
  Description of Artificial Sequence: Synthetic oligonucleotide
  Antisense strand to SEQ ID NO: 2261694
ucuaauccucgaugacagc

SEQ ID NO: 2261696 - RNA, 19 nt, Artificial Sequence
  Description of Artificial Sequence: Synthetic oligonucleotide
  Sense strand starting at position 3088 of SEQ ID NO: 1884386
gaggauuagaugugugaug

SEQ ID NO: 2261697 - RNA, 19 nt, Artificial Sequence
  Description of Artificial Sequence: Synthetic oligonucleotide
  Antisense strand to SEQ ID NO: 2261696
caucacacaucuaauccuc

SEQ ID NO: 2261698 - RNA, 19 nt, Artificial Sequence
  Description of Artificial Sequence: Synthetic oligonucleotide
  Sense strand starting at position 3089 of SEQ ID NO: 1884386
aggauuagaugugugauga

SEQ ID NO: 2261699 - RNA, 19 nt, Artificial Sequence
  Description of Artificial Sequence: Synthetic oligonucleotide
  Antisense strand to SEQ ID NO: 2261698
ucaucacacaucuaauccu

SEQ ID NO: 2261700 - RNA, 19 nt, Artificial Sequence
  Description of Artificial Sequence: Synthetic oligonucleotide
  Sense strand starting at position 3090 of SEQ ID NO: 1884386
ggauuagaugugugaugag

SEQ ID NO: 2261701 - RNA, 19 nt, Artificial Sequence
  Description of Artificial Sequence: Synthetic oligonucleotide
  Antisense strand to SEQ ID NO: 2261700
cucaucacacaucuaaucc

SEQ ID NO: 2261702 - RNA, 19 nt, Artificial Sequence
  Description of Artificial Sequence: Synthetic oligonucleotide
  Sense strand starting at position 3130 of SEQ ID NO: 1884386
gcccuaauucugcugcuuu

SEQ ID NO: 2261703 - RNA, 19 nt, Artificial Sequence
  Description of Artificial Sequence: Synthetic oligonucleotide
  Antisense strand to SEQ ID NO: 2261702
aaagcagcagaauuagggc

SEQ ID NO: 2261704 - RNA, 19 nt, Artificial Sequence
  Description of Artificial Sequence: Synthetic oligonucleotide
  Sense strand starting at position 3140 of SEQ ID NO: 1884386
ugcugcuuugccuguugaa

SEQ ID NO: 2261705 - RNA, 19 nt, Artificial Sequence
  Description of Artificial Sequence: Synthetic oligonucleotide
  Antisense strand to SEQ ID NO: 2261704
uucaacaggcaaagcagca

SEQ ID NO: 2261706 - RNA, 19 nt, Artificial Sequence
  Description of Artificial Sequence: Synthetic oligonucleotide
  Sense strand starting at position 3141 of SEQ ID NO: 1884386
gcugcuuugccuguugaaa

SEQ ID NO: 2261707 - RNA, 19 nt, Artificial Sequence
  Description of Artificial Sequence: Synthetic oligonucleotide
  Antisense strand to SEQ ID NO: 2261706
uuucaacaggcaaagcagc

SEQ ID NO: 2261708 - RNA, 19 nt, Artificial Sequence
  Description of Artificial Sequence: Synthetic oligonucleotide
  Sense strand starting at position 3307 of SEQ ID NO: 1884386
gaagguguauuauuacauu

SEQ ID NO: 2261709 - RNA, 19 nt, Artificial Sequence
  Description of Artificial Sequence: Synthetic oligonucleotide
  Antisense strand to SEQ ID NO: 2261708
aauguaauaauacaccuuc

SEQ ID NO: 2261710 - RNA, 19 nt, Artificial Sequence
  Description of Artificial Sequence: Synthetic oligonucleotide
  Sense strand starting at position 3310 of SEQ ID NO: 1884386
gguguauuauuacauugua

SEQ ID NO: 2261711 - RNA, 19 nt, Artificial Sequence
  Description of Artificial Sequence: Synthetic oligonucleotide
  Antisense strand to SEQ ID NO: 2261710
uacaauguaauaauacacc

SEQ ID NO: 2261712 - RNA, 19 nt, Artificial Sequence
  Description of Artificial Sequence: Synthetic oligonucleotide
  Sense strand starting at position 3375 of SEQ ID NO: 1884386
uuugaugagcaguacuuau

SEQ ID NO: 2261713 - RNA, 19 nt, Artificial Sequence
  Description of Artificial Sequence: Synthetic oligonucleotide
  Antisense strand to SEQ ID NO: 2261712
auaaguacugcucaucaaa

SEQ ID NO: 2261714 - RNA, 19 nt, Artificial Sequence
  Description of Artificial Sequence: Synthetic oligonucleotide
  Sense strand starting at position 3383 of SEQ ID NO: 1884386
gcaguacuuauuuguuguu

SEQ ID NO: 2261715 - RNA, 19 nt, Artificial Sequence
  Description of Artificial Sequence: Synthetic oligonucleotide
  Antisense strand to SEQ ID NO: 2261714
aacaacaaauaaguacugc

SEQ ID NO: 2261716 - RNA, 19 nt, Artificial Sequence
  Description of Artificial Sequence: Synthetic oligonucleotide
  Sense strand starting at position 3386 of SEQ ID NO: 1884386
guacuuauuuguuguucua

SEQ ID NO: 2261717 - RNA, 19 nt, Artificial Sequence
  Description of Artificial Sequence: Synthetic oligonucleotide
  Antisense strand to SEQ ID NO: 2261716
uagaacaacaaauaaguac

SEQ ID NO: 2261718 - RNA, 19 nt, Artificial Sequence
  Description of Artificial Sequence: Synthetic oligonucleotide
  Sense strand starting at position 3393 of SEQ ID NO: 1884386
uuuguuguucuagaauaga

SEQ ID NO: 2261719 - RNA, 19 nt, Artificial Sequence
  Description of Artificial Sequence: Synthetic oligonucleotide
  Antisense strand to SEQ ID NO: 2261718
ucuauucuagaacaacaaa

SEQ ID NO: 2261720 - RNA, 19 nt, Artificial Sequence
  Description of Artificial Sequence: Synthetic oligonucleotide
  Sense strand starting at position 3459 of SEQ ID NO: 1884386
gcguuuaaacaguguuuau

SEQ ID NO: 2261721 - RNA, 19 nt, Artificial Sequence
  Description of Artificial Sequence: Synthetic oligonucleotide
  Antisense strand to SEQ ID NO: 2261720
auaaacacuguuuaaacgc

SEQ ID NO: 2261722 - RNA, 19 nt, Artificial Sequence
  Description of Artificial Sequence: Synthetic oligonucleotide
  Sense strand starting at position 3496 of SEQ ID NO: 1884386
aaaggaacuuugcuagguu

SEQ ID NO: 2261723 - RNA, 19 nt, Artificial Sequence
  Description of Artificial Sequence: Synthetic oligonucleotide
  Antisense strand to SEQ ID NO: 2261722
aaccuagcaaaguuccuuu

SEQ ID NO: 2261724 - RNA, 19 nt, Artificial Sequence
  Description of Artificial Sequence: Synthetic oligonucleotide
  Sense strand starting at position 3497 of SEQ ID NO: 1884386
aaggaacuuugcuagguuu

SEQ ID NO: 2261725 - RNA, 19 nt, Artificial Sequence
  Description of Artificial Sequence: Synthetic oligonucleotide
  Antisense strand to SEQ ID NO: 2261724
aaaccuagcaaaguuccuu

SEQ ID NO: 2261726 - RNA, 19 nt, Artificial Sequence
  Description of Artificial Sequence: Synthetic oligonucleotide
  Sense strand starting at position 3499 of SEQ ID NO: 1884386
ggaacuuugcuagguuuau

SEQ ID NO: 2261727 - RNA, 19 nt, Artificial Sequence
  Description of Artificial Sequence: Synthetic oligonucleotide
  Antisense strand to SEQ ID NO: 2261726
auaaaccuagcaaaguucc

SEQ ID NO: 2261728 - RNA, 19 nt, Artificial Sequence
  Description of Artificial Sequence: Synthetic oligonucleotide
  Sense strand starting at position 3500 of SEQ ID NO: 1884386
gaacuuugcuagguuuauu

SEQ ID NO: 2261729 - RNA, 19 nt, Artificial Sequence
  Description of Artificial Sequence: Synthetic oligonucleotide
  Antisense strand to SEQ ID NO: 2261728
aauaaaccuagcaaaguuc

SEQ ID NO: 2261730 - RNA, 19 nt, Artificial Sequence
  Description of Artificial Sequence: Synthetic oligonucleotide
  Sense strand starting at position 3509 of SEQ ID NO: 1884386
uagguuuauuuaggagaca

SEQ ID NO: 2261731 - RNA, 19 nt, Artificial Sequence
  Description of Artificial Sequence: Synthetic oligonucleotide
  Antisense strand to SEQ ID NO: 2261730
ugucuccuaaauaaaccua

SEQ ID NO: 2261732 - RNA, 19 nt, Artificial Sequence
  Description of Artificial Sequence: Synthetic oligonucleotide
  Sense strand starting at position 3510 of SEQ ID NO: 1884386
agguuuauuuaggagacag

SEQ ID NO: 2261733 - RNA, 19 nt, Artificial Sequence
  Description of Artificial Sequence: Synthetic oligonucleotide
  Antisense strand to SEQ ID NO: 2261732
cugucuccuaaauaaaccu

SEQ ID NO: 2261734 - RNA, 19 nt, Artificial Sequence
  Description of Artificial Sequence: Synthetic oligonucleotide
  Sense strand starting at position 3816 of SEQ ID NO: 1884386
acaauaaauugaggugaag

SEQ ID NO: 2261735 - RNA, 19 nt, Artificial Sequence
  Description of Artificial Sequence: Synthetic oligonucleotide
  Antisense strand to SEQ ID NO: 2261734
cuucaccucaauuuauugu

SEQ ID NO: 2261736 - RNA, 19 nt, Artificial Sequence
  Description of Artificial Sequence: Synthetic oligonucleotide
  Sense strand starting at position 3827 of SEQ ID NO: 1884386
aggugaaguugacacagaa

SEQ ID NO: 2261737 - RNA, 19 nt, Artificial Sequence
  Description of Artificial Sequence: Synthetic oligonucleotide
  Antisense strand to SEQ ID NO: 2261736
uucugugucaacuucaccu

SEQ ID NO: 2261738 - RNA, 19 nt, Artificial Sequence
  Description of Artificial Sequence: Synthetic oligonucleotide
  Sense strand starting at position 3871 of SEQ ID NO: 1884386
cguuuagugaaaggauuac

SEQ ID NO: 2261739 - RNA, 19 nt, Artificial Sequence
  Description of Artificial Sequence: Synthetic oligonucleotide
  Antisense strand to SEQ ID NO: 2261738
guaauccuuucacuaaacg

SEQ ID NO: 2261740 - RNA, 19 nt, Artificial Sequence
  Description of Artificial Sequence: Synthetic oligonucleotide
  Sense strand starting at position 3911 of SEQ ID NO: 1884386
agacaaaugucuugugccu

SEQ ID NO: 2261741 - RNA, 19 nt, Artificial Sequence
  Description of Artificial Sequence: Synthetic oligonucleotide
  Antisense strand to SEQ ID NO: 2261740
aggcacaagacauuugucu

SEQ ID NO: 2261742 - RNA, 19 nt, Artificial Sequence
  Description of Artificial Sequence: Synthetic oligonucleotide
  Sense strand starting at position 1984 of SEQ ID NO: 1884387
uuuguuugaucucacugau

SEQ ID NO: 2261743 - RNA, 19 nt, Artificial Sequence
  Description of Artificial Sequence: Synthetic oligonucleotide
  Antisense strand to SEQ ID NO: 2261742
aucagugagaucaaacaaa

SEQ ID NO: 2261744 - RNA, 19 nt, Artificial Sequence
  Description of Artificial Sequence: Synthetic oligonucleotide
  Sense strand starting at position 1987 of SEQ ID NO: 1884387
guuugaucucacugaugga

SEQ ID NO: 2261745 - RNA, 19 nt, Artificial Sequence
  Description of Artificial Sequence: Synthetic oligonucleotide
  Antisense strand to SEQ ID NO: 2261744
uccaucagugagaucaaac

SEQ ID NO: 2261746 - RNA, 19 nt, Artificial Sequence
  Description of Artificial Sequence: Synthetic oligonucleotide
  Sense strand starting at position 2093 of SEQ ID NO: 1884387
gugcuaagacccugacaga

SEQ ID NO: 2261747 - RNA, 19 nt, Artificial Sequence
  Description of Artificial Sequence: Synthetic oligonucleotide
  Antisense strand to SEQ ID NO: 2261746
ucugucagggucuuagcac

SEQ ID NO: 2261748 - RNA, 19 nt, Artificial Sequence
  Description of Artificial Sequence: Synthetic oligonucleotide
  Sense strand starting at position 2106 of SEQ ID NO: 1884387
gacagagucugucagcacu

SEQ ID NO: 2261749 - RNA, 19 nt, Artificial Sequence
  Description of Artificial Sequence: Synthetic oligonucleotide
  Antisense strand to SEQ ID NO: 2261748
agugcugacagacucuguc

SEQ ID NO: 2261750 - RNA, 19 nt, Artificial Sequence
  Description of Artificial Sequence: Synthetic oligonucleotide
  Sense strand starting at position 2178 of SEQ ID NO: 1884387
uaacuauggugccaaugau

SEQ ID NO: 2261751 - RNA, 19 nt, Artificial Sequence
  Description of Artificial Sequence: Synthetic oligonucleotide
  Antisense strand to SEQ ID NO: 2261750
aucauuggcaccauaguua

SEQ ID NO: 2261752 - RNA, 19 nt, Artificial Sequence
  Description of Artificial Sequence: Synthetic oligonucleotide
  Sense strand starting at position 2187 of SEQ ID NO: 1884387
ugccaaugaugccuuugua

SEQ ID NO: 2261753 - RNA, 19 nt, Artificial Sequence
  Description of Artificial Sequence: Synthetic oligonucleotide
  Antisense strand to SEQ ID NO: 2261752
uacaaaggcaucauuggca

SEQ ID NO: 2261754 - RNA, 19 nt, Artificial Sequence
  Description of Artificial Sequence: Synthetic oligonucleotide
  Sense strand starting at position 2372 of SEQ ID NO: 1884387
gggcuaugugguggucaca

SEQ ID NO: 2261755 - RNA, 19 nt, Artificial Sequence
  Description of Artificial Sequence: Synthetic oligonucleotide
  Antisense strand to SEQ ID NO: 2261754
ugugaccaccacauagccc

SEQ ID NO: 2261756 - RNA, 19 nt, Artificial Sequence
  Description of Artificial Sequence: Synthetic oligonucleotide
  Sense strand starting at position 2417 of SEQ ID NO: 1884387
aggccuacugccuauuagu

SEQ ID NO: 2261757 - RNA, 19 nt, Artificial Sequence
  Description of Artificial Sequence: Synthetic oligonucleotide
  Antisense strand to SEQ ID NO: 2261756
acuaauaggcaguaggccu

SEQ ID NO: 2261758 - RNA, 19 nt, Artificial Sequence
  Description of Artificial Sequence: Synthetic oligonucleotide
  Sense strand starting at position 2426 of SEQ ID NO: 1884387
gccuauuagugcuguggga

SEQ ID NO: 2261759 - RNA, 19 nt, Artificial Sequence
  Description of Artificial Sequence: Synthetic oligonucleotide
  Antisense strand to SEQ ID NO: 2261758
ucccacagcacuaauaggc

SEQ ID NO: 2261760 - RNA, 19 nt, Artificial Sequence
  Description of Artificial Sequence: Synthetic oligonucleotide
  Sense strand starting at position 2462 of SEQ ID NO: 1884387
ucuguugauuucuaucuca

SEQ ID NO: 2261761 - RNA, 19 nt, Artificial Sequence
  Description of Artificial Sequence: Synthetic oligonucleotide
  Antisense strand to SEQ ID NO: 2261760
ugagauagaaaucaacaga

SEQ ID NO: 2261762 - RNA, 19 nt, Artificial Sequence
  Description of Artificial Sequence: Synthetic oligonucleotide
  Sense strand starting at position 2465 of SEQ ID NO: 1884387
guugauuucuaucucaugu

SEQ ID NO: 2261763 - RNA, 19 nt, Artificial Sequence
  Description of Artificial Sequence: Synthetic oligonucleotide
  Antisense strand to SEQ ID NO: 2261762
acaugagauagaaaucaac

SEQ ID NO: 2261764 - RNA, 19 nt, Artificial Sequence
  Description of Artificial Sequence: Synthetic oligonucleotide
  Sense strand starting at position 2475 of SEQ ID NO: 1884387
aucucaugucucuguccau

SEQ ID NO: 2261765 - RNA, 19 nt, Artificial Sequence
  Description of Artificial Sequence: Synthetic oligonucleotide
  Antisense strand to SEQ ID NO: 2261764
auggacagagacaugagau

SEQ ID NO: 2261766 - RNA, 19 nt, Artificial Sequence
  Description of Artificial Sequence: Synthetic oligonucleotide
  Sense strand starting at position 2476 of SEQ ID NO: 1884387
ucucaugucucuguccauu

SEQ ID NO: 2261767 - RNA, 19 nt, Artificial Sequence
  Description of Artificial Sequence: Synthetic oligonucleotide
  Antisense strand to SEQ ID NO: 2261766
aauggacagagacaugaga

SEQ ID NO: 2261768 - RNA, 19 nt, Artificial Sequence
  Description of Artificial Sequence: Synthetic oligonucleotide
  Sense strand starting at position 2559 of SEQ ID NO: 1884387
aaggaagacuugucuaggu

SEQ ID NO: 2261769 - RNA, 19 nt, Artificial Sequence
  Description of Artificial Sequence: Synthetic oligonucleotide
  Antisense strand to SEQ ID NO: 2261768
accuagacaagucuuccuu

SEQ ID NO: 2261770 - RNA, 19 nt, Artificial Sequence
  Description of Artificial Sequence: Synthetic oligonucleotide
  Sense strand starting at position 2561 of SEQ ID NO: 1884387
ggaagacuugucuagguuc

SEQ ID NO: 2261771 - RNA, 19 nt, Artificial Sequence
  Description of Artificial Sequence: Synthetic oligonucleotide
  Antisense strand to SEQ ID NO: 2261770
gaaccuagacaagucuucc

SEQ ID NO: 2261772 - RNA, 19 nt, Artificial Sequence
  Description of Artificial Sequence: Synthetic oligonucleotide
  Sense strand starting at position 2569 of SEQ ID NO: 1884387
ugucuagguuccucagcua

SEQ ID NO: 2261773 - RNA, 19 nt, Artificial Sequence
  Description of Artificial Sequence: Synthetic oligonucleotide
  Antisense strand to SEQ ID NO: 2261772
uagcugaggaaccuagaca

SEQ ID NO: 2261774 - RNA, 19 nt, Artificial Sequence
  Description of Artificial Sequence: Synthetic oligonucleotide
  Sense strand starting at position 2572 of SEQ ID NO: 1884387
cuagguuccucagcuaaau

SEQ ID NO: 2261775 - RNA, 19 nt, Artificial Sequence
  Description of Artificial Sequence: Synthetic oligonucleotide
  Antisense strand to SEQ ID NO: 2261774
auuuagcugaggaaccuag

SEQ ID NO: 2261776 - RNA, 19 nt, Artificial Sequence
  Description of Artificial Sequence: Synthetic oligonucleotide
  Sense strand starting at position 2591 of SEQ ID NO: 1884387
uagggacauucugauagac

SEQ ID NO: 2261777 - RNA, 19 nt, Artificial Sequence
  Description of Artificial Sequence: Synthetic oligonucleotide
  Antisense strand to SEQ ID NO: 2261776
gucuaucagaaugucccua

SEQ ID NO: 2261778 - RNA, 19 nt, Artificial Sequence
  Description of Artificial Sequence: Synthetic oligonucleotide
  Sense strand starting at position 2593 of SEQ ID NO: 1884387
gggacauucugauagacua

SEQ ID NO: 2261779 - RNA, 19 nt, Artificial Sequence
  Description of Artificial Sequence: Synthetic oligonucleotide
  Antisense strand to SEQ ID NO: 2261778
uagucuaucagaauguccc

SEQ ID NO: 2261780 - RNA, 19 nt, Artificial Sequence
  Description of Artificial Sequence: Synthetic oligonucleotide
  Sense strand starting at position 2973 of SEQ ID NO: 1884387
uucuguaauucuguggaug

SEQ ID NO: 2261781 - RNA, 19 nt, Artificial Sequence
  Description of Artificial Sequence: Synthetic oligonucleotide
  Antisense strand to SEQ ID NO: 2261780
cauccacagaauuacagaa

SEQ ID NO: 2261782 - RNA, 19 nt, Artificial Sequence
  Description of Artificial Sequence: Synthetic oligonucleotide
  Sense strand starting at position 2974 of SEQ ID NO: 1884387
ucuguaauucuguggauga

SEQ ID NO: 2261783 - RNA, 19 nt, Artificial Sequence
  Description of Artificial Sequence: Synthetic oligonucleotide
  Antisense strand to SEQ ID NO: 2261782
ucauccacagaauuacaga

SEQ ID NO: 2261784 - RNA, 19 nt, Artificial Sequence
  Description of Artificial Sequence: Synthetic oligonucleotide
  Sense strand starting at position 2975 of SEQ ID NO: 1884387
cuguaauucuguggaugaa

SEQ ID NO: 2261785 - RNA, 19 nt, Artificial Sequence
  Description of Artificial Sequence: Synthetic oligonucleotide
  Antisense strand to SEQ ID NO: 2261784
uucauccacagaauuacag

SEQ ID NO: 2261786 - RNA, 19 nt, Artificial Sequence
  Description of Artificial Sequence: Synthetic oligonucleotide
  Sense strand starting at position 3002 of SEQ ID NO: 1884387
cugggacccucuugaauua

SEQ ID NO: 2261787 - RNA, 19 nt, Artificial Sequence
  Description of Artificial Sequence: Synthetic oligonucleotide
  Antisense strand to SEQ ID NO: 2261786
uaauucaagagggucccag

SEQ ID NO: 2261788 - RNA, 19 nt, Artificial Sequence
  Description of Artificial Sequence: Synthetic oligonucleotide
  Sense strand starting at position 3012 of SEQ ID NO: 1884387
cuugaauuauucgcuguaa

SEQ ID NO: 2261789 - RNA, 19 nt, Artificial Sequence
  Description of Artificial Sequence: Synthetic oligonucleotide
  Antisense strand to SEQ ID NO: 2261788
uuacagcgaauaauucaag

SEQ ID NO: 2261790 - RNA, 19 nt, Artificial Sequence
  Description of Artificial Sequence: Synthetic oligonucleotide
  Sense strand starting at position 3013 of SEQ ID NO: 1884387
uugaauuauucgcuguaac

SEQ ID NO: 2261791 - RNA, 19 nt, Artificial Sequence
  Description of Artificial Sequence: Synthetic oligonucleotide
  Antisense strand to SEQ ID NO: 2261790
guuacagcgaauaauucaa

SEQ ID NO: 2261792 - RNA, 19 nt, Artificial Sequence
  Description of Artificial Sequence: Synthetic oligonucleotide
  Sense strand starting at position 3014 of SEQ ID NO: 1884387
ugaauuauucgcuguaaca

SEQ ID NO: 2261793 - RNA, 19 nt, Artificial Sequence
  Description of Artificial Sequence: Synthetic oligonucleotide
  Antisense strand to SEQ ID NO: 2261792
uguuacagcgaauaauuca

SEQ ID NO: 2261794 - RNA, 19 nt, Artificial Sequence
  Description of Artificial Sequence: Synthetic oligonucleotide
  Sense strand starting at position 3124 of SEQ ID NO: 1884387
cagccagucugccagauua

SEQ ID NO: 2261795 - RNA, 19 nt, Artificial Sequence
  Description of Artificial Sequence: Synthetic oligonucleotide
  Antisense strand to SEQ ID NO: 2261794
uaaucuggcagacuggcug

SEQ ID NO: 2261796 - RNA, 19 nt, Artificial Sequence
  Description of Artificial Sequence: Synthetic oligonucleotide
  Sense strand starting at position 3126 of SEQ ID NO: 1884387
gccagucugccagauuaca

SEQ ID NO: 2261797 - RNA, 19 nt, Artificial Sequence
  Description of Artificial Sequence: Synthetic oligonucleotide
  Antisense strand to SEQ ID NO: 2261796
uguaaucuggcagacuggc

SEQ ID NO: 2261798 - RNA, 19 nt, Artificial Sequence
  Description of Artificial Sequence: Synthetic oligonucleotide
  Sense strand starting at position 3134 of SEQ ID NO: 1884387
gccagauuacagugaccca

SEQ ID NO: 2261799 - RNA, 19 nt, Artificial Sequence
  Description of Artificial Sequence: Synthetic oligonucleotide
  Antisense strand to SEQ ID NO: 2261798
ugggucacuguaaucuggc

SEQ ID NO: 2261800 - RNA, 19 nt, Artificial Sequence
  Description of Artificial Sequence: Synthetic oligonucleotide
  Sense strand starting at position 3137 of SEQ ID NO: 1884387
agauuacagugacccagau

SEQ ID NO: 2261801 - RNA, 19 nt, Artificial Sequence
  Description of Artificial Sequence: Synthetic oligonucleotide
  Antisense strand to SEQ ID NO: 2261800
aucugggucacuguaaucu

SEQ ID NO: 2261802 - RNA, 19 nt, Artificial Sequence
  Description of Artificial Sequence: Synthetic oligonucleotide
  Sense strand starting at position 3324 of SEQ ID NO: 1884387
gcuuguagcugggaguaca

SEQ ID NO: 2261803 - RNA, 19 nt, Artificial Sequence
  Description of Artificial Sequence: Synthetic oligonucleotide
  Antisense strand to SEQ ID NO: 2261802
uguacucccagcuacaagc

SEQ ID NO: 2261804 - RNA, 19 nt, Artificial Sequence
  Description of Artificial Sequence: Synthetic oligonucleotide
  Sense strand starting at position 3472 of SEQ ID NO: 1884387
gggauuauaguguaagcca

SEQ ID NO: 2261805 - RNA, 19 nt, Artificial Sequence
  Description of Artificial Sequence: Synthetic oligonucleotide
  Antisense strand to SEQ ID NO: 2261804
uggcuuacacuauaauccc

SEQ ID NO: 2261806 - RNA, 19 nt, Artificial Sequence
  Description of Artificial Sequence: Synthetic oligonucleotide
  Sense strand starting at position 3559 of SEQ ID NO: 1884387
cagugcugaucugcauaca

SEQ ID NO: 2261807 - RNA, 19 nt, Artificial Sequence
  Description of Artificial Sequence: Synthetic oligonucleotide
  Antisense strand to SEQ ID NO: 2261806
uguaugcagaucagcacug

SEQ ID NO: 2261808 - RNA, 19 nt, Artificial Sequence
  Description of Artificial Sequence: Synthetic oligonucleotide
  Sense strand starting at position 3560 of SEQ ID NO: 1884387
agugcugaucugcauacau

SEQ ID NO: 2261809 - RNA, 19 nt, Artificial Sequence
  Description of Artificial Sequence: Synthetic oligonucleotide
  Antisense strand to SEQ ID NO: 2261808
auguaugcagaucagcacu

SEQ ID NO: 2261810 - RNA, 19 nt, Artificial Sequence
  Description of Artificial Sequence: Synthetic oligonucleotide
  Sense strand starting at position 3562 of SEQ ID NO: 1884387
ugcugaucugcauacaugu

SEQ ID NO: 2261811 - RNA, 19 nt, Artificial Sequence
  Description of Artificial Sequence: Synthetic oligonucleotide
  Antisense strand to SEQ ID NO: 2261810
acauguaugcagaucagca

SEQ ID NO: 2261812 - RNA, 19 nt, Artificial Sequence
  Description of Artificial Sequence: Synthetic oligonucleotide
  Sense strand starting at position 3592 of SEQ ID NO: 1884387
gaguuucuauagccagauc

SEQ ID NO: 2261813 - RNA, 19 nt, Artificial Sequence
  Description of Artificial Sequence: Synthetic oligonucleotide
  Antisense strand to SEQ ID NO: 2261812
gaucuggcuauagaaacuc

SEQ ID NO: 2261814 - RNA, 19 nt, Artificial Sequence
  Description of Artificial Sequence: Synthetic oligonucleotide
  Sense strand starting at position 3606 of SEQ ID NO: 1884387
agauccaaguccuuguaua

SEQ ID NO: 2261815 - RNA, 19 nt, Artificial Sequence
  Description of Artificial Sequence: Synthetic oligonucleotide
  Antisense strand to SEQ ID NO: 2261814
uauacaaggacuuggaucu

SEQ ID NO: 2261816 - RNA, 19 nt, Artificial Sequence
  Description of Artificial Sequence: Synthetic oligonucleotide
  Sense strand starting at position 3661 of SEQ ID NO: 1884387
agcagaauguauucugacu

SEQ ID NO: 2261817 - RNA, 19 nt, Artificial Sequence
  Description of Artificial Sequence: Synthetic oligonucleotide
  Antisense strand to SEQ ID NO: 2261816
agucagaauacauucugcu

SEQ ID NO: 2261818 - RNA, 19 nt, Artificial Sequence
  Description of Artificial Sequence: Synthetic oligonucleotide
  Sense strand starting at position 3689 of SEQ ID NO: 1884387
cugaaauccuucucaugga

SEQ ID NO: 2261819 - RNA, 19 nt, Artificial Sequence
  Description of Artificial Sequence: Synthetic oligonucleotide
  Antisense strand to SEQ ID NO: 2261818
uccaugagaaggauuucag

SEQ ID NO: 2261820 - RNA, 19 nt, Artificial Sequence
  Description of Artificial Sequence: Synthetic oligonucleotide
  Sense strand starting at position 3883 of SEQ ID NO: 1884387
ccuggagucuuucugaaau

SEQ ID NO: 2261821 - RNA, 19 nt, Artificial Sequence
  Description of Artificial Sequence: Synthetic oligonucleotide
  Antisense strand to SEQ ID NO: 2261820
auuucagaaagacuccagg

SEQ ID NO: 2261822 - RNA, 19 nt, Artificial Sequence
  Description of Artificial Sequence: Synthetic oligonucleotide
  Sense strand starting at position 461 of SEQ ID NO: 1884388
cauggaguuuacccaugua

SEQ ID NO: 2261823 - RNA, 19 nt, Artificial Sequence
  Description of Artificial Sequence: Synthetic oligonucleotide
  Antisense strand to SEQ ID NO: 2261822
uacauggguaaacuccaug

SEQ ID NO: 2261824 - RNA, 19 nt, Artificial Sequence
  Description of Artificial Sequence: Synthetic oligonucleotide
  Sense strand starting at position 464 of SEQ ID NO: 1884388
ggaguuuacccauguaaca

SEQ ID NO: 2261825 - RNA, 19 nt, Artificial Sequence
  Description of Artificial Sequence: Synthetic oligonucleotide
  Antisense strand to SEQ ID NO: 2261824
uguuacauggguaaacucc

SEQ ID NO: 2261826 - RNA, 19 nt, Artificial Sequence
  Description of Artificial Sequence: Synthetic oligonucleotide
  Sense strand starting at position 563 of SEQ ID NO: 1884388
cauuucuuuguguggcaca

SEQ ID NO: 2261827 - RNA, 19 nt, Artificial Sequence
  Description of Artificial Sequence: Synthetic oligonucleotide
  Antisense strand to SEQ ID NO: 2261826
ugugccacacaaagaaaug

SEQ ID NO: 2261828 - RNA, 19 nt, Artificial Sequence
  Description of Artificial Sequence: Synthetic oligonucleotide
  Sense strand starting at position 577 of SEQ ID NO: 1884388
gcacauuggagccagguau

SEQ ID NO: 2261829 - RNA, 19 nt, Artificial Sequence
  Description of Artificial Sequence: Synthetic oligonucleotide
  Antisense strand to SEQ ID NO: 2261828
auaccuggcuccaaugugc

SEQ ID NO: 2261830 - RNA, 19 nt, Artificial Sequence
  Description of Artificial Sequence: Synthetic oligonucleotide
  Sense strand starting at position 592 of SEQ ID NO: 1884388
guauauuuggccuaugcuu

SEQ ID NO: 2261831 - RNA, 19 nt, Artificial Sequence
  Description of Artificial Sequence: Synthetic oligonucleotide
  Antisense strand to SEQ ID NO: 2261830
aagcauaggccaaauauac

SEQ ID NO: 2261832 - RNA, 19 nt, Artificial Sequence
  Description of Artificial Sequence: Synthetic oligonucleotide
  Sense strand starting at position 653 of SEQ ID NO: 1884388
uuuccacuaccaugugaua

SEQ ID NO: 2261833 - RNA, 19 nt, Artificial Sequence
  Description of Artificial Sequence: Synthetic oligonucleotide
  Antisense strand to SEQ ID NO: 2261832
uaucacaugguaguggaaa

SEQ ID NO: 2261834 - RNA, 19 nt, Artificial Sequence
  Description of Artificial Sequence: Synthetic oligonucleotide
  Sense strand starting at position 694 of SEQ ID NO: 1884388
agugccuucccauauacau

SEQ ID NO: 2261835 - RNA, 19 nt, Artificial Sequence
  Description of Artificial Sequence: Synthetic oligonucleotide
  Antisense strand to SEQ ID NO: 2261834
auguauaugggaaggcacu

SEQ ID NO: 2261836 - RNA, 19 nt, Artificial Sequence
  Description of Artificial Sequence: Synthetic oligonucleotide
  Sense strand starting at position 783 of SEQ ID NO: 1884388
acaauaauugcuugcagaa

SEQ ID NO: 2261837 - RNA, 19 nt, Artificial Sequence
  Description of Artificial Sequence: Synthetic oligonucleotide
  Antisense strand to SEQ ID NO: 2261836
uucugcaagcaauuauugu

SEQ ID NO: 2261838 - RNA, 19 nt, Artificial Sequence
  Description of Artificial Sequence: Synthetic oligonucleotide
  Sense strand starting at position 888 of SEQ ID NO: 1884388
augguugauuuccaagaac

SEQ ID NO: 2261839 - RNA, 19 nt, Artificial Sequence
  Description of Artificial Sequence: Synthetic oligonucleotide
  Antisense strand to SEQ ID NO: 2261838
guucuuggaaaucaaccau

SEQ ID NO: 2261840 - RNA, 19 nt, Artificial Sequence
  Description of Artificial Sequence: Synthetic oligonucleotide
  Sense strand starting at position 914 of SEQ ID NO: 1884388
uuccaagaguuucccugau

SEQ ID NO: 2261841 - RNA, 19 nt, Artificial Sequence
  Description of Artificial Sequence: Synthetic oligonucleotide
  Antisense strand to SEQ ID NO: 2261840
aucagggaaacucuuggaa

SEQ ID NO: 2261842 - RNA, 19 nt, Artificial Sequence
  Description of Artificial Sequence: Synthetic oligonucleotide
  Sense strand starting at position 916 of SEQ ID NO: 1884388
ccaagaguuucccugauug

SEQ ID NO: 2261843 - RNA, 19 nt, Artificial Sequence
  Description of Artificial Sequence: Synthetic oligonucleotide
  Antisense strand to SEQ ID NO: 2261842
caaucagggaaacucuugg

SEQ ID NO: 2261844 - RNA, 19 nt, Artificial Sequence
  Description of Artificial Sequence: Synthetic oligonucleotide
  Sense strand starting at position 918 of SEQ ID NO: 1884388
aagaguuucccugauugug

SEQ ID NO: 2261845 - RNA, 19 nt, Artificial Sequence
  Description of Artificial Sequence: Synthetic oligonucleotide
  Antisense strand to SEQ ID NO: 2261844
cacaaucagggaaacucuu

SEQ ID NO: 2261846 - RNA, 19 nt, Artificial Sequence
  Description of Artificial Sequence: Synthetic oligonucleotide
  Sense strand starting at position 963 of SEQ ID NO: 1884388
ccaggaaaugcaugauaca

SEQ ID NO: 2261847 - RNA, 19 nt, Artificial Sequence
  Description of Artificial Sequence: Synthetic oligonucleotide
  Antisense strand to SEQ ID NO: 2261846
uguaucaugcauuuccugg

SEQ ID NO: 2261848 - RNA, 19 nt, Artificial Sequence
  Description of Artificial Sequence: Synthetic oligonucleotide
  Sense strand starting at position 990 of SEQ ID NO: 1884388
uuacguauaaauggguaga

SEQ ID NO: 2261849 - RNA, 19 nt, Artificial Sequence
  Description of Artificial Sequence: Synthetic oligonucleotide
  Antisense strand to SEQ ID NO: 2261848
ucuacccauuuauacguaa

SEQ ID NO: 2261850 - RNA, 19 nt, Artificial Sequence
  Description of Artificial Sequence: Synthetic oligonucleotide
  Sense strand starting at position 991 of SEQ ID NO: 1884388
uacguauaaauggguagau

SEQ ID NO: 2261851 - RNA, 19 nt, Artificial Sequence
  Description of Artificial Sequence: Synthetic oligonucleotide
  Antisense strand to SEQ ID NO: 2261850
aucuacccauuuauacgua

SEQ ID NO: 2261852 - RNA, 19 nt, Artificial Sequence
  Description of Artificial Sequence: Synthetic oligonucleotide
  Sense strand starting at position 992 of SEQ ID NO: 1884388
acguauaaauggguagauu

SEQ ID NO: 2261853 - RNA, 19 nt, Artificial Sequence
  Description of Artificial Sequence: Synthetic oligonucleotide
  Antisense strand to SEQ ID NO: 2261852
aaucuacccauuuauacgu

SEQ ID NO: 2261854 - RNA, 19 nt, Artificial Sequence
  Description of Artificial Sequence: Synthetic oligonucleotide
  Sense strand starting at position 1350 of SEQ ID NO: 1884388
uuauauaauccugguuaag

SEQ ID NO: 2261855 - RNA, 19 nt, Artificial Sequence
  Description of Artificial Sequence: Synthetic oligonucleotide
  Antisense strand to SEQ ID NO: 2261854
cuuaaccaggauuauauaa

SEQ ID NO: 2261856 - RNA, 19 nt, Artificial Sequence
  Description of Artificial Sequence: Synthetic oligonucleotide
  Sense strand starting at position 1352 of SEQ ID NO: 1884388
auauaauccugguuaagga

SEQ ID NO: 2261857 - RNA, 19 nt, Artificial Sequence
  Description of Artificial Sequence: Synthetic oligonucleotide
  Antisense strand to SEQ ID NO: 2261856
uccuuaaccaggauuauau

SEQ ID NO: 2261858 - RNA, 19 nt, Artificial Sequence
  Description of Artificial Sequence: Synthetic oligonucleotide
  Sense strand starting at position 1435 of SEQ ID NO: 1884388
aaguuacuguucuuggaaa

SEQ ID NO: 2261859 - RNA, 19 nt, Artificial Sequence
  Description of Artificial Sequence: Synthetic oligonucleotide
  Antisense strand to SEQ ID NO: 2261858
uuuccaagaacaguaacuu

SEQ ID NO: 2261860 - RNA, 19 nt, Artificial Sequence
  Description of Artificial Sequence: Synthetic oligonucleotide
  Sense strand starting at position 1479 of SEQ ID NO: 1884388
ugaguuucuguuuauauga

SEQ ID NO: 2261861 - RNA, 19 nt, Artificial Sequence
  Description of Artificial Sequence: Synthetic oligonucleotide
  Antisense strand to SEQ ID NO: 2261860
ucauauaaacagaaacuca

SEQ ID NO: 2261862 - RNA, 19 nt, Artificial Sequence
  Description of Artificial Sequence: Synthetic oligonucleotide
  Sense strand starting at position 1486 of SEQ ID NO: 1884388
cuguuuauaugaucucuag

SEQ ID NO: 2261863 - RNA, 19 nt, Artificial Sequence
  Description of Artificial Sequence: Synthetic oligonucleotide
  Antisense strand to SEQ ID NO: 2261862
cuagagaucauauaaacag

SEQ ID NO: 2261864 - RNA, 19 nt, Artificial Sequence
  Description of Artificial Sequence: Synthetic oligonucleotide
  Sense strand starting at position 1566 of SEQ ID NO: 1884388
aaguaagagucauuauugc

SEQ ID NO: 2261865 - RNA, 19 nt, Artificial Sequence
  Description of Artificial Sequence: Synthetic oligonucleotide
  Antisense strand to SEQ ID NO: 2261864
gcaauaaugacucuuacuu

SEQ ID NO: 2261866 - RNA, 19 nt, Artificial Sequence
  Description of Artificial Sequence: Synthetic oligonucleotide
  Sense strand starting at position 1683 of SEQ ID NO: 1884388
ugucaaacaggucacuuau

SEQ ID NO: 2261867 - RNA, 19 nt, Artificial Sequence
  Description of Artificial Sequence: Synthetic oligonucleotide
  Antisense strand to SEQ ID NO: 2261866
auaagugaccuguuugaca

SEQ ID NO: 2261868 - RNA, 19 nt, Artificial Sequence
  Description of Artificial Sequence: Synthetic oligonucleotide
  Sense strand starting at position 1748 of SEQ ID NO: 1884388
agugccacagaguauuaau

SEQ ID NO: 2261869 - RNA, 19 nt, Artificial Sequence
  Description of Artificial Sequence: Synthetic oligonucleotide
  Antisense strand to SEQ ID NO: 2261868
auuaauacucuguggcacu

SEQ ID NO: 2261870 - RNA, 19 nt, Artificial Sequence
  Description of Artificial Sequence: Synthetic oligonucleotide
  Sense strand starting at position 2309 of SEQ ID NO: 1884388
cuuagaauccucugcaaga

SEQ ID NO: 2261871 - RNA, 19 nt, Artificial Sequence
  Description of Artificial Sequence: Synthetic oligonucleotide
  Antisense strand to SEQ ID NO: 2261870
ucuugcagaggauucuaag

SEQ ID NO: 2261872 - RNA, 19 nt, Artificial Sequence
  Description of Artificial Sequence: Synthetic oligonucleotide
  Sense strand starting at position 2310 of SEQ ID NO: 1884388
uuagaauccucugcaagau

SEQ ID NO: 2261873 - RNA, 19 nt, Artificial Sequence
  Description of Artificial Sequence: Synthetic oligonucleotide
  Antisense strand to SEQ ID NO: 2261872
aucuugcagaggauucuaa

SEQ ID NO: 2261874 - RNA, 19 nt, Artificial Sequence
  Description of Artificial Sequence: Synthetic oligonucleotide
  Sense strand starting at position 2360 of SEQ ID NO: 1884388
ugguccuuaguuuauuauu

SEQ ID NO: 2261875 - RNA, 19 nt, Artificial Sequence
  Description of Artificial Sequence: Synthetic oligonucleotide
  Antisense strand to SEQ ID NO: 2261874
aauaauaaacuaaggacca

SEQ ID NO: 2261876 - RNA, 19 nt, Artificial Sequence
  Description of Artificial Sequence: Synthetic oligonucleotide
  Sense strand starting at position 2646 of SEQ ID NO: 1884388
augaguaauagaugacagu

SEQ ID NO: 2261877 - RNA, 19 nt, Artificial Sequence
  Description of Artificial Sequence: Synthetic oligonucleotide
  Antisense strand to SEQ ID NO: 2261876
acugucaucuauuacucau

SEQ ID NO: 2261878 - RNA, 19 nt, Artificial Sequence
  Description of Artificial Sequence: Synthetic oligonucleotide
  Sense strand starting at position 2716 of SEQ ID NO: 1884388
gcaaauuuccacugagugc

SEQ ID NO: 2261879 - RNA, 19 nt, Artificial Sequence
  Description of Artificial Sequence: Synthetic oligonucleotide
  Antisense strand to SEQ ID NO: 2261878
gcacucaguggaaauuugc

SEQ ID NO: 2261880 - RNA, 19 nt, Artificial Sequence
  Description of Artificial Sequence: Synthetic oligonucleotide
  Sense strand starting at position 2899 of SEQ ID NO: 1884388
cgucaauggaaauguaaau

SEQ ID NO: 2261881 - RNA, 19 nt, Artificial Sequence
  Description of Artificial Sequence: Synthetic oligonucleotide
  Antisense strand to SEQ ID NO: 2261880
auuuacauuuccauugacg

SEQ ID NO: 2261882 - RNA, 19 nt, Artificial Sequence
  Description of Artificial Sequence: Synthetic oligonucleotide
  Sense strand starting at position 2926 of SEQ ID NO: 1884388
ucaggaaaguccucauuac

SEQ ID NO: 2261883 - RNA, 19 nt, Artificial Sequence
  Description of Artificial Sequence: Synthetic oligonucleotide
  Antisense strand to SEQ ID NO: 2261882
guaaugaggacuuuccuga

SEQ ID NO: 2261884 - RNA, 19 nt, Artificial Sequence
  Description of Artificial Sequence: Synthetic oligonucleotide
  Sense strand starting at position 2970 of SEQ ID NO: 1884388
auaggagcauucuuauaua

SEQ ID NO: 2261885 - RNA, 19 nt, Artificial Sequence
  Description of Artificial Sequence: Synthetic oligonucleotide
  Antisense strand to SEQ ID NO: 2261884
uauauaagaaugcuccuau

SEQ ID NO: 2261886 - RNA, 19 nt, Artificial Sequence
  Description of Artificial Sequence: Synthetic oligonucleotide
  Sense strand starting at position 3119 of SEQ ID NO: 1884388
augaauaagccuuggaauc

SEQ ID NO: 2261887 - RNA, 19 nt, Artificial Sequence
  Description of Artificial Sequence: Synthetic oligonucleotide
  Antisense strand to SEQ ID NO: 2261886
gauuccaaggcuuauucau

SEQ ID NO: 2261888 - RNA, 19 nt, Artificial Sequence
  Description of Artificial Sequence: Synthetic oligonucleotide
  Sense strand starting at position 3120 of SEQ ID NO: 1884388
ugaauaagccuuggaauca

SEQ ID NO: 2261889 - RNA, 19 nt, Artificial Sequence
  Description of Artificial Sequence: Synthetic oligonucleotide
  Antisense strand to SEQ ID NO: 2261888
ugauuccaaggcuuauuca

SEQ ID NO: 2261890 - RNA, 19 nt, Artificial Sequence
  Description of Artificial Sequence: Synthetic oligonucleotide
  Sense strand starting at position 3133 of SEQ ID NO: 1884388
gaaucauuacgguaaguga

SEQ ID NO: 2261891 - RNA, 19 nt, Artificial Sequence
  Description of Artificial Sequence: Synthetic oligonucleotide
  Antisense strand to SEQ ID NO: 2261890
ucacuuaccguaaugauuc

SEQ ID NO: 2261892 - RNA, 19 nt, Artificial Sequence
  Description of Artificial Sequence: Synthetic oligonucleotide
  Sense strand starting at position 3243 of SEQ ID NO: 1884388
agguaaguggguggagaau

SEQ ID NO: 2261893 - RNA, 19 nt, Artificial Sequence
  Description of Artificial Sequence: Synthetic oligonucleotide
  Antisense strand to SEQ ID NO: 2261892
auucuccacccacuuaccu

SEQ ID NO: 2261894 - RNA, 19 nt, Artificial Sequence
  Description of Artificial Sequence: Synthetic oligonucleotide
  Sense strand starting at position 3297 of SEQ ID NO: 1884388
ggugguguuacuuacacaa

SEQ ID NO: 2261895 - RNA, 19 nt, Artificial Sequence
  Description of Artificial Sequence: Synthetic oligonucleotide
  Antisense strand to SEQ ID NO: 2261894
uuguguaaguaacaccacc

SEQ ID NO: 2261896 - RNA, 19 nt, Artificial Sequence
  Description of Artificial Sequence: Synthetic oligonucleotide
  Sense strand starting at position 3824 of SEQ ID NO: 1884388
gaaggagagauuggccuuu

SEQ ID NO: 2261897 - RNA, 19 nt, Artificial Sequence
  Description of Artificial Sequence: Synthetic oligonucleotide
  Antisense strand to SEQ ID NO: 2261896
aaaggccaaucucuccuuc

SEQ ID NO: 2261898 - RNA, 19 nt, Artificial Sequence
  Description of Artificial Sequence: Synthetic oligonucleotide
  Sense strand starting at position 3854 of SEQ ID NO: 1884388
guauuugcuuuguugacca

SEQ ID NO: 2261899 - RNA, 19 nt, Artificial Sequence
  Description of Artificial Sequence: Synthetic oligonucleotide
  Antisense strand to SEQ ID NO: 2261898
uggucaacaaagcaaauac

SEQ ID NO: 2261900 - RNA, 19 nt, Artificial Sequence
  Description of Artificial Sequence: Synthetic oligonucleotide
  Sense strand starting at position 3952 of SEQ ID NO: 1884388
uuaaaucuguugccagaag

SEQ ID NO: 2261901 - RNA, 19 nt, Artificial Sequence
  Description of Artificial Sequence: Synthetic oligonucleotide
  Antisense strand to SEQ ID NO: 2261900
cuucuggcaacagauuuaa

SEQ ID NO: 2261902 - RNA, 19 nt, Artificial Sequence
  Description of Artificial Sequence: Synthetic oligonucleotide
  Sense strand starting at position 139 of SEQ ID NO: 1884389
ucaggagcagauugacauu

SEQ ID NO: 2261903 - RNA, 19 nt, Artificial Sequence
  Description of Artificial Sequence: Synthetic oligonucleotide
  Antisense strand to SEQ ID NO: 2261902
aaugucaaucugcuccuga

SEQ ID NO: 2261904 - RNA, 19 nt, Artificial Sequence
  Description of Artificial Sequence: Synthetic oligonucleotide
  Sense strand starting at position 142 of SEQ ID NO: 1884389
ggagcagauugacauuauu

SEQ ID NO: 2261905 - RNA, 19 nt, Artificial Sequence
  Description of Artificial Sequence: Synthetic oligonucleotide
  Antisense strand to SEQ ID NO: 2261904
aauaaugucaaucugcucc

SEQ ID NO: 2261906 - RNA, 19 nt, Artificial Sequence
  Description of Artificial Sequence: Synthetic oligonucleotide
  Sense strand starting at position 236 of SEQ ID NO: 1884389
augaacugagcuggauuau

SEQ ID NO: 2261907 - RNA, 19 nt, Artificial Sequence
  Description of Artificial Sequence: Synthetic oligonucleotide
  Antisense strand to SEQ ID NO: 2261906
auaauccagcucaguucau

SEQ ID NO: 2261908 - RNA, 19 nt, Artificial Sequence
  Description of Artificial Sequence: Synthetic oligonucleotide
  Sense strand starting at position 242 of SEQ ID NO: 1884389
ugagcuggauuauuauauu

SEQ ID NO: 2261909 - RNA, 19 nt, Artificial Sequence
  Description of Artificial Sequence: Synthetic oligonucleotide
  Antisense strand to SEQ ID NO: 2261908
aauauaauaauccagcuca

SEQ ID NO: 2261910 - RNA, 19 nt, Artificial Sequence
  Description of Artificial Sequence: Synthetic oligonucleotide
  Sense strand starting at position 245 of SEQ ID NO: 1884389
gcuggauuauuauauuuga

SEQ ID NO: 2261911 - RNA, 19 nt, Artificial Sequence
  Description of Artificial Sequence: Synthetic oligonucleotide
  Antisense strand to SEQ ID NO: 2261910
ucaaauauaauaauccagc

SEQ ID NO: 2261912 - RNA, 19 nt, Artificial Sequence
  Description of Artificial Sequence: Synthetic oligonucleotide
  Sense strand starting at position 1097 of SEQ ID NO: 1884389
agggaugaggcguggaaau

SEQ ID NO: 2261913 - RNA, 19 nt, Artificial Sequence
  Description of Artificial Sequence: Synthetic oligonucleotide
  Antisense strand to SEQ ID NO: 2261912
auuuccacgccucaucccu

SEQ ID NO: 2261914 - RNA, 19 nt, Artificial Sequence
  Description of Artificial Sequence: Synthetic oligonucleotide
  Sense strand starting at position 1098 of SEQ ID NO: 1884389
gggaugaggcguggaaaua

SEQ ID NO: 2261915 - RNA, 19 nt, Artificial Sequence
  Description of Artificial Sequence: Synthetic oligonucleotide
  Antisense strand to SEQ ID NO: 2261914
uauuuccacgccucauccc

SEQ ID NO: 2261916 - RNA, 19 nt, Artificial Sequence
  Description of Artificial Sequence: Synthetic oligonucleotide
  Sense strand starting at position 2295 of SEQ ID NO: 1884389
uggcaauuauuagccucau

SEQ ID NO: 2261917 - RNA, 19 nt, Artificial Sequence
  Description of Artificial Sequence: Synthetic oligonucleotide
  Antisense strand to SEQ ID NO: 2261916
augaggcuaauaauugcca

SEQ ID NO: 2261918 - RNA, 19 nt, Artificial Sequence
  Description of Artificial Sequence: Synthetic oligonucleotide
  Sense strand starting at position 2296 of SEQ ID NO: 1884389
ggcaauuauuagccucauu

SEQ ID NO: 2261919 - RNA, 19 nt, Artificial Sequence
  Description of Artificial Sequence: Synthetic oligonucleotide
  Antisense strand to SEQ ID NO: 2261918
aaugaggcuaauaauugcc

SEQ ID NO: 2261920 - RNA, 19 nt, Artificial Sequence
  Description of Artificial Sequence: Synthetic oligonucleotide
  Sense strand starting at position 2400 of SEQ ID NO: 1884389
ucacuauauuuagagauag

SEQ ID NO: 2261921 - RNA, 19 nt, Artificial Sequence
  Description of Artificial Sequence: Synthetic oligonucleotide
  Antisense strand to SEQ ID NO: 2261920
cuaucucuaaauauaguga

SEQ ID NO: 2261922 - RNA, 19 nt, Artificial Sequence
  Description of Artificial Sequence: Synthetic oligonucleotide
  Sense strand starting at position 2439 of SEQ ID NO: 1884389
ugagguugccacuagcuau

SEQ ID NO: 2261923 - RNA, 19 nt, Artificial Sequence
  Description of Artificial Sequence: Synthetic oligonucleotide
  Antisense strand to SEQ ID NO: 2261922
auagcuaguggcaaccuca

SEQ ID NO: 2261924 - RNA, 19 nt, Artificial Sequence
  Description of Artificial Sequence: Synthetic oligonucleotide
  Sense strand starting at position 2445 of SEQ ID NO: 1884389
ugccacuagcuaugugauu

SEQ ID NO: 2261925 - RNA, 19 nt, Artificial Sequence
  Description of Artificial Sequence: Synthetic oligonucleotide
  Antisense strand to SEQ ID NO: 2261924
aaucacauagcuaguggca

SEQ ID NO: 2261926 - RNA, 19 nt, Artificial Sequence
  Description of Artificial Sequence: Synthetic oligonucleotide
  Sense strand starting at position 2446 of SEQ ID NO: 1884389
gccacuagcuaugugauuu

SEQ ID NO: 2261927 - RNA, 19 nt, Artificial Sequence
  Description of Artificial Sequence: Synthetic oligonucleotide
  Antisense strand to SEQ ID NO: 2261926
aaaucacauagcuaguggc

SEQ ID NO: 2261928 - RNA, 19 nt, Artificial Sequence
  Description of Artificial Sequence: Synthetic oligonucleotide
  Sense strand starting at position 2621 of SEQ ID NO: 1884389
ucuaaugcucccugacugu

SEQ ID NO: 2261929 - RNA, 19 nt, Artificial Sequence
  Description of Artificial Sequence: Synthetic oligonucleotide
  Antisense strand to SEQ ID NO: 2261928
acagucagggagcauuaga

SEQ ID NO: 2261930 - RNA, 19 nt, Artificial Sequence
  Description of Artificial Sequence: Synthetic oligonucleotide
  Sense strand starting at position 2668 of SEQ ID NO: 1884389
uccucugauugccaugaau

SEQ ID NO: 2261931 - RNA, 19 nt, Artificial Sequence
  Description of Artificial Sequence: Synthetic oligonucleotide
  Antisense strand to SEQ ID NO: 2261930
auucauggcaaucagagga

SEQ ID NO: 2261932 - RNA, 19 nt, Artificial Sequence
  Description of Artificial Sequence: Synthetic oligonucleotide
  Sense strand starting at position 2670 of SEQ ID NO: 1884389
cucugauugccaugaauug

SEQ ID NO: 2261933 - RNA, 19 nt, Artificial Sequence
  Description of Artificial Sequence: Synthetic oligonucleotide
  Antisense strand to SEQ ID NO: 2261932
caauucauggcaaucagag

SEQ ID NO: 2261934 - RNA, 19 nt, Artificial Sequence
  Description of Artificial Sequence: Synthetic oligonucleotide
  Sense strand starting at position 2677 of SEQ ID NO: 1884389
ugccaugaauugccaacau

SEQ ID NO: 2261935 - RNA, 19 nt, Artificial Sequence
  Description of Artificial Sequence: Synthetic oligonucleotide
  Antisense strand to SEQ ID NO: 2261934
auguuggcaauucauggca

SEQ ID NO: 2261936 - RNA, 19 nt, Artificial Sequence
  Description of Artificial Sequence: Synthetic oligonucleotide
  Sense strand starting at position 2715 of SEQ ID NO: 1884389
guggcaagaaaguaggauu

SEQ ID NO: 2261937 - RNA, 19 nt, Artificial Sequence
  Description of Artificial Sequence: Synthetic oligonucleotide
  Antisense strand to SEQ ID NO: 2261936
aauccuacuuucuugccac

SEQ ID NO: 2261938 - RNA, 19 nt, Artificial Sequence
  Description of Artificial Sequence: Synthetic oligonucleotide
  Sense strand starting at position 2766 of SEQ ID NO: 1884389
ucagcuuuguauuaauugu

SEQ ID NO: 2261939 - RNA, 19 nt, Artificial Sequence
  Description of Artificial Sequence: Synthetic oligonucleotide
  Antisense strand to SEQ ID NO: 2261938
acaauuaauacaaagcuga

SEQ ID NO: 2261940 - RNA, 19 nt, Artificial Sequence
  Description of Artificial Sequence: Synthetic oligonucleotide
  Sense strand starting at position 2827 of SEQ ID NO: 1884389
uggaguuguuauuauuggu

SEQ ID NO: 2261941 - RNA, 19 nt, Artificial Sequence
  Description of Artificial Sequence: Synthetic oligonucleotide
  Antisense strand to SEQ ID NO: 2261940
accaauaauaacaacucca

SEQ ID NO: 2261942 - RNA, 19 nt, Artificial Sequence
  Description of Artificial Sequence: Synthetic oligonucleotide
  Sense strand starting at position 2846 of SEQ ID NO: 1884389
gguggucuguucuaagcau

SEQ ID NO: 2261943 - RNA, 19 nt, Artificial Sequence
  Description of Artificial Sequence: Synthetic oligonucleotide
  Antisense strand to SEQ ID NO: 2261942
augcuuagaacagaccacc

SEQ ID NO: 2261944 - RNA, 19 nt, Artificial Sequence
  Description of Artificial Sequence: Synthetic oligonucleotide
  Sense strand starting at position 2869 of SEQ ID NO: 1884389
ugaagaaaugcaugucaaa

SEQ ID NO: 2261945 - RNA, 19 nt, Artificial Sequence
  Description of Artificial Sequence: Synthetic oligonucleotide
  Antisense strand to SEQ ID NO: 2261944
uuugacaugcauuucuuca

SEQ ID NO: 2261946 - RNA, 19 nt, Artificial Sequence
  Description of Artificial Sequence: Synthetic oligonucleotide
  Sense strand starting at position 2916 of SEQ ID NO: 1884389
uggaaaggagucuguuaca

SEQ ID NO: 2261947 - RNA, 19 nt, Artificial Sequence
  Description of Artificial Sequence: Synthetic oligonucleotide
  Antisense strand to SEQ ID NO: 2261946
uguaacagacuccuuucca

SEQ ID NO: 2261948 - RNA, 19 nt, Artificial Sequence
  Description of Artificial Sequence: Synthetic oligonucleotide
  Sense strand starting at position 2919 of SEQ ID NO: 1884389
aaaggagucuguuacaguc

SEQ ID NO: 2261949 - RNA, 19 nt, Artificial Sequence
  Description of Artificial Sequence: Synthetic oligonucleotide
  Antisense strand to SEQ ID NO: 2261948
gacuguaacagacuccuuu

SEQ ID NO: 2261950 - RNA, 19 nt, Artificial Sequence
  Description of Artificial Sequence: Synthetic oligonucleotide
  Sense strand starting at position 2962 of SEQ ID NO: 1884389
gucucuccuugugagguau

SEQ ID NO: 2261951 - RNA, 19 nt, Artificial Sequence
  Description of Artificial Sequence: Synthetic oligonucleotide
  Antisense strand to SEQ ID NO: 2261950
auaccucacaaggagagac

SEQ ID NO: 2261952 - RNA, 19 nt, Artificial Sequence
  Description of Artificial Sequence: Synthetic oligonucleotide
  Sense strand starting at position 3021 of SEQ ID NO: 1884389
gugaggucggagugaaagu

SEQ ID NO: 2261953 - RNA, 19 nt, Artificial Sequence
  Description of Artificial Sequence: Synthetic oligonucleotide
  Antisense strand to SEQ ID NO: 2261952
acuuucacuccgaccucac

SEQ ID NO: 2261954 - RNA, 19 nt, Artificial Sequence
  Description of Artificial Sequence: Synthetic oligonucleotide
  Sense strand starting at position 3022 of SEQ ID NO: 1884389
ugaggucggagugaaaguu

SEQ ID NO: 2261955 - RNA, 19 nt, Artificial Sequence
  Description of Artificial Sequence: Synthetic oligonucleotide
  Antisense strand to SEQ ID NO: 2261954
aacuuucacuccgaccuca

SEQ ID NO: 2261956 - RNA, 19 nt, Artificial Sequence
  Description of Artificial Sequence: Synthetic oligonucleotide
  Sense strand starting at position 3054 of SEQ ID NO: 1884389
aagaaagcucucuguugca

SEQ ID NO: 2261957 - RNA, 19 nt, Artificial Sequence
  Description of Artificial Sequence: Synthetic oligonucleotide
  Antisense strand to SEQ ID NO: 2261956
ugcaacagagagcuuucuu

SEQ ID NO: 2261958 - RNA, 19 nt, Artificial Sequence
  Description of Artificial Sequence: Synthetic oligonucleotide
  Sense strand starting at position 3057 of SEQ ID NO: 1884389
aaagcucucuguugcagaa

SEQ ID NO: 2261959 - RNA, 19 nt, Artificial Sequence
  Description of Artificial Sequence: Synthetic oligonucleotide
  Antisense strand to SEQ ID NO: 2261958
uucugcaacagagagcuuu

SEQ ID NO: 2261960 - RNA, 19 nt, Artificial Sequence
  Description of Artificial Sequence: Synthetic oligonucleotide
  Sense strand starting at position 3224 of SEQ ID NO: 1884389
uugaguuacccauauugcu

SEQ ID NO: 2261961 - RNA, 19 nt, Artificial Sequence
  Description of Artificial Sequence: Synthetic oligonucleotide
  Antisense strand to SEQ ID NO: 2261960
agcaauauggguaacucaa

SEQ ID NO: 2261962 - RNA, 19 nt, Artificial Sequence
  Description of Artificial Sequence: Synthetic oligonucleotide
  Sense strand starting at position 3250 of SEQ ID NO: 1884389
ccuuauuaugcauguguca

SEQ ID NO: 2261963 - RNA, 19 nt, Artificial Sequence
  Description of Artificial Sequence: Synthetic oligonucleotide
  Antisense strand to SEQ ID NO: 2261962
ugacacaugcauaauaagg

SEQ ID NO: 2261964 - RNA, 19 nt, Artificial Sequence
  Description of Artificial Sequence: Synthetic oligonucleotide
  Sense strand starting at position 3289 of SEQ ID NO: 1884389
cuggcaugucugggcaagu

SEQ ID NO: 2261965 - RNA, 19 nt, Artificial Sequence
  Description of Artificial Sequence: Synthetic oligonucleotide
  Antisense strand to SEQ ID NO: 2261964
acuugcccagacaugccag

SEQ ID NO: 2261966 - RNA, 19 nt, Artificial Sequence
  Description of Artificial Sequence: Synthetic oligonucleotide
  Sense strand starting at position 3365 of SEQ ID NO: 1884389
aguguaaguucccuuaucu

SEQ ID NO: 2261967 - RNA, 19 nt, Artificial Sequence
  Description of Artificial Sequence: Synthetic oligonucleotide
  Antisense strand to SEQ ID NO: 2261966
agauaagggaacuuacacu

SEQ ID NO: 2261968 - RNA, 19 nt, Artificial Sequence
  Description of Artificial Sequence: Synthetic oligonucleotide
  Sense strand starting at position 3519 of SEQ ID NO: 1884389
auagccuuguucccagaau

SEQ ID NO: 2261969 - RNA, 19 nt, Artificial Sequence
  Description of Artificial Sequence: Synthetic oligonucleotide
  Antisense strand to SEQ ID NO: 2261968
auucugggaacaaggcuau

SEQ ID NO: 2261970 - RNA, 19 nt, Artificial Sequence
  Description of Artificial Sequence: Synthetic oligonucleotide
  Sense strand starting at position 3520 of SEQ ID NO: 1884389
uagccuuguucccagaaug

SEQ ID NO: 2261971 - RNA, 19 nt, Artificial Sequence
  Description of Artificial Sequence: Synthetic oligonucleotide
  Antisense strand to SEQ ID NO: 2261970
cauucugggaacaaggcua

SEQ ID NO: 2261972 - RNA, 19 nt, Artificial Sequence
  Description of Artificial Sequence: Synthetic oligonucleotide
  Sense strand starting at position 3530 of SEQ ID NO: 1884389
cccagaaugcuuuggaaau

SEQ ID NO: 2261973 - RNA, 19 nt, Artificial Sequence
  Description of Artificial Sequence: Synthetic oligonucleotide
  Antisense strand to SEQ ID NO: 2261972
auuuccaaagcauucuggg

SEQ ID NO: 2261974 - RNA, 19 nt, Artificial Sequence
  Description of Artificial Sequence: Synthetic oligonucleotide
  Sense strand starting at position 3531 of SEQ ID NO: 1884389
ccagaaugcuuuggaaaug

SEQ ID NO: 2261975 - RNA, 19 nt, Artificial Sequence
  Description of Artificial Sequence: Synthetic oligonucleotide
  Antisense strand to SEQ ID NO: 2261974
cauuuccaaagcauucugg

SEQ ID NO: 2261976 - RNA, 19 nt, Artificial Sequence
  Description of Artificial Sequence: Synthetic oligonucleotide
  Sense strand starting at position 3532 of SEQ ID NO: 1884389
cagaaugcuuuggaaaugu

SEQ ID NO: 2261977 - RNA, 19 nt, Artificial Sequence
  Description of Artificial Sequence: Synthetic oligonucleotide
  Antisense strand to SEQ ID NO: 2261976
acauuuccaaagcauucug

SEQ ID NO: 2261978 - RNA, 19 nt, Artificial Sequence
  Description of Artificial Sequence: Synthetic oligonucleotide
  Sense strand starting at position 3594 of SEQ ID NO: 1884389
guacuuaaugcagagcaaa

SEQ ID NO: 2261979 - RNA, 19 nt, Artificial Sequence
  Description of Artificial Sequence: Synthetic oligonucleotide
  Antisense strand to SEQ ID NO: 2261978
uuugcucugcauuaaguac

SEQ ID NO: 2261980 - RNA, 19 nt, Artificial Sequence
  Description of Artificial Sequence: Synthetic oligonucleotide
  Sense strand starting at position 3748 of SEQ ID NO: 1884389
agccaauauuucuggccuu

SEQ ID NO: 2261981 - RNA, 19 nt, Artificial Sequence
  Description of Artificial Sequence: Synthetic oligonucleotide
  Antisense strand to SEQ ID NO: 2261980
aaggccagaaauauuggcu

SEQ ID NO: 2261982 - RNA, 19 nt, Artificial Sequence
  Description of Artificial Sequence: Synthetic oligonucleotide
  Sense strand starting at position 123 of SEQ ID NO: 1884390
gcaggcaucagguacauua

SEQ ID NO: 2261983 - RNA, 19 nt, Artificial Sequence
  Description of Artificial Sequence: Synthetic oligonucleotide
  Antisense strand to SEQ ID NO: 2261982
uaauguaccugaugccugc

SEQ ID NO: 2261984 - RNA, 19 nt, Artificial Sequence
  Description of Artificial Sequence: Synthetic oligonucleotide
  Sense strand starting at position 125 of SEQ ID NO: 1884390
aggcaucagguacauuaua

SEQ ID NO: 2261985 - RNA, 19 nt, Artificial Sequence
  Description of Artificial Sequence: Synthetic oligonucleotide
  Antisense strand to SEQ ID NO: 2261984
uauaauguaccugaugccu

SEQ ID NO: 2261986 - RNA, 19 nt, Artificial Sequence
  Description of Artificial Sequence: Synthetic oligonucleotide
  Sense strand starting at position 252 of SEQ ID NO: 1884390
cucgcacuuuauuucugaa

SEQ ID NO: 2261987 - RNA, 19 nt, Artificial Sequence
  Description of Artificial Sequence: Synthetic oligonucleotide
  Antisense strand to SEQ ID NO: 2261986
uucagaaauaaagugcgag

SEQ ID NO: 2261988 - RNA, 19 nt, Artificial Sequence
  Description of Artificial Sequence: Synthetic oligonucleotide
  Sense strand starting at position 264 of SEQ ID NO: 1884390
uucugaauguuauugaaag

SEQ ID NO: 2261989 - RNA, 19 nt, Artificial Sequence
  Description of Artificial Sequence: Synthetic oligonucleotide
  Antisense strand to SEQ ID NO: 2261988
cuuucaauaacauucagaa

SEQ ID NO: 2261990 - RNA, 19 nt, Artificial Sequence
  Description of Artificial Sequence: Synthetic oligonucleotide
  Sense strand starting at position 272 of SEQ ID NO: 1884390
guuauugaaaguugucaga

SEQ ID NO: 2261991 - RNA, 19 nt, Artificial Sequence
  Description of Artificial Sequence: Synthetic oligonucleotide
  Antisense strand to SEQ ID NO: 2261990
ucugacaacuuucaauaac

SEQ ID NO: 2261992 - RNA, 19 nt, Artificial Sequence
  Description of Artificial Sequence: Synthetic oligonucleotide
  Sense strand starting at position 274 of SEQ ID NO: 1884390
uauugaaaguugucagaac

SEQ ID NO: 2261993 - RNA, 19 nt, Artificial Sequence
  Description of Artificial Sequence: Synthetic oligonucleotide
  Antisense strand to SEQ ID NO: 2261992
guucugacaacuuucaaua

SEQ ID NO: 2261994 - RNA, 19 nt, Artificial Sequence
  Description of Artificial Sequence: Synthetic oligonucleotide
  Sense strand starting at position 285 of SEQ ID NO: 1884390
gucagaacuugucucacuu

SEQ ID NO: 2261995 - RNA, 19 nt, Artificial Sequence
  Description of Artificial Sequence: Synthetic oligonucleotide
  Antisense strand to SEQ ID NO: 2261994
aagugagacaaguucugac

SEQ ID NO: 2261996 - RNA, 19 nt, Artificial Sequence
  Description of Artificial Sequence: Synthetic oligonucleotide
  Sense strand starting at position 328 of SEQ ID NO: 1884390
aauacaaugccucaggagu

SEQ ID NO: 2261997 - RNA, 19 nt, Artificial Sequence
  Description of Artificial Sequence: Synthetic oligonucleotide
  Antisense strand to SEQ ID NO: 2261996
acuccugaggcauuguauu

SEQ ID NO: 2261998 - RNA, 19 nt, Artificial Sequence
  Description of Artificial Sequence: Synthetic oligonucleotide
  Sense strand starting at position 376 of SEQ ID NO: 1884390
agauuaauuuaugaacgca

SEQ ID NO: 2261999 - RNA, 19 nt, Artificial Sequence
  Description of Artificial Sequence: Synthetic oligonucleotide
  Antisense strand to SEQ ID NO: 2261998
ugcguucauaaauuaaucu

SEQ ID NO: 2262000 - RNA, 19 nt, Artificial Sequence
  Description of Artificial Sequence: Synthetic oligonucleotide
  Sense strand starting at position 425 of SEQ ID NO: 1884390
caaauugauguugguaaga

SEQ ID NO: 2262001 - RNA, 19 nt, Artificial Sequence
  Description of Artificial Sequence: Synthetic oligonucleotide
  Antisense strand to SEQ ID NO: 2262000
ucuuaccaacaucaauuug

SEQ ID NO: 2262002 - RNA, 19 nt, Artificial Sequence
  Description of Artificial Sequence: Synthetic oligonucleotide
  Sense strand starting at position 436 of SEQ ID NO: 1884390
ugguaagagccacaagcau

SEQ ID NO: 2262003 - RNA, 19 nt, Artificial Sequence
  Description of Artificial Sequence: Synthetic oligonucleotide
  Antisense strand to SEQ ID NO: 2262002
augcuuguggcucuuacca

SEQ ID NO: 2262004 - RNA, 19 nt, Artificial Sequence
  Description of Artificial Sequence: Synthetic oligonucleotide
  Sense strand starting at position 739 of SEQ ID NO: 1884390
acugcuugugaugaccuua

SEQ ID NO: 2262005 - RNA, 19 nt, Artificial Sequence
  Description of Artificial Sequence: Synthetic oligonucleotide
  Antisense strand to SEQ ID NO: 2262004
uaaggucaucacaagcagu

SEQ ID NO: 2262006 - RNA, 19 nt, Artificial Sequence
  Description of Artificial Sequence: Synthetic oligonucleotide
  Sense strand starting at position 744 of SEQ ID NO: 1884390
uugugaugaccuuaucucu

SEQ ID NO: 2262007 - RNA, 19 nt, Artificial Sequence
  Description of Artificial Sequence: Synthetic oligonucleotide
  Antisense strand to SEQ ID NO: 2262006
agagauaaggucaucacaa

SEQ ID NO: 2262008 - RNA, 19 nt, Artificial Sequence
  Description of Artificial Sequence: Synthetic oligonucleotide
  Sense strand starting at position 792 of SEQ ID NO: 1884390
auuugaaacuauuggagaa

SEQ ID NO: 2262009 - RNA, 19 nt, Artificial Sequence
  Description of Artificial Sequence: Synthetic oligonucleotide
  Antisense strand to SEQ ID NO: 2262008
uucuccaauaguuucaaau

SEQ ID NO: 2262010 - RNA, 19 nt, Artificial Sequence
  Description of Artificial Sequence: Synthetic oligonucleotide
  Sense strand starting at position 833 of SEQ ID NO: 1884390
ugggauugugugcagcaga

SEQ ID NO: 2262011 - RNA, 19 nt, Artificial Sequence
  Description of Artificial Sequence: Synthetic oligonucleotide
  Antisense strand to SEQ ID NO: 2262010
ucugcugcacacaauccca

SEQ ID NO: 2262012 - RNA, 19 nt, Artificial Sequence
  Description of Artificial Sequence: Synthetic oligonucleotide
  Sense strand starting at position 836 of SEQ ID NO: 1884390
gauugugugcagcagauuu

SEQ ID NO: 2262013 - RNA, 19 nt, Artificial Sequence
  Description of Artificial Sequence: Synthetic oligonucleotide
  Antisense strand to SEQ ID NO: 2262012
aaaucugcugcacacaauc

SEQ ID NO: 2262014 - RNA, 19 nt, Artificial Sequence
  Description of Artificial Sequence: Synthetic oligonucleotide
  Sense strand starting at position 892 of SEQ ID NO: 1884390
gacugcaguggucaaguua

SEQ ID NO: 2262015 - RNA, 19 nt, Artificial Sequence
  Description of Artificial Sequence: Synthetic oligonucleotide
  Antisense strand to SEQ ID NO: 2262014
uaacuugaccacugcaguc

SEQ ID NO: 2262016 - RNA, 19 nt, Artificial Sequence
  Description of Artificial Sequence: Synthetic oligonucleotide
  Sense strand starting at position 903 of SEQ ID NO: 1884390
ucaaguuaagucuggagca

SEQ ID NO: 2262017 - RNA, 19 nt, Artificial Sequence
  Description of Artificial Sequence: Synthetic oligonucleotide
  Antisense strand to SEQ ID NO: 2262016
ugcuccagacuuaacuuga

SEQ ID NO: 2262018 - RNA, 19 nt, Artificial Sequence
  Description of Artificial Sequence: Synthetic oligonucleotide
  Sense strand starting at position 905 of SEQ ID NO: 1884390
aaguuaagucuggagcaga

SEQ ID NO: 2262019 - RNA, 19 nt, Artificial Sequence
  Description of Artificial Sequence: Synthetic oligonucleotide
  Antisense strand to SEQ ID NO: 2262018
ucugcuccagacuuaacuu

SEQ ID NO: 2262020 - RNA, 19 nt, Artificial Sequence
  Description of Artificial Sequence: Synthetic oligonucleotide
  Sense strand starting at position 923 of SEQ ID NO: 1884390
aggaguugcuggguggaua

SEQ ID NO: 2262021 - RNA, 19 nt, Artificial Sequence
  Description of Artificial Sequence: Synthetic oligonucleotide
  Antisense strand to SEQ ID NO: 2262020
uauccacccagcaacuccu

SEQ ID NO: 2262022 - RNA, 19 nt, Artificial Sequence
  Description of Artificial Sequence: Synthetic oligonucleotide
  Sense strand starting at position 924 of SEQ ID NO: 1884390
ggaguugcuggguggauau

SEQ ID NO: 2262023 - RNA, 19 nt, Artificial Sequence
  Description of Artificial Sequence: Synthetic oligonucleotide
  Antisense strand to SEQ ID NO: 2262022
auauccacccagcaacucc

SEQ ID NO: 2262024 - RNA, 19 nt, Artificial Sequence
  Description of Artificial Sequence: Synthetic oligonucleotide
  Sense strand starting at position 936 of SEQ ID NO: 1884390
uggauaugcuaaucucaag

SEQ ID NO: 2262025 - RNA, 19 nt, Artificial Sequence
  Description of Artificial Sequence: Synthetic oligonucleotide
  Antisense strand to SEQ ID NO: 2262024
cuugagauuagcauaucca

SEQ ID NO: 2262026 - RNA, 19 nt, Artificial Sequence
  Description of Artificial Sequence: Synthetic oligonucleotide
  Sense strand starting at position 1070 of SEQ ID NO: 1884390
gagggcucaucuguuuaga

SEQ ID NO: 2262027 - RNA, 19 nt, Artificial Sequence
  Description of Artificial Sequence: Synthetic oligonucleotide
  Antisense strand to SEQ ID NO: 2262026
ucuaaacagaugagcccuc

SEQ ID NO: 2262028 - RNA, 19 nt, Artificial Sequence
  Description of Artificial Sequence: Synthetic oligonucleotide
  Sense strand starting at position 1072 of SEQ ID NO: 1884390
gggcucaucuguuuagaag

SEQ ID NO: 2262029 - RNA, 19 nt, Artificial Sequence
  Description of Artificial Sequence: Synthetic oligonucleotide
  Antisense strand to SEQ ID NO: 2262028
cuucuaaacagaugagccc

SEQ ID NO: 2262030 - RNA, 19 nt, Artificial Sequence
  Description of Artificial Sequence: Synthetic oligonucleotide
  Sense strand starting at position 1210 of SEQ ID NO: 1884390
ccgaauuugagcggugguu

SEQ ID NO: 2262031 - RNA, 19 nt, Artificial Sequence
  Description of Artificial Sequence: Synthetic oligonucleotide
  Antisense strand to SEQ ID NO: 2262030
aaccaccgcucaaauucgg

SEQ ID NO: 2262032 - RNA, 19 nt, Artificial Sequence
  Description of Artificial Sequence: Synthetic oligonucleotide
  Sense strand starting at position 1212 of SEQ ID NO: 1884390
gaauuugagcggugguucu

SEQ ID NO: 2262033 - RNA, 19 nt, Artificial Sequence
  Description of Artificial Sequence: Synthetic oligonucleotide
  Antisense strand to SEQ ID NO: 2262032
agaaccaccgcucaaauuc

SEQ ID NO: 2262034 - RNA, 19 nt, Artificial Sequence
  Description of Artificial Sequence: Synthetic oligonucleotide
  Sense strand starting at position 1222 of SEQ ID NO: 1884390
ggugguucucaaugggaaa

SEQ ID NO: 2262035 - RNA, 19 nt, Artificial Sequence
  Description of Artificial Sequence: Synthetic oligonucleotide
  Antisense strand to SEQ ID NO: 2262034
uuucccauugagaaccacc

SEQ ID NO: 2262036 - RNA, 19 nt, Artificial Sequence
  Description of Artificial Sequence: Synthetic oligonucleotide
  Sense strand starting at position 1248 of SEQ ID NO: 1884390
ggaguuugcccauagccaa

SEQ ID NO: 2262037 - RNA, 19 nt, Artificial Sequence
  Description of Artificial Sequence: Synthetic oligonucleotide
  Antisense strand to SEQ ID NO: 2262036
uuggcuaugggcaaacucc

SEQ ID NO: 2262038 - RNA, 19 nt, Artificial Sequence
  Description of Artificial Sequence: Synthetic oligonucleotide
  Sense strand starting at position 1410 of SEQ ID NO: 1884390
caggaauaccuguguggag

SEQ ID NO: 2262039 - RNA, 19 nt, Artificial Sequence
  Description of Artificial Sequence: Synthetic oligonucleotide
  Antisense strand to SEQ ID NO: 2262038
cuccacacagguauuccug

SEQ ID NO: 2262040 - RNA, 19 nt, Artificial Sequence
  Description of Artificial Sequence: Synthetic oligonucleotide
  Sense strand starting at position 1918 of SEQ ID NO: 1884390
gggucaucagugucagcgu

SEQ ID NO: 2262041 - RNA, 19 nt, Artificial Sequence
  Description of Artificial Sequence: Synthetic oligonucleotide
  Antisense strand to SEQ ID NO: 2262040
acgcugacacugaugaccc

SEQ ID NO: 2262042 - RNA, 19 nt, Artificial Sequence
  Description of Artificial Sequence: Synthetic oligonucleotide
  Sense strand starting at position 2635 of SEQ ID NO: 1884390
augcuuacuguagaccuaa

SEQ ID NO: 2262043 - RNA, 19 nt, Artificial Sequence
  Description of Artificial Sequence: Synthetic oligonucleotide
  Antisense strand to SEQ ID NO: 2262042
uuaggucuacaguaagcau

SEQ ID NO: 2262044 - RNA, 19 nt, Artificial Sequence
  Description of Artificial Sequence: Synthetic oligonucleotide
  Sense strand starting at position 2682 of SEQ ID NO: 1884390
cgugcuggugagaguaaca

SEQ ID NO: 2262045 - RNA, 19 nt, Artificial Sequence
  Description of Artificial Sequence: Synthetic oligonucleotide
  Antisense strand to SEQ ID NO: 2262044
uguuacucucaccagcacg

SEQ ID NO: 2262046 - RNA, 19 nt, Artificial Sequence
  Description of Artificial Sequence: Synthetic oligonucleotide
  Sense strand starting at position 3242 of SEQ ID NO: 1884390
aggaaaucuuucucaccug

SEQ ID NO: 2262047 - RNA, 19 nt, Artificial Sequence
  Description of Artificial Sequence: Synthetic oligonucleotide
  Antisense strand to SEQ ID NO: 2262046
caggugagaaagauuuccu

SEQ ID NO: 2262048 - RNA, 19 nt, Artificial Sequence
  Description of Artificial Sequence: Synthetic oligonucleotide
  Sense strand starting at position 3414 of SEQ ID NO: 1884390
ucagaugucugcccacaga

SEQ ID NO: 2262049 - RNA, 19 nt, Artificial Sequence
  Description of Artificial Sequence: Synthetic oligonucleotide
  Antisense strand to SEQ ID NO: 2262048
ucugugggcagacaucuga

SEQ ID NO: 2262050 - RNA, 19 nt, Artificial Sequence
  Description of Artificial Sequence: Synthetic oligonucleotide
  Sense strand starting at position 3553 of SEQ ID NO: 1884390
agucccaucugacugagau

SEQ ID NO: 2262051 - RNA, 19 nt, Artificial Sequence
  Description of Artificial Sequence: Synthetic oligonucleotide
  Antisense strand to SEQ ID NO: 2262050
aucucagucagaugggacu

SEQ ID NO: 2262052 - RNA, 19 nt, Artificial Sequence
  Description of Artificial Sequence: Synthetic oligonucleotide
  Sense strand starting at position 3554 of SEQ ID NO: 1884390
gucccaucugacugagaua

SEQ ID NO: 2262053 - RNA, 19 nt, Artificial Sequence
  Description of Artificial Sequence: Synthetic oligonucleotide
  Antisense strand to SEQ ID NO: 2262052
uaucucagucagaugggac

SEQ ID NO: 2262054 - RNA, 19 nt, Artificial Sequence
  Description of Artificial Sequence: Synthetic oligonucleotide
  Sense strand starting at position 3647 of SEQ ID NO: 1884390
cugagaucaugguuugcca

SEQ ID NO: 2262055 - RNA, 19 nt, Artificial Sequence
  Description of Artificial Sequence: Synthetic oligonucleotide
  Antisense strand to SEQ ID NO: 2262054
uggcaaaccaugaucucag

SEQ ID NO: 2262056 - RNA, 19 nt, Artificial Sequence
  Description of Artificial Sequence: Synthetic oligonucleotide
  Sense strand starting at position 3888 of SEQ ID NO: 1884390
aacagugagcuuuacaguu

SEQ ID NO: 2262057 - RNA, 19 nt, Artificial Sequence
  Description of Artificial Sequence: Synthetic oligonucleotide
  Antisense strand to SEQ ID NO: 2262056
aacuguaaagcucacuguu

SEQ ID NO: 2262058 - RNA, 19 nt, Artificial Sequence
  Description of Artificial Sequence: Synthetic oligonucleotide
  Sense strand starting at position 3913 of SEQ ID NO: 1884390
cuauuuauguauucugcau

SEQ ID NO: 2262059 - RNA, 19 nt, Artificial Sequence
  Description of Artificial Sequence: Synthetic oligonucleotide
  Antisense strand to SEQ ID NO: 2262058
augcagaauacauaaauag

SEQ ID NO: 2262060 - RNA, 19 nt, Artificial Sequence
  Description of Artificial Sequence: Synthetic oligonucleotide
  Sense strand starting at position 3964 of SEQ ID NO: 1884390
ggcugaguaccuuaccuuu

SEQ ID NO: 2262061 - RNA, 19 nt, Artificial Sequence
  Description of Artificial Sequence: Synthetic oligonucleotide
  Antisense strand to SEQ ID NO: 2262060
aaagguaagguacucagcc

SEQ ID NO: 2262062 - RNA, 19 nt, Artificial Sequence
  Description of Artificial Sequence: Synthetic oligonucleotide
  Sense strand starting at position 1 of SEQ ID NO: 1884391
gggauuaaauuagaugaug

SEQ ID NO: 2262063 - RNA, 19 nt, Artificial Sequence
  Description of Artificial Sequence: Synthetic oligonucleotide
  Antisense strand to SEQ ID NO: 2262062
caucaucuaauuuaauccc

SEQ ID NO: 2262064 - RNA, 19 nt, Artificial Sequence
  Description of Artificial Sequence: Synthetic oligonucleotide
  Sense strand starting at position 9 of SEQ ID NO: 1884391
auuagaugaugggugcaaa

SEQ ID NO: 2262065 - RNA, 19 nt, Artificial Sequence
  Description of Artificial Sequence: Synthetic oligonucleotide
  Antisense strand to SEQ ID NO: 2262064
uuugcacccaucaucuaau

SEQ ID NO: 2262066 - RNA, 19 nt, Artificial Sequence
  Description of Artificial Sequence: Synthetic oligonucleotide
  Sense strand starting at position 39 of SEQ ID NO: 1884391
ugugguuaaugguugacaa

SEQ ID NO: 2262067 - RNA, 19 nt, Artificial Sequence
  Description of Artificial Sequence: Synthetic oligonucleotide
  Antisense strand to SEQ ID NO: 2262066
uugucaaccauuaaccaca

SEQ ID NO: 2262068 - RNA, 19 nt, Artificial Sequence
  Description of Artificial Sequence: Synthetic oligonucleotide
  Sense strand starting at position 40 of SEQ ID NO: 1884391
gugguuaaugguugacaag

SEQ ID NO: 2262069 - RNA, 19 nt, Artificial Sequence
  Description of Artificial Sequence: Synthetic oligonucleotide
  Antisense strand to SEQ ID NO: 2262068
cuugucaaccauuaaccac

SEQ ID NO: 2262070 - RNA, 19 nt, Artificial Sequence
  Description of Artificial Sequence: Synthetic oligonucleotide
  Sense strand starting at position 41 of SEQ ID NO: 1884391
ugguuaaugguugacaagu

SEQ ID NO: 2262071 - RNA, 19 nt, Artificial Sequence
  Description of Artificial Sequence: Synthetic oligonucleotide
  Antisense strand to SEQ ID NO: 2262070
acuugucaaccauuaacca

SEQ ID NO: 2262072 - RNA, 19 nt, Artificial Sequence
  Description of Artificial Sequence: Synthetic oligonucleotide
  Sense strand starting at position 50 of SEQ ID NO: 1884391
guugacaagugcccaauaa

SEQ ID NO: 2262073 - RNA, 19 nt, Artificial Sequence
  Description of Artificial Sequence: Synthetic oligonucleotide
  Antisense strand to SEQ ID NO: 2262072
uuauugggcacuugucaac

SEQ ID NO: 2262074 - RNA, 19 nt, Artificial Sequence
  Description of Artificial Sequence: Synthetic oligonucleotide
  Sense strand starting at position 54 of SEQ ID NO: 1884391
acaagugcccaauaaguau

SEQ ID NO: 2262075 - RNA, 19 nt, Artificial Sequence
  Description of Artificial Sequence: Synthetic oligonucleotide
  Antisense strand to SEQ ID NO: 2262074
auacuuauugggcacuugu

SEQ ID NO: 2262076 - RNA, 19 nt, Artificial Sequence
  Description of Artificial Sequence: Synthetic oligonucleotide
  Sense strand starting at position 110 of SEQ ID NO: 1884391
uuguuuguaggcuagaaag

SEQ ID NO: 2262077 - RNA, 19 nt, Artificial Sequence
  Description of Artificial Sequence: Synthetic oligonucleotide
  Antisense strand to SEQ ID NO: 2262076
cuuucuagccuacaaacaa

SEQ ID NO: 2262078 - RNA, 19 nt, Artificial Sequence
  Description of Artificial Sequence: Synthetic oligonucleotide
  Sense strand starting at position 112 of SEQ ID NO: 1884391
guuuguaggcuagaaagua

SEQ ID NO: 2262079 - RNA, 19 nt, Artificial Sequence
  Description of Artificial Sequence: Synthetic oligonucleotide
  Antisense strand to SEQ ID NO: 2262078
uacuuucuagccuacaaac

SEQ ID NO: 2262080 - RNA, 19 nt, Artificial Sequence
  Description of Artificial Sequence: Synthetic oligonucleotide
  Sense strand starting at position 166 of SEQ ID NO: 1884391
aggaauuaacuugguauca

SEQ ID NO: 2262081 - RNA, 19 nt, Artificial Sequence
  Description of Artificial Sequence: Synthetic oligonucleotide
  Antisense strand to SEQ ID NO: 2262080
ugauaccaaguuaauuccu

SEQ ID NO: 2262082 - RNA, 19 nt, Artificial Sequence
  Description of Artificial Sequence: Synthetic oligonucleotide
  Sense strand starting at position 167 of SEQ ID NO: 1884391
ggaauuaacuugguaucaa

SEQ ID NO: 2262083 - RNA, 19 nt, Artificial Sequence
  Description of Artificial Sequence: Synthetic oligonucleotide
  Antisense strand to SEQ ID NO: 2262082
uugauaccaaguuaauucc

SEQ ID NO: 2262084 - RNA, 19 nt, Artificial Sequence
  Description of Artificial Sequence: Synthetic oligonucleotide
  Sense strand starting at position 288 of SEQ ID NO: 1884391
guggguagaucacuagaga

SEQ ID NO: 2262085 - RNA, 19 nt, Artificial Sequence
  Description of Artificial Sequence: Synthetic oligonucleotide
  Antisense strand to SEQ ID NO: 2262084
ucucuagugaucuacccac

SEQ ID NO: 2262086 - RNA, 19 nt, Artificial Sequence
  Description of Artificial Sequence: Synthetic oligonucleotide
  Sense strand starting at position 502 of SEQ ID NO: 1884391
aagugagacucugucaaua

SEQ ID NO: 2262087 - RNA, 19 nt, Artificial Sequence
  Description of Artificial Sequence: Synthetic oligonucleotide
  Antisense strand to SEQ ID NO: 2262086
uauugacagagucucacuu

SEQ ID NO: 2262088 - RNA, 19 nt, Artificial Sequence
  Description of Artificial Sequence: Synthetic oligonucleotide
  Sense strand starting at position 1045 of SEQ ID NO: 1884391
agauuaauuuauggacaug

SEQ ID NO: 2262089 - RNA, 19 nt, Artificial Sequence
  Description of Artificial Sequence: Synthetic oligonucleotide
  Antisense strand to SEQ ID NO: 2262088
cauguccauaaauuaaucu

SEQ ID NO: 2262090 - RNA, 19 nt, Artificial Sequence
  Description of Artificial Sequence: Synthetic oligonucleotide
  Sense strand starting at position 1135 of SEQ ID NO: 1884391
auuagucccuggcuacaaa

SEQ ID NO: 2262091 - RNA, 19 nt, Artificial Sequence
  Description of Artificial Sequence: Synthetic oligonucleotide
  Antisense strand to SEQ ID NO: 2262090
uuuguagccagggacuaau

SEQ ID NO: 2262092 - RNA, 19 nt, Artificial Sequence
  Description of Artificial Sequence: Synthetic oligonucleotide
  Sense strand starting at position 1167 of SEQ ID NO: 1884391
ccuaguuaagaugauguca

SEQ ID NO: 2262093 - RNA, 19 nt, Artificial Sequence
  Description of Artificial Sequence: Synthetic oligonucleotide
  Antisense strand to SEQ ID NO: 2262092
ugacaucaucuuaacuagg

SEQ ID NO: 2262094 - RNA, 19 nt, Artificial Sequence
  Description of Artificial Sequence: Synthetic oligonucleotide
  Sense strand starting at position 1209 of SEQ ID NO: 1884391
gccacauucugguuguaaa

SEQ ID NO: 2262095 - RNA, 19 nt, Artificial Sequence
  Description of Artificial Sequence: Synthetic oligonucleotide
  Antisense strand to SEQ ID NO: 2262094
uuuacaaccagaauguggc

SEQ ID NO: 2262096 - RNA, 19 nt, Artificial Sequence
  Description of Artificial Sequence: Synthetic oligonucleotide
  Sense strand starting at position 1210 of SEQ ID NO: 1884391
ccacauucugguuguaaau

SEQ ID NO: 2262097 - RNA, 19 nt, Artificial Sequence
  Description of Artificial Sequence: Synthetic oligonucleotide
  Antisense strand to SEQ ID NO: 2262096
auuuacaaccagaaugugg

SEQ ID NO: 2262098 - RNA, 19 nt, Artificial Sequence
  Description of Artificial Sequence: Synthetic oligonucleotide
  Sense strand starting at position 1424 of SEQ ID NO: 1884391
uuuaauauucucugaggaa

SEQ ID NO: 2262099 - RNA, 19 nt, Artificial Sequence
  Description of Artificial Sequence: Synthetic oligonucleotide
  Antisense strand to SEQ ID NO: 2262098
uuccucagagaauauuaaa

SEQ ID NO: 2262100 - RNA, 19 nt, Artificial Sequence
  Description of Artificial Sequence: Synthetic oligonucleotide
  Sense strand starting at position 1867 of SEQ ID NO: 1884391
gacggaguaguuuauaaag

SEQ ID NO: 2262101 - RNA, 19 nt, Artificial Sequence
  Description of Artificial Sequence: Synthetic oligonucleotide
  Antisense strand to SEQ ID NO: 2262100
cuuuauaaacuacuccguc

SEQ ID NO: 2262102 - RNA, 19 nt, Artificial Sequence
  Description of Artificial Sequence: Synthetic oligonucleotide
  Sense strand starting at position 2218 of SEQ ID NO: 1884391
ccugauguacucuggaaau

SEQ ID NO: 2262103 - RNA, 19 nt, Artificial Sequence
  Description of Artificial Sequence: Synthetic oligonucleotide
  Antisense strand to SEQ ID NO: 2262102
auuuccagaguacaucagg

SEQ ID NO: 2262104 - RNA, 19 nt, Artificial Sequence
  Description of Artificial Sequence: Synthetic oligonucleotide
  Sense strand starting at position 2239 of SEQ ID NO: 1884391
uggaaucaaugugcccaua

SEQ ID NO: 2262105 - RNA, 19 nt, Artificial Sequence
  Description of Artificial Sequence: Synthetic oligonucleotide
  Antisense strand to SEQ ID NO: 2262104
uaugggcacauugauucca

SEQ ID NO: 2262106 - RNA, 19 nt, Artificial Sequence
  Description of Artificial Sequence: Synthetic oligonucleotide
  Sense strand starting at position 2241 of SEQ ID NO: 1884391
gaaucaaugugcccauaga

SEQ ID NO: 2262107 - RNA, 19 nt, Artificial Sequence
  Description of Artificial Sequence: Synthetic oligonucleotide
  Antisense strand to SEQ ID NO: 2262106
ucuaugggcacauugauuc

SEQ ID NO: 2262108 - RNA, 19 nt, Artificial Sequence
  Description of Artificial Sequence: Synthetic oligonucleotide
  Sense strand starting at position 2296 of SEQ ID NO: 1884391
augauaugaccuggaggca

SEQ ID NO: 2262109 - RNA, 19 nt, Artificial Sequence
  Description of Artificial Sequence: Synthetic oligonucleotide
  Antisense strand to SEQ ID NO: 2262108
ugccuccaggucauaucau

SEQ ID NO: 2262110 - RNA, 19 nt, Artificial Sequence
  Description of Artificial Sequence: Synthetic oligonucleotide
  Sense strand starting at position 2375 of SEQ ID NO: 1884391
guauuucuggacugugcuu

SEQ ID NO: 2262111 - RNA, 19 nt, Artificial Sequence
  Description of Artificial Sequence: Synthetic oligonucleotide
  Antisense strand to SEQ ID NO: 2262110
aagcacaguccagaaauac

SEQ ID NO: 2262112 - RNA, 19 nt, Artificial Sequence
  Description of Artificial Sequence: Synthetic oligonucleotide
  Sense strand starting at position 2445 of SEQ ID NO: 1884391
agacuagugagcuagguga

SEQ ID NO: 2262113 - RNA, 19 nt, Artificial Sequence
  Description of Artificial Sequence: Synthetic oligonucleotide
  Antisense strand to SEQ ID NO: 2262112
ucaccuagcucacuagucu

SEQ ID NO: 2262114 - RNA, 19 nt, Artificial Sequence
  Description of Artificial Sequence: Synthetic oligonucleotide
  Sense strand starting at position 2474 of SEQ ID NO: 1884391
uucucuaucuaggugagga

SEQ ID NO: 2262115 - RNA, 19 nt, Artificial Sequence
  Description of Artificial Sequence: Synthetic oligonucleotide
  Antisense strand to SEQ ID NO: 2262114
uccucaccuagauagagaa

SEQ ID NO: 2262116 - RNA, 19 nt, Artificial Sequence
  Description of Artificial Sequence: Synthetic oligonucleotide
  Sense strand starting at position 2475 of SEQ ID NO: 1884391
ucucuaucuaggugaggaa

SEQ ID NO: 2262117 - RNA, 19 nt, Artificial Sequence
  Description of Artificial Sequence: Synthetic oligonucleotide
  Antisense strand to SEQ ID NO: 2262116
uuccucaccuagauagaga

SEQ ID NO: 2262118 - RNA, 19 nt, Artificial Sequence
  Description of Artificial Sequence: Synthetic oligonucleotide
  Sense strand starting at position 2757 of SEQ ID NO: 1884391
cuaguuccuuaaucaugua

SEQ ID NO: 2262119 - RNA, 19 nt, Artificial Sequence
  Description of Artificial Sequence: Synthetic oligonucleotide
  Antisense strand to SEQ ID NO: 2262118
uacaugauuaaggaacuag

SEQ ID NO: 2262120 - RNA, 19 nt, Artificial Sequence
  Description of Artificial Sequence: Synthetic oligonucleotide
  Sense strand starting at position 2764 of SEQ ID NO: 1884391
cuuaaucauguagauaagu

SEQ ID NO: 2262121 - RNA, 19 nt, Artificial Sequence
  Description of Artificial Sequence: Synthetic oligonucleotide
  Antisense strand to SEQ ID NO: 2262120
acuuaucuacaugauuaag

SEQ ID NO: 2262122 - RNA, 19 nt, Artificial Sequence
  Description of Artificial Sequence: Synthetic oligonucleotide
  Sense strand starting at position 2853 of SEQ ID NO: 1884391
uguaauguaccauauagug

SEQ ID NO: 2262123 - RNA, 19 nt, Artificial Sequence
  Description of Artificial Sequence: Synthetic oligonucleotide
  Antisense strand to SEQ ID NO: 2262122
cacuauaugguacauuaca

SEQ ID NO: 2262124 - RNA, 19 nt, Artificial Sequence
  Description of Artificial Sequence: Synthetic oligonucleotide
  Sense strand starting at position 2859 of SEQ ID NO: 1884391
guaccauauagugguaauu

SEQ ID NO: 2262125 - RNA, 19 nt, Artificial Sequence
  Description of Artificial Sequence: Synthetic oligonucleotide
  Antisense strand to SEQ ID NO: 2262124
aauuaccacuauaugguac

SEQ ID NO: 2262126 - RNA, 19 nt, Artificial Sequence
  Description of Artificial Sequence: Synthetic oligonucleotide
  Sense strand starting at position 2905 of SEQ ID NO: 1884391
ugccaagugcuauacaaau

SEQ ID NO: 2262127 - RNA, 19 nt, Artificial Sequence
  Description of Artificial Sequence: Synthetic oligonucleotide
  Antisense strand to SEQ ID NO: 2262126
auuuguauagcacuuggca

SEQ ID NO: 2262128 - RNA, 19 nt, Artificial Sequence
  Description of Artificial Sequence: Synthetic oligonucleotide
  Sense strand starting at position 2924 of SEQ ID NO: 1884391
guccauuaucauuauuaug

SEQ ID NO: 2262129 - RNA, 19 nt, Artificial Sequence
  Description of Artificial Sequence: Synthetic oligonucleotide
  Antisense strand to SEQ ID NO: 2262128
cauaauaaugauaauggac

SEQ ID NO: 2262130 - RNA, 19 nt, Artificial Sequence
  Description of Artificial Sequence: Synthetic oligonucleotide
  Sense strand starting at position 2941 of SEQ ID NO: 1884391
ugaugaugauuagauaaug

SEQ ID NO: 2262131 - RNA, 19 nt, Artificial Sequence
  Description of Artificial Sequence: Synthetic oligonucleotide
  Antisense strand to SEQ ID NO: 2262130
cauuaucuaaucaucauca

SEQ ID NO: 2262132 - RNA, 19 nt, Artificial Sequence
  Description of Artificial Sequence: Synthetic oligonucleotide
  Sense strand starting at position 3566 of SEQ ID NO: 1884391
cagaguuagccucacagag

SEQ ID NO: 2262133 - RNA, 19 nt, Artificial Sequence
  Description of Artificial Sequence: Synthetic oligonucleotide
  Antisense strand to SEQ ID NO: 2262132
cucugugaggcuaacucug

SEQ ID NO: 2262134 - RNA, 19 nt, Artificial Sequence
  Description of Artificial Sequence: Synthetic oligonucleotide
  Sense strand starting at position 3677 of SEQ ID NO: 1884391
agcugcagucaugagugaa

SEQ ID NO: 2262135 - RNA, 19 nt, Artificial Sequence
  Description of Artificial Sequence: Synthetic oligonucleotide
  Antisense strand to SEQ ID NO: 2262134
uucacucaugacugcagcu

SEQ ID NO: 2262136 - RNA, 19 nt, Artificial Sequence
  Description of Artificial Sequence: Synthetic oligonucleotide
  Sense strand starting at position 3680 of SEQ ID NO: 1884391
ugcagucaugagugaaagu

SEQ ID NO: 2262137 - RNA, 19 nt, Artificial Sequence
  Description of Artificial Sequence: Synthetic oligonucleotide
  Antisense strand to SEQ ID NO: 2262136
acuuucacucaugacugca

SEQ ID NO: 2262138 - RNA, 19 nt, Artificial Sequence
  Description of Artificial Sequence: Synthetic oligonucleotide
  Sense strand starting at position 3681 of SEQ ID NO: 1884391
gcagucaugagugaaaguc

SEQ ID NO: 2262139 - RNA, 19 nt, Artificial Sequence
  Description of Artificial Sequence: Synthetic oligonucleotide
  Antisense strand to SEQ ID NO: 2262138
gacuuucacucaugacugc

SEQ ID NO: 2262140 - RNA, 19 nt, Artificial Sequence
  Description of Artificial Sequence: Synthetic oligonucleotide
  Sense strand starting at position 3842 of SEQ ID NO: 1884391
gguugaucauaauccugaa

SEQ ID NO: 2262141 - RNA, 19 nt, Artificial Sequence
  Description of Artificial Sequence: Synthetic oligonucleotide
  Antisense strand to SEQ ID NO: 2262140
uucaggauuaugaucaacc

SEQ ID NO: 2262142 - RNA, 19 nt, Artificial Sequence
  Description of Artificial Sequence: Synthetic oligonucleotide
  Sense strand starting at position 1373 of SEQ ID NO: 1884392
gccauugugagucaugauc

SEQ ID NO: 2262143 - RNA, 19 nt, Artificial Sequence
  Description of Artificial Sequence: Synthetic oligonucleotide
  Antisense strand to SEQ ID NO: 2262142
gaucaugacucacaauggc

SEQ ID NO: 2262144 - RNA, 19 nt, Artificial Sequence
  Description of Artificial Sequence: Synthetic oligonucleotide
  Sense strand starting at position 1375 of SEQ ID NO: 1884392
cauugugagucaugaucuu

SEQ ID NO: 2262145 - RNA, 19 nt, Artificial Sequence
  Description of Artificial Sequence: Synthetic oligonucleotide
  Antisense strand to SEQ ID NO: 2262144
aagaucaugacucacaaug

SEQ ID NO: 2262146 - RNA, 19 nt, Artificial Sequence
  Description of Artificial Sequence: Synthetic oligonucleotide
  Sense strand starting at position 1381 of SEQ ID NO: 1884392
gagucaugaucuuggucug

SEQ ID NO: 2262147 - RNA, 19 nt, Artificial Sequence
  Description of Artificial Sequence: Synthetic oligonucleotide
  Antisense strand to SEQ ID NO: 2262146
cagaccaagaucaugacuc

SEQ ID NO: 2262148 - RNA, 19 nt, Artificial Sequence
  Description of Artificial Sequence: Synthetic oligonucleotide
  Sense strand starting at position 1384 of SEQ ID NO: 1884392
ucaugaucuuggucuguag

SEQ ID NO: 2262149 - RNA, 19 nt, Artificial Sequence
  Description of Artificial Sequence: Synthetic oligonucleotide
  Antisense strand to SEQ ID NO: 2262148
cuacagaccaagaucauga

SEQ ID NO: 2262150 - RNA, 19 nt, Artificial Sequence
  Description of Artificial Sequence: Synthetic oligonucleotide
  Sense strand starting at position 2766 of SEQ ID NO: 1884392
uucuuauacuaugagaggu

SEQ ID NO: 2262151 - RNA, 19 nt, Artificial Sequence
  Description of Artificial Sequence: Synthetic oligonucleotide
  Antisense strand to SEQ ID NO: 2262150
accucucauaguauaagaa

SEQ ID NO: 2262152 - RNA, 19 nt, Artificial Sequence
  Description of Artificial Sequence: Synthetic oligonucleotide
  Sense strand starting at position 2770 of SEQ ID NO: 1884392
uauacuaugagaggugguu

SEQ ID NO: 2262153 - RNA, 19 nt, Artificial Sequence
  Description of Artificial Sequence: Synthetic oligonucleotide
  Antisense strand to SEQ ID NO: 2262152
aaccaccucucauaguaua

SEQ ID NO: 2262154 - RNA, 19 nt, Artificial Sequence
  Description of Artificial Sequence: Synthetic oligonucleotide
  Sense strand starting at position 2772 of SEQ ID NO: 1884392
uacuaugagaggugguuaa

SEQ ID NO: 2262155 - RNA, 19 nt, Artificial Sequence
  Description of Artificial Sequence: Synthetic oligonucleotide
  Antisense strand to SEQ ID NO: 2262154
uuaaccaccucucauagua

SEQ ID NO: 2262156 - RNA, 19 nt, Artificial Sequence
  Description of Artificial Sequence: Synthetic oligonucleotide
  Sense strand starting at position 531 of SEQ ID NO: 1884393
cguaauuggcucuggaaca

SEQ ID NO: 2262157 - RNA, 19 nt, Artificial Sequence
  Description of Artificial Sequence: Synthetic oligonucleotide
  Antisense strand to SEQ ID NO: 2262156
uguuccagagccaauuacg

SEQ ID NO: 2262158 - RNA, 19 nt, Artificial Sequence
  Description of Artificial Sequence: Synthetic oligonucleotide
  Sense strand starting at position 603 of SEQ ID NO: 1884393
aggugugugggaugauaga

SEQ ID NO: 2262159 - RNA, 19 nt, Artificial Sequence
  Description of Artificial Sequence: Synthetic oligonucleotide
  Antisense strand to SEQ ID NO: 2262158
ucuaucaucccacacaccu

SEQ ID NO: 2262160 - RNA, 19 nt, Artificial Sequence
  Description of Artificial Sequence: Synthetic oligonucleotide
  Sense strand starting at position 612 of SEQ ID NO: 1884393
ggaugauagacuugcucug

SEQ ID NO: 2262161 - RNA, 19 nt, Artificial Sequence
  Description of Artificial Sequence: Synthetic oligonucleotide
  Antisense strand to SEQ ID NO: 2262160
cagagcaagucuaucaucc

SEQ ID NO: 2262162 - RNA, 19 nt, Artificial Sequence
  Description of Artificial Sequence: Synthetic oligonucleotide
  Sense strand starting at position 709 of SEQ ID NO: 1884393
auuagaaagguucgguugu

SEQ ID NO: 2262163 - RNA, 19 nt, Artificial Sequence
  Description of Artificial Sequence: Synthetic oligonucleotide
  Antisense strand to SEQ ID NO: 2262162
acaaccgaaccuuucuaau

SEQ ID NO: 2262164 - RNA, 19 nt, Artificial Sequence
  Description of Artificial Sequence: Synthetic oligonucleotide
  Sense strand starting at position 711 of SEQ ID NO: 1884393
uagaaagguucgguuguag

SEQ ID NO: 2262165 - RNA, 19 nt, Artificial Sequence
  Description of Artificial Sequence: Synthetic oligonucleotide
  Antisense strand to SEQ ID NO: 2262164
cuacaaccgaaccuuucua

SEQ ID NO: 2262166 - RNA, 19 nt, Artificial Sequence
  Description of Artificial Sequence: Synthetic oligonucleotide
  Sense strand starting at position 741 of SEQ ID NO: 1884393
acaggcugcuuguuugaaa

SEQ ID NO: 2262167 - RNA, 19 nt, Artificial Sequence
  Description of Artificial Sequence: Synthetic oligonucleotide
  Antisense strand to SEQ ID NO: 2262166
uuucaaacaagcagccugu

SEQ ID NO: 2262168 - RNA, 19 nt, Artificial Sequence
  Description of Artificial Sequence: Synthetic oligonucleotide
  Sense strand starting at position 742 of SEQ ID NO: 1884393
caggcugcuuguuugaaau

SEQ ID NO: 2262169 - RNA, 19 nt, Artificial Sequence
  Description of Artificial Sequence: Synthetic oligonucleotide
  Antisense strand to SEQ ID NO: 2262168
auuucaaacaagcagccug

SEQ ID NO: 2262170 - RNA, 19 nt, Artificial Sequence
  Description of Artificial Sequence: Synthetic oligonucleotide
  Sense strand starting at position 748 of SEQ ID NO: 1884393
gcuuguuugaaaugaguag

SEQ ID NO: 2262171 - RNA, 19 nt, Artificial Sequence
  Description of Artificial Sequence: Synthetic oligonucleotide
  Antisense strand to SEQ ID NO: 2262170
cuacucauuucaaacaagc

SEQ ID NO: 2262172 - RNA, 19 nt, Artificial Sequence
  Description of Artificial Sequence: Synthetic oligonucleotide
  Sense strand starting at position 760 of SEQ ID NO: 1884393
ugaguagacucuuuaucca

SEQ ID NO: 2262173 - RNA, 19 nt, Artificial Sequence
  Description of Artificial Sequence: Synthetic oligonucleotide
  Antisense strand to SEQ ID NO: 2262172
uggauaaagagucuacuca

SEQ ID NO: 2262174 - RNA, 19 nt, Artificial Sequence
  Description of Artificial Sequence: Synthetic oligonucleotide
  Sense strand starting at position 806 of SEQ ID NO: 1884393
guugguuugcuucauggga

SEQ ID NO: 2262175 - RNA, 19 nt, Artificial Sequence
  Description of Artificial Sequence: Synthetic oligonucleotide
  Antisense strand to SEQ ID NO: 2262174
ucccaugaagcaaaccaac

SEQ ID NO: 2262176 - RNA, 19 nt, Artificial Sequence
  Description of Artificial Sequence: Synthetic oligonucleotide
  Sense strand starting at position 867 of SEQ ID NO: 1884393
gaucuuccugauggucaua

SEQ ID NO: 2262177 - RNA, 19 nt, Artificial Sequence
  Description of Artificial Sequence: Synthetic oligonucleotide
  Antisense strand to SEQ ID NO: 2262176
uaugaccaucaggaagauc

SEQ ID NO: 2262178 - RNA, 19 nt, Artificial Sequence
  Description of Artificial Sequence: Synthetic oligonucleotide
  Sense strand starting at position 869 of SEQ ID NO: 1884393
ucuuccugauggucauaau

SEQ ID NO: 2262179 - RNA, 19 nt, Artificial Sequence
  Description of Artificial Sequence: Synthetic oligonucleotide
  Antisense strand to SEQ ID NO: 2262178
auuaugaccaucaggaaga

SEQ ID NO: 2262180 - RNA, 19 nt, Artificial Sequence
  Description of Artificial Sequence: Synthetic oligonucleotide
  Sense strand starting at position 870 of SEQ ID NO: 1884393
cuuccugauggucauaaua

SEQ ID NO: 2262181 - RNA, 19 nt, Artificial Sequence
  Description of Artificial Sequence: Synthetic oligonucleotide
  Antisense strand to SEQ ID NO: 2262180
uauuaugaccaucaggaag

SEQ ID NO: 2262182 - RNA, 19 nt, Artificial Sequence
  Description of Artificial Sequence: Synthetic oligonucleotide
  Sense strand starting at position 943 of SEQ ID NO: 1884393
ccaucuguaggaugcuaaa

SEQ ID NO: 2262183 - RNA, 19 nt, Artificial Sequence
  Description of Artificial Sequence: Synthetic oligonucleotide
  Antisense strand to SEQ ID NO: 2262182
uuuagcauccuacagaugg

SEQ ID NO: 2262184 - RNA, 19 nt, Artificial Sequence
  Description of Artificial Sequence: Synthetic oligonucleotide
  Sense strand starting at position 966 of SEQ ID NO: 1884393
gucucuuugacuggagcaa

SEQ ID NO: 2262185 - RNA, 19 nt, Artificial Sequence
  Description of Artificial Sequence: Synthetic oligonucleotide
  Antisense strand to SEQ ID NO: 2262184
uugcuccagucaaagagac

SEQ ID NO: 2262186 - RNA, 19 nt, Artificial Sequence
  Description of Artificial Sequence: Synthetic oligonucleotide
  Sense strand starting at position 1018 of SEQ ID NO: 1884393
gucguaaccuagguacgaa

SEQ ID NO: 2262187 - RNA, 19 nt, Artificial Sequence
  Description of Artificial Sequence: Synthetic oligonucleotide
  Antisense strand to SEQ ID NO: 2262186
uucguaccuagguuacgac

SEQ ID NO: 2262188 - RNA, 19 nt, Artificial Sequence
  Description of Artificial Sequence: Synthetic oligonucleotide
  Sense strand starting at position 1019 of SEQ ID NO: 1884393
ucguaaccuagguacgaau

SEQ ID NO: 2262189 - RNA, 19 nt, Artificial Sequence
  Description of Artificial Sequence: Synthetic oligonucleotide
  Antisense strand to SEQ ID NO: 2262188
auucguaccuagguuacga

SEQ ID NO: 2262190 - RNA, 19 nt, Artificial Sequence
  Description of Artificial Sequence: Synthetic oligonucleotide
  Sense strand starting at position 1224 of SEQ ID NO: 1884393
gauggagucacgcaagcua

SEQ ID NO: 2262191 - RNA, 19 nt, Artificial Sequence
  Description of Artificial Sequence: Synthetic oligonucleotide
  Antisense strand to SEQ ID NO: 2262190
uagcuugcgugacuccauc

SEQ ID NO: 2262192 - RNA, 19 nt, Artificial Sequence
  Description of Artificial Sequence: Synthetic oligonucleotide
  Sense strand starting at position 1334 of SEQ ID NO: 1884393
caaggagguuccucucuau

SEQ ID NO: 2262193 - RNA, 19 nt, Artificial Sequence
  Description of Artificial Sequence: Synthetic oligonucleotide
  Antisense strand to SEQ ID NO: 2262192
auagagaggaaccuccuug

SEQ ID NO: 2262194 - RNA, 19 nt, Artificial Sequence
  Description of Artificial Sequence: Synthetic oligonucleotide
  Sense strand starting at position 1461 of SEQ ID NO: 1884393
cagggacaccaaugucuaa

SEQ ID NO: 2262195 - RNA, 19 nt, Artificial Sequence
  Description of Artificial Sequence: Synthetic oligonucleotide
  Antisense strand to SEQ ID NO: 2262194
uuagacauuggugucccug

SEQ ID NO: 2262196 - RNA, 19 nt, Artificial Sequence
  Description of Artificial Sequence: Synthetic oligonucleotide
  Sense strand starting at position 1492 of SEQ ID NO: 1884393
uuaaauuaagcuuggcgua

SEQ ID NO: 2262197 - RNA, 19 nt, Artificial Sequence
  Description of Artificial Sequence: Synthetic oligonucleotide
  Antisense strand to SEQ ID NO: 2262196
uacgccaagcuuaauuuaa

SEQ ID NO: 2262198 - RNA, 19 nt, Artificial Sequence
  Description of Artificial Sequence: Synthetic oligonucleotide
  Sense strand starting at position 1493 of SEQ ID NO: 1884393
uaaauuaagcuuggcguaa

SEQ ID NO: 2262199 - RNA, 19 nt, Artificial Sequence
  Description of Artificial Sequence: Synthetic oligonucleotide
  Antisense strand to SEQ ID NO: 2262198
uuacgccaagcuuaauuua

SEQ ID NO: 2262200 - RNA, 19 nt, Artificial Sequence
  Description of Artificial Sequence: Synthetic oligonucleotide
  Sense strand starting at position 1494 of SEQ ID NO: 1884393
aaauuaagcuuggcguaaa

SEQ ID NO: 2262201 - RNA, 19 nt, Artificial Sequence
  Description of Artificial Sequence: Synthetic oligonucleotide
  Antisense strand to SEQ ID NO: 2262200
uuuacgccaagcuuaauuu

SEQ ID NO: 2262202 - RNA, 19 nt, Artificial Sequence
  Description of Artificial Sequence: Synthetic oligonucleotide
  Sense strand starting at position 2081 of SEQ ID NO: 1884393
caacauugaccuggagguu

SEQ ID NO: 2262203 - RNA, 19 nt, Artificial Sequence
  Description of Artificial Sequence: Synthetic oligonucleotide
  Antisense strand to SEQ ID NO: 2262202
aaccuccaggucaauguug

SEQ ID NO: 2262204 - RNA, 19 nt, Artificial Sequence
  Description of Artificial Sequence: Synthetic oligonucleotide
  Sense strand starting at position 2097 of SEQ ID NO: 1884393
guuccugcucgugcaauua

SEQ ID NO: 2262205 - RNA, 19 nt, Artificial Sequence
  Description of Artificial Sequence: Synthetic oligonucleotide
  Antisense strand to SEQ ID NO: 2262204
uaauugcacgagcaggaac

SEQ ID NO: 2262206 - RNA, 19 nt, Artificial Sequence
  Description of Artificial Sequence: Synthetic oligonucleotide
  Sense strand starting at position 2177 of SEQ ID NO: 1884393
cagauaacgugaccaucua

SEQ ID NO: 2262207 - RNA, 19 nt, Artificial Sequence
  Description of Artificial Sequence: Synthetic oligonucleotide
  Antisense strand to SEQ ID NO: 2262206
uagauggucacguuaucug

SEQ ID NO: 2262208 - RNA, 19 nt, Artificial Sequence
  Description of Artificial Sequence: Synthetic oligonucleotide
  Sense strand starting at position 2231 of SEQ ID NO: 1884393
agaacuacucagugagauu

SEQ ID NO: 2262209 - RNA, 19 nt, Artificial Sequence
  Description of Artificial Sequence: Synthetic oligonucleotide
  Antisense strand to SEQ ID NO: 2262208
aaucucacugaguaguucu

SEQ ID NO: 2262210 - RNA, 19 nt, Artificial Sequence
  Description of Artificial Sequence: Synthetic oligonucleotide
  Sense strand starting at position 2246 of SEQ ID NO: 1884393
gauuaacaagguuguggaa

SEQ ID NO: 2262211 - RNA, 19 nt, Artificial Sequence
  Description of Artificial Sequence: Synthetic oligonucleotide
  Antisense strand to SEQ ID NO: 2262210
uuccacaaccuuguuaauc

SEQ ID NO: 2262212 - RNA, 19 nt, Artificial Sequence
  Description of Artificial Sequence: Synthetic oligonucleotide
  Sense strand starting at position 2284 of SEQ ID NO: 1884393
aguccauuguguuucuaua

SEQ ID NO: 2262213 - RNA, 19 nt, Artificial Sequence
  Description of Artificial Sequence: Synthetic oligonucleotide
  Antisense strand to SEQ ID NO: 2262212
uauagaaacacaauggacu

SEQ ID NO: 2262214 - RNA, 19 nt, Artificial Sequence
  Description of Artificial Sequence: Synthetic oligonucleotide
  Sense strand starting at position 2663 of SEQ ID NO: 1884393
uugagugauacugguguaa

SEQ ID NO: 2262215 - RNA, 19 nt, Artificial Sequence
  Description of Artificial Sequence: Synthetic oligonucleotide
  Antisense strand to SEQ ID NO: 2262214
uuacaccaguaucacucaa

SEQ ID NO: 2262216 - RNA, 19 nt, Artificial Sequence
  Description of Artificial Sequence: Synthetic oligonucleotide
  Sense strand starting at position 2990 of SEQ ID NO: 1884393
acuggaucuccauaugcaa

SEQ ID NO: 2262217 - RNA, 19 nt, Artificial Sequence
  Description of Artificial Sequence: Synthetic oligonucleotide
  Antisense strand to SEQ ID NO: 2262216
uugcauauggagauccagu

SEQ ID NO: 2262218 - RNA, 19 nt, Artificial Sequence
  Description of Artificial Sequence: Synthetic oligonucleotide
  Sense strand starting at position 3068 of SEQ ID NO: 1884393
aaaggaucgugggucuaaa

SEQ ID NO: 2262219 - RNA, 19 nt, Artificial Sequence
  Description of Artificial Sequence: Synthetic oligonucleotide
  Antisense strand to SEQ ID NO: 2262218
uuuagacccacgauccuuu

SEQ ID NO: 2262220 - RNA, 19 nt, Artificial Sequence
  Description of Artificial Sequence: Synthetic oligonucleotide
  Sense strand starting at position 3121 of SEQ ID NO: 1884393
ucuuuauggcucuggauaa

SEQ ID NO: 2262221 - RNA, 19 nt, Artificial Sequence
  Description of Artificial Sequence: Synthetic oligonucleotide
  Antisense strand to SEQ ID NO: 2262220
uuauccagagccauaaaga

SEQ ID NO: 2262222 - RNA, 19 nt, Artificial Sequence
  Description of Artificial Sequence: Synthetic oligonucleotide
  Sense strand starting at position 3713 of SEQ ID NO: 1884393
caagauguaucagugguga

SEQ ID NO: 2262223 - RNA, 19 nt, Artificial Sequence
  Description of Artificial Sequence: Synthetic oligonucleotide
  Antisense strand to SEQ ID NO: 2262222
ucaccacugauacaucuug

SEQ ID NO: 2262224 - RNA, 19 nt, Artificial Sequence
  Description of Artificial Sequence: Synthetic oligonucleotide
  Sense strand starting at position 3715 of SEQ ID NO: 1884393
agauguaucaguggugaag

SEQ ID NO: 2262225 - RNA, 19 nt, Artificial Sequence
  Description of Artificial Sequence: Synthetic oligonucleotide
  Antisense strand to SEQ ID NO: 2262224
cuucaccacugauacaucu

SEQ ID NO: 2262226 - RNA, 19 nt, Artificial Sequence
  Description of Artificial Sequence: Synthetic oligonucleotide
  Sense strand starting at position 3818 of SEQ ID NO: 1884393
gggccaaagucagcgagau

SEQ ID NO: 2262227 - RNA, 19 nt, Artificial Sequence
  Description of Artificial Sequence: Synthetic oligonucleotide
  Antisense strand to SEQ ID NO: 2262226
aucucgcugacuuuggccc

SEQ ID NO: 2262228 - RNA, 19 nt, Artificial Sequence
  Description of Artificial Sequence: Synthetic oligonucleotide
  Sense strand starting at position 3820 of SEQ ID NO: 1884393
gccaaagucagcgagauga

SEQ ID NO: 2262229 - RNA, 19 nt, Artificial Sequence
  Description of Artificial Sequence: Synthetic oligonucleotide
  Antisense strand to SEQ ID NO: 2262228
ucaucucgcugacuuuggc

SEQ ID NO: 2262230 - RNA, 19 nt, Artificial Sequence
  Description of Artificial Sequence: Synthetic oligonucleotide
  Sense strand starting at position 3872 of SEQ ID NO: 1884393
gccguuucugaacaaguuu

SEQ ID NO: 2262231 - RNA, 19 nt, Artificial Sequence
  Description of Artificial Sequence: Synthetic oligonucleotide
  Antisense strand to SEQ ID NO: 2262230
aaacuuguucagaaacggc

SEQ ID NO: 2262232 - RNA, 19 nt, Artificial Sequence
  Description of Artificial Sequence: Synthetic oligonucleotide
  Sense strand starting at position 3947 of SEQ ID NO: 1884393
aaaggaaauguauguccuu

SEQ ID NO: 2262233 - RNA, 19 nt, Artificial Sequence
  Description of Artificial Sequence: Synthetic oligonucleotide
  Antisense strand to SEQ ID NO: 2262232
aaggacauacauuuccuuu

SEQ ID NO: 2262234 - RNA, 19 nt, Artificial Sequence
  Description of Artificial Sequence: Synthetic oligonucleotide
  Sense strand starting at position 3982 of SEQ ID NO: 1884393
gaauguaaauggccacauu

SEQ ID NO: 2262235 - RNA, 19 nt, Artificial Sequence
  Description of Artificial Sequence: Synthetic oligonucleotide
  Antisense strand to SEQ ID NO: 2262234
aauguggccauuuacauuc

SEQ ID NO: 2262236 - RNA, 19 nt, Artificial Sequence
  Description of Artificial Sequence: Synthetic oligonucleotide
  Sense strand starting at position 291 of SEQ ID NO: 1884394
guuggaauguguguuuauc

SEQ ID NO: 2262237 - RNA, 19 nt, Artificial Sequence
  Description of Artificial Sequence: Synthetic oligonucleotide
  Antisense strand to SEQ ID NO: 2262236
gauaaacacacauuccaac

SEQ ID NO: 2262238 - RNA, 19 nt, Artificial Sequence
  Description of Artificial Sequence: Synthetic oligonucleotide
  Sense strand starting at position 293 of SEQ ID NO: 1884394
uggaauguguguuuaucuu

SEQ ID NO: 2262239 - RNA, 19 nt, Artificial Sequence
  Description of Artificial Sequence: Synthetic oligonucleotide
  Antisense strand to SEQ ID NO: 2262238
aagauaaacacacauucca

SEQ ID NO: 2262240 - RNA, 19 nt, Artificial Sequence
  Description of Artificial Sequence: Synthetic oligonucleotide
  Sense strand starting at position 300 of SEQ ID NO: 1884394
uguguuuaucuuuggccca

SEQ ID NO: 2262241 - RNA, 19 nt, Artificial Sequence
  Description of Artificial Sequence: Synthetic oligonucleotide
  Antisense strand to SEQ ID NO: 2262240
ugggccaaagauaaacaca

SEQ ID NO: 2262242 - RNA, 19 nt, Artificial Sequence
  Description of Artificial Sequence: Synthetic oligonucleotide
  Sense strand starting at position 301 of SEQ ID NO: 1884394
guguuuaucuuuggcccaa

SEQ ID NO: 2262243 - RNA, 19 nt, Artificial Sequence
  Description of Artificial Sequence: Synthetic oligonucleotide
  Antisense strand to SEQ ID NO: 2262242
uugggccaaagauaaacac

SEQ ID NO: 2262244 - RNA, 19 nt, Artificial Sequence
  Description of Artificial Sequence: Synthetic oligonucleotide
  Sense strand starting at position 348 of SEQ ID NO: 1884394
cuuagagaggguuguuaga

SEQ ID NO: 2262245 - RNA, 19 nt, Artificial Sequence
  Description of Artificial Sequence: Synthetic oligonucleotide
  Antisense strand to SEQ ID NO: 2262244
ucuaacaacccucucuaag

SEQ ID NO: 2262246 - RNA, 19 nt, Artificial Sequence
  Description of Artificial Sequence: Synthetic oligonucleotide
  Sense strand starting at position 350 of SEQ ID NO: 1884394
uagagaggguuguuagaca

SEQ ID NO: 2262247 - RNA, 19 nt, Artificial Sequence
  Description of Artificial Sequence: Synthetic oligonucleotide
  Antisense strand to SEQ ID NO: 2262246
ugucuaacaacccucucua

SEQ ID NO: 2262248 - RNA, 19 nt, Artificial Sequence
  Description of Artificial Sequence: Synthetic oligonucleotide
  Sense strand starting at position 417 of SEQ ID NO: 1884394
cugacuucagugcggagaa

SEQ ID NO: 2262249 - RNA, 19 nt, Artificial Sequence
  Description of Artificial Sequence: Synthetic oligonucleotide
  Antisense strand to SEQ ID NO: 2262248
uucuccgcacugaagucag

SEQ ID NO: 2262250 - RNA, 19 nt, Artificial Sequence
  Description of Artificial Sequence: Synthetic oligonucleotide
  Sense strand starting at position 655 of SEQ ID NO: 1884394
gcacguuuagguugaguga

SEQ ID NO: 2262251 - RNA, 19 nt, Artificial Sequence
  Description of Artificial Sequence: Synthetic oligonucleotide
  Antisense strand to SEQ ID NO: 2262250
ucacucaaccuaaacgugc

SEQ ID NO: 2262252 - RNA, 19 nt, Artificial Sequence
  Description of Artificial Sequence: Synthetic oligonucleotide
  Sense strand starting at position 656 of SEQ ID NO: 1884394
cacguuuagguugagugaa

SEQ ID NO: 2262253 - RNA, 19 nt, Artificial Sequence
  Description of Artificial Sequence: Synthetic oligonucleotide
  Antisense strand to SEQ ID NO: 2262252
uucacucaaccuaaacgug

SEQ ID NO: 2262254 - RNA, 19 nt, Artificial Sequence
  Description of Artificial Sequence: Synthetic oligonucleotide
  Sense strand starting at position 657 of SEQ ID NO: 1884394
acguuuagguugagugaag

SEQ ID NO: 2262255 - RNA, 19 nt, Artificial Sequence
  Description of Artificial Sequence: Synthetic oligonucleotide
  Antisense strand to SEQ ID NO: 2262254
cuucacucaaccuaaacgu

SEQ ID NO: 2262256 - RNA, 19 nt, Artificial Sequence
  Description of Artificial Sequence: Synthetic oligonucleotide
  Sense strand starting at position 658 of SEQ ID NO: 1884394
cguuuagguugagugaaga

SEQ ID NO: 2262257 - RNA, 19 nt, Artificial Sequence
  Description of Artificial Sequence: Synthetic oligonucleotide
  Antisense strand to SEQ ID NO: 2262256
ucuucacucaaccuaaacg

SEQ ID NO: 2262258 - RNA, 19 nt, Artificial Sequence
  Description of Artificial Sequence: Synthetic oligonucleotide
  Sense strand starting at position 887 of SEQ ID NO: 1884394
ucugcaugcugaccaguua

SEQ ID NO: 2262259 - RNA, 19 nt, Artificial Sequence
  Description of Artificial Sequence: Synthetic oligonucleotide
  Antisense strand to SEQ ID NO: 2262258
uaacuggucagcaugcaga

SEQ ID NO: 2262260 - RNA, 19 nt, Artificial Sequence
  Description of Artificial Sequence: Synthetic oligonucleotide
  Sense strand starting at position 888 of SEQ ID NO: 1884394
cugcaugcugaccaguuaa

SEQ ID NO: 2262261 - RNA, 19 nt, Artificial Sequence
  Description of Artificial Sequence: Synthetic oligonucleotide
  Antisense strand to SEQ ID NO: 2262260
uuaacuggucagcaugcag

SEQ ID NO: 2262262 - RNA, 19 nt, Artificial Sequence
  Description of Artificial Sequence: Synthetic oligonucleotide
  Sense strand starting at position 972 of SEQ ID NO: 1884394
gugugaucguggcccugua

SEQ ID NO: 2262263 - RNA, 19 nt, Artificial Sequence
  Description of Artificial Sequence: Synthetic oligonucleotide
  Antisense strand to SEQ ID NO: 2262262
uacagggccacgaucacac

SEQ ID NO: 2262264 - RNA, 19 nt, Artificial Sequence
  Description of Artificial Sequence: Synthetic oligonucleotide
  Sense strand starting at position 1039 of SEQ ID NO: 1884394
ggcugugucucagcaugaa

SEQ ID NO: 2262265 - RNA, 19 nt, Artificial Sequence
  Description of Artificial Sequence: Synthetic oligonucleotide
  Antisense strand to SEQ ID NO: 2262264
uucaugcugagacacagcc

SEQ ID NO: 2262266 - RNA, 19 nt, Artificial Sequence
  Description of Artificial Sequence: Synthetic oligonucleotide
  Sense strand starting at position 1042 of SEQ ID NO: 1884394
ugugucucagcaugaauuc

SEQ ID NO: 2262267 - RNA, 19 nt, Artificial Sequence
  Description of Artificial Sequence: Synthetic oligonucleotide
  Antisense strand to SEQ ID NO: 2262266
gaauucaugcugagacaca

SEQ ID NO: 2262268 - RNA, 19 nt, Artificial Sequence
  Description of Artificial Sequence: Synthetic oligonucleotide
  Sense strand starting at position 1051 of SEQ ID NO: 1884394
gcaugaauuccgugaccca

SEQ ID NO: 2262269 - RNA, 19 nt, Artificial Sequence
  Description of Artificial Sequence: Synthetic oligonucleotide
  Antisense strand to SEQ ID NO: 2262268
ugggucacggaauucaugc

SEQ ID NO: 2262270 - RNA, 19 nt, Artificial Sequence
  Description of Artificial Sequence: Synthetic oligonucleotide
  Sense strand starting at position 1112 of SEQ ID NO: 1884394
gaggcaggcacuugguaua

SEQ ID NO: 2262271 - RNA, 19 nt, Artificial Sequence
  Description of Artificial Sequence: Synthetic oligonucleotide
  Antisense strand to SEQ ID NO: 2262270
uauaccaagugccugccuc

SEQ ID NO: 2262272 - RNA, 19 nt, Artificial Sequence
  Description of Artificial Sequence: Synthetic oligonucleotide
  Sense strand starting at position 1286 of SEQ ID NO: 1884394
ccgagcucccaggaagaua

SEQ ID NO: 2262273 - RNA, 19 nt, Artificial Sequence
  Description of Artificial Sequence: Synthetic oligonucleotide
  Antisense strand to SEQ ID NO: 2262272
uaucuuccugggagcucgg

SEQ ID NO: 2262274 - RNA, 19 nt, Artificial Sequence
  Description of Artificial Sequence: Synthetic oligonucleotide
  Sense strand starting at position 1540 of SEQ ID NO: 1884394
gugugugaugccugacaag

SEQ ID NO: 2262275 - RNA, 19 nt, Artificial Sequence
  Description of Artificial Sequence: Synthetic oligonucleotide
  Antisense strand to SEQ ID NO: 2262274
cuugucaggcaucacacac

SEQ ID NO: 2262276 - RNA, 19 nt, Artificial Sequence
  Description of Artificial Sequence: Synthetic oligonucleotide
  Sense strand starting at position 1582 of SEQ ID NO: 1884394
uggagaucuugugacuucu

SEQ ID NO: 2262277 - RNA, 19 nt, Artificial Sequence
  Description of Artificial Sequence: Synthetic oligonucleotide
  Antisense strand to SEQ ID NO: 2262276
agaagucacaagaucucca

SEQ ID NO: 2262278 - RNA, 19 nt, Artificial Sequence
  Description of Artificial Sequence: Synthetic oligonucleotide
  Sense strand starting at position 1584 of SEQ ID NO: 1884394
gagaucuugugacuucuca

SEQ ID NO: 2262279 - RNA, 19 nt, Artificial Sequence
  Description of Artificial Sequence: Synthetic oligonucleotide
  Antisense strand to SEQ ID NO: 2262278
ugagaagucacaagaucuc

SEQ ID NO: 2262280 - RNA, 19 nt, Artificial Sequence
  Description of Artificial Sequence: Synthetic oligonucleotide
  Sense strand starting at position 1612 of SEQ ID NO: 1884394
uuggaagguucgagaagga

SEQ ID NO: 2262281 - RNA, 19 nt, Artificial Sequence
  Description of Artificial Sequence: Synthetic oligonucleotide
  Antisense strand to SEQ ID NO: 2262280
uccuucucgaaccuuccaa

SEQ ID NO: 2262282 - RNA, 19 nt, Artificial Sequence
  Description of Artificial Sequence: Synthetic oligonucleotide
  Sense strand starting at position 1651 of SEQ ID NO: 1884394
cccuuaaggcugugguaac

SEQ ID NO: 2262283 - RNA, 19 nt, Artificial Sequence
  Description of Artificial Sequence: Synthetic oligonucleotide
  Antisense strand to SEQ ID NO: 2262282
guuaccacagccuuaaggg

SEQ ID NO: 2262284 - RNA, 19 nt, Artificial Sequence
  Description of Artificial Sequence: Synthetic oligonucleotide
  Sense strand starting at position 1907 of SEQ ID NO: 1884394
gaagcagucgcugugggua

SEQ ID NO: 2262285 - RNA, 19 nt, Artificial Sequence
  Description of Artificial Sequence: Synthetic oligonucleotide
  Antisense strand to SEQ ID NO: 2262284
uacccacagcgacugcuuc

SEQ ID NO: 2262286 - RNA, 19 nt, Artificial Sequence
  Description of Artificial Sequence: Synthetic oligonucleotide
  Sense strand starting at position 1920 of SEQ ID NO: 1884394
uggguauucuguuccuugu

SEQ ID NO: 2262287 - RNA, 19 nt, Artificial Sequence
  Description of Artificial Sequence: Synthetic oligonucleotide
  Antisense strand to SEQ ID NO: 2262286
acaaggaacagaauaccca

SEQ ID NO: 2262288 - RNA, 19 nt, Artificial Sequence
  Description of Artificial Sequence: Synthetic oligonucleotide
  Sense strand starting at position 1922 of SEQ ID NO: 1884394
gguauucuguuccuuguca

SEQ ID NO: 2262289 - RNA, 19 nt, Artificial Sequence
  Description of Artificial Sequence: Synthetic oligonucleotide
  Antisense strand to SEQ ID NO: 2262288
ugacaaggaacagaauacc

SEQ ID NO: 2262290 - RNA, 19 nt, Artificial Sequence
  Description of Artificial Sequence: Synthetic oligonucleotide
  Sense strand starting at position 1938 of SEQ ID NO: 1884394
ucagcacugugcuugcaaa

SEQ ID NO: 2262291 - RNA, 19 nt, Artificial Sequence
  Description of Artificial Sequence: Synthetic oligonucleotide
  Antisense strand to SEQ ID NO: 2262290
uuugcaagcacagugcuga

SEQ ID NO: 2262292 - RNA, 19 nt, Artificial Sequence
  Description of Artificial Sequence: Synthetic oligonucleotide
  Sense strand starting at position 2563 of SEQ ID NO: 1884394
guagccagcucugagcaua

SEQ ID NO: 2262293 - RNA, 19 nt, Artificial Sequence
  Description of Artificial Sequence: Synthetic oligonucleotide
  Antisense strand to SEQ ID NO: 2262292
uaugcucagagcuggcuac

SEQ ID NO: 2262294 - RNA, 19 nt, Artificial Sequence
  Description of Artificial Sequence: Synthetic oligonucleotide
  Sense strand starting at position 2666 of SEQ ID NO: 1884394
gaggaacauucucccgaca

SEQ ID NO: 2262295 - RNA, 19 nt, Artificial Sequence
  Description of Artificial Sequence: Synthetic oligonucleotide
  Antisense strand to SEQ ID NO: 2262294
ugucgggagaauguuccuc

SEQ ID NO: 2262296 - RNA, 19 nt, Artificial Sequence
  Description of Artificial Sequence: Synthetic oligonucleotide
  Sense strand starting at position 2668 of SEQ ID NO: 1884394
ggaacauucucccgacagg

SEQ ID NO: 2262297 - RNA, 19 nt, Artificial Sequence
  Description of Artificial Sequence: Synthetic oligonucleotide
  Antisense strand to SEQ ID NO: 2262296
ccugucgggagaauguucc

SEQ ID NO: 2262298 - RNA, 19 nt, Artificial Sequence
  Description of Artificial Sequence: Synthetic oligonucleotide
  Sense strand starting at position 2945 of SEQ ID NO: 1884394
gguuuaugcaggcagcauu

SEQ ID NO: 2262299 - RNA, 19 nt, Artificial Sequence
  Description of Artificial Sequence: Synthetic oligonucleotide
  Antisense strand to SEQ ID NO: 2262298
aaugcugccugcauaaacc

SEQ ID NO: 2262300 - RNA, 19 nt, Artificial Sequence
  Description of Artificial Sequence: Synthetic oligonucleotide
  Sense strand starting at position 3350 of SEQ ID NO: 1884394
cgcucauagcccugugaca

SEQ ID NO: 2262301 - RNA, 19 nt, Artificial Sequence
  Description of Artificial Sequence: Synthetic oligonucleotide
  Antisense strand to SEQ ID NO: 2262300
ugucacagggcuaugagcg

SEQ ID NO: 2262302 - RNA, 19 nt, Artificial Sequence
  Description of Artificial Sequence: Synthetic oligonucleotide
  Sense strand starting at position 3470 of SEQ ID NO: 1884394
cucccagaccucugugaag

SEQ ID NO: 2262303 - RNA, 19 nt, Artificial Sequence
  Description of Artificial Sequence: Synthetic oligonucleotide
  Antisense strand to SEQ ID NO: 2262302
cuucacagaggucugggag

SEQ ID NO: 2262304 - RNA, 19 nt, Artificial Sequence
  Description of Artificial Sequence: Synthetic oligonucleotide
  Sense strand starting at position 94 of SEQ ID NO: 1884395
cccggaagugcugaguuaa

SEQ ID NO: 2262305 - RNA, 19 nt, Artificial Sequence
  Description of Artificial Sequence: Synthetic oligonucleotide
  Antisense strand to SEQ ID NO: 2262304
uuaacucagcacuuccggg

SEQ ID NO: 2262306 - RNA, 19 nt, Artificial Sequence
  Description of Artificial Sequence: Synthetic oligonucleotide
  Sense strand starting at position 106 of SEQ ID NO: 1884395
gaguuaaaucggcacugga

SEQ ID NO: 2262307 - RNA, 19 nt, Artificial Sequence
  Description of Artificial Sequence: Synthetic oligonucleotide
  Antisense strand to SEQ ID NO: 2262306
uccagugccgauuuaacuc

SEQ ID NO: 2262308 - RNA, 19 nt, Artificial Sequence
  Description of Artificial Sequence: Synthetic oligonucleotide
  Sense strand starting at position 169 of SEQ ID NO: 1884395
caaguuguaggucaggaga

SEQ ID NO: 2262309 - RNA, 19 nt, Artificial Sequence
  Description of Artificial Sequence: Synthetic oligonucleotide
  Antisense strand to SEQ ID NO: 2262308
ucuccugaccuacaacuug

SEQ ID NO: 2262310 - RNA, 19 nt, Artificial Sequence
  Description of Artificial Sequence: Synthetic oligonucleotide
  Sense strand starting at position 218 of SEQ ID NO: 1884395
aagacuguauggucugaaa

SEQ ID NO: 2262311 - RNA, 19 nt, Artificial Sequence
  Description of Artificial Sequence: Synthetic oligonucleotide
  Antisense strand to SEQ ID NO: 2262310
uuucagaccauacagucuu

SEQ ID NO: 2262312 - RNA, 19 nt, Artificial Sequence
  Description of Artificial Sequence: Synthetic oligonucleotide
  Sense strand starting at position 220 of SEQ ID NO: 1884395
gacuguauggucugaaauc

SEQ ID NO: 2262313 - RNA, 19 nt, Artificial Sequence
  Description of Artificial Sequence: Synthetic oligonucleotide
  Antisense strand to SEQ ID NO: 2262312
gauuucagaccauacaguc

SEQ ID NO: 2262314 - RNA, 19 nt, Artificial Sequence
  Description of Artificial Sequence: Synthetic oligonucleotide
  Sense strand starting at position 316 of SEQ ID NO: 1884395
gcccuugaugccuagaaca

SEQ ID NO: 2262315 - RNA, 19 nt, Artificial Sequence
  Description of Artificial Sequence: Synthetic oligonucleotide
  Antisense strand to SEQ ID NO: 2262314
uguucuaggcaucaagggc

SEQ ID NO: 2262316 - RNA, 19 nt, Artificial Sequence
  Description of Artificial Sequence: Synthetic oligonucleotide
  Sense strand starting at position 318 of SEQ ID NO: 1884395
ccuugaugccuagaacaug

SEQ ID NO: 2262317 - RNA, 19 nt, Artificial Sequence
  Description of Artificial Sequence: Synthetic oligonucleotide
  Antisense strand to SEQ ID NO: 2262316
cauguucuaggcaucaagg

SEQ ID NO: 2262318 - RNA, 19 nt, Artificial Sequence
  Description of Artificial Sequence: Synthetic oligonucleotide
  Sense strand starting at position 399 of SEQ ID NO: 1884395
aaagucuugcaagaaguaa

SEQ ID NO: 2262319 - RNA, 19 nt, Artificial Sequence
  Description of Artificial Sequence: Synthetic oligonucleotide
  Antisense strand to SEQ ID NO: 2262318
uuacuucuugcaagacuuu

SEQ ID NO: 2262320 - RNA, 19 nt, Artificial Sequence
  Description of Artificial Sequence: Synthetic oligonucleotide
  Sense strand starting at position 441 of SEQ ID NO: 1884395
cauuauaagcuauagaggu

SEQ ID NO: 2262321 - RNA, 19 nt, Artificial Sequence
  Description of Artificial Sequence: Synthetic oligonucleotide
  Antisense strand to SEQ ID NO: 2262320
accucuauagcuuauaaug

SEQ ID NO: 2262322 - RNA, 19 nt, Artificial Sequence
  Description of Artificial Sequence: Synthetic oligonucleotide
  Sense strand starting at position 445 of SEQ ID NO: 1884395
auaagcuauagagguaaga

SEQ ID NO: 2262323 - RNA, 19 nt, Artificial Sequence
  Description of Artificial Sequence: Synthetic oligonucleotide
  Antisense strand to SEQ ID NO: 2262322
ucuuaccucuauagcuuau

SEQ ID NO: 2262324 - RNA, 19 nt, Artificial Sequence
  Description of Artificial Sequence: Synthetic oligonucleotide
  Sense strand starting at position 469 of SEQ ID NO: 1884395
ccacucauguaugcugaga

SEQ ID NO: 2262325 - RNA, 19 nt, Artificial Sequence
  Description of Artificial Sequence: Synthetic oligonucleotide
  Antisense strand to SEQ ID NO: 2262324
ucucagcauacaugagugg

SEQ ID NO: 2262326 - RNA, 19 nt, Artificial Sequence
  Description of Artificial Sequence: Synthetic oligonucleotide
  Sense strand starting at position 502 of SEQ ID NO: 1884395
agggcuuggccuuagauaa

SEQ ID NO: 2262327 - RNA, 19 nt, Artificial Sequence
  Description of Artificial Sequence: Synthetic oligonucleotide
  Antisense strand to SEQ ID NO: 2262326
uuaucuaaggccaagcccu

SEQ ID NO: 2262328 - RNA, 19 nt, Artificial Sequence
  Description of Artificial Sequence: Synthetic oligonucleotide
  Sense strand starting at position 788 of SEQ ID NO: 1884395
uagaccagauuguuuguua

SEQ ID NO: 2262329 - RNA, 19 nt, Artificial Sequence
  Description of Artificial Sequence: Synthetic oligonucleotide
  Antisense strand to SEQ ID NO: 2262328
uaacaaacaaucuggucua

SEQ ID NO: 2262330 - RNA, 19 nt, Artificial Sequence
  Description of Artificial Sequence: Synthetic oligonucleotide
  Sense strand starting at position 789 of SEQ ID NO: 1884395
agaccagauuguuuguuau

SEQ ID NO: 2262331 - RNA, 19 nt, Artificial Sequence
  Description of Artificial Sequence: Synthetic oligonucleotide
  Antisense strand to SEQ ID NO: 2262330
auaacaaacaaucuggucu

SEQ ID NO: 2262332 - RNA, 19 nt, Artificial Sequence
  Description of Artificial Sequence: Synthetic oligonucleotide
  Sense strand starting at position 1074 of SEQ ID NO: 1884395
gcucauuaaugguugaaag

SEQ ID NO: 2262333 - RNA, 19 nt, Artificial Sequence
  Description of Artificial Sequence: Synthetic oligonucleotide
  Antisense strand to SEQ ID NO: 2262332
cuuucaaccauuaaugagc

SEQ ID NO: 2262334 - RNA, 19 nt, Artificial Sequence
  Description of Artificial Sequence: Synthetic oligonucleotide
  Sense strand starting at position 1143 of SEQ ID NO: 1884395
uuuagaauguuagccaaau

SEQ ID NO: 2262335 - RNA, 19 nt, Artificial Sequence
  Description of Artificial Sequence: Synthetic oligonucleotide
  Antisense strand to SEQ ID NO: 2262334
auuuggcuaacauucuaaa

SEQ ID NO: 2262336 - RNA, 19 nt, Artificial Sequence
  Description of Artificial Sequence: Synthetic oligonucleotide
  Sense strand starting at position 1144 of SEQ ID NO: 1884395
uuagaauguuagccaaaua

SEQ ID NO: 2262337 - RNA, 19 nt, Artificial Sequence
  Description of Artificial Sequence: Synthetic oligonucleotide
  Antisense strand to SEQ ID NO: 2262336
uauuuggcuaacauucuaa

SEQ ID NO: 2262338 - RNA, 19 nt, Artificial Sequence
  Description of Artificial Sequence: Synthetic oligonucleotide
  Sense strand starting at position 1149 of SEQ ID NO: 1884395
auguuagccaaauaggagu

SEQ ID NO: 2262339 - RNA, 19 nt, Artificial Sequence
  Description of Artificial Sequence: Synthetic oligonucleotide
  Antisense strand to SEQ ID NO: 2262338
acuccuauuuggcuaacau

SEQ ID NO: 2262340 - RNA, 19 nt, Artificial Sequence
  Description of Artificial Sequence: Synthetic oligonucleotide
  Sense strand starting at position 1256 of SEQ ID NO: 1884395
aucagucuggcugauggaa

SEQ ID NO: 2262341 - RNA, 19 nt, Artificial Sequence
  Description of Artificial Sequence: Synthetic oligonucleotide
  Antisense strand to SEQ ID NO: 2262340
uuccaucagccagacugau

SEQ ID NO: 2262342 - RNA, 19 nt, Artificial Sequence
  Description of Artificial Sequence: Synthetic oligonucleotide
  Sense strand starting at position 1316 of SEQ ID NO: 1884395
caguacugucaugaagagu

SEQ ID NO: 2262343 - RNA, 19 nt, Artificial Sequence
  Description of Artificial Sequence: Synthetic oligonucleotide
  Antisense strand to SEQ ID NO: 2262342
acucuucaugacaguacug

SEQ ID NO: 2262344 - RNA, 19 nt, Artificial Sequence
  Description of Artificial Sequence: Synthetic oligonucleotide
  Sense strand starting at position 1442 of SEQ ID NO: 1884395
ucagguaugcaggaguuga

SEQ ID NO: 2262345 - RNA, 19 nt, Artificial Sequence
  Description of Artificial Sequence: Synthetic oligonucleotide
  Antisense strand to SEQ ID NO: 2262344
ucaacuccugcauaccuga

SEQ ID NO: 2262346 - RNA, 19 nt, Artificial Sequence
  Description of Artificial Sequence: Synthetic oligonucleotide
  Sense strand starting at position 1634 of SEQ ID NO: 1884395
gaauuccuguuggccauaa

SEQ ID NO: 2262347 - RNA, 19 nt, Artificial Sequence
  Description of Artificial Sequence: Synthetic oligonucleotide
  Antisense strand to SEQ ID NO: 2262346
uuauggccaacaggaauuc

SEQ ID NO: 2262348 - RNA, 19 nt, Artificial Sequence
  Description of Artificial Sequence: Synthetic oligonucleotide
  Sense strand starting at position 1772 of SEQ ID NO: 1884395
gggagccagcgagaauuaa

SEQ ID NO: 2262349 - RNA, 19 nt, Artificial Sequence
  Description of Artificial Sequence: Synthetic oligonucleotide
  Antisense strand to SEQ ID NO: 2262348
uuaauucucgcuggcuccc

SEQ ID NO: 2262350 - RNA, 19 nt, Artificial Sequence
  Description of Artificial Sequence: Synthetic oligonucleotide
  Sense strand starting at position 1960 of SEQ ID NO: 1884395
cgaaguugugggcagaaga

SEQ ID NO: 2262351 - RNA, 19 nt, Artificial Sequence
  Description of Artificial Sequence: Synthetic oligonucleotide
  Antisense strand to SEQ ID NO: 2262350
ucuucugcccacaacuucg

SEQ ID NO: 2262352 - RNA, 19 nt, Artificial Sequence
  Description of Artificial Sequence: Synthetic oligonucleotide
  Sense strand starting at position 2314 of SEQ ID NO: 1884395
uagggaguugucuaccaga

SEQ ID NO: 2262353 - RNA, 19 nt, Artificial Sequence
  Description of Artificial Sequence: Synthetic oligonucleotide
  Antisense strand to SEQ ID NO: 2262352
ucugguagacaacucccua

SEQ ID NO: 2262354 - RNA, 19 nt, Artificial Sequence
  Description of Artificial Sequence: Synthetic oligonucleotide
  Sense strand starting at position 2319 of SEQ ID NO: 1884395
aguugucuaccagagauug

SEQ ID NO: 2262355 - RNA, 19 nt, Artificial Sequence
  Description of Artificial Sequence: Synthetic oligonucleotide
  Antisense strand to SEQ ID NO: 2262354
caaucucugguagacaacu

SEQ ID NO: 2262356 - RNA, 19 nt, Artificial Sequence
  Description of Artificial Sequence: Synthetic oligonucleotide
  Sense strand starting at position 2404 of SEQ ID NO: 1884395
agggaaagcaugugugaga

SEQ ID NO: 2262357 - RNA, 19 nt, Artificial Sequence
  Description of Artificial Sequence: Synthetic oligonucleotide
  Antisense strand to SEQ ID NO: 2262356
ucucacacaugcuuucccu

SEQ ID NO: 2262358 - RNA, 19 nt, Artificial Sequence
  Description of Artificial Sequence: Synthetic oligonucleotide
  Sense strand starting at position 2405 of SEQ ID NO: 1884395
gggaaagcaugugugagaa

SEQ ID NO: 2262359 - RNA, 19 nt, Artificial Sequence
  Description of Artificial Sequence: Synthetic oligonucleotide
  Antisense strand to SEQ ID NO: 2262358
uucucacacaugcuuuccc

SEQ ID NO: 2262360 - RNA, 19 nt, Artificial Sequence
  Description of Artificial Sequence: Synthetic oligonucleotide
  Sense strand starting at position 2434 of SEQ ID NO: 1884395
gcgguugcuagccuuggaa

SEQ ID NO: 2262361 - RNA, 19 nt, Artificial Sequence
  Description of Artificial Sequence: Synthetic oligonucleotide
  Antisense strand to SEQ ID NO: 2262360
uuccaaggcuagcaaccgc

SEQ ID NO: 2262362 - RNA, 19 nt, Artificial Sequence
  Description of Artificial Sequence: Synthetic oligonucleotide
  Sense strand starting at position 2488 of SEQ ID NO: 1884395
aggagugucuaauuaauca

SEQ ID NO: 2262363 - RNA, 19 nt, Artificial Sequence
  Description of Artificial Sequence: Synthetic oligonucleotide
  Antisense strand to SEQ ID NO: 2262362
ugauuaauuagacacuccu

SEQ ID NO: 2262364 - RNA, 19 nt, Artificial Sequence
  Description of Artificial Sequence: Synthetic oligonucleotide
  Sense strand starting at position 2606 of SEQ ID NO: 1884395
uccaaagagcccuguaauu

SEQ ID NO: 2262365 - RNA, 19 nt, Artificial Sequence
  Description of Artificial Sequence: Synthetic oligonucleotide
  Antisense strand to SEQ ID NO: 2262364
aauuacagggcucuuugga

SEQ ID NO: 2262366 - RNA, 19 nt, Artificial Sequence
  Description of Artificial Sequence: Synthetic oligonucleotide
  Sense strand starting at position 2608 of SEQ ID NO: 1884395
caaagagcccuguaauugu

SEQ ID NO: 2262367 - RNA, 19 nt, Artificial Sequence
  Description of Artificial Sequence: Synthetic oligonucleotide
  Antisense strand to SEQ ID NO: 2262366
acaauuacagggcucuuug

SEQ ID NO: 2262368 - RNA, 19 nt, Artificial Sequence
  Description of Artificial Sequence: Synthetic oligonucleotide
  Sense strand starting at position 2724 of SEQ ID NO: 1884395
ggaggaaucagucagcgug

SEQ ID NO: 2262369 - RNA, 19 nt, Artificial Sequence
  Description of Artificial Sequence: Synthetic oligonucleotide
  Antisense strand to SEQ ID NO: 2262368
cacgcugacugauuccucc

SEQ ID NO: 2262370 - RNA, 19 nt, Artificial Sequence
  Description of Artificial Sequence: Synthetic oligonucleotide
  Sense strand starting at position 3087 of SEQ ID NO: 1884395
ggugcuuggcuagagaaag

SEQ ID NO: 2262371 - RNA, 19 nt, Artificial Sequence
  Description of Artificial Sequence: Synthetic oligonucleotide
  Antisense strand to SEQ ID NO: 2262370
cuuucucuagccaagcacc

SEQ ID NO: 2262372 - RNA, 19 nt, Artificial Sequence
  Description of Artificial Sequence: Synthetic oligonucleotide
  Sense strand starting at position 3295 of SEQ ID NO: 1884395
gagggagcuuuguuugaug

SEQ ID NO: 2262373 - RNA, 19 nt, Artificial Sequence
  Description of Artificial Sequence: Synthetic oligonucleotide
  Antisense strand to SEQ ID NO: 2262372
caucaaacaaagcucccuc

SEQ ID NO: 2262374 - RNA, 19 nt, Artificial Sequence
  Description of Artificial Sequence: Synthetic oligonucleotide
  Sense strand starting at position 3367 of SEQ ID NO: 1884395
uaaacagcuguugaguuaa

SEQ ID NO: 2262375 - RNA, 19 nt, Artificial Sequence
  Description of Artificial Sequence: Synthetic oligonucleotide
  Antisense strand to SEQ ID NO: 2262374
uuaacucaacagcuguuua

SEQ ID NO: 2262376 - RNA, 19 nt, Artificial Sequence
  Description of Artificial Sequence: Synthetic oligonucleotide
  Sense strand starting at position 3375 of SEQ ID NO: 1884395
uguugaguuaaucaacgga

SEQ ID NO: 2262377 - RNA, 19 nt, Artificial Sequence
  Description of Artificial Sequence: Synthetic oligonucleotide
  Antisense strand to SEQ ID NO: 2262376
uccguugauuaacucaaca

SEQ ID NO: 2262378 - RNA, 19 nt, Artificial Sequence
  Description of Artificial Sequence: Synthetic oligonucleotide
  Sense strand starting at position 3536 of SEQ ID NO: 1884395
cucccugcucguguuuaca

SEQ ID NO: 2262379 - RNA, 19 nt, Artificial Sequence
  Description of Artificial Sequence: Synthetic oligonucleotide
  Antisense strand to SEQ ID NO: 2262378
uguaaacacgagcagggag

SEQ ID NO: 2262380 - RNA, 19 nt, Artificial Sequence
  Description of Artificial Sequence: Synthetic oligonucleotide
  Sense strand starting at position 3836 of SEQ ID NO: 1884395
aguucuggagcacaugaua

SEQ ID NO: 2262381 - RNA, 19 nt, Artificial Sequence
  Description of Artificial Sequence: Synthetic oligonucleotide
  Antisense strand to SEQ ID NO: 2262380
uaucaugugcuccagaacu

SEQ ID NO: 2262382 - RNA, 19 nt, Artificial Sequence
  Description of Artificial Sequence: Synthetic oligonucleotide
  Sense strand starting at position 3871 of SEQ ID NO: 1884395
ucguuucgucuccugacua

SEQ ID NO: 2262383 - RNA, 19 nt, Artificial Sequence
  Description of Artificial Sequence: Synthetic oligonucleotide
  Antisense strand to SEQ ID NO: 2262382
uagucaggagacgaaacga

SEQ ID NO: 2262384 - RNA, 19 nt, Artificial Sequence
  Description of Artificial Sequence: Synthetic oligonucleotide
  Sense strand starting at position 161 of SEQ ID NO: 1884396
cgucauggcagacaggauu

SEQ ID NO: 2262385 - RNA, 19 nt, Artificial Sequence
  Description of Artificial Sequence: Synthetic oligonucleotide
  Antisense strand to SEQ ID NO: 2262384
aauccugucugccaugacg

SEQ ID NO: 2262386 - RNA, 19 nt, Artificial Sequence
  Description of Artificial Sequence: Synthetic oligonucleotide
  Sense strand starting at position 185 of SEQ ID NO: 1884396
ccuuguucccgcgagugau

SEQ ID NO: 2262387 - RNA, 19 nt, Artificial Sequence
  Description of Artificial Sequence: Synthetic oligonucleotide
  Antisense strand to SEQ ID NO: 2262386
aucacucgcgggaacaagg

SEQ ID NO: 2262388 - RNA, 19 nt, Artificial Sequence
  Description of Artificial Sequence: Synthetic oligonucleotide
  Sense strand starting at position 391 of SEQ ID NO: 1884396
caguguggccuccagcauu

SEQ ID NO: 2262389 - RNA, 19 nt, Artificial Sequence
  Description of Artificial Sequence: Synthetic oligonucleotide
  Antisense strand to SEQ ID NO: 2262388
aaugcuggaggccacacug

SEQ ID NO: 2262390 - RNA, 19 nt, Artificial Sequence
  Description of Artificial Sequence: Synthetic oligonucleotide
  Sense strand starting at position 835 of SEQ ID NO: 1884396
cugggccuuccuggaagau

SEQ ID NO: 2262391 - RNA, 19 nt, Artificial Sequence
  Description of Artificial Sequence: Synthetic oligonucleotide
  Antisense strand to SEQ ID NO: 2262390
aucuuccaggaaggcccag

SEQ ID NO: 2262392 - RNA, 19 nt, Artificial Sequence
  Description of Artificial Sequence: Synthetic oligonucleotide
  Sense strand starting at position 1007 of SEQ ID NO: 1884396
gugucuucucuggagcaag

SEQ ID NO: 2262393 - RNA, 19 nt, Artificial Sequence
  Description of Artificial Sequence: Synthetic oligonucleotide
  Antisense strand to SEQ ID NO: 2262392
cuugcuccagagaagacac

SEQ ID NO: 2262394 - RNA, 19 nt, Artificial Sequence
  Description of Artificial Sequence: Synthetic oligonucleotide
  Sense strand starting at position 1018 of SEQ ID NO: 1884396
ggagcaagcucaguucuga

SEQ ID NO: 2262395 - RNA, 19 nt, Artificial Sequence
  Description of Artificial Sequence: Synthetic oligonucleotide
  Antisense strand to SEQ ID NO: 2262394
ucagaacugagcuugcucc

SEQ ID NO: 2262396 - RNA, 19 nt, Artificial Sequence
  Description of Artificial Sequence: Synthetic oligonucleotide
  Sense strand starting at position 1232 of SEQ ID NO: 1884396
gcccacagcuagcuaauau

SEQ ID NO: 2262397 - RNA, 19 nt, Artificial Sequence
  Description of Artificial Sequence: Synthetic oligonucleotide
  Antisense strand to SEQ ID NO: 2262396
auauuagcuagcugugggc

SEQ ID NO: 2262398 - RNA, 19 nt, Artificial Sequence
  Description of Artificial Sequence: Synthetic oligonucleotide
  Sense strand starting at position 1242 of SEQ ID NO: 1884396
agcuaauaucuagggcuga

SEQ ID NO: 2262399 - RNA, 19 nt, Artificial Sequence
  Description of Artificial Sequence: Synthetic oligonucleotide
  Antisense strand to SEQ ID NO: 2262398
ucagcccuagauauuagcu

SEQ ID NO: 2262400 - RNA, 19 nt, Artificial Sequence
  Description of Artificial Sequence: Synthetic oligonucleotide
  Sense strand starting at position 1301 of SEQ ID NO: 1884396
aggauuucuucccaaagcu

SEQ ID NO: 2262401 - RNA, 19 nt, Artificial Sequence
  Description of Artificial Sequence: Synthetic oligonucleotide
  Antisense strand to SEQ ID NO: 2262400
agcuuugggaagaaauccu

SEQ ID NO: 2262402 - RNA, 19 nt, Artificial Sequence
  Description of Artificial Sequence: Synthetic oligonucleotide
  Sense strand starting at position 1384 of SEQ ID NO: 1884396
ugcagugacccacaguuau

SEQ ID NO: 2262403 - RNA, 19 nt, Artificial Sequence
  Description of Artificial Sequence: Synthetic oligonucleotide
  Antisense strand to SEQ ID NO: 2262402
auaacugugggucacugca

SEQ ID NO: 2262404 - RNA, 19 nt, Artificial Sequence
  Description of Artificial Sequence: Synthetic oligonucleotide
  Sense strand starting at position 1391 of SEQ ID NO: 1884396
acccacaguuaucauggaa

SEQ ID NO: 2262405 - RNA, 19 nt, Artificial Sequence
  Description of Artificial Sequence: Synthetic oligonucleotide
  Antisense strand to SEQ ID NO: 2262404
uuccaugauaacugugggu

SEQ ID NO: 2262406 - RNA, 19 nt, Artificial Sequence
  Description of Artificial Sequence: Synthetic oligonucleotide
  Sense strand starting at position 1411 of SEQ ID NO: 1884396
cuccauaccugagguaaga

SEQ ID NO: 2262407 - RNA, 19 nt, Artificial Sequence
  Description of Artificial Sequence: Synthetic oligonucleotide
  Antisense strand to SEQ ID NO: 2262406
ucuuaccucagguauggag

SEQ ID NO: 2262408 - RNA, 19 nt, Artificial Sequence
  Description of Artificial Sequence: Synthetic oligonucleotide
  Sense strand starting at position 1514 of SEQ ID NO: 1884396
ccugccugucugugguuaa

SEQ ID NO: 2262409 - RNA, 19 nt, Artificial Sequence
  Description of Artificial Sequence: Synthetic oligonucleotide
  Antisense strand to SEQ ID NO: 2262408
uuaaccacagacaggcagg

SEQ ID NO: 2262410 - RNA, 19 nt, Artificial Sequence
  Description of Artificial Sequence: Synthetic oligonucleotide
  Sense strand starting at position 1517 of SEQ ID NO: 1884396
gccugucugugguuaagaa

SEQ ID NO: 2262411 - RNA, 19 nt, Artificial Sequence
  Description of Artificial Sequence: Synthetic oligonucleotide
  Antisense strand to SEQ ID NO: 2262410
uucuuaaccacagacaggc

SEQ ID NO: 2262412 - RNA, 19 nt, Artificial Sequence
  Description of Artificial Sequence: Synthetic oligonucleotide
  Sense strand starting at position 1518 of SEQ ID NO: 1884396
ccugucugugguuaagaaa

SEQ ID NO: 2262413 - RNA, 19 nt, Artificial Sequence
  Description of Artificial Sequence: Synthetic oligonucleotide
  Antisense strand to SEQ ID NO: 2262412
uuucuuaaccacagacagg

SEQ ID NO: 2262414 - RNA, 19 nt, Artificial Sequence
  Description of Artificial Sequence: Synthetic oligonucleotide
  Sense strand starting at position 1547 of SEQ ID NO: 1884396
uugagaugccuccaggauc

SEQ ID NO: 2262415 - RNA, 19 nt, Artificial Sequence
  Description of Artificial Sequence: Synthetic oligonucleotide
  Antisense strand to SEQ ID NO: 2262414
gauccuggaggcaucucaa

SEQ ID NO: 2262416 - RNA, 19 nt, Artificial Sequence
  Description of Artificial Sequence: Synthetic oligonucleotide
  Sense strand starting at position 2018 of SEQ ID NO: 1884396
gccaaugccugcucuucua

SEQ ID NO: 2262417 - RNA, 19 nt, Artificial Sequence
  Description of Artificial Sequence: Synthetic oligonucleotide
  Antisense strand to SEQ ID NO: 2262416
uagaagagcaggcauuggc

SEQ ID NO: 2262418 - RNA, 19 nt, Artificial Sequence
  Description of Artificial Sequence: Synthetic oligonucleotide
  Sense strand starting at position 2131 of SEQ ID NO: 1884396
ucuggugucugggacaaau

SEQ ID NO: 2262419 - RNA, 19 nt, Artificial Sequence
  Description of Artificial Sequence: Synthetic oligonucleotide
  Antisense strand to SEQ ID NO: 2262418
auuugucccagacaccaga

SEQ ID NO: 2262420 - RNA, 19 nt, Artificial Sequence
  Description of Artificial Sequence: Synthetic oligonucleotide
  Sense strand starting at position 2133 of SEQ ID NO: 1884396
uggugucugggacaaauau

SEQ ID NO: 2262421 - RNA, 19 nt, Artificial Sequence
  Description of Artificial Sequence: Synthetic oligonucleotide
  Antisense strand to SEQ ID NO: 2262420
auauuugucccagacacca

SEQ ID NO: 2262422 - RNA, 19 nt, Artificial Sequence
  Description of Artificial Sequence: Synthetic oligonucleotide
  Sense strand starting at position 2164 of SEQ ID NO: 1884396
uguuaaguccagugagguc

SEQ ID NO: 2262423 - RNA, 19 nt, Artificial Sequence
  Description of Artificial Sequence: Synthetic oligonucleotide
  Antisense strand to SEQ ID NO: 2262422
gaccucacuggacuuaaca

SEQ ID NO: 2262424 - RNA, 19 nt, Artificial Sequence
  Description of Artificial Sequence: Synthetic oligonucleotide
  Sense strand starting at position 2639 of SEQ ID NO: 1884396
cuagaagauucucugccuu

SEQ ID NO: 2262425 - RNA, 19 nt, Artificial Sequence
  Description of Artificial Sequence: Synthetic oligonucleotide
  Antisense strand to SEQ ID NO: 2262424
aaggcagagaaucuucuag

SEQ ID NO: 2262426 - RNA, 19 nt, Artificial Sequence
  Description of Artificial Sequence: Synthetic oligonucleotide
  Sense strand starting at position 2917 of SEQ ID NO: 1884396
guccucuucuccuuccaga

SEQ ID NO: 2262427 - RNA, 19 nt, Artificial Sequence
  Description of Artificial Sequence: Synthetic oligonucleotide
  Antisense strand to SEQ ID NO: 2262426
ucuggaaggagaagaggac

SEQ ID NO: 2262428 - RNA, 19 nt, Artificial Sequence
  Description of Artificial Sequence: Synthetic oligonucleotide
  Sense strand starting at position 2949 of SEQ ID NO: 1884396
uuucuagugccugaaacau

SEQ ID NO: 2262429 - RNA, 19 nt, Artificial Sequence
  Description of Artificial Sequence: Synthetic oligonucleotide
  Antisense strand to SEQ ID NO: 2262428
auguuucaggcacuagaaa

SEQ ID NO: 2262430 - RNA, 19 nt, Artificial Sequence
  Description of Artificial Sequence: Synthetic oligonucleotide
  Sense strand starting at position 3008 of SEQ ID NO: 1884396
ugagguguccuuugugaaa

SEQ ID NO: 2262431 - RNA, 19 nt, Artificial Sequence
  Description of Artificial Sequence: Synthetic oligonucleotide
  Antisense strand to SEQ ID NO: 2262430
uuucacaaaggacaccuca

SEQ ID NO: 2262432 - RNA, 19 nt, Artificial Sequence
  Description of Artificial Sequence: Synthetic oligonucleotide
  Sense strand starting at position 3033 of SEQ ID NO: 1884396
cuguaaguguccuugggag

SEQ ID NO: 2262433 - RNA, 19 nt, Artificial Sequence
  Description of Artificial Sequence: Synthetic oligonucleotide
  Antisense strand to SEQ ID NO: 2262432
cucccaaggacacuuacag

SEQ ID NO: 2262434 - RNA, 19 nt, Artificial Sequence
  Description of Artificial Sequence: Synthetic oligonucleotide
  Sense strand starting at position 3060 of SEQ ID NO: 1884396
gucaccugaaguugugaca

SEQ ID NO: 2262435 - RNA, 19 nt, Artificial Sequence
  Description of Artificial Sequence: Synthetic oligonucleotide
  Antisense strand to SEQ ID NO: 2262434
ugucacaacuucaggugac

SEQ ID NO: 2262436 - RNA, 19 nt, Artificial Sequence
  Description of Artificial Sequence: Synthetic oligonucleotide
  Sense strand starting at position 3063 of SEQ ID NO: 1884396
accugaaguugugacaucu

SEQ ID NO: 2262437 - RNA, 19 nt, Artificial Sequence
  Description of Artificial Sequence: Synthetic oligonucleotide
  Antisense strand to SEQ ID NO: 2262436
agaugucacaacuucaggu

SEQ ID NO: 2262438 - RNA, 19 nt, Artificial Sequence
  Description of Artificial Sequence: Synthetic oligonucleotide
  Sense strand starting at position 3086 of SEQ ID NO: 1884396
gcucccuugggacaucauu

SEQ ID NO: 2262439 - RNA, 19 nt, Artificial Sequence
  Description of Artificial Sequence: Synthetic oligonucleotide
  Antisense strand to SEQ ID NO: 2262438
aaugaugucccaagggagc

SEQ ID NO: 2262440 - RNA, 19 nt, Artificial Sequence
  Description of Artificial Sequence: Synthetic oligonucleotide
  Sense strand starting at position 3192 of SEQ ID NO: 1884396
cccaguggccauuagaaga

SEQ ID NO: 2262441 - RNA, 19 nt, Artificial Sequence
  Description of Artificial Sequence: Synthetic oligonucleotide
  Antisense strand to SEQ ID NO: 2262440
ucuucuaauggccacuggg

SEQ ID NO: 2262442 - RNA, 19 nt, Artificial Sequence
  Description of Artificial Sequence: Synthetic oligonucleotide
  Sense strand starting at position 3216 of SEQ ID NO: 1884396
cugccagguucugugugua

SEQ ID NO: 2262443 - RNA, 19 nt, Artificial Sequence
  Description of Artificial Sequence: Synthetic oligonucleotide
  Antisense strand to SEQ ID NO: 2262442
uacacacagaaccuggcag

SEQ ID NO: 2262444 - RNA, 19 nt, Artificial Sequence
  Description of Artificial Sequence: Synthetic oligonucleotide
  Sense strand starting at position 3221 of SEQ ID NO: 1884396
agguucuguguguacucau

SEQ ID NO: 2262445 - RNA, 19 nt, Artificial Sequence
  Description of Artificial Sequence: Synthetic oligonucleotide
  Antisense strand to SEQ ID NO: 2262444
augaguacacacagaaccu

SEQ ID NO: 2262446 - RNA, 19 nt, Artificial Sequence
  Description of Artificial Sequence: Synthetic oligonucleotide
  Sense strand starting at position 3347 of SEQ ID NO: 1884396
gucuguuucuuggcugagu

SEQ ID NO: 2262447 - RNA, 19 nt, Artificial Sequence
  Description of Artificial Sequence: Synthetic oligonucleotide
  Antisense strand to SEQ ID NO: 2262446
acucagccaagaaacagac

SEQ ID NO: 2262448 - RNA, 19 nt, Artificial Sequence
  Description of Artificial Sequence: Synthetic oligonucleotide
  Sense strand starting at position 3349 of SEQ ID NO: 1884396
cuguuucuuggcugagugu

SEQ ID NO: 2262449 - RNA, 19 nt, Artificial Sequence
  Description of Artificial Sequence: Synthetic oligonucleotide
  Antisense strand to SEQ ID NO: 2262448
acacucagccaagaaacag

SEQ ID NO: 2262450 - RNA, 19 nt, Artificial Sequence
  Description of Artificial Sequence: Synthetic oligonucleotide
  Sense strand starting at position 3350 of SEQ ID NO: 1884396
uguuucuuggcugaguguu

SEQ ID NO: 2262451 - RNA, 19 nt, Artificial Sequence
  Description of Artificial Sequence: Synthetic oligonucleotide
  Antisense strand to SEQ ID NO: 2262450
aacacucagccaagaaaca

SEQ ID NO: 2262452 - RNA, 19 nt, Artificial Sequence
  Description of Artificial Sequence: Synthetic oligonucleotide
  Sense strand starting at position 3545 of SEQ ID NO: 1884396
gugugaggucguggaguga

SEQ ID NO: 2262453 - RNA, 19 nt, Artificial Sequence
  Description of Artificial Sequence: Synthetic oligonucleotide
  Antisense strand to SEQ ID NO: 2262452
ucacuccacgaccucacac

SEQ ID NO: 2262454 - RNA, 19 nt, Artificial Sequence
  Description of Artificial Sequence: Synthetic oligonucleotide
  Sense strand starting at position 3640 of SEQ ID NO: 1884396
cuuugaagcgccugagaca

SEQ ID NO: 2262455 - RNA, 19 nt, Artificial Sequence
  Description of Artificial Sequence: Synthetic oligonucleotide
  Antisense strand to SEQ ID NO: 2262454
ugucucaggcgcuucaaag

SEQ ID NO: 2262456 - RNA, 19 nt, Artificial Sequence
  Description of Artificial Sequence: Synthetic oligonucleotide
  Sense strand starting at position 3749 of SEQ ID NO: 1884396
cuugguuuauugucagcuu

SEQ ID NO: 2262457 - RNA, 19 nt, Artificial Sequence
  Description of Artificial Sequence: Synthetic oligonucleotide
  Antisense strand to SEQ ID NO: 2262456
aagcugacaauaaaccaag

SEQ ID NO: 2262458 - RNA, 19 nt, Artificial Sequence
  Description of Artificial Sequence: Synthetic oligonucleotide
  Sense strand starting at position 3752 of SEQ ID NO: 1884396
gguuuauugucagcuuccu

SEQ ID NO: 2262459 - RNA, 19 nt, Artificial Sequence
  Description of Artificial Sequence: Synthetic oligonucleotide
  Antisense strand to SEQ ID NO: 2262458
aggaagcugacaauaaacc

SEQ ID NO: 2262460 - RNA, 19 nt, Artificial Sequence
  Description of Artificial Sequence: Synthetic oligonucleotide
  Sense strand starting at position 3761 of SEQ ID NO: 1884396
ucagcuuccuugccagaaa

SEQ ID NO: 2262461 - RNA, 19 nt, Artificial Sequence
  Description of Artificial Sequence: Synthetic oligonucleotide
  Antisense strand to SEQ ID NO: 2262460
uuucuggcaaggaagcuga

SEQ ID NO: 2262462 - RNA, 19 nt, Artificial Sequence
  Description of Artificial Sequence: Synthetic oligonucleotide
  Sense strand starting at position 3764 of SEQ ID NO: 1884396
gcuuccuugccagaaauau

SEQ ID NO: 2262463 - RNA, 19 nt, Artificial Sequence
  Description of Artificial Sequence: Synthetic oligonucleotide
  Antisense strand to SEQ ID NO: 2262462
auauuucuggcaaggaagc

SEQ ID NO: 2262464 - RNA, 19 nt, Artificial Sequence
  Description of Artificial Sequence: Synthetic oligonucleotide
  Sense strand starting at position 360 of SEQ ID NO: 1884397
uaguuuauugcugucugca

SEQ ID NO: 2262465 - RNA, 19 nt, Artificial Sequence
  Description of Artificial Sequence: Synthetic oligonucleotide
  Antisense strand to SEQ ID NO: 2262464
ugcagacagcaauaaacua

SEQ ID NO: 2262466 - RNA, 19 nt, Artificial Sequence
  Description of Artificial Sequence: Synthetic oligonucleotide
  Sense strand starting at position 361 of SEQ ID NO: 1884397
aguuuauugcugucugcau

SEQ ID NO: 2262467 - RNA, 19 nt, Artificial Sequence
  Description of Artificial Sequence: Synthetic oligonucleotide
  Antisense strand to SEQ ID NO: 2262466
augcagacagcaauaaacu

SEQ ID NO: 2262468 - RNA, 19 nt, Artificial Sequence
  Description of Artificial Sequence: Synthetic oligonucleotide
  Sense strand starting at position 411 of SEQ ID NO: 1884397
agcaauagguaauugaagu

SEQ ID NO: 2262469 - RNA, 19 nt, Artificial Sequence
  Description of Artificial Sequence: Synthetic oligonucleotide
  Antisense strand to SEQ ID NO: 2262468
acuucaauuaccuauugcu

SEQ ID NO: 2262470 - RNA, 19 nt, Artificial Sequence
  Description of Artificial Sequence: Synthetic oligonucleotide
  Sense strand starting at position 412 of SEQ ID NO: 1884397
gcaauagguaauugaagua

SEQ ID NO: 2262471 - RNA, 19 nt, Artificial Sequence
  Description of Artificial Sequence: Synthetic oligonucleotide
  Antisense strand to SEQ ID NO: 2262470
uacuucaauuaccuauugc

SEQ ID NO: 2262472 - RNA, 19 nt, Artificial Sequence
  Description of Artificial Sequence: Synthetic oligonucleotide
  Sense strand starting at position 642 of SEQ ID NO: 1884397
auauaucuaguggguugaa

SEQ ID NO: 2262473 - RNA, 19 nt, Artificial Sequence
  Description of Artificial Sequence: Synthetic oligonucleotide
  Antisense strand to SEQ ID NO: 2262472
uucaacccacuagauauau

SEQ ID NO: 2262474 - RNA, 19 nt, Artificial Sequence
  Description of Artificial Sequence: Synthetic oligonucleotide
  Sense strand starting at position 693 of SEQ ID NO: 1884397
auuuacgguagcugugaau

SEQ ID NO: 2262475 - RNA, 19 nt, Artificial Sequence
  Description of Artificial Sequence: Synthetic oligonucleotide
  Antisense strand to SEQ ID NO: 2262474
auucacagcuaccguaaau

SEQ ID NO: 2262476 - RNA, 19 nt, Artificial Sequence
  Description of Artificial Sequence: Synthetic oligonucleotide
  Sense strand starting at position 753 of SEQ ID NO: 1884397
gcuaaauaauuugagauga

SEQ ID NO: 2262477 - RNA, 19 nt, Artificial Sequence
  Description of Artificial Sequence: Synthetic oligonucleotide
  Antisense strand to SEQ ID NO: 2262476
ucaucucaaauuauuuagc

SEQ ID NO: 2262478 - RNA, 19 nt, Artificial Sequence
  Description of Artificial Sequence: Synthetic oligonucleotide
  Sense strand starting at position 786 of SEQ ID NO: 1884397
uagaguaggcccuaaauua

SEQ ID NO: 2262479 - RNA, 19 nt, Artificial Sequence
  Description of Artificial Sequence: Synthetic oligonucleotide
  Antisense strand to SEQ ID NO: 2262478
uaauuuagggccuacucua

SEQ ID NO: 2262480 - RNA, 19 nt, Artificial Sequence
  Description of Artificial Sequence: Synthetic oligonucleotide
  Sense strand starting at position 1251 of SEQ ID NO: 1884397
auugaaacucagugcauaa

SEQ ID NO: 2262481 - RNA, 19 nt, Artificial Sequence
  Description of Artificial Sequence: Synthetic oligonucleotide
  Antisense strand to SEQ ID NO: 2262480
uuaugcacugaguuucaau

SEQ ID NO: 2262482 - RNA, 19 nt, Artificial Sequence
  Description of Artificial Sequence: Synthetic oligonucleotide
  Sense strand starting at position 1399 of SEQ ID NO: 1884397
agauaaagauguuucuuag

SEQ ID NO: 2262483 - RNA, 19 nt, Artificial Sequence
  Description of Artificial Sequence: Synthetic oligonucleotide
  Antisense strand to SEQ ID NO: 2262482
cuaagaaacaucuuuaucu

SEQ ID NO: 2262484 - RNA, 19 nt, Artificial Sequence
  Description of Artificial Sequence: Synthetic oligonucleotide
  Sense strand starting at position 1441 of SEQ ID NO: 1884397
uuugauuaugcuugagaga

SEQ ID NO: 2262485 - RNA, 19 nt, Artificial Sequence
  Description of Artificial Sequence: Synthetic oligonucleotide
  Antisense strand to SEQ ID NO: 2262484
ucucucaagcauaaucaaa

SEQ ID NO: 2262486 - RNA, 19 nt, Artificial Sequence
  Description of Artificial Sequence: Synthetic oligonucleotide
  Sense strand starting at position 1448 of SEQ ID NO: 1884397
augcuugagagaugauaua

SEQ ID NO: 2262487 - RNA, 19 nt, Artificial Sequence
  Description of Artificial Sequence: Synthetic oligonucleotide
  Antisense strand to SEQ ID NO: 2262486
uauaucaucucucaagcau

SEQ ID NO: 2262488 - RNA, 19 nt, Artificial Sequence
  Description of Artificial Sequence: Synthetic oligonucleotide
  Sense strand starting at position 1480 of SEQ ID NO: 1884397
auuaguagucagcagaaua

SEQ ID NO: 2262489 - RNA, 19 nt, Artificial Sequence
  Description of Artificial Sequence: Synthetic oligonucleotide
  Antisense strand to SEQ ID NO: 2262488
uauucugcugacuacuaau

SEQ ID NO: 2262490 - RNA, 19 nt, Artificial Sequence
  Description of Artificial Sequence: Synthetic oligonucleotide
  Sense strand starting at position 1520 of SEQ ID NO: 1884397
gcaauaugucaguacuaaa

SEQ ID NO: 2262491 - RNA, 19 nt, Artificial Sequence
  Description of Artificial Sequence: Synthetic oligonucleotide
  Antisense strand to SEQ ID NO: 2262490
uuuaguacugacauauugc

SEQ ID NO: 2262492 - RNA, 19 nt, Artificial Sequence
  Description of Artificial Sequence: Synthetic oligonucleotide
  Sense strand starting at position 1842 of SEQ ID NO: 1884397
ucacguauuucuuuccaua

SEQ ID NO: 2262493 - RNA, 19 nt, Artificial Sequence
  Description of Artificial Sequence: Synthetic oligonucleotide
  Antisense strand to SEQ ID NO: 2262492
uauggaaagaaauacguga

SEQ ID NO: 2262494 - RNA, 19 nt, Artificial Sequence
  Description of Artificial Sequence: Synthetic oligonucleotide
  Sense strand starting at position 1998 of SEQ ID NO: 1884397
gcauguugaccugugcuuu

SEQ ID NO: 2262495 - RNA, 19 nt, Artificial Sequence
  Description of Artificial Sequence: Synthetic oligonucleotide
  Antisense strand to SEQ ID NO: 2262494
aaagcacaggucaacaugc

SEQ ID NO: 2262496 - RNA, 19 nt, Artificial Sequence
  Description of Artificial Sequence: Synthetic oligonucleotide
  Sense strand starting at position 2235 of SEQ ID NO: 1884397
cguucuagaagaggacuua

SEQ ID NO: 2262497 - RNA, 19 nt, Artificial Sequence
  Description of Artificial Sequence: Synthetic oligonucleotide
  Antisense strand to SEQ ID NO: 2262496
uaaguccucuucuagaacg

SEQ ID NO: 2262498 - RNA, 19 nt, Artificial Sequence
  Description of Artificial Sequence: Synthetic oligonucleotide
  Sense strand starting at position 2278 of SEQ ID NO: 1884397
uugugauucucauuuaugu

SEQ ID NO: 2262499 - RNA, 19 nt, Artificial Sequence
  Description of Artificial Sequence: Synthetic oligonucleotide
  Antisense strand to SEQ ID NO: 2262498
acauaaaugagaaucacaa

SEQ ID NO: 2262500 - RNA, 19 nt, Artificial Sequence
  Description of Artificial Sequence: Synthetic oligonucleotide
  Sense strand starting at position 2325 of SEQ ID NO: 1884397
cauaacuggugcuuaagga

SEQ ID NO: 2262501 - RNA, 19 nt, Artificial Sequence
  Description of Artificial Sequence: Synthetic oligonucleotide
  Antisense strand to SEQ ID NO: 2262500
uccuuaagcaccaguuaug

SEQ ID NO: 2262502 - RNA, 19 nt, Artificial Sequence
  Description of Artificial Sequence: Synthetic oligonucleotide
  Sense strand starting at position 2576 of SEQ ID NO: 1884397
uccugaagcagguauugau

SEQ ID NO: 2262503 - RNA, 19 nt, Artificial Sequence
  Description of Artificial Sequence: Synthetic oligonucleotide
  Antisense strand to SEQ ID NO: 2262502
aucaauaccugcuucagga

SEQ ID NO: 2262504 - RNA, 19 nt, Artificial Sequence
  Description of Artificial Sequence: Synthetic oligonucleotide
  Sense strand starting at position 2635 of SEQ ID NO: 1884397
acuuccuaugaguagcuaa

SEQ ID NO: 2262505 - RNA, 19 nt, Artificial Sequence
  Description of Artificial Sequence: Synthetic oligonucleotide
  Antisense strand to SEQ ID NO: 2262504
uuagcuacucauaggaagu

SEQ ID NO: 2262506 - RNA, 19 nt, Artificial Sequence
  Description of Artificial Sequence: Synthetic oligonucleotide
  Sense strand starting at position 2659 of SEQ ID NO: 1884397
ucaauauuagagcauugua

SEQ ID NO: 2262507 - RNA, 19 nt, Artificial Sequence
  Description of Artificial Sequence: Synthetic oligonucleotide
  Antisense strand to SEQ ID NO: 2262506
uacaaugcucuaauauuga

SEQ ID NO: 2262508 - RNA, 19 nt, Artificial Sequence
  Description of Artificial Sequence: Synthetic oligonucleotide
  Sense strand starting at position 2831 of SEQ ID NO: 1884397
cccuauuauuugcuguaua

SEQ ID NO: 2262509 - RNA, 19 nt, Artificial Sequence
  Description of Artificial Sequence: Synthetic oligonucleotide
  Antisense strand to SEQ ID NO: 2262508
uauacagcaaauaauaggg

SEQ ID NO: 2262510 - RNA, 19 nt, Artificial Sequence
  Description of Artificial Sequence: Synthetic oligonucleotide
  Sense strand starting at position 2916 of SEQ ID NO: 1884397
gaucuuaaucaaugggagu

SEQ ID NO: 2262511 - RNA, 19 nt, Artificial Sequence
  Description of Artificial Sequence: Synthetic oligonucleotide
  Antisense strand to SEQ ID NO: 2262510
acucccauugauuaagauc

SEQ ID NO: 2262512 - RNA, 19 nt, Artificial Sequence
  Description of Artificial Sequence: Synthetic oligonucleotide
  Sense strand starting at position 2941 of SEQ ID NO: 1884397
uuauguuuggccuagagaa

SEQ ID NO: 2262513 - RNA, 19 nt, Artificial Sequence
  Description of Artificial Sequence: Synthetic oligonucleotide
  Antisense strand to SEQ ID NO: 2262512
uucucuaggccaaacauaa

SEQ ID NO: 2262514 - RNA, 19 nt, Artificial Sequence
  Description of Artificial Sequence: Synthetic oligonucleotide
  Sense strand starting at position 2959 of SEQ ID NO: 1884397
aaagaugggcacuguauaa

SEQ ID NO: 2262515 - RNA, 19 nt, Artificial Sequence
  Description of Artificial Sequence: Synthetic oligonucleotide
  Antisense strand to SEQ ID NO: 2262514
uuauacagugcccaucuuu

SEQ ID NO: 2262516 - RNA, 19 nt, Artificial Sequence
  Description of Artificial Sequence: Synthetic oligonucleotide
  Sense strand starting at position 3148 of SEQ ID NO: 1884397
uuugcauuucuauggugca

SEQ ID NO: 2262517 - RNA, 19 nt, Artificial Sequence
  Description of Artificial Sequence: Synthetic oligonucleotide
  Antisense strand to SEQ ID NO: 2262516
ugcaccauagaaaugcaaa

SEQ ID NO: 2262518 - RNA, 19 nt, Artificial Sequence
  Description of Artificial Sequence: Synthetic oligonucleotide
  Sense strand starting at position 3300 of SEQ ID NO: 1884397
cuuuauuggccucauauag

SEQ ID NO: 2262519 - RNA, 19 nt, Artificial Sequence
  Description of Artificial Sequence: Synthetic oligonucleotide
  Antisense strand to SEQ ID NO: 2262518
cuauaugaggccaauaaag

SEQ ID NO: 2262520 - RNA, 19 nt, Artificial Sequence
  Description of Artificial Sequence: Synthetic oligonucleotide
  Sense strand starting at position 3307 of SEQ ID NO: 1884397
ggccucauauaggucagaa

SEQ ID NO: 2262521 - RNA, 19 nt, Artificial Sequence
  Description of Artificial Sequence: Synthetic oligonucleotide
  Antisense strand to SEQ ID NO: 2262520
uucugaccuauaugaggcc

SEQ ID NO: 2262522 - RNA, 19 nt, Artificial Sequence
  Description of Artificial Sequence: Synthetic oligonucleotide
  Sense strand starting at position 3350 of SEQ ID NO: 1884397
ucauauaaucuguaaguac

SEQ ID NO: 2262523 - RNA, 19 nt, Artificial Sequence
  Description of Artificial Sequence: Synthetic oligonucleotide
  Antisense strand to SEQ ID NO: 2262522
guacuuacagauuauauga

SEQ ID NO: 2262524 - RNA, 19 nt, Artificial Sequence
  Description of Artificial Sequence: Synthetic oligonucleotide
  Sense strand starting at position 3359 of SEQ ID NO: 1884397
cuguaaguacuugauauua

SEQ ID NO: 2262525 - RNA, 19 nt, Artificial Sequence
  Description of Artificial Sequence: Synthetic oligonucleotide
  Antisense strand to SEQ ID NO: 2262524
uaauaucaaguacuuacag

SEQ ID NO: 2262526 - RNA, 19 nt, Artificial Sequence
  Description of Artificial Sequence: Synthetic oligonucleotide
  Sense strand starting at position 3571 of SEQ ID NO: 1884397
ugauucuugccuuagaauc

SEQ ID NO: 2262527 - RNA, 19 nt, Artificial Sequence
  Description of Artificial Sequence: Synthetic oligonucleotide
  Antisense strand to SEQ ID NO: 2262526
gauucuaaggcaagaauca

SEQ ID NO: 2262528 - RNA, 19 nt, Artificial Sequence
  Description of Artificial Sequence: Synthetic oligonucleotide
  Sense strand starting at position 3730 of SEQ ID NO: 1884397
ugaauaaguucugcaugaa

SEQ ID NO: 2262529 - RNA, 19 nt, Artificial Sequence
  Description of Artificial Sequence: Synthetic oligonucleotide
  Antisense strand to SEQ ID NO: 2262528
uucaugcagaacuuauuca

SEQ ID NO: 2262530 - RNA, 19 nt, Artificial Sequence
  Description of Artificial Sequence: Synthetic oligonucleotide
  Sense strand starting at position 3743 of SEQ ID NO: 1884397
caugaaucuguccagguaa

SEQ ID NO: 2262531 - RNA, 19 nt, Artificial Sequence
  Description of Artificial Sequence: Synthetic oligonucleotide
  Antisense strand to SEQ ID NO: 2262530
uuaccuggacagauucaug

SEQ ID NO: 2262532 - RNA, 19 nt, Artificial Sequence
  Description of Artificial Sequence: Synthetic oligonucleotide
  Sense strand starting at position 3745 of SEQ ID NO: 1884397
ugaaucuguccagguaaca

SEQ ID NO: 2262533 - RNA, 19 nt, Artificial Sequence
  Description of Artificial Sequence: Synthetic oligonucleotide
  Antisense strand to SEQ ID NO: 2262532
uguuaccuggacagauuca

SEQ ID NO: 2262534 - RNA, 19 nt, Artificial Sequence
  Description of Artificial Sequence: Synthetic oligonucleotide
  Sense strand starting at position 3826 of SEQ ID NO: 1884397
uuuguccagcucuaagaga

SEQ ID NO: 2262535 - RNA, 19 nt, Artificial Sequence
  Description of Artificial Sequence: Synthetic oligonucleotide
  Antisense strand to SEQ ID NO: 2262534
ucucuuagagcuggacaaa

SEQ ID NO: 2262536 - RNA, 19 nt, Artificial Sequence
  Description of Artificial Sequence: Synthetic oligonucleotide
  Sense strand starting at position 3897 of SEQ ID NO: 1884397
caaacuaggcuguggauua

SEQ ID NO: 2262537 - RNA, 19 nt, Artificial Sequence
  Description of Artificial Sequence: Synthetic oligonucleotide
  Antisense strand to SEQ ID NO: 2262536
uaauccacagccuaguuug

SEQ ID NO: 2262538 - RNA, 19 nt, Artificial Sequence
  Description of Artificial Sequence: Synthetic oligonucleotide
  Sense strand starting at position 3902 of SEQ ID NO: 1884397
uaggcuguggauuaauaca

SEQ ID NO: 2262539 - RNA, 19 nt, Artificial Sequence
  Description of Artificial Sequence: Synthetic oligonucleotide
  Antisense strand to SEQ ID NO: 2262538
uguauuaauccacagccua

SEQ ID NO: 2262540 - RNA, 19 nt, Artificial Sequence
  Description of Artificial Sequence: Synthetic oligonucleotide
  Sense strand starting at position 3932 of SEQ ID NO: 1884397
aacaguacuccucggauaa

SEQ ID NO: 2262541 - RNA, 19 nt, Artificial Sequence
  Description of Artificial Sequence: Synthetic oligonucleotide
  Antisense strand to SEQ ID NO: 2262540
uuauccgaggaguacuguu

SEQ ID NO: 2262542 - RNA, 19 nt, Artificial Sequence
  Description of Artificial Sequence: Synthetic oligonucleotide
  Sense strand starting at position 3933 of SEQ ID NO: 1884397
acaguacuccucggauaaa

SEQ ID NO: 2262543 - RNA, 19 nt, Artificial Sequence
  Description of Artificial Sequence: Synthetic oligonucleotide
  Antisense strand to SEQ ID NO: 2262542
uuuauccgaggaguacugu

SEQ ID NO: 2262544 - RNA, 19 nt, Artificial Sequence
  Description of Artificial Sequence: Synthetic oligonucleotide
  Sense strand starting at position 104 of SEQ ID NO: 1884398
ggaaaucacucuucuauug

SEQ ID NO: 2262545 - RNA, 19 nt, Artificial Sequence
  Description of Artificial Sequence: Synthetic oligonucleotide
  Antisense strand to SEQ ID NO: 2262544
caauagaagagugauuucc

SEQ ID NO: 2262546 - RNA, 19 nt, Artificial Sequence
  Description of Artificial Sequence: Synthetic oligonucleotide
  Sense strand starting at position 123 of SEQ ID NO: 1884398
augucuucuuaggcaauuu

SEQ ID NO: 2262547 - RNA, 19 nt, Artificial Sequence
  Description of Artificial Sequence: Synthetic oligonucleotide
  Antisense strand to SEQ ID NO: 2262546
aaauugccuaagaagacau

SEQ ID NO: 2262548 - RNA, 19 nt, Artificial Sequence
  Description of Artificial Sequence: Synthetic oligonucleotide
  Sense strand starting at position 396 of SEQ ID NO: 1884398
ucugaagguaucuagaguu

SEQ ID NO: 2262549 - RNA, 19 nt, Artificial Sequence
  Description of Artificial Sequence: Synthetic oligonucleotide
  Antisense strand to SEQ ID NO: 2262548
aacucuagauaccuucaga

SEQ ID NO: 2262550 - RNA, 19 nt, Artificial Sequence
  Description of Artificial Sequence: Synthetic oligonucleotide
  Sense strand starting at position 402 of SEQ ID NO: 1884398
gguaucuagaguuggaaua

SEQ ID NO: 2262551 - RNA, 19 nt, Artificial Sequence
  Description of Artificial Sequence: Synthetic oligonucleotide
  Antisense strand to SEQ ID NO: 2262550
uauuccaacucuagauacc

SEQ ID NO: 2262552 - RNA, 19 nt, Artificial Sequence
  Description of Artificial Sequence: Synthetic oligonucleotide
  Sense strand starting at position 403 of SEQ ID NO: 1884398
guaucuagaguuggaauau

SEQ ID NO: 2262553 - RNA, 19 nt, Artificial Sequence
  Description of Artificial Sequence: Synthetic oligonucleotide
  Antisense strand to SEQ ID NO: 2262552
auauuccaacucuagauac

SEQ ID NO: 2262554 - RNA, 19 nt, Artificial Sequence
  Description of Artificial Sequence: Synthetic oligonucleotide
  Sense strand starting at position 506 of SEQ ID NO: 1884398
auggcaagagaugguuaaa

SEQ ID NO: 2262555 - RNA, 19 nt, Artificial Sequence
  Description of Artificial Sequence: Synthetic oligonucleotide
  Antisense strand to SEQ ID NO: 2262554
uuuaaccaucucuugccau

SEQ ID NO: 2262556 - RNA, 19 nt, Artificial Sequence
  Description of Artificial Sequence: Synthetic oligonucleotide
  Sense strand starting at position 553 of SEQ ID NO: 1884398
ccuggaaguggucauuaua

SEQ ID NO: 2262557 - RNA, 19 nt, Artificial Sequence
  Description of Artificial Sequence: Synthetic oligonucleotide
  Antisense strand to SEQ ID NO: 2262556
uauaaugaccacuuccagg

SEQ ID NO: 2262558 - RNA, 19 nt, Artificial Sequence
  Description of Artificial Sequence: Synthetic oligonucleotide
  Sense strand starting at position 653 of SEQ ID NO: 1884398
guccucauuguauaagaau

SEQ ID NO: 2262559 - RNA, 19 nt, Artificial Sequence
  Description of Artificial Sequence: Synthetic oligonucleotide
  Antisense strand to SEQ ID NO: 2262558
auucuuauacaaugaggac

SEQ ID NO: 2262560 - RNA, 19 nt, Artificial Sequence
  Description of Artificial Sequence: Synthetic oligonucleotide
  Sense strand starting at position 712 of SEQ ID NO: 1884398
aucacaugagcuugauuga

SEQ ID NO: 2262561 - RNA, 19 nt, Artificial Sequence
  Description of Artificial Sequence: Synthetic oligonucleotide
  Antisense strand to SEQ ID NO: 2262560
ucaaucaagcucaugugau

SEQ ID NO: 2262562 - RNA, 19 nt, Artificial Sequence
  Description of Artificial Sequence: Synthetic oligonucleotide
  Sense strand starting at position 713 of SEQ ID NO: 1884398
ucacaugagcuugauugau

SEQ ID NO: 2262563 - RNA, 19 nt, Artificial Sequence
  Description of Artificial Sequence: Synthetic oligonucleotide
  Antisense strand to SEQ ID NO: 2262562
aucaaucaagcucauguga

SEQ ID NO: 2262564 - RNA, 19 nt, Artificial Sequence
  Description of Artificial Sequence: Synthetic oligonucleotide
  Sense strand starting at position 715 of SEQ ID NO: 1884398
acaugagcuugauugauau

SEQ ID NO: 2262565 - RNA, 19 nt, Artificial Sequence
  Description of Artificial Sequence: Synthetic oligonucleotide
  Antisense strand to SEQ ID NO: 2262564
auaucaaucaagcucaugu

SEQ ID NO: 2262566 - RNA, 19 nt, Artificial Sequence
  Description of Artificial Sequence: Synthetic oligonucleotide
  Sense strand starting at position 746 of SEQ ID NO: 1884398
gagcuuugucguuugucau

SEQ ID NO: 2262567 - RNA, 19 nt, Artificial Sequence
  Description of Artificial Sequence: Synthetic oligonucleotide
  Antisense strand to SEQ ID NO: 2262566
augacaaacgacaaagcuc

SEQ ID NO: 2262568 - RNA, 19 nt, Artificial Sequence
  Description of Artificial Sequence: Synthetic oligonucleotide
  Sense strand starting at position 817 of SEQ ID NO: 1884398
acaggauugucaucagaau

SEQ ID NO: 2262569 - RNA, 19 nt, Artificial Sequence
  Description of Artificial Sequence: Synthetic oligonucleotide
  Antisense strand to SEQ ID NO: 2262568
auucugaugacaauccugu

SEQ ID NO: 2262570 - RNA, 19 nt, Artificial Sequence
  Description of Artificial Sequence: Synthetic oligonucleotide
  Sense strand starting at position 872 of SEQ ID NO: 1884398
gcccuaagagcucaauaaa

SEQ ID NO: 2262571 - RNA, 19 nt, Artificial Sequence
  Description of Artificial Sequence: Synthetic oligonucleotide
  Antisense strand to SEQ ID NO: 2262570
uuuauugagcucuuagggc

SEQ ID NO: 2262572 - RNA, 19 nt, Artificial Sequence
  Description of Artificial Sequence: Synthetic oligonucleotide
  Sense strand starting at position 1013 of SEQ ID NO: 1884398
gagauauugaguuggucau

SEQ ID NO: 2262573 - RNA, 19 nt, Artificial Sequence
  Description of Artificial Sequence: Synthetic oligonucleotide
  Antisense strand to SEQ ID NO: 2262572
augaccaacucaauaucuc

SEQ ID NO: 2262574 - RNA, 19 nt, Artificial Sequence
  Description of Artificial Sequence: Synthetic oligonucleotide
  Sense strand starting at position 1014 of SEQ ID NO: 1884398
agauauugaguuggucaug

SEQ ID NO: 2262575 - RNA, 19 nt, Artificial Sequence
  Description of Artificial Sequence: Synthetic oligonucleotide
  Antisense strand to SEQ ID NO: 2262574
caugaccaacucaauaucu

SEQ ID NO: 2262576 - RNA, 19 nt, Artificial Sequence
  Description of Artificial Sequence: Synthetic oligonucleotide
  Sense strand starting at position 1213 of SEQ ID NO: 1884398
auauuuguuugccuuguca

SEQ ID NO: 2262577 - RNA, 19 nt, Artificial Sequence
  Description of Artificial Sequence: Synthetic oligonucleotide
  Antisense strand to SEQ ID NO: 2262576
ugacaaggcaaacaaauau

SEQ ID NO: 2262578 - RNA, 19 nt, Artificial Sequence
  Description of Artificial Sequence: Synthetic oligonucleotide
  Sense strand starting at position 1277 of SEQ ID NO: 1884398
cuugucaugcugcuuggua

SEQ ID NO: 2262579 - RNA, 19 nt, Artificial Sequence
  Description of Artificial Sequence: Synthetic oligonucleotide
  Antisense strand to SEQ ID NO: 2262578
uaccaagcagcaugacaag

SEQ ID NO: 2262580 - RNA, 19 nt, Artificial Sequence
  Description of Artificial Sequence: Synthetic oligonucleotide
  Sense strand starting at position 1486 of SEQ ID NO: 1884398
agguuagacuuuccagauu

SEQ ID NO: 2262581 - RNA, 19 nt, Artificial Sequence
  Description of Artificial Sequence: Synthetic oligonucleotide
  Antisense strand to SEQ ID NO: 2262580
aaucuggaaagucuaaccu

SEQ ID NO: 2262582 - RNA, 19 nt, Artificial Sequence
  Description of Artificial Sequence: Synthetic oligonucleotide
  Sense strand starting at position 1926 of SEQ ID NO: 1884398
uguggaaucaugcacagau

SEQ ID NO: 2262583 - RNA, 19 nt, Artificial Sequence
  Description of Artificial Sequence: Synthetic oligonucleotide
  Antisense strand to SEQ ID NO: 2262582
aucugugcaugauuccaca

SEQ ID NO: 2262584 - RNA, 19 nt, Artificial Sequence
  Description of Artificial Sequence: Synthetic oligonucleotide
  Sense strand starting at position 2135 of SEQ ID NO: 1884398
uucuguaaacgggagugaa

SEQ ID NO: 2262585 - RNA, 19 nt, Artificial Sequence
  Description of Artificial Sequence: Synthetic oligonucleotide
  Antisense strand to SEQ ID NO: 2262584
uucacucccguuuacagaa

SEQ ID NO: 2262586 - RNA, 19 nt, Artificial Sequence
  Description of Artificial Sequence: Synthetic oligonucleotide
  Sense strand starting at position 2599 of SEQ ID NO: 1884398
caaucuaucguauaaggca

SEQ ID NO: 2262587 - RNA, 19 nt, Artificial Sequence
  Description of Artificial Sequence: Synthetic oligonucleotide
  Antisense strand to SEQ ID NO: 2262586
ugccuuauacgauagauug

SEQ ID NO: 2262588 - RNA, 19 nt, Artificial Sequence
  Description of Artificial Sequence: Synthetic oligonucleotide
  Sense strand starting at position 2607 of SEQ ID NO: 1884398
cguauaaggcaugaucaau

SEQ ID NO: 2262589 - RNA, 19 nt, Artificial Sequence
  Description of Artificial Sequence: Synthetic oligonucleotide
  Antisense strand to SEQ ID NO: 2262588
auugaucaugccuuauacg

SEQ ID NO: 2262590 - RNA, 19 nt, Artificial Sequence
  Description of Artificial Sequence: Synthetic oligonucleotide
  Sense strand starting at position 2673 of SEQ ID NO: 1884398
cagucauggcuugaaguga

SEQ ID NO: 2262591 - RNA, 19 nt, Artificial Sequence
  Description of Artificial Sequence: Synthetic oligonucleotide
  Antisense strand to SEQ ID NO: 2262590
ucacuucaagccaugacug

SEQ ID NO: 2262592 - RNA, 19 nt, Artificial Sequence
  Description of Artificial Sequence: Synthetic oligonucleotide
  Sense strand starting at position 2691 of SEQ ID NO: 1884398
agcacuuacugauugacau

SEQ ID NO: 2262593 - RNA, 19 nt, Artificial Sequence
  Description of Artificial Sequence: Synthetic oligonucleotide
  Antisense strand to SEQ ID NO: 2262592
augucaaucaguaagugcu

SEQ ID NO: 2262594 - RNA, 19 nt, Artificial Sequence
  Description of Artificial Sequence: Synthetic oligonucleotide
  Sense strand starting at position 2692 of SEQ ID NO: 1884398
gcacuuacugauugacaua

SEQ ID NO: 2262595 - RNA, 19 nt, Artificial Sequence
  Description of Artificial Sequence: Synthetic oligonucleotide
  Antisense strand to SEQ ID NO: 2262594
uaugucaaucaguaagugc

SEQ ID NO: 2262596 - RNA, 19 nt, Artificial Sequence
  Description of Artificial Sequence: Synthetic oligonucleotide
  Sense strand starting at position 2803 of SEQ ID NO: 1884398
cuuaaucagggucaucuua

SEQ ID NO: 2262597 - RNA, 19 nt, Artificial Sequence
  Description of Artificial Sequence: Synthetic oligonucleotide
  Antisense strand to SEQ ID NO: 2262596
uaagaugacccugauuaag

SEQ ID NO: 2262598 - RNA, 19 nt, Artificial Sequence
  Description of Artificial Sequence: Synthetic oligonucleotide
  Sense strand starting at position 3089 of SEQ ID NO: 1884398
aucagacagucuccucaua

SEQ ID NO: 2262599 - RNA, 19 nt, Artificial Sequence
  Description of Artificial Sequence: Synthetic oligonucleotide
  Antisense strand to SEQ ID NO: 2262598
uaugaggagacugucugau

SEQ ID NO: 2262600 - RNA, 19 nt, Artificial Sequence
  Description of Artificial Sequence: Synthetic oligonucleotide
  Sense strand starting at position 3200 of SEQ ID NO: 1884398
gaagauuacuucguuauaa

SEQ ID NO: 2262601 - RNA, 19 nt, Artificial Sequence
  Description of Artificial Sequence: Synthetic oligonucleotide
  Antisense strand to SEQ ID NO: 2262600
uuauaacgaaguaaucuuc

SEQ ID NO: 2262602 - RNA, 19 nt, Artificial Sequence
  Description of Artificial Sequence: Synthetic oligonucleotide
  Sense strand starting at position 3201 of SEQ ID NO: 1884398
aagauuacuucguuauaag

SEQ ID NO: 2262603 - RNA, 19 nt, Artificial Sequence
  Description of Artificial Sequence: Synthetic oligonucleotide
  Antisense strand to SEQ ID NO: 2262602
cuuauaacgaaguaaucuu

SEQ ID NO: 2262604 - RNA, 19 nt, Artificial Sequence
  Description of Artificial Sequence: Synthetic oligonucleotide
  Sense strand starting at position 3375 of SEQ ID NO: 1884398
auuccuagagccuaauaug

SEQ ID NO: 2262605 - RNA, 19 nt, Artificial Sequence
  Description of Artificial Sequence: Synthetic oligonucleotide
  Antisense strand to SEQ ID NO: 2262604
cauauuaggcucuaggaau

SEQ ID NO: 2262606 - RNA, 19 nt, Artificial Sequence
  Description of Artificial Sequence: Synthetic oligonucleotide
  Sense strand starting at position 3445 of SEQ ID NO: 1884398
ugaaaugggcucuaaucuu

SEQ ID NO: 2262607 - RNA, 19 nt, Artificial Sequence
  Description of Artificial Sequence: Synthetic oligonucleotide
  Antisense strand to SEQ ID NO: 2262606
aagauuagagcccauuuca

SEQ ID NO: 2262608 - RNA, 19 nt, Artificial Sequence
  Description of Artificial Sequence: Synthetic oligonucleotide
  Sense strand starting at position 3508 of SEQ ID NO: 1884398
auuaauuccguuggaggga

SEQ ID NO: 2262609 - RNA, 19 nt, Artificial Sequence
  Description of Artificial Sequence: Synthetic oligonucleotide
  Antisense strand to SEQ ID NO: 2262608
ucccuccaacggaauuaau

SEQ ID NO: 2262610 - RNA, 19 nt, Artificial Sequence
  Description of Artificial Sequence: Synthetic oligonucleotide
  Sense strand starting at position 3582 of SEQ ID NO: 1884398
ggguaauauagacgaauua

SEQ ID NO: 2262611 - RNA, 19 nt, Artificial Sequence
  Description of Artificial Sequence: Synthetic oligonucleotide
  Antisense strand to SEQ ID NO: 2262610
uaauucgucuauauuaccc

SEQ ID NO: 2262612 - RNA, 19 nt, Artificial Sequence
  Description of Artificial Sequence: Synthetic oligonucleotide
  Sense strand starting at position 3702 of SEQ ID NO: 1884398
guguugguggaguaggaau

SEQ ID NO: 2262613 - RNA, 19 nt, Artificial Sequence
  Description of Artificial Sequence: Synthetic oligonucleotide
  Antisense strand to SEQ ID NO: 2262612
auuccuacuccaccaacac

SEQ ID NO: 2262614 - RNA, 19 nt, Artificial Sequence
  Description of Artificial Sequence: Synthetic oligonucleotide
  Sense strand starting at position 3756 of SEQ ID NO: 1884398
ugagaaaucuggccuuuga

SEQ ID NO: 2262615 - RNA, 19 nt, Artificial Sequence
  Description of Artificial Sequence: Synthetic oligonucleotide
  Antisense strand to SEQ ID NO: 2262614
ucaaaggccagauuucuca

SEQ ID NO: 2262616 - RNA, 19 nt, Artificial Sequence
  Description of Artificial Sequence: Synthetic oligonucleotide
  Sense strand starting at position 3838 of SEQ ID NO: 1884398
guaaccucagcagauugaa

SEQ ID NO: 2262617 - RNA, 19 nt, Artificial Sequence
  Description of Artificial Sequence: Synthetic oligonucleotide
  Antisense strand to SEQ ID NO: 2262616
uucaaucugcugagguuac

SEQ ID NO: 2262618 - RNA, 19 nt, Artificial Sequence
  Description of Artificial Sequence: Synthetic oligonucleotide
  Sense strand starting at position 3880 of SEQ ID NO: 1884398
caaacuuuguggguugaaa

SEQ ID NO: 2262619 - RNA, 19 nt, Artificial Sequence
  Description of Artificial Sequence: Synthetic oligonucleotide
  Antisense strand to SEQ ID NO: 2262618
uuucaacccacaaaguuug

SEQ ID NO: 2262620 - RNA, 19 nt, Artificial Sequence
  Description of Artificial Sequence: Synthetic oligonucleotide
  Sense strand starting at position 3882 of SEQ ID NO: 1884398
aacuuuguggguugaaaua

SEQ ID NO: 2262621 - RNA, 19 nt, Artificial Sequence
  Description of Artificial Sequence: Synthetic oligonucleotide
  Antisense strand to SEQ ID NO: 2262620
uauuucaacccacaaaguu

SEQ ID NO: 2262622 - RNA, 19 nt, Artificial Sequence
  Description of Artificial Sequence: Synthetic oligonucleotide
  Sense strand starting at position 3959 of SEQ ID NO: 1884398
gguuuauacggguaaauaa

SEQ ID NO: 2262623 - RNA, 19 nt, Artificial Sequence
  Description of Artificial Sequence: Synthetic oligonucleotide
  Antisense strand to SEQ ID NO: 2262622
uuauuuacccguauaaacc

SEQ ID NO: 2262624 - RNA, 19 nt, Artificial Sequence
  Description of Artificial Sequence: Synthetic oligonucleotide
  Sense strand starting at position 492 of SEQ ID NO: 1884399
aaaguagacucuuugaagc

SEQ ID NO: 2262625 - RNA, 19 nt, Artificial Sequence
  Description of Artificial Sequence: Synthetic oligonucleotide
  Antisense strand to SEQ ID NO: 2262624
gcuucaaagagucuacuuu

SEQ ID NO: 2262626 - RNA, 19 nt, Artificial Sequence
  Description of Artificial Sequence: Synthetic oligonucleotide
  Sense strand starting at position 527 of SEQ ID NO: 1884399
cuagccugacucuagcaua

SEQ ID NO: 2262627 - RNA, 19 nt, Artificial Sequence
  Description of Artificial Sequence: Synthetic oligonucleotide
  Antisense strand to SEQ ID NO: 2262626
uaugcuagagucaggcuag

SEQ ID NO: 2262628 - RNA, 19 nt, Artificial Sequence
  Description of Artificial Sequence: Synthetic oligonucleotide
  Sense strand starting at position 619 of SEQ ID NO: 1884399
auugaaauggccuggcaaa

SEQ ID NO: 2262629 - RNA, 19 nt, Artificial Sequence
  Description of Artificial Sequence: Synthetic oligonucleotide
  Antisense strand to SEQ ID NO: 2262628
uuugccaggccauuucaau

SEQ ID NO: 2262630 - RNA, 19 nt, Artificial Sequence
  Description of Artificial Sequence: Synthetic oligonucleotide
  Sense strand starting at position 700 of SEQ ID NO: 1884399
uucccugauccaggagagu

SEQ ID NO: 2262631 - RNA, 19 nt, Artificial Sequence
  Description of Artificial Sequence: Synthetic oligonucleotide
  Antisense strand to SEQ ID NO: 2262630
acucuccuggaucagggaa

SEQ ID NO: 2262632 - RNA, 19 nt, Artificial Sequence
  Description of Artificial Sequence: Synthetic oligonucleotide
  Sense strand starting at position 1561 of SEQ ID NO: 1884399
ugacaaucuccagguuacu

SEQ ID NO: 2262633 - RNA, 19 nt, Artificial Sequence
  Description of Artificial Sequence: Synthetic oligonucleotide
  Antisense strand to SEQ ID NO: 2262632
aguaaccuggagauuguca

SEQ ID NO: 2262634 - RNA, 19 nt, Artificial Sequence
  Description of Artificial Sequence: Synthetic oligonucleotide
  Sense strand starting at position 1591 of SEQ ID NO: 1884399
acaagauaagcauguguua

SEQ ID NO: 2262635 - RNA, 19 nt, Artificial Sequence
  Description of Artificial Sequence: Synthetic oligonucleotide
  Antisense strand to SEQ ID NO: 2262634
uaacacaugcuuaucuugu

SEQ ID NO: 2262636 - RNA, 19 nt, Artificial Sequence
  Description of Artificial Sequence: Synthetic oligonucleotide
  Sense strand starting at position 1610 of SEQ ID NO: 1884399
acucuuuguuaaguaaaug

SEQ ID NO: 2262637 - RNA, 19 nt, Artificial Sequence
  Description of Artificial Sequence: Synthetic oligonucleotide
  Antisense strand to SEQ ID NO: 2262636
cauuuacuuaacaaagagu

SEQ ID NO: 2262638 - RNA, 19 nt, Artificial Sequence
  Description of Artificial Sequence: Synthetic oligonucleotide
  Sense strand starting at position 1729 of SEQ ID NO: 1884399
aguaaaucuccuuauguuc

SEQ ID NO: 2262639 - RNA, 19 nt, Artificial Sequence
  Description of Artificial Sequence: Synthetic oligonucleotide
  Antisense strand to SEQ ID NO: 2262638
gaacauaaggagauuuacu

SEQ ID NO: 2262640 - RNA, 19 nt, Artificial Sequence
  Description of Artificial Sequence: Synthetic oligonucleotide
  Sense strand starting at position 1769 of SEQ ID NO: 1884399
agaguucucuccucagaua

SEQ ID NO: 2262641 - RNA, 19 nt, Artificial Sequence
  Description of Artificial Sequence: Synthetic oligonucleotide
  Antisense strand to SEQ ID NO: 2262640
uaucugaggagagaacucu

SEQ ID NO: 2262642 - RNA, 19 nt, Artificial Sequence
  Description of Artificial Sequence: Synthetic oligonucleotide
  Sense strand starting at position 1917 of SEQ ID NO: 1884399
aguagaugguucuuacaag

SEQ ID NO: 2262643 - RNA, 19 nt, Artificial Sequence
  Description of Artificial Sequence: Synthetic oligonucleotide
  Antisense strand to SEQ ID NO: 2262642
cuuguaagaaccaucuacu

SEQ ID NO: 2262644 - RNA, 19 nt, Artificial Sequence
  Description of Artificial Sequence: Synthetic oligonucleotide
  Sense strand starting at position 2063 of SEQ ID NO: 1884399
ugaccugucuucuuagaaa

SEQ ID NO: 2262645 - RNA, 19 nt, Artificial Sequence
  Description of Artificial Sequence: Synthetic oligonucleotide
  Antisense strand to SEQ ID NO: 2262644
uuucuaagaagacagguca

SEQ ID NO: 2262646 - RNA, 19 nt, Artificial Sequence
  Description of Artificial Sequence: Synthetic oligonucleotide
  Sense strand starting at position 2243 of SEQ ID NO: 1884399
gguacagaguucuugaaac

SEQ ID NO: 2262647 - RNA, 19 nt, Artificial Sequence
  Description of Artificial Sequence: Synthetic oligonucleotide
  Antisense strand to SEQ ID NO: 2262646
guuucaagaacucuguacc

SEQ ID NO: 2262648 - RNA, 19 nt, Artificial Sequence
  Description of Artificial Sequence: Synthetic oligonucleotide
  Sense strand starting at position 2340 of SEQ ID NO: 1884399
agugaauugccuuaagaug

SEQ ID NO: 2262649 - RNA, 19 nt, Artificial Sequence
  Description of Artificial Sequence: Synthetic oligonucleotide
  Antisense strand to SEQ ID NO: 2262648
caucuuaaggcaauucacu

SEQ ID NO: 2262650 - RNA, 19 nt, Artificial Sequence
  Description of Artificial Sequence: Synthetic oligonucleotide
  Sense strand starting at position 2407 of SEQ ID NO: 1884399
aaaucaaagcguuggaaca

SEQ ID NO: 2262651 - RNA, 19 nt, Artificial Sequence
  Description of Artificial Sequence: Synthetic oligonucleotide
  Antisense strand to SEQ ID NO: 2262650
uguuccaacgcuuugauuu

SEQ ID NO: 2262652 - RNA, 19 nt, Artificial Sequence
  Description of Artificial Sequence: Synthetic oligonucleotide
  Sense strand starting at position 2408 of SEQ ID NO: 1884399
aaucaaagcguuggaacau

SEQ ID NO: 2262653 - RNA, 19 nt, Artificial Sequence
  Description of Artificial Sequence: Synthetic oligonucleotide
  Antisense strand to SEQ ID NO: 2262652
auguuccaacgcuuugauu

SEQ ID NO: 2262654 - RNA, 19 nt, Artificial Sequence
  Description of Artificial Sequence: Synthetic oligonucleotide
  Sense strand starting at position 2471 of SEQ ID NO: 1884399
guugaagauuaagcucuau

SEQ ID NO: 2262655 - RNA, 19 nt, Artificial Sequence
  Description of Artificial Sequence: Synthetic oligonucleotide
  Antisense strand to SEQ ID NO: 2262654
auagagcuuaaucuucaac

SEQ ID NO: 2262656 - RNA, 19 nt, Artificial Sequence
  Description of Artificial Sequence: Synthetic oligonucleotide
  Sense strand starting at position 2503 of SEQ ID NO: 1884399
aacaaugagccuugaugag

SEQ ID NO: 2262657 - RNA, 19 nt, Artificial Sequence
  Description of Artificial Sequence: Synthetic oligonucleotide
  Antisense strand to SEQ ID NO: 2262656
cucaucaaggcucauuguu

SEQ ID NO: 2262658 - RNA, 19 nt, Artificial Sequence
  Description of Artificial Sequence: Synthetic oligonucleotide
  Sense strand starting at position 2643 of SEQ ID NO: 1884399
cuggcuauuuauguguauu

SEQ ID NO: 2262659 - RNA, 19 nt, Artificial Sequence
  Description of Artificial Sequence: Synthetic oligonucleotide
  Antisense strand to SEQ ID NO: 2262658
aauacacauaaauagccag

SEQ ID NO: 2262660 - RNA, 19 nt, Artificial Sequence
  Description of Artificial Sequence: Synthetic oligonucleotide
  Sense strand starting at position 2713 of SEQ ID NO: 1884399
ugaguucuaugagcaauug

SEQ ID NO: 2262661 - RNA, 19 nt, Artificial Sequence
  Description of Artificial Sequence: Synthetic oligonucleotide
  Antisense strand to SEQ ID NO: 2262660
caauugcucauagaacuca

SEQ ID NO: 2262662 - RNA, 19 nt, Artificial Sequence
  Description of Artificial Sequence: Synthetic oligonucleotide
  Sense strand starting at position 2714 of SEQ ID NO: 1884399
gaguucuaugagcaauugu

SEQ ID NO: 2262663 - RNA, 19 nt, Artificial Sequence
  Description of Artificial Sequence: Synthetic oligonucleotide
  Antisense strand to SEQ ID NO: 2262662
acaauugcucauagaacuc

SEQ ID NO: 2262664 - RNA, 19 nt, Artificial Sequence
  Description of Artificial Sequence: Synthetic oligonucleotide
  Sense strand starting at position 2785 of SEQ ID NO: 1884399
gucggucagaaauagcaua

SEQ ID NO: 2262665 - RNA, 19 nt, Artificial Sequence
  Description of Artificial Sequence: Synthetic oligonucleotide
  Antisense strand to SEQ ID NO: 2262664
uaugcuauuucugaccgac

SEQ ID NO: 2262666 - RNA, 19 nt, Artificial Sequence
  Description of Artificial Sequence: Synthetic oligonucleotide
  Sense strand starting at position 2790 of SEQ ID NO: 1884399
ucagaaauagcauagcgaa

SEQ ID NO: 2262667 - RNA, 19 nt, Artificial Sequence
  Description of Artificial Sequence: Synthetic oligonucleotide
  Antisense strand to SEQ ID NO: 2262666
uucgcuaugcuauuucuga

SEQ ID NO: 2262668 - RNA, 19 nt, Artificial Sequence
  Description of Artificial Sequence: Synthetic oligonucleotide
  Sense strand starting at position 2812 of SEQ ID NO: 1884399
gugaacuuguaauuggaau

SEQ ID NO: 2262669 - RNA, 19 nt, Artificial Sequence
  Description of Artificial Sequence: Synthetic oligonucleotide
  Antisense strand to SEQ ID NO: 2262668
auuccaauuacaaguucac

SEQ ID NO: 2262670 - RNA, 19 nt, Artificial Sequence
  Description of Artificial Sequence: Synthetic oligonucleotide
  Sense strand starting at position 2842 of SEQ ID NO: 1884399
ggagucuugcgagacugag

SEQ ID NO: 2262671 - RNA, 19 nt, Artificial Sequence
  Description of Artificial Sequence: Synthetic oligonucleotide
  Antisense strand to SEQ ID NO: 2262670
cucagucucgcaagacucc

SEQ ID NO: 2262672 - RNA, 19 nt, Artificial Sequence
  Description of Artificial Sequence: Synthetic oligonucleotide
  Sense strand starting at position 2945 of SEQ ID NO: 1884399
agaauuggucaguguugga

SEQ ID NO: 2262673 - RNA, 19 nt, Artificial Sequence
  Description of Artificial Sequence: Synthetic oligonucleotide
  Antisense strand to SEQ ID NO: 2262672
uccaacacugaccaauucu

SEQ ID NO: 2262674 - RNA, 19 nt, Artificial Sequence
  Description of Artificial Sequence: Synthetic oligonucleotide
  Sense strand starting at position 2982 of SEQ ID NO: 1884399
ugaugucagaaauagugua

SEQ ID NO: 2262675 - RNA, 19 nt, Artificial Sequence
  Description of Artificial Sequence: Synthetic oligonucleotide
  Antisense strand to SEQ ID NO: 2262674
uacacuauuucugacauca

SEQ ID NO: 2262676 - RNA, 19 nt, Artificial Sequence
  Description of Artificial Sequence: Synthetic oligonucleotide
  Sense strand starting at position 3027 of SEQ ID NO: 1884399
ugaaaugucuugguaucug

SEQ ID NO: 2262677 - RNA, 19 nt, Artificial Sequence
  Description of Artificial Sequence: Synthetic oligonucleotide
  Antisense strand to SEQ ID NO: 2262676
cagauaccaagacauuuca

SEQ ID NO: 2262678 - RNA, 19 nt, Artificial Sequence
  Description of Artificial Sequence: Synthetic oligonucleotide
  Sense strand starting at position 3036 of SEQ ID NO: 1884399
uugguaucuggugaaauuc

SEQ ID NO: 2262679 - RNA, 19 nt, Artificial Sequence
  Description of Artificial Sequence: Synthetic oligonucleotide
  Antisense strand to SEQ ID NO: 2262678
gaauuucaccagauaccaa

SEQ ID NO: 2262680 - RNA, 19 nt, Artificial Sequence
  Description of Artificial Sequence: Synthetic oligonucleotide
  Sense strand starting at position 3184 of SEQ ID NO: 1884399
cccacuagccugcagaauu

SEQ ID NO: 2262681 - RNA, 19 nt, Artificial Sequence
  Description of Artificial Sequence: Synthetic oligonucleotide
  Antisense strand to SEQ ID NO: 2262680
aauucugcaggcuaguggg

SEQ ID NO: 2262682 - RNA, 19 nt, Artificial Sequence
  Description of Artificial Sequence: Synthetic oligonucleotide
  Sense strand starting at position 3214 of SEQ ID NO: 1884399
cgaaucacauccuccugaa

SEQ ID NO: 2262683 - RNA, 19 nt, Artificial Sequence
  Description of Artificial Sequence: Synthetic oligonucleotide
  Antisense strand to SEQ ID NO: 2262682
uucaggaggaugugauucg

SEQ ID NO: 2262684 - RNA, 19 nt, Artificial Sequence
  Description of Artificial Sequence: Synthetic oligonucleotide
  Sense strand starting at position 3406 of SEQ ID NO: 1884399
caguguuacguguuguaug

SEQ ID NO: 2262685 - RNA, 19 nt, Artificial Sequence
  Description of Artificial Sequence: Synthetic oligonucleotide
  Antisense strand to SEQ ID NO: 2262684
cauacaacacguaacacug

SEQ ID NO: 2262686 - RNA, 19 nt, Artificial Sequence
  Description of Artificial Sequence: Synthetic oligonucleotide
  Sense strand starting at position 3408 of SEQ ID NO: 1884399
guguuacguguuguauguu

SEQ ID NO: 2262687 - RNA, 19 nt, Artificial Sequence
  Description of Artificial Sequence: Synthetic oligonucleotide
  Antisense strand to SEQ ID NO: 2262686
aacauacaacacguaacac

SEQ ID NO: 2262688 - RNA, 19 nt, Artificial Sequence
  Description of Artificial Sequence: Synthetic oligonucleotide
  Sense strand starting at position 3474 of SEQ ID NO: 1884399
gggugauugagacagcauu

SEQ ID NO: 2262689 - RNA, 19 nt, Artificial Sequence
  Description of Artificial Sequence: Synthetic oligonucleotide
  Antisense strand to SEQ ID NO: 2262688
aaugcugucucaaucaccc

SEQ ID NO: 2262690 - RNA, 19 nt, Artificial Sequence
  Description of Artificial Sequence: Synthetic oligonucleotide
  Sense strand starting at position 3515 of SEQ ID NO: 1884399
auguuagauguaggaggaa

SEQ ID NO: 2262691 - RNA, 19 nt, Artificial Sequence
  Description of Artificial Sequence: Synthetic oligonucleotide
  Antisense strand to SEQ ID NO: 2262690
uuccuccuacaucuaacau

SEQ ID NO: 2262692 - RNA, 19 nt, Artificial Sequence
  Description of Artificial Sequence: Synthetic oligonucleotide
  Sense strand starting at position 3684 of SEQ ID NO: 1884399
ucacuaaacugcuuuggau

SEQ ID NO: 2262693 - RNA, 19 nt, Artificial Sequence
  Description of Artificial Sequence: Synthetic oligonucleotide
  Antisense strand to SEQ ID NO: 2262692
auccaaagcaguuuaguga

SEQ ID NO: 2262694 - RNA, 19 nt, Artificial Sequence
  Description of Artificial Sequence: Synthetic oligonucleotide
  Sense strand starting at position 3690 of SEQ ID NO: 1884399
aacugcuuuggauggauaa

SEQ ID NO: 2262695 - RNA, 19 nt, Artificial Sequence
  Description of Artificial Sequence: Synthetic oligonucleotide
  Antisense strand to SEQ ID NO: 2262694
uuauccauccaaagcaguu

SEQ ID NO: 2262696 - RNA, 19 nt, Artificial Sequence
  Description of Artificial Sequence: Synthetic oligonucleotide
  Sense strand starting at position 3691 of SEQ ID NO: 1884399
acugcuuuggauggauaau

SEQ ID NO: 2262697 - RNA, 19 nt, Artificial Sequence
  Description of Artificial Sequence: Synthetic oligonucleotide
  Antisense strand to SEQ ID NO: 2262696
auuauccauccaaagcagu

SEQ ID NO: 2262698 - RNA, 19 nt, Artificial Sequence
  Description of Artificial Sequence: Synthetic oligonucleotide
  Sense strand starting at position 3692 of SEQ ID NO: 1884399
cugcuuuggauggauaauc

SEQ ID NO: 2262699 - RNA, 19 nt, Artificial Sequence
  Description of Artificial Sequence: Synthetic oligonucleotide
  Antisense strand to SEQ ID NO: 2262698
gauuauccauccaaagcag

SEQ ID NO: 2262700 - RNA, 19 nt, Artificial Sequence
  Description of Artificial Sequence: Synthetic oligonucleotide
  Sense strand starting at position 3697 of SEQ ID NO: 1884399
uuggauggauaaucucuau

SEQ ID NO: 2262701 - RNA, 19 nt, Artificial Sequence
  Description of Artificial Sequence: Synthetic oligonucleotide
  Antisense strand to SEQ ID NO: 2262700
auagagauuauccauccaa

SEQ ID NO: 2262702 - RNA, 19 nt, Artificial Sequence
  Description of Artificial Sequence: Synthetic oligonucleotide
  Sense strand starting at position 3759 of SEQ ID NO: 1884399
ugaagagugugggagauuu

SEQ ID NO: 2262703 - RNA, 19 nt, Artificial Sequence
  Description of Artificial Sequence: Synthetic oligonucleotide
  Antisense strand to SEQ ID NO: 2262702
aaaucucccacacucuuca

SEQ ID NO: 2262704 - RNA, 19 nt, Artificial Sequence
  Description of Artificial Sequence: Synthetic oligonucleotide
  Sense strand starting at position 775 of SEQ ID NO: 1884400
gcauauacccuguacagua

SEQ ID NO: 2262705 - RNA, 19 nt, Artificial Sequence
  Description of Artificial Sequence: Synthetic oligonucleotide
  Antisense strand to SEQ ID NO: 2262704
uacuguacaggguauaugc

SEQ ID NO: 2262706 - RNA, 19 nt, Artificial Sequence
  Description of Artificial Sequence: Synthetic oligonucleotide
  Sense strand starting at position 825 of SEQ ID NO: 1884400
aggcauguuuaccugcaga

SEQ ID NO: 2262707 - RNA, 19 nt, Artificial Sequence
  Description of Artificial Sequence: Synthetic oligonucleotide
  Antisense strand to SEQ ID NO: 2262706
ucugcagguaaacaugccu

SEQ ID NO: 2262708 - RNA, 19 nt, Artificial Sequence
  Description of Artificial Sequence: Synthetic oligonucleotide
  Sense strand starting at position 853 of SEQ ID NO: 1884400
gccuauacccuguacagua

SEQ ID NO: 2262709 - RNA, 19 nt, Artificial Sequence
  Description of Artificial Sequence: Synthetic oligonucleotide
  Antisense strand to SEQ ID NO: 2262708
uacuguacaggguauaggc

SEQ ID NO: 2262710 - RNA, 19 nt, Artificial Sequence
  Description of Artificial Sequence: Synthetic oligonucleotide
  Sense strand starting at position 928 of SEQ ID NO: 1884400
cuguauagcuguucucuga

SEQ ID NO: 2262711 - RNA, 19 nt, Artificial Sequence
  Description of Artificial Sequence: Synthetic oligonucleotide
  Antisense strand to SEQ ID NO: 2262710
ucagagaacagcuauacag

SEQ ID NO: 2262712 - RNA, 19 nt, Artificial Sequence
  Description of Artificial Sequence: Synthetic oligonucleotide
  Sense strand starting at position 932 of SEQ ID NO: 1884400
auagcuguucucugaacag

SEQ ID NO: 2262713 - RNA, 19 nt, Artificial Sequence
  Description of Artificial Sequence: Synthetic oligonucleotide
  Antisense strand to SEQ ID NO: 2262712
cuguucagagaacagcuau

SEQ ID NO: 2262714 - RNA, 19 nt, Artificial Sequence
  Description of Artificial Sequence: Synthetic oligonucleotide
  Sense strand starting at position 936 of SEQ ID NO: 1884400
cuguucucugaacagaacu

SEQ ID NO: 2262715 - RNA, 19 nt, Artificial Sequence
  Description of Artificial Sequence: Synthetic oligonucleotide
  Antisense strand to SEQ ID NO: 2262714
aguucuguucagagaacag

SEQ ID NO: 2262716 - RNA, 19 nt, Artificial Sequence
  Description of Artificial Sequence: Synthetic oligonucleotide
  Sense strand starting at position 963 of SEQ ID NO: 1884400
ucaguucuaccuuagugag

SEQ ID NO: 2262717 - RNA, 19 nt, Artificial Sequence
  Description of Artificial Sequence: Synthetic oligonucleotide
  Antisense strand to SEQ ID NO: 2262716
cucacuaagguagaacuga

SEQ ID NO: 2262718 - RNA, 19 nt, Artificial Sequence
  Description of Artificial Sequence: Synthetic oligonucleotide
  Sense strand starting at position 965 of SEQ ID NO: 1884400
aguucuaccuuagugagau

SEQ ID NO: 2262719 - RNA, 19 nt, Artificial Sequence
  Description of Artificial Sequence: Synthetic oligonucleotide
  Antisense strand to SEQ ID NO: 2262718
aucucacuaagguagaacu

SEQ ID NO: 2262720 - RNA, 19 nt, Artificial Sequence
  Description of Artificial Sequence: Synthetic oligonucleotide
  Sense strand starting at position 975 of SEQ ID NO: 1884400
uagugagaucccuggaggu

SEQ ID NO: 2262721 - RNA, 19 nt, Artificial Sequence
  Description of Artificial Sequence: Synthetic oligonucleotide
  Antisense strand to SEQ ID NO: 2262720
accuccagggaucucacua

SEQ ID NO: 2262722 - RNA, 19 nt, Artificial Sequence
  Description of Artificial Sequence: Synthetic oligonucleotide
  Sense strand starting at position 991 of SEQ ID NO: 1884400
ggugguaccugccugauga

SEQ ID NO: 2262723 - RNA, 19 nt, Artificial Sequence
  Description of Artificial Sequence: Synthetic oligonucleotide
  Antisense strand to SEQ ID NO: 2262722
ucaucaggcagguaccacc

SEQ ID NO: 2262724 - RNA, 19 nt, Artificial Sequence
  Description of Artificial Sequence: Synthetic oligonucleotide
  Sense strand starting at position 1049 of SEQ ID NO: 1884400
ccagccuugcgugugaaca

SEQ ID NO: 2262725 - RNA, 19 nt, Artificial Sequence
  Description of Artificial Sequence: Synthetic oligonucleotide
  Antisense strand to SEQ ID NO: 2262724
uguucacacgcaaggcugg

SEQ ID NO: 2262726 - RNA, 19 nt, Artificial Sequence
  Description of Artificial Sequence: Synthetic oligonucleotide
  Sense strand starting at position 1097 of SEQ ID NO: 1884400
cccuucucugugcaggaaa

SEQ ID NO: 2262727 - RNA, 19 nt, Artificial Sequence
  Description of Artificial Sequence: Synthetic oligonucleotide
  Antisense strand to SEQ ID NO: 2262726
uuuccugcacagagaaggg

SEQ ID NO: 2262728 - RNA, 19 nt, Artificial Sequence
  Description of Artificial Sequence: Synthetic oligonucleotide
  Sense strand starting at position 1099 of SEQ ID NO: 1884400
cuucucugugcaggaaaua

SEQ ID NO: 2262729 - RNA, 19 nt, Artificial Sequence
  Description of Artificial Sequence: Synthetic oligonucleotide
  Antisense strand to SEQ ID NO: 2262728
uauuuccugcacagagaag

SEQ ID NO: 2262730 - RNA, 19 nt, Artificial Sequence
  Description of Artificial Sequence: Synthetic oligonucleotide
  Sense strand starting at position 1100 of SEQ ID NO: 1884400
uucucugugcaggaaauaa

SEQ ID NO: 2262731 - RNA, 19 nt, Artificial Sequence
  Description of Artificial Sequence: Synthetic oligonucleotide
  Antisense strand to SEQ ID NO: 2262730
uuauuuccugcacagagaa

SEQ ID NO: 2262732 - RNA, 19 nt, Artificial Sequence
  Description of Artificial Sequence: Synthetic oligonucleotide
  Sense strand starting at position 1111 of SEQ ID NO: 1884400
ggaaauaacuacuagagag

SEQ ID NO: 2262733 - RNA, 19 nt, Artificial Sequence
  Description of Artificial Sequence: Synthetic oligonucleotide
  Antisense strand to SEQ ID NO: 2262732
cucucuaguaguuauuucc

SEQ ID NO: 2262734 - RNA, 19 nt, Artificial Sequence
  Description of Artificial Sequence: Synthetic oligonucleotide
  Sense strand starting at position 1224 of SEQ ID NO: 1884400
gaggcaggucuuggaguuu

SEQ ID NO: 2262735 - RNA, 19 nt, Artificial Sequence
  Description of Artificial Sequence: Synthetic oligonucleotide
  Antisense strand to SEQ ID NO: 2262734
aaacuccaagaccugccuc

SEQ ID NO: 2262736 - RNA, 19 nt, Artificial Sequence
  Description of Artificial Sequence: Synthetic oligonucleotide
  Sense strand starting at position 1230 of SEQ ID NO: 1884400
ggucuuggaguuuggauga

SEQ ID NO: 2262737 - RNA, 19 nt, Artificial Sequence
  Description of Artificial Sequence: Synthetic oligonucleotide
  Antisense strand to SEQ ID NO: 2262736
ucauccaaacuccaagacc

SEQ ID NO: 2262738 - RNA, 19 nt, Artificial Sequence
  Description of Artificial Sequence: Synthetic oligonucleotide
  Sense strand starting at position 1337 of SEQ ID NO: 1884400
ggcucagucuccuugagac

SEQ ID NO: 2262739 - RNA, 19 nt, Artificial Sequence
  Description of Artificial Sequence: Synthetic oligonucleotide
  Antisense strand to SEQ ID NO: 2262738
gucucaaggagacugagcc

SEQ ID NO: 2262740 - RNA, 19 nt, Artificial Sequence
  Description of Artificial Sequence: Synthetic oligonucleotide
  Sense strand starting at position 1535 of SEQ ID NO: 1884400
guccauaaacugggaugau

SEQ ID NO: 2262741 - RNA, 19 nt, Artificial Sequence
  Description of Artificial Sequence: Synthetic oligonucleotide
  Antisense strand to SEQ ID NO: 2262740
aucaucccaguuuauggac

SEQ ID NO: 2262742 - RNA, 19 nt, Artificial Sequence
  Description of Artificial Sequence: Synthetic oligonucleotide
  Sense strand starting at position 1596 of SEQ ID NO: 1884400
agccauuaugcucaagaca

SEQ ID NO: 2262743 - RNA, 19 nt, Artificial Sequence
  Description of Artificial Sequence: Synthetic oligonucleotide
  Antisense strand to SEQ ID NO: 2262742
ugucuugagcauaauggcu

SEQ ID NO: 2262744 - RNA, 19 nt, Artificial Sequence
  Description of Artificial Sequence: Synthetic oligonucleotide
  Sense strand starting at position 1770 of SEQ ID NO: 1884400
uggguucccuguccugaaa

SEQ ID NO: 2262745 - RNA, 19 nt, Artificial Sequence
  Description of Artificial Sequence: Synthetic oligonucleotide
  Antisense strand to SEQ ID NO: 2262744
uuucaggacagggaaccca

SEQ ID NO: 2262746 - RNA, 19 nt, Artificial Sequence
  Description of Artificial Sequence: Synthetic oligonucleotide
  Sense strand starting at position 1887 of SEQ ID NO: 1884400
gggauuccucacuggucuu

SEQ ID NO: 2262747 - RNA, 19 nt, Artificial Sequence
  Description of Artificial Sequence: Synthetic oligonucleotide
  Antisense strand to SEQ ID NO: 2262746
aagaccagugaggaauccc

SEQ ID NO: 2262748 - RNA, 19 nt, Artificial Sequence
  Description of Artificial Sequence: Synthetic oligonucleotide
  Sense strand starting at position 1960 of SEQ ID NO: 1884400
agaagauguucugagagga

SEQ ID NO: 2262749 - RNA, 19 nt, Artificial Sequence
  Description of Artificial Sequence: Synthetic oligonucleotide
  Antisense strand to SEQ ID NO: 2262748
uccucucagaacaucuucu

SEQ ID NO: 2262750 - RNA, 19 nt, Artificial Sequence
  Description of Artificial Sequence: Synthetic oligonucleotide
  Sense strand starting at position 2108 of SEQ ID NO: 1884400
gugggucagaugugagaau

SEQ ID NO: 2262751 - RNA, 19 nt, Artificial Sequence
  Description of Artificial Sequence: Synthetic oligonucleotide
  Antisense strand to SEQ ID NO: 2262750
auucucacaucugacccac

SEQ ID NO: 2262752 - RNA, 19 nt, Artificial Sequence
  Description of Artificial Sequence: Synthetic oligonucleotide
  Sense strand starting at position 2199 of SEQ ID NO: 1884400
aacugauugggaugcauag

SEQ ID NO: 2262753 - RNA, 19 nt, Artificial Sequence
  Description of Artificial Sequence: Synthetic oligonucleotide
  Antisense strand to SEQ ID NO: 2262752
cuaugcaucccaaucaguu

SEQ ID NO: 2262754 - RNA, 19 nt, Artificial Sequence
  Description of Artificial Sequence: Synthetic oligonucleotide
  Sense strand starting at position 2211 of SEQ ID NO: 1884400
ugcauaggauucuaggaaa

SEQ ID NO: 2262755 - RNA, 19 nt, Artificial Sequence
  Description of Artificial Sequence: Synthetic oligonucleotide
  Antisense strand to SEQ ID NO: 2262754
uuuccuagaauccuaugca

SEQ ID NO: 2262756 - RNA, 19 nt, Artificial Sequence
  Description of Artificial Sequence: Synthetic oligonucleotide
  Sense strand starting at position 2237 of SEQ ID NO: 1884400
aguguuauagcccaacaag

SEQ ID NO: 2262757 - RNA, 19 nt, Artificial Sequence
  Description of Artificial Sequence: Synthetic oligonucleotide
  Antisense strand to SEQ ID NO: 2262756
cuuguugggcuauaacacu

SEQ ID NO: 2262758 - RNA, 19 nt, Artificial Sequence
  Description of Artificial Sequence: Synthetic oligonucleotide
  Sense strand starting at position 2279 of SEQ ID NO: 1884400
agacuaaugcacugagaac

SEQ ID NO: 2262759 - RNA, 19 nt, Artificial Sequence
  Description of Artificial Sequence: Synthetic oligonucleotide
  Antisense strand to SEQ ID NO: 2262758
guucucagugcauuagucu

SEQ ID NO: 2262760 - RNA, 19 nt, Artificial Sequence
  Description of Artificial Sequence: Synthetic oligonucleotide
  Sense strand starting at position 2367 of SEQ ID NO: 1884400
aucugccguccugagaauu

SEQ ID NO: 2262761 - RNA, 19 nt, Artificial Sequence
  Description of Artificial Sequence: Synthetic oligonucleotide
  Antisense strand to SEQ ID NO: 2262760
aauucucaggacggcagau

SEQ ID NO: 2262762 - RNA, 19 nt, Artificial Sequence
  Description of Artificial Sequence: Synthetic oligonucleotide
  Sense strand starting at position 2394 of SEQ ID NO: 1884400
aggguuuauuaaguauagu

SEQ ID NO: 2262763 - RNA, 19 nt, Artificial Sequence
  Description of Artificial Sequence: Synthetic oligonucleotide
  Antisense strand to SEQ ID NO: 2262762
acuauacuuaauaaacccu

SEQ ID NO: 2262764 - RNA, 19 nt, Artificial Sequence
  Description of Artificial Sequence: Synthetic oligonucleotide
  Sense strand starting at position 2395 of SEQ ID NO: 1884400
ggguuuauuaaguauaguu

SEQ ID NO: 2262765 - RNA, 19 nt, Artificial Sequence
  Description of Artificial Sequence: Synthetic oligonucleotide
  Antisense strand to SEQ ID NO: 2262764
aacuauacuuaauaaaccc

SEQ ID NO: 2262766 - RNA, 19 nt, Artificial Sequence
  Description of Artificial Sequence: Synthetic oligonucleotide
  Sense strand starting at position 2522 of SEQ ID NO: 1884400
ugagucaguuuccugacuu

SEQ ID NO: 2262767 - RNA, 19 nt, Artificial Sequence
  Description of Artificial Sequence: Synthetic oligonucleotide
  Antisense strand to SEQ ID NO: 2262766
aagucaggaaacugacuca

SEQ ID NO: 2262768 - RNA, 19 nt, Artificial Sequence
  Description of Artificial Sequence: Synthetic oligonucleotide
  Sense strand starting at position 2526 of SEQ ID NO: 1884400
ucaguuuccugacuuaggu

SEQ ID NO: 2262769 - RNA, 19 nt, Artificial Sequence
  Description of Artificial Sequence: Synthetic oligonucleotide
  Antisense strand to SEQ ID NO: 2262768
accuaagucaggaaacuga

SEQ ID NO: 2262770 - RNA, 19 nt, Artificial Sequence
  Description of Artificial Sequence: Synthetic oligonucleotide
  Sense strand starting at position 2558 of SEQ ID NO: 1884400
gguaacaucugguuccuca

SEQ ID NO: 2262771 - RNA, 19 nt, Artificial Sequence
  Description of Artificial Sequence: Synthetic oligonucleotide
  Antisense strand to SEQ ID NO: 2262770
ugaggaaccagauguuacc

SEQ ID NO: 2262772 - RNA, 19 nt, Artificial Sequence
  Description of Artificial Sequence: Synthetic oligonucleotide
  Sense strand starting at position 2562 of SEQ ID NO: 1884400
acaucugguuccucagaau

SEQ ID NO: 2262773 - RNA, 19 nt, Artificial Sequence
  Description of Artificial Sequence: Synthetic oligonucleotide
  Antisense strand to SEQ ID NO: 2262772
auucugaggaaccagaugu

SEQ ID NO: 2262774 - RNA, 19 nt, Artificial Sequence
  Description of Artificial Sequence: Synthetic oligonucleotide
  Sense strand starting at position 3209 of SEQ ID NO: 1884400
ggaagaugcagucagcugu

SEQ ID NO: 2262775 - RNA, 19 nt, Artificial Sequence
  Description of Artificial Sequence: Synthetic oligonucleotide
  Antisense strand to SEQ ID NO: 2262774
acagcugacugcaucuucc

SEQ ID NO: 2262776 - RNA, 19 nt, Artificial Sequence
  Description of Artificial Sequence: Synthetic oligonucleotide
  Sense strand starting at position 3215 of SEQ ID NO: 1884400
ugcagucagcugugacaga

SEQ ID NO: 2262777 - RNA, 19 nt, Artificial Sequence
  Description of Artificial Sequence: Synthetic oligonucleotide
  Antisense strand to SEQ ID NO: 2262776
ucugucacagcugacugca

SEQ ID NO: 2262778 - RNA, 19 nt, Artificial Sequence
  Description of Artificial Sequence: Synthetic oligonucleotide
  Sense strand starting at position 3331 of SEQ ID NO: 1884400
agaggagugcuuggacagu

SEQ ID NO: 2262779 - RNA, 19 nt, Artificial Sequence
  Description of Artificial Sequence: Synthetic oligonucleotide
  Antisense strand to SEQ ID NO: 2262778
acuguccaagcacuccucu

SEQ ID NO: 2262780 - RNA, 19 nt, Artificial Sequence
  Description of Artificial Sequence: Synthetic oligonucleotide
  Sense strand starting at position 3372 of SEQ ID NO: 1884400
gcacaaacuccugauguga

SEQ ID NO: 2262781 - RNA, 19 nt, Artificial Sequence
  Description of Artificial Sequence: Synthetic oligonucleotide
  Antisense strand to SEQ ID NO: 2262780
ucacaucaggaguuugugc

SEQ ID NO: 2262782 - RNA, 19 nt, Artificial Sequence
  Description of Artificial Sequence: Synthetic oligonucleotide
  Sense strand starting at position 3388 of SEQ ID NO: 1884400
ugaguugauucagugagga

SEQ ID NO: 2262783 - RNA, 19 nt, Artificial Sequence
  Description of Artificial Sequence: Synthetic oligonucleotide
  Antisense strand to SEQ ID NO: 2262782
uccucacugaaucaacuca

SEQ ID NO: 2262784 - RNA, 19 nt, Artificial Sequence
  Description of Artificial Sequence: Synthetic oligonucleotide
  Sense strand starting at position 123 of SEQ ID NO: 1884401
ccugcuggaugucucagaa

SEQ ID NO: 2262785 - RNA, 19 nt, Artificial Sequence
  Description of Artificial Sequence: Synthetic oligonucleotide
  Antisense strand to SEQ ID NO: 2262784
uucugagacauccagcagg

SEQ ID NO: 2262786 - RNA, 19 nt, Artificial Sequence
  Description of Artificial Sequence: Synthetic oligonucleotide
  Sense strand starting at position 211 of SEQ ID NO: 1884401
gucacuuagcuuugcauuu

SEQ ID NO: 2262787 - RNA, 19 nt, Artificial Sequence
  Description of Artificial Sequence: Synthetic oligonucleotide
  Antisense strand to SEQ ID NO: 2262786
aaaugcaaagcuaagugac

SEQ ID NO: 2262788 - RNA, 19 nt, Artificial Sequence
  Description of Artificial Sequence: Synthetic oligonucleotide
  Sense strand starting at position 338 of SEQ ID NO: 1884401
gaggauucccgcugacuca

SEQ ID NO: 2262789 - RNA, 19 nt, Artificial Sequence
  Description of Artificial Sequence: Synthetic oligonucleotide
  Antisense strand to SEQ ID NO: 2262788
ugagucagcgggaauccuc

SEQ ID NO: 2262790 - RNA, 19 nt, Artificial Sequence
  Description of Artificial Sequence: Synthetic oligonucleotide
  Sense strand starting at position 339 of SEQ ID NO: 1884401
aggauucccgcugacucaa

SEQ ID NO: 2262791 - RNA, 19 nt, Artificial Sequence
  Description of Artificial Sequence: Synthetic oligonucleotide
  Antisense strand to SEQ ID NO: 2262790
uugagucagcgggaauccu

SEQ ID NO: 2262792 - RNA, 19 nt, Artificial Sequence
  Description of Artificial Sequence: Synthetic oligonucleotide
  Sense strand starting at position 574 of SEQ ID NO: 1884401
agccuucuaggacacuuaa

SEQ ID NO: 2262793 - RNA, 19 nt, Artificial Sequence
  Description of Artificial Sequence: Synthetic oligonucleotide
  Antisense strand to SEQ ID NO: 2262792
uuaaguguccuagaaggcu

SEQ ID NO: 2262794 - RNA, 19 nt, Artificial Sequence
  Description of Artificial Sequence: Synthetic oligonucleotide
  Sense strand starting at position 868 of SEQ ID NO: 1884401
ucucuuucucaccgaguca

SEQ ID NO: 2262795 - RNA, 19 nt, Artificial Sequence
  Description of Artificial Sequence: Synthetic oligonucleotide
  Antisense strand to SEQ ID NO: 2262794
ugacucggugagaaagaga

SEQ ID NO: 2262796 - RNA, 19 nt, Artificial Sequence
  Description of Artificial Sequence: Synthetic oligonucleotide
  Sense strand starting at position 1575 of SEQ ID NO: 1884401
gcagcuagcgggcucuaau

SEQ ID NO: 2262797 - RNA, 19 nt, Artificial Sequence
  Description of Artificial Sequence: Synthetic oligonucleotide
  Antisense strand to SEQ ID NO: 2262796
auuagagcccgcuagcugc

SEQ ID NO: 2262798 - RNA, 19 nt, Artificial Sequence
  Description of Artificial Sequence: Synthetic oligonucleotide
  Sense strand starting at position 1597 of SEQ ID NO: 1884401
ccgcuuguccggcucuuaa

SEQ ID NO: 2262799 - RNA, 19 nt, Artificial Sequence
  Description of Artificial Sequence: Synthetic oligonucleotide
  Antisense strand to SEQ ID NO: 2262798
uuaagagccggacaagcgg

SEQ ID NO: 2262800 - RNA, 19 nt, Artificial Sequence
  Description of Artificial Sequence: Synthetic oligonucleotide
  Sense strand starting at position 1608 of SEQ ID NO: 1884401
gcucuuaaccuagauugca

SEQ ID NO: 2262801 - RNA, 19 nt, Artificial Sequence
  Description of Artificial Sequence: Synthetic oligonucleotide
  Antisense strand to SEQ ID NO: 2262800
ugcaaucuagguuaagagc

SEQ ID NO: 2262802 - RNA, 19 nt, Artificial Sequence
  Description of Artificial Sequence: Synthetic oligonucleotide
  Sense strand starting at position 1694 of SEQ ID NO: 1884401
gccucagaauuggaaggaa

SEQ ID NO: 2262803 - RNA, 19 nt, Artificial Sequence
  Description of Artificial Sequence: Synthetic oligonucleotide
  Antisense strand to SEQ ID NO: 2262802
uuccuuccaauucugaggc

SEQ ID NO: 2262804 - RNA, 19 nt, Artificial Sequence
  Description of Artificial Sequence: Synthetic oligonucleotide
  Sense strand starting at position 1770 of SEQ ID NO: 1884401
cagagccguuucuuugauu

SEQ ID NO: 2262805 - RNA, 19 nt, Artificial Sequence
  Description of Artificial Sequence: Synthetic oligonucleotide
  Antisense strand to SEQ ID NO: 2262804
aaucaaagaaacggcucug

SEQ ID NO: 2262806 - RNA, 19 nt, Artificial Sequence
  Description of Artificial Sequence: Synthetic oligonucleotide
  Sense strand starting at position 1803 of SEQ ID NO: 1884401
ggcucaauuugcccaguau

SEQ ID NO: 2262807 - RNA, 19 nt, Artificial Sequence
  Description of Artificial Sequence: Synthetic oligonucleotide
  Antisense strand to SEQ ID NO: 2262806
auacugggcaaauugagcc

SEQ ID NO: 2262808 - RNA, 19 nt, Artificial Sequence
  Description of Artificial Sequence: Synthetic oligonucleotide
  Sense strand starting at position 1815 of SEQ ID NO: 1884401
ccaguauaaucugucuuaa

SEQ ID NO: 2262809 - RNA, 19 nt, Artificial Sequence
  Description of Artificial Sequence: Synthetic oligonucleotide
  Antisense strand to SEQ ID NO: 2262808
uuaagacagauuauacugg

SEQ ID NO: 2262810 - RNA, 19 nt, Artificial Sequence
  Description of Artificial Sequence: Synthetic oligonucleotide
  Sense strand starting at position 1817 of SEQ ID NO: 1884401
aguauaaucugucuuaaug

SEQ ID NO: 2262811 - RNA, 19 nt, Artificial Sequence
  Description of Artificial Sequence: Synthetic oligonucleotide
  Antisense strand to SEQ ID NO: 2262810
cauuaagacagauuauacu

SEQ ID NO: 2262812 - RNA, 19 nt, Artificial Sequence
  Description of Artificial Sequence: Synthetic oligonucleotide
  Sense strand starting at position 1827 of SEQ ID NO: 1884401
gucuuaauguaauugcauu

SEQ ID NO: 2262813 - RNA, 19 nt, Artificial Sequence
  Description of Artificial Sequence: Synthetic oligonucleotide
  Antisense strand to SEQ ID NO: 2262812
aaugcaauuacauuaagac

SEQ ID NO: 2262814 - RNA, 19 nt, Artificial Sequence
  Description of Artificial Sequence: Synthetic oligonucleotide
  Sense strand starting at position 1910 of SEQ ID NO: 1884401
cggauuuaaucugaaucuc

SEQ ID NO: 2262815 - RNA, 19 nt, Artificial Sequence
  Description of Artificial Sequence: Synthetic oligonucleotide
  Antisense strand to SEQ ID NO: 2262814
gagauucagauuaaauccg

SEQ ID NO: 2262816 - RNA, 19 nt, Artificial Sequence
  Description of Artificial Sequence: Synthetic oligonucleotide
  Sense strand starting at position 2159 of SEQ ID NO: 1884401
ggucguggucuucaaugau

SEQ ID NO: 2262817 - RNA, 19 nt, Artificial Sequence
  Description of Artificial Sequence: Synthetic oligonucleotide
  Antisense strand to SEQ ID NO: 2262816
aucauugaagaccacgacc

SEQ ID NO: 2262818 - RNA, 19 nt, Artificial Sequence
  Description of Artificial Sequence: Synthetic oligonucleotide
  Sense strand starting at position 2310 of SEQ ID NO: 1884401
ccggauuguuuggcaaagu

SEQ ID NO: 2262819 - RNA, 19 nt, Artificial Sequence
  Description of Artificial Sequence: Synthetic oligonucleotide
  Antisense strand to SEQ ID NO: 2262818
acuuugccaaacaauccgg

SEQ ID NO: 2262820 - RNA, 19 nt, Artificial Sequence
  Description of Artificial Sequence: Synthetic oligonucleotide
  Sense strand starting at position 2423 of SEQ ID NO: 1884401
gggagagcuuaucucaacu

SEQ ID NO: 2262821 - RNA, 19 nt, Artificial Sequence
  Description of Artificial Sequence: Synthetic oligonucleotide
  Antisense strand to SEQ ID NO: 2262820
aguugagauaagcucuccc

SEQ ID NO: 2262822 - RNA, 19 nt, Artificial Sequence
  Description of Artificial Sequence: Synthetic oligonucleotide
  Sense strand starting at position 2436 of SEQ ID NO: 1884401
ucaacuucucucgaagcaa

SEQ ID NO: 2262823 - RNA, 19 nt, Artificial Sequence
  Description of Artificial Sequence: Synthetic oligonucleotide
  Antisense strand to SEQ ID NO: 2262822
uugcuucgagagaaguuga

SEQ ID NO: 2262824 - RNA, 19 nt, Artificial Sequence
  Description of Artificial Sequence: Synthetic oligonucleotide
  Sense strand starting at position 2527 of SEQ ID NO: 1884401
guucuaaggcacuagggau

SEQ ID NO: 2262825 - RNA, 19 nt, Artificial Sequence
  Description of Artificial Sequence: Synthetic oligonucleotide
  Antisense strand to SEQ ID NO: 2262824
aucccuagugccuuagaac

SEQ ID NO: 2262826 - RNA, 19 nt, Artificial Sequence
  Description of Artificial Sequence: Synthetic oligonucleotide
  Sense strand starting at position 2573 of SEQ ID NO: 1884401
gcugcuauuauggaguuga

SEQ ID NO: 2262827 - RNA, 19 nt, Artificial Sequence
  Description of Artificial Sequence: Synthetic oligonucleotide
  Antisense strand to SEQ ID NO: 2262826
ucaacuccauaauagcagc

SEQ ID NO: 2262828 - RNA, 19 nt, Artificial Sequence
  Description of Artificial Sequence: Synthetic oligonucleotide
  Sense strand starting at position 2577 of SEQ ID NO: 1884401
cuauuauggaguugacgau

SEQ ID NO: 2262829 - RNA, 19 nt, Artificial Sequence
  Description of Artificial Sequence: Synthetic oligonucleotide
  Antisense strand to SEQ ID NO: 2262828
aucgucaacuccauaauag

SEQ ID NO: 2262830 - RNA, 19 nt, Artificial Sequence
  Description of Artificial Sequence: Synthetic oligonucleotide
  Sense strand starting at position 2578 of SEQ ID NO: 1884401
uauuauggaguugacgauu

SEQ ID NO: 2262831 - RNA, 19 nt, Artificial Sequence
  Description of Artificial Sequence: Synthetic oligonucleotide
  Antisense strand to SEQ ID NO: 2262830
aaucgucaacuccauaaua

SEQ ID NO: 2262832 - RNA, 19 nt, Artificial Sequence
  Description of Artificial Sequence: Synthetic oligonucleotide
  Sense strand starting at position 2581 of SEQ ID NO: 1884401
uauggaguugacgauucuu

SEQ ID NO: 2262833 - RNA, 19 nt, Artificial Sequence
  Description of Artificial Sequence: Synthetic oligonucleotide
  Antisense strand to SEQ ID NO: 2262832
aagaaucgucaacuccaua

SEQ ID NO: 2262834 - RNA, 19 nt, Artificial Sequence
  Description of Artificial Sequence: Synthetic oligonucleotide
  Sense strand starting at position 2845 of SEQ ID NO: 1884401
ccagguuccagcgaaucuu

SEQ ID NO: 2262835 - RNA, 19 nt, Artificial Sequence
  Description of Artificial Sequence: Synthetic oligonucleotide
  Antisense strand to SEQ ID NO: 2262834
aagauucgcuggaaccugg

SEQ ID NO: 2262836 - RNA, 19 nt, Artificial Sequence
  Description of Artificial Sequence: Synthetic oligonucleotide
  Sense strand starting at position 3086 of SEQ ID NO: 1884401
uuucuuugccuagacagua

SEQ ID NO: 2262837 - RNA, 19 nt, Artificial Sequence
  Description of Artificial Sequence: Synthetic oligonucleotide
  Antisense strand to SEQ ID NO: 2262836
uacugucuaggcaaagaaa

SEQ ID NO: 2262838 - RNA, 19 nt, Artificial Sequence
  Description of Artificial Sequence: Synthetic oligonucleotide
  Sense strand starting at position 3106 of SEQ ID NO: 1884401
agaguuccaaggugggaua

SEQ ID NO: 2262839 - RNA, 19 nt, Artificial Sequence
  Description of Artificial Sequence: Synthetic oligonucleotide
  Antisense strand to SEQ ID NO: 2262838
uaucccaccuuggaacucu

SEQ ID NO: 2262840 - RNA, 19 nt, Artificial Sequence
  Description of Artificial Sequence: Synthetic oligonucleotide
  Sense strand starting at position 3162 of SEQ ID NO: 1884401
gacagauguguuggaggcu

SEQ ID NO: 2262841 - RNA, 19 nt, Artificial Sequence
  Description of Artificial Sequence: Synthetic oligonucleotide
  Antisense strand to SEQ ID NO: 2262840
agccuccaacacaucuguc

SEQ ID NO: 2262842 - RNA, 19 nt, Artificial Sequence
  Description of Artificial Sequence: Synthetic oligonucleotide
  Sense strand starting at position 3246 of SEQ ID NO: 1884401
uugggauucuaucucaucu

SEQ ID NO: 2262843 - RNA, 19 nt, Artificial Sequence
  Description of Artificial Sequence: Synthetic oligonucleotide
  Antisense strand to SEQ ID NO: 2262842
agaugagauagaaucccaa

SEQ ID NO: 2262844 - RNA, 19 nt, Artificial Sequence
  Description of Artificial Sequence: Synthetic oligonucleotide
  Sense strand starting at position 3383 of SEQ ID NO: 1884401
ugagcuaaugcauguuaau

SEQ ID NO: 2262845 - RNA, 19 nt, Artificial Sequence
  Description of Artificial Sequence: Synthetic oligonucleotide
  Antisense strand to SEQ ID NO: 2262844
auuaacaugcauuagcuca

SEQ ID NO: 2262846 - RNA, 19 nt, Artificial Sequence
  Description of Artificial Sequence: Synthetic oligonucleotide
  Sense strand starting at position 3394 of SEQ ID NO: 1884401
auguuaaugugcuuuguaa

SEQ ID NO: 2262847 - RNA, 19 nt, Artificial Sequence
  Description of Artificial Sequence: Synthetic oligonucleotide
  Antisense strand to SEQ ID NO: 2262846
uuacaaagcacauuaacau

SEQ ID NO: 2262848 - RNA, 19 nt, Artificial Sequence
  Description of Artificial Sequence: Synthetic oligonucleotide
  Sense strand starting at position 3448 of SEQ ID NO: 1884401
gagauuaucugguuugaag

SEQ ID NO: 2262849 - RNA, 19 nt, Artificial Sequence
  Description of Artificial Sequence: Synthetic oligonucleotide
  Antisense strand to SEQ ID NO: 2262848
cuucaaaccagauaaucuc

SEQ ID NO: 2262850 - RNA, 19 nt, Artificial Sequence
  Description of Artificial Sequence: Synthetic oligonucleotide
  Sense strand starting at position 3450 of SEQ ID NO: 1884401
gauuaucugguuugaagga

SEQ ID NO: 2262851 - RNA, 19 nt, Artificial Sequence
  Description of Artificial Sequence: Synthetic oligonucleotide
  Antisense strand to SEQ ID NO: 2262850
uccuucaaaccagauaauc

SEQ ID NO: 2262852 - RNA, 19 nt, Artificial Sequence
  Description of Artificial Sequence: Synthetic oligonucleotide
  Sense strand starting at position 3571 of SEQ ID NO: 1884401
gaagucaggcuuugagaaa

SEQ ID NO: 2262853 - RNA, 19 nt, Artificial Sequence
  Description of Artificial Sequence: Synthetic oligonucleotide
  Antisense strand to SEQ ID NO: 2262852
uuucucaaagccugacuuc

SEQ ID NO: 2262854 - RNA, 19 nt, Artificial Sequence
  Description of Artificial Sequence: Synthetic oligonucleotide
  Sense strand starting at position 3670 of SEQ ID NO: 1884401
uccuaauaguccuugagua

SEQ ID NO: 2262855 - RNA, 19 nt, Artificial Sequence
  Description of Artificial Sequence: Synthetic oligonucleotide
  Antisense strand to SEQ ID NO: 2262854
uacucaaggacuauuagga

SEQ ID NO: 2262856 - RNA, 19 nt, Artificial Sequence
  Description of Artificial Sequence: Synthetic oligonucleotide
  Sense strand starting at position 3671 of SEQ ID NO: 1884401
ccuaauaguccuugaguau

SEQ ID NO: 2262857 - RNA, 19 nt, Artificial Sequence
  Description of Artificial Sequence: Synthetic oligonucleotide
  Antisense strand to SEQ ID NO: 2262856
auacucaaggacuauuagg

SEQ ID NO: 2262858 - RNA, 19 nt, Artificial Sequence
  Description of Artificial Sequence: Synthetic oligonucleotide
  Sense strand starting at position 3672 of SEQ ID NO: 1884401
cuaauaguccuugaguaua

SEQ ID NO: 2262859 - RNA, 19 nt, Artificial Sequence
  Description of Artificial Sequence: Synthetic oligonucleotide
  Antisense strand to SEQ ID NO: 2262858
uauacucaaggacuauuag

SEQ ID NO: 2262860 - RNA, 19 nt, Artificial Sequence
  Description of Artificial Sequence: Synthetic oligonucleotide
  Sense strand starting at position 3907 of SEQ ID NO: 1884401
aacuucuugccguagaaac

SEQ ID NO: 2262861 - RNA, 19 nt, Artificial Sequence
  Description of Artificial Sequence: Synthetic oligonucleotide
  Antisense strand to SEQ ID NO: 2262860
guuucuacggcaagaaguu

SEQ ID NO: 2262862 - RNA, 19 nt, Artificial Sequence
  Description of Artificial Sequence: Synthetic oligonucleotide
  Sense strand starting at position 3918 of SEQ ID NO: 1884401
guagaaaccucugugcuac

SEQ ID NO: 2262863 - RNA, 19 nt, Artificial Sequence
  Description of Artificial Sequence: Synthetic oligonucleotide
  Antisense strand to SEQ ID NO: 2262862
guagcacagagguuucuac

SEQ ID NO: 2262864 - RNA, 19 nt, Artificial Sequence
  Description of Artificial Sequence: Synthetic oligonucleotide
  Sense strand starting at position 613 of SEQ ID NO: 1884402
gccucugucucuuccaaag

SEQ ID NO: 2262865 - RNA, 19 nt, Artificial Sequence
  Description of Artificial Sequence: Synthetic oligonucleotide
  Antisense strand to SEQ ID NO: 2262864
cuuuggaagagacagaggc

SEQ ID NO: 2262866 - RNA, 19 nt, Artificial Sequence
  Description of Artificial Sequence: Synthetic oligonucleotide
  Sense strand starting at position 662 of SEQ ID NO: 1884402
aguuaauaugggcguccaa

SEQ ID NO: 2262867 - RNA, 19 nt, Artificial Sequence
  Description of Artificial Sequence: Synthetic oligonucleotide
  Antisense strand to SEQ ID NO: 2262866
uuggacgcccauauuaacu

SEQ ID NO: 2262868 - RNA, 19 nt, Artificial Sequence
  Description of Artificial Sequence: Synthetic oligonucleotide
  Sense strand starting at position 1278 of SEQ ID NO: 1884402
guucgauacccaggugaga

SEQ ID NO: 2262869 - RNA, 19 nt, Artificial Sequence
  Description of Artificial Sequence: Synthetic oligonucleotide
  Antisense strand to SEQ ID NO: 2262868
ucucaccuggguaucgaac

SEQ ID NO: 2262870 - RNA, 19 nt, Artificial Sequence
  Description of Artificial Sequence: Synthetic oligonucleotide
  Sense strand starting at position 1312 of SEQ ID NO: 1884402
gguacuguucuggaaggau

SEQ ID NO: 2262871 - RNA, 19 nt, Artificial Sequence
  Description of Artificial Sequence: Synthetic oligonucleotide
  Antisense strand to SEQ ID NO: 2262870
auccuuccagaacaguacc

SEQ ID NO: 2262872 - RNA, 19 nt, Artificial Sequence
  Description of Artificial Sequence: Synthetic oligonucleotide
  Sense strand starting at position 1333 of SEQ ID NO: 1884402
augaauaguucuuucggga

SEQ ID NO: 2262873 - RNA, 19 nt, Artificial Sequence
  Description of Artificial Sequence: Synthetic oligonucleotide
  Antisense strand to SEQ ID NO: 2262872
ucccgaaagaacuauucau

SEQ ID NO: 2262874 - RNA, 19 nt, Artificial Sequence
  Description of Artificial Sequence: Synthetic oligonucleotide
  Sense strand starting at position 1347 of SEQ ID NO: 1884402
cgggauggugugggagaaa

SEQ ID NO: 2262875 - RNA, 19 nt, Artificial Sequence
  Description of Artificial Sequence: Synthetic oligonucleotide
  Antisense strand to SEQ ID NO: 2262874
uuucucccacaccaucccg

SEQ ID NO: 2262876 - RNA, 19 nt, Artificial Sequence
  Description of Artificial Sequence: Synthetic oligonucleotide
  Sense strand starting at position 1484 of SEQ ID NO: 1884402
ggagguuugccuuaagagc

SEQ ID NO: 2262877 - RNA, 19 nt, Artificial Sequence
  Description of Artificial Sequence: Synthetic oligonucleotide
  Antisense strand to SEQ ID NO: 2262876
gcucuuaaggcaaaccucc

SEQ ID NO: 2262878 - RNA, 19 nt, Artificial Sequence
  Description of Artificial Sequence: Synthetic oligonucleotide
  Sense strand starting at position 1670 of SEQ ID NO: 1884402
gcgguuccgcagagauucu

SEQ ID NO: 2262879 - RNA, 19 nt, Artificial Sequence
  Description of Artificial Sequence: Synthetic oligonucleotide
  Antisense strand to SEQ ID NO: 2262878
agaaucucugcggaaccgc

SEQ ID NO: 2262880 - RNA, 19 nt, Artificial Sequence
  Description of Artificial Sequence: Synthetic oligonucleotide
  Sense strand starting at position 1679 of SEQ ID NO: 1884402
cagagauucuguuccggac

SEQ ID NO: 2262881 - RNA, 19 nt, Artificial Sequence
  Description of Artificial Sequence: Synthetic oligonucleotide
  Antisense strand to SEQ ID NO: 2262880
guccggaacagaaucucug

SEQ ID NO: 2262882 - RNA, 19 nt, Artificial Sequence
  Description of Artificial Sequence: Synthetic oligonucleotide
  Sense strand starting at position 1685 of SEQ ID NO: 1884402
uucuguuccggacaaggaa

SEQ ID NO: 2262883 - RNA, 19 nt, Artificial Sequence
  Description of Artificial Sequence: Synthetic oligonucleotide
  Antisense strand to SEQ ID NO: 2262882
uuccuuguccggaacagaa

SEQ ID NO: 2262884 - RNA, 19 nt, Artificial Sequence
  Description of Artificial Sequence: Synthetic oligonucleotide
  Sense strand starting at position 1793 of SEQ ID NO: 1884402
cuucccuuggcuugaagau

SEQ ID NO: 2262885 - RNA, 19 nt, Artificial Sequence
  Description of Artificial Sequence: Synthetic oligonucleotide
  Antisense strand to SEQ ID NO: 2262884
aucuucaagccaagggaag

SEQ ID NO: 2262886 - RNA, 19 nt, Artificial Sequence
  Description of Artificial Sequence: Synthetic oligonucleotide
  Sense strand starting at position 1998 of SEQ ID NO: 1884402
gugguagauccugguguug

SEQ ID NO: 2262887 - RNA, 19 nt, Artificial Sequence
  Description of Artificial Sequence: Synthetic oligonucleotide
  Antisense strand to SEQ ID NO: 2262886
caacaccaggaucuaccac

SEQ ID NO: 2262888 - RNA, 19 nt, Artificial Sequence
  Description of Artificial Sequence: Synthetic oligonucleotide
  Sense strand starting at position 2261 of SEQ ID NO: 1884402
ggaugugacuguccgguua

SEQ ID NO: 2262889 - RNA, 19 nt, Artificial Sequence
  Description of Artificial Sequence: Synthetic oligonucleotide
  Antisense strand to SEQ ID NO: 2262888
uaaccggacagucacaucc

SEQ ID NO: 2262890 - RNA, 19 nt, Artificial Sequence
  Description of Artificial Sequence: Synthetic oligonucleotide
  Sense strand starting at position 2357 of SEQ ID NO: 1884402
gcacauacuucccugcuga

SEQ ID NO: 2262891 - RNA, 19 nt, Artificial Sequence
  Description of Artificial Sequence: Synthetic oligonucleotide
  Antisense strand to SEQ ID NO: 2262890
ucagcagggaaguaugugc

SEQ ID NO: 2262892 - RNA, 19 nt, Artificial Sequence
  Description of Artificial Sequence: Synthetic oligonucleotide
  Sense strand starting at position 2393 of SEQ ID NO: 1884402
ccuggagcuuucucugauc

SEQ ID NO: 2262893 - RNA, 19 nt, Artificial Sequence
  Description of Artificial Sequence: Synthetic oligonucleotide
  Antisense strand to SEQ ID NO: 2262892
gaucagagaaagcuccagg

SEQ ID NO: 2262894 - RNA, 19 nt, Artificial Sequence
  Description of Artificial Sequence: Synthetic oligonucleotide
  Sense strand starting at position 2466 of SEQ ID NO: 1884402
agcuaauuguaagcagacu

SEQ ID NO: 2262895 - RNA, 19 nt, Artificial Sequence
  Description of Artificial Sequence: Synthetic oligonucleotide
  Antisense strand to SEQ ID NO: 2262894
agucugcuuacaauuagcu

SEQ ID NO: 2262896 - RNA, 19 nt, Artificial Sequence
  Description of Artificial Sequence: Synthetic oligonucleotide
  Sense strand starting at position 2488 of SEQ ID NO: 1884402
ggaacucugggcuggagaa

SEQ ID NO: 2262897 - RNA, 19 nt, Artificial Sequence
  Description of Artificial Sequence: Synthetic oligonucleotide
  Antisense strand to SEQ ID NO: 2262896
uucuccagcccagaguucc

SEQ ID NO: 2262898 - RNA, 19 nt, Artificial Sequence
  Description of Artificial Sequence: Synthetic oligonucleotide
  Sense strand starting at position 2598 of SEQ ID NO: 1884402
ugagugaugguguguggga

SEQ ID NO: 2262899 - RNA, 19 nt, Artificial Sequence
  Description of Artificial Sequence: Synthetic oligonucleotide
  Antisense strand to SEQ ID NO: 2262898
ucccacacaccaucacuca

SEQ ID NO: 2262900 - RNA, 19 nt, Artificial Sequence
  Description of Artificial Sequence: Synthetic oligonucleotide
  Sense strand starting at position 2684 of SEQ ID NO: 1884402
ucuguuguuacguacagga

SEQ ID NO: 2262901 - RNA, 19 nt, Artificial Sequence
  Description of Artificial Sequence: Synthetic oligonucleotide
  Antisense strand to SEQ ID NO: 2262900
uccuguacguaacaacaga

SEQ ID NO: 2262902 - RNA, 19 nt, Artificial Sequence
  Description of Artificial Sequence: Synthetic oligonucleotide
  Sense strand starting at position 2686 of SEQ ID NO: 1884402
uguuguuacguacaggauu

SEQ ID NO: 2262903 - RNA, 19 nt, Artificial Sequence
  Description of Artificial Sequence: Synthetic oligonucleotide
  Antisense strand to SEQ ID NO: 2262902
aauccuguacguaacaaca

SEQ ID NO: 2262904 - RNA, 19 nt, Artificial Sequence
  Description of Artificial Sequence: Synthetic oligonucleotide
  Sense strand starting at position 2700 of SEQ ID NO: 1884402
ggauuuguccagugggcuc

SEQ ID NO: 2262905 - RNA, 19 nt, Artificial Sequence
  Description of Artificial Sequence: Synthetic oligonucleotide
  Antisense strand to SEQ ID NO: 2262904
gagcccacuggacaaaucc

SEQ ID NO: 2262906 - RNA, 19 nt, Artificial Sequence
  Description of Artificial Sequence: Synthetic oligonucleotide
  Sense strand starting at position 2781 of SEQ ID NO: 1884402
ggguuuaugagguguagug

SEQ ID NO: 2262907 - RNA, 19 nt, Artificial Sequence
  Description of Artificial Sequence: Synthetic oligonucleotide
  Antisense strand to SEQ ID NO: 2262906
cacuacaccucauaaaccc

SEQ ID NO: 2262908 - RNA, 19 nt, Artificial Sequence
  Description of Artificial Sequence: Synthetic oligonucleotide
  Sense strand starting at position 2982 of SEQ ID NO: 1884402
gugcauaggcucuggaaag

SEQ ID NO: 2262909 - RNA, 19 nt, Artificial Sequence
  Description of Artificial Sequence: Synthetic oligonucleotide
  Antisense strand to SEQ ID NO: 2262908
cuuuccagagccuaugcac

SEQ ID NO: 2262910 - RNA, 19 nt, Artificial Sequence
  Description of Artificial Sequence: Synthetic oligonucleotide
  Sense strand starting at position 3160 of SEQ ID NO: 1884402
uggugaacauaguuuggau

SEQ ID NO: 2262911 - RNA, 19 nt, Artificial Sequence
  Description of Artificial Sequence: Synthetic oligonucleotide
  Antisense strand to SEQ ID NO: 2262910
auccaaacuauguucacca

SEQ ID NO: 2262912 - RNA, 19 nt, Artificial Sequence
  Description of Artificial Sequence: Synthetic oligonucleotide
  Sense strand starting at position 3196 of SEQ ID NO: 1884402
ggccacuuccaguggacua

SEQ ID NO: 2262913 - RNA, 19 nt, Artificial Sequence
  Description of Artificial Sequence: Synthetic oligonucleotide
  Antisense strand to SEQ ID NO: 2262912
uaguccacuggaaguggcc

SEQ ID NO: 2262914 - RNA, 19 nt, Artificial Sequence
  Description of Artificial Sequence: Synthetic oligonucleotide
  Sense strand starting at position 3404 of SEQ ID NO: 1884402
ugguuauggcaugaggacu

SEQ ID NO: 2262915 - RNA, 19 nt, Artificial Sequence
  Description of Artificial Sequence: Synthetic oligonucleotide
  Antisense strand to SEQ ID NO: 2262914
aguccucaugccauaacca

SEQ ID NO: 2262916 - RNA, 19 nt, Artificial Sequence
  Description of Artificial Sequence: Synthetic oligonucleotide
  Sense strand starting at position 3412 of SEQ ID NO: 1884402
gcaugaggacugugucuga

SEQ ID NO: 2262917 - RNA, 19 nt, Artificial Sequence
  Description of Artificial Sequence: Synthetic oligonucleotide
  Antisense strand to SEQ ID NO: 2262916
ucagacacaguccucaugc

SEQ ID NO: 2262918 - RNA, 19 nt, Artificial Sequence
  Description of Artificial Sequence: Synthetic oligonucleotide
  Sense strand starting at position 3445 of SEQ ID NO: 1884402
guuuccaggucccaaauuu

SEQ ID NO: 2262919 - RNA, 19 nt, Artificial Sequence
  Description of Artificial Sequence: Synthetic oligonucleotide
  Antisense strand to SEQ ID NO: 2262918
aaauuugggaccuggaaac

SEQ ID NO: 2262920 - RNA, 19 nt, Artificial Sequence
  Description of Artificial Sequence: Synthetic oligonucleotide
  Sense strand starting at position 3561 of SEQ ID NO: 1884402
aggagauuggguuguguag

SEQ ID NO: 2262921 - RNA, 19 nt, Artificial Sequence
  Description of Artificial Sequence: Synthetic oligonucleotide
  Antisense strand to SEQ ID NO: 2262920
cuacacaacccaaucuccu

SEQ ID NO: 2262922 - RNA, 19 nt, Artificial Sequence
  Description of Artificial Sequence: Synthetic oligonucleotide
  Sense strand starting at position 3573 of SEQ ID NO: 1884402
uguguaguggcugauaaca

SEQ ID NO: 2262923 - RNA, 19 nt, Artificial Sequence
  Description of Artificial Sequence: Synthetic oligonucleotide
  Antisense strand to SEQ ID NO: 2262922
uguuaucagccacuacaca

SEQ ID NO: 2262924 - RNA, 19 nt, Artificial Sequence
  Description of Artificial Sequence: Synthetic oligonucleotide
  Sense strand starting at position 3597 of SEQ ID NO: 1884402
uuuaaagucagauggguau

SEQ ID NO: 2262925 - RNA, 19 nt, Artificial Sequence
  Description of Artificial Sequence: Synthetic oligonucleotide
  Antisense strand to SEQ ID NO: 2262924
auacccaucugacuuuaaa

SEQ ID NO: 2262926 - RNA, 19 nt, Artificial Sequence
  Description of Artificial Sequence: Synthetic oligonucleotide
  Sense strand starting at position 3619 of SEQ ID NO: 1884402
uggugucuugcgucuguca

SEQ ID NO: 2262927 - RNA, 19 nt, Artificial Sequence
  Description of Artificial Sequence: Synthetic oligonucleotide
  Antisense strand to SEQ ID NO: 2262926
ugacagacgcaagacacca

SEQ ID NO: 2262928 - RNA, 19 nt, Artificial Sequence
  Description of Artificial Sequence: Synthetic oligonucleotide
  Sense strand starting at position 3620 of SEQ ID NO: 1884402
ggugucuugcgucugucau

SEQ ID NO: 2262929 - RNA, 19 nt, Artificial Sequence
  Description of Artificial Sequence: Synthetic oligonucleotide
  Antisense strand to SEQ ID NO: 2262928
augacagacgcaagacacc

SEQ ID NO: 2262930 - RNA, 19 nt, Artificial Sequence
  Description of Artificial Sequence: Synthetic oligonucleotide
  Sense strand starting at position 3648 of SEQ ID NO: 1884402
aggugaccaccuugauuaa

SEQ ID NO: 2262931 - RNA, 19 nt, Artificial Sequence
  Description of Artificial Sequence: Synthetic oligonucleotide
  Antisense strand to SEQ ID NO: 2262930
uuaaucaagguggucaccu

SEQ ID NO: 2262932 - RNA, 19 nt, Artificial Sequence
  Description of Artificial Sequence: Synthetic oligonucleotide
  Sense strand starting at position 3723 of SEQ ID NO: 1884402
aguugugagcauuaagaaa

SEQ ID NO: 2262933 - RNA, 19 nt, Artificial Sequence
  Description of Artificial Sequence: Synthetic oligonucleotide
  Antisense strand to SEQ ID NO: 2262932
uuucuuaaugcucacaacu

SEQ ID NO: 2262934 - RNA, 19 nt, Artificial Sequence
  Description of Artificial Sequence: Synthetic oligonucleotide
  Sense strand starting at position 3746 of SEQ ID NO: 1884402
acguaaaguguucagugca

SEQ ID NO: 2262935 - RNA, 19 nt, Artificial Sequence
  Description of Artificial Sequence: Synthetic oligonucleotide
  Antisense strand to SEQ ID NO: 2262934
ugcacugaacacuuuacgu

SEQ ID NO: 2262936 - RNA, 19 nt, Artificial Sequence
  Description of Artificial Sequence: Synthetic oligonucleotide
  Sense strand starting at position 3765 of SEQ ID NO: 1884402
gugucuggcaaauaaggaa

SEQ ID NO: 2262937 - RNA, 19 nt, Artificial Sequence
  Description of Artificial Sequence: Synthetic oligonucleotide
  Antisense strand to SEQ ID NO: 2262936
uuccuuauuugccagacac

SEQ ID NO: 2262938 - RNA, 19 nt, Artificial Sequence
  Description of Artificial Sequence: Synthetic oligonucleotide
  Sense strand starting at position 3842 of SEQ ID NO: 1884402
acauuaauagcccguaaau

SEQ ID NO: 2262939 - RNA, 19 nt, Artificial Sequence
  Description of Artificial Sequence: Synthetic oligonucleotide
  Antisense strand to SEQ ID NO: 2262938
auuuacgggcuauuaaugu

SEQ ID NO: 2262940 - RNA, 19 nt, Artificial Sequence
  Description of Artificial Sequence: Synthetic oligonucleotide
  Sense strand starting at position 3844 of SEQ ID NO: 1884402
auuaauagcccguaaauga

SEQ ID NO: 2262941 - RNA, 19 nt, Artificial Sequence
  Description of Artificial Sequence: Synthetic oligonucleotide
  Antisense strand to SEQ ID NO: 2262940
ucauuuacgggcuauuaau

SEQ ID NO: 2262942 - RNA, 19 nt, Artificial Sequence
  Description of Artificial Sequence: Synthetic oligonucleotide
  Sense strand starting at position 3898 of SEQ ID NO: 1884402
agguaucaaucuguuccaa

SEQ ID NO: 2262943 - RNA, 19 nt, Artificial Sequence
  Description of Artificial Sequence: Synthetic oligonucleotide
  Antisense strand to SEQ ID NO: 2262942
uuggaacagauugauaccu

SEQ ID NO: 2262944 - RNA, 19 nt, Artificial Sequence
  Description of Artificial Sequence: Synthetic oligonucleotide
  Sense strand starting at position 277 of SEQ ID NO: 1884403
cucugagucuuggagacag

SEQ ID NO: 2262945 - RNA, 19 nt, Artificial Sequence
  Description of Artificial Sequence: Synthetic oligonucleotide
  Antisense strand to SEQ ID NO: 2262944
cugucuccaagacucagag

SEQ ID NO: 2262946 - RNA, 19 nt, Artificial Sequence
  Description of Artificial Sequence: Synthetic oligonucleotide
  Sense strand starting at position 325 of SEQ ID NO: 1884403
ggcuauguuucuucuacca

SEQ ID NO: 2262947 - RNA, 19 nt, Artificial Sequence
  Description of Artificial Sequence: Synthetic oligonucleotide
  Antisense strand to SEQ ID NO: 2262946
ugguagaagaaacauagcc

SEQ ID NO: 2262948 - RNA, 19 nt, Artificial Sequence
  Description of Artificial Sequence: Synthetic oligonucleotide
  Sense strand starting at position 330 of SEQ ID NO: 1884403
uguuucuucuaccagagac

SEQ ID NO: 2262949 - RNA, 19 nt, Artificial Sequence
  Description of Artificial Sequence: Synthetic oligonucleotide
  Antisense strand to SEQ ID NO: 2262948
gucucugguagaagaaaca

SEQ ID NO: 2262950 - RNA, 19 nt, Artificial Sequence
  Description of Artificial Sequence: Synthetic oligonucleotide
  Sense strand starting at position 456 of SEQ ID NO: 1884403
ggauuagaucacugauucu

SEQ ID NO: 2262951 - RNA, 19 nt, Artificial Sequence
  Description of Artificial Sequence: Synthetic oligonucleotide
  Antisense strand to SEQ ID NO: 2262950
agaaucagugaucuaaucc

SEQ ID NO: 2262952 - RNA, 19 nt, Artificial Sequence
  Description of Artificial Sequence: Synthetic oligonucleotide
  Sense strand starting at position 564 of SEQ ID NO: 1884403
uuguguugccugcuugcaa

SEQ ID NO: 2262953 - RNA, 19 nt, Artificial Sequence
  Description of Artificial Sequence: Synthetic oligonucleotide
  Antisense strand to SEQ ID NO: 2262952
uugcaagcaggcaacacaa

SEQ ID NO: 2262954 - RNA, 19 nt, Artificial Sequence
  Description of Artificial Sequence: Synthetic oligonucleotide
  Sense strand starting at position 616 of SEQ ID NO: 1884403
guuuaucugucucuuccua

SEQ ID NO: 2262955 - RNA, 19 nt, Artificial Sequence
  Description of Artificial Sequence: Synthetic oligonucleotide
  Antisense strand to SEQ ID NO: 2262954
uaggaagagacagauaaac

SEQ ID NO: 2262956 - RNA, 19 nt, Artificial Sequence
  Description of Artificial Sequence: Synthetic oligonucleotide
  Sense strand starting at position 688 of SEQ ID NO: 1884403
cucggauugcgccugcaau

SEQ ID NO: 2262957 - RNA, 19 nt, Artificial Sequence
  Description of Artificial Sequence: Synthetic oligonucleotide
  Antisense strand to SEQ ID NO: 2262956
auugcaggcgcaauccgag

SEQ ID NO: 2262958 - RNA, 19 nt, Artificial Sequence
  Description of Artificial Sequence: Synthetic oligonucleotide
  Sense strand starting at position 868 of SEQ ID NO: 1884403
guguucugacgauguccuu

SEQ ID NO: 2262959 - RNA, 19 nt, Artificial Sequence
  Description of Artificial Sequence: Synthetic oligonucleotide
  Antisense strand to SEQ ID NO: 2262958
aaggacaucgucagaacac

SEQ ID NO: 2262960 - RNA, 19 nt, Artificial Sequence
  Description of Artificial Sequence: Synthetic oligonucleotide
  Sense strand starting at position 947 of SEQ ID NO: 1884403
aggcuagguccugguggaa

SEQ ID NO: 2262961 - RNA, 19 nt, Artificial Sequence
  Description of Artificial Sequence: Synthetic oligonucleotide
  Antisense strand to SEQ ID NO: 2262960
uuccaccaggaccuagccu

SEQ ID NO: 2262962 - RNA, 19 nt, Artificial Sequence
  Description of Artificial Sequence: Synthetic oligonucleotide
  Sense strand starting at position 1026 of SEQ ID NO: 1884403
auuguagagugaugggaaa

SEQ ID NO: 2262963 - RNA, 19 nt, Artificial Sequence
  Description of Artificial Sequence: Synthetic oligonucleotide
  Antisense strand to SEQ ID NO: 2262962
uuucccaucacucuacaau

SEQ ID NO: 2262964 - RNA, 19 nt, Artificial Sequence
  Description of Artificial Sequence: Synthetic oligonucleotide
  Sense strand starting at position 2048 of SEQ ID NO: 1884403
agcuuauucugcguguuaa

SEQ ID NO: 2262965 - RNA, 19 nt, Artificial Sequence
  Description of Artificial Sequence: Synthetic oligonucleotide
  Antisense strand to SEQ ID NO: 2262964
uuaacacgcagaauaagcu

SEQ ID NO: 2262966 - RNA, 19 nt, Artificial Sequence
  Description of Artificial Sequence: Synthetic oligonucleotide
  Sense strand starting at position 2059 of SEQ ID NO: 1884403
cguguuaaaugccuagauc

SEQ ID NO: 2262967 - RNA, 19 nt, Artificial Sequence
  Description of Artificial Sequence: Synthetic oligonucleotide
  Antisense strand to SEQ ID NO: 2262966
gaucuaggcauuuaacacg

SEQ ID NO: 2262968 - RNA, 19 nt, Artificial Sequence
  Description of Artificial Sequence: Synthetic oligonucleotide
  Sense strand starting at position 2060 of SEQ ID NO: 1884403
guguuaaaugccuagaucu

SEQ ID NO: 2262969 - RNA, 19 nt, Artificial Sequence
  Description of Artificial Sequence: Synthetic oligonucleotide
  Antisense strand to SEQ ID NO: 2262968
agaucuaggcauuuaacac

SEQ ID NO: 2262970 - RNA, 19 nt, Artificial Sequence
  Description of Artificial Sequence: Synthetic oligonucleotide
  Sense strand starting at position 2086 of SEQ ID NO: 1884403
gcaugagacuucuuagccu

SEQ ID NO: 2262971 - RNA, 19 nt, Artificial Sequence
  Description of Artificial Sequence: Synthetic oligonucleotide
  Antisense strand to SEQ ID NO: 2262970
aggcuaagaagucucaugc

SEQ ID NO: 2262972 - RNA, 19 nt, Artificial Sequence
  Description of Artificial Sequence: Synthetic oligonucleotide
  Sense strand starting at position 2089 of SEQ ID NO: 1884403
ugagacuucuuagccucua

SEQ ID NO: 2262973 - RNA, 19 nt, Artificial Sequence
  Description of Artificial Sequence: Synthetic oligonucleotide
  Antisense strand to SEQ ID NO: 2262972
uagaggcuaagaagucuca

SEQ ID NO: 2262974 - RNA, 19 nt, Artificial Sequence
  Description of Artificial Sequence: Synthetic oligonucleotide
  Sense strand starting at position 2126 of SEQ ID NO: 1884403
agaucacagucuguacuaa

SEQ ID NO: 2262975 - RNA, 19 nt, Artificial Sequence
  Description of Artificial Sequence: Synthetic oligonucleotide
  Antisense strand to SEQ ID NO: 2262974
uuaguacagacugugaucu

SEQ ID NO: 2262976 - RNA, 19 nt, Artificial Sequence
  Description of Artificial Sequence: Synthetic oligonucleotide
  Sense strand starting at position 2138 of SEQ ID NO: 1884403
guacuaauuguguagagga

SEQ ID NO: 2262977 - RNA, 19 nt, Artificial Sequence
  Description of Artificial Sequence: Synthetic oligonucleotide
  Antisense strand to SEQ ID NO: 2262976
uccucuacacaauuaguac

SEQ ID NO: 2262978 - RNA, 19 nt, Artificial Sequence
  Description of Artificial Sequence: Synthetic oligonucleotide
  Sense strand starting at position 2302 of SEQ ID NO: 1884403
aaggacgucuccucuuaaa

SEQ ID NO: 2262979 - RNA, 19 nt, Artificial Sequence
  Description of Artificial Sequence: Synthetic oligonucleotide
  Antisense strand to SEQ ID NO: 2262978
uuuaagaggagacguccuu

SEQ ID NO: 2262980 - RNA, 19 nt, Artificial Sequence
  Description of Artificial Sequence: Synthetic oligonucleotide
  Sense strand starting at position 2305 of SEQ ID NO: 1884403
gacgucuccucuuaaagaa

SEQ ID NO: 2262981 - RNA, 19 nt, Artificial Sequence
  Description of Artificial Sequence: Synthetic oligonucleotide
  Antisense strand to SEQ ID NO: 2262980
uucuuuaagaggagacguc

SEQ ID NO: 2262982 - RNA, 19 nt, Artificial Sequence
  Description of Artificial Sequence: Synthetic oligonucleotide
  Sense strand starting at position 2344 of SEQ ID NO: 1884403
gaaauaaacguaggaucca

SEQ ID NO: 2262983 - RNA, 19 nt, Artificial Sequence
  Description of Artificial Sequence: Synthetic oligonucleotide
  Antisense strand to SEQ ID NO: 2262982
uggauccuacguuuauuuc

SEQ ID NO: 2262984 - RNA, 19 nt, Artificial Sequence
  Description of Artificial Sequence: Synthetic oligonucleotide
  Sense strand starting at position 2452 of SEQ ID NO: 1884403
agcuguggaguucagacua

SEQ ID NO: 2262985 - RNA, 19 nt, Artificial Sequence
  Description of Artificial Sequence: Synthetic oligonucleotide
  Antisense strand to SEQ ID NO: 2262984
uagucugaacuccacagcu

SEQ ID NO: 2262986 - RNA, 19 nt, Artificial Sequence
  Description of Artificial Sequence: Synthetic oligonucleotide
  Sense strand starting at position 2519 of SEQ ID NO: 1884403
ucagaaacuuggcuucuga

SEQ ID NO: 2262987 - RNA, 19 nt, Artificial Sequence
  Description of Artificial Sequence: Synthetic oligonucleotide
  Antisense strand to SEQ ID NO: 2262986
ucagaagccaaguuucuga

SEQ ID NO: 2262988 - RNA, 19 nt, Artificial Sequence
  Description of Artificial Sequence: Synthetic oligonucleotide
  Sense strand starting at position 2549 of SEQ ID NO: 1884403
uugucuguggcaggugaau

SEQ ID NO: 2262989 - RNA, 19 nt, Artificial Sequence
  Description of Artificial Sequence: Synthetic oligonucleotide
  Antisense strand to SEQ ID NO: 2262988
auucaccugccacagacaa

SEQ ID NO: 2262990 - RNA, 19 nt, Artificial Sequence
  Description of Artificial Sequence: Synthetic oligonucleotide
  Sense strand starting at position 2845 of SEQ ID NO: 1884403
ccuguuaucuggccucaug

SEQ ID NO: 2262991 - RNA, 19 nt, Artificial Sequence
  Description of Artificial Sequence: Synthetic oligonucleotide
  Antisense strand to SEQ ID NO: 2262990
caugaggccagauaacagg

SEQ ID NO: 2262992 - RNA, 19 nt, Artificial Sequence
  Description of Artificial Sequence: Synthetic oligonucleotide
  Sense strand starting at position 2848 of SEQ ID NO: 1884403
guuaucuggccucaugguu

SEQ ID NO: 2262993 - RNA, 19 nt, Artificial Sequence
  Description of Artificial Sequence: Synthetic oligonucleotide
  Antisense strand to SEQ ID NO: 2262992
aaccaugaggccagauaac

SEQ ID NO: 2262994 - RNA, 19 nt, Artificial Sequence
  Description of Artificial Sequence: Synthetic oligonucleotide
  Sense strand starting at position 3031 of SEQ ID NO: 1884403
uggcauuugucuucucacu

SEQ ID NO: 2262995 - RNA, 19 nt, Artificial Sequence
  Description of Artificial Sequence: Synthetic oligonucleotide
  Antisense strand to SEQ ID NO: 2262994
agugagaagacaaaugcca

SEQ ID NO: 2262996 - RNA, 19 nt, Artificial Sequence
  Description of Artificial Sequence: Synthetic oligonucleotide
  Sense strand starting at position 3147 of SEQ ID NO: 1884403
cgcaccucuuccuuaugaa

SEQ ID NO: 2262997 - RNA, 19 nt, Artificial Sequence
  Description of Artificial Sequence: Synthetic oligonucleotide
  Antisense strand to SEQ ID NO: 2262996
uucauaaggaagaggugcg

SEQ ID NO: 2262998 - RNA, 19 nt, Artificial Sequence
  Description of Artificial Sequence: Synthetic oligonucleotide
  Sense strand starting at position 3448 of SEQ ID NO: 1884403
cugggacauuguccuaauu

SEQ ID NO: 2262999 - RNA, 19 nt, Artificial Sequence
  Description of Artificial Sequence: Synthetic oligonucleotide
  Antisense strand to SEQ ID NO: 2262998
aauuaggacaaugucccag

SEQ ID NO: 2263000 - RNA, 19 nt, Artificial Sequence
  Description of Artificial Sequence: Synthetic oligonucleotide
  Sense strand starting at position 3563 of SEQ ID NO: 1884403
cacagaggacucuaacguu

SEQ ID NO: 2263001 - RNA, 19 nt, Artificial Sequence
  Description of Artificial Sequence: Synthetic oligonucleotide
  Antisense strand to SEQ ID NO: 2263000
aacguuagaguccucugug

SEQ ID NO: 2263002 - RNA, 19 nt, Artificial Sequence
  Description of Artificial Sequence: Synthetic oligonucleotide
  Sense strand starting at position 3700 of SEQ ID NO: 1884403
cugggcucugugcaguaua

SEQ ID NO: 2263003 - RNA, 19 nt, Artificial Sequence
  Description of Artificial Sequence: Synthetic oligonucleotide
  Antisense strand to SEQ ID NO: 2263002
uauacugcacagagcccag

SEQ ID NO: 2263004 - RNA, 19 nt, Artificial Sequence
  Description of Artificial Sequence: Synthetic oligonucleotide
  Sense strand starting at position 3729 of SEQ ID NO: 1884403
gagagagcuugagauguga

SEQ ID NO: 2263005 - RNA, 19 nt, Artificial Sequence
  Description of Artificial Sequence: Synthetic oligonucleotide
  Antisense strand to SEQ ID NO: 2263004
ucacaucucaagcucucuc

SEQ ID NO: 2263006 - RNA, 19 nt, Artificial Sequence
  Description of Artificial Sequence: Synthetic oligonucleotide
  Sense strand starting at position 3733 of SEQ ID NO: 1884403
gagcuugagaugugagcuu

SEQ ID NO: 2263007 - RNA, 19 nt, Artificial Sequence
  Description of Artificial Sequence: Synthetic oligonucleotide
  Antisense strand to SEQ ID NO: 2263006
aagcucacaucucaagcuc

SEQ ID NO: 2263008 - RNA, 19 nt, Artificial Sequence
  Description of Artificial Sequence: Synthetic oligonucleotide
  Sense strand starting at position 3843 of SEQ ID NO: 1884403
gccgaaagagcucgguuaa

SEQ ID NO: 2263009 - RNA, 19 nt, Artificial Sequence
  Description of Artificial Sequence: Synthetic oligonucleotide
  Antisense strand to SEQ ID NO: 2263008
uuaaccgagcucuuucggc

SEQ ID NO: 2263010 - RNA, 19 nt, Artificial Sequence
  Description of Artificial Sequence: Synthetic oligonucleotide
  Sense strand starting at position 3844 of SEQ ID NO: 1884403
ccgaaagagcucgguuaag

SEQ ID NO: 2263011 - RNA, 19 nt, Artificial Sequence
  Description of Artificial Sequence: Synthetic oligonucleotide
  Antisense strand to SEQ ID NO: 2263010
cuuaaccgagcucuuucgg

SEQ ID NO: 2263012 - RNA, 19 nt, Artificial Sequence
  Description of Artificial Sequence: Synthetic oligonucleotide
  Sense strand starting at position 3853 of SEQ ID NO: 1884403
cucgguuaaguccagcuua

SEQ ID NO: 2263013 - RNA, 19 nt, Artificial Sequence
  Description of Artificial Sequence: Synthetic oligonucleotide
  Antisense strand to SEQ ID NO: 2263012
uaagcuggacuuaaccgag

SEQ ID NO: 2263014 - RNA, 19 nt, Artificial Sequence
  Description of Artificial Sequence: Synthetic oligonucleotide
  Sense strand starting at position 3927 of SEQ ID NO: 1884403
ucagguucuuaucuguaaa

SEQ ID NO: 2263015 - RNA, 19 nt, Artificial Sequence
  Description of Artificial Sequence: Synthetic oligonucleotide
  Antisense strand to SEQ ID NO: 2263014
uuuacagauaagaaccuga

SEQ ID NO: 2263016 - RNA, 19 nt, Artificial Sequence
  Description of Artificial Sequence: Synthetic oligonucleotide
  Sense strand starting at position 3929 of SEQ ID NO: 1884403
agguucuuaucuguaaaga

SEQ ID NO: 2263017 - RNA, 19 nt, Artificial Sequence
  Description of Artificial Sequence: Synthetic oligonucleotide
  Antisense strand to SEQ ID NO: 2263016
ucuuuacagauaagaaccu

SEQ ID NO: 2263018 - RNA, 19 nt, Artificial Sequence
  Description of Artificial Sequence: Synthetic oligonucleotide
  Sense strand starting at position 3930 of SEQ ID NO: 1884403
gguucuuaucuguaaagaa

SEQ ID NO: 2263019 - RNA, 19 nt, Artificial Sequence
  Description of Artificial Sequence: Synthetic oligonucleotide
  Antisense strand to SEQ ID NO: 2263018
uucuuuacagauaagaacc

SEQ ID NO: 2263020 - RNA, 19 nt, Artificial Sequence
  Description of Artificial Sequence: Synthetic oligonucleotide
  Sense strand starting at position 3971 of SEQ ID NO: 1884403
gcaggaugguugagaagau

SEQ ID NO: 2263021 - RNA, 19 nt, Artificial Sequence
  Description of Artificial Sequence: Synthetic oligonucleotide
  Antisense strand to SEQ ID NO: 2263020
aucuucucaaccauccugc

SEQ ID NO: 2263022 - RNA, 19 nt, Artificial Sequence
  Description of Artificial Sequence: Synthetic oligonucleotide
  Sense strand starting at position 3972 of SEQ ID NO: 1884403
caggaugguugagaagauu

SEQ ID NO: 2263023 - RNA, 19 nt, Artificial Sequence
  Description of Artificial Sequence: Synthetic oligonucleotide
  Antisense strand to SEQ ID NO: 2263022
aaucuucucaaccauccug

SEQ ID NO: 2263024 - RNA, 19 nt, Artificial Sequence
  Description of Artificial Sequence: Synthetic oligonucleotide
  Sense strand starting at position 3012 of SEQ ID NO: 1884404
agcugauuccucugcggca

SEQ ID NO: 2263025 - RNA, 19 nt, Artificial Sequence
  Description of Artificial Sequence: Synthetic oligonucleotide
  Antisense strand to SEQ ID NO: 2263024
ugccgcagaggaaucagcu

SEQ ID NO: 2263026 - RNA, 19 nt, Artificial Sequence
  Description of Artificial Sequence: Synthetic oligonucleotide
  Sense strand starting at position 3014 of SEQ ID NO: 1884404
cugauuccucugcggcaga

SEQ ID NO: 2263027 - RNA, 19 nt, Artificial Sequence
  Description of Artificial Sequence: Synthetic oligonucleotide
  Antisense strand to SEQ ID NO: 2263026
ucugccgcagaggaaucag

SEQ ID NO: 2263028 - RNA, 19 nt, Artificial Sequence
  Description of Artificial Sequence: Synthetic oligonucleotide
  Sense strand starting at position 3015 of SEQ ID NO: 1884404
ugauuccucugcggcagaa

SEQ ID NO: 2263029 - RNA, 19 nt, Artificial Sequence
  Description of Artificial Sequence: Synthetic oligonucleotide
  Antisense strand to SEQ ID NO: 2263028
uucugccgcagaggaauca

SEQ ID NO: 2263030 - RNA, 19 nt, Artificial Sequence
  Description of Artificial Sequence: Synthetic oligonucleotide
  Sense strand starting at position 3174 of SEQ ID NO: 1884404
ggcaguuucuggaagugga

SEQ ID NO: 2263031 - RNA, 19 nt, Artificial Sequence
  Description of Artificial Sequence: Synthetic oligonucleotide
  Antisense strand to SEQ ID NO: 2263030
uccacuuccagaaacugcc

SEQ ID NO: 2263032 - RNA, 19 nt, Artificial Sequence
  Description of Artificial Sequence: Synthetic oligonucleotide
  Sense strand starting at position 3205 of SEQ ID NO: 1884404
ccgggagaaguauguccaa

SEQ ID NO: 2263033 - RNA, 19 nt, Artificial Sequence
  Description of Artificial Sequence: Synthetic oligonucleotide
  Antisense strand to SEQ ID NO: 2263032
uuggacauacuucucccgg

SEQ ID NO: 2263034 - RNA, 19 nt, Artificial Sequence
  Description of Artificial Sequence: Synthetic oligonucleotide
  Sense strand starting at position 3307 of SEQ ID NO: 1884404
ggugaugacugccaaguau

SEQ ID NO: 2263035 - RNA, 19 nt, Artificial Sequence
  Description of Artificial Sequence: Synthetic oligonucleotide
  Antisense strand to SEQ ID NO: 2263034
auacuuggcagucaucacc

SEQ ID NO: 2263036 - RNA, 19 nt, Artificial Sequence
  Description of Artificial Sequence: Synthetic oligonucleotide
  Sense strand starting at position 3489 of SEQ ID NO: 1884404
acuggagugucuugccuuu

SEQ ID NO: 2263037 - RNA, 19 nt, Artificial Sequence
  Description of Artificial Sequence: Synthetic oligonucleotide
  Antisense strand to SEQ ID NO: 2263036
aaaggcaagacacuccagu

SEQ ID NO: 2263038 - RNA, 19 nt, Artificial Sequence
  Description of Artificial Sequence: Synthetic oligonucleotide
  Sense strand starting at position 3603 of SEQ ID NO: 1884404
cccugaaggcucugucacu

SEQ ID NO: 2263039 - RNA, 19 nt, Artificial Sequence
  Description of Artificial Sequence: Synthetic oligonucleotide
  Antisense strand to SEQ ID NO: 2263038
agugacagagccuucaggg

SEQ ID NO: 2263040 - RNA, 19 nt, Artificial Sequence
  Description of Artificial Sequence: Synthetic oligonucleotide
  Sense strand starting at position 3608 of SEQ ID NO: 1884404
aaggcucugucacuagaga

SEQ ID NO: 2263041 - RNA, 19 nt, Artificial Sequence
  Description of Artificial Sequence: Synthetic oligonucleotide
  Antisense strand to SEQ ID NO: 2263040
ucucuagugacagagccuu

SEQ ID NO: 2263042 - RNA, 19 nt, Artificial Sequence
  Description of Artificial Sequence: Synthetic oligonucleotide
  Sense strand starting at position 3694 of SEQ ID NO: 1884404
ggauuagaaucagccuaac

SEQ ID NO: 2263043 - RNA, 19 nt, Artificial Sequence
  Description of Artificial Sequence: Synthetic oligonucleotide
  Antisense strand to SEQ ID NO: 2263042
guuaggcugauucuaaucc

SEQ ID NO: 2263044 - RNA, 19 nt, Artificial Sequence
  Description of Artificial Sequence: Synthetic oligonucleotide
  Sense strand starting at position 3897 of SEQ ID NO: 1884404
gccugagguccucgcuaaa

SEQ ID NO: 2263045 - RNA, 19 nt, Artificial Sequence
  Description of Artificial Sequence: Synthetic oligonucleotide
  Antisense strand to SEQ ID NO: 2263044
uuuagcgaggaccucaggc

SEQ ID NO: 2263046 - RNA, 19 nt, Artificial Sequence
  Description of Artificial Sequence: Synthetic oligonucleotide
  Sense strand starting at position 3910 of SEQ ID NO: 1884404
gcuaaaugcuggcugcuua

SEQ ID NO: 2263047 - RNA, 19 nt, Artificial Sequence
  Description of Artificial Sequence: Synthetic oligonucleotide
  Antisense strand to SEQ ID NO: 2263046
uaagcagccagcauuuagc

SEQ ID NO: 2263048 - RNA, 19 nt, Artificial Sequence
  Description of Artificial Sequence: Synthetic oligonucleotide
  Sense strand starting at position 3911 of SEQ ID NO: 1884404
cuaaaugcuggcugcuuaa

SEQ ID NO: 2263049 - RNA, 19 nt, Artificial Sequence
  Description of Artificial Sequence: Synthetic oligonucleotide
  Antisense strand to SEQ ID NO: 2263048
uuaagcagccagcauuuag

SEQ ID NO: 2263050 - RNA, 19 nt, Artificial Sequence
  Description of Artificial Sequence: Synthetic oligonucleotide
  Sense strand starting at position 3933 of SEQ ID NO: 1884404
gugaccagucuuggugcau

SEQ ID NO: 2263051 - RNA, 19 nt, Artificial Sequence
  Description of Artificial Sequence: Synthetic oligonucleotide
  Antisense strand to SEQ ID NO: 2263050
augcaccaagacuggucac

SEQ ID NO: 2263052 - RNA, 19 nt, Artificial Sequence
  Description of Artificial Sequence: Synthetic oligonucleotide
  Sense strand starting at position 3975 of SEQ ID NO: 1884404
gccagcuccuguugugaac

SEQ ID NO: 2263053 - RNA, 19 nt, Artificial Sequence
  Description of Artificial Sequence: Synthetic oligonucleotide
  Antisense strand to SEQ ID NO: 2263052
guucacaacaggagcuggc

SEQ ID NO: 2263054 - RNA, 19 nt, Artificial Sequence
  Description of Artificial Sequence: Synthetic oligonucleotide
  Sense strand starting at position 168 of SEQ ID NO: 1884405
uuuagugcuggacaaguaa

SEQ ID NO: 2263055 - RNA, 19 nt, Artificial Sequence
  Description of Artificial Sequence: Synthetic oligonucleotide
  Antisense strand to SEQ ID NO: 2263054
uuacuuguccagcacuaaa

SEQ ID NO: 2263056 - RNA, 19 nt, Artificial Sequence
  Description of Artificial Sequence: Synthetic oligonucleotide
  Sense strand starting at position 280 of SEQ ID NO: 1884405
cgauuacuugcguaaauau

SEQ ID NO: 2263057 - RNA, 19 nt, Artificial Sequence
  Description of Artificial Sequence: Synthetic oligonucleotide
  Antisense strand to SEQ ID NO: 2263056
auauuuacgcaaguaaucg

SEQ ID NO: 2263058 - RNA, 19 nt, Artificial Sequence
  Description of Artificial Sequence: Synthetic oligonucleotide
  Sense strand starting at position 376 of SEQ ID NO: 1884405
aauaaaugaugcguaaagu

SEQ ID NO: 2263059 - RNA, 19 nt, Artificial Sequence
  Description of Artificial Sequence: Synthetic oligonucleotide
  Antisense strand to SEQ ID NO: 2263058
acuuuacgcaucauuuauu

SEQ ID NO: 2263060 - RNA, 19 nt, Artificial Sequence
  Description of Artificial Sequence: Synthetic oligonucleotide
  Sense strand starting at position 377 of SEQ ID NO: 1884405
auaaaugaugcguaaaguu

SEQ ID NO: 2263061 - RNA, 19 nt, Artificial Sequence
  Description of Artificial Sequence: Synthetic oligonucleotide
  Antisense strand to SEQ ID NO: 2263060
aacuuuacgcaucauuuau

SEQ ID NO: 2263062 - RNA, 19 nt, Artificial Sequence
  Description of Artificial Sequence: Synthetic oligonucleotide
  Sense strand starting at position 396 of SEQ ID NO: 1884405
cuuugagaucccuggauac

SEQ ID NO: 2263063 - RNA, 19 nt, Artificial Sequence
  Description of Artificial Sequence: Synthetic oligonucleotide
  Antisense strand to SEQ ID NO: 2263062
guauccagggaucucaaag

SEQ ID NO: 2263064 - RNA, 19 nt, Artificial Sequence
  Description of Artificial Sequence: Synthetic oligonucleotide
  Sense strand starting at position 1389 of SEQ ID NO: 1884405
gaaagugcugcggaaggua

SEQ ID NO: 2263065 - RNA, 19 nt, Artificial Sequence
  Description of Artificial Sequence: Synthetic oligonucleotide
  Antisense strand to SEQ ID NO: 2263064
uaccuuccgcagcacuuuc

SEQ ID NO: 2263066 - RNA, 19 nt, Artificial Sequence
  Description of Artificial Sequence: Synthetic oligonucleotide
  Sense strand starting at position 1586 of SEQ ID NO: 1884405
uuauuuccgccgggacaga

SEQ ID NO: 2263067 - RNA, 19 nt, Artificial Sequence
  Description of Artificial Sequence: Synthetic oligonucleotide
  Antisense strand to SEQ ID NO: 2263066
ucugucccggcggaaauaa

SEQ ID NO: 2263068 - RNA, 19 nt, Artificial Sequence
  Description of Artificial Sequence: Synthetic oligonucleotide
  Sense strand starting at position 1657 of SEQ ID NO: 1884405
gugccuuugcucuccuuua

SEQ ID NO: 2263069 - RNA, 19 nt, Artificial Sequence
  Description of Artificial Sequence: Synthetic oligonucleotide
  Antisense strand to SEQ ID NO: 2263068
uaaaggagagcaaaggcac

SEQ ID NO: 2263070 - RNA, 19 nt, Artificial Sequence
  Description of Artificial Sequence: Synthetic oligonucleotide
  Sense strand starting at position 2138 of SEQ ID NO: 1884405
gcuuccuagagugacugau

SEQ ID NO: 2263071 - RNA, 19 nt, Artificial Sequence
  Description of Artificial Sequence: Synthetic oligonucleotide
  Antisense strand to SEQ ID NO: 2263070
aucagucacucuaggaagc

SEQ ID NO: 2263072 - RNA, 19 nt, Artificial Sequence
  Description of Artificial Sequence: Synthetic oligonucleotide
  Sense strand starting at position 2155 of SEQ ID NO: 1884405
auagaaaguuuacuccagu

SEQ ID NO: 2263073 - RNA, 19 nt, Artificial Sequence
  Description of Artificial Sequence: Synthetic oligonucleotide
  Antisense strand to SEQ ID NO: 2263072
acuggaguaaacuuucuau

SEQ ID NO: 2263074 - RNA, 19 nt, Artificial Sequence
  Description of Artificial Sequence: Synthetic oligonucleotide
  Sense strand starting at position 2161 of SEQ ID NO: 1884405
aguuuacuccaguauuguu

SEQ ID NO: 2263075 - RNA, 19 nt, Artificial Sequence
  Description of Artificial Sequence: Synthetic oligonucleotide
  Antisense strand to SEQ ID NO: 2263074
aacaauacuggaguaaacu

SEQ ID NO: 2263076 - RNA, 19 nt, Artificial Sequence
  Description of Artificial Sequence: Synthetic oligonucleotide
  Sense strand starting at position 2168 of SEQ ID NO: 1884405
uccaguauuguuuagcuua

SEQ ID NO: 2263077 - RNA, 19 nt, Artificial Sequence
  Description of Artificial Sequence: Synthetic oligonucleotide
  Antisense strand to SEQ ID NO: 2263076
uaagcuaaacaauacugga

SEQ ID NO: 2263078 - RNA, 19 nt, Artificial Sequence
  Description of Artificial Sequence: Synthetic oligonucleotide
  Sense strand starting at position 2342 of SEQ ID NO: 1884405
uggaaacguuaggugagau

SEQ ID NO: 2263079 - RNA, 19 nt, Artificial Sequence
  Description of Artificial Sequence: Synthetic oligonucleotide
  Antisense strand to SEQ ID NO: 2263078
aucucaccuaacguuucca

SEQ ID NO: 2263080 - RNA, 19 nt, Artificial Sequence
  Description of Artificial Sequence: Synthetic oligonucleotide
  Sense strand starting at position 2425 of SEQ ID NO: 1884405
agcggagaugaauauggua

SEQ ID NO: 2263081 - RNA, 19 nt, Artificial Sequence
  Description of Artificial Sequence: Synthetic oligonucleotide
  Antisense strand to SEQ ID NO: 2263080
uaccauauucaucuccgcu

SEQ ID NO: 2263082 - RNA, 19 nt, Artificial Sequence
  Description of Artificial Sequence: Synthetic oligonucleotide
  Sense strand starting at position 2474 of SEQ ID NO: 1884405
ucacuuugggauuguucuu

SEQ ID NO: 2263083 - RNA, 19 nt, Artificial Sequence
  Description of Artificial Sequence: Synthetic oligonucleotide
  Antisense strand to SEQ ID NO: 2263082
aagaacaaucccaaaguga

SEQ ID NO: 2263084 - RNA, 19 nt, Artificial Sequence
  Description of Artificial Sequence: Synthetic oligonucleotide
  Sense strand starting at position 2479 of SEQ ID NO: 1884405
uugggauuguucuuucuac

SEQ ID NO: 2263085 - RNA, 19 nt, Artificial Sequence
  Description of Artificial Sequence: Synthetic oligonucleotide
  Antisense strand to SEQ ID NO: 2263084
guagaaagaacaaucccaa

SEQ ID NO: 2263086 - RNA, 19 nt, Artificial Sequence
  Description of Artificial Sequence: Synthetic oligonucleotide
  Sense strand starting at position 2480 of SEQ ID NO: 1884405
ugggauuguucuuucuaca

SEQ ID NO: 2263087 - RNA, 19 nt, Artificial Sequence
  Description of Artificial Sequence: Synthetic oligonucleotide
  Antisense strand to SEQ ID NO: 2263086
uguagaaagaacaauccca

SEQ ID NO: 2263088 - RNA, 19 nt, Artificial Sequence
  Description of Artificial Sequence: Synthetic oligonucleotide
  Sense strand starting at position 2547 of SEQ ID NO: 1884405
ucaaauauuugcgcucuuu

SEQ ID NO: 2263089 - RNA, 19 nt, Artificial Sequence
  Description of Artificial Sequence: Synthetic oligonucleotide
  Antisense strand to SEQ ID NO: 2263088
aaagagcgcaaauauuuga

SEQ ID NO: 2263090 - RNA, 19 nt, Artificial Sequence
  Description of Artificial Sequence: Synthetic oligonucleotide
  Sense strand starting at position 2693 of SEQ ID NO: 1884405
gagcaaagggauugcagau

SEQ ID NO: 2263091 - RNA, 19 nt, Artificial Sequence
  Description of Artificial Sequence: Synthetic oligonucleotide
  Antisense strand to SEQ ID NO: 2263090
aucugcaaucccuuugcuc

SEQ ID NO: 2263092 - RNA, 19 nt, Artificial Sequence
  Description of Artificial Sequence: Synthetic oligonucleotide
  Sense strand starting at position 2702 of SEQ ID NO: 1884405
gauugcagauuugagguua

SEQ ID NO: 2263093 - RNA, 19 nt, Artificial Sequence
  Description of Artificial Sequence: Synthetic oligonucleotide
  Antisense strand to SEQ ID NO: 2263092
uaaccucaaaucugcaauc

SEQ ID NO: 2263094 - RNA, 19 nt, Artificial Sequence
  Description of Artificial Sequence: Synthetic oligonucleotide
  Sense strand starting at position 2748 of SEQ ID NO: 1884405
guguuuauuggauauguuu

SEQ ID NO: 2263095 - RNA, 19 nt, Artificial Sequence
  Description of Artificial Sequence: Synthetic oligonucleotide
  Antisense strand to SEQ ID NO: 2263094
aaacauauccaauaaacac

SEQ ID NO: 2263096 - RNA, 19 nt, Artificial Sequence
  Description of Artificial Sequence: Synthetic oligonucleotide
  Sense strand starting at position 2755 of SEQ ID NO: 1884405
uuggauauguuucucuuga

SEQ ID NO: 2263097 - RNA, 19 nt, Artificial Sequence
  Description of Artificial Sequence: Synthetic oligonucleotide
  Antisense strand to SEQ ID NO: 2263096
ucaagagaaacauauccaa

SEQ ID NO: 2263098 - RNA, 19 nt, Artificial Sequence
  Description of Artificial Sequence: Synthetic oligonucleotide
  Sense strand starting at position 2756 of SEQ ID NO: 1884405
uggauauguuucucuugaa

SEQ ID NO: 2263099 - RNA, 19 nt, Artificial Sequence
  Description of Artificial Sequence: Synthetic oligonucleotide
  Antisense strand to SEQ ID NO: 2263098
uucaagagaaacauaucca

SEQ ID NO: 2263100 - RNA, 19 nt, Artificial Sequence
  Description of Artificial Sequence: Synthetic oligonucleotide
  Sense strand starting at position 2757 of SEQ ID NO: 1884405
ggauauguuucucuugaaa

SEQ ID NO: 2263101 - RNA, 19 nt, Artificial Sequence
  Description of Artificial Sequence: Synthetic oligonucleotide
  Antisense strand to SEQ ID NO: 2263100
uuucaagagaaacauaucc

SEQ ID NO: 2263102 - RNA, 19 nt, Artificial Sequence
  Description of Artificial Sequence: Synthetic oligonucleotide
  Sense strand starting at position 2878 of SEQ ID NO: 1884405
gcuugugagaaauguaaug

SEQ ID NO: 2263103 - RNA, 19 nt, Artificial Sequence
  Description of Artificial Sequence: Synthetic oligonucleotide
  Antisense strand to SEQ ID NO: 2263102
cauuacauuucucacaagc

SEQ ID NO: 2263104 - RNA, 19 nt, Artificial Sequence
  Description of Artificial Sequence: Synthetic oligonucleotide
  Sense strand starting at position 3004 of SEQ ID NO: 1884405
auguuaugucuuugacaug

SEQ ID NO: 2263105 - RNA, 19 nt, Artificial Sequence
  Description of Artificial Sequence: Synthetic oligonucleotide
  Antisense strand to SEQ ID NO: 2263104
caugucaaagacauaacau

SEQ ID NO: 2263106 - RNA, 19 nt, Artificial Sequence
  Description of Artificial Sequence: Synthetic oligonucleotide
  Sense strand starting at position 3040 of SEQ ID NO: 1884405
agacauguuugauuaaagu

SEQ ID NO: 2263107 - RNA, 19 nt, Artificial Sequence
  Description of Artificial Sequence: Synthetic oligonucleotide
  Antisense strand to SEQ ID NO: 2263106
acuuuaaucaaacaugucu

SEQ ID NO: 2263108 - RNA, 19 nt, Artificial Sequence
  Description of Artificial Sequence: Synthetic oligonucleotide
  Sense strand starting at position 3117 of SEQ ID NO: 1884405
cuguauugacuuugauaaa

SEQ ID NO: 2263109 - RNA, 19 nt, Artificial Sequence
  Description of Artificial Sequence: Synthetic oligonucleotide
  Antisense strand to SEQ ID NO: 2263108
uuuaucaaagucaauacag

SEQ ID NO: 2263110 - RNA, 19 nt, Artificial Sequence
  Description of Artificial Sequence: Synthetic oligonucleotide
  Sense strand starting at position 3156 of SEQ ID NO: 1884405
gcaauuuguuaggcuaaua

SEQ ID NO: 2263111 - RNA, 19 nt, Artificial Sequence
  Description of Artificial Sequence: Synthetic oligonucleotide
  Antisense strand to SEQ ID NO: 2263110
uauuagccuaacaaauugc

SEQ ID NO: 2263112 - RNA, 19 nt, Artificial Sequence
  Description of Artificial Sequence: Synthetic oligonucleotide
  Sense strand starting at position 3223 of SEQ ID NO: 1884405
uugagagagcuauggcuau

SEQ ID NO: 2263113 - RNA, 19 nt, Artificial Sequence
  Description of Artificial Sequence: Synthetic oligonucleotide
  Antisense strand to SEQ ID NO: 2263112
auagccauagcucucucaa

SEQ ID NO: 2263114 - RNA, 19 nt, Artificial Sequence
  Description of Artificial Sequence: Synthetic oligonucleotide
  Sense strand starting at position 3227 of SEQ ID NO: 1884405
gagagcuauggcuauggau

SEQ ID NO: 2263115 - RNA, 19 nt, Artificial Sequence
  Description of Artificial Sequence: Synthetic oligonucleotide
  Antisense strand to SEQ ID NO: 2263114
auccauagccauagcucuc

SEQ ID NO: 2263116 - RNA, 19 nt, Artificial Sequence
  Description of Artificial Sequence: Synthetic oligonucleotide
  Sense strand starting at position 3457 of SEQ ID NO: 1884405
caugcaguggcaugaaaua

SEQ ID NO: 2263117 - RNA, 19 nt, Artificial Sequence
  Description of Artificial Sequence: Synthetic oligonucleotide
  Antisense strand to SEQ ID NO: 2263116
uauuucaugccacugcaug

SEQ ID NO: 2263118 - RNA, 19 nt, Artificial Sequence
  Description of Artificial Sequence: Synthetic oligonucleotide
  Sense strand starting at position 3489 of SEQ ID NO: 1884405
aggauucuuugagccaguu

SEQ ID NO: 2263119 - RNA, 19 nt, Artificial Sequence
  Description of Artificial Sequence: Synthetic oligonucleotide
  Antisense strand to SEQ ID NO: 2263118
aacuggcucaaagaauccu

SEQ ID NO: 2263120 - RNA, 19 nt, Artificial Sequence
  Description of Artificial Sequence: Synthetic oligonucleotide
  Sense strand starting at position 3564 of SEQ ID NO: 1884405
uuaagagaaucaguaugua

SEQ ID NO: 2263121 - RNA, 19 nt, Artificial Sequence
  Description of Artificial Sequence: Synthetic oligonucleotide
  Antisense strand to SEQ ID NO: 2263120
uacauacugauucucuuaa

SEQ ID NO: 2263122 - RNA, 19 nt, Artificial Sequence
  Description of Artificial Sequence: Synthetic oligonucleotide
  Sense strand starting at position 3567 of SEQ ID NO: 1884405
agagaaucaguauguagca

SEQ ID NO: 2263123 - RNA, 19 nt, Artificial Sequence
  Description of Artificial Sequence: Synthetic oligonucleotide
  Antisense strand to SEQ ID NO: 2263122
ugcuacauacugauucucu

SEQ ID NO: 2263124 - RNA, 19 nt, Artificial Sequence
  Description of Artificial Sequence: Synthetic oligonucleotide
  Sense strand starting at position 3568 of SEQ ID NO: 1884405
gagaaucaguauguagcau

SEQ ID NO: 2263125 - RNA, 19 nt, Artificial Sequence
  Description of Artificial Sequence: Synthetic oligonucleotide
  Antisense strand to SEQ ID NO: 2263124
augcuacauacugauucuc

SEQ ID NO: 2263126 - RNA, 19 nt, Artificial Sequence
  Description of Artificial Sequence: Synthetic oligonucleotide
  Sense strand starting at position 3750 of SEQ ID NO: 1884405
agccaagugagucauagua

SEQ ID NO: 2263127 - RNA, 19 nt, Artificial Sequence
  Description of Artificial Sequence: Synthetic oligonucleotide
  Antisense strand to SEQ ID NO: 2263126
uacuaugacucacuuggcu

SEQ ID NO: 2263128 - RNA, 19 nt, Artificial Sequence
  Description of Artificial Sequence: Synthetic oligonucleotide
  Sense strand starting at position 3866 of SEQ ID NO: 1884405
gaagaagggucaccuuuau

SEQ ID NO: 2263129 - RNA, 19 nt, Artificial Sequence
  Description of Artificial Sequence: Synthetic oligonucleotide
  Antisense strand to SEQ ID NO: 2263128
auaaaggugacccuucuuc

SEQ ID NO: 2263130 - RNA, 19 nt, Artificial Sequence
  Description of Artificial Sequence: Synthetic oligonucleotide
  Sense strand starting at position 3886 of SEQ ID NO: 1884405
ugggacagaaaguguuauu

SEQ ID NO: 2263131 - RNA, 19 nt, Artificial Sequence
  Description of Artificial Sequence: Synthetic oligonucleotide
  Antisense strand to SEQ ID NO: 2263130
aauaacacuuucuguccca

SEQ ID NO: 2263132 - RNA, 19 nt, Artificial Sequence
  Description of Artificial Sequence: Synthetic oligonucleotide
  Sense strand starting at position 3916 of SEQ ID NO: 1884405
uggcuuaauuuguugcagu

SEQ ID NO: 2263133 - RNA, 19 nt, Artificial Sequence
  Description of Artificial Sequence: Synthetic oligonucleotide
  Antisense strand to SEQ ID NO: 2263132
acugcaacaaauuaagcca

SEQ ID NO: 2263134 - RNA, 19 nt, Artificial Sequence
  Description of Artificial Sequence: Synthetic oligonucleotide
  Sense strand starting at position 133 of SEQ ID NO: 1884406
gagacaagacuccgucuca

SEQ ID NO: 2263135 - RNA, 19 nt, Artificial Sequence
  Description of Artificial Sequence: Synthetic oligonucleotide
  Antisense strand to SEQ ID NO: 2263134
ugagacggagucuugucuc

SEQ ID NO: 2263136 - RNA, 19 nt, Artificial Sequence
  Description of Artificial Sequence: Synthetic oligonucleotide
  Sense strand starting at position 188 of SEQ ID NO: 1884406
uauaaagauguuuguugga

SEQ ID NO: 2263137 - RNA, 19 nt, Artificial Sequence
  Description of Artificial Sequence: Synthetic oligonucleotide
  Antisense strand to SEQ ID NO: 2263136
uccaacaaacaucuuuaua

SEQ ID NO: 2263138 - RNA, 19 nt, Artificial Sequence
  Description of Artificial Sequence: Synthetic oligonucleotide
  Sense strand starting at position 195 of SEQ ID NO: 1884406
auguuuguuggacgaauga

SEQ ID NO: 2263139 - RNA, 19 nt, Artificial Sequence
  Description of Artificial Sequence: Synthetic oligonucleotide
  Antisense strand to SEQ ID NO: 2263138
ucauucguccaacaaacau

SEQ ID NO: 2263140 - RNA, 19 nt, Artificial Sequence
  Description of Artificial Sequence: Synthetic oligonucleotide
  Sense strand starting at position 209 of SEQ ID NO: 1884406
aaugaaggcuuguucguga

SEQ ID NO: 2263141 - RNA, 19 nt, Artificial Sequence
  Description of Artificial Sequence: Synthetic oligonucleotide
  Antisense strand to SEQ ID NO: 2263140
ucacgaacaagccuucauu

SEQ ID NO: 2263142 - RNA, 19 nt, Artificial Sequence
  Description of Artificial Sequence: Synthetic oligonucleotide
  Sense strand starting at position 212 of SEQ ID NO: 1884406
gaaggcuuguucgugaaau

SEQ ID NO: 2263143 - RNA, 19 nt, Artificial Sequence
  Description of Artificial Sequence: Synthetic oligonucleotide
  Antisense strand to SEQ ID NO: 2263142
auuucacgaacaagccuuc

SEQ ID NO: 2263144 - RNA, 19 nt, Artificial Sequence
  Description of Artificial Sequence: Synthetic oligonucleotide
  Sense strand starting at position 214 of SEQ ID NO: 1884406
aggcuuguucgugaaauua

SEQ ID NO: 2263145 - RNA, 19 nt, Artificial Sequence
  Description of Artificial Sequence: Synthetic oligonucleotide
  Antisense strand to SEQ ID NO: 2263144
uaauuucacgaacaagccu

SEQ ID NO: 2263146 - RNA, 19 nt, Artificial Sequence
  Description of Artificial Sequence: Synthetic oligonucleotide
  Sense strand starting at position 223 of SEQ ID NO: 1884406
cgugaaauuauuggauguu

SEQ ID NO: 2263147 - RNA, 19 nt, Artificial Sequence
  Description of Artificial Sequence: Synthetic oligonucleotide
  Antisense strand to SEQ ID NO: 2263146
aacauccaauaauuucacg

SEQ ID NO: 2263148 - RNA, 19 nt, Artificial Sequence
  Description of Artificial Sequence: Synthetic oligonucleotide
  Sense strand starting at position 224 of SEQ ID NO: 1884406
gugaaauuauuggauguuc

SEQ ID NO: 2263149 - RNA, 19 nt, Artificial Sequence
  Description of Artificial Sequence: Synthetic oligonucleotide
  Antisense strand to SEQ ID NO: 2263148
gaacauccaauaauuucac

SEQ ID NO: 2263150 - RNA, 19 nt, Artificial Sequence
  Description of Artificial Sequence: Synthetic oligonucleotide
  Sense strand starting at position 229 of SEQ ID NO: 1884406
auuauuggauguucccaga

SEQ ID NO: 2263151 - RNA, 19 nt, Artificial Sequence
  Description of Artificial Sequence: Synthetic oligonucleotide
  Antisense strand to SEQ ID NO: 2263150
ucugggaacauccaauaau

SEQ ID NO: 2263152 - RNA, 19 nt, Artificial Sequence
  Description of Artificial Sequence: Synthetic oligonucleotide
  Sense strand starting at position 232 of SEQ ID NO: 1884406
auuggauguucccagauuu

SEQ ID NO: 2263153 - RNA, 19 nt, Artificial Sequence
  Description of Artificial Sequence: Synthetic oligonucleotide
  Antisense strand to SEQ ID NO: 2263152
aaaucugggaacauccaau

SEQ ID NO: 2263154 - RNA, 19 nt, Artificial Sequence
  Description of Artificial Sequence: Synthetic oligonucleotide
  Sense strand starting at position 322 of SEQ ID NO: 1884406
augcaagcagcauagaauu

SEQ ID NO: 2263155 - RNA, 19 nt, Artificial Sequence
  Description of Artificial Sequence: Synthetic oligonucleotide
  Antisense strand to SEQ ID NO: 2263154
aauucuaugcugcuugcau

SEQ ID NO: 2263156 - RNA, 19 nt, Artificial Sequence
  Description of Artificial Sequence: Synthetic oligonucleotide
  Sense strand starting at position 330 of SEQ ID NO: 1884406
agcauagaauucuuacgca

SEQ ID NO: 2263157 - RNA, 19 nt, Artificial Sequence
  Description of Artificial Sequence: Synthetic oligonucleotide
  Antisense strand to SEQ ID NO: 2263156
ugcguaagaauucuaugcu

SEQ ID NO: 2263158 - RNA, 19 nt, Artificial Sequence
  Description of Artificial Sequence: Synthetic oligonucleotide
  Sense strand starting at position 422 of SEQ ID NO: 1884406
guacucacauccucuauga

SEQ ID NO: 2263159 - RNA, 19 nt, Artificial Sequence
  Description of Artificial Sequence: Synthetic oligonucleotide
  Antisense strand to SEQ ID NO: 2263158
ucauagaggaugugaguac

SEQ ID NO: 2263160 - RNA, 19 nt, Artificial Sequence
  Description of Artificial Sequence: Synthetic oligonucleotide
  Sense strand starting at position 485 of SEQ ID NO: 1884406
cccuaaaugcuguguggua

SEQ ID NO: 2263161 - RNA, 19 nt, Artificial Sequence
  Description of Artificial Sequence: Synthetic oligonucleotide
  Antisense strand to SEQ ID NO: 2263160
uaccacacagcauuuaggg

SEQ ID NO: 2263162 - RNA, 19 nt, Artificial Sequence
  Description of Artificial Sequence: Synthetic oligonucleotide
  Sense strand starting at position 937 of SEQ ID NO: 1884406
ugcuuaggagaaugaacuu

SEQ ID NO: 2263163 - RNA, 19 nt, Artificial Sequence
  Description of Artificial Sequence: Synthetic oligonucleotide
  Antisense strand to SEQ ID NO: 2263162
aaguucauucuccuaagca

SEQ ID NO: 2263164 - RNA, 19 nt, Artificial Sequence
  Description of Artificial Sequence: Synthetic oligonucleotide
  Sense strand starting at position 992 of SEQ ID NO: 1884406
gucuuaugguggcuaggga

SEQ ID NO: 2263165 - RNA, 19 nt, Artificial Sequence
  Description of Artificial Sequence: Synthetic oligonucleotide
  Antisense strand to SEQ ID NO: 2263164
ucccuagccaccauaagac

SEQ ID NO: 2263166 - RNA, 19 nt, Artificial Sequence
  Description of Artificial Sequence: Synthetic oligonucleotide
  Sense strand starting at position 1000 of SEQ ID NO: 1884406
guggcuagggacuauugua

SEQ ID NO: 2263167 - RNA, 19 nt, Artificial Sequence
  Description of Artificial Sequence: Synthetic oligonucleotide
  Antisense strand to SEQ ID NO: 2263166
uacaauagucccuagccac

SEQ ID NO: 2263168 - RNA, 19 nt, Artificial Sequence
  Description of Artificial Sequence: Synthetic oligonucleotide
  Sense strand starting at position 1005 of SEQ ID NO: 1884406
uagggacuauuguagaaau

SEQ ID NO: 2263169 - RNA, 19 nt, Artificial Sequence
  Description of Artificial Sequence: Synthetic oligonucleotide
  Antisense strand to SEQ ID NO: 2263168
auuucuacaauagucccua

SEQ ID NO: 2263170 - RNA, 19 nt, Artificial Sequence
  Description of Artificial Sequence: Synthetic oligonucleotide
  Sense strand starting at position 1015 of SEQ ID NO: 1884406
uguagaaauuaucagaaac

SEQ ID NO: 2263171 - RNA, 19 nt, Artificial Sequence
  Description of Artificial Sequence: Synthetic oligonucleotide
  Antisense strand to SEQ ID NO: 2263170
guuucugauaauuucuaca

SEQ ID NO: 2263172 - RNA, 19 nt, Artificial Sequence
  Description of Artificial Sequence: Synthetic oligonucleotide
  Sense strand starting at position 1035 of SEQ ID NO: 1884406
auaguugggaccugggaua

SEQ ID NO: 2263173 - RNA, 19 nt, Artificial Sequence
  Description of Artificial Sequence: Synthetic oligonucleotide
  Antisense strand to SEQ ID NO: 2263172
uaucccaggucccaacuau

SEQ ID NO: 2263174 - RNA, 19 nt, Artificial Sequence
  Description of Artificial Sequence: Synthetic oligonucleotide
  Sense strand starting at position 1156 of SEQ ID NO: 1884406
ugaagaagcugagucucaa

SEQ ID NO: 2263175 - RNA, 19 nt, Artificial Sequence
  Description of Artificial Sequence: Synthetic oligonucleotide
  Antisense strand to SEQ ID NO: 2263174
uugagacucagcuucuuca

SEQ ID NO: 2263176 - RNA, 19 nt, Artificial Sequence
  Description of Artificial Sequence: Synthetic oligonucleotide
  Sense strand starting at position 1160 of SEQ ID NO: 1884406
gaagcugagucucaagaga

SEQ ID NO: 2263177 - RNA, 19 nt, Artificial Sequence
  Description of Artificial Sequence: Synthetic oligonucleotide
  Antisense strand to SEQ ID NO: 2263176
ucucuugagacucagcuuc

SEQ ID NO: 2263178 - RNA, 19 nt, Artificial Sequence
  Description of Artificial Sequence: Synthetic oligonucleotide
  Sense strand starting at position 1235 of SEQ ID NO: 1884406
cugagagucuugcucagau

SEQ ID NO: 2263179 - RNA, 19 nt, Artificial Sequence
  Description of Artificial Sequence: Synthetic oligonucleotide
  Antisense strand to SEQ ID NO: 2263178
aucugagcaagacucucag

SEQ ID NO: 2263180 - RNA, 19 nt, Artificial Sequence
  Description of Artificial Sequence: Synthetic oligonucleotide
  Sense strand starting at position 1237 of SEQ ID NO: 1884406
gagagucuugcucagauca

SEQ ID NO: 2263181 - RNA, 19 nt, Artificial Sequence
  Description of Artificial Sequence: Synthetic oligonucleotide
  Antisense strand to SEQ ID NO: 2263180
ugaucugagcaagacucuc

SEQ ID NO: 2263182 - RNA, 19 nt, Artificial Sequence
  Description of Artificial Sequence: Synthetic oligonucleotide
  Sense strand starting at position 1309 of SEQ ID NO: 1884406
gccagcaguguguaacaua

SEQ ID NO: 2263183 - RNA, 19 nt, Artificial Sequence
  Description of Artificial Sequence: Synthetic oligonucleotide
  Antisense strand to SEQ ID NO: 2263182
uauguuacacacugcuggc

SEQ ID NO: 2263184 - RNA, 19 nt, Artificial Sequence
  Description of Artificial Sequence: Synthetic oligonucleotide
  Sense strand starting at position 1425 of SEQ ID NO: 1884406
gcaacagaaucucaaugga

SEQ ID NO: 2263185 - RNA, 19 nt, Artificial Sequence
  Description of Artificial Sequence: Synthetic oligonucleotide
  Antisense strand to SEQ ID NO: 2263184
uccauugagauucuguugc

SEQ ID NO: 2263186 - RNA, 19 nt, Artificial Sequence
  Description of Artificial Sequence: Synthetic oligonucleotide
  Sense strand starting at position 2174 of SEQ ID NO: 1884406
gaaggucugaaagguaguu

SEQ ID NO: 2263187 - RNA, 19 nt, Artificial Sequence
  Description of Artificial Sequence: Synthetic oligonucleotide
  Antisense strand to SEQ ID NO: 2263186
aacuaccuuucagaccuuc

SEQ ID NO: 2263188 - RNA, 19 nt, Artificial Sequence
  Description of Artificial Sequence: Synthetic oligonucleotide
  Sense strand starting at position 2618 of SEQ ID NO: 1884406
ccgcguuagucucuuggaa

SEQ ID NO: 2263189 - RNA, 19 nt, Artificial Sequence
  Description of Artificial Sequence: Synthetic oligonucleotide
  Antisense strand to SEQ ID NO: 2263188
uuccaagagacuaacgcgg

SEQ ID NO: 2263190 - RNA, 19 nt, Artificial Sequence
  Description of Artificial Sequence: Synthetic oligonucleotide
  Sense strand starting at position 2619 of SEQ ID NO: 1884406
cgcguuagucucuuggaau

SEQ ID NO: 2263191 - RNA, 19 nt, Artificial Sequence
  Description of Artificial Sequence: Synthetic oligonucleotide
  Antisense strand to SEQ ID NO: 2263190
auuccaagagacuaacgcg

SEQ ID NO: 2263192 - RNA, 19 nt, Artificial Sequence
  Description of Artificial Sequence: Synthetic oligonucleotide
  Sense strand starting at position 2625 of SEQ ID NO: 1884406
agucucuuggaaugagaau

SEQ ID NO: 2263193 - RNA, 19 nt, Artificial Sequence
  Description of Artificial Sequence: Synthetic oligonucleotide
  Antisense strand to SEQ ID NO: 2263192
auucucauuccaagagacu

SEQ ID NO: 2263194 - RNA, 19 nt, Artificial Sequence
  Description of Artificial Sequence: Synthetic oligonucleotide
  Sense strand starting at position 2644 of SEQ ID NO: 1884406
cuagaaaccuaggaucuga

SEQ ID NO: 2263195 - RNA, 19 nt, Artificial Sequence
  Description of Artificial Sequence: Synthetic oligonucleotide
  Antisense strand to SEQ ID NO: 2263194
ucagauccuagguuucuag

SEQ ID NO: 2263196 - RNA, 19 nt, Artificial Sequence
  Description of Artificial Sequence: Synthetic oligonucleotide
  Sense strand starting at position 2660 of SEQ ID NO: 1884406
ugauuccggcucuguuaga

SEQ ID NO: 2263197 - RNA, 19 nt, Artificial Sequence
  Description of Artificial Sequence: Synthetic oligonucleotide
  Antisense strand to SEQ ID NO: 2263196
ucuaacagagccggaauca

SEQ ID NO: 2263198 - RNA, 19 nt, Artificial Sequence
  Description of Artificial Sequence: Synthetic oligonucleotide
  Sense strand starting at position 2667 of SEQ ID NO: 1884406
ggcucuguuagagauuagu

SEQ ID NO: 2263199 - RNA, 19 nt, Artificial Sequence
  Description of Artificial Sequence: Synthetic oligonucleotide
  Antisense strand to SEQ ID NO: 2263198
acuaaucucuaacagagcc

SEQ ID NO: 2263200 - RNA, 19 nt, Artificial Sequence
  Description of Artificial Sequence: Synthetic oligonucleotide
  Sense strand starting at position 2670 of SEQ ID NO: 1884406
ucuguuagagauuaguagu

SEQ ID NO: 2263201 - RNA, 19 nt, Artificial Sequence
  Description of Artificial Sequence: Synthetic oligonucleotide
  Antisense strand to SEQ ID NO: 2263200
acuacuaaucucuaacaga

SEQ ID NO: 2263202 - RNA, 19 nt, Artificial Sequence
  Description of Artificial Sequence: Synthetic oligonucleotide
  Sense strand starting at position 2676 of SEQ ID NO: 1884406
agagauuaguaguuacuuc

SEQ ID NO: 2263203 - RNA, 19 nt, Artificial Sequence
  Description of Artificial Sequence: Synthetic oligonucleotide
  Antisense strand to SEQ ID NO: 2263202
gaaguaacuacuaaucucu

SEQ ID NO: 2263204 - RNA, 19 nt, Artificial Sequence
  Description of Artificial Sequence: Synthetic oligonucleotide
  Sense strand starting at position 3271 of SEQ ID NO: 1884406
ccacuuaacugauggauuc

SEQ ID NO: 2263205 - RNA, 19 nt, Artificial Sequence
  Description of Artificial Sequence: Synthetic oligonucleotide
  Antisense strand to SEQ ID NO: 2263204
gaauccaucaguuaagugg

SEQ ID NO: 2263206 - RNA, 19 nt, Artificial Sequence
  Description of Artificial Sequence: Synthetic oligonucleotide
  Sense strand starting at position 3295 of SEQ ID NO: 1884406
aauagaacaugugugguua

SEQ ID NO: 2263207 - RNA, 19 nt, Artificial Sequence
  Description of Artificial Sequence: Synthetic oligonucleotide
  Antisense strand to SEQ ID NO: 2263206
uaaccacacauguucuauu

SEQ ID NO: 2263208 - RNA, 19 nt, Artificial Sequence
  Description of Artificial Sequence: Synthetic oligonucleotide
  Sense strand starting at position 3296 of SEQ ID NO: 1884406
auagaacaugugugguuau

SEQ ID NO: 2263209 - RNA, 19 nt, Artificial Sequence
  Description of Artificial Sequence: Synthetic oligonucleotide
  Antisense strand to SEQ ID NO: 2263208
auaaccacacauguucuau

SEQ ID NO: 2263210 - RNA, 19 nt, Artificial Sequence
  Description of Artificial Sequence: Synthetic oligonucleotide
  Sense strand starting at position 3811 of SEQ ID NO: 1884406
cucugucuaccgggagaua

SEQ ID NO: 2263211 - RNA, 19 nt, Artificial Sequence
  Description of Artificial Sequence: Synthetic oligonucleotide
  Antisense strand to SEQ ID NO: 2263210
uaucucccgguagacagag

SEQ ID NO: 2263212 - RNA, 19 nt, Artificial Sequence
  Description of Artificial Sequence: Synthetic oligonucleotide
  Sense strand starting at position 3956 of SEQ ID NO: 1884406
ccucuuucgguuugauuaa

SEQ ID NO: 2263213 - RNA, 19 nt, Artificial Sequence
  Description of Artificial Sequence: Synthetic oligonucleotide
  Antisense strand to SEQ ID NO: 2263212
uuaaucaaaccgaaagagg

SEQ ID NO: 2263214 - RNA, 19 nt, Artificial Sequence
  Description of Artificial Sequence: Synthetic oligonucleotide
  Sense strand starting at position 39 of SEQ ID NO: 1884407
ugaugugugcuacaagaag

SEQ ID NO: 2263215 - RNA, 19 nt, Artificial Sequence
  Description of Artificial Sequence: Synthetic oligonucleotide
  Antisense strand to SEQ ID NO: 2263214
cuucuuguagcacacauca

SEQ ID NO: 2263216 - RNA, 19 nt, Artificial Sequence
  Description of Artificial Sequence: Synthetic oligonucleotide
  Sense strand starting at position 700 of SEQ ID NO: 1884407
uuagaauaugcuggcagaa

SEQ ID NO: 2263217 - RNA, 19 nt, Artificial Sequence
  Description of Artificial Sequence: Synthetic oligonucleotide
  Antisense strand to SEQ ID NO: 2263216
uucugccagcauauucuaa

SEQ ID NO: 2263218 - RNA, 19 nt, Artificial Sequence
  Description of Artificial Sequence: Synthetic oligonucleotide
  Sense strand starting at position 942 of SEQ ID NO: 1884407
aguaguaaaucucucaaag

SEQ ID NO: 2263219 - RNA, 19 nt, Artificial Sequence
  Description of Artificial Sequence: Synthetic oligonucleotide
  Antisense strand to SEQ ID NO: 2263218
cuuugagagauuuacuacu

SEQ ID NO: 2263220 - RNA, 19 nt, Artificial Sequence
  Description of Artificial Sequence: Synthetic oligonucleotide
  Sense strand starting at position 1270 of SEQ ID NO: 1884407
ugcgauauuuaaguuguuu

SEQ ID NO: 2263221 - RNA, 19 nt, Artificial Sequence
  Description of Artificial Sequence: Synthetic oligonucleotide
  Antisense strand to SEQ ID NO: 2263220
aaacaacuuaaauaucgca

SEQ ID NO: 2263222 - RNA, 19 nt, Artificial Sequence
  Description of Artificial Sequence: Synthetic oligonucleotide
  Sense strand starting at position 1286 of SEQ ID NO: 1884407
uuuauuguacugugaggag

SEQ ID NO: 2263223 - RNA, 19 nt, Artificial Sequence
  Description of Artificial Sequence: Synthetic oligonucleotide
  Antisense strand to SEQ ID NO: 2263222
cuccucacaguacaauaaa

SEQ ID NO: 2263224 - RNA, 19 nt, Artificial Sequence
  Description of Artificial Sequence: Synthetic oligonucleotide
  Sense strand starting at position 1316 of SEQ ID NO: 1884407
aagggagaugguugacuuu

SEQ ID NO: 2263225 - RNA, 19 nt, Artificial Sequence
  Description of Artificial Sequence: Synthetic oligonucleotide
  Antisense strand to SEQ ID NO: 2263224
aaagucaaccaucucccuu

SEQ ID NO: 2263226 - RNA, 19 nt, Artificial Sequence
  Description of Artificial Sequence: Synthetic oligonucleotide
  Sense strand starting at position 1394 of SEQ ID NO: 1884407
uuaacuuuagcaggaguaa

SEQ ID NO: 2263227 - RNA, 19 nt, Artificial Sequence
  Description of Artificial Sequence: Synthetic oligonucleotide
  Antisense strand to SEQ ID NO: 2263226
uuacuccugcuaaaguuaa

SEQ ID NO: 2263228 - RNA, 19 nt, Artificial Sequence
  Description of Artificial Sequence: Synthetic oligonucleotide
  Sense strand starting at position 1403 of SEQ ID NO: 1884407
gcaggaguaagugaagauu

SEQ ID NO: 2263229 - RNA, 19 nt, Artificial Sequence
  Description of Artificial Sequence: Synthetic oligonucleotide
  Antisense strand to SEQ ID NO: 2263228
aaucuucacuuacuccugc

SEQ ID NO: 2263230 - RNA, 19 nt, Artificial Sequence
  Description of Artificial Sequence: Synthetic oligonucleotide
  Sense strand starting at position 1406 of SEQ ID NO: 1884407
ggaguaagugaagauucgu

SEQ ID NO: 2263231 - RNA, 19 nt, Artificial Sequence
  Description of Artificial Sequence: Synthetic oligonucleotide
  Antisense strand to SEQ ID NO: 2263230
acgaaucuucacuuacucc

SEQ ID NO: 2263232 - RNA, 19 nt, Artificial Sequence
  Description of Artificial Sequence: Synthetic oligonucleotide
  Sense strand starting at position 1411 of SEQ ID NO: 1884407
aagugaagauucguaacau

SEQ ID NO: 2263233 - RNA, 19 nt, Artificial Sequence
  Description of Artificial Sequence: Synthetic oligonucleotide
  Antisense strand to SEQ ID NO: 2263232
auguuacgaaucuucacuu

SEQ ID NO: 2263234 - RNA, 19 nt, Artificial Sequence
  Description of Artificial Sequence: Synthetic oligonucleotide
  Sense strand starting at position 1462 of SEQ ID NO: 1884407
ggccuuaagcaagacuauu

SEQ ID NO: 2263235 - RNA, 19 nt, Artificial Sequence
  Description of Artificial Sequence: Synthetic oligonucleotide
  Antisense strand to SEQ ID NO: 2263234
aauagucuugcuuaaggcc

SEQ ID NO: 2263236 - RNA, 19 nt, Artificial Sequence
  Description of Artificial Sequence: Synthetic oligonucleotide
  Sense strand starting at position 1470 of SEQ ID NO: 1884407
gcaagacuauuggcuauau

SEQ ID NO: 2263237 - RNA, 19 nt, Artificial Sequence
  Description of Artificial Sequence: Synthetic oligonucleotide
  Antisense strand to SEQ ID NO: 2263236
auauagccaauagucuugc

SEQ ID NO: 2263238 - RNA, 19 nt, Artificial Sequence
  Description of Artificial Sequence: Synthetic oligonucleotide
  Sense strand starting at position 1474 of SEQ ID NO: 1884407
gacuauuggcuauauauug

SEQ ID NO: 2263239 - RNA, 19 nt, Artificial Sequence
  Description of Artificial Sequence: Synthetic oligonucleotide
  Antisense strand to SEQ ID NO: 2263238
caauauauagccaauaguc

SEQ ID NO: 2263240 - RNA, 19 nt, Artificial Sequence
  Description of Artificial Sequence: Synthetic oligonucleotide
  Sense strand starting at position 1604 of SEQ ID NO: 1884407
acaaauaaguucucaguuu

SEQ ID NO: 2263241 - RNA, 19 nt, Artificial Sequence
  Description of Artificial Sequence: Synthetic oligonucleotide
  Antisense strand to SEQ ID NO: 2263240
aaacugagaacuuauuugu

SEQ ID NO: 2263242 - RNA, 19 nt, Artificial Sequence
  Description of Artificial Sequence: Synthetic oligonucleotide
  Sense strand starting at position 1716 of SEQ ID NO: 1884407
guaugaggccuugaacaau

SEQ ID NO: 2263243 - RNA, 19 nt, Artificial Sequence
  Description of Artificial Sequence: Synthetic oligonucleotide
  Antisense strand to SEQ ID NO: 2263242
auuguucaaggccucauac

SEQ ID NO: 2263244 - RNA, 19 nt, Artificial Sequence
  Description of Artificial Sequence: Synthetic oligonucleotide
  Sense strand starting at position 1728 of SEQ ID NO: 1884407
gaacaaugauggccauguu

SEQ ID NO: 2263245 - RNA, 19 nt, Artificial Sequence
  Description of Artificial Sequence: Synthetic oligonucleotide
  Antisense strand to SEQ ID NO: 2263244
aacauggccaucauuguuc

SEQ ID NO: 2263246 - RNA, 19 nt, Artificial Sequence
  Description of Artificial Sequence: Synthetic oligonucleotide
  Sense strand starting at position 1908 of SEQ ID NO: 1884407
ggaaaucuuccaggccagu

SEQ ID NO: 2263247 - RNA, 19 nt, Artificial Sequence
  Description of Artificial Sequence: Synthetic oligonucleotide
  Antisense strand to SEQ ID NO: 2263246
acuggccuggaagauuucc

SEQ ID NO: 2263248 - RNA, 19 nt, Artificial Sequence
  Description of Artificial Sequence: Synthetic oligonucleotide
  Sense strand starting at position 1964 of SEQ ID NO: 1884407
aagggcuuucuccaagcga

SEQ ID NO: 2263249 - RNA, 19 nt, Artificial Sequence
  Description of Artificial Sequence: Synthetic oligonucleotide
  Antisense strand to SEQ ID NO: 2263248
ucgcuuggagaaagcccuu

SEQ ID NO: 2263250 - RNA, 19 nt, Artificial Sequence
  Description of Artificial Sequence: Synthetic oligonucleotide
  Sense strand starting at position 2108 of SEQ ID NO: 1884407
ucaacaaguugucuaccua

SEQ ID NO: 2263251 - RNA, 19 nt, Artificial Sequence
  Description of Artificial Sequence: Synthetic oligonucleotide
  Antisense strand to SEQ ID NO: 2263250
uagguagacaacuuguuga

SEQ ID NO: 2263252 - RNA, 19 nt, Artificial Sequence
  Description of Artificial Sequence: Synthetic oligonucleotide
  Sense strand starting at position 2144 of SEQ ID NO: 1884407
uggaauuaagacugcauaa

SEQ ID NO: 2263253 - RNA, 19 nt, Artificial Sequence
  Description of Artificial Sequence: Synthetic oligonucleotide
  Antisense strand to SEQ ID NO: 2263252
uuaugcagucuuaauucca

SEQ ID NO: 2263254 - RNA, 19 nt, Artificial Sequence
  Description of Artificial Sequence: Synthetic oligonucleotide
  Sense strand starting at position 2156 of SEQ ID NO: 1884407
ugcauaaccuagguuauaa

SEQ ID NO: 2263255 - RNA, 19 nt, Artificial Sequence
  Description of Artificial Sequence: Synthetic oligonucleotide
  Antisense strand to SEQ ID NO: 2263254
uuauaaccuagguuaugca

SEQ ID NO: 2263256 - RNA, 19 nt, Artificial Sequence
  Description of Artificial Sequence: Synthetic oligonucleotide
  Sense strand starting at position 2167 of SEQ ID NO: 1884407
gguuauaauuaacucagac

SEQ ID NO: 2263257 - RNA, 19 nt, Artificial Sequence
  Description of Artificial Sequence: Synthetic oligonucleotide
  Antisense strand to SEQ ID NO: 2263256
gucugaguuaauuauaacc

SEQ ID NO: 2263258 - RNA, 19 nt, Artificial Sequence
  Description of Artificial Sequence: Synthetic oligonucleotide
  Sense strand starting at position 2354 of SEQ ID NO: 1884407
auaguuagacuuuaagcau

SEQ ID NO: 2263259 - RNA, 19 nt, Artificial Sequence
  Description of Artificial Sequence: Synthetic oligonucleotide
  Antisense strand to SEQ ID NO: 2263258
augcuuaaagucuaacuau

SEQ ID NO: 2263260 - RNA, 19 nt, Artificial Sequence
  Description of Artificial Sequence: Synthetic oligonucleotide
  Sense strand starting at position 2360 of SEQ ID NO: 1884407
agacuuuaagcaugacuca

SEQ ID NO: 2263261 - RNA, 19 nt, Artificial Sequence
  Description of Artificial Sequence: Synthetic oligonucleotide
  Antisense strand to SEQ ID NO: 2263260
ugagucaugcuuaaagucu

SEQ ID NO: 2263262 - RNA, 19 nt, Artificial Sequence
  Description of Artificial Sequence: Synthetic oligonucleotide
  Sense strand starting at position 2386 of SEQ ID NO: 1884407
cuagacaucucaguggaga

SEQ ID NO: 2263263 - RNA, 19 nt, Artificial Sequence
  Description of Artificial Sequence: Synthetic oligonucleotide
  Antisense strand to SEQ ID NO: 2263262
ucuccacugagaugucuag

SEQ ID NO: 2263264 - RNA, 19 nt, Artificial Sequence
  Description of Artificial Sequence: Synthetic oligonucleotide
  Sense strand starting at position 2403 of SEQ ID NO: 1884407
gagauaauauugcucaguu

SEQ ID NO: 2263265 - RNA, 19 nt, Artificial Sequence
  Description of Artificial Sequence: Synthetic oligonucleotide
  Antisense strand to SEQ ID NO: 2263264
aacugagcaauauuaucuc

SEQ ID NO: 2263266 - RNA, 19 nt, Artificial Sequence
  Description of Artificial Sequence: Synthetic oligonucleotide
  Sense strand starting at position 2404 of SEQ ID NO: 1884407
agauaauauugcucaguuu

SEQ ID NO: 2263267 - RNA, 19 nt, Artificial Sequence
  Description of Artificial Sequence: Synthetic oligonucleotide
  Antisense strand to SEQ ID NO: 2263266
aaacugagcaauauuaucu

SEQ ID NO: 2263268 - RNA, 19 nt, Artificial Sequence
  Description of Artificial Sequence: Synthetic oligonucleotide
  Sense strand starting at position 2463 of SEQ ID NO: 1884407
ggacuuugagaauggucag

SEQ ID NO: 2263269 - RNA, 19 nt, Artificial Sequence
  Description of Artificial Sequence: Synthetic oligonucleotide
  Antisense strand to SEQ ID NO: 2263268
cugaccauucucaaagucc

SEQ ID NO: 2263270 - RNA, 19 nt, Artificial Sequence
  Description of Artificial Sequence: Synthetic oligonucleotide
  Sense strand starting at position 2464 of SEQ ID NO: 1884407
gacuuugagaauggucagu

SEQ ID NO: 2263271 - RNA, 19 nt, Artificial Sequence
  Description of Artificial Sequence: Synthetic oligonucleotide
  Antisense strand to SEQ ID NO: 2263270
acugaccauucucaaaguc

SEQ ID NO: 2263272 - RNA, 19 nt, Artificial Sequence
  Description of Artificial Sequence: Synthetic oligonucleotide
  Sense strand starting at position 2466 of SEQ ID NO: 1884407
cuuugagaauggucaguag

SEQ ID NO: 2263273 - RNA, 19 nt, Artificial Sequence
  Description of Artificial Sequence: Synthetic oligonucleotide
  Antisense strand to SEQ ID NO: 2263272
cuacugaccauucucaaag

SEQ ID NO: 2263274 - RNA, 19 nt, Artificial Sequence
  Description of Artificial Sequence: Synthetic oligonucleotide
  Sense strand starting at position 2968 of SEQ ID NO: 1884407
aaacuuagccaagggugau

SEQ ID NO: 2263275 - RNA, 19 nt, Artificial Sequence
  Description of Artificial Sequence: Synthetic oligonucleotide
  Antisense strand to SEQ ID NO: 2263274
aucacccuuggcuaaguuu

SEQ ID NO: 2263276 - RNA, 19 nt, Artificial Sequence
  Description of Artificial Sequence: Synthetic oligonucleotide
  Sense strand starting at position 3103 of SEQ ID NO: 1884407
gagugagaccuaugucaaa

SEQ ID NO: 2263277 - RNA, 19 nt, Artificial Sequence
  Description of Artificial Sequence: Synthetic oligonucleotide
  Antisense strand to SEQ ID NO: 2263276
uuugacauaggucucacuc

SEQ ID NO: 2263278 - RNA, 19 nt, Artificial Sequence
  Description of Artificial Sequence: Synthetic oligonucleotide
  Sense strand starting at position 3413 of SEQ ID NO: 1884407
uaauacuaggcuuagugaa

SEQ ID NO: 2263279 - RNA, 19 nt, Artificial Sequence
  Description of Artificial Sequence: Synthetic oligonucleotide
  Antisense strand to SEQ ID NO: 2263278
uucacuaagccuaguauua

SEQ ID NO: 2263280 - RNA, 19 nt, Artificial Sequence
  Description of Artificial Sequence: Synthetic oligonucleotide
  Sense strand starting at position 3415 of SEQ ID NO: 1884407
auacuaggcuuagugaauu

SEQ ID NO: 2263281 - RNA, 19 nt, Artificial Sequence
  Description of Artificial Sequence: Synthetic oligonucleotide
  Antisense strand to SEQ ID NO: 2263280
aauucacuaagccuaguau

SEQ ID NO: 2263282 - RNA, 19 nt, Artificial Sequence
  Description of Artificial Sequence: Synthetic oligonucleotide
  Sense strand starting at position 3438 of SEQ ID NO: 1884407
caaaguaauuuggaggcaa

SEQ ID NO: 2263283 - RNA, 19 nt, Artificial Sequence
  Description of Artificial Sequence: Synthetic oligonucleotide
  Antisense strand to SEQ ID NO: 2263282
uugccuccaaauuacuuug

SEQ ID NO: 2263284 - RNA, 19 nt, Artificial Sequence
  Description of Artificial Sequence: Synthetic oligonucleotide
  Sense strand starting at position 3573 of SEQ ID NO: 1884407
agauuuaagugaugaucag

SEQ ID NO: 2263285 - RNA, 19 nt, Artificial Sequence
  Description of Artificial Sequence: Synthetic oligonucleotide
  Antisense strand to SEQ ID NO: 2263284
cugaucaucacuuaaaucu

SEQ ID NO: 2263286 - RNA, 19 nt, Artificial Sequence
  Description of Artificial Sequence: Synthetic oligonucleotide
  Sense strand starting at position 3582 of SEQ ID NO: 1884407
ugaugaucaguagguccau

SEQ ID NO: 2263287 - RNA, 19 nt, Artificial Sequence
  Description of Artificial Sequence: Synthetic oligonucleotide
  Antisense strand to SEQ ID NO: 2263286
auggaccuacugaucauca

SEQ ID NO: 2263288 - RNA, 19 nt, Artificial Sequence
  Description of Artificial Sequence: Synthetic oligonucleotide
  Sense strand starting at position 3703 of SEQ ID NO: 1884407
ugguaugaaaguugagauu

SEQ ID NO: 2263289 - RNA, 19 nt, Artificial Sequence
  Description of Artificial Sequence: Synthetic oligonucleotide
  Antisense strand to SEQ ID NO: 2263288
aaucucaacuuucauacca

SEQ ID NO: 2263290 - RNA, 19 nt, Artificial Sequence
  Description of Artificial Sequence: Synthetic oligonucleotide
  Sense strand starting at position 3772 of SEQ ID NO: 1884407
aggaaugccuuaccuauua

SEQ ID NO: 2263291 - RNA, 19 nt, Artificial Sequence
  Description of Artificial Sequence: Synthetic oligonucleotide
  Antisense strand to SEQ ID NO: 2263290
uaauagguaaggcauuccu

SEQ ID NO: 2263292 - RNA, 19 nt, Artificial Sequence
  Description of Artificial Sequence: Synthetic oligonucleotide
  Sense strand starting at position 3782 of SEQ ID NO: 1884407
uaccuauuacguuaaagag

SEQ ID NO: 2263293 - RNA, 19 nt, Artificial Sequence
  Description of Artificial Sequence: Synthetic oligonucleotide
  Antisense strand to SEQ ID NO: 2263292
cucuuuaacguaauaggua

SEQ ID NO: 2263294 - RNA, 19 nt, Artificial Sequence
  Description of Artificial Sequence: Synthetic oligonucleotide
  Sense strand starting at position 33 of SEQ ID NO: 1884408
uggaguugccuggacugaa

SEQ ID NO: 2263295 - RNA, 19 nt, Artificial Sequence
  Description of Artificial Sequence: Synthetic oligonucleotide
  Antisense strand to SEQ ID NO: 2263294
uucaguccaggcaacucca

SEQ ID NO: 2263296 - RNA, 19 nt, Artificial Sequence
  Description of Artificial Sequence: Synthetic oligonucleotide
  Sense strand starting at position 183 of SEQ ID NO: 1884408
ucuugauuagaucguuaca

SEQ ID NO: 2263297 - RNA, 19 nt, Artificial Sequence
  Description of Artificial Sequence: Synthetic oligonucleotide
  Antisense strand to SEQ ID NO: 2263296
uguaacgaucuaaucaaga

SEQ ID NO: 2263298 - RNA, 19 nt, Artificial Sequence
  Description of Artificial Sequence: Synthetic oligonucleotide
  Sense strand starting at position 185 of SEQ ID NO: 1884408
uugauuagaucguuacauu

SEQ ID NO: 2263299 - RNA, 19 nt, Artificial Sequence
  Description of Artificial Sequence: Synthetic oligonucleotide
  Antisense strand to SEQ ID NO: 2263298
aauguaacgaucuaaucaa

SEQ ID NO: 2263300 - RNA, 19 nt, Artificial Sequence
  Description of Artificial Sequence: Synthetic oligonucleotide
  Sense strand starting at position 186 of SEQ ID NO: 1884408
ugauuagaucguuacauuc

SEQ ID NO: 2263301 - RNA, 19 nt, Artificial Sequence
  Description of Artificial Sequence: Synthetic oligonucleotide
  Antisense strand to SEQ ID NO: 2263300
gaauguaacgaucuaauca

SEQ ID NO: 2263302 - RNA, 19 nt, Artificial Sequence
  Description of Artificial Sequence: Synthetic oligonucleotide
  Sense strand starting at position 519 of SEQ ID NO: 1884408
cccugucaccgugagaaag

SEQ ID NO: 2263303 - RNA, 19 nt, Artificial Sequence
  Description of Artificial Sequence: Synthetic oligonucleotide
  Antisense strand to SEQ ID NO: 2263302
cuuucucacggugacaggg

SEQ ID NO: 2263304 - RNA, 19 nt, Artificial Sequence
  Description of Artificial Sequence: Synthetic oligonucleotide
  Sense strand starting at position 584 of SEQ ID NO: 1884408
caguaaugguccuuaguag

SEQ ID NO: 2263305 - RNA, 19 nt, Artificial Sequence
  Description of Artificial Sequence: Synthetic oligonucleotide
  Antisense strand to SEQ ID NO: 2263304
cuacuaaggaccauuacug

SEQ ID NO: 2263306 - RNA, 19 nt, Artificial Sequence
  Description of Artificial Sequence: Synthetic oligonucleotide
  Sense strand starting at position 634 of SEQ ID NO: 1884408
ggugccugagcagaugaaa

SEQ ID NO: 2263307 - RNA, 19 nt, Artificial Sequence
  Description of Artificial Sequence: Synthetic oligonucleotide
  Antisense strand to SEQ ID NO: 2263306
uuucaucugcucaggcacc

SEQ ID NO: 2263308 - RNA, 19 nt, Artificial Sequence
  Description of Artificial Sequence: Synthetic oligonucleotide
  Sense strand starting at position 702 of SEQ ID NO: 1884408
auuguuauccuccagguca

SEQ ID NO: 2263309 - RNA, 19 nt, Artificial Sequence
  Description of Artificial Sequence: Synthetic oligonucleotide
  Antisense strand to SEQ ID NO: 2263308
ugaccuggaggauaacaau

SEQ ID NO: 2263310 - RNA, 19 nt, Artificial Sequence
  Description of Artificial Sequence: Synthetic oligonucleotide
  Sense strand starting at position 843 of SEQ ID NO: 1884408
uuaguuaaacuuugaggga

SEQ ID NO: 2263311 - RNA, 19 nt, Artificial Sequence
  Description of Artificial Sequence: Synthetic oligonucleotide
  Antisense strand to SEQ ID NO: 2263310
ucccucaaaguuuaacuaa

SEQ ID NO: 2263312 - RNA, 19 nt, Artificial Sequence
  Description of Artificial Sequence: Synthetic oligonucleotide
  Sense strand starting at position 892 of SEQ ID NO: 1884408
ugcagagcugaugacuaau

SEQ ID NO: 2263313 - RNA, 19 nt, Artificial Sequence
  Description of Artificial Sequence: Synthetic oligonucleotide
  Antisense strand to SEQ ID NO: 2263312
auuagucaucagcucugca

SEQ ID NO: 2263314 - RNA, 19 nt, Artificial Sequence
  Description of Artificial Sequence: Synthetic oligonucleotide
  Sense strand starting at position 920 of SEQ ID NO: 1884408
agagucugaugacuccaau

SEQ ID NO: 2263315 - RNA, 19 nt, Artificial Sequence
  Description of Artificial Sequence: Synthetic oligonucleotide
  Antisense strand to SEQ ID NO: 2263314
auuggagucaucagacucu

SEQ ID NO: 2263316 - RNA, 19 nt, Artificial Sequence
  Description of Artificial Sequence: Synthetic oligonucleotide
  Sense strand starting at position 1001 of SEQ ID NO: 1884408
aggacucuccuuugucaac

SEQ ID NO: 2263317 - RNA, 19 nt, Artificial Sequence
  Description of Artificial Sequence: Synthetic oligonucleotide
  Antisense strand to SEQ ID NO: 2263316
guugacaaaggagaguccu

SEQ ID NO: 2263318 - RNA, 19 nt, Artificial Sequence
  Description of Artificial Sequence: Synthetic oligonucleotide
  Sense strand starting at position 1002 of SEQ ID NO: 1884408
ggacucuccuuugucaaca

SEQ ID NO: 2263319 - RNA, 19 nt, Artificial Sequence
  Description of Artificial Sequence: Synthetic oligonucleotide
  Antisense strand to SEQ ID NO: 2263318
uguugacaaaggagagucc

SEQ ID NO: 2263320 - RNA, 19 nt, Artificial Sequence
  Description of Artificial Sequence: Synthetic oligonucleotide
  Sense strand starting at position 1028 of SEQ ID NO: 1884408
agcccugaugaaggauuaa

SEQ ID NO: 2263321 - RNA, 19 nt, Artificial Sequence
  Description of Artificial Sequence: Synthetic oligonucleotide
  Antisense strand to SEQ ID NO: 2263320
uuaauccuucaucagggcu

SEQ ID NO: 2263322 - RNA, 19 nt, Artificial Sequence
  Description of Artificial Sequence: Synthetic oligonucleotide
  Sense strand starting at position 1165 of SEQ ID NO: 1884408
cugguauucuugucacaag

SEQ ID NO: 2263323 - RNA, 19 nt, Artificial Sequence
  Description of Artificial Sequence: Synthetic oligonucleotide
  Antisense strand to SEQ ID NO: 2263322
cuugugacaagaauaccag

SEQ ID NO: 2263324 - RNA, 19 nt, Artificial Sequence
  Description of Artificial Sequence: Synthetic oligonucleotide
  Sense strand starting at position 1202 of SEQ ID NO: 1884408
ucagcucagcgugaaacaa

SEQ ID NO: 2263325 - RNA, 19 nt, Artificial Sequence
  Description of Artificial Sequence: Synthetic oligonucleotide
  Antisense strand to SEQ ID NO: 2263324
uuguuucacgcugagcuga

SEQ ID NO: 2263326 - RNA, 19 nt, Artificial Sequence
  Description of Artificial Sequence: Synthetic oligonucleotide
  Sense strand starting at position 1517 of SEQ ID NO: 1884408
uuugaacuuuggcuuuaga

SEQ ID NO: 2263327 - RNA, 19 nt, Artificial Sequence
  Description of Artificial Sequence: Synthetic oligonucleotide
  Antisense strand to SEQ ID NO: 2263326
ucuaaagccaaaguucaaa

SEQ ID NO: 2263328 - RNA, 19 nt, Artificial Sequence
  Description of Artificial Sequence: Synthetic oligonucleotide
  Sense strand starting at position 1541 of SEQ ID NO: 1884408
uuggguguucuccagagaa

SEQ ID NO: 2263329 - RNA, 19 nt, Artificial Sequence
  Description of Artificial Sequence: Synthetic oligonucleotide
  Antisense strand to SEQ ID NO: 2263328
uucucuggagaacacccaa

SEQ ID NO: 2263330 - RNA, 19 nt, Artificial Sequence
  Description of Artificial Sequence: Synthetic oligonucleotide
  Sense strand starting at position 1543 of SEQ ID NO: 1884408
ggguguucuccagagaaca

SEQ ID NO: 2263331 - RNA, 19 nt, Artificial Sequence
  Description of Artificial Sequence: Synthetic oligonucleotide
  Antisense strand to SEQ ID NO: 2263330
uguucucuggagaacaccc

SEQ ID NO: 2263332 - RNA, 19 nt, Artificial Sequence
  Description of Artificial Sequence: Synthetic oligonucleotide
  Sense strand starting at position 1612 of SEQ ID NO: 1884408
acucccaagugucuugaau

SEQ ID NO: 2263333 - RNA, 19 nt, Artificial Sequence
  Description of Artificial Sequence: Synthetic oligonucleotide
  Antisense strand to SEQ ID NO: 2263332
auucaagacacuugggagu

SEQ ID NO: 2263334 - RNA, 19 nt, Artificial Sequence
  Description of Artificial Sequence: Synthetic oligonucleotide
  Sense strand starting at position 1777 of SEQ ID NO: 1884408
aaacuuggcuuuguggaga

SEQ ID NO: 2263335 - RNA, 19 nt, Artificial Sequence
  Description of Artificial Sequence: Synthetic oligonucleotide
  Antisense strand to SEQ ID NO: 2263334
ucuccacaaagccaaguuu

SEQ ID NO: 2263336 - RNA, 19 nt, Artificial Sequence
  Description of Artificial Sequence: Synthetic oligonucleotide
  Sense strand starting at position 1780 of SEQ ID NO: 1884408
cuuggcuuuguggagagua

SEQ ID NO: 2263337 - RNA, 19 nt, Artificial Sequence
  Description of Artificial Sequence: Synthetic oligonucleotide
  Antisense strand to SEQ ID NO: 2263336
uacucuccacaaagccaag

SEQ ID NO: 2263338 - RNA, 19 nt, Artificial Sequence
  Description of Artificial Sequence: Synthetic oligonucleotide
  Sense strand starting at position 1782 of SEQ ID NO: 1884408
uggcuuuguggagaguaag

SEQ ID NO: 2263339 - RNA, 19 nt, Artificial Sequence
  Description of Artificial Sequence: Synthetic oligonucleotide
  Antisense strand to SEQ ID NO: 2263338
cuuacucuccacaaagcca

SEQ ID NO: 2263340 - RNA, 19 nt, Artificial Sequence
  Description of Artificial Sequence: Synthetic oligonucleotide
  Sense strand starting at position 1838 of SEQ ID NO: 1884408
ggcuguguuccuguuguua

SEQ ID NO: 2263341 - RNA, 19 nt, Artificial Sequence
  Description of Artificial Sequence: Synthetic oligonucleotide
  Antisense strand to SEQ ID NO: 2263340
uaacaacaggaacacagcc

SEQ ID NO: 2263342 - RNA, 19 nt, Artificial Sequence
  Description of Artificial Sequence: Synthetic oligonucleotide
  Sense strand starting at position 1850 of SEQ ID NO: 1884408
guuguuaugccugaggauu

SEQ ID NO: 2263343 - RNA, 19 nt, Artificial Sequence
  Description of Artificial Sequence: Synthetic oligonucleotide
  Antisense strand to SEQ ID NO: 2263342
aauccucaggcauaacaac

SEQ ID NO: 2263344 - RNA, 19 nt, Artificial Sequence
  Description of Artificial Sequence: Synthetic oligonucleotide
  Sense strand starting at position 1858 of SEQ ID NO: 1884408
gccugaggauucuccuaga

SEQ ID NO: 2263345 - RNA, 19 nt, Artificial Sequence
  Description of Artificial Sequence: Synthetic oligonucleotide
  Antisense strand to SEQ ID NO: 2263344
ucuaggagaauccucaggc

SEQ ID NO: 2263346 - RNA, 19 nt, Artificial Sequence
  Description of Artificial Sequence: Synthetic oligonucleotide
  Sense strand starting at position 1890 of SEQ ID NO: 1884408
aagggaagcucauuaugcu

SEQ ID NO: 2263347 - RNA, 19 nt, Artificial Sequence
  Description of Artificial Sequence: Synthetic oligonucleotide
  Antisense strand to SEQ ID NO: 2263346
agcauaaugagcuucccuu

SEQ ID NO: 2263348 - RNA, 19 nt, Artificial Sequence
  Description of Artificial Sequence: Synthetic oligonucleotide
  Sense strand starting at position 2168 of SEQ ID NO: 1884408
agccucuguccucaaagaa

SEQ ID NO: 2263349 - RNA, 19 nt, Artificial Sequence
  Description of Artificial Sequence: Synthetic oligonucleotide
  Antisense strand to SEQ ID NO: 2263348
uucuuugaggacagaggcu

SEQ ID NO: 2263350 - RNA, 19 nt, Artificial Sequence
  Description of Artificial Sequence: Synthetic oligonucleotide
  Sense strand starting at position 2334 of SEQ ID NO: 1884408
cugucuuccgcauagaaug

SEQ ID NO: 2263351 - RNA, 19 nt, Artificial Sequence
  Description of Artificial Sequence: Synthetic oligonucleotide
  Antisense strand to SEQ ID NO: 2263350
cauucuaugcggaagacag

SEQ ID NO: 2263352 - RNA, 19 nt, Artificial Sequence
  Description of Artificial Sequence: Synthetic oligonucleotide
  Sense strand starting at position 2344 of SEQ ID NO: 1884408
cauagaaugugagcuucca

SEQ ID NO: 2263353 - RNA, 19 nt, Artificial Sequence
  Description of Artificial Sequence: Synthetic oligonucleotide
  Antisense strand to SEQ ID NO: 2263352
uggaagcucacauucuaug

SEQ ID NO: 2263354 - RNA, 19 nt, Artificial Sequence
  Description of Artificial Sequence: Synthetic oligonucleotide
  Sense strand starting at position 2893 of SEQ ID NO: 1884408
uggauuagggccuacucau

SEQ ID NO: 2263355 - RNA, 19 nt, Artificial Sequence
  Description of Artificial Sequence: Synthetic oligonucleotide
  Antisense strand to SEQ ID NO: 2263354
augaguaggcccuaaucca

SEQ ID NO: 2263356 - RNA, 19 nt, Artificial Sequence
  Description of Artificial Sequence: Synthetic oligonucleotide
  Sense strand starting at position 2962 of SEQ ID NO: 1884408
gagucauauccugagguac

SEQ ID NO: 2263357 - RNA, 19 nt, Artificial Sequence
  Description of Artificial Sequence: Synthetic oligonucleotide
  Antisense strand to SEQ ID NO: 2263356
guaccucaggauaugacuc

SEQ ID NO: 2263358 - RNA, 19 nt, Artificial Sequence
  Description of Artificial Sequence: Synthetic oligonucleotide
  Sense strand starting at position 3147 of SEQ ID NO: 1884408
cuucuuggcugacugacaa

SEQ ID NO: 2263359 - RNA, 19 nt, Artificial Sequence
  Description of Artificial Sequence: Synthetic oligonucleotide
  Antisense strand to SEQ ID NO: 2263358
uugucagucagccaagaag

SEQ ID NO: 2263360 - RNA, 19 nt, Artificial Sequence
  Description of Artificial Sequence: Synthetic oligonucleotide
  Sense strand starting at position 3279 of SEQ ID NO: 1884408
accugaggugucuguauuu

SEQ ID NO: 2263361 - RNA, 19 nt, Artificial Sequence
  Description of Artificial Sequence: Synthetic oligonucleotide
  Antisense strand to SEQ ID NO: 2263360
aaauacagacaccucaggu

SEQ ID NO: 2263362 - RNA, 19 nt, Artificial Sequence
  Description of Artificial Sequence: Synthetic oligonucleotide
  Sense strand starting at position 3340 of SEQ ID NO: 1884408
aaacaugucucccuuggga

SEQ ID NO: 2263363 - RNA, 19 nt, Artificial Sequence
  Description of Artificial Sequence: Synthetic oligonucleotide
  Antisense strand to SEQ ID NO: 2263362
ucccaagggagacauguuu

SEQ ID NO: 2263364 - RNA, 19 nt, Artificial Sequence
  Description of Artificial Sequence: Synthetic oligonucleotide
  Sense strand starting at position 3342 of SEQ ID NO: 1884408
acaugucucccuugggacu

SEQ ID NO: 2263365 - RNA, 19 nt, Artificial Sequence
  Description of Artificial Sequence: Synthetic oligonucleotide
  Antisense strand to SEQ ID NO: 2263364
agucccaagggagacaugu

SEQ ID NO: 2263366 - RNA, 19 nt, Artificial Sequence
  Description of Artificial Sequence: Synthetic oligonucleotide
  Sense strand starting at position 3687 of SEQ ID NO: 1884408
ggcuaagugccauauugga

SEQ ID NO: 2263367 - RNA, 19 nt, Artificial Sequence
  Description of Artificial Sequence: Synthetic oligonucleotide
  Antisense strand to SEQ ID NO: 2263366
uccaauauggcacuuagcc

SEQ ID NO: 2263368 - RNA, 19 nt, Artificial Sequence
  Description of Artificial Sequence: Synthetic oligonucleotide
  Sense strand starting at position 3749 of SEQ ID NO: 1884408
uaaucagacuuggcuuagu

SEQ ID NO: 2263369 - RNA, 19 nt, Artificial Sequence
  Description of Artificial Sequence: Synthetic oligonucleotide
  Antisense strand to SEQ ID NO: 2263368
acuaagccaagucugauua

SEQ ID NO: 2263370 - RNA, 19 nt, Artificial Sequence
  Description of Artificial Sequence: Synthetic oligonucleotide
  Sense strand starting at position 3839 of SEQ ID NO: 1884408
ccagaaguggcuugaggua

SEQ ID NO: 2263371 - RNA, 19 nt, Artificial Sequence
  Description of Artificial Sequence: Synthetic oligonucleotide
  Antisense strand to SEQ ID NO: 2263370
uaccucaagccacuucugg

SEQ ID NO: 2263372 - RNA, 19 nt, Artificial Sequence
  Description of Artificial Sequence: Synthetic oligonucleotide
  Sense strand starting at position 3925 of SEQ ID NO: 1884408
caguucucucggcaaagga

SEQ ID NO: 2263373 - RNA, 19 nt, Artificial Sequence
  Description of Artificial Sequence: Synthetic oligonucleotide
  Antisense strand to SEQ ID NO: 2263372
uccuuugccgagagaacug

SEQ ID NO: 2263374 - RNA, 19 nt, Artificial Sequence
  Description of Artificial Sequence: Synthetic oligonucleotide
  Sense strand starting at position 102 of SEQ ID NO: 1884409
auugguugacaaugugaag

SEQ ID NO: 2263375 - RNA, 19 nt, Artificial Sequence
  Description of Artificial Sequence: Synthetic oligonucleotide
  Antisense strand to SEQ ID NO: 2263374
cuucacauugucaaccaau

SEQ ID NO: 2263376 - RNA, 19 nt, Artificial Sequence
  Description of Artificial Sequence: Synthetic oligonucleotide
  Sense strand starting at position 1128 of SEQ ID NO: 1884409
cuauauagucauggcuaca

SEQ ID NO: 2263377 - RNA, 19 nt, Artificial Sequence
  Description of Artificial Sequence: Synthetic oligonucleotide
  Antisense strand to SEQ ID NO: 2263376
uguagccaugacuauauag

SEQ ID NO: 2263378 - RNA, 19 nt, Artificial Sequence
  Description of Artificial Sequence: Synthetic oligonucleotide
  Sense strand starting at position 1193 of SEQ ID NO: 1884409
cauaauaguugcuucugga

SEQ ID NO: 2263379 - RNA, 19 nt, Artificial Sequence
  Description of Artificial Sequence: Synthetic oligonucleotide
  Antisense strand to SEQ ID NO: 2263378
uccagaagcaacuauuaug

SEQ ID NO: 2263380 - RNA, 19 nt, Artificial Sequence
  Description of Artificial Sequence: Synthetic oligonucleotide
  Sense strand starting at position 1222 of SEQ ID NO: 1884409
ggguaauaggcuugagagu

SEQ ID NO: 2263381 - RNA, 19 nt, Artificial Sequence
  Description of Artificial Sequence: Synthetic oligonucleotide
  Antisense strand to SEQ ID NO: 2263380
acucucaagccuauuaccc

SEQ ID NO: 2263382 - RNA, 19 nt, Artificial Sequence
  Description of Artificial Sequence: Synthetic oligonucleotide
  Sense strand starting at position 1223 of SEQ ID NO: 1884409
gguaauaggcuugagagua

SEQ ID NO: 2263383 - RNA, 19 nt, Artificial Sequence
  Description of Artificial Sequence: Synthetic oligonucleotide
  Antisense strand to SEQ ID NO: 2263382
uacucucaagccuauuacc

SEQ ID NO: 2263384 - RNA, 19 nt, Artificial Sequence
  Description of Artificial Sequence: Synthetic oligonucleotide
  Sense strand starting at position 1304 of SEQ ID NO: 1884409
ucauaaugccaguagucaa

SEQ ID NO: 2263385 - RNA, 19 nt, Artificial Sequence
  Description of Artificial Sequence: Synthetic oligonucleotide
  Antisense strand to SEQ ID NO: 2263384
uugacuacuggcauuauga

SEQ ID NO: 2263386 - RNA, 19 nt, Artificial Sequence
  Description of Artificial Sequence: Synthetic oligonucleotide
  Sense strand starting at position 1327 of SEQ ID NO: 1884409
gggugauggguguacagua

SEQ ID NO: 2263387 - RNA, 19 nt, Artificial Sequence
  Description of Artificial Sequence: Synthetic oligonucleotide
  Antisense strand to SEQ ID NO: 2263386
uacuguacacccaucaccc

SEQ ID NO: 2263388 - RNA, 19 nt, Artificial Sequence
  Description of Artificial Sequence: Synthetic oligonucleotide
  Sense strand starting at position 1402 of SEQ ID NO: 1884409
augggaugccuguggauga

SEQ ID NO: 2263389 - RNA, 19 nt, Artificial Sequence
  Description of Artificial Sequence: Synthetic oligonucleotide
  Antisense strand to SEQ ID NO: 2263388
ucauccacaggcaucccau

SEQ ID NO: 2263390 - RNA, 19 nt, Artificial Sequence
  Description of Artificial Sequence: Synthetic oligonucleotide
  Sense strand starting at position 1421 of SEQ ID NO: 1884409
uguagauaauucccuguaa

SEQ ID NO: 2263391 - RNA, 19 nt, Artificial Sequence
  Description of Artificial Sequence: Synthetic oligonucleotide
  Antisense strand to SEQ ID NO: 2263390
uuacagggaauuaucuaca

SEQ ID NO: 2263392 - RNA, 19 nt, Artificial Sequence
  Description of Artificial Sequence: Synthetic oligonucleotide
  Sense strand starting at position 1422 of SEQ ID NO: 1884409
guagauaauucccuguaau

SEQ ID NO: 2263393 - RNA, 19 nt, Artificial Sequence
  Description of Artificial Sequence: Synthetic oligonucleotide
  Antisense strand to SEQ ID NO: 2263392
auuacagggaauuaucuac

SEQ ID NO: 2263394 - RNA, 19 nt, Artificial Sequence
  Description of Artificial Sequence: Synthetic oligonucleotide
  Sense strand starting at position 1599 of SEQ ID NO: 1884409
aucaguuaugaagguauac

SEQ ID NO: 2263395 - RNA, 19 nt, Artificial Sequence
  Description of Artificial Sequence: Synthetic oligonucleotide
  Antisense strand to SEQ ID NO: 2263394
guauaccuucauaacugau

SEQ ID NO: 2263396 - RNA, 19 nt, Artificial Sequence
  Description of Artificial Sequence: Synthetic oligonucleotide
  Sense strand starting at position 1601 of SEQ ID NO: 1884409
caguuaugaagguauacgu

SEQ ID NO: 2263397 - RNA, 19 nt, Artificial Sequence
  Description of Artificial Sequence: Synthetic oligonucleotide
  Antisense strand to SEQ ID NO: 2263396
acguauaccuucauaacug

SEQ ID NO: 2263398 - RNA, 19 nt, Artificial Sequence
  Description of Artificial Sequence: Synthetic oligonucleotide
  Sense strand starting at position 1626 of SEQ ID NO: 1884409
gggacagugaaugguguau

SEQ ID NO: 2263399 - RNA, 19 nt, Artificial Sequence
  Description of Artificial Sequence: Synthetic oligonucleotide
  Antisense strand to SEQ ID NO: 2263398
auacaccauucacuguccc

SEQ ID NO: 2263400 - RNA, 19 nt, Artificial Sequence
  Description of Artificial Sequence: Synthetic oligonucleotide
  Sense strand starting at position 1982 of SEQ ID NO: 1884409
cgccaauucggccuucuga

SEQ ID NO: 2263401 - RNA, 19 nt, Artificial Sequence
  Description of Artificial Sequence: Synthetic oligonucleotide
  Antisense strand to SEQ ID NO: 2263400
ucagaaggccgaauuggcg

SEQ ID NO: 2263402 - RNA, 19 nt, Artificial Sequence
  Description of Artificial Sequence: Synthetic oligonucleotide
  Sense strand starting at position 2090 of SEQ ID NO: 1884409
augaguccuaccgaggcaa

SEQ ID NO: 2263403 - RNA, 19 nt, Artificial Sequence
  Description of Artificial Sequence: Synthetic oligonucleotide
  Antisense strand to SEQ ID NO: 2263402
uugccucgguaggacucau

SEQ ID NO: 2263404 - RNA, 19 nt, Artificial Sequence
  Description of Artificial Sequence: Synthetic oligonucleotide
  Sense strand starting at position 2092 of SEQ ID NO: 1884409
gaguccuaccgaggcaaga

SEQ ID NO: 2263405 - RNA, 19 nt, Artificial Sequence
  Description of Artificial Sequence: Synthetic oligonucleotide
  Antisense strand to SEQ ID NO: 2263404
ucuugccucgguaggacuc

SEQ ID NO: 2263406 - RNA, 19 nt, Artificial Sequence
  Description of Artificial Sequence: Synthetic oligonucleotide
  Sense strand starting at position 2132 of SEQ ID NO: 1884409
aaauacauuuccguguguu

SEQ ID NO: 2263407 - RNA, 19 nt, Artificial Sequence
  Description of Artificial Sequence: Synthetic oligonucleotide
  Antisense strand to SEQ ID NO: 2263406
aacacacggaaauguauuu

SEQ ID NO: 2263408 - RNA, 19 nt, Artificial Sequence
  Description of Artificial Sequence: Synthetic oligonucleotide
  Sense strand starting at position 2133 of SEQ ID NO: 1884409
aauacauuuccguguguuu

SEQ ID NO: 2263409 - RNA, 19 nt, Artificial Sequence
  Description of Artificial Sequence: Synthetic oligonucleotide
  Antisense strand to SEQ ID NO: 2263408
aaacacacggaaauguauu

SEQ ID NO: 2263410 - RNA, 19 nt, Artificial Sequence
  Description of Artificial Sequence: Synthetic oligonucleotide
  Sense strand starting at position 2174 of SEQ ID NO: 1884409
caacucuuucguggaggga

SEQ ID NO: 2263411 - RNA, 19 nt, Artificial Sequence
  Description of Artificial Sequence: Synthetic oligonucleotide
  Antisense strand to SEQ ID NO: 2263410
ucccuccacgaaagaguug

SEQ ID NO: 2263412 - RNA, 19 nt, Artificial Sequence
  Description of Artificial Sequence: Synthetic oligonucleotide
  Sense strand starting at position 2857 of SEQ ID NO: 1884409
cggccuugggaguagaaga

SEQ ID NO: 2263413 - RNA, 19 nt, Artificial Sequence
  Description of Artificial Sequence: Synthetic oligonucleotide
  Antisense strand to SEQ ID NO: 2263412
ucuucuacucccaaggccg

SEQ ID NO: 2263414 - RNA, 19 nt, Artificial Sequence
  Description of Artificial Sequence: Synthetic oligonucleotide
  Sense strand starting at position 2993 of SEQ ID NO: 1884409
guaguuugaguuggaggga

SEQ ID NO: 2263415 - RNA, 19 nt, Artificial Sequence
  Description of Artificial Sequence: Synthetic oligonucleotide
  Antisense strand to SEQ ID NO: 2263414
ucccuccaacucaaacuac

SEQ ID NO: 2263416 - RNA, 19 nt, Artificial Sequence
  Description of Artificial Sequence: Synthetic oligonucleotide
  Sense strand starting at position 3036 of SEQ ID NO: 1884409
gggcuucuacugugggaga

SEQ ID NO: 2263417 - RNA, 19 nt, Artificial Sequence
  Description of Artificial Sequence: Synthetic oligonucleotide
  Antisense strand to SEQ ID NO: 2263416
ucucccacaguagaagccc

SEQ ID NO: 2263418 - RNA, 19 nt, Artificial Sequence
  Description of Artificial Sequence: Synthetic oligonucleotide
  Sense strand starting at position 3049 of SEQ ID NO: 1884409
gggagaggacucugucuaa

SEQ ID NO: 2263419 - RNA, 19 nt, Artificial Sequence
  Description of Artificial Sequence: Synthetic oligonucleotide
  Antisense strand to SEQ ID NO: 2263418
uuagacagaguccucuccc

SEQ ID NO: 2263420 - RNA, 19 nt, Artificial Sequence
  Description of Artificial Sequence: Synthetic oligonucleotide
  Sense strand starting at position 3126 of SEQ ID NO: 1884409
agcuuugaguuaucuuaaa

SEQ ID NO: 2263421 - RNA, 19 nt, Artificial Sequence
  Description of Artificial Sequence: Synthetic oligonucleotide
  Antisense strand to SEQ ID NO: 2263420
uuuaagauaacucaaagcu

SEQ ID NO: 2263422 - RNA, 19 nt, Artificial Sequence
  Description of Artificial Sequence: Synthetic oligonucleotide
  Sense strand starting at position 3243 of SEQ ID NO: 1884409
aaaugauuguaugccggaa

SEQ ID NO: 2263423 - RNA, 19 nt, Artificial Sequence
  Description of Artificial Sequence: Synthetic oligonucleotide
  Antisense strand to SEQ ID NO: 2263422
uuccggcauacaaucauuu

SEQ ID NO: 2263424 - RNA, 19 nt, Artificial Sequence
  Description of Artificial Sequence: Synthetic oligonucleotide
  Sense strand starting at position 3383 of SEQ ID NO: 1884409
gaagacuagucauugcauu

SEQ ID NO: 2263425 - RNA, 19 nt, Artificial Sequence
  Description of Artificial Sequence: Synthetic oligonucleotide
  Antisense strand to SEQ ID NO: 2263424
aaugcaaugacuagucuuc

SEQ ID NO: 2263426 - RNA, 19 nt, Artificial Sequence
  Description of Artificial Sequence: Synthetic oligonucleotide
  Sense strand starting at position 3389 of SEQ ID NO: 1884409
uagucauugcauuagagau

SEQ ID NO: 2263427 - RNA, 19 nt, Artificial Sequence
  Description of Artificial Sequence: Synthetic oligonucleotide
  Antisense strand to SEQ ID NO: 2263426
aucucuaaugcaaugacua

SEQ ID NO: 2263428 - RNA, 19 nt, Artificial Sequence
  Description of Artificial Sequence: Synthetic oligonucleotide
  Sense strand starting at position 3410 of SEQ ID NO: 1884409
aaugguggcacugagaagu

SEQ ID NO: 2263429 - RNA, 19 nt, Artificial Sequence
  Description of Artificial Sequence: Synthetic oligonucleotide
  Antisense strand to SEQ ID NO: 2263428
acuucucagugccaccauu

SEQ ID NO: 2263430 - RNA, 19 nt, Artificial Sequence
  Description of Artificial Sequence: Synthetic oligonucleotide
  Sense strand starting at position 3418 of SEQ ID NO: 1884409
cacugagaagugugcaaca

SEQ ID NO: 2263431 - RNA, 19 nt, Artificial Sequence
  Description of Artificial Sequence: Synthetic oligonucleotide
  Antisense strand to SEQ ID NO: 2263430
uguugcacacuucucagug

SEQ ID NO: 2263432 - RNA, 19 nt, Artificial Sequence
  Description of Artificial Sequence: Synthetic oligonucleotide
  Sense strand starting at position 3420 of SEQ ID NO: 1884409
cugagaagugugcaacauu

SEQ ID NO: 2263433 - RNA, 19 nt, Artificial Sequence
  Description of Artificial Sequence: Synthetic oligonucleotide
  Antisense strand to SEQ ID NO: 2263432
aauguugcacacuucucag

SEQ ID NO: 2263434 - RNA, 19 nt, Artificial Sequence
  Description of Artificial Sequence: Synthetic oligonucleotide
  Sense strand starting at position 3516 of SEQ ID NO: 1884409
uuaugaguuccuugaaggu

SEQ ID NO: 2263435 - RNA, 19 nt, Artificial Sequence
  Description of Artificial Sequence: Synthetic oligonucleotide
  Antisense strand to SEQ ID NO: 2263434
accuucaaggaacucauaa

SEQ ID NO: 2263436 - RNA, 19 nt, Artificial Sequence
  Description of Artificial Sequence: Synthetic oligonucleotide
  Sense strand starting at position 3531 of SEQ ID NO: 1884409
aggugagcuccuugagauu

SEQ ID NO: 2263437 - RNA, 19 nt, Artificial Sequence
  Description of Artificial Sequence: Synthetic oligonucleotide
  Antisense strand to SEQ ID NO: 2263436
aaucucaaggagcucaccu

SEQ ID NO: 2263438 - RNA, 19 nt, Artificial Sequence
  Description of Artificial Sequence: Synthetic oligonucleotide
  Sense strand starting at position 3550 of SEQ ID NO: 1884409
guauguucccuuuaccuau

SEQ ID NO: 2263439 - RNA, 19 nt, Artificial Sequence
  Description of Artificial Sequence: Synthetic oligonucleotide
  Antisense strand to SEQ ID NO: 2263438
auagguaaagggaacauac

SEQ ID NO: 2263440 - RNA, 19 nt, Artificial Sequence
  Description of Artificial Sequence: Synthetic oligonucleotide
  Sense strand starting at position 3602 of SEQ ID NO: 1884409
accagugguccuugaagga

SEQ ID NO: 2263441 - RNA, 19 nt, Artificial Sequence
  Description of Artificial Sequence: Synthetic oligonucleotide
  Antisense strand to SEQ ID NO: 2263440
uccuucaaggaccacuggu

SEQ ID NO: 2263442 - RNA, 19 nt, Artificial Sequence
  Description of Artificial Sequence: Synthetic oligonucleotide
  Sense strand starting at position 3634 of SEQ ID NO: 1884409
aggagauguugagugugaa

SEQ ID NO: 2263443 - RNA, 19 nt, Artificial Sequence
  Description of Artificial Sequence: Synthetic oligonucleotide
  Antisense strand to SEQ ID NO: 2263442
uucacacucaacaucuccu

SEQ ID NO: 2263444 - RNA, 19 nt, Artificial Sequence
  Description of Artificial Sequence: Synthetic oligonucleotide
  Sense strand starting at position 3635 of SEQ ID NO: 1884409
ggagauguugagugugaaa

SEQ ID NO: 2263445 - RNA, 19 nt, Artificial Sequence
  Description of Artificial Sequence: Synthetic oligonucleotide
  Antisense strand to SEQ ID NO: 2263444
uuucacacucaacaucucc

SEQ ID NO: 2263446 - RNA, 19 nt, Artificial Sequence
  Description of Artificial Sequence: Synthetic oligonucleotide
  Sense strand starting at position 3642 of SEQ ID NO: 1884409
uugagugugaaaggaauga

SEQ ID NO: 2263447 - RNA, 19 nt, Artificial Sequence
  Description of Artificial Sequence: Synthetic oligonucleotide
  Antisense strand to SEQ ID NO: 2263446
ucauuccuuucacacucaa

SEQ ID NO: 2263448 - RNA, 19 nt, Artificial Sequence
  Description of Artificial Sequence: Synthetic oligonucleotide
  Sense strand starting at position 3699 of SEQ ID NO: 1884409
uucugaagccauggagaca

SEQ ID NO: 2263449 - RNA, 19 nt, Artificial Sequence
  Description of Artificial Sequence: Synthetic oligonucleotide
  Antisense strand to SEQ ID NO: 2263448
ugucuccauggcuucagaa

SEQ ID NO: 2263450 - RNA, 19 nt, Artificial Sequence
  Description of Artificial Sequence: Synthetic oligonucleotide
  Sense strand starting at position 3902 of SEQ ID NO: 1884409
agaugagguucagagaaag

SEQ ID NO: 2263451 - RNA, 19 nt, Artificial Sequence
  Description of Artificial Sequence: Synthetic oligonucleotide
  Antisense strand to SEQ ID NO: 2263450
cuuucucugaaccucaucu

SEQ ID NO: 2263452 - RNA, 19 nt, Artificial Sequence
  Description of Artificial Sequence: Synthetic oligonucleotide
  Sense strand starting at position 3977 of SEQ ID NO: 1884409
ggaguuggauuaccugauu

SEQ ID NO: 2263453 - RNA, 19 nt, Artificial Sequence
  Description of Artificial Sequence: Synthetic oligonucleotide
  Antisense strand to SEQ ID NO: 2263452
aaucagguaauccaacucc

SEQ ID NO: 2263454 - RNA, 19 nt, Artificial Sequence
  Description of Artificial Sequence: Synthetic oligonucleotide
  Sense strand starting at position 135 of SEQ ID NO: 1884410
agccaaucuuggcuuuaga

SEQ ID NO: 2263455 - RNA, 19 nt, Artificial Sequence
  Description of Artificial Sequence: Synthetic oligonucleotide
  Antisense strand to SEQ ID NO: 2263454
ucuaaagccaagauuggcu

SEQ ID NO: 2263456 - RNA, 19 nt, Artificial Sequence
  Description of Artificial Sequence: Synthetic oligonucleotide
  Sense strand starting at position 142 of SEQ ID NO: 1884410
cuuggcuuuagaugaugau

SEQ ID NO: 2263457 - RNA, 19 nt, Artificial Sequence
  Description of Artificial Sequence: Synthetic oligonucleotide
  Antisense strand to SEQ ID NO: 2263456
aucaucaucuaaagccaag

SEQ ID NO: 2263458 - RNA, 19 nt, Artificial Sequence
  Description of Artificial Sequence: Synthetic oligonucleotide
  Sense strand starting at position 366 of SEQ ID NO: 1884410
ggugaagucuucucuauac

SEQ ID NO: 2263459 - RNA, 19 nt, Artificial Sequence
  Description of Artificial Sequence: Synthetic oligonucleotide
  Antisense strand to SEQ ID NO: 2263458
guauagagaagacuucacc

SEQ ID NO: 2263460 - RNA, 19 nt, Artificial Sequence
  Description of Artificial Sequence: Synthetic oligonucleotide
  Sense strand starting at position 457 of SEQ ID NO: 1884410
ccaucucuuguggauuaaa

SEQ ID NO: 2263461 - RNA, 19 nt, Artificial Sequence
  Description of Artificial Sequence: Synthetic oligonucleotide
  Antisense strand to SEQ ID NO: 2263460
uuuaauccacaagagaugg

SEQ ID NO: 2263462 - RNA, 19 nt, Artificial Sequence
  Description of Artificial Sequence: Synthetic oligonucleotide
  Sense strand starting at position 557 of SEQ ID NO: 1884410
uuagguuuagacuagguca

SEQ ID NO: 2263463 - RNA, 19 nt, Artificial Sequence
  Description of Artificial Sequence: Synthetic oligonucleotide
  Antisense strand to SEQ ID NO: 2263462
ugaccuagucuaaaccuaa

SEQ ID NO: 2263464 - RNA, 19 nt, Artificial Sequence
  Description of Artificial Sequence: Synthetic oligonucleotide
  Sense strand starting at position 560 of SEQ ID NO: 1884410
gguuuagacuaggucaaga

SEQ ID NO: 2263465 - RNA, 19 nt, Artificial Sequence
  Description of Artificial Sequence: Synthetic oligonucleotide
  Antisense strand to SEQ ID NO: 2263464
ucuugaccuagucuaaacc

SEQ ID NO: 2263466 - RNA, 19 nt, Artificial Sequence
  Description of Artificial Sequence: Synthetic oligonucleotide
  Sense strand starting at position 585 of SEQ ID NO: 1884410
gacccuccugaugggauua

SEQ ID NO: 2263467 - RNA, 19 nt, Artificial Sequence
  Description of Artificial Sequence: Synthetic oligonucleotide
  Antisense strand to SEQ ID NO: 2263466
uaaucccaucaggaggguc

SEQ ID NO: 2263468 - RNA, 19 nt, Artificial Sequence
  Description of Artificial Sequence: Synthetic oligonucleotide
  Sense strand starting at position 624 of SEQ ID NO: 1884410
agagaucucuugucaaugc

SEQ ID NO: 2263469 - RNA, 19 nt, Artificial Sequence
  Description of Artificial Sequence: Synthetic oligonucleotide
  Antisense strand to SEQ ID NO: 2263468
gcauugacaagagaucucu

SEQ ID NO: 2263470 - RNA, 19 nt, Artificial Sequence
  Description of Artificial Sequence: Synthetic oligonucleotide
  Sense strand starting at position 697 of SEQ ID NO: 1884410
gggugaggacccggguauu

SEQ ID NO: 2263471 - RNA, 19 nt, Artificial Sequence
  Description of Artificial Sequence: Synthetic oligonucleotide
  Antisense strand to SEQ ID NO: 2263470
aauacccggguccucaccc

SEQ ID NO: 2263472 - RNA, 19 nt, Artificial Sequence
  Description of Artificial Sequence: Synthetic oligonucleotide
  Sense strand starting at position 707 of SEQ ID NO: 1884410
ccggguauugaguaaagau

SEQ ID NO: 2263473 - RNA, 19 nt, Artificial Sequence
  Description of Artificial Sequence: Synthetic oligonucleotide
  Antisense strand to SEQ ID NO: 2263472
aucuuuacucaauacccgg

SEQ ID NO: 2263474 - RNA, 19 nt, Artificial Sequence
  Description of Artificial Sequence: Synthetic oligonucleotide
  Sense strand starting at position 726 of SEQ ID NO: 1884410
gagcuauuugcaggcaggu

SEQ ID NO: 2263475 - RNA, 19 nt, Artificial Sequence
  Description of Artificial Sequence: Synthetic oligonucleotide
  Antisense strand to SEQ ID NO: 2263474
accugccugcaaauagcuc

SEQ ID NO: 2263476 - RNA, 19 nt, Artificial Sequence
  Description of Artificial Sequence: Synthetic oligonucleotide
  Sense strand starting at position 750 of SEQ ID NO: 1884410
cagagcuuucugggccaaa

SEQ ID NO: 2263477 - RNA, 19 nt, Artificial Sequence
  Description of Artificial Sequence: Synthetic oligonucleotide
  Antisense strand to SEQ ID NO: 2263476
uuuggcccagaaagcucug

SEQ ID NO: 2263478 - RNA, 19 nt, Artificial Sequence
  Description of Artificial Sequence: Synthetic oligonucleotide
  Sense strand starting at position 751 of SEQ ID NO: 1884410
agagcuuucugggccaaag

SEQ ID NO: 2263479 - RNA, 19 nt, Artificial Sequence
  Description of Artificial Sequence: Synthetic oligonucleotide
  Antisense strand to SEQ ID NO: 2263478
cuuuggcccagaaagcucu

SEQ ID NO: 2263480 - RNA, 19 nt, Artificial Sequence
  Description of Artificial Sequence: Synthetic oligonucleotide
  Sense strand starting at position 984 of SEQ ID NO: 1884410
ccgcuaacaagugaaagua

SEQ ID NO: 2263481 - RNA, 19 nt, Artificial Sequence
  Description of Artificial Sequence: Synthetic oligonucleotide
  Antisense strand to SEQ ID NO: 2263480
uacuuucacuuguuagcgg

SEQ ID NO: 2263482 - RNA, 19 nt, Artificial Sequence
  Description of Artificial Sequence: Synthetic oligonucleotide
  Sense strand starting at position 1039 of SEQ ID NO: 1884410
uggguuuaaggcuagaacu

SEQ ID NO: 2263483 - RNA, 19 nt, Artificial Sequence
  Description of Artificial Sequence: Synthetic oligonucleotide
  Antisense strand to SEQ ID NO: 2263482
aguucuagccuuaaaccca

SEQ ID NO: 2263484 - RNA, 19 nt, Artificial Sequence
  Description of Artificial Sequence: Synthetic oligonucleotide
  Sense strand starting at position 1057 of SEQ ID NO: 1884410
uggaauuggucauugaguu

SEQ ID NO: 2263485 - RNA, 19 nt, Artificial Sequence
  Description of Artificial Sequence: Synthetic oligonucleotide
  Antisense strand to SEQ ID NO: 2263484
aacucaaugaccaauucca

SEQ ID NO: 2263486 - RNA, 19 nt, Artificial Sequence
  Description of Artificial Sequence: Synthetic oligonucleotide
  Sense strand starting at position 1058 of SEQ ID NO: 1884410
ggaauuggucauugaguuu

SEQ ID NO: 2263487 - RNA, 19 nt, Artificial Sequence
  Description of Artificial Sequence: Synthetic oligonucleotide
  Antisense strand to SEQ ID NO: 2263486
aaacucaaugaccaauucc

SEQ ID NO: 2263488 - RNA, 19 nt, Artificial Sequence
  Description of Artificial Sequence: Synthetic oligonucleotide
  Sense strand starting at position 1077 of SEQ ID NO: 1884410
uaaagacuguugccagaua

SEQ ID NO: 2263489 - RNA, 19 nt, Artificial Sequence
  Description of Artificial Sequence: Synthetic oligonucleotide
  Antisense strand to SEQ ID NO: 2263488
uaucuggcaacagucuuua

SEQ ID NO: 2263490 - RNA, 19 nt, Artificial Sequence
  Description of Artificial Sequence: Synthetic oligonucleotide
  Sense strand starting at position 2172 of SEQ ID NO: 1884410
gcgauaauaaucuaacguu

SEQ ID NO: 2263491 - RNA, 19 nt, Artificial Sequence
  Description of Artificial Sequence: Synthetic oligonucleotide
  Antisense strand to SEQ ID NO: 2263490
aacguuagauuauuaucgc

SEQ ID NO: 2263492 - RNA, 19 nt, Artificial Sequence
  Description of Artificial Sequence: Synthetic oligonucleotide
  Sense strand starting at position 2205 of SEQ ID NO: 1884410
caggaauuaggcuguguac

SEQ ID NO: 2263493 - RNA, 19 nt, Artificial Sequence
  Description of Artificial Sequence: Synthetic oligonucleotide
  Antisense strand to SEQ ID NO: 2263492
guacacagccuaauuccug

SEQ ID NO: 2263494 - RNA, 19 nt, Artificial Sequence
  Description of Artificial Sequence: Synthetic oligonucleotide
  Sense strand starting at position 2539 of SEQ ID NO: 1884410
gagaaagugucuuccagga

SEQ ID NO: 2263495 - RNA, 19 nt, Artificial Sequence
  Description of Artificial Sequence: Synthetic oligonucleotide
  Antisense strand to SEQ ID NO: 2263494
uccuggaagacacuuucuc

SEQ ID NO: 2263496 - RNA, 19 nt, Artificial Sequence
  Description of Artificial Sequence: Synthetic oligonucleotide
  Sense strand starting at position 2543 of SEQ ID NO: 1884410
aagugucuuccaggaguca

SEQ ID NO: 2263497 - RNA, 19 nt, Artificial Sequence
  Description of Artificial Sequence: Synthetic oligonucleotide
  Antisense strand to SEQ ID NO: 2263496
ugacuccuggaagacacuu

SEQ ID NO: 2263498 - RNA, 19 nt, Artificial Sequence
  Description of Artificial Sequence: Synthetic oligonucleotide
  Sense strand starting at position 2603 of SEQ ID NO: 1884410
ggaaacacugcauguugua

SEQ ID NO: 2263499 - RNA, 19 nt, Artificial Sequence
  Description of Artificial Sequence: Synthetic oligonucleotide
  Antisense strand to SEQ ID NO: 2263498
uacaacaugcaguguuucc

SEQ ID NO: 2263500 - RNA, 19 nt, Artificial Sequence
  Description of Artificial Sequence: Synthetic oligonucleotide
  Sense strand starting at position 2763 of SEQ ID NO: 1884410
ugcuaauaagaaugucuuu

SEQ ID NO: 2263501 - RNA, 19 nt, Artificial Sequence
  Description of Artificial Sequence: Synthetic oligonucleotide
  Antisense strand to SEQ ID NO: 2263500
aaagacauucuuauuagca

SEQ ID NO: 2263502 - RNA, 19 nt, Artificial Sequence
  Description of Artificial Sequence: Synthetic oligonucleotide
  Sense strand starting at position 2839 of SEQ ID NO: 1884410
aaacaauagcugugggagu

SEQ ID NO: 2263503 - RNA, 19 nt, Artificial Sequence
  Description of Artificial Sequence: Synthetic oligonucleotide
  Antisense strand to SEQ ID NO: 2263502
acucccacagcuauuguuu

SEQ ID NO: 2263504 - RNA, 19 nt, Artificial Sequence
  Description of Artificial Sequence: Synthetic oligonucleotide
  Sense strand starting at position 2912 of SEQ ID NO: 1884410
guguuaucauaaucaucuu

SEQ ID NO: 2263505 - RNA, 19 nt, Artificial Sequence
  Description of Artificial Sequence: Synthetic oligonucleotide
  Antisense strand to SEQ ID NO: 2263504
aagaugauuaugauaacac

SEQ ID NO: 2263506 - RNA, 19 nt, Artificial Sequence
  Description of Artificial Sequence: Synthetic oligonucleotide
  Sense strand starting at position 2976 of SEQ ID NO: 1884410
uguggugcugaauaagaau

SEQ ID NO: 2263507 - RNA, 19 nt, Artificial Sequence
  Description of Artificial Sequence: Synthetic oligonucleotide
  Antisense strand to SEQ ID NO: 2263506
auucuuauucagcaccaca

SEQ ID NO: 2263508 - RNA, 19 nt, Artificial Sequence
  Description of Artificial Sequence: Synthetic oligonucleotide
  Sense strand starting at position 3034 of SEQ ID NO: 1884410
guucuaagugccuuccgua

SEQ ID NO: 2263509 - RNA, 19 nt, Artificial Sequence
  Description of Artificial Sequence: Synthetic oligonucleotide
  Antisense strand to SEQ ID NO: 2263508
uacggaaggcacuuagaac

SEQ ID NO: 2263510 - RNA, 19 nt, Artificial Sequence
  Description of Artificial Sequence: Synthetic oligonucleotide
  Sense strand starting at position 3083 of SEQ ID NO: 1884410
agguauuauggccaucuga

SEQ ID NO: 2263511 - RNA, 19 nt, Artificial Sequence
  Description of Artificial Sequence: Synthetic oligonucleotide
  Antisense strand to SEQ ID NO: 2263510
ucagauggccauaauaccu

SEQ ID NO: 2263512 - RNA, 19 nt, Artificial Sequence
  Description of Artificial Sequence: Synthetic oligonucleotide
  Sense strand starting at position 3178 of SEQ ID NO: 1884410
acgcaagugcuugccauua

SEQ ID NO: 2263513 - RNA, 19 nt, Artificial Sequence
  Description of Artificial Sequence: Synthetic oligonucleotide
  Antisense strand to SEQ ID NO: 2263512
uaauggcaagcacuugcgu

SEQ ID NO: 2263514 - RNA, 19 nt, Artificial Sequence
  Description of Artificial Sequence: Synthetic oligonucleotide
  Sense strand starting at position 3242 of SEQ ID NO: 1884410
uuaagugacuugcucuaga

SEQ ID NO: 2263515 - RNA, 19 nt, Artificial Sequence
  Description of Artificial Sequence: Synthetic oligonucleotide
  Antisense strand to SEQ ID NO: 2263514
ucuagagcaagucacuuaa

SEQ ID NO: 2263516 - RNA, 19 nt, Artificial Sequence
  Description of Artificial Sequence: Synthetic oligonucleotide
  Sense strand starting at position 3264 of SEQ ID NO: 1884410
cacuaauaguaagugaguu

SEQ ID NO: 2263517 - RNA, 19 nt, Artificial Sequence
  Description of Artificial Sequence: Synthetic oligonucleotide
  Antisense strand to SEQ ID NO: 2263516
aacucacuuacuauuagug

SEQ ID NO: 2263518 - RNA, 19 nt, Artificial Sequence
  Description of Artificial Sequence: Synthetic oligonucleotide
  Sense strand starting at position 3268 of SEQ ID NO: 1884410
aauaguaagugaguuggaa

SEQ ID NO: 2263519 - RNA, 19 nt, Artificial Sequence
  Description of Artificial Sequence: Synthetic oligonucleotide
  Antisense strand to SEQ ID NO: 2263518
uuccaacucacuuacuauu

SEQ ID NO: 2263520 - RNA, 19 nt, Artificial Sequence
  Description of Artificial Sequence: Synthetic oligonucleotide
  Sense strand starting at position 3392 of SEQ ID NO: 1884410
cagaauuuccugugagugc

SEQ ID NO: 2263521 - RNA, 19 nt, Artificial Sequence
  Description of Artificial Sequence: Synthetic oligonucleotide
  Antisense strand to SEQ ID NO: 2263520
gcacucacaggaaauucug

SEQ ID NO: 2263522 - RNA, 19 nt, Artificial Sequence
  Description of Artificial Sequence: Synthetic oligonucleotide
  Sense strand starting at position 3515 of SEQ ID NO: 1884410
uggauuggacccugaccua

SEQ ID NO: 2263523 - RNA, 19 nt, Artificial Sequence
  Description of Artificial Sequence: Synthetic oligonucleotide
  Antisense strand to SEQ ID NO: 2263522
uaggucaggguccaaucca

SEQ ID NO: 2263524 - RNA, 19 nt, Artificial Sequence
  Description of Artificial Sequence: Synthetic oligonucleotide
  Sense strand starting at position 3698 of SEQ ID NO: 1884410
agaagacuucccugacugu

SEQ ID NO: 2263525 - RNA, 19 nt, Artificial Sequence
  Description of Artificial Sequence: Synthetic oligonucleotide
  Antisense strand to SEQ ID NO: 2263524
acagucagggaagucuucu

SEQ ID NO: 2263526 - RNA, 19 nt, Artificial Sequence
  Description of Artificial Sequence: Synthetic oligonucleotide
  Sense strand starting at position 3786 of SEQ ID NO: 1884410
gccaaauccuuggucuuga

SEQ ID NO: 2263527 - RNA, 19 nt, Artificial Sequence
  Description of Artificial Sequence: Synthetic oligonucleotide
  Antisense strand to SEQ ID NO: 2263526
ucaagaccaaggauuuggc

SEQ ID NO: 2263528 - RNA, 19 nt, Artificial Sequence
  Description of Artificial Sequence: Synthetic oligonucleotide
  Sense strand starting at position 3787 of SEQ ID NO: 1884410
ccaaauccuuggucuugaa

SEQ ID NO: 2263529 - RNA, 19 nt, Artificial Sequence
  Description of Artificial Sequence: Synthetic oligonucleotide
  Antisense strand to SEQ ID NO: 2263528
uucaagaccaaggauuugg

SEQ ID NO: 2263530 - RNA, 19 nt, Artificial Sequence
  Description of Artificial Sequence: Synthetic oligonucleotide
  Sense strand starting at position 3791 of SEQ ID NO: 1884410
auccuuggucuugaaauua

SEQ ID NO: 2263531 - RNA, 19 nt, Artificial Sequence
  Description of Artificial Sequence: Synthetic oligonucleotide
  Antisense strand to SEQ ID NO: 2263530
uaauuucaagaccaaggau

SEQ ID NO: 2263532 - RNA, 19 nt, Artificial Sequence
  Description of Artificial Sequence: Synthetic oligonucleotide
  Sense strand starting at position 3961 of SEQ ID NO: 1884410
ccagaaggauagcugauau

SEQ ID NO: 2263533 - RNA, 19 nt, Artificial Sequence
  Description of Artificial Sequence: Synthetic oligonucleotide
  Antisense strand to SEQ ID NO: 2263532
auaucagcuauccuucugg

SEQ ID NO: 2263534 - RNA, 19 nt, Artificial Sequence
  Description of Artificial Sequence: Synthetic oligonucleotide
  Sense strand starting at position 76 of SEQ ID NO: 1884411
ugugcuaugacuuggccau

SEQ ID NO: 2263535 - RNA, 19 nt, Artificial Sequence
  Description of Artificial Sequence: Synthetic oligonucleotide
  Antisense strand to SEQ ID NO: 2263534
auggccaagucauagcaca

SEQ ID NO: 2263536 - RNA, 19 nt, Artificial Sequence
  Description of Artificial Sequence: Synthetic oligonucleotide
  Sense strand starting at position 77 of SEQ ID NO: 1884411
gugcuaugacuuggccauu

SEQ ID NO: 2263537 - RNA, 19 nt, Artificial Sequence
  Description of Artificial Sequence: Synthetic oligonucleotide
  Antisense strand to SEQ ID NO: 2263536
aauggccaagucauagcac

SEQ ID NO: 2263538 - RNA, 19 nt, Artificial Sequence
  Description of Artificial Sequence: Synthetic oligonucleotide
  Sense strand starting at position 114 of SEQ ID NO: 1884411
agugguaucccuggguaug

SEQ ID NO: 2263539 - RNA, 19 nt, Artificial Sequence
  Description of Artificial Sequence: Synthetic oligonucleotide
  Antisense strand to SEQ ID NO: 2263538
cauacccagggauaccacu

SEQ ID NO: 2263540 - RNA, 19 nt, Artificial Sequence
  Description of Artificial Sequence: Synthetic oligonucleotide
  Sense strand starting at position 181 of SEQ ID NO: 1884411
aggcuuuagacaggccaua

SEQ ID NO: 2263541 - RNA, 19 nt, Artificial Sequence
  Description of Artificial Sequence: Synthetic oligonucleotide
  Antisense strand to SEQ ID NO: 2263540
uauggccugucuaaagccu

SEQ ID NO: 2263542 - RNA, 19 nt, Artificial Sequence
  Description of Artificial Sequence: Synthetic oligonucleotide
  Sense strand starting at position 233 of SEQ ID NO: 1884411
gguacuuugggagagcuaa

SEQ ID NO: 2263543 - RNA, 19 nt, Artificial Sequence
  Description of Artificial Sequence: Synthetic oligonucleotide
  Antisense strand to SEQ ID NO: 2263542
uuagcucucccaaaguacc

SEQ ID NO: 2263544 - RNA, 19 nt, Artificial Sequence
  Description of Artificial Sequence: Synthetic oligonucleotide
  Sense strand starting at position 313 of SEQ ID NO: 1884411
aaaugagguugugcacaga

SEQ ID NO: 2263545 - RNA, 19 nt, Artificial Sequence
  Description of Artificial Sequence: Synthetic oligonucleotide
  Antisense strand to SEQ ID NO: 2263544
ucugugcacaaccucauuu

SEQ ID NO: 2263546 - RNA, 19 nt, Artificial Sequence
  Description of Artificial Sequence: Synthetic oligonucleotide
  Sense strand starting at position 316 of SEQ ID NO: 1884411
ugagguugugcacagaacu

SEQ ID NO: 2263547 - RNA, 19 nt, Artificial Sequence
  Description of Artificial Sequence: Synthetic oligonucleotide
  Antisense strand to SEQ ID NO: 2263546
aguucugugcacaaccuca

SEQ ID NO: 2263548 - RNA, 19 nt, Artificial Sequence
  Description of Artificial Sequence: Synthetic oligonucleotide
  Sense strand starting at position 430 of SEQ ID NO: 1884411
ugcuguaugcuacuaguuu

SEQ ID NO: 2263549 - RNA, 19 nt, Artificial Sequence
  Description of Artificial Sequence: Synthetic oligonucleotide
  Antisense strand to SEQ ID NO: 2263548
aaacuaguagcauacagca

SEQ ID NO: 2263550 - RNA, 19 nt, Artificial Sequence
  Description of Artificial Sequence: Synthetic oligonucleotide
  Sense strand starting at position 571 of SEQ ID NO: 1884411
uugcuaaagcuuggacuuu

SEQ ID NO: 2263551 - RNA, 19 nt, Artificial Sequence
  Description of Artificial Sequence: Synthetic oligonucleotide
  Antisense strand to SEQ ID NO: 2263550
aaaguccaagcuuuagcaa

SEQ ID NO: 2263552 - RNA, 19 nt, Artificial Sequence
  Description of Artificial Sequence: Synthetic oligonucleotide
  Sense strand starting at position 593 of SEQ ID NO: 1884411
auuggaagucuuggguuua

SEQ ID NO: 2263553 - RNA, 19 nt, Artificial Sequence
  Description of Artificial Sequence: Synthetic oligonucleotide
  Antisense strand to SEQ ID NO: 2263552
uaaacccaagacuuccaau

SEQ ID NO: 2263554 - RNA, 19 nt, Artificial Sequence
  Description of Artificial Sequence: Synthetic oligonucleotide
  Sense strand starting at position 598 of SEQ ID NO: 1884411
aagucuuggguuuaaaucu

SEQ ID NO: 2263555 - RNA, 19 nt, Artificial Sequence
  Description of Artificial Sequence: Synthetic oligonucleotide
  Antisense strand to SEQ ID NO: 2263554
agauuuaaacccaagacuu

SEQ ID NO: 2263556 - RNA, 19 nt, Artificial Sequence
  Description of Artificial Sequence: Synthetic oligonucleotide
  Sense strand starting at position 639 of SEQ ID NO: 1884411
uguggccuugugcaaauua

SEQ ID NO: 2263557 - RNA, 19 nt, Artificial Sequence
  Description of Artificial Sequence: Synthetic oligonucleotide
  Antisense strand to SEQ ID NO: 2263556
uaauuugcacaaggccaca

SEQ ID NO: 2263558 - RNA, 19 nt, Artificial Sequence
  Description of Artificial Sequence: Synthetic oligonucleotide
  Sense strand starting at position 650 of SEQ ID NO: 1884411
gcaaauuagugucucuaca

SEQ ID NO: 2263559 - RNA, 19 nt, Artificial Sequence
  Description of Artificial Sequence: Synthetic oligonucleotide
  Antisense strand to SEQ ID NO: 2263558
uguagagacacuaauuugc

SEQ ID NO: 2263560 - RNA, 19 nt, Artificial Sequence
  Description of Artificial Sequence: Synthetic oligonucleotide
  Sense strand starting at position 670 of SEQ ID NO: 1884411
cgcugcauccuccauuaaa

SEQ ID NO: 2263561 - RNA, 19 nt, Artificial Sequence
  Description of Artificial Sequence: Synthetic oligonucleotide
  Antisense strand to SEQ ID NO: 2263560
uuuaauggaggaugcagcg

SEQ ID NO: 2263562 - RNA, 19 nt, Artificial Sequence
  Description of Artificial Sequence: Synthetic oligonucleotide
  Sense strand starting at position 714 of SEQ ID NO: 1884411
uuguaaaguccauauccca

SEQ ID NO: 2263563 - RNA, 19 nt, Artificial Sequence
  Description of Artificial Sequence: Synthetic oligonucleotide
  Antisense strand to SEQ ID NO: 2263562
ugggauauggacuuuacaa

SEQ ID NO: 2263564 - RNA, 19 nt, Artificial Sequence
  Description of Artificial Sequence: Synthetic oligonucleotide
  Sense strand starting at position 774 of SEQ ID NO: 1884411
ggcugauaccaucacaacu

SEQ ID NO: 2263565 - RNA, 19 nt, Artificial Sequence
  Description of Artificial Sequence: Synthetic oligonucleotide
  Antisense strand to SEQ ID NO: 2263564
aguugugaugguaucagcc

SEQ ID NO: 2263566 - RNA, 19 nt, Artificial Sequence
  Description of Artificial Sequence: Synthetic oligonucleotide
  Sense strand starting at position 870 of SEQ ID NO: 1884411
ggcaaacugauauggguau

SEQ ID NO: 2263567 - RNA, 19 nt, Artificial Sequence
  Description of Artificial Sequence: Synthetic oligonucleotide
  Antisense strand to SEQ ID NO: 2263566
auacccauaucaguuugcc

SEQ ID NO: 2263568 - RNA, 19 nt, Artificial Sequence
  Description of Artificial Sequence: Synthetic oligonucleotide
  Sense strand starting at position 876 of SEQ ID NO: 1884411
cugauauggguauggguuu

SEQ ID NO: 2263569 - RNA, 19 nt, Artificial Sequence
  Description of Artificial Sequence: Synthetic oligonucleotide
  Antisense strand to SEQ ID NO: 2263568
aaacccauacccauaucag

SEQ ID NO: 2263570 - RNA, 19 nt, Artificial Sequence
  Description of Artificial Sequence: Synthetic oligonucleotide
  Sense strand starting at position 932 of SEQ ID NO: 1884411
uguagaugguggcuuagaa

SEQ ID NO: 2263571 - RNA, 19 nt, Artificial Sequence
  Description of Artificial Sequence: Synthetic oligonucleotide
  Antisense strand to SEQ ID NO: 2263570
uucuaagccaccaucuaca

SEQ ID NO: 2263572 - RNA, 19 nt, Artificial Sequence
  Description of Artificial Sequence: Synthetic oligonucleotide
  Sense strand starting at position 1268 of SEQ ID NO: 1884411
gagcuauuuggauggugcu

SEQ ID NO: 2263573 - RNA, 19 nt, Artificial Sequence
  Description of Artificial Sequence: Synthetic oligonucleotide
  Antisense strand to SEQ ID NO: 2263572
agcaccauccaaauagcuc

SEQ ID NO: 2263574 - RNA, 19 nt, Artificial Sequence
  Description of Artificial Sequence: Synthetic oligonucleotide
  Sense strand starting at position 1304 of SEQ ID NO: 1884411
cuggcaaacugauauuuga

SEQ ID NO: 2263575 - RNA, 19 nt, Artificial Sequence
  Description of Artificial Sequence: Synthetic oligonucleotide
  Antisense strand to SEQ ID NO: 2263574
ucaaauaucaguuugccag

SEQ ID NO: 2263576 - RNA, 19 nt, Artificial Sequence
  Description of Artificial Sequence: Synthetic oligonucleotide
  Sense strand starting at position 1439 of SEQ ID NO: 1884411
gucacaaucaaacgugguu

SEQ ID NO: 2263577 - RNA, 19 nt, Artificial Sequence
  Description of Artificial Sequence: Synthetic oligonucleotide
  Antisense strand to SEQ ID NO: 2263576
aaccacguuugauugugac

SEQ ID NO: 2263578 - RNA, 19 nt, Artificial Sequence
  Description of Artificial Sequence: Synthetic oligonucleotide
  Sense strand starting at position 1451 of SEQ ID NO: 1884411
cgugguuucccuuugcagu

SEQ ID NO: 2263579 - RNA, 19 nt, Artificial Sequence
  Description of Artificial Sequence: Synthetic oligonucleotide
  Antisense strand to SEQ ID NO: 2263578
acugcaaagggaaaccacg

SEQ ID NO: 2263580 - RNA, 19 nt, Artificial Sequence
  Description of Artificial Sequence: Synthetic oligonucleotide
  Sense strand starting at position 1561 of SEQ ID NO: 1884411
ucagaaugguugcuacucu

SEQ ID NO: 2263581 - RNA, 19 nt, Artificial Sequence
  Description of Artificial Sequence: Synthetic oligonucleotide
  Antisense strand to SEQ ID NO: 2263580
agaguagcaaccauucuga

SEQ ID NO: 2263582 - RNA, 19 nt, Artificial Sequence
  Description of Artificial Sequence: Synthetic oligonucleotide
  Sense strand starting at position 1641 of SEQ ID NO: 1884411
ucucuauggccacaguauu

SEQ ID NO: 2263583 - RNA, 19 nt, Artificial Sequence
  Description of Artificial Sequence: Synthetic oligonucleotide
  Antisense strand to SEQ ID NO: 2263582
aauacuguggccauagaga

SEQ ID NO: 2263584 - RNA, 19 nt, Artificial Sequence
  Description of Artificial Sequence: Synthetic oligonucleotide
  Sense strand starting at position 1649 of SEQ ID NO: 1884411
gccacaguauuacuacauu

SEQ ID NO: 2263585 - RNA, 19 nt, Artificial Sequence
  Description of Artificial Sequence: Synthetic oligonucleotide
  Antisense strand to SEQ ID NO: 2263584
aauguaguaauacuguggc

SEQ ID NO: 2263586 - RNA, 19 nt, Artificial Sequence
  Description of Artificial Sequence: Synthetic oligonucleotide
  Sense strand starting at position 1684 of SEQ ID NO: 1884411
gugcccugaguuuaaauua

SEQ ID NO: 2263587 - RNA, 19 nt, Artificial Sequence
  Description of Artificial Sequence: Synthetic oligonucleotide
  Antisense strand to SEQ ID NO: 2263586
uaauuuaaacucagggcac

SEQ ID NO: 2263588 - RNA, 19 nt, Artificial Sequence
  Description of Artificial Sequence: Synthetic oligonucleotide
  Sense strand starting at position 1704 of SEQ ID NO: 1884411
guugaaugcugggcugagu

SEQ ID NO: 2263589 - RNA, 19 nt, Artificial Sequence
  Description of Artificial Sequence: Synthetic oligonucleotide
  Antisense strand to SEQ ID NO: 2263588
acucagcccagcauucaac

SEQ ID NO: 2263590 - RNA, 19 nt, Artificial Sequence
  Description of Artificial Sequence: Synthetic oligonucleotide
  Sense strand starting at position 1735 of SEQ ID NO: 1884411
agauacugcuagucuaagu

SEQ ID NO: 2263591 - RNA, 19 nt, Artificial Sequence
  Description of Artificial Sequence: Synthetic oligonucleotide
  Antisense strand to SEQ ID NO: 2263590
acuuagacuagcaguaucu

SEQ ID NO: 2263592 - RNA, 19 nt, Artificial Sequence
  Description of Artificial Sequence: Synthetic oligonucleotide
  Sense strand starting at position 2135 of SEQ ID NO: 1884411
gugggaagucugggaggua

SEQ ID NO: 2263593 - RNA, 19 nt, Artificial Sequence
  Description of Artificial Sequence: Synthetic oligonucleotide
  Antisense strand to SEQ ID NO: 2263592
uaccucccagacuucccac

SEQ ID NO: 2263594 - RNA, 19 nt, Artificial Sequence
  Description of Artificial Sequence: Synthetic oligonucleotide
  Sense strand starting at position 2138 of SEQ ID NO: 1884411
ggaagucugggagguacaa

SEQ ID NO: 2263595 - RNA, 19 nt, Artificial Sequence
  Description of Artificial Sequence: Synthetic oligonucleotide
  Antisense strand to SEQ ID NO: 2263594
uuguaccucccagacuucc

SEQ ID NO: 2263596 - RNA, 19 nt, Artificial Sequence
  Description of Artificial Sequence: Synthetic oligonucleotide
  Sense strand starting at position 2245 of SEQ ID NO: 1884411
acaccaaauugugaugauu

SEQ ID NO: 2263597 - RNA, 19 nt, Artificial Sequence
  Description of Artificial Sequence: Synthetic oligonucleotide
  Antisense strand to SEQ ID NO: 2263596
aaucaucacaauuuggugu

SEQ ID NO: 2263598 - RNA, 19 nt, Artificial Sequence
  Description of Artificial Sequence: Synthetic oligonucleotide
  Sense strand starting at position 2248 of SEQ ID NO: 1884411
ccaaauugugaugauuccu

SEQ ID NO: 2263599 - RNA, 19 nt, Artificial Sequence
  Description of Artificial Sequence: Synthetic oligonucleotide
  Antisense strand to SEQ ID NO: 2263598
aggaaucaucacaauuugg

SEQ ID NO: 2263600 - RNA, 19 nt, Artificial Sequence
  Description of Artificial Sequence: Synthetic oligonucleotide
  Sense strand starting at position 2362 of SEQ ID NO: 1884411
gccuaaauggcuuagcuca

SEQ ID NO: 2263601 - RNA, 19 nt, Artificial Sequence
  Description of Artificial Sequence: Synthetic oligonucleotide
  Antisense strand to SEQ ID NO: 2263600
ugagcuaagccauuuaggc

SEQ ID NO: 2263602 - RNA, 19 nt, Artificial Sequence
  Description of Artificial Sequence: Synthetic oligonucleotide
  Sense strand starting at position 2370 of SEQ ID NO: 1884411
ggcuuagcucaagacucau

SEQ ID NO: 2263603 - RNA, 19 nt, Artificial Sequence
  Description of Artificial Sequence: Synthetic oligonucleotide
  Antisense strand to SEQ ID NO: 2263602
augagucuugagcuaagcc

SEQ ID NO: 2263604 - RNA, 19 nt, Artificial Sequence
  Description of Artificial Sequence: Synthetic oligonucleotide
  Sense strand starting at position 2392 of SEQ ID NO: 1884411
ucagaaugcucucuauaga

SEQ ID NO: 2263605 - RNA, 19 nt, Artificial Sequence
  Description of Artificial Sequence: Synthetic oligonucleotide
  Antisense strand to SEQ ID NO: 2263604
ucuauagagagcauucuga

SEQ ID NO: 2263606 - RNA, 19 nt, Artificial Sequence
  Description of Artificial Sequence: Synthetic oligonucleotide
  Sense strand starting at position 2497 of SEQ ID NO: 1884411
cugugagcccuuugaaagc

SEQ ID NO: 2263607 - RNA, 19 nt, Artificial Sequence
  Description of Artificial Sequence: Synthetic oligonucleotide
  Antisense strand to SEQ ID NO: 2263606
gcuuucaaagggcucacag

SEQ ID NO: 2263608 - RNA, 19 nt, Artificial Sequence
  Description of Artificial Sequence: Synthetic oligonucleotide
  Sense strand starting at position 2529 of SEQ ID NO: 1884411
uacuuaugggcuuaguauc

SEQ ID NO: 2263609 - RNA, 19 nt, Artificial Sequence
  Description of Artificial Sequence: Synthetic oligonucleotide
  Antisense strand to SEQ ID NO: 2263608
gauacuaagcccauaagua

SEQ ID NO: 2263610 - RNA, 19 nt, Artificial Sequence
  Description of Artificial Sequence: Synthetic oligonucleotide
  Sense strand starting at position 2573 of SEQ ID NO: 1884411
acuuguuuggugcacauua

SEQ ID NO: 2263611 - RNA, 19 nt, Artificial Sequence
  Description of Artificial Sequence: Synthetic oligonucleotide
  Antisense strand to SEQ ID NO: 2263610
uaaugugcaccaaacaagu

SEQ ID NO: 2263612 - RNA, 19 nt, Artificial Sequence
  Description of Artificial Sequence: Synthetic oligonucleotide
  Sense strand starting at position 2575 of SEQ ID NO: 1884411
uuguuuggugcacauuaaa

SEQ ID NO: 2263613 - RNA, 19 nt, Artificial Sequence
  Description of Artificial Sequence: Synthetic oligonucleotide
  Antisense strand to SEQ ID NO: 2263612
uuuaaugugcaccaaacaa

SEQ ID NO: 2263614 - RNA, 19 nt, Artificial Sequence
  Description of Artificial Sequence: Synthetic oligonucleotide
  Sense strand starting at position 175 of SEQ ID NO: 1884412
cucuacaucugaucguuua

SEQ ID NO: 2263615 - RNA, 19 nt, Artificial Sequence
  Description of Artificial Sequence: Synthetic oligonucleotide
  Antisense strand to SEQ ID NO: 2263614
uaaacgaucagauguagag

SEQ ID NO: 2263616 - RNA, 19 nt, Artificial Sequence
  Description of Artificial Sequence: Synthetic oligonucleotide
  Sense strand starting at position 176 of SEQ ID NO: 1884412
ucuacaucugaucguuuau

SEQ ID NO: 2263617 - RNA, 19 nt, Artificial Sequence
  Description of Artificial Sequence: Synthetic oligonucleotide
  Antisense strand to SEQ ID NO: 2263616
auaaacgaucagauguaga

SEQ ID NO: 2263618 - RNA, 19 nt, Artificial Sequence
  Description of Artificial Sequence: Synthetic oligonucleotide
  Sense strand starting at position 249 of SEQ ID NO: 1884412
ucaauccuauugcugagua

SEQ ID NO: 2263619 - RNA, 19 nt, Artificial Sequence
  Description of Artificial Sequence: Synthetic oligonucleotide
  Antisense strand to SEQ ID NO: 2263618
uacucagcaauaggauuga

SEQ ID NO: 2263620 - RNA, 19 nt, Artificial Sequence
  Description of Artificial Sequence: Synthetic oligonucleotide
  Sense strand starting at position 253 of SEQ ID NO: 1884412
uccuauugcugaguacauu

SEQ ID NO: 2263621 - RNA, 19 nt, Artificial Sequence
  Description of Artificial Sequence: Synthetic oligonucleotide
  Antisense strand to SEQ ID NO: 2263620
aauguacucagcaauagga

SEQ ID NO: 2263622 - RNA, 19 nt, Artificial Sequence
  Description of Artificial Sequence: Synthetic oligonucleotide
  Sense strand starting at position 309 of SEQ ID NO: 1884412
ugccuuccaucuuugaaga

SEQ ID NO: 2263623 - RNA, 19 nt, Artificial Sequence
  Description of Artificial Sequence: Synthetic oligonucleotide
  Antisense strand to SEQ ID NO: 2263622
ucuucaaagauggaaggca

SEQ ID NO: 2263624 - RNA, 19 nt, Artificial Sequence
  Description of Artificial Sequence: Synthetic oligonucleotide
  Sense strand starting at position 536 of SEQ ID NO: 1884412
cagucaagucucguugcca

SEQ ID NO: 2263625 - RNA, 19 nt, Artificial Sequence
  Description of Artificial Sequence: Synthetic oligonucleotide
  Antisense strand to SEQ ID NO: 2263624
uggcaacgagacuugacug

SEQ ID NO: 2263626 - RNA, 19 nt, Artificial Sequence
  Description of Artificial Sequence: Synthetic oligonucleotide
  Sense strand starting at position 544 of SEQ ID NO: 1884412
ucucguugccaauauaaga

SEQ ID NO: 2263627 - RNA, 19 nt, Artificial Sequence
  Description of Artificial Sequence: Synthetic oligonucleotide
  Antisense strand to SEQ ID NO: 2263626
ucuuauauuggcaacgaga

SEQ ID NO: 2263628 - RNA, 19 nt, Artificial Sequence
  Description of Artificial Sequence: Synthetic oligonucleotide
  Sense strand starting at position 579 of SEQ ID NO: 1884412
acagaauaugagugucaca

SEQ ID NO: 2263629 - RNA, 19 nt, Artificial Sequence
  Description of Artificial Sequence: Synthetic oligonucleotide
  Antisense strand to SEQ ID NO: 2263628
ugugacacucauauucugu

SEQ ID NO: 2263630 - RNA, 19 nt, Artificial Sequence
  Description of Artificial Sequence: Synthetic oligonucleotide
  Sense strand starting at position 637 of SEQ ID NO: 1884412
ugccauaugccacagaauu

SEQ ID NO: 2263631 - RNA, 19 nt, Artificial Sequence
  Description of Artificial Sequence: Synthetic oligonucleotide
  Antisense strand to SEQ ID NO: 2263630
aauucuguggcauauggca

SEQ ID NO: 2263632 - RNA, 19 nt, Artificial Sequence
  Description of Artificial Sequence: Synthetic oligonucleotide
  Sense strand starting at position 645 of SEQ ID NO: 1884412
gccacagaauuggcugaaa

SEQ ID NO: 2263633 - RNA, 19 nt, Artificial Sequence
  Description of Artificial Sequence: Synthetic oligonucleotide
  Antisense strand to SEQ ID NO: 2263632
uuucagccaauucuguggc

SEQ ID NO: 2263634 - RNA, 19 nt, Artificial Sequence
  Description of Artificial Sequence: Synthetic oligonucleotide
  Sense strand starting at position 647 of SEQ ID NO: 1884412
cacagaauuggcugaaaug

SEQ ID NO: 2263635 - RNA, 19 nt, Artificial Sequence
  Description of Artificial Sequence: Synthetic oligonucleotide
  Antisense strand to SEQ ID NO: 2263634
cauuucagccaauucugug

SEQ ID NO: 2263636 - RNA, 19 nt, Artificial Sequence
  Description of Artificial Sequence: Synthetic oligonucleotide
  Sense strand starting at position 691 of SEQ ID NO: 1884412
guggcaaguguuggacaaa

SEQ ID NO: 2263637 - RNA, 19 nt, Artificial Sequence
  Description of Artificial Sequence: Synthetic oligonucleotide
  Antisense strand to SEQ ID NO: 2263636
uuuguccaacacuugccac

SEQ ID NO: 2263638 - RNA, 19 nt, Artificial Sequence
  Description of Artificial Sequence: Synthetic oligonucleotide
  Sense strand starting at position 795 of SEQ ID NO: 1884412
gcaggaggcugucccauaa

SEQ ID NO: 2263639 - RNA, 19 nt, Artificial Sequence
  Description of Artificial Sequence: Synthetic oligonucleotide
  Antisense strand to SEQ ID NO: 2263638
uuaugggacagccuccugc

SEQ ID NO: 2263640 - RNA, 19 nt, Artificial Sequence
  Description of Artificial Sequence: Synthetic oligonucleotide
  Sense strand starting at position 799 of SEQ ID NO: 1884412
gaggcugucccauaauuga

SEQ ID NO: 2263641 - RNA, 19 nt, Artificial Sequence
  Description of Artificial Sequence: Synthetic oligonucleotide
  Antisense strand to SEQ ID NO: 2263640
ucaauuaugggacagccuc

SEQ ID NO: 2263642 - RNA, 19 nt, Artificial Sequence
  Description of Artificial Sequence: Synthetic oligonucleotide
  Sense strand starting at position 927 of SEQ ID NO: 1884412
cuaaaugauuuacagguau

SEQ ID NO: 2263643 - RNA, 19 nt, Artificial Sequence
  Description of Artificial Sequence: Synthetic oligonucleotide
  Antisense strand to SEQ ID NO: 2263642
auaccuguaaaucauuuag

SEQ ID NO: 2263644 - RNA, 19 nt, Artificial Sequence
  Description of Artificial Sequence: Synthetic oligonucleotide
  Sense strand starting at position 941 of SEQ ID NO: 1884412
gguauuaucucacugaacu

SEQ ID NO: 2263645 - RNA, 19 nt, Artificial Sequence
  Description of Artificial Sequence: Synthetic oligonucleotide
  Antisense strand to SEQ ID NO: 2263644
aguucagugagauaauacc

SEQ ID NO: 2263646 - RNA, 19 nt, Artificial Sequence
  Description of Artificial Sequence: Synthetic oligonucleotide
  Sense strand starting at position 968 of SEQ ID NO: 1884412
aacugugugagguggauau

SEQ ID NO: 2263647 - RNA, 19 nt, Artificial Sequence
  Description of Artificial Sequence: Synthetic oligonucleotide
  Antisense strand to SEQ ID NO: 2263646
auauccaccucacacaguu

SEQ ID NO: 2263648 - RNA, 19 nt, Artificial Sequence
  Description of Artificial Sequence: Synthetic oligonucleotide
  Sense strand starting at position 972 of SEQ ID NO: 1884412
gugugagguggauaugaac

SEQ ID NO: 2263649 - RNA, 19 nt, Artificial Sequence
  Description of Artificial Sequence: Synthetic oligonucleotide
  Antisense strand to SEQ ID NO: 2263648
guucauauccaccucacac

SEQ ID NO: 2263650 - RNA, 19 nt, Artificial Sequence
  Description of Artificial Sequence: Synthetic oligonucleotide
  Sense strand starting at position 1425 of SEQ ID NO: 1884412
ggucucauuuccuuucgaa

SEQ ID NO: 2263651 - RNA, 19 nt, Artificial Sequence
  Description of Artificial Sequence: Synthetic oligonucleotide
  Antisense strand to SEQ ID NO: 2263650
uucgaaaggaaaugagacc

SEQ ID NO: 2263652 - RNA, 19 nt, Artificial Sequence
  Description of Artificial Sequence: Synthetic oligonucleotide
  Sense strand starting at position 1730 of SEQ ID NO: 1884412
gguugagcaauuugcucaa

SEQ ID NO: 2263653 - RNA, 19 nt, Artificial Sequence
  Description of Artificial Sequence: Synthetic oligonucleotide
  Antisense strand to SEQ ID NO: 2263652
uugagcaaauugcucaacc

SEQ ID NO: 2263654 - RNA, 19 nt, Artificial Sequence
  Description of Artificial Sequence: Synthetic oligonucleotide
  Sense strand starting at position 1733 of SEQ ID NO: 1884412
ugagcaauuugcucaaggu

SEQ ID NO: 2263655 - RNA, 19 nt, Artificial Sequence
  Description of Artificial Sequence: Synthetic oligonucleotide
  Antisense strand to SEQ ID NO: 2263654
accuugagcaaauugcuca

SEQ ID NO: 2263656 - RNA, 19 nt, Artificial Sequence
  Description of Artificial Sequence: Synthetic oligonucleotide
  Sense strand starting at position 1769 of SEQ ID NO: 1884412
aagccacaaucgguguaaa

SEQ ID NO: 2263657 - RNA, 19 nt, Artificial Sequence
  Description of Artificial Sequence: Synthetic oligonucleotide
  Antisense strand to SEQ ID NO: 2263656
uuuacaccgauuguggcuu

SEQ ID NO: 2263658 - RNA, 19 nt, Artificial Sequence
  Description of Artificial Sequence: Synthetic oligonucleotide
  Sense strand starting at position 2694 of SEQ ID NO: 1884412
gccagaaccucggcuacaa

SEQ ID NO: 2263659 - RNA, 19 nt, Artificial Sequence
  Description of Artificial Sequence: Synthetic oligonucleotide
  Antisense strand to SEQ ID NO: 2263658
uuguagccgagguucuggc

SEQ ID NO: 2263660 - RNA, 19 nt, Artificial Sequence
  Description of Artificial Sequence: Synthetic oligonucleotide
  Sense strand starting at position 2921 of SEQ ID NO: 1884412
ggagacagcucuccuggaa

SEQ ID NO: 2263661 - RNA, 19 nt, Artificial Sequence
  Description of Artificial Sequence: Synthetic oligonucleotide
  Antisense strand to SEQ ID NO: 2263660
uuccaggagagcugucucc

SEQ ID NO: 2263662 - RNA, 19 nt, Artificial Sequence
  Description of Artificial Sequence: Synthetic oligonucleotide
  Sense strand starting at position 2998 of SEQ ID NO: 1884412
agucaucuggccugggaaa

SEQ ID NO: 2263663 - RNA, 19 nt, Artificial Sequence
  Description of Artificial Sequence: Synthetic oligonucleotide
  Antisense strand to SEQ ID NO: 2263662
uuucccaggccagaugacu

SEQ ID NO: 2263664 - RNA, 19 nt, Artificial Sequence
  Description of Artificial Sequence: Synthetic oligonucleotide
  Sense strand starting at position 3000 of SEQ ID NO: 1884412
ucaucuggccugggaaaga

SEQ ID NO: 2263665 - RNA, 19 nt, Artificial Sequence
  Description of Artificial Sequence: Synthetic oligonucleotide
  Antisense strand to SEQ ID NO: 2263664
ucuuucccaggccagauga

SEQ ID NO: 2263666 - RNA, 19 nt, Artificial Sequence
  Description of Artificial Sequence: Synthetic oligonucleotide
  Sense strand starting at position 3099 of SEQ ID NO: 1884412
gaggguuaucucugccaag

SEQ ID NO: 2263667 - RNA, 19 nt, Artificial Sequence
  Description of Artificial Sequence: Synthetic oligonucleotide
  Antisense strand to SEQ ID NO: 2263666
cuuggcagagauaacccuc

SEQ ID NO: 2263668 - RNA, 19 nt, Artificial Sequence
  Description of Artificial Sequence: Synthetic oligonucleotide
  Sense strand starting at position 3309 of SEQ ID NO: 1884412
agaggucaugcaugaagga

SEQ ID NO: 2263669 - RNA, 19 nt, Artificial Sequence
  Description of Artificial Sequence: Synthetic oligonucleotide
  Antisense strand to SEQ ID NO: 2263668
uccuucaugcaugaccucu

SEQ ID NO: 2263670 - RNA, 19 nt, Artificial Sequence
  Description of Artificial Sequence: Synthetic oligonucleotide
  Sense strand starting at position 3342 of SEQ ID NO: 1884412
uugaguucuuucuuauccu

SEQ ID NO: 2263671 - RNA, 19 nt, Artificial Sequence
  Description of Artificial Sequence: Synthetic oligonucleotide
  Antisense strand to SEQ ID NO: 2263670
aggauaagaaagaacucaa

SEQ ID NO: 2263672 - RNA, 19 nt, Artificial Sequence
  Description of Artificial Sequence: Synthetic oligonucleotide
  Sense strand starting at position 3406 of SEQ ID NO: 1884412
caggaaggugguugguaua

SEQ ID NO: 2263673 - RNA, 19 nt, Artificial Sequence
  Description of Artificial Sequence: Synthetic oligonucleotide
  Antisense strand to SEQ ID NO: 2263672
uauaccaaccaccuuccug

SEQ ID NO: 2263674 - RNA, 19 nt, Artificial Sequence
  Description of Artificial Sequence: Synthetic oligonucleotide
  Sense strand starting at position 3457 of SEQ ID NO: 1884412
uguaaagcauaucuaauga

SEQ ID NO: 2263675 - RNA, 19 nt, Artificial Sequence
  Description of Artificial Sequence: Synthetic oligonucleotide
  Antisense strand to SEQ ID NO: 2263674
ucauuagauaugcuuuaca

SEQ ID NO: 2263676 - RNA, 19 nt, Artificial Sequence
  Description of Artificial Sequence: Synthetic oligonucleotide
  Sense strand starting at position 3484 of SEQ ID NO: 1884412
auguuuauuccacaguaau

SEQ ID NO: 2263677 - RNA, 19 nt, Artificial Sequence
  Description of Artificial Sequence: Synthetic oligonucleotide
  Antisense strand to SEQ ID NO: 2263676
auuacuguggaauaaacau

SEQ ID NO: 2263678 - RNA, 19 nt, Artificial Sequence
  Description of Artificial Sequence: Synthetic oligonucleotide
  Sense strand starting at position 3509 of SEQ ID NO: 1884412
uugcauauacagggugauu

SEQ ID NO: 2263679 - RNA, 19 nt, Artificial Sequence
  Description of Artificial Sequence: Synthetic oligonucleotide
  Antisense strand to SEQ ID NO: 2263678
aaucacccuguauaugcaa

SEQ ID NO: 2263680 - RNA, 19 nt, Artificial Sequence
  Description of Artificial Sequence: Synthetic oligonucleotide
  Sense strand starting at position 3511 of SEQ ID NO: 1884412
gcauauacagggugauuau

SEQ ID NO: 2263681 - RNA, 19 nt, Artificial Sequence
  Description of Artificial Sequence: Synthetic oligonucleotide
  Antisense strand to SEQ ID NO: 2263680
auaaucacccuguauaugc

SEQ ID NO: 2263682 - RNA, 19 nt, Artificial Sequence
  Description of Artificial Sequence: Synthetic oligonucleotide
  Sense strand starting at position 3514 of SEQ ID NO: 1884412
uauacagggugauuauaau

SEQ ID NO: 2263683 - RNA, 19 nt, Artificial Sequence
  Description of Artificial Sequence: Synthetic oligonucleotide
  Antisense strand to SEQ ID NO: 2263682
auuauaaucacccuguaua

SEQ ID NO: 2263684 - RNA, 19 nt, Artificial Sequence
  Description of Artificial Sequence: Synthetic oligonucleotide
  Sense strand starting at position 3520 of SEQ ID NO: 1884412
gggugauuauaauccugca

SEQ ID NO: 2263685 - RNA, 19 nt, Artificial Sequence
  Description of Artificial Sequence: Synthetic oligonucleotide
  Antisense strand to SEQ ID NO: 2263684
ugcaggauuauaaucaccc

SEQ ID NO: 2263686 - RNA, 19 nt, Artificial Sequence
  Description of Artificial Sequence: Synthetic oligonucleotide
  Sense strand starting at position 3587 of SEQ ID NO: 1884412
aaguguuaacauugguuau

SEQ ID NO: 2263687 - RNA, 19 nt, Artificial Sequence
  Description of Artificial Sequence: Synthetic oligonucleotide
  Antisense strand to SEQ ID NO: 2263686
auaaccaauguuaacacuu

SEQ ID NO: 2263688 - RNA, 19 nt, Artificial Sequence
  Description of Artificial Sequence: Synthetic oligonucleotide
  Sense strand starting at position 3588 of SEQ ID NO: 1884412
aguguuaacauugguuaug

SEQ ID NO: 2263689 - RNA, 19 nt, Artificial Sequence
  Description of Artificial Sequence: Synthetic oligonucleotide
  Antisense strand to SEQ ID NO: 2263688
cauaaccaauguuaacacu

SEQ ID NO: 2263690 - RNA, 19 nt, Artificial Sequence
  Description of Artificial Sequence: Synthetic oligonucleotide
  Sense strand starting at position 3590 of SEQ ID NO: 1884412
uguuaacauugguuauguu

SEQ ID NO: 2263691 - RNA, 19 nt, Artificial Sequence
  Description of Artificial Sequence: Synthetic oligonucleotide
  Antisense strand to SEQ ID NO: 2263690
aacauaaccaauguuaaca

SEQ ID NO: 2263692 - RNA, 19 nt, Artificial Sequence
  Description of Artificial Sequence: Synthetic oligonucleotide
  Sense strand starting at position 3591 of SEQ ID NO: 1884412
guuaacauugguuauguuu

SEQ ID NO: 2263693 - RNA, 19 nt, Artificial Sequence
  Description of Artificial Sequence: Synthetic oligonucleotide
  Antisense strand to SEQ ID NO: 2263692
aaacauaaccaauguuaac

SEQ ID NO: 2263694 - RNA, 19 nt, Artificial Sequence
  Description of Artificial Sequence: Synthetic oligonucleotide
  Sense strand starting at position 165 of SEQ ID NO: 1884413
gcaugcuugcaguccuuga

SEQ ID NO: 2263695 - RNA, 19 nt, Artificial Sequence
  Description of Artificial Sequence: Synthetic oligonucleotide
  Antisense strand to SEQ ID NO: 2263694
ucaaggacugcaagcaugc

SEQ ID NO: 2263696 - RNA, 19 nt, Artificial Sequence
  Description of Artificial Sequence: Synthetic oligonucleotide
  Sense strand starting at position 170 of SEQ ID NO: 1884413
cuugcaguccuugaaacau

SEQ ID NO: 2263697 - RNA, 19 nt, Artificial Sequence
  Description of Artificial Sequence: Synthetic oligonucleotide
  Antisense strand to SEQ ID NO: 2263696
auguuucaaggacugcaag

SEQ ID NO: 2263698 - RNA, 19 nt, Artificial Sequence
  Description of Artificial Sequence: Synthetic oligonucleotide
  Sense strand starting at position 213 of SEQ ID NO: 1884413
auuugugcccaaggaguuu

SEQ ID NO: 2263699 - RNA, 19 nt, Artificial Sequence
  Description of Artificial Sequence: Synthetic oligonucleotide
  Antisense strand to SEQ ID NO: 2263698
aaacuccuugggcacaaau

SEQ ID NO: 2263700 - RNA, 19 nt, Artificial Sequence
  Description of Artificial Sequence: Synthetic oligonucleotide
  Sense strand starting at position 350 of SEQ ID NO: 1884413
guguuauuagaugagguuu

SEQ ID NO: 2263701 - RNA, 19 nt, Artificial Sequence
  Description of Artificial Sequence: Synthetic oligonucleotide
  Antisense strand to SEQ ID NO: 2263700
aaaccucaucuaauaacac

SEQ ID NO: 2263702 - RNA, 19 nt, Artificial Sequence
  Description of Artificial Sequence: Synthetic oligonucleotide
  Sense strand starting at position 445 of SEQ ID NO: 1884413
aguguuaaacuuggaaggu

SEQ ID NO: 2263703 - RNA, 19 nt, Artificial Sequence
  Description of Artificial Sequence: Synthetic oligonucleotide
  Antisense strand to SEQ ID NO: 2263702
accuuccaaguuuaacacu

SEQ ID NO: 2263704 - RNA, 19 nt, Artificial Sequence
  Description of Artificial Sequence: Synthetic oligonucleotide
  Sense strand starting at position 478 of SEQ ID NO: 1884413
ucagccuuacuguaggaua

SEQ ID NO: 2263705 - RNA, 19 nt, Artificial Sequence
  Description of Artificial Sequence: Synthetic oligonucleotide
  Antisense strand to SEQ ID NO: 2263704
uauccuacaguaaggcuga

SEQ ID NO: 2263706 - RNA, 19 nt, Artificial Sequence
  Description of Artificial Sequence: Synthetic oligonucleotide
  Sense strand starting at position 489 of SEQ ID NO: 1884413
guaggauauuacuugagug

SEQ ID NO: 2263707 - RNA, 19 nt, Artificial Sequence
  Description of Artificial Sequence: Synthetic oligonucleotide
  Antisense strand to SEQ ID NO: 2263706
cacucaaguaauauccuac

SEQ ID NO: 2263708 - RNA, 19 nt, Artificial Sequence
  Description of Artificial Sequence: Synthetic oligonucleotide
  Sense strand starting at position 493 of SEQ ID NO: 1884413
gauauuacuugagugagug

SEQ ID NO: 2263709 - RNA, 19 nt, Artificial Sequence
  Description of Artificial Sequence: Synthetic oligonucleotide
  Antisense strand to SEQ ID NO: 2263708
cacucacucaaguaauauc

SEQ ID NO: 2263710 - RNA, 19 nt, Artificial Sequence
  Description of Artificial Sequence: Synthetic oligonucleotide
  Sense strand starting at position 818 of SEQ ID NO: 1884413
ggcucuggagucugaaaga

SEQ ID NO: 2263711 - RNA, 19 nt, Artificial Sequence
  Description of Artificial Sequence: Synthetic oligonucleotide
  Antisense strand to SEQ ID NO: 2263710
ucuuucagacuccagagcc

SEQ ID NO: 2263712 - RNA, 19 nt, Artificial Sequence
  Description of Artificial Sequence: Synthetic oligonucleotide
  Sense strand starting at position 839 of SEQ ID NO: 1884413
gagaucucagcuuaggagu

SEQ ID NO: 2263713 - RNA, 19 nt, Artificial Sequence
  Description of Artificial Sequence: Synthetic oligonucleotide
  Antisense strand to SEQ ID NO: 2263712
acuccuaagcugagaucuc

SEQ ID NO: 2263714 - RNA, 19 nt, Artificial Sequence
  Description of Artificial Sequence: Synthetic oligonucleotide
  Sense strand starting at position 920 of SEQ ID NO: 1884413
guaucugggcugggaagau

SEQ ID NO: 2263715 - RNA, 19 nt, Artificial Sequence
  Description of Artificial Sequence: Synthetic oligonucleotide
  Antisense strand to SEQ ID NO: 2263714
aucuucccagcccagauac

SEQ ID NO: 2263716 - RNA, 19 nt, Artificial Sequence
  Description of Artificial Sequence: Synthetic oligonucleotide
  Sense strand starting at position 1022 of SEQ ID NO: 1884413
ucaugauagcuggacuucu

SEQ ID NO: 2263717 - RNA, 19 nt, Artificial Sequence
  Description of Artificial Sequence: Synthetic oligonucleotide
  Antisense strand to SEQ ID NO: 2263716
agaaguccagcuaucauga

SEQ ID NO: 2263718 - RNA, 19 nt, Artificial Sequence
  Description of Artificial Sequence: Synthetic oligonucleotide
  Sense strand starting at position 1061 of SEQ ID NO: 1884413
uagagugaauguuccaaga

SEQ ID NO: 2263719 - RNA, 19 nt, Artificial Sequence
  Description of Artificial Sequence: Synthetic oligonucleotide
  Antisense strand to SEQ ID NO: 2263718
ucuuggaacauucacucua

SEQ ID NO: 2263720 - RNA, 19 nt, Artificial Sequence
  Description of Artificial Sequence: Synthetic oligonucleotide
  Sense strand starting at position 1199 of SEQ ID NO: 1884413
cuaguagaacaguaucgaa

SEQ ID NO: 2263721 - RNA, 19 nt, Artificial Sequence
  Description of Artificial Sequence: Synthetic oligonucleotide
  Antisense strand to SEQ ID NO: 2263720
uucgauacuguucuacuag

SEQ ID NO: 2263722 - RNA, 19 nt, Artificial Sequence
  Description of Artificial Sequence: Synthetic oligonucleotide
  Sense strand starting at position 1221 of SEQ ID NO: 1884413
ccugaagacuugcuuuaag

SEQ ID NO: 2263723 - RNA, 19 nt, Artificial Sequence
  Description of Artificial Sequence: Synthetic oligonucleotide
  Antisense strand to SEQ ID NO: 2263722
cuuaaagcaagucuucagg

SEQ ID NO: 2263724 - RNA, 19 nt, Artificial Sequence
  Description of Artificial Sequence: Synthetic oligonucleotide
  Sense strand starting at position 1502 of SEQ ID NO: 1884413
gauaaauggcaagggcuau

SEQ ID NO: 2263725 - RNA, 19 nt, Artificial Sequence
  Description of Artificial Sequence: Synthetic oligonucleotide
  Antisense strand to SEQ ID NO: 2263724
auagcccuugccauuuauc

SEQ ID NO: 2263726 - RNA, 19 nt, Artificial Sequence
  Description of Artificial Sequence: Synthetic oligonucleotide
  Sense strand starting at position 1526 of SEQ ID NO: 1884413
agggucaucucacugagau

SEQ ID NO: 2263727 - RNA, 19 nt, Artificial Sequence
  Description of Artificial Sequence: Synthetic oligonucleotide
  Antisense strand to SEQ ID NO: 2263726
aucucagugagaugacccu

SEQ ID NO: 2263728 - RNA, 19 nt, Artificial Sequence
  Description of Artificial Sequence: Synthetic oligonucleotide
  Sense strand starting at position 1527 of SEQ ID NO: 1884413
gggucaucucacugagauu

SEQ ID NO: 2263729 - RNA, 19 nt, Artificial Sequence
  Description of Artificial Sequence: Synthetic oligonucleotide
  Antisense strand to SEQ ID NO: 2263728
aaucucagugagaugaccc

SEQ ID NO: 2263730 - RNA, 19 nt, Artificial Sequence
  Description of Artificial Sequence: Synthetic oligonucleotide
  Sense strand starting at position 1533 of SEQ ID NO: 1884413
ucucacugagauuguuacu

SEQ ID NO: 2263731 - RNA, 19 nt, Artificial Sequence
  Description of Artificial Sequence: Synthetic oligonucleotide
  Antisense strand to SEQ ID NO: 2263730
aguaacaaucucagugaga

SEQ ID NO: 2263732 - RNA, 19 nt, Artificial Sequence
  Description of Artificial Sequence: Synthetic oligonucleotide
  Sense strand starting at position 1677 of SEQ ID NO: 1884413
gaguccuuaguauaauugu

SEQ ID NO: 2263733 - RNA, 19 nt, Artificial Sequence
  Description of Artificial Sequence: Synthetic oligonucleotide
  Antisense strand to SEQ ID NO: 2263732
acaauuauacuaaggacuc

SEQ ID NO: 2263734 - RNA, 19 nt, Artificial Sequence
  Description of Artificial Sequence: Synthetic oligonucleotide
  Sense strand starting at position 1686 of SEQ ID NO: 1884413
guauaauugugauccauug

SEQ ID NO: 2263735 - RNA, 19 nt, Artificial Sequence
  Description of Artificial Sequence: Synthetic oligonucleotide
  Antisense strand to SEQ ID NO: 2263734
caauggaucacaauuauac

SEQ ID NO: 2263736 - RNA, 19 nt, Artificial Sequence
  Description of Artificial Sequence: Synthetic oligonucleotide
  Sense strand starting at position 1768 of SEQ ID NO: 1884413
uggguaugucaaggauacu

SEQ ID NO: 2263737 - RNA, 19 nt, Artificial Sequence
  Description of Artificial Sequence: Synthetic oligonucleotide
  Antisense strand to SEQ ID NO: 2263736
aguauccuugacauaccca

SEQ ID NO: 2263738 - RNA, 19 nt, Artificial Sequence
  Description of Artificial Sequence: Synthetic oligonucleotide
  Sense strand starting at position 1769 of SEQ ID NO: 1884413
ggguaugucaaggauacuu

SEQ ID NO: 2263739 - RNA, 19 nt, Artificial Sequence
  Description of Artificial Sequence: Synthetic oligonucleotide
  Antisense strand to SEQ ID NO: 2263738
aaguauccuugacauaccc

SEQ ID NO: 2263740 - RNA, 19 nt, Artificial Sequence
  Description of Artificial Sequence: Synthetic oligonucleotide
  Sense strand starting at position 1774 of SEQ ID NO: 1884413
ugucaaggauacuuacaca

SEQ ID NO: 2263741 - RNA, 19 nt, Artificial Sequence
  Description of Artificial Sequence: Synthetic oligonucleotide
  Antisense strand to SEQ ID NO: 2263740
uguguaaguauccuugaca

SEQ ID NO: 2263742 - RNA, 19 nt, Artificial Sequence
  Description of Artificial Sequence: Synthetic oligonucleotide
  Sense strand starting at position 1818 of SEQ ID NO: 1884413
aucacagauuggcuugaau

SEQ ID NO: 2263743 - RNA, 19 nt, Artificial Sequence
  Description of Artificial Sequence: Synthetic oligonucleotide
  Antisense strand to SEQ ID NO: 2263742
auucaagccaaucugugau

SEQ ID NO: 2263744 - RNA, 19 nt, Artificial Sequence
  Description of Artificial Sequence: Synthetic oligonucleotide
  Sense strand starting at position 1898 of SEQ ID NO: 1884413
gccagauaagcugagaucu

SEQ ID NO: 2263745 - RNA, 19 nt, Artificial Sequence
  Description of Artificial Sequence: Synthetic oligonucleotide
  Antisense strand to SEQ ID NO: 2263744
agaucucagcuuaucuggc

SEQ ID NO: 2263746 - RNA, 19 nt, Artificial Sequence
  Description of Artificial Sequence: Synthetic oligonucleotide
  Sense strand starting at position 2179 of SEQ ID NO: 1884413
uugugagugagcuaaauug

SEQ ID NO: 2263747 - RNA, 19 nt, Artificial Sequence
  Description of Artificial Sequence: Synthetic oligonucleotide
  Antisense strand to SEQ ID NO: 2263746
caauuuagcucacucacaa

SEQ ID NO: 2263748 - RNA, 19 nt, Artificial Sequence
  Description of Artificial Sequence: Synthetic oligonucleotide
  Sense strand starting at position 2303 of SEQ ID NO: 1884413
agugguaugcaucagguaa

SEQ ID NO: 2263749 - RNA, 19 nt, Artificial Sequence
  Description of Artificial Sequence: Synthetic oligonucleotide
  Antisense strand to SEQ ID NO: 2263748
uuaccugaugcauaccacu

SEQ ID NO: 2263750 - RNA, 19 nt, Artificial Sequence
  Description of Artificial Sequence: Synthetic oligonucleotide
  Sense strand starting at position 2415 of SEQ ID NO: 1884413
cuugcaaugguagaagauu

SEQ ID NO: 2263751 - RNA, 19 nt, Artificial Sequence
  Description of Artificial Sequence: Synthetic oligonucleotide
  Antisense strand to SEQ ID NO: 2263750
aaucuucuaccauugcaag

SEQ ID NO: 2263752 - RNA, 19 nt, Artificial Sequence
  Description of Artificial Sequence: Synthetic oligonucleotide
  Sense strand starting at position 2502 of SEQ ID NO: 1884413
cagacaaagggcuauuguu

SEQ ID NO: 2263753 - RNA, 19 nt, Artificial Sequence
  Description of Artificial Sequence: Synthetic oligonucleotide
  Antisense strand to SEQ ID NO: 2263752
aacaauagcccuuugucug

SEQ ID NO: 2263754 - RNA, 19 nt, Artificial Sequence
  Description of Artificial Sequence: Synthetic oligonucleotide
  Sense strand starting at position 2508 of SEQ ID NO: 1884413
aagggcuauuguucugaaa

SEQ ID NO: 2263755 - RNA, 19 nt, Artificial Sequence
  Description of Artificial Sequence: Synthetic oligonucleotide
  Antisense strand to SEQ ID NO: 2263754
uuucagaacaauagcccuu

SEQ ID NO: 2263756 - RNA, 19 nt, Artificial Sequence
  Description of Artificial Sequence: Synthetic oligonucleotide
  Sense strand starting at position 2603 of SEQ ID NO: 1884413
aguagcaauggugauuaca

SEQ ID NO: 2263757 - RNA, 19 nt, Artificial Sequence
  Description of Artificial Sequence: Synthetic oligonucleotide
  Antisense strand to SEQ ID NO: 2263756
uguaaucaccauugcuacu

SEQ ID NO: 2263758 - RNA, 19 nt, Artificial Sequence
  Description of Artificial Sequence: Synthetic oligonucleotide
  Sense strand starting at position 2605 of SEQ ID NO: 1884413
uagcaauggugauuacauc

SEQ ID NO: 2263759 - RNA, 19 nt, Artificial Sequence
  Description of Artificial Sequence: Synthetic oligonucleotide
  Antisense strand to SEQ ID NO: 2263758
gauguaaucaccauugcua

SEQ ID NO: 2263760 - RNA, 19 nt, Artificial Sequence
  Description of Artificial Sequence: Synthetic oligonucleotide
  Sense strand starting at position 2613 of SEQ ID NO: 1884413
gugauuacaucuuccugaa

SEQ ID NO: 2263761 - RNA, 19 nt, Artificial Sequence
  Description of Artificial Sequence: Synthetic oligonucleotide
  Antisense strand to SEQ ID NO: 2263760
uucaggaagauguaaucac

SEQ ID NO: 2263762 - RNA, 19 nt, Artificial Sequence
  Description of Artificial Sequence: Synthetic oligonucleotide
  Sense strand starting at position 3039 of SEQ ID NO: 1884413
gccauaugauggucuggag

SEQ ID NO: 2263763 - RNA, 19 nt, Artificial Sequence
  Description of Artificial Sequence: Synthetic oligonucleotide
  Antisense strand to SEQ ID NO: 2263762
cuccagaccaucauauggc

SEQ ID NO: 2263764 - RNA, 19 nt, Artificial Sequence
  Description of Artificial Sequence: Synthetic oligonucleotide
  Sense strand starting at position 3579 of SEQ ID NO: 1884413
auggguuaaugggugcaga

SEQ ID NO: 2263765 - RNA, 19 nt, Artificial Sequence
  Description of Artificial Sequence: Synthetic oligonucleotide
  Antisense strand to SEQ ID NO: 2263764
ucugcacccauuaacccau

SEQ ID NO: 2263766 - RNA, 19 nt, Artificial Sequence
  Description of Artificial Sequence: Synthetic oligonucleotide
  Sense strand starting at position 3580 of SEQ ID NO: 1884413
uggguuaaugggugcagaa

SEQ ID NO: 2263767 - RNA, 19 nt, Artificial Sequence
  Description of Artificial Sequence: Synthetic oligonucleotide
  Antisense strand to SEQ ID NO: 2263766
uucugcacccauuaaccca

SEQ ID NO: 2263768 - RNA, 19 nt, Artificial Sequence
  Description of Artificial Sequence: Synthetic oligonucleotide
  Sense strand starting at position 3757 of SEQ ID NO: 1884413
aaaugauuacuugguagug

SEQ ID NO: 2263769 - RNA, 19 nt, Artificial Sequence
  Description of Artificial Sequence: Synthetic oligonucleotide
  Antisense strand to SEQ ID NO: 2263768
cacuaccaaguaaucauuu

SEQ ID NO: 2263770 - RNA, 19 nt, Artificial Sequence
  Description of Artificial Sequence: Synthetic oligonucleotide
  Sense strand starting at position 3911 of SEQ ID NO: 1884413
cauuuauccuguguguauu

SEQ ID NO: 2263771 - RNA, 19 nt, Artificial Sequence
  Description of Artificial Sequence: Synthetic oligonucleotide
  Antisense strand to SEQ ID NO: 2263770
aauacacacaggauaaaug

SEQ ID NO: 2263772 - RNA, 19 nt, Artificial Sequence
  Description of Artificial Sequence: Synthetic oligonucleotide
  Sense strand starting at position 3912 of SEQ ID NO: 1884413
auuuauccuguguguauua

SEQ ID NO: 2263773 - RNA, 19 nt, Artificial Sequence
  Description of Artificial Sequence: Synthetic oligonucleotide
  Antisense strand to SEQ ID NO: 2263772
uaauacacacaggauaaau

SEQ ID NO: 2263774 - RNA, 19 nt, Artificial Sequence
  Description of Artificial Sequence: Synthetic oligonucleotide
  Sense strand starting at position 180 of SEQ ID NO: 1884414
gacagacauuguuccuagu

SEQ ID NO: 2263775 - RNA, 19 nt, Artificial Sequence
  Description of Artificial Sequence: Synthetic oligonucleotide
  Antisense strand to SEQ ID NO: 2263774
acuaggaacaaugucuguc

SEQ ID NO: 2263776 - RNA, 19 nt, Artificial Sequence
  Description of Artificial Sequence: Synthetic oligonucleotide
  Sense strand starting at position 182 of SEQ ID NO: 1884414
cagacauuguuccuaguga

SEQ ID NO: 2263777 - RNA, 19 nt, Artificial Sequence
  Description of Artificial Sequence: Synthetic oligonucleotide
  Antisense strand to SEQ ID NO: 2263776
ucacuaggaacaaugucug

SEQ ID NO: 2263778 - RNA, 19 nt, Artificial Sequence
  Description of Artificial Sequence: Synthetic oligonucleotide
  Sense strand starting at position 290 of SEQ ID NO: 1884414
uguauucuugugcauggaa

SEQ ID NO: 2263779 - RNA, 19 nt, Artificial Sequence
  Description of Artificial Sequence: Synthetic oligonucleotide
  Antisense strand to SEQ ID NO: 2263778
uuccaugcacaagaauaca

SEQ ID NO: 2263780 - RNA, 19 nt, Artificial Sequence
  Description of Artificial Sequence: Synthetic oligonucleotide
  Sense strand starting at position 321 of SEQ ID NO: 1884414
gguuuccucacaugaguag

SEQ ID NO: 2263781 - RNA, 19 nt, Artificial Sequence
  Description of Artificial Sequence: Synthetic oligonucleotide
  Antisense strand to SEQ ID NO: 2263780
cuacucaugugaggaaacc

SEQ ID NO: 2263782 - RNA, 19 nt, Artificial Sequence
  Description of Artificial Sequence: Synthetic oligonucleotide
  Sense strand starting at position 346 of SEQ ID NO: 1884414
aagccuuaucugggagcca

SEQ ID NO: 2263783 - RNA, 19 nt, Artificial Sequence
  Description of Artificial Sequence: Synthetic oligonucleotide
  Antisense strand to SEQ ID NO: 2263782
uggcucccagauaaggcuu

SEQ ID NO: 2263784 - RNA, 19 nt, Artificial Sequence
  Description of Artificial Sequence: Synthetic oligonucleotide
  Sense strand starting at position 386 of SEQ ID NO: 1884414
gaaauaaaguguccucuug

SEQ ID NO: 2263785 - RNA, 19 nt, Artificial Sequence
  Description of Artificial Sequence: Synthetic oligonucleotide
  Antisense strand to SEQ ID NO: 2263784
caagaggacacuuuauuuc

SEQ ID NO: 2263786 - RNA, 19 nt, Artificial Sequence
  Description of Artificial Sequence: Synthetic oligonucleotide
  Sense strand starting at position 608 of SEQ ID NO: 1884414
aggaguagucuuuagucaa

SEQ ID NO: 2263787 - RNA, 19 nt, Artificial Sequence
  Description of Artificial Sequence: Synthetic oligonucleotide
  Antisense strand to SEQ ID NO: 2263786
uugacuaaagacuacuccu

SEQ ID NO: 2263788 - RNA, 19 nt, Artificial Sequence
  Description of Artificial Sequence: Synthetic oligonucleotide
  Sense strand starting at position 611 of SEQ ID NO: 1884414
aguagucuuuagucaaaca

SEQ ID NO: 2263789 - RNA, 19 nt, Artificial Sequence
  Description of Artificial Sequence: Synthetic oligonucleotide
  Antisense strand to SEQ ID NO: 2263788
uguuugacuaaagacuacu

SEQ ID NO: 2263790 - RNA, 19 nt, Artificial Sequence
  Description of Artificial Sequence: Synthetic oligonucleotide
  Sense strand starting at position 612 of SEQ ID NO: 1884414
guagucuuuagucaaacag

SEQ ID NO: 2263791 - RNA, 19 nt, Artificial Sequence
  Description of Artificial Sequence: Synthetic oligonucleotide
  Antisense strand to SEQ ID NO: 2263790
cuguuugacuaaagacuac

SEQ ID NO: 2263792 - RNA, 19 nt, Artificial Sequence
  Description of Artificial Sequence: Synthetic oligonucleotide
  Sense strand starting at position 679 of SEQ ID NO: 1884414
ugcacaauauuguuaaagu

SEQ ID NO: 2263793 - RNA, 19 nt, Artificial Sequence
  Description of Artificial Sequence: Synthetic oligonucleotide
  Antisense strand to SEQ ID NO: 2263792
acuuuaacaauauugugca

SEQ ID NO: 2263794 - RNA, 19 nt, Artificial Sequence
  Description of Artificial Sequence: Synthetic oligonucleotide
  Sense strand starting at position 1171 of SEQ ID NO: 1884414
ugagcaaauugagcuaauu

SEQ ID NO: 2263795 - RNA, 19 nt, Artificial Sequence
  Description of Artificial Sequence: Synthetic oligonucleotide
  Antisense strand to SEQ ID NO: 2263794
aauuagcucaauuugcuca

SEQ ID NO: 2263796 - RNA, 19 nt, Artificial Sequence
  Description of Artificial Sequence: Synthetic oligonucleotide
  Sense strand starting at position 1182 of SEQ ID NO: 1884414
agcuaauugccuuaggcaa

SEQ ID NO: 2263797 - RNA, 19 nt, Artificial Sequence
  Description of Artificial Sequence: Synthetic oligonucleotide
  Antisense strand to SEQ ID NO: 2263796
uugccuaaggcaauuagcu

SEQ ID NO: 2263798 - RNA, 19 nt, Artificial Sequence
  Description of Artificial Sequence: Synthetic oligonucleotide
  Sense strand starting at position 1246 of SEQ ID NO: 1884414
guucuagcuccugaaucca

SEQ ID NO: 2263799 - RNA, 19 nt, Artificial Sequence
  Description of Artificial Sequence: Synthetic oligonucleotide
  Antisense strand to SEQ ID NO: 2263798
uggauucaggagcuagaac

SEQ ID NO: 2263800 - RNA, 19 nt, Artificial Sequence
  Description of Artificial Sequence: Synthetic oligonucleotide
  Sense strand starting at position 1350 of SEQ ID NO: 1884414
ugaggccugccucaaauau

SEQ ID NO: 2263801 - RNA, 19 nt, Artificial Sequence
  Description of Artificial Sequence: Synthetic oligonucleotide
  Antisense strand to SEQ ID NO: 2263800
auauuugaggcaggccuca

SEQ ID NO: 2263802 - RNA, 19 nt, Artificial Sequence
  Description of Artificial Sequence: Synthetic oligonucleotide
  Sense strand starting at position 1389 of SEQ ID NO: 1884414
ccugguguucuccaggaga

SEQ ID NO: 2263803 - RNA, 19 nt, Artificial Sequence
  Description of Artificial Sequence: Synthetic oligonucleotide
  Antisense strand to SEQ ID NO: 2263802
ucuccuggagaacaccagg

SEQ ID NO: 2263804 - RNA, 19 nt, Artificial Sequence
  Description of Artificial Sequence: Synthetic oligonucleotide
  Sense strand starting at position 1391 of SEQ ID NO: 1884414
ugguguucuccaggagaga

SEQ ID NO: 2263805 - RNA, 19 nt, Artificial Sequence
  Description of Artificial Sequence: Synthetic oligonucleotide
  Antisense strand to SEQ ID NO: 2263804
ucucuccuggagaacacca

SEQ ID NO: 2263806 - RNA, 19 nt, Artificial Sequence
  Description of Artificial Sequence: Synthetic oligonucleotide
  Sense strand starting at position 1517 of SEQ ID NO: 1884414
gggugagggcucugaagau

SEQ ID NO: 2263807 - RNA, 19 nt, Artificial Sequence
  Description of Artificial Sequence: Synthetic oligonucleotide
  Antisense strand to SEQ ID NO: 2263806
aucuucagagcccucaccc

SEQ ID NO: 2263808 - RNA, 19 nt, Artificial Sequence
  Description of Artificial Sequence: Synthetic oligonucleotide
  Sense strand starting at position 1572 of SEQ ID NO: 1884414
cucauuacaugucugauga

SEQ ID NO: 2263809 - RNA, 19 nt, Artificial Sequence
  Description of Artificial Sequence: Synthetic oligonucleotide
  Antisense strand to SEQ ID NO: 2263808
ucaucagacauguaaugag

SEQ ID NO: 2263810 - RNA, 19 nt, Artificial Sequence
  Description of Artificial Sequence: Synthetic oligonucleotide
  Sense strand starting at position 1573 of SEQ ID NO: 1884414
ucauuacaugucugaugaa

SEQ ID NO: 2263811 - RNA, 19 nt, Artificial Sequence
  Description of Artificial Sequence: Synthetic oligonucleotide
  Antisense strand to SEQ ID NO: 2263810
uucaucagacauguaauga

SEQ ID NO: 2263812 - RNA, 19 nt, Artificial Sequence
  Description of Artificial Sequence: Synthetic oligonucleotide
  Sense strand starting at position 1613 of SEQ ID NO: 1884414
gggugcauuucucucaacu

SEQ ID NO: 2263813 - RNA, 19 nt, Artificial Sequence
  Description of Artificial Sequence: Synthetic oligonucleotide
  Antisense strand to SEQ ID NO: 2263812
aguugagagaaaugcaccc

SEQ ID NO: 2263814 - RNA, 19 nt, Artificial Sequence
  Description of Artificial Sequence: Synthetic oligonucleotide
  Sense strand starting at position 1749 of SEQ ID NO: 1884414
gcaagaaguccaugcagau

SEQ ID NO: 2263815 - RNA, 19 nt, Artificial Sequence
  Description of Artificial Sequence: Synthetic oligonucleotide
  Antisense strand to SEQ ID NO: 2263814
aucugcauggacuucuugc

SEQ ID NO: 2263816 - RNA, 19 nt, Artificial Sequence
  Description of Artificial Sequence: Synthetic oligonucleotide
  Sense strand starting at position 1791 of SEQ ID NO: 1884414
aaauaaauacugcguuuga

SEQ ID NO: 2263817 - RNA, 19 nt, Artificial Sequence
  Description of Artificial Sequence: Synthetic oligonucleotide
  Antisense strand to SEQ ID NO: 2263816
ucaaacgcaguauuuauuu

SEQ ID NO: 2263818 - RNA, 19 nt, Artificial Sequence
  Description of Artificial Sequence: Synthetic oligonucleotide
  Sense strand starting at position 1798 of SEQ ID NO: 1884414
uacugcguuugauuuccaa

SEQ ID NO: 2263819 - RNA, 19 nt, Artificial Sequence
  Description of Artificial Sequence: Synthetic oligonucleotide
  Antisense strand to SEQ ID NO: 2263818
uuggaaaucaaacgcagua

SEQ ID NO: 2263820 - RNA, 19 nt, Artificial Sequence
  Description of Artificial Sequence: Synthetic oligonucleotide
  Sense strand starting at position 1801 of SEQ ID NO: 1884414
ugcguuugauuuccaaaca

SEQ ID NO: 2263821 - RNA, 19 nt, Artificial Sequence
  Description of Artificial Sequence: Synthetic oligonucleotide
  Antisense strand to SEQ ID NO: 2263820
uguuuggaaaucaaacgca

SEQ ID NO: 2263822 - RNA, 19 nt, Artificial Sequence
  Description of Artificial Sequence: Synthetic oligonucleotide
  Sense strand starting at position 2046 of SEQ ID NO: 1884414
gguggauauguugaucuug

SEQ ID NO: 2263823 - RNA, 19 nt, Artificial Sequence
  Description of Artificial Sequence: Synthetic oligonucleotide
  Antisense strand to SEQ ID NO: 2263822
caagaucaacauauccacc

SEQ ID NO: 2263824 - RNA, 19 nt, Artificial Sequence
  Description of Artificial Sequence: Synthetic oligonucleotide
  Sense strand starting at position 2048 of SEQ ID NO: 1884414
uggauauguugaucuugga

SEQ ID NO: 2263825 - RNA, 19 nt, Artificial Sequence
  Description of Artificial Sequence: Synthetic oligonucleotide
  Antisense strand to SEQ ID NO: 2263824
uccaagaucaacauaucca

SEQ ID NO: 2263826 - RNA, 19 nt, Artificial Sequence
  Description of Artificial Sequence: Synthetic oligonucleotide
  Sense strand starting at position 2052 of SEQ ID NO: 1884414
uauguugaucuuggacaga

SEQ ID NO: 2263827 - RNA, 19 nt, Artificial Sequence
  Description of Artificial Sequence: Synthetic oligonucleotide
  Antisense strand to SEQ ID NO: 2263826
ucuguccaagaucaacaua

SEQ ID NO: 2263828 - RNA, 19 nt, Artificial Sequence
  Description of Artificial Sequence: Synthetic oligonucleotide
  Sense strand starting at position 2096 of SEQ ID NO: 1884414
aacagauauguggguggau

SEQ ID NO: 2263829 - RNA, 19 nt, Artificial Sequence
  Description of Artificial Sequence: Synthetic oligonucleotide
  Antisense strand to SEQ ID NO: 2263828
auccacccacauaucuguu

SEQ ID NO: 2263830 - RNA, 19 nt, Artificial Sequence
  Description of Artificial Sequence: Synthetic oligonucleotide
  Sense strand starting at position 2187 of SEQ ID NO: 1884414
ugagaaguuguaugggaag

SEQ ID NO: 2263831 - RNA, 19 nt, Artificial Sequence
  Description of Artificial Sequence: Synthetic oligonucleotide
  Antisense strand to SEQ ID NO: 2263830
cuucccauacaacuucuca

SEQ ID NO: 2263832 - RNA, 19 nt, Artificial Sequence
  Description of Artificial Sequence: Synthetic oligonucleotide
  Sense strand starting at position 2189 of SEQ ID NO: 1884414
agaaguuguaugggaagau

SEQ ID NO: 2263833 - RNA, 19 nt, Artificial Sequence
  Description of Artificial Sequence: Synthetic oligonucleotide
  Antisense strand to SEQ ID NO: 2263832
aucuucccauacaacuucu

SEQ ID NO: 2263834 - RNA, 19 nt, Artificial Sequence
  Description of Artificial Sequence: Synthetic oligonucleotide
  Sense strand starting at position 2281 of SEQ ID NO: 1884414
gaccuaagugguuagugga

SEQ ID NO: 2263835 - RNA, 19 nt, Artificial Sequence
  Description of Artificial Sequence: Synthetic oligonucleotide
  Antisense strand to SEQ ID NO: 2263834
uccacuaaccacuuagguc

SEQ ID NO: 2263836 - RNA, 19 nt, Artificial Sequence
  Description of Artificial Sequence: Synthetic oligonucleotide
  Sense strand starting at position 2377 of SEQ ID NO: 1884414
gaaggauauuuaggaggau

SEQ ID NO: 2263837 - RNA, 19 nt, Artificial Sequence
  Description of Artificial Sequence: Synthetic oligonucleotide
  Antisense strand to SEQ ID NO: 2263836
auccuccuaaauauccuuc

SEQ ID NO: 2263838 - RNA, 19 nt, Artificial Sequence
  Description of Artificial Sequence: Synthetic oligonucleotide
  Sense strand starting at position 2504 of SEQ ID NO: 1884414
cuguucugccaagaagcua

SEQ ID NO: 2263839 - RNA, 19 nt, Artificial Sequence
  Description of Artificial Sequence: Synthetic oligonucleotide
  Antisense strand to SEQ ID NO: 2263838
uagcuucuuggcagaacag

SEQ ID NO: 2263840 - RNA, 19 nt, Artificial Sequence
  Description of Artificial Sequence: Synthetic oligonucleotide
  Sense strand starting at position 2578 of SEQ ID NO: 1884414
cucuuuccacuuggaagau

SEQ ID NO: 2263841 - RNA, 19 nt, Artificial Sequence
  Description of Artificial Sequence: Synthetic oligonucleotide
  Antisense strand to SEQ ID NO: 2263840
aucuuccaaguggaaagag

SEQ ID NO: 2263842 - RNA, 19 nt, Artificial Sequence
  Description of Artificial Sequence: Synthetic oligonucleotide
  Sense strand starting at position 2739 of SEQ ID NO: 1884414
agagaaauuuagcgggaaa

SEQ ID NO: 2263843 - RNA, 19 nt, Artificial Sequence
  Description of Artificial Sequence: Synthetic oligonucleotide
  Antisense strand to SEQ ID NO: 2263842
uuucccgcuaaauuucucu

SEQ ID NO: 2263844 - RNA, 19 nt, Artificial Sequence
  Description of Artificial Sequence: Synthetic oligonucleotide
  Sense strand starting at position 3506 of SEQ ID NO: 1884414
ggagaaugugucuguggaa

SEQ ID NO: 2263845 - RNA, 19 nt, Artificial Sequence
  Description of Artificial Sequence: Synthetic oligonucleotide
  Antisense strand to SEQ ID NO: 2263844
uuccacagacacauucucc

SEQ ID NO: 2263846 - RNA, 19 nt, Artificial Sequence
  Description of Artificial Sequence: Synthetic oligonucleotide
  Sense strand starting at position 3507 of SEQ ID NO: 1884414
gagaaugugucuguggaag

SEQ ID NO: 2263847 - RNA, 19 nt, Artificial Sequence
  Description of Artificial Sequence: Synthetic oligonucleotide
  Antisense strand to SEQ ID NO: 2263846
cuuccacagacacauucuc

SEQ ID NO: 2263848 - RNA, 19 nt, Artificial Sequence
  Description of Artificial Sequence: Synthetic oligonucleotide
  Sense strand starting at position 3556 of SEQ ID NO: 1884414
gaagaaaguuuguugggca

SEQ ID NO: 2263849 - RNA, 19 nt, Artificial Sequence
  Description of Artificial Sequence: Synthetic oligonucleotide
  Antisense strand to SEQ ID NO: 2263848
ugcccaacaaacuuucuuc

SEQ ID NO: 2263850 - RNA, 19 nt, Artificial Sequence
  Description of Artificial Sequence: Synthetic oligonucleotide
  Sense strand starting at position 3776 of SEQ ID NO: 1884414
uuaucaagguggucacaga

SEQ ID NO: 2263851 - RNA, 19 nt, Artificial Sequence
  Description of Artificial Sequence: Synthetic oligonucleotide
  Antisense strand to SEQ ID NO: 2263850
ucugugaccaccuugauaa

SEQ ID NO: 2263852 - RNA, 19 nt, Artificial Sequence
  Description of Artificial Sequence: Synthetic oligonucleotide
  Sense strand starting at position 3958 of SEQ ID NO: 1884414
uugggucuccaugagauuc

SEQ ID NO: 2263853 - RNA, 19 nt, Artificial Sequence
  Description of Artificial Sequence: Synthetic oligonucleotide
  Antisense strand to SEQ ID NO: 2263852
gaaucucauggagacccaa

SEQ ID NO: 2263854 - RNA, 19 nt, Artificial Sequence
  Description of Artificial Sequence: Synthetic oligonucleotide
  Sense strand starting at position 141 of SEQ ID NO: 1884415
gcaauagauuuacagaaau

SEQ ID NO: 2263855 - RNA, 19 nt, Artificial Sequence
  Description of Artificial Sequence: Synthetic oligonucleotide
  Antisense strand to SEQ ID NO: 2263854
auuucuguaaaucuauugc

SEQ ID NO: 2263856 - RNA, 19 nt, Artificial Sequence
  Description of Artificial Sequence: Synthetic oligonucleotide
  Sense strand starting at position 159 of SEQ ID NO: 1884415
ugggauuguugggucaaga

SEQ ID NO: 2263857 - RNA, 19 nt, Artificial Sequence
  Description of Artificial Sequence: Synthetic oligonucleotide
  Antisense strand to SEQ ID NO: 2263856
ucuugacccaacaauccca

SEQ ID NO: 2263858 - RNA, 19 nt, Artificial Sequence
  Description of Artificial Sequence: Synthetic oligonucleotide
  Sense strand starting at position 172 of SEQ ID NO: 1884415
ucaagaugaguauggcuau

SEQ ID NO: 2263859 - RNA, 19 nt, Artificial Sequence
  Description of Artificial Sequence: Synthetic oligonucleotide
  Antisense strand to SEQ ID NO: 2263858
auagccauacucaucuuga

SEQ ID NO: 2263860 - RNA, 19 nt, Artificial Sequence
  Description of Artificial Sequence: Synthetic oligonucleotide
  Sense strand starting at position 252 of SEQ ID NO: 1884415
ccuguaagaggucaugguu

SEQ ID NO: 2263861 - RNA, 19 nt, Artificial Sequence
  Description of Artificial Sequence: Synthetic oligonucleotide
  Antisense strand to SEQ ID NO: 2263860
aaccaugaccucuuacagg

SEQ ID NO: 2263862 - RNA, 19 nt, Artificial Sequence
  Description of Artificial Sequence: Synthetic oligonucleotide
  Sense strand starting at position 453 of SEQ ID NO: 1884415
uuaauacauuguucuggga

SEQ ID NO: 2263863 - RNA, 19 nt, Artificial Sequence
  Description of Artificial Sequence: Synthetic oligonucleotide
  Antisense strand to SEQ ID NO: 2263862
ucccagaacaauguauuaa

SEQ ID NO: 2263864 - RNA, 19 nt, Artificial Sequence
  Description of Artificial Sequence: Synthetic oligonucleotide
  Sense strand starting at position 480 of SEQ ID NO: 1884415
ccaccagaaccgugggaaa

SEQ ID NO: 2263865 - RNA, 19 nt, Artificial Sequence
  Description of Artificial Sequence: Synthetic oligonucleotide
  Antisense strand to SEQ ID NO: 2263864
uuucccacgguucuggugg

SEQ ID NO: 2263866 - RNA, 19 nt, Artificial Sequence
  Description of Artificial Sequence: Synthetic oligonucleotide
  Sense strand starting at position 606 of SEQ ID NO: 1884415
ugcuuuccugaaggaugaa

SEQ ID NO: 2263867 - RNA, 19 nt, Artificial Sequence
  Description of Artificial Sequence: Synthetic oligonucleotide
  Antisense strand to SEQ ID NO: 2263866
uucauccuucaggaaagca

SEQ ID NO: 2263868 - RNA, 19 nt, Artificial Sequence
  Description of Artificial Sequence: Synthetic oligonucleotide
  Sense strand starting at position 702 of SEQ ID NO: 1884415
uuugaaguuggcuauacuu

SEQ ID NO: 2263869 - RNA, 19 nt, Artificial Sequence
  Description of Artificial Sequence: Synthetic oligonucleotide
  Antisense strand to SEQ ID NO: 2263868
aaguauagccaacuucaaa

SEQ ID NO: 2263870 - RNA, 19 nt, Artificial Sequence
  Description of Artificial Sequence: Synthetic oligonucleotide
  Sense strand starting at position 704 of SEQ ID NO: 1884415
ugaaguuggcuauacuuua

SEQ ID NO: 2263871 - RNA, 19 nt, Artificial Sequence
  Description of Artificial Sequence: Synthetic oligonucleotide
  Antisense strand to SEQ ID NO: 2263870
uaaaguauagccaacuuca

SEQ ID NO: 2263872 - RNA, 19 nt, Artificial Sequence
  Description of Artificial Sequence: Synthetic oligonucleotide
  Sense strand starting at position 709 of SEQ ID NO: 1884415
uuggcuauacuuuaacuga

SEQ ID NO: 2263873 - RNA, 19 nt, Artificial Sequence
  Description of Artificial Sequence: Synthetic oligonucleotide
  Antisense strand to SEQ ID NO: 2263872
ucaguuaaaguauagccaa

SEQ ID NO: 2263874 - RNA, 19 nt, Artificial Sequence
  Description of Artificial Sequence: Synthetic oligonucleotide
  Sense strand starting at position 901 of SEQ ID NO: 1884415
ugacuacugucuuuauaua

SEQ ID NO: 2263875 - RNA, 19 nt, Artificial Sequence
  Description of Artificial Sequence: Synthetic oligonucleotide
  Antisense strand to SEQ ID NO: 2263874
uauauaaagacaguaguca

SEQ ID NO: 2263876 - RNA, 19 nt, Artificial Sequence
  Description of Artificial Sequence: Synthetic oligonucleotide
  Sense strand starting at position 972 of SEQ ID NO: 1884415
cuuauuacuccagaguaug

SEQ ID NO: 2263877 - RNA, 19 nt, Artificial Sequence
  Description of Artificial Sequence: Synthetic oligonucleotide
  Antisense strand to SEQ ID NO: 2263876
cauacucuggaguaauaag

SEQ ID NO: 2263878 - RNA, 19 nt, Artificial Sequence
  Description of Artificial Sequence: Synthetic oligonucleotide
  Sense strand starting at position 1117 of SEQ ID NO: 1884415
ccaguaugucaucaccacu

SEQ ID NO: 2263879 - RNA, 19 nt, Artificial Sequence
  Description of Artificial Sequence: Synthetic oligonucleotide
  Antisense strand to SEQ ID NO: 2263878
aguggugaugacauacugg

SEQ ID NO: 2263880 - RNA, 19 nt, Artificial Sequence
  Description of Artificial Sequence: Synthetic oligonucleotide
  Sense strand starting at position 1300 of SEQ ID NO: 1884415
auguauuaauagcuagaug

SEQ ID NO: 2263881 - RNA, 19 nt, Artificial Sequence
  Description of Artificial Sequence: Synthetic oligonucleotide
  Antisense strand to SEQ ID NO: 2263880
caucuagcuauuaauacau

SEQ ID NO: 2263882 - RNA, 19 nt, Artificial Sequence
  Description of Artificial Sequence: Synthetic oligonucleotide
  Sense strand starting at position 1391 of SEQ ID NO: 1884415
cuauguaagcuuuaagaaa

SEQ ID NO: 2263883 - RNA, 19 nt, Artificial Sequence
  Description of Artificial Sequence: Synthetic oligonucleotide
  Antisense strand to SEQ ID NO: 2263882
uuucuuaaagcuuacauag

SEQ ID NO: 2263884 - RNA, 19 nt, Artificial Sequence
  Description of Artificial Sequence: Synthetic oligonucleotide
  Sense strand starting at position 1499 of SEQ ID NO: 1884415
aguaacauacuuugugaau

SEQ ID NO: 2263885 - RNA, 19 nt, Artificial Sequence
  Description of Artificial Sequence: Synthetic oligonucleotide
  Antisense strand to SEQ ID NO: 2263884
auucacaaaguauguuacu

SEQ ID NO: 2263886 - RNA, 19 nt, Artificial Sequence
  Description of Artificial Sequence: Synthetic oligonucleotide
  Sense strand starting at position 1500 of SEQ ID NO: 1884415
guaacauacuuugugaaug

SEQ ID NO: 2263887 - RNA, 19 nt, Artificial Sequence
  Description of Artificial Sequence: Synthetic oligonucleotide
  Antisense strand to SEQ ID NO: 2263886
cauucacaaaguauguuac

SEQ ID NO: 2263888 - RNA, 19 nt, Artificial Sequence
  Description of Artificial Sequence: Synthetic oligonucleotide
  Sense strand starting at position 1505 of SEQ ID NO: 1884415
auacuuugugaauggcaga

SEQ ID NO: 2263889 - RNA, 19 nt, Artificial Sequence
  Description of Artificial Sequence: Synthetic oligonucleotide
  Antisense strand to SEQ ID NO: 2263888
ucugccauucacaaaguau

SEQ ID NO: 2263890 - RNA, 19 nt, Artificial Sequence
  Description of Artificial Sequence: Synthetic oligonucleotide
  Sense strand starting at position 1512 of SEQ ID NO: 1884415
gugaauggcagagggaaua

SEQ ID NO: 2263891 - RNA, 19 nt, Artificial Sequence
  Description of Artificial Sequence: Synthetic oligonucleotide
  Antisense strand to SEQ ID NO: 2263890
uauucccucugccauucac

SEQ ID NO: 2263892 - RNA, 19 nt, Artificial Sequence
  Description of Artificial Sequence: Synthetic oligonucleotide
  Sense strand starting at position 1605 of SEQ ID NO: 1884415
cuuugaugcuuaccaaaga

SEQ ID NO: 2263893 - RNA, 19 nt, Artificial Sequence
  Description of Artificial Sequence: Synthetic oligonucleotide
  Antisense strand to SEQ ID NO: 2263892
ucuuugguaagcaucaaag

SEQ ID NO: 2263894 - RNA, 19 nt, Artificial Sequence
  Description of Artificial Sequence: Synthetic oligonucleotide
  Sense strand starting at position 1682 of SEQ ID NO: 1884415
cuaauuugugcaugucauu

SEQ ID NO: 2263895 - RNA, 19 nt, Artificial Sequence
  Description of Artificial Sequence: Synthetic oligonucleotide
  Antisense strand to SEQ ID NO: 2263894
aaugacaugcacaaauuag

SEQ ID NO: 2263896 - RNA, 19 nt, Artificial Sequence
  Description of Artificial Sequence: Synthetic oligonucleotide
  Sense strand starting at position 1896 of SEQ ID NO: 1884415
cuaaguaccugucuaaaua

SEQ ID NO: 2263897 - RNA, 19 nt, Artificial Sequence
  Description of Artificial Sequence: Synthetic oligonucleotide
  Antisense strand to SEQ ID NO: 2263896
uauuuagacagguacuuag

SEQ ID NO: 2263898 - RNA, 19 nt, Artificial Sequence
  Description of Artificial Sequence: Synthetic oligonucleotide
  Sense strand starting at position 2324 of SEQ ID NO: 1884415
cccagaauaguccagguuu

SEQ ID NO: 2263899 - RNA, 19 nt, Artificial Sequence
  Description of Artificial Sequence: Synthetic oligonucleotide
  Antisense strand to SEQ ID NO: 2263898
aaaccuggacuauucuggg

SEQ ID NO: 2263900 - RNA, 19 nt, Artificial Sequence
  Description of Artificial Sequence: Synthetic oligonucleotide
  Sense strand starting at position 2326 of SEQ ID NO: 1884415
cagaauaguccagguuuau

SEQ ID NO: 2263901 - RNA, 19 nt, Artificial Sequence
  Description of Artificial Sequence: Synthetic oligonucleotide
  Antisense strand to SEQ ID NO: 2263900
auaaaccuggacuauucug

SEQ ID NO: 2263902 - RNA, 19 nt, Artificial Sequence
  Description of Artificial Sequence: Synthetic oligonucleotide
  Sense strand starting at position 2392 of SEQ ID NO: 1884415
auuaucucagcagggauaa

SEQ ID NO: 2263903 - RNA, 19 nt, Artificial Sequence
  Description of Artificial Sequence: Synthetic oligonucleotide
  Antisense strand to SEQ ID NO: 2263902
uuaucccugcugagauaau

SEQ ID NO: 2263904 - RNA, 19 nt, Artificial Sequence
  Description of Artificial Sequence: Synthetic oligonucleotide
  Sense strand starting at position 2393 of SEQ ID NO: 1884415
uuaucucagcagggauaau

SEQ ID NO: 2263905 - RNA, 19 nt, Artificial Sequence
  Description of Artificial Sequence: Synthetic oligonucleotide
  Antisense strand to SEQ ID NO: 2263904
auuaucccugcugagauaa

SEQ ID NO: 2263906 - RNA, 19 nt, Artificial Sequence
  Description of Artificial Sequence: Synthetic oligonucleotide
  Sense strand starting at position 2412 of SEQ ID NO: 1884415
acauuauauggucaugcua

SEQ ID NO: 2263907 - RNA, 19 nt, Artificial Sequence
  Description of Artificial Sequence: Synthetic oligonucleotide
  Antisense strand to SEQ ID NO: 2263906
uagcaugaccauauaaugu

SEQ ID NO: 2263908 - RNA, 19 nt, Artificial Sequence
  Description of Artificial Sequence: Synthetic oligonucleotide
  Sense strand starting at position 3095 of SEQ ID NO: 1884415
uuuauccauugaucgacau

SEQ ID NO: 2263909 - RNA, 19 nt, Artificial Sequence
  Description of Artificial Sequence: Synthetic oligonucleotide
  Antisense strand to SEQ ID NO: 2263908
augucgaucaauggauaaa

SEQ ID NO: 2263910 - RNA, 19 nt, Artificial Sequence
  Description of Artificial Sequence: Synthetic oligonucleotide
  Sense strand starting at position 3132 of SEQ ID NO: 1884415
gguuauuaugaauagcagu

SEQ ID NO: 2263911 - RNA, 19 nt, Artificial Sequence
  Description of Artificial Sequence: Synthetic oligonucleotide
  Antisense strand to SEQ ID NO: 2263910
acugcuauucauaauaacc

SEQ ID NO: 2263912 - RNA, 19 nt, Artificial Sequence
  Description of Artificial Sequence: Synthetic oligonucleotide
  Sense strand starting at position 3147 of SEQ ID NO: 1884415
caguguuaugaacauugau

SEQ ID NO: 2263913 - RNA, 19 nt, Artificial Sequence
  Description of Artificial Sequence: Synthetic oligonucleotide
  Antisense strand to SEQ ID NO: 2263912
aucaauguucauaacacug

SEQ ID NO: 2263914 - RNA, 19 nt, Artificial Sequence
  Description of Artificial Sequence: Synthetic oligonucleotide
  Sense strand starting at position 3205 of SEQ ID NO: 1884415
ccuaccuaggauugaaauu

SEQ ID NO: 2263915 - RNA, 19 nt, Artificial Sequence
  Description of Artificial Sequence: Synthetic oligonucleotide
  Antisense strand to SEQ ID NO: 2263914
aauuucaauccuagguagg

SEQ ID NO: 2263916 - RNA, 19 nt, Artificial Sequence
  Description of Artificial Sequence: Synthetic oligonucleotide
  Sense strand starting at position 3374 of SEQ ID NO: 1884415
aaauucuaguaggugugaa

SEQ ID NO: 2263917 - RNA, 19 nt, Artificial Sequence
  Description of Artificial Sequence: Synthetic oligonucleotide
  Antisense strand to SEQ ID NO: 2263916
uucacaccuacuagaauuu

SEQ ID NO: 2263918 - RNA, 19 nt, Artificial Sequence
  Description of Artificial Sequence: Synthetic oligonucleotide
  Sense strand starting at position 3653 of SEQ ID NO: 1884415
gguugaggaaguuaucucu

SEQ ID NO: 2263919 - RNA, 19 nt, Artificial Sequence
  Description of Artificial Sequence: Synthetic oligonucleotide
  Antisense strand to SEQ ID NO: 2263918
agagauaacuuccucaacc

SEQ ID NO: 2263920 - RNA, 19 nt, Artificial Sequence
  Description of Artificial Sequence: Synthetic oligonucleotide
  Sense strand starting at position 3656 of SEQ ID NO: 1884415
ugaggaaguuaucucuacu

SEQ ID NO: 2263921 - RNA, 19 nt, Artificial Sequence
  Description of Artificial Sequence: Synthetic oligonucleotide
  Antisense strand to SEQ ID NO: 2263920
aguagagauaacuuccuca

SEQ ID NO: 2263922 - RNA, 19 nt, Artificial Sequence
  Description of Artificial Sequence: Synthetic oligonucleotide
  Sense strand starting at position 3659 of SEQ ID NO: 1884415
ggaaguuaucucuacuccu

SEQ ID NO: 2263923 - RNA, 19 nt, Artificial Sequence
  Description of Artificial Sequence: Synthetic oligonucleotide
  Antisense strand to SEQ ID NO: 2263922
aggaguagagauaacuucc

SEQ ID NO: 2263924 - RNA, 19 nt, Artificial Sequence
  Description of Artificial Sequence: Synthetic oligonucleotide
  Sense strand starting at position 3886 of SEQ ID NO: 1884415
cccucauaggccuauguaa

SEQ ID NO: 2263925 - RNA, 19 nt, Artificial Sequence
  Description of Artificial Sequence: Synthetic oligonucleotide
  Antisense strand to SEQ ID NO: 2263924
uuacauaggccuaugaggg

SEQ ID NO: 2263926 - RNA, 19 nt, Artificial Sequence
  Description of Artificial Sequence: Synthetic oligonucleotide
  Sense strand starting at position 3894 of SEQ ID NO: 1884415
ggccuauguaagcaugaua

SEQ ID NO: 2263927 - RNA, 19 nt, Artificial Sequence
  Description of Artificial Sequence: Synthetic oligonucleotide
  Antisense strand to SEQ ID NO: 2263926
uaucaugcuuacauaggcc

SEQ ID NO: 2263928 - RNA, 19 nt, Artificial Sequence
  Description of Artificial Sequence: Synthetic oligonucleotide
  Sense strand starting at position 3897 of SEQ ID NO: 1884415
cuauguaagcaugauauaa

SEQ ID NO: 2263929 - RNA, 19 nt, Artificial Sequence
  Description of Artificial Sequence: Synthetic oligonucleotide
  Antisense strand to SEQ ID NO: 2263928
uuauaucaugcuuacauag

SEQ ID NO: 2263930 - RNA, 19 nt, Artificial Sequence
  Description of Artificial Sequence: Synthetic oligonucleotide
  Sense strand starting at position 3912 of SEQ ID NO: 1884415
auaagaauaguaggugacu

SEQ ID NO: 2263931 - RNA, 19 nt, Artificial Sequence
  Description of Artificial Sequence: Synthetic oligonucleotide
  Antisense strand to SEQ ID NO: 2263930
agucaccuacuauucuuau

SEQ ID NO: 2263932 - RNA, 19 nt, Artificial Sequence
  Description of Artificial Sequence: Synthetic oligonucleotide
  Sense strand starting at position 3913 of SEQ ID NO: 1884415
uaagaauaguaggugacuu

SEQ ID NO: 2263933 - RNA, 19 nt, Artificial Sequence
  Description of Artificial Sequence: Synthetic oligonucleotide
  Antisense strand to SEQ ID NO: 2263932
aagucaccuacuauucuua

SEQ ID NO: 2263934 - RNA, 19 nt, Artificial Sequence
  Description of Artificial Sequence: Synthetic oligonucleotide
  Sense strand starting at position 81 of SEQ ID NO: 1884416
uuuggaaucucugauuuag

SEQ ID NO: 2263935 - RNA, 19 nt, Artificial Sequence
  Description of Artificial Sequence: Synthetic oligonucleotide
  Antisense strand to SEQ ID NO: 2263934
cuaaaucagagauuccaaa

SEQ ID NO: 2263936 - RNA, 19 nt, Artificial Sequence
  Description of Artificial Sequence: Synthetic oligonucleotide
  Sense strand starting at position 263 of SEQ ID NO: 1884416
ggacuuuaccuguauuaau

SEQ ID NO: 2263937 - RNA, 19 nt, Artificial Sequence
  Description of Artificial Sequence: Synthetic oligonucleotide
  Antisense strand to SEQ ID NO: 2263936
auuaauacagguaaagucc

SEQ ID NO: 2263938 - RNA, 19 nt, Artificial Sequence
  Description of Artificial Sequence: Synthetic oligonucleotide
  Sense strand starting at position 435 of SEQ ID NO: 1884416
acugcaucuuucuuuggaa

SEQ ID NO: 2263939 - RNA, 19 nt, Artificial Sequence
  Description of Artificial Sequence: Synthetic oligonucleotide
  Antisense strand to SEQ ID NO: 2263938
uuccaaagaaagaugcagu

SEQ ID NO: 2263940 - RNA, 19 nt, Artificial Sequence
  Description of Artificial Sequence: Synthetic oligonucleotide
  Sense strand starting at position 436 of SEQ ID NO: 1884416
cugcaucuuucuuuggaaa

SEQ ID NO: 2263941 - RNA, 19 nt, Artificial Sequence
  Description of Artificial Sequence: Synthetic oligonucleotide
  Antisense strand to SEQ ID NO: 2263940
uuuccaaagaaagaugcag

SEQ ID NO: 2263942 - RNA, 19 nt, Artificial Sequence
  Description of Artificial Sequence: Synthetic oligonucleotide
  Sense strand starting at position 459 of SEQ ID NO: 1884416
ggaagaggauaucauaaau

SEQ ID NO: 2263943 - RNA, 19 nt, Artificial Sequence
  Description of Artificial Sequence: Synthetic oligonucleotide
  Antisense strand to SEQ ID NO: 2263942
auuuaugauauccucuucc

SEQ ID NO: 2263944 - RNA, 19 nt, Artificial Sequence
  Description of Artificial Sequence: Synthetic oligonucleotide
  Sense strand starting at position 479 of SEQ ID NO: 1884416
cgggaacuuccucaggcuu

SEQ ID NO: 2263945 - RNA, 19 nt, Artificial Sequence
  Description of Artificial Sequence: Synthetic oligonucleotide
  Antisense strand to SEQ ID NO: 2263944
aagccugaggaaguucccg

SEQ ID NO: 2263946 - RNA, 19 nt, Artificial Sequence
  Description of Artificial Sequence: Synthetic oligonucleotide
  Sense strand starting at position 511 of SEQ ID NO: 1884416
acaaacuaugguuagcauu

SEQ ID NO: 2263947 - RNA, 19 nt, Artificial Sequence
  Description of Artificial Sequence: Synthetic oligonucleotide
  Antisense strand to SEQ ID NO: 2263946
aaugcuaaccauaguuugu

SEQ ID NO: 2263948 - RNA, 19 nt, Artificial Sequence
  Description of Artificial Sequence: Synthetic oligonucleotide
  Sense strand starting at position 949 of SEQ ID NO: 1884416
ugcauaguuuauuugcauu

SEQ ID NO: 2263949 - RNA, 19 nt, Artificial Sequence
  Description of Artificial Sequence: Synthetic oligonucleotide
  Antisense strand to SEQ ID NO: 2263948
aaugcaaauaaacuaugca

SEQ ID NO: 2263950 - RNA, 19 nt, Artificial Sequence
  Description of Artificial Sequence: Synthetic oligonucleotide
  Sense strand starting at position 985 of SEQ ID NO: 1884416
aguuaugucugcuuugaaa

SEQ ID NO: 2263951 - RNA, 19 nt, Artificial Sequence
  Description of Artificial Sequence: Synthetic oligonucleotide
  Antisense strand to SEQ ID NO: 2263950
uuucaaagcagacauaacu

SEQ ID NO: 2263952 - RNA, 19 nt, Artificial Sequence
  Description of Artificial Sequence: Synthetic oligonucleotide
  Sense strand starting at position 1101 of SEQ ID NO: 1884416
ugugcugugcuacuguuaa

SEQ ID NO: 2263953 - RNA, 19 nt, Artificial Sequence
  Description of Artificial Sequence: Synthetic oligonucleotide
  Antisense strand to SEQ ID NO: 2263952
uuaacaguagcacagcaca

SEQ ID NO: 2263954 - RNA, 19 nt, Artificial Sequence
  Description of Artificial Sequence: Synthetic oligonucleotide
  Sense strand starting at position 1103 of SEQ ID NO: 1884416
ugcugugcuacuguuaagu

SEQ ID NO: 2263955 - RNA, 19 nt, Artificial Sequence
  Description of Artificial Sequence: Synthetic oligonucleotide
  Antisense strand to SEQ ID NO: 2263954
acuuaacaguagcacagca

SEQ ID NO: 2263956 - RNA, 19 nt, Artificial Sequence
  Description of Artificial Sequence: Synthetic oligonucleotide
  Sense strand starting at position 1120 of SEQ ID NO: 1884416
guuccagcacuuuaaggaa

SEQ ID NO: 2263957 - RNA, 19 nt, Artificial Sequence
  Description of Artificial Sequence: Synthetic oligonucleotide
  Antisense strand to SEQ ID NO: 2263956
uuccuuaaagugcuggaac

SEQ ID NO: 2263958 - RNA, 19 nt, Artificial Sequence
  Description of Artificial Sequence: Synthetic oligonucleotide
  Sense strand starting at position 1138 of SEQ ID NO: 1884416
acguuucaggagugacuaa

SEQ ID NO: 2263959 - RNA, 19 nt, Artificial Sequence
  Description of Artificial Sequence: Synthetic oligonucleotide
  Antisense strand to SEQ ID NO: 2263958
uuagucacuccugaaacgu

SEQ ID NO: 2263960 - RNA, 19 nt, Artificial Sequence
  Description of Artificial Sequence: Synthetic oligonucleotide
  Sense strand starting at position 2745 of SEQ ID NO: 1884416
uagguuuccugaguuugaa

SEQ ID NO: 2263961 - RNA, 19 nt, Artificial Sequence
  Description of Artificial Sequence: Synthetic oligonucleotide
  Antisense strand to SEQ ID NO: 2263960
uucaaacucaggaaaccua

SEQ ID NO: 2263962 - RNA, 19 nt, Artificial Sequence
  Description of Artificial Sequence: Synthetic oligonucleotide
  Sense strand starting at position 2748 of SEQ ID NO: 1884416
guuuccugaguuugaaguu

SEQ ID NO: 2263963 - RNA, 19 nt, Artificial Sequence
  Description of Artificial Sequence: Synthetic oligonucleotide
  Antisense strand to SEQ ID NO: 2263962
aacuucaaacucaggaaac

SEQ ID NO: 2263964 - RNA, 19 nt, Artificial Sequence
  Description of Artificial Sequence: Synthetic oligonucleotide
  Sense strand starting at position 3076 of SEQ ID NO: 1884416
cuucuaucuugagcuacga

SEQ ID NO: 2263965 - RNA, 19 nt, Artificial Sequence
  Description of Artificial Sequence: Synthetic oligonucleotide
  Antisense strand to SEQ ID NO: 2263964
ucguagcucaagauagaag

SEQ ID NO: 2263966 - RNA, 19 nt, Artificial Sequence
  Description of Artificial Sequence: Synthetic oligonucleotide
  Sense strand starting at position 3126 of SEQ ID NO: 1884416
auuggaaaggcuugauugu

SEQ ID NO: 2263967 - RNA, 19 nt, Artificial Sequence
  Description of Artificial Sequence: Synthetic oligonucleotide
  Antisense strand to SEQ ID NO: 2263966
acaaucaagccuuuccaau

SEQ ID NO: 2263968 - RNA, 19 nt, Artificial Sequence
  Description of Artificial Sequence: Synthetic oligonucleotide
  Sense strand starting at position 3127 of SEQ ID NO: 1884416
uuggaaaggcuugauugua

SEQ ID NO: 2263969 - RNA, 19 nt, Artificial Sequence
  Description of Artificial Sequence: Synthetic oligonucleotide
  Antisense strand to SEQ ID NO: 2263968
uacaaucaagccuuuccaa

SEQ ID NO: 2263970 - RNA, 19 nt, Artificial Sequence
  Description of Artificial Sequence: Synthetic oligonucleotide
  Sense strand starting at position 3155 of SEQ ID NO: 1884416
uguauuguuaccgcggagu

SEQ ID NO: 2263971 - RNA, 19 nt, Artificial Sequence
  Description of Artificial Sequence: Synthetic oligonucleotide
  Antisense strand to SEQ ID NO: 2263970
acuccgcgguaacaauaca

SEQ ID NO: 2263972 - RNA, 19 nt, Artificial Sequence
  Description of Artificial Sequence: Synthetic oligonucleotide
  Sense strand starting at position 3159 of SEQ ID NO: 1884416
uuguuaccgcggaguuagu

SEQ ID NO: 2263973 - RNA, 19 nt, Artificial Sequence
  Description of Artificial Sequence: Synthetic oligonucleotide
  Antisense strand to SEQ ID NO: 2263972
acuaacuccgcgguaacaa

SEQ ID NO: 2263974 - RNA, 19 nt, Artificial Sequence
  Description of Artificial Sequence: Synthetic oligonucleotide
  Sense strand starting at position 3169 of SEQ ID NO: 1884416
ggaguuaguguacaccaua

SEQ ID NO: 2263975 - RNA, 19 nt, Artificial Sequence
  Description of Artificial Sequence: Synthetic oligonucleotide
  Antisense strand to SEQ ID NO: 2263974
uaugguguacacuaacucc

SEQ ID NO: 2263976 - RNA, 19 nt, Artificial Sequence
  Description of Artificial Sequence: Synthetic oligonucleotide
  Sense strand starting at position 3188 of SEQ ID NO: 1884416
aaaguuagcuuggccaaga

SEQ ID NO: 2263977 - RNA, 19 nt, Artificial Sequence
  Description of Artificial Sequence: Synthetic oligonucleotide
  Antisense strand to SEQ ID NO: 2263976
ucuuggccaagcuaacuuu

SEQ ID NO: 2263978 - RNA, 19 nt, Artificial Sequence
  Description of Artificial Sequence: Synthetic oligonucleotide
  Sense strand starting at position 3320 of SEQ ID NO: 1884416
gccggauguggugacaagu

SEQ ID NO: 2263979 - RNA, 19 nt, Artificial Sequence
  Description of Artificial Sequence: Synthetic oligonucleotide
  Antisense strand to SEQ ID NO: 2263978
acuugucaccacauccggc

SEQ ID NO: 2263980 - RNA, 19 nt, Artificial Sequence
  Description of Artificial Sequence: Synthetic oligonucleotide
  Sense strand starting at position 3326 of SEQ ID NO: 1884416
uguggugacaaguagaacu

SEQ ID NO: 2263981 - RNA, 19 nt, Artificial Sequence
  Description of Artificial Sequence: Synthetic oligonucleotide
  Antisense strand to SEQ ID NO: 2263980
aguucuacuugucaccaca

SEQ ID NO: 2263982 - RNA, 19 nt, Artificial Sequence
  Description of Artificial Sequence: Synthetic oligonucleotide
  Sense strand starting at position 3338 of SEQ ID NO: 1884416
uagaacucucagugugcau

SEQ ID NO: 2263983 - RNA, 19 nt, Artificial Sequence
  Description of Artificial Sequence: Synthetic oligonucleotide
  Antisense strand to SEQ ID NO: 2263982
augcacacugagaguucua

SEQ ID NO: 2263984 - RNA, 19 nt, Artificial Sequence
  Description of Artificial Sequence: Synthetic oligonucleotide
  Sense strand starting at position 3371 of SEQ ID NO: 1884416
guaccugcauguuuaaaug

SEQ ID NO: 2263985 - RNA, 19 nt, Artificial Sequence
  Description of Artificial Sequence: Synthetic oligonucleotide
  Antisense strand to SEQ ID NO: 2263984
cauuuaaacaugcagguac

SEQ ID NO: 2263986 - RNA, 19 nt, Artificial Sequence
  Description of Artificial Sequence: Synthetic oligonucleotide
  Sense strand starting at position 3407 of SEQ ID NO: 1884416
cuagaaaucuuagccaggu

SEQ ID NO: 2263987 - RNA, 19 nt, Artificial Sequence
  Description of Artificial Sequence: Synthetic oligonucleotide
  Antisense strand to SEQ ID NO: 2263986
accuggcuaagauuucuag

SEQ ID NO: 2263988 - RNA, 19 nt, Artificial Sequence
  Description of Artificial Sequence: Synthetic oligonucleotide
  Sense strand starting at position 3408 of SEQ ID NO: 1884416
uagaaaucuuagccagguu

SEQ ID NO: 2263989 - RNA, 19 nt, Artificial Sequence
  Description of Artificial Sequence: Synthetic oligonucleotide
  Antisense strand to SEQ ID NO: 2263988
aaccuggcuaagauuucua

SEQ ID NO: 2263990 - RNA, 19 nt, Artificial Sequence
  Description of Artificial Sequence: Synthetic oligonucleotide
  Sense strand starting at position 3411 of SEQ ID NO: 1884416
aaaucuuagccagguuaag

SEQ ID NO: 2263991 - RNA, 19 nt, Artificial Sequence
  Description of Artificial Sequence: Synthetic oligonucleotide
  Antisense strand to SEQ ID NO: 2263990
cuuaaccuggcuaagauuu

SEQ ID NO: 2263992 - RNA, 19 nt, Artificial Sequence
  Description of Artificial Sequence: Synthetic oligonucleotide
  Sense strand starting at position 3464 of SEQ ID NO: 1884416
uuuguauuauuggcagaua

SEQ ID NO: 2263993 - RNA, 19 nt, Artificial Sequence
  Description of Artificial Sequence: Synthetic oligonucleotide
  Antisense strand to SEQ ID NO: 2263992
uaucugccaauaauacaaa

SEQ ID NO: 2263994 - RNA, 19 nt, Artificial Sequence
  Description of Artificial Sequence: Synthetic oligonucleotide
  Sense strand starting at position 3502 of SEQ ID NO: 1884416
agcucauuuccucaucgua

SEQ ID NO: 2263995 - RNA, 19 nt, Artificial Sequence
  Description of Artificial Sequence: Synthetic oligonucleotide
  Antisense strand to SEQ ID NO: 2263994
uacgaugaggaaaugagcu

SEQ ID NO: 2263996 - RNA, 19 nt, Artificial Sequence
  Description of Artificial Sequence: Synthetic oligonucleotide
  Sense strand starting at position 3504 of SEQ ID NO: 1884416
cucauuuccucaucguagu

SEQ ID NO: 2263997 - RNA, 19 nt, Artificial Sequence
  Description of Artificial Sequence: Synthetic oligonucleotide
  Antisense strand to SEQ ID NO: 2263996
acuacgaugaggaaaugag

SEQ ID NO: 2263998 - RNA, 19 nt, Artificial Sequence
  Description of Artificial Sequence: Synthetic oligonucleotide
  Sense strand starting at position 3539 of SEQ ID NO: 1884416
gugauaggauucucccagu

SEQ ID NO: 2263999 - RNA, 19 nt, Artificial Sequence
  Description of Artificial Sequence: Synthetic oligonucleotide
  Antisense strand to SEQ ID NO: 2263998
acugggagaauccuaucac

SEQ ID NO: 2264000 - RNA, 19 nt, Artificial Sequence
  Description of Artificial Sequence: Synthetic oligonucleotide
  Sense strand starting at position 3701 of SEQ ID NO: 1884416
gucuaauaggcgcaaucau

SEQ ID NO: 2264001 - RNA, 19 nt, Artificial Sequence
  Description of Artificial Sequence: Synthetic oligonucleotide
  Antisense strand to SEQ ID NO: 2264000
augauugcgccuauuagac

SEQ ID NO: 2264002 - RNA, 19 nt, Artificial Sequence
  Description of Artificial Sequence: Synthetic oligonucleotide
  Sense strand starting at position 3710 of SEQ ID NO: 1884416
gcgcaaucaugaguuagag

SEQ ID NO: 2264003 - RNA, 19 nt, Artificial Sequence
  Description of Artificial Sequence: Synthetic oligonucleotide
  Antisense strand to SEQ ID NO: 2264002
cucuaacucaugauugcgc

SEQ ID NO: 2264004 - RNA, 19 nt, Artificial Sequence
  Description of Artificial Sequence: Synthetic oligonucleotide
  Sense strand starting at position 3712 of SEQ ID NO: 1884416
gcaaucaugaguuagagua

SEQ ID NO: 2264005 - RNA, 19 nt, Artificial Sequence
  Description of Artificial Sequence: Synthetic oligonucleotide
  Antisense strand to SEQ ID NO: 2264004
uacucuaacucaugauugc

SEQ ID NO: 2264006 - RNA, 19 nt, Artificial Sequence
  Description of Artificial Sequence: Synthetic oligonucleotide
  Sense strand starting at position 3720 of SEQ ID NO: 1884416
gaguuagaguaagcuaaag

SEQ ID NO: 2264007 - RNA, 19 nt, Artificial Sequence
  Description of Artificial Sequence: Synthetic oligonucleotide
  Antisense strand to SEQ ID NO: 2264006
cuuuagcuuacucuaacuc

SEQ ID NO: 2264008 - RNA, 19 nt, Artificial Sequence
  Description of Artificial Sequence: Synthetic oligonucleotide
  Sense strand starting at position 3764 of SEQ ID NO: 1884416
aggucuuggcuccaguagu

SEQ ID NO: 2264009 - RNA, 19 nt, Artificial Sequence
  Description of Artificial Sequence: Synthetic oligonucleotide
  Antisense strand to SEQ ID NO: 2264008
acuacuggagccaagaccu

SEQ ID NO: 2264010 - RNA, 19 nt, Artificial Sequence
  Description of Artificial Sequence: Synthetic oligonucleotide
  Sense strand starting at position 3793 of SEQ ID NO: 1884416
ggauguuguugcuuagaaa

SEQ ID NO: 2264011 - RNA, 19 nt, Artificial Sequence
  Description of Artificial Sequence: Synthetic oligonucleotide
  Antisense strand to SEQ ID NO: 2264010
uuucuaagcaacaacaucc

SEQ ID NO: 2264012 - RNA, 19 nt, Artificial Sequence
  Description of Artificial Sequence: Synthetic oligonucleotide
  Sense strand starting at position 3911 of SEQ ID NO: 1884416
acauuuaucuuugggacuu

SEQ ID NO: 2264013 - RNA, 19 nt, Artificial Sequence
  Description of Artificial Sequence: Synthetic oligonucleotide
  Antisense strand to SEQ ID NO: 2264012
aagucccaaagauaaaugu

SEQ ID NO: 2264014 - RNA, 19 nt, Artificial Sequence
  Description of Artificial Sequence: Synthetic oligonucleotide
  Sense strand starting at position 200 of SEQ ID NO: 1884417
aagagaacagugugaaagu

SEQ ID NO: 2264015 - RNA, 19 nt, Artificial Sequence
  Description of Artificial Sequence: Synthetic oligonucleotide
  Antisense strand to SEQ ID NO: 2264014
acuuucacacuguucucuu

SEQ ID NO: 2264016 - RNA, 19 nt, Artificial Sequence
  Description of Artificial Sequence: Synthetic oligonucleotide
  Sense strand starting at position 266 of SEQ ID NO: 1884417
ugcuuugacaaguggaauc

SEQ ID NO: 2264017 - RNA, 19 nt, Artificial Sequence
  Description of Artificial Sequence: Synthetic oligonucleotide
  Antisense strand to SEQ ID NO: 2264016
gauuccacuugucaaagca

SEQ ID NO: 2264018 - RNA, 19 nt, Artificial Sequence
  Description of Artificial Sequence: Synthetic oligonucleotide
  Sense strand starting at position 496 of SEQ ID NO: 1884417
gguagcugguuauuucuca

SEQ ID NO: 2264019 - RNA, 19 nt, Artificial Sequence
  Description of Artificial Sequence: Synthetic oligonucleotide
  Antisense strand to SEQ ID NO: 2264018
ugagaaauaaccagcuacc

SEQ ID NO: 2264020 - RNA, 19 nt, Artificial Sequence
  Description of Artificial Sequence: Synthetic oligonucleotide
  Sense strand starting at position 503 of SEQ ID NO: 1884417
gguuauuucucaguggagc

SEQ ID NO: 2264021 - RNA, 19 nt, Artificial Sequence
  Description of Artificial Sequence: Synthetic oligonucleotide
  Antisense strand to SEQ ID NO: 2264020
gcuccacugagaaauaacc

SEQ ID NO: 2264022 - RNA, 19 nt, Artificial Sequence
  Description of Artificial Sequence: Synthetic oligonucleotide
  Sense strand starting at position 504 of SEQ ID NO: 1884417
guuauuucucaguggagca

SEQ ID NO: 2264023 - RNA, 19 nt, Artificial Sequence
  Description of Artificial Sequence: Synthetic oligonucleotide
  Antisense strand to SEQ ID NO: 2264022
ugcuccacugagaaauaac

SEQ ID NO: 2264024 - RNA, 19 nt, Artificial Sequence
  Description of Artificial Sequence: Synthetic oligonucleotide
  Sense strand starting at position 529 of SEQ ID NO: 1884417
gaacuagugcuagggaaca

SEQ ID NO: 2264025 - RNA, 19 nt, Artificial Sequence
  Description of Artificial Sequence: Synthetic oligonucleotide
  Antisense strand to SEQ ID NO: 2264024
uguucccuagcacuaguuc

SEQ ID NO: 2264026 - RNA, 19 nt, Artificial Sequence
  Description of Artificial Sequence: Synthetic oligonucleotide
  Sense strand starting at position 568 of SEQ ID NO: 1884417
gaaauucucaggcgggagu

SEQ ID NO: 2264027 - RNA, 19 nt, Artificial Sequence
  Description of Artificial Sequence: Synthetic oligonucleotide
  Antisense strand to SEQ ID NO: 2264026
acucccgccugagaauuuc

SEQ ID NO: 2264028 - RNA, 19 nt, Artificial Sequence
  Description of Artificial Sequence: Synthetic oligonucleotide
  Sense strand starting at position 692 of SEQ ID NO: 1884417
cguggguaugagugaaaga

SEQ ID NO: 2264029 - RNA, 19 nt, Artificial Sequence
  Description of Artificial Sequence: Synthetic oligonucleotide
  Antisense strand to SEQ ID NO: 2264028
ucuuucacucauacccacg

SEQ ID NO: 2264030 - RNA, 19 nt, Artificial Sequence
  Description of Artificial Sequence: Synthetic oligonucleotide
  Sense strand starting at position 695 of SEQ ID NO: 1884417
ggguaugagugaaagaguu

SEQ ID NO: 2264031 - RNA, 19 nt, Artificial Sequence
  Description of Artificial Sequence: Synthetic oligonucleotide
  Antisense strand to SEQ ID NO: 2264030
aacucuuucacucauaccc

SEQ ID NO: 2264032 - RNA, 19 nt, Artificial Sequence
  Description of Artificial Sequence: Synthetic oligonucleotide
  Sense strand starting at position 828 of SEQ ID NO: 1884417
gcuucugaggcauaugaau

SEQ ID NO: 2264033 - RNA, 19 nt, Artificial Sequence
  Description of Artificial Sequence: Synthetic oligonucleotide
  Antisense strand to SEQ ID NO: 2264032
auucauaugccucagaagc

SEQ ID NO: 2264034 - RNA, 19 nt, Artificial Sequence
  Description of Artificial Sequence: Synthetic oligonucleotide
  Sense strand starting at position 865 of SEQ ID NO: 1884417
ccugguguuaguugggaaa

SEQ ID NO: 2264035 - RNA, 19 nt, Artificial Sequence
  Description of Artificial Sequence: Synthetic oligonucleotide
  Antisense strand to SEQ ID NO: 2264034
uuucccaacuaacaccagg

SEQ ID NO: 2264036 - RNA, 19 nt, Artificial Sequence
  Description of Artificial Sequence: Synthetic oligonucleotide
  Sense strand starting at position 933 of SEQ ID NO: 1884417
uccguucaacuuggugaga

SEQ ID NO: 2264037 - RNA, 19 nt, Artificial Sequence
  Description of Artificial Sequence: Synthetic oligonucleotide
  Antisense strand to SEQ ID NO: 2264036
ucucaccaaguugaacgga

SEQ ID NO: 2264038 - RNA, 19 nt, Artificial Sequence
  Description of Artificial Sequence: Synthetic oligonucleotide
  Sense strand starting at position 934 of SEQ ID NO: 1884417
ccguucaacuuggugagaa

SEQ ID NO: 2264039 - RNA, 19 nt, Artificial Sequence
  Description of Artificial Sequence: Synthetic oligonucleotide
  Antisense strand to SEQ ID NO: 2264038
uucucaccaaguugaacgg

SEQ ID NO: 2264040 - RNA, 19 nt, Artificial Sequence
  Description of Artificial Sequence: Synthetic oligonucleotide
  Sense strand starting at position 2023 of SEQ ID NO: 1884417
ugcucauuggccuagcaga

SEQ ID NO: 2264041 - RNA, 19 nt, Artificial Sequence
  Description of Artificial Sequence: Synthetic oligonucleotide
  Antisense strand to SEQ ID NO: 2264040
ucugcuaggccaaugagca

SEQ ID NO: 2264042 - RNA, 19 nt, Artificial Sequence
  Description of Artificial Sequence: Synthetic oligonucleotide
  Sense strand starting at position 2037 of SEQ ID NO: 1884417
gcagaagugauugacaggu

SEQ ID NO: 2264043 - RNA, 19 nt, Artificial Sequence
  Description of Artificial Sequence: Synthetic oligonucleotide
  Antisense strand to SEQ ID NO: 2264042
accugucaaucacuucugc

SEQ ID NO: 2264044 - RNA, 19 nt, Artificial Sequence
  Description of Artificial Sequence: Synthetic oligonucleotide
  Sense strand starting at position 2041 of SEQ ID NO: 1884417
aagugauugacaggucagu

SEQ ID NO: 2264045 - RNA, 19 nt, Artificial Sequence
  Description of Artificial Sequence: Synthetic oligonucleotide
  Antisense strand to SEQ ID NO: 2264044
acugaccugucaaucacuu

SEQ ID NO: 2264046 - RNA, 19 nt, Artificial Sequence
  Description of Artificial Sequence: Synthetic oligonucleotide
  Sense strand starting at position 2055 of SEQ ID NO: 1884417
ucaguagcccagugaauga

SEQ ID NO: 2264047 - RNA, 19 nt, Artificial Sequence
  Description of Artificial Sequence: Synthetic oligonucleotide
  Antisense strand to SEQ ID NO: 2264046
ucauucacugggcuacuga

SEQ ID NO: 2264048 - RNA, 19 nt, Artificial Sequence
  Description of Artificial Sequence: Synthetic oligonucleotide
  Sense strand starting at position 2104 of SEQ ID NO: 1884417
gucaauucucgcuuugcga

SEQ ID NO: 2264049 - RNA, 19 nt, Artificial Sequence
  Description of Artificial Sequence: Synthetic oligonucleotide
  Antisense strand to SEQ ID NO: 2264048
ucgcaaagcgagaauugac

SEQ ID NO: 2264050 - RNA, 19 nt, Artificial Sequence
  Description of Artificial Sequence: Synthetic oligonucleotide
  Sense strand starting at position 2283 of SEQ ID NO: 1884417
ugucauauugaaugaauca

SEQ ID NO: 2264051 - RNA, 19 nt, Artificial Sequence
  Description of Artificial Sequence: Synthetic oligonucleotide
  Antisense strand to SEQ ID NO: 2264050
ugauucauucaauaugaca

SEQ ID NO: 2264052 - RNA, 19 nt, Artificial Sequence
  Description of Artificial Sequence: Synthetic oligonucleotide
  Sense strand starting at position 2389 of SEQ ID NO: 1884417
agaggagucacgcagcaga

SEQ ID NO: 2264053 - RNA, 19 nt, Artificial Sequence
  Description of Artificial Sequence: Synthetic oligonucleotide
  Antisense strand to SEQ ID NO: 2264052
ucugcugcgugacuccucu

SEQ ID NO: 2264054 - RNA, 19 nt, Artificial Sequence
  Description of Artificial Sequence: Synthetic oligonucleotide
  Sense strand starting at position 2438 of SEQ ID NO: 1884417
uuuguaaccugugugaaau

SEQ ID NO: 2264055 - RNA, 19 nt, Artificial Sequence
  Description of Artificial Sequence: Synthetic oligonucleotide
  Antisense strand to SEQ ID NO: 2264054
auuucacacagguuacaaa

SEQ ID NO: 2264056 - RNA, 19 nt, Artificial Sequence
  Description of Artificial Sequence: Synthetic oligonucleotide
  Sense strand starting at position 2439 of SEQ ID NO: 1884417
uuguaaccugugugaaaug

SEQ ID NO: 2264057 - RNA, 19 nt, Artificial Sequence
  Description of Artificial Sequence: Synthetic oligonucleotide
  Antisense strand to SEQ ID NO: 2264056
cauuucacacagguuacaa

SEQ ID NO: 2264058 - RNA, 19 nt, Artificial Sequence
  Description of Artificial Sequence: Synthetic oligonucleotide
  Sense strand starting at position 2591 of SEQ ID NO: 1884417
gcuggcuuggauggugaaa

SEQ ID NO: 2264059 - RNA, 19 nt, Artificial Sequence
  Description of Artificial Sequence: Synthetic oligonucleotide
  Antisense strand to SEQ ID NO: 2264058
uuucaccauccaagccagc

SEQ ID NO: 2264060 - RNA, 19 nt, Artificial Sequence
  Description of Artificial Sequence: Synthetic oligonucleotide
  Sense strand starting at position 2801 of SEQ ID NO: 1884417
uggaaaguuugacaaagga

SEQ ID NO: 2264061 - RNA, 19 nt, Artificial Sequence
  Description of Artificial Sequence: Synthetic oligonucleotide
  Antisense strand to SEQ ID NO: 2264060
uccuuugucaaacuuucca

SEQ ID NO: 2264062 - RNA, 19 nt, Artificial Sequence
  Description of Artificial Sequence: Synthetic oligonucleotide
  Sense strand starting at position 2881 of SEQ ID NO: 1884417
gguacauaguugucacuca

SEQ ID NO: 2264063 - RNA, 19 nt, Artificial Sequence
  Description of Artificial Sequence: Synthetic oligonucleotide
  Antisense strand to SEQ ID NO: 2264062
ugagugacaacuauguacc

SEQ ID NO: 2264064 - RNA, 19 nt, Artificial Sequence
  Description of Artificial Sequence: Synthetic oligonucleotide
  Sense strand starting at position 2886 of SEQ ID NO: 1884417
auaguugucacucaguaag

SEQ ID NO: 2264065 - RNA, 19 nt, Artificial Sequence
  Description of Artificial Sequence: Synthetic oligonucleotide
  Antisense strand to SEQ ID NO: 2264064
cuuacugagugacaacuau

SEQ ID NO: 2264066 - RNA, 19 nt, Artificial Sequence
  Description of Artificial Sequence: Synthetic oligonucleotide
  Sense strand starting at position 2982 of SEQ ID NO: 1884417
ggaagugaguggagaagua

SEQ ID NO: 2264067 - RNA, 19 nt, Artificial Sequence
  Description of Artificial Sequence: Synthetic oligonucleotide
  Antisense strand to SEQ ID NO: 2264066
uacuucuccacucacuucc

SEQ ID NO: 2264068 - RNA, 19 nt, Artificial Sequence
  Description of Artificial Sequence: Synthetic oligonucleotide
  Sense strand starting at position 3077 of SEQ ID NO: 1884417
uccuccauugggugaauga

SEQ ID NO: 2264069 - RNA, 19 nt, Artificial Sequence
  Description of Artificial Sequence: Synthetic oligonucleotide
  Antisense strand to SEQ ID NO: 2264068
ucauucacccaauggagga

SEQ ID NO: 2264070 - RNA, 19 nt, Artificial Sequence
  Description of Artificial Sequence: Synthetic oligonucleotide
  Sense strand starting at position 3249 of SEQ ID NO: 1884417
aguagaauggguuguggca

SEQ ID NO: 2264071 - RNA, 19 nt, Artificial Sequence
  Description of Artificial Sequence: Synthetic oligonucleotide
  Antisense strand to SEQ ID NO: 2264070
ugccacaacccauucuacu

SEQ ID NO: 2264072 - RNA, 19 nt, Artificial Sequence
  Description of Artificial Sequence: Synthetic oligonucleotide
  Sense strand starting at position 3278 of SEQ ID NO: 1884417
cugggugaaccauguauga

SEQ ID NO: 2264073 - RNA, 19 nt, Artificial Sequence
  Description of Artificial Sequence: Synthetic oligonucleotide
  Antisense strand to SEQ ID NO: 2264072
ucauacaugguucacccag

SEQ ID NO: 2264074 - RNA, 19 nt, Artificial Sequence
  Description of Artificial Sequence: Synthetic oligonucleotide
  Sense strand starting at position 3282 of SEQ ID NO: 1884417
gugaaccauguaugauaua

SEQ ID NO: 2264075 - RNA, 19 nt, Artificial Sequence
  Description of Artificial Sequence: Synthetic oligonucleotide
  Antisense strand to SEQ ID NO: 2264074
uauaucauacaugguucac

SEQ ID NO: 2264076 - RNA, 19 nt, Artificial Sequence
  Description of Artificial Sequence: Synthetic oligonucleotide
  Sense strand starting at position 3300 of SEQ ID NO: 1884417
acauaacaguugucaugau

SEQ ID NO: 2264077 - RNA, 19 nt, Artificial Sequence
  Description of Artificial Sequence: Synthetic oligonucleotide
  Antisense strand to SEQ ID NO: 2264076
aucaugacaacuguuaugu

SEQ ID NO: 2264078 - RNA, 19 nt, Artificial Sequence
  Description of Artificial Sequence: Synthetic oligonucleotide
  Sense strand starting at position 3350 of SEQ ID NO: 1884417
cuaguugucucuccuaaga

SEQ ID NO: 2264079 - RNA, 19 nt, Artificial Sequence
  Description of Artificial Sequence: Synthetic oligonucleotide
  Antisense strand to SEQ ID NO: 2264078
ucuuaggagagacaacuag

SEQ ID NO: 2264080 - RNA, 19 nt, Artificial Sequence
  Description of Artificial Sequence: Synthetic oligonucleotide
  Sense strand starting at position 3447 of SEQ ID NO: 1884417
accacaaauuucugaggga

SEQ ID NO: 2264081 - RNA, 19 nt, Artificial Sequence
  Description of Artificial Sequence: Synthetic oligonucleotide
  Antisense strand to SEQ ID NO: 2264080
ucccucagaaauuuguggu

SEQ ID NO: 2264082 - RNA, 19 nt, Artificial Sequence
  Description of Artificial Sequence: Synthetic oligonucleotide
  Sense strand starting at position 3448 of SEQ ID NO: 1884417
ccacaaauuucugagggaa

SEQ ID NO: 2264083 - RNA, 19 nt, Artificial Sequence
  Description of Artificial Sequence: Synthetic oligonucleotide
  Antisense strand to SEQ ID NO: 2264082
uucccucagaaauuugugg

SEQ ID NO: 2264084 - RNA, 19 nt, Artificial Sequence
  Description of Artificial Sequence: Synthetic oligonucleotide
  Sense strand starting at position 3450 of SEQ ID NO: 1884417
acaaauuucugagggaaga

SEQ ID NO: 2264085 - RNA, 19 nt, Artificial Sequence
  Description of Artificial Sequence: Synthetic oligonucleotide
  Antisense strand to SEQ ID NO: 2264084
ucuucccucagaaauuugu

SEQ ID NO: 2264086 - RNA, 19 nt, Artificial Sequence
  Description of Artificial Sequence: Synthetic oligonucleotide
  Sense strand starting at position 3646 of SEQ ID NO: 1884417
uuagcaagucaucgaauga

SEQ ID NO: 2264087 - RNA, 19 nt, Artificial Sequence
  Description of Artificial Sequence: Synthetic oligonucleotide
  Antisense strand to SEQ ID NO: 2264086
ucauucgaugacuugcuaa

SEQ ID NO: 2264088 - RNA, 19 nt, Artificial Sequence
  Description of Artificial Sequence: Synthetic oligonucleotide
  Sense strand starting at position 3695 of SEQ ID NO: 1884417
gcagcucugagguagcuaa

SEQ ID NO: 2264089 - RNA, 19 nt, Artificial Sequence
  Description of Artificial Sequence: Synthetic oligonucleotide
  Antisense strand to SEQ ID NO: 2264088
uuagcuaccucagagcugc

SEQ ID NO: 2264090 - RNA, 19 nt, Artificial Sequence
  Description of Artificial Sequence: Synthetic oligonucleotide
  Sense strand starting at position 3795 of SEQ ID NO: 1884417
acaagcucucuuugagcaa

SEQ ID NO: 2264091 - RNA, 19 nt, Artificial Sequence
  Description of Artificial Sequence: Synthetic oligonucleotide
  Antisense strand to SEQ ID NO: 2264090
uugcucaaagagagcuugu

SEQ ID NO: 2264092 - RNA, 19 nt, Artificial Sequence
  Description of Artificial Sequence: Synthetic oligonucleotide
  Sense strand starting at position 3799 of SEQ ID NO: 1884417
gcucucuuugagcaacagu

SEQ ID NO: 2264093 - RNA, 19 nt, Artificial Sequence
  Description of Artificial Sequence: Synthetic oligonucleotide
  Antisense strand to SEQ ID NO: 2264092
acuguugcucaaagagagc

SEQ ID NO: 2264094 - RNA, 19 nt, Artificial Sequence
  Description of Artificial Sequence: Synthetic oligonucleotide
  Sense strand starting at position 67 of SEQ ID NO: 1884418
ccaugugcucugguugcua

SEQ ID NO: 2264095 - RNA, 19 nt, Artificial Sequence
  Description of Artificial Sequence: Synthetic oligonucleotide
  Antisense strand to SEQ ID NO: 2264094
uagcaaccagagcacaugg

SEQ ID NO: 2264096 - RNA, 19 nt, Artificial Sequence
  Description of Artificial Sequence: Synthetic oligonucleotide
  Sense strand starting at position 115 of SEQ ID NO: 1884418
auccuauccuuggucugaa

SEQ ID NO: 2264097 - RNA, 19 nt, Artificial Sequence
  Description of Artificial Sequence: Synthetic oligonucleotide
  Antisense strand to SEQ ID NO: 2264096
uucagaccaaggauaggau

SEQ ID NO: 2264098 - RNA, 19 nt, Artificial Sequence
  Description of Artificial Sequence: Synthetic oligonucleotide
  Sense strand starting at position 118 of SEQ ID NO: 1884418
cuauccuuggucugaacau

SEQ ID NO: 2264099 - RNA, 19 nt, Artificial Sequence
  Description of Artificial Sequence: Synthetic oligonucleotide
  Antisense strand to SEQ ID NO: 2264098
auguucagaccaaggauag

SEQ ID NO: 2264100 - RNA, 19 nt, Artificial Sequence
  Description of Artificial Sequence: Synthetic oligonucleotide
  Sense strand starting at position 209 of SEQ ID NO: 1884418
gaaggugacuuggucuuga

SEQ ID NO: 2264101 - RNA, 19 nt, Artificial Sequence
  Description of Artificial Sequence: Synthetic oligonucleotide
  Antisense strand to SEQ ID NO: 2264100
ucaagaccaagucaccuuc

SEQ ID NO: 2264102 - RNA, 19 nt, Artificial Sequence
  Description of Artificial Sequence: Synthetic oligonucleotide
  Sense strand starting at position 214 of SEQ ID NO: 1884418
ugacuuggucuugagggua

SEQ ID NO: 2264103 - RNA, 19 nt, Artificial Sequence
  Description of Artificial Sequence: Synthetic oligonucleotide
  Antisense strand to SEQ ID NO: 2264102
uacccucaagaccaaguca

SEQ ID NO: 2264104 - RNA, 19 nt, Artificial Sequence
  Description of Artificial Sequence: Synthetic oligonucleotide
  Sense strand starting at position 367 of SEQ ID NO: 1884418
cucucuggacugugagaaa

SEQ ID NO: 2264105 - RNA, 19 nt, Artificial Sequence
  Description of Artificial Sequence: Synthetic oligonucleotide
  Antisense strand to SEQ ID NO: 2264104
uuucucacaguccagagag

SEQ ID NO: 2264106 - RNA, 19 nt, Artificial Sequence
  Description of Artificial Sequence: Synthetic oligonucleotide
  Sense strand starting at position 460 of SEQ ID NO: 1884418
gucuuuagaacucagggua

SEQ ID NO: 2264107 - RNA, 19 nt, Artificial Sequence
  Description of Artificial Sequence: Synthetic oligonucleotide
  Antisense strand to SEQ ID NO: 2264106
uacccugaguucuaaagac

SEQ ID NO: 2264108 - RNA, 19 nt, Artificial Sequence
  Description of Artificial Sequence: Synthetic oligonucleotide
  Sense strand starting at position 492 of SEQ ID NO: 1884418
gucaaugcucaugaccauu

SEQ ID NO: 2264109 - RNA, 19 nt, Artificial Sequence
  Description of Artificial Sequence: Synthetic oligonucleotide
  Antisense strand to SEQ ID NO: 2264108
aauggucaugagcauugac

SEQ ID NO: 2264110 - RNA, 19 nt, Artificial Sequence
  Description of Artificial Sequence: Synthetic oligonucleotide
  Sense strand starting at position 621 of SEQ ID NO: 1884418
agcuuuagacccuacagau

SEQ ID NO: 2264111 - RNA, 19 nt, Artificial Sequence
  Description of Artificial Sequence: Synthetic oligonucleotide
  Antisense strand to SEQ ID NO: 2264110
aucuguagggucuaaagcu

SEQ ID NO: 2264112 - RNA, 19 nt, Artificial Sequence
  Description of Artificial Sequence: Synthetic oligonucleotide
  Sense strand starting at position 672 of SEQ ID NO: 1884418
cuggguacuagugauacua

SEQ ID NO: 2264113 - RNA, 19 nt, Artificial Sequence
  Description of Artificial Sequence: Synthetic oligonucleotide
  Antisense strand to SEQ ID NO: 2264112
uaguaucacuaguacccag

SEQ ID NO: 2264114 - RNA, 19 nt, Artificial Sequence
  Description of Artificial Sequence: Synthetic oligonucleotide
  Sense strand starting at position 684 of SEQ ID NO: 1884418
gauacuaagcugggugaua

SEQ ID NO: 2264115 - RNA, 19 nt, Artificial Sequence
  Description of Artificial Sequence: Synthetic oligonucleotide
  Antisense strand to SEQ ID NO: 2264114
uaucacccagcuuaguauc

SEQ ID NO: 2264116 - RNA, 19 nt, Artificial Sequence
  Description of Artificial Sequence: Synthetic oligonucleotide
  Sense strand starting at position 685 of SEQ ID NO: 1884418
auacuaagcugggugauaa

SEQ ID NO: 2264117 - RNA, 19 nt, Artificial Sequence
  Description of Artificial Sequence: Synthetic oligonucleotide
  Antisense strand to SEQ ID NO: 2264116
uuaucacccagcuuaguau

SEQ ID NO: 2264118 - RNA, 19 nt, Artificial Sequence
  Description of Artificial Sequence: Synthetic oligonucleotide
  Sense strand starting at position 696 of SEQ ID NO: 1884418
ggugauaaacccugcuaga

SEQ ID NO: 2264119 - RNA, 19 nt, Artificial Sequence
  Description of Artificial Sequence: Synthetic oligonucleotide
  Antisense strand to SEQ ID NO: 2264118
ucuagcaggguuuaucacc

SEQ ID NO: 2264120 - RNA, 19 nt, Artificial Sequence
  Description of Artificial Sequence: Synthetic oligonucleotide
  Sense strand starting at position 903 of SEQ ID NO: 1884418
gaaacugguggcuacuaau

SEQ ID NO: 2264121 - RNA, 19 nt, Artificial Sequence
  Description of Artificial Sequence: Synthetic oligonucleotide
  Antisense strand to SEQ ID NO: 2264120
auuaguagccaccaguuuc

SEQ ID NO: 2264122 - RNA, 19 nt, Artificial Sequence
  Description of Artificial Sequence: Synthetic oligonucleotide
  Sense strand starting at position 932 of SEQ ID NO: 1884418
gaauguguguauuuaucuu

SEQ ID NO: 2264123 - RNA, 19 nt, Artificial Sequence
  Description of Artificial Sequence: Synthetic oligonucleotide
  Antisense strand to SEQ ID NO: 2264122
aagauaaauacacacauuc

SEQ ID NO: 2264124 - RNA, 19 nt, Artificial Sequence
  Description of Artificial Sequence: Synthetic oligonucleotide
  Sense strand starting at position 986 of SEQ ID NO: 1884418
ucaugacaagucgauauca

SEQ ID NO: 2264125 - RNA, 19 nt, Artificial Sequence
  Description of Artificial Sequence: Synthetic oligonucleotide
  Antisense strand to SEQ ID NO: 2264124
ugauaucgacuugucauga

SEQ ID NO: 2264126 - RNA, 19 nt, Artificial Sequence
  Description of Artificial Sequence: Synthetic oligonucleotide
  Sense strand starting at position 1007 of SEQ ID NO: 1884418
acgaauuuguuguauuucu

SEQ ID NO: 2264127 - RNA, 19 nt, Artificial Sequence
  Description of Artificial Sequence: Synthetic oligonucleotide
  Antisense strand to SEQ ID NO: 2264126
agaaauacaacaaauucgu

SEQ ID NO: 2264128 - RNA, 19 nt, Artificial Sequence
  Description of Artificial Sequence: Synthetic oligonucleotide
  Sense strand starting at position 1021 of SEQ ID NO: 1884418
uuucuuggucagggaagaa

SEQ ID NO: 2264129 - RNA, 19 nt, Artificial Sequence
  Description of Artificial Sequence: Synthetic oligonucleotide
  Antisense strand to SEQ ID NO: 2264128
uucuucccugaccaagaaa

SEQ ID NO: 2264130 - RNA, 19 nt, Artificial Sequence
  Description of Artificial Sequence: Synthetic oligonucleotide
  Sense strand starting at position 1221 of SEQ ID NO: 1884418
guuguaacuccacaaagca

SEQ ID NO: 2264131 - RNA, 19 nt, Artificial Sequence
  Description of Artificial Sequence: Synthetic oligonucleotide
  Antisense strand to SEQ ID NO: 2264130
ugcuuuguggaguuacaac

SEQ ID NO: 2264132 - RNA, 19 nt, Artificial Sequence
  Description of Artificial Sequence: Synthetic oligonucleotide
  Sense strand starting at position 1681 of SEQ ID NO: 1884418
uugugaauuuccguugaac

SEQ ID NO: 2264133 - RNA, 19 nt, Artificial Sequence
  Description of Artificial Sequence: Synthetic oligonucleotide
  Antisense strand to SEQ ID NO: 2264132
guucaacggaaauucacaa

SEQ ID NO: 2264134 - RNA, 19 nt, Artificial Sequence
  Description of Artificial Sequence: Synthetic oligonucleotide
  Sense strand starting at position 1875 of SEQ ID NO: 1884418
uuuguuucccggagugggu

SEQ ID NO: 2264135 - RNA, 19 nt, Artificial Sequence
  Description of Artificial Sequence: Synthetic oligonucleotide
  Antisense strand to SEQ ID NO: 2264134
acccacuccgggaaacaaa

SEQ ID NO: 2264136 - RNA, 19 nt, Artificial Sequence
  Description of Artificial Sequence: Synthetic oligonucleotide
  Sense strand starting at position 1977 of SEQ ID NO: 1884418
uuucuugauggcuaaagca

SEQ ID NO: 2264137 - RNA, 19 nt, Artificial Sequence
  Description of Artificial Sequence: Synthetic oligonucleotide
  Antisense strand to SEQ ID NO: 2264136
ugcuuuagccaucaagaaa

SEQ ID NO: 2264138 - RNA, 19 nt, Artificial Sequence
  Description of Artificial Sequence: Synthetic oligonucleotide
  Sense strand starting at position 2207 of SEQ ID NO: 1884418
gcuaccuugguguagaaga

SEQ ID NO: 2264139 - RNA, 19 nt, Artificial Sequence
  Description of Artificial Sequence: Synthetic oligonucleotide
  Antisense strand to SEQ ID NO: 2264138
ucuucuacaccaagguagc

SEQ ID NO: 2264140 - RNA, 19 nt, Artificial Sequence
  Description of Artificial Sequence: Synthetic oligonucleotide
  Sense strand starting at position 2361 of SEQ ID NO: 1884418
aagggaauguuauucugac

SEQ ID NO: 2264141 - RNA, 19 nt, Artificial Sequence
  Description of Artificial Sequence: Synthetic oligonucleotide
  Antisense strand to SEQ ID NO: 2264140
gucagaauaacauucccuu

SEQ ID NO: 2264142 - RNA, 19 nt, Artificial Sequence
  Description of Artificial Sequence: Synthetic oligonucleotide
  Sense strand starting at position 2367 of SEQ ID NO: 1884418
auguuauucugacccacau

SEQ ID NO: 2264143 - RNA, 19 nt, Artificial Sequence
  Description of Artificial Sequence: Synthetic oligonucleotide
  Antisense strand to SEQ ID NO: 2264142
augugggucagaauaacau

SEQ ID NO: 2264144 - RNA, 19 nt, Artificial Sequence
  Description of Artificial Sequence: Synthetic oligonucleotide
  Sense strand starting at position 2399 of SEQ ID NO: 1884418
ggcugaagucacuacuaac

SEQ ID NO: 2264145 - RNA, 19 nt, Artificial Sequence
  Description of Artificial Sequence: Synthetic oligonucleotide
  Antisense strand to SEQ ID NO: 2264144
guuaguagugacuucagcc

SEQ ID NO: 2264146 - RNA, 19 nt, Artificial Sequence
  Description of Artificial Sequence: Synthetic oligonucleotide
  Sense strand starting at position 2698 of SEQ ID NO: 1884418
cuguccugccaagagauua

SEQ ID NO: 2264147 - RNA, 19 nt, Artificial Sequence
  Description of Artificial Sequence: Synthetic oligonucleotide
  Antisense strand to SEQ ID NO: 2264146
uaaucucuuggcaggacag

SEQ ID NO: 2264148 - RNA, 19 nt, Artificial Sequence
  Description of Artificial Sequence: Synthetic oligonucleotide
  Sense strand starting at position 3015 of SEQ ID NO: 1884418
gaaagugcagcucaacuuu

SEQ ID NO: 2264149 - RNA, 19 nt, Artificial Sequence
  Description of Artificial Sequence: Synthetic oligonucleotide
  Antisense strand to SEQ ID NO: 2264148
aaaguugagcugcacuuuc

SEQ ID NO: 2264150 - RNA, 19 nt, Artificial Sequence
  Description of Artificial Sequence: Synthetic oligonucleotide
  Sense strand starting at position 3033 of SEQ ID NO: 1884418
ugcacauaugcuuggauuu

SEQ ID NO: 2264151 - RNA, 19 nt, Artificial Sequence
  Description of Artificial Sequence: Synthetic oligonucleotide
  Antisense strand to SEQ ID NO: 2264150
aaauccaagcauaugugca

SEQ ID NO: 2264152 - RNA, 19 nt, Artificial Sequence
  Description of Artificial Sequence: Synthetic oligonucleotide
  Sense strand starting at position 3034 of SEQ ID NO: 1884418
gcacauaugcuuggauuuc

SEQ ID NO: 2264153 - RNA, 19 nt, Artificial Sequence
  Description of Artificial Sequence: Synthetic oligonucleotide
  Antisense strand to SEQ ID NO: 2264152
gaaauccaagcauaugugc

SEQ ID NO: 2264154 - RNA, 19 nt, Artificial Sequence
  Description of Artificial Sequence: Synthetic oligonucleotide
  Sense strand starting at position 3079 of SEQ ID NO: 1884418
caggguuuggccuaacaca

SEQ ID NO: 2264155 - RNA, 19 nt, Artificial Sequence
  Description of Artificial Sequence: Synthetic oligonucleotide
  Antisense strand to SEQ ID NO: 2264154
uguguuaggccaaacccug

SEQ ID NO: 2264156 - RNA, 19 nt, Artificial Sequence
  Description of Artificial Sequence: Synthetic oligonucleotide
  Sense strand starting at position 3251 of SEQ ID NO: 1884418
uuggccuuguucucauuua

SEQ ID NO: 2264157 - RNA, 19 nt, Artificial Sequence
  Description of Artificial Sequence: Synthetic oligonucleotide
  Antisense strand to SEQ ID NO: 2264156
uaaaugagaacaaggccaa

SEQ ID NO: 2264158 - RNA, 19 nt, Artificial Sequence
  Description of Artificial Sequence: Synthetic oligonucleotide
  Sense strand starting at position 3323 of SEQ ID NO: 1884418
ucagaaucucgccagauga

SEQ ID NO: 2264159 - RNA, 19 nt, Artificial Sequence
  Description of Artificial Sequence: Synthetic oligonucleotide
  Antisense strand to SEQ ID NO: 2264158
ucaucuggcgagauucuga

SEQ ID NO: 2264160 - RNA, 19 nt, Artificial Sequence
  Description of Artificial Sequence: Synthetic oligonucleotide
  Sense strand starting at position 3325 of SEQ ID NO: 1884418
agaaucucgccagaugaac

SEQ ID NO: 2264161 - RNA, 19 nt, Artificial Sequence
  Description of Artificial Sequence: Synthetic oligonucleotide
  Antisense strand to SEQ ID NO: 2264160
guucaucuggcgagauucu

SEQ ID NO: 2264162 - RNA, 19 nt, Artificial Sequence
  Description of Artificial Sequence: Synthetic oligonucleotide
  Sense strand starting at position 3500 of SEQ ID NO: 1884418
cgcucuucgguucugugaa

SEQ ID NO: 2264163 - RNA, 19 nt, Artificial Sequence
  Description of Artificial Sequence: Synthetic oligonucleotide
  Antisense strand to SEQ ID NO: 2264162
uucacagaaccgaagagcg

SEQ ID NO: 2264164 - RNA, 19 nt, Artificial Sequence
  Description of Artificial Sequence: Synthetic oligonucleotide
  Sense strand starting at position 3572 of SEQ ID NO: 1884418
ugguccuugcuuuacagaa

SEQ ID NO: 2264165 - RNA, 19 nt, Artificial Sequence
  Description of Artificial Sequence: Synthetic oligonucleotide
  Antisense strand to SEQ ID NO: 2264164
uucuguaaagcaaggacca

SEQ ID NO: 2264166 - RNA, 19 nt, Artificial Sequence
  Description of Artificial Sequence: Synthetic oligonucleotide
  Sense strand starting at position 3682 of SEQ ID NO: 1884418
uagggugagcugugaauaa

SEQ ID NO: 2264167 - RNA, 19 nt, Artificial Sequence
  Description of Artificial Sequence: Synthetic oligonucleotide
  Antisense strand to SEQ ID NO: 2264166
uuauucacagcucacccua

SEQ ID NO: 2264168 - RNA, 19 nt, Artificial Sequence
  Description of Artificial Sequence: Synthetic oligonucleotide
  Sense strand starting at position 3686 of SEQ ID NO: 1884418
gugagcugugaauaaagca

SEQ ID NO: 2264169 - RNA, 19 nt, Artificial Sequence
  Description of Artificial Sequence: Synthetic oligonucleotide
  Antisense strand to SEQ ID NO: 2264168
ugcuuuauucacagcucac

SEQ ID NO: 2264170 - RNA, 19 nt, Artificial Sequence
  Description of Artificial Sequence: Synthetic oligonucleotide
  Sense strand starting at position 3776 of SEQ ID NO: 1884418
guaaccugaagugauguaa

SEQ ID NO: 2264171 - RNA, 19 nt, Artificial Sequence
  Description of Artificial Sequence: Synthetic oligonucleotide
  Antisense strand to SEQ ID NO: 2264170
uuacaucacuucagguuac

SEQ ID NO: 2264172 - RNA, 19 nt, Artificial Sequence
  Description of Artificial Sequence: Synthetic oligonucleotide
  Sense strand starting at position 3975 of SEQ ID NO: 1884418
auaacauggugauuacagu

SEQ ID NO: 2264173 - RNA, 19 nt, Artificial Sequence
  Description of Artificial Sequence: Synthetic oligonucleotide
  Antisense strand to SEQ ID NO: 2264172
acuguaaucaccauguuau

SEQ ID NO: 2264174 - RNA, 19 nt, Artificial Sequence
  Description of Artificial Sequence: Synthetic oligonucleotide
  Sense strand starting at position 156 of SEQ ID NO: 1884419
ggaggagcuuuggagugau

SEQ ID NO: 2264175 - RNA, 19 nt, Artificial Sequence
  Description of Artificial Sequence: Synthetic oligonucleotide
  Antisense strand to SEQ ID NO: 2264174
aucacuccaaagcuccucc

SEQ ID NO: 2264176 - RNA, 19 nt, Artificial Sequence
  Description of Artificial Sequence: Synthetic oligonucleotide
  Sense strand starting at position 159 of SEQ ID NO: 1884419
ggagcuuuggagugauagg

SEQ ID NO: 2264177 - RNA, 19 nt, Artificial Sequence
  Description of Artificial Sequence: Synthetic oligonucleotide
  Antisense strand to SEQ ID NO: 2264176
ccuaucacuccaaagcucc

SEQ ID NO: 2264178 - RNA, 19 nt, Artificial Sequence
  Description of Artificial Sequence: Synthetic oligonucleotide
  Sense strand starting at position 226 of SEQ ID NO: 1884419
cgaaguugcuauuccaaag

SEQ ID NO: 2264179 - RNA, 19 nt, Artificial Sequence
  Description of Artificial Sequence: Synthetic oligonucleotide
  Antisense strand to SEQ ID NO: 2264178
cuuuggaauagcaacuucg

SEQ ID NO: 2264180 - RNA, 19 nt, Artificial Sequence
  Description of Artificial Sequence: Synthetic oligonucleotide
  Sense strand starting at position 349 of SEQ ID NO: 1884419
acuccuauuugggaagaga

SEQ ID NO: 2264181 - RNA, 19 nt, Artificial Sequence
  Description of Artificial Sequence: Synthetic oligonucleotide
  Antisense strand to SEQ ID NO: 2264180
ucucuucccaaauaggagu

SEQ ID NO: 2264182 - RNA, 19 nt, Artificial Sequence
  Description of Artificial Sequence: Synthetic oligonucleotide
  Sense strand starting at position 780 of SEQ ID NO: 1884419
ccgaaauccuaaucuuguc

SEQ ID NO: 2264183 - RNA, 19 nt, Artificial Sequence
  Description of Artificial Sequence: Synthetic oligonucleotide
  Antisense strand to SEQ ID NO: 2264182
gacaagauuaggauuucgg

SEQ ID NO: 2264184 - RNA, 19 nt, Artificial Sequence
  Description of Artificial Sequence: Synthetic oligonucleotide
  Sense strand starting at position 846 of SEQ ID NO: 1884419
gcugcuuugaccuguauug

SEQ ID NO: 2264185 - RNA, 19 nt, Artificial Sequence
  Description of Artificial Sequence: Synthetic oligonucleotide
  Antisense strand to SEQ ID NO: 2264184
caauacaggucaaagcagc

SEQ ID NO: 2264186 - RNA, 19 nt, Artificial Sequence
  Description of Artificial Sequence: Synthetic oligonucleotide
  Sense strand starting at position 856 of SEQ ID NO: 1884419
ccuguauugucuguucuga

SEQ ID NO: 2264187 - RNA, 19 nt, Artificial Sequence
  Description of Artificial Sequence: Synthetic oligonucleotide
  Antisense strand to SEQ ID NO: 2264186
ucagaacagacaauacagg

SEQ ID NO: 2264188 - RNA, 19 nt, Artificial Sequence
  Description of Artificial Sequence: Synthetic oligonucleotide
  Sense strand starting at position 1132 of SEQ ID NO: 1884419
caguucuuugugcaggagu

SEQ ID NO: 2264189 - RNA, 19 nt, Artificial Sequence
  Description of Artificial Sequence: Synthetic oligonucleotide
  Antisense strand to SEQ ID NO: 2264188
acuccugcacaaagaacug

SEQ ID NO: 2264190 - RNA, 19 nt, Artificial Sequence
  Description of Artificial Sequence: Synthetic oligonucleotide
  Sense strand starting at position 1194 of SEQ ID NO: 1884419
ggagggauuggcuguuugu

SEQ ID NO: 2264191 - RNA, 19 nt, Artificial Sequence
  Description of Artificial Sequence: Synthetic oligonucleotide
  Antisense strand to SEQ ID NO: 2264190
acaaacagccaaucccucc

SEQ ID NO: 2264192 - RNA, 19 nt, Artificial Sequence
  Description of Artificial Sequence: Synthetic oligonucleotide
  Sense strand starting at position 1203 of SEQ ID NO: 1884419
ggcuguuuguagcugaaca

SEQ ID NO: 2264193 - RNA, 19 nt, Artificial Sequence
  Description of Artificial Sequence: Synthetic oligonucleotide
  Antisense strand to SEQ ID NO: 2264192
uguucagcuacaaacagcc

SEQ ID NO: 2264194 - RNA, 19 nt, Artificial Sequence
  Description of Artificial Sequence: Synthetic oligonucleotide
  Sense strand starting at position 1402 of SEQ ID NO: 1884419
cuucgaugaguccguguga

SEQ ID NO: 2264195 - RNA, 19 nt, Artificial Sequence
  Description of Artificial Sequence: Synthetic oligonucleotide
  Antisense strand to SEQ ID NO: 2264194
ucacacggacucaucgaag

SEQ ID NO: 2264196 - RNA, 19 nt, Artificial Sequence
  Description of Artificial Sequence: Synthetic oligonucleotide
  Sense strand starting at position 1403 of SEQ ID NO: 1884419
uucgaugaguccgugugaa

SEQ ID NO: 2264197 - RNA, 19 nt, Artificial Sequence
  Description of Artificial Sequence: Synthetic oligonucleotide
  Antisense strand to SEQ ID NO: 2264196
uucacacggacucaucgaa

SEQ ID NO: 2264198 - RNA, 19 nt, Artificial Sequence
  Description of Artificial Sequence: Synthetic oligonucleotide
  Sense strand starting at position 1443 of SEQ ID NO: 1884419
gcgcgcucagggaaugauu

SEQ ID NO: 2264199 - RNA, 19 nt, Artificial Sequence
  Description of Artificial Sequence: Synthetic oligonucleotide
  Antisense strand to SEQ ID NO: 2264198
aaucauucccugagcgcgc

SEQ ID NO: 2264200 - RNA, 19 nt, Artificial Sequence
  Description of Artificial Sequence: Synthetic oligonucleotide
  Sense strand starting at position 1451 of SEQ ID NO: 1884419
agggaaugauugugagaag

SEQ ID NO: 2264201 - RNA, 19 nt, Artificial Sequence
  Description of Artificial Sequence: Synthetic oligonucleotide
  Antisense strand to SEQ ID NO: 2264200
cuucucacaaucauucccu

SEQ ID NO: 2264202 - RNA, 19 nt, Artificial Sequence
  Description of Artificial Sequence: Synthetic oligonucleotide
  Sense strand starting at position 1542 of SEQ ID NO: 1884419
ggcucucucccuggucauu

SEQ ID NO: 2264203 - RNA, 19 nt, Artificial Sequence
  Description of Artificial Sequence: Synthetic oligonucleotide
  Antisense strand to SEQ ID NO: 2264202
aaugaccagggagagagcc

SEQ ID NO: 2264204 - RNA, 19 nt, Artificial Sequence
  Description of Artificial Sequence: Synthetic oligonucleotide
  Sense strand starting at position 1724 of SEQ ID NO: 1884419
gccugucagcccugagaaa

SEQ ID NO: 2264205 - RNA, 19 nt, Artificial Sequence
  Description of Artificial Sequence: Synthetic oligonucleotide
  Antisense strand to SEQ ID NO: 2264204
uuucucagggcugacaggc

SEQ ID NO: 2264206 - RNA, 19 nt, Artificial Sequence
  Description of Artificial Sequence: Synthetic oligonucleotide
  Sense strand starting at position 2204 of SEQ ID NO: 1884419
gacucuuggcucuggaaga

SEQ ID NO: 2264207 - RNA, 19 nt, Artificial Sequence
  Description of Artificial Sequence: Synthetic oligonucleotide
  Antisense strand to SEQ ID NO: 2264206
ucuuccagagccaagaguc

SEQ ID NO: 2264208 - RNA, 19 nt, Artificial Sequence
  Description of Artificial Sequence: Synthetic oligonucleotide
  Sense strand starting at position 2232 of SEQ ID NO: 1884419
gacucugacuucuugguua

SEQ ID NO: 2264209 - RNA, 19 nt, Artificial Sequence
  Description of Artificial Sequence: Synthetic oligonucleotide
  Antisense strand to SEQ ID NO: 2264208
uaaccaagaagucagaguc

SEQ ID NO: 2264210 - RNA, 19 nt, Artificial Sequence
  Description of Artificial Sequence: Synthetic oligonucleotide
  Sense strand starting at position 2234 of SEQ ID NO: 1884419
cucugacuucuugguuacu

SEQ ID NO: 2264211 - RNA, 19 nt, Artificial Sequence
  Description of Artificial Sequence: Synthetic oligonucleotide
  Antisense strand to SEQ ID NO: 2264210
aguaaccaagaagucagag

SEQ ID NO: 2264212 - RNA, 19 nt, Artificial Sequence
  Description of Artificial Sequence: Synthetic oligonucleotide
  Sense strand starting at position 2236 of SEQ ID NO: 1884419
cugacuucuugguuacuca

SEQ ID NO: 2264213 - RNA, 19 nt, Artificial Sequence
  Description of Artificial Sequence: Synthetic oligonucleotide
  Antisense strand to SEQ ID NO: 2264212
ugaguaaccaagaagucag

SEQ ID NO: 2264214 - RNA, 19 nt, Artificial Sequence
  Description of Artificial Sequence: Synthetic oligonucleotide
  Sense strand starting at position 2326 of SEQ ID NO: 1884419
ucugauuucucugaggaaa

SEQ ID NO: 2264215 - RNA, 19 nt, Artificial Sequence
  Description of Artificial Sequence: Synthetic oligonucleotide
  Antisense strand to SEQ ID NO: 2264214
uuuccucagagaaaucaga

SEQ ID NO: 2264216 - RNA, 19 nt, Artificial Sequence
  Description of Artificial Sequence: Synthetic oligonucleotide
  Sense strand starting at position 2358 of SEQ ID NO: 1884419
ccaagaacucuugggcuuu

SEQ ID NO: 2264217 - RNA, 19 nt, Artificial Sequence
  Description of Artificial Sequence: Synthetic oligonucleotide
  Antisense strand to SEQ ID NO: 2264216
aaagcccaagaguucuugg

SEQ ID NO: 2264218 - RNA, 19 nt, Artificial Sequence
  Description of Artificial Sequence: Synthetic oligonucleotide
  Sense strand starting at position 2494 of SEQ ID NO: 1884419
ccugcuucugggugagagu

SEQ ID NO: 2264219 - RNA, 19 nt, Artificial Sequence
  Description of Artificial Sequence: Synthetic oligonucleotide
  Antisense strand to SEQ ID NO: 2264218
acucucacccagaagcagg

SEQ ID NO: 2264220 - RNA, 19 nt, Artificial Sequence
  Description of Artificial Sequence: Synthetic oligonucleotide
  Sense strand starting at position 2514 of SEQ ID NO: 1884419
ggagguaaugguugcuuga

SEQ ID NO: 2264221 - RNA, 19 nt, Artificial Sequence
  Description of Artificial Sequence: Synthetic oligonucleotide
  Antisense strand to SEQ ID NO: 2264220
ucaagcaaccauuaccucc

SEQ ID NO: 2264222 - RNA, 19 nt, Artificial Sequence
  Description of Artificial Sequence: Synthetic oligonucleotide
  Sense strand starting at position 2641 of SEQ ID NO: 1884419
ggucuuggcaaagaauguu

SEQ ID NO: 2264223 - RNA, 19 nt, Artificial Sequence
  Description of Artificial Sequence: Synthetic oligonucleotide
  Antisense strand to SEQ ID NO: 2264222
aacauucuuugccaagacc

SEQ ID NO: 2264224 - RNA, 19 nt, Artificial Sequence
  Description of Artificial Sequence: Synthetic oligonucleotide
  Sense strand starting at position 2647 of SEQ ID NO: 1884419
ggcaaagaauguucuagac

SEQ ID NO: 2264225 - RNA, 19 nt, Artificial Sequence
  Description of Artificial Sequence: Synthetic oligonucleotide
  Antisense strand to SEQ ID NO: 2264224
gucuagaacauucuuugcc

SEQ ID NO: 2264226 - RNA, 19 nt, Artificial Sequence
  Description of Artificial Sequence: Synthetic oligonucleotide
  Sense strand starting at position 2661 of SEQ ID NO: 1884419
uagaccaaggguugucaaa

SEQ ID NO: 2264227 - RNA, 19 nt, Artificial Sequence
  Description of Artificial Sequence: Synthetic oligonucleotide
  Antisense strand to SEQ ID NO: 2264226
uuugacaacccuuggucua

SEQ ID NO: 2264228 - RNA, 19 nt, Artificial Sequence
  Description of Artificial Sequence: Synthetic oligonucleotide
  Sense strand starting at position 2663 of SEQ ID NO: 1884419
gaccaaggguugucaaacu

SEQ ID NO: 2264229 - RNA, 19 nt, Artificial Sequence
  Description of Artificial Sequence: Synthetic oligonucleotide
  Antisense strand to SEQ ID NO: 2264228
aguuugacaacccuugguc

SEQ ID NO: 2264230 - RNA, 19 nt, Artificial Sequence
  Description of Artificial Sequence: Synthetic oligonucleotide
  Sense strand starting at position 2798 of SEQ ID NO: 1884419
gagaccauguguccugcaa

SEQ ID NO: 2264231 - RNA, 19 nt, Artificial Sequence
  Description of Artificial Sequence: Synthetic oligonucleotide
  Antisense strand to SEQ ID NO: 2264230
uugcaggacacauggucuc

SEQ ID NO: 2264232 - RNA, 19 nt, Artificial Sequence
  Description of Artificial Sequence: Synthetic oligonucleotide
  Sense strand starting at position 2828 of SEQ ID NO: 1884419
uguucugucuuauccuuua

SEQ ID NO: 2264233 - RNA, 19 nt, Artificial Sequence
  Description of Artificial Sequence: Synthetic oligonucleotide
  Antisense strand to SEQ ID NO: 2264232
uaaaggauaagacagaaca

SEQ ID NO: 2264234 - RNA, 19 nt, Artificial Sequence
  Description of Artificial Sequence: Synthetic oligonucleotide
  Sense strand starting at position 2917 of SEQ ID NO: 1884419
cagagaggugucuggagua

SEQ ID NO: 2264235 - RNA, 19 nt, Artificial Sequence
  Description of Artificial Sequence: Synthetic oligonucleotide
  Antisense strand to SEQ ID NO: 2264234
uacuccagacaccucucug

SEQ ID NO: 2264236 - RNA, 19 nt, Artificial Sequence
  Description of Artificial Sequence: Synthetic oligonucleotide
  Sense strand starting at position 2966 of SEQ ID NO: 1884419
ugugacaagugucuaggau

SEQ ID NO: 2264237 - RNA, 19 nt, Artificial Sequence
  Description of Artificial Sequence: Synthetic oligonucleotide
  Antisense strand to SEQ ID NO: 2264236
auccuagacacuugucaca

SEQ ID NO: 2264238 - RNA, 19 nt, Artificial Sequence
  Description of Artificial Sequence: Synthetic oligonucleotide
  Sense strand starting at position 2967 of SEQ ID NO: 1884419
gugacaagugucuaggaug

SEQ ID NO: 2264239 - RNA, 19 nt, Artificial Sequence
  Description of Artificial Sequence: Synthetic oligonucleotide
  Antisense strand to SEQ ID NO: 2264238
cauccuagacacuugucac

SEQ ID NO: 2264240 - RNA, 19 nt, Artificial Sequence
  Description of Artificial Sequence: Synthetic oligonucleotide
  Sense strand starting at position 3267 of SEQ ID NO: 1884419
gaagaauggcguggugagu

SEQ ID NO: 2264241 - RNA, 19 nt, Artificial Sequence
  Description of Artificial Sequence: Synthetic oligonucleotide
  Antisense strand to SEQ ID NO: 2264240
acucaccacgccauucuuc

SEQ ID NO: 2264242 - RNA, 19 nt, Artificial Sequence
  Description of Artificial Sequence: Synthetic oligonucleotide
  Sense strand starting at position 3328 of SEQ ID NO: 1884419
cugugaguccugggccaau

SEQ ID NO: 2264243 - RNA, 19 nt, Artificial Sequence
  Description of Artificial Sequence: Synthetic oligonucleotide
  Antisense strand to SEQ ID NO: 2264242
auuggcccaggacucacag

SEQ ID NO: 2264244 - RNA, 19 nt, Artificial Sequence
  Description of Artificial Sequence: Synthetic oligonucleotide
  Sense strand starting at position 3376 of SEQ ID NO: 1884419
ugcccuaugccugguagau

SEQ ID NO: 2264245 - RNA, 19 nt, Artificial Sequence
  Description of Artificial Sequence: Synthetic oligonucleotide
  Antisense strand to SEQ ID NO: 2264244
aucuaccaggcauagggca

SEQ ID NO: 2264246 - RNA, 19 nt, Artificial Sequence
  Description of Artificial Sequence: Synthetic oligonucleotide
  Sense strand starting at position 3388 of SEQ ID NO: 1884419
gguagauucugagcaagcu

SEQ ID NO: 2264247 - RNA, 19 nt, Artificial Sequence
  Description of Artificial Sequence: Synthetic oligonucleotide
  Antisense strand to SEQ ID NO: 2264246
agcuugcucagaaucuacc

SEQ ID NO: 2264248 - RNA, 19 nt, Artificial Sequence
  Description of Artificial Sequence: Synthetic oligonucleotide
  Sense strand starting at position 3810 of SEQ ID NO: 1884419
cuuggagucuuguuuauac

SEQ ID NO: 2264249 - RNA, 19 nt, Artificial Sequence
  Description of Artificial Sequence: Synthetic oligonucleotide
  Antisense strand to SEQ ID NO: 2264248
guauaaacaagacuccaag

SEQ ID NO: 2264250 - RNA, 19 nt, Artificial Sequence
  Description of Artificial Sequence: Synthetic oligonucleotide
  Sense strand starting at position 3812 of SEQ ID NO: 1884419
uggagucuuguuuauacgu

SEQ ID NO: 2264251 - RNA, 19 nt, Artificial Sequence
  Description of Artificial Sequence: Synthetic oligonucleotide
  Antisense strand to SEQ ID NO: 2264250
acguauaaacaagacucca

SEQ ID NO: 2264252 - RNA, 19 nt, Artificial Sequence
  Description of Artificial Sequence: Synthetic oligonucleotide
  Sense strand starting at position 3821 of SEQ ID NO: 1884419
guuuauacguucuugaugu

SEQ ID NO: 2264253 - RNA, 19 nt, Artificial Sequence
  Description of Artificial Sequence: Synthetic oligonucleotide
  Antisense strand to SEQ ID NO: 2264252
acaucaagaacguauaaac

SEQ ID NO: 2264254 - RNA, 19 nt, Artificial Sequence
  Description of Artificial Sequence: Synthetic oligonucleotide
  Sense strand starting at position 1197 of SEQ ID NO: 1884420
gagggcucauccugggaca

SEQ ID NO: 2264255 - RNA, 19 nt, Artificial Sequence
  Description of Artificial Sequence: Synthetic oligonucleotide
  Antisense strand to SEQ ID NO: 2264254
ugucccaggaugagcccuc

SEQ ID NO: 2264256 - RNA, 19 nt, Artificial Sequence
  Description of Artificial Sequence: Synthetic oligonucleotide
  Sense strand starting at position 1198 of SEQ ID NO: 1884420
agggcucauccugggacaa

SEQ ID NO: 2264257 - RNA, 19 nt, Artificial Sequence
  Description of Artificial Sequence: Synthetic oligonucleotide
  Antisense strand to SEQ ID NO: 2264256
uugucccaggaugagcccu

SEQ ID NO: 2264258 - RNA, 19 nt, Artificial Sequence
  Description of Artificial Sequence: Synthetic oligonucleotide
  Sense strand starting at position 1269 of SEQ ID NO: 1884420
aggcguggucccaggguaa

SEQ ID NO: 2264259 - RNA, 19 nt, Artificial Sequence
  Description of Artificial Sequence: Synthetic oligonucleotide
  Antisense strand to SEQ ID NO: 2264258
uuacccugggaccacgccu

SEQ ID NO: 2264260 - RNA, 19 nt, Artificial Sequence
  Description of Artificial Sequence: Synthetic oligonucleotide
  Sense strand starting at position 1270 of SEQ ID NO: 1884420
ggcguggucccaggguaaa

SEQ ID NO: 2264261 - RNA, 19 nt, Artificial Sequence
  Description of Artificial Sequence: Synthetic oligonucleotide
  Antisense strand to SEQ ID NO: 2264260
uuuacccugggaccacgcc

SEQ ID NO: 2264262 - RNA, 19 nt, Artificial Sequence
  Description of Artificial Sequence: Synthetic oligonucleotide
  Sense strand starting at position 2312 of SEQ ID NO: 1884420
ucuccagacucuugggaaa

SEQ ID NO: 2264263 - RNA, 19 nt, Artificial Sequence
  Description of Artificial Sequence: Synthetic oligonucleotide
  Antisense strand to SEQ ID NO: 2264262
uuucccaagagucuggaga

SEQ ID NO: 2264264 - RNA, 19 nt, Artificial Sequence
  Description of Artificial Sequence: Synthetic oligonucleotide
  Sense strand starting at position 2314 of SEQ ID NO: 1884420
uccagacucuugggaaagu

SEQ ID NO: 2264265 - RNA, 19 nt, Artificial Sequence
  Description of Artificial Sequence: Synthetic oligonucleotide
  Antisense strand to SEQ ID NO: 2264264
acuuucccaagagucugga

SEQ ID NO: 2264266 - RNA, 19 nt, Artificial Sequence
  Description of Artificial Sequence: Synthetic oligonucleotide
  Sense strand starting at position 2323 of SEQ ID NO: 1884420
uugggaaagugucacuuaa

SEQ ID NO: 2264267 - RNA, 19 nt, Artificial Sequence
  Description of Artificial Sequence: Synthetic oligonucleotide
  Antisense strand to SEQ ID NO: 2264266
uuaagugacacuuucccaa

SEQ ID NO: 2264268 - RNA, 19 nt, Artificial Sequence
  Description of Artificial Sequence: Synthetic oligonucleotide
  Sense strand starting at position 2351 of SEQ ID NO: 1884420
gggucugguguuugcuuua

SEQ ID NO: 2264269 - RNA, 19 nt, Artificial Sequence
  Description of Artificial Sequence: Synthetic oligonucleotide
  Antisense strand to SEQ ID NO: 2264268
uaaagcaaacaccagaccc

SEQ ID NO: 2264270 - RNA, 19 nt, Artificial Sequence
  Description of Artificial Sequence: Synthetic oligonucleotide
  Sense strand starting at position 2356 of SEQ ID NO: 1884420
ugguguuugcuuuauucca

SEQ ID NO: 2264271 - RNA, 19 nt, Artificial Sequence
  Description of Artificial Sequence: Synthetic oligonucleotide
  Antisense strand to SEQ ID NO: 2264270
uggaauaaagcaaacacca

SEQ ID NO: 2264272 - RNA, 19 nt, Artificial Sequence
  Description of Artificial Sequence: Synthetic oligonucleotide
  Sense strand starting at position 2358 of SEQ ID NO: 1884420
guguuugcuuuauuccaag

SEQ ID NO: 2264273 - RNA, 19 nt, Artificial Sequence
  Description of Artificial Sequence: Synthetic oligonucleotide
  Antisense strand to SEQ ID NO: 2264272
cuuggaauaaagcaaacac

SEQ ID NO: 2264274 - RNA, 19 nt, Artificial Sequence
  Description of Artificial Sequence: Synthetic oligonucleotide
  Sense strand starting at position 2361 of SEQ ID NO: 1884420
uuugcuuuauuccaaggaa

SEQ ID NO: 2264275 - RNA, 19 nt, Artificial Sequence
  Description of Artificial Sequence: Synthetic oligonucleotide
  Antisense strand to SEQ ID NO: 2264274
uuccuuggaauaaagcaaa

SEQ ID NO: 2264276 - RNA, 19 nt, Artificial Sequence
  Description of Artificial Sequence: Synthetic oligonucleotide
  Sense strand starting at position 2364 of SEQ ID NO: 1884420
gcuuuauuccaaggaaagg

SEQ ID NO: 2264277 - RNA, 19 nt, Artificial Sequence
  Description of Artificial Sequence: Synthetic oligonucleotide
  Antisense strand to SEQ ID NO: 2264276
ccuuuccuuggaauaaagc

SEQ ID NO: 2264278 - RNA, 19 nt, Artificial Sequence
  Description of Artificial Sequence: Synthetic oligonucleotide
  Sense strand starting at position 2610 of SEQ ID NO: 1884420
ugcacucacacggauguua

SEQ ID NO: 2264279 - RNA, 19 nt, Artificial Sequence
  Description of Artificial Sequence: Synthetic oligonucleotide
  Antisense strand to SEQ ID NO: 2264278
uaacauccgugugagugca

SEQ ID NO: 2264280 - RNA, 19 nt, Artificial Sequence
  Description of Artificial Sequence: Synthetic oligonucleotide
  Sense strand starting at position 2623 of SEQ ID NO: 1884420
auguuaacagucuggaaga

SEQ ID NO: 2264281 - RNA, 19 nt, Artificial Sequence
  Description of Artificial Sequence: Synthetic oligonucleotide
  Antisense strand to SEQ ID NO: 2264280
ucuuccagacuguuaacau

SEQ ID NO: 2264282 - RNA, 19 nt, Artificial Sequence
  Description of Artificial Sequence: Synthetic oligonucleotide
  Sense strand starting at position 2624 of SEQ ID NO: 1884420
uguuaacagucuggaagaa

SEQ ID NO: 2264283 - RNA, 19 nt, Artificial Sequence
  Description of Artificial Sequence: Synthetic oligonucleotide
  Antisense strand to SEQ ID NO: 2264282
uucuuccagacuguuaaca

SEQ ID NO: 2264284 - RNA, 19 nt, Artificial Sequence
  Description of Artificial Sequence: Synthetic oligonucleotide
  Sense strand starting at position 2642 of SEQ ID NO: 1884420
aacugaccuggcugugaau

SEQ ID NO: 2264285 - RNA, 19 nt, Artificial Sequence
  Description of Artificial Sequence: Synthetic oligonucleotide
  Antisense strand to SEQ ID NO: 2264284
auucacagccaggucaguu

SEQ ID NO: 2264286 - RNA, 19 nt, Artificial Sequence
  Description of Artificial Sequence: Synthetic oligonucleotide
  Sense strand starting at position 2645 of SEQ ID NO: 1884420
ugaccuggcugugaauaga

SEQ ID NO: 2264287 - RNA, 19 nt, Artificial Sequence
  Description of Artificial Sequence: Synthetic oligonucleotide
  Antisense strand to SEQ ID NO: 2264286
ucuauucacagccagguca

SEQ ID NO: 2264288 - RNA, 19 nt, Artificial Sequence
  Description of Artificial Sequence: Synthetic oligonucleotide
  Sense strand starting at position 2815 of SEQ ID NO: 1884420
guguuaagugccucagugu

SEQ ID NO: 2264289 - RNA, 19 nt, Artificial Sequence
  Description of Artificial Sequence: Synthetic oligonucleotide
  Antisense strand to SEQ ID NO: 2264288
acacugaggcacuuaacac

SEQ ID NO: 2264290 - RNA, 19 nt, Artificial Sequence
  Description of Artificial Sequence: Synthetic oligonucleotide
  Sense strand starting at position 2843 of SEQ ID NO: 1884420
cggcaucaccauugaaaug

SEQ ID NO: 2264291 - RNA, 19 nt, Artificial Sequence
  Description of Artificial Sequence: Synthetic oligonucleotide
  Antisense strand to SEQ ID NO: 2264290
cauuucaauggugaugccg

SEQ ID NO: 2264292 - RNA, 19 nt, Artificial Sequence
  Description of Artificial Sequence: Synthetic oligonucleotide
  Sense strand starting at position 2853 of SEQ ID NO: 1884420
auugaaaugcuguaucaga

SEQ ID NO: 2264293 - RNA, 19 nt, Artificial Sequence
  Description of Artificial Sequence: Synthetic oligonucleotide
  Antisense strand to SEQ ID NO: 2264292
ucugauacagcauuucaau

SEQ ID NO: 2264294 - RNA, 19 nt, Artificial Sequence
  Description of Artificial Sequence: Synthetic oligonucleotide
  Sense strand starting at position 3008 of SEQ ID NO: 1884420
ugccacagagacuguuaua

SEQ ID NO: 2264295 - RNA, 19 nt, Artificial Sequence
  Description of Artificial Sequence: Synthetic oligonucleotide
  Antisense strand to SEQ ID NO: 2264294
uauaacagucucuguggca

SEQ ID NO: 2264296 - RNA, 19 nt, Artificial Sequence
  Description of Artificial Sequence: Synthetic oligonucleotide
  Sense strand starting at position 3018 of SEQ ID NO: 1884420
acuguuauagcccacaaag

SEQ ID NO: 2264297 - RNA, 19 nt, Artificial Sequence
  Description of Artificial Sequence: Synthetic oligonucleotide
  Antisense strand to SEQ ID NO: 2264296
cuuugugggcuauaacagu

SEQ ID NO: 2264298 - RNA, 19 nt, Artificial Sequence
  Description of Artificial Sequence: Synthetic oligonucleotide
  Sense strand starting at position 3268 of SEQ ID NO: 1884420
gguugaugaguggguacaa

SEQ ID NO: 2264299 - RNA, 19 nt, Artificial Sequence
  Description of Artificial Sequence: Synthetic oligonucleotide
  Antisense strand to SEQ ID NO: 2264298
uuguacccacucaucaacc

SEQ ID NO: 2264300 - RNA, 19 nt, Artificial Sequence
  Description of Artificial Sequence: Synthetic oligonucleotide
  Sense strand starting at position 3269 of SEQ ID NO: 1884420
guugaugaguggguacaaa

SEQ ID NO: 2264301 - RNA, 19 nt, Artificial Sequence
  Description of Artificial Sequence: Synthetic oligonucleotide
  Antisense strand to SEQ ID NO: 2264300
uuuguacccacucaucaac

SEQ ID NO: 2264302 - RNA, 19 nt, Artificial Sequence
  Description of Artificial Sequence: Synthetic oligonucleotide
  Sense strand starting at position 3304 of SEQ ID NO: 1884420
cgaaauaacaucugguguu

SEQ ID NO: 2264303 - RNA, 19 nt, Artificial Sequence
  Description of Artificial Sequence: Synthetic oligonucleotide
  Antisense strand to SEQ ID NO: 2264302
aacaccagauguuauuucg

SEQ ID NO: 2264304 - RNA, 19 nt, Artificial Sequence
  Description of Artificial Sequence: Synthetic oligonucleotide
  Sense strand starting at position 3305 of SEQ ID NO: 1884420
gaaauaacaucugguguuc

SEQ ID NO: 2264305 - RNA, 19 nt, Artificial Sequence
  Description of Artificial Sequence: Synthetic oligonucleotide
  Antisense strand to SEQ ID NO: 2264304
gaacaccagauguuauuuc

SEQ ID NO: 2264306 - RNA, 19 nt, Artificial Sequence
  Description of Artificial Sequence: Synthetic oligonucleotide
  Sense strand starting at position 3327 of SEQ ID NO: 1884420
agaucaguagggugacauu

SEQ ID NO: 2264307 - RNA, 19 nt, Artificial Sequence
  Description of Artificial Sequence: Synthetic oligonucleotide
  Antisense strand to SEQ ID NO: 2264306
aaugucacccuacugaucu

SEQ ID NO: 2264308 - RNA, 19 nt, Artificial Sequence
  Description of Artificial Sequence: Synthetic oligonucleotide
  Sense strand starting at position 3330 of SEQ ID NO: 1884420
ucaguagggugacauuaau

SEQ ID NO: 2264309 - RNA, 19 nt, Artificial Sequence
  Description of Artificial Sequence: Synthetic oligonucleotide
  Antisense strand to SEQ ID NO: 2264308
auuaaugucacccuacuga

SEQ ID NO: 2264310 - RNA, 19 nt, Artificial Sequence
  Description of Artificial Sequence: Synthetic oligonucleotide
  Sense strand starting at position 3336 of SEQ ID NO: 1884420
gggugacauuaaucgauug

SEQ ID NO: 2264311 - RNA, 19 nt, Artificial Sequence
  Description of Artificial Sequence: Synthetic oligonucleotide
  Antisense strand to SEQ ID NO: 2264310
caaucgauuaaugucaccc

SEQ ID NO: 2264312 - RNA, 19 nt, Artificial Sequence
  Description of Artificial Sequence: Synthetic oligonucleotide
  Sense strand starting at position 3337 of SEQ ID NO: 1884420
ggugacauuaaucgauugu

SEQ ID NO: 2264313 - RNA, 19 nt, Artificial Sequence
  Description of Artificial Sequence: Synthetic oligonucleotide
  Antisense strand to SEQ ID NO: 2264312
acaaucgauuaaugucacc

SEQ ID NO: 2264314 - RNA, 19 nt, Artificial Sequence
  Description of Artificial Sequence: Synthetic oligonucleotide
  Sense strand starting at position 3338 of SEQ ID NO: 1884420
gugacauuaaucgauugua

SEQ ID NO: 2264315 - RNA, 19 nt, Artificial Sequence
  Description of Artificial Sequence: Synthetic oligonucleotide
  Antisense strand to SEQ ID NO: 2264314
uacaaucgauuaaugucac

SEQ ID NO: 2264316 - RNA, 19 nt, Artificial Sequence
  Description of Artificial Sequence: Synthetic oligonucleotide
  Sense strand starting at position 3341 of SEQ ID NO: 1884420
acauuaaucgauuguacac

SEQ ID NO: 2264317 - RNA, 19 nt, Artificial Sequence
  Description of Artificial Sequence: Synthetic oligonucleotide
  Antisense strand to SEQ ID NO: 2264316
guguacaaucgauuaaugu

SEQ ID NO: 2264318 - RNA, 19 nt, Artificial Sequence
  Description of Artificial Sequence: Synthetic oligonucleotide
  Sense strand starting at position 3384 of SEQ ID NO: 1884420
uccuaauguuccuggcaca

SEQ ID NO: 2264319 - RNA, 19 nt, Artificial Sequence
  Description of Artificial Sequence: Synthetic oligonucleotide
  Antisense strand to SEQ ID NO: 2264318
ugugccaggaacauuagga

SEQ ID NO: 2264320 - RNA, 19 nt, Artificial Sequence
  Description of Artificial Sequence: Synthetic oligonucleotide
  Sense strand starting at position 3385 of SEQ ID NO: 1884420
ccuaauguuccuggcacaa

SEQ ID NO: 2264321 - RNA, 19 nt, Artificial Sequence
  Description of Artificial Sequence: Synthetic oligonucleotide
  Antisense strand to SEQ ID NO: 2264320
uugugccaggaacauuagg

SEQ ID NO: 2264322 - RNA, 19 nt, Artificial Sequence
  Description of Artificial Sequence: Synthetic oligonucleotide
  Sense strand starting at position 3445 of SEQ ID NO: 1884420
cugauuugauuauaggaau

SEQ ID NO: 2264323 - RNA, 19 nt, Artificial Sequence
  Description of Artificial Sequence: Synthetic oligonucleotide
  Antisense strand to SEQ ID NO: 2264322
auuccuauaaucaaaucag

SEQ ID NO: 2264324 - RNA, 19 nt, Artificial Sequence
  Description of Artificial Sequence: Synthetic oligonucleotide
  Sense strand starting at position 3494 of SEQ ID NO: 1884420
agauacagcuaguguauuu

SEQ ID NO: 2264325 - RNA, 19 nt, Artificial Sequence
  Description of Artificial Sequence: Synthetic oligonucleotide
  Antisense strand to SEQ ID NO: 2264324
aaauacacuagcuguaucu

SEQ ID NO: 2264326 - RNA, 19 nt, Artificial Sequence
  Description of Artificial Sequence: Synthetic oligonucleotide
  Sense strand starting at position 3862 of SEQ ID NO: 1884420
agaaguguggaugguaaga

SEQ ID NO: 2264327 - RNA, 19 nt, Artificial Sequence
  Description of Artificial Sequence: Synthetic oligonucleotide
  Antisense strand to SEQ ID NO: 2264326
ucuuaccauccacacuucu

SEQ ID NO: 2264328 - RNA, 19 nt, Artificial Sequence
  Description of Artificial Sequence: Synthetic oligonucleotide
  Sense strand starting at position 3864 of SEQ ID NO: 1884420
aaguguggaugguaagaaa

SEQ ID NO: 2264329 - RNA, 19 nt, Artificial Sequence
  Description of Artificial Sequence: Synthetic oligonucleotide
  Antisense strand to SEQ ID NO: 2264328
uuucuuaccauccacacuu

SEQ ID NO: 2264330 - RNA, 19 nt, Artificial Sequence
  Description of Artificial Sequence: Synthetic oligonucleotide
  Sense strand starting at position 85 of SEQ ID NO: 1884421
ccauuugaugcccggugaa

SEQ ID NO: 2264331 - RNA, 19 nt, Artificial Sequence
  Description of Artificial Sequence: Synthetic oligonucleotide
  Antisense strand to SEQ ID NO: 2264330
uucaccgggcaucaaaugg

SEQ ID NO: 2264332 - RNA, 19 nt, Artificial Sequence
  Description of Artificial Sequence: Synthetic oligonucleotide
  Sense strand starting at position 88 of SEQ ID NO: 1884421
uuugaugcccggugaacau

SEQ ID NO: 2264333 - RNA, 19 nt, Artificial Sequence
  Description of Artificial Sequence: Synthetic oligonucleotide
  Antisense strand to SEQ ID NO: 2264332
auguucaccgggcaucaaa

SEQ ID NO: 2264334 - RNA, 19 nt, Artificial Sequence
  Description of Artificial Sequence: Synthetic oligonucleotide
  Sense strand starting at position 97 of SEQ ID NO: 1884421
cggugaacauucuauaccu

SEQ ID NO: 2264335 - RNA, 19 nt, Artificial Sequence
  Description of Artificial Sequence: Synthetic oligonucleotide
  Antisense strand to SEQ ID NO: 2264334
agguauagaauguucaccg

SEQ ID NO: 2264336 - RNA, 19 nt, Artificial Sequence
  Description of Artificial Sequence: Synthetic oligonucleotide
  Sense strand starting at position 229 of SEQ ID NO: 1884421
augauaaagguuuguuucu

SEQ ID NO: 2264337 - RNA, 19 nt, Artificial Sequence
  Description of Artificial Sequence: Synthetic oligonucleotide
  Antisense strand to SEQ ID NO: 2264336
agaaacaaaccuuuaucau

SEQ ID NO: 2264338 - RNA, 19 nt, Artificial Sequence
  Description of Artificial Sequence: Synthetic oligonucleotide
  Sense strand starting at position 231 of SEQ ID NO: 1884421
gauaaagguuuguuucuca

SEQ ID NO: 2264339 - RNA, 19 nt, Artificial Sequence
  Description of Artificial Sequence: Synthetic oligonucleotide
  Antisense strand to SEQ ID NO: 2264338
ugagaaacaaaccuuuauc

SEQ ID NO: 2264340 - RNA, 19 nt, Artificial Sequence
  Description of Artificial Sequence: Synthetic oligonucleotide
  Sense strand starting at position 430 of SEQ ID NO: 1884421
agguauauuuaagaugaug

SEQ ID NO: 2264341 - RNA, 19 nt, Artificial Sequence
  Description of Artificial Sequence: Synthetic oligonucleotide
  Antisense strand to SEQ ID NO: 2264340
caucaucuuaaauauaccu

SEQ ID NO: 2264342 - RNA, 19 nt, Artificial Sequence
  Description of Artificial Sequence: Synthetic oligonucleotide
  Sense strand starting at position 456 of SEQ ID NO: 1884421
acccaauggucuuggguca

SEQ ID NO: 2264343 - RNA, 19 nt, Artificial Sequence
  Description of Artificial Sequence: Synthetic oligonucleotide
  Antisense strand to SEQ ID NO: 2264342
ugacccaagaccauugggu

SEQ ID NO: 2264344 - RNA, 19 nt, Artificial Sequence
  Description of Artificial Sequence: Synthetic oligonucleotide
  Sense strand starting at position 457 of SEQ ID NO: 1884421
cccaauggucuugggucaa

SEQ ID NO: 2264345 - RNA, 19 nt, Artificial Sequence
  Description of Artificial Sequence: Synthetic oligonucleotide
  Antisense strand to SEQ ID NO: 2264344
uugacccaagaccauuggg

SEQ ID NO: 2264346 - RNA, 19 nt, Artificial Sequence
  Description of Artificial Sequence: Synthetic oligonucleotide
  Sense strand starting at position 477 of SEQ ID NO: 1884421
uacaguuuaugacugugua

SEQ ID NO: 2264347 - RNA, 19 nt, Artificial Sequence
  Description of Artificial Sequence: Synthetic oligonucleotide
  Antisense strand to SEQ ID NO: 2264346
uacacagucauaaacugua

SEQ ID NO: 2264348 - RNA, 19 nt, Artificial Sequence
  Description of Artificial Sequence: Synthetic oligonucleotide
  Sense strand starting at position 480 of SEQ ID NO: 1884421
aguuuaugacuguguaucu

SEQ ID NO: 2264349 - RNA, 19 nt, Artificial Sequence
  Description of Artificial Sequence: Synthetic oligonucleotide
  Antisense strand to SEQ ID NO: 2264348
agauacacagucauaaacu

SEQ ID NO: 2264350 - RNA, 19 nt, Artificial Sequence
  Description of Artificial Sequence: Synthetic oligonucleotide
  Sense strand starting at position 481 of SEQ ID NO: 1884421
guuuaugacuguguaucua

SEQ ID NO: 2264351 - RNA, 19 nt, Artificial Sequence
  Description of Artificial Sequence: Synthetic oligonucleotide
  Antisense strand to SEQ ID NO: 2264350
uagauacacagucauaaac

SEQ ID NO: 2264352 - RNA, 19 nt, Artificial Sequence
  Description of Artificial Sequence: Synthetic oligonucleotide
  Sense strand starting at position 647 of SEQ ID NO: 1884421
gauguagcacacuguauaa

SEQ ID NO: 2264353 - RNA, 19 nt, Artificial Sequence
  Description of Artificial Sequence: Synthetic oligonucleotide
  Antisense strand to SEQ ID NO: 2264352
uuauacagugugcuacauc

SEQ ID NO: 2264354 - RNA, 19 nt, Artificial Sequence
  Description of Artificial Sequence: Synthetic oligonucleotide
  Sense strand starting at position 658 of SEQ ID NO: 1884421
cuguauaagcuggagcuaa

SEQ ID NO: 2264355 - RNA, 19 nt, Artificial Sequence
  Description of Artificial Sequence: Synthetic oligonucleotide
  Antisense strand to SEQ ID NO: 2264354
uuagcuccagcuuauacag

SEQ ID NO: 2264356 - RNA, 19 nt, Artificial Sequence
  Description of Artificial Sequence: Synthetic oligonucleotide
  Sense strand starting at position 677 of SEQ ID NO: 1884421
aggaaacuuuccuuaaagu

SEQ ID NO: 2264357 - RNA, 19 nt, Artificial Sequence
  Description of Artificial Sequence: Synthetic oligonucleotide
  Antisense strand to SEQ ID NO: 2264356
acuuuaaggaaaguuuccu

SEQ ID NO: 2264358 - RNA, 19 nt, Artificial Sequence
  Description of Artificial Sequence: Synthetic oligonucleotide
  Sense strand starting at position 729 of SEQ ID NO: 1884421
gacaaaucgaaguguggca

SEQ ID NO: 2264359 - RNA, 19 nt, Artificial Sequence
  Description of Artificial Sequence: Synthetic oligonucleotide
  Antisense strand to SEQ ID NO: 2264358
ugccacacuucgauuuguc

SEQ ID NO: 2264360 - RNA, 19 nt, Artificial Sequence
  Description of Artificial Sequence: Synthetic oligonucleotide
  Sense strand starting at position 808 of SEQ ID NO: 1884421
cuuugucacgcugaggaua

SEQ ID NO: 2264361 - RNA, 19 nt, Artificial Sequence
  Description of Artificial Sequence: Synthetic oligonucleotide
  Antisense strand to SEQ ID NO: 2264360
uauccucagcgugacaaag

SEQ ID NO: 2264362 - RNA, 19 nt, Artificial Sequence
  Description of Artificial Sequence: Synthetic oligonucleotide
  Sense strand starting at position 912 of SEQ ID NO: 1884421
uauuuaguaucguccuuga

SEQ ID NO: 2264363 - RNA, 19 nt, Artificial Sequence
  Description of Artificial Sequence: Synthetic oligonucleotide
  Antisense strand to SEQ ID NO: 2264362
ucaaggacgauacuaaaua

SEQ ID NO: 2264364 - RNA, 19 nt, Artificial Sequence
  Description of Artificial Sequence: Synthetic oligonucleotide
  Sense strand starting at position 915 of SEQ ID NO: 1884421
uuaguaucguccuugauac

SEQ ID NO: 2264365 - RNA, 19 nt, Artificial Sequence
  Description of Artificial Sequence: Synthetic oligonucleotide
  Antisense strand to SEQ ID NO: 2264364
guaucaaggacgauacuaa

SEQ ID NO: 2264366 - RNA, 19 nt, Artificial Sequence
  Description of Artificial Sequence: Synthetic oligonucleotide
  Sense strand starting at position 916 of SEQ ID NO: 1884421
uaguaucguccuugauaca

SEQ ID NO: 2264367 - RNA, 19 nt, Artificial Sequence
  Description of Artificial Sequence: Synthetic oligonucleotide
  Antisense strand to SEQ ID NO: 2264366
uguaucaaggacgauacua

SEQ ID NO: 2264368 - RNA, 19 nt, Artificial Sequence
  Description of Artificial Sequence: Synthetic oligonucleotide
  Sense strand starting at position 917 of SEQ ID NO: 1884421
aguaucguccuugauacau

SEQ ID NO: 2264369 - RNA, 19 nt, Artificial Sequence
  Description of Artificial Sequence: Synthetic oligonucleotide
  Antisense strand to SEQ ID NO: 2264368
auguaucaaggacgauacu

SEQ ID NO: 2264370 - RNA, 19 nt, Artificial Sequence
  Description of Artificial Sequence: Synthetic oligonucleotide
  Sense strand starting at position 966 of SEQ ID NO: 1884421
gucuuccucuguguuaaau

SEQ ID NO: 2264371 - RNA, 19 nt, Artificial Sequence
  Description of Artificial Sequence: Synthetic oligonucleotide
  Antisense strand to SEQ ID NO: 2264370
auuuaacacagaggaagac

SEQ ID NO: 2264372 - RNA, 19 nt, Artificial Sequence
  Description of Artificial Sequence: Synthetic oligonucleotide
  Sense strand starting at position 968 of SEQ ID NO: 1884421
cuuccucuguguuaaaucu

SEQ ID NO: 2264373 - RNA, 19 nt, Artificial Sequence
  Description of Artificial Sequence: Synthetic oligonucleotide
  Antisense strand to SEQ ID NO: 2264372
agauuuaacacagaggaag

SEQ ID NO: 2264374 - RNA, 19 nt, Artificial Sequence
  Description of Artificial Sequence: Synthetic oligonucleotide
  Sense strand starting at position 1051 of SEQ ID NO: 1884421
ccaauuagauagggcauaa

SEQ ID NO: 2264375 - RNA, 19 nt, Artificial Sequence
  Description of Artificial Sequence: Synthetic oligonucleotide
  Antisense strand to SEQ ID NO: 2264374
uuaugcccuaucuaauugg

SEQ ID NO: 2264376 - RNA, 19 nt, Artificial Sequence
  Description of Artificial Sequence: Synthetic oligonucleotide
  Sense strand starting at position 1062 of SEQ ID NO: 1884421
gggcauaauucuuaauuug

SEQ ID NO: 2264377 - RNA, 19 nt, Artificial Sequence
  Description of Artificial Sequence: Synthetic oligonucleotide
  Antisense strand to SEQ ID NO: 2264376
caaauuaagaauuaugccc

SEQ ID NO: 2264378 - RNA, 19 nt, Artificial Sequence
  Description of Artificial Sequence: Synthetic oligonucleotide
  Sense strand starting at position 1089 of SEQ ID NO: 1884421
aacguaauaugcuuaugag

SEQ ID NO: 2264379 - RNA, 19 nt, Artificial Sequence
  Description of Artificial Sequence: Synthetic oligonucleotide
  Antisense strand to SEQ ID NO: 2264378
cucauaagcauauuacguu

SEQ ID NO: 2264380 - RNA, 19 nt, Artificial Sequence
  Description of Artificial Sequence: Synthetic oligonucleotide
  Sense strand starting at position 1090 of SEQ ID NO: 1884421
acguaauaugcuuaugagg

SEQ ID NO: 2264381 - RNA, 19 nt, Artificial Sequence
  Description of Artificial Sequence: Synthetic oligonucleotide
  Antisense strand to SEQ ID NO: 2264380
ccucauaagcauauuacgu

SEQ ID NO: 2264382 - RNA, 19 nt, Artificial Sequence
  Description of Artificial Sequence: Synthetic oligonucleotide
  Sense strand starting at position 1092 of SEQ ID NO: 1884421
guaauaugcuuaugagguu

SEQ ID NO: 2264383 - RNA, 19 nt, Artificial Sequence
  Description of Artificial Sequence: Synthetic oligonucleotide
  Antisense strand to SEQ ID NO: 2264382
aaccucauaagcauauuac

SEQ ID NO: 2264384 - RNA, 19 nt, Artificial Sequence
  Description of Artificial Sequence: Synthetic oligonucleotide
  Sense strand starting at position 1120 of SEQ ID NO: 1884421
agaaccugcuauugagagu

SEQ ID NO: 2264385 - RNA, 19 nt, Artificial Sequence
  Description of Artificial Sequence: Synthetic oligonucleotide
  Antisense strand to SEQ ID NO: 2264384
acucucaauagcagguucu

SEQ ID NO: 2264386 - RNA, 19 nt, Artificial Sequence
  Description of Artificial Sequence: Synthetic oligonucleotide
  Sense strand starting at position 1126 of SEQ ID NO: 1884421
ugcuauugagaguagcauu

SEQ ID NO: 2264387 - RNA, 19 nt, Artificial Sequence
  Description of Artificial Sequence: Synthetic oligonucleotide
  Antisense strand to SEQ ID NO: 2264386
aaugcuacucucaauagca

SEQ ID NO: 2264388 - RNA, 19 nt, Artificial Sequence
  Description of Artificial Sequence: Synthetic oligonucleotide
  Sense strand starting at position 1995 of SEQ ID NO: 1884421
gaguccagucgucaugacu

SEQ ID NO: 2264389 - RNA, 19 nt, Artificial Sequence
  Description of Artificial Sequence: Synthetic oligonucleotide
  Antisense strand to SEQ ID NO: 2264388
agucaugacgacuggacuc

SEQ ID NO: 2264390 - RNA, 19 nt, Artificial Sequence
  Description of Artificial Sequence: Synthetic oligonucleotide
  Sense strand starting at position 2133 of SEQ ID NO: 1884421
ggacaccuugccugaaguu

SEQ ID NO: 2264391 - RNA, 19 nt, Artificial Sequence
  Description of Artificial Sequence: Synthetic oligonucleotide
  Antisense strand to SEQ ID NO: 2264390
aacuucaggcaaggugucc

SEQ ID NO: 2264392 - RNA, 19 nt, Artificial Sequence
  Description of Artificial Sequence: Synthetic oligonucleotide
  Sense strand starting at position 2134 of SEQ ID NO: 1884421
gacaccuugccugaaguuu

SEQ ID NO: 2264393 - RNA, 19 nt, Artificial Sequence
  Description of Artificial Sequence: Synthetic oligonucleotide
  Antisense strand to SEQ ID NO: 2264392
aaacuucaggcaagguguc

SEQ ID NO: 2264394 - RNA, 19 nt, Artificial Sequence
  Description of Artificial Sequence: Synthetic oligonucleotide
  Sense strand starting at position 2145 of SEQ ID NO: 1884421
ugaaguuucggccauaccu

SEQ ID NO: 2264395 - RNA, 19 nt, Artificial Sequence
  Description of Artificial Sequence: Synthetic oligonucleotide
  Antisense strand to SEQ ID NO: 2264394
agguauggccgaaacuuca

SEQ ID NO: 2264396 - RNA, 19 nt, Artificial Sequence
  Description of Artificial Sequence: Synthetic oligonucleotide
  Sense strand starting at position 2147 of SEQ ID NO: 1884421
aaguuucggccauaccuau

SEQ ID NO: 2264397 - RNA, 19 nt, Artificial Sequence
  Description of Artificial Sequence: Synthetic oligonucleotide
  Antisense strand to SEQ ID NO: 2264396
auagguauggccgaaacuu

SEQ ID NO: 2264398 - RNA, 19 nt, Artificial Sequence
  Description of Artificial Sequence: Synthetic oligonucleotide
  Sense strand starting at position 2261 of SEQ ID NO: 1884421
gcgcauauuccagagcuga

SEQ ID NO: 2264399 - RNA, 19 nt, Artificial Sequence
  Description of Artificial Sequence: Synthetic oligonucleotide
  Antisense strand to SEQ ID NO: 2264398
ucagcucuggaauaugcgc

SEQ ID NO: 2264400 - RNA, 19 nt, Artificial Sequence
  Description of Artificial Sequence: Synthetic oligonucleotide
  Sense strand starting at position 2683 of SEQ ID NO: 1884421
ggcucugaguccgaggagu

SEQ ID NO: 2264401 - RNA, 19 nt, Artificial Sequence
  Description of Artificial Sequence: Synthetic oligonucleotide
  Antisense strand to SEQ ID NO: 2264400
acuccucggacucagagcc

SEQ ID NO: 2264402 - RNA, 19 nt, Artificial Sequence
  Description of Artificial Sequence: Synthetic oligonucleotide
  Sense strand starting at position 3380 of SEQ ID NO: 1884421
uggagugcauccuguacaa

SEQ ID NO: 2264403 - RNA, 19 nt, Artificial Sequence
  Description of Artificial Sequence: Synthetic oligonucleotide
  Antisense strand to SEQ ID NO: 2264402
uuguacaggaugcacucca

SEQ ID NO: 2264404 - RNA, 19 nt, Artificial Sequence
  Description of Artificial Sequence: Synthetic oligonucleotide
  Sense strand starting at position 3382 of SEQ ID NO: 1884421
gagugcauccuguacaaag

SEQ ID NO: 2264405 - RNA, 19 nt, Artificial Sequence
  Description of Artificial Sequence: Synthetic oligonucleotide
  Antisense strand to SEQ ID NO: 2264404
cuuuguacaggaugcacuc

SEQ ID NO: 2264406 - RNA, 19 nt, Artificial Sequence
  Description of Artificial Sequence: Synthetic oligonucleotide
  Sense strand starting at position 3913 of SEQ ID NO: 1884421
cuuuccgaaucuuccagau

SEQ ID NO: 2264407 - RNA, 19 nt, Artificial Sequence
  Description of Artificial Sequence: Synthetic oligonucleotide
  Antisense strand to SEQ ID NO: 2264406
aucuggaagauucggaaag

SEQ ID NO: 2264408 - RNA, 19 nt, Artificial Sequence
  Description of Artificial Sequence: Synthetic oligonucleotide
  Sense strand starting at position 3915 of SEQ ID NO: 1884421
uuccgaaucuuccagauuc

SEQ ID NO: 2264409 - RNA, 19 nt, Artificial Sequence
  Description of Artificial Sequence: Synthetic oligonucleotide
  Antisense strand to SEQ ID NO: 2264408
gaaucuggaagauucggaa

SEQ ID NO: 2264410 - RNA, 19 nt, Artificial Sequence
  Description of Artificial Sequence: Synthetic oligonucleotide
  Sense strand starting at position 320 of SEQ ID NO: 1884422
uuucuuaaggcugacuaau

SEQ ID NO: 2264411 - RNA, 19 nt, Artificial Sequence
  Description of Artificial Sequence: Synthetic oligonucleotide
  Antisense strand to SEQ ID NO: 2264410
auuagucagccuuaagaaa

SEQ ID NO: 2264412 - RNA, 19 nt, Artificial Sequence
  Description of Artificial Sequence: Synthetic oligonucleotide
  Sense strand starting at position 322 of SEQ ID NO: 1884422
ucuuaaggcugacuaauau

SEQ ID NO: 2264413 - RNA, 19 nt, Artificial Sequence
  Description of Artificial Sequence: Synthetic oligonucleotide
  Antisense strand to SEQ ID NO: 2264412
auauuagucagccuuaaga

SEQ ID NO: 2264414 - RNA, 19 nt, Artificial Sequence
  Description of Artificial Sequence: Synthetic oligonucleotide
  Sense strand starting at position 376 of SEQ ID NO: 1884422
cucaucugucaauggauaa

SEQ ID NO: 2264415 - RNA, 19 nt, Artificial Sequence
  Description of Artificial Sequence: Synthetic oligonucleotide
  Antisense strand to SEQ ID NO: 2264414
uuauccauugacagaugag

SEQ ID NO: 2264416 - RNA, 19 nt, Artificial Sequence
  Description of Artificial Sequence: Synthetic oligonucleotide
  Sense strand starting at position 401 of SEQ ID NO: 1884422
auggauauuucgcauuuau

SEQ ID NO: 2264417 - RNA, 19 nt, Artificial Sequence
  Description of Artificial Sequence: Synthetic oligonucleotide
  Antisense strand to SEQ ID NO: 2264416
auaaaugcgaaauauccau

SEQ ID NO: 2264418 - RNA, 19 nt, Artificial Sequence
  Description of Artificial Sequence: Synthetic oligonucleotide
  Sense strand starting at position 478 of SEQ ID NO: 1884422
auuauagcaaugugagaga

SEQ ID NO: 2264419 - RNA, 19 nt, Artificial Sequence
  Description of Artificial Sequence: Synthetic oligonucleotide
  Antisense strand to SEQ ID NO: 2264418
ucucucacauugcuauaau

SEQ ID NO: 2264420 - RNA, 19 nt, Artificial Sequence
  Description of Artificial Sequence: Synthetic oligonucleotide
  Sense strand starting at position 561 of SEQ ID NO: 1884422
auaggugagaaaugcuauu

SEQ ID NO: 2264421 - RNA, 19 nt, Artificial Sequence
  Description of Artificial Sequence: Synthetic oligonucleotide
  Antisense strand to SEQ ID NO: 2264420
aauagcauuucucaccuau

SEQ ID NO: 2264422 - RNA, 19 nt, Artificial Sequence
  Description of Artificial Sequence: Synthetic oligonucleotide
  Sense strand starting at position 571 of SEQ ID NO: 1884422
aaugcuauuucuguguagu

SEQ ID NO: 2264423 - RNA, 19 nt, Artificial Sequence
  Description of Artificial Sequence: Synthetic oligonucleotide
  Antisense strand to SEQ ID NO: 2264422
acuacacagaaauagcauu

SEQ ID NO: 2264424 - RNA, 19 nt, Artificial Sequence
  Description of Artificial Sequence: Synthetic oligonucleotide
  Sense strand starting at position 574 of SEQ ID NO: 1884422
gcuauuucuguguagucuu

SEQ ID NO: 2264425 - RNA, 19 nt, Artificial Sequence
  Description of Artificial Sequence: Synthetic oligonucleotide
  Antisense strand to SEQ ID NO: 2264424
aagacuacacagaaauagc

SEQ ID NO: 2264426 - RNA, 19 nt, Artificial Sequence
  Description of Artificial Sequence: Synthetic oligonucleotide
  Sense strand starting at position 577 of SEQ ID NO: 1884422
auuucuguguagucuuaau

SEQ ID NO: 2264427 - RNA, 19 nt, Artificial Sequence
  Description of Artificial Sequence: Synthetic oligonucleotide
  Antisense strand to SEQ ID NO: 2264426
auuaagacuacacagaaau

SEQ ID NO: 2264428 - RNA, 19 nt, Artificial Sequence
  Description of Artificial Sequence: Synthetic oligonucleotide
  Sense strand starting at position 603 of SEQ ID NO: 1884422
guaugagagggaugaguau

SEQ ID NO: 2264429 - RNA, 19 nt, Artificial Sequence
  Description of Artificial Sequence: Synthetic oligonucleotide
  Antisense strand to SEQ ID NO: 2264428
auacucaucccucucauac

SEQ ID NO: 2264430 - RNA, 19 nt, Artificial Sequence
  Description of Artificial Sequence: Synthetic oligonucleotide
  Sense strand starting at position 982 of SEQ ID NO: 1884422
gugaaacaaguccagcuua

SEQ ID NO: 2264431 - RNA, 19 nt, Artificial Sequence
  Description of Artificial Sequence: Synthetic oligonucleotide
  Antisense strand to SEQ ID NO: 2264430
uaagcuggacuuguuucac

SEQ ID NO: 2264432 - RNA, 19 nt, Artificial Sequence
  Description of Artificial Sequence: Synthetic oligonucleotide
  Sense strand starting at position 1225 of SEQ ID NO: 1884422
ucaggaaagucagucaaug

SEQ ID NO: 2264433 - RNA, 19 nt, Artificial Sequence
  Description of Artificial Sequence: Synthetic oligonucleotide
  Antisense strand to SEQ ID NO: 2264432
cauugacugacuuuccuga

SEQ ID NO: 2264434 - RNA, 19 nt, Artificial Sequence
  Description of Artificial Sequence: Synthetic oligonucleotide
  Sense strand starting at position 1227 of SEQ ID NO: 1884422
aggaaagucagucaauguu

SEQ ID NO: 2264435 - RNA, 19 nt, Artificial Sequence
  Description of Artificial Sequence: Synthetic oligonucleotide
  Antisense strand to SEQ ID NO: 2264434
aacauugacugacuuuccu

SEQ ID NO: 2264436 - RNA, 19 nt, Artificial Sequence
  Description of Artificial Sequence: Synthetic oligonucleotide
  Sense strand starting at position 1292 of SEQ ID NO: 1884422
uuaccaacucagugguaaa

SEQ ID NO: 2264437 - RNA, 19 nt, Artificial Sequence
  Description of Artificial Sequence: Synthetic oligonucleotide
  Antisense strand to SEQ ID NO: 2264436
uuuaccacugaguugguaa

SEQ ID NO: 2264438 - RNA, 19 nt, Artificial Sequence
  Description of Artificial Sequence: Synthetic oligonucleotide
  Sense strand starting at position 1397 of SEQ ID NO: 1884422
ugacuuuguccugaaguac

SEQ ID NO: 2264439 - RNA, 19 nt, Artificial Sequence
  Description of Artificial Sequence: Synthetic oligonucleotide
  Antisense strand to SEQ ID NO: 2264438
guacuucaggacaaaguca

SEQ ID NO: 2264440 - RNA, 19 nt, Artificial Sequence
  Description of Artificial Sequence: Synthetic oligonucleotide
  Sense strand starting at position 1531 of SEQ ID NO: 1884422
ggcaaugcuccugaaauag

SEQ ID NO: 2264441 - RNA, 19 nt, Artificial Sequence
  Description of Artificial Sequence: Synthetic oligonucleotide
  Antisense strand to SEQ ID NO: 2264440
cuauuucaggagcauugcc

SEQ ID NO: 2264442 - RNA, 19 nt, Artificial Sequence
  Description of Artificial Sequence: Synthetic oligonucleotide
  Sense strand starting at position 1564 of SEQ ID NO: 1884422
ucuccuauuucuguguaag

SEQ ID NO: 2264443 - RNA, 19 nt, Artificial Sequence
  Description of Artificial Sequence: Synthetic oligonucleotide
  Antisense strand to SEQ ID NO: 2264442
cuuacacagaaauaggaga

SEQ ID NO: 2264444 - RNA, 19 nt, Artificial Sequence
  Description of Artificial Sequence: Synthetic oligonucleotide
  Sense strand starting at position 1566 of SEQ ID NO: 1884422
uccuauuucuguguaagca

SEQ ID NO: 2264445 - RNA, 19 nt, Artificial Sequence
  Description of Artificial Sequence: Synthetic oligonucleotide
  Antisense strand to SEQ ID NO: 2264444
ugcuuacacagaaauagga

SEQ ID NO: 2264446 - RNA, 19 nt, Artificial Sequence
  Description of Artificial Sequence: Synthetic oligonucleotide
  Sense strand starting at position 1801 of SEQ ID NO: 1884422
aagagagguuaugugaguu

SEQ ID NO: 2264447 - RNA, 19 nt, Artificial Sequence
  Description of Artificial Sequence: Synthetic oligonucleotide
  Antisense strand to SEQ ID NO: 2264446
aacucacauaaccucucuu

SEQ ID NO: 2264448 - RNA, 19 nt, Artificial Sequence
  Description of Artificial Sequence: Synthetic oligonucleotide
  Sense strand starting at position 1807 of SEQ ID NO: 1884422
gguuaugugaguuaucaua

SEQ ID NO: 2264449 - RNA, 19 nt, Artificial Sequence
  Description of Artificial Sequence: Synthetic oligonucleotide
  Antisense strand to SEQ ID NO: 2264448
uaugauaacucacauaacc

SEQ ID NO: 2264450 - RNA, 19 nt, Artificial Sequence
  Description of Artificial Sequence: Synthetic oligonucleotide
  Sense strand starting at position 2002 of SEQ ID NO: 1884422
aagggaguaugugucuaaa

SEQ ID NO: 2264451 - RNA, 19 nt, Artificial Sequence
  Description of Artificial Sequence: Synthetic oligonucleotide
  Antisense strand to SEQ ID NO: 2264450
uuuagacacauacucccuu

SEQ ID NO: 2264452 - RNA, 19 nt, Artificial Sequence
  Description of Artificial Sequence: Synthetic oligonucleotide
  Sense strand starting at position 2004 of SEQ ID NO: 1884422
gggaguaugugucuaaaga

SEQ ID NO: 2264453 - RNA, 19 nt, Artificial Sequence
  Description of Artificial Sequence: Synthetic oligonucleotide
  Antisense strand to SEQ ID NO: 2264452
ucuuuagacacauacuccc

SEQ ID NO: 2264454 - RNA, 19 nt, Artificial Sequence
  Description of Artificial Sequence: Synthetic oligonucleotide
  Sense strand starting at position 2005 of SEQ ID NO: 1884422
ggaguaugugucuaaagac

SEQ ID NO: 2264455 - RNA, 19 nt, Artificial Sequence
  Description of Artificial Sequence: Synthetic oligonucleotide
  Antisense strand to SEQ ID NO: 2264454
gucuuuagacacauacucc

SEQ ID NO: 2264456 - RNA, 19 nt, Artificial Sequence
  Description of Artificial Sequence: Synthetic oligonucleotide
  Sense strand starting at position 2148 of SEQ ID NO: 1884422
gucucuauuugugucagga

SEQ ID NO: 2264457 - RNA, 19 nt, Artificial Sequence
  Description of Artificial Sequence: Synthetic oligonucleotide
  Antisense strand to SEQ ID NO: 2264456
uccugacacaaauagagac

SEQ ID NO: 2264458 - RNA, 19 nt, Artificial Sequence
  Description of Artificial Sequence: Synthetic oligonucleotide
  Sense strand starting at position 2235 of SEQ ID NO: 1884422
acagaaguuccguuagcgu

SEQ ID NO: 2264459 - RNA, 19 nt, Artificial Sequence
  Description of Artificial Sequence: Synthetic oligonucleotide
  Antisense strand to SEQ ID NO: 2264458
acgcuaacggaacuucugu

SEQ ID NO: 2264460 - RNA, 19 nt, Artificial Sequence
  Description of Artificial Sequence: Synthetic oligonucleotide
  Sense strand starting at position 2406 of SEQ ID NO: 1884422
uaugucuuuggugaauauc

SEQ ID NO: 2264461 - RNA, 19 nt, Artificial Sequence
  Description of Artificial Sequence: Synthetic oligonucleotide
  Antisense strand to SEQ ID NO: 2264460
gauauucaccaaagacaua

SEQ ID NO: 2264462 - RNA, 19 nt, Artificial Sequence
  Description of Artificial Sequence: Synthetic oligonucleotide
  Sense strand starting at position 2783 of SEQ ID NO: 1884422
gaggcauagcauuaaauug

SEQ ID NO: 2264463 - RNA, 19 nt, Artificial Sequence
  Description of Artificial Sequence: Synthetic oligonucleotide
  Antisense strand to SEQ ID NO: 2264462
caauuuaaugcuaugccuc

SEQ ID NO: 2264464 - RNA, 19 nt, Artificial Sequence
  Description of Artificial Sequence: Synthetic oligonucleotide
  Sense strand starting at position 2848 of SEQ ID NO: 1884422
gcuguaaaucuagauauga

SEQ ID NO: 2264465 - RNA, 19 nt, Artificial Sequence
  Description of Artificial Sequence: Synthetic oligonucleotide
  Antisense strand to SEQ ID NO: 2264464
ucauaucuagauuuacagc

SEQ ID NO: 2264466 - RNA, 19 nt, Artificial Sequence
  Description of Artificial Sequence: Synthetic oligonucleotide
  Sense strand starting at position 2970 of SEQ ID NO: 1884422
gagcuuaucccugaugauu

SEQ ID NO: 2264467 - RNA, 19 nt, Artificial Sequence
  Description of Artificial Sequence: Synthetic oligonucleotide
  Antisense strand to SEQ ID NO: 2264466
aaucaucagggauaagcuc

SEQ ID NO: 2264468 - RNA, 19 nt, Artificial Sequence
  Description of Artificial Sequence: Synthetic oligonucleotide
  Sense strand starting at position 3112 of SEQ ID NO: 1884422
cuuugcuaugagcaggaaa

SEQ ID NO: 2264469 - RNA, 19 nt, Artificial Sequence
  Description of Artificial Sequence: Synthetic oligonucleotide
  Antisense strand to SEQ ID NO: 2264468
uuuccugcucauagcaaag

SEQ ID NO: 2264470 - RNA, 19 nt, Artificial Sequence
  Description of Artificial Sequence: Synthetic oligonucleotide
  Sense strand starting at position 3209 of SEQ ID NO: 1884422
ucccgaucagagggugaau

SEQ ID NO: 2264471 - RNA, 19 nt, Artificial Sequence
  Description of Artificial Sequence: Synthetic oligonucleotide
  Antisense strand to SEQ ID NO: 2264470
auucacccucugaucggga

SEQ ID NO: 2264472 - RNA, 19 nt, Artificial Sequence
  Description of Artificial Sequence: Synthetic oligonucleotide
  Sense strand starting at position 3212 of SEQ ID NO: 1884422
cgaucagagggugaaugua

SEQ ID NO: 2264473 - RNA, 19 nt, Artificial Sequence
  Description of Artificial Sequence: Synthetic oligonucleotide
  Antisense strand to SEQ ID NO: 2264472
uacauucacccucugaucg

SEQ ID NO: 2264474 - RNA, 19 nt, Artificial Sequence
  Description of Artificial Sequence: Synthetic oligonucleotide
  Sense strand starting at position 3386 of SEQ ID NO: 1884422
cauccuguuguacaugaga

SEQ ID NO: 2264475 - RNA, 19 nt, Artificial Sequence
  Description of Artificial Sequence: Synthetic oligonucleotide
  Antisense strand to SEQ ID NO: 2264474
ucucauguacaacaggaug

SEQ ID NO: 2264476 - RNA, 19 nt, Artificial Sequence
  Description of Artificial Sequence: Synthetic oligonucleotide
  Sense strand starting at position 3453 of SEQ ID NO: 1884422
cuccuuggcauagggauaa

SEQ ID NO: 2264477 - RNA, 19 nt, Artificial Sequence
  Description of Artificial Sequence: Synthetic oligonucleotide
  Antisense strand to SEQ ID NO: 2264476
uuaucccuaugccaaggag

SEQ ID NO: 2264478 - RNA, 19 nt, Artificial Sequence
  Description of Artificial Sequence: Synthetic oligonucleotide
  Sense strand starting at position 3610 of SEQ ID NO: 1884422
ggaccugaauuguuaaacu

SEQ ID NO: 2264479 - RNA, 19 nt, Artificial Sequence
  Description of Artificial Sequence: Synthetic oligonucleotide
  Antisense strand to SEQ ID NO: 2264478
aguuuaacaauucaggucc

SEQ ID NO: 2264480 - RNA, 19 nt, Artificial Sequence
  Description of Artificial Sequence: Synthetic oligonucleotide
  Sense strand starting at position 3764 of SEQ ID NO: 1884422
ccgagauaucucuggauau

SEQ ID NO: 2264481 - RNA, 19 nt, Artificial Sequence
  Description of Artificial Sequence: Synthetic oligonucleotide
  Antisense strand to SEQ ID NO: 2264480
auauccagagauaucucgg

SEQ ID NO: 2264482 - RNA, 19 nt, Artificial Sequence
  Description of Artificial Sequence: Synthetic oligonucleotide
  Sense strand starting at position 3768 of SEQ ID NO: 1884422
gauaucucuggauaugugu

SEQ ID NO: 2264483 - RNA, 19 nt, Artificial Sequence
  Description of Artificial Sequence: Synthetic oligonucleotide
  Antisense strand to SEQ ID NO: 2264482
acacauauccagagauauc

SEQ ID NO: 2264484 - RNA, 19 nt, Artificial Sequence
  Description of Artificial Sequence: Synthetic oligonucleotide
  Sense strand starting at position 3840 of SEQ ID NO: 1884422
ucuacugcuggagaguuua

SEQ ID NO: 2264485 - RNA, 19 nt, Artificial Sequence
  Description of Artificial Sequence: Synthetic oligonucleotide
  Antisense strand to SEQ ID NO: 2264484
uaaacucuccagcaguaga

SEQ ID NO: 2264486 - RNA, 19 nt, Artificial Sequence
  Description of Artificial Sequence: Synthetic oligonucleotide
  Sense strand starting at position 3850 of SEQ ID NO: 1884422
gagaguuuaccaugcaaau

SEQ ID NO: 2264487 - RNA, 19 nt, Artificial Sequence
  Description of Artificial Sequence: Synthetic oligonucleotide
  Antisense strand to SEQ ID NO: 2264486
auuugcaugguaaacucuc

SEQ ID NO: 2264488 - RNA, 19 nt, Artificial Sequence
  Description of Artificial Sequence: Synthetic oligonucleotide
  Sense strand starting at position 3869 of SEQ ID NO: 1884422
ccugcaaucuggguagaaa

SEQ ID NO: 2264489 - RNA, 19 nt, Artificial Sequence
  Description of Artificial Sequence: Synthetic oligonucleotide
  Antisense strand to SEQ ID NO: 2264488
uuucuacccagauugcagg

SEQ ID NO: 2264490 - RNA, 19 nt, Artificial Sequence
  Description of Artificial Sequence: Synthetic oligonucleotide
  Sense strand starting at position 6 of SEQ ID NO: 1884423
uagauuuaguugcacagau

SEQ ID NO: 2264491 - RNA, 19 nt, Artificial Sequence
  Description of Artificial Sequence: Synthetic oligonucleotide
  Antisense strand to SEQ ID NO: 2264490
aucugugcaacuaaaucua

SEQ ID NO: 2264492 - RNA, 19 nt, Artificial Sequence
  Description of Artificial Sequence: Synthetic oligonucleotide
  Sense strand starting at position 19 of SEQ ID NO: 1884423
acagauauuaggugguaca

SEQ ID NO: 2264493 - RNA, 19 nt, Artificial Sequence
  Description of Artificial Sequence: Synthetic oligonucleotide
  Antisense strand to SEQ ID NO: 2264492
uguaccaccuaauaucugu

SEQ ID NO: 2264494 - RNA, 19 nt, Artificial Sequence
  Description of Artificial Sequence: Synthetic oligonucleotide
  Sense strand starting at position 20 of SEQ ID NO: 1884423
cagauauuaggugguacaa

SEQ ID NO: 2264495 - RNA, 19 nt, Artificial Sequence
  Description of Artificial Sequence: Synthetic oligonucleotide
  Antisense strand to SEQ ID NO: 2264494
uuguaccaccuaauaucug

SEQ ID NO: 2264496 - RNA, 19 nt, Artificial Sequence
  Description of Artificial Sequence: Synthetic oligonucleotide
  Sense strand starting at position 133 of SEQ ID NO: 1884423
cucaacuucguagauugaa

SEQ ID NO: 2264497 - RNA, 19 nt, Artificial Sequence
  Description of Artificial Sequence: Synthetic oligonucleotide
  Antisense strand to SEQ ID NO: 2264496
uucaaucuacgaaguugag

SEQ ID NO: 2264498 - RNA, 19 nt, Artificial Sequence
  Description of Artificial Sequence: Synthetic oligonucleotide
  Sense strand starting at position 192 of SEQ ID NO: 1884423
gcaggucugcuauauagau

SEQ ID NO: 2264499 - RNA, 19 nt, Artificial Sequence
  Description of Artificial Sequence: Synthetic oligonucleotide
  Antisense strand to SEQ ID NO: 2264498
aucuauauagcagaccugc

SEQ ID NO: 2264500 - RNA, 19 nt, Artificial Sequence
  Description of Artificial Sequence: Synthetic oligonucleotide
  Sense strand starting at position 410 of SEQ ID NO: 1884423
uuugauuucuguuccugca

SEQ ID NO: 2264501 - RNA, 19 nt, Artificial Sequence
  Description of Artificial Sequence: Synthetic oligonucleotide
  Antisense strand to SEQ ID NO: 2264500
ugcaggaacagaaaucaaa

SEQ ID NO: 2264502 - RNA, 19 nt, Artificial Sequence
  Description of Artificial Sequence: Synthetic oligonucleotide
  Sense strand starting at position 412 of SEQ ID NO: 1884423
ugauuucuguuccugcauu

SEQ ID NO: 2264503 - RNA, 19 nt, Artificial Sequence
  Description of Artificial Sequence: Synthetic oligonucleotide
  Antisense strand to SEQ ID NO: 2264502
aaugcaggaacagaaauca

SEQ ID NO: 2264504 - RNA, 19 nt, Artificial Sequence
  Description of Artificial Sequence: Synthetic oligonucleotide
  Sense strand starting at position 605 of SEQ ID NO: 1884423
auacguguucgugugucuu

SEQ ID NO: 2264505 - RNA, 19 nt, Artificial Sequence
  Description of Artificial Sequence: Synthetic oligonucleotide
  Antisense strand to SEQ ID NO: 2264504
aagacacacgaacacguau

SEQ ID NO: 2264506 - RNA, 19 nt, Artificial Sequence
  Description of Artificial Sequence: Synthetic oligonucleotide
  Sense strand starting at position 1165 of SEQ ID NO: 1884423
uuagaauuauuggcugcua

SEQ ID NO: 2264507 - RNA, 19 nt, Artificial Sequence
  Description of Artificial Sequence: Synthetic oligonucleotide
  Antisense strand to SEQ ID NO: 2264506
uagcagccaauaauucuaa

SEQ ID NO: 2264508 - RNA, 19 nt, Artificial Sequence
  Description of Artificial Sequence: Synthetic oligonucleotide
  Sense strand starting at position 1167 of SEQ ID NO: 1884423
agaauuauuggcugcuauu

SEQ ID NO: 2264509 - RNA, 19 nt, Artificial Sequence
  Description of Artificial Sequence: Synthetic oligonucleotide
  Antisense strand to SEQ ID NO: 2264508
aauagcagccaauaauucu

SEQ ID NO: 2264510 - RNA, 19 nt, Artificial Sequence
  Description of Artificial Sequence: Synthetic oligonucleotide
  Sense strand starting at position 1208 of SEQ ID NO: 1884423
gugauuacccuuugugaau

SEQ ID NO: 2264511 - RNA, 19 nt, Artificial Sequence
  Description of Artificial Sequence: Synthetic oligonucleotide
  Antisense strand to SEQ ID NO: 2264510
auucacaaaggguaaucac

SEQ ID NO: 2264512 - RNA, 19 nt, Artificial Sequence
  Description of Artificial Sequence: Synthetic oligonucleotide
  Sense strand starting at position 1209 of SEQ ID NO: 1884423
ugauuacccuuugugaaug

SEQ ID NO: 2264513 - RNA, 19 nt, Artificial Sequence
  Description of Artificial Sequence: Synthetic oligonucleotide
  Antisense strand to SEQ ID NO: 2264512
cauucacaaaggguaauca

SEQ ID NO: 2264514 - RNA, 19 nt, Artificial Sequence
  Description of Artificial Sequence: Synthetic oligonucleotide
  Sense strand starting at position 1214 of SEQ ID NO: 1884423
acccuuugugaauguagga

SEQ ID NO: 2264515 - RNA, 19 nt, Artificial Sequence
  Description of Artificial Sequence: Synthetic oligonucleotide
  Antisense strand to SEQ ID NO: 2264514
uccuacauucacaaagggu

SEQ ID NO: 2264516 - RNA, 19 nt, Artificial Sequence
  Description of Artificial Sequence: Synthetic oligonucleotide
  Sense strand starting at position 1354 of SEQ ID NO: 1884423
guguauuguacaugcauuu

SEQ ID NO: 2264517 - RNA, 19 nt, Artificial Sequence
  Description of Artificial Sequence: Synthetic oligonucleotide
  Antisense strand to SEQ ID NO: 2264516
aaaugcauguacaauacac

SEQ ID NO: 2264518 - RNA, 19 nt, Artificial Sequence
  Description of Artificial Sequence: Synthetic oligonucleotide
  Sense strand starting at position 1450 of SEQ ID NO: 1884423
aucauauaguccucuguca

SEQ ID NO: 2264519 - RNA, 19 nt, Artificial Sequence
  Description of Artificial Sequence: Synthetic oligonucleotide
  Antisense strand to SEQ ID NO: 2264518
ugacagaggacuauaugau

SEQ ID NO: 2264520 - RNA, 19 nt, Artificial Sequence
  Description of Artificial Sequence: Synthetic oligonucleotide
  Sense strand starting at position 1529 of SEQ ID NO: 1884423
gaaugcagguccuuaaaca

SEQ ID NO: 2264521 - RNA, 19 nt, Artificial Sequence
  Description of Artificial Sequence: Synthetic oligonucleotide
  Antisense strand to SEQ ID NO: 2264520
uguuuaaggaccugcauuc

SEQ ID NO: 2264522 - RNA, 19 nt, Artificial Sequence
  Description of Artificial Sequence: Synthetic oligonucleotide
  Sense strand starting at position 1583 of SEQ ID NO: 1884423
gaucaucagcuuugagaug

SEQ ID NO: 2264523 - RNA, 19 nt, Artificial Sequence
  Description of Artificial Sequence: Synthetic oligonucleotide
  Antisense strand to SEQ ID NO: 2264522
caucucaaagcugaugauc

SEQ ID NO: 2264524 - RNA, 19 nt, Artificial Sequence
  Description of Artificial Sequence: Synthetic oligonucleotide
  Sense strand starting at position 1592 of SEQ ID NO: 1884423
cuuugagaugcauauuccu

SEQ ID NO: 2264525 - RNA, 19 nt, Artificial Sequence
  Description of Artificial Sequence: Synthetic oligonucleotide
  Antisense strand to SEQ ID NO: 2264524
aggaauaugcaucucaaag

SEQ ID NO: 2264526 - RNA, 19 nt, Artificial Sequence
  Description of Artificial Sequence: Synthetic oligonucleotide
  Sense strand starting at position 1595 of SEQ ID NO: 1884423
ugagaugcauauuccuaga

SEQ ID NO: 2264527 - RNA, 19 nt, Artificial Sequence
  Description of Artificial Sequence: Synthetic oligonucleotide
  Antisense strand to SEQ ID NO: 2264526
ucuaggaauaugcaucuca

SEQ ID NO: 2264528 - RNA, 19 nt, Artificial Sequence
  Description of Artificial Sequence: Synthetic oligonucleotide
  Sense strand starting at position 1600 of SEQ ID NO: 1884423
ugcauauuccuagagccca

SEQ ID NO: 2264529 - RNA, 19 nt, Artificial Sequence
  Description of Artificial Sequence: Synthetic oligonucleotide
  Antisense strand to SEQ ID NO: 2264528
ugggcucuaggaauaugca

SEQ ID NO: 2264530 - RNA, 19 nt, Artificial Sequence
  Description of Artificial Sequence: Synthetic oligonucleotide
  Sense strand starting at position 1651 of SEQ ID NO: 1884423
ccacauauugaugaacguu

SEQ ID NO: 2264531 - RNA, 19 nt, Artificial Sequence
  Description of Artificial Sequence: Synthetic oligonucleotide
  Antisense strand to SEQ ID NO: 2264530
aacguucaucaauaugugg

SEQ ID NO: 2264532 - RNA, 19 nt, Artificial Sequence
  Description of Artificial Sequence: Synthetic oligonucleotide
  Sense strand starting at position 1673 of SEQ ID NO: 1884423
agaaucgauuuaugacaag

SEQ ID NO: 2264533 - RNA, 19 nt, Artificial Sequence
  Description of Artificial Sequence: Synthetic oligonucleotide
  Antisense strand to SEQ ID NO: 2264532
cuugucauaaaucgauucu

SEQ ID NO: 2264534 - RNA, 19 nt, Artificial Sequence
  Description of Artificial Sequence: Synthetic oligonucleotide
  Sense strand starting at position 1676 of SEQ ID NO: 1884423
aucgauuuaugacaaggga

SEQ ID NO: 2264535 - RNA, 19 nt, Artificial Sequence
  Description of Artificial Sequence: Synthetic oligonucleotide
  Antisense strand to SEQ ID NO: 2264534
ucccuugucauaaaucgau

SEQ ID NO: 2264536 - RNA, 19 nt, Artificial Sequence
  Description of Artificial Sequence: Synthetic oligonucleotide
  Sense strand starting at position 1777 of SEQ ID NO: 1884423
cucggaagugccugaaauc

SEQ ID NO: 2264537 - RNA, 19 nt, Artificial Sequence
  Description of Artificial Sequence: Synthetic oligonucleotide
  Antisense strand to SEQ ID NO: 2264536
gauuucaggcacuuccgag

SEQ ID NO: 2264538 - RNA, 19 nt, Artificial Sequence
  Description of Artificial Sequence: Synthetic oligonucleotide
  Sense strand starting at position 1778 of SEQ ID NO: 1884423
ucggaagugccugaaaucu

SEQ ID NO: 2264539 - RNA, 19 nt, Artificial Sequence
  Description of Artificial Sequence: Synthetic oligonucleotide
  Antisense strand to SEQ ID NO: 2264538
agauuucaggcacuuccga

SEQ ID NO: 2264540 - RNA, 19 nt, Artificial Sequence
  Description of Artificial Sequence: Synthetic oligonucleotide
  Sense strand starting at position 2628 of SEQ ID NO: 1884423
acgcucucccuggaaacuu

SEQ ID NO: 2264541 - RNA, 19 nt, Artificial Sequence
  Description of Artificial Sequence: Synthetic oligonucleotide
  Antisense strand to SEQ ID NO: 2264540
aaguuuccagggagagcgu

SEQ ID NO: 2264542 - RNA, 19 nt, Artificial Sequence
  Description of Artificial Sequence: Synthetic oligonucleotide
  Sense strand starting at position 2834 of SEQ ID NO: 1884423
cgcuucuuuccaggauaaa

SEQ ID NO: 2264543 - RNA, 19 nt, Artificial Sequence
  Description of Artificial Sequence: Synthetic oligonucleotide
  Antisense strand to SEQ ID NO: 2264542
uuuauccuggaaagaagcg

SEQ ID NO: 2264544 - RNA, 19 nt, Artificial Sequence
  Description of Artificial Sequence: Synthetic oligonucleotide
  Sense strand starting at position 2862 of SEQ ID NO: 1884423
gugacaaauguugaguaca

SEQ ID NO: 2264545 - RNA, 19 nt, Artificial Sequence
  Description of Artificial Sequence: Synthetic oligonucleotide
  Antisense strand to SEQ ID NO: 2264544
uguacucaacauuugucac

SEQ ID NO: 2264546 - RNA, 19 nt, Artificial Sequence
  Description of Artificial Sequence: Synthetic oligonucleotide
  Sense strand starting at position 2864 of SEQ ID NO: 1884423
gacaaauguugaguacauu

SEQ ID NO: 2264547 - RNA, 19 nt, Artificial Sequence
  Description of Artificial Sequence: Synthetic oligonucleotide
  Antisense strand to SEQ ID NO: 2264546
aauguacucaacauuuguc

SEQ ID NO: 2264548 - RNA, 19 nt, Artificial Sequence
  Description of Artificial Sequence: Synthetic oligonucleotide
  Sense strand starting at position 2872 of SEQ ID NO: 1884423
uugaguacauuaucaggua

SEQ ID NO: 2264549 - RNA, 19 nt, Artificial Sequence
  Description of Artificial Sequence: Synthetic oligonucleotide
  Antisense strand to SEQ ID NO: 2264548
uaccugauaauguacucaa

SEQ ID NO: 2264550 - RNA, 19 nt, Artificial Sequence
  Description of Artificial Sequence: Synthetic oligonucleotide
  Sense strand starting at position 3300 of SEQ ID NO: 1884423
ucaaguuauuguucuccau

SEQ ID NO: 2264551 - RNA, 19 nt, Artificial Sequence
  Description of Artificial Sequence: Synthetic oligonucleotide
  Antisense strand to SEQ ID NO: 2264550
auggagaacaauaacuuga

SEQ ID NO: 2264552 - RNA, 19 nt, Artificial Sequence
  Description of Artificial Sequence: Synthetic oligonucleotide
  Sense strand starting at position 3303 of SEQ ID NO: 1884423
aguuauuguucuccauuac

SEQ ID NO: 2264553 - RNA, 19 nt, Artificial Sequence
  Description of Artificial Sequence: Synthetic oligonucleotide
  Antisense strand to SEQ ID NO: 2264552
guaauggagaacaauaacu

SEQ ID NO: 2264554 - RNA, 19 nt, Artificial Sequence
  Description of Artificial Sequence: Synthetic oligonucleotide
  Sense strand starting at position 3318 of SEQ ID NO: 1884423
uuaccuaagugagcaagaa

SEQ ID NO: 2264555 - RNA, 19 nt, Artificial Sequence
  Description of Artificial Sequence: Synthetic oligonucleotide
  Antisense strand to SEQ ID NO: 2264554
uucuugcucacuuagguaa

SEQ ID NO: 2264556 - RNA, 19 nt, Artificial Sequence
  Description of Artificial Sequence: Synthetic oligonucleotide
  Sense strand starting at position 3353 of SEQ ID NO: 1884423
ucaacagguugcuuugaua

SEQ ID NO: 2264557 - RNA, 19 nt, Artificial Sequence
  Description of Artificial Sequence: Synthetic oligonucleotide
  Antisense strand to SEQ ID NO: 2264556
uaucaaagcaaccuguuga

SEQ ID NO: 2264558 - RNA, 19 nt, Artificial Sequence
  Description of Artificial Sequence: Synthetic oligonucleotide
  Sense strand starting at position 3366 of SEQ ID NO: 1884423
uugauauuacugggagcca

SEQ ID NO: 2264559 - RNA, 19 nt, Artificial Sequence
  Description of Artificial Sequence: Synthetic oligonucleotide
  Antisense strand to SEQ ID NO: 2264558
uggcucccaguaauaucaa

SEQ ID NO: 2264560 - RNA, 19 nt, Artificial Sequence
  Description of Artificial Sequence: Synthetic oligonucleotide
  Sense strand starting at position 3483 of SEQ ID NO: 1884423
ggcucucccugaucucaaa

SEQ ID NO: 2264561 - RNA, 19 nt, Artificial Sequence
  Description of Artificial Sequence: Synthetic oligonucleotide
  Antisense strand to SEQ ID NO: 2264560
uuugagaucagggagagcc

SEQ ID NO: 2264562 - RNA, 19 nt, Artificial Sequence
  Description of Artificial Sequence: Synthetic oligonucleotide
  Sense strand starting at position 3578 of SEQ ID NO: 1884423
ugucccuaggcauaaagaa

SEQ ID NO: 2264563 - RNA, 19 nt, Artificial Sequence
  Description of Artificial Sequence: Synthetic oligonucleotide
  Antisense strand to SEQ ID NO: 2264562
uucuuuaugccuagggaca

SEQ ID NO: 2264564 - RNA, 19 nt, Artificial Sequence
  Description of Artificial Sequence: Synthetic oligonucleotide
  Sense strand starting at position 3870 of SEQ ID NO: 1884423
ugagguuuaggccggaaga

SEQ ID NO: 2264565 - RNA, 19 nt, Artificial Sequence
  Description of Artificial Sequence: Synthetic oligonucleotide
  Antisense strand to SEQ ID NO: 2264564
ucuuccggccuaaaccuca

SEQ ID NO: 2264566 - RNA, 19 nt, Artificial Sequence
  Description of Artificial Sequence: Synthetic oligonucleotide
  Sense strand starting at position 3871 of SEQ ID NO: 1884423
gagguuuaggccggaagag

SEQ ID NO: 2264567 - RNA, 19 nt, Artificial Sequence
  Description of Artificial Sequence: Synthetic oligonucleotide
  Antisense strand to SEQ ID NO: 2264566
cucuuccggccuaaaccuc

SEQ ID NO: 2264568 - RNA, 19 nt, Artificial Sequence
  Description of Artificial Sequence: Synthetic oligonucleotide
  Sense strand starting at position 3920 of SEQ ID NO: 1884423
accaauugguucgcagaca

SEQ ID NO: 2264569 - RNA, 19 nt, Artificial Sequence
  Description of Artificial Sequence: Synthetic oligonucleotide
  Antisense strand to SEQ ID NO: 2264568
ugucugcgaaccaauuggu

SEQ ID NO: 2264570 - RNA, 19 nt, Artificial Sequence
  Description of Artificial Sequence: Synthetic oligonucleotide
  Sense strand starting at position 298 of SEQ ID NO: 1884424
cuuggucuuguuuaagcuu

SEQ ID NO: 2264571 - RNA, 19 nt, Artificial Sequence
  Description of Artificial Sequence: Synthetic oligonucleotide
  Antisense strand to SEQ ID NO: 2264570
aagcuuaaacaagaccaag

SEQ ID NO: 2264572 - RNA, 19 nt, Artificial Sequence
  Description of Artificial Sequence: Synthetic oligonucleotide
  Sense strand starting at position 362 of SEQ ID NO: 1884424
uggagaaauccuugcccag

SEQ ID NO: 2264573 - RNA, 19 nt, Artificial Sequence
  Description of Artificial Sequence: Synthetic oligonucleotide
  Antisense strand to SEQ ID NO: 2264572
cugggcaaggauuucucca

SEQ ID NO: 2264574 - RNA, 19 nt, Artificial Sequence
  Description of Artificial Sequence: Synthetic oligonucleotide
  Sense strand starting at position 380 of SEQ ID NO: 1884424
gggccauguuucccugaau

SEQ ID NO: 2264575 - RNA, 19 nt, Artificial Sequence
  Description of Artificial Sequence: Synthetic oligonucleotide
  Antisense strand to SEQ ID NO: 2264574
auucagggaaacauggccc

SEQ ID NO: 2264576 - RNA, 19 nt, Artificial Sequence
  Description of Artificial Sequence: Synthetic oligonucleotide
  Sense strand starting at position 381 of SEQ ID NO: 1884424
ggccauguuucccugaauc

SEQ ID NO: 2264577 - RNA, 19 nt, Artificial Sequence
  Description of Artificial Sequence: Synthetic oligonucleotide
  Antisense strand to SEQ ID NO: 2264576
gauucagggaaacauggcc

SEQ ID NO: 2264578 - RNA, 19 nt, Artificial Sequence
  Description of Artificial Sequence: Synthetic oligonucleotide
  Sense strand starting at position 483 of SEQ ID NO: 1884424
cagcuacgucauuaauguu

SEQ ID NO: 2264579 - RNA, 19 nt, Artificial Sequence
  Description of Artificial Sequence: Synthetic oligonucleotide
  Antisense strand to SEQ ID NO: 2264578
aacauuaaugacguagcug

SEQ ID NO: 2264580 - RNA, 19 nt, Artificial Sequence
  Description of Artificial Sequence: Synthetic oligonucleotide
  Sense strand starting at position 490 of SEQ ID NO: 1884424
gucauuaauguuugcugaa

SEQ ID NO: 2264581 - RNA, 19 nt, Artificial Sequence
  Description of Artificial Sequence: Synthetic oligonucleotide
  Antisense strand to SEQ ID NO: 2264580
uucagcaaacauuaaugac

SEQ ID NO: 2264582 - RNA, 19 nt, Artificial Sequence
  Description of Artificial Sequence: Synthetic oligonucleotide
  Sense strand starting at position 492 of SEQ ID NO: 1884424
cauuaauguuugcugaaug

SEQ ID NO: 2264583 - RNA, 19 nt, Artificial Sequence
  Description of Artificial Sequence: Synthetic oligonucleotide
  Antisense strand to SEQ ID NO: 2264582
cauucagcaaacauuaaug

SEQ ID NO: 2264584 - RNA, 19 nt, Artificial Sequence
  Description of Artificial Sequence: Synthetic oligonucleotide
  Sense strand starting at position 497 of SEQ ID NO: 1884424
auguuugcugaauggauca

SEQ ID NO: 2264585 - RNA, 19 nt, Artificial Sequence
  Description of Artificial Sequence: Synthetic oligonucleotide
  Antisense strand to SEQ ID NO: 2264584
ugauccauucagcaaacau

SEQ ID NO: 2264586 - RNA, 19 nt, Artificial Sequence
  Description of Artificial Sequence: Synthetic oligonucleotide
  Sense strand starting at position 499 of SEQ ID NO: 1884424
guuugcugaauggaucaau

SEQ ID NO: 2264587 - RNA, 19 nt, Artificial Sequence
  Description of Artificial Sequence: Synthetic oligonucleotide
  Antisense strand to SEQ ID NO: 2264586
auugauccauucagcaaac

SEQ ID NO: 2264588 - RNA, 19 nt, Artificial Sequence
  Description of Artificial Sequence: Synthetic oligonucleotide
  Sense strand starting at position 558 of SEQ ID NO: 1884424
gggcgauccuugcccagaa

SEQ ID NO: 2264589 - RNA, 19 nt, Artificial Sequence
  Description of Artificial Sequence: Synthetic oligonucleotide
  Antisense strand to SEQ ID NO: 2264588
uucugggcaaggaucgccc

SEQ ID NO: 2264590 - RNA, 19 nt, Artificial Sequence
  Description of Artificial Sequence: Synthetic oligonucleotide
  Sense strand starting at position 559 of SEQ ID NO: 1884424
ggcgauccuugcccagaaa

SEQ ID NO: 2264591 - RNA, 19 nt, Artificial Sequence
  Description of Artificial Sequence: Synthetic oligonucleotide
  Antisense strand to SEQ ID NO: 2264590
uuucugggcaaggaucgcc

SEQ ID NO: 2264592 - RNA, 19 nt, Artificial Sequence
  Description of Artificial Sequence: Synthetic oligonucleotide
  Sense strand starting at position 642 of SEQ ID NO: 1884424
augcuaucagcguagacaa

SEQ ID NO: 2264593 - RNA, 19 nt, Artificial Sequence
  Description of Artificial Sequence: Synthetic oligonucleotide
  Antisense strand to SEQ ID NO: 2264592
uugucuacgcugauagcau

SEQ ID NO: 2264594 - RNA, 19 nt, Artificial Sequence
  Description of Artificial Sequence: Synthetic oligonucleotide
  Sense strand starting at position 667 of SEQ ID NO: 1884424
caccgaaaugcugagaagu

SEQ ID NO: 2264595 - RNA, 19 nt, Artificial Sequence
  Description of Artificial Sequence: Synthetic oligonucleotide
  Antisense strand to SEQ ID NO: 2264594
acuucucagcauuucggug

SEQ ID NO: 2264596 - RNA, 19 nt, Artificial Sequence
  Description of Artificial Sequence: Synthetic oligonucleotide
  Sense strand starting at position 767 of SEQ ID NO: 1884424
ugggcuuugaaagguggaa

SEQ ID NO: 2264597 - RNA, 19 nt, Artificial Sequence
  Description of Artificial Sequence: Synthetic oligonucleotide
  Antisense strand to SEQ ID NO: 2264596
uuccaccuuucaaagccca

SEQ ID NO: 2264598 - RNA, 19 nt, Artificial Sequence
  Description of Artificial Sequence: Synthetic oligonucleotide
  Sense strand starting at position 769 of SEQ ID NO: 1884424
ggcuuugaaagguggaaac

SEQ ID NO: 2264599 - RNA, 19 nt, Artificial Sequence
  Description of Artificial Sequence: Synthetic oligonucleotide
  Antisense strand to SEQ ID NO: 2264598
guuuccaccuuucaaagcc

SEQ ID NO: 2264600 - RNA, 19 nt, Artificial Sequence
  Description of Artificial Sequence: Synthetic oligonucleotide
  Sense strand starting at position 948 of SEQ ID NO: 1884424
uggaucuugugucucagaa

SEQ ID NO: 2264601 - RNA, 19 nt, Artificial Sequence
  Description of Artificial Sequence: Synthetic oligonucleotide
  Antisense strand to SEQ ID NO: 2264600
uucugagacacaagaucca

SEQ ID NO: 2264602 - RNA, 19 nt, Artificial Sequence
  Description of Artificial Sequence: Synthetic oligonucleotide
  Sense strand starting at position 1070 of SEQ ID NO: 1884424
uggcgaaacucuguauuua

SEQ ID NO: 2264603 - RNA, 19 nt, Artificial Sequence
  Description of Artificial Sequence: Synthetic oligonucleotide
  Antisense strand to SEQ ID NO: 2264602
uaaauacagaguuucgcca

SEQ ID NO: 2264604 - RNA, 19 nt, Artificial Sequence
  Description of Artificial Sequence: Synthetic oligonucleotide
  Sense strand starting at position 1408 of SEQ ID NO: 1884424
ggcucaggagucugagaac

SEQ ID NO: 2264605 - RNA, 19 nt, Artificial Sequence
  Description of Artificial Sequence: Synthetic oligonucleotide
  Antisense strand to SEQ ID NO: 2264604
guucucagacuccugagcc

SEQ ID NO: 2264606 - RNA, 19 nt, Artificial Sequence
  Description of Artificial Sequence: Synthetic oligonucleotide
  Sense strand starting at position 1517 of SEQ ID NO: 1884424
cgauguggagcuugagaga

SEQ ID NO: 2264607 - RNA, 19 nt, Artificial Sequence
  Description of Artificial Sequence: Synthetic oligonucleotide
  Antisense strand to SEQ ID NO: 2264606
ucucucaagcuccacaucg

SEQ ID NO: 2264608 - RNA, 19 nt, Artificial Sequence
  Description of Artificial Sequence: Synthetic oligonucleotide
  Sense strand starting at position 1574 of SEQ ID NO: 1884424
ggugauguuuccuccaccu

SEQ ID NO: 2264609 - RNA, 19 nt, Artificial Sequence
  Description of Artificial Sequence: Synthetic oligonucleotide
  Antisense strand to SEQ ID NO: 2264608
agguggaggaaacaucacc

SEQ ID NO: 2264610 - RNA, 19 nt, Artificial Sequence
  Description of Artificial Sequence: Synthetic oligonucleotide
  Sense strand starting at position 1985 of SEQ ID NO: 1884424
gguucuagaccugguugga

SEQ ID NO: 2264611 - RNA, 19 nt, Artificial Sequence
  Description of Artificial Sequence: Synthetic oligonucleotide
  Antisense strand to SEQ ID NO: 2264610
uccaaccaggucuagaacc

SEQ ID NO: 2264612 - RNA, 19 nt, Artificial Sequence
  Description of Artificial Sequence: Synthetic oligonucleotide
  Sense strand starting at position 2137 of SEQ ID NO: 1884424
acgggacuucugugacuau

SEQ ID NO: 2264613 - RNA, 19 nt, Artificial Sequence
  Description of Artificial Sequence: Synthetic oligonucleotide
  Antisense strand to SEQ ID NO: 2264612
auagucacagaagucccgu

SEQ ID NO: 2264614 - RNA, 19 nt, Artificial Sequence
  Description of Artificial Sequence: Synthetic oligonucleotide
  Sense strand starting at position 2140 of SEQ ID NO: 1884424
ggacuucugugacuauuaa

SEQ ID NO: 2264615 - RNA, 19 nt, Artificial Sequence
  Description of Artificial Sequence: Synthetic oligonucleotide
  Antisense strand to SEQ ID NO: 2264614
uuaauagucacagaagucc

SEQ ID NO: 2264616 - RNA, 19 nt, Artificial Sequence
  Description of Artificial Sequence: Synthetic oligonucleotide
  Sense strand starting at position 2148 of SEQ ID NO: 1884424
gugacuauuaagcgggaua

SEQ ID NO: 2264617 - RNA, 19 nt, Artificial Sequence
  Description of Artificial Sequence: Synthetic oligonucleotide
  Antisense strand to SEQ ID NO: 2264616
uaucccgcuuaauagucac

SEQ ID NO: 2264618 - RNA, 19 nt, Artificial Sequence
  Description of Artificial Sequence: Synthetic oligonucleotide
  Sense strand starting at position 2149 of SEQ ID NO: 1884424
ugacuauuaagcgggauaa

SEQ ID NO: 2264619 - RNA, 19 nt, Artificial Sequence
  Description of Artificial Sequence: Synthetic oligonucleotide
  Antisense strand to SEQ ID NO: 2264618
uuaucccgcuuaauaguca

SEQ ID NO: 2264620 - RNA, 19 nt, Artificial Sequence
  Description of Artificial Sequence: Synthetic oligonucleotide
  Sense strand starting at position 2150 of SEQ ID NO: 1884424
gacuauuaagcgggauaau

SEQ ID NO: 2264621 - RNA, 19 nt, Artificial Sequence
  Description of Artificial Sequence: Synthetic oligonucleotide
  Antisense strand to SEQ ID NO: 2264620
auuaucccgcuuaauaguc

SEQ ID NO: 2264622 - RNA, 19 nt, Artificial Sequence
  Description of Artificial Sequence: Synthetic oligonucleotide
  Sense strand starting at position 2169 of SEQ ID NO: 1884424
gcguguuaugcacuuggca

SEQ ID NO: 2264623 - RNA, 19 nt, Artificial Sequence
  Description of Artificial Sequence: Synthetic oligonucleotide
  Antisense strand to SEQ ID NO: 2264622
ugccaagugcauaacacgc

SEQ ID NO: 2264624 - RNA, 19 nt, Artificial Sequence
  Description of Artificial Sequence: Synthetic oligonucleotide
  Sense strand starting at position 2228 of SEQ ID NO: 1884424
ggcugcucugaugauuauu

SEQ ID NO: 2264625 - RNA, 19 nt, Artificial Sequence
  Description of Artificial Sequence: Synthetic oligonucleotide
  Antisense strand to SEQ ID NO: 2264624
aauaaucaucagagcagcc

SEQ ID NO: 2264626 - RNA, 19 nt, Artificial Sequence
  Description of Artificial Sequence: Synthetic oligonucleotide
  Sense strand starting at position 2230 of SEQ ID NO: 1884424
cugcucugaugauuauuau

SEQ ID NO: 2264627 - RNA, 19 nt, Artificial Sequence
  Description of Artificial Sequence: Synthetic oligonucleotide
  Antisense strand to SEQ ID NO: 2264626
auaauaaucaucagagcag

SEQ ID NO: 2264628 - RNA, 19 nt, Artificial Sequence
  Description of Artificial Sequence: Synthetic oligonucleotide
  Sense strand starting at position 2231 of SEQ ID NO: 1884424
ugcucugaugauuauuaua

SEQ ID NO: 2264629 - RNA, 19 nt, Artificial Sequence
  Description of Artificial Sequence: Synthetic oligonucleotide
  Antisense strand to SEQ ID NO: 2264628
uauaauaaucaucagagca

SEQ ID NO: 2264630 - RNA, 19 nt, Artificial Sequence
  Description of Artificial Sequence: Synthetic oligonucleotide
  Sense strand starting at position 2234 of SEQ ID NO: 1884424
ucugaugauuauuauagag

SEQ ID NO: 2264631 - RNA, 19 nt, Artificial Sequence
  Description of Artificial Sequence: Synthetic oligonucleotide
  Antisense strand to SEQ ID NO: 2264630
cucuauaauaaucaucaga

SEQ ID NO: 2264632 - RNA, 19 nt, Artificial Sequence
  Description of Artificial Sequence: Synthetic oligonucleotide
  Sense strand starting at position 2630 of SEQ ID NO: 1884424
gcgguaauuugucugcuca

SEQ ID NO: 2264633 - RNA, 19 nt, Artificial Sequence
  Description of Artificial Sequence: Synthetic oligonucleotide
  Antisense strand to SEQ ID NO: 2264632
ugagcagacaaauuaccgc

SEQ ID NO: 2264634 - RNA, 19 nt, Artificial Sequence
  Description of Artificial Sequence: Synthetic oligonucleotide
  Sense strand starting at position 2631 of SEQ ID NO: 1884424
cgguaauuugucugcucac

SEQ ID NO: 2264635 - RNA, 19 nt, Artificial Sequence
  Description of Artificial Sequence: Synthetic oligonucleotide
  Antisense strand to SEQ ID NO: 2264634
gugagcagacaaauuaccg

SEQ ID NO: 2264636 - RNA, 19 nt, Artificial Sequence
  Description of Artificial Sequence: Synthetic oligonucleotide
  Sense strand starting at position 2807 of SEQ ID NO: 1884424
gcgggcgcucagcuauuaa

SEQ ID NO: 2264637 - RNA, 19 nt, Artificial Sequence
  Description of Artificial Sequence: Synthetic oligonucleotide
  Antisense strand to SEQ ID NO: 2264636
uuaauagcugagcgcccgc

SEQ ID NO: 2264638 - RNA, 19 nt, Artificial Sequence
  Description of Artificial Sequence: Synthetic oligonucleotide
  Sense strand starting at position 3397 of SEQ ID NO: 1884424
cacagaagguuucugcaau

SEQ ID NO: 2264639 - RNA, 19 nt, Artificial Sequence
  Description of Artificial Sequence: Synthetic oligonucleotide
  Antisense strand to SEQ ID NO: 2264638
auugcagaaaccuucugug

SEQ ID NO: 2264640 - RNA, 19 nt, Artificial Sequence
  Description of Artificial Sequence: Synthetic oligonucleotide
  Sense strand starting at position 3403 of SEQ ID NO: 1884424
agguuucugcaauaucaaa

SEQ ID NO: 2264641 - RNA, 19 nt, Artificial Sequence
  Description of Artificial Sequence: Synthetic oligonucleotide
  Antisense strand to SEQ ID NO: 2264640
uuugauauugcagaaaccu

SEQ ID NO: 2264642 - RNA, 19 nt, Artificial Sequence
  Description of Artificial Sequence: Synthetic oligonucleotide
  Sense strand starting at position 3425 of SEQ ID NO: 1884424
gcucuuagagacuaaucau

SEQ ID NO: 2264643 - RNA, 19 nt, Artificial Sequence
  Description of Artificial Sequence: Synthetic oligonucleotide
  Antisense strand to SEQ ID NO: 2264642
augauuagucucuaagagc

SEQ ID NO: 2264644 - RNA, 19 nt, Artificial Sequence
  Description of Artificial Sequence: Synthetic oligonucleotide
  Sense strand starting at position 3468 of SEQ ID NO: 1884424
gaaagagcuucugcuuggu

SEQ ID NO: 2264645 - RNA, 19 nt, Artificial Sequence
  Description of Artificial Sequence: Synthetic oligonucleotide
  Antisense strand to SEQ ID NO: 2264644
accaagcagaagcucuuuc

SEQ ID NO: 2264646 - RNA, 19 nt, Artificial Sequence
  Description of Artificial Sequence: Synthetic oligonucleotide
  Sense strand starting at position 3578 of SEQ ID NO: 1884424
gauugaaaugcuggucuga

SEQ ID NO: 2264647 - RNA, 19 nt, Artificial Sequence
  Description of Artificial Sequence: Synthetic oligonucleotide
  Antisense strand to SEQ ID NO: 2264646
ucagaccagcauuucaauc

SEQ ID NO: 2264648 - RNA, 19 nt, Artificial Sequence
  Description of Artificial Sequence: Synthetic oligonucleotide
  Sense strand starting at position 3977 of SEQ ID NO: 1884424
uaugguacagacugguaaa

SEQ ID NO: 2264649 - RNA, 19 nt, Artificial Sequence
  Description of Artificial Sequence: Synthetic oligonucleotide
  Antisense strand to SEQ ID NO: 2264648
uuuaccagucuguaccaua

SEQ ID NO: 2264650 - RNA, 19 nt, Artificial Sequence
  Description of Artificial Sequence: Synthetic oligonucleotide
  Sense strand starting at position 102 of SEQ ID NO: 1884425
gaggccagauucccuauua

SEQ ID NO: 2264651 - RNA, 19 nt, Artificial Sequence
  Description of Artificial Sequence: Synthetic oligonucleotide
  Antisense strand to SEQ ID NO: 2264650
uaauagggaaucuggccuc

SEQ ID NO: 2264652 - RNA, 19 nt, Artificial Sequence
  Description of Artificial Sequence: Synthetic oligonucleotide
  Sense strand starting at position 282 of SEQ ID NO: 1884425
gccggaugacuggauggau

SEQ ID NO: 2264653 - RNA, 19 nt, Artificial Sequence
  Description of Artificial Sequence: Synthetic oligonucleotide
  Antisense strand to SEQ ID NO: 2264652
auccauccagucauccggc

SEQ ID NO: 2264654 - RNA, 19 nt, Artificial Sequence
  Description of Artificial Sequence: Synthetic oligonucleotide
  Sense strand starting at position 945 of SEQ ID NO: 1884425
gcacauguaucucagaaug

SEQ ID NO: 2264655 - RNA, 19 nt, Artificial Sequence
  Description of Artificial Sequence: Synthetic oligonucleotide
  Antisense strand to SEQ ID NO: 2264654
cauucugagauacaugugc

SEQ ID NO: 2264656 - RNA, 19 nt, Artificial Sequence
  Description of Artificial Sequence: Synthetic oligonucleotide
  Sense strand starting at position 947 of SEQ ID NO: 1884425
acauguaucucagaaugua

SEQ ID NO: 2264657 - RNA, 19 nt, Artificial Sequence
  Description of Artificial Sequence: Synthetic oligonucleotide
  Antisense strand to SEQ ID NO: 2264656
uacauucugagauacaugu

SEQ ID NO: 2264658 - RNA, 19 nt, Artificial Sequence
  Description of Artificial Sequence: Synthetic oligonucleotide
  Sense strand starting at position 950 of SEQ ID NO: 1884425
uguaucucagaauguagaa

SEQ ID NO: 2264659 - RNA, 19 nt, Artificial Sequence
  Description of Artificial Sequence: Synthetic oligonucleotide
  Antisense strand to SEQ ID NO: 2264658
uucuacauucugagauaca

SEQ ID NO: 2264660 - RNA, 19 nt, Artificial Sequence
  Description of Artificial Sequence: Synthetic oligonucleotide
  Sense strand starting at position 1687 of SEQ ID NO: 1884425
gagucuuccuucccagaga

SEQ ID NO: 2264661 - RNA, 19 nt, Artificial Sequence
  Description of Artificial Sequence: Synthetic oligonucleotide
  Antisense strand to SEQ ID NO: 2264660
ucucugggaaggaagacuc

SEQ ID NO: 2264662 - RNA, 19 nt, Artificial Sequence
  Description of Artificial Sequence: Synthetic oligonucleotide
  Sense strand starting at position 1873 of SEQ ID NO: 1884425
cugcguaccuguuucuaca

SEQ ID NO: 2264663 - RNA, 19 nt, Artificial Sequence
  Description of Artificial Sequence: Synthetic oligonucleotide
  Antisense strand to SEQ ID NO: 2264662
uguagaaacagguacgcag

SEQ ID NO: 2264664 - RNA, 19 nt, Artificial Sequence
  Description of Artificial Sequence: Synthetic oligonucleotide
  Sense strand starting at position 1876 of SEQ ID NO: 1884425
cguaccuguuucuacaaca

SEQ ID NO: 2264665 - RNA, 19 nt, Artificial Sequence
  Description of Artificial Sequence: Synthetic oligonucleotide
  Antisense strand to SEQ ID NO: 2264664
uguuguagaaacagguacg

SEQ ID NO: 2264666 - RNA, 19 nt, Artificial Sequence
  Description of Artificial Sequence: Synthetic oligonucleotide
  Sense strand starting at position 1988 of SEQ ID NO: 1884425
guccuuuggaacuggaaau

SEQ ID NO: 2264667 - RNA, 19 nt, Artificial Sequence
  Description of Artificial Sequence: Synthetic oligonucleotide
  Antisense strand to SEQ ID NO: 2264666
auuuccaguuccaaaggac

SEQ ID NO: 2264668 - RNA, 19 nt, Artificial Sequence
  Description of Artificial Sequence: Synthetic oligonucleotide
  Sense strand starting at position 2799 of SEQ ID NO: 1884425
gcugcauguugcuuagaga

SEQ ID NO: 2264669 - RNA, 19 nt, Artificial Sequence
  Description of Artificial Sequence: Synthetic oligonucleotide
  Antisense strand to SEQ ID NO: 2264668
ucucuaagcaacaugcagc

SEQ ID NO: 2264670 - RNA, 19 nt, Artificial Sequence
  Description of Artificial Sequence: Synthetic oligonucleotide
  Sense strand starting at position 2800 of SEQ ID NO: 1884425
cugcauguugcuuagagaa

SEQ ID NO: 2264671 - RNA, 19 nt, Artificial Sequence
  Description of Artificial Sequence: Synthetic oligonucleotide
  Antisense strand to SEQ ID NO: 2264670
uucucuaagcaacaugcag

SEQ ID NO: 2264672 - RNA, 19 nt, Artificial Sequence
  Description of Artificial Sequence: Synthetic oligonucleotide
  Sense strand starting at position 2802 of SEQ ID NO: 1884425
gcauguugcuuagagaaca

SEQ ID NO: 2264673 - RNA, 19 nt, Artificial Sequence
  Description of Artificial Sequence: Synthetic oligonucleotide
  Antisense strand to SEQ ID NO: 2264672
uguucucuaagcaacaugc

SEQ ID NO: 2264674 - RNA, 19 nt, Artificial Sequence
  Description of Artificial Sequence: Synthetic oligonucleotide
  Sense strand starting at position 2936 of SEQ ID NO: 1884425
caguucuuguacucgcaaa

SEQ ID NO: 2264675 - RNA, 19 nt, Artificial Sequence
  Description of Artificial Sequence: Synthetic oligonucleotide
  Antisense strand to SEQ ID NO: 2264674
uuugcgaguacaagaacug

SEQ ID NO: 2264676 - RNA, 19 nt, Artificial Sequence
  Description of Artificial Sequence: Synthetic oligonucleotide
  Sense strand starting at position 3078 of SEQ ID NO: 1884425
ggagacccuucuuaggaaa

SEQ ID NO: 2264677 - RNA, 19 nt, Artificial Sequence
  Description of Artificial Sequence: Synthetic oligonucleotide
  Antisense strand to SEQ ID NO: 2264676
uuuccuaagaagggucucc

SEQ ID NO: 2264678 - RNA, 19 nt, Artificial Sequence
  Description of Artificial Sequence: Synthetic oligonucleotide
  Sense strand starting at position 3171 of SEQ ID NO: 1884425
agcccagaucuguguacau

SEQ ID NO: 2264679 - RNA, 19 nt, Artificial Sequence
  Description of Artificial Sequence: Synthetic oligonucleotide
  Antisense strand to SEQ ID NO: 2264678
auguacacagaucugggcu

SEQ ID NO: 2264680 - RNA, 19 nt, Artificial Sequence
  Description of Artificial Sequence: Synthetic oligonucleotide
  Sense strand starting at position 3688 of SEQ ID NO: 1884425
ucgguucuccuccaacgaa

SEQ ID NO: 2264681 - RNA, 19 nt, Artificial Sequence
  Description of Artificial Sequence: Synthetic oligonucleotide
  Antisense strand to SEQ ID NO: 2264680
uucguuggaggagaaccga

SEQ ID NO: 2264682 - RNA, 19 nt, Artificial Sequence
  Description of Artificial Sequence: Synthetic oligonucleotide
  Sense strand starting at position 3888 of SEQ ID NO: 1884425
cagcaacauugugguguau

SEQ ID NO: 2264683 - RNA, 19 nt, Artificial Sequence
  Description of Artificial Sequence: Synthetic oligonucleotide
  Antisense strand to SEQ ID NO: 2264682
auacaccacaauguugcug

SEQ ID NO: 2264684 - RNA, 19 nt, Artificial Sequence
  Description of Artificial Sequence: Synthetic oligonucleotide
  Sense strand starting at position 3890 of SEQ ID NO: 1884425
gcaacauugugguguaugu

SEQ ID NO: 2264685 - RNA, 19 nt, Artificial Sequence
  Description of Artificial Sequence: Synthetic oligonucleotide
  Antisense strand to SEQ ID NO: 2264684
acauacaccacaauguugc

SEQ ID NO: 2264686 - RNA, 19 nt, Artificial Sequence
  Description of Artificial Sequence: Synthetic oligonucleotide
  Sense strand starting at position 3900 of SEQ ID NO: 1884425
gguguauguacacgaugga

SEQ ID NO: 2264687 - RNA, 19 nt, Artificial Sequence
  Description of Artificial Sequence: Synthetic oligonucleotide
  Antisense strand to SEQ ID NO: 2264686
uccaucguguacauacacc

SEQ ID NO: 2264688 - RNA, 19 nt, Artificial Sequence
  Description of Artificial Sequence: Synthetic oligonucleotide
  Sense strand starting at position 3901 of SEQ ID NO: 1884425
guguauguacacgauggaa

SEQ ID NO: 2264689 - RNA, 19 nt, Artificial Sequence
  Description of Artificial Sequence: Synthetic oligonucleotide
  Antisense strand to SEQ ID NO: 2264688
uuccaucguguacauacac

SEQ ID NO: 2264690 - RNA, 19 nt, Artificial Sequence
  Description of Artificial Sequence: Synthetic oligonucleotide
  Sense strand starting at position 3903 of SEQ ID NO: 1884425
guauguacacgauggaaua

SEQ ID NO: 2264691 - RNA, 19 nt, Artificial Sequence
  Description of Artificial Sequence: Synthetic oligonucleotide
  Antisense strand to SEQ ID NO: 2264690
uauuccaucguguacauac

SEQ ID NO: 2264692 - RNA, 19 nt, Artificial Sequence
  Description of Artificial Sequence: Synthetic oligonucleotide
  Sense strand starting at position 3979 of SEQ ID NO: 1884425
ggaggauauuaucuuaagu

SEQ ID NO: 2264693 - RNA, 19 nt, Artificial Sequence
  Description of Artificial Sequence: Synthetic oligonucleotide
  Antisense strand to SEQ ID NO: 2264692
acuuaagauaauauccucc

SEQ ID NO: 2264694 - RNA, 19 nt, Artificial Sequence
  Description of Artificial Sequence: Synthetic oligonucleotide
  Sense strand starting at position 3981 of SEQ ID NO: 1884425
aggauauuaucuuaaguga

SEQ ID NO: 2264695 - RNA, 19 nt, Artificial Sequence
  Description of Artificial Sequence: Synthetic oligonucleotide
  Antisense strand to SEQ ID NO: 2264694
ucacuuaagauaauauccu

SEQ ID NO: 2264696 - RNA, 19 nt, Artificial Sequence
  Description of Artificial Sequence: Synthetic oligonucleotide
  Sense strand starting at position 64 of SEQ ID NO: 1884426
acauuaguacuuugaguac

SEQ ID NO: 2264697 - RNA, 19 nt, Artificial Sequence
  Description of Artificial Sequence: Synthetic oligonucleotide
  Antisense strand to SEQ ID NO: 2264696
guacucaaaguacuaaugu

SEQ ID NO: 2264698 - RNA, 19 nt, Artificial Sequence
  Description of Artificial Sequence: Synthetic oligonucleotide
  Sense strand starting at position 67 of SEQ ID NO: 1884426
uuaguacuuugaguacauu

SEQ ID NO: 2264699 - RNA, 19 nt, Artificial Sequence
  Description of Artificial Sequence: Synthetic oligonucleotide
  Antisense strand to SEQ ID NO: 2264698
aauguacucaaaguacuaa

SEQ ID NO: 2264700 - RNA, 19 nt, Artificial Sequence
  Description of Artificial Sequence: Synthetic oligonucleotide
  Sense strand starting at position 199 of SEQ ID NO: 1884426
accaauuaggaauguucuu

SEQ ID NO: 2264701 - RNA, 19 nt, Artificial Sequence
  Description of Artificial Sequence: Synthetic oligonucleotide
  Antisense strand to SEQ ID NO: 2264700
aagaacauuccuaauuggu

SEQ ID NO: 2264702 - RNA, 19 nt, Artificial Sequence
  Description of Artificial Sequence: Synthetic oligonucleotide
  Sense strand starting at position 285 of SEQ ID NO: 1884426
aggauucuguaaccuguga

SEQ ID NO: 2264703 - RNA, 19 nt, Artificial Sequence
  Description of Artificial Sequence: Synthetic oligonucleotide
  Antisense strand to SEQ ID NO: 2264702
ucacagguuacagaauccu

SEQ ID NO: 2264704 - RNA, 19 nt, Artificial Sequence
  Description of Artificial Sequence: Synthetic oligonucleotide
  Sense strand starting at position 292 of SEQ ID NO: 1884426
uguaaccugugauuguaaa

SEQ ID NO: 2264705 - RNA, 19 nt, Artificial Sequence
  Description of Artificial Sequence: Synthetic oligonucleotide
  Antisense strand to SEQ ID NO: 2264704
uuuacaaucacagguuaca

SEQ ID NO: 2264706 - RNA, 19 nt, Artificial Sequence
  Description of Artificial Sequence: Synthetic oligonucleotide
  Sense strand starting at position 371 of SEQ ID NO: 1884426
guguaacuccuuuauaccu

SEQ ID NO: 2264707 - RNA, 19 nt, Artificial Sequence
  Description of Artificial Sequence: Synthetic oligonucleotide
  Antisense strand to SEQ ID NO: 2264706
agguauaaaggaguuacac

SEQ ID NO: 2264708 - RNA, 19 nt, Artificial Sequence
  Description of Artificial Sequence: Synthetic oligonucleotide
  Sense strand starting at position 380 of SEQ ID NO: 1884426
cuuuauaccucucugagga

SEQ ID NO: 2264709 - RNA, 19 nt, Artificial Sequence
  Description of Artificial Sequence: Synthetic oligonucleotide
  Antisense strand to SEQ ID NO: 2264708
uccucagagagguauaaag

SEQ ID NO: 2264710 - RNA, 19 nt, Artificial Sequence
  Description of Artificial Sequence: Synthetic oligonucleotide
  Sense strand starting at position 381 of SEQ ID NO: 1884426
uuuauaccucucugaggaa

SEQ ID NO: 2264711 - RNA, 19 nt, Artificial Sequence
  Description of Artificial Sequence: Synthetic oligonucleotide
  Antisense strand to SEQ ID NO: 2264710
uuccucagagagguauaaa

SEQ ID NO: 2264712 - RNA, 19 nt, Artificial Sequence
  Description of Artificial Sequence: Synthetic oligonucleotide
  Sense strand starting at position 422 of SEQ ID NO: 1884426
ugaacuucugguuaaucca

SEQ ID NO: 2264713 - RNA, 19 nt, Artificial Sequence
  Description of Artificial Sequence: Synthetic oligonucleotide
  Antisense strand to SEQ ID NO: 2264712
uggauuaaccagaaguuca

SEQ ID NO: 2264714 - RNA, 19 nt, Artificial Sequence
  Description of Artificial Sequence: Synthetic oligonucleotide
  Sense strand starting at position 425 of SEQ ID NO: 1884426
acuucugguuaauccagaa

SEQ ID NO: 2264715 - RNA, 19 nt, Artificial Sequence
  Description of Artificial Sequence: Synthetic oligonucleotide
  Antisense strand to SEQ ID NO: 2264714
uucuggauuaaccagaagu

SEQ ID NO: 2264716 - RNA, 19 nt, Artificial Sequence
  Description of Artificial Sequence: Synthetic oligonucleotide
  Sense strand starting at position 484 of SEQ ID NO: 1884426
ucuggaugaugaguuugua

SEQ ID NO: 2264717 - RNA, 19 nt, Artificial Sequence
  Description of Artificial Sequence: Synthetic oligonucleotide
  Antisense strand to SEQ ID NO: 2264716
uacaaacucaucauccaga

SEQ ID NO: 2264718 - RNA, 19 nt, Artificial Sequence
  Description of Artificial Sequence: Synthetic oligonucleotide
  Sense strand starting at position 487 of SEQ ID NO: 1884426
ggaugaugaguuuguauag

SEQ ID NO: 2264719 - RNA, 19 nt, Artificial Sequence
  Description of Artificial Sequence: Synthetic oligonucleotide
  Antisense strand to SEQ ID NO: 2264718
cuauacaaacucaucaucc

SEQ ID NO: 2264720 - RNA, 19 nt, Artificial Sequence
  Description of Artificial Sequence: Synthetic oligonucleotide
  Sense strand starting at position 488 of SEQ ID NO: 1884426
gaugaugaguuuguauagu

SEQ ID NO: 2264721 - RNA, 19 nt, Artificial Sequence
  Description of Artificial Sequence: Synthetic oligonucleotide
  Antisense strand to SEQ ID NO: 2264720
acuauacaaacucaucauc

SEQ ID NO: 2264722 - RNA, 19 nt, Artificial Sequence
  Description of Artificial Sequence: Synthetic oligonucleotide
  Sense strand starting at position 534 of SEQ ID NO: 1884426
uggguuagccucugacaaa

SEQ ID NO: 2264723 - RNA, 19 nt, Artificial Sequence
  Description of Artificial Sequence: Synthetic oligonucleotide
  Antisense strand to SEQ ID NO: 2264722
uuugucagaggcuaaccca

SEQ ID NO: 2264724 - RNA, 19 nt, Artificial Sequence
  Description of Artificial Sequence: Synthetic oligonucleotide
  Sense strand starting at position 763 of SEQ ID NO: 1884426
aagugugauuccucacaga

SEQ ID NO: 2264725 - RNA, 19 nt, Artificial Sequence
  Description of Artificial Sequence: Synthetic oligonucleotide
  Antisense strand to SEQ ID NO: 2264724
ucugugaggaaucacacuu

SEQ ID NO: 2264726 - RNA, 19 nt, Artificial Sequence
  Description of Artificial Sequence: Synthetic oligonucleotide
  Sense strand starting at position 1490 of SEQ ID NO: 1884426
cuccgagaagucuacaaug

SEQ ID NO: 2264727 - RNA, 19 nt, Artificial Sequence
  Description of Artificial Sequence: Synthetic oligonucleotide
  Antisense strand to SEQ ID NO: 2264726
cauuguagacuucucggag

SEQ ID NO: 2264728 - RNA, 19 nt, Artificial Sequence
  Description of Artificial Sequence: Synthetic oligonucleotide
  Sense strand starting at position 1793 of SEQ ID NO: 1884426
auuggcauucucggaacaa

SEQ ID NO: 2264729 - RNA, 19 nt, Artificial Sequence
  Description of Artificial Sequence: Synthetic oligonucleotide
  Antisense strand to SEQ ID NO: 2264728
uuguuccgagaaugccaau

SEQ ID NO: 2264730 - RNA, 19 nt, Artificial Sequence
  Description of Artificial Sequence: Synthetic oligonucleotide
  Sense strand starting at position 1839 of SEQ ID NO: 1884426
gugagaaggugaaagguaa

SEQ ID NO: 2264731 - RNA, 19 nt, Artificial Sequence
  Description of Artificial Sequence: Synthetic oligonucleotide
  Antisense strand to SEQ ID NO: 2264730
uuaccuuucaccuucucac

SEQ ID NO: 2264732 - RNA, 19 nt, Artificial Sequence
  Description of Artificial Sequence: Synthetic oligonucleotide
  Sense strand starting at position 2008 of SEQ ID NO: 1884426
uauaaagggucaguuggua

SEQ ID NO: 2264733 - RNA, 19 nt, Artificial Sequence
  Description of Artificial Sequence: Synthetic oligonucleotide
  Antisense strand to SEQ ID NO: 2264732
uaccaacugacccuuuaua

SEQ ID NO: 2264734 - RNA, 19 nt, Artificial Sequence
  Description of Artificial Sequence: Synthetic oligonucleotide
  Sense strand starting at position 2012 of SEQ ID NO: 1884426
aagggucaguugguaaaua

SEQ ID NO: 2264735 - RNA, 19 nt, Artificial Sequence
  Description of Artificial Sequence: Synthetic oligonucleotide
  Antisense strand to SEQ ID NO: 2264734
uauuuaccaacugacccuu

SEQ ID NO: 2264736 - RNA, 19 nt, Artificial Sequence
  Description of Artificial Sequence: Synthetic oligonucleotide
  Sense strand starting at position 2037 of SEQ ID NO: 1884426
guuuaugagccauagaguc

SEQ ID NO: 2264737 - RNA, 19 nt, Artificial Sequence
  Description of Artificial Sequence: Synthetic oligonucleotide
  Antisense strand to SEQ ID NO: 2264736
gacucuauggcucauaaac

SEQ ID NO: 2264738 - RNA, 19 nt, Artificial Sequence
  Description of Artificial Sequence: Synthetic oligonucleotide
  Sense strand starting at position 2489 of SEQ ID NO: 1884426
ccuguugcucuugaagaua

SEQ ID NO: 2264739 - RNA, 19 nt, Artificial Sequence
  Description of Artificial Sequence: Synthetic oligonucleotide
  Antisense strand to SEQ ID NO: 2264738
uaucuucaagagcaacagg

SEQ ID NO: 2264740 - RNA, 19 nt, Artificial Sequence
  Description of Artificial Sequence: Synthetic oligonucleotide
  Sense strand starting at position 2492 of SEQ ID NO: 1884426
guugcucuugaagauagau

SEQ ID NO: 2264741 - RNA, 19 nt, Artificial Sequence
  Description of Artificial Sequence: Synthetic oligonucleotide
  Antisense strand to SEQ ID NO: 2264740
aucuaucuucaagagcaac

SEQ ID NO: 2264742 - RNA, 19 nt, Artificial Sequence
  Description of Artificial Sequence: Synthetic oligonucleotide
  Sense strand starting at position 2584 of SEQ ID NO: 1884426
uugagauuguggccaaaua

SEQ ID NO: 2264743 - RNA, 19 nt, Artificial Sequence
  Description of Artificial Sequence: Synthetic oligonucleotide
  Antisense strand to SEQ ID NO: 2264742
uauuuggccacaaucucaa

SEQ ID NO: 2264744 - RNA, 19 nt, Artificial Sequence
  Description of Artificial Sequence: Synthetic oligonucleotide
  Sense strand starting at position 2659 of SEQ ID NO: 1884426
ggaauucuccgucauucua

SEQ ID NO: 2264745 - RNA, 19 nt, Artificial Sequence
  Description of Artificial Sequence: Synthetic oligonucleotide
  Antisense strand to SEQ ID NO: 2264744
uagaaugacggagaauucc

SEQ ID NO: 2264746 - RNA, 19 nt, Artificial Sequence
  Description of Artificial Sequence: Synthetic oligonucleotide
  Sense strand starting at position 2730 of SEQ ID NO: 1884426
uuuggaaaguuugcuauca

SEQ ID NO: 2264747 - RNA, 19 nt, Artificial Sequence
  Description of Artificial Sequence: Synthetic oligonucleotide
  Antisense strand to SEQ ID NO: 2264746
ugauagcaaacuuuccaaa

SEQ ID NO: 2264748 - RNA, 19 nt, Artificial Sequence
  Description of Artificial Sequence: Synthetic oligonucleotide
  Sense strand starting at position 2731 of SEQ ID NO: 1884426
uuggaaaguuugcuaucaa

SEQ ID NO: 2264749 - RNA, 19 nt, Artificial Sequence
  Description of Artificial Sequence: Synthetic oligonucleotide
  Antisense strand to SEQ ID NO: 2264748
uugauagcaaacuuuccaa

SEQ ID NO: 2264750 - RNA, 19 nt, Artificial Sequence
  Description of Artificial Sequence: Synthetic oligonucleotide
  Sense strand starting at position 2829 of SEQ ID NO: 1884426
uuauuagaacacugguuau

SEQ ID NO: 2264751 - RNA, 19 nt, Artificial Sequence
  Description of Artificial Sequence: Synthetic oligonucleotide
  Antisense strand to SEQ ID NO: 2264750
auaaccaguguucuaauaa

SEQ ID NO: 2264752 - RNA, 19 nt, Artificial Sequence
  Description of Artificial Sequence: Synthetic oligonucleotide
  Sense strand starting at position 2847 of SEQ ID NO: 1884426
uaaagcauuuaugauggua

SEQ ID NO: 2264753 - RNA, 19 nt, Artificial Sequence
  Description of Artificial Sequence: Synthetic oligonucleotide
  Antisense strand to SEQ ID NO: 2264752
uaccaucauaaaugcuuua

SEQ ID NO: 2264754 - RNA, 19 nt, Artificial Sequence
  Description of Artificial Sequence: Synthetic oligonucleotide
  Sense strand starting at position 2886 of SEQ ID NO: 1884426
aaguuauuagcaggaagga

SEQ ID NO: 2264755 - RNA, 19 nt, Artificial Sequence
  Description of Artificial Sequence: Synthetic oligonucleotide
  Antisense strand to SEQ ID NO: 2264754
uccuuccugcuaauaacuu

SEQ ID NO: 2264756 - RNA, 19 nt, Artificial Sequence
  Description of Artificial Sequence: Synthetic oligonucleotide
  Sense strand starting at position 2982 of SEQ ID NO: 1884426
caaguaguaagaugguaga

SEQ ID NO: 2264757 - RNA, 19 nt, Artificial Sequence
  Description of Artificial Sequence: Synthetic oligonucleotide
  Antisense strand to SEQ ID NO: 2264756
ucuaccaucuuacuacuug

SEQ ID NO: 2264758 - RNA, 19 nt, Artificial Sequence
  Description of Artificial Sequence: Synthetic oligonucleotide
  Sense strand starting at position 3067 of SEQ ID NO: 1884426
gagaucaggguuugcuuua

SEQ ID NO: 2264759 - RNA, 19 nt, Artificial Sequence
  Description of Artificial Sequence: Synthetic oligonucleotide
  Antisense strand to SEQ ID NO: 2264758
uaaagcaaacccugaucuc

SEQ ID NO: 2264760 - RNA, 19 nt, Artificial Sequence
  Description of Artificial Sequence: Synthetic oligonucleotide
  Sense strand starting at position 3068 of SEQ ID NO: 1884426
agaucaggguuugcuuuaa

SEQ ID NO: 2264761 - RNA, 19 nt, Artificial Sequence
  Description of Artificial Sequence: Synthetic oligonucleotide
  Antisense strand to SEQ ID NO: 2264760
uuaaagcaaacccugaucu

SEQ ID NO: 2264762 - RNA, 19 nt, Artificial Sequence
  Description of Artificial Sequence: Synthetic oligonucleotide
  Sense strand starting at position 3500 of SEQ ID NO: 1884426
aguuguugucacuauauga

SEQ ID NO: 2264763 - RNA, 19 nt, Artificial Sequence
  Description of Artificial Sequence: Synthetic oligonucleotide
  Antisense strand to SEQ ID NO: 2264762
ucauauagugacaacaacu

SEQ ID NO: 2264764 - RNA, 19 nt, Artificial Sequence
  Description of Artificial Sequence: Synthetic oligonucleotide
  Sense strand starting at position 3543 of SEQ ID NO: 1884426
guaagaaaggaugguugau

SEQ ID NO: 2264765 - RNA, 19 nt, Artificial Sequence
  Description of Artificial Sequence: Synthetic oligonucleotide
  Antisense strand to SEQ ID NO: 2264764
aucaaccauccuuucuuac

SEQ ID NO: 2264766 - RNA, 19 nt, Artificial Sequence
  Description of Artificial Sequence: Synthetic oligonucleotide
  Sense strand starting at position 3597 of SEQ ID NO: 1884426
uuaagaucaaguggaguuu

SEQ ID NO: 2264767 - RNA, 19 nt, Artificial Sequence
  Description of Artificial Sequence: Synthetic oligonucleotide
  Antisense strand to SEQ ID NO: 2264766
aaacuccacuugaucuuaa

SEQ ID NO: 2264768 - RNA, 19 nt, Artificial Sequence
  Description of Artificial Sequence: Synthetic oligonucleotide
  Sense strand starting at position 3603 of SEQ ID NO: 1884426
ucaaguggaguuuauugua

SEQ ID NO: 2264769 - RNA, 19 nt, Artificial Sequence
  Description of Artificial Sequence: Synthetic oligonucleotide
  Antisense strand to SEQ ID NO: 2264768
uacaauaaacuccacuuga

SEQ ID NO: 2264770 - RNA, 19 nt, Artificial Sequence
  Description of Artificial Sequence: Synthetic oligonucleotide
  Sense strand starting at position 3610 of SEQ ID NO: 1884426
gaguuuauuguaggaauag

SEQ ID NO: 2264771 - RNA, 19 nt, Artificial Sequence
  Description of Artificial Sequence: Synthetic oligonucleotide
  Antisense strand to SEQ ID NO: 2264770
cuauuccuacaauaaacuc

SEQ ID NO: 2264772 - RNA, 19 nt, Artificial Sequence
  Description of Artificial Sequence: Synthetic oligonucleotide
  Sense strand starting at position 3869 of SEQ ID NO: 1884426
agaagucuacaguggaaca

SEQ ID NO: 2264773 - RNA, 19 nt, Artificial Sequence
  Description of Artificial Sequence: Synthetic oligonucleotide
  Antisense strand to SEQ ID NO: 2264772
uguuccacuguagacuucu

SEQ ID NO: 2264774 - RNA, 19 nt, Artificial Sequence
  Description of Artificial Sequence: Synthetic oligonucleotide
  Sense strand starting at position 3889 of SEQ ID NO: 1884426
uggguagcuccuuaaucuu

SEQ ID NO: 2264775 - RNA, 19 nt, Artificial Sequence
  Description of Artificial Sequence: Synthetic oligonucleotide
  Antisense strand to SEQ ID NO: 2264774
aagauuaaggagcuaccca

SEQ ID NO: 2264776 - RNA, 19 nt, Artificial Sequence
  Description of Artificial Sequence: Synthetic oligonucleotide
  Sense strand starting at position 373 of SEQ ID NO: 1884427
cuauuuaagugagagaaag

SEQ ID NO: 2264777 - RNA, 19 nt, Artificial Sequence
  Description of Artificial Sequence: Synthetic oligonucleotide
  Antisense strand to SEQ ID NO: 2264776
cuuucucucacuuaaauag

SEQ ID NO: 2264778 - RNA, 19 nt, Artificial Sequence
  Description of Artificial Sequence: Synthetic oligonucleotide
  Sense strand starting at position 607 of SEQ ID NO: 1884427
cuaggugaauauucucuuu

SEQ ID NO: 2264779 - RNA, 19 nt, Artificial Sequence
  Description of Artificial Sequence: Synthetic oligonucleotide
  Antisense strand to SEQ ID NO: 2264778
aaagagaauauucaccuag

SEQ ID NO: 2264780 - RNA, 19 nt, Artificial Sequence
  Description of Artificial Sequence: Synthetic oligonucleotide
  Sense strand starting at position 609 of SEQ ID NO: 1884427
aggugaauauucucuuuga

SEQ ID NO: 2264781 - RNA, 19 nt, Artificial Sequence
  Description of Artificial Sequence: Synthetic oligonucleotide
  Antisense strand to SEQ ID NO: 2264780
ucaaagagaauauucaccu

SEQ ID NO: 2264782 - RNA, 19 nt, Artificial Sequence
  Description of Artificial Sequence: Synthetic oligonucleotide
  Sense strand starting at position 610 of SEQ ID NO: 1884427
ggugaauauucucuuugaa

SEQ ID NO: 2264783 - RNA, 19 nt, Artificial Sequence
  Description of Artificial Sequence: Synthetic oligonucleotide
  Antisense strand to SEQ ID NO: 2264782
uucaaagagaauauucacc

SEQ ID NO: 2264784 - RNA, 19 nt, Artificial Sequence
  Description of Artificial Sequence: Synthetic oligonucleotide
  Sense strand starting at position 790 of SEQ ID NO: 1884427
ucguguuaucaugaagcua

SEQ ID NO: 2264785 - RNA, 19 nt, Artificial Sequence
  Description of Artificial Sequence: Synthetic oligonucleotide
  Antisense strand to SEQ ID NO: 2264784
uagcuucaugauaacacga

SEQ ID NO: 2264786 - RNA, 19 nt, Artificial Sequence
  Description of Artificial Sequence: Synthetic oligonucleotide
  Sense strand starting at position 941 of SEQ ID NO: 1884427
auguaauagcaauaagugu

SEQ ID NO: 2264787 - RNA, 19 nt, Artificial Sequence
  Description of Artificial Sequence: Synthetic oligonucleotide
  Antisense strand to SEQ ID NO: 2264786
acacuuauugcuauuacau

SEQ ID NO: 2264788 - RNA, 19 nt, Artificial Sequence
  Description of Artificial Sequence: Synthetic oligonucleotide
  Sense strand starting at position 947 of SEQ ID NO: 1884427
uagcaauaaguguaguaac

SEQ ID NO: 2264789 - RNA, 19 nt, Artificial Sequence
  Description of Artificial Sequence: Synthetic oligonucleotide
  Antisense strand to SEQ ID NO: 2264788
guuacuacacuuauugcua

SEQ ID NO: 2264790 - RNA, 19 nt, Artificial Sequence
  Description of Artificial Sequence: Synthetic oligonucleotide
  Sense strand starting at position 974 of SEQ ID NO: 1884427
agggaauggugacuauucu

SEQ ID NO: 2264791 - RNA, 19 nt, Artificial Sequence
  Description of Artificial Sequence: Synthetic oligonucleotide
  Antisense strand to SEQ ID NO: 2264790
agaauagucaccauucccu

SEQ ID NO: 2264792 - RNA, 19 nt, Artificial Sequence
  Description of Artificial Sequence: Synthetic oligonucleotide
  Sense strand starting at position 978 of SEQ ID NO: 1884427
aauggugacuauucuauag

SEQ ID NO: 2264793 - RNA, 19 nt, Artificial Sequence
  Description of Artificial Sequence: Synthetic oligonucleotide
  Antisense strand to SEQ ID NO: 2264792
cuauagaauagucaccauu

SEQ ID NO: 2264794 - RNA, 19 nt, Artificial Sequence
  Description of Artificial Sequence: Synthetic oligonucleotide
  Sense strand starting at position 982 of SEQ ID NO: 1884427
gugacuauucuauagcaaa

SEQ ID NO: 2264795 - RNA, 19 nt, Artificial Sequence
  Description of Artificial Sequence: Synthetic oligonucleotide
  Antisense strand to SEQ ID NO: 2264794
uuugcuauagaauagucac

SEQ ID NO: 2264796 - RNA, 19 nt, Artificial Sequence
  Description of Artificial Sequence: Synthetic oligonucleotide
  Sense strand starting at position 1008 of SEQ ID NO: 1884427
agauguuggaauuguguua

SEQ ID NO: 2264797 - RNA, 19 nt, Artificial Sequence
  Description of Artificial Sequence: Synthetic oligonucleotide
  Antisense strand to SEQ ID NO: 2264796
uaacacaauuccaacaucu

SEQ ID NO: 2264798 - RNA, 19 nt, Artificial Sequence
  Description of Artificial Sequence: Synthetic oligonucleotide
  Sense strand starting at position 1062 of SEQ ID NO: 1884427
auuuaaaugucguaggaaa

SEQ ID NO: 2264799 - RNA, 19 nt, Artificial Sequence
  Description of Artificial Sequence: Synthetic oligonucleotide
  Antisense strand to SEQ ID NO: 2264798
uuuccuacgacauuuaaau

SEQ ID NO: 2264800 - RNA, 19 nt, Artificial Sequence
  Description of Artificial Sequence: Synthetic oligonucleotide
  Sense strand starting at position 1109 of SEQ ID NO: 1884427
aggaccaggugcucuaaua

SEQ ID NO: 2264801 - RNA, 19 nt, Artificial Sequence
  Description of Artificial Sequence: Synthetic oligonucleotide
  Antisense strand to SEQ ID NO: 2264800
uauuagagcaccugguccu

SEQ ID NO: 2264802 - RNA, 19 nt, Artificial Sequence
  Description of Artificial Sequence: Synthetic oligonucleotide
  Sense strand starting at position 1290 of SEQ ID NO: 1884427
guuguuuaaguuuauggaa

SEQ ID NO: 2264803 - RNA, 19 nt, Artificial Sequence
  Description of Artificial Sequence: Synthetic oligonucleotide
  Antisense strand to SEQ ID NO: 2264802
uuccauaaacuuaaacaac

SEQ ID NO: 2264804 - RNA, 19 nt, Artificial Sequence
  Description of Artificial Sequence: Synthetic oligonucleotide
  Sense strand starting at position 1303 of SEQ ID NO: 1884427
auggaaguaugacuccauu

SEQ ID NO: 2264805 - RNA, 19 nt, Artificial Sequence
  Description of Artificial Sequence: Synthetic oligonucleotide
  Antisense strand to SEQ ID NO: 2264804
aauggagucauacuuccau

SEQ ID NO: 2264806 - RNA, 19 nt, Artificial Sequence
  Description of Artificial Sequence: Synthetic oligonucleotide
  Sense strand starting at position 1338 of SEQ ID NO: 1884427
gucgcaaacgauggaauaa

SEQ ID NO: 2264807 - RNA, 19 nt, Artificial Sequence
  Description of Artificial Sequence: Synthetic oligonucleotide
  Antisense strand to SEQ ID NO: 2264806
uuauuccaucguuugcgac

SEQ ID NO: 2264808 - RNA, 19 nt, Artificial Sequence
  Description of Artificial Sequence: Synthetic oligonucleotide
  Sense strand starting at position 1372 of SEQ ID NO: 1884427
auuaccugguaaguauaaa

SEQ ID NO: 2264809 - RNA, 19 nt, Artificial Sequence
  Description of Artificial Sequence: Synthetic oligonucleotide
  Antisense strand to SEQ ID NO: 2264808
uuuauacuuaccagguaau

SEQ ID NO: 2264810 - RNA, 19 nt, Artificial Sequence
  Description of Artificial Sequence: Synthetic oligonucleotide
  Sense strand starting at position 1472 of SEQ ID NO: 1884427
auguuuaacgugcacuuaa

SEQ ID NO: 2264811 - RNA, 19 nt, Artificial Sequence
  Description of Artificial Sequence: Synthetic oligonucleotide
  Antisense strand to SEQ ID NO: 2264810
uuaagugcacguuaaacau

SEQ ID NO: 2264812 - RNA, 19 nt, Artificial Sequence
  Description of Artificial Sequence: Synthetic oligonucleotide
  Sense strand starting at position 1591 of SEQ ID NO: 1884427
cggacauuccuaugggaaa

SEQ ID NO: 2264813 - RNA, 19 nt, Artificial Sequence
  Description of Artificial Sequence: Synthetic oligonucleotide
  Antisense strand to SEQ ID NO: 2264812
uuucccauaggaauguccg

SEQ ID NO: 2264814 - RNA, 19 nt, Artificial Sequence
  Description of Artificial Sequence: Synthetic oligonucleotide
  Sense strand starting at position 2162 of SEQ ID NO: 1884427
cucagagacuucgcgaaua

SEQ ID NO: 2264815 - RNA, 19 nt, Artificial Sequence
  Description of Artificial Sequence: Synthetic oligonucleotide
  Antisense strand to SEQ ID NO: 2264814
uauucgcgaagucucugag

SEQ ID NO: 2264816 - RNA, 19 nt, Artificial Sequence
  Description of Artificial Sequence: Synthetic oligonucleotide
  Sense strand starting at position 2164 of SEQ ID NO: 1884427
cagagacuucgcgaauaug

SEQ ID NO: 2264817 - RNA, 19 nt, Artificial Sequence
  Description of Artificial Sequence: Synthetic oligonucleotide
  Antisense strand to SEQ ID NO: 2264816
cauauucgcgaagucucug

SEQ ID NO: 2264818 - RNA, 19 nt, Artificial Sequence
  Description of Artificial Sequence: Synthetic oligonucleotide
  Sense strand starting at position 2174 of SEQ ID NO: 1884427
gcgaauauggcuuugcgca

SEQ ID NO: 2264819 - RNA, 19 nt, Artificial Sequence
  Description of Artificial Sequence: Synthetic oligonucleotide
  Antisense strand to SEQ ID NO: 2264818
ugcgcaaagccauauucgc

SEQ ID NO: 2264820 - RNA, 19 nt, Artificial Sequence
  Description of Artificial Sequence: Synthetic oligonucleotide
  Sense strand starting at position 2578 of SEQ ID NO: 1884427
ugaguucucggugaaggug

SEQ ID NO: 2264821 - RNA, 19 nt, Artificial Sequence
  Description of Artificial Sequence: Synthetic oligonucleotide
  Antisense strand to SEQ ID NO: 2264820
caccuucaccgagaacuca

SEQ ID NO: 2264822 - RNA, 19 nt, Artificial Sequence
  Description of Artificial Sequence: Synthetic oligonucleotide
  Sense strand starting at position 3296 of SEQ ID NO: 1884427
ggaagcacuucccuaacuu

SEQ ID NO: 2264823 - RNA, 19 nt, Artificial Sequence
  Description of Artificial Sequence: Synthetic oligonucleotide
  Antisense strand to SEQ ID NO: 2264822
aaguuagggaagugcuucc

SEQ ID NO: 2264824 - RNA, 19 nt, Artificial Sequence
  Description of Artificial Sequence: Synthetic oligonucleotide
  Sense strand starting at position 3511 of SEQ ID NO: 1884427
agagcuuucggagagaccu

SEQ ID NO: 2264825 - RNA, 19 nt, Artificial Sequence
  Description of Artificial Sequence: Synthetic oligonucleotide
  Antisense strand to SEQ ID NO: 2264824
aggucucuccgaaagcucu

SEQ ID NO: 2264826 - RNA, 19 nt, Artificial Sequence
  Description of Artificial Sequence: Synthetic oligonucleotide
  Sense strand starting at position 3589 of SEQ ID NO: 1884427
gauguugcucgugucugua

SEQ ID NO: 2264827 - RNA, 19 nt, Artificial Sequence
  Description of Artificial Sequence: Synthetic oligonucleotide
  Antisense strand to SEQ ID NO: 2264826
uacagacacgagcaacauc

SEQ ID NO: 2264828 - RNA, 19 nt, Artificial Sequence
  Description of Artificial Sequence: Synthetic oligonucleotide
  Sense strand starting at position 3620 of SEQ ID NO: 1884427
uauugaucucagugcucag

SEQ ID NO: 2264829 - RNA, 19 nt, Artificial Sequence
  Description of Artificial Sequence: Synthetic oligonucleotide
  Antisense strand to SEQ ID NO: 2264828
cugagcacugagaucaaua

SEQ ID NO: 2264830 - RNA, 19 nt, Artificial Sequence
  Description of Artificial Sequence: Synthetic oligonucleotide
  Sense strand starting at position 3646 of SEQ ID NO: 1884427
gauaguagaauguggcuuu

SEQ ID NO: 2264831 - RNA, 19 nt, Artificial Sequence
  Description of Artificial Sequence: Synthetic oligonucleotide
  Antisense strand to SEQ ID NO: 2264830
aaagccacauucuacuauc

SEQ ID NO: 2264832 - RNA, 19 nt, Artificial Sequence
  Description of Artificial Sequence: Synthetic oligonucleotide
  Sense strand starting at position 3673 of SEQ ID NO: 1884427
auucguucugagccguuua

SEQ ID NO: 2264833 - RNA, 19 nt, Artificial Sequence
  Description of Artificial Sequence: Synthetic oligonucleotide
  Antisense strand to SEQ ID NO: 2264832
uaaacggcucagaacgaau

SEQ ID NO: 2264834 - RNA, 19 nt, Artificial Sequence
  Description of Artificial Sequence: Synthetic oligonucleotide
  Sense strand starting at position 3675 of SEQ ID NO: 1884427
ucguucugagccguuuaaa

SEQ ID NO: 2264835 - RNA, 19 nt, Artificial Sequence
  Description of Artificial Sequence: Synthetic oligonucleotide
  Antisense strand to SEQ ID NO: 2264834
uuuaaacggcucagaacga

SEQ ID NO: 2264836 - RNA, 19 nt, Artificial Sequence
  Description of Artificial Sequence: Synthetic oligonucleotide
  Sense strand starting at position 3801 of SEQ ID NO: 1884427
cuuacagaucugcaaugca

SEQ ID NO: 2264837 - RNA, 19 nt, Artificial Sequence
  Description of Artificial Sequence: Synthetic oligonucleotide
  Antisense strand to SEQ ID NO: 2264836
ugcauugcagaucuguaag

SEQ ID NO: 2264838 - RNA, 19 nt, Artificial Sequence
  Description of Artificial Sequence: Synthetic oligonucleotide
  Sense strand starting at position 3825 of SEQ ID NO: 1884427
agugccaggaucugaaaua

SEQ ID NO: 2264839 - RNA, 19 nt, Artificial Sequence
  Description of Artificial Sequence: Synthetic oligonucleotide
  Antisense strand to SEQ ID NO: 2264838
uauuucagauccuggcacu

SEQ ID NO: 2264840 - RNA, 19 nt, Artificial Sequence
  Description of Artificial Sequence: Synthetic oligonucleotide
  Sense strand starting at position 3832 of SEQ ID NO: 1884427
ggaucugaaauacguugua

SEQ ID NO: 2264841 - RNA, 19 nt, Artificial Sequence
  Description of Artificial Sequence: Synthetic oligonucleotide
  Antisense strand to SEQ ID NO: 2264840
uacaacguauuucagaucc

SEQ ID NO: 2264842 - RNA, 19 nt, Artificial Sequence
  Description of Artificial Sequence: Synthetic oligonucleotide
  Sense strand starting at position 3835 of SEQ ID NO: 1884427
ucugaaauacguuguaauu

SEQ ID NO: 2264843 - RNA, 19 nt, Artificial Sequence
  Description of Artificial Sequence: Synthetic oligonucleotide
  Antisense strand to SEQ ID NO: 2264842
aauuacaacguauuucaga

SEQ ID NO: 2264844 - RNA, 19 nt, Artificial Sequence
  Description of Artificial Sequence: Synthetic oligonucleotide
  Sense strand starting at position 3841 of SEQ ID NO: 1884427
auacguuguaauugaauga

SEQ ID NO: 2264845 - RNA, 19 nt, Artificial Sequence
  Description of Artificial Sequence: Synthetic oligonucleotide
  Antisense strand to SEQ ID NO: 2264844
ucauucaauuacaacguau

SEQ ID NO: 2264846 - RNA, 19 nt, Artificial Sequence
  Description of Artificial Sequence: Synthetic oligonucleotide
  Sense strand starting at position 3863 of SEQ ID NO: 1884427
cuuauagaucuguauguua

SEQ ID NO: 2264847 - RNA, 19 nt, Artificial Sequence
  Description of Artificial Sequence: Synthetic oligonucleotide
  Antisense strand to SEQ ID NO: 2264846
uaacauacagaucuauaag

SEQ ID NO: 2264848 - RNA, 19 nt, Artificial Sequence
  Description of Artificial Sequence: Synthetic oligonucleotide
  Sense strand starting at position 3866 of SEQ ID NO: 1884427
auagaucuguauguuagca

SEQ ID NO: 2264849 - RNA, 19 nt, Artificial Sequence
  Description of Artificial Sequence: Synthetic oligonucleotide
  Antisense strand to SEQ ID NO: 2264848
ugcuaacauacagaucuau

SEQ ID NO: 2264850 - RNA, 19 nt, Artificial Sequence
  Description of Artificial Sequence: Synthetic oligonucleotide
  Sense strand starting at position 3904 of SEQ ID NO: 1884427
uuucucguuccagguauuu

SEQ ID NO: 2264851 - RNA, 19 nt, Artificial Sequence
  Description of Artificial Sequence: Synthetic oligonucleotide
  Antisense strand to SEQ ID NO: 2264850
aaauaccuggaacgagaaa

SEQ ID NO: 2264852 - RNA, 19 nt, Artificial Sequence
  Description of Artificial Sequence: Synthetic oligonucleotide
  Sense strand starting at position 3975 of SEQ ID NO: 1884427
gaagauucuucguugucaa

SEQ ID NO: 2264853 - RNA, 19 nt, Artificial Sequence
  Description of Artificial Sequence: Synthetic oligonucleotide
  Antisense strand to SEQ ID NO: 2264852
uugacaacgaagaaucuuc

SEQ ID NO: 2264854 - RNA, 19 nt, Artificial Sequence
  Description of Artificial Sequence: Synthetic oligonucleotide
  Sense strand starting at position 3976 of SEQ ID NO: 1884427
aagauucuucguugucaag

SEQ ID NO: 2264855 - RNA, 19 nt, Artificial Sequence
  Description of Artificial Sequence: Synthetic oligonucleotide
  Antisense strand to SEQ ID NO: 2264854
cuugacaacgaagaaucuu

SEQ ID NO: 2264856 - RNA, 19 nt, Artificial Sequence
  Description of Artificial Sequence: Synthetic oligonucleotide
  Sense strand starting at position 55 of SEQ ID NO: 1884428
ucagauucuugcuuccaga

SEQ ID NO: 2264857 - RNA, 19 nt, Artificial Sequence
  Description of Artificial Sequence: Synthetic oligonucleotide
  Antisense strand to SEQ ID NO: 2264856
ucuggaagcaagaaucuga

SEQ ID NO: 2264858 - RNA, 19 nt, Artificial Sequence
  Description of Artificial Sequence: Synthetic oligonucleotide
  Sense strand starting at position 236 of SEQ ID NO: 1884428
ggaacauucugaucccauu

SEQ ID NO: 2264859 - RNA, 19 nt, Artificial Sequence
  Description of Artificial Sequence: Synthetic oligonucleotide
  Antisense strand to SEQ ID NO: 2264858
aaugggaucagaauguucc

SEQ ID NO: 2264860 - RNA, 19 nt, Artificial Sequence
  Description of Artificial Sequence: Synthetic oligonucleotide
  Sense strand starting at position 372 of SEQ ID NO: 1884428
cugccuuugccagcuguua

SEQ ID NO: 2264861 - RNA, 19 nt, Artificial Sequence
  Description of Artificial Sequence: Synthetic oligonucleotide
  Antisense strand to SEQ ID NO: 2264860
uaacagcuggcaaaggcag

SEQ ID NO: 2264862 - RNA, 19 nt, Artificial Sequence
  Description of Artificial Sequence: Synthetic oligonucleotide
  Sense strand starting at position 441 of SEQ ID NO: 1884428
ggugguugugaauauacag

SEQ ID NO: 2264863 - RNA, 19 nt, Artificial Sequence
  Description of Artificial Sequence: Synthetic oligonucleotide
  Antisense strand to SEQ ID NO: 2264862
cuguauauucacaaccacc

SEQ ID NO: 2264864 - RNA, 19 nt, Artificial Sequence
  Description of Artificial Sequence: Synthetic oligonucleotide
  Sense strand starting at position 470 of SEQ ID NO: 1884428
uaacacaguugauucguaa

SEQ ID NO: 2264865 - RNA, 19 nt, Artificial Sequence
  Description of Artificial Sequence: Synthetic oligonucleotide
  Antisense strand to SEQ ID NO: 2264864
uuacgaaucaacuguguua

SEQ ID NO: 2264866 - RNA, 19 nt, Artificial Sequence
  Description of Artificial Sequence: Synthetic oligonucleotide
  Sense strand starting at position 544 of SEQ ID NO: 1884428
gaguuaugacuccagugau

SEQ ID NO: 2264867 - RNA, 19 nt, Artificial Sequence
  Description of Artificial Sequence: Synthetic oligonucleotide
  Antisense strand to SEQ ID NO: 2264866
aucacuggagucauaacuc

SEQ ID NO: 2264868 - RNA, 19 nt, Artificial Sequence
  Description of Artificial Sequence: Synthetic oligonucleotide
  Sense strand starting at position 547 of SEQ ID NO: 1884428
uuaugacuccagugauaga

SEQ ID NO: 2264869 - RNA, 19 nt, Artificial Sequence
  Description of Artificial Sequence: Synthetic oligonucleotide
  Antisense strand to SEQ ID NO: 2264868
ucuaucacuggagucauaa

SEQ ID NO: 2264870 - RNA, 19 nt, Artificial Sequence
  Description of Artificial Sequence: Synthetic oligonucleotide
  Sense strand starting at position 558 of SEQ ID NO: 1884428
gugauagacugcuccaugu

SEQ ID NO: 2264871 - RNA, 19 nt, Artificial Sequence
  Description of Artificial Sequence: Synthetic oligonucleotide
  Antisense strand to SEQ ID NO: 2264870
acauggagcagucuaucac

SEQ ID NO: 2264872 - RNA, 19 nt, Artificial Sequence
  Description of Artificial Sequence: Synthetic oligonucleotide
  Sense strand starting at position 560 of SEQ ID NO: 1884428
gauagacugcuccauguga

SEQ ID NO: 2264873 - RNA, 19 nt, Artificial Sequence
  Description of Artificial Sequence: Synthetic oligonucleotide
  Antisense strand to SEQ ID NO: 2264872
ucacauggagcagucuauc

SEQ ID NO: 2264874 - RNA, 19 nt, Artificial Sequence
  Description of Artificial Sequence: Synthetic oligonucleotide
  Sense strand starting at position 562 of SEQ ID NO: 1884428
uagacugcuccaugugagu

SEQ ID NO: 2264875 - RNA, 19 nt, Artificial Sequence
  Description of Artificial Sequence: Synthetic oligonucleotide
  Antisense strand to SEQ ID NO: 2264874
acucacauggagcagucua

SEQ ID NO: 2264876 - RNA, 19 nt, Artificial Sequence
  Description of Artificial Sequence: Synthetic oligonucleotide
  Sense strand starting at position 564 of SEQ ID NO: 1884428
gacugcuccaugugaguga

SEQ ID NO: 2264877 - RNA, 19 nt, Artificial Sequence
  Description of Artificial Sequence: Synthetic oligonucleotide
  Antisense strand to SEQ ID NO: 2264876
ucacucacauggagcaguc

SEQ ID NO: 2264878 - RNA, 19 nt, Artificial Sequence
  Description of Artificial Sequence: Synthetic oligonucleotide
  Sense strand starting at position 671 of SEQ ID NO: 1884428
cuaucuguacaauggguaa

SEQ ID NO: 2264879 - RNA, 19 nt, Artificial Sequence
  Description of Artificial Sequence: Synthetic oligonucleotide
  Antisense strand to SEQ ID NO: 2264878
uuacccauuguacagauag

SEQ ID NO: 2264880 - RNA, 19 nt, Artificial Sequence
  Description of Artificial Sequence: Synthetic oligonucleotide
  Sense strand starting at position 689 of SEQ ID NO: 1884428
aagugaucauaccucagga

SEQ ID NO: 2264881 - RNA, 19 nt, Artificial Sequence
  Description of Artificial Sequence: Synthetic oligonucleotide
  Antisense strand to SEQ ID NO: 2264880
uccugagguaugaucacuu

SEQ ID NO: 2264882 - RNA, 19 nt, Artificial Sequence
  Description of Artificial Sequence: Synthetic oligonucleotide
  Sense strand starting at position 725 of SEQ ID NO: 1884428
ugagguccuccaugccaaa

SEQ ID NO: 2264883 - RNA, 19 nt, Artificial Sequence
  Description of Artificial Sequence: Synthetic oligonucleotide
  Antisense strand to SEQ ID NO: 2264882
uuuggcauggaggaccuca

SEQ ID NO: 2264884 - RNA, 19 nt, Artificial Sequence
  Description of Artificial Sequence: Synthetic oligonucleotide
  Sense strand starting at position 759 of SEQ ID NO: 1884428
cucaguauaugcucaucuu

SEQ ID NO: 2264885 - RNA, 19 nt, Artificial Sequence
  Description of Artificial Sequence: Synthetic oligonucleotide
  Antisense strand to SEQ ID NO: 2264884
aagaugagcauauacugag

SEQ ID NO: 2264886 - RNA, 19 nt, Artificial Sequence
  Description of Artificial Sequence: Synthetic oligonucleotide
  Sense strand starting at position 760 of SEQ ID NO: 1884428
ucaguauaugcucaucuua

SEQ ID NO: 2264887 - RNA, 19 nt, Artificial Sequence
  Description of Artificial Sequence: Synthetic oligonucleotide
  Antisense strand to SEQ ID NO: 2264886
uaagaugagcauauacuga

SEQ ID NO: 2264888 - RNA, 19 nt, Artificial Sequence
  Description of Artificial Sequence: Synthetic oligonucleotide
  Sense strand starting at position 762 of SEQ ID NO: 1884428
aguauaugcucaucuuauc

SEQ ID NO: 2264889 - RNA, 19 nt, Artificial Sequence
  Description of Artificial Sequence: Synthetic oligonucleotide
  Antisense strand to SEQ ID NO: 2264888
gauaagaugagcauauacu

SEQ ID NO: 2264890 - RNA, 19 nt, Artificial Sequence
  Description of Artificial Sequence: Synthetic oligonucleotide
  Sense strand starting at position 767 of SEQ ID NO: 1884428
augcucaucuuaucuguga

SEQ ID NO: 2264891 - RNA, 19 nt, Artificial Sequence
  Description of Artificial Sequence: Synthetic oligonucleotide
  Antisense strand to SEQ ID NO: 2264890
ucacagauaagaugagcau

SEQ ID NO: 2264892 - RNA, 19 nt, Artificial Sequence
  Description of Artificial Sequence: Synthetic oligonucleotide
  Sense strand starting at position 770 of SEQ ID NO: 1884428
cucaucuuaucugugauca

SEQ ID NO: 2264893 - RNA, 19 nt, Artificial Sequence
  Description of Artificial Sequence: Synthetic oligonucleotide
  Antisense strand to SEQ ID NO: 2264892
ugaucacagauaagaugag

SEQ ID NO: 2264894 - RNA, 19 nt, Artificial Sequence
  Description of Artificial Sequence: Synthetic oligonucleotide
  Sense strand starting at position 771 of SEQ ID NO: 1884428
ucaucuuaucugugaucau

SEQ ID NO: 2264895 - RNA, 19 nt, Artificial Sequence
  Description of Artificial Sequence: Synthetic oligonucleotide
  Antisense strand to SEQ ID NO: 2264894
augaucacagauaagauga

SEQ ID NO: 2264896 - RNA, 19 nt, Artificial Sequence
  Description of Artificial Sequence: Synthetic oligonucleotide
  Sense strand starting at position 1047 of SEQ ID NO: 1884428
gcuuguaacacuguugugu

SEQ ID NO: 2264897 - RNA, 19 nt, Artificial Sequence
  Description of Artificial Sequence: Synthetic oligonucleotide
  Antisense strand to SEQ ID NO: 2264896
acacaacaguguuacaagc

SEQ ID NO: 2264898 - RNA, 19 nt, Artificial Sequence
  Description of Artificial Sequence: Synthetic oligonucleotide
  Sense strand starting at position 1080 of SEQ ID NO: 1884428
ggcaccuuuguggaugaga

SEQ ID NO: 2264899 - RNA, 19 nt, Artificial Sequence
  Description of Artificial Sequence: Synthetic oligonucleotide
  Antisense strand to SEQ ID NO: 2264898
ucucauccacaaaggugcc

SEQ ID NO: 2264900 - RNA, 19 nt, Artificial Sequence
  Description of Artificial Sequence: Synthetic oligonucleotide
  Sense strand starting at position 1082 of SEQ ID NO: 1884428
caccuuuguggaugagaaa

SEQ ID NO: 2264901 - RNA, 19 nt, Artificial Sequence
  Description of Artificial Sequence: Synthetic oligonucleotide
  Antisense strand to SEQ ID NO: 2264900
uuucucauccacaaaggug

SEQ ID NO: 2264902 - RNA, 19 nt, Artificial Sequence
  Description of Artificial Sequence: Synthetic oligonucleotide
  Sense strand starting at position 1091 of SEQ ID NO: 1884428
ggaugagaaacuggugucu

SEQ ID NO: 2264903 - RNA, 19 nt, Artificial Sequence
  Description of Artificial Sequence: Synthetic oligonucleotide
  Antisense strand to SEQ ID NO: 2264902
agacaccaguuucucaucc

SEQ ID NO: 2264904 - RNA, 19 nt, Artificial Sequence
  Description of Artificial Sequence: Synthetic oligonucleotide
  Sense strand starting at position 1097 of SEQ ID NO: 1884428
gaaacuggugucuauggua

SEQ ID NO: 2264905 - RNA, 19 nt, Artificial Sequence
  Description of Artificial Sequence: Synthetic oligonucleotide
  Antisense strand to SEQ ID NO: 2264904
uaccauagacaccaguuuc

SEQ ID NO: 2264906 - RNA, 19 nt, Artificial Sequence
  Description of Artificial Sequence: Synthetic oligonucleotide
  Sense strand starting at position 2596 of SEQ ID NO: 1884428
cuuucuucugguugugaac

SEQ ID NO: 2264907 - RNA, 19 nt, Artificial Sequence
  Description of Artificial Sequence: Synthetic oligonucleotide
  Antisense strand to SEQ ID NO: 2264906
guucacaaccagaagaaag

SEQ ID NO: 2264908 - RNA, 19 nt, Artificial Sequence
  Description of Artificial Sequence: Synthetic oligonucleotide
  Sense strand starting at position 2686 of SEQ ID NO: 1884428
ggaugagaaugggacaguu

SEQ ID NO: 2264909 - RNA, 19 nt, Artificial Sequence
  Description of Artificial Sequence: Synthetic oligonucleotide
  Antisense strand to SEQ ID NO: 2264908
aacugucccauucucaucc

SEQ ID NO: 2264910 - RNA, 19 nt, Artificial Sequence
  Description of Artificial Sequence: Synthetic oligonucleotide
  Sense strand starting at position 3313 of SEQ ID NO: 1884428
ugaugucuccauuguggga

SEQ ID NO: 2264911 - RNA, 19 nt, Artificial Sequence
  Description of Artificial Sequence: Synthetic oligonucleotide
  Antisense strand to SEQ ID NO: 2264910
ucccacaauggagacauca

SEQ ID NO: 2264912 - RNA, 19 nt, Artificial Sequence
  Description of Artificial Sequence: Synthetic oligonucleotide
  Sense strand starting at position 3373 of SEQ ID NO: 1884428
ucuguaauacuagguaguu

SEQ ID NO: 2264913 - RNA, 19 nt, Artificial Sequence
  Description of Artificial Sequence: Synthetic oligonucleotide
  Antisense strand to SEQ ID NO: 2264912
aacuaccuaguauuacaga

SEQ ID NO: 2264914 - RNA, 19 nt, Artificial Sequence
  Description of Artificial Sequence: Synthetic oligonucleotide
  Sense strand starting at position 3374 of SEQ ID NO: 1884428
cuguaauacuagguaguua

SEQ ID NO: 2264915 - RNA, 19 nt, Artificial Sequence
  Description of Artificial Sequence: Synthetic oligonucleotide
  Antisense strand to SEQ ID NO: 2264914
uaacuaccuaguauuacag

SEQ ID NO: 2264916 - RNA, 19 nt, Artificial Sequence
  Description of Artificial Sequence: Synthetic oligonucleotide
  Sense strand starting at position 3378 of SEQ ID NO: 1884428
aauacuagguaguuagagu

SEQ ID NO: 2264917 - RNA, 19 nt, Artificial Sequence
  Description of Artificial Sequence: Synthetic oligonucleotide
  Antisense strand to SEQ ID NO: 2264916
acucuaacuaccuaguauu

SEQ ID NO: 2264918 - RNA, 19 nt, Artificial Sequence
  Description of Artificial Sequence: Synthetic oligonucleotide
  Sense strand starting at position 3385 of SEQ ID NO: 1884428
gguaguuagagucaaucaa

SEQ ID NO: 2264919 - RNA, 19 nt, Artificial Sequence
  Description of Artificial Sequence: Synthetic oligonucleotide
  Antisense strand to SEQ ID NO: 2264918
uugauugacucuaacuacc

SEQ ID NO: 2264920 - RNA, 19 nt, Artificial Sequence
  Description of Artificial Sequence: Synthetic oligonucleotide
  Sense strand starting at position 3700 of SEQ ID NO: 1884428
uagagucaaucuuuaaggu

SEQ ID NO: 2264921 - RNA, 19 nt, Artificial Sequence
  Description of Artificial Sequence: Synthetic oligonucleotide
  Antisense strand to SEQ ID NO: 2264920
accuuaaagauugacucua

SEQ ID NO: 2264922 - RNA, 19 nt, Artificial Sequence
  Description of Artificial Sequence: Synthetic oligonucleotide
  Sense strand starting at position 3701 of SEQ ID NO: 1884428
agagucaaucuuuaagguu

SEQ ID NO: 2264923 - RNA, 19 nt, Artificial Sequence
  Description of Artificial Sequence: Synthetic oligonucleotide
  Antisense strand to SEQ ID NO: 2264922
aaccuuaaagauugacucu

SEQ ID NO: 2264924 - RNA, 19 nt, Artificial Sequence
  Description of Artificial Sequence: Synthetic oligonucleotide
  Sense strand starting at position 3733 of SEQ ID NO: 1884428
ccaaauaugguccaccagu

SEQ ID NO: 2264925 - RNA, 19 nt, Artificial Sequence
  Description of Artificial Sequence: Synthetic oligonucleotide
  Antisense strand to SEQ ID NO: 2264924
acugguggaccauauuugg

SEQ ID NO: 2264926 - RNA, 19 nt, Artificial Sequence
  Description of Artificial Sequence: Synthetic oligonucleotide
  Sense strand starting at position 3809 of SEQ ID NO: 1884428
ucuggugaauggguacaau

SEQ ID NO: 2264927 - RNA, 19 nt, Artificial Sequence
  Description of Artificial Sequence: Synthetic oligonucleotide
  Antisense strand to SEQ ID NO: 2264926
auuguacccauucaccaga

SEQ ID NO: 2264928 - RNA, 19 nt, Artificial Sequence
  Description of Artificial Sequence: Synthetic oligonucleotide
  Sense strand starting at position 3812 of SEQ ID NO: 1884428
ggugaauggguacaauagu

SEQ ID NO: 2264929 - RNA, 19 nt, Artificial Sequence
  Description of Artificial Sequence: Synthetic oligonucleotide
  Antisense strand to SEQ ID NO: 2264928
acuauuguacccauucacc

SEQ ID NO: 2264930 - RNA, 19 nt, Artificial Sequence
  Description of Artificial Sequence: Synthetic oligonucleotide
  Sense strand starting at position 3887 of SEQ ID NO: 1884428
cagguaugcaauugguaug

SEQ ID NO: 2264931 - RNA, 19 nt, Artificial Sequence
  Description of Artificial Sequence: Synthetic oligonucleotide
  Antisense strand to SEQ ID NO: 2264930
cauaccaauugcauaccug

SEQ ID NO: 2264932 - RNA, 19 nt, Artificial Sequence
  Description of Artificial Sequence: Synthetic oligonucleotide
  Sense strand starting at position 3920 of SEQ ID NO: 1884428
ugugaugacagugaugguu

SEQ ID NO: 2264933 - RNA, 19 nt, Artificial Sequence
  Description of Artificial Sequence: Synthetic oligonucleotide
  Antisense strand to SEQ ID NO: 2264932
aaccaucacugucaucaca

SEQ ID NO: 2264934 - RNA, 19 nt, Artificial Sequence
  Description of Artificial Sequence: Synthetic oligonucleotide
  Sense strand starting at position 3928 of SEQ ID NO: 1884428
cagugaugguucucagcag

SEQ ID NO: 2264935 - RNA, 19 nt, Artificial Sequence
  Description of Artificial Sequence: Synthetic oligonucleotide
  Antisense strand to SEQ ID NO: 2264934
cugcugagaaccaucacug

SEQ ID NO: 2264936 - RNA, 19 nt, Artificial Sequence
  Description of Artificial Sequence: Synthetic oligonucleotide
  Sense strand starting at position 99 of SEQ ID NO: 1884430
gucuuaccacaaggacauu

SEQ ID NO: 2264937 - RNA, 19 nt, Artificial Sequence
  Description of Artificial Sequence: Synthetic oligonucleotide
  Antisense strand to SEQ ID NO: 2264936
aauguccuugugguaagac

SEQ ID NO: 2264938 - RNA, 19 nt, Artificial Sequence
  Description of Artificial Sequence: Synthetic oligonucleotide
  Sense strand starting at position 144 of SEQ ID NO: 1884430
ccauguaccucaccuauga

SEQ ID NO: 2264939 - RNA, 19 nt, Artificial Sequence
  Description of Artificial Sequence: Synthetic oligonucleotide
  Antisense strand to SEQ ID NO: 2264938
ucauaggugagguacaugg

SEQ ID NO: 2264940 - RNA, 19 nt, Artificial Sequence
  Description of Artificial Sequence: Synthetic oligonucleotide
  Sense strand starting at position 148 of SEQ ID NO: 1884430
guaccucaccuaugauguu

SEQ ID NO: 2264941 - RNA, 19 nt, Artificial Sequence
  Description of Artificial Sequence: Synthetic oligonucleotide
  Antisense strand to SEQ ID NO: 2264940
aacaucauaggugagguac

SEQ ID NO: 2264942 - RNA, 19 nt, Artificial Sequence
  Description of Artificial Sequence: Synthetic oligonucleotide
  Sense strand starting at position 278 of SEQ ID NO: 1884430
ccguuuguucuggagaaau

SEQ ID NO: 2264943 - RNA, 19 nt, Artificial Sequence
  Description of Artificial Sequence: Synthetic oligonucleotide
  Antisense strand to SEQ ID NO: 2264942
auuucuccagaacaaacgg

SEQ ID NO: 2264944 - RNA, 19 nt, Artificial Sequence
  Description of Artificial Sequence: Synthetic oligonucleotide
  Sense strand starting at position 580 of SEQ ID NO: 1884430
guggauucaugagugugaa

SEQ ID NO: 2264945 - RNA, 19 nt, Artificial Sequence
  Description of Artificial Sequence: Synthetic oligonucleotide
  Antisense strand to SEQ ID NO: 2264944
uucacacucaugaauccac

SEQ ID NO: 2264946 - RNA, 19 nt, Artificial Sequence
  Description of Artificial Sequence: Synthetic oligonucleotide
  Sense strand starting at position 581 of SEQ ID NO: 1884430
uggauucaugagugugaau

SEQ ID NO: 2264947 - RNA, 19 nt, Artificial Sequence
  Description of Artificial Sequence: Synthetic oligonucleotide
  Antisense strand to SEQ ID NO: 2264946
auucacacucaugaaucca

SEQ ID NO: 2264948 - RNA, 19 nt, Artificial Sequence
  Description of Artificial Sequence: Synthetic oligonucleotide
  Sense strand starting at position 691 of SEQ ID NO: 1884430
gggauugauggcugaugga

SEQ ID NO: 2264949 - RNA, 19 nt, Artificial Sequence
  Description of Artificial Sequence: Synthetic oligonucleotide
  Antisense strand to SEQ ID NO: 2264948
uccaucagccaucaauccc

SEQ ID NO: 2264950 - RNA, 19 nt, Artificial Sequence
  Description of Artificial Sequence: Synthetic oligonucleotide
  Sense strand starting at position 795 of SEQ ID NO: 1884430
guaggucuggccugaugga

SEQ ID NO: 2264951 - RNA, 19 nt, Artificial Sequence
  Description of Artificial Sequence: Synthetic oligonucleotide
  Antisense strand to SEQ ID NO: 2264950
uccaucaggccagaccuac

SEQ ID NO: 2264952 - RNA, 19 nt, Artificial Sequence
  Description of Artificial Sequence: Synthetic oligonucleotide
  Sense strand starting at position 986 of SEQ ID NO: 1884430
agacgcuuagcugagaaau

SEQ ID NO: 2264953 - RNA, 19 nt, Artificial Sequence
  Description of Artificial Sequence: Synthetic oligonucleotide
  Antisense strand to SEQ ID NO: 2264952
auuucucagcuaagcgucu

SEQ ID NO: 2264954 - RNA, 19 nt, Artificial Sequence
  Description of Artificial Sequence: Synthetic oligonucleotide
  Sense strand starting at position 1395 of SEQ ID NO: 1884430
acuuuaguaugaguuugau

SEQ ID NO: 2264955 - RNA, 19 nt, Artificial Sequence
  Description of Artificial Sequence: Synthetic oligonucleotide
  Antisense strand to SEQ ID NO: 2264954
aucaaacucauacuaaagu

SEQ ID NO: 2264956 - RNA, 19 nt, Artificial Sequence
  Description of Artificial Sequence: Synthetic oligonucleotide
  Sense strand starting at position 1398 of SEQ ID NO: 1884430
uuaguaugaguuugaucca

SEQ ID NO: 2264957 - RNA, 19 nt, Artificial Sequence
  Description of Artificial Sequence: Synthetic oligonucleotide
  Antisense strand to SEQ ID NO: 2264956
uggaucaaacucauacuaa

SEQ ID NO: 2264958 - RNA, 19 nt, Artificial Sequence
  Description of Artificial Sequence: Synthetic oligonucleotide
  Sense strand starting at position 1401 of SEQ ID NO: 1884430
guaugaguuugauccauag

SEQ ID NO: 2264959 - RNA, 19 nt, Artificial Sequence
  Description of Artificial Sequence: Synthetic oligonucleotide
  Antisense strand to SEQ ID NO: 2264958
cuauggaucaaacucauac

SEQ ID NO: 2264960 - RNA, 19 nt, Artificial Sequence
  Description of Artificial Sequence: Synthetic oligonucleotide
  Sense strand starting at position 1405 of SEQ ID NO: 1884430
gaguuugauccauaguuug

SEQ ID NO: 2264961 - RNA, 19 nt, Artificial Sequence
  Description of Artificial Sequence: Synthetic oligonucleotide
  Antisense strand to SEQ ID NO: 2264960
caaacuauggaucaaacuc

SEQ ID NO: 2264962 - RNA, 19 nt, Artificial Sequence
  Description of Artificial Sequence: Synthetic oligonucleotide
  Sense strand starting at position 1432 of SEQ ID NO: 1884430
ugggcuauuugcucuguga

SEQ ID NO: 2264963 - RNA, 19 nt, Artificial Sequence
  Description of Artificial Sequence: Synthetic oligonucleotide
  Antisense strand to SEQ ID NO: 2264962
ucacagagcaaauagccca

SEQ ID NO: 2264964 - RNA, 19 nt, Artificial Sequence
  Description of Artificial Sequence: Synthetic oligonucleotide
  Sense strand starting at position 1434 of SEQ ID NO: 1884430
ggcuauuugcucugugagu

SEQ ID NO: 2264965 - RNA, 19 nt, Artificial Sequence
  Description of Artificial Sequence: Synthetic oligonucleotide
  Antisense strand to SEQ ID NO: 2264964
acucacagagcaaauagcc

SEQ ID NO: 2264966 - RNA, 19 nt, Artificial Sequence
  Description of Artificial Sequence: Synthetic oligonucleotide
  Sense strand starting at position 1435 of SEQ ID NO: 1884430
gcuauuugcucugugaguc

SEQ ID NO: 2264967 - RNA, 19 nt, Artificial Sequence
  Description of Artificial Sequence: Synthetic oligonucleotide
  Antisense strand to SEQ ID NO: 2264966
gacucacagagcaaauagc

SEQ ID NO: 2264968 - RNA, 19 nt, Artificial Sequence
  Description of Artificial Sequence: Synthetic oligonucleotide
  Sense strand starting at position 1436 of SEQ ID NO: 1884430
cuauuugcucugugagucu

SEQ ID NO: 2264969 - RNA, 19 nt, Artificial Sequence
  Description of Artificial Sequence: Synthetic oligonucleotide
  Antisense strand to SEQ ID NO: 2264968
agacucacagagcaaauag

SEQ ID NO: 2264970 - RNA, 19 nt, Artificial Sequence
  Description of Artificial Sequence: Synthetic oligonucleotide
  Sense strand starting at position 1451 of SEQ ID NO: 1884430
gucucacuggcagaugaaa

SEQ ID NO: 2264971 - RNA, 19 nt, Artificial Sequence
  Description of Artificial Sequence: Synthetic oligonucleotide
  Antisense strand to SEQ ID NO: 2264970
uuucaucugccagugagac

SEQ ID NO: 2264972 - RNA, 19 nt, Artificial Sequence
  Description of Artificial Sequence: Synthetic oligonucleotide
  Sense strand starting at position 1468 of SEQ ID NO: 1884430
aaaguugagggaugcauua

SEQ ID NO: 2264973 - RNA, 19 nt, Artificial Sequence
  Description of Artificial Sequence: Synthetic oligonucleotide
  Antisense strand to SEQ ID NO: 2264972
uaaugcaucccucaacuuu

SEQ ID NO: 2264974 - RNA, 19 nt, Artificial Sequence
  Description of Artificial Sequence: Synthetic oligonucleotide
  Sense strand starting at position 1724 of SEQ ID NO: 1884430
gcaagaaugcagggagcuu

SEQ ID NO: 2264975 - RNA, 19 nt, Artificial Sequence
  Description of Artificial Sequence: Synthetic oligonucleotide
  Antisense strand to SEQ ID NO: 2264974
aagcucccugcauucuugc

SEQ ID NO: 2264976 - RNA, 19 nt, Artificial Sequence
  Description of Artificial Sequence: Synthetic oligonucleotide
  Sense strand starting at position 1947 of SEQ ID NO: 1884430
agaggaggcuuugcauauu

SEQ ID NO: 2264977 - RNA, 19 nt, Artificial Sequence
  Description of Artificial Sequence: Synthetic oligonucleotide
  Antisense strand to SEQ ID NO: 2264976
aauaugcaaagccuccucu

SEQ ID NO: 2264978 - RNA, 19 nt, Artificial Sequence
  Description of Artificial Sequence: Synthetic oligonucleotide
  Sense strand starting at position 2055 of SEQ ID NO: 1884430
ggaucauugugaccucaca

SEQ ID NO: 2264979 - RNA, 19 nt, Artificial Sequence
  Description of Artificial Sequence: Synthetic oligonucleotide
  Antisense strand to SEQ ID NO: 2264978
ugugaggucacaaugaucc

SEQ ID NO: 2264980 - RNA, 19 nt, Artificial Sequence
  Description of Artificial Sequence: Synthetic oligonucleotide
  Sense strand starting at position 2461 of SEQ ID NO: 1884430
gggagaagaucucugcuca

SEQ ID NO: 2264981 - RNA, 19 nt, Artificial Sequence
  Description of Artificial Sequence: Synthetic oligonucleotide
  Antisense strand to SEQ ID NO: 2264980
ugagcagagaucuucuccc

SEQ ID NO: 2264982 - RNA, 19 nt, Artificial Sequence
  Description of Artificial Sequence: Synthetic oligonucleotide
  Sense strand starting at position 2462 of SEQ ID NO: 1884430
ggagaagaucucugcucag

SEQ ID NO: 2264983 - RNA, 19 nt, Artificial Sequence
  Description of Artificial Sequence: Synthetic oligonucleotide
  Antisense strand to SEQ ID NO: 2264982
cugagcagagaucuucucc

SEQ ID NO: 2264984 - RNA, 19 nt, Artificial Sequence
  Description of Artificial Sequence: Synthetic oligonucleotide
  Sense strand starting at position 2465 of SEQ ID NO: 1884430
gaagaucucugcucagaug

SEQ ID NO: 2264985 - RNA, 19 nt, Artificial Sequence
  Description of Artificial Sequence: Synthetic oligonucleotide
  Antisense strand to SEQ ID NO: 2264984
caucugagcagagaucuuc

SEQ ID NO: 2264986 - RNA, 19 nt, Artificial Sequence
  Description of Artificial Sequence: Synthetic oligonucleotide
  Sense strand starting at position 2466 of SEQ ID NO: 1884430
aagaucucugcucagaugu

SEQ ID NO: 2264987 - RNA, 19 nt, Artificial Sequence
  Description of Artificial Sequence: Synthetic oligonucleotide
  Antisense strand to SEQ ID NO: 2264986
acaucugagcagagaucuu

SEQ ID NO: 2264988 - RNA, 19 nt, Artificial Sequence
  Description of Artificial Sequence: Synthetic oligonucleotide
  Sense strand starting at position 2589 of SEQ ID NO: 1884430
agcagucaucaccaucuga

SEQ ID NO: 2264989 - RNA, 19 nt, Artificial Sequence
  Description of Artificial Sequence: Synthetic oligonucleotide
  Antisense strand to SEQ ID NO: 2264988
ucagauggugaugacugcu

SEQ ID NO: 2264990 - RNA, 19 nt, Artificial Sequence
  Description of Artificial Sequence: Synthetic oligonucleotide
  Sense strand starting at position 2606 of SEQ ID NO: 1884430
gauauuccuguguaugcau

SEQ ID NO: 2264991 - RNA, 19 nt, Artificial Sequence
  Description of Artificial Sequence: Synthetic oligonucleotide
  Antisense strand to SEQ ID NO: 2264990
augcauacacaggaauauc

SEQ ID NO: 2264992 - RNA, 19 nt, Artificial Sequence
  Description of Artificial Sequence: Synthetic oligonucleotide
  Sense strand starting at position 2669 of SEQ ID NO: 1884430
gaagguaagcucuguggga

SEQ ID NO: 2264993 - RNA, 19 nt, Artificial Sequence
  Description of Artificial Sequence: Synthetic oligonucleotide
  Antisense strand to SEQ ID NO: 2264992
ucccacagagcuuaccuuc

SEQ ID NO: 2264994 - RNA, 19 nt, Artificial Sequence
  Description of Artificial Sequence: Synthetic oligonucleotide
  Sense strand starting at position 2711 of SEQ ID NO: 1884430
uguuuauuccgugacccag

SEQ ID NO: 2264995 - RNA, 19 nt, Artificial Sequence
  Description of Artificial Sequence: Synthetic oligonucleotide
  Antisense strand to SEQ ID NO: 2264994
cugggucacggaauaaaca

SEQ ID NO: 2264996 - RNA, 19 nt, Artificial Sequence
  Description of Artificial Sequence: Synthetic oligonucleotide
  Sense strand starting at position 2751 of SEQ ID NO: 1884430
auagaagugucgcugaaug

SEQ ID NO: 2264997 - RNA, 19 nt, Artificial Sequence
  Description of Artificial Sequence: Synthetic oligonucleotide
  Antisense strand to SEQ ID NO: 2264996
cauucagcgacacuucuau

SEQ ID NO: 2264998 - RNA, 19 nt, Artificial Sequence
  Description of Artificial Sequence: Synthetic oligonucleotide
  Sense strand starting at position 2753 of SEQ ID NO: 1884430
agaagugucgcugaaugaa

SEQ ID NO: 2264999 - RNA, 19 nt, Artificial Sequence
  Description of Artificial Sequence: Synthetic oligonucleotide
  Antisense strand to SEQ ID NO: 2264998
uucauucagcgacacuucu

SEQ ID NO: 2265000 - RNA, 19 nt, Artificial Sequence
  Description of Artificial Sequence: Synthetic oligonucleotide
  Sense strand starting at position 2779 of SEQ ID NO: 1884430
augaauguccauuguguga

SEQ ID NO: 2265001 - RNA, 19 nt, Artificial Sequence
  Description of Artificial Sequence: Synthetic oligonucleotide
  Antisense strand to SEQ ID NO: 2265000
ucacacaauggacauucau

SEQ ID NO: 2265002 - RNA, 19 nt, Artificial Sequence
  Description of Artificial Sequence: Synthetic oligonucleotide
  Sense strand starting at position 2783 of SEQ ID NO: 1884430
auguccauugugugaauga

SEQ ID NO: 2265003 - RNA, 19 nt, Artificial Sequence
  Description of Artificial Sequence: Synthetic oligonucleotide
  Antisense strand to SEQ ID NO: 2265002
ucauucacacaauggacau

SEQ ID NO: 2265004 - RNA, 19 nt, Artificial Sequence
  Description of Artificial Sequence: Synthetic oligonucleotide
  Sense strand starting at position 2844 of SEQ ID NO: 1884430
cugugacagcugugauaau

SEQ ID NO: 2265005 - RNA, 19 nt, Artificial Sequence
  Description of Artificial Sequence: Synthetic oligonucleotide
  Antisense strand to SEQ ID NO: 2265004
auuaucacagcugucacag

SEQ ID NO: 2265006 - RNA, 19 nt, Artificial Sequence
  Description of Artificial Sequence: Synthetic oligonucleotide
  Sense strand starting at position 3039 of SEQ ID NO: 1884430
ccacaugacuuguccaaag

SEQ ID NO: 2265007 - RNA, 19 nt, Artificial Sequence
  Description of Artificial Sequence: Synthetic oligonucleotide
  Antisense strand to SEQ ID NO: 2265006
cuuuggacaagucaugugg

SEQ ID NO: 2265008 - RNA, 19 nt, Artificial Sequence
  Description of Artificial Sequence: Synthetic oligonucleotide
  Sense strand starting at position 3161 of SEQ ID NO: 1884430
aacagucuccugggacaau

SEQ ID NO: 2265009 - RNA, 19 nt, Artificial Sequence
  Description of Artificial Sequence: Synthetic oligonucleotide
  Antisense strand to SEQ ID NO: 2265008
auugucccaggagacuguu

SEQ ID NO: 2265010 - RNA, 19 nt, Artificial Sequence
  Description of Artificial Sequence: Synthetic oligonucleotide
  Sense strand starting at position 3209 of SEQ ID NO: 1884430
caauguguugagggcacau

SEQ ID NO: 2265011 - RNA, 19 nt, Artificial Sequence
  Description of Artificial Sequence: Synthetic oligonucleotide
  Antisense strand to SEQ ID NO: 2265010
augugcccucaacacauug

SEQ ID NO: 2265012 - RNA, 19 nt, Artificial Sequence
  Description of Artificial Sequence: Synthetic oligonucleotide
  Sense strand starting at position 3322 of SEQ ID NO: 1884430
uggucucccguggagauua

SEQ ID NO: 2265013 - RNA, 19 nt, Artificial Sequence
  Description of Artificial Sequence: Synthetic oligonucleotide
  Antisense strand to SEQ ID NO: 2265012
uaaucuccacgggagacca

SEQ ID NO: 2265014 - RNA, 19 nt, Artificial Sequence
  Description of Artificial Sequence: Synthetic oligonucleotide
  Sense strand starting at position 3702 of SEQ ID NO: 1884430
uugucuaagucuucccaaa

SEQ ID NO: 2265015 - RNA, 19 nt, Artificial Sequence
  Description of Artificial Sequence: Synthetic oligonucleotide
  Antisense strand to SEQ ID NO: 2265014
uuugggaagacuuagacaa

SEQ ID NO: 2265016 - RNA, 19 nt, Artificial Sequence
  Description of Artificial Sequence: Synthetic oligonucleotide
  Sense strand starting at position 36 of SEQ ID NO: 1884429
auacaaaggccauguaauu

SEQ ID NO: 2265017 - RNA, 19 nt, Artificial Sequence
  Description of Artificial Sequence: Synthetic oligonucleotide
  Antisense strand to SEQ ID NO: 2265016
aauuacauggccuuuguau

SEQ ID NO: 2265018 - RNA, 19 nt, Artificial Sequence
  Description of Artificial Sequence: Synthetic oligonucleotide
  Sense strand starting at position 55 of SEQ ID NO: 1884429
cauagacuuugugugagga

SEQ ID NO: 2265019 - RNA, 19 nt, Artificial Sequence
  Description of Artificial Sequence: Synthetic oligonucleotide
  Antisense strand to SEQ ID NO: 2265018
uccucacacaaagucuaug

SEQ ID NO: 2265020 - RNA, 19 nt, Artificial Sequence
  Description of Artificial Sequence: Synthetic oligonucleotide
  Sense strand starting at position 56 of SEQ ID NO: 1884429
auagacuuugugugaggau

SEQ ID NO: 2265021 - RNA, 19 nt, Artificial Sequence
  Description of Artificial Sequence: Synthetic oligonucleotide
  Antisense strand to SEQ ID NO: 2265020
auccucacacaaagucuau

SEQ ID NO: 2265022 - RNA, 19 nt, Artificial Sequence
  Description of Artificial Sequence: Synthetic oligonucleotide
  Sense strand starting at position 63 of SEQ ID NO: 1884429
uugugugaggaugagcaau

SEQ ID NO: 2265023 - RNA, 19 nt, Artificial Sequence
  Description of Artificial Sequence: Synthetic oligonucleotide
  Antisense strand to SEQ ID NO: 2265022
auugcucauccucacacaa

SEQ ID NO: 2265024 - RNA, 19 nt, Artificial Sequence
  Description of Artificial Sequence: Synthetic oligonucleotide
  Sense strand starting at position 74 of SEQ ID NO: 1884429
ugagcaauagaguaugcaa

SEQ ID NO: 2265025 - RNA, 19 nt, Artificial Sequence
  Description of Artificial Sequence: Synthetic oligonucleotide
  Antisense strand to SEQ ID NO: 2265024
uugcauacucuauugcuca

SEQ ID NO: 2265026 - RNA, 19 nt, Artificial Sequence
  Description of Artificial Sequence: Synthetic oligonucleotide
  Sense strand starting at position 520 of SEQ ID NO: 1884429
ccauuugcugugugaggau

SEQ ID NO: 2265027 - RNA, 19 nt, Artificial Sequence
  Description of Artificial Sequence: Synthetic oligonucleotide
  Antisense strand to SEQ ID NO: 2265026
auccucacacagcaaaugg

SEQ ID NO: 2265028 - RNA, 19 nt, Artificial Sequence
  Description of Artificial Sequence: Synthetic oligonucleotide
  Sense strand starting at position 758 of SEQ ID NO: 1884429
gucucuccuccaugagacu

SEQ ID NO: 2265029 - RNA, 19 nt, Artificial Sequence
  Description of Artificial Sequence: Synthetic oligonucleotide
  Antisense strand to SEQ ID NO: 2265028
agucucauggaggagagac

SEQ ID NO: 2265030 - RNA, 19 nt, Artificial Sequence
  Description of Artificial Sequence: Synthetic oligonucleotide
  Sense strand starting at position 828 of SEQ ID NO: 1884429
aaucucugagcgggaagua

SEQ ID NO: 2265031 - RNA, 19 nt, Artificial Sequence
  Description of Artificial Sequence: Synthetic oligonucleotide
  Antisense strand to SEQ ID NO: 2265030
uacuucccgcucagagauu

SEQ ID NO: 2265032 - RNA, 19 nt, Artificial Sequence
  Description of Artificial Sequence: Synthetic oligonucleotide
  Sense strand starting at position 841 of SEQ ID NO: 1884429
gaaguacuagaauguggau

SEQ ID NO: 2265033 - RNA, 19 nt, Artificial Sequence
  Description of Artificial Sequence: Synthetic oligonucleotide
  Antisense strand to SEQ ID NO: 2265032
auccacauucuaguacuuc

SEQ ID NO: 2265034 - RNA, 19 nt, Artificial Sequence
  Description of Artificial Sequence: Synthetic oligonucleotide
  Sense strand starting at position 843 of SEQ ID NO: 1884429
aguacuagaauguggauau

SEQ ID NO: 2265035 - RNA, 19 nt, Artificial Sequence
  Description of Artificial Sequence: Synthetic oligonucleotide
  Antisense strand to SEQ ID NO: 2265034
auauccacauucuaguacu

SEQ ID NO: 2265036 - RNA, 19 nt, Artificial Sequence
  Description of Artificial Sequence: Synthetic oligonucleotide
  Sense strand starting at position 895 of SEQ ID NO: 1884429
agacgagcacucuguaaau

SEQ ID NO: 2265037 - RNA, 19 nt, Artificial Sequence
  Description of Artificial Sequence: Synthetic oligonucleotide
  Antisense strand to SEQ ID NO: 2265036
auuuacagagugcucgucu

SEQ ID NO: 2265038 - RNA, 19 nt, Artificial Sequence
  Description of Artificial Sequence: Synthetic oligonucleotide
  Sense strand starting at position 897 of SEQ ID NO: 1884429
acgagcacucuguaaauau

SEQ ID NO: 2265039 - RNA, 19 nt, Artificial Sequence
  Description of Artificial Sequence: Synthetic oligonucleotide
  Antisense strand to SEQ ID NO: 2265038
auauuuacagagugcucgu

SEQ ID NO: 2265040 - RNA, 19 nt, Artificial Sequence
  Description of Artificial Sequence: Synthetic oligonucleotide
  Sense strand starting at position 957 of SEQ ID NO: 1884429
agaccagaaugugucuauu

SEQ ID NO: 2265041 - RNA, 19 nt, Artificial Sequence
  Description of Artificial Sequence: Synthetic oligonucleotide
  Antisense strand to SEQ ID NO: 2265040
aauagacacauucuggucu

SEQ ID NO: 2265042 - RNA, 19 nt, Artificial Sequence
  Description of Artificial Sequence: Synthetic oligonucleotide
  Sense strand starting at position 959 of SEQ ID NO: 1884429
accagaaugugucuauuau

SEQ ID NO: 2265043 - RNA, 19 nt, Artificial Sequence
  Description of Artificial Sequence: Synthetic oligonucleotide
  Antisense strand to SEQ ID NO: 2265042
auaauagacacauucuggu

SEQ ID NO: 2265044 - RNA, 19 nt, Artificial Sequence
  Description of Artificial Sequence: Synthetic oligonucleotide
  Sense strand starting at position 960 of SEQ ID NO: 1884429
ccagaaugugucuauuaug

SEQ ID NO: 2265045 - RNA, 19 nt, Artificial Sequence
  Description of Artificial Sequence: Synthetic oligonucleotide
  Antisense strand to SEQ ID NO: 2265044
cauaauagacacauucugg

SEQ ID NO: 2265046 - RNA, 19 nt, Artificial Sequence
  Description of Artificial Sequence: Synthetic oligonucleotide
  Sense strand starting at position 1313 of SEQ ID NO: 1884429
aucaauugauguuuguuga

SEQ ID NO: 2265047 - RNA, 19 nt, Artificial Sequence
  Description of Artificial Sequence: Synthetic oligonucleotide
  Antisense strand to SEQ ID NO: 2265046
ucaacaaacaucaauugau

SEQ ID NO: 2265048 - RNA, 19 nt, Artificial Sequence
  Description of Artificial Sequence: Synthetic oligonucleotide
  Sense strand starting at position 1546 of SEQ ID NO: 1884429
gucuuaccacaaggacauu

SEQ ID NO: 2265049 - RNA, 19 nt, Artificial Sequence
  Description of Artificial Sequence: Synthetic oligonucleotide
  Antisense strand to SEQ ID NO: 2265048
aauguccuugugguaagac

SEQ ID NO: 2265050 - RNA, 19 nt, Artificial Sequence
  Description of Artificial Sequence: Synthetic oligonucleotide
  Sense strand starting at position 1591 of SEQ ID NO: 1884429
ccauguaccucaccuauga

SEQ ID NO: 2265051 - RNA, 19 nt, Artificial Sequence
  Description of Artificial Sequence: Synthetic oligonucleotide
  Antisense strand to SEQ ID NO: 2265050
ucauaggugagguacaugg

SEQ ID NO: 2265052 - RNA, 19 nt, Artificial Sequence
  Description of Artificial Sequence: Synthetic oligonucleotide
  Sense strand starting at position 1725 of SEQ ID NO: 1884429
ccguuuguucuggagaaau

SEQ ID NO: 2265053 - RNA, 19 nt, Artificial Sequence
  Description of Artificial Sequence: Synthetic oligonucleotide
  Antisense strand to SEQ ID NO: 2265052
auuucuccagaacaaacgg

SEQ ID NO: 2265054 - RNA, 19 nt, Artificial Sequence
  Description of Artificial Sequence: Synthetic oligonucleotide
  Sense strand starting at position 2027 of SEQ ID NO: 1884429
guggauucaugagugugaa

SEQ ID NO: 2265055 - RNA, 19 nt, Artificial Sequence
  Description of Artificial Sequence: Synthetic oligonucleotide
  Antisense strand to SEQ ID NO: 2265054
uucacacucaugaauccac

SEQ ID NO: 2265056 - RNA, 19 nt, Artificial Sequence
  Description of Artificial Sequence: Synthetic oligonucleotide
  Sense strand starting at position 2028 of SEQ ID NO: 1884429
uggauucaugagugugaau

SEQ ID NO: 2265057 - RNA, 19 nt, Artificial Sequence
  Description of Artificial Sequence: Synthetic oligonucleotide
  Antisense strand to SEQ ID NO: 2265056
auucacacucaugaaucca

SEQ ID NO: 2265058 - RNA, 19 nt, Artificial Sequence
  Description of Artificial Sequence: Synthetic oligonucleotide
  Sense strand starting at position 2138 of SEQ ID NO: 1884429
gggauugauggcugaugga

SEQ ID NO: 2265059 - RNA, 19 nt, Artificial Sequence
  Description of Artificial Sequence: Synthetic oligonucleotide
  Antisense strand to SEQ ID NO: 2265058
uccaucagccaucaauccc

SEQ ID NO: 2265060 - RNA, 19 nt, Artificial Sequence
  Description of Artificial Sequence: Synthetic oligonucleotide
  Sense strand starting at position 2433 of SEQ ID NO: 1884429
agacgcuuagcugagaaau

SEQ ID NO: 2265061 - RNA, 19 nt, Artificial Sequence
  Description of Artificial Sequence: Synthetic oligonucleotide
  Antisense strand to SEQ ID NO: 2265060
auuucucagcuaagcgucu

SEQ ID NO: 2265062 - RNA, 19 nt, Artificial Sequence
  Description of Artificial Sequence: Synthetic oligonucleotide
  Sense strand starting at position 2842 of SEQ ID NO: 1884429
acuuuaguaugaguuugau

SEQ ID NO: 2265063 - RNA, 19 nt, Artificial Sequence
  Description of Artificial Sequence: Synthetic oligonucleotide
  Antisense strand to SEQ ID NO: 2265062
aucaaacucauacuaaagu

SEQ ID NO: 2265064 - RNA, 19 nt, Artificial Sequence
  Description of Artificial Sequence: Synthetic oligonucleotide
  Sense strand starting at position 2845 of SEQ ID NO: 1884429
uuaguaugaguuugaucca

SEQ ID NO: 2265065 - RNA, 19 nt, Artificial Sequence
  Description of Artificial Sequence: Synthetic oligonucleotide
  Antisense strand to SEQ ID NO: 2265064
uggaucaaacucauacuaa

SEQ ID NO: 2265066 - RNA, 19 nt, Artificial Sequence
  Description of Artificial Sequence: Synthetic oligonucleotide
  Sense strand starting at position 2848 of SEQ ID NO: 1884429
guaugaguuugauccauag

SEQ ID NO: 2265067 - RNA, 19 nt, Artificial Sequence
  Description of Artificial Sequence: Synthetic oligonucleotide
  Antisense strand to SEQ ID NO: 2265066
cuauggaucaaacucauac

SEQ ID NO: 2265068 - RNA, 19 nt, Artificial Sequence
  Description of Artificial Sequence: Synthetic oligonucleotide
  Sense strand starting at position 2852 of SEQ ID NO: 1884429
gaguuugauccauaguuug

SEQ ID NO: 2265069 - RNA, 19 nt, Artificial Sequence
  Description of Artificial Sequence: Synthetic oligonucleotide
  Antisense strand to SEQ ID NO: 2265068
caaacuauggaucaaacuc

SEQ ID NO: 2265070 - RNA, 19 nt, Artificial Sequence
  Description of Artificial Sequence: Synthetic oligonucleotide
  Sense strand starting at position 2879 of SEQ ID NO: 1884429
ugggcuauuugcucuguga

SEQ ID NO: 2265071 - RNA, 19 nt, Artificial Sequence
  Description of Artificial Sequence: Synthetic oligonucleotide
  Antisense strand to SEQ ID NO: 2265070
ucacagagcaaauagccca

SEQ ID NO: 2265072 - RNA, 19 nt, Artificial Sequence
  Description of Artificial Sequence: Synthetic oligonucleotide
  Sense strand starting at position 2881 of SEQ ID NO: 1884429
ggcuauuugcucugugagu

SEQ ID NO: 2265073 - RNA, 19 nt, Artificial Sequence
  Description of Artificial Sequence: Synthetic oligonucleotide
  Antisense strand to SEQ ID NO: 2265072
acucacagagcaaauagcc

SEQ ID NO: 2265074 - RNA, 19 nt, Artificial Sequence
  Description of Artificial Sequence: Synthetic oligonucleotide
  Sense strand starting at position 2882 of SEQ ID NO: 1884429
gcuauuugcucugugaguc

SEQ ID NO: 2265075 - RNA, 19 nt, Artificial Sequence
  Description of Artificial Sequence: Synthetic oligonucleotide
  Antisense strand to SEQ ID NO: 2265074
gacucacagagcaaauagc

SEQ ID NO: 2265076 - RNA, 19 nt, Artificial Sequence
  Description of Artificial Sequence: Synthetic oligonucleotide
  Sense strand starting at position 2883 of SEQ ID NO: 1884429
cuauuugcucugugagucu

SEQ ID NO: 2265077 - RNA, 19 nt, Artificial Sequence
  Description of Artificial Sequence: Synthetic oligonucleotide
  Antisense strand to SEQ ID NO: 2265076
agacucacagagcaaauag

SEQ ID NO: 2265078 - RNA, 19 nt, Artificial Sequence
  Description of Artificial Sequence: Synthetic oligonucleotide
  Sense strand starting at position 2898 of SEQ ID NO: 1884429
gucucacuggcagaugaaa

SEQ ID NO: 2265079 - RNA, 19 nt, Artificial Sequence
  Description of Artificial Sequence: Synthetic oligonucleotide
  Antisense strand to SEQ ID NO: 2265078
uuucaucugccagugagac

SEQ ID NO: 2265080 - RNA, 19 nt, Artificial Sequence
  Description of Artificial Sequence: Synthetic oligonucleotide
  Sense strand starting at position 2915 of SEQ ID NO: 1884429
aaaguugagggaugcauua

SEQ ID NO: 2265081 - RNA, 19 nt, Artificial Sequence
  Description of Artificial Sequence: Synthetic oligonucleotide
  Antisense strand to SEQ ID NO: 2265080
uaaugcaucccucaacuuu

SEQ ID NO: 2265082 - RNA, 19 nt, Artificial Sequence
  Description of Artificial Sequence: Synthetic oligonucleotide
  Sense strand starting at position 3171 of SEQ ID NO: 1884429
gcaagaaugcagggagcuu

SEQ ID NO: 2265083 - RNA, 19 nt, Artificial Sequence
  Description of Artificial Sequence: Synthetic oligonucleotide
  Antisense strand to SEQ ID NO: 2265082
aagcucccugcauucuugc

SEQ ID NO: 2265084 - RNA, 19 nt, Artificial Sequence
  Description of Artificial Sequence: Synthetic oligonucleotide
  Sense strand starting at position 3394 of SEQ ID NO: 1884429
agaggaggcuuugcauauu

SEQ ID NO: 2265085 - RNA, 19 nt, Artificial Sequence
  Description of Artificial Sequence: Synthetic oligonucleotide
  Antisense strand to SEQ ID NO: 2265084
aauaugcaaagccuccucu

SEQ ID NO: 2265086 - RNA, 19 nt, Artificial Sequence
  Description of Artificial Sequence: Synthetic oligonucleotide
  Sense strand starting at position 3502 of SEQ ID NO: 1884429
ggaucauugugaccucaca

SEQ ID NO: 2265087 - RNA, 19 nt, Artificial Sequence
  Description of Artificial Sequence: Synthetic oligonucleotide
  Antisense strand to SEQ ID NO: 2265086
ugugaggucacaaugaucc

SEQ ID NO: 2265088 - RNA, 19 nt, Artificial Sequence
  Description of Artificial Sequence: Synthetic oligonucleotide
  Sense strand starting at position 3908 of SEQ ID NO: 1884429
gggagaagaucucugcuca

SEQ ID NO: 2265089 - RNA, 19 nt, Artificial Sequence
  Description of Artificial Sequence: Synthetic oligonucleotide
  Antisense strand to SEQ ID NO: 2265088
ugagcagagaucuucuccc

SEQ ID NO: 2265090 - RNA, 19 nt, Artificial Sequence
  Description of Artificial Sequence: Synthetic oligonucleotide
  Sense strand starting at position 3909 of SEQ ID NO: 1884429
ggagaagaucucugcucag

SEQ ID NO: 2265091 - RNA, 19 nt, Artificial Sequence
  Description of Artificial Sequence: Synthetic oligonucleotide
  Antisense strand to SEQ ID NO: 2265090
cugagcagagaucuucucc

SEQ ID NO: 2265092 - RNA, 19 nt, Artificial Sequence
  Description of Artificial Sequence: Synthetic oligonucleotide
  Sense strand starting at position 3912 of SEQ ID NO: 1884429
gaagaucucugcucagaug

SEQ ID NO: 2265093 - RNA, 19 nt, Artificial Sequence
  Description of Artificial Sequence: Synthetic oligonucleotide
  Antisense strand to SEQ ID NO: 2265092
caucugagcagagaucuuc

SEQ ID NO: 2265094 - RNA, 19 nt, Artificial Sequence
  Description of Artificial Sequence: Synthetic oligonucleotide
  Sense strand starting at position 3913 of SEQ ID NO: 1884429
aagaucucugcucagaugu

SEQ ID NO: 2265095 - RNA, 19 nt, Artificial Sequence
  Description of Artificial Sequence: Synthetic oligonucleotide
  Antisense strand to SEQ ID NO: 2265094
acaucugagcagagaucuu

SEQ ID NO: 2265096 - RNA, 19 nt, Artificial Sequence
  Description of Artificial Sequence: Synthetic oligonucleotide
  Sense strand starting at position 26 of SEQ ID NO: 1884432
gugggcugucaugaggaaa

SEQ ID NO: 2265097 - RNA, 19 nt, Artificial Sequence
  Description of Artificial Sequence: Synthetic oligonucleotide
  Antisense strand to SEQ ID NO: 2265096
uuuccucaugacagcccac

SEQ ID NO: 2265098 - RNA, 19 nt, Artificial Sequence
  Description of Artificial Sequence: Synthetic oligonucleotide
  Sense strand starting at position 210 of SEQ ID NO: 1884432
acaaauauugauuggcacu

SEQ ID NO: 2265099 - RNA, 19 nt, Artificial Sequence
  Description of Artificial Sequence: Synthetic oligonucleotide
  Antisense strand to SEQ ID NO: 2265098
agugccaaucaauauuugu

SEQ ID NO: 2265100 - RNA, 19 nt, Artificial Sequence
  Description of Artificial Sequence: Synthetic oligonucleotide
  Sense strand starting at position 216 of SEQ ID NO: 1884432
auugauuggcacuggauua

SEQ ID NO: 2265101 - RNA, 19 nt, Artificial Sequence
  Description of Artificial Sequence: Synthetic oligonucleotide
  Antisense strand to SEQ ID NO: 2265100
uaauccagugccaaucaau

SEQ ID NO: 2265102 - RNA, 19 nt, Artificial Sequence
  Description of Artificial Sequence: Synthetic oligonucleotide
  Sense strand starting at position 217 of SEQ ID NO: 1884432
uugauuggcacuggauuaa

SEQ ID NO: 2265103 - RNA, 19 nt, Artificial Sequence
  Description of Artificial Sequence: Synthetic oligonucleotide
  Antisense strand to SEQ ID NO: 2265102
uuaauccagugccaaucaa

SEQ ID NO: 2265104 - RNA, 19 nt, Artificial Sequence
  Description of Artificial Sequence: Synthetic oligonucleotide
  Sense strand starting at position 438 of SEQ ID NO: 1884432
ggauuugucucuucuccuu

SEQ ID NO: 2265105 - RNA, 19 nt, Artificial Sequence
  Description of Artificial Sequence: Synthetic oligonucleotide
  Antisense strand to SEQ ID NO: 2265104
aaggagaagagacaaaucc

SEQ ID NO: 2265106 - RNA, 19 nt, Artificial Sequence
  Description of Artificial Sequence: Synthetic oligonucleotide
  Sense strand starting at position 506 of SEQ ID NO: 1884432
uugaauucucuguaguauc

SEQ ID NO: 2265107 - RNA, 19 nt, Artificial Sequence
  Description of Artificial Sequence: Synthetic oligonucleotide
  Antisense strand to SEQ ID NO: 2265106
gauacuacagagaauucaa

SEQ ID NO: 2265108 - RNA, 19 nt, Artificial Sequence
  Description of Artificial Sequence: Synthetic oligonucleotide
  Sense strand starting at position 661 of SEQ ID NO: 1884432
uacguacaugguuaugauu

SEQ ID NO: 2265109 - RNA, 19 nt, Artificial Sequence
  Description of Artificial Sequence: Synthetic oligonucleotide
  Antisense strand to SEQ ID NO: 2265108
aaucauaaccauguacgua

SEQ ID NO: 2265110 - RNA, 19 nt, Artificial Sequence
  Description of Artificial Sequence: Synthetic oligonucleotide
  Sense strand starting at position 672 of SEQ ID NO: 1884432
uuaugauugugacuuggau

SEQ ID NO: 2265111 - RNA, 19 nt, Artificial Sequence
  Description of Artificial Sequence: Synthetic oligonucleotide
  Antisense strand to SEQ ID NO: 2265110
auccaagucacaaucauaa

SEQ ID NO: 2265112 - RNA, 19 nt, Artificial Sequence
  Description of Artificial Sequence: Synthetic oligonucleotide
  Sense strand starting at position 674 of SEQ ID NO: 1884432
augauugugacuuggauua

SEQ ID NO: 2265113 - RNA, 19 nt, Artificial Sequence
  Description of Artificial Sequence: Synthetic oligonucleotide
  Antisense strand to SEQ ID NO: 2265112
uaauccaagucacaaucau

SEQ ID NO: 2265114 - RNA, 19 nt, Artificial Sequence
  Description of Artificial Sequence: Synthetic oligonucleotide
  Sense strand starting at position 760 of SEQ ID NO: 1884432
aucugauacagguguagac

SEQ ID NO: 2265115 - RNA, 19 nt, Artificial Sequence
  Description of Artificial Sequence: Synthetic oligonucleotide
  Antisense strand to SEQ ID NO: 2265114
gucuacaccuguaucagau

SEQ ID NO: 2265116 - RNA, 19 nt, Artificial Sequence
  Description of Artificial Sequence: Synthetic oligonucleotide
  Sense strand starting at position 769 of SEQ ID NO: 1884432
agguguagacuauagcaga

SEQ ID NO: 2265117 - RNA, 19 nt, Artificial Sequence
  Description of Artificial Sequence: Synthetic oligonucleotide
  Antisense strand to SEQ ID NO: 2265116
ucugcuauagucuacaccu

SEQ ID NO: 2265118 - RNA, 19 nt, Artificial Sequence
  Description of Artificial Sequence: Synthetic oligonucleotide
  Sense strand starting at position 815 of SEQ ID NO: 1884432
caaugacuuccugggucau

SEQ ID NO: 2265119 - RNA, 19 nt, Artificial Sequence
  Description of Artificial Sequence: Synthetic oligonucleotide
  Antisense strand to SEQ ID NO: 2265118
augacccaggaagucauug

SEQ ID NO: 2265120 - RNA, 19 nt, Artificial Sequence
  Description of Artificial Sequence: Synthetic oligonucleotide
  Sense strand starting at position 816 of SEQ ID NO: 1884432
aaugacuuccugggucaua

SEQ ID NO: 2265121 - RNA, 19 nt, Artificial Sequence
  Description of Artificial Sequence: Synthetic oligonucleotide
  Antisense strand to SEQ ID NO: 2265120
uaugacccaggaagucauu

SEQ ID NO: 2265122 - RNA, 19 nt, Artificial Sequence
  Description of Artificial Sequence: Synthetic oligonucleotide
  Sense strand starting at position 825 of SEQ ID NO: 1884432
cugggucauagucaaggua

SEQ ID NO: 2265123 - RNA, 19 nt, Artificial Sequence
  Description of Artificial Sequence: Synthetic oligonucleotide
  Antisense strand to SEQ ID NO: 2265122
uaccuugacuaugacccag

SEQ ID NO: 2265124 - RNA, 19 nt, Artificial Sequence
  Description of Artificial Sequence: Synthetic oligonucleotide
  Sense strand starting at position 943 of SEQ ID NO: 1884432
ggguaacucuuauucuaca

SEQ ID NO: 2265125 - RNA, 19 nt, Artificial Sequence
  Description of Artificial Sequence: Synthetic oligonucleotide
  Antisense strand to SEQ ID NO: 2265124
uguagaauaagaguuaccc

SEQ ID NO: 2265126 - RNA, 19 nt, Artificial Sequence
  Description of Artificial Sequence: Synthetic oligonucleotide
  Sense strand starting at position 1084 of SEQ ID NO: 1884432
gcaacugaaccuuauugca

SEQ ID NO: 2265127 - RNA, 19 nt, Artificial Sequence
  Description of Artificial Sequence: Synthetic oligonucleotide
  Antisense strand to SEQ ID NO: 2265126
ugcaauaagguucaguugc

SEQ ID NO: 2265128 - RNA, 19 nt, Artificial Sequence
  Description of Artificial Sequence: Synthetic oligonucleotide
  Sense strand starting at position 1249 of SEQ ID NO: 1884432
gaagaauugugcuuaagau

SEQ ID NO: 2265129 - RNA, 19 nt, Artificial Sequence
  Description of Artificial Sequence: Synthetic oligonucleotide
  Antisense strand to SEQ ID NO: 2265128
aucuuaagcacaauucuuc

SEQ ID NO: 2265130 - RNA, 19 nt, Artificial Sequence
  Description of Artificial Sequence: Synthetic oligonucleotide
  Sense strand starting at position 1261 of SEQ ID NO: 1884432
uuaagauggucugugaauu

SEQ ID NO: 2265131 - RNA, 19 nt, Artificial Sequence
  Description of Artificial Sequence: Synthetic oligonucleotide
  Antisense strand to SEQ ID NO: 2265130
aauucacagaccaucuuaa

SEQ ID NO: 2265132 - RNA, 19 nt, Artificial Sequence
  Description of Artificial Sequence: Synthetic oligonucleotide
  Sense strand starting at position 1289 of SEQ ID NO: 1884432
guaguuuggagccacucaa

SEQ ID NO: 2265133 - RNA, 19 nt, Artificial Sequence
  Description of Artificial Sequence: Synthetic oligonucleotide
  Antisense strand to SEQ ID NO: 2265132
uugaguggcuccaaacuac

SEQ ID NO: 2265134 - RNA, 19 nt, Artificial Sequence
  Description of Artificial Sequence: Synthetic oligonucleotide
  Sense strand starting at position 1336 of SEQ ID NO: 1884432
uuagaacuggcauguaaca

SEQ ID NO: 2265135 - RNA, 19 nt, Artificial Sequence
  Description of Artificial Sequence: Synthetic oligonucleotide
  Antisense strand to SEQ ID NO: 2265134
uguuacaugccaguucuaa

SEQ ID NO: 2265136 - RNA, 19 nt, Artificial Sequence
  Description of Artificial Sequence: Synthetic oligonucleotide
  Sense strand starting at position 1828 of SEQ ID NO: 1884432
augauucuguugguuaaga

SEQ ID NO: 2265137 - RNA, 19 nt, Artificial Sequence
  Description of Artificial Sequence: Synthetic oligonucleotide
  Antisense strand to SEQ ID NO: 2265136
ucuuaaccaacagaaucau

SEQ ID NO: 2265138 - RNA, 19 nt, Artificial Sequence
  Description of Artificial Sequence: Synthetic oligonucleotide
  Sense strand starting at position 1829 of SEQ ID NO: 1884432
ugauucuguugguuaagag

SEQ ID NO: 2265139 - RNA, 19 nt, Artificial Sequence
  Description of Artificial Sequence: Synthetic oligonucleotide
  Antisense strand to SEQ ID NO: 2265138
cucuuaaccaacagaauca

SEQ ID NO: 2265140 - RNA, 19 nt, Artificial Sequence
  Description of Artificial Sequence: Synthetic oligonucleotide
  Sense strand starting at position 1844 of SEQ ID NO: 1884432
agagcacuugguuggaaga

SEQ ID NO: 2265141 - RNA, 19 nt, Artificial Sequence
  Description of Artificial Sequence: Synthetic oligonucleotide
  Antisense strand to SEQ ID NO: 2265140
ucuuccaaccaagugcucu

SEQ ID NO: 2265142 - RNA, 19 nt, Artificial Sequence
  Description of Artificial Sequence: Synthetic oligonucleotide
  Sense strand starting at position 1845 of SEQ ID NO: 1884432
gagcacuugguuggaagau

SEQ ID NO: 2265143 - RNA, 19 nt, Artificial Sequence
  Description of Artificial Sequence: Synthetic oligonucleotide
  Antisense strand to SEQ ID NO: 2265142
aucuuccaaccaagugcuc

SEQ ID NO: 2265144 - RNA, 19 nt, Artificial Sequence
  Description of Artificial Sequence: Synthetic oligonucleotide
  Sense strand starting at position 1855 of SEQ ID NO: 1884432
uuggaagauucuccaccua

SEQ ID NO: 2265145 - RNA, 19 nt, Artificial Sequence
  Description of Artificial Sequence: Synthetic oligonucleotide
  Antisense strand to SEQ ID NO: 2265144
uagguggagaaucuuccaa

SEQ ID NO: 2265146 - RNA, 19 nt, Artificial Sequence
  Description of Artificial Sequence: Synthetic oligonucleotide
  Sense strand starting at position 2286 of SEQ ID NO: 1884432
cuguucgagccauaacaaa

SEQ ID NO: 2265147 - RNA, 19 nt, Artificial Sequence
  Description of Artificial Sequence: Synthetic oligonucleotide
  Antisense strand to SEQ ID NO: 2265146
uuuguuauggcucgaacag

SEQ ID NO: 2265148 - RNA, 19 nt, Artificial Sequence
  Description of Artificial Sequence: Synthetic oligonucleotide
  Sense strand starting at position 2447 of SEQ ID NO: 1884432
cucucaggugauugaugau

SEQ ID NO: 2265149 - RNA, 19 nt, Artificial Sequence
  Description of Artificial Sequence: Synthetic oligonucleotide
  Antisense strand to SEQ ID NO: 2265148
aucaucaaucaccugagag

SEQ ID NO: 2265150 - RNA, 19 nt, Artificial Sequence
  Description of Artificial Sequence: Synthetic oligonucleotide
  Sense strand starting at position 2453 of SEQ ID NO: 1884432
ggugauugaugauuggcua

SEQ ID NO: 2265151 - RNA, 19 nt, Artificial Sequence
  Description of Artificial Sequence: Synthetic oligonucleotide
  Antisense strand to SEQ ID NO: 2265150
uagccaaucaucaaucacc

SEQ ID NO: 2265152 - RNA, 19 nt, Artificial Sequence
  Description of Artificial Sequence: Synthetic oligonucleotide
  Sense strand starting at position 2589 of SEQ ID NO: 1884432
cccagcuaggcuuaggaaa

SEQ ID NO: 2265153 - RNA, 19 nt, Artificial Sequence
  Description of Artificial Sequence: Synthetic oligonucleotide
  Antisense strand to SEQ ID NO: 2265152
uuuccuaagccuagcuggg

SEQ ID NO: 2265154 - RNA, 19 nt, Artificial Sequence
  Description of Artificial Sequence: Synthetic oligonucleotide
  Sense strand starting at position 2602 of SEQ ID NO: 1884432
aggaaaucuuucuuggccu

SEQ ID NO: 2265155 - RNA, 19 nt, Artificial Sequence
  Description of Artificial Sequence: Synthetic oligonucleotide
  Antisense strand to SEQ ID NO: 2265154
aggccaagaaagauuuccu

SEQ ID NO: 2265156 - RNA, 19 nt, Artificial Sequence
  Description of Artificial Sequence: Synthetic oligonucleotide
  Sense strand starting at position 2608 of SEQ ID NO: 1884432
ucuuucuuggccuaggaaa

SEQ ID NO: 2265157 - RNA, 19 nt, Artificial Sequence
  Description of Artificial Sequence: Synthetic oligonucleotide
  Antisense strand to SEQ ID NO: 2265156
uuuccuaggccaagaaaga

SEQ ID NO: 2265158 - RNA, 19 nt, Artificial Sequence
  Description of Artificial Sequence: Synthetic oligonucleotide
  Sense strand starting at position 2770 of SEQ ID NO: 1884432
aaggcugaggcuuauggaa

SEQ ID NO: 2265159 - RNA, 19 nt, Artificial Sequence
  Description of Artificial Sequence: Synthetic oligonucleotide
  Antisense strand to SEQ ID NO: 2265158
uuccauaagccucagccuu

SEQ ID NO: 2265160 - RNA, 19 nt, Artificial Sequence
  Description of Artificial Sequence: Synthetic oligonucleotide
  Sense strand starting at position 2779 of SEQ ID NO: 1884432
gcuuauggaaaguaaguaa

SEQ ID NO: 2265161 - RNA, 19 nt, Artificial Sequence
  Description of Artificial Sequence: Synthetic oligonucleotide
  Antisense strand to SEQ ID NO: 2265160
uuacuuacuuuccauaagc

SEQ ID NO: 2265162 - RNA, 19 nt, Artificial Sequence
  Description of Artificial Sequence: Synthetic oligonucleotide
  Sense strand starting at position 2834 of SEQ ID NO: 1884432
ccagaauucgcugacucuu

SEQ ID NO: 2265163 - RNA, 19 nt, Artificial Sequence
  Description of Artificial Sequence: Synthetic oligonucleotide
  Antisense strand to SEQ ID NO: 2265162
aagagucagcgaauucugg

SEQ ID NO: 2265164 - RNA, 19 nt, Artificial Sequence
  Description of Artificial Sequence: Synthetic oligonucleotide
  Sense strand starting at position 3013 of SEQ ID NO: 1884432
gucccuugugaauaggaau

SEQ ID NO: 2265165 - RNA, 19 nt, Artificial Sequence
  Description of Artificial Sequence: Synthetic oligonucleotide
  Antisense strand to SEQ ID NO: 2265164
auuccuauucacaagggac

SEQ ID NO: 2265166 - RNA, 19 nt, Artificial Sequence
  Description of Artificial Sequence: Synthetic oligonucleotide
  Sense strand starting at position 3394 of SEQ ID NO: 1884432
cagucuuaucuugaauggu

SEQ ID NO: 2265167 - RNA, 19 nt, Artificial Sequence
  Description of Artificial Sequence: Synthetic oligonucleotide
  Antisense strand to SEQ ID NO: 2265166
accauucaagauaagacug

SEQ ID NO: 2265168 - RNA, 19 nt, Artificial Sequence
  Description of Artificial Sequence: Synthetic oligonucleotide
  Sense strand starting at position 3403 of SEQ ID NO: 1884432
cuugaauggucuuucuuaa

SEQ ID NO: 2265169 - RNA, 19 nt, Artificial Sequence
  Description of Artificial Sequence: Synthetic oligonucleotide
  Antisense strand to SEQ ID NO: 2265168
uuaagaaagaccauucaag

SEQ ID NO: 2265170 - RNA, 19 nt, Artificial Sequence
  Description of Artificial Sequence: Synthetic oligonucleotide
  Sense strand starting at position 3652 of SEQ ID NO: 1884432
ugagucugaguuuaucaag

SEQ ID NO: 2265171 - RNA, 19 nt, Artificial Sequence
  Description of Artificial Sequence: Synthetic oligonucleotide
  Antisense strand to SEQ ID NO: 2265170
cuugauaaacucagacuca

SEQ ID NO: 2265172 - RNA, 19 nt, Artificial Sequence
  Description of Artificial Sequence: Synthetic oligonucleotide
  Sense strand starting at position 3754 of SEQ ID NO: 1884432
uggaguauugcgucugucu

SEQ ID NO: 2265173 - RNA, 19 nt, Artificial Sequence
  Description of Artificial Sequence: Synthetic oligonucleotide
  Antisense strand to SEQ ID NO: 2265172
agacagacgcaauacucca

SEQ ID NO: 2265174 - RNA, 19 nt, Artificial Sequence
  Description of Artificial Sequence: Synthetic oligonucleotide
  Sense strand starting at position 3755 of SEQ ID NO: 1884432
ggaguauugcgucugucuc

SEQ ID NO: 2265175 - RNA, 19 nt, Artificial Sequence
  Description of Artificial Sequence: Synthetic oligonucleotide
  Antisense strand to SEQ ID NO: 2265174
gagacagacgcaauacucc

SEQ ID NO: 2265176 - RNA, 19 nt, Artificial Sequence
  Description of Artificial Sequence: Synthetic oligonucleotide
  Sense strand starting at position 313 of SEQ ID NO: 1884431
auguguucuggucaucaca

SEQ ID NO: 2265177 - RNA, 19 nt, Artificial Sequence
  Description of Artificial Sequence: Synthetic oligonucleotide
  Antisense strand to SEQ ID NO: 2265176
ugugaugaccagaacacau

SEQ ID NO: 2265178 - RNA, 19 nt, Artificial Sequence
  Description of Artificial Sequence: Synthetic oligonucleotide
  Sense strand starting at position 439 of SEQ ID NO: 1884431
uaugauucuguugguuaag

SEQ ID NO: 2265179 - RNA, 19 nt, Artificial Sequence
  Description of Artificial Sequence: Synthetic oligonucleotide
  Antisense strand to SEQ ID NO: 2265178
cuuaaccaacagaaucaua

SEQ ID NO: 2265180 - RNA, 19 nt, Artificial Sequence
  Description of Artificial Sequence: Synthetic oligonucleotide
  Sense strand starting at position 440 of SEQ ID NO: 1884431
augauucuguugguuaaga

SEQ ID NO: 2265181 - RNA, 19 nt, Artificial Sequence
  Description of Artificial Sequence: Synthetic oligonucleotide
  Antisense strand to SEQ ID NO: 2265180
ucuuaaccaacagaaucau

SEQ ID NO: 2265182 - RNA, 19 nt, Artificial Sequence
  Description of Artificial Sequence: Synthetic oligonucleotide
  Sense strand starting at position 441 of SEQ ID NO: 1884431
ugauucuguugguuaagag

SEQ ID NO: 2265183 - RNA, 19 nt, Artificial Sequence
  Description of Artificial Sequence: Synthetic oligonucleotide
  Antisense strand to SEQ ID NO: 2265182
cucuuaaccaacagaauca

SEQ ID NO: 2265184 - RNA, 19 nt, Artificial Sequence
  Description of Artificial Sequence: Synthetic oligonucleotide
  Sense strand starting at position 456 of SEQ ID NO: 1884431
agagcacuugguuggaaga

SEQ ID NO: 2265185 - RNA, 19 nt, Artificial Sequence
  Description of Artificial Sequence: Synthetic oligonucleotide
  Antisense strand to SEQ ID NO: 2265184
ucuuccaaccaagugcucu

SEQ ID NO: 2265186 - RNA, 19 nt, Artificial Sequence
  Description of Artificial Sequence: Synthetic oligonucleotide
  Sense strand starting at position 457 of SEQ ID NO: 1884431
gagcacuugguuggaagau

SEQ ID NO: 2265187 - RNA, 19 nt, Artificial Sequence
  Description of Artificial Sequence: Synthetic oligonucleotide
  Antisense strand to SEQ ID NO: 2265186
aucuuccaaccaagugcuc

SEQ ID NO: 2265188 - RNA, 19 nt, Artificial Sequence
  Description of Artificial Sequence: Synthetic oligonucleotide
  Sense strand starting at position 467 of SEQ ID NO: 1884431
uuggaagauucuccaccua

SEQ ID NO: 2265189 - RNA, 19 nt, Artificial Sequence
  Description of Artificial Sequence: Synthetic oligonucleotide
  Antisense strand to SEQ ID NO: 2265188
uagguggagaaucuuccaa

SEQ ID NO: 2265190 - RNA, 19 nt, Artificial Sequence
  Description of Artificial Sequence: Synthetic oligonucleotide
  Sense strand starting at position 898 of SEQ ID NO: 1884431
cuguucgagccauaacaaa

SEQ ID NO: 2265191 - RNA, 19 nt, Artificial Sequence
  Description of Artificial Sequence: Synthetic oligonucleotide
  Antisense strand to SEQ ID NO: 2265190
uuuguuauggcucgaacag

SEQ ID NO: 2265192 - RNA, 19 nt, Artificial Sequence
  Description of Artificial Sequence: Synthetic oligonucleotide
  Sense strand starting at position 1025 of SEQ ID NO: 1884431
gguuuauaucgugaucauu

SEQ ID NO: 2265193 - RNA, 19 nt, Artificial Sequence
  Description of Artificial Sequence: Synthetic oligonucleotide
  Antisense strand to SEQ ID NO: 2265192
aaugaucacgauauaaacc

SEQ ID NO: 2265194 - RNA, 19 nt, Artificial Sequence
  Description of Artificial Sequence: Synthetic oligonucleotide
  Sense strand starting at position 1056 of SEQ ID NO: 1884431
gugcucucaggugauugau

SEQ ID NO: 2265195 - RNA, 19 nt, Artificial Sequence
  Description of Artificial Sequence: Synthetic oligonucleotide
  Antisense strand to SEQ ID NO: 2265194
aucaaucaccugagagcac

SEQ ID NO: 2265196 - RNA, 19 nt, Artificial Sequence
  Description of Artificial Sequence: Synthetic oligonucleotide
  Sense strand starting at position 1059 of SEQ ID NO: 1884431
cucucaggugauugaugau

SEQ ID NO: 2265197 - RNA, 19 nt, Artificial Sequence
  Description of Artificial Sequence: Synthetic oligonucleotide
  Antisense strand to SEQ ID NO: 2265196
aucaucaaucaccugagag

SEQ ID NO: 2265198 - RNA, 19 nt, Artificial Sequence
  Description of Artificial Sequence: Synthetic oligonucleotide
  Sense strand starting at position 1065 of SEQ ID NO: 1884431
ggugauugaugauuggcua

SEQ ID NO: 2265199 - RNA, 19 nt, Artificial Sequence
  Description of Artificial Sequence: Synthetic oligonucleotide
  Antisense strand to SEQ ID NO: 2265198
uagccaaucaucaaucacc

SEQ ID NO: 2265200 - RNA, 19 nt, Artificial Sequence
  Description of Artificial Sequence: Synthetic oligonucleotide
  Sense strand starting at position 1066 of SEQ ID NO: 1884431
gugauugaugauuggcuau

SEQ ID NO: 2265201 - RNA, 19 nt, Artificial Sequence
  Description of Artificial Sequence: Synthetic oligonucleotide
  Antisense strand to SEQ ID NO: 2265200
auagccaaucaucaaucac

SEQ ID NO: 2265202 - RNA, 19 nt, Artificial Sequence
  Description of Artificial Sequence: Synthetic oligonucleotide
  Sense strand starting at position 1201 of SEQ ID NO: 1884431
cccagcuaggcuuaggaaa

SEQ ID NO: 2265203 - RNA, 19 nt, Artificial Sequence
  Description of Artificial Sequence: Synthetic oligonucleotide
  Antisense strand to SEQ ID NO: 2265202
uuuccuaagccuagcuggg

SEQ ID NO: 2265204 - RNA, 19 nt, Artificial Sequence
  Description of Artificial Sequence: Synthetic oligonucleotide
  Sense strand starting at position 1214 of SEQ ID NO: 1884431
aggaaaucuuucuuggccu

SEQ ID NO: 2265205 - RNA, 19 nt, Artificial Sequence
  Description of Artificial Sequence: Synthetic oligonucleotide
  Antisense strand to SEQ ID NO: 2265204
aggccaagaaagauuuccu

SEQ ID NO: 2265206 - RNA, 19 nt, Artificial Sequence
  Description of Artificial Sequence: Synthetic oligonucleotide
  Sense strand starting at position 1220 of SEQ ID NO: 1884431
ucuuucuuggccuaggaaa

SEQ ID NO: 2265207 - RNA, 19 nt, Artificial Sequence
  Description of Artificial Sequence: Synthetic oligonucleotide
  Antisense strand to SEQ ID NO: 2265206
uuuccuaggccaagaaaga

SEQ ID NO: 2265208 - RNA, 19 nt, Artificial Sequence
  Description of Artificial Sequence: Synthetic oligonucleotide
  Sense strand starting at position 1222 of SEQ ID NO: 1884431
uuucuuggccuaggaaauc

SEQ ID NO: 2265209 - RNA, 19 nt, Artificial Sequence
  Description of Artificial Sequence: Synthetic oligonucleotide
  Antisense strand to SEQ ID NO: 2265208
gauuuccuaggccaagaaa

SEQ ID NO: 2265210 - RNA, 19 nt, Artificial Sequence
  Description of Artificial Sequence: Synthetic oligonucleotide
  Sense strand starting at position 1297 of SEQ ID NO: 1884431
ugcccaucacaugguaaau

SEQ ID NO: 2265211 - RNA, 19 nt, Artificial Sequence
  Description of Artificial Sequence: Synthetic oligonucleotide
  Antisense strand to SEQ ID NO: 2265210
auuuaccaugugaugggca

SEQ ID NO: 2265212 - RNA, 19 nt, Artificial Sequence
  Description of Artificial Sequence: Synthetic oligonucleotide
  Sense strand starting at position 1382 of SEQ ID NO: 1884431
aaggcugaggcuuauggaa

SEQ ID NO: 2265213 - RNA, 19 nt, Artificial Sequence
  Description of Artificial Sequence: Synthetic oligonucleotide
  Antisense strand to SEQ ID NO: 2265212
uuccauaagccucagccuu

SEQ ID NO: 2265214 - RNA, 19 nt, Artificial Sequence
  Description of Artificial Sequence: Synthetic oligonucleotide
  Sense strand starting at position 1391 of SEQ ID NO: 1884431
gcuuauggaaaguaaguaa

SEQ ID NO: 2265215 - RNA, 19 nt, Artificial Sequence
  Description of Artificial Sequence: Synthetic oligonucleotide
  Antisense strand to SEQ ID NO: 2265214
uuacuuacuuuccauaagc

SEQ ID NO: 2265216 - RNA, 19 nt, Artificial Sequence
  Description of Artificial Sequence: Synthetic oligonucleotide
  Sense strand starting at position 1446 of SEQ ID NO: 1884431
ccagaauucgcugacucuu

SEQ ID NO: 2265217 - RNA, 19 nt, Artificial Sequence
  Description of Artificial Sequence: Synthetic oligonucleotide
  Antisense strand to SEQ ID NO: 2265216
aagagucagcgaauucugg

SEQ ID NO: 2265218 - RNA, 19 nt, Artificial Sequence
  Description of Artificial Sequence: Synthetic oligonucleotide
  Sense strand starting at position 1625 of SEQ ID NO: 1884431
gucccuugugaauaggaau

SEQ ID NO: 2265219 - RNA, 19 nt, Artificial Sequence
  Description of Artificial Sequence: Synthetic oligonucleotide
  Antisense strand to SEQ ID NO: 2265218
auuccuauucacaagggac

SEQ ID NO: 2265220 - RNA, 19 nt, Artificial Sequence
  Description of Artificial Sequence: Synthetic oligonucleotide
  Sense strand starting at position 2006 of SEQ ID NO: 1884431
cagucuuaucuugaauggu

SEQ ID NO: 2265221 - RNA, 19 nt, Artificial Sequence
  Description of Artificial Sequence: Synthetic oligonucleotide
  Antisense strand to SEQ ID NO: 2265220
accauucaagauaagacug

SEQ ID NO: 2265222 - RNA, 19 nt, Artificial Sequence
  Description of Artificial Sequence: Synthetic oligonucleotide
  Sense strand starting at position 2015 of SEQ ID NO: 1884431
cuugaauggucuuucuuaa

SEQ ID NO: 2265223 - RNA, 19 nt, Artificial Sequence
  Description of Artificial Sequence: Synthetic oligonucleotide
  Antisense strand to SEQ ID NO: 2265222
uuaagaaagaccauucaag

SEQ ID NO: 2265224 - RNA, 19 nt, Artificial Sequence
  Description of Artificial Sequence: Synthetic oligonucleotide
  Sense strand starting at position 2261 of SEQ ID NO: 1884431
uacugagucugaguuuauc

SEQ ID NO: 2265225 - RNA, 19 nt, Artificial Sequence
  Description of Artificial Sequence: Synthetic oligonucleotide
  Antisense strand to SEQ ID NO: 2265224
gauaaacucagacucagua

SEQ ID NO: 2265226 - RNA, 19 nt, Artificial Sequence
  Description of Artificial Sequence: Synthetic oligonucleotide
  Sense strand starting at position 2264 of SEQ ID NO: 1884431
ugagucugaguuuaucaag

SEQ ID NO: 2265227 - RNA, 19 nt, Artificial Sequence
  Description of Artificial Sequence: Synthetic oligonucleotide
  Antisense strand to SEQ ID NO: 2265226
cuugauaaacucagacuca

SEQ ID NO: 2265228 - RNA, 19 nt, Artificial Sequence
  Description of Artificial Sequence: Synthetic oligonucleotide
  Sense strand starting at position 2366 of SEQ ID NO: 1884431
uggaguauugcgucugucu

SEQ ID NO: 2265229 - RNA, 19 nt, Artificial Sequence
  Description of Artificial Sequence: Synthetic oligonucleotide
  Antisense strand to SEQ ID NO: 2265228
agacagacgcaauacucca

SEQ ID NO: 2265230 - RNA, 19 nt, Artificial Sequence
  Description of Artificial Sequence: Synthetic oligonucleotide
  Sense strand starting at position 2367 of SEQ ID NO: 1884431
ggaguauugcgucugucuc

SEQ ID NO: 2265231 - RNA, 19 nt, Artificial Sequence
  Description of Artificial Sequence: Synthetic oligonucleotide
  Antisense strand to SEQ ID NO: 2265230
gagacagacgcaauacucc

SEQ ID NO: 2265232 - RNA, 19 nt, Artificial Sequence
  Description of Artificial Sequence: Synthetic oligonucleotide
  Sense strand starting at position 2741 of SEQ ID NO: 1884431
gggugaaagugaagagaug

SEQ ID NO: 2265233 - RNA, 19 nt, Artificial Sequence
  Description of Artificial Sequence: Synthetic oligonucleotide
  Antisense strand to SEQ ID NO: 2265232
caucucuucacuuucaccc

SEQ ID NO: 2265234 - RNA, 19 nt, Artificial Sequence
  Description of Artificial Sequence: Synthetic oligonucleotide
  Sense strand starting at position 2809 of SEQ ID NO: 1884431
guuuaaauccgagaucuuc

SEQ ID NO: 2265235 - RNA, 19 nt, Artificial Sequence
  Description of Artificial Sequence: Synthetic oligonucleotide
  Antisense strand to SEQ ID NO: 2265234
gaagaucucggauuuaaac

SEQ ID NO: 2265236 - RNA, 19 nt, Artificial Sequence
  Description of Artificial Sequence: Synthetic oligonucleotide
  Sense strand starting at position 2854 of SEQ ID NO: 1884431
gguacuuaauuguccaauu

SEQ ID NO: 2265237 - RNA, 19 nt, Artificial Sequence
  Description of Artificial Sequence: Synthetic oligonucleotide
  Antisense strand to SEQ ID NO: 2265236
aauuggacaauuaaguacc

SEQ ID NO: 2265238 - RNA, 19 nt, Artificial Sequence
  Description of Artificial Sequence: Synthetic oligonucleotide
  Sense strand starting at position 3373 of SEQ ID NO: 1884431
aauggaauacgguggugau

SEQ ID NO: 2265239 - RNA, 19 nt, Artificial Sequence
  Description of Artificial Sequence: Synthetic oligonucleotide
  Antisense strand to SEQ ID NO: 2265238
aucaccaccguauuccauu

SEQ ID NO: 2265240 - RNA, 19 nt, Artificial Sequence
  Description of Artificial Sequence: Synthetic oligonucleotide
  Sense strand starting at position 3374 of SEQ ID NO: 1884431
auggaauacgguggugaua

SEQ ID NO: 2265241 - RNA, 19 nt, Artificial Sequence
  Description of Artificial Sequence: Synthetic oligonucleotide
  Antisense strand to SEQ ID NO: 2265240
uaucaccaccguauuccau

SEQ ID NO: 2265242 - RNA, 19 nt, Artificial Sequence
  Description of Artificial Sequence: Synthetic oligonucleotide
  Sense strand starting at position 3395 of SEQ ID NO: 1884431
acaagccaucccuaggauu

SEQ ID NO: 2265243 - RNA, 19 nt, Artificial Sequence
  Description of Artificial Sequence: Synthetic oligonucleotide
  Antisense strand to SEQ ID NO: 2265242
aauccuagggauggcuugu

SEQ ID NO: 2265244 - RNA, 19 nt, Artificial Sequence
  Description of Artificial Sequence: Synthetic oligonucleotide
  Sense strand starting at position 3508 of SEQ ID NO: 1884431
uggugaggucauuaagauu

SEQ ID NO: 2265245 - RNA, 19 nt, Artificial Sequence
  Description of Artificial Sequence: Synthetic oligonucleotide
  Antisense strand to SEQ ID NO: 2265244
aaucuuaaugaccucacca

SEQ ID NO: 2265246 - RNA, 19 nt, Artificial Sequence
  Description of Artificial Sequence: Synthetic oligonucleotide
  Sense strand starting at position 3514 of SEQ ID NO: 1884431
ggucauuaagauuguagag

SEQ ID NO: 2265247 - RNA, 19 nt, Artificial Sequence
  Description of Artificial Sequence: Synthetic oligonucleotide
  Antisense strand to SEQ ID NO: 2265246
cucuacaaucuuaaugacc

SEQ ID NO: 2265248 - RNA, 19 nt, Artificial Sequence
  Description of Artificial Sequence: Synthetic oligonucleotide
  Sense strand starting at position 3590 of SEQ ID NO: 1884431
uucuuugcaugagcaagaa

SEQ ID NO: 2265249 - RNA, 19 nt, Artificial Sequence
  Description of Artificial Sequence: Synthetic oligonucleotide
  Antisense strand to SEQ ID NO: 2265248
uucuugcucaugcaaagaa

SEQ ID NO: 2265250 - RNA, 19 nt, Artificial Sequence
  Description of Artificial Sequence: Synthetic oligonucleotide
  Sense strand starting at position 3631 of SEQ ID NO: 1884431
uguugagauauuggaggau

SEQ ID NO: 2265251 - RNA, 19 nt, Artificial Sequence
  Description of Artificial Sequence: Synthetic oligonucleotide
  Antisense strand to SEQ ID NO: 2265250
auccuccaauaucucaaca

SEQ ID NO: 2265252 - RNA, 19 nt, Artificial Sequence
  Description of Artificial Sequence: Synthetic oligonucleotide
  Sense strand starting at position 3634 of SEQ ID NO: 1884431
ugagauauuggaggauugu

SEQ ID NO: 2265253 - RNA, 19 nt, Artificial Sequence
  Description of Artificial Sequence: Synthetic oligonucleotide
  Antisense strand to SEQ ID NO: 2265252
acaauccuccaauaucuca

SEQ ID NO: 2265254 - RNA, 19 nt, Artificial Sequence
  Description of Artificial Sequence: Synthetic oligonucleotide
  Sense strand starting at position 3658 of SEQ ID NO: 1884431
cagcuagugguuuauuaca

SEQ ID NO: 2265255 - RNA, 19 nt, Artificial Sequence
  Description of Artificial Sequence: Synthetic oligonucleotide
  Antisense strand to SEQ ID NO: 2265254
uguaauaaaccacuagcug

SEQ ID NO: 2265256 - RNA, 19 nt, Artificial Sequence
  Description of Artificial Sequence: Synthetic oligonucleotide
  Sense strand starting at position 124 of SEQ ID NO: 1884433
gaaauuagccacuguggga

SEQ ID NO: 2265257 - RNA, 19 nt, Artificial Sequence
  Description of Artificial Sequence: Synthetic oligonucleotide
  Antisense strand to SEQ ID NO: 2265256
ucccacaguggcuaauuuc

SEQ ID NO: 2265258 - RNA, 19 nt, Artificial Sequence
  Description of Artificial Sequence: Synthetic oligonucleotide
  Sense strand starting at position 131 of SEQ ID NO: 1884433
gccacugugggagaauuga

SEQ ID NO: 2265259 - RNA, 19 nt, Artificial Sequence
  Description of Artificial Sequence: Synthetic oligonucleotide
  Antisense strand to SEQ ID NO: 2265258
ucaauucucccacaguggc

SEQ ID NO: 2265260 - RNA, 19 nt, Artificial Sequence
  Description of Artificial Sequence: Synthetic oligonucleotide
  Sense strand starting at position 225 of SEQ ID NO: 1884433
gaaugugguccacaaguga

SEQ ID NO: 2265261 - RNA, 19 nt, Artificial Sequence
  Description of Artificial Sequence: Synthetic oligonucleotide
  Antisense strand to SEQ ID NO: 2265260
ucacuuguggaccacauuc

SEQ ID NO: 2265262 - RNA, 19 nt, Artificial Sequence
  Description of Artificial Sequence: Synthetic oligonucleotide
  Sense strand starting at position 239 of SEQ ID NO: 1884433
agugauuaacacugaguag

SEQ ID NO: 2265263 - RNA, 19 nt, Artificial Sequence
  Description of Artificial Sequence: Synthetic oligonucleotide
  Antisense strand to SEQ ID NO: 2265262
cuacucaguguuaaucacu

SEQ ID NO: 2265264 - RNA, 19 nt, Artificial Sequence
  Description of Artificial Sequence: Synthetic oligonucleotide
  Sense strand starting at position 242 of SEQ ID NO: 1884433
gauuaacacugaguagguu

SEQ ID NO: 2265265 - RNA, 19 nt, Artificial Sequence
  Description of Artificial Sequence: Synthetic oligonucleotide
  Antisense strand to SEQ ID NO: 2265264
aaccuacucaguguuaauc

SEQ ID NO: 2265266 - RNA, 19 nt, Artificial Sequence
  Description of Artificial Sequence: Synthetic oligonucleotide
  Sense strand starting at position 448 of SEQ ID NO: 1884433
ggaaacacccgguaaguau

SEQ ID NO: 2265267 - RNA, 19 nt, Artificial Sequence
  Description of Artificial Sequence: Synthetic oligonucleotide
  Antisense strand to SEQ ID NO: 2265266
auacuuaccggguguuucc

SEQ ID NO: 2265268 - RNA, 19 nt, Artificial Sequence
  Description of Artificial Sequence: Synthetic oligonucleotide
  Sense strand starting at position 881 of SEQ ID NO: 1884433
cuccuuugaguccaggauu

SEQ ID NO: 2265269 - RNA, 19 nt, Artificial Sequence
  Description of Artificial Sequence: Synthetic oligonucleotide
  Antisense strand to SEQ ID NO: 2265268
aauccuggacucaaaggag

SEQ ID NO: 2265270 - RNA, 19 nt, Artificial Sequence
  Description of Artificial Sequence: Synthetic oligonucleotide
  Sense strand starting at position 907 of SEQ ID NO: 1884433
cuauuucucuguguaggca

SEQ ID NO: 2265271 - RNA, 19 nt, Artificial Sequence
  Description of Artificial Sequence: Synthetic oligonucleotide
  Antisense strand to SEQ ID NO: 2265270
ugccuacacagagaaauag

SEQ ID NO: 2265272 - RNA, 19 nt, Artificial Sequence
  Description of Artificial Sequence: Synthetic oligonucleotide
  Sense strand starting at position 965 of SEQ ID NO: 1884433
augaacauugccugggaaa

SEQ ID NO: 2265273 - RNA, 19 nt, Artificial Sequence
  Description of Artificial Sequence: Synthetic oligonucleotide
  Antisense strand to SEQ ID NO: 2265272
uuucccaggcaauguucau

SEQ ID NO: 2265274 - RNA, 19 nt, Artificial Sequence
  Description of Artificial Sequence: Synthetic oligonucleotide
  Sense strand starting at position 966 of SEQ ID NO: 1884433
ugaacauugccugggaaau

SEQ ID NO: 2265275 - RNA, 19 nt, Artificial Sequence
  Description of Artificial Sequence: Synthetic oligonucleotide
  Antisense strand to SEQ ID NO: 2265274
auuucccaggcaauguuca

SEQ ID NO: 2265276 - RNA, 19 nt, Artificial Sequence
  Description of Artificial Sequence: Synthetic oligonucleotide
  Sense strand starting at position 967 of SEQ ID NO: 1884433
gaacauugccugggaaaug

SEQ ID NO: 2265277 - RNA, 19 nt, Artificial Sequence
  Description of Artificial Sequence: Synthetic oligonucleotide
  Antisense strand to SEQ ID NO: 2265276
cauuucccaggcaauguuc

SEQ ID NO: 2265278 - RNA, 19 nt, Artificial Sequence
  Description of Artificial Sequence: Synthetic oligonucleotide
  Sense strand starting at position 1012 of SEQ ID NO: 1884433
agccuaguaggcuauaaua

SEQ ID NO: 2265279 - RNA, 19 nt, Artificial Sequence
  Description of Artificial Sequence: Synthetic oligonucleotide
  Antisense strand to SEQ ID NO: 2265278
uauuauagccuacuaggcu

SEQ ID NO: 2265280 - RNA, 19 nt, Artificial Sequence
  Description of Artificial Sequence: Synthetic oligonucleotide
  Sense strand starting at position 1014 of SEQ ID NO: 1884433
ccuaguaggcuauaauaau

SEQ ID NO: 2265281 - RNA, 19 nt, Artificial Sequence
  Description of Artificial Sequence: Synthetic oligonucleotide
  Antisense strand to SEQ ID NO: 2265280
auuauuauagccuacuagg

SEQ ID NO: 2265282 - RNA, 19 nt, Artificial Sequence
  Description of Artificial Sequence: Synthetic oligonucleotide
  Sense strand starting at position 1066 of SEQ ID NO: 1884433
aaguauauuguguaaagca

SEQ ID NO: 2265283 - RNA, 19 nt, Artificial Sequence
  Description of Artificial Sequence: Synthetic oligonucleotide
  Antisense strand to SEQ ID NO: 2265282
ugcuuuacacaauauacuu

SEQ ID NO: 2265284 - RNA, 19 nt, Artificial Sequence
  Description of Artificial Sequence: Synthetic oligonucleotide
  Sense strand starting at position 2281 of SEQ ID NO: 1884433
guugauacacuguggaaga

SEQ ID NO: 2265285 - RNA, 19 nt, Artificial Sequence
  Description of Artificial Sequence: Synthetic oligonucleotide
  Antisense strand to SEQ ID NO: 2265284
ucuuccacaguguaucaac

SEQ ID NO: 2265286 - RNA, 19 nt, Artificial Sequence
  Description of Artificial Sequence: Synthetic oligonucleotide
  Sense strand starting at position 2433 of SEQ ID NO: 1884433
uacggugacgcuuuagcua

SEQ ID NO: 2265287 - RNA, 19 nt, Artificial Sequence
  Description of Artificial Sequence: Synthetic oligonucleotide
  Antisense strand to SEQ ID NO: 2265286
uagcuaaagcgucaccgua

SEQ ID NO: 2265288 - RNA, 19 nt, Artificial Sequence
  Description of Artificial Sequence: Synthetic oligonucleotide
  Sense strand starting at position 2533 of SEQ ID NO: 1884433
acagucuuccaccauaugu

SEQ ID NO: 2265289 - RNA, 19 nt, Artificial Sequence
  Description of Artificial Sequence: Synthetic oligonucleotide
  Antisense strand to SEQ ID NO: 2265288
acauaugguggaagacugu

SEQ ID NO: 2265290 - RNA, 19 nt, Artificial Sequence
  Description of Artificial Sequence: Synthetic oligonucleotide
  Sense strand starting at position 2535 of SEQ ID NO: 1884433
agucuuccaccauauguga

SEQ ID NO: 2265291 - RNA, 19 nt, Artificial Sequence
  Description of Artificial Sequence: Synthetic oligonucleotide
  Antisense strand to SEQ ID NO: 2265290
ucacauaugguggaagacu

SEQ ID NO: 2265292 - RNA, 19 nt, Artificial Sequence
  Description of Artificial Sequence: Synthetic oligonucleotide
  Sense strand starting at position 2546 of SEQ ID NO: 1884433
auaugugagguuuacaugu

SEQ ID NO: 2265293 - RNA, 19 nt, Artificial Sequence
  Description of Artificial Sequence: Synthetic oligonucleotide
  Antisense strand to SEQ ID NO: 2265292
acauguaaaccucacauau

SEQ ID NO: 2265294 - RNA, 19 nt, Artificial Sequence
  Description of Artificial Sequence: Synthetic oligonucleotide
  Sense strand starting at position 2556 of SEQ ID NO: 1884433
uuuacaugucauugggacu

SEQ ID NO: 2265295 - RNA, 19 nt, Artificial Sequence
  Description of Artificial Sequence: Synthetic oligonucleotide
  Antisense strand to SEQ ID NO: 2265294
agucccaaugacauguaaa

SEQ ID NO: 2265296 - RNA, 19 nt, Artificial Sequence
  Description of Artificial Sequence: Synthetic oligonucleotide
  Sense strand starting at position 2584 of SEQ ID NO: 1884433
cgacacuguggauaucaua

SEQ ID NO: 2265297 - RNA, 19 nt, Artificial Sequence
  Description of Artificial Sequence: Synthetic oligonucleotide
  Antisense strand to SEQ ID NO: 2265296
uaugauauccacagugucg

SEQ ID NO: 2265298 - RNA, 19 nt, Artificial Sequence
  Description of Artificial Sequence: Synthetic oligonucleotide
  Sense strand starting at position 2611 of SEQ ID NO: 1884433
gugaaugaugcugaguaac

SEQ ID NO: 2265299 - RNA, 19 nt, Artificial Sequence
  Description of Artificial Sequence: Synthetic oligonucleotide
  Antisense strand to SEQ ID NO: 2265298
guuacucagcaucauucac

SEQ ID NO: 2265300 - RNA, 19 nt, Artificial Sequence
  Description of Artificial Sequence: Synthetic oligonucleotide
  Sense strand starting at position 2613 of SEQ ID NO: 1884433
gaaugaugcugaguaacug

SEQ ID NO: 2265301 - RNA, 19 nt, Artificial Sequence
  Description of Artificial Sequence: Synthetic oligonucleotide
  Antisense strand to SEQ ID NO: 2265300
caguuacucagcaucauuc

SEQ ID NO: 2265302 - RNA, 19 nt, Artificial Sequence
  Description of Artificial Sequence: Synthetic oligonucleotide
  Sense strand starting at position 2785 of SEQ ID NO: 1884433
caugacuguuaaucagaga

SEQ ID NO: 2265303 - RNA, 19 nt, Artificial Sequence
  Description of Artificial Sequence: Synthetic oligonucleotide
  Antisense strand to SEQ ID NO: 2265302
ucucugauuaacagucaug

SEQ ID NO: 2265304 - RNA, 19 nt, Artificial Sequence
  Description of Artificial Sequence: Synthetic oligonucleotide
  Sense strand starting at position 2849 of SEQ ID NO: 1884433
uguagaagcucucuaaaua

SEQ ID NO: 2265305 - RNA, 19 nt, Artificial Sequence
  Description of Artificial Sequence: Synthetic oligonucleotide
  Antisense strand to SEQ ID NO: 2265304
uauuuagagagcuucuaca

SEQ ID NO: 2265306 - RNA, 19 nt, Artificial Sequence
  Description of Artificial Sequence: Synthetic oligonucleotide
  Sense strand starting at position 2850 of SEQ ID NO: 1884433
guagaagcucucuaaauac

SEQ ID NO: 2265307 - RNA, 19 nt, Artificial Sequence
  Description of Artificial Sequence: Synthetic oligonucleotide
  Antisense strand to SEQ ID NO: 2265306
guauuuagagagcuucuac

SEQ ID NO: 2265308 - RNA, 19 nt, Artificial Sequence
  Description of Artificial Sequence: Synthetic oligonucleotide
  Sense strand starting at position 2949 of SEQ ID NO: 1884433
gcagaagauacugagugua

SEQ ID NO: 2265309 - RNA, 19 nt, Artificial Sequence
  Description of Artificial Sequence: Synthetic oligonucleotide
  Antisense strand to SEQ ID NO: 2265308
uacacucaguaucuucugc

SEQ ID NO: 2265310 - RNA, 19 nt, Artificial Sequence
  Description of Artificial Sequence: Synthetic oligonucleotide
  Sense strand starting at position 3048 of SEQ ID NO: 1884433
gguugucagacuugggaug

SEQ ID NO: 2265311 - RNA, 19 nt, Artificial Sequence
  Description of Artificial Sequence: Synthetic oligonucleotide
  Antisense strand to SEQ ID NO: 2265310
caucccaagucugacaacc

SEQ ID NO: 2265312 - RNA, 19 nt, Artificial Sequence
  Description of Artificial Sequence: Synthetic oligonucleotide
  Sense strand starting at position 3137 of SEQ ID NO: 1884433
augauaccaucuguaugaa

SEQ ID NO: 2265313 - RNA, 19 nt, Artificial Sequence
  Description of Artificial Sequence: Synthetic oligonucleotide
  Antisense strand to SEQ ID NO: 2265312
uucauacagaugguaucau

SEQ ID NO: 2265314 - RNA, 19 nt, Artificial Sequence
  Description of Artificial Sequence: Synthetic oligonucleotide
  Sense strand starting at position 3214 of SEQ ID NO: 1884433
uuaugaccacgucacuauu

SEQ ID NO: 2265315 - RNA, 19 nt, Artificial Sequence
  Description of Artificial Sequence: Synthetic oligonucleotide
  Antisense strand to SEQ ID NO: 2265314
aauagugacguggucauaa

SEQ ID NO: 2265316 - RNA, 19 nt, Artificial Sequence
  Description of Artificial Sequence: Synthetic oligonucleotide
  Sense strand starting at position 3263 of SEQ ID NO: 1884433
ugaccuuaucauugagcaa

SEQ ID NO: 2265317 - RNA, 19 nt, Artificial Sequence
  Description of Artificial Sequence: Synthetic oligonucleotide
  Antisense strand to SEQ ID NO: 2265316
uugcucaaugauaagguca

SEQ ID NO: 2265318 - RNA, 19 nt, Artificial Sequence
  Description of Artificial Sequence: Synthetic oligonucleotide
  Sense strand starting at position 3266 of SEQ ID NO: 1884433
ccuuaucauugagcaaaga

SEQ ID NO: 2265319 - RNA, 19 nt, Artificial Sequence
  Description of Artificial Sequence: Synthetic oligonucleotide
  Antisense strand to SEQ ID NO: 2265318
ucuuugcucaaugauaagg

SEQ ID NO: 2265320 - RNA, 19 nt, Artificial Sequence
  Description of Artificial Sequence: Synthetic oligonucleotide
  Sense strand starting at position 3511 of SEQ ID NO: 1884433
uguuaauagugacugaaug

SEQ ID NO: 2265321 - RNA, 19 nt, Artificial Sequence
  Description of Artificial Sequence: Synthetic oligonucleotide
  Antisense strand to SEQ ID NO: 2265320
cauucagucacuauuaaca

SEQ ID NO: 2265322 - RNA, 19 nt, Artificial Sequence
  Description of Artificial Sequence: Synthetic oligonucleotide
  Sense strand starting at position 3512 of SEQ ID NO: 1884433
guuaauagugacugaauga

SEQ ID NO: 2265323 - RNA, 19 nt, Artificial Sequence
  Description of Artificial Sequence: Synthetic oligonucleotide
  Antisense strand to SEQ ID NO: 2265322
ucauucagucacuauuaac

SEQ ID NO: 2265324 - RNA, 19 nt, Artificial Sequence
  Description of Artificial Sequence: Synthetic oligonucleotide
  Sense strand starting at position 3551 of SEQ ID NO: 1884433
uaaguauguggcuugcgua

SEQ ID NO: 2265325 - RNA, 19 nt, Artificial Sequence
  Description of Artificial Sequence: Synthetic oligonucleotide
  Antisense strand to SEQ ID NO: 2265324
uacgcaagccacauacuua

SEQ ID NO: 2265326 - RNA, 19 nt, Artificial Sequence
  Description of Artificial Sequence: Synthetic oligonucleotide
  Sense strand starting at position 3567 of SEQ ID NO: 1884433
guauaaacagcuugaaaua

SEQ ID NO: 2265327 - RNA, 19 nt, Artificial Sequence
  Description of Artificial Sequence: Synthetic oligonucleotide
  Antisense strand to SEQ ID NO: 2265326
uauuucaagcuguuuauac

SEQ ID NO: 2265328 - RNA, 19 nt, Artificial Sequence
  Description of Artificial Sequence: Synthetic oligonucleotide
  Sense strand starting at position 3577 of SEQ ID NO: 1884433
cuugaaauagugugacaau

SEQ ID NO: 2265329 - RNA, 19 nt, Artificial Sequence
  Description of Artificial Sequence: Synthetic oligonucleotide
  Antisense strand to SEQ ID NO: 2265328
auugucacacuauuucaag

SEQ ID NO: 2265330 - RNA, 19 nt, Artificial Sequence
  Description of Artificial Sequence: Synthetic oligonucleotide
  Sense strand starting at position 3651 of SEQ ID NO: 1884433
auugucacucuuuggaaua

SEQ ID NO: 2265331 - RNA, 19 nt, Artificial Sequence
  Description of Artificial Sequence: Synthetic oligonucleotide
  Antisense strand to SEQ ID NO: 2265330
uauuccaaagagugacaau

SEQ ID NO: 2265332 - RNA, 19 nt, Artificial Sequence
  Description of Artificial Sequence: Synthetic oligonucleotide
  Sense strand starting at position 3752 of SEQ ID NO: 1884433
ccaagcuuauuaguggaaa

SEQ ID NO: 2265333 - RNA, 19 nt, Artificial Sequence
  Description of Artificial Sequence: Synthetic oligonucleotide
  Antisense strand to SEQ ID NO: 2265332
uuuccacuaauaagcuugg

SEQ ID NO: 2265334 - RNA, 19 nt, Artificial Sequence
  Description of Artificial Sequence: Synthetic oligonucleotide
  Sense strand starting at position 3908 of SEQ ID NO: 1884433
cagguuacauucucagaag

SEQ ID NO: 2265335 - RNA, 19 nt, Artificial Sequence
  Description of Artificial Sequence: Synthetic oligonucleotide
  Antisense strand to SEQ ID NO: 2265334
cuucugagaauguaaccug

SEQ ID NO: 2265336 - RNA, 19 nt, Artificial Sequence
  Description of Artificial Sequence: Synthetic oligonucleotide
  Sense strand starting at position 9 of SEQ ID NO: 1884434
ggaugaugaugccuggguu

SEQ ID NO: 2265337 - RNA, 19 nt, Artificial Sequence
  Description of Artificial Sequence: Synthetic oligonucleotide
  Antisense strand to SEQ ID NO: 2265336
aacccaggcaucaucaucc

SEQ ID NO: 2265338 - RNA, 19 nt, Artificial Sequence
  Description of Artificial Sequence: Synthetic oligonucleotide
  Sense strand starting at position 10 of SEQ ID NO: 1884434
gaugaugaugccuggguua

SEQ ID NO: 2265339 - RNA, 19 nt, Artificial Sequence
  Description of Artificial Sequence: Synthetic oligonucleotide
  Antisense strand to SEQ ID NO: 2265338
uaacccaggcaucaucauc

SEQ ID NO: 2265340 - RNA, 19 nt, Artificial Sequence
  Description of Artificial Sequence: Synthetic oligonucleotide
  Sense strand starting at position 82 of SEQ ID NO: 1884434
gcggaucgaauuuguugau

SEQ ID NO: 2265341 - RNA, 19 nt, Artificial Sequence
  Description of Artificial Sequence: Synthetic oligonucleotide
  Antisense strand to SEQ ID NO: 2265340
aucaacaaauucgauccgc

SEQ ID NO: 2265342 - RNA, 19 nt, Artificial Sequence
  Description of Artificial Sequence: Synthetic oligonucleotide
  Sense strand starting at position 130 of SEQ ID NO: 1884434
ucaagauuguucccagguu

SEQ ID NO: 2265343 - RNA, 19 nt, Artificial Sequence
  Description of Artificial Sequence: Synthetic oligonucleotide
  Antisense strand to SEQ ID NO: 2265342
aaccugggaacaaucuuga

SEQ ID NO: 2265344 - RNA, 19 nt, Artificial Sequence
  Description of Artificial Sequence: Synthetic oligonucleotide
  Sense strand starting at position 150 of SEQ ID NO: 1884434
uugcuuugagugcacuaau

SEQ ID NO: 2265345 - RNA, 19 nt, Artificial Sequence
  Description of Artificial Sequence: Synthetic oligonucleotide
  Antisense strand to SEQ ID NO: 2265344
auuagugcacucaaagcaa

SEQ ID NO: 2265346 - RNA, 19 nt, Artificial Sequence
  Description of Artificial Sequence: Synthetic oligonucleotide
  Sense strand starting at position 153 of SEQ ID NO: 1884434
cuuugagugcacuaaugau

SEQ ID NO: 2265347 - RNA, 19 nt, Artificial Sequence
  Description of Artificial Sequence: Synthetic oligonucleotide
  Antisense strand to SEQ ID NO: 2265346
aucauuagugcacucaaag

SEQ ID NO: 2265348 - RNA, 19 nt, Artificial Sequence
  Description of Artificial Sequence: Synthetic oligonucleotide
  Sense strand starting at position 165 of SEQ ID NO: 1884434
uaaugauggcaccauuagu

SEQ ID NO: 2265349 - RNA, 19 nt, Artificial Sequence
  Description of Artificial Sequence: Synthetic oligonucleotide
  Antisense strand to SEQ ID NO: 2265348
acuaauggugccaucauua

SEQ ID NO: 2265350 - RNA, 19 nt, Artificial Sequence
  Description of Artificial Sequence: Synthetic oligonucleotide
  Sense strand starting at position 173 of SEQ ID NO: 1884434
gcaccauuaguugacauaa

SEQ ID NO: 2265351 - RNA, 19 nt, Artificial Sequence
  Description of Artificial Sequence: Synthetic oligonucleotide
  Antisense strand to SEQ ID NO: 2265350
uuaugucaacuaauggugc

SEQ ID NO: 2265352 - RNA, 19 nt, Artificial Sequence
  Description of Artificial Sequence: Synthetic oligonucleotide
  Sense strand starting at position 442 of SEQ ID NO: 1884434
guagcagagccauaucuuc

SEQ ID NO: 2265353 - RNA, 19 nt, Artificial Sequence
  Description of Artificial Sequence: Synthetic oligonucleotide
  Antisense strand to SEQ ID NO: 2265352
gaagauauggcucugcuac

SEQ ID NO: 2265354 - RNA, 19 nt, Artificial Sequence
  Description of Artificial Sequence: Synthetic oligonucleotide
  Sense strand starting at position 644 of SEQ ID NO: 1884434
ccuauuuaguccguuuguu

SEQ ID NO: 2265355 - RNA, 19 nt, Artificial Sequence
  Description of Artificial Sequence: Synthetic oligonucleotide
  Antisense strand to SEQ ID NO: 2265354
aacaaacggacuaaauagg

SEQ ID NO: 2265356 - RNA, 19 nt, Artificial Sequence
  Description of Artificial Sequence: Synthetic oligonucleotide
  Sense strand starting at position 1556 of SEQ ID NO: 1884434
ccaugaaguccuggcuacu

SEQ ID NO: 2265357 - RNA, 19 nt, Artificial Sequence
  Description of Artificial Sequence: Synthetic oligonucleotide
  Antisense strand to SEQ ID NO: 2265356
aguagccaggacuucaugg

SEQ ID NO: 2265358 - RNA, 19 nt, Artificial Sequence
  Description of Artificial Sequence: Synthetic oligonucleotide
  Sense strand starting at position 1709 of SEQ ID NO: 1884434
cucguuggucgccuucaga

SEQ ID NO: 2265359 - RNA, 19 nt, Artificial Sequence
  Description of Artificial Sequence: Synthetic oligonucleotide
  Antisense strand to SEQ ID NO: 2265358
ucugaaggcgaccaacgag

SEQ ID NO: 2265360 - RNA, 19 nt, Artificial Sequence
  Description of Artificial Sequence: Synthetic oligonucleotide
  Sense strand starting at position 2099 of SEQ ID NO: 1884434
ccuuucucaguguacuaaa

SEQ ID NO: 2265361 - RNA, 19 nt, Artificial Sequence
  Description of Artificial Sequence: Synthetic oligonucleotide
  Antisense strand to SEQ ID NO: 2265360
uuuaguacacugagaaagg

SEQ ID NO: 2265362 - RNA, 19 nt, Artificial Sequence
  Description of Artificial Sequence: Synthetic oligonucleotide
  Sense strand starting at position 2396 of SEQ ID NO: 1884434
caagauuggcaaugaaagu

SEQ ID NO: 2265363 - RNA, 19 nt, Artificial Sequence
  Description of Artificial Sequence: Synthetic oligonucleotide
  Antisense strand to SEQ ID NO: 2265362
acuuucauugccaaucuug

SEQ ID NO: 2265364 - RNA, 19 nt, Artificial Sequence
  Description of Artificial Sequence: Synthetic oligonucleotide
  Sense strand starting at position 2521 of SEQ ID NO: 1884434
uuaggaaguuacucuauau

SEQ ID NO: 2265365 - RNA, 19 nt, Artificial Sequence
  Description of Artificial Sequence: Synthetic oligonucleotide
  Antisense strand to SEQ ID NO: 2265364
auauagaguaacuuccuaa

SEQ ID NO: 2265366 - RNA, 19 nt, Artificial Sequence
  Description of Artificial Sequence: Synthetic oligonucleotide
  Sense strand starting at position 2767 of SEQ ID NO: 1884434
uugcuuaaagucuaagaau

SEQ ID NO: 2265367 - RNA, 19 nt, Artificial Sequence
  Description of Artificial Sequence: Synthetic oligonucleotide
  Antisense strand to SEQ ID NO: 2265366
auucuuagacuuuaagcaa

SEQ ID NO: 2265368 - RNA, 19 nt, Artificial Sequence
  Description of Artificial Sequence: Synthetic oligonucleotide
  Sense strand starting at position 2776 of SEQ ID NO: 1884434
gucuaagaauccucucuug

SEQ ID NO: 2265369 - RNA, 19 nt, Artificial Sequence
  Description of Artificial Sequence: Synthetic oligonucleotide
  Antisense strand to SEQ ID NO: 2265368
caagagaggauucuuagac

SEQ ID NO: 2265370 - RNA, 19 nt, Artificial Sequence
  Description of Artificial Sequence: Synthetic oligonucleotide
  Sense strand starting at position 2997 of SEQ ID NO: 1884434
guggauugggugugugaaa

SEQ ID NO: 2265371 - RNA, 19 nt, Artificial Sequence
  Description of Artificial Sequence: Synthetic oligonucleotide
  Antisense strand to SEQ ID NO: 2265370
uuucacacacccaauccac

SEQ ID NO: 2265372 - RNA, 19 nt, Artificial Sequence
  Description of Artificial Sequence: Synthetic oligonucleotide
  Sense strand starting at position 2998 of SEQ ID NO: 1884434
uggauugggugugugaaau

SEQ ID NO: 2265373 - RNA, 19 nt, Artificial Sequence
  Description of Artificial Sequence: Synthetic oligonucleotide
  Antisense strand to SEQ ID NO: 2265372
auuucacacacccaaucca

SEQ ID NO: 2265374 - RNA, 19 nt, Artificial Sequence
  Description of Artificial Sequence: Synthetic oligonucleotide
  Sense strand starting at position 3048 of SEQ ID NO: 1884434
ggcugauagcugggagaau

SEQ ID NO: 2265375 - RNA, 19 nt, Artificial Sequence
  Description of Artificial Sequence: Synthetic oligonucleotide
  Antisense strand to SEQ ID NO: 2265374
auucucccagcuaucagcc

SEQ ID NO: 2265376 - RNA, 19 nt, Artificial Sequence
  Description of Artificial Sequence: Synthetic oligonucleotide
  Sense strand starting at position 3060 of SEQ ID NO: 1884434
ggagaauguugggccauca

SEQ ID NO: 2265377 - RNA, 19 nt, Artificial Sequence
  Description of Artificial Sequence: Synthetic oligonucleotide
  Antisense strand to SEQ ID NO: 2265376
ugauggcccaacauucucc

SEQ ID NO: 2265378 - RNA, 19 nt, Artificial Sequence
  Description of Artificial Sequence: Synthetic oligonucleotide
  Sense strand starting at position 3136 of SEQ ID NO: 1884434
uauauuaagccuugaaggu

SEQ ID NO: 2265379 - RNA, 19 nt, Artificial Sequence
  Description of Artificial Sequence: Synthetic oligonucleotide
  Antisense strand to SEQ ID NO: 2265378
accuucaaggcuuaauaua

SEQ ID NO: 2265380 - RNA, 19 nt, Artificial Sequence
  Description of Artificial Sequence: Synthetic oligonucleotide
  Sense strand starting at position 3214 of SEQ ID NO: 1884434
aggccugagcuagaaaucu

SEQ ID NO: 2265381 - RNA, 19 nt, Artificial Sequence
  Description of Artificial Sequence: Synthetic oligonucleotide
  Antisense strand to SEQ ID NO: 2265380
agauuucuagcucaggccu

SEQ ID NO: 2265382 - RNA, 19 nt, Artificial Sequence
  Description of Artificial Sequence: Synthetic oligonucleotide
  Sense strand starting at position 3225 of SEQ ID NO: 1884434
agaaaucugugccuuagau

SEQ ID NO: 2265383 - RNA, 19 nt, Artificial Sequence
  Description of Artificial Sequence: Synthetic oligonucleotide
  Antisense strand to SEQ ID NO: 2265382
aucuaaggcacagauuucu

SEQ ID NO: 2265384 - RNA, 19 nt, Artificial Sequence
  Description of Artificial Sequence: Synthetic oligonucleotide
  Sense strand starting at position 3278 of SEQ ID NO: 1884434
gaagaaauugccuggugga

SEQ ID NO: 2265385 - RNA, 19 nt, Artificial Sequence
  Description of Artificial Sequence: Synthetic oligonucleotide
  Antisense strand to SEQ ID NO: 2265384
uccaccaggcaauuucuuc

SEQ ID NO: 2265386 - RNA, 19 nt, Artificial Sequence
  Description of Artificial Sequence: Synthetic oligonucleotide
  Sense strand starting at position 3279 of SEQ ID NO: 1884434
aagaaauugccugguggag

SEQ ID NO: 2265387 - RNA, 19 nt, Artificial Sequence
  Description of Artificial Sequence: Synthetic oligonucleotide
  Antisense strand to SEQ ID NO: 2265386
cuccaccaggcaauuucuu

SEQ ID NO: 2265388 - RNA, 19 nt, Artificial Sequence
  Description of Artificial Sequence: Synthetic oligonucleotide
  Sense strand starting at position 3285 of SEQ ID NO: 1884434
uugccugguggagagaaua

SEQ ID NO: 2265389 - RNA, 19 nt, Artificial Sequence
  Description of Artificial Sequence: Synthetic oligonucleotide
  Antisense strand to SEQ ID NO: 2265388
uauucucuccaccaggcaa

SEQ ID NO: 2265390 - RNA, 19 nt, Artificial Sequence
  Description of Artificial Sequence: Synthetic oligonucleotide
  Sense strand starting at position 3436 of SEQ ID NO: 1884434
aagaguaauuaggucaguu

SEQ ID NO: 2265391 - RNA, 19 nt, Artificial Sequence
  Description of Artificial Sequence: Synthetic oligonucleotide
  Antisense strand to SEQ ID NO: 2265390
aacugaccuaauuacucuu

SEQ ID NO: 2265392 - RNA, 19 nt, Artificial Sequence
  Description of Artificial Sequence: Synthetic oligonucleotide
  Sense strand starting at position 3457 of SEQ ID NO: 1884434
gcugauaaauuagugagau

SEQ ID NO: 2265393 - RNA, 19 nt, Artificial Sequence
  Description of Artificial Sequence: Synthetic oligonucleotide
  Antisense strand to SEQ ID NO: 2265392
aucucacuaauuuaucagc

SEQ ID NO: 2265394 - RNA, 19 nt, Artificial Sequence
  Description of Artificial Sequence: Synthetic oligonucleotide
  Sense strand starting at position 3470 of SEQ ID NO: 1884434
ugagaugacugagcagacu

SEQ ID NO: 2265395 - RNA, 19 nt, Artificial Sequence
  Description of Artificial Sequence: Synthetic oligonucleotide
  Antisense strand to SEQ ID NO: 2265394
agucugcucagucaucuca

SEQ ID NO: 2265396 - RNA, 19 nt, Artificial Sequence
  Description of Artificial Sequence: Synthetic oligonucleotide
  Sense strand starting at position 3490 of SEQ ID NO: 1884434
uguuguuaccuggagcaga

SEQ ID NO: 2265397 - RNA, 19 nt, Artificial Sequence
  Description of Artificial Sequence: Synthetic oligonucleotide
  Antisense strand to SEQ ID NO: 2265396
ucugcuccagguaacaaca

SEQ ID NO: 2265398 - RNA, 19 nt, Artificial Sequence
  Description of Artificial Sequence: Synthetic oligonucleotide
  Sense strand starting at position 3500 of SEQ ID NO: 1884434
uggagcagauuccuuggaa

SEQ ID NO: 2265399 - RNA, 19 nt, Artificial Sequence
  Description of Artificial Sequence: Synthetic oligonucleotide
  Antisense strand to SEQ ID NO: 2265398
uuccaaggaaucugcucca

SEQ ID NO: 2265400 - RNA, 19 nt, Artificial Sequence
  Description of Artificial Sequence: Synthetic oligonucleotide
  Sense strand starting at position 3501 of SEQ ID NO: 1884434
ggagcagauuccuuggaau

SEQ ID NO: 2265401 - RNA, 19 nt, Artificial Sequence
  Description of Artificial Sequence: Synthetic oligonucleotide
  Antisense strand to SEQ ID NO: 2265400
auuccaaggaaucugcucc

SEQ ID NO: 2265402 - RNA, 19 nt, Artificial Sequence
  Description of Artificial Sequence: Synthetic oligonucleotide
  Sense strand starting at position 3594 of SEQ ID NO: 1884434
auaggcaaaucuuccaaga

SEQ ID NO: 2265403 - RNA, 19 nt, Artificial Sequence
  Description of Artificial Sequence: Synthetic oligonucleotide
  Antisense strand to SEQ ID NO: 2265402
ucuuggaagauuugccuau

SEQ ID NO: 2265404 - RNA, 19 nt, Artificial Sequence
  Description of Artificial Sequence: Synthetic oligonucleotide
  Sense strand starting at position 3607 of SEQ ID NO: 1884434
ccaagaaguugucugugaa

SEQ ID NO: 2265405 - RNA, 19 nt, Artificial Sequence
  Description of Artificial Sequence: Synthetic oligonucleotide
  Antisense strand to SEQ ID NO: 2265404
uucacagacaacuucuugg

SEQ ID NO: 2265406 - RNA, 19 nt, Artificial Sequence
  Description of Artificial Sequence: Synthetic oligonucleotide
  Sense strand starting at position 3608 of SEQ ID NO: 1884434
caagaaguugucugugaag

SEQ ID NO: 2265407 - RNA, 19 nt, Artificial Sequence
  Description of Artificial Sequence: Synthetic oligonucleotide
  Antisense strand to SEQ ID NO: 2265406
cuucacagacaacuucuug

SEQ ID NO: 2265408 - RNA, 19 nt, Artificial Sequence
  Description of Artificial Sequence: Synthetic oligonucleotide
  Sense strand starting at position 3610 of SEQ ID NO: 1884434
agaaguugucugugaagaa

SEQ ID NO: 2265409 - RNA, 19 nt, Artificial Sequence
  Description of Artificial Sequence: Synthetic oligonucleotide
  Antisense strand to SEQ ID NO: 2265408
uucuucacagacaacuucu

SEQ ID NO: 2265410 - RNA, 19 nt, Artificial Sequence
  Description of Artificial Sequence: Synthetic oligonucleotide
  Sense strand starting at position 3614 of SEQ ID NO: 1884434
guugucugugaagaaauga

SEQ ID NO: 2265411 - RNA, 19 nt, Artificial Sequence
  Description of Artificial Sequence: Synthetic oligonucleotide
  Antisense strand to SEQ ID NO: 2265410
ucauuucuucacagacaac

SEQ ID NO: 2265412 - RNA, 19 nt, Artificial Sequence
  Description of Artificial Sequence: Synthetic oligonucleotide
  Sense strand starting at position 3684 of SEQ ID NO: 1884434
ggagaaacauaagcuuguu

SEQ ID NO: 2265413 - RNA, 19 nt, Artificial Sequence
  Description of Artificial Sequence: Synthetic oligonucleotide
  Antisense strand to SEQ ID NO: 2265412
aacaagcuuauguuucucc

SEQ ID NO: 2265414 - RNA, 19 nt, Artificial Sequence
  Description of Artificial Sequence: Synthetic oligonucleotide
  Sense strand starting at position 3766 of SEQ ID NO: 1884434
agugcauugguguaauauu

SEQ ID NO: 2265415 - RNA, 19 nt, Artificial Sequence
  Description of Artificial Sequence: Synthetic oligonucleotide
  Antisense strand to SEQ ID NO: 2265414
aauauuacaccaaugcacu

SEQ ID NO: 2265416 - RNA, 19 nt, Artificial Sequence
  Description of Artificial Sequence: Synthetic oligonucleotide
  Sense strand starting at position 109 of SEQ ID NO: 1884435
ugcucuuugcuccagaaag

SEQ ID NO: 2265417 - RNA, 19 nt, Artificial Sequence
  Description of Artificial Sequence: Synthetic oligonucleotide
  Antisense strand to SEQ ID NO: 2265416
cuuucuggagcaaagagca

SEQ ID NO: 2265418 - RNA, 19 nt, Artificial Sequence
  Description of Artificial Sequence: Synthetic oligonucleotide
  Sense strand starting at position 111 of SEQ ID NO: 1884435
cucuuugcuccagaaagaa

SEQ ID NO: 2265419 - RNA, 19 nt, Artificial Sequence
  Description of Artificial Sequence: Synthetic oligonucleotide
  Antisense strand to SEQ ID NO: 2265418
uucuuucuggagcaaagag

SEQ ID NO: 2265420 - RNA, 19 nt, Artificial Sequence
  Description of Artificial Sequence: Synthetic oligonucleotide
  Sense strand starting at position 464 of SEQ ID NO: 1884435
gugggaacucuccaagcua

SEQ ID NO: 2265421 - RNA, 19 nt, Artificial Sequence
  Description of Artificial Sequence: Synthetic oligonucleotide
  Antisense strand to SEQ ID NO: 2265420
uagcuuggagaguucccac

SEQ ID NO: 2265422 - RNA, 19 nt, Artificial Sequence
  Description of Artificial Sequence: Synthetic oligonucleotide
  Sense strand starting at position 818 of SEQ ID NO: 1884435
agguaacugggcugagaaa

SEQ ID NO: 2265423 - RNA, 19 nt, Artificial Sequence
  Description of Artificial Sequence: Synthetic oligonucleotide
  Antisense strand to SEQ ID NO: 2265422
uuucucagcccaguuaccu

SEQ ID NO: 2265424 - RNA, 19 nt, Artificial Sequence
  Description of Artificial Sequence: Synthetic oligonucleotide
  Sense strand starting at position 1036 of SEQ ID NO: 1884435
uugacuacucguuauccca

SEQ ID NO: 2265425 - RNA, 19 nt, Artificial Sequence
  Description of Artificial Sequence: Synthetic oligonucleotide
  Antisense strand to SEQ ID NO: 2265424
ugggauaacgaguagucaa

SEQ ID NO: 2265426 - RNA, 19 nt, Artificial Sequence
  Description of Artificial Sequence: Synthetic oligonucleotide
  Sense strand starting at position 1132 of SEQ ID NO: 1884435
acagguagaccuuguugga

SEQ ID NO: 2265427 - RNA, 19 nt, Artificial Sequence
  Description of Artificial Sequence: Synthetic oligonucleotide
  Antisense strand to SEQ ID NO: 2265426
uccaacaaggucuaccugu

SEQ ID NO: 2265428 - RNA, 19 nt, Artificial Sequence
  Description of Artificial Sequence: Synthetic oligonucleotide
  Sense strand starting at position 1666 of SEQ ID NO: 1884435
cuaaaccucugagcaagau

SEQ ID NO: 2265429 - RNA, 19 nt, Artificial Sequence
  Description of Artificial Sequence: Synthetic oligonucleotide
  Antisense strand to SEQ ID NO: 2265428
aucuugcucagagguuuag

SEQ ID NO: 2265430 - RNA, 19 nt, Artificial Sequence
  Description of Artificial Sequence: Synthetic oligonucleotide
  Sense strand starting at position 2047 of SEQ ID NO: 1884435
cccaaagucuugucaggaa

SEQ ID NO: 2265431 - RNA, 19 nt, Artificial Sequence
  Description of Artificial Sequence: Synthetic oligonucleotide
  Antisense strand to SEQ ID NO: 2265430
uuccugacaagacuuuggg

SEQ ID NO: 2265432 - RNA, 19 nt, Artificial Sequence
  Description of Artificial Sequence: Synthetic oligonucleotide
  Sense strand starting at position 2184 of SEQ ID NO: 1884435
aaagcaaauggauguuuau

SEQ ID NO: 2265433 - RNA, 19 nt, Artificial Sequence
  Description of Artificial Sequence: Synthetic oligonucleotide
  Antisense strand to SEQ ID NO: 2265432
auaaacauccauuugcuuu

SEQ ID NO: 2265434 - RNA, 19 nt, Artificial Sequence
  Description of Artificial Sequence: Synthetic oligonucleotide
  Sense strand starting at position 2191 of SEQ ID NO: 1884435
auggauguuuaucucaauc

SEQ ID NO: 2265435 - RNA, 19 nt, Artificial Sequence
  Description of Artificial Sequence: Synthetic oligonucleotide
  Antisense strand to SEQ ID NO: 2265434
gauugagauaaacauccau

SEQ ID NO: 2265436 - RNA, 19 nt, Artificial Sequence
  Description of Artificial Sequence: Synthetic oligonucleotide
  Sense strand starting at position 2202 of SEQ ID NO: 1884435
ucucaaucuugaguguaaa

SEQ ID NO: 2265437 - RNA, 19 nt, Artificial Sequence
  Description of Artificial Sequence: Synthetic oligonucleotide
  Antisense strand to SEQ ID NO: 2265436
uuuacacucaagauugaga

SEQ ID NO: 2265438 - RNA, 19 nt, Artificial Sequence
  Description of Artificial Sequence: Synthetic oligonucleotide
  Sense strand starting at position 2203 of SEQ ID NO: 1884435
cucaaucuugaguguaaau

SEQ ID NO: 2265439 - RNA, 19 nt, Artificial Sequence
  Description of Artificial Sequence: Synthetic oligonucleotide
  Antisense strand to SEQ ID NO: 2265438
auuuacacucaagauugag

SEQ ID NO: 2265440 - RNA, 19 nt, Artificial Sequence
  Description of Artificial Sequence: Synthetic oligonucleotide
  Sense strand starting at position 2295 of SEQ ID NO: 1884435
auacuugaggccugaagca

SEQ ID NO: 2265441 - RNA, 19 nt, Artificial Sequence
  Description of Artificial Sequence: Synthetic oligonucleotide
  Antisense strand to SEQ ID NO: 2265440
ugcuucaggccucaaguau

SEQ ID NO: 2265442 - RNA, 19 nt, Artificial Sequence
  Description of Artificial Sequence: Synthetic oligonucleotide
  Sense strand starting at position 2317 of SEQ ID NO: 1884435
gccuucucucuggaggaaa

SEQ ID NO: 2265443 - RNA, 19 nt, Artificial Sequence
  Description of Artificial Sequence: Synthetic oligonucleotide
  Antisense strand to SEQ ID NO: 2265442
uuuccuccagagagaaggc

SEQ ID NO: 2265444 - RNA, 19 nt, Artificial Sequence
  Description of Artificial Sequence: Synthetic oligonucleotide
  Sense strand starting at position 2319 of SEQ ID NO: 1884435
cuucucucuggaggaaaca

SEQ ID NO: 2265445 - RNA, 19 nt, Artificial Sequence
  Description of Artificial Sequence: Synthetic oligonucleotide
  Antisense strand to SEQ ID NO: 2265444
uguuuccuccagagagaag

SEQ ID NO: 2265446 - RNA, 19 nt, Artificial Sequence
  Description of Artificial Sequence: Synthetic oligonucleotide
  Sense strand starting at position 2493 of SEQ ID NO: 1884435
guggcauacuaacuaaaug

SEQ ID NO: 2265447 - RNA, 19 nt, Artificial Sequence
  Description of Artificial Sequence: Synthetic oligonucleotide
  Antisense strand to SEQ ID NO: 2265446
cauuuaguuaguaugccac

SEQ ID NO: 2265448 - RNA, 19 nt, Artificial Sequence
  Description of Artificial Sequence: Synthetic oligonucleotide
  Sense strand starting at position 2504 of SEQ ID NO: 1884435
acuaaauguguggacucua

SEQ ID NO: 2265449 - RNA, 19 nt, Artificial Sequence
  Description of Artificial Sequence: Synthetic oligonucleotide
  Antisense strand to SEQ ID NO: 2265448
uagaguccacacauuuagu

SEQ ID NO: 2265450 - RNA, 19 nt, Artificial Sequence
  Description of Artificial Sequence: Synthetic oligonucleotide
  Sense strand starting at position 2527 of SEQ ID NO: 1884435
cagacuaugugaguccaaa

SEQ ID NO: 2265451 - RNA, 19 nt, Artificial Sequence
  Description of Artificial Sequence: Synthetic oligonucleotide
  Antisense strand to SEQ ID NO: 2265450
uuuggacucacauagucug

SEQ ID NO: 2265452 - RNA, 19 nt, Artificial Sequence
  Description of Artificial Sequence: Synthetic oligonucleotide
  Sense strand starting at position 2724 of SEQ ID NO: 1884435
ggcauuguuagggauagcu

SEQ ID NO: 2265453 - RNA, 19 nt, Artificial Sequence
  Description of Artificial Sequence: Synthetic oligonucleotide
  Antisense strand to SEQ ID NO: 2265452
agcuaucccuaacaaugcc

SEQ ID NO: 2265454 - RNA, 19 nt, Artificial Sequence
  Description of Artificial Sequence: Synthetic oligonucleotide
  Sense strand starting at position 2755 of SEQ ID NO: 1884435
cagugauaucauggauacu

SEQ ID NO: 2265455 - RNA, 19 nt, Artificial Sequence
  Description of Artificial Sequence: Synthetic oligonucleotide
  Antisense strand to SEQ ID NO: 2265454
aguauccaugauaucacug

SEQ ID NO: 2265456 - RNA, 19 nt, Artificial Sequence
  Description of Artificial Sequence: Synthetic oligonucleotide
  Sense strand starting at position 2780 of SEQ ID NO: 1884435
uuugccaggcucuauauaa

SEQ ID NO: 2265457 - RNA, 19 nt, Artificial Sequence
  Description of Artificial Sequence: Synthetic oligonucleotide
  Antisense strand to SEQ ID NO: 2265456
uuauauagagccuggcaaa

SEQ ID NO: 2265458 - RNA, 19 nt, Artificial Sequence
  Description of Artificial Sequence: Synthetic oligonucleotide
  Sense strand starting at position 2855 of SEQ ID NO: 1884435
gcuauuccagugcuaguuu

SEQ ID NO: 2265459 - RNA, 19 nt, Artificial Sequence
  Description of Artificial Sequence: Synthetic oligonucleotide
  Antisense strand to SEQ ID NO: 2265458
aaacuagcacuggaauagc

SEQ ID NO: 2265460 - RNA, 19 nt, Artificial Sequence
  Description of Artificial Sequence: Synthetic oligonucleotide
  Sense strand starting at position 2929 of SEQ ID NO: 1884435
gaccuugucuccuuaagga

SEQ ID NO: 2265461 - RNA, 19 nt, Artificial Sequence
  Description of Artificial Sequence: Synthetic oligonucleotide
  Antisense strand to SEQ ID NO: 2265460
uccuuaaggagacaagguc

SEQ ID NO: 2265462 - RNA, 19 nt, Artificial Sequence
  Description of Artificial Sequence: Synthetic oligonucleotide
  Sense strand starting at position 2950 of SEQ ID NO: 1884435
aguugugagguuuaaauaa

SEQ ID NO: 2265463 - RNA, 19 nt, Artificial Sequence
  Description of Artificial Sequence: Synthetic oligonucleotide
  Antisense strand to SEQ ID NO: 2265462
uuauuuaaaccucacaacu

SEQ ID NO: 2265464 - RNA, 19 nt, Artificial Sequence
  Description of Artificial Sequence: Synthetic oligonucleotide
  Sense strand starting at position 2966 of SEQ ID NO: 1884435
uaagguaauccauguaaga

SEQ ID NO: 2265465 - RNA, 19 nt, Artificial Sequence
  Description of Artificial Sequence: Synthetic oligonucleotide
  Antisense strand to SEQ ID NO: 2265464
ucuuacauggauuaccuua

SEQ ID NO: 2265466 - RNA, 19 nt, Artificial Sequence
  Description of Artificial Sequence: Synthetic oligonucleotide
  Sense strand starting at position 2968 of SEQ ID NO: 1884435
agguaauccauguaagagu

SEQ ID NO: 2265467 - RNA, 19 nt, Artificial Sequence
  Description of Artificial Sequence: Synthetic oligonucleotide
  Antisense strand to SEQ ID NO: 2265466
acucuuacauggauuaccu

SEQ ID NO: 2265468 - RNA, 19 nt, Artificial Sequence
  Description of Artificial Sequence: Synthetic oligonucleotide
  Sense strand starting at position 2993 of SEQ ID NO: 1884435
uggugucaggcauacaaua

SEQ ID NO: 2265469 - RNA, 19 nt, Artificial Sequence
  Description of Artificial Sequence: Synthetic oligonucleotide
  Antisense strand to SEQ ID NO: 2265468
uauuguaugccugacacca

SEQ ID NO: 2265470 - RNA, 19 nt, Artificial Sequence
  Description of Artificial Sequence: Synthetic oligonucleotide
  Sense strand starting at position 3346 of SEQ ID NO: 1884435
acaagcccucuguaugaga

SEQ ID NO: 2265471 - RNA, 19 nt, Artificial Sequence
  Description of Artificial Sequence: Synthetic oligonucleotide
  Antisense strand to SEQ ID NO: 2265470
ucucauacagagggcuugu

SEQ ID NO: 2265472 - RNA, 19 nt, Artificial Sequence
  Description of Artificial Sequence: Synthetic oligonucleotide
  Sense strand starting at position 3357 of SEQ ID NO: 1884435
guaugagacucuucuuaug

SEQ ID NO: 2265473 - RNA, 19 nt, Artificial Sequence
  Description of Artificial Sequence: Synthetic oligonucleotide
  Antisense strand to SEQ ID NO: 2265472
cauaagaagagucucauac

SEQ ID NO: 2265474 - RNA, 19 nt, Artificial Sequence
  Description of Artificial Sequence: Synthetic oligonucleotide
  Sense strand starting at position 3359 of SEQ ID NO: 1884435
augagacucuucuuaugca

SEQ ID NO: 2265475 - RNA, 19 nt, Artificial Sequence
  Description of Artificial Sequence: Synthetic oligonucleotide
  Antisense strand to SEQ ID NO: 2265474
ugcauaagaagagucucau

SEQ ID NO: 2265476 - RNA, 19 nt, Artificial Sequence
  Description of Artificial Sequence: Synthetic oligonucleotide
  Sense strand starting at position 3558 of SEQ ID NO: 1884435
augugugaucauggaauuc

SEQ ID NO: 2265477 - RNA, 19 nt, Artificial Sequence
  Description of Artificial Sequence: Synthetic oligonucleotide
  Antisense strand to SEQ ID NO: 2265476
gaauuccaugaucacacau

SEQ ID NO: 2265478 - RNA, 19 nt, Artificial Sequence
  Description of Artificial Sequence: Synthetic oligonucleotide
  Sense strand starting at position 3676 of SEQ ID NO: 1884435
ggacacaaucacuggugau

SEQ ID NO: 2265479 - RNA, 19 nt, Artificial Sequence
  Description of Artificial Sequence: Synthetic oligonucleotide
  Antisense strand to SEQ ID NO: 2265478
aucaccagugauugugucc

SEQ ID NO: 2265480 - RNA, 19 nt, Artificial Sequence
  Description of Artificial Sequence: Synthetic oligonucleotide
  Sense strand starting at position 3703 of SEQ ID NO: 1884435
ugcacugagcaaugaauga

SEQ ID NO: 2265481 - RNA, 19 nt, Artificial Sequence
  Description of Artificial Sequence: Synthetic oligonucleotide
  Antisense strand to SEQ ID NO: 2265480
ucauucauugcucagugca

SEQ ID NO: 2265482 - RNA, 19 nt, Artificial Sequence
  Description of Artificial Sequence: Synthetic oligonucleotide
  Sense strand starting at position 3707 of SEQ ID NO: 1884435
cugagcaaugaaugauguu

SEQ ID NO: 2265483 - RNA, 19 nt, Artificial Sequence
  Description of Artificial Sequence: Synthetic oligonucleotide
  Antisense strand to SEQ ID NO: 2265482
aacaucauucauugcucag

SEQ ID NO: 2265484 - RNA, 19 nt, Artificial Sequence
  Description of Artificial Sequence: Synthetic oligonucleotide
  Sense strand starting at position 3826 of SEQ ID NO: 1884435
cucagaauuugugcagucu

SEQ ID NO: 2265485 - RNA, 19 nt, Artificial Sequence
  Description of Artificial Sequence: Synthetic oligonucleotide
  Antisense strand to SEQ ID NO: 2265484
agacugcacaaauucugag

SEQ ID NO: 2265486 - RNA, 19 nt, Artificial Sequence
  Description of Artificial Sequence: Synthetic oligonucleotide
  Sense strand starting at position 3872 of SEQ ID NO: 1884435
ucugguugucagggaagaa

SEQ ID NO: 2265487 - RNA, 19 nt, Artificial Sequence
  Description of Artificial Sequence: Synthetic oligonucleotide
  Antisense strand to SEQ ID NO: 2265486
uucuucccugacaaccaga

SEQ ID NO: 2265488 - RNA, 19 nt, Artificial Sequence
  Description of Artificial Sequence: Synthetic oligonucleotide
  Sense strand starting at position 3884 of SEQ ID NO: 1884435
ggaagaaacucuucugcca

SEQ ID NO: 2265489 - RNA, 19 nt, Artificial Sequence
  Description of Artificial Sequence: Synthetic oligonucleotide
  Antisense strand to SEQ ID NO: 2265488
uggcagaagaguuucuucc

SEQ ID NO: 2265490 - RNA, 19 nt, Artificial Sequence
  Description of Artificial Sequence: Synthetic oligonucleotide
  Sense strand starting at position 3977 of SEQ ID NO: 1884435
aguuaucauacugguggga

SEQ ID NO: 2265491 - RNA, 19 nt, Artificial Sequence
  Description of Artificial Sequence: Synthetic oligonucleotide
  Antisense strand to SEQ ID NO: 2265490
ucccaccaguaugauaacu

SEQ ID NO: 2265492 - RNA, 19 nt, Artificial Sequence
  Description of Artificial Sequence: Synthetic oligonucleotide
  Sense strand starting at position 3980 of SEQ ID NO: 1884435
uaucauacuggugggauua

SEQ ID NO: 2265493 - RNA, 19 nt, Artificial Sequence
  Description of Artificial Sequence: Synthetic oligonucleotide
  Antisense strand to SEQ ID NO: 2265492
uaaucccaccaguaugaua

SEQ ID NO: 2265494 - RNA, 19 nt, Artificial Sequence
  Description of Artificial Sequence: Synthetic oligonucleotide
  Sense strand starting at position 3981 of SEQ ID NO: 1884435
aucauacuggugggauuaa

SEQ ID NO: 2265495 - RNA, 19 nt, Artificial Sequence
  Description of Artificial Sequence: Synthetic oligonucleotide
  Antisense strand to SEQ ID NO: 2265494
uuaaucccaccaguaugau

SEQ ID NO: 2265496 - RNA, 19 nt, Artificial Sequence
  Description of Artificial Sequence: Synthetic oligonucleotide
  Sense strand starting at position 3 of SEQ ID NO: 1884436
gguaaaggaucacaauaua

SEQ ID NO: 2265497 - RNA, 19 nt, Artificial Sequence
  Description of Artificial Sequence: Synthetic oligonucleotide
  Antisense strand to SEQ ID NO: 2265496
uauauugugauccuuuacc

SEQ ID NO: 2265498 - RNA, 19 nt, Artificial Sequence
  Description of Artificial Sequence: Synthetic oligonucleotide
  Sense strand starting at position 38 of SEQ ID NO: 1884436
gcgguuaaagaauauauag

SEQ ID NO: 2265499 - RNA, 19 nt, Artificial Sequence
  Description of Artificial Sequence: Synthetic oligonucleotide
  Antisense strand to SEQ ID NO: 2265498
cuauauauucuuuaaccgc

SEQ ID NO: 2265500 - RNA, 19 nt, Artificial Sequence
  Description of Artificial Sequence: Synthetic oligonucleotide
  Sense strand starting at position 421 of SEQ ID NO: 1884436
ucauaaagcgaauggauua

SEQ ID NO: 2265501 - RNA, 19 nt, Artificial Sequence
  Description of Artificial Sequence: Synthetic oligonucleotide
  Antisense strand to SEQ ID NO: 2265500
uaauccauucgcuuuauga

SEQ ID NO: 2265502 - RNA, 19 nt, Artificial Sequence
  Description of Artificial Sequence: Synthetic oligonucleotide
  Sense strand starting at position 426 of SEQ ID NO: 1884436
aagcgaauggauuaaaugu

SEQ ID NO: 2265503 - RNA, 19 nt, Artificial Sequence
  Description of Artificial Sequence: Synthetic oligonucleotide
  Antisense strand to SEQ ID NO: 2265502
acauuuaauccauucgcuu

SEQ ID NO: 2265504 - RNA, 19 nt, Artificial Sequence
  Description of Artificial Sequence: Synthetic oligonucleotide
  Sense strand starting at position 476 of SEQ ID NO: 1884436
cuguucuuauucuuguaau

SEQ ID NO: 2265505 - RNA, 19 nt, Artificial Sequence
  Description of Artificial Sequence: Synthetic oligonucleotide
  Antisense strand to SEQ ID NO: 2265504
auuacaagaauaagaacag

SEQ ID NO: 2265506 - RNA, 19 nt, Artificial Sequence
  Description of Artificial Sequence: Synthetic oligonucleotide
  Sense strand starting at position 667 of SEQ ID NO: 1884436
cuguaacaucccugaaagu

SEQ ID NO: 2265507 - RNA, 19 nt, Artificial Sequence
  Description of Artificial Sequence: Synthetic oligonucleotide
  Antisense strand to SEQ ID NO: 2265506
acuuucagggauguuacag

SEQ ID NO: 2265508 - RNA, 19 nt, Artificial Sequence
  Description of Artificial Sequence: Synthetic oligonucleotide
  Sense strand starting at position 668 of SEQ ID NO: 1884436
uguaacaucccugaaagua

SEQ ID NO: 2265509 - RNA, 19 nt, Artificial Sequence
  Description of Artificial Sequence: Synthetic oligonucleotide
  Antisense strand to SEQ ID NO: 2265508
uacuuucagggauguuaca

SEQ ID NO: 2265510 - RNA, 19 nt, Artificial Sequence
  Description of Artificial Sequence: Synthetic oligonucleotide
  Sense strand starting at position 847 of SEQ ID NO: 1884436
agcacaacugccuaagagu

SEQ ID NO: 2265511 - RNA, 19 nt, Artificial Sequence
  Description of Artificial Sequence: Synthetic oligonucleotide
  Antisense strand to SEQ ID NO: 2265510
acucuuaggcaguugugcu

SEQ ID NO: 2265512 - RNA, 19 nt, Artificial Sequence
  Description of Artificial Sequence: Synthetic oligonucleotide
  Sense strand starting at position 948 of SEQ ID NO: 1884436
cacugagaaugccucuguu

SEQ ID NO: 2265513 - RNA, 19 nt, Artificial Sequence
  Description of Artificial Sequence: Synthetic oligonucleotide
  Antisense strand to SEQ ID NO: 2265512
aacagaggcauucucagug

SEQ ID NO: 2265514 - RNA, 19 nt, Artificial Sequence
  Description of Artificial Sequence: Synthetic oligonucleotide
  Sense strand starting at position 996 of SEQ ID NO: 1884436
agucaagucuagguucuga

SEQ ID NO: 2265515 - RNA, 19 nt, Artificial Sequence
  Description of Artificial Sequence: Synthetic oligonucleotide
  Antisense strand to SEQ ID NO: 2265514
ucagaaccuagacuugacu

SEQ ID NO: 2265516 - RNA, 19 nt, Artificial Sequence
  Description of Artificial Sequence: Synthetic oligonucleotide
  Sense strand starting at position 1044 of SEQ ID NO: 1884436
gggcuugagccagacacaa

SEQ ID NO: 2265517 - RNA, 19 nt, Artificial Sequence
  Description of Artificial Sequence: Synthetic oligonucleotide
  Antisense strand to SEQ ID NO: 2265516
uugugucuggcucaagccc

SEQ ID NO: 2265518 - RNA, 19 nt, Artificial Sequence
  Description of Artificial Sequence: Synthetic oligonucleotide
  Sense strand starting at position 1057 of SEQ ID NO: 1884436
acacaaagccugggaucua

SEQ ID NO: 2265519 - RNA, 19 nt, Artificial Sequence
  Description of Artificial Sequence: Synthetic oligonucleotide
  Antisense strand to SEQ ID NO: 2265518
uagaucccaggcuuugugu

SEQ ID NO: 2265520 - RNA, 19 nt, Artificial Sequence
  Description of Artificial Sequence: Synthetic oligonucleotide
  Sense strand starting at position 1173 of SEQ ID NO: 1884436
aguauagauccaugguucu

SEQ ID NO: 2265521 - RNA, 19 nt, Artificial Sequence
  Description of Artificial Sequence: Synthetic oligonucleotide
  Antisense strand to SEQ ID NO: 2265520
agaaccauggaucuauacu

SEQ ID NO: 2265522 - RNA, 19 nt, Artificial Sequence
  Description of Artificial Sequence: Synthetic oligonucleotide
  Sense strand starting at position 1242 of SEQ ID NO: 1884436
uucugcuaccaaugagauc

SEQ ID NO: 2265523 - RNA, 19 nt, Artificial Sequence
  Description of Artificial Sequence: Synthetic oligonucleotide
  Antisense strand to SEQ ID NO: 2265522
gaucucauugguagcagaa

SEQ ID NO: 2265524 - RNA, 19 nt, Artificial Sequence
  Description of Artificial Sequence: Synthetic oligonucleotide
  Sense strand starting at position 1281 of SEQ ID NO: 1884436
ccaggcaucgguuauaguu

SEQ ID NO: 2265525 - RNA, 19 nt, Artificial Sequence
  Description of Artificial Sequence: Synthetic oligonucleotide
  Antisense strand to SEQ ID NO: 2265524
aacuauaaccgaugccugg

SEQ ID NO: 2265526 - RNA, 19 nt, Artificial Sequence
  Description of Artificial Sequence: Synthetic oligonucleotide
  Sense strand starting at position 1448 of SEQ ID NO: 1884436
gagauuagguauccuuaua

SEQ ID NO: 2265527 - RNA, 19 nt, Artificial Sequence
  Description of Artificial Sequence: Synthetic oligonucleotide
  Antisense strand to SEQ ID NO: 2265526
uauaaggauaccuaaucuc

SEQ ID NO: 2265528 - RNA, 19 nt, Artificial Sequence
  Description of Artificial Sequence: Synthetic oligonucleotide
  Sense strand starting at position 1651 of SEQ ID NO: 1884436
agaucaugguauucuauua

SEQ ID NO: 2265529 - RNA, 19 nt, Artificial Sequence
  Description of Artificial Sequence: Synthetic oligonucleotide
  Antisense strand to SEQ ID NO: 2265528
uaauagaauaccaugaucu

SEQ ID NO: 2265530 - RNA, 19 nt, Artificial Sequence
  Description of Artificial Sequence: Synthetic oligonucleotide
  Sense strand starting at position 1703 of SEQ ID NO: 1884436
gucuauuaucuuuauuggu

SEQ ID NO: 2265531 - RNA, 19 nt, Artificial Sequence
  Description of Artificial Sequence: Synthetic oligonucleotide
  Antisense strand to SEQ ID NO: 2265530
accaauaaagauaauagac

SEQ ID NO: 2265532 - RNA, 19 nt, Artificial Sequence
  Description of Artificial Sequence: Synthetic oligonucleotide
  Sense strand starting at position 1705 of SEQ ID NO: 1884436
cuauuaucuuuauugguac

SEQ ID NO: 2265533 - RNA, 19 nt, Artificial Sequence
  Description of Artificial Sequence: Synthetic oligonucleotide
  Antisense strand to SEQ ID NO: 2265532
guaccaauaaagauaauag

SEQ ID NO: 2265534 - RNA, 19 nt, Artificial Sequence
  Description of Artificial Sequence: Synthetic oligonucleotide
  Sense strand starting at position 2027 of SEQ ID NO: 1884436
agaggcaguuuacuacuua

SEQ ID NO: 2265535 - RNA, 19 nt, Artificial Sequence
  Description of Artificial Sequence: Synthetic oligonucleotide
  Antisense strand to SEQ ID NO: 2265534
uaaguaguaaacugccucu

SEQ ID NO: 2265536 - RNA, 19 nt, Artificial Sequence
  Description of Artificial Sequence: Synthetic oligonucleotide
  Sense strand starting at position 2031 of SEQ ID NO: 1884436
gcaguuuacuacuuacagu

SEQ ID NO: 2265537 - RNA, 19 nt, Artificial Sequence
  Description of Artificial Sequence: Synthetic oligonucleotide
  Antisense strand to SEQ ID NO: 2265536
acuguaaguaguaaacugc

SEQ ID NO: 2265538 - RNA, 19 nt, Artificial Sequence
  Description of Artificial Sequence: Synthetic oligonucleotide
  Sense strand starting at position 2219 of SEQ ID NO: 1884436
gacugcucuuugcuccaga

SEQ ID NO: 2265539 - RNA, 19 nt, Artificial Sequence
  Description of Artificial Sequence: Synthetic oligonucleotide
  Antisense strand to SEQ ID NO: 2265538
ucuggagcaaagagcaguc

SEQ ID NO: 2265540 - RNA, 19 nt, Artificial Sequence
  Description of Artificial Sequence: Synthetic oligonucleotide
  Sense strand starting at position 2220 of SEQ ID NO: 1884436
acugcucuuugcuccagaa

SEQ ID NO: 2265541 - RNA, 19 nt, Artificial Sequence
  Description of Artificial Sequence: Synthetic oligonucleotide
  Antisense strand to SEQ ID NO: 2265540
uucuggagcaaagagcagu

SEQ ID NO: 2265542 - RNA, 19 nt, Artificial Sequence
  Description of Artificial Sequence: Synthetic oligonucleotide
  Sense strand starting at position 2222 of SEQ ID NO: 1884436
ugcucuuugcuccagaaag

SEQ ID NO: 2265543 - RNA, 19 nt, Artificial Sequence
  Description of Artificial Sequence: Synthetic oligonucleotide
  Antisense strand to SEQ ID NO: 2265542
cuuucuggagcaaagagca

SEQ ID NO: 2265544 - RNA, 19 nt, Artificial Sequence
  Description of Artificial Sequence: Synthetic oligonucleotide
  Sense strand starting at position 2224 of SEQ ID NO: 1884436
cucuuugcuccagaaagaa

SEQ ID NO: 2265545 - RNA, 19 nt, Artificial Sequence
  Description of Artificial Sequence: Synthetic oligonucleotide
  Antisense strand to SEQ ID NO: 2265544
uucuuucuggagcaaagag

SEQ ID NO: 2265546 - RNA, 19 nt, Artificial Sequence
  Description of Artificial Sequence: Synthetic oligonucleotide
  Sense strand starting at position 2316 of SEQ ID NO: 1884436
ggugcuugucuccagaaug

SEQ ID NO: 2265547 - RNA, 19 nt, Artificial Sequence
  Description of Artificial Sequence: Synthetic oligonucleotide
  Antisense strand to SEQ ID NO: 2265546
cauucuggagacaagcacc

SEQ ID NO: 2265548 - RNA, 19 nt, Artificial Sequence
  Description of Artificial Sequence: Synthetic oligonucleotide
  Sense strand starting at position 2492 of SEQ ID NO: 1884436
gcaccugaauugcucauaa

SEQ ID NO: 2265549 - RNA, 19 nt, Artificial Sequence
  Description of Artificial Sequence: Synthetic oligonucleotide
  Antisense strand to SEQ ID NO: 2265548
uuaugagcaauucaggugc

SEQ ID NO: 2265550 - RNA, 19 nt, Artificial Sequence
  Description of Artificial Sequence: Synthetic oligonucleotide
  Sense strand starting at position 2577 of SEQ ID NO: 1884436
gugggaacucuccaagcua

SEQ ID NO: 2265551 - RNA, 19 nt, Artificial Sequence
  Description of Artificial Sequence: Synthetic oligonucleotide
  Antisense strand to SEQ ID NO: 2265550
uagcuuggagaguucccac

SEQ ID NO: 2265552 - RNA, 19 nt, Artificial Sequence
  Description of Artificial Sequence: Synthetic oligonucleotide
  Sense strand starting at position 2675 of SEQ ID NO: 1884436
gguuaaauggaggguugca

SEQ ID NO: 2265553 - RNA, 19 nt, Artificial Sequence
  Description of Artificial Sequence: Synthetic oligonucleotide
  Antisense strand to SEQ ID NO: 2265552
ugcaacccuccauuuaacc

SEQ ID NO: 2265554 - RNA, 19 nt, Artificial Sequence
  Description of Artificial Sequence: Synthetic oligonucleotide
  Sense strand starting at position 2902 of SEQ ID NO: 1884436
gcuguucuggucuaaacuu

SEQ ID NO: 2265555 - RNA, 19 nt, Artificial Sequence
  Description of Artificial Sequence: Synthetic oligonucleotide
  Antisense strand to SEQ ID NO: 2265554
aaguuuagaccagaacagc

SEQ ID NO: 2265556 - RNA, 19 nt, Artificial Sequence
  Description of Artificial Sequence: Synthetic oligonucleotide
  Sense strand starting at position 2909 of SEQ ID NO: 1884436
uggucuaaacuuuguccau

SEQ ID NO: 2265557 - RNA, 19 nt, Artificial Sequence
  Description of Artificial Sequence: Synthetic oligonucleotide
  Antisense strand to SEQ ID NO: 2265556
auggacaaaguuuagacca

SEQ ID NO: 2265558 - RNA, 19 nt, Artificial Sequence
  Description of Artificial Sequence: Synthetic oligonucleotide
  Sense strand starting at position 2931 of SEQ ID NO: 1884436
agguaacugggcugagaaa

SEQ ID NO: 2265559 - RNA, 19 nt, Artificial Sequence
  Description of Artificial Sequence: Synthetic oligonucleotide
  Antisense strand to SEQ ID NO: 2265558
uuucucagcccaguuaccu

SEQ ID NO: 2265560 - RNA, 19 nt, Artificial Sequence
  Description of Artificial Sequence: Synthetic oligonucleotide
  Sense strand starting at position 3145 of SEQ ID NO: 1884436
cauguugacuacucguuau

SEQ ID NO: 2265561 - RNA, 19 nt, Artificial Sequence
  Description of Artificial Sequence: Synthetic oligonucleotide
  Antisense strand to SEQ ID NO: 2265560
auaacgaguagucaacaug

SEQ ID NO: 2265562 - RNA, 19 nt, Artificial Sequence
  Description of Artificial Sequence: Synthetic oligonucleotide
  Sense strand starting at position 3149 of SEQ ID NO: 1884436
uugacuacucguuauccca

SEQ ID NO: 2265563 - RNA, 19 nt, Artificial Sequence
  Description of Artificial Sequence: Synthetic oligonucleotide
  Antisense strand to SEQ ID NO: 2265562
ugggauaacgaguagucaa

SEQ ID NO: 2265564 - RNA, 19 nt, Artificial Sequence
  Description of Artificial Sequence: Synthetic oligonucleotide
  Sense strand starting at position 3151 of SEQ ID NO: 1884436
gacuacucguuaucccaga

SEQ ID NO: 2265565 - RNA, 19 nt, Artificial Sequence
  Description of Artificial Sequence: Synthetic oligonucleotide
  Antisense strand to SEQ ID NO: 2265564
ucugggauaacgaguaguc

SEQ ID NO: 2265566 - RNA, 19 nt, Artificial Sequence
  Description of Artificial Sequence: Synthetic oligonucleotide
  Sense strand starting at position 3152 of SEQ ID NO: 1884436
acuacucguuaucccagau

SEQ ID NO: 2265567 - RNA, 19 nt, Artificial Sequence
  Description of Artificial Sequence: Synthetic oligonucleotide
  Antisense strand to SEQ ID NO: 2265566
aucugggauaacgaguagu

SEQ ID NO: 2265568 - RNA, 19 nt, Artificial Sequence
  Description of Artificial Sequence: Synthetic oligonucleotide
  Sense strand starting at position 3156 of SEQ ID NO: 1884436
cucguuaucccagaugcua

SEQ ID NO: 2265569 - RNA, 19 nt, Artificial Sequence
  Description of Artificial Sequence: Synthetic oligonucleotide
  Antisense strand to SEQ ID NO: 2265568
uagcaucugggauaacgag

SEQ ID NO: 2265570 - RNA, 19 nt, Artificial Sequence
  Description of Artificial Sequence: Synthetic oligonucleotide
  Sense strand starting at position 3245 of SEQ ID NO: 1884436
acagguagaccuuguugga

SEQ ID NO: 2265571 - RNA, 19 nt, Artificial Sequence
  Description of Artificial Sequence: Synthetic oligonucleotide
  Antisense strand to SEQ ID NO: 2265570
uccaacaaggucuaccugu

SEQ ID NO: 2265572 - RNA, 19 nt, Artificial Sequence
  Description of Artificial Sequence: Synthetic oligonucleotide
  Sense strand starting at position 3779 of SEQ ID NO: 1884436
cuaaaccucugagcaagau

SEQ ID NO: 2265573 - RNA, 19 nt, Artificial Sequence
  Description of Artificial Sequence: Synthetic oligonucleotide
  Antisense strand to SEQ ID NO: 2265572
aucuugcucagagguuuag

SEQ ID NO: 2265574 - RNA, 19 nt, Artificial Sequence
  Description of Artificial Sequence: Synthetic oligonucleotide
  Sense strand starting at position 3791 of SEQ ID NO: 1884436
gcaagauucuguuucuacu

SEQ ID NO: 2265575 - RNA, 19 nt, Artificial Sequence
  Description of Artificial Sequence: Synthetic oligonucleotide
  Antisense strand to SEQ ID NO: 2265574
aguagaaacagaaucuugc

SEQ ID NO: 2265576 - RNA, 19 nt, Artificial Sequence
  Description of Artificial Sequence: Synthetic oligonucleotide
  Sense strand starting at position 81 of SEQ ID NO: 1884437
ggaguuagcuucccugagu

SEQ ID NO: 2265577 - RNA, 19 nt, Artificial Sequence
  Description of Artificial Sequence: Synthetic oligonucleotide
  Antisense strand to SEQ ID NO: 2265576
acucagggaagcuaacucc

SEQ ID NO: 2265578 - RNA, 19 nt, Artificial Sequence
  Description of Artificial Sequence: Synthetic oligonucleotide
  Sense strand starting at position 82 of SEQ ID NO: 1884437
gaguuagcuucccugaguu

SEQ ID NO: 2265579 - RNA, 19 nt, Artificial Sequence
  Description of Artificial Sequence: Synthetic oligonucleotide
  Antisense strand to SEQ ID NO: 2265578
aacucagggaagcuaacuc

SEQ ID NO: 2265580 - RNA, 19 nt, Artificial Sequence
  Description of Artificial Sequence: Synthetic oligonucleotide
  Sense strand starting at position 92 of SEQ ID NO: 1884437
cccugaguucccgggcagu

SEQ ID NO: 2265581 - RNA, 19 nt, Artificial Sequence
  Description of Artificial Sequence: Synthetic oligonucleotide
  Antisense strand to SEQ ID NO: 2265580
acugcccgggaacucaggg

SEQ ID NO: 2265582 - RNA, 19 nt, Artificial Sequence
  Description of Artificial Sequence: Synthetic oligonucleotide
  Sense strand starting at position 144 of SEQ ID NO: 1884437
acuugagacucgcuaaaca

SEQ ID NO: 2265583 - RNA, 19 nt, Artificial Sequence
  Description of Artificial Sequence: Synthetic oligonucleotide
  Antisense strand to SEQ ID NO: 2265582
uguuuagcgagucucaagu

SEQ ID NO: 2265584 - RNA, 19 nt, Artificial Sequence
  Description of Artificial Sequence: Synthetic oligonucleotide
  Sense strand starting at position 178 of SEQ ID NO: 1884437
gaggauggaaaucguuagu

SEQ ID NO: 2265585 - RNA, 19 nt, Artificial Sequence
  Description of Artificial Sequence: Synthetic oligonucleotide
  Antisense strand to SEQ ID NO: 2265584
acuaacgauuuccauccuc

SEQ ID NO: 2265586 - RNA, 19 nt, Artificial Sequence
  Description of Artificial Sequence: Synthetic oligonucleotide
  Sense strand starting at position 181 of SEQ ID NO: 1884437
gauggaaaucguuagucua

SEQ ID NO: 2265587 - RNA, 19 nt, Artificial Sequence
  Description of Artificial Sequence: Synthetic oligonucleotide
  Antisense strand to SEQ ID NO: 2265586
uagacuaacgauuuccauc

SEQ ID NO: 2265588 - RNA, 19 nt, Artificial Sequence
  Description of Artificial Sequence: Synthetic oligonucleotide
  Sense strand starting at position 388 of SEQ ID NO: 1884437
aggagcuuccugugagcca

SEQ ID NO: 2265589 - RNA, 19 nt, Artificial Sequence
  Description of Artificial Sequence: Synthetic oligonucleotide
  Antisense strand to SEQ ID NO: 2265588
uggcucacaggaagcuccu

SEQ ID NO: 2265590 - RNA, 19 nt, Artificial Sequence
  Description of Artificial Sequence: Synthetic oligonucleotide
  Sense strand starting at position 395 of SEQ ID NO: 1884437
uccugugagccagacuaau

SEQ ID NO: 2265591 - RNA, 19 nt, Artificial Sequence
  Description of Artificial Sequence: Synthetic oligonucleotide
  Antisense strand to SEQ ID NO: 2265590
auuagucuggcucacagga

SEQ ID NO: 2265592 - RNA, 19 nt, Artificial Sequence
  Description of Artificial Sequence: Synthetic oligonucleotide
  Sense strand starting at position 774 of SEQ ID NO: 1884437
aggagugugagcuggauga

SEQ ID NO: 2265593 - RNA, 19 nt, Artificial Sequence
  Description of Artificial Sequence: Synthetic oligonucleotide
  Antisense strand to SEQ ID NO: 2265592
ucauccagcucacacuccu

SEQ ID NO: 2265594 - RNA, 19 nt, Artificial Sequence
  Description of Artificial Sequence: Synthetic oligonucleotide
  Sense strand starting at position 775 of SEQ ID NO: 1884437
ggagugugagcuggaugau

SEQ ID NO: 2265595 - RNA, 19 nt, Artificial Sequence
  Description of Artificial Sequence: Synthetic oligonucleotide
  Antisense strand to SEQ ID NO: 2265594
aucauccagcucacacucc

SEQ ID NO: 2265596 - RNA, 19 nt, Artificial Sequence
  Description of Artificial Sequence: Synthetic oligonucleotide
  Sense strand starting at position 776 of SEQ ID NO: 1884437
gagugugagcuggaugauc

SEQ ID NO: 2265597 - RNA, 19 nt, Artificial Sequence
  Description of Artificial Sequence: Synthetic oligonucleotide
  Antisense strand to SEQ ID NO: 2265596
gaucauccagcucacacuc

SEQ ID NO: 2265598 - RNA, 19 nt, Artificial Sequence
  Description of Artificial Sequence: Synthetic oligonucleotide
  Sense strand starting at position 799 of SEQ ID NO: 1884437
aaggacuccuaguucugaa

SEQ ID NO: 2265599 - RNA, 19 nt, Artificial Sequence
  Description of Artificial Sequence: Synthetic oligonucleotide
  Antisense strand to SEQ ID NO: 2265598
uucagaacuaggaguccuu

SEQ ID NO: 2265600 - RNA, 19 nt, Artificial Sequence
  Description of Artificial Sequence: Synthetic oligonucleotide
  Sense strand starting at position 803 of SEQ ID NO: 1884437
acuccuaguucugaaagcu

SEQ ID NO: 2265601 - RNA, 19 nt, Artificial Sequence
  Description of Artificial Sequence: Synthetic oligonucleotide
  Antisense strand to SEQ ID NO: 2265600
agcuuucagaacuaggagu

SEQ ID NO: 2265602 - RNA, 19 nt, Artificial Sequence
  Description of Artificial Sequence: Synthetic oligonucleotide
  Sense strand starting at position 809 of SEQ ID NO: 1884437
aguucugaaagcugggauu

SEQ ID NO: 2265603 - RNA, 19 nt, Artificial Sequence
  Description of Artificial Sequence: Synthetic oligonucleotide
  Antisense strand to SEQ ID NO: 2265602
aaucccagcuuucagaacu

SEQ ID NO: 2265604 - RNA, 19 nt, Artificial Sequence
  Description of Artificial Sequence: Synthetic oligonucleotide
  Sense strand starting at position 811 of SEQ ID NO: 1884437
uucugaaagcugggauucu

SEQ ID NO: 2265605 - RNA, 19 nt, Artificial Sequence
  Description of Artificial Sequence: Synthetic oligonucleotide
  Antisense strand to SEQ ID NO: 2265604
agaaucccagcuuucagaa

SEQ ID NO: 2265606 - RNA, 19 nt, Artificial Sequence
  Description of Artificial Sequence: Synthetic oligonucleotide
  Sense strand starting at position 812 of SEQ ID NO: 1884437
ucugaaagcugggauucua

SEQ ID NO: 2265607 - RNA, 19 nt, Artificial Sequence
  Description of Artificial Sequence: Synthetic oligonucleotide
  Antisense strand to SEQ ID NO: 2265606
uagaaucccagcuuucaga

SEQ ID NO: 2265608 - RNA, 19 nt, Artificial Sequence
  Description of Artificial Sequence: Synthetic oligonucleotide
  Sense strand starting at position 977 of SEQ ID NO: 1884437
aauggcucugagugcagaa

SEQ ID NO: 2265609 - RNA, 19 nt, Artificial Sequence
  Description of Artificial Sequence: Synthetic oligonucleotide
  Antisense strand to SEQ ID NO: 2265608
uucugcacucagagccauu

SEQ ID NO: 2265610 - RNA, 19 nt, Artificial Sequence
  Description of Artificial Sequence: Synthetic oligonucleotide
  Sense strand starting at position 1210 of SEQ ID NO: 1884437
cagacuggguguguuaaca

SEQ ID NO: 2265611 - RNA, 19 nt, Artificial Sequence
  Description of Artificial Sequence: Synthetic oligonucleotide
  Antisense strand to SEQ ID NO: 2265610
uguuaacacacccagucug

SEQ ID NO: 2265612 - RNA, 19 nt, Artificial Sequence
  Description of Artificial Sequence: Synthetic oligonucleotide
  Sense strand starting at position 1245 of SEQ ID NO: 1884437
ggagguacauugcccaauu

SEQ ID NO: 2265613 - RNA, 19 nt, Artificial Sequence
  Description of Artificial Sequence: Synthetic oligonucleotide
  Antisense strand to SEQ ID NO: 2265612
aauugggcaauguaccucc

SEQ ID NO: 2265614 - RNA, 19 nt, Artificial Sequence
  Description of Artificial Sequence: Synthetic oligonucleotide
  Sense strand starting at position 1448 of SEQ ID NO: 1884437
ggucauuucuccugcaaac

SEQ ID NO: 2265615 - RNA, 19 nt, Artificial Sequence
  Description of Artificial Sequence: Synthetic oligonucleotide
  Antisense strand to SEQ ID NO: 2265614
guuugcaggagaaaugacc

SEQ ID NO: 2265616 - RNA, 19 nt, Artificial Sequence
  Description of Artificial Sequence: Synthetic oligonucleotide
  Sense strand starting at position 1475 of SEQ ID NO: 1884437
uaaagugucuuggaugcuu

SEQ ID NO: 2265617 - RNA, 19 nt, Artificial Sequence
  Description of Artificial Sequence: Synthetic oligonucleotide
  Antisense strand to SEQ ID NO: 2265616
aagcauccaagacacuuua

SEQ ID NO: 2265618 - RNA, 19 nt, Artificial Sequence
  Description of Artificial Sequence: Synthetic oligonucleotide
  Sense strand starting at position 1585 of SEQ ID NO: 1884437
acgccaguuucccuucuua

SEQ ID NO: 2265619 - RNA, 19 nt, Artificial Sequence
  Description of Artificial Sequence: Synthetic oligonucleotide
  Antisense strand to SEQ ID NO: 2265618
uaagaagggaaacuggcgu

SEQ ID NO: 2265620 - RNA, 19 nt, Artificial Sequence
  Description of Artificial Sequence: Synthetic oligonucleotide
  Sense strand starting at position 1619 of SEQ ID NO: 1884437
gccaaugguuuccuccuaa

SEQ ID NO: 2265621 - RNA, 19 nt, Artificial Sequence
  Description of Artificial Sequence: Synthetic oligonucleotide
  Antisense strand to SEQ ID NO: 2265620
uuaggaggaaaccauuggc

SEQ ID NO: 2265622 - RNA, 19 nt, Artificial Sequence
  Description of Artificial Sequence: Synthetic oligonucleotide
  Sense strand starting at position 1970 of SEQ ID NO: 1884437
gcggccaucugcuuagauu

SEQ ID NO: 2265623 - RNA, 19 nt, Artificial Sequence
  Description of Artificial Sequence: Synthetic oligonucleotide
  Antisense strand to SEQ ID NO: 2265622
aaucuaagcagauggccgc

SEQ ID NO: 2265624 - RNA, 19 nt, Artificial Sequence
  Description of Artificial Sequence: Synthetic oligonucleotide
  Sense strand starting at position 2538 of SEQ ID NO: 1884437
ggagaggucuugcgggaga

SEQ ID NO: 2265625 - RNA, 19 nt, Artificial Sequence
  Description of Artificial Sequence: Synthetic oligonucleotide
  Antisense strand to SEQ ID NO: 2265624
ucucccgcaagaccucucc

SEQ ID NO: 2265626 - RNA, 19 nt, Artificial Sequence
  Description of Artificial Sequence: Synthetic oligonucleotide
  Sense strand starting at position 2540 of SEQ ID NO: 1884437
agaggucuugcgggagaca

SEQ ID NO: 2265627 - RNA, 19 nt, Artificial Sequence
  Description of Artificial Sequence: Synthetic oligonucleotide
  Antisense strand to SEQ ID NO: 2265626
ugucucccgcaagaccucu

SEQ ID NO: 2265628 - RNA, 19 nt, Artificial Sequence
  Description of Artificial Sequence: Synthetic oligonucleotide
  Sense strand starting at position 2541 of SEQ ID NO: 1884437
gaggucuugcgggagacaa

SEQ ID NO: 2265629 - RNA, 19 nt, Artificial Sequence
  Description of Artificial Sequence: Synthetic oligonucleotide
  Antisense strand to SEQ ID NO: 2265628
uugucucccgcaagaccuc

SEQ ID NO: 2265630 - RNA, 19 nt, Artificial Sequence
  Description of Artificial Sequence: Synthetic oligonucleotide
  Sense strand starting at position 2875 of SEQ ID NO: 1884437
acgacuuggcuccaaacuu

SEQ ID NO: 2265631 - RNA, 19 nt, Artificial Sequence
  Description of Artificial Sequence: Synthetic oligonucleotide
  Antisense strand to SEQ ID NO: 2265630
aaguuuggagccaagucgu

SEQ ID NO: 2265632 - RNA, 19 nt, Artificial Sequence
  Description of Artificial Sequence: Synthetic oligonucleotide
  Sense strand starting at position 3181 of SEQ ID NO: 1884437
cgcgcuucuuggaaagagu

SEQ ID NO: 2265633 - RNA, 19 nt, Artificial Sequence
  Description of Artificial Sequence: Synthetic oligonucleotide
  Antisense strand to SEQ ID NO: 2265632
acucuuuccaagaagcgcg

SEQ ID NO: 2265634 - RNA, 19 nt, Artificial Sequence
  Description of Artificial Sequence: Synthetic oligonucleotide
  Sense strand starting at position 3189 of SEQ ID NO: 1884437
uuggaaagagugugaucca

SEQ ID NO: 2265635 - RNA, 19 nt, Artificial Sequence
  Description of Artificial Sequence: Synthetic oligonucleotide
  Antisense strand to SEQ ID NO: 2265634
uggaucacacucuuuccaa

SEQ ID NO: 2265636 - RNA, 19 nt, Artificial Sequence
  Description of Artificial Sequence: Synthetic oligonucleotide
  Sense strand starting at position 3198 of SEQ ID NO: 1884437
gugugauccagaguugcgu

SEQ ID NO: 2265637 - RNA, 19 nt, Artificial Sequence
  Description of Artificial Sequence: Synthetic oligonucleotide
  Antisense strand to SEQ ID NO: 2265636
acgcaacucuggaucacac

SEQ ID NO: 2265638 - RNA, 19 nt, Artificial Sequence
  Description of Artificial Sequence: Synthetic oligonucleotide
  Sense strand starting at position 3204 of SEQ ID NO: 1884437
uccagaguugcgucuguuu

SEQ ID NO: 2265639 - RNA, 19 nt, Artificial Sequence
  Description of Artificial Sequence: Synthetic oligonucleotide
  Antisense strand to SEQ ID NO: 2265638
aaacagacgcaacucugga

SEQ ID NO: 2265640 - RNA, 19 nt, Artificial Sequence
  Description of Artificial Sequence: Synthetic oligonucleotide
  Sense strand starting at position 3641 of SEQ ID NO: 1884437
uucggauaagucuagacuu

SEQ ID NO: 2265641 - RNA, 19 nt, Artificial Sequence
  Description of Artificial Sequence: Synthetic oligonucleotide
  Antisense strand to SEQ ID NO: 2265640
aagucuagacuuauccgaa

SEQ ID NO: 2265642 - RNA, 19 nt, Artificial Sequence
  Description of Artificial Sequence: Synthetic oligonucleotide
  Sense strand starting at position 3730 of SEQ ID NO: 1884437
gagccuaagucgcaaagau

SEQ ID NO: 2265643 - RNA, 19 nt, Artificial Sequence
  Description of Artificial Sequence: Synthetic oligonucleotide
  Antisense strand to SEQ ID NO: 2265642
aucuuugcgacuuaggcuc

SEQ ID NO: 2265644 - RNA, 19 nt, Artificial Sequence
  Description of Artificial Sequence: Synthetic oligonucleotide
  Sense strand starting at position 3739 of SEQ ID NO: 1884437
ucgcaaagauaaccguaaa

SEQ ID NO: 2265645 - RNA, 19 nt, Artificial Sequence
  Description of Artificial Sequence: Synthetic oligonucleotide
  Antisense strand to SEQ ID NO: 2265644
uuuacgguuaucuuugcga

SEQ ID NO: 2265646 - RNA, 19 nt, Artificial Sequence
  Description of Artificial Sequence: Synthetic oligonucleotide
  Sense strand starting at position 3792 of SEQ ID NO: 1884437
ccuagaacuuugucggaug

SEQ ID NO: 2265647 - RNA, 19 nt, Artificial Sequence
  Description of Artificial Sequence: Synthetic oligonucleotide
  Antisense strand to SEQ ID NO: 2265646
cauccgacaaaguucuagg

SEQ ID NO: 2265648 - RNA, 19 nt, Artificial Sequence
  Description of Artificial Sequence: Synthetic oligonucleotide
  Sense strand starting at position 3803 of SEQ ID NO: 1884437
gucggaugcugcagacaug

SEQ ID NO: 2265649 - RNA, 19 nt, Artificial Sequence
  Description of Artificial Sequence: Synthetic oligonucleotide
  Antisense strand to SEQ ID NO: 2265648
caugucugcagcauccgac

SEQ ID NO: 2265650 - RNA, 19 nt, Artificial Sequence
  Description of Artificial Sequence: Synthetic oligonucleotide
  Sense strand starting at position 3836 of SEQ ID NO: 1884437
gccgcuaaccugggaaaga

SEQ ID NO: 2265651 - RNA, 19 nt, Artificial Sequence
  Description of Artificial Sequence: Synthetic oligonucleotide
  Antisense strand to SEQ ID NO: 2265650
ucuuucccagguuagcggc

SEQ ID NO: 2265652 - RNA, 19 nt, Artificial Sequence
  Description of Artificial Sequence: Synthetic oligonucleotide
  Sense strand starting at position 3837 of SEQ ID NO: 1884437
ccgcuaaccugggaaagaa

SEQ ID NO: 2265653 - RNA, 19 nt, Artificial Sequence
  Description of Artificial Sequence: Synthetic oligonucleotide
  Antisense strand to SEQ ID NO: 2265652
uucuuucccagguuagcgg

SEQ ID NO: 2265654 - RNA, 19 nt, Artificial Sequence
  Description of Artificial Sequence: Synthetic oligonucleotide
  Sense strand starting at position 3962 of SEQ ID NO: 1884437
ccagaaacacuuugauguu

SEQ ID NO: 2265655 - RNA, 19 nt, Artificial Sequence
  Description of Artificial Sequence: Synthetic oligonucleotide
  Antisense strand to SEQ ID NO: 2265654
aacaucaaaguguuucugg

SEQ ID NO: 2265656 - RNA, 19 nt, Artificial Sequence
  Description of Artificial Sequence: Synthetic oligonucleotide
  Sense strand starting at position 256 of SEQ ID NO: 1884438
cuccuacuccuaggaggaa

SEQ ID NO: 2265657 - RNA, 19 nt, Artificial Sequence
  Description of Artificial Sequence: Synthetic oligonucleotide
  Antisense strand to SEQ ID NO: 2265656
uuccuccuaggaguaggag

SEQ ID NO: 2265658 - RNA, 19 nt, Artificial Sequence
  Description of Artificial Sequence: Synthetic oligonucleotide
  Sense strand starting at position 680 of SEQ ID NO: 1884438
guuauauuccugggucuaa

SEQ ID NO: 2265659 - RNA, 19 nt, Artificial Sequence
  Description of Artificial Sequence: Synthetic oligonucleotide
  Antisense strand to SEQ ID NO: 2265658
uuagacccaggaauauaac

SEQ ID NO: 2265660 - RNA, 19 nt, Artificial Sequence
  Description of Artificial Sequence: Synthetic oligonucleotide
  Sense strand starting at position 681 of SEQ ID NO: 1884438
uuauauuccugggucuaau

SEQ ID NO: 2265661 - RNA, 19 nt, Artificial Sequence
  Description of Artificial Sequence: Synthetic oligonucleotide
  Antisense strand to SEQ ID NO: 2265660
auuagacccaggaauauaa

SEQ ID NO: 2265662 - RNA, 19 nt, Artificial Sequence
  Description of Artificial Sequence: Synthetic oligonucleotide
  Sense strand starting at position 1793 of SEQ ID NO: 1884438
ggcaguuuccgaggaaaua

SEQ ID NO: 2265663 - RNA, 19 nt, Artificial Sequence
  Description of Artificial Sequence: Synthetic oligonucleotide
  Antisense strand to SEQ ID NO: 2265662
uauuuccucggaaacugcc

SEQ ID NO: 2265664 - RNA, 19 nt, Artificial Sequence
  Description of Artificial Sequence: Synthetic oligonucleotide
  Sense strand starting at position 1794 of SEQ ID NO: 1884438
gcaguuuccgaggaaauaa

SEQ ID NO: 2265665 - RNA, 19 nt, Artificial Sequence
  Description of Artificial Sequence: Synthetic oligonucleotide
  Antisense strand to SEQ ID NO: 2265664
uuauuuccucggaaacugc

SEQ ID NO: 2265666 - RNA, 19 nt, Artificial Sequence
  Description of Artificial Sequence: Synthetic oligonucleotide
  Sense strand starting at position 2256 of SEQ ID NO: 1884438
cggauauuuggugggccuu

SEQ ID NO: 2265667 - RNA, 19 nt, Artificial Sequence
  Description of Artificial Sequence: Synthetic oligonucleotide
  Antisense strand to SEQ ID NO: 2265666
aaggcccaccaaauauccg

SEQ ID NO: 2265668 - RNA, 19 nt, Artificial Sequence
  Description of Artificial Sequence: Synthetic oligonucleotide
  Sense strand starting at position 2306 of SEQ ID NO: 1884438
ucgugauggguacagucau

SEQ ID NO: 2265669 - RNA, 19 nt, Artificial Sequence
  Description of Artificial Sequence: Synthetic oligonucleotide
  Antisense strand to SEQ ID NO: 2265668
augacuguacccaucacga

SEQ ID NO: 2265670 - RNA, 19 nt, Artificial Sequence
  Description of Artificial Sequence: Synthetic oligonucleotide
  Sense strand starting at position 2312 of SEQ ID NO: 1884438
uggguacagucaucaguau

SEQ ID NO: 2265671 - RNA, 19 nt, Artificial Sequence
  Description of Artificial Sequence: Synthetic oligonucleotide
  Antisense strand to SEQ ID NO: 2265670
auacugaugacuguaccca

SEQ ID NO: 2265672 - RNA, 19 nt, Artificial Sequence
  Description of Artificial Sequence: Synthetic oligonucleotide
  Sense strand starting at position 2313 of SEQ ID NO: 1884438
ggguacagucaucaguauu

SEQ ID NO: 2265673 - RNA, 19 nt, Artificial Sequence
  Description of Artificial Sequence: Synthetic oligonucleotide
  Antisense strand to SEQ ID NO: 2265672
aauacugaugacuguaccc

SEQ ID NO: 2265674 - RNA, 19 nt, Artificial Sequence
  Description of Artificial Sequence: Synthetic oligonucleotide
  Sense strand starting at position 2358 of SEQ ID NO: 1884438
ggaauucccacugggaugu

SEQ ID NO: 2265675 - RNA, 19 nt, Artificial Sequence
  Description of Artificial Sequence: Synthetic oligonucleotide
  Antisense strand to SEQ ID NO: 2265674
acaucccagugggaauucc

SEQ ID NO: 2265676 - RNA, 19 nt, Artificial Sequence
  Description of Artificial Sequence: Synthetic oligonucleotide
  Sense strand starting at position 2406 of SEQ ID NO: 1884438
uaaccaguguucccuggaa

SEQ ID NO: 2265677 - RNA, 19 nt, Artificial Sequence
  Description of Artificial Sequence: Synthetic oligonucleotide
  Antisense strand to SEQ ID NO: 2265676
uuccagggaacacugguua

SEQ ID NO: 2265678 - RNA, 19 nt, Artificial Sequence
  Description of Artificial Sequence: Synthetic oligonucleotide
  Sense strand starting at position 2408 of SEQ ID NO: 1884438
accaguguucccuggaaug

SEQ ID NO: 2265679 - RNA, 19 nt, Artificial Sequence
  Description of Artificial Sequence: Synthetic oligonucleotide
  Antisense strand to SEQ ID NO: 2265678
cauuccagggaacacuggu

SEQ ID NO: 2265680 - RNA, 19 nt, Artificial Sequence
  Description of Artificial Sequence: Synthetic oligonucleotide
  Sense strand starting at position 2410 of SEQ ID NO: 1884438
caguguucccuggaaugaa

SEQ ID NO: 2265681 - RNA, 19 nt, Artificial Sequence
  Description of Artificial Sequence: Synthetic oligonucleotide
  Antisense strand to SEQ ID NO: 2265680
uucauuccagggaacacug

SEQ ID NO: 2265682 - RNA, 19 nt, Artificial Sequence
  Description of Artificial Sequence: Synthetic oligonucleotide
  Sense strand starting at position 2488 of SEQ ID NO: 1884438
auacaagguugcuuaacaa

SEQ ID NO: 2265683 - RNA, 19 nt, Artificial Sequence
  Description of Artificial Sequence: Synthetic oligonucleotide
  Antisense strand to SEQ ID NO: 2265682
uuguuaagcaaccuuguau

SEQ ID NO: 2265684 - RNA, 19 nt, Artificial Sequence
  Description of Artificial Sequence: Synthetic oligonucleotide
  Sense strand starting at position 2795 of SEQ ID NO: 1884438
accuuaauacgucaaguga

SEQ ID NO: 2265685 - RNA, 19 nt, Artificial Sequence
  Description of Artificial Sequence: Synthetic oligonucleotide
  Antisense strand to SEQ ID NO: 2265684
ucacuugacguauuaaggu

SEQ ID NO: 2265686 - RNA, 19 nt, Artificial Sequence
  Description of Artificial Sequence: Synthetic oligonucleotide
  Sense strand starting at position 2877 of SEQ ID NO: 1884438
ugugcaauugcauaguaaa

SEQ ID NO: 2265687 - RNA, 19 nt, Artificial Sequence
  Description of Artificial Sequence: Synthetic oligonucleotide
  Antisense strand to SEQ ID NO: 2265686
uuuacuaugcaauugcaca

SEQ ID NO: 2265688 - RNA, 19 nt, Artificial Sequence
  Description of Artificial Sequence: Synthetic oligonucleotide
  Sense strand starting at position 2931 of SEQ ID NO: 1884438
gaagaauuguucgcuugaa

SEQ ID NO: 2265689 - RNA, 19 nt, Artificial Sequence
  Description of Artificial Sequence: Synthetic oligonucleotide
  Antisense strand to SEQ ID NO: 2265688
uucaagcgaacaauucuuc

SEQ ID NO: 2265690 - RNA, 19 nt, Artificial Sequence
  Description of Artificial Sequence: Synthetic oligonucleotide
  Sense strand starting at position 2943 of SEQ ID NO: 1884438
gcuugaacgaucuggaaug

SEQ ID NO: 2265691 - RNA, 19 nt, Artificial Sequence
  Description of Artificial Sequence: Synthetic oligonucleotide
  Antisense strand to SEQ ID NO: 2265690
cauuccagaucguucaagc

SEQ ID NO: 2265692 - RNA, 19 nt, Artificial Sequence
  Description of Artificial Sequence: Synthetic oligonucleotide
  Sense strand starting at position 2948 of SEQ ID NO: 1884438
aacgaucuggaaugguuaa

SEQ ID NO: 2265693 - RNA, 19 nt, Artificial Sequence
  Description of Artificial Sequence: Synthetic oligonucleotide
  Antisense strand to SEQ ID NO: 2265692
uuaaccauuccagaucguu

SEQ ID NO: 2265694 - RNA, 19 nt, Artificial Sequence
  Description of Artificial Sequence: Synthetic oligonucleotide
  Sense strand starting at position 2955 of SEQ ID NO: 1884438
uggaaugguuaagucacau

SEQ ID NO: 2265695 - RNA, 19 nt, Artificial Sequence
  Description of Artificial Sequence: Synthetic oligonucleotide
  Antisense strand to SEQ ID NO: 2265694
augugacuuaaccauucca

SEQ ID NO: 2265696 - RNA, 19 nt, Artificial Sequence
  Description of Artificial Sequence: Synthetic oligonucleotide
  Sense strand starting at position 2967 of SEQ ID NO: 1884438
gucacauguuuacuugaua

SEQ ID NO: 2265697 - RNA, 19 nt, Artificial Sequence
  Description of Artificial Sequence: Synthetic oligonucleotide
  Antisense strand to SEQ ID NO: 2265696
uaucaaguaaacaugugac

SEQ ID NO: 2265698 - RNA, 19 nt, Artificial Sequence
  Description of Artificial Sequence: Synthetic oligonucleotide
  Sense strand starting at position 2990 of SEQ ID NO: 1884438
ugcagucuucugccaguua

SEQ ID NO: 2265699 - RNA, 19 nt, Artificial Sequence
  Description of Artificial Sequence: Synthetic oligonucleotide
  Antisense strand to SEQ ID NO: 2265698
uaacuggcagaagacugca

SEQ ID NO: 2265700 - RNA, 19 nt, Artificial Sequence
  Description of Artificial Sequence: Synthetic oligonucleotide
  Sense strand starting at position 3006 of SEQ ID NO: 1884438
uuaaacuugcaagagucaa

SEQ ID NO: 2265701 - RNA, 19 nt, Artificial Sequence
  Description of Artificial Sequence: Synthetic oligonucleotide
  Antisense strand to SEQ ID NO: 2265700
uugacucuugcaaguuuaa

SEQ ID NO: 2265702 - RNA, 19 nt, Artificial Sequence
  Description of Artificial Sequence: Synthetic oligonucleotide
  Sense strand starting at position 3034 of SEQ ID NO: 1884438
aggacuggguuucuaacaa

SEQ ID NO: 2265703 - RNA, 19 nt, Artificial Sequence
  Description of Artificial Sequence: Synthetic oligonucleotide
  Antisense strand to SEQ ID NO: 2265702
uuguuagaaacccaguccu

SEQ ID NO: 2265704 - RNA, 19 nt, Artificial Sequence
  Description of Artificial Sequence: Synthetic oligonucleotide
  Sense strand starting at position 3049 of SEQ ID NO: 1884438
acaagauaccaucgguuaa

SEQ ID NO: 2265705 - RNA, 19 nt, Artificial Sequence
  Description of Artificial Sequence: Synthetic oligonucleotide
  Antisense strand to SEQ ID NO: 2265704
uuaaccgaugguaucuugu

SEQ ID NO: 2265706 - RNA, 19 nt, Artificial Sequence
  Description of Artificial Sequence: Synthetic oligonucleotide
  Sense strand starting at position 3051 of SEQ ID NO: 1884438
aagauaccaucgguuaaga

SEQ ID NO: 2265707 - RNA, 19 nt, Artificial Sequence
  Description of Artificial Sequence: Synthetic oligonucleotide
  Antisense strand to SEQ ID NO: 2265706
ucuuaaccgaugguaucuu

SEQ ID NO: 2265708 - RNA, 19 nt, Artificial Sequence
  Description of Artificial Sequence: Synthetic oligonucleotide
  Sense strand starting at position 3263 of SEQ ID NO: 1884438
gcuauauaagaauguggaa

SEQ ID NO: 2265709 - RNA, 19 nt, Artificial Sequence
  Description of Artificial Sequence: Synthetic oligonucleotide
  Antisense strand to SEQ ID NO: 2265708
uuccacauucuuauauagc

SEQ ID NO: 2265710 - RNA, 19 nt, Artificial Sequence
  Description of Artificial Sequence: Synthetic oligonucleotide
  Sense strand starting at position 3423 of SEQ ID NO: 1884438
agacgugugggcuaugauu

SEQ ID NO: 2265711 - RNA, 19 nt, Artificial Sequence
  Description of Artificial Sequence: Synthetic oligonucleotide
  Antisense strand to SEQ ID NO: 2265710
aaucauagcccacacgucu

SEQ ID NO: 2265712 - RNA, 19 nt, Artificial Sequence
  Description of Artificial Sequence: Synthetic oligonucleotide
  Sense strand starting at position 3425 of SEQ ID NO: 1884438
acgugugggcuaugauuua

SEQ ID NO: 2265713 - RNA, 19 nt, Artificial Sequence
  Description of Artificial Sequence: Synthetic oligonucleotide
  Antisense strand to SEQ ID NO: 2265712
uaaaucauagcccacacgu

SEQ ID NO: 2265714 - RNA, 19 nt, Artificial Sequence
  Description of Artificial Sequence: Synthetic oligonucleotide
  Sense strand starting at position 3508 of SEQ ID NO: 1884438
uccauuagucuuuaacugu

SEQ ID NO: 2265715 - RNA, 19 nt, Artificial Sequence
  Description of Artificial Sequence: Synthetic oligonucleotide
  Antisense strand to SEQ ID NO: 2265714
acaguuaaagacuaaugga

SEQ ID NO: 2265716 - RNA, 19 nt, Artificial Sequence
  Description of Artificial Sequence: Synthetic oligonucleotide
  Sense strand starting at position 3660 of SEQ ID NO: 1884438
uuguuuaguaaaggaguuu

SEQ ID NO: 2265717 - RNA, 19 nt, Artificial Sequence
  Description of Artificial Sequence: Synthetic oligonucleotide
  Antisense strand to SEQ ID NO: 2265716
aaacuccuuuacuaaacaa

SEQ ID NO: 2265718 - RNA, 19 nt, Artificial Sequence
  Description of Artificial Sequence: Synthetic oligonucleotide
  Sense strand starting at position 3669 of SEQ ID NO: 1884438
aaaggaguuuccucuaagu

SEQ ID NO: 2265719 - RNA, 19 nt, Artificial Sequence
  Description of Artificial Sequence: Synthetic oligonucleotide
  Antisense strand to SEQ ID NO: 2265718
acuuagaggaaacuccuuu

SEQ ID NO: 2265720 - RNA, 19 nt, Artificial Sequence
  Description of Artificial Sequence: Synthetic oligonucleotide
  Sense strand starting at position 3671 of SEQ ID NO: 1884438
aggaguuuccucuaagucu

SEQ ID NO: 2265721 - RNA, 19 nt, Artificial Sequence
  Description of Artificial Sequence: Synthetic oligonucleotide
  Antisense strand to SEQ ID NO: 2265720
agacuuagaggaaacuccu

SEQ ID NO: 2265722 - RNA, 19 nt, Artificial Sequence
  Description of Artificial Sequence: Synthetic oligonucleotide
  Sense strand starting at position 3820 of SEQ ID NO: 1884438
ugaugugggugugcuauuu

SEQ ID NO: 2265723 - RNA, 19 nt, Artificial Sequence
  Description of Artificial Sequence: Synthetic oligonucleotide
  Antisense strand to SEQ ID NO: 2265722
aaauagcacacccacauca

SEQ ID NO: 2265724 - RNA, 19 nt, Artificial Sequence
  Description of Artificial Sequence: Synthetic oligonucleotide
  Sense strand starting at position 3841 of SEQ ID NO: 1884438
aagggauguggguguuuac

SEQ ID NO: 2265725 - RNA, 19 nt, Artificial Sequence
  Description of Artificial Sequence: Synthetic oligonucleotide
  Antisense strand to SEQ ID NO: 2265724
guaaacacccacaucccuu

SEQ ID NO: 2265726 - RNA, 19 nt, Artificial Sequence
  Description of Artificial Sequence: Synthetic oligonucleotide
  Sense strand starting at position 3844 of SEQ ID NO: 1884438
ggauguggguguuuacuga

SEQ ID NO: 2265727 - RNA, 19 nt, Artificial Sequence
  Description of Artificial Sequence: Synthetic oligonucleotide
  Antisense strand to SEQ ID NO: 2265726
ucaguaaacacccacaucc

SEQ ID NO: 2265728 - RNA, 19 nt, Artificial Sequence
  Description of Artificial Sequence: Synthetic oligonucleotide
  Sense strand starting at position 3877 of SEQ ID NO: 1884438
aggagaaauuagucuguag

SEQ ID NO: 2265729 - RNA, 19 nt, Artificial Sequence
  Description of Artificial Sequence: Synthetic oligonucleotide
  Antisense strand to SEQ ID NO: 2265728
cuacagacuaauuucuccu

SEQ ID NO: 2265730 - RNA, 19 nt, Artificial Sequence
  Description of Artificial Sequence: Synthetic oligonucleotide
  Sense strand starting at position 3879 of SEQ ID NO: 1884438
gagaaauuagucuguagca

SEQ ID NO: 2265731 - RNA, 19 nt, Artificial Sequence
  Description of Artificial Sequence: Synthetic oligonucleotide
  Antisense strand to SEQ ID NO: 2265730
ugcuacagacuaauuucuc

SEQ ID NO: 2265732 - RNA, 19 nt, Artificial Sequence
  Description of Artificial Sequence: Synthetic oligonucleotide
  Sense strand starting at position 3880 of SEQ ID NO: 1884438
agaaauuagucuguagcac

SEQ ID NO: 2265733 - RNA, 19 nt, Artificial Sequence
  Description of Artificial Sequence: Synthetic oligonucleotide
  Antisense strand to SEQ ID NO: 2265732
gugcuacagacuaauuucu

SEQ ID NO: 2265734 - RNA, 19 nt, Artificial Sequence
  Description of Artificial Sequence: Synthetic oligonucleotide
  Sense strand starting at position 3958 of SEQ ID NO: 1884438
uuccucagauagguaauau

SEQ ID NO: 2265735 - RNA, 19 nt, Artificial Sequence
  Description of Artificial Sequence: Synthetic oligonucleotide
  Antisense strand to SEQ ID NO: 2265734
auauuaccuaucugaggaa

SEQ ID NO: 2265736 - RNA, 19 nt, Artificial Sequence
  Description of Artificial Sequence: Synthetic oligonucleotide
  Sense strand starting at position 185 of SEQ ID NO: 1884439
uuugauucugggugacuaa

SEQ ID NO: 2265737 - RNA, 19 nt, Artificial Sequence
  Description of Artificial Sequence: Synthetic oligonucleotide
  Antisense strand to SEQ ID NO: 2265736
uuagucacccagaaucaaa

SEQ ID NO: 2265738 - RNA, 19 nt, Artificial Sequence
  Description of Artificial Sequence: Synthetic oligonucleotide
  Sense strand starting at position 486 of SEQ ID NO: 1884439
agcauuaaccagcacaagu

SEQ ID NO: 2265739 - RNA, 19 nt, Artificial Sequence
  Description of Artificial Sequence: Synthetic oligonucleotide
  Antisense strand to SEQ ID NO: 2265738
acuugugcugguuaaugcu

SEQ ID NO: 2265740 - RNA, 19 nt, Artificial Sequence
  Description of Artificial Sequence: Synthetic oligonucleotide
  Sense strand starting at position 903 of SEQ ID NO: 1884439
cagguuucucaguacagaa

SEQ ID NO: 2265741 - RNA, 19 nt, Artificial Sequence
  Description of Artificial Sequence: Synthetic oligonucleotide
  Antisense strand to SEQ ID NO: 2265740
uucuguacugagaaaccug

SEQ ID NO: 2265742 - RNA, 19 nt, Artificial Sequence
  Description of Artificial Sequence: Synthetic oligonucleotide
  Sense strand starting at position 905 of SEQ ID NO: 1884439
gguuucucaguacagaauu

SEQ ID NO: 2265743 - RNA, 19 nt, Artificial Sequence
  Description of Artificial Sequence: Synthetic oligonucleotide
  Antisense strand to SEQ ID NO: 2265742
aauucuguacugagaaacc

SEQ ID NO: 2265744 - RNA, 19 nt, Artificial Sequence
  Description of Artificial Sequence: Synthetic oligonucleotide
  Sense strand starting at position 938 of SEQ ID NO: 1884439
agaauuacucagggugacu

SEQ ID NO: 2265745 - RNA, 19 nt, Artificial Sequence
  Description of Artificial Sequence: Synthetic oligonucleotide
  Antisense strand to SEQ ID NO: 2265744
agucacccugaguaauucu

SEQ ID NO: 2265746 - RNA, 19 nt, Artificial Sequence
  Description of Artificial Sequence: Synthetic oligonucleotide
  Sense strand starting at position 1008 of SEQ ID NO: 1884439
agaucuucuggugggagua

SEQ ID NO: 2265747 - RNA, 19 nt, Artificial Sequence
  Description of Artificial Sequence: Synthetic oligonucleotide
  Antisense strand to SEQ ID NO: 2265746
uacucccaccagaagaucu

SEQ ID NO: 2265748 - RNA, 19 nt, Artificial Sequence
  Description of Artificial Sequence: Synthetic oligonucleotide
  Sense strand starting at position 1009 of SEQ ID NO: 1884439
gaucuucuggugggaguaa

SEQ ID NO: 2265749 - RNA, 19 nt, Artificial Sequence
  Description of Artificial Sequence: Synthetic oligonucleotide
  Antisense strand to SEQ ID NO: 2265748
uuacucccaccagaagauc

SEQ ID NO: 2265750 - RNA, 19 nt, Artificial Sequence
  Description of Artificial Sequence: Synthetic oligonucleotide
  Sense strand starting at position 1124 of SEQ ID NO: 1884439
uguccuauuugucucagca

SEQ ID NO: 2265751 - RNA, 19 nt, Artificial Sequence
  Description of Artificial Sequence: Synthetic oligonucleotide
  Antisense strand to SEQ ID NO: 2265750
ugcugagacaaauaggaca

SEQ ID NO: 2265752 - RNA, 19 nt, Artificial Sequence
  Description of Artificial Sequence: Synthetic oligonucleotide
  Sense strand starting at position 1128 of SEQ ID NO: 1884439
cuauuugucucagcacuca

SEQ ID NO: 2265753 - RNA, 19 nt, Artificial Sequence
  Description of Artificial Sequence: Synthetic oligonucleotide
  Antisense strand to SEQ ID NO: 2265752
ugagugcugagacaaauag

SEQ ID NO: 2265754 - RNA, 19 nt, Artificial Sequence
  Description of Artificial Sequence: Synthetic oligonucleotide
  Sense strand starting at position 1222 of SEQ ID NO: 1884439
accuaagagucuuuaaagc

SEQ ID NO: 2265755 - RNA, 19 nt, Artificial Sequence
  Description of Artificial Sequence: Synthetic oligonucleotide
  Antisense strand to SEQ ID NO: 2265754
gcuuuaaagacucuuaggu

SEQ ID NO: 2265756 - RNA, 19 nt, Artificial Sequence
  Description of Artificial Sequence: Synthetic oligonucleotide
  Sense strand starting at position 1471 of SEQ ID NO: 1884439
ugugcagugcuugucaguu

SEQ ID NO: 2265757 - RNA, 19 nt, Artificial Sequence
  Description of Artificial Sequence: Synthetic oligonucleotide
  Antisense strand to SEQ ID NO: 2265756
aacugacaagcacugcaca

SEQ ID NO: 2265758 - RNA, 19 nt, Artificial Sequence
  Description of Artificial Sequence: Synthetic oligonucleotide
  Sense strand starting at position 1531 of SEQ ID NO: 1884439
ucuguaagauaagcauuau

SEQ ID NO: 2265759 - RNA, 19 nt, Artificial Sequence
  Description of Artificial Sequence: Synthetic oligonucleotide
  Antisense strand to SEQ ID NO: 2265758
auaaugcuuaucuuacaga

SEQ ID NO: 2265760 - RNA, 19 nt, Artificial Sequence
  Description of Artificial Sequence: Synthetic oligonucleotide
  Sense strand starting at position 1612 of SEQ ID NO: 1884439
uaguaaguggaaugucaga

SEQ ID NO: 2265761 - RNA, 19 nt, Artificial Sequence
  Description of Artificial Sequence: Synthetic oligonucleotide
  Antisense strand to SEQ ID NO: 2265760
ucugacauuccacuuacua

SEQ ID NO: 2265762 - RNA, 19 nt, Artificial Sequence
  Description of Artificial Sequence: Synthetic oligonucleotide
  Sense strand starting at position 1638 of SEQ ID NO: 1884439
aggaucuucucacuaugca

SEQ ID NO: 2265763 - RNA, 19 nt, Artificial Sequence
  Description of Artificial Sequence: Synthetic oligonucleotide
  Antisense strand to SEQ ID NO: 2265762
ugcauagugagaagauccu

SEQ ID NO: 2265764 - RNA, 19 nt, Artificial Sequence
  Description of Artificial Sequence: Synthetic oligonucleotide
  Sense strand starting at position 1639 of SEQ ID NO: 1884439
ggaucuucucacuaugcau

SEQ ID NO: 2265765 - RNA, 19 nt, Artificial Sequence
  Description of Artificial Sequence: Synthetic oligonucleotide
  Antisense strand to SEQ ID NO: 2265764
augcauagugagaagaucc

SEQ ID NO: 2265766 - RNA, 19 nt, Artificial Sequence
  Description of Artificial Sequence: Synthetic oligonucleotide
  Sense strand starting at position 1754 of SEQ ID NO: 1884439
agagaacauuggucagcua

SEQ ID NO: 2265767 - RNA, 19 nt, Artificial Sequence
  Description of Artificial Sequence: Synthetic oligonucleotide
  Antisense strand to SEQ ID NO: 2265766
uagcugaccaauguucucu

SEQ ID NO: 2265768 - RNA, 19 nt, Artificial Sequence
  Description of Artificial Sequence: Synthetic oligonucleotide
  Sense strand starting at position 1755 of SEQ ID NO: 1884439
gagaacauuggucagcuau

SEQ ID NO: 2265769 - RNA, 19 nt, Artificial Sequence
  Description of Artificial Sequence: Synthetic oligonucleotide
  Antisense strand to SEQ ID NO: 2265768
auagcugaccaauguucuc

SEQ ID NO: 2265770 - RNA, 19 nt, Artificial Sequence
  Description of Artificial Sequence: Synthetic oligonucleotide
  Sense strand starting at position 1757 of SEQ ID NO: 1884439
gaacauuggucagcuauau

SEQ ID NO: 2265771 - RNA, 19 nt, Artificial Sequence
  Description of Artificial Sequence: Synthetic oligonucleotide
  Antisense strand to SEQ ID NO: 2265770
auauagcugaccaauguuc

SEQ ID NO: 2265772 - RNA, 19 nt, Artificial Sequence
  Description of Artificial Sequence: Synthetic oligonucleotide
  Sense strand starting at position 1761 of SEQ ID NO: 1884439
auuggucagcuauauccua

SEQ ID NO: 2265773 - RNA, 19 nt, Artificial Sequence
  Description of Artificial Sequence: Synthetic oligonucleotide
  Antisense strand to SEQ ID NO: 2265772
uaggauauagcugaccaau

SEQ ID NO: 2265774 - RNA, 19 nt, Artificial Sequence
  Description of Artificial Sequence: Synthetic oligonucleotide
  Sense strand starting at position 1825 of SEQ ID NO: 1884439
augcauauauuaguugaca

SEQ ID NO: 2265775 - RNA, 19 nt, Artificial Sequence
  Description of Artificial Sequence: Synthetic oligonucleotide
  Antisense strand to SEQ ID NO: 2265774
ugucaacuaauauaugcau

SEQ ID NO: 2265776 - RNA, 19 nt, Artificial Sequence
  Description of Artificial Sequence: Synthetic oligonucleotide
  Sense strand starting at position 1826 of SEQ ID NO: 1884439
ugcauauauuaguugacaa

SEQ ID NO: 2265777 - RNA, 19 nt, Artificial Sequence
  Description of Artificial Sequence: Synthetic oligonucleotide
  Antisense strand to SEQ ID NO: 2265776
uugucaacuaauauaugca

SEQ ID NO: 2265778 - RNA, 19 nt, Artificial Sequence
  Description of Artificial Sequence: Synthetic oligonucleotide
  Sense strand starting at position 1839 of SEQ ID NO: 1884439
ugacaacuucuguguaaga

SEQ ID NO: 2265779 - RNA, 19 nt, Artificial Sequence
  Description of Artificial Sequence: Synthetic oligonucleotide
  Antisense strand to SEQ ID NO: 2265778
ucuuacacagaaguuguca

SEQ ID NO: 2265780 - RNA, 19 nt, Artificial Sequence
  Description of Artificial Sequence: Synthetic oligonucleotide
  Sense strand starting at position 1840 of SEQ ID NO: 1884439
gacaacuucuguguaagaa

SEQ ID NO: 2265781 - RNA, 19 nt, Artificial Sequence
  Description of Artificial Sequence: Synthetic oligonucleotide
  Antisense strand to SEQ ID NO: 2265780
uucuuacacagaaguuguc

SEQ ID NO: 2265782 - RNA, 19 nt, Artificial Sequence
  Description of Artificial Sequence: Synthetic oligonucleotide
  Sense strand starting at position 1841 of SEQ ID NO: 1884439
acaacuucuguguaagaac

SEQ ID NO: 2265783 - RNA, 19 nt, Artificial Sequence
  Description of Artificial Sequence: Synthetic oligonucleotide
  Antisense strand to SEQ ID NO: 2265782
guucuuacacagaaguugu

SEQ ID NO: 2265784 - RNA, 19 nt, Artificial Sequence
  Description of Artificial Sequence: Synthetic oligonucleotide
  Sense strand starting at position 1939 of SEQ ID NO: 1884439
uugggacugucccugaaca

SEQ ID NO: 2265785 - RNA, 19 nt, Artificial Sequence
  Description of Artificial Sequence: Synthetic oligonucleotide
  Antisense strand to SEQ ID NO: 2265784
uguucagggacagucccaa

SEQ ID NO: 2265786 - RNA, 19 nt, Artificial Sequence
  Description of Artificial Sequence: Synthetic oligonucleotide
  Sense strand starting at position 1960 of SEQ ID NO: 1884439
cugacacuguaauuaaagu

SEQ ID NO: 2265787 - RNA, 19 nt, Artificial Sequence
  Description of Artificial Sequence: Synthetic oligonucleotide
  Antisense strand to SEQ ID NO: 2265786
acuuuaauuacagugucag

SEQ ID NO: 2265788 - RNA, 19 nt, Artificial Sequence
  Description of Artificial Sequence: Synthetic oligonucleotide
  Sense strand starting at position 2031 of SEQ ID NO: 1884439
cuugaaagcucuucuaaga

SEQ ID NO: 2265789 - RNA, 19 nt, Artificial Sequence
  Description of Artificial Sequence: Synthetic oligonucleotide
  Antisense strand to SEQ ID NO: 2265788
ucuuagaagagcuuucaag

SEQ ID NO: 2265790 - RNA, 19 nt, Artificial Sequence
  Description of Artificial Sequence: Synthetic oligonucleotide
  Sense strand starting at position 2268 of SEQ ID NO: 1884439
agagacagguuuccuuauu

SEQ ID NO: 2265791 - RNA, 19 nt, Artificial Sequence
  Description of Artificial Sequence: Synthetic oligonucleotide
  Antisense strand to SEQ ID NO: 2265790
aauaaggaaaccugucucu

SEQ ID NO: 2265792 - RNA, 19 nt, Artificial Sequence
  Description of Artificial Sequence: Synthetic oligonucleotide
  Sense strand starting at position 2269 of SEQ ID NO: 1884439
gagacagguuuccuuauuc

SEQ ID NO: 2265793 - RNA, 19 nt, Artificial Sequence
  Description of Artificial Sequence: Synthetic oligonucleotide
  Antisense strand to SEQ ID NO: 2265792
gaauaaggaaaccugucuc

SEQ ID NO: 2265794 - RNA, 19 nt, Artificial Sequence
  Description of Artificial Sequence: Synthetic oligonucleotide
  Sense strand starting at position 2283 of SEQ ID NO: 1884439
uauucucagguagaaguuu

SEQ ID NO: 2265795 - RNA, 19 nt, Artificial Sequence
  Description of Artificial Sequence: Synthetic oligonucleotide
  Antisense strand to SEQ ID NO: 2265794
aaacuucuaccugagaaua

SEQ ID NO: 2265796 - RNA, 19 nt, Artificial Sequence
  Description of Artificial Sequence: Synthetic oligonucleotide
  Sense strand starting at position 2938 of SEQ ID NO: 1884439
uuaagauagugaguuccua

SEQ ID NO: 2265797 - RNA, 19 nt, Artificial Sequence
  Description of Artificial Sequence: Synthetic oligonucleotide
  Antisense strand to SEQ ID NO: 2265796
uaggaacucacuaucuuaa

SEQ ID NO: 2265798 - RNA, 19 nt, Artificial Sequence
  Description of Artificial Sequence: Synthetic oligonucleotide
  Sense strand starting at position 3031 of SEQ ID NO: 1884439
cgggaagaauuaucuucuu

SEQ ID NO: 2265799 - RNA, 19 nt, Artificial Sequence
  Description of Artificial Sequence: Synthetic oligonucleotide
  Antisense strand to SEQ ID NO: 2265798
aagaagauaauucuucccg

SEQ ID NO: 2265800 - RNA, 19 nt, Artificial Sequence
  Description of Artificial Sequence: Synthetic oligonucleotide
  Sense strand starting at position 3268 of SEQ ID NO: 1884439
aaaucaaaggucugugacu

SEQ ID NO: 2265801 - RNA, 19 nt, Artificial Sequence
  Description of Artificial Sequence: Synthetic oligonucleotide
  Antisense strand to SEQ ID NO: 2265800
agucacagaccuuugauuu

SEQ ID NO: 2265802 - RNA, 19 nt, Artificial Sequence
  Description of Artificial Sequence: Synthetic oligonucleotide
  Sense strand starting at position 3269 of SEQ ID NO: 1884439
aaucaaaggucugugacuu

SEQ ID NO: 2265803 - RNA, 19 nt, Artificial Sequence
  Description of Artificial Sequence: Synthetic oligonucleotide
  Antisense strand to SEQ ID NO: 2265802
aagucacagaccuuugauu

SEQ ID NO: 2265804 - RNA, 19 nt, Artificial Sequence
  Description of Artificial Sequence: Synthetic oligonucleotide
  Sense strand starting at position 3279 of SEQ ID NO: 1884439
cugugacuucgaggaagau

SEQ ID NO: 2265805 - RNA, 19 nt, Artificial Sequence
  Description of Artificial Sequence: Synthetic oligonucleotide
  Antisense strand to SEQ ID NO: 2265804
aucuuccucgaagucacag

SEQ ID NO: 2265806 - RNA, 19 nt, Artificial Sequence
  Description of Artificial Sequence: Synthetic oligonucleotide
  Sense strand starting at position 3371 of SEQ ID NO: 1884439
uggcaaaugugaguauaaa

SEQ ID NO: 2265807 - RNA, 19 nt, Artificial Sequence
  Description of Artificial Sequence: Synthetic oligonucleotide
  Antisense strand to SEQ ID NO: 2265806
uuuauacucacauuugcca

SEQ ID NO: 2265808 - RNA, 19 nt, Artificial Sequence
  Description of Artificial Sequence: Synthetic oligonucleotide
  Sense strand starting at position 3372 of SEQ ID NO: 1884439
ggcaaaugugaguauaaac

SEQ ID NO: 2265809 - RNA, 19 nt, Artificial Sequence
  Description of Artificial Sequence: Synthetic oligonucleotide
  Antisense strand to SEQ ID NO: 2265808
guuuauacucacauuugcc

SEQ ID NO: 2265810 - RNA, 19 nt, Artificial Sequence
  Description of Artificial Sequence: Synthetic oligonucleotide
  Sense strand starting at position 3406 of SEQ ID NO: 1884439
gcacaaugagcuuaaguac

SEQ ID NO: 2265811 - RNA, 19 nt, Artificial Sequence
  Description of Artificial Sequence: Synthetic oligonucleotide
  Antisense strand to SEQ ID NO: 2265810
guacuuaagcucauugugc

SEQ ID NO: 2265812 - RNA, 19 nt, Artificial Sequence
  Description of Artificial Sequence: Synthetic oligonucleotide
  Sense strand starting at position 3539 of SEQ ID NO: 1884439
caaggucaaggugaguauu

SEQ ID NO: 2265813 - RNA, 19 nt, Artificial Sequence
  Description of Artificial Sequence: Synthetic oligonucleotide
  Antisense strand to SEQ ID NO: 2265812
aauacucaccuugaccuug

SEQ ID NO: 2265814 - RNA, 19 nt, Artificial Sequence
  Description of Artificial Sequence: Synthetic oligonucleotide
  Sense strand starting at position 3595 of SEQ ID NO: 1884439
aagauucuuugguuauuag

SEQ ID NO: 2265815 - RNA, 19 nt, Artificial Sequence
  Description of Artificial Sequence: Synthetic oligonucleotide
  Antisense strand to SEQ ID NO: 2265814
cuaauaaccaaagaaucuu

SEQ ID NO: 2265816 - RNA, 19 nt, Artificial Sequence
  Description of Artificial Sequence: Synthetic oligonucleotide
  Sense strand starting at position 11 of SEQ ID NO: 1884440
guugaugguacugguauaa

SEQ ID NO: 2265817 - RNA, 19 nt, Artificial Sequence
  Description of Artificial Sequence: Synthetic oligonucleotide
  Antisense strand to SEQ ID NO: 2265816
uuauaccaguaccaucaac

SEQ ID NO: 2265818 - RNA, 19 nt, Artificial Sequence
  Description of Artificial Sequence: Synthetic oligonucleotide
  Sense strand starting at position 65 of SEQ ID NO: 1884440
ugugaaaccuugucuugau

SEQ ID NO: 2265819 - RNA, 19 nt, Artificial Sequence
  Description of Artificial Sequence: Synthetic oligonucleotide
  Antisense strand to SEQ ID NO: 2265818
aucaagacaagguuucaca

SEQ ID NO: 2265820 - RNA, 19 nt, Artificial Sequence
  Description of Artificial Sequence: Synthetic oligonucleotide
  Sense strand starting at position 66 of SEQ ID NO: 1884440
gugaaaccuugucuugaua

SEQ ID NO: 2265821 - RNA, 19 nt, Artificial Sequence
  Description of Artificial Sequence: Synthetic oligonucleotide
  Antisense strand to SEQ ID NO: 2265820
uaucaagacaagguuucac

SEQ ID NO: 2265822 - RNA, 19 nt, Artificial Sequence
  Description of Artificial Sequence: Synthetic oligonucleotide
  Sense strand starting at position 124 of SEQ ID NO: 1884440
ucucacagucuuggaagaa

SEQ ID NO: 2265823 - RNA, 19 nt, Artificial Sequence
  Description of Artificial Sequence: Synthetic oligonucleotide
  Antisense strand to SEQ ID NO: 2265822
uucuuccaagacugugaga

SEQ ID NO: 2265824 - RNA, 19 nt, Artificial Sequence
  Description of Artificial Sequence: Synthetic oligonucleotide
  Sense strand starting at position 188 of SEQ ID NO: 1884440
gaaagaguuaggugguuug

SEQ ID NO: 2265825 - RNA, 19 nt, Artificial Sequence
  Description of Artificial Sequence: Synthetic oligonucleotide
  Antisense strand to SEQ ID NO: 2265824
caaaccaccuaacucuuuc

SEQ ID NO: 2265826 - RNA, 19 nt, Artificial Sequence
  Description of Artificial Sequence: Synthetic oligonucleotide
  Sense strand starting at position 261 of SEQ ID NO: 1884440
uuaagaagugcuugauaga

SEQ ID NO: 2265827 - RNA, 19 nt, Artificial Sequence
  Description of Artificial Sequence: Synthetic oligonucleotide
  Antisense strand to SEQ ID NO: 2265826
ucuaucaagcacuucuuaa

SEQ ID NO: 2265828 - RNA, 19 nt, Artificial Sequence
  Description of Artificial Sequence: Synthetic oligonucleotide
  Sense strand starting at position 268 of SEQ ID NO: 1884440
gugcuugauagagaaacga

SEQ ID NO: 2265829 - RNA, 19 nt, Artificial Sequence
  Description of Artificial Sequence: Synthetic oligonucleotide
  Antisense strand to SEQ ID NO: 2265828
ucguuucucuaucaagcac

SEQ ID NO: 2265830 - RNA, 19 nt, Artificial Sequence
  Description of Artificial Sequence: Synthetic oligonucleotide
  Sense strand starting at position 272 of SEQ ID NO: 1884440
uugauagagaaacgaguau

SEQ ID NO: 2265831 - RNA, 19 nt, Artificial Sequence
  Description of Artificial Sequence: Synthetic oligonucleotide
  Antisense strand to SEQ ID NO: 2265830
auacucguuucucuaucaa

SEQ ID NO: 2265832 - RNA, 19 nt, Artificial Sequence
  Description of Artificial Sequence: Synthetic oligonucleotide
  Sense strand starting at position 418 of SEQ ID NO: 1884440
gccuaccucccagaaguaa

SEQ ID NO: 2265833 - RNA, 19 nt, Artificial Sequence
  Description of Artificial Sequence: Synthetic oligonucleotide
  Antisense strand to SEQ ID NO: 2265832
uuacuucugggagguaggc

SEQ ID NO: 2265834 - RNA, 19 nt, Artificial Sequence
  Description of Artificial Sequence: Synthetic oligonucleotide
  Sense strand starting at position 621 of SEQ ID NO: 1884440
uuccaaauugccgagugua

SEQ ID NO: 2265835 - RNA, 19 nt, Artificial Sequence
  Description of Artificial Sequence: Synthetic oligonucleotide
  Antisense strand to SEQ ID NO: 2265834
uacacucggcaauuuggaa

SEQ ID NO: 2265836 - RNA, 19 nt, Artificial Sequence
  Description of Artificial Sequence: Synthetic oligonucleotide
  Sense strand starting at position 742 of SEQ ID NO: 1884440
gucuccuaucaaugaaugu

SEQ ID NO: 2265837 - RNA, 19 nt, Artificial Sequence
  Description of Artificial Sequence: Synthetic oligonucleotide
  Antisense strand to SEQ ID NO: 2265836
acauucauugauaggagac

SEQ ID NO: 2265838 - RNA, 19 nt, Artificial Sequence
  Description of Artificial Sequence: Synthetic oligonucleotide
  Sense strand starting at position 806 of SEQ ID NO: 1884440
guguguuugccuuugucag

SEQ ID NO: 2265839 - RNA, 19 nt, Artificial Sequence
  Description of Artificial Sequence: Synthetic oligonucleotide
  Antisense strand to SEQ ID NO: 2265838
cugacaaaggcaaacacac

SEQ ID NO: 2265840 - RNA, 19 nt, Artificial Sequence
  Description of Artificial Sequence: Synthetic oligonucleotide
  Sense strand starting at position 823 of SEQ ID NO: 1884440
aguaaugcuacugggaaca

SEQ ID NO: 2265841 - RNA, 19 nt, Artificial Sequence
  Description of Artificial Sequence: Synthetic oligonucleotide
  Antisense strand to SEQ ID NO: 2265840
uguucccaguagcauuacu

SEQ ID NO: 2265842 - RNA, 19 nt, Artificial Sequence
  Description of Artificial Sequence: Synthetic oligonucleotide
  Sense strand starting at position 833 of SEQ ID NO: 1884440
cugggaacauccuuguaca

SEQ ID NO: 2265843 - RNA, 19 nt, Artificial Sequence
  Description of Artificial Sequence: Synthetic oligonucleotide
  Antisense strand to SEQ ID NO: 2265842
uguacaaggauguucccag

SEQ ID NO: 2265844 - RNA, 19 nt, Artificial Sequence
  Description of Artificial Sequence: Synthetic oligonucleotide
  Sense strand starting at position 834 of SEQ ID NO: 1884440
ugggaacauccuuguacau

SEQ ID NO: 2265845 - RNA, 19 nt, Artificial Sequence
  Description of Artificial Sequence: Synthetic oligonucleotide
  Antisense strand to SEQ ID NO: 2265844
auguacaaggauguuccca

SEQ ID NO: 2265846 - RNA, 19 nt, Artificial Sequence
  Description of Artificial Sequence: Synthetic oligonucleotide
  Sense strand starting at position 859 of SEQ ID NO: 1884440
ugaaacauauguguaagau

SEQ ID NO: 2265847 - RNA, 19 nt, Artificial Sequence
  Description of Artificial Sequence: Synthetic oligonucleotide
  Antisense strand to SEQ ID NO: 2265846
aucuuacacauauguuuca

SEQ ID NO: 2265848 - RNA, 19 nt, Artificial Sequence
  Description of Artificial Sequence: Synthetic oligonucleotide
  Sense strand starting at position 915 of SEQ ID NO: 1884440
ggccuuuagugggucauaa

SEQ ID NO: 2265849 - RNA, 19 nt, Artificial Sequence
  Description of Artificial Sequence: Synthetic oligonucleotide
  Antisense strand to SEQ ID NO: 2265848
uuaugacccacuaaaggcc

SEQ ID NO: 2265850 - RNA, 19 nt, Artificial Sequence
  Description of Artificial Sequence: Synthetic oligonucleotide
  Sense strand starting at position 1065 of SEQ ID NO: 1884440
uguguauccuggguuauga

SEQ ID NO: 2265851 - RNA, 19 nt, Artificial Sequence
  Description of Artificial Sequence: Synthetic oligonucleotide
  Antisense strand to SEQ ID NO: 2265850
ucauaacccaggauacaca

SEQ ID NO: 2265852 - RNA, 19 nt, Artificial Sequence
  Description of Artificial Sequence: Synthetic oligonucleotide
  Sense strand starting at position 1356 of SEQ ID NO: 1884440
uuaaacuaucuaugugagu

SEQ ID NO: 2265853 - RNA, 19 nt, Artificial Sequence
  Description of Artificial Sequence: Synthetic oligonucleotide
  Antisense strand to SEQ ID NO: 2265852
acucacauagauaguuuaa

SEQ ID NO: 2265854 - RNA, 19 nt, Artificial Sequence
  Description of Artificial Sequence: Synthetic oligonucleotide
  Sense strand starting at position 1764 of SEQ ID NO: 1884440
gagcacuuagaguagucaa

SEQ ID NO: 2265855 - RNA, 19 nt, Artificial Sequence
  Description of Artificial Sequence: Synthetic oligonucleotide
  Antisense strand to SEQ ID NO: 2265854
uugacuacucuaagugcuc

SEQ ID NO: 2265856 - RNA, 19 nt, Artificial Sequence
  Description of Artificial Sequence: Synthetic oligonucleotide
  Sense strand starting at position 1767 of SEQ ID NO: 1884440
cacuuagaguagucaagau

SEQ ID NO: 2265857 - RNA, 19 nt, Artificial Sequence
  Description of Artificial Sequence: Synthetic oligonucleotide
  Antisense strand to SEQ ID NO: 2265856
aucuugacuacucuaagug

SEQ ID NO: 2265858 - RNA, 19 nt, Artificial Sequence
  Description of Artificial Sequence: Synthetic oligonucleotide
  Sense strand starting at position 1800 of SEQ ID NO: 1884440
guagaaugguggcugauag

SEQ ID NO: 2265859 - RNA, 19 nt, Artificial Sequence
  Description of Artificial Sequence: Synthetic oligonucleotide
  Antisense strand to SEQ ID NO: 2265858
cuaucagccaccauucuac

SEQ ID NO: 2265860 - RNA, 19 nt, Artificial Sequence
  Description of Artificial Sequence: Synthetic oligonucleotide
  Sense strand starting at position 2401 of SEQ ID NO: 1884440
auaaauauagugugucagu

SEQ ID NO: 2265861 - RNA, 19 nt, Artificial Sequence
  Description of Artificial Sequence: Synthetic oligonucleotide
  Antisense strand to SEQ ID NO: 2265860
acugacacacuauauuuau

SEQ ID NO: 2265862 - RNA, 19 nt, Artificial Sequence
  Description of Artificial Sequence: Synthetic oligonucleotide
  Sense strand starting at position 2402 of SEQ ID NO: 1884440
uaaauauagugugucagua

SEQ ID NO: 2265863 - RNA, 19 nt, Artificial Sequence
  Description of Artificial Sequence: Synthetic oligonucleotide
  Antisense strand to SEQ ID NO: 2265862
uacugacacacuauauuua

SEQ ID NO: 2265864 - RNA, 19 nt, Artificial Sequence
  Description of Artificial Sequence: Synthetic oligonucleotide
  Sense strand starting at position 2417 of SEQ ID NO: 1884440
aguaucaaguugcuaugaa

SEQ ID NO: 2265865 - RNA, 19 nt, Artificial Sequence
  Description of Artificial Sequence: Synthetic oligonucleotide
  Antisense strand to SEQ ID NO: 2265864
uucauagcaacuugauacu

SEQ ID NO: 2265866 - RNA, 19 nt, Artificial Sequence
  Description of Artificial Sequence: Synthetic oligonucleotide
  Sense strand starting at position 2563 of SEQ ID NO: 1884440
gcacauguuuaccuuuaca

SEQ ID NO: 2265867 - RNA, 19 nt, Artificial Sequence
  Description of Artificial Sequence: Synthetic oligonucleotide
  Antisense strand to SEQ ID NO: 2265866
uguaaagguaaacaugugc

SEQ ID NO: 2265868 - RNA, 19 nt, Artificial Sequence
  Description of Artificial Sequence: Synthetic oligonucleotide
  Sense strand starting at position 2686 of SEQ ID NO: 1884440
cugucagaauucuuaaugu

SEQ ID NO: 2265869 - RNA, 19 nt, Artificial Sequence
  Description of Artificial Sequence: Synthetic oligonucleotide
  Antisense strand to SEQ ID NO: 2265868
acauuaagaauucugacag

SEQ ID NO: 2265870 - RNA, 19 nt, Artificial Sequence
  Description of Artificial Sequence: Synthetic oligonucleotide
  Sense strand starting at position 2708 of SEQ ID NO: 1884440
ccaaucugguggguguaaa

SEQ ID NO: 2265871 - RNA, 19 nt, Artificial Sequence
  Description of Artificial Sequence: Synthetic oligonucleotide
  Antisense strand to SEQ ID NO: 2265870
uuuacacccaccagauugg

SEQ ID NO: 2265872 - RNA, 19 nt, Artificial Sequence
  Description of Artificial Sequence: Synthetic oligonucleotide
  Sense strand starting at position 2824 of SEQ ID NO: 1884440
ugaaaugccuguuuaaauc

SEQ ID NO: 2265873 - RNA, 19 nt, Artificial Sequence
  Description of Artificial Sequence: Synthetic oligonucleotide
  Antisense strand to SEQ ID NO: 2265872
gauuuaaacaggcauuuca

SEQ ID NO: 2265874 - RNA, 19 nt, Artificial Sequence
  Description of Artificial Sequence: Synthetic oligonucleotide
  Sense strand starting at position 2889 of SEQ ID NO: 1884440
guaagaguuuguuuaauca

SEQ ID NO: 2265875 - RNA, 19 nt, Artificial Sequence
  Description of Artificial Sequence: Synthetic oligonucleotide
  Antisense strand to SEQ ID NO: 2265874
ugauuaaacaaacucuuac

SEQ ID NO: 2265876 - RNA, 19 nt, Artificial Sequence
  Description of Artificial Sequence: Synthetic oligonucleotide
  Sense strand starting at position 2951 of SEQ ID NO: 1884440
guauuauguaugcagugag

SEQ ID NO: 2265877 - RNA, 19 nt, Artificial Sequence
  Description of Artificial Sequence: Synthetic oligonucleotide
  Antisense strand to SEQ ID NO: 2265876
cucacugcauacauaauac

SEQ ID NO: 2265878 - RNA, 19 nt, Artificial Sequence
  Description of Artificial Sequence: Synthetic oligonucleotide
  Sense strand starting at position 3065 of SEQ ID NO: 1884440
uauguauggcaaugauaaa

SEQ ID NO: 2265879 - RNA, 19 nt, Artificial Sequence
  Description of Artificial Sequence: Synthetic oligonucleotide
  Antisense strand to SEQ ID NO: 2265878
uuuaucauugccauacaua

SEQ ID NO: 2265880 - RNA, 19 nt, Artificial Sequence
  Description of Artificial Sequence: Synthetic oligonucleotide
  Sense strand starting at position 3236 of SEQ ID NO: 1884440
aagaguuagccaggcauag

SEQ ID NO: 2265881 - RNA, 19 nt, Artificial Sequence
  Description of Artificial Sequence: Synthetic oligonucleotide
  Antisense strand to SEQ ID NO: 2265880
cuaugccuggcuaacucuu

SEQ ID NO: 2265882 - RNA, 19 nt, Artificial Sequence
  Description of Artificial Sequence: Synthetic oligonucleotide
  Sense strand starting at position 3238 of SEQ ID NO: 1884440
gaguuagccaggcauagug

SEQ ID NO: 2265883 - RNA, 19 nt, Artificial Sequence
  Description of Artificial Sequence: Synthetic oligonucleotide
  Antisense strand to SEQ ID NO: 2265882
cacuaugccuggcuaacuc

SEQ ID NO: 2265884 - RNA, 19 nt, Artificial Sequence
  Description of Artificial Sequence: Synthetic oligonucleotide
  Sense strand starting at position 3463 of SEQ ID NO: 1884440
uuugaacaguggucaggaa

SEQ ID NO: 2265885 - RNA, 19 nt, Artificial Sequence
  Description of Artificial Sequence: Synthetic oligonucleotide
  Antisense strand to SEQ ID NO: 2265884
uuccugaccacuguucaaa

SEQ ID NO: 2265886 - RNA, 19 nt, Artificial Sequence
  Description of Artificial Sequence: Synthetic oligonucleotide
  Sense strand starting at position 3549 of SEQ ID NO: 1884440
ggcuauaggaaggguugau

SEQ ID NO: 2265887 - RNA, 19 nt, Artificial Sequence
  Description of Artificial Sequence: Synthetic oligonucleotide
  Antisense strand to SEQ ID NO: 2265886
aucaacccuuccuauagcc

SEQ ID NO: 2265888 - RNA, 19 nt, Artificial Sequence
  Description of Artificial Sequence: Synthetic oligonucleotide
  Sense strand starting at position 3584 of SEQ ID NO: 1884440
aguuacaugcauuacagau

SEQ ID NO: 2265889 - RNA, 19 nt, Artificial Sequence
  Description of Artificial Sequence: Synthetic oligonucleotide
  Antisense strand to SEQ ID NO: 2265888
aucuguaaugcauguaacu

SEQ ID NO: 2265890 - RNA, 19 nt, Artificial Sequence
  Description of Artificial Sequence: Synthetic oligonucleotide
  Sense strand starting at position 3886 of SEQ ID NO: 1884440
guggguaccacuuacuaga

SEQ ID NO: 2265891 - RNA, 19 nt, Artificial Sequence
  Description of Artificial Sequence: Synthetic oligonucleotide
  Antisense strand to SEQ ID NO: 2265890
ucuaguaagugguacccac

SEQ ID NO: 2265892 - RNA, 19 nt, Artificial Sequence
  Description of Artificial Sequence: Synthetic oligonucleotide
  Sense strand starting at position 3888 of SEQ ID NO: 1884440
ggguaccacuuacuagaua

SEQ ID NO: 2265893 - RNA, 19 nt, Artificial Sequence
  Description of Artificial Sequence: Synthetic oligonucleotide
  Antisense strand to SEQ ID NO: 2265892
uaucuaguaagugguaccc

SEQ ID NO: 2265894 - RNA, 19 nt, Artificial Sequence
  Description of Artificial Sequence: Synthetic oligonucleotide
  Sense strand starting at position 3958 of SEQ ID NO: 1884440
uuuauauaugugcagaucu

SEQ ID NO: 2265895 - RNA, 19 nt, Artificial Sequence
  Description of Artificial Sequence: Synthetic oligonucleotide
  Antisense strand to SEQ ID NO: 2265894
agaucugcacauauauaaa

SEQ ID NO: 2265896 - RNA, 19 nt, Artificial Sequence
  Description of Artificial Sequence: Synthetic oligonucleotide
  Sense strand starting at position 37 of SEQ ID NO: 1884441
gguugauacaguuauaugg

SEQ ID NO: 2265897 - RNA, 19 nt, Artificial Sequence
  Description of Artificial Sequence: Synthetic oligonucleotide
  Antisense strand to SEQ ID NO: 2265896
ccauauaacuguaucaacc

SEQ ID NO: 2265898 - RNA, 19 nt, Artificial Sequence
  Description of Artificial Sequence: Synthetic oligonucleotide
  Sense strand starting at position 92 of SEQ ID NO: 1884441
agcuuugccucacugauuu

SEQ ID NO: 2265899 - RNA, 19 nt, Artificial Sequence
  Description of Artificial Sequence: Synthetic oligonucleotide
  Antisense strand to SEQ ID NO: 2265898
aaaucagugaggcaaagcu

SEQ ID NO: 2265900 - RNA, 19 nt, Artificial Sequence
  Description of Artificial Sequence: Synthetic oligonucleotide
  Sense strand starting at position 153 of SEQ ID NO: 1884441
aguuauaucccacagguuu

SEQ ID NO: 2265901 - RNA, 19 nt, Artificial Sequence
  Description of Artificial Sequence: Synthetic oligonucleotide
  Antisense strand to SEQ ID NO: 2265900
aaaccugugggauauaacu

SEQ ID NO: 2265902 - RNA, 19 nt, Artificial Sequence
  Description of Artificial Sequence: Synthetic oligonucleotide
  Sense strand starting at position 323 of SEQ ID NO: 1884441
ugcucuuuccauugagaaa

SEQ ID NO: 2265903 - RNA, 19 nt, Artificial Sequence
  Description of Artificial Sequence: Synthetic oligonucleotide
  Antisense strand to SEQ ID NO: 2265902
uuucucaauggaaagagca

SEQ ID NO: 2265904 - RNA, 19 nt, Artificial Sequence
  Description of Artificial Sequence: Synthetic oligonucleotide
  Sense strand starting at position 337 of SEQ ID NO: 1884441
agaaauuuguguccucgcu

SEQ ID NO: 2265905 - RNA, 19 nt, Artificial Sequence
  Description of Artificial Sequence: Synthetic oligonucleotide
  Antisense strand to SEQ ID NO: 2265904
agcgaggacacaaauuucu

SEQ ID NO: 2265906 - RNA, 19 nt, Artificial Sequence
  Description of Artificial Sequence: Synthetic oligonucleotide
  Sense strand starting at position 343 of SEQ ID NO: 1884441
uuguguccucgcucagauu

SEQ ID NO: 2265907 - RNA, 19 nt, Artificial Sequence
  Description of Artificial Sequence: Synthetic oligonucleotide
  Antisense strand to SEQ ID NO: 2265906
aaucugagcgaggacacaa

SEQ ID NO: 2265908 - RNA, 19 nt, Artificial Sequence
  Description of Artificial Sequence: Synthetic oligonucleotide
  Sense strand starting at position 344 of SEQ ID NO: 1884441
uguguccucgcucagauuu

SEQ ID NO: 2265909 - RNA, 19 nt, Artificial Sequence
  Description of Artificial Sequence: Synthetic oligonucleotide
  Antisense strand to SEQ ID NO: 2265908
aaaucugagcgaggacaca

SEQ ID NO: 2265910 - RNA, 19 nt, Artificial Sequence
  Description of Artificial Sequence: Synthetic oligonucleotide
  Sense strand starting at position 559 of SEQ ID NO: 1884441
uugaucuuaagagguuuga

SEQ ID NO: 2265911 - RNA, 19 nt, Artificial Sequence
  Description of Artificial Sequence: Synthetic oligonucleotide
  Antisense strand to SEQ ID NO: 2265910
ucaaaccucuuaagaucaa

SEQ ID NO: 2265912 - RNA, 19 nt, Artificial Sequence
  Description of Artificial Sequence: Synthetic oligonucleotide
  Sense strand starting at position 563 of SEQ ID NO: 1884441
ucuuaagagguuugagaau

SEQ ID NO: 2265913 - RNA, 19 nt, Artificial Sequence
  Description of Artificial Sequence: Synthetic oligonucleotide
  Antisense strand to SEQ ID NO: 2265912
auucucaaaccucuuaaga

SEQ ID NO: 2265914 - RNA, 19 nt, Artificial Sequence
  Description of Artificial Sequence: Synthetic oligonucleotide
  Sense strand starting at position 583 of SEQ ID NO: 1884441
ugugaauguaucuggagga

SEQ ID NO: 2265915 - RNA, 19 nt, Artificial Sequence
  Description of Artificial Sequence: Synthetic oligonucleotide
  Antisense strand to SEQ ID NO: 2265914
uccuccagauacauucaca

SEQ ID NO: 2265916 - RNA, 19 nt, Artificial Sequence
  Description of Artificial Sequence: Synthetic oligonucleotide
  Sense strand starting at position 587 of SEQ ID NO: 1884441
aauguaucuggaggagguu

SEQ ID NO: 2265917 - RNA, 19 nt, Artificial Sequence
  Description of Artificial Sequence: Synthetic oligonucleotide
  Antisense strand to SEQ ID NO: 2265916
aaccuccuccagauacauu

SEQ ID NO: 2265918 - RNA, 19 nt, Artificial Sequence
  Description of Artificial Sequence: Synthetic oligonucleotide
  Sense strand starting at position 759 of SEQ ID NO: 1884441
aguguaauggcugaaggua

SEQ ID NO: 2265919 - RNA, 19 nt, Artificial Sequence
  Description of Artificial Sequence: Synthetic oligonucleotide
  Antisense strand to SEQ ID NO: 2265918
uaccuucagccauuacacu

SEQ ID NO: 2265920 - RNA, 19 nt, Artificial Sequence
  Description of Artificial Sequence: Synthetic oligonucleotide
  Sense strand starting at position 772 of SEQ ID NO: 1884441
aagguaguaguguaugaac

SEQ ID NO: 2265921 - RNA, 19 nt, Artificial Sequence
  Description of Artificial Sequence: Synthetic oligonucleotide
  Antisense strand to SEQ ID NO: 2265920
guucauacacuacuaccuu

SEQ ID NO: 2265922 - RNA, 19 nt, Artificial Sequence
  Description of Artificial Sequence: Synthetic oligonucleotide
  Sense strand starting at position 1052 of SEQ ID NO: 1884441
gcacauggauguuuacaaa

SEQ ID NO: 2265923 - RNA, 19 nt, Artificial Sequence
  Description of Artificial Sequence: Synthetic oligonucleotide
  Antisense strand to SEQ ID NO: 2265922
uuuguaaacauccaugugc

SEQ ID NO: 2265924 - RNA, 19 nt, Artificial Sequence
  Description of Artificial Sequence: Synthetic oligonucleotide
  Sense strand starting at position 1149 of SEQ ID NO: 1884441
cuguuacauccagacagua

SEQ ID NO: 2265925 - RNA, 19 nt, Artificial Sequence
  Description of Artificial Sequence: Synthetic oligonucleotide
  Antisense strand to SEQ ID NO: 2265924
uacugucuggauguaacag

SEQ ID NO: 2265926 - RNA, 19 nt, Artificial Sequence
  Description of Artificial Sequence: Synthetic oligonucleotide
  Sense strand starting at position 1235 of SEQ ID NO: 1884441
gcaaauuacuaagucaaag

SEQ ID NO: 2265927 - RNA, 19 nt, Artificial Sequence
  Description of Artificial Sequence: Synthetic oligonucleotide
  Antisense strand to SEQ ID NO: 2265926
cuuugacuuaguaauuugc

SEQ ID NO: 2265928 - RNA, 19 nt, Artificial Sequence
  Description of Artificial Sequence: Synthetic oligonucleotide
  Sense strand starting at position 1435 of SEQ ID NO: 1884441
gauacaugucaguauguau

SEQ ID NO: 2265929 - RNA, 19 nt, Artificial Sequence
  Description of Artificial Sequence: Synthetic oligonucleotide
  Antisense strand to SEQ ID NO: 2265928
auacauacugacauguauc

SEQ ID NO: 2265930 - RNA, 19 nt, Artificial Sequence
  Description of Artificial Sequence: Synthetic oligonucleotide
  Sense strand starting at position 1442 of SEQ ID NO: 1884441
gucaguauguauuugucca

SEQ ID NO: 2265931 - RNA, 19 nt, Artificial Sequence
  Description of Artificial Sequence: Synthetic oligonucleotide
  Antisense strand to SEQ ID NO: 2265930
uggacaaauacauacugac

SEQ ID NO: 2265932 - RNA, 19 nt, Artificial Sequence
  Description of Artificial Sequence: Synthetic oligonucleotide
  Sense strand starting at position 1446 of SEQ ID NO: 1884441
guauguauuuguccaaauc

SEQ ID NO: 2265933 - RNA, 19 nt, Artificial Sequence
  Description of Artificial Sequence: Synthetic oligonucleotide
  Antisense strand to SEQ ID NO: 2265932
gauuuggacaaauacauac

SEQ ID NO: 2265934 - RNA, 19 nt, Artificial Sequence
  Description of Artificial Sequence: Synthetic oligonucleotide
  Sense strand starting at position 1478 of SEQ ID NO: 1884441
acauguuaugagugauaug

SEQ ID NO: 2265935 - RNA, 19 nt, Artificial Sequence
  Description of Artificial Sequence: Synthetic oligonucleotide
  Antisense strand to SEQ ID NO: 2265934
cauaucacucauaacaugu

SEQ ID NO: 2265936 - RNA, 19 nt, Artificial Sequence
  Description of Artificial Sequence: Synthetic oligonucleotide
  Sense strand starting at position 1654 of SEQ ID NO: 1884441
uuuagaucuggccaguuua

SEQ ID NO: 2265937 - RNA, 19 nt, Artificial Sequence
  Description of Artificial Sequence: Synthetic oligonucleotide
  Antisense strand to SEQ ID NO: 2265936
uaaacuggccagaucuaaa

SEQ ID NO: 2265938 - RNA, 19 nt, Artificial Sequence
  Description of Artificial Sequence: Synthetic oligonucleotide
  Sense strand starting at position 1760 of SEQ ID NO: 1884441
gguuacaaacuguagugaa

SEQ ID NO: 2265939 - RNA, 19 nt, Artificial Sequence
  Description of Artificial Sequence: Synthetic oligonucleotide
  Antisense strand to SEQ ID NO: 2265938
uucacuacaguuuguaacc

SEQ ID NO: 2265940 - RNA, 19 nt, Artificial Sequence
  Description of Artificial Sequence: Synthetic oligonucleotide
  Sense strand starting at position 2215 of SEQ ID NO: 1884441
ugggucauugcugagaagu

SEQ ID NO: 2265941 - RNA, 19 nt, Artificial Sequence
  Description of Artificial Sequence: Synthetic oligonucleotide
  Antisense strand to SEQ ID NO: 2265940
acuucucagcaaugaccca

SEQ ID NO: 2265942 - RNA, 19 nt, Artificial Sequence
  Description of Artificial Sequence: Synthetic oligonucleotide
  Sense strand starting at position 2266 of SEQ ID NO: 1884441
agcaaagaaguuuacaagu

SEQ ID NO: 2265943 - RNA, 19 nt, Artificial Sequence
  Description of Artificial Sequence: Synthetic oligonucleotide
  Antisense strand to SEQ ID NO: 2265942
acuuguaaacuucuuugcu

SEQ ID NO: 2265944 - RNA, 19 nt, Artificial Sequence
  Description of Artificial Sequence: Synthetic oligonucleotide
  Sense strand starting at position 2541 of SEQ ID NO: 1884441
gaagguuaaucuguaauag

SEQ ID NO: 2265945 - RNA, 19 nt, Artificial Sequence
  Description of Artificial Sequence: Synthetic oligonucleotide
  Antisense strand to SEQ ID NO: 2265944
cuauuacagauuaaccuuc

SEQ ID NO: 2265946 - RNA, 19 nt, Artificial Sequence
  Description of Artificial Sequence: Synthetic oligonucleotide
  Sense strand starting at position 2830 of SEQ ID NO: 1884441
aucugucauuugucuguua

SEQ ID NO: 2265947 - RNA, 19 nt, Artificial Sequence
  Description of Artificial Sequence: Synthetic oligonucleotide
  Antisense strand to SEQ ID NO: 2265946
uaacagacaaaugacagau

SEQ ID NO: 2265948 - RNA, 19 nt, Artificial Sequence
  Description of Artificial Sequence: Synthetic oligonucleotide
  Sense strand starting at position 2831 of SEQ ID NO: 1884441
ucugucauuugucuguuaa

SEQ ID NO: 2265949 - RNA, 19 nt, Artificial Sequence
  Description of Artificial Sequence: Synthetic oligonucleotide
  Antisense strand to SEQ ID NO: 2265948
uuaacagacaaaugacaga

SEQ ID NO: 2265950 - RNA, 19 nt, Artificial Sequence
  Description of Artificial Sequence: Synthetic oligonucleotide
  Sense strand starting at position 2832 of SEQ ID NO: 1884441
cugucauuugucuguuaac

SEQ ID NO: 2265951 - RNA, 19 nt, Artificial Sequence
  Description of Artificial Sequence: Synthetic oligonucleotide
  Antisense strand to SEQ ID NO: 2265950
guuaacagacaaaugacag

SEQ ID NO: 2265952 - RNA, 19 nt, Artificial Sequence
  Description of Artificial Sequence: Synthetic oligonucleotide
  Sense strand starting at position 3024 of SEQ ID NO: 1884441
uaccauaaguacguaagau

SEQ ID NO: 2265953 - RNA, 19 nt, Artificial Sequence
  Description of Artificial Sequence: Synthetic oligonucleotide
  Antisense strand to SEQ ID NO: 2265952
aucuuacguacuuauggua

SEQ ID NO: 2265954 - RNA, 19 nt, Artificial Sequence
  Description of Artificial Sequence: Synthetic oligonucleotide
  Sense strand starting at position 3326 of SEQ ID NO: 1884441
uccaucugucucuauggau

SEQ ID NO: 2265955 - RNA, 19 nt, Artificial Sequence
  Description of Artificial Sequence: Synthetic oligonucleotide
  Antisense strand to SEQ ID NO: 2265954
auccauagagacagaugga

SEQ ID NO: 2265956 - RNA, 19 nt, Artificial Sequence
  Description of Artificial Sequence: Synthetic oligonucleotide
  Sense strand starting at position 3494 of SEQ ID NO: 1884441
auuccuuauggcugaauga

SEQ ID NO: 2265957 - RNA, 19 nt, Artificial Sequence
  Description of Artificial Sequence: Synthetic oligonucleotide
  Antisense strand to SEQ ID NO: 2265956
ucauucagccauaaggaau

SEQ ID NO: 2265958 - RNA, 19 nt, Artificial Sequence
  Description of Artificial Sequence: Synthetic oligonucleotide
  Sense strand starting at position 3495 of SEQ ID NO: 1884441
uuccuuauggcugaaugau

SEQ ID NO: 2265959 - RNA, 19 nt, Artificial Sequence
  Description of Artificial Sequence: Synthetic oligonucleotide
  Antisense strand to SEQ ID NO: 2265958
aucauucagccauaaggaa

SEQ ID NO: 2265960 - RNA, 19 nt, Artificial Sequence
  Description of Artificial Sequence: Synthetic oligonucleotide
  Sense strand starting at position 3660 of SEQ ID NO: 1884441
uuugguauguaccuaggaa

SEQ ID NO: 2265961 - RNA, 19 nt, Artificial Sequence
  Description of Artificial Sequence: Synthetic oligonucleotide
  Antisense strand to SEQ ID NO: 2265960
uuccuagguacauaccaaa

SEQ ID NO: 2265962 - RNA, 19 nt, Artificial Sequence
  Description of Artificial Sequence: Synthetic oligonucleotide
  Sense strand starting at position 3661 of SEQ ID NO: 1884441
uugguauguaccuaggaau

SEQ ID NO: 2265963 - RNA, 19 nt, Artificial Sequence
  Description of Artificial Sequence: Synthetic oligonucleotide
  Antisense strand to SEQ ID NO: 2265962
auuccuagguacauaccaa

SEQ ID NO: 2265964 - RNA, 19 nt, Artificial Sequence
  Description of Artificial Sequence: Synthetic oligonucleotide
  Sense strand starting at position 3781 of SEQ ID NO: 1884441
guuccauaguuaucaaaga

SEQ ID NO: 2265965 - RNA, 19 nt, Artificial Sequence
  Description of Artificial Sequence: Synthetic oligonucleotide
  Antisense strand to SEQ ID NO: 2265964
ucuuugauaacuauggaac

SEQ ID NO: 2265966 - RNA, 19 nt, Artificial Sequence
  Description of Artificial Sequence: Synthetic oligonucleotide
  Sense strand starting at position 3827 of SEQ ID NO: 1884441
aagauuuauugagacuguu

SEQ ID NO: 2265967 - RNA, 19 nt, Artificial Sequence
  Description of Artificial Sequence: Synthetic oligonucleotide
  Antisense strand to SEQ ID NO: 2265966
aacagucucaauaaaucuu

SEQ ID NO: 2265968 - RNA, 19 nt, Artificial Sequence
  Description of Artificial Sequence: Synthetic oligonucleotide
  Sense strand starting at position 3863 of SEQ ID NO: 1884441
gucuacucuggagaauggu

SEQ ID NO: 2265969 - RNA, 19 nt, Artificial Sequence
  Description of Artificial Sequence: Synthetic oligonucleotide
  Antisense strand to SEQ ID NO: 2265968
accauucuccagaguagac

SEQ ID NO: 2265970 - RNA, 19 nt, Artificial Sequence
  Description of Artificial Sequence: Synthetic oligonucleotide
  Sense strand starting at position 3919 of SEQ ID NO: 1884441
uuggguggagucuaccauu

SEQ ID NO: 2265971 - RNA, 19 nt, Artificial Sequence
  Description of Artificial Sequence: Synthetic oligonucleotide
  Antisense strand to SEQ ID NO: 2265970
aaugguagacuccacccaa

SEQ ID NO: 2265972 - RNA, 19 nt, Artificial Sequence
  Description of Artificial Sequence: Synthetic oligonucleotide
  Sense strand starting at position 3957 of SEQ ID NO: 1884441
ggcucagcauuugcuugau

SEQ ID NO: 2265973 - RNA, 19 nt, Artificial Sequence
  Description of Artificial Sequence: Synthetic oligonucleotide
  Antisense strand to SEQ ID NO: 2265972
aucaagcaaaugcugagcc

SEQ ID NO: 2265974 - RNA, 19 nt, Artificial Sequence
  Description of Artificial Sequence: Synthetic oligonucleotide
  Sense strand starting at position 3969 of SEQ ID NO: 1884441
gcuugauugcuauaaaccu

SEQ ID NO: 2265975 - RNA, 19 nt, Artificial Sequence
  Description of Artificial Sequence: Synthetic oligonucleotide
  Antisense strand to SEQ ID NO: 2265974
agguuuauagcaaucaagc

SEQ ID NO: 2265976 - RNA, 19 nt, Artificial Sequence
  Description of Artificial Sequence: Synthetic oligonucleotide
  Sense strand starting at position 57 of SEQ ID NO: 1884442
cugggauagucauugucau

SEQ ID NO: 2265977 - RNA, 19 nt, Artificial Sequence
  Description of Artificial Sequence: Synthetic oligonucleotide
  Antisense strand to SEQ ID NO: 2265976
augacaaugacuaucccag

SEQ ID NO: 2265978 - RNA, 19 nt, Artificial Sequence
  Description of Artificial Sequence: Synthetic oligonucleotide
  Sense strand starting at position 210 of SEQ ID NO: 1884442
gccggugggaacuggaaua

SEQ ID NO: 2265979 - RNA, 19 nt, Artificial Sequence
  Description of Artificial Sequence: Synthetic oligonucleotide
  Antisense strand to SEQ ID NO: 2265978
uauuccaguucccaccggc

SEQ ID NO: 2265980 - RNA, 19 nt, Artificial Sequence
  Description of Artificial Sequence: Synthetic oligonucleotide
  Sense strand starting at position 389 of SEQ ID NO: 1884442
gagucuuuguccuugggag

SEQ ID NO: 2265981 - RNA, 19 nt, Artificial Sequence
  Description of Artificial Sequence: Synthetic oligonucleotide
  Antisense strand to SEQ ID NO: 2265980
cucccaaggacaaagacuc

SEQ ID NO: 2265982 - RNA, 19 nt, Artificial Sequence
  Description of Artificial Sequence: Synthetic oligonucleotide
  Sense strand starting at position 391 of SEQ ID NO: 1884442
gucuuuguccuugggagga

SEQ ID NO: 2265983 - RNA, 19 nt, Artificial Sequence
  Description of Artificial Sequence: Synthetic oligonucleotide
  Antisense strand to SEQ ID NO: 2265982
uccucccaaggacaaagac

SEQ ID NO: 2265984 - RNA, 19 nt, Artificial Sequence
  Description of Artificial Sequence: Synthetic oligonucleotide
  Sense strand starting at position 532 of SEQ ID NO: 1884442
ucccaacgucuuggaagaa

SEQ ID NO: 2265985 - RNA, 19 nt, Artificial Sequence
  Description of Artificial Sequence: Synthetic oligonucleotide
  Antisense strand to SEQ ID NO: 2265984
uucuuccaagacguuggga

SEQ ID NO: 2265986 - RNA, 19 nt, Artificial Sequence
  Description of Artificial Sequence: Synthetic oligonucleotide
  Sense strand starting at position 545 of SEQ ID NO: 1884442
gaagaaugguagccauaag

SEQ ID NO: 2265987 - RNA, 19 nt, Artificial Sequence
  Description of Artificial Sequence: Synthetic oligonucleotide
  Antisense strand to SEQ ID NO: 2265986
cuuauggcuaccauucuuc

SEQ ID NO: 2265988 - RNA, 19 nt, Artificial Sequence
  Description of Artificial Sequence: Synthetic oligonucleotide
  Sense strand starting at position 596 of SEQ ID NO: 1884442
gcuccagugcugucucuuu

SEQ ID NO: 2265989 - RNA, 19 nt, Artificial Sequence
  Description of Artificial Sequence: Synthetic oligonucleotide
  Antisense strand to SEQ ID NO: 2265988
aaagagacagcacuggagc

SEQ ID NO: 2265990 - RNA, 19 nt, Artificial Sequence
  Description of Artificial Sequence: Synthetic oligonucleotide
  Sense strand starting at position 600 of SEQ ID NO: 1884442
cagugcugucucuuugcua

SEQ ID NO: 2265991 - RNA, 19 nt, Artificial Sequence
  Description of Artificial Sequence: Synthetic oligonucleotide
  Antisense strand to SEQ ID NO: 2265990
uagcaaagagacagcacug

SEQ ID NO: 2265992 - RNA, 19 nt, Artificial Sequence
  Description of Artificial Sequence: Synthetic oligonucleotide
  Sense strand starting at position 666 of SEQ ID NO: 1884442
uuuccuagucuguagaaag

SEQ ID NO: 2265993 - RNA, 19 nt, Artificial Sequence
  Description of Artificial Sequence: Synthetic oligonucleotide
  Antisense strand to SEQ ID NO: 2265992
cuuucuacagacuaggaaa

SEQ ID NO: 2265994 - RNA, 19 nt, Artificial Sequence
  Description of Artificial Sequence: Synthetic oligonucleotide
  Sense strand starting at position 824 of SEQ ID NO: 1884442
agacuaaguucucuccaga

SEQ ID NO: 2265995 - RNA, 19 nt, Artificial Sequence
  Description of Artificial Sequence: Synthetic oligonucleotide
  Antisense strand to SEQ ID NO: 2265994
ucuggagagaacuuagucu

SEQ ID NO: 2265996 - RNA, 19 nt, Artificial Sequence
  Description of Artificial Sequence: Synthetic oligonucleotide
  Sense strand starting at position 983 of SEQ ID NO: 1884442
ugaagacucuguucccuga

SEQ ID NO: 2265997 - RNA, 19 nt, Artificial Sequence
  Description of Artificial Sequence: Synthetic oligonucleotide
  Antisense strand to SEQ ID NO: 2265996
ucagggaacagagucuuca

SEQ ID NO: 2265998 - RNA, 19 nt, Artificial Sequence
  Description of Artificial Sequence: Synthetic oligonucleotide
  Sense strand starting at position 991 of SEQ ID NO: 1884442
cuguucccugaauaauuga

SEQ ID NO: 2265999 - RNA, 19 nt, Artificial Sequence
  Description of Artificial Sequence: Synthetic oligonucleotide
  Antisense strand to SEQ ID NO: 2265998
ucaauuauucagggaacag

SEQ ID NO: 2266000 - RNA, 19 nt, Artificial Sequence
  Description of Artificial Sequence: Synthetic oligonucleotide
  Sense strand starting at position 1094 of SEQ ID NO: 1884442
aucuuauccuaauugggua

SEQ ID NO: 2266001 - RNA, 19 nt, Artificial Sequence
  Description of Artificial Sequence: Synthetic oligonucleotide
  Antisense strand to SEQ ID NO: 2266000
uacccaauuaggauaagau

SEQ ID NO: 2266002 - RNA, 19 nt, Artificial Sequence
  Description of Artificial Sequence: Synthetic oligonucleotide
  Sense strand starting at position 1099 of SEQ ID NO: 1884442
auccuaauuggguauaucu

SEQ ID NO: 2266003 - RNA, 19 nt, Artificial Sequence
  Description of Artificial Sequence: Synthetic oligonucleotide
  Antisense strand to SEQ ID NO: 2266002
agauauacccaauuaggau

SEQ ID NO: 2266004 - RNA, 19 nt, Artificial Sequence
  Description of Artificial Sequence: Synthetic oligonucleotide
  Sense strand starting at position 1101 of SEQ ID NO: 1884442
ccuaauuggguauaucuca

SEQ ID NO: 2266005 - RNA, 19 nt, Artificial Sequence
  Description of Artificial Sequence: Synthetic oligonucleotide
  Antisense strand to SEQ ID NO: 2266004
ugagauauacccaauuagg

SEQ ID NO: 2266006 - RNA, 19 nt, Artificial Sequence
  Description of Artificial Sequence: Synthetic oligonucleotide
  Sense strand starting at position 1332 of SEQ ID NO: 1884442
agacacauuagguguuuga

SEQ ID NO: 2266007 - RNA, 19 nt, Artificial Sequence
  Description of Artificial Sequence: Synthetic oligonucleotide
  Antisense strand to SEQ ID NO: 2266006
ucaaacaccuaaugugucu

SEQ ID NO: 2266008 - RNA, 19 nt, Artificial Sequence
  Description of Artificial Sequence: Synthetic oligonucleotide
  Sense strand starting at position 1335 of SEQ ID NO: 1884442
cacauuagguguuugauau

SEQ ID NO: 2266009 - RNA, 19 nt, Artificial Sequence
  Description of Artificial Sequence: Synthetic oligonucleotide
  Antisense strand to SEQ ID NO: 2266008
auaucaaacaccuaaugug

SEQ ID NO: 2266010 - RNA, 19 nt, Artificial Sequence
  Description of Artificial Sequence: Synthetic oligonucleotide
  Sense strand starting at position 1336 of SEQ ID NO: 1884442
acauuagguguuugauauc

SEQ ID NO: 2266011 - RNA, 19 nt, Artificial Sequence
  Description of Artificial Sequence: Synthetic oligonucleotide
  Antisense strand to SEQ ID NO: 2266010
gauaucaaacaccuaaugu

SEQ ID NO: 2266012 - RNA, 19 nt, Artificial Sequence
  Description of Artificial Sequence: Synthetic oligonucleotide
  Sense strand starting at position 1489 of SEQ ID NO: 1884442
guccauuacgcugcagagu

SEQ ID NO: 2266013 - RNA, 19 nt, Artificial Sequence
  Description of Artificial Sequence: Synthetic oligonucleotide
  Antisense strand to SEQ ID NO: 2266012
acucugcagcguaauggac

SEQ ID NO: 2266014 - RNA, 19 nt, Artificial Sequence
  Description of Artificial Sequence: Synthetic oligonucleotide
  Sense strand starting at position 1917 of SEQ ID NO: 1884442
cauuacacugcuggagaua

SEQ ID NO: 2266015 - RNA, 19 nt, Artificial Sequence
  Description of Artificial Sequence: Synthetic oligonucleotide
  Antisense strand to SEQ ID NO: 2266014
uaucuccagcaguguaaug

SEQ ID NO: 2266016 - RNA, 19 nt, Artificial Sequence
  Description of Artificial Sequence: Synthetic oligonucleotide
  Sense strand starting at position 2059 of SEQ ID NO: 1884442
cuaaguuaaugagucacaa

SEQ ID NO: 2266017 - RNA, 19 nt, Artificial Sequence
  Description of Artificial Sequence: Synthetic oligonucleotide
  Antisense strand to SEQ ID NO: 2266016
uugugacucauuaacuuag

SEQ ID NO: 2266018 - RNA, 19 nt, Artificial Sequence
  Description of Artificial Sequence: Synthetic oligonucleotide
  Sense strand starting at position 2300 of SEQ ID NO: 1884442
cagauuugugcuugaggug

SEQ ID NO: 2266019 - RNA, 19 nt, Artificial Sequence
  Description of Artificial Sequence: Synthetic oligonucleotide
  Antisense strand to SEQ ID NO: 2266018
caccucaagcacaaaucug

SEQ ID NO: 2266020 - RNA, 19 nt, Artificial Sequence
  Description of Artificial Sequence: Synthetic oligonucleotide
  Sense strand starting at position 2367 of SEQ ID NO: 1884442
cacugagcagugcaaauua

SEQ ID NO: 2266021 - RNA, 19 nt, Artificial Sequence
  Description of Artificial Sequence: Synthetic oligonucleotide
  Antisense strand to SEQ ID NO: 2266020
uaauuugcacugcucagug

SEQ ID NO: 2266022 - RNA, 19 nt, Artificial Sequence
  Description of Artificial Sequence: Synthetic oligonucleotide
  Sense strand starting at position 2477 of SEQ ID NO: 1884442
ucaucugagcguucugcua

SEQ ID NO: 2266023 - RNA, 19 nt, Artificial Sequence
  Description of Artificial Sequence: Synthetic oligonucleotide
  Antisense strand to SEQ ID NO: 2266022
uagcagaacgcucagauga

SEQ ID NO: 2266024 - RNA, 19 nt, Artificial Sequence
  Description of Artificial Sequence: Synthetic oligonucleotide
  Sense strand starting at position 2484 of SEQ ID NO: 1884442
agcguucugcuauugcuau

SEQ ID NO: 2266025 - RNA, 19 nt, Artificial Sequence
  Description of Artificial Sequence: Synthetic oligonucleotide
  Antisense strand to SEQ ID NO: 2266024
auagcaauagcagaacgcu

SEQ ID NO: 2266026 - RNA, 19 nt, Artificial Sequence
  Description of Artificial Sequence: Synthetic oligonucleotide
  Sense strand starting at position 2704 of SEQ ID NO: 1884442
gggccuugauucucuuaaa

SEQ ID NO: 2266027 - RNA, 19 nt, Artificial Sequence
  Description of Artificial Sequence: Synthetic oligonucleotide
  Antisense strand to SEQ ID NO: 2266026
uuuaagagaaucaaggccc

SEQ ID NO: 2266028 - RNA, 19 nt, Artificial Sequence
  Description of Artificial Sequence: Synthetic oligonucleotide
  Sense strand starting at position 2705 of SEQ ID NO: 1884442
ggccuugauucucuuaaag

SEQ ID NO: 2266029 - RNA, 19 nt, Artificial Sequence
  Description of Artificial Sequence: Synthetic oligonucleotide
  Antisense strand to SEQ ID NO: 2266028
cuuuaagagaaucaaggcc

SEQ ID NO: 2266030 - RNA, 19 nt, Artificial Sequence
  Description of Artificial Sequence: Synthetic oligonucleotide
  Sense strand starting at position 2743 of SEQ ID NO: 1884442
uuacgaagacuugaucuuu

SEQ ID NO: 2266031 - RNA, 19 nt, Artificial Sequence
  Description of Artificial Sequence: Synthetic oligonucleotide
  Antisense strand to SEQ ID NO: 2266030
aaagaucaagucuucguaa

SEQ ID NO: 2266032 - RNA, 19 nt, Artificial Sequence
  Description of Artificial Sequence: Synthetic oligonucleotide
  Sense strand starting at position 2751 of SEQ ID NO: 1884442
acuugaucuuucuuugaga

SEQ ID NO: 2266033 - RNA, 19 nt, Artificial Sequence
  Description of Artificial Sequence: Synthetic oligonucleotide
  Antisense strand to SEQ ID NO: 2266032
ucucaaagaaagaucaagu

SEQ ID NO: 2266034 - RNA, 19 nt, Artificial Sequence
  Description of Artificial Sequence: Synthetic oligonucleotide
  Sense strand starting at position 2752 of SEQ ID NO: 1884442
cuugaucuuucuuugagau

SEQ ID NO: 2266035 - RNA, 19 nt, Artificial Sequence
  Description of Artificial Sequence: Synthetic oligonucleotide
  Antisense strand to SEQ ID NO: 2266034
aucucaaagaaagaucaag

SEQ ID NO: 2266036 - RNA, 19 nt, Artificial Sequence
  Description of Artificial Sequence: Synthetic oligonucleotide
  Sense strand starting at position 2753 of SEQ ID NO: 1884442
uugaucuuucuuugagaua

SEQ ID NO: 2266037 - RNA, 19 nt, Artificial Sequence
  Description of Artificial Sequence: Synthetic oligonucleotide
  Antisense strand to SEQ ID NO: 2266036
uaucucaaagaaagaucaa

SEQ ID NO: 2266038 - RNA, 19 nt, Artificial Sequence
  Description of Artificial Sequence: Synthetic oligonucleotide
  Sense strand starting at position 2765 of SEQ ID NO: 1884442
ugagauaagugucauuuac

SEQ ID NO: 2266039 - RNA, 19 nt, Artificial Sequence
  Description of Artificial Sequence: Synthetic oligonucleotide
  Antisense strand to SEQ ID NO: 2266038
guaaaugacacuuaucuca

SEQ ID NO: 2266040 - RNA, 19 nt, Artificial Sequence
  Description of Artificial Sequence: Synthetic oligonucleotide
  Sense strand starting at position 2841 of SEQ ID NO: 1884442
guucuaugucaagacugaa

SEQ ID NO: 2266041 - RNA, 19 nt, Artificial Sequence
  Description of Artificial Sequence: Synthetic oligonucleotide
  Antisense strand to SEQ ID NO: 2266040
uucagucuugacauagaac

SEQ ID NO: 2266042 - RNA, 19 nt, Artificial Sequence
  Description of Artificial Sequence: Synthetic oligonucleotide
  Sense strand starting at position 2915 of SEQ ID NO: 1884442
agaugucuugaaggaguuu

SEQ ID NO: 2266043 - RNA, 19 nt, Artificial Sequence
  Description of Artificial Sequence: Synthetic oligonucleotide
  Antisense strand to SEQ ID NO: 2266042
aaacuccuucaagacaucu

SEQ ID NO: 2266044 - RNA, 19 nt, Artificial Sequence
  Description of Artificial Sequence: Synthetic oligonucleotide
  Sense strand starting at position 3007 of SEQ ID NO: 1884442
acucacuagcugugacaau

SEQ ID NO: 2266045 - RNA, 19 nt, Artificial Sequence
  Description of Artificial Sequence: Synthetic oligonucleotide
  Antisense strand to SEQ ID NO: 2266044
auugucacagcuagugagu

SEQ ID NO: 2266046 - RNA, 19 nt, Artificial Sequence
  Description of Artificial Sequence: Synthetic oligonucleotide
  Sense strand starting at position 3018 of SEQ ID NO: 1884442
gugacaauauggguuagua

SEQ ID NO: 2266047 - RNA, 19 nt, Artificial Sequence
  Description of Artificial Sequence: Synthetic oligonucleotide
  Antisense strand to SEQ ID NO: 2266046
uacuaacccauauugucac

SEQ ID NO: 2266048 - RNA, 19 nt, Artificial Sequence
  Description of Artificial Sequence: Synthetic oligonucleotide
  Sense strand starting at position 3022 of SEQ ID NO: 1884442
caauauggguuaguaacuu

SEQ ID NO: 2266049 - RNA, 19 nt, Artificial Sequence
  Description of Artificial Sequence: Synthetic oligonucleotide
  Antisense strand to SEQ ID NO: 2266048
aaguuacuaacccauauug

SEQ ID NO: 2266050 - RNA, 19 nt, Artificial Sequence
  Description of Artificial Sequence: Synthetic oligonucleotide
  Sense strand starting at position 3028 of SEQ ID NO: 1884442
ggguuaguaacuuagugac

SEQ ID NO: 2266051 - RNA, 19 nt, Artificial Sequence
  Description of Artificial Sequence: Synthetic oligonucleotide
  Antisense strand to SEQ ID NO: 2266050
gucacuaaguuacuaaccc

SEQ ID NO: 2266052 - RNA, 19 nt, Artificial Sequence
  Description of Artificial Sequence: Synthetic oligonucleotide
  Sense strand starting at position 3523 of SEQ ID NO: 1884442
gagacaacacugugguuua

SEQ ID NO: 2266053 - RNA, 19 nt, Artificial Sequence
  Description of Artificial Sequence: Synthetic oligonucleotide
  Antisense strand to SEQ ID NO: 2266052
uaaaccacaguguugucuc

SEQ ID NO: 2266054 - RNA, 19 nt, Artificial Sequence
  Description of Artificial Sequence: Synthetic oligonucleotide
  Sense strand starting at position 3962 of SEQ ID NO: 1884442
uaaggaagguauccauauu

SEQ ID NO: 2266055 - RNA, 19 nt, Artificial Sequence
  Description of Artificial Sequence: Synthetic oligonucleotide
  Antisense strand to SEQ ID NO: 2266054
aauauggauaccuuccuua

SEQ ID NO: 2266056 - RNA, 19 nt, Artificial Sequence
  Description of Artificial Sequence: Synthetic oligonucleotide
  Sense strand starting at position 534 of SEQ ID NO: 1884443
gcgugcuugcgccuuauuu

SEQ ID NO: 2266057 - RNA, 19 nt, Artificial Sequence
  Description of Artificial Sequence: Synthetic oligonucleotide
  Antisense strand to SEQ ID NO: 2266056
aaauaaggcgcaagcacgc

SEQ ID NO: 2266058 - RNA, 19 nt, Artificial Sequence
  Description of Artificial Sequence: Synthetic oligonucleotide
  Sense strand starting at position 618 of SEQ ID NO: 1884443
aauugacuugcuggagaga

SEQ ID NO: 2266059 - RNA, 19 nt, Artificial Sequence
  Description of Artificial Sequence: Synthetic oligonucleotide
  Antisense strand to SEQ ID NO: 2266058
ucucuccagcaagucaauu

SEQ ID NO: 2266060 - RNA, 19 nt, Artificial Sequence
  Description of Artificial Sequence: Synthetic oligonucleotide
  Sense strand starting at position 841 of SEQ ID NO: 1884443
uguuguguucacgucagca

SEQ ID NO: 2266061 - RNA, 19 nt, Artificial Sequence
  Description of Artificial Sequence: Synthetic oligonucleotide
  Antisense strand to SEQ ID NO: 2266060
ugcugacgugaacacaaca

SEQ ID NO: 2266062 - RNA, 19 nt, Artificial Sequence
  Description of Artificial Sequence: Synthetic oligonucleotide
  Sense strand starting at position 865 of SEQ ID NO: 1884443
gucauaucgcucucugguu

SEQ ID NO: 2266063 - RNA, 19 nt, Artificial Sequence
  Description of Artificial Sequence: Synthetic oligonucleotide
  Antisense strand to SEQ ID NO: 2266062
aaccagagagcgauaugac

SEQ ID NO: 2266064 - RNA, 19 nt, Artificial Sequence
  Description of Artificial Sequence: Synthetic oligonucleotide
  Sense strand starting at position 1147 of SEQ ID NO: 1884443
guugguugugaagacaaga

SEQ ID NO: 2266065 - RNA, 19 nt, Artificial Sequence
  Description of Artificial Sequence: Synthetic oligonucleotide
  Antisense strand to SEQ ID NO: 2266064
ucuugucuucacaaccaac

SEQ ID NO: 2266066 - RNA, 19 nt, Artificial Sequence
  Description of Artificial Sequence: Synthetic oligonucleotide
  Sense strand starting at position 1203 of SEQ ID NO: 1884443
agaggaguuaaagguguua

SEQ ID NO: 2266067 - RNA, 19 nt, Artificial Sequence
  Description of Artificial Sequence: Synthetic oligonucleotide
  Antisense strand to SEQ ID NO: 2266066
uaacaccuuuaacuccucu

SEQ ID NO: 2266068 - RNA, 19 nt, Artificial Sequence
  Description of Artificial Sequence: Synthetic oligonucleotide
  Sense strand starting at position 1313 of SEQ ID NO: 1884443
agaugugaacucuggcuaa

SEQ ID NO: 2266069 - RNA, 19 nt, Artificial Sequence
  Description of Artificial Sequence: Synthetic oligonucleotide
  Antisense strand to SEQ ID NO: 2266068
uuagccagaguucacaucu

SEQ ID NO: 2266070 - RNA, 19 nt, Artificial Sequence
  Description of Artificial Sequence: Synthetic oligonucleotide
  Sense strand starting at position 1365 of SEQ ID NO: 1884443
acaagaucucaggguccuu

SEQ ID NO: 2266071 - RNA, 19 nt, Artificial Sequence
  Description of Artificial Sequence: Synthetic oligonucleotide
  Antisense strand to SEQ ID NO: 2266070
aaggacccugagaucuugu

SEQ ID NO: 2266072 - RNA, 19 nt, Artificial Sequence
  Description of Artificial Sequence: Synthetic oligonucleotide
  Sense strand starting at position 1393 of SEQ ID NO: 1884443
gaaggaaaugauugugagu

SEQ ID NO: 2266073 - RNA, 19 nt, Artificial Sequence
  Description of Artificial Sequence: Synthetic oligonucleotide
  Antisense strand to SEQ ID NO: 2266072
acucacaaucauuuccuuc

SEQ ID NO: 2266074 - RNA, 19 nt, Artificial Sequence
  Description of Artificial Sequence: Synthetic oligonucleotide
  Sense strand starting at position 1398 of SEQ ID NO: 1884443
aaaugauugugagugacuu

SEQ ID NO: 2266075 - RNA, 19 nt, Artificial Sequence
  Description of Artificial Sequence: Synthetic oligonucleotide
  Antisense strand to SEQ ID NO: 2266074
aagucacucacaaucauuu

SEQ ID NO: 2266076 - RNA, 19 nt, Artificial Sequence
  Description of Artificial Sequence: Synthetic oligonucleotide
  Sense strand starting at position 1400 of SEQ ID NO: 1884443
augauugugagugacuuga

SEQ ID NO: 2266077 - RNA, 19 nt, Artificial Sequence
  Description of Artificial Sequence: Synthetic oligonucleotide
  Antisense strand to SEQ ID NO: 2266076
ucaagucacucacaaucau

SEQ ID NO: 2266078 - RNA, 19 nt, Artificial Sequence
  Description of Artificial Sequence: Synthetic oligonucleotide
  Sense strand starting at position 1428 of SEQ ID NO: 1884443
gauaguugucaguggagag

SEQ ID NO: 2266079 - RNA, 19 nt, Artificial Sequence
  Description of Artificial Sequence: Synthetic oligonucleotide
  Antisense strand to SEQ ID NO: 2266078
cucuccacugacaacuauc

SEQ ID NO: 2266080 - RNA, 19 nt, Artificial Sequence
  Description of Artificial Sequence: Synthetic oligonucleotide
  Sense strand starting at position 1475 of SEQ ID NO: 1884443
gccugaugcguacucagua

SEQ ID NO: 2266081 - RNA, 19 nt, Artificial Sequence
  Description of Artificial Sequence: Synthetic oligonucleotide
  Antisense strand to SEQ ID NO: 2266080
uacugaguacgcaucaggc

SEQ ID NO: 2266082 - RNA, 19 nt, Artificial Sequence
  Description of Artificial Sequence: Synthetic oligonucleotide
  Sense strand starting at position 1504 of SEQ ID NO: 1884443
caggccugaucuuugagau

SEQ ID NO: 2266083 - RNA, 19 nt, Artificial Sequence
  Description of Artificial Sequence: Synthetic oligonucleotide
  Antisense strand to SEQ ID NO: 2266082
aucucaaagaucaggccug

SEQ ID NO: 2266084 - RNA, 19 nt, Artificial Sequence
  Description of Artificial Sequence: Synthetic oligonucleotide
  Sense strand starting at position 1780 of SEQ ID NO: 1884443
cugagugcggcucuguuau

SEQ ID NO: 2266085 - RNA, 19 nt, Artificial Sequence
  Description of Artificial Sequence: Synthetic oligonucleotide
  Antisense strand to SEQ ID NO: 2266084
auaacagagccgcacucag

SEQ ID NO: 2266086 - RNA, 19 nt, Artificial Sequence
  Description of Artificial Sequence: Synthetic oligonucleotide
  Sense strand starting at position 1853 of SEQ ID NO: 1884443
gggacuauuuggguucguu

SEQ ID NO: 2266087 - RNA, 19 nt, Artificial Sequence
  Description of Artificial Sequence: Synthetic oligonucleotide
  Antisense strand to SEQ ID NO: 2266086
aacgaacccaaauaguccc

SEQ ID NO: 2266088 - RNA, 19 nt, Artificial Sequence
  Description of Artificial Sequence: Synthetic oligonucleotide
  Sense strand starting at position 1856 of SEQ ID NO: 1884443
acuauuuggguucguuaag

SEQ ID NO: 2266089 - RNA, 19 nt, Artificial Sequence
  Description of Artificial Sequence: Synthetic oligonucleotide
  Antisense strand to SEQ ID NO: 2266088
cuuaacgaacccaaauagu

SEQ ID NO: 2266090 - RNA, 19 nt, Artificial Sequence
  Description of Artificial Sequence: Synthetic oligonucleotide
  Sense strand starting at position 1865 of SEQ ID NO: 1884443
guucguuaagcagugguga

SEQ ID NO: 2266091 - RNA, 19 nt, Artificial Sequence
  Description of Artificial Sequence: Synthetic oligonucleotide
  Antisense strand to SEQ ID NO: 2266090
ucaccacugcuuaacgaac

SEQ ID NO: 2266092 - RNA, 19 nt, Artificial Sequence
  Description of Artificial Sequence: Synthetic oligonucleotide
  Sense strand starting at position 1920 of SEQ ID NO: 1884443
ggugguguucuagagauau

SEQ ID NO: 2266093 - RNA, 19 nt, Artificial Sequence
  Description of Artificial Sequence: Synthetic oligonucleotide
  Antisense strand to SEQ ID NO: 2266092
auaucucuagaacaccacc

SEQ ID NO: 2266094 - RNA, 19 nt, Artificial Sequence
  Description of Artificial Sequence: Synthetic oligonucleotide
  Sense strand starting at position 1922 of SEQ ID NO: 1884443
ugguguucuagagauauca

SEQ ID NO: 2266095 - RNA, 19 nt, Artificial Sequence
  Description of Artificial Sequence: Synthetic oligonucleotide
  Antisense strand to SEQ ID NO: 2266094
ugauaucucuagaacacca

SEQ ID NO: 2266096 - RNA, 19 nt, Artificial Sequence
  Description of Artificial Sequence: Synthetic oligonucleotide
  Sense strand starting at position 1951 of SEQ ID NO: 1884443
ccagaauuaggacgaagua

SEQ ID NO: 2266097 - RNA, 19 nt, Artificial Sequence
  Description of Artificial Sequence: Synthetic oligonucleotide
  Antisense strand to SEQ ID NO: 2266096
uacuucguccuaauucugg

SEQ ID NO: 2266098 - RNA, 19 nt, Artificial Sequence
  Description of Artificial Sequence: Synthetic oligonucleotide
  Sense strand starting at position 2013 of SEQ ID NO: 1884443
agguacugucagugggaga

SEQ ID NO: 2266099 - RNA, 19 nt, Artificial Sequence
  Description of Artificial Sequence: Synthetic oligonucleotide
  Antisense strand to SEQ ID NO: 2266098
ucucccacugacaguaccu

SEQ ID NO: 2266100 - RNA, 19 nt, Artificial Sequence
  Description of Artificial Sequence: Synthetic oligonucleotide
  Sense strand starting at position 2014 of SEQ ID NO: 1884443
gguacugucagugggagaa

SEQ ID NO: 2266101 - RNA, 19 nt, Artificial Sequence
  Description of Artificial Sequence: Synthetic oligonucleotide
  Antisense strand to SEQ ID NO: 2266100
uucucccacugacaguacc

SEQ ID NO: 2266102 - RNA, 19 nt, Artificial Sequence
  Description of Artificial Sequence: Synthetic oligonucleotide
  Sense strand starting at position 2048 of SEQ ID NO: 1884443
aggagagugaauuguuaug

SEQ ID NO: 2266103 - RNA, 19 nt, Artificial Sequence
  Description of Artificial Sequence: Synthetic oligonucleotide
  Antisense strand to SEQ ID NO: 2266102
cauaacaauucacucuccu

SEQ ID NO: 2266104 - RNA, 19 nt, Artificial Sequence
  Description of Artificial Sequence: Synthetic oligonucleotide
  Sense strand starting at position 2161 of SEQ ID NO: 1884443
agagucgcuauagagauaa

SEQ ID NO: 2266105 - RNA, 19 nt, Artificial Sequence
  Description of Artificial Sequence: Synthetic oligonucleotide
  Antisense strand to SEQ ID NO: 2266104
uuaucucuauagcgacucu

SEQ ID NO: 2266106 - RNA, 19 nt, Artificial Sequence
  Description of Artificial Sequence: Synthetic oligonucleotide
  Sense strand starting at position 2426 of SEQ ID NO: 1884443
guuucucuccgugugcauu

SEQ ID NO: 2266107 - RNA, 19 nt, Artificial Sequence
  Description of Artificial Sequence: Synthetic oligonucleotide
  Antisense strand to SEQ ID NO: 2266106
aaugcacacggagagaaac

SEQ ID NO: 2266108 - RNA, 19 nt, Artificial Sequence
  Description of Artificial Sequence: Synthetic oligonucleotide
  Sense strand starting at position 2649 of SEQ ID NO: 1884443
ggacauaguuuagaaauuu

SEQ ID NO: 2266109 - RNA, 19 nt, Artificial Sequence
  Description of Artificial Sequence: Synthetic oligonucleotide
  Antisense strand to SEQ ID NO: 2266108
aaauuucuaaacuaugucc

SEQ ID NO: 2266110 - RNA, 19 nt, Artificial Sequence
  Description of Artificial Sequence: Synthetic oligonucleotide
  Sense strand starting at position 2700 of SEQ ID NO: 1884443
ccugguauuucugccucua

SEQ ID NO: 2266111 - RNA, 19 nt, Artificial Sequence
  Description of Artificial Sequence: Synthetic oligonucleotide
  Antisense strand to SEQ ID NO: 2266110
uagaggcagaaauaccagg

SEQ ID NO: 2266112 - RNA, 19 nt, Artificial Sequence
  Description of Artificial Sequence: Synthetic oligonucleotide
  Sense strand starting at position 2702 of SEQ ID NO: 1884443
ugguauuucugccucuaau

SEQ ID NO: 2266113 - RNA, 19 nt, Artificial Sequence
  Description of Artificial Sequence: Synthetic oligonucleotide
  Antisense strand to SEQ ID NO: 2266112
auuagaggcagaaauacca

SEQ ID NO: 2266114 - RNA, 19 nt, Artificial Sequence
  Description of Artificial Sequence: Synthetic oligonucleotide
  Sense strand starting at position 2768 of SEQ ID NO: 1884443
uuguauuacugauucugag

SEQ ID NO: 2266115 - RNA, 19 nt, Artificial Sequence
  Description of Artificial Sequence: Synthetic oligonucleotide
  Antisense strand to SEQ ID NO: 2266114
cucagaaucaguaauacaa

SEQ ID NO: 2266116 - RNA, 19 nt, Artificial Sequence
  Description of Artificial Sequence: Synthetic oligonucleotide
  Sense strand starting at position 2965 of SEQ ID NO: 1884443
gagcaugguuaacuagaca

SEQ ID NO: 2266117 - RNA, 19 nt, Artificial Sequence
  Description of Artificial Sequence: Synthetic oligonucleotide
  Antisense strand to SEQ ID NO: 2266116
ugucuaguuaaccaugcuc

SEQ ID NO: 2266118 - RNA, 19 nt, Artificial Sequence
  Description of Artificial Sequence: Synthetic oligonucleotide
  Sense strand starting at position 2999 of SEQ ID NO: 1884443
uuacaucaagcugaaugua

SEQ ID NO: 2266119 - RNA, 19 nt, Artificial Sequence
  Description of Artificial Sequence: Synthetic oligonucleotide
  Antisense strand to SEQ ID NO: 2266118
uacauucagcuugauguaa

SEQ ID NO: 2266120 - RNA, 19 nt, Artificial Sequence
  Description of Artificial Sequence: Synthetic oligonucleotide
  Sense strand starting at position 3002 of SEQ ID NO: 1884443
caucaagcugaauguagau

SEQ ID NO: 2266121 - RNA, 19 nt, Artificial Sequence
  Description of Artificial Sequence: Synthetic oligonucleotide
  Antisense strand to SEQ ID NO: 2266120
aucuacauucagcuugaug

SEQ ID NO: 2266122 - RNA, 19 nt, Artificial Sequence
  Description of Artificial Sequence: Synthetic oligonucleotide
  Sense strand starting at position 3009 of SEQ ID NO: 1884443
cugaauguagauuguugaa

SEQ ID NO: 2266123 - RNA, 19 nt, Artificial Sequence
  Description of Artificial Sequence: Synthetic oligonucleotide
  Antisense strand to SEQ ID NO: 2266122
uucaacaaucuacauucag

SEQ ID NO: 2266124 - RNA, 19 nt, Artificial Sequence
  Description of Artificial Sequence: Synthetic oligonucleotide
  Sense strand starting at position 3011 of SEQ ID NO: 1884443
gaauguagauuguugaaac

SEQ ID NO: 2266125 - RNA, 19 nt, Artificial Sequence
  Description of Artificial Sequence: Synthetic oligonucleotide
  Antisense strand to SEQ ID NO: 2266124
guuucaacaaucuacauuc

SEQ ID NO: 2266126 - RNA, 19 nt, Artificial Sequence
  Description of Artificial Sequence: Synthetic oligonucleotide
  Sense strand starting at position 3216 of SEQ ID NO: 1884443
gaaauuaagucauugguag

SEQ ID NO: 2266127 - RNA, 19 nt, Artificial Sequence
  Description of Artificial Sequence: Synthetic oligonucleotide
  Antisense strand to SEQ ID NO: 2266126
cuaccaaugacuuaauuuc

SEQ ID NO: 2266128 - RNA, 19 nt, Artificial Sequence
  Description of Artificial Sequence: Synthetic oligonucleotide
  Sense strand starting at position 3222 of SEQ ID NO: 1884443
aagucauugguagggauag

SEQ ID NO: 2266129 - RNA, 19 nt, Artificial Sequence
  Description of Artificial Sequence: Synthetic oligonucleotide
  Antisense strand to SEQ ID NO: 2266128
cuaucccuaccaaugacuu

SEQ ID NO: 2266130 - RNA, 19 nt, Artificial Sequence
  Description of Artificial Sequence: Synthetic oligonucleotide
  Sense strand starting at position 3633 of SEQ ID NO: 1884443
cuaucauuaguaugaaagu

SEQ ID NO: 2266131 - RNA, 19 nt, Artificial Sequence
  Description of Artificial Sequence: Synthetic oligonucleotide
  Antisense strand to SEQ ID NO: 2266130
acuuucauacuaaugauag

SEQ ID NO: 2266132 - RNA, 19 nt, Artificial Sequence
  Description of Artificial Sequence: Synthetic oligonucleotide
  Sense strand starting at position 3924 of SEQ ID NO: 1884443
uugucuuaauaucugggau

SEQ ID NO: 2266133 - RNA, 19 nt, Artificial Sequence
  Description of Artificial Sequence: Synthetic oligonucleotide
  Antisense strand to SEQ ID NO: 2266132
aucccagauauuaagacaa

SEQ ID NO: 2266134 - RNA, 19 nt, Artificial Sequence
  Description of Artificial Sequence: Synthetic oligonucleotide
  Sense strand starting at position 3927 of SEQ ID NO: 1884443
ucuuaauaucugggauagc

SEQ ID NO: 2266135 - RNA, 19 nt, Artificial Sequence
  Description of Artificial Sequence: Synthetic oligonucleotide
  Antisense strand to SEQ ID NO: 2266134
gcuaucccagauauuaaga

SEQ ID NO: 2266136 - RNA, 19 nt, Artificial Sequence
  Description of Artificial Sequence: Synthetic oligonucleotide
  Sense strand starting at position 499 of SEQ ID NO: 1884444
gcgugcuugcgccuuauuu

SEQ ID NO: 2266137 - RNA, 19 nt, Artificial Sequence
  Description of Artificial Sequence: Synthetic oligonucleotide
  Antisense strand to SEQ ID NO: 2266136
aaauaaggcgcaagcacgc

SEQ ID NO: 2266138 - RNA, 19 nt, Artificial Sequence
  Description of Artificial Sequence: Synthetic oligonucleotide
  Sense strand starting at position 583 of SEQ ID NO: 1884444
aauugacuugcuggagaga

SEQ ID NO: 2266139 - RNA, 19 nt, Artificial Sequence
  Description of Artificial Sequence: Synthetic oligonucleotide
  Antisense strand to SEQ ID NO: 2266138
ucucuccagcaagucaauu

SEQ ID NO: 2266140 - RNA, 19 nt, Artificial Sequence
  Description of Artificial Sequence: Synthetic oligonucleotide
  Sense strand starting at position 806 of SEQ ID NO: 1884444
uguuguguucacgucagca

SEQ ID NO: 2266141 - RNA, 19 nt, Artificial Sequence
  Description of Artificial Sequence: Synthetic oligonucleotide
  Antisense strand to SEQ ID NO: 2266140
ugcugacgugaacacaaca

SEQ ID NO: 2266142 - RNA, 19 nt, Artificial Sequence
  Description of Artificial Sequence: Synthetic oligonucleotide
  Sense strand starting at position 830 of SEQ ID NO: 1884444
gucauaucgcucucugguu

SEQ ID NO: 2266143 - RNA, 19 nt, Artificial Sequence
  Description of Artificial Sequence: Synthetic oligonucleotide
  Antisense strand to SEQ ID NO: 2266142
aaccagagagcgauaugac

SEQ ID NO: 2266144 - RNA, 19 nt, Artificial Sequence
  Description of Artificial Sequence: Synthetic oligonucleotide
  Sense strand starting at position 1112 of SEQ ID NO: 1884444
guugguugugaagacaaga

SEQ ID NO: 2266145 - RNA, 19 nt, Artificial Sequence
  Description of Artificial Sequence: Synthetic oligonucleotide
  Antisense strand to SEQ ID NO: 2266144
ucuugucuucacaaccaac

SEQ ID NO: 2266146 - RNA, 19 nt, Artificial Sequence
  Description of Artificial Sequence: Synthetic oligonucleotide
  Sense strand starting at position 1168 of SEQ ID NO: 1884444
agaggaguuaaagguguua

SEQ ID NO: 2266147 - RNA, 19 nt, Artificial Sequence
  Description of Artificial Sequence: Synthetic oligonucleotide
  Antisense strand to SEQ ID NO: 2266146
uaacaccuuuaacuccucu

SEQ ID NO: 2266148 - RNA, 19 nt, Artificial Sequence
  Description of Artificial Sequence: Synthetic oligonucleotide
  Sense strand starting at position 1278 of SEQ ID NO: 1884444
agaugugaacucuggcuaa

SEQ ID NO: 2266149 - RNA, 19 nt, Artificial Sequence
  Description of Artificial Sequence: Synthetic oligonucleotide
  Antisense strand to SEQ ID NO: 2266148
uuagccagaguucacaucu

SEQ ID NO: 2266150 - RNA, 19 nt, Artificial Sequence
  Description of Artificial Sequence: Synthetic oligonucleotide
  Sense strand starting at position 1330 of SEQ ID NO: 1884444
acaagaucucaggguccuu

SEQ ID NO: 2266151 - RNA, 19 nt, Artificial Sequence
  Description of Artificial Sequence: Synthetic oligonucleotide
  Antisense strand to SEQ ID NO: 2266150
aaggacccugagaucuugu

SEQ ID NO: 2266152 - RNA, 19 nt, Artificial Sequence
  Description of Artificial Sequence: Synthetic oligonucleotide
  Sense strand starting at position 1358 of SEQ ID NO: 1884444
gaaggaaaugauugugagu

SEQ ID NO: 2266153 - RNA, 19 nt, Artificial Sequence
  Description of Artificial Sequence: Synthetic oligonucleotide
  Antisense strand to SEQ ID NO: 2266152
acucacaaucauuuccuuc

SEQ ID NO: 2266154 - RNA, 19 nt, Artificial Sequence
  Description of Artificial Sequence: Synthetic oligonucleotide
  Sense strand starting at position 1363 of SEQ ID NO: 1884444
aaaugauugugagugacuu

SEQ ID NO: 2266155 - RNA, 19 nt, Artificial Sequence
  Description of Artificial Sequence: Synthetic oligonucleotide
  Antisense strand to SEQ ID NO: 2266154
aagucacucacaaucauuu

SEQ ID NO: 2266156 - RNA, 19 nt, Artificial Sequence
  Description of Artificial Sequence: Synthetic oligonucleotide
  Sense strand starting at position 1365 of SEQ ID NO: 1884444
augauugugagugacuuga

SEQ ID NO: 2266157 - RNA, 19 nt, Artificial Sequence
  Description of Artificial Sequence: Synthetic oligonucleotide
  Antisense strand to SEQ ID NO: 2266156
ucaagucacucacaaucau

SEQ ID NO: 2266158 - RNA, 19 nt, Artificial Sequence
  Description of Artificial Sequence: Synthetic oligonucleotide
  Sense strand starting at position 1393 of SEQ ID NO: 1884444
gauaguugucaguggagag

SEQ ID NO: 2266159 - RNA, 19 nt, Artificial Sequence
  Description of Artificial Sequence: Synthetic oligonucleotide
  Antisense strand to SEQ ID NO: 2266158
cucuccacugacaacuauc

SEQ ID NO: 2266160 - RNA, 19 nt, Artificial Sequence
  Description of Artificial Sequence: Synthetic oligonucleotide
  Sense strand starting at position 1440 of SEQ ID NO: 1884444
gccugaugcguacucagua

SEQ ID NO: 2266161 - RNA, 19 nt, Artificial Sequence
  Description of Artificial Sequence: Synthetic oligonucleotide
  Antisense strand to SEQ ID NO: 2266160
uacugaguacgcaucaggc

SEQ ID NO: 2266162 - RNA, 19 nt, Artificial Sequence
  Description of Artificial Sequence: Synthetic oligonucleotide
  Sense strand starting at position 1469 of SEQ ID NO: 1884444
caggccugaucuuugagau

SEQ ID NO: 2266163 - RNA, 19 nt, Artificial Sequence
  Description of Artificial Sequence: Synthetic oligonucleotide
  Antisense strand to SEQ ID NO: 2266162
aucucaaagaucaggccug

SEQ ID NO: 2266164 - RNA, 19 nt, Artificial Sequence
  Description of Artificial Sequence: Synthetic oligonucleotide
  Sense strand starting at position 1745 of SEQ ID NO: 1884444
cugagugcggcucuguuau

SEQ ID NO: 2266165 - RNA, 19 nt, Artificial Sequence
  Description of Artificial Sequence: Synthetic oligonucleotide
  Antisense strand to SEQ ID NO: 2266164
auaacagagccgcacucag

SEQ ID NO: 2266166 - RNA, 19 nt, Artificial Sequence
  Description of Artificial Sequence: Synthetic oligonucleotide
  Sense strand starting at position 1818 of SEQ ID NO: 1884444
gggacuauuuggguucguu

SEQ ID NO: 2266167 - RNA, 19 nt, Artificial Sequence
  Description of Artificial Sequence: Synthetic oligonucleotide
  Antisense strand to SEQ ID NO: 2266166
aacgaacccaaauaguccc

SEQ ID NO: 2266168 - RNA, 19 nt, Artificial Sequence
  Description of Artificial Sequence: Synthetic oligonucleotide
  Sense strand starting at position 1821 of SEQ ID NO: 1884444
acuauuuggguucguuaag

SEQ ID NO: 2266169 - RNA, 19 nt, Artificial Sequence
  Description of Artificial Sequence: Synthetic oligonucleotide
  Antisense strand to SEQ ID NO: 2266168
cuuaacgaacccaaauagu

SEQ ID NO: 2266170 - RNA, 19 nt, Artificial Sequence
  Description of Artificial Sequence: Synthetic oligonucleotide
  Sense strand starting at position 1830 of SEQ ID NO: 1884444
guucguuaagcagugguga

SEQ ID NO: 2266171 - RNA, 19 nt, Artificial Sequence
  Description of Artificial Sequence: Synthetic oligonucleotide
  Antisense strand to SEQ ID NO: 2266170
ucaccacugcuuaacgaac

SEQ ID NO: 2266172 - RNA, 19 nt, Artificial Sequence
  Description of Artificial Sequence: Synthetic oligonucleotide
  Sense strand starting at position 1885 of SEQ ID NO: 1884444
ggugguguucuagagauau

SEQ ID NO: 2266173 - RNA, 19 nt, Artificial Sequence
  Description of Artificial Sequence: Synthetic oligonucleotide
  Antisense strand to SEQ ID NO: 2266172
auaucucuagaacaccacc

SEQ ID NO: 2266174 - RNA, 19 nt, Artificial Sequence
  Description of Artificial Sequence: Synthetic oligonucleotide
  Sense strand starting at position 1887 of SEQ ID NO: 1884444
ugguguucuagagauauca

SEQ ID NO: 2266175 - RNA, 19 nt, Artificial Sequence
  Description of Artificial Sequence: Synthetic oligonucleotide
  Antisense strand to SEQ ID NO: 2266174
ugauaucucuagaacacca

SEQ ID NO: 2266176 - RNA, 19 nt, Artificial Sequence
  Description of Artificial Sequence: Synthetic oligonucleotide
  Sense strand starting at position 1916 of SEQ ID NO: 1884444
ccagaauuaggacgaagua

SEQ ID NO: 2266177 - RNA, 19 nt, Artificial Sequence
  Description of Artificial Sequence: Synthetic oligonucleotide
  Antisense strand to SEQ ID NO: 2266176
uacuucguccuaauucugg

SEQ ID NO: 2266178 - RNA, 19 nt, Artificial Sequence
  Description of Artificial Sequence: Synthetic oligonucleotide
  Sense strand starting at position 1978 of SEQ ID NO: 1884444
agguacugucagugggaga

SEQ ID NO: 2266179 - RNA, 19 nt, Artificial Sequence
  Description of Artificial Sequence: Synthetic oligonucleotide
  Antisense strand to SEQ ID NO: 2266178
ucucccacugacaguaccu

SEQ ID NO: 2266180 - RNA, 19 nt, Artificial Sequence
  Description of Artificial Sequence: Synthetic oligonucleotide
  Sense strand starting at position 1979 of SEQ ID NO: 1884444
gguacugucagugggagaa

SEQ ID NO: 2266181 - RNA, 19 nt, Artificial Sequence
  Description of Artificial Sequence: Synthetic oligonucleotide
  Antisense strand to SEQ ID NO: 2266180
uucucccacugacaguacc

SEQ ID NO: 2266182 - RNA, 19 nt, Artificial Sequence
  Description of Artificial Sequence: Synthetic oligonucleotide
  Sense strand starting at position 2013 of SEQ ID NO: 1884444
aggagagugaauuguuaug

SEQ ID NO: 2266183 - RNA, 19 nt, Artificial Sequence
  Description of Artificial Sequence: Synthetic oligonucleotide
  Antisense strand to SEQ ID NO: 2266182
cauaacaauucacucuccu

SEQ ID NO: 2266184 - RNA, 19 nt, Artificial Sequence
  Description of Artificial Sequence: Synthetic oligonucleotide
  Sense strand starting at position 2126 of SEQ ID NO: 1884444
agagucgcuauagagauaa

SEQ ID NO: 2266185 - RNA, 19 nt, Artificial Sequence
  Description of Artificial Sequence: Synthetic oligonucleotide
  Antisense strand to SEQ ID NO: 2266184
uuaucucuauagcgacucu

SEQ ID NO: 2266186 - RNA, 19 nt, Artificial Sequence
  Description of Artificial Sequence: Synthetic oligonucleotide
  Sense strand starting at position 2391 of SEQ ID NO: 1884444
guuucucuccgugugcauu

SEQ ID NO: 2266187 - RNA, 19 nt, Artificial Sequence
  Description of Artificial Sequence: Synthetic oligonucleotide
  Antisense strand to SEQ ID NO: 2266186
aaugcacacggagagaaac

SEQ ID NO: 2266188 - RNA, 19 nt, Artificial Sequence
  Description of Artificial Sequence: Synthetic oligonucleotide
  Sense strand starting at position 2614 of SEQ ID NO: 1884444
ggacauaguuuagaaauuu

SEQ ID NO: 2266189 - RNA, 19 nt, Artificial Sequence
  Description of Artificial Sequence: Synthetic oligonucleotide
  Antisense strand to SEQ ID NO: 2266188
aaauuucuaaacuaugucc

SEQ ID NO: 2266190 - RNA, 19 nt, Artificial Sequence
  Description of Artificial Sequence: Synthetic oligonucleotide
  Sense strand starting at position 2665 of SEQ ID NO: 1884444
ccugguauuucugccucua

SEQ ID NO: 2266191 - RNA, 19 nt, Artificial Sequence
  Description of Artificial Sequence: Synthetic oligonucleotide
  Antisense strand to SEQ ID NO: 2266190
uagaggcagaaauaccagg

SEQ ID NO: 2266192 - RNA, 19 nt, Artificial Sequence
  Description of Artificial Sequence: Synthetic oligonucleotide
  Sense strand starting at position 2667 of SEQ ID NO: 1884444
ugguauuucugccucuaau

SEQ ID NO: 2266193 - RNA, 19 nt, Artificial Sequence
  Description of Artificial Sequence: Synthetic oligonucleotide
  Antisense strand to SEQ ID NO: 2266192
auuagaggcagaaauacca

SEQ ID NO: 2266194 - RNA, 19 nt, Artificial Sequence
  Description of Artificial Sequence: Synthetic oligonucleotide
  Sense strand starting at position 2733 of SEQ ID NO: 1884444
uuguauuacugauucugag

SEQ ID NO: 2266195 - RNA, 19 nt, Artificial Sequence
  Description of Artificial Sequence: Synthetic oligonucleotide
  Antisense strand to SEQ ID NO: 2266194
cucagaaucaguaauacaa

SEQ ID NO: 2266196 - RNA, 19 nt, Artificial Sequence
  Description of Artificial Sequence: Synthetic oligonucleotide
  Sense strand starting at position 2930 of SEQ ID NO: 1884444
gagcaugguuaacuagaca

SEQ ID NO: 2266197 - RNA, 19 nt, Artificial Sequence
  Description of Artificial Sequence: Synthetic oligonucleotide
  Antisense strand to SEQ ID NO: 2266196
ugucuaguuaaccaugcuc

SEQ ID NO: 2266198 - RNA, 19 nt, Artificial Sequence
  Description of Artificial Sequence: Synthetic oligonucleotide
  Sense strand starting at position 2964 of SEQ ID NO: 1884444
uuacaucaagcugaaugua

SEQ ID NO: 2266199 - RNA, 19 nt, Artificial Sequence
  Description of Artificial Sequence: Synthetic oligonucleotide
  Antisense strand to SEQ ID NO: 2266198
uacauucagcuugauguaa

SEQ ID NO: 2266200 - RNA, 19 nt, Artificial Sequence
  Description of Artificial Sequence: Synthetic oligonucleotide
  Sense strand starting at position 2967 of SEQ ID NO: 1884444
caucaagcugaauguagau

SEQ ID NO: 2266201 - RNA, 19 nt, Artificial Sequence
  Description of Artificial Sequence: Synthetic oligonucleotide
  Antisense strand to SEQ ID NO: 2266200
aucuacauucagcuugaug

SEQ ID NO: 2266202 - RNA, 19 nt, Artificial Sequence
  Description of Artificial Sequence: Synthetic oligonucleotide
  Sense strand starting at position 2974 of SEQ ID NO: 1884444
cugaauguagauuguugaa

SEQ ID NO: 2266203 - RNA, 19 nt, Artificial Sequence
  Description of Artificial Sequence: Synthetic oligonucleotide
  Antisense strand to SEQ ID NO: 2266202
uucaacaaucuacauucag

SEQ ID NO: 2266204 - RNA, 19 nt, Artificial Sequence
  Description of Artificial Sequence: Synthetic oligonucleotide
  Sense strand starting at position 2976 of SEQ ID NO: 1884444
gaauguagauuguugaaac

SEQ ID NO: 2266205 - RNA, 19 nt, Artificial Sequence
  Description of Artificial Sequence: Synthetic oligonucleotide
  Antisense strand to SEQ ID NO: 2266204
guuucaacaaucuacauuc

SEQ ID NO: 2266206 - RNA, 19 nt, Artificial Sequence
  Description of Artificial Sequence: Synthetic oligonucleotide
  Sense strand starting at position 3181 of SEQ ID NO: 1884444
gaaauuaagucauugguag

SEQ ID NO: 2266207 - RNA, 19 nt, Artificial Sequence
  Description of Artificial Sequence: Synthetic oligonucleotide
  Antisense strand to SEQ ID NO: 2266206
cuaccaaugacuuaauuuc

SEQ ID NO: 2266208 - RNA, 19 nt, Artificial Sequence
  Description of Artificial Sequence: Synthetic oligonucleotide
  Sense strand starting at position 3187 of SEQ ID NO: 1884444
aagucauugguagggauag

SEQ ID NO: 2266209 - RNA, 19 nt, Artificial Sequence
  Description of Artificial Sequence: Synthetic oligonucleotide
  Antisense strand to SEQ ID NO: 2266208
cuaucccuaccaaugacuu

SEQ ID NO: 2266210 - RNA, 19 nt, Artificial Sequence
  Description of Artificial Sequence: Synthetic oligonucleotide
  Sense strand starting at position 3598 of SEQ ID NO: 1884444
cuaucauuaguaugaaagu

SEQ ID NO: 2266211 - RNA, 19 nt, Artificial Sequence
  Description of Artificial Sequence: Synthetic oligonucleotide
  Antisense strand to SEQ ID NO: 2266210
acuuucauacuaaugauag

SEQ ID NO: 2266212 - RNA, 19 nt, Artificial Sequence
  Description of Artificial Sequence: Synthetic oligonucleotide
  Sense strand starting at position 3889 of SEQ ID NO: 1884444
uugucuuaauaucugggau

SEQ ID NO: 2266213 - RNA, 19 nt, Artificial Sequence
  Description of Artificial Sequence: Synthetic oligonucleotide
  Antisense strand to SEQ ID NO: 2266212
aucccagauauuaagacaa

SEQ ID NO: 2266214 - RNA, 19 nt, Artificial Sequence
  Description of Artificial Sequence: Synthetic oligonucleotide
  Sense strand starting at position 3892 of SEQ ID NO: 1884444
ucuuaauaucugggauagc

SEQ ID NO: 2266215 - RNA, 19 nt, Artificial Sequence
  Description of Artificial Sequence: Synthetic oligonucleotide
  Antisense strand to SEQ ID NO: 2266214
gcuaucccagauauuaaga

SEQ ID NO: 2266216 - RNA, 19 nt, Artificial Sequence
  Description of Artificial Sequence: Synthetic oligonucleotide
  Sense strand starting at position 8 of SEQ ID NO: 1884445
ugcauauuagggcaauaaa

SEQ ID NO: 2266217 - RNA, 19 nt, Artificial Sequence
  Description of Artificial Sequence: Synthetic oligonucleotide
  Antisense strand to SEQ ID NO: 2266216
uuuauugcccuaauaugca

SEQ ID NO: 2266218 - RNA, 19 nt, Artificial Sequence
  Description of Artificial Sequence: Synthetic oligonucleotide
  Sense strand starting at position 312 of SEQ ID NO: 1884445
auugauagaugaguaaagu

SEQ ID NO: 2266219 - RNA, 19 nt, Artificial Sequence
  Description of Artificial Sequence: Synthetic oligonucleotide
  Antisense strand to SEQ ID NO: 2266218
acuuuacucaucuaucaau

SEQ ID NO: 2266220 - RNA, 19 nt, Artificial Sequence
  Description of Artificial Sequence: Synthetic oligonucleotide
  Sense strand starting at position 397 of SEQ ID NO: 1884445
ugucuuggaccuuacuaau

SEQ ID NO: 2266221 - RNA, 19 nt, Artificial Sequence
  Description of Artificial Sequence: Synthetic oligonucleotide
  Antisense strand to SEQ ID NO: 2266220
auuaguaagguccaagaca

SEQ ID NO: 2266222 - RNA, 19 nt, Artificial Sequence
  Description of Artificial Sequence: Synthetic oligonucleotide
  Sense strand starting at position 443 of SEQ ID NO: 1884445
agacauggucugcaccaga

SEQ ID NO: 2266223 - RNA, 19 nt, Artificial Sequence
  Description of Artificial Sequence: Synthetic oligonucleotide
  Antisense strand to SEQ ID NO: 2266222
ucuggugcagaccaugucu

SEQ ID NO: 2266224 - RNA, 19 nt, Artificial Sequence
  Description of Artificial Sequence: Synthetic oligonucleotide
  Sense strand starting at position 456 of SEQ ID NO: 1884445
accagaaggucucccagaa

SEQ ID NO: 2266225 - RNA, 19 nt, Artificial Sequence
  Description of Artificial Sequence: Synthetic oligonucleotide
  Antisense strand to SEQ ID NO: 2266224
uucugggagaccuucuggu

SEQ ID NO: 2266226 - RNA, 19 nt, Artificial Sequence
  Description of Artificial Sequence: Synthetic oligonucleotide
  Sense strand starting at position 516 of SEQ ID NO: 1884445
gguacuaugguacauaguu

SEQ ID NO: 2266227 - RNA, 19 nt, Artificial Sequence
  Description of Artificial Sequence: Synthetic oligonucleotide
  Antisense strand to SEQ ID NO: 2266226
aacuauguaccauaguacc

SEQ ID NO: 2266228 - RNA, 19 nt, Artificial Sequence
  Description of Artificial Sequence: Synthetic oligonucleotide
  Sense strand starting at position 521 of SEQ ID NO: 1884445
uaugguacauaguucugaa

SEQ ID NO: 2266229 - RNA, 19 nt, Artificial Sequence
  Description of Artificial Sequence: Synthetic oligonucleotide
  Antisense strand to SEQ ID NO: 2266228
uucagaacuauguaccaua

SEQ ID NO: 2266230 - RNA, 19 nt, Artificial Sequence
  Description of Artificial Sequence: Synthetic oligonucleotide
  Sense strand starting at position 628 of SEQ ID NO: 1884445
uguagaauuccuggaggca

SEQ ID NO: 2266231 - RNA, 19 nt, Artificial Sequence
  Description of Artificial Sequence: Synthetic oligonucleotide
  Antisense strand to SEQ ID NO: 2266230
ugccuccaggaauucuaca

SEQ ID NO: 2266232 - RNA, 19 nt, Artificial Sequence
  Description of Artificial Sequence: Synthetic oligonucleotide
  Sense strand starting at position 629 of SEQ ID NO: 1884445
guagaauuccuggaggcag

SEQ ID NO: 2266233 - RNA, 19 nt, Artificial Sequence
  Description of Artificial Sequence: Synthetic oligonucleotide
  Antisense strand to SEQ ID NO: 2266232
cugccuccaggaauucuac

SEQ ID NO: 2266234 - RNA, 19 nt, Artificial Sequence
  Description of Artificial Sequence: Synthetic oligonucleotide
  Sense strand starting at position 798 of SEQ ID NO: 1884445
ugcggcuuuacuuagauuu

SEQ ID NO: 2266235 - RNA, 19 nt, Artificial Sequence
  Description of Artificial Sequence: Synthetic oligonucleotide
  Antisense strand to SEQ ID NO: 2266234
aaaucuaaguaaagccgca

SEQ ID NO: 2266236 - RNA, 19 nt, Artificial Sequence
  Description of Artificial Sequence: Synthetic oligonucleotide
  Sense strand starting at position 860 of SEQ ID NO: 1884445
acacaugcagcaugaauau

SEQ ID NO: 2266237 - RNA, 19 nt, Artificial Sequence
  Description of Artificial Sequence: Synthetic oligonucleotide
  Antisense strand to SEQ ID NO: 2266236
auauucaugcugcaugugu

SEQ ID NO: 2266238 - RNA, 19 nt, Artificial Sequence
  Description of Artificial Sequence: Synthetic oligonucleotide
  Sense strand starting at position 1119 of SEQ ID NO: 1884445
ugcuaagacucuuucugaa

SEQ ID NO: 2266239 - RNA, 19 nt, Artificial Sequence
  Description of Artificial Sequence: Synthetic oligonucleotide
  Antisense strand to SEQ ID NO: 2266238
uucagaaagagucuuagca

SEQ ID NO: 2266240 - RNA, 19 nt, Artificial Sequence
  Description of Artificial Sequence: Synthetic oligonucleotide
  Sense strand starting at position 1160 of SEQ ID NO: 1884445
guuuaugaagcuuaccuuu

SEQ ID NO: 2266241 - RNA, 19 nt, Artificial Sequence
  Description of Artificial Sequence: Synthetic oligonucleotide
  Antisense strand to SEQ ID NO: 2266240
aaagguaagcuucauaaac

SEQ ID NO: 2266242 - RNA, 19 nt, Artificial Sequence
  Description of Artificial Sequence: Synthetic oligonucleotide
  Sense strand starting at position 1271 of SEQ ID NO: 1884445
uguaacuguaaguaaguua

SEQ ID NO: 2266243 - RNA, 19 nt, Artificial Sequence
  Description of Artificial Sequence: Synthetic oligonucleotide
  Antisense strand to SEQ ID NO: 2266242
uaacuuacuuacaguuaca

SEQ ID NO: 2266244 - RNA, 19 nt, Artificial Sequence
  Description of Artificial Sequence: Synthetic oligonucleotide
  Sense strand starting at position 1354 of SEQ ID NO: 1884445
gguuacaucaggcauuaag

SEQ ID NO: 2266245 - RNA, 19 nt, Artificial Sequence
  Description of Artificial Sequence: Synthetic oligonucleotide
  Antisense strand to SEQ ID NO: 2266244
cuuaaugccugauguaacc

SEQ ID NO: 2266246 - RNA, 19 nt, Artificial Sequence
  Description of Artificial Sequence: Synthetic oligonucleotide
  Sense strand starting at position 1420 of SEQ ID NO: 1884445
uaucauuucgugcaguguu

SEQ ID NO: 2266247 - RNA, 19 nt, Artificial Sequence
  Description of Artificial Sequence: Synthetic oligonucleotide
  Antisense strand to SEQ ID NO: 2266246
aacacugcacgaaaugaua

SEQ ID NO: 2266248 - RNA, 19 nt, Artificial Sequence
  Description of Artificial Sequence: Synthetic oligonucleotide
  Sense strand starting at position 1462 of SEQ ID NO: 1884445
aaauguagugacugaguaa

SEQ ID NO: 2266249 - RNA, 19 nt, Artificial Sequence
  Description of Artificial Sequence: Synthetic oligonucleotide
  Antisense strand to SEQ ID NO: 2266248
uuacucagucacuacauuu

SEQ ID NO: 2266250 - RNA, 19 nt, Artificial Sequence
  Description of Artificial Sequence: Synthetic oligonucleotide
  Sense strand starting at position 1463 of SEQ ID NO: 1884445
aauguagugacugaguaag

SEQ ID NO: 2266251 - RNA, 19 nt, Artificial Sequence
  Description of Artificial Sequence: Synthetic oligonucleotide
  Antisense strand to SEQ ID NO: 2266250
cuuacucagucacuacauu

SEQ ID NO: 2266252 - RNA, 19 nt, Artificial Sequence
  Description of Artificial Sequence: Synthetic oligonucleotide
  Sense strand starting at position 1465 of SEQ ID NO: 1884445
uguagugacugaguaagaa

SEQ ID NO: 2266253 - RNA, 19 nt, Artificial Sequence
  Description of Artificial Sequence: Synthetic oligonucleotide
  Antisense strand to SEQ ID NO: 2266252
uucuuacucagucacuaca

SEQ ID NO: 2266254 - RNA, 19 nt, Artificial Sequence
  Description of Artificial Sequence: Synthetic oligonucleotide
  Sense strand starting at position 1495 of SEQ ID NO: 1884445
caguuaaugcuagagauua

SEQ ID NO: 2266255 - RNA, 19 nt, Artificial Sequence
  Description of Artificial Sequence: Synthetic oligonucleotide
  Antisense strand to SEQ ID NO: 2266254
uaaucucuagcauuaacug

SEQ ID NO: 2266256 - RNA, 19 nt, Artificial Sequence
  Description of Artificial Sequence: Synthetic oligonucleotide
  Sense strand starting at position 1531 of SEQ ID NO: 1884445
cacaguguccuagaaguug

SEQ ID NO: 2266257 - RNA, 19 nt, Artificial Sequence
  Description of Artificial Sequence: Synthetic oligonucleotide
  Antisense strand to SEQ ID NO: 2266256
caacuucuaggacacugug

SEQ ID NO: 2266258 - RNA, 19 nt, Artificial Sequence
  Description of Artificial Sequence: Synthetic oligonucleotide
  Sense strand starting at position 1681 of SEQ ID NO: 1884445
cucauauucccagagcaag

SEQ ID NO: 2266259 - RNA, 19 nt, Artificial Sequence
  Description of Artificial Sequence: Synthetic oligonucleotide
  Antisense strand to SEQ ID NO: 2266258
cuugcucugggaauaugag

SEQ ID NO: 2266260 - RNA, 19 nt, Artificial Sequence
  Description of Artificial Sequence: Synthetic oligonucleotide
  Sense strand starting at position 1767 of SEQ ID NO: 1884445
gacacugaagccuggaauu

SEQ ID NO: 2266261 - RNA, 19 nt, Artificial Sequence
  Description of Artificial Sequence: Synthetic oligonucleotide
  Antisense strand to SEQ ID NO: 2266260
aauuccaggcuucaguguc

SEQ ID NO: 2266262 - RNA, 19 nt, Artificial Sequence
  Description of Artificial Sequence: Synthetic oligonucleotide
  Sense strand starting at position 1905 of SEQ ID NO: 1884445
ucacucaauggaugaguua

SEQ ID NO: 2266263 - RNA, 19 nt, Artificial Sequence
  Description of Artificial Sequence: Synthetic oligonucleotide
  Antisense strand to SEQ ID NO: 2266262
uaacucauccauugaguga

SEQ ID NO: 2266264 - RNA, 19 nt, Artificial Sequence
  Description of Artificial Sequence: Synthetic oligonucleotide
  Sense strand starting at position 2060 of SEQ ID NO: 1884445
uacugauuggccuagauuc

SEQ ID NO: 2266265 - RNA, 19 nt, Artificial Sequence
  Description of Artificial Sequence: Synthetic oligonucleotide
  Antisense strand to SEQ ID NO: 2266264
gaaucuaggccaaucagua

SEQ ID NO: 2266266 - RNA, 19 nt, Artificial Sequence
  Description of Artificial Sequence: Synthetic oligonucleotide
  Sense strand starting at position 2254 of SEQ ID NO: 1884445
acaauuccuguauagucua

SEQ ID NO: 2266267 - RNA, 19 nt, Artificial Sequence
  Description of Artificial Sequence: Synthetic oligonucleotide
  Antisense strand to SEQ ID NO: 2266266
uagacuauacaggaauugu

SEQ ID NO: 2266268 - RNA, 19 nt, Artificial Sequence
  Description of Artificial Sequence: Synthetic oligonucleotide
  Sense strand starting at position 3036 of SEQ ID NO: 1884445
augaauaacguguacaagu

SEQ ID NO: 2266269 - RNA, 19 nt, Artificial Sequence
  Description of Artificial Sequence: Synthetic oligonucleotide
  Antisense strand to SEQ ID NO: 2266268
acuuguacacguuauucau

SEQ ID NO: 2266270 - RNA, 19 nt, Artificial Sequence
  Description of Artificial Sequence: Synthetic oligonucleotide
  Sense strand starting at position 3317 of SEQ ID NO: 1884445
cauugcaauguaugaugau

SEQ ID NO: 2266271 - RNA, 19 nt, Artificial Sequence
  Description of Artificial Sequence: Synthetic oligonucleotide
  Antisense strand to SEQ ID NO: 2266270
aucaucauacauugcaaug

SEQ ID NO: 2266272 - RNA, 19 nt, Artificial Sequence
  Description of Artificial Sequence: Synthetic oligonucleotide
  Sense strand starting at position 3439 of SEQ ID NO: 1884445
aagaaaguuccagguuaug

SEQ ID NO: 2266273 - RNA, 19 nt, Artificial Sequence
  Description of Artificial Sequence: Synthetic oligonucleotide
  Antisense strand to SEQ ID NO: 2266272
cauaaccuggaacuuucuu

SEQ ID NO: 2266274 - RNA, 19 nt, Artificial Sequence
  Description of Artificial Sequence: Synthetic oligonucleotide
  Sense strand starting at position 3442 of SEQ ID NO: 1884445
aaaguuccagguuaugcaa

SEQ ID NO: 2266275 - RNA, 19 nt, Artificial Sequence
  Description of Artificial Sequence: Synthetic oligonucleotide
  Antisense strand to SEQ ID NO: 2266274
uugcauaaccuggaacuuu

SEQ ID NO: 2266276 - RNA, 19 nt, Artificial Sequence
  Description of Artificial Sequence: Synthetic oligonucleotide
  Sense strand starting at position 3604 of SEQ ID NO: 1884445
gagcaagaauacucaaggu

SEQ ID NO: 2266277 - RNA, 19 nt, Artificial Sequence
  Description of Artificial Sequence: Synthetic oligonucleotide
  Antisense strand to SEQ ID NO: 2266276
accuugaguauucuugcuc

SEQ ID NO: 2266278 - RNA, 19 nt, Artificial Sequence
  Description of Artificial Sequence: Synthetic oligonucleotide
  Sense strand starting at position 3626 of SEQ ID NO: 1884445
gugaaauuauuaucaggcu

SEQ ID NO: 2266279 - RNA, 19 nt, Artificial Sequence
  Description of Artificial Sequence: Synthetic oligonucleotide
  Antisense strand to SEQ ID NO: 2266278
agccugauaauaauuucac

SEQ ID NO: 2266280 - RNA, 19 nt, Artificial Sequence
  Description of Artificial Sequence: Synthetic oligonucleotide
  Sense strand starting at position 3639 of SEQ ID NO: 1884445
caggcuuuaguguauauga

SEQ ID NO: 2266281 - RNA, 19 nt, Artificial Sequence
  Description of Artificial Sequence: Synthetic oligonucleotide
  Antisense strand to SEQ ID NO: 2266280
ucauauacacuaaagccug

SEQ ID NO: 2266282 - RNA, 19 nt, Artificial Sequence
  Description of Artificial Sequence: Synthetic oligonucleotide
  Sense strand starting at position 3641 of SEQ ID NO: 1884445
ggcuuuaguguauaugaau

SEQ ID NO: 2266283 - RNA, 19 nt, Artificial Sequence
  Description of Artificial Sequence: Synthetic oligonucleotide
  Antisense strand to SEQ ID NO: 2266282
auucauauacacuaaagcc

SEQ ID NO: 2266284 - RNA, 19 nt, Artificial Sequence
  Description of Artificial Sequence: Synthetic oligonucleotide
  Sense strand starting at position 3666 of SEQ ID NO: 1884445
uggacuuacuuguuagaau

SEQ ID NO: 2266285 - RNA, 19 nt, Artificial Sequence
  Description of Artificial Sequence: Synthetic oligonucleotide
  Antisense strand to SEQ ID NO: 2266284
auucuaacaaguaagucca

SEQ ID NO: 2266286 - RNA, 19 nt, Artificial Sequence
  Description of Artificial Sequence: Synthetic oligonucleotide
  Sense strand starting at position 3684 of SEQ ID NO: 1884445
uuggauauuccuggaacuu

SEQ ID NO: 2266287 - RNA, 19 nt, Artificial Sequence
  Description of Artificial Sequence: Synthetic oligonucleotide
  Antisense strand to SEQ ID NO: 2266286
aaguuccaggaauauccaa

SEQ ID NO: 2266288 - RNA, 19 nt, Artificial Sequence
  Description of Artificial Sequence: Synthetic oligonucleotide
  Sense strand starting at position 3819 of SEQ ID NO: 1884445
uuugguaauacugguagga

SEQ ID NO: 2266289 - RNA, 19 nt, Artificial Sequence
  Description of Artificial Sequence: Synthetic oligonucleotide
  Antisense strand to SEQ ID NO: 2266288
uccuaccaguauuaccaaa

SEQ ID NO: 2266290 - RNA, 19 nt, Artificial Sequence
  Description of Artificial Sequence: Synthetic oligonucleotide
  Sense strand starting at position 3823 of SEQ ID NO: 1884445
guaauacugguaggauaga

SEQ ID NO: 2266291 - RNA, 19 nt, Artificial Sequence
  Description of Artificial Sequence: Synthetic oligonucleotide
  Antisense strand to SEQ ID NO: 2266290
ucuauccuaccaguauuac

SEQ ID NO: 2266292 - RNA, 19 nt, Artificial Sequence
  Description of Artificial Sequence: Synthetic oligonucleotide
  Sense strand starting at position 3832 of SEQ ID NO: 1884445
guaggauagacugagcuuu

SEQ ID NO: 2266293 - RNA, 19 nt, Artificial Sequence
  Description of Artificial Sequence: Synthetic oligonucleotide
  Antisense strand to SEQ ID NO: 2266292
aaagcucagucuauccuac

SEQ ID NO: 2266294 - RNA, 19 nt, Artificial Sequence
  Description of Artificial Sequence: Synthetic oligonucleotide
  Sense strand starting at position 3834 of SEQ ID NO: 1884445
aggauagacugagcuuuga

SEQ ID NO: 2266295 - RNA, 19 nt, Artificial Sequence
  Description of Artificial Sequence: Synthetic oligonucleotide
  Antisense strand to SEQ ID NO: 2266294
ucaaagcucagucuauccu

SEQ ID NO: 2266296 - RNA, 19 nt, Artificial Sequence
  Description of Artificial Sequence: Synthetic oligonucleotide
  Sense strand starting at position 312 of SEQ ID NO: 1884446
gccagauugugggcaauga

SEQ ID NO: 2266297 - RNA, 19 nt, Artificial Sequence
  Description of Artificial Sequence: Synthetic oligonucleotide
  Antisense strand to SEQ ID NO: 2266296
ucauugcccacaaucuggc

SEQ ID NO: 2266298 - RNA, 19 nt, Artificial Sequence
  Description of Artificial Sequence: Synthetic oligonucleotide
  Sense strand starting at position 313 of SEQ ID NO: 1884446
ccagauugugggcaaugau

SEQ ID NO: 2266299 - RNA, 19 nt, Artificial Sequence
  Description of Artificial Sequence: Synthetic oligonucleotide
  Antisense strand to SEQ ID NO: 2266298
aucauugcccacaaucugg

SEQ ID NO: 2266300 - RNA, 19 nt, Artificial Sequence
  Description of Artificial Sequence: Synthetic oligonucleotide
  Sense strand starting at position 316 of SEQ ID NO: 1884446
gauugugggcaaugaugaa

SEQ ID NO: 2266301 - RNA, 19 nt, Artificial Sequence
  Description of Artificial Sequence: Synthetic oligonucleotide
  Antisense strand to SEQ ID NO: 2266300
uucaucauugcccacaauc

SEQ ID NO: 2266302 - RNA, 19 nt, Artificial Sequence
  Description of Artificial Sequence: Synthetic oligonucleotide
  Sense strand starting at position 415 of SEQ ID NO: 1884446
guuaauuuguuccucucau

SEQ ID NO: 2266303 - RNA, 19 nt, Artificial Sequence
  Description of Artificial Sequence: Synthetic oligonucleotide
  Antisense strand to SEQ ID NO: 2266302
augagaggaacaaauuaac

SEQ ID NO: 2266304 - RNA, 19 nt, Artificial Sequence
  Description of Artificial Sequence: Synthetic oligonucleotide
  Sense strand starting at position 432 of SEQ ID NO: 1884446
auugauaaucauuguguac

SEQ ID NO: 2266305 - RNA, 19 nt, Artificial Sequence
  Description of Artificial Sequence: Synthetic oligonucleotide
  Antisense strand to SEQ ID NO: 2266304
guacacaaugauuaucaau

SEQ ID NO: 2266306 - RNA, 19 nt, Artificial Sequence
  Description of Artificial Sequence: Synthetic oligonucleotide
  Sense strand starting at position 436 of SEQ ID NO: 1884446
auaaucauuguguaccuaa

SEQ ID NO: 2266307 - RNA, 19 nt, Artificial Sequence
  Description of Artificial Sequence: Synthetic oligonucleotide
  Antisense strand to SEQ ID NO: 2266306
uuagguacacaaugauuau

SEQ ID NO: 2266308 - RNA, 19 nt, Artificial Sequence
  Description of Artificial Sequence: Synthetic oligonucleotide
  Sense strand starting at position 439 of SEQ ID NO: 1884446
aucauuguguaccuaaauu

SEQ ID NO: 2266309 - RNA, 19 nt, Artificial Sequence
  Description of Artificial Sequence: Synthetic oligonucleotide
  Antisense strand to SEQ ID NO: 2266308
aauuuagguacacaaugau

SEQ ID NO: 2266310 - RNA, 19 nt, Artificial Sequence
  Description of Artificial Sequence: Synthetic oligonucleotide
  Sense strand starting at position 521 of SEQ ID NO: 1884446
cuacuuagguuucccaaga

SEQ ID NO: 2266311 - RNA, 19 nt, Artificial Sequence
  Description of Artificial Sequence: Synthetic oligonucleotide
  Antisense strand to SEQ ID NO: 2266310
ucuugggaaaccuaaguag

SEQ ID NO: 2266312 - RNA, 19 nt, Artificial Sequence
  Description of Artificial Sequence: Synthetic oligonucleotide
  Sense strand starting at position 620 of SEQ ID NO: 1884446
aacauuguucuagguagaa

SEQ ID NO: 2266313 - RNA, 19 nt, Artificial Sequence
  Description of Artificial Sequence: Synthetic oligonucleotide
  Antisense strand to SEQ ID NO: 2266312
uucuaccuagaacaauguu

SEQ ID NO: 2266314 - RNA, 19 nt, Artificial Sequence
  Description of Artificial Sequence: Synthetic oligonucleotide
  Sense strand starting at position 624 of SEQ ID NO: 1884446
uuguucuagguagaacaau

SEQ ID NO: 2266315 - RNA, 19 nt, Artificial Sequence
  Description of Artificial Sequence: Synthetic oligonucleotide
  Antisense strand to SEQ ID NO: 2266314
auuguucuaccuagaacaa

SEQ ID NO: 2266316 - RNA, 19 nt, Artificial Sequence
  Description of Artificial Sequence: Synthetic oligonucleotide
  Sense strand starting at position 655 of SEQ ID NO: 1884446
auuaaauggcaagguuaua

SEQ ID NO: 2266317 - RNA, 19 nt, Artificial Sequence
  Description of Artificial Sequence: Synthetic oligonucleotide
  Antisense strand to SEQ ID NO: 2266316
uauaaccuugccauuuaau

SEQ ID NO: 2266318 - RNA, 19 nt, Artificial Sequence
  Description of Artificial Sequence: Synthetic oligonucleotide
  Sense strand starting at position 902 of SEQ ID NO: 1884446
cagccaugugcugaacaua

SEQ ID NO: 2266319 - RNA, 19 nt, Artificial Sequence
  Description of Artificial Sequence: Synthetic oligonucleotide
  Antisense strand to SEQ ID NO: 2266318
uauguucagcacauggcug

SEQ ID NO: 2266320 - RNA, 19 nt, Artificial Sequence
  Description of Artificial Sequence: Synthetic oligonucleotide
  Sense strand starting at position 925 of SEQ ID NO: 1884446
guaaauaacugucuccaug

SEQ ID NO: 2266321 - RNA, 19 nt, Artificial Sequence
  Description of Artificial Sequence: Synthetic oligonucleotide
  Antisense strand to SEQ ID NO: 2266320
cauggagacaguuauuuac

SEQ ID NO: 2266322 - RNA, 19 nt, Artificial Sequence
  Description of Artificial Sequence: Synthetic oligonucleotide
  Sense strand starting at position 1059 of SEQ ID NO: 1884446
aaugauuguuaguugacca

SEQ ID NO: 2266323 - RNA, 19 nt, Artificial Sequence
  Description of Artificial Sequence: Synthetic oligonucleotide
  Antisense strand to SEQ ID NO: 2266322
uggucaacuaacaaucauu

SEQ ID NO: 2266324 - RNA, 19 nt, Artificial Sequence
  Description of Artificial Sequence: Synthetic oligonucleotide
  Sense strand starting at position 1067 of SEQ ID NO: 1884446
uuaguugaccacuacgaaa

SEQ ID NO: 2266325 - RNA, 19 nt, Artificial Sequence
  Description of Artificial Sequence: Synthetic oligonucleotide
  Antisense strand to SEQ ID NO: 2266324
uuucguaguggucaacuaa

SEQ ID NO: 2266326 - RNA, 19 nt, Artificial Sequence
  Description of Artificial Sequence: Synthetic oligonucleotide
  Sense strand starting at position 1264 of SEQ ID NO: 1884446
gaaauuguuccagaggcuu

SEQ ID NO: 2266327 - RNA, 19 nt, Artificial Sequence
  Description of Artificial Sequence: Synthetic oligonucleotide
  Antisense strand to SEQ ID NO: 2266326
aagccucuggaacaauuuc

SEQ ID NO: 2266328 - RNA, 19 nt, Artificial Sequence
  Description of Artificial Sequence: Synthetic oligonucleotide
  Sense strand starting at position 1374 of SEQ ID NO: 1884446
gguaauuacugaucauguu

SEQ ID NO: 2266329 - RNA, 19 nt, Artificial Sequence
  Description of Artificial Sequence: Synthetic oligonucleotide
  Antisense strand to SEQ ID NO: 2266328
aacaugaucaguaauuacc

SEQ ID NO: 2266330 - RNA, 19 nt, Artificial Sequence
  Description of Artificial Sequence: Synthetic oligonucleotide
  Sense strand starting at position 1375 of SEQ ID NO: 1884446
guaauuacugaucauguuc

SEQ ID NO: 2266331 - RNA, 19 nt, Artificial Sequence
  Description of Artificial Sequence: Synthetic oligonucleotide
  Antisense strand to SEQ ID NO: 2266330
gaacaugaucaguaauuac

SEQ ID NO: 2266332 - RNA, 19 nt, Artificial Sequence
  Description of Artificial Sequence: Synthetic oligonucleotide
  Sense strand starting at position 1384 of SEQ ID NO: 1884446
gaucauguucucugaugua

SEQ ID NO: 2266333 - RNA, 19 nt, Artificial Sequence
  Description of Artificial Sequence: Synthetic oligonucleotide
  Antisense strand to SEQ ID NO: 2266332
uacaucagagaacaugauc

SEQ ID NO: 2266334 - RNA, 19 nt, Artificial Sequence
  Description of Artificial Sequence: Synthetic oligonucleotide
  Sense strand starting at position 1423 of SEQ ID NO: 1884446
ggagaaucaaauggguagu

SEQ ID NO: 2266335 - RNA, 19 nt, Artificial Sequence
  Description of Artificial Sequence: Synthetic oligonucleotide
  Antisense strand to SEQ ID NO: 2266334
acuacccauuugauucucc

SEQ ID NO: 2266336 - RNA, 19 nt, Artificial Sequence
  Description of Artificial Sequence: Synthetic oligonucleotide
  Sense strand starting at position 1540 of SEQ ID NO: 1884446
aggaaauguacagguauua

SEQ ID NO: 2266337 - RNA, 19 nt, Artificial Sequence
  Description of Artificial Sequence: Synthetic oligonucleotide
  Antisense strand to SEQ ID NO: 2266336
uaauaccuguacauuuccu

SEQ ID NO: 2266338 - RNA, 19 nt, Artificial Sequence
  Description of Artificial Sequence: Synthetic oligonucleotide
  Sense strand starting at position 1582 of SEQ ID NO: 1884446
ucuggaaaucugugaggag

SEQ ID NO: 2266339 - RNA, 19 nt, Artificial Sequence
  Description of Artificial Sequence: Synthetic oligonucleotide
  Antisense strand to SEQ ID NO: 2266338
cuccucacagauuuccaga

SEQ ID NO: 2266340 - RNA, 19 nt, Artificial Sequence
  Description of Artificial Sequence: Synthetic oligonucleotide
  Sense strand starting at position 1672 of SEQ ID NO: 1884446
ugauauccuuuaucgaguu

SEQ ID NO: 2266341 - RNA, 19 nt, Artificial Sequence
  Description of Artificial Sequence: Synthetic oligonucleotide
  Antisense strand to SEQ ID NO: 2266340
aacucgauaaaggauauca

SEQ ID NO: 2266342 - RNA, 19 nt, Artificial Sequence
  Description of Artificial Sequence: Synthetic oligonucleotide
  Sense strand starting at position 2843 of SEQ ID NO: 1884446
cugagucuuuggguccaca

SEQ ID NO: 2266343 - RNA, 19 nt, Artificial Sequence
  Description of Artificial Sequence: Synthetic oligonucleotide
  Antisense strand to SEQ ID NO: 2266342
uguggacccaaagacucag

SEQ ID NO: 2266344 - RNA, 19 nt, Artificial Sequence
  Description of Artificial Sequence: Synthetic oligonucleotide
  Sense strand starting at position 2963 of SEQ ID NO: 1884446
cgccuuaggagcuauaaug

SEQ ID NO: 2266345 - RNA, 19 nt, Artificial Sequence
  Description of Artificial Sequence: Synthetic oligonucleotide
  Antisense strand to SEQ ID NO: 2266344
cauuauagcuccuaaggcg

SEQ ID NO: 2266346 - RNA, 19 nt, Artificial Sequence
  Description of Artificial Sequence: Synthetic oligonucleotide
  Sense strand starting at position 3286 of SEQ ID NO: 1884446
ucacaaucacuauguuagu

SEQ ID NO: 2266347 - RNA, 19 nt, Artificial Sequence
  Description of Artificial Sequence: Synthetic oligonucleotide
  Antisense strand to SEQ ID NO: 2266346
acuaacauagugauuguga

SEQ ID NO: 2266348 - RNA, 19 nt, Artificial Sequence
  Description of Artificial Sequence: Synthetic oligonucleotide
  Sense strand starting at position 3299 of SEQ ID NO: 1884446
guuaguuagcaauauauug

SEQ ID NO: 2266349 - RNA, 19 nt, Artificial Sequence
  Description of Artificial Sequence: Synthetic oligonucleotide
  Antisense strand to SEQ ID NO: 2266348
caauauauugcuaacuaac

SEQ ID NO: 2266350 - RNA, 19 nt, Artificial Sequence
  Description of Artificial Sequence: Synthetic oligonucleotide
  Sense strand starting at position 3342 of SEQ ID NO: 1884446
caauauaugcucugugaug

SEQ ID NO: 2266351 - RNA, 19 nt, Artificial Sequence
  Description of Artificial Sequence: Synthetic oligonucleotide
  Antisense strand to SEQ ID NO: 2266350
caucacagagcauauauug

SEQ ID NO: 2266352 - RNA, 19 nt, Artificial Sequence
  Description of Artificial Sequence: Synthetic oligonucleotide
  Sense strand starting at position 3384 of SEQ ID NO: 1884446
ccuuuaaagugagcacagu

SEQ ID NO: 2266353 - RNA, 19 nt, Artificial Sequence
  Description of Artificial Sequence: Synthetic oligonucleotide
  Antisense strand to SEQ ID NO: 2266352
acugugcucacuuuaaagg

SEQ ID NO: 2266354 - RNA, 19 nt, Artificial Sequence
  Description of Artificial Sequence: Synthetic oligonucleotide
  Sense strand starting at position 3401 of SEQ ID NO: 1884446
guaugaagcuaucuuagua

SEQ ID NO: 2266355 - RNA, 19 nt, Artificial Sequence
  Description of Artificial Sequence: Synthetic oligonucleotide
  Antisense strand to SEQ ID NO: 2266354
uacuaagauagcuucauac

SEQ ID NO: 2266356 - RNA, 19 nt, Artificial Sequence
  Description of Artificial Sequence: Synthetic oligonucleotide
  Sense strand starting at position 3408 of SEQ ID NO: 1884446
gcuaucuuaguagaggaau

SEQ ID NO: 2266357 - RNA, 19 nt, Artificial Sequence
  Description of Artificial Sequence: Synthetic oligonucleotide
  Antisense strand to SEQ ID NO: 2266356
auuccucuacuaagauagc

SEQ ID NO: 2266358 - RNA, 19 nt, Artificial Sequence
  Description of Artificial Sequence: Synthetic oligonucleotide
  Sense strand starting at position 3499 of SEQ ID NO: 1884446
gaggucauccagugaagca

SEQ ID NO: 2266359 - RNA, 19 nt, Artificial Sequence
  Description of Artificial Sequence: Synthetic oligonucleotide
  Antisense strand to SEQ ID NO: 2266358
ugcuucacuggaugaccuc

SEQ ID NO: 2266360 - RNA, 19 nt, Artificial Sequence
  Description of Artificial Sequence: Synthetic oligonucleotide
  Sense strand starting at position 3524 of SEQ ID NO: 1884446
cagcuaucggcugagaaug

SEQ ID NO: 2266361 - RNA, 19 nt, Artificial Sequence
  Description of Artificial Sequence: Synthetic oligonucleotide
  Antisense strand to SEQ ID NO: 2266360
cauucucagccgauagcug

SEQ ID NO: 2266362 - RNA, 19 nt, Artificial Sequence
  Description of Artificial Sequence: Synthetic oligonucleotide
  Sense strand starting at position 3534 of SEQ ID NO: 1884446
cugagaauguagucccucu

SEQ ID NO: 2266363 - RNA, 19 nt, Artificial Sequence
  Description of Artificial Sequence: Synthetic oligonucleotide
  Antisense strand to SEQ ID NO: 2266362
agagggacuacauucucag

SEQ ID NO: 2266364 - RNA, 19 nt, Artificial Sequence
  Description of Artificial Sequence: Synthetic oligonucleotide
  Sense strand starting at position 3712 of SEQ ID NO: 1884446
uguggaaaguugucuauca

SEQ ID NO: 2266365 - RNA, 19 nt, Artificial Sequence
  Description of Artificial Sequence: Synthetic oligonucleotide
  Antisense strand to SEQ ID NO: 2266364
ugauagacaacuuuccaca

SEQ ID NO: 2266366 - RNA, 19 nt, Artificial Sequence
  Description of Artificial Sequence: Synthetic oligonucleotide
  Sense strand starting at position 3713 of SEQ ID NO: 1884446
guggaaaguugucuaucac

SEQ ID NO: 2266367 - RNA, 19 nt, Artificial Sequence
  Description of Artificial Sequence: Synthetic oligonucleotide
  Antisense strand to SEQ ID NO: 2266366
gugauagacaacuuuccac

SEQ ID NO: 2266368 - RNA, 19 nt, Artificial Sequence
  Description of Artificial Sequence: Synthetic oligonucleotide
  Sense strand starting at position 3714 of SEQ ID NO: 1884446
uggaaaguugucuaucacu

SEQ ID NO: 2266369 - RNA, 19 nt, Artificial Sequence
  Description of Artificial Sequence: Synthetic oligonucleotide
  Antisense strand to SEQ ID NO: 2266368
agugauagacaacuuucca

SEQ ID NO: 2266370 - RNA, 19 nt, Artificial Sequence
  Description of Artificial Sequence: Synthetic oligonucleotide
  Sense strand starting at position 3836 of SEQ ID NO: 1884446
ccaaguuugcugucgguua

SEQ ID NO: 2266371 - RNA, 19 nt, Artificial Sequence
  Description of Artificial Sequence: Synthetic oligonucleotide
  Antisense strand to SEQ ID NO: 2266370
uaaccgacagcaaacuugg

SEQ ID NO: 2266372 - RNA, 19 nt, Artificial Sequence
  Description of Artificial Sequence: Synthetic oligonucleotide
  Sense strand starting at position 3840 of SEQ ID NO: 1884446
guuugcugucgguuaugca

SEQ ID NO: 2266373 - RNA, 19 nt, Artificial Sequence
  Description of Artificial Sequence: Synthetic oligonucleotide
  Antisense strand to SEQ ID NO: 2266372
ugcauaaccgacagcaaac

SEQ ID NO: 2266374 - RNA, 19 nt, Artificial Sequence
  Description of Artificial Sequence: Synthetic oligonucleotide
  Sense strand starting at position 3936 of SEQ ID NO: 1884446
ugaaacaucccuuguuuag

SEQ ID NO: 2266375 - RNA, 19 nt, Artificial Sequence
  Description of Artificial Sequence: Synthetic oligonucleotide
  Antisense strand to SEQ ID NO: 2266374
cuaaacaagggauguuuca

SEQ ID NO: 2266376 - RNA, 19 nt, Artificial Sequence
  Description of Artificial Sequence: Synthetic oligonucleotide
  Sense strand starting at position 205 of SEQ ID NO: 1884447
gcauuccauugauuaagga

SEQ ID NO: 2266377 - RNA, 19 nt, Artificial Sequence
  Description of Artificial Sequence: Synthetic oligonucleotide
  Antisense strand to SEQ ID NO: 2266376
uccuuaaucaauggaaugc

SEQ ID NO: 2266378 - RNA, 19 nt, Artificial Sequence
  Description of Artificial Sequence: Synthetic oligonucleotide
  Sense strand starting at position 284 of SEQ ID NO: 1884447
guauauggaucaccaacau

SEQ ID NO: 2266379 - RNA, 19 nt, Artificial Sequence
  Description of Artificial Sequence: Synthetic oligonucleotide
  Antisense strand to SEQ ID NO: 2266378
auguuggugauccauauac

SEQ ID NO: 2266380 - RNA, 19 nt, Artificial Sequence
  Description of Artificial Sequence: Synthetic oligonucleotide
  Sense strand starting at position 428 of SEQ ID NO: 1884447
gcaugaagaggcuaaguaa

SEQ ID NO: 2266381 - RNA, 19 nt, Artificial Sequence
  Description of Artificial Sequence: Synthetic oligonucleotide
  Antisense strand to SEQ ID NO: 2266380
uuacuuagccucuucaugc

SEQ ID NO: 2266382 - RNA, 19 nt, Artificial Sequence
  Description of Artificial Sequence: Synthetic oligonucleotide
  Sense strand starting at position 431 of SEQ ID NO: 1884447
ugaagaggcuaaguaacuu

SEQ ID NO: 2266383 - RNA, 19 nt, Artificial Sequence
  Description of Artificial Sequence: Synthetic oligonucleotide
  Antisense strand to SEQ ID NO: 2266382
aaguuacuuagccucuuca

SEQ ID NO: 2266384 - RNA, 19 nt, Artificial Sequence
  Description of Artificial Sequence: Synthetic oligonucleotide
  Sense strand starting at position 485 of SEQ ID NO: 1884447
ggaugucaaccagguggua

SEQ ID NO: 2266385 - RNA, 19 nt, Artificial Sequence
  Description of Artificial Sequence: Synthetic oligonucleotide
  Antisense strand to SEQ ID NO: 2266384
uaccaccugguugacaucc

SEQ ID NO: 2266386 - RNA, 19 nt, Artificial Sequence
  Description of Artificial Sequence: Synthetic oligonucleotide
  Sense strand starting at position 531 of SEQ ID NO: 1884447
acaugauacugcuccucga

SEQ ID NO: 2266387 - RNA, 19 nt, Artificial Sequence
  Description of Artificial Sequence: Synthetic oligonucleotide
  Antisense strand to SEQ ID NO: 2266386
ucgaggagcaguaucaugu

SEQ ID NO: 2266388 - RNA, 19 nt, Artificial Sequence
  Description of Artificial Sequence: Synthetic oligonucleotide
  Sense strand starting at position 725 of SEQ ID NO: 1884447
agguuauucuaauuaagug

SEQ ID NO: 2266389 - RNA, 19 nt, Artificial Sequence
  Description of Artificial Sequence: Synthetic oligonucleotide
  Antisense strand to SEQ ID NO: 2266388
cacuuaauuagaauaaccu

SEQ ID NO: 2266390 - RNA, 19 nt, Artificial Sequence
  Description of Artificial Sequence: Synthetic oligonucleotide
  Sense strand starting at position 778 of SEQ ID NO: 1884447
ggcuaaugugaagguauaa

SEQ ID NO: 2266391 - RNA, 19 nt, Artificial Sequence
  Description of Artificial Sequence: Synthetic oligonucleotide
  Antisense strand to SEQ ID NO: 2266390
uuauaccuucacauuagcc

SEQ ID NO: 2266392 - RNA, 19 nt, Artificial Sequence
  Description of Artificial Sequence: Synthetic oligonucleotide
  Sense strand starting at position 980 of SEQ ID NO: 1884447
gagagaugcaguggugauu

SEQ ID NO: 2266393 - RNA, 19 nt, Artificial Sequence
  Description of Artificial Sequence: Synthetic oligonucleotide
  Antisense strand to SEQ ID NO: 2266392
aaucaccacugcaucucuc

SEQ ID NO: 2266394 - RNA, 19 nt, Artificial Sequence
  Description of Artificial Sequence: Synthetic oligonucleotide
  Sense strand starting at position 992 of SEQ ID NO: 1884447
ggugauuccaacuggagau

SEQ ID NO: 2266395 - RNA, 19 nt, Artificial Sequence
  Description of Artificial Sequence: Synthetic oligonucleotide
  Antisense strand to SEQ ID NO: 2266394
aucuccaguuggaaucacc

SEQ ID NO: 2266396 - RNA, 19 nt, Artificial Sequence
  Description of Artificial Sequence: Synthetic oligonucleotide
  Sense strand starting at position 993 of SEQ ID NO: 1884447
gugauuccaacuggagauu

SEQ ID NO: 2266397 - RNA, 19 nt, Artificial Sequence
  Description of Artificial Sequence: Synthetic oligonucleotide
  Antisense strand to SEQ ID NO: 2266396
aaucuccaguuggaaucac

SEQ ID NO: 2266398 - RNA, 19 nt, Artificial Sequence
  Description of Artificial Sequence: Synthetic oligonucleotide
  Sense strand starting at position 1002 of SEQ ID NO: 1884447
acuggagauuccuccagac

SEQ ID NO: 2266399 - RNA, 19 nt, Artificial Sequence
  Description of Artificial Sequence: Synthetic oligonucleotide
  Antisense strand to SEQ ID NO: 2266398
gucuggaggaaucuccagu

SEQ ID NO: 2266400 - RNA, 19 nt, Artificial Sequence
  Description of Artificial Sequence: Synthetic oligonucleotide
  Sense strand starting at position 1100 of SEQ ID NO: 1884447
acaugagugaauugaagca

SEQ ID NO: 2266401 - RNA, 19 nt, Artificial Sequence
  Description of Artificial Sequence: Synthetic oligonucleotide
  Antisense strand to SEQ ID NO: 2266400
ugcuucaauucacucaugu

SEQ ID NO: 2266402 - RNA, 19 nt, Artificial Sequence
  Description of Artificial Sequence: Synthetic oligonucleotide
  Sense strand starting at position 1306 of SEQ ID NO: 1884447
gcaaucaguccaggauaca

SEQ ID NO: 2266403 - RNA, 19 nt, Artificial Sequence
  Description of Artificial Sequence: Synthetic oligonucleotide
  Antisense strand to SEQ ID NO: 2266402
uguauccuggacugauugc

SEQ ID NO: 2266404 - RNA, 19 nt, Artificial Sequence
  Description of Artificial Sequence: Synthetic oligonucleotide
  Sense strand starting at position 1336 of SEQ ID NO: 1884447
agguguucuaaagaaagca

SEQ ID NO: 2266405 - RNA, 19 nt, Artificial Sequence
  Description of Artificial Sequence: Synthetic oligonucleotide
  Antisense strand to SEQ ID NO: 2266404
ugcuuucuuuagaacaccu

SEQ ID NO: 2266406 - RNA, 19 nt, Artificial Sequence
  Description of Artificial Sequence: Synthetic oligonucleotide
  Sense strand starting at position 1390 of SEQ ID NO: 1884447
augagaaacugucuugauu

SEQ ID NO: 2266407 - RNA, 19 nt, Artificial Sequence
  Description of Artificial Sequence: Synthetic oligonucleotide
  Antisense strand to SEQ ID NO: 2266406
aaucaagacaguuucucau

SEQ ID NO: 2266408 - RNA, 19 nt, Artificial Sequence
  Description of Artificial Sequence: Synthetic oligonucleotide
  Sense strand starting at position 1393 of SEQ ID NO: 1884447
agaaacugucuugauugua

SEQ ID NO: 2266409 - RNA, 19 nt, Artificial Sequence
  Description of Artificial Sequence: Synthetic oligonucleotide
  Antisense strand to SEQ ID NO: 2266408
uacaaucaagacaguuucu

SEQ ID NO: 2266410 - RNA, 19 nt, Artificial Sequence
  Description of Artificial Sequence: Synthetic oligonucleotide
  Sense strand starting at position 1401 of SEQ ID NO: 1884447
ucuugauuguacuuguaag

SEQ ID NO: 2266411 - RNA, 19 nt, Artificial Sequence
  Description of Artificial Sequence: Synthetic oligonucleotide
  Antisense strand to SEQ ID NO: 2266410
cuuacaaguacaaucaaga

SEQ ID NO: 2266412 - RNA, 19 nt, Artificial Sequence
  Description of Artificial Sequence: Synthetic oligonucleotide
  Sense strand starting at position 1418 of SEQ ID NO: 1884447
agaaaugauugugcgguua

SEQ ID NO: 2266413 - RNA, 19 nt, Artificial Sequence
  Description of Artificial Sequence: Synthetic oligonucleotide
  Antisense strand to SEQ ID NO: 2266412
uaaccgcacaaucauuucu

SEQ ID NO: 2266414 - RNA, 19 nt, Artificial Sequence
  Description of Artificial Sequence: Synthetic oligonucleotide
  Sense strand starting at position 1492 of SEQ ID NO: 1884447
cuuaauaacagguguggaa

SEQ ID NO: 2266415 - RNA, 19 nt, Artificial Sequence
  Description of Artificial Sequence: Synthetic oligonucleotide
  Antisense strand to SEQ ID NO: 2266414
uuccacaccuguuauuaag

SEQ ID NO: 2266416 - RNA, 19 nt, Artificial Sequence
  Description of Artificial Sequence: Synthetic oligonucleotide
  Sense strand starting at position 1494 of SEQ ID NO: 1884447
uaauaacagguguggaaua

SEQ ID NO: 2266417 - RNA, 19 nt, Artificial Sequence
  Description of Artificial Sequence: Synthetic oligonucleotide
  Antisense strand to SEQ ID NO: 2266416
uauuccacaccuguuauua

SEQ ID NO: 2266418 - RNA, 19 nt, Artificial Sequence
  Description of Artificial Sequence: Synthetic oligonucleotide
  Sense strand starting at position 1704 of SEQ ID NO: 1884447
guguaaugggaauaacgau

SEQ ID NO: 2266419 - RNA, 19 nt, Artificial Sequence
  Description of Artificial Sequence: Synthetic oligonucleotide
  Antisense strand to SEQ ID NO: 2266418
aucguuauucccauuacac

SEQ ID NO: 2266420 - RNA, 19 nt, Artificial Sequence
  Description of Artificial Sequence: Synthetic oligonucleotide
  Sense strand starting at position 1712 of SEQ ID NO: 1884447
ggaauaacgauccguaccu

SEQ ID NO: 2266421 - RNA, 19 nt, Artificial Sequence
  Description of Artificial Sequence: Synthetic oligonucleotide
  Antisense strand to SEQ ID NO: 2266420
agguacggaucguuauucc

SEQ ID NO: 2266422 - RNA, 19 nt, Artificial Sequence
  Description of Artificial Sequence: Synthetic oligonucleotide
  Sense strand starting at position 1738 of SEQ ID NO: 1884447
gugcgaggcggguuguaaa

SEQ ID NO: 2266423 - RNA, 19 nt, Artificial Sequence
  Description of Artificial Sequence: Synthetic oligonucleotide
  Antisense strand to SEQ ID NO: 2266422
uuuacaacccgccucgcac

SEQ ID NO: 2266424 - RNA, 19 nt, Artificial Sequence
  Description of Artificial Sequence: Synthetic oligonucleotide
  Sense strand starting at position 2633 of SEQ ID NO: 1884447
agaauaggauuaggagaaa

SEQ ID NO: 2266425 - RNA, 19 nt, Artificial Sequence
  Description of Artificial Sequence: Synthetic oligonucleotide
  Antisense strand to SEQ ID NO: 2266424
uuucuccuaauccuauucu

SEQ ID NO: 2266426 - RNA, 19 nt, Artificial Sequence
  Description of Artificial Sequence: Synthetic oligonucleotide
  Sense strand starting at position 2750 of SEQ ID NO: 1884447
gggugugugccucuuugua

SEQ ID NO: 2266427 - RNA, 19 nt, Artificial Sequence
  Description of Artificial Sequence: Synthetic oligonucleotide
  Antisense strand to SEQ ID NO: 2266426
uacaaagaggcacacaccc

SEQ ID NO: 2266428 - RNA, 19 nt, Artificial Sequence
  Description of Artificial Sequence: Synthetic oligonucleotide
  Sense strand starting at position 2916 of SEQ ID NO: 1884447
uuuguuucuggagaguaaa

SEQ ID NO: 2266429 - RNA, 19 nt, Artificial Sequence
  Description of Artificial Sequence: Synthetic oligonucleotide
  Antisense strand to SEQ ID NO: 2266428
uuuacucuccagaaacaaa

SEQ ID NO: 2266430 - RNA, 19 nt, Artificial Sequence
  Description of Artificial Sequence: Synthetic oligonucleotide
  Sense strand starting at position 2928 of SEQ ID NO: 1884447
gaguaaauuccuggagcaa

SEQ ID NO: 2266431 - RNA, 19 nt, Artificial Sequence
  Description of Artificial Sequence: Synthetic oligonucleotide
  Antisense strand to SEQ ID NO: 2266430
uugcuccaggaauuuacuc

SEQ ID NO: 2266432 - RNA, 19 nt, Artificial Sequence
  Description of Artificial Sequence: Synthetic oligonucleotide
  Sense strand starting at position 2929 of SEQ ID NO: 1884447
aguaaauuccuggagcaau

SEQ ID NO: 2266433 - RNA, 19 nt, Artificial Sequence
  Description of Artificial Sequence: Synthetic oligonucleotide
  Antisense strand to SEQ ID NO: 2266432
auugcuccaggaauuuacu

SEQ ID NO: 2266434 - RNA, 19 nt, Artificial Sequence
  Description of Artificial Sequence: Synthetic oligonucleotide
  Sense strand starting at position 3122 of SEQ ID NO: 1884447
aaguccuucuggguuccaa

SEQ ID NO: 2266435 - RNA, 19 nt, Artificial Sequence
  Description of Artificial Sequence: Synthetic oligonucleotide
  Antisense strand to SEQ ID NO: 2266434
uuggaacccagaaggacuu

SEQ ID NO: 2266436 - RNA, 19 nt, Artificial Sequence
  Description of Artificial Sequence: Synthetic oligonucleotide
  Sense strand starting at position 3302 of SEQ ID NO: 1884447
gggccaauuccuggucaca

SEQ ID NO: 2266437 - RNA, 19 nt, Artificial Sequence
  Description of Artificial Sequence: Synthetic oligonucleotide
  Antisense strand to SEQ ID NO: 2266436
ugugaccaggaauuggccc

SEQ ID NO: 2266438 - RNA, 19 nt, Artificial Sequence
  Description of Artificial Sequence: Synthetic oligonucleotide
  Sense strand starting at position 3674 of SEQ ID NO: 1884447
cuuaaugugcaaugugagu

SEQ ID NO: 2266439 - RNA, 19 nt, Artificial Sequence
  Description of Artificial Sequence: Synthetic oligonucleotide
  Antisense strand to SEQ ID NO: 2266438
acucacauugcacauuaag

SEQ ID NO: 2266440 - RNA, 19 nt, Artificial Sequence
  Description of Artificial Sequence: Synthetic oligonucleotide
  Sense strand starting at position 3711 of SEQ ID NO: 1884447
gagauagguucuuugccca

SEQ ID NO: 2266441 - RNA, 19 nt, Artificial Sequence
  Description of Artificial Sequence: Synthetic oligonucleotide
  Antisense strand to SEQ ID NO: 2266440
ugggcaaagaaccuaucuc

SEQ ID NO: 2266442 - RNA, 19 nt, Artificial Sequence
  Description of Artificial Sequence: Synthetic oligonucleotide
  Sense strand starting at position 3807 of SEQ ID NO: 1884447
auuugauccucugaguaac

SEQ ID NO: 2266443 - RNA, 19 nt, Artificial Sequence
  Description of Artificial Sequence: Synthetic oligonucleotide
  Antisense strand to SEQ ID NO: 2266442
guuacucagaggaucaaau

SEQ ID NO: 2266444 - RNA, 19 nt, Artificial Sequence
  Description of Artificial Sequence: Synthetic oligonucleotide
  Sense strand starting at position 3827 of SEQ ID NO: 1884447
ccaugaggucauuacuauu

SEQ ID NO: 2266445 - RNA, 19 nt, Artificial Sequence
  Description of Artificial Sequence: Synthetic oligonucleotide
  Antisense strand to SEQ ID NO: 2266444
aauaguaaugaccucaugg

SEQ ID NO: 2266446 - RNA, 19 nt, Artificial Sequence
  Description of Artificial Sequence: Synthetic oligonucleotide
  Sense strand starting at position 3838 of SEQ ID NO: 1884447
uuacuauugucgucaccau

SEQ ID NO: 2266447 - RNA, 19 nt, Artificial Sequence
  Description of Artificial Sequence: Synthetic oligonucleotide
  Antisense strand to SEQ ID NO: 2266446
auggugacgacaauaguaa

SEQ ID NO: 2266448 - RNA, 19 nt, Artificial Sequence
  Description of Artificial Sequence: Synthetic oligonucleotide
  Sense strand starting at position 3892 of SEQ ID NO: 1884447
gcaaucugcccagggugau

SEQ ID NO: 2266449 - RNA, 19 nt, Artificial Sequence
  Description of Artificial Sequence: Synthetic oligonucleotide
  Antisense strand to SEQ ID NO: 2266448
aucacccugggcagauugc

SEQ ID NO: 2266450 - RNA, 19 nt, Artificial Sequence
  Description of Artificial Sequence: Synthetic oligonucleotide
  Sense strand starting at position 3907 of SEQ ID NO: 1884447
ugaugaucccgcugguaag

SEQ ID NO: 2266451 - RNA, 19 nt, Artificial Sequence
  Description of Artificial Sequence: Synthetic oligonucleotide
  Antisense strand to SEQ ID NO: 2266450
cuuaccagcgggaucauca

SEQ ID NO: 2266452 - RNA, 19 nt, Artificial Sequence
  Description of Artificial Sequence: Synthetic oligonucleotide
  Sense strand starting at position 3908 of SEQ ID NO: 1884447
gaugaucccgcugguaaga

SEQ ID NO: 2266453 - RNA, 19 nt, Artificial Sequence
  Description of Artificial Sequence: Synthetic oligonucleotide
  Antisense strand to SEQ ID NO: 2266452
ucuuaccagcgggaucauc

SEQ ID NO: 2266454 - RNA, 19 nt, Artificial Sequence
  Description of Artificial Sequence: Synthetic oligonucleotide
  Sense strand starting at position 3974 of SEQ ID NO: 1884447
ucauaaucacuccgaaaug

SEQ ID NO: 2266455 - RNA, 19 nt, Artificial Sequence
  Description of Artificial Sequence: Synthetic oligonucleotide
  Antisense strand to SEQ ID NO: 2266454
cauuucggagugauuauga

SEQ ID NO: 2266456 - RNA, 19 nt, Artificial Sequence
  Description of Artificial Sequence: Synthetic oligonucleotide
  Sense strand starting at position 109 of SEQ ID NO: 1884448
gcaugaagaggcuaaguaa

SEQ ID NO: 2266457 - RNA, 19 nt, Artificial Sequence
  Description of Artificial Sequence: Synthetic oligonucleotide
  Antisense strand to SEQ ID NO: 2266456
uuacuuagccucuucaugc

SEQ ID NO: 2266458 - RNA, 19 nt, Artificial Sequence
  Description of Artificial Sequence: Synthetic oligonucleotide
  Sense strand starting at position 112 of SEQ ID NO: 1884448
ugaagaggcuaaguaacuu

SEQ ID NO: 2266459 - RNA, 19 nt, Artificial Sequence
  Description of Artificial Sequence: Synthetic oligonucleotide
  Antisense strand to SEQ ID NO: 2266458
aaguuacuuagccucuuca

SEQ ID NO: 2266460 - RNA, 19 nt, Artificial Sequence
  Description of Artificial Sequence: Synthetic oligonucleotide
  Sense strand starting at position 166 of SEQ ID NO: 1884448
ggaugucaaccagguggua

SEQ ID NO: 2266461 - RNA, 19 nt, Artificial Sequence
  Description of Artificial Sequence: Synthetic oligonucleotide
  Antisense strand to SEQ ID NO: 2266460
uaccaccugguugacaucc

SEQ ID NO: 2266462 - RNA, 19 nt, Artificial Sequence
  Description of Artificial Sequence: Synthetic oligonucleotide
  Sense strand starting at position 212 of SEQ ID NO: 1884448
acaugauacugcuccucga

SEQ ID NO: 2266463 - RNA, 19 nt, Artificial Sequence
  Description of Artificial Sequence: Synthetic oligonucleotide
  Antisense strand to SEQ ID NO: 2266462
ucgaggagcaguaucaugu

SEQ ID NO: 2266464 - RNA, 19 nt, Artificial Sequence
  Description of Artificial Sequence: Synthetic oligonucleotide
  Sense strand starting at position 406 of SEQ ID NO: 1884448
agguuauucuaauuaagug

SEQ ID NO: 2266465 - RNA, 19 nt, Artificial Sequence
  Description of Artificial Sequence: Synthetic oligonucleotide
  Antisense strand to SEQ ID NO: 2266464
cacuuaauuagaauaaccu

SEQ ID NO: 2266466 - RNA, 19 nt, Artificial Sequence
  Description of Artificial Sequence: Synthetic oligonucleotide
  Sense strand starting at position 459 of SEQ ID NO: 1884448
ggcuaaugugaagguauaa

SEQ ID NO: 2266467 - RNA, 19 nt, Artificial Sequence
  Description of Artificial Sequence: Synthetic oligonucleotide
  Antisense strand to SEQ ID NO: 2266466
uuauaccuucacauuagcc

SEQ ID NO: 2266468 - RNA, 19 nt, Artificial Sequence
  Description of Artificial Sequence: Synthetic oligonucleotide
  Sense strand starting at position 661 of SEQ ID NO: 1884448
gagagaugcaguggugauu

SEQ ID NO: 2266469 - RNA, 19 nt, Artificial Sequence
  Description of Artificial Sequence: Synthetic oligonucleotide
  Antisense strand to SEQ ID NO: 2266468
aaucaccacugcaucucuc

SEQ ID NO: 2266470 - RNA, 19 nt, Artificial Sequence
  Description of Artificial Sequence: Synthetic oligonucleotide
  Sense strand starting at position 673 of SEQ ID NO: 1884448
ggugauuccaacuggagau

SEQ ID NO: 2266471 - RNA, 19 nt, Artificial Sequence
  Description of Artificial Sequence: Synthetic oligonucleotide
  Antisense strand to SEQ ID NO: 2266470
aucuccaguuggaaucacc

SEQ ID NO: 2266472 - RNA, 19 nt, Artificial Sequence
  Description of Artificial Sequence: Synthetic oligonucleotide
  Sense strand starting at position 674 of SEQ ID NO: 1884448
gugauuccaacuggagauu

SEQ ID NO: 2266473 - RNA, 19 nt, Artificial Sequence
  Description of Artificial Sequence: Synthetic oligonucleotide
  Antisense strand to SEQ ID NO: 2266472
aaucuccaguuggaaucac

SEQ ID NO: 2266474 - RNA, 19 nt, Artificial Sequence
  Description of Artificial Sequence: Synthetic oligonucleotide
  Sense strand starting at position 683 of SEQ ID NO: 1884448
acuggagauuccuccagac

SEQ ID NO: 2266475 - RNA, 19 nt, Artificial Sequence
  Description of Artificial Sequence: Synthetic oligonucleotide
  Antisense strand to SEQ ID NO: 2266474
gucuggaggaaucuccagu

SEQ ID NO: 2266476 - RNA, 19 nt, Artificial Sequence
  Description of Artificial Sequence: Synthetic oligonucleotide
  Sense strand starting at position 781 of SEQ ID NO: 1884448
acaugagugaauugaagca

SEQ ID NO: 2266477 - RNA, 19 nt, Artificial Sequence
  Description of Artificial Sequence: Synthetic oligonucleotide
  Antisense strand to SEQ ID NO: 2266476
ugcuucaauucacucaugu

SEQ ID NO: 2266478 - RNA, 19 nt, Artificial Sequence
  Description of Artificial Sequence: Synthetic oligonucleotide
  Sense strand starting at position 987 of SEQ ID NO: 1884448
gcaaucaguccaggauaca

SEQ ID NO: 2266479 - RNA, 19 nt, Artificial Sequence
  Description of Artificial Sequence: Synthetic oligonucleotide
  Antisense strand to SEQ ID NO: 2266478
uguauccuggacugauugc

SEQ ID NO: 2266480 - RNA, 19 nt, Artificial Sequence
  Description of Artificial Sequence: Synthetic oligonucleotide
  Sense strand starting at position 1017 of SEQ ID NO: 1884448
agguguucuaaagaaagca

SEQ ID NO: 2266481 - RNA, 19 nt, Artificial Sequence
  Description of Artificial Sequence: Synthetic oligonucleotide
  Antisense strand to SEQ ID NO: 2266480
ugcuuucuuuagaacaccu

SEQ ID NO: 2266482 - RNA, 19 nt, Artificial Sequence
  Description of Artificial Sequence: Synthetic oligonucleotide
  Sense strand starting at position 1071 of SEQ ID NO: 1884448
augagaaacugucuugauu

SEQ ID NO: 2266483 - RNA, 19 nt, Artificial Sequence
  Description of Artificial Sequence: Synthetic oligonucleotide
  Antisense strand to SEQ ID NO: 2266482
aaucaagacaguuucucau

SEQ ID NO: 2266484 - RNA, 19 nt, Artificial Sequence
  Description of Artificial Sequence: Synthetic oligonucleotide
  Sense strand starting at position 1074 of SEQ ID NO: 1884448
agaaacugucuugauugua

SEQ ID NO: 2266485 - RNA, 19 nt, Artificial Sequence
  Description of Artificial Sequence: Synthetic oligonucleotide
  Antisense strand to SEQ ID NO: 2266484
uacaaucaagacaguuucu

SEQ ID NO: 2266486 - RNA, 19 nt, Artificial Sequence
  Description of Artificial Sequence: Synthetic oligonucleotide
  Sense strand starting at position 1082 of SEQ ID NO: 1884448
ucuugauuguacuuguaag

SEQ ID NO: 2266487 - RNA, 19 nt, Artificial Sequence
  Description of Artificial Sequence: Synthetic oligonucleotide
  Antisense strand to SEQ ID NO: 2266486
cuuacaaguacaaucaaga

SEQ ID NO: 2266488 - RNA, 19 nt, Artificial Sequence
  Description of Artificial Sequence: Synthetic oligonucleotide
  Sense strand starting at position 1099 of SEQ ID NO: 1884448
agaaaugauugugcgguua

SEQ ID NO: 2266489 - RNA, 19 nt, Artificial Sequence
  Description of Artificial Sequence: Synthetic oligonucleotide
  Antisense strand to SEQ ID NO: 2266488
uaaccgcacaaucauuucu

SEQ ID NO: 2266490 - RNA, 19 nt, Artificial Sequence
  Description of Artificial Sequence: Synthetic oligonucleotide
  Sense strand starting at position 1173 of SEQ ID NO: 1884448
cuuaauaacagguguggaa

SEQ ID NO: 2266491 - RNA, 19 nt, Artificial Sequence
  Description of Artificial Sequence: Synthetic oligonucleotide
  Antisense strand to SEQ ID NO: 2266490
uuccacaccuguuauuaag

SEQ ID NO: 2266492 - RNA, 19 nt, Artificial Sequence
  Description of Artificial Sequence: Synthetic oligonucleotide
  Sense strand starting at position 1175 of SEQ ID NO: 1884448
uaauaacagguguggaaua

SEQ ID NO: 2266493 - RNA, 19 nt, Artificial Sequence
  Description of Artificial Sequence: Synthetic oligonucleotide
  Antisense strand to SEQ ID NO: 2266492
uauuccacaccuguuauua

SEQ ID NO: 2266494 - RNA, 19 nt, Artificial Sequence
  Description of Artificial Sequence: Synthetic oligonucleotide
  Sense strand starting at position 1385 of SEQ ID NO: 1884448
guguaaugggaauaacgau

SEQ ID NO: 2266495 - RNA, 19 nt, Artificial Sequence
  Description of Artificial Sequence: Synthetic oligonucleotide
  Antisense strand to SEQ ID NO: 2266494
aucguuauucccauuacac

SEQ ID NO: 2266496 - RNA, 19 nt, Artificial Sequence
  Description of Artificial Sequence: Synthetic oligonucleotide
  Sense strand starting at position 1393 of SEQ ID NO: 1884448
ggaauaacgauccguaccu

SEQ ID NO: 2266497 - RNA, 19 nt, Artificial Sequence
  Description of Artificial Sequence: Synthetic oligonucleotide
  Antisense strand to SEQ ID NO: 2266496
agguacggaucguuauucc

SEQ ID NO: 2266498 - RNA, 19 nt, Artificial Sequence
  Description of Artificial Sequence: Synthetic oligonucleotide
  Sense strand starting at position 1419 of SEQ ID NO: 1884448
gugcgaggcggguuguaaa

SEQ ID NO: 2266499 - RNA, 19 nt, Artificial Sequence
  Description of Artificial Sequence: Synthetic oligonucleotide
  Antisense strand to SEQ ID NO: 2266498
uuuacaacccgccucgcac

SEQ ID NO: 2266500 - RNA, 19 nt, Artificial Sequence
  Description of Artificial Sequence: Synthetic oligonucleotide
  Sense strand starting at position 2314 of SEQ ID NO: 1884448
agaauaggauuaggagaaa

SEQ ID NO: 2266501 - RNA, 19 nt, Artificial Sequence
  Description of Artificial Sequence: Synthetic oligonucleotide
  Antisense strand to SEQ ID NO: 2266500
uuucuccuaauccuauucu

SEQ ID NO: 2266502 - RNA, 19 nt, Artificial Sequence
  Description of Artificial Sequence: Synthetic oligonucleotide
  Sense strand starting at position 2431 of SEQ ID NO: 1884448
gggugugugccucuuugua

SEQ ID NO: 2266503 - RNA, 19 nt, Artificial Sequence
  Description of Artificial Sequence: Synthetic oligonucleotide
  Antisense strand to SEQ ID NO: 2266502
uacaaagaggcacacaccc

SEQ ID NO: 2266504 - RNA, 19 nt, Artificial Sequence
  Description of Artificial Sequence: Synthetic oligonucleotide
  Sense strand starting at position 2597 of SEQ ID NO: 1884448
uuuguuucuggagaguaaa

SEQ ID NO: 2266505 - RNA, 19 nt, Artificial Sequence
  Description of Artificial Sequence: Synthetic oligonucleotide
  Antisense strand to SEQ ID NO: 2266504
uuuacucuccagaaacaaa

SEQ ID NO: 2266506 - RNA, 19 nt, Artificial Sequence
  Description of Artificial Sequence: Synthetic oligonucleotide
  Sense strand starting at position 2609 of SEQ ID NO: 1884448
gaguaaauuccuggagcaa

SEQ ID NO: 2266507 - RNA, 19 nt, Artificial Sequence
  Description of Artificial Sequence: Synthetic oligonucleotide
  Antisense strand to SEQ ID NO: 2266506
uugcuccaggaauuuacuc

SEQ ID NO: 2266508 - RNA, 19 nt, Artificial Sequence
  Description of Artificial Sequence: Synthetic oligonucleotide
  Sense strand starting at position 2610 of SEQ ID NO: 1884448
aguaaauuccuggagcaau

SEQ ID NO: 2266509 - RNA, 19 nt, Artificial Sequence
  Description of Artificial Sequence: Synthetic oligonucleotide
  Antisense strand to SEQ ID NO: 2266508
auugcuccaggaauuuacu

SEQ ID NO: 2266510 - RNA, 19 nt, Artificial Sequence
  Description of Artificial Sequence: Synthetic oligonucleotide
  Sense strand starting at position 2803 of SEQ ID NO: 1884448
aaguccuucuggguuccaa

SEQ ID NO: 2266511 - RNA, 19 nt, Artificial Sequence
  Description of Artificial Sequence: Synthetic oligonucleotide
  Antisense strand to SEQ ID NO: 2266510
uuggaacccagaaggacuu

SEQ ID NO: 2266512 - RNA, 19 nt, Artificial Sequence
  Description of Artificial Sequence: Synthetic oligonucleotide
  Sense strand starting at position 2841 of SEQ ID NO: 1884448
cugcacuucuguuugggua

SEQ ID NO: 2266513 - RNA, 19 nt, Artificial Sequence
  Description of Artificial Sequence: Synthetic oligonucleotide
  Antisense strand to SEQ ID NO: 2266512
uacccaaacagaagugcag

SEQ ID NO: 2266514 - RNA, 19 nt, Artificial Sequence
  Description of Artificial Sequence: Synthetic oligonucleotide
  Sense strand starting at position 2983 of SEQ ID NO: 1884448
gggccaauuccuggucaca

SEQ ID NO: 2266515 - RNA, 19 nt, Artificial Sequence
  Description of Artificial Sequence: Synthetic oligonucleotide
  Antisense strand to SEQ ID NO: 2266514
ugugaccaggaauuggccc

SEQ ID NO: 2266516 - RNA, 19 nt, Artificial Sequence
  Description of Artificial Sequence: Synthetic oligonucleotide
  Sense strand starting at position 3355 of SEQ ID NO: 1884448
cuuaaugugcaaugugagu

SEQ ID NO: 2266517 - RNA, 19 nt, Artificial Sequence
  Description of Artificial Sequence: Synthetic oligonucleotide
  Antisense strand to SEQ ID NO: 2266516
acucacauugcacauuaag

SEQ ID NO: 2266518 - RNA, 19 nt, Artificial Sequence
  Description of Artificial Sequence: Synthetic oligonucleotide
  Sense strand starting at position 3392 of SEQ ID NO: 1884448
gagauagguucuuugccca

SEQ ID NO: 2266519 - RNA, 19 nt, Artificial Sequence
  Description of Artificial Sequence: Synthetic oligonucleotide
  Antisense strand to SEQ ID NO: 2266518
ugggcaaagaaccuaucuc

SEQ ID NO: 2266520 - RNA, 19 nt, Artificial Sequence
  Description of Artificial Sequence: Synthetic oligonucleotide
  Sense strand starting at position 3488 of SEQ ID NO: 1884448
auuugauccucugaguaac

SEQ ID NO: 2266521 - RNA, 19 nt, Artificial Sequence
  Description of Artificial Sequence: Synthetic oligonucleotide
  Antisense strand to SEQ ID NO: 2266520
guuacucagaggaucaaau

SEQ ID NO: 2266522 - RNA, 19 nt, Artificial Sequence
  Description of Artificial Sequence: Synthetic oligonucleotide
  Sense strand starting at position 3508 of SEQ ID NO: 1884448
ccaugaggucauuacuauu

SEQ ID NO: 2266523 - RNA, 19 nt, Artificial Sequence
  Description of Artificial Sequence: Synthetic oligonucleotide
  Antisense strand to SEQ ID NO: 2266522
aauaguaaugaccucaugg

SEQ ID NO: 2266524 - RNA, 19 nt, Artificial Sequence
  Description of Artificial Sequence: Synthetic oligonucleotide
  Sense strand starting at position 3519 of SEQ ID NO: 1884448
uuacuauugucgucaccau

SEQ ID NO: 2266525 - RNA, 19 nt, Artificial Sequence
  Description of Artificial Sequence: Synthetic oligonucleotide
  Antisense strand to SEQ ID NO: 2266524
auggugacgacaauaguaa

SEQ ID NO: 2266526 - RNA, 19 nt, Artificial Sequence
  Description of Artificial Sequence: Synthetic oligonucleotide
  Sense strand starting at position 3573 of SEQ ID NO: 1884448
gcaaucugcccagggugau

SEQ ID NO: 2266527 - RNA, 19 nt, Artificial Sequence
  Description of Artificial Sequence: Synthetic oligonucleotide
  Antisense strand to SEQ ID NO: 2266526
aucacccugggcagauugc

SEQ ID NO: 2266528 - RNA, 19 nt, Artificial Sequence
  Description of Artificial Sequence: Synthetic oligonucleotide
  Sense strand starting at position 3588 of SEQ ID NO: 1884448
ugaugaucccgcugguaag

SEQ ID NO: 2266529 - RNA, 19 nt, Artificial Sequence
  Description of Artificial Sequence: Synthetic oligonucleotide
  Antisense strand to SEQ ID NO: 2266528
cuuaccagcgggaucauca

SEQ ID NO: 2266530 - RNA, 19 nt, Artificial Sequence
  Description of Artificial Sequence: Synthetic oligonucleotide
  Sense strand starting at position 3589 of SEQ ID NO: 1884448
gaugaucccgcugguaaga

SEQ ID NO: 2266531 - RNA, 19 nt, Artificial Sequence
  Description of Artificial Sequence: Synthetic oligonucleotide
  Antisense strand to SEQ ID NO: 2266530
ucuuaccagcgggaucauc

SEQ ID NO: 2266532 - RNA, 19 nt, Artificial Sequence
  Description of Artificial Sequence: Synthetic oligonucleotide
  Sense strand starting at position 3655 of SEQ ID NO: 1884448
ucauaaucacuccgaaaug

SEQ ID NO: 2266533 - RNA, 19 nt, Artificial Sequence
  Description of Artificial Sequence: Synthetic oligonucleotide
  Antisense strand to SEQ ID NO: 2266532
cauuucggagugauuauga

SEQ ID NO: 2266534 - RNA, 19 nt, Artificial Sequence
  Description of Artificial Sequence: Synthetic oligonucleotide
  Sense strand starting at position 3784 of SEQ ID NO: 1884448
ggcuguggugagagcauau

SEQ ID NO: 2266535 - RNA, 19 nt, Artificial Sequence
  Description of Artificial Sequence: Synthetic oligonucleotide
  Antisense strand to SEQ ID NO: 2266534
auaugcucucaccacagcc

SEQ ID NO: 2266536 - RNA, 19 nt, Artificial Sequence
  Description of Artificial Sequence: Synthetic oligonucleotide
  Sense strand starting at position 265 of SEQ ID NO: 1884449
gucugaguguuucuccuua

SEQ ID NO: 2266537 - RNA, 19 nt, Artificial Sequence
  Description of Artificial Sequence: Synthetic oligonucleotide
  Antisense strand to SEQ ID NO: 2266536
uaaggagaaacacucagac

SEQ ID NO: 2266538 - RNA, 19 nt, Artificial Sequence
  Description of Artificial Sequence: Synthetic oligonucleotide
  Sense strand starting at position 386 of SEQ ID NO: 1884449
gcagcuggcguggucauua

SEQ ID NO: 2266539 - RNA, 19 nt, Artificial Sequence
  Description of Artificial Sequence: Synthetic oligonucleotide
  Antisense strand to SEQ ID NO: 2266538
uaaugaccacgccagcugc

SEQ ID NO: 2266540 - RNA, 19 nt, Artificial Sequence
  Description of Artificial Sequence: Synthetic oligonucleotide
  Sense strand starting at position 391 of SEQ ID NO: 1884449
uggcguggucauuaugaaa

SEQ ID NO: 2266541 - RNA, 19 nt, Artificial Sequence
  Description of Artificial Sequence: Synthetic oligonucleotide
  Antisense strand to SEQ ID NO: 2266540
uuucauaaugaccacgcca

SEQ ID NO: 2266542 - RNA, 19 nt, Artificial Sequence
  Description of Artificial Sequence: Synthetic oligonucleotide
  Sense strand starting at position 486 of SEQ ID NO: 1884449
uuuacaaagcguuauauga

SEQ ID NO: 2266543 - RNA, 19 nt, Artificial Sequence
  Description of Artificial Sequence: Synthetic oligonucleotide
  Antisense strand to SEQ ID NO: 2266542
ucauauaacgcuuuguaaa

SEQ ID NO: 2266544 - RNA, 19 nt, Artificial Sequence
  Description of Artificial Sequence: Synthetic oligonucleotide
  Sense strand starting at position 493 of SEQ ID NO: 1884449
agcguuauaugaucaguuc

SEQ ID NO: 2266545 - RNA, 19 nt, Artificial Sequence
  Description of Artificial Sequence: Synthetic oligonucleotide
  Antisense strand to SEQ ID NO: 2266544
gaacugaucauauaacgcu

SEQ ID NO: 2266546 - RNA, 19 nt, Artificial Sequence
  Description of Artificial Sequence: Synthetic oligonucleotide
  Sense strand starting at position 496 of SEQ ID NO: 1884449
guuauaugaucaguuccua

SEQ ID NO: 2266547 - RNA, 19 nt, Artificial Sequence
  Description of Artificial Sequence: Synthetic oligonucleotide
  Antisense strand to SEQ ID NO: 2266546
uaggaacugaucauauaac

SEQ ID NO: 2266548 - RNA, 19 nt, Artificial Sequence
  Description of Artificial Sequence: Synthetic oligonucleotide
  Sense strand starting at position 537 of SEQ ID NO: 1884449
cugugaagcuccuuaauau

SEQ ID NO: 2266549 - RNA, 19 nt, Artificial Sequence
  Description of Artificial Sequence: Synthetic oligonucleotide
  Antisense strand to SEQ ID NO: 2266548
auauuaaggagcuucacag

SEQ ID NO: 2266550 - RNA, 19 nt, Artificial Sequence
  Description of Artificial Sequence: Synthetic oligonucleotide
  Sense strand starting at position 538 of SEQ ID NO: 1884449
ugugaagcuccuuaauaua

SEQ ID NO: 2266551 - RNA, 19 nt, Artificial Sequence
  Description of Artificial Sequence: Synthetic oligonucleotide
  Antisense strand to SEQ ID NO: 2266550
uauauuaaggagcuucaca

SEQ ID NO: 2266552 - RNA, 19 nt, Artificial Sequence
  Description of Artificial Sequence: Synthetic oligonucleotide
  Sense strand starting at position 556 of SEQ ID NO: 1884449
auaaacaguucucaggaga

SEQ ID NO: 2266553 - RNA, 19 nt, Artificial Sequence
  Description of Artificial Sequence: Synthetic oligonucleotide
  Antisense strand to SEQ ID NO: 2266552
ucuccugagaacuguuuau

SEQ ID NO: 2266554 - RNA, 19 nt, Artificial Sequence
  Description of Artificial Sequence: Synthetic oligonucleotide
  Sense strand starting at position 657 of SEQ ID NO: 1884449
acccuuacugcauauguga

SEQ ID NO: 2266555 - RNA, 19 nt, Artificial Sequence
  Description of Artificial Sequence: Synthetic oligonucleotide
  Antisense strand to SEQ ID NO: 2266554
ucacauaugcaguaagggu

SEQ ID NO: 2266556 - RNA, 19 nt, Artificial Sequence
  Description of Artificial Sequence: Synthetic oligonucleotide
  Sense strand starting at position 662 of SEQ ID NO: 1884449
uacugcauaugugagagaa

SEQ ID NO: 2266557 - RNA, 19 nt, Artificial Sequence
  Description of Artificial Sequence: Synthetic oligonucleotide
  Antisense strand to SEQ ID NO: 2266556
uucucucacauaugcagua

SEQ ID NO: 2266558 - RNA, 19 nt, Artificial Sequence
  Description of Artificial Sequence: Synthetic oligonucleotide
  Sense strand starting at position 690 of SEQ ID NO: 1884449
gcuggaucgacuggaaaug

SEQ ID NO: 2266559 - RNA, 19 nt, Artificial Sequence
  Description of Artificial Sequence: Synthetic oligonucleotide
  Antisense strand to SEQ ID NO: 2266558
cauuuccagucgauccagc

SEQ ID NO: 2266560 - RNA, 19 nt, Artificial Sequence
  Description of Artificial Sequence: Synthetic oligonucleotide
  Sense strand starting at position 1985 of SEQ ID NO: 1884449
acucaaaguuguuugugga

SEQ ID NO: 2266561 - RNA, 19 nt, Artificial Sequence
  Description of Artificial Sequence: Synthetic oligonucleotide
  Antisense strand to SEQ ID NO: 2266560
uccacaaacaacuuugagu

SEQ ID NO: 2266562 - RNA, 19 nt, Artificial Sequence
  Description of Artificial Sequence: Synthetic oligonucleotide
  Sense strand starting at position 2133 of SEQ ID NO: 1884449
agcuuucggaaaugagcau

SEQ ID NO: 2266563 - RNA, 19 nt, Artificial Sequence
  Description of Artificial Sequence: Synthetic oligonucleotide
  Antisense strand to SEQ ID NO: 2266562
augcucauuuccgaaagcu

SEQ ID NO: 2266564 - RNA, 19 nt, Artificial Sequence
  Description of Artificial Sequence: Synthetic oligonucleotide
  Sense strand starting at position 2687 of SEQ ID NO: 1884449
agagcauuccaaugauugc

SEQ ID NO: 2266565 - RNA, 19 nt, Artificial Sequence
  Description of Artificial Sequence: Synthetic oligonucleotide
  Antisense strand to SEQ ID NO: 2266564
gcaaucauuggaaugcucu

SEQ ID NO: 2266566 - RNA, 19 nt, Artificial Sequence
  Description of Artificial Sequence: Synthetic oligonucleotide
  Sense strand starting at position 2725 of SEQ ID NO: 1884449
ugaggucucugccugggaa

SEQ ID NO: 2266567 - RNA, 19 nt, Artificial Sequence
  Description of Artificial Sequence: Synthetic oligonucleotide
  Antisense strand to SEQ ID NO: 2266566
uucccaggcagagaccuca

SEQ ID NO: 2266568 - RNA, 19 nt, Artificial Sequence
  Description of Artificial Sequence: Synthetic oligonucleotide
  Sense strand starting at position 2727 of SEQ ID NO: 1884449
aggucucugccugggaaga

SEQ ID NO: 2266569 - RNA, 19 nt, Artificial Sequence
  Description of Artificial Sequence: Synthetic oligonucleotide
  Antisense strand to SEQ ID NO: 2266568
ucuucccaggcagagaccu

SEQ ID NO: 2266570 - RNA, 19 nt, Artificial Sequence
  Description of Artificial Sequence: Synthetic oligonucleotide
  Sense strand starting at position 2728 of SEQ ID NO: 1884449
ggucucugccugggaagaa

SEQ ID NO: 2266571 - RNA, 19 nt, Artificial Sequence
  Description of Artificial Sequence: Synthetic oligonucleotide
  Antisense strand to SEQ ID NO: 2266570
uucuucccaggcagagacc

SEQ ID NO: 2266572 - RNA, 19 nt, Artificial Sequence
  Description of Artificial Sequence: Synthetic oligonucleotide
  Sense strand starting at position 2844 of SEQ ID NO: 1884449
ggcuuauuaggucacuuau

SEQ ID NO: 2266573 - RNA, 19 nt, Artificial Sequence
  Description of Artificial Sequence: Synthetic oligonucleotide
  Antisense strand to SEQ ID NO: 2266572
auaagugaccuaauaagcc

SEQ ID NO: 2266574 - RNA, 19 nt, Artificial Sequence
  Description of Artificial Sequence: Synthetic oligonucleotide
  Sense strand starting at position 2846 of SEQ ID NO: 1884449
cuuauuaggucacuuaugu

SEQ ID NO: 2266575 - RNA, 19 nt, Artificial Sequence
  Description of Artificial Sequence: Synthetic oligonucleotide
  Antisense strand to SEQ ID NO: 2266574
acauaagugaccuaauaag

SEQ ID NO: 2266576 - RNA, 19 nt, Artificial Sequence
  Description of Artificial Sequence: Synthetic oligonucleotide
  Sense strand starting at position 2876 of SEQ ID NO: 1884449
ugugaagucccacaaucag

SEQ ID NO: 2266577 - RNA, 19 nt, Artificial Sequence
  Description of Artificial Sequence: Synthetic oligonucleotide
  Antisense strand to SEQ ID NO: 2266576
cugauugugggacuucaca

SEQ ID NO: 2266578 - RNA, 19 nt, Artificial Sequence
  Description of Artificial Sequence: Synthetic oligonucleotide
  Sense strand starting at position 2882 of SEQ ID NO: 1884449
gucccacaaucaguagauu

SEQ ID NO: 2266579 - RNA, 19 nt, Artificial Sequence
  Description of Artificial Sequence: Synthetic oligonucleotide
  Antisense strand to SEQ ID NO: 2266578
aaucuacugauugugggac

SEQ ID NO: 2266580 - RNA, 19 nt, Artificial Sequence
  Description of Artificial Sequence: Synthetic oligonucleotide
  Sense strand starting at position 3142 of SEQ ID NO: 1884449
gacauuguccguuauccac

SEQ ID NO: 2266581 - RNA, 19 nt, Artificial Sequence
  Description of Artificial Sequence: Synthetic oligonucleotide
  Antisense strand to SEQ ID NO: 2266580
guggauaacggacaauguc

SEQ ID NO: 2266582 - RNA, 19 nt, Artificial Sequence
  Description of Artificial Sequence: Synthetic oligonucleotide
  Sense strand starting at position 3282 of SEQ ID NO: 1884449
gcuaacuuccugcaugcua

SEQ ID NO: 2266583 - RNA, 19 nt, Artificial Sequence
  Description of Artificial Sequence: Synthetic oligonucleotide
  Antisense strand to SEQ ID NO: 2266582
uagcaugcaggaaguuagc

SEQ ID NO: 2266584 - RNA, 19 nt, Artificial Sequence
  Description of Artificial Sequence: Synthetic oligonucleotide
  Sense strand starting at position 3295 of SEQ ID NO: 1884449
augcuacugucaucucaga

SEQ ID NO: 2266585 - RNA, 19 nt, Artificial Sequence
  Description of Artificial Sequence: Synthetic oligonucleotide
  Antisense strand to SEQ ID NO: 2266584
ucugagaugacaguagcau

SEQ ID NO: 2266586 - RNA, 19 nt, Artificial Sequence
  Description of Artificial Sequence: Synthetic oligonucleotide
  Sense strand starting at position 3479 of SEQ ID NO: 1884449
aaagauaacugugaggauu

SEQ ID NO: 2266587 - RNA, 19 nt, Artificial Sequence
  Description of Artificial Sequence: Synthetic oligonucleotide
  Antisense strand to SEQ ID NO: 2266586
aauccucacaguuaucuuu

SEQ ID NO: 2266588 - RNA, 19 nt, Artificial Sequence
  Description of Artificial Sequence: Synthetic oligonucleotide
  Sense strand starting at position 3481 of SEQ ID NO: 1884449
agauaacugugaggauuaa

SEQ ID NO: 2266589 - RNA, 19 nt, Artificial Sequence
  Description of Artificial Sequence: Synthetic oligonucleotide
  Antisense strand to SEQ ID NO: 2266588
uuaauccucacaguuaucu

SEQ ID NO: 2266590 - RNA, 19 nt, Artificial Sequence
  Description of Artificial Sequence: Synthetic oligonucleotide
  Sense strand starting at position 3492 of SEQ ID NO: 1884449
aggauuaagugaguuuaua

SEQ ID NO: 2266591 - RNA, 19 nt, Artificial Sequence
  Description of Artificial Sequence: Synthetic oligonucleotide
  Antisense strand to SEQ ID NO: 2266590
uauaaacucacuuaauccu

SEQ ID NO: 2266592 - RNA, 19 nt, Artificial Sequence
  Description of Artificial Sequence: Synthetic oligonucleotide
  Sense strand starting at position 3592 of SEQ ID NO: 1884449
ucccaaguguuacuagaau

SEQ ID NO: 2266593 - RNA, 19 nt, Artificial Sequence
  Description of Artificial Sequence: Synthetic oligonucleotide
  Antisense strand to SEQ ID NO: 2266592
auucuaguaacacuuggga

SEQ ID NO: 2266594 - RNA, 19 nt, Artificial Sequence
  Description of Artificial Sequence: Synthetic oligonucleotide
  Sense strand starting at position 3687 of SEQ ID NO: 1884449
ggugacuccuuccuuauua

SEQ ID NO: 2266595 - RNA, 19 nt, Artificial Sequence
  Description of Artificial Sequence: Synthetic oligonucleotide
  Antisense strand to SEQ ID NO: 2266594
uaauaaggaaggagucacc

SEQ ID NO: 2266596 - RNA, 19 nt, Artificial Sequence
  Description of Artificial Sequence: Synthetic oligonucleotide
  Sense strand starting at position 3713 of SEQ ID NO: 1884449
agaacacuauccuaaguga

SEQ ID NO: 2266597 - RNA, 19 nt, Artificial Sequence
  Description of Artificial Sequence: Synthetic oligonucleotide
  Antisense strand to SEQ ID NO: 2266596
ucacuuaggauaguguucu

SEQ ID NO: 2266598 - RNA, 19 nt, Artificial Sequence
  Description of Artificial Sequence: Synthetic oligonucleotide
  Sense strand starting at position 3716 of SEQ ID NO: 1884449
acacuauccuaagugaagu

SEQ ID NO: 2266599 - RNA, 19 nt, Artificial Sequence
  Description of Artificial Sequence: Synthetic oligonucleotide
  Antisense strand to SEQ ID NO: 2266598
acuucacuuaggauagugu

SEQ ID NO: 2266600 - RNA, 19 nt, Artificial Sequence
  Description of Artificial Sequence: Synthetic oligonucleotide
  Sense strand starting at position 3730 of SEQ ID NO: 1884449
gaaguacaaugguuacuaa

SEQ ID NO: 2266601 - RNA, 19 nt, Artificial Sequence
  Description of Artificial Sequence: Synthetic oligonucleotide
  Antisense strand to SEQ ID NO: 2266600
uuaguaaccauuguacuuc

SEQ ID NO: 2266602 - RNA, 19 nt, Artificial Sequence
  Description of Artificial Sequence: Synthetic oligonucleotide
  Sense strand starting at position 3733 of SEQ ID NO: 1884449
guacaaugguuacuaaauu

SEQ ID NO: 2266603 - RNA, 19 nt, Artificial Sequence
  Description of Artificial Sequence: Synthetic oligonucleotide
  Antisense strand to SEQ ID NO: 2266602
aauuuaguaaccauuguac

SEQ ID NO: 2266604 - RNA, 19 nt, Artificial Sequence
  Description of Artificial Sequence: Synthetic oligonucleotide
  Sense strand starting at position 3741 of SEQ ID NO: 1884449
guuacuaaauuagaugaca

SEQ ID NO: 2266605 - RNA, 19 nt, Artificial Sequence
  Description of Artificial Sequence: Synthetic oligonucleotide
  Antisense strand to SEQ ID NO: 2266604
ugucaucuaauuuaguaac

SEQ ID NO: 2266606 - RNA, 19 nt, Artificial Sequence
  Description of Artificial Sequence: Synthetic oligonucleotide
  Sense strand starting at position 3760 of SEQ ID NO: 1884449
ucuggaucuggcugaucuu

SEQ ID NO: 2266607 - RNA, 19 nt, Artificial Sequence
  Description of Artificial Sequence: Synthetic oligonucleotide
  Antisense strand to SEQ ID NO: 2266606
aagaucagccagauccaga

SEQ ID NO: 2266608 - RNA, 19 nt, Artificial Sequence
  Description of Artificial Sequence: Synthetic oligonucleotide
  Sense strand starting at position 3798 of SEQ ID NO: 1884449
auaacuuagcuaggucauu

SEQ ID NO: 2266609 - RNA, 19 nt, Artificial Sequence
  Description of Artificial Sequence: Synthetic oligonucleotide
  Antisense strand to SEQ ID NO: 2266608
aaugaccuagcuaaguuau

SEQ ID NO: 2266610 - RNA, 19 nt, Artificial Sequence
  Description of Artificial Sequence: Synthetic oligonucleotide
  Sense strand starting at position 3803 of SEQ ID NO: 1884449
uuagcuaggucauugugaa

SEQ ID NO: 2266611 - RNA, 19 nt, Artificial Sequence
  Description of Artificial Sequence: Synthetic oligonucleotide
  Antisense strand to SEQ ID NO: 2266610
uucacaaugaccuagcuaa

SEQ ID NO: 2266612 - RNA, 19 nt, Artificial Sequence
  Description of Artificial Sequence: Synthetic oligonucleotide
  Sense strand starting at position 3804 of SEQ ID NO: 1884449
uagcuaggucauugugaaa

SEQ ID NO: 2266613 - RNA, 19 nt, Artificial Sequence
  Description of Artificial Sequence: Synthetic oligonucleotide
  Antisense strand to SEQ ID NO: 2266612
uuucacaaugaccuagcua

SEQ ID NO: 2266614 - RNA, 19 nt, Artificial Sequence
  Description of Artificial Sequence: Synthetic oligonucleotide
  Sense strand starting at position 3807 of SEQ ID NO: 1884449
cuaggucauugugaaauuu

SEQ ID NO: 2266615 - RNA, 19 nt, Artificial Sequence
  Description of Artificial Sequence: Synthetic oligonucleotide
  Antisense strand to SEQ ID NO: 2266614
aaauuucacaaugaccuag

SEQ ID NO: 2266616 - RNA, 19 nt, Artificial Sequence
  Description of Artificial Sequence: Synthetic oligonucleotide
  Sense strand starting at position 23 of SEQ ID NO: 1884450
gaagcuguagagugaaauu

SEQ ID NO: 2266617 - RNA, 19 nt, Artificial Sequence
  Description of Artificial Sequence: Synthetic oligonucleotide
  Antisense strand to SEQ ID NO: 2266616
aauuucacucuacagcuuc

SEQ ID NO: 2266618 - RNA, 19 nt, Artificial Sequence
  Description of Artificial Sequence: Synthetic oligonucleotide
  Sense strand starting at position 122 of SEQ ID NO: 1884450
auauuauaguccuuggaca

SEQ ID NO: 2266619 - RNA, 19 nt, Artificial Sequence
  Description of Artificial Sequence: Synthetic oligonucleotide
  Antisense strand to SEQ ID NO: 2266618
uguccaaggacuauaauau

SEQ ID NO: 2266620 - RNA, 19 nt, Artificial Sequence
  Description of Artificial Sequence: Synthetic oligonucleotide
  Sense strand starting at position 124 of SEQ ID NO: 1884450
auuauaguccuuggacaaa

SEQ ID NO: 2266621 - RNA, 19 nt, Artificial Sequence
  Description of Artificial Sequence: Synthetic oligonucleotide
  Antisense strand to SEQ ID NO: 2266620
uuuguccaaggacuauaau

SEQ ID NO: 2266622 - RNA, 19 nt, Artificial Sequence
  Description of Artificial Sequence: Synthetic oligonucleotide
  Sense strand starting at position 372 of SEQ ID NO: 1884450
gccugagugucccaggcuu

SEQ ID NO: 2266623 - RNA, 19 nt, Artificial Sequence
  Description of Artificial Sequence: Synthetic oligonucleotide
  Antisense strand to SEQ ID NO: 2266622
aagccugggacacucaggc

SEQ ID NO: 2266624 - RNA, 19 nt, Artificial Sequence
  Description of Artificial Sequence: Synthetic oligonucleotide
  Sense strand starting at position 437 of SEQ ID NO: 1884450
cucaguuugucagacugaa

SEQ ID NO: 2266625 - RNA, 19 nt, Artificial Sequence
  Description of Artificial Sequence: Synthetic oligonucleotide
  Antisense strand to SEQ ID NO: 2266624
uucagucugacaaacugag

SEQ ID NO: 2266626 - RNA, 19 nt, Artificial Sequence
  Description of Artificial Sequence: Synthetic oligonucleotide
  Sense strand starting at position 510 of SEQ ID NO: 1884450
cagccacucgaggguuaaa

SEQ ID NO: 2266627 - RNA, 19 nt, Artificial Sequence
  Description of Artificial Sequence: Synthetic oligonucleotide
  Antisense strand to SEQ ID NO: 2266626
uuuaacccucgaguggcug

SEQ ID NO: 2266628 - RNA, 19 nt, Artificial Sequence
  Description of Artificial Sequence: Synthetic oligonucleotide
  Sense strand starting at position 661 of SEQ ID NO: 1884450
gggaguuucucagagaaag

SEQ ID NO: 2266629 - RNA, 19 nt, Artificial Sequence
  Description of Artificial Sequence: Synthetic oligonucleotide
  Antisense strand to SEQ ID NO: 2266628
cuuucucugagaaacuccc

SEQ ID NO: 2266630 - RNA, 19 nt, Artificial Sequence
  Description of Artificial Sequence: Synthetic oligonucleotide
  Sense strand starting at position 774 of SEQ ID NO: 1884450
ccggaagggucccuuucuu

SEQ ID NO: 2266631 - RNA, 19 nt, Artificial Sequence
  Description of Artificial Sequence: Synthetic oligonucleotide
  Antisense strand to SEQ ID NO: 2266630
aagaaagggacccuuccgg

SEQ ID NO: 2266632 - RNA, 19 nt, Artificial Sequence
  Description of Artificial Sequence: Synthetic oligonucleotide
  Sense strand starting at position 798 of SEQ ID NO: 1884450
gucccaguguccuucgauc

SEQ ID NO: 2266633 - RNA, 19 nt, Artificial Sequence
  Description of Artificial Sequence: Synthetic oligonucleotide
  Antisense strand to SEQ ID NO: 2266632
gaucgaaggacacugggac

SEQ ID NO: 2266634 - RNA, 19 nt, Artificial Sequence
  Description of Artificial Sequence: Synthetic oligonucleotide
  Sense strand starting at position 953 of SEQ ID NO: 1884450
uaguuucugacagggcgaa

SEQ ID NO: 2266635 - RNA, 19 nt, Artificial Sequence
  Description of Artificial Sequence: Synthetic oligonucleotide
  Antisense strand to SEQ ID NO: 2266634
uucgcccugucagaaacua

SEQ ID NO: 2266636 - RNA, 19 nt, Artificial Sequence
  Description of Artificial Sequence: Synthetic oligonucleotide
  Sense strand starting at position 995 of SEQ ID NO: 1884450
cccaguguguccguuacua

SEQ ID NO: 2266637 - RNA, 19 nt, Artificial Sequence
  Description of Artificial Sequence: Synthetic oligonucleotide
  Antisense strand to SEQ ID NO: 2266636
uaguaacggacacacuggg

SEQ ID NO: 2266638 - RNA, 19 nt, Artificial Sequence
  Description of Artificial Sequence: Synthetic oligonucleotide
  Sense strand starting at position 997 of SEQ ID NO: 1884450
caguguguccguuacuauc

SEQ ID NO: 2266639 - RNA, 19 nt, Artificial Sequence
  Description of Artificial Sequence: Synthetic oligonucleotide
  Antisense strand to SEQ ID NO: 2266638
gauaguaacggacacacug

SEQ ID NO: 2266640 - RNA, 19 nt, Artificial Sequence
  Description of Artificial Sequence: Synthetic oligonucleotide
  Sense strand starting at position 1028 of SEQ ID NO: 1884450
ccucuaccuucuggaaagu

SEQ ID NO: 2266641 - RNA, 19 nt, Artificial Sequence
  Description of Artificial Sequence: Synthetic oligonucleotide
  Antisense strand to SEQ ID NO: 2266640
acuuuccagaagguagagg

SEQ ID NO: 2266642 - RNA, 19 nt, Artificial Sequence
  Description of Artificial Sequence: Synthetic oligonucleotide
  Sense strand starting at position 1034 of SEQ ID NO: 1884450
ccuucuggaaaguggaauu

SEQ ID NO: 2266643 - RNA, 19 nt, Artificial Sequence
  Description of Artificial Sequence: Synthetic oligonucleotide
  Antisense strand to SEQ ID NO: 2266642
aauuccacuuuccagaagg

SEQ ID NO: 2266644 - RNA, 19 nt, Artificial Sequence
  Description of Artificial Sequence: Synthetic oligonucleotide
  Sense strand starting at position 1126 of SEQ ID NO: 1884450
gcaguuucccggcggaaac

SEQ ID NO: 2266645 - RNA, 19 nt, Artificial Sequence
  Description of Artificial Sequence: Synthetic oligonucleotide
  Antisense strand to SEQ ID NO: 2266644
guuuccgccgggaaacugc

SEQ ID NO: 2266646 - RNA, 19 nt, Artificial Sequence
  Description of Artificial Sequence: Synthetic oligonucleotide
  Sense strand starting at position 1280 of SEQ ID NO: 1884450
gggauuguuuccucccgua

SEQ ID NO: 2266647 - RNA, 19 nt, Artificial Sequence
  Description of Artificial Sequence: Synthetic oligonucleotide
  Antisense strand to SEQ ID NO: 2266646
uacgggaggaaacaauccc

SEQ ID NO: 2266648 - RNA, 19 nt, Artificial Sequence
  Description of Artificial Sequence: Synthetic oligonucleotide
  Sense strand starting at position 1283 of SEQ ID NO: 1884450
auuguuuccucccguagag

SEQ ID NO: 2266649 - RNA, 19 nt, Artificial Sequence
  Description of Artificial Sequence: Synthetic oligonucleotide
  Antisense strand to SEQ ID NO: 2266648
cucuacgggaggaaacaau

SEQ ID NO: 2266650 - RNA, 19 nt, Artificial Sequence
  Description of Artificial Sequence: Synthetic oligonucleotide
  Sense strand starting at position 1327 of SEQ ID NO: 1884450
auugucuucugccuuauca

SEQ ID NO: 2266651 - RNA, 19 nt, Artificial Sequence
  Description of Artificial Sequence: Synthetic oligonucleotide
  Antisense strand to SEQ ID NO: 2266650
ugauaaggcagaagacaau

SEQ ID NO: 2266652 - RNA, 19 nt, Artificial Sequence
  Description of Artificial Sequence: Synthetic oligonucleotide
  Sense strand starting at position 1337 of SEQ ID NO: 1884450
gccuuaucacuggguacaa

SEQ ID NO: 2266653 - RNA, 19 nt, Artificial Sequence
  Description of Artificial Sequence: Synthetic oligonucleotide
  Antisense strand to SEQ ID NO: 2266652
uuguacccagugauaaggc

SEQ ID NO: 2266654 - RNA, 19 nt, Artificial Sequence
  Description of Artificial Sequence: Synthetic oligonucleotide
  Sense strand starting at position 1338 of SEQ ID NO: 1884450
ccuuaucacuggguacaaa

SEQ ID NO: 2266655 - RNA, 19 nt, Artificial Sequence
  Description of Artificial Sequence: Synthetic oligonucleotide
  Antisense strand to SEQ ID NO: 2266654
uuuguacccagugauaagg

SEQ ID NO: 2266656 - RNA, 19 nt, Artificial Sequence
  Description of Artificial Sequence: Synthetic oligonucleotide
  Sense strand starting at position 1688 of SEQ ID NO: 1884450
gugcaagcccaagguuauu

SEQ ID NO: 2266657 - RNA, 19 nt, Artificial Sequence
  Description of Artificial Sequence: Synthetic oligonucleotide
  Antisense strand to SEQ ID NO: 2266656
aauaaccuugggcuugcac

SEQ ID NO: 2266658 - RNA, 19 nt, Artificial Sequence
  Description of Artificial Sequence: Synthetic oligonucleotide
  Sense strand starting at position 1989 of SEQ ID NO: 1884450
gaagcccgccucugagauu

SEQ ID NO: 2266659 - RNA, 19 nt, Artificial Sequence
  Description of Artificial Sequence: Synthetic oligonucleotide
  Antisense strand to SEQ ID NO: 2266658
aaucucagaggcgggcuuc

SEQ ID NO: 2266660 - RNA, 19 nt, Artificial Sequence
  Description of Artificial Sequence: Synthetic oligonucleotide
  Sense strand starting at position 2309 of SEQ ID NO: 1884450
ucucuuugaugcucagaaa

SEQ ID NO: 2266661 - RNA, 19 nt, Artificial Sequence
  Description of Artificial Sequence: Synthetic oligonucleotide
  Antisense strand to SEQ ID NO: 2266660
uuucugagcaucaaagaga

SEQ ID NO: 2266662 - RNA, 19 nt, Artificial Sequence
  Description of Artificial Sequence: Synthetic oligonucleotide
  Sense strand starting at position 2310 of SEQ ID NO: 1884450
cucuuugaugcucagaaau

SEQ ID NO: 2266663 - RNA, 19 nt, Artificial Sequence
  Description of Artificial Sequence: Synthetic oligonucleotide
  Antisense strand to SEQ ID NO: 2266662
auuucugagcaucaaagag

SEQ ID NO: 2266664 - RNA, 19 nt, Artificial Sequence
  Description of Artificial Sequence: Synthetic oligonucleotide
  Sense strand starting at position 2312 of SEQ ID NO: 1884450
cuuugaugcucagaaaucu

SEQ ID NO: 2266665 - RNA, 19 nt, Artificial Sequence
  Description of Artificial Sequence: Synthetic oligonucleotide
  Antisense strand to SEQ ID NO: 2266664
agauuucugagcaucaaag

SEQ ID NO: 2266666 - RNA, 19 nt, Artificial Sequence
  Description of Artificial Sequence: Synthetic oligonucleotide
  Sense strand starting at position 2320 of SEQ ID NO: 1884450
cucagaaaucugcgccucu

SEQ ID NO: 2266667 - RNA, 19 nt, Artificial Sequence
  Description of Artificial Sequence: Synthetic oligonucleotide
  Antisense strand to SEQ ID NO: 2266666
agaggcgcagauuucugag

SEQ ID NO: 2266668 - RNA, 19 nt, Artificial Sequence
  Description of Artificial Sequence: Synthetic oligonucleotide
  Sense strand starting at position 2332 of SEQ ID NO: 1884450
cgccucuggauacgaauaa

SEQ ID NO: 2266669 - RNA, 19 nt, Artificial Sequence
  Description of Artificial Sequence: Synthetic oligonucleotide
  Antisense strand to SEQ ID NO: 2266668
uuauucguauccagaggcg

SEQ ID NO: 2266670 - RNA, 19 nt, Artificial Sequence
  Description of Artificial Sequence: Synthetic oligonucleotide
  Sense strand starting at position 2333 of SEQ ID NO: 1884450
gccucuggauacgaauaaa

SEQ ID NO: 2266671 - RNA, 19 nt, Artificial Sequence
  Description of Artificial Sequence: Synthetic oligonucleotide
  Antisense strand to SEQ ID NO: 2266670
uuuauucguauccagaggc

SEQ ID NO: 2266672 - RNA, 19 nt, Artificial Sequence
  Description of Artificial Sequence: Synthetic oligonucleotide
  Sense strand starting at position 2489 of SEQ ID NO: 1884450
agguuccucuuuccaguua

SEQ ID NO: 2266673 - RNA, 19 nt, Artificial Sequence
  Description of Artificial Sequence: Synthetic oligonucleotide
  Antisense strand to SEQ ID NO: 2266672
uaacuggaaagaggaaccu

SEQ ID NO: 2266674 - RNA, 19 nt, Artificial Sequence
  Description of Artificial Sequence: Synthetic oligonucleotide
  Sense strand starting at position 2490 of SEQ ID NO: 1884450
gguuccucuuuccaguuaa

SEQ ID NO: 2266675 - RNA, 19 nt, Artificial Sequence
  Description of Artificial Sequence: Synthetic oligonucleotide
  Antisense strand to SEQ ID NO: 2266674
uuaacuggaaagaggaacc

SEQ ID NO: 2266676 - RNA, 19 nt, Artificial Sequence
  Description of Artificial Sequence: Synthetic oligonucleotide
  Sense strand starting at position 2680 of SEQ ID NO: 1884450
uggugcuuccagcguggua

SEQ ID NO: 2266677 - RNA, 19 nt, Artificial Sequence
  Description of Artificial Sequence: Synthetic oligonucleotide
  Antisense strand to SEQ ID NO: 2266676
uaccacgcuggaagcacca

SEQ ID NO: 2266678 - RNA, 19 nt, Artificial Sequence
  Description of Artificial Sequence: Synthetic oligonucleotide
  Sense strand starting at position 2735 of SEQ ID NO: 1884450
ggaggugcccuuugugaug

SEQ ID NO: 2266679 - RNA, 19 nt, Artificial Sequence
  Description of Artificial Sequence: Synthetic oligonucleotide
  Antisense strand to SEQ ID NO: 2266678
caucacaaagggcaccucc

SEQ ID NO: 2266680 - RNA, 19 nt, Artificial Sequence
  Description of Artificial Sequence: Synthetic oligonucleotide
  Sense strand starting at position 2936 of SEQ ID NO: 1884450
uguucugauauuggagacu

SEQ ID NO: 2266681 - RNA, 19 nt, Artificial Sequence
  Description of Artificial Sequence: Synthetic oligonucleotide
  Antisense strand to SEQ ID NO: 2266680
agucuccaauaucagaaca

SEQ ID NO: 2266682 - RNA, 19 nt, Artificial Sequence
  Description of Artificial Sequence: Synthetic oligonucleotide
  Sense strand starting at position 3029 of SEQ ID NO: 1884450
uuuacuugguuaugaggga

SEQ ID NO: 2266683 - RNA, 19 nt, Artificial Sequence
  Description of Artificial Sequence: Synthetic oligonucleotide
  Antisense strand to SEQ ID NO: 2266682
ucccucauaaccaaguaaa

SEQ ID NO: 2266684 - RNA, 19 nt, Artificial Sequence
  Description of Artificial Sequence: Synthetic oligonucleotide
  Sense strand starting at position 3125 of SEQ ID NO: 1884450
uagcauauuucuggccuga

SEQ ID NO: 2266685 - RNA, 19 nt, Artificial Sequence
  Description of Artificial Sequence: Synthetic oligonucleotide
  Antisense strand to SEQ ID NO: 2266684
ucaggccagaaauaugcua

SEQ ID NO: 2266686 - RNA, 19 nt, Artificial Sequence
  Description of Artificial Sequence: Synthetic oligonucleotide
  Sense strand starting at position 3127 of SEQ ID NO: 1884450
gcauauuucuggccugacu

SEQ ID NO: 2266687 - RNA, 19 nt, Artificial Sequence
  Description of Artificial Sequence: Synthetic oligonucleotide
  Antisense strand to SEQ ID NO: 2266686
agucaggccagaaauaugc

SEQ ID NO: 2266688 - RNA, 19 nt, Artificial Sequence
  Description of Artificial Sequence: Synthetic oligonucleotide
  Sense strand starting at position 3473 of SEQ ID NO: 1884450
uuugaauacugucaaguca

SEQ ID NO: 2266689 - RNA, 19 nt, Artificial Sequence
  Description of Artificial Sequence: Synthetic oligonucleotide
  Antisense strand to SEQ ID NO: 2266688
ugacuugacaguauucaaa

SEQ ID NO: 2266690 - RNA, 19 nt, Artificial Sequence
  Description of Artificial Sequence: Synthetic oligonucleotide
  Sense strand starting at position 3748 of SEQ ID NO: 1884450
gcagucuucgcucacuaca

SEQ ID NO: 2266691 - RNA, 19 nt, Artificial Sequence
  Description of Artificial Sequence: Synthetic oligonucleotide
  Antisense strand to SEQ ID NO: 2266690
uguagugagcgaagacugc

SEQ ID NO: 2266692 - RNA, 19 nt, Artificial Sequence
  Description of Artificial Sequence: Synthetic oligonucleotide
  Sense strand starting at position 145 of SEQ ID NO: 1884451
gaggacaauucuuuacggu

SEQ ID NO: 2266693 - RNA, 19 nt, Artificial Sequence
  Description of Artificial Sequence: Synthetic oligonucleotide
  Antisense strand to SEQ ID NO: 2266692
accguaaagaauuguccuc

SEQ ID NO: 2266694 - RNA, 19 nt, Artificial Sequence
  Description of Artificial Sequence: Synthetic oligonucleotide
  Sense strand starting at position 152 of SEQ ID NO: 1884451
auucuuuacggucaaagaa

SEQ ID NO: 2266695 - RNA, 19 nt, Artificial Sequence
  Description of Artificial Sequence: Synthetic oligonucleotide
  Antisense strand to SEQ ID NO: 2266694
uucuuugaccguaaagaau

SEQ ID NO: 2266696 - RNA, 19 nt, Artificial Sequence
  Description of Artificial Sequence: Synthetic oligonucleotide
  Sense strand starting at position 188 of SEQ ID NO: 1884451
cugugucacauggagacau

SEQ ID NO: 2266697 - RNA, 19 nt, Artificial Sequence
  Description of Artificial Sequence: Synthetic oligonucleotide
  Antisense strand to SEQ ID NO: 2266696
augucuccaugugacacag

SEQ ID NO: 2266698 - RNA, 19 nt, Artificial Sequence
  Description of Artificial Sequence: Synthetic oligonucleotide
  Sense strand starting at position 251 of SEQ ID NO: 1884451
caagucauuugggaucuga

SEQ ID NO: 2266699 - RNA, 19 nt, Artificial Sequence
  Description of Artificial Sequence: Synthetic oligonucleotide
  Antisense strand to SEQ ID NO: 2266698
ucagaucccaaaugacuug

SEQ ID NO: 2266700 - RNA, 19 nt, Artificial Sequence
  Description of Artificial Sequence: Synthetic oligonucleotide
  Sense strand starting at position 321 of SEQ ID NO: 1884451
uguagcacuugaucaggau

SEQ ID NO: 2266701 - RNA, 19 nt, Artificial Sequence
  Description of Artificial Sequence: Synthetic oligonucleotide
  Antisense strand to SEQ ID NO: 2266700
auccugaucaagugcuaca

SEQ ID NO: 2266702 - RNA, 19 nt, Artificial Sequence
  Description of Artificial Sequence: Synthetic oligonucleotide
  Sense strand starting at position 322 of SEQ ID NO: 1884451
guagcacuugaucaggaua

SEQ ID NO: 2266703 - RNA, 19 nt, Artificial Sequence
  Description of Artificial Sequence: Synthetic oligonucleotide
  Antisense strand to SEQ ID NO: 2266702
uauccugaucaagugcuac

SEQ ID NO: 2266704 - RNA, 19 nt, Artificial Sequence
  Description of Artificial Sequence: Synthetic oligonucleotide
  Sense strand starting at position 345 of SEQ ID NO: 1884451
cagccugugugauuagaua

SEQ ID NO: 2266705 - RNA, 19 nt, Artificial Sequence
  Description of Artificial Sequence: Synthetic oligonucleotide
  Antisense strand to SEQ ID NO: 2266704
uaucuaaucacacaggcug

SEQ ID NO: 2266706 - RNA, 19 nt, Artificial Sequence
  Description of Artificial Sequence: Synthetic oligonucleotide
  Sense strand starting at position 353 of SEQ ID NO: 1884451
gugauuagauacuuggugu

SEQ ID NO: 2266707 - RNA, 19 nt, Artificial Sequence
  Description of Artificial Sequence: Synthetic oligonucleotide
  Antisense strand to SEQ ID NO: 2266706
acaccaaguaucuaaucac

SEQ ID NO: 2266708 - RNA, 19 nt, Artificial Sequence
  Description of Artificial Sequence: Synthetic oligonucleotide
  Sense strand starting at position 354 of SEQ ID NO: 1884451
ugauuagauacuugguguu

SEQ ID NO: 2266709 - RNA, 19 nt, Artificial Sequence
  Description of Artificial Sequence: Synthetic oligonucleotide
  Antisense strand to SEQ ID NO: 2266708
aacaccaaguaucuaauca

SEQ ID NO: 2266710 - RNA, 19 nt, Artificial Sequence
  Description of Artificial Sequence: Synthetic oligonucleotide
  Sense strand starting at position 396 of SEQ ID NO: 1884451
uguacuuccucucuuggaa

SEQ ID NO: 2266711 - RNA, 19 nt, Artificial Sequence
  Description of Artificial Sequence: Synthetic oligonucleotide
  Antisense strand to SEQ ID NO: 2266710
uuccaagagaggaaguaca

SEQ ID NO: 2266712 - RNA, 19 nt, Artificial Sequence
  Description of Artificial Sequence: Synthetic oligonucleotide
  Sense strand starting at position 403 of SEQ ID NO: 1884451
ccucucuuggaaggaguua

SEQ ID NO: 2266713 - RNA, 19 nt, Artificial Sequence
  Description of Artificial Sequence: Synthetic oligonucleotide
  Antisense strand to SEQ ID NO: 2266712
uaacuccuuccaagagagg

SEQ ID NO: 2266714 - RNA, 19 nt, Artificial Sequence
  Description of Artificial Sequence: Synthetic oligonucleotide
  Sense strand starting at position 430 of SEQ ID NO: 1884451
gggugacuugucuggaaac

SEQ ID NO: 2266715 - RNA, 19 nt, Artificial Sequence
  Description of Artificial Sequence: Synthetic oligonucleotide
  Antisense strand to SEQ ID NO: 2266714
guuuccagacaagucaccc

SEQ ID NO: 2266716 - RNA, 19 nt, Artificial Sequence
  Description of Artificial Sequence: Synthetic oligonucleotide
  Sense strand starting at position 458 of SEQ ID NO: 1884451
guguuuacaagagaugguu

SEQ ID NO: 2266717 - RNA, 19 nt, Artificial Sequence
  Description of Artificial Sequence: Synthetic oligonucleotide
  Antisense strand to SEQ ID NO: 2266716
aaccaucucuuguaaacac

SEQ ID NO: 2266718 - RNA, 19 nt, Artificial Sequence
  Description of Artificial Sequence: Synthetic oligonucleotide
  Sense strand starting at position 470 of SEQ ID NO: 1884451
gaugguuugcaaugcagac

SEQ ID NO: 2266719 - RNA, 19 nt, Artificial Sequence
  Description of Artificial Sequence: Synthetic oligonucleotide
  Antisense strand to SEQ ID NO: 2266718
gucugcauugcaaaccauc

SEQ ID NO: 2266720 - RNA, 19 nt, Artificial Sequence
  Description of Artificial Sequence: Synthetic oligonucleotide
  Sense strand starting at position 472 of SEQ ID NO: 1884451
ugguuugcaaugcagacua

SEQ ID NO: 2266721 - RNA, 19 nt, Artificial Sequence
  Description of Artificial Sequence: Synthetic oligonucleotide
  Antisense strand to SEQ ID NO: 2266720
uagucugcauugcaaacca

SEQ ID NO: 2266722 - RNA, 19 nt, Artificial Sequence
  Description of Artificial Sequence: Synthetic oligonucleotide
  Sense strand starting at position 474 of SEQ ID NO: 1884451
guuugcaaugcagacuaaa

SEQ ID NO: 2266723 - RNA, 19 nt, Artificial Sequence
  Description of Artificial Sequence: Synthetic oligonucleotide
  Antisense strand to SEQ ID NO: 2266722
uuuagucugcauugcaaac

SEQ ID NO: 2266724 - RNA, 19 nt, Artificial Sequence
  Description of Artificial Sequence: Synthetic oligonucleotide
  Sense strand starting at position 501 of SEQ ID NO: 1884451
aaauuugagugugauggaa

SEQ ID NO: 2266725 - RNA, 19 nt, Artificial Sequence
  Description of Artificial Sequence: Synthetic oligonucleotide
  Antisense strand to SEQ ID NO: 2266724
uuccaucacacucaaauuu

SEQ ID NO: 2266726 - RNA, 19 nt, Artificial Sequence
  Description of Artificial Sequence: Synthetic oligonucleotide
  Sense strand starting at position 554 of SEQ ID NO: 1884451
acacaaucugcuuggccaa

SEQ ID NO: 2266727 - RNA, 19 nt, Artificial Sequence
  Description of Artificial Sequence: Synthetic oligonucleotide
  Antisense strand to SEQ ID NO: 2266726
uuggccaagcagauugugu

SEQ ID NO: 2266728 - RNA, 19 nt, Artificial Sequence
  Description of Artificial Sequence: Synthetic oligonucleotide
  Sense strand starting at position 650 of SEQ ID NO: 1884451
ugccaaguacuagauucua

SEQ ID NO: 2266729 - RNA, 19 nt, Artificial Sequence
  Description of Artificial Sequence: Synthetic oligonucleotide
  Antisense strand to SEQ ID NO: 2266728
uagaaucuaguacuuggca

SEQ ID NO: 2266730 - RNA, 19 nt, Artificial Sequence
  Description of Artificial Sequence: Synthetic oligonucleotide
  Sense strand starting at position 662 of SEQ ID NO: 1884451
gauucuaggguuugcauga

SEQ ID NO: 2266731 - RNA, 19 nt, Artificial Sequence
  Description of Artificial Sequence: Synthetic oligonucleotide
  Antisense strand to SEQ ID NO: 2266730
ucaugcaaacccuagaauc

SEQ ID NO: 2266732 - RNA, 19 nt, Artificial Sequence
  Description of Artificial Sequence: Synthetic oligonucleotide
  Sense strand starting at position 667 of SEQ ID NO: 1884451
uaggguuugcaugagcagu

SEQ ID NO: 2266733 - RNA, 19 nt, Artificial Sequence
  Description of Artificial Sequence: Synthetic oligonucleotide
  Antisense strand to SEQ ID NO: 2266732
acugcucaugcaaacccua

SEQ ID NO: 2266734 - RNA, 19 nt, Artificial Sequence
  Description of Artificial Sequence: Synthetic oligonucleotide
  Sense strand starting at position 688 of SEQ ID NO: 1884451
uguguuugcauaggcauuu

SEQ ID NO: 2266735 - RNA, 19 nt, Artificial Sequence
  Description of Artificial Sequence: Synthetic oligonucleotide
  Antisense strand to SEQ ID NO: 2266734
aaaugccuaugcaaacaca

SEQ ID NO: 2266736 - RNA, 19 nt, Artificial Sequence
  Description of Artificial Sequence: Synthetic oligonucleotide
  Sense strand starting at position 801 of SEQ ID NO: 1884451
aaagaucuugugugaagug

SEQ ID NO: 2266737 - RNA, 19 nt, Artificial Sequence
  Description of Artificial Sequence: Synthetic oligonucleotide
  Antisense strand to SEQ ID NO: 2266736
cacuucacacaagaucuuu

SEQ ID NO: 2266738 - RNA, 19 nt, Artificial Sequence
  Description of Artificial Sequence: Synthetic oligonucleotide
  Sense strand starting at position 828 of SEQ ID NO: 1884451
gggacuacacucuguuaaa

SEQ ID NO: 2266739 - RNA, 19 nt, Artificial Sequence
  Description of Artificial Sequence: Synthetic oligonucleotide
  Antisense strand to SEQ ID NO: 2266738
uuuaacagaguguaguccc

SEQ ID NO: 2266740 - RNA, 19 nt, Artificial Sequence
  Description of Artificial Sequence: Synthetic oligonucleotide
  Sense strand starting at position 1171 of SEQ ID NO: 1884451
agaucuagucucgggaauu

SEQ ID NO: 2266741 - RNA, 19 nt, Artificial Sequence
  Description of Artificial Sequence: Synthetic oligonucleotide
  Antisense strand to SEQ ID NO: 2266740
aauucccgagacuagaucu

SEQ ID NO: 2266742 - RNA, 19 nt, Artificial Sequence
  Description of Artificial Sequence: Synthetic oligonucleotide
  Sense strand starting at position 1796 of SEQ ID NO: 1884451
gggugguucugacuucgga

SEQ ID NO: 2266743 - RNA, 19 nt, Artificial Sequence
  Description of Artificial Sequence: Synthetic oligonucleotide
  Antisense strand to SEQ ID NO: 2266742
uccgaagucagaaccaccc

SEQ ID NO: 2266744 - RNA, 19 nt, Artificial Sequence
  Description of Artificial Sequence: Synthetic oligonucleotide
  Sense strand starting at position 1874 of SEQ ID NO: 1884451
aagguuacggcucaggaua

SEQ ID NO: 2266745 - RNA, 19 nt, Artificial Sequence
  Description of Artificial Sequence: Synthetic oligonucleotide
  Antisense strand to SEQ ID NO: 2266744
uauccugagccguaaccuu

SEQ ID NO: 2266746 - RNA, 19 nt, Artificial Sequence
  Description of Artificial Sequence: Synthetic oligonucleotide
  Sense strand starting at position 2339 of SEQ ID NO: 1884451
gugcccucggugagugaaa

SEQ ID NO: 2266747 - RNA, 19 nt, Artificial Sequence
  Description of Artificial Sequence: Synthetic oligonucleotide
  Antisense strand to SEQ ID NO: 2266746
uuucacucaccgagggcac

SEQ ID NO: 2266748 - RNA, 19 nt, Artificial Sequence
  Description of Artificial Sequence: Synthetic oligonucleotide
  Sense strand starting at position 2394 of SEQ ID NO: 1884451
ugaguucgacccugaggga

SEQ ID NO: 2266749 - RNA, 19 nt, Artificial Sequence
  Description of Artificial Sequence: Synthetic oligonucleotide
  Antisense strand to SEQ ID NO: 2266748
ucccucagggucgaacuca

SEQ ID NO: 2266750 - RNA, 19 nt, Artificial Sequence
  Description of Artificial Sequence: Synthetic oligonucleotide
  Sense strand starting at position 2601 of SEQ ID NO: 1884451
gggugaguuaucggaacca

SEQ ID NO: 2266751 - RNA, 19 nt, Artificial Sequence
  Description of Artificial Sequence: Synthetic oligonucleotide
  Antisense strand to SEQ ID NO: 2266750
ugguuccgauaacucaccc

SEQ ID NO: 2266752 - RNA, 19 nt, Artificial Sequence
  Description of Artificial Sequence: Synthetic oligonucleotide
  Sense strand starting at position 2800 of SEQ ID NO: 1884451
cacgcacuucgugucaauu

SEQ ID NO: 2266753 - RNA, 19 nt, Artificial Sequence
  Description of Artificial Sequence: Synthetic oligonucleotide
  Antisense strand to SEQ ID NO: 2266752
aauugacacgaagugcgug

SEQ ID NO: 2266754 - RNA, 19 nt, Artificial Sequence
  Description of Artificial Sequence: Synthetic oligonucleotide
  Sense strand starting at position 2898 of SEQ ID NO: 1884451
ugaggucauuugggacaca

SEQ ID NO: 2266755 - RNA, 19 nt, Artificial Sequence
  Description of Artificial Sequence: Synthetic oligonucleotide
  Antisense strand to SEQ ID NO: 2266754
ugugucccaaaugaccuca

SEQ ID NO: 2266756 - RNA, 19 nt, Artificial Sequence
  Description of Artificial Sequence: Synthetic oligonucleotide
  Sense strand starting at position 3070 of SEQ ID NO: 1884451
uggagcaaguguuugggaa

SEQ ID NO: 2266757 - RNA, 19 nt, Artificial Sequence
  Description of Artificial Sequence: Synthetic oligonucleotide
  Antisense strand to SEQ ID NO: 2266756
uucccaaacacuugcucca

SEQ ID NO: 2266758 - RNA, 19 nt, Artificial Sequence
  Description of Artificial Sequence: Synthetic oligonucleotide
  Sense strand starting at position 3071 of SEQ ID NO: 1884451
ggagcaaguguuugggaag

SEQ ID NO: 2266759 - RNA, 19 nt, Artificial Sequence
  Description of Artificial Sequence: Synthetic oligonucleotide
  Antisense strand to SEQ ID NO: 2266758
cuucccaaacacuugcucc

SEQ ID NO: 2266760 - RNA, 19 nt, Artificial Sequence
  Description of Artificial Sequence: Synthetic oligonucleotide
  Sense strand starting at position 3242 of SEQ ID NO: 1884451
ggagugaaggguggguuua

SEQ ID NO: 2266761 - RNA, 19 nt, Artificial Sequence
  Description of Artificial Sequence: Synthetic oligonucleotide
  Antisense strand to SEQ ID NO: 2266760
uaaacccacccuucacucc

SEQ ID NO: 2266762 - RNA, 19 nt, Artificial Sequence
  Description of Artificial Sequence: Synthetic oligonucleotide
  Sense strand starting at position 3253 of SEQ ID NO: 1884451
uggguuuagcuauauugac

SEQ ID NO: 2266763 - RNA, 19 nt, Artificial Sequence
  Description of Artificial Sequence: Synthetic oligonucleotide
  Antisense strand to SEQ ID NO: 2266762
gucaauauagcuaaaccca

SEQ ID NO: 2266764 - RNA, 19 nt, Artificial Sequence
  Description of Artificial Sequence: Synthetic oligonucleotide
  Sense strand starting at position 3320 of SEQ ID NO: 1884451
gaagcuguagagugaaauu

SEQ ID NO: 2266765 - RNA, 19 nt, Artificial Sequence
  Description of Artificial Sequence: Synthetic oligonucleotide
  Antisense strand to SEQ ID NO: 2266764
aauuucacucuacagcuuc

SEQ ID NO: 2266766 - RNA, 19 nt, Artificial Sequence
  Description of Artificial Sequence: Synthetic oligonucleotide
  Sense strand starting at position 3419 of SEQ ID NO: 1884451
auauuauaguccuuggaca

SEQ ID NO: 2266767 - RNA, 19 nt, Artificial Sequence
  Description of Artificial Sequence: Synthetic oligonucleotide
  Antisense strand to SEQ ID NO: 2266766
uguccaaggacuauaauau

SEQ ID NO: 2266768 - RNA, 19 nt, Artificial Sequence
  Description of Artificial Sequence: Synthetic oligonucleotide
  Sense strand starting at position 3421 of SEQ ID NO: 1884451
auuauaguccuuggacaaa

SEQ ID NO: 2266769 - RNA, 19 nt, Artificial Sequence
  Description of Artificial Sequence: Synthetic oligonucleotide
  Antisense strand to SEQ ID NO: 2266768
uuuguccaaggacuauaau

SEQ ID NO: 2266770 - RNA, 19 nt, Artificial Sequence
  Description of Artificial Sequence: Synthetic oligonucleotide
  Sense strand starting at position 3807 of SEQ ID NO: 1884451
cagccacucgaggguuaaa

SEQ ID NO: 2266771 - RNA, 19 nt, Artificial Sequence
  Description of Artificial Sequence: Synthetic oligonucleotide
  Antisense strand to SEQ ID NO: 2266770
uuuaacccucgaguggcug

SEQ ID NO: 2266772 - RNA, 19 nt, Artificial Sequence
  Description of Artificial Sequence: Synthetic oligonucleotide
  Sense strand starting at position 262 of SEQ ID NO: 1884452
guuucuucucaauggaaac

SEQ ID NO: 2266773 - RNA, 19 nt, Artificial Sequence
  Description of Artificial Sequence: Synthetic oligonucleotide
  Antisense strand to SEQ ID NO: 2266772
guuuccauugagaagaaac

SEQ ID NO: 2266774 - RNA, 19 nt, Artificial Sequence
  Description of Artificial Sequence: Synthetic oligonucleotide
  Sense strand starting at position 446 of SEQ ID NO: 1884452
caguuuagguauccuagau

SEQ ID NO: 2266775 - RNA, 19 nt, Artificial Sequence
  Description of Artificial Sequence: Synthetic oligonucleotide
  Antisense strand to SEQ ID NO: 2266774
aucuaggauaccuaaacug

SEQ ID NO: 2266776 - RNA, 19 nt, Artificial Sequence
  Description of Artificial Sequence: Synthetic oligonucleotide
  Sense strand starting at position 450 of SEQ ID NO: 1884452
uuagguauccuagauccau

SEQ ID NO: 2266777 - RNA, 19 nt, Artificial Sequence
  Description of Artificial Sequence: Synthetic oligonucleotide
  Antisense strand to SEQ ID NO: 2266776
auggaucuaggauaccuaa

SEQ ID NO: 2266778 - RNA, 19 nt, Artificial Sequence
  Description of Artificial Sequence: Synthetic oligonucleotide
  Sense strand starting at position 776 of SEQ ID NO: 1884452
ugugacugagggugagaua

SEQ ID NO: 2266779 - RNA, 19 nt, Artificial Sequence
  Description of Artificial Sequence: Synthetic oligonucleotide
  Antisense strand to SEQ ID NO: 2266778
uaucucacccucagucaca

SEQ ID NO: 2266780 - RNA, 19 nt, Artificial Sequence
  Description of Artificial Sequence: Synthetic oligonucleotide
  Sense strand starting at position 1023 of SEQ ID NO: 1884452
uggaauguccgugaacuuu

SEQ ID NO: 2266781 - RNA, 19 nt, Artificial Sequence
  Description of Artificial Sequence: Synthetic oligonucleotide
  Antisense strand to SEQ ID NO: 2266780
aaaguucacggacauucca

SEQ ID NO: 2266782 - RNA, 19 nt, Artificial Sequence
  Description of Artificial Sequence: Synthetic oligonucleotide
  Sense strand starting at position 1565 of SEQ ID NO: 1884452
ggauucuguagauagugca

SEQ ID NO: 2266783 - RNA, 19 nt, Artificial Sequence
  Description of Artificial Sequence: Synthetic oligonucleotide
  Antisense strand to SEQ ID NO: 2266782
ugcacuaucuacagaaucc

SEQ ID NO: 2266784 - RNA, 19 nt, Artificial Sequence
  Description of Artificial Sequence: Synthetic oligonucleotide
  Sense strand starting at position 1677 of SEQ ID NO: 1884452
aaacaaggugucuggcaua

SEQ ID NO: 2266785 - RNA, 19 nt, Artificial Sequence
  Description of Artificial Sequence: Synthetic oligonucleotide
  Antisense strand to SEQ ID NO: 2266784
uaugccagacaccuuguuu

SEQ ID NO: 2266786 - RNA, 19 nt, Artificial Sequence
  Description of Artificial Sequence: Synthetic oligonucleotide
  Sense strand starting at position 1689 of SEQ ID NO: 1884452
uggcauaagcuuuauuaua

SEQ ID NO: 2266787 - RNA, 19 nt, Artificial Sequence
  Description of Artificial Sequence: Synthetic oligonucleotide
  Antisense strand to SEQ ID NO: 2266786
uauaauaaagcuuaugcca

SEQ ID NO: 2266788 - RNA, 19 nt, Artificial Sequence
  Description of Artificial Sequence: Synthetic oligonucleotide
  Sense strand starting at position 1752 of SEQ ID NO: 1884452
cccaauuaagaguguagga

SEQ ID NO: 2266789 - RNA, 19 nt, Artificial Sequence
  Description of Artificial Sequence: Synthetic oligonucleotide
  Antisense strand to SEQ ID NO: 2266788
uccuacacucuuaauuggg

SEQ ID NO: 2266790 - RNA, 19 nt, Artificial Sequence
  Description of Artificial Sequence: Synthetic oligonucleotide
  Sense strand starting at position 1788 of SEQ ID NO: 1884452
ggcugcugaaugcaugaau

SEQ ID NO: 2266791 - RNA, 19 nt, Artificial Sequence
  Description of Artificial Sequence: Synthetic oligonucleotide
  Antisense strand to SEQ ID NO: 2266790
auucaugcauucagcagcc

SEQ ID NO: 2266792 - RNA, 19 nt, Artificial Sequence
  Description of Artificial Sequence: Synthetic oligonucleotide
  Sense strand starting at position 1837 of SEQ ID NO: 1884452
acugaugucucacccaaag

SEQ ID NO: 2266793 - RNA, 19 nt, Artificial Sequence
  Description of Artificial Sequence: Synthetic oligonucleotide
  Antisense strand to SEQ ID NO: 2266792
cuuugggugagacaucagu

SEQ ID NO: 2266794 - RNA, 19 nt, Artificial Sequence
  Description of Artificial Sequence: Synthetic oligonucleotide
  Sense strand starting at position 1988 of SEQ ID NO: 1884452
uggugaauugccuggaaag

SEQ ID NO: 2266795 - RNA, 19 nt, Artificial Sequence
  Description of Artificial Sequence: Synthetic oligonucleotide
  Antisense strand to SEQ ID NO: 2266794
cuuuccaggcaauucacca

SEQ ID NO: 2266796 - RNA, 19 nt, Artificial Sequence
  Description of Artificial Sequence: Synthetic oligonucleotide
  Sense strand starting at position 1990 of SEQ ID NO: 1884452
gugaauugccuggaaagug

SEQ ID NO: 2266797 - RNA, 19 nt, Artificial Sequence
  Description of Artificial Sequence: Synthetic oligonucleotide
  Antisense strand to SEQ ID NO: 2266796
cacuuuccaggcaauucac

SEQ ID NO: 2266798 - RNA, 19 nt, Artificial Sequence
  Description of Artificial Sequence: Synthetic oligonucleotide
  Sense strand starting at position 2079 of SEQ ID NO: 1884452
uuguaaugacagcauugau

SEQ ID NO: 2266799 - RNA, 19 nt, Artificial Sequence
  Description of Artificial Sequence: Synthetic oligonucleotide
  Antisense strand to SEQ ID NO: 2266798
aucaaugcugucauuacaa

SEQ ID NO: 2266800 - RNA, 19 nt, Artificial Sequence
  Description of Artificial Sequence: Synthetic oligonucleotide
  Sense strand starting at position 2089 of SEQ ID NO: 1884452
agcauugauguuugggaga

SEQ ID NO: 2266801 - RNA, 19 nt, Artificial Sequence
  Description of Artificial Sequence: Synthetic oligonucleotide
  Antisense strand to SEQ ID NO: 2266800
ucucccaaacaucaaugcu

SEQ ID NO: 2266802 - RNA, 19 nt, Artificial Sequence
  Description of Artificial Sequence: Synthetic oligonucleotide
  Sense strand starting at position 2204 of SEQ ID NO: 1884452
aguggaggacuuuggcaaa

SEQ ID NO: 2266803 - RNA, 19 nt, Artificial Sequence
  Description of Artificial Sequence: Synthetic oligonucleotide
  Antisense strand to SEQ ID NO: 2266802
uuugccaaaguccuccacu

SEQ ID NO: 2266804 - RNA, 19 nt, Artificial Sequence
  Description of Artificial Sequence: Synthetic oligonucleotide
  Sense strand starting at position 2250 of SEQ ID NO: 1884452
ugaccugugaaguggagau

SEQ ID NO: 2266805 - RNA, 19 nt, Artificial Sequence
  Description of Artificial Sequence: Synthetic oligonucleotide
  Antisense strand to SEQ ID NO: 2266804
aucuccacuucacagguca

SEQ ID NO: 2266806 - RNA, 19 nt, Artificial Sequence
  Description of Artificial Sequence: Synthetic oligonucleotide
  Sense strand starting at position 2302 of SEQ ID NO: 1884452
ggaugaaaugugugagcca

SEQ ID NO: 2266807 - RNA, 19 nt, Artificial Sequence
  Description of Artificial Sequence: Synthetic oligonucleotide
  Antisense strand to SEQ ID NO: 2266806
uggcucacacauuucaucc

SEQ ID NO: 2266808 - RNA, 19 nt, Artificial Sequence
  Description of Artificial Sequence: Synthetic oligonucleotide
  Sense strand starting at position 2305 of SEQ ID NO: 1884452
ugaaaugugugagccaaau

SEQ ID NO: 2266809 - RNA, 19 nt, Artificial Sequence
  Description of Artificial Sequence: Synthetic oligonucleotide
  Antisense strand to SEQ ID NO: 2266808
auuuggcucacacauuuca

SEQ ID NO: 2266810 - RNA, 19 nt, Artificial Sequence
  Description of Artificial Sequence: Synthetic oligonucleotide
  Sense strand starting at position 2311 of SEQ ID NO: 1884452
gugugagccaaauaucuag

SEQ ID NO: 2266811 - RNA, 19 nt, Artificial Sequence
  Description of Artificial Sequence: Synthetic oligonucleotide
  Antisense strand to SEQ ID NO: 2266810
cuagauauuuggcucacac

SEQ ID NO: 2266812 - RNA, 19 nt, Artificial Sequence
  Description of Artificial Sequence: Synthetic oligonucleotide
  Sense strand starting at position 2450 of SEQ ID NO: 1884452
aguaaagaagaugguuuau

SEQ ID NO: 2266813 - RNA, 19 nt, Artificial Sequence
  Description of Artificial Sequence: Synthetic oligonucleotide
  Antisense strand to SEQ ID NO: 2266812
auaaaccaucuucuuuacu

SEQ ID NO: 2266814 - RNA, 19 nt, Artificial Sequence
  Description of Artificial Sequence: Synthetic oligonucleotide
  Sense strand starting at position 2838 of SEQ ID NO: 1884452
agggacuucccaugacuuu

SEQ ID NO: 2266815 - RNA, 19 nt, Artificial Sequence
  Description of Artificial Sequence: Synthetic oligonucleotide
  Antisense strand to SEQ ID NO: 2266814
aaagucaugggaagucccu

SEQ ID NO: 2266816 - RNA, 19 nt, Artificial Sequence
  Description of Artificial Sequence: Synthetic oligonucleotide
  Sense strand starting at position 2850 of SEQ ID NO: 1884452
ugacuuuauggagguguca

SEQ ID NO: 2266817 - RNA, 19 nt, Artificial Sequence
  Description of Artificial Sequence: Synthetic oligonucleotide
  Antisense strand to SEQ ID NO: 2266816
ugacaccuccauaaaguca

SEQ ID NO: 2266818 - RNA, 19 nt, Artificial Sequence
  Description of Artificial Sequence: Synthetic oligonucleotide
  Sense strand starting at position 2852 of SEQ ID NO: 1884452
acuuuauggaggugucaug

SEQ ID NO: 2266819 - RNA, 19 nt, Artificial Sequence
  Description of Artificial Sequence: Synthetic oligonucleotide
  Antisense strand to SEQ ID NO: 2266818
caugacaccuccauaaagu

SEQ ID NO: 2266820 - RNA, 19 nt, Artificial Sequence
  Description of Artificial Sequence: Synthetic oligonucleotide
  Sense strand starting at position 2861 of SEQ ID NO: 1884452
aggugucaugauuagaccu

SEQ ID NO: 2266821 - RNA, 19 nt, Artificial Sequence
  Description of Artificial Sequence: Synthetic oligonucleotide
  Antisense strand to SEQ ID NO: 2266820
aggucuaaucaugacaccu

SEQ ID NO: 2266822 - RNA, 19 nt, Artificial Sequence
  Description of Artificial Sequence: Synthetic oligonucleotide
  Sense strand starting at position 2973 of SEQ ID NO: 1884452
gguucucugguauaaucau

SEQ ID NO: 2266823 - RNA, 19 nt, Artificial Sequence
  Description of Artificial Sequence: Synthetic oligonucleotide
  Antisense strand to SEQ ID NO: 2266822
augauuauaccagagaacc

SEQ ID NO: 2266824 - RNA, 19 nt, Artificial Sequence
  Description of Artificial Sequence: Synthetic oligonucleotide
  Sense strand starting at position 3190 of SEQ ID NO: 1884452
agaaguaauuaugcaugaa

SEQ ID NO: 2266825 - RNA, 19 nt, Artificial Sequence
  Description of Artificial Sequence: Synthetic oligonucleotide
  Antisense strand to SEQ ID NO: 2266824
uucaugcauaauuacuucu

SEQ ID NO: 2266826 - RNA, 19 nt, Artificial Sequence
  Description of Artificial Sequence: Synthetic oligonucleotide
  Sense strand starting at position 3193 of SEQ ID NO: 1884452
aguaauuaugcaugaacug

SEQ ID NO: 2266827 - RNA, 19 nt, Artificial Sequence
  Description of Artificial Sequence: Synthetic oligonucleotide
  Antisense strand to SEQ ID NO: 2266826
caguucaugcauaauuacu

SEQ ID NO: 2266828 - RNA, 19 nt, Artificial Sequence
  Description of Artificial Sequence: Synthetic oligonucleotide
  Sense strand starting at position 3262 of SEQ ID NO: 1884452
ccaguuaggcuccaggaua

SEQ ID NO: 2266829 - RNA, 19 nt, Artificial Sequence
  Description of Artificial Sequence: Synthetic oligonucleotide
  Antisense strand to SEQ ID NO: 2266828
uauccuggagccuaacugg

SEQ ID NO: 2266830 - RNA, 19 nt, Artificial Sequence
  Description of Artificial Sequence: Synthetic oligonucleotide
  Sense strand starting at position 3354 of SEQ ID NO: 1884452
guccacugauaucuggaaa

SEQ ID NO: 2266831 - RNA, 19 nt, Artificial Sequence
  Description of Artificial Sequence: Synthetic oligonucleotide
  Antisense strand to SEQ ID NO: 2266830
uuuccagauaucaguggac

SEQ ID NO: 2266832 - RNA, 19 nt, Artificial Sequence
  Description of Artificial Sequence: Synthetic oligonucleotide
  Sense strand starting at position 3407 of SEQ ID NO: 1884452
gagacauggaguggaguuu

SEQ ID NO: 2266833 - RNA, 19 nt, Artificial Sequence
  Description of Artificial Sequence: Synthetic oligonucleotide
  Antisense strand to SEQ ID NO: 2266832
aaacuccacuccaugucuc

SEQ ID NO: 2266834 - RNA, 19 nt, Artificial Sequence
  Description of Artificial Sequence: Synthetic oligonucleotide
  Sense strand starting at position 3413 of SEQ ID NO: 1884452
uggaguggaguuuaucacu

SEQ ID NO: 2266835 - RNA, 19 nt, Artificial Sequence
  Description of Artificial Sequence: Synthetic oligonucleotide
  Antisense strand to SEQ ID NO: 2266834
agugauaaacuccacucca

SEQ ID NO: 2266836 - RNA, 19 nt, Artificial Sequence
  Description of Artificial Sequence: Synthetic oligonucleotide
  Sense strand starting at position 3418 of SEQ ID NO: 1884452
uggaguuuaucacuggaau

SEQ ID NO: 2266837 - RNA, 19 nt, Artificial Sequence
  Description of Artificial Sequence: Synthetic oligonucleotide
  Antisense strand to SEQ ID NO: 2266836
auuccagugauaaacucca

SEQ ID NO: 2266838 - RNA, 19 nt, Artificial Sequence
  Description of Artificial Sequence: Synthetic oligonucleotide
  Sense strand starting at position 3419 of SEQ ID NO: 1884452
ggaguuuaucacuggaauu

SEQ ID NO: 2266839 - RNA, 19 nt, Artificial Sequence
  Description of Artificial Sequence: Synthetic oligonucleotide
  Antisense strand to SEQ ID NO: 2266838
aauuccagugauaaacucc

SEQ ID NO: 2266840 - RNA, 19 nt, Artificial Sequence
  Description of Artificial Sequence: Synthetic oligonucleotide
  Sense strand starting at position 3462 of SEQ ID NO: 1884452
gggauucccaguuggaaua

SEQ ID NO: 2266841 - RNA, 19 nt, Artificial Sequence
  Description of Artificial Sequence: Synthetic oligonucleotide
  Antisense strand to SEQ ID NO: 2266840
uauuccaacugggaauccc

SEQ ID NO: 2266842 - RNA, 19 nt, Artificial Sequence
  Description of Artificial Sequence: Synthetic oligonucleotide
  Sense strand starting at position 3463 of SEQ ID NO: 1884452
ggauucccaguuggaauaa

SEQ ID NO: 2266843 - RNA, 19 nt, Artificial Sequence
  Description of Artificial Sequence: Synthetic oligonucleotide
  Antisense strand to SEQ ID NO: 2266842
uuauuccaacugggaaucc

SEQ ID NO: 2266844 - RNA, 19 nt, Artificial Sequence
  Description of Artificial Sequence: Synthetic oligonucleotide
  Sense strand starting at position 3541 of SEQ ID NO: 1884452
uucuuagucuagcugagaa

SEQ ID NO: 2266845 - RNA, 19 nt, Artificial Sequence
  Description of Artificial Sequence: Synthetic oligonucleotide
  Antisense strand to SEQ ID NO: 2266844
uucucagcuagacuaagaa

SEQ ID NO: 2266846 - RNA, 19 nt, Artificial Sequence
  Description of Artificial Sequence: Synthetic oligonucleotide
  Sense strand starting at position 3738 of SEQ ID NO: 1884452
uucucauggaagugaaugu

SEQ ID NO: 2266847 - RNA, 19 nt, Artificial Sequence
  Description of Artificial Sequence: Synthetic oligonucleotide
  Antisense strand to SEQ ID NO: 2266846
acauucacuuccaugagaa

SEQ ID NO: 2266848 - RNA, 19 nt, Artificial Sequence
  Description of Artificial Sequence: Synthetic oligonucleotide
  Sense strand starting at position 3745 of SEQ ID NO: 1884452
ggaagugaaugugucucau

SEQ ID NO: 2266849 - RNA, 19 nt, Artificial Sequence
  Description of Artificial Sequence: Synthetic oligonucleotide
  Antisense strand to SEQ ID NO: 2266848
augagacacauucacuucc

SEQ ID NO: 2266850 - RNA, 19 nt, Artificial Sequence
  Description of Artificial Sequence: Synthetic oligonucleotide
  Sense strand starting at position 3747 of SEQ ID NO: 1884452
aagugaaugugucucauga

SEQ ID NO: 2266851 - RNA, 19 nt, Artificial Sequence
  Description of Artificial Sequence: Synthetic oligonucleotide
  Antisense strand to SEQ ID NO: 2266850
ucaugagacacauucacuu

SEQ ID NO: 2266852 - RNA, 19 nt, Artificial Sequence
  Description of Artificial Sequence: Synthetic oligonucleotide
  Sense strand starting at position 35 of SEQ ID NO: 1884453
augggagagcugugacaga

SEQ ID NO: 2266853 - RNA, 19 nt, Artificial Sequence
  Description of Artificial Sequence: Synthetic oligonucleotide
  Antisense strand to SEQ ID NO: 2266852
ucugucacagcucucccau

SEQ ID NO: 2266854 - RNA, 19 nt, Artificial Sequence
  Description of Artificial Sequence: Synthetic oligonucleotide
  Sense strand starting at position 146 of SEQ ID NO: 1884453
ucaugaauugcgcucugcu

SEQ ID NO: 2266855 - RNA, 19 nt, Artificial Sequence
  Description of Artificial Sequence: Synthetic oligonucleotide
  Antisense strand to SEQ ID NO: 2266854
agcagagcgcaauucauga

SEQ ID NO: 2266856 - RNA, 19 nt, Artificial Sequence
  Description of Artificial Sequence: Synthetic oligonucleotide
  Sense strand starting at position 176 of SEQ ID NO: 1884453
ucuugaucuggucaaauua

SEQ ID NO: 2266857 - RNA, 19 nt, Artificial Sequence
  Description of Artificial Sequence: Synthetic oligonucleotide
  Antisense strand to SEQ ID NO: 2266856
uaauuugaccagaucaaga

SEQ ID NO: 2266858 - RNA, 19 nt, Artificial Sequence
  Description of Artificial Sequence: Synthetic oligonucleotide
  Sense strand starting at position 219 of SEQ ID NO: 1884453
gcaguaaagccugauugga

SEQ ID NO: 2266859 - RNA, 19 nt, Artificial Sequence
  Description of Artificial Sequence: Synthetic oligonucleotide
  Antisense strand to SEQ ID NO: 2266858
uccaaucaggcuuuacugc

SEQ ID NO: 2266860 - RNA, 19 nt, Artificial Sequence
  Description of Artificial Sequence: Synthetic oligonucleotide
  Sense strand starting at position 221 of SEQ ID NO: 1884453
aguaaagccugauuggaau

SEQ ID NO: 2266861 - RNA, 19 nt, Artificial Sequence
  Description of Artificial Sequence: Synthetic oligonucleotide
  Antisense strand to SEQ ID NO: 2266860
auuccaaucaggcuuuacu

SEQ ID NO: 2266862 - RNA, 19 nt, Artificial Sequence
  Description of Artificial Sequence: Synthetic oligonucleotide
  Sense strand starting at position 290 of SEQ ID NO: 1884453
aaagcauuacagugacuga

SEQ ID NO: 2266863 - RNA, 19 nt, Artificial Sequence
  Description of Artificial Sequence: Synthetic oligonucleotide
  Antisense strand to SEQ ID NO: 2266862
ucagucacuguaaugcuuu

SEQ ID NO: 2266864 - RNA, 19 nt, Artificial Sequence
  Description of Artificial Sequence: Synthetic oligonucleotide
  Sense strand starting at position 293 of SEQ ID NO: 1884453
gcauuacagugacugaaca

SEQ ID NO: 2266865 - RNA, 19 nt, Artificial Sequence
  Description of Artificial Sequence: Synthetic oligonucleotide
  Antisense strand to SEQ ID NO: 2266864
uguucagucacuguaaugc

SEQ ID NO: 2266866 - RNA, 19 nt, Artificial Sequence
  Description of Artificial Sequence: Synthetic oligonucleotide
  Sense strand starting at position 318 of SEQ ID NO: 1884453
agguuucuacauggacaca

SEQ ID NO: 2266867 - RNA, 19 nt, Artificial Sequence
  Description of Artificial Sequence: Synthetic oligonucleotide
  Antisense strand to SEQ ID NO: 2266866
uguguccauguagaaaccu

SEQ ID NO: 2266868 - RNA, 19 nt, Artificial Sequence
  Description of Artificial Sequence: Synthetic oligonucleotide
  Sense strand starting at position 629 of SEQ ID NO: 1884453
uauggagguuucuccugau

SEQ ID NO: 2266869 - RNA, 19 nt, Artificial Sequence
  Description of Artificial Sequence: Synthetic oligonucleotide
  Antisense strand to SEQ ID NO: 2266868
aucaggagaaaccuccaua

SEQ ID NO: 2266870 - RNA, 19 nt, Artificial Sequence
  Description of Artificial Sequence: Synthetic oligonucleotide
  Sense strand starting at position 633 of SEQ ID NO: 1884453
gagguuucuccugauccau

SEQ ID NO: 2266871 - RNA, 19 nt, Artificial Sequence
  Description of Artificial Sequence: Synthetic oligonucleotide
  Antisense strand to SEQ ID NO: 2266870
auggaucaggagaaaccuc

SEQ ID NO: 2266872 - RNA, 19 nt, Artificial Sequence
  Description of Artificial Sequence: Synthetic oligonucleotide
  Sense strand starting at position 699 of SEQ ID NO: 1884453
ggaugucaucagggcucua

SEQ ID NO: 2266873 - RNA, 19 nt, Artificial Sequence
  Description of Artificial Sequence: Synthetic oligonucleotide
  Antisense strand to SEQ ID NO: 2266872
uagagcccugaugacaucc

SEQ ID NO: 2266874 - RNA, 19 nt, Artificial Sequence
  Description of Artificial Sequence: Synthetic oligonucleotide
  Sense strand starting at position 758 of SEQ ID NO: 1884453
ccagcaguugucuaacuag

SEQ ID NO: 2266875 - RNA, 19 nt, Artificial Sequence
  Description of Artificial Sequence: Synthetic oligonucleotide
  Antisense strand to SEQ ID NO: 2266874
cuaguuagacaacugcugg

SEQ ID NO: 2266876 - RNA, 19 nt, Artificial Sequence
  Description of Artificial Sequence: Synthetic oligonucleotide
  Sense strand starting at position 779 of SEQ ID NO: 1884453
cccucagagccuugagauu

SEQ ID NO: 2266877 - RNA, 19 nt, Artificial Sequence
  Description of Artificial Sequence: Synthetic oligonucleotide
  Antisense strand to SEQ ID NO: 2266876
aaucucaaggcucugaggg

SEQ ID NO: 2266878 - RNA, 19 nt, Artificial Sequence
  Description of Artificial Sequence: Synthetic oligonucleotide
  Sense strand starting at position 873 of SEQ ID NO: 1884453
agagauuaugcaugaucua

SEQ ID NO: 2266879 - RNA, 19 nt, Artificial Sequence
  Description of Artificial Sequence: Synthetic oligonucleotide
  Antisense strand to SEQ ID NO: 2266878
uagaucaugcauaaucucu

SEQ ID NO: 2266880 - RNA, 19 nt, Artificial Sequence
  Description of Artificial Sequence: Synthetic oligonucleotide
  Sense strand starting at position 925 of SEQ ID NO: 1884453
gccugucauguuuauagaa

SEQ ID NO: 2266881 - RNA, 19 nt, Artificial Sequence
  Description of Artificial Sequence: Synthetic oligonucleotide
  Antisense strand to SEQ ID NO: 2266880
uucuauaaacaugacaggc

SEQ ID NO: 2266882 - RNA, 19 nt, Artificial Sequence
  Description of Artificial Sequence: Synthetic oligonucleotide
  Sense strand starting at position 961 of SEQ ID NO: 1884453
aacacaauacagugugaga

SEQ ID NO: 2266883 - RNA, 19 nt, Artificial Sequence
  Description of Artificial Sequence: Synthetic oligonucleotide
  Antisense strand to SEQ ID NO: 2266882
ucucacacuguauuguguu

SEQ ID NO: 2266884 - RNA, 19 nt, Artificial Sequence
  Description of Artificial Sequence: Synthetic oligonucleotide
  Sense strand starting at position 963 of SEQ ID NO: 1884453
cacaauacagugugagaga

SEQ ID NO: 2266885 - RNA, 19 nt, Artificial Sequence
  Description of Artificial Sequence: Synthetic oligonucleotide
  Antisense strand to SEQ ID NO: 2266884
ucucucacacuguauugug

SEQ ID NO: 2266886 - RNA, 19 nt, Artificial Sequence
  Description of Artificial Sequence: Synthetic oligonucleotide
  Sense strand starting at position 1346 of SEQ ID NO: 1884453
uuaugaguacaugauguca

SEQ ID NO: 2266887 - RNA, 19 nt, Artificial Sequence
  Description of Artificial Sequence: Synthetic oligonucleotide
  Antisense strand to SEQ ID NO: 2266886
ugacaucauguacucauaa

SEQ ID NO: 2266888 - RNA, 19 nt, Artificial Sequence
  Description of Artificial Sequence: Synthetic oligonucleotide
  Sense strand starting at position 1389 of SEQ ID NO: 1884453
gugcuaaagauacggagaa

SEQ ID NO: 2266889 - RNA, 19 nt, Artificial Sequence
  Description of Artificial Sequence: Synthetic oligonucleotide
  Antisense strand to SEQ ID NO: 2266888
uucuccguaucuuuagcac

SEQ ID NO: 2266890 - RNA, 19 nt, Artificial Sequence
  Description of Artificial Sequence: Synthetic oligonucleotide
  Sense strand starting at position 1401 of SEQ ID NO: 1884453
cggagaaauuaugcaggga

SEQ ID NO: 2266891 - RNA, 19 nt, Artificial Sequence
  Description of Artificial Sequence: Synthetic oligonucleotide
  Antisense strand to SEQ ID NO: 2266890
ucccugcauaauuucuccg

SEQ ID NO: 2266892 - RNA, 19 nt, Artificial Sequence
  Description of Artificial Sequence: Synthetic oligonucleotide
  Sense strand starting at position 1446 of SEQ ID NO: 1884453
cucaguauaaggugguaaa

SEQ ID NO: 2266893 - RNA, 19 nt, Artificial Sequence
  Description of Artificial Sequence: Synthetic oligonucleotide
  Antisense strand to SEQ ID NO: 2266892
uuuaccaccuuauacugag

SEQ ID NO: 2266894 - RNA, 19 nt, Artificial Sequence
  Description of Artificial Sequence: Synthetic oligonucleotide
  Sense strand starting at position 1632 of SEQ ID NO: 1884453
aggugaaagguuuggaaac

SEQ ID NO: 2266895 - RNA, 19 nt, Artificial Sequence
  Description of Artificial Sequence: Synthetic oligonucleotide
  Antisense strand to SEQ ID NO: 2266894
guuuccaaaccuuucaccu

SEQ ID NO: 2266896 - RNA, 19 nt, Artificial Sequence
  Description of Artificial Sequence: Synthetic oligonucleotide
  Sense strand starting at position 1793 of SEQ ID NO: 1884453
cugaaucauggagguuaug

SEQ ID NO: 2266897 - RNA, 19 nt, Artificial Sequence
  Description of Artificial Sequence: Synthetic oligonucleotide
  Antisense strand to SEQ ID NO: 2266896
cauaaccuccaugauucag

SEQ ID NO: 2266898 - RNA, 19 nt, Artificial Sequence
  Description of Artificial Sequence: Synthetic oligonucleotide
  Sense strand starting at position 1835 of SEQ ID NO: 1884453
cacagauaugaacggcaga

SEQ ID NO: 2266899 - RNA, 19 nt, Artificial Sequence
  Description of Artificial Sequence: Synthetic oligonucleotide
  Antisense strand to SEQ ID NO: 2266898
ucugccguucauaucugug

SEQ ID NO: 2266900 - RNA, 19 nt, Artificial Sequence
  Description of Artificial Sequence: Synthetic oligonucleotide
  Sense strand starting at position 1836 of SEQ ID NO: 1884453
acagauaugaacggcagaa

SEQ ID NO: 2266901 - RNA, 19 nt, Artificial Sequence
  Description of Artificial Sequence: Synthetic oligonucleotide
  Antisense strand to SEQ ID NO: 2266900
uucugccguucauaucugu

SEQ ID NO: 2266902 - RNA, 19 nt, Artificial Sequence
  Description of Artificial Sequence: Synthetic oligonucleotide
  Sense strand starting at position 1858 of SEQ ID NO: 1884453
acaggcaucuuucugacuu

SEQ ID NO: 2266903 - RNA, 19 nt, Artificial Sequence
  Description of Artificial Sequence: Synthetic oligonucleotide
  Antisense strand to SEQ ID NO: 2266902
aagucagaaagaugccugu

SEQ ID NO: 2266904 - RNA, 19 nt, Artificial Sequence
  Description of Artificial Sequence: Synthetic oligonucleotide
  Sense strand starting at position 2000 of SEQ ID NO: 1884453
gguauagucccagaaucua

SEQ ID NO: 2266905 - RNA, 19 nt, Artificial Sequence
  Description of Artificial Sequence: Synthetic oligonucleotide
  Antisense strand to SEQ ID NO: 2266904
uagauucugggacuauacc

SEQ ID NO: 2266906 - RNA, 19 nt, Artificial Sequence
  Description of Artificial Sequence: Synthetic oligonucleotide
  Sense strand starting at position 2069 of SEQ ID NO: 1884453
agaggauucuaauuagcuu

SEQ ID NO: 2266907 - RNA, 19 nt, Artificial Sequence
  Description of Artificial Sequence: Synthetic oligonucleotide
  Antisense strand to SEQ ID NO: 2266906
aagcuaauuagaauccucu

SEQ ID NO: 2266908 - RNA, 19 nt, Artificial Sequence
  Description of Artificial Sequence: Synthetic oligonucleotide
  Sense strand starting at position 2072 of SEQ ID NO: 1884453
ggauucuaauuagcuucua

SEQ ID NO: 2266909 - RNA, 19 nt, Artificial Sequence
  Description of Artificial Sequence: Synthetic oligonucleotide
  Antisense strand to SEQ ID NO: 2266908
uagaagcuaauuagaaucc

SEQ ID NO: 2266910 - RNA, 19 nt, Artificial Sequence
  Description of Artificial Sequence: Synthetic oligonucleotide
  Sense strand starting at position 2382 of SEQ ID NO: 1884453
cccugaaaugcuugagaca

SEQ ID NO: 2266911 - RNA, 19 nt, Artificial Sequence
  Description of Artificial Sequence: Synthetic oligonucleotide
  Antisense strand to SEQ ID NO: 2266910
ugucucaagcauuucaggg

SEQ ID NO: 2266912 - RNA, 19 nt, Artificial Sequence
  Description of Artificial Sequence: Synthetic oligonucleotide
  Sense strand starting at position 2436 of SEQ ID NO: 1884453
cacacugcucccgagauga

SEQ ID NO: 2266913 - RNA, 19 nt, Artificial Sequence
  Description of Artificial Sequence: Synthetic oligonucleotide
  Antisense strand to SEQ ID NO: 2266912
ucaucucgggagcagugug

SEQ ID NO: 2266914 - RNA, 19 nt, Artificial Sequence
  Description of Artificial Sequence: Synthetic oligonucleotide
  Sense strand starting at position 2438 of SEQ ID NO: 1884453
cacugcucccgagaugaca

SEQ ID NO: 2266915 - RNA, 19 nt, Artificial Sequence
  Description of Artificial Sequence: Synthetic oligonucleotide
  Antisense strand to SEQ ID NO: 2266914
ugucaucucgggagcagug

SEQ ID NO: 2266916 - RNA, 19 nt, Artificial Sequence
  Description of Artificial Sequence: Synthetic oligonucleotide
  Sense strand starting at position 2782 of SEQ ID NO: 1884453
gagagauacugcucacauu

SEQ ID NO: 2266917 - RNA, 19 nt, Artificial Sequence
  Description of Artificial Sequence: Synthetic oligonucleotide
  Antisense strand to SEQ ID NO: 2266916
aaugugagcaguaucucuc

SEQ ID NO: 2266918 - RNA, 19 nt, Artificial Sequence
  Description of Artificial Sequence: Synthetic oligonucleotide
  Sense strand starting at position 3112 of SEQ ID NO: 1884453
agcuaucauguugaggaca

SEQ ID NO: 2266919 - RNA, 19 nt, Artificial Sequence
  Description of Artificial Sequence: Synthetic oligonucleotide
  Antisense strand to SEQ ID NO: 2266918
uguccucaacaugauagcu

SEQ ID NO: 2266920 - RNA, 19 nt, Artificial Sequence
  Description of Artificial Sequence: Synthetic oligonucleotide
  Sense strand starting at position 3161 of SEQ ID NO: 1884453
aaugaaugguccucugcag

SEQ ID NO: 2266921 - RNA, 19 nt, Artificial Sequence
  Description of Artificial Sequence: Synthetic oligonucleotide
  Antisense strand to SEQ ID NO: 2266920
cugcagaggaccauucauu

SEQ ID NO: 2266922 - RNA, 19 nt, Artificial Sequence
  Description of Artificial Sequence: Synthetic oligonucleotide
  Sense strand starting at position 3193 of SEQ ID NO: 1884453
gacccaauaggcuagucau

SEQ ID NO: 2266923 - RNA, 19 nt, Artificial Sequence
  Description of Artificial Sequence: Synthetic oligonucleotide
  Antisense strand to SEQ ID NO: 2266922
augacuagccuauuggguc

SEQ ID NO: 2266924 - RNA, 19 nt, Artificial Sequence
  Description of Artificial Sequence: Synthetic oligonucleotide
  Sense strand starting at position 3196 of SEQ ID NO: 1884453
ccaauaggcuagucauaau

SEQ ID NO: 2266925 - RNA, 19 nt, Artificial Sequence
  Description of Artificial Sequence: Synthetic oligonucleotide
  Antisense strand to SEQ ID NO: 2266924
auuaugacuagccuauugg

SEQ ID NO: 2266926 - RNA, 19 nt, Artificial Sequence
  Description of Artificial Sequence: Synthetic oligonucleotide
  Sense strand starting at position 3570 of SEQ ID NO: 1884453
guuucuucucaauggaaac

SEQ ID NO: 2266927 - RNA, 19 nt, Artificial Sequence
  Description of Artificial Sequence: Synthetic oligonucleotide
  Antisense strand to SEQ ID NO: 2266926
guuuccauugagaagaaac

SEQ ID NO: 2266928 - RNA, 19 nt, Artificial Sequence
  Description of Artificial Sequence: Synthetic oligonucleotide
  Sense strand starting at position 3754 of SEQ ID NO: 1884453
caguuuagguauccuagau

SEQ ID NO: 2266929 - RNA, 19 nt, Artificial Sequence
  Description of Artificial Sequence: Synthetic oligonucleotide
  Antisense strand to SEQ ID NO: 2266928
aucuaggauaccuaaacug

SEQ ID NO: 2266930 - RNA, 19 nt, Artificial Sequence
  Description of Artificial Sequence: Synthetic oligonucleotide
  Sense strand starting at position 3758 of SEQ ID NO: 1884453
uuagguauccuagauccau

SEQ ID NO: 2266931 - RNA, 19 nt, Artificial Sequence
  Description of Artificial Sequence: Synthetic oligonucleotide
  Antisense strand to SEQ ID NO: 2266930
auggaucuaggauaccuaa

SEQ ID NO: 2266932 - RNA, 19 nt, Artificial Sequence
  Description of Artificial Sequence: Synthetic oligonucleotide
  Sense strand starting at position 71 of SEQ ID NO: 1884454
uuagccaggcauuaugaua

SEQ ID NO: 2266933 - RNA, 19 nt, Artificial Sequence
  Description of Artificial Sequence: Synthetic oligonucleotide
  Antisense strand to SEQ ID NO: 2266932
uaucauaaugccuggcuaa

SEQ ID NO: 2266934 - RNA, 19 nt, Artificial Sequence
  Description of Artificial Sequence: Synthetic oligonucleotide
  Sense strand starting at position 359 of SEQ ID NO: 1884454
cuuagucuaguauaacuau

SEQ ID NO: 2266935 - RNA, 19 nt, Artificial Sequence
  Description of Artificial Sequence: Synthetic oligonucleotide
  Antisense strand to SEQ ID NO: 2266934
auaguuauacuagacuaag

SEQ ID NO: 2266936 - RNA, 19 nt, Artificial Sequence
  Description of Artificial Sequence: Synthetic oligonucleotide
  Sense strand starting at position 362 of SEQ ID NO: 1884454
agucuaguauaacuauuga

SEQ ID NO: 2266937 - RNA, 19 nt, Artificial Sequence
  Description of Artificial Sequence: Synthetic oligonucleotide
  Antisense strand to SEQ ID NO: 2266936
ucaauaguuauacuagacu

SEQ ID NO: 2266938 - RNA, 19 nt, Artificial Sequence
  Description of Artificial Sequence: Synthetic oligonucleotide
  Sense strand starting at position 407 of SEQ ID NO: 1884454
auguaaauuccuugaaguc

SEQ ID NO: 2266939 - RNA, 19 nt, Artificial Sequence
  Description of Artificial Sequence: Synthetic oligonucleotide
  Antisense strand to SEQ ID NO: 2266938
gacuucaaggaauuuacau

SEQ ID NO: 2266940 - RNA, 19 nt, Artificial Sequence
  Description of Artificial Sequence: Synthetic oligonucleotide
  Sense strand starting at position 408 of SEQ ID NO: 1884454
uguaaauuccuugaaguca

SEQ ID NO: 2266941 - RNA, 19 nt, Artificial Sequence
  Description of Artificial Sequence: Synthetic oligonucleotide
  Antisense strand to SEQ ID NO: 2266940
ugacuucaaggaauuuaca

SEQ ID NO: 2266942 - RNA, 19 nt, Artificial Sequence
  Description of Artificial Sequence: Synthetic oligonucleotide
  Sense strand starting at position 631 of SEQ ID NO: 1884454
ugguaucuuuaaucuauag

SEQ ID NO: 2266943 - RNA, 19 nt, Artificial Sequence
  Description of Artificial Sequence: Synthetic oligonucleotide
  Antisense strand to SEQ ID NO: 2266942
cuauagauuaaagauacca

SEQ ID NO: 2266944 - RNA, 19 nt, Artificial Sequence
  Description of Artificial Sequence: Synthetic oligonucleotide
  Sense strand starting at position 642 of SEQ ID NO: 1884454
aucuauagguagcuucuaa

SEQ ID NO: 2266945 - RNA, 19 nt, Artificial Sequence
  Description of Artificial Sequence: Synthetic oligonucleotide
  Antisense strand to SEQ ID NO: 2266944
uuagaagcuaccuauagau

SEQ ID NO: 2266946 - RNA, 19 nt, Artificial Sequence
  Description of Artificial Sequence: Synthetic oligonucleotide
  Sense strand starting at position 769 of SEQ ID NO: 1884454
guauucucaguugaccuua

SEQ ID NO: 2266947 - RNA, 19 nt, Artificial Sequence
  Description of Artificial Sequence: Synthetic oligonucleotide
  Antisense strand to SEQ ID NO: 2266946
uaaggucaacugagaauac

SEQ ID NO: 2266948 - RNA, 19 nt, Artificial Sequence
  Description of Artificial Sequence: Synthetic oligonucleotide
  Sense strand starting at position 818 of SEQ ID NO: 1884454
gcuuuaacucuuggaucca

SEQ ID NO: 2266949 - RNA, 19 nt, Artificial Sequence
  Description of Artificial Sequence: Synthetic oligonucleotide
  Antisense strand to SEQ ID NO: 2266948
uggauccaagaguuaaagc

SEQ ID NO: 2266950 - RNA, 19 nt, Artificial Sequence
  Description of Artificial Sequence: Synthetic oligonucleotide
  Sense strand starting at position 995 of SEQ ID NO: 1884454
gaugcaauccuguaagagc

SEQ ID NO: 2266951 - RNA, 19 nt, Artificial Sequence
  Description of Artificial Sequence: Synthetic oligonucleotide
  Antisense strand to SEQ ID NO: 2266950
gcucuuacaggauugcauc

SEQ ID NO: 2266952 - RNA, 19 nt, Artificial Sequence
  Description of Artificial Sequence: Synthetic oligonucleotide
  Sense strand starting at position 1017 of SEQ ID NO: 1884454
ucagaaagguaauuguaca

SEQ ID NO: 2266953 - RNA, 19 nt, Artificial Sequence
  Description of Artificial Sequence: Synthetic oligonucleotide
  Antisense strand to SEQ ID NO: 2266952
uguacaauuaccuuucuga

SEQ ID NO: 2266954 - RNA, 19 nt, Artificial Sequence
  Description of Artificial Sequence: Synthetic oligonucleotide
  Sense strand starting at position 1171 of SEQ ID NO: 1884454
auugaauuggccugggauu

SEQ ID NO: 2266955 - RNA, 19 nt, Artificial Sequence
  Description of Artificial Sequence: Synthetic oligonucleotide
  Antisense strand to SEQ ID NO: 2266954
aaucccaggccaauucaau

SEQ ID NO: 2266956 - RNA, 19 nt, Artificial Sequence
  Description of Artificial Sequence: Synthetic oligonucleotide
  Sense strand starting at position 1219 of SEQ ID NO: 1884454
gaaacaaguuaggcauaga

SEQ ID NO: 2266957 - RNA, 19 nt, Artificial Sequence
  Description of Artificial Sequence: Synthetic oligonucleotide
  Antisense strand to SEQ ID NO: 2266956
ucuaugccuaacuuguuuc

SEQ ID NO: 2266958 - RNA, 19 nt, Artificial Sequence
  Description of Artificial Sequence: Synthetic oligonucleotide
  Sense strand starting at position 1326 of SEQ ID NO: 1884454
ccagauuuauuagaagcca

SEQ ID NO: 2266959 - RNA, 19 nt, Artificial Sequence
  Description of Artificial Sequence: Synthetic oligonucleotide
  Antisense strand to SEQ ID NO: 2266958
uggcuucuaauaaaucugg

SEQ ID NO: 2266960 - RNA, 19 nt, Artificial Sequence
  Description of Artificial Sequence: Synthetic oligonucleotide
  Sense strand starting at position 1459 of SEQ ID NO: 1884454
guggguugaacucauagcu

SEQ ID NO: 2266961 - RNA, 19 nt, Artificial Sequence
  Description of Artificial Sequence: Synthetic oligonucleotide
  Antisense strand to SEQ ID NO: 2266960
agcuaugaguucaacccac

SEQ ID NO: 2266962 - RNA, 19 nt, Artificial Sequence
  Description of Artificial Sequence: Synthetic oligonucleotide
  Sense strand starting at position 1605 of SEQ ID NO: 1884454
gccauuucucaagguuggu

SEQ ID NO: 2266963 - RNA, 19 nt, Artificial Sequence
  Description of Artificial Sequence: Synthetic oligonucleotide
  Antisense strand to SEQ ID NO: 2266962
accaaccuugagaaauggc

SEQ ID NO: 2266964 - RNA, 19 nt, Artificial Sequence
  Description of Artificial Sequence: Synthetic oligonucleotide
  Sense strand starting at position 1666 of SEQ ID NO: 1884454
uuuacauggucagccagau

SEQ ID NO: 2266965 - RNA, 19 nt, Artificial Sequence
  Description of Artificial Sequence: Synthetic oligonucleotide
  Antisense strand to SEQ ID NO: 2266964
aucuggcugaccauguaaa

SEQ ID NO: 2266966 - RNA, 19 nt, Artificial Sequence
  Description of Artificial Sequence: Synthetic oligonucleotide
  Sense strand starting at position 1987 of SEQ ID NO: 1884454
ccuucuguugagcacaauu

SEQ ID NO: 2266967 - RNA, 19 nt, Artificial Sequence
  Description of Artificial Sequence: Synthetic oligonucleotide
  Antisense strand to SEQ ID NO: 2266966
aauugugcucaacagaagg

SEQ ID NO: 2266968 - RNA, 19 nt, Artificial Sequence
  Description of Artificial Sequence: Synthetic oligonucleotide
  Sense strand starting at position 2071 of SEQ ID NO: 1884454
uacauaaguuggcugaaga

SEQ ID NO: 2266969 - RNA, 19 nt, Artificial Sequence
  Description of Artificial Sequence: Synthetic oligonucleotide
  Antisense strand to SEQ ID NO: 2266968
ucuucagccaacuuaugua

SEQ ID NO: 2266970 - RNA, 19 nt, Artificial Sequence
  Description of Artificial Sequence: Synthetic oligonucleotide
  Sense strand starting at position 2072 of SEQ ID NO: 1884454
acauaaguuggcugaagag

SEQ ID NO: 2266971 - RNA, 19 nt, Artificial Sequence
  Description of Artificial Sequence: Synthetic oligonucleotide
  Antisense strand to SEQ ID NO: 2266970
cucuucagccaacuuaugu

SEQ ID NO: 2266972 - RNA, 19 nt, Artificial Sequence
  Description of Artificial Sequence: Synthetic oligonucleotide
  Sense strand starting at position 2456 of SEQ ID NO: 1884454
aauccaaugggauguguuu

SEQ ID NO: 2266973 - RNA, 19 nt, Artificial Sequence
  Description of Artificial Sequence: Synthetic oligonucleotide
  Antisense strand to SEQ ID NO: 2266972
aaacacaucccauuggauu

SEQ ID NO: 2266974 - RNA, 19 nt, Artificial Sequence
  Description of Artificial Sequence: Synthetic oligonucleotide
  Sense strand starting at position 2480 of SEQ ID NO: 1884454
ggcacugacacugaaguau

SEQ ID NO: 2266975 - RNA, 19 nt, Artificial Sequence
  Description of Artificial Sequence: Synthetic oligonucleotide
  Antisense strand to SEQ ID NO: 2266974
auacuucagugucagugcc

SEQ ID NO: 2266976 - RNA, 19 nt, Artificial Sequence
  Description of Artificial Sequence: Synthetic oligonucleotide
  Sense strand starting at position 2644 of SEQ ID NO: 1884454
ccuuccagccuuuagugaa

SEQ ID NO: 2266977 - RNA, 19 nt, Artificial Sequence
  Description of Artificial Sequence: Synthetic oligonucleotide
  Antisense strand to SEQ ID NO: 2266976
uucacuaaaggcuggaagg

SEQ ID NO: 2266978 - RNA, 19 nt, Artificial Sequence
  Description of Artificial Sequence: Synthetic oligonucleotide
  Sense strand starting at position 2657 of SEQ ID NO: 1884454
agugaaacuguguauauuc

SEQ ID NO: 2266979 - RNA, 19 nt, Artificial Sequence
  Description of Artificial Sequence: Synthetic oligonucleotide
  Antisense strand to SEQ ID NO: 2266978
gaauauacacaguuucacu

SEQ ID NO: 2266980 - RNA, 19 nt, Artificial Sequence
  Description of Artificial Sequence: Synthetic oligonucleotide
  Sense strand starting at position 2679 of SEQ ID NO: 1884454
caaaucugggaucgucaaa

SEQ ID NO: 2266981 - RNA, 19 nt, Artificial Sequence
  Description of Artificial Sequence: Synthetic oligonucleotide
  Antisense strand to SEQ ID NO: 2266980
uuugacgaucccagauuug

SEQ ID NO: 2266982 - RNA, 19 nt, Artificial Sequence
  Description of Artificial Sequence: Synthetic oligonucleotide
  Sense strand starting at position 2943 of SEQ ID NO: 1884454
guuugcauggguuaugaua

SEQ ID NO: 2266983 - RNA, 19 nt, Artificial Sequence
  Description of Artificial Sequence: Synthetic oligonucleotide
  Antisense strand to SEQ ID NO: 2266982
uaucauaacccaugcaaac

SEQ ID NO: 2266984 - RNA, 19 nt, Artificial Sequence
  Description of Artificial Sequence: Synthetic oligonucleotide
  Sense strand starting at position 2951 of SEQ ID NO: 1884454
ggguuaugauauuccauag

SEQ ID NO: 2266985 - RNA, 19 nt, Artificial Sequence
  Description of Artificial Sequence: Synthetic oligonucleotide
  Antisense strand to SEQ ID NO: 2266984
cuauggaauaucauaaccc

SEQ ID NO: 2266986 - RNA, 19 nt, Artificial Sequence
  Description of Artificial Sequence: Synthetic oligonucleotide
  Sense strand starting at position 3021 of SEQ ID NO: 1884454
augauuaaugugugcauuu

SEQ ID NO: 2266987 - RNA, 19 nt, Artificial Sequence
  Description of Artificial Sequence: Synthetic oligonucleotide
  Antisense strand to SEQ ID NO: 2266986
aaaugcacacauuaaucau

SEQ ID NO: 2266988 - RNA, 19 nt, Artificial Sequence
  Description of Artificial Sequence: Synthetic oligonucleotide
  Sense strand starting at position 3049 of SEQ ID NO: 1884454
ccuguuuagcaucagaaau

SEQ ID NO: 2266989 - RNA, 19 nt, Artificial Sequence
  Description of Artificial Sequence: Synthetic oligonucleotide
  Antisense strand to SEQ ID NO: 2266988
auuucugaugcuaaacagg

SEQ ID NO: 2266990 - RNA, 19 nt, Artificial Sequence
  Description of Artificial Sequence: Synthetic oligonucleotide
  Sense strand starting at position 3079 of SEQ ID NO: 1884454
uaaagaaaguaguuugguu

SEQ ID NO: 2266991 - RNA, 19 nt, Artificial Sequence
  Description of Artificial Sequence: Synthetic oligonucleotide
  Antisense strand to SEQ ID NO: 2266990
aaccaaacuacuuucuuua

SEQ ID NO: 2266992 - RNA, 19 nt, Artificial Sequence
  Description of Artificial Sequence: Synthetic oligonucleotide
  Sense strand starting at position 3122 of SEQ ID NO: 1884454
gcuaaauaacccuagguca

SEQ ID NO: 2266993 - RNA, 19 nt, Artificial Sequence
  Description of Artificial Sequence: Synthetic oligonucleotide
  Antisense strand to SEQ ID NO: 2266992
ugaccuaggguuauuuagc

SEQ ID NO: 2266994 - RNA, 19 nt, Artificial Sequence
  Description of Artificial Sequence: Synthetic oligonucleotide
  Sense strand starting at position 3186 of SEQ ID NO: 1884454
uguuuaagaguguacacuu

SEQ ID NO: 2266995 - RNA, 19 nt, Artificial Sequence
  Description of Artificial Sequence: Synthetic oligonucleotide
  Antisense strand to SEQ ID NO: 2266994
aaguguacacucuuaaaca

SEQ ID NO: 2266996 - RNA, 19 nt, Artificial Sequence
  Description of Artificial Sequence: Synthetic oligonucleotide
  Sense strand starting at position 3554 of SEQ ID NO: 1884454
ugcauucuugcgguuccaa

SEQ ID NO: 2266997 - RNA, 19 nt, Artificial Sequence
  Description of Artificial Sequence: Synthetic oligonucleotide
  Antisense strand to SEQ ID NO: 2266996
uuggaaccgcaagaaugca

SEQ ID NO: 2266998 - RNA, 19 nt, Artificial Sequence
  Description of Artificial Sequence: Synthetic oligonucleotide
  Sense strand starting at position 3555 of SEQ ID NO: 1884454
gcauucuugcgguuccaau

SEQ ID NO: 2266999 - RNA, 19 nt, Artificial Sequence
  Description of Artificial Sequence: Synthetic oligonucleotide
  Antisense strand to SEQ ID NO: 2266998
auuggaaccgcaagaaugc

SEQ ID NO: 2267000 - RNA, 19 nt, Artificial Sequence
  Description of Artificial Sequence: Synthetic oligonucleotide
  Sense strand starting at position 3683 of SEQ ID NO: 1884454
ugagauuauuaaucaggug

SEQ ID NO: 2267001 - RNA, 19 nt, Artificial Sequence
  Description of Artificial Sequence: Synthetic oligonucleotide
  Antisense strand to SEQ ID NO: 2267000
caccugauuaauaaucuca

SEQ ID NO: 2267002 - RNA, 19 nt, Artificial Sequence
  Description of Artificial Sequence: Synthetic oligonucleotide
  Sense strand starting at position 3689 of SEQ ID NO: 1884454
uauuaaucagguggaacau

SEQ ID NO: 2267003 - RNA, 19 nt, Artificial Sequence
  Description of Artificial Sequence: Synthetic oligonucleotide
  Antisense strand to SEQ ID NO: 2267002
auguuccaccugauuaaua

SEQ ID NO: 2267004 - RNA, 19 nt, Artificial Sequence
  Description of Artificial Sequence: Synthetic oligonucleotide
  Sense strand starting at position 3701 of SEQ ID NO: 1884454
ggaacauaagcccagcaau

SEQ ID NO: 2267005 - RNA, 19 nt, Artificial Sequence
  Description of Artificial Sequence: Synthetic oligonucleotide
  Antisense strand to SEQ ID NO: 2267004
auugcugggcuuauguucc

SEQ ID NO: 2267006 - RNA, 19 nt, Artificial Sequence
  Description of Artificial Sequence: Synthetic oligonucleotide
  Sense strand starting at position 3885 of SEQ ID NO: 1884454
aguuaugugagccaugaaa

SEQ ID NO: 2267007 - RNA, 19 nt, Artificial Sequence
  Description of Artificial Sequence: Synthetic oligonucleotide
  Antisense strand to SEQ ID NO: 2267006
uuucauggcucacauaacu

SEQ ID NO: 2267008 - RNA, 19 nt, Artificial Sequence
  Description of Artificial Sequence: Synthetic oligonucleotide
  Sense strand starting at position 3887 of SEQ ID NO: 1884454
uuaugugagccaugaaauc

SEQ ID NO: 2267009 - RNA, 19 nt, Artificial Sequence
  Description of Artificial Sequence: Synthetic oligonucleotide
  Antisense strand to SEQ ID NO: 2267008
gauuucauggcucacauaa

SEQ ID NO: 2267010 - RNA, 19 nt, Artificial Sequence
  Description of Artificial Sequence: Synthetic oligonucleotide
  Sense strand starting at position 3934 of SEQ ID NO: 1884454
ugauuuccauuugguacaa

SEQ ID NO: 2267011 - RNA, 19 nt, Artificial Sequence
  Description of Artificial Sequence: Synthetic oligonucleotide
  Antisense strand to SEQ ID NO: 2267010
uuguaccaaauggaaauca

SEQ ID NO: 2267012 - RNA, 19 nt, Artificial Sequence
  Description of Artificial Sequence: Synthetic oligonucleotide
  Sense strand starting at position 26 of SEQ ID NO: 1884455
uucuuuauucuggauuaug

SEQ ID NO: 2267013 - RNA, 19 nt, Artificial Sequence
  Description of Artificial Sequence: Synthetic oligonucleotide
  Antisense strand to SEQ ID NO: 2267012
cauaauccagaauaaagaa

SEQ ID NO: 2267014 - RNA, 19 nt, Artificial Sequence
  Description of Artificial Sequence: Synthetic oligonucleotide
  Sense strand starting at position 29 of SEQ ID NO: 1884455
uuuauucuggauuaugcua

SEQ ID NO: 2267015 - RNA, 19 nt, Artificial Sequence
  Description of Artificial Sequence: Synthetic oligonucleotide
  Antisense strand to SEQ ID NO: 2267014
uagcauaauccagaauaaa

SEQ ID NO: 2267016 - RNA, 19 nt, Artificial Sequence
  Description of Artificial Sequence: Synthetic oligonucleotide
  Sense strand starting at position 223 of SEQ ID NO: 1884455
ugcuauucucaugacagag

SEQ ID NO: 2267017 - RNA, 19 nt, Artificial Sequence
  Description of Artificial Sequence: Synthetic oligonucleotide
  Antisense strand to SEQ ID NO: 2267016
cucugucaugagaauagca

SEQ ID NO: 2267018 - RNA, 19 nt, Artificial Sequence
  Description of Artificial Sequence: Synthetic oligonucleotide
  Sense strand starting at position 424 of SEQ ID NO: 1884455
caguuaaugguaggaaacu

SEQ ID NO: 2267019 - RNA, 19 nt, Artificial Sequence
  Description of Artificial Sequence: Synthetic oligonucleotide
  Antisense strand to SEQ ID NO: 2267018
aguuuccuaccauuaacug

SEQ ID NO: 2267020 - RNA, 19 nt, Artificial Sequence
  Description of Artificial Sequence: Synthetic oligonucleotide
  Sense strand starting at position 658 of SEQ ID NO: 1884455
augaauaucccauguguug

SEQ ID NO: 2267021 - RNA, 19 nt, Artificial Sequence
  Description of Artificial Sequence: Synthetic oligonucleotide
  Antisense strand to SEQ ID NO: 2267020
caacacaugggauauucau

SEQ ID NO: 2267022 - RNA, 19 nt, Artificial Sequence
  Description of Artificial Sequence: Synthetic oligonucleotide
  Sense strand starting at position 760 of SEQ ID NO: 1884455
cugaaauugugaucauaag

SEQ ID NO: 2267023 - RNA, 19 nt, Artificial Sequence
  Description of Artificial Sequence: Synthetic oligonucleotide
  Antisense strand to SEQ ID NO: 2267022
cuuaugaucacaauuucag

SEQ ID NO: 2267024 - RNA, 19 nt, Artificial Sequence
  Description of Artificial Sequence: Synthetic oligonucleotide
  Sense strand starting at position 769 of SEQ ID NO: 1884455
ugaucauaaguucgauuaa

SEQ ID NO: 2267025 - RNA, 19 nt, Artificial Sequence
  Description of Artificial Sequence: Synthetic oligonucleotide
  Antisense strand to SEQ ID NO: 2267024
uuaaucgaacuuaugauca

SEQ ID NO: 2267026 - RNA, 19 nt, Artificial Sequence
  Description of Artificial Sequence: Synthetic oligonucleotide
  Sense strand starting at position 840 of SEQ ID NO: 1884455
gagugagcugcauagagau

SEQ ID NO: 2267027 - RNA, 19 nt, Artificial Sequence
  Description of Artificial Sequence: Synthetic oligonucleotide
  Antisense strand to SEQ ID NO: 2267026
aucucuaugcagcucacuc

SEQ ID NO: 2267028 - RNA, 19 nt, Artificial Sequence
  Description of Artificial Sequence: Synthetic oligonucleotide
  Sense strand starting at position 842 of SEQ ID NO: 1884455
gugagcugcauagagauau

SEQ ID NO: 2267029 - RNA, 19 nt, Artificial Sequence
  Description of Artificial Sequence: Synthetic oligonucleotide
  Antisense strand to SEQ ID NO: 2267028
auaucucuaugcagcucac

SEQ ID NO: 2267030 - RNA, 19 nt, Artificial Sequence
  Description of Artificial Sequence: Synthetic oligonucleotide
  Sense strand starting at position 860 of SEQ ID NO: 1884455
uaauaucuagaguggucaa

SEQ ID NO: 2267031 - RNA, 19 nt, Artificial Sequence
  Description of Artificial Sequence: Synthetic oligonucleotide
  Antisense strand to SEQ ID NO: 2267030
uugaccacucuagauauua

SEQ ID NO: 2267032 - RNA, 19 nt, Artificial Sequence
  Description of Artificial Sequence: Synthetic oligonucleotide
  Sense strand starting at position 863 of SEQ ID NO: 1884455
uaucuagaguggucaaaca

SEQ ID NO: 2267033 - RNA, 19 nt, Artificial Sequence
  Description of Artificial Sequence: Synthetic oligonucleotide
  Antisense strand to SEQ ID NO: 2267032
uguuugaccacucuagaua

SEQ ID NO: 2267034 - RNA, 19 nt, Artificial Sequence
  Description of Artificial Sequence: Synthetic oligonucleotide
  Sense strand starting at position 1038 of SEQ ID NO: 1884455
ugccauggccacuaauauu

SEQ ID NO: 2267035 - RNA, 19 nt, Artificial Sequence
  Description of Artificial Sequence: Synthetic oligonucleotide
  Antisense strand to SEQ ID NO: 2267034
aauauuaguggccauggca

SEQ ID NO: 2267036 - RNA, 19 nt, Artificial Sequence
  Description of Artificial Sequence: Synthetic oligonucleotide
  Sense strand starting at position 1058 of SEQ ID NO: 1884455
cugaguauugcuuaaacau

SEQ ID NO: 2267037 - RNA, 19 nt, Artificial Sequence
  Description of Artificial Sequence: Synthetic oligonucleotide
  Antisense strand to SEQ ID NO: 2267036
auguuuaagcaauacucag

SEQ ID NO: 2267038 - RNA, 19 nt, Artificial Sequence
  Description of Artificial Sequence: Synthetic oligonucleotide
  Sense strand starting at position 1188 of SEQ ID NO: 1884455
ugaguugagcucuacuuga

SEQ ID NO: 2267039 - RNA, 19 nt, Artificial Sequence
  Description of Artificial Sequence: Synthetic oligonucleotide
  Antisense strand to SEQ ID NO: 2267038
ucaaguagagcucaacuca

SEQ ID NO: 2267040 - RNA, 19 nt, Artificial Sequence
  Description of Artificial Sequence: Synthetic oligonucleotide
  Sense strand starting at position 1281 of SEQ ID NO: 1884455
cauaauaaguguuuaguga

SEQ ID NO: 2267041 - RNA, 19 nt, Artificial Sequence
  Description of Artificial Sequence: Synthetic oligonucleotide
  Antisense strand to SEQ ID NO: 2267040
ucacuaaacacuuauuaug

SEQ ID NO: 2267042 - RNA, 19 nt, Artificial Sequence
  Description of Artificial Sequence: Synthetic oligonucleotide
  Sense strand starting at position 1307 of SEQ ID NO: 1884455
agauaugaguugcugaaug

SEQ ID NO: 2267043 - RNA, 19 nt, Artificial Sequence
  Description of Artificial Sequence: Synthetic oligonucleotide
  Antisense strand to SEQ ID NO: 2267042
cauucagcaacucauaucu

SEQ ID NO: 2267044 - RNA, 19 nt, Artificial Sequence
  Description of Artificial Sequence: Synthetic oligonucleotide
  Sense strand starting at position 1321 of SEQ ID NO: 1884455
gaaugaagcugacuaguaa

SEQ ID NO: 2267045 - RNA, 19 nt, Artificial Sequence
  Description of Artificial Sequence: Synthetic oligonucleotide
  Antisense strand to SEQ ID NO: 2267044
uuacuagucagcuucauuc

SEQ ID NO: 2267046 - RNA, 19 nt, Artificial Sequence
  Description of Artificial Sequence: Synthetic oligonucleotide
  Sense strand starting at position 1718 of SEQ ID NO: 1884455
uaauuugucugagagauau

SEQ ID NO: 2267047 - RNA, 19 nt, Artificial Sequence
  Description of Artificial Sequence: Synthetic oligonucleotide
  Antisense strand to SEQ ID NO: 2267046
auaucucucagacaaauua

SEQ ID NO: 2267048 - RNA, 19 nt, Artificial Sequence
  Description of Artificial Sequence: Synthetic oligonucleotide
  Sense strand starting at position 1784 of SEQ ID NO: 1884455
ggucauuaaacuggcaaug

SEQ ID NO: 2267049 - RNA, 19 nt, Artificial Sequence
  Description of Artificial Sequence: Synthetic oligonucleotide
  Antisense strand to SEQ ID NO: 2267048
cauugccaguuuaaugacc

SEQ ID NO: 2267050 - RNA, 19 nt, Artificial Sequence
  Description of Artificial Sequence: Synthetic oligonucleotide
  Sense strand starting at position 2082 of SEQ ID NO: 1884455
aguggcuacucagugagaa

SEQ ID NO: 2267051 - RNA, 19 nt, Artificial Sequence
  Description of Artificial Sequence: Synthetic oligonucleotide
  Antisense strand to SEQ ID NO: 2267050
uucucacugaguagccacu

SEQ ID NO: 2267052 - RNA, 19 nt, Artificial Sequence
  Description of Artificial Sequence: Synthetic oligonucleotide
  Sense strand starting at position 2084 of SEQ ID NO: 1884455
uggcuacucagugagaacu

SEQ ID NO: 2267053 - RNA, 19 nt, Artificial Sequence
  Description of Artificial Sequence: Synthetic oligonucleotide
  Antisense strand to SEQ ID NO: 2267052
aguucucacugaguagcca

SEQ ID NO: 2267054 - RNA, 19 nt, Artificial Sequence
  Description of Artificial Sequence: Synthetic oligonucleotide
  Sense strand starting at position 2463 of SEQ ID NO: 1884455
agucauuaccuguauccaa

SEQ ID NO: 2267055 - RNA, 19 nt, Artificial Sequence
  Description of Artificial Sequence: Synthetic oligonucleotide
  Antisense strand to SEQ ID NO: 2267054
uuggauacagguaaugacu

SEQ ID NO: 2267056 - RNA, 19 nt, Artificial Sequence
  Description of Artificial Sequence: Synthetic oligonucleotide
  Sense strand starting at position 2643 of SEQ ID NO: 1884455
cuguucuuagaucauacau

SEQ ID NO: 2267057 - RNA, 19 nt, Artificial Sequence
  Description of Artificial Sequence: Synthetic oligonucleotide
  Antisense strand to SEQ ID NO: 2267056
auguaugaucuaagaacag

SEQ ID NO: 2267058 - RNA, 19 nt, Artificial Sequence
  Description of Artificial Sequence: Synthetic oligonucleotide
  Sense strand starting at position 2732 of SEQ ID NO: 1884455
acgauugugccuuagacau

SEQ ID NO: 2267059 - RNA, 19 nt, Artificial Sequence
  Description of Artificial Sequence: Synthetic oligonucleotide
  Antisense strand to SEQ ID NO: 2267058
augucuaaggcacaaucgu

SEQ ID NO: 2267060 - RNA, 19 nt, Artificial Sequence
  Description of Artificial Sequence: Synthetic oligonucleotide
  Sense strand starting at position 2753 of SEQ ID NO: 1884455
uaggcuuucggauaguuga

SEQ ID NO: 2267061 - RNA, 19 nt, Artificial Sequence
  Description of Artificial Sequence: Synthetic oligonucleotide
  Antisense strand to SEQ ID NO: 2267060
ucaacuauccgaaagccua

SEQ ID NO: 2267062 - RNA, 19 nt, Artificial Sequence
  Description of Artificial Sequence: Synthetic oligonucleotide
  Sense strand starting at position 2760 of SEQ ID NO: 1884455
ucggauaguugagugaacu

SEQ ID NO: 2267063 - RNA, 19 nt, Artificial Sequence
  Description of Artificial Sequence: Synthetic oligonucleotide
  Antisense strand to SEQ ID NO: 2267062
aguucacucaacuauccga

SEQ ID NO: 2267064 - RNA, 19 nt, Artificial Sequence
  Description of Artificial Sequence: Synthetic oligonucleotide
  Sense strand starting at position 2778 of SEQ ID NO: 1884455
ucaggcaaugcagauaaau

SEQ ID NO: 2267065 - RNA, 19 nt, Artificial Sequence
  Description of Artificial Sequence: Synthetic oligonucleotide
  Antisense strand to SEQ ID NO: 2267064
auuuaucugcauugccuga

SEQ ID NO: 2267066 - RNA, 19 nt, Artificial Sequence
  Description of Artificial Sequence: Synthetic oligonucleotide
  Sense strand starting at position 2906 of SEQ ID NO: 1884455
cauuuauaguuggcagcau

SEQ ID NO: 2267067 - RNA, 19 nt, Artificial Sequence
  Description of Artificial Sequence: Synthetic oligonucleotide
  Antisense strand to SEQ ID NO: 2267066
augcugccaacuauaaaug

SEQ ID NO: 2267068 - RNA, 19 nt, Artificial Sequence
  Description of Artificial Sequence: Synthetic oligonucleotide
  Sense strand starting at position 3016 of SEQ ID NO: 1884455
augcaaguggacugaguaa

SEQ ID NO: 2267069 - RNA, 19 nt, Artificial Sequence
  Description of Artificial Sequence: Synthetic oligonucleotide
  Antisense strand to SEQ ID NO: 2267068
uuacucaguccacuugcau

SEQ ID NO: 2267070 - RNA, 19 nt, Artificial Sequence
  Description of Artificial Sequence: Synthetic oligonucleotide
  Sense strand starting at position 3107 of SEQ ID NO: 1884455
auuguaagauccucaauag

SEQ ID NO: 2267071 - RNA, 19 nt, Artificial Sequence
  Description of Artificial Sequence: Synthetic oligonucleotide
  Antisense strand to SEQ ID NO: 2267070
cuauugaggaucuuacaau

SEQ ID NO: 2267072 - RNA, 19 nt, Artificial Sequence
  Description of Artificial Sequence: Synthetic oligonucleotide
  Sense strand starting at position 3126 of SEQ ID NO: 1884455
ggaggaguuugcccucuaa

SEQ ID NO: 2267073 - RNA, 19 nt, Artificial Sequence
  Description of Artificial Sequence: Synthetic oligonucleotide
  Antisense strand to SEQ ID NO: 2267072
uuagagggcaaacuccucc

SEQ ID NO: 2267074 - RNA, 19 nt, Artificial Sequence
  Description of Artificial Sequence: Synthetic oligonucleotide
  Sense strand starting at position 3312 of SEQ ID NO: 1884455
cuaugaauaaugugugaga

SEQ ID NO: 2267075 - RNA, 19 nt, Artificial Sequence
  Description of Artificial Sequence: Synthetic oligonucleotide
  Antisense strand to SEQ ID NO: 2267074
ucucacacauuauucauag

SEQ ID NO: 2267076 - RNA, 19 nt, Artificial Sequence
  Description of Artificial Sequence: Synthetic oligonucleotide
  Sense strand starting at position 3313 of SEQ ID NO: 1884455
uaugaauaaugugugagaa

SEQ ID NO: 2267077 - RNA, 19 nt, Artificial Sequence
  Description of Artificial Sequence: Synthetic oligonucleotide
  Antisense strand to SEQ ID NO: 2267076
uucucacacauuauucaua

SEQ ID NO: 2267078 - RNA, 19 nt, Artificial Sequence
  Description of Artificial Sequence: Synthetic oligonucleotide
  Sense strand starting at position 3314 of SEQ ID NO: 1884455
augaauaaugugugagaau

SEQ ID NO: 2267079 - RNA, 19 nt, Artificial Sequence
  Description of Artificial Sequence: Synthetic oligonucleotide
  Antisense strand to SEQ ID NO: 2267078
auucucacacauuauucau

SEQ ID NO: 2267080 - RNA, 19 nt, Artificial Sequence
  Description of Artificial Sequence: Synthetic oligonucleotide
  Sense strand starting at position 3327 of SEQ ID NO: 1884455
gagaaucucguaggaucuu

SEQ ID NO: 2267081 - RNA, 19 nt, Artificial Sequence
  Description of Artificial Sequence: Synthetic oligonucleotide
  Antisense strand to SEQ ID NO: 2267080
aagauccuacgagauucuc

SEQ ID NO: 2267082 - RNA, 19 nt, Artificial Sequence
  Description of Artificial Sequence: Synthetic oligonucleotide
  Sense strand starting at position 3456 of SEQ ID NO: 1884455
auauuaauucuaugacgac

SEQ ID NO: 2267083 - RNA, 19 nt, Artificial Sequence
  Description of Artificial Sequence: Synthetic oligonucleotide
  Antisense strand to SEQ ID NO: 2267082
gucgucauagaauuaauau

SEQ ID NO: 2267084 - RNA, 19 nt, Artificial Sequence
  Description of Artificial Sequence: Synthetic oligonucleotide
  Sense strand starting at position 3579 of SEQ ID NO: 1884455
aauuccuucugguuuggau

SEQ ID NO: 2267085 - RNA, 19 nt, Artificial Sequence
  Description of Artificial Sequence: Synthetic oligonucleotide
  Antisense strand to SEQ ID NO: 2267084
auccaaaccagaaggaauu

SEQ ID NO: 2267086 - RNA, 19 nt, Artificial Sequence
  Description of Artificial Sequence: Synthetic oligonucleotide
  Sense strand starting at position 3592 of SEQ ID NO: 1884455
uuggaugauuuccauagaa

SEQ ID NO: 2267087 - RNA, 19 nt, Artificial Sequence
  Description of Artificial Sequence: Synthetic oligonucleotide
  Antisense strand to SEQ ID NO: 2267086
uucuauggaaaucauccaa

SEQ ID NO: 2267088 - RNA, 19 nt, Artificial Sequence
  Description of Artificial Sequence: Synthetic oligonucleotide
  Sense strand starting at position 3682 of SEQ ID NO: 1884455
guugauuuccuuugacagc

SEQ ID NO: 2267089 - RNA, 19 nt, Artificial Sequence
  Description of Artificial Sequence: Synthetic oligonucleotide
  Antisense strand to SEQ ID NO: 2267088
gcugucaaaggaaaucaac

SEQ ID NO: 2267090 - RNA, 19 nt, Artificial Sequence
  Description of Artificial Sequence: Synthetic oligonucleotide
  Sense strand starting at position 3952 of SEQ ID NO: 1884455
cuggcacucccagaguuaa

SEQ ID NO: 2267091 - RNA, 19 nt, Artificial Sequence
  Description of Artificial Sequence: Synthetic oligonucleotide
  Antisense strand to SEQ ID NO: 2267090
uuaacucugggagugccag

SEQ ID NO: 2267092 - RNA, 19 nt, Artificial Sequence
  Description of Artificial Sequence: Synthetic oligonucleotide
  Sense strand starting at position 258 of SEQ ID NO: 1884456
cagugaaauugucuuaaug

SEQ ID NO: 2267093 - RNA, 19 nt, Artificial Sequence
  Description of Artificial Sequence: Synthetic oligonucleotide
  Antisense strand to SEQ ID NO: 2267092
cauuaagacaauuucacug

SEQ ID NO: 2267094 - RNA, 19 nt, Artificial Sequence
  Description of Artificial Sequence: Synthetic oligonucleotide
  Sense strand starting at position 325 of SEQ ID NO: 1884456
uugucuuuguaacccaaga

SEQ ID NO: 2267095 - RNA, 19 nt, Artificial Sequence
  Description of Artificial Sequence: Synthetic oligonucleotide
  Antisense strand to SEQ ID NO: 2267094
ucuuggguuacaaagacaa

SEQ ID NO: 2267096 - RNA, 19 nt, Artificial Sequence
  Description of Artificial Sequence: Synthetic oligonucleotide
  Sense strand starting at position 351 of SEQ ID NO: 1884456
agaguaagaucagaggaag

SEQ ID NO: 2267097 - RNA, 19 nt, Artificial Sequence
  Description of Artificial Sequence: Synthetic oligonucleotide
  Antisense strand to SEQ ID NO: 2267096
cuuccucugaucuuacucu

SEQ ID NO: 2267098 - RNA, 19 nt, Artificial Sequence
  Description of Artificial Sequence: Synthetic oligonucleotide
  Sense strand starting at position 417 of SEQ ID NO: 1884456
ggugaaauccuguagcccu

SEQ ID NO: 2267099 - RNA, 19 nt, Artificial Sequence
  Description of Artificial Sequence: Synthetic oligonucleotide
  Antisense strand to SEQ ID NO: 2267098
agggcuacaggauuucacc

SEQ ID NO: 2267100 - RNA, 19 nt, Artificial Sequence
  Description of Artificial Sequence: Synthetic oligonucleotide
  Sense strand starting at position 485 of SEQ ID NO: 1884456
aaaggauguugguucucuu

SEQ ID NO: 2267101 - RNA, 19 nt, Artificial Sequence
  Description of Artificial Sequence: Synthetic oligonucleotide
  Antisense strand to SEQ ID NO: 2267100
aagagaaccaacauccuuu

SEQ ID NO: 2267102 - RNA, 19 nt, Artificial Sequence
  Description of Artificial Sequence: Synthetic oligonucleotide
  Sense strand starting at position 1694 of SEQ ID NO: 1884456
ccuagacacugugcuaaau

SEQ ID NO: 2267103 - RNA, 19 nt, Artificial Sequence
  Description of Artificial Sequence: Synthetic oligonucleotide
  Antisense strand to SEQ ID NO: 2267102
auuuagcacagugucuagg

SEQ ID NO: 2267104 - RNA, 19 nt, Artificial Sequence
  Description of Artificial Sequence: Synthetic oligonucleotide
  Sense strand starting at position 1757 of SEQ ID NO: 1884456
aggugugugcugcuauuau

SEQ ID NO: 2267105 - RNA, 19 nt, Artificial Sequence
  Description of Artificial Sequence: Synthetic oligonucleotide
  Antisense strand to SEQ ID NO: 2267104
auaauagcagcacacaccu

SEQ ID NO: 2267106 - RNA, 19 nt, Artificial Sequence
  Description of Artificial Sequence: Synthetic oligonucleotide
  Sense strand starting at position 1767 of SEQ ID NO: 1884456
ugcuauuaucccuaguuga

SEQ ID NO: 2267107 - RNA, 19 nt, Artificial Sequence
  Description of Artificial Sequence: Synthetic oligonucleotide
  Antisense strand to SEQ ID NO: 2267106
ucaacuagggauaauagca

SEQ ID NO: 2267108 - RNA, 19 nt, Artificial Sequence
  Description of Artificial Sequence: Synthetic oligonucleotide
  Sense strand starting at position 1794 of SEQ ID NO: 1884456
ggaacugagguucgggauu

SEQ ID NO: 2267109 - RNA, 19 nt, Artificial Sequence
  Description of Artificial Sequence: Synthetic oligonucleotide
  Antisense strand to SEQ ID NO: 2267108
aaucccgaaccucaguucc

SEQ ID NO: 2267110 - RNA, 19 nt, Artificial Sequence
  Description of Artificial Sequence: Synthetic oligonucleotide
  Sense strand starting at position 1819 of SEQ ID NO: 1884456
augacuuaccuguggcaau

SEQ ID NO: 2267111 - RNA, 19 nt, Artificial Sequence
  Description of Artificial Sequence: Synthetic oligonucleotide
  Antisense strand to SEQ ID NO: 2267110
auugccacagguaagucau

SEQ ID NO: 2267112 - RNA, 19 nt, Artificial Sequence
  Description of Artificial Sequence: Synthetic oligonucleotide
  Sense strand starting at position 2105 of SEQ ID NO: 1884456
cagagaugagguugugaca

SEQ ID NO: 2267113 - RNA, 19 nt, Artificial Sequence
  Description of Artificial Sequence: Synthetic oligonucleotide
  Antisense strand to SEQ ID NO: 2267112
ugucacaaccucaucucug

SEQ ID NO: 2267114 - RNA, 19 nt, Artificial Sequence
  Description of Artificial Sequence: Synthetic oligonucleotide
  Sense strand starting at position 2231 of SEQ ID NO: 1884456
ggcauccaaguuuaauuaa

SEQ ID NO: 2267115 - RNA, 19 nt, Artificial Sequence
  Description of Artificial Sequence: Synthetic oligonucleotide
  Antisense strand to SEQ ID NO: 2267114
uuaauuaaacuuggaugcc

SEQ ID NO: 2267116 - RNA, 19 nt, Artificial Sequence
  Description of Artificial Sequence: Synthetic oligonucleotide
  Sense strand starting at position 2316 of SEQ ID NO: 1884456
auugaagugccaggcauuu

SEQ ID NO: 2267117 - RNA, 19 nt, Artificial Sequence
  Description of Artificial Sequence: Synthetic oligonucleotide
  Antisense strand to SEQ ID NO: 2267116
aaaugccuggcacuucaau

SEQ ID NO: 2267118 - RNA, 19 nt, Artificial Sequence
  Description of Artificial Sequence: Synthetic oligonucleotide
  Sense strand starting at position 2419 of SEQ ID NO: 1884456
guguaugacagagacuguu

SEQ ID NO: 2267119 - RNA, 19 nt, Artificial Sequence
  Description of Artificial Sequence: Synthetic oligonucleotide
  Antisense strand to SEQ ID NO: 2267118
aacagucucugucauacac

SEQ ID NO: 2267120 - RNA, 19 nt, Artificial Sequence
  Description of Artificial Sequence: Synthetic oligonucleotide
  Sense strand starting at position 2542 of SEQ ID NO: 1884456
ccaguaaaucaacaucugu

SEQ ID NO: 2267121 - RNA, 19 nt, Artificial Sequence
  Description of Artificial Sequence: Synthetic oligonucleotide
  Antisense strand to SEQ ID NO: 2267120
acagauguugauuuacugg

SEQ ID NO: 2267122 - RNA, 19 nt, Artificial Sequence
  Description of Artificial Sequence: Synthetic oligonucleotide
  Sense strand starting at position 2563 of SEQ ID NO: 1884456
gucauaaacugguucugga

SEQ ID NO: 2267123 - RNA, 19 nt, Artificial Sequence
  Description of Artificial Sequence: Synthetic oligonucleotide
  Antisense strand to SEQ ID NO: 2267122
uccagaaccaguuuaugac

SEQ ID NO: 2267124 - RNA, 19 nt, Artificial Sequence
  Description of Artificial Sequence: Synthetic oligonucleotide
  Sense strand starting at position 2715 of SEQ ID NO: 1884456
gggaaagucugucuuccau

SEQ ID NO: 2267125 - RNA, 19 nt, Artificial Sequence
  Description of Artificial Sequence: Synthetic oligonucleotide
  Antisense strand to SEQ ID NO: 2267124
auggaagacagacuuuccc

SEQ ID NO: 2267126 - RNA, 19 nt, Artificial Sequence
  Description of Artificial Sequence: Synthetic oligonucleotide
  Sense strand starting at position 2717 of SEQ ID NO: 1884456
gaaagucugucuuccauga

SEQ ID NO: 2267127 - RNA, 19 nt, Artificial Sequence
  Description of Artificial Sequence: Synthetic oligonucleotide
  Antisense strand to SEQ ID NO: 2267126
ucauggaagacagacuuuc

SEQ ID NO: 2267128 - RNA, 19 nt, Artificial Sequence
  Description of Artificial Sequence: Synthetic oligonucleotide
  Sense strand starting at position 2835 of SEQ ID NO: 1884456
acuccaugugcuugaggaa

SEQ ID NO: 2267129 - RNA, 19 nt, Artificial Sequence
  Description of Artificial Sequence: Synthetic oligonucleotide
  Antisense strand to SEQ ID NO: 2267128
uuccucaagcacauggagu

SEQ ID NO: 2267130 - RNA, 19 nt, Artificial Sequence
  Description of Artificial Sequence: Synthetic oligonucleotide
  Sense strand starting at position 2850 of SEQ ID NO: 1884456
ggaauuccuguaugaaggu

SEQ ID NO: 2267131 - RNA, 19 nt, Artificial Sequence
  Description of Artificial Sequence: Synthetic oligonucleotide
  Antisense strand to SEQ ID NO: 2267130
accuucauacaggaauucc

SEQ ID NO: 2267132 - RNA, 19 nt, Artificial Sequence
  Description of Artificial Sequence: Synthetic oligonucleotide
  Sense strand starting at position 2856 of SEQ ID NO: 1884456
ccuguaugaaggugacuau

SEQ ID NO: 2267133 - RNA, 19 nt, Artificial Sequence
  Description of Artificial Sequence: Synthetic oligonucleotide
  Antisense strand to SEQ ID NO: 2267132
auagucaccuucauacagg

SEQ ID NO: 2267134 - RNA, 19 nt, Artificial Sequence
  Description of Artificial Sequence: Synthetic oligonucleotide
  Sense strand starting at position 2857 of SEQ ID NO: 1884456
cuguaugaaggugacuauu

SEQ ID NO: 2267135 - RNA, 19 nt, Artificial Sequence
  Description of Artificial Sequence: Synthetic oligonucleotide
  Antisense strand to SEQ ID NO: 2267134
aauagucaccuucauacag

SEQ ID NO: 2267136 - RNA, 19 nt, Artificial Sequence
  Description of Artificial Sequence: Synthetic oligonucleotide
  Sense strand starting at position 2973 of SEQ ID NO: 1884456
cagcacuugguaggauaua

SEQ ID NO: 2267137 - RNA, 19 nt, Artificial Sequence
  Description of Artificial Sequence: Synthetic oligonucleotide
  Antisense strand to SEQ ID NO: 2267136
uauauccuaccaagugcug

SEQ ID NO: 2267138 - RNA, 19 nt, Artificial Sequence
  Description of Artificial Sequence: Synthetic oligonucleotide
  Sense strand starting at position 2982 of SEQ ID NO: 1884456
guaggauauaauuagccga

SEQ ID NO: 2267139 - RNA, 19 nt, Artificial Sequence
  Description of Artificial Sequence: Synthetic oligonucleotide
  Antisense strand to SEQ ID NO: 2267138
ucggcuaauuauauccuac

SEQ ID NO: 2267140 - RNA, 19 nt, Artificial Sequence
  Description of Artificial Sequence: Synthetic oligonucleotide
  Sense strand starting at position 2985 of SEQ ID NO: 1884456
ggauauaauuagccgaagu

SEQ ID NO: 2267141 - RNA, 19 nt, Artificial Sequence
  Description of Artificial Sequence: Synthetic oligonucleotide
  Antisense strand to SEQ ID NO: 2267140
acuucggcuaauuauaucc

SEQ ID NO: 2267142 - RNA, 19 nt, Artificial Sequence
  Description of Artificial Sequence: Synthetic oligonucleotide
  Sense strand starting at position 2987 of SEQ ID NO: 1884456
auauaauuagccgaagucu

SEQ ID NO: 2267143 - RNA, 19 nt, Artificial Sequence
  Description of Artificial Sequence: Synthetic oligonucleotide
  Antisense strand to SEQ ID NO: 2267142
agacuucggcuaauuauau

SEQ ID NO: 2267144 - RNA, 19 nt, Artificial Sequence
  Description of Artificial Sequence: Synthetic oligonucleotide
  Sense strand starting at position 3252 of SEQ ID NO: 1884456
gagguucugcucuacuaug

SEQ ID NO: 2267145 - RNA, 19 nt, Artificial Sequence
  Description of Artificial Sequence: Synthetic oligonucleotide
  Antisense strand to SEQ ID NO: 2267144
cauaguagagcagaaccuc

SEQ ID NO: 2267146 - RNA, 19 nt, Artificial Sequence
  Description of Artificial Sequence: Synthetic oligonucleotide
  Sense strand starting at position 3505 of SEQ ID NO: 1884456
aucuacuuguguccuaaag

SEQ ID NO: 2267147 - RNA, 19 nt, Artificial Sequence
  Description of Artificial Sequence: Synthetic oligonucleotide
  Antisense strand to SEQ ID NO: 2267146
cuuuaggacacaaguagau

SEQ ID NO: 2267148 - RNA, 19 nt, Artificial Sequence
  Description of Artificial Sequence: Synthetic oligonucleotide
  Sense strand starting at position 3567 of SEQ ID NO: 1884456
gaaacaugacccuggcaga

SEQ ID NO: 2267149 - RNA, 19 nt, Artificial Sequence
  Description of Artificial Sequence: Synthetic oligonucleotide
  Antisense strand to SEQ ID NO: 2267148
ucugccagggucauguuuc

SEQ ID NO: 2267150 - RNA, 19 nt, Artificial Sequence
  Description of Artificial Sequence: Synthetic oligonucleotide
  Sense strand starting at position 3674 of SEQ ID NO: 1884456
auaacuucugauggcauaa

SEQ ID NO: 2267151 - RNA, 19 nt, Artificial Sequence
  Description of Artificial Sequence: Synthetic oligonucleotide
  Antisense strand to SEQ ID NO: 2267150
uuaugccaucagaaguuau

SEQ ID NO: 2267152 - RNA, 19 nt, Artificial Sequence
  Description of Artificial Sequence: Synthetic oligonucleotide
  Sense strand starting at position 3706 of SEQ ID NO: 1884456
auaucaucuggagguaacu

SEQ ID NO: 2267153 - RNA, 19 nt, Artificial Sequence
  Description of Artificial Sequence: Synthetic oligonucleotide
  Antisense strand to SEQ ID NO: 2267152
aguuaccuccagaugauau

SEQ ID NO: 2267154 - RNA, 19 nt, Artificial Sequence
  Description of Artificial Sequence: Synthetic oligonucleotide
  Sense strand starting at position 3715 of SEQ ID NO: 1884456
ggagguaacuuuccuggca

SEQ ID NO: 2267155 - RNA, 19 nt, Artificial Sequence
  Description of Artificial Sequence: Synthetic oligonucleotide
  Antisense strand to SEQ ID NO: 2267154
ugccaggaaaguuaccucc

SEQ ID NO: 2267156 - RNA, 19 nt, Artificial Sequence
  Description of Artificial Sequence: Synthetic oligonucleotide
  Sense strand starting at position 3749 of SEQ ID NO: 1884456
uggcuaucucuccaaacug

SEQ ID NO: 2267157 - RNA, 19 nt, Artificial Sequence
  Description of Artificial Sequence: Synthetic oligonucleotide
  Antisense strand to SEQ ID NO: 2267156
caguuuggagagauagcca

SEQ ID NO: 2267158 - RNA, 19 nt, Artificial Sequence
  Description of Artificial Sequence: Synthetic oligonucleotide
  Sense strand starting at position 3820 of SEQ ID NO: 1884456
gugcuucaggacuggauua

SEQ ID NO: 2267159 - RNA, 19 nt, Artificial Sequence
  Description of Artificial Sequence: Synthetic oligonucleotide
  Antisense strand to SEQ ID NO: 2267158
uaauccaguccugaagcac

SEQ ID NO: 2267160 - RNA, 19 nt, Artificial Sequence
  Description of Artificial Sequence: Synthetic oligonucleotide
  Sense strand starting at position 3847 of SEQ ID NO: 1884456
augauugacuaucugaguu

SEQ ID NO: 2267161 - RNA, 19 nt, Artificial Sequence
  Description of Artificial Sequence: Synthetic oligonucleotide
  Antisense strand to SEQ ID NO: 2267160
aacucagauagucaaucau

SEQ ID NO: 2267162 - RNA, 19 nt, Artificial Sequence
  Description of Artificial Sequence: Synthetic oligonucleotide
  Sense strand starting at position 3851 of SEQ ID NO: 1884456
uugacuaucugaguuguca

SEQ ID NO: 2267163 - RNA, 19 nt, Artificial Sequence
  Description of Artificial Sequence: Synthetic oligonucleotide
  Antisense strand to SEQ ID NO: 2267162
ugacaacucagauagucaa

SEQ ID NO: 2267164 - RNA, 19 nt, Artificial Sequence
  Description of Artificial Sequence: Synthetic oligonucleotide
  Sense strand starting at position 3872 of SEQ ID NO: 1884456
auggaagaauuagaaagaa

SEQ ID NO: 2267165 - RNA, 19 nt, Artificial Sequence
  Description of Artificial Sequence: Synthetic oligonucleotide
  Antisense strand to SEQ ID NO: 2267164
uucuuucuaauucuuccau

SEQ ID NO: 2267166 - RNA, 19 nt, Artificial Sequence
  Description of Artificial Sequence: Synthetic oligonucleotide
  Sense strand starting at position 3897 of SEQ ID NO: 1884456
uccucauugcuagagugga

SEQ ID NO: 2267167 - RNA, 19 nt, Artificial Sequence
  Description of Artificial Sequence: Synthetic oligonucleotide
  Antisense strand to SEQ ID NO: 2267166
uccacucuagcaaugagga

SEQ ID NO: 2267168 - RNA, 19 nt, Artificial Sequence
  Description of Artificial Sequence: Synthetic oligonucleotide
  Sense strand starting at position 3901 of SEQ ID NO: 1884456
cauugcuagaguggaaagu

SEQ ID NO: 2267169 - RNA, 19 nt, Artificial Sequence
  Description of Artificial Sequence: Synthetic oligonucleotide
  Antisense strand to SEQ ID NO: 2267168
acuuuccacucuagcaaug

SEQ ID NO: 2267170 - RNA, 19 nt, Artificial Sequence
  Description of Artificial Sequence: Synthetic oligonucleotide
  Sense strand starting at position 3911 of SEQ ID NO: 1884456
guggaaaguguuuacaguu

SEQ ID NO: 2267171 - RNA, 19 nt, Artificial Sequence
  Description of Artificial Sequence: Synthetic oligonucleotide
  Antisense strand to SEQ ID NO: 2267170
aacuguaaacacuuuccac

SEQ ID NO: 2267172 - RNA, 19 nt, Artificial Sequence
  Description of Artificial Sequence: Synthetic oligonucleotide
  Sense strand starting at position 31 of SEQ ID NO: 1884457
agggauugggcauguuaac

SEQ ID NO: 2267173 - RNA, 19 nt, Artificial Sequence
  Description of Artificial Sequence: Synthetic oligonucleotide
  Antisense strand to SEQ ID NO: 2267172
guuaacaugcccaaucccu

SEQ ID NO: 2267174 - RNA, 19 nt, Artificial Sequence
  Description of Artificial Sequence: Synthetic oligonucleotide
  Sense strand starting at position 261 of SEQ ID NO: 1884457
gaugacguucuacaauguu

SEQ ID NO: 2267175 - RNA, 19 nt, Artificial Sequence
  Description of Artificial Sequence: Synthetic oligonucleotide
  Antisense strand to SEQ ID NO: 2267174
aacauuguagaacgucauc

SEQ ID NO: 2267176 - RNA, 19 nt, Artificial Sequence
  Description of Artificial Sequence: Synthetic oligonucleotide
  Sense strand starting at position 424 of SEQ ID NO: 1884457
gccaauagccaauauugaa

SEQ ID NO: 2267177 - RNA, 19 nt, Artificial Sequence
  Description of Artificial Sequence: Synthetic oligonucleotide
  Antisense strand to SEQ ID NO: 2267176
uucaauauuggcuauuggc

SEQ ID NO: 2267178 - RNA, 19 nt, Artificial Sequence
  Description of Artificial Sequence: Synthetic oligonucleotide
  Sense strand starting at position 431 of SEQ ID NO: 1884457
gccaauauugaaggaauua

SEQ ID NO: 2267179 - RNA, 19 nt, Artificial Sequence
  Description of Artificial Sequence: Synthetic oligonucleotide
  Antisense strand to SEQ ID NO: 2267178
uaauuccuucaauauuggc

SEQ ID NO: 2267180 - RNA, 19 nt, Artificial Sequence
  Description of Artificial Sequence: Synthetic oligonucleotide
  Sense strand starting at position 480 of SEQ ID NO: 1884457
gaagaaucaggauguguuc

SEQ ID NO: 2267181 - RNA, 19 nt, Artificial Sequence
  Description of Artificial Sequence: Synthetic oligonucleotide
  Antisense strand to SEQ ID NO: 2267180
gaacacauccugauucuuc

SEQ ID NO: 2267182 - RNA, 19 nt, Artificial Sequence
  Description of Artificial Sequence: Synthetic oligonucleotide
  Sense strand starting at position 579 of SEQ ID NO: 1884457
aguaauuuaugggaugaua

SEQ ID NO: 2267183 - RNA, 19 nt, Artificial Sequence
  Description of Artificial Sequence: Synthetic oligonucleotide
  Antisense strand to SEQ ID NO: 2267182
uaucaucccauaaauuacu

SEQ ID NO: 2267184 - RNA, 19 nt, Artificial Sequence
  Description of Artificial Sequence: Synthetic oligonucleotide
  Sense strand starting at position 710 of SEQ ID NO: 1884457
gccuaauuccaugggacca

SEQ ID NO: 2267185 - RNA, 19 nt, Artificial Sequence
  Description of Artificial Sequence: Synthetic oligonucleotide
  Antisense strand to SEQ ID NO: 2267184
uggucccauggaauuaggc

SEQ ID NO: 2267186 - RNA, 19 nt, Artificial Sequence
  Description of Artificial Sequence: Synthetic oligonucleotide
  Sense strand starting at position 755 of SEQ ID NO: 1884457
agaagugggcucugagaau

SEQ ID NO: 2267187 - RNA, 19 nt, Artificial Sequence
  Description of Artificial Sequence: Synthetic oligonucleotide
  Antisense strand to SEQ ID NO: 2267186
auucucagagcccacuucu

SEQ ID NO: 2267188 - RNA, 19 nt, Artificial Sequence
  Description of Artificial Sequence: Synthetic oligonucleotide
  Sense strand starting at position 783 of SEQ ID NO: 1884457
cagagagcucuccaggcaa

SEQ ID NO: 2267189 - RNA, 19 nt, Artificial Sequence
  Description of Artificial Sequence: Synthetic oligonucleotide
  Antisense strand to SEQ ID NO: 2267188
uugccuggagagcucucug

SEQ ID NO: 2267190 - RNA, 19 nt, Artificial Sequence
  Description of Artificial Sequence: Synthetic oligonucleotide
  Sense strand starting at position 1009 of SEQ ID NO: 1884457
accucaucuccaugggaaa

SEQ ID NO: 2267191 - RNA, 19 nt, Artificial Sequence
  Description of Artificial Sequence: Synthetic oligonucleotide
  Antisense strand to SEQ ID NO: 2267190
uuucccauggagaugaggu

SEQ ID NO: 2267192 - RNA, 19 nt, Artificial Sequence
  Description of Artificial Sequence: Synthetic oligonucleotide
  Sense strand starting at position 1715 of SEQ ID NO: 1884457
auuggcauggcugaauaua

SEQ ID NO: 2267193 - RNA, 19 nt, Artificial Sequence
  Description of Artificial Sequence: Synthetic oligonucleotide
  Antisense strand to SEQ ID NO: 2267192
uauauucagccaugccaau

SEQ ID NO: 2267194 - RNA, 19 nt, Artificial Sequence
  Description of Artificial Sequence: Synthetic oligonucleotide
  Sense strand starting at position 1816 of SEQ ID NO: 1884457
gacuuaaagguguaucacu

SEQ ID NO: 2267195 - RNA, 19 nt, Artificial Sequence
  Description of Artificial Sequence: Synthetic oligonucleotide
  Antisense strand to SEQ ID NO: 2267194
agugauacaccuuuaaguc

SEQ ID NO: 2267196 - RNA, 19 nt, Artificial Sequence
  Description of Artificial Sequence: Synthetic oligonucleotide
  Sense strand starting at position 1824 of SEQ ID NO: 1884457
gguguaucacuacaguaaa

SEQ ID NO: 2267197 - RNA, 19 nt, Artificial Sequence
  Description of Artificial Sequence: Synthetic oligonucleotide
  Antisense strand to SEQ ID NO: 2267196
uuuacuguagugauacacc

SEQ ID NO: 2267198 - RNA, 19 nt, Artificial Sequence
  Description of Artificial Sequence: Synthetic oligonucleotide
  Sense strand starting at position 1889 of SEQ ID NO: 1884457
gcacaaggcccuuaucuaa

SEQ ID NO: 2267199 - RNA, 19 nt, Artificial Sequence
  Description of Artificial Sequence: Synthetic oligonucleotide
  Antisense strand to SEQ ID NO: 2267198
uuagauaagggccuugugc

SEQ ID NO: 2267200 - RNA, 19 nt, Artificial Sequence
  Description of Artificial Sequence: Synthetic oligonucleotide
  Sense strand starting at position 1930 of SEQ ID NO: 1884457
guagccucugugcucauua

SEQ ID NO: 2267201 - RNA, 19 nt, Artificial Sequence
  Description of Artificial Sequence: Synthetic oligonucleotide
  Antisense strand to SEQ ID NO: 2267200
uaaugagcacagaggcuac

SEQ ID NO: 2267202 - RNA, 19 nt, Artificial Sequence
  Description of Artificial Sequence: Synthetic oligonucleotide
  Sense strand starting at position 1967 of SEQ ID NO: 1884457
cuagcuucucauuaggaag

SEQ ID NO: 2267203 - RNA, 19 nt, Artificial Sequence
  Description of Artificial Sequence: Synthetic oligonucleotide
  Antisense strand to SEQ ID NO: 2267202
cuuccuaaugagaagcuag

SEQ ID NO: 2267204 - RNA, 19 nt, Artificial Sequence
  Description of Artificial Sequence: Synthetic oligonucleotide
  Sense strand starting at position 2015 of SEQ ID NO: 1884457
uuaagagucuuucccaaga

SEQ ID NO: 2267205 - RNA, 19 nt, Artificial Sequence
  Description of Artificial Sequence: Synthetic oligonucleotide
  Antisense strand to SEQ ID NO: 2267204
ucuugggaaagacucuuaa

SEQ ID NO: 2267206 - RNA, 19 nt, Artificial Sequence
  Description of Artificial Sequence: Synthetic oligonucleotide
  Sense strand starting at position 2149 of SEQ ID NO: 1884457
cuaauugcaccagauuagu

SEQ ID NO: 2267207 - RNA, 19 nt, Artificial Sequence
  Description of Artificial Sequence: Synthetic oligonucleotide
  Antisense strand to SEQ ID NO: 2267206
acuaaucuggugcaauuag

SEQ ID NO: 2267208 - RNA, 19 nt, Artificial Sequence
  Description of Artificial Sequence: Synthetic oligonucleotide
  Sense strand starting at position 2158 of SEQ ID NO: 1884457
ccagauuagugauuacaau

SEQ ID NO: 2267209 - RNA, 19 nt, Artificial Sequence
  Description of Artificial Sequence: Synthetic oligonucleotide
  Antisense strand to SEQ ID NO: 2267208
auuguaaucacuaaucugg

SEQ ID NO: 2267210 - RNA, 19 nt, Artificial Sequence
  Description of Artificial Sequence: Synthetic oligonucleotide
  Sense strand starting at position 2467 of SEQ ID NO: 1884457
cccagaacgcuccagaauu

SEQ ID NO: 2267211 - RNA, 19 nt, Artificial Sequence
  Description of Artificial Sequence: Synthetic oligonucleotide
  Antisense strand to SEQ ID NO: 2267210
aauucuggagcguucuggg

SEQ ID NO: 2267212 - RNA, 19 nt, Artificial Sequence
  Description of Artificial Sequence: Synthetic oligonucleotide
  Sense strand starting at position 2545 of SEQ ID NO: 1884457
uuacuucuggaauauaugu

SEQ ID NO: 2267213 - RNA, 19 nt, Artificial Sequence
  Description of Artificial Sequence: Synthetic oligonucleotide
  Antisense strand to SEQ ID NO: 2267212
acauauauuccagaaguaa

SEQ ID NO: 2267214 - RNA, 19 nt, Artificial Sequence
  Description of Artificial Sequence: Synthetic oligonucleotide
  Sense strand starting at position 2609 of SEQ ID NO: 1884457
agacuuaaaugagcuaugu

SEQ ID NO: 2267215 - RNA, 19 nt, Artificial Sequence
  Description of Artificial Sequence: Synthetic oligonucleotide
  Antisense strand to SEQ ID NO: 2267214
acauagcucauuuaagucu

SEQ ID NO: 2267216 - RNA, 19 nt, Artificial Sequence
  Description of Artificial Sequence: Synthetic oligonucleotide
  Sense strand starting at position 2613 of SEQ ID NO: 1884457
uuaaaugagcuauguaaac

SEQ ID NO: 2267217 - RNA, 19 nt, Artificial Sequence
  Description of Artificial Sequence: Synthetic oligonucleotide
  Antisense strand to SEQ ID NO: 2267216
guuuacauagcucauuuaa

SEQ ID NO: 2267218 - RNA, 19 nt, Artificial Sequence
  Description of Artificial Sequence: Synthetic oligonucleotide
  Sense strand starting at position 2690 of SEQ ID NO: 1884457
ucaauucgugugugaauuu

SEQ ID NO: 2267219 - RNA, 19 nt, Artificial Sequence
  Description of Artificial Sequence: Synthetic oligonucleotide
  Antisense strand to SEQ ID NO: 2267218
aaauucacacacgaauuga

SEQ ID NO: 2267220 - RNA, 19 nt, Artificial Sequence
  Description of Artificial Sequence: Synthetic oligonucleotide
  Sense strand starting at position 2744 of SEQ ID NO: 1884457
cugucugaacuguagaaua

SEQ ID NO: 2267221 - RNA, 19 nt, Artificial Sequence
  Description of Artificial Sequence: Synthetic oligonucleotide
  Antisense strand to SEQ ID NO: 2267220
uauucuacaguucagacag

SEQ ID NO: 2267222 - RNA, 19 nt, Artificial Sequence
  Description of Artificial Sequence: Synthetic oligonucleotide
  Sense strand starting at position 2746 of SEQ ID NO: 1884457
gucugaacuguagaauagu

SEQ ID NO: 2267223 - RNA, 19 nt, Artificial Sequence
  Description of Artificial Sequence: Synthetic oligonucleotide
  Antisense strand to SEQ ID NO: 2267222
acuauucuacaguucagac

SEQ ID NO: 2267224 - RNA, 19 nt, Artificial Sequence
  Description of Artificial Sequence: Synthetic oligonucleotide
  Sense strand starting at position 3096 of SEQ ID NO: 1884457
cuuggugaacaucaguaua

SEQ ID NO: 2267225 - RNA, 19 nt, Artificial Sequence
  Description of Artificial Sequence: Synthetic oligonucleotide
  Antisense strand to SEQ ID NO: 2267224
uauacugauguucaccaag

SEQ ID NO: 2267226 - RNA, 19 nt, Artificial Sequence
  Description of Artificial Sequence: Synthetic oligonucleotide
  Sense strand starting at position 3098 of SEQ ID NO: 1884457
uggugaacaucaguauaug

SEQ ID NO: 2267227 - RNA, 19 nt, Artificial Sequence
  Description of Artificial Sequence: Synthetic oligonucleotide
  Antisense strand to SEQ ID NO: 2267226
cauauacugauguucacca

SEQ ID NO: 2267228 - RNA, 19 nt, Artificial Sequence
  Description of Artificial Sequence: Synthetic oligonucleotide
  Sense strand starting at position 3099 of SEQ ID NO: 1884457
ggugaacaucaguauaugu

SEQ ID NO: 2267229 - RNA, 19 nt, Artificial Sequence
  Description of Artificial Sequence: Synthetic oligonucleotide
  Antisense strand to SEQ ID NO: 2267228
acauauacugauguucacc

SEQ ID NO: 2267230 - RNA, 19 nt, Artificial Sequence
  Description of Artificial Sequence: Synthetic oligonucleotide
  Sense strand starting at position 3107 of SEQ ID NO: 1884457
ucaguauauguguaauaga

SEQ ID NO: 2267231 - RNA, 19 nt, Artificial Sequence
  Description of Artificial Sequence: Synthetic oligonucleotide
  Antisense strand to SEQ ID NO: 2267230
ucuauuacacauauacuga

SEQ ID NO: 2267232 - RNA, 19 nt, Artificial Sequence
  Description of Artificial Sequence: Synthetic oligonucleotide
  Sense strand starting at position 3180 of SEQ ID NO: 1884457
gcaccagaucuagaggguu

SEQ ID NO: 2267233 - RNA, 19 nt, Artificial Sequence
  Description of Artificial Sequence: Synthetic oligonucleotide
  Antisense strand to SEQ ID NO: 2267232
aacccucuagaucuggugc

SEQ ID NO: 2267234 - RNA, 19 nt, Artificial Sequence
  Description of Artificial Sequence: Synthetic oligonucleotide
  Sense strand starting at position 3218 of SEQ ID NO: 1884457
aaguauugaccuugaacag

SEQ ID NO: 2267235 - RNA, 19 nt, Artificial Sequence
  Description of Artificial Sequence: Synthetic oligonucleotide
  Antisense strand to SEQ ID NO: 2267234
cuguucaaggucaauacuu

SEQ ID NO: 2267236 - RNA, 19 nt, Artificial Sequence
  Description of Artificial Sequence: Synthetic oligonucleotide
  Sense strand starting at position 3249 of SEQ ID NO: 1884457
ugggaaugauuguccauuc

SEQ ID NO: 2267237 - RNA, 19 nt, Artificial Sequence
  Description of Artificial Sequence: Synthetic oligonucleotide
  Antisense strand to SEQ ID NO: 2267236
gaauggacaaucauuccca

SEQ ID NO: 2267238 - RNA, 19 nt, Artificial Sequence
  Description of Artificial Sequence: Synthetic oligonucleotide
  Sense strand starting at position 3250 of SEQ ID NO: 1884457
gggaaugauuguccauucu

SEQ ID NO: 2267239 - RNA, 19 nt, Artificial Sequence
  Description of Artificial Sequence: Synthetic oligonucleotide
  Antisense strand to SEQ ID NO: 2267238
agaauggacaaucauuccc

SEQ ID NO: 2267240 - RNA, 19 nt, Artificial Sequence
  Description of Artificial Sequence: Synthetic oligonucleotide
  Sense strand starting at position 3264 of SEQ ID NO: 1884457
auucuauuuccauguguug

SEQ ID NO: 2267241 - RNA, 19 nt, Artificial Sequence
  Description of Artificial Sequence: Synthetic oligonucleotide
  Antisense strand to SEQ ID NO: 2267240
caacacauggaaauagaau

SEQ ID NO: 2267242 - RNA, 19 nt, Artificial Sequence
  Description of Artificial Sequence: Synthetic oligonucleotide
  Sense strand starting at position 3354 of SEQ ID NO: 1884457
ucaagaaggccucagaguu

SEQ ID NO: 2267243 - RNA, 19 nt, Artificial Sequence
  Description of Artificial Sequence: Synthetic oligonucleotide
  Antisense strand to SEQ ID NO: 2267242
aacucugaggccuucuuga

SEQ ID NO: 2267244 - RNA, 19 nt, Artificial Sequence
  Description of Artificial Sequence: Synthetic oligonucleotide
  Sense strand starting at position 3473 of SEQ ID NO: 1884457
gagaaaugagcaugucuuc

SEQ ID NO: 2267245 - RNA, 19 nt, Artificial Sequence
  Description of Artificial Sequence: Synthetic oligonucleotide
  Antisense strand to SEQ ID NO: 2267244
gaagacaugcucauuucuc

SEQ ID NO: 2267246 - RNA, 19 nt, Artificial Sequence
  Description of Artificial Sequence: Synthetic oligonucleotide
  Sense strand starting at position 3515 of SEQ ID NO: 1884457
gugcuugauacaugaagac

SEQ ID NO: 2267247 - RNA, 19 nt, Artificial Sequence
  Description of Artificial Sequence: Synthetic oligonucleotide
  Antisense strand to SEQ ID NO: 2267246
gucuucauguaucaagcac

SEQ ID NO: 2267248 - RNA, 19 nt, Artificial Sequence
  Description of Artificial Sequence: Synthetic oligonucleotide
  Sense strand starting at position 3625 of SEQ ID NO: 1884457
cagaaauguggcgacaucu

SEQ ID NO: 2267249 - RNA, 19 nt, Artificial Sequence
  Description of Artificial Sequence: Synthetic oligonucleotide
  Antisense strand to SEQ ID NO: 2267248
agaugucgccacauuucug

SEQ ID NO: 2267250 - RNA, 19 nt, Artificial Sequence
  Description of Artificial Sequence: Synthetic oligonucleotide
  Sense strand starting at position 3656 of SEQ ID NO: 1884457
cuaugaacuucugugaaac

SEQ ID NO: 2267251 - RNA, 19 nt, Artificial Sequence
  Description of Artificial Sequence: Synthetic oligonucleotide
  Antisense strand to SEQ ID NO: 2267250
guuucacagaaguucauag

SEQ ID NO: 2267252 - RNA, 19 nt, Artificial Sequence
  Description of Artificial Sequence: Synthetic oligonucleotide
  Sense strand starting at position 208 of SEQ ID NO: 1884458
cagugucaggaagauaguu

SEQ ID NO: 2267253 - RNA, 19 nt, Artificial Sequence
  Description of Artificial Sequence: Synthetic oligonucleotide
  Antisense strand to SEQ ID NO: 2267252
aacuaucuuccugacacug

SEQ ID NO: 2267254 - RNA, 19 nt, Artificial Sequence
  Description of Artificial Sequence: Synthetic oligonucleotide
  Sense strand starting at position 216 of SEQ ID NO: 1884458
ggaagauaguuucugcaaa

SEQ ID NO: 2267255 - RNA, 19 nt, Artificial Sequence
  Description of Artificial Sequence: Synthetic oligonucleotide
  Antisense strand to SEQ ID NO: 2267254
uuugcagaaacuaucuucc

SEQ ID NO: 2267256 - RNA, 19 nt, Artificial Sequence
  Description of Artificial Sequence: Synthetic oligonucleotide
  Sense strand starting at position 249 of SEQ ID NO: 1884458
auguauucugacgaguuga

SEQ ID NO: 2267257 - RNA, 19 nt, Artificial Sequence
  Description of Artificial Sequence: Synthetic oligonucleotide
  Antisense strand to SEQ ID NO: 2267256
ucaacucgucagaauacau

SEQ ID NO: 2267258 - RNA, 19 nt, Artificial Sequence
  Description of Artificial Sequence: Synthetic oligonucleotide
  Sense strand starting at position 417 of SEQ ID NO: 1884458
cagguaagcuuucuaaaug

SEQ ID NO: 2267259 - RNA, 19 nt, Artificial Sequence
  Description of Artificial Sequence: Synthetic oligonucleotide
  Antisense strand to SEQ ID NO: 2267258
cauuuagaaagcuuaccug

SEQ ID NO: 2267260 - RNA, 19 nt, Artificial Sequence
  Description of Artificial Sequence: Synthetic oligonucleotide
  Sense strand starting at position 841 of SEQ ID NO: 1884458
aagauuugguuggacacau

SEQ ID NO: 2267261 - RNA, 19 nt, Artificial Sequence
  Description of Artificial Sequence: Synthetic oligonucleotide
  Antisense strand to SEQ ID NO: 2267260
auguguccaaccaaaucuu

SEQ ID NO: 2267262 - RNA, 19 nt, Artificial Sequence
  Description of Artificial Sequence: Synthetic oligonucleotide
  Sense strand starting at position 904 of SEQ ID NO: 1884458
aguuccaagcuguaaacuu

SEQ ID NO: 2267263 - RNA, 19 nt, Artificial Sequence
  Description of Artificial Sequence: Synthetic oligonucleotide
  Antisense strand to SEQ ID NO: 2267262
aaguuuacagcuuggaacu

SEQ ID NO: 2267264 - RNA, 19 nt, Artificial Sequence
  Description of Artificial Sequence: Synthetic oligonucleotide
  Sense strand starting at position 1378 of SEQ ID NO: 1884458
ucaucaucgcuugaugaag

SEQ ID NO: 2267265 - RNA, 19 nt, Artificial Sequence
  Description of Artificial Sequence: Synthetic oligonucleotide
  Antisense strand to SEQ ID NO: 2267264
cuucaucaagcgaugauga

SEQ ID NO: 2267266 - RNA, 19 nt, Artificial Sequence
  Description of Artificial Sequence: Synthetic oligonucleotide
  Sense strand starting at position 1611 of SEQ ID NO: 1884458
cuauuuagcuugguuucua

SEQ ID NO: 2267267 - RNA, 19 nt, Artificial Sequence
  Description of Artificial Sequence: Synthetic oligonucleotide
  Antisense strand to SEQ ID NO: 2267266
uagaaaccaagcuaaauag

SEQ ID NO: 2267268 - RNA, 19 nt, Artificial Sequence
  Description of Artificial Sequence: Synthetic oligonucleotide
  Sense strand starting at position 1640 of SEQ ID NO: 1884458
cuuggcaucauguaggaua

SEQ ID NO: 2267269 - RNA, 19 nt, Artificial Sequence
  Description of Artificial Sequence: Synthetic oligonucleotide
  Antisense strand to SEQ ID NO: 2267268
uauccuacaugaugccaag

SEQ ID NO: 2267270 - RNA, 19 nt, Artificial Sequence
  Description of Artificial Sequence: Synthetic oligonucleotide
  Sense strand starting at position 1745 of SEQ ID NO: 1884458
aagaaaggcugucuuauac

SEQ ID NO: 2267271 - RNA, 19 nt, Artificial Sequence
  Description of Artificial Sequence: Synthetic oligonucleotide
  Antisense strand to SEQ ID NO: 2267270
guauaagacagccuuucuu

SEQ ID NO: 2267272 - RNA, 19 nt, Artificial Sequence
  Description of Artificial Sequence: Synthetic oligonucleotide
  Sense strand starting at position 1854 of SEQ ID NO: 1884458
uugugacaucguuauauaa

SEQ ID NO: 2267273 - RNA, 19 nt, Artificial Sequence
  Description of Artificial Sequence: Synthetic oligonucleotide
  Antisense strand to SEQ ID NO: 2267272
uuauauaacgaugucacaa

SEQ ID NO: 2267274 - RNA, 19 nt, Artificial Sequence
  Description of Artificial Sequence: Synthetic oligonucleotide
  Sense strand starting at position 1876 of SEQ ID NO: 1884458
uuaauagugccagaauacu

SEQ ID NO: 2267275 - RNA, 19 nt, Artificial Sequence
  Description of Artificial Sequence: Synthetic oligonucleotide
  Antisense strand to SEQ ID NO: 2267274
aguauucuggcacuauuaa

SEQ ID NO: 2267276 - RNA, 19 nt, Artificial Sequence
  Description of Artificial Sequence: Synthetic oligonucleotide
  Sense strand starting at position 1942 of SEQ ID NO: 1884458
agcacuuuccuacauagua

SEQ ID NO: 2267277 - RNA, 19 nt, Artificial Sequence
  Description of Artificial Sequence: Synthetic oligonucleotide
  Antisense strand to SEQ ID NO: 2267276
uacuauguaggaaagugcu

SEQ ID NO: 2267278 - RNA, 19 nt, Artificial Sequence
  Description of Artificial Sequence: Synthetic oligonucleotide
  Sense strand starting at position 2206 of SEQ ID NO: 1884458
gccagaagacuugaucuuu

SEQ ID NO: 2267279 - RNA, 19 nt, Artificial Sequence
  Description of Artificial Sequence: Synthetic oligonucleotide
  Antisense strand to SEQ ID NO: 2267278
aaagaucaagucuucuggc

SEQ ID NO: 2267280 - RNA, 19 nt, Artificial Sequence
  Description of Artificial Sequence: Synthetic oligonucleotide
  Sense strand starting at position 2231 of SEQ ID NO: 1884458
ggcucaacuccugaauaca

SEQ ID NO: 2267281 - RNA, 19 nt, Artificial Sequence
  Description of Artificial Sequence: Synthetic oligonucleotide
  Antisense strand to SEQ ID NO: 2267280
uguauucaggaguugagcc

SEQ ID NO: 2267282 - RNA, 19 nt, Artificial Sequence
  Description of Artificial Sequence: Synthetic oligonucleotide
  Sense strand starting at position 2352 of SEQ ID NO: 1884458
aggacccugugaguuuaau

SEQ ID NO: 2267283 - RNA, 19 nt, Artificial Sequence
  Description of Artificial Sequence: Synthetic oligonucleotide
  Antisense strand to SEQ ID NO: 2267282
auuaaacucacaggguccu

SEQ ID NO: 2267284 - RNA, 19 nt, Artificial Sequence
  Description of Artificial Sequence: Synthetic oligonucleotide
  Sense strand starting at position 2358 of SEQ ID NO: 1884458
cugugaguuuaaucagacu

SEQ ID NO: 2267285 - RNA, 19 nt, Artificial Sequence
  Description of Artificial Sequence: Synthetic oligonucleotide
  Antisense strand to SEQ ID NO: 2267284
agucugauuaaacucacag

SEQ ID NO: 2267286 - RNA, 19 nt, Artificial Sequence
  Description of Artificial Sequence: Synthetic oligonucleotide
  Sense strand starting at position 2414 of SEQ ID NO: 1884458
augaauuugcuaugcuauu

SEQ ID NO: 2267287 - RNA, 19 nt, Artificial Sequence
  Description of Artificial Sequence: Synthetic oligonucleotide
  Antisense strand to SEQ ID NO: 2267286
aauagcauagcaaauucau

SEQ ID NO: 2267288 - RNA, 19 nt, Artificial Sequence
  Description of Artificial Sequence: Synthetic oligonucleotide
  Sense strand starting at position 2466 of SEQ ID NO: 1884458
ucuucugggacuugaagua

SEQ ID NO: 2267289 - RNA, 19 nt, Artificial Sequence
  Description of Artificial Sequence: Synthetic oligonucleotide
  Antisense strand to SEQ ID NO: 2267288
uacuucaagucccagaaga

SEQ ID NO: 2267290 - RNA, 19 nt, Artificial Sequence
  Description of Artificial Sequence: Synthetic oligonucleotide
  Sense strand starting at position 2506 of SEQ ID NO: 1884458
caagaaggaucuucuguau

SEQ ID NO: 2267291 - RNA, 19 nt, Artificial Sequence
  Description of Artificial Sequence: Synthetic oligonucleotide
  Antisense strand to SEQ ID NO: 2267290
auacagaagauccuucuug

SEQ ID NO: 2267292 - RNA, 19 nt, Artificial Sequence
  Description of Artificial Sequence: Synthetic oligonucleotide
  Sense strand starting at position 2517 of SEQ ID NO: 1884458
uucuguauuucugugccau

SEQ ID NO: 2267293 - RNA, 19 nt, Artificial Sequence
  Description of Artificial Sequence: Synthetic oligonucleotide
  Antisense strand to SEQ ID NO: 2267292
auggcacagaaauacagaa

SEQ ID NO: 2267294 - RNA, 19 nt, Artificial Sequence
  Description of Artificial Sequence: Synthetic oligonucleotide
  Sense strand starting at position 2518 of SEQ ID NO: 1884458
ucuguauuucugugccaua

SEQ ID NO: 2267295 - RNA, 19 nt, Artificial Sequence
  Description of Artificial Sequence: Synthetic oligonucleotide
  Antisense strand to SEQ ID NO: 2267294
uauggcacagaaauacaga

SEQ ID NO: 2267296 - RNA, 19 nt, Artificial Sequence
  Description of Artificial Sequence: Synthetic oligonucleotide
  Sense strand starting at position 2519 of SEQ ID NO: 1884458
cuguauuucugugccauaa

SEQ ID NO: 2267297 - RNA, 19 nt, Artificial Sequence
  Description of Artificial Sequence: Synthetic oligonucleotide
  Antisense strand to SEQ ID NO: 2267296
uuauggcacagaaauacag

SEQ ID NO: 2267298 - RNA, 19 nt, Artificial Sequence
  Description of Artificial Sequence: Synthetic oligonucleotide
  Sense strand starting at position 2810 of SEQ ID NO: 1884458
uguuaaaugaaaugguaag

SEQ ID NO: 2267299 - RNA, 19 nt, Artificial Sequence
  Description of Artificial Sequence: Synthetic oligonucleotide
  Antisense strand to SEQ ID NO: 2267298
cuuaccauuucauuuaaca

SEQ ID NO: 2267300 - RNA, 19 nt, Artificial Sequence
  Description of Artificial Sequence: Synthetic oligonucleotide
  Sense strand starting at position 2876 of SEQ ID NO: 1884458
gauccagcugugcaugaau

SEQ ID NO: 2267301 - RNA, 19 nt, Artificial Sequence
  Description of Artificial Sequence: Synthetic oligonucleotide
  Antisense strand to SEQ ID NO: 2267300
auucaugcacagcuggauc

SEQ ID NO: 2267302 - RNA, 19 nt, Artificial Sequence
  Description of Artificial Sequence: Synthetic oligonucleotide
  Sense strand starting at position 3019 of SEQ ID NO: 1884458
ggcucuggucacgaucaaa

SEQ ID NO: 2267303 - RNA, 19 nt, Artificial Sequence
  Description of Artificial Sequence: Synthetic oligonucleotide
  Antisense strand to SEQ ID NO: 2267302
uuugaucgugaccagagcc

SEQ ID NO: 2267304 - RNA, 19 nt, Artificial Sequence
  Description of Artificial Sequence: Synthetic oligonucleotide
  Sense strand starting at position 3037 of SEQ ID NO: 1884458
agcuaagcuucuuugaaga

SEQ ID NO: 2267305 - RNA, 19 nt, Artificial Sequence
  Description of Artificial Sequence: Synthetic oligonucleotide
  Antisense strand to SEQ ID NO: 2267304
ucuucaaagaagcuuagcu

SEQ ID NO: 2267306 - RNA, 19 nt, Artificial Sequence
  Description of Artificial Sequence: Synthetic oligonucleotide
  Sense strand starting at position 3064 of SEQ ID NO: 1884458
uacuuugaggcugguaaca

SEQ ID NO: 2267307 - RNA, 19 nt, Artificial Sequence
  Description of Artificial Sequence: Synthetic oligonucleotide
  Antisense strand to SEQ ID NO: 2267306
uguuaccagccucaaagua

SEQ ID NO: 2267308 - RNA, 19 nt, Artificial Sequence
  Description of Artificial Sequence: Synthetic oligonucleotide
  Sense strand starting at position 3140 of SEQ ID NO: 1884458
ggaggucuagcguauuucu

SEQ ID NO: 2267309 - RNA, 19 nt, Artificial Sequence
  Description of Artificial Sequence: Synthetic oligonucleotide
  Antisense strand to SEQ ID NO: 2267308
agaaauacgcuagaccucc

SEQ ID NO: 2267310 - RNA, 19 nt, Artificial Sequence
  Description of Artificial Sequence: Synthetic oligonucleotide
  Sense strand starting at position 3143 of SEQ ID NO: 1884458
ggucuagcguauuucuaau

SEQ ID NO: 2267311 - RNA, 19 nt, Artificial Sequence
  Description of Artificial Sequence: Synthetic oligonucleotide
  Antisense strand to SEQ ID NO: 2267310
auuagaaauacgcuagacc

SEQ ID NO: 2267312 - RNA, 19 nt, Artificial Sequence
  Description of Artificial Sequence: Synthetic oligonucleotide
  Sense strand starting at position 3178 of SEQ ID NO: 1884458
ucuggucuucuuggaaaca

SEQ ID NO: 2267313 - RNA, 19 nt, Artificial Sequence
  Description of Artificial Sequence: Synthetic oligonucleotide
  Antisense strand to SEQ ID NO: 2267312
uguuuccaagaagaccaga

SEQ ID NO: 2267314 - RNA, 19 nt, Artificial Sequence
  Description of Artificial Sequence: Synthetic oligonucleotide
  Sense strand starting at position 3331 of SEQ ID NO: 1884458
aaauauauuugggaugguu

SEQ ID NO: 2267315 - RNA, 19 nt, Artificial Sequence
  Description of Artificial Sequence: Synthetic oligonucleotide
  Antisense strand to SEQ ID NO: 2267314
aaccaucccaaauauauuu

SEQ ID NO: 2267316 - RNA, 19 nt, Artificial Sequence
  Description of Artificial Sequence: Synthetic oligonucleotide
  Sense strand starting at position 3346 of SEQ ID NO: 1884458
gguuucuggguguauaauc

SEQ ID NO: 2267317 - RNA, 19 nt, Artificial Sequence
  Description of Artificial Sequence: Synthetic oligonucleotide
  Antisense strand to SEQ ID NO: 2267316
gauuauacacccagaaacc

SEQ ID NO: 2267318 - RNA, 19 nt, Artificial Sequence
  Description of Artificial Sequence: Synthetic oligonucleotide
  Sense strand starting at position 3353 of SEQ ID NO: 1884458
ggguguauaauccauugga

SEQ ID NO: 2267319 - RNA, 19 nt, Artificial Sequence
  Description of Artificial Sequence: Synthetic oligonucleotide
  Antisense strand to SEQ ID NO: 2267318
uccaauggauuauacaccc

SEQ ID NO: 2267320 - RNA, 19 nt, Artificial Sequence
  Description of Artificial Sequence: Synthetic oligonucleotide
  Sense strand starting at position 3478 of SEQ ID NO: 1884458
cgugucaucuuauuuguaa

SEQ ID NO: 2267321 - RNA, 19 nt, Artificial Sequence
  Description of Artificial Sequence: Synthetic oligonucleotide
  Antisense strand to SEQ ID NO: 2267320
uuacaaauaagaugacacg

SEQ ID NO: 2267322 - RNA, 19 nt, Artificial Sequence
  Description of Artificial Sequence: Synthetic oligonucleotide
  Sense strand starting at position 3479 of SEQ ID NO: 1884458
gugucaucuuauuuguaag

SEQ ID NO: 2267323 - RNA, 19 nt, Artificial Sequence
  Description of Artificial Sequence: Synthetic oligonucleotide
  Antisense strand to SEQ ID NO: 2267322
cuuacaaauaagaugacac

SEQ ID NO: 2267324 - RNA, 19 nt, Artificial Sequence
  Description of Artificial Sequence: Synthetic oligonucleotide
  Sense strand starting at position 3505 of SEQ ID NO: 1884458
ucucuaguuggauagugau

SEQ ID NO: 2267325 - RNA, 19 nt, Artificial Sequence
  Description of Artificial Sequence: Synthetic oligonucleotide
  Antisense strand to SEQ ID NO: 2267324
aucacuauccaacuagaga

SEQ ID NO: 2267326 - RNA, 19 nt, Artificial Sequence
  Description of Artificial Sequence: Synthetic oligonucleotide
  Sense strand starting at position 3927 of SEQ ID NO: 1884458
agaaauuguuaaguuugga

SEQ ID NO: 2267327 - RNA, 19 nt, Artificial Sequence
  Description of Artificial Sequence: Synthetic oligonucleotide
  Antisense strand to SEQ ID NO: 2267326
uccaaacuuaacaauuucu

SEQ ID NO: 2267328 - RNA, 19 nt, Artificial Sequence
  Description of Artificial Sequence: Synthetic oligonucleotide
  Sense strand starting at position 3964 of SEQ ID NO: 1884458
auuuguaacuuggaugaga

SEQ ID NO: 2267329 - RNA, 19 nt, Artificial Sequence
  Description of Artificial Sequence: Synthetic oligonucleotide
  Antisense strand to SEQ ID NO: 2267328
ucucauccaaguuacaaau

SEQ ID NO: 2267330 - RNA, 19 nt, Artificial Sequence
  Description of Artificial Sequence: Synthetic oligonucleotide
  Sense strand starting at position 3966 of SEQ ID NO: 1884458
uuguaacuuggaugagaac

SEQ ID NO: 2267331 - RNA, 19 nt, Artificial Sequence
  Description of Artificial Sequence: Synthetic oligonucleotide
  Antisense strand to SEQ ID NO: 2267330
guucucauccaaguuacaa

SEQ ID NO: 2267332 - RNA, 19 nt, Artificial Sequence
  Description of Artificial Sequence: Synthetic oligonucleotide
  Sense strand starting at position 459 of SEQ ID NO: 1884459
agaagacauugguacaucu

SEQ ID NO: 2267333 - RNA, 19 nt, Artificial Sequence
  Description of Artificial Sequence: Synthetic oligonucleotide
  Antisense strand to SEQ ID NO: 2267332
agauguaccaaugucuucu

SEQ ID NO: 2267334 - RNA, 19 nt, Artificial Sequence
  Description of Artificial Sequence: Synthetic oligonucleotide
  Sense strand starting at position 536 of SEQ ID NO: 1884459
aggccaucacaaugaauuc

SEQ ID NO: 2267335 - RNA, 19 nt, Artificial Sequence
  Description of Artificial Sequence: Synthetic oligonucleotide
  Antisense strand to SEQ ID NO: 2267334
gaauucauugugauggccu

SEQ ID NO: 2267336 - RNA, 19 nt, Artificial Sequence
  Description of Artificial Sequence: Synthetic oligonucleotide
  Sense strand starting at position 656 of SEQ ID NO: 1884459
gcagcuaccgggcaugauu

SEQ ID NO: 2267337 - RNA, 19 nt, Artificial Sequence
  Description of Artificial Sequence: Synthetic oligonucleotide
  Antisense strand to SEQ ID NO: 2267336
aaucaugcccgguagcugc

SEQ ID NO: 2267338 - RNA, 19 nt, Artificial Sequence
  Description of Artificial Sequence: Synthetic oligonucleotide
  Sense strand starting at position 836 of SEQ ID NO: 1884459
gcacuuaccuuggucugau

SEQ ID NO: 2267339 - RNA, 19 nt, Artificial Sequence
  Description of Artificial Sequence: Synthetic oligonucleotide
  Antisense strand to SEQ ID NO: 2267338
aucagaccaagguaagugc

SEQ ID NO: 2267340 - RNA, 19 nt, Artificial Sequence
  Description of Artificial Sequence: Synthetic oligonucleotide
  Sense strand starting at position 839 of SEQ ID NO: 1884459
cuuaccuuggucugauaga

SEQ ID NO: 2267341 - RNA, 19 nt, Artificial Sequence
  Description of Artificial Sequence: Synthetic oligonucleotide
  Antisense strand to SEQ ID NO: 2267340
ucuaucagaccaagguaag

SEQ ID NO: 2267342 - RNA, 19 nt, Artificial Sequence
  Description of Artificial Sequence: Synthetic oligonucleotide
  Sense strand starting at position 840 of SEQ ID NO: 1884459
uuaccuuggucugauagau

SEQ ID NO: 2267343 - RNA, 19 nt, Artificial Sequence
  Description of Artificial Sequence: Synthetic oligonucleotide
  Antisense strand to SEQ ID NO: 2267342
aucuaucagaccaagguaa

SEQ ID NO: 2267344 - RNA, 19 nt, Artificial Sequence
  Description of Artificial Sequence: Synthetic oligonucleotide
  Sense strand starting at position 846 of SEQ ID NO: 1884459
uggucugauagaugacuca

SEQ ID NO: 2267345 - RNA, 19 nt, Artificial Sequence
  Description of Artificial Sequence: Synthetic oligonucleotide
  Antisense strand to SEQ ID NO: 2267344
ugagucaucuaucagacca

SEQ ID NO: 2267346 - RNA, 19 nt, Artificial Sequence
  Description of Artificial Sequence: Synthetic oligonucleotide
  Sense strand starting at position 873 of SEQ ID NO: 1884459
cuguguucgcuucccugaa

SEQ ID NO: 2267347 - RNA, 19 nt, Artificial Sequence
  Description of Artificial Sequence: Synthetic oligonucleotide
  Antisense strand to SEQ ID NO: 2267346
uucagggaagcgaacacag

SEQ ID NO: 2267348 - RNA, 19 nt, Artificial Sequence
  Description of Artificial Sequence: Synthetic oligonucleotide
  Sense strand starting at position 1038 of SEQ ID NO: 1884459
ggacaaugaugaugucucu

SEQ ID NO: 2267349 - RNA, 19 nt, Artificial Sequence
  Description of Artificial Sequence: Synthetic oligonucleotide
  Antisense strand to SEQ ID NO: 2267348
agagacaucaucauugucc

SEQ ID NO: 2267350 - RNA, 19 nt, Artificial Sequence
  Description of Artificial Sequence: Synthetic oligonucleotide
  Sense strand starting at position 1041 of SEQ ID NO: 1884459
caaugaugaugucucugua

SEQ ID NO: 2267351 - RNA, 19 nt, Artificial Sequence
  Description of Artificial Sequence: Synthetic oligonucleotide
  Antisense strand to SEQ ID NO: 2267350
uacagagacaucaucauug

SEQ ID NO: 2267352 - RNA, 19 nt, Artificial Sequence
  Description of Artificial Sequence: Synthetic oligonucleotide
  Sense strand starting at position 1101 of SEQ ID NO: 1884459
gguuacauuuguuaaaugu

SEQ ID NO: 2267353 - RNA, 19 nt, Artificial Sequence
  Description of Artificial Sequence: Synthetic oligonucleotide
  Antisense strand to SEQ ID NO: 2267352
acauuuaacaaauguaacc

SEQ ID NO: 2267354 - RNA, 19 nt, Artificial Sequence
  Description of Artificial Sequence: Synthetic oligonucleotide
  Sense strand starting at position 1137 of SEQ ID NO: 1884459
gugggugaguguucaugac

SEQ ID NO: 2267355 - RNA, 19 nt, Artificial Sequence
  Description of Artificial Sequence: Synthetic oligonucleotide
  Antisense strand to SEQ ID NO: 2267354
gucaugaacacucacccac

SEQ ID NO: 2267356 - RNA, 19 nt, Artificial Sequence
  Description of Artificial Sequence: Synthetic oligonucleotide
  Sense strand starting at position 1141 of SEQ ID NO: 1884459
gugaguguucaugacaaug

SEQ ID NO: 2267357 - RNA, 19 nt, Artificial Sequence
  Description of Artificial Sequence: Synthetic oligonucleotide
  Antisense strand to SEQ ID NO: 2267356
cauugucaugaacacucac

SEQ ID NO: 2267358 - RNA, 19 nt, Artificial Sequence
  Description of Artificial Sequence: Synthetic oligonucleotide
  Sense strand starting at position 1166 of SEQ ID NO: 1884459
cugacuacuuccgcgagaa

SEQ ID NO: 2267359 - RNA, 19 nt, Artificial Sequence
  Description of Artificial Sequence: Synthetic oligonucleotide
  Antisense strand to SEQ ID NO: 2267358
uucucgcggaaguagucag

SEQ ID NO: 2267360 - RNA, 19 nt, Artificial Sequence
  Description of Artificial Sequence: Synthetic oligonucleotide
  Sense strand starting at position 1167 of SEQ ID NO: 1884459
ugacuacuuccgcgagaaa

SEQ ID NO: 2267361 - RNA, 19 nt, Artificial Sequence
  Description of Artificial Sequence: Synthetic oligonucleotide
  Antisense strand to SEQ ID NO: 2267360
uuucucgcggaaguaguca

SEQ ID NO: 2267362 - RNA, 19 nt, Artificial Sequence
  Description of Artificial Sequence: Synthetic oligonucleotide
  Sense strand starting at position 1168 of SEQ ID NO: 1884459
gacuacuuccgcgagaaac

SEQ ID NO: 2267363 - RNA, 19 nt, Artificial Sequence
  Description of Artificial Sequence: Synthetic oligonucleotide
  Antisense strand to SEQ ID NO: 2267362
guuucucgcggaaguaguc

SEQ ID NO: 2267364 - RNA, 19 nt, Artificial Sequence
  Description of Artificial Sequence: Synthetic oligonucleotide
  Sense strand starting at position 1219 of SEQ ID NO: 1884459
ggaauauggcgcugucuuu

SEQ ID NO: 2267365 - RNA, 19 nt, Artificial Sequence
  Description of Artificial Sequence: Synthetic oligonucleotide
  Antisense strand to SEQ ID NO: 2267364
aaagacagcgccauauucc

SEQ ID NO: 2267366 - RNA, 19 nt, Artificial Sequence
  Description of Artificial Sequence: Synthetic oligonucleotide
  Sense strand starting at position 1261 of SEQ ID NO: 1884459
gaauuuacguguuaucaga

SEQ ID NO: 2267367 - RNA, 19 nt, Artificial Sequence
  Description of Artificial Sequence: Synthetic oligonucleotide
  Antisense strand to SEQ ID NO: 2267366
ucugauaacacguaaauuc

SEQ ID NO: 2267368 - RNA, 19 nt, Artificial Sequence
  Description of Artificial Sequence: Synthetic oligonucleotide
  Sense strand starting at position 1369 of SEQ ID NO: 1884459
ggcucuccuuagugggaaa

SEQ ID NO: 2267369 - RNA, 19 nt, Artificial Sequence
  Description of Artificial Sequence: Synthetic oligonucleotide
  Antisense strand to SEQ ID NO: 2267368
uuucccacuaaggagagcc

SEQ ID NO: 2267370 - RNA, 19 nt, Artificial Sequence
  Description of Artificial Sequence: Synthetic oligonucleotide
  Sense strand starting at position 1382 of SEQ ID NO: 1884459
gggaaacucugucugucuu

SEQ ID NO: 2267371 - RNA, 19 nt, Artificial Sequence
  Description of Artificial Sequence: Synthetic oligonucleotide
  Antisense strand to SEQ ID NO: 2267370
aagacagacagaguuuccc

SEQ ID NO: 2267372 - RNA, 19 nt, Artificial Sequence
  Description of Artificial Sequence: Synthetic oligonucleotide
  Sense strand starting at position 1469 of SEQ ID NO: 1884459
gcagucgccuuggcagaaa

SEQ ID NO: 2267373 - RNA, 19 nt, Artificial Sequence
  Description of Artificial Sequence: Synthetic oligonucleotide
  Antisense strand to SEQ ID NO: 2267372
uuucugccaaggcgacugc

SEQ ID NO: 2267374 - RNA, 19 nt, Artificial Sequence
  Description of Artificial Sequence: Synthetic oligonucleotide
  Sense strand starting at position 1501 of SEQ ID NO: 1884459
ggauguaguggguggugaa

SEQ ID NO: 2267375 - RNA, 19 nt, Artificial Sequence
  Description of Artificial Sequence: Synthetic oligonucleotide
  Antisense strand to SEQ ID NO: 2267374
uucaccacccacuacaucc

SEQ ID NO: 2267376 - RNA, 19 nt, Artificial Sequence
  Description of Artificial Sequence: Synthetic oligonucleotide
  Sense strand starting at position 1578 of SEQ ID NO: 1884459
gcgggaaucccacaaaucu

SEQ ID NO: 2267377 - RNA, 19 nt, Artificial Sequence
  Description of Artificial Sequence: Synthetic oligonucleotide
  Antisense strand to SEQ ID NO: 2267376
agauuugugggauucccgc

SEQ ID NO: 2267378 - RNA, 19 nt, Artificial Sequence
  Description of Artificial Sequence: Synthetic oligonucleotide
  Sense strand starting at position 2107 of SEQ ID NO: 1884459
ugccuuugucagcggagga

SEQ ID NO: 2267379 - RNA, 19 nt, Artificial Sequence
  Description of Artificial Sequence: Synthetic oligonucleotide
  Antisense strand to SEQ ID NO: 2267378
uccuccgcugacaaaggca

SEQ ID NO: 2267380 - RNA, 19 nt, Artificial Sequence
  Description of Artificial Sequence: Synthetic oligonucleotide
  Sense strand starting at position 2789 of SEQ ID NO: 1884459
gcaugacucgugcaacuug

SEQ ID NO: 2267381 - RNA, 19 nt, Artificial Sequence
  Description of Artificial Sequence: Synthetic oligonucleotide
  Antisense strand to SEQ ID NO: 2267380
caaguugcacgagucaugc

SEQ ID NO: 2267382 - RNA, 19 nt, Artificial Sequence
  Description of Artificial Sequence: Synthetic oligonucleotide
  Sense strand starting at position 3310 of SEQ ID NO: 1884459
agaugcacgucucuaugua

SEQ ID NO: 2267383 - RNA, 19 nt, Artificial Sequence
  Description of Artificial Sequence: Synthetic oligonucleotide
  Antisense strand to SEQ ID NO: 2267382
uacauagagacgugcaucu

SEQ ID NO: 2267384 - RNA, 19 nt, Artificial Sequence
  Description of Artificial Sequence: Synthetic oligonucleotide
  Sense strand starting at position 3314 of SEQ ID NO: 1884459
gcacgucucuauguagcau

SEQ ID NO: 2267385 - RNA, 19 nt, Artificial Sequence
  Description of Artificial Sequence: Synthetic oligonucleotide
  Antisense strand to SEQ ID NO: 2267384
augcuacauagagacgugc

SEQ ID NO: 2267386 - RNA, 19 nt, Artificial Sequence
  Description of Artificial Sequence: Synthetic oligonucleotide
  Sense strand starting at position 3318 of SEQ ID NO: 1884459
gucucuauguagcaugaaa

SEQ ID NO: 2267387 - RNA, 19 nt, Artificial Sequence
  Description of Artificial Sequence: Synthetic oligonucleotide
  Antisense strand to SEQ ID NO: 2267386
uuucaugcuacauagagac

SEQ ID NO: 2267388 - RNA, 19 nt, Artificial Sequence
  Description of Artificial Sequence: Synthetic oligonucleotide
  Sense strand starting at position 3337 of SEQ ID NO: 1884459
gcacuuucuccgcucaguu

SEQ ID NO: 2267389 - RNA, 19 nt, Artificial Sequence
  Description of Artificial Sequence: Synthetic oligonucleotide
  Antisense strand to SEQ ID NO: 2267388
aacugagcggagaaagugc

SEQ ID NO: 2267390 - RNA, 19 nt, Artificial Sequence
  Description of Artificial Sequence: Synthetic oligonucleotide
  Sense strand starting at position 3345 of SEQ ID NO: 1884459
uccgcucaguucuuuacaa

SEQ ID NO: 2267391 - RNA, 19 nt, Artificial Sequence
  Description of Artificial Sequence: Synthetic oligonucleotide
  Antisense strand to SEQ ID NO: 2267390
uuguaaagaacugagcgga

SEQ ID NO: 2267392 - RNA, 19 nt, Artificial Sequence
  Description of Artificial Sequence: Synthetic oligonucleotide
  Sense strand starting at position 3346 of SEQ ID NO: 1884459
ccgcucaguucuuuacaaa

SEQ ID NO: 2267393 - RNA, 19 nt, Artificial Sequence
  Description of Artificial Sequence: Synthetic oligonucleotide
  Antisense strand to SEQ ID NO: 2267392
uuuguaaagaacugagcgg

SEQ ID NO: 2267394 - RNA, 19 nt, Artificial Sequence
  Description of Artificial Sequence: Synthetic oligonucleotide
  Sense strand starting at position 3374 of SEQ ID NO: 1884459
uauguaauagcguucuguu

SEQ ID NO: 2267395 - RNA, 19 nt, Artificial Sequence
  Description of Artificial Sequence: Synthetic oligonucleotide
  Antisense strand to SEQ ID NO: 2267394
aacagaacgcuauuacaua

SEQ ID NO: 2267396 - RNA, 19 nt, Artificial Sequence
  Description of Artificial Sequence: Synthetic oligonucleotide
  Sense strand starting at position 3375 of SEQ ID NO: 1884459
auguaauagcguucuguuu

SEQ ID NO: 2267397 - RNA, 19 nt, Artificial Sequence
  Description of Artificial Sequence: Synthetic oligonucleotide
  Antisense strand to SEQ ID NO: 2267396
aaacagaacgcuauuacau

SEQ ID NO: 2267398 - RNA, 19 nt, Artificial Sequence
  Description of Artificial Sequence: Synthetic oligonucleotide
  Sense strand starting at position 3376 of SEQ ID NO: 1884459
uguaauagcguucuguuua

SEQ ID NO: 2267399 - RNA, 19 nt, Artificial Sequence
  Description of Artificial Sequence: Synthetic oligonucleotide
  Antisense strand to SEQ ID NO: 2267398
uaaacagaacgcuauuaca

SEQ ID NO: 2267400 - RNA, 19 nt, Artificial Sequence
  Description of Artificial Sequence: Synthetic oligonucleotide
  Sense strand starting at position 3381 of SEQ ID NO: 1884459
uagcguucuguuuauuuaa

SEQ ID NO: 2267401 - RNA, 19 nt, Artificial Sequence
  Description of Artificial Sequence: Synthetic oligonucleotide
  Antisense strand to SEQ ID NO: 2267400
uuaaauaaacagaacgcua

SEQ ID NO: 2267402 - RNA, 19 nt, Artificial Sequence
  Description of Artificial Sequence: Synthetic oligonucleotide
  Sense strand starting at position 3383 of SEQ ID NO: 1884459
gcguucuguuuauuuaaua

SEQ ID NO: 2267403 - RNA, 19 nt, Artificial Sequence
  Description of Artificial Sequence: Synthetic oligonucleotide
  Antisense strand to SEQ ID NO: 2267402
uauuaaauaaacagaacgc

SEQ ID NO: 2267404 - RNA, 19 nt, Artificial Sequence
  Description of Artificial Sequence: Synthetic oligonucleotide
  Sense strand starting at position 3403 of SEQ ID NO: 1884459
ccagcucucugcucgggaa

SEQ ID NO: 2267405 - RNA, 19 nt, Artificial Sequence
  Description of Artificial Sequence: Synthetic oligonucleotide
  Antisense strand to SEQ ID NO: 2267404
uucccgagcagagagcugg

SEQ ID NO: 2267406 - RNA, 19 nt, Artificial Sequence
  Description of Artificial Sequence: Synthetic oligonucleotide
  Sense strand starting at position 3427 of SEQ ID NO: 1884459
uuggaaacacugcguguua

SEQ ID NO: 2267407 - RNA, 19 nt, Artificial Sequence
  Description of Artificial Sequence: Synthetic oligonucleotide
  Antisense strand to SEQ ID NO: 2267406
uaacacgcaguguuuccaa

SEQ ID NO: 2267408 - RNA, 19 nt, Artificial Sequence
  Description of Artificial Sequence: Synthetic oligonucleotide
  Sense strand starting at position 3429 of SEQ ID NO: 1884459
ggaaacacugcguguuaca

SEQ ID NO: 2267409 - RNA, 19 nt, Artificial Sequence
  Description of Artificial Sequence: Synthetic oligonucleotide
  Antisense strand to SEQ ID NO: 2267408
uguaacacgcaguguuucc

SEQ ID NO: 2267410 - RNA, 19 nt, Artificial Sequence
  Description of Artificial Sequence: Synthetic oligonucleotide
  Sense strand starting at position 3432 of SEQ ID NO: 1884459
aacacugcguguuacauaa

SEQ ID NO: 2267411 - RNA, 19 nt, Artificial Sequence
  Description of Artificial Sequence: Synthetic oligonucleotide
  Antisense strand to SEQ ID NO: 2267410
uuauguaacacgcaguguu

SEQ ID NO: 2267412 - RNA, 19 nt, Artificial Sequence
  Description of Artificial Sequence: Synthetic oligonucleotide
  Sense strand starting at position 124 of SEQ ID NO: 1884460
gguuccauagacugacuau

SEQ ID NO: 2267413 - RNA, 19 nt, Artificial Sequence
  Description of Artificial Sequence: Synthetic oligonucleotide
  Antisense strand to SEQ ID NO: 2267412
auagucagucuauggaacc

SEQ ID NO: 2267414 - RNA, 19 nt, Artificial Sequence
  Description of Artificial Sequence: Synthetic oligonucleotide
  Sense strand starting at position 244 of SEQ ID NO: 1884460
cugggugguggugauuaua

SEQ ID NO: 2267415 - RNA, 19 nt, Artificial Sequence
  Description of Artificial Sequence: Synthetic oligonucleotide
  Antisense strand to SEQ ID NO: 2267414
uauaaucaccaccacccag

SEQ ID NO: 2267416 - RNA, 19 nt, Artificial Sequence
  Description of Artificial Sequence: Synthetic oligonucleotide
  Sense strand starting at position 478 of SEQ ID NO: 1884460
uccuuugugaaauggagaa

SEQ ID NO: 2267417 - RNA, 19 nt, Artificial Sequence
  Description of Artificial Sequence: Synthetic oligonucleotide
  Antisense strand to SEQ ID NO: 2267416
uucuccauuucacaaagga

SEQ ID NO: 2267418 - RNA, 19 nt, Artificial Sequence
  Description of Artificial Sequence: Synthetic oligonucleotide
  Sense strand starting at position 523 of SEQ ID NO: 1884460
ggcuuauugguagacucaa

SEQ ID NO: 2267419 - RNA, 19 nt, Artificial Sequence
  Description of Artificial Sequence: Synthetic oligonucleotide
  Antisense strand to SEQ ID NO: 2267418
uugagucuaccaauaagcc

SEQ ID NO: 2267420 - RNA, 19 nt, Artificial Sequence
  Description of Artificial Sequence: Synthetic oligonucleotide
  Sense strand starting at position 543 of SEQ ID NO: 1884460
ugagauaauacgugaaagu

SEQ ID NO: 2267421 - RNA, 19 nt, Artificial Sequence
  Description of Artificial Sequence: Synthetic oligonucleotide
  Antisense strand to SEQ ID NO: 2267420
acuuucacguauuaucuca

SEQ ID NO: 2267422 - RNA, 19 nt, Artificial Sequence
  Description of Artificial Sequence: Synthetic oligonucleotide
  Sense strand starting at position 572 of SEQ ID NO: 1884460
aguauaaaguacucuaaag

SEQ ID NO: 2267423 - RNA, 19 nt, Artificial Sequence
  Description of Artificial Sequence: Synthetic oligonucleotide
  Antisense strand to SEQ ID NO: 2267422
cuuuagaguacuuuauacu

SEQ ID NO: 2267424 - RNA, 19 nt, Artificial Sequence
  Description of Artificial Sequence: Synthetic oligonucleotide
  Sense strand starting at position 625 of SEQ ID NO: 1884460
guaauuguaguuuagauac

SEQ ID NO: 2267425 - RNA, 19 nt, Artificial Sequence
  Description of Artificial Sequence: Synthetic oligonucleotide
  Antisense strand to SEQ ID NO: 2267424
guaucuaaacuacaauuac

SEQ ID NO: 2267426 - RNA, 19 nt, Artificial Sequence
  Description of Artificial Sequence: Synthetic oligonucleotide
  Sense strand starting at position 635 of SEQ ID NO: 1884460
uuuagauacugggcucaua

SEQ ID NO: 2267427 - RNA, 19 nt, Artificial Sequence
  Description of Artificial Sequence: Synthetic oligonucleotide
  Antisense strand to SEQ ID NO: 2267426
uaugagcccaguaucuaaa

SEQ ID NO: 2267428 - RNA, 19 nt, Artificial Sequence
  Description of Artificial Sequence: Synthetic oligonucleotide
  Sense strand starting at position 919 of SEQ ID NO: 1884460
ccgcacuuggcccaagaaa

SEQ ID NO: 2267429 - RNA, 19 nt, Artificial Sequence
  Description of Artificial Sequence: Synthetic oligonucleotide
  Antisense strand to SEQ ID NO: 2267428
uuucuugggccaagugcgg

SEQ ID NO: 2267430 - RNA, 19 nt, Artificial Sequence
  Description of Artificial Sequence: Synthetic oligonucleotide
  Sense strand starting at position 950 of SEQ ID NO: 1884460
gggccaaauguauauguga

SEQ ID NO: 2267431 - RNA, 19 nt, Artificial Sequence
  Description of Artificial Sequence: Synthetic oligonucleotide
  Antisense strand to SEQ ID NO: 2267430
ucacauauacauuuggccc

SEQ ID NO: 2267432 - RNA, 19 nt, Artificial Sequence
  Description of Artificial Sequence: Synthetic oligonucleotide
  Sense strand starting at position 953 of SEQ ID NO: 1884460
ccaaauguauaugugaaau

SEQ ID NO: 2267433 - RNA, 19 nt, Artificial Sequence
  Description of Artificial Sequence: Synthetic oligonucleotide
  Antisense strand to SEQ ID NO: 2267432
auuucacauauacauuugg

SEQ ID NO: 2267434 - RNA, 19 nt, Artificial Sequence
  Description of Artificial Sequence: Synthetic oligonucleotide
  Sense strand starting at position 1574 of SEQ ID NO: 1884460
gagacugugucccucaaag

SEQ ID NO: 2267435 - RNA, 19 nt, Artificial Sequence
  Description of Artificial Sequence: Synthetic oligonucleotide
  Antisense strand to SEQ ID NO: 2267434
cuuugagggacacagucuc

SEQ ID NO: 2267436 - RNA, 19 nt, Artificial Sequence
  Description of Artificial Sequence: Synthetic oligonucleotide
  Sense strand starting at position 1576 of SEQ ID NO: 1884460
gacugugucccucaaagug

SEQ ID NO: 2267437 - RNA, 19 nt, Artificial Sequence
  Description of Artificial Sequence: Synthetic oligonucleotide
  Antisense strand to SEQ ID NO: 2267436
cacuuugagggacacaguc

SEQ ID NO: 2267438 - RNA, 19 nt, Artificial Sequence
  Description of Artificial Sequence: Synthetic oligonucleotide
  Sense strand starting at position 1743 of SEQ ID NO: 1884460
gccacauuacuacaguauu

SEQ ID NO: 2267439 - RNA, 19 nt, Artificial Sequence
  Description of Artificial Sequence: Synthetic oligonucleotide
  Antisense strand to SEQ ID NO: 2267438
aauacuguaguaauguggc

SEQ ID NO: 2267440 - RNA, 19 nt, Artificial Sequence
  Description of Artificial Sequence: Synthetic oligonucleotide
  Sense strand starting at position 1815 of SEQ ID NO: 1884460
gagaguugccuggauugac

SEQ ID NO: 2267441 - RNA, 19 nt, Artificial Sequence
  Description of Artificial Sequence: Synthetic oligonucleotide
  Antisense strand to SEQ ID NO: 2267440
gucaauccaggcaacucuc

SEQ ID NO: 2267442 - RNA, 19 nt, Artificial Sequence
  Description of Artificial Sequence: Synthetic oligonucleotide
  Sense strand starting at position 1837 of SEQ ID NO: 1884460
gaugccugaguguauaauu

SEQ ID NO: 2267443 - RNA, 19 nt, Artificial Sequence
  Description of Artificial Sequence: Synthetic oligonucleotide
  Antisense strand to SEQ ID NO: 2267442
aauuauacacucaggcauc

SEQ ID NO: 2267444 - RNA, 19 nt, Artificial Sequence
  Description of Artificial Sequence: Synthetic oligonucleotide
  Sense strand starting at position 1904 of SEQ ID NO: 1884460
cuaauuguaggcuacaaau

SEQ ID NO: 2267445 - RNA, 19 nt, Artificial Sequence
  Description of Artificial Sequence: Synthetic oligonucleotide
  Antisense strand to SEQ ID NO: 2267444
auuuguagccuacaauuag

SEQ ID NO: 2267446 - RNA, 19 nt, Artificial Sequence
  Description of Artificial Sequence: Synthetic oligonucleotide
  Sense strand starting at position 2022 of SEQ ID NO: 1884460
caugcugacuaguccagaa

SEQ ID NO: 2267447 - RNA, 19 nt, Artificial Sequence
  Description of Artificial Sequence: Synthetic oligonucleotide
  Antisense strand to SEQ ID NO: 2267446
uucuggacuagucagcaug

SEQ ID NO: 2267448 - RNA, 19 nt, Artificial Sequence
  Description of Artificial Sequence: Synthetic oligonucleotide
  Sense strand starting at position 2024 of SEQ ID NO: 1884460
ugcugacuaguccagaaga

SEQ ID NO: 2267449 - RNA, 19 nt, Artificial Sequence
  Description of Artificial Sequence: Synthetic oligonucleotide
  Antisense strand to SEQ ID NO: 2267448
ucuucuggacuagucagca

SEQ ID NO: 2267450 - RNA, 19 nt, Artificial Sequence
  Description of Artificial Sequence: Synthetic oligonucleotide
  Sense strand starting at position 2172 of SEQ ID NO: 1884460
uuugauuccucuuugggaa

SEQ ID NO: 2267451 - RNA, 19 nt, Artificial Sequence
  Description of Artificial Sequence: Synthetic oligonucleotide
  Antisense strand to SEQ ID NO: 2267450
uucccaaagaggaaucaaa

SEQ ID NO: 2267452 - RNA, 19 nt, Artificial Sequence
  Description of Artificial Sequence: Synthetic oligonucleotide
  Sense strand starting at position 2173 of SEQ ID NO: 1884460
uugauuccucuuugggaau

SEQ ID NO: 2267453 - RNA, 19 nt, Artificial Sequence
  Description of Artificial Sequence: Synthetic oligonucleotide
  Antisense strand to SEQ ID NO: 2267452
auucccaaagaggaaucaa

SEQ ID NO: 2267454 - RNA, 19 nt, Artificial Sequence
  Description of Artificial Sequence: Synthetic oligonucleotide
  Sense strand starting at position 2186 of SEQ ID NO: 1884460
gggaauuguuuccugacca

SEQ ID NO: 2267455 - RNA, 19 nt, Artificial Sequence
  Description of Artificial Sequence: Synthetic oligonucleotide
  Antisense strand to SEQ ID NO: 2267454
uggucaggaaacaauuccc

SEQ ID NO: 2267456 - RNA, 19 nt, Artificial Sequence
  Description of Artificial Sequence: Synthetic oligonucleotide
  Sense strand starting at position 2733 of SEQ ID NO: 1884460
gaaggaacagcucgaucua

SEQ ID NO: 2267457 - RNA, 19 nt, Artificial Sequence
  Description of Artificial Sequence: Synthetic oligonucleotide
  Antisense strand to SEQ ID NO: 2267456
uagaucgagcuguuccuuc

SEQ ID NO: 2267458 - RNA, 19 nt, Artificial Sequence
  Description of Artificial Sequence: Synthetic oligonucleotide
  Sense strand starting at position 2791 of SEQ ID NO: 1884460
cuugguauagaugagucua

SEQ ID NO: 2267459 - RNA, 19 nt, Artificial Sequence
  Description of Artificial Sequence: Synthetic oligonucleotide
  Antisense strand to SEQ ID NO: 2267458
uagacucaucuauaccaag

SEQ ID NO: 2267460 - RNA, 19 nt, Artificial Sequence
  Description of Artificial Sequence: Synthetic oligonucleotide
  Sense strand starting at position 2793 of SEQ ID NO: 1884460
ugguauagaugagucuaua

SEQ ID NO: 2267461 - RNA, 19 nt, Artificial Sequence
  Description of Artificial Sequence: Synthetic oligonucleotide
  Antisense strand to SEQ ID NO: 2267460
uauagacucaucuauacca

SEQ ID NO: 2267462 - RNA, 19 nt, Artificial Sequence
  Description of Artificial Sequence: Synthetic oligonucleotide
  Sense strand starting at position 2872 of SEQ ID NO: 1884460
aucucuaguggugauagua

SEQ ID NO: 2267463 - RNA, 19 nt, Artificial Sequence
  Description of Artificial Sequence: Synthetic oligonucleotide
  Antisense strand to SEQ ID NO: 2267462
uacuaucaccacuagagau

SEQ ID NO: 2267464 - RNA, 19 nt, Artificial Sequence
  Description of Artificial Sequence: Synthetic oligonucleotide
  Sense strand starting at position 2966 of SEQ ID NO: 1884460
cuaggaaucucaguauuga

SEQ ID NO: 2267465 - RNA, 19 nt, Artificial Sequence
  Description of Artificial Sequence: Synthetic oligonucleotide
  Antisense strand to SEQ ID NO: 2267464
ucaauacugagauuccuag

SEQ ID NO: 2267466 - RNA, 19 nt, Artificial Sequence
  Description of Artificial Sequence: Synthetic oligonucleotide
  Sense strand starting at position 2977 of SEQ ID NO: 1884460
aguauugaaagcgaccuua

SEQ ID NO: 2267467 - RNA, 19 nt, Artificial Sequence
  Description of Artificial Sequence: Synthetic oligonucleotide
  Antisense strand to SEQ ID NO: 2267466
uaaggucgcuuucaauacu

SEQ ID NO: 2267468 - RNA, 19 nt, Artificial Sequence
  Description of Artificial Sequence: Synthetic oligonucleotide
  Sense strand starting at position 3157 of SEQ ID NO: 1884460
cugucauugccucauuugu

SEQ ID NO: 2267469 - RNA, 19 nt, Artificial Sequence
  Description of Artificial Sequence: Synthetic oligonucleotide
  Antisense strand to SEQ ID NO: 2267468
acaaaugaggcaaugacag

SEQ ID NO: 2267470 - RNA, 19 nt, Artificial Sequence
  Description of Artificial Sequence: Synthetic oligonucleotide
  Sense strand starting at position 3231 of SEQ ID NO: 1884460
ucuggaauacugugaugaa

SEQ ID NO: 2267471 - RNA, 19 nt, Artificial Sequence
  Description of Artificial Sequence: Synthetic oligonucleotide
  Antisense strand to SEQ ID NO: 2267470
uucaucacaguauuccaga

SEQ ID NO: 2267472 - RNA, 19 nt, Artificial Sequence
  Description of Artificial Sequence: Synthetic oligonucleotide
  Sense strand starting at position 3271 of SEQ ID NO: 1884460
gaacguauucuguaauuga

SEQ ID NO: 2267473 - RNA, 19 nt, Artificial Sequence
  Description of Artificial Sequence: Synthetic oligonucleotide
  Antisense strand to SEQ ID NO: 2267472
ucaauuacagaauacguuc

SEQ ID NO: 2267474 - RNA, 19 nt, Artificial Sequence
  Description of Artificial Sequence: Synthetic oligonucleotide
  Sense strand starting at position 3490 of SEQ ID NO: 1884460
ucuucuccaggguaaacau

SEQ ID NO: 2267475 - RNA, 19 nt, Artificial Sequence
  Description of Artificial Sequence: Synthetic oligonucleotide
  Antisense strand to SEQ ID NO: 2267474
auguuuacccuggagaaga

SEQ ID NO: 2267476 - RNA, 19 nt, Artificial Sequence
  Description of Artificial Sequence: Synthetic oligonucleotide
  Sense strand starting at position 3499 of SEQ ID NO: 1884460
ggguaaacauucucaguuc

SEQ ID NO: 2267477 - RNA, 19 nt, Artificial Sequence
  Description of Artificial Sequence: Synthetic oligonucleotide
  Antisense strand to SEQ ID NO: 2267476
gaacugagaauguuuaccc

SEQ ID NO: 2267478 - RNA, 19 nt, Artificial Sequence
  Description of Artificial Sequence: Synthetic oligonucleotide
  Sense strand starting at position 3511 of SEQ ID NO: 1884460
ucaguuccuuccgucauuu

SEQ ID NO: 2267479 - RNA, 19 nt, Artificial Sequence
  Description of Artificial Sequence: Synthetic oligonucleotide
  Antisense strand to SEQ ID NO: 2267478
aaaugacggaaggaacuga

SEQ ID NO: 2267480 - RNA, 19 nt, Artificial Sequence
  Description of Artificial Sequence: Synthetic oligonucleotide
  Sense strand starting at position 3520 of SEQ ID NO: 1884460
uccgucauuucuccuguga

SEQ ID NO: 2267481 - RNA, 19 nt, Artificial Sequence
  Description of Artificial Sequence: Synthetic oligonucleotide
  Antisense strand to SEQ ID NO: 2267480
ucacaggagaaaugacgga

SEQ ID NO: 2267482 - RNA, 19 nt, Artificial Sequence
  Description of Artificial Sequence: Synthetic oligonucleotide
  Sense strand starting at position 3566 of SEQ ID NO: 1884460
ggucacuguccuuaggacu

SEQ ID NO: 2267483 - RNA, 19 nt, Artificial Sequence
  Description of Artificial Sequence: Synthetic oligonucleotide
  Antisense strand to SEQ ID NO: 2267482
aguccuaaggacagugacc

SEQ ID NO: 2267484 - RNA, 19 nt, Artificial Sequence
  Description of Artificial Sequence: Synthetic oligonucleotide
  Sense strand starting at position 3820 of SEQ ID NO: 1884460
auccuucccuugguauaga

SEQ ID NO: 2267485 - RNA, 19 nt, Artificial Sequence
  Description of Artificial Sequence: Synthetic oligonucleotide
  Antisense strand to SEQ ID NO: 2267484
ucuauaccaagggaaggau

SEQ ID NO: 2267486 - RNA, 19 nt, Artificial Sequence
  Description of Artificial Sequence: Synthetic oligonucleotide
  Sense strand starting at position 3825 of SEQ ID NO: 1884460
ucccuugguauagacgaau

SEQ ID NO: 2267487 - RNA, 19 nt, Artificial Sequence
  Description of Artificial Sequence: Synthetic oligonucleotide
  Antisense strand to SEQ ID NO: 2267486
auucgucuauaccaaggga

SEQ ID NO: 2267488 - RNA, 19 nt, Artificial Sequence
  Description of Artificial Sequence: Synthetic oligonucleotide
  Sense strand starting at position 3828 of SEQ ID NO: 1884460
cuugguauagacgaaucua

SEQ ID NO: 2267489 - RNA, 19 nt, Artificial Sequence
  Description of Artificial Sequence: Synthetic oligonucleotide
  Antisense strand to SEQ ID NO: 2267488
uagauucgucuauaccaag

SEQ ID NO: 2267490 - RNA, 19 nt, Artificial Sequence
  Description of Artificial Sequence: Synthetic oligonucleotide
  Sense strand starting at position 3931 of SEQ ID NO: 1884460
auuccaguucuauaacugu

SEQ ID NO: 2267491 - RNA, 19 nt, Artificial Sequence
  Description of Artificial Sequence: Synthetic oligonucleotide
  Antisense strand to SEQ ID NO: 2267490
acaguuauagaacuggaau

SEQ ID NO: 2267492 - RNA, 19 nt, Artificial Sequence
  Description of Artificial Sequence: Synthetic oligonucleotide
  Sense strand starting at position 113 of SEQ ID NO: 1884461
aucuguauugauuacugua

SEQ ID NO: 2267493 - RNA, 19 nt, Artificial Sequence
  Description of Artificial Sequence: Synthetic oligonucleotide
  Antisense strand to SEQ ID NO: 2267492
uacaguaaucaauacagau

SEQ ID NO: 2267494 - RNA, 19 nt, Artificial Sequence
  Description of Artificial Sequence: Synthetic oligonucleotide
  Sense strand starting at position 459 of SEQ ID NO: 1884461
uuagaaagcucccuccaga

SEQ ID NO: 2267495 - RNA, 19 nt, Artificial Sequence
  Description of Artificial Sequence: Synthetic oligonucleotide
  Antisense strand to SEQ ID NO: 2267494
ucuggagggagcuuucuaa

SEQ ID NO: 2267496 - RNA, 19 nt, Artificial Sequence
  Description of Artificial Sequence: Synthetic oligonucleotide
  Sense strand starting at position 519 of SEQ ID NO: 1884461
guacucaacucauuaaagu

SEQ ID NO: 2267497 - RNA, 19 nt, Artificial Sequence
  Description of Artificial Sequence: Synthetic oligonucleotide
  Antisense strand to SEQ ID NO: 2267496
acuuuaaugaguugaguac

SEQ ID NO: 2267498 - RNA, 19 nt, Artificial Sequence
  Description of Artificial Sequence: Synthetic oligonucleotide
  Sense strand starting at position 727 of SEQ ID NO: 1884461
ccauauuucucuguuaggu

SEQ ID NO: 2267499 - RNA, 19 nt, Artificial Sequence
  Description of Artificial Sequence: Synthetic oligonucleotide
  Antisense strand to SEQ ID NO: 2267498
accuaacagagaaauaugg

SEQ ID NO: 2267500 - RNA, 19 nt, Artificial Sequence
  Description of Artificial Sequence: Synthetic oligonucleotide
  Sense strand starting at position 883 of SEQ ID NO: 1884461
uuugauagucuaggaauau

SEQ ID NO: 2267501 - RNA, 19 nt, Artificial Sequence
  Description of Artificial Sequence: Synthetic oligonucleotide
  Antisense strand to SEQ ID NO: 2267500
auauuccuagacuaucaaa

SEQ ID NO: 2267502 - RNA, 19 nt, Artificial Sequence
  Description of Artificial Sequence: Synthetic oligonucleotide
  Sense strand starting at position 892 of SEQ ID NO: 1884461
cuaggaauauugccauacu

SEQ ID NO: 2267503 - RNA, 19 nt, Artificial Sequence
  Description of Artificial Sequence: Synthetic oligonucleotide
  Antisense strand to SEQ ID NO: 2267502
aguauggcaauauuccuag

SEQ ID NO: 2267504 - RNA, 19 nt, Artificial Sequence
  Description of Artificial Sequence: Synthetic oligonucleotide
  Sense strand starting at position 1004 of SEQ ID NO: 1884461
uucugugauguauacauau

SEQ ID NO: 2267505 - RNA, 19 nt, Artificial Sequence
  Description of Artificial Sequence: Synthetic oligonucleotide
  Antisense strand to SEQ ID NO: 2267504
auauguauacaucacagaa

SEQ ID NO: 2267506 - RNA, 19 nt, Artificial Sequence
  Description of Artificial Sequence: Synthetic oligonucleotide
  Sense strand starting at position 1247 of SEQ ID NO: 1884461
uuuguuuguguacagagaa

SEQ ID NO: 2267507 - RNA, 19 nt, Artificial Sequence
  Description of Artificial Sequence: Synthetic oligonucleotide
  Antisense strand to SEQ ID NO: 2267506
uucucuguacacaaacaaa

SEQ ID NO: 2267508 - RNA, 19 nt, Artificial Sequence
  Description of Artificial Sequence: Synthetic oligonucleotide
  Sense strand starting at position 1369 of SEQ ID NO: 1884461
uaugauaauugguuaaguc

SEQ ID NO: 2267509 - RNA, 19 nt, Artificial Sequence
  Description of Artificial Sequence: Synthetic oligonucleotide
  Antisense strand to SEQ ID NO: 2267508
gacuuaaccaauuaucaua

SEQ ID NO: 2267510 - RNA, 19 nt, Artificial Sequence
  Description of Artificial Sequence: Synthetic oligonucleotide
  Sense strand starting at position 1409 of SEQ ID NO: 1884461
guuugaagaaugggauguu

SEQ ID NO: 2267511 - RNA, 19 nt, Artificial Sequence
  Description of Artificial Sequence: Synthetic oligonucleotide
  Antisense strand to SEQ ID NO: 2267510
aacaucccauucuucaaac

SEQ ID NO: 2267512 - RNA, 19 nt, Artificial Sequence
  Description of Artificial Sequence: Synthetic oligonucleotide
  Sense strand starting at position 1418 of SEQ ID NO: 1884461
augggauguuaccuaaaca

SEQ ID NO: 2267513 - RNA, 19 nt, Artificial Sequence
  Description of Artificial Sequence: Synthetic oligonucleotide
  Antisense strand to SEQ ID NO: 2267512
uguuuagguaacaucccau

SEQ ID NO: 2267514 - RNA, 19 nt, Artificial Sequence
  Description of Artificial Sequence: Synthetic oligonucleotide
  Sense strand starting at position 1443 of SEQ ID NO: 1884461
agguacuauuaguugagga

SEQ ID NO: 2267515 - RNA, 19 nt, Artificial Sequence
  Description of Artificial Sequence: Synthetic oligonucleotide
  Antisense strand to SEQ ID NO: 2267514
uccucaacuaauaguaccu

SEQ ID NO: 2267516 - RNA, 19 nt, Artificial Sequence
  Description of Artificial Sequence: Synthetic oligonucleotide
  Sense strand starting at position 1444 of SEQ ID NO: 1884461
gguacuauuaguugaggag

SEQ ID NO: 2267517 - RNA, 19 nt, Artificial Sequence
  Description of Artificial Sequence: Synthetic oligonucleotide
  Antisense strand to SEQ ID NO: 2267516
cuccucaacuaauaguacc

SEQ ID NO: 2267518 - RNA, 19 nt, Artificial Sequence
  Description of Artificial Sequence: Synthetic oligonucleotide
  Sense strand starting at position 1475 of SEQ ID NO: 1884461
gcugauagauuaguagaua

SEQ ID NO: 2267519 - RNA, 19 nt, Artificial Sequence
  Description of Artificial Sequence: Synthetic oligonucleotide
  Antisense strand to SEQ ID NO: 2267518
uaucuacuaaucuaucagc

SEQ ID NO: 2267520 - RNA, 19 nt, Artificial Sequence
  Description of Artificial Sequence: Synthetic oligonucleotide
  Sense strand starting at position 1661 of SEQ ID NO: 1884461
uaaacacugcugugaauag

SEQ ID NO: 2267521 - RNA, 19 nt, Artificial Sequence
  Description of Artificial Sequence: Synthetic oligonucleotide
  Antisense strand to SEQ ID NO: 2267520
cuauucacagcaguguuua

SEQ ID NO: 2267522 - RNA, 19 nt, Artificial Sequence
  Description of Artificial Sequence: Synthetic oligonucleotide
  Sense strand starting at position 1665 of SEQ ID NO: 1884461
cacugcugugaauaguaca

SEQ ID NO: 2267523 - RNA, 19 nt, Artificial Sequence
  Description of Artificial Sequence: Synthetic oligonucleotide
  Antisense strand to SEQ ID NO: 2267522
uguacuauucacagcagug

SEQ ID NO: 2267524 - RNA, 19 nt, Artificial Sequence
  Description of Artificial Sequence: Synthetic oligonucleotide
  Sense strand starting at position 1707 of SEQ ID NO: 1884461
ugguuuguccauuauaaca

SEQ ID NO: 2267525 - RNA, 19 nt, Artificial Sequence
  Description of Artificial Sequence: Synthetic oligonucleotide
  Antisense strand to SEQ ID NO: 2267524
uguuauaauggacaaacca

SEQ ID NO: 2267526 - RNA, 19 nt, Artificial Sequence
  Description of Artificial Sequence: Synthetic oligonucleotide
  Sense strand starting at position 1852 of SEQ ID NO: 1884461
uaugguaugcaauggauua

SEQ ID NO: 2267527 - RNA, 19 nt, Artificial Sequence
  Description of Artificial Sequence: Synthetic oligonucleotide
  Antisense strand to SEQ ID NO: 2267526
uaauccauugcauaccaua

SEQ ID NO: 2267528 - RNA, 19 nt, Artificial Sequence
  Description of Artificial Sequence: Synthetic oligonucleotide
  Sense strand starting at position 1921 of SEQ ID NO: 1884461
gcgguagcugguuuccaau

SEQ ID NO: 2267529 - RNA, 19 nt, Artificial Sequence
  Description of Artificial Sequence: Synthetic oligonucleotide
  Antisense strand to SEQ ID NO: 2267528
auuggaaaccagcuaccgc

SEQ ID NO: 2267530 - RNA, 19 nt, Artificial Sequence
  Description of Artificial Sequence: Synthetic oligonucleotide
  Sense strand starting at position 2107 of SEQ ID NO: 1884461
cuuucuguucuuuaaugag

SEQ ID NO: 2267531 - RNA, 19 nt, Artificial Sequence
  Description of Artificial Sequence: Synthetic oligonucleotide
  Antisense strand to SEQ ID NO: 2267530
cucauuaaagaacagaaag

SEQ ID NO: 2267532 - RNA, 19 nt, Artificial Sequence
  Description of Artificial Sequence: Synthetic oligonucleotide
  Sense strand starting at position 2114 of SEQ ID NO: 1884461
uucuuuaaugaguagucau

SEQ ID NO: 2267533 - RNA, 19 nt, Artificial Sequence
  Description of Artificial Sequence: Synthetic oligonucleotide
  Antisense strand to SEQ ID NO: 2267532
augacuacucauuaaagaa

SEQ ID NO: 2267534 - RNA, 19 nt, Artificial Sequence
  Description of Artificial Sequence: Synthetic oligonucleotide
  Sense strand starting at position 2125 of SEQ ID NO: 1884461
guagucauaauaugagaag

SEQ ID NO: 2267535 - RNA, 19 nt, Artificial Sequence
  Description of Artificial Sequence: Synthetic oligonucleotide
  Antisense strand to SEQ ID NO: 2267534
cuucucauauuaugacuac

SEQ ID NO: 2267536 - RNA, 19 nt, Artificial Sequence
  Description of Artificial Sequence: Synthetic oligonucleotide
  Sense strand starting at position 2322 of SEQ ID NO: 1884461
gcaaguaucacguagagag

SEQ ID NO: 2267537 - RNA, 19 nt, Artificial Sequence
  Description of Artificial Sequence: Synthetic oligonucleotide
  Antisense strand to SEQ ID NO: 2267536
cucucuacgugauacuugc

SEQ ID NO: 2267538 - RNA, 19 nt, Artificial Sequence
  Description of Artificial Sequence: Synthetic oligonucleotide
  Sense strand starting at position 2411 of SEQ ID NO: 1884461
uuugauauggcuuauaaug

SEQ ID NO: 2267539 - RNA, 19 nt, Artificial Sequence
  Description of Artificial Sequence: Synthetic oligonucleotide
  Antisense strand to SEQ ID NO: 2267538
cauuauaagccauaucaaa

SEQ ID NO: 2267540 - RNA, 19 nt, Artificial Sequence
  Description of Artificial Sequence: Synthetic oligonucleotide
  Sense strand starting at position 2450 of SEQ ID NO: 1884461
ggucaauaucuguaaaggu

SEQ ID NO: 2267541 - RNA, 19 nt, Artificial Sequence
  Description of Artificial Sequence: Synthetic oligonucleotide
  Antisense strand to SEQ ID NO: 2267540
accuuuacagauauugacc

SEQ ID NO: 2267542 - RNA, 19 nt, Artificial Sequence
  Description of Artificial Sequence: Synthetic oligonucleotide
  Sense strand starting at position 2490 of SEQ ID NO: 1884461
ucauuaguccaucaguaaa

SEQ ID NO: 2267543 - RNA, 19 nt, Artificial Sequence
  Description of Artificial Sequence: Synthetic oligonucleotide
  Antisense strand to SEQ ID NO: 2267542
uuuacugauggacuaauga

SEQ ID NO: 2267544 - RNA, 19 nt, Artificial Sequence
  Description of Artificial Sequence: Synthetic oligonucleotide
  Sense strand starting at position 2502 of SEQ ID NO: 1884461
caguaaagcccucagguaa

SEQ ID NO: 2267545 - RNA, 19 nt, Artificial Sequence
  Description of Artificial Sequence: Synthetic oligonucleotide
  Antisense strand to SEQ ID NO: 2267544
uuaccugagggcuuuacug

SEQ ID NO: 2267546 - RNA, 19 nt, Artificial Sequence
  Description of Artificial Sequence: Synthetic oligonucleotide
  Sense strand starting at position 2659 of SEQ ID NO: 1884461
ucucuuagagcuggacaaa

SEQ ID NO: 2267547 - RNA, 19 nt, Artificial Sequence
  Description of Artificial Sequence: Synthetic oligonucleotide
  Antisense strand to SEQ ID NO: 2267546
uuuguccagcucuaagaga

SEQ ID NO: 2267548 - RNA, 19 nt, Artificial Sequence
  Description of Artificial Sequence: Synthetic oligonucleotide
  Sense strand starting at position 2662 of SEQ ID NO: 1884461
cuuagagcuggacaaaguu

SEQ ID NO: 2267549 - RNA, 19 nt, Artificial Sequence
  Description of Artificial Sequence: Synthetic oligonucleotide
  Antisense strand to SEQ ID NO: 2267548
aacuuuguccagcucuaag

SEQ ID NO: 2267550 - RNA, 19 nt, Artificial Sequence
  Description of Artificial Sequence: Synthetic oligonucleotide
  Sense strand starting at position 2857 of SEQ ID NO: 1884461
guuucucucugauugaaag

SEQ ID NO: 2267551 - RNA, 19 nt, Artificial Sequence
  Description of Artificial Sequence: Synthetic oligonucleotide
  Antisense strand to SEQ ID NO: 2267550
cuuucaaucagagagaaac

SEQ ID NO: 2267552 - RNA, 19 nt, Artificial Sequence
  Description of Artificial Sequence: Synthetic oligonucleotide
  Sense strand starting at position 3241 of SEQ ID NO: 1884461
uagguaugauggucugaaa

SEQ ID NO: 2267553 - RNA, 19 nt, Artificial Sequence
  Description of Artificial Sequence: Synthetic oligonucleotide
  Antisense strand to SEQ ID NO: 2267552
uuucagaccaucauaccua

SEQ ID NO: 2267554 - RNA, 19 nt, Artificial Sequence
  Description of Artificial Sequence: Synthetic oligonucleotide
  Sense strand starting at position 3270 of SEQ ID NO: 1884461
guagcugacgugggauuua

SEQ ID NO: 2267555 - RNA, 19 nt, Artificial Sequence
  Description of Artificial Sequence: Synthetic oligonucleotide
  Antisense strand to SEQ ID NO: 2267554
uaaaucccacgucagcuac

SEQ ID NO: 2267556 - RNA, 19 nt, Artificial Sequence
  Description of Artificial Sequence: Synthetic oligonucleotide
  Sense strand starting at position 3330 of SEQ ID NO: 1884461
ucuguagugcaccauagaa

SEQ ID NO: 2267557 - RNA, 19 nt, Artificial Sequence
  Description of Artificial Sequence: Synthetic oligonucleotide
  Antisense strand to SEQ ID NO: 2267556
uucuauggugcacuacaga

SEQ ID NO: 2267558 - RNA, 19 nt, Artificial Sequence
  Description of Artificial Sequence: Synthetic oligonucleotide
  Sense strand starting at position 3332 of SEQ ID NO: 1884461
uguagugcaccauagaaau

SEQ ID NO: 2267559 - RNA, 19 nt, Artificial Sequence
  Description of Artificial Sequence: Synthetic oligonucleotide
  Antisense strand to SEQ ID NO: 2267558
auuucuauggugcacuaca

SEQ ID NO: 2267560 - RNA, 19 nt, Artificial Sequence
  Description of Artificial Sequence: Synthetic oligonucleotide
  Sense strand starting at position 3438 of SEQ ID NO: 1884461
guuagauuagaaugaguaa

SEQ ID NO: 2267561 - RNA, 19 nt, Artificial Sequence
  Description of Artificial Sequence: Synthetic oligonucleotide
  Antisense strand to SEQ ID NO: 2267560
uuacucauucuaaucuaac

SEQ ID NO: 2267562 - RNA, 19 nt, Artificial Sequence
  Description of Artificial Sequence: Synthetic oligonucleotide
  Sense strand starting at position 3477 of SEQ ID NO: 1884461
gucuguuggacagacuaau

SEQ ID NO: 2267563 - RNA, 19 nt, Artificial Sequence
  Description of Artificial Sequence: Synthetic oligonucleotide
  Antisense strand to SEQ ID NO: 2267562
auuagucuguccaacagac

SEQ ID NO: 2267564 - RNA, 19 nt, Artificial Sequence
  Description of Artificial Sequence: Synthetic oligonucleotide
  Sense strand starting at position 3565 of SEQ ID NO: 1884461
uuggacucccauugauuaa

SEQ ID NO: 2267565 - RNA, 19 nt, Artificial Sequence
  Description of Artificial Sequence: Synthetic oligonucleotide
  Antisense strand to SEQ ID NO: 2267564
uuaaucaaugggaguccaa

SEQ ID NO: 2267566 - RNA, 19 nt, Artificial Sequence
  Description of Artificial Sequence: Synthetic oligonucleotide
  Sense strand starting at position 3577 of SEQ ID NO: 1884461
ugauuaagauccucugauu

SEQ ID NO: 2267567 - RNA, 19 nt, Artificial Sequence
  Description of Artificial Sequence: Synthetic oligonucleotide
  Antisense strand to SEQ ID NO: 2267566
aaucagaggaucuuaauca

SEQ ID NO: 2267568 - RNA, 19 nt, Artificial Sequence
  Description of Artificial Sequence: Synthetic oligonucleotide
  Sense strand starting at position 3612 of SEQ ID NO: 1884461
uauugauuggcauagucaa

SEQ ID NO: 2267569 - RNA, 19 nt, Artificial Sequence
  Description of Artificial Sequence: Synthetic oligonucleotide
  Antisense strand to SEQ ID NO: 2267568
uugacuaugccaaucaaua

SEQ ID NO: 2267570 - RNA, 19 nt, Artificial Sequence
  Description of Artificial Sequence: Synthetic oligonucleotide
  Sense strand starting at position 3619 of SEQ ID NO: 1884461
uggcauagucaacaaguuu

SEQ ID NO: 2267571 - RNA, 19 nt, Artificial Sequence
  Description of Artificial Sequence: Synthetic oligonucleotide
  Antisense strand to SEQ ID NO: 2267570
aaacuuguugacuaugcca

SEQ ID NO: 2267572 - RNA, 19 nt, Artificial Sequence
  Description of Artificial Sequence: Synthetic oligonucleotide
  Sense strand starting at position 127 of SEQ ID NO: 1884462
gcccguaauuuaucagauu

SEQ ID NO: 2267573 - RNA, 19 nt, Artificial Sequence
  Description of Artificial Sequence: Synthetic oligonucleotide
  Antisense strand to SEQ ID NO: 2267572
aaucugauaaauuacgggc

SEQ ID NO: 2267574 - RNA, 19 nt, Artificial Sequence
  Description of Artificial Sequence: Synthetic oligonucleotide
  Sense strand starting at position 128 of SEQ ID NO: 1884462
cccguaauuuaucagauuu

SEQ ID NO: 2267575 - RNA, 19 nt, Artificial Sequence
  Description of Artificial Sequence: Synthetic oligonucleotide
  Antisense strand to SEQ ID NO: 2267574
aaaucugauaaauuacggg

SEQ ID NO: 2267576 - RNA, 19 nt, Artificial Sequence
  Description of Artificial Sequence: Synthetic oligonucleotide
  Sense strand starting at position 202 of SEQ ID NO: 1884462
uggauaugugcuuaugaga

SEQ ID NO: 2267577 - RNA, 19 nt, Artificial Sequence
  Description of Artificial Sequence: Synthetic oligonucleotide
  Antisense strand to SEQ ID NO: 2267576
ucucauaagcacauaucca

SEQ ID NO: 2267578 - RNA, 19 nt, Artificial Sequence
  Description of Artificial Sequence: Synthetic oligonucleotide
  Sense strand starting at position 211 of SEQ ID NO: 1884462
gcuuaugagaugggucaua

SEQ ID NO: 2267579 - RNA, 19 nt, Artificial Sequence
  Description of Artificial Sequence: Synthetic oligonucleotide
  Antisense strand to SEQ ID NO: 2267578
uaugacccaucucauaagc

SEQ ID NO: 2267580 - RNA, 19 nt, Artificial Sequence
  Description of Artificial Sequence: Synthetic oligonucleotide
  Sense strand starting at position 365 of SEQ ID NO: 1884462
cuaugaaacuugcucagga

SEQ ID NO: 2267581 - RNA, 19 nt, Artificial Sequence
  Description of Artificial Sequence: Synthetic oligonucleotide
  Antisense strand to SEQ ID NO: 2267580
uccugagcaaguuucauag

SEQ ID NO: 2267582 - RNA, 19 nt, Artificial Sequence
  Description of Artificial Sequence: Synthetic oligonucleotide
  Sense strand starting at position 680 of SEQ ID NO: 1884462
gguugccaacgucauuuau

SEQ ID NO: 2267583 - RNA, 19 nt, Artificial Sequence
  Description of Artificial Sequence: Synthetic oligonucleotide
  Antisense strand to SEQ ID NO: 2267582
auaaaugacguuggcaacc

SEQ ID NO: 2267584 - RNA, 19 nt, Artificial Sequence
  Description of Artificial Sequence: Synthetic oligonucleotide
  Sense strand starting at position 778 of SEQ ID NO: 1884462
aggcuuacgaguuagaaua

SEQ ID NO: 2267585 - RNA, 19 nt, Artificial Sequence
  Description of Artificial Sequence: Synthetic oligonucleotide
  Antisense strand to SEQ ID NO: 2267584
uauucuaacucguaagccu

SEQ ID NO: 2267586 - RNA, 19 nt, Artificial Sequence
  Description of Artificial Sequence: Synthetic oligonucleotide
  Sense strand starting at position 1205 of SEQ ID NO: 1884462
cgaggauaaacuuguagag

SEQ ID NO: 2267587 - RNA, 19 nt, Artificial Sequence
  Description of Artificial Sequence: Synthetic oligonucleotide
  Antisense strand to SEQ ID NO: 2267586
cucuacaaguuuauccucg

SEQ ID NO: 2267588 - RNA, 19 nt, Artificial Sequence
  Description of Artificial Sequence: Synthetic oligonucleotide
  Sense strand starting at position 1235 of SEQ ID NO: 1884462
gaggaagcuuuauugggau

SEQ ID NO: 2267589 - RNA, 19 nt, Artificial Sequence
  Description of Artificial Sequence: Synthetic oligonucleotide
  Antisense strand to SEQ ID NO: 2267588
aucccaauaaagcuuccuc

SEQ ID NO: 2267590 - RNA, 19 nt, Artificial Sequence
  Description of Artificial Sequence: Synthetic oligonucleotide
  Sense strand starting at position 1237 of SEQ ID NO: 1884462
ggaagcuuuauugggaucu

SEQ ID NO: 2267591 - RNA, 19 nt, Artificial Sequence
  Description of Artificial Sequence: Synthetic oligonucleotide
  Antisense strand to SEQ ID NO: 2267590
agaucccaauaaagcuucc

SEQ ID NO: 2267592 - RNA, 19 nt, Artificial Sequence
  Description of Artificial Sequence: Synthetic oligonucleotide
  Sense strand starting at position 1374 of SEQ ID NO: 1884462
aagagaugugaauggcuaa

SEQ ID NO: 2267593 - RNA, 19 nt, Artificial Sequence
  Description of Artificial Sequence: Synthetic oligonucleotide
  Antisense strand to SEQ ID NO: 2267592
uuagccauucacaucucuu

SEQ ID NO: 2267594 - RNA, 19 nt, Artificial Sequence
  Description of Artificial Sequence: Synthetic oligonucleotide
  Sense strand starting at position 1375 of SEQ ID NO: 1884462
agagaugugaauggcuaaa

SEQ ID NO: 2267595 - RNA, 19 nt, Artificial Sequence
  Description of Artificial Sequence: Synthetic oligonucleotide
  Antisense strand to SEQ ID NO: 2267594
uuuagccauucacaucucu

SEQ ID NO: 2267596 - RNA, 19 nt, Artificial Sequence
  Description of Artificial Sequence: Synthetic oligonucleotide
  Sense strand starting at position 1377 of SEQ ID NO: 1884462
agaugugaauggcuaaacu

SEQ ID NO: 2267597 - RNA, 19 nt, Artificial Sequence
  Description of Artificial Sequence: Synthetic oligonucleotide
  Antisense strand to SEQ ID NO: 2267596
aguuuagccauucacaucu

SEQ ID NO: 2267598 - RNA, 19 nt, Artificial Sequence
  Description of Artificial Sequence: Synthetic oligonucleotide
  Sense strand starting at position 1483 of SEQ ID NO: 1884462
gggaauaucuggccaacuu

SEQ ID NO: 2267599 - RNA, 19 nt, Artificial Sequence
  Description of Artificial Sequence: Synthetic oligonucleotide
  Antisense strand to SEQ ID NO: 2267598
aaguuggccagauauuccc

SEQ ID NO: 2267600 - RNA, 19 nt, Artificial Sequence
  Description of Artificial Sequence: Synthetic oligonucleotide
  Sense strand starting at position 1484 of SEQ ID NO: 1884462
ggaauaucuggccaacuuu

SEQ ID NO: 2267601 - RNA, 19 nt, Artificial Sequence
  Description of Artificial Sequence: Synthetic oligonucleotide
  Antisense strand to SEQ ID NO: 2267600
aaaguuggccagauauucc

SEQ ID NO: 2267602 - RNA, 19 nt, Artificial Sequence
  Description of Artificial Sequence: Synthetic oligonucleotide
  Sense strand starting at position 1573 of SEQ ID NO: 1884462
aguugauguccauauugau

SEQ ID NO: 2267603 - RNA, 19 nt, Artificial Sequence
  Description of Artificial Sequence: Synthetic oligonucleotide
  Antisense strand to SEQ ID NO: 2267602
aucaauauggacaucaacu

SEQ ID NO: 2267604 - RNA, 19 nt, Artificial Sequence
  Description of Artificial Sequence: Synthetic oligonucleotide
  Sense strand starting at position 1742 of SEQ ID NO: 1884462
gaagaaaguuucuucucug

SEQ ID NO: 2267605 - RNA, 19 nt, Artificial Sequence
  Description of Artificial Sequence: Synthetic oligonucleotide
  Antisense strand to SEQ ID NO: 2267604
cagagaagaaacuuucuuc

SEQ ID NO: 2267606 - RNA, 19 nt, Artificial Sequence
  Description of Artificial Sequence: Synthetic oligonucleotide
  Sense strand starting at position 1749 of SEQ ID NO: 1884462
guuucuucucuguugcuau

SEQ ID NO: 2267607 - RNA, 19 nt, Artificial Sequence
  Description of Artificial Sequence: Synthetic oligonucleotide
  Antisense strand to SEQ ID NO: 2267606
auagcaacagagaagaaac

SEQ ID NO: 2267608 - RNA, 19 nt, Artificial Sequence
  Description of Artificial Sequence: Synthetic oligonucleotide
  Sense strand starting at position 1752 of SEQ ID NO: 1884462
ucuucucuguugcuauuua

SEQ ID NO: 2267609 - RNA, 19 nt, Artificial Sequence
  Description of Artificial Sequence: Synthetic oligonucleotide
  Antisense strand to SEQ ID NO: 2267608
uaaauagcaacagagaaga

SEQ ID NO: 2267610 - RNA, 19 nt, Artificial Sequence
  Description of Artificial Sequence: Synthetic oligonucleotide
  Sense strand starting at position 2027 of SEQ ID NO: 1884462
gcagaaagaccgcagguau

SEQ ID NO: 2267611 - RNA, 19 nt, Artificial Sequence
  Description of Artificial Sequence: Synthetic oligonucleotide
  Antisense strand to SEQ ID NO: 2267610
auaccugcggucuuucugc

SEQ ID NO: 2267612 - RNA, 19 nt, Artificial Sequence
  Description of Artificial Sequence: Synthetic oligonucleotide
  Sense strand starting at position 2103 of SEQ ID NO: 1884462
gcugcugcaaguguuauau

SEQ ID NO: 2267613 - RNA, 19 nt, Artificial Sequence
  Description of Artificial Sequence: Synthetic oligonucleotide
  Antisense strand to SEQ ID NO: 2267612
auauaacacuugcagcagc

SEQ ID NO: 2267614 - RNA, 19 nt, Artificial Sequence
  Description of Artificial Sequence: Synthetic oligonucleotide
  Sense strand starting at position 2169 of SEQ ID NO: 1884462
guagccucugaugaaacau

SEQ ID NO: 2267615 - RNA, 19 nt, Artificial Sequence
  Description of Artificial Sequence: Synthetic oligonucleotide
  Antisense strand to SEQ ID NO: 2267614
auguuucaucagaggcuac

SEQ ID NO: 2267616 - RNA, 19 nt, Artificial Sequence
  Description of Artificial Sequence: Synthetic oligonucleotide
  Sense strand starting at position 2178 of SEQ ID NO: 1884462
gaugaaacauuugaguaau

SEQ ID NO: 2267617 - RNA, 19 nt, Artificial Sequence
  Description of Artificial Sequence: Synthetic oligonucleotide
  Antisense strand to SEQ ID NO: 2267616
auuacucaaauguuucauc

SEQ ID NO: 2267618 - RNA, 19 nt, Artificial Sequence
  Description of Artificial Sequence: Synthetic oligonucleotide
  Sense strand starting at position 2285 of SEQ ID NO: 1884462
gcaggucugguacagacua

SEQ ID NO: 2267619 - RNA, 19 nt, Artificial Sequence
  Description of Artificial Sequence: Synthetic oligonucleotide
  Antisense strand to SEQ ID NO: 2267618
uagucuguaccagaccugc

SEQ ID NO: 2267620 - RNA, 19 nt, Artificial Sequence
  Description of Artificial Sequence: Synthetic oligonucleotide
  Sense strand starting at position 2317 of SEQ ID NO: 1884462
acuggaauaagugguuaau

SEQ ID NO: 2267621 - RNA, 19 nt, Artificial Sequence
  Description of Artificial Sequence: Synthetic oligonucleotide
  Antisense strand to SEQ ID NO: 2267620
auuaaccacuuauuccagu

SEQ ID NO: 2267622 - RNA, 19 nt, Artificial Sequence
  Description of Artificial Sequence: Synthetic oligonucleotide
  Sense strand starting at position 2319 of SEQ ID NO: 1884462
uggaauaagugguuaaucu

SEQ ID NO: 2267623 - RNA, 19 nt, Artificial Sequence
  Description of Artificial Sequence: Synthetic oligonucleotide
  Antisense strand to SEQ ID NO: 2267622
agauuaaccacuuauucca

SEQ ID NO: 2267624 - RNA, 19 nt, Artificial Sequence
  Description of Artificial Sequence: Synthetic oligonucleotide
  Sense strand starting at position 2323 of SEQ ID NO: 1884462
auaagugguuaaucucaaa

SEQ ID NO: 2267625 - RNA, 19 nt, Artificial Sequence
  Description of Artificial Sequence: Synthetic oligonucleotide
  Antisense strand to SEQ ID NO: 2267624
uuugagauuaaccacuuau

SEQ ID NO: 2267626 - RNA, 19 nt, Artificial Sequence
  Description of Artificial Sequence: Synthetic oligonucleotide
  Sense strand starting at position 2548 of SEQ ID NO: 1884462
ccuaucaugcacuagguau

SEQ ID NO: 2267627 - RNA, 19 nt, Artificial Sequence
  Description of Artificial Sequence: Synthetic oligonucleotide
  Antisense strand to SEQ ID NO: 2267626
auaccuagugcaugauagg

SEQ ID NO: 2267628 - RNA, 19 nt, Artificial Sequence
  Description of Artificial Sequence: Synthetic oligonucleotide
  Sense strand starting at position 2631 of SEQ ID NO: 1884462
guugcccuugaagaauuau

SEQ ID NO: 2267629 - RNA, 19 nt, Artificial Sequence
  Description of Artificial Sequence: Synthetic oligonucleotide
  Antisense strand to SEQ ID NO: 2267628
auaauucuucaagggcaac

SEQ ID NO: 2267630 - RNA, 19 nt, Artificial Sequence
  Description of Artificial Sequence: Synthetic oligonucleotide
  Sense strand starting at position 2647 of SEQ ID NO: 1884462
uauagucucuuacugagga

SEQ ID NO: 2267631 - RNA, 19 nt, Artificial Sequence
  Description of Artificial Sequence: Synthetic oligonucleotide
  Antisense strand to SEQ ID NO: 2267630
uccucaguaagagacuaua

SEQ ID NO: 2267632 - RNA, 19 nt, Artificial Sequence
  Description of Artificial Sequence: Synthetic oligonucleotide
  Sense strand starting at position 2767 of SEQ ID NO: 1884462
gaacuugaauugguccuua

SEQ ID NO: 2267633 - RNA, 19 nt, Artificial Sequence
  Description of Artificial Sequence: Synthetic oligonucleotide
  Antisense strand to SEQ ID NO: 2267632
uaaggaccaauucaaguuc

SEQ ID NO: 2267634 - RNA, 19 nt, Artificial Sequence
  Description of Artificial Sequence: Synthetic oligonucleotide
  Sense strand starting at position 3003 of SEQ ID NO: 1884462
ccaugugauucuccuagag

SEQ ID NO: 2267635 - RNA, 19 nt, Artificial Sequence
  Description of Artificial Sequence: Synthetic oligonucleotide
  Antisense strand to SEQ ID NO: 2267634
cucuaggagaaucacaugg

SEQ ID NO: 2267636 - RNA, 19 nt, Artificial Sequence
  Description of Artificial Sequence: Synthetic oligonucleotide
  Sense strand starting at position 3007 of SEQ ID NO: 1884462
gugauucuccuagagaugc

SEQ ID NO: 2267637 - RNA, 19 nt, Artificial Sequence
  Description of Artificial Sequence: Synthetic oligonucleotide
  Antisense strand to SEQ ID NO: 2267636
gcaucucuaggagaaucac

SEQ ID NO: 2267638 - RNA, 19 nt, Artificial Sequence
  Description of Artificial Sequence: Synthetic oligonucleotide
  Sense strand starting at position 3013 of SEQ ID NO: 1884462
cuccuagagaugcaugagu

SEQ ID NO: 2267639 - RNA, 19 nt, Artificial Sequence
  Description of Artificial Sequence: Synthetic oligonucleotide
  Antisense strand to SEQ ID NO: 2267638
acucaugcaucucuaggag

SEQ ID NO: 2267640 - RNA, 19 nt, Artificial Sequence
  Description of Artificial Sequence: Synthetic oligonucleotide
  Sense strand starting at position 3018 of SEQ ID NO: 1884462
agagaugcaugaguccuua

SEQ ID NO: 2267641 - RNA, 19 nt, Artificial Sequence
  Description of Artificial Sequence: Synthetic oligonucleotide
  Antisense strand to SEQ ID NO: 2267640
uaaggacucaugcaucucu

SEQ ID NO: 2267642 - RNA, 19 nt, Artificial Sequence
  Description of Artificial Sequence: Synthetic oligonucleotide
  Sense strand starting at position 3022 of SEQ ID NO: 1884462
augcaugaguccuuaauga

SEQ ID NO: 2267643 - RNA, 19 nt, Artificial Sequence
  Description of Artificial Sequence: Synthetic oligonucleotide
  Antisense strand to SEQ ID NO: 2267642
ucauuaaggacucaugcau

SEQ ID NO: 2267644 - RNA, 19 nt, Artificial Sequence
  Description of Artificial Sequence: Synthetic oligonucleotide
  Sense strand starting at position 3139 of SEQ ID NO: 1884462
ccgucagcucacugaauuu

SEQ ID NO: 2267645 - RNA, 19 nt, Artificial Sequence
  Description of Artificial Sequence: Synthetic oligonucleotide
  Antisense strand to SEQ ID NO: 2267644
aaauucagugagcugacgg

SEQ ID NO: 2267646 - RNA, 19 nt, Artificial Sequence
  Description of Artificial Sequence: Synthetic oligonucleotide
  Sense strand starting at position 3429 of SEQ ID NO: 1884462
ucugcaaucagggaguucu

SEQ ID NO: 2267647 - RNA, 19 nt, Artificial Sequence
  Description of Artificial Sequence: Synthetic oligonucleotide
  Antisense strand to SEQ ID NO: 2267646
agaacucccugauugcaga

SEQ ID NO: 2267648 - RNA, 19 nt, Artificial Sequence
  Description of Artificial Sequence: Synthetic oligonucleotide
  Sense strand starting at position 3905 of SEQ ID NO: 1884462
acaucaaagccaggaguaa

SEQ ID NO: 2267649 - RNA, 19 nt, Artificial Sequence
  Description of Artificial Sequence: Synthetic oligonucleotide
  Antisense strand to SEQ ID NO: 2267648
uuacuccuggcuuugaugu

SEQ ID NO: 2267650 - RNA, 19 nt, Artificial Sequence
  Description of Artificial Sequence: Synthetic oligonucleotide
  Sense strand starting at position 3947 of SEQ ID NO: 1884462
uguuucugccuccaagaaa

SEQ ID NO: 2267651 - RNA, 19 nt, Artificial Sequence
  Description of Artificial Sequence: Synthetic oligonucleotide
  Antisense strand to SEQ ID NO: 2267650
uuucuuggaggcagaaaca

SEQ ID NO: 2267652 - RNA, 19 nt, Artificial Sequence
  Description of Artificial Sequence: Synthetic oligonucleotide
  Sense strand starting at position 18 of SEQ ID NO: 1884463
cguugugagaagugaccua

SEQ ID NO: 2267653 - RNA, 19 nt, Artificial Sequence
  Description of Artificial Sequence: Synthetic oligonucleotide
  Antisense strand to SEQ ID NO: 2267652
uaggucacuucucacaacg

SEQ ID NO: 2267654 - RNA, 19 nt, Artificial Sequence
  Description of Artificial Sequence: Synthetic oligonucleotide
  Sense strand starting at position 132 of SEQ ID NO: 1884463
uacuuagccgaccgugaaa

SEQ ID NO: 2267655 - RNA, 19 nt, Artificial Sequence
  Description of Artificial Sequence: Synthetic oligonucleotide
  Antisense strand to SEQ ID NO: 2267654
uuucacggucggcuaagua

SEQ ID NO: 2267656 - RNA, 19 nt, Artificial Sequence
  Description of Artificial Sequence: Synthetic oligonucleotide
  Sense strand starting at position 263 of SEQ ID NO: 1884463
cccuguggugcuugaauga

SEQ ID NO: 2267657 - RNA, 19 nt, Artificial Sequence
  Description of Artificial Sequence: Synthetic oligonucleotide
  Antisense strand to SEQ ID NO: 2267656
ucauucaagcaccacaggg

SEQ ID NO: 2267658 - RNA, 19 nt, Artificial Sequence
  Description of Artificial Sequence: Synthetic oligonucleotide
  Sense strand starting at position 268 of SEQ ID NO: 1884463
uggugcuugaaugaucaca

SEQ ID NO: 2267659 - RNA, 19 nt, Artificial Sequence
  Description of Artificial Sequence: Synthetic oligonucleotide
  Antisense strand to SEQ ID NO: 2267658
ugugaucauucaagcacca

SEQ ID NO: 2267660 - RNA, 19 nt, Artificial Sequence
  Description of Artificial Sequence: Synthetic oligonucleotide
  Sense strand starting at position 270 of SEQ ID NO: 1884463
gugcuugaaugaucacacu

SEQ ID NO: 2267661 - RNA, 19 nt, Artificial Sequence
  Description of Artificial Sequence: Synthetic oligonucleotide
  Antisense strand to SEQ ID NO: 2267660
agugugaucauucaagcac

SEQ ID NO: 2267662 - RNA, 19 nt, Artificial Sequence
  Description of Artificial Sequence: Synthetic oligonucleotide
  Sense strand starting at position 372 of SEQ ID NO: 1884463
ucuuaaagucuuugaucgu

SEQ ID NO: 2267663 - RNA, 19 nt, Artificial Sequence
  Description of Artificial Sequence: Synthetic oligonucleotide
  Antisense strand to SEQ ID NO: 2267662
acgaucaaagacuuuaaga

SEQ ID NO: 2267664 - RNA, 19 nt, Artificial Sequence
  Description of Artificial Sequence: Synthetic oligonucleotide
  Sense strand starting at position 376 of SEQ ID NO: 1884463
aaagucuuugaucguucuu

SEQ ID NO: 2267665 - RNA, 19 nt, Artificial Sequence
  Description of Artificial Sequence: Synthetic oligonucleotide
  Antisense strand to SEQ ID NO: 2267664
aagaacgaucaaagacuuu

SEQ ID NO: 2267666 - RNA, 19 nt, Artificial Sequence
  Description of Artificial Sequence: Synthetic oligonucleotide
  Sense strand starting at position 378 of SEQ ID NO: 1884463
agucuuugaucguucuucu

SEQ ID NO: 2267667 - RNA, 19 nt, Artificial Sequence
  Description of Artificial Sequence: Synthetic oligonucleotide
  Antisense strand to SEQ ID NO: 2267666
agaagaacgaucaaagacu

SEQ ID NO: 2267668 - RNA, 19 nt, Artificial Sequence
  Description of Artificial Sequence: Synthetic oligonucleotide
  Sense strand starting at position 381 of SEQ ID NO: 1884463
cuuugaucguucuucuaag

SEQ ID NO: 2267669 - RNA, 19 nt, Artificial Sequence
  Description of Artificial Sequence: Synthetic oligonucleotide
  Antisense strand to SEQ ID NO: 2267668
cuuagaagaacgaucaaag

SEQ ID NO: 2267670 - RNA, 19 nt, Artificial Sequence
  Description of Artificial Sequence: Synthetic oligonucleotide
  Sense strand starting at position 382 of SEQ ID NO: 1884463
uuugaucguucuucuaagu

SEQ ID NO: 2267671 - RNA, 19 nt, Artificial Sequence
  Description of Artificial Sequence: Synthetic oligonucleotide
  Antisense strand to SEQ ID NO: 2267670
acuuagaagaacgaucaaa

SEQ ID NO: 2267672 - RNA, 19 nt, Artificial Sequence
  Description of Artificial Sequence: Synthetic oligonucleotide
  Sense strand starting at position 387 of SEQ ID NO: 1884463
ucguucuucuaagugcaga

SEQ ID NO: 2267673 - RNA, 19 nt, Artificial Sequence
  Description of Artificial Sequence: Synthetic oligonucleotide
  Antisense strand to SEQ ID NO: 2267672
ucugcacuuagaagaacga

SEQ ID NO: 2267674 - RNA, 19 nt, Artificial Sequence
  Description of Artificial Sequence: Synthetic oligonucleotide
  Sense strand starting at position 632 of SEQ ID NO: 1884463
gcucuuuaucucgugucuu

SEQ ID NO: 2267675 - RNA, 19 nt, Artificial Sequence
  Description of Artificial Sequence: Synthetic oligonucleotide
  Antisense strand to SEQ ID NO: 2267674
aagacacgagauaaagagc

SEQ ID NO: 2267676 - RNA, 19 nt, Artificial Sequence
  Description of Artificial Sequence: Synthetic oligonucleotide
  Sense strand starting at position 779 of SEQ ID NO: 1884463
gcagcaaauugaccugaaa

SEQ ID NO: 2267677 - RNA, 19 nt, Artificial Sequence
  Description of Artificial Sequence: Synthetic oligonucleotide
  Antisense strand to SEQ ID NO: 2267676
uuucaggucaauuugcugc

SEQ ID NO: 2267678 - RNA, 19 nt, Artificial Sequence
  Description of Artificial Sequence: Synthetic oligonucleotide
  Sense strand starting at position 1015 of SEQ ID NO: 1884463
ccuagucuccuuugcagau

SEQ ID NO: 2267679 - RNA, 19 nt, Artificial Sequence
  Description of Artificial Sequence: Synthetic oligonucleotide
  Antisense strand to SEQ ID NO: 2267678
aucugcaaaggagacuagg

SEQ ID NO: 2267680 - RNA, 19 nt, Artificial Sequence
  Description of Artificial Sequence: Synthetic oligonucleotide
  Sense strand starting at position 1016 of SEQ ID NO: 1884463
cuagucuccuuugcagauu

SEQ ID NO: 2267681 - RNA, 19 nt, Artificial Sequence
  Description of Artificial Sequence: Synthetic oligonucleotide
  Antisense strand to SEQ ID NO: 2267680
aaucugcaaaggagacuag

SEQ ID NO: 2267682 - RNA, 19 nt, Artificial Sequence
  Description of Artificial Sequence: Synthetic oligonucleotide
  Sense strand starting at position 1049 of SEQ ID NO: 1884463
guuggagucccagaguuca

SEQ ID NO: 2267683 - RNA, 19 nt, Artificial Sequence
  Description of Artificial Sequence: Synthetic oligonucleotide
  Antisense strand to SEQ ID NO: 2267682
ugaacucugggacuccaac

SEQ ID NO: 2267684 - RNA, 19 nt, Artificial Sequence
  Description of Artificial Sequence: Synthetic oligonucleotide
  Sense strand starting at position 1094 of SEQ ID NO: 1884463
augcgauucccacauaguu

SEQ ID NO: 2267685 - RNA, 19 nt, Artificial Sequence
  Description of Artificial Sequence: Synthetic oligonucleotide
  Antisense strand to SEQ ID NO: 2267684
aacuaugugggaaucgcau

SEQ ID NO: 2267686 - RNA, 19 nt, Artificial Sequence
  Description of Artificial Sequence: Synthetic oligonucleotide
  Sense strand starting at position 1350 of SEQ ID NO: 1884463
gugagcauucuugggcagu

SEQ ID NO: 2267687 - RNA, 19 nt, Artificial Sequence
  Description of Artificial Sequence: Synthetic oligonucleotide
  Antisense strand to SEQ ID NO: 2267686
acugcccaagaaugcucac

SEQ ID NO: 2267688 - RNA, 19 nt, Artificial Sequence
  Description of Artificial Sequence: Synthetic oligonucleotide
  Sense strand starting at position 1480 of SEQ ID NO: 1884463
gcagcaaauccuggcaacu

SEQ ID NO: 2267689 - RNA, 19 nt, Artificial Sequence
  Description of Artificial Sequence: Synthetic oligonucleotide
  Antisense strand to SEQ ID NO: 2267688
aguugccaggauuugcugc

SEQ ID NO: 2267690 - RNA, 19 nt, Artificial Sequence
  Description of Artificial Sequence: Synthetic oligonucleotide
  Sense strand starting at position 1904 of SEQ ID NO: 1884463
ggcaguguuuguucagagg

SEQ ID NO: 2267691 - RNA, 19 nt, Artificial Sequence
  Description of Artificial Sequence: Synthetic oligonucleotide
  Antisense strand to SEQ ID NO: 2267690
ccucugaacaaacacugcc

SEQ ID NO: 2267692 - RNA, 19 nt, Artificial Sequence
  Description of Artificial Sequence: Synthetic oligonucleotide
  Sense strand starting at position 2382 of SEQ ID NO: 1884463
cgagcucuuccaggauauu

SEQ ID NO: 2267693 - RNA, 19 nt, Artificial Sequence
  Description of Artificial Sequence: Synthetic oligonucleotide
  Antisense strand to SEQ ID NO: 2267692
aauauccuggaagagcucg

SEQ ID NO: 2267694 - RNA, 19 nt, Artificial Sequence
  Description of Artificial Sequence: Synthetic oligonucleotide
  Sense strand starting at position 2383 of SEQ ID NO: 1884463
gagcucuuccaggauauug

SEQ ID NO: 2267695 - RNA, 19 nt, Artificial Sequence
  Description of Artificial Sequence: Synthetic oligonucleotide
  Antisense strand to SEQ ID NO: 2267694
caauauccuggaagagcuc

SEQ ID NO: 2267696 - RNA, 19 nt, Artificial Sequence
  Description of Artificial Sequence: Synthetic oligonucleotide
  Sense strand starting at position 2411 of SEQ ID NO: 1884463
ggcggcaguccugcauuaa

SEQ ID NO: 2267697 - RNA, 19 nt, Artificial Sequence
  Description of Artificial Sequence: Synthetic oligonucleotide
  Antisense strand to SEQ ID NO: 2267696
uuaaugcaggacugccgcc

SEQ ID NO: 2267698 - RNA, 19 nt, Artificial Sequence
  Description of Artificial Sequence: Synthetic oligonucleotide
  Sense strand starting at position 2412 of SEQ ID NO: 1884463
gcggcaguccugcauuaaa

SEQ ID NO: 2267699 - RNA, 19 nt, Artificial Sequence
  Description of Artificial Sequence: Synthetic oligonucleotide
  Antisense strand to SEQ ID NO: 2267698
uuuaaugcaggacugccgc

SEQ ID NO: 2267700 - RNA, 19 nt, Artificial Sequence
  Description of Artificial Sequence: Synthetic oligonucleotide
  Sense strand starting at position 2415 of SEQ ID NO: 1884463
gcaguccugcauuaaagag

SEQ ID NO: 2267701 - RNA, 19 nt, Artificial Sequence
  Description of Artificial Sequence: Synthetic oligonucleotide
  Antisense strand to SEQ ID NO: 2267700
cucuuuaaugcaggacugc

SEQ ID NO: 2267702 - RNA, 19 nt, Artificial Sequence
  Description of Artificial Sequence: Synthetic oligonucleotide
  Sense strand starting at position 2425 of SEQ ID NO: 1884463
auuaaagaguguuuccaag

SEQ ID NO: 2267703 - RNA, 19 nt, Artificial Sequence
  Description of Artificial Sequence: Synthetic oligonucleotide
  Antisense strand to SEQ ID NO: 2267702
cuuggaaacacucuuuaau

SEQ ID NO: 2267704 - RNA, 19 nt, Artificial Sequence
  Description of Artificial Sequence: Synthetic oligonucleotide
  Sense strand starting at position 2427 of SEQ ID NO: 1884463
uaaagaguguuuccaaggu

SEQ ID NO: 2267705 - RNA, 19 nt, Artificial Sequence
  Description of Artificial Sequence: Synthetic oligonucleotide
  Antisense strand to SEQ ID NO: 2267704
accuuggaaacacucuuua

SEQ ID NO: 2267706 - RNA, 19 nt, Artificial Sequence
  Description of Artificial Sequence: Synthetic oligonucleotide
  Sense strand starting at position 3274 of SEQ ID NO: 1884463
ucuugcaguccucacaaga

SEQ ID NO: 2267707 - RNA, 19 nt, Artificial Sequence
  Description of Artificial Sequence: Synthetic oligonucleotide
  Antisense strand to SEQ ID NO: 2267706
ucuugugaggacugcaaga

SEQ ID NO: 2267708 - RNA, 19 nt, Artificial Sequence
  Description of Artificial Sequence: Synthetic oligonucleotide
  Sense strand starting at position 3304 of SEQ ID NO: 1884463
guagguauuguucccguuu

SEQ ID NO: 2267709 - RNA, 19 nt, Artificial Sequence
  Description of Artificial Sequence: Synthetic oligonucleotide
  Antisense strand to SEQ ID NO: 2267708
aaacgggaacaauaccuac

SEQ ID NO: 2267710 - RNA, 19 nt, Artificial Sequence
  Description of Artificial Sequence: Synthetic oligonucleotide
  Sense strand starting at position 3447 of SEQ ID NO: 1884463
gaguuuaugugcuuuacuu

SEQ ID NO: 2267711 - RNA, 19 nt, Artificial Sequence
  Description of Artificial Sequence: Synthetic oligonucleotide
  Antisense strand to SEQ ID NO: 2267710
aaguaaagcacauaaacuc

SEQ ID NO: 2267712 - RNA, 19 nt, Artificial Sequence
  Description of Artificial Sequence: Synthetic oligonucleotide
  Sense strand starting at position 3449 of SEQ ID NO: 1884463
guuuaugugcuuuacuugu

SEQ ID NO: 2267713 - RNA, 19 nt, Artificial Sequence
  Description of Artificial Sequence: Synthetic oligonucleotide
  Antisense strand to SEQ ID NO: 2267712
acaaguaaagcacauaaac

SEQ ID NO: 2267714 - RNA, 19 nt, Artificial Sequence
  Description of Artificial Sequence: Synthetic oligonucleotide
  Sense strand starting at position 3456 of SEQ ID NO: 1884463
ugcuuuacuuguuucgaca

SEQ ID NO: 2267715 - RNA, 19 nt, Artificial Sequence
  Description of Artificial Sequence: Synthetic oligonucleotide
  Antisense strand to SEQ ID NO: 2267714
ugucgaaacaaguaaagca

SEQ ID NO: 2267716 - RNA, 19 nt, Artificial Sequence
  Description of Artificial Sequence: Synthetic oligonucleotide
  Sense strand starting at position 3548 of SEQ ID NO: 1884463
gagguuugacuucggguuu

SEQ ID NO: 2267717 - RNA, 19 nt, Artificial Sequence
  Description of Artificial Sequence: Synthetic oligonucleotide
  Antisense strand to SEQ ID NO: 2267716
aaacccgaagucaaaccuc

SEQ ID NO: 2267718 - RNA, 19 nt, Artificial Sequence
  Description of Artificial Sequence: Synthetic oligonucleotide
  Sense strand starting at position 3554 of SEQ ID NO: 1884463
ugacuucggguuuggcaua

SEQ ID NO: 2267719 - RNA, 19 nt, Artificial Sequence
  Description of Artificial Sequence: Synthetic oligonucleotide
  Antisense strand to SEQ ID NO: 2267718
uaugccaaacccgaaguca

SEQ ID NO: 2267720 - RNA, 19 nt, Artificial Sequence
  Description of Artificial Sequence: Synthetic oligonucleotide
  Sense strand starting at position 3559 of SEQ ID NO: 1884463
ucggguuuggcauaguuga

SEQ ID NO: 2267721 - RNA, 19 nt, Artificial Sequence
  Description of Artificial Sequence: Synthetic oligonucleotide
  Antisense strand to SEQ ID NO: 2267720
ucaacuaugccaaacccga

SEQ ID NO: 2267722 - RNA, 19 nt, Artificial Sequence
  Description of Artificial Sequence: Synthetic oligonucleotide
  Sense strand starting at position 3560 of SEQ ID NO: 1884463
cggguuuggcauaguugau

SEQ ID NO: 2267723 - RNA, 19 nt, Artificial Sequence
  Description of Artificial Sequence: Synthetic oligonucleotide
  Antisense strand to SEQ ID NO: 2267722
aucaacuaugccaaacccg

SEQ ID NO: 2267724 - RNA, 19 nt, Artificial Sequence
  Description of Artificial Sequence: Synthetic oligonucleotide
  Sense strand starting at position 3602 of SEQ ID NO: 1884463
ucuuucuuauuggaagaau

SEQ ID NO: 2267725 - RNA, 19 nt, Artificial Sequence
  Description of Artificial Sequence: Synthetic oligonucleotide
  Antisense strand to SEQ ID NO: 2267724
auucuuccaauaagaaaga

SEQ ID NO: 2267726 - RNA, 19 nt, Artificial Sequence
  Description of Artificial Sequence: Synthetic oligonucleotide
  Sense strand starting at position 3611 of SEQ ID NO: 1884463
uuggaagaauguuaaguca

SEQ ID NO: 2267727 - RNA, 19 nt, Artificial Sequence
  Description of Artificial Sequence: Synthetic oligonucleotide
  Antisense strand to SEQ ID NO: 2267726
ugacuuaacauucuuccaa

SEQ ID NO: 2267728 - RNA, 19 nt, Artificial Sequence
  Description of Artificial Sequence: Synthetic oligonucleotide
  Sense strand starting at position 3657 of SEQ ID NO: 1884463
gcaucauggccaugacaag

SEQ ID NO: 2267729 - RNA, 19 nt, Artificial Sequence
  Description of Artificial Sequence: Synthetic oligonucleotide
  Antisense strand to SEQ ID NO: 2267728
cuugucauggccaugaugc

SEQ ID NO: 2267730 - RNA, 19 nt, Artificial Sequence
  Description of Artificial Sequence: Synthetic oligonucleotide
  Sense strand starting at position 3773 of SEQ ID NO: 1884463
gaguucuccuagcugauac

SEQ ID NO: 2267731 - RNA, 19 nt, Artificial Sequence
  Description of Artificial Sequence: Synthetic oligonucleotide
  Antisense strand to SEQ ID NO: 2267730
guaucagcuaggagaacuc

SEQ ID NO: 2267732 - RNA, 19 nt, Artificial Sequence
  Description of Artificial Sequence: Synthetic oligonucleotide
  Sense strand starting at position 131 of SEQ ID NO: 1884464
ccuccauacugcuguucua

SEQ ID NO: 2267733 - RNA, 19 nt, Artificial Sequence
  Description of Artificial Sequence: Synthetic oligonucleotide
  Antisense strand to SEQ ID NO: 2267732
uagaacagcaguauggagg

SEQ ID NO: 2267734 - RNA, 19 nt, Artificial Sequence
  Description of Artificial Sequence: Synthetic oligonucleotide
  Sense strand starting at position 341 of SEQ ID NO: 1884464
acaagauccugugcagauc

SEQ ID NO: 2267735 - RNA, 19 nt, Artificial Sequence
  Description of Artificial Sequence: Synthetic oligonucleotide
  Antisense strand to SEQ ID NO: 2267734
gaucugcacaggaucuugu

SEQ ID NO: 2267736 - RNA, 19 nt, Artificial Sequence
  Description of Artificial Sequence: Synthetic oligonucleotide
  Sense strand starting at position 577 of SEQ ID NO: 1884464
gggugcacugcuugucuga

SEQ ID NO: 2267737 - RNA, 19 nt, Artificial Sequence
  Description of Artificial Sequence: Synthetic oligonucleotide
  Antisense strand to SEQ ID NO: 2267736
ucagacaagcagugcaccc

SEQ ID NO: 2267738 - RNA, 19 nt, Artificial Sequence
  Description of Artificial Sequence: Synthetic oligonucleotide
  Sense strand starting at position 790 of SEQ ID NO: 1884464
aggugcugccacugcuaau

SEQ ID NO: 2267739 - RNA, 19 nt, Artificial Sequence
  Description of Artificial Sequence: Synthetic oligonucleotide
  Antisense strand to SEQ ID NO: 2267738
auuagcaguggcagcaccu

SEQ ID NO: 2267740 - RNA, 19 nt, Artificial Sequence
  Description of Artificial Sequence: Synthetic oligonucleotide
  Sense strand starting at position 791 of SEQ ID NO: 1884464
ggugcugccacugcuaauu

SEQ ID NO: 2267741 - RNA, 19 nt, Artificial Sequence
  Description of Artificial Sequence: Synthetic oligonucleotide
  Antisense strand to SEQ ID NO: 2267740
aauuagcaguggcagcacc

SEQ ID NO: 2267742 - RNA, 19 nt, Artificial Sequence
  Description of Artificial Sequence: Synthetic oligonucleotide
  Sense strand starting at position 961 of SEQ ID NO: 1884464
gggugugacccacagaauu

SEQ ID NO: 2267743 - RNA, 19 nt, Artificial Sequence
  Description of Artificial Sequence: Synthetic oligonucleotide
  Antisense strand to SEQ ID NO: 2267742
aauucugugggucacaccc

SEQ ID NO: 2267744 - RNA, 19 nt, Artificial Sequence
  Description of Artificial Sequence: Synthetic oligonucleotide
  Sense strand starting at position 1251 of SEQ ID NO: 1884464
gcaggcagaucgcuuuaga

SEQ ID NO: 2267745 - RNA, 19 nt, Artificial Sequence
  Description of Artificial Sequence: Synthetic oligonucleotide
  Antisense strand to SEQ ID NO: 2267744
ucuaaagcgaucugccugc

SEQ ID NO: 2267746 - RNA, 19 nt, Artificial Sequence
  Description of Artificial Sequence: Synthetic oligonucleotide
  Sense strand starting at position 1259 of SEQ ID NO: 1884464
aucgcuuuagaucaggagu

SEQ ID NO: 2267747 - RNA, 19 nt, Artificial Sequence
  Description of Artificial Sequence: Synthetic oligonucleotide
  Antisense strand to SEQ ID NO: 2267746
acuccugaucuaaagcgau

SEQ ID NO: 2267748 - RNA, 19 nt, Artificial Sequence
  Description of Artificial Sequence: Synthetic oligonucleotide
  Sense strand starting at position 1261 of SEQ ID NO: 1884464
cgcuuuagaucaggaguuc

SEQ ID NO: 2267749 - RNA, 19 nt, Artificial Sequence
  Description of Artificial Sequence: Synthetic oligonucleotide
  Antisense strand to SEQ ID NO: 2267748
gaacuccugaucuaaagcg

SEQ ID NO: 2267750 - RNA, 19 nt, Artificial Sequence
  Description of Artificial Sequence: Synthetic oligonucleotide
  Sense strand starting at position 2491 of SEQ ID NO: 1884464
gacguuucuagcggaggga

SEQ ID NO: 2267751 - RNA, 19 nt, Artificial Sequence
  Description of Artificial Sequence: Synthetic oligonucleotide
  Antisense strand to SEQ ID NO: 2267750
ucccuccgcuagaaacguc

SEQ ID NO: 2267752 - RNA, 19 nt, Artificial Sequence
  Description of Artificial Sequence: Synthetic oligonucleotide
  Sense strand starting at position 2575 of SEQ ID NO: 1884464
gggccauuccgggaguuga

SEQ ID NO: 2267753 - RNA, 19 nt, Artificial Sequence
  Description of Artificial Sequence: Synthetic oligonucleotide
  Antisense strand to SEQ ID NO: 2267752
ucaacucccggaauggccc

SEQ ID NO: 2267754 - RNA, 19 nt, Artificial Sequence
  Description of Artificial Sequence: Synthetic oligonucleotide
  Sense strand starting at position 3670 of SEQ ID NO: 1884464
ucacgcuacuuuggaauaa

SEQ ID NO: 2267755 - RNA, 19 nt, Artificial Sequence
  Description of Artificial Sequence: Synthetic oligonucleotide
  Antisense strand to SEQ ID NO: 2267754
uuauuccaaaguagcguga

SEQ ID NO: 2267756 - RNA, 19 nt, Artificial Sequence
  Description of Artificial Sequence: Synthetic oligonucleotide
  Sense strand starting at position 3674 of SEQ ID NO: 1884464
gcuacuuuggaauaaacuu

SEQ ID NO: 2267757 - RNA, 19 nt, Artificial Sequence
  Description of Artificial Sequence: Synthetic oligonucleotide
  Antisense strand to SEQ ID NO: 2267756
aaguuuauuccaaaguagc

SEQ ID NO: 2267758 - RNA, 19 nt, Artificial Sequence
  Description of Artificial Sequence: Synthetic oligonucleotide
  Sense strand starting at position 3774 of SEQ ID NO: 1884464
gggugugguguguugaguu

SEQ ID NO: 2267759 - RNA, 19 nt, Artificial Sequence
  Description of Artificial Sequence: Synthetic oligonucleotide
  Antisense strand to SEQ ID NO: 2267758
aacucaacacaccacaccc

SEQ ID NO: 2267760 - RNA, 19 nt, Artificial Sequence
  Description of Artificial Sequence: Synthetic oligonucleotide
  Sense strand starting at position 3775 of SEQ ID NO: 1884464
ggugugguguguugaguuu

SEQ ID NO: 2267761 - RNA, 19 nt, Artificial Sequence
  Description of Artificial Sequence: Synthetic oligonucleotide
  Antisense strand to SEQ ID NO: 2267760
aaacucaacacaccacacc

SEQ ID NO: 2267762 - RNA, 19 nt, Artificial Sequence
  Description of Artificial Sequence: Synthetic oligonucleotide
  Sense strand starting at position 3956 of SEQ ID NO: 1884464
gccugagucccuggugguu

SEQ ID NO: 2267763 - RNA, 19 nt, Artificial Sequence
  Description of Artificial Sequence: Synthetic oligonucleotide
  Antisense strand to SEQ ID NO: 2267762
aaccaccagggacucaggc

SEQ ID NO: 2267764 - RNA, 19 nt, Artificial Sequence
  Description of Artificial Sequence: Synthetic oligonucleotide
  Sense strand starting at position 117 of SEQ ID NO: 1884465
uagugaucacucugugcug

SEQ ID NO: 2267765 - RNA, 19 nt, Artificial Sequence
  Description of Artificial Sequence: Synthetic oligonucleotide
  Antisense strand to SEQ ID NO: 2267764
cagcacagagugaucacua

SEQ ID NO: 2267766 - RNA, 19 nt, Artificial Sequence
  Description of Artificial Sequence: Synthetic oligonucleotide
  Sense strand starting at position 154 of SEQ ID NO: 1884465
auuagaauaauggguguga

SEQ ID NO: 2267767 - RNA, 19 nt, Artificial Sequence
  Description of Artificial Sequence: Synthetic oligonucleotide
  Antisense strand to SEQ ID NO: 2267766
ucacacccauuauucuaau

SEQ ID NO: 2267768 - RNA, 19 nt, Artificial Sequence
  Description of Artificial Sequence: Synthetic oligonucleotide
  Sense strand starting at position 155 of SEQ ID NO: 1884465
uuagaauaaugggugugaa

SEQ ID NO: 2267769 - RNA, 19 nt, Artificial Sequence
  Description of Artificial Sequence: Synthetic oligonucleotide
  Antisense strand to SEQ ID NO: 2267768
uucacacccauuauucuaa

SEQ ID NO: 2267770 - RNA, 19 nt, Artificial Sequence
  Description of Artificial Sequence: Synthetic oligonucleotide
  Sense strand starting at position 158 of SEQ ID NO: 1884465
gaauaaugggugugaaaug

SEQ ID NO: 2267771 - RNA, 19 nt, Artificial Sequence
  Description of Artificial Sequence: Synthetic oligonucleotide
  Antisense strand to SEQ ID NO: 2267770
cauuucacacccauuauuc

SEQ ID NO: 2267772 - RNA, 19 nt, Artificial Sequence
  Description of Artificial Sequence: Synthetic oligonucleotide
  Sense strand starting at position 163 of SEQ ID NO: 1884465
augggugugaaaugucuga

SEQ ID NO: 2267773 - RNA, 19 nt, Artificial Sequence
  Description of Artificial Sequence: Synthetic oligonucleotide
  Antisense strand to SEQ ID NO: 2267772
ucagacauuucacacccau

SEQ ID NO: 2267774 - RNA, 19 nt, Artificial Sequence
  Description of Artificial Sequence: Synthetic oligonucleotide
  Sense strand starting at position 167 of SEQ ID NO: 1884465
gugugaaaugucugacaca

SEQ ID NO: 2267775 - RNA, 19 nt, Artificial Sequence
  Description of Artificial Sequence: Synthetic oligonucleotide
  Antisense strand to SEQ ID NO: 2267774
ugugucagacauuucacac

SEQ ID NO: 2267776 - RNA, 19 nt, Artificial Sequence
  Description of Artificial Sequence: Synthetic oligonucleotide
  Sense strand starting at position 170 of SEQ ID NO: 1884465
ugaaaugucugacacagau

SEQ ID NO: 2267777 - RNA, 19 nt, Artificial Sequence
  Description of Artificial Sequence: Synthetic oligonucleotide
  Antisense strand to SEQ ID NO: 2267776
aucugugucagacauuuca

SEQ ID NO: 2267778 - RNA, 19 nt, Artificial Sequence
  Description of Artificial Sequence: Synthetic oligonucleotide
  Sense strand starting at position 273 of SEQ ID NO: 1884465
agacacauccacugaguca

SEQ ID NO: 2267779 - RNA, 19 nt, Artificial Sequence
  Description of Artificial Sequence: Synthetic oligonucleotide
  Antisense strand to SEQ ID NO: 2267778
ugacucaguggaugugucu

SEQ ID NO: 2267780 - RNA, 19 nt, Artificial Sequence
  Description of Artificial Sequence: Synthetic oligonucleotide
  Sense strand starting at position 579 of SEQ ID NO: 1884465
uguguuuccugucucccua

SEQ ID NO: 2267781 - RNA, 19 nt, Artificial Sequence
  Description of Artificial Sequence: Synthetic oligonucleotide
  Antisense strand to SEQ ID NO: 2267780
uagggagacaggaaacaca

SEQ ID NO: 2267782 - RNA, 19 nt, Artificial Sequence
  Description of Artificial Sequence: Synthetic oligonucleotide
  Sense strand starting at position 613 of SEQ ID NO: 1884465
ggaugaagggcccagcuau

SEQ ID NO: 2267783 - RNA, 19 nt, Artificial Sequence
  Description of Artificial Sequence: Synthetic oligonucleotide
  Antisense strand to SEQ ID NO: 2267782
auagcugggcccuucaucc

SEQ ID NO: 2267784 - RNA, 19 nt, Artificial Sequence
  Description of Artificial Sequence: Synthetic oligonucleotide
  Sense strand starting at position 650 of SEQ ID NO: 1884465
gggaguaacuguuucuuaa

SEQ ID NO: 2267785 - RNA, 19 nt, Artificial Sequence
  Description of Artificial Sequence: Synthetic oligonucleotide
  Antisense strand to SEQ ID NO: 2267784
uuaagaaacaguuacuccc

SEQ ID NO: 2267786 - RNA, 19 nt, Artificial Sequence
  Description of Artificial Sequence: Synthetic oligonucleotide
  Sense strand starting at position 652 of SEQ ID NO: 1884465
gaguaacuguuucuuaaga

SEQ ID NO: 2267787 - RNA, 19 nt, Artificial Sequence
  Description of Artificial Sequence: Synthetic oligonucleotide
  Antisense strand to SEQ ID NO: 2267786
ucuuaagaaacaguuacuc

SEQ ID NO: 2267788 - RNA, 19 nt, Artificial Sequence
  Description of Artificial Sequence: Synthetic oligonucleotide
  Sense strand starting at position 653 of SEQ ID NO: 1884465
aguaacuguuucuuaagaa

SEQ ID NO: 2267789 - RNA, 19 nt, Artificial Sequence
  Description of Artificial Sequence: Synthetic oligonucleotide
  Antisense strand to SEQ ID NO: 2267788
uucuuaagaaacaguuacu

SEQ ID NO: 2267790 - RNA, 19 nt, Artificial Sequence
  Description of Artificial Sequence: Synthetic oligonucleotide
  Sense strand starting at position 2003 of SEQ ID NO: 1884465
gcucuauugcgugucuaug

SEQ ID NO: 2267791 - RNA, 19 nt, Artificial Sequence
  Description of Artificial Sequence: Synthetic oligonucleotide
  Antisense strand to SEQ ID NO: 2267790
cauagacacgcaauagagc

SEQ ID NO: 2267792 - RNA, 19 nt, Artificial Sequence
  Description of Artificial Sequence: Synthetic oligonucleotide
  Sense strand starting at position 2004 of SEQ ID NO: 1884465
cucuauugcgugucuaugu

SEQ ID NO: 2267793 - RNA, 19 nt, Artificial Sequence
  Description of Artificial Sequence: Synthetic oligonucleotide
  Antisense strand to SEQ ID NO: 2267792
acauagacacgcaauagag

SEQ ID NO: 2267794 - RNA, 19 nt, Artificial Sequence
  Description of Artificial Sequence: Synthetic oligonucleotide
  Sense strand starting at position 2034 of SEQ ID NO: 1884465
ggcgagagguguuuauuag

SEQ ID NO: 2267795 - RNA, 19 nt, Artificial Sequence
  Description of Artificial Sequence: Synthetic oligonucleotide
  Antisense strand to SEQ ID NO: 2267794
cuaauaaacaccucucgcc

SEQ ID NO: 2267796 - RNA, 19 nt, Artificial Sequence
  Description of Artificial Sequence: Synthetic oligonucleotide
  Sense strand starting at position 2035 of SEQ ID NO: 1884465
gcgagagguguuuauuaga

SEQ ID NO: 2267797 - RNA, 19 nt, Artificial Sequence
  Description of Artificial Sequence: Synthetic oligonucleotide
  Antisense strand to SEQ ID NO: 2267796
ucuaauaaacaccucucgc

SEQ ID NO: 2267798 - RNA, 19 nt, Artificial Sequence
  Description of Artificial Sequence: Synthetic oligonucleotide
  Sense strand starting at position 2328 of SEQ ID NO: 1884465
ggagguuugagcgggaucu

SEQ ID NO: 2267799 - RNA, 19 nt, Artificial Sequence
  Description of Artificial Sequence: Synthetic oligonucleotide
  Antisense strand to SEQ ID NO: 2267798
agaucccgcucaaaccucc

SEQ ID NO: 2267800 - RNA, 19 nt, Artificial Sequence
  Description of Artificial Sequence: Synthetic oligonucleotide
  Sense strand starting at position 2329 of SEQ ID NO: 1884465
gagguuugagcgggaucua

SEQ ID NO: 2267801 - RNA, 19 nt, Artificial Sequence
  Description of Artificial Sequence: Synthetic oligonucleotide
  Antisense strand to SEQ ID NO: 2267800
uagaucccgcucaaaccuc

SEQ ID NO: 2267802 - RNA, 19 nt, Artificial Sequence
  Description of Artificial Sequence: Synthetic oligonucleotide
  Sense strand starting at position 2405 of SEQ ID NO: 1884465
guaucuuaguuuccucaac

SEQ ID NO: 2267803 - RNA, 19 nt, Artificial Sequence
  Description of Artificial Sequence: Synthetic oligonucleotide
  Antisense strand to SEQ ID NO: 2267802
guugaggaaacuaagauac

SEQ ID NO: 2267804 - RNA, 19 nt, Artificial Sequence
  Description of Artificial Sequence: Synthetic oligonucleotide
  Sense strand starting at position 2535 of SEQ ID NO: 1884465
aguacuuucuucuuaguau

SEQ ID NO: 2267805 - RNA, 19 nt, Artificial Sequence
  Description of Artificial Sequence: Synthetic oligonucleotide
  Antisense strand to SEQ ID NO: 2267804
auacuaagaagaaaguacu

SEQ ID NO: 2267806 - RNA, 19 nt, Artificial Sequence
  Description of Artificial Sequence: Synthetic oligonucleotide
  Sense strand starting at position 2588 of SEQ ID NO: 1884465
gcagaaggauuggaaucaa

SEQ ID NO: 2267807 - RNA, 19 nt, Artificial Sequence
  Description of Artificial Sequence: Synthetic oligonucleotide
  Antisense strand to SEQ ID NO: 2267806
uugauuccaauccuucugc

SEQ ID NO: 2267808 - RNA, 19 nt, Artificial Sequence
  Description of Artificial Sequence: Synthetic oligonucleotide
  Sense strand starting at position 2650 of SEQ ID NO: 1884465
gcaccagauuccuucugaa

SEQ ID NO: 2267809 - RNA, 19 nt, Artificial Sequence
  Description of Artificial Sequence: Synthetic oligonucleotide
  Antisense strand to SEQ ID NO: 2267808
uucagaaggaaucuggugc

SEQ ID NO: 2267810 - RNA, 19 nt, Artificial Sequence
  Description of Artificial Sequence: Synthetic oligonucleotide
  Sense strand starting at position 2857 of SEQ ID NO: 1884465
aggacuuguggagggaagu

SEQ ID NO: 2267811 - RNA, 19 nt, Artificial Sequence
  Description of Artificial Sequence: Synthetic oligonucleotide
  Antisense strand to SEQ ID NO: 2267810
acuucccuccacaaguccu

SEQ ID NO: 2267812 - RNA, 19 nt, Artificial Sequence
  Description of Artificial Sequence: Synthetic oligonucleotide
  Sense strand starting at position 2858 of SEQ ID NO: 1884465
ggacuuguggagggaaguu

SEQ ID NO: 2267813 - RNA, 19 nt, Artificial Sequence
  Description of Artificial Sequence: Synthetic oligonucleotide
  Antisense strand to SEQ ID NO: 2267812
aacuucccuccacaagucc

SEQ ID NO: 2267814 - RNA, 19 nt, Artificial Sequence
  Description of Artificial Sequence: Synthetic oligonucleotide
  Sense strand starting at position 2867 of SEQ ID NO: 1884465
gagggaaguugcuuccacu

SEQ ID NO: 2267815 - RNA, 19 nt, Artificial Sequence
  Description of Artificial Sequence: Synthetic oligonucleotide
  Antisense strand to SEQ ID NO: 2267814
aguggaagcaacuucccuc

SEQ ID NO: 2267816 - RNA, 19 nt, Artificial Sequence
  Description of Artificial Sequence: Synthetic oligonucleotide
  Sense strand starting at position 2940 of SEQ ID NO: 1884465
gccgucaucugacccauaa

SEQ ID NO: 2267817 - RNA, 19 nt, Artificial Sequence
  Description of Artificial Sequence: Synthetic oligonucleotide
  Antisense strand to SEQ ID NO: 2267816
uuaugggucagaugacggc

SEQ ID NO: 2267818 - RNA, 19 nt, Artificial Sequence
  Description of Artificial Sequence: Synthetic oligonucleotide
  Sense strand starting at position 3013 of SEQ ID NO: 1884465
acggcagugaccuaauaau

SEQ ID NO: 2267819 - RNA, 19 nt, Artificial Sequence
  Description of Artificial Sequence: Synthetic oligonucleotide
  Antisense strand to SEQ ID NO: 2267818
auuauuaggucacugccgu

SEQ ID NO: 2267820 - RNA, 19 nt, Artificial Sequence
  Description of Artificial Sequence: Synthetic oligonucleotide
  Sense strand starting at position 3024 of SEQ ID NO: 1884465
cuaauaaugcaccguuauc

SEQ ID NO: 2267821 - RNA, 19 nt, Artificial Sequence
  Description of Artificial Sequence: Synthetic oligonucleotide
  Antisense strand to SEQ ID NO: 2267820
gauaacggugcauuauuag

SEQ ID NO: 2267822 - RNA, 19 nt, Artificial Sequence
  Description of Artificial Sequence: Synthetic oligonucleotide
  Sense strand starting at position 3285 of SEQ ID NO: 1884465
cugguauuacggugauuaa

SEQ ID NO: 2267823 - RNA, 19 nt, Artificial Sequence
  Description of Artificial Sequence: Synthetic oligonucleotide
  Antisense strand to SEQ ID NO: 2267822
uuaaucaccguaauaccag

SEQ ID NO: 2267824 - RNA, 19 nt, Artificial Sequence
  Description of Artificial Sequence: Synthetic oligonucleotide
  Sense strand starting at position 3286 of SEQ ID NO: 1884465
ugguauuacggugauuaag

SEQ ID NO: 2267825 - RNA, 19 nt, Artificial Sequence
  Description of Artificial Sequence: Synthetic oligonucleotide
  Antisense strand to SEQ ID NO: 2267824
cuuaaucaccguaauacca

SEQ ID NO: 2267826 - RNA, 19 nt, Artificial Sequence
  Description of Artificial Sequence: Synthetic oligonucleotide
  Sense strand starting at position 3288 of SEQ ID NO: 1884465
guauuacggugauuaagac

SEQ ID NO: 2267827 - RNA, 19 nt, Artificial Sequence
  Description of Artificial Sequence: Synthetic oligonucleotide
  Antisense strand to SEQ ID NO: 2267826
gucuuaaucaccguaauac

SEQ ID NO: 2267828 - RNA, 19 nt, Artificial Sequence
  Description of Artificial Sequence: Synthetic oligonucleotide
  Sense strand starting at position 3426 of SEQ ID NO: 1884465
gcggcuaacugcucuggaa

SEQ ID NO: 2267829 - RNA, 19 nt, Artificial Sequence
  Description of Artificial Sequence: Synthetic oligonucleotide
  Antisense strand to SEQ ID NO: 2267828
uuccagagcaguuagccgc

SEQ ID NO: 2267830 - RNA, 19 nt, Artificial Sequence
  Description of Artificial Sequence: Synthetic oligonucleotide
  Sense strand starting at position 3636 of SEQ ID NO: 1884465
gggcauagcuuggccagau

SEQ ID NO: 2267831 - RNA, 19 nt, Artificial Sequence
  Description of Artificial Sequence: Synthetic oligonucleotide
  Antisense strand to SEQ ID NO: 2267830
aucuggccaagcuaugccc

SEQ ID NO: 2267832 - RNA, 19 nt, Artificial Sequence
  Description of Artificial Sequence: Synthetic oligonucleotide
  Sense strand starting at position 3723 of SEQ ID NO: 1884465
gcagaugauucugagaauc

SEQ ID NO: 2267833 - RNA, 19 nt, Artificial Sequence
  Description of Artificial Sequence: Synthetic oligonucleotide
  Antisense strand to SEQ ID NO: 2267832
gauucucagaaucaucugc

SEQ ID NO: 2267834 - RNA, 19 nt, Artificial Sequence
  Description of Artificial Sequence: Synthetic oligonucleotide
  Sense strand starting at position 3725 of SEQ ID NO: 1884465
agaugauucugagaaucuu

SEQ ID NO: 2267835 - RNA, 19 nt, Artificial Sequence
  Description of Artificial Sequence: Synthetic oligonucleotide
  Antisense strand to SEQ ID NO: 2267834
aagauucucagaaucaucu

SEQ ID NO: 2267836 - RNA, 19 nt, Artificial Sequence
  Description of Artificial Sequence: Synthetic oligonucleotide
  Sense strand starting at position 3911 of SEQ ID NO: 1884465
ccagucaguaauggguauu

SEQ ID NO: 2267837 - RNA, 19 nt, Artificial Sequence
  Description of Artificial Sequence: Synthetic oligonucleotide
  Antisense strand to SEQ ID NO: 2267836
aauacccauuacugacugg

SEQ ID NO: 2267838 - RNA, 19 nt, Artificial Sequence
  Description of Artificial Sequence: Synthetic oligonucleotide
  Sense strand starting at position 3944 of SEQ ID NO: 1884465
cgaagucccgcgcuuaauu

SEQ ID NO: 2267839 - RNA, 19 nt, Artificial Sequence
  Description of Artificial Sequence: Synthetic oligonucleotide
  Antisense strand to SEQ ID NO: 2267838
aauuaagcgcgggacuucg

SEQ ID NO: 2267840 - RNA, 19 nt, Artificial Sequence
  Description of Artificial Sequence: Synthetic oligonucleotide
  Sense strand starting at position 3967 of SEQ ID NO: 1884465
uccagugagauugggauua

SEQ ID NO: 2267841 - RNA, 19 nt, Artificial Sequence
  Description of Artificial Sequence: Synthetic oligonucleotide
  Antisense strand to SEQ ID NO: 2267840
uaaucccaaucucacugga

SEQ ID NO: 2267842 - RNA, 19 nt, Artificial Sequence
  Description of Artificial Sequence: Synthetic oligonucleotide
  Sense strand starting at position 3969 of SEQ ID NO: 1884465
cagugagauugggauuaau

SEQ ID NO: 2267843 - RNA, 19 nt, Artificial Sequence
  Description of Artificial Sequence: Synthetic oligonucleotide
  Antisense strand to SEQ ID NO: 2267842
auuaaucccaaucucacug

SEQ ID NO: 2267844 - RNA, 19 nt, Artificial Sequence
  Description of Artificial Sequence: Synthetic oligonucleotide
  Sense strand starting at position 67 of SEQ ID NO: 1884466
gagaaaucuuaacuggucu

SEQ ID NO: 2267845 - RNA, 19 nt, Artificial Sequence
  Description of Artificial Sequence: Synthetic oligonucleotide
  Antisense strand to SEQ ID NO: 2267844
agaccaguuaagauuucuc

SEQ ID NO: 2267846 - RNA, 19 nt, Artificial Sequence
  Description of Artificial Sequence: Synthetic oligonucleotide
  Sense strand starting at position 357 of SEQ ID NO: 1884466
ggacaugaugcgugaggaa

SEQ ID NO: 2267847 - RNA, 19 nt, Artificial Sequence
  Description of Artificial Sequence: Synthetic oligonucleotide
  Antisense strand to SEQ ID NO: 2267846
uuccucacgcaucaugucc

SEQ ID NO: 2267848 - RNA, 19 nt, Artificial Sequence
  Description of Artificial Sequence: Synthetic oligonucleotide
  Sense strand starting at position 409 of SEQ ID NO: 1884466
gguggaagaauauggucau

SEQ ID NO: 2267849 - RNA, 19 nt, Artificial Sequence
  Description of Artificial Sequence: Synthetic oligonucleotide
  Antisense strand to SEQ ID NO: 2267848
augaccauauucuuccacc

SEQ ID NO: 2267850 - RNA, 19 nt, Artificial Sequence
  Description of Artificial Sequence: Synthetic oligonucleotide
  Sense strand starting at position 699 of SEQ ID NO: 1884466
uguagaucaaggugggaau

SEQ ID NO: 2267851 - RNA, 19 nt, Artificial Sequence
  Description of Artificial Sequence: Synthetic oligonucleotide
  Antisense strand to SEQ ID NO: 2267850
auucccaccuugaucuaca

SEQ ID NO: 2267852 - RNA, 19 nt, Artificial Sequence
  Description of Artificial Sequence: Synthetic oligonucleotide
  Sense strand starting at position 700 of SEQ ID NO: 1884466
guagaucaaggugggaaua

SEQ ID NO: 2267853 - RNA, 19 nt, Artificial Sequence
  Description of Artificial Sequence: Synthetic oligonucleotide
  Antisense strand to SEQ ID NO: 2267852
uauucccaccuugaucuac

SEQ ID NO: 2267854 - RNA, 19 nt, Artificial Sequence
  Description of Artificial Sequence: Synthetic oligonucleotide
  Sense strand starting at position 941 of SEQ ID NO: 1884466
aucaauugagcucggagau

SEQ ID NO: 2267855 - RNA, 19 nt, Artificial Sequence
  Description of Artificial Sequence: Synthetic oligonucleotide
  Antisense strand to SEQ ID NO: 2267854
aucuccgagcucaauugau

SEQ ID NO: 2267856 - RNA, 19 nt, Artificial Sequence
  Description of Artificial Sequence: Synthetic oligonucleotide
  Sense strand starting at position 942 of SEQ ID NO: 1884466
ucaauugagcucggagauu

SEQ ID NO: 2267857 - RNA, 19 nt, Artificial Sequence
  Description of Artificial Sequence: Synthetic oligonucleotide
  Antisense strand to SEQ ID NO: 2267856
aaucuccgagcucaauuga

SEQ ID NO: 2267858 - RNA, 19 nt, Artificial Sequence
  Description of Artificial Sequence: Synthetic oligonucleotide
  Sense strand starting at position 1206 of SEQ ID NO: 1884466
agaggcagauuccugagau

SEQ ID NO: 2267859 - RNA, 19 nt, Artificial Sequence
  Description of Artificial Sequence: Synthetic oligonucleotide
  Antisense strand to SEQ ID NO: 2267858
aucucaggaaucugccucu

SEQ ID NO: 2267860 - RNA, 19 nt, Artificial Sequence
  Description of Artificial Sequence: Synthetic oligonucleotide
  Sense strand starting at position 1311 of SEQ ID NO: 1884466
gcugaaugcaugcaucaga

SEQ ID NO: 2267861 - RNA, 19 nt, Artificial Sequence
  Description of Artificial Sequence: Synthetic oligonucleotide
  Antisense strand to SEQ ID NO: 2267860
ucugaugcaugcauucagc

SEQ ID NO: 2267862 - RNA, 19 nt, Artificial Sequence
  Description of Artificial Sequence: Synthetic oligonucleotide
  Sense strand starting at position 1358 of SEQ ID NO: 1884466
uggagcucuuaggcuagaa

SEQ ID NO: 2267863 - RNA, 19 nt, Artificial Sequence
  Description of Artificial Sequence: Synthetic oligonucleotide
  Antisense strand to SEQ ID NO: 2267862
uucuagccuaagagcucca

SEQ ID NO: 2267864 - RNA, 19 nt, Artificial Sequence
  Description of Artificial Sequence: Synthetic oligonucleotide
  Sense strand starting at position 1360 of SEQ ID NO: 1884466
gagcucuuaggcuagaaga

SEQ ID NO: 2267865 - RNA, 19 nt, Artificial Sequence
  Description of Artificial Sequence: Synthetic oligonucleotide
  Antisense strand to SEQ ID NO: 2267864
ucuucuagccuaagagcuc

SEQ ID NO: 2267866 - RNA, 19 nt, Artificial Sequence
  Description of Artificial Sequence: Synthetic oligonucleotide
  Sense strand starting at position 1362 of SEQ ID NO: 1884466
gcucuuaggcuagaagaug

SEQ ID NO: 2267867 - RNA, 19 nt, Artificial Sequence
  Description of Artificial Sequence: Synthetic oligonucleotide
  Antisense strand to SEQ ID NO: 2267866
caucuucuagccuaagagc

SEQ ID NO: 2267868 - RNA, 19 nt, Artificial Sequence
  Description of Artificial Sequence: Synthetic oligonucleotide
  Sense strand starting at position 1378 of SEQ ID NO: 1884466
augauuucuucuggacaag

SEQ ID NO: 2267869 - RNA, 19 nt, Artificial Sequence
  Description of Artificial Sequence: Synthetic oligonucleotide
  Antisense strand to SEQ ID NO: 2267868
cuuguccagaagaaaucau

SEQ ID NO: 2267870 - RNA, 19 nt, Artificial Sequence
  Description of Artificial Sequence: Synthetic oligonucleotide
  Sense strand starting at position 1449 of SEQ ID NO: 1884466
accaucccguguuuacaaa

SEQ ID NO: 2267871 - RNA, 19 nt, Artificial Sequence
  Description of Artificial Sequence: Synthetic oligonucleotide
  Antisense strand to SEQ ID NO: 2267870
uuuguaaacacgggauggu

SEQ ID NO: 2267872 - RNA, 19 nt, Artificial Sequence
  Description of Artificial Sequence: Synthetic oligonucleotide
  Sense strand starting at position 1621 of SEQ ID NO: 1884466
ccugaaucucugggacgaa

SEQ ID NO: 2267873 - RNA, 19 nt, Artificial Sequence
  Description of Artificial Sequence: Synthetic oligonucleotide
  Antisense strand to SEQ ID NO: 2267872
uucgucccagagauucagg

SEQ ID NO: 2267874 - RNA, 19 nt, Artificial Sequence
  Description of Artificial Sequence: Synthetic oligonucleotide
  Sense strand starting at position 1645 of SEQ ID NO: 1884466
guugucaccucccuaaaug

SEQ ID NO: 2267875 - RNA, 19 nt, Artificial Sequence
  Description of Artificial Sequence: Synthetic oligonucleotide
  Antisense strand to SEQ ID NO: 2267874
cauuuagggaggugacaac

SEQ ID NO: 2267876 - RNA, 19 nt, Artificial Sequence
  Description of Artificial Sequence: Synthetic oligonucleotide
  Sense strand starting at position 1653 of SEQ ID NO: 1884466
cucccuaaaugguucuaga

SEQ ID NO: 2267877 - RNA, 19 nt, Artificial Sequence
  Description of Artificial Sequence: Synthetic oligonucleotide
  Antisense strand to SEQ ID NO: 2267876
ucuagaaccauuuagggag

SEQ ID NO: 2267878 - RNA, 19 nt, Artificial Sequence
  Description of Artificial Sequence: Synthetic oligonucleotide
  Sense strand starting at position 1783 of SEQ ID NO: 1884466
ugcucugcagacugagaua

SEQ ID NO: 2267879 - RNA, 19 nt, Artificial Sequence
  Description of Artificial Sequence: Synthetic oligonucleotide
  Antisense strand to SEQ ID NO: 2267878
uaucucagucugcagagca

SEQ ID NO: 2267880 - RNA, 19 nt, Artificial Sequence
  Description of Artificial Sequence: Synthetic oligonucleotide
  Sense strand starting at position 1797 of SEQ ID NO: 1884466
agauaagagccuuacguuu

SEQ ID NO: 2267881 - RNA, 19 nt, Artificial Sequence
  Description of Artificial Sequence: Synthetic oligonucleotide
  Antisense strand to SEQ ID NO: 2267880
aaacguaaggcucuuaucu

SEQ ID NO: 2267882 - RNA, 19 nt, Artificial Sequence
  Description of Artificial Sequence: Synthetic oligonucleotide
  Sense strand starting at position 1803 of SEQ ID NO: 1884466
gagccuuacguuuacaaag

SEQ ID NO: 2267883 - RNA, 19 nt, Artificial Sequence
  Description of Artificial Sequence: Synthetic oligonucleotide
  Antisense strand to SEQ ID NO: 2267882
cuuuguaaacguaaggcuc

SEQ ID NO: 2267884 - RNA, 19 nt, Artificial Sequence
  Description of Artificial Sequence: Synthetic oligonucleotide
  Sense strand starting at position 1992 of SEQ ID NO: 1884466
accugugaaacucggaaau

SEQ ID NO: 2267885 - RNA, 19 nt, Artificial Sequence
  Description of Artificial Sequence: Synthetic oligonucleotide
  Antisense strand to SEQ ID NO: 2267884
auuuccgaguuucacaggu

SEQ ID NO: 2267886 - RNA, 19 nt, Artificial Sequence
  Description of Artificial Sequence: Synthetic oligonucleotide
  Sense strand starting at position 2053 of SEQ ID NO: 1884466
gcggaaucucuccaaucau

SEQ ID NO: 2267887 - RNA, 19 nt, Artificial Sequence
  Description of Artificial Sequence: Synthetic oligonucleotide
  Antisense strand to SEQ ID NO: 2267886
augauuggagagauuccgc

SEQ ID NO: 2267888 - RNA, 19 nt, Artificial Sequence
  Description of Artificial Sequence: Synthetic oligonucleotide
  Sense strand starting at position 2156 of SEQ ID NO: 1884466
ucccaacagccuuaugaga

SEQ ID NO: 2267889 - RNA, 19 nt, Artificial Sequence
  Description of Artificial Sequence: Synthetic oligonucleotide
  Antisense strand to SEQ ID NO: 2267888
ucucauaaggcuguuggga

SEQ ID NO: 2267890 - RNA, 19 nt, Artificial Sequence
  Description of Artificial Sequence: Synthetic oligonucleotide
  Sense strand starting at position 2170 of SEQ ID NO: 1884466
ugagaugggcacugucauu

SEQ ID NO: 2267891 - RNA, 19 nt, Artificial Sequence
  Description of Artificial Sequence: Synthetic oligonucleotide
  Antisense strand to SEQ ID NO: 2267890
aaugacagugcccaucuca

SEQ ID NO: 2267892 - RNA, 19 nt, Artificial Sequence
  Description of Artificial Sequence: Synthetic oligonucleotide
  Sense strand starting at position 2214 of SEQ ID NO: 1884466
aaagcagucgcauaaauug

SEQ ID NO: 2267893 - RNA, 19 nt, Artificial Sequence
  Description of Artificial Sequence: Synthetic oligonucleotide
  Antisense strand to SEQ ID NO: 2267892
caauuuaugcgacugcuuu

SEQ ID NO: 2267894 - RNA, 19 nt, Artificial Sequence
  Description of Artificial Sequence: Synthetic oligonucleotide
  Sense strand starting at position 2269 of SEQ ID NO: 1884466
gcuuccugagguuagaagu

SEQ ID NO: 2267895 - RNA, 19 nt, Artificial Sequence
  Description of Artificial Sequence: Synthetic oligonucleotide
  Antisense strand to SEQ ID NO: 2267894
acuucuaaccucaggaagc

SEQ ID NO: 2267896 - RNA, 19 nt, Artificial Sequence
  Description of Artificial Sequence: Synthetic oligonucleotide
  Sense strand starting at position 2610 of SEQ ID NO: 1884466
cgcuuugggagugauauua

SEQ ID NO: 2267897 - RNA, 19 nt, Artificial Sequence
  Description of Artificial Sequence: Synthetic oligonucleotide
  Antisense strand to SEQ ID NO: 2267896
uaauaucacucccaaagcg

SEQ ID NO: 2267898 - RNA, 19 nt, Artificial Sequence
  Description of Artificial Sequence: Synthetic oligonucleotide
  Sense strand starting at position 2888 of SEQ ID NO: 1884466
gcugcuaugguauaaguaa

SEQ ID NO: 2267899 - RNA, 19 nt, Artificial Sequence
  Description of Artificial Sequence: Synthetic oligonucleotide
  Antisense strand to SEQ ID NO: 2267898
uuacuuauaccauagcagc

SEQ ID NO: 2267900 - RNA, 19 nt, Artificial Sequence
  Description of Artificial Sequence: Synthetic oligonucleotide
  Sense strand starting at position 2929 of SEQ ID NO: 1884466
aguaucaaaucagugcaaa

SEQ ID NO: 2267901 - RNA, 19 nt, Artificial Sequence
  Description of Artificial Sequence: Synthetic oligonucleotide
  Antisense strand to SEQ ID NO: 2267900
uuugcacugauuugauacu

SEQ ID NO: 2267902 - RNA, 19 nt, Artificial Sequence
  Description of Artificial Sequence: Synthetic oligonucleotide
  Sense strand starting at position 2963 of SEQ ID NO: 1884466
ucacgagauauauggcaga

SEQ ID NO: 2267903 - RNA, 19 nt, Artificial Sequence
  Description of Artificial Sequence: Synthetic oligonucleotide
  Antisense strand to SEQ ID NO: 2267902
ucugccauauaucucguga

SEQ ID NO: 2267904 - RNA, 19 nt, Artificial Sequence
  Description of Artificial Sequence: Synthetic oligonucleotide
  Sense strand starting at position 3090 of SEQ ID NO: 1884466
ucaggagccuaguuguaaa

SEQ ID NO: 2267905 - RNA, 19 nt, Artificial Sequence
  Description of Artificial Sequence: Synthetic oligonucleotide
  Antisense strand to SEQ ID NO: 2267904
uuuacaacuaggcuccuga

SEQ ID NO: 2267906 - RNA, 19 nt, Artificial Sequence
  Description of Artificial Sequence: Synthetic oligonucleotide
  Sense strand starting at position 3126 of SEQ ID NO: 1884466
ggauguguacacgacauca

SEQ ID NO: 2267907 - RNA, 19 nt, Artificial Sequence
  Description of Artificial Sequence: Synthetic oligonucleotide
  Antisense strand to SEQ ID NO: 2267906
ugaugucguguacacaucc

SEQ ID NO: 2267908 - RNA, 19 nt, Artificial Sequence
  Description of Artificial Sequence: Synthetic oligonucleotide
  Sense strand starting at position 3128 of SEQ ID NO: 1884466
auguguacacgacaucaau

SEQ ID NO: 2267909 - RNA, 19 nt, Artificial Sequence
  Description of Artificial Sequence: Synthetic oligonucleotide
  Antisense strand to SEQ ID NO: 2267908
auugaugucguguacacau

SEQ ID NO: 2267910 - RNA, 19 nt, Artificial Sequence
  Description of Artificial Sequence: Synthetic oligonucleotide
  Sense strand starting at position 3228 of SEQ ID NO: 1884466
cggaaauucccacgaucac

SEQ ID NO: 2267911 - RNA, 19 nt, Artificial Sequence
  Description of Artificial Sequence: Synthetic oligonucleotide
  Antisense strand to SEQ ID NO: 2267910
gugaucgugggaauuuccg

SEQ ID NO: 2267912 - RNA, 19 nt, Artificial Sequence
  Description of Artificial Sequence: Synthetic oligonucleotide
  Sense strand starting at position 3404 of SEQ ID NO: 1884466
aagggaauuuccugugaga

SEQ ID NO: 2267913 - RNA, 19 nt, Artificial Sequence
  Description of Artificial Sequence: Synthetic oligonucleotide
  Antisense strand to SEQ ID NO: 2267912
ucucacaggaaauucccuu

SEQ ID NO: 2267914 - RNA, 19 nt, Artificial Sequence
  Description of Artificial Sequence: Synthetic oligonucleotide
  Sense strand starting at position 3407 of SEQ ID NO: 1884466
ggaauuuccugugagagca

SEQ ID NO: 2267915 - RNA, 19 nt, Artificial Sequence
  Description of Artificial Sequence: Synthetic oligonucleotide
  Antisense strand to SEQ ID NO: 2267914
ugcucucacaggaaauucc

SEQ ID NO: 2267916 - RNA, 19 nt, Artificial Sequence
  Description of Artificial Sequence: Synthetic oligonucleotide
  Sense strand starting at position 3578 of SEQ ID NO: 1884466
ugcugaauccucugguuaa

SEQ ID NO: 2267917 - RNA, 19 nt, Artificial Sequence
  Description of Artificial Sequence: Synthetic oligonucleotide
  Antisense strand to SEQ ID NO: 2267916
uuaaccagaggauucagca

SEQ ID NO: 2267918 - RNA, 19 nt, Artificial Sequence
  Description of Artificial Sequence: Synthetic oligonucleotide
  Sense strand starting at position 3581 of SEQ ID NO: 1884466
ugaauccucugguuaaaca

SEQ ID NO: 2267919 - RNA, 19 nt, Artificial Sequence
  Description of Artificial Sequence: Synthetic oligonucleotide
  Antisense strand to SEQ ID NO: 2267918
uguuuaaccagaggauuca

SEQ ID NO: 2267920 - RNA, 19 nt, Artificial Sequence
  Description of Artificial Sequence: Synthetic oligonucleotide
  Sense strand starting at position 3645 of SEQ ID NO: 1884466
ccaugaaauuucuaagugu

SEQ ID NO: 2267921 - RNA, 19 nt, Artificial Sequence
  Description of Artificial Sequence: Synthetic oligonucleotide
  Antisense strand to SEQ ID NO: 2267920
acacuuagaaauuucaugg

SEQ ID NO: 2267922 - RNA, 19 nt, Artificial Sequence
  Description of Artificial Sequence: Synthetic oligonucleotide
  Sense strand starting at position 3749 of SEQ ID NO: 1884466
uccucucaagcagagaauu

SEQ ID NO: 2267923 - RNA, 19 nt, Artificial Sequence
  Description of Artificial Sequence: Synthetic oligonucleotide
  Antisense strand to SEQ ID NO: 2267922
aauucucugcuugagagga

SEQ ID NO: 2267924 - RNA, 19 nt, Artificial Sequence
  Description of Artificial Sequence: Synthetic oligonucleotide
  Sense strand starting at position 12 of SEQ ID NO: 1884467
gucugugcgcucagagaug

SEQ ID NO: 2267925 - RNA, 19 nt, Artificial Sequence
  Description of Artificial Sequence: Synthetic oligonucleotide
  Antisense strand to SEQ ID NO: 2267924
caucucugagcgcacagac

SEQ ID NO: 2267926 - RNA, 19 nt, Artificial Sequence
  Description of Artificial Sequence: Synthetic oligonucleotide
  Sense strand starting at position 17 of SEQ ID NO: 1884467
ugcgcucagagaugacaaa

SEQ ID NO: 2267927 - RNA, 19 nt, Artificial Sequence
  Description of Artificial Sequence: Synthetic oligonucleotide
  Antisense strand to SEQ ID NO: 2267926
uuugucaucucugagcgca

SEQ ID NO: 2267928 - RNA, 19 nt, Artificial Sequence
  Description of Artificial Sequence: Synthetic oligonucleotide
  Sense strand starting at position 222 of SEQ ID NO: 1884467
ccaguaaguguugaagcua

SEQ ID NO: 2267929 - RNA, 19 nt, Artificial Sequence
  Description of Artificial Sequence: Synthetic oligonucleotide
  Antisense strand to SEQ ID NO: 2267928
uagcuucaacacuuacugg

SEQ ID NO: 2267930 - RNA, 19 nt, Artificial Sequence
  Description of Artificial Sequence: Synthetic oligonucleotide
  Sense strand starting at position 227 of SEQ ID NO: 1884467
aaguguugaagcuagguuu

SEQ ID NO: 2267931 - RNA, 19 nt, Artificial Sequence
  Description of Artificial Sequence: Synthetic oligonucleotide
  Antisense strand to SEQ ID NO: 2267930
aaaccuagcuucaacacuu

SEQ ID NO: 2267932 - RNA, 19 nt, Artificial Sequence
  Description of Artificial Sequence: Synthetic oligonucleotide
  Sense strand starting at position 302 of SEQ ID NO: 1884467
ucucuaugucuuuacaagu

SEQ ID NO: 2267933 - RNA, 19 nt, Artificial Sequence
  Description of Artificial Sequence: Synthetic oligonucleotide
  Antisense strand to SEQ ID NO: 2267932
acuuguaaagacauagaga

SEQ ID NO: 2267934 - RNA, 19 nt, Artificial Sequence
  Description of Artificial Sequence: Synthetic oligonucleotide
  Sense strand starting at position 586 of SEQ ID NO: 1884467
gcccaacaucuuuagagcu

SEQ ID NO: 2267935 - RNA, 19 nt, Artificial Sequence
  Description of Artificial Sequence: Synthetic oligonucleotide
  Antisense strand to SEQ ID NO: 2267934
agcucuaaagauguugggc

SEQ ID NO: 2267936 - RNA, 19 nt, Artificial Sequence
  Description of Artificial Sequence: Synthetic oligonucleotide
  Sense strand starting at position 594 of SEQ ID NO: 1884467
ucuuuagagcuguaaucug

SEQ ID NO: 2267937 - RNA, 19 nt, Artificial Sequence
  Description of Artificial Sequence: Synthetic oligonucleotide
  Antisense strand to SEQ ID NO: 2267936
cagauuacagcucuaaaga

SEQ ID NO: 2267938 - RNA, 19 nt, Artificial Sequence
  Description of Artificial Sequence: Synthetic oligonucleotide
  Sense strand starting at position 642 of SEQ ID NO: 1884467
cagacagacugcucaguua

SEQ ID NO: 2267939 - RNA, 19 nt, Artificial Sequence
  Description of Artificial Sequence: Synthetic oligonucleotide
  Antisense strand to SEQ ID NO: 2267938
uaacugagcagucugucug

SEQ ID NO: 2267940 - RNA, 19 nt, Artificial Sequence
  Description of Artificial Sequence: Synthetic oligonucleotide
  Sense strand starting at position 811 of SEQ ID NO: 1884467
gguguuaucauggacacca

SEQ ID NO: 2267941 - RNA, 19 nt, Artificial Sequence
  Description of Artificial Sequence: Synthetic oligonucleotide
  Antisense strand to SEQ ID NO: 2267940
ugguguccaugauaacacc

SEQ ID NO: 2267942 - RNA, 19 nt, Artificial Sequence
  Description of Artificial Sequence: Synthetic oligonucleotide
  Sense strand starting at position 884 of SEQ ID NO: 1884467
cuguaaaggugguuaagau

SEQ ID NO: 2267943 - RNA, 19 nt, Artificial Sequence
  Description of Artificial Sequence: Synthetic oligonucleotide
  Antisense strand to SEQ ID NO: 2267942
aucuuaaccaccuuuacag

SEQ ID NO: 2267944 - RNA, 19 nt, Artificial Sequence
  Description of Artificial Sequence: Synthetic oligonucleotide
  Sense strand starting at position 885 of SEQ ID NO: 1884467
uguaaaggugguuaagauu

SEQ ID NO: 2267945 - RNA, 19 nt, Artificial Sequence
  Description of Artificial Sequence: Synthetic oligonucleotide
  Antisense strand to SEQ ID NO: 2267944
aaucuuaaccaccuuuaca

SEQ ID NO: 2267946 - RNA, 19 nt, Artificial Sequence
  Description of Artificial Sequence: Synthetic oligonucleotide
  Sense strand starting at position 966 of SEQ ID NO: 1884467
ggagcucugggacgauuaa

SEQ ID NO: 2267947 - RNA, 19 nt, Artificial Sequence
  Description of Artificial Sequence: Synthetic oligonucleotide
  Antisense strand to SEQ ID NO: 2267946
uuaaucgucccagagcucc

SEQ ID NO: 2267948 - RNA, 19 nt, Artificial Sequence
  Description of Artificial Sequence: Synthetic oligonucleotide
  Sense strand starting at position 967 of SEQ ID NO: 1884467
gagcucugggacgauuaau

SEQ ID NO: 2267949 - RNA, 19 nt, Artificial Sequence
  Description of Artificial Sequence: Synthetic oligonucleotide
  Antisense strand to SEQ ID NO: 2267948
auuaaucgucccagagcuc

SEQ ID NO: 2267950 - RNA, 19 nt, Artificial Sequence
  Description of Artificial Sequence: Synthetic oligonucleotide
  Sense strand starting at position 1125 of SEQ ID NO: 1884467
ugaauauguugaguuggag

SEQ ID NO: 2267951 - RNA, 19 nt, Artificial Sequence
  Description of Artificial Sequence: Synthetic oligonucleotide
  Antisense strand to SEQ ID NO: 2267950
cuccaacucaacauauuca

SEQ ID NO: 2267952 - RNA, 19 nt, Artificial Sequence
  Description of Artificial Sequence: Synthetic oligonucleotide
  Sense strand starting at position 1146 of SEQ ID NO: 1884467
agaggucagccuggaacuu

SEQ ID NO: 2267953 - RNA, 19 nt, Artificial Sequence
  Description of Artificial Sequence: Synthetic oligonucleotide
  Antisense strand to SEQ ID NO: 2267952
aaguuccaggcugaccucu

SEQ ID NO: 2267954 - RNA, 19 nt, Artificial Sequence
  Description of Artificial Sequence: Synthetic oligonucleotide
  Sense strand starting at position 1147 of SEQ ID NO: 1884467
gaggucagccuggaacuua

SEQ ID NO: 2267955 - RNA, 19 nt, Artificial Sequence
  Description of Artificial Sequence: Synthetic oligonucleotide
  Antisense strand to SEQ ID NO: 2267954
uaaguuccaggcugaccuc

SEQ ID NO: 2267956 - RNA, 19 nt, Artificial Sequence
  Description of Artificial Sequence: Synthetic oligonucleotide
  Sense strand starting at position 1289 of SEQ ID NO: 1884467
acaaguguugcaugggaac

SEQ ID NO: 2267957 - RNA, 19 nt, Artificial Sequence
  Description of Artificial Sequence: Synthetic oligonucleotide
  Antisense strand to SEQ ID NO: 2267956
guucccaugcaacacuugu

SEQ ID NO: 2267958 - RNA, 19 nt, Artificial Sequence
  Description of Artificial Sequence: Synthetic oligonucleotide
  Sense strand starting at position 2039 of SEQ ID NO: 1884467
uccagaagccucugagaug

SEQ ID NO: 2267959 - RNA, 19 nt, Artificial Sequence
  Description of Artificial Sequence: Synthetic oligonucleotide
  Antisense strand to SEQ ID NO: 2267958
caucucagaggcuucugga

SEQ ID NO: 2267960 - RNA, 19 nt, Artificial Sequence
  Description of Artificial Sequence: Synthetic oligonucleotide
  Sense strand starting at position 2066 of SEQ ID NO: 1884467
acccacaaugcccgaaaua

SEQ ID NO: 2267961 - RNA, 19 nt, Artificial Sequence
  Description of Artificial Sequence: Synthetic oligonucleotide
  Antisense strand to SEQ ID NO: 2267960
uauuucgggcauugugggu

SEQ ID NO: 2267962 - RNA, 19 nt, Artificial Sequence
  Description of Artificial Sequence: Synthetic oligonucleotide
  Sense strand starting at position 2206 of SEQ ID NO: 1884467
gugagauuagaucgaggcu

SEQ ID NO: 2267963 - RNA, 19 nt, Artificial Sequence
  Description of Artificial Sequence: Synthetic oligonucleotide
  Antisense strand to SEQ ID NO: 2267962
agccucgaucuaaucucac

SEQ ID NO: 2267964 - RNA, 19 nt, Artificial Sequence
  Description of Artificial Sequence: Synthetic oligonucleotide
  Sense strand starting at position 2207 of SEQ ID NO: 1884467
ugagauuagaucgaggcuu

SEQ ID NO: 2267965 - RNA, 19 nt, Artificial Sequence
  Description of Artificial Sequence: Synthetic oligonucleotide
  Antisense strand to SEQ ID NO: 2267964
aagccucgaucuaaucuca

SEQ ID NO: 2267966 - RNA, 19 nt, Artificial Sequence
  Description of Artificial Sequence: Synthetic oligonucleotide
  Sense strand starting at position 2209 of SEQ ID NO: 1884467
agauuagaucgaggcuuuc

SEQ ID NO: 2267967 - RNA, 19 nt, Artificial Sequence
  Description of Artificial Sequence: Synthetic oligonucleotide
  Antisense strand to SEQ ID NO: 2267966
gaaagccucgaucuaaucu

SEQ ID NO: 2267968 - RNA, 19 nt, Artificial Sequence
  Description of Artificial Sequence: Synthetic oligonucleotide
  Sense strand starting at position 2431 of SEQ ID NO: 1884467
cgggaucaccaagguuaga

SEQ ID NO: 2267969 - RNA, 19 nt, Artificial Sequence
  Description of Artificial Sequence: Synthetic oligonucleotide
  Antisense strand to SEQ ID NO: 2267968
ucuaaccuuggugaucccg

SEQ ID NO: 2267970 - RNA, 19 nt, Artificial Sequence
  Description of Artificial Sequence: Synthetic oligonucleotide
  Sense strand starting at position 2492 of SEQ ID NO: 1884467
gcaagauuggaaugccacu

SEQ ID NO: 2267971 - RNA, 19 nt, Artificial Sequence
  Description of Artificial Sequence: Synthetic oligonucleotide
  Antisense strand to SEQ ID NO: 2267970
aguggcauuccaaucuugc

SEQ ID NO: 2267972 - RNA, 19 nt, Artificial Sequence
  Description of Artificial Sequence: Synthetic oligonucleotide
  Sense strand starting at position 2725 of SEQ ID NO: 1884467
gugagcugucaagacauau

SEQ ID NO: 2267973 - RNA, 19 nt, Artificial Sequence
  Description of Artificial Sequence: Synthetic oligonucleotide
  Antisense strand to SEQ ID NO: 2267972
auaugucuugacagcucac

SEQ ID NO: 2267974 - RNA, 19 nt, Artificial Sequence
  Description of Artificial Sequence: Synthetic oligonucleotide
  Sense strand starting at position 2751 of SEQ ID NO: 1884467
gcccguguucuagcccaga

SEQ ID NO: 2267975 - RNA, 19 nt, Artificial Sequence
  Description of Artificial Sequence: Synthetic oligonucleotide
  Antisense strand to SEQ ID NO: 2267974
ucugggcuagaacacgggc

SEQ ID NO: 2267976 - RNA, 19 nt, Artificial Sequence
  Description of Artificial Sequence: Synthetic oligonucleotide
  Sense strand starting at position 2779 of SEQ ID NO: 1884467
gguugaagccuuugaagga

SEQ ID NO: 2267977 - RNA, 19 nt, Artificial Sequence
  Description of Artificial Sequence: Synthetic oligonucleotide
  Antisense strand to SEQ ID NO: 2267976
uccuucaaaggcuucaacc

SEQ ID NO: 2267978 - RNA, 19 nt, Artificial Sequence
  Description of Artificial Sequence: Synthetic oligonucleotide
  Sense strand starting at position 2797 of SEQ ID NO: 1884467
aagggcauggcccaugaau

SEQ ID NO: 2267979 - RNA, 19 nt, Artificial Sequence
  Description of Artificial Sequence: Synthetic oligonucleotide
  Antisense strand to SEQ ID NO: 2267978
auucaugggccaugcccuu

SEQ ID NO: 2267980 - RNA, 19 nt, Artificial Sequence
  Description of Artificial Sequence: Synthetic oligonucleotide
  Sense strand starting at position 2799 of SEQ ID NO: 1884467
gggcauggcccaugaauaa

SEQ ID NO: 2267981 - RNA, 19 nt, Artificial Sequence
  Description of Artificial Sequence: Synthetic oligonucleotide
  Antisense strand to SEQ ID NO: 2267980
uuauucaugggccaugccc

SEQ ID NO: 2267982 - RNA, 19 nt, Artificial Sequence
  Description of Artificial Sequence: Synthetic oligonucleotide
  Sense strand starting at position 2989 of SEQ ID NO: 1884467
agaaucaugccugauccca

SEQ ID NO: 2267983 - RNA, 19 nt, Artificial Sequence
  Description of Artificial Sequence: Synthetic oligonucleotide
  Antisense strand to SEQ ID NO: 2267982
ugggaucaggcaugauucu

SEQ ID NO: 2267984 - RNA, 19 nt, Artificial Sequence
  Description of Artificial Sequence: Synthetic oligonucleotide
  Sense strand starting at position 3013 of SEQ ID NO: 1884467
acuuuaugucaucagcuuu

SEQ ID NO: 2267985 - RNA, 19 nt, Artificial Sequence
  Description of Artificial Sequence: Synthetic oligonucleotide
  Antisense strand to SEQ ID NO: 2267984
aaagcugaugacauaaagu

SEQ ID NO: 2267986 - RNA, 19 nt, Artificial Sequence
  Description of Artificial Sequence: Synthetic oligonucleotide
  Sense strand starting at position 3049 of SEQ ID NO: 1884467
gaugguggauuugauagaa

SEQ ID NO: 2267987 - RNA, 19 nt, Artificial Sequence
  Description of Artificial Sequence: Synthetic oligonucleotide
  Antisense strand to SEQ ID NO: 2267986
uucuaucaaauccaccauc

SEQ ID NO: 2267988 - RNA, 19 nt, Artificial Sequence
  Description of Artificial Sequence: Synthetic oligonucleotide
  Sense strand starting at position 3068 of SEQ ID NO: 1884467
gaaggaauugucuggguug

SEQ ID NO: 2267989 - RNA, 19 nt, Artificial Sequence
  Description of Artificial Sequence: Synthetic oligonucleotide
  Antisense strand to SEQ ID NO: 2267988
caacccagacaauuccuuc

SEQ ID NO: 2267990 - RNA, 19 nt, Artificial Sequence
  Description of Artificial Sequence: Synthetic oligonucleotide
  Sense strand starting at position 3070 of SEQ ID NO: 1884467
aggaauugucuggguugua

SEQ ID NO: 2267991 - RNA, 19 nt, Artificial Sequence
  Description of Artificial Sequence: Synthetic oligonucleotide
  Antisense strand to SEQ ID NO: 2267990
uacaacccagacaauuccu

SEQ ID NO: 2267992 - RNA, 19 nt, Artificial Sequence
  Description of Artificial Sequence: Synthetic oligonucleotide
  Sense strand starting at position 3084 of SEQ ID NO: 1884467
uuguauguccaauaugcaa

SEQ ID NO: 2267993 - RNA, 19 nt, Artificial Sequence
  Description of Artificial Sequence: Synthetic oligonucleotide
  Antisense strand to SEQ ID NO: 2267992
uugcauauuggacauacaa

SEQ ID NO: 2267994 - RNA, 19 nt, Artificial Sequence
  Description of Artificial Sequence: Synthetic oligonucleotide
  Sense strand starting at position 3103 of SEQ ID NO: 1884467
uuguauuguauaugggaca

SEQ ID NO: 2267995 - RNA, 19 nt, Artificial Sequence
  Description of Artificial Sequence: Synthetic oligonucleotide
  Antisense strand to SEQ ID NO: 2267994
ugucccauauacaauacaa

SEQ ID NO: 2267996 - RNA, 19 nt, Artificial Sequence
  Description of Artificial Sequence: Synthetic oligonucleotide
  Sense strand starting at position 3161 of SEQ ID NO: 1884467
cuaugaaaucagcaguggu

SEQ ID NO: 2267997 - RNA, 19 nt, Artificial Sequence
  Description of Artificial Sequence: Synthetic oligonucleotide
  Antisense strand to SEQ ID NO: 2267996
accacugcugauuucauag

SEQ ID NO: 2267998 - RNA, 19 nt, Artificial Sequence
  Description of Artificial Sequence: Synthetic oligonucleotide
  Sense strand starting at position 3833 of SEQ ID NO: 1884467
gggagauguucucucagca

SEQ ID NO: 2267999 - RNA, 19 nt, Artificial Sequence
  Description of Artificial Sequence: Synthetic oligonucleotide
  Antisense strand to SEQ ID NO: 2267998
ugcugagagaacaucuccc

SEQ ID NO: 2268000 - RNA, 19 nt, Artificial Sequence
  Description of Artificial Sequence: Synthetic oligonucleotide
  Sense strand starting at position 3837 of SEQ ID NO: 1884467
gauguucucucagcaggau

SEQ ID NO: 2268001 - RNA, 19 nt, Artificial Sequence
  Description of Artificial Sequence: Synthetic oligonucleotide
  Antisense strand to SEQ ID NO: 2268000
auccugcugagagaacauc

SEQ ID NO: 2268002 - RNA, 19 nt, Artificial Sequence
  Description of Artificial Sequence: Synthetic oligonucleotide
  Sense strand starting at position 3937 of SEQ ID NO: 1884467
cucagaguugcugggauca

SEQ ID NO: 2268003 - RNA, 19 nt, Artificial Sequence
  Description of Artificial Sequence: Synthetic oligonucleotide
  Antisense strand to SEQ ID NO: 2268002
ugaucccagcaacucugag

SEQ ID NO: 2268004 - RNA, 19 nt, Artificial Sequence
  Description of Artificial Sequence: Synthetic oligonucleotide
  Sense strand starting at position 133 of SEQ ID NO: 1884468
guauuuccugcauguacau

SEQ ID NO: 2268005 - RNA, 19 nt, Artificial Sequence
  Description of Artificial Sequence: Synthetic oligonucleotide
  Antisense strand to SEQ ID NO: 2268004
auguacaugcaggaaauac

SEQ ID NO: 2268006 - RNA, 19 nt, Artificial Sequence
  Description of Artificial Sequence: Synthetic oligonucleotide
  Sense strand starting at position 150 of SEQ ID NO: 1884468
auaugcuaccgauauaaua

SEQ ID NO: 2268007 - RNA, 19 nt, Artificial Sequence
  Description of Artificial Sequence: Synthetic oligonucleotide
  Antisense strand to SEQ ID NO: 2268006
uauuauaucgguagcauau

SEQ ID NO: 2268008 - RNA, 19 nt, Artificial Sequence
  Description of Artificial Sequence: Synthetic oligonucleotide
  Sense strand starting at position 241 of SEQ ID NO: 1884468
uugacaaauguuugucuuu

SEQ ID NO: 2268009 - RNA, 19 nt, Artificial Sequence
  Description of Artificial Sequence: Synthetic oligonucleotide
  Antisense strand to SEQ ID NO: 2268008
aaagacaaacauuugucaa

SEQ ID NO: 2268010 - RNA, 19 nt, Artificial Sequence
  Description of Artificial Sequence: Synthetic oligonucleotide
  Sense strand starting at position 355 of SEQ ID NO: 1884468
caagguagccuugaacuuu

SEQ ID NO: 2268011 - RNA, 19 nt, Artificial Sequence
  Description of Artificial Sequence: Synthetic oligonucleotide
  Antisense strand to SEQ ID NO: 2268010
aaaguucaaggcuaccuug

SEQ ID NO: 2268012 - RNA, 19 nt, Artificial Sequence
  Description of Artificial Sequence: Synthetic oligonucleotide
  Sense strand starting at position 413 of SEQ ID NO: 1884468
cgaugaggucuucagguug

SEQ ID NO: 2268013 - RNA, 19 nt, Artificial Sequence
  Description of Artificial Sequence: Synthetic oligonucleotide
  Antisense strand to SEQ ID NO: 2268012
caaccugaagaccucaucg

SEQ ID NO: 2268014 - RNA, 19 nt, Artificial Sequence
  Description of Artificial Sequence: Synthetic oligonucleotide
  Sense strand starting at position 418 of SEQ ID NO: 1884468
aggucuucagguugagauu

SEQ ID NO: 2268015 - RNA, 19 nt, Artificial Sequence
  Description of Artificial Sequence: Synthetic oligonucleotide
  Antisense strand to SEQ ID NO: 2268014
aaucucaaccugaagaccu

SEQ ID NO: 2268016 - RNA, 19 nt, Artificial Sequence
  Description of Artificial Sequence: Synthetic oligonucleotide
  Sense strand starting at position 419 of SEQ ID NO: 1884468
ggucuucagguugagauua

SEQ ID NO: 2268017 - RNA, 19 nt, Artificial Sequence
  Description of Artificial Sequence: Synthetic oligonucleotide
  Antisense strand to SEQ ID NO: 2268016
uaaucucaaccugaagacc

SEQ ID NO: 2268018 - RNA, 19 nt, Artificial Sequence
  Description of Artificial Sequence: Synthetic oligonucleotide
  Sense strand starting at position 427 of SEQ ID NO: 1884468
gguugagauuaacaaacaa

SEQ ID NO: 2268019 - RNA, 19 nt, Artificial Sequence
  Description of Artificial Sequence: Synthetic oligonucleotide
  Antisense strand to SEQ ID NO: 2268018
uuguuuguuaaucucaacc

SEQ ID NO: 2268020 - RNA, 19 nt, Artificial Sequence
  Description of Artificial Sequence: Synthetic oligonucleotide
  Sense strand starting at position 841 of SEQ ID NO: 1884468
aggacugguuucccucaaa

SEQ ID NO: 2268021 - RNA, 19 nt, Artificial Sequence
  Description of Artificial Sequence: Synthetic oligonucleotide
  Antisense strand to SEQ ID NO: 2268020
uuugagggaaaccaguccu

SEQ ID NO: 2268022 - RNA, 19 nt, Artificial Sequence
  Description of Artificial Sequence: Synthetic oligonucleotide
  Sense strand starting at position 922 of SEQ ID NO: 1884468
agaguugcagucugaagca

SEQ ID NO: 2268023 - RNA, 19 nt, Artificial Sequence
  Description of Artificial Sequence: Synthetic oligonucleotide
  Antisense strand to SEQ ID NO: 2268022
ugcuucagacugcaacucu

SEQ ID NO: 2268024 - RNA, 19 nt, Artificial Sequence
  Description of Artificial Sequence: Synthetic oligonucleotide
  Sense strand starting at position 1270 of SEQ ID NO: 1884468
cggaauucuguguaaaucu

SEQ ID NO: 2268025 - RNA, 19 nt, Artificial Sequence
  Description of Artificial Sequence: Synthetic oligonucleotide
  Antisense strand to SEQ ID NO: 2268024
agauuuacacagaauuccg

SEQ ID NO: 2268026 - RNA, 19 nt, Artificial Sequence
  Description of Artificial Sequence: Synthetic oligonucleotide
  Sense strand starting at position 1609 of SEQ ID NO: 1884468
agacaaauuucuggaaggu

SEQ ID NO: 2268027 - RNA, 19 nt, Artificial Sequence
  Description of Artificial Sequence: Synthetic oligonucleotide
  Antisense strand to SEQ ID NO: 2268026
accuuccagaaauuugucu

SEQ ID NO: 2268028 - RNA, 19 nt, Artificial Sequence
  Description of Artificial Sequence: Synthetic oligonucleotide
  Sense strand starting at position 1721 of SEQ ID NO: 1884468
cgcugucagcuccaggaau

SEQ ID NO: 2268029 - RNA, 19 nt, Artificial Sequence
  Description of Artificial Sequence: Synthetic oligonucleotide
  Antisense strand to SEQ ID NO: 2268028
auuccuggagcugacagcg

SEQ ID NO: 2268030 - RNA, 19 nt, Artificial Sequence
  Description of Artificial Sequence: Synthetic oligonucleotide
  Sense strand starting at position 1735 of SEQ ID NO: 1884468
ggaauacuuaccugcugag

SEQ ID NO: 2268031 - RNA, 19 nt, Artificial Sequence
  Description of Artificial Sequence: Synthetic oligonucleotide
  Antisense strand to SEQ ID NO: 2268030
cucagcagguaaguauucc

SEQ ID NO: 2268032 - RNA, 19 nt, Artificial Sequence
  Description of Artificial Sequence: Synthetic oligonucleotide
  Sense strand starting at position 1947 of SEQ ID NO: 1884468
agcacaaguccuggaaucu

SEQ ID NO: 2268033 - RNA, 19 nt, Artificial Sequence
  Description of Artificial Sequence: Synthetic oligonucleotide
  Antisense strand to SEQ ID NO: 2268032
agauuccaggacuugugcu

SEQ ID NO: 2268034 - RNA, 19 nt, Artificial Sequence
  Description of Artificial Sequence: Synthetic oligonucleotide
  Sense strand starting at position 1948 of SEQ ID NO: 1884468
gcacaaguccuggaaucuc

SEQ ID NO: 2268035 - RNA, 19 nt, Artificial Sequence
  Description of Artificial Sequence: Synthetic oligonucleotide
  Antisense strand to SEQ ID NO: 2268034
gagauuccaggacuugugc

SEQ ID NO: 2268036 - RNA, 19 nt, Artificial Sequence
  Description of Artificial Sequence: Synthetic oligonucleotide
  Sense strand starting at position 2059 of SEQ ID NO: 1884468
ggccuuaauggaugucaau

SEQ ID NO: 2268037 - RNA, 19 nt, Artificial Sequence
  Description of Artificial Sequence: Synthetic oligonucleotide
  Antisense strand to SEQ ID NO: 2268036
auugacauccauuaaggcc

SEQ ID NO: 2268038 - RNA, 19 nt, Artificial Sequence
  Description of Artificial Sequence: Synthetic oligonucleotide
  Sense strand starting at position 2139 of SEQ ID NO: 1884468
guucucuggcgccaucaua

SEQ ID NO: 2268039 - RNA, 19 nt, Artificial Sequence
  Description of Artificial Sequence: Synthetic oligonucleotide
  Antisense strand to SEQ ID NO: 2268038
uaugauggcgccagagaac

SEQ ID NO: 2268040 - RNA, 19 nt, Artificial Sequence
  Description of Artificial Sequence: Synthetic oligonucleotide
  Sense strand starting at position 2203 of SEQ ID NO: 1884468
uucccugaguaucugcaaa

SEQ ID NO: 2268041 - RNA, 19 nt, Artificial Sequence
  Description of Artificial Sequence: Synthetic oligonucleotide
  Antisense strand to SEQ ID NO: 2268040
uuugcagauacucagggaa

SEQ ID NO: 2268042 - RNA, 19 nt, Artificial Sequence
  Description of Artificial Sequence: Synthetic oligonucleotide
  Sense strand starting at position 2205 of SEQ ID NO: 1884468
cccugaguaucugcaaacu

SEQ ID NO: 2268043 - RNA, 19 nt, Artificial Sequence
  Description of Artificial Sequence: Synthetic oligonucleotide
  Antisense strand to SEQ ID NO: 2268042
aguuugcagauacucaggg

SEQ ID NO: 2268044 - RNA, 19 nt, Artificial Sequence
  Description of Artificial Sequence: Synthetic oligonucleotide
  Sense strand starting at position 2482 of SEQ ID NO: 1884468
ggaugcucgcaauaagauu

SEQ ID NO: 2268045 - RNA, 19 nt, Artificial Sequence
  Description of Artificial Sequence: Synthetic oligonucleotide
  Antisense strand to SEQ ID NO: 2268044
aaucuuauugcgagcaucc

SEQ ID NO: 2268046 - RNA, 19 nt, Artificial Sequence
  Description of Artificial Sequence: Synthetic oligonucleotide
  Sense strand starting at position 2771 of SEQ ID NO: 1884468
gcgugaggcucuaagguua

SEQ ID NO: 2268047 - RNA, 19 nt, Artificial Sequence
  Description of Artificial Sequence: Synthetic oligonucleotide
  Antisense strand to SEQ ID NO: 2268046
uaaccuuagagccucacgc

SEQ ID NO: 2268048 - RNA, 19 nt, Artificial Sequence
  Description of Artificial Sequence: Synthetic oligonucleotide
  Sense strand starting at position 2891 of SEQ ID NO: 1884468
ccaacuggugacugcaaau

SEQ ID NO: 2268049 - RNA, 19 nt, Artificial Sequence
  Description of Artificial Sequence: Synthetic oligonucleotide
  Antisense strand to SEQ ID NO: 2268048
auuugcagucaccaguugg

SEQ ID NO: 2268050 - RNA, 19 nt, Artificial Sequence
  Description of Artificial Sequence: Synthetic oligonucleotide
  Sense strand starting at position 2949 of SEQ ID NO: 1884468
cccauuguaaguugagguu

SEQ ID NO: 2268051 - RNA, 19 nt, Artificial Sequence
  Description of Artificial Sequence: Synthetic oligonucleotide
  Antisense strand to SEQ ID NO: 2268050
aaccucaacuuacaauggg

SEQ ID NO: 2268052 - RNA, 19 nt, Artificial Sequence
  Description of Artificial Sequence: Synthetic oligonucleotide
  Sense strand starting at position 2952 of SEQ ID NO: 1884468
auuguaaguugagguugaa

SEQ ID NO: 2268053 - RNA, 19 nt, Artificial Sequence
  Description of Artificial Sequence: Synthetic oligonucleotide
  Antisense strand to SEQ ID NO: 2268052
uucaaccucaacuuacaau

SEQ ID NO: 2268054 - RNA, 19 nt, Artificial Sequence
  Description of Artificial Sequence: Synthetic oligonucleotide
  Sense strand starting at position 2955 of SEQ ID NO: 1884468
guaaguugagguugaaaug

SEQ ID NO: 2268055 - RNA, 19 nt, Artificial Sequence
  Description of Artificial Sequence: Synthetic oligonucleotide
  Antisense strand to SEQ ID NO: 2268054
cauuucaaccucaacuuac

SEQ ID NO: 2268056 - RNA, 19 nt, Artificial Sequence
  Description of Artificial Sequence: Synthetic oligonucleotide
  Sense strand starting at position 3167 of SEQ ID NO: 1884468
ugugcauugucuucccaag

SEQ ID NO: 2268057 - RNA, 19 nt, Artificial Sequence
  Description of Artificial Sequence: Synthetic oligonucleotide
  Antisense strand to SEQ ID NO: 2268056
cuugggaagacaaugcaca

SEQ ID NO: 2268058 - RNA, 19 nt, Artificial Sequence
  Description of Artificial Sequence: Synthetic oligonucleotide
  Sense strand starting at position 3201 of SEQ ID NO: 1884468
gggucuccaugugaagagu

SEQ ID NO: 2268059 - RNA, 19 nt, Artificial Sequence
  Description of Artificial Sequence: Synthetic oligonucleotide
  Antisense strand to SEQ ID NO: 2268058
acucuucacauggagaccc

SEQ ID NO: 2268060 - RNA, 19 nt, Artificial Sequence
  Description of Artificial Sequence: Synthetic oligonucleotide
  Sense strand starting at position 3448 of SEQ ID NO: 1884468
gccaguucuccucagccuu

SEQ ID NO: 2268061 - RNA, 19 nt, Artificial Sequence
  Description of Artificial Sequence: Synthetic oligonucleotide
  Antisense strand to SEQ ID NO: 2268060
aaggcugaggagaacuggc

SEQ ID NO: 2268062 - RNA, 19 nt, Artificial Sequence
  Description of Artificial Sequence: Synthetic oligonucleotide
  Sense strand starting at position 3570 of SEQ ID NO: 1884468
gugauauacucucagggua

SEQ ID NO: 2268063 - RNA, 19 nt, Artificial Sequence
  Description of Artificial Sequence: Synthetic oligonucleotide
  Antisense strand to SEQ ID NO: 2268062
uacccugagaguauaucac

SEQ ID NO: 2268064 - RNA, 19 nt, Artificial Sequence
  Description of Artificial Sequence: Synthetic oligonucleotide
  Sense strand starting at position 3572 of SEQ ID NO: 1884468
gauauacucucaggguaga

SEQ ID NO: 2268065 - RNA, 19 nt, Artificial Sequence
  Description of Artificial Sequence: Synthetic oligonucleotide
  Antisense strand to SEQ ID NO: 2268064
ucuacccugagaguauauc

SEQ ID NO: 2268066 - RNA, 19 nt, Artificial Sequence
  Description of Artificial Sequence: Synthetic oligonucleotide
  Sense strand starting at position 3617 of SEQ ID NO: 1884468
cagaacauguugucugcaa

SEQ ID NO: 2268067 - RNA, 19 nt, Artificial Sequence
  Description of Artificial Sequence: Synthetic oligonucleotide
  Antisense strand to SEQ ID NO: 2268066
uugcagacaacauguucug

SEQ ID NO: 2268068 - RNA, 19 nt, Artificial Sequence
  Description of Artificial Sequence: Synthetic oligonucleotide
  Sense strand starting at position 3619 of SEQ ID NO: 1884468
gaacauguugucugcaacu

SEQ ID NO: 2268069 - RNA, 19 nt, Artificial Sequence
  Description of Artificial Sequence: Synthetic oligonucleotide
  Antisense strand to SEQ ID NO: 2268068
aguugcagacaacauguuc

SEQ ID NO: 2268070 - RNA, 19 nt, Artificial Sequence
  Description of Artificial Sequence: Synthetic oligonucleotide
  Sense strand starting at position 3621 of SEQ ID NO: 1884468
acauguugucugcaacucu

SEQ ID NO: 2268071 - RNA, 19 nt, Artificial Sequence
  Description of Artificial Sequence: Synthetic oligonucleotide
  Antisense strand to SEQ ID NO: 2268070
agaguugcagacaacaugu

SEQ ID NO: 2268072 - RNA, 19 nt, Artificial Sequence
  Description of Artificial Sequence: Synthetic oligonucleotide
  Sense strand starting at position 3802 of SEQ ID NO: 1884468
ucuuuauggguuugcaaac

SEQ ID NO: 2268073 - RNA, 19 nt, Artificial Sequence
  Description of Artificial Sequence: Synthetic oligonucleotide
  Antisense strand to SEQ ID NO: 2268072
guuugcaaacccauaaaga

SEQ ID NO: 2268074 - RNA, 19 nt, Artificial Sequence
  Description of Artificial Sequence: Synthetic oligonucleotide
  Sense strand starting at position 3853 of SEQ ID NO: 1884468
aaagcauucuugucacguu

SEQ ID NO: 2268075 - RNA, 19 nt, Artificial Sequence
  Description of Artificial Sequence: Synthetic oligonucleotide
  Antisense strand to SEQ ID NO: 2268074
aacgugacaagaaugcuuu

SEQ ID NO: 2268076 - RNA, 19 nt, Artificial Sequence
  Description of Artificial Sequence: Synthetic oligonucleotide
  Sense strand starting at position 3860 of SEQ ID NO: 1884468
ucuugucacguuuauuaua

SEQ ID NO: 2268077 - RNA, 19 nt, Artificial Sequence
  Description of Artificial Sequence: Synthetic oligonucleotide
  Antisense strand to SEQ ID NO: 2268076
uauaauaaacgugacaaga

SEQ ID NO: 2268078 - RNA, 19 nt, Artificial Sequence
  Description of Artificial Sequence: Synthetic oligonucleotide
  Sense strand starting at position 3890 of SEQ ID NO: 1884468
acaagaugcuuugugccaa

SEQ ID NO: 2268079 - RNA, 19 nt, Artificial Sequence
  Description of Artificial Sequence: Synthetic oligonucleotide
  Antisense strand to SEQ ID NO: 2268078
uuggcacaaagcaucuugu

SEQ ID NO: 2268080 - RNA, 19 nt, Artificial Sequence
  Description of Artificial Sequence: Synthetic oligonucleotide
  Sense strand starting at position 3894 of SEQ ID NO: 1884468
gaugcuuugugccaaggga

SEQ ID NO: 2268081 - RNA, 19 nt, Artificial Sequence
  Description of Artificial Sequence: Synthetic oligonucleotide
  Antisense strand to SEQ ID NO: 2268080
ucccuuggcacaaagcauc

SEQ ID NO: 2268082 - RNA, 19 nt, Artificial Sequence
  Description of Artificial Sequence: Synthetic oligonucleotide
  Sense strand starting at position 3973 of SEQ ID NO: 1884468
guauaagcauuagcuagaa

SEQ ID NO: 2268083 - RNA, 19 nt, Artificial Sequence
  Description of Artificial Sequence: Synthetic oligonucleotide
  Antisense strand to SEQ ID NO: 2268082
uucuagcuaaugcuuauac

SEQ ID NO: 2268084 - RNA, 19 nt, Artificial Sequence
  Description of Artificial Sequence: Synthetic oligonucleotide
  Sense strand starting at position 144 of SEQ ID NO: 1884469
gcaggagucuugccuccaa

SEQ ID NO: 2268085 - RNA, 19 nt, Artificial Sequence
  Description of Artificial Sequence: Synthetic oligonucleotide
  Antisense strand to SEQ ID NO: 2268084
uuggaggcaagacuccugc

SEQ ID NO: 2268086 - RNA, 19 nt, Artificial Sequence
  Description of Artificial Sequence: Synthetic oligonucleotide
  Sense strand starting at position 148 of SEQ ID NO: 1884469
gagucuugccuccaagagc

SEQ ID NO: 2268087 - RNA, 19 nt, Artificial Sequence
  Description of Artificial Sequence: Synthetic oligonucleotide
  Antisense strand to SEQ ID NO: 2268086
gcucuuggaggcaagacuc

SEQ ID NO: 2268088 - RNA, 19 nt, Artificial Sequence
  Description of Artificial Sequence: Synthetic oligonucleotide
  Sense strand starting at position 451 of SEQ ID NO: 1884469
caguaacacgguugagaga

SEQ ID NO: 2268089 - RNA, 19 nt, Artificial Sequence
  Description of Artificial Sequence: Synthetic oligonucleotide
  Antisense strand to SEQ ID NO: 2268088
ucucucaaccguguuacug

SEQ ID NO: 2268090 - RNA, 19 nt, Artificial Sequence
  Description of Artificial Sequence: Synthetic oligonucleotide
  Sense strand starting at position 468 of SEQ ID NO: 1884469
gauuuacuccuguggccuu

SEQ ID NO: 2268091 - RNA, 19 nt, Artificial Sequence
  Description of Artificial Sequence: Synthetic oligonucleotide
  Antisense strand to SEQ ID NO: 2268090
aaggccacaggaguaaauc

SEQ ID NO: 2268092 - RNA, 19 nt, Artificial Sequence
  Description of Artificial Sequence: Synthetic oligonucleotide
  Sense strand starting at position 483 of SEQ ID NO: 1884469
ccuugagagggcugaacaa

SEQ ID NO: 2268093 - RNA, 19 nt, Artificial Sequence
  Description of Artificial Sequence: Synthetic oligonucleotide
  Antisense strand to SEQ ID NO: 2268092
uuguucagcccucucaagg

SEQ ID NO: 2268094 - RNA, 19 nt, Artificial Sequence
  Description of Artificial Sequence: Synthetic oligonucleotide
  Sense strand starting at position 502 of SEQ ID NO: 1884469
auggaagcaucucuagguu

SEQ ID NO: 2268095 - RNA, 19 nt, Artificial Sequence
  Description of Artificial Sequence: Synthetic oligonucleotide
  Antisense strand to SEQ ID NO: 2268094
aaccuagagaugcuuccau

SEQ ID NO: 2268096 - RNA, 19 nt, Artificial Sequence
  Description of Artificial Sequence: Synthetic oligonucleotide
  Sense strand starting at position 505 of SEQ ID NO: 1884469
gaagcaucucuagguugca

SEQ ID NO: 2268097 - RNA, 19 nt, Artificial Sequence
  Description of Artificial Sequence: Synthetic oligonucleotide
  Antisense strand to SEQ ID NO: 2268096
ugcaaccuagagaugcuuc

SEQ ID NO: 2268098 - RNA, 19 nt, Artificial Sequence
  Description of Artificial Sequence: Synthetic oligonucleotide
  Sense strand starting at position 554 of SEQ ID NO: 1884469
ccuguaacuucugucauuc

SEQ ID NO: 2268099 - RNA, 19 nt, Artificial Sequence
  Description of Artificial Sequence: Synthetic oligonucleotide
  Antisense strand to SEQ ID NO: 2268098
gaaugacagaaguuacagg

SEQ ID NO: 2268100 - RNA, 19 nt, Artificial Sequence
  Description of Artificial Sequence: Synthetic oligonucleotide
  Sense strand starting at position 614 of SEQ ID NO: 1884469
gggaauuccucuccucuua

SEQ ID NO: 2268101 - RNA, 19 nt, Artificial Sequence
  Description of Artificial Sequence: Synthetic oligonucleotide
  Antisense strand to SEQ ID NO: 2268100
uaagaggagaggaauuccc

SEQ ID NO: 2268102 - RNA, 19 nt, Artificial Sequence
  Description of Artificial Sequence: Synthetic oligonucleotide
  Sense strand starting at position 647 of SEQ ID NO: 1884469
agcuaucucgcuccagcua

SEQ ID NO: 2268103 - RNA, 19 nt, Artificial Sequence
  Description of Artificial Sequence: Synthetic oligonucleotide
  Antisense strand to SEQ ID NO: 2268102
uagcuggagcgagauagcu

SEQ ID NO: 2268104 - RNA, 19 nt, Artificial Sequence
  Description of Artificial Sequence: Synthetic oligonucleotide
  Sense strand starting at position 658 of SEQ ID NO: 1884469
uccagcuaugccuaagaaa

SEQ ID NO: 2268105 - RNA, 19 nt, Artificial Sequence
  Description of Artificial Sequence: Synthetic oligonucleotide
  Antisense strand to SEQ ID NO: 2268104
uuucuuaggcauagcugga

SEQ ID NO: 2268106 - RNA, 19 nt, Artificial Sequence
  Description of Artificial Sequence: Synthetic oligonucleotide
  Sense strand starting at position 677 of SEQ ID NO: 1884469
ucugucuuaucacugacau

SEQ ID NO: 2268107 - RNA, 19 nt, Artificial Sequence
  Description of Artificial Sequence: Synthetic oligonucleotide
  Antisense strand to SEQ ID NO: 2268106
augucagugauaagacaga

SEQ ID NO: 2268108 - RNA, 19 nt, Artificial Sequence
  Description of Artificial Sequence: Synthetic oligonucleotide
  Sense strand starting at position 678 of SEQ ID NO: 1884469
cugucuuaucacugacaug

SEQ ID NO: 2268109 - RNA, 19 nt, Artificial Sequence
  Description of Artificial Sequence: Synthetic oligonucleotide
  Antisense strand to SEQ ID NO: 2268108
caugucagugauaagacag

SEQ ID NO: 2268110 - RNA, 19 nt, Artificial Sequence
  Description of Artificial Sequence: Synthetic oligonucleotide
  Sense strand starting at position 1442 of SEQ ID NO: 1884469
ggcagagucuucucuacuc

SEQ ID NO: 2268111 - RNA, 19 nt, Artificial Sequence
  Description of Artificial Sequence: Synthetic oligonucleotide
  Antisense strand to SEQ ID NO: 2268110
gaguagagaagacucugcc

SEQ ID NO: 2268112 - RNA, 19 nt, Artificial Sequence
  Description of Artificial Sequence: Synthetic oligonucleotide
  Sense strand starting at position 1454 of SEQ ID NO: 1884469
ucuacucugugguuccaua

SEQ ID NO: 2268113 - RNA, 19 nt, Artificial Sequence
  Description of Artificial Sequence: Synthetic oligonucleotide
  Antisense strand to SEQ ID NO: 2268112
uauggaaccacagaguaga

SEQ ID NO: 2268114 - RNA, 19 nt, Artificial Sequence
  Description of Artificial Sequence: Synthetic oligonucleotide
  Sense strand starting at position 1603 of SEQ ID NO: 1884469
ggguauaggugcucuguga

SEQ ID NO: 2268115 - RNA, 19 nt, Artificial Sequence
  Description of Artificial Sequence: Synthetic oligonucleotide
  Antisense strand to SEQ ID NO: 2268114
ucacagagcaccuauaccc

SEQ ID NO: 2268116 - RNA, 19 nt, Artificial Sequence
  Description of Artificial Sequence: Synthetic oligonucleotide
  Sense strand starting at position 1607 of SEQ ID NO: 1884469
auaggugcucugugagguu

SEQ ID NO: 2268117 - RNA, 19 nt, Artificial Sequence
  Description of Artificial Sequence: Synthetic oligonucleotide
  Antisense strand to SEQ ID NO: 2268116
aaccucacagagcaccuau

SEQ ID NO: 2268118 - RNA, 19 nt, Artificial Sequence
  Description of Artificial Sequence: Synthetic oligonucleotide
  Sense strand starting at position 1616 of SEQ ID NO: 1884469
cugugagguuucuuaauaa

SEQ ID NO: 2268119 - RNA, 19 nt, Artificial Sequence
  Description of Artificial Sequence: Synthetic oligonucleotide
  Antisense strand to SEQ ID NO: 2268118
uuauuaagaaaccucacag

SEQ ID NO: 2268120 - RNA, 19 nt, Artificial Sequence
  Description of Artificial Sequence: Synthetic oligonucleotide
  Sense strand starting at position 1620 of SEQ ID NO: 1884469
gagguuucuuaauaaagag

SEQ ID NO: 2268121 - RNA, 19 nt, Artificial Sequence
  Description of Artificial Sequence: Synthetic oligonucleotide
  Antisense strand to SEQ ID NO: 2268120
cucuuuauuaagaaaccuc

SEQ ID NO: 2268122 - RNA, 19 nt, Artificial Sequence
  Description of Artificial Sequence: Synthetic oligonucleotide
  Sense strand starting at position 1654 of SEQ ID NO: 1884469
caguuugggugguugagau

SEQ ID NO: 2268123 - RNA, 19 nt, Artificial Sequence
  Description of Artificial Sequence: Synthetic oligonucleotide
  Antisense strand to SEQ ID NO: 2268122
aucucaaccacccaaacug

SEQ ID NO: 2268124 - RNA, 19 nt, Artificial Sequence
  Description of Artificial Sequence: Synthetic oligonucleotide
  Sense strand starting at position 1694 of SEQ ID NO: 1884469
uccugauaccagugaccaa

SEQ ID NO: 2268125 - RNA, 19 nt, Artificial Sequence
  Description of Artificial Sequence: Synthetic oligonucleotide
  Antisense strand to SEQ ID NO: 2268124
uuggucacugguaucagga

SEQ ID NO: 2268126 - RNA, 19 nt, Artificial Sequence
  Description of Artificial Sequence: Synthetic oligonucleotide
  Sense strand starting at position 2484 of SEQ ID NO: 1884469
ggguuauggaccugcgaga

SEQ ID NO: 2268127 - RNA, 19 nt, Artificial Sequence
  Description of Artificial Sequence: Synthetic oligonucleotide
  Antisense strand to SEQ ID NO: 2268126
ucucgcagguccauaaccc

SEQ ID NO: 2268128 - RNA, 19 nt, Artificial Sequence
  Description of Artificial Sequence: Synthetic oligonucleotide
  Sense strand starting at position 2764 of SEQ ID NO: 1884469
gcgagcuuuggcagugaua

SEQ ID NO: 2268129 - RNA, 19 nt, Artificial Sequence
  Description of Artificial Sequence: Synthetic oligonucleotide
  Antisense strand to SEQ ID NO: 2268128
uaucacugccaaagcucgc

SEQ ID NO: 2268130 - RNA, 19 nt, Artificial Sequence
  Description of Artificial Sequence: Synthetic oligonucleotide
  Sense strand starting at position 2974 of SEQ ID NO: 1884469
cauguccuccaagguagaa

SEQ ID NO: 2268131 - RNA, 19 nt, Artificial Sequence
  Description of Artificial Sequence: Synthetic oligonucleotide
  Antisense strand to SEQ ID NO: 2268130
uucuaccuuggaggacaug

SEQ ID NO: 2268132 - RNA, 19 nt, Artificial Sequence
  Description of Artificial Sequence: Synthetic oligonucleotide
  Sense strand starting at position 3004 of SEQ ID NO: 1884469
agugaaucgcgcagaguug

SEQ ID NO: 2268133 - RNA, 19 nt, Artificial Sequence
  Description of Artificial Sequence: Synthetic oligonucleotide
  Antisense strand to SEQ ID NO: 2268132
caacucugcgcgauucacu

SEQ ID NO: 2268134 - RNA, 19 nt, Artificial Sequence
  Description of Artificial Sequence: Synthetic oligonucleotide
  Sense strand starting at position 3005 of SEQ ID NO: 1884469
gugaaucgcgcagaguuga

SEQ ID NO: 2268135 - RNA, 19 nt, Artificial Sequence
  Description of Artificial Sequence: Synthetic oligonucleotide
  Antisense strand to SEQ ID NO: 2268134
ucaacucugcgcgauucac

SEQ ID NO: 2268136 - RNA, 19 nt, Artificial Sequence
  Description of Artificial Sequence: Synthetic oligonucleotide
  Sense strand starting at position 3098 of SEQ ID NO: 1884469
uuaccuagagcuggagaaa

SEQ ID NO: 2268137 - RNA, 19 nt, Artificial Sequence
  Description of Artificial Sequence: Synthetic oligonucleotide
  Antisense strand to SEQ ID NO: 2268136
uuucuccagcucuagguaa

SEQ ID NO: 2268138 - RNA, 19 nt, Artificial Sequence
  Description of Artificial Sequence: Synthetic oligonucleotide
  Sense strand starting at position 3126 of SEQ ID NO: 1884469
gaggaagcaugccuaaguu

SEQ ID NO: 2268139 - RNA, 19 nt, Artificial Sequence
  Description of Artificial Sequence: Synthetic oligonucleotide
  Antisense strand to SEQ ID NO: 2268138
aacuuaggcaugcuuccuc

SEQ ID NO: 2268140 - RNA, 19 nt, Artificial Sequence
  Description of Artificial Sequence: Synthetic oligonucleotide
  Sense strand starting at position 3332 of SEQ ID NO: 1884469
cgcccaccuuuguuacaaa

SEQ ID NO: 2268141 - RNA, 19 nt, Artificial Sequence
  Description of Artificial Sequence: Synthetic oligonucleotide
  Antisense strand to SEQ ID NO: 2268140
uuuguaacaaaggugggcg

SEQ ID NO: 2268142 - RNA, 19 nt, Artificial Sequence
  Description of Artificial Sequence: Synthetic oligonucleotide
  Sense strand starting at position 3358 of SEQ ID NO: 1884469
cuugcuaauuauggaauuu

SEQ ID NO: 2268143 - RNA, 19 nt, Artificial Sequence
  Description of Artificial Sequence: Synthetic oligonucleotide
  Antisense strand to SEQ ID NO: 2268142
aaauuccauaauuagcaag

SEQ ID NO: 2268144 - RNA, 19 nt, Artificial Sequence
  Description of Artificial Sequence: Synthetic oligonucleotide
  Sense strand starting at position 3407 of SEQ ID NO: 1884469
ugguaaaucgacuauccaa

SEQ ID NO: 2268145 - RNA, 19 nt, Artificial Sequence
  Description of Artificial Sequence: Synthetic oligonucleotide
  Antisense strand to SEQ ID NO: 2268144
uuggauagucgauuuacca

SEQ ID NO: 2268146 - RNA, 19 nt, Artificial Sequence
  Description of Artificial Sequence: Synthetic oligonucleotide
  Sense strand starting at position 3446 of SEQ ID NO: 1884469
uuuaguauaucucuugauc

SEQ ID NO: 2268147 - RNA, 19 nt, Artificial Sequence
  Description of Artificial Sequence: Synthetic oligonucleotide
  Antisense strand to SEQ ID NO: 2268146
gaucaagagauauacuaaa

SEQ ID NO: 2268148 - RNA, 19 nt, Artificial Sequence
  Description of Artificial Sequence: Synthetic oligonucleotide
  Sense strand starting at position 3449 of SEQ ID NO: 1884469
aguauaucucuugaucauu

SEQ ID NO: 2268149 - RNA, 19 nt, Artificial Sequence
  Description of Artificial Sequence: Synthetic oligonucleotide
  Antisense strand to SEQ ID NO: 2268148
aaugaucaagagauauacu

SEQ ID NO: 2268150 - RNA, 19 nt, Artificial Sequence
  Description of Artificial Sequence: Synthetic oligonucleotide
  Sense strand starting at position 3588 of SEQ ID NO: 1884469
auguccuagugguugcaau

SEQ ID NO: 2268151 - RNA, 19 nt, Artificial Sequence
  Description of Artificial Sequence: Synthetic oligonucleotide
  Antisense strand to SEQ ID NO: 2268150
auugcaaccacuaggacau

SEQ ID NO: 2268152 - RNA, 19 nt, Artificial Sequence
  Description of Artificial Sequence: Synthetic oligonucleotide
  Sense strand starting at position 3589 of SEQ ID NO: 1884469
uguccuagugguugcaaua

SEQ ID NO: 2268153 - RNA, 19 nt, Artificial Sequence
  Description of Artificial Sequence: Synthetic oligonucleotide
  Antisense strand to SEQ ID NO: 2268152
uauugcaaccacuaggaca

SEQ ID NO: 2268154 - RNA, 19 nt, Artificial Sequence
  Description of Artificial Sequence: Synthetic oligonucleotide
  Sense strand starting at position 3656 of SEQ ID NO: 1884469
auugcuucuugugugauua

SEQ ID NO: 2268155 - RNA, 19 nt, Artificial Sequence
  Description of Artificial Sequence: Synthetic oligonucleotide
  Antisense strand to SEQ ID NO: 2268154
uaaucacacaagaagcaau

SEQ ID NO: 2268156 - RNA, 19 nt, Artificial Sequence
  Description of Artificial Sequence: Synthetic oligonucleotide
  Sense strand starting at position 3844 of SEQ ID NO: 1884469
cuuugauguccuuagggac

SEQ ID NO: 2268157 - RNA, 19 nt, Artificial Sequence
  Description of Artificial Sequence: Synthetic oligonucleotide
  Antisense strand to SEQ ID NO: 2268156
gucccuaaggacaucaaag

SEQ ID NO: 2268158 - RNA, 19 nt, Artificial Sequence
  Description of Artificial Sequence: Synthetic oligonucleotide
  Sense strand starting at position 3929 of SEQ ID NO: 1884469
uagggauguucucuguggu

SEQ ID NO: 2268159 - RNA, 19 nt, Artificial Sequence
  Description of Artificial Sequence: Synthetic oligonucleotide
  Antisense strand to SEQ ID NO: 2268158
accacagagaacaucccua

SEQ ID NO: 2268160 - RNA, 19 nt, Artificial Sequence
  Description of Artificial Sequence: Synthetic oligonucleotide
  Sense strand starting at position 3930 of SEQ ID NO: 1884469
agggauguucucuguggua

SEQ ID NO: 2268161 - RNA, 19 nt, Artificial Sequence
  Description of Artificial Sequence: Synthetic oligonucleotide
  Antisense strand to SEQ ID NO: 2268160
uaccacagagaacaucccu

SEQ ID NO: 2268162 - RNA, 19 nt, Artificial Sequence
  Description of Artificial Sequence: Synthetic oligonucleotide
  Sense strand starting at position 3932 of SEQ ID NO: 1884469
ggauguucucugugguagu

SEQ ID NO: 2268163 - RNA, 19 nt, Artificial Sequence
  Description of Artificial Sequence: Synthetic oligonucleotide
  Antisense strand to SEQ ID NO: 2268162
acuaccacagagaacaucc

SEQ ID NO: 2268164 - RNA, 19 nt, Artificial Sequence
  Description of Artificial Sequence: Synthetic oligonucleotide
  Sense strand starting at position 47 of SEQ ID NO: 1884470
ugggaaugcccuuauuguu

SEQ ID NO: 2268165 - RNA, 19 nt, Artificial Sequence
  Description of Artificial Sequence: Synthetic oligonucleotide
  Antisense strand to SEQ ID NO: 2268164
aacaauaagggcauuccca

SEQ ID NO: 2268166 - RNA, 19 nt, Artificial Sequence
  Description of Artificial Sequence: Synthetic oligonucleotide
  Sense strand starting at position 345 of SEQ ID NO: 1884470
uuagcuauugcuugugcua

SEQ ID NO: 2268167 - RNA, 19 nt, Artificial Sequence
  Description of Artificial Sequence: Synthetic oligonucleotide
  Antisense strand to SEQ ID NO: 2268166
uagcacaagcaauagcuaa

SEQ ID NO: 2268168 - RNA, 19 nt, Artificial Sequence
  Description of Artificial Sequence: Synthetic oligonucleotide
  Sense strand starting at position 348 of SEQ ID NO: 1884470
gcuauugcuugugcuaaca

SEQ ID NO: 2268169 - RNA, 19 nt, Artificial Sequence
  Description of Artificial Sequence: Synthetic oligonucleotide
  Antisense strand to SEQ ID NO: 2268168
uguuagcacaagcaauagc

SEQ ID NO: 2268170 - RNA, 19 nt, Artificial Sequence
  Description of Artificial Sequence: Synthetic oligonucleotide
  Sense strand starting at position 360 of SEQ ID NO: 1884470
gcuaacauugcagagugau

SEQ ID NO: 2268171 - RNA, 19 nt, Artificial Sequence
  Description of Artificial Sequence: Synthetic oligonucleotide
  Antisense strand to SEQ ID NO: 2268170
aucacucugcaauguuagc

SEQ ID NO: 2268172 - RNA, 19 nt, Artificial Sequence
  Description of Artificial Sequence: Synthetic oligonucleotide
  Sense strand starting at position 488 of SEQ ID NO: 1884470
uaguguuaagguuagcauu

SEQ ID NO: 2268173 - RNA, 19 nt, Artificial Sequence
  Description of Artificial Sequence: Synthetic oligonucleotide
  Antisense strand to SEQ ID NO: 2268172
aaugcuaaccuuaacacua

SEQ ID NO: 2268174 - RNA, 19 nt, Artificial Sequence
  Description of Artificial Sequence: Synthetic oligonucleotide
  Sense strand starting at position 579 of SEQ ID NO: 1884470
uccugcaacccuuguauga

SEQ ID NO: 2268175 - RNA, 19 nt, Artificial Sequence
  Description of Artificial Sequence: Synthetic oligonucleotide
  Antisense strand to SEQ ID NO: 2268174
ucauacaaggguugcagga

SEQ ID NO: 2268176 - RNA, 19 nt, Artificial Sequence
  Description of Artificial Sequence: Synthetic oligonucleotide
  Sense strand starting at position 583 of SEQ ID NO: 1884470
gcaacccuuguaugauaca

SEQ ID NO: 2268177 - RNA, 19 nt, Artificial Sequence
  Description of Artificial Sequence: Synthetic oligonucleotide
  Antisense strand to SEQ ID NO: 2268176
uguaucauacaaggguugc

SEQ ID NO: 2268178 - RNA, 19 nt, Artificial Sequence
  Description of Artificial Sequence: Synthetic oligonucleotide
  Sense strand starting at position 701 of SEQ ID NO: 1884470
agguuccaggucugaauaa

SEQ ID NO: 2268179 - RNA, 19 nt, Artificial Sequence
  Description of Artificial Sequence: Synthetic oligonucleotide
  Antisense strand to SEQ ID NO: 2268178
uuauucagaccuggaaccu

SEQ ID NO: 2268180 - RNA, 19 nt, Artificial Sequence
  Description of Artificial Sequence: Synthetic oligonucleotide
  Sense strand starting at position 1011 of SEQ ID NO: 1884470
ugcugugcauuguuaggau

SEQ ID NO: 2268181 - RNA, 19 nt, Artificial Sequence
  Description of Artificial Sequence: Synthetic oligonucleotide
  Antisense strand to SEQ ID NO: 2268180
auccuaacaaugcacagca

SEQ ID NO: 2268182 - RNA, 19 nt, Artificial Sequence
  Description of Artificial Sequence: Synthetic oligonucleotide
  Sense strand starting at position 1141 of SEQ ID NO: 1884470
guacaaauguuucugcaac

SEQ ID NO: 2268183 - RNA, 19 nt, Artificial Sequence
  Description of Artificial Sequence: Synthetic oligonucleotide
  Antisense strand to SEQ ID NO: 2268182
guugcagaaacauuuguac

SEQ ID NO: 2268184 - RNA, 19 nt, Artificial Sequence
  Description of Artificial Sequence: Synthetic oligonucleotide
  Sense strand starting at position 1283 of SEQ ID NO: 1884470
augagauaauagcagaagu

SEQ ID NO: 2268185 - RNA, 19 nt, Artificial Sequence
  Description of Artificial Sequence: Synthetic oligonucleotide
  Antisense strand to SEQ ID NO: 2268184
acuucugcuauuaucucau

SEQ ID NO: 2268186 - RNA, 19 nt, Artificial Sequence
  Description of Artificial Sequence: Synthetic oligonucleotide
  Sense strand starting at position 1432 of SEQ ID NO: 1884470
augaguuaugcauaauaac

SEQ ID NO: 2268187 - RNA, 19 nt, Artificial Sequence
  Description of Artificial Sequence: Synthetic oligonucleotide
  Antisense strand to SEQ ID NO: 2268186
guuauuaugcauaacucau

SEQ ID NO: 2268188 - RNA, 19 nt, Artificial Sequence
  Description of Artificial Sequence: Synthetic oligonucleotide
  Sense strand starting at position 1469 of SEQ ID NO: 1884470
gagguuagugucugagaau

SEQ ID NO: 2268189 - RNA, 19 nt, Artificial Sequence
  Description of Artificial Sequence: Synthetic oligonucleotide
  Antisense strand to SEQ ID NO: 2268188
auucucagacacuaaccuc

SEQ ID NO: 2268190 - RNA, 19 nt, Artificial Sequence
  Description of Artificial Sequence: Synthetic oligonucleotide
  Sense strand starting at position 1683 of SEQ ID NO: 1884470
cccguuugccuugucaauu

SEQ ID NO: 2268191 - RNA, 19 nt, Artificial Sequence
  Description of Artificial Sequence: Synthetic oligonucleotide
  Antisense strand to SEQ ID NO: 2268190
aauugacaaggcaaacggg

SEQ ID NO: 2268192 - RNA, 19 nt, Artificial Sequence
  Description of Artificial Sequence: Synthetic oligonucleotide
  Sense strand starting at position 1684 of SEQ ID NO: 1884470
ccguuugccuugucaauuu

SEQ ID NO: 2268193 - RNA, 19 nt, Artificial Sequence
  Description of Artificial Sequence: Synthetic oligonucleotide
  Antisense strand to SEQ ID NO: 2268192
aaauugacaaggcaaacgg

SEQ ID NO: 2268194 - RNA, 19 nt, Artificial Sequence
  Description of Artificial Sequence: Synthetic oligonucleotide
  Sense strand starting at position 1740 of SEQ ID NO: 1884470
cgucgaagucccguguuca

SEQ ID NO: 2268195 - RNA, 19 nt, Artificial Sequence
  Description of Artificial Sequence: Synthetic oligonucleotide
  Antisense strand to SEQ ID NO: 2268194
ugaacacgggacuucgacg

SEQ ID NO: 2268196 - RNA, 19 nt, Artificial Sequence
  Description of Artificial Sequence: Synthetic oligonucleotide
  Sense strand starting at position 1796 of SEQ ID NO: 1884470
agucaccacuuguugagaa

SEQ ID NO: 2268197 - RNA, 19 nt, Artificial Sequence
  Description of Artificial Sequence: Synthetic oligonucleotide
  Antisense strand to SEQ ID NO: 2268196
uucucaacaaguggugacu

SEQ ID NO: 2268198 - RNA, 19 nt, Artificial Sequence
  Description of Artificial Sequence: Synthetic oligonucleotide
  Sense strand starting at position 2047 of SEQ ID NO: 1884470
gcuugauucgcagcaggcu

SEQ ID NO: 2268199 - RNA, 19 nt, Artificial Sequence
  Description of Artificial Sequence: Synthetic oligonucleotide
  Antisense strand to SEQ ID NO: 2268198
agccugcugcgaaucaagc

SEQ ID NO: 2268200 - RNA, 19 nt, Artificial Sequence
  Description of Artificial Sequence: Synthetic oligonucleotide
  Sense strand starting at position 2074 of SEQ ID NO: 1884470
ugcauucuuaggugcuaga

SEQ ID NO: 2268201 - RNA, 19 nt, Artificial Sequence
  Description of Artificial Sequence: Synthetic oligonucleotide
  Antisense strand to SEQ ID NO: 2268200
ucuagcaccuaagaaugca

SEQ ID NO: 2268202 - RNA, 19 nt, Artificial Sequence
  Description of Artificial Sequence: Synthetic oligonucleotide
  Sense strand starting at position 2085 of SEQ ID NO: 1884470
gugcuagacuucucaauag

SEQ ID NO: 2268203 - RNA, 19 nt, Artificial Sequence
  Description of Artificial Sequence: Synthetic oligonucleotide
  Antisense strand to SEQ ID NO: 2268202
cuauugagaagucuagcac

SEQ ID NO: 2268204 - RNA, 19 nt, Artificial Sequence
  Description of Artificial Sequence: Synthetic oligonucleotide
  Sense strand starting at position 2230 of SEQ ID NO: 1884470
agcgaaaugcugaguuggu

SEQ ID NO: 2268205 - RNA, 19 nt, Artificial Sequence
  Description of Artificial Sequence: Synthetic oligonucleotide
  Antisense strand to SEQ ID NO: 2268204
accaacucagcauuucgcu

SEQ ID NO: 2268206 - RNA, 19 nt, Artificial Sequence
  Description of Artificial Sequence: Synthetic oligonucleotide
  Sense strand starting at position 2231 of SEQ ID NO: 1884470
gcgaaaugcugaguugguc

SEQ ID NO: 2268207 - RNA, 19 nt, Artificial Sequence
  Description of Artificial Sequence: Synthetic oligonucleotide
  Antisense strand to SEQ ID NO: 2268206
gaccaacucagcauuucgc

SEQ ID NO: 2268208 - RNA, 19 nt, Artificial Sequence
  Description of Artificial Sequence: Synthetic oligonucleotide
  Sense strand starting at position 2287 of SEQ ID NO: 1884470
cuguauuuguccugauuag

SEQ ID NO: 2268209 - RNA, 19 nt, Artificial Sequence
  Description of Artificial Sequence: Synthetic oligonucleotide
  Antisense strand to SEQ ID NO: 2268208
cuaaucaggacaaauacag

SEQ ID NO: 2268210 - RNA, 19 nt, Artificial Sequence
  Description of Artificial Sequence: Synthetic oligonucleotide
  Sense strand starting at position 2298 of SEQ ID NO: 1884470
cugauuagccagcaacuua

SEQ ID NO: 2268211 - RNA, 19 nt, Artificial Sequence
  Description of Artificial Sequence: Synthetic oligonucleotide
  Antisense strand to SEQ ID NO: 2268210
uaaguugcuggcuaaucag

SEQ ID NO: 2268212 - RNA, 19 nt, Artificial Sequence
  Description of Artificial Sequence: Synthetic oligonucleotide
  Sense strand starting at position 2411 of SEQ ID NO: 1884470
ggaacagacuaugacuuaa

SEQ ID NO: 2268213 - RNA, 19 nt, Artificial Sequence
  Description of Artificial Sequence: Synthetic oligonucleotide
  Antisense strand to SEQ ID NO: 2268212
uuaagucauagucuguucc

SEQ ID NO: 2268214 - RNA, 19 nt, Artificial Sequence
  Description of Artificial Sequence: Synthetic oligonucleotide
  Sense strand starting at position 2568 of SEQ ID NO: 1884470
uuguuucugagagaaguua

SEQ ID NO: 2268215 - RNA, 19 nt, Artificial Sequence
  Description of Artificial Sequence: Synthetic oligonucleotide
  Antisense strand to SEQ ID NO: 2268214
uaacuucucucagaaacaa

SEQ ID NO: 2268216 - RNA, 19 nt, Artificial Sequence
  Description of Artificial Sequence: Synthetic oligonucleotide
  Sense strand starting at position 2823 of SEQ ID NO: 1884470
auaucauuggacugaguga

SEQ ID NO: 2268217 - RNA, 19 nt, Artificial Sequence
  Description of Artificial Sequence: Synthetic oligonucleotide
  Antisense strand to SEQ ID NO: 2268216
ucacucaguccaaugauau

SEQ ID NO: 2268218 - RNA, 19 nt, Artificial Sequence
  Description of Artificial Sequence: Synthetic oligonucleotide
  Sense strand starting at position 3212 of SEQ ID NO: 1884470
auuggauacaccgguuauu

SEQ ID NO: 2268219 - RNA, 19 nt, Artificial Sequence
  Description of Artificial Sequence: Synthetic oligonucleotide
  Antisense strand to SEQ ID NO: 2268218
aauaaccgguguauccaau

SEQ ID NO: 2268220 - RNA, 19 nt, Artificial Sequence
  Description of Artificial Sequence: Synthetic oligonucleotide
  Sense strand starting at position 3237 of SEQ ID NO: 1884470
aggcuuuggcuggaauguu

SEQ ID NO: 2268221 - RNA, 19 nt, Artificial Sequence
  Description of Artificial Sequence: Synthetic oligonucleotide
  Antisense strand to SEQ ID NO: 2268220
aacauuccagccaaagccu

SEQ ID NO: 2268222 - RNA, 19 nt, Artificial Sequence
  Description of Artificial Sequence: Synthetic oligonucleotide
  Sense strand starting at position 3285 of SEQ ID NO: 1884470
aggaauugaggcugacuuu

SEQ ID NO: 2268223 - RNA, 19 nt, Artificial Sequence
  Description of Artificial Sequence: Synthetic oligonucleotide
  Antisense strand to SEQ ID NO: 2268222
aaagucagccucaauuccu

SEQ ID NO: 2268224 - RNA, 19 nt, Artificial Sequence
  Description of Artificial Sequence: Synthetic oligonucleotide
  Sense strand starting at position 3359 of SEQ ID NO: 1884470
uuacaagguuccucagcuu

SEQ ID NO: 2268225 - RNA, 19 nt, Artificial Sequence
  Description of Artificial Sequence: Synthetic oligonucleotide
  Antisense strand to SEQ ID NO: 2268224
aagcugaggaaccuuguaa

SEQ ID NO: 2268226 - RNA, 19 nt, Artificial Sequence
  Description of Artificial Sequence: Synthetic oligonucleotide
  Sense strand starting at position 3370 of SEQ ID NO: 1884470
cucagcuugcgguaaguaa

SEQ ID NO: 2268227 - RNA, 19 nt, Artificial Sequence
  Description of Artificial Sequence: Synthetic oligonucleotide
  Antisense strand to SEQ ID NO: 2268226
uuacuuaccgcaagcugag

SEQ ID NO: 2268228 - RNA, 19 nt, Artificial Sequence
  Description of Artificial Sequence: Synthetic oligonucleotide
  Sense strand starting at position 3381 of SEQ ID NO: 1884470
guaaguaaagacugucauu

SEQ ID NO: 2268229 - RNA, 19 nt, Artificial Sequence
  Description of Artificial Sequence: Synthetic oligonucleotide
  Antisense strand to SEQ ID NO: 2268228
aaugacagucuuuacuuac

SEQ ID NO: 2268230 - RNA, 19 nt, Artificial Sequence
  Description of Artificial Sequence: Synthetic oligonucleotide
  Sense strand starting at position 3430 of SEQ ID NO: 1884470
uugggucauugagaagaua

SEQ ID NO: 2268231 - RNA, 19 nt, Artificial Sequence
  Description of Artificial Sequence: Synthetic oligonucleotide
  Antisense strand to SEQ ID NO: 2268230
uaucuucucaaugacccaa

SEQ ID NO: 2268232 - RNA, 19 nt, Artificial Sequence
  Description of Artificial Sequence: Synthetic oligonucleotide
  Sense strand starting at position 3477 of SEQ ID NO: 1884470
caagcagucccacagugaa

SEQ ID NO: 2268233 - RNA, 19 nt, Artificial Sequence
  Description of Artificial Sequence: Synthetic oligonucleotide
  Antisense strand to SEQ ID NO: 2268232
uucacugugggacugcuug

SEQ ID NO: 2268234 - RNA, 19 nt, Artificial Sequence
  Description of Artificial Sequence: Synthetic oligonucleotide
  Sense strand starting at position 3507 of SEQ ID NO: 1884470
gcuuacuagucuuuagagg

SEQ ID NO: 2268235 - RNA, 19 nt, Artificial Sequence
  Description of Artificial Sequence: Synthetic oligonucleotide
  Antisense strand to SEQ ID NO: 2268234
ccucuaaagacuaguaagc

SEQ ID NO: 2268236 - RNA, 19 nt, Artificial Sequence
  Description of Artificial Sequence: Synthetic oligonucleotide
  Sense strand starting at position 3508 of SEQ ID NO: 1884470
cuuacuagucuuuagaggu

SEQ ID NO: 2268237 - RNA, 19 nt, Artificial Sequence
  Description of Artificial Sequence: Synthetic oligonucleotide
  Antisense strand to SEQ ID NO: 2268236
accucuaaagacuaguaag

SEQ ID NO: 2268238 - RNA, 19 nt, Artificial Sequence
  Description of Artificial Sequence: Synthetic oligonucleotide
  Sense strand starting at position 3533 of SEQ ID NO: 1884470
aguguaaucugagauuucu

SEQ ID NO: 2268239 - RNA, 19 nt, Artificial Sequence
  Description of Artificial Sequence: Synthetic oligonucleotide
  Antisense strand to SEQ ID NO: 2268238
agaaaucucagauuacacu

SEQ ID NO: 2268240 - RNA, 19 nt, Artificial Sequence
  Description of Artificial Sequence: Synthetic oligonucleotide
  Sense strand starting at position 3583 of SEQ ID NO: 1884470
agccuauauggccaaucau

SEQ ID NO: 2268241 - RNA, 19 nt, Artificial Sequence
  Description of Artificial Sequence: Synthetic oligonucleotide
  Antisense strand to SEQ ID NO: 2268240
augauuggccauauaggcu

SEQ ID NO: 2268242 - RNA, 19 nt, Artificial Sequence
  Description of Artificial Sequence: Synthetic oligonucleotide
  Sense strand starting at position 3598 of SEQ ID NO: 1884470
ucauucuucuuguugcaca

SEQ ID NO: 2268243 - RNA, 19 nt, Artificial Sequence
  Description of Artificial Sequence: Synthetic oligonucleotide
  Antisense strand to SEQ ID NO: 2268242
ugugcaacaagaagaauga

SEQ ID NO: 2268244 - RNA, 19 nt, Artificial Sequence
  Description of Artificial Sequence: Synthetic oligonucleotide
  Sense strand starting at position 2 of SEQ ID NO: 1884471
uugucuccauuguuaagga

SEQ ID NO: 2268245 - RNA, 19 nt, Artificial Sequence
  Description of Artificial Sequence: Synthetic oligonucleotide
  Antisense strand to SEQ ID NO: 2268244
uccuuaacaauggagacaa

SEQ ID NO: 2268246 - RNA, 19 nt, Artificial Sequence
  Description of Artificial Sequence: Synthetic oligonucleotide
  Sense strand starting at position 9 of SEQ ID NO: 1884471
cauuguuaaggauggcaaa

SEQ ID NO: 2268247 - RNA, 19 nt, Artificial Sequence
  Description of Artificial Sequence: Synthetic oligonucleotide
  Antisense strand to SEQ ID NO: 2268246
uuugccauccuuaacaaug

SEQ ID NO: 2268248 - RNA, 19 nt, Artificial Sequence
  Description of Artificial Sequence: Synthetic oligonucleotide
  Sense strand starting at position 238 of SEQ ID NO: 1884471
cuuuguguugucuagaagg

SEQ ID NO: 2268249 - RNA, 19 nt, Artificial Sequence
  Description of Artificial Sequence: Synthetic oligonucleotide
  Antisense strand to SEQ ID NO: 2268248
ccuucuagacaacacaaag

SEQ ID NO: 2268250 - RNA, 19 nt, Artificial Sequence
  Description of Artificial Sequence: Synthetic oligonucleotide
  Sense strand starting at position 410 of SEQ ID NO: 1884471
ccugucauguccucagaag

SEQ ID NO: 2268251 - RNA, 19 nt, Artificial Sequence
  Description of Artificial Sequence: Synthetic oligonucleotide
  Antisense strand to SEQ ID NO: 2268250
cuucugaggacaugacagg

SEQ ID NO: 2268252 - RNA, 19 nt, Artificial Sequence
  Description of Artificial Sequence: Synthetic oligonucleotide
  Sense strand starting at position 600 of SEQ ID NO: 1884471
aagccuucugcucauggga

SEQ ID NO: 2268253 - RNA, 19 nt, Artificial Sequence
  Description of Artificial Sequence: Synthetic oligonucleotide
  Antisense strand to SEQ ID NO: 2268252
ucccaugagcagaaggcuu

SEQ ID NO: 2268254 - RNA, 19 nt, Artificial Sequence
  Description of Artificial Sequence: Synthetic oligonucleotide
  Sense strand starting at position 728 of SEQ ID NO: 1884471
aggccaucccagcagugau

SEQ ID NO: 2268255 - RNA, 19 nt, Artificial Sequence
  Description of Artificial Sequence: Synthetic oligonucleotide
  Antisense strand to SEQ ID NO: 2268254
aucacugcugggauggccu

SEQ ID NO: 2268256 - RNA, 19 nt, Artificial Sequence
  Description of Artificial Sequence: Synthetic oligonucleotide
  Sense strand starting at position 1533 of SEQ ID NO: 1884471
caggcaguacaagaguaau

SEQ ID NO: 2268257 - RNA, 19 nt, Artificial Sequence
  Description of Artificial Sequence: Synthetic oligonucleotide
  Antisense strand to SEQ ID NO: 2268256
auuacucuuguacugccug

SEQ ID NO: 2268258 - RNA, 19 nt, Artificial Sequence
  Description of Artificial Sequence: Synthetic oligonucleotide
  Sense strand starting at position 1536 of SEQ ID NO: 1884471
gcaguacaagaguaauauu

SEQ ID NO: 2268259 - RNA, 19 nt, Artificial Sequence
  Description of Artificial Sequence: Synthetic oligonucleotide
  Antisense strand to SEQ ID NO: 2268258
aauauuacucuuguacugc

SEQ ID NO: 2268260 - RNA, 19 nt, Artificial Sequence
  Description of Artificial Sequence: Synthetic oligonucleotide
  Sense strand starting at position 1743 of SEQ ID NO: 1884471
uuagcugcucaggaagagu

SEQ ID NO: 2268261 - RNA, 19 nt, Artificial Sequence
  Description of Artificial Sequence: Synthetic oligonucleotide
  Antisense strand to SEQ ID NO: 2268260
acucuuccugagcagcuaa

SEQ ID NO: 2268262 - RNA, 19 nt, Artificial Sequence
  Description of Artificial Sequence: Synthetic oligonucleotide
  Sense strand starting at position 1746 of SEQ ID NO: 1884471
gcugcucaggaagaguaaa

SEQ ID NO: 2268263 - RNA, 19 nt, Artificial Sequence
  Description of Artificial Sequence: Synthetic oligonucleotide
  Antisense strand to SEQ ID NO: 2268262
uuuacucuuccugagcagc

SEQ ID NO: 2268264 - RNA, 19 nt, Artificial Sequence
  Description of Artificial Sequence: Synthetic oligonucleotide
  Sense strand starting at position 1815 of SEQ ID NO: 1884471
cuacaagucaucgggagua

SEQ ID NO: 2268265 - RNA, 19 nt, Artificial Sequence
  Description of Artificial Sequence: Synthetic oligonucleotide
  Antisense strand to SEQ ID NO: 2268264
uacucccgaugacuuguag

SEQ ID NO: 2268266 - RNA, 19 nt, Artificial Sequence
  Description of Artificial Sequence: Synthetic oligonucleotide
  Sense strand starting at position 1817 of SEQ ID NO: 1884471
acaagucaucgggaguaac

SEQ ID NO: 2268267 - RNA, 19 nt, Artificial Sequence
  Description of Artificial Sequence: Synthetic oligonucleotide
  Antisense strand to SEQ ID NO: 2268266
guuacucccgaugacuugu

SEQ ID NO: 2268268 - RNA, 19 nt, Artificial Sequence
  Description of Artificial Sequence: Synthetic oligonucleotide
  Sense strand starting at position 1827 of SEQ ID NO: 1884471
gggaguaacggugauugga

SEQ ID NO: 2268269 - RNA, 19 nt, Artificial Sequence
  Description of Artificial Sequence: Synthetic oligonucleotide
  Antisense strand to SEQ ID NO: 2268268
uccaaucaccguuacuccc

SEQ ID NO: 2268270 - RNA, 19 nt, Artificial Sequence
  Description of Artificial Sequence: Synthetic oligonucleotide
  Sense strand starting at position 1829 of SEQ ID NO: 1884471
gaguaacggugauuggauu

SEQ ID NO: 2268271 - RNA, 19 nt, Artificial Sequence
  Description of Artificial Sequence: Synthetic oligonucleotide
  Antisense strand to SEQ ID NO: 2268270
aauccaaucaccguuacuc

SEQ ID NO: 2268272 - RNA, 19 nt, Artificial Sequence
  Description of Artificial Sequence: Synthetic oligonucleotide
  Sense strand starting at position 1851 of SEQ ID NO: 1884471
caguguucucaagagaagc

SEQ ID NO: 2268273 - RNA, 19 nt, Artificial Sequence
  Description of Artificial Sequence: Synthetic oligonucleotide
  Antisense strand to SEQ ID NO: 2268272
gcuucucuugagaacacug

SEQ ID NO: 2268274 - RNA, 19 nt, Artificial Sequence
  Description of Artificial Sequence: Synthetic oligonucleotide
  Sense strand starting at position 1877 of SEQ ID NO: 1884471
acaggaugugcugauauac

SEQ ID NO: 2268275 - RNA, 19 nt, Artificial Sequence
  Description of Artificial Sequence: Synthetic oligonucleotide
  Antisense strand to SEQ ID NO: 2268274
guauaucagcacauccugu

SEQ ID NO: 2268276 - RNA, 19 nt, Artificial Sequence
  Description of Artificial Sequence: Synthetic oligonucleotide
  Sense strand starting at position 1897 of SEQ ID NO: 1884471
gacagagauuugugauaag

SEQ ID NO: 2268277 - RNA, 19 nt, Artificial Sequence
  Description of Artificial Sequence: Synthetic oligonucleotide
  Antisense strand to SEQ ID NO: 2268276
cuuaucacaaaucucuguc

SEQ ID NO: 2268278 - RNA, 19 nt, Artificial Sequence
  Description of Artificial Sequence: Synthetic oligonucleotide
  Sense strand starting at position 1900 of SEQ ID NO: 1884471
agagauuugugauaaggaa

SEQ ID NO: 2268279 - RNA, 19 nt, Artificial Sequence
  Description of Artificial Sequence: Synthetic oligonucleotide
  Antisense strand to SEQ ID NO: 2268278
uuccuuaucacaaaucucu

SEQ ID NO: 2268280 - RNA, 19 nt, Artificial Sequence
  Description of Artificial Sequence: Synthetic oligonucleotide
  Sense strand starting at position 1913 of SEQ ID NO: 1884471
aaggaauuggcuugaacca

SEQ ID NO: 2268281 - RNA, 19 nt, Artificial Sequence
  Description of Artificial Sequence: Synthetic oligonucleotide
  Antisense strand to SEQ ID NO: 2268280
ugguucaagccaauuccuu

SEQ ID NO: 2268282 - RNA, 19 nt, Artificial Sequence
  Description of Artificial Sequence: Synthetic oligonucleotide
  Sense strand starting at position 1920 of SEQ ID NO: 1884471
uggcuugaaccauguugga

SEQ ID NO: 2268283 - RNA, 19 nt, Artificial Sequence
  Description of Artificial Sequence: Synthetic oligonucleotide
  Antisense strand to SEQ ID NO: 2268282
uccaacaugguucaagcca

SEQ ID NO: 2268284 - RNA, 19 nt, Artificial Sequence
  Description of Artificial Sequence: Synthetic oligonucleotide
  Sense strand starting at position 2090 of SEQ ID NO: 1884471
ucuugcauuuggguucuaa

SEQ ID NO: 2268285 - RNA, 19 nt, Artificial Sequence
  Description of Artificial Sequence: Synthetic oligonucleotide
  Antisense strand to SEQ ID NO: 2268284
uuagaacccaaaugcaaga

SEQ ID NO: 2268286 - RNA, 19 nt, Artificial Sequence
  Description of Artificial Sequence: Synthetic oligonucleotide
  Sense strand starting at position 2114 of SEQ ID NO: 1884471
ccuuccacugauuggguaa

SEQ ID NO: 2268287 - RNA, 19 nt, Artificial Sequence
  Description of Artificial Sequence: Synthetic oligonucleotide
  Antisense strand to SEQ ID NO: 2268286
uuacccaaucaguggaagg

SEQ ID NO: 2268288 - RNA, 19 nt, Artificial Sequence
  Description of Artificial Sequence: Synthetic oligonucleotide
  Sense strand starting at position 2153 of SEQ ID NO: 1884471
ggcacauugcuuuacugaa

SEQ ID NO: 2268289 - RNA, 19 nt, Artificial Sequence
  Description of Artificial Sequence: Synthetic oligonucleotide
  Antisense strand to SEQ ID NO: 2268288
uucaguaaagcaaugugcc

SEQ ID NO: 2268290 - RNA, 19 nt, Artificial Sequence
  Description of Artificial Sequence: Synthetic oligonucleotide
  Sense strand starting at position 2223 of SEQ ID NO: 1884471
cuggaaucaugcuugacca

SEQ ID NO: 2268291 - RNA, 19 nt, Artificial Sequence
  Description of Artificial Sequence: Synthetic oligonucleotide
  Antisense strand to SEQ ID NO: 2268290
uggucaagcaugauuccag

SEQ ID NO: 2268292 - RNA, 19 nt, Artificial Sequence
  Description of Artificial Sequence: Synthetic oligonucleotide
  Sense strand starting at position 2224 of SEQ ID NO: 1884471
uggaaucaugcuugaccaa

SEQ ID NO: 2268293 - RNA, 19 nt, Artificial Sequence
  Description of Artificial Sequence: Synthetic oligonucleotide
  Antisense strand to SEQ ID NO: 2268292
uuggucaagcaugauucca

SEQ ID NO: 2268294 - RNA, 19 nt, Artificial Sequence
  Description of Artificial Sequence: Synthetic oligonucleotide
  Sense strand starting at position 2749 of SEQ ID NO: 1884471
caugguucugauuggagga

SEQ ID NO: 2268295 - RNA, 19 nt, Artificial Sequence
  Description of Artificial Sequence: Synthetic oligonucleotide
  Antisense strand to SEQ ID NO: 2268294
uccuccaaucagaaccaug

SEQ ID NO: 2268296 - RNA, 19 nt, Artificial Sequence
  Description of Artificial Sequence: Synthetic oligonucleotide
  Sense strand starting at position 2932 of SEQ ID NO: 1884471
acaucagaugcuugaguga

SEQ ID NO: 2268297 - RNA, 19 nt, Artificial Sequence
  Description of Artificial Sequence: Synthetic oligonucleotide
  Antisense strand to SEQ ID NO: 2268296
ucacucaagcaucugaugu

SEQ ID NO: 2268298 - RNA, 19 nt, Artificial Sequence
  Description of Artificial Sequence: Synthetic oligonucleotide
  Sense strand starting at position 3207 of SEQ ID NO: 1884471
gggagaaaguagcugagau

SEQ ID NO: 2268299 - RNA, 19 nt, Artificial Sequence
  Description of Artificial Sequence: Synthetic oligonucleotide
  Antisense strand to SEQ ID NO: 2268298
aucucagcuacuuucuccc

SEQ ID NO: 2268300 - RNA, 19 nt, Artificial Sequence
  Description of Artificial Sequence: Synthetic oligonucleotide
  Sense strand starting at position 3208 of SEQ ID NO: 1884471
ggagaaaguagcugagauu

SEQ ID NO: 2268301 - RNA, 19 nt, Artificial Sequence
  Description of Artificial Sequence: Synthetic oligonucleotide
  Antisense strand to SEQ ID NO: 2268300
aaucucagcuacuuucucc

SEQ ID NO: 2268302 - RNA, 19 nt, Artificial Sequence
  Description of Artificial Sequence: Synthetic oligonucleotide
  Sense strand starting at position 3307 of SEQ ID NO: 1884471
ugggaaauguaguucccuu

SEQ ID NO: 2268303 - RNA, 19 nt, Artificial Sequence
  Description of Artificial Sequence: Synthetic oligonucleotide
  Antisense strand to SEQ ID NO: 2268302
aagggaacuacauuuccca

SEQ ID NO: 2268304 - RNA, 19 nt, Artificial Sequence
  Description of Artificial Sequence: Synthetic oligonucleotide
  Sense strand starting at position 3400 of SEQ ID NO: 1884471
gugucugcccaagugucau

SEQ ID NO: 2268305 - RNA, 19 nt, Artificial Sequence
  Description of Artificial Sequence: Synthetic oligonucleotide
  Antisense strand to SEQ ID NO: 2268304
augacacuugggcagacac

SEQ ID NO: 2268306 - RNA, 19 nt, Artificial Sequence
  Description of Artificial Sequence: Synthetic oligonucleotide
  Sense strand starting at position 3413 of SEQ ID NO: 1884471
ugucaucugcugggaaaug

SEQ ID NO: 2268307 - RNA, 19 nt, Artificial Sequence
  Description of Artificial Sequence: Synthetic oligonucleotide
  Antisense strand to SEQ ID NO: 2268306
cauuucccagcagaugaca

SEQ ID NO: 2268308 - RNA, 19 nt, Artificial Sequence
  Description of Artificial Sequence: Synthetic oligonucleotide
  Sense strand starting at position 3425 of SEQ ID NO: 1884471
ggaaaugccuuccuugaca

SEQ ID NO: 2268309 - RNA, 19 nt, Artificial Sequence
  Description of Artificial Sequence: Synthetic oligonucleotide
  Antisense strand to SEQ ID NO: 2268308
ugucaaggaaggcauuucc

SEQ ID NO: 2268310 - RNA, 19 nt, Artificial Sequence
  Description of Artificial Sequence: Synthetic oligonucleotide
  Sense strand starting at position 3594 of SEQ ID NO: 1884471
uggauuaucuaguucuauu

SEQ ID NO: 2268311 - RNA, 19 nt, Artificial Sequence
  Description of Artificial Sequence: Synthetic oligonucleotide
  Antisense strand to SEQ ID NO: 2268310
aauagaacuagauaaucca

SEQ ID NO: 2268312 - RNA, 19 nt, Artificial Sequence
  Description of Artificial Sequence: Synthetic oligonucleotide
  Sense strand starting at position 3729 of SEQ ID NO: 1884471
cugucuugcucauuugaga

SEQ ID NO: 2268313 - RNA, 19 nt, Artificial Sequence
  Description of Artificial Sequence: Synthetic oligonucleotide
  Antisense strand to SEQ ID NO: 2268312
ucucaaaugagcaagacag

SEQ ID NO: 2268314 - RNA, 19 nt, Artificial Sequence
  Description of Artificial Sequence: Synthetic oligonucleotide
  Sense strand starting at position 3794 of SEQ ID NO: 1884471
auagaaucuucucccaggu

SEQ ID NO: 2268315 - RNA, 19 nt, Artificial Sequence
  Description of Artificial Sequence: Synthetic oligonucleotide
  Antisense strand to SEQ ID NO: 2268314
accugggagaagauucuau

SEQ ID NO: 2268316 - RNA, 19 nt, Artificial Sequence
  Description of Artificial Sequence: Synthetic oligonucleotide
  Sense strand starting at position 3815 of SEQ ID NO: 1884471
ucucuucuuuggguacaua

SEQ ID NO: 2268317 - RNA, 19 nt, Artificial Sequence
  Description of Artificial Sequence: Synthetic oligonucleotide
  Antisense strand to SEQ ID NO: 2268316
uauguacccaaagaagaga

SEQ ID NO: 2268318 - RNA, 19 nt, Artificial Sequence
  Description of Artificial Sequence: Synthetic oligonucleotide
  Sense strand starting at position 3816 of SEQ ID NO: 1884471
cucuucuuuggguacauau

SEQ ID NO: 2268319 - RNA, 19 nt, Artificial Sequence
  Description of Artificial Sequence: Synthetic oligonucleotide
  Antisense strand to SEQ ID NO: 2268318
auauguacccaaagaagag

SEQ ID NO: 2268320 - RNA, 19 nt, Artificial Sequence
  Description of Artificial Sequence: Synthetic oligonucleotide
  Sense strand starting at position 3825 of SEQ ID NO: 1884471
ggguacauauccuuaguuu

SEQ ID NO: 2268321 - RNA, 19 nt, Artificial Sequence
  Description of Artificial Sequence: Synthetic oligonucleotide
  Antisense strand to SEQ ID NO: 2268320
aaacuaaggauauguaccc

SEQ ID NO: 2268322 - RNA, 19 nt, Artificial Sequence
  Description of Artificial Sequence: Synthetic oligonucleotide
  Sense strand starting at position 3826 of SEQ ID NO: 1884471
gguacauauccuuaguuuc

SEQ ID NO: 2268323 - RNA, 19 nt, Artificial Sequence
  Description of Artificial Sequence: Synthetic oligonucleotide
  Antisense strand to SEQ ID NO: 2268322
gaaacuaaggauauguacc

SEQ ID NO: 2268324 - RNA, 19 nt, Artificial Sequence
  Description of Artificial Sequence: Synthetic oligonucleotide
  Sense strand starting at position 2397 of SEQ ID NO: 1884472
aaccacgugccauguauua

SEQ ID NO: 2268325 - RNA, 19 nt, Artificial Sequence
  Description of Artificial Sequence: Synthetic oligonucleotide
  Antisense strand to SEQ ID NO: 2268324
uaauacauggcacgugguu

SEQ ID NO: 2268326 - RNA, 19 nt, Artificial Sequence
  Description of Artificial Sequence: Synthetic oligonucleotide
  Sense strand starting at position 2404 of SEQ ID NO: 1884472
ugccauguauuaucuguua

SEQ ID NO: 2268327 - RNA, 19 nt, Artificial Sequence
  Description of Artificial Sequence: Synthetic oligonucleotide
  Antisense strand to SEQ ID NO: 2268326
uaacagauaauacauggca

SEQ ID NO: 2268328 - RNA, 19 nt, Artificial Sequence
  Description of Artificial Sequence: Synthetic oligonucleotide
  Sense strand starting at position 2533 of SEQ ID NO: 1884472
ccuucuguucccgaguaua

SEQ ID NO: 2268329 - RNA, 19 nt, Artificial Sequence
  Description of Artificial Sequence: Synthetic oligonucleotide
  Antisense strand to SEQ ID NO: 2268328
uauacucgggaacagaagg

SEQ ID NO: 2268330 - RNA, 19 nt, Artificial Sequence
  Description of Artificial Sequence: Synthetic oligonucleotide
  Sense strand starting at position 2543 of SEQ ID NO: 1884472
ccgaguauacuggaaccua

SEQ ID NO: 2268331 - RNA, 19 nt, Artificial Sequence
  Description of Artificial Sequence: Synthetic oligonucleotide
  Antisense strand to SEQ ID NO: 2268330
uagguuccaguauacucgg

SEQ ID NO: 2268332 - RNA, 19 nt, Artificial Sequence
  Description of Artificial Sequence: Synthetic oligonucleotide
  Sense strand starting at position 2590 of SEQ ID NO: 1884472
ggcugcagcauuuguacaa

SEQ ID NO: 2268333 - RNA, 19 nt, Artificial Sequence
  Description of Artificial Sequence: Synthetic oligonucleotide
  Antisense strand to SEQ ID NO: 2268332
uuguacaaaugcugcagcc

SEQ ID NO: 2268334 - RNA, 19 nt, Artificial Sequence
  Description of Artificial Sequence: Synthetic oligonucleotide
  Sense strand starting at position 2591 of SEQ ID NO: 1884472
gcugcagcauuuguacaaa

SEQ ID NO: 2268335 - RNA, 19 nt, Artificial Sequence
  Description of Artificial Sequence: Synthetic oligonucleotide
  Antisense strand to SEQ ID NO: 2268334
uuuguacaaaugcugcagc

SEQ ID NO: 2268336 - RNA, 19 nt, Artificial Sequence
  Description of Artificial Sequence: Synthetic oligonucleotide
  Sense strand starting at position 2662 of SEQ ID NO: 1884472
gcaugcagucuugugugua

SEQ ID NO: 2268337 - RNA, 19 nt, Artificial Sequence
  Description of Artificial Sequence: Synthetic oligonucleotide
  Antisense strand to SEQ ID NO: 2268336
uacacacaagacugcaugc

SEQ ID NO: 2268338 - RNA, 19 nt, Artificial Sequence
  Description of Artificial Sequence: Synthetic oligonucleotide
  Sense strand starting at position 2764 of SEQ ID NO: 1884472
guguguauaccugggugga

SEQ ID NO: 2268339 - RNA, 19 nt, Artificial Sequence
  Description of Artificial Sequence: Synthetic oligonucleotide
  Antisense strand to SEQ ID NO: 2268338
uccacccagguauacacac

SEQ ID NO: 2268340 - RNA, 19 nt, Artificial Sequence
  Description of Artificial Sequence: Synthetic oligonucleotide
  Sense strand starting at position 2777 of SEQ ID NO: 1884472
gguggaggucccuaauuac

SEQ ID NO: 2268341 - RNA, 19 nt, Artificial Sequence
  Description of Artificial Sequence: Synthetic oligonucleotide
  Antisense strand to SEQ ID NO: 2268340
guaauuagggaccuccacc

SEQ ID NO: 2268342 - RNA, 19 nt, Artificial Sequence
  Description of Artificial Sequence: Synthetic oligonucleotide
  Sense strand starting at position 2780 of SEQ ID NO: 1884472
ggaggucccuaauuacaag

SEQ ID NO: 2268343 - RNA, 19 nt, Artificial Sequence
  Description of Artificial Sequence: Synthetic oligonucleotide
  Antisense strand to SEQ ID NO: 2268342
cuuguaauuagggaccucc

SEQ ID NO: 2268344 - RNA, 19 nt, Artificial Sequence
  Description of Artificial Sequence: Synthetic oligonucleotide
  Sense strand starting at position 2865 of SEQ ID NO: 1884472
cucuaauuauaagaggaca

SEQ ID NO: 2268345 - RNA, 19 nt, Artificial Sequence
  Description of Artificial Sequence: Synthetic oligonucleotide
  Antisense strand to SEQ ID NO: 2268344
uguccucuuauaauuagag

SEQ ID NO: 2268346 - RNA, 19 nt, Artificial Sequence
  Description of Artificial Sequence: Synthetic oligonucleotide
  Sense strand starting at position 2974 of SEQ ID NO: 1884472
aggcuuaauugcccuuuga

SEQ ID NO: 2268347 - RNA, 19 nt, Artificial Sequence
  Description of Artificial Sequence: Synthetic oligonucleotide
  Antisense strand to SEQ ID NO: 2268346
ucaaagggcaauuaagccu

SEQ ID NO: 2268348 - RNA, 19 nt, Artificial Sequence
  Description of Artificial Sequence: Synthetic oligonucleotide
  Sense strand starting at position 3149 of SEQ ID NO: 1884472
ggaggaggaaguuguuacu

SEQ ID NO: 2268349 - RNA, 19 nt, Artificial Sequence
  Description of Artificial Sequence: Synthetic oligonucleotide
  Antisense strand to SEQ ID NO: 2268348
aguaacaacuuccuccucc

SEQ ID NO: 2268350 - RNA, 19 nt, Artificial Sequence
  Description of Artificial Sequence: Synthetic oligonucleotide
  Sense strand starting at position 3155 of SEQ ID NO: 1884472
ggaaguuguuacuugcauc

SEQ ID NO: 2268351 - RNA, 19 nt, Artificial Sequence
  Description of Artificial Sequence: Synthetic oligonucleotide
  Antisense strand to SEQ ID NO: 2268350
gaugcaaguaacaacuucc

SEQ ID NO: 2268352 - RNA, 19 nt, Artificial Sequence
  Description of Artificial Sequence: Synthetic oligonucleotide
  Sense strand starting at position 3195 of SEQ ID NO: 1884472
cucugagcuuccucaggaa

SEQ ID NO: 2268353 - RNA, 19 nt, Artificial Sequence
  Description of Artificial Sequence: Synthetic oligonucleotide
  Antisense strand to SEQ ID NO: 2268352
uuccugaggaagcucagag

SEQ ID NO: 2268354 - RNA, 19 nt, Artificial Sequence
  Description of Artificial Sequence: Synthetic oligonucleotide
  Sense strand starting at position 3207 of SEQ ID NO: 1884472
ucaggaaucccagguccuu

SEQ ID NO: 2268355 - RNA, 19 nt, Artificial Sequence
  Description of Artificial Sequence: Synthetic oligonucleotide
  Antisense strand to SEQ ID NO: 2268354
aaggaccugggauuccuga

SEQ ID NO: 2268356 - RNA, 19 nt, Artificial Sequence
  Description of Artificial Sequence: Synthetic oligonucleotide
  Sense strand starting at position 3267 of SEQ ID NO: 1884472
caggaauggccuugugaac

SEQ ID NO: 2268357 - RNA, 19 nt, Artificial Sequence
  Description of Artificial Sequence: Synthetic oligonucleotide
  Antisense strand to SEQ ID NO: 2268356
guucacaaggccauuccug

SEQ ID NO: 2268358 - RNA, 19 nt, Artificial Sequence
  Description of Artificial Sequence: Synthetic oligonucleotide
  Sense strand starting at position 3436 of SEQ ID NO: 1884472
gagaaagugcuuuguaaau

SEQ ID NO: 2268359 - RNA, 19 nt, Artificial Sequence
  Description of Artificial Sequence: Synthetic oligonucleotide
  Antisense strand to SEQ ID NO: 2268358
auuuacaaagcacuuucuc

SEQ ID NO: 2268360 - RNA, 19 nt, Artificial Sequence
  Description of Artificial Sequence: Synthetic oligonucleotide
  Sense strand starting at position 3442 of SEQ ID NO: 1884472
gugcuuuguaaaugggaaa

SEQ ID NO: 2268361 - RNA, 19 nt, Artificial Sequence
  Description of Artificial Sequence: Synthetic oligonucleotide
  Antisense strand to SEQ ID NO: 2268360
uuucccauuuacaaagcac

SEQ ID NO: 2268362 - RNA, 19 nt, Artificial Sequence
  Description of Artificial Sequence: Synthetic oligonucleotide
  Sense strand starting at position 3443 of SEQ ID NO: 1884472
ugcuuuguaaaugggaaau

SEQ ID NO: 2268363 - RNA, 19 nt, Artificial Sequence
  Description of Artificial Sequence: Synthetic oligonucleotide
  Antisense strand to SEQ ID NO: 2268362
auuucccauuuacaaagca

SEQ ID NO: 2268364 - RNA, 19 nt, Artificial Sequence
  Description of Artificial Sequence: Synthetic oligonucleotide
  Sense strand starting at position 3453 of SEQ ID NO: 1884472
augggaaauccuugcacug

SEQ ID NO: 2268365 - RNA, 19 nt, Artificial Sequence
  Description of Artificial Sequence: Synthetic oligonucleotide
  Antisense strand to SEQ ID NO: 2268364
cagugcaaggauuucccau

SEQ ID NO: 2268366 - RNA, 19 nt, Artificial Sequence
  Description of Artificial Sequence: Synthetic oligonucleotide
  Sense strand starting at position 3471 of SEQ ID NO: 1884472
guuauuagccauuagggac

SEQ ID NO: 2268367 - RNA, 19 nt, Artificial Sequence
  Description of Artificial Sequence: Synthetic oligonucleotide
  Antisense strand to SEQ ID NO: 2268366
gucccuaauggcuaauaac

SEQ ID NO: 2268368 - RNA, 19 nt, Artificial Sequence
  Description of Artificial Sequence: Synthetic oligonucleotide
  Sense strand starting at position 3506 of SEQ ID NO: 1884472
gaucgaauguucuuggaag

SEQ ID NO: 2268369 - RNA, 19 nt, Artificial Sequence
  Description of Artificial Sequence: Synthetic oligonucleotide
  Antisense strand to SEQ ID NO: 2268368
cuuccaagaacauucgauc

SEQ ID NO: 2268370 - RNA, 19 nt, Artificial Sequence
  Description of Artificial Sequence: Synthetic oligonucleotide
  Sense strand starting at position 3508 of SEQ ID NO: 1884472
ucgaauguucuuggaagac

SEQ ID NO: 2268371 - RNA, 19 nt, Artificial Sequence
  Description of Artificial Sequence: Synthetic oligonucleotide
  Antisense strand to SEQ ID NO: 2268370
gucuuccaagaacauucga

SEQ ID NO: 2268372 - RNA, 19 nt, Artificial Sequence
  Description of Artificial Sequence: Synthetic oligonucleotide
  Sense strand starting at position 3526 of SEQ ID NO: 1884472
caggaaucaugucuuaguc

SEQ ID NO: 2268373 - RNA, 19 nt, Artificial Sequence
  Description of Artificial Sequence: Synthetic oligonucleotide
  Antisense strand to SEQ ID NO: 2268372
gacuaagacaugauuccug

SEQ ID NO: 2268374 - RNA, 19 nt, Artificial Sequence
  Description of Artificial Sequence: Synthetic oligonucleotide
  Sense strand starting at position 3528 of SEQ ID NO: 1884472
ggaaucaugucuuagucau

SEQ ID NO: 2268375 - RNA, 19 nt, Artificial Sequence
  Description of Artificial Sequence: Synthetic oligonucleotide
  Antisense strand to SEQ ID NO: 2268374
augacuaagacaugauucc

SEQ ID NO: 2268376 - RNA, 19 nt, Artificial Sequence
  Description of Artificial Sequence: Synthetic oligonucleotide
  Sense strand starting at position 3567 of SEQ ID NO: 1884472
cucugauaggguggaauca

SEQ ID NO: 2268377 - RNA, 19 nt, Artificial Sequence
  Description of Artificial Sequence: Synthetic oligonucleotide
  Antisense strand to SEQ ID NO: 2268376
ugauuccacccuaucagag

SEQ ID NO: 2268378 - RNA, 19 nt, Artificial Sequence
  Description of Artificial Sequence: Synthetic oligonucleotide
  Sense strand starting at position 3634 of SEQ ID NO: 1884472
uaucuuucccuugguguga

SEQ ID NO: 2268379 - RNA, 19 nt, Artificial Sequence
  Description of Artificial Sequence: Synthetic oligonucleotide
  Antisense strand to SEQ ID NO: 2268378
ucacaccaagggaaagaua

SEQ ID NO: 2268380 - RNA, 19 nt, Artificial Sequence
  Description of Artificial Sequence: Synthetic oligonucleotide
  Sense strand starting at position 3635 of SEQ ID NO: 1884472
aucuuucccuuggugugaa

SEQ ID NO: 2268381 - RNA, 19 nt, Artificial Sequence
  Description of Artificial Sequence: Synthetic oligonucleotide
  Antisense strand to SEQ ID NO: 2268380
uucacaccaagggaaagau

SEQ ID NO: 2268382 - RNA, 19 nt, Artificial Sequence
  Description of Artificial Sequence: Synthetic oligonucleotide
  Sense strand starting at position 3638 of SEQ ID NO: 1884472
uuucccuuggugugaacaa

SEQ ID NO: 2268383 - RNA, 19 nt, Artificial Sequence
  Description of Artificial Sequence: Synthetic oligonucleotide
  Antisense strand to SEQ ID NO: 2268382
uuguucacaccaagggaaa

SEQ ID NO: 2268384 - RNA, 19 nt, Artificial Sequence
  Description of Artificial Sequence: Synthetic oligonucleotide
  Sense strand starting at position 3639 of SEQ ID NO: 1884472
uucccuuggugugaacaaa

SEQ ID NO: 2268385 - RNA, 19 nt, Artificial Sequence
  Description of Artificial Sequence: Synthetic oligonucleotide
  Antisense strand to SEQ ID NO: 2268384
uuuguucacaccaagggaa

SEQ ID NO: 2268386 - RNA, 19 nt, Artificial Sequence
  Description of Artificial Sequence: Synthetic oligonucleotide
  Sense strand starting at position 3665 of SEQ ID NO: 1884472
aaccuuuggcaaugagaug

SEQ ID NO: 2268387 - RNA, 19 nt, Artificial Sequence
  Description of Artificial Sequence: Synthetic oligonucleotide
  Antisense strand to SEQ ID NO: 2268386
caucucauugccaaagguu

SEQ ID NO: 2268388 - RNA, 19 nt, Artificial Sequence
  Description of Artificial Sequence: Synthetic oligonucleotide
  Sense strand starting at position 3721 of SEQ ID NO: 1884472
ugacauuuacuguguagca

SEQ ID NO: 2268389 - RNA, 19 nt, Artificial Sequence
  Description of Artificial Sequence: Synthetic oligonucleotide
  Antisense strand to SEQ ID NO: 2268388
ugcuacacaguaaauguca

SEQ ID NO: 2268390 - RNA, 19 nt, Artificial Sequence
  Description of Artificial Sequence: Synthetic oligonucleotide
  Sense strand starting at position 3741 of SEQ ID NO: 1884472
gcacuauccuaagcaguuu

SEQ ID NO: 2268391 - RNA, 19 nt, Artificial Sequence
  Description of Artificial Sequence: Synthetic oligonucleotide
  Antisense strand to SEQ ID NO: 2268390
aaacugcuuaggauagugc

SEQ ID NO: 2268392 - RNA, 19 nt, Artificial Sequence
  Description of Artificial Sequence: Synthetic oligonucleotide
  Sense strand starting at position 3786 of SEQ ID NO: 1884472
caauguccuuaagaggagu

SEQ ID NO: 2268393 - RNA, 19 nt, Artificial Sequence
  Description of Artificial Sequence: Synthetic oligonucleotide
  Antisense strand to SEQ ID NO: 2268392
acuccucuuaaggacauug

SEQ ID NO: 2268394 - RNA, 19 nt, Artificial Sequence
  Description of Artificial Sequence: Synthetic oligonucleotide
  Sense strand starting at position 3788 of SEQ ID NO: 1884472
auguccuuaagaggaguau

SEQ ID NO: 2268395 - RNA, 19 nt, Artificial Sequence
  Description of Artificial Sequence: Synthetic oligonucleotide
  Antisense strand to SEQ ID NO: 2268394
auacuccucuuaaggacau

SEQ ID NO: 2268396 - RNA, 19 nt, Artificial Sequence
  Description of Artificial Sequence: Synthetic oligonucleotide
  Sense strand starting at position 3794 of SEQ ID NO: 1884472
uuaagaggaguauguuauc

SEQ ID NO: 2268397 - RNA, 19 nt, Artificial Sequence
  Description of Artificial Sequence: Synthetic oligonucleotide
  Antisense strand to SEQ ID NO: 2268396
gauaacauacuccucuuaa

SEQ ID NO: 2268398 - RNA, 19 nt, Artificial Sequence
  Description of Artificial Sequence: Synthetic oligonucleotide
  Sense strand starting at position 3799 of SEQ ID NO: 1884472
aggaguauguuaucuccac

SEQ ID NO: 2268399 - RNA, 19 nt, Artificial Sequence
  Description of Artificial Sequence: Synthetic oligonucleotide
  Antisense strand to SEQ ID NO: 2268398
guggagauaacauacuccu

SEQ ID NO: 2268400 - RNA, 19 nt, Artificial Sequence
  Description of Artificial Sequence: Synthetic oligonucleotide
  Sense strand starting at position 3803 of SEQ ID NO: 1884472
guauguuaucuccaccauc

SEQ ID NO: 2268401 - RNA, 19 nt, Artificial Sequence
  Description of Artificial Sequence: Synthetic oligonucleotide
  Antisense strand to SEQ ID NO: 2268400
gaugguggagauaacauac

SEQ ID NO: 2268402 - RNA, 19 nt, Artificial Sequence
  Description of Artificial Sequence: Synthetic oligonucleotide
  Sense strand starting at position 3951 of SEQ ID NO: 1884472
ccagguggugaaugacauu

SEQ ID NO: 2268403 - RNA, 19 nt, Artificial Sequence
  Description of Artificial Sequence: Synthetic oligonucleotide
  Antisense strand to SEQ ID NO: 2268402
aaugucauucaccaccugg

SEQ ID NO: 2268404 - RNA, 19 nt, Artificial Sequence
  Description of Artificial Sequence: Synthetic oligonucleotide
  Sense strand starting at position 82 of SEQ ID NO: 1884473
accucaaagggugguauua

SEQ ID NO: 2268405 - RNA, 19 nt, Artificial Sequence
  Description of Artificial Sequence: Synthetic oligonucleotide
  Antisense strand to SEQ ID NO: 2268404
uaauaccacccuuugaggu

SEQ ID NO: 2268406 - RNA, 19 nt, Artificial Sequence
  Description of Artificial Sequence: Synthetic oligonucleotide
  Sense strand starting at position 95 of SEQ ID NO: 1884473
guauuaggcaaaugcugaa

SEQ ID NO: 2268407 - RNA, 19 nt, Artificial Sequence
  Description of Artificial Sequence: Synthetic oligonucleotide
  Antisense strand to SEQ ID NO: 2268406
uucagcauuugccuaauac

SEQ ID NO: 2268408 - RNA, 19 nt, Artificial Sequence
  Description of Artificial Sequence: Synthetic oligonucleotide
  Sense strand starting at position 127 of SEQ ID NO: 1884473
ugcuuugagguuuauagaa

SEQ ID NO: 2268409 - RNA, 19 nt, Artificial Sequence
  Description of Artificial Sequence: Synthetic oligonucleotide
  Antisense strand to SEQ ID NO: 2268408
uucuauaaaccucaaagca

SEQ ID NO: 2268410 - RNA, 19 nt, Artificial Sequence
  Description of Artificial Sequence: Synthetic oligonucleotide
  Sense strand starting at position 296 of SEQ ID NO: 1884473
guaggagacucagagaaag

SEQ ID NO: 2268411 - RNA, 19 nt, Artificial Sequence
  Description of Artificial Sequence: Synthetic oligonucleotide
  Antisense strand to SEQ ID NO: 2268410
cuuucucugagucuccuac

SEQ ID NO: 2268412 - RNA, 19 nt, Artificial Sequence
  Description of Artificial Sequence: Synthetic oligonucleotide
  Sense strand starting at position 379 of SEQ ID NO: 1884473
gcccuacucagauggaaag

SEQ ID NO: 2268413 - RNA, 19 nt, Artificial Sequence
  Description of Artificial Sequence: Synthetic oligonucleotide
  Antisense strand to SEQ ID NO: 2268412
cuuuccaucugaguagggc

SEQ ID NO: 2268414 - RNA, 19 nt, Artificial Sequence
  Description of Artificial Sequence: Synthetic oligonucleotide
  Sense strand starting at position 584 of SEQ ID NO: 1884473
gugggucugaauuagauuc

SEQ ID NO: 2268415 - RNA, 19 nt, Artificial Sequence
  Description of Artificial Sequence: Synthetic oligonucleotide
  Antisense strand to SEQ ID NO: 2268414
gaaucuaauucagacccac

SEQ ID NO: 2268416 - RNA, 19 nt, Artificial Sequence
  Description of Artificial Sequence: Synthetic oligonucleotide
  Sense strand starting at position 1097 of SEQ ID NO: 1884473
uuucccaguccaggauaau

SEQ ID NO: 2268417 - RNA, 19 nt, Artificial Sequence
  Description of Artificial Sequence: Synthetic oligonucleotide
  Antisense strand to SEQ ID NO: 2268416
auuauccuggacugggaaa

SEQ ID NO: 2268418 - RNA, 19 nt, Artificial Sequence
  Description of Artificial Sequence: Synthetic oligonucleotide
  Sense strand starting at position 1185 of SEQ ID NO: 1884473
caagaagggucucugcuua

SEQ ID NO: 2268419 - RNA, 19 nt, Artificial Sequence
  Description of Artificial Sequence: Synthetic oligonucleotide
  Antisense strand to SEQ ID NO: 2268418
uaagcagagacccuucuug

SEQ ID NO: 2268420 - RNA, 19 nt, Artificial Sequence
  Description of Artificial Sequence: Synthetic oligonucleotide
  Sense strand starting at position 1189 of SEQ ID NO: 1884473
aagggucucugcuuaacau

SEQ ID NO: 2268421 - RNA, 19 nt, Artificial Sequence
  Description of Artificial Sequence: Synthetic oligonucleotide
  Antisense strand to SEQ ID NO: 2268420
auguuaagcagagacccuu

SEQ ID NO: 2268422 - RNA, 19 nt, Artificial Sequence
  Description of Artificial Sequence: Synthetic oligonucleotide
  Sense strand starting at position 1190 of SEQ ID NO: 1884473
agggucucugcuuaacauu

SEQ ID NO: 2268423 - RNA, 19 nt, Artificial Sequence
  Description of Artificial Sequence: Synthetic oligonucleotide
  Antisense strand to SEQ ID NO: 2268422
aauguuaagcagagacccu

SEQ ID NO: 2268424 - RNA, 19 nt, Artificial Sequence
  Description of Artificial Sequence: Synthetic oligonucleotide
  Sense strand starting at position 1249 of SEQ ID NO: 1884473
agagguuaucaggaggcga

SEQ ID NO: 2268425 - RNA, 19 nt, Artificial Sequence
  Description of Artificial Sequence: Synthetic oligonucleotide
  Antisense strand to SEQ ID NO: 2268424
ucgccuccugauaaccucu

SEQ ID NO: 2268426 - RNA, 19 nt, Artificial Sequence
  Description of Artificial Sequence: Synthetic oligonucleotide
  Sense strand starting at position 1251 of SEQ ID NO: 1884473
agguuaucaggaggcgauu

SEQ ID NO: 2268427 - RNA, 19 nt, Artificial Sequence
  Description of Artificial Sequence: Synthetic oligonucleotide
  Antisense strand to SEQ ID NO: 2268426
aaucgccuccugauaaccu

SEQ ID NO: 2268428 - RNA, 19 nt, Artificial Sequence
  Description of Artificial Sequence: Synthetic oligonucleotide
  Sense strand starting at position 1285 of SEQ ID NO: 1884473
uguggauggagucaucuga

SEQ ID NO: 2268429 - RNA, 19 nt, Artificial Sequence
  Description of Artificial Sequence: Synthetic oligonucleotide
  Antisense strand to SEQ ID NO: 2268428
ucagaugacuccauccaca

SEQ ID NO: 2268430 - RNA, 19 nt, Artificial Sequence
  Description of Artificial Sequence: Synthetic oligonucleotide
  Sense strand starting at position 1289 of SEQ ID NO: 1884473
gauggagucaucugaaguc

SEQ ID NO: 2268431 - RNA, 19 nt, Artificial Sequence
  Description of Artificial Sequence: Synthetic oligonucleotide
  Antisense strand to SEQ ID NO: 2268430
gacuucagaugacuccauc

SEQ ID NO: 2268432 - RNA, 19 nt, Artificial Sequence
  Description of Artificial Sequence: Synthetic oligonucleotide
  Sense strand starting at position 1461 of SEQ ID NO: 1884473
gugcucagacucugagaua

SEQ ID NO: 2268433 - RNA, 19 nt, Artificial Sequence
  Description of Artificial Sequence: Synthetic oligonucleotide
  Antisense strand to SEQ ID NO: 2268432
uaucucagagucugagcac

SEQ ID NO: 2268434 - RNA, 19 nt, Artificial Sequence
  Description of Artificial Sequence: Synthetic oligonucleotide
  Sense strand starting at position 1540 of SEQ ID NO: 1884473
ugaggaagguccuuugacu

SEQ ID NO: 2268435 - RNA, 19 nt, Artificial Sequence
  Description of Artificial Sequence: Synthetic oligonucleotide
  Antisense strand to SEQ ID NO: 2268434
agucaaaggaccuuccuca

SEQ ID NO: 2268436 - RNA, 19 nt, Artificial Sequence
  Description of Artificial Sequence: Synthetic oligonucleotide
  Sense strand starting at position 1810 of SEQ ID NO: 1884473
ugagacaccucauuaaggu

SEQ ID NO: 2268437 - RNA, 19 nt, Artificial Sequence
  Description of Artificial Sequence: Synthetic oligonucleotide
  Antisense strand to SEQ ID NO: 2268436
accuuaaugaggugucuca

SEQ ID NO: 2268438 - RNA, 19 nt, Artificial Sequence
  Description of Artificial Sequence: Synthetic oligonucleotide
  Sense strand starting at position 2389 of SEQ ID NO: 1884473
ugcucaucgaaucauguga

SEQ ID NO: 2268439 - RNA, 19 nt, Artificial Sequence
  Description of Artificial Sequence: Synthetic oligonucleotide
  Antisense strand to SEQ ID NO: 2268438
ucacaugauucgaugagca

SEQ ID NO: 2268440 - RNA, 19 nt, Artificial Sequence
  Description of Artificial Sequence: Synthetic oligonucleotide
  Sense strand starting at position 2403 of SEQ ID NO: 1884473
ugugauagguagagaggaa

SEQ ID NO: 2268441 - RNA, 19 nt, Artificial Sequence
  Description of Artificial Sequence: Synthetic oligonucleotide
  Antisense strand to SEQ ID NO: 2268440
uuccucucuaccuaucaca

SEQ ID NO: 2268442 - RNA, 19 nt, Artificial Sequence
  Description of Artificial Sequence: Synthetic oligonucleotide
  Sense strand starting at position 2431 of SEQ ID NO: 1884473
cuagccuuccuaugggaca

SEQ ID NO: 2268443 - RNA, 19 nt, Artificial Sequence
  Description of Artificial Sequence: Synthetic oligonucleotide
  Antisense strand to SEQ ID NO: 2268442
ugucccauaggaaggcuag

SEQ ID NO: 2268444 - RNA, 19 nt, Artificial Sequence
  Description of Artificial Sequence: Synthetic oligonucleotide
  Sense strand starting at position 2442 of SEQ ID NO: 1884473
augggacauuccuucugau

SEQ ID NO: 2268445 - RNA, 19 nt, Artificial Sequence
  Description of Artificial Sequence: Synthetic oligonucleotide
  Antisense strand to SEQ ID NO: 2268444
aucagaaggaaugucccau

SEQ ID NO: 2268446 - RNA, 19 nt, Artificial Sequence
  Description of Artificial Sequence: Synthetic oligonucleotide
  Sense strand starting at position 2469 of SEQ ID NO: 1884473
aggcguaaugacugguaga

SEQ ID NO: 2268447 - RNA, 19 nt, Artificial Sequence
  Description of Artificial Sequence: Synthetic oligonucleotide
  Antisense strand to SEQ ID NO: 2268446
ucuaccagucauuacgccu

SEQ ID NO: 2268448 - RNA, 19 nt, Artificial Sequence
  Description of Artificial Sequence: Synthetic oligonucleotide
  Sense strand starting at position 2470 of SEQ ID NO: 1884473
ggcguaaugacugguagaa

SEQ ID NO: 2268449 - RNA, 19 nt, Artificial Sequence
  Description of Artificial Sequence: Synthetic oligonucleotide
  Antisense strand to SEQ ID NO: 2268448
uucuaccagucauuacgcc

SEQ ID NO: 2268450 - RNA, 19 nt, Artificial Sequence
  Description of Artificial Sequence: Synthetic oligonucleotide
  Sense strand starting at position 2500 of SEQ ID NO: 1884473
ucauuaucuccauggguac

SEQ ID NO: 2268451 - RNA, 19 nt, Artificial Sequence
  Description of Artificial Sequence: Synthetic oligonucleotide
  Antisense strand to SEQ ID NO: 2268450
guacccauggagauaauga

SEQ ID NO: 2268452 - RNA, 19 nt, Artificial Sequence
  Description of Artificial Sequence: Synthetic oligonucleotide
  Sense strand starting at position 2537 of SEQ ID NO: 1884473
gccugaagccagcaaugau

SEQ ID NO: 2268453 - RNA, 19 nt, Artificial Sequence
  Description of Artificial Sequence: Synthetic oligonucleotide
  Antisense strand to SEQ ID NO: 2268452
aucauugcuggcuucaggc

SEQ ID NO: 2268454 - RNA, 19 nt, Artificial Sequence
  Description of Artificial Sequence: Synthetic oligonucleotide
  Sense strand starting at position 2589 of SEQ ID NO: 1884473
gugucaagccugcaaugga

SEQ ID NO: 2268455 - RNA, 19 nt, Artificial Sequence
  Description of Artificial Sequence: Synthetic oligonucleotide
  Antisense strand to SEQ ID NO: 2268454
uccauugcaggcuugacac

SEQ ID NO: 2268456 - RNA, 19 nt, Artificial Sequence
  Description of Artificial Sequence: Synthetic oligonucleotide
  Sense strand starting at position 2597 of SEQ ID NO: 1884473
ccugcaauggagugaugau

SEQ ID NO: 2268457 - RNA, 19 nt, Artificial Sequence
  Description of Artificial Sequence: Synthetic oligonucleotide
  Antisense strand to SEQ ID NO: 2268456
aucaucacuccauugcagg

SEQ ID NO: 2268458 - RNA, 19 nt, Artificial Sequence
  Description of Artificial Sequence: Synthetic oligonucleotide
  Sense strand starting at position 2598 of SEQ ID NO: 1884473
cugcaauggagugaugauu

SEQ ID NO: 2268459 - RNA, 19 nt, Artificial Sequence
  Description of Artificial Sequence: Synthetic oligonucleotide
  Antisense strand to SEQ ID NO: 2268458
aaucaucacuccauugcag

SEQ ID NO: 2268460 - RNA, 19 nt, Artificial Sequence
  Description of Artificial Sequence: Synthetic oligonucleotide
  Sense strand starting at position 2632 of SEQ ID NO: 1884473
gccagagccuuucuaagaa

SEQ ID NO: 2268461 - RNA, 19 nt, Artificial Sequence
  Description of Artificial Sequence: Synthetic oligonucleotide
  Antisense strand to SEQ ID NO: 2268460
uucuuagaaaggcucuggc

SEQ ID NO: 2268462 - RNA, 19 nt, Artificial Sequence
  Description of Artificial Sequence: Synthetic oligonucleotide
  Sense strand starting at position 2752 of SEQ ID NO: 1884473
uuugaauucugaucuguca

SEQ ID NO: 2268463 - RNA, 19 nt, Artificial Sequence
  Description of Artificial Sequence: Synthetic oligonucleotide
  Antisense strand to SEQ ID NO: 2268462
ugacagaucagaauucaaa

SEQ ID NO: 2268464 - RNA, 19 nt, Artificial Sequence
  Description of Artificial Sequence: Synthetic oligonucleotide
  Sense strand starting at position 2759 of SEQ ID NO: 1884473
ucugaucugucaccuggua

SEQ ID NO: 2268465 - RNA, 19 nt, Artificial Sequence
  Description of Artificial Sequence: Synthetic oligonucleotide
  Antisense strand to SEQ ID NO: 2268464
uaccaggugacagaucaga

SEQ ID NO: 2268466 - RNA, 19 nt, Artificial Sequence
  Description of Artificial Sequence: Synthetic oligonucleotide
  Sense strand starting at position 2818 of SEQ ID NO: 1884473
uaaguccuucuggagguaa

SEQ ID NO: 2268467 - RNA, 19 nt, Artificial Sequence
  Description of Artificial Sequence: Synthetic oligonucleotide
  Antisense strand to SEQ ID NO: 2268466
uuaccuccagaaggacuua

SEQ ID NO: 2268468 - RNA, 19 nt, Artificial Sequence
  Description of Artificial Sequence: Synthetic oligonucleotide
  Sense strand starting at position 2873 of SEQ ID NO: 1884473
uuuauaugauccuuguaug

SEQ ID NO: 2268469 - RNA, 19 nt, Artificial Sequence
  Description of Artificial Sequence: Synthetic oligonucleotide
  Antisense strand to SEQ ID NO: 2268468
cauacaaggaucauauaaa

SEQ ID NO: 2268470 - RNA, 19 nt, Artificial Sequence
  Description of Artificial Sequence: Synthetic oligonucleotide
  Sense strand starting at position 2874 of SEQ ID NO: 1884473
uuauaugauccuuguaugu

SEQ ID NO: 2268471 - RNA, 19 nt, Artificial Sequence
  Description of Artificial Sequence: Synthetic oligonucleotide
  Antisense strand to SEQ ID NO: 2268470
acauacaaggaucauauaa

SEQ ID NO: 2268472 - RNA, 19 nt, Artificial Sequence
  Description of Artificial Sequence: Synthetic oligonucleotide
  Sense strand starting at position 3083 of SEQ ID NO: 1884473
guguuuauuauugauguga

SEQ ID NO: 2268473 - RNA, 19 nt, Artificial Sequence
  Description of Artificial Sequence: Synthetic oligonucleotide
  Antisense strand to SEQ ID NO: 2268472
ucacaucaauaauaaacac

SEQ ID NO: 2268474 - RNA, 19 nt, Artificial Sequence
  Description of Artificial Sequence: Synthetic oligonucleotide
  Sense strand starting at position 3309 of SEQ ID NO: 1884473
augguaucucauuggauaa

SEQ ID NO: 2268475 - RNA, 19 nt, Artificial Sequence
  Description of Artificial Sequence: Synthetic oligonucleotide
  Antisense strand to SEQ ID NO: 2268474
uuauccaaugagauaccau

SEQ ID NO: 2268476 - RNA, 19 nt, Artificial Sequence
  Description of Artificial Sequence: Synthetic oligonucleotide
  Sense strand starting at position 3310 of SEQ ID NO: 1884473
ugguaucucauuggauaag

SEQ ID NO: 2268477 - RNA, 19 nt, Artificial Sequence
  Description of Artificial Sequence: Synthetic oligonucleotide
  Antisense strand to SEQ ID NO: 2268476
cuuauccaaugagauacca

SEQ ID NO: 2268478 - RNA, 19 nt, Artificial Sequence
  Description of Artificial Sequence: Synthetic oligonucleotide
  Sense strand starting at position 3424 of SEQ ID NO: 1884473
ggaauuagaguggaucgua

SEQ ID NO: 2268479 - RNA, 19 nt, Artificial Sequence
  Description of Artificial Sequence: Synthetic oligonucleotide
  Antisense strand to SEQ ID NO: 2268478
uacgauccacucuaauucc

SEQ ID NO: 2268480 - RNA, 19 nt, Artificial Sequence
  Description of Artificial Sequence: Synthetic oligonucleotide
  Sense strand starting at position 3427 of SEQ ID NO: 1884473
auuagaguggaucguauca

SEQ ID NO: 2268481 - RNA, 19 nt, Artificial Sequence
  Description of Artificial Sequence: Synthetic oligonucleotide
  Antisense strand to SEQ ID NO: 2268480
ugauacgauccacucuaau

SEQ ID NO: 2268482 - RNA, 19 nt, Artificial Sequence
  Description of Artificial Sequence: Synthetic oligonucleotide
  Sense strand starting at position 3709 of SEQ ID NO: 1884473
ucgggaaacucaguucuga

SEQ ID NO: 2268483 - RNA, 19 nt, Artificial Sequence
  Description of Artificial Sequence: Synthetic oligonucleotide
  Antisense strand to SEQ ID NO: 2268482
ucagaacugaguuucccga

SEQ ID NO: 2268484 - RNA, 19 nt, Artificial Sequence
  Description of Artificial Sequence: Synthetic oligonucleotide
  Sense strand starting at position 145 of SEQ ID NO: 1884474
ggucuuagcaccgauauga

SEQ ID NO: 2268485 - RNA, 19 nt, Artificial Sequence
  Description of Artificial Sequence: Synthetic oligonucleotide
  Antisense strand to SEQ ID NO: 2268484
ucauaucggugcuaagacc

SEQ ID NO: 2268486 - RNA, 19 nt, Artificial Sequence
  Description of Artificial Sequence: Synthetic oligonucleotide
  Sense strand starting at position 187 of SEQ ID NO: 1884474
auccaaauugauggucauu

SEQ ID NO: 2268487 - RNA, 19 nt, Artificial Sequence
  Description of Artificial Sequence: Synthetic oligonucleotide
  Antisense strand to SEQ ID NO: 2268486
aaugaccaucaauuuggau

SEQ ID NO: 2268488 - RNA, 19 nt, Artificial Sequence
  Description of Artificial Sequence: Synthetic oligonucleotide
  Sense strand starting at position 189 of SEQ ID NO: 1884474
ccaaauugauggucauuau

SEQ ID NO: 2268489 - RNA, 19 nt, Artificial Sequence
  Description of Artificial Sequence: Synthetic oligonucleotide
  Antisense strand to SEQ ID NO: 2268488
auaaugaccaucaauuugg

SEQ ID NO: 2268490 - RNA, 19 nt, Artificial Sequence
  Description of Artificial Sequence: Synthetic oligonucleotide
  Sense strand starting at position 192 of SEQ ID NO: 1884474
aauugauggucauuauaag

SEQ ID NO: 2268491 - RNA, 19 nt, Artificial Sequence
  Description of Artificial Sequence: Synthetic oligonucleotide
  Antisense strand to SEQ ID NO: 2268490
cuuauaaugaccaucaauu

SEQ ID NO: 2268492 - RNA, 19 nt, Artificial Sequence
  Description of Artificial Sequence: Synthetic oligonucleotide
  Sense strand starting at position 331 of SEQ ID NO: 1884474
aaccaagaucugggucaua

SEQ ID NO: 2268493 - RNA, 19 nt, Artificial Sequence
  Description of Artificial Sequence: Synthetic oligonucleotide
  Antisense strand to SEQ ID NO: 2268492
uaugacccagaucuugguu

SEQ ID NO: 2268494 - RNA, 19 nt, Artificial Sequence
  Description of Artificial Sequence: Synthetic oligonucleotide
  Sense strand starting at position 366 of SEQ ID NO: 1884474
cccaguuguccuggaagaa

SEQ ID NO: 2268495 - RNA, 19 nt, Artificial Sequence
  Description of Artificial Sequence: Synthetic oligonucleotide
  Antisense strand to SEQ ID NO: 2268494
uucuuccaggacaacuggg

SEQ ID NO: 2268496 - RNA, 19 nt, Artificial Sequence
  Description of Artificial Sequence: Synthetic oligonucleotide
  Sense strand starting at position 405 of SEQ ID NO: 1884474
uggaaagcuugugucugaa

SEQ ID NO: 2268497 - RNA, 19 nt, Artificial Sequence
  Description of Artificial Sequence: Synthetic oligonucleotide
  Antisense strand to SEQ ID NO: 2268496
uucagacacaagcuuucca

SEQ ID NO: 2268498 - RNA, 19 nt, Artificial Sequence
  Description of Artificial Sequence: Synthetic oligonucleotide
  Sense strand starting at position 407 of SEQ ID NO: 1884474
gaaagcuugugucugaauc

SEQ ID NO: 2268499 - RNA, 19 nt, Artificial Sequence
  Description of Artificial Sequence: Synthetic oligonucleotide
  Antisense strand to SEQ ID NO: 2268498
gauucagacacaagcuuuc

SEQ ID NO: 2268500 - RNA, 19 nt, Artificial Sequence
  Description of Artificial Sequence: Synthetic oligonucleotide
  Sense strand starting at position 440 of SEQ ID NO: 1884474
gcuggcugauuucuucuaa

SEQ ID NO: 2268501 - RNA, 19 nt, Artificial Sequence
  Description of Artificial Sequence: Synthetic oligonucleotide
  Antisense strand to SEQ ID NO: 2268500
uuagaagaaaucagccagc

SEQ ID NO: 2268502 - RNA, 19 nt, Artificial Sequence
  Description of Artificial Sequence: Synthetic oligonucleotide
  Sense strand starting at position 2066 of SEQ ID NO: 1884474
gguauuacacgcuagguau

SEQ ID NO: 2268503 - RNA, 19 nt, Artificial Sequence
  Description of Artificial Sequence: Synthetic oligonucleotide
  Antisense strand to SEQ ID NO: 2268502
auaccuagcguguaauacc

SEQ ID NO: 2268504 - RNA, 19 nt, Artificial Sequence
  Description of Artificial Sequence: Synthetic oligonucleotide
  Sense strand starting at position 2122 of SEQ ID NO: 1884474
cgaggugucguguugcuga

SEQ ID NO: 2268505 - RNA, 19 nt, Artificial Sequence
  Description of Artificial Sequence: Synthetic oligonucleotide
  Antisense strand to SEQ ID NO: 2268504
ucagcaacacgacaccucg

SEQ ID NO: 2268506 - RNA, 19 nt, Artificial Sequence
  Description of Artificial Sequence: Synthetic oligonucleotide
  Sense strand starting at position 2124 of SEQ ID NO: 1884474
aggugucguguugcugaua

SEQ ID NO: 2268507 - RNA, 19 nt, Artificial Sequence
  Description of Artificial Sequence: Synthetic oligonucleotide
  Antisense strand to SEQ ID NO: 2268506
uaucagcaacacgacaccu

SEQ ID NO: 2268508 - RNA, 19 nt, Artificial Sequence
  Description of Artificial Sequence: Synthetic oligonucleotide
  Sense strand starting at position 2135 of SEQ ID NO: 1884474
ugcugauacgcucagacaa

SEQ ID NO: 2268509 - RNA, 19 nt, Artificial Sequence
  Description of Artificial Sequence: Synthetic oligonucleotide
  Antisense strand to SEQ ID NO: 2268508
uugucugagcguaucagca

SEQ ID NO: 2268510 - RNA, 19 nt, Artificial Sequence
  Description of Artificial Sequence: Synthetic oligonucleotide
  Sense strand starting at position 2156 of SEQ ID NO: 1884474
gagcuuggcguagagagaa

SEQ ID NO: 2268511 - RNA, 19 nt, Artificial Sequence
  Description of Artificial Sequence: Synthetic oligonucleotide
  Antisense strand to SEQ ID NO: 2268510
uucucucuacgccaagcuc

SEQ ID NO: 2268512 - RNA, 19 nt, Artificial Sequence
  Description of Artificial Sequence: Synthetic oligonucleotide
  Sense strand starting at position 2372 of SEQ ID NO: 1884474
cuguuaauuccgcaauaac

SEQ ID NO: 2268513 - RNA, 19 nt, Artificial Sequence
  Description of Artificial Sequence: Synthetic oligonucleotide
  Antisense strand to SEQ ID NO: 2268512
guuauugcggaauuaacag

SEQ ID NO: 2268514 - RNA, 19 nt, Artificial Sequence
  Description of Artificial Sequence: Synthetic oligonucleotide
  Sense strand starting at position 2480 of SEQ ID NO: 1884474
agagguugcagcuacagau

SEQ ID NO: 2268515 - RNA, 19 nt, Artificial Sequence
  Description of Artificial Sequence: Synthetic oligonucleotide
  Antisense strand to SEQ ID NO: 2268514
aucuguagcugcaaccucu

SEQ ID NO: 2268516 - RNA, 19 nt, Artificial Sequence
  Description of Artificial Sequence: Synthetic oligonucleotide
  Sense strand starting at position 2545 of SEQ ID NO: 1884474
ucugaauguggaugugaga

SEQ ID NO: 2268517 - RNA, 19 nt, Artificial Sequence
  Description of Artificial Sequence: Synthetic oligonucleotide
  Antisense strand to SEQ ID NO: 2268516
ucucacauccacauucaga

SEQ ID NO: 2268518 - RNA, 19 nt, Artificial Sequence
  Description of Artificial Sequence: Synthetic oligonucleotide
  Sense strand starting at position 2729 of SEQ ID NO: 1884474
guacuuauucgagacauug

SEQ ID NO: 2268519 - RNA, 19 nt, Artificial Sequence
  Description of Artificial Sequence: Synthetic oligonucleotide
  Antisense strand to SEQ ID NO: 2268518
caaugucucgaauaaguac

SEQ ID NO: 2268520 - RNA, 19 nt, Artificial Sequence
  Description of Artificial Sequence: Synthetic oligonucleotide
  Sense strand starting at position 2737 of SEQ ID NO: 1884474
ucgagacauugaucauuga

SEQ ID NO: 2268521 - RNA, 19 nt, Artificial Sequence
  Description of Artificial Sequence: Synthetic oligonucleotide
  Antisense strand to SEQ ID NO: 2268520
ucaaugaucaaugucucga

SEQ ID NO: 2268522 - RNA, 19 nt, Artificial Sequence
  Description of Artificial Sequence: Synthetic oligonucleotide
  Sense strand starting at position 2756 of SEQ ID NO: 1884474
acaggucccucuguauuau

SEQ ID NO: 2268523 - RNA, 19 nt, Artificial Sequence
  Description of Artificial Sequence: Synthetic oligonucleotide
  Antisense strand to SEQ ID NO: 2268522
auaauacagagggaccugu

SEQ ID NO: 2268524 - RNA, 19 nt, Artificial Sequence
  Description of Artificial Sequence: Synthetic oligonucleotide
  Sense strand starting at position 2774 of SEQ ID NO: 1884474
ugaugauuucugugucugu

SEQ ID NO: 2268525 - RNA, 19 nt, Artificial Sequence
  Description of Artificial Sequence: Synthetic oligonucleotide
  Antisense strand to SEQ ID NO: 2268524
acagacacagaaaucauca

SEQ ID NO: 2268526 - RNA, 19 nt, Artificial Sequence
  Description of Artificial Sequence: Synthetic oligonucleotide
  Sense strand starting at position 2778 of SEQ ID NO: 1884474
gauuucugugucuguuugu

SEQ ID NO: 2268527 - RNA, 19 nt, Artificial Sequence
  Description of Artificial Sequence: Synthetic oligonucleotide
  Antisense strand to SEQ ID NO: 2268526
acaaacagacacagaaauc

SEQ ID NO: 2268528 - RNA, 19 nt, Artificial Sequence
  Description of Artificial Sequence: Synthetic oligonucleotide
  Sense strand starting at position 2791 of SEQ ID NO: 1884474
guuugucuaaauggagagu

SEQ ID NO: 2268529 - RNA, 19 nt, Artificial Sequence
  Description of Artificial Sequence: Synthetic oligonucleotide
  Antisense strand to SEQ ID NO: 2268528
acucuccauuuagacaaac

SEQ ID NO: 2268530 - RNA, 19 nt, Artificial Sequence
  Description of Artificial Sequence: Synthetic oligonucleotide
  Sense strand starting at position 2792 of SEQ ID NO: 1884474
uuugucuaaauggagaguu

SEQ ID NO: 2268531 - RNA, 19 nt, Artificial Sequence
  Description of Artificial Sequence: Synthetic oligonucleotide
  Antisense strand to SEQ ID NO: 2268530
aacucuccauuuagacaaa

SEQ ID NO: 2268532 - RNA, 19 nt, Artificial Sequence
  Description of Artificial Sequence: Synthetic oligonucleotide
  Sense strand starting at position 2794 of SEQ ID NO: 1884474
ugucuaaauggagaguucu

SEQ ID NO: 2268533 - RNA, 19 nt, Artificial Sequence
  Description of Artificial Sequence: Synthetic oligonucleotide
  Antisense strand to SEQ ID NO: 2268532
agaacucuccauuuagaca

SEQ ID NO: 2268534 - RNA, 19 nt, Artificial Sequence
  Description of Artificial Sequence: Synthetic oligonucleotide
  Sense strand starting at position 2986 of SEQ ID NO: 1884474
ggugagugggucgagagau

SEQ ID NO: 2268535 - RNA, 19 nt, Artificial Sequence
  Description of Artificial Sequence: Synthetic oligonucleotide
  Antisense strand to SEQ ID NO: 2268534
aucucucgacccacucacc

SEQ ID NO: 2268536 - RNA, 19 nt, Artificial Sequence
  Description of Artificial Sequence: Synthetic oligonucleotide
  Sense strand starting at position 2994 of SEQ ID NO: 1884474
ggucgagagauggaugagu

SEQ ID NO: 2268537 - RNA, 19 nt, Artificial Sequence
  Description of Artificial Sequence: Synthetic oligonucleotide
  Antisense strand to SEQ ID NO: 2268536
acucauccaucucucgacc

SEQ ID NO: 2268538 - RNA, 19 nt, Artificial Sequence
  Description of Artificial Sequence: Synthetic oligonucleotide
  Sense strand starting at position 3076 of SEQ ID NO: 1884474
agggauagcaucuguuucu

SEQ ID NO: 2268539 - RNA, 19 nt, Artificial Sequence
  Description of Artificial Sequence: Synthetic oligonucleotide
  Antisense strand to SEQ ID NO: 2268538
agaaacagaugcuaucccu

SEQ ID NO: 2268540 - RNA, 19 nt, Artificial Sequence
  Description of Artificial Sequence: Synthetic oligonucleotide
  Sense strand starting at position 3077 of SEQ ID NO: 1884474
gggauagcaucuguuucua

SEQ ID NO: 2268541 - RNA, 19 nt, Artificial Sequence
  Description of Artificial Sequence: Synthetic oligonucleotide
  Antisense strand to SEQ ID NO: 2268540
uagaaacagaugcuauccc

SEQ ID NO: 2268542 - RNA, 19 nt, Artificial Sequence
  Description of Artificial Sequence: Synthetic oligonucleotide
  Sense strand starting at position 3079 of SEQ ID NO: 1884474
gauagcaucuguuucuaag

SEQ ID NO: 2268543 - RNA, 19 nt, Artificial Sequence
  Description of Artificial Sequence: Synthetic oligonucleotide
  Antisense strand to SEQ ID NO: 2268542
cuuagaaacagaugcuauc

SEQ ID NO: 2268544 - RNA, 19 nt, Artificial Sequence
  Description of Artificial Sequence: Synthetic oligonucleotide
  Sense strand starting at position 3210 of SEQ ID NO: 1884474
ccugguuucccagauaacc

SEQ ID NO: 2268545 - RNA, 19 nt, Artificial Sequence
  Description of Artificial Sequence: Synthetic oligonucleotide
  Antisense strand to SEQ ID NO: 2268544
gguuaucugggaaaccagg

SEQ ID NO: 2268546 - RNA, 19 nt, Artificial Sequence
  Description of Artificial Sequence: Synthetic oligonucleotide
  Sense strand starting at position 3255 of SEQ ID NO: 1884474
agguguaguucccugaaug

SEQ ID NO: 2268547 - RNA, 19 nt, Artificial Sequence
  Description of Artificial Sequence: Synthetic oligonucleotide
  Antisense strand to SEQ ID NO: 2268546
cauucagggaacuacaccu

SEQ ID NO: 2268548 - RNA, 19 nt, Artificial Sequence
  Description of Artificial Sequence: Synthetic oligonucleotide
  Sense strand starting at position 3288 of SEQ ID NO: 1884474
accugaagaguuuguuaaa

SEQ ID NO: 2268549 - RNA, 19 nt, Artificial Sequence
  Description of Artificial Sequence: Synthetic oligonucleotide
  Antisense strand to SEQ ID NO: 2268548
uuuaacaaacucuucaggu

SEQ ID NO: 2268550 - RNA, 19 nt, Artificial Sequence
  Description of Artificial Sequence: Synthetic oligonucleotide
  Sense strand starting at position 3319 of SEQ ID NO: 1884474
gggcccuucccucagagau

SEQ ID NO: 2268551 - RNA, 19 nt, Artificial Sequence
  Description of Artificial Sequence: Synthetic oligonucleotide
  Antisense strand to SEQ ID NO: 2268550
aucucugagggaagggccc

SEQ ID NO: 2268552 - RNA, 19 nt, Artificial Sequence
  Description of Artificial Sequence: Synthetic oligonucleotide
  Sense strand starting at position 3367 of SEQ ID NO: 1884474
gggaauauguauguuuaaa

SEQ ID NO: 2268553 - RNA, 19 nt, Artificial Sequence
  Description of Artificial Sequence: Synthetic oligonucleotide
  Antisense strand to SEQ ID NO: 2268552
uuuaaacauacauauuccc

SEQ ID NO: 2268554 - RNA, 19 nt, Artificial Sequence
  Description of Artificial Sequence: Synthetic oligonucleotide
  Sense strand starting at position 3404 of SEQ ID NO: 1884474
ggcugaugugaagguaagu

SEQ ID NO: 2268555 - RNA, 19 nt, Artificial Sequence
  Description of Artificial Sequence: Synthetic oligonucleotide
  Antisense strand to SEQ ID NO: 2268554
acuuaccuucacaucagcc

SEQ ID NO: 2268556 - RNA, 19 nt, Artificial Sequence
  Description of Artificial Sequence: Synthetic oligonucleotide
  Sense strand starting at position 3409 of SEQ ID NO: 1884474
augugaagguaaguuugau

SEQ ID NO: 2268557 - RNA, 19 nt, Artificial Sequence
  Description of Artificial Sequence: Synthetic oligonucleotide
  Antisense strand to SEQ ID NO: 2268556
aucaaacuuaccuucacau

SEQ ID NO: 2268558 - RNA, 19 nt, Artificial Sequence
  Description of Artificial Sequence: Synthetic oligonucleotide
  Sense strand starting at position 3643 of SEQ ID NO: 1884474
aggcccagucccuaaagaa

SEQ ID NO: 2268559 - RNA, 19 nt, Artificial Sequence
  Description of Artificial Sequence: Synthetic oligonucleotide
  Antisense strand to SEQ ID NO: 2268558
uucuuuagggacugggccu

SEQ ID NO: 2268560 - RNA, 19 nt, Artificial Sequence
  Description of Artificial Sequence: Synthetic oligonucleotide
  Sense strand starting at position 3803 of SEQ ID NO: 1884474
gucuguuucuaccuaaaca

SEQ ID NO: 2268561 - RNA, 19 nt, Artificial Sequence
  Description of Artificial Sequence: Synthetic oligonucleotide
  Antisense strand to SEQ ID NO: 2268560
uguuuagguagaaacagac

SEQ ID NO: 2268562 - RNA, 19 nt, Artificial Sequence
  Description of Artificial Sequence: Synthetic oligonucleotide
  Sense strand starting at position 3956 of SEQ ID NO: 1884474
gccaaacaucuuggcaacu

SEQ ID NO: 2268563 - RNA, 19 nt, Artificial Sequence
  Description of Artificial Sequence: Synthetic oligonucleotide
  Antisense strand to SEQ ID NO: 2268562
aguugccaagauguuuggc

SEQ ID NO: 2268564 - RNA, 19 nt, Artificial Sequence
  Description of Artificial Sequence: Synthetic oligonucleotide
  Sense strand starting at position 510 of SEQ ID NO: 1884475
caacgaaaugcauacgcuu

SEQ ID NO: 2268565 - RNA, 19 nt, Artificial Sequence
  Description of Artificial Sequence: Synthetic oligonucleotide
  Antisense strand to SEQ ID NO: 2268564
aagcguaugcauuucguug

SEQ ID NO: 2268566 - RNA, 19 nt, Artificial Sequence
  Description of Artificial Sequence: Synthetic oligonucleotide
  Sense strand starting at position 522 of SEQ ID NO: 1884475
uacgcuuucgagggaagga

SEQ ID NO: 2268567 - RNA, 19 nt, Artificial Sequence
  Description of Artificial Sequence: Synthetic oligonucleotide
  Antisense strand to SEQ ID NO: 2268566
uccuucccucgaaagcgua

SEQ ID NO: 2268568 - RNA, 19 nt, Artificial Sequence
  Description of Artificial Sequence: Synthetic oligonucleotide
  Sense strand starting at position 986 of SEQ ID NO: 1884475
cuauguuccaggugugaaa

SEQ ID NO: 2268569 - RNA, 19 nt, Artificial Sequence
  Description of Artificial Sequence: Synthetic oligonucleotide
  Antisense strand to SEQ ID NO: 2268568
uuucacaccuggaacauag

SEQ ID NO: 2268570 - RNA, 19 nt, Artificial Sequence
  Description of Artificial Sequence: Synthetic oligonucleotide
  Sense strand starting at position 1466 of SEQ ID NO: 1884475
ggucaucuagggcgaaauu

SEQ ID NO: 2268571 - RNA, 19 nt, Artificial Sequence
  Description of Artificial Sequence: Synthetic oligonucleotide
  Antisense strand to SEQ ID NO: 2268570
aauuucgcccuagaugacc

SEQ ID NO: 2268572 - RNA, 19 nt, Artificial Sequence
  Description of Artificial Sequence: Synthetic oligonucleotide
  Sense strand starting at position 1498 of SEQ ID NO: 1884475
ugagcagugacuuaaguuu

SEQ ID NO: 2268573 - RNA, 19 nt, Artificial Sequence
  Description of Artificial Sequence: Synthetic oligonucleotide
  Antisense strand to SEQ ID NO: 2268572
aaacuuaagucacugcuca

SEQ ID NO: 2268574 - RNA, 19 nt, Artificial Sequence
  Description of Artificial Sequence: Synthetic oligonucleotide
  Sense strand starting at position 1682 of SEQ ID NO: 1884475
ggagcucagaggugaagau

SEQ ID NO: 2268575 - RNA, 19 nt, Artificial Sequence
  Description of Artificial Sequence: Synthetic oligonucleotide
  Antisense strand to SEQ ID NO: 2268574
aucuucaccucugagcucc

SEQ ID NO: 2268576 - RNA, 19 nt, Artificial Sequence
  Description of Artificial Sequence: Synthetic oligonucleotide
  Sense strand starting at position 1790 of SEQ ID NO: 1884475
cugggauguuggaggaaga

SEQ ID NO: 2268577 - RNA, 19 nt, Artificial Sequence
  Description of Artificial Sequence: Synthetic oligonucleotide
  Antisense strand to SEQ ID NO: 2268576
ucuuccuccaacaucccag

SEQ ID NO: 2268578 - RNA, 19 nt, Artificial Sequence
  Description of Artificial Sequence: Synthetic oligonucleotide
  Sense strand starting at position 2012 of SEQ ID NO: 1884475
gaggguaggaccuguauac

SEQ ID NO: 2268579 - RNA, 19 nt, Artificial Sequence
  Description of Artificial Sequence: Synthetic oligonucleotide
  Antisense strand to SEQ ID NO: 2268578
guauacagguccuacccuc

SEQ ID NO: 2268580 - RNA, 19 nt, Artificial Sequence
  Description of Artificial Sequence: Synthetic oligonucleotide
  Sense strand starting at position 2105 of SEQ ID NO: 1884475
ucccuagcucaggacuuau

SEQ ID NO: 2268581 - RNA, 19 nt, Artificial Sequence
  Description of Artificial Sequence: Synthetic oligonucleotide
  Antisense strand to SEQ ID NO: 2268580
auaaguccugagcuaggga

SEQ ID NO: 2268582 - RNA, 19 nt, Artificial Sequence
  Description of Artificial Sequence: Synthetic oligonucleotide
  Sense strand starting at position 2116 of SEQ ID NO: 1884475
ggacuuauuccaugcacac

SEQ ID NO: 2268583 - RNA, 19 nt, Artificial Sequence
  Description of Artificial Sequence: Synthetic oligonucleotide
  Antisense strand to SEQ ID NO: 2268582
gugugcauggaauaagucc

SEQ ID NO: 2268584 - RNA, 19 nt, Artificial Sequence
  Description of Artificial Sequence: Synthetic oligonucleotide
  Sense strand starting at position 2125 of SEQ ID NO: 1884475
ccaugcacacucugauaga

SEQ ID NO: 2268585 - RNA, 19 nt, Artificial Sequence
  Description of Artificial Sequence: Synthetic oligonucleotide
  Antisense strand to SEQ ID NO: 2268584
ucuaucagagugugcaugg

SEQ ID NO: 2268586 - RNA, 19 nt, Artificial Sequence
  Description of Artificial Sequence: Synthetic oligonucleotide
  Sense strand starting at position 2346 of SEQ ID NO: 1884475
auagcuaccuccucagaga

SEQ ID NO: 2268587 - RNA, 19 nt, Artificial Sequence
  Description of Artificial Sequence: Synthetic oligonucleotide
  Antisense strand to SEQ ID NO: 2268586
ucucugaggagguagcuau

SEQ ID NO: 2268588 - RNA, 19 nt, Artificial Sequence
  Description of Artificial Sequence: Synthetic oligonucleotide
  Sense strand starting at position 2414 of SEQ ID NO: 1884475
accugagugugagucauca

SEQ ID NO: 2268589 - RNA, 19 nt, Artificial Sequence
  Description of Artificial Sequence: Synthetic oligonucleotide
  Antisense strand to SEQ ID NO: 2268588
ugaugacucacacucaggu

SEQ ID NO: 2268590 - RNA, 19 nt, Artificial Sequence
  Description of Artificial Sequence: Synthetic oligonucleotide
  Sense strand starting at position 2416 of SEQ ID NO: 1884475
cugagugugagucaucauc

SEQ ID NO: 2268591 - RNA, 19 nt, Artificial Sequence
  Description of Artificial Sequence: Synthetic oligonucleotide
  Antisense strand to SEQ ID NO: 2268590
gaugaugacucacacucag

SEQ ID NO: 2268592 - RNA, 19 nt, Artificial Sequence
  Description of Artificial Sequence: Synthetic oligonucleotide
  Sense strand starting at position 2418 of SEQ ID NO: 1884475
gagugugagucaucaucac

SEQ ID NO: 2268593 - RNA, 19 nt, Artificial Sequence
  Description of Artificial Sequence: Synthetic oligonucleotide
  Antisense strand to SEQ ID NO: 2268592
gugaugaugacucacacuc

SEQ ID NO: 2268594 - RNA, 19 nt, Artificial Sequence
  Description of Artificial Sequence: Synthetic oligonucleotide
  Sense strand starting at position 2422 of SEQ ID NO: 1884475
gugagucaucaucaccacu

SEQ ID NO: 2268595 - RNA, 19 nt, Artificial Sequence
  Description of Artificial Sequence: Synthetic oligonucleotide
  Antisense strand to SEQ ID NO: 2268594
aguggugaugaugacucac

SEQ ID NO: 2268596 - RNA, 19 nt, Artificial Sequence
  Description of Artificial Sequence: Synthetic oligonucleotide
  Sense strand starting at position 2473 of SEQ ID NO: 1884475
ugccauccuugcuuagaga

SEQ ID NO: 2268597 - RNA, 19 nt, Artificial Sequence
  Description of Artificial Sequence: Synthetic oligonucleotide
  Antisense strand to SEQ ID NO: 2268596
ucucuaagcaaggauggca

SEQ ID NO: 2268598 - RNA, 19 nt, Artificial Sequence
  Description of Artificial Sequence: Synthetic oligonucleotide
  Sense strand starting at position 2474 of SEQ ID NO: 1884475
gccauccuugcuuagagau

SEQ ID NO: 2268599 - RNA, 19 nt, Artificial Sequence
  Description of Artificial Sequence: Synthetic oligonucleotide
  Antisense strand to SEQ ID NO: 2268598
aucucuaagcaaggauggc

SEQ ID NO: 2268600 - RNA, 19 nt, Artificial Sequence
  Description of Artificial Sequence: Synthetic oligonucleotide
  Sense strand starting at position 2549 of SEQ ID NO: 1884475
gcaucauaccagcagauca

SEQ ID NO: 2268601 - RNA, 19 nt, Artificial Sequence
  Description of Artificial Sequence: Synthetic oligonucleotide
  Antisense strand to SEQ ID NO: 2268600
ugaucugcugguaugaugc

SEQ ID NO: 2268602 - RNA, 19 nt, Artificial Sequence
  Description of Artificial Sequence: Synthetic oligonucleotide
  Sense strand starting at position 2557 of SEQ ID NO: 1884475
ccagcagaucaauaaaugu

SEQ ID NO: 2268603 - RNA, 19 nt, Artificial Sequence
  Description of Artificial Sequence: Synthetic oligonucleotide
  Antisense strand to SEQ ID NO: 2268602
acauuuauugaucugcugg

SEQ ID NO: 2268604 - RNA, 19 nt, Artificial Sequence
  Description of Artificial Sequence: Synthetic oligonucleotide
  Sense strand starting at position 2564 of SEQ ID NO: 1884475
aucaauaaauguuugugga

SEQ ID NO: 2268605 - RNA, 19 nt, Artificial Sequence
  Description of Artificial Sequence: Synthetic oligonucleotide
  Antisense strand to SEQ ID NO: 2268604
uccacaaacauuuauugau

SEQ ID NO: 2268606 - RNA, 19 nt, Artificial Sequence
  Description of Artificial Sequence: Synthetic oligonucleotide
  Sense strand starting at position 2715 of SEQ ID NO: 1884475
guugucuugcuccaaauau

SEQ ID NO: 2268607 - RNA, 19 nt, Artificial Sequence
  Description of Artificial Sequence: Synthetic oligonucleotide
  Antisense strand to SEQ ID NO: 2268606
auauuuggagcaagacaac

SEQ ID NO: 2268608 - RNA, 19 nt, Artificial Sequence
  Description of Artificial Sequence: Synthetic oligonucleotide
  Sense strand starting at position 2885 of SEQ ID NO: 1884475
gggcauguguacucuggaa

SEQ ID NO: 2268609 - RNA, 19 nt, Artificial Sequence
  Description of Artificial Sequence: Synthetic oligonucleotide
  Antisense strand to SEQ ID NO: 2268608
uuccagaguacacaugccc

SEQ ID NO: 2268610 - RNA, 19 nt, Artificial Sequence
  Description of Artificial Sequence: Synthetic oligonucleotide
  Sense strand starting at position 2887 of SEQ ID NO: 1884475
gcauguguacucuggaaau

SEQ ID NO: 2268611 - RNA, 19 nt, Artificial Sequence
  Description of Artificial Sequence: Synthetic oligonucleotide
  Antisense strand to SEQ ID NO: 2268610
auuuccagaguacacaugc

SEQ ID NO: 2268612 - RNA, 19 nt, Artificial Sequence
  Description of Artificial Sequence: Synthetic oligonucleotide
  Sense strand starting at position 2889 of SEQ ID NO: 1884475
auguguacucuggaaauac

SEQ ID NO: 2268613 - RNA, 19 nt, Artificial Sequence
  Description of Artificial Sequence: Synthetic oligonucleotide
  Antisense strand to SEQ ID NO: 2268612
guauuuccagaguacacau

SEQ ID NO: 2268614 - RNA, 19 nt, Artificial Sequence
  Description of Artificial Sequence: Synthetic oligonucleotide
  Sense strand starting at position 3067 of SEQ ID NO: 1884475
cugagcuggugauugcaaa

SEQ ID NO: 2268615 - RNA, 19 nt, Artificial Sequence
  Description of Artificial Sequence: Synthetic oligonucleotide
  Antisense strand to SEQ ID NO: 2268614
uuugcaaucaccagcucag

SEQ ID NO: 2268616 - RNA, 19 nt, Artificial Sequence
  Description of Artificial Sequence: Synthetic oligonucleotide
  Sense strand starting at position 3454 of SEQ ID NO: 1884475
guaacauguggauggauag

SEQ ID NO: 2268617 - RNA, 19 nt, Artificial Sequence
  Description of Artificial Sequence: Synthetic oligonucleotide
  Antisense strand to SEQ ID NO: 2268616
cuauccauccacauguuac

SEQ ID NO: 2268618 - RNA, 19 nt, Artificial Sequence
  Description of Artificial Sequence: Synthetic oligonucleotide
  Sense strand starting at position 3464 of SEQ ID NO: 1884475
gauggauaguuguugguua

SEQ ID NO: 2268619 - RNA, 19 nt, Artificial Sequence
  Description of Artificial Sequence: Synthetic oligonucleotide
  Antisense strand to SEQ ID NO: 2268618
uaaccaacaacuauccauc

SEQ ID NO: 2268620 - RNA, 19 nt, Artificial Sequence
  Description of Artificial Sequence: Synthetic oligonucleotide
  Sense strand starting at position 3466 of SEQ ID NO: 1884475
uggauaguuguugguuaua

SEQ ID NO: 2268621 - RNA, 19 nt, Artificial Sequence
  Description of Artificial Sequence: Synthetic oligonucleotide
  Antisense strand to SEQ ID NO: 2268620
uauaaccaacaacuaucca

SEQ ID NO: 2268622 - RNA, 19 nt, Artificial Sequence
  Description of Artificial Sequence: Synthetic oligonucleotide
  Sense strand starting at position 3468 of SEQ ID NO: 1884475
gauaguuguugguuauaug

SEQ ID NO: 2268623 - RNA, 19 nt, Artificial Sequence
  Description of Artificial Sequence: Synthetic oligonucleotide
  Antisense strand to SEQ ID NO: 2268622
cauauaaccaacaacuauc

SEQ ID NO: 2268624 - RNA, 19 nt, Artificial Sequence
  Description of Artificial Sequence: Synthetic oligonucleotide
  Sense strand starting at position 3475 of SEQ ID NO: 1884475
guugguuauauggaucgau

SEQ ID NO: 2268625 - RNA, 19 nt, Artificial Sequence
  Description of Artificial Sequence: Synthetic oligonucleotide
  Antisense strand to SEQ ID NO: 2268624
aucgauccauauaaccaac

SEQ ID NO: 2268626 - RNA, 19 nt, Artificial Sequence
  Description of Artificial Sequence: Synthetic oligonucleotide
  Sense strand starting at position 3479 of SEQ ID NO: 1884475
guuauauggaucgaugggu

SEQ ID NO: 2268627 - RNA, 19 nt, Artificial Sequence
  Description of Artificial Sequence: Synthetic oligonucleotide
  Antisense strand to SEQ ID NO: 2268626
acccaucgauccauauaac

SEQ ID NO: 2268628 - RNA, 19 nt, Artificial Sequence
  Description of Artificial Sequence: Synthetic oligonucleotide
  Sense strand starting at position 3494 of SEQ ID NO: 1884475
gggugauggguggacucua

SEQ ID NO: 2268629 - RNA, 19 nt, Artificial Sequence
  Description of Artificial Sequence: Synthetic oligonucleotide
  Antisense strand to SEQ ID NO: 2268628
uagaguccacccaucaccc

SEQ ID NO: 2268630 - RNA, 19 nt, Artificial Sequence
  Description of Artificial Sequence: Synthetic oligonucleotide
  Sense strand starting at position 3511 of SEQ ID NO: 1884475
uaggauaauggaugcuuau

SEQ ID NO: 2268631 - RNA, 19 nt, Artificial Sequence
  Description of Artificial Sequence: Synthetic oligonucleotide
  Antisense strand to SEQ ID NO: 2268630
auaagcauccauuauccua

SEQ ID NO: 2268632 - RNA, 19 nt, Artificial Sequence
  Description of Artificial Sequence: Synthetic oligonucleotide
  Sense strand starting at position 3545 of SEQ ID NO: 1884475
aguggacugaucuguagac

SEQ ID NO: 2268633 - RNA, 19 nt, Artificial Sequence
  Description of Artificial Sequence: Synthetic oligonucleotide
  Antisense strand to SEQ ID NO: 2268632
gucuacagaucaguccacu

SEQ ID NO: 2268634 - RNA, 19 nt, Artificial Sequence
  Description of Artificial Sequence: Synthetic oligonucleotide
  Sense strand starting at position 3546 of SEQ ID NO: 1884475
guggacugaucuguagaca

SEQ ID NO: 2268635 - RNA, 19 nt, Artificial Sequence
  Description of Artificial Sequence: Synthetic oligonucleotide
  Antisense strand to SEQ ID NO: 2268634
ugucuacagaucaguccac

SEQ ID NO: 2268636 - RNA, 19 nt, Artificial Sequence
  Description of Artificial Sequence: Synthetic oligonucleotide
  Sense strand starting at position 3555 of SEQ ID NO: 1884475
ucuguagacagaugauuag

SEQ ID NO: 2268637 - RNA, 19 nt, Artificial Sequence
  Description of Artificial Sequence: Synthetic oligonucleotide
  Antisense strand to SEQ ID NO: 2268636
cuaaucaucugucuacaga

SEQ ID NO: 2268638 - RNA, 19 nt, Artificial Sequence
  Description of Artificial Sequence: Synthetic oligonucleotide
  Sense strand starting at position 3914 of SEQ ID NO: 1884475
gcauguaggguuggagaga

SEQ ID NO: 2268639 - RNA, 19 nt, Artificial Sequence
  Description of Artificial Sequence: Synthetic oligonucleotide
  Antisense strand to SEQ ID NO: 2268638
ucucuccaacccuacaugc

SEQ ID NO: 2268640 - RNA, 19 nt, Artificial Sequence
  Description of Artificial Sequence: Synthetic oligonucleotide
  Sense strand starting at position 3951 of SEQ ID NO: 1884475
gaaggauacugcucaaguc

SEQ ID NO: 2268641 - RNA, 19 nt, Artificial Sequence
  Description of Artificial Sequence: Synthetic oligonucleotide
  Antisense strand to SEQ ID NO: 2268640
gacuugagcaguauccuuc

SEQ ID NO: 2268642 - RNA, 19 nt, Artificial Sequence
  Description of Artificial Sequence: Synthetic oligonucleotide
  Sense strand starting at position 3952 of SEQ ID NO: 1884475
aaggauacugcucaaguca

SEQ ID NO: 2268643 - RNA, 19 nt, Artificial Sequence
  Description of Artificial Sequence: Synthetic oligonucleotide
  Antisense strand to SEQ ID NO: 2268642
ugacuugagcaguauccuu

SEQ ID NO: 2268644 - RNA, 19 nt, Artificial Sequence
  Description of Artificial Sequence: Synthetic oligonucleotide
  Sense strand starting at position 77 of SEQ ID NO: 1884476
cuccuaggaguguagacau

SEQ ID NO: 2268645 - RNA, 19 nt, Artificial Sequence
  Description of Artificial Sequence: Synthetic oligonucleotide
  Antisense strand to SEQ ID NO: 2268644
augucuacacuccuaggag

SEQ ID NO: 2268646 - RNA, 19 nt, Artificial Sequence
  Description of Artificial Sequence: Synthetic oligonucleotide
  Sense strand starting at position 97 of SEQ ID NO: 1884476
cuugucucaggaggaauau

SEQ ID NO: 2268647 - RNA, 19 nt, Artificial Sequence
  Description of Artificial Sequence: Synthetic oligonucleotide
  Antisense strand to SEQ ID NO: 2268646
auauuccuccugagacaag

SEQ ID NO: 2268648 - RNA, 19 nt, Artificial Sequence
  Description of Artificial Sequence: Synthetic oligonucleotide
  Sense strand starting at position 302 of SEQ ID NO: 1884476
agguuuguacccuagaacu

SEQ ID NO: 2268649 - RNA, 19 nt, Artificial Sequence
  Description of Artificial Sequence: Synthetic oligonucleotide
  Antisense strand to SEQ ID NO: 2268648
aguucuaggguacaaaccu

SEQ ID NO: 2268650 - RNA, 19 nt, Artificial Sequence
  Description of Artificial Sequence: Synthetic oligonucleotide
  Sense strand starting at position 304 of SEQ ID NO: 1884476
guuuguacccuagaacuua

SEQ ID NO: 2268651 - RNA, 19 nt, Artificial Sequence
  Description of Artificial Sequence: Synthetic oligonucleotide
  Antisense strand to SEQ ID NO: 2268650
uaaguucuaggguacaaac

SEQ ID NO: 2268652 - RNA, 19 nt, Artificial Sequence
  Description of Artificial Sequence: Synthetic oligonucleotide
  Sense strand starting at position 656 of SEQ ID NO: 1884476
ugcagaagauccucuacau

SEQ ID NO: 2268653 - RNA, 19 nt, Artificial Sequence
  Description of Artificial Sequence: Synthetic oligonucleotide
  Antisense strand to SEQ ID NO: 2268652
auguagaggaucuucugca

SEQ ID NO: 2268654 - RNA, 19 nt, Artificial Sequence
  Description of Artificial Sequence: Synthetic oligonucleotide
  Sense strand starting at position 737 of SEQ ID NO: 1884476
gagaucugcccaggaacua

SEQ ID NO: 2268655 - RNA, 19 nt, Artificial Sequence
  Description of Artificial Sequence: Synthetic oligonucleotide
  Antisense strand to SEQ ID NO: 2268654
uaguuccugggcagaucuc

SEQ ID NO: 2268656 - RNA, 19 nt, Artificial Sequence
  Description of Artificial Sequence: Synthetic oligonucleotide
  Sense strand starting at position 1037 of SEQ ID NO: 1884476
guauaugaacuugaguuua

SEQ ID NO: 2268657 - RNA, 19 nt, Artificial Sequence
  Description of Artificial Sequence: Synthetic oligonucleotide
  Antisense strand to SEQ ID NO: 2268656
uaaacucaaguucauauac

SEQ ID NO: 2268658 - RNA, 19 nt, Artificial Sequence
  Description of Artificial Sequence: Synthetic oligonucleotide
  Sense strand starting at position 1042 of SEQ ID NO: 1884476
ugaacuugaguuuauaggu

SEQ ID NO: 2268659 - RNA, 19 nt, Artificial Sequence
  Description of Artificial Sequence: Synthetic oligonucleotide
  Antisense strand to SEQ ID NO: 2268658
accuauaaacucaaguuca

SEQ ID NO: 2268660 - RNA, 19 nt, Artificial Sequence
  Description of Artificial Sequence: Synthetic oligonucleotide
  Sense strand starting at position 1047 of SEQ ID NO: 1884476
uugaguuuauagguccaga

SEQ ID NO: 2268661 - RNA, 19 nt, Artificial Sequence
  Description of Artificial Sequence: Synthetic oligonucleotide
  Antisense strand to SEQ ID NO: 2268660
ucuggaccuauaaacucaa

SEQ ID NO: 2268662 - RNA, 19 nt, Artificial Sequence
  Description of Artificial Sequence: Synthetic oligonucleotide
  Sense strand starting at position 1050 of SEQ ID NO: 1884476
aguuuauagguccagaguu

SEQ ID NO: 2268663 - RNA, 19 nt, Artificial Sequence
  Description of Artificial Sequence: Synthetic oligonucleotide
  Antisense strand to SEQ ID NO: 2268662
aacucuggaccuauaaacu

SEQ ID NO: 2268664 - RNA, 19 nt, Artificial Sequence
  Description of Artificial Sequence: Synthetic oligonucleotide
  Sense strand starting at position 1073 of SEQ ID NO: 1884476
guguaccaucuuuacauga

SEQ ID NO: 2268665 - RNA, 19 nt, Artificial Sequence
  Description of Artificial Sequence: Synthetic oligonucleotide
  Antisense strand to SEQ ID NO: 2268664
ucauguaaagaugguacac

SEQ ID NO: 2268666 - RNA, 19 nt, Artificial Sequence
  Description of Artificial Sequence: Synthetic oligonucleotide
  Sense strand starting at position 1552 of SEQ ID NO: 1884476
ccaggcuccugacuuaaau

SEQ ID NO: 2268667 - RNA, 19 nt, Artificial Sequence
  Description of Artificial Sequence: Synthetic oligonucleotide
  Antisense strand to SEQ ID NO: 2268666
auuuaagucaggagccugg

SEQ ID NO: 2268668 - RNA, 19 nt, Artificial Sequence
  Description of Artificial Sequence: Synthetic oligonucleotide
  Sense strand starting at position 2092 of SEQ ID NO: 1884476
cauagacucagugggugaa

SEQ ID NO: 2268669 - RNA, 19 nt, Artificial Sequence
  Description of Artificial Sequence: Synthetic oligonucleotide
  Antisense strand to SEQ ID NO: 2268668
uucacccacugagucuaug

SEQ ID NO: 2268670 - RNA, 19 nt, Artificial Sequence
  Description of Artificial Sequence: Synthetic oligonucleotide
  Sense strand starting at position 2094 of SEQ ID NO: 1884476
uagacucagugggugaaua

SEQ ID NO: 2268671 - RNA, 19 nt, Artificial Sequence
  Description of Artificial Sequence: Synthetic oligonucleotide
  Antisense strand to SEQ ID NO: 2268670
uauucacccacugagucua

SEQ ID NO: 2268672 - RNA, 19 nt, Artificial Sequence
  Description of Artificial Sequence: Synthetic oligonucleotide
  Sense strand starting at position 2095 of SEQ ID NO: 1884476
agacucagugggugaauaa

SEQ ID NO: 2268673 - RNA, 19 nt, Artificial Sequence
  Description of Artificial Sequence: Synthetic oligonucleotide
  Antisense strand to SEQ ID NO: 2268672
uuauucacccacugagucu

SEQ ID NO: 2268674 - RNA, 19 nt, Artificial Sequence
  Description of Artificial Sequence: Synthetic oligonucleotide
  Sense strand starting at position 2234 of SEQ ID NO: 1884476
uggugugucacucagagag

SEQ ID NO: 2268675 - RNA, 19 nt, Artificial Sequence
  Description of Artificial Sequence: Synthetic oligonucleotide
  Antisense strand to SEQ ID NO: 2268674
cucucugagugacacacca

SEQ ID NO: 2268676 - RNA, 19 nt, Artificial Sequence
  Description of Artificial Sequence: Synthetic oligonucleotide
  Sense strand starting at position 2385 of SEQ ID NO: 1884476
agaggugugacugguuaga

SEQ ID NO: 2268677 - RNA, 19 nt, Artificial Sequence
  Description of Artificial Sequence: Synthetic oligonucleotide
  Antisense strand to SEQ ID NO: 2268676
ucuaaccagucacaccucu

SEQ ID NO: 2268678 - RNA, 19 nt, Artificial Sequence
  Description of Artificial Sequence: Synthetic oligonucleotide
  Sense strand starting at position 2387 of SEQ ID NO: 1884476
aggugugacugguuagaaa

SEQ ID NO: 2268679 - RNA, 19 nt, Artificial Sequence
  Description of Artificial Sequence: Synthetic oligonucleotide
  Antisense strand to SEQ ID NO: 2268678
uuucuaaccagucacaccu

SEQ ID NO: 2268680 - RNA, 19 nt, Artificial Sequence
  Description of Artificial Sequence: Synthetic oligonucleotide
  Sense strand starting at position 2404 of SEQ ID NO: 1884476
aagaacggccucuaaugau

SEQ ID NO: 2268681 - RNA, 19 nt, Artificial Sequence
  Description of Artificial Sequence: Synthetic oligonucleotide
  Antisense strand to SEQ ID NO: 2268680
aucauuagaggccguucuu

SEQ ID NO: 2268682 - RNA, 19 nt, Artificial Sequence
  Description of Artificial Sequence: Synthetic oligonucleotide
  Sense strand starting at position 2492 of SEQ ID NO: 1884476
aauuuauucuucguuggca

SEQ ID NO: 2268683 - RNA, 19 nt, Artificial Sequence
  Description of Artificial Sequence: Synthetic oligonucleotide
  Antisense strand to SEQ ID NO: 2268682
ugccaacgaagaauaaauu

SEQ ID NO: 2268684 - RNA, 19 nt, Artificial Sequence
  Description of Artificial Sequence: Synthetic oligonucleotide
  Sense strand starting at position 2562 of SEQ ID NO: 1884476
cccauaacugcccaggauu

SEQ ID NO: 2268685 - RNA, 19 nt, Artificial Sequence
  Description of Artificial Sequence: Synthetic oligonucleotide
  Antisense strand to SEQ ID NO: 2268684
aauccugggcaguuauggg

SEQ ID NO: 2268686 - RNA, 19 nt, Artificial Sequence
  Description of Artificial Sequence: Synthetic oligonucleotide
  Sense strand starting at position 2720 of SEQ ID NO: 1884476
guauuucccuagcugaauu

SEQ ID NO: 2268687 - RNA, 19 nt, Artificial Sequence
  Description of Artificial Sequence: Synthetic oligonucleotide
  Antisense strand to SEQ ID NO: 2268686
aauucagcuagggaaauac

SEQ ID NO: 2268688 - RNA, 19 nt, Artificial Sequence
  Description of Artificial Sequence: Synthetic oligonucleotide
  Sense strand starting at position 2780 of SEQ ID NO: 1884476
agaugagugcacuaaaguc

SEQ ID NO: 2268689 - RNA, 19 nt, Artificial Sequence
  Description of Artificial Sequence: Synthetic oligonucleotide
  Antisense strand to SEQ ID NO: 2268688
gacuuuagugcacucaucu

SEQ ID NO: 2268690 - RNA, 19 nt, Artificial Sequence
  Description of Artificial Sequence: Synthetic oligonucleotide
  Sense strand starting at position 2802 of SEQ ID NO: 1884476
gggauugaugcugaugcau

SEQ ID NO: 2268691 - RNA, 19 nt, Artificial Sequence
  Description of Artificial Sequence: Synthetic oligonucleotide
  Antisense strand to SEQ ID NO: 2268690
augcaucagcaucaauccc

SEQ ID NO: 2268692 - RNA, 19 nt, Artificial Sequence
  Description of Artificial Sequence: Synthetic oligonucleotide
  Sense strand starting at position 2852 of SEQ ID NO: 1884476
gacccuugucaauaaggua

SEQ ID NO: 2268693 - RNA, 19 nt, Artificial Sequence
  Description of Artificial Sequence: Synthetic oligonucleotide
  Antisense strand to SEQ ID NO: 2268692
uaccuuauugacaaggguc

SEQ ID NO: 2268694 - RNA, 19 nt, Artificial Sequence
  Description of Artificial Sequence: Synthetic oligonucleotide
  Sense strand starting at position 2981 of SEQ ID NO: 1884476
augggaucauuguuacuuu

SEQ ID NO: 2268695 - RNA, 19 nt, Artificial Sequence
  Description of Artificial Sequence: Synthetic oligonucleotide
  Antisense strand to SEQ ID NO: 2268694
aaaguaacaaugaucccau

SEQ ID NO: 2268696 - RNA, 19 nt, Artificial Sequence
  Description of Artificial Sequence: Synthetic oligonucleotide
  Sense strand starting at position 3002 of SEQ ID NO: 1884476
guauuucuuugacugcaau

SEQ ID NO: 2268697 - RNA, 19 nt, Artificial Sequence
  Description of Artificial Sequence: Synthetic oligonucleotide
  Antisense strand to SEQ ID NO: 2268696
auugcagucaaagaaauac

SEQ ID NO: 2268698 - RNA, 19 nt, Artificial Sequence
  Description of Artificial Sequence: Synthetic oligonucleotide
  Sense strand starting at position 3193 of SEQ ID NO: 1884476
acuagaugacucuggugau

SEQ ID NO: 2268699 - RNA, 19 nt, Artificial Sequence
  Description of Artificial Sequence: Synthetic oligonucleotide
  Antisense strand to SEQ ID NO: 2268698
aucaccagagucaucuagu

SEQ ID NO: 2268700 - RNA, 19 nt, Artificial Sequence
  Description of Artificial Sequence: Synthetic oligonucleotide
  Sense strand starting at position 3208 of SEQ ID NO: 1884476
ugaugugauuaagucugau

SEQ ID NO: 2268701 - RNA, 19 nt, Artificial Sequence
  Description of Artificial Sequence: Synthetic oligonucleotide
  Antisense strand to SEQ ID NO: 2268700
aucagacuuaaucacauca

SEQ ID NO: 2268702 - RNA, 19 nt, Artificial Sequence
  Description of Artificial Sequence: Synthetic oligonucleotide
  Sense strand starting at position 3211 of SEQ ID NO: 1884476
ugugauuaagucugaugaa

SEQ ID NO: 2268703 - RNA, 19 nt, Artificial Sequence
  Description of Artificial Sequence: Synthetic oligonucleotide
  Antisense strand to SEQ ID NO: 2268702
uucaucagacuuaaucaca

SEQ ID NO: 2268704 - RNA, 19 nt, Artificial Sequence
  Description of Artificial Sequence: Synthetic oligonucleotide
  Sense strand starting at position 3482 of SEQ ID NO: 1884476
caguguuaugacgagagug

SEQ ID NO: 2268705 - RNA, 19 nt, Artificial Sequence
  Description of Artificial Sequence: Synthetic oligonucleotide
  Antisense strand to SEQ ID NO: 2268704
cacucucgucauaacacug

SEQ ID NO: 2268706 - RNA, 19 nt, Artificial Sequence
  Description of Artificial Sequence: Synthetic oligonucleotide
  Sense strand starting at position 3492 of SEQ ID NO: 1884476
acgagagugggaugacaua

SEQ ID NO: 2268707 - RNA, 19 nt, Artificial Sequence
  Description of Artificial Sequence: Synthetic oligonucleotide
  Antisense strand to SEQ ID NO: 2268706
uaugucaucccacucucgu

SEQ ID NO: 2268708 - RNA, 19 nt, Artificial Sequence
  Description of Artificial Sequence: Synthetic oligonucleotide
  Sense strand starting at position 3611 of SEQ ID NO: 1884476
gaaggacauucuccauguu

SEQ ID NO: 2268709 - RNA, 19 nt, Artificial Sequence
  Description of Artificial Sequence: Synthetic oligonucleotide
  Antisense strand to SEQ ID NO: 2268708
aacauggagaauguccuuc

SEQ ID NO: 2268710 - RNA, 19 nt, Artificial Sequence
  Description of Artificial Sequence: Synthetic oligonucleotide
  Sense strand starting at position 3614 of SEQ ID NO: 1884476
ggacauucuccauguugaa

SEQ ID NO: 2268711 - RNA, 19 nt, Artificial Sequence
  Description of Artificial Sequence: Synthetic oligonucleotide
  Antisense strand to SEQ ID NO: 2268710
uucaacauggagaaugucc

SEQ ID NO: 2268712 - RNA, 19 nt, Artificial Sequence
  Description of Artificial Sequence: Synthetic oligonucleotide
  Sense strand starting at position 3621 of SEQ ID NO: 1884476
cuccauguugaacaauagu

SEQ ID NO: 2268713 - RNA, 19 nt, Artificial Sequence
  Description of Artificial Sequence: Synthetic oligonucleotide
  Antisense strand to SEQ ID NO: 2268712
acuauuguucaacauggag

SEQ ID NO: 2268714 - RNA, 19 nt, Artificial Sequence
  Description of Artificial Sequence: Synthetic oligonucleotide
  Sense strand starting at position 3724 of SEQ ID NO: 1884476
uuguaaagugcugaauuag

SEQ ID NO: 2268715 - RNA, 19 nt, Artificial Sequence
  Description of Artificial Sequence: Synthetic oligonucleotide
  Antisense strand to SEQ ID NO: 2268714
cuaauucagcacuuuacaa

SEQ ID NO: 2268716 - RNA, 19 nt, Artificial Sequence
  Description of Artificial Sequence: Synthetic oligonucleotide
  Sense strand starting at position 3804 of SEQ ID NO: 1884476
uuauaaauugcucaagggu

SEQ ID NO: 2268717 - RNA, 19 nt, Artificial Sequence
  Description of Artificial Sequence: Synthetic oligonucleotide
  Antisense strand to SEQ ID NO: 2268716
acccuugagcaauuuauaa

SEQ ID NO: 2268718 - RNA, 19 nt, Artificial Sequence
  Description of Artificial Sequence: Synthetic oligonucleotide
  Sense strand starting at position 3807 of SEQ ID NO: 1884476
uaaauugcucaaggguaua

SEQ ID NO: 2268719 - RNA, 19 nt, Artificial Sequence
  Description of Artificial Sequence: Synthetic oligonucleotide
  Antisense strand to SEQ ID NO: 2268718
uauacccuugagcaauuua

SEQ ID NO: 2268720 - RNA, 19 nt, Artificial Sequence
  Description of Artificial Sequence: Synthetic oligonucleotide
  Sense strand starting at position 3915 of SEQ ID NO: 1884476
cucagaauugaucaagcuu

SEQ ID NO: 2268721 - RNA, 19 nt, Artificial Sequence
  Description of Artificial Sequence: Synthetic oligonucleotide
  Antisense strand to SEQ ID NO: 2268720
aagcuugaucaauucugag

SEQ ID NO: 2268722 - RNA, 19 nt, Artificial Sequence
  Description of Artificial Sequence: Synthetic oligonucleotide
  Sense strand starting at position 3970 of SEQ ID NO: 1884476
gugagaauuugucaugaaa

SEQ ID NO: 2268723 - RNA, 19 nt, Artificial Sequence
  Description of Artificial Sequence: Synthetic oligonucleotide
  Antisense strand to SEQ ID NO: 2268722
uuucaugacaaauucucac

SEQ ID NO: 2268724 - RNA, 19 nt, Artificial Sequence
  Description of Artificial Sequence: Synthetic oligonucleotide
  Sense strand starting at position 285 of SEQ ID NO: 1884477
gguggaccaucugaaguua

SEQ ID NO: 2268725 - RNA, 19 nt, Artificial Sequence
  Description of Artificial Sequence: Synthetic oligonucleotide
  Antisense strand to SEQ ID NO: 2268724
uaacuucagaugguccacc

SEQ ID NO: 2268726 - RNA, 19 nt, Artificial Sequence
  Description of Artificial Sequence: Synthetic oligonucleotide
  Sense strand starting at position 390 of SEQ ID NO: 1884477
gaauuagccaaggguggua

SEQ ID NO: 2268727 - RNA, 19 nt, Artificial Sequence
  Description of Artificial Sequence: Synthetic oligonucleotide
  Antisense strand to SEQ ID NO: 2268726
uaccacccuuggcuaauuc

SEQ ID NO: 2268728 - RNA, 19 nt, Artificial Sequence
  Description of Artificial Sequence: Synthetic oligonucleotide
  Sense strand starting at position 455 of SEQ ID NO: 1884477
aggauuccuugagccauga

SEQ ID NO: 2268729 - RNA, 19 nt, Artificial Sequence
  Description of Artificial Sequence: Synthetic oligonucleotide
  Antisense strand to SEQ ID NO: 2268728
ucauggcucaaggaauccu

SEQ ID NO: 2268730 - RNA, 19 nt, Artificial Sequence
  Description of Artificial Sequence: Synthetic oligonucleotide
  Sense strand starting at position 468 of SEQ ID NO: 1884477
ccaugauugcgccaccuca

SEQ ID NO: 2268731 - RNA, 19 nt, Artificial Sequence
  Description of Artificial Sequence: Synthetic oligonucleotide
  Antisense strand to SEQ ID NO: 2268730
ugagguggcgcaaucaugg

SEQ ID NO: 2268732 - RNA, 19 nt, Artificial Sequence
  Description of Artificial Sequence: Synthetic oligonucleotide
  Sense strand starting at position 581 of SEQ ID NO: 1884477
uuuccuuaucauuaguaug

SEQ ID NO: 2268733 - RNA, 19 nt, Artificial Sequence
  Description of Artificial Sequence: Synthetic oligonucleotide
  Antisense strand to SEQ ID NO: 2268732
cauacuaaugauaaggaaa

SEQ ID NO: 2268734 - RNA, 19 nt, Artificial Sequence
  Description of Artificial Sequence: Synthetic oligonucleotide
  Sense strand starting at position 584 of SEQ ID NO: 1884477
ccuuaucauuaguaugaag

SEQ ID NO: 2268735 - RNA, 19 nt, Artificial Sequence
  Description of Artificial Sequence: Synthetic oligonucleotide
  Antisense strand to SEQ ID NO: 2268734
cuucauacuaaugauaagg

SEQ ID NO: 2268736 - RNA, 19 nt, Artificial Sequence
  Description of Artificial Sequence: Synthetic oligonucleotide
  Sense strand starting at position 587 of SEQ ID NO: 1884477
uaucauuaguaugaagaag

SEQ ID NO: 2268737 - RNA, 19 nt, Artificial Sequence
  Description of Artificial Sequence: Synthetic oligonucleotide
  Antisense strand to SEQ ID NO: 2268736
cuucuucauacuaaugaua

SEQ ID NO: 2268738 - RNA, 19 nt, Artificial Sequence
  Description of Artificial Sequence: Synthetic oligonucleotide
  Sense strand starting at position 601 of SEQ ID NO: 1884477
agaagugaauugccuguaa

SEQ ID NO: 2268739 - RNA, 19 nt, Artificial Sequence
  Description of Artificial Sequence: Synthetic oligonucleotide
  Antisense strand to SEQ ID NO: 2268738
uuacaggcaauucacuucu

SEQ ID NO: 2268740 - RNA, 19 nt, Artificial Sequence
  Description of Artificial Sequence: Synthetic oligonucleotide
  Sense strand starting at position 705 of SEQ ID NO: 1884477
gcugaaauggauugccuga

SEQ ID NO: 2268741 - RNA, 19 nt, Artificial Sequence
  Description of Artificial Sequence: Synthetic oligonucleotide
  Antisense strand to SEQ ID NO: 2268740
ucaggcaauccauuucagc

SEQ ID NO: 2268742 - RNA, 19 nt, Artificial Sequence
  Description of Artificial Sequence: Synthetic oligonucleotide
  Sense strand starting at position 981 of SEQ ID NO: 1884477
gagcaugagcgcuggaaga

SEQ ID NO: 2268743 - RNA, 19 nt, Artificial Sequence
  Description of Artificial Sequence: Synthetic oligonucleotide
  Antisense strand to SEQ ID NO: 2268742
ucuuccagcgcucaugcuc

SEQ ID NO: 2268744 - RNA, 19 nt, Artificial Sequence
  Description of Artificial Sequence: Synthetic oligonucleotide
  Sense strand starting at position 983 of SEQ ID NO: 1884477
gcaugagcgcuggaagaaa

SEQ ID NO: 2268745 - RNA, 19 nt, Artificial Sequence
  Description of Artificial Sequence: Synthetic oligonucleotide
  Antisense strand to SEQ ID NO: 2268744
uuucuuccagcgcucaugc

SEQ ID NO: 2268746 - RNA, 19 nt, Artificial Sequence
  Description of Artificial Sequence: Synthetic oligonucleotide
  Sense strand starting at position 1146 of SEQ ID NO: 1884477
cgggcuggauuccauauau

SEQ ID NO: 2268747 - RNA, 19 nt, Artificial Sequence
  Description of Artificial Sequence: Synthetic oligonucleotide
  Antisense strand to SEQ ID NO: 2268746
auauauggaauccagcccg

SEQ ID NO: 2268748 - RNA, 19 nt, Artificial Sequence
  Description of Artificial Sequence: Synthetic oligonucleotide
  Sense strand starting at position 1187 of SEQ ID NO: 1884477
uuguuuagacguuaucuca

SEQ ID NO: 2268749 - RNA, 19 nt, Artificial Sequence
  Description of Artificial Sequence: Synthetic oligonucleotide
  Antisense strand to SEQ ID NO: 2268748
ugagauaacgucuaaacaa

SEQ ID NO: 2268750 - RNA, 19 nt, Artificial Sequence
  Description of Artificial Sequence: Synthetic oligonucleotide
  Sense strand starting at position 1197 of SEQ ID NO: 1884477
guuaucucagucuguccaa

SEQ ID NO: 2268751 - RNA, 19 nt, Artificial Sequence
  Description of Artificial Sequence: Synthetic oligonucleotide
  Antisense strand to SEQ ID NO: 2268750
uuggacagacugagauaac

SEQ ID NO: 2268752 - RNA, 19 nt, Artificial Sequence
  Description of Artificial Sequence: Synthetic oligonucleotide
  Sense strand starting at position 1465 of SEQ ID NO: 1884477
ccggccgauugcuuauauu

SEQ ID NO: 2268753 - RNA, 19 nt, Artificial Sequence
  Description of Artificial Sequence: Synthetic oligonucleotide
  Antisense strand to SEQ ID NO: 2268752
aauauaagcaaucggccgg

SEQ ID NO: 2268754 - RNA, 19 nt, Artificial Sequence
  Description of Artificial Sequence: Synthetic oligonucleotide
  Sense strand starting at position 1875 of SEQ ID NO: 1884477
ucguaaaucuccuccucgu

SEQ ID NO: 2268755 - RNA, 19 nt, Artificial Sequence
  Description of Artificial Sequence: Synthetic oligonucleotide
  Antisense strand to SEQ ID NO: 2268754
acgaggaggagauuuacga

SEQ ID NO: 2268756 - RNA, 19 nt, Artificial Sequence
  Description of Artificial Sequence: Synthetic oligonucleotide
  Sense strand starting at position 1980 of SEQ ID NO: 1884477
cggccagucauccgcacau

SEQ ID NO: 2268757 - RNA, 19 nt, Artificial Sequence
  Description of Artificial Sequence: Synthetic oligonucleotide
  Antisense strand to SEQ ID NO: 2268756
augugcggaugacuggccg

SEQ ID NO: 2268758 - RNA, 19 nt, Artificial Sequence
  Description of Artificial Sequence: Synthetic oligonucleotide
  Sense strand starting at position 2038 of SEQ ID NO: 1884477
cgauuggcuccgcgugaga

SEQ ID NO: 2268759 - RNA, 19 nt, Artificial Sequence
  Description of Artificial Sequence: Synthetic oligonucleotide
  Antisense strand to SEQ ID NO: 2268758
ucucacgcggagccaaucg

SEQ ID NO: 2268760 - RNA, 19 nt, Artificial Sequence
  Description of Artificial Sequence: Synthetic oligonucleotide
  Sense strand starting at position 2040 of SEQ ID NO: 1884477
auuggcuccgcgugagaga

SEQ ID NO: 2268761 - RNA, 19 nt, Artificial Sequence
  Description of Artificial Sequence: Synthetic oligonucleotide
  Antisense strand to SEQ ID NO: 2268760
ucucucacgcggagccaau

SEQ ID NO: 2268762 - RNA, 19 nt, Artificial Sequence
  Description of Artificial Sequence: Synthetic oligonucleotide
  Sense strand starting at position 2053 of SEQ ID NO: 1884477
gagagacguuccucggcga

SEQ ID NO: 2268763 - RNA, 19 nt, Artificial Sequence
  Description of Artificial Sequence: Synthetic oligonucleotide
  Antisense strand to SEQ ID NO: 2268762
ucgccgaggaacgucucuc

SEQ ID NO: 2268764 - RNA, 19 nt, Artificial Sequence
  Description of Artificial Sequence: Synthetic oligonucleotide
  Sense strand starting at position 2154 of SEQ ID NO: 1884477
gcagucuuaucaucagagu

SEQ ID NO: 2268765 - RNA, 19 nt, Artificial Sequence
  Description of Artificial Sequence: Synthetic oligonucleotide
  Antisense strand to SEQ ID NO: 2268764
acucugaugauaagacugc

SEQ ID NO: 2268766 - RNA, 19 nt, Artificial Sequence
  Description of Artificial Sequence: Synthetic oligonucleotide
  Sense strand starting at position 2155 of SEQ ID NO: 1884477
cagucuuaucaucagagug

SEQ ID NO: 2268767 - RNA, 19 nt, Artificial Sequence
  Description of Artificial Sequence: Synthetic oligonucleotide
  Antisense strand to SEQ ID NO: 2268766
cacucugaugauaagacug

SEQ ID NO: 2268768 - RNA, 19 nt, Artificial Sequence
  Description of Artificial Sequence: Synthetic oligonucleotide
  Sense strand starting at position 2157 of SEQ ID NO: 1884477
gucuuaucaucagagugga

SEQ ID NO: 2268769 - RNA, 19 nt, Artificial Sequence
  Description of Artificial Sequence: Synthetic oligonucleotide
  Antisense strand to SEQ ID NO: 2268768
uccacucugaugauaagac

SEQ ID NO: 2268770 - RNA, 19 nt, Artificial Sequence
  Description of Artificial Sequence: Synthetic oligonucleotide
  Sense strand starting at position 2208 of SEQ ID NO: 1884477
guguguugcuagcuggaga

SEQ ID NO: 2268771 - RNA, 19 nt, Artificial Sequence
  Description of Artificial Sequence: Synthetic oligonucleotide
  Antisense strand to SEQ ID NO: 2268770
ucuccagcuagcaacacac

SEQ ID NO: 2268772 - RNA, 19 nt, Artificial Sequence
  Description of Artificial Sequence: Synthetic oligonucleotide
  Sense strand starting at position 2209 of SEQ ID NO: 1884477
uguguugcuagcuggagaa

SEQ ID NO: 2268773 - RNA, 19 nt, Artificial Sequence
  Description of Artificial Sequence: Synthetic oligonucleotide
  Antisense strand to SEQ ID NO: 2268772
uucuccagcuagcaacaca

SEQ ID NO: 2268774 - RNA, 19 nt, Artificial Sequence
  Description of Artificial Sequence: Synthetic oligonucleotide
  Sense strand starting at position 2255 of SEQ ID NO: 1884477
aguguuuauaucggucaaa

SEQ ID NO: 2268775 - RNA, 19 nt, Artificial Sequence
  Description of Artificial Sequence: Synthetic oligonucleotide
  Antisense strand to SEQ ID NO: 2268774
uuugaccgauauaaacacu

SEQ ID NO: 2268776 - RNA, 19 nt, Artificial Sequence
  Description of Artificial Sequence: Synthetic oligonucleotide
  Sense strand starting at position 3324 of SEQ ID NO: 1884477
augaaagccugucucuaga

SEQ ID NO: 2268777 - RNA, 19 nt, Artificial Sequence
  Description of Artificial Sequence: Synthetic oligonucleotide
  Antisense strand to SEQ ID NO: 2268776
ucuagagacaggcuuucau

SEQ ID NO: 2268778 - RNA, 19 nt, Artificial Sequence
  Description of Artificial Sequence: Synthetic oligonucleotide
  Sense strand starting at position 3326 of SEQ ID NO: 1884477
gaaagccugucucuagaua

SEQ ID NO: 2268779 - RNA, 19 nt, Artificial Sequence
  Description of Artificial Sequence: Synthetic oligonucleotide
  Antisense strand to SEQ ID NO: 2268778
uaucuagagacaggcuuuc

SEQ ID NO: 2268780 - RNA, 19 nt, Artificial Sequence
  Description of Artificial Sequence: Synthetic oligonucleotide
  Sense strand starting at position 3334 of SEQ ID NO: 1884477
gucucuagauaguuagcua

SEQ ID NO: 2268781 - RNA, 19 nt, Artificial Sequence
  Description of Artificial Sequence: Synthetic oligonucleotide
  Antisense strand to SEQ ID NO: 2268780
uagcuaacuaucuagagac

SEQ ID NO: 2268782 - RNA, 19 nt, Artificial Sequence
  Description of Artificial Sequence: Synthetic oligonucleotide
  Sense strand starting at position 3338 of SEQ ID NO: 1884477
cuagauaguuagcuagcua

SEQ ID NO: 2268783 - RNA, 19 nt, Artificial Sequence
  Description of Artificial Sequence: Synthetic oligonucleotide
  Antisense strand to SEQ ID NO: 2268782
uagcuagcuaacuaucuag

SEQ ID NO: 2268784 - RNA, 19 nt, Artificial Sequence
  Description of Artificial Sequence: Synthetic oligonucleotide
  Sense strand starting at position 3360 of SEQ ID NO: 1884477
agauaauugacacguaguu

SEQ ID NO: 2268785 - RNA, 19 nt, Artificial Sequence
  Description of Artificial Sequence: Synthetic oligonucleotide
  Antisense strand to SEQ ID NO: 2268784
aacuacgugucaauuaucu

SEQ ID NO: 2268786 - RNA, 19 nt, Artificial Sequence
  Description of Artificial Sequence: Synthetic oligonucleotide
  Sense strand starting at position 3411 of SEQ ID NO: 1884477
gagucuuguucugucacgu

SEQ ID NO: 2268787 - RNA, 19 nt, Artificial Sequence
  Description of Artificial Sequence: Synthetic oligonucleotide
  Antisense strand to SEQ ID NO: 2268786
acgugacagaacaagacuc

SEQ ID NO: 2268788 - RNA, 19 nt, Artificial Sequence
  Description of Artificial Sequence: Synthetic oligonucleotide
  Sense strand starting at position 3412 of SEQ ID NO: 1884477
agucuuguucugucacgua

SEQ ID NO: 2268789 - RNA, 19 nt, Artificial Sequence
  Description of Artificial Sequence: Synthetic oligonucleotide
  Antisense strand to SEQ ID NO: 2268788
uacgugacagaacaagacu

SEQ ID NO: 2268790 - RNA, 19 nt, Artificial Sequence
  Description of Artificial Sequence: Synthetic oligonucleotide
  Sense strand starting at position 3519 of SEQ ID NO: 1884477
ugggaauuauaggcacaca

SEQ ID NO: 2268791 - RNA, 19 nt, Artificial Sequence
  Description of Artificial Sequence: Synthetic oligonucleotide
  Antisense strand to SEQ ID NO: 2268790
ugugugccuauaauuccca

SEQ ID NO: 2268792 - RNA, 19 nt, Artificial Sequence
  Description of Artificial Sequence: Synthetic oligonucleotide
  Sense strand starting at position 3846 of SEQ ID NO: 1884477
cacauagguccucaaguga

SEQ ID NO: 2268793 - RNA, 19 nt, Artificial Sequence
  Description of Artificial Sequence: Synthetic oligonucleotide
  Antisense strand to SEQ ID NO: 2268792
ucacuugaggaccuaugug

SEQ ID NO: 2268794 - RNA, 19 nt, Artificial Sequence
  Description of Artificial Sequence: Synthetic oligonucleotide
  Sense strand starting at position 3863 of SEQ ID NO: 1884477
gaauuugucugauguugac

SEQ ID NO: 2268795 - RNA, 19 nt, Artificial Sequence
  Description of Artificial Sequence: Synthetic oligonucleotide
  Antisense strand to SEQ ID NO: 2268794
gucaacaucagacaaauuc

SEQ ID NO: 2268796 - RNA, 19 nt, Artificial Sequence
  Description of Artificial Sequence: Synthetic oligonucleotide
  Sense strand starting at position 3897 of SEQ ID NO: 1884477
uuguccacuugauuggaau

SEQ ID NO: 2268797 - RNA, 19 nt, Artificial Sequence
  Description of Artificial Sequence: Synthetic oligonucleotide
  Antisense strand to SEQ ID NO: 2268796
auuccaaucaaguggacaa

SEQ ID NO: 2268798 - RNA, 19 nt, Artificial Sequence
  Description of Artificial Sequence: Synthetic oligonucleotide
  Sense strand starting at position 3898 of SEQ ID NO: 1884477
uguccacuugauuggaaua

SEQ ID NO: 2268799 - RNA, 19 nt, Artificial Sequence
  Description of Artificial Sequence: Synthetic oligonucleotide
  Antisense strand to SEQ ID NO: 2268798
uauuccaaucaaguggaca

SEQ ID NO: 2268800 - RNA, 19 nt, Artificial Sequence
  Description of Artificial Sequence: Synthetic oligonucleotide
  Sense strand starting at position 3900 of SEQ ID NO: 1884477
uccacuugauuggaauagu

SEQ ID NO: 2268801 - RNA, 19 nt, Artificial Sequence
  Description of Artificial Sequence: Synthetic oligonucleotide
  Antisense strand to SEQ ID NO: 2268800
acuauuccaaucaagugga

SEQ ID NO: 2268802 - RNA, 19 nt, Artificial Sequence
  Description of Artificial Sequence: Synthetic oligonucleotide
  Sense strand starting at position 3910 of SEQ ID NO: 1884477
uggaauaguuaguaauuuc

SEQ ID NO: 2268803 - RNA, 19 nt, Artificial Sequence
  Description of Artificial Sequence: Synthetic oligonucleotide
  Antisense strand to SEQ ID NO: 2268802
gaaauuacuaacuauucca

SEQ ID NO: 2268804 - RNA, 19 nt, Artificial Sequence
  Description of Artificial Sequence: Synthetic oligonucleotide
  Sense strand starting at position 2096 of SEQ ID NO: 1884478
gaaggacaguacuaauaag

SEQ ID NO: 2268805 - RNA, 19 nt, Artificial Sequence
  Description of Artificial Sequence: Synthetic oligonucleotide
  Antisense strand to SEQ ID NO: 2268804
cuuauuaguacuguccuuc

SEQ ID NO: 2268806 - RNA, 19 nt, Artificial Sequence
  Description of Artificial Sequence: Synthetic oligonucleotide
  Sense strand starting at position 2134 of SEQ ID NO: 1884478
ggaguuucuuaagauuauu

SEQ ID NO: 2268807 - RNA, 19 nt, Artificial Sequence
  Description of Artificial Sequence: Synthetic oligonucleotide
  Antisense strand to SEQ ID NO: 2268806
aauaaucuuaagaaacucc

SEQ ID NO: 2268808 - RNA, 19 nt, Artificial Sequence
  Description of Artificial Sequence: Synthetic oligonucleotide
  Sense strand starting at position 2137 of SEQ ID NO: 1884478
guuucuuaagauuauugac

SEQ ID NO: 2268809 - RNA, 19 nt, Artificial Sequence
  Description of Artificial Sequence: Synthetic oligonucleotide
  Antisense strand to SEQ ID NO: 2268808
gucaauaaucuuaagaaac

SEQ ID NO: 2268810 - RNA, 19 nt, Artificial Sequence
  Description of Artificial Sequence: Synthetic oligonucleotide
  Sense strand starting at position 2283 of SEQ ID NO: 1884478
guccaagagucucaaagcu

SEQ ID NO: 2268811 - RNA, 19 nt, Artificial Sequence
  Description of Artificial Sequence: Synthetic oligonucleotide
  Antisense strand to SEQ ID NO: 2268810
agcuuugagacucuuggac

SEQ ID NO: 2268812 - RNA, 19 nt, Artificial Sequence
  Description of Artificial Sequence: Synthetic oligonucleotide
  Sense strand starting at position 2367 of SEQ ID NO: 1884478
aagacuaagucagucuagu

SEQ ID NO: 2268813 - RNA, 19 nt, Artificial Sequence
  Description of Artificial Sequence: Synthetic oligonucleotide
  Antisense strand to SEQ ID NO: 2268812
acuagacugacuuagucuu

SEQ ID NO: 2268814 - RNA, 19 nt, Artificial Sequence
  Description of Artificial Sequence: Synthetic oligonucleotide
  Sense strand starting at position 2641 of SEQ ID NO: 1884478
caguguagguggcaagauu

SEQ ID NO: 2268815 - RNA, 19 nt, Artificial Sequence
  Description of Artificial Sequence: Synthetic oligonucleotide
  Antisense strand to SEQ ID NO: 2268814
aaucuugccaccuacacug

SEQ ID NO: 2268816 - RNA, 19 nt, Artificial Sequence
  Description of Artificial Sequence: Synthetic oligonucleotide
  Sense strand starting at position 2678 of SEQ ID NO: 1884478
aaccauugggccugugauu

SEQ ID NO: 2268817 - RNA, 19 nt, Artificial Sequence
  Description of Artificial Sequence: Synthetic oligonucleotide
  Antisense strand to SEQ ID NO: 2268816
aaucacaggcccaaugguu

SEQ ID NO: 2268818 - RNA, 19 nt, Artificial Sequence
  Description of Artificial Sequence: Synthetic oligonucleotide
  Sense strand starting at position 2689 of SEQ ID NO: 1884478
cugugauuccucuguggcu

SEQ ID NO: 2268819 - RNA, 19 nt, Artificial Sequence
  Description of Artificial Sequence: Synthetic oligonucleotide
  Antisense strand to SEQ ID NO: 2268818
agccacagaggaaucacag

SEQ ID NO: 2268820 - RNA, 19 nt, Artificial Sequence
  Description of Artificial Sequence: Synthetic oligonucleotide
  Sense strand starting at position 2702 of SEQ ID NO: 1884478
guggcugguccugguuuaa

SEQ ID NO: 2268821 - RNA, 19 nt, Artificial Sequence
  Description of Artificial Sequence: Synthetic oligonucleotide
  Antisense strand to SEQ ID NO: 2268820
uuaaaccaggaccagccac

SEQ ID NO: 2268822 - RNA, 19 nt, Artificial Sequence
  Description of Artificial Sequence: Synthetic oligonucleotide
  Sense strand starting at position 2732 of SEQ ID NO: 1884478
gggugagcaucaucucagu

SEQ ID NO: 2268823 - RNA, 19 nt, Artificial Sequence
  Description of Artificial Sequence: Synthetic oligonucleotide
  Antisense strand to SEQ ID NO: 2268822
acugagaugaugcucaccc

SEQ ID NO: 2268824 - RNA, 19 nt, Artificial Sequence
  Description of Artificial Sequence: Synthetic oligonucleotide
  Sense strand starting at position 2799 of SEQ ID NO: 1884478
ggcucauaauugcuguguu

SEQ ID NO: 2268825 - RNA, 19 nt, Artificial Sequence
  Description of Artificial Sequence: Synthetic oligonucleotide
  Antisense strand to SEQ ID NO: 2268824
aacacagcaauuaugagcc

SEQ ID NO: 2268826 - RNA, 19 nt, Artificial Sequence
  Description of Artificial Sequence: Synthetic oligonucleotide
  Sense strand starting at position 2972 of SEQ ID NO: 1884478
auuuacgguucuuaagaag

SEQ ID NO: 2268827 - RNA, 19 nt, Artificial Sequence
  Description of Artificial Sequence: Synthetic oligonucleotide
  Antisense strand to SEQ ID NO: 2268826
cuucuuaagaaccguaaau

SEQ ID NO: 2268828 - RNA, 19 nt, Artificial Sequence
  Description of Artificial Sequence: Synthetic oligonucleotide
  Sense strand starting at position 2975 of SEQ ID NO: 1884478
uacgguucuuaagaagguu

SEQ ID NO: 2268829 - RNA, 19 nt, Artificial Sequence
  Description of Artificial Sequence: Synthetic oligonucleotide
  Antisense strand to SEQ ID NO: 2268828
aaccuucuuaagaaccgua

SEQ ID NO: 2268830 - RNA, 19 nt, Artificial Sequence
  Description of Artificial Sequence: Synthetic oligonucleotide
  Sense strand starting at position 3132 of SEQ ID NO: 1884478
gguguuaguucuucauugu

SEQ ID NO: 2268831 - RNA, 19 nt, Artificial Sequence
  Description of Artificial Sequence: Synthetic oligonucleotide
  Antisense strand to SEQ ID NO: 2268830
acaaugaagaacuaacacc

SEQ ID NO: 2268832 - RNA, 19 nt, Artificial Sequence
  Description of Artificial Sequence: Synthetic oligonucleotide
  Sense strand starting at position 3243 of SEQ ID NO: 1884478
ucauuauuggccuguugag

SEQ ID NO: 2268833 - RNA, 19 nt, Artificial Sequence
  Description of Artificial Sequence: Synthetic oligonucleotide
  Antisense strand to SEQ ID NO: 2268832
cucaacaggccaauaauga

SEQ ID NO: 2268834 - RNA, 19 nt, Artificial Sequence
  Description of Artificial Sequence: Synthetic oligonucleotide
  Sense strand starting at position 3289 of SEQ ID NO: 1884478
ugguaaguuguauguguuu

SEQ ID NO: 2268835 - RNA, 19 nt, Artificial Sequence
  Description of Artificial Sequence: Synthetic oligonucleotide
  Antisense strand to SEQ ID NO: 2268834
aaacacauacaacuuacca

SEQ ID NO: 2268836 - RNA, 19 nt, Artificial Sequence
  Description of Artificial Sequence: Synthetic oligonucleotide
  Sense strand starting at position 3291 of SEQ ID NO: 1884478
guaaguuguauguguuuag

SEQ ID NO: 2268837 - RNA, 19 nt, Artificial Sequence
  Description of Artificial Sequence: Synthetic oligonucleotide
  Antisense strand to SEQ ID NO: 2268836
cuaaacacauacaacuuac

SEQ ID NO: 2268838 - RNA, 19 nt, Artificial Sequence
  Description of Artificial Sequence: Synthetic oligonucleotide
  Sense strand starting at position 3292 of SEQ ID NO: 1884478
uaaguuguauguguuuaga

SEQ ID NO: 2268839 - RNA, 19 nt, Artificial Sequence
  Description of Artificial Sequence: Synthetic oligonucleotide
  Antisense strand to SEQ ID NO: 2268838
ucuaaacacauacaacuua

SEQ ID NO: 2268840 - RNA, 19 nt, Artificial Sequence
  Description of Artificial Sequence: Synthetic oligonucleotide
  Sense strand starting at position 3294 of SEQ ID NO: 1884478
aguuguauguguuuagaaa

SEQ ID NO: 2268841 - RNA, 19 nt, Artificial Sequence
  Description of Artificial Sequence: Synthetic oligonucleotide
  Antisense strand to SEQ ID NO: 2268840
uuucuaaacacauacaacu

SEQ ID NO: 2268842 - RNA, 19 nt, Artificial Sequence
  Description of Artificial Sequence: Synthetic oligonucleotide
  Sense strand starting at position 3335 of SEQ ID NO: 1884478
uccaguuugucagugugca

SEQ ID NO: 2268843 - RNA, 19 nt, Artificial Sequence
  Description of Artificial Sequence: Synthetic oligonucleotide
  Antisense strand to SEQ ID NO: 2268842
ugcacacugacaaacugga

SEQ ID NO: 2268844 - RNA, 19 nt, Artificial Sequence
  Description of Artificial Sequence: Synthetic oligonucleotide
  Sense strand starting at position 3343 of SEQ ID NO: 1884478
gucagugugcaguuguuca

SEQ ID NO: 2268845 - RNA, 19 nt, Artificial Sequence
  Description of Artificial Sequence: Synthetic oligonucleotide
  Antisense strand to SEQ ID NO: 2268844
ugaacaacugcacacugac

SEQ ID NO: 2268846 - RNA, 19 nt, Artificial Sequence
  Description of Artificial Sequence: Synthetic oligonucleotide
  Sense strand starting at position 3347 of SEQ ID NO: 1884478
gugugcaguuguucauacu

SEQ ID NO: 2268847 - RNA, 19 nt, Artificial Sequence
  Description of Artificial Sequence: Synthetic oligonucleotide
  Antisense strand to SEQ ID NO: 2268846
aguaugaacaacugcacac

SEQ ID NO: 2268848 - RNA, 19 nt, Artificial Sequence
  Description of Artificial Sequence: Synthetic oligonucleotide
  Sense strand starting at position 3359 of SEQ ID NO: 1884478
ucauacuagucugaugauc

SEQ ID NO: 2268849 - RNA, 19 nt, Artificial Sequence
  Description of Artificial Sequence: Synthetic oligonucleotide
  Antisense strand to SEQ ID NO: 2268848
gaucaucagacuaguauga

SEQ ID NO: 2268850 - RNA, 19 nt, Artificial Sequence
  Description of Artificial Sequence: Synthetic oligonucleotide
  Sense strand starting at position 3361 of SEQ ID NO: 1884478
auacuagucugaugaucuu

SEQ ID NO: 2268851 - RNA, 19 nt, Artificial Sequence
  Description of Artificial Sequence: Synthetic oligonucleotide
  Antisense strand to SEQ ID NO: 2268850
aagaucaucagacuaguau

SEQ ID NO: 2268852 - RNA, 19 nt, Artificial Sequence
  Description of Artificial Sequence: Synthetic oligonucleotide
  Sense strand starting at position 3384 of SEQ ID NO: 1884478
uuuagauguuaucaguugu

SEQ ID NO: 2268853 - RNA, 19 nt, Artificial Sequence
  Description of Artificial Sequence: Synthetic oligonucleotide
  Antisense strand to SEQ ID NO: 2268852
acaacugauaacaucuaaa

SEQ ID NO: 2268854 - RNA, 19 nt, Artificial Sequence
  Description of Artificial Sequence: Synthetic oligonucleotide
  Sense strand starting at position 3453 of SEQ ID NO: 1884478
ugguauagcuaguaguuua

SEQ ID NO: 2268855 - RNA, 19 nt, Artificial Sequence
  Description of Artificial Sequence: Synthetic oligonucleotide
  Antisense strand to SEQ ID NO: 2268854
uaaacuacuagcuauacca

SEQ ID NO: 2268856 - RNA, 19 nt, Artificial Sequence
  Description of Artificial Sequence: Synthetic oligonucleotide
  Sense strand starting at position 3458 of SEQ ID NO: 1884478
uagcuaguaguuuauugau

SEQ ID NO: 2268857 - RNA, 19 nt, Artificial Sequence
  Description of Artificial Sequence: Synthetic oligonucleotide
  Antisense strand to SEQ ID NO: 2268856
aucaauaaacuacuagcua

SEQ ID NO: 2268858 - RNA, 19 nt, Artificial Sequence
  Description of Artificial Sequence: Synthetic oligonucleotide
  Sense strand starting at position 3460 of SEQ ID NO: 1884478
gcuaguaguuuauugauuu

SEQ ID NO: 2268859 - RNA, 19 nt, Artificial Sequence
  Description of Artificial Sequence: Synthetic oligonucleotide
  Antisense strand to SEQ ID NO: 2268858
aaaucaauaaacuacuagc

SEQ ID NO: 2268860 - RNA, 19 nt, Artificial Sequence
  Description of Artificial Sequence: Synthetic oligonucleotide
  Sense strand starting at position 3781 of SEQ ID NO: 1884478
ccagacugaguuuaucuuu

SEQ ID NO: 2268861 - RNA, 19 nt, Artificial Sequence
  Description of Artificial Sequence: Synthetic oligonucleotide
  Antisense strand to SEQ ID NO: 2268860
aaagauaaacucagucugg

SEQ ID NO: 2268862 - RNA, 19 nt, Artificial Sequence
  Description of Artificial Sequence: Synthetic oligonucleotide
  Sense strand starting at position 3855 of SEQ ID NO: 1884478
uuguuuacuucugcucuua

SEQ ID NO: 2268863 - RNA, 19 nt, Artificial Sequence
  Description of Artificial Sequence: Synthetic oligonucleotide
  Antisense strand to SEQ ID NO: 2268862
uaagagcagaaguaaacaa

SEQ ID NO: 2268864 - RNA, 19 nt, Artificial Sequence
  Description of Artificial Sequence: Synthetic oligonucleotide
  Sense strand starting at position 3857 of SEQ ID NO: 1884478
guuuacuucugcucuuauc

SEQ ID NO: 2268865 - RNA, 19 nt, Artificial Sequence
  Description of Artificial Sequence: Synthetic oligonucleotide
  Antisense strand to SEQ ID NO: 2268864
gauaagagcagaaguaaac

SEQ ID NO: 2268866 - RNA, 19 nt, Artificial Sequence
  Description of Artificial Sequence: Synthetic oligonucleotide
  Sense strand starting at position 3898 of SEQ ID NO: 1884478
ggcuuuguuuguucucacu

SEQ ID NO: 2268867 - RNA, 19 nt, Artificial Sequence
  Description of Artificial Sequence: Synthetic oligonucleotide
  Antisense strand to SEQ ID NO: 2268866
agugagaacaaacaaagcc

SEQ ID NO: 2268868 - RNA, 19 nt, Artificial Sequence
  Description of Artificial Sequence: Synthetic oligonucleotide
  Sense strand starting at position 3935 of SEQ ID NO: 1884478
guaucauuagauuguuugu

SEQ ID NO: 2268869 - RNA, 19 nt, Artificial Sequence
  Description of Artificial Sequence: Synthetic oligonucleotide
  Antisense strand to SEQ ID NO: 2268868
acaaacaaucuaaugauac

SEQ ID NO: 2268870 - RNA, 19 nt, Artificial Sequence
  Description of Artificial Sequence: Synthetic oligonucleotide
  Sense strand starting at position 3940 of SEQ ID NO: 1884478
auuagauuguuuguuggaa

SEQ ID NO: 2268871 - RNA, 19 nt, Artificial Sequence
  Description of Artificial Sequence: Synthetic oligonucleotide
  Antisense strand to SEQ ID NO: 2268870
uuccaacaaacaaucuaau

SEQ ID NO: 2268872 - RNA, 19 nt, Artificial Sequence
  Description of Artificial Sequence: Synthetic oligonucleotide
  Sense strand starting at position 3941 of SEQ ID NO: 1884478
uuagauuguuuguuggaaa

SEQ ID NO: 2268873 - RNA, 19 nt, Artificial Sequence
  Description of Artificial Sequence: Synthetic oligonucleotide
  Antisense strand to SEQ ID NO: 2268872
uuuccaacaaacaaucuaa

SEQ ID NO: 2268874 - RNA, 19 nt, Artificial Sequence
  Description of Artificial Sequence: Synthetic oligonucleotide
  Sense strand starting at position 3942 of SEQ ID NO: 1884478
uagauuguuuguuggaaau

SEQ ID NO: 2268875 - RNA, 19 nt, Artificial Sequence
  Description of Artificial Sequence: Synthetic oligonucleotide
  Antisense strand to SEQ ID NO: 2268874
auuuccaacaaacaaucua

SEQ ID NO: 2268876 - RNA, 19 nt, Artificial Sequence
  Description of Artificial Sequence: Synthetic oligonucleotide
  Sense strand starting at position 3944 of SEQ ID NO: 1884478
gauuguuuguuggaaaucu

SEQ ID NO: 2268877 - RNA, 19 nt, Artificial Sequence
  Description of Artificial Sequence: Synthetic oligonucleotide
  Antisense strand to SEQ ID NO: 2268876
agauuuccaacaaacaauc

SEQ ID NO: 2268878 - RNA, 19 nt, Artificial Sequence
  Description of Artificial Sequence: Synthetic oligonucleotide
  Sense strand starting at position 3980 of SEQ ID NO: 1884478
agauguuuauugcuaugga

SEQ ID NO: 2268879 - RNA, 19 nt, Artificial Sequence
  Description of Artificial Sequence: Synthetic oligonucleotide
  Antisense strand to SEQ ID NO: 2268878
uccauagcaauaaacaucu

SEQ ID NO: 2268880 - RNA, 19 nt, Artificial Sequence
  Description of Artificial Sequence: Synthetic oligonucleotide
  Sense strand starting at position 3981 of SEQ ID NO: 1884478
gauguuuauugcuauggac

SEQ ID NO: 2268881 - RNA, 19 nt, Artificial Sequence
  Description of Artificial Sequence: Synthetic oligonucleotide
  Antisense strand to SEQ ID NO: 2268880
guccauagcaauaaacauc

SEQ ID NO: 2268882 - RNA, 19 nt, Artificial Sequence
  Description of Artificial Sequence: Synthetic oligonucleotide
  Sense strand starting at position 3983 of SEQ ID NO: 1884478
uguuuauugcuauggacuu

SEQ ID NO: 2268883 - RNA, 19 nt, Artificial Sequence
  Description of Artificial Sequence: Synthetic oligonucleotide
  Antisense strand to SEQ ID NO: 2268882
aaguccauagcaauaaaca

SEQ ID NO: 2268884 - RNA, 19 nt, Artificial Sequence
  Description of Artificial Sequence: Synthetic oligonucleotide
  Sense strand starting at position 2243 of SEQ ID NO: 1884479
gaaggacaguacuaauaag

SEQ ID NO: 2268885 - RNA, 19 nt, Artificial Sequence
  Description of Artificial Sequence: Synthetic oligonucleotide
  Antisense strand to SEQ ID NO: 2268884
cuuauuaguacuguccuuc

SEQ ID NO: 2268886 - RNA, 19 nt, Artificial Sequence
  Description of Artificial Sequence: Synthetic oligonucleotide
  Sense strand starting at position 2281 of SEQ ID NO: 1884479
ggaguuucuuaagauuauu

SEQ ID NO: 2268887 - RNA, 19 nt, Artificial Sequence
  Description of Artificial Sequence: Synthetic oligonucleotide
  Antisense strand to SEQ ID NO: 2268886
aauaaucuuaagaaacucc

SEQ ID NO: 2268888 - RNA, 19 nt, Artificial Sequence
  Description of Artificial Sequence: Synthetic oligonucleotide
  Sense strand starting at position 2284 of SEQ ID NO: 1884479
guuucuuaagauuauugac

SEQ ID NO: 2268889 - RNA, 19 nt, Artificial Sequence
  Description of Artificial Sequence: Synthetic oligonucleotide
  Antisense strand to SEQ ID NO: 2268888
gucaauaaucuuaagaaac

SEQ ID NO: 2268890 - RNA, 19 nt, Artificial Sequence
  Description of Artificial Sequence: Synthetic oligonucleotide
  Sense strand starting at position 2430 of SEQ ID NO: 1884479
guccaagagucucaaagcu

SEQ ID NO: 2268891 - RNA, 19 nt, Artificial Sequence
  Description of Artificial Sequence: Synthetic oligonucleotide
  Antisense strand to SEQ ID NO: 2268890
agcuuugagacucuuggac

SEQ ID NO: 2268892 - RNA, 19 nt, Artificial Sequence
  Description of Artificial Sequence: Synthetic oligonucleotide
  Sense strand starting at position 2514 of SEQ ID NO: 1884479
aagacuaagucagucuagu

SEQ ID NO: 2268893 - RNA, 19 nt, Artificial Sequence
  Description of Artificial Sequence: Synthetic oligonucleotide
  Antisense strand to SEQ ID NO: 2268892
acuagacugacuuagucuu

SEQ ID NO: 2268894 - RNA, 19 nt, Artificial Sequence
  Description of Artificial Sequence: Synthetic oligonucleotide
  Sense strand starting at position 2788 of SEQ ID NO: 1884479
caguguagguggcaagauu

SEQ ID NO: 2268895 - RNA, 19 nt, Artificial Sequence
  Description of Artificial Sequence: Synthetic oligonucleotide
  Antisense strand to SEQ ID NO: 2268894
aaucuugccaccuacacug

SEQ ID NO: 2268896 - RNA, 19 nt, Artificial Sequence
  Description of Artificial Sequence: Synthetic oligonucleotide
  Sense strand starting at position 2825 of SEQ ID NO: 1884479
aaccauugggccugugauu

SEQ ID NO: 2268897 - RNA, 19 nt, Artificial Sequence
  Description of Artificial Sequence: Synthetic oligonucleotide
  Antisense strand to SEQ ID NO: 2268896
aaucacaggcccaaugguu

SEQ ID NO: 2268898 - RNA, 19 nt, Artificial Sequence
  Description of Artificial Sequence: Synthetic oligonucleotide
  Sense strand starting at position 2836 of SEQ ID NO: 1884479
cugugauuccucuguggcu

SEQ ID NO: 2268899 - RNA, 19 nt, Artificial Sequence
  Description of Artificial Sequence: Synthetic oligonucleotide
  Antisense strand to SEQ ID NO: 2268898
agccacagaggaaucacag

SEQ ID NO: 2268900 - RNA, 19 nt, Artificial Sequence
  Description of Artificial Sequence: Synthetic oligonucleotide
  Sense strand starting at position 2849 of SEQ ID NO: 1884479
guggcugguccugguuuaa

SEQ ID NO: 2268901 - RNA, 19 nt, Artificial Sequence
  Description of Artificial Sequence: Synthetic oligonucleotide
  Antisense strand to SEQ ID NO: 2268900
uuaaaccaggaccagccac

SEQ ID NO: 2268902 - RNA, 19 nt, Artificial Sequence
  Description of Artificial Sequence: Synthetic oligonucleotide
  Sense strand starting at position 2879 of SEQ ID NO: 1884479
gggugagcaucaucucagu

SEQ ID NO: 2268903 - RNA, 19 nt, Artificial Sequence
  Description of Artificial Sequence: Synthetic oligonucleotide
  Antisense strand to SEQ ID NO: 2268902
acugagaugaugcucaccc

SEQ ID NO: 2268904 - RNA, 19 nt, Artificial Sequence
  Description of Artificial Sequence: Synthetic oligonucleotide
  Sense strand starting at position 2946 of SEQ ID NO: 1884479
ggcucauaauugcuguguu

SEQ ID NO: 2268905 - RNA, 19 nt, Artificial Sequence
  Description of Artificial Sequence: Synthetic oligonucleotide
  Antisense strand to SEQ ID NO: 2268904
aacacagcaauuaugagcc

SEQ ID NO: 2268906 - RNA, 19 nt, Artificial Sequence
  Description of Artificial Sequence: Synthetic oligonucleotide
  Sense strand starting at position 3119 of SEQ ID NO: 1884479
auuuacgguucuuaagaag

SEQ ID NO: 2268907 - RNA, 19 nt, Artificial Sequence
  Description of Artificial Sequence: Synthetic oligonucleotide
  Antisense strand to SEQ ID NO: 2268906
cuucuuaagaaccguaaau

SEQ ID NO: 2268908 - RNA, 19 nt, Artificial Sequence
  Description of Artificial Sequence: Synthetic oligonucleotide
  Sense strand starting at position 3122 of SEQ ID NO: 1884479
uacgguucuuaagaagguu

SEQ ID NO: 2268909 - RNA, 19 nt, Artificial Sequence
  Description of Artificial Sequence: Synthetic oligonucleotide
  Antisense strand to SEQ ID NO: 2268908
aaccuucuuaagaaccgua

SEQ ID NO: 2268910 - RNA, 19 nt, Artificial Sequence
  Description of Artificial Sequence: Synthetic oligonucleotide
  Sense strand starting at position 3279 of SEQ ID NO: 1884479
gguguuaguucuucauugu

SEQ ID NO: 2268911 - RNA, 19 nt, Artificial Sequence
  Description of Artificial Sequence: Synthetic oligonucleotide
  Antisense strand to SEQ ID NO: 2268910
acaaugaagaacuaacacc

SEQ ID NO: 2268912 - RNA, 19 nt, Artificial Sequence
  Description of Artificial Sequence: Synthetic oligonucleotide
  Sense strand starting at position 3390 of SEQ ID NO: 1884479
ucauuauuggccuguugag

SEQ ID NO: 2268913 - RNA, 19 nt, Artificial Sequence
  Description of Artificial Sequence: Synthetic oligonucleotide
  Antisense strand to SEQ ID NO: 2268912
cucaacaggccaauaauga

SEQ ID NO: 2268914 - RNA, 19 nt, Artificial Sequence
  Description of Artificial Sequence: Synthetic oligonucleotide
  Sense strand starting at position 3436 of SEQ ID NO: 1884479
ugguaaguuguauguguuu

SEQ ID NO: 2268915 - RNA, 19 nt, Artificial Sequence
  Description of Artificial Sequence: Synthetic oligonucleotide
  Antisense strand to SEQ ID NO: 2268914
aaacacauacaacuuacca

SEQ ID NO: 2268916 - RNA, 19 nt, Artificial Sequence
  Description of Artificial Sequence: Synthetic oligonucleotide
  Sense strand starting at position 3438 of SEQ ID NO: 1884479
guaaguuguauguguuuag

SEQ ID NO: 2268917 - RNA, 19 nt, Artificial Sequence
  Description of Artificial Sequence: Synthetic oligonucleotide
  Antisense strand to SEQ ID NO: 2268916
cuaaacacauacaacuuac

SEQ ID NO: 2268918 - RNA, 19 nt, Artificial Sequence
  Description of Artificial Sequence: Synthetic oligonucleotide
  Sense strand starting at position 3439 of SEQ ID NO: 1884479
uaaguuguauguguuuaga

SEQ ID NO: 2268919 - RNA, 19 nt, Artificial Sequence
  Description of Artificial Sequence: Synthetic oligonucleotide
  Antisense strand to SEQ ID NO: 2268918
ucuaaacacauacaacuua

SEQ ID NO: 2268920 - RNA, 19 nt, Artificial Sequence
  Description of Artificial Sequence: Synthetic oligonucleotide
  Sense strand starting at position 3441 of SEQ ID NO: 1884479
aguuguauguguuuagaaa

SEQ ID NO: 2268921 - RNA, 19 nt, Artificial Sequence
  Description of Artificial Sequence: Synthetic oligonucleotide
  Antisense strand to SEQ ID NO: 2268920
uuucuaaacacauacaacu

SEQ ID NO: 2268922 - RNA, 19 nt, Artificial Sequence
  Description of Artificial Sequence: Synthetic oligonucleotide
  Sense strand starting at position 3482 of SEQ ID NO: 1884479
uccaguuugucagugugca

SEQ ID NO: 2268923 - RNA, 19 nt, Artificial Sequence
  Description of Artificial Sequence: Synthetic oligonucleotide
  Antisense strand to SEQ ID NO: 2268922
ugcacacugacaaacugga

SEQ ID NO: 2268924 - RNA, 19 nt, Artificial Sequence
  Description of Artificial Sequence: Synthetic oligonucleotide
  Sense strand starting at position 3490 of SEQ ID NO: 1884479
gucagugugcaguuguuca

SEQ ID NO: 2268925 - RNA, 19 nt, Artificial Sequence
  Description of Artificial Sequence: Synthetic oligonucleotide
  Antisense strand to SEQ ID NO: 2268924
ugaacaacugcacacugac

SEQ ID NO: 2268926 - RNA, 19 nt, Artificial Sequence
  Description of Artificial Sequence: Synthetic oligonucleotide
  Sense strand starting at position 3494 of SEQ ID NO: 1884479
gugugcaguuguucauacu

SEQ ID NO: 2268927 - RNA, 19 nt, Artificial Sequence
  Description of Artificial Sequence: Synthetic oligonucleotide
  Antisense strand to SEQ ID NO: 2268926
aguaugaacaacugcacac

SEQ ID NO: 2268928 - RNA, 19 nt, Artificial Sequence
  Description of Artificial Sequence: Synthetic oligonucleotide
  Sense strand starting at position 3506 of SEQ ID NO: 1884479
ucauacuagucugaugauc

SEQ ID NO: 2268929 - RNA, 19 nt, Artificial Sequence
  Description of Artificial Sequence: Synthetic oligonucleotide
  Antisense strand to SEQ ID NO: 2268928
gaucaucagacuaguauga

SEQ ID NO: 2268930 - RNA, 19 nt, Artificial Sequence
  Description of Artificial Sequence: Synthetic oligonucleotide
  Sense strand starting at position 3508 of SEQ ID NO: 1884479
auacuagucugaugaucuu

SEQ ID NO: 2268931 - RNA, 19 nt, Artificial Sequence
  Description of Artificial Sequence: Synthetic oligonucleotide
  Antisense strand to SEQ ID NO: 2268930
aagaucaucagacuaguau

SEQ ID NO: 2268932 - RNA, 19 nt, Artificial Sequence
  Description of Artificial Sequence: Synthetic oligonucleotide
  Sense strand starting at position 3531 of SEQ ID NO: 1884479
uuuagauguuaucaguugu

SEQ ID NO: 2268933 - RNA, 19 nt, Artificial Sequence
  Description of Artificial Sequence: Synthetic oligonucleotide
  Antisense strand to SEQ ID NO: 2268932
acaacugauaacaucuaaa

SEQ ID NO: 2268934 - RNA, 19 nt, Artificial Sequence
  Description of Artificial Sequence: Synthetic oligonucleotide
  Sense strand starting at position 3600 of SEQ ID NO: 1884479
ugguauagcuaguaguuua

SEQ ID NO: 2268935 - RNA, 19 nt, Artificial Sequence
  Description of Artificial Sequence: Synthetic oligonucleotide
  Antisense strand to SEQ ID NO: 2268934
uaaacuacuagcuauacca

SEQ ID NO: 2268936 - RNA, 19 nt, Artificial Sequence
  Description of Artificial Sequence: Synthetic oligonucleotide
  Sense strand starting at position 3605 of SEQ ID NO: 1884479
uagcuaguaguuuauugau

SEQ ID NO: 2268937 - RNA, 19 nt, Artificial Sequence
  Description of Artificial Sequence: Synthetic oligonucleotide
  Antisense strand to SEQ ID NO: 2268936
aucaauaaacuacuagcua

SEQ ID NO: 2268938 - RNA, 19 nt, Artificial Sequence
  Description of Artificial Sequence: Synthetic oligonucleotide
  Sense strand starting at position 3607 of SEQ ID NO: 1884479
gcuaguaguuuauugauuu

SEQ ID NO: 2268939 - RNA, 19 nt, Artificial Sequence
  Description of Artificial Sequence: Synthetic oligonucleotide
  Antisense strand to SEQ ID NO: 2268938
aaaucaauaaacuacuagc

SEQ ID NO: 2268940 - RNA, 19 nt, Artificial Sequence
  Description of Artificial Sequence: Synthetic oligonucleotide
  Sense strand starting at position 3928 of SEQ ID NO: 1884479
ccagacugaguuuaucuuu

SEQ ID NO: 2268941 - RNA, 19 nt, Artificial Sequence
  Description of Artificial Sequence: Synthetic oligonucleotide
  Antisense strand to SEQ ID NO: 2268940
aaagauaaacucagucugg

SEQ ID NO: 2268942 - RNA, 19 nt, Artificial Sequence
  Description of Artificial Sequence: Synthetic oligonucleotide
  Sense strand starting at position 277 of SEQ ID NO: 1884480
uuguaauaaucacugaaug

SEQ ID NO: 2268943 - RNA, 19 nt, Artificial Sequence
  Description of Artificial Sequence: Synthetic oligonucleotide
  Antisense strand to SEQ ID NO: 2268942
cauucagugauuauuacaa

SEQ ID NO: 2268944 - RNA, 19 nt, Artificial Sequence
  Description of Artificial Sequence: Synthetic oligonucleotide
  Sense strand starting at position 361 of SEQ ID NO: 1884480
uuugauuccaggcagugau

SEQ ID NO: 2268945 - RNA, 19 nt, Artificial Sequence
  Description of Artificial Sequence: Synthetic oligonucleotide
  Antisense strand to SEQ ID NO: 2268944
aucacugccuggaaucaaa

SEQ ID NO: 2268946 - RNA, 19 nt, Artificial Sequence
  Description of Artificial Sequence: Synthetic oligonucleotide
  Sense strand starting at position 365 of SEQ ID NO: 1884480
auuccaggcagugauguaa

SEQ ID NO: 2268947 - RNA, 19 nt, Artificial Sequence
  Description of Artificial Sequence: Synthetic oligonucleotide
  Antisense strand to SEQ ID NO: 2268946
uuacaucacugccuggaau

SEQ ID NO: 2268948 - RNA, 19 nt, Artificial Sequence
  Description of Artificial Sequence: Synthetic oligonucleotide
  Sense strand starting at position 401 of SEQ ID NO: 1884480
ggauacucuuccucagaag

SEQ ID NO: 2268949 - RNA, 19 nt, Artificial Sequence
  Description of Artificial Sequence: Synthetic oligonucleotide
  Antisense strand to SEQ ID NO: 2268948
cuucugaggaagaguaucc

SEQ ID NO: 2268950 - RNA, 19 nt, Artificial Sequence
  Description of Artificial Sequence: Synthetic oligonucleotide
  Sense strand starting at position 421 of SEQ ID NO: 1884480
uuuaguuaacaauagcuga

SEQ ID NO: 2268951 - RNA, 19 nt, Artificial Sequence
  Description of Artificial Sequence: Synthetic oligonucleotide
  Antisense strand to SEQ ID NO: 2268950
ucagcuauuguuaacuaaa

SEQ ID NO: 2268952 - RNA, 19 nt, Artificial Sequence
  Description of Artificial Sequence: Synthetic oligonucleotide
  Sense strand starting at position 429 of SEQ ID NO: 1884480
acaauagcugacuaaaguu

SEQ ID NO: 2268953 - RNA, 19 nt, Artificial Sequence
  Description of Artificial Sequence: Synthetic oligonucleotide
  Antisense strand to SEQ ID NO: 2268952
aacuuuagucagcuauugu

SEQ ID NO: 2268954 - RNA, 19 nt, Artificial Sequence
  Description of Artificial Sequence: Synthetic oligonucleotide
  Sense strand starting at position 915 of SEQ ID NO: 1884480
ccauauguuccugagcaaa

SEQ ID NO: 2268955 - RNA, 19 nt, Artificial Sequence
  Description of Artificial Sequence: Synthetic oligonucleotide
  Antisense strand to SEQ ID NO: 2268954
uuugcucaggaacauaugg

SEQ ID NO: 2268956 - RNA, 19 nt, Artificial Sequence
  Description of Artificial Sequence: Synthetic oligonucleotide
  Sense strand starting at position 1042 of SEQ ID NO: 1884480
uagggauuaucugcagaua

SEQ ID NO: 2268957 - RNA, 19 nt, Artificial Sequence
  Description of Artificial Sequence: Synthetic oligonucleotide
  Antisense strand to SEQ ID NO: 2268956
uaucugcagauaaucccua

SEQ ID NO: 2268958 - RNA, 19 nt, Artificial Sequence
  Description of Artificial Sequence: Synthetic oligonucleotide
  Sense strand starting at position 1115 of SEQ ID NO: 1884480
ggaaauggguagucaucua

SEQ ID NO: 2268959 - RNA, 19 nt, Artificial Sequence
  Description of Artificial Sequence: Synthetic oligonucleotide
  Antisense strand to SEQ ID NO: 2268958
uagaugacuacccauuucc

SEQ ID NO: 2268960 - RNA, 19 nt, Artificial Sequence
  Description of Artificial Sequence: Synthetic oligonucleotide
  Sense strand starting at position 1246 of SEQ ID NO: 1884480
ggaauacuaucugucuaaa

SEQ ID NO: 2268961 - RNA, 19 nt, Artificial Sequence
  Description of Artificial Sequence: Synthetic oligonucleotide
  Antisense strand to SEQ ID NO: 2268960
uuuagacagauaguauucc

SEQ ID NO: 2268962 - RNA, 19 nt, Artificial Sequence
  Description of Artificial Sequence: Synthetic oligonucleotide
  Sense strand starting at position 1258 of SEQ ID NO: 1884480
gucuaaauagcucaugacu

SEQ ID NO: 2268963 - RNA, 19 nt, Artificial Sequence
  Description of Artificial Sequence: Synthetic oligonucleotide
  Antisense strand to SEQ ID NO: 2268962
agucaugagcuauuuagac

SEQ ID NO: 2268964 - RNA, 19 nt, Artificial Sequence
  Description of Artificial Sequence: Synthetic oligonucleotide
  Sense strand starting at position 1296 of SEQ ID NO: 1884480
agcuucuauguauaagaca

SEQ ID NO: 2268965 - RNA, 19 nt, Artificial Sequence
  Description of Artificial Sequence: Synthetic oligonucleotide
  Antisense strand to SEQ ID NO: 2268964
ugucuuauacauagaagcu

SEQ ID NO: 2268966 - RNA, 19 nt, Artificial Sequence
  Description of Artificial Sequence: Synthetic oligonucleotide
  Sense strand starting at position 1323 of SEQ ID NO: 1884480
gaaaguugugugcaggaag

SEQ ID NO: 2268967 - RNA, 19 nt, Artificial Sequence
  Description of Artificial Sequence: Synthetic oligonucleotide
  Antisense strand to SEQ ID NO: 2268966
cuuccugcacacaacuuuc

SEQ ID NO: 2268968 - RNA, 19 nt, Artificial Sequence
  Description of Artificial Sequence: Synthetic oligonucleotide
  Sense strand starting at position 1349 of SEQ ID NO: 1884480
agguuaaguccuggagaga

SEQ ID NO: 2268969 - RNA, 19 nt, Artificial Sequence
  Description of Artificial Sequence: Synthetic oligonucleotide
  Antisense strand to SEQ ID NO: 2268968
ucucuccaggacuuaaccu

SEQ ID NO: 2268970 - RNA, 19 nt, Artificial Sequence
  Description of Artificial Sequence: Synthetic oligonucleotide
  Sense strand starting at position 1404 of SEQ ID NO: 1884480
ugugauagcaaccagugaa

SEQ ID NO: 2268971 - RNA, 19 nt, Artificial Sequence
  Description of Artificial Sequence: Synthetic oligonucleotide
  Antisense strand to SEQ ID NO: 2268970
uucacugguugcuaucaca

SEQ ID NO: 2268972 - RNA, 19 nt, Artificial Sequence
  Description of Artificial Sequence: Synthetic oligonucleotide
  Sense strand starting at position 1407 of SEQ ID NO: 1884480
gauagcaaccagugaaaua

SEQ ID NO: 2268973 - RNA, 19 nt, Artificial Sequence
  Description of Artificial Sequence: Synthetic oligonucleotide
  Antisense strand to SEQ ID NO: 2268972
uauuucacugguugcuauc

SEQ ID NO: 2268974 - RNA, 19 nt, Artificial Sequence
  Description of Artificial Sequence: Synthetic oligonucleotide
  Sense strand starting at position 1574 of SEQ ID NO: 1884480
uuuauaaucugggcaauaa

SEQ ID NO: 2268975 - RNA, 19 nt, Artificial Sequence
  Description of Artificial Sequence: Synthetic oligonucleotide
  Antisense strand to SEQ ID NO: 2268974
uuauugcccagauuauaaa

SEQ ID NO: 2268976 - RNA, 19 nt, Artificial Sequence
  Description of Artificial Sequence: Synthetic oligonucleotide
  Sense strand starting at position 1585 of SEQ ID NO: 1884480
ggcaauaauuuggaaacaa

SEQ ID NO: 2268977 - RNA, 19 nt, Artificial Sequence
  Description of Artificial Sequence: Synthetic oligonucleotide
  Antisense strand to SEQ ID NO: 2268976
uuguuuccaaauuauugcc

SEQ ID NO: 2268978 - RNA, 19 nt, Artificial Sequence
  Description of Artificial Sequence: Synthetic oligonucleotide
  Sense strand starting at position 1707 of SEQ ID NO: 1884480
agcugaaagcagggaauua

SEQ ID NO: 2268979 - RNA, 19 nt, Artificial Sequence
  Description of Artificial Sequence: Synthetic oligonucleotide
  Antisense strand to SEQ ID NO: 2268978
uaauucccugcuuucagcu

SEQ ID NO: 2268980 - RNA, 19 nt, Artificial Sequence
  Description of Artificial Sequence: Synthetic oligonucleotide
  Sense strand starting at position 1719 of SEQ ID NO: 1884480
ggaauuaacuucuuucuag

SEQ ID NO: 2268981 - RNA, 19 nt, Artificial Sequence
  Description of Artificial Sequence: Synthetic oligonucleotide
  Antisense strand to SEQ ID NO: 2268980
cuagaaagaaguuaauucc

SEQ ID NO: 2268982 - RNA, 19 nt, Artificial Sequence
  Description of Artificial Sequence: Synthetic oligonucleotide
  Sense strand starting at position 1729 of SEQ ID NO: 1884480
ucuuucuagcuagaagaca

SEQ ID NO: 2268983 - RNA, 19 nt, Artificial Sequence
  Description of Artificial Sequence: Synthetic oligonucleotide
  Antisense strand to SEQ ID NO: 2268982
ugucuucuagcuagaaaga

SEQ ID NO: 2268984 - RNA, 19 nt, Artificial Sequence
  Description of Artificial Sequence: Synthetic oligonucleotide
  Sense strand starting at position 2059 of SEQ ID NO: 1884480
gagacugcugcuuagaaau

SEQ ID NO: 2268985 - RNA, 19 nt, Artificial Sequence
  Description of Artificial Sequence: Synthetic oligonucleotide
  Antisense strand to SEQ ID NO: 2268984
auuucuaagcagcagucuc

SEQ ID NO: 2268986 - RNA, 19 nt, Artificial Sequence
  Description of Artificial Sequence: Synthetic oligonucleotide
  Sense strand starting at position 2083 of SEQ ID NO: 1884480
gcucauugucaagaaauuc

SEQ ID NO: 2268987 - RNA, 19 nt, Artificial Sequence
  Description of Artificial Sequence: Synthetic oligonucleotide
  Antisense strand to SEQ ID NO: 2268986
gaauuucuugacaaugagc

SEQ ID NO: 2268988 - RNA, 19 nt, Artificial Sequence
  Description of Artificial Sequence: Synthetic oligonucleotide
  Sense strand starting at position 2094 of SEQ ID NO: 1884480
agaaauuccuugucaucag

SEQ ID NO: 2268989 - RNA, 19 nt, Artificial Sequence
  Description of Artificial Sequence: Synthetic oligonucleotide
  Antisense strand to SEQ ID NO: 2268988
cugaugacaaggaauuucu

SEQ ID NO: 2268990 - RNA, 19 nt, Artificial Sequence
  Description of Artificial Sequence: Synthetic oligonucleotide
  Sense strand starting at position 2184 of SEQ ID NO: 1884480
uuguuaugugcguugacac

SEQ ID NO: 2268991 - RNA, 19 nt, Artificial Sequence
  Description of Artificial Sequence: Synthetic oligonucleotide
  Antisense strand to SEQ ID NO: 2268990
gugucaacgcacauaacaa

SEQ ID NO: 2268992 - RNA, 19 nt, Artificial Sequence
  Description of Artificial Sequence: Synthetic oligonucleotide
  Sense strand starting at position 2322 of SEQ ID NO: 1884480
acaaauucugaaggaguuu

SEQ ID NO: 2268993 - RNA, 19 nt, Artificial Sequence
  Description of Artificial Sequence: Synthetic oligonucleotide
  Antisense strand to SEQ ID NO: 2268992
aaacuccuucagaauuugu

SEQ ID NO: 2268994 - RNA, 19 nt, Artificial Sequence
  Description of Artificial Sequence: Synthetic oligonucleotide
  Sense strand starting at position 2456 of SEQ ID NO: 1884480
ucuuaaccuuugguggaaa

SEQ ID NO: 2268995 - RNA, 19 nt, Artificial Sequence
  Description of Artificial Sequence: Synthetic oligonucleotide
  Antisense strand to SEQ ID NO: 2268994
uuuccaccaaagguuaaga

SEQ ID NO: 2268996 - RNA, 19 nt, Artificial Sequence
  Description of Artificial Sequence: Synthetic oligonucleotide
  Sense strand starting at position 2458 of SEQ ID NO: 1884480
uuaaccuuugguggaaaua

SEQ ID NO: 2268997 - RNA, 19 nt, Artificial Sequence
  Description of Artificial Sequence: Synthetic oligonucleotide
  Antisense strand to SEQ ID NO: 2268996
uauuuccaccaaagguuaa

SEQ ID NO: 2268998 - RNA, 19 nt, Artificial Sequence
  Description of Artificial Sequence: Synthetic oligonucleotide
  Sense strand starting at position 2700 of SEQ ID NO: 1884480
aagacagugagguguugaa

SEQ ID NO: 2268999 - RNA, 19 nt, Artificial Sequence
  Description of Artificial Sequence: Synthetic oligonucleotide
  Antisense strand to SEQ ID NO: 2268998
uucaacaccucacugucuu

SEQ ID NO: 2269000 - RNA, 19 nt, Artificial Sequence
  Description of Artificial Sequence: Synthetic oligonucleotide
  Sense strand starting at position 2937 of SEQ ID NO: 1884480
uuguauguucugucugcua

SEQ ID NO: 2269001 - RNA, 19 nt, Artificial Sequence
  Description of Artificial Sequence: Synthetic oligonucleotide
  Antisense strand to SEQ ID NO: 2269000
uagcagacagaacauacaa

SEQ ID NO: 2269002 - RNA, 19 nt, Artificial Sequence
  Description of Artificial Sequence: Synthetic oligonucleotide
  Sense strand starting at position 2976 of SEQ ID NO: 1884480
ugucauaccuucucaagga

SEQ ID NO: 2269003 - RNA, 19 nt, Artificial Sequence
  Description of Artificial Sequence: Synthetic oligonucleotide
  Antisense strand to SEQ ID NO: 2269002
uccuugagaagguaugaca

SEQ ID NO: 2269004 - RNA, 19 nt, Artificial Sequence
  Description of Artificial Sequence: Synthetic oligonucleotide
  Sense strand starting at position 2980 of SEQ ID NO: 1884480
auaccuucucaaggagacu

SEQ ID NO: 2269005 - RNA, 19 nt, Artificial Sequence
  Description of Artificial Sequence: Synthetic oligonucleotide
  Antisense strand to SEQ ID NO: 2269004
agucuccuugagaagguau

SEQ ID NO: 2269006 - RNA, 19 nt, Artificial Sequence
  Description of Artificial Sequence: Synthetic oligonucleotide
  Sense strand starting at position 2989 of SEQ ID NO: 1884480
caaggagacugagcuauua

SEQ ID NO: 2269007 - RNA, 19 nt, Artificial Sequence
  Description of Artificial Sequence: Synthetic oligonucleotide
  Antisense strand to SEQ ID NO: 2269006
uaauagcucagucuccuug

SEQ ID NO: 2269008 - RNA, 19 nt, Artificial Sequence
  Description of Artificial Sequence: Synthetic oligonucleotide
  Sense strand starting at position 3009 of SEQ ID NO: 1884480
ggaugaaagcguuaaucaa

SEQ ID NO: 2269009 - RNA, 19 nt, Artificial Sequence
  Description of Artificial Sequence: Synthetic oligonucleotide
  Antisense strand to SEQ ID NO: 2269008
uugauuaacgcuuucaucc

SEQ ID NO: 2269010 - RNA, 19 nt, Artificial Sequence
  Description of Artificial Sequence: Synthetic oligonucleotide
  Sense strand starting at position 3192 of SEQ ID NO: 1884480
aguucuaaauucuuugaag

SEQ ID NO: 2269011 - RNA, 19 nt, Artificial Sequence
  Description of Artificial Sequence: Synthetic oligonucleotide
  Antisense strand to SEQ ID NO: 2269010
cuucaaagaauuuagaacu

SEQ ID NO: 2269012 - RNA, 19 nt, Artificial Sequence
  Description of Artificial Sequence: Synthetic oligonucleotide
  Sense strand starting at position 3236 of SEQ ID NO: 1884480
uguguuccuaaaggagaaa

SEQ ID NO: 2269013 - RNA, 19 nt, Artificial Sequence
  Description of Artificial Sequence: Synthetic oligonucleotide
  Antisense strand to SEQ ID NO: 2269012
uuucuccuuuaggaacaca

SEQ ID NO: 2269014 - RNA, 19 nt, Artificial Sequence
  Description of Artificial Sequence: Synthetic oligonucleotide
  Sense strand starting at position 3430 of SEQ ID NO: 1884480
uggaaugcuuaaguaaaug

SEQ ID NO: 2269015 - RNA, 19 nt, Artificial Sequence
  Description of Artificial Sequence: Synthetic oligonucleotide
  Antisense strand to SEQ ID NO: 2269014
cauuuacuuaagcauucca

SEQ ID NO: 2269016 - RNA, 19 nt, Artificial Sequence
  Description of Artificial Sequence: Synthetic oligonucleotide
  Sense strand starting at position 3494 of SEQ ID NO: 1884480
gggaauuccugacuuccua

SEQ ID NO: 2269017 - RNA, 19 nt, Artificial Sequence
  Description of Artificial Sequence: Synthetic oligonucleotide
  Antisense strand to SEQ ID NO: 2269016
uaggaagucaggaauuccc

SEQ ID NO: 2269018 - RNA, 19 nt, Artificial Sequence
  Description of Artificial Sequence: Synthetic oligonucleotide
  Sense strand starting at position 3501 of SEQ ID NO: 1884480
ccugacuuccuaugagaaa

SEQ ID NO: 2269019 - RNA, 19 nt, Artificial Sequence
  Description of Artificial Sequence: Synthetic oligonucleotide
  Antisense strand to SEQ ID NO: 2269018
uuucucauaggaagucagg

SEQ ID NO: 2269020 - RNA, 19 nt, Artificial Sequence
  Description of Artificial Sequence: Synthetic oligonucleotide
  Sense strand starting at position 3900 of SEQ ID NO: 1884480
uuauaauuaccaggugauc

SEQ ID NO: 2269021 - RNA, 19 nt, Artificial Sequence
  Description of Artificial Sequence: Synthetic oligonucleotide
  Antisense strand to SEQ ID NO: 2269020
gaucaccugguaauuauaa

SEQ ID NO: 2269022 - RNA, 19 nt, Artificial Sequence
  Description of Artificial Sequence: Synthetic oligonucleotide
  Sense strand starting at position 112 of SEQ ID NO: 1884481
cuaacagugcuuuguuaaa

SEQ ID NO: 2269023 - RNA, 19 nt, Artificial Sequence
  Description of Artificial Sequence: Synthetic oligonucleotide
  Antisense strand to SEQ ID NO: 2269022
uuuaacaaagcacuguuag

SEQ ID NO: 2269024 - RNA, 19 nt, Artificial Sequence
  Description of Artificial Sequence: Synthetic oligonucleotide
  Sense strand starting at position 147 of SEQ ID NO: 1884481
ggagaacgcuuccuuuaau

SEQ ID NO: 2269025 - RNA, 19 nt, Artificial Sequence
  Description of Artificial Sequence: Synthetic oligonucleotide
  Antisense strand to SEQ ID NO: 2269024
auuaaaggaagcguucucc

SEQ ID NO: 2269026 - RNA, 19 nt, Artificial Sequence
  Description of Artificial Sequence: Synthetic oligonucleotide
  Sense strand starting at position 148 of SEQ ID NO: 1884481
gagaacgcuuccuuuaaug

SEQ ID NO: 2269027 - RNA, 19 nt, Artificial Sequence
  Description of Artificial Sequence: Synthetic oligonucleotide
  Antisense strand to SEQ ID NO: 2269026
cauuaaaggaagcguucuc

SEQ ID NO: 2269028 - RNA, 19 nt, Artificial Sequence
  Description of Artificial Sequence: Synthetic oligonucleotide
  Sense strand starting at position 235 of SEQ ID NO: 1884481
cuagguuucuuucugaaca

SEQ ID NO: 2269029 - RNA, 19 nt, Artificial Sequence
  Description of Artificial Sequence: Synthetic oligonucleotide
  Antisense strand to SEQ ID NO: 2269028
uguucagaaagaaaccuag

SEQ ID NO: 2269030 - RNA, 19 nt, Artificial Sequence
  Description of Artificial Sequence: Synthetic oligonucleotide
  Sense strand starting at position 258 of SEQ ID NO: 1884481
aguaacgugcuuuaagaaa

SEQ ID NO: 2269031 - RNA, 19 nt, Artificial Sequence
  Description of Artificial Sequence: Synthetic oligonucleotide
  Antisense strand to SEQ ID NO: 2269030
uuucuuaaagcacguuacu

SEQ ID NO: 2269032 - RNA, 19 nt, Artificial Sequence
  Description of Artificial Sequence: Synthetic oligonucleotide
  Sense strand starting at position 384 of SEQ ID NO: 1884481
uuaagaucucuuggaaagc

SEQ ID NO: 2269033 - RNA, 19 nt, Artificial Sequence
  Description of Artificial Sequence: Synthetic oligonucleotide
  Antisense strand to SEQ ID NO: 2269032
gcuuuccaagagaucuuaa

SEQ ID NO: 2269034 - RNA, 19 nt, Artificial Sequence
  Description of Artificial Sequence: Synthetic oligonucleotide
  Sense strand starting at position 394 of SEQ ID NO: 1884481
uuggaaagcuaacauuuau

SEQ ID NO: 2269035 - RNA, 19 nt, Artificial Sequence
  Description of Artificial Sequence: Synthetic oligonucleotide
  Antisense strand to SEQ ID NO: 2269034
auaaauguuagcuuuccaa

SEQ ID NO: 2269036 - RNA, 19 nt, Artificial Sequence
  Description of Artificial Sequence: Synthetic oligonucleotide
  Sense strand starting at position 400 of SEQ ID NO: 1884481
agcuaacauuuauagaguu

SEQ ID NO: 2269037 - RNA, 19 nt, Artificial Sequence
  Description of Artificial Sequence: Synthetic oligonucleotide
  Antisense strand to SEQ ID NO: 2269036
aacucuauaaauguuagcu

SEQ ID NO: 2269038 - RNA, 19 nt, Artificial Sequence
  Description of Artificial Sequence: Synthetic oligonucleotide
  Sense strand starting at position 417 of SEQ ID NO: 1884481
uuauuaucaugccucaguu

SEQ ID NO: 2269039 - RNA, 19 nt, Artificial Sequence
  Description of Artificial Sequence: Synthetic oligonucleotide
  Antisense strand to SEQ ID NO: 2269038
aacugaggcaugauaauaa

SEQ ID NO: 2269040 - RNA, 19 nt, Artificial Sequence
  Description of Artificial Sequence: Synthetic oligonucleotide
  Sense strand starting at position 1066 of SEQ ID NO: 1884481
agauuaagaugagagaaau

SEQ ID NO: 2269041 - RNA, 19 nt, Artificial Sequence
  Description of Artificial Sequence: Synthetic oligonucleotide
  Antisense strand to SEQ ID NO: 2269040
auuucucucaucuuaaucu

SEQ ID NO: 2269042 - RNA, 19 nt, Artificial Sequence
  Description of Artificial Sequence: Synthetic oligonucleotide
  Sense strand starting at position 1098 of SEQ ID NO: 1884481
gauacaagagugugccuuu

SEQ ID NO: 2269043 - RNA, 19 nt, Artificial Sequence
  Description of Artificial Sequence: Synthetic oligonucleotide
  Antisense strand to SEQ ID NO: 2269042
aaaggcacacucuuguauc

SEQ ID NO: 2269044 - RNA, 19 nt, Artificial Sequence
  Description of Artificial Sequence: Synthetic oligonucleotide
  Sense strand starting at position 1165 of SEQ ID NO: 1884481
aaugacuaagucugcugua

SEQ ID NO: 2269045 - RNA, 19 nt, Artificial Sequence
  Description of Artificial Sequence: Synthetic oligonucleotide
  Antisense strand to SEQ ID NO: 2269044
uacagcagacuuagucauu

SEQ ID NO: 2269046 - RNA, 19 nt, Artificial Sequence
  Description of Artificial Sequence: Synthetic oligonucleotide
  Sense strand starting at position 1166 of SEQ ID NO: 1884481
augacuaagucugcuguaa

SEQ ID NO: 2269047 - RNA, 19 nt, Artificial Sequence
  Description of Artificial Sequence: Synthetic oligonucleotide
  Antisense strand to SEQ ID NO: 2269046
uuacagcagacuuagucau

SEQ ID NO: 2269048 - RNA, 19 nt, Artificial Sequence
  Description of Artificial Sequence: Synthetic oligonucleotide
  Sense strand starting at position 1192 of SEQ ID NO: 1884481
uugucauaauagguuaaug

SEQ ID NO: 2269049 - RNA, 19 nt, Artificial Sequence
  Description of Artificial Sequence: Synthetic oligonucleotide
  Antisense strand to SEQ ID NO: 2269048
cauuaaccuauuaugacaa

SEQ ID NO: 2269050 - RNA, 19 nt, Artificial Sequence
  Description of Artificial Sequence: Synthetic oligonucleotide
  Sense strand starting at position 1533 of SEQ ID NO: 1884481
gaggucguuccugaaauau

SEQ ID NO: 2269051 - RNA, 19 nt, Artificial Sequence
  Description of Artificial Sequence: Synthetic oligonucleotide
  Antisense strand to SEQ ID NO: 2269050
auauuucaggaacgaccuc

SEQ ID NO: 2269052 - RNA, 19 nt, Artificial Sequence
  Description of Artificial Sequence: Synthetic oligonucleotide
  Sense strand starting at position 1555 of SEQ ID NO: 1884481
uaagauguguuaccgaacu

SEQ ID NO: 2269053 - RNA, 19 nt, Artificial Sequence
  Description of Artificial Sequence: Synthetic oligonucleotide
  Antisense strand to SEQ ID NO: 2269052
aguucgguaacacaucuua

SEQ ID NO: 2269054 - RNA, 19 nt, Artificial Sequence
  Description of Artificial Sequence: Synthetic oligonucleotide
  Sense strand starting at position 1577 of SEQ ID NO: 1884481
cgcuuagagguugagcaua

SEQ ID NO: 2269055 - RNA, 19 nt, Artificial Sequence
  Description of Artificial Sequence: Synthetic oligonucleotide
  Antisense strand to SEQ ID NO: 2269054
uaugcucaaccucuaagcg

SEQ ID NO: 2269056 - RNA, 19 nt, Artificial Sequence
  Description of Artificial Sequence: Synthetic oligonucleotide
  Sense strand starting at position 1579 of SEQ ID NO: 1884481
cuuagagguugagcauaaa

SEQ ID NO: 2269057 - RNA, 19 nt, Artificial Sequence
  Description of Artificial Sequence: Synthetic oligonucleotide
  Antisense strand to SEQ ID NO: 2269056
uuuaugcucaaccucuaag

SEQ ID NO: 2269058 - RNA, 19 nt, Artificial Sequence
  Description of Artificial Sequence: Synthetic oligonucleotide
  Sense strand starting at position 1589 of SEQ ID NO: 1884481
gagcauaaacacugaguca

SEQ ID NO: 2269059 - RNA, 19 nt, Artificial Sequence
  Description of Artificial Sequence: Synthetic oligonucleotide
  Antisense strand to SEQ ID NO: 2269058
ugacucaguguuuaugcuc

SEQ ID NO: 2269060 - RNA, 19 nt, Artificial Sequence
  Description of Artificial Sequence: Synthetic oligonucleotide
  Sense strand starting at position 2087 of SEQ ID NO: 1884481
gcagccucucggguguuaa

SEQ ID NO: 2269061 - RNA, 19 nt, Artificial Sequence
  Description of Artificial Sequence: Synthetic oligonucleotide
  Antisense strand to SEQ ID NO: 2269060
uuaacacccgagaggcugc

SEQ ID NO: 2269062 - RNA, 19 nt, Artificial Sequence
  Description of Artificial Sequence: Synthetic oligonucleotide
  Sense strand starting at position 2856 of SEQ ID NO: 1884481
augaccugucaaugggauu

SEQ ID NO: 2269063 - RNA, 19 nt, Artificial Sequence
  Description of Artificial Sequence: Synthetic oligonucleotide
  Antisense strand to SEQ ID NO: 2269062
aaucccauugacaggucau

SEQ ID NO: 2269064 - RNA, 19 nt, Artificial Sequence
  Description of Artificial Sequence: Synthetic oligonucleotide
  Sense strand starting at position 2905 of SEQ ID NO: 1884481
gcccucucccuggauaauu

SEQ ID NO: 2269065 - RNA, 19 nt, Artificial Sequence
  Description of Artificial Sequence: Synthetic oligonucleotide
  Antisense strand to SEQ ID NO: 2269064
aauuauccagggagagggc

SEQ ID NO: 2269066 - RNA, 19 nt, Artificial Sequence
  Description of Artificial Sequence: Synthetic oligonucleotide
  Sense strand starting at position 2913 of SEQ ID NO: 1884481
ccuggauaauuguccagaa

SEQ ID NO: 2269067 - RNA, 19 nt, Artificial Sequence
  Description of Artificial Sequence: Synthetic oligonucleotide
  Antisense strand to SEQ ID NO: 2269066
uucuggacaauuauccagg

SEQ ID NO: 2269068 - RNA, 19 nt, Artificial Sequence
  Description of Artificial Sequence: Synthetic oligonucleotide
  Sense strand starting at position 2914 of SEQ ID NO: 1884481
cuggauaauuguccagaag

SEQ ID NO: 2269069 - RNA, 19 nt, Artificial Sequence
  Description of Artificial Sequence: Synthetic oligonucleotide
  Antisense strand to SEQ ID NO: 2269068
cuucuggacaauuauccag

SEQ ID NO: 2269070 - RNA, 19 nt, Artificial Sequence
  Description of Artificial Sequence: Synthetic oligonucleotide
  Sense strand starting at position 3093 of SEQ ID NO: 1884481
cgggucagauucucaaaga

SEQ ID NO: 2269071 - RNA, 19 nt, Artificial Sequence
  Description of Artificial Sequence: Synthetic oligonucleotide
  Antisense strand to SEQ ID NO: 2269070
ucuuugagaaucugacccg

SEQ ID NO: 2269072 - RNA, 19 nt, Artificial Sequence
  Description of Artificial Sequence: Synthetic oligonucleotide
  Sense strand starting at position 3109 of SEQ ID NO: 1884481
agagccagcucuuuaauua

SEQ ID NO: 2269073 - RNA, 19 nt, Artificial Sequence
  Description of Artificial Sequence: Synthetic oligonucleotide
  Antisense strand to SEQ ID NO: 2269072
uaauuaaagagcuggcucu

SEQ ID NO: 2269074 - RNA, 19 nt, Artificial Sequence
  Description of Artificial Sequence: Synthetic oligonucleotide
  Sense strand starting at position 3117 of SEQ ID NO: 1884481
cucuuuaauuagguguaau

SEQ ID NO: 2269075 - RNA, 19 nt, Artificial Sequence
  Description of Artificial Sequence: Synthetic oligonucleotide
  Antisense strand to SEQ ID NO: 2269074
auuacaccuaauuaaagag

SEQ ID NO: 2269076 - RNA, 19 nt, Artificial Sequence
  Description of Artificial Sequence: Synthetic oligonucleotide
  Sense strand starting at position 3129 of SEQ ID NO: 1884481
guguaauugagagaucgug

SEQ ID NO: 2269077 - RNA, 19 nt, Artificial Sequence
  Description of Artificial Sequence: Synthetic oligonucleotide
  Antisense strand to SEQ ID NO: 2269076
cacgaucucucaauuacac

SEQ ID NO: 2269078 - RNA, 19 nt, Artificial Sequence
  Description of Artificial Sequence: Synthetic oligonucleotide
  Sense strand starting at position 3408 of SEQ ID NO: 1884481
gagagaaaccugugccuuc

SEQ ID NO: 2269079 - RNA, 19 nt, Artificial Sequence
  Description of Artificial Sequence: Synthetic oligonucleotide
  Antisense strand to SEQ ID NO: 2269078
gaaggcacagguuucucuc

SEQ ID NO: 2269080 - RNA, 19 nt, Artificial Sequence
  Description of Artificial Sequence: Synthetic oligonucleotide
  Sense strand starting at position 3419 of SEQ ID NO: 1884481
gugccuuccggauugcauu

SEQ ID NO: 2269081 - RNA, 19 nt, Artificial Sequence
  Description of Artificial Sequence: Synthetic oligonucleotide
  Antisense strand to SEQ ID NO: 2269080
aaugcaauccggaaggcac

SEQ ID NO: 2269082 - RNA, 19 nt, Artificial Sequence
  Description of Artificial Sequence: Synthetic oligonucleotide
  Sense strand starting at position 3440 of SEQ ID NO: 1884481
auguuugaugaagaacguu

SEQ ID NO: 2269083 - RNA, 19 nt, Artificial Sequence
  Description of Artificial Sequence: Synthetic oligonucleotide
  Antisense strand to SEQ ID NO: 2269082
aacguucuucaucaaacau

SEQ ID NO: 2269084 - RNA, 19 nt, Artificial Sequence
  Description of Artificial Sequence: Synthetic oligonucleotide
  Sense strand starting at position 3640 of SEQ ID NO: 1884481
cgggcuguugugaggauua

SEQ ID NO: 2269085 - RNA, 19 nt, Artificial Sequence
  Description of Artificial Sequence: Synthetic oligonucleotide
  Antisense strand to SEQ ID NO: 2269084
uaauccucacaacagcccg

SEQ ID NO: 2269086 - RNA, 19 nt, Artificial Sequence
  Description of Artificial Sequence: Synthetic oligonucleotide
  Sense strand starting at position 3715 of SEQ ID NO: 1884481
aguggauguucccugaaua

SEQ ID NO: 2269087 - RNA, 19 nt, Artificial Sequence
  Description of Artificial Sequence: Synthetic oligonucleotide
  Antisense strand to SEQ ID NO: 2269086
uauucagggaacauccacu

SEQ ID NO: 2269088 - RNA, 19 nt, Artificial Sequence
  Description of Artificial Sequence: Synthetic oligonucleotide
  Sense strand starting at position 3716 of SEQ ID NO: 1884481
guggauguucccugaauaa

SEQ ID NO: 2269089 - RNA, 19 nt, Artificial Sequence
  Description of Artificial Sequence: Synthetic oligonucleotide
  Antisense strand to SEQ ID NO: 2269088
uuauucagggaacauccac

SEQ ID NO: 2269090 - RNA, 19 nt, Artificial Sequence
  Description of Artificial Sequence: Synthetic oligonucleotide
  Sense strand starting at position 3754 of SEQ ID NO: 1884481
cuccacuauucuguguuua

SEQ ID NO: 2269091 - RNA, 19 nt, Artificial Sequence
  Description of Artificial Sequence: Synthetic oligonucleotide
  Antisense strand to SEQ ID NO: 2269090
uaaacacagaauaguggag

SEQ ID NO: 2269092 - RNA, 19 nt, Artificial Sequence
  Description of Artificial Sequence: Synthetic oligonucleotide
  Sense strand starting at position 3756 of SEQ ID NO: 1884481
ccacuauucuguguuuaug

SEQ ID NO: 2269093 - RNA, 19 nt, Artificial Sequence
  Description of Artificial Sequence: Synthetic oligonucleotide
  Antisense strand to SEQ ID NO: 2269092
cauaaacacagaauagugg

SEQ ID NO: 2269094 - RNA, 19 nt, Artificial Sequence
  Description of Artificial Sequence: Synthetic oligonucleotide
  Sense strand starting at position 3758 of SEQ ID NO: 1884481
acuauucuguguuuaugaa

SEQ ID NO: 2269095 - RNA, 19 nt, Artificial Sequence
  Description of Artificial Sequence: Synthetic oligonucleotide
  Antisense strand to SEQ ID NO: 2269094
uucauaaacacagaauagu

SEQ ID NO: 2269096 - RNA, 19 nt, Artificial Sequence
  Description of Artificial Sequence: Synthetic oligonucleotide
  Sense strand starting at position 3759 of SEQ ID NO: 1884481
cuauucuguguuuaugaaa

SEQ ID NO: 2269097 - RNA, 19 nt, Artificial Sequence
  Description of Artificial Sequence: Synthetic oligonucleotide
  Antisense strand to SEQ ID NO: 2269096
uuucauaaacacagaauag

SEQ ID NO: 2269098 - RNA, 19 nt, Artificial Sequence
  Description of Artificial Sequence: Synthetic oligonucleotide
  Sense strand starting at position 3776 of SEQ ID NO: 1884481
aaaguuggguuagugauaa

SEQ ID NO: 2269099 - RNA, 19 nt, Artificial Sequence
  Description of Artificial Sequence: Synthetic oligonucleotide
  Antisense strand to SEQ ID NO: 2269098
uuaucacuaacccaacuuu

SEQ ID NO: 2269100 - RNA, 19 nt, Artificial Sequence
  Description of Artificial Sequence: Synthetic oligonucleotide
  Sense strand starting at position 3787 of SEQ ID NO: 1884481
agugauaauccuuaaaugc

SEQ ID NO: 2269101 - RNA, 19 nt, Artificial Sequence
  Description of Artificial Sequence: Synthetic oligonucleotide
  Antisense strand to SEQ ID NO: 2269100
gcauuuaaggauuaucacu

SEQ ID NO: 2269102 - RNA, 19 nt, Artificial Sequence
  Description of Artificial Sequence: Synthetic oligonucleotide
  Sense strand starting at position 81 of SEQ ID NO: 1884482
cugggcuacuucuuuguaa

SEQ ID NO: 2269103 - RNA, 19 nt, Artificial Sequence
  Description of Artificial Sequence: Synthetic oligonucleotide
  Antisense strand to SEQ ID NO: 2269102
uuacaaagaaguagcccag

SEQ ID NO: 2269104 - RNA, 19 nt, Artificial Sequence
  Description of Artificial Sequence: Synthetic oligonucleotide
  Sense strand starting at position 83 of SEQ ID NO: 1884482
gggcuacuucuuuguaaca

SEQ ID NO: 2269105 - RNA, 19 nt, Artificial Sequence
  Description of Artificial Sequence: Synthetic oligonucleotide
  Antisense strand to SEQ ID NO: 2269104
uguuacaaagaaguagccc

SEQ ID NO: 2269106 - RNA, 19 nt, Artificial Sequence
  Description of Artificial Sequence: Synthetic oligonucleotide
  Sense strand starting at position 104 of SEQ ID NO: 1884482
gaauguauccauuggguag

SEQ ID NO: 2269107 - RNA, 19 nt, Artificial Sequence
  Description of Artificial Sequence: Synthetic oligonucleotide
  Antisense strand to SEQ ID NO: 2269106
cuacccaauggauacauuc

SEQ ID NO: 2269108 - RNA, 19 nt, Artificial Sequence
  Description of Artificial Sequence: Synthetic oligonucleotide
  Sense strand starting at position 596 of SEQ ID NO: 1884482
ggauuacgcggucaggagu

SEQ ID NO: 2269109 - RNA, 19 nt, Artificial Sequence
  Description of Artificial Sequence: Synthetic oligonucleotide
  Antisense strand to SEQ ID NO: 2269108
acuccugaccgcguaaucc

SEQ ID NO: 2269110 - RNA, 19 nt, Artificial Sequence
  Description of Artificial Sequence: Synthetic oligonucleotide
  Sense strand starting at position 946 of SEQ ID NO: 1884482
ucaacuauccguugguuag

SEQ ID NO: 2269111 - RNA, 19 nt, Artificial Sequence
  Description of Artificial Sequence: Synthetic oligonucleotide
  Antisense strand to SEQ ID NO: 2269110
cuaaccaacggauaguuga

SEQ ID NO: 2269112 - RNA, 19 nt, Artificial Sequence
  Description of Artificial Sequence: Synthetic oligonucleotide
  Sense strand starting at position 1022 of SEQ ID NO: 1884482
gagggcuaucuguaacauc

SEQ ID NO: 2269113 - RNA, 19 nt, Artificial Sequence
  Description of Artificial Sequence: Synthetic oligonucleotide
  Antisense strand to SEQ ID NO: 2269112
gauguuacagauagcccuc

SEQ ID NO: 2269114 - RNA, 19 nt, Artificial Sequence
  Description of Artificial Sequence: Synthetic oligonucleotide
  Sense strand starting at position 1061 of SEQ ID NO: 1884482
auucgauaaucgucugaaa

SEQ ID NO: 2269115 - RNA, 19 nt, Artificial Sequence
  Description of Artificial Sequence: Synthetic oligonucleotide
  Antisense strand to SEQ ID NO: 2269114
uuucagacgauuaucgaau

SEQ ID NO: 2269116 - RNA, 19 nt, Artificial Sequence
  Description of Artificial Sequence: Synthetic oligonucleotide
  Sense strand starting at position 1063 of SEQ ID NO: 1884482
ucgauaaucgucugaaaug

SEQ ID NO: 2269117 - RNA, 19 nt, Artificial Sequence
  Description of Artificial Sequence: Synthetic oligonucleotide
  Antisense strand to SEQ ID NO: 2269116
cauuucagacgauuaucga

SEQ ID NO: 2269118 - RNA, 19 nt, Artificial Sequence
  Description of Artificial Sequence: Synthetic oligonucleotide
  Sense strand starting at position 1129 of SEQ ID NO: 1884482
gcgcgauccaaaucuguua

SEQ ID NO: 2269119 - RNA, 19 nt, Artificial Sequence
  Description of Artificial Sequence: Synthetic oligonucleotide
  Antisense strand to SEQ ID NO: 2269118
uaacagauuuggaucgcgc

SEQ ID NO: 2269120 - RNA, 19 nt, Artificial Sequence
  Description of Artificial Sequence: Synthetic oligonucleotide
  Sense strand starting at position 1132 of SEQ ID NO: 1884482
cgauccaaaucuguuacaa

SEQ ID NO: 2269121 - RNA, 19 nt, Artificial Sequence
  Description of Artificial Sequence: Synthetic oligonucleotide
  Antisense strand to SEQ ID NO: 2269120
uuguaacagauuuggaucg

SEQ ID NO: 2269122 - RNA, 19 nt, Artificial Sequence
  Description of Artificial Sequence: Synthetic oligonucleotide
  Sense strand starting at position 1310 of SEQ ID NO: 1884482
uuuagaaagggcuggguua

SEQ ID NO: 2269123 - RNA, 19 nt, Artificial Sequence
  Description of Artificial Sequence: Synthetic oligonucleotide
  Antisense strand to SEQ ID NO: 2269122
uaacccagcccuuucuaaa

SEQ ID NO: 2269124 - RNA, 19 nt, Artificial Sequence
  Description of Artificial Sequence: Synthetic oligonucleotide
  Sense strand starting at position 1311 of SEQ ID NO: 1884482
uuagaaagggcuggguuaa

SEQ ID NO: 2269125 - RNA, 19 nt, Artificial Sequence
  Description of Artificial Sequence: Synthetic oligonucleotide
  Antisense strand to SEQ ID NO: 2269124
uuaacccagcccuuucuaa

SEQ ID NO: 2269126 - RNA, 19 nt, Artificial Sequence
  Description of Artificial Sequence: Synthetic oligonucleotide
  Sense strand starting at position 1369 of SEQ ID NO: 1884482
uuguauccauucuuaguaa

SEQ ID NO: 2269127 - RNA, 19 nt, Artificial Sequence
  Description of Artificial Sequence: Synthetic oligonucleotide
  Antisense strand to SEQ ID NO: 2269126
uuacuaagaauggauacaa

SEQ ID NO: 2269128 - RNA, 19 nt, Artificial Sequence
  Description of Artificial Sequence: Synthetic oligonucleotide
  Sense strand starting at position 1424 of SEQ ID NO: 1884482
uugacuuuccuuuauuagu

SEQ ID NO: 2269129 - RNA, 19 nt, Artificial Sequence
  Description of Artificial Sequence: Synthetic oligonucleotide
  Antisense strand to SEQ ID NO: 2269128
acuaauaaaggaaagucaa

SEQ ID NO: 2269130 - RNA, 19 nt, Artificial Sequence
  Description of Artificial Sequence: Synthetic oligonucleotide
  Sense strand starting at position 1437 of SEQ ID NO: 1884482
auuaguucgcaacacaaga

SEQ ID NO: 2269131 - RNA, 19 nt, Artificial Sequence
  Description of Artificial Sequence: Synthetic oligonucleotide
  Antisense strand to SEQ ID NO: 2269130
ucuuguguugcgaacuaau

SEQ ID NO: 2269132 - RNA, 19 nt, Artificial Sequence
  Description of Artificial Sequence: Synthetic oligonucleotide
  Sense strand starting at position 1828 of SEQ ID NO: 1884482
cagcaaucgccagacaaag

SEQ ID NO: 2269133 - RNA, 19 nt, Artificial Sequence
  Description of Artificial Sequence: Synthetic oligonucleotide
  Antisense strand to SEQ ID NO: 2269132
cuuugucuggcgauugcug

SEQ ID NO: 2269134 - RNA, 19 nt, Artificial Sequence
  Description of Artificial Sequence: Synthetic oligonucleotide
  Sense strand starting at position 2055 of SEQ ID NO: 1884482
gggauaagcgguuauguca

SEQ ID NO: 2269135 - RNA, 19 nt, Artificial Sequence
  Description of Artificial Sequence: Synthetic oligonucleotide
  Antisense strand to SEQ ID NO: 2269134
ugacauaaccgcuuauccc

SEQ ID NO: 2269136 - RNA, 19 nt, Artificial Sequence
  Description of Artificial Sequence: Synthetic oligonucleotide
  Sense strand starting at position 2064 of SEQ ID NO: 1884482
gguuaugucaaccagucag

SEQ ID NO: 2269137 - RNA, 19 nt, Artificial Sequence
  Description of Artificial Sequence: Synthetic oligonucleotide
  Antisense strand to SEQ ID NO: 2269136
cugacugguugacauaacc

SEQ ID NO: 2269138 - RNA, 19 nt, Artificial Sequence
  Description of Artificial Sequence: Synthetic oligonucleotide
  Sense strand starting at position 2227 of SEQ ID NO: 1884482
cguccugugagugauguaa

SEQ ID NO: 2269139 - RNA, 19 nt, Artificial Sequence
  Description of Artificial Sequence: Synthetic oligonucleotide
  Antisense strand to SEQ ID NO: 2269138
uuacaucacucacaggacg

SEQ ID NO: 2269140 - RNA, 19 nt, Artificial Sequence
  Description of Artificial Sequence: Synthetic oligonucleotide
  Sense strand starting at position 2231 of SEQ ID NO: 1884482
cugugagugauguaaugac

SEQ ID NO: 2269141 - RNA, 19 nt, Artificial Sequence
  Description of Artificial Sequence: Synthetic oligonucleotide
  Antisense strand to SEQ ID NO: 2269140
gucauuacaucacucacag

SEQ ID NO: 2269142 - RNA, 19 nt, Artificial Sequence
  Description of Artificial Sequence: Synthetic oligonucleotide
  Sense strand starting at position 2376 of SEQ ID NO: 1884482
gagguucguauauaaaugu

SEQ ID NO: 2269143 - RNA, 19 nt, Artificial Sequence
  Description of Artificial Sequence: Synthetic oligonucleotide
  Antisense strand to SEQ ID NO: 2269142
acauuuauauacgaaccuc

SEQ ID NO: 2269144 - RNA, 19 nt, Artificial Sequence
  Description of Artificial Sequence: Synthetic oligonucleotide
  Sense strand starting at position 2547 of SEQ ID NO: 1884482
agaagcggaguuuauuaau

SEQ ID NO: 2269145 - RNA, 19 nt, Artificial Sequence
  Description of Artificial Sequence: Synthetic oligonucleotide
  Antisense strand to SEQ ID NO: 2269144
auuaauaaacuccgcuucu

SEQ ID NO: 2269146 - RNA, 19 nt, Artificial Sequence
  Description of Artificial Sequence: Synthetic oligonucleotide
  Sense strand starting at position 2958 of SEQ ID NO: 1884482
guuacugaggucuaacauc

SEQ ID NO: 2269147 - RNA, 19 nt, Artificial Sequence
  Description of Artificial Sequence: Synthetic oligonucleotide
  Antisense strand to SEQ ID NO: 2269146
gauguuagaccucaguaac

SEQ ID NO: 2269148 - RNA, 19 nt, Artificial Sequence
  Description of Artificial Sequence: Synthetic oligonucleotide
  Sense strand starting at position 2964 of SEQ ID NO: 1884482
gaggucuaacaucggauau

SEQ ID NO: 2269149 - RNA, 19 nt, Artificial Sequence
  Description of Artificial Sequence: Synthetic oligonucleotide
  Antisense strand to SEQ ID NO: 2269148
auauccgauguuagaccuc

SEQ ID NO: 2269150 - RNA, 19 nt, Artificial Sequence
  Description of Artificial Sequence: Synthetic oligonucleotide
  Sense strand starting at position 2965 of SEQ ID NO: 1884482
aggucuaacaucggauauu

SEQ ID NO: 2269151 - RNA, 19 nt, Artificial Sequence
  Description of Artificial Sequence: Synthetic oligonucleotide
  Antisense strand to SEQ ID NO: 2269150
aauauccgauguuagaccu

SEQ ID NO: 2269152 - RNA, 19 nt, Artificial Sequence
  Description of Artificial Sequence: Synthetic oligonucleotide
  Sense strand starting at position 3206 of SEQ ID NO: 1884482
uugcuuuggaagugucuaa

SEQ ID NO: 2269153 - RNA, 19 nt, Artificial Sequence
  Description of Artificial Sequence: Synthetic oligonucleotide
  Antisense strand to SEQ ID NO: 2269152
uuagacacuuccaaagcaa

SEQ ID NO: 2269154 - RNA, 19 nt, Artificial Sequence
  Description of Artificial Sequence: Synthetic oligonucleotide
  Sense strand starting at position 3210 of SEQ ID NO: 1884482
uuuggaagugucuaaauca

SEQ ID NO: 2269155 - RNA, 19 nt, Artificial Sequence
  Description of Artificial Sequence: Synthetic oligonucleotide
  Antisense strand to SEQ ID NO: 2269154
ugauuuagacacuuccaaa

SEQ ID NO: 2269156 - RNA, 19 nt, Artificial Sequence
  Description of Artificial Sequence: Synthetic oligonucleotide
  Sense strand starting at position 3217 of SEQ ID NO: 1884482
gugucuaaaucagcugaua

SEQ ID NO: 2269157 - RNA, 19 nt, Artificial Sequence
  Description of Artificial Sequence: Synthetic oligonucleotide
  Antisense strand to SEQ ID NO: 2269156
uaucagcugauuuagacac

SEQ ID NO: 2269158 - RNA, 19 nt, Artificial Sequence
  Description of Artificial Sequence: Synthetic oligonucleotide
  Sense strand starting at position 3255 of SEQ ID NO: 1884482
ggagaaauuguagguucga

SEQ ID NO: 2269159 - RNA, 19 nt, Artificial Sequence
  Description of Artificial Sequence: Synthetic oligonucleotide
  Antisense strand to SEQ ID NO: 2269158
ucgaaccuacaauuucucc

SEQ ID NO: 2269160 - RNA, 19 nt, Artificial Sequence
  Description of Artificial Sequence: Synthetic oligonucleotide
  Sense strand starting at position 3256 of SEQ ID NO: 1884482
gagaaauuguagguucgag

SEQ ID NO: 2269161 - RNA, 19 nt, Artificial Sequence
  Description of Artificial Sequence: Synthetic oligonucleotide
  Antisense strand to SEQ ID NO: 2269160
cucgaaccuacaauuucuc

SEQ ID NO: 2269162 - RNA, 19 nt, Artificial Sequence
  Description of Artificial Sequence: Synthetic oligonucleotide
  Sense strand starting at position 3283 of SEQ ID NO: 1884482
cggcuuuguccugaaucuu

SEQ ID NO: 2269163 - RNA, 19 nt, Artificial Sequence
  Description of Artificial Sequence: Synthetic oligonucleotide
  Antisense strand to SEQ ID NO: 2269162
aagauucaggacaaagccg

SEQ ID NO: 2269164 - RNA, 19 nt, Artificial Sequence
  Description of Artificial Sequence: Synthetic oligonucleotide
  Sense strand starting at position 3370 of SEQ ID NO: 1884482
gaguauguagaucaaguuu

SEQ ID NO: 2269165 - RNA, 19 nt, Artificial Sequence
  Description of Artificial Sequence: Synthetic oligonucleotide
  Antisense strand to SEQ ID NO: 2269164
aaacuugaucuacauacuc

SEQ ID NO: 2269166 - RNA, 19 nt, Artificial Sequence
  Description of Artificial Sequence: Synthetic oligonucleotide
  Sense strand starting at position 3382 of SEQ ID NO: 1884482
caaguuuacguuuaguaag

SEQ ID NO: 2269167 - RNA, 19 nt, Artificial Sequence
  Description of Artificial Sequence: Synthetic oligonucleotide
  Antisense strand to SEQ ID NO: 2269166
cuuacuaaacguaaacuug

SEQ ID NO: 2269168 - RNA, 19 nt, Artificial Sequence
  Description of Artificial Sequence: Synthetic oligonucleotide
  Sense strand starting at position 3435 of SEQ ID NO: 1884482
ccauaagaugcauagcuaa

SEQ ID NO: 2269169 - RNA, 19 nt, Artificial Sequence
  Description of Artificial Sequence: Synthetic oligonucleotide
  Antisense strand to SEQ ID NO: 2269168
uuagcuaugcaucuuaugg

SEQ ID NO: 2269170 - RNA, 19 nt, Artificial Sequence
  Description of Artificial Sequence: Synthetic oligonucleotide
  Sense strand starting at position 3470 of SEQ ID NO: 1884482
uuugacuguuuggaaauuu

SEQ ID NO: 2269171 - RNA, 19 nt, Artificial Sequence
  Description of Artificial Sequence: Synthetic oligonucleotide
  Antisense strand to SEQ ID NO: 2269170
aaauuuccaaacagucaaa

SEQ ID NO: 2269172 - RNA, 19 nt, Artificial Sequence
  Description of Artificial Sequence: Synthetic oligonucleotide
  Sense strand starting at position 3499 of SEQ ID NO: 1884482
auugucaguguccacuauu

SEQ ID NO: 2269173 - RNA, 19 nt, Artificial Sequence
  Description of Artificial Sequence: Synthetic oligonucleotide
  Antisense strand to SEQ ID NO: 2269172
aauaguggacacugacaau

SEQ ID NO: 2269174 - RNA, 19 nt, Artificial Sequence
  Description of Artificial Sequence: Synthetic oligonucleotide
  Sense strand starting at position 3517 of SEQ ID NO: 1884482
uuggaaauucuaugagcag

SEQ ID NO: 2269175 - RNA, 19 nt, Artificial Sequence
  Description of Artificial Sequence: Synthetic oligonucleotide
  Antisense strand to SEQ ID NO: 2269174
cugcucauagaauuuccaa

SEQ ID NO: 2269176 - RNA, 19 nt, Artificial Sequence
  Description of Artificial Sequence: Synthetic oligonucleotide
  Sense strand starting at position 3520 of SEQ ID NO: 1884482
gaaauucuaugagcaguca

SEQ ID NO: 2269177 - RNA, 19 nt, Artificial Sequence
  Description of Artificial Sequence: Synthetic oligonucleotide
  Antisense strand to SEQ ID NO: 2269176
ugacugcucauagaauuuc

SEQ ID NO: 2269178 - RNA, 19 nt, Artificial Sequence
  Description of Artificial Sequence: Synthetic oligonucleotide
  Sense strand starting at position 3533 of SEQ ID NO: 1884482
cagucagcugucuacagau

SEQ ID NO: 2269179 - RNA, 19 nt, Artificial Sequence
  Description of Artificial Sequence: Synthetic oligonucleotide
  Antisense strand to SEQ ID NO: 2269178
aucuguagacagcugacug

SEQ ID NO: 2269180 - RNA, 19 nt, Artificial Sequence
  Description of Artificial Sequence: Synthetic oligonucleotide
  Sense strand starting at position 3547 of SEQ ID NO: 1884482
cagauacuugagugccuuu

SEQ ID NO: 2269181 - RNA, 19 nt, Artificial Sequence
  Description of Artificial Sequence: Synthetic oligonucleotide
  Antisense strand to SEQ ID NO: 2269180
aaaggcacucaaguaucug

SEQ ID NO: 2269182 - RNA, 19 nt, Artificial Sequence
  Description of Artificial Sequence: Synthetic oligonucleotide
  Sense strand starting at position 212 of SEQ ID NO: 1884483
cgcaucuuuccguuuguca

SEQ ID NO: 2269183 - RNA, 19 nt, Artificial Sequence
  Description of Artificial Sequence: Synthetic oligonucleotide
  Antisense strand to SEQ ID NO: 2269182
ugacaaacggaaagaugcg

SEQ ID NO: 2269184 - RNA, 19 nt, Artificial Sequence
  Description of Artificial Sequence: Synthetic oligonucleotide
  Sense strand starting at position 267 of SEQ ID NO: 1884483
cucaccuggucuucugaaa

SEQ ID NO: 2269185 - RNA, 19 nt, Artificial Sequence
  Description of Artificial Sequence: Synthetic oligonucleotide
  Antisense strand to SEQ ID NO: 2269184
uuucagaagaccaggugag

SEQ ID NO: 2269186 - RNA, 19 nt, Artificial Sequence
  Description of Artificial Sequence: Synthetic oligonucleotide
  Sense strand starting at position 274 of SEQ ID NO: 1884483
ggucuucugaaagagcuau

SEQ ID NO: 2269187 - RNA, 19 nt, Artificial Sequence
  Description of Artificial Sequence: Synthetic oligonucleotide
  Antisense strand to SEQ ID NO: 2269186
auagcucuuucagaagacc

SEQ ID NO: 2269188 - RNA, 19 nt, Artificial Sequence
  Description of Artificial Sequence: Synthetic oligonucleotide
  Sense strand starting at position 530 of SEQ ID NO: 1884483
gagauugcuuaaucaggga

SEQ ID NO: 2269189 - RNA, 19 nt, Artificial Sequence
  Description of Artificial Sequence: Synthetic oligonucleotide
  Antisense strand to SEQ ID NO: 2269188
ucccugauuaagcaaucuc

SEQ ID NO: 2269190 - RNA, 19 nt, Artificial Sequence
  Description of Artificial Sequence: Synthetic oligonucleotide
  Sense strand starting at position 582 of SEQ ID NO: 1884483
cucucugaagagugacuuu

SEQ ID NO: 2269191 - RNA, 19 nt, Artificial Sequence
  Description of Artificial Sequence: Synthetic oligonucleotide
  Antisense strand to SEQ ID NO: 2269190
aaagucacucuucagagag

SEQ ID NO: 2269192 - RNA, 19 nt, Artificial Sequence
  Description of Artificial Sequence: Synthetic oligonucleotide
  Sense strand starting at position 603 of SEQ ID NO: 1884483
accugauggagucaugguu

SEQ ID NO: 2269193 - RNA, 19 nt, Artificial Sequence
  Description of Artificial Sequence: Synthetic oligonucleotide
  Antisense strand to SEQ ID NO: 2269192
aaccaugacuccaucaggu

SEQ ID NO: 2269194 - RNA, 19 nt, Artificial Sequence
  Description of Artificial Sequence: Synthetic oligonucleotide
  Sense strand starting at position 673 of SEQ ID NO: 1884483
agggcaaagccagauguaa

SEQ ID NO: 2269195 - RNA, 19 nt, Artificial Sequence
  Description of Artificial Sequence: Synthetic oligonucleotide
  Antisense strand to SEQ ID NO: 2269194
uuacaucuggcuuugcccu

SEQ ID NO: 2269196 - RNA, 19 nt, Artificial Sequence
  Description of Artificial Sequence: Synthetic oligonucleotide
  Sense strand starting at position 821 of SEQ ID NO: 1884483
gccaauccucaucagguau

SEQ ID NO: 2269197 - RNA, 19 nt, Artificial Sequence
  Description of Artificial Sequence: Synthetic oligonucleotide
  Antisense strand to SEQ ID NO: 2269196
auaccugaugaggauuggc

SEQ ID NO: 2269198 - RNA, 19 nt, Artificial Sequence
  Description of Artificial Sequence: Synthetic oligonucleotide
  Sense strand starting at position 827 of SEQ ID NO: 1884483
ccucaucagguaugaauua

SEQ ID NO: 2269199 - RNA, 19 nt, Artificial Sequence
  Description of Artificial Sequence: Synthetic oligonucleotide
  Antisense strand to SEQ ID NO: 2269198
uaauucauaccugaugagg

SEQ ID NO: 2269200 - RNA, 19 nt, Artificial Sequence
  Description of Artificial Sequence: Synthetic oligonucleotide
  Sense strand starting at position 902 of SEQ ID NO: 1884483
uggugucauguauauugau

SEQ ID NO: 2269201 - RNA, 19 nt, Artificial Sequence
  Description of Artificial Sequence: Synthetic oligonucleotide
  Antisense strand to SEQ ID NO: 2269200
aucaauauacaugacacca

SEQ ID NO: 2269202 - RNA, 19 nt, Artificial Sequence
  Description of Artificial Sequence: Synthetic oligonucleotide
  Sense strand starting at position 911 of SEQ ID NO: 1884483
guauauugauccuuccuua

SEQ ID NO: 2269203 - RNA, 19 nt, Artificial Sequence
  Description of Artificial Sequence: Synthetic oligonucleotide
  Antisense strand to SEQ ID NO: 2269202
uaaggaaggaucaauauac

SEQ ID NO: 2269204 - RNA, 19 nt, Artificial Sequence
  Description of Artificial Sequence: Synthetic oligonucleotide
  Sense strand starting at position 972 of SEQ ID NO: 1884483
cucucaacuccguauuugu

SEQ ID NO: 2269205 - RNA, 19 nt, Artificial Sequence
  Description of Artificial Sequence: Synthetic oligonucleotide
  Antisense strand to SEQ ID NO: 2269204
acaaauacggaguugagag

SEQ ID NO: 2269206 - RNA, 19 nt, Artificial Sequence
  Description of Artificial Sequence: Synthetic oligonucleotide
  Sense strand starting at position 982 of SEQ ID NO: 1884483
cguauuuguagaggaaugu

SEQ ID NO: 2269207 - RNA, 19 nt, Artificial Sequence
  Description of Artificial Sequence: Synthetic oligonucleotide
  Antisense strand to SEQ ID NO: 2269206
acauuccucuacaaauacg

SEQ ID NO: 2269208 - RNA, 19 nt, Artificial Sequence
  Description of Artificial Sequence: Synthetic oligonucleotide
  Sense strand starting at position 1025 of SEQ ID NO: 1884483
cagggccuggcuuauuaaa

SEQ ID NO: 2269209 - RNA, 19 nt, Artificial Sequence
  Description of Artificial Sequence: Synthetic oligonucleotide
  Antisense strand to SEQ ID NO: 2269208
uuuaauaagccaggcccug

SEQ ID NO: 2269210 - RNA, 19 nt, Artificial Sequence
  Description of Artificial Sequence: Synthetic oligonucleotide
  Sense strand starting at position 1169 of SEQ ID NO: 1884483
ccaagucagacauggcaga

SEQ ID NO: 2269211 - RNA, 19 nt, Artificial Sequence
  Description of Artificial Sequence: Synthetic oligonucleotide
  Antisense strand to SEQ ID NO: 2269210
ucugccaugucugacuugg

SEQ ID NO: 2269212 - RNA, 19 nt, Artificial Sequence
  Description of Artificial Sequence: Synthetic oligonucleotide
  Sense strand starting at position 1320 of SEQ ID NO: 1884483
ggaucaugaucuccaccca

SEQ ID NO: 2269213 - RNA, 19 nt, Artificial Sequence
  Description of Artificial Sequence: Synthetic oligonucleotide
  Antisense strand to SEQ ID NO: 2269212
uggguggagaucaugaucc

SEQ ID NO: 2269214 - RNA, 19 nt, Artificial Sequence
  Description of Artificial Sequence: Synthetic oligonucleotide
  Sense strand starting at position 1633 of SEQ ID NO: 1884483
ugaucuguuauagggaauu

SEQ ID NO: 2269215 - RNA, 19 nt, Artificial Sequence
  Description of Artificial Sequence: Synthetic oligonucleotide
  Antisense strand to SEQ ID NO: 2269214
aauucccuauaacagauca

SEQ ID NO: 2269216 - RNA, 19 nt, Artificial Sequence
  Description of Artificial Sequence: Synthetic oligonucleotide
  Sense strand starting at position 1811 of SEQ ID NO: 1884483
gcaacuuuagagugauaug

SEQ ID NO: 2269217 - RNA, 19 nt, Artificial Sequence
  Description of Artificial Sequence: Synthetic oligonucleotide
  Antisense strand to SEQ ID NO: 2269216
cauaucacucuaaaguugc

SEQ ID NO: 2269218 - RNA, 19 nt, Artificial Sequence
  Description of Artificial Sequence: Synthetic oligonucleotide
  Sense strand starting at position 1963 of SEQ ID NO: 1884483
augggugcaccugauaagu

SEQ ID NO: 2269219 - RNA, 19 nt, Artificial Sequence
  Description of Artificial Sequence: Synthetic oligonucleotide
  Antisense strand to SEQ ID NO: 2269218
acuuaucaggugcacccau

SEQ ID NO: 2269220 - RNA, 19 nt, Artificial Sequence
  Description of Artificial Sequence: Synthetic oligonucleotide
  Sense strand starting at position 2362 of SEQ ID NO: 1884483
ugaauucgauccucuaaug

SEQ ID NO: 2269221 - RNA, 19 nt, Artificial Sequence
  Description of Artificial Sequence: Synthetic oligonucleotide
  Antisense strand to SEQ ID NO: 2269220
cauuagaggaucgaauuca

SEQ ID NO: 2269222 - RNA, 19 nt, Artificial Sequence
  Description of Artificial Sequence: Synthetic oligonucleotide
  Sense strand starting at position 2554 of SEQ ID NO: 1884483
ugaacauaagguugaaugu

SEQ ID NO: 2269223 - RNA, 19 nt, Artificial Sequence
  Description of Artificial Sequence: Synthetic oligonucleotide
  Antisense strand to SEQ ID NO: 2269222
acauucaaccuuauguuca

SEQ ID NO: 2269224 - RNA, 19 nt, Artificial Sequence
  Description of Artificial Sequence: Synthetic oligonucleotide
  Sense strand starting at position 2636 of SEQ ID NO: 1884483
ucauauugaugguuaagca

SEQ ID NO: 2269225 - RNA, 19 nt, Artificial Sequence
  Description of Artificial Sequence: Synthetic oligonucleotide
  Antisense strand to SEQ ID NO: 2269224
ugcuuaaccaucaauauga

SEQ ID NO: 2269226 - RNA, 19 nt, Artificial Sequence
  Description of Artificial Sequence: Synthetic oligonucleotide
  Sense strand starting at position 2637 of SEQ ID NO: 1884483
cauauugaugguuaagcaa

SEQ ID NO: 2269227 - RNA, 19 nt, Artificial Sequence
  Description of Artificial Sequence: Synthetic oligonucleotide
  Antisense strand to SEQ ID NO: 2269226
uugcuuaaccaucaauaug

SEQ ID NO: 2269228 - RNA, 19 nt, Artificial Sequence
  Description of Artificial Sequence: Synthetic oligonucleotide
  Sense strand starting at position 2640 of SEQ ID NO: 1884483
auugaugguuaagcaauau

SEQ ID NO: 2269229 - RNA, 19 nt, Artificial Sequence
  Description of Artificial Sequence: Synthetic oligonucleotide
  Antisense strand to SEQ ID NO: 2269228
auauugcuuaaccaucaau

SEQ ID NO: 2269230 - RNA, 19 nt, Artificial Sequence
  Description of Artificial Sequence: Synthetic oligonucleotide
  Sense strand starting at position 2644 of SEQ ID NO: 1884483
augguuaagcaauaucuuu

SEQ ID NO: 2269231 - RNA, 19 nt, Artificial Sequence
  Description of Artificial Sequence: Synthetic oligonucleotide
  Antisense strand to SEQ ID NO: 2269230
aaagauauugcuuaaccau

SEQ ID NO: 2269232 - RNA, 19 nt, Artificial Sequence
  Description of Artificial Sequence: Synthetic oligonucleotide
  Sense strand starting at position 2779 of SEQ ID NO: 1884483
uuuguacacccuuaaguga

SEQ ID NO: 2269233 - RNA, 19 nt, Artificial Sequence
  Description of Artificial Sequence: Synthetic oligonucleotide
  Antisense strand to SEQ ID NO: 2269232
ucacuuaaggguguacaaa

SEQ ID NO: 2269234 - RNA, 19 nt, Artificial Sequence
  Description of Artificial Sequence: Synthetic oligonucleotide
  Sense strand starting at position 2795 of SEQ ID NO: 1884483
ugaggucucucaccucaca

SEQ ID NO: 2269235 - RNA, 19 nt, Artificial Sequence
  Description of Artificial Sequence: Synthetic oligonucleotide
  Antisense strand to SEQ ID NO: 2269234
ugugaggugagagaccuca

SEQ ID NO: 2269236 - RNA, 19 nt, Artificial Sequence
  Description of Artificial Sequence: Synthetic oligonucleotide
  Sense strand starting at position 2939 of SEQ ID NO: 1884483
uguuguguugaguucuguu

SEQ ID NO: 2269237 - RNA, 19 nt, Artificial Sequence
  Description of Artificial Sequence: Synthetic oligonucleotide
  Antisense strand to SEQ ID NO: 2269236
aacagaacucaacacaaca

SEQ ID NO: 2269238 - RNA, 19 nt, Artificial Sequence
  Description of Artificial Sequence: Synthetic oligonucleotide
  Sense strand starting at position 2944 of SEQ ID NO: 1884483
uguugaguucuguugugcu

SEQ ID NO: 2269239 - RNA, 19 nt, Artificial Sequence
  Description of Artificial Sequence: Synthetic oligonucleotide
  Antisense strand to SEQ ID NO: 2269238
agcacaacagaacucaaca

SEQ ID NO: 2269240 - RNA, 19 nt, Artificial Sequence
  Description of Artificial Sequence: Synthetic oligonucleotide
  Sense strand starting at position 2946 of SEQ ID NO: 1884483
uugaguucuguugugcuuu

SEQ ID NO: 2269241 - RNA, 19 nt, Artificial Sequence
  Description of Artificial Sequence: Synthetic oligonucleotide
  Antisense strand to SEQ ID NO: 2269240
aaagcacaacagaacucaa

SEQ ID NO: 2269242 - RNA, 19 nt, Artificial Sequence
  Description of Artificial Sequence: Synthetic oligonucleotide
  Sense strand starting at position 3006 of SEQ ID NO: 1884483
cuugaagccagucaugagu

SEQ ID NO: 2269243 - RNA, 19 nt, Artificial Sequence
  Description of Artificial Sequence: Synthetic oligonucleotide
  Antisense strand to SEQ ID NO: 2269242
acucaugacuggcuucaag

SEQ ID NO: 2269244 - RNA, 19 nt, Artificial Sequence
  Description of Artificial Sequence: Synthetic oligonucleotide
  Sense strand starting at position 3082 of SEQ ID NO: 1884483
cuugguucucugggaugga

SEQ ID NO: 2269245 - RNA, 19 nt, Artificial Sequence
  Description of Artificial Sequence: Synthetic oligonucleotide
  Antisense strand to SEQ ID NO: 2269244
uccaucccagagaaccaag

SEQ ID NO: 2269246 - RNA, 19 nt, Artificial Sequence
  Description of Artificial Sequence: Synthetic oligonucleotide
  Sense strand starting at position 3085 of SEQ ID NO: 1884483
gguucucugggauggaaau

SEQ ID NO: 2269247 - RNA, 19 nt, Artificial Sequence
  Description of Artificial Sequence: Synthetic oligonucleotide
  Antisense strand to SEQ ID NO: 2269246
auuuccaucccagagaacc

SEQ ID NO: 2269248 - RNA, 19 nt, Artificial Sequence
  Description of Artificial Sequence: Synthetic oligonucleotide
  Sense strand starting at position 3086 of SEQ ID NO: 1884483
guucucugggauggaaaua

SEQ ID NO: 2269249 - RNA, 19 nt, Artificial Sequence
  Description of Artificial Sequence: Synthetic oligonucleotide
  Antisense strand to SEQ ID NO: 2269248
uauuuccaucccagagaac

SEQ ID NO: 2269250 - RNA, 19 nt, Artificial Sequence
  Description of Artificial Sequence: Synthetic oligonucleotide
  Sense strand starting at position 3406 of SEQ ID NO: 1884483
uuccgaagugugcuucagu

SEQ ID NO: 2269251 - RNA, 19 nt, Artificial Sequence
  Description of Artificial Sequence: Synthetic oligonucleotide
  Antisense strand to SEQ ID NO: 2269250
acugaagcacacuucggaa

SEQ ID NO: 2269252 - RNA, 19 nt, Artificial Sequence
  Description of Artificial Sequence: Synthetic oligonucleotide
  Sense strand starting at position 3527 of SEQ ID NO: 1884483
caaggacagucaucucuga

SEQ ID NO: 2269253 - RNA, 19 nt, Artificial Sequence
  Description of Artificial Sequence: Synthetic oligonucleotide
  Antisense strand to SEQ ID NO: 2269252
ucagagaugacuguccuug

SEQ ID NO: 2269254 - RNA, 19 nt, Artificial Sequence
  Description of Artificial Sequence: Synthetic oligonucleotide
  Sense strand starting at position 3531 of SEQ ID NO: 1884483
gacagucaucucugagaag

SEQ ID NO: 2269255 - RNA, 19 nt, Artificial Sequence
  Description of Artificial Sequence: Synthetic oligonucleotide
  Antisense strand to SEQ ID NO: 2269254
cuucucagagaugacuguc

SEQ ID NO: 2269256 - RNA, 19 nt, Artificial Sequence
  Description of Artificial Sequence: Synthetic oligonucleotide
  Sense strand starting at position 3567 of SEQ ID NO: 1884483
gagcacuggucagugacaa

SEQ ID NO: 2269257 - RNA, 19 nt, Artificial Sequence
  Description of Artificial Sequence: Synthetic oligonucleotide
  Antisense strand to SEQ ID NO: 2269256
uugucacugaccagugcuc

SEQ ID NO: 2269258 - RNA, 19 nt, Artificial Sequence
  Description of Artificial Sequence: Synthetic oligonucleotide
  Sense strand starting at position 3793 of SEQ ID NO: 1884483
gcaauaagaggacgauaau

SEQ ID NO: 2269259 - RNA, 19 nt, Artificial Sequence
  Description of Artificial Sequence: Synthetic oligonucleotide
  Antisense strand to SEQ ID NO: 2269258
auuaucguccucuuauugc

SEQ ID NO: 2269260 - RNA, 19 nt, Artificial Sequence
  Description of Artificial Sequence: Synthetic oligonucleotide
  Sense strand starting at position 3946 of SEQ ID NO: 1884483
guguccuuucaggagaaga

SEQ ID NO: 2269261 - RNA, 19 nt, Artificial Sequence
  Description of Artificial Sequence: Synthetic oligonucleotide
  Antisense strand to SEQ ID NO: 2269260
ucuucuccugaaaggacac

SEQ ID NO: 2269262 - RNA, 19 nt, Artificial Sequence
  Description of Artificial Sequence: Synthetic oligonucleotide
  Sense strand starting at position 249 of SEQ ID NO: 1884484
aauuauauggcagguauua

SEQ ID NO: 2269263 - RNA, 19 nt, Artificial Sequence
  Description of Artificial Sequence: Synthetic oligonucleotide
  Antisense strand to SEQ ID NO: 2269262
uaauaccugccauauaauu

SEQ ID NO: 2269264 - RNA, 19 nt, Artificial Sequence
  Description of Artificial Sequence: Synthetic oligonucleotide
  Sense strand starting at position 473 of SEQ ID NO: 1884484
gcuaauuauugacugaacu

SEQ ID NO: 2269265 - RNA, 19 nt, Artificial Sequence
  Description of Artificial Sequence: Synthetic oligonucleotide
  Antisense strand to SEQ ID NO: 2269264
aguucagucaauaauuagc

SEQ ID NO: 2269266 - RNA, 19 nt, Artificial Sequence
  Description of Artificial Sequence: Synthetic oligonucleotide
  Sense strand starting at position 626 of SEQ ID NO: 1884484
cuguaauacuuggcuugga

SEQ ID NO: 2269267 - RNA, 19 nt, Artificial Sequence
  Description of Artificial Sequence: Synthetic oligonucleotide
  Antisense strand to SEQ ID NO: 2269266
uccaagccaaguauuacag

SEQ ID NO: 2269268 - RNA, 19 nt, Artificial Sequence
  Description of Artificial Sequence: Synthetic oligonucleotide
  Sense strand starting at position 627 of SEQ ID NO: 1884484
uguaauacuuggcuuggau

SEQ ID NO: 2269269 - RNA, 19 nt, Artificial Sequence
  Description of Artificial Sequence: Synthetic oligonucleotide
  Antisense strand to SEQ ID NO: 2269268
auccaagccaaguauuaca

SEQ ID NO: 2269270 - RNA, 19 nt, Artificial Sequence
  Description of Artificial Sequence: Synthetic oligonucleotide
  Sense strand starting at position 1024 of SEQ ID NO: 1884484
agaagaauuguuugaaugu

SEQ ID NO: 2269271 - RNA, 19 nt, Artificial Sequence
  Description of Artificial Sequence: Synthetic oligonucleotide
  Antisense strand to SEQ ID NO: 2269270
acauucaaacaauucuucu

SEQ ID NO: 2269272 - RNA, 19 nt, Artificial Sequence
  Description of Artificial Sequence: Synthetic oligonucleotide
  Sense strand starting at position 1206 of SEQ ID NO: 1884484
agucauaaaucauuaguuc

SEQ ID NO: 2269273 - RNA, 19 nt, Artificial Sequence
  Description of Artificial Sequence: Synthetic oligonucleotide
  Antisense strand to SEQ ID NO: 2269272
gaacuaaugauuuaugacu

SEQ ID NO: 2269274 - RNA, 19 nt, Artificial Sequence
  Description of Artificial Sequence: Synthetic oligonucleotide
  Sense strand starting at position 1243 of SEQ ID NO: 1884484
gcuauuacugaucacugca

SEQ ID NO: 2269275 - RNA, 19 nt, Artificial Sequence
  Description of Artificial Sequence: Synthetic oligonucleotide
  Antisense strand to SEQ ID NO: 2269274
ugcagugaucaguaauagc

SEQ ID NO: 2269276 - RNA, 19 nt, Artificial Sequence
  Description of Artificial Sequence: Synthetic oligonucleotide
  Sense strand starting at position 1246 of SEQ ID NO: 1884484
auuacugaucacugcaguu

SEQ ID NO: 2269277 - RNA, 19 nt, Artificial Sequence
  Description of Artificial Sequence: Synthetic oligonucleotide
  Antisense strand to SEQ ID NO: 2269276
aacugcagugaucaguaau

SEQ ID NO: 2269278 - RNA, 19 nt, Artificial Sequence
  Description of Artificial Sequence: Synthetic oligonucleotide
  Sense strand starting at position 1259 of SEQ ID NO: 1884484
gcaguuacacuuuacgaca

SEQ ID NO: 2269279 - RNA, 19 nt, Artificial Sequence
  Description of Artificial Sequence: Synthetic oligonucleotide
  Antisense strand to SEQ ID NO: 2269278
ugucguaaaguguaacugc

SEQ ID NO: 2269280 - RNA, 19 nt, Artificial Sequence
  Description of Artificial Sequence: Synthetic oligonucleotide
  Sense strand starting at position 1291 of SEQ ID NO: 1884484
ccagaaugcuuucuguaaa

SEQ ID NO: 2269281 - RNA, 19 nt, Artificial Sequence
  Description of Artificial Sequence: Synthetic oligonucleotide
  Antisense strand to SEQ ID NO: 2269280
uuuacagaaagcauucugg

SEQ ID NO: 2269282 - RNA, 19 nt, Artificial Sequence
  Description of Artificial Sequence: Synthetic oligonucleotide
  Sense strand starting at position 1294 of SEQ ID NO: 1884484
gaaugcuuucuguaaaguu

SEQ ID NO: 2269283 - RNA, 19 nt, Artificial Sequence
  Description of Artificial Sequence: Synthetic oligonucleotide
  Antisense strand to SEQ ID NO: 2269282
aacuuuacagaaagcauuc

SEQ ID NO: 2269284 - RNA, 19 nt, Artificial Sequence
  Description of Artificial Sequence: Synthetic oligonucleotide
  Sense strand starting at position 1360 of SEQ ID NO: 1884484
ucaacaucugagugauuga

SEQ ID NO: 2269285 - RNA, 19 nt, Artificial Sequence
  Description of Artificial Sequence: Synthetic oligonucleotide
  Antisense strand to SEQ ID NO: 2269284
ucaaucacucagauguuga

SEQ ID NO: 2269286 - RNA, 19 nt, Artificial Sequence
  Description of Artificial Sequence: Synthetic oligonucleotide
  Sense strand starting at position 1363 of SEQ ID NO: 1884484
acaucugagugauugaagu

SEQ ID NO: 2269287 - RNA, 19 nt, Artificial Sequence
  Description of Artificial Sequence: Synthetic oligonucleotide
  Antisense strand to SEQ ID NO: 2269286
acuucaaucacucagaugu

SEQ ID NO: 2269288 - RNA, 19 nt, Artificial Sequence
  Description of Artificial Sequence: Synthetic oligonucleotide
  Sense strand starting at position 1365 of SEQ ID NO: 1884484
aucugagugauugaaguuc

SEQ ID NO: 2269289 - RNA, 19 nt, Artificial Sequence
  Description of Artificial Sequence: Synthetic oligonucleotide
  Antisense strand to SEQ ID NO: 2269288
gaacuucaaucacucagau

SEQ ID NO: 2269290 - RNA, 19 nt, Artificial Sequence
  Description of Artificial Sequence: Synthetic oligonucleotide
  Sense strand starting at position 1625 of SEQ ID NO: 1884484
agcaaaugucuggacaguu

SEQ ID NO: 2269291 - RNA, 19 nt, Artificial Sequence
  Description of Artificial Sequence: Synthetic oligonucleotide
  Antisense strand to SEQ ID NO: 2269290
aacuguccagacauuugcu

SEQ ID NO: 2269292 - RNA, 19 nt, Artificial Sequence
  Description of Artificial Sequence: Synthetic oligonucleotide
  Sense strand starting at position 1633 of SEQ ID NO: 1884484
ucuggacaguuaucuauau

SEQ ID NO: 2269293 - RNA, 19 nt, Artificial Sequence
  Description of Artificial Sequence: Synthetic oligonucleotide
  Antisense strand to SEQ ID NO: 2269292
auauagauaacuguccaga

SEQ ID NO: 2269294 - RNA, 19 nt, Artificial Sequence
  Description of Artificial Sequence: Synthetic oligonucleotide
  Sense strand starting at position 1634 of SEQ ID NO: 1884484
cuggacaguuaucuauauu

SEQ ID NO: 2269295 - RNA, 19 nt, Artificial Sequence
  Description of Artificial Sequence: Synthetic oligonucleotide
  Antisense strand to SEQ ID NO: 2269294
aauauagauaacuguccag

SEQ ID NO: 2269296 - RNA, 19 nt, Artificial Sequence
  Description of Artificial Sequence: Synthetic oligonucleotide
  Sense strand starting at position 1793 of SEQ ID NO: 1884484
gguauaucauacuuaccau

SEQ ID NO: 2269297 - RNA, 19 nt, Artificial Sequence
  Description of Artificial Sequence: Synthetic oligonucleotide
  Antisense strand to SEQ ID NO: 2269296
augguaaguaugauauacc

SEQ ID NO: 2269298 - RNA, 19 nt, Artificial Sequence
  Description of Artificial Sequence: Synthetic oligonucleotide
  Sense strand starting at position 1883 of SEQ ID NO: 1884484
uucuguucugcugucaagu

SEQ ID NO: 2269299 - RNA, 19 nt, Artificial Sequence
  Description of Artificial Sequence: Synthetic oligonucleotide
  Antisense strand to SEQ ID NO: 2269298
acuugacagcagaacagaa

SEQ ID NO: 2269300 - RNA, 19 nt, Artificial Sequence
  Description of Artificial Sequence: Synthetic oligonucleotide
  Sense strand starting at position 1884 of SEQ ID NO: 1884484
ucuguucugcugucaaguu

SEQ ID NO: 2269301 - RNA, 19 nt, Artificial Sequence
  Description of Artificial Sequence: Synthetic oligonucleotide
  Antisense strand to SEQ ID NO: 2269300
aacuugacagcagaacaga

SEQ ID NO: 2269302 - RNA, 19 nt, Artificial Sequence
  Description of Artificial Sequence: Synthetic oligonucleotide
  Sense strand starting at position 2005 of SEQ ID NO: 1884484
acucaauucgaacagugua

SEQ ID NO: 2269303 - RNA, 19 nt, Artificial Sequence
  Description of Artificial Sequence: Synthetic oligonucleotide
  Antisense strand to SEQ ID NO: 2269302
uacacuguucgaauugagu

SEQ ID NO: 2269304 - RNA, 19 nt, Artificial Sequence
  Description of Artificial Sequence: Synthetic oligonucleotide
  Sense strand starting at position 2196 of SEQ ID NO: 1884484
cugccagcugaauaauuaa

SEQ ID NO: 2269305 - RNA, 19 nt, Artificial Sequence
  Description of Artificial Sequence: Synthetic oligonucleotide
  Antisense strand to SEQ ID NO: 2269304
uuaauuauucagcuggcag

SEQ ID NO: 2269306 - RNA, 19 nt, Artificial Sequence
  Description of Artificial Sequence: Synthetic oligonucleotide
  Sense strand starting at position 2247 of SEQ ID NO: 1884484
guuucuauggcagacacuu

SEQ ID NO: 2269307 - RNA, 19 nt, Artificial Sequence
  Description of Artificial Sequence: Synthetic oligonucleotide
  Antisense strand to SEQ ID NO: 2269306
aagugucugccauagaaac

SEQ ID NO: 2269308 - RNA, 19 nt, Artificial Sequence
  Description of Artificial Sequence: Synthetic oligonucleotide
  Sense strand starting at position 2389 of SEQ ID NO: 1884484
uugucuuuguaacugauca

SEQ ID NO: 2269309 - RNA, 19 nt, Artificial Sequence
  Description of Artificial Sequence: Synthetic oligonucleotide
  Antisense strand to SEQ ID NO: 2269308
ugaucaguuacaaagacaa

SEQ ID NO: 2269310 - RNA, 19 nt, Artificial Sequence
  Description of Artificial Sequence: Synthetic oligonucleotide
  Sense strand starting at position 2441 of SEQ ID NO: 1884484
aacugagaccuaugguaau

SEQ ID NO: 2269311 - RNA, 19 nt, Artificial Sequence
  Description of Artificial Sequence: Synthetic oligonucleotide
  Antisense strand to SEQ ID NO: 2269310
auuaccauaggucucaguu

SEQ ID NO: 2269312 - RNA, 19 nt, Artificial Sequence
  Description of Artificial Sequence: Synthetic oligonucleotide
  Sense strand starting at position 2655 of SEQ ID NO: 1884484
cucuaaggagaaugcuaua

SEQ ID NO: 2269313 - RNA, 19 nt, Artificial Sequence
  Description of Artificial Sequence: Synthetic oligonucleotide
  Antisense strand to SEQ ID NO: 2269312
uauagcauucuccuuagag

SEQ ID NO: 2269314 - RNA, 19 nt, Artificial Sequence
  Description of Artificial Sequence: Synthetic oligonucleotide
  Sense strand starting at position 2741 of SEQ ID NO: 1884484
caaucuaugcuugguggau

SEQ ID NO: 2269315 - RNA, 19 nt, Artificial Sequence
  Description of Artificial Sequence: Synthetic oligonucleotide
  Antisense strand to SEQ ID NO: 2269314
auccaccaagcauagauug

SEQ ID NO: 2269316 - RNA, 19 nt, Artificial Sequence
  Description of Artificial Sequence: Synthetic oligonucleotide
  Sense strand starting at position 2742 of SEQ ID NO: 1884484
aaucuaugcuugguggaua

SEQ ID NO: 2269317 - RNA, 19 nt, Artificial Sequence
  Description of Artificial Sequence: Synthetic oligonucleotide
  Antisense strand to SEQ ID NO: 2269316
uauccaccaagcauagauu

SEQ ID NO: 2269318 - RNA, 19 nt, Artificial Sequence
  Description of Artificial Sequence: Synthetic oligonucleotide
  Sense strand starting at position 2745 of SEQ ID NO: 1884484
cuaugcuugguggauacua

SEQ ID NO: 2269319 - RNA, 19 nt, Artificial Sequence
  Description of Artificial Sequence: Synthetic oligonucleotide
  Antisense strand to SEQ ID NO: 2269318
uaguauccaccaagcauag

SEQ ID NO: 2269320 - RNA, 19 nt, Artificial Sequence
  Description of Artificial Sequence: Synthetic oligonucleotide
  Sense strand starting at position 2771 of SEQ ID NO: 1884484
augccuaauguauagcuaa

SEQ ID NO: 2269321 - RNA, 19 nt, Artificial Sequence
  Description of Artificial Sequence: Synthetic oligonucleotide
  Antisense strand to SEQ ID NO: 2269320
uuagcuauacauuaggcau

SEQ ID NO: 2269322 - RNA, 19 nt, Artificial Sequence
  Description of Artificial Sequence: Synthetic oligonucleotide
  Sense strand starting at position 2821 of SEQ ID NO: 1884484
cuucuaaguugacuuggau

SEQ ID NO: 2269323 - RNA, 19 nt, Artificial Sequence
  Description of Artificial Sequence: Synthetic oligonucleotide
  Antisense strand to SEQ ID NO: 2269322
auccaagucaacuuagaag

SEQ ID NO: 2269324 - RNA, 19 nt, Artificial Sequence
  Description of Artificial Sequence: Synthetic oligonucleotide
  Sense strand starting at position 2825 of SEQ ID NO: 1884484
uaaguugacuuggauuuga

SEQ ID NO: 2269325 - RNA, 19 nt, Artificial Sequence
  Description of Artificial Sequence: Synthetic oligonucleotide
  Antisense strand to SEQ ID NO: 2269324
ucaaauccaagucaacuua

SEQ ID NO: 2269326 - RNA, 19 nt, Artificial Sequence
  Description of Artificial Sequence: Synthetic oligonucleotide
  Sense strand starting at position 2858 of SEQ ID NO: 1884484
uccugaugacaggguagau

SEQ ID NO: 2269327 - RNA, 19 nt, Artificial Sequence
  Description of Artificial Sequence: Synthetic oligonucleotide
  Antisense strand to SEQ ID NO: 2269326
aucuacccugucaucagga

SEQ ID NO: 2269328 - RNA, 19 nt, Artificial Sequence
  Description of Artificial Sequence: Synthetic oligonucleotide
  Sense strand starting at position 2880 of SEQ ID NO: 1884484
aguuccuugcuugagcaaa

SEQ ID NO: 2269329 - RNA, 19 nt, Artificial Sequence
  Description of Artificial Sequence: Synthetic oligonucleotide
  Antisense strand to SEQ ID NO: 2269328
uuugcucaagcaaggaacu

SEQ ID NO: 2269330 - RNA, 19 nt, Artificial Sequence
  Description of Artificial Sequence: Synthetic oligonucleotide
  Sense strand starting at position 2950 of SEQ ID NO: 1884484
ggacaugacuaggaaacua

SEQ ID NO: 2269331 - RNA, 19 nt, Artificial Sequence
  Description of Artificial Sequence: Synthetic oligonucleotide
  Antisense strand to SEQ ID NO: 2269330
uaguuuccuagucaugucc

SEQ ID NO: 2269332 - RNA, 19 nt, Artificial Sequence
  Description of Artificial Sequence: Synthetic oligonucleotide
  Sense strand starting at position 3118 of SEQ ID NO: 1884484
gaaagcuacuuuguugaac

SEQ ID NO: 2269333 - RNA, 19 nt, Artificial Sequence
  Description of Artificial Sequence: Synthetic oligonucleotide
  Antisense strand to SEQ ID NO: 2269332
guucaacaaaguagcuuuc

SEQ ID NO: 2269334 - RNA, 19 nt, Artificial Sequence
  Description of Artificial Sequence: Synthetic oligonucleotide
  Sense strand starting at position 3132 of SEQ ID NO: 1884484
ugaacacacuguguagaau

SEQ ID NO: 2269335 - RNA, 19 nt, Artificial Sequence
  Description of Artificial Sequence: Synthetic oligonucleotide
  Antisense strand to SEQ ID NO: 2269334
auucuacacaguguguuca

SEQ ID NO: 2269336 - RNA, 19 nt, Artificial Sequence
  Description of Artificial Sequence: Synthetic oligonucleotide
  Sense strand starting at position 3526 of SEQ ID NO: 1884484
caaagcaguuuggcagaaa

SEQ ID NO: 2269337 - RNA, 19 nt, Artificial Sequence
  Description of Artificial Sequence: Synthetic oligonucleotide
  Antisense strand to SEQ ID NO: 2269336
uuucugccaaacugcuuug

SEQ ID NO: 2269338 - RNA, 19 nt, Artificial Sequence
  Description of Artificial Sequence: Synthetic oligonucleotide
  Sense strand starting at position 3529 of SEQ ID NO: 1884484
agcaguuuggcagaaagcu

SEQ ID NO: 2269339 - RNA, 19 nt, Artificial Sequence
  Description of Artificial Sequence: Synthetic oligonucleotide
  Antisense strand to SEQ ID NO: 2269338
agcuuucugccaaacugcu

SEQ ID NO: 2269340 - RNA, 19 nt, Artificial Sequence
  Description of Artificial Sequence: Synthetic oligonucleotide
  Sense strand starting at position 3861 of SEQ ID NO: 1884484
cacauaucacacgguaguu

SEQ ID NO: 2269341 - RNA, 19 nt, Artificial Sequence
  Description of Artificial Sequence: Synthetic oligonucleotide
  Antisense strand to SEQ ID NO: 2269340
aacuaccgugugauaugug

SEQ ID NO: 2269342 - RNA, 19 nt, Artificial Sequence
  Description of Artificial Sequence: Synthetic oligonucleotide
  Sense strand starting at position 40 of SEQ ID NO: 1884485
gcauaaagaugagcaagau

SEQ ID NO: 2269343 - RNA, 19 nt, Artificial Sequence
  Description of Artificial Sequence: Synthetic oligonucleotide
  Antisense strand to SEQ ID NO: 2269342
aucuugcucaucuuuaugc

SEQ ID NO: 2269344 - RNA, 19 nt, Artificial Sequence
  Description of Artificial Sequence: Synthetic oligonucleotide
  Sense strand starting at position 134 of SEQ ID NO: 1884485
ugguaugugcuauaaggga

SEQ ID NO: 2269345 - RNA, 19 nt, Artificial Sequence
  Description of Artificial Sequence: Synthetic oligonucleotide
  Antisense strand to SEQ ID NO: 2269344
ucccuuauagcacauacca

SEQ ID NO: 2269346 - RNA, 19 nt, Artificial Sequence
  Description of Artificial Sequence: Synthetic oligonucleotide
  Sense strand starting at position 504 of SEQ ID NO: 1884485
uggauaagcuucuuggaga

SEQ ID NO: 2269347 - RNA, 19 nt, Artificial Sequence
  Description of Artificial Sequence: Synthetic oligonucleotide
  Antisense strand to SEQ ID NO: 2269346
ucuccaagaagcuuaucca

SEQ ID NO: 2269348 - RNA, 19 nt, Artificial Sequence
  Description of Artificial Sequence: Synthetic oligonucleotide
  Sense strand starting at position 512 of SEQ ID NO: 1884485
cuucuuggagaaugacuuu

SEQ ID NO: 2269349 - RNA, 19 nt, Artificial Sequence
  Description of Artificial Sequence: Synthetic oligonucleotide
  Antisense strand to SEQ ID NO: 2269348
aaagucauucuccaagaag

SEQ ID NO: 2269350 - RNA, 19 nt, Artificial Sequence
  Description of Artificial Sequence: Synthetic oligonucleotide
  Sense strand starting at position 538 of SEQ ID NO: 1884485
ggucuugaagggugaguau

SEQ ID NO: 2269351 - RNA, 19 nt, Artificial Sequence
  Description of Artificial Sequence: Synthetic oligonucleotide
  Antisense strand to SEQ ID NO: 2269350
auacucacccuucaagacc

SEQ ID NO: 2269352 - RNA, 19 nt, Artificial Sequence
  Description of Artificial Sequence: Synthetic oligonucleotide
  Sense strand starting at position 681 of SEQ ID NO: 1884485
aguuuagaagccuagccau

SEQ ID NO: 2269353 - RNA, 19 nt, Artificial Sequence
  Description of Artificial Sequence: Synthetic oligonucleotide
  Antisense strand to SEQ ID NO: 2269352
auggcuaggcuucuaaacu

SEQ ID NO: 2269354 - RNA, 19 nt, Artificial Sequence
  Description of Artificial Sequence: Synthetic oligonucleotide
  Sense strand starting at position 719 of SEQ ID NO: 1884485
cucacuguauuccugggaa

SEQ ID NO: 2269355 - RNA, 19 nt, Artificial Sequence
  Description of Artificial Sequence: Synthetic oligonucleotide
  Antisense strand to SEQ ID NO: 2269354
uucccaggaauacagugag

SEQ ID NO: 2269356 - RNA, 19 nt, Artificial Sequence
  Description of Artificial Sequence: Synthetic oligonucleotide
  Sense strand starting at position 721 of SEQ ID NO: 1884485
cacuguauuccugggaaag

SEQ ID NO: 2269357 - RNA, 19 nt, Artificial Sequence
  Description of Artificial Sequence: Synthetic oligonucleotide
  Antisense strand to SEQ ID NO: 2269356
cuuucccaggaauacagug

SEQ ID NO: 2269358 - RNA, 19 nt, Artificial Sequence
  Description of Artificial Sequence: Synthetic oligonucleotide
  Sense strand starting at position 722 of SEQ ID NO: 1884485
acuguauuccugggaaagg

SEQ ID NO: 2269359 - RNA, 19 nt, Artificial Sequence
  Description of Artificial Sequence: Synthetic oligonucleotide
  Antisense strand to SEQ ID NO: 2269358
ccuuucccaggaauacagu

SEQ ID NO: 2269360 - RNA, 19 nt, Artificial Sequence
  Description of Artificial Sequence: Synthetic oligonucleotide
  Sense strand starting at position 865 of SEQ ID NO: 1884485
ccaggacucuuucuaagca

SEQ ID NO: 2269361 - RNA, 19 nt, Artificial Sequence
  Description of Artificial Sequence: Synthetic oligonucleotide
  Antisense strand to SEQ ID NO: 2269360
ugcuuagaaagaguccugg

SEQ ID NO: 2269362 - RNA, 19 nt, Artificial Sequence
  Description of Artificial Sequence: Synthetic oligonucleotide
  Sense strand starting at position 978 of SEQ ID NO: 1884485
uuccuuucucugggaaaga

SEQ ID NO: 2269363 - RNA, 19 nt, Artificial Sequence
  Description of Artificial Sequence: Synthetic oligonucleotide
  Antisense strand to SEQ ID NO: 2269362
ucuuucccagagaaaggaa

SEQ ID NO: 2269364 - RNA, 19 nt, Artificial Sequence
  Description of Artificial Sequence: Synthetic oligonucleotide
  Sense strand starting at position 1033 of SEQ ID NO: 1884485
uuaagcauugcaggaauga

SEQ ID NO: 2269365 - RNA, 19 nt, Artificial Sequence
  Description of Artificial Sequence: Synthetic oligonucleotide
  Antisense strand to SEQ ID NO: 2269364
ucauuccugcaaugcuuaa

SEQ ID NO: 2269366 - RNA, 19 nt, Artificial Sequence
  Description of Artificial Sequence: Synthetic oligonucleotide
  Sense strand starting at position 1061 of SEQ ID NO: 1884485
ugccuuaaucuggagcauu

SEQ ID NO: 2269367 - RNA, 19 nt, Artificial Sequence
  Description of Artificial Sequence: Synthetic oligonucleotide
  Antisense strand to SEQ ID NO: 2269366
aaugcuccagauuaaggca

SEQ ID NO: 2269368 - RNA, 19 nt, Artificial Sequence
  Description of Artificial Sequence: Synthetic oligonucleotide
  Sense strand starting at position 1167 of SEQ ID NO: 1884485
agagcugcuccauggaaca

SEQ ID NO: 2269369 - RNA, 19 nt, Artificial Sequence
  Description of Artificial Sequence: Synthetic oligonucleotide
  Antisense strand to SEQ ID NO: 2269368
uguuccauggagcagcucu

SEQ ID NO: 2269370 - RNA, 19 nt, Artificial Sequence
  Description of Artificial Sequence: Synthetic oligonucleotide
  Sense strand starting at position 1315 of SEQ ID NO: 1884485
agacuaugucccuaugucu

SEQ ID NO: 2269371 - RNA, 19 nt, Artificial Sequence
  Description of Artificial Sequence: Synthetic oligonucleotide
  Antisense strand to SEQ ID NO: 2269370
agacauagggacauagucu

SEQ ID NO: 2269372 - RNA, 19 nt, Artificial Sequence
  Description of Artificial Sequence: Synthetic oligonucleotide
  Sense strand starting at position 1600 of SEQ ID NO: 1884485
augcauccucagggugaga

SEQ ID NO: 2269373 - RNA, 19 nt, Artificial Sequence
  Description of Artificial Sequence: Synthetic oligonucleotide
  Antisense strand to SEQ ID NO: 2269372
ucucacccugaggaugcau

SEQ ID NO: 2269374 - RNA, 19 nt, Artificial Sequence
  Description of Artificial Sequence: Synthetic oligonucleotide
  Sense strand starting at position 1644 of SEQ ID NO: 1884485
caaacuuccgggcaacaga

SEQ ID NO: 2269375 - RNA, 19 nt, Artificial Sequence
  Description of Artificial Sequence: Synthetic oligonucleotide
  Antisense strand to SEQ ID NO: 2269374
ucuguugcccggaaguuug

SEQ ID NO: 2269376 - RNA, 19 nt, Artificial Sequence
  Description of Artificial Sequence: Synthetic oligonucleotide
  Sense strand starting at position 1657 of SEQ ID NO: 1884485
aacagaaaugguugauugu

SEQ ID NO: 2269377 - RNA, 19 nt, Artificial Sequence
  Description of Artificial Sequence: Synthetic oligonucleotide
  Antisense strand to SEQ ID NO: 2269376
acaaucaaccauuucuguu

SEQ ID NO: 2269378 - RNA, 19 nt, Artificial Sequence
  Description of Artificial Sequence: Synthetic oligonucleotide
  Sense strand starting at position 1660 of SEQ ID NO: 1884485
agaaaugguugauuguguu

SEQ ID NO: 2269379 - RNA, 19 nt, Artificial Sequence
  Description of Artificial Sequence: Synthetic oligonucleotide
  Antisense strand to SEQ ID NO: 2269378
aacacaaucaaccauuucu

SEQ ID NO: 2269380 - RNA, 19 nt, Artificial Sequence
  Description of Artificial Sequence: Synthetic oligonucleotide
  Sense strand starting at position 1699 of SEQ ID NO: 1884485
cugaauugugcuuacacac

SEQ ID NO: 2269381 - RNA, 19 nt, Artificial Sequence
  Description of Artificial Sequence: Synthetic oligonucleotide
  Antisense strand to SEQ ID NO: 2269380
guguguaagcacaauucag

SEQ ID NO: 2269382 - RNA, 19 nt, Artificial Sequence
  Description of Artificial Sequence: Synthetic oligonucleotide
  Sense strand starting at position 1879 of SEQ ID NO: 1884485
uugucuccuuucuugaaag

SEQ ID NO: 2269383 - RNA, 19 nt, Artificial Sequence
  Description of Artificial Sequence: Synthetic oligonucleotide
  Antisense strand to SEQ ID NO: 2269382
cuuucaagaaaggagacaa

SEQ ID NO: 2269384 - RNA, 19 nt, Artificial Sequence
  Description of Artificial Sequence: Synthetic oligonucleotide
  Sense strand starting at position 2084 of SEQ ID NO: 1884485
agcugagggcuacacaauu

SEQ ID NO: 2269385 - RNA, 19 nt, Artificial Sequence
  Description of Artificial Sequence: Synthetic oligonucleotide
  Antisense strand to SEQ ID NO: 2269384
aauuguguagcccucagcu

SEQ ID NO: 2269386 - RNA, 19 nt, Artificial Sequence
  Description of Artificial Sequence: Synthetic oligonucleotide
  Sense strand starting at position 2101 of SEQ ID NO: 1884485
uugauaccuccugaccgaa

SEQ ID NO: 2269387 - RNA, 19 nt, Artificial Sequence
  Description of Artificial Sequence: Synthetic oligonucleotide
  Antisense strand to SEQ ID NO: 2269386
uucggucaggagguaucaa

SEQ ID NO: 2269388 - RNA, 19 nt, Artificial Sequence
  Description of Artificial Sequence: Synthetic oligonucleotide
  Sense strand starting at position 2147 of SEQ ID NO: 1884485
ccaccucuucugggauauc

SEQ ID NO: 2269389 - RNA, 19 nt, Artificial Sequence
  Description of Artificial Sequence: Synthetic oligonucleotide
  Antisense strand to SEQ ID NO: 2269388
gauaucccagaagaggugg

SEQ ID NO: 2269390 - RNA, 19 nt, Artificial Sequence
  Description of Artificial Sequence: Synthetic oligonucleotide
  Sense strand starting at position 2157 of SEQ ID NO: 1884485
ugggauaucuaauuggcau

SEQ ID NO: 2269391 - RNA, 19 nt, Artificial Sequence
  Description of Artificial Sequence: Synthetic oligonucleotide
  Antisense strand to SEQ ID NO: 2269390
augccaauuagauauccca

SEQ ID NO: 2269392 - RNA, 19 nt, Artificial Sequence
  Description of Artificial Sequence: Synthetic oligonucleotide
  Sense strand starting at position 2158 of SEQ ID NO: 1884485
gggauaucuaauuggcauc

SEQ ID NO: 2269393 - RNA, 19 nt, Artificial Sequence
  Description of Artificial Sequence: Synthetic oligonucleotide
  Antisense strand to SEQ ID NO: 2269392
gaugccaauuagauauccc

SEQ ID NO: 2269394 - RNA, 19 nt, Artificial Sequence
  Description of Artificial Sequence: Synthetic oligonucleotide
  Sense strand starting at position 2196 of SEQ ID NO: 1884485
agcauaacucuugaguucu

SEQ ID NO: 2269395 - RNA, 19 nt, Artificial Sequence
  Description of Artificial Sequence: Synthetic oligonucleotide
  Antisense strand to SEQ ID NO: 2269394
agaacucaagaguuaugcu

SEQ ID NO: 2269396 - RNA, 19 nt, Artificial Sequence
  Description of Artificial Sequence: Synthetic oligonucleotide
  Sense strand starting at position 2337 of SEQ ID NO: 1884485
ccugucagcuguccauuua

SEQ ID NO: 2269397 - RNA, 19 nt, Artificial Sequence
  Description of Artificial Sequence: Synthetic oligonucleotide
  Antisense strand to SEQ ID NO: 2269396
uaaauggacagcugacagg

SEQ ID NO: 2269398 - RNA, 19 nt, Artificial Sequence
  Description of Artificial Sequence: Synthetic oligonucleotide
  Sense strand starting at position 2478 of SEQ ID NO: 1884485
gguguaaaggcuuaaguca

SEQ ID NO: 2269399 - RNA, 19 nt, Artificial Sequence
  Description of Artificial Sequence: Synthetic oligonucleotide
  Antisense strand to SEQ ID NO: 2269398
ugacuuaagccuuuacacc

SEQ ID NO: 2269400 - RNA, 19 nt, Artificial Sequence
  Description of Artificial Sequence: Synthetic oligonucleotide
  Sense strand starting at position 2560 of SEQ ID NO: 1884485
agucuuuaucacgacccaa

SEQ ID NO: 2269401 - RNA, 19 nt, Artificial Sequence
  Description of Artificial Sequence: Synthetic oligonucleotide
  Antisense strand to SEQ ID NO: 2269400
uugggucgugauaaagacu

SEQ ID NO: 2269402 - RNA, 19 nt, Artificial Sequence
  Description of Artificial Sequence: Synthetic oligonucleotide
  Sense strand starting at position 2678 of SEQ ID NO: 1884485
agucuuuccaucggaaaug

SEQ ID NO: 2269403 - RNA, 19 nt, Artificial Sequence
  Description of Artificial Sequence: Synthetic oligonucleotide
  Antisense strand to SEQ ID NO: 2269402
cauuuccgauggaaagacu

SEQ ID NO: 2269404 - RNA, 19 nt, Artificial Sequence
  Description of Artificial Sequence: Synthetic oligonucleotide
  Sense strand starting at position 2689 of SEQ ID NO: 1884485
cggaaaugaucuuuccuca

SEQ ID NO: 2269405 - RNA, 19 nt, Artificial Sequence
  Description of Artificial Sequence: Synthetic oligonucleotide
  Antisense strand to SEQ ID NO: 2269404
ugaggaaagaucauuuccg

SEQ ID NO: 2269406 - RNA, 19 nt, Artificial Sequence
  Description of Artificial Sequence: Synthetic oligonucleotide
  Sense strand starting at position 2702 of SEQ ID NO: 1884485
uccucaggacuucgaaaga

SEQ ID NO: 2269407 - RNA, 19 nt, Artificial Sequence
  Description of Artificial Sequence: Synthetic oligonucleotide
  Antisense strand to SEQ ID NO: 2269406
ucuuucgaaguccugagga

SEQ ID NO: 2269408 - RNA, 19 nt, Artificial Sequence
  Description of Artificial Sequence: Synthetic oligonucleotide
  Sense strand starting at position 2828 of SEQ ID NO: 1884485
ucuuguucuccacaguaau

SEQ ID NO: 2269409 - RNA, 19 nt, Artificial Sequence
  Description of Artificial Sequence: Synthetic oligonucleotide
  Antisense strand to SEQ ID NO: 2269408
auuacuguggagaacaaga

SEQ ID NO: 2269410 - RNA, 19 nt, Artificial Sequence
  Description of Artificial Sequence: Synthetic oligonucleotide
  Sense strand starting at position 2831 of SEQ ID NO: 1884485
uguucuccacaguaauuau

SEQ ID NO: 2269411 - RNA, 19 nt, Artificial Sequence
  Description of Artificial Sequence: Synthetic oligonucleotide
  Antisense strand to SEQ ID NO: 2269410
auaauuacuguggagaaca

SEQ ID NO: 2269412 - RNA, 19 nt, Artificial Sequence
  Description of Artificial Sequence: Synthetic oligonucleotide
  Sense strand starting at position 2989 of SEQ ID NO: 1884485
auagacugugcuuaguaaa

SEQ ID NO: 2269413 - RNA, 19 nt, Artificial Sequence
  Description of Artificial Sequence: Synthetic oligonucleotide
  Antisense strand to SEQ ID NO: 2269412
uuuacuaagcacagucuau

SEQ ID NO: 2269414 - RNA, 19 nt, Artificial Sequence
  Description of Artificial Sequence: Synthetic oligonucleotide
  Sense strand starting at position 3015 of SEQ ID NO: 1884485
ugaauuaaugaauguguuc

SEQ ID NO: 2269415 - RNA, 19 nt, Artificial Sequence
  Description of Artificial Sequence: Synthetic oligonucleotide
  Antisense strand to SEQ ID NO: 2269414
gaacacauucauuaauuca

SEQ ID NO: 2269416 - RNA, 19 nt, Artificial Sequence
  Description of Artificial Sequence: Synthetic oligonucleotide
  Sense strand starting at position 3035 of SEQ ID NO: 1884485
uuugucaagucuuugaaca

SEQ ID NO: 2269417 - RNA, 19 nt, Artificial Sequence
  Description of Artificial Sequence: Synthetic oligonucleotide
  Antisense strand to SEQ ID NO: 2269416
uguucaaagacuugacaaa

SEQ ID NO: 2269418 - RNA, 19 nt, Artificial Sequence
  Description of Artificial Sequence: Synthetic oligonucleotide
  Sense strand starting at position 3521 of SEQ ID NO: 1884485
ccaggcuuugcucagagau

SEQ ID NO: 2269419 - RNA, 19 nt, Artificial Sequence
  Description of Artificial Sequence: Synthetic oligonucleotide
  Antisense strand to SEQ ID NO: 2269418
aucucugagcaaagccugg

SEQ ID NO: 2269420 - RNA, 19 nt, Artificial Sequence
  Description of Artificial Sequence: Synthetic oligonucleotide
  Sense strand starting at position 3834 of SEQ ID NO: 1884485
uccagcucccaaggaauau

SEQ ID NO: 2269421 - RNA, 19 nt, Artificial Sequence
  Description of Artificial Sequence: Synthetic oligonucleotide
  Antisense strand to SEQ ID NO: 2269420
auauuccuugggagcugga

SEQ ID NO: 2269422 - RNA, 19 nt, Artificial Sequence
  Description of Artificial Sequence: Synthetic oligonucleotide
  Sense strand starting at position 793 of SEQ ID NO: 1884486
gcaguauugcaguaaacau

SEQ ID NO: 2269423 - RNA, 19 nt, Artificial Sequence
  Description of Artificial Sequence: Synthetic oligonucleotide
  Antisense strand to SEQ ID NO: 2269422
auguuuacugcaauacugc

SEQ ID NO: 2269424 - RNA, 19 nt, Artificial Sequence
  Description of Artificial Sequence: Synthetic oligonucleotide
  Sense strand starting at position 837 of SEQ ID NO: 1884486
ugcacagaucuguacgaua

SEQ ID NO: 2269425 - RNA, 19 nt, Artificial Sequence
  Description of Artificial Sequence: Synthetic oligonucleotide
  Antisense strand to SEQ ID NO: 2269424
uaucguacagaucugugca

SEQ ID NO: 2269426 - RNA, 19 nt, Artificial Sequence
  Description of Artificial Sequence: Synthetic oligonucleotide
  Sense strand starting at position 839 of SEQ ID NO: 1884486
cacagaucuguacgauaaa

SEQ ID NO: 2269427 - RNA, 19 nt, Artificial Sequence
  Description of Artificial Sequence: Synthetic oligonucleotide
  Antisense strand to SEQ ID NO: 2269426
uuuaucguacagaucugug

SEQ ID NO: 2269428 - RNA, 19 nt, Artificial Sequence
  Description of Artificial Sequence: Synthetic oligonucleotide
  Sense strand starting at position 842 of SEQ ID NO: 1884486
agaucuguacgauaaauuc

SEQ ID NO: 2269429 - RNA, 19 nt, Artificial Sequence
  Description of Artificial Sequence: Synthetic oligonucleotide
  Antisense strand to SEQ ID NO: 2269428
gaauuuaucguacagaucu

SEQ ID NO: 2269430 - RNA, 19 nt, Artificial Sequence
  Description of Artificial Sequence: Synthetic oligonucleotide
  Sense strand starting at position 850 of SEQ ID NO: 1884486
acgauaaauuccucauagu

SEQ ID NO: 2269431 - RNA, 19 nt, Artificial Sequence
  Description of Artificial Sequence: Synthetic oligonucleotide
  Antisense strand to SEQ ID NO: 2269430
acuaugaggaauuuaucgu

SEQ ID NO: 2269432 - RNA, 19 nt, Artificial Sequence
  Description of Artificial Sequence: Synthetic oligonucleotide
  Sense strand starting at position 851 of SEQ ID NO: 1884486
cgauaaauuccucauagug

SEQ ID NO: 2269433 - RNA, 19 nt, Artificial Sequence
  Description of Artificial Sequence: Synthetic oligonucleotide
  Antisense strand to SEQ ID NO: 2269432
cacuaugaggaauuuaucg

SEQ ID NO: 2269434 - RNA, 19 nt, Artificial Sequence
  Description of Artificial Sequence: Synthetic oligonucleotide
  Sense strand starting at position 866 of SEQ ID NO: 1884486
aguggauuacugggccaga

SEQ ID NO: 2269435 - RNA, 19 nt, Artificial Sequence
  Description of Artificial Sequence: Synthetic oligonucleotide
  Antisense strand to SEQ ID NO: 2269434
ucuggcccaguaauccacu

SEQ ID NO: 2269436 - RNA, 19 nt, Artificial Sequence
  Description of Artificial Sequence: Synthetic oligonucleotide
  Sense strand starting at position 867 of SEQ ID NO: 1884486
guggauuacugggccagaa

SEQ ID NO: 2269437 - RNA, 19 nt, Artificial Sequence
  Description of Artificial Sequence: Synthetic oligonucleotide
  Antisense strand to SEQ ID NO: 2269436
uucuggcccaguaauccac

SEQ ID NO: 2269438 - RNA, 19 nt, Artificial Sequence
  Description of Artificial Sequence: Synthetic oligonucleotide
  Sense strand starting at position 911 of SEQ ID NO: 1884486
gucaaauuguccuccuaaa

SEQ ID NO: 2269439 - RNA, 19 nt, Artificial Sequence
  Description of Artificial Sequence: Synthetic oligonucleotide
  Antisense strand to SEQ ID NO: 2269438
uuuaggaggacaauuugac

SEQ ID NO: 2269440 - RNA, 19 nt, Artificial Sequence
  Description of Artificial Sequence: Synthetic oligonucleotide
  Sense strand starting at position 922 of SEQ ID NO: 1884486
cuccuaaagguuuguacca

SEQ ID NO: 2269441 - RNA, 19 nt, Artificial Sequence
  Description of Artificial Sequence: Synthetic oligonucleotide
  Antisense strand to SEQ ID NO: 2269440
ugguacaaaccuuuaggag

SEQ ID NO: 2269442 - RNA, 19 nt, Artificial Sequence
  Description of Artificial Sequence: Synthetic oligonucleotide
  Sense strand starting at position 923 of SEQ ID NO: 1884486
uccuaaagguuuguaccaa

SEQ ID NO: 2269443 - RNA, 19 nt, Artificial Sequence
  Description of Artificial Sequence: Synthetic oligonucleotide
  Antisense strand to SEQ ID NO: 2269442
uugguacaaaccuuuagga

SEQ ID NO: 2269444 - RNA, 19 nt, Artificial Sequence
  Description of Artificial Sequence: Synthetic oligonucleotide
  Sense strand starting at position 954 of SEQ ID NO: 1884486
caauauugacuuugagugu

SEQ ID NO: 2269445 - RNA, 19 nt, Artificial Sequence
  Description of Artificial Sequence: Synthetic oligonucleotide
  Antisense strand to SEQ ID NO: 2269444
acacucaaagucaauauug

SEQ ID NO: 2269446 - RNA, 19 nt, Artificial Sequence
  Description of Artificial Sequence: Synthetic oligonucleotide
  Sense strand starting at position 958 of SEQ ID NO: 1884486
auugacuuugaguguccau

SEQ ID NO: 2269447 - RNA, 19 nt, Artificial Sequence
  Description of Artificial Sequence: Synthetic oligonucleotide
  Antisense strand to SEQ ID NO: 2269446
auggacacucaaagucaau

SEQ ID NO: 2269448 - RNA, 19 nt, Artificial Sequence
  Description of Artificial Sequence: Synthetic oligonucleotide
  Sense strand starting at position 1423 of SEQ ID NO: 1884486
uuacaaauuccuuggaagu

SEQ ID NO: 2269449 - RNA, 19 nt, Artificial Sequence
  Description of Artificial Sequence: Synthetic oligonucleotide
  Antisense strand to SEQ ID NO: 2269448
acuuccaaggaauuuguaa

SEQ ID NO: 2269450 - RNA, 19 nt, Artificial Sequence
  Description of Artificial Sequence: Synthetic oligonucleotide
  Sense strand starting at position 1624 of SEQ ID NO: 1884486
gggaaacaucguuauccca

SEQ ID NO: 2269451 - RNA, 19 nt, Artificial Sequence
  Description of Artificial Sequence: Synthetic oligonucleotide
  Antisense strand to SEQ ID NO: 2269450
ugggauaacgauguuuccc

SEQ ID NO: 2269452 - RNA, 19 nt, Artificial Sequence
  Description of Artificial Sequence: Synthetic oligonucleotide
  Sense strand starting at position 1848 of SEQ ID NO: 1884486
gccugaacaucuguaauua

SEQ ID NO: 2269453 - RNA, 19 nt, Artificial Sequence
  Description of Artificial Sequence: Synthetic oligonucleotide
  Antisense strand to SEQ ID NO: 2269452
uaauuacagauguucaggc

SEQ ID NO: 2269454 - RNA, 19 nt, Artificial Sequence
  Description of Artificial Sequence: Synthetic oligonucleotide
  Sense strand starting at position 1986 of SEQ ID NO: 1884486
gcgucugguccagagggaa

SEQ ID NO: 2269455 - RNA, 19 nt, Artificial Sequence
  Description of Artificial Sequence: Synthetic oligonucleotide
  Antisense strand to SEQ ID NO: 2269454
uucccucuggaccagacgc

SEQ ID NO: 2269456 - RNA, 19 nt, Artificial Sequence
  Description of Artificial Sequence: Synthetic oligonucleotide
  Sense strand starting at position 2564 of SEQ ID NO: 1884486
guaauugucaagugaauga

SEQ ID NO: 2269457 - RNA, 19 nt, Artificial Sequence
  Description of Artificial Sequence: Synthetic oligonucleotide
  Antisense strand to SEQ ID NO: 2269456
ucauucacuugacaauuac

SEQ ID NO: 2269458 - RNA, 19 nt, Artificial Sequence
  Description of Artificial Sequence: Synthetic oligonucleotide
  Sense strand starting at position 2689 of SEQ ID NO: 1884486
ugcugcgaugugaacgauu

SEQ ID NO: 2269459 - RNA, 19 nt, Artificial Sequence
  Description of Artificial Sequence: Synthetic oligonucleotide
  Antisense strand to SEQ ID NO: 2269458
aaucguucacaucgcagca

SEQ ID NO: 2269460 - RNA, 19 nt, Artificial Sequence
  Description of Artificial Sequence: Synthetic oligonucleotide
  Sense strand starting at position 2856 of SEQ ID NO: 1884486
cucggugaacuagauucuu

SEQ ID NO: 2269461 - RNA, 19 nt, Artificial Sequence
  Description of Artificial Sequence: Synthetic oligonucleotide
  Antisense strand to SEQ ID NO: 2269460
aagaaucuaguucaccgag

SEQ ID NO: 2269462 - RNA, 19 nt, Artificial Sequence
  Description of Artificial Sequence: Synthetic oligonucleotide
  Sense strand starting at position 2907 of SEQ ID NO: 1884486
gguaauuguugagcaggau

SEQ ID NO: 2269463 - RNA, 19 nt, Artificial Sequence
  Description of Artificial Sequence: Synthetic oligonucleotide
  Antisense strand to SEQ ID NO: 2269462
auccugcucaacaauuacc

SEQ ID NO: 2269464 - RNA, 19 nt, Artificial Sequence
  Description of Artificial Sequence: Synthetic oligonucleotide
  Sense strand starting at position 2908 of SEQ ID NO: 1884486
guaauuguugagcaggauu

SEQ ID NO: 2269465 - RNA, 19 nt, Artificial Sequence
  Description of Artificial Sequence: Synthetic oligonucleotide
  Antisense strand to SEQ ID NO: 2269464
aauccugcucaacaauuac

SEQ ID NO: 2269466 - RNA, 19 nt, Artificial Sequence
  Description of Artificial Sequence: Synthetic oligonucleotide
  Sense strand starting at position 2910 of SEQ ID NO: 1884486
aauuguugagcaggauuga

SEQ ID NO: 2269467 - RNA, 19 nt, Artificial Sequence
  Description of Artificial Sequence: Synthetic oligonucleotide
  Antisense strand to SEQ ID NO: 2269466
ucaauccugcucaacaauu

SEQ ID NO: 2269468 - RNA, 19 nt, Artificial Sequence
  Description of Artificial Sequence: Synthetic oligonucleotide
  Sense strand starting at position 2919 of SEQ ID NO: 1884486
gcaggauugaaaugcauuc

SEQ ID NO: 2269469 - RNA, 19 nt, Artificial Sequence
  Description of Artificial Sequence: Synthetic oligonucleotide
  Antisense strand to SEQ ID NO: 2269468
gaaugcauuucaauccugc

SEQ ID NO: 2269470 - RNA, 19 nt, Artificial Sequence
  Description of Artificial Sequence: Synthetic oligonucleotide
  Sense strand starting at position 2928 of SEQ ID NO: 1884486
aaaugcauuccguuguguu

SEQ ID NO: 2269471 - RNA, 19 nt, Artificial Sequence
  Description of Artificial Sequence: Synthetic oligonucleotide
  Antisense strand to SEQ ID NO: 2269470
aacacaacggaaugcauuu

SEQ ID NO: 2269472 - RNA, 19 nt, Artificial Sequence
  Description of Artificial Sequence: Synthetic oligonucleotide
  Sense strand starting at position 3005 of SEQ ID NO: 1884486
uauauucguguugaugaau

SEQ ID NO: 2269473 - RNA, 19 nt, Artificial Sequence
  Description of Artificial Sequence: Synthetic oligonucleotide
  Antisense strand to SEQ ID NO: 2269472
auucaucaacacgaauaua

SEQ ID NO: 2269474 - RNA, 19 nt, Artificial Sequence
  Description of Artificial Sequence: Synthetic oligonucleotide
  Sense strand starting at position 3008 of SEQ ID NO: 1884486
auucguguugaugaaucuu

SEQ ID NO: 2269475 - RNA, 19 nt, Artificial Sequence
  Description of Artificial Sequence: Synthetic oligonucleotide
  Antisense strand to SEQ ID NO: 2269474
aagauucaucaacacgaau

SEQ ID NO: 2269476 - RNA, 19 nt, Artificial Sequence
  Description of Artificial Sequence: Synthetic oligonucleotide
  Sense strand starting at position 3046 of SEQ ID NO: 1884486
agcaucaauagagguugaa

SEQ ID NO: 2269477 - RNA, 19 nt, Artificial Sequence
  Description of Artificial Sequence: Synthetic oligonucleotide
  Antisense strand to SEQ ID NO: 2269476
uucaaccucuauugaugcu

SEQ ID NO: 2269478 - RNA, 19 nt, Artificial Sequence
  Description of Artificial Sequence: Synthetic oligonucleotide
  Sense strand starting at position 3087 of SEQ ID NO: 1884486
caaauuuaugcguggcucu

SEQ ID NO: 2269479 - RNA, 19 nt, Artificial Sequence
  Description of Artificial Sequence: Synthetic oligonucleotide
  Antisense strand to SEQ ID NO: 2269478
agagccacgcauaaauuug

SEQ ID NO: 2269480 - RNA, 19 nt, Artificial Sequence
  Description of Artificial Sequence: Synthetic oligonucleotide
  Sense strand starting at position 3088 of SEQ ID NO: 1884486
aaauuuaugcguggcucua

SEQ ID NO: 2269481 - RNA, 19 nt, Artificial Sequence
  Description of Artificial Sequence: Synthetic oligonucleotide
  Antisense strand to SEQ ID NO: 2269480
uagagccacgcauaaauuu

SEQ ID NO: 2269482 - RNA, 19 nt, Artificial Sequence
  Description of Artificial Sequence: Synthetic oligonucleotide
  Sense strand starting at position 3090 of SEQ ID NO: 1884486
auuuaugcguggcucuaau

SEQ ID NO: 2269483 - RNA, 19 nt, Artificial Sequence
  Description of Artificial Sequence: Synthetic oligonucleotide
  Antisense strand to SEQ ID NO: 2269482
auuagagccacgcauaaau

SEQ ID NO: 2269484 - RNA, 19 nt, Artificial Sequence
  Description of Artificial Sequence: Synthetic oligonucleotide
  Sense strand starting at position 3108 of SEQ ID NO: 1884486
uuuaauucucaugggacca

SEQ ID NO: 2269485 - RNA, 19 nt, Artificial Sequence
  Description of Artificial Sequence: Synthetic oligonucleotide
  Antisense strand to SEQ ID NO: 2269484
uggucccaugagaauuaaa

SEQ ID NO: 2269486 - RNA, 19 nt, Artificial Sequence
  Description of Artificial Sequence: Synthetic oligonucleotide
  Sense strand starting at position 3131 of SEQ ID NO: 1884486
aucaaaucuuggcccagaa

SEQ ID NO: 2269487 - RNA, 19 nt, Artificial Sequence
  Description of Artificial Sequence: Synthetic oligonucleotide
  Antisense strand to SEQ ID NO: 2269486
uucugggccaagauuugau

SEQ ID NO: 2269488 - RNA, 19 nt, Artificial Sequence
  Description of Artificial Sequence: Synthetic oligonucleotide
  Sense strand starting at position 3304 of SEQ ID NO: 1884486
uguagaagacuuugacuuc

SEQ ID NO: 2269489 - RNA, 19 nt, Artificial Sequence
  Description of Artificial Sequence: Synthetic oligonucleotide
  Antisense strand to SEQ ID NO: 2269488
gaagucaaagucuucuaca

SEQ ID NO: 2269490 - RNA, 19 nt, Artificial Sequence
  Description of Artificial Sequence: Synthetic oligonucleotide
  Sense strand starting at position 3307 of SEQ ID NO: 1884486
agaagacuuugacuucucu

SEQ ID NO: 2269491 - RNA, 19 nt, Artificial Sequence
  Description of Artificial Sequence: Synthetic oligonucleotide
  Antisense strand to SEQ ID NO: 2269490
agagaagucaaagucuucu

SEQ ID NO: 2269492 - RNA, 19 nt, Artificial Sequence
  Description of Artificial Sequence: Synthetic oligonucleotide
  Sense strand starting at position 3313 of SEQ ID NO: 1884486
cuuugacuucucugaagug

SEQ ID NO: 2269493 - RNA, 19 nt, Artificial Sequence
  Description of Artificial Sequence: Synthetic oligonucleotide
  Antisense strand to SEQ ID NO: 2269492
cacuucagagaagucaaag

SEQ ID NO: 2269494 - RNA, 19 nt, Artificial Sequence
  Description of Artificial Sequence: Synthetic oligonucleotide
  Sense strand starting at position 3322 of SEQ ID NO: 1884486
cucugaagugacuggacaa

SEQ ID NO: 2269495 - RNA, 19 nt, Artificial Sequence
  Description of Artificial Sequence: Synthetic oligonucleotide
  Antisense strand to SEQ ID NO: 2269494
uuguccagucacuucagag

SEQ ID NO: 2269496 - RNA, 19 nt, Artificial Sequence
  Description of Artificial Sequence: Synthetic oligonucleotide
  Sense strand starting at position 3407 of SEQ ID NO: 1884486
aguuaaaucuaguugguaa

SEQ ID NO: 2269497 - RNA, 19 nt, Artificial Sequence
  Description of Artificial Sequence: Synthetic oligonucleotide
  Antisense strand to SEQ ID NO: 2269496
uuaccaacuagauuuaacu

SEQ ID NO: 2269498 - RNA, 19 nt, Artificial Sequence
  Description of Artificial Sequence: Synthetic oligonucleotide
  Sense strand starting at position 3409 of SEQ ID NO: 1884486
uuaaaucuaguugguaaac

SEQ ID NO: 2269499 - RNA, 19 nt, Artificial Sequence
  Description of Artificial Sequence: Synthetic oligonucleotide
  Antisense strand to SEQ ID NO: 2269498
guuuaccaacuagauuuaa

SEQ ID NO: 2269500 - RNA, 19 nt, Artificial Sequence
  Description of Artificial Sequence: Synthetic oligonucleotide
  Sense strand starting at position 3806 of SEQ ID NO: 1884486
aaagguauuccguaacaau

SEQ ID NO: 2269501 - RNA, 19 nt, Artificial Sequence
  Description of Artificial Sequence: Synthetic oligonucleotide
  Antisense strand to SEQ ID NO: 2269500
auuguuacggaauaccuuu

SEQ ID NO: 2269502 - RNA, 19 nt, Artificial Sequence
  Description of Artificial Sequence: Synthetic oligonucleotide
  Sense strand starting at position 192 of SEQ ID NO: 1884487
gcacaugagaaguauuagu

SEQ ID NO: 2269503 - RNA, 19 nt, Artificial Sequence
  Description of Artificial Sequence: Synthetic oligonucleotide
  Antisense strand to SEQ ID NO: 2269502
acuaauacuucucaugugc

SEQ ID NO: 2269504 - RNA, 19 nt, Artificial Sequence
  Description of Artificial Sequence: Synthetic oligonucleotide
  Sense strand starting at position 197 of SEQ ID NO: 1884487
ugagaaguauuagugcuca

SEQ ID NO: 2269505 - RNA, 19 nt, Artificial Sequence
  Description of Artificial Sequence: Synthetic oligonucleotide
  Antisense strand to SEQ ID NO: 2269504
ugagcacuaauacuucuca

SEQ ID NO: 2269506 - RNA, 19 nt, Artificial Sequence
  Description of Artificial Sequence: Synthetic oligonucleotide
  Sense strand starting at position 202 of SEQ ID NO: 1884487
aguauuagugcucaacaca

SEQ ID NO: 2269507 - RNA, 19 nt, Artificial Sequence
  Description of Artificial Sequence: Synthetic oligonucleotide
  Antisense strand to SEQ ID NO: 2269506
uguguugagcacuaauacu

SEQ ID NO: 2269508 - RNA, 19 nt, Artificial Sequence
  Description of Artificial Sequence: Synthetic oligonucleotide
  Sense strand starting at position 283 of SEQ ID NO: 1884487
ggagcugugaacuggugau

SEQ ID NO: 2269509 - RNA, 19 nt, Artificial Sequence
  Description of Artificial Sequence: Synthetic oligonucleotide
  Antisense strand to SEQ ID NO: 2269508
aucaccaguucacagcucc

SEQ ID NO: 2269510 - RNA, 19 nt, Artificial Sequence
  Description of Artificial Sequence: Synthetic oligonucleotide
  Sense strand starting at position 295 of SEQ ID NO: 1884487
uggugauguuggaaagguu

SEQ ID NO: 2269511 - RNA, 19 nt, Artificial Sequence
  Description of Artificial Sequence: Synthetic oligonucleotide
  Antisense strand to SEQ ID NO: 2269510
aaccuuuccaacaucacca

SEQ ID NO: 2269512 - RNA, 19 nt, Artificial Sequence
  Description of Artificial Sequence: Synthetic oligonucleotide
  Sense strand starting at position 303 of SEQ ID NO: 1884487
uuggaaagguuucuggcaa

SEQ ID NO: 2269513 - RNA, 19 nt, Artificial Sequence
  Description of Artificial Sequence: Synthetic oligonucleotide
  Antisense strand to SEQ ID NO: 2269512
uugccagaaaccuuuccaa

SEQ ID NO: 2269514 - RNA, 19 nt, Artificial Sequence
  Description of Artificial Sequence: Synthetic oligonucleotide
  Sense strand starting at position 354 of SEQ ID NO: 1884487
gccucucuguaauccaaag

SEQ ID NO: 2269515 - RNA, 19 nt, Artificial Sequence
  Description of Artificial Sequence: Synthetic oligonucleotide
  Antisense strand to SEQ ID NO: 2269514
cuuuggauuacagagaggc

SEQ ID NO: 2269516 - RNA, 19 nt, Artificial Sequence
  Description of Artificial Sequence: Synthetic oligonucleotide
  Sense strand starting at position 471 of SEQ ID NO: 1884487
ugggcauauguaugcaaga

SEQ ID NO: 2269517 - RNA, 19 nt, Artificial Sequence
  Description of Artificial Sequence: Synthetic oligonucleotide
  Antisense strand to SEQ ID NO: 2269516
ucuugcauacauaugccca

SEQ ID NO: 2269518 - RNA, 19 nt, Artificial Sequence
  Description of Artificial Sequence: Synthetic oligonucleotide
  Sense strand starting at position 473 of SEQ ID NO: 1884487
ggcauauguaugcaagagu

SEQ ID NO: 2269519 - RNA, 19 nt, Artificial Sequence
  Description of Artificial Sequence: Synthetic oligonucleotide
  Antisense strand to SEQ ID NO: 2269518
acucuugcauacauaugcc

SEQ ID NO: 2269520 - RNA, 19 nt, Artificial Sequence
  Description of Artificial Sequence: Synthetic oligonucleotide
  Sense strand starting at position 476 of SEQ ID NO: 1884487
auauguaugcaagagugau

SEQ ID NO: 2269521 - RNA, 19 nt, Artificial Sequence
  Description of Artificial Sequence: Synthetic oligonucleotide
  Antisense strand to SEQ ID NO: 2269520
aucacucuugcauacauau

SEQ ID NO: 2269522 - RNA, 19 nt, Artificial Sequence
  Description of Artificial Sequence: Synthetic oligonucleotide
  Sense strand starting at position 482 of SEQ ID NO: 1884487
augcaagagugauugugga

SEQ ID NO: 2269523 - RNA, 19 nt, Artificial Sequence
  Description of Artificial Sequence: Synthetic oligonucleotide
  Antisense strand to SEQ ID NO: 2269522
uccacaaucacucuugcau

SEQ ID NO: 2269524 - RNA, 19 nt, Artificial Sequence
  Description of Artificial Sequence: Synthetic oligonucleotide
  Sense strand starting at position 624 of SEQ ID NO: 1884487
acauucuguugaucugcaa

SEQ ID NO: 2269525 - RNA, 19 nt, Artificial Sequence
  Description of Artificial Sequence: Synthetic oligonucleotide
  Antisense strand to SEQ ID NO: 2269524
uugcagaucaacagaaugu

SEQ ID NO: 2269526 - RNA, 19 nt, Artificial Sequence
  Description of Artificial Sequence: Synthetic oligonucleotide
  Sense strand starting at position 640 of SEQ ID NO: 1884487
caaugucagguuggauaau

SEQ ID NO: 2269527 - RNA, 19 nt, Artificial Sequence
  Description of Artificial Sequence: Synthetic oligonucleotide
  Antisense strand to SEQ ID NO: 2269526
auuauccaaccugacauug

SEQ ID NO: 2269528 - RNA, 19 nt, Artificial Sequence
  Description of Artificial Sequence: Synthetic oligonucleotide
  Sense strand starting at position 665 of SEQ ID NO: 1884487
uaaauugagucccuucgau

SEQ ID NO: 2269529 - RNA, 19 nt, Artificial Sequence
  Description of Artificial Sequence: Synthetic oligonucleotide
  Antisense strand to SEQ ID NO: 2269528
aucgaagggacucaauuua

SEQ ID NO: 2269530 - RNA, 19 nt, Artificial Sequence
  Description of Artificial Sequence: Synthetic oligonucleotide
  Sense strand starting at position 871 of SEQ ID NO: 1884487
agcaaacuggcuuaucaga

SEQ ID NO: 2269531 - RNA, 19 nt, Artificial Sequence
  Description of Artificial Sequence: Synthetic oligonucleotide
  Antisense strand to SEQ ID NO: 2269530
ucugauaagccaguuugcu

SEQ ID NO: 2269532 - RNA, 19 nt, Artificial Sequence
  Description of Artificial Sequence: Synthetic oligonucleotide
  Sense strand starting at position 878 of SEQ ID NO: 1884487
uggcuuaucagagagcaga

SEQ ID NO: 2269533 - RNA, 19 nt, Artificial Sequence
  Description of Artificial Sequence: Synthetic oligonucleotide
  Antisense strand to SEQ ID NO: 2269532
ucugcucucugauaagcca

SEQ ID NO: 2269534 - RNA, 19 nt, Artificial Sequence
  Description of Artificial Sequence: Synthetic oligonucleotide
  Sense strand starting at position 1050 of SEQ ID NO: 1884487
aagggucacucacuguauu

SEQ ID NO: 2269535 - RNA, 19 nt, Artificial Sequence
  Description of Artificial Sequence: Synthetic oligonucleotide
  Antisense strand to SEQ ID NO: 2269534
aauacagugagugacccuu

SEQ ID NO: 2269536 - RNA, 19 nt, Artificial Sequence
  Description of Artificial Sequence: Synthetic oligonucleotide
  Sense strand starting at position 1093 of SEQ ID NO: 1884487
gauggaaauccaggugguu

SEQ ID NO: 2269537 - RNA, 19 nt, Artificial Sequence
  Description of Artificial Sequence: Synthetic oligonucleotide
  Antisense strand to SEQ ID NO: 2269536
aaccaccuggauuuccauc

SEQ ID NO: 2269538 - RNA, 19 nt, Artificial Sequence
  Description of Artificial Sequence: Synthetic oligonucleotide
  Sense strand starting at position 1095 of SEQ ID NO: 1884487
uggaaauccaggugguuaa

SEQ ID NO: 2269539 - RNA, 19 nt, Artificial Sequence
  Description of Artificial Sequence: Synthetic oligonucleotide
  Antisense strand to SEQ ID NO: 2269538
uuaaccaccuggauuucca

SEQ ID NO: 2269540 - RNA, 19 nt, Artificial Sequence
  Description of Artificial Sequence: Synthetic oligonucleotide
  Sense strand starting at position 1098 of SEQ ID NO: 1884487
aaauccaggugguuaagaa

SEQ ID NO: 2269541 - RNA, 19 nt, Artificial Sequence
  Description of Artificial Sequence: Synthetic oligonucleotide
  Antisense strand to SEQ ID NO: 2269540
uucuuaaccaccuggauuu

SEQ ID NO: 2269542 - RNA, 19 nt, Artificial Sequence
  Description of Artificial Sequence: Synthetic oligonucleotide
  Sense strand starting at position 1126 of SEQ ID NO: 1884487
acgcaugaucuugauacca

SEQ ID NO: 2269543 - RNA, 19 nt, Artificial Sequence
  Description of Artificial Sequence: Synthetic oligonucleotide
  Antisense strand to SEQ ID NO: 2269542
ugguaucaagaucaugcgu

SEQ ID NO: 2269544 - RNA, 19 nt, Artificial Sequence
  Description of Artificial Sequence: Synthetic oligonucleotide
  Sense strand starting at position 1335 of SEQ ID NO: 1884487
ucuccucuugugggaaauu

SEQ ID NO: 2269545 - RNA, 19 nt, Artificial Sequence
  Description of Artificial Sequence: Synthetic oligonucleotide
  Antisense strand to SEQ ID NO: 2269544
aauuucccacaagaggaga

SEQ ID NO: 2269546 - RNA, 19 nt, Artificial Sequence
  Description of Artificial Sequence: Synthetic oligonucleotide
  Sense strand starting at position 1536 of SEQ ID NO: 1884487
gggaacagcugcuuuaaga

SEQ ID NO: 2269547 - RNA, 19 nt, Artificial Sequence
  Description of Artificial Sequence: Synthetic oligonucleotide
  Antisense strand to SEQ ID NO: 2269546
ucuuaaagcagcuguuccc

SEQ ID NO: 2269548 - RNA, 19 nt, Artificial Sequence
  Description of Artificial Sequence: Synthetic oligonucleotide
  Sense strand starting at position 1591 of SEQ ID NO: 1884487
gucuaacucugguuuauuu

SEQ ID NO: 2269549 - RNA, 19 nt, Artificial Sequence
  Description of Artificial Sequence: Synthetic oligonucleotide
  Antisense strand to SEQ ID NO: 2269548
aaauaaaccagaguuagac

SEQ ID NO: 2269550 - RNA, 19 nt, Artificial Sequence
  Description of Artificial Sequence: Synthetic oligonucleotide
  Sense strand starting at position 1898 of SEQ ID NO: 1884487
ucgccaaagaucugauuag

SEQ ID NO: 2269551 - RNA, 19 nt, Artificial Sequence
  Description of Artificial Sequence: Synthetic oligonucleotide
  Antisense strand to SEQ ID NO: 2269550
cuaaucagaucuuuggcga

SEQ ID NO: 2269552 - RNA, 19 nt, Artificial Sequence
  Description of Artificial Sequence: Synthetic oligonucleotide
  Sense strand starting at position 2122 of SEQ ID NO: 1884487
gucagcugucaagaagaaa

SEQ ID NO: 2269553 - RNA, 19 nt, Artificial Sequence
  Description of Artificial Sequence: Synthetic oligonucleotide
  Antisense strand to SEQ ID NO: 2269552
uuucuucuugacagcugac

SEQ ID NO: 2269554 - RNA, 19 nt, Artificial Sequence
  Description of Artificial Sequence: Synthetic oligonucleotide
  Sense strand starting at position 2439 of SEQ ID NO: 1884487
cagggugguaggcaaauua

SEQ ID NO: 2269555 - RNA, 19 nt, Artificial Sequence
  Description of Artificial Sequence: Synthetic oligonucleotide
  Antisense strand to SEQ ID NO: 2269554
uaauuugccuaccacccug

SEQ ID NO: 2269556 - RNA, 19 nt, Artificial Sequence
  Description of Artificial Sequence: Synthetic oligonucleotide
  Sense strand starting at position 2883 of SEQ ID NO: 1884487
aggcuuucucucgaccaau

SEQ ID NO: 2269557 - RNA, 19 nt, Artificial Sequence
  Description of Artificial Sequence: Synthetic oligonucleotide
  Antisense strand to SEQ ID NO: 2269556
auuggucgagagaaagccu

SEQ ID NO: 2269558 - RNA, 19 nt, Artificial Sequence
  Description of Artificial Sequence: Synthetic oligonucleotide
  Sense strand starting at position 3006 of SEQ ID NO: 1884487
ucugcuugugaucaguaaa

SEQ ID NO: 2269559 - RNA, 19 nt, Artificial Sequence
  Description of Artificial Sequence: Synthetic oligonucleotide
  Antisense strand to SEQ ID NO: 2269558
uuuacugaucacaagcaga

SEQ ID NO: 2269560 - RNA, 19 nt, Artificial Sequence
  Description of Artificial Sequence: Synthetic oligonucleotide
  Sense strand starting at position 3055 of SEQ ID NO: 1884487
uagcacugauuggucaauu

SEQ ID NO: 2269561 - RNA, 19 nt, Artificial Sequence
  Description of Artificial Sequence: Synthetic oligonucleotide
  Antisense strand to SEQ ID NO: 2269560
aauugaccaaucagugcua

SEQ ID NO: 2269562 - RNA, 19 nt, Artificial Sequence
  Description of Artificial Sequence: Synthetic oligonucleotide
  Sense strand starting at position 3066 of SEQ ID NO: 1884487
ggucaauugcauuaacacu

SEQ ID NO: 2269563 - RNA, 19 nt, Artificial Sequence
  Description of Artificial Sequence: Synthetic oligonucleotide
  Antisense strand to SEQ ID NO: 2269562
aguguuaaugcaauugacc

SEQ ID NO: 2269564 - RNA, 19 nt, Artificial Sequence
  Description of Artificial Sequence: Synthetic oligonucleotide
  Sense strand starting at position 3074 of SEQ ID NO: 1884487
gcauuaacacuugaaguca

SEQ ID NO: 2269565 - RNA, 19 nt, Artificial Sequence
  Description of Artificial Sequence: Synthetic oligonucleotide
  Antisense strand to SEQ ID NO: 2269564
ugacuucaaguguuaaugc

SEQ ID NO: 2269566 - RNA, 19 nt, Artificial Sequence
  Description of Artificial Sequence: Synthetic oligonucleotide
  Sense strand starting at position 3149 of SEQ ID NO: 1884487
gccagaacagcugagucua

SEQ ID NO: 2269567 - RNA, 19 nt, Artificial Sequence
  Description of Artificial Sequence: Synthetic oligonucleotide
  Antisense strand to SEQ ID NO: 2269566
uagacucagcuguucuggc

SEQ ID NO: 2269568 - RNA, 19 nt, Artificial Sequence
  Description of Artificial Sequence: Synthetic oligonucleotide
  Sense strand starting at position 3151 of SEQ ID NO: 1884487
cagaacagcugagucuaaa

SEQ ID NO: 2269569 - RNA, 19 nt, Artificial Sequence
  Description of Artificial Sequence: Synthetic oligonucleotide
  Antisense strand to SEQ ID NO: 2269568
uuuagacucagcuguucug

SEQ ID NO: 2269570 - RNA, 19 nt, Artificial Sequence
  Description of Artificial Sequence: Synthetic oligonucleotide
  Sense strand starting at position 3791 of SEQ ID NO: 1884487
ggucgagcaggauaaucuu

SEQ ID NO: 2269571 - RNA, 19 nt, Artificial Sequence
  Description of Artificial Sequence: Synthetic oligonucleotide
  Antisense strand to SEQ ID NO: 2269570
aagauuauccugcucgacc

SEQ ID NO: 2269572 - RNA, 19 nt, Artificial Sequence
  Description of Artificial Sequence: Synthetic oligonucleotide
  Sense strand starting at position 3825 of SEQ ID NO: 1884487
cuguaaaggcgagauagua

SEQ ID NO: 2269573 - RNA, 19 nt, Artificial Sequence
  Description of Artificial Sequence: Synthetic oligonucleotide
  Antisense strand to SEQ ID NO: 2269572
uacuaucucgccuuuacag

SEQ ID NO: 2269574 - RNA, 19 nt, Artificial Sequence
  Description of Artificial Sequence: Synthetic oligonucleotide
  Sense strand starting at position 3962 of SEQ ID NO: 1884487
acucguguuagagaaauag

SEQ ID NO: 2269575 - RNA, 19 nt, Artificial Sequence
  Description of Artificial Sequence: Synthetic oligonucleotide
  Antisense strand to SEQ ID NO: 2269574
cuauuucucuaacacgagu

SEQ ID NO: 2269576 - RNA, 19 nt, Artificial Sequence
  Description of Artificial Sequence: Synthetic oligonucleotide
  Sense strand starting at position 3971 of SEQ ID NO: 1884487
agagaaauaguuggcacau

SEQ ID NO: 2269577 - RNA, 19 nt, Artificial Sequence
  Description of Artificial Sequence: Synthetic oligonucleotide
  Antisense strand to SEQ ID NO: 2269576
augugccaacuauuucucu

SEQ ID NO: 2269578 - RNA, 19 nt, Artificial Sequence
  Description of Artificial Sequence: Synthetic oligonucleotide
  Sense strand starting at position 3972 of SEQ ID NO: 1884487
gagaaauaguuggcacauu

SEQ ID NO: 2269579 - RNA, 19 nt, Artificial Sequence
  Description of Artificial Sequence: Synthetic oligonucleotide
  Antisense strand to SEQ ID NO: 2269578
aaugugccaacuauuucuc

SEQ ID NO: 2269580 - RNA, 19 nt, Artificial Sequence
  Description of Artificial Sequence: Synthetic oligonucleotide
  Sense strand starting at position 3973 of SEQ ID NO: 1884487
agaaauaguuggcacauuu

SEQ ID NO: 2269581 - RNA, 19 nt, Artificial Sequence
  Description of Artificial Sequence: Synthetic oligonucleotide
  Antisense strand to SEQ ID NO: 2269580
aaaugugccaacuauuucu

SEQ ID NO: 2269582 - RNA, 19 nt, Artificial Sequence
  Description of Artificial Sequence: Synthetic oligonucleotide
  Sense strand starting at position 193 of SEQ ID NO: 1884488
ccagcugaaguguaaauaa

SEQ ID NO: 2269583 - RNA, 19 nt, Artificial Sequence
  Description of Artificial Sequence: Synthetic oligonucleotide
  Antisense strand to SEQ ID NO: 2269582
uuauuuacacuucagcugg

SEQ ID NO: 2269584 - RNA, 19 nt, Artificial Sequence
  Description of Artificial Sequence: Synthetic oligonucleotide
  Sense strand starting at position 252 of SEQ ID NO: 1884488
uuaacuuguuccuuggaac

SEQ ID NO: 2269585 - RNA, 19 nt, Artificial Sequence
  Description of Artificial Sequence: Synthetic oligonucleotide
  Antisense strand to SEQ ID NO: 2269584
guuccaaggaacaaguuaa

SEQ ID NO: 2269586 - RNA, 19 nt, Artificial Sequence
  Description of Artificial Sequence: Synthetic oligonucleotide
  Sense strand starting at position 324 of SEQ ID NO: 1884488
gucggagaacuggagucua

SEQ ID NO: 2269587 - RNA, 19 nt, Artificial Sequence
  Description of Artificial Sequence: Synthetic oligonucleotide
  Antisense strand to SEQ ID NO: 2269586
uagacuccaguucuccgac

SEQ ID NO: 2269588 - RNA, 19 nt, Artificial Sequence
  Description of Artificial Sequence: Synthetic oligonucleotide
  Sense strand starting at position 449 of SEQ ID NO: 1884488
agcuguuaagaguaucaaa

SEQ ID NO: 2269589 - RNA, 19 nt, Artificial Sequence
  Description of Artificial Sequence: Synthetic oligonucleotide
  Antisense strand to SEQ ID NO: 2269588
uuugauacucuuaacagcu

SEQ ID NO: 2269590 - RNA, 19 nt, Artificial Sequence
  Description of Artificial Sequence: Synthetic oligonucleotide
  Sense strand starting at position 511 of SEQ ID NO: 1884488
aucugucgugaguacuaaa

SEQ ID NO: 2269591 - RNA, 19 nt, Artificial Sequence
  Description of Artificial Sequence: Synthetic oligonucleotide
  Antisense strand to SEQ ID NO: 2269590
uuuaguacucacgacagau

SEQ ID NO: 2269592 - RNA, 19 nt, Artificial Sequence
  Description of Artificial Sequence: Synthetic oligonucleotide
  Sense strand starting at position 662 of SEQ ID NO: 1884488
ccaggaaguuuccuacauc

SEQ ID NO: 2269593 - RNA, 19 nt, Artificial Sequence
  Description of Artificial Sequence: Synthetic oligonucleotide
  Antisense strand to SEQ ID NO: 2269592
gauguaggaaacuuccugg

SEQ ID NO: 2269594 - RNA, 19 nt, Artificial Sequence
  Description of Artificial Sequence: Synthetic oligonucleotide
  Sense strand starting at position 665 of SEQ ID NO: 1884488
ggaaguuuccuacaucucu

SEQ ID NO: 2269595 - RNA, 19 nt, Artificial Sequence
  Description of Artificial Sequence: Synthetic oligonucleotide
  Antisense strand to SEQ ID NO: 2269594
agagauguaggaaacuucc

SEQ ID NO: 2269596 - RNA, 19 nt, Artificial Sequence
  Description of Artificial Sequence: Synthetic oligonucleotide
  Sense strand starting at position 696 of SEQ ID NO: 1884488
gcgacugcgauuuacucaa

SEQ ID NO: 2269597 - RNA, 19 nt, Artificial Sequence
  Description of Artificial Sequence: Synthetic oligonucleotide
  Antisense strand to SEQ ID NO: 2269596
uugaguaaaucgcagucgc

SEQ ID NO: 2269598 - RNA, 19 nt, Artificial Sequence
  Description of Artificial Sequence: Synthetic oligonucleotide
  Sense strand starting at position 745 of SEQ ID NO: 1884488
gucucaguuccucagagga

SEQ ID NO: 2269599 - RNA, 19 nt, Artificial Sequence
  Description of Artificial Sequence: Synthetic oligonucleotide
  Antisense strand to SEQ ID NO: 2269598
uccucugaggaacugagac

SEQ ID NO: 2269600 - RNA, 19 nt, Artificial Sequence
  Description of Artificial Sequence: Synthetic oligonucleotide
  Sense strand starting at position 790 of SEQ ID NO: 1884488
ucugaucucccagguuaug

SEQ ID NO: 2269601 - RNA, 19 nt, Artificial Sequence
  Description of Artificial Sequence: Synthetic oligonucleotide
  Antisense strand to SEQ ID NO: 2269600
cauaaccugggagaucaga

SEQ ID NO: 2269602 - RNA, 19 nt, Artificial Sequence
  Description of Artificial Sequence: Synthetic oligonucleotide
  Sense strand starting at position 800 of SEQ ID NO: 1884488
cagguuaugccuggaacuu

SEQ ID NO: 2269603 - RNA, 19 nt, Artificial Sequence
  Description of Artificial Sequence: Synthetic oligonucleotide
  Antisense strand to SEQ ID NO: 2269602
aaguuccaggcauaaccug

SEQ ID NO: 2269604 - RNA, 19 nt, Artificial Sequence
  Description of Artificial Sequence: Synthetic oligonucleotide
  Sense strand starting at position 801 of SEQ ID NO: 1884488
agguuaugccuggaacuug

SEQ ID NO: 2269605 - RNA, 19 nt, Artificial Sequence
  Description of Artificial Sequence: Synthetic oligonucleotide
  Antisense strand to SEQ ID NO: 2269604
caaguuccaggcauaaccu

SEQ ID NO: 2269606 - RNA, 19 nt, Artificial Sequence
  Description of Artificial Sequence: Synthetic oligonucleotide
  Sense strand starting at position 834 of SEQ ID NO: 1884488
gggagcuuuauguuugcgu

SEQ ID NO: 2269607 - RNA, 19 nt, Artificial Sequence
  Description of Artificial Sequence: Synthetic oligonucleotide
  Antisense strand to SEQ ID NO: 2269606
acgcaaacauaaagcuccc

SEQ ID NO: 2269608 - RNA, 19 nt, Artificial Sequence
  Description of Artificial Sequence: Synthetic oligonucleotide
  Sense strand starting at position 1214 of SEQ ID NO: 1884488
cccaaaucuguauggauau

SEQ ID NO: 2269609 - RNA, 19 nt, Artificial Sequence
  Description of Artificial Sequence: Synthetic oligonucleotide
  Antisense strand to SEQ ID NO: 2269608
auauccauacagauuuggg

SEQ ID NO: 2269610 - RNA, 19 nt, Artificial Sequence
  Description of Artificial Sequence: Synthetic oligonucleotide
  Sense strand starting at position 1285 of SEQ ID NO: 1884488
gugaguguuguaucuuguu

SEQ ID NO: 2269611 - RNA, 19 nt, Artificial Sequence
  Description of Artificial Sequence: Synthetic oligonucleotide
  Antisense strand to SEQ ID NO: 2269610
aacaagauacaacacucac

SEQ ID NO: 2269612 - RNA, 19 nt, Artificial Sequence
  Description of Artificial Sequence: Synthetic oligonucleotide
  Sense strand starting at position 1301 of SEQ ID NO: 1884488
guucgcugugaaaggugau

SEQ ID NO: 2269613 - RNA, 19 nt, Artificial Sequence
  Description of Artificial Sequence: Synthetic oligonucleotide
  Antisense strand to SEQ ID NO: 2269612
aucaccuuucacagcgaac

SEQ ID NO: 2269614 - RNA, 19 nt, Artificial Sequence
  Description of Artificial Sequence: Synthetic oligonucleotide
  Sense strand starting at position 1360 of SEQ ID NO: 1884488
guucuuagucguucuguga

SEQ ID NO: 2269615 - RNA, 19 nt, Artificial Sequence
  Description of Artificial Sequence: Synthetic oligonucleotide
  Antisense strand to SEQ ID NO: 2269614
ucacagaacgacuaagaac

SEQ ID NO: 2269616 - RNA, 19 nt, Artificial Sequence
  Description of Artificial Sequence: Synthetic oligonucleotide
  Sense strand starting at position 2107 of SEQ ID NO: 1884488
auuaaaucugaaggugacu

SEQ ID NO: 2269617 - RNA, 19 nt, Artificial Sequence
  Description of Artificial Sequence: Synthetic oligonucleotide
  Antisense strand to SEQ ID NO: 2269616
agucaccuucagauuuaau

SEQ ID NO: 2269618 - RNA, 19 nt, Artificial Sequence
  Description of Artificial Sequence: Synthetic oligonucleotide
  Sense strand starting at position 2217 of SEQ ID NO: 1884488
guaguuaugguagugcagu

SEQ ID NO: 2269619 - RNA, 19 nt, Artificial Sequence
  Description of Artificial Sequence: Synthetic oligonucleotide
  Antisense strand to SEQ ID NO: 2269618
acugcacuaccauaacuac

SEQ ID NO: 2269620 - RNA, 19 nt, Artificial Sequence
  Description of Artificial Sequence: Synthetic oligonucleotide
  Sense strand starting at position 2328 of SEQ ID NO: 1884488
gagccugagguuuauaaug

SEQ ID NO: 2269621 - RNA, 19 nt, Artificial Sequence
  Description of Artificial Sequence: Synthetic oligonucleotide
  Antisense strand to SEQ ID NO: 2269620
cauuauaaaccucaggcuc

SEQ ID NO: 2269622 - RNA, 19 nt, Artificial Sequence
  Description of Artificial Sequence: Synthetic oligonucleotide
  Sense strand starting at position 2457 of SEQ ID NO: 1884488
uggacuggucaguguauuu

SEQ ID NO: 2269623 - RNA, 19 nt, Artificial Sequence
  Description of Artificial Sequence: Synthetic oligonucleotide
  Antisense strand to SEQ ID NO: 2269622
aaauacacugaccagucca

SEQ ID NO: 2269624 - RNA, 19 nt, Artificial Sequence
  Description of Artificial Sequence: Synthetic oligonucleotide
  Sense strand starting at position 2665 of SEQ ID NO: 1884488
augacuauaagugguguga

SEQ ID NO: 2269625 - RNA, 19 nt, Artificial Sequence
  Description of Artificial Sequence: Synthetic oligonucleotide
  Antisense strand to SEQ ID NO: 2269624
ucacaccacuuauagucau

SEQ ID NO: 2269626 - RNA, 19 nt, Artificial Sequence
  Description of Artificial Sequence: Synthetic oligonucleotide
  Sense strand starting at position 3168 of SEQ ID NO: 1884488
gcgacauguaaugggaaua

SEQ ID NO: 2269627 - RNA, 19 nt, Artificial Sequence
  Description of Artificial Sequence: Synthetic oligonucleotide
  Antisense strand to SEQ ID NO: 2269626
uauucccauuacaugucgc

SEQ ID NO: 2269628 - RNA, 19 nt, Artificial Sequence
  Description of Artificial Sequence: Synthetic oligonucleotide
  Sense strand starting at position 3169 of SEQ ID NO: 1884488
cgacauguaaugggaauaa

SEQ ID NO: 2269629 - RNA, 19 nt, Artificial Sequence
  Description of Artificial Sequence: Synthetic oligonucleotide
  Antisense strand to SEQ ID NO: 2269628
uuauucccauuacaugucg

SEQ ID NO: 2269630 - RNA, 19 nt, Artificial Sequence
  Description of Artificial Sequence: Synthetic oligonucleotide
  Sense strand starting at position 3179 of SEQ ID NO: 1884488
ugggaauaaauguaugcuu

SEQ ID NO: 2269631 - RNA, 19 nt, Artificial Sequence
  Description of Artificial Sequence: Synthetic oligonucleotide
  Antisense strand to SEQ ID NO: 2269630
aagcauacauuuauuccca

SEQ ID NO: 2269632 - RNA, 19 nt, Artificial Sequence
  Description of Artificial Sequence: Synthetic oligonucleotide
  Sense strand starting at position 3181 of SEQ ID NO: 1884488
ggaauaaauguaugcuuug

SEQ ID NO: 2269633 - RNA, 19 nt, Artificial Sequence
  Description of Artificial Sequence: Synthetic oligonucleotide
  Antisense strand to SEQ ID NO: 2269632
caaagcauacauuuauucc

SEQ ID NO: 2269634 - RNA, 19 nt, Artificial Sequence
  Description of Artificial Sequence: Synthetic oligonucleotide
  Sense strand starting at position 3184 of SEQ ID NO: 1884488
auaaauguaugcuuuggaa

SEQ ID NO: 2269635 - RNA, 19 nt, Artificial Sequence
  Description of Artificial Sequence: Synthetic oligonucleotide
  Antisense strand to SEQ ID NO: 2269634
uuccaaagcauacauuuau

SEQ ID NO: 2269636 - RNA, 19 nt, Artificial Sequence
  Description of Artificial Sequence: Synthetic oligonucleotide
  Sense strand starting at position 3186 of SEQ ID NO: 1884488
aaauguaugcuuuggaaua

SEQ ID NO: 2269637 - RNA, 19 nt, Artificial Sequence
  Description of Artificial Sequence: Synthetic oligonucleotide
  Antisense strand to SEQ ID NO: 2269636
uauuccaaagcauacauuu

SEQ ID NO: 2269638 - RNA, 19 nt, Artificial Sequence
  Description of Artificial Sequence: Synthetic oligonucleotide
  Sense strand starting at position 3394 of SEQ ID NO: 1884488
cuggguugucuggucguua

SEQ ID NO: 2269639 - RNA, 19 nt, Artificial Sequence
  Description of Artificial Sequence: Synthetic oligonucleotide
  Antisense strand to SEQ ID NO: 2269638
uaacgaccagacaacccag

SEQ ID NO: 2269640 - RNA, 19 nt, Artificial Sequence
  Description of Artificial Sequence: Synthetic oligonucleotide
  Sense strand starting at position 3443 of SEQ ID NO: 1884488
cugcuuuguggagaucuuu

SEQ ID NO: 2269641 - RNA, 19 nt, Artificial Sequence
  Description of Artificial Sequence: Synthetic oligonucleotide
  Antisense strand to SEQ ID NO: 2269640
aaagaucuccacaaagcag

SEQ ID NO: 2269642 - RNA, 19 nt, Artificial Sequence
  Description of Artificial Sequence: Synthetic oligonucleotide
  Sense strand starting at position 3449 of SEQ ID NO: 1884488
uguggagaucuuuacugcu

SEQ ID NO: 2269643 - RNA, 19 nt, Artificial Sequence
  Description of Artificial Sequence: Synthetic oligonucleotide
  Antisense strand to SEQ ID NO: 2269642
agcaguaaagaucuccaca

SEQ ID NO: 2269644 - RNA, 19 nt, Artificial Sequence
  Description of Artificial Sequence: Synthetic oligonucleotide
  Sense strand starting at position 3526 of SEQ ID NO: 1884488
cacagauggguuuauguuu

SEQ ID NO: 2269645 - RNA, 19 nt, Artificial Sequence
  Description of Artificial Sequence: Synthetic oligonucleotide
  Antisense strand to SEQ ID NO: 2269644
aaacauaaacccaucugug

SEQ ID NO: 2269646 - RNA, 19 nt, Artificial Sequence
  Description of Artificial Sequence: Synthetic oligonucleotide
  Sense strand starting at position 3638 of SEQ ID NO: 1884488
aaguucuagcaagggauga

SEQ ID NO: 2269647 - RNA, 19 nt, Artificial Sequence
  Description of Artificial Sequence: Synthetic oligonucleotide
  Antisense strand to SEQ ID NO: 2269646
ucaucccuugcuagaacuu

SEQ ID NO: 2269648 - RNA, 19 nt, Artificial Sequence
  Description of Artificial Sequence: Synthetic oligonucleotide
  Sense strand starting at position 3725 of SEQ ID NO: 1884488
ccugaaagcucguuaagaa

SEQ ID NO: 2269649 - RNA, 19 nt, Artificial Sequence
  Description of Artificial Sequence: Synthetic oligonucleotide
  Antisense strand to SEQ ID NO: 2269648
uucuuaacgagcuuucagg

SEQ ID NO: 2269650 - RNA, 19 nt, Artificial Sequence
  Description of Artificial Sequence: Synthetic oligonucleotide
  Sense strand starting at position 3726 of SEQ ID NO: 1884488
cugaaagcucguuaagaaa

SEQ ID NO: 2269651 - RNA, 19 nt, Artificial Sequence
  Description of Artificial Sequence: Synthetic oligonucleotide
  Antisense strand to SEQ ID NO: 2269650
uuucuuaacgagcuuucag

SEQ ID NO: 2269652 - RNA, 19 nt, Artificial Sequence
  Description of Artificial Sequence: Synthetic oligonucleotide
  Sense strand starting at position 3733 of SEQ ID NO: 1884488
cucguuaagaaacguagaa

SEQ ID NO: 2269653 - RNA, 19 nt, Artificial Sequence
  Description of Artificial Sequence: Synthetic oligonucleotide
  Antisense strand to SEQ ID NO: 2269652
uucuacguuucuuaacgag

SEQ ID NO: 2269654 - RNA, 19 nt, Artificial Sequence
  Description of Artificial Sequence: Synthetic oligonucleotide
  Sense strand starting at position 3735 of SEQ ID NO: 1884488
cguuaagaaacguagaauu

SEQ ID NO: 2269655 - RNA, 19 nt, Artificial Sequence
  Description of Artificial Sequence: Synthetic oligonucleotide
  Antisense strand to SEQ ID NO: 2269654
aauucuacguuucuuaacg

SEQ ID NO: 2269656 - RNA, 19 nt, Artificial Sequence
  Description of Artificial Sequence: Synthetic oligonucleotide
  Sense strand starting at position 3879 of SEQ ID NO: 1884488
gacagcugugucuaauuga

SEQ ID NO: 2269657 - RNA, 19 nt, Artificial Sequence
  Description of Artificial Sequence: Synthetic oligonucleotide
  Antisense strand to SEQ ID NO: 2269656
ucaauuagacacagcuguc

SEQ ID NO: 2269658 - RNA, 19 nt, Artificial Sequence
  Description of Artificial Sequence: Synthetic oligonucleotide
  Sense strand starting at position 3914 of SEQ ID NO: 1884488
agauauuagguuugugcaa

SEQ ID NO: 2269659 - RNA, 19 nt, Artificial Sequence
  Description of Artificial Sequence: Synthetic oligonucleotide
  Antisense strand to SEQ ID NO: 2269658
uugcacaaaccuaauaucu

SEQ ID NO: 2269660 - RNA, 19 nt, Artificial Sequence
  Description of Artificial Sequence: Synthetic oligonucleotide
  Sense strand starting at position 3915 of SEQ ID NO: 1884488
gauauuagguuugugcaaa

SEQ ID NO: 2269661 - RNA, 19 nt, Artificial Sequence
  Description of Artificial Sequence: Synthetic oligonucleotide
  Antisense strand to SEQ ID NO: 2269660
uuugcacaaaccuaauauc

SEQ ID NO: 2269662 - RNA, 19 nt, Artificial Sequence
  Description of Artificial Sequence: Synthetic oligonucleotide
  Sense strand starting at position 1989 of SEQ ID NO: 1884489
cccaguccuuuacagaagu

SEQ ID NO: 2269663 - RNA, 19 nt, Artificial Sequence
  Description of Artificial Sequence: Synthetic oligonucleotide
  Antisense strand to SEQ ID NO: 2269662
acuucuguaaaggacuggg

SEQ ID NO: 2269664 - RNA, 19 nt, Artificial Sequence
  Description of Artificial Sequence: Synthetic oligonucleotide
  Sense strand starting at position 2326 of SEQ ID NO: 1884489
gggaacuucucggucgcua

SEQ ID NO: 2269665 - RNA, 19 nt, Artificial Sequence
  Description of Artificial Sequence: Synthetic oligonucleotide
  Antisense strand to SEQ ID NO: 2269664
uagcgaccgagaaguuccc

SEQ ID NO: 2269666 - RNA, 19 nt, Artificial Sequence
  Description of Artificial Sequence: Synthetic oligonucleotide
  Sense strand starting at position 2438 of SEQ ID NO: 1884489
ucuccuguccuuugucauu

SEQ ID NO: 2269667 - RNA, 19 nt, Artificial Sequence
  Description of Artificial Sequence: Synthetic oligonucleotide
  Antisense strand to SEQ ID NO: 2269666
aaugacaaaggacaggaga

SEQ ID NO: 2269668 - RNA, 19 nt, Artificial Sequence
  Description of Artificial Sequence: Synthetic oligonucleotide
  Sense strand starting at position 2461 of SEQ ID NO: 1884489
ccauauagucucgacguca

SEQ ID NO: 2269669 - RNA, 19 nt, Artificial Sequence
  Description of Artificial Sequence: Synthetic oligonucleotide
  Antisense strand to SEQ ID NO: 2269668
ugacgucgagacuauaugg

SEQ ID NO: 2269670 - RNA, 19 nt, Artificial Sequence
  Description of Artificial Sequence: Synthetic oligonucleotide
  Sense strand starting at position 2524 of SEQ ID NO: 1884489
gggccauggcauuauugua

SEQ ID NO: 2269671 - RNA, 19 nt, Artificial Sequence
  Description of Artificial Sequence: Synthetic oligonucleotide
  Antisense strand to SEQ ID NO: 2269670
uacaauaaugccauggccc

SEQ ID NO: 2269672 - RNA, 19 nt, Artificial Sequence
  Description of Artificial Sequence: Synthetic oligonucleotide
  Sense strand starting at position 2544 of SEQ ID NO: 1884489
aauaucuucgucguuugua

SEQ ID NO: 2269673 - RNA, 19 nt, Artificial Sequence
  Description of Artificial Sequence: Synthetic oligonucleotide
  Antisense strand to SEQ ID NO: 2269672
uacaaacgacgaagauauu

SEQ ID NO: 2269674 - RNA, 19 nt, Artificial Sequence
  Description of Artificial Sequence: Synthetic oligonucleotide
  Sense strand starting at position 2545 of SEQ ID NO: 1884489
auaucuucgucguuuguau

SEQ ID NO: 2269675 - RNA, 19 nt, Artificial Sequence
  Description of Artificial Sequence: Synthetic oligonucleotide
  Antisense strand to SEQ ID NO: 2269674
auacaaacgacgaagauau

SEQ ID NO: 2269676 - RNA, 19 nt, Artificial Sequence
  Description of Artificial Sequence: Synthetic oligonucleotide
  Sense strand starting at position 2570 of SEQ ID NO: 1884489
aggucuuacuagucuagaa

SEQ ID NO: 2269677 - RNA, 19 nt, Artificial Sequence
  Description of Artificial Sequence: Synthetic oligonucleotide
  Antisense strand to SEQ ID NO: 2269676
uucuagacuaguaagaccu

SEQ ID NO: 2269678 - RNA, 19 nt, Artificial Sequence
  Description of Artificial Sequence: Synthetic oligonucleotide
  Sense strand starting at position 2572 of SEQ ID NO: 1884489
gucuuacuagucuagaauu

SEQ ID NO: 2269679 - RNA, 19 nt, Artificial Sequence
  Description of Artificial Sequence: Synthetic oligonucleotide
  Antisense strand to SEQ ID NO: 2269678
aauucuagacuaguaagac

SEQ ID NO: 2269680 - RNA, 19 nt, Artificial Sequence
  Description of Artificial Sequence: Synthetic oligonucleotide
  Sense strand starting at position 2669 of SEQ ID NO: 1884489
uggagaguuccagggcaca

SEQ ID NO: 2269681 - RNA, 19 nt, Artificial Sequence
  Description of Artificial Sequence: Synthetic oligonucleotide
  Antisense strand to SEQ ID NO: 2269680
ugugcccuggaacucucca

SEQ ID NO: 2269682 - RNA, 19 nt, Artificial Sequence
  Description of Artificial Sequence: Synthetic oligonucleotide
  Sense strand starting at position 2795 of SEQ ID NO: 1884489
gggagagauuagugacgcu

SEQ ID NO: 2269683 - RNA, 19 nt, Artificial Sequence
  Description of Artificial Sequence: Synthetic oligonucleotide
  Antisense strand to SEQ ID NO: 2269682
agcgucacuaaucucuccc

SEQ ID NO: 2269684 - RNA, 19 nt, Artificial Sequence
  Description of Artificial Sequence: Synthetic oligonucleotide
  Sense strand starting at position 2798 of SEQ ID NO: 1884489
agagauuagugacgcugua

SEQ ID NO: 2269685 - RNA, 19 nt, Artificial Sequence
  Description of Artificial Sequence: Synthetic oligonucleotide
  Antisense strand to SEQ ID NO: 2269684
uacagcgucacuaaucucu

SEQ ID NO: 2269686 - RNA, 19 nt, Artificial Sequence
  Description of Artificial Sequence: Synthetic oligonucleotide
  Sense strand starting at position 2848 of SEQ ID NO: 1884489
acagcaacucuaugaaguu

SEQ ID NO: 2269687 - RNA, 19 nt, Artificial Sequence
  Description of Artificial Sequence: Synthetic oligonucleotide
  Antisense strand to SEQ ID NO: 2269686
aacuucauagaguugcugu

SEQ ID NO: 2269688 - RNA, 19 nt, Artificial Sequence
  Description of Artificial Sequence: Synthetic oligonucleotide
  Sense strand starting at position 2879 of SEQ ID NO: 1884489
uccuuuggcuccuguaaau

SEQ ID NO: 2269689 - RNA, 19 nt, Artificial Sequence
  Description of Artificial Sequence: Synthetic oligonucleotide
  Antisense strand to SEQ ID NO: 2269688
auuuacaggagccaaagga

SEQ ID NO: 2269690 - RNA, 19 nt, Artificial Sequence
  Description of Artificial Sequence: Synthetic oligonucleotide
  Sense strand starting at position 3010 of SEQ ID NO: 1884489
ugaagcagcuguucucaau

SEQ ID NO: 2269691 - RNA, 19 nt, Artificial Sequence
  Description of Artificial Sequence: Synthetic oligonucleotide
  Antisense strand to SEQ ID NO: 2269690
auugagaacagcugcuuca

SEQ ID NO: 2269692 - RNA, 19 nt, Artificial Sequence
  Description of Artificial Sequence: Synthetic oligonucleotide
  Sense strand starting at position 3013 of SEQ ID NO: 1884489
agcagcuguucucaauuga

SEQ ID NO: 2269693 - RNA, 19 nt, Artificial Sequence
  Description of Artificial Sequence: Synthetic oligonucleotide
  Antisense strand to SEQ ID NO: 2269692
ucaauugagaacagcugcu

SEQ ID NO: 2269694 - RNA, 19 nt, Artificial Sequence
  Description of Artificial Sequence: Synthetic oligonucleotide
  Sense strand starting at position 3023 of SEQ ID NO: 1884489
cucaauugacgcuggugaa

SEQ ID NO: 2269695 - RNA, 19 nt, Artificial Sequence
  Description of Artificial Sequence: Synthetic oligonucleotide
  Antisense strand to SEQ ID NO: 2269694
uucaccagcgucaauugag

SEQ ID NO: 2269696 - RNA, 19 nt, Artificial Sequence
  Description of Artificial Sequence: Synthetic oligonucleotide
  Sense strand starting at position 3024 of SEQ ID NO: 1884489
ucaauugacgcuggugaaa

SEQ ID NO: 2269697 - RNA, 19 nt, Artificial Sequence
  Description of Artificial Sequence: Synthetic oligonucleotide
  Antisense strand to SEQ ID NO: 2269696
uuucaccagcgucaauuga

SEQ ID NO: 2269698 - RNA, 19 nt, Artificial Sequence
  Description of Artificial Sequence: Synthetic oligonucleotide
  Sense strand starting at position 3026 of SEQ ID NO: 1884489
aauugacgcuggugaaacu

SEQ ID NO: 2269699 - RNA, 19 nt, Artificial Sequence
  Description of Artificial Sequence: Synthetic oligonucleotide
  Antisense strand to SEQ ID NO: 2269698
aguuucaccagcgucaauu

SEQ ID NO: 2269700 - RNA, 19 nt, Artificial Sequence
  Description of Artificial Sequence: Synthetic oligonucleotide
  Sense strand starting at position 3035 of SEQ ID NO: 1884489
uggugaaacuguucuuguu

SEQ ID NO: 2269701 - RNA, 19 nt, Artificial Sequence
  Description of Artificial Sequence: Synthetic oligonucleotide
  Antisense strand to SEQ ID NO: 2269700
aacaagaacaguuucacca

SEQ ID NO: 2269702 - RNA, 19 nt, Artificial Sequence
  Description of Artificial Sequence: Synthetic oligonucleotide
  Sense strand starting at position 3081 of SEQ ID NO: 1884489
gccuguaagaguggaauau

SEQ ID NO: 2269703 - RNA, 19 nt, Artificial Sequence
  Description of Artificial Sequence: Synthetic oligonucleotide
  Antisense strand to SEQ ID NO: 2269702
auauuccacucuuacaggc

SEQ ID NO: 2269704 - RNA, 19 nt, Artificial Sequence
  Description of Artificial Sequence: Synthetic oligonucleotide
  Sense strand starting at position 3091 of SEQ ID NO: 1884489
guggaauauuacugagaug

SEQ ID NO: 2269705 - RNA, 19 nt, Artificial Sequence
  Description of Artificial Sequence: Synthetic oligonucleotide
  Antisense strand to SEQ ID NO: 2269704
caucucaguaauauuccac

SEQ ID NO: 2269706 - RNA, 19 nt, Artificial Sequence
  Description of Artificial Sequence: Synthetic oligonucleotide
  Sense strand starting at position 3094 of SEQ ID NO: 1884489
gaauauuacugagaugcag

SEQ ID NO: 2269707 - RNA, 19 nt, Artificial Sequence
  Description of Artificial Sequence: Synthetic oligonucleotide
  Antisense strand to SEQ ID NO: 2269706
cugcaucucaguaauauuc

SEQ ID NO: 2269708 - RNA, 19 nt, Artificial Sequence
  Description of Artificial Sequence: Synthetic oligonucleotide
  Sense strand starting at position 3204 of SEQ ID NO: 1884489
ggucaccucguuucgcaaa

SEQ ID NO: 2269709 - RNA, 19 nt, Artificial Sequence
  Description of Artificial Sequence: Synthetic oligonucleotide
  Antisense strand to SEQ ID NO: 2269708
uuugcgaaacgaggugacc

SEQ ID NO: 2269710 - RNA, 19 nt, Artificial Sequence
  Description of Artificial Sequence: Synthetic oligonucleotide
  Sense strand starting at position 3205 of SEQ ID NO: 1884489
gucaccucguuucgcaaau

SEQ ID NO: 2269711 - RNA, 19 nt, Artificial Sequence
  Description of Artificial Sequence: Synthetic oligonucleotide
  Antisense strand to SEQ ID NO: 2269710
auuugcgaaacgaggugac

SEQ ID NO: 2269712 - RNA, 19 nt, Artificial Sequence
  Description of Artificial Sequence: Synthetic oligonucleotide
  Sense strand starting at position 3270 of SEQ ID NO: 1884489
acagcuaauuaauagcaga

SEQ ID NO: 2269713 - RNA, 19 nt, Artificial Sequence
  Description of Artificial Sequence: Synthetic oligonucleotide
  Antisense strand to SEQ ID NO: 2269712
ucugcuauuaauuagcugu

SEQ ID NO: 2269714 - RNA, 19 nt, Artificial Sequence
  Description of Artificial Sequence: Synthetic oligonucleotide
  Sense strand starting at position 3283 of SEQ ID NO: 1884489
agcagaagcuguucuugaa

SEQ ID NO: 2269715 - RNA, 19 nt, Artificial Sequence
  Description of Artificial Sequence: Synthetic oligonucleotide
  Antisense strand to SEQ ID NO: 2269714
uucaagaacagcuucugcu

SEQ ID NO: 2269716 - RNA, 19 nt, Artificial Sequence
  Description of Artificial Sequence: Synthetic oligonucleotide
  Sense strand starting at position 3293 of SEQ ID NO: 1884489
guucuugaaucccagauuu

SEQ ID NO: 2269717 - RNA, 19 nt, Artificial Sequence
  Description of Artificial Sequence: Synthetic oligonucleotide
  Antisense strand to SEQ ID NO: 2269716
aaaucugggauucaagaac

SEQ ID NO: 2269718 - RNA, 19 nt, Artificial Sequence
  Description of Artificial Sequence: Synthetic oligonucleotide
  Sense strand starting at position 3438 of SEQ ID NO: 1884489
gagugagaugaacguuaag

SEQ ID NO: 2269719 - RNA, 19 nt, Artificial Sequence
  Description of Artificial Sequence: Synthetic oligonucleotide
  Antisense strand to SEQ ID NO: 2269718
cuuaacguucaucucacuc

SEQ ID NO: 2269720 - RNA, 19 nt, Artificial Sequence
  Description of Artificial Sequence: Synthetic oligonucleotide
  Sense strand starting at position 3468 of SEQ ID NO: 1884489
gcuuuaaauuauugucagu

SEQ ID NO: 2269721 - RNA, 19 nt, Artificial Sequence
  Description of Artificial Sequence: Synthetic oligonucleotide
  Antisense strand to SEQ ID NO: 2269720
acugacaauaauuuaaagc

SEQ ID NO: 2269722 - RNA, 19 nt, Artificial Sequence
  Description of Artificial Sequence: Synthetic oligonucleotide
  Sense strand starting at position 3829 of SEQ ID NO: 1884489
gccagaauguuguacaguc

SEQ ID NO: 2269723 - RNA, 19 nt, Artificial Sequence
  Description of Artificial Sequence: Synthetic oligonucleotide
  Antisense strand to SEQ ID NO: 2269722
gacuguacaacauucuggc

SEQ ID NO: 2269724 - RNA, 19 nt, Artificial Sequence
  Description of Artificial Sequence: Synthetic oligonucleotide
  Sense strand starting at position 3831 of SEQ ID NO: 1884489
cagaauguuguacagucau

SEQ ID NO: 2269725 - RNA, 19 nt, Artificial Sequence
  Description of Artificial Sequence: Synthetic oligonucleotide
  Antisense strand to SEQ ID NO: 2269724
augacuguacaacauucug

SEQ ID NO: 2269726 - RNA, 19 nt, Artificial Sequence
  Description of Artificial Sequence: Synthetic oligonucleotide
  Sense strand starting at position 3882 of SEQ ID NO: 1884489
ccucuccucggaugcuaaa

SEQ ID NO: 2269727 - RNA, 19 nt, Artificial Sequence
  Description of Artificial Sequence: Synthetic oligonucleotide
  Antisense strand to SEQ ID NO: 2269726
uuuagcauccgaggagagg

SEQ ID NO: 2269728 - RNA, 19 nt, Artificial Sequence
  Description of Artificial Sequence: Synthetic oligonucleotide
  Sense strand starting at position 175 of SEQ ID NO: 1884490
uucccuuucuuggcuguaa

SEQ ID NO: 2269729 - RNA, 19 nt, Artificial Sequence
  Description of Artificial Sequence: Synthetic oligonucleotide
  Antisense strand to SEQ ID NO: 2269728
uuacagccaagaaagggaa

SEQ ID NO: 2269730 - RNA, 19 nt, Artificial Sequence
  Description of Artificial Sequence: Synthetic oligonucleotide
  Sense strand starting at position 176 of SEQ ID NO: 1884490
ucccuuucuuggcuguaaa

SEQ ID NO: 2269731 - RNA, 19 nt, Artificial Sequence
  Description of Artificial Sequence: Synthetic oligonucleotide
  Antisense strand to SEQ ID NO: 2269730
uuuacagccaagaaaggga

SEQ ID NO: 2269732 - RNA, 19 nt, Artificial Sequence
  Description of Artificial Sequence: Synthetic oligonucleotide
  Sense strand starting at position 301 of SEQ ID NO: 1884490
gugguuuccaaucagcuga

SEQ ID NO: 2269733 - RNA, 19 nt, Artificial Sequence
  Description of Artificial Sequence: Synthetic oligonucleotide
  Antisense strand to SEQ ID NO: 2269732
ucagcugauuggaaaccac

SEQ ID NO: 2269734 - RNA, 19 nt, Artificial Sequence
  Description of Artificial Sequence: Synthetic oligonucleotide
  Sense strand starting at position 342 of SEQ ID NO: 1884490
gccauugugauguggacau

SEQ ID NO: 2269735 - RNA, 19 nt, Artificial Sequence
  Description of Artificial Sequence: Synthetic oligonucleotide
  Antisense strand to SEQ ID NO: 2269734
auguccacaucacaauggc

SEQ ID NO: 2269736 - RNA, 19 nt, Artificial Sequence
  Description of Artificial Sequence: Synthetic oligonucleotide
  Sense strand starting at position 415 of SEQ ID NO: 1884490
aguccuaguccuggucaca

SEQ ID NO: 2269737 - RNA, 19 nt, Artificial Sequence
  Description of Artificial Sequence: Synthetic oligonucleotide
  Antisense strand to SEQ ID NO: 2269736
ugugaccaggacuaggacu

SEQ ID NO: 2269738 - RNA, 19 nt, Artificial Sequence
  Description of Artificial Sequence: Synthetic oligonucleotide
  Sense strand starting at position 664 of SEQ ID NO: 1884490
uggaguaguuugaguuggu

SEQ ID NO: 2269739 - RNA, 19 nt, Artificial Sequence
  Description of Artificial Sequence: Synthetic oligonucleotide
  Antisense strand to SEQ ID NO: 2269738
accaacucaaacuacucca

SEQ ID NO: 2269740 - RNA, 19 nt, Artificial Sequence
  Description of Artificial Sequence: Synthetic oligonucleotide
  Sense strand starting at position 665 of SEQ ID NO: 1884490
ggaguaguuugaguugguc

SEQ ID NO: 2269741 - RNA, 19 nt, Artificial Sequence
  Description of Artificial Sequence: Synthetic oligonucleotide
  Antisense strand to SEQ ID NO: 2269740
gaccaacucaaacuacucc

SEQ ID NO: 2269742 - RNA, 19 nt, Artificial Sequence
  Description of Artificial Sequence: Synthetic oligonucleotide
  Sense strand starting at position 669 of SEQ ID NO: 1884490
uaguuugaguuggucccua

SEQ ID NO: 2269743 - RNA, 19 nt, Artificial Sequence
  Description of Artificial Sequence: Synthetic oligonucleotide
  Antisense strand to SEQ ID NO: 2269742
uagggaccaacucaaacua

SEQ ID NO: 2269744 - RNA, 19 nt, Artificial Sequence
  Description of Artificial Sequence: Synthetic oligonucleotide
  Sense strand starting at position 820 of SEQ ID NO: 1884490
agguuuaacuuggaauugu

SEQ ID NO: 2269745 - RNA, 19 nt, Artificial Sequence
  Description of Artificial Sequence: Synthetic oligonucleotide
  Antisense strand to SEQ ID NO: 2269744
acaauuccaaguuaaaccu

SEQ ID NO: 2269746 - RNA, 19 nt, Artificial Sequence
  Description of Artificial Sequence: Synthetic oligonucleotide
  Sense strand starting at position 2872 of SEQ ID NO: 1884490
uguuguucuccgcgggaag

SEQ ID NO: 2269747 - RNA, 19 nt, Artificial Sequence
  Description of Artificial Sequence: Synthetic oligonucleotide
  Antisense strand to SEQ ID NO: 2269746
cuucccgcggagaacaaca

SEQ ID NO: 2269748 - RNA, 19 nt, Artificial Sequence
  Description of Artificial Sequence: Synthetic oligonucleotide
  Sense strand starting at position 143 of SEQ ID NO: 1884491
ugggcuucccauuagaaua

SEQ ID NO: 2269749 - RNA, 19 nt, Artificial Sequence
  Description of Artificial Sequence: Synthetic oligonucleotide
  Antisense strand to SEQ ID NO: 2269748
uauucuaaugggaagccca

SEQ ID NO: 2269750 - RNA, 19 nt, Artificial Sequence
  Description of Artificial Sequence: Synthetic oligonucleotide
  Sense strand starting at position 185 of SEQ ID NO: 1884491
uuugaagccguuuagaaac

SEQ ID NO: 2269751 - RNA, 19 nt, Artificial Sequence
  Description of Artificial Sequence: Synthetic oligonucleotide
  Antisense strand to SEQ ID NO: 2269750
guuucuaaacggcuucaaa

SEQ ID NO: 2269752 - RNA, 19 nt, Artificial Sequence
  Description of Artificial Sequence: Synthetic oligonucleotide
  Sense strand starting at position 210 of SEQ ID NO: 1884491
agggccaacugcucuauau

SEQ ID NO: 2269753 - RNA, 19 nt, Artificial Sequence
  Description of Artificial Sequence: Synthetic oligonucleotide
  Antisense strand to SEQ ID NO: 2269752
auauagagcaguuggcccu

SEQ ID NO: 2269754 - RNA, 19 nt, Artificial Sequence
  Description of Artificial Sequence: Synthetic oligonucleotide
  Sense strand starting at position 212 of SEQ ID NO: 1884491
ggccaacugcucuauauaa

SEQ ID NO: 2269755 - RNA, 19 nt, Artificial Sequence
  Description of Artificial Sequence: Synthetic oligonucleotide
  Antisense strand to SEQ ID NO: 2269754
uuauauagagcaguuggcc

SEQ ID NO: 2269756 - RNA, 19 nt, Artificial Sequence
  Description of Artificial Sequence: Synthetic oligonucleotide
  Sense strand starting at position 709 of SEQ ID NO: 1884491
cucagugcuaugcaaagga

SEQ ID NO: 2269757 - RNA, 19 nt, Artificial Sequence
  Description of Artificial Sequence: Synthetic oligonucleotide
  Antisense strand to SEQ ID NO: 2269756
uccuuugcauagcacugag

SEQ ID NO: 2269758 - RNA, 19 nt, Artificial Sequence
  Description of Artificial Sequence: Synthetic oligonucleotide
  Sense strand starting at position 713 of SEQ ID NO: 1884491
gugcuaugcaaaggaaaug

SEQ ID NO: 2269759 - RNA, 19 nt, Artificial Sequence
  Description of Artificial Sequence: Synthetic oligonucleotide
  Antisense strand to SEQ ID NO: 2269758
cauuuccuuugcauagcac

SEQ ID NO: 2269760 - RNA, 19 nt, Artificial Sequence
  Description of Artificial Sequence: Synthetic oligonucleotide
  Sense strand starting at position 743 of SEQ ID NO: 1884491
ugucgucuuggucuagcaa

SEQ ID NO: 2269761 - RNA, 19 nt, Artificial Sequence
  Description of Artificial Sequence: Synthetic oligonucleotide
  Antisense strand to SEQ ID NO: 2269760
uugcuagaccaagacgaca

SEQ ID NO: 2269762 - RNA, 19 nt, Artificial Sequence
  Description of Artificial Sequence: Synthetic oligonucleotide
  Sense strand starting at position 788 of SEQ ID NO: 1884491
auacauaugucaucuguau

SEQ ID NO: 2269763 - RNA, 19 nt, Artificial Sequence
  Description of Artificial Sequence: Synthetic oligonucleotide
  Antisense strand to SEQ ID NO: 2269762
auacagaugacauauguau

SEQ ID NO: 2269764 - RNA, 19 nt, Artificial Sequence
  Description of Artificial Sequence: Synthetic oligonucleotide
  Sense strand starting at position 792 of SEQ ID NO: 1884491
auaugucaucuguaucuag

SEQ ID NO: 2269765 - RNA, 19 nt, Artificial Sequence
  Description of Artificial Sequence: Synthetic oligonucleotide
  Antisense strand to SEQ ID NO: 2269764
cuagauacagaugacauau

SEQ ID NO: 2269766 - RNA, 19 nt, Artificial Sequence
  Description of Artificial Sequence: Synthetic oligonucleotide
  Sense strand starting at position 870 of SEQ ID NO: 1884491
uuaguuauuccugaguagg

SEQ ID NO: 2269767 - RNA, 19 nt, Artificial Sequence
  Description of Artificial Sequence: Synthetic oligonucleotide
  Antisense strand to SEQ ID NO: 2269766
ccuacucaggaauaacuaa

SEQ ID NO: 2269768 - RNA, 19 nt, Artificial Sequence
  Description of Artificial Sequence: Synthetic oligonucleotide
  Sense strand starting at position 872 of SEQ ID NO: 1884491
aguuauuccugaguagguc

SEQ ID NO: 2269769 - RNA, 19 nt, Artificial Sequence
  Description of Artificial Sequence: Synthetic oligonucleotide
  Antisense strand to SEQ ID NO: 2269768
gaccuacucaggaauaacu

SEQ ID NO: 2269770 - RNA, 19 nt, Artificial Sequence
  Description of Artificial Sequence: Synthetic oligonucleotide
  Sense strand starting at position 873 of SEQ ID NO: 1884491
guuauuccugaguaggucu

SEQ ID NO: 2269771 - RNA, 19 nt, Artificial Sequence
  Description of Artificial Sequence: Synthetic oligonucleotide
  Antisense strand to SEQ ID NO: 2269770
agaccuacucaggaauaac

SEQ ID NO: 2269772 - RNA, 19 nt, Artificial Sequence
  Description of Artificial Sequence: Synthetic oligonucleotide
  Sense strand starting at position 876 of SEQ ID NO: 1884491
auuccugaguaggucuuaa

SEQ ID NO: 2269773 - RNA, 19 nt, Artificial Sequence
  Description of Artificial Sequence: Synthetic oligonucleotide
  Antisense strand to SEQ ID NO: 2269772
uuaagaccuacucaggaau

SEQ ID NO: 2269774 - RNA, 19 nt, Artificial Sequence
  Description of Artificial Sequence: Synthetic oligonucleotide
  Sense strand starting at position 1119 of SEQ ID NO: 1884491
ucuaguucuguuuacagac

SEQ ID NO: 2269775 - RNA, 19 nt, Artificial Sequence
  Description of Artificial Sequence: Synthetic oligonucleotide
  Antisense strand to SEQ ID NO: 2269774
gucuguaaacagaacuaga

SEQ ID NO: 2269776 - RNA, 19 nt, Artificial Sequence
  Description of Artificial Sequence: Synthetic oligonucleotide
  Sense strand starting at position 1144 of SEQ ID NO: 1884491
gcucacauuguuggaauga

SEQ ID NO: 2269777 - RNA, 19 nt, Artificial Sequence
  Description of Artificial Sequence: Synthetic oligonucleotide
  Antisense strand to SEQ ID NO: 2269776
ucauuccaacaaugugagc

SEQ ID NO: 2269778 - RNA, 19 nt, Artificial Sequence
  Description of Artificial Sequence: Synthetic oligonucleotide
  Sense strand starting at position 1185 of SEQ ID NO: 1884491
uugaucuguggucaguuua

SEQ ID NO: 2269779 - RNA, 19 nt, Artificial Sequence
  Description of Artificial Sequence: Synthetic oligonucleotide
  Antisense strand to SEQ ID NO: 2269778
uaaacugaccacagaucaa

SEQ ID NO: 2269780 - RNA, 19 nt, Artificial Sequence
  Description of Artificial Sequence: Synthetic oligonucleotide
  Sense strand starting at position 1218 of SEQ ID NO: 1884491
gcacaauggugacauuuaa

SEQ ID NO: 2269781 - RNA, 19 nt, Artificial Sequence
  Description of Artificial Sequence: Synthetic oligonucleotide
  Antisense strand to SEQ ID NO: 2269780
uuaaaugucaccauugugc

SEQ ID NO: 2269782 - RNA, 19 nt, Artificial Sequence
  Description of Artificial Sequence: Synthetic oligonucleotide
  Sense strand starting at position 1225 of SEQ ID NO: 1884491
ggugacauuuaagaggcaa

SEQ ID NO: 2269783 - RNA, 19 nt, Artificial Sequence
  Description of Artificial Sequence: Synthetic oligonucleotide
  Antisense strand to SEQ ID NO: 2269782
uugccucuuaaaugucacc

SEQ ID NO: 2269784 - RNA, 19 nt, Artificial Sequence
  Description of Artificial Sequence: Synthetic oligonucleotide
  Sense strand starting at position 1359 of SEQ ID NO: 1884491
ucuuacacugcuggauaua

SEQ ID NO: 2269785 - RNA, 19 nt, Artificial Sequence
  Description of Artificial Sequence: Synthetic oligonucleotide
  Antisense strand to SEQ ID NO: 2269784
uauauccagcaguguaaga

SEQ ID NO: 2269786 - RNA, 19 nt, Artificial Sequence
  Description of Artificial Sequence: Synthetic oligonucleotide
  Sense strand starting at position 1360 of SEQ ID NO: 1884491
cuuacacugcuggauauaa

SEQ ID NO: 2269787 - RNA, 19 nt, Artificial Sequence
  Description of Artificial Sequence: Synthetic oligonucleotide
  Antisense strand to SEQ ID NO: 2269786
uuauauccagcaguguaag

SEQ ID NO: 2269788 - RNA, 19 nt, Artificial Sequence
  Description of Artificial Sequence: Synthetic oligonucleotide
  Sense strand starting at position 1387 of SEQ ID NO: 1884491
auaaauaguuaggcaguua

SEQ ID NO: 2269789 - RNA, 19 nt, Artificial Sequence
  Description of Artificial Sequence: Synthetic oligonucleotide
  Antisense strand to SEQ ID NO: 2269788
uaacugccuaacuauuuau

SEQ ID NO: 2269790 - RNA, 19 nt, Artificial Sequence
  Description of Artificial Sequence: Synthetic oligonucleotide
  Sense strand starting at position 1469 of SEQ ID NO: 1884491
gaggaagaauugcaacaaa

SEQ ID NO: 2269791 - RNA, 19 nt, Artificial Sequence
  Description of Artificial Sequence: Synthetic oligonucleotide
  Antisense strand to SEQ ID NO: 2269790
uuuguugcaauucuuccuc

SEQ ID NO: 2269792 - RNA, 19 nt, Artificial Sequence
  Description of Artificial Sequence: Synthetic oligonucleotide
  Sense strand starting at position 1502 of SEQ ID NO: 1884491
cccaaaucacggugaaauu

SEQ ID NO: 2269793 - RNA, 19 nt, Artificial Sequence
  Description of Artificial Sequence: Synthetic oligonucleotide
  Antisense strand to SEQ ID NO: 2269792
aauuucaccgugauuuggg

SEQ ID NO: 2269794 - RNA, 19 nt, Artificial Sequence
  Description of Artificial Sequence: Synthetic oligonucleotide
  Sense strand starting at position 1632 of SEQ ID NO: 1884491
acaguaaguuguuccaauc

SEQ ID NO: 2269795 - RNA, 19 nt, Artificial Sequence
  Description of Artificial Sequence: Synthetic oligonucleotide
  Antisense strand to SEQ ID NO: 2269794
gauuggaacaacuuacugu

SEQ ID NO: 2269796 - RNA, 19 nt, Artificial Sequence
  Description of Artificial Sequence: Synthetic oligonucleotide
  Sense strand starting at position 1686 of SEQ ID NO: 1884491
cuucuaauuugacagcaga

SEQ ID NO: 2269797 - RNA, 19 nt, Artificial Sequence
  Description of Artificial Sequence: Synthetic oligonucleotide
  Antisense strand to SEQ ID NO: 2269796
ucugcugucaaauuagaag

SEQ ID NO: 2269798 - RNA, 19 nt, Artificial Sequence
  Description of Artificial Sequence: Synthetic oligonucleotide
  Sense strand starting at position 1875 of SEQ ID NO: 1884491
gggauauugaauggcauau

SEQ ID NO: 2269799 - RNA, 19 nt, Artificial Sequence
  Description of Artificial Sequence: Synthetic oligonucleotide
  Antisense strand to SEQ ID NO: 2269798
auaugccauucaauauccc

SEQ ID NO: 2269800 - RNA, 19 nt, Artificial Sequence
  Description of Artificial Sequence: Synthetic oligonucleotide
  Sense strand starting at position 1910 of SEQ ID NO: 1884491
ccgugagauugccuaacag

SEQ ID NO: 2269801 - RNA, 19 nt, Artificial Sequence
  Description of Artificial Sequence: Synthetic oligonucleotide
  Antisense strand to SEQ ID NO: 2269800
cuguuaggcaaucucacgg

SEQ ID NO: 2269802 - RNA, 19 nt, Artificial Sequence
  Description of Artificial Sequence: Synthetic oligonucleotide
  Sense strand starting at position 2198 of SEQ ID NO: 1884491
ccacaaauccaguggacuu

SEQ ID NO: 2269803 - RNA, 19 nt, Artificial Sequence
  Description of Artificial Sequence: Synthetic oligonucleotide
  Antisense strand to SEQ ID NO: 2269802
aaguccacuggauuugugg

SEQ ID NO: 2269804 - RNA, 19 nt, Artificial Sequence
  Description of Artificial Sequence: Synthetic oligonucleotide
  Sense strand starting at position 2205 of SEQ ID NO: 1884491
uccaguggacuuuagguaa

SEQ ID NO: 2269805 - RNA, 19 nt, Artificial Sequence
  Description of Artificial Sequence: Synthetic oligonucleotide
  Antisense strand to SEQ ID NO: 2269804
uuaccuaaaguccacugga

SEQ ID NO: 2269806 - RNA, 19 nt, Artificial Sequence
  Description of Artificial Sequence: Synthetic oligonucleotide
  Sense strand starting at position 2209 of SEQ ID NO: 1884491
guggacuuuagguaaaccu

SEQ ID NO: 2269807 - RNA, 19 nt, Artificial Sequence
  Description of Artificial Sequence: Synthetic oligonucleotide
  Antisense strand to SEQ ID NO: 2269806
agguuuaccuaaaguccac

SEQ ID NO: 2269808 - RNA, 19 nt, Artificial Sequence
  Description of Artificial Sequence: Synthetic oligonucleotide
  Sense strand starting at position 2276 of SEQ ID NO: 1884491
cacauaaucugggcaaagu

SEQ ID NO: 2269809 - RNA, 19 nt, Artificial Sequence
  Description of Artificial Sequence: Synthetic oligonucleotide
  Antisense strand to SEQ ID NO: 2269808
acuuugcccagauuaugug

SEQ ID NO: 2269810 - RNA, 19 nt, Artificial Sequence
  Description of Artificial Sequence: Synthetic oligonucleotide
  Sense strand starting at position 2333 of SEQ ID NO: 1884491
uuuaaauuguaggcagaga

SEQ ID NO: 2269811 - RNA, 19 nt, Artificial Sequence
  Description of Artificial Sequence: Synthetic oligonucleotide
  Antisense strand to SEQ ID NO: 2269810
ucucugccuacaauuuaaa

SEQ ID NO: 2269812 - RNA, 19 nt, Artificial Sequence
  Description of Artificial Sequence: Synthetic oligonucleotide
  Sense strand starting at position 2462 of SEQ ID NO: 1884491
agaauaaacuuagcaagua

SEQ ID NO: 2269813 - RNA, 19 nt, Artificial Sequence
  Description of Artificial Sequence: Synthetic oligonucleotide
  Antisense strand to SEQ ID NO: 2269812
uacuugcuaaguuuauucu

SEQ ID NO: 2269814 - RNA, 19 nt, Artificial Sequence
  Description of Artificial Sequence: Synthetic oligonucleotide
  Sense strand starting at position 2551 of SEQ ID NO: 1884491
uaagauccaucuucgggaa

SEQ ID NO: 2269815 - RNA, 19 nt, Artificial Sequence
  Description of Artificial Sequence: Synthetic oligonucleotide
  Antisense strand to SEQ ID NO: 2269814
uucccgaagauggaucuua

SEQ ID NO: 2269816 - RNA, 19 nt, Artificial Sequence
  Description of Artificial Sequence: Synthetic oligonucleotide
  Sense strand starting at position 2552 of SEQ ID NO: 1884491
aagauccaucuucgggaaa

SEQ ID NO: 2269817 - RNA, 19 nt, Artificial Sequence
  Description of Artificial Sequence: Synthetic oligonucleotide
  Antisense strand to SEQ ID NO: 2269816
uuucccgaagauggaucuu

SEQ ID NO: 2269818 - RNA, 19 nt, Artificial Sequence
  Description of Artificial Sequence: Synthetic oligonucleotide
  Sense strand starting at position 2746 of SEQ ID NO: 1884491
ggaugaaucuguuucagag

SEQ ID NO: 2269819 - RNA, 19 nt, Artificial Sequence
  Description of Artificial Sequence: Synthetic oligonucleotide
  Antisense strand to SEQ ID NO: 2269818
cucugaaacagauucaucc

SEQ ID NO: 2269820 - RNA, 19 nt, Artificial Sequence
  Description of Artificial Sequence: Synthetic oligonucleotide
  Sense strand starting at position 3683 of SEQ ID NO: 1884491
ugagaaucuaguuguagcu

SEQ ID NO: 2269821 - RNA, 19 nt, Artificial Sequence
  Description of Artificial Sequence: Synthetic oligonucleotide
  Antisense strand to SEQ ID NO: 2269820
agcuacaacuagauucuca

SEQ ID NO: 2269822 - RNA, 19 nt, Artificial Sequence
  Description of Artificial Sequence: Synthetic oligonucleotide
  Sense strand starting at position 3925 of SEQ ID NO: 1884491
uguuaaauauugcuggaau

SEQ ID NO: 2269823 - RNA, 19 nt, Artificial Sequence
  Description of Artificial Sequence: Synthetic oligonucleotide
  Antisense strand to SEQ ID NO: 2269822
auuccagcaauauuuaaca

SEQ ID NO: 2269824 - RNA, 19 nt, Artificial Sequence
  Description of Artificial Sequence: Synthetic oligonucleotide
  Sense strand starting at position 3927 of SEQ ID NO: 1884491
uuaaauauugcuggaaugu

SEQ ID NO: 2269825 - RNA, 19 nt, Artificial Sequence
  Description of Artificial Sequence: Synthetic oligonucleotide
  Antisense strand to SEQ ID NO: 2269824
acauuccagcaauauuuaa

SEQ ID NO: 2269826 - RNA, 19 nt, Artificial Sequence
  Description of Artificial Sequence: Synthetic oligonucleotide
  Sense strand starting at position 3928 of SEQ ID NO: 1884491
uaaauauugcuggaaugug

SEQ ID NO: 2269827 - RNA, 19 nt, Artificial Sequence
  Description of Artificial Sequence: Synthetic oligonucleotide
  Antisense strand to SEQ ID NO: 2269826
cacauuccagcaauauuua

SEQ ID NO: 2269828 - RNA, 19 nt, Artificial Sequence
  Description of Artificial Sequence: Synthetic oligonucleotide
  Sense strand starting at position 4 of SEQ ID NO: 1884492
acggguaaaucacuaguaa

SEQ ID NO: 2269829 - RNA, 19 nt, Artificial Sequence
  Description of Artificial Sequence: Synthetic oligonucleotide
  Antisense strand to SEQ ID NO: 2269828
uuacuagugauuuacccgu

SEQ ID NO: 2269830 - RNA, 19 nt, Artificial Sequence
  Description of Artificial Sequence: Synthetic oligonucleotide
  Sense strand starting at position 5 of SEQ ID NO: 1884492
cggguaaaucacuaguaag

SEQ ID NO: 2269831 - RNA, 19 nt, Artificial Sequence
  Description of Artificial Sequence: Synthetic oligonucleotide
  Antisense strand to SEQ ID NO: 2269830
cuuacuagugauuuacccg

SEQ ID NO: 2269832 - RNA, 19 nt, Artificial Sequence
  Description of Artificial Sequence: Synthetic oligonucleotide
  Sense strand starting at position 19 of SEQ ID NO: 1884492
guaagaaacaugcagcaga

SEQ ID NO: 2269833 - RNA, 19 nt, Artificial Sequence
  Description of Artificial Sequence: Synthetic oligonucleotide
  Antisense strand to SEQ ID NO: 2269832
ucugcugcauguuucuuac

SEQ ID NO: 2269834 - RNA, 19 nt, Artificial Sequence
  Description of Artificial Sequence: Synthetic oligonucleotide
  Sense strand starting at position 68 of SEQ ID NO: 1884492
gcacuuggauagucaggaa

SEQ ID NO: 2269835 - RNA, 19 nt, Artificial Sequence
  Description of Artificial Sequence: Synthetic oligonucleotide
  Antisense strand to SEQ ID NO: 2269834
uuccugacuauccaagugc

SEQ ID NO: 2269836 - RNA, 19 nt, Artificial Sequence
  Description of Artificial Sequence: Synthetic oligonucleotide
  Sense strand starting at position 506 of SEQ ID NO: 1884492
ugaucaugugccugagaca

SEQ ID NO: 2269837 - RNA, 19 nt, Artificial Sequence
  Description of Artificial Sequence: Synthetic oligonucleotide
  Antisense strand to SEQ ID NO: 2269836
ugucucaggcacaugauca

SEQ ID NO: 2269838 - RNA, 19 nt, Artificial Sequence
  Description of Artificial Sequence: Synthetic oligonucleotide
  Sense strand starting at position 507 of SEQ ID NO: 1884492
gaucaugugccugagacau

SEQ ID NO: 2269839 - RNA, 19 nt, Artificial Sequence
  Description of Artificial Sequence: Synthetic oligonucleotide
  Antisense strand to SEQ ID NO: 2269838
augucucaggcacaugauc

SEQ ID NO: 2269840 - RNA, 19 nt, Artificial Sequence
  Description of Artificial Sequence: Synthetic oligonucleotide
  Sense strand starting at position 518 of SEQ ID NO: 1884492
ugagacauggugugacauu

SEQ ID NO: 2269841 - RNA, 19 nt, Artificial Sequence
  Description of Artificial Sequence: Synthetic oligonucleotide
  Antisense strand to SEQ ID NO: 2269840
aaugucacaccaugucuca

SEQ ID NO: 2269842 - RNA, 19 nt, Artificial Sequence
  Description of Artificial Sequence: Synthetic oligonucleotide
  Sense strand starting at position 528 of SEQ ID NO: 1884492
ugugacauuugcucuggca

SEQ ID NO: 2269843 - RNA, 19 nt, Artificial Sequence
  Description of Artificial Sequence: Synthetic oligonucleotide
  Antisense strand to SEQ ID NO: 2269842
ugccagagcaaaugucaca

SEQ ID NO: 2269844 - RNA, 19 nt, Artificial Sequence
  Description of Artificial Sequence: Synthetic oligonucleotide
  Sense strand starting at position 1035 of SEQ ID NO: 1884492
uagggcucauaaguaauau

SEQ ID NO: 2269845 - RNA, 19 nt, Artificial Sequence
  Description of Artificial Sequence: Synthetic oligonucleotide
  Antisense strand to SEQ ID NO: 2269844
auauuacuuaugagcccua

SEQ ID NO: 2269846 - RNA, 19 nt, Artificial Sequence
  Description of Artificial Sequence: Synthetic oligonucleotide
  Sense strand starting at position 1275 of SEQ ID NO: 1884492
cuucuaguuuggguuaaag

SEQ ID NO: 2269847 - RNA, 19 nt, Artificial Sequence
  Description of Artificial Sequence: Synthetic oligonucleotide
  Antisense strand to SEQ ID NO: 2269846
cuuuaacccaaacuagaag

SEQ ID NO: 2269848 - RNA, 19 nt, Artificial Sequence
  Description of Artificial Sequence: Synthetic oligonucleotide
  Sense strand starting at position 1277 of SEQ ID NO: 1884492
ucuaguuuggguuaaaguc

SEQ ID NO: 2269849 - RNA, 19 nt, Artificial Sequence
  Description of Artificial Sequence: Synthetic oligonucleotide
  Antisense strand to SEQ ID NO: 2269848
gacuuuaacccaaacuaga

SEQ ID NO: 2269850 - RNA, 19 nt, Artificial Sequence
  Description of Artificial Sequence: Synthetic oligonucleotide
  Sense strand starting at position 1840 of SEQ ID NO: 1884492
uuauaaugcuaggcaaaua

SEQ ID NO: 2269851 - RNA, 19 nt, Artificial Sequence
  Description of Artificial Sequence: Synthetic oligonucleotide
  Antisense strand to SEQ ID NO: 2269850
uauuugccuagcauuauaa

SEQ ID NO: 2269852 - RNA, 19 nt, Artificial Sequence
  Description of Artificial Sequence: Synthetic oligonucleotide
  Sense strand starting at position 1908 of SEQ ID NO: 1884492
ccagaaguguuaucuuaga

SEQ ID NO: 2269853 - RNA, 19 nt, Artificial Sequence
  Description of Artificial Sequence: Synthetic oligonucleotide
  Antisense strand to SEQ ID NO: 2269852
ucuaagauaacacuucugg

SEQ ID NO: 2269854 - RNA, 19 nt, Artificial Sequence
  Description of Artificial Sequence: Synthetic oligonucleotide
  Sense strand starting at position 1944 of SEQ ID NO: 1884492
agaaaucucucaguugagu

SEQ ID NO: 2269855 - RNA, 19 nt, Artificial Sequence
  Description of Artificial Sequence: Synthetic oligonucleotide
  Antisense strand to SEQ ID NO: 2269854
acucaacugagagauuucu

SEQ ID NO: 2269856 - RNA, 19 nt, Artificial Sequence
  Description of Artificial Sequence: Synthetic oligonucleotide
  Sense strand starting at position 2328 of SEQ ID NO: 1884492
ugggaaguccuguaucaca

SEQ ID NO: 2269857 - RNA, 19 nt, Artificial Sequence
  Description of Artificial Sequence: Synthetic oligonucleotide
  Antisense strand to SEQ ID NO: 2269856
ugugauacaggacuuccca

SEQ ID NO: 2269858 - RNA, 19 nt, Artificial Sequence
  Description of Artificial Sequence: Synthetic oligonucleotide
  Sense strand starting at position 2381 of SEQ ID NO: 1884492
gggcuguuccgagagguaa

SEQ ID NO: 2269859 - RNA, 19 nt, Artificial Sequence
  Description of Artificial Sequence: Synthetic oligonucleotide
  Antisense strand to SEQ ID NO: 2269858
uuaccucucggaacagccc

SEQ ID NO: 2269860 - RNA, 19 nt, Artificial Sequence
  Description of Artificial Sequence: Synthetic oligonucleotide
  Sense strand starting at position 2488 of SEQ ID NO: 1884492
ucuagagcucuggacacau

SEQ ID NO: 2269861 - RNA, 19 nt, Artificial Sequence
  Description of Artificial Sequence: Synthetic oligonucleotide
  Antisense strand to SEQ ID NO: 2269860
auguguccagagcucuaga

SEQ ID NO: 2269862 - RNA, 19 nt, Artificial Sequence
  Description of Artificial Sequence: Synthetic oligonucleotide
  Sense strand starting at position 2546 of SEQ ID NO: 1884492
auaguaucuuucuccagag

SEQ ID NO: 2269863 - RNA, 19 nt, Artificial Sequence
  Description of Artificial Sequence: Synthetic oligonucleotide
  Antisense strand to SEQ ID NO: 2269862
cucuggagaaagauacuau

SEQ ID NO: 2269864 - RNA, 19 nt, Artificial Sequence
  Description of Artificial Sequence: Synthetic oligonucleotide
  Sense strand starting at position 2627 of SEQ ID NO: 1884492
cuccucauuugagugucau

SEQ ID NO: 2269865 - RNA, 19 nt, Artificial Sequence
  Description of Artificial Sequence: Synthetic oligonucleotide
  Antisense strand to SEQ ID NO: 2269864
augacacucaaaugaggag

SEQ ID NO: 2269866 - RNA, 19 nt, Artificial Sequence
  Description of Artificial Sequence: Synthetic oligonucleotide
  Sense strand starting at position 2826 of SEQ ID NO: 1884492
cagaaagguaguggaguuu

SEQ ID NO: 2269867 - RNA, 19 nt, Artificial Sequence
  Description of Artificial Sequence: Synthetic oligonucleotide
  Antisense strand to SEQ ID NO: 2269866
aaacuccacuaccuuucug

SEQ ID NO: 2269868 - RNA, 19 nt, Artificial Sequence
  Description of Artificial Sequence: Synthetic oligonucleotide
  Sense strand starting at position 2832 of SEQ ID NO: 1884492
gguaguggaguuuaauaga

SEQ ID NO: 2269869 - RNA, 19 nt, Artificial Sequence
  Description of Artificial Sequence: Synthetic oligonucleotide
  Antisense strand to SEQ ID NO: 2269868
ucuauuaaacuccacuacc

SEQ ID NO: 2269870 - RNA, 19 nt, Artificial Sequence
  Description of Artificial Sequence: Synthetic oligonucleotide
  Sense strand starting at position 2845 of SEQ ID NO: 1884492
aauagaguccaguggaaau

SEQ ID NO: 2269871 - RNA, 19 nt, Artificial Sequence
  Description of Artificial Sequence: Synthetic oligonucleotide
  Antisense strand to SEQ ID NO: 2269870
auuuccacuggacucuauu

SEQ ID NO: 2269872 - RNA, 19 nt, Artificial Sequence
  Description of Artificial Sequence: Synthetic oligonucleotide
  Sense strand starting at position 2855 of SEQ ID NO: 1884492
aguggaaauuggucugaga

SEQ ID NO: 2269873 - RNA, 19 nt, Artificial Sequence
  Description of Artificial Sequence: Synthetic oligonucleotide
  Antisense strand to SEQ ID NO: 2269872
ucucagaccaauuuccacu

SEQ ID NO: 2269874 - RNA, 19 nt, Artificial Sequence
  Description of Artificial Sequence: Synthetic oligonucleotide
  Sense strand starting at position 2857 of SEQ ID NO: 1884492
uggaaauuggucugagauu

SEQ ID NO: 2269875 - RNA, 19 nt, Artificial Sequence
  Description of Artificial Sequence: Synthetic oligonucleotide
  Antisense strand to SEQ ID NO: 2269874
aaucucagaccaauuucca

SEQ ID NO: 2269876 - RNA, 19 nt, Artificial Sequence
  Description of Artificial Sequence: Synthetic oligonucleotide
  Sense strand starting at position 2858 of SEQ ID NO: 1884492
ggaaauuggucugagauuu

SEQ ID NO: 2269877 - RNA, 19 nt, Artificial Sequence
  Description of Artificial Sequence: Synthetic oligonucleotide
  Antisense strand to SEQ ID NO: 2269876
aaaucucagaccaauuucc

SEQ ID NO: 2269878 - RNA, 19 nt, Artificial Sequence
  Description of Artificial Sequence: Synthetic oligonucleotide
  Sense strand starting at position 2904 of SEQ ID NO: 1884492
ccaggacugcuggaagagu

SEQ ID NO: 2269879 - RNA, 19 nt, Artificial Sequence
  Description of Artificial Sequence: Synthetic oligonucleotide
  Antisense strand to SEQ ID NO: 2269878
acucuuccagcaguccugg

SEQ ID NO: 2269880 - RNA, 19 nt, Artificial Sequence
  Description of Artificial Sequence: Synthetic oligonucleotide
  Sense strand starting at position 3100 of SEQ ID NO: 1884492
augaaauaauacgucacaa

SEQ ID NO: 2269881 - RNA, 19 nt, Artificial Sequence
  Description of Artificial Sequence: Synthetic oligonucleotide
  Antisense strand to SEQ ID NO: 2269880
uugugacguauuauuucau

SEQ ID NO: 2269882 - RNA, 19 nt, Artificial Sequence
  Description of Artificial Sequence: Synthetic oligonucleotide
  Sense strand starting at position 3167 of SEQ ID NO: 1884492
gaaaguuucuuuguuugga

SEQ ID NO: 2269883 - RNA, 19 nt, Artificial Sequence
  Description of Artificial Sequence: Synthetic oligonucleotide
  Antisense strand to SEQ ID NO: 2269882
uccaaacaaagaaacuuuc

SEQ ID NO: 2269884 - RNA, 19 nt, Artificial Sequence
  Description of Artificial Sequence: Synthetic oligonucleotide
  Sense strand starting at position 3180 of SEQ ID NO: 1884492
uuuggauuccaguaacugu

SEQ ID NO: 2269885 - RNA, 19 nt, Artificial Sequence
  Description of Artificial Sequence: Synthetic oligonucleotide
  Antisense strand to SEQ ID NO: 2269884
acaguuacuggaauccaaa

SEQ ID NO: 2269886 - RNA, 19 nt, Artificial Sequence
  Description of Artificial Sequence: Synthetic oligonucleotide
  Sense strand starting at position 3190 of SEQ ID NO: 1884492
aguaacugugcugauaaau

SEQ ID NO: 2269887 - RNA, 19 nt, Artificial Sequence
  Description of Artificial Sequence: Synthetic oligonucleotide
  Antisense strand to SEQ ID NO: 2269886
auuuaucagcacaguuacu

SEQ ID NO: 2269888 - RNA, 19 nt, Artificial Sequence
  Description of Artificial Sequence: Synthetic oligonucleotide
  Sense strand starting at position 3250 of SEQ ID NO: 1884492
uugacaucaugaccaguuu

SEQ ID NO: 2269889 - RNA, 19 nt, Artificial Sequence
  Description of Artificial Sequence: Synthetic oligonucleotide
  Antisense strand to SEQ ID NO: 2269888
aaacuggucaugaugucaa

SEQ ID NO: 2269890 - RNA, 19 nt, Artificial Sequence
  Description of Artificial Sequence: Synthetic oligonucleotide
  Sense strand starting at position 3313 of SEQ ID NO: 1884492
agcauacuguucucacaga

SEQ ID NO: 2269891 - RNA, 19 nt, Artificial Sequence
  Description of Artificial Sequence: Synthetic oligonucleotide
  Antisense strand to SEQ ID NO: 2269890
ucugugagaacaguaugcu

SEQ ID NO: 2269892 - RNA, 19 nt, Artificial Sequence
  Description of Artificial Sequence: Synthetic oligonucleotide
  Sense strand starting at position 3381 of SEQ ID NO: 1884492
gaggaugaucagugagugu

SEQ ID NO: 2269893 - RNA, 19 nt, Artificial Sequence
  Description of Artificial Sequence: Synthetic oligonucleotide
  Antisense strand to SEQ ID NO: 2269892
acacucacugaucauccuc

SEQ ID NO: 2269894 - RNA, 19 nt, Artificial Sequence
  Description of Artificial Sequence: Synthetic oligonucleotide
  Sense strand starting at position 3489 of SEQ ID NO: 1884492
uuacuagugcauuggaaau

SEQ ID NO: 2269895 - RNA, 19 nt, Artificial Sequence
  Description of Artificial Sequence: Synthetic oligonucleotide
  Antisense strand to SEQ ID NO: 2269894
auuuccaaugcacuaguaa

SEQ ID NO: 2269896 - RNA, 19 nt, Artificial Sequence
  Description of Artificial Sequence: Synthetic oligonucleotide
  Sense strand starting at position 3495 of SEQ ID NO: 1884492
gugcauuggaaaugauacu

SEQ ID NO: 2269897 - RNA, 19 nt, Artificial Sequence
  Description of Artificial Sequence: Synthetic oligonucleotide
  Antisense strand to SEQ ID NO: 2269896
aguaucauuuccaaugcac

SEQ ID NO: 2269898 - RNA, 19 nt, Artificial Sequence
  Description of Artificial Sequence: Synthetic oligonucleotide
  Sense strand starting at position 3688 of SEQ ID NO: 1884492
aaaguaugucaaugaugau

SEQ ID NO: 2269899 - RNA, 19 nt, Artificial Sequence
  Description of Artificial Sequence: Synthetic oligonucleotide
  Antisense strand to SEQ ID NO: 2269898
aucaucauugacauacuuu

SEQ ID NO: 2269900 - RNA, 19 nt, Artificial Sequence
  Description of Artificial Sequence: Synthetic oligonucleotide
  Sense strand starting at position 3702 of SEQ ID NO: 1884492
augauauugcuaugaacca

SEQ ID NO: 2269901 - RNA, 19 nt, Artificial Sequence
  Description of Artificial Sequence: Synthetic oligonucleotide
  Antisense strand to SEQ ID NO: 2269900
ugguucauagcaauaucau

SEQ ID NO: 2269902 - RNA, 19 nt, Artificial Sequence
  Description of Artificial Sequence: Synthetic oligonucleotide
  Sense strand starting at position 3775 of SEQ ID NO: 1884492
ggguuaaacugcccugaag

SEQ ID NO: 2269903 - RNA, 19 nt, Artificial Sequence
  Description of Artificial Sequence: Synthetic oligonucleotide
  Antisense strand to SEQ ID NO: 2269902
cuucagggcaguuuaaccc

SEQ ID NO: 2269904 - RNA, 19 nt, Artificial Sequence
  Description of Artificial Sequence: Synthetic oligonucleotide
  Sense strand starting at position 3777 of SEQ ID NO: 1884492
guuaaacugcccugaagau

SEQ ID NO: 2269905 - RNA, 19 nt, Artificial Sequence
  Description of Artificial Sequence: Synthetic oligonucleotide
  Antisense strand to SEQ ID NO: 2269904
aucuucagggcaguuuaac

SEQ ID NO: 2269906 - RNA, 19 nt, Artificial Sequence
  Description of Artificial Sequence: Synthetic oligonucleotide
  Sense strand starting at position 3938 of SEQ ID NO: 1884492
ugagaaccuuuagugacaa

SEQ ID NO: 2269907 - RNA, 19 nt, Artificial Sequence
  Description of Artificial Sequence: Synthetic oligonucleotide
  Antisense strand to SEQ ID NO: 2269906
uugucacuaaagguucuca

SEQ ID NO: 2269908 - RNA, 19 nt, Artificial Sequence
  Description of Artificial Sequence: Synthetic oligonucleotide
  Sense strand starting at position 363 of SEQ ID NO: 1884493
ccgacagcaucauguacua

SEQ ID NO: 2269909 - RNA, 19 nt, Artificial Sequence
  Description of Artificial Sequence: Synthetic oligonucleotide
  Antisense strand to SEQ ID NO: 2269908
uaguacaugaugcugucgg

SEQ ID NO: 2269910 - RNA, 19 nt, Artificial Sequence
  Description of Artificial Sequence: Synthetic oligonucleotide
  Sense strand starting at position 494 of SEQ ID NO: 1884493
ggugaacccugacuucuaa

SEQ ID NO: 2269911 - RNA, 19 nt, Artificial Sequence
  Description of Artificial Sequence: Synthetic oligonucleotide
  Antisense strand to SEQ ID NO: 2269910
uuagaagucaggguucacc

SEQ ID NO: 2269912 - RNA, 19 nt, Artificial Sequence
  Description of Artificial Sequence: Synthetic oligonucleotide
  Sense strand starting at position 2585 of SEQ ID NO: 1884493
ggguguuccaguugcauuc

SEQ ID NO: 2269913 - RNA, 19 nt, Artificial Sequence
  Description of Artificial Sequence: Synthetic oligonucleotide
  Antisense strand to SEQ ID NO: 2269912
gaaugcaacuggaacaccc

SEQ ID NO: 2269914 - RNA, 19 nt, Artificial Sequence
  Description of Artificial Sequence: Synthetic oligonucleotide
  Sense strand starting at position 2592 of SEQ ID NO: 1884493
ccaguugcauucugguaca

SEQ ID NO: 2269915 - RNA, 19 nt, Artificial Sequence
  Description of Artificial Sequence: Synthetic oligonucleotide
  Antisense strand to SEQ ID NO: 2269914
uguaccagaaugcaacugg

SEQ ID NO: 2269916 - RNA, 19 nt, Artificial Sequence
  Description of Artificial Sequence: Synthetic oligonucleotide
  Sense strand starting at position 2595 of SEQ ID NO: 1884493
guugcauucugguacacac

SEQ ID NO: 2269917 - RNA, 19 nt, Artificial Sequence
  Description of Artificial Sequence: Synthetic oligonucleotide
  Antisense strand to SEQ ID NO: 2269916
guguguaccagaaugcaac

SEQ ID NO: 2269918 - RNA, 19 nt, Artificial Sequence
  Description of Artificial Sequence: Synthetic oligonucleotide
  Sense strand starting at position 2700 of SEQ ID NO: 1884493
ucaucagagugaccacuua

SEQ ID NO: 2269919 - RNA, 19 nt, Artificial Sequence
  Description of Artificial Sequence: Synthetic oligonucleotide
  Antisense strand to SEQ ID NO: 2269918
uaaguggucacucugauga

SEQ ID NO: 2269920 - RNA, 19 nt, Artificial Sequence
  Description of Artificial Sequence: Synthetic oligonucleotide
  Sense strand starting at position 2770 of SEQ ID NO: 1884493
uugaaaguguggccugagu

SEQ ID NO: 2269921 - RNA, 19 nt, Artificial Sequence
  Description of Artificial Sequence: Synthetic oligonucleotide
  Antisense strand to SEQ ID NO: 2269920
acucaggccacacuuucaa

SEQ ID NO: 2269922 - RNA, 19 nt, Artificial Sequence
  Description of Artificial Sequence: Synthetic oligonucleotide
  Sense strand starting at position 2772 of SEQ ID NO: 1884493
gaaaguguggccugaguuc

SEQ ID NO: 2269923 - RNA, 19 nt, Artificial Sequence
  Description of Artificial Sequence: Synthetic oligonucleotide
  Antisense strand to SEQ ID NO: 2269922
gaacucaggccacacuuuc

SEQ ID NO: 2269924 - RNA, 19 nt, Artificial Sequence
  Description of Artificial Sequence: Synthetic oligonucleotide
  Sense strand starting at position 2789 of SEQ ID NO: 1884493
ucacgcuuagcuuaugaga

SEQ ID NO: 2269925 - RNA, 19 nt, Artificial Sequence
  Description of Artificial Sequence: Synthetic oligonucleotide
  Antisense strand to SEQ ID NO: 2269924
ucucauaagcuaagcguga

SEQ ID NO: 2269926 - RNA, 19 nt, Artificial Sequence
  Description of Artificial Sequence: Synthetic oligonucleotide
  Sense strand starting at position 2791 of SEQ ID NO: 1884493
acgcuuagcuuaugagaau

SEQ ID NO: 2269927 - RNA, 19 nt, Artificial Sequence
  Description of Artificial Sequence: Synthetic oligonucleotide
  Antisense strand to SEQ ID NO: 2269926
auucucauaagcuaagcgu

SEQ ID NO: 2269928 - RNA, 19 nt, Artificial Sequence
  Description of Artificial Sequence: Synthetic oligonucleotide
  Sense strand starting at position 2792 of SEQ ID NO: 1884493
cgcuuagcuuaugagaauc

SEQ ID NO: 2269929 - RNA, 19 nt, Artificial Sequence
  Description of Artificial Sequence: Synthetic oligonucleotide
  Antisense strand to SEQ ID NO: 2269928
gauucucauaagcuaagcg

SEQ ID NO: 2269930 - RNA, 19 nt, Artificial Sequence
  Description of Artificial Sequence: Synthetic oligonucleotide
  Sense strand starting at position 2812 of SEQ ID NO: 1884493
aacucuauccgcugaggaa

SEQ ID NO: 2269931 - RNA, 19 nt, Artificial Sequence
  Description of Artificial Sequence: Synthetic oligonucleotide
  Antisense strand to SEQ ID NO: 2269930
uuccucagcggauagaguu

SEQ ID NO: 2269932 - RNA, 19 nt, Artificial Sequence
  Description of Artificial Sequence: Synthetic oligonucleotide
  Sense strand starting at position 2813 of SEQ ID NO: 1884493
acucuauccgcugaggaaa

SEQ ID NO: 2269933 - RNA, 19 nt, Artificial Sequence
  Description of Artificial Sequence: Synthetic oligonucleotide
  Antisense strand to SEQ ID NO: 2269932
uuuccucagcggauagagu

SEQ ID NO: 2269934 - RNA, 19 nt, Artificial Sequence
  Description of Artificial Sequence: Synthetic oligonucleotide
  Sense strand starting at position 2911 of SEQ ID NO: 1884493
agaguuaauucuuugcuuu

SEQ ID NO: 2269935 - RNA, 19 nt, Artificial Sequence
  Description of Artificial Sequence: Synthetic oligonucleotide
  Antisense strand to SEQ ID NO: 2269934
aaagcaaagaauuaacucu

SEQ ID NO: 2269936 - RNA, 19 nt, Artificial Sequence
  Description of Artificial Sequence: Synthetic oligonucleotide
  Sense strand starting at position 2937 of SEQ ID NO: 1884493
gauccauguccuggcaauu

SEQ ID NO: 2269937 - RNA, 19 nt, Artificial Sequence
  Description of Artificial Sequence: Synthetic oligonucleotide
  Antisense strand to SEQ ID NO: 2269936
aauugccaggacauggauc

SEQ ID NO: 2269938 - RNA, 19 nt, Artificial Sequence
  Description of Artificial Sequence: Synthetic oligonucleotide
  Sense strand starting at position 3285 of SEQ ID NO: 1884493
aauuaauuaucugggagug

SEQ ID NO: 2269939 - RNA, 19 nt, Artificial Sequence
  Description of Artificial Sequence: Synthetic oligonucleotide
  Antisense strand to SEQ ID NO: 2269938
cacucccagauaauuaauu

SEQ ID NO: 2269940 - RNA, 19 nt, Artificial Sequence
  Description of Artificial Sequence: Synthetic oligonucleotide
  Sense strand starting at position 3287 of SEQ ID NO: 1884493
uuaauuaucugggaguggu

SEQ ID NO: 2269941 - RNA, 19 nt, Artificial Sequence
  Description of Artificial Sequence: Synthetic oligonucleotide
  Antisense strand to SEQ ID NO: 2269940
accacucccagauaauuaa

SEQ ID NO: 2269942 - RNA, 19 nt, Artificial Sequence
  Description of Artificial Sequence: Synthetic oligonucleotide
  Sense strand starting at position 3488 of SEQ ID NO: 1884493
ugugucaucuucuccuaaa

SEQ ID NO: 2269943 - RNA, 19 nt, Artificial Sequence
  Description of Artificial Sequence: Synthetic oligonucleotide
  Antisense strand to SEQ ID NO: 2269942
uuuaggagaagaugacaca

SEQ ID NO: 2269944 - RNA, 19 nt, Artificial Sequence
  Description of Artificial Sequence: Synthetic oligonucleotide
  Sense strand starting at position 3519 of SEQ ID NO: 1884493
agauccguaccuggaauau

SEQ ID NO: 2269945 - RNA, 19 nt, Artificial Sequence
  Description of Artificial Sequence: Synthetic oligonucleotide
  Antisense strand to SEQ ID NO: 2269944
auauuccagguacggaucu

SEQ ID NO: 2269946 - RNA, 19 nt, Artificial Sequence
  Description of Artificial Sequence: Synthetic oligonucleotide
  Sense strand starting at position 3614 of SEQ ID NO: 1884493
uaucaugagggcugugaga

SEQ ID NO: 2269947 - RNA, 19 nt, Artificial Sequence
  Description of Artificial Sequence: Synthetic oligonucleotide
  Antisense strand to SEQ ID NO: 2269946
ucucacagcccucaugaua

SEQ ID NO: 2269948 - RNA, 19 nt, Artificial Sequence
  Description of Artificial Sequence: Synthetic oligonucleotide
  Sense strand starting at position 3616 of SEQ ID NO: 1884493
ucaugagggcugugagaca

SEQ ID NO: 2269949 - RNA, 19 nt, Artificial Sequence
  Description of Artificial Sequence: Synthetic oligonucleotide
  Antisense strand to SEQ ID NO: 2269948
ugucucacagcccucauga

SEQ ID NO: 2269950 - RNA, 19 nt, Artificial Sequence
  Description of Artificial Sequence: Synthetic oligonucleotide
  Sense strand starting at position 3658 of SEQ ID NO: 1884493
agcacagaguugucaauuc

SEQ ID NO: 2269951 - RNA, 19 nt, Artificial Sequence
  Description of Artificial Sequence: Synthetic oligonucleotide
  Antisense strand to SEQ ID NO: 2269950
gaauugacaacucugugcu

SEQ ID NO: 2269952 - RNA, 19 nt, Artificial Sequence
  Description of Artificial Sequence: Synthetic oligonucleotide
  Sense strand starting at position 3668 of SEQ ID NO: 1884493
ugucaauucuaagagcuuc

SEQ ID NO: 2269953 - RNA, 19 nt, Artificial Sequence
  Description of Artificial Sequence: Synthetic oligonucleotide
  Antisense strand to SEQ ID NO: 2269952
gaagcucuuagaauugaca

SEQ ID NO: 2269954 - RNA, 19 nt, Artificial Sequence
  Description of Artificial Sequence: Synthetic oligonucleotide
  Sense strand starting at position 3706 of SEQ ID NO: 1884493
ccauacuuggucugucuau

SEQ ID NO: 2269955 - RNA, 19 nt, Artificial Sequence
  Description of Artificial Sequence: Synthetic oligonucleotide
  Antisense strand to SEQ ID NO: 2269954
auagacagaccaaguaugg

SEQ ID NO: 2269956 - RNA, 19 nt, Artificial Sequence
  Description of Artificial Sequence: Synthetic oligonucleotide
  Sense strand starting at position 3713 of SEQ ID NO: 1884493
uggucugucuauuaaacaa

SEQ ID NO: 2269957 - RNA, 19 nt, Artificial Sequence
  Description of Artificial Sequence: Synthetic oligonucleotide
  Antisense strand to SEQ ID NO: 2269956
uuguuuaauagacagacca

SEQ ID NO: 2269958 - RNA, 19 nt, Artificial Sequence
  Description of Artificial Sequence: Synthetic oligonucleotide
  Sense strand starting at position 3797 of SEQ ID NO: 1884493
aggagaugcuguccacaga

SEQ ID NO: 2269959 - RNA, 19 nt, Artificial Sequence
  Description of Artificial Sequence: Synthetic oligonucleotide
  Antisense strand to SEQ ID NO: 2269958
ucuguggacagcaucuccu

SEQ ID NO: 2269960 - RNA, 19 nt, Artificial Sequence
  Description of Artificial Sequence: Synthetic oligonucleotide
  Sense strand starting at position 3882 of SEQ ID NO: 1884493
gguagaagcuugccaugua

SEQ ID NO: 2269961 - RNA, 19 nt, Artificial Sequence
  Description of Artificial Sequence: Synthetic oligonucleotide
  Antisense strand to SEQ ID NO: 2269960
uacauggcaagcuucuacc

SEQ ID NO: 2269962 - RNA, 19 nt, Artificial Sequence
  Description of Artificial Sequence: Synthetic oligonucleotide
  Sense strand starting at position 3885 of SEQ ID NO: 1884493
agaagcuugccauguagac

SEQ ID NO: 2269963 - RNA, 19 nt, Artificial Sequence
  Description of Artificial Sequence: Synthetic oligonucleotide
  Antisense strand to SEQ ID NO: 2269962
gucuacauggcaagcuucu

SEQ ID NO: 2269964 - RNA, 19 nt, Artificial Sequence
  Description of Artificial Sequence: Synthetic oligonucleotide
  Sense strand starting at position 3897 of SEQ ID NO: 1884493
uguagacugcuguagagaa

SEQ ID NO: 2269965 - RNA, 19 nt, Artificial Sequence
  Description of Artificial Sequence: Synthetic oligonucleotide
  Antisense strand to SEQ ID NO: 2269964
uucucuacagcagucuaca

SEQ ID NO: 2269966 - RNA, 19 nt, Artificial Sequence
  Description of Artificial Sequence: Synthetic oligonucleotide
  Sense strand starting at position 3901 of SEQ ID NO: 1884493
gacugcuguagagaaugua

SEQ ID NO: 2269967 - RNA, 19 nt, Artificial Sequence
  Description of Artificial Sequence: Synthetic oligonucleotide
  Antisense strand to SEQ ID NO: 2269966
uacauucucuacagcaguc

SEQ ID NO: 2269968 - RNA, 19 nt, Artificial Sequence
  Description of Artificial Sequence: Synthetic oligonucleotide
  Sense strand starting at position 3909 of SEQ ID NO: 1884493
uagagaauguacuccaggu

SEQ ID NO: 2269969 - RNA, 19 nt, Artificial Sequence
  Description of Artificial Sequence: Synthetic oligonucleotide
  Antisense strand to SEQ ID NO: 2269968
accuggaguacauucucua

SEQ ID NO: 2269970 - RNA, 19 nt, Artificial Sequence
  Description of Artificial Sequence: Synthetic oligonucleotide
  Sense strand starting at position 3913 of SEQ ID NO: 1884493
gaauguacuccagguagca

SEQ ID NO: 2269971 - RNA, 19 nt, Artificial Sequence
  Description of Artificial Sequence: Synthetic oligonucleotide
  Antisense strand to SEQ ID NO: 2269970
ugcuaccuggaguacauuc

SEQ ID NO: 2269972 - RNA, 19 nt, Artificial Sequence
  Description of Artificial Sequence: Synthetic oligonucleotide
  Sense strand starting at position 3955 of SEQ ID NO: 1884493
gagguauauucuggaaccu

SEQ ID NO: 2269973 - RNA, 19 nt, Artificial Sequence
  Description of Artificial Sequence: Synthetic oligonucleotide
  Antisense strand to SEQ ID NO: 2269972
agguuccagaauauaccuc

SEQ ID NO: 2269974 - RNA, 19 nt, Artificial Sequence
  Description of Artificial Sequence: Synthetic oligonucleotide
  Sense strand starting at position 3972 of SEQ ID NO: 1884493
cucugagcaguucgaucau

SEQ ID NO: 2269975 - RNA, 19 nt, Artificial Sequence
  Description of Artificial Sequence: Synthetic oligonucleotide
  Antisense strand to SEQ ID NO: 2269974
augaucgaacugcucagag

SEQ ID NO: 2269976 - RNA, 19 nt, Artificial Sequence
  Description of Artificial Sequence: Synthetic oligonucleotide
  Sense strand starting at position 110 of SEQ ID NO: 1884494
uuaaaugccugggugauca

SEQ ID NO: 2269977 - RNA, 19 nt, Artificial Sequence
  Description of Artificial Sequence: Synthetic oligonucleotide
  Antisense strand to SEQ ID NO: 2269976
ugaucacccaggcauuuaa

SEQ ID NO: 2269978 - RNA, 19 nt, Artificial Sequence
  Description of Artificial Sequence: Synthetic oligonucleotide
  Sense strand starting at position 136 of SEQ ID NO: 1884494
gauagcaaccucggaacau

SEQ ID NO: 2269979 - RNA, 19 nt, Artificial Sequence
  Description of Artificial Sequence: Synthetic oligonucleotide
  Antisense strand to SEQ ID NO: 2269978
auguuccgagguugcuauc

SEQ ID NO: 2269980 - RNA, 19 nt, Artificial Sequence
  Description of Artificial Sequence: Synthetic oligonucleotide
  Sense strand starting at position 182 of SEQ ID NO: 1884494
accugagagugccuugaaa

SEQ ID NO: 2269981 - RNA, 19 nt, Artificial Sequence
  Description of Artificial Sequence: Synthetic oligonucleotide
  Antisense strand to SEQ ID NO: 2269980
uuucaaggcacucucaggu

SEQ ID NO: 2269982 - RNA, 19 nt, Artificial Sequence
  Description of Artificial Sequence: Synthetic oligonucleotide
  Sense strand starting at position 184 of SEQ ID NO: 1884494
cugagagugccuugaaaua

SEQ ID NO: 2269983 - RNA, 19 nt, Artificial Sequence
  Description of Artificial Sequence: Synthetic oligonucleotide
  Antisense strand to SEQ ID NO: 2269982
uauuucaaggcacucucag

SEQ ID NO: 2269984 - RNA, 19 nt, Artificial Sequence
  Description of Artificial Sequence: Synthetic oligonucleotide
  Sense strand starting at position 277 of SEQ ID NO: 1884494
uuuauugauccauguauac

SEQ ID NO: 2269985 - RNA, 19 nt, Artificial Sequence
  Description of Artificial Sequence: Synthetic oligonucleotide
  Antisense strand to SEQ ID NO: 2269984
guauacauggaucaauaaa

SEQ ID NO: 2269986 - RNA, 19 nt, Artificial Sequence
  Description of Artificial Sequence: Synthetic oligonucleotide
  Sense strand starting at position 384 of SEQ ID NO: 1884494
agauucguaaguuaaauag

SEQ ID NO: 2269987 - RNA, 19 nt, Artificial Sequence
  Description of Artificial Sequence: Synthetic oligonucleotide
  Antisense strand to SEQ ID NO: 2269986
cuauuuaacuuacgaaucu

SEQ ID NO: 2269988 - RNA, 19 nt, Artificial Sequence
  Description of Artificial Sequence: Synthetic oligonucleotide
  Sense strand starting at position 483 of SEQ ID NO: 1884494
uaacgaugacucgacaauc

SEQ ID NO: 2269989 - RNA, 19 nt, Artificial Sequence
  Description of Artificial Sequence: Synthetic oligonucleotide
  Antisense strand to SEQ ID NO: 2269988
gauugucgagucaucguua

SEQ ID NO: 2269990 - RNA, 19 nt, Artificial Sequence
  Description of Artificial Sequence: Synthetic oligonucleotide
  Sense strand starting at position 522 of SEQ ID NO: 1884494
gcacauucggacuaucaaa

SEQ ID NO: 2269991 - RNA, 19 nt, Artificial Sequence
  Description of Artificial Sequence: Synthetic oligonucleotide
  Antisense strand to SEQ ID NO: 2269990
uuugauaguccgaaugugc

SEQ ID NO: 2269992 - RNA, 19 nt, Artificial Sequence
  Description of Artificial Sequence: Synthetic oligonucleotide
  Sense strand starting at position 595 of SEQ ID NO: 1884494
ggugcaaucguugcauagu

SEQ ID NO: 2269993 - RNA, 19 nt, Artificial Sequence
  Description of Artificial Sequence: Synthetic oligonucleotide
  Antisense strand to SEQ ID NO: 2269992
acuaugcaacgauugcacc

SEQ ID NO: 2269994 - RNA, 19 nt, Artificial Sequence
  Description of Artificial Sequence: Synthetic oligonucleotide
  Sense strand starting at position 838 of SEQ ID NO: 1884494
aagagaaauguuggcccaa

SEQ ID NO: 2269995 - RNA, 19 nt, Artificial Sequence
  Description of Artificial Sequence: Synthetic oligonucleotide
  Antisense strand to SEQ ID NO: 2269994
uugggccaacauuucucuu

SEQ ID NO: 2269996 - RNA, 19 nt, Artificial Sequence
  Description of Artificial Sequence: Synthetic oligonucleotide
  Sense strand starting at position 839 of SEQ ID NO: 1884494
agagaaauguuggcccaau

SEQ ID NO: 2269997 - RNA, 19 nt, Artificial Sequence
  Description of Artificial Sequence: Synthetic oligonucleotide
  Antisense strand to SEQ ID NO: 2269996
auugggccaacauuucucu

SEQ ID NO: 2269998 - RNA, 19 nt, Artificial Sequence
  Description of Artificial Sequence: Synthetic oligonucleotide
  Sense strand starting at position 840 of SEQ ID NO: 1884494
gagaaauguuggcccaaua

SEQ ID NO: 2269999 - RNA, 19 nt, Artificial Sequence
  Description of Artificial Sequence: Synthetic oligonucleotide
  Antisense strand to SEQ ID NO: 2269998
uauugggccaacauuucuc

SEQ ID NO: 2270000 - RNA, 19 nt, Artificial Sequence
  Description of Artificial Sequence: Synthetic oligonucleotide
  Sense strand starting at position 942 of SEQ ID NO: 1884494
acgagacagcccuaaauca

SEQ ID NO: 2270001 - RNA, 19 nt, Artificial Sequence
  Description of Artificial Sequence: Synthetic oligonucleotide
  Antisense strand to SEQ ID NO: 2270000
ugauuuagggcugucucgu

SEQ ID NO: 2270002 - RNA, 19 nt, Artificial Sequence
  Description of Artificial Sequence: Synthetic oligonucleotide
  Sense strand starting at position 950 of SEQ ID NO: 1884494
gcccuaaaucacugaaaug

SEQ ID NO: 2270003 - RNA, 19 nt, Artificial Sequence
  Description of Artificial Sequence: Synthetic oligonucleotide
  Antisense strand to SEQ ID NO: 2270002
cauuucagugauuuagggc

SEQ ID NO: 2270004 - RNA, 19 nt, Artificial Sequence
  Description of Artificial Sequence: Synthetic oligonucleotide
  Sense strand starting at position 1422 of SEQ ID NO: 1884494
ccuuuaucugcgucuguau

SEQ ID NO: 2270005 - RNA, 19 nt, Artificial Sequence
  Description of Artificial Sequence: Synthetic oligonucleotide
  Antisense strand to SEQ ID NO: 2270004
auacagacgcagauaaagg

SEQ ID NO: 2270006 - RNA, 19 nt, Artificial Sequence
  Description of Artificial Sequence: Synthetic oligonucleotide
  Sense strand starting at position 1469 of SEQ ID NO: 1884494
auguguggacacugaauau

SEQ ID NO: 2270007 - RNA, 19 nt, Artificial Sequence
  Description of Artificial Sequence: Synthetic oligonucleotide
  Antisense strand to SEQ ID NO: 2270006
auauucaguguccacacau

SEQ ID NO: 2270008 - RNA, 19 nt, Artificial Sequence
  Description of Artificial Sequence: Synthetic oligonucleotide
  Sense strand starting at position 1527 of SEQ ID NO: 1884494
uaagauuaacuguggaguu

SEQ ID NO: 2270009 - RNA, 19 nt, Artificial Sequence
  Description of Artificial Sequence: Synthetic oligonucleotide
  Antisense strand to SEQ ID NO: 2270008
aacuccacaguuaaucuua

SEQ ID NO: 2270010 - RNA, 19 nt, Artificial Sequence
  Description of Artificial Sequence: Synthetic oligonucleotide
  Sense strand starting at position 1619 of SEQ ID NO: 1884494
guucuuguuacgcucguau

SEQ ID NO: 2270011 - RNA, 19 nt, Artificial Sequence
  Description of Artificial Sequence: Synthetic oligonucleotide
  Antisense strand to SEQ ID NO: 2270010
auacgagcguaacaagaac

SEQ ID NO: 2270012 - RNA, 19 nt, Artificial Sequence
  Description of Artificial Sequence: Synthetic oligonucleotide
  Sense strand starting at position 1622 of SEQ ID NO: 1884494
cuuguuacgcucguauacu

SEQ ID NO: 2270013 - RNA, 19 nt, Artificial Sequence
  Description of Artificial Sequence: Synthetic oligonucleotide
  Antisense strand to SEQ ID NO: 2270012
aguauacgagcguaacaag

SEQ ID NO: 2270014 - RNA, 19 nt, Artificial Sequence
  Description of Artificial Sequence: Synthetic oligonucleotide
  Sense strand starting at position 1648 of SEQ ID NO: 1884494
guugcucucaaggaauaga

SEQ ID NO: 2270015 - RNA, 19 nt, Artificial Sequence
  Description of Artificial Sequence: Synthetic oligonucleotide
  Antisense strand to SEQ ID NO: 2270014
ucuauuccuugagagcaac

SEQ ID NO: 2270016 - RNA, 19 nt, Artificial Sequence
  Description of Artificial Sequence: Synthetic oligonucleotide
  Sense strand starting at position 1673 of SEQ ID NO: 1884494
agaugaguuccacaagccu

SEQ ID NO: 2270017 - RNA, 19 nt, Artificial Sequence
  Description of Artificial Sequence: Synthetic oligonucleotide
  Antisense strand to SEQ ID NO: 2270016
aggcuuguggaacucaucu

SEQ ID NO: 2270018 - RNA, 19 nt, Artificial Sequence
  Description of Artificial Sequence: Synthetic oligonucleotide
  Sense strand starting at position 1934 of SEQ ID NO: 1884494
gagccuaacccguggauuu

SEQ ID NO: 2270019 - RNA, 19 nt, Artificial Sequence
  Description of Artificial Sequence: Synthetic oligonucleotide
  Antisense strand to SEQ ID NO: 2270018
aaauccacggguuaggcuc

SEQ ID NO: 2270020 - RNA, 19 nt, Artificial Sequence
  Description of Artificial Sequence: Synthetic oligonucleotide
  Sense strand starting at position 1935 of SEQ ID NO: 1884494
agccuaacccguggauuua

SEQ ID NO: 2270021 - RNA, 19 nt, Artificial Sequence
  Description of Artificial Sequence: Synthetic oligonucleotide
  Antisense strand to SEQ ID NO: 2270020
uaaauccacggguuaggcu

SEQ ID NO: 2270022 - RNA, 19 nt, Artificial Sequence
  Description of Artificial Sequence: Synthetic oligonucleotide
  Sense strand starting at position 1987 of SEQ ID NO: 1884494
cugagaggagcgcaacaau

SEQ ID NO: 2270023 - RNA, 19 nt, Artificial Sequence
  Description of Artificial Sequence: Synthetic oligonucleotide
  Antisense strand to SEQ ID NO: 2270022
auuguugcgcuccucucag

SEQ ID NO: 2270024 - RNA, 19 nt, Artificial Sequence
  Description of Artificial Sequence: Synthetic oligonucleotide
  Sense strand starting at position 2048 of SEQ ID NO: 1884494
ggcaauuucuguucgaggu

SEQ ID NO: 2270025 - RNA, 19 nt, Artificial Sequence
  Description of Artificial Sequence: Synthetic oligonucleotide
  Antisense strand to SEQ ID NO: 2270024
accucgaacagaaauugcc

SEQ ID NO: 2270026 - RNA, 19 nt, Artificial Sequence
  Description of Artificial Sequence: Synthetic oligonucleotide
  Sense strand starting at position 2049 of SEQ ID NO: 1884494
gcaauuucuguucgagguu

SEQ ID NO: 2270027 - RNA, 19 nt, Artificial Sequence
  Description of Artificial Sequence: Synthetic oligonucleotide
  Antisense strand to SEQ ID NO: 2270026
aaccucgaacagaaauugc

SEQ ID NO: 2270028 - RNA, 19 nt, Artificial Sequence
  Description of Artificial Sequence: Synthetic oligonucleotide
  Sense strand starting at position 2097 of SEQ ID NO: 1884494
ugguauuucuucucuaagc

SEQ ID NO: 2270029 - RNA, 19 nt, Artificial Sequence
  Description of Artificial Sequence: Synthetic oligonucleotide
  Antisense strand to SEQ ID NO: 2270028
gcuuagagaagaaauacca

SEQ ID NO: 2270030 - RNA, 19 nt, Artificial Sequence
  Description of Artificial Sequence: Synthetic oligonucleotide
  Sense strand starting at position 2098 of SEQ ID NO: 1884494
gguauuucuucucuaagcu

SEQ ID NO: 2270031 - RNA, 19 nt, Artificial Sequence
  Description of Artificial Sequence: Synthetic oligonucleotide
  Antisense strand to SEQ ID NO: 2270030
agcuuagagaagaaauacc

SEQ ID NO: 2270032 - RNA, 19 nt, Artificial Sequence
  Description of Artificial Sequence: Synthetic oligonucleotide
  Sense strand starting at position 2131 of SEQ ID NO: 1884494
aauugagauuccguuuaag

SEQ ID NO: 2270033 - RNA, 19 nt, Artificial Sequence
  Description of Artificial Sequence: Synthetic oligonucleotide
  Antisense strand to SEQ ID NO: 2270032
cuuaaacggaaucucaauu

SEQ ID NO: 2270034 - RNA, 19 nt, Artificial Sequence
  Description of Artificial Sequence: Synthetic oligonucleotide
  Sense strand starting at position 2295 of SEQ ID NO: 1884494
cucagaaaugcccaaguuu

SEQ ID NO: 2270035 - RNA, 19 nt, Artificial Sequence
  Description of Artificial Sequence: Synthetic oligonucleotide
  Antisense strand to SEQ ID NO: 2270034
aaacuugggcauuucugag

SEQ ID NO: 2270036 - RNA, 19 nt, Artificial Sequence
  Description of Artificial Sequence: Synthetic oligonucleotide
  Sense strand starting at position 2489 of SEQ ID NO: 1884494
aggcuauagaaguguaaag

SEQ ID NO: 2270037 - RNA, 19 nt, Artificial Sequence
  Description of Artificial Sequence: Synthetic oligonucleotide
  Antisense strand to SEQ ID NO: 2270036
cuuuacacuucuauagccu

SEQ ID NO: 2270038 - RNA, 19 nt, Artificial Sequence
  Description of Artificial Sequence: Synthetic oligonucleotide
  Sense strand starting at position 2491 of SEQ ID NO: 1884494
gcuauagaaguguaaagac

SEQ ID NO: 2270039 - RNA, 19 nt, Artificial Sequence
  Description of Artificial Sequence: Synthetic oligonucleotide
  Antisense strand to SEQ ID NO: 2270038
gucuuuacacuucuauagc

SEQ ID NO: 2270040 - RNA, 19 nt, Artificial Sequence
  Description of Artificial Sequence: Synthetic oligonucleotide
  Sense strand starting at position 2686 of SEQ ID NO: 1884494
accaaaucucgagacugua

SEQ ID NO: 2270041 - RNA, 19 nt, Artificial Sequence
  Description of Artificial Sequence: Synthetic oligonucleotide
  Antisense strand to SEQ ID NO: 2270040
uacagucucgagauuuggu

SEQ ID NO: 2270042 - RNA, 19 nt, Artificial Sequence
  Description of Artificial Sequence: Synthetic oligonucleotide
  Sense strand starting at position 2715 of SEQ ID NO: 1884494
uuaugcuuugacgagagaa

SEQ ID NO: 2270043 - RNA, 19 nt, Artificial Sequence
  Description of Artificial Sequence: Synthetic oligonucleotide
  Antisense strand to SEQ ID NO: 2270042
uucucucgucaaagcauaa

SEQ ID NO: 2270044 - RNA, 19 nt, Artificial Sequence
  Description of Artificial Sequence: Synthetic oligonucleotide
  Sense strand starting at position 2973 of SEQ ID NO: 1884494
caggcugucauuugguaga

SEQ ID NO: 2270045 - RNA, 19 nt, Artificial Sequence
  Description of Artificial Sequence: Synthetic oligonucleotide
  Antisense strand to SEQ ID NO: 2270044
ucuaccaaaugacagccug

SEQ ID NO: 2270046 - RNA, 19 nt, Artificial Sequence
  Description of Artificial Sequence: Synthetic oligonucleotide
  Sense strand starting at position 3130 of SEQ ID NO: 1884494
ugguucuguaccugauaga

SEQ ID NO: 2270047 - RNA, 19 nt, Artificial Sequence
  Description of Artificial Sequence: Synthetic oligonucleotide
  Antisense strand to SEQ ID NO: 2270046
ucuaucagguacagaacca

SEQ ID NO: 2270048 - RNA, 19 nt, Artificial Sequence
  Description of Artificial Sequence: Synthetic oligonucleotide
  Sense strand starting at position 3131 of SEQ ID NO: 1884494
gguucuguaccugauagau

SEQ ID NO: 2270049 - RNA, 19 nt, Artificial Sequence
  Description of Artificial Sequence: Synthetic oligonucleotide
  Antisense strand to SEQ ID NO: 2270048
aucuaucagguacagaacc

SEQ ID NO: 2270050 - RNA, 19 nt, Artificial Sequence
  Description of Artificial Sequence: Synthetic oligonucleotide
  Sense strand starting at position 3458 of SEQ ID NO: 1884494
caguuagagcucuagacuc

SEQ ID NO: 2270051 - RNA, 19 nt, Artificial Sequence
  Description of Artificial Sequence: Synthetic oligonucleotide
  Antisense strand to SEQ ID NO: 2270050
gagucuagagcucuaacug

SEQ ID NO: 2270052 - RNA, 19 nt, Artificial Sequence
  Description of Artificial Sequence: Synthetic oligonucleotide
  Sense strand starting at position 3934 of SEQ ID NO: 1884494
gcaggcaucaggcacaaau

SEQ ID NO: 2270053 - RNA, 19 nt, Artificial Sequence
  Description of Artificial Sequence: Synthetic oligonucleotide
  Antisense strand to SEQ ID NO: 2270052
auuugugccugaugccugc

SEQ ID NO: 2270054 - RNA, 19 nt, Artificial Sequence
  Description of Artificial Sequence: Synthetic oligonucleotide
  Sense strand starting at position 3945 of SEQ ID NO: 1884494
gcacaaaucagcgacaagu

SEQ ID NO: 2270055 - RNA, 19 nt, Artificial Sequence
  Description of Artificial Sequence: Synthetic oligonucleotide
  Antisense strand to SEQ ID NO: 2270054
acuugucgcugauuugugc

SEQ ID NO: 2270056 - RNA, 19 nt, Artificial Sequence
  Description of Artificial Sequence: Synthetic oligonucleotide
  Sense strand starting at position 116 of SEQ ID NO: 1884495
gcgauuacucacucgcgca

SEQ ID NO: 2270057 - RNA, 19 nt, Artificial Sequence
  Description of Artificial Sequence: Synthetic oligonucleotide
  Antisense strand to SEQ ID NO: 2270056
ugcgcgagugaguaaucgc

SEQ ID NO: 2270058 - RNA, 19 nt, Artificial Sequence
  Description of Artificial Sequence: Synthetic oligonucleotide
  Sense strand starting at position 512 of SEQ ID NO: 1884495
gugcaauuugcuggaaguu

SEQ ID NO: 2270059 - RNA, 19 nt, Artificial Sequence
  Description of Artificial Sequence: Synthetic oligonucleotide
  Antisense strand to SEQ ID NO: 2270058
aacuuccagcaaauugcac

SEQ ID NO: 2270060 - RNA, 19 nt, Artificial Sequence
  Description of Artificial Sequence: Synthetic oligonucleotide
  Sense strand starting at position 548 of SEQ ID NO: 1884495
uuuguaaauuacucucgga

SEQ ID NO: 2270061 - RNA, 19 nt, Artificial Sequence
  Description of Artificial Sequence: Synthetic oligonucleotide
  Antisense strand to SEQ ID NO: 2270060
uccgagaguaauuuacaaa

SEQ ID NO: 2270062 - RNA, 19 nt, Artificial Sequence
  Description of Artificial Sequence: Synthetic oligonucleotide
  Sense strand starting at position 552 of SEQ ID NO: 1884495
uaaauuacucucggaagag

SEQ ID NO: 2270063 - RNA, 19 nt, Artificial Sequence
  Description of Artificial Sequence: Synthetic oligonucleotide
  Antisense strand to SEQ ID NO: 2270062
cucuuccgagaguaauuua

SEQ ID NO: 2270064 - RNA, 19 nt, Artificial Sequence
  Description of Artificial Sequence: Synthetic oligonucleotide
  Sense strand starting at position 666 of SEQ ID NO: 1884495
uggcuagcgacuuaagauu

SEQ ID NO: 2270065 - RNA, 19 nt, Artificial Sequence
  Description of Artificial Sequence: Synthetic oligonucleotide
  Antisense strand to SEQ ID NO: 2270064
aaucuuaagucgcuagcca

SEQ ID NO: 2270066 - RNA, 19 nt, Artificial Sequence
  Description of Artificial Sequence: Synthetic oligonucleotide
  Sense strand starting at position 732 of SEQ ID NO: 1884495
cggugauuggauuagcuga

SEQ ID NO: 2270067 - RNA, 19 nt, Artificial Sequence
  Description of Artificial Sequence: Synthetic oligonucleotide
  Antisense strand to SEQ ID NO: 2270066
ucagcuaauccaaucaccg

SEQ ID NO: 2270068 - RNA, 19 nt, Artificial Sequence
  Description of Artificial Sequence: Synthetic oligonucleotide
  Sense strand starting at position 1019 of SEQ ID NO: 1884495
guuacauagacaugguaga

SEQ ID NO: 2270069 - RNA, 19 nt, Artificial Sequence
  Description of Artificial Sequence: Synthetic oligonucleotide
  Antisense strand to SEQ ID NO: 2270068
ucuaccaugucuauguaac

SEQ ID NO: 2270070 - RNA, 19 nt, Artificial Sequence
  Description of Artificial Sequence: Synthetic oligonucleotide
  Sense strand starting at position 1062 of SEQ ID NO: 1884495
cccauaaagaauugucgga

SEQ ID NO: 2270071 - RNA, 19 nt, Artificial Sequence
  Description of Artificial Sequence: Synthetic oligonucleotide
  Antisense strand to SEQ ID NO: 2270070
uccgacaauucuuuauggg

SEQ ID NO: 2270072 - RNA, 19 nt, Artificial Sequence
  Description of Artificial Sequence: Synthetic oligonucleotide
  Sense strand starting at position 1066 of SEQ ID NO: 1884495
uaaagaauugucggaaaca

SEQ ID NO: 2270073 - RNA, 19 nt, Artificial Sequence
  Description of Artificial Sequence: Synthetic oligonucleotide
  Antisense strand to SEQ ID NO: 2270072
uguuuccgacaauucuuua

SEQ ID NO: 2270074 - RNA, 19 nt, Artificial Sequence
  Description of Artificial Sequence: Synthetic oligonucleotide
  Sense strand starting at position 1096 of SEQ ID NO: 1884495
gggaguccucucuauuaau

SEQ ID NO: 2270075 - RNA, 19 nt, Artificial Sequence
  Description of Artificial Sequence: Synthetic oligonucleotide
  Antisense strand to SEQ ID NO: 2270074
auuaauagagaggacuccc

SEQ ID NO: 2270076 - RNA, 19 nt, Artificial Sequence
  Description of Artificial Sequence: Synthetic oligonucleotide
  Sense strand starting at position 1154 of SEQ ID NO: 1884495
gcuggacaaucccugaauu

SEQ ID NO: 2270077 - RNA, 19 nt, Artificial Sequence
  Description of Artificial Sequence: Synthetic oligonucleotide
  Antisense strand to SEQ ID NO: 2270076
aauucagggauuguccagc

SEQ ID NO: 2270078 - RNA, 19 nt, Artificial Sequence
  Description of Artificial Sequence: Synthetic oligonucleotide
  Sense strand starting at position 1155 of SEQ ID NO: 1884495
cuggacaaucccugaauuc

SEQ ID NO: 2270079 - RNA, 19 nt, Artificial Sequence
  Description of Artificial Sequence: Synthetic oligonucleotide
  Antisense strand to SEQ ID NO: 2270078
gaauucagggauuguccag

SEQ ID NO: 2270080 - RNA, 19 nt, Artificial Sequence
  Description of Artificial Sequence: Synthetic oligonucleotide
  Sense strand starting at position 1260 of SEQ ID NO: 1884495
ccaacuucuccagagcugu

SEQ ID NO: 2270081 - RNA, 19 nt, Artificial Sequence
  Description of Artificial Sequence: Synthetic oligonucleotide
  Antisense strand to SEQ ID NO: 2270080
acagcucuggagaaguugg

SEQ ID NO: 2270082 - RNA, 19 nt, Artificial Sequence
  Description of Artificial Sequence: Synthetic oligonucleotide
  Sense strand starting at position 1282 of SEQ ID NO: 1884495
augcaauuagaguaaguua

SEQ ID NO: 2270083 - RNA, 19 nt, Artificial Sequence
  Description of Artificial Sequence: Synthetic oligonucleotide
  Antisense strand to SEQ ID NO: 2270082
uaacuuacucuaauugcau

SEQ ID NO: 2270084 - RNA, 19 nt, Artificial Sequence
  Description of Artificial Sequence: Synthetic oligonucleotide
  Sense strand starting at position 1290 of SEQ ID NO: 1884495
agaguaaguuaaucagggu

SEQ ID NO: 2270085 - RNA, 19 nt, Artificial Sequence
  Description of Artificial Sequence: Synthetic oligonucleotide
  Antisense strand to SEQ ID NO: 2270084
acccugauuaacuuacucu

SEQ ID NO: 2270086 - RNA, 19 nt, Artificial Sequence
  Description of Artificial Sequence: Synthetic oligonucleotide
  Sense strand starting at position 1291 of SEQ ID NO: 1884495
gaguaaguuaaucaggguu

SEQ ID NO: 2270087 - RNA, 19 nt, Artificial Sequence
  Description of Artificial Sequence: Synthetic oligonucleotide
  Antisense strand to SEQ ID NO: 2270086
aacccugauuaacuuacuc

SEQ ID NO: 2270088 - RNA, 19 nt, Artificial Sequence
  Description of Artificial Sequence: Synthetic oligonucleotide
  Sense strand starting at position 1445 of SEQ ID NO: 1884495
cugagcucacauugucaaa

SEQ ID NO: 2270089 - RNA, 19 nt, Artificial Sequence
  Description of Artificial Sequence: Synthetic oligonucleotide
  Antisense strand to SEQ ID NO: 2270088
uuugacaaugugagcucag

SEQ ID NO: 2270090 - RNA, 19 nt, Artificial Sequence
  Description of Artificial Sequence: Synthetic oligonucleotide
  Sense strand starting at position 1693 of SEQ ID NO: 1884495
ccaccugagcugugaagga

SEQ ID NO: 2270091 - RNA, 19 nt, Artificial Sequence
  Description of Artificial Sequence: Synthetic oligonucleotide
  Antisense strand to SEQ ID NO: 2270090
uccuucacagcucaggugg

SEQ ID NO: 2270092 - RNA, 19 nt, Artificial Sequence
  Description of Artificial Sequence: Synthetic oligonucleotide
  Sense strand starting at position 1698 of SEQ ID NO: 1884495
ugagcugugaaggacgaua

SEQ ID NO: 2270093 - RNA, 19 nt, Artificial Sequence
  Description of Artificial Sequence: Synthetic oligonucleotide
  Antisense strand to SEQ ID NO: 2270092
uaucguccuucacagcuca

SEQ ID NO: 2270094 - RNA, 19 nt, Artificial Sequence
  Description of Artificial Sequence: Synthetic oligonucleotide
  Sense strand starting at position 1709 of SEQ ID NO: 1884495
ggacgauaugaacgaggua

SEQ ID NO: 2270095 - RNA, 19 nt, Artificial Sequence
  Description of Artificial Sequence: Synthetic oligonucleotide
  Antisense strand to SEQ ID NO: 2270094
uaccucguucauaucgucc

SEQ ID NO: 2270096 - RNA, 19 nt, Artificial Sequence
  Description of Artificial Sequence: Synthetic oligonucleotide
  Sense strand starting at position 2192 of SEQ ID NO: 1884495
ggguguguucgggugguuu

SEQ ID NO: 2270097 - RNA, 19 nt, Artificial Sequence
  Description of Artificial Sequence: Synthetic oligonucleotide
  Antisense strand to SEQ ID NO: 2270096
aaaccacccgaacacaccc

SEQ ID NO: 2270098 - RNA, 19 nt, Artificial Sequence
  Description of Artificial Sequence: Synthetic oligonucleotide
  Sense strand starting at position 2283 of SEQ ID NO: 1884495
ugauaagaagccugaguuu

SEQ ID NO: 2270099 - RNA, 19 nt, Artificial Sequence
  Description of Artificial Sequence: Synthetic oligonucleotide
  Antisense strand to SEQ ID NO: 2270098
aaacucaggcuucuuauca

SEQ ID NO: 2270100 - RNA, 19 nt, Artificial Sequence
  Description of Artificial Sequence: Synthetic oligonucleotide
  Sense strand starting at position 2463 of SEQ ID NO: 1884495
ccagcuggccuuuauuaaa

SEQ ID NO: 2270101 - RNA, 19 nt, Artificial Sequence
  Description of Artificial Sequence: Synthetic oligonucleotide
  Antisense strand to SEQ ID NO: 2270100
uuuaauaaaggccagcugg

SEQ ID NO: 2270102 - RNA, 19 nt, Artificial Sequence
  Description of Artificial Sequence: Synthetic oligonucleotide
  Sense strand starting at position 2531 of SEQ ID NO: 1884495
uucuucuucgcuuaagaga

SEQ ID NO: 2270103 - RNA, 19 nt, Artificial Sequence
  Description of Artificial Sequence: Synthetic oligonucleotide
  Antisense strand to SEQ ID NO: 2270102
ucucuuaagcgaagaagaa

SEQ ID NO: 2270104 - RNA, 19 nt, Artificial Sequence
  Description of Artificial Sequence: Synthetic oligonucleotide
  Sense strand starting at position 2551 of SEQ ID NO: 1884495
cauaaaugguaagcuguaa

SEQ ID NO: 2270105 - RNA, 19 nt, Artificial Sequence
  Description of Artificial Sequence: Synthetic oligonucleotide
  Antisense strand to SEQ ID NO: 2270104
uuacagcuuaccauuuaug

SEQ ID NO: 2270106 - RNA, 19 nt, Artificial Sequence
  Description of Artificial Sequence: Synthetic oligonucleotide
  Sense strand starting at position 2555 of SEQ ID NO: 1884495
aaugguaagcuguaacaaa

SEQ ID NO: 2270107 - RNA, 19 nt, Artificial Sequence
  Description of Artificial Sequence: Synthetic oligonucleotide
  Antisense strand to SEQ ID NO: 2270106
uuuguuacagcuuaccauu

SEQ ID NO: 2270108 - RNA, 19 nt, Artificial Sequence
  Description of Artificial Sequence: Synthetic oligonucleotide
  Sense strand starting at position 2644 of SEQ ID NO: 1884495
gaggcacuguuucuuaaga

SEQ ID NO: 2270109 - RNA, 19 nt, Artificial Sequence
  Description of Artificial Sequence: Synthetic oligonucleotide
  Antisense strand to SEQ ID NO: 2270108
ucuuaagaaacagugccuc

SEQ ID NO: 2270110 - RNA, 19 nt, Artificial Sequence
  Description of Artificial Sequence: Synthetic oligonucleotide
  Sense strand starting at position 2701 of SEQ ID NO: 1884495
gagccacaucucgauuauu

SEQ ID NO: 2270111 - RNA, 19 nt, Artificial Sequence
  Description of Artificial Sequence: Synthetic oligonucleotide
  Antisense strand to SEQ ID NO: 2270110
aauaaucgagauguggcuc

SEQ ID NO: 2270112 - RNA, 19 nt, Artificial Sequence
  Description of Artificial Sequence: Synthetic oligonucleotide
  Sense strand starting at position 2734 of SEQ ID NO: 1884495
aguccaauccaguaaugcu

SEQ ID NO: 2270113 - RNA, 19 nt, Artificial Sequence
  Description of Artificial Sequence: Synthetic oligonucleotide
  Antisense strand to SEQ ID NO: 2270112
agcauuacuggauuggacu

SEQ ID NO: 2270114 - RNA, 19 nt, Artificial Sequence
  Description of Artificial Sequence: Synthetic oligonucleotide
  Sense strand starting at position 2743 of SEQ ID NO: 1884495
caguaaugcucccuuagag

SEQ ID NO: 2270115 - RNA, 19 nt, Artificial Sequence
  Description of Artificial Sequence: Synthetic oligonucleotide
  Antisense strand to SEQ ID NO: 2270114
cucuaagggagcauuacug

SEQ ID NO: 2270116 - RNA, 19 nt, Artificial Sequence
  Description of Artificial Sequence: Synthetic oligonucleotide
  Sense strand starting at position 2873 of SEQ ID NO: 1884495
uuaaguuucuggcuggaag

SEQ ID NO: 2270117 - RNA, 19 nt, Artificial Sequence
  Description of Artificial Sequence: Synthetic oligonucleotide
  Antisense strand to SEQ ID NO: 2270116
cuuccagccagaaacuuaa

SEQ ID NO: 2270118 - RNA, 19 nt, Artificial Sequence
  Description of Artificial Sequence: Synthetic oligonucleotide
  Sense strand starting at position 2925 of SEQ ID NO: 1884495
agaggaguaucccuuggau

SEQ ID NO: 2270119 - RNA, 19 nt, Artificial Sequence
  Description of Artificial Sequence: Synthetic oligonucleotide
  Antisense strand to SEQ ID NO: 2270118
auccaagggauacuccucu

SEQ ID NO: 2270120 - RNA, 19 nt, Artificial Sequence
  Description of Artificial Sequence: Synthetic oligonucleotide
  Sense strand starting at position 2927 of SEQ ID NO: 1884495
aggaguaucccuuggauca

SEQ ID NO: 2270121 - RNA, 19 nt, Artificial Sequence
  Description of Artificial Sequence: Synthetic oligonucleotide
  Antisense strand to SEQ ID NO: 2270120
ugauccaagggauacuccu

SEQ ID NO: 2270122 - RNA, 19 nt, Artificial Sequence
  Description of Artificial Sequence: Synthetic oligonucleotide
  Sense strand starting at position 2928 of SEQ ID NO: 1884495
ggaguaucccuuggaucau

SEQ ID NO: 2270123 - RNA, 19 nt, Artificial Sequence
  Description of Artificial Sequence: Synthetic oligonucleotide
  Antisense strand to SEQ ID NO: 2270122
augauccaagggauacucc

SEQ ID NO: 2270124 - RNA, 19 nt, Artificial Sequence
  Description of Artificial Sequence: Synthetic oligonucleotide
  Sense strand starting at position 3121 of SEQ ID NO: 1884495
ccaggucagcccuagcaaa

SEQ ID NO: 2270125 - RNA, 19 nt, Artificial Sequence
  Description of Artificial Sequence: Synthetic oligonucleotide
  Antisense strand to SEQ ID NO: 2270124
uuugcuagggcugaccugg

SEQ ID NO: 2270126 - RNA, 19 nt, Artificial Sequence
  Description of Artificial Sequence: Synthetic oligonucleotide
  Sense strand starting at position 3219 of SEQ ID NO: 1884495
uccaaaggagcuugauauu

SEQ ID NO: 2270127 - RNA, 19 nt, Artificial Sequence
  Description of Artificial Sequence: Synthetic oligonucleotide
  Antisense strand to SEQ ID NO: 2270126
aauaucaagcuccuuugga

SEQ ID NO: 2270128 - RNA, 19 nt, Artificial Sequence
  Description of Artificial Sequence: Synthetic oligonucleotide
  Sense strand starting at position 3638 of SEQ ID NO: 1884495
gguaaagaaucgcucaaau

SEQ ID NO: 2270129 - RNA, 19 nt, Artificial Sequence
  Description of Artificial Sequence: Synthetic oligonucleotide
  Antisense strand to SEQ ID NO: 2270128
auuugagcgauucuuuacc

SEQ ID NO: 2270130 - RNA, 19 nt, Artificial Sequence
  Description of Artificial Sequence: Synthetic oligonucleotide
  Sense strand starting at position 3663 of SEQ ID NO: 1884495
aagaaugagguuuguaugu

SEQ ID NO: 2270131 - RNA, 19 nt, Artificial Sequence
  Description of Artificial Sequence: Synthetic oligonucleotide
  Antisense strand to SEQ ID NO: 2270130
acauacaaaccucauucuu

SEQ ID NO: 2270132 - RNA, 19 nt, Artificial Sequence
  Description of Artificial Sequence: Synthetic oligonucleotide
  Sense strand starting at position 3768 of SEQ ID NO: 1884495
caauaaugcggcuuugugu

SEQ ID NO: 2270133 - RNA, 19 nt, Artificial Sequence
  Description of Artificial Sequence: Synthetic oligonucleotide
  Antisense strand to SEQ ID NO: 2270132
acacaaagccgcauuauug

SEQ ID NO: 2270134 - RNA, 19 nt, Artificial Sequence
  Description of Artificial Sequence: Synthetic oligonucleotide
  Sense strand starting at position 3776 of SEQ ID NO: 1884495
cggcuuugugugcuucaca

SEQ ID NO: 2270135 - RNA, 19 nt, Artificial Sequence
  Description of Artificial Sequence: Synthetic oligonucleotide
  Antisense strand to SEQ ID NO: 2270134
ugugaagcacacaaagccg

SEQ ID NO: 2270136 - RNA, 19 nt, Artificial Sequence
  Description of Artificial Sequence: Synthetic oligonucleotide
  Sense strand starting at position 120 of SEQ ID NO: 1884496
ucaaucaugucauuaagag

SEQ ID NO: 2270137 - RNA, 19 nt, Artificial Sequence
  Description of Artificial Sequence: Synthetic oligonucleotide
  Antisense strand to SEQ ID NO: 2270136
cucuuaaugacaugauuga

SEQ ID NO: 2270138 - RNA, 19 nt, Artificial Sequence
  Description of Artificial Sequence: Synthetic oligonucleotide
  Sense strand starting at position 374 of SEQ ID NO: 1884496
gggauuauguaaaggagag

SEQ ID NO: 2270139 - RNA, 19 nt, Artificial Sequence
  Description of Artificial Sequence: Synthetic oligonucleotide
  Antisense strand to SEQ ID NO: 2270138
cucuccuuuacauaauccc

SEQ ID NO: 2270140 - RNA, 19 nt, Artificial Sequence
  Description of Artificial Sequence: Synthetic oligonucleotide
  Sense strand starting at position 472 of SEQ ID NO: 1884496
ugcucucuucuagagauug

SEQ ID NO: 2270141 - RNA, 19 nt, Artificial Sequence
  Description of Artificial Sequence: Synthetic oligonucleotide
  Antisense strand to SEQ ID NO: 2270140
caaucucuagaagagagca

SEQ ID NO: 2270142 - RNA, 19 nt, Artificial Sequence
  Description of Artificial Sequence: Synthetic oligonucleotide
  Sense strand starting at position 914 of SEQ ID NO: 1884496
auggauuucuauuaaagca

SEQ ID NO: 2270143 - RNA, 19 nt, Artificial Sequence
  Description of Artificial Sequence: Synthetic oligonucleotide
  Antisense strand to SEQ ID NO: 2270142
ugcuuuaauagaaauccau

SEQ ID NO: 2270144 - RNA, 19 nt, Artificial Sequence
  Description of Artificial Sequence: Synthetic oligonucleotide
  Sense strand starting at position 949 of SEQ ID NO: 1884496
gcaggacaaauguacguua

SEQ ID NO: 2270145 - RNA, 19 nt, Artificial Sequence
  Description of Artificial Sequence: Synthetic oligonucleotide
  Antisense strand to SEQ ID NO: 2270144
uaacguacauuuguccugc

SEQ ID NO: 2270146 - RNA, 19 nt, Artificial Sequence
  Description of Artificial Sequence: Synthetic oligonucleotide
  Sense strand starting at position 951 of SEQ ID NO: 1884496
aggacaaauguacguuacu

SEQ ID NO: 2270147 - RNA, 19 nt, Artificial Sequence
  Description of Artificial Sequence: Synthetic oligonucleotide
  Antisense strand to SEQ ID NO: 2270146
aguaacguacauuuguccu

SEQ ID NO: 2270148 - RNA, 19 nt, Artificial Sequence
  Description of Artificial Sequence: Synthetic oligonucleotide
  Sense strand starting at position 1131 of SEQ ID NO: 1884496
auauguaucucucugauac

SEQ ID NO: 2270149 - RNA, 19 nt, Artificial Sequence
  Description of Artificial Sequence: Synthetic oligonucleotide
  Antisense strand to SEQ ID NO: 2270148
guaucagagagauacauau

SEQ ID NO: 2270150 - RNA, 19 nt, Artificial Sequence
  Description of Artificial Sequence: Synthetic oligonucleotide
  Sense strand starting at position 1148 of SEQ ID NO: 1884496
accaaacaguuguuuauga

SEQ ID NO: 2270151 - RNA, 19 nt, Artificial Sequence
  Description of Artificial Sequence: Synthetic oligonucleotide
  Antisense strand to SEQ ID NO: 2270150
ucauaaacaacuguuuggu

SEQ ID NO: 2270152 - RNA, 19 nt, Artificial Sequence
  Description of Artificial Sequence: Synthetic oligonucleotide
  Sense strand starting at position 1149 of SEQ ID NO: 1884496
ccaaacaguuguuuaugau

SEQ ID NO: 2270153 - RNA, 19 nt, Artificial Sequence
  Description of Artificial Sequence: Synthetic oligonucleotide
  Antisense strand to SEQ ID NO: 2270152
aucauaaacaacuguuugg

SEQ ID NO: 2270154 - RNA, 19 nt, Artificial Sequence
  Description of Artificial Sequence: Synthetic oligonucleotide
  Sense strand starting at position 1446 of SEQ ID NO: 1884496
uuuggugauuacuucuaac

SEQ ID NO: 2270155 - RNA, 19 nt, Artificial Sequence
  Description of Artificial Sequence: Synthetic oligonucleotide
  Antisense strand to SEQ ID NO: 2270154
guuagaaguaaucaccaaa

SEQ ID NO: 2270156 - RNA, 19 nt, Artificial Sequence
  Description of Artificial Sequence: Synthetic oligonucleotide
  Sense strand starting at position 1491 of SEQ ID NO: 1884496
agugaucuguaaucaauga

SEQ ID NO: 2270157 - RNA, 19 nt, Artificial Sequence
  Description of Artificial Sequence: Synthetic oligonucleotide
  Antisense strand to SEQ ID NO: 2270156
ucauugauuacagaucacu

SEQ ID NO: 2270158 - RNA, 19 nt, Artificial Sequence
  Description of Artificial Sequence: Synthetic oligonucleotide
  Sense strand starting at position 1557 of SEQ ID NO: 1884496
ugggaaacuuaauuggcaa

SEQ ID NO: 2270159 - RNA, 19 nt, Artificial Sequence
  Description of Artificial Sequence: Synthetic oligonucleotide
  Antisense strand to SEQ ID NO: 2270158
uugccaauuaaguuuccca

SEQ ID NO: 2270160 - RNA, 19 nt, Artificial Sequence
  Description of Artificial Sequence: Synthetic oligonucleotide
  Sense strand starting at position 2136 of SEQ ID NO: 1884496
guagcaagugcugauggaa

SEQ ID NO: 2270161 - RNA, 19 nt, Artificial Sequence
  Description of Artificial Sequence: Synthetic oligonucleotide
  Antisense strand to SEQ ID NO: 2270160
uuccaucagcacuugcuac

SEQ ID NO: 2270162 - RNA, 19 nt, Artificial Sequence
  Description of Artificial Sequence: Synthetic oligonucleotide
  Sense strand starting at position 2262 of SEQ ID NO: 1884496
cuaagauuguagcuaaaga

SEQ ID NO: 2270163 - RNA, 19 nt, Artificial Sequence
  Description of Artificial Sequence: Synthetic oligonucleotide
  Antisense strand to SEQ ID NO: 2270162
ucuuuagcuacaaucuuag

SEQ ID NO: 2270164 - RNA, 19 nt, Artificial Sequence
  Description of Artificial Sequence: Synthetic oligonucleotide
  Sense strand starting at position 2336 of SEQ ID NO: 1884496
ggauaaugcaauuggugac

SEQ ID NO: 2270165 - RNA, 19 nt, Artificial Sequence
  Description of Artificial Sequence: Synthetic oligonucleotide
  Antisense strand to SEQ ID NO: 2270164
gucaccaauugcauuaucc

SEQ ID NO: 2270166 - RNA, 19 nt, Artificial Sequence
  Description of Artificial Sequence: Synthetic oligonucleotide
  Sense strand starting at position 2396 of SEQ ID NO: 1884496
gccguuaagagucauaaua

SEQ ID NO: 2270167 - RNA, 19 nt, Artificial Sequence
  Description of Artificial Sequence: Synthetic oligonucleotide
  Antisense strand to SEQ ID NO: 2270166
uauuaugacucuuaacggc

SEQ ID NO: 2270168 - RNA, 19 nt, Artificial Sequence
  Description of Artificial Sequence: Synthetic oligonucleotide
  Sense strand starting at position 2450 of SEQ ID NO: 1884496
ccuagaugguaacuuguau

SEQ ID NO: 2270169 - RNA, 19 nt, Artificial Sequence
  Description of Artificial Sequence: Synthetic oligonucleotide
  Antisense strand to SEQ ID NO: 2270168
auacaaguuaccaucuagg

SEQ ID NO: 2270170 - RNA, 19 nt, Artificial Sequence
  Description of Artificial Sequence: Synthetic oligonucleotide
  Sense strand starting at position 2705 of SEQ ID NO: 1884496
uugauauaauuccuccgau

SEQ ID NO: 2270171 - RNA, 19 nt, Artificial Sequence
  Description of Artificial Sequence: Synthetic oligonucleotide
  Antisense strand to SEQ ID NO: 2270170
aucggaggaauuauaucaa

SEQ ID NO: 2270172 - RNA, 19 nt, Artificial Sequence
  Description of Artificial Sequence: Synthetic oligonucleotide
  Sense strand starting at position 2706 of SEQ ID NO: 1884496
ugauauaauuccuccgaug

SEQ ID NO: 2270173 - RNA, 19 nt, Artificial Sequence
  Description of Artificial Sequence: Synthetic oligonucleotide
  Antisense strand to SEQ ID NO: 2270172
caucggaggaauuauauca

SEQ ID NO: 2270174 - RNA, 19 nt, Artificial Sequence
  Description of Artificial Sequence: Synthetic oligonucleotide
  Sense strand starting at position 2708 of SEQ ID NO: 1884496
auauaauuccuccgaugga

SEQ ID NO: 2270175 - RNA, 19 nt, Artificial Sequence
  Description of Artificial Sequence: Synthetic oligonucleotide
  Antisense strand to SEQ ID NO: 2270174
uccaucggaggaauuauau

SEQ ID NO: 2270176 - RNA, 19 nt, Artificial Sequence
  Description of Artificial Sequence: Synthetic oligonucleotide
  Sense strand starting at position 2731 of SEQ ID NO: 1884496
ggcagaguaaauugaauac

SEQ ID NO: 2270177 - RNA, 19 nt, Artificial Sequence
  Description of Artificial Sequence: Synthetic oligonucleotide
  Antisense strand to SEQ ID NO: 2270176
guauucaauuuacucugcc

SEQ ID NO: 2270178 - RNA, 19 nt, Artificial Sequence
  Description of Artificial Sequence: Synthetic oligonucleotide
  Sense strand starting at position 2742 of SEQ ID NO: 1884496
uugaauacccucuggaaau

SEQ ID NO: 2270179 - RNA, 19 nt, Artificial Sequence
  Description of Artificial Sequence: Synthetic oligonucleotide
  Antisense strand to SEQ ID NO: 2270178
auuuccagaggguauucaa

SEQ ID NO: 2270180 - RNA, 19 nt, Artificial Sequence
  Description of Artificial Sequence: Synthetic oligonucleotide
  Sense strand starting at position 2766 of SEQ ID NO: 1884496
auuauucuagauggcauua

SEQ ID NO: 2270181 - RNA, 19 nt, Artificial Sequence
  Description of Artificial Sequence: Synthetic oligonucleotide
  Antisense strand to SEQ ID NO: 2270180
uaaugccaucuagaauaau

SEQ ID NO: 2270182 - RNA, 19 nt, Artificial Sequence
  Description of Artificial Sequence: Synthetic oligonucleotide
  Sense strand starting at position 2777 of SEQ ID NO: 1884496
uggcauuaagaauguuuau

SEQ ID NO: 2270183 - RNA, 19 nt, Artificial Sequence
  Description of Artificial Sequence: Synthetic oligonucleotide
  Antisense strand to SEQ ID NO: 2270182
auaaacauucuuaaugcca

SEQ ID NO: 2270184 - RNA, 19 nt, Artificial Sequence
  Description of Artificial Sequence: Synthetic oligonucleotide
  Sense strand starting at position 2831 of SEQ ID NO: 1884496
ggaaguguaagugaaguga

SEQ ID NO: 2270185 - RNA, 19 nt, Artificial Sequence
  Description of Artificial Sequence: Synthetic oligonucleotide
  Antisense strand to SEQ ID NO: 2270184
ucacuucacuuacacuucc

SEQ ID NO: 2270186 - RNA, 19 nt, Artificial Sequence
  Description of Artificial Sequence: Synthetic oligonucleotide
  Sense strand starting at position 2870 of SEQ ID NO: 1884496
cuuugagcgauugaagacu

SEQ ID NO: 2270187 - RNA, 19 nt, Artificial Sequence
  Description of Artificial Sequence: Synthetic oligonucleotide
  Antisense strand to SEQ ID NO: 2270186
agucuucaaucgcucaaag

SEQ ID NO: 2270188 - RNA, 19 nt, Artificial Sequence
  Description of Artificial Sequence: Synthetic oligonucleotide
  Sense strand starting at position 2930 of SEQ ID NO: 1884496
agaacaauuagaugcggaa

SEQ ID NO: 2270189 - RNA, 19 nt, Artificial Sequence
  Description of Artificial Sequence: Synthetic oligonucleotide
  Antisense strand to SEQ ID NO: 2270188
uuccgcaucuaauuguucu

SEQ ID NO: 2270190 - RNA, 19 nt, Artificial Sequence
  Description of Artificial Sequence: Synthetic oligonucleotide
  Sense strand starting at position 3029 of SEQ ID NO: 1884496
aacauaguugcuugaaaug

SEQ ID NO: 2270191 - RNA, 19 nt, Artificial Sequence
  Description of Artificial Sequence: Synthetic oligonucleotide
  Antisense strand to SEQ ID NO: 2270190
cauuucaagcaacuauguu

SEQ ID NO: 2270192 - RNA, 19 nt, Artificial Sequence
  Description of Artificial Sequence: Synthetic oligonucleotide
  Sense strand starting at position 3035 of SEQ ID NO: 1884496
guugcuugaaauggaaacu

SEQ ID NO: 2270193 - RNA, 19 nt, Artificial Sequence
  Description of Artificial Sequence: Synthetic oligonucleotide
  Antisense strand to SEQ ID NO: 2270192
aguuuccauuucaagcaac

SEQ ID NO: 2270194 - RNA, 19 nt, Artificial Sequence
  Description of Artificial Sequence: Synthetic oligonucleotide
  Sense strand starting at position 3107 of SEQ ID NO: 1884496
ucacauacacuugguugaa

SEQ ID NO: 2270195 - RNA, 19 nt, Artificial Sequence
  Description of Artificial Sequence: Synthetic oligonucleotide
  Antisense strand to SEQ ID NO: 2270194
uucaaccaaguguauguga

SEQ ID NO: 2270196 - RNA, 19 nt, Artificial Sequence
  Description of Artificial Sequence: Synthetic oligonucleotide
  Sense strand starting at position 3203 of SEQ ID NO: 1884496
guaugcuuuggagaaauau

SEQ ID NO: 2270197 - RNA, 19 nt, Artificial Sequence
  Description of Artificial Sequence: Synthetic oligonucleotide
  Antisense strand to SEQ ID NO: 2270196
auauuucuccaaagcauac

SEQ ID NO: 2270198 - RNA, 19 nt, Artificial Sequence
  Description of Artificial Sequence: Synthetic oligonucleotide
  Sense strand starting at position 3515 of SEQ ID NO: 1884496
ugacauuugcuuuaucgca

SEQ ID NO: 2270199 - RNA, 19 nt, Artificial Sequence
  Description of Artificial Sequence: Synthetic oligonucleotide
  Antisense strand to SEQ ID NO: 2270198
ugcgauaaagcaaauguca

SEQ ID NO: 2270200 - RNA, 19 nt, Artificial Sequence
  Description of Artificial Sequence: Synthetic oligonucleotide
  Sense strand starting at position 3522 of SEQ ID NO: 1884496
ugcuuuaucgcaguggucu

SEQ ID NO: 2270201 - RNA, 19 nt, Artificial Sequence
  Description of Artificial Sequence: Synthetic oligonucleotide
  Antisense strand to SEQ ID NO: 2270200
agaccacugcgauaaagca

SEQ ID NO: 2270202 - RNA, 19 nt, Artificial Sequence
  Description of Artificial Sequence: Synthetic oligonucleotide
  Sense strand starting at position 3530 of SEQ ID NO: 1884496
cgcaguggucuagaauaaa

SEQ ID NO: 2270203 - RNA, 19 nt, Artificial Sequence
  Description of Artificial Sequence: Synthetic oligonucleotide
  Antisense strand to SEQ ID NO: 2270202
uuuauucuagaccacugcg

SEQ ID NO: 2270204 - RNA, 19 nt, Artificial Sequence
  Description of Artificial Sequence: Synthetic oligonucleotide
  Sense strand starting at position 3598 of SEQ ID NO: 1884496
acaguuuagcuugguauuu

SEQ ID NO: 2270205 - RNA, 19 nt, Artificial Sequence
  Description of Artificial Sequence: Synthetic oligonucleotide
  Antisense strand to SEQ ID NO: 2270204
aaauaccaagcuaaacugu

SEQ ID NO: 2270206 - RNA, 19 nt, Artificial Sequence
  Description of Artificial Sequence: Synthetic oligonucleotide
  Sense strand starting at position 3769 of SEQ ID NO: 1884496
ugucaagacugagcacauu

SEQ ID NO: 2270207 - RNA, 19 nt, Artificial Sequence
  Description of Artificial Sequence: Synthetic oligonucleotide
  Antisense strand to SEQ ID NO: 2270206
aaugugcucagucuugaca

SEQ ID NO: 2270208 - RNA, 19 nt, Artificial Sequence
  Description of Artificial Sequence: Synthetic oligonucleotide
  Sense strand starting at position 3820 of SEQ ID NO: 1884496
gaaauuaaugcaugcagga

SEQ ID NO: 2270209 - RNA, 19 nt, Artificial Sequence
  Description of Artificial Sequence: Synthetic oligonucleotide
  Antisense strand to SEQ ID NO: 2270208
uccugcaugcauuaauuuc

SEQ ID NO: 2270210 - RNA, 19 nt, Artificial Sequence
  Description of Artificial Sequence: Synthetic oligonucleotide
  Sense strand starting at position 3873 of SEQ ID NO: 1884496
aggcaaguggcauaggaaa

SEQ ID NO: 2270211 - RNA, 19 nt, Artificial Sequence
  Description of Artificial Sequence: Synthetic oligonucleotide
  Antisense strand to SEQ ID NO: 2270210
uuuccuaugccacuugccu

SEQ ID NO: 2270212 - RNA, 19 nt, Artificial Sequence
  Description of Artificial Sequence: Synthetic oligonucleotide
  Sense strand starting at position 3875 of SEQ ID NO: 1884496
gcaaguggcauaggaaaua

SEQ ID NO: 2270213 - RNA, 19 nt, Artificial Sequence
  Description of Artificial Sequence: Synthetic oligonucleotide
  Antisense strand to SEQ ID NO: 2270212
uauuuccuaugccacuugc

SEQ ID NO: 2270214 - RNA, 19 nt, Artificial Sequence
  Description of Artificial Sequence: Synthetic oligonucleotide
  Sense strand starting at position 3968 of SEQ ID NO: 1884496
agcuguuugacagaaagua

SEQ ID NO: 2270215 - RNA, 19 nt, Artificial Sequence
  Description of Artificial Sequence: Synthetic oligonucleotide
  Antisense strand to SEQ ID NO: 2270214
uacuuucugucaaacagcu

SEQ ID NO: 2270216 - RNA, 19 nt, Artificial Sequence
  Description of Artificial Sequence: Synthetic oligonucleotide
  Sense strand starting at position 14 of SEQ ID NO: 1884497
gcaacaguugucuggcuga

SEQ ID NO: 2270217 - RNA, 19 nt, Artificial Sequence
  Description of Artificial Sequence: Synthetic oligonucleotide
  Antisense strand to SEQ ID NO: 2270216
ucagccagacaacuguugc

SEQ ID NO: 2270218 - RNA, 19 nt, Artificial Sequence
  Description of Artificial Sequence: Synthetic oligonucleotide
  Sense strand starting at position 241 of SEQ ID NO: 1884497
ucccaaaucuggugaaggu

SEQ ID NO: 2270219 - RNA, 19 nt, Artificial Sequence
  Description of Artificial Sequence: Synthetic oligonucleotide
  Antisense strand to SEQ ID NO: 2270218
accuucaccagauuuggga

SEQ ID NO: 2270220 - RNA, 19 nt, Artificial Sequence
  Description of Artificial Sequence: Synthetic oligonucleotide
  Sense strand starting at position 242 of SEQ ID NO: 1884497
cccaaaucuggugaagguu

SEQ ID NO: 2270221 - RNA, 19 nt, Artificial Sequence
  Description of Artificial Sequence: Synthetic oligonucleotide
  Antisense strand to SEQ ID NO: 2270220
aaccuucaccagauuuggg

SEQ ID NO: 2270222 - RNA, 19 nt, Artificial Sequence
  Description of Artificial Sequence: Synthetic oligonucleotide
  Sense strand starting at position 279 of SEQ ID NO: 1884497
agggcuuucuggcugggaa

SEQ ID NO: 2270223 - RNA, 19 nt, Artificial Sequence
  Description of Artificial Sequence: Synthetic oligonucleotide
  Antisense strand to SEQ ID NO: 2270222
uucccagccagaaagcccu

SEQ ID NO: 2270224 - RNA, 19 nt, Artificial Sequence
  Description of Artificial Sequence: Synthetic oligonucleotide
  Sense strand starting at position 280 of SEQ ID NO: 1884497
gggcuuucuggcugggaag

SEQ ID NO: 2270225 - RNA, 19 nt, Artificial Sequence
  Description of Artificial Sequence: Synthetic oligonucleotide
  Antisense strand to SEQ ID NO: 2270224
cuucccagccagaaagccc

SEQ ID NO: 2270226 - RNA, 19 nt, Artificial Sequence
  Description of Artificial Sequence: Synthetic oligonucleotide
  Sense strand starting at position 281 of SEQ ID NO: 1884497
ggcuuucuggcugggaaga

SEQ ID NO: 2270227 - RNA, 19 nt, Artificial Sequence
  Description of Artificial Sequence: Synthetic oligonucleotide
  Antisense strand to SEQ ID NO: 2270226
ucuucccagccagaaagcc

SEQ ID NO: 2270228 - RNA, 19 nt, Artificial Sequence
  Description of Artificial Sequence: Synthetic oligonucleotide
  Sense strand starting at position 349 of SEQ ID NO: 1884497
gggugaagcuauuauuaau

SEQ ID NO: 2270229 - RNA, 19 nt, Artificial Sequence
  Description of Artificial Sequence: Synthetic oligonucleotide
  Antisense strand to SEQ ID NO: 2270228
auuaauaauagcuucaccc

SEQ ID NO: 2270230 - RNA, 19 nt, Artificial Sequence
  Description of Artificial Sequence: Synthetic oligonucleotide
  Sense strand starting at position 365 of SEQ ID NO: 1884497
aaucuaacgugguucuuau

SEQ ID NO: 2270231 - RNA, 19 nt, Artificial Sequence
  Description of Artificial Sequence: Synthetic oligonucleotide
  Antisense strand to SEQ ID NO: 2270230
auaagaaccacguuagauu

SEQ ID NO: 2270232 - RNA, 19 nt, Artificial Sequence
  Description of Artificial Sequence: Synthetic oligonucleotide
  Sense strand starting at position 513 of SEQ ID NO: 1884497
aaacguauucagggaggga

SEQ ID NO: 2270233 - RNA, 19 nt, Artificial Sequence
  Description of Artificial Sequence: Synthetic oligonucleotide
  Antisense strand to SEQ ID NO: 2270232
ucccucccugaauacguuu

SEQ ID NO: 2270234 - RNA, 19 nt, Artificial Sequence
  Description of Artificial Sequence: Synthetic oligonucleotide
  Sense strand starting at position 550 of SEQ ID NO: 1884497
gaggaaagcucugauuuag

SEQ ID NO: 2270235 - RNA, 19 nt, Artificial Sequence
  Description of Artificial Sequence: Synthetic oligonucleotide
  Antisense strand to SEQ ID NO: 2270234
cuaaaucagagcuuuccuc

SEQ ID NO: 2270236 - RNA, 19 nt, Artificial Sequence
  Description of Artificial Sequence: Synthetic oligonucleotide
  Sense strand starting at position 657 of SEQ ID NO: 1884497
gcccuuuccuaauucugga

SEQ ID NO: 2270237 - RNA, 19 nt, Artificial Sequence
  Description of Artificial Sequence: Synthetic oligonucleotide
  Antisense strand to SEQ ID NO: 2270236
uccagaauuaggaaagggc

SEQ ID NO: 2270238 - RNA, 19 nt, Artificial Sequence
  Description of Artificial Sequence: Synthetic oligonucleotide
  Sense strand starting at position 722 of SEQ ID NO: 1884497
gggcguuuaguuuguugga

SEQ ID NO: 2270239 - RNA, 19 nt, Artificial Sequence
  Description of Artificial Sequence: Synthetic oligonucleotide
  Antisense strand to SEQ ID NO: 2270238
uccaacaaacuaaacgccc

SEQ ID NO: 2270240 - RNA, 19 nt, Artificial Sequence
  Description of Artificial Sequence: Synthetic oligonucleotide
  Sense strand starting at position 723 of SEQ ID NO: 1884497
ggcguuuaguuuguuggaa

SEQ ID NO: 2270241 - RNA, 19 nt, Artificial Sequence
  Description of Artificial Sequence: Synthetic oligonucleotide
  Antisense strand to SEQ ID NO: 2270240
uuccaacaaacuaaacgcc

SEQ ID NO: 2270242 - RNA, 19 nt, Artificial Sequence
  Description of Artificial Sequence: Synthetic oligonucleotide
  Sense strand starting at position 724 of SEQ ID NO: 1884497
gcguuuaguuuguuggaag

SEQ ID NO: 2270243 - RNA, 19 nt, Artificial Sequence
  Description of Artificial Sequence: Synthetic oligonucleotide
  Antisense strand to SEQ ID NO: 2270242
cuuccaacaaacuaaacgc

SEQ ID NO: 2270244 - RNA, 19 nt, Artificial Sequence
  Description of Artificial Sequence: Synthetic oligonucleotide
  Sense strand starting at position 739 of SEQ ID NO: 1884497
gaagaacggugguugugau

SEQ ID NO: 2270245 - RNA, 19 nt, Artificial Sequence
  Description of Artificial Sequence: Synthetic oligonucleotide
  Antisense strand to SEQ ID NO: 2270244
aucacaaccaccguucuuc

SEQ ID NO: 2270246 - RNA, 19 nt, Artificial Sequence
  Description of Artificial Sequence: Synthetic oligonucleotide
  Sense strand starting at position 740 of SEQ ID NO: 1884497
aagaacggugguugugaua

SEQ ID NO: 2270247 - RNA, 19 nt, Artificial Sequence
  Description of Artificial Sequence: Synthetic oligonucleotide
  Antisense strand to SEQ ID NO: 2270246
uaucacaaccaccguucuu

SEQ ID NO: 2270248 - RNA, 19 nt, Artificial Sequence
  Description of Artificial Sequence: Synthetic oligonucleotide
  Sense strand starting at position 860 of SEQ ID NO: 1884497
ugggcacucauguguguau

SEQ ID NO: 2270249 - RNA, 19 nt, Artificial Sequence
  Description of Artificial Sequence: Synthetic oligonucleotide
  Antisense strand to SEQ ID NO: 2270248
auacacacaugagugccca

SEQ ID NO: 2270250 - RNA, 19 nt, Artificial Sequence
  Description of Artificial Sequence: Synthetic oligonucleotide
  Sense strand starting at position 862 of SEQ ID NO: 1884497
ggcacucauguguguaugu

SEQ ID NO: 2270251 - RNA, 19 nt, Artificial Sequence
  Description of Artificial Sequence: Synthetic oligonucleotide
  Antisense strand to SEQ ID NO: 2270250
acauacacacaugagugcc

SEQ ID NO: 2270252 - RNA, 19 nt, Artificial Sequence
  Description of Artificial Sequence: Synthetic oligonucleotide
  Sense strand starting at position 913 of SEQ ID NO: 1884497
gcgucuagcaguguuccua

SEQ ID NO: 2270253 - RNA, 19 nt, Artificial Sequence
  Description of Artificial Sequence: Synthetic oligonucleotide
  Antisense strand to SEQ ID NO: 2270252
uaggaacacugcuagacgc

SEQ ID NO: 2270254 - RNA, 19 nt, Artificial Sequence
  Description of Artificial Sequence: Synthetic oligonucleotide
  Sense strand starting at position 1462 of SEQ ID NO: 1884497
auugcagaaucggaucauu

SEQ ID NO: 2270255 - RNA, 19 nt, Artificial Sequence
  Description of Artificial Sequence: Synthetic oligonucleotide
  Antisense strand to SEQ ID NO: 2270254
aaugauccgauucugcaau

SEQ ID NO: 2270256 - RNA, 19 nt, Artificial Sequence
  Description of Artificial Sequence: Synthetic oligonucleotide
  Sense strand starting at position 1470 of SEQ ID NO: 1884497
aucggaucauuacggucaa

SEQ ID NO: 2270257 - RNA, 19 nt, Artificial Sequence
  Description of Artificial Sequence: Synthetic oligonucleotide
  Antisense strand to SEQ ID NO: 2270256
uugaccguaaugauccgau

SEQ ID NO: 2270258 - RNA, 19 nt, Artificial Sequence
  Description of Artificial Sequence: Synthetic oligonucleotide
  Sense strand starting at position 1471 of SEQ ID NO: 1884497
ucggaucauuacggucaaa

SEQ ID NO: 2270259 - RNA, 19 nt, Artificial Sequence
  Description of Artificial Sequence: Synthetic oligonucleotide
  Antisense strand to SEQ ID NO: 2270258
uuugaccguaaugauccga

SEQ ID NO: 2270260 - RNA, 19 nt, Artificial Sequence
  Description of Artificial Sequence: Synthetic oligonucleotide
  Sense strand starting at position 1527 of SEQ ID NO: 1884497
gguucugacuuggccuuaa

SEQ ID NO: 2270261 - RNA, 19 nt, Artificial Sequence
  Description of Artificial Sequence: Synthetic oligonucleotide
  Antisense strand to SEQ ID NO: 2270260
uuaaggccaagucagaacc

SEQ ID NO: 2270262 - RNA, 19 nt, Artificial Sequence
  Description of Artificial Sequence: Synthetic oligonucleotide
  Sense strand starting at position 1539 of SEQ ID NO: 1884497
gccuuaagcucagauccuu

SEQ ID NO: 2270263 - RNA, 19 nt, Artificial Sequence
  Description of Artificial Sequence: Synthetic oligonucleotide
  Antisense strand to SEQ ID NO: 2270262
aaggaucugagcuuaaggc

SEQ ID NO: 2270264 - RNA, 19 nt, Artificial Sequence
  Description of Artificial Sequence: Synthetic oligonucleotide
  Sense strand starting at position 1701 of SEQ ID NO: 1884497
ugauacaaagucuguuaaa

SEQ ID NO: 2270265 - RNA, 19 nt, Artificial Sequence
  Description of Artificial Sequence: Synthetic oligonucleotide
  Antisense strand to SEQ ID NO: 2270264
uuuaacagacuuuguauca

SEQ ID NO: 2270266 - RNA, 19 nt, Artificial Sequence
  Description of Artificial Sequence: Synthetic oligonucleotide
  Sense strand starting at position 1799 of SEQ ID NO: 1884497
gccgaaucuuccguggaaa

SEQ ID NO: 2270267 - RNA, 19 nt, Artificial Sequence
  Description of Artificial Sequence: Synthetic oligonucleotide
  Antisense strand to SEQ ID NO: 2270266
uuuccacggaagauucggc

SEQ ID NO: 2270268 - RNA, 19 nt, Artificial Sequence
  Description of Artificial Sequence: Synthetic oligonucleotide
  Sense strand starting at position 1892 of SEQ ID NO: 1884497
ugccgucuucucgacgagu

SEQ ID NO: 2270269 - RNA, 19 nt, Artificial Sequence
  Description of Artificial Sequence: Synthetic oligonucleotide
  Antisense strand to SEQ ID NO: 2270268
acucgucgagaagacggca

SEQ ID NO: 2270270 - RNA, 19 nt, Artificial Sequence
  Description of Artificial Sequence: Synthetic oligonucleotide
  Sense strand starting at position 1999 of SEQ ID NO: 1884497
gcagaauaugccggcuucu

SEQ ID NO: 2270271 - RNA, 19 nt, Artificial Sequence
  Description of Artificial Sequence: Synthetic oligonucleotide
  Antisense strand to SEQ ID NO: 2270270
agaagccggcauauucugc

SEQ ID NO: 2270272 - RNA, 19 nt, Artificial Sequence
  Description of Artificial Sequence: Synthetic oligonucleotide
  Sense strand starting at position 2321 of SEQ ID NO: 1884497
cuaucucccuaucagaguu

SEQ ID NO: 2270273 - RNA, 19 nt, Artificial Sequence
  Description of Artificial Sequence: Synthetic oligonucleotide
  Antisense strand to SEQ ID NO: 2270272
aacucugauagggagauag

SEQ ID NO: 2270274 - RNA, 19 nt, Artificial Sequence
  Description of Artificial Sequence: Synthetic oligonucleotide
  Sense strand starting at position 2405 of SEQ ID NO: 1884497
ccucuuaucccucagaguc

SEQ ID NO: 2270275 - RNA, 19 nt, Artificial Sequence
  Description of Artificial Sequence: Synthetic oligonucleotide
  Antisense strand to SEQ ID NO: 2270274
gacucugagggauaagagg

SEQ ID NO: 2270276 - RNA, 19 nt, Artificial Sequence
  Description of Artificial Sequence: Synthetic oligonucleotide
  Sense strand starting at position 2512 of SEQ ID NO: 1884497
agcucauuggugcggacua

SEQ ID NO: 2270277 - RNA, 19 nt, Artificial Sequence
  Description of Artificial Sequence: Synthetic oligonucleotide
  Antisense strand to SEQ ID NO: 2270276
uaguccgcaccaaugagcu

SEQ ID NO: 2270278 - RNA, 19 nt, Artificial Sequence
  Description of Artificial Sequence: Synthetic oligonucleotide
  Sense strand starting at position 2514 of SEQ ID NO: 1884497
cucauuggugcggacuaaa

SEQ ID NO: 2270279 - RNA, 19 nt, Artificial Sequence
  Description of Artificial Sequence: Synthetic oligonucleotide
  Antisense strand to SEQ ID NO: 2270278
uuuaguccgcaccaaugag

SEQ ID NO: 2270280 - RNA, 19 nt, Artificial Sequence
  Description of Artificial Sequence: Synthetic oligonucleotide
  Sense strand starting at position 2718 of SEQ ID NO: 1884497
gcgcgauguauugggaaag

SEQ ID NO: 2270281 - RNA, 19 nt, Artificial Sequence
  Description of Artificial Sequence: Synthetic oligonucleotide
  Antisense strand to SEQ ID NO: 2270280
cuuucccaauacaucgcgc

SEQ ID NO: 2270282 - RNA, 19 nt, Artificial Sequence
  Description of Artificial Sequence: Synthetic oligonucleotide
  Sense strand starting at position 2719 of SEQ ID NO: 1884497
cgcgauguauugggaaaga

SEQ ID NO: 2270283 - RNA, 19 nt, Artificial Sequence
  Description of Artificial Sequence: Synthetic oligonucleotide
  Antisense strand to SEQ ID NO: 2270282
ucuuucccaauacaucgcg

SEQ ID NO: 2270284 - RNA, 19 nt, Artificial Sequence
  Description of Artificial Sequence: Synthetic oligonucleotide
  Sense strand starting at position 2885 of SEQ ID NO: 1884497
acccaaaguucugaaugcu

SEQ ID NO: 2270285 - RNA, 19 nt, Artificial Sequence
  Description of Artificial Sequence: Synthetic oligonucleotide
  Antisense strand to SEQ ID NO: 2270284
agcauucagaacuuugggu

SEQ ID NO: 2270286 - RNA, 19 nt, Artificial Sequence
  Description of Artificial Sequence: Synthetic oligonucleotide
  Sense strand starting at position 2891 of SEQ ID NO: 1884497
aguucugaaugcucaacua

SEQ ID NO: 2270287 - RNA, 19 nt, Artificial Sequence
  Description of Artificial Sequence: Synthetic oligonucleotide
  Antisense strand to SEQ ID NO: 2270286
uaguugagcauucagaacu

SEQ ID NO: 2270288 - RNA, 19 nt, Artificial Sequence
  Description of Artificial Sequence: Synthetic oligonucleotide
  Sense strand starting at position 2937 of SEQ ID NO: 1884497
ccgaaaccgucucaguauu

SEQ ID NO: 2270289 - RNA, 19 nt, Artificial Sequence
  Description of Artificial Sequence: Synthetic oligonucleotide
  Antisense strand to SEQ ID NO: 2270288
aauacugagacgguuucgg

SEQ ID NO: 2270290 - RNA, 19 nt, Artificial Sequence
  Description of Artificial Sequence: Synthetic oligonucleotide
  Sense strand starting at position 3062 of SEQ ID NO: 1884497
gggcgaacccgucauugac

SEQ ID NO: 2270291 - RNA, 19 nt, Artificial Sequence
  Description of Artificial Sequence: Synthetic oligonucleotide
  Antisense strand to SEQ ID NO: 2270290
gucaaugacggguucgccc

SEQ ID NO: 2270292 - RNA, 19 nt, Artificial Sequence
  Description of Artificial Sequence: Synthetic oligonucleotide
  Sense strand starting at position 3108 of SEQ ID NO: 1884497
ccaccuucugcgggaggaa

SEQ ID NO: 2270293 - RNA, 19 nt, Artificial Sequence
  Description of Artificial Sequence: Synthetic oligonucleotide
  Antisense strand to SEQ ID NO: 2270292
uuccucccgcagaaggugg

SEQ ID NO: 2270294 - RNA, 19 nt, Artificial Sequence
  Description of Artificial Sequence: Synthetic oligonucleotide
  Sense strand starting at position 3463 of SEQ ID NO: 1884497
ccauauuuguucuuuggca

SEQ ID NO: 2270295 - RNA, 19 nt, Artificial Sequence
  Description of Artificial Sequence: Synthetic oligonucleotide
  Antisense strand to SEQ ID NO: 2270294
ugccaaagaacaaauaugg

SEQ ID NO: 2270296 - RNA, 19 nt, Artificial Sequence
  Description of Artificial Sequence: Synthetic oligonucleotide
  Sense strand starting at position 346 of SEQ ID NO: 1884498
gugcccauucucuagaaug

SEQ ID NO: 2270297 - RNA, 19 nt, Artificial Sequence
  Description of Artificial Sequence: Synthetic oligonucleotide
  Antisense strand to SEQ ID NO: 2270296
cauucuagagaaugggcac

SEQ ID NO: 2270298 - RNA, 19 nt, Artificial Sequence
  Description of Artificial Sequence: Synthetic oligonucleotide
  Sense strand starting at position 348 of SEQ ID NO: 1884498
gcccauucucuagaaugag

SEQ ID NO: 2270299 - RNA, 19 nt, Artificial Sequence
  Description of Artificial Sequence: Synthetic oligonucleotide
  Antisense strand to SEQ ID NO: 2270298
cucauucuagagaaugggc

SEQ ID NO: 2270300 - RNA, 19 nt, Artificial Sequence
  Description of Artificial Sequence: Synthetic oligonucleotide
  Sense strand starting at position 356 of SEQ ID NO: 1884498
ucuagaaugaggcauugua

SEQ ID NO: 2270301 - RNA, 19 nt, Artificial Sequence
  Description of Artificial Sequence: Synthetic oligonucleotide
  Antisense strand to SEQ ID NO: 2270300
uacaaugccucauucuaga

SEQ ID NO: 2270302 - RNA, 19 nt, Artificial Sequence
  Description of Artificial Sequence: Synthetic oligonucleotide
  Sense strand starting at position 391 of SEQ ID NO: 1884498
aguaguguauuuguacgaa

SEQ ID NO: 2270303 - RNA, 19 nt, Artificial Sequence
  Description of Artificial Sequence: Synthetic oligonucleotide
  Antisense strand to SEQ ID NO: 2270302
uucguacaaauacacuacu

SEQ ID NO: 2270304 - RNA, 19 nt, Artificial Sequence
  Description of Artificial Sequence: Synthetic oligonucleotide
  Sense strand starting at position 394 of SEQ ID NO: 1884498
aguguauuuguacgaaguu

SEQ ID NO: 2270305 - RNA, 19 nt, Artificial Sequence
  Description of Artificial Sequence: Synthetic oligonucleotide
  Antisense strand to SEQ ID NO: 2270304
aacuucguacaaauacacu

SEQ ID NO: 2270306 - RNA, 19 nt, Artificial Sequence
  Description of Artificial Sequence: Synthetic oligonucleotide
  Sense strand starting at position 500 of SEQ ID NO: 1884498
ggaucuaccugguucucaa

SEQ ID NO: 2270307 - RNA, 19 nt, Artificial Sequence
  Description of Artificial Sequence: Synthetic oligonucleotide
  Antisense strand to SEQ ID NO: 2270306
uugagaaccagguagaucc

SEQ ID NO: 2270308 - RNA, 19 nt, Artificial Sequence
  Description of Artificial Sequence: Synthetic oligonucleotide
  Sense strand starting at position 607 of SEQ ID NO: 1884498
guagaaauaccagguuuaa

SEQ ID NO: 2270309 - RNA, 19 nt, Artificial Sequence
  Description of Artificial Sequence: Synthetic oligonucleotide
  Antisense strand to SEQ ID NO: 2270308
uuaaaccugguauuucuac

SEQ ID NO: 2270310 - RNA, 19 nt, Artificial Sequence
  Description of Artificial Sequence: Synthetic oligonucleotide
  Sense strand starting at position 731 of SEQ ID NO: 1884498
gugcaauuaugacugaacu

SEQ ID NO: 2270311 - RNA, 19 nt, Artificial Sequence
  Description of Artificial Sequence: Synthetic oligonucleotide
  Antisense strand to SEQ ID NO: 2270310
aguucagucauaauugcac

SEQ ID NO: 2270312 - RNA, 19 nt, Artificial Sequence
  Description of Artificial Sequence: Synthetic oligonucleotide
  Sense strand starting at position 732 of SEQ ID NO: 1884498
ugcaauuaugacugaacug

SEQ ID NO: 2270313 - RNA, 19 nt, Artificial Sequence
  Description of Artificial Sequence: Synthetic oligonucleotide
  Antisense strand to SEQ ID NO: 2270312
caguucagucauaauugca

SEQ ID NO: 2270314 - RNA, 19 nt, Artificial Sequence
  Description of Artificial Sequence: Synthetic oligonucleotide
  Sense strand starting at position 770 of SEQ ID NO: 1884498
uuugcaauauugcugagaa

SEQ ID NO: 2270315 - RNA, 19 nt, Artificial Sequence
  Description of Artificial Sequence: Synthetic oligonucleotide
  Antisense strand to SEQ ID NO: 2270314
uucucagcaauauugcaaa

SEQ ID NO: 2270316 - RNA, 19 nt, Artificial Sequence
  Description of Artificial Sequence: Synthetic oligonucleotide
  Sense strand starting at position 772 of SEQ ID NO: 1884498
ugcaauauugcugagaaau

SEQ ID NO: 2270317 - RNA, 19 nt, Artificial Sequence
  Description of Artificial Sequence: Synthetic oligonucleotide
  Antisense strand to SEQ ID NO: 2270316
auuucucagcaauauugca

SEQ ID NO: 2270318 - RNA, 19 nt, Artificial Sequence
  Description of Artificial Sequence: Synthetic oligonucleotide
  Sense strand starting at position 1069 of SEQ ID NO: 1884498
acagguuuacgugacuuua

SEQ ID NO: 2270319 - RNA, 19 nt, Artificial Sequence
  Description of Artificial Sequence: Synthetic oligonucleotide
  Antisense strand to SEQ ID NO: 2270318
uaaagucacguaaaccugu

SEQ ID NO: 2270320 - RNA, 19 nt, Artificial Sequence
  Description of Artificial Sequence: Synthetic oligonucleotide
  Sense strand starting at position 1088 of SEQ ID NO: 1884498
ggaugaaauauguguaacu

SEQ ID NO: 2270321 - RNA, 19 nt, Artificial Sequence
  Description of Artificial Sequence: Synthetic oligonucleotide
  Antisense strand to SEQ ID NO: 2270320
aguuacacauauuucaucc

SEQ ID NO: 2270322 - RNA, 19 nt, Artificial Sequence
  Description of Artificial Sequence: Synthetic oligonucleotide
  Sense strand starting at position 1089 of SEQ ID NO: 1884498
gaugaaauauguguaacug

SEQ ID NO: 2270323 - RNA, 19 nt, Artificial Sequence
  Description of Artificial Sequence: Synthetic oligonucleotide
  Antisense strand to SEQ ID NO: 2270322
caguuacacauauuucauc

SEQ ID NO: 2270324 - RNA, 19 nt, Artificial Sequence
  Description of Artificial Sequence: Synthetic oligonucleotide
  Sense strand starting at position 1105 of SEQ ID NO: 1884498
cugccaguugaauaaugau

SEQ ID NO: 2270325 - RNA, 19 nt, Artificial Sequence
  Description of Artificial Sequence: Synthetic oligonucleotide
  Antisense strand to SEQ ID NO: 2270324
aucauuauucaacuggcag

SEQ ID NO: 2270326 - RNA, 19 nt, Artificial Sequence
  Description of Artificial Sequence: Synthetic oligonucleotide
  Sense strand starting at position 1235 of SEQ ID NO: 1884498
uguguuauaccugaaauac

SEQ ID NO: 2270327 - RNA, 19 nt, Artificial Sequence
  Description of Artificial Sequence: Synthetic oligonucleotide
  Antisense strand to SEQ ID NO: 2270326
guauuucagguauaacaca

SEQ ID NO: 2270328 - RNA, 19 nt, Artificial Sequence
  Description of Artificial Sequence: Synthetic oligonucleotide
  Sense strand starting at position 1244 of SEQ ID NO: 1884498
ccugaaauacugggauggu

SEQ ID NO: 2270329 - RNA, 19 nt, Artificial Sequence
  Description of Artificial Sequence: Synthetic oligonucleotide
  Antisense strand to SEQ ID NO: 2270328
accaucccaguauuucagg

SEQ ID NO: 2270330 - RNA, 19 nt, Artificial Sequence
  Description of Artificial Sequence: Synthetic oligonucleotide
  Sense strand starting at position 1247 of SEQ ID NO: 1884498
gaaauacugggauggugua

SEQ ID NO: 2270331 - RNA, 19 nt, Artificial Sequence
  Description of Artificial Sequence: Synthetic oligonucleotide
  Antisense strand to SEQ ID NO: 2270330
uacaccaucccaguauuuc

SEQ ID NO: 2270332 - RNA, 19 nt, Artificial Sequence
  Description of Artificial Sequence: Synthetic oligonucleotide
  Sense strand starting at position 1284 of SEQ ID NO: 1884498
uugaguccuugauuauuau

SEQ ID NO: 2270333 - RNA, 19 nt, Artificial Sequence
  Description of Artificial Sequence: Synthetic oligonucleotide
  Antisense strand to SEQ ID NO: 2270332
auaauaaucaaggacucaa

SEQ ID NO: 2270334 - RNA, 19 nt, Artificial Sequence
  Description of Artificial Sequence: Synthetic oligonucleotide
  Sense strand starting at position 1285 of SEQ ID NO: 1884498
ugaguccuugauuauuaua

SEQ ID NO: 2270335 - RNA, 19 nt, Artificial Sequence
  Description of Artificial Sequence: Synthetic oligonucleotide
  Antisense strand to SEQ ID NO: 2270334
uauaauaaucaaggacuca

SEQ ID NO: 2270336 - RNA, 19 nt, Artificial Sequence
  Description of Artificial Sequence: Synthetic oligonucleotide
  Sense strand starting at position 1287 of SEQ ID NO: 1884498
aguccuugauuauuauaag

SEQ ID NO: 2270337 - RNA, 19 nt, Artificial Sequence
  Description of Artificial Sequence: Synthetic oligonucleotide
  Antisense strand to SEQ ID NO: 2270336
cuuauaauaaucaaggacu

SEQ ID NO: 2270338 - RNA, 19 nt, Artificial Sequence
  Description of Artificial Sequence: Synthetic oligonucleotide
  Sense strand starting at position 1388 of SEQ ID NO: 1884498
aggauacauuuccaguuau

SEQ ID NO: 2270339 - RNA, 19 nt, Artificial Sequence
  Description of Artificial Sequence: Synthetic oligonucleotide
  Antisense strand to SEQ ID NO: 2270338
auaacuggaaauguauccu

SEQ ID NO: 2270340 - RNA, 19 nt, Artificial Sequence
  Description of Artificial Sequence: Synthetic oligonucleotide
  Sense strand starting at position 1434 of SEQ ID NO: 1884498
agauccaguuuauuauaca

SEQ ID NO: 2270341 - RNA, 19 nt, Artificial Sequence
  Description of Artificial Sequence: Synthetic oligonucleotide
  Antisense strand to SEQ ID NO: 2270340
uguauaauaaacuggaucu

SEQ ID NO: 2270342 - RNA, 19 nt, Artificial Sequence
  Description of Artificial Sequence: Synthetic oligonucleotide
  Sense strand starting at position 1456 of SEQ ID NO: 1884498
auauccagcucugucagaa

SEQ ID NO: 2270343 - RNA, 19 nt, Artificial Sequence
  Description of Artificial Sequence: Synthetic oligonucleotide
  Antisense strand to SEQ ID NO: 2270342
uucugacagagcuggauau

SEQ ID NO: 2270344 - RNA, 19 nt, Artificial Sequence
  Description of Artificial Sequence: Synthetic oligonucleotide
  Sense strand starting at position 1590 of SEQ ID NO: 1884498
gcgaucacucaagaauggu

SEQ ID NO: 2270345 - RNA, 19 nt, Artificial Sequence
  Description of Artificial Sequence: Synthetic oligonucleotide
  Antisense strand to SEQ ID NO: 2270344
accauucuugagugaucgc

SEQ ID NO: 2270346 - RNA, 19 nt, Artificial Sequence
  Description of Artificial Sequence: Synthetic oligonucleotide
  Sense strand starting at position 1619 of SEQ ID NO: 1884498
ggaguaugccaauaccuaa

SEQ ID NO: 2270347 - RNA, 19 nt, Artificial Sequence
  Description of Artificial Sequence: Synthetic oligonucleotide
  Antisense strand to SEQ ID NO: 2270346
uuagguauuggcauacucc

SEQ ID NO: 2270348 - RNA, 19 nt, Artificial Sequence
  Description of Artificial Sequence: Synthetic oligonucleotide
  Sense strand starting at position 1644 of SEQ ID NO: 1884498
aaaguagauuaucugguuu

SEQ ID NO: 2270349 - RNA, 19 nt, Artificial Sequence
  Description of Artificial Sequence: Synthetic oligonucleotide
  Antisense strand to SEQ ID NO: 2270348
aaaccagauaaucuacuuu

SEQ ID NO: 2270350 - RNA, 19 nt, Artificial Sequence
  Description of Artificial Sequence: Synthetic oligonucleotide
  Sense strand starting at position 1733 of SEQ ID NO: 1884498
acaauaguccugugaguaa

SEQ ID NO: 2270351 - RNA, 19 nt, Artificial Sequence
  Description of Artificial Sequence: Synthetic oligonucleotide
  Antisense strand to SEQ ID NO: 2270350
uuacucacaggacuauugu

SEQ ID NO: 2270352 - RNA, 19 nt, Artificial Sequence
  Description of Artificial Sequence: Synthetic oligonucleotide
  Sense strand starting at position 1737 of SEQ ID NO: 1884498
uaguccugugaguaaagua

SEQ ID NO: 2270353 - RNA, 19 nt, Artificial Sequence
  Description of Artificial Sequence: Synthetic oligonucleotide
  Antisense strand to SEQ ID NO: 2270352
uacuuuacucacaggacua

SEQ ID NO: 2270354 - RNA, 19 nt, Artificial Sequence
  Description of Artificial Sequence: Synthetic oligonucleotide
  Sense strand starting at position 1899 of SEQ ID NO: 1884498
gugauucuugcugaaucac

SEQ ID NO: 2270355 - RNA, 19 nt, Artificial Sequence
  Description of Artificial Sequence: Synthetic oligonucleotide
  Antisense strand to SEQ ID NO: 2270354
gugauucagcaagaaucac

SEQ ID NO: 2270356 - RNA, 19 nt, Artificial Sequence
  Description of Artificial Sequence: Synthetic oligonucleotide
  Sense strand starting at position 2443 of SEQ ID NO: 1884498
cgacuuuggcauuauauaa

SEQ ID NO: 2270357 - RNA, 19 nt, Artificial Sequence
  Description of Artificial Sequence: Synthetic oligonucleotide
  Antisense strand to SEQ ID NO: 2270356
uuauauaaugccaaagucg

SEQ ID NO: 2270358 - RNA, 19 nt, Artificial Sequence
  Description of Artificial Sequence: Synthetic oligonucleotide
  Sense strand starting at position 2501 of SEQ ID NO: 1884498
uuaugaccuguguaaucau

SEQ ID NO: 2270359 - RNA, 19 nt, Artificial Sequence
  Description of Artificial Sequence: Synthetic oligonucleotide
  Antisense strand to SEQ ID NO: 2270358
augauuacacaggucauaa

SEQ ID NO: 2270360 - RNA, 19 nt, Artificial Sequence
  Description of Artificial Sequence: Synthetic oligonucleotide
  Sense strand starting at position 2765 of SEQ ID NO: 1884498
guagaaaugucccugaaua

SEQ ID NO: 2270361 - RNA, 19 nt, Artificial Sequence
  Description of Artificial Sequence: Synthetic oligonucleotide
  Antisense strand to SEQ ID NO: 2270360
uauucagggacauuucuac

SEQ ID NO: 2270362 - RNA, 19 nt, Artificial Sequence
  Description of Artificial Sequence: Synthetic oligonucleotide
  Sense strand starting at position 2787 of SEQ ID NO: 1884498
ugaaacuugcucugacaac

SEQ ID NO: 2270363 - RNA, 19 nt, Artificial Sequence
  Description of Artificial Sequence: Synthetic oligonucleotide
  Antisense strand to SEQ ID NO: 2270362
guugucagagcaaguuuca

SEQ ID NO: 2270364 - RNA, 19 nt, Artificial Sequence
  Description of Artificial Sequence: Synthetic oligonucleotide
  Sense strand starting at position 2915 of SEQ ID NO: 1884498
uuguguauaucaucaacau

SEQ ID NO: 2270365 - RNA, 19 nt, Artificial Sequence
  Description of Artificial Sequence: Synthetic oligonucleotide
  Antisense strand to SEQ ID NO: 2270364
auguugaugauauacacaa

SEQ ID NO: 2270366 - RNA, 19 nt, Artificial Sequence
  Description of Artificial Sequence: Synthetic oligonucleotide
  Sense strand starting at position 2916 of SEQ ID NO: 1884498
uguguauaucaucaacaug

SEQ ID NO: 2270367 - RNA, 19 nt, Artificial Sequence
  Description of Artificial Sequence: Synthetic oligonucleotide
  Antisense strand to SEQ ID NO: 2270366
cauguugaugauauacaca

SEQ ID NO: 2270368 - RNA, 19 nt, Artificial Sequence
  Description of Artificial Sequence: Synthetic oligonucleotide
  Sense strand starting at position 2985 of SEQ ID NO: 1884498
cuguuuaucuauucuacag

SEQ ID NO: 2270369 - RNA, 19 nt, Artificial Sequence
  Description of Artificial Sequence: Synthetic oligonucleotide
  Antisense strand to SEQ ID NO: 2270368
cuguagaauagauaaacag

SEQ ID NO: 2270370 - RNA, 19 nt, Artificial Sequence
  Description of Artificial Sequence: Synthetic oligonucleotide
  Sense strand starting at position 3437 of SEQ ID NO: 1884498
cuuuguccacguuaaacaa

SEQ ID NO: 2270371 - RNA, 19 nt, Artificial Sequence
  Description of Artificial Sequence: Synthetic oligonucleotide
  Antisense strand to SEQ ID NO: 2270370
uuguuuaacguggacaaag

SEQ ID NO: 2270372 - RNA, 19 nt, Artificial Sequence
  Description of Artificial Sequence: Synthetic oligonucleotide
  Sense strand starting at position 3506 of SEQ ID NO: 1884498
cucuaucguggugaucaaa

SEQ ID NO: 2270373 - RNA, 19 nt, Artificial Sequence
  Description of Artificial Sequence: Synthetic oligonucleotide
  Antisense strand to SEQ ID NO: 2270372
uuugaucaccacgauagag

SEQ ID NO: 2270374 - RNA, 19 nt, Artificial Sequence
  Description of Artificial Sequence: Synthetic oligonucleotide
  Sense strand starting at position 3981 of SEQ ID NO: 1884498
acuugucauggcugaacaa

SEQ ID NO: 2270375 - RNA, 19 nt, Artificial Sequence
  Description of Artificial Sequence: Synthetic oligonucleotide
  Antisense strand to SEQ ID NO: 2270374
uuguucagccaugacaagu

SEQ ID NO: 2270376 - RNA, 19 nt, Artificial Sequence
  Description of Artificial Sequence: Synthetic oligonucleotide
  Sense strand starting at position 213 of SEQ ID NO: 1884499
uguuguugugaucagaaug

SEQ ID NO: 2270377 - RNA, 19 nt, Artificial Sequence
  Description of Artificial Sequence: Synthetic oligonucleotide
  Antisense strand to SEQ ID NO: 2270376
cauucugaucacaacaaca

SEQ ID NO: 2270378 - RNA, 19 nt, Artificial Sequence
  Description of Artificial Sequence: Synthetic oligonucleotide
  Sense strand starting at position 237 of SEQ ID NO: 1884499
gcugucugggcaggagaaa

SEQ ID NO: 2270379 - RNA, 19 nt, Artificial Sequence
  Description of Artificial Sequence: Synthetic oligonucleotide
  Antisense strand to SEQ ID NO: 2270378
uuucuccugcccagacagc

SEQ ID NO: 2270380 - RNA, 19 nt, Artificial Sequence
  Description of Artificial Sequence: Synthetic oligonucleotide
  Sense strand starting at position 349 of SEQ ID NO: 1884499
gggagucugacccaucuuu

SEQ ID NO: 2270381 - RNA, 19 nt, Artificial Sequence
  Description of Artificial Sequence: Synthetic oligonucleotide
  Antisense strand to SEQ ID NO: 2270380
aaagaugggucagacuccc

SEQ ID NO: 2270382 - RNA, 19 nt, Artificial Sequence
  Description of Artificial Sequence: Synthetic oligonucleotide
  Sense strand starting at position 657 of SEQ ID NO: 1884499
gaaguaaauggcugaguca

SEQ ID NO: 2270383 - RNA, 19 nt, Artificial Sequence
  Description of Artificial Sequence: Synthetic oligonucleotide
  Antisense strand to SEQ ID NO: 2270382
ugacucagccauuuacuuc

SEQ ID NO: 2270384 - RNA, 19 nt, Artificial Sequence
  Description of Artificial Sequence: Synthetic oligonucleotide
  Sense strand starting at position 658 of SEQ ID NO: 1884499
aaguaaauggcugagucau

SEQ ID NO: 2270385 - RNA, 19 nt, Artificial Sequence
  Description of Artificial Sequence: Synthetic oligonucleotide
  Antisense strand to SEQ ID NO: 2270384
augacucagccauuuacuu

SEQ ID NO: 2270386 - RNA, 19 nt, Artificial Sequence
  Description of Artificial Sequence: Synthetic oligonucleotide
  Sense strand starting at position 660 of SEQ ID NO: 1884499
guaaauggcugagucauug

SEQ ID NO: 2270387 - RNA, 19 nt, Artificial Sequence
  Description of Artificial Sequence: Synthetic oligonucleotide
  Antisense strand to SEQ ID NO: 2270386
caaugacucagccauuuac

SEQ ID NO: 2270388 - RNA, 19 nt, Artificial Sequence
  Description of Artificial Sequence: Synthetic oligonucleotide
  Sense strand starting at position 668 of SEQ ID NO: 1884499
cugagucauugcucucaaa

SEQ ID NO: 2270389 - RNA, 19 nt, Artificial Sequence
  Description of Artificial Sequence: Synthetic oligonucleotide
  Antisense strand to SEQ ID NO: 2270388
uuugagagcaaugacucag

SEQ ID NO: 2270390 - RNA, 19 nt, Artificial Sequence
  Description of Artificial Sequence: Synthetic oligonucleotide
  Sense strand starting at position 992 of SEQ ID NO: 1884499
ggccucaauuuccuuguaa

SEQ ID NO: 2270391 - RNA, 19 nt, Artificial Sequence
  Description of Artificial Sequence: Synthetic oligonucleotide
  Antisense strand to SEQ ID NO: 2270390
uuacaaggaaauugaggcc

SEQ ID NO: 2270392 - RNA, 19 nt, Artificial Sequence
  Description of Artificial Sequence: Synthetic oligonucleotide
  Sense strand starting at position 1007 of SEQ ID NO: 1884499
guaauugguccugggagaa

SEQ ID NO: 2270393 - RNA, 19 nt, Artificial Sequence
  Description of Artificial Sequence: Synthetic oligonucleotide
  Antisense strand to SEQ ID NO: 2270392
uucucccaggaccaauuac

SEQ ID NO: 2270394 - RNA, 19 nt, Artificial Sequence
  Description of Artificial Sequence: Synthetic oligonucleotide
  Sense strand starting at position 1021 of SEQ ID NO: 1884499
gagaaucauucuguggguu

SEQ ID NO: 2270395 - RNA, 19 nt, Artificial Sequence
  Description of Artificial Sequence: Synthetic oligonucleotide
  Antisense strand to SEQ ID NO: 2270394
aacccacagaaugauucuc

SEQ ID NO: 2270396 - RNA, 19 nt, Artificial Sequence
  Description of Artificial Sequence: Synthetic oligonucleotide
  Sense strand starting at position 1024 of SEQ ID NO: 1884499
aaucauucuguggguugau

SEQ ID NO: 2270397 - RNA, 19 nt, Artificial Sequence
  Description of Artificial Sequence: Synthetic oligonucleotide
  Antisense strand to SEQ ID NO: 2270396
aucaacccacagaaugauu

SEQ ID NO: 2270398 - RNA, 19 nt, Artificial Sequence
  Description of Artificial Sequence: Synthetic oligonucleotide
  Sense strand starting at position 1025 of SEQ ID NO: 1884499
aucauucuguggguugauu

SEQ ID NO: 2270399 - RNA, 19 nt, Artificial Sequence
  Description of Artificial Sequence: Synthetic oligonucleotide
  Antisense strand to SEQ ID NO: 2270398
aaucaacccacagaaugau

SEQ ID NO: 2270400 - RNA, 19 nt, Artificial Sequence
  Description of Artificial Sequence: Synthetic oligonucleotide
  Sense strand starting at position 1066 of SEQ ID NO: 1884499
agauuaagucaugggcaac

SEQ ID NO: 2270401 - RNA, 19 nt, Artificial Sequence
  Description of Artificial Sequence: Synthetic oligonucleotide
  Antisense strand to SEQ ID NO: 2270400
guugcccaugacuuaaucu

SEQ ID NO: 2270402 - RNA, 19 nt, Artificial Sequence
  Description of Artificial Sequence: Synthetic oligonucleotide
  Sense strand starting at position 1158 of SEQ ID NO: 1884499
gggaguggugcugagaaag

SEQ ID NO: 2270403 - RNA, 19 nt, Artificial Sequence
  Description of Artificial Sequence: Synthetic oligonucleotide
  Antisense strand to SEQ ID NO: 2270402
cuuucucagcaccacuccc

SEQ ID NO: 2270404 - RNA, 19 nt, Artificial Sequence
  Description of Artificial Sequence: Synthetic oligonucleotide
  Sense strand starting at position 1226 of SEQ ID NO: 1884499
gggaaggagcuguagguau

SEQ ID NO: 2270405 - RNA, 19 nt, Artificial Sequence
  Description of Artificial Sequence: Synthetic oligonucleotide
  Antisense strand to SEQ ID NO: 2270404
auaccuacagcuccuuccc

SEQ ID NO: 2270406 - RNA, 19 nt, Artificial Sequence
  Description of Artificial Sequence: Synthetic oligonucleotide
  Sense strand starting at position 1281 of SEQ ID NO: 1884499
agcaauccucucgaguuaa

SEQ ID NO: 2270407 - RNA, 19 nt, Artificial Sequence
  Description of Artificial Sequence: Synthetic oligonucleotide
  Antisense strand to SEQ ID NO: 2270406
uuaacucgagaggauugcu

SEQ ID NO: 2270408 - RNA, 19 nt, Artificial Sequence
  Description of Artificial Sequence: Synthetic oligonucleotide
  Sense strand starting at position 1339 of SEQ ID NO: 1884499
aggccuacucuguaccuaa

SEQ ID NO: 2270409 - RNA, 19 nt, Artificial Sequence
  Description of Artificial Sequence: Synthetic oligonucleotide
  Antisense strand to SEQ ID NO: 2270408
uuagguacagaguaggccu

SEQ ID NO: 2270410 - RNA, 19 nt, Artificial Sequence
  Description of Artificial Sequence: Synthetic oligonucleotide
  Sense strand starting at position 1402 of SEQ ID NO: 1884499
ugagucugggaaugcuuau

SEQ ID NO: 2270411 - RNA, 19 nt, Artificial Sequence
  Description of Artificial Sequence: Synthetic oligonucleotide
  Antisense strand to SEQ ID NO: 2270410
auaagcauucccagacuca

SEQ ID NO: 2270412 - RNA, 19 nt, Artificial Sequence
  Description of Artificial Sequence: Synthetic oligonucleotide
  Sense strand starting at position 1408 of SEQ ID NO: 1884499
ugggaaugcuuauccuucu

SEQ ID NO: 2270413 - RNA, 19 nt, Artificial Sequence
  Description of Artificial Sequence: Synthetic oligonucleotide
  Antisense strand to SEQ ID NO: 2270412
agaaggauaagcauuccca

SEQ ID NO: 2270414 - RNA, 19 nt, Artificial Sequence
  Description of Artificial Sequence: Synthetic oligonucleotide
  Sense strand starting at position 1409 of SEQ ID NO: 1884499
gggaaugcuuauccuucuu

SEQ ID NO: 2270415 - RNA, 19 nt, Artificial Sequence
  Description of Artificial Sequence: Synthetic oligonucleotide
  Antisense strand to SEQ ID NO: 2270414
aagaaggauaagcauuccc

SEQ ID NO: 2270416 - RNA, 19 nt, Artificial Sequence
  Description of Artificial Sequence: Synthetic oligonucleotide
  Sense strand starting at position 1447 of SEQ ID NO: 1884499
acuucugguccuuaaaggu

SEQ ID NO: 2270417 - RNA, 19 nt, Artificial Sequence
  Description of Artificial Sequence: Synthetic oligonucleotide
  Antisense strand to SEQ ID NO: 2270416
accuuuaaggaccagaagu

SEQ ID NO: 2270418 - RNA, 19 nt, Artificial Sequence
  Description of Artificial Sequence: Synthetic oligonucleotide
  Sense strand starting at position 1588 of SEQ ID NO: 1884499
agaugagugagcugucaag

SEQ ID NO: 2270419 - RNA, 19 nt, Artificial Sequence
  Description of Artificial Sequence: Synthetic oligonucleotide
  Antisense strand to SEQ ID NO: 2270418
cuugacagcucacucaucu

SEQ ID NO: 2270420 - RNA, 19 nt, Artificial Sequence
  Description of Artificial Sequence: Synthetic oligonucleotide
  Sense strand starting at position 1594 of SEQ ID NO: 1884499
gugagcugucaagacuuaa

SEQ ID NO: 2270421 - RNA, 19 nt, Artificial Sequence
  Description of Artificial Sequence: Synthetic oligonucleotide
  Antisense strand to SEQ ID NO: 2270420
uuaagucuugacagcucac

SEQ ID NO: 2270422 - RNA, 19 nt, Artificial Sequence
  Description of Artificial Sequence: Synthetic oligonucleotide
  Sense strand starting at position 1606 of SEQ ID NO: 1884499
gacuuaacacaggguugua

SEQ ID NO: 2270423 - RNA, 19 nt, Artificial Sequence
  Description of Artificial Sequence: Synthetic oligonucleotide
  Antisense strand to SEQ ID NO: 2270422
uacaacccuguguuaaguc

SEQ ID NO: 2270424 - RNA, 19 nt, Artificial Sequence
  Description of Artificial Sequence: Synthetic oligonucleotide
  Sense strand starting at position 1713 of SEQ ID NO: 1884499
uguuaccucccagaaguua

SEQ ID NO: 2270425 - RNA, 19 nt, Artificial Sequence
  Description of Artificial Sequence: Synthetic oligonucleotide
  Antisense strand to SEQ ID NO: 2270424
uaacuucugggagguaaca

SEQ ID NO: 2270426 - RNA, 19 nt, Artificial Sequence
  Description of Artificial Sequence: Synthetic oligonucleotide
  Sense strand starting at position 1749 of SEQ ID NO: 1884499
ggaggcagugucuaucaca

SEQ ID NO: 2270427 - RNA, 19 nt, Artificial Sequence
  Description of Artificial Sequence: Synthetic oligonucleotide
  Antisense strand to SEQ ID NO: 2270426
ugugauagacacugccucc

SEQ ID NO: 2270428 - RNA, 19 nt, Artificial Sequence
  Description of Artificial Sequence: Synthetic oligonucleotide
  Sense strand starting at position 1820 of SEQ ID NO: 1884499
aagugaggcuacccagauu

SEQ ID NO: 2270429 - RNA, 19 nt, Artificial Sequence
  Description of Artificial Sequence: Synthetic oligonucleotide
  Antisense strand to SEQ ID NO: 2270428
aaucuggguagccucacuu

SEQ ID NO: 2270430 - RNA, 19 nt, Artificial Sequence
  Description of Artificial Sequence: Synthetic oligonucleotide
  Sense strand starting at position 1873 of SEQ ID NO: 1884499
gaggaauugcaaugcugag

SEQ ID NO: 2270431 - RNA, 19 nt, Artificial Sequence
  Description of Artificial Sequence: Synthetic oligonucleotide
  Antisense strand to SEQ ID NO: 2270430
cucagcauugcaauuccuc

SEQ ID NO: 2270432 - RNA, 19 nt, Artificial Sequence
  Description of Artificial Sequence: Synthetic oligonucleotide
  Sense strand starting at position 2268 of SEQ ID NO: 1884499
gaugcucaguccucaaaga

SEQ ID NO: 2270433 - RNA, 19 nt, Artificial Sequence
  Description of Artificial Sequence: Synthetic oligonucleotide
  Antisense strand to SEQ ID NO: 2270432
ucuuugaggacugagcauc

SEQ ID NO: 2270434 - RNA, 19 nt, Artificial Sequence
  Description of Artificial Sequence: Synthetic oligonucleotide
  Sense strand starting at position 2269 of SEQ ID NO: 1884499
augcucaguccucaaagaa

SEQ ID NO: 2270435 - RNA, 19 nt, Artificial Sequence
  Description of Artificial Sequence: Synthetic oligonucleotide
  Antisense strand to SEQ ID NO: 2270434
uucuuugaggacugagcau

SEQ ID NO: 2270436 - RNA, 19 nt, Artificial Sequence
  Description of Artificial Sequence: Synthetic oligonucleotide
  Sense strand starting at position 2350 of SEQ ID NO: 1884499
uugcauuuccgcuagcuua

SEQ ID NO: 2270437 - RNA, 19 nt, Artificial Sequence
  Description of Artificial Sequence: Synthetic oligonucleotide
  Antisense strand to SEQ ID NO: 2270436
uaagcuagcggaaaugcaa

SEQ ID NO: 2270438 - RNA, 19 nt, Artificial Sequence
  Description of Artificial Sequence: Synthetic oligonucleotide
  Sense strand starting at position 2613 of SEQ ID NO: 1884499
cugaaagcacuuugcagau

SEQ ID NO: 2270439 - RNA, 19 nt, Artificial Sequence
  Description of Artificial Sequence: Synthetic oligonucleotide
  Antisense strand to SEQ ID NO: 2270438
aucugcaaagugcuuucag

SEQ ID NO: 2270440 - RNA, 19 nt, Artificial Sequence
  Description of Artificial Sequence: Synthetic oligonucleotide
  Sense strand starting at position 2713 of SEQ ID NO: 1884499
cugaguuauuuccugucuu

SEQ ID NO: 2270441 - RNA, 19 nt, Artificial Sequence
  Description of Artificial Sequence: Synthetic oligonucleotide
  Antisense strand to SEQ ID NO: 2270440
aagacaggaaauaacucag

SEQ ID NO: 2270442 - RNA, 19 nt, Artificial Sequence
  Description of Artificial Sequence: Synthetic oligonucleotide
  Sense strand starting at position 2726 of SEQ ID NO: 1884499
ugucuuauccagggacccu

SEQ ID NO: 2270443 - RNA, 19 nt, Artificial Sequence
  Description of Artificial Sequence: Synthetic oligonucleotide
  Antisense strand to SEQ ID NO: 2270442
agggucccuggauaagaca

SEQ ID NO: 2270444 - RNA, 19 nt, Artificial Sequence
  Description of Artificial Sequence: Synthetic oligonucleotide
  Sense strand starting at position 2849 of SEQ ID NO: 1884499
ccagaaagcugcccuggaa

SEQ ID NO: 2270445 - RNA, 19 nt, Artificial Sequence
  Description of Artificial Sequence: Synthetic oligonucleotide
  Antisense strand to SEQ ID NO: 2270444
uuccagggcagcuuucugg

SEQ ID NO: 2270446 - RNA, 19 nt, Artificial Sequence
  Description of Artificial Sequence: Synthetic oligonucleotide
  Sense strand starting at position 3001 of SEQ ID NO: 1884499
gagggugauuccuccagug

SEQ ID NO: 2270447 - RNA, 19 nt, Artificial Sequence
  Description of Artificial Sequence: Synthetic oligonucleotide
  Antisense strand to SEQ ID NO: 2270446
cacuggaggaaucacccuc

SEQ ID NO: 2270448 - RNA, 19 nt, Artificial Sequence
  Description of Artificial Sequence: Synthetic oligonucleotide
  Sense strand starting at position 3036 of SEQ ID NO: 1884499
ggagaugccuucuucccua

SEQ ID NO: 2270449 - RNA, 19 nt, Artificial Sequence
  Description of Artificial Sequence: Synthetic oligonucleotide
  Antisense strand to SEQ ID NO: 2270448
uagggaagaaggcaucucc

SEQ ID NO: 2270450 - RNA, 19 nt, Artificial Sequence
  Description of Artificial Sequence: Synthetic oligonucleotide
  Sense strand starting at position 3187 of SEQ ID NO: 1884499
ucccguaaucugcaaacau

SEQ ID NO: 2270451 - RNA, 19 nt, Artificial Sequence
  Description of Artificial Sequence: Synthetic oligonucleotide
  Antisense strand to SEQ ID NO: 2270450
auguuugcagauuacggga

SEQ ID NO: 2270452 - RNA, 19 nt, Artificial Sequence
  Description of Artificial Sequence: Synthetic oligonucleotide
  Sense strand starting at position 3397 of SEQ ID NO: 1884499
ccaggucucuccuuaggga

SEQ ID NO: 2270453 - RNA, 19 nt, Artificial Sequence
  Description of Artificial Sequence: Synthetic oligonucleotide
  Antisense strand to SEQ ID NO: 2270452
ucccuaaggagagaccugg

SEQ ID NO: 2270454 - RNA, 19 nt, Artificial Sequence
  Description of Artificial Sequence: Synthetic oligonucleotide
  Sense strand starting at position 3820 of SEQ ID NO: 1884499
uguucugugaaugggauga

SEQ ID NO: 2270455 - RNA, 19 nt, Artificial Sequence
  Description of Artificial Sequence: Synthetic oligonucleotide
  Antisense strand to SEQ ID NO: 2270454
ucaucccauucacagaaca

SEQ ID NO: 2270456 - RNA, 19 nt, Artificial Sequence
  Description of Artificial Sequence: Synthetic oligonucleotide
  Sense strand starting at position 15 of SEQ ID NO: 1884500
cuauucugagccugaagag

SEQ ID NO: 2270457 - RNA, 19 nt, Artificial Sequence
  Description of Artificial Sequence: Synthetic oligonucleotide
  Antisense strand to SEQ ID NO: 2270456
cucuucaggcucagaauag

SEQ ID NO: 2270458 - RNA, 19 nt, Artificial Sequence
  Description of Artificial Sequence: Synthetic oligonucleotide
  Sense strand starting at position 49 of SEQ ID NO: 1884500
ucuguaaacaggcagugau

SEQ ID NO: 2270459 - RNA, 19 nt, Artificial Sequence
  Description of Artificial Sequence: Synthetic oligonucleotide
  Antisense strand to SEQ ID NO: 2270458
aucacugccuguuuacaga

SEQ ID NO: 2270460 - RNA, 19 nt, Artificial Sequence
  Description of Artificial Sequence: Synthetic oligonucleotide
  Sense strand starting at position 59 of SEQ ID NO: 1884500
ggcagugauccagguagaa

SEQ ID NO: 2270461 - RNA, 19 nt, Artificial Sequence
  Description of Artificial Sequence: Synthetic oligonucleotide
  Antisense strand to SEQ ID NO: 2270460
uucuaccuggaucacugcc

SEQ ID NO: 2270462 - RNA, 19 nt, Artificial Sequence
  Description of Artificial Sequence: Synthetic oligonucleotide
  Sense strand starting at position 136 of SEQ ID NO: 1884500
aauaguaugcgagagaagu

SEQ ID NO: 2270463 - RNA, 19 nt, Artificial Sequence
  Description of Artificial Sequence: Synthetic oligonucleotide
  Antisense strand to SEQ ID NO: 2270462
acuucucucgcauacuauu

SEQ ID NO: 2270464 - RNA, 19 nt, Artificial Sequence
  Description of Artificial Sequence: Synthetic oligonucleotide
  Sense strand starting at position 156 of SEQ ID NO: 1884500
acgagagauuaggcuggua

SEQ ID NO: 2270465 - RNA, 19 nt, Artificial Sequence
  Description of Artificial Sequence: Synthetic oligonucleotide
  Antisense strand to SEQ ID NO: 2270464
uaccagccuaaucucucgu

SEQ ID NO: 2270466 - RNA, 19 nt, Artificial Sequence
  Description of Artificial Sequence: Synthetic oligonucleotide
  Sense strand starting at position 158 of SEQ ID NO: 1884500
gagagauuaggcugguaag

SEQ ID NO: 2270467 - RNA, 19 nt, Artificial Sequence
  Description of Artificial Sequence: Synthetic oligonucleotide
  Antisense strand to SEQ ID NO: 2270466
cuuaccagccuaaucucuc

SEQ ID NO: 2270468 - RNA, 19 nt, Artificial Sequence
  Description of Artificial Sequence: Synthetic oligonucleotide
  Sense strand starting at position 159 of SEQ ID NO: 1884500
agagauuaggcugguaaga

SEQ ID NO: 2270469 - RNA, 19 nt, Artificial Sequence
  Description of Artificial Sequence: Synthetic oligonucleotide
  Antisense strand to SEQ ID NO: 2270468
ucuuaccagccuaaucucu

SEQ ID NO: 2270470 - RNA, 19 nt, Artificial Sequence
  Description of Artificial Sequence: Synthetic oligonucleotide
  Sense strand starting at position 169 of SEQ ID NO: 1884500
cugguaagauaugcaggaa

SEQ ID NO: 2270471 - RNA, 19 nt, Artificial Sequence
  Description of Artificial Sequence: Synthetic oligonucleotide
  Antisense strand to SEQ ID NO: 2270470
uuccugcauaucuuaccag

SEQ ID NO: 2270472 - RNA, 19 nt, Artificial Sequence
  Description of Artificial Sequence: Synthetic oligonucleotide
  Sense strand starting at position 207 of SEQ ID NO: 1884500
guaugucauagagaaagcu

SEQ ID NO: 2270473 - RNA, 19 nt, Artificial Sequence
  Description of Artificial Sequence: Synthetic oligonucleotide
  Antisense strand to SEQ ID NO: 2270472
agcuuucucuaugacauac

SEQ ID NO: 2270474 - RNA, 19 nt, Artificial Sequence
  Description of Artificial Sequence: Synthetic oligonucleotide
  Sense strand starting at position 428 of SEQ ID NO: 1884500
gcuauaucaucauuugugu

SEQ ID NO: 2270475 - RNA, 19 nt, Artificial Sequence
  Description of Artificial Sequence: Synthetic oligonucleotide
  Antisense strand to SEQ ID NO: 2270474
acacaaaugaugauauagc

SEQ ID NO: 2270476 - RNA, 19 nt, Artificial Sequence
  Description of Artificial Sequence: Synthetic oligonucleotide
  Sense strand starting at position 515 of SEQ ID NO: 1884500
ugaguaacuugaccuacau

SEQ ID NO: 2270477 - RNA, 19 nt, Artificial Sequence
  Description of Artificial Sequence: Synthetic oligonucleotide
  Antisense strand to SEQ ID NO: 2270476
auguaggucaaguuacuca

SEQ ID NO: 2270478 - RNA, 19 nt, Artificial Sequence
  Description of Artificial Sequence: Synthetic oligonucleotide
  Sense strand starting at position 553 of SEQ ID NO: 1884500
auuccuauaguaggucuaa

SEQ ID NO: 2270479 - RNA, 19 nt, Artificial Sequence
  Description of Artificial Sequence: Synthetic oligonucleotide
  Antisense strand to SEQ ID NO: 2270478
uuagaccuacuauaggaau

SEQ ID NO: 2270480 - RNA, 19 nt, Artificial Sequence
  Description of Artificial Sequence: Synthetic oligonucleotide
  Sense strand starting at position 942 of SEQ ID NO: 1884500
acauauauguuagcuagau

SEQ ID NO: 2270481 - RNA, 19 nt, Artificial Sequence
  Description of Artificial Sequence: Synthetic oligonucleotide
  Antisense strand to SEQ ID NO: 2270480
aucuagcuaacauauaugu

SEQ ID NO: 2270482 - RNA, 19 nt, Artificial Sequence
  Description of Artificial Sequence: Synthetic oligonucleotide
  Sense strand starting at position 943 of SEQ ID NO: 1884500
cauauauguuagcuagaug

SEQ ID NO: 2270483 - RNA, 19 nt, Artificial Sequence
  Description of Artificial Sequence: Synthetic oligonucleotide
  Antisense strand to SEQ ID NO: 2270482
caucuagcuaacauauaug

SEQ ID NO: 2270484 - RNA, 19 nt, Artificial Sequence
  Description of Artificial Sequence: Synthetic oligonucleotide
  Sense strand starting at position 948 of SEQ ID NO: 1884500
auguuagcuagaugagaau

SEQ ID NO: 2270485 - RNA, 19 nt, Artificial Sequence
  Description of Artificial Sequence: Synthetic oligonucleotide
  Antisense strand to SEQ ID NO: 2270484
auucucaucuagcuaacau

SEQ ID NO: 2270486 - RNA, 19 nt, Artificial Sequence
  Description of Artificial Sequence: Synthetic oligonucleotide
  Sense strand starting at position 1097 of SEQ ID NO: 1884500
uaguaauauuacguaugga

SEQ ID NO: 2270487 - RNA, 19 nt, Artificial Sequence
  Description of Artificial Sequence: Synthetic oligonucleotide
  Antisense strand to SEQ ID NO: 2270486
uccauacguaauauuacua

SEQ ID NO: 2270488 - RNA, 19 nt, Artificial Sequence
  Description of Artificial Sequence: Synthetic oligonucleotide
  Sense strand starting at position 1098 of SEQ ID NO: 1884500
aguaauauuacguauggaa

SEQ ID NO: 2270489 - RNA, 19 nt, Artificial Sequence
  Description of Artificial Sequence: Synthetic oligonucleotide
  Antisense strand to SEQ ID NO: 2270488
uuccauacguaauauuacu

SEQ ID NO: 2270490 - RNA, 19 nt, Artificial Sequence
  Description of Artificial Sequence: Synthetic oligonucleotide
  Sense strand starting at position 1102 of SEQ ID NO: 1884500
auauuacguauggaagcau

SEQ ID NO: 2270491 - RNA, 19 nt, Artificial Sequence
  Description of Artificial Sequence: Synthetic oligonucleotide
  Antisense strand to SEQ ID NO: 2270490
augcuuccauacguaauau

SEQ ID NO: 2270492 - RNA, 19 nt, Artificial Sequence
  Description of Artificial Sequence: Synthetic oligonucleotide
  Sense strand starting at position 1274 of SEQ ID NO: 1884500
gaaagacuccuuggcagag

SEQ ID NO: 2270493 - RNA, 19 nt, Artificial Sequence
  Description of Artificial Sequence: Synthetic oligonucleotide
  Antisense strand to SEQ ID NO: 2270492
cucugccaaggagucuuuc

SEQ ID NO: 2270494 - RNA, 19 nt, Artificial Sequence
  Description of Artificial Sequence: Synthetic oligonucleotide
  Sense strand starting at position 1275 of SEQ ID NO: 1884500
aaagacuccuuggcagagu

SEQ ID NO: 2270495 - RNA, 19 nt, Artificial Sequence
  Description of Artificial Sequence: Synthetic oligonucleotide
  Antisense strand to SEQ ID NO: 2270494
acucugccaaggagucuuu

SEQ ID NO: 2270496 - RNA, 19 nt, Artificial Sequence
  Description of Artificial Sequence: Synthetic oligonucleotide
  Sense strand starting at position 1278 of SEQ ID NO: 1884500
gacuccuuggcagaguagu

SEQ ID NO: 2270497 - RNA, 19 nt, Artificial Sequence
  Description of Artificial Sequence: Synthetic oligonucleotide
  Antisense strand to SEQ ID NO: 2270496
acuacucugccaaggaguc

SEQ ID NO: 2270498 - RNA, 19 nt, Artificial Sequence
  Description of Artificial Sequence: Synthetic oligonucleotide
  Sense strand starting at position 1353 of SEQ ID NO: 1884500
uagugaucuugaccaaguu

SEQ ID NO: 2270499 - RNA, 19 nt, Artificial Sequence
  Description of Artificial Sequence: Synthetic oligonucleotide
  Antisense strand to SEQ ID NO: 2270498
aacuuggucaagaucacua

SEQ ID NO: 2270500 - RNA, 19 nt, Artificial Sequence
  Description of Artificial Sequence: Synthetic oligonucleotide
  Sense strand starting at position 1354 of SEQ ID NO: 1884500
agugaucuugaccaaguua

SEQ ID NO: 2270501 - RNA, 19 nt, Artificial Sequence
  Description of Artificial Sequence: Synthetic oligonucleotide
  Antisense strand to SEQ ID NO: 2270500
uaacuuggucaagaucacu

SEQ ID NO: 2270502 - RNA, 19 nt, Artificial Sequence
  Description of Artificial Sequence: Synthetic oligonucleotide
  Sense strand starting at position 1550 of SEQ ID NO: 1884500
uucugucaugucuaccuga

SEQ ID NO: 2270503 - RNA, 19 nt, Artificial Sequence
  Description of Artificial Sequence: Synthetic oligonucleotide
  Antisense strand to SEQ ID NO: 2270502
ucagguagacaugacagaa

SEQ ID NO: 2270504 - RNA, 19 nt, Artificial Sequence
  Description of Artificial Sequence: Synthetic oligonucleotide
  Sense strand starting at position 1564 of SEQ ID NO: 1884500
ccugaaucaagauacgguu

SEQ ID NO: 2270505 - RNA, 19 nt, Artificial Sequence
  Description of Artificial Sequence: Synthetic oligonucleotide
  Antisense strand to SEQ ID NO: 2270504
aaccguaucuugauucagg

SEQ ID NO: 2270506 - RNA, 19 nt, Artificial Sequence
  Description of Artificial Sequence: Synthetic oligonucleotide
  Sense strand starting at position 1715 of SEQ ID NO: 1884500
agagaagguucuguccaca

SEQ ID NO: 2270507 - RNA, 19 nt, Artificial Sequence
  Description of Artificial Sequence: Synthetic oligonucleotide
  Antisense strand to SEQ ID NO: 2270506
uguggacagaaccuucucu

SEQ ID NO: 2270508 - RNA, 19 nt, Artificial Sequence
  Description of Artificial Sequence: Synthetic oligonucleotide
  Sense strand starting at position 1832 of SEQ ID NO: 1884500
auagcugacugauugaaga

SEQ ID NO: 2270509 - RNA, 19 nt, Artificial Sequence
  Description of Artificial Sequence: Synthetic oligonucleotide
  Antisense strand to SEQ ID NO: 2270508
ucuucaaucagucagcuau

SEQ ID NO: 2270510 - RNA, 19 nt, Artificial Sequence
  Description of Artificial Sequence: Synthetic oligonucleotide
  Sense strand starting at position 2039 of SEQ ID NO: 1884500
agagcugaggacugaagua

SEQ ID NO: 2270511 - RNA, 19 nt, Artificial Sequence
  Description of Artificial Sequence: Synthetic oligonucleotide
  Antisense strand to SEQ ID NO: 2270510
uacuucaguccucagcucu

SEQ ID NO: 2270512 - RNA, 19 nt, Artificial Sequence
  Description of Artificial Sequence: Synthetic oligonucleotide
  Sense strand starting at position 2090 of SEQ ID NO: 1884500
agauauuaagcauagccuu

SEQ ID NO: 2270513 - RNA, 19 nt, Artificial Sequence
  Description of Artificial Sequence: Synthetic oligonucleotide
  Antisense strand to SEQ ID NO: 2270512
aaggcuaugcuuaauaucu

SEQ ID NO: 2270514 - RNA, 19 nt, Artificial Sequence
  Description of Artificial Sequence: Synthetic oligonucleotide
  Sense strand starting at position 2117 of SEQ ID NO: 1884500
acaguuaauggugauguuu

SEQ ID NO: 2270515 - RNA, 19 nt, Artificial Sequence
  Description of Artificial Sequence: Synthetic oligonucleotide
  Antisense strand to SEQ ID NO: 2270514
aaacaucaccauuaacugu

SEQ ID NO: 2270516 - RNA, 19 nt, Artificial Sequence
  Description of Artificial Sequence: Synthetic oligonucleotide
  Sense strand starting at position 2147 of SEQ ID NO: 1884500
agaauaaguccugaggcuu

SEQ ID NO: 2270517 - RNA, 19 nt, Artificial Sequence
  Description of Artificial Sequence: Synthetic oligonucleotide
  Antisense strand to SEQ ID NO: 2270516
aagccucaggacuuauucu

SEQ ID NO: 2270518 - RNA, 19 nt, Artificial Sequence
  Description of Artificial Sequence: Synthetic oligonucleotide
  Sense strand starting at position 2466 of SEQ ID NO: 1884500
agaaguuccuaaucugauu

SEQ ID NO: 2270519 - RNA, 19 nt, Artificial Sequence
  Description of Artificial Sequence: Synthetic oligonucleotide
  Antisense strand to SEQ ID NO: 2270518
aaucagauuaggaacuucu

SEQ ID NO: 2270520 - RNA, 19 nt, Artificial Sequence
  Description of Artificial Sequence: Synthetic oligonucleotide
  Sense strand starting at position 2774 of SEQ ID NO: 1884500
uacuguauucgacaguuua

SEQ ID NO: 2270521 - RNA, 19 nt, Artificial Sequence
  Description of Artificial Sequence: Synthetic oligonucleotide
  Antisense strand to SEQ ID NO: 2270520
uaaacugucgaauacagua

SEQ ID NO: 2270522 - RNA, 19 nt, Artificial Sequence
  Description of Artificial Sequence: Synthetic oligonucleotide
  Sense strand starting at position 2909 of SEQ ID NO: 1884500
acgcauaaugauggaauau

SEQ ID NO: 2270523 - RNA, 19 nt, Artificial Sequence
  Description of Artificial Sequence: Synthetic oligonucleotide
  Antisense strand to SEQ ID NO: 2270522
auauuccaucauuaugcgu

SEQ ID NO: 2270524 - RNA, 19 nt, Artificial Sequence
  Description of Artificial Sequence: Synthetic oligonucleotide
  Sense strand starting at position 3091 of SEQ ID NO: 1884500
ccggauugucuagggauag

SEQ ID NO: 2270525 - RNA, 19 nt, Artificial Sequence
  Description of Artificial Sequence: Synthetic oligonucleotide
  Antisense strand to SEQ ID NO: 2270524
cuaucccuagacaauccgg

SEQ ID NO: 2270526 - RNA, 19 nt, Artificial Sequence
  Description of Artificial Sequence: Synthetic oligonucleotide
  Sense strand starting at position 3393 of SEQ ID NO: 1884500
accaaagugucuucuauag

SEQ ID NO: 2270527 - RNA, 19 nt, Artificial Sequence
  Description of Artificial Sequence: Synthetic oligonucleotide
  Antisense strand to SEQ ID NO: 2270526
cuauagaagacacuuuggu

SEQ ID NO: 2270528 - RNA, 19 nt, Artificial Sequence
  Description of Artificial Sequence: Synthetic oligonucleotide
  Sense strand starting at position 3397 of SEQ ID NO: 1884500
aagugucuucuauaguaga

SEQ ID NO: 2270529 - RNA, 19 nt, Artificial Sequence
  Description of Artificial Sequence: Synthetic oligonucleotide
  Antisense strand to SEQ ID NO: 2270528
ucuacuauagaagacacuu

SEQ ID NO: 2270530 - RNA, 19 nt, Artificial Sequence
  Description of Artificial Sequence: Synthetic oligonucleotide
  Sense strand starting at position 3441 of SEQ ID NO: 1884500
guggcaucuagugauauag

SEQ ID NO: 2270531 - RNA, 19 nt, Artificial Sequence
  Description of Artificial Sequence: Synthetic oligonucleotide
  Antisense strand to SEQ ID NO: 2270530
cuauaucacuagaugccac

SEQ ID NO: 2270532 - RNA, 19 nt, Artificial Sequence
  Description of Artificial Sequence: Synthetic oligonucleotide
  Sense strand starting at position 3634 of SEQ ID NO: 1884500
ggcuaagugcuugauggaa

SEQ ID NO: 2270533 - RNA, 19 nt, Artificial Sequence
  Description of Artificial Sequence: Synthetic oligonucleotide
  Antisense strand to SEQ ID NO: 2270532
uuccaucaagcacuuagcc

SEQ ID NO: 2270534 - RNA, 19 nt, Artificial Sequence
  Description of Artificial Sequence: Synthetic oligonucleotide
  Sense strand starting at position 3905 of SEQ ID NO: 1884500
gccaaaugauagcucaauu

SEQ ID NO: 2270535 - RNA, 19 nt, Artificial Sequence
  Description of Artificial Sequence: Synthetic oligonucleotide
  Antisense strand to SEQ ID NO: 2270534
aauugagcuaucauuuggc

SEQ ID NO: 2270536 - RNA, 19 nt, Artificial Sequence
  Description of Artificial Sequence: Synthetic oligonucleotide
  Sense strand starting at position 174 of SEQ ID NO: 1884501
uugggacuguccguucaca

SEQ ID NO: 2270537 - RNA, 19 nt, Artificial Sequence
  Description of Artificial Sequence: Synthetic oligonucleotide
  Antisense strand to SEQ ID NO: 2270536
ugugaacggacagucccaa

SEQ ID NO: 2270538 - RNA, 19 nt, Artificial Sequence
  Description of Artificial Sequence: Synthetic oligonucleotide
  Sense strand starting at position 213 of SEQ ID NO: 1884501
uguguuagguccucuguga

SEQ ID NO: 2270539 - RNA, 19 nt, Artificial Sequence
  Description of Artificial Sequence: Synthetic oligonucleotide
  Antisense strand to SEQ ID NO: 2270538
ucacagaggaccuaacaca

SEQ ID NO: 2270540 - RNA, 19 nt, Artificial Sequence
  Description of Artificial Sequence: Synthetic oligonucleotide
  Sense strand starting at position 672 of SEQ ID NO: 1884501
gcaagugucaucuacgccu

SEQ ID NO: 2270541 - RNA, 19 nt, Artificial Sequence
  Description of Artificial Sequence: Synthetic oligonucleotide
  Antisense strand to SEQ ID NO: 2270540
aggcguagaugacacuugc

SEQ ID NO: 2270542 - RNA, 19 nt, Artificial Sequence
  Description of Artificial Sequence: Synthetic oligonucleotide
  Sense strand starting at position 734 of SEQ ID NO: 1884501
cucuuaucuucccagagga

SEQ ID NO: 2270543 - RNA, 19 nt, Artificial Sequence
  Description of Artificial Sequence: Synthetic oligonucleotide
  Antisense strand to SEQ ID NO: 2270542
uccucugggaagauaagag

SEQ ID NO: 2270544 - RNA, 19 nt, Artificial Sequence
  Description of Artificial Sequence: Synthetic oligonucleotide
  Sense strand starting at position 1102 of SEQ ID NO: 1884501
agaggaacugccugugagu

SEQ ID NO: 2270545 - RNA, 19 nt, Artificial Sequence
  Description of Artificial Sequence: Synthetic oligonucleotide
  Antisense strand to SEQ ID NO: 2270544
acucacaggcaguuccucu

SEQ ID NO: 2270546 - RNA, 19 nt, Artificial Sequence
  Description of Artificial Sequence: Synthetic oligonucleotide
  Sense strand starting at position 1138 of SEQ ID NO: 1884501
ccagacuucucucaaugag

SEQ ID NO: 2270547 - RNA, 19 nt, Artificial Sequence
  Description of Artificial Sequence: Synthetic oligonucleotide
  Antisense strand to SEQ ID NO: 2270546
cucauugagagaagucugg

SEQ ID NO: 2270548 - RNA, 19 nt, Artificial Sequence
  Description of Artificial Sequence: Synthetic oligonucleotide
  Sense strand starting at position 1207 of SEQ ID NO: 1884501
uugggaggcuuagucugaa

SEQ ID NO: 2270549 - RNA, 19 nt, Artificial Sequence
  Description of Artificial Sequence: Synthetic oligonucleotide
  Antisense strand to SEQ ID NO: 2270548
uucagacuaagccucccaa

SEQ ID NO: 2270550 - RNA, 19 nt, Artificial Sequence
  Description of Artificial Sequence: Synthetic oligonucleotide
  Sense strand starting at position 1210 of SEQ ID NO: 1884501
ggaggcuuagucugaagga

SEQ ID NO: 2270551 - RNA, 19 nt, Artificial Sequence
  Description of Artificial Sequence: Synthetic oligonucleotide
  Antisense strand to SEQ ID NO: 2270550
uccuucagacuaagccucc

SEQ ID NO: 2270552 - RNA, 19 nt, Artificial Sequence
  Description of Artificial Sequence: Synthetic oligonucleotide
  Sense strand starting at position 1211 of SEQ ID NO: 1884501
gaggcuuagucugaaggag

SEQ ID NO: 2270553 - RNA, 19 nt, Artificial Sequence
  Description of Artificial Sequence: Synthetic oligonucleotide
  Antisense strand to SEQ ID NO: 2270552
cuccuucagacuaagccuc

SEQ ID NO: 2270554 - RNA, 19 nt, Artificial Sequence
  Description of Artificial Sequence: Synthetic oligonucleotide
  Sense strand starting at position 1213 of SEQ ID NO: 1884501
ggcuuagucugaaggagga

SEQ ID NO: 2270555 - RNA, 19 nt, Artificial Sequence
  Description of Artificial Sequence: Synthetic oligonucleotide
  Antisense strand to SEQ ID NO: 2270554
uccuccuucagacuaagcc

SEQ ID NO: 2270556 - RNA, 19 nt, Artificial Sequence
  Description of Artificial Sequence: Synthetic oligonucleotide
  Sense strand starting at position 1265 of SEQ ID NO: 1884501
gcccaacugucagugucau

SEQ ID NO: 2270557 - RNA, 19 nt, Artificial Sequence
  Description of Artificial Sequence: Synthetic oligonucleotide
  Antisense strand to SEQ ID NO: 2270556
augacacugacaguugggc

SEQ ID NO: 2270558 - RNA, 19 nt, Artificial Sequence
  Description of Artificial Sequence: Synthetic oligonucleotide
  Sense strand starting at position 1275 of SEQ ID NO: 1884501
cagugucaugcuugaguga

SEQ ID NO: 2270559 - RNA, 19 nt, Artificial Sequence
  Description of Artificial Sequence: Synthetic oligonucleotide
  Antisense strand to SEQ ID NO: 2270558
ucacucaagcaugacacug

SEQ ID NO: 2270560 - RNA, 19 nt, Artificial Sequence
  Description of Artificial Sequence: Synthetic oligonucleotide
  Sense strand starting at position 1280 of SEQ ID NO: 1884501
ucaugcuugagugaggcau

SEQ ID NO: 2270561 - RNA, 19 nt, Artificial Sequence
  Description of Artificial Sequence: Synthetic oligonucleotide
  Antisense strand to SEQ ID NO: 2270560
augccucacucaagcauga

SEQ ID NO: 2270562 - RNA, 19 nt, Artificial Sequence
  Description of Artificial Sequence: Synthetic oligonucleotide
  Sense strand starting at position 1466 of SEQ ID NO: 1884501
gguccaagaacuugcguuu

SEQ ID NO: 2270563 - RNA, 19 nt, Artificial Sequence
  Description of Artificial Sequence: Synthetic oligonucleotide
  Antisense strand to SEQ ID NO: 2270562
aaacgcaaguucuuggacc

SEQ ID NO: 2270564 - RNA, 19 nt, Artificial Sequence
  Description of Artificial Sequence: Synthetic oligonucleotide
  Sense strand starting at position 1469 of SEQ ID NO: 1884501
ccaagaacuugcguuucca

SEQ ID NO: 2270565 - RNA, 19 nt, Artificial Sequence
  Description of Artificial Sequence: Synthetic oligonucleotide
  Antisense strand to SEQ ID NO: 2270564
uggaaacgcaaguucuugg

SEQ ID NO: 2270566 - RNA, 19 nt, Artificial Sequence
  Description of Artificial Sequence: Synthetic oligonucleotide
  Sense strand starting at position 1473 of SEQ ID NO: 1884501
gaacuugcguuuccaaaca

SEQ ID NO: 2270567 - RNA, 19 nt, Artificial Sequence
  Description of Artificial Sequence: Synthetic oligonucleotide
  Antisense strand to SEQ ID NO: 2270566
uguuuggaaacgcaaguuc

SEQ ID NO: 2270568 - RNA, 19 nt, Artificial Sequence
  Description of Artificial Sequence: Synthetic oligonucleotide
  Sense strand starting at position 1581 of SEQ ID NO: 1884501
gccuguuugggucauccca

SEQ ID NO: 2270569 - RNA, 19 nt, Artificial Sequence
  Description of Artificial Sequence: Synthetic oligonucleotide
  Antisense strand to SEQ ID NO: 2270568
ugggaugacccaaacaggc

SEQ ID NO: 2270570 - RNA, 19 nt, Artificial Sequence
  Description of Artificial Sequence: Synthetic oligonucleotide
  Sense strand starting at position 1583 of SEQ ID NO: 1884501
cuguuugggucaucccauu

SEQ ID NO: 2270571 - RNA, 19 nt, Artificial Sequence
  Description of Artificial Sequence: Synthetic oligonucleotide
  Antisense strand to SEQ ID NO: 2270570
aaugggaugacccaaacag

SEQ ID NO: 2270572 - RNA, 19 nt, Artificial Sequence
  Description of Artificial Sequence: Synthetic oligonucleotide
  Sense strand starting at position 1589 of SEQ ID NO: 1884501
gggucaucccauuguacag

SEQ ID NO: 2270573 - RNA, 19 nt, Artificial Sequence
  Description of Artificial Sequence: Synthetic oligonucleotide
  Antisense strand to SEQ ID NO: 2270572
cuguacaaugggaugaccc

SEQ ID NO: 2270574 - RNA, 19 nt, Artificial Sequence
  Description of Artificial Sequence: Synthetic oligonucleotide
  Sense strand starting at position 1785 of SEQ ID NO: 1884501
ggagcccagucuuaaagga

SEQ ID NO: 2270575 - RNA, 19 nt, Artificial Sequence
  Description of Artificial Sequence: Synthetic oligonucleotide
  Antisense strand to SEQ ID NO: 2270574
uccuuuaagacugggcucc

SEQ ID NO: 2270576 - RNA, 19 nt, Artificial Sequence
  Description of Artificial Sequence: Synthetic oligonucleotide
  Sense strand starting at position 1979 of SEQ ID NO: 1884501
acacgugcacuguagaaua

SEQ ID NO: 2270577 - RNA, 19 nt, Artificial Sequence
  Description of Artificial Sequence: Synthetic oligonucleotide
  Antisense strand to SEQ ID NO: 2270576
uauucuacagugcacgugu

SEQ ID NO: 2270578 - RNA, 19 nt, Artificial Sequence
  Description of Artificial Sequence: Synthetic oligonucleotide
  Sense strand starting at position 2259 of SEQ ID NO: 1884501
gcaagaguugccugcacga

SEQ ID NO: 2270579 - RNA, 19 nt, Artificial Sequence
  Description of Artificial Sequence: Synthetic oligonucleotide
  Antisense strand to SEQ ID NO: 2270578
ucgugcaggcaacucuugc

SEQ ID NO: 2270580 - RNA, 19 nt, Artificial Sequence
  Description of Artificial Sequence: Synthetic oligonucleotide
  Sense strand starting at position 2261 of SEQ ID NO: 1884501
aagaguugccugcacgauc

SEQ ID NO: 2270581 - RNA, 19 nt, Artificial Sequence
  Description of Artificial Sequence: Synthetic oligonucleotide
  Antisense strand to SEQ ID NO: 2270580
gaucgugcaggcaacucuu

SEQ ID NO: 2270582 - RNA, 19 nt, Artificial Sequence
  Description of Artificial Sequence: Synthetic oligonucleotide
  Sense strand starting at position 2290 of SEQ ID NO: 1884501
gggccugacucacuggaau

SEQ ID NO: 2270583 - RNA, 19 nt, Artificial Sequence
  Description of Artificial Sequence: Synthetic oligonucleotide
  Antisense strand to SEQ ID NO: 2270582
auuccagugagucaggccc

SEQ ID NO: 2270584 - RNA, 19 nt, Artificial Sequence
  Description of Artificial Sequence: Synthetic oligonucleotide
  Sense strand starting at position 2505 of SEQ ID NO: 1884501
aaccgagaguggucccauu

SEQ ID NO: 2270585 - RNA, 19 nt, Artificial Sequence
  Description of Artificial Sequence: Synthetic oligonucleotide
  Antisense strand to SEQ ID NO: 2270584
aaugggaccacucucgguu

SEQ ID NO: 2270586 - RNA, 19 nt, Artificial Sequence
  Description of Artificial Sequence: Synthetic oligonucleotide
  Sense strand starting at position 2803 of SEQ ID NO: 1884501
gagccugugcccugagaaa

SEQ ID NO: 2270587 - RNA, 19 nt, Artificial Sequence
  Description of Artificial Sequence: Synthetic oligonucleotide
  Antisense strand to SEQ ID NO: 2270586
uuucucagggcacaggcuc

SEQ ID NO: 2270588 - RNA, 19 nt, Artificial Sequence
  Description of Artificial Sequence: Synthetic oligonucleotide
  Sense strand starting at position 2853 of SEQ ID NO: 1884501
ugaguuuggugacccugaa

SEQ ID NO: 2270589 - RNA, 19 nt, Artificial Sequence
  Description of Artificial Sequence: Synthetic oligonucleotide
  Antisense strand to SEQ ID NO: 2270588
uucagggucaccaaacuca

SEQ ID NO: 2270590 - RNA, 19 nt, Artificial Sequence
  Description of Artificial Sequence: Synthetic oligonucleotide
  Sense strand starting at position 3002 of SEQ ID NO: 1884501
gggucagugucagaagaga

SEQ ID NO: 2270591 - RNA, 19 nt, Artificial Sequence
  Description of Artificial Sequence: Synthetic oligonucleotide
  Antisense strand to SEQ ID NO: 2270590
ucucuucugacacugaccc

SEQ ID NO: 2270592 - RNA, 19 nt, Artificial Sequence
  Description of Artificial Sequence: Synthetic oligonucleotide
  Sense strand starting at position 3019 of SEQ ID NO: 1884501
gaguuuacaucccucagga

SEQ ID NO: 2270593 - RNA, 19 nt, Artificial Sequence
  Description of Artificial Sequence: Synthetic oligonucleotide
  Antisense strand to SEQ ID NO: 2270592
uccugagggauguaaacuc

SEQ ID NO: 2270594 - RNA, 19 nt, Artificial Sequence
  Description of Artificial Sequence: Synthetic oligonucleotide
  Sense strand starting at position 3211 of SEQ ID NO: 1884501
augcacugugugcaucaau

SEQ ID NO: 2270595 - RNA, 19 nt, Artificial Sequence
  Description of Artificial Sequence: Synthetic oligonucleotide
  Antisense strand to SEQ ID NO: 2270594
auugaugcacacagugcau

SEQ ID NO: 2270596 - RNA, 19 nt, Artificial Sequence
  Description of Artificial Sequence: Synthetic oligonucleotide
  Sense strand starting at position 3348 of SEQ ID NO: 1884501
aggcguuugcugagcugua

SEQ ID NO: 2270597 - RNA, 19 nt, Artificial Sequence
  Description of Artificial Sequence: Synthetic oligonucleotide
  Antisense strand to SEQ ID NO: 2270596
uacagcucagcaaacgccu

SEQ ID NO: 2270598 - RNA, 19 nt, Artificial Sequence
  Description of Artificial Sequence: Synthetic oligonucleotide
  Sense strand starting at position 3350 of SEQ ID NO: 1884501
gcguuugcugagcuguaaa

SEQ ID NO: 2270599 - RNA, 19 nt, Artificial Sequence
  Description of Artificial Sequence: Synthetic oligonucleotide
  Antisense strand to SEQ ID NO: 2270598
uuuacagcucagcaaacgc

SEQ ID NO: 2270600 - RNA, 19 nt, Artificial Sequence
  Description of Artificial Sequence: Synthetic oligonucleotide
  Sense strand starting at position 3353 of SEQ ID NO: 1884501
uuugcugagcuguaaauga

SEQ ID NO: 2270601 - RNA, 19 nt, Artificial Sequence
  Description of Artificial Sequence: Synthetic oligonucleotide
  Antisense strand to SEQ ID NO: 2270600
ucauuuacagcucagcaaa

SEQ ID NO: 2270602 - RNA, 19 nt, Artificial Sequence
  Description of Artificial Sequence: Synthetic oligonucleotide
  Sense strand starting at position 3361 of SEQ ID NO: 1884501
gcuguaaaugacuggguaa

SEQ ID NO: 2270603 - RNA, 19 nt, Artificial Sequence
  Description of Artificial Sequence: Synthetic oligonucleotide
  Antisense strand to SEQ ID NO: 2270602
uuacccagucauuuacagc

SEQ ID NO: 2270604 - RNA, 19 nt, Artificial Sequence
  Description of Artificial Sequence: Synthetic oligonucleotide
  Sense strand starting at position 3362 of SEQ ID NO: 1884501
cuguaaaugacuggguaaa

SEQ ID NO: 2270605 - RNA, 19 nt, Artificial Sequence
  Description of Artificial Sequence: Synthetic oligonucleotide
  Antisense strand to SEQ ID NO: 2270604
uuuacccagucauuuacag

SEQ ID NO: 2270606 - RNA, 19 nt, Artificial Sequence
  Description of Artificial Sequence: Synthetic oligonucleotide
  Sense strand starting at position 3363 of SEQ ID NO: 1884501
uguaaaugacuggguaaac

SEQ ID NO: 2270607 - RNA, 19 nt, Artificial Sequence
  Description of Artificial Sequence: Synthetic oligonucleotide
  Antisense strand to SEQ ID NO: 2270606
guuuacccagucauuuaca

SEQ ID NO: 2270608 - RNA, 19 nt, Artificial Sequence
  Description of Artificial Sequence: Synthetic oligonucleotide
  Sense strand starting at position 3364 of SEQ ID NO: 1884501
guaaaugacuggguaaacu

SEQ ID NO: 2270609 - RNA, 19 nt, Artificial Sequence
  Description of Artificial Sequence: Synthetic oligonucleotide
  Antisense strand to SEQ ID NO: 2270608
aguuuacccagucauuuac

SEQ ID NO: 2270610 - RNA, 19 nt, Artificial Sequence
  Description of Artificial Sequence: Synthetic oligonucleotide
  Sense strand starting at position 3504 of SEQ ID NO: 1884501
caguuacagucucagagaa

SEQ ID NO: 2270611 - RNA, 19 nt, Artificial Sequence
  Description of Artificial Sequence: Synthetic oligonucleotide
  Antisense strand to SEQ ID NO: 2270610
uucucugagacuguaacug

SEQ ID NO: 2270612 - RNA, 19 nt, Artificial Sequence
  Description of Artificial Sequence: Synthetic oligonucleotide
  Sense strand starting at position 3596 of SEQ ID NO: 1884501
ggcccuuugugcuucagga

SEQ ID NO: 2270613 - RNA, 19 nt, Artificial Sequence
  Description of Artificial Sequence: Synthetic oligonucleotide
  Antisense strand to SEQ ID NO: 2270612
uccugaagcacaaagggcc

SEQ ID NO: 2270614 - RNA, 19 nt, Artificial Sequence
  Description of Artificial Sequence: Synthetic oligonucleotide
  Sense strand starting at position 3946 of SEQ ID NO: 1884501
cagaguccugcuugucuuu

SEQ ID NO: 2270615 - RNA, 19 nt, Artificial Sequence
  Description of Artificial Sequence: Synthetic oligonucleotide
  Antisense strand to SEQ ID NO: 2270614
aaagacaagcaggacucug

SEQ ID NO: 2270616 - RNA, 19 nt, Artificial Sequence
  Description of Artificial Sequence: Synthetic oligonucleotide
  Sense strand starting at position 2 of SEQ ID NO: 1884502
cauucuuggugggcucaaa

SEQ ID NO: 2270617 - RNA, 19 nt, Artificial Sequence
  Description of Artificial Sequence: Synthetic oligonucleotide
  Antisense strand to SEQ ID NO: 2270616
uuugagcccaccaagaaug

SEQ ID NO: 2270618 - RNA, 19 nt, Artificial Sequence
  Description of Artificial Sequence: Synthetic oligonucleotide
  Sense strand starting at position 33 of SEQ ID NO: 1884502
uggagacaguucuccaauc

SEQ ID NO: 2270619 - RNA, 19 nt, Artificial Sequence
  Description of Artificial Sequence: Synthetic oligonucleotide
  Antisense strand to SEQ ID NO: 2270618
gauuggagaacugucucca

SEQ ID NO: 2270620 - RNA, 19 nt, Artificial Sequence
  Description of Artificial Sequence: Synthetic oligonucleotide
  Sense strand starting at position 34 of SEQ ID NO: 1884502
ggagacaguucuccaauca

SEQ ID NO: 2270621 - RNA, 19 nt, Artificial Sequence
  Description of Artificial Sequence: Synthetic oligonucleotide
  Antisense strand to SEQ ID NO: 2270620
ugauuggagaacugucucc

SEQ ID NO: 2270622 - RNA, 19 nt, Artificial Sequence
  Description of Artificial Sequence: Synthetic oligonucleotide
  Sense strand starting at position 80 of SEQ ID NO: 1884502
ggcccuuguugauguggaa

SEQ ID NO: 2270623 - RNA, 19 nt, Artificial Sequence
  Description of Artificial Sequence: Synthetic oligonucleotide
  Antisense strand to SEQ ID NO: 2270622
uuccacaucaacaagggcc

SEQ ID NO: 2270624 - RNA, 19 nt, Artificial Sequence
  Description of Artificial Sequence: Synthetic oligonucleotide
  Sense strand starting at position 304 of SEQ ID NO: 1884502
gcaccaauccgugcucuuu

SEQ ID NO: 2270625 - RNA, 19 nt, Artificial Sequence
  Description of Artificial Sequence: Synthetic oligonucleotide
  Antisense strand to SEQ ID NO: 2270624
aaagagcacggauuggugc

SEQ ID NO: 2270626 - RNA, 19 nt, Artificial Sequence
  Description of Artificial Sequence: Synthetic oligonucleotide
  Sense strand starting at position 1035 of SEQ ID NO: 1884502
aguuuaagaucaccgagua

SEQ ID NO: 2270627 - RNA, 19 nt, Artificial Sequence
  Description of Artificial Sequence: Synthetic oligonucleotide
  Antisense strand to SEQ ID NO: 2270626
uacucggugaucuuaaacu

SEQ ID NO: 2270628 - RNA, 19 nt, Artificial Sequence
  Description of Artificial Sequence: Synthetic oligonucleotide
  Sense strand starting at position 1036 of SEQ ID NO: 1884502
guuuaagaucaccgaguau

SEQ ID NO: 2270629 - RNA, 19 nt, Artificial Sequence
  Description of Artificial Sequence: Synthetic oligonucleotide
  Antisense strand to SEQ ID NO: 2270628
auacucggugaucuuaaac

SEQ ID NO: 2270630 - RNA, 19 nt, Artificial Sequence
  Description of Artificial Sequence: Synthetic oligonucleotide
  Sense strand starting at position 1047 of SEQ ID NO: 1884502
ccgaguaucugcucuaguu

SEQ ID NO: 2270631 - RNA, 19 nt, Artificial Sequence
  Description of Artificial Sequence: Synthetic oligonucleotide
  Antisense strand to SEQ ID NO: 2270630
aacuagagcagauacucgg

SEQ ID NO: 2270632 - RNA, 19 nt, Artificial Sequence
  Description of Artificial Sequence: Synthetic oligonucleotide
  Sense strand starting at position 1049 of SEQ ID NO: 1884502
gaguaucugcucuaguuag

SEQ ID NO: 2270633 - RNA, 19 nt, Artificial Sequence
  Description of Artificial Sequence: Synthetic oligonucleotide
  Antisense strand to SEQ ID NO: 2270632
cuaacuagagcagauacuc

SEQ ID NO: 2270634 - RNA, 19 nt, Artificial Sequence
  Description of Artificial Sequence: Synthetic oligonucleotide
  Sense strand starting at position 1055 of SEQ ID NO: 1884502
cugcucuaguuagaaggau

SEQ ID NO: 2270635 - RNA, 19 nt, Artificial Sequence
  Description of Artificial Sequence: Synthetic oligonucleotide
  Antisense strand to SEQ ID NO: 2270634
auccuucuaacuagagcag

SEQ ID NO: 2270636 - RNA, 19 nt, Artificial Sequence
  Description of Artificial Sequence: Synthetic oligonucleotide
  Sense strand starting at position 1059 of SEQ ID NO: 1884502
ucuaguuagaaggaugcau

SEQ ID NO: 2270637 - RNA, 19 nt, Artificial Sequence
  Description of Artificial Sequence: Synthetic oligonucleotide
  Antisense strand to SEQ ID NO: 2270636
augcauccuucuaacuaga

SEQ ID NO: 2270638 - RNA, 19 nt, Artificial Sequence
  Description of Artificial Sequence: Synthetic oligonucleotide
  Sense strand starting at position 1061 of SEQ ID NO: 1884502
uaguuagaaggaugcauca

SEQ ID NO: 2270639 - RNA, 19 nt, Artificial Sequence
  Description of Artificial Sequence: Synthetic oligonucleotide
  Antisense strand to SEQ ID NO: 2270638
ugaugcauccuucuaacua

SEQ ID NO: 2270640 - RNA, 19 nt, Artificial Sequence
  Description of Artificial Sequence: Synthetic oligonucleotide
  Sense strand starting at position 1276 of SEQ ID NO: 1884502
ggaccuucccgcuguuaua

SEQ ID NO: 2270641 - RNA, 19 nt, Artificial Sequence
  Description of Artificial Sequence: Synthetic oligonucleotide
  Antisense strand to SEQ ID NO: 2270640
uauaacagcgggaaggucc

SEQ ID NO: 2270642 - RNA, 19 nt, Artificial Sequence
  Description of Artificial Sequence: Synthetic oligonucleotide
  Sense strand starting at position 1288 of SEQ ID NO: 1884502
uguuauagcucuuaaagga

SEQ ID NO: 2270643 - RNA, 19 nt, Artificial Sequence
  Description of Artificial Sequence: Synthetic oligonucleotide
  Antisense strand to SEQ ID NO: 2270642
uccuuuaagagcuauaaca

SEQ ID NO: 2270644 - RNA, 19 nt, Artificial Sequence
  Description of Artificial Sequence: Synthetic oligonucleotide
  Sense strand starting at position 1346 of SEQ ID NO: 1884502
gguuuagugugacgagcaa

SEQ ID NO: 2270645 - RNA, 19 nt, Artificial Sequence
  Description of Artificial Sequence: Synthetic oligonucleotide
  Antisense strand to SEQ ID NO: 2270644
uugcucgucacacuaaacc

SEQ ID NO: 2270646 - RNA, 19 nt, Artificial Sequence
  Description of Artificial Sequence: Synthetic oligonucleotide
  Sense strand starting at position 1707 of SEQ ID NO: 1884502
gaggaagacuucccuacgu

SEQ ID NO: 2270647 - RNA, 19 nt, Artificial Sequence
  Description of Artificial Sequence: Synthetic oligonucleotide
  Antisense strand to SEQ ID NO: 2270646
acguagggaagucuuccuc

SEQ ID NO: 2270648 - RNA, 19 nt, Artificial Sequence
  Description of Artificial Sequence: Synthetic oligonucleotide
  Sense strand starting at position 1829 of SEQ ID NO: 1884502
gcuacuuuggguugugcaa

SEQ ID NO: 2270649 - RNA, 19 nt, Artificial Sequence
  Description of Artificial Sequence: Synthetic oligonucleotide
  Antisense strand to SEQ ID NO: 2270648
uugcacaacccaaaguagc

SEQ ID NO: 2270650 - RNA, 19 nt, Artificial Sequence
  Description of Artificial Sequence: Synthetic oligonucleotide
  Sense strand starting at position 1847 of SEQ ID NO: 1884502
agguaagguccauggcgau

SEQ ID NO: 2270651 - RNA, 19 nt, Artificial Sequence
  Description of Artificial Sequence: Synthetic oligonucleotide
  Antisense strand to SEQ ID NO: 2270650
aucgccauggaccuuaccu

SEQ ID NO: 2270652 - RNA, 19 nt, Artificial Sequence
  Description of Artificial Sequence: Synthetic oligonucleotide
  Sense strand starting at position 1853 of SEQ ID NO: 1884502
gguccauggcgauaagauu

SEQ ID NO: 2270653 - RNA, 19 nt, Artificial Sequence
  Description of Artificial Sequence: Synthetic oligonucleotide
  Antisense strand to SEQ ID NO: 2270652
aaucuuaucgccauggacc

SEQ ID NO: 2270654 - RNA, 19 nt, Artificial Sequence
  Description of Artificial Sequence: Synthetic oligonucleotide
  Sense strand starting at position 2037 of SEQ ID NO: 1884502
gccuguuucgucugcgcau

SEQ ID NO: 2270655 - RNA, 19 nt, Artificial Sequence
  Description of Artificial Sequence: Synthetic oligonucleotide
  Antisense strand to SEQ ID NO: 2270654
augcgcagacgaaacaggc

SEQ ID NO: 2270656 - RNA, 19 nt, Artificial Sequence
  Description of Artificial Sequence: Synthetic oligonucleotide
  Sense strand starting at position 2441 of SEQ ID NO: 1884502
agggcuguggucuagaaag

SEQ ID NO: 2270657 - RNA, 19 nt, Artificial Sequence
  Description of Artificial Sequence: Synthetic oligonucleotide
  Antisense strand to SEQ ID NO: 2270656
cuuucuagaccacagcccu

SEQ ID NO: 2270658 - RNA, 19 nt, Artificial Sequence
  Description of Artificial Sequence: Synthetic oligonucleotide
  Sense strand starting at position 2651 of SEQ ID NO: 1884502
ucgcuaaguguaugccauu

SEQ ID NO: 2270659 - RNA, 19 nt, Artificial Sequence
  Description of Artificial Sequence: Synthetic oligonucleotide
  Antisense strand to SEQ ID NO: 2270658
aauggcauacacuuagcga

SEQ ID NO: 2270660 - RNA, 19 nt, Artificial Sequence
  Description of Artificial Sequence: Synthetic oligonucleotide
  Sense strand starting at position 2891 of SEQ ID NO: 1884502
ucuccuagccaucgagaca

SEQ ID NO: 2270661 - RNA, 19 nt, Artificial Sequence
  Description of Artificial Sequence: Synthetic oligonucleotide
  Antisense strand to SEQ ID NO: 2270660
ugucucgauggcuaggaga

SEQ ID NO: 2270662 - RNA, 19 nt, Artificial Sequence
  Description of Artificial Sequence: Synthetic oligonucleotide
  Sense strand starting at position 3446 of SEQ ID NO: 1884502
ccucgucccaggugaagua

SEQ ID NO: 2270663 - RNA, 19 nt, Artificial Sequence
  Description of Artificial Sequence: Synthetic oligonucleotide
  Antisense strand to SEQ ID NO: 2270662
uacuucaccugggacgagg

SEQ ID NO: 2270664 - RNA, 19 nt, Artificial Sequence
  Description of Artificial Sequence: Synthetic oligonucleotide
  Sense strand starting at position 166 of SEQ ID NO: 1884503
gguccaacuugcucuguga

SEQ ID NO: 2270665 - RNA, 19 nt, Artificial Sequence
  Description of Artificial Sequence: Synthetic oligonucleotide
  Antisense strand to SEQ ID NO: 2270664
ucacagagcaaguuggacc

SEQ ID NO: 2270666 - RNA, 19 nt, Artificial Sequence
  Description of Artificial Sequence: Synthetic oligonucleotide
  Sense strand starting at position 301 of SEQ ID NO: 1884503
auagccaacgccuguuauu

SEQ ID NO: 2270667 - RNA, 19 nt, Artificial Sequence
  Description of Artificial Sequence: Synthetic oligonucleotide
  Antisense strand to SEQ ID NO: 2270666
aauaacaggcguuggcuau

SEQ ID NO: 2270668 - RNA, 19 nt, Artificial Sequence
  Description of Artificial Sequence: Synthetic oligonucleotide
  Sense strand starting at position 310 of SEQ ID NO: 1884503
gccuguuauuaagcaauuu

SEQ ID NO: 2270669 - RNA, 19 nt, Artificial Sequence
  Description of Artificial Sequence: Synthetic oligonucleotide
  Antisense strand to SEQ ID NO: 2270668
aaauugcuuaauaacaggc

SEQ ID NO: 2270670 - RNA, 19 nt, Artificial Sequence
  Description of Artificial Sequence: Synthetic oligonucleotide
  Sense strand starting at position 1011 of SEQ ID NO: 1884503
ggcuuccuccugggaggaa

SEQ ID NO: 2270671 - RNA, 19 nt, Artificial Sequence
  Description of Artificial Sequence: Synthetic oligonucleotide
  Antisense strand to SEQ ID NO: 2270670
uuccucccaggaggaagcc

SEQ ID NO: 2270672 - RNA, 19 nt, Artificial Sequence
  Description of Artificial Sequence: Synthetic oligonucleotide
  Sense strand starting at position 1024 of SEQ ID NO: 1884503
gaggaagccuguugcauuc

SEQ ID NO: 2270673 - RNA, 19 nt, Artificial Sequence
  Description of Artificial Sequence: Synthetic oligonucleotide
  Antisense strand to SEQ ID NO: 2270672
gaaugcaacaggcuuccuc

SEQ ID NO: 2270674 - RNA, 19 nt, Artificial Sequence
  Description of Artificial Sequence: Synthetic oligonucleotide
  Sense strand starting at position 1252 of SEQ ID NO: 1884503
ggcugugcuccagggagau

SEQ ID NO: 2270675 - RNA, 19 nt, Artificial Sequence
  Description of Artificial Sequence: Synthetic oligonucleotide
  Antisense strand to SEQ ID NO: 2270674
aucucccuggagcacagcc

SEQ ID NO: 2270676 - RNA, 19 nt, Artificial Sequence
  Description of Artificial Sequence: Synthetic oligonucleotide
  Sense strand starting at position 1406 of SEQ ID NO: 1884503
gugcuuccucagggugcaa

SEQ ID NO: 2270677 - RNA, 19 nt, Artificial Sequence
  Description of Artificial Sequence: Synthetic oligonucleotide
  Antisense strand to SEQ ID NO: 2270676
uugcacccugaggaagcac

SEQ ID NO: 2270678 - RNA, 19 nt, Artificial Sequence
  Description of Artificial Sequence: Synthetic oligonucleotide
  Sense strand starting at position 1640 of SEQ ID NO: 1884503
gcuugaaaggguuaguaag

SEQ ID NO: 2270679 - RNA, 19 nt, Artificial Sequence
  Description of Artificial Sequence: Synthetic oligonucleotide
  Antisense strand to SEQ ID NO: 2270678
cuuacuaacccuuucaagc

SEQ ID NO: 2270680 - RNA, 19 nt, Artificial Sequence
  Description of Artificial Sequence: Synthetic oligonucleotide
  Sense strand starting at position 1656 of SEQ ID NO: 1884503
aagagugagccuggcaaau

SEQ ID NO: 2270681 - RNA, 19 nt, Artificial Sequence
  Description of Artificial Sequence: Synthetic oligonucleotide
  Antisense strand to SEQ ID NO: 2270680
auuugccaggcucacucuu

SEQ ID NO: 2270682 - RNA, 19 nt, Artificial Sequence
  Description of Artificial Sequence: Synthetic oligonucleotide
  Sense strand starting at position 1658 of SEQ ID NO: 1884503
gagugagccuggcaaauaa

SEQ ID NO: 2270683 - RNA, 19 nt, Artificial Sequence
  Description of Artificial Sequence: Synthetic oligonucleotide
  Antisense strand to SEQ ID NO: 2270682
uuauuugccaggcucacuc

SEQ ID NO: 2270684 - RNA, 19 nt, Artificial Sequence
  Description of Artificial Sequence: Synthetic oligonucleotide
  Sense strand starting at position 1670 of SEQ ID NO: 1884503
caaauaagcuaggaagagu

SEQ ID NO: 2270685 - RNA, 19 nt, Artificial Sequence
  Description of Artificial Sequence: Synthetic oligonucleotide
  Antisense strand to SEQ ID NO: 2270684
acucuuccuagcuuauuug

SEQ ID NO: 2270686 - RNA, 19 nt, Artificial Sequence
  Description of Artificial Sequence: Synthetic oligonucleotide
  Sense strand starting at position 1892 of SEQ ID NO: 1884503
cuggcauugaggcgaacau

SEQ ID NO: 2270687 - RNA, 19 nt, Artificial Sequence
  Description of Artificial Sequence: Synthetic oligonucleotide
  Antisense strand to SEQ ID NO: 2270686
auguucgccucaaugccag

SEQ ID NO: 2270688 - RNA, 19 nt, Artificial Sequence
  Description of Artificial Sequence: Synthetic oligonucleotide
  Sense strand starting at position 1893 of SEQ ID NO: 1884503
uggcauugaggcgaacaua

SEQ ID NO: 2270689 - RNA, 19 nt, Artificial Sequence
  Description of Artificial Sequence: Synthetic oligonucleotide
  Antisense strand to SEQ ID NO: 2270688
uauguucgccucaaugcca

SEQ ID NO: 2270690 - RNA, 19 nt, Artificial Sequence
  Description of Artificial Sequence: Synthetic oligonucleotide
  Sense strand starting at position 1904 of SEQ ID NO: 1884503
cgaacauaccugugaccua

SEQ ID NO: 2270691 - RNA, 19 nt, Artificial Sequence
  Description of Artificial Sequence: Synthetic oligonucleotide
  Antisense strand to SEQ ID NO: 2270690
uaggucacagguauguucg

SEQ ID NO: 2270692 - RNA, 19 nt, Artificial Sequence
  Description of Artificial Sequence: Synthetic oligonucleotide
  Sense strand starting at position 1911 of SEQ ID NO: 1884503
accugugaccuauggaauu

SEQ ID NO: 2270693 - RNA, 19 nt, Artificial Sequence
  Description of Artificial Sequence: Synthetic oligonucleotide
  Antisense strand to SEQ ID NO: 2270692
aauuccauaggucacaggu

SEQ ID NO: 2270694 - RNA, 19 nt, Artificial Sequence
  Description of Artificial Sequence: Synthetic oligonucleotide
  Sense strand starting at position 1948 of SEQ ID NO: 1884503
gagagcacuggcugucaau

SEQ ID NO: 2270695 - RNA, 19 nt, Artificial Sequence
  Description of Artificial Sequence: Synthetic oligonucleotide
  Antisense strand to SEQ ID NO: 2270694
auugacagccagugcucuc

SEQ ID NO: 2270696 - RNA, 19 nt, Artificial Sequence
  Description of Artificial Sequence: Synthetic oligonucleotide
  Sense strand starting at position 2152 of SEQ ID NO: 1884503
ggcacuuccacauggaguu

SEQ ID NO: 2270697 - RNA, 19 nt, Artificial Sequence
  Description of Artificial Sequence: Synthetic oligonucleotide
  Antisense strand to SEQ ID NO: 2270696
aacuccauguggaagugcc

SEQ ID NO: 2270698 - RNA, 19 nt, Artificial Sequence
  Description of Artificial Sequence: Synthetic oligonucleotide
  Sense strand starting at position 2306 of SEQ ID NO: 1884503
caccgaggcuucuuaucau

SEQ ID NO: 2270699 - RNA, 19 nt, Artificial Sequence
  Description of Artificial Sequence: Synthetic oligonucleotide
  Antisense strand to SEQ ID NO: 2270698
augauaagaagccucggug

SEQ ID NO: 2270700 - RNA, 19 nt, Artificial Sequence
  Description of Artificial Sequence: Synthetic oligonucleotide
  Sense strand starting at position 3029 of SEQ ID NO: 1884503
cagccucagugacaaagaa

SEQ ID NO: 2270701 - RNA, 19 nt, Artificial Sequence
  Description of Artificial Sequence: Synthetic oligonucleotide
  Antisense strand to SEQ ID NO: 2270700
uucuuugucacugaggcug

SEQ ID NO: 2270702 - RNA, 19 nt, Artificial Sequence
  Description of Artificial Sequence: Synthetic oligonucleotide
  Sense strand starting at position 3299 of SEQ ID NO: 1884503
gcguaaccucucugaacca

SEQ ID NO: 2270703 - RNA, 19 nt, Artificial Sequence
  Description of Artificial Sequence: Synthetic oligonucleotide
  Antisense strand to SEQ ID NO: 2270702
ugguucagagagguuacgc

SEQ ID NO: 2270704 - RNA, 19 nt, Artificial Sequence
  Description of Artificial Sequence: Synthetic oligonucleotide
  Sense strand starting at position 3324 of SEQ ID NO: 1884503
auaugucaaucaggacuua

SEQ ID NO: 2270705 - RNA, 19 nt, Artificial Sequence
  Description of Artificial Sequence: Synthetic oligonucleotide
  Antisense strand to SEQ ID NO: 2270704
uaaguccugauugacauau

SEQ ID NO: 2270706 - RNA, 19 nt, Artificial Sequence
  Description of Artificial Sequence: Synthetic oligonucleotide
  Sense strand starting at position 3472 of SEQ ID NO: 1884503
ggcagagcuuccucuugca

SEQ ID NO: 2270707 - RNA, 19 nt, Artificial Sequence
  Description of Artificial Sequence: Synthetic oligonucleotide
  Antisense strand to SEQ ID NO: 2270706
ugcaagaggaagcucugcc

SEQ ID NO: 2270708 - RNA, 19 nt, Artificial Sequence
  Description of Artificial Sequence: Synthetic oligonucleotide
  Sense strand starting at position 3475 of SEQ ID NO: 1884503
agagcuuccucuugcaaag

SEQ ID NO: 2270709 - RNA, 19 nt, Artificial Sequence
  Description of Artificial Sequence: Synthetic oligonucleotide
  Antisense strand to SEQ ID NO: 2270708
cuuugcaagaggaagcucu

SEQ ID NO: 2270710 - RNA, 19 nt, Artificial Sequence
  Description of Artificial Sequence: Synthetic oligonucleotide
  Sense strand starting at position 3511 of SEQ ID NO: 1884503
cagacagguuccggugaca

SEQ ID NO: 2270711 - RNA, 19 nt, Artificial Sequence
  Description of Artificial Sequence: Synthetic oligonucleotide
  Antisense strand to SEQ ID NO: 2270710
ugucaccggaaccugucug

SEQ ID NO: 2270712 - RNA, 19 nt, Artificial Sequence
  Description of Artificial Sequence: Synthetic oligonucleotide
  Sense strand starting at position 108 of SEQ ID NO: 1884504
auagccaacgccuguuauu

SEQ ID NO: 2270713 - RNA, 19 nt, Artificial Sequence
  Description of Artificial Sequence: Synthetic oligonucleotide
  Antisense strand to SEQ ID NO: 2270712
aauaacaggcguuggcuau

SEQ ID NO: 2270714 - RNA, 19 nt, Artificial Sequence
  Description of Artificial Sequence: Synthetic oligonucleotide
  Sense strand starting at position 117 of SEQ ID NO: 1884504
gccuguuauuaagcaauuu

SEQ ID NO: 2270715 - RNA, 19 nt, Artificial Sequence
  Description of Artificial Sequence: Synthetic oligonucleotide
  Antisense strand to SEQ ID NO: 2270714
aaauugcuuaauaacaggc

SEQ ID NO: 2270716 - RNA, 19 nt, Artificial Sequence
  Description of Artificial Sequence: Synthetic oligonucleotide
  Sense strand starting at position 818 of SEQ ID NO: 1884504
ggcuuccuccugggaggaa

SEQ ID NO: 2270717 - RNA, 19 nt, Artificial Sequence
  Description of Artificial Sequence: Synthetic oligonucleotide
  Antisense strand to SEQ ID NO: 2270716
uuccucccaggaggaagcc

SEQ ID NO: 2270718 - RNA, 19 nt, Artificial Sequence
  Description of Artificial Sequence: Synthetic oligonucleotide
  Sense strand starting at position 831 of SEQ ID NO: 1884504
gaggaagccuguugcauuc

SEQ ID NO: 2270719 - RNA, 19 nt, Artificial Sequence
  Description of Artificial Sequence: Synthetic oligonucleotide
  Antisense strand to SEQ ID NO: 2270718
gaaugcaacaggcuuccuc

SEQ ID NO: 2270720 - RNA, 19 nt, Artificial Sequence
  Description of Artificial Sequence: Synthetic oligonucleotide
  Sense strand starting at position 1059 of SEQ ID NO: 1884504
ggcugugcuccagggagau

SEQ ID NO: 2270721 - RNA, 19 nt, Artificial Sequence
  Description of Artificial Sequence: Synthetic oligonucleotide
  Antisense strand to SEQ ID NO: 2270720
aucucccuggagcacagcc

SEQ ID NO: 2270722 - RNA, 19 nt, Artificial Sequence
  Description of Artificial Sequence: Synthetic oligonucleotide
  Sense strand starting at position 1213 of SEQ ID NO: 1884504
gugcuuccucagggugcaa

SEQ ID NO: 2270723 - RNA, 19 nt, Artificial Sequence
  Description of Artificial Sequence: Synthetic oligonucleotide
  Antisense strand to SEQ ID NO: 2270722
uugcacccugaggaagcac

SEQ ID NO: 2270724 - RNA, 19 nt, Artificial Sequence
  Description of Artificial Sequence: Synthetic oligonucleotide
  Sense strand starting at position 1447 of SEQ ID NO: 1884504
gcuugaaaggguuaguaag

SEQ ID NO: 2270725 - RNA, 19 nt, Artificial Sequence
  Description of Artificial Sequence: Synthetic oligonucleotide
  Antisense strand to SEQ ID NO: 2270724
cuuacuaacccuuucaagc

SEQ ID NO: 2270726 - RNA, 19 nt, Artificial Sequence
  Description of Artificial Sequence: Synthetic oligonucleotide
  Sense strand starting at position 1463 of SEQ ID NO: 1884504
aagagugagccuggcaaau

SEQ ID NO: 2270727 - RNA, 19 nt, Artificial Sequence
  Description of Artificial Sequence: Synthetic oligonucleotide
  Antisense strand to SEQ ID NO: 2270726
auuugccaggcucacucuu

SEQ ID NO: 2270728 - RNA, 19 nt, Artificial Sequence
  Description of Artificial Sequence: Synthetic oligonucleotide
  Sense strand starting at position 1465 of SEQ ID NO: 1884504
gagugagccuggcaaauaa

SEQ ID NO: 2270729 - RNA, 19 nt, Artificial Sequence
  Description of Artificial Sequence: Synthetic oligonucleotide
  Antisense strand to SEQ ID NO: 2270728
uuauuugccaggcucacuc

SEQ ID NO: 2270730 - RNA, 19 nt, Artificial Sequence
  Description of Artificial Sequence: Synthetic oligonucleotide
  Sense strand starting at position 1477 of SEQ ID NO: 1884504
caaauaagcuaggaagagu

SEQ ID NO: 2270731 - RNA, 19 nt, Artificial Sequence
  Description of Artificial Sequence: Synthetic oligonucleotide
  Antisense strand to SEQ ID NO: 2270730
acucuuccuagcuuauuug

SEQ ID NO: 2270732 - RNA, 19 nt, Artificial Sequence
  Description of Artificial Sequence: Synthetic oligonucleotide
  Sense strand starting at position 1699 of SEQ ID NO: 1884504
cuggcauugaggcgaacau

SEQ ID NO: 2270733 - RNA, 19 nt, Artificial Sequence
  Description of Artificial Sequence: Synthetic oligonucleotide
  Antisense strand to SEQ ID NO: 2270732
auguucgccucaaugccag

SEQ ID NO: 2270734 - RNA, 19 nt, Artificial Sequence
  Description of Artificial Sequence: Synthetic oligonucleotide
  Sense strand starting at position 1700 of SEQ ID NO: 1884504
uggcauugaggcgaacaua

SEQ ID NO: 2270735 - RNA, 19 nt, Artificial Sequence
  Description of Artificial Sequence: Synthetic oligonucleotide
  Antisense strand to SEQ ID NO: 2270734
uauguucgccucaaugcca

SEQ ID NO: 2270736 - RNA, 19 nt, Artificial Sequence
  Description of Artificial Sequence: Synthetic oligonucleotide
  Sense strand starting at position 1711 of SEQ ID NO: 1884504
cgaacauaccugugaccua

SEQ ID NO: 2270737 - RNA, 19 nt, Artificial Sequence
  Description of Artificial Sequence: Synthetic oligonucleotide
  Antisense strand to SEQ ID NO: 2270736
uaggucacagguauguucg

SEQ ID NO: 2270738 - RNA, 19 nt, Artificial Sequence
  Description of Artificial Sequence: Synthetic oligonucleotide
  Sense strand starting at position 1718 of SEQ ID NO: 1884504
accugugaccuauggaauu

SEQ ID NO: 2270739 - RNA, 19 nt, Artificial Sequence
  Description of Artificial Sequence: Synthetic oligonucleotide
  Antisense strand to SEQ ID NO: 2270738
aauuccauaggucacaggu

SEQ ID NO: 2270740 - RNA, 19 nt, Artificial Sequence
  Description of Artificial Sequence: Synthetic oligonucleotide
  Sense strand starting at position 1755 of SEQ ID NO: 1884504
gagagcacuggcugucaau

SEQ ID NO: 2270741 - RNA, 19 nt, Artificial Sequence
  Description of Artificial Sequence: Synthetic oligonucleotide
  Antisense strand to SEQ ID NO: 2270740
auugacagccagugcucuc

SEQ ID NO: 2270742 - RNA, 19 nt, Artificial Sequence
  Description of Artificial Sequence: Synthetic oligonucleotide
  Sense strand starting at position 1959 of SEQ ID NO: 1884504
ggcacuuccacauggaguu

SEQ ID NO: 2270743 - RNA, 19 nt, Artificial Sequence
  Description of Artificial Sequence: Synthetic oligonucleotide
  Antisense strand to SEQ ID NO: 2270742
aacuccauguggaagugcc

SEQ ID NO: 2270744 - RNA, 19 nt, Artificial Sequence
  Description of Artificial Sequence: Synthetic oligonucleotide
  Sense strand starting at position 2113 of SEQ ID NO: 1884504
caccgaggcuucuuaucau

SEQ ID NO: 2270745 - RNA, 19 nt, Artificial Sequence
  Description of Artificial Sequence: Synthetic oligonucleotide
  Antisense strand to SEQ ID NO: 2270744
augauaagaagccucggug

SEQ ID NO: 2270746 - RNA, 19 nt, Artificial Sequence
  Description of Artificial Sequence: Synthetic oligonucleotide
  Sense strand starting at position 2836 of SEQ ID NO: 1884504
cagccucagugacaaagaa

SEQ ID NO: 2270747 - RNA, 19 nt, Artificial Sequence
  Description of Artificial Sequence: Synthetic oligonucleotide
  Antisense strand to SEQ ID NO: 2270746
uucuuugucacugaggcug

SEQ ID NO: 2270748 - RNA, 19 nt, Artificial Sequence
  Description of Artificial Sequence: Synthetic oligonucleotide
  Sense strand starting at position 3106 of SEQ ID NO: 1884504
gcguaaccucucugaacca

SEQ ID NO: 2270749 - RNA, 19 nt, Artificial Sequence
  Description of Artificial Sequence: Synthetic oligonucleotide
  Antisense strand to SEQ ID NO: 2270748
ugguucagagagguuacgc

SEQ ID NO: 2270750 - RNA, 19 nt, Artificial Sequence
  Description of Artificial Sequence: Synthetic oligonucleotide
  Sense strand starting at position 3131 of SEQ ID NO: 1884504
auaugucaaucaggacuua

SEQ ID NO: 2270751 - RNA, 19 nt, Artificial Sequence
  Description of Artificial Sequence: Synthetic oligonucleotide
  Antisense strand to SEQ ID NO: 2270750
uaaguccugauugacauau

SEQ ID NO: 2270752 - RNA, 19 nt, Artificial Sequence
  Description of Artificial Sequence: Synthetic oligonucleotide
  Sense strand starting at position 3279 of SEQ ID NO: 1884504
ggcagagcuuccucuugca

SEQ ID NO: 2270753 - RNA, 19 nt, Artificial Sequence
  Description of Artificial Sequence: Synthetic oligonucleotide
  Antisense strand to SEQ ID NO: 2270752
ugcaagaggaagcucugcc

SEQ ID NO: 2270754 - RNA, 19 nt, Artificial Sequence
  Description of Artificial Sequence: Synthetic oligonucleotide
  Sense strand starting at position 3282 of SEQ ID NO: 1884504
agagcuuccucuugcaaag

SEQ ID NO: 2270755 - RNA, 19 nt, Artificial Sequence
  Description of Artificial Sequence: Synthetic oligonucleotide
  Antisense strand to SEQ ID NO: 2270754
cuuugcaagaggaagcucu

SEQ ID NO: 2270756 - RNA, 19 nt, Artificial Sequence
  Description of Artificial Sequence: Synthetic oligonucleotide
  Sense strand starting at position 3318 of SEQ ID NO: 1884504
cagacagguuccggugaca

SEQ ID NO: 2270757 - RNA, 19 nt, Artificial Sequence
  Description of Artificial Sequence: Synthetic oligonucleotide
  Antisense strand to SEQ ID NO: 2270756
ugucaccggaaccugucug

SEQ ID NO: 2270758 - RNA, 19 nt, Artificial Sequence
  Description of Artificial Sequence: Synthetic oligonucleotide
  Sense strand starting at position 69 of SEQ ID NO: 1884505
gagggauggucguaccucu

SEQ ID NO: 2270759 - RNA, 19 nt, Artificial Sequence
  Description of Artificial Sequence: Synthetic oligonucleotide
  Antisense strand to SEQ ID NO: 2270758
agagguacgaccaucccuc

SEQ ID NO: 2270760 - RNA, 19 nt, Artificial Sequence
  Description of Artificial Sequence: Synthetic oligonucleotide
  Sense strand starting at position 76 of SEQ ID NO: 1884505
ggucguaccucugugacca

SEQ ID NO: 2270761 - RNA, 19 nt, Artificial Sequence
  Description of Artificial Sequence: Synthetic oligonucleotide
  Antisense strand to SEQ ID NO: 2270760
uggucacagagguacgacc

SEQ ID NO: 2270762 - RNA, 19 nt, Artificial Sequence
  Description of Artificial Sequence: Synthetic oligonucleotide
  Sense strand starting at position 172 of SEQ ID NO: 1884505
ggucaugagcucugcccua

SEQ ID NO: 2270763 - RNA, 19 nt, Artificial Sequence
  Description of Artificial Sequence: Synthetic oligonucleotide
  Antisense strand to SEQ ID NO: 2270762
uagggcagagcucaugacc

SEQ ID NO: 2270764 - RNA, 19 nt, Artificial Sequence
  Description of Artificial Sequence: Synthetic oligonucleotide
  Sense strand starting at position 257 of SEQ ID NO: 1884505
guguguuucugaggaacuc

SEQ ID NO: 2270765 - RNA, 19 nt, Artificial Sequence
  Description of Artificial Sequence: Synthetic oligonucleotide
  Antisense strand to SEQ ID NO: 2270764
gaguuccucagaaacacac

SEQ ID NO: 2270766 - RNA, 19 nt, Artificial Sequence
  Description of Artificial Sequence: Synthetic oligonucleotide
  Sense strand starting at position 321 of SEQ ID NO: 1884505
ugcugcuggcucugaugaa

SEQ ID NO: 2270767 - RNA, 19 nt, Artificial Sequence
  Description of Artificial Sequence: Synthetic oligonucleotide
  Antisense strand to SEQ ID NO: 2270766
uucaucagagccagcagca

SEQ ID NO: 2270768 - RNA, 19 nt, Artificial Sequence
  Description of Artificial Sequence: Synthetic oligonucleotide
  Sense strand starting at position 495 of SEQ ID NO: 1884505
ggcguaaucucgucucgcu

SEQ ID NO: 2270769 - RNA, 19 nt, Artificial Sequence
  Description of Artificial Sequence: Synthetic oligonucleotide
  Antisense strand to SEQ ID NO: 2270768
agcgagacgagauuacgcc

SEQ ID NO: 2270770 - RNA, 19 nt, Artificial Sequence
  Description of Artificial Sequence: Synthetic oligonucleotide
  Sense strand starting at position 786 of SEQ ID NO: 1884505
uggccagagugcuucagau

SEQ ID NO: 2270771 - RNA, 19 nt, Artificial Sequence
  Description of Artificial Sequence: Synthetic oligonucleotide
  Antisense strand to SEQ ID NO: 2270770
aucugaagcacucuggcca

SEQ ID NO: 2270772 - RNA, 19 nt, Artificial Sequence
  Description of Artificial Sequence: Synthetic oligonucleotide
  Sense strand starting at position 808 of SEQ ID NO: 1884505
ucagcaaaccuuugaguug

SEQ ID NO: 2270773 - RNA, 19 nt, Artificial Sequence
  Description of Artificial Sequence: Synthetic oligonucleotide
  Antisense strand to SEQ ID NO: 2270772
caacucaaagguuugcuga

SEQ ID NO: 2270774 - RNA, 19 nt, Artificial Sequence
  Description of Artificial Sequence: Synthetic oligonucleotide
  Sense strand starting at position 874 of SEQ ID NO: 1884505
ugugaacuguguugacaug

SEQ ID NO: 2270775 - RNA, 19 nt, Artificial Sequence
  Description of Artificial Sequence: Synthetic oligonucleotide
  Antisense strand to SEQ ID NO: 2270774
caugucaacacaguucaca

SEQ ID NO: 2270776 - RNA, 19 nt, Artificial Sequence
  Description of Artificial Sequence: Synthetic oligonucleotide
  Sense strand starting at position 875 of SEQ ID NO: 1884505
gugaacuguguugacauga

SEQ ID NO: 2270777 - RNA, 19 nt, Artificial Sequence
  Description of Artificial Sequence: Synthetic oligonucleotide
  Antisense strand to SEQ ID NO: 2270776
ucaugucaacacaguucac

SEQ ID NO: 2270778 - RNA, 19 nt, Artificial Sequence
  Description of Artificial Sequence: Synthetic oligonucleotide
  Sense strand starting at position 978 of SEQ ID NO: 1884505
gaucccaccugguguaagu

SEQ ID NO: 2270779 - RNA, 19 nt, Artificial Sequence
  Description of Artificial Sequence: Synthetic oligonucleotide
  Antisense strand to SEQ ID NO: 2270778
acuuacaccaggugggauc

SEQ ID NO: 2270780 - RNA, 19 nt, Artificial Sequence
  Description of Artificial Sequence: Synthetic oligonucleotide
  Sense strand starting at position 1141 of SEQ ID NO: 1884505
cgccgucuggcaguaaguu

SEQ ID NO: 2270781 - RNA, 19 nt, Artificial Sequence
  Description of Artificial Sequence: Synthetic oligonucleotide
  Antisense strand to SEQ ID NO: 2270780
aacuuacugccagacggcg

SEQ ID NO: 2270782 - RNA, 19 nt, Artificial Sequence
  Description of Artificial Sequence: Synthetic oligonucleotide
  Sense strand starting at position 1142 of SEQ ID NO: 1884505
gccgucuggcaguaaguua

SEQ ID NO: 2270783 - RNA, 19 nt, Artificial Sequence
  Description of Artificial Sequence: Synthetic oligonucleotide
  Antisense strand to SEQ ID NO: 2270782
uaacuuacugccagacggc

SEQ ID NO: 2270784 - RNA, 19 nt, Artificial Sequence
  Description of Artificial Sequence: Synthetic oligonucleotide
  Sense strand starting at position 1150 of SEQ ID NO: 1884505
gcaguaaguuagcucugca

SEQ ID NO: 2270785 - RNA, 19 nt, Artificial Sequence
  Description of Artificial Sequence: Synthetic oligonucleotide
  Antisense strand to SEQ ID NO: 2270784
ugcagagcuaacuuacugc

SEQ ID NO: 2270786 - RNA, 19 nt, Artificial Sequence
  Description of Artificial Sequence: Synthetic oligonucleotide
  Sense strand starting at position 1153 of SEQ ID NO: 1884505
guaaguuagcucugcaggu

SEQ ID NO: 2270787 - RNA, 19 nt, Artificial Sequence
  Description of Artificial Sequence: Synthetic oligonucleotide
  Antisense strand to SEQ ID NO: 2270786
accugcagagcuaacuuac

SEQ ID NO: 2270788 - RNA, 19 nt, Artificial Sequence
  Description of Artificial Sequence: Synthetic oligonucleotide
  Sense strand starting at position 1569 of SEQ ID NO: 1884505
ugguccuguuggcugaaga

SEQ ID NO: 2270789 - RNA, 19 nt, Artificial Sequence
  Description of Artificial Sequence: Synthetic oligonucleotide
  Antisense strand to SEQ ID NO: 2270788
ucuucagccaacaggacca

SEQ ID NO: 2270790 - RNA, 19 nt, Artificial Sequence
  Description of Artificial Sequence: Synthetic oligonucleotide
  Sense strand starting at position 1570 of SEQ ID NO: 1884505
gguccuguuggcugaagau

SEQ ID NO: 2270791 - RNA, 19 nt, Artificial Sequence
  Description of Artificial Sequence: Synthetic oligonucleotide
  Antisense strand to SEQ ID NO: 2270790
aucuucagccaacaggacc

SEQ ID NO: 2270792 - RNA, 19 nt, Artificial Sequence
  Description of Artificial Sequence: Synthetic oligonucleotide
  Sense strand starting at position 1739 of SEQ ID NO: 1884505
cccgaaugauuucgcuuac

SEQ ID NO: 2270793 - RNA, 19 nt, Artificial Sequence
  Description of Artificial Sequence: Synthetic oligonucleotide
  Antisense strand to SEQ ID NO: 2270792
guaagcgaaaucauucggg

SEQ ID NO: 2270794 - RNA, 19 nt, Artificial Sequence
  Description of Artificial Sequence: Synthetic oligonucleotide
  Sense strand starting at position 3066 of SEQ ID NO: 1884505
gcgagagaauccugucugu

SEQ ID NO: 2270795 - RNA, 19 nt, Artificial Sequence
  Description of Artificial Sequence: Synthetic oligonucleotide
  Antisense strand to SEQ ID NO: 2270794
acagacaggauucucucgc

SEQ ID NO: 2270796 - RNA, 19 nt, Artificial Sequence
  Description of Artificial Sequence: Synthetic oligonucleotide
  Sense strand starting at position 3075 of SEQ ID NO: 1884505
uccugucugugcgcugaaa

SEQ ID NO: 2270797 - RNA, 19 nt, Artificial Sequence
  Description of Artificial Sequence: Synthetic oligonucleotide
  Antisense strand to SEQ ID NO: 2270796
uuucagcgcacagacagga

SEQ ID NO: 2270798 - RNA, 19 nt, Artificial Sequence
  Description of Artificial Sequence: Synthetic oligonucleotide
  Sense strand starting at position 3150 of SEQ ID NO: 1884505
agcuucagacguggaagua

SEQ ID NO: 2270799 - RNA, 19 nt, Artificial Sequence
  Description of Artificial Sequence: Synthetic oligonucleotide
  Antisense strand to SEQ ID NO: 2270798
uacuuccacgucugaagcu

SEQ ID NO: 2270800 - RNA, 19 nt, Artificial Sequence
  Description of Artificial Sequence: Synthetic oligonucleotide
  Sense strand starting at position 3151 of SEQ ID NO: 1884505
gcuucagacguggaaguau

SEQ ID NO: 2270801 - RNA, 19 nt, Artificial Sequence
  Description of Artificial Sequence: Synthetic oligonucleotide
  Antisense strand to SEQ ID NO: 2270800
auacuuccacgucugaagc

SEQ ID NO: 2270802 - RNA, 19 nt, Artificial Sequence
  Description of Artificial Sequence: Synthetic oligonucleotide
  Sense strand starting at position 3659 of SEQ ID NO: 1884505
uccugugggucgugaagga

SEQ ID NO: 2270803 - RNA, 19 nt, Artificial Sequence
  Description of Artificial Sequence: Synthetic oligonucleotide
  Antisense strand to SEQ ID NO: 2270802
uccuucacgacccacagga

SEQ ID NO: 2270804 - RNA, 19 nt, Artificial Sequence
  Description of Artificial Sequence: Synthetic oligonucleotide
  Sense strand starting at position 3943 of SEQ ID NO: 1884505
gugcccucaucgggagaaa

SEQ ID NO: 2270805 - RNA, 19 nt, Artificial Sequence
  Description of Artificial Sequence: Synthetic oligonucleotide
  Antisense strand to SEQ ID NO: 2270804
uuucucccgaugagggcac

SEQ ID NO: 2270806 - RNA, 19 nt, Artificial Sequence
  Description of Artificial Sequence: Synthetic oligonucleotide
  Sense strand starting at position 3956 of SEQ ID NO: 1884505
gagaaagcaucuuugcaga

SEQ ID NO: 2270807 - RNA, 19 nt, Artificial Sequence
  Description of Artificial Sequence: Synthetic oligonucleotide
  Antisense strand to SEQ ID NO: 2270806
ucugcaaagaugcuuucuc

SEQ ID NO: 2270808 - RNA, 19 nt, Artificial Sequence
  Description of Artificial Sequence: Synthetic oligonucleotide
  Sense strand starting at position 3958 of SEQ ID NO: 1884505
gaaagcaucuuugcagaug

SEQ ID NO: 2270809 - RNA, 19 nt, Artificial Sequence
  Description of Artificial Sequence: Synthetic oligonucleotide
  Antisense strand to SEQ ID NO: 2270808
caucugcaaagaugcuuuc

SEQ ID NO: 2270810 - RNA, 19 nt, Artificial Sequence
  Description of Artificial Sequence: Synthetic oligonucleotide
  Sense strand starting at position 3972 of SEQ ID NO: 1884505
agaugucauuaagggaaac

SEQ ID NO: 2270811 - RNA, 19 nt, Artificial Sequence
  Description of Artificial Sequence: Synthetic oligonucleotide
  Antisense strand to SEQ ID NO: 2270810
guuucccuuaaugacaucu

SEQ ID NO: 2270812 - RNA, 19 nt, Artificial Sequence
  Description of Artificial Sequence: Synthetic oligonucleotide
  Sense strand starting at position 62 of SEQ ID NO: 1884506
ugcugcuggcucugaugaa

SEQ ID NO: 2270813 - RNA, 19 nt, Artificial Sequence
  Description of Artificial Sequence: Synthetic oligonucleotide
  Antisense strand to SEQ ID NO: 2270812
uucaucagagccagcagca

SEQ ID NO: 2270814 - RNA, 19 nt, Artificial Sequence
  Description of Artificial Sequence: Synthetic oligonucleotide
  Sense strand starting at position 236 of SEQ ID NO: 1884506
ggcguaaucucgucucgcu

SEQ ID NO: 2270815 - RNA, 19 nt, Artificial Sequence
  Description of Artificial Sequence: Synthetic oligonucleotide
  Antisense strand to SEQ ID NO: 2270814
agcgagacgagauuacgcc

SEQ ID NO: 2270816 - RNA, 19 nt, Artificial Sequence
  Description of Artificial Sequence: Synthetic oligonucleotide
  Sense strand starting at position 527 of SEQ ID NO: 1884506
uggccagagugcuucagau

SEQ ID NO: 2270817 - RNA, 19 nt, Artificial Sequence
  Description of Artificial Sequence: Synthetic oligonucleotide
  Antisense strand to SEQ ID NO: 2270816
aucugaagcacucuggcca

SEQ ID NO: 2270818 - RNA, 19 nt, Artificial Sequence
  Description of Artificial Sequence: Synthetic oligonucleotide
  Sense strand starting at position 549 of SEQ ID NO: 1884506
ucagcaaaccuuugaguug

SEQ ID NO: 2270819 - RNA, 19 nt, Artificial Sequence
  Description of Artificial Sequence: Synthetic oligonucleotide
  Antisense strand to SEQ ID NO: 2270818
caacucaaagguuugcuga

SEQ ID NO: 2270820 - RNA, 19 nt, Artificial Sequence
  Description of Artificial Sequence: Synthetic oligonucleotide
  Sense strand starting at position 615 of SEQ ID NO: 1884506
ugugaacuguguugacaug

SEQ ID NO: 2270821 - RNA, 19 nt, Artificial Sequence
  Description of Artificial Sequence: Synthetic oligonucleotide
  Antisense strand to SEQ ID NO: 2270820
caugucaacacaguucaca

SEQ ID NO: 2270822 - RNA, 19 nt, Artificial Sequence
  Description of Artificial Sequence: Synthetic oligonucleotide
  Sense strand starting at position 616 of SEQ ID NO: 1884506
gugaacuguguugacauga

SEQ ID NO: 2270823 - RNA, 19 nt, Artificial Sequence
  Description of Artificial Sequence: Synthetic oligonucleotide
  Antisense strand to SEQ ID NO: 2270822
ucaugucaacacaguucac

SEQ ID NO: 2270824 - RNA, 19 nt, Artificial Sequence
  Description of Artificial Sequence: Synthetic oligonucleotide
  Sense strand starting at position 719 of SEQ ID NO: 1884506
gaucccaccugguguaagu

SEQ ID NO: 2270825 - RNA, 19 nt, Artificial Sequence
  Description of Artificial Sequence: Synthetic oligonucleotide
  Antisense strand to SEQ ID NO: 2270824
acuuacaccaggugggauc

SEQ ID NO: 2270826 - RNA, 19 nt, Artificial Sequence
  Description of Artificial Sequence: Synthetic oligonucleotide
  Sense strand starting at position 882 of SEQ ID NO: 1884506
cgccgucuggcaguaaguu

SEQ ID NO: 2270827 - RNA, 19 nt, Artificial Sequence
  Description of Artificial Sequence: Synthetic oligonucleotide
  Antisense strand to SEQ ID NO: 2270826
aacuuacugccagacggcg

SEQ ID NO: 2270828 - RNA, 19 nt, Artificial Sequence
  Description of Artificial Sequence: Synthetic oligonucleotide
  Sense strand starting at position 883 of SEQ ID NO: 1884506
gccgucuggcaguaaguua

SEQ ID NO: 2270829 - RNA, 19 nt, Artificial Sequence
  Description of Artificial Sequence: Synthetic oligonucleotide
  Antisense strand to SEQ ID NO: 2270828
uaacuuacugccagacggc

SEQ ID NO: 2270830 - RNA, 19 nt, Artificial Sequence
  Description of Artificial Sequence: Synthetic oligonucleotide
  Sense strand starting at position 891 of SEQ ID NO: 1884506
gcaguaaguuagcucugca

SEQ ID NO: 2270831 - RNA, 19 nt, Artificial Sequence
  Description of Artificial Sequence: Synthetic oligonucleotide
  Antisense strand to SEQ ID NO: 2270830
ugcagagcuaacuuacugc

SEQ ID NO: 2270832 - RNA, 19 nt, Artificial Sequence
  Description of Artificial Sequence: Synthetic oligonucleotide
  Sense strand starting at position 894 of SEQ ID NO: 1884506
guaaguuagcucugcaggu

SEQ ID NO: 2270833 - RNA, 19 nt, Artificial Sequence
  Description of Artificial Sequence: Synthetic oligonucleotide
  Antisense strand to SEQ ID NO: 2270832
accugcagagcuaacuuac

SEQ ID NO: 2270834 - RNA, 19 nt, Artificial Sequence
  Description of Artificial Sequence: Synthetic oligonucleotide
  Sense strand starting at position 1310 of SEQ ID NO: 1884506
ugguccuguuggcugaaga

SEQ ID NO: 2270835 - RNA, 19 nt, Artificial Sequence
  Description of Artificial Sequence: Synthetic oligonucleotide
  Antisense strand to SEQ ID NO: 2270834
ucuucagccaacaggacca

SEQ ID NO: 2270836 - RNA, 19 nt, Artificial Sequence
  Description of Artificial Sequence: Synthetic oligonucleotide
  Sense strand starting at position 1311 of SEQ ID NO: 1884506
gguccuguuggcugaagau

SEQ ID NO: 2270837 - RNA, 19 nt, Artificial Sequence
  Description of Artificial Sequence: Synthetic oligonucleotide
  Antisense strand to SEQ ID NO: 2270836
aucuucagccaacaggacc

SEQ ID NO: 2270838 - RNA, 19 nt, Artificial Sequence
  Description of Artificial Sequence: Synthetic oligonucleotide
  Sense strand starting at position 1480 of SEQ ID NO: 1884506
cccgaaugauuucgcuuac

SEQ ID NO: 2270839 - RNA, 19 nt, Artificial Sequence
  Description of Artificial Sequence: Synthetic oligonucleotide
  Antisense strand to SEQ ID NO: 2270838
guaagcgaaaucauucggg

SEQ ID NO: 2270840 - RNA, 19 nt, Artificial Sequence
  Description of Artificial Sequence: Synthetic oligonucleotide
  Sense strand starting at position 2807 of SEQ ID NO: 1884506
gcgagagaauccugucugu

SEQ ID NO: 2270841 - RNA, 19 nt, Artificial Sequence
  Description of Artificial Sequence: Synthetic oligonucleotide
  Antisense strand to SEQ ID NO: 2270840
acagacaggauucucucgc

SEQ ID NO: 2270842 - RNA, 19 nt, Artificial Sequence
  Description of Artificial Sequence: Synthetic oligonucleotide
  Sense strand starting at position 2816 of SEQ ID NO: 1884506
uccugucugugcgcugaaa

SEQ ID NO: 2270843 - RNA, 19 nt, Artificial Sequence
  Description of Artificial Sequence: Synthetic oligonucleotide
  Antisense strand to SEQ ID NO: 2270842
uuucagcgcacagacagga

SEQ ID NO: 2270844 - RNA, 19 nt, Artificial Sequence
  Description of Artificial Sequence: Synthetic oligonucleotide
  Sense strand starting at position 2891 of SEQ ID NO: 1884506
agcuucagacguggaagua

SEQ ID NO: 2270845 - RNA, 19 nt, Artificial Sequence
  Description of Artificial Sequence: Synthetic oligonucleotide
  Antisense strand to SEQ ID NO: 2270844
uacuuccacgucugaagcu

SEQ ID NO: 2270846 - RNA, 19 nt, Artificial Sequence
  Description of Artificial Sequence: Synthetic oligonucleotide
  Sense strand starting at position 2892 of SEQ ID NO: 1884506
gcuucagacguggaaguau

SEQ ID NO: 2270847 - RNA, 19 nt, Artificial Sequence
  Description of Artificial Sequence: Synthetic oligonucleotide
  Antisense strand to SEQ ID NO: 2270846
auacuuccacgucugaagc

SEQ ID NO: 2270848 - RNA, 19 nt, Artificial Sequence
  Description of Artificial Sequence: Synthetic oligonucleotide
  Sense strand starting at position 3400 of SEQ ID NO: 1884506
uccugugggucgugaagga

SEQ ID NO: 2270849 - RNA, 19 nt, Artificial Sequence
  Description of Artificial Sequence: Synthetic oligonucleotide
  Antisense strand to SEQ ID NO: 2270848
uccuucacgacccacagga

SEQ ID NO: 2270850 - RNA, 19 nt, Artificial Sequence
  Description of Artificial Sequence: Synthetic oligonucleotide
  Sense strand starting at position 3684 of SEQ ID NO: 1884506
gugcccucaucgggagaaa

SEQ ID NO: 2270851 - RNA, 19 nt, Artificial Sequence
  Description of Artificial Sequence: Synthetic oligonucleotide
  Antisense strand to SEQ ID NO: 2270850
uuucucccgaugagggcac

SEQ ID NO: 2270852 - RNA, 19 nt, Artificial Sequence
  Description of Artificial Sequence: Synthetic oligonucleotide
  Sense strand starting at position 3697 of SEQ ID NO: 1884506
gagaaagcaucuuugcaga

SEQ ID NO: 2270853 - RNA, 19 nt, Artificial Sequence
  Description of Artificial Sequence: Synthetic oligonucleotide
  Antisense strand to SEQ ID NO: 2270852
ucugcaaagaugcuuucuc

SEQ ID NO: 2270854 - RNA, 19 nt, Artificial Sequence
  Description of Artificial Sequence: Synthetic oligonucleotide
  Sense strand starting at position 3699 of SEQ ID NO: 1884506
gaaagcaucuuugcagaug

SEQ ID NO: 2270855 - RNA, 19 nt, Artificial Sequence
  Description of Artificial Sequence: Synthetic oligonucleotide
  Antisense strand to SEQ ID NO: 2270854
caucugcaaagaugcuuuc

SEQ ID NO: 2270856 - RNA, 19 nt, Artificial Sequence
  Description of Artificial Sequence: Synthetic oligonucleotide
  Sense strand starting at position 3713 of SEQ ID NO: 1884506
agaugucauuaagggaaac

SEQ ID NO: 2270857 - RNA, 19 nt, Artificial Sequence
  Description of Artificial Sequence: Synthetic oligonucleotide
  Antisense strand to SEQ ID NO: 2270856
guuucccuuaaugacaucu

SEQ ID NO: 2270858 - RNA, 19 nt, Artificial Sequence
  Description of Artificial Sequence: Synthetic oligonucleotide
  Sense strand starting at position 3776 of SEQ ID NO: 1884506
uccaaugaucaguguccuu

SEQ ID NO: 2270859 - RNA, 19 nt, Artificial Sequence
  Description of Artificial Sequence: Synthetic oligonucleotide
  Antisense strand to SEQ ID NO: 2270858
aaggacacugaucauugga

SEQ ID NO: 2270860 - RNA, 19 nt, Artificial Sequence
  Description of Artificial Sequence: Synthetic oligonucleotide
  Sense strand starting at position 3959 of SEQ ID NO: 1884506
augguagugugagcuugua

SEQ ID NO: 2270861 - RNA, 19 nt, Artificial Sequence
  Description of Artificial Sequence: Synthetic oligonucleotide
  Antisense strand to SEQ ID NO: 2270860
uacaagcucacacuaccau

SEQ ID NO: 2270862 - RNA, 19 nt, Artificial Sequence
  Description of Artificial Sequence: Synthetic oligonucleotide
  Sense strand starting at position 24 of SEQ ID NO: 1884507
ggcuuagaaacaggucuau

SEQ ID NO: 2270863 - RNA, 19 nt, Artificial Sequence
  Description of Artificial Sequence: Synthetic oligonucleotide
  Antisense strand to SEQ ID NO: 2270862
auagaccuguuucuaagcc

SEQ ID NO: 2270864 - RNA, 19 nt, Artificial Sequence
  Description of Artificial Sequence: Synthetic oligonucleotide
  Sense strand starting at position 110 of SEQ ID NO: 1884507
ugcuaucugguguaaugaa

SEQ ID NO: 2270865 - RNA, 19 nt, Artificial Sequence
  Description of Artificial Sequence: Synthetic oligonucleotide
  Antisense strand to SEQ ID NO: 2270864
uucauuacaccagauagca

SEQ ID NO: 2270866 - RNA, 19 nt, Artificial Sequence
  Description of Artificial Sequence: Synthetic oligonucleotide
  Sense strand starting at position 145 of SEQ ID NO: 1884507
gaggaauucccuggacugu

SEQ ID NO: 2270867 - RNA, 19 nt, Artificial Sequence
  Description of Artificial Sequence: Synthetic oligonucleotide
  Antisense strand to SEQ ID NO: 2270866
acaguccagggaauuccuc

SEQ ID NO: 2270868 - RNA, 19 nt, Artificial Sequence
  Description of Artificial Sequence: Synthetic oligonucleotide
  Sense strand starting at position 183 of SEQ ID NO: 1884507
ucacuuaaggcugaugagu

SEQ ID NO: 2270869 - RNA, 19 nt, Artificial Sequence
  Description of Artificial Sequence: Synthetic oligonucleotide
  Antisense strand to SEQ ID NO: 2270868
acucaucagccuuaaguga

SEQ ID NO: 2270870 - RNA, 19 nt, Artificial Sequence
  Description of Artificial Sequence: Synthetic oligonucleotide
  Sense strand starting at position 205 of SEQ ID NO: 1884507
gcaccuccuggcuaaauau

SEQ ID NO: 2270871 - RNA, 19 nt, Artificial Sequence
  Description of Artificial Sequence: Synthetic oligonucleotide
  Antisense strand to SEQ ID NO: 2270870
auauuuagccaggaggugc

SEQ ID NO: 2270872 - RNA, 19 nt, Artificial Sequence
  Description of Artificial Sequence: Synthetic oligonucleotide
  Sense strand starting at position 234 of SEQ ID NO: 1884507
gucacugugcgcuccuuaa

SEQ ID NO: 2270873 - RNA, 19 nt, Artificial Sequence
  Description of Artificial Sequence: Synthetic oligonucleotide
  Antisense strand to SEQ ID NO: 2270872
uuaaggagcgcacagugac

SEQ ID NO: 2270874 - RNA, 19 nt, Artificial Sequence
  Description of Artificial Sequence: Synthetic oligonucleotide
  Sense strand starting at position 282 of SEQ ID NO: 1884507
gcaucacaucccugaagga

SEQ ID NO: 2270875 - RNA, 19 nt, Artificial Sequence
  Description of Artificial Sequence: Synthetic oligonucleotide
  Antisense strand to SEQ ID NO: 2270874
uccuucagggaugugaugc

SEQ ID NO: 2270876 - RNA, 19 nt, Artificial Sequence
  Description of Artificial Sequence: Synthetic oligonucleotide
  Sense strand starting at position 309 of SEQ ID NO: 1884507
caggcagaugccuaguuaa

SEQ ID NO: 2270877 - RNA, 19 nt, Artificial Sequence
  Description of Artificial Sequence: Synthetic oligonucleotide
  Antisense strand to SEQ ID NO: 2270876
uuaacuaggcaucugccug

SEQ ID NO: 2270878 - RNA, 19 nt, Artificial Sequence
  Description of Artificial Sequence: Synthetic oligonucleotide
  Sense strand starting at position 385 of SEQ ID NO: 1884507
gagaguaauucucucuaga

SEQ ID NO: 2270879 - RNA, 19 nt, Artificial Sequence
  Description of Artificial Sequence: Synthetic oligonucleotide
  Antisense strand to SEQ ID NO: 2270878
ucuagagagaauuacucuc

SEQ ID NO: 2270880 - RNA, 19 nt, Artificial Sequence
  Description of Artificial Sequence: Synthetic oligonucleotide
  Sense strand starting at position 421 of SEQ ID NO: 1884507
ugaucauguggccauaaga

SEQ ID NO: 2270881 - RNA, 19 nt, Artificial Sequence
  Description of Artificial Sequence: Synthetic oligonucleotide
  Antisense strand to SEQ ID NO: 2270880
ucuuauggccacaugauca

SEQ ID NO: 2270882 - RNA, 19 nt, Artificial Sequence
  Description of Artificial Sequence: Synthetic oligonucleotide
  Sense strand starting at position 447 of SEQ ID NO: 1884507
uuacuaugucuggauagca

SEQ ID NO: 2270883 - RNA, 19 nt, Artificial Sequence
  Description of Artificial Sequence: Synthetic oligonucleotide
  Antisense strand to SEQ ID NO: 2270882
ugcuauccagacauaguaa

SEQ ID NO: 2270884 - RNA, 19 nt, Artificial Sequence
  Description of Artificial Sequence: Synthetic oligonucleotide
  Sense strand starting at position 579 of SEQ ID NO: 1884507
acuagacuaucaucgggua

SEQ ID NO: 2270885 - RNA, 19 nt, Artificial Sequence
  Description of Artificial Sequence: Synthetic oligonucleotide
  Antisense strand to SEQ ID NO: 2270884
uacccgaugauagucuagu

SEQ ID NO: 2270886 - RNA, 19 nt, Artificial Sequence
  Description of Artificial Sequence: Synthetic oligonucleotide
  Sense strand starting at position 584 of SEQ ID NO: 1884507
acuaucaucggguagggau

SEQ ID NO: 2270887 - RNA, 19 nt, Artificial Sequence
  Description of Artificial Sequence: Synthetic oligonucleotide
  Antisense strand to SEQ ID NO: 2270886
aucccuacccgaugauagu

SEQ ID NO: 2270888 - RNA, 19 nt, Artificial Sequence
  Description of Artificial Sequence: Synthetic oligonucleotide
  Sense strand starting at position 787 of SEQ ID NO: 1884507
auauauaaaugccugcaga

SEQ ID NO: 2270889 - RNA, 19 nt, Artificial Sequence
  Description of Artificial Sequence: Synthetic oligonucleotide
  Antisense strand to SEQ ID NO: 2270888
ucugcaggcauuuauauau

SEQ ID NO: 2270890 - RNA, 19 nt, Artificial Sequence
  Description of Artificial Sequence: Synthetic oligonucleotide
  Sense strand starting at position 968 of SEQ ID NO: 1884507
accuuagaccugugaacau

SEQ ID NO: 2270891 - RNA, 19 nt, Artificial Sequence
  Description of Artificial Sequence: Synthetic oligonucleotide
  Antisense strand to SEQ ID NO: 2270890
auguucacaggucuaaggu

SEQ ID NO: 2270892 - RNA, 19 nt, Artificial Sequence
  Description of Artificial Sequence: Synthetic oligonucleotide
  Sense strand starting at position 975 of SEQ ID NO: 1884507
accugugaacauuaaugua

SEQ ID NO: 2270893 - RNA, 19 nt, Artificial Sequence
  Description of Artificial Sequence: Synthetic oligonucleotide
  Antisense strand to SEQ ID NO: 2270892
uacauuaauguucacaggu

SEQ ID NO: 2270894 - RNA, 19 nt, Artificial Sequence
  Description of Artificial Sequence: Synthetic oligonucleotide
  Sense strand starting at position 1035 of SEQ ID NO: 1884507
guguguaugcaugcaaguu

SEQ ID NO: 2270895 - RNA, 19 nt, Artificial Sequence
  Description of Artificial Sequence: Synthetic oligonucleotide
  Antisense strand to SEQ ID NO: 2270894
aacuugcaugcauacacac

SEQ ID NO: 2270896 - RNA, 19 nt, Artificial Sequence
  Description of Artificial Sequence: Synthetic oligonucleotide
  Sense strand starting at position 1167 of SEQ ID NO: 1884507
cagaguuuacgccagagaa

SEQ ID NO: 2270897 - RNA, 19 nt, Artificial Sequence
  Description of Artificial Sequence: Synthetic oligonucleotide
  Antisense strand to SEQ ID NO: 2270896
uucucuggcguaaacucug

SEQ ID NO: 2270898 - RNA, 19 nt, Artificial Sequence
  Description of Artificial Sequence: Synthetic oligonucleotide
  Sense strand starting at position 1169 of SEQ ID NO: 1884507
gaguuuacgccagagaaca

SEQ ID NO: 2270899 - RNA, 19 nt, Artificial Sequence
  Description of Artificial Sequence: Synthetic oligonucleotide
  Antisense strand to SEQ ID NO: 2270898
uguucucuggcguaaacuc

SEQ ID NO: 2270900 - RNA, 19 nt, Artificial Sequence
  Description of Artificial Sequence: Synthetic oligonucleotide
  Sense strand starting at position 1235 of SEQ ID NO: 1884507
uuccuuauuccuggaggaa

SEQ ID NO: 2270901 - RNA, 19 nt, Artificial Sequence
  Description of Artificial Sequence: Synthetic oligonucleotide
  Antisense strand to SEQ ID NO: 2270900
uuccuccaggaauaaggaa

SEQ ID NO: 2270902 - RNA, 19 nt, Artificial Sequence
  Description of Artificial Sequence: Synthetic oligonucleotide
  Sense strand starting at position 1408 of SEQ ID NO: 1884507
aaagacuggugccuggaaa

SEQ ID NO: 2270903 - RNA, 19 nt, Artificial Sequence
  Description of Artificial Sequence: Synthetic oligonucleotide
  Antisense strand to SEQ ID NO: 2270902
uuuccaggcaccagucuuu

SEQ ID NO: 2270904 - RNA, 19 nt, Artificial Sequence
  Description of Artificial Sequence: Synthetic oligonucleotide
  Sense strand starting at position 1436 of SEQ ID NO: 1884507
agacacuugcuuuaaguuu

SEQ ID NO: 2270905 - RNA, 19 nt, Artificial Sequence
  Description of Artificial Sequence: Synthetic oligonucleotide
  Antisense strand to SEQ ID NO: 2270904
aaacuuaaagcaagugucu

SEQ ID NO: 2270906 - RNA, 19 nt, Artificial Sequence
  Description of Artificial Sequence: Synthetic oligonucleotide
  Sense strand starting at position 1614 of SEQ ID NO: 1884507
aagguauaaguggguccaa

SEQ ID NO: 2270907 - RNA, 19 nt, Artificial Sequence
  Description of Artificial Sequence: Synthetic oligonucleotide
  Antisense strand to SEQ ID NO: 2270906
uuggacccacuuauaccuu

SEQ ID NO: 2270908 - RNA, 19 nt, Artificial Sequence
  Description of Artificial Sequence: Synthetic oligonucleotide
  Sense strand starting at position 1662 of SEQ ID NO: 1884507
uauuaauauuagucuggga

SEQ ID NO: 2270909 - RNA, 19 nt, Artificial Sequence
  Description of Artificial Sequence: Synthetic oligonucleotide
  Antisense strand to SEQ ID NO: 2270908
ucccagacuaauauuaaua

SEQ ID NO: 2270910 - RNA, 19 nt, Artificial Sequence
  Description of Artificial Sequence: Synthetic oligonucleotide
  Sense strand starting at position 1664 of SEQ ID NO: 1884507
uuaauauuagucugggauu

SEQ ID NO: 2270911 - RNA, 19 nt, Artificial Sequence
  Description of Artificial Sequence: Synthetic oligonucleotide
  Antisense strand to SEQ ID NO: 2270910
aaucccagacuaauauuaa

SEQ ID NO: 2270912 - RNA, 19 nt, Artificial Sequence
  Description of Artificial Sequence: Synthetic oligonucleotide
  Sense strand starting at position 1760 of SEQ ID NO: 1884507
acuucuaugcacuggagaa

SEQ ID NO: 2270913 - RNA, 19 nt, Artificial Sequence
  Description of Artificial Sequence: Synthetic oligonucleotide
  Antisense strand to SEQ ID NO: 2270912
uucuccagugcauagaagu

SEQ ID NO: 2270914 - RNA, 19 nt, Artificial Sequence
  Description of Artificial Sequence: Synthetic oligonucleotide
  Sense strand starting at position 1761 of SEQ ID NO: 1884507
cuucuaugcacuggagaag

SEQ ID NO: 2270915 - RNA, 19 nt, Artificial Sequence
  Description of Artificial Sequence: Synthetic oligonucleotide
  Antisense strand to SEQ ID NO: 2270914
cuucuccagugcauagaag

SEQ ID NO: 2270916 - RNA, 19 nt, Artificial Sequence
  Description of Artificial Sequence: Synthetic oligonucleotide
  Sense strand starting at position 1990 of SEQ ID NO: 1884507
gcacuuacccaaggugaaa

SEQ ID NO: 2270917 - RNA, 19 nt, Artificial Sequence
  Description of Artificial Sequence: Synthetic oligonucleotide
  Antisense strand to SEQ ID NO: 2270916
uuucaccuuggguaagugc

SEQ ID NO: 2270918 - RNA, 19 nt, Artificial Sequence
  Description of Artificial Sequence: Synthetic oligonucleotide
  Sense strand starting at position 2058 of SEQ ID NO: 1884507
agacucuauuaacugugaa

SEQ ID NO: 2270919 - RNA, 19 nt, Artificial Sequence
  Description of Artificial Sequence: Synthetic oligonucleotide
  Antisense strand to SEQ ID NO: 2270918
uucacaguuaauagagucu

SEQ ID NO: 2270920 - RNA, 19 nt, Artificial Sequence
  Description of Artificial Sequence: Synthetic oligonucleotide
  Sense strand starting at position 2348 of SEQ ID NO: 1884507
ucuugauaucucuggauac

SEQ ID NO: 2270921 - RNA, 19 nt, Artificial Sequence
  Description of Artificial Sequence: Synthetic oligonucleotide
  Antisense strand to SEQ ID NO: 2270920
guauccagagauaucaaga

SEQ ID NO: 2270922 - RNA, 19 nt, Artificial Sequence
  Description of Artificial Sequence: Synthetic oligonucleotide
  Sense strand starting at position 2495 of SEQ ID NO: 1884507
uauccucugguaggugaaa

SEQ ID NO: 2270923 - RNA, 19 nt, Artificial Sequence
  Description of Artificial Sequence: Synthetic oligonucleotide
  Antisense strand to SEQ ID NO: 2270922
uuucaccuaccagaggaua

SEQ ID NO: 2270924 - RNA, 19 nt, Artificial Sequence
  Description of Artificial Sequence: Synthetic oligonucleotide
  Sense strand starting at position 3504 of SEQ ID NO: 1884507
cauguuaggucauugggaa

SEQ ID NO: 2270925 - RNA, 19 nt, Artificial Sequence
  Description of Artificial Sequence: Synthetic oligonucleotide
  Antisense strand to SEQ ID NO: 2270924
uucccaaugaccuaacaug

SEQ ID NO: 2270926 - RNA, 19 nt, Artificial Sequence
  Description of Artificial Sequence: Synthetic oligonucleotide
  Sense strand starting at position 3505 of SEQ ID NO: 1884507
auguuaggucauugggaag

SEQ ID NO: 2270927 - RNA, 19 nt, Artificial Sequence
  Description of Artificial Sequence: Synthetic oligonucleotide
  Antisense strand to SEQ ID NO: 2270926
cuucccaaugaccuaacau

SEQ ID NO: 2270928 - RNA, 19 nt, Artificial Sequence
  Description of Artificial Sequence: Synthetic oligonucleotide
  Sense strand starting at position 3587 of SEQ ID NO: 1884507
agacauauugcauauguac

SEQ ID NO: 2270929 - RNA, 19 nt, Artificial Sequence
  Description of Artificial Sequence: Synthetic oligonucleotide
  Antisense strand to SEQ ID NO: 2270928
guacauaugcaauaugucu

SEQ ID NO: 2270930 - RNA, 19 nt, Artificial Sequence
  Description of Artificial Sequence: Synthetic oligonucleotide
  Sense strand starting at position 3596 of SEQ ID NO: 1884507
gcauauguaccuuaagaaa

SEQ ID NO: 2270931 - RNA, 19 nt, Artificial Sequence
  Description of Artificial Sequence: Synthetic oligonucleotide
  Antisense strand to SEQ ID NO: 2270930
uuucuuaagguacauaugc

SEQ ID NO: 2270932 - RNA, 19 nt, Artificial Sequence
  Description of Artificial Sequence: Synthetic oligonucleotide
  Sense strand starting at position 3677 of SEQ ID NO: 1884507
ugaugcauccuugaacaua

SEQ ID NO: 2270933 - RNA, 19 nt, Artificial Sequence
  Description of Artificial Sequence: Synthetic oligonucleotide
  Antisense strand to SEQ ID NO: 2270932
uauguucaaggaugcauca

SEQ ID NO: 2270934 - RNA, 19 nt, Artificial Sequence
  Description of Artificial Sequence: Synthetic oligonucleotide
  Sense strand starting at position 3951 of SEQ ID NO: 1884507
uucuuaggaaguuguagau

SEQ ID NO: 2270935 - RNA, 19 nt, Artificial Sequence
  Description of Artificial Sequence: Synthetic oligonucleotide
  Antisense strand to SEQ ID NO: 2270934
aucuacaacuuccuaagaa

SEQ ID NO: 2270936 - RNA, 19 nt, Artificial Sequence
  Description of Artificial Sequence: Synthetic oligonucleotide
  Sense strand starting at position 3957 of SEQ ID NO: 1884507
ggaaguuguagaugagcua

SEQ ID NO: 2270937 - RNA, 19 nt, Artificial Sequence
  Description of Artificial Sequence: Synthetic oligonucleotide
  Antisense strand to SEQ ID NO: 2270936
uagcucaucuacaacuucc

SEQ ID NO: 2270938 - RNA, 19 nt, Artificial Sequence
  Description of Artificial Sequence: Synthetic oligonucleotide
  Sense strand starting at position 3958 of SEQ ID NO: 1884507
gaaguuguagaugagcuau

SEQ ID NO: 2270939 - RNA, 19 nt, Artificial Sequence
  Description of Artificial Sequence: Synthetic oligonucleotide
  Antisense strand to SEQ ID NO: 2270938
auagcucaucuacaacuuc

SEQ ID NO: 2270940 - RNA, 19 nt, Artificial Sequence
  Description of Artificial Sequence: Synthetic oligonucleotide
  Sense strand starting at position 3964 of SEQ ID NO: 1884507
guagaugagcuauaagcca

SEQ ID NO: 2270941 - RNA, 19 nt, Artificial Sequence
  Description of Artificial Sequence: Synthetic oligonucleotide
  Antisense strand to SEQ ID NO: 2270940
uggcuuauagcucaucuac

SEQ ID NO: 2270942 - RNA, 19 nt, Artificial Sequence
  Description of Artificial Sequence: Synthetic oligonucleotide
  Sense strand starting at position 112 of SEQ ID NO: 1884508
uguauaugucucugucacu

SEQ ID NO: 2270943 - RNA, 19 nt, Artificial Sequence
  Description of Artificial Sequence: Synthetic oligonucleotide
  Antisense strand to SEQ ID NO: 2270942
agugacagagacauauaca

SEQ ID NO: 2270944 - RNA, 19 nt, Artificial Sequence
  Description of Artificial Sequence: Synthetic oligonucleotide
  Sense strand starting at position 171 of SEQ ID NO: 1884508
gggaaacuuucuuuccacu

SEQ ID NO: 2270945 - RNA, 19 nt, Artificial Sequence
  Description of Artificial Sequence: Synthetic oligonucleotide
  Antisense strand to SEQ ID NO: 2270944
aguggaaagaaaguuuccc

SEQ ID NO: 2270946 - RNA, 19 nt, Artificial Sequence
  Description of Artificial Sequence: Synthetic oligonucleotide
  Sense strand starting at position 243 of SEQ ID NO: 1884508
aguggcucauccuucuaau

SEQ ID NO: 2270947 - RNA, 19 nt, Artificial Sequence
  Description of Artificial Sequence: Synthetic oligonucleotide
  Antisense strand to SEQ ID NO: 2270946
auuagaaggaugagccacu

SEQ ID NO: 2270948 - RNA, 19 nt, Artificial Sequence
  Description of Artificial Sequence: Synthetic oligonucleotide
  Sense strand starting at position 410 of SEQ ID NO: 1884508
agacuaggguggcagaauu

SEQ ID NO: 2270949 - RNA, 19 nt, Artificial Sequence
  Description of Artificial Sequence: Synthetic oligonucleotide
  Antisense strand to SEQ ID NO: 2270948
aauucugccacccuagucu

SEQ ID NO: 2270950 - RNA, 19 nt, Artificial Sequence
  Description of Artificial Sequence: Synthetic oligonucleotide
  Sense strand starting at position 904 of SEQ ID NO: 1884508
ugaauuaaaugccugcuau

SEQ ID NO: 2270951 - RNA, 19 nt, Artificial Sequence
  Description of Artificial Sequence: Synthetic oligonucleotide
  Antisense strand to SEQ ID NO: 2270950
auagcaggcauuuaauuca

SEQ ID NO: 2270952 - RNA, 19 nt, Artificial Sequence
  Description of Artificial Sequence: Synthetic oligonucleotide
  Sense strand starting at position 972 of SEQ ID NO: 1884508
cuuauaagccuucgaagac

SEQ ID NO: 2270953 - RNA, 19 nt, Artificial Sequence
  Description of Artificial Sequence: Synthetic oligonucleotide
  Antisense strand to SEQ ID NO: 2270952
gucuucgaaggcuuauaag

SEQ ID NO: 2270954 - RNA, 19 nt, Artificial Sequence
  Description of Artificial Sequence: Synthetic oligonucleotide
  Sense strand starting at position 982 of SEQ ID NO: 1884508
uucgaagacuuucguauuu

SEQ ID NO: 2270955 - RNA, 19 nt, Artificial Sequence
  Description of Artificial Sequence: Synthetic oligonucleotide
  Antisense strand to SEQ ID NO: 2270954
aaauacgaaagucuucgaa

SEQ ID NO: 2270956 - RNA, 19 nt, Artificial Sequence
  Description of Artificial Sequence: Synthetic oligonucleotide
  Sense strand starting at position 984 of SEQ ID NO: 1884508
cgaagacuuucguauuuag

SEQ ID NO: 2270957 - RNA, 19 nt, Artificial Sequence
  Description of Artificial Sequence: Synthetic oligonucleotide
  Antisense strand to SEQ ID NO: 2270956
cuaaauacgaaagucuucg

SEQ ID NO: 2270958 - RNA, 19 nt, Artificial Sequence
  Description of Artificial Sequence: Synthetic oligonucleotide
  Sense strand starting at position 991 of SEQ ID NO: 1884508
uuucguauuuaguggagga

SEQ ID NO: 2270959 - RNA, 19 nt, Artificial Sequence
  Description of Artificial Sequence: Synthetic oligonucleotide
  Antisense strand to SEQ ID NO: 2270958
uccuccacuaaauacgaaa

SEQ ID NO: 2270960 - RNA, 19 nt, Artificial Sequence
  Description of Artificial Sequence: Synthetic oligonucleotide
  Sense strand starting at position 1016 of SEQ ID NO: 1884508
cagccucgcccuuaauagu

SEQ ID NO: 2270961 - RNA, 19 nt, Artificial Sequence
  Description of Artificial Sequence: Synthetic oligonucleotide
  Antisense strand to SEQ ID NO: 2270960
acuauuaagggcgaggcug

SEQ ID NO: 2270962 - RNA, 19 nt, Artificial Sequence
  Description of Artificial Sequence: Synthetic oligonucleotide
  Sense strand starting at position 1022 of SEQ ID NO: 1884508
cgcccuuaauagucagaau

SEQ ID NO: 2270963 - RNA, 19 nt, Artificial Sequence
  Description of Artificial Sequence: Synthetic oligonucleotide
  Antisense strand to SEQ ID NO: 2270962
auucugacuauuaagggcg

SEQ ID NO: 2270964 - RNA, 19 nt, Artificial Sequence
  Description of Artificial Sequence: Synthetic oligonucleotide
  Sense strand starting at position 1025 of SEQ ID NO: 1884508
ccuuaauagucagaaugca

SEQ ID NO: 2270965 - RNA, 19 nt, Artificial Sequence
  Description of Artificial Sequence: Synthetic oligonucleotide
  Antisense strand to SEQ ID NO: 2270964
ugcauucugacuauuaagg

SEQ ID NO: 2270966 - RNA, 19 nt, Artificial Sequence
  Description of Artificial Sequence: Synthetic oligonucleotide
  Sense strand starting at position 1040 of SEQ ID NO: 1884508
ugcauaagagaauguaacu

SEQ ID NO: 2270967 - RNA, 19 nt, Artificial Sequence
  Description of Artificial Sequence: Synthetic oligonucleotide
  Antisense strand to SEQ ID NO: 2270966
aguuacauucucuuaugca

SEQ ID NO: 2270968 - RNA, 19 nt, Artificial Sequence
  Description of Artificial Sequence: Synthetic oligonucleotide
  Sense strand starting at position 1253 of SEQ ID NO: 1884508
uggugagucugguuaaucu

SEQ ID NO: 2270969 - RNA, 19 nt, Artificial Sequence
  Description of Artificial Sequence: Synthetic oligonucleotide
  Antisense strand to SEQ ID NO: 2270968
agauuaaccagacucacca

SEQ ID NO: 2270970 - RNA, 19 nt, Artificial Sequence
  Description of Artificial Sequence: Synthetic oligonucleotide
  Sense strand starting at position 1261 of SEQ ID NO: 1884508
cugguuaaucuuuagccuu

SEQ ID NO: 2270971 - RNA, 19 nt, Artificial Sequence
  Description of Artificial Sequence: Synthetic oligonucleotide
  Antisense strand to SEQ ID NO: 2270970
aaggcuaaagauuaaccag

SEQ ID NO: 2270972 - RNA, 19 nt, Artificial Sequence
  Description of Artificial Sequence: Synthetic oligonucleotide
  Sense strand starting at position 1263 of SEQ ID NO: 1884508
gguuaaucuuuagccuuaa

SEQ ID NO: 2270973 - RNA, 19 nt, Artificial Sequence
  Description of Artificial Sequence: Synthetic oligonucleotide
  Antisense strand to SEQ ID NO: 2270972
uuaaggcuaaagauuaacc

SEQ ID NO: 2270974 - RNA, 19 nt, Artificial Sequence
  Description of Artificial Sequence: Synthetic oligonucleotide
  Sense strand starting at position 1282 of SEQ ID NO: 1884508
augccaggcuaagaaauuu

SEQ ID NO: 2270975 - RNA, 19 nt, Artificial Sequence
  Description of Artificial Sequence: Synthetic oligonucleotide
  Antisense strand to SEQ ID NO: 2270974
aaauuucuuagccuggcau

SEQ ID NO: 2270976 - RNA, 19 nt, Artificial Sequence
  Description of Artificial Sequence: Synthetic oligonucleotide
  Sense strand starting at position 1310 of SEQ ID NO: 1884508
aggguaugcuggcugacau

SEQ ID NO: 2270977 - RNA, 19 nt, Artificial Sequence
  Description of Artificial Sequence: Synthetic oligonucleotide
  Antisense strand to SEQ ID NO: 2270976
augucagccagcauacccu

SEQ ID NO: 2270978 - RNA, 19 nt, Artificial Sequence
  Description of Artificial Sequence: Synthetic oligonucleotide
  Sense strand starting at position 1311 of SEQ ID NO: 1884508
ggguaugcuggcugacauu

SEQ ID NO: 2270979 - RNA, 19 nt, Artificial Sequence
  Description of Artificial Sequence: Synthetic oligonucleotide
  Antisense strand to SEQ ID NO: 2270978
aaugucagccagcauaccc

SEQ ID NO: 2270980 - RNA, 19 nt, Artificial Sequence
  Description of Artificial Sequence: Synthetic oligonucleotide
  Sense strand starting at position 2049 of SEQ ID NO: 1884508
guaagucaugcuuacacca

SEQ ID NO: 2270981 - RNA, 19 nt, Artificial Sequence
  Description of Artificial Sequence: Synthetic oligonucleotide
  Antisense strand to SEQ ID NO: 2270980
ugguguaagcaugacuuac

SEQ ID NO: 2270982 - RNA, 19 nt, Artificial Sequence
  Description of Artificial Sequence: Synthetic oligonucleotide
  Sense strand starting at position 2287 of SEQ ID NO: 1884508
acugauggcuuuccugagu

SEQ ID NO: 2270983 - RNA, 19 nt, Artificial Sequence
  Description of Artificial Sequence: Synthetic oligonucleotide
  Antisense strand to SEQ ID NO: 2270982
acucaggaaagccaucagu

SEQ ID NO: 2270984 - RNA, 19 nt, Artificial Sequence
  Description of Artificial Sequence: Synthetic oligonucleotide
  Sense strand starting at position 2337 of SEQ ID NO: 1884508
gucucuguuccugagauac

SEQ ID NO: 2270985 - RNA, 19 nt, Artificial Sequence
  Description of Artificial Sequence: Synthetic oligonucleotide
  Antisense strand to SEQ ID NO: 2270984
guaucucaggaacagagac

SEQ ID NO: 2270986 - RNA, 19 nt, Artificial Sequence
  Description of Artificial Sequence: Synthetic oligonucleotide
  Sense strand starting at position 2339 of SEQ ID NO: 1884508
cucuguuccugagauacca

SEQ ID NO: 2270987 - RNA, 19 nt, Artificial Sequence
  Description of Artificial Sequence: Synthetic oligonucleotide
  Antisense strand to SEQ ID NO: 2270986
ugguaucucaggaacagag

SEQ ID NO: 2270988 - RNA, 19 nt, Artificial Sequence
  Description of Artificial Sequence: Synthetic oligonucleotide
  Sense strand starting at position 2392 of SEQ ID NO: 1884508
ucucuuuggcaugagagca

SEQ ID NO: 2270989 - RNA, 19 nt, Artificial Sequence
  Description of Artificial Sequence: Synthetic oligonucleotide
  Antisense strand to SEQ ID NO: 2270988
ugcucucaugccaaagaga

SEQ ID NO: 2270990 - RNA, 19 nt, Artificial Sequence
  Description of Artificial Sequence: Synthetic oligonucleotide
  Sense strand starting at position 2412 of SEQ ID NO: 1884508
gcaccugcuccugagaaac

SEQ ID NO: 2270991 - RNA, 19 nt, Artificial Sequence
  Description of Artificial Sequence: Synthetic oligonucleotide
  Antisense strand to SEQ ID NO: 2270990
guuucucaggagcaggugc

SEQ ID NO: 2270992 - RNA, 19 nt, Artificial Sequence
  Description of Artificial Sequence: Synthetic oligonucleotide
  Sense strand starting at position 2461 of SEQ ID NO: 1884508
ccaucugucucucagauga

SEQ ID NO: 2270993 - RNA, 19 nt, Artificial Sequence
  Description of Artificial Sequence: Synthetic oligonucleotide
  Antisense strand to SEQ ID NO: 2270992
ucaucugagagacagaugg

SEQ ID NO: 2270994 - RNA, 19 nt, Artificial Sequence
  Description of Artificial Sequence: Synthetic oligonucleotide
  Sense strand starting at position 2463 of SEQ ID NO: 1884508
aucugucucucagaugaca

SEQ ID NO: 2270995 - RNA, 19 nt, Artificial Sequence
  Description of Artificial Sequence: Synthetic oligonucleotide
  Antisense strand to SEQ ID NO: 2270994
ugucaucugagagacagau

SEQ ID NO: 2270996 - RNA, 19 nt, Artificial Sequence
  Description of Artificial Sequence: Synthetic oligonucleotide
  Sense strand starting at position 2516 of SEQ ID NO: 1884508
cagguucuccugggugaca

SEQ ID NO: 2270997 - RNA, 19 nt, Artificial Sequence
  Description of Artificial Sequence: Synthetic oligonucleotide
  Antisense strand to SEQ ID NO: 2270996
ugucacccaggagaaccug

SEQ ID NO: 2270998 - RNA, 19 nt, Artificial Sequence
  Description of Artificial Sequence: Synthetic oligonucleotide
  Sense strand starting at position 2606 of SEQ ID NO: 1884508
acaagaugcugccugcauu

SEQ ID NO: 2270999 - RNA, 19 nt, Artificial Sequence
  Description of Artificial Sequence: Synthetic oligonucleotide
  Antisense strand to SEQ ID NO: 2270998
aaugcaggcagcaucuugu

SEQ ID NO: 2271000 - RNA, 19 nt, Artificial Sequence
  Description of Artificial Sequence: Synthetic oligonucleotide
  Sense strand starting at position 2939 of SEQ ID NO: 1884508
agcagaaacugucuguugu

SEQ ID NO: 2271001 - RNA, 19 nt, Artificial Sequence
  Description of Artificial Sequence: Synthetic oligonucleotide
  Antisense strand to SEQ ID NO: 2271000
acaacagacaguuucugcu

SEQ ID NO: 2271002 - RNA, 19 nt, Artificial Sequence
  Description of Artificial Sequence: Synthetic oligonucleotide
  Sense strand starting at position 2940 of SEQ ID NO: 1884508
gcagaaacugucuguuguc

SEQ ID NO: 2271003 - RNA, 19 nt, Artificial Sequence
  Description of Artificial Sequence: Synthetic oligonucleotide
  Antisense strand to SEQ ID NO: 2271002
gacaacagacaguuucugc

SEQ ID NO: 2271004 - RNA, 19 nt, Artificial Sequence
  Description of Artificial Sequence: Synthetic oligonucleotide
  Sense strand starting at position 2946 of SEQ ID NO: 1884508
acugucuguugucuaauca

SEQ ID NO: 2271005 - RNA, 19 nt, Artificial Sequence
  Description of Artificial Sequence: Synthetic oligonucleotide
  Antisense strand to SEQ ID NO: 2271004
ugauuagacaacagacagu

SEQ ID NO: 2271006 - RNA, 19 nt, Artificial Sequence
  Description of Artificial Sequence: Synthetic oligonucleotide
  Sense strand starting at position 3311 of SEQ ID NO: 1884508
ggcggaaugucaucucuac

SEQ ID NO: 2271007 - RNA, 19 nt, Artificial Sequence
  Description of Artificial Sequence: Synthetic oligonucleotide
  Antisense strand to SEQ ID NO: 2271006
guagagaugacauuccgcc

SEQ ID NO: 2271008 - RNA, 19 nt, Artificial Sequence
  Description of Artificial Sequence: Synthetic oligonucleotide
  Sense strand starting at position 3364 of SEQ ID NO: 1884508
gcucuugugaugcuagcua

SEQ ID NO: 2271009 - RNA, 19 nt, Artificial Sequence
  Description of Artificial Sequence: Synthetic oligonucleotide
  Antisense strand to SEQ ID NO: 2271008
uagcuagcaucacaagagc

SEQ ID NO: 2271010 - RNA, 19 nt, Artificial Sequence
  Description of Artificial Sequence: Synthetic oligonucleotide
  Sense strand starting at position 3368 of SEQ ID NO: 1884508
uugugaugcuagcuacuca

SEQ ID NO: 2271011 - RNA, 19 nt, Artificial Sequence
  Description of Artificial Sequence: Synthetic oligonucleotide
  Antisense strand to SEQ ID NO: 2271010
ugaguagcuagcaucacaa

SEQ ID NO: 2271012 - RNA, 19 nt, Artificial Sequence
  Description of Artificial Sequence: Synthetic oligonucleotide
  Sense strand starting at position 3542 of SEQ ID NO: 1884508
gcgguagugaguccagcuu

SEQ ID NO: 2271013 - RNA, 19 nt, Artificial Sequence
  Description of Artificial Sequence: Synthetic oligonucleotide
  Antisense strand to SEQ ID NO: 2271012
aagcuggacucacuaccgc

SEQ ID NO: 2271014 - RNA, 19 nt, Artificial Sequence
  Description of Artificial Sequence: Synthetic oligonucleotide
  Sense strand starting at position 3624 of SEQ ID NO: 1884508
ggaagugaucaggacugcu

SEQ ID NO: 2271015 - RNA, 19 nt, Artificial Sequence
  Description of Artificial Sequence: Synthetic oligonucleotide
  Antisense strand to SEQ ID NO: 2271014
agcaguccugaucacuucc

SEQ ID NO: 2271016 - RNA, 19 nt, Artificial Sequence
  Description of Artificial Sequence: Synthetic oligonucleotide
  Sense strand starting at position 3655 of SEQ ID NO: 1884508
gagaaaugccuauggcgac

SEQ ID NO: 2271017 - RNA, 19 nt, Artificial Sequence
  Description of Artificial Sequence: Synthetic oligonucleotide
  Antisense strand to SEQ ID NO: 2271016
gucgccauaggcauuucuc

SEQ ID NO: 2271018 - RNA, 19 nt, Artificial Sequence
  Description of Artificial Sequence: Synthetic oligonucleotide
  Sense strand starting at position 3744 of SEQ ID NO: 1884508
acugguggguguuuguuaa

SEQ ID NO: 2271019 - RNA, 19 nt, Artificial Sequence
  Description of Artificial Sequence: Synthetic oligonucleotide
  Antisense strand to SEQ ID NO: 2271018
uuaacaaacacccaccagu

SEQ ID NO: 2271020 - RNA, 19 nt, Artificial Sequence
  Description of Artificial Sequence: Synthetic oligonucleotide
  Sense strand starting at position 3748 of SEQ ID NO: 1884508
guggguguuuguuaaauuu

SEQ ID NO: 2271021 - RNA, 19 nt, Artificial Sequence
  Description of Artificial Sequence: Synthetic oligonucleotide
  Antisense strand to SEQ ID NO: 2271020
aaauuuaacaaacacccac

SEQ ID NO: 2271022 - RNA, 19 nt, Artificial Sequence
  Description of Artificial Sequence: Synthetic oligonucleotide
  Sense strand starting at position 381 of SEQ ID NO: 1884509
gaaccuuaagugcauguua

SEQ ID NO: 2271023 - RNA, 19 nt, Artificial Sequence
  Description of Artificial Sequence: Synthetic oligonucleotide
  Antisense strand to SEQ ID NO: 2271022
uaacaugcacuuaagguuc

SEQ ID NO: 2271024 - RNA, 19 nt, Artificial Sequence
  Description of Artificial Sequence: Synthetic oligonucleotide
  Sense strand starting at position 435 of SEQ ID NO: 1884509
auuccaacuguaugagauu

SEQ ID NO: 2271025 - RNA, 19 nt, Artificial Sequence
  Description of Artificial Sequence: Synthetic oligonucleotide
  Antisense strand to SEQ ID NO: 2271024
aaucucauacaguuggaau

SEQ ID NO: 2271026 - RNA, 19 nt, Artificial Sequence
  Description of Artificial Sequence: Synthetic oligonucleotide
  Sense strand starting at position 971 of SEQ ID NO: 1884509
aaacgcauacuuugaguga

SEQ ID NO: 2271027 - RNA, 19 nt, Artificial Sequence
  Description of Artificial Sequence: Synthetic oligonucleotide
  Antisense strand to SEQ ID NO: 2271026
ucacucaaaguaugcguuu

SEQ ID NO: 2271028 - RNA, 19 nt, Artificial Sequence
  Description of Artificial Sequence: Synthetic oligonucleotide
  Sense strand starting at position 975 of SEQ ID NO: 1884509
gcauacuuugagugauaau

SEQ ID NO: 2271029 - RNA, 19 nt, Artificial Sequence
  Description of Artificial Sequence: Synthetic oligonucleotide
  Antisense strand to SEQ ID NO: 2271028
auuaucacucaaaguaugc

SEQ ID NO: 2271030 - RNA, 19 nt, Artificial Sequence
  Description of Artificial Sequence: Synthetic oligonucleotide
  Sense strand starting at position 1195 of SEQ ID NO: 1884509
ggacaauacuagucauggu

SEQ ID NO: 2271031 - RNA, 19 nt, Artificial Sequence
  Description of Artificial Sequence: Synthetic oligonucleotide
  Antisense strand to SEQ ID NO: 2271030
accaugacuaguauugucc

SEQ ID NO: 2271032 - RNA, 19 nt, Artificial Sequence
  Description of Artificial Sequence: Synthetic oligonucleotide
  Sense strand starting at position 1199 of SEQ ID NO: 1884509
aauacuagucaugguaguu

SEQ ID NO: 2271033 - RNA, 19 nt, Artificial Sequence
  Description of Artificial Sequence: Synthetic oligonucleotide
  Antisense strand to SEQ ID NO: 2271032
aacuaccaugacuaguauu

SEQ ID NO: 2271034 - RNA, 19 nt, Artificial Sequence
  Description of Artificial Sequence: Synthetic oligonucleotide
  Sense strand starting at position 1328 of SEQ ID NO: 1884509
cagugauccuggcuaacua

SEQ ID NO: 2271035 - RNA, 19 nt, Artificial Sequence
  Description of Artificial Sequence: Synthetic oligonucleotide
  Antisense strand to SEQ ID NO: 2271034
uaguuagccaggaucacug

SEQ ID NO: 2271036 - RNA, 19 nt, Artificial Sequence
  Description of Artificial Sequence: Synthetic oligonucleotide
  Sense strand starting at position 1329 of SEQ ID NO: 1884509
agugauccuggcuaacuau

SEQ ID NO: 2271037 - RNA, 19 nt, Artificial Sequence
  Description of Artificial Sequence: Synthetic oligonucleotide
  Antisense strand to SEQ ID NO: 2271036
auaguuagccaggaucacu

SEQ ID NO: 2271038 - RNA, 19 nt, Artificial Sequence
  Description of Artificial Sequence: Synthetic oligonucleotide
  Sense strand starting at position 1376 of SEQ ID NO: 1884509
ugccaagucucauuccaga

SEQ ID NO: 2271039 - RNA, 19 nt, Artificial Sequence
  Description of Artificial Sequence: Synthetic oligonucleotide
  Antisense strand to SEQ ID NO: 2271038
ucuggaaugagacuuggca

SEQ ID NO: 2271040 - RNA, 19 nt, Artificial Sequence
  Description of Artificial Sequence: Synthetic oligonucleotide
  Sense strand starting at position 1424 of SEQ ID NO: 1884509
cccagaaugugucuaggga

SEQ ID NO: 2271041 - RNA, 19 nt, Artificial Sequence
  Description of Artificial Sequence: Synthetic oligonucleotide
  Antisense strand to SEQ ID NO: 2271040
ucccuagacacauucuggg

SEQ ID NO: 2271042 - RNA, 19 nt, Artificial Sequence
  Description of Artificial Sequence: Synthetic oligonucleotide
  Sense strand starting at position 1425 of SEQ ID NO: 1884509
ccagaaugugucuagggau

SEQ ID NO: 2271043 - RNA, 19 nt, Artificial Sequence
  Description of Artificial Sequence: Synthetic oligonucleotide
  Antisense strand to SEQ ID NO: 2271042
aucccuagacacauucugg

SEQ ID NO: 2271044 - RNA, 19 nt, Artificial Sequence
  Description of Artificial Sequence: Synthetic oligonucleotide
  Sense strand starting at position 1603 of SEQ ID NO: 1884509
uaagauuuguucuaggaga

SEQ ID NO: 2271045 - RNA, 19 nt, Artificial Sequence
  Description of Artificial Sequence: Synthetic oligonucleotide
  Antisense strand to SEQ ID NO: 2271044
ucuccuagaacaaaucuua

SEQ ID NO: 2271046 - RNA, 19 nt, Artificial Sequence
  Description of Artificial Sequence: Synthetic oligonucleotide
  Sense strand starting at position 1670 of SEQ ID NO: 1884509
ugggaaucauuagcaaauc

SEQ ID NO: 2271047 - RNA, 19 nt, Artificial Sequence
  Description of Artificial Sequence: Synthetic oligonucleotide
  Antisense strand to SEQ ID NO: 2271046
gauuugcuaaugauuccca

SEQ ID NO: 2271048 - RNA, 19 nt, Artificial Sequence
  Description of Artificial Sequence: Synthetic oligonucleotide
  Sense strand starting at position 1773 of SEQ ID NO: 1884509
ucuguuuaacuugagacuu

SEQ ID NO: 2271049 - RNA, 19 nt, Artificial Sequence
  Description of Artificial Sequence: Synthetic oligonucleotide
  Antisense strand to SEQ ID NO: 2271048
aagucucaaguuaaacaga

SEQ ID NO: 2271050 - RNA, 19 nt, Artificial Sequence
  Description of Artificial Sequence: Synthetic oligonucleotide
  Sense strand starting at position 1866 of SEQ ID NO: 1884509
acucaucauccuggagaca

SEQ ID NO: 2271051 - RNA, 19 nt, Artificial Sequence
  Description of Artificial Sequence: Synthetic oligonucleotide
  Antisense strand to SEQ ID NO: 2271050
ugucuccaggaugaugagu

SEQ ID NO: 2271052 - RNA, 19 nt, Artificial Sequence
  Description of Artificial Sequence: Synthetic oligonucleotide
  Sense strand starting at position 2141 of SEQ ID NO: 1884509
agaggugaugacugcacaa

SEQ ID NO: 2271053 - RNA, 19 nt, Artificial Sequence
  Description of Artificial Sequence: Synthetic oligonucleotide
  Antisense strand to SEQ ID NO: 2271052
uugugcagucaucaccucu

SEQ ID NO: 2271054 - RNA, 19 nt, Artificial Sequence
  Description of Artificial Sequence: Synthetic oligonucleotide
  Sense strand starting at position 2143 of SEQ ID NO: 1884509
aggugaugacugcacaacu

SEQ ID NO: 2271055 - RNA, 19 nt, Artificial Sequence
  Description of Artificial Sequence: Synthetic oligonucleotide
  Antisense strand to SEQ ID NO: 2271054
aguugugcagucaucaccu

SEQ ID NO: 2271056 - RNA, 19 nt, Artificial Sequence
  Description of Artificial Sequence: Synthetic oligonucleotide
  Sense strand starting at position 2197 of SEQ ID NO: 1884509
auagguggccuguauggua

SEQ ID NO: 2271057 - RNA, 19 nt, Artificial Sequence
  Description of Artificial Sequence: Synthetic oligonucleotide
  Antisense strand to SEQ ID NO: 2271056
uaccauacaggccaccuau

SEQ ID NO: 2271058 - RNA, 19 nt, Artificial Sequence
  Description of Artificial Sequence: Synthetic oligonucleotide
  Sense strand starting at position 2206 of SEQ ID NO: 1884509
cuguaugguaggugaauca

SEQ ID NO: 2271059 - RNA, 19 nt, Artificial Sequence
  Description of Artificial Sequence: Synthetic oligonucleotide
  Antisense strand to SEQ ID NO: 2271058
ugauucaccuaccauacag

SEQ ID NO: 2271060 - RNA, 19 nt, Artificial Sequence
  Description of Artificial Sequence: Synthetic oligonucleotide
  Sense strand starting at position 2271 of SEQ ID NO: 1884509
cuaucaauuugugaaguaa

SEQ ID NO: 2271061 - RNA, 19 nt, Artificial Sequence
  Description of Artificial Sequence: Synthetic oligonucleotide
  Antisense strand to SEQ ID NO: 2271060
uuacuucacaaauugauag

SEQ ID NO: 2271062 - RNA, 19 nt, Artificial Sequence
  Description of Artificial Sequence: Synthetic oligonucleotide
  Sense strand starting at position 2335 of SEQ ID NO: 1884509
uuaagaguauuggugaaca

SEQ ID NO: 2271063 - RNA, 19 nt, Artificial Sequence
  Description of Artificial Sequence: Synthetic oligonucleotide
  Antisense strand to SEQ ID NO: 2271062
uguucaccaauacucuuaa

SEQ ID NO: 2271064 - RNA, 19 nt, Artificial Sequence
  Description of Artificial Sequence: Synthetic oligonucleotide
  Sense strand starting at position 2340 of SEQ ID NO: 1884509
aguauuggugaacaucuuu

SEQ ID NO: 2271065 - RNA, 19 nt, Artificial Sequence
  Description of Artificial Sequence: Synthetic oligonucleotide
  Antisense strand to SEQ ID NO: 2271064
aaagauguucaccaauacu

SEQ ID NO: 2271066 - RNA, 19 nt, Artificial Sequence
  Description of Artificial Sequence: Synthetic oligonucleotide
  Sense strand starting at position 2618 of SEQ ID NO: 1884509
uggauuaucugagcucucu

SEQ ID NO: 2271067 - RNA, 19 nt, Artificial Sequence
  Description of Artificial Sequence: Synthetic oligonucleotide
  Antisense strand to SEQ ID NO: 2271066
agagagcucagauaaucca

SEQ ID NO: 2271068 - RNA, 19 nt, Artificial Sequence
  Description of Artificial Sequence: Synthetic oligonucleotide
  Sense strand starting at position 2626 of SEQ ID NO: 1884509
cugagcucucuguaaauaa

SEQ ID NO: 2271069 - RNA, 19 nt, Artificial Sequence
  Description of Artificial Sequence: Synthetic oligonucleotide
  Antisense strand to SEQ ID NO: 2271068
uuauuuacagagagcucag

SEQ ID NO: 2271070 - RNA, 19 nt, Artificial Sequence
  Description of Artificial Sequence: Synthetic oligonucleotide
  Sense strand starting at position 2649 of SEQ ID NO: 1884509
acuggcuucuguuuacaaa

SEQ ID NO: 2271071 - RNA, 19 nt, Artificial Sequence
  Description of Artificial Sequence: Synthetic oligonucleotide
  Antisense strand to SEQ ID NO: 2271070
uuuguaaacagaagccagu

SEQ ID NO: 2271072 - RNA, 19 nt, Artificial Sequence
  Description of Artificial Sequence: Synthetic oligonucleotide
  Sense strand starting at position 2696 of SEQ ID NO: 1884509
uucccuuucugaguauauc

SEQ ID NO: 2271073 - RNA, 19 nt, Artificial Sequence
  Description of Artificial Sequence: Synthetic oligonucleotide
  Antisense strand to SEQ ID NO: 2271072
gauauacucagaaagggaa

SEQ ID NO: 2271074 - RNA, 19 nt, Artificial Sequence
  Description of Artificial Sequence: Synthetic oligonucleotide
  Sense strand starting at position 2697 of SEQ ID NO: 1884509
ucccuuucugaguauaucu

SEQ ID NO: 2271075 - RNA, 19 nt, Artificial Sequence
  Description of Artificial Sequence: Synthetic oligonucleotide
  Antisense strand to SEQ ID NO: 2271074
agauauacucagaaaggga

SEQ ID NO: 2271076 - RNA, 19 nt, Artificial Sequence
  Description of Artificial Sequence: Synthetic oligonucleotide
  Sense strand starting at position 2705 of SEQ ID NO: 1884509
ugaguauaucugcauggca

SEQ ID NO: 2271077 - RNA, 19 nt, Artificial Sequence
  Description of Artificial Sequence: Synthetic oligonucleotide
  Antisense strand to SEQ ID NO: 2271076
ugccaugcagauauacuca

SEQ ID NO: 2271078 - RNA, 19 nt, Artificial Sequence
  Description of Artificial Sequence: Synthetic oligonucleotide
  Sense strand starting at position 2717 of SEQ ID NO: 1884509
cauggcauccuaggaagaa

SEQ ID NO: 2271079 - RNA, 19 nt, Artificial Sequence
  Description of Artificial Sequence: Synthetic oligonucleotide
  Antisense strand to SEQ ID NO: 2271078
uucuuccuaggaugccaug

SEQ ID NO: 2271080 - RNA, 19 nt, Artificial Sequence
  Description of Artificial Sequence: Synthetic oligonucleotide
  Sense strand starting at position 2798 of SEQ ID NO: 1884509
ggguauaacuaaguacuca

SEQ ID NO: 2271081 - RNA, 19 nt, Artificial Sequence
  Description of Artificial Sequence: Synthetic oligonucleotide
  Antisense strand to SEQ ID NO: 2271080
ugaguacuuaguuauaccc

SEQ ID NO: 2271082 - RNA, 19 nt, Artificial Sequence
  Description of Artificial Sequence: Synthetic oligonucleotide
  Sense strand starting at position 2802 of SEQ ID NO: 1884509
auaacuaaguacucaguca

SEQ ID NO: 2271083 - RNA, 19 nt, Artificial Sequence
  Description of Artificial Sequence: Synthetic oligonucleotide
  Antisense strand to SEQ ID NO: 2271082
ugacugaguacuuaguuau

SEQ ID NO: 2271084 - RNA, 19 nt, Artificial Sequence
  Description of Artificial Sequence: Synthetic oligonucleotide
  Sense strand starting at position 2915 of SEQ ID NO: 1884509
agacuucuuccaugcuuag

SEQ ID NO: 2271085 - RNA, 19 nt, Artificial Sequence
  Description of Artificial Sequence: Synthetic oligonucleotide
  Antisense strand to SEQ ID NO: 2271084
cuaagcauggaagaagucu

SEQ ID NO: 2271086 - RNA, 19 nt, Artificial Sequence
  Description of Artificial Sequence: Synthetic oligonucleotide
  Sense strand starting at position 2961 of SEQ ID NO: 1884509
auuuaugauucugacauug

SEQ ID NO: 2271087 - RNA, 19 nt, Artificial Sequence
  Description of Artificial Sequence: Synthetic oligonucleotide
  Antisense strand to SEQ ID NO: 2271086
caaugucagaaucauaaau

SEQ ID NO: 2271088 - RNA, 19 nt, Artificial Sequence
  Description of Artificial Sequence: Synthetic oligonucleotide
  Sense strand starting at position 3021 of SEQ ID NO: 1884509
auuauagcuuuacugagau

SEQ ID NO: 2271089 - RNA, 19 nt, Artificial Sequence
  Description of Artificial Sequence: Synthetic oligonucleotide
  Antisense strand to SEQ ID NO: 2271088
aucucaguaaagcuauaau

SEQ ID NO: 2271090 - RNA, 19 nt, Artificial Sequence
  Description of Artificial Sequence: Synthetic oligonucleotide
  Sense strand starting at position 3725 of SEQ ID NO: 1884509
gacuaauucugaguguauu

SEQ ID NO: 2271091 - RNA, 19 nt, Artificial Sequence
  Description of Artificial Sequence: Synthetic oligonucleotide
  Antisense strand to SEQ ID NO: 2271090
aauacacucagaauuaguc

SEQ ID NO: 2271092 - RNA, 19 nt, Artificial Sequence
  Description of Artificial Sequence: Synthetic oligonucleotide
  Sense strand starting at position 3726 of SEQ ID NO: 1884509
acuaauucugaguguauua

SEQ ID NO: 2271093 - RNA, 19 nt, Artificial Sequence
  Description of Artificial Sequence: Synthetic oligonucleotide
  Antisense strand to SEQ ID NO: 2271092
uaauacacucagaauuagu

SEQ ID NO: 2271094 - RNA, 19 nt, Artificial Sequence
  Description of Artificial Sequence: Synthetic oligonucleotide
  Sense strand starting at position 3733 of SEQ ID NO: 1884509
cugaguguauuaucuauag

SEQ ID NO: 2271095 - RNA, 19 nt, Artificial Sequence
  Description of Artificial Sequence: Synthetic oligonucleotide
  Antisense strand to SEQ ID NO: 2271094
cuauagauaauacacucag

SEQ ID NO: 2271096 - RNA, 19 nt, Artificial Sequence
  Description of Artificial Sequence: Synthetic oligonucleotide
  Sense strand starting at position 3737 of SEQ ID NO: 1884509
guguauuaucuauagcuga

SEQ ID NO: 2271097 - RNA, 19 nt, Artificial Sequence
  Description of Artificial Sequence: Synthetic oligonucleotide
  Antisense strand to SEQ ID NO: 2271096
ucagcuauagauaauacac

SEQ ID NO: 2271098 - RNA, 19 nt, Artificial Sequence
  Description of Artificial Sequence: Synthetic oligonucleotide
  Sense strand starting at position 3797 of SEQ ID NO: 1884509
aguauuagggaacgucauu

SEQ ID NO: 2271099 - RNA, 19 nt, Artificial Sequence
  Description of Artificial Sequence: Synthetic oligonucleotide
  Antisense strand to SEQ ID NO: 2271098
aaugacguucccuaauacu

SEQ ID NO: 2271100 - RNA, 19 nt, Artificial Sequence
  Description of Artificial Sequence: Synthetic oligonucleotide
  Sense strand starting at position 3957 of SEQ ID NO: 1884509
ugcugagauuaaucauuaa

SEQ ID NO: 2271101 - RNA, 19 nt, Artificial Sequence
  Description of Artificial Sequence: Synthetic oligonucleotide
  Antisense strand to SEQ ID NO: 2271100
uuaaugauuaaucucagca

SEQ ID NO: 2271102 - RNA, 19 nt, Artificial Sequence
  Description of Artificial Sequence: Synthetic oligonucleotide
  Sense strand starting at position 14 of SEQ ID NO: 1884510
ccaagugccuuacucagaa

SEQ ID NO: 2271103 - RNA, 19 nt, Artificial Sequence
  Description of Artificial Sequence: Synthetic oligonucleotide
  Antisense strand to SEQ ID NO: 2271102
uucugaguaaggcacuugg

SEQ ID NO: 2271104 - RNA, 19 nt, Artificial Sequence
  Description of Artificial Sequence: Synthetic oligonucleotide
  Sense strand starting at position 184 of SEQ ID NO: 1884510
cagaauuagucuuugaagc

SEQ ID NO: 2271105 - RNA, 19 nt, Artificial Sequence
  Description of Artificial Sequence: Synthetic oligonucleotide
  Antisense strand to SEQ ID NO: 2271104
gcuucaaagacuaauucug

SEQ ID NO: 2271106 - RNA, 19 nt, Artificial Sequence
  Description of Artificial Sequence: Synthetic oligonucleotide
  Sense strand starting at position 564 of SEQ ID NO: 1884510
gcaauaagcguggauaaac

SEQ ID NO: 2271107 - RNA, 19 nt, Artificial Sequence
  Description of Artificial Sequence: Synthetic oligonucleotide
  Antisense strand to SEQ ID NO: 2271106
guuuauccacgcuuauugc

SEQ ID NO: 2271108 - RNA, 19 nt, Artificial Sequence
  Description of Artificial Sequence: Synthetic oligonucleotide
  Sense strand starting at position 624 of SEQ ID NO: 1884510
ggccaccuaccauaugauu

SEQ ID NO: 2271109 - RNA, 19 nt, Artificial Sequence
  Description of Artificial Sequence: Synthetic oligonucleotide
  Antisense strand to SEQ ID NO: 2271108
aaucauaugguagguggcc

SEQ ID NO: 2271110 - RNA, 19 nt, Artificial Sequence
  Description of Artificial Sequence: Synthetic oligonucleotide
  Sense strand starting at position 723 of SEQ ID NO: 1884510
acuguuaauggguacggua

SEQ ID NO: 2271111 - RNA, 19 nt, Artificial Sequence
  Description of Artificial Sequence: Synthetic oligonucleotide
  Antisense strand to SEQ ID NO: 2271110
uaccguacccauuaacagu

SEQ ID NO: 2271112 - RNA, 19 nt, Artificial Sequence
  Description of Artificial Sequence: Synthetic oligonucleotide
  Sense strand starting at position 771 of SEQ ID NO: 1884510
gacaguaaugauggugguu

SEQ ID NO: 2271113 - RNA, 19 nt, Artificial Sequence
  Description of Artificial Sequence: Synthetic oligonucleotide
  Antisense strand to SEQ ID NO: 2271112
aaccaccaucauuacuguc

SEQ ID NO: 2271114 - RNA, 19 nt, Artificial Sequence
  Description of Artificial Sequence: Synthetic oligonucleotide
  Sense strand starting at position 776 of SEQ ID NO: 1884510
uaaugauggugguuguaaa

SEQ ID NO: 2271115 - RNA, 19 nt, Artificial Sequence
  Description of Artificial Sequence: Synthetic oligonucleotide
  Antisense strand to SEQ ID NO: 2271114
uuuacaaccaccaucauua

SEQ ID NO: 2271116 - RNA, 19 nt, Artificial Sequence
  Description of Artificial Sequence: Synthetic oligonucleotide
  Sense strand starting at position 793 of SEQ ID NO: 1884510
aaauuuauuugcugauggu

SEQ ID NO: 2271117 - RNA, 19 nt, Artificial Sequence
  Description of Artificial Sequence: Synthetic oligonucleotide
  Antisense strand to SEQ ID NO: 2271116
accaucagcaaauaaauuu

SEQ ID NO: 2271118 - RNA, 19 nt, Artificial Sequence
  Description of Artificial Sequence: Synthetic oligonucleotide
  Sense strand starting at position 800 of SEQ ID NO: 1884510
uuugcugaugguuacauaa

SEQ ID NO: 2271119 - RNA, 19 nt, Artificial Sequence
  Description of Artificial Sequence: Synthetic oligonucleotide
  Antisense strand to SEQ ID NO: 2271118
uuauguaaccaucagcaaa

SEQ ID NO: 2271120 - RNA, 19 nt, Artificial Sequence
  Description of Artificial Sequence: Synthetic oligonucleotide
  Sense strand starting at position 830 of SEQ ID NO: 1884510
ugcuaauaaccuugaauug

SEQ ID NO: 2271121 - RNA, 19 nt, Artificial Sequence
  Description of Artificial Sequence: Synthetic oligonucleotide
  Antisense strand to SEQ ID NO: 2271120
caauucaagguuauuagca

SEQ ID NO: 2271122 - RNA, 19 nt, Artificial Sequence
  Description of Artificial Sequence: Synthetic oligonucleotide
  Sense strand starting at position 831 of SEQ ID NO: 1884510
gcuaauaaccuugaauugu

SEQ ID NO: 2271123 - RNA, 19 nt, Artificial Sequence
  Description of Artificial Sequence: Synthetic oligonucleotide
  Antisense strand to SEQ ID NO: 2271122
acaauucaagguuauuagc

SEQ ID NO: 2271124 - RNA, 19 nt, Artificial Sequence
  Description of Artificial Sequence: Synthetic oligonucleotide
  Sense strand starting at position 863 of SEQ ID NO: 1884510
ggugaauuguaaguuauau

SEQ ID NO: 2271125 - RNA, 19 nt, Artificial Sequence
  Description of Artificial Sequence: Synthetic oligonucleotide
  Antisense strand to SEQ ID NO: 2271124
auauaacuuacaauucacc

SEQ ID NO: 2271126 - RNA, 19 nt, Artificial Sequence
  Description of Artificial Sequence: Synthetic oligonucleotide
  Sense strand starting at position 978 of SEQ ID NO: 1884510
ggacacuucuaagcaugga

SEQ ID NO: 2271127 - RNA, 19 nt, Artificial Sequence
  Description of Artificial Sequence: Synthetic oligonucleotide
  Antisense strand to SEQ ID NO: 2271126
uccaugcuuagaagugucc

SEQ ID NO: 2271128 - RNA, 19 nt, Artificial Sequence
  Description of Artificial Sequence: Synthetic oligonucleotide
  Sense strand starting at position 982 of SEQ ID NO: 1884510
acuucuaagcauggaagaa

SEQ ID NO: 2271129 - RNA, 19 nt, Artificial Sequence
  Description of Artificial Sequence: Synthetic oligonucleotide
  Antisense strand to SEQ ID NO: 2271128
uucuuccaugcuuagaagu

SEQ ID NO: 2271130 - RNA, 19 nt, Artificial Sequence
  Description of Artificial Sequence: Synthetic oligonucleotide
  Sense strand starting at position 1046 of SEQ ID NO: 1884510
aggauacauugacugugau

SEQ ID NO: 2271131 - RNA, 19 nt, Artificial Sequence
  Description of Artificial Sequence: Synthetic oligonucleotide
  Antisense strand to SEQ ID NO: 2271130
aucacagucaauguauccu

SEQ ID NO: 2271132 - RNA, 19 nt, Artificial Sequence
  Description of Artificial Sequence: Synthetic oligonucleotide
  Sense strand starting at position 1081 of SEQ ID NO: 1884510
ugaugauuagagugagugu

SEQ ID NO: 2271133 - RNA, 19 nt, Artificial Sequence
  Description of Artificial Sequence: Synthetic oligonucleotide
  Antisense strand to SEQ ID NO: 2271132
acacucacucuaaucauca

SEQ ID NO: 2271134 - RNA, 19 nt, Artificial Sequence
  Description of Artificial Sequence: Synthetic oligonucleotide
  Sense strand starting at position 1092 of SEQ ID NO: 1884510
gugagugugacugaguacu

SEQ ID NO: 2271135 - RNA, 19 nt, Artificial Sequence
  Description of Artificial Sequence: Synthetic oligonucleotide
  Antisense strand to SEQ ID NO: 2271134
aguacucagucacacucac

SEQ ID NO: 2271136 - RNA, 19 nt, Artificial Sequence
  Description of Artificial Sequence: Synthetic oligonucleotide
  Sense strand starting at position 1094 of SEQ ID NO: 1884510
gagugugacugaguacuua

SEQ ID NO: 2271137 - RNA, 19 nt, Artificial Sequence
  Description of Artificial Sequence: Synthetic oligonucleotide
  Antisense strand to SEQ ID NO: 2271136
uaaguacucagucacacuc

SEQ ID NO: 2271138 - RNA, 19 nt, Artificial Sequence
  Description of Artificial Sequence: Synthetic oligonucleotide
  Sense strand starting at position 1153 of SEQ ID NO: 1884510
gaaugaagcuuucuggaaa

SEQ ID NO: 2271139 - RNA, 19 nt, Artificial Sequence
  Description of Artificial Sequence: Synthetic oligonucleotide
  Antisense strand to SEQ ID NO: 2271138
uuuccagaaagcuucauuc

SEQ ID NO: 2271140 - RNA, 19 nt, Artificial Sequence
  Description of Artificial Sequence: Synthetic oligonucleotide
  Sense strand starting at position 1175 of SEQ ID NO: 1884510
gauuaaguguucuuccuag

SEQ ID NO: 2271141 - RNA, 19 nt, Artificial Sequence
  Description of Artificial Sequence: Synthetic oligonucleotide
  Antisense strand to SEQ ID NO: 2271140
cuaggaagaacacuuaauc

SEQ ID NO: 2271142 - RNA, 19 nt, Artificial Sequence
  Description of Artificial Sequence: Synthetic oligonucleotide
  Sense strand starting at position 2020 of SEQ ID NO: 1884510
gaaagauaguaauuguguc

SEQ ID NO: 2271143 - RNA, 19 nt, Artificial Sequence
  Description of Artificial Sequence: Synthetic oligonucleotide
  Antisense strand to SEQ ID NO: 2271142
gacacaauuacuaucuuuc

SEQ ID NO: 2271144 - RNA, 19 nt, Artificial Sequence
  Description of Artificial Sequence: Synthetic oligonucleotide
  Sense strand starting at position 2032 of SEQ ID NO: 1884510
uugugucuccaggaugaug

SEQ ID NO: 2271145 - RNA, 19 nt, Artificial Sequence
  Description of Artificial Sequence: Synthetic oligonucleotide
  Antisense strand to SEQ ID NO: 2271144
caucauccuggagacacaa

SEQ ID NO: 2271146 - RNA, 19 nt, Artificial Sequence
  Description of Artificial Sequence: Synthetic oligonucleotide
  Sense strand starting at position 2040 of SEQ ID NO: 1884510
ccaggaugaugaguguuua

SEQ ID NO: 2271147 - RNA, 19 nt, Artificial Sequence
  Description of Artificial Sequence: Synthetic oligonucleotide
  Antisense strand to SEQ ID NO: 2271146
uaaacacucaucauccugg

SEQ ID NO: 2271148 - RNA, 19 nt, Artificial Sequence
  Description of Artificial Sequence: Synthetic oligonucleotide
  Sense strand starting at position 2044 of SEQ ID NO: 1884510
gaugaugaguguuuacauc

SEQ ID NO: 2271149 - RNA, 19 nt, Artificial Sequence
  Description of Artificial Sequence: Synthetic oligonucleotide
  Antisense strand to SEQ ID NO: 2271148
gauguaaacacucaucauc

SEQ ID NO: 2271150 - RNA, 19 nt, Artificial Sequence
  Description of Artificial Sequence: Synthetic oligonucleotide
  Sense strand starting at position 2092 of SEQ ID NO: 1884510
gcagcacacagucagagau

SEQ ID NO: 2271151 - RNA, 19 nt, Artificial Sequence
  Description of Artificial Sequence: Synthetic oligonucleotide
  Antisense strand to SEQ ID NO: 2271150
aucucugacugugugcugc

SEQ ID NO: 2271152 - RNA, 19 nt, Artificial Sequence
  Description of Artificial Sequence: Synthetic oligonucleotide
  Sense strand starting at position 2443 of SEQ ID NO: 1884510
cuaucaugugacugugaug

SEQ ID NO: 2271153 - RNA, 19 nt, Artificial Sequence
  Description of Artificial Sequence: Synthetic oligonucleotide
  Antisense strand to SEQ ID NO: 2271152
caucacagucacaugauag

SEQ ID NO: 2271154 - RNA, 19 nt, Artificial Sequence
  Description of Artificial Sequence: Synthetic oligonucleotide
  Sense strand starting at position 2449 of SEQ ID NO: 1884510
ugugacugugaugauuauu

SEQ ID NO: 2271155 - RNA, 19 nt, Artificial Sequence
  Description of Artificial Sequence: Synthetic oligonucleotide
  Antisense strand to SEQ ID NO: 2271154
aauaaucaucacagucaca

SEQ ID NO: 2271156 - RNA, 19 nt, Artificial Sequence
  Description of Artificial Sequence: Synthetic oligonucleotide
  Sense strand starting at position 2454 of SEQ ID NO: 1884510
cugugaugauuauuaugau

SEQ ID NO: 2271157 - RNA, 19 nt, Artificial Sequence
  Description of Artificial Sequence: Synthetic oligonucleotide
  Antisense strand to SEQ ID NO: 2271156
aucauaauaaucaucacag

SEQ ID NO: 2271158 - RNA, 19 nt, Artificial Sequence
  Description of Artificial Sequence: Synthetic oligonucleotide
  Sense strand starting at position 2494 of SEQ ID NO: 1884510
ggagcucuggccuacaagu

SEQ ID NO: 2271159 - RNA, 19 nt, Artificial Sequence
  Description of Artificial Sequence: Synthetic oligonucleotide
  Antisense strand to SEQ ID NO: 2271158
acuuguaggccagagcucc

SEQ ID NO: 2271160 - RNA, 19 nt, Artificial Sequence
  Description of Artificial Sequence: Synthetic oligonucleotide
  Sense strand starting at position 2529 of SEQ ID NO: 1884510
gaaugagacuuggcagcuu

SEQ ID NO: 2271161 - RNA, 19 nt, Artificial Sequence
  Description of Artificial Sequence: Synthetic oligonucleotide
  Antisense strand to SEQ ID NO: 2271160
aagcugccaagucucauuc

SEQ ID NO: 2271162 - RNA, 19 nt, Artificial Sequence
  Description of Artificial Sequence: Synthetic oligonucleotide
  Sense strand starting at position 2569 of SEQ ID NO: 1884510
cugauaguuagccaggauc

SEQ ID NO: 2271163 - RNA, 19 nt, Artificial Sequence
  Description of Artificial Sequence: Synthetic oligonucleotide
  Antisense strand to SEQ ID NO: 2271162
gauccuggcuaacuaucag

SEQ ID NO: 2271164 - RNA, 19 nt, Artificial Sequence
  Description of Artificial Sequence: Synthetic oligonucleotide
  Sense strand starting at position 2571 of SEQ ID NO: 1884510
gauaguuagccaggaucac

SEQ ID NO: 2271165 - RNA, 19 nt, Artificial Sequence
  Description of Artificial Sequence: Synthetic oligonucleotide
  Antisense strand to SEQ ID NO: 2271164
gugauccuggcuaacuauc

SEQ ID NO: 2271166 - RNA, 19 nt, Artificial Sequence
  Description of Artificial Sequence: Synthetic oligonucleotide
  Sense strand starting at position 2572 of SEQ ID NO: 1884510
auaguuagccaggaucacu

SEQ ID NO: 2271167 - RNA, 19 nt, Artificial Sequence
  Description of Artificial Sequence: Synthetic oligonucleotide
  Antisense strand to SEQ ID NO: 2271166
agugauccuggcuaacuau

SEQ ID NO: 2271168 - RNA, 19 nt, Artificial Sequence
  Description of Artificial Sequence: Synthetic oligonucleotide
  Sense strand starting at position 2617 of SEQ ID NO: 1884510
uuugucugucaucagaaua

SEQ ID NO: 2271169 - RNA, 19 nt, Artificial Sequence
  Description of Artificial Sequence: Synthetic oligonucleotide
  Antisense strand to SEQ ID NO: 2271168
uauucugaugacagacaaa

SEQ ID NO: 2271170 - RNA, 19 nt, Artificial Sequence
  Description of Artificial Sequence: Synthetic oligonucleotide
  Sense strand starting at position 2653 of SEQ ID NO: 1884510
ugcucuaagccucaaugaa

SEQ ID NO: 2271171 - RNA, 19 nt, Artificial Sequence
  Description of Artificial Sequence: Synthetic oligonucleotide
  Antisense strand to SEQ ID NO: 2271170
uucauugaggcuuagagca

SEQ ID NO: 2271172 - RNA, 19 nt, Artificial Sequence
  Description of Artificial Sequence: Synthetic oligonucleotide
  Sense strand starting at position 2713 of SEQ ID NO: 1884510
cuaguauuguccuuaugaa

SEQ ID NO: 2271173 - RNA, 19 nt, Artificial Sequence
  Description of Artificial Sequence: Synthetic oligonucleotide
  Antisense strand to SEQ ID NO: 2271172
uucauaaggacaauacuag

SEQ ID NO: 2271174 - RNA, 19 nt, Artificial Sequence
  Description of Artificial Sequence: Synthetic oligonucleotide
  Sense strand starting at position 2748 of SEQ ID NO: 1884510
ugucuccuagaaugugaau

SEQ ID NO: 2271175 - RNA, 19 nt, Artificial Sequence
  Description of Artificial Sequence: Synthetic oligonucleotide
  Antisense strand to SEQ ID NO: 2271174
auucacauucuaggagaca

SEQ ID NO: 2271176 - RNA, 19 nt, Artificial Sequence
  Description of Artificial Sequence: Synthetic oligonucleotide
  Sense strand starting at position 2754 of SEQ ID NO: 1884510
cuagaaugugaaugaaagu

SEQ ID NO: 2271177 - RNA, 19 nt, Artificial Sequence
  Description of Artificial Sequence: Synthetic oligonucleotide
  Antisense strand to SEQ ID NO: 2271176
acuuucauucacauucuag

SEQ ID NO: 2271178 - RNA, 19 nt, Artificial Sequence
  Description of Artificial Sequence: Synthetic oligonucleotide
  Sense strand starting at position 2936 of SEQ ID NO: 1884510
aaaguaugcguuuacauua

SEQ ID NO: 2271179 - RNA, 19 nt, Artificial Sequence
  Description of Artificial Sequence: Synthetic oligonucleotide
  Antisense strand to SEQ ID NO: 2271178
uaauguaaacgcauacuuu

SEQ ID NO: 2271180 - RNA, 19 nt, Artificial Sequence
  Description of Artificial Sequence: Synthetic oligonucleotide
  Sense strand starting at position 3005 of SEQ ID NO: 1884510
ccauguauccaacauugua

SEQ ID NO: 2271181 - RNA, 19 nt, Artificial Sequence
  Description of Artificial Sequence: Synthetic oligonucleotide
  Antisense strand to SEQ ID NO: 2271180
uacaauguuggauacaugg

SEQ ID NO: 2271182 - RNA, 19 nt, Artificial Sequence
  Description of Artificial Sequence: Synthetic oligonucleotide
  Sense strand starting at position 278 of SEQ ID NO: 1884511
uuugaaauguggguccacu

SEQ ID NO: 2271183 - RNA, 19 nt, Artificial Sequence
  Description of Artificial Sequence: Synthetic oligonucleotide
  Antisense strand to SEQ ID NO: 2271182
aguggacccacauuucaaa

SEQ ID NO: 2271184 - RNA, 19 nt, Artificial Sequence
  Description of Artificial Sequence: Synthetic oligonucleotide
  Sense strand starting at position 363 of SEQ ID NO: 1884511
ugugguguccaggacuuau

SEQ ID NO: 2271185 - RNA, 19 nt, Artificial Sequence
  Description of Artificial Sequence: Synthetic oligonucleotide
  Antisense strand to SEQ ID NO: 2271184
auaaguccuggacaccaca

SEQ ID NO: 2271186 - RNA, 19 nt, Artificial Sequence
  Description of Artificial Sequence: Synthetic oligonucleotide
  Sense strand starting at position 407 of SEQ ID NO: 1884511
cggcauaagccuugcauuu

SEQ ID NO: 2271187 - RNA, 19 nt, Artificial Sequence
  Description of Artificial Sequence: Synthetic oligonucleotide
  Antisense strand to SEQ ID NO: 2271186
aaaugcaaggcuuaugccg

SEQ ID NO: 2271188 - RNA, 19 nt, Artificial Sequence
  Description of Artificial Sequence: Synthetic oligonucleotide
  Sense strand starting at position 456 of SEQ ID NO: 1884511
guagaaacuguugagguaa

SEQ ID NO: 2271189 - RNA, 19 nt, Artificial Sequence
  Description of Artificial Sequence: Synthetic oligonucleotide
  Antisense strand to SEQ ID NO: 2271188
uuaccucaacaguuucuac

SEQ ID NO: 2271190 - RNA, 19 nt, Artificial Sequence
  Description of Artificial Sequence: Synthetic oligonucleotide
  Sense strand starting at position 610 of SEQ ID NO: 1884511
uggccucuugugggucaga

SEQ ID NO: 2271191 - RNA, 19 nt, Artificial Sequence
  Description of Artificial Sequence: Synthetic oligonucleotide
  Antisense strand to SEQ ID NO: 2271190
ucugacccacaagaggcca

SEQ ID NO: 2271192 - RNA, 19 nt, Artificial Sequence
  Description of Artificial Sequence: Synthetic oligonucleotide
  Sense strand starting at position 673 of SEQ ID NO: 1884511
ggaacugugugaucaguca

SEQ ID NO: 2271193 - RNA, 19 nt, Artificial Sequence
  Description of Artificial Sequence: Synthetic oligonucleotide
  Antisense strand to SEQ ID NO: 2271192
ugacugaucacacaguucc

SEQ ID NO: 2271194 - RNA, 19 nt, Artificial Sequence
  Description of Artificial Sequence: Synthetic oligonucleotide
  Sense strand starting at position 697 of SEQ ID NO: 1884511
gggacaagauccuagggau

SEQ ID NO: 2271195 - RNA, 19 nt, Artificial Sequence
  Description of Artificial Sequence: Synthetic oligonucleotide
  Antisense strand to SEQ ID NO: 2271194
aucccuaggaucuuguccc

SEQ ID NO: 2271196 - RNA, 19 nt, Artificial Sequence
  Description of Artificial Sequence: Synthetic oligonucleotide
  Sense strand starting at position 704 of SEQ ID NO: 1884511
gauccuagggauugucuau

SEQ ID NO: 2271197 - RNA, 19 nt, Artificial Sequence
  Description of Artificial Sequence: Synthetic oligonucleotide
  Antisense strand to SEQ ID NO: 2271196
auagacaaucccuaggauc

SEQ ID NO: 2271198 - RNA, 19 nt, Artificial Sequence
  Description of Artificial Sequence: Synthetic oligonucleotide
  Sense strand starting at position 724 of SEQ ID NO: 1884511
ccgacauccucuguuugga

SEQ ID NO: 2271199 - RNA, 19 nt, Artificial Sequence
  Description of Artificial Sequence: Synthetic oligonucleotide
  Antisense strand to SEQ ID NO: 2271198
uccaaacagaggaugucgg

SEQ ID NO: 2271200 - RNA, 19 nt, Artificial Sequence
  Description of Artificial Sequence: Synthetic oligonucleotide
  Sense strand starting at position 733 of SEQ ID NO: 1884511
ucuguuuggaguugaggaa

SEQ ID NO: 2271201 - RNA, 19 nt, Artificial Sequence
  Description of Artificial Sequence: Synthetic oligonucleotide
  Antisense strand to SEQ ID NO: 2271200
uuccucaacuccaaacaga

SEQ ID NO: 2271202 - RNA, 19 nt, Artificial Sequence
  Description of Artificial Sequence: Synthetic oligonucleotide
  Sense strand starting at position 880 of SEQ ID NO: 1884511
cuagucuuggguugcuuaa

SEQ ID NO: 2271203 - RNA, 19 nt, Artificial Sequence
  Description of Artificial Sequence: Synthetic oligonucleotide
  Antisense strand to SEQ ID NO: 2271202
uuaagcaacccaagacuag

SEQ ID NO: 2271204 - RNA, 19 nt, Artificial Sequence
  Description of Artificial Sequence: Synthetic oligonucleotide
  Sense strand starting at position 1257 of SEQ ID NO: 1884511
accauuuaaucuggcaaga

SEQ ID NO: 2271205 - RNA, 19 nt, Artificial Sequence
  Description of Artificial Sequence: Synthetic oligonucleotide
  Antisense strand to SEQ ID NO: 2271204
ucuugccagauuaaauggu

SEQ ID NO: 2271206 - RNA, 19 nt, Artificial Sequence
  Description of Artificial Sequence: Synthetic oligonucleotide
  Sense strand starting at position 1309 of SEQ ID NO: 1884511
acuugaucuuguucugaac

SEQ ID NO: 2271207 - RNA, 19 nt, Artificial Sequence
  Description of Artificial Sequence: Synthetic oligonucleotide
  Antisense strand to SEQ ID NO: 2271206
guucagaacaagaucaagu

SEQ ID NO: 2271208 - RNA, 19 nt, Artificial Sequence
  Description of Artificial Sequence: Synthetic oligonucleotide
  Sense strand starting at position 1364 of SEQ ID NO: 1884511
guaaaucaaugcuuaugua

SEQ ID NO: 2271209 - RNA, 19 nt, Artificial Sequence
  Description of Artificial Sequence: Synthetic oligonucleotide
  Antisense strand to SEQ ID NO: 2271208
uacauaagcauugauuuac

SEQ ID NO: 2271210 - RNA, 19 nt, Artificial Sequence
  Description of Artificial Sequence: Synthetic oligonucleotide
  Sense strand starting at position 1459 of SEQ ID NO: 1884511
cugaaugagccauguuguc

SEQ ID NO: 2271211 - RNA, 19 nt, Artificial Sequence
  Description of Artificial Sequence: Synthetic oligonucleotide
  Antisense strand to SEQ ID NO: 2271210
gacaacauggcucauucag

SEQ ID NO: 2271212 - RNA, 19 nt, Artificial Sequence
  Description of Artificial Sequence: Synthetic oligonucleotide
  Sense strand starting at position 1499 of SEQ ID NO: 1884511
ugguccuacuaccuagaaa

SEQ ID NO: 2271213 - RNA, 19 nt, Artificial Sequence
  Description of Artificial Sequence: Synthetic oligonucleotide
  Antisense strand to SEQ ID NO: 2271212
uuucuagguaguaggacca

SEQ ID NO: 2271214 - RNA, 19 nt, Artificial Sequence
  Description of Artificial Sequence: Synthetic oligonucleotide
  Sense strand starting at position 1986 of SEQ ID NO: 1884511
uuaucagcucucgagguga

SEQ ID NO: 2271215 - RNA, 19 nt, Artificial Sequence
  Description of Artificial Sequence: Synthetic oligonucleotide
  Antisense strand to SEQ ID NO: 2271214
ucaccucgagagcugauaa

SEQ ID NO: 2271216 - RNA, 19 nt, Artificial Sequence
  Description of Artificial Sequence: Synthetic oligonucleotide
  Sense strand starting at position 2162 of SEQ ID NO: 1884511
ggugguuugguuugaggaa

SEQ ID NO: 2271217 - RNA, 19 nt, Artificial Sequence
  Description of Artificial Sequence: Synthetic oligonucleotide
  Antisense strand to SEQ ID NO: 2271216
uuccucaaaccaaaccacc

SEQ ID NO: 2271218 - RNA, 19 nt, Artificial Sequence
  Description of Artificial Sequence: Synthetic oligonucleotide
  Sense strand starting at position 2201 of SEQ ID NO: 1884511
gaagacguucuuuaauggu

SEQ ID NO: 2271219 - RNA, 19 nt, Artificial Sequence
  Description of Artificial Sequence: Synthetic oligonucleotide
  Antisense strand to SEQ ID NO: 2271218
accauuaaagaacgucuuc

SEQ ID NO: 2271220 - RNA, 19 nt, Artificial Sequence
  Description of Artificial Sequence: Synthetic oligonucleotide
  Sense strand starting at position 2323 of SEQ ID NO: 1884511
uccgaugcccuguaaacuu

SEQ ID NO: 2271221 - RNA, 19 nt, Artificial Sequence
  Description of Artificial Sequence: Synthetic oligonucleotide
  Antisense strand to SEQ ID NO: 2271220
aaguuuacagggcaucgga

SEQ ID NO: 2271222 - RNA, 19 nt, Artificial Sequence
  Description of Artificial Sequence: Synthetic oligonucleotide
  Sense strand starting at position 2341 of SEQ ID NO: 1884511
ucugauagcuucuuccagu

SEQ ID NO: 2271223 - RNA, 19 nt, Artificial Sequence
  Description of Artificial Sequence: Synthetic oligonucleotide
  Antisense strand to SEQ ID NO: 2271222
acuggaagaagcuaucaga

SEQ ID NO: 2271224 - RNA, 19 nt, Artificial Sequence
  Description of Artificial Sequence: Synthetic oligonucleotide
  Sense strand starting at position 2342 of SEQ ID NO: 1884511
cugauagcuucuuccaguu

SEQ ID NO: 2271225 - RNA, 19 nt, Artificial Sequence
  Description of Artificial Sequence: Synthetic oligonucleotide
  Antisense strand to SEQ ID NO: 2271224
aacuggaagaagcuaucag

SEQ ID NO: 2271226 - RNA, 19 nt, Artificial Sequence
  Description of Artificial Sequence: Synthetic oligonucleotide
  Sense strand starting at position 2409 of SEQ ID NO: 1884511
ucggccuucgcaggaauuu

SEQ ID NO: 2271227 - RNA, 19 nt, Artificial Sequence
  Description of Artificial Sequence: Synthetic oligonucleotide
  Antisense strand to SEQ ID NO: 2271226
aaauuccugcgaaggccga

SEQ ID NO: 2271228 - RNA, 19 nt, Artificial Sequence
  Description of Artificial Sequence: Synthetic oligonucleotide
  Sense strand starting at position 2450 of SEQ ID NO: 1884511
cuaagaacuccauacgguu

SEQ ID NO: 2271229 - RNA, 19 nt, Artificial Sequence
  Description of Artificial Sequence: Synthetic oligonucleotide
  Antisense strand to SEQ ID NO: 2271228
aaccguauggaguucuuag

SEQ ID NO: 2271230 - RNA, 19 nt, Artificial Sequence
  Description of Artificial Sequence: Synthetic oligonucleotide
  Sense strand starting at position 2545 of SEQ ID NO: 1884511
agcaucaucuguccacaca

SEQ ID NO: 2271231 - RNA, 19 nt, Artificial Sequence
  Description of Artificial Sequence: Synthetic oligonucleotide
  Antisense strand to SEQ ID NO: 2271230
uguguggacagaugaugcu

SEQ ID NO: 2271232 - RNA, 19 nt, Artificial Sequence
  Description of Artificial Sequence: Synthetic oligonucleotide
  Sense strand starting at position 2603 of SEQ ID NO: 1884511
gugugcuuucaggaaagaa

SEQ ID NO: 2271233 - RNA, 19 nt, Artificial Sequence
  Description of Artificial Sequence: Synthetic oligonucleotide
  Antisense strand to SEQ ID NO: 2271232
uucuuuccugaaagcacac

SEQ ID NO: 2271234 - RNA, 19 nt, Artificial Sequence
  Description of Artificial Sequence: Synthetic oligonucleotide
  Sense strand starting at position 2658 of SEQ ID NO: 1884511
uucuguaaacggcaaugaa

SEQ ID NO: 2271235 - RNA, 19 nt, Artificial Sequence
  Description of Artificial Sequence: Synthetic oligonucleotide
  Antisense strand to SEQ ID NO: 2271234
uucauugccguuuacagaa

SEQ ID NO: 2271236 - RNA, 19 nt, Artificial Sequence
  Description of Artificial Sequence: Synthetic oligonucleotide
  Sense strand starting at position 2668 of SEQ ID NO: 1884511
ggcaaugaacugugaucaa

SEQ ID NO: 2271237 - RNA, 19 nt, Artificial Sequence
  Description of Artificial Sequence: Synthetic oligonucleotide
  Antisense strand to SEQ ID NO: 2271236
uugaucacaguucauugcc

SEQ ID NO: 2271238 - RNA, 19 nt, Artificial Sequence
  Description of Artificial Sequence: Synthetic oligonucleotide
  Sense strand starting at position 2714 of SEQ ID NO: 1884511
agaacaaugcugugggagu

SEQ ID NO: 2271239 - RNA, 19 nt, Artificial Sequence
  Description of Artificial Sequence: Synthetic oligonucleotide
  Antisense strand to SEQ ID NO: 2271238
acucccacagcauuguucu

SEQ ID NO: 2271240 - RNA, 19 nt, Artificial Sequence
  Description of Artificial Sequence: Synthetic oligonucleotide
  Sense strand starting at position 2727 of SEQ ID NO: 1884511
gggagucagggcugaguuu

SEQ ID NO: 2271241 - RNA, 19 nt, Artificial Sequence
  Description of Artificial Sequence: Synthetic oligonucleotide
  Antisense strand to SEQ ID NO: 2271240
aaacucagcccugacuccc

SEQ ID NO: 2271242 - RNA, 19 nt, Artificial Sequence
  Description of Artificial Sequence: Synthetic oligonucleotide
  Sense strand starting at position 2769 of SEQ ID NO: 1884511
agcugaaugccauggguga

SEQ ID NO: 2271243 - RNA, 19 nt, Artificial Sequence
  Description of Artificial Sequence: Synthetic oligonucleotide
  Antisense strand to SEQ ID NO: 2271242
ucacccauggcauucagcu

SEQ ID NO: 2271244 - RNA, 19 nt, Artificial Sequence
  Description of Artificial Sequence: Synthetic oligonucleotide
  Sense strand starting at position 2791 of SEQ ID NO: 1884511
accaauucuccugaagugu

SEQ ID NO: 2271245 - RNA, 19 nt, Artificial Sequence
  Description of Artificial Sequence: Synthetic oligonucleotide
  Antisense strand to SEQ ID NO: 2271244
acacuucaggagaauuggu

SEQ ID NO: 2271246 - RNA, 19 nt, Artificial Sequence
  Description of Artificial Sequence: Synthetic oligonucleotide
  Sense strand starting at position 2800 of SEQ ID NO: 1884511
ccugaagugucaguuucca

SEQ ID NO: 2271247 - RNA, 19 nt, Artificial Sequence
  Description of Artificial Sequence: Synthetic oligonucleotide
  Antisense strand to SEQ ID NO: 2271246
uggaaacugacacuucagg

SEQ ID NO: 2271248 - RNA, 19 nt, Artificial Sequence
  Description of Artificial Sequence: Synthetic oligonucleotide
  Sense strand starting at position 3269 of SEQ ID NO: 1884511
acauuuggcuuugaacaaa

SEQ ID NO: 2271249 - RNA, 19 nt, Artificial Sequence
  Description of Artificial Sequence: Synthetic oligonucleotide
  Antisense strand to SEQ ID NO: 2271248
uuuguucaaagccaaaugu

SEQ ID NO: 2271250 - RNA, 19 nt, Artificial Sequence
  Description of Artificial Sequence: Synthetic oligonucleotide
  Sense strand starting at position 3357 of SEQ ID NO: 1884511
aguugaagaucauuauuag

SEQ ID NO: 2271251 - RNA, 19 nt, Artificial Sequence
  Description of Artificial Sequence: Synthetic oligonucleotide
  Antisense strand to SEQ ID NO: 2271250
cuaauaaugaucuucaacu

SEQ ID NO: 2271252 - RNA, 19 nt, Artificial Sequence
  Description of Artificial Sequence: Synthetic oligonucleotide
  Sense strand starting at position 3360 of SEQ ID NO: 1884511
ugaagaucauuauuagcua

SEQ ID NO: 2271253 - RNA, 19 nt, Artificial Sequence
  Description of Artificial Sequence: Synthetic oligonucleotide
  Antisense strand to SEQ ID NO: 2271252
uagcuaauaaugaucuuca

SEQ ID NO: 2271254 - RNA, 19 nt, Artificial Sequence
  Description of Artificial Sequence: Synthetic oligonucleotide
  Sense strand starting at position 3690 of SEQ ID NO: 1884511
cugugaucucucuaauugc

SEQ ID NO: 2271255 - RNA, 19 nt, Artificial Sequence
  Description of Artificial Sequence: Synthetic oligonucleotide
  Antisense strand to SEQ ID NO: 2271254
gcaauuagagagaucacag

SEQ ID NO: 2271256 - RNA, 19 nt, Artificial Sequence
  Description of Artificial Sequence: Synthetic oligonucleotide
  Sense strand starting at position 3765 of SEQ ID NO: 1884511
uccaaaugcuucucaagga

SEQ ID NO: 2271257 - RNA, 19 nt, Artificial Sequence
  Description of Artificial Sequence: Synthetic oligonucleotide
  Antisense strand to SEQ ID NO: 2271256
uccuugagaagcauuugga

SEQ ID NO: 2271258 - RNA, 19 nt, Artificial Sequence
  Description of Artificial Sequence: Synthetic oligonucleotide
  Sense strand starting at position 3935 of SEQ ID NO: 1884511
aaacauguucucggguauc

SEQ ID NO: 2271259 - RNA, 19 nt, Artificial Sequence
  Description of Artificial Sequence: Synthetic oligonucleotide
  Antisense strand to SEQ ID NO: 2271258
gauacccgagaacauguuu

SEQ ID NO: 2271260 - RNA, 19 nt, Artificial Sequence
  Description of Artificial Sequence: Synthetic oligonucleotide
  Sense strand starting at position 3938 of SEQ ID NO: 1884511
cauguucucggguauccau

SEQ ID NO: 2271261 - RNA, 19 nt, Artificial Sequence
  Description of Artificial Sequence: Synthetic oligonucleotide
  Antisense strand to SEQ ID NO: 2271260
auggauacccgagaacaug

SEQ ID NO: 2271262 - RNA, 19 nt, Artificial Sequence
  Description of Artificial Sequence: Synthetic oligonucleotide
  Sense strand starting at position 48 of SEQ ID NO: 1884512
gcggaaggauuagcuaaga

SEQ ID NO: 2271263 - RNA, 19 nt, Artificial Sequence
  Description of Artificial Sequence: Synthetic oligonucleotide
  Antisense strand to SEQ ID NO: 2271262
ucuuagcuaauccuuccgc

SEQ ID NO: 2271264 - RNA, 19 nt, Artificial Sequence
  Description of Artificial Sequence: Synthetic oligonucleotide
  Sense strand starting at position 76 of SEQ ID NO: 1884512
uugcaaucaugaguucuga

SEQ ID NO: 2271265 - RNA, 19 nt, Artificial Sequence
  Description of Artificial Sequence: Synthetic oligonucleotide
  Antisense strand to SEQ ID NO: 2271264
ucagaacucaugauugcaa

SEQ ID NO: 2271266 - RNA, 19 nt, Artificial Sequence
  Description of Artificial Sequence: Synthetic oligonucleotide
  Sense strand starting at position 188 of SEQ ID NO: 1884512
ucuaaauagugcuuagaga

SEQ ID NO: 2271267 - RNA, 19 nt, Artificial Sequence
  Description of Artificial Sequence: Synthetic oligonucleotide
  Antisense strand to SEQ ID NO: 2271266
ucucuaagcacuauuuaga

SEQ ID NO: 2271268 - RNA, 19 nt, Artificial Sequence
  Description of Artificial Sequence: Synthetic oligonucleotide
  Sense strand starting at position 189 of SEQ ID NO: 1884512
cuaaauagugcuuagagau

SEQ ID NO: 2271269 - RNA, 19 nt, Artificial Sequence
  Description of Artificial Sequence: Synthetic oligonucleotide
  Antisense strand to SEQ ID NO: 2271268
aucucuaagcacuauuuag

SEQ ID NO: 2271270 - RNA, 19 nt, Artificial Sequence
  Description of Artificial Sequence: Synthetic oligonucleotide
  Sense strand starting at position 209 of SEQ ID NO: 1884512
cguuaaauauagcuaagag

SEQ ID NO: 2271271 - RNA, 19 nt, Artificial Sequence
  Description of Artificial Sequence: Synthetic oligonucleotide
  Antisense strand to SEQ ID NO: 2271270
cucuuagcuauauuuaacg

SEQ ID NO: 2271272 - RNA, 19 nt, Artificial Sequence
  Description of Artificial Sequence: Synthetic oligonucleotide
  Sense strand starting at position 240 of SEQ ID NO: 1884512
aggacuagauggguccuua

SEQ ID NO: 2271273 - RNA, 19 nt, Artificial Sequence
  Description of Artificial Sequence: Synthetic oligonucleotide
  Antisense strand to SEQ ID NO: 2271272
uaaggacccaucuaguccu

SEQ ID NO: 2271274 - RNA, 19 nt, Artificial Sequence
  Description of Artificial Sequence: Synthetic oligonucleotide
  Sense strand starting at position 244 of SEQ ID NO: 1884512
cuagauggguccuuaaaga

SEQ ID NO: 2271275 - RNA, 19 nt, Artificial Sequence
  Description of Artificial Sequence: Synthetic oligonucleotide
  Antisense strand to SEQ ID NO: 2271274
ucuuuaaggacccaucuag

SEQ ID NO: 2271276 - RNA, 19 nt, Artificial Sequence
  Description of Artificial Sequence: Synthetic oligonucleotide
  Sense strand starting at position 404 of SEQ ID NO: 1884512
ucauuccaggagcauuaau

SEQ ID NO: 2271277 - RNA, 19 nt, Artificial Sequence
  Description of Artificial Sequence: Synthetic oligonucleotide
  Antisense strand to SEQ ID NO: 2271276
auuaaugcuccuggaauga

SEQ ID NO: 2271278 - RNA, 19 nt, Artificial Sequence
  Description of Artificial Sequence: Synthetic oligonucleotide
  Sense strand starting at position 463 of SEQ ID NO: 1884512
agguauuugccucgaaacu

SEQ ID NO: 2271279 - RNA, 19 nt, Artificial Sequence
  Description of Artificial Sequence: Synthetic oligonucleotide
  Antisense strand to SEQ ID NO: 2271278
aguuucgaggcaaauaccu

SEQ ID NO: 2271280 - RNA, 19 nt, Artificial Sequence
  Description of Artificial Sequence: Synthetic oligonucleotide
  Sense strand starting at position 620 of SEQ ID NO: 1884512
ugccuauaaauuggugaga

SEQ ID NO: 2271281 - RNA, 19 nt, Artificial Sequence
  Description of Artificial Sequence: Synthetic oligonucleotide
  Antisense strand to SEQ ID NO: 2271280
ucucaccaauuuauaggca

SEQ ID NO: 2271282 - RNA, 19 nt, Artificial Sequence
  Description of Artificial Sequence: Synthetic oligonucleotide
  Sense strand starting at position 621 of SEQ ID NO: 1884512
gccuauaaauuggugagaa

SEQ ID NO: 2271283 - RNA, 19 nt, Artificial Sequence
  Description of Artificial Sequence: Synthetic oligonucleotide
  Antisense strand to SEQ ID NO: 2271282
uucucaccaauuuauaggc

SEQ ID NO: 2271284 - RNA, 19 nt, Artificial Sequence
  Description of Artificial Sequence: Synthetic oligonucleotide
  Sense strand starting at position 818 of SEQ ID NO: 1884512
aaggaaaugcguuaugguu

SEQ ID NO: 2271285 - RNA, 19 nt, Artificial Sequence
  Description of Artificial Sequence: Synthetic oligonucleotide
  Antisense strand to SEQ ID NO: 2271284
aaccauaacgcauuuccuu

SEQ ID NO: 2271286 - RNA, 19 nt, Artificial Sequence
  Description of Artificial Sequence: Synthetic oligonucleotide
  Sense strand starting at position 825 of SEQ ID NO: 1884512
ugcguuaugguucugaggu

SEQ ID NO: 2271287 - RNA, 19 nt, Artificial Sequence
  Description of Artificial Sequence: Synthetic oligonucleotide
  Antisense strand to SEQ ID NO: 2271286
accucagaaccauaacgca

SEQ ID NO: 2271288 - RNA, 19 nt, Artificial Sequence
  Description of Artificial Sequence: Synthetic oligonucleotide
  Sense strand starting at position 920 of SEQ ID NO: 1884512
gguugaauggcuuacuggu

SEQ ID NO: 2271289 - RNA, 19 nt, Artificial Sequence
  Description of Artificial Sequence: Synthetic oligonucleotide
  Antisense strand to SEQ ID NO: 2271288
accaguaagccauucaacc

SEQ ID NO: 2271290 - RNA, 19 nt, Artificial Sequence
  Description of Artificial Sequence: Synthetic oligonucleotide
  Sense strand starting at position 968 of SEQ ID NO: 1884512
cggugaaagcugcaacaua

SEQ ID NO: 2271291 - RNA, 19 nt, Artificial Sequence
  Description of Artificial Sequence: Synthetic oligonucleotide
  Antisense strand to SEQ ID NO: 2271290
uauguugcagcuuucaccg

SEQ ID NO: 2271292 - RNA, 19 nt, Artificial Sequence
  Description of Artificial Sequence: Synthetic oligonucleotide
  Sense strand starting at position 989 of SEQ ID NO: 1884512
agagcuguucuagagaauu

SEQ ID NO: 2271293 - RNA, 19 nt, Artificial Sequence
  Description of Artificial Sequence: Synthetic oligonucleotide
  Antisense strand to SEQ ID NO: 2271292
aauucucuagaacagcucu

SEQ ID NO: 2271294 - RNA, 19 nt, Artificial Sequence
  Description of Artificial Sequence: Synthetic oligonucleotide
  Sense strand starting at position 1025 of SEQ ID NO: 1884512
ggucuaacagcucauggua

SEQ ID NO: 2271295 - RNA, 19 nt, Artificial Sequence
  Description of Artificial Sequence: Synthetic oligonucleotide
  Antisense strand to SEQ ID NO: 2271294
uaccaugagcuguuagacc

SEQ ID NO: 2271296 - RNA, 19 nt, Artificial Sequence
  Description of Artificial Sequence: Synthetic oligonucleotide
  Sense strand starting at position 1033 of SEQ ID NO: 1884512
agcucaugguauuccagau

SEQ ID NO: 2271297 - RNA, 19 nt, Artificial Sequence
  Description of Artificial Sequence: Synthetic oligonucleotide
  Antisense strand to SEQ ID NO: 2271296
aucuggaauaccaugagcu

SEQ ID NO: 2271298 - RNA, 19 nt, Artificial Sequence
  Description of Artificial Sequence: Synthetic oligonucleotide
  Sense strand starting at position 1194 of SEQ ID NO: 1884512
gagggcuuugcucaguaga

SEQ ID NO: 2271299 - RNA, 19 nt, Artificial Sequence
  Description of Artificial Sequence: Synthetic oligonucleotide
  Antisense strand to SEQ ID NO: 2271298
ucuacugagcaaagcccuc

SEQ ID NO: 2271300 - RNA, 19 nt, Artificial Sequence
  Description of Artificial Sequence: Synthetic oligonucleotide
  Sense strand starting at position 1268 of SEQ ID NO: 1884512
cugugaguggcagaaauca

SEQ ID NO: 2271301 - RNA, 19 nt, Artificial Sequence
  Description of Artificial Sequence: Synthetic oligonucleotide
  Antisense strand to SEQ ID NO: 2271300
ugauuucugccacucacag

SEQ ID NO: 2271302 - RNA, 19 nt, Artificial Sequence
  Description of Artificial Sequence: Synthetic oligonucleotide
  Sense strand starting at position 1304 of SEQ ID NO: 1884512
acuguaagcucuuugagau

SEQ ID NO: 2271303 - RNA, 19 nt, Artificial Sequence
  Description of Artificial Sequence: Synthetic oligonucleotide
  Antisense strand to SEQ ID NO: 2271302
aucucaaagagcuuacagu

SEQ ID NO: 2271304 - RNA, 19 nt, Artificial Sequence
  Description of Artificial Sequence: Synthetic oligonucleotide
  Sense strand starting at position 1310 of SEQ ID NO: 1884512
agcucuuugagaugggaac

SEQ ID NO: 2271305 - RNA, 19 nt, Artificial Sequence
  Description of Artificial Sequence: Synthetic oligonucleotide
  Antisense strand to SEQ ID NO: 2271304
guucccaucucaaagagcu

SEQ ID NO: 2271306 - RNA, 19 nt, Artificial Sequence
  Description of Artificial Sequence: Synthetic oligonucleotide
  Sense strand starting at position 1392 of SEQ ID NO: 1884512
ucaucaaauagguguugga

SEQ ID NO: 2271307 - RNA, 19 nt, Artificial Sequence
  Description of Artificial Sequence: Synthetic oligonucleotide
  Antisense strand to SEQ ID NO: 2271306
uccaacaccuauuugauga

SEQ ID NO: 2271308 - RNA, 19 nt, Artificial Sequence
  Description of Artificial Sequence: Synthetic oligonucleotide
  Sense strand starting at position 1396 of SEQ ID NO: 1884512
caaauagguguuggaugaa

SEQ ID NO: 2271309 - RNA, 19 nt, Artificial Sequence
  Description of Artificial Sequence: Synthetic oligonucleotide
  Antisense strand to SEQ ID NO: 2271308
uucauccaacaccuauuug

SEQ ID NO: 2271310 - RNA, 19 nt, Artificial Sequence
  Description of Artificial Sequence: Synthetic oligonucleotide
  Sense strand starting at position 1449 of SEQ ID NO: 1884512
gcacaaguauacccagaga

SEQ ID NO: 2271311 - RNA, 19 nt, Artificial Sequence
  Description of Artificial Sequence: Synthetic oligonucleotide
  Antisense strand to SEQ ID NO: 2271310
ucucuggguauacuugugc

SEQ ID NO: 2271312 - RNA, 19 nt, Artificial Sequence
  Description of Artificial Sequence: Synthetic oligonucleotide
  Sense strand starting at position 1529 of SEQ ID NO: 1884512
cuauauccugacuaguuau

SEQ ID NO: 2271313 - RNA, 19 nt, Artificial Sequence
  Description of Artificial Sequence: Synthetic oligonucleotide
  Antisense strand to SEQ ID NO: 2271312
auaacuagucaggauauag

SEQ ID NO: 2271314 - RNA, 19 nt, Artificial Sequence
  Description of Artificial Sequence: Synthetic oligonucleotide
  Sense strand starting at position 1625 of SEQ ID NO: 1884512
uccucugaggcuggauaau

SEQ ID NO: 2271315 - RNA, 19 nt, Artificial Sequence
  Description of Artificial Sequence: Synthetic oligonucleotide
  Antisense strand to SEQ ID NO: 2271314
auuauccagccucagagga

SEQ ID NO: 2271316 - RNA, 19 nt, Artificial Sequence
  Description of Artificial Sequence: Synthetic oligonucleotide
  Sense strand starting at position 1655 of SEQ ID NO: 1884512
gagugaagugcucaugaug

SEQ ID NO: 2271317 - RNA, 19 nt, Artificial Sequence
  Description of Artificial Sequence: Synthetic oligonucleotide
  Antisense strand to SEQ ID NO: 2271316
caucaugagcacuucacuc

SEQ ID NO: 2271318 - RNA, 19 nt, Artificial Sequence
  Description of Artificial Sequence: Synthetic oligonucleotide
  Sense strand starting at position 1732 of SEQ ID NO: 1884512
cgaccaaguacuggauaaa

SEQ ID NO: 2271319 - RNA, 19 nt, Artificial Sequence
  Description of Artificial Sequence: Synthetic oligonucleotide
  Antisense strand to SEQ ID NO: 2271318
uuuauccaguacuuggucg

SEQ ID NO: 2271320 - RNA, 19 nt, Artificial Sequence
  Description of Artificial Sequence: Synthetic oligonucleotide
  Sense strand starting at position 2068 of SEQ ID NO: 1884512
uucccaaguuaguccauaa

SEQ ID NO: 2271321 - RNA, 19 nt, Artificial Sequence
  Description of Artificial Sequence: Synthetic oligonucleotide
  Antisense strand to SEQ ID NO: 2271320
uuauggacuaacuugggaa

SEQ ID NO: 2271322 - RNA, 19 nt, Artificial Sequence
  Description of Artificial Sequence: Synthetic oligonucleotide
  Sense strand starting at position 2345 of SEQ ID NO: 1884512
ccgcucaaucaugaaauua

SEQ ID NO: 2271323 - RNA, 19 nt, Artificial Sequence
  Description of Artificial Sequence: Synthetic oligonucleotide
  Antisense strand to SEQ ID NO: 2271322
uaauuucaugauugagcgg

SEQ ID NO: 2271324 - RNA, 19 nt, Artificial Sequence
  Description of Artificial Sequence: Synthetic oligonucleotide
  Sense strand starting at position 2554 of SEQ ID NO: 1884512
agcggauugcuugugcuca

SEQ ID NO: 2271325 - RNA, 19 nt, Artificial Sequence
  Description of Artificial Sequence: Synthetic oligonucleotide
  Antisense strand to SEQ ID NO: 2271324
ugagcacaagcaauccgcu

SEQ ID NO: 2271326 - RNA, 19 nt, Artificial Sequence
  Description of Artificial Sequence: Synthetic oligonucleotide
  Sense strand starting at position 2881 of SEQ ID NO: 1884512
ccaaauguuucucugugaa

SEQ ID NO: 2271327 - RNA, 19 nt, Artificial Sequence
  Description of Artificial Sequence: Synthetic oligonucleotide
  Antisense strand to SEQ ID NO: 2271326
uucacagagaaacauuugg

SEQ ID NO: 2271328 - RNA, 19 nt, Artificial Sequence
  Description of Artificial Sequence: Synthetic oligonucleotide
  Sense strand starting at position 3061 of SEQ ID NO: 1884512
gccauaauccucgauucuu

SEQ ID NO: 2271329 - RNA, 19 nt, Artificial Sequence
  Description of Artificial Sequence: Synthetic oligonucleotide
  Antisense strand to SEQ ID NO: 2271328
aagaaucgaggauuauggc

SEQ ID NO: 2271330 - RNA, 19 nt, Artificial Sequence
  Description of Artificial Sequence: Synthetic oligonucleotide
  Sense strand starting at position 3117 of SEQ ID NO: 1884512
cuguccguggcagaauuua

SEQ ID NO: 2271331 - RNA, 19 nt, Artificial Sequence
  Description of Artificial Sequence: Synthetic oligonucleotide
  Antisense strand to SEQ ID NO: 2271330
uaaauucugccacggacag

SEQ ID NO: 2271332 - RNA, 19 nt, Artificial Sequence
  Description of Artificial Sequence: Synthetic oligonucleotide
  Sense strand starting at position 3229 of SEQ ID NO: 1884512
ggacuagaaucagcacauu

SEQ ID NO: 2271333 - RNA, 19 nt, Artificial Sequence
  Description of Artificial Sequence: Synthetic oligonucleotide
  Antisense strand to SEQ ID NO: 2271332
aaugugcugauucuagucc

SEQ ID NO: 2271334 - RNA, 19 nt, Artificial Sequence
  Description of Artificial Sequence: Synthetic oligonucleotide
  Sense strand starting at position 3358 of SEQ ID NO: 1884512
aagaaaugagucugaguau

SEQ ID NO: 2271335 - RNA, 19 nt, Artificial Sequence
  Description of Artificial Sequence: Synthetic oligonucleotide
  Antisense strand to SEQ ID NO: 2271334
auacucagacucauuucuu

SEQ ID NO: 2271336 - RNA, 19 nt, Artificial Sequence
  Description of Artificial Sequence: Synthetic oligonucleotide
  Sense strand starting at position 3398 of SEQ ID NO: 1884512
agcuauacagcugaugaaa

SEQ ID NO: 2271337 - RNA, 19 nt, Artificial Sequence
  Description of Artificial Sequence: Synthetic oligonucleotide
  Antisense strand to SEQ ID NO: 2271336
uuucaucagcuguauagcu

SEQ ID NO: 2271338 - RNA, 19 nt, Artificial Sequence
  Description of Artificial Sequence: Synthetic oligonucleotide
  Sense strand starting at position 3509 of SEQ ID NO: 1884512
gcaguauuacuacagccua

SEQ ID NO: 2271339 - RNA, 19 nt, Artificial Sequence
  Description of Artificial Sequence: Synthetic oligonucleotide
  Antisense strand to SEQ ID NO: 2271338
uaggcuguaguaauacugc

SEQ ID NO: 2271340 - RNA, 19 nt, Artificial Sequence
  Description of Artificial Sequence: Synthetic oligonucleotide
  Sense strand starting at position 3680 of SEQ ID NO: 1884512
gguaucuugcauuagugaa

SEQ ID NO: 2271341 - RNA, 19 nt, Artificial Sequence
  Description of Artificial Sequence: Synthetic oligonucleotide
  Antisense strand to SEQ ID NO: 2271340
uucacuaaugcaagauacc

SEQ ID NO: 2271342 - RNA, 19 nt, Artificial Sequence
  Description of Artificial Sequence: Synthetic oligonucleotide
  Sense strand starting at position 11 of SEQ ID NO: 1884513
cuagcugaugugggacaaa

SEQ ID NO: 2271343 - RNA, 19 nt, Artificial Sequence
  Description of Artificial Sequence: Synthetic oligonucleotide
  Antisense strand to SEQ ID NO: 2271342
uuugucccacaucagcuag

SEQ ID NO: 2271344 - RNA, 19 nt, Artificial Sequence
  Description of Artificial Sequence: Synthetic oligonucleotide
  Sense strand starting at position 66 of SEQ ID NO: 1884513
ggccauaaaucugcuagga

SEQ ID NO: 2271345 - RNA, 19 nt, Artificial Sequence
  Description of Artificial Sequence: Synthetic oligonucleotide
  Antisense strand to SEQ ID NO: 2271344
uccuagcagauuuauggcc

SEQ ID NO: 2271346 - RNA, 19 nt, Artificial Sequence
  Description of Artificial Sequence: Synthetic oligonucleotide
  Sense strand starting at position 96 of SEQ ID NO: 1884513
ugcccuuuagcccagaagu

SEQ ID NO: 2271347 - RNA, 19 nt, Artificial Sequence
  Description of Artificial Sequence: Synthetic oligonucleotide
  Antisense strand to SEQ ID NO: 2271346
acuucugggcuaaagggca

SEQ ID NO: 2271348 - RNA, 19 nt, Artificial Sequence
  Description of Artificial Sequence: Synthetic oligonucleotide
  Sense strand starting at position 98 of SEQ ID NO: 1884513
cccuuuagcccagaaguau

SEQ ID NO: 2271349 - RNA, 19 nt, Artificial Sequence
  Description of Artificial Sequence: Synthetic oligonucleotide
  Antisense strand to SEQ ID NO: 2271348
auacuucugggcuaaaggg

SEQ ID NO: 2271350 - RNA, 19 nt, Artificial Sequence
  Description of Artificial Sequence: Synthetic oligonucleotide
  Sense strand starting at position 135 of SEQ ID NO: 1884513
gggaaagccucuuuaaacu

SEQ ID NO: 2271351 - RNA, 19 nt, Artificial Sequence
  Description of Artificial Sequence: Synthetic oligonucleotide
  Antisense strand to SEQ ID NO: 2271350
aguuuaaagaggcuuuccc

SEQ ID NO: 2271352 - RNA, 19 nt, Artificial Sequence
  Description of Artificial Sequence: Synthetic oligonucleotide
  Sense strand starting at position 158 of SEQ ID NO: 1884513
guucucuccagcuggagaa

SEQ ID NO: 2271353 - RNA, 19 nt, Artificial Sequence
  Description of Artificial Sequence: Synthetic oligonucleotide
  Antisense strand to SEQ ID NO: 2271352
uucuccagcuggagagaac

SEQ ID NO: 2271354 - RNA, 19 nt, Artificial Sequence
  Description of Artificial Sequence: Synthetic oligonucleotide
  Sense strand starting at position 396 of SEQ ID NO: 1884513
ucaagaaguaguugggaga

SEQ ID NO: 2271355 - RNA, 19 nt, Artificial Sequence
  Description of Artificial Sequence: Synthetic oligonucleotide
  Antisense strand to SEQ ID NO: 2271354
ucucccaacuacuucuuga

SEQ ID NO: 2271356 - RNA, 19 nt, Artificial Sequence
  Description of Artificial Sequence: Synthetic oligonucleotide
  Sense strand starting at position 420 of SEQ ID NO: 1884513
agaaacaaguguucuuaau

SEQ ID NO: 2271357 - RNA, 19 nt, Artificial Sequence
  Description of Artificial Sequence: Synthetic oligonucleotide
  Antisense strand to SEQ ID NO: 2271356
auuaagaacacuuguuucu

SEQ ID NO: 2271358 - RNA, 19 nt, Artificial Sequence
  Description of Artificial Sequence: Synthetic oligonucleotide
  Sense strand starting at position 455 of SEQ ID NO: 1884513
cuaggagaauccuucgucu

SEQ ID NO: 2271359 - RNA, 19 nt, Artificial Sequence
  Description of Artificial Sequence: Synthetic oligonucleotide
  Antisense strand to SEQ ID NO: 2271358
agacgaaggauucuccuag

SEQ ID NO: 2271360 - RNA, 19 nt, Artificial Sequence
  Description of Artificial Sequence: Synthetic oligonucleotide
  Sense strand starting at position 457 of SEQ ID NO: 1884513
aggagaauccuucgucuaa

SEQ ID NO: 2271361 - RNA, 19 nt, Artificial Sequence
  Description of Artificial Sequence: Synthetic oligonucleotide
  Antisense strand to SEQ ID NO: 2271360
uuagacgaaggauucuccu

SEQ ID NO: 2271362 - RNA, 19 nt, Artificial Sequence
  Description of Artificial Sequence: Synthetic oligonucleotide
  Sense strand starting at position 458 of SEQ ID NO: 1884513
ggagaauccuucgucuaaa

SEQ ID NO: 2271363 - RNA, 19 nt, Artificial Sequence
  Description of Artificial Sequence: Synthetic oligonucleotide
  Antisense strand to SEQ ID NO: 2271362
uuuagacgaaggauucucc

SEQ ID NO: 2271364 - RNA, 19 nt, Artificial Sequence
  Description of Artificial Sequence: Synthetic oligonucleotide
  Sense strand starting at position 565 of SEQ ID NO: 1884513
guaaaucuguuugcuagga

SEQ ID NO: 2271365 - RNA, 19 nt, Artificial Sequence
  Description of Artificial Sequence: Synthetic oligonucleotide
  Antisense strand to SEQ ID NO: 2271364
uccuagcaaacagauuuac

SEQ ID NO: 2271366 - RNA, 19 nt, Artificial Sequence
  Description of Artificial Sequence: Synthetic oligonucleotide
  Sense strand starting at position 733 of SEQ ID NO: 1884513
gcaacugucucacccagaa

SEQ ID NO: 2271367 - RNA, 19 nt, Artificial Sequence
  Description of Artificial Sequence: Synthetic oligonucleotide
  Antisense strand to SEQ ID NO: 2271366
uucugggugagacaguugc

SEQ ID NO: 2271368 - RNA, 19 nt, Artificial Sequence
  Description of Artificial Sequence: Synthetic oligonucleotide
  Sense strand starting at position 838 of SEQ ID NO: 1884513
ucuccucucuggguaacau

SEQ ID NO: 2271369 - RNA, 19 nt, Artificial Sequence
  Description of Artificial Sequence: Synthetic oligonucleotide
  Antisense strand to SEQ ID NO: 2271368
auguuacccagagaggaga

SEQ ID NO: 2271370 - RNA, 19 nt, Artificial Sequence
  Description of Artificial Sequence: Synthetic oligonucleotide
  Sense strand starting at position 839 of SEQ ID NO: 1884513
cuccucucuggguaacauu

SEQ ID NO: 2271371 - RNA, 19 nt, Artificial Sequence
  Description of Artificial Sequence: Synthetic oligonucleotide
  Antisense strand to SEQ ID NO: 2271370
aauguuacccagagaggag

SEQ ID NO: 2271372 - RNA, 19 nt, Artificial Sequence
  Description of Artificial Sequence: Synthetic oligonucleotide
  Sense strand starting at position 940 of SEQ ID NO: 1884513
gcccaccaucccgaaagau

SEQ ID NO: 2271373 - RNA, 19 nt, Artificial Sequence
  Description of Artificial Sequence: Synthetic oligonucleotide
  Antisense strand to SEQ ID NO: 2271372
aucuuucgggauggugggc

SEQ ID NO: 2271374 - RNA, 19 nt, Artificial Sequence
  Description of Artificial Sequence: Synthetic oligonucleotide
  Sense strand starting at position 1083 of SEQ ID NO: 1884513
gaugaagauugagcugcaa

SEQ ID NO: 2271375 - RNA, 19 nt, Artificial Sequence
  Description of Artificial Sequence: Synthetic oligonucleotide
  Antisense strand to SEQ ID NO: 2271374
uugcagcucaaucuucauc

SEQ ID NO: 2271376 - RNA, 19 nt, Artificial Sequence
  Description of Artificial Sequence: Synthetic oligonucleotide
  Sense strand starting at position 1222 of SEQ ID NO: 1884513
cggaaugucugaguuacau

SEQ ID NO: 2271377 - RNA, 19 nt, Artificial Sequence
  Description of Artificial Sequence: Synthetic oligonucleotide
  Antisense strand to SEQ ID NO: 2271376
auguaacucagacauuccg

SEQ ID NO: 2271378 - RNA, 19 nt, Artificial Sequence
  Description of Artificial Sequence: Synthetic oligonucleotide
  Sense strand starting at position 1232 of SEQ ID NO: 1884513
gaguuacauucccugcuga

SEQ ID NO: 2271379 - RNA, 19 nt, Artificial Sequence
  Description of Artificial Sequence: Synthetic oligonucleotide
  Antisense strand to SEQ ID NO: 2271378
ucagcagggaauguaacuc

SEQ ID NO: 2271380 - RNA, 19 nt, Artificial Sequence
  Description of Artificial Sequence: Synthetic oligonucleotide
  Sense strand starting at position 1473 of SEQ ID NO: 1884513
gugcuaggcccugaggauu

SEQ ID NO: 2271381 - RNA, 19 nt, Artificial Sequence
  Description of Artificial Sequence: Synthetic oligonucleotide
  Antisense strand to SEQ ID NO: 2271380
aauccucagggccuagcac

SEQ ID NO: 2271382 - RNA, 19 nt, Artificial Sequence
  Description of Artificial Sequence: Synthetic oligonucleotide
  Sense strand starting at position 1486 of SEQ ID NO: 1884513
aggauuccacagugaucaa

SEQ ID NO: 2271383 - RNA, 19 nt, Artificial Sequence
  Description of Artificial Sequence: Synthetic oligonucleotide
  Antisense strand to SEQ ID NO: 2271382
uugaucacuguggaauccu

SEQ ID NO: 2271384 - RNA, 19 nt, Artificial Sequence
  Description of Artificial Sequence: Synthetic oligonucleotide
  Sense strand starting at position 1793 of SEQ ID NO: 1884513
ccaagugucaggcacauga

SEQ ID NO: 2271385 - RNA, 19 nt, Artificial Sequence
  Description of Artificial Sequence: Synthetic oligonucleotide
  Antisense strand to SEQ ID NO: 2271384
ucaugugccugacacuugg

SEQ ID NO: 2271386 - RNA, 19 nt, Artificial Sequence
  Description of Artificial Sequence: Synthetic oligonucleotide
  Sense strand starting at position 1804 of SEQ ID NO: 1884513
gcacaugacugugugauuu

SEQ ID NO: 2271387 - RNA, 19 nt, Artificial Sequence
  Description of Artificial Sequence: Synthetic oligonucleotide
  Antisense strand to SEQ ID NO: 2271386
aaaucacacagucaugugc

SEQ ID NO: 2271388 - RNA, 19 nt, Artificial Sequence
  Description of Artificial Sequence: Synthetic oligonucleotide
  Sense strand starting at position 1850 of SEQ ID NO: 1884513
acagaaugaacguguguua

SEQ ID NO: 2271389 - RNA, 19 nt, Artificial Sequence
  Description of Artificial Sequence: Synthetic oligonucleotide
  Antisense strand to SEQ ID NO: 2271388
uaacacacguucauucugu

SEQ ID NO: 2271390 - RNA, 19 nt, Artificial Sequence
  Description of Artificial Sequence: Synthetic oligonucleotide
  Sense strand starting at position 1853 of SEQ ID NO: 1884513
gaaugaacguguguuauuu

SEQ ID NO: 2271391 - RNA, 19 nt, Artificial Sequence
  Description of Artificial Sequence: Synthetic oligonucleotide
  Antisense strand to SEQ ID NO: 2271390
aaauaacacacguucauuc

SEQ ID NO: 2271392 - RNA, 19 nt, Artificial Sequence
  Description of Artificial Sequence: Synthetic oligonucleotide
  Sense strand starting at position 2403 of SEQ ID NO: 1884513
guguauguuuaugcauuua

SEQ ID NO: 2271393 - RNA, 19 nt, Artificial Sequence
  Description of Artificial Sequence: Synthetic oligonucleotide
  Antisense strand to SEQ ID NO: 2271392
uaaaugcauaaacauacac

SEQ ID NO: 2271394 - RNA, 19 nt, Artificial Sequence
  Description of Artificial Sequence: Synthetic oligonucleotide
  Sense strand starting at position 2455 of SEQ ID NO: 1884513
ggucauuacuacucuucca

SEQ ID NO: 2271395 - RNA, 19 nt, Artificial Sequence
  Description of Artificial Sequence: Synthetic oligonucleotide
  Antisense strand to SEQ ID NO: 2271394
uggaagaguaguaaugacc

SEQ ID NO: 2271396 - RNA, 19 nt, Artificial Sequence
  Description of Artificial Sequence: Synthetic oligonucleotide
  Sense strand starting at position 2657 of SEQ ID NO: 1884513
uggaguacugcccaguaau

SEQ ID NO: 2271397 - RNA, 19 nt, Artificial Sequence
  Description of Artificial Sequence: Synthetic oligonucleotide
  Antisense strand to SEQ ID NO: 2271396
auuacugggcaguacucca

SEQ ID NO: 2271398 - RNA, 19 nt, Artificial Sequence
  Description of Artificial Sequence: Synthetic oligonucleotide
  Sense strand starting at position 2660 of SEQ ID NO: 1884513
aguacugcccaguaauaac

SEQ ID NO: 2271399 - RNA, 19 nt, Artificial Sequence
  Description of Artificial Sequence: Synthetic oligonucleotide
  Antisense strand to SEQ ID NO: 2271398
guuauuacugggcaguacu

SEQ ID NO: 2271400 - RNA, 19 nt, Artificial Sequence
  Description of Artificial Sequence: Synthetic oligonucleotide
  Sense strand starting at position 2750 of SEQ ID NO: 1884513
uacugauugccacguaaga

SEQ ID NO: 2271401 - RNA, 19 nt, Artificial Sequence
  Description of Artificial Sequence: Synthetic oligonucleotide
  Antisense strand to SEQ ID NO: 2271400
ucuuacguggcaaucagua

SEQ ID NO: 2271402 - RNA, 19 nt, Artificial Sequence
  Description of Artificial Sequence: Synthetic oligonucleotide
  Sense strand starting at position 2752 of SEQ ID NO: 1884513
cugauugccacguaagaau

SEQ ID NO: 2271403 - RNA, 19 nt, Artificial Sequence
  Description of Artificial Sequence: Synthetic oligonucleotide
  Antisense strand to SEQ ID NO: 2271402
auucuuacguggcaaucag

SEQ ID NO: 2271404 - RNA, 19 nt, Artificial Sequence
  Description of Artificial Sequence: Synthetic oligonucleotide
  Sense strand starting at position 2920 of SEQ ID NO: 1884513
ggagaagagcccugccuua

SEQ ID NO: 2271405 - RNA, 19 nt, Artificial Sequence
  Description of Artificial Sequence: Synthetic oligonucleotide
  Antisense strand to SEQ ID NO: 2271404
uaaggcagggcucuucucc

SEQ ID NO: 2271406 - RNA, 19 nt, Artificial Sequence
  Description of Artificial Sequence: Synthetic oligonucleotide
  Sense strand starting at position 3004 of SEQ ID NO: 1884513
gcaaacguccaugaaguga

SEQ ID NO: 2271407 - RNA, 19 nt, Artificial Sequence
  Description of Artificial Sequence: Synthetic oligonucleotide
  Antisense strand to SEQ ID NO: 2271406
ucacuucauggacguuugc

SEQ ID NO: 2271408 - RNA, 19 nt, Artificial Sequence
  Description of Artificial Sequence: Synthetic oligonucleotide
  Sense strand starting at position 3009 of SEQ ID NO: 1884513
cguccaugaagugauaacu

SEQ ID NO: 2271409 - RNA, 19 nt, Artificial Sequence
  Description of Artificial Sequence: Synthetic oligonucleotide
  Antisense strand to SEQ ID NO: 2271408
aguuaucacuucauggacg

SEQ ID NO: 2271410 - RNA, 19 nt, Artificial Sequence
  Description of Artificial Sequence: Synthetic oligonucleotide
  Sense strand starting at position 3229 of SEQ ID NO: 1884513
gucugucauccauaagcag

SEQ ID NO: 2271411 - RNA, 19 nt, Artificial Sequence
  Description of Artificial Sequence: Synthetic oligonucleotide
  Antisense strand to SEQ ID NO: 2271410
cugcuuauggaugacagac

SEQ ID NO: 2271412 - RNA, 19 nt, Artificial Sequence
  Description of Artificial Sequence: Synthetic oligonucleotide
  Sense strand starting at position 3865 of SEQ ID NO: 1884513
uaugguguccuggaguaac

SEQ ID NO: 2271413 - RNA, 19 nt, Artificial Sequence
  Description of Artificial Sequence: Synthetic oligonucleotide
  Antisense strand to SEQ ID NO: 2271412
guuacuccaggacaccaua

SEQ ID NO: 2271414 - RNA, 19 nt, Artificial Sequence
  Description of Artificial Sequence: Synthetic oligonucleotide
  Sense strand starting at position 3877 of SEQ ID NO: 1884513
gaguaacacuaguugagau

SEQ ID NO: 2271415 - RNA, 19 nt, Artificial Sequence
  Description of Artificial Sequence: Synthetic oligonucleotide
  Antisense strand to SEQ ID NO: 2271414
aucucaacuaguguuacuc

SEQ ID NO: 2271416 - RNA, 19 nt, Artificial Sequence
  Description of Artificial Sequence: Synthetic oligonucleotide
  Sense strand starting at position 3902 of SEQ ID NO: 1884513
ccaguauuugcugacgucu

SEQ ID NO: 2271417 - RNA, 19 nt, Artificial Sequence
  Description of Artificial Sequence: Synthetic oligonucleotide
  Antisense strand to SEQ ID NO: 2271416
agacgucagcaaauacugg

SEQ ID NO: 2271418 - RNA, 19 nt, Artificial Sequence
  Description of Artificial Sequence: Synthetic oligonucleotide
  Sense strand starting at position 3949 of SEQ ID NO: 1884513
ccaauauuguuauuggcaa

SEQ ID NO: 2271419 - RNA, 19 nt, Artificial Sequence
  Description of Artificial Sequence: Synthetic oligonucleotide
  Antisense strand to SEQ ID NO: 2271418
uugccaauaacaauauugg

SEQ ID NO: 2271420 - RNA, 19 nt, Artificial Sequence
  Description of Artificial Sequence: Synthetic oligonucleotide
  Sense strand starting at position 3960 of SEQ ID NO: 1884513
auuggcaauugcucuauuu

SEQ ID NO: 2271421 - RNA, 19 nt, Artificial Sequence
  Description of Artificial Sequence: Synthetic oligonucleotide
  Antisense strand to SEQ ID NO: 2271420
aaauagagcaauugccaau

SEQ ID NO: 2271422 - RNA, 19 nt, Artificial Sequence
  Description of Artificial Sequence: Synthetic oligonucleotide
  Sense strand starting at position 189 of SEQ ID NO: 1884514
ggagcuccuaagggaauua

SEQ ID NO: 2271423 - RNA, 19 nt, Artificial Sequence
  Description of Artificial Sequence: Synthetic oligonucleotide
  Antisense strand to SEQ ID NO: 2271422
uaauucccuuaggagcucc

SEQ ID NO: 2271424 - RNA, 19 nt, Artificial Sequence
  Description of Artificial Sequence: Synthetic oligonucleotide
  Sense strand starting at position 390 of SEQ ID NO: 1884514
aggcaagauucucuuccca

SEQ ID NO: 2271425 - RNA, 19 nt, Artificial Sequence
  Description of Artificial Sequence: Synthetic oligonucleotide
  Antisense strand to SEQ ID NO: 2271424
ugggaagagaaucuugccu

SEQ ID NO: 2271426 - RNA, 19 nt, Artificial Sequence
  Description of Artificial Sequence: Synthetic oligonucleotide
  Sense strand starting at position 392 of SEQ ID NO: 1884514
gcaagauucucuucccagc

SEQ ID NO: 2271427 - RNA, 19 nt, Artificial Sequence
  Description of Artificial Sequence: Synthetic oligonucleotide
  Antisense strand to SEQ ID NO: 2271426
gcugggaagagaaucuugc

SEQ ID NO: 2271428 - RNA, 19 nt, Artificial Sequence
  Description of Artificial Sequence: Synthetic oligonucleotide
  Sense strand starting at position 486 of SEQ ID NO: 1884514
cccaguggucccuacguca

SEQ ID NO: 2271429 - RNA, 19 nt, Artificial Sequence
  Description of Artificial Sequence: Synthetic oligonucleotide
  Antisense strand to SEQ ID NO: 2271428
ugacguagggaccacuggg

SEQ ID NO: 2271430 - RNA, 19 nt, Artificial Sequence
  Description of Artificial Sequence: Synthetic oligonucleotide
  Sense strand starting at position 499 of SEQ ID NO: 1884514
acgucaagguggucagaau

SEQ ID NO: 2271431 - RNA, 19 nt, Artificial Sequence
  Description of Artificial Sequence: Synthetic oligonucleotide
  Antisense strand to SEQ ID NO: 2271430
auucugaccaccuugacgu

SEQ ID NO: 2271432 - RNA, 19 nt, Artificial Sequence
  Description of Artificial Sequence: Synthetic oligonucleotide
  Sense strand starting at position 500 of SEQ ID NO: 1884514
cgucaagguggucagaaua

SEQ ID NO: 2271433 - RNA, 19 nt, Artificial Sequence
  Description of Artificial Sequence: Synthetic oligonucleotide
  Antisense strand to SEQ ID NO: 2271432
uauucugaccaccuugacg

SEQ ID NO: 2271434 - RNA, 19 nt, Artificial Sequence
  Description of Artificial Sequence: Synthetic oligonucleotide
  Sense strand starting at position 704 of SEQ ID NO: 1884514
acaguucucgcucagcaaa

SEQ ID NO: 2271435 - RNA, 19 nt, Artificial Sequence
  Description of Artificial Sequence: Synthetic oligonucleotide
  Antisense strand to SEQ ID NO: 2271434
uuugcugagcgagaacugu

SEQ ID NO: 2271436 - RNA, 19 nt, Artificial Sequence
  Description of Artificial Sequence: Synthetic oligonucleotide
  Sense strand starting at position 726 of SEQ ID NO: 1884514
ggcugugagucccugaaau

SEQ ID NO: 2271437 - RNA, 19 nt, Artificial Sequence
  Description of Artificial Sequence: Synthetic oligonucleotide
  Antisense strand to SEQ ID NO: 2271436
auuucagggacucacagcc

SEQ ID NO: 2271438 - RNA, 19 nt, Artificial Sequence
  Description of Artificial Sequence: Synthetic oligonucleotide
  Sense strand starting at position 728 of SEQ ID NO: 1884514
cugugagucccugaaauuc

SEQ ID NO: 2271439 - RNA, 19 nt, Artificial Sequence
  Description of Artificial Sequence: Synthetic oligonucleotide
  Antisense strand to SEQ ID NO: 2271438
gaauuucagggacucacag

SEQ ID NO: 2271440 - RNA, 19 nt, Artificial Sequence
  Description of Artificial Sequence: Synthetic oligonucleotide
  Sense strand starting at position 816 of SEQ ID NO: 1884514
agcccugcgccucuuaaau

SEQ ID NO: 2271441 - RNA, 19 nt, Artificial Sequence
  Description of Artificial Sequence: Synthetic oligonucleotide
  Antisense strand to SEQ ID NO: 2271440
auuuaagaggcgcagggcu

SEQ ID NO: 2271442 - RNA, 19 nt, Artificial Sequence
  Description of Artificial Sequence: Synthetic oligonucleotide
  Sense strand starting at position 839 of SEQ ID NO: 1884514
gucauuacuuucucaacga

SEQ ID NO: 2271443 - RNA, 19 nt, Artificial Sequence
  Description of Artificial Sequence: Synthetic oligonucleotide
  Antisense strand to SEQ ID NO: 2271442
ucguugagaaaguaaugac

SEQ ID NO: 2271444 - RNA, 19 nt, Artificial Sequence
  Description of Artificial Sequence: Synthetic oligonucleotide
  Sense strand starting at position 843 of SEQ ID NO: 1884514
uuacuuucucaacgagauc

SEQ ID NO: 2271445 - RNA, 19 nt, Artificial Sequence
  Description of Artificial Sequence: Synthetic oligonucleotide
  Antisense strand to SEQ ID NO: 2271444
gaucucguugagaaaguaa

SEQ ID NO: 2271446 - RNA, 19 nt, Artificial Sequence
  Description of Artificial Sequence: Synthetic oligonucleotide
  Sense strand starting at position 1878 of SEQ ID NO: 1884514
uugcgugucaucgugagca

SEQ ID NO: 2271447 - RNA, 19 nt, Artificial Sequence
  Description of Artificial Sequence: Synthetic oligonucleotide
  Antisense strand to SEQ ID NO: 2271446
ugcucacgaugacacgcaa

SEQ ID NO: 2271448 - RNA, 19 nt, Artificial Sequence
  Description of Artificial Sequence: Synthetic oligonucleotide
  Sense strand starting at position 1881 of SEQ ID NO: 1884514
cgugucaucgugagcaugu

SEQ ID NO: 2271449 - RNA, 19 nt, Artificial Sequence
  Description of Artificial Sequence: Synthetic oligonucleotide
  Antisense strand to SEQ ID NO: 2271448
acaugcucacgaugacacg

SEQ ID NO: 2271450 - RNA, 19 nt, Artificial Sequence
  Description of Artificial Sequence: Synthetic oligonucleotide
  Sense strand starting at position 1910 of SEQ ID NO: 1884514
gugagagguccugggaaac

SEQ ID NO: 2271451 - RNA, 19 nt, Artificial Sequence
  Description of Artificial Sequence: Synthetic oligonucleotide
  Antisense strand to SEQ ID NO: 2271450
guuucccaggaccucucac

SEQ ID NO: 2271452 - RNA, 19 nt, Artificial Sequence
  Description of Artificial Sequence: Synthetic oligonucleotide
  Sense strand starting at position 2078 of SEQ ID NO: 1884514
cauggauaucugcaugcga

SEQ ID NO: 2271453 - RNA, 19 nt, Artificial Sequence
  Description of Artificial Sequence: Synthetic oligonucleotide
  Antisense strand to SEQ ID NO: 2271452
ucgcaugcagauauccaug

SEQ ID NO: 2271454 - RNA, 19 nt, Artificial Sequence
  Description of Artificial Sequence: Synthetic oligonucleotide
  Sense strand starting at position 2080 of SEQ ID NO: 1884514
uggauaucugcaugcgaug

SEQ ID NO: 2271455 - RNA, 19 nt, Artificial Sequence
  Description of Artificial Sequence: Synthetic oligonucleotide
  Antisense strand to SEQ ID NO: 2271454
caucgcaugcagauaucca

SEQ ID NO: 2271456 - RNA, 19 nt, Artificial Sequence
  Description of Artificial Sequence: Synthetic oligonucleotide
  Sense strand starting at position 2140 of SEQ ID NO: 1884514
caaggauaucugcaugcga

SEQ ID NO: 2271457 - RNA, 19 nt, Artificial Sequence
  Description of Artificial Sequence: Synthetic oligonucleotide
  Antisense strand to SEQ ID NO: 2271456
ucgcaugcagauauccuug

SEQ ID NO: 2271458 - RNA, 19 nt, Artificial Sequence
  Description of Artificial Sequence: Synthetic oligonucleotide
  Sense strand starting at position 2142 of SEQ ID NO: 1884514
aggauaucugcaugcgaug

SEQ ID NO: 2271459 - RNA, 19 nt, Artificial Sequence
  Description of Artificial Sequence: Synthetic oligonucleotide
  Antisense strand to SEQ ID NO: 2271458
caucgcaugcagauauccu

SEQ ID NO: 2271460 - RNA, 19 nt, Artificial Sequence
  Description of Artificial Sequence: Synthetic oligonucleotide
  Sense strand starting at position 2255 of SEQ ID NO: 1884514
acgaguucacguggauauc

SEQ ID NO: 2271461 - RNA, 19 nt, Artificial Sequence
  Description of Artificial Sequence: Synthetic oligonucleotide
  Antisense strand to SEQ ID NO: 2271460
gauauccacgugaacucgu

SEQ ID NO: 2271462 - RNA, 19 nt, Artificial Sequence
  Description of Artificial Sequence: Synthetic oligonucleotide
  Sense strand starting at position 2256 of SEQ ID NO: 1884514
cgaguucacguggauaucu

SEQ ID NO: 2271463 - RNA, 19 nt, Artificial Sequence
  Description of Artificial Sequence: Synthetic oligonucleotide
  Antisense strand to SEQ ID NO: 2271462
agauauccacgugaacucg

SEQ ID NO: 2271464 - RNA, 19 nt, Artificial Sequence
  Description of Artificial Sequence: Synthetic oligonucleotide
  Sense strand starting at position 2265 of SEQ ID NO: 1884514
guggauaucugcacgcgau

SEQ ID NO: 2271465 - RNA, 19 nt, Artificial Sequence
  Description of Artificial Sequence: Synthetic oligonucleotide
  Antisense strand to SEQ ID NO: 2271464
aucgcgugcagauauccac

SEQ ID NO: 2271466 - RNA, 19 nt, Artificial Sequence
  Description of Artificial Sequence: Synthetic oligonucleotide
  Sense strand starting at position 2326 of SEQ ID NO: 1884514
cauggauaucugcacguga

SEQ ID NO: 2271467 - RNA, 19 nt, Artificial Sequence
  Description of Artificial Sequence: Synthetic oligonucleotide
  Antisense strand to SEQ ID NO: 2271466
ucacgugcagauauccaug

SEQ ID NO: 2271468 - RNA, 19 nt, Artificial Sequence
  Description of Artificial Sequence: Synthetic oligonucleotide
  Sense strand starting at position 2328 of SEQ ID NO: 1884514
uggauaucugcacgugaug

SEQ ID NO: 2271469 - RNA, 19 nt, Artificial Sequence
  Description of Artificial Sequence: Synthetic oligonucleotide
  Antisense strand to SEQ ID NO: 2271468
caucacgugcagauaucca

SEQ ID NO: 2271470 - RNA, 19 nt, Artificial Sequence
  Description of Artificial Sequence: Synthetic oligonucleotide
  Sense strand starting at position 2388 of SEQ ID NO: 1884514
cauggauaucugcacgcga

SEQ ID NO: 2271471 - RNA, 19 nt, Artificial Sequence
  Description of Artificial Sequence: Synthetic oligonucleotide
  Antisense strand to SEQ ID NO: 2271470
ucgcgugcagauauccaug

SEQ ID NO: 2271472 - RNA, 19 nt, Artificial Sequence
  Description of Artificial Sequence: Synthetic oligonucleotide
  Sense strand starting at position 2674 of SEQ ID NO: 1884514
gcgucuuacacggacauga

SEQ ID NO: 2271473 - RNA, 19 nt, Artificial Sequence
  Description of Artificial Sequence: Synthetic oligonucleotide
  Antisense strand to SEQ ID NO: 2271472
ucauguccguguaagacgc

SEQ ID NO: 2271474 - RNA, 19 nt, Artificial Sequence
  Description of Artificial Sequence: Synthetic oligonucleotide
  Sense strand starting at position 2676 of SEQ ID NO: 1884514
gucuuacacggacaugagu

SEQ ID NO: 2271475 - RNA, 19 nt, Artificial Sequence
  Description of Artificial Sequence: Synthetic oligonucleotide
  Antisense strand to SEQ ID NO: 2271474
acucauguccguguaagac

SEQ ID NO: 2271476 - RNA, 19 nt, Artificial Sequence
  Description of Artificial Sequence: Synthetic oligonucleotide
  Sense strand starting at position 2698 of SEQ ID NO: 1884514
cauggauauuugcauguga

SEQ ID NO: 2271477 - RNA, 19 nt, Artificial Sequence
  Description of Artificial Sequence: Synthetic oligonucleotide
  Antisense strand to SEQ ID NO: 2271476
ucacaugcaaauauccaug

SEQ ID NO: 2271478 - RNA, 19 nt, Artificial Sequence
  Description of Artificial Sequence: Synthetic oligonucleotide
  Sense strand starting at position 2711 of SEQ ID NO: 1884514
augugauuaucugugcaua

SEQ ID NO: 2271479 - RNA, 19 nt, Artificial Sequence
  Description of Artificial Sequence: Synthetic oligonucleotide
  Antisense strand to SEQ ID NO: 2271478
uaugcacagauaaucacau

SEQ ID NO: 2271480 - RNA, 19 nt, Artificial Sequence
  Description of Artificial Sequence: Synthetic oligonucleotide
  Sense strand starting at position 2759 of SEQ ID NO: 1884514
guguguaugugcaugauga

SEQ ID NO: 2271481 - RNA, 19 nt, Artificial Sequence
  Description of Artificial Sequence: Synthetic oligonucleotide
  Antisense strand to SEQ ID NO: 2271480
ucaucaugcacauacacac

SEQ ID NO: 2271482 - RNA, 19 nt, Artificial Sequence
  Description of Artificial Sequence: Synthetic oligonucleotide
  Sense strand starting at position 2761 of SEQ ID NO: 1884514
guguaugugcaugaugaug

SEQ ID NO: 2271483 - RNA, 19 nt, Artificial Sequence
  Description of Artificial Sequence: Synthetic oligonucleotide
  Antisense strand to SEQ ID NO: 2271482
caucaucaugcacauacac

SEQ ID NO: 2271484 - RNA, 19 nt, Artificial Sequence
  Description of Artificial Sequence: Synthetic oligonucleotide
  Sense strand starting at position 2770 of SEQ ID NO: 1884514
caugaugauguguauugua

SEQ ID NO: 2271485 - RNA, 19 nt, Artificial Sequence
  Description of Artificial Sequence: Synthetic oligonucleotide
  Antisense strand to SEQ ID NO: 2271484
uacaauacacaucaucaug

SEQ ID NO: 2271486 - RNA, 19 nt, Artificial Sequence
  Description of Artificial Sequence: Synthetic oligonucleotide
  Sense strand starting at position 2778 of SEQ ID NO: 1884514
uguguauuguauccaaaca

SEQ ID NO: 2271487 - RNA, 19 nt, Artificial Sequence
  Description of Artificial Sequence: Synthetic oligonucleotide
  Antisense strand to SEQ ID NO: 2271486
uguuuggauacaauacaca

SEQ ID NO: 2271488 - RNA, 19 nt, Artificial Sequence
  Description of Artificial Sequence: Synthetic oligonucleotide
  Sense strand starting at position 2786 of SEQ ID NO: 1884514
guauccaaacaugauugua

SEQ ID NO: 2271489 - RNA, 19 nt, Artificial Sequence
  Description of Artificial Sequence: Synthetic oligonucleotide
  Antisense strand to SEQ ID NO: 2271488
uacaaucauguuuggauac

SEQ ID NO: 2271490 - RNA, 19 nt, Artificial Sequence
  Description of Artificial Sequence: Synthetic oligonucleotide
  Sense strand starting at position 2809 of SEQ ID NO: 1884514
ugugacuguguaugaucau

SEQ ID NO: 2271491 - RNA, 19 nt, Artificial Sequence
  Description of Artificial Sequence: Synthetic oligonucleotide
  Antisense strand to SEQ ID NO: 2271490
augaucauacacagucaca

SEQ ID NO: 2271492 - RNA, 19 nt, Artificial Sequence
  Description of Artificial Sequence: Synthetic oligonucleotide
  Sense strand starting at position 2902 of SEQ ID NO: 1884514
ggcuguauuguauauaugu

SEQ ID NO: 2271493 - RNA, 19 nt, Artificial Sequence
  Description of Artificial Sequence: Synthetic oligonucleotide
  Antisense strand to SEQ ID NO: 2271492
acauauauacaauacagcc

SEQ ID NO: 2271494 - RNA, 19 nt, Artificial Sequence
  Description of Artificial Sequence: Synthetic oligonucleotide
  Sense strand starting at position 2926 of SEQ ID NO: 1884514
ugugcuuguauggcuguaa

SEQ ID NO: 2271495 - RNA, 19 nt, Artificial Sequence
  Description of Artificial Sequence: Synthetic oligonucleotide
  Antisense strand to SEQ ID NO: 2271494
uuacagccauacaagcaca

SEQ ID NO: 2271496 - RNA, 19 nt, Artificial Sequence
  Description of Artificial Sequence: Synthetic oligonucleotide
  Sense strand starting at position 2930 of SEQ ID NO: 1884514
cuuguauggcuguaauuau

SEQ ID NO: 2271497 - RNA, 19 nt, Artificial Sequence
  Description of Artificial Sequence: Synthetic oligonucleotide
  Antisense strand to SEQ ID NO: 2271496
auaauuacagccauacaag

SEQ ID NO: 2271498 - RNA, 19 nt, Artificial Sequence
  Description of Artificial Sequence: Synthetic oligonucleotide
  Sense strand starting at position 2937 of SEQ ID NO: 1884514
ggcuguaauuaugugugaa

SEQ ID NO: 2271499 - RNA, 19 nt, Artificial Sequence
  Description of Artificial Sequence: Synthetic oligonucleotide
  Antisense strand to SEQ ID NO: 2271498
uucacacauaauuacagcc

SEQ ID NO: 2271500 - RNA, 19 nt, Artificial Sequence
  Description of Artificial Sequence: Synthetic oligonucleotide
  Sense strand starting at position 2940 of SEQ ID NO: 1884514
uguaauuaugugugaacac

SEQ ID NO: 2271501 - RNA, 19 nt, Artificial Sequence
  Description of Artificial Sequence: Synthetic oligonucleotide
  Antisense strand to SEQ ID NO: 2271500
guguucacacauaauuaca

SEQ ID NO: 2271502 - RNA, 19 nt, Artificial Sequence
  Description of Artificial Sequence: Synthetic oligonucleotide
  Sense strand starting at position 28 of SEQ ID NO: 1884515
auuauauggccucaaguca

SEQ ID NO: 2271503 - RNA, 19 nt, Artificial Sequence
  Description of Artificial Sequence: Synthetic oligonucleotide
  Antisense strand to SEQ ID NO: 2271502
ugacuugaggccauauaau

SEQ ID NO: 2271504 - RNA, 19 nt, Artificial Sequence
  Description of Artificial Sequence: Synthetic oligonucleotide
  Sense strand starting at position 35 of SEQ ID NO: 1884515
ggccucaagucauuuauuc

SEQ ID NO: 2271505 - RNA, 19 nt, Artificial Sequence
  Description of Artificial Sequence: Synthetic oligonucleotide
  Antisense strand to SEQ ID NO: 2271504
gaauaaaugacuugaggcc

SEQ ID NO: 2271506 - RNA, 19 nt, Artificial Sequence
  Description of Artificial Sequence: Synthetic oligonucleotide
  Sense strand starting at position 77 of SEQ ID NO: 1884515
agaauauacucugaauuga

SEQ ID NO: 2271507 - RNA, 19 nt, Artificial Sequence
  Description of Artificial Sequence: Synthetic oligonucleotide
  Antisense strand to SEQ ID NO: 2271506
ucaauucagaguauauucu

SEQ ID NO: 2271508 - RNA, 19 nt, Artificial Sequence
  Description of Artificial Sequence: Synthetic oligonucleotide
  Sense strand starting at position 85 of SEQ ID NO: 1884515
cucugaauugaucaagcca

SEQ ID NO: 2271509 - RNA, 19 nt, Artificial Sequence
  Description of Artificial Sequence: Synthetic oligonucleotide
  Antisense strand to SEQ ID NO: 2271508
uggcuugaucaauucagag

SEQ ID NO: 2271510 - RNA, 19 nt, Artificial Sequence
  Description of Artificial Sequence: Synthetic oligonucleotide
  Sense strand starting at position 155 of SEQ ID NO: 1884515
ucaauuauccaggaguggu

SEQ ID NO: 2271511 - RNA, 19 nt, Artificial Sequence
  Description of Artificial Sequence: Synthetic oligonucleotide
  Antisense strand to SEQ ID NO: 2271510
accacuccuggauaauuga

SEQ ID NO: 2271512 - RNA, 19 nt, Artificial Sequence
  Description of Artificial Sequence: Synthetic oligonucleotide
  Sense strand starting at position 158 of SEQ ID NO: 1884515
auuauccaggagugguaaa

SEQ ID NO: 2271513 - RNA, 19 nt, Artificial Sequence
  Description of Artificial Sequence: Synthetic oligonucleotide
  Antisense strand to SEQ ID NO: 2271512
uuuaccacuccuggauaau

SEQ ID NO: 2271514 - RNA, 19 nt, Artificial Sequence
  Description of Artificial Sequence: Synthetic oligonucleotide
  Sense strand starting at position 159 of SEQ ID NO: 1884515
uuauccaggagugguaaau

SEQ ID NO: 2271515 - RNA, 19 nt, Artificial Sequence
  Description of Artificial Sequence: Synthetic oligonucleotide
  Antisense strand to SEQ ID NO: 2271514
auuuaccacuccuggauaa

SEQ ID NO: 2271516 - RNA, 19 nt, Artificial Sequence
  Description of Artificial Sequence: Synthetic oligonucleotide
  Sense strand starting at position 451 of SEQ ID NO: 1884515
agcgaaaccacguauccaa

SEQ ID NO: 2271517 - RNA, 19 nt, Artificial Sequence
  Description of Artificial Sequence: Synthetic oligonucleotide
  Antisense strand to SEQ ID NO: 2271516
uuggauacgugguuucgcu

SEQ ID NO: 2271518 - RNA, 19 nt, Artificial Sequence
  Description of Artificial Sequence: Synthetic oligonucleotide
  Sense strand starting at position 575 of SEQ ID NO: 1884515
cacugugagcaucacgaua

SEQ ID NO: 2271519 - RNA, 19 nt, Artificial Sequence
  Description of Artificial Sequence: Synthetic oligonucleotide
  Antisense strand to SEQ ID NO: 2271518
uaucgugaugcucacagug

SEQ ID NO: 2271520 - RNA, 19 nt, Artificial Sequence
  Description of Artificial Sequence: Synthetic oligonucleotide
  Sense strand starting at position 580 of SEQ ID NO: 1884515
ugagcaucacgauaaccuu

SEQ ID NO: 2271521 - RNA, 19 nt, Artificial Sequence
  Description of Artificial Sequence: Synthetic oligonucleotide
  Antisense strand to SEQ ID NO: 2271520
aagguuaucgugaugcuca

SEQ ID NO: 2271522 - RNA, 19 nt, Artificial Sequence
  Description of Artificial Sequence: Synthetic oligonucleotide
  Sense strand starting at position 702 of SEQ ID NO: 1884515
gcaagagcucuacaccauu

SEQ ID NO: 2271523 - RNA, 19 nt, Artificial Sequence
  Description of Artificial Sequence: Synthetic oligonucleotide
  Antisense strand to SEQ ID NO: 2271522
aaugguguagagcucuugc

SEQ ID NO: 2271524 - RNA, 19 nt, Artificial Sequence
  Description of Artificial Sequence: Synthetic oligonucleotide
  Sense strand starting at position 931 of SEQ ID NO: 1884515
uguaaauuccuauaggguu

SEQ ID NO: 2271525 - RNA, 19 nt, Artificial Sequence
  Description of Artificial Sequence: Synthetic oligonucleotide
  Antisense strand to SEQ ID NO: 2271524
aacccuauaggaauuuaca

SEQ ID NO: 2271526 - RNA, 19 nt, Artificial Sequence
  Description of Artificial Sequence: Synthetic oligonucleotide
  Sense strand starting at position 1000 of SEQ ID NO: 1884515
aucagauacugcuucuaug

SEQ ID NO: 2271527 - RNA, 19 nt, Artificial Sequence
  Description of Artificial Sequence: Synthetic oligonucleotide
  Antisense strand to SEQ ID NO: 2271526
cauagaagcaguaucugau

SEQ ID NO: 2271528 - RNA, 19 nt, Artificial Sequence
  Description of Artificial Sequence: Synthetic oligonucleotide
  Sense strand starting at position 1331 of SEQ ID NO: 1884515
uaaguuuccugaguguuaa

SEQ ID NO: 2271529 - RNA, 19 nt, Artificial Sequence
  Description of Artificial Sequence: Synthetic oligonucleotide
  Antisense strand to SEQ ID NO: 2271528
uuaacacucaggaaacuua

SEQ ID NO: 2271530 - RNA, 19 nt, Artificial Sequence
  Description of Artificial Sequence: Synthetic oligonucleotide
  Sense strand starting at position 1332 of SEQ ID NO: 1884515
aaguuuccugaguguuaau

SEQ ID NO: 2271531 - RNA, 19 nt, Artificial Sequence
  Description of Artificial Sequence: Synthetic oligonucleotide
  Antisense strand to SEQ ID NO: 2271530
auuaacacucaggaaacuu

SEQ ID NO: 2271532 - RNA, 19 nt, Artificial Sequence
  Description of Artificial Sequence: Synthetic oligonucleotide
  Sense strand starting at position 1356 of SEQ ID NO: 1884515
uguaguuauauaggaagau

SEQ ID NO: 2271533 - RNA, 19 nt, Artificial Sequence
  Description of Artificial Sequence: Synthetic oligonucleotide
  Antisense strand to SEQ ID NO: 2271532
aucuuccuauauaacuaca

SEQ ID NO: 2271534 - RNA, 19 nt, Artificial Sequence
  Description of Artificial Sequence: Synthetic oligonucleotide
  Sense strand starting at position 1394 of SEQ ID NO: 1884515
cuugcugaaauagggauua

SEQ ID NO: 2271535 - RNA, 19 nt, Artificial Sequence
  Description of Artificial Sequence: Synthetic oligonucleotide
  Antisense strand to SEQ ID NO: 2271534
uaaucccuauuucagcaag

SEQ ID NO: 2271536 - RNA, 19 nt, Artificial Sequence
  Description of Artificial Sequence: Synthetic oligonucleotide
  Sense strand starting at position 1406 of SEQ ID NO: 1884515
gggauuaaauaacaugaua

SEQ ID NO: 2271537 - RNA, 19 nt, Artificial Sequence
  Description of Artificial Sequence: Synthetic oligonucleotide
  Antisense strand to SEQ ID NO: 2271536
uaucauguuauuuaauccc

SEQ ID NO: 2271538 - RNA, 19 nt, Artificial Sequence
  Description of Artificial Sequence: Synthetic oligonucleotide
  Sense strand starting at position 1489 of SEQ ID NO: 1884515
uguuaauagugacucuaaa

SEQ ID NO: 2271539 - RNA, 19 nt, Artificial Sequence
  Description of Artificial Sequence: Synthetic oligonucleotide
  Antisense strand to SEQ ID NO: 2271538
uuuagagucacuauuaaca

SEQ ID NO: 2271540 - RNA, 19 nt, Artificial Sequence
  Description of Artificial Sequence: Synthetic oligonucleotide
  Sense strand starting at position 1623 of SEQ ID NO: 1884515
uacucagcucugugacaga

SEQ ID NO: 2271541 - RNA, 19 nt, Artificial Sequence
  Description of Artificial Sequence: Synthetic oligonucleotide
  Antisense strand to SEQ ID NO: 2271540
ucugucacagagcugagua

SEQ ID NO: 2271542 - RNA, 19 nt, Artificial Sequence
  Description of Artificial Sequence: Synthetic oligonucleotide
  Sense strand starting at position 1662 of SEQ ID NO: 1884515
uuagguaucugcucacuac

SEQ ID NO: 2271543 - RNA, 19 nt, Artificial Sequence
  Description of Artificial Sequence: Synthetic oligonucleotide
  Antisense strand to SEQ ID NO: 2271542
guagugagcagauaccuaa

SEQ ID NO: 2271544 - RNA, 19 nt, Artificial Sequence
  Description of Artificial Sequence: Synthetic oligonucleotide
  Sense strand starting at position 1665 of SEQ ID NO: 1884515
gguaucugcucacuaccua

SEQ ID NO: 2271545 - RNA, 19 nt, Artificial Sequence
  Description of Artificial Sequence: Synthetic oligonucleotide
  Antisense strand to SEQ ID NO: 2271544
uagguagugagcagauacc

SEQ ID NO: 2271546 - RNA, 19 nt, Artificial Sequence
  Description of Artificial Sequence: Synthetic oligonucleotide
  Sense strand starting at position 1940 of SEQ ID NO: 1884515
gauacaaugugaccucaga

SEQ ID NO: 2271547 - RNA, 19 nt, Artificial Sequence
  Description of Artificial Sequence: Synthetic oligonucleotide
  Antisense strand to SEQ ID NO: 2271546
ucugaggucacauuguauc

SEQ ID NO: 2271548 - RNA, 19 nt, Artificial Sequence
  Description of Artificial Sequence: Synthetic oligonucleotide
  Sense strand starting at position 2143 of SEQ ID NO: 1884515
agaaaucugcaaggcugaa

SEQ ID NO: 2271549 - RNA, 19 nt, Artificial Sequence
  Description of Artificial Sequence: Synthetic oligonucleotide
  Antisense strand to SEQ ID NO: 2271548
uucagccuugcagauuucu

SEQ ID NO: 2271550 - RNA, 19 nt, Artificial Sequence
  Description of Artificial Sequence: Synthetic oligonucleotide
  Sense strand starting at position 2166 of SEQ ID NO: 1884515
ugguauuuccugugcagac

SEQ ID NO: 2271551 - RNA, 19 nt, Artificial Sequence
  Description of Artificial Sequence: Synthetic oligonucleotide
  Antisense strand to SEQ ID NO: 2271550
gucugcacaggaaauacca

SEQ ID NO: 2271552 - RNA, 19 nt, Artificial Sequence
  Description of Artificial Sequence: Synthetic oligonucleotide
  Sense strand starting at position 2167 of SEQ ID NO: 1884515
gguauuuccugugcagacu

SEQ ID NO: 2271553 - RNA, 19 nt, Artificial Sequence
  Description of Artificial Sequence: Synthetic oligonucleotide
  Antisense strand to SEQ ID NO: 2271552
agucugcacaggaaauacc

SEQ ID NO: 2271554 - RNA, 19 nt, Artificial Sequence
  Description of Artificial Sequence: Synthetic oligonucleotide
  Sense strand starting at position 2255 of SEQ ID NO: 1884515
aggagcaugcuaugcaaua

SEQ ID NO: 2271555 - RNA, 19 nt, Artificial Sequence
  Description of Artificial Sequence: Synthetic oligonucleotide
  Antisense strand to SEQ ID NO: 2271554
uauugcauagcaugcuccu

SEQ ID NO: 2271556 - RNA, 19 nt, Artificial Sequence
  Description of Artificial Sequence: Synthetic oligonucleotide
  Sense strand starting at position 2256 of SEQ ID NO: 1884515
ggagcaugcuaugcaauaa

SEQ ID NO: 2271557 - RNA, 19 nt, Artificial Sequence
  Description of Artificial Sequence: Synthetic oligonucleotide
  Antisense strand to SEQ ID NO: 2271556
uuauugcauagcaugcucc

SEQ ID NO: 2271558 - RNA, 19 nt, Artificial Sequence
  Description of Artificial Sequence: Synthetic oligonucleotide
  Sense strand starting at position 2333 of SEQ ID NO: 1884515
ccuuauuaccgcgacugau

SEQ ID NO: 2271559 - RNA, 19 nt, Artificial Sequence
  Description of Artificial Sequence: Synthetic oligonucleotide
  Antisense strand to SEQ ID NO: 2271558
aucagucgcgguaauaagg

SEQ ID NO: 2271560 - RNA, 19 nt, Artificial Sequence
  Description of Artificial Sequence: Synthetic oligonucleotide
  Sense strand starting at position 2342 of SEQ ID NO: 1884515
cgcgacugauuaccuaaua

SEQ ID NO: 2271561 - RNA, 19 nt, Artificial Sequence
  Description of Artificial Sequence: Synthetic oligonucleotide
  Antisense strand to SEQ ID NO: 2271560
uauuagguaaucagucgcg

SEQ ID NO: 2271562 - RNA, 19 nt, Artificial Sequence
  Description of Artificial Sequence: Synthetic oligonucleotide
  Sense strand starting at position 2343 of SEQ ID NO: 1884515
gcgacugauuaccuaauag

SEQ ID NO: 2271563 - RNA, 19 nt, Artificial Sequence
  Description of Artificial Sequence: Synthetic oligonucleotide
  Antisense strand to SEQ ID NO: 2271562
cuauuagguaaucagucgc

SEQ ID NO: 2271564 - RNA, 19 nt, Artificial Sequence
  Description of Artificial Sequence: Synthetic oligonucleotide
  Sense strand starting at position 2432 of SEQ ID NO: 1884515
ccuccaauuugccagagga

SEQ ID NO: 2271565 - RNA, 19 nt, Artificial Sequence
  Description of Artificial Sequence: Synthetic oligonucleotide
  Antisense strand to SEQ ID NO: 2271564
uccucuggcaaauuggagg

SEQ ID NO: 2271566 - RNA, 19 nt, Artificial Sequence
  Description of Artificial Sequence: Synthetic oligonucleotide
  Sense strand starting at position 3122 of SEQ ID NO: 1884515
gcugcauuaguagaagaug

SEQ ID NO: 2271567 - RNA, 19 nt, Artificial Sequence
  Description of Artificial Sequence: Synthetic oligonucleotide
  Antisense strand to SEQ ID NO: 2271566
caucuucuacuaaugcagc

SEQ ID NO: 2271568 - RNA, 19 nt, Artificial Sequence
  Description of Artificial Sequence: Synthetic oligonucleotide
  Sense strand starting at position 3205 of SEQ ID NO: 1884515
uggcaaagggucuagaagu

SEQ ID NO: 2271569 - RNA, 19 nt, Artificial Sequence
  Description of Artificial Sequence: Synthetic oligonucleotide
  Antisense strand to SEQ ID NO: 2271568
acuucuagacccuuugcca

SEQ ID NO: 2271570 - RNA, 19 nt, Artificial Sequence
  Description of Artificial Sequence: Synthetic oligonucleotide
  Sense strand starting at position 3213 of SEQ ID NO: 1884515
ggucuagaaguauaucauu

SEQ ID NO: 2271571 - RNA, 19 nt, Artificial Sequence
  Description of Artificial Sequence: Synthetic oligonucleotide
  Antisense strand to SEQ ID NO: 2271570
aaugauauacuucuagacc

SEQ ID NO: 2271572 - RNA, 19 nt, Artificial Sequence
  Description of Artificial Sequence: Synthetic oligonucleotide
  Sense strand starting at position 3393 of SEQ ID NO: 1884515
uuugguuugccacagggaa

SEQ ID NO: 2271573 - RNA, 19 nt, Artificial Sequence
  Description of Artificial Sequence: Synthetic oligonucleotide
  Antisense strand to SEQ ID NO: 2271572
uucccuguggcaaaccaaa

SEQ ID NO: 2271574 - RNA, 19 nt, Artificial Sequence
  Description of Artificial Sequence: Synthetic oligonucleotide
  Sense strand starting at position 3425 of SEQ ID NO: 1884515
guuguagaaguucagaaug

SEQ ID NO: 2271575 - RNA, 19 nt, Artificial Sequence
  Description of Artificial Sequence: Synthetic oligonucleotide
  Antisense strand to SEQ ID NO: 2271574
cauucugaacuucuacaac

SEQ ID NO: 2271576 - RNA, 19 nt, Artificial Sequence
  Description of Artificial Sequence: Synthetic oligonucleotide
  Sense strand starting at position 3437 of SEQ ID NO: 1884515
cagaaugugggauguagaa

SEQ ID NO: 2271577 - RNA, 19 nt, Artificial Sequence
  Description of Artificial Sequence: Synthetic oligonucleotide
  Antisense strand to SEQ ID NO: 2271576
uucuacaucccacauucug

SEQ ID NO: 2271578 - RNA, 19 nt, Artificial Sequence
  Description of Artificial Sequence: Synthetic oligonucleotide
  Sense strand starting at position 3456 of SEQ ID NO: 1884515
cccagaaugcuuggauuag

SEQ ID NO: 2271579 - RNA, 19 nt, Artificial Sequence
  Description of Artificial Sequence: Synthetic oligonucleotide
  Antisense strand to SEQ ID NO: 2271578
cuaauccaagcauucuggg

SEQ ID NO: 2271580 - RNA, 19 nt, Artificial Sequence
  Description of Artificial Sequence: Synthetic oligonucleotide
  Sense strand starting at position 3465 of SEQ ID NO: 1884515
cuuggauuaggaugucaac

SEQ ID NO: 2271581 - RNA, 19 nt, Artificial Sequence
  Description of Artificial Sequence: Synthetic oligonucleotide
  Antisense strand to SEQ ID NO: 2271580
guugacauccuaauccaag

SEQ ID NO: 2271582 - RNA, 19 nt, Artificial Sequence
  Description of Artificial Sequence: Synthetic oligonucleotide
  Sense strand starting at position 20 of SEQ ID NO: 1884516
uucuucccacugugaagaa

SEQ ID NO: 2271583 - RNA, 19 nt, Artificial Sequence
  Description of Artificial Sequence: Synthetic oligonucleotide
  Antisense strand to SEQ ID NO: 2271582
uucuucacagugggaagaa

SEQ ID NO: 2271584 - RNA, 19 nt, Artificial Sequence
  Description of Artificial Sequence: Synthetic oligonucleotide
  Sense strand starting at position 27 of SEQ ID NO: 1884516
cacugugaagaaugaucau

SEQ ID NO: 2271585 - RNA, 19 nt, Artificial Sequence
  Description of Artificial Sequence: Synthetic oligonucleotide
  Antisense strand to SEQ ID NO: 2271584
augaucauucuucacagug

SEQ ID NO: 2271586 - RNA, 19 nt, Artificial Sequence
  Description of Artificial Sequence: Synthetic oligonucleotide
  Sense strand starting at position 55 of SEQ ID NO: 1884516
augaguacggcuggaaaca

SEQ ID NO: 2271587 - RNA, 19 nt, Artificial Sequence
  Description of Artificial Sequence: Synthetic oligonucleotide
  Antisense strand to SEQ ID NO: 2271586
uguuuccagccguacucau

SEQ ID NO: 2271588 - RNA, 19 nt, Artificial Sequence
  Description of Artificial Sequence: Synthetic oligonucleotide
  Sense strand starting at position 123 of SEQ ID NO: 1884516
gcugcugucccugagagag

SEQ ID NO: 2271589 - RNA, 19 nt, Artificial Sequence
  Description of Artificial Sequence: Synthetic oligonucleotide
  Antisense strand to SEQ ID NO: 2271588
cucucucagggacagcagc

SEQ ID NO: 2271590 - RNA, 19 nt, Artificial Sequence
  Description of Artificial Sequence: Synthetic oligonucleotide
  Sense strand starting at position 425 of SEQ ID NO: 1884516
gaaaguuggguuggguaua

SEQ ID NO: 2271591 - RNA, 19 nt, Artificial Sequence
  Description of Artificial Sequence: Synthetic oligonucleotide
  Antisense strand to SEQ ID NO: 2271590
uauacccaacccaacuuuc

SEQ ID NO: 2271592 - RNA, 19 nt, Artificial Sequence
  Description of Artificial Sequence: Synthetic oligonucleotide
  Sense strand starting at position 499 of SEQ ID NO: 1884516
gagcuuguuggccagacaa

SEQ ID NO: 2271593 - RNA, 19 nt, Artificial Sequence
  Description of Artificial Sequence: Synthetic oligonucleotide
  Antisense strand to SEQ ID NO: 2271592
uugucuggccaacaagcuc

SEQ ID NO: 2271594 - RNA, 19 nt, Artificial Sequence
  Description of Artificial Sequence: Synthetic oligonucleotide
  Sense strand starting at position 501 of SEQ ID NO: 1884516
gcuuguuggccagacaaag

SEQ ID NO: 2271595 - RNA, 19 nt, Artificial Sequence
  Description of Artificial Sequence: Synthetic oligonucleotide
  Antisense strand to SEQ ID NO: 2271594
cuuugucuggccaacaagc

SEQ ID NO: 2271596 - RNA, 19 nt, Artificial Sequence
  Description of Artificial Sequence: Synthetic oligonucleotide
  Sense strand starting at position 600 of SEQ ID NO: 1884516
uuuagaauggcuuaagcau

SEQ ID NO: 2271597 - RNA, 19 nt, Artificial Sequence
  Description of Artificial Sequence: Synthetic oligonucleotide
  Antisense strand to SEQ ID NO: 2271596
augcuuaagccauucuaaa

SEQ ID NO: 2271598 - RNA, 19 nt, Artificial Sequence
  Description of Artificial Sequence: Synthetic oligonucleotide
  Sense strand starting at position 643 of SEQ ID NO: 1884516
ugggaagugaggugacauu

SEQ ID NO: 2271599 - RNA, 19 nt, Artificial Sequence
  Description of Artificial Sequence: Synthetic oligonucleotide
  Antisense strand to SEQ ID NO: 2271598
aaugucaccucacuuccca

SEQ ID NO: 2271600 - RNA, 19 nt, Artificial Sequence
  Description of Artificial Sequence: Synthetic oligonucleotide
  Sense strand starting at position 656 of SEQ ID NO: 1884516
gacauuguuggcuaauucu

SEQ ID NO: 2271601 - RNA, 19 nt, Artificial Sequence
  Description of Artificial Sequence: Synthetic oligonucleotide
  Antisense strand to SEQ ID NO: 2271600
agaauuagccaacaauguc

SEQ ID NO: 2271602 - RNA, 19 nt, Artificial Sequence
  Description of Artificial Sequence: Synthetic oligonucleotide
  Sense strand starting at position 663 of SEQ ID NO: 1884516
uuggcuaauucuuuaagca

SEQ ID NO: 2271603 - RNA, 19 nt, Artificial Sequence
  Description of Artificial Sequence: Synthetic oligonucleotide
  Antisense strand to SEQ ID NO: 2271602
ugcuuaaagaauuagccaa

SEQ ID NO: 2271604 - RNA, 19 nt, Artificial Sequence
  Description of Artificial Sequence: Synthetic oligonucleotide
  Sense strand starting at position 664 of SEQ ID NO: 1884516
uggcuaauucuuuaagcag

SEQ ID NO: 2271605 - RNA, 19 nt, Artificial Sequence
  Description of Artificial Sequence: Synthetic oligonucleotide
  Antisense strand to SEQ ID NO: 2271604
cugcuuaaagaauuagcca

SEQ ID NO: 2271606 - RNA, 19 nt, Artificial Sequence
  Description of Artificial Sequence: Synthetic oligonucleotide
  Sense strand starting at position 667 of SEQ ID NO: 1884516
cuaauucuuuaagcaggua

SEQ ID NO: 2271607 - RNA, 19 nt, Artificial Sequence
  Description of Artificial Sequence: Synthetic oligonucleotide
  Antisense strand to SEQ ID NO: 2271606
uaccugcuuaaagaauuag

SEQ ID NO: 2271608 - RNA, 19 nt, Artificial Sequence
  Description of Artificial Sequence: Synthetic oligonucleotide
  Sense strand starting at position 672 of SEQ ID NO: 1884516
ucuuuaagcagguagagua

SEQ ID NO: 2271609 - RNA, 19 nt, Artificial Sequence
  Description of Artificial Sequence: Synthetic oligonucleotide
  Antisense strand to SEQ ID NO: 2271608
uacucuaccugcuuaaaga

SEQ ID NO: 2271610 - RNA, 19 nt, Artificial Sequence
  Description of Artificial Sequence: Synthetic oligonucleotide
  Sense strand starting at position 688 of SEQ ID NO: 1884516
guauuugucucacuuguua

SEQ ID NO: 2271611 - RNA, 19 nt, Artificial Sequence
  Description of Artificial Sequence: Synthetic oligonucleotide
  Antisense strand to SEQ ID NO: 2271610
uaacaagugagacaaauac

SEQ ID NO: 2271612 - RNA, 19 nt, Artificial Sequence
  Description of Artificial Sequence: Synthetic oligonucleotide
  Sense strand starting at position 692 of SEQ ID NO: 1884516
uugucucacuuguuagaug

SEQ ID NO: 2271613 - RNA, 19 nt, Artificial Sequence
  Description of Artificial Sequence: Synthetic oligonucleotide
  Antisense strand to SEQ ID NO: 2271612
caucuaacaagugagacaa

SEQ ID NO: 2271614 - RNA, 19 nt, Artificial Sequence
  Description of Artificial Sequence: Synthetic oligonucleotide
  Sense strand starting at position 841 of SEQ ID NO: 1884516
cugaguuacucucugagga

SEQ ID NO: 2271615 - RNA, 19 nt, Artificial Sequence
  Description of Artificial Sequence: Synthetic oligonucleotide
  Antisense strand to SEQ ID NO: 2271614
uccucagagaguaacucag

SEQ ID NO: 2271616 - RNA, 19 nt, Artificial Sequence
  Description of Artificial Sequence: Synthetic oligonucleotide
  Sense strand starting at position 842 of SEQ ID NO: 1884516
ugaguuacucucugaggaa

SEQ ID NO: 2271617 - RNA, 19 nt, Artificial Sequence
  Description of Artificial Sequence: Synthetic oligonucleotide
  Antisense strand to SEQ ID NO: 2271616
uuccucagagaguaacuca

SEQ ID NO: 2271618 - RNA, 19 nt, Artificial Sequence
  Description of Artificial Sequence: Synthetic oligonucleotide
  Sense strand starting at position 1023 of SEQ ID NO: 1884516
uagagucuugcucagguua

SEQ ID NO: 2271619 - RNA, 19 nt, Artificial Sequence
  Description of Artificial Sequence: Synthetic oligonucleotide
  Antisense strand to SEQ ID NO: 2271618
uaaccugagcaagacucua

SEQ ID NO: 2271620 - RNA, 19 nt, Artificial Sequence
  Description of Artificial Sequence: Synthetic oligonucleotide
  Sense strand starting at position 1099 of SEQ ID NO: 1884516
ucaagauagucuccugucu

SEQ ID NO: 2271621 - RNA, 19 nt, Artificial Sequence
  Description of Artificial Sequence: Synthetic oligonucleotide
  Antisense strand to SEQ ID NO: 2271620
agacaggagacuaucuuga

SEQ ID NO: 2271622 - RNA, 19 nt, Artificial Sequence
  Description of Artificial Sequence: Synthetic oligonucleotide
  Sense strand starting at position 1343 of SEQ ID NO: 1884516
cucagagguuaugugacuu

SEQ ID NO: 2271623 - RNA, 19 nt, Artificial Sequence
  Description of Artificial Sequence: Synthetic oligonucleotide
  Antisense strand to SEQ ID NO: 2271622
aagucacauaaccucugag

SEQ ID NO: 2271624 - RNA, 19 nt, Artificial Sequence
  Description of Artificial Sequence: Synthetic oligonucleotide
  Sense strand starting at position 1403 of SEQ ID NO: 1884516
gcauguggaggcuaaaguu

SEQ ID NO: 2271625 - RNA, 19 nt, Artificial Sequence
  Description of Artificial Sequence: Synthetic oligonucleotide
  Antisense strand to SEQ ID NO: 2271624
aacuuuagccuccacaugc

SEQ ID NO: 2271626 - RNA, 19 nt, Artificial Sequence
  Description of Artificial Sequence: Synthetic oligonucleotide
  Sense strand starting at position 1455 of SEQ ID NO: 1884516
agacaauggccuugccaaa

SEQ ID NO: 2271627 - RNA, 19 nt, Artificial Sequence
  Description of Artificial Sequence: Synthetic oligonucleotide
  Antisense strand to SEQ ID NO: 2271626
uuuggcaaggccauugucu

SEQ ID NO: 2271628 - RNA, 19 nt, Artificial Sequence
  Description of Artificial Sequence: Synthetic oligonucleotide
  Sense strand starting at position 1534 of SEQ ID NO: 1884516
augugugcccuugagaaag

SEQ ID NO: 2271629 - RNA, 19 nt, Artificial Sequence
  Description of Artificial Sequence: Synthetic oligonucleotide
  Antisense strand to SEQ ID NO: 2271628
cuuucucaagggcacacau

SEQ ID NO: 2271630 - RNA, 19 nt, Artificial Sequence
  Description of Artificial Sequence: Synthetic oligonucleotide
  Sense strand starting at position 2069 of SEQ ID NO: 1884516
aauguauauuggucaaaug

SEQ ID NO: 2271631 - RNA, 19 nt, Artificial Sequence
  Description of Artificial Sequence: Synthetic oligonucleotide
  Antisense strand to SEQ ID NO: 2271630
cauuugaccaauauacauu

SEQ ID NO: 2271632 - RNA, 19 nt, Artificial Sequence
  Description of Artificial Sequence: Synthetic oligonucleotide
  Sense strand starting at position 2129 of SEQ ID NO: 1884516
ccuaaagaccuauguuuga

SEQ ID NO: 2271633 - RNA, 19 nt, Artificial Sequence
  Description of Artificial Sequence: Synthetic oligonucleotide
  Antisense strand to SEQ ID NO: 2271632
ucaaacauaggucuuuagg

SEQ ID NO: 2271634 - RNA, 19 nt, Artificial Sequence
  Description of Artificial Sequence: Synthetic oligonucleotide
  Sense strand starting at position 2201 of SEQ ID NO: 1884516
guccuuagcuuccucauuu

SEQ ID NO: 2271635 - RNA, 19 nt, Artificial Sequence
  Description of Artificial Sequence: Synthetic oligonucleotide
  Antisense strand to SEQ ID NO: 2271634
aaaugaggaagcuaaggac

SEQ ID NO: 2271636 - RNA, 19 nt, Artificial Sequence
  Description of Artificial Sequence: Synthetic oligonucleotide
  Sense strand starting at position 2238 of SEQ ID NO: 1884516
ugguaucuauuauuaagac

SEQ ID NO: 2271637 - RNA, 19 nt, Artificial Sequence
  Description of Artificial Sequence: Synthetic oligonucleotide
  Antisense strand to SEQ ID NO: 2271636
gucuuaauaauagauacca

SEQ ID NO: 2271638 - RNA, 19 nt, Artificial Sequence
  Description of Artificial Sequence: Synthetic oligonucleotide
  Sense strand starting at position 2340 of SEQ ID NO: 1884516
guaauaaucugaccgauug

SEQ ID NO: 2271639 - RNA, 19 nt, Artificial Sequence
  Description of Artificial Sequence: Synthetic oligonucleotide
  Antisense strand to SEQ ID NO: 2271638
caaucggucagauuauuac

SEQ ID NO: 2271640 - RNA, 19 nt, Artificial Sequence
  Description of Artificial Sequence: Synthetic oligonucleotide
  Sense strand starting at position 2341 of SEQ ID NO: 1884516
uaauaaucugaccgauugu

SEQ ID NO: 2271641 - RNA, 19 nt, Artificial Sequence
  Description of Artificial Sequence: Synthetic oligonucleotide
  Antisense strand to SEQ ID NO: 2271640
acaaucggucagauuauua

SEQ ID NO: 2271642 - RNA, 19 nt, Artificial Sequence
  Description of Artificial Sequence: Synthetic oligonucleotide
  Sense strand starting at position 2455 of SEQ ID NO: 1884516
uuguuaacugauuaccagu

SEQ ID NO: 2271643 - RNA, 19 nt, Artificial Sequence
  Description of Artificial Sequence: Synthetic oligonucleotide
  Antisense strand to SEQ ID NO: 2271642
acugguaaucaguuaacaa

SEQ ID NO: 2271644 - RNA, 19 nt, Artificial Sequence
  Description of Artificial Sequence: Synthetic oligonucleotide
  Sense strand starting at position 2469 of SEQ ID NO: 1884516
ccaguugaaugggugugaa

SEQ ID NO: 2271645 - RNA, 19 nt, Artificial Sequence
  Description of Artificial Sequence: Synthetic oligonucleotide
  Antisense strand to SEQ ID NO: 2271644
uucacacccauucaacugg

SEQ ID NO: 2271646 - RNA, 19 nt, Artificial Sequence
  Description of Artificial Sequence: Synthetic oligonucleotide
  Sense strand starting at position 2472 of SEQ ID NO: 1884516
guugaaugggugugaaagu

SEQ ID NO: 2271647 - RNA, 19 nt, Artificial Sequence
  Description of Artificial Sequence: Synthetic oligonucleotide
  Antisense strand to SEQ ID NO: 2271646
acuuucacacccauucaac

SEQ ID NO: 2271648 - RNA, 19 nt, Artificial Sequence
  Description of Artificial Sequence: Synthetic oligonucleotide
  Sense strand starting at position 2673 of SEQ ID NO: 1884516
uaguuaagagccugugacu

SEQ ID NO: 2271649 - RNA, 19 nt, Artificial Sequence
  Description of Artificial Sequence: Synthetic oligonucleotide
  Antisense strand to SEQ ID NO: 2271648
agucacaggcucuuaacua

SEQ ID NO: 2271650 - RNA, 19 nt, Artificial Sequence
  Description of Artificial Sequence: Synthetic oligonucleotide
  Sense strand starting at position 2843 of SEQ ID NO: 1884516
ucuaaagcgccggauaaau

SEQ ID NO: 2271651 - RNA, 19 nt, Artificial Sequence
  Description of Artificial Sequence: Synthetic oligonucleotide
  Antisense strand to SEQ ID NO: 2271650
auuuauccggcgcuuuaga

SEQ ID NO: 2271652 - RNA, 19 nt, Artificial Sequence
  Description of Artificial Sequence: Synthetic oligonucleotide
  Sense strand starting at position 2845 of SEQ ID NO: 1884516
uaaagcgccggauaaauaa

SEQ ID NO: 2271653 - RNA, 19 nt, Artificial Sequence
  Description of Artificial Sequence: Synthetic oligonucleotide
  Antisense strand to SEQ ID NO: 2271652
uuauuuauccggcgcuuua

SEQ ID NO: 2271654 - RNA, 19 nt, Artificial Sequence
  Description of Artificial Sequence: Synthetic oligonucleotide
  Sense strand starting at position 3210 of SEQ ID NO: 1884516
accagaacuucucuucgca

SEQ ID NO: 2271655 - RNA, 19 nt, Artificial Sequence
  Description of Artificial Sequence: Synthetic oligonucleotide
  Antisense strand to SEQ ID NO: 2271654
ugcgaagagaaguucuggu

SEQ ID NO: 2271656 - RNA, 19 nt, Artificial Sequence
  Description of Artificial Sequence: Synthetic oligonucleotide
  Sense strand starting at position 3587 of SEQ ID NO: 1884516
agaggaagauugucugcaa

SEQ ID NO: 2271657 - RNA, 19 nt, Artificial Sequence
  Description of Artificial Sequence: Synthetic oligonucleotide
  Antisense strand to SEQ ID NO: 2271656
uugcagacaaucuuccucu

SEQ ID NO: 2271658 - RNA, 19 nt, Artificial Sequence
  Description of Artificial Sequence: Synthetic oligonucleotide
  Sense strand starting at position 3588 of SEQ ID NO: 1884516
gaggaagauugucugcaau

SEQ ID NO: 2271659 - RNA, 19 nt, Artificial Sequence
  Description of Artificial Sequence: Synthetic oligonucleotide
  Antisense strand to SEQ ID NO: 2271658
auugcagacaaucuuccuc

SEQ ID NO: 2271660 - RNA, 19 nt, Artificial Sequence
  Description of Artificial Sequence: Synthetic oligonucleotide
  Sense strand starting at position 3590 of SEQ ID NO: 1884516
ggaagauugucugcaauug

SEQ ID NO: 2271661 - RNA, 19 nt, Artificial Sequence
  Description of Artificial Sequence: Synthetic oligonucleotide
  Antisense strand to SEQ ID NO: 2271660
caauugcagacaaucuucc

SEQ ID NO: 2271662 - RNA, 19 nt, Artificial Sequence
  Description of Artificial Sequence: Synthetic oligonucleotide
  Sense strand starting at position 62 of SEQ ID NO: 1884517
ggaggaaagcccugcugaa

SEQ ID NO: 2271663 - RNA, 19 nt, Artificial Sequence
  Description of Artificial Sequence: Synthetic oligonucleotide
  Antisense strand to SEQ ID NO: 2271662
uucagcagggcuuuccucc

SEQ ID NO: 2271664 - RNA, 19 nt, Artificial Sequence
  Description of Artificial Sequence: Synthetic oligonucleotide
  Sense strand starting at position 121 of SEQ ID NO: 1884517
caaugaugucagugacgga

SEQ ID NO: 2271665 - RNA, 19 nt, Artificial Sequence
  Description of Artificial Sequence: Synthetic oligonucleotide
  Antisense strand to SEQ ID NO: 2271664
uccgucacugacaucauug

SEQ ID NO: 2271666 - RNA, 19 nt, Artificial Sequence
  Description of Artificial Sequence: Synthetic oligonucleotide
  Sense strand starting at position 122 of SEQ ID NO: 1884517
aaugaugucagugacggau

SEQ ID NO: 2271667 - RNA, 19 nt, Artificial Sequence
  Description of Artificial Sequence: Synthetic oligonucleotide
  Antisense strand to SEQ ID NO: 2271666
auccgucacugacaucauu

SEQ ID NO: 2271668 - RNA, 19 nt, Artificial Sequence
  Description of Artificial Sequence: Synthetic oligonucleotide
  Sense strand starting at position 161 of SEQ ID NO: 1884517
acaucauagguaugaccuu

SEQ ID NO: 2271669 - RNA, 19 nt, Artificial Sequence
  Description of Artificial Sequence: Synthetic oligonucleotide
  Antisense strand to SEQ ID NO: 2271668
aaggucauaccuaugaugu

SEQ ID NO: 2271670 - RNA, 19 nt, Artificial Sequence
  Description of Artificial Sequence: Synthetic oligonucleotide
  Sense strand starting at position 167 of SEQ ID NO: 1884517
uagguaugaccuuaucgua

SEQ ID NO: 2271671 - RNA, 19 nt, Artificial Sequence
  Description of Artificial Sequence: Synthetic oligonucleotide
  Antisense strand to SEQ ID NO: 2271670
uacgauaaggucauaccua

SEQ ID NO: 2271672 - RNA, 19 nt, Artificial Sequence
  Description of Artificial Sequence: Synthetic oligonucleotide
  Sense strand starting at position 192 of SEQ ID NO: 1884517
gcuucuuaugcccaggaca

SEQ ID NO: 2271673 - RNA, 19 nt, Artificial Sequence
  Description of Artificial Sequence: Synthetic oligonucleotide
  Antisense strand to SEQ ID NO: 2271672
uguccugggcauaagaagc

SEQ ID NO: 2271674 - RNA, 19 nt, Artificial Sequence
  Description of Artificial Sequence: Synthetic oligonucleotide
  Sense strand starting at position 194 of SEQ ID NO: 1884517
uucuuaugcccaggacaga

SEQ ID NO: 2271675 - RNA, 19 nt, Artificial Sequence
  Description of Artificial Sequence: Synthetic oligonucleotide
  Antisense strand to SEQ ID NO: 2271674
ucuguccugggcauaagaa

SEQ ID NO: 2271676 - RNA, 19 nt, Artificial Sequence
  Description of Artificial Sequence: Synthetic oligonucleotide
  Sense strand starting at position 195 of SEQ ID NO: 1884517
ucuuaugcccaggacagau

SEQ ID NO: 2271677 - RNA, 19 nt, Artificial Sequence
  Description of Artificial Sequence: Synthetic oligonucleotide
  Antisense strand to SEQ ID NO: 2271676
aucuguccugggcauaaga

SEQ ID NO: 2271678 - RNA, 19 nt, Artificial Sequence
  Description of Artificial Sequence: Synthetic oligonucleotide
  Sense strand starting at position 264 of SEQ ID NO: 1884517
ccuuaaauucucugguuag

SEQ ID NO: 2271679 - RNA, 19 nt, Artificial Sequence
  Description of Artificial Sequence: Synthetic oligonucleotide
  Antisense strand to SEQ ID NO: 2271678
cuaaccagagaauuuaagg

SEQ ID NO: 2271680 - RNA, 19 nt, Artificial Sequence
  Description of Artificial Sequence: Synthetic oligonucleotide
  Sense strand starting at position 275 of SEQ ID NO: 1884517
cugguuagaaagugacuuu

SEQ ID NO: 2271681 - RNA, 19 nt, Artificial Sequence
  Description of Artificial Sequence: Synthetic oligonucleotide
  Antisense strand to SEQ ID NO: 2271680
aaagucacuuucuaaccag

SEQ ID NO: 2271682 - RNA, 19 nt, Artificial Sequence
  Description of Artificial Sequence: Synthetic oligonucleotide
  Sense strand starting at position 278 of SEQ ID NO: 1884517
guuagaaagugacuuucga

SEQ ID NO: 2271683 - RNA, 19 nt, Artificial Sequence
  Description of Artificial Sequence: Synthetic oligonucleotide
  Antisense strand to SEQ ID NO: 2271682
ucgaaagucacuuucuaac

SEQ ID NO: 2271684 - RNA, 19 nt, Artificial Sequence
  Description of Artificial Sequence: Synthetic oligonucleotide
  Sense strand starting at position 604 of SEQ ID NO: 1884517
cuuccuugauaugugagau

SEQ ID NO: 2271685 - RNA, 19 nt, Artificial Sequence
  Description of Artificial Sequence: Synthetic oligonucleotide
  Antisense strand to SEQ ID NO: 2271684
aucucacauaucaaggaag

SEQ ID NO: 2271686 - RNA, 19 nt, Artificial Sequence
  Description of Artificial Sequence: Synthetic oligonucleotide
  Sense strand starting at position 616 of SEQ ID NO: 1884517
gugagauaauuaccuguca

SEQ ID NO: 2271687 - RNA, 19 nt, Artificial Sequence
  Description of Artificial Sequence: Synthetic oligonucleotide
  Antisense strand to SEQ ID NO: 2271686
ugacagguaauuaucucac

SEQ ID NO: 2271688 - RNA, 19 nt, Artificial Sequence
  Description of Artificial Sequence: Synthetic oligonucleotide
  Sense strand starting at position 705 of SEQ ID NO: 1884517
gcaauugugagugagcaaa

SEQ ID NO: 2271689 - RNA, 19 nt, Artificial Sequence
  Description of Artificial Sequence: Synthetic oligonucleotide
  Antisense strand to SEQ ID NO: 2271688
uuugcucacucacaauugc

SEQ ID NO: 2271690 - RNA, 19 nt, Artificial Sequence
  Description of Artificial Sequence: Synthetic oligonucleotide
  Sense strand starting at position 719 of SEQ ID NO: 1884517
gcaaaucuagcagagucua

SEQ ID NO: 2271691 - RNA, 19 nt, Artificial Sequence
  Description of Artificial Sequence: Synthetic oligonucleotide
  Antisense strand to SEQ ID NO: 2271690
uagacucugcuagauuugc

SEQ ID NO: 2271692 - RNA, 19 nt, Artificial Sequence
  Description of Artificial Sequence: Synthetic oligonucleotide
  Sense strand starting at position 724 of SEQ ID NO: 1884517
ucuagcagagucuauagua

SEQ ID NO: 2271693 - RNA, 19 nt, Artificial Sequence
  Description of Artificial Sequence: Synthetic oligonucleotide
  Antisense strand to SEQ ID NO: 2271692
uacuauagacucugcuaga

SEQ ID NO: 2271694 - RNA, 19 nt, Artificial Sequence
  Description of Artificial Sequence: Synthetic oligonucleotide
  Sense strand starting at position 733 of SEQ ID NO: 1884517
gucuauaguacgcauaaag

SEQ ID NO: 2271695 - RNA, 19 nt, Artificial Sequence
  Description of Artificial Sequence: Synthetic oligonucleotide
  Antisense strand to SEQ ID NO: 2271694
cuuuaugcguacuauagac

SEQ ID NO: 2271696 - RNA, 19 nt, Artificial Sequence
  Description of Artificial Sequence: Synthetic oligonucleotide
  Sense strand starting at position 815 of SEQ ID NO: 1884517
uuuccuuggcaugaauaca

SEQ ID NO: 2271697 - RNA, 19 nt, Artificial Sequence
  Description of Artificial Sequence: Synthetic oligonucleotide
  Antisense strand to SEQ ID NO: 2271696
uguauucaugccaaggaaa

SEQ ID NO: 2271698 - RNA, 19 nt, Artificial Sequence
  Description of Artificial Sequence: Synthetic oligonucleotide
  Sense strand starting at position 843 of SEQ ID NO: 1884517
aucuuagaauaucuguuga

SEQ ID NO: 2271699 - RNA, 19 nt, Artificial Sequence
  Description of Artificial Sequence: Synthetic oligonucleotide
  Antisense strand to SEQ ID NO: 2271698
ucaacagauauucuaagau

SEQ ID NO: 2271700 - RNA, 19 nt, Artificial Sequence
  Description of Artificial Sequence: Synthetic oligonucleotide
  Sense strand starting at position 845 of SEQ ID NO: 1884517
cuuagaauaucuguugaua

SEQ ID NO: 2271701 - RNA, 19 nt, Artificial Sequence
  Description of Artificial Sequence: Synthetic oligonucleotide
  Antisense strand to SEQ ID NO: 2271700
uaucaacagauauucuaag

SEQ ID NO: 2271702 - RNA, 19 nt, Artificial Sequence
  Description of Artificial Sequence: Synthetic oligonucleotide
  Sense strand starting at position 910 of SEQ ID NO: 1884517
agagguaaguguucagauu

SEQ ID NO: 2271703 - RNA, 19 nt, Artificial Sequence
  Description of Artificial Sequence: Synthetic oligonucleotide
  Antisense strand to SEQ ID NO: 2271702
aaucugaacacuuaccucu

SEQ ID NO: 2271704 - RNA, 19 nt, Artificial Sequence
  Description of Artificial Sequence: Synthetic oligonucleotide
  Sense strand starting at position 1107 of SEQ ID NO: 1884517
caaggcucuguugauauga

SEQ ID NO: 2271705 - RNA, 19 nt, Artificial Sequence
  Description of Artificial Sequence: Synthetic oligonucleotide
  Antisense strand to SEQ ID NO: 2271704
ucauaucaacagagccuug

SEQ ID NO: 2271706 - RNA, 19 nt, Artificial Sequence
  Description of Artificial Sequence: Synthetic oligonucleotide
  Sense strand starting at position 1159 of SEQ ID NO: 1884517
ugaaguauucuaugcagag

SEQ ID NO: 2271707 - RNA, 19 nt, Artificial Sequence
  Description of Artificial Sequence: Synthetic oligonucleotide
  Antisense strand to SEQ ID NO: 2271706
cucugcauagaauacuuca

SEQ ID NO: 2271708 - RNA, 19 nt, Artificial Sequence
  Description of Artificial Sequence: Synthetic oligonucleotide
  Sense strand starting at position 1160 of SEQ ID NO: 1884517
gaaguauucuaugcagaga

SEQ ID NO: 2271709 - RNA, 19 nt, Artificial Sequence
  Description of Artificial Sequence: Synthetic oligonucleotide
  Antisense strand to SEQ ID NO: 2271708
ucucugcauagaauacuuc

SEQ ID NO: 2271710 - RNA, 19 nt, Artificial Sequence
  Description of Artificial Sequence: Synthetic oligonucleotide
  Sense strand starting at position 1163 of SEQ ID NO: 1884517
guauucuaugcagagaucu

SEQ ID NO: 2271711 - RNA, 19 nt, Artificial Sequence
  Description of Artificial Sequence: Synthetic oligonucleotide
  Antisense strand to SEQ ID NO: 2271710
agaucucugcauagaauac

SEQ ID NO: 2271712 - RNA, 19 nt, Artificial Sequence
  Description of Artificial Sequence: Synthetic oligonucleotide
  Sense strand starting at position 1270 of SEQ ID NO: 1884517
aucauaagugucuaucuua

SEQ ID NO: 2271713 - RNA, 19 nt, Artificial Sequence
  Description of Artificial Sequence: Synthetic oligonucleotide
  Antisense strand to SEQ ID NO: 2271712
uaagauagacacuuaugau

SEQ ID NO: 2271714 - RNA, 19 nt, Artificial Sequence
  Description of Artificial Sequence: Synthetic oligonucleotide
  Sense strand starting at position 1273 of SEQ ID NO: 1884517
auaagugucuaucuuaaac

SEQ ID NO: 2271715 - RNA, 19 nt, Artificial Sequence
  Description of Artificial Sequence: Synthetic oligonucleotide
  Antisense strand to SEQ ID NO: 2271714
guuuaagauagacacuuau

SEQ ID NO: 2271716 - RNA, 19 nt, Artificial Sequence
  Description of Artificial Sequence: Synthetic oligonucleotide
  Sense strand starting at position 1533 of SEQ ID NO: 1884517
uuugaaguucuggaaaguc

SEQ ID NO: 2271717 - RNA, 19 nt, Artificial Sequence
  Description of Artificial Sequence: Synthetic oligonucleotide
  Antisense strand to SEQ ID NO: 2271716
gacuuuccagaacuucaaa

SEQ ID NO: 2271718 - RNA, 19 nt, Artificial Sequence
  Description of Artificial Sequence: Synthetic oligonucleotide
  Sense strand starting at position 1654 of SEQ ID NO: 1884517
agggaagcugggugaugau

SEQ ID NO: 2271719 - RNA, 19 nt, Artificial Sequence
  Description of Artificial Sequence: Synthetic oligonucleotide
  Antisense strand to SEQ ID NO: 2271718
aucaucacccagcuucccu

SEQ ID NO: 2271720 - RNA, 19 nt, Artificial Sequence
  Description of Artificial Sequence: Synthetic oligonucleotide
  Sense strand starting at position 1708 of SEQ ID NO: 1884517
aauguuaagcuauacugga

SEQ ID NO: 2271721 - RNA, 19 nt, Artificial Sequence
  Description of Artificial Sequence: Synthetic oligonucleotide
  Antisense strand to SEQ ID NO: 2271720
uccaguauagcuuaacauu

SEQ ID NO: 2271722 - RNA, 19 nt, Artificial Sequence
  Description of Artificial Sequence: Synthetic oligonucleotide
  Sense strand starting at position 2104 of SEQ ID NO: 1884517
ugacucuccagucgaauga

SEQ ID NO: 2271723 - RNA, 19 nt, Artificial Sequence
  Description of Artificial Sequence: Synthetic oligonucleotide
  Antisense strand to SEQ ID NO: 2271722
ucauucgacuggagaguca

SEQ ID NO: 2271724 - RNA, 19 nt, Artificial Sequence
  Description of Artificial Sequence: Synthetic oligonucleotide
  Sense strand starting at position 2179 of SEQ ID NO: 1884517
gucuaaggaucccuacuuu

SEQ ID NO: 2271725 - RNA, 19 nt, Artificial Sequence
  Description of Artificial Sequence: Synthetic oligonucleotide
  Antisense strand to SEQ ID NO: 2271724
aaaguagggauccuuagac

SEQ ID NO: 2271726 - RNA, 19 nt, Artificial Sequence
  Description of Artificial Sequence: Synthetic oligonucleotide
  Sense strand starting at position 2436 of SEQ ID NO: 1884517
gcagcucuuggugaaagga

SEQ ID NO: 2271727 - RNA, 19 nt, Artificial Sequence
  Description of Artificial Sequence: Synthetic oligonucleotide
  Antisense strand to SEQ ID NO: 2271726
uccuuucaccaagagcugc

SEQ ID NO: 2271728 - RNA, 19 nt, Artificial Sequence
  Description of Artificial Sequence: Synthetic oligonucleotide
  Sense strand starting at position 2992 of SEQ ID NO: 1884517
gggaguggauuguucccau

SEQ ID NO: 2271729 - RNA, 19 nt, Artificial Sequence
  Description of Artificial Sequence: Synthetic oligonucleotide
  Antisense strand to SEQ ID NO: 2271728
augggaacaauccacuccc

SEQ ID NO: 2271730 - RNA, 19 nt, Artificial Sequence
  Description of Artificial Sequence: Synthetic oligonucleotide
  Sense strand starting at position 3084 of SEQ ID NO: 1884517
agacacaucucgucacaau

SEQ ID NO: 2271731 - RNA, 19 nt, Artificial Sequence
  Description of Artificial Sequence: Synthetic oligonucleotide
  Antisense strand to SEQ ID NO: 2271730
auugugacgagaugugucu

SEQ ID NO: 2271732 - RNA, 19 nt, Artificial Sequence
  Description of Artificial Sequence: Synthetic oligonucleotide
  Sense strand starting at position 3270 of SEQ ID NO: 1884517
uuaucuugccuggaaggau

SEQ ID NO: 2271733 - RNA, 19 nt, Artificial Sequence
  Description of Artificial Sequence: Synthetic oligonucleotide
  Antisense strand to SEQ ID NO: 2271732
auccuuccaggcaagauaa

SEQ ID NO: 2271734 - RNA, 19 nt, Artificial Sequence
  Description of Artificial Sequence: Synthetic oligonucleotide
  Sense strand starting at position 3329 of SEQ ID NO: 1884517
guuguuggaaauuaguaau

SEQ ID NO: 2271735 - RNA, 19 nt, Artificial Sequence
  Description of Artificial Sequence: Synthetic oligonucleotide
  Antisense strand to SEQ ID NO: 2271734
auuacuaauuuccaacaac

SEQ ID NO: 2271736 - RNA, 19 nt, Artificial Sequence
  Description of Artificial Sequence: Synthetic oligonucleotide
  Sense strand starting at position 3498 of SEQ ID NO: 1884517
uggaaucacuccuugugga

SEQ ID NO: 2271737 - RNA, 19 nt, Artificial Sequence
  Description of Artificial Sequence: Synthetic oligonucleotide
  Antisense strand to SEQ ID NO: 2271736
uccacaaggagugauucca

SEQ ID NO: 2271738 - RNA, 19 nt, Artificial Sequence
  Description of Artificial Sequence: Synthetic oligonucleotide
  Sense strand starting at position 3499 of SEQ ID NO: 1884517
ggaaucacuccuuguggaa

SEQ ID NO: 2271739 - RNA, 19 nt, Artificial Sequence
  Description of Artificial Sequence: Synthetic oligonucleotide
  Antisense strand to SEQ ID NO: 2271738
uuccacaaggagugauucc

SEQ ID NO: 2271740 - RNA, 19 nt, Artificial Sequence
  Description of Artificial Sequence: Synthetic oligonucleotide
  Sense strand starting at position 3632 of SEQ ID NO: 1884517
agagaaacaucaucccugu

SEQ ID NO: 2271741 - RNA, 19 nt, Artificial Sequence
  Description of Artificial Sequence: Synthetic oligonucleotide
  Antisense strand to SEQ ID NO: 2271740
acagggaugauguuucucu

SEQ ID NO: 2271742 - RNA, 19 nt, Artificial Sequence
  Description of Artificial Sequence: Synthetic oligonucleotide
  Sense strand starting at position 3 of SEQ ID NO: 1884518
ggugcuaagugcucugaag

SEQ ID NO: 2271743 - RNA, 19 nt, Artificial Sequence
  Description of Artificial Sequence: Synthetic oligonucleotide
  Antisense strand to SEQ ID NO: 2271742
cuucagagcacuuagcacc

SEQ ID NO: 2271744 - RNA, 19 nt, Artificial Sequence
  Description of Artificial Sequence: Synthetic oligonucleotide
  Sense strand starting at position 5 of SEQ ID NO: 1884518
ugcuaagugcucugaagaa

SEQ ID NO: 2271745 - RNA, 19 nt, Artificial Sequence
  Description of Artificial Sequence: Synthetic oligonucleotide
  Antisense strand to SEQ ID NO: 2271744
uucuucagagcacuuagca

SEQ ID NO: 2271746 - RNA, 19 nt, Artificial Sequence
  Description of Artificial Sequence: Synthetic oligonucleotide
  Sense strand starting at position 125 of SEQ ID NO: 1884518
cacaguagguguguuguaa

SEQ ID NO: 2271747 - RNA, 19 nt, Artificial Sequence
  Description of Artificial Sequence: Synthetic oligonucleotide
  Antisense strand to SEQ ID NO: 2271746
uuacaacacaccuacugug

SEQ ID NO: 2271748 - RNA, 19 nt, Artificial Sequence
  Description of Artificial Sequence: Synthetic oligonucleotide
  Sense strand starting at position 362 of SEQ ID NO: 1884518
gagggacaaucagcaugua

SEQ ID NO: 2271749 - RNA, 19 nt, Artificial Sequence
  Description of Artificial Sequence: Synthetic oligonucleotide
  Antisense strand to SEQ ID NO: 2271748
uacaugcugauugucccuc

SEQ ID NO: 2271750 - RNA, 19 nt, Artificial Sequence
  Description of Artificial Sequence: Synthetic oligonucleotide
  Sense strand starting at position 365 of SEQ ID NO: 1884518
ggacaaucagcauguauug

SEQ ID NO: 2271751 - RNA, 19 nt, Artificial Sequence
  Description of Artificial Sequence: Synthetic oligonucleotide
  Antisense strand to SEQ ID NO: 2271750
caauacaugcugauugucc

SEQ ID NO: 2271752 - RNA, 19 nt, Artificial Sequence
  Description of Artificial Sequence: Synthetic oligonucleotide
  Sense strand starting at position 580 of SEQ ID NO: 1884518
ggacaucauguuuguucuu

SEQ ID NO: 2271753 - RNA, 19 nt, Artificial Sequence
  Description of Artificial Sequence: Synthetic oligonucleotide
  Antisense strand to SEQ ID NO: 2271752
aagaacaaacaugaugucc

SEQ ID NO: 2271754 - RNA, 19 nt, Artificial Sequence
  Description of Artificial Sequence: Synthetic oligonucleotide
  Sense strand starting at position 585 of SEQ ID NO: 1884518
ucauguuuguucuucgaag

SEQ ID NO: 2271755 - RNA, 19 nt, Artificial Sequence
  Description of Artificial Sequence: Synthetic oligonucleotide
  Antisense strand to SEQ ID NO: 2271754
cuucgaagaacaaacauga

SEQ ID NO: 2271756 - RNA, 19 nt, Artificial Sequence
  Description of Artificial Sequence: Synthetic oligonucleotide
  Sense strand starting at position 714 of SEQ ID NO: 1884518
cuuccuuucugagcaggaa

SEQ ID NO: 2271757 - RNA, 19 nt, Artificial Sequence
  Description of Artificial Sequence: Synthetic oligonucleotide
  Antisense strand to SEQ ID NO: 2271756
uuccugcucagaaaggaag

SEQ ID NO: 2271758 - RNA, 19 nt, Artificial Sequence
  Description of Artificial Sequence: Synthetic oligonucleotide
  Sense strand starting at position 715 of SEQ ID NO: 1884518
uuccuuucugagcaggaaa

SEQ ID NO: 2271759 - RNA, 19 nt, Artificial Sequence
  Description of Artificial Sequence: Synthetic oligonucleotide
  Antisense strand to SEQ ID NO: 2271758
uuuccugcucagaaaggaa

SEQ ID NO: 2271760 - RNA, 19 nt, Artificial Sequence
  Description of Artificial Sequence: Synthetic oligonucleotide
  Sense strand starting at position 1211 of SEQ ID NO: 1884518
ucuugauucgucugaccac

SEQ ID NO: 2271761 - RNA, 19 nt, Artificial Sequence
  Description of Artificial Sequence: Synthetic oligonucleotide
  Antisense strand to SEQ ID NO: 2271760
guggucagacgaaucaaga

SEQ ID NO: 2271762 - RNA, 19 nt, Artificial Sequence
  Description of Artificial Sequence: Synthetic oligonucleotide
  Sense strand starting at position 1242 of SEQ ID NO: 1884518
gcuuguaucccagagccua

SEQ ID NO: 2271763 - RNA, 19 nt, Artificial Sequence
  Description of Artificial Sequence: Synthetic oligonucleotide
  Antisense strand to SEQ ID NO: 2271762
uaggcucugggauacaagc

SEQ ID NO: 2271764 - RNA, 19 nt, Artificial Sequence
  Description of Artificial Sequence: Synthetic oligonucleotide
  Sense strand starting at position 1282 of SEQ ID NO: 1884518
agguuaauuugacagacag

SEQ ID NO: 2271765 - RNA, 19 nt, Artificial Sequence
  Description of Artificial Sequence: Synthetic oligonucleotide
  Antisense strand to SEQ ID NO: 2271764
cugucugucaaauuaaccu

SEQ ID NO: 2271766 - RNA, 19 nt, Artificial Sequence
  Description of Artificial Sequence: Synthetic oligonucleotide
  Sense strand starting at position 1431 of SEQ ID NO: 1884518
uuaaccuuuccaggaaggu

SEQ ID NO: 2271767 - RNA, 19 nt, Artificial Sequence
  Description of Artificial Sequence: Synthetic oligonucleotide
  Antisense strand to SEQ ID NO: 2271766
accuuccuggaaagguuaa

SEQ ID NO: 2271768 - RNA, 19 nt, Artificial Sequence
  Description of Artificial Sequence: Synthetic oligonucleotide
  Sense strand starting at position 1506 of SEQ ID NO: 1884518
uaauuuacauggcaaguga

SEQ ID NO: 2271769 - RNA, 19 nt, Artificial Sequence
  Description of Artificial Sequence: Synthetic oligonucleotide
  Antisense strand to SEQ ID NO: 2271768
ucacuugccauguaaauua

SEQ ID NO: 2271770 - RNA, 19 nt, Artificial Sequence
  Description of Artificial Sequence: Synthetic oligonucleotide
  Sense strand starting at position 1594 of SEQ ID NO: 1884518
ggcucuaaccuaugacaga

SEQ ID NO: 2271771 - RNA, 19 nt, Artificial Sequence
  Description of Artificial Sequence: Synthetic oligonucleotide
  Antisense strand to SEQ ID NO: 2271770
ucugucauagguuagagcc

SEQ ID NO: 2271772 - RNA, 19 nt, Artificial Sequence
  Description of Artificial Sequence: Synthetic oligonucleotide
  Sense strand starting at position 1838 of SEQ ID NO: 1884518
auugcuaggccuuggaaag

SEQ ID NO: 2271773 - RNA, 19 nt, Artificial Sequence
  Description of Artificial Sequence: Synthetic oligonucleotide
  Antisense strand to SEQ ID NO: 2271772
cuuuccaaggccuagcaau

SEQ ID NO: 2271774 - RNA, 19 nt, Artificial Sequence
  Description of Artificial Sequence: Synthetic oligonucleotide
  Sense strand starting at position 2006 of SEQ ID NO: 1884518
ggaagacauuccuucuucu

SEQ ID NO: 2271775 - RNA, 19 nt, Artificial Sequence
  Description of Artificial Sequence: Synthetic oligonucleotide
  Antisense strand to SEQ ID NO: 2271774
agaagaaggaaugucuucc

SEQ ID NO: 2271776 - RNA, 19 nt, Artificial Sequence
  Description of Artificial Sequence: Synthetic oligonucleotide
  Sense strand starting at position 2477 of SEQ ID NO: 1884518
cugccagauuucuuuguga

SEQ ID NO: 2271777 - RNA, 19 nt, Artificial Sequence
  Description of Artificial Sequence: Synthetic oligonucleotide
  Antisense strand to SEQ ID NO: 2271776
ucacaaagaaaucuggcag

SEQ ID NO: 2271778 - RNA, 19 nt, Artificial Sequence
  Description of Artificial Sequence: Synthetic oligonucleotide
  Sense strand starting at position 2479 of SEQ ID NO: 1884518
gccagauuucuuugugauc

SEQ ID NO: 2271779 - RNA, 19 nt, Artificial Sequence
  Description of Artificial Sequence: Synthetic oligonucleotide
  Antisense strand to SEQ ID NO: 2271778
gaucacaaagaaaucuggc

SEQ ID NO: 2271780 - RNA, 19 nt, Artificial Sequence
  Description of Artificial Sequence: Synthetic oligonucleotide
  Sense strand starting at position 2598 of SEQ ID NO: 1884518
aaacauuuguaggguauga

SEQ ID NO: 2271781 - RNA, 19 nt, Artificial Sequence
  Description of Artificial Sequence: Synthetic oligonucleotide
  Antisense strand to SEQ ID NO: 2271780
ucauacccuacaaauguuu

SEQ ID NO: 2271782 - RNA, 19 nt, Artificial Sequence
  Description of Artificial Sequence: Synthetic oligonucleotide
  Sense strand starting at position 2735 of SEQ ID NO: 1884518
gagacuugcugugcaccua

SEQ ID NO: 2271783 - RNA, 19 nt, Artificial Sequence
  Description of Artificial Sequence: Synthetic oligonucleotide
  Antisense strand to SEQ ID NO: 2271782
uaggugcacagcaagucuc

SEQ ID NO: 2271784 - RNA, 19 nt, Artificial Sequence
  Description of Artificial Sequence: Synthetic oligonucleotide
  Sense strand starting at position 2775 of SEQ ID NO: 1884518
gggcuuuccacacgugaca

SEQ ID NO: 2271785 - RNA, 19 nt, Artificial Sequence
  Description of Artificial Sequence: Synthetic oligonucleotide
  Antisense strand to SEQ ID NO: 2271784
ugucacguguggaaagccc

SEQ ID NO: 2271786 - RNA, 19 nt, Artificial Sequence
  Description of Artificial Sequence: Synthetic oligonucleotide
  Sense strand starting at position 2950 of SEQ ID NO: 1884518
cgcugagacucaguagguu

SEQ ID NO: 2271787 - RNA, 19 nt, Artificial Sequence
  Description of Artificial Sequence: Synthetic oligonucleotide
  Antisense strand to SEQ ID NO: 2271786
aaccuacugagucucagcg

SEQ ID NO: 2271788 - RNA, 19 nt, Artificial Sequence
  Description of Artificial Sequence: Synthetic oligonucleotide
  Sense strand starting at position 2956 of SEQ ID NO: 1884518
gacucaguagguugaggaa

SEQ ID NO: 2271789 - RNA, 19 nt, Artificial Sequence
  Description of Artificial Sequence: Synthetic oligonucleotide
  Antisense strand to SEQ ID NO: 2271788
uuccucaaccuacugaguc

SEQ ID NO: 2271790 - RNA, 19 nt, Artificial Sequence
  Description of Artificial Sequence: Synthetic oligonucleotide
  Sense strand starting at position 3065 of SEQ ID NO: 1884518
ucuggaugugucugaggaa

SEQ ID NO: 2271791 - RNA, 19 nt, Artificial Sequence
  Description of Artificial Sequence: Synthetic oligonucleotide
  Antisense strand to SEQ ID NO: 2271790
uuccucagacacauccaga

SEQ ID NO: 2271792 - RNA, 19 nt, Artificial Sequence
  Description of Artificial Sequence: Synthetic oligonucleotide
  Sense strand starting at position 3104 of SEQ ID NO: 1884518
ccugaaaccuguuugaaag

SEQ ID NO: 2271793 - RNA, 19 nt, Artificial Sequence
  Description of Artificial Sequence: Synthetic oligonucleotide
  Antisense strand to SEQ ID NO: 2271792
cuuucaaacagguuucagg

SEQ ID NO: 2271794 - RNA, 19 nt, Artificial Sequence
  Description of Artificial Sequence: Synthetic oligonucleotide
  Sense strand starting at position 3314 of SEQ ID NO: 1884518
cuugcuuaauucguggaua

SEQ ID NO: 2271795 - RNA, 19 nt, Artificial Sequence
  Description of Artificial Sequence: Synthetic oligonucleotide
  Antisense strand to SEQ ID NO: 2271794
uauccacgaauuaagcaag

SEQ ID NO: 2271796 - RNA, 19 nt, Artificial Sequence
  Description of Artificial Sequence: Synthetic oligonucleotide
  Sense strand starting at position 3316 of SEQ ID NO: 1884518
ugcuuaauucguggauaua

SEQ ID NO: 2271797 - RNA, 19 nt, Artificial Sequence
  Description of Artificial Sequence: Synthetic oligonucleotide
  Antisense strand to SEQ ID NO: 2271796
uauauccacgaauuaagca

SEQ ID NO: 2271798 - RNA, 19 nt, Artificial Sequence
  Description of Artificial Sequence: Synthetic oligonucleotide
  Sense strand starting at position 3317 of SEQ ID NO: 1884518
gcuuaauucguggauauac

SEQ ID NO: 2271799 - RNA, 19 nt, Artificial Sequence
  Description of Artificial Sequence: Synthetic oligonucleotide
  Antisense strand to SEQ ID NO: 2271798
guauauccacgaauuaagc

SEQ ID NO: 2271800 - RNA, 19 nt, Artificial Sequence
  Description of Artificial Sequence: Synthetic oligonucleotide
  Sense strand starting at position 3328 of SEQ ID NO: 1884518
ggauauaccuacucuacga

SEQ ID NO: 2271801 - RNA, 19 nt, Artificial Sequence
  Description of Artificial Sequence: Synthetic oligonucleotide
  Antisense strand to SEQ ID NO: 2271800
ucguagaguagguauaucc

SEQ ID NO: 2271802 - RNA, 19 nt, Artificial Sequence
  Description of Artificial Sequence: Synthetic oligonucleotide
  Sense strand starting at position 3343 of SEQ ID NO: 1884518
acgaaucuuuaugagaaga

SEQ ID NO: 2271803 - RNA, 19 nt, Artificial Sequence
  Description of Artificial Sequence: Synthetic oligonucleotide
  Antisense strand to SEQ ID NO: 2271802
ucuucucauaaagauucgu

SEQ ID NO: 2271804 - RNA, 19 nt, Artificial Sequence
  Description of Artificial Sequence: Synthetic oligonucleotide
  Sense strand starting at position 3410 of SEQ ID NO: 1884518
gguuuccugagaugcgaga

SEQ ID NO: 2271805 - RNA, 19 nt, Artificial Sequence
  Description of Artificial Sequence: Synthetic oligonucleotide
  Antisense strand to SEQ ID NO: 2271804
ucucgcaucucaggaaacc

SEQ ID NO: 2271806 - RNA, 19 nt, Artificial Sequence
  Description of Artificial Sequence: Synthetic oligonucleotide
  Sense strand starting at position 3529 of SEQ ID NO: 1884518
agucacugcccucaagaaa

SEQ ID NO: 2271807 - RNA, 19 nt, Artificial Sequence
  Description of Artificial Sequence: Synthetic oligonucleotide
  Antisense strand to SEQ ID NO: 2271806
uuucuugagggcagugacu

SEQ ID NO: 2271808 - RNA, 19 nt, Artificial Sequence
  Description of Artificial Sequence: Synthetic oligonucleotide
  Sense strand starting at position 3565 of SEQ ID NO: 1884518
gcugccacucaaugagaaa

SEQ ID NO: 2271809 - RNA, 19 nt, Artificial Sequence
  Description of Artificial Sequence: Synthetic oligonucleotide
  Antisense strand to SEQ ID NO: 2271808
uuucucauugaguggcagc

SEQ ID NO: 2271810 - RNA, 19 nt, Artificial Sequence
  Description of Artificial Sequence: Synthetic oligonucleotide
  Sense strand starting at position 3644 of SEQ ID NO: 1884518
ggaauauuaucaccuccgu

SEQ ID NO: 2271811 - RNA, 19 nt, Artificial Sequence
  Description of Artificial Sequence: Synthetic oligonucleotide
  Antisense strand to SEQ ID NO: 2271810
acggaggugauaauauucc

SEQ ID NO: 2271812 - RNA, 19 nt, Artificial Sequence
  Description of Artificial Sequence: Synthetic oligonucleotide
  Sense strand starting at position 3648 of SEQ ID NO: 1884518
uauuaucaccuccguggua

SEQ ID NO: 2271813 - RNA, 19 nt, Artificial Sequence
  Description of Artificial Sequence: Synthetic oligonucleotide
  Antisense strand to SEQ ID NO: 2271812
uaccacggaggugauaaua

SEQ ID NO: 2271814 - RNA, 19 nt, Artificial Sequence
  Description of Artificial Sequence: Synthetic oligonucleotide
  Sense strand starting at position 3657 of SEQ ID NO: 1884518
cuccgugguaugcauaaga

SEQ ID NO: 2271815 - RNA, 19 nt, Artificial Sequence
  Description of Artificial Sequence: Synthetic oligonucleotide
  Antisense strand to SEQ ID NO: 2271814
ucuuaugcauaccacggag

SEQ ID NO: 2271816 - RNA, 19 nt, Artificial Sequence
  Description of Artificial Sequence: Synthetic oligonucleotide
  Sense strand starting at position 3726 of SEQ ID NO: 1884518
gugaccugcuaagauuuga

SEQ ID NO: 2271817 - RNA, 19 nt, Artificial Sequence
  Description of Artificial Sequence: Synthetic oligonucleotide
  Antisense strand to SEQ ID NO: 2271816
ucaaaucuuagcaggucac

SEQ ID NO: 2271818 - RNA, 19 nt, Artificial Sequence
  Description of Artificial Sequence: Synthetic oligonucleotide
  Sense strand starting at position 3770 of SEQ ID NO: 1884518
ggcaguuuccagcaugaac

SEQ ID NO: 2271819 - RNA, 19 nt, Artificial Sequence
  Description of Artificial Sequence: Synthetic oligonucleotide
  Antisense strand to SEQ ID NO: 2271818
guucaugcuggaaacugcc

SEQ ID NO: 2271820 - RNA, 19 nt, Artificial Sequence
  Description of Artificial Sequence: Synthetic oligonucleotide
  Sense strand starting at position 3849 of SEQ ID NO: 1884518
uggcauguucuagguauuc

SEQ ID NO: 2271821 - RNA, 19 nt, Artificial Sequence
  Description of Artificial Sequence: Synthetic oligonucleotide
  Antisense strand to SEQ ID NO: 2271820
gaauaccuagaacaugcca

SEQ ID NO: 2271822 - RNA, 19 nt, Artificial Sequence
  Description of Artificial Sequence: Synthetic oligonucleotide
  Sense strand starting at position 346 of SEQ ID NO: 1884519
aguccaaaucuuggauaug

SEQ ID NO: 2271823 - RNA, 19 nt, Artificial Sequence
  Description of Artificial Sequence: Synthetic oligonucleotide
  Antisense strand to SEQ ID NO: 2271822
cauauccaagauuuggacu

SEQ ID NO: 2271824 - RNA, 19 nt, Artificial Sequence
  Description of Artificial Sequence: Synthetic oligonucleotide
  Sense strand starting at position 388 of SEQ ID NO: 1884519
gguuguguccugucggagu

SEQ ID NO: 2271825 - RNA, 19 nt, Artificial Sequence
  Description of Artificial Sequence: Synthetic oligonucleotide
  Antisense strand to SEQ ID NO: 2271824
acuccgacaggacacaacc

SEQ ID NO: 2271826 - RNA, 19 nt, Artificial Sequence
  Description of Artificial Sequence: Synthetic oligonucleotide
  Sense strand starting at position 392 of SEQ ID NO: 1884519
guguccugucggagucagu

SEQ ID NO: 2271827 - RNA, 19 nt, Artificial Sequence
  Description of Artificial Sequence: Synthetic oligonucleotide
  Antisense strand to SEQ ID NO: 2271826
acugacuccgacaggacac

SEQ ID NO: 2271828 - RNA, 19 nt, Artificial Sequence
  Description of Artificial Sequence: Synthetic oligonucleotide
  Sense strand starting at position 655 of SEQ ID NO: 1884519
uguacaguuucugugauuu

SEQ ID NO: 2271829 - RNA, 19 nt, Artificial Sequence
  Description of Artificial Sequence: Synthetic oligonucleotide
  Antisense strand to SEQ ID NO: 2271828
aaaucacagaaacuguaca

SEQ ID NO: 2271830 - RNA, 19 nt, Artificial Sequence
  Description of Artificial Sequence: Synthetic oligonucleotide
  Sense strand starting at position 802 of SEQ ID NO: 1884519
caucuuaaugagugaacag

SEQ ID NO: 2271831 - RNA, 19 nt, Artificial Sequence
  Description of Artificial Sequence: Synthetic oligonucleotide
  Antisense strand to SEQ ID NO: 2271830
cuguucacucauuaagaug

SEQ ID NO: 2271832 - RNA, 19 nt, Artificial Sequence
  Description of Artificial Sequence: Synthetic oligonucleotide
  Sense strand starting at position 921 of SEQ ID NO: 1884519
uuugucauggcaggaacaa

SEQ ID NO: 2271833 - RNA, 19 nt, Artificial Sequence
  Description of Artificial Sequence: Synthetic oligonucleotide
  Antisense strand to SEQ ID NO: 2271832
uuguuccugccaugacaaa

SEQ ID NO: 2271834 - RNA, 19 nt, Artificial Sequence
  Description of Artificial Sequence: Synthetic oligonucleotide
  Sense strand starting at position 1160 of SEQ ID NO: 1884519
auacaucagucagcuaaga

SEQ ID NO: 2271835 - RNA, 19 nt, Artificial Sequence
  Description of Artificial Sequence: Synthetic oligonucleotide
  Antisense strand to SEQ ID NO: 2271834
ucuuagcugacugauguau

SEQ ID NO: 2271836 - RNA, 19 nt, Artificial Sequence
  Description of Artificial Sequence: Synthetic oligonucleotide
  Sense strand starting at position 1212 of SEQ ID NO: 1884519
ugguuaagagccugaagga

SEQ ID NO: 2271837 - RNA, 19 nt, Artificial Sequence
  Description of Artificial Sequence: Synthetic oligonucleotide
  Antisense strand to SEQ ID NO: 2271836
uccuucaggcucuuaacca

SEQ ID NO: 2271838 - RNA, 19 nt, Artificial Sequence
  Description of Artificial Sequence: Synthetic oligonucleotide
  Sense strand starting at position 1287 of SEQ ID NO: 1884519
aacuuaguagcugaaaugu

SEQ ID NO: 2271839 - RNA, 19 nt, Artificial Sequence
  Description of Artificial Sequence: Synthetic oligonucleotide
  Antisense strand to SEQ ID NO: 2271838
acauuucagcuacuaaguu

SEQ ID NO: 2271840 - RNA, 19 nt, Artificial Sequence
  Description of Artificial Sequence: Synthetic oligonucleotide
  Sense strand starting at position 1567 of SEQ ID NO: 1884519
ugaguuggagcucaacuga

SEQ ID NO: 2271841 - RNA, 19 nt, Artificial Sequence
  Description of Artificial Sequence: Synthetic oligonucleotide
  Antisense strand to SEQ ID NO: 2271840
ucaguugagcuccaacuca

SEQ ID NO: 2271842 - RNA, 19 nt, Artificial Sequence
  Description of Artificial Sequence: Synthetic oligonucleotide
  Sense strand starting at position 1591 of SEQ ID NO: 1884519
uagcuuggugaauacucua

SEQ ID NO: 2271843 - RNA, 19 nt, Artificial Sequence
  Description of Artificial Sequence: Synthetic oligonucleotide
  Antisense strand to SEQ ID NO: 2271842
uagaguauucaccaagcua

SEQ ID NO: 2271844 - RNA, 19 nt, Artificial Sequence
  Description of Artificial Sequence: Synthetic oligonucleotide
  Sense strand starting at position 1594 of SEQ ID NO: 1884519
cuuggugaauacucuacua

SEQ ID NO: 2271845 - RNA, 19 nt, Artificial Sequence
  Description of Artificial Sequence: Synthetic oligonucleotide
  Antisense strand to SEQ ID NO: 2271844
uaguagaguauucaccaag

SEQ ID NO: 2271846 - RNA, 19 nt, Artificial Sequence
  Description of Artificial Sequence: Synthetic oligonucleotide
  Sense strand starting at position 1607 of SEQ ID NO: 1884519
cuacuagacgauggcaaau

SEQ ID NO: 2271847 - RNA, 19 nt, Artificial Sequence
  Description of Artificial Sequence: Synthetic oligonucleotide
  Antisense strand to SEQ ID NO: 2271846
auuugccaucgucuaguag

SEQ ID NO: 2271848 - RNA, 19 nt, Artificial Sequence
  Description of Artificial Sequence: Synthetic oligonucleotide
  Sense strand starting at position 1741 of SEQ ID NO: 1884519
gagcuaacaguuuaacugu

SEQ ID NO: 2271849 - RNA, 19 nt, Artificial Sequence
  Description of Artificial Sequence: Synthetic oligonucleotide
  Antisense strand to SEQ ID NO: 2271848
acaguuaaacuguuagcuc

SEQ ID NO: 2271850 - RNA, 19 nt, Artificial Sequence
  Description of Artificial Sequence: Synthetic oligonucleotide
  Sense strand starting at position 1750 of SEQ ID NO: 1884519
guuuaacuguaucuggaga

SEQ ID NO: 2271851 - RNA, 19 nt, Artificial Sequence
  Description of Artificial Sequence: Synthetic oligonucleotide
  Antisense strand to SEQ ID NO: 2271850
ucuccagauacaguuaaac

SEQ ID NO: 2271852 - RNA, 19 nt, Artificial Sequence
  Description of Artificial Sequence: Synthetic oligonucleotide
  Sense strand starting at position 2616 of SEQ ID NO: 1884519
gauggaggcccagauucuu

SEQ ID NO: 2271853 - RNA, 19 nt, Artificial Sequence
  Description of Artificial Sequence: Synthetic oligonucleotide
  Antisense strand to SEQ ID NO: 2271852
aagaaucugggccuccauc

SEQ ID NO: 2271854 - RNA, 19 nt, Artificial Sequence
  Description of Artificial Sequence: Synthetic oligonucleotide
  Sense strand starting at position 2627 of SEQ ID NO: 1884519
agauucuugagacguuucu

SEQ ID NO: 2271855 - RNA, 19 nt, Artificial Sequence
  Description of Artificial Sequence: Synthetic oligonucleotide
  Antisense strand to SEQ ID NO: 2271854
agaaacgucucaagaaucu

SEQ ID NO: 2271856 - RNA, 19 nt, Artificial Sequence
  Description of Artificial Sequence: Synthetic oligonucleotide
  Sense strand starting at position 2728 of SEQ ID NO: 1884519
accauuccgcccugggaaa

SEQ ID NO: 2271857 - RNA, 19 nt, Artificial Sequence
  Description of Artificial Sequence: Synthetic oligonucleotide
  Antisense strand to SEQ ID NO: 2271856
uuucccagggcggaauggu

SEQ ID NO: 2271858 - RNA, 19 nt, Artificial Sequence
  Description of Artificial Sequence: Synthetic oligonucleotide
  Sense strand starting at position 2763 of SEQ ID NO: 1884519
cucaaauuauagguuugaa

SEQ ID NO: 2271859 - RNA, 19 nt, Artificial Sequence
  Description of Artificial Sequence: Synthetic oligonucleotide
  Antisense strand to SEQ ID NO: 2271858
uucaaaccuauaauuugag

SEQ ID NO: 2271860 - RNA, 19 nt, Artificial Sequence
  Description of Artificial Sequence: Synthetic oligonucleotide
  Sense strand starting at position 2834 of SEQ ID NO: 1884519
uggagagucucaucugcac

SEQ ID NO: 2271861 - RNA, 19 nt, Artificial Sequence
  Description of Artificial Sequence: Synthetic oligonucleotide
  Antisense strand to SEQ ID NO: 2271860
gugcagaugagacucucca

SEQ ID NO: 2271862 - RNA, 19 nt, Artificial Sequence
  Description of Artificial Sequence: Synthetic oligonucleotide
  Sense strand starting at position 2868 of SEQ ID NO: 1884519
gggacuuggccuuauacuc

SEQ ID NO: 2271863 - RNA, 19 nt, Artificial Sequence
  Description of Artificial Sequence: Synthetic oligonucleotide
  Antisense strand to SEQ ID NO: 2271862
gaguauaaggccaaguccc

SEQ ID NO: 2271864 - RNA, 19 nt, Artificial Sequence
  Description of Artificial Sequence: Synthetic oligonucleotide
  Sense strand starting at position 2873 of SEQ ID NO: 1884519
uuggccuuauacucuuaga

SEQ ID NO: 2271865 - RNA, 19 nt, Artificial Sequence
  Description of Artificial Sequence: Synthetic oligonucleotide
  Antisense strand to SEQ ID NO: 2271864
ucuaagaguauaaggccaa

SEQ ID NO: 2271866 - RNA, 19 nt, Artificial Sequence
  Description of Artificial Sequence: Synthetic oligonucleotide
  Sense strand starting at position 2892 of SEQ ID NO: 1884519
gggccaugcagugauguga

SEQ ID NO: 2271867 - RNA, 19 nt, Artificial Sequence
  Description of Artificial Sequence: Synthetic oligonucleotide
  Antisense strand to SEQ ID NO: 2271866
ucacaucacugcauggccc

SEQ ID NO: 2271868 - RNA, 19 nt, Artificial Sequence
  Description of Artificial Sequence: Synthetic oligonucleotide
  Sense strand starting at position 2915 of SEQ ID NO: 1884519
ugggccuucuagucaaaua

SEQ ID NO: 2271869 - RNA, 19 nt, Artificial Sequence
  Description of Artificial Sequence: Synthetic oligonucleotide
  Antisense strand to SEQ ID NO: 2271868
uauuugacuagaaggccca

SEQ ID NO: 2271870 - RNA, 19 nt, Artificial Sequence
  Description of Artificial Sequence: Synthetic oligonucleotide
  Sense strand starting at position 2916 of SEQ ID NO: 1884519
gggccuucuagucaaauag

SEQ ID NO: 2271871 - RNA, 19 nt, Artificial Sequence
  Description of Artificial Sequence: Synthetic oligonucleotide
  Antisense strand to SEQ ID NO: 2271870
cuauuugacuagaaggccc

SEQ ID NO: 2271872 - RNA, 19 nt, Artificial Sequence
  Description of Artificial Sequence: Synthetic oligonucleotide
  Sense strand starting at position 2966 of SEQ ID NO: 1884519
cgugguccucuugagauca

SEQ ID NO: 2271873 - RNA, 19 nt, Artificial Sequence
  Description of Artificial Sequence: Synthetic oligonucleotide
  Antisense strand to SEQ ID NO: 2271872
ugaucucaagaggaccacg

SEQ ID NO: 2271874 - RNA, 19 nt, Artificial Sequence
  Description of Artificial Sequence: Synthetic oligonucleotide
  Sense strand starting at position 3031 of SEQ ID NO: 1884519
agggacuauuuagaauagu

SEQ ID NO: 2271875 - RNA, 19 nt, Artificial Sequence
  Description of Artificial Sequence: Synthetic oligonucleotide
  Antisense strand to SEQ ID NO: 2271874
acuauucuaaauagucccu

SEQ ID NO: 2271876 - RNA, 19 nt, Artificial Sequence
  Description of Artificial Sequence: Synthetic oligonucleotide
  Sense strand starting at position 3050 of SEQ ID NO: 1884519
agaaacuauuuguaucaga

SEQ ID NO: 2271877 - RNA, 19 nt, Artificial Sequence
  Description of Artificial Sequence: Synthetic oligonucleotide
  Antisense strand to SEQ ID NO: 2271876
ucugauacaaauaguuucu

SEQ ID NO: 2271878 - RNA, 19 nt, Artificial Sequence
  Description of Artificial Sequence: Synthetic oligonucleotide
  Sense strand starting at position 3055 of SEQ ID NO: 1884519
cuauuuguaucagaaauag

SEQ ID NO: 2271879 - RNA, 19 nt, Artificial Sequence
  Description of Artificial Sequence: Synthetic oligonucleotide
  Antisense strand to SEQ ID NO: 2271878
cuauuucugauacaaauag

SEQ ID NO: 2271880 - RNA, 19 nt, Artificial Sequence
  Description of Artificial Sequence: Synthetic oligonucleotide
  Sense strand starting at position 3091 of SEQ ID NO: 1884519
agagcuguaauaggucaaa

SEQ ID NO: 2271881 - RNA, 19 nt, Artificial Sequence
  Description of Artificial Sequence: Synthetic oligonucleotide
  Antisense strand to SEQ ID NO: 2271880
uuugaccuauuacagcucu

SEQ ID NO: 2271882 - RNA, 19 nt, Artificial Sequence
  Description of Artificial Sequence: Synthetic oligonucleotide
  Sense strand starting at position 3094 of SEQ ID NO: 1884519
gcuguaauaggucaaagaa

SEQ ID NO: 2271883 - RNA, 19 nt, Artificial Sequence
  Description of Artificial Sequence: Synthetic oligonucleotide
  Antisense strand to SEQ ID NO: 2271882
uucuuugaccuauuacagc

SEQ ID NO: 2271884 - RNA, 19 nt, Artificial Sequence
  Description of Artificial Sequence: Synthetic oligonucleotide
  Sense strand starting at position 3123 of SEQ ID NO: 1884519
ggaggugagacuugaguag

SEQ ID NO: 2271885 - RNA, 19 nt, Artificial Sequence
  Description of Artificial Sequence: Synthetic oligonucleotide
  Antisense strand to SEQ ID NO: 2271884
cuacucaagucucaccucc

SEQ ID NO: 2271886 - RNA, 19 nt, Artificial Sequence
  Description of Artificial Sequence: Synthetic oligonucleotide
  Sense strand starting at position 3135 of SEQ ID NO: 1884519
ugaguagauccuugaugca

SEQ ID NO: 2271887 - RNA, 19 nt, Artificial Sequence
  Description of Artificial Sequence: Synthetic oligonucleotide
  Antisense strand to SEQ ID NO: 2271886
ugcaucaaggaucuacuca

SEQ ID NO: 2271888 - RNA, 19 nt, Artificial Sequence
  Description of Artificial Sequence: Synthetic oligonucleotide
  Sense strand starting at position 3247 of SEQ ID NO: 1884519
cugggagaucucugcuaau

SEQ ID NO: 2271889 - RNA, 19 nt, Artificial Sequence
  Description of Artificial Sequence: Synthetic oligonucleotide
  Antisense strand to SEQ ID NO: 2271888
auuagcagagaucucccag

SEQ ID NO: 2271890 - RNA, 19 nt, Artificial Sequence
  Description of Artificial Sequence: Synthetic oligonucleotide
  Sense strand starting at position 3416 of SEQ ID NO: 1884519
accaaaggcuuaguucuaa

SEQ ID NO: 2271891 - RNA, 19 nt, Artificial Sequence
  Description of Artificial Sequence: Synthetic oligonucleotide
  Antisense strand to SEQ ID NO: 2271890
uuagaacuaagccuuuggu

SEQ ID NO: 2271892 - RNA, 19 nt, Artificial Sequence
  Description of Artificial Sequence: Synthetic oligonucleotide
  Sense strand starting at position 3484 of SEQ ID NO: 1884519
accagcaaauggucucaua

SEQ ID NO: 2271893 - RNA, 19 nt, Artificial Sequence
  Description of Artificial Sequence: Synthetic oligonucleotide
  Antisense strand to SEQ ID NO: 2271892
uaugagaccauuugcuggu

SEQ ID NO: 2271894 - RNA, 19 nt, Artificial Sequence
  Description of Artificial Sequence: Synthetic oligonucleotide
  Sense strand starting at position 3528 of SEQ ID NO: 1884519
gcaggucaucuggaucauu

SEQ ID NO: 2271895 - RNA, 19 nt, Artificial Sequence
  Description of Artificial Sequence: Synthetic oligonucleotide
  Antisense strand to SEQ ID NO: 2271894
aaugauccagaugaccugc

SEQ ID NO: 2271896 - RNA, 19 nt, Artificial Sequence
  Description of Artificial Sequence: Synthetic oligonucleotide
  Sense strand starting at position 3591 of SEQ ID NO: 1884519
gcccaaggauguuugaaua

SEQ ID NO: 2271897 - RNA, 19 nt, Artificial Sequence
  Description of Artificial Sequence: Synthetic oligonucleotide
  Antisense strand to SEQ ID NO: 2271896
uauucaaacauccuugggc

SEQ ID NO: 2271898 - RNA, 19 nt, Artificial Sequence
  Description of Artificial Sequence: Synthetic oligonucleotide
  Sense strand starting at position 3938 of SEQ ID NO: 1884519
uugguuaggagauaguuau

SEQ ID NO: 2271899 - RNA, 19 nt, Artificial Sequence
  Description of Artificial Sequence: Synthetic oligonucleotide
  Antisense strand to SEQ ID NO: 2271898
auaacuaucuccuaaccaa

SEQ ID NO: 2271900 - RNA, 19 nt, Artificial Sequence
  Description of Artificial Sequence: Synthetic oligonucleotide
  Sense strand starting at position 3974 of SEQ ID NO: 1884519
accaaauuguuagucacuu

SEQ ID NO: 2271901 - RNA, 19 nt, Artificial Sequence
  Description of Artificial Sequence: Synthetic oligonucleotide
  Antisense strand to SEQ ID NO: 2271900
aagugacuaacaauuuggu

SEQ ID NO: 2271902 - RNA, 19 nt, Artificial Sequence
  Description of Artificial Sequence: Synthetic oligonucleotide
  Sense strand starting at position 63 of SEQ ID NO: 1884520
ggaaguucauugguaaugu

SEQ ID NO: 2271903 - RNA, 19 nt, Artificial Sequence
  Description of Artificial Sequence: Synthetic oligonucleotide
  Antisense strand to SEQ ID NO: 2271902
acauuaccaaugaacuucc

SEQ ID NO: 2271904 - RNA, 19 nt, Artificial Sequence
  Description of Artificial Sequence: Synthetic oligonucleotide
  Sense strand starting at position 200 of SEQ ID NO: 1884520
gccauaauuuaagggaaac

SEQ ID NO: 2271905 - RNA, 19 nt, Artificial Sequence
  Description of Artificial Sequence: Synthetic oligonucleotide
  Antisense strand to SEQ ID NO: 2271904
guuucccuuaaauuauggc

SEQ ID NO: 2271906 - RNA, 19 nt, Artificial Sequence
  Description of Artificial Sequence: Synthetic oligonucleotide
  Sense strand starting at position 303 of SEQ ID NO: 1884520
augcauuuguauguacuua

SEQ ID NO: 2271907 - RNA, 19 nt, Artificial Sequence
  Description of Artificial Sequence: Synthetic oligonucleotide
  Antisense strand to SEQ ID NO: 2271906
uaaguacauacaaaugcau

SEQ ID NO: 2271908 - RNA, 19 nt, Artificial Sequence
  Description of Artificial Sequence: Synthetic oligonucleotide
  Sense strand starting at position 343 of SEQ ID NO: 1884520
gcaguuucuccuggaaagg

SEQ ID NO: 2271909 - RNA, 19 nt, Artificial Sequence
  Description of Artificial Sequence: Synthetic oligonucleotide
  Antisense strand to SEQ ID NO: 2271908
ccuuuccaggagaaacugc

SEQ ID NO: 2271910 - RNA, 19 nt, Artificial Sequence
  Description of Artificial Sequence: Synthetic oligonucleotide
  Sense strand starting at position 386 of SEQ ID NO: 1884520
cggugaggcagauaugacu

SEQ ID NO: 2271911 - RNA, 19 nt, Artificial Sequence
  Description of Artificial Sequence: Synthetic oligonucleotide
  Antisense strand to SEQ ID NO: 2271910
agucauaucugccucaccg

SEQ ID NO: 2271912 - RNA, 19 nt, Artificial Sequence
  Description of Artificial Sequence: Synthetic oligonucleotide
  Sense strand starting at position 406 of SEQ ID NO: 1884520
acaggaggccgcuauucua

SEQ ID NO: 2271913 - RNA, 19 nt, Artificial Sequence
  Description of Artificial Sequence: Synthetic oligonucleotide
  Antisense strand to SEQ ID NO: 2271912
uagaauagcggccuccugu

SEQ ID NO: 2271914 - RNA, 19 nt, Artificial Sequence
  Description of Artificial Sequence: Synthetic oligonucleotide
  Sense strand starting at position 847 of SEQ ID NO: 1884520
aguccaaaucuuggauaug

SEQ ID NO: 2271915 - RNA, 19 nt, Artificial Sequence
  Description of Artificial Sequence: Synthetic oligonucleotide
  Antisense strand to SEQ ID NO: 2271914
cauauccaagauuuggacu

SEQ ID NO: 2271916 - RNA, 19 nt, Artificial Sequence
  Description of Artificial Sequence: Synthetic oligonucleotide
  Sense strand starting at position 889 of SEQ ID NO: 1884520
gguuguguccugucggagu

SEQ ID NO: 2271917 - RNA, 19 nt, Artificial Sequence
  Description of Artificial Sequence: Synthetic oligonucleotide
  Antisense strand to SEQ ID NO: 2271916
acuccgacaggacacaacc

SEQ ID NO: 2271918 - RNA, 19 nt, Artificial Sequence
  Description of Artificial Sequence: Synthetic oligonucleotide
  Sense strand starting at position 893 of SEQ ID NO: 1884520
guguccugucggagucagu

SEQ ID NO: 2271919 - RNA, 19 nt, Artificial Sequence
  Description of Artificial Sequence: Synthetic oligonucleotide
  Antisense strand to SEQ ID NO: 2271918
acugacuccgacaggacac

SEQ ID NO: 2271920 - RNA, 19 nt, Artificial Sequence
  Description of Artificial Sequence: Synthetic oligonucleotide
  Sense strand starting at position 1156 of SEQ ID NO: 1884520
uguacaguuucugugauuu

SEQ ID NO: 2271921 - RNA, 19 nt, Artificial Sequence
  Description of Artificial Sequence: Synthetic oligonucleotide
  Antisense strand to SEQ ID NO: 2271920
aaaucacagaaacuguaca

SEQ ID NO: 2271922 - RNA, 19 nt, Artificial Sequence
  Description of Artificial Sequence: Synthetic oligonucleotide
  Sense strand starting at position 1303 of SEQ ID NO: 1884520
caucuuaaugagugaacag

SEQ ID NO: 2271923 - RNA, 19 nt, Artificial Sequence
  Description of Artificial Sequence: Synthetic oligonucleotide
  Antisense strand to SEQ ID NO: 2271922
cuguucacucauuaagaug

SEQ ID NO: 2271924 - RNA, 19 nt, Artificial Sequence
  Description of Artificial Sequence: Synthetic oligonucleotide
  Sense strand starting at position 1422 of SEQ ID NO: 1884520
uuugucauggcaggaacaa

SEQ ID NO: 2271925 - RNA, 19 nt, Artificial Sequence
  Description of Artificial Sequence: Synthetic oligonucleotide
  Antisense strand to SEQ ID NO: 2271924
uuguuccugccaugacaaa

SEQ ID NO: 2271926 - RNA, 19 nt, Artificial Sequence
  Description of Artificial Sequence: Synthetic oligonucleotide
  Sense strand starting at position 1661 of SEQ ID NO: 1884520
auacaucagucagcuaaga

SEQ ID NO: 2271927 - RNA, 19 nt, Artificial Sequence
  Description of Artificial Sequence: Synthetic oligonucleotide
  Antisense strand to SEQ ID NO: 2271926
ucuuagcugacugauguau

SEQ ID NO: 2271928 - RNA, 19 nt, Artificial Sequence
  Description of Artificial Sequence: Synthetic oligonucleotide
  Sense strand starting at position 1713 of SEQ ID NO: 1884520
ugguuaagagccugaagga

SEQ ID NO: 2271929 - RNA, 19 nt, Artificial Sequence
  Description of Artificial Sequence: Synthetic oligonucleotide
  Antisense strand to SEQ ID NO: 2271928
uccuucaggcucuuaacca

SEQ ID NO: 2271930 - RNA, 19 nt, Artificial Sequence
  Description of Artificial Sequence: Synthetic oligonucleotide
  Sense strand starting at position 1788 of SEQ ID NO: 1884520
aacuuaguagcugaaaugu

SEQ ID NO: 2271931 - RNA, 19 nt, Artificial Sequence
  Description of Artificial Sequence: Synthetic oligonucleotide
  Antisense strand to SEQ ID NO: 2271930
acauuucagcuacuaaguu

SEQ ID NO: 2271932 - RNA, 19 nt, Artificial Sequence
  Description of Artificial Sequence: Synthetic oligonucleotide
  Sense strand starting at position 2068 of SEQ ID NO: 1884520
ugaguuggagcucaacuga

SEQ ID NO: 2271933 - RNA, 19 nt, Artificial Sequence
  Description of Artificial Sequence: Synthetic oligonucleotide
  Antisense strand to SEQ ID NO: 2271932
ucaguugagcuccaacuca

SEQ ID NO: 2271934 - RNA, 19 nt, Artificial Sequence
  Description of Artificial Sequence: Synthetic oligonucleotide
  Sense strand starting at position 2092 of SEQ ID NO: 1884520
uagcuuggugaauacucua

SEQ ID NO: 2271935 - RNA, 19 nt, Artificial Sequence
  Description of Artificial Sequence: Synthetic oligonucleotide
  Antisense strand to SEQ ID NO: 2271934
uagaguauucaccaagcua

SEQ ID NO: 2271936 - RNA, 19 nt, Artificial Sequence
  Description of Artificial Sequence: Synthetic oligonucleotide
  Sense strand starting at position 2095 of SEQ ID NO: 1884520
cuuggugaauacucuacua

SEQ ID NO: 2271937 - RNA, 19 nt, Artificial Sequence
  Description of Artificial Sequence: Synthetic oligonucleotide
  Antisense strand to SEQ ID NO: 2271936
uaguagaguauucaccaag

SEQ ID NO: 2271938 - RNA, 19 nt, Artificial Sequence
  Description of Artificial Sequence: Synthetic oligonucleotide
  Sense strand starting at position 2108 of SEQ ID NO: 1884520
cuacuagacgauggcaaau

SEQ ID NO: 2271939 - RNA, 19 nt, Artificial Sequence
  Description of Artificial Sequence: Synthetic oligonucleotide
  Antisense strand to SEQ ID NO: 2271938
auuugccaucgucuaguag

SEQ ID NO: 2271940 - RNA, 19 nt, Artificial Sequence
  Description of Artificial Sequence: Synthetic oligonucleotide
  Sense strand starting at position 2242 of SEQ ID NO: 1884520
gagcuaacaguuuaacugu

SEQ ID NO: 2271941 - RNA, 19 nt, Artificial Sequence
  Description of Artificial Sequence: Synthetic oligonucleotide
  Antisense strand to SEQ ID NO: 2271940
acaguuaaacuguuagcuc

SEQ ID NO: 2271942 - RNA, 19 nt, Artificial Sequence
  Description of Artificial Sequence: Synthetic oligonucleotide
  Sense strand starting at position 2251 of SEQ ID NO: 1884520
guuuaacuguaucuggaga

SEQ ID NO: 2271943 - RNA, 19 nt, Artificial Sequence
  Description of Artificial Sequence: Synthetic oligonucleotide
  Antisense strand to SEQ ID NO: 2271942
ucuccagauacaguuaaac

SEQ ID NO: 2271944 - RNA, 19 nt, Artificial Sequence
  Description of Artificial Sequence: Synthetic oligonucleotide
  Sense strand starting at position 3117 of SEQ ID NO: 1884520
gauggaggcccagauucuu

SEQ ID NO: 2271945 - RNA, 19 nt, Artificial Sequence
  Description of Artificial Sequence: Synthetic oligonucleotide
  Antisense strand to SEQ ID NO: 2271944
aagaaucugggccuccauc

SEQ ID NO: 2271946 - RNA, 19 nt, Artificial Sequence
  Description of Artificial Sequence: Synthetic oligonucleotide
  Sense strand starting at position 3128 of SEQ ID NO: 1884520
agauucuugagacguuucu

SEQ ID NO: 2271947 - RNA, 19 nt, Artificial Sequence
  Description of Artificial Sequence: Synthetic oligonucleotide
  Antisense strand to SEQ ID NO: 2271946
agaaacgucucaagaaucu

SEQ ID NO: 2271948 - RNA, 19 nt, Artificial Sequence
  Description of Artificial Sequence: Synthetic oligonucleotide
  Sense strand starting at position 3229 of SEQ ID NO: 1884520
accauuccgcccugggaaa

SEQ ID NO: 2271949 - RNA, 19 nt, Artificial Sequence
  Description of Artificial Sequence: Synthetic oligonucleotide
  Antisense strand to SEQ ID NO: 2271948
uuucccagggcggaauggu

SEQ ID NO: 2271950 - RNA, 19 nt, Artificial Sequence
  Description of Artificial Sequence: Synthetic oligonucleotide
  Sense strand starting at position 3264 of SEQ ID NO: 1884520
cucaaauuauagguuugaa

SEQ ID NO: 2271951 - RNA, 19 nt, Artificial Sequence
  Description of Artificial Sequence: Synthetic oligonucleotide
  Antisense strand to SEQ ID NO: 2271950
uucaaaccuauaauuugag

SEQ ID NO: 2271952 - RNA, 19 nt, Artificial Sequence
  Description of Artificial Sequence: Synthetic oligonucleotide
  Sense strand starting at position 3335 of SEQ ID NO: 1884520
uggagagucucaucugcac

SEQ ID NO: 2271953 - RNA, 19 nt, Artificial Sequence
  Description of Artificial Sequence: Synthetic oligonucleotide
  Antisense strand to SEQ ID NO: 2271952
gugcagaugagacucucca

SEQ ID NO: 2271954 - RNA, 19 nt, Artificial Sequence
  Description of Artificial Sequence: Synthetic oligonucleotide
  Sense strand starting at position 3369 of SEQ ID NO: 1884520
gggacuuggccuuauacuc

SEQ ID NO: 2271955 - RNA, 19 nt, Artificial Sequence
  Description of Artificial Sequence: Synthetic oligonucleotide
  Antisense strand to SEQ ID NO: 2271954
gaguauaaggccaaguccc

SEQ ID NO: 2271956 - RNA, 19 nt, Artificial Sequence
  Description of Artificial Sequence: Synthetic oligonucleotide
  Sense strand starting at position 3374 of SEQ ID NO: 1884520
uuggccuuauacucuuaga

SEQ ID NO: 2271957 - RNA, 19 nt, Artificial Sequence
  Description of Artificial Sequence: Synthetic oligonucleotide
  Antisense strand to SEQ ID NO: 2271956
ucuaagaguauaaggccaa

SEQ ID NO: 2271958 - RNA, 19 nt, Artificial Sequence
  Description of Artificial Sequence: Synthetic oligonucleotide
  Sense strand starting at position 3416 of SEQ ID NO: 1884520
ugggccuucuagucaaaua

SEQ ID NO: 2271959 - RNA, 19 nt, Artificial Sequence
  Description of Artificial Sequence: Synthetic oligonucleotide
  Antisense strand to SEQ ID NO: 2271958
uauuugacuagaaggccca

SEQ ID NO: 2271960 - RNA, 19 nt, Artificial Sequence
  Description of Artificial Sequence: Synthetic oligonucleotide
  Sense strand starting at position 3417 of SEQ ID NO: 1884520
gggccuucuagucaaauag

SEQ ID NO: 2271961 - RNA, 19 nt, Artificial Sequence
  Description of Artificial Sequence: Synthetic oligonucleotide
  Antisense strand to SEQ ID NO: 2271960
cuauuugacuagaaggccc

SEQ ID NO: 2271962 - RNA, 19 nt, Artificial Sequence
  Description of Artificial Sequence: Synthetic oligonucleotide
  Sense strand starting at position 3467 of SEQ ID NO: 1884520
cgugguccucuugagauca

SEQ ID NO: 2271963 - RNA, 19 nt, Artificial Sequence
  Description of Artificial Sequence: Synthetic oligonucleotide
  Antisense strand to SEQ ID NO: 2271962
ugaucucaagaggaccacg

SEQ ID NO: 2271964 - RNA, 19 nt, Artificial Sequence
  Description of Artificial Sequence: Synthetic oligonucleotide
  Sense strand starting at position 3532 of SEQ ID NO: 1884520
agggacuauuuagaauagu

SEQ ID NO: 2271965 - RNA, 19 nt, Artificial Sequence
  Description of Artificial Sequence: Synthetic oligonucleotide
  Antisense strand to SEQ ID NO: 2271964
acuauucuaaauagucccu

SEQ ID NO: 2271966 - RNA, 19 nt, Artificial Sequence
  Description of Artificial Sequence: Synthetic oligonucleotide
  Sense strand starting at position 3551 of SEQ ID NO: 1884520
agaaacuauuuguaucaga

SEQ ID NO: 2271967 - RNA, 19 nt, Artificial Sequence
  Description of Artificial Sequence: Synthetic oligonucleotide
  Antisense strand to SEQ ID NO: 2271966
ucugauacaaauaguuucu

SEQ ID NO: 2271968 - RNA, 19 nt, Artificial Sequence
  Description of Artificial Sequence: Synthetic oligonucleotide
  Sense strand starting at position 3556 of SEQ ID NO: 1884520
cuauuuguaucagaaauag

SEQ ID NO: 2271969 - RNA, 19 nt, Artificial Sequence
  Description of Artificial Sequence: Synthetic oligonucleotide
  Antisense strand to SEQ ID NO: 2271968
cuauuucugauacaaauag

SEQ ID NO: 2271970 - RNA, 19 nt, Artificial Sequence
  Description of Artificial Sequence: Synthetic oligonucleotide
  Sense strand starting at position 3592 of SEQ ID NO: 1884520
agagcuguaauaggucaaa

SEQ ID NO: 2271971 - RNA, 19 nt, Artificial Sequence
  Description of Artificial Sequence: Synthetic oligonucleotide
  Antisense strand to SEQ ID NO: 2271970
uuugaccuauuacagcucu

SEQ ID NO: 2271972 - RNA, 19 nt, Artificial Sequence
  Description of Artificial Sequence: Synthetic oligonucleotide
  Sense strand starting at position 3595 of SEQ ID NO: 1884520
gcuguaauaggucaaagaa

SEQ ID NO: 2271973 - RNA, 19 nt, Artificial Sequence
  Description of Artificial Sequence: Synthetic oligonucleotide
  Antisense strand to SEQ ID NO: 2271972
uucuuugaccuauuacagc

SEQ ID NO: 2271974 - RNA, 19 nt, Artificial Sequence
  Description of Artificial Sequence: Synthetic oligonucleotide
  Sense strand starting at position 3624 of SEQ ID NO: 1884520
ggaggugagacuugaguag

SEQ ID NO: 2271975 - RNA, 19 nt, Artificial Sequence
  Description of Artificial Sequence: Synthetic oligonucleotide
  Antisense strand to SEQ ID NO: 2271974
cuacucaagucucaccucc

SEQ ID NO: 2271976 - RNA, 19 nt, Artificial Sequence
  Description of Artificial Sequence: Synthetic oligonucleotide
  Sense strand starting at position 3636 of SEQ ID NO: 1884520
ugaguagauccuugaugca

SEQ ID NO: 2271977 - RNA, 19 nt, Artificial Sequence
  Description of Artificial Sequence: Synthetic oligonucleotide
  Antisense strand to SEQ ID NO: 2271976
ugcaucaaggaucuacuca

SEQ ID NO: 2271978 - RNA, 19 nt, Artificial Sequence
  Description of Artificial Sequence: Synthetic oligonucleotide
  Sense strand starting at position 3748 of SEQ ID NO: 1884520
cugggagaucucugcuaau

SEQ ID NO: 2271979 - RNA, 19 nt, Artificial Sequence
  Description of Artificial Sequence: Synthetic oligonucleotide
  Antisense strand to SEQ ID NO: 2271978
auuagcagagaucucccag

SEQ ID NO: 2271980 - RNA, 19 nt, Artificial Sequence
  Description of Artificial Sequence: Synthetic oligonucleotide
  Sense strand starting at position 3917 of SEQ ID NO: 1884520
accaaaggcuuaguucuaa

SEQ ID NO: 2271981 - RNA, 19 nt, Artificial Sequence
  Description of Artificial Sequence: Synthetic oligonucleotide
  Antisense strand to SEQ ID NO: 2271980
uuagaacuaagccuuuggu

SEQ ID NO: 2271982 - RNA, 19 nt, Artificial Sequence
  Description of Artificial Sequence: Synthetic oligonucleotide
  Sense strand starting at position 392 of SEQ ID NO: 1884521
acagucaaguuagugaaau

SEQ ID NO: 2271983 - RNA, 19 nt, Artificial Sequence
  Description of Artificial Sequence: Synthetic oligonucleotide
  Antisense strand to SEQ ID NO: 2271982
auuucacuaacuugacugu

SEQ ID NO: 2271984 - RNA, 19 nt, Artificial Sequence
  Description of Artificial Sequence: Synthetic oligonucleotide
  Sense strand starting at position 422 of SEQ ID NO: 1884521
uaugcuucccguuagaaau

SEQ ID NO: 2271985 - RNA, 19 nt, Artificial Sequence
  Description of Artificial Sequence: Synthetic oligonucleotide
  Antisense strand to SEQ ID NO: 2271984
auuucuaacgggaagcaua

SEQ ID NO: 2271986 - RNA, 19 nt, Artificial Sequence
  Description of Artificial Sequence: Synthetic oligonucleotide
  Sense strand starting at position 495 of SEQ ID NO: 1884521
gccagugucuguucugagu

SEQ ID NO: 2271987 - RNA, 19 nt, Artificial Sequence
  Description of Artificial Sequence: Synthetic oligonucleotide
  Antisense strand to SEQ ID NO: 2271986
acucagaacagacacuggc

SEQ ID NO: 2271988 - RNA, 19 nt, Artificial Sequence
  Description of Artificial Sequence: Synthetic oligonucleotide
  Sense strand starting at position 641 of SEQ ID NO: 1884521
ugagaacagccucggcaau

SEQ ID NO: 2271989 - RNA, 19 nt, Artificial Sequence
  Description of Artificial Sequence: Synthetic oligonucleotide
  Antisense strand to SEQ ID NO: 2271988
auugccgaggcuguucuca

SEQ ID NO: 2271990 - RNA, 19 nt, Artificial Sequence
  Description of Artificial Sequence: Synthetic oligonucleotide
  Sense strand starting at position 893 of SEQ ID NO: 1884521
ccuugcauauugucagcua

SEQ ID NO: 2271991 - RNA, 19 nt, Artificial Sequence
  Description of Artificial Sequence: Synthetic oligonucleotide
  Antisense strand to SEQ ID NO: 2271990
uagcugacaauaugcaagg

SEQ ID NO: 2271992 - RNA, 19 nt, Artificial Sequence
  Description of Artificial Sequence: Synthetic oligonucleotide
  Sense strand starting at position 942 of SEQ ID NO: 1884521
uguaaaguuccuuugcgcu

SEQ ID NO: 2271993 - RNA, 19 nt, Artificial Sequence
  Description of Artificial Sequence: Synthetic oligonucleotide
  Antisense strand to SEQ ID NO: 2271992
agcgcaaaggaacuuuaca

SEQ ID NO: 2271994 - RNA, 19 nt, Artificial Sequence
  Description of Artificial Sequence: Synthetic oligonucleotide
  Sense strand starting at position 948 of SEQ ID NO: 1884521
guuccuuugcgcucuguga

SEQ ID NO: 2271995 - RNA, 19 nt, Artificial Sequence
  Description of Artificial Sequence: Synthetic oligonucleotide
  Antisense strand to SEQ ID NO: 2271994
ucacagagcgcaaaggaac

SEQ ID NO: 2271996 - RNA, 19 nt, Artificial Sequence
  Description of Artificial Sequence: Synthetic oligonucleotide
  Sense strand starting at position 949 of SEQ ID NO: 1884521
uuccuuugcgcucugugaa

SEQ ID NO: 2271997 - RNA, 19 nt, Artificial Sequence
  Description of Artificial Sequence: Synthetic oligonucleotide
  Antisense strand to SEQ ID NO: 2271996
uucacagagcgcaaaggaa

SEQ ID NO: 2271998 - RNA, 19 nt, Artificial Sequence
  Description of Artificial Sequence: Synthetic oligonucleotide
  Sense strand starting at position 952 of SEQ ID NO: 1884521
cuuugcgcucugugaauua

SEQ ID NO: 2271999 - RNA, 19 nt, Artificial Sequence
  Description of Artificial Sequence: Synthetic oligonucleotide
  Antisense strand to SEQ ID NO: 2271998
uaauucacagagcgcaaag

SEQ ID NO: 2272000 - RNA, 19 nt, Artificial Sequence
  Description of Artificial Sequence: Synthetic oligonucleotide
  Sense strand starting at position 963 of SEQ ID NO: 1884521
gugaauuauacacguuagc

SEQ ID NO: 2272001 - RNA, 19 nt, Artificial Sequence
  Description of Artificial Sequence: Synthetic oligonucleotide
  Antisense strand to SEQ ID NO: 2272000
gcuaacguguauaauucac

SEQ ID NO: 2272002 - RNA, 19 nt, Artificial Sequence
  Description of Artificial Sequence: Synthetic oligonucleotide
  Sense strand starting at position 1023 of SEQ ID NO: 1884521
ccuggaaucugaucccuaa

SEQ ID NO: 2272003 - RNA, 19 nt, Artificial Sequence
  Description of Artificial Sequence: Synthetic oligonucleotide
  Antisense strand to SEQ ID NO: 2272002
uuagggaucagauuccagg

SEQ ID NO: 2272004 - RNA, 19 nt, Artificial Sequence
  Description of Artificial Sequence: Synthetic oligonucleotide
  Sense strand starting at position 1030 of SEQ ID NO: 1884521
ucugaucccuaagaauuag

SEQ ID NO: 2272005 - RNA, 19 nt, Artificial Sequence
  Description of Artificial Sequence: Synthetic oligonucleotide
  Antisense strand to SEQ ID NO: 2272004
cuaauucuuagggaucaga

SEQ ID NO: 2272006 - RNA, 19 nt, Artificial Sequence
  Description of Artificial Sequence: Synthetic oligonucleotide
  Sense strand starting at position 1107 of SEQ ID NO: 1884521
gaagacagucaucaccgua

SEQ ID NO: 2272007 - RNA, 19 nt, Artificial Sequence
  Description of Artificial Sequence: Synthetic oligonucleotide
  Antisense strand to SEQ ID NO: 2272006
uacggugaugacugucuuc

SEQ ID NO: 2272008 - RNA, 19 nt, Artificial Sequence
  Description of Artificial Sequence: Synthetic oligonucleotide
  Sense strand starting at position 1110 of SEQ ID NO: 1884521
gacagucaucaccguagga

SEQ ID NO: 2272009 - RNA, 19 nt, Artificial Sequence
  Description of Artificial Sequence: Synthetic oligonucleotide
  Antisense strand to SEQ ID NO: 2272008
uccuacggugaugacuguc

SEQ ID NO: 2272010 - RNA, 19 nt, Artificial Sequence
  Description of Artificial Sequence: Synthetic oligonucleotide
  Sense strand starting at position 1378 of SEQ ID NO: 1884521
ugaagaucuugcccugauu

SEQ ID NO: 2272011 - RNA, 19 nt, Artificial Sequence
  Description of Artificial Sequence: Synthetic oligonucleotide
  Antisense strand to SEQ ID NO: 2272010
aaucagggcaagaucuuca

SEQ ID NO: 2272012 - RNA, 19 nt, Artificial Sequence
  Description of Artificial Sequence: Synthetic oligonucleotide
  Sense strand starting at position 1381 of SEQ ID NO: 1884521
agaucuugcccugauugaa

SEQ ID NO: 2272013 - RNA, 19 nt, Artificial Sequence
  Description of Artificial Sequence: Synthetic oligonucleotide
  Antisense strand to SEQ ID NO: 2272012
uucaaucagggcaagaucu

SEQ ID NO: 2272014 - RNA, 19 nt, Artificial Sequence
  Description of Artificial Sequence: Synthetic oligonucleotide
  Sense strand starting at position 1545 of SEQ ID NO: 1884521
gccagcauguggucaaguu

SEQ ID NO: 2272015 - RNA, 19 nt, Artificial Sequence
  Description of Artificial Sequence: Synthetic oligonucleotide
  Antisense strand to SEQ ID NO: 2272014
aacuugaccacaugcuggc

SEQ ID NO: 2272016 - RNA, 19 nt, Artificial Sequence
  Description of Artificial Sequence: Synthetic oligonucleotide
  Sense strand starting at position 1546 of SEQ ID NO: 1884521
ccagcauguggucaaguua

SEQ ID NO: 2272017 - RNA, 19 nt, Artificial Sequence
  Description of Artificial Sequence: Synthetic oligonucleotide
  Antisense strand to SEQ ID NO: 2272016
uaacuugaccacaugcugg

SEQ ID NO: 2272018 - RNA, 19 nt, Artificial Sequence
  Description of Artificial Sequence: Synthetic oligonucleotide
  Sense strand starting at position 1620 of SEQ ID NO: 1884521
ccaggucuccugugaacau

SEQ ID NO: 2272019 - RNA, 19 nt, Artificial Sequence
  Description of Artificial Sequence: Synthetic oligonucleotide
  Antisense strand to SEQ ID NO: 2272018
auguucacaggagaccugg

SEQ ID NO: 2272020 - RNA, 19 nt, Artificial Sequence
  Description of Artificial Sequence: Synthetic oligonucleotide
  Sense strand starting at position 1750 of SEQ ID NO: 1884521
ccaccuuccucaccggaaa

SEQ ID NO: 2272021 - RNA, 19 nt, Artificial Sequence
  Description of Artificial Sequence: Synthetic oligonucleotide
  Antisense strand to SEQ ID NO: 2272020
uuuccggugaggaaggugg

SEQ ID NO: 2272022 - RNA, 19 nt, Artificial Sequence
  Description of Artificial Sequence: Synthetic oligonucleotide
  Sense strand starting at position 1967 of SEQ ID NO: 1884521
cucucuuaccagugaugag

SEQ ID NO: 2272023 - RNA, 19 nt, Artificial Sequence
  Description of Artificial Sequence: Synthetic oligonucleotide
  Antisense strand to SEQ ID NO: 2272022
cucaucacugguaagagag

SEQ ID NO: 2272024 - RNA, 19 nt, Artificial Sequence
  Description of Artificial Sequence: Synthetic oligonucleotide
  Sense strand starting at position 2208 of SEQ ID NO: 1884521
agugaagggugcuuucacu

SEQ ID NO: 2272025 - RNA, 19 nt, Artificial Sequence
  Description of Artificial Sequence: Synthetic oligonucleotide
  Antisense strand to SEQ ID NO: 2272024
agugaaagcacccuucacu

SEQ ID NO: 2272026 - RNA, 19 nt, Artificial Sequence
  Description of Artificial Sequence: Synthetic oligonucleotide
  Sense strand starting at position 2245 of SEQ ID NO: 1884521
aggaaauggucauugugcu

SEQ ID NO: 2272027 - RNA, 19 nt, Artificial Sequence
  Description of Artificial Sequence: Synthetic oligonucleotide
  Antisense strand to SEQ ID NO: 2272026
agcacaaugaccauuuccu

SEQ ID NO: 2272028 - RNA, 19 nt, Artificial Sequence
  Description of Artificial Sequence: Synthetic oligonucleotide
  Sense strand starting at position 2252 of SEQ ID NO: 1884521
ggucauugugcuggcagau

SEQ ID NO: 2272029 - RNA, 19 nt, Artificial Sequence
  Description of Artificial Sequence: Synthetic oligonucleotide
  Antisense strand to SEQ ID NO: 2272028
aucugccagcacaaugacc

SEQ ID NO: 2272030 - RNA, 19 nt, Artificial Sequence
  Description of Artificial Sequence: Synthetic oligonucleotide
  Sense strand starting at position 2258 of SEQ ID NO: 1884521
ugugcuggcagauguguau

SEQ ID NO: 2272031 - RNA, 19 nt, Artificial Sequence
  Description of Artificial Sequence: Synthetic oligonucleotide
  Antisense strand to SEQ ID NO: 2272030
auacacaucugccagcaca

SEQ ID NO: 2272032 - RNA, 19 nt, Artificial Sequence
  Description of Artificial Sequence: Synthetic oligonucleotide
  Sense strand starting at position 2264 of SEQ ID NO: 1884521
ggcagauguguaugaccuu

SEQ ID NO: 2272033 - RNA, 19 nt, Artificial Sequence
  Description of Artificial Sequence: Synthetic oligonucleotide
  Antisense strand to SEQ ID NO: 2272032
aaggucauacacaucugcc

SEQ ID NO: 2272034 - RNA, 19 nt, Artificial Sequence
  Description of Artificial Sequence: Synthetic oligonucleotide
  Sense strand starting at position 2273 of SEQ ID NO: 1884521
guaugaccuuaugagggaa

SEQ ID NO: 2272035 - RNA, 19 nt, Artificial Sequence
  Description of Artificial Sequence: Synthetic oligonucleotide
  Antisense strand to SEQ ID NO: 2272034
uucccucauaaggucauac

SEQ ID NO: 2272036 - RNA, 19 nt, Artificial Sequence
  Description of Artificial Sequence: Synthetic oligonucleotide
  Sense strand starting at position 2321 of SEQ ID NO: 1884521
aggacacuccucugcauaa

SEQ ID NO: 2272037 - RNA, 19 nt, Artificial Sequence
  Description of Artificial Sequence: Synthetic oligonucleotide
  Antisense strand to SEQ ID NO: 2272036
uuaugcagaggaguguccu

SEQ ID NO: 2272038 - RNA, 19 nt, Artificial Sequence
  Description of Artificial Sequence: Synthetic oligonucleotide
  Sense strand starting at position 2565 of SEQ ID NO: 1884521
gaauguaagcagugaacau

SEQ ID NO: 2272039 - RNA, 19 nt, Artificial Sequence
  Description of Artificial Sequence: Synthetic oligonucleotide
  Antisense strand to SEQ ID NO: 2272038
auguucacugcuuacauuc

SEQ ID NO: 2272040 - RNA, 19 nt, Artificial Sequence
  Description of Artificial Sequence: Synthetic oligonucleotide
  Sense strand starting at position 2757 of SEQ ID NO: 1884521
ggucacucccuccacgauu

SEQ ID NO: 2272041 - RNA, 19 nt, Artificial Sequence
  Description of Artificial Sequence: Synthetic oligonucleotide
  Antisense strand to SEQ ID NO: 2272040
aaucguggagggagugacc

SEQ ID NO: 2272042 - RNA, 19 nt, Artificial Sequence
  Description of Artificial Sequence: Synthetic oligonucleotide
  Sense strand starting at position 2769 of SEQ ID NO: 1884521
cacgauuggugcucuguuu

SEQ ID NO: 2272043 - RNA, 19 nt, Artificial Sequence
  Description of Artificial Sequence: Synthetic oligonucleotide
  Antisense strand to SEQ ID NO: 2272042
aaacagagcaccaaucgug

SEQ ID NO: 2272044 - RNA, 19 nt, Artificial Sequence
  Description of Artificial Sequence: Synthetic oligonucleotide
  Sense strand starting at position 3271 of SEQ ID NO: 1884521
ggagacuugcucgaaccca

SEQ ID NO: 2272045 - RNA, 19 nt, Artificial Sequence
  Description of Artificial Sequence: Synthetic oligonucleotide
  Antisense strand to SEQ ID NO: 2272044
uggguucgagcaagucucc

SEQ ID NO: 2272046 - RNA, 19 nt, Artificial Sequence
  Description of Artificial Sequence: Synthetic oligonucleotide
  Sense strand starting at position 3416 of SEQ ID NO: 1884521
ugugcauacauguguuaaa

SEQ ID NO: 2272047 - RNA, 19 nt, Artificial Sequence
  Description of Artificial Sequence: Synthetic oligonucleotide
  Antisense strand to SEQ ID NO: 2272046
uuuaacacauguaugcaca

SEQ ID NO: 2272048 - RNA, 19 nt, Artificial Sequence
  Description of Artificial Sequence: Synthetic oligonucleotide
  Sense strand starting at position 3417 of SEQ ID NO: 1884521
gugcauacauguguuaaau

SEQ ID NO: 2272049 - RNA, 19 nt, Artificial Sequence
  Description of Artificial Sequence: Synthetic oligonucleotide
  Antisense strand to SEQ ID NO: 2272048
auuuaacacauguaugcac

SEQ ID NO: 2272050 - RNA, 19 nt, Artificial Sequence
  Description of Artificial Sequence: Synthetic oligonucleotide
  Sense strand starting at position 3427 of SEQ ID NO: 1884521
guguuaaaugccuaaccuu

SEQ ID NO: 2272051 - RNA, 19 nt, Artificial Sequence
  Description of Artificial Sequence: Synthetic oligonucleotide
  Antisense strand to SEQ ID NO: 2272050
aagguuaggcauuuaacac

SEQ ID NO: 2272052 - RNA, 19 nt, Artificial Sequence
  Description of Artificial Sequence: Synthetic oligonucleotide
  Sense strand starting at position 3477 of SEQ ID NO: 1884521
cccuguuugucucuuuaac

SEQ ID NO: 2272053 - RNA, 19 nt, Artificial Sequence
  Description of Artificial Sequence: Synthetic oligonucleotide
  Antisense strand to SEQ ID NO: 2272052
guuaaagagacaaacaggg

SEQ ID NO: 2272054 - RNA, 19 nt, Artificial Sequence
  Description of Artificial Sequence: Synthetic oligonucleotide
  Sense strand starting at position 3730 of SEQ ID NO: 1884521
aacauaaagccuugaguug

SEQ ID NO: 2272055 - RNA, 19 nt, Artificial Sequence
  Description of Artificial Sequence: Synthetic oligonucleotide
  Antisense strand to SEQ ID NO: 2272054
caacucaaggcuuuauguu

SEQ ID NO: 2272056 - RNA, 19 nt, Artificial Sequence
  Description of Artificial Sequence: Synthetic oligonucleotide
  Sense strand starting at position 3731 of SEQ ID NO: 1884521
acauaaagccuugaguugu

SEQ ID NO: 2272057 - RNA, 19 nt, Artificial Sequence
  Description of Artificial Sequence: Synthetic oligonucleotide
  Antisense strand to SEQ ID NO: 2272056
acaacucaaggcuuuaugu

SEQ ID NO: 2272058 - RNA, 19 nt, Artificial Sequence
  Description of Artificial Sequence: Synthetic oligonucleotide
  Sense strand starting at position 3739 of SEQ ID NO: 1884521
ccuugaguugugucccgca

SEQ ID NO: 2272059 - RNA, 19 nt, Artificial Sequence
  Description of Artificial Sequence: Synthetic oligonucleotide
  Antisense strand to SEQ ID NO: 2272058
ugcgggacacaacucaagg

SEQ ID NO: 2272060 - RNA, 19 nt, Artificial Sequence
  Description of Artificial Sequence: Synthetic oligonucleotide
  Sense strand starting at position 3741 of SEQ ID NO: 1884521
uugaguugugucccgcaua

SEQ ID NO: 2272061 - RNA, 19 nt, Artificial Sequence
  Description of Artificial Sequence: Synthetic oligonucleotide
  Antisense strand to SEQ ID NO: 2272060
uaugcgggacacaacucaa

SEQ ID NO: 2272062 - RNA, 19 nt, Artificial Sequence
  Description of Artificial Sequence: Synthetic oligonucleotide
  Sense strand starting at position 513 of SEQ ID NO: 1884522
aaagaauugugccaggaaa

SEQ ID NO: 2272063 - RNA, 19 nt, Artificial Sequence
  Description of Artificial Sequence: Synthetic oligonucleotide
  Antisense strand to SEQ ID NO: 2272062
uuuccuggcacaauucuuu

SEQ ID NO: 2272064 - RNA, 19 nt, Artificial Sequence
  Description of Artificial Sequence: Synthetic oligonucleotide
  Sense strand starting at position 902 of SEQ ID NO: 1884522
ggagaaguagugugaacug

SEQ ID NO: 2272065 - RNA, 19 nt, Artificial Sequence
  Description of Artificial Sequence: Synthetic oligonucleotide
  Antisense strand to SEQ ID NO: 2272064
caguucacacuacuucucc

SEQ ID NO: 2272066 - RNA, 19 nt, Artificial Sequence
  Description of Artificial Sequence: Synthetic oligonucleotide
  Sense strand starting at position 1023 of SEQ ID NO: 1884522
ugaauacucuaggaauaug

SEQ ID NO: 2272067 - RNA, 19 nt, Artificial Sequence
  Description of Artificial Sequence: Synthetic oligonucleotide
  Antisense strand to SEQ ID NO: 2272066
cauauuccuagaguauuca

SEQ ID NO: 2272068 - RNA, 19 nt, Artificial Sequence
  Description of Artificial Sequence: Synthetic oligonucleotide
  Sense strand starting at position 1051 of SEQ ID NO: 1884522
uacuaagcuuguguuuaag

SEQ ID NO: 2272069 - RNA, 19 nt, Artificial Sequence
  Description of Artificial Sequence: Synthetic oligonucleotide
  Antisense strand to SEQ ID NO: 2272068
cuuaaacacaagcuuagua

SEQ ID NO: 2272070 - RNA, 19 nt, Artificial Sequence
  Description of Artificial Sequence: Synthetic oligonucleotide
  Sense strand starting at position 1053 of SEQ ID NO: 1884522
cuaagcuuguguuuaagca

SEQ ID NO: 2272071 - RNA, 19 nt, Artificial Sequence
  Description of Artificial Sequence: Synthetic oligonucleotide
  Antisense strand to SEQ ID NO: 2272070
ugcuuaaacacaagcuuag

SEQ ID NO: 2272072 - RNA, 19 nt, Artificial Sequence
  Description of Artificial Sequence: Synthetic oligonucleotide
  Sense strand starting at position 1054 of SEQ ID NO: 1884522
uaagcuuguguuuaagcaa

SEQ ID NO: 2272073 - RNA, 19 nt, Artificial Sequence
  Description of Artificial Sequence: Synthetic oligonucleotide
  Antisense strand to SEQ ID NO: 2272072
uugcuuaaacacaagcuua

SEQ ID NO: 2272074 - RNA, 19 nt, Artificial Sequence
  Description of Artificial Sequence: Synthetic oligonucleotide
  Sense strand starting at position 1178 of SEQ ID NO: 1884522
aguugacuuuaaguaagau

SEQ ID NO: 2272075 - RNA, 19 nt, Artificial Sequence
  Description of Artificial Sequence: Synthetic oligonucleotide
  Antisense strand to SEQ ID NO: 2272074
aucuuacuuaaagucaacu

SEQ ID NO: 2272076 - RNA, 19 nt, Artificial Sequence
  Description of Artificial Sequence: Synthetic oligonucleotide
  Sense strand starting at position 1619 of SEQ ID NO: 1884522
gggacuuacgaguggaaca

SEQ ID NO: 2272077 - RNA, 19 nt, Artificial Sequence
  Description of Artificial Sequence: Synthetic oligonucleotide
  Antisense strand to SEQ ID NO: 2272076
uguuccacucguaaguccc

SEQ ID NO: 2272078 - RNA, 19 nt, Artificial Sequence
  Description of Artificial Sequence: Synthetic oligonucleotide
  Sense strand starting at position 1620 of SEQ ID NO: 1884522
ggacuuacgaguggaacau

SEQ ID NO: 2272079 - RNA, 19 nt, Artificial Sequence
  Description of Artificial Sequence: Synthetic oligonucleotide
  Antisense strand to SEQ ID NO: 2272078
auguuccacucguaagucc

SEQ ID NO: 2272080 - RNA, 19 nt, Artificial Sequence
  Description of Artificial Sequence: Synthetic oligonucleotide
  Sense strand starting at position 2399 of SEQ ID NO: 1884522
gcuauaguaugcgucacaa

SEQ ID NO: 2272081 - RNA, 19 nt, Artificial Sequence
  Description of Artificial Sequence: Synthetic oligonucleotide
  Antisense strand to SEQ ID NO: 2272080
uugugacgcauacuauagc

SEQ ID NO: 2272082 - RNA, 19 nt, Artificial Sequence
  Description of Artificial Sequence: Synthetic oligonucleotide
  Sense strand starting at position 2401 of SEQ ID NO: 1884522
uauaguaugcgucacaacu

SEQ ID NO: 2272083 - RNA, 19 nt, Artificial Sequence
  Description of Artificial Sequence: Synthetic oligonucleotide
  Antisense strand to SEQ ID NO: 2272082
aguugugacgcauacuaua

SEQ ID NO: 2272084 - RNA, 19 nt, Artificial Sequence
  Description of Artificial Sequence: Synthetic oligonucleotide
  Sense strand starting at position 2422 of SEQ ID NO: 1884522
cgcagacuccggcaguauu

SEQ ID NO: 2272085 - RNA, 19 nt, Artificial Sequence
  Description of Artificial Sequence: Synthetic oligonucleotide
  Antisense strand to SEQ ID NO: 2272084
aauacugccggagucugcg

SEQ ID NO: 2272086 - RNA, 19 nt, Artificial Sequence
  Description of Artificial Sequence: Synthetic oligonucleotide
  Sense strand starting at position 2650 of SEQ ID NO: 1884522
cgagcuucgcaaugguaag

SEQ ID NO: 2272087 - RNA, 19 nt, Artificial Sequence
  Description of Artificial Sequence: Synthetic oligonucleotide
  Antisense strand to SEQ ID NO: 2272086
cuuaccauugcgaagcucg

SEQ ID NO: 2272088 - RNA, 19 nt, Artificial Sequence
  Description of Artificial Sequence: Synthetic oligonucleotide
  Sense strand starting at position 2819 of SEQ ID NO: 1884522
ggcugagggcgcaguauua

SEQ ID NO: 2272089 - RNA, 19 nt, Artificial Sequence
  Description of Artificial Sequence: Synthetic oligonucleotide
  Antisense strand to SEQ ID NO: 2272088
uaauacugcgcccucagcc

SEQ ID NO: 2272090 - RNA, 19 nt, Artificial Sequence
  Description of Artificial Sequence: Synthetic oligonucleotide
  Sense strand starting at position 3029 of SEQ ID NO: 1884522
cucguaauccucuaguaau

SEQ ID NO: 2272091 - RNA, 19 nt, Artificial Sequence
  Description of Artificial Sequence: Synthetic oligonucleotide
  Antisense strand to SEQ ID NO: 2272090
auuacuagaggauuacgag

SEQ ID NO: 2272092 - RNA, 19 nt, Artificial Sequence
  Description of Artificial Sequence: Synthetic oligonucleotide
  Sense strand starting at position 3042 of SEQ ID NO: 1884522
aguaauagguaacuuguau

SEQ ID NO: 2272093 - RNA, 19 nt, Artificial Sequence
  Description of Artificial Sequence: Synthetic oligonucleotide
  Antisense strand to SEQ ID NO: 2272092
auacaaguuaccuauuacu

SEQ ID NO: 2272094 - RNA, 19 nt, Artificial Sequence
  Description of Artificial Sequence: Synthetic oligonucleotide
  Sense strand starting at position 3048 of SEQ ID NO: 1884522
agguaacuuguauaguaag

SEQ ID NO: 2272095 - RNA, 19 nt, Artificial Sequence
  Description of Artificial Sequence: Synthetic oligonucleotide
  Antisense strand to SEQ ID NO: 2272094
cuuacuauacaaguuaccu

SEQ ID NO: 2272096 - RNA, 19 nt, Artificial Sequence
  Description of Artificial Sequence: Synthetic oligonucleotide
  Sense strand starting at position 3077 of SEQ ID NO: 1884522
gguguagauuucuagaguc

SEQ ID NO: 2272097 - RNA, 19 nt, Artificial Sequence
  Description of Artificial Sequence: Synthetic oligonucleotide
  Antisense strand to SEQ ID NO: 2272096
gacucuagaaaucuacacc

SEQ ID NO: 2272098 - RNA, 19 nt, Artificial Sequence
  Description of Artificial Sequence: Synthetic oligonucleotide
  Sense strand starting at position 3103 of SEQ ID NO: 1884522
gagaguuuaucuucccguc

SEQ ID NO: 2272099 - RNA, 19 nt, Artificial Sequence
  Description of Artificial Sequence: Synthetic oligonucleotide
  Antisense strand to SEQ ID NO: 2272098
gacgggaagauaaacucuc

SEQ ID NO: 2272100 - RNA, 19 nt, Artificial Sequence
  Description of Artificial Sequence: Synthetic oligonucleotide
  Sense strand starting at position 3294 of SEQ ID NO: 1884522
auccuugauaacgguggaa

SEQ ID NO: 2272101 - RNA, 19 nt, Artificial Sequence
  Description of Artificial Sequence: Synthetic oligonucleotide
  Antisense strand to SEQ ID NO: 2272100
uuccaccguuaucaaggau

SEQ ID NO: 2272102 - RNA, 19 nt, Artificial Sequence
  Description of Artificial Sequence: Synthetic oligonucleotide
  Sense strand starting at position 3296 of SEQ ID NO: 1884522
ccuugauaacgguggaaca

SEQ ID NO: 2272103 - RNA, 19 nt, Artificial Sequence
  Description of Artificial Sequence: Synthetic oligonucleotide
  Antisense strand to SEQ ID NO: 2272102
uguuccaccguuaucaagg

SEQ ID NO: 2272104 - RNA, 19 nt, Artificial Sequence
  Description of Artificial Sequence: Synthetic oligonucleotide
  Sense strand starting at position 3312 of SEQ ID NO: 1884522
acagauuucucugacgcag

SEQ ID NO: 2272105 - RNA, 19 nt, Artificial Sequence
  Description of Artificial Sequence: Synthetic oligonucleotide
  Antisense strand to SEQ ID NO: 2272104
cugcgucagagaaaucugu

SEQ ID NO: 2272106 - RNA, 19 nt, Artificial Sequence
  Description of Artificial Sequence: Synthetic oligonucleotide
  Sense strand starting at position 3314 of SEQ ID NO: 1884522
agauuucucugacgcagau

SEQ ID NO: 2272107 - RNA, 19 nt, Artificial Sequence
  Description of Artificial Sequence: Synthetic oligonucleotide
  Antisense strand to SEQ ID NO: 2272106
aucugcgucagagaaaucu

SEQ ID NO: 2272108 - RNA, 19 nt, Artificial Sequence
  Description of Artificial Sequence: Synthetic oligonucleotide
  Sense strand starting at position 3346 of SEQ ID NO: 1884522
aagggugcuucugccagaa

SEQ ID NO: 2272109 - RNA, 19 nt, Artificial Sequence
  Description of Artificial Sequence: Synthetic oligonucleotide
  Antisense strand to SEQ ID NO: 2272108
uucuggcagaagcacccuu

SEQ ID NO: 2272110 - RNA, 19 nt, Artificial Sequence
  Description of Artificial Sequence: Synthetic oligonucleotide
  Sense strand starting at position 3350 of SEQ ID NO: 1884522
gugcuucugccagaaauac

SEQ ID NO: 2272111 - RNA, 19 nt, Artificial Sequence
  Description of Artificial Sequence: Synthetic oligonucleotide
  Antisense strand to SEQ ID NO: 2272110
guauuucuggcagaagcac

SEQ ID NO: 2272112 - RNA, 19 nt, Artificial Sequence
  Description of Artificial Sequence: Synthetic oligonucleotide
  Sense strand starting at position 3450 of SEQ ID NO: 1884522
ugacaaagcuaccuaugau

SEQ ID NO: 2272113 - RNA, 19 nt, Artificial Sequence
  Description of Artificial Sequence: Synthetic oligonucleotide
  Antisense strand to SEQ ID NO: 2272112
aucauagguagcuuuguca

SEQ ID NO: 2272114 - RNA, 19 nt, Artificial Sequence
  Description of Artificial Sequence: Synthetic oligonucleotide
  Sense strand starting at position 3589 of SEQ ID NO: 1884522
ggguguauccuacaugugu

SEQ ID NO: 2272115 - RNA, 19 nt, Artificial Sequence
  Description of Artificial Sequence: Synthetic oligonucleotide
  Antisense strand to SEQ ID NO: 2272114
acacauguaggauacaccc

SEQ ID NO: 2272116 - RNA, 19 nt, Artificial Sequence
  Description of Artificial Sequence: Synthetic oligonucleotide
  Sense strand starting at position 3593 of SEQ ID NO: 1884522
guauccuacauguguguuu

SEQ ID NO: 2272117 - RNA, 19 nt, Artificial Sequence
  Description of Artificial Sequence: Synthetic oligonucleotide
  Antisense strand to SEQ ID NO: 2272116
aaacacacauguaggauac

SEQ ID NO: 2272118 - RNA, 19 nt, Artificial Sequence
  Description of Artificial Sequence: Synthetic oligonucleotide
  Sense strand starting at position 3619 of SEQ ID NO: 1884522
uuaaauugucuugaccaug

SEQ ID NO: 2272119 - RNA, 19 nt, Artificial Sequence
  Description of Artificial Sequence: Synthetic oligonucleotide
  Antisense strand to SEQ ID NO: 2272118
cauggucaagacaauuuaa

SEQ ID NO: 2272120 - RNA, 19 nt, Artificial Sequence
  Description of Artificial Sequence: Synthetic oligonucleotide
  Sense strand starting at position 3624 of SEQ ID NO: 1884522
uugucuugaccauguuaag

SEQ ID NO: 2272121 - RNA, 19 nt, Artificial Sequence
  Description of Artificial Sequence: Synthetic oligonucleotide
  Antisense strand to SEQ ID NO: 2272120
cuuaacauggucaagacaa

SEQ ID NO: 2272122 - RNA, 19 nt, Artificial Sequence
  Description of Artificial Sequence: Synthetic oligonucleotide
  Sense strand starting at position 3734 of SEQ ID NO: 1884522
uccugauccugagaugaau

SEQ ID NO: 2272123 - RNA, 19 nt, Artificial Sequence
  Description of Artificial Sequence: Synthetic oligonucleotide
  Antisense strand to SEQ ID NO: 2272122
auucaucucaggaucagga

SEQ ID NO: 2272124 - RNA, 19 nt, Artificial Sequence
  Description of Artificial Sequence: Synthetic oligonucleotide
  Sense strand starting at position 3747 of SEQ ID NO: 1884522
augaauucucaggguucuu

SEQ ID NO: 2272125 - RNA, 19 nt, Artificial Sequence
  Description of Artificial Sequence: Synthetic oligonucleotide
  Antisense strand to SEQ ID NO: 2272124
aagaacccugagaauucau

SEQ ID NO: 2272126 - RNA, 19 nt, Artificial Sequence
  Description of Artificial Sequence: Synthetic oligonucleotide
  Sense strand starting at position 3797 of SEQ ID NO: 1884522
uuuagugaagcccaaggau

SEQ ID NO: 2272127 - RNA, 19 nt, Artificial Sequence
  Description of Artificial Sequence: Synthetic oligonucleotide
  Antisense strand to SEQ ID NO: 2272126
auccuugggcuucacuaaa

SEQ ID NO: 2272128 - RNA, 19 nt, Artificial Sequence
  Description of Artificial Sequence: Synthetic oligonucleotide
  Sense strand starting at position 3819 of SEQ ID NO: 1884522
uuauguuucgaguaaaugg

SEQ ID NO: 2272129 - RNA, 19 nt, Artificial Sequence
  Description of Artificial Sequence: Synthetic oligonucleotide
  Antisense strand to SEQ ID NO: 2272128
ccauuuacucgaaacauaa

SEQ ID NO: 2272130 - RNA, 19 nt, Artificial Sequence
  Description of Artificial Sequence: Synthetic oligonucleotide
  Sense strand starting at position 3827 of SEQ ID NO: 1884522
cgaguaaauggaugcauag

SEQ ID NO: 2272131 - RNA, 19 nt, Artificial Sequence
  Description of Artificial Sequence: Synthetic oligonucleotide
  Antisense strand to SEQ ID NO: 2272130
cuaugcauccauuuacucg

SEQ ID NO: 2272132 - RNA, 19 nt, Artificial Sequence
  Description of Artificial Sequence: Synthetic oligonucleotide
  Sense strand starting at position 3959 of SEQ ID NO: 1884522
gaaauuuaguacggucuac

SEQ ID NO: 2272133 - RNA, 19 nt, Artificial Sequence
  Description of Artificial Sequence: Synthetic oligonucleotide
  Antisense strand to SEQ ID NO: 2272132
guagaccguacuaaauuuc

SEQ ID NO: 2272134 - RNA, 19 nt, Artificial Sequence
  Description of Artificial Sequence: Synthetic oligonucleotide
  Sense strand starting at position 3969 of SEQ ID NO: 1884522
acggucuacucaguaguau

SEQ ID NO: 2272135 - RNA, 19 nt, Artificial Sequence
  Description of Artificial Sequence: Synthetic oligonucleotide
  Antisense strand to SEQ ID NO: 2272134
auacuacugaguagaccgu

SEQ ID NO: 2272136 - RNA, 19 nt, Artificial Sequence
  Description of Artificial Sequence: Synthetic oligonucleotide
  Sense strand starting at position 3970 of SEQ ID NO: 1884522
cggucuacucaguaguaug

SEQ ID NO: 2272137 - RNA, 19 nt, Artificial Sequence
  Description of Artificial Sequence: Synthetic oligonucleotide
  Antisense strand to SEQ ID NO: 2272136
cauacuacugaguagaccg

SEQ ID NO: 2272138 - RNA, 19 nt, Artificial Sequence
  Description of Artificial Sequence: Synthetic oligonucleotide
  Sense strand starting at position 3978 of SEQ ID NO: 1884522
ucaguaguauggucugauu

SEQ ID NO: 2272139 - RNA, 19 nt, Artificial Sequence
  Description of Artificial Sequence: Synthetic oligonucleotide
  Antisense strand to SEQ ID NO: 2272138
aaucagaccauacuacuga

SEQ ID NO: 2272140 - RNA, 19 nt, Artificial Sequence
  Description of Artificial Sequence: Synthetic oligonucleotide
  Sense strand starting at position 3980 of SEQ ID NO: 1884522
aguaguauggucugauuac

SEQ ID NO: 2272141 - RNA, 19 nt, Artificial Sequence
  Description of Artificial Sequence: Synthetic oligonucleotide
  Antisense strand to SEQ ID NO: 2272140
guaaucagaccauacuacu

SEQ ID NO: 2272142 - RNA, 19 nt, Artificial Sequence
  Description of Artificial Sequence: Synthetic oligonucleotide
  Sense strand starting at position 96 of SEQ ID NO: 1884523
ccagcuggccaggaaagau

SEQ ID NO: 2272143 - RNA, 19 nt, Artificial Sequence
  Description of Artificial Sequence: Synthetic oligonucleotide
  Antisense strand to SEQ ID NO: 2272142
aucuuuccuggccagcugg

SEQ ID NO: 2272144 - RNA, 19 nt, Artificial Sequence
  Description of Artificial Sequence: Synthetic oligonucleotide
  Sense strand starting at position 116 of SEQ ID NO: 1884523
ggguauguucacuggagcu

SEQ ID NO: 2272145 - RNA, 19 nt, Artificial Sequence
  Description of Artificial Sequence: Synthetic oligonucleotide
  Antisense strand to SEQ ID NO: 2272144
agcuccagugaacauaccc

SEQ ID NO: 2272146 - RNA, 19 nt, Artificial Sequence
  Description of Artificial Sequence: Synthetic oligonucleotide
  Sense strand starting at position 167 of SEQ ID NO: 1884523
agggaugaauugucucaug

SEQ ID NO: 2272147 - RNA, 19 nt, Artificial Sequence
  Description of Artificial Sequence: Synthetic oligonucleotide
  Antisense strand to SEQ ID NO: 2272146
caugagacaauucaucccu

SEQ ID NO: 2272148 - RNA, 19 nt, Artificial Sequence
  Description of Artificial Sequence: Synthetic oligonucleotide
  Sense strand starting at position 295 of SEQ ID NO: 1884523
guaggcaaucuuuggcauu

SEQ ID NO: 2272149 - RNA, 19 nt, Artificial Sequence
  Description of Artificial Sequence: Synthetic oligonucleotide
  Antisense strand to SEQ ID NO: 2272148
aaugccaaagauugccuac

SEQ ID NO: 2272150 - RNA, 19 nt, Artificial Sequence
  Description of Artificial Sequence: Synthetic oligonucleotide
  Sense strand starting at position 305 of SEQ ID NO: 1884523
uuuggcauuccuugacuga

SEQ ID NO: 2272151 - RNA, 19 nt, Artificial Sequence
  Description of Artificial Sequence: Synthetic oligonucleotide
  Antisense strand to SEQ ID NO: 2272150
ucagucaaggaaugccaaa

SEQ ID NO: 2272152 - RNA, 19 nt, Artificial Sequence
  Description of Artificial Sequence: Synthetic oligonucleotide
  Sense strand starting at position 309 of SEQ ID NO: 1884523
gcauuccuugacugacaga

SEQ ID NO: 2272153 - RNA, 19 nt, Artificial Sequence
  Description of Artificial Sequence: Synthetic oligonucleotide
  Antisense strand to SEQ ID NO: 2272152
ucugucagucaaggaaugc

SEQ ID NO: 2272154 - RNA, 19 nt, Artificial Sequence
  Description of Artificial Sequence: Synthetic oligonucleotide
  Sense strand starting at position 729 of SEQ ID NO: 1884523
gaauaucaguccuacugga

SEQ ID NO: 2272155 - RNA, 19 nt, Artificial Sequence
  Description of Artificial Sequence: Synthetic oligonucleotide
  Antisense strand to SEQ ID NO: 2272154
uccaguaggacugauauuc

SEQ ID NO: 2272156 - RNA, 19 nt, Artificial Sequence
  Description of Artificial Sequence: Synthetic oligonucleotide
  Sense strand starting at position 824 of SEQ ID NO: 1884523
ugagauccucagggugaua

SEQ ID NO: 2272157 - RNA, 19 nt, Artificial Sequence
  Description of Artificial Sequence: Synthetic oligonucleotide
  Antisense strand to SEQ ID NO: 2272156
uaucacccugaggaucuca

SEQ ID NO: 2272158 - RNA, 19 nt, Artificial Sequence
  Description of Artificial Sequence: Synthetic oligonucleotide
  Sense strand starting at position 919 of SEQ ID NO: 1884523
aggagaugagucugagggu

SEQ ID NO: 2272159 - RNA, 19 nt, Artificial Sequence
  Description of Artificial Sequence: Synthetic oligonucleotide
  Antisense strand to SEQ ID NO: 2272158
acccucagacucaucuccu

SEQ ID NO: 2272160 - RNA, 19 nt, Artificial Sequence
  Description of Artificial Sequence: Synthetic oligonucleotide
  Sense strand starting at position 1235 of SEQ ID NO: 1884523
ggaaagugaggucgagaca

SEQ ID NO: 2272161 - RNA, 19 nt, Artificial Sequence
  Description of Artificial Sequence: Synthetic oligonucleotide
  Antisense strand to SEQ ID NO: 2272160
ugucucgaccucacuuucc

SEQ ID NO: 2272162 - RNA, 19 nt, Artificial Sequence
  Description of Artificial Sequence: Synthetic oligonucleotide
  Sense strand starting at position 1267 of SEQ ID NO: 1884523
ugaccauaucccugaugga

SEQ ID NO: 2272163 - RNA, 19 nt, Artificial Sequence
  Description of Artificial Sequence: Synthetic oligonucleotide
  Antisense strand to SEQ ID NO: 2272162
uccaucagggauaugguca

SEQ ID NO: 2272164 - RNA, 19 nt, Artificial Sequence
  Description of Artificial Sequence: Synthetic oligonucleotide
  Sense strand starting at position 1270 of SEQ ID NO: 1884523
ccauaucccugauggagaa

SEQ ID NO: 2272165 - RNA, 19 nt, Artificial Sequence
  Description of Artificial Sequence: Synthetic oligonucleotide
  Antisense strand to SEQ ID NO: 2272164
uucuccaucagggauaugg

SEQ ID NO: 2272166 - RNA, 19 nt, Artificial Sequence
  Description of Artificial Sequence: Synthetic oligonucleotide
  Sense strand starting at position 1431 of SEQ ID NO: 1884523
gaauuugacugagagacuc

SEQ ID NO: 2272167 - RNA, 19 nt, Artificial Sequence
  Description of Artificial Sequence: Synthetic oligonucleotide
  Antisense strand to SEQ ID NO: 2272166
gagucucucagucaaauuc

SEQ ID NO: 2272168 - RNA, 19 nt, Artificial Sequence
  Description of Artificial Sequence: Synthetic oligonucleotide
  Sense strand starting at position 1439 of SEQ ID NO: 1884523
cugagagacucuuugaagc

SEQ ID NO: 2272169 - RNA, 19 nt, Artificial Sequence
  Description of Artificial Sequence: Synthetic oligonucleotide
  Antisense strand to SEQ ID NO: 2272168
gcuucaaagagucucucag

SEQ ID NO: 2272170 - RNA, 19 nt, Artificial Sequence
  Description of Artificial Sequence: Synthetic oligonucleotide
  Sense strand starting at position 1450 of SEQ ID NO: 1884523
uuugaagccgucugagauu

SEQ ID NO: 2272171 - RNA, 19 nt, Artificial Sequence
  Description of Artificial Sequence: Synthetic oligonucleotide
  Antisense strand to SEQ ID NO: 2272170
aaucucagacggcuucaaa

SEQ ID NO: 2272172 - RNA, 19 nt, Artificial Sequence
  Description of Artificial Sequence: Synthetic oligonucleotide
  Sense strand starting at position 1459 of SEQ ID NO: 1884523
gucugagauuuccauauac

SEQ ID NO: 2272173 - RNA, 19 nt, Artificial Sequence
  Description of Artificial Sequence: Synthetic oligonucleotide
  Antisense strand to SEQ ID NO: 2272172
guauauggaaaucucagac

SEQ ID NO: 2272174 - RNA, 19 nt, Artificial Sequence
  Description of Artificial Sequence: Synthetic oligonucleotide
  Sense strand starting at position 1560 of SEQ ID NO: 1884523
agguaaacccagcauuauu

SEQ ID NO: 2272175 - RNA, 19 nt, Artificial Sequence
  Description of Artificial Sequence: Synthetic oligonucleotide
  Antisense strand to SEQ ID NO: 2272174
aauaaugcuggguuuaccu

SEQ ID NO: 2272176 - RNA, 19 nt, Artificial Sequence
  Description of Artificial Sequence: Synthetic oligonucleotide
  Sense strand starting at position 1568 of SEQ ID NO: 1884523
ccagcauuauucuuggauu

SEQ ID NO: 2272177 - RNA, 19 nt, Artificial Sequence
  Description of Artificial Sequence: Synthetic oligonucleotide
  Antisense strand to SEQ ID NO: 2272176
aauccaagaauaaugcugg

SEQ ID NO: 2272178 - RNA, 19 nt, Artificial Sequence
  Description of Artificial Sequence: Synthetic oligonucleotide
  Sense strand starting at position 1570 of SEQ ID NO: 1884523
agcauuauucuuggauuaa

SEQ ID NO: 2272179 - RNA, 19 nt, Artificial Sequence
  Description of Artificial Sequence: Synthetic oligonucleotide
  Antisense strand to SEQ ID NO: 2272178
uuaauccaagaauaaugcu

SEQ ID NO: 2272180 - RNA, 19 nt, Artificial Sequence
  Description of Artificial Sequence: Synthetic oligonucleotide
  Sense strand starting at position 1750 of SEQ ID NO: 1884523
ugccaauugcgggaggagu

SEQ ID NO: 2272181 - RNA, 19 nt, Artificial Sequence
  Description of Artificial Sequence: Synthetic oligonucleotide
  Antisense strand to SEQ ID NO: 2272180
acuccucccgcaauuggca

SEQ ID NO: 2272182 - RNA, 19 nt, Artificial Sequence
  Description of Artificial Sequence: Synthetic oligonucleotide
  Sense strand starting at position 1761 of SEQ ID NO: 1884523
ggaggaguccuucagggca

SEQ ID NO: 2272183 - RNA, 19 nt, Artificial Sequence
  Description of Artificial Sequence: Synthetic oligonucleotide
  Antisense strand to SEQ ID NO: 2272182
ugcccugaaggacuccucc

SEQ ID NO: 2272184 - RNA, 19 nt, Artificial Sequence
  Description of Artificial Sequence: Synthetic oligonucleotide
  Sense strand starting at position 1788 of SEQ ID NO: 1884523
uaaucaugcuaaguaggau

SEQ ID NO: 2272185 - RNA, 19 nt, Artificial Sequence
  Description of Artificial Sequence: Synthetic oligonucleotide
  Antisense strand to SEQ ID NO: 2272184
auccuacuuagcaugauua

SEQ ID NO: 2272186 - RNA, 19 nt, Artificial Sequence
  Description of Artificial Sequence: Synthetic oligonucleotide
  Sense strand starting at position 1791 of SEQ ID NO: 1884523
ucaugcuaaguaggauaaa

SEQ ID NO: 2272187 - RNA, 19 nt, Artificial Sequence
  Description of Artificial Sequence: Synthetic oligonucleotide
  Antisense strand to SEQ ID NO: 2272186
uuuauccuacuuagcauga

SEQ ID NO: 2272188 - RNA, 19 nt, Artificial Sequence
  Description of Artificial Sequence: Synthetic oligonucleotide
  Sense strand starting at position 1792 of SEQ ID NO: 1884523
caugcuaaguaggauaaau

SEQ ID NO: 2272189 - RNA, 19 nt, Artificial Sequence
  Description of Artificial Sequence: Synthetic oligonucleotide
  Antisense strand to SEQ ID NO: 2272188
auuuauccuacuuagcaug

SEQ ID NO: 2272190 - RNA, 19 nt, Artificial Sequence
  Description of Artificial Sequence: Synthetic oligonucleotide
  Sense strand starting at position 1895 of SEQ ID NO: 1884523
uuugcagauccacauugaa

SEQ ID NO: 2272191 - RNA, 19 nt, Artificial Sequence
  Description of Artificial Sequence: Synthetic oligonucleotide
  Antisense strand to SEQ ID NO: 2272190
uucaauguggaucugcaaa

SEQ ID NO: 2272192 - RNA, 19 nt, Artificial Sequence
  Description of Artificial Sequence: Synthetic oligonucleotide
  Sense strand starting at position 1927 of SEQ ID NO: 1884523
gucuuuacuccugagagcu

SEQ ID NO: 2272193 - RNA, 19 nt, Artificial Sequence
  Description of Artificial Sequence: Synthetic oligonucleotide
  Antisense strand to SEQ ID NO: 2272192
agcucucaggaguaaagac

SEQ ID NO: 2272194 - RNA, 19 nt, Artificial Sequence
  Description of Artificial Sequence: Synthetic oligonucleotide
  Sense strand starting at position 1950 of SEQ ID NO: 1884523
uuggaagguacucaugagu

SEQ ID NO: 2272195 - RNA, 19 nt, Artificial Sequence
  Description of Artificial Sequence: Synthetic oligonucleotide
  Antisense strand to SEQ ID NO: 2272194
acucaugaguaccuuccaa

SEQ ID NO: 2272196 - RNA, 19 nt, Artificial Sequence
  Description of Artificial Sequence: Synthetic oligonucleotide
  Sense strand starting at position 1955 of SEQ ID NO: 1884523
agguacucaugagugaaga

SEQ ID NO: 2272197 - RNA, 19 nt, Artificial Sequence
  Description of Artificial Sequence: Synthetic oligonucleotide
  Antisense strand to SEQ ID NO: 2272196
ucuucacucaugaguaccu

SEQ ID NO: 2272198 - RNA, 19 nt, Artificial Sequence
  Description of Artificial Sequence: Synthetic oligonucleotide
  Sense strand starting at position 1956 of SEQ ID NO: 1884523
gguacucaugagugaagac

SEQ ID NO: 2272199 - RNA, 19 nt, Artificial Sequence
  Description of Artificial Sequence: Synthetic oligonucleotide
  Antisense strand to SEQ ID NO: 2272198
gucuucacucaugaguacc

SEQ ID NO: 2272200 - RNA, 19 nt, Artificial Sequence
  Description of Artificial Sequence: Synthetic oligonucleotide
  Sense strand starting at position 2258 of SEQ ID NO: 1884523
cacacagguccgugagcua

SEQ ID NO: 2272201 - RNA, 19 nt, Artificial Sequence
  Description of Artificial Sequence: Synthetic oligonucleotide
  Antisense strand to SEQ ID NO: 2272200
uagcucacggaccugugug

SEQ ID NO: 2272202 - RNA, 19 nt, Artificial Sequence
  Description of Artificial Sequence: Synthetic oligonucleotide
  Sense strand starting at position 2270 of SEQ ID NO: 1884523
ugagcuacguggaaugaga

SEQ ID NO: 2272203 - RNA, 19 nt, Artificial Sequence
  Description of Artificial Sequence: Synthetic oligonucleotide
  Antisense strand to SEQ ID NO: 2272202
ucucauuccacguagcuca

SEQ ID NO: 2272204 - RNA, 19 nt, Artificial Sequence
  Description of Artificial Sequence: Synthetic oligonucleotide
  Sense strand starting at position 2751 of SEQ ID NO: 1884523
gaaugauauguuugugguu

SEQ ID NO: 2272205 - RNA, 19 nt, Artificial Sequence
  Description of Artificial Sequence: Synthetic oligonucleotide
  Antisense strand to SEQ ID NO: 2272204
aaccacaaacauaucauuc

SEQ ID NO: 2272206 - RNA, 19 nt, Artificial Sequence
  Description of Artificial Sequence: Synthetic oligonucleotide
  Sense strand starting at position 2756 of SEQ ID NO: 1884523
auauguuugugguucccua

SEQ ID NO: 2272207 - RNA, 19 nt, Artificial Sequence
  Description of Artificial Sequence: Synthetic oligonucleotide
  Antisense strand to SEQ ID NO: 2272206
uagggaaccacaaacauau

SEQ ID NO: 2272208 - RNA, 19 nt, Artificial Sequence
  Description of Artificial Sequence: Synthetic oligonucleotide
  Sense strand starting at position 2816 of SEQ ID NO: 1884523
cucagaggcuauucucaga

SEQ ID NO: 2272209 - RNA, 19 nt, Artificial Sequence
  Description of Artificial Sequence: Synthetic oligonucleotide
  Antisense strand to SEQ ID NO: 2272208
ucugagaauagccucugag

SEQ ID NO: 2272210 - RNA, 19 nt, Artificial Sequence
  Description of Artificial Sequence: Synthetic oligonucleotide
  Sense strand starting at position 2873 of SEQ ID NO: 1884523
acaauuugcuuggaaggca

SEQ ID NO: 2272211 - RNA, 19 nt, Artificial Sequence
  Description of Artificial Sequence: Synthetic oligonucleotide
  Antisense strand to SEQ ID NO: 2272210
ugccuuccaagcaaauugu

SEQ ID NO: 2272212 - RNA, 19 nt, Artificial Sequence
  Description of Artificial Sequence: Synthetic oligonucleotide
  Sense strand starting at position 3419 of SEQ ID NO: 1884523
caacgaucucaugggauua

SEQ ID NO: 2272213 - RNA, 19 nt, Artificial Sequence
  Description of Artificial Sequence: Synthetic oligonucleotide
  Antisense strand to SEQ ID NO: 2272212
uaaucccaugagaucguug

SEQ ID NO: 2272214 - RNA, 19 nt, Artificial Sequence
  Description of Artificial Sequence: Synthetic oligonucleotide
  Sense strand starting at position 3421 of SEQ ID NO: 1884523
acgaucucaugggauuaga

SEQ ID NO: 2272215 - RNA, 19 nt, Artificial Sequence
  Description of Artificial Sequence: Synthetic oligonucleotide
  Antisense strand to SEQ ID NO: 2272214
ucuaaucccaugagaucgu

SEQ ID NO: 2272216 - RNA, 19 nt, Artificial Sequence
  Description of Artificial Sequence: Synthetic oligonucleotide
  Sense strand starting at position 3448 of SEQ ID NO: 1884523
cagugaugccagugagaag

SEQ ID NO: 2272217 - RNA, 19 nt, Artificial Sequence
  Description of Artificial Sequence: Synthetic oligonucleotide
  Antisense strand to SEQ ID NO: 2272216
cuucucacuggcaucacug

SEQ ID NO: 2272218 - RNA, 19 nt, Artificial Sequence
  Description of Artificial Sequence: Synthetic oligonucleotide
  Sense strand starting at position 3558 of SEQ ID NO: 1884523
gaacacgugucaucaggaa

SEQ ID NO: 2272219 - RNA, 19 nt, Artificial Sequence
  Description of Artificial Sequence: Synthetic oligonucleotide
  Antisense strand to SEQ ID NO: 2272218
uuccugaugacacguguuc

SEQ ID NO: 2272220 - RNA, 19 nt, Artificial Sequence
  Description of Artificial Sequence: Synthetic oligonucleotide
  Sense strand starting at position 3639 of SEQ ID NO: 1884523
uaaagaacaugugaacagu

SEQ ID NO: 2272221 - RNA, 19 nt, Artificial Sequence
  Description of Artificial Sequence: Synthetic oligonucleotide
  Antisense strand to SEQ ID NO: 2272220
acuguucacauguucuuua

SEQ ID NO: 2272222 - RNA, 19 nt, Artificial Sequence
  Description of Artificial Sequence: Synthetic oligonucleotide
  Sense strand starting at position 21 of SEQ ID NO: 1884524
acauauuguucucuagaua

SEQ ID NO: 2272223 - RNA, 19 nt, Artificial Sequence
  Description of Artificial Sequence: Synthetic oligonucleotide
  Antisense strand to SEQ ID NO: 2272222
uaucuagagaacaauaugu

SEQ ID NO: 2272224 - RNA, 19 nt, Artificial Sequence
  Description of Artificial Sequence: Synthetic oligonucleotide
  Sense strand starting at position 51 of SEQ ID NO: 1884524
gguguuaaauuuguuccca

SEQ ID NO: 2272225 - RNA, 19 nt, Artificial Sequence
  Description of Artificial Sequence: Synthetic oligonucleotide
  Antisense strand to SEQ ID NO: 2272224
ugggaacaaauuuaacacc

SEQ ID NO: 2272226 - RNA, 19 nt, Artificial Sequence
  Description of Artificial Sequence: Synthetic oligonucleotide
  Sense strand starting at position 52 of SEQ ID NO: 1884524
guguuaaauuuguucccau

SEQ ID NO: 2272227 - RNA, 19 nt, Artificial Sequence
  Description of Artificial Sequence: Synthetic oligonucleotide
  Antisense strand to SEQ ID NO: 2272226
augggaacaaauuuaacac

SEQ ID NO: 2272228 - RNA, 19 nt, Artificial Sequence
  Description of Artificial Sequence: Synthetic oligonucleotide
  Sense strand starting at position 91 of SEQ ID NO: 1884524
gcagaagaauuggccuaga

SEQ ID NO: 2272229 - RNA, 19 nt, Artificial Sequence
  Description of Artificial Sequence: Synthetic oligonucleotide
  Antisense strand to SEQ ID NO: 2272228
ucuaggccaauucuucugc

SEQ ID NO: 2272230 - RNA, 19 nt, Artificial Sequence
  Description of Artificial Sequence: Synthetic oligonucleotide
  Sense strand starting at position 114 of SEQ ID NO: 1884524
aaaguuguuugagucaaua

SEQ ID NO: 2272231 - RNA, 19 nt, Artificial Sequence
  Description of Artificial Sequence: Synthetic oligonucleotide
  Antisense strand to SEQ ID NO: 2272230
uauugacucaaacaacuuu

SEQ ID NO: 2272232 - RNA, 19 nt, Artificial Sequence
  Description of Artificial Sequence: Synthetic oligonucleotide
  Sense strand starting at position 150 of SEQ ID NO: 1884524
ggagcucagaguugugaua

SEQ ID NO: 2272233 - RNA, 19 nt, Artificial Sequence
  Description of Artificial Sequence: Synthetic oligonucleotide
  Antisense strand to SEQ ID NO: 2272232
uaucacaacucugagcucc

SEQ ID NO: 2272234 - RNA, 19 nt, Artificial Sequence
  Description of Artificial Sequence: Synthetic oligonucleotide
  Sense strand starting at position 172 of SEQ ID NO: 1884524
ugguauaucugcucaugag

SEQ ID NO: 2272235 - RNA, 19 nt, Artificial Sequence
  Description of Artificial Sequence: Synthetic oligonucleotide
  Antisense strand to SEQ ID NO: 2272234
cucaugagcagauauacca

SEQ ID NO: 2272236 - RNA, 19 nt, Artificial Sequence
  Description of Artificial Sequence: Synthetic oligonucleotide
  Sense strand starting at position 173 of SEQ ID NO: 1884524
gguauaucugcucaugaga

SEQ ID NO: 2272237 - RNA, 19 nt, Artificial Sequence
  Description of Artificial Sequence: Synthetic oligonucleotide
  Antisense strand to SEQ ID NO: 2272236
ucucaugagcagauauacc

SEQ ID NO: 2272238 - RNA, 19 nt, Artificial Sequence
  Description of Artificial Sequence: Synthetic oligonucleotide
  Sense strand starting at position 176 of SEQ ID NO: 1884524
auaucugcucaugagaugu

SEQ ID NO: 2272239 - RNA, 19 nt, Artificial Sequence
  Description of Artificial Sequence: Synthetic oligonucleotide
  Antisense strand to SEQ ID NO: 2272238
acaucucaugagcagauau

SEQ ID NO: 2272240 - RNA, 19 nt, Artificial Sequence
  Description of Artificial Sequence: Synthetic oligonucleotide
  Sense strand starting at position 190 of SEQ ID NO: 1884524
gauguuauuguggaacuua

SEQ ID NO: 2272241 - RNA, 19 nt, Artificial Sequence
  Description of Artificial Sequence: Synthetic oligonucleotide
  Antisense strand to SEQ ID NO: 2272240
uaaguuccacaauaacauc

SEQ ID NO: 2272242 - RNA, 19 nt, Artificial Sequence
  Description of Artificial Sequence: Synthetic oligonucleotide
  Sense strand starting at position 198 of SEQ ID NO: 1884524
uguggaacuuaaucaauag

SEQ ID NO: 2272243 - RNA, 19 nt, Artificial Sequence
  Description of Artificial Sequence: Synthetic oligonucleotide
  Antisense strand to SEQ ID NO: 2272242
cuauugauuaaguuccaca

SEQ ID NO: 2272244 - RNA, 19 nt, Artificial Sequence
  Description of Artificial Sequence: Synthetic oligonucleotide
  Sense strand starting at position 210 of SEQ ID NO: 1884524
ucaauagaaucagccagau

SEQ ID NO: 2272245 - RNA, 19 nt, Artificial Sequence
  Description of Artificial Sequence: Synthetic oligonucleotide
  Antisense strand to SEQ ID NO: 2272244
aucuggcugauucuauuga

SEQ ID NO: 2272246 - RNA, 19 nt, Artificial Sequence
  Description of Artificial Sequence: Synthetic oligonucleotide
  Sense strand starting at position 472 of SEQ ID NO: 1884524
ggcauaauauuugaauaga

SEQ ID NO: 2272247 - RNA, 19 nt, Artificial Sequence
  Description of Artificial Sequence: Synthetic oligonucleotide
  Antisense strand to SEQ ID NO: 2272246
ucuauucaaauauuaugcc

SEQ ID NO: 2272248 - RNA, 19 nt, Artificial Sequence
  Description of Artificial Sequence: Synthetic oligonucleotide
  Sense strand starting at position 921 of SEQ ID NO: 1884524
gguacuuauacgcaaugga

SEQ ID NO: 2272249 - RNA, 19 nt, Artificial Sequence
  Description of Artificial Sequence: Synthetic oligonucleotide
  Antisense strand to SEQ ID NO: 2272248
uccauugcguauaaguacc

SEQ ID NO: 2272250 - RNA, 19 nt, Artificial Sequence
  Description of Artificial Sequence: Synthetic oligonucleotide
  Sense strand starting at position 938 of SEQ ID NO: 1884524
gaggacuaguuagccauaa

SEQ ID NO: 2272251 - RNA, 19 nt, Artificial Sequence
  Description of Artificial Sequence: Synthetic oligonucleotide
  Antisense strand to SEQ ID NO: 2272250
uuauggcuaacuaguccuc

SEQ ID NO: 2272252 - RNA, 19 nt, Artificial Sequence
  Description of Artificial Sequence: Synthetic oligonucleotide
  Sense strand starting at position 939 of SEQ ID NO: 1884524
aggacuaguuagccauaaa

SEQ ID NO: 2272253 - RNA, 19 nt, Artificial Sequence
  Description of Artificial Sequence: Synthetic oligonucleotide
  Antisense strand to SEQ ID NO: 2272252
uuuauggcuaacuaguccu

SEQ ID NO: 2272254 - RNA, 19 nt, Artificial Sequence
  Description of Artificial Sequence: Synthetic oligonucleotide
  Sense strand starting at position 1225 of SEQ ID NO: 1884524
acaauagguuaaccauagu

SEQ ID NO: 2272255 - RNA, 19 nt, Artificial Sequence
  Description of Artificial Sequence: Synthetic oligonucleotide
  Antisense strand to SEQ ID NO: 2272254
acuaugguuaaccuauugu

SEQ ID NO: 2272256 - RNA, 19 nt, Artificial Sequence
  Description of Artificial Sequence: Synthetic oligonucleotide
  Sense strand starting at position 1231 of SEQ ID NO: 1884524
gguuaaccauagucaauaa

SEQ ID NO: 2272257 - RNA, 19 nt, Artificial Sequence
  Description of Artificial Sequence: Synthetic oligonucleotide
  Antisense strand to SEQ ID NO: 2272256
uuauugacuaugguuaacc

SEQ ID NO: 2272258 - RNA, 19 nt, Artificial Sequence
  Description of Artificial Sequence: Synthetic oligonucleotide
  Sense strand starting at position 1597 of SEQ ID NO: 1884524
aggugagaacuuggugaaa

SEQ ID NO: 2272259 - RNA, 19 nt, Artificial Sequence
  Description of Artificial Sequence: Synthetic oligonucleotide
  Antisense strand to SEQ ID NO: 2272258
uuucaccaaguucucaccu

SEQ ID NO: 2272260 - RNA, 19 nt, Artificial Sequence
  Description of Artificial Sequence: Synthetic oligonucleotide
  Sense strand starting at position 1768 of SEQ ID NO: 1884524
aggaaauccugcuuacuuu

SEQ ID NO: 2272261 - RNA, 19 nt, Artificial Sequence
  Description of Artificial Sequence: Synthetic oligonucleotide
  Antisense strand to SEQ ID NO: 2272260
aaaguaagcaggauuuccu

SEQ ID NO: 2272262 - RNA, 19 nt, Artificial Sequence
  Description of Artificial Sequence: Synthetic oligonucleotide
  Sense strand starting at position 1874 of SEQ ID NO: 1884524
uagauucgaugaccugaaa

SEQ ID NO: 2272263 - RNA, 19 nt, Artificial Sequence
  Description of Artificial Sequence: Synthetic oligonucleotide
  Antisense strand to SEQ ID NO: 2272262
uuucaggucaucgaaucua

SEQ ID NO: 2272264 - RNA, 19 nt, Artificial Sequence
  Description of Artificial Sequence: Synthetic oligonucleotide
  Sense strand starting at position 1898 of SEQ ID NO: 1884524
ggcacaaucugaucuuuac

SEQ ID NO: 2272265 - RNA, 19 nt, Artificial Sequence
  Description of Artificial Sequence: Synthetic oligonucleotide
  Antisense strand to SEQ ID NO: 2272264
guaaagaucagauugugcc

SEQ ID NO: 2272266 - RNA, 19 nt, Artificial Sequence
  Description of Artificial Sequence: Synthetic oligonucleotide
  Sense strand starting at position 1934 of SEQ ID NO: 1884524
gaguuaagauaaucaguac

SEQ ID NO: 2272267 - RNA, 19 nt, Artificial Sequence
  Description of Artificial Sequence: Synthetic oligonucleotide
  Antisense strand to SEQ ID NO: 2272266
guacugauuaucuuaacuc

SEQ ID NO: 2272268 - RNA, 19 nt, Artificial Sequence
  Description of Artificial Sequence: Synthetic oligonucleotide
  Sense strand starting at position 2089 of SEQ ID NO: 1884524
ggaagcucuuauccugaua

SEQ ID NO: 2272269 - RNA, 19 nt, Artificial Sequence
  Description of Artificial Sequence: Synthetic oligonucleotide
  Antisense strand to SEQ ID NO: 2272268
uaucaggauaagagcuucc

SEQ ID NO: 2272270 - RNA, 19 nt, Artificial Sequence
  Description of Artificial Sequence: Synthetic oligonucleotide
  Sense strand starting at position 2147 of SEQ ID NO: 1884524
cugagaagucacugauaug

SEQ ID NO: 2272271 - RNA, 19 nt, Artificial Sequence
  Description of Artificial Sequence: Synthetic oligonucleotide
  Antisense strand to SEQ ID NO: 2272270
cauaucagugacuucucag

SEQ ID NO: 2272272 - RNA, 19 nt, Artificial Sequence
  Description of Artificial Sequence: Synthetic oligonucleotide
  Sense strand starting at position 2543 of SEQ ID NO: 1884524
gaaguacagcauugcuaua

SEQ ID NO: 2272273 - RNA, 19 nt, Artificial Sequence
  Description of Artificial Sequence: Synthetic oligonucleotide
  Antisense strand to SEQ ID NO: 2272272
uauagcaaugcuguacuuc

SEQ ID NO: 2272274 - RNA, 19 nt, Artificial Sequence
  Description of Artificial Sequence: Synthetic oligonucleotide
  Sense strand starting at position 2545 of SEQ ID NO: 1884524
aguacagcauugcuauaaa

SEQ ID NO: 2272275 - RNA, 19 nt, Artificial Sequence
  Description of Artificial Sequence: Synthetic oligonucleotide
  Antisense strand to SEQ ID NO: 2272274
uuuauagcaaugcuguacu

SEQ ID NO: 2272276 - RNA, 19 nt, Artificial Sequence
  Description of Artificial Sequence: Synthetic oligonucleotide
  Sense strand starting at position 2548 of SEQ ID NO: 1884524
acagcauugcuauaaagau

SEQ ID NO: 2272277 - RNA, 19 nt, Artificial Sequence
  Description of Artificial Sequence: Synthetic oligonucleotide
  Antisense strand to SEQ ID NO: 2272276
aucuuuauagcaaugcugu

SEQ ID NO: 2272278 - RNA, 19 nt, Artificial Sequence
  Description of Artificial Sequence: Synthetic oligonucleotide
  Sense strand starting at position 2862 of SEQ ID NO: 1884524
uuugcuaugcguuugcaaa

SEQ ID NO: 2272279 - RNA, 19 nt, Artificial Sequence
  Description of Artificial Sequence: Synthetic oligonucleotide
  Antisense strand to SEQ ID NO: 2272278
uuugcaaacgcauagcaaa

SEQ ID NO: 2272280 - RNA, 19 nt, Artificial Sequence
  Description of Artificial Sequence: Synthetic oligonucleotide
  Sense strand starting at position 2926 of SEQ ID NO: 1884524
ugaccuucagagugaugga

SEQ ID NO: 2272281 - RNA, 19 nt, Artificial Sequence
  Description of Artificial Sequence: Synthetic oligonucleotide
  Antisense strand to SEQ ID NO: 2272280
uccaucacucugaagguca

SEQ ID NO: 2272282 - RNA, 19 nt, Artificial Sequence
  Description of Artificial Sequence: Synthetic oligonucleotide
  Sense strand starting at position 3038 of SEQ ID NO: 1884524
aaggaaugaucugaaacug

SEQ ID NO: 2272283 - RNA, 19 nt, Artificial Sequence
  Description of Artificial Sequence: Synthetic oligonucleotide
  Antisense strand to SEQ ID NO: 2272282
caguuucagaucauuccuu

SEQ ID NO: 2272284 - RNA, 19 nt, Artificial Sequence
  Description of Artificial Sequence: Synthetic oligonucleotide
  Sense strand starting at position 3107 of SEQ ID NO: 1884524
gccugacccuguguagaaa

SEQ ID NO: 2272285 - RNA, 19 nt, Artificial Sequence
  Description of Artificial Sequence: Synthetic oligonucleotide
  Antisense strand to SEQ ID NO: 2272284
uuucuacacagggucaggc

SEQ ID NO: 2272286 - RNA, 19 nt, Artificial Sequence
  Description of Artificial Sequence: Synthetic oligonucleotide
  Sense strand starting at position 3288 of SEQ ID NO: 1884524
agggaagaaugguuucgua

SEQ ID NO: 2272287 - RNA, 19 nt, Artificial Sequence
  Description of Artificial Sequence: Synthetic oligonucleotide
  Antisense strand to SEQ ID NO: 2272286
uacgaaaccauucuucccu

SEQ ID NO: 2272288 - RNA, 19 nt, Artificial Sequence
  Description of Artificial Sequence: Synthetic oligonucleotide
  Sense strand starting at position 3394 of SEQ ID NO: 1884524
gggucccagauaugucuua

SEQ ID NO: 2272289 - RNA, 19 nt, Artificial Sequence
  Description of Artificial Sequence: Synthetic oligonucleotide
  Antisense strand to SEQ ID NO: 2272288
uaagacauaucugggaccc

SEQ ID NO: 2272290 - RNA, 19 nt, Artificial Sequence
  Description of Artificial Sequence: Synthetic oligonucleotide
  Sense strand starting at position 3502 of SEQ ID NO: 1884524
uuggaagccuuugucuaga

SEQ ID NO: 2272291 - RNA, 19 nt, Artificial Sequence
  Description of Artificial Sequence: Synthetic oligonucleotide
  Antisense strand to SEQ ID NO: 2272290
ucuagacaaaggcuuccaa

SEQ ID NO: 2272292 - RNA, 19 nt, Artificial Sequence
  Description of Artificial Sequence: Synthetic oligonucleotide
  Sense strand starting at position 3504 of SEQ ID NO: 1884524
ggaagccuuugucuagauu

SEQ ID NO: 2272293 - RNA, 19 nt, Artificial Sequence
  Description of Artificial Sequence: Synthetic oligonucleotide
  Antisense strand to SEQ ID NO: 2272292
aaucuagacaaaggcuucc

SEQ ID NO: 2272294 - RNA, 19 nt, Artificial Sequence
  Description of Artificial Sequence: Synthetic oligonucleotide
  Sense strand starting at position 3543 of SEQ ID NO: 1884524
auuccauguccaggcagaa

SEQ ID NO: 2272295 - RNA, 19 nt, Artificial Sequence
  Description of Artificial Sequence: Synthetic oligonucleotide
  Antisense strand to SEQ ID NO: 2272294
uucugccuggacauggaau

SEQ ID NO: 2272296 - RNA, 19 nt, Artificial Sequence
  Description of Artificial Sequence: Synthetic oligonucleotide
  Sense strand starting at position 3853 of SEQ ID NO: 1884524
gcaucaguauggucuaaau

SEQ ID NO: 2272297 - RNA, 19 nt, Artificial Sequence
  Description of Artificial Sequence: Synthetic oligonucleotide
  Antisense strand to SEQ ID NO: 2272296
auuuagaccauacugaugc

SEQ ID NO: 2272298 - RNA, 19 nt, Artificial Sequence
  Description of Artificial Sequence: Synthetic oligonucleotide
  Sense strand starting at position 3855 of SEQ ID NO: 1884524
aucaguauggucuaaaugu

SEQ ID NO: 2272299 - RNA, 19 nt, Artificial Sequence
  Description of Artificial Sequence: Synthetic oligonucleotide
  Antisense strand to SEQ ID NO: 2272298
acauuuagaccauacugau

SEQ ID NO: 2272300 - RNA, 19 nt, Artificial Sequence
  Description of Artificial Sequence: Synthetic oligonucleotide
  Sense strand starting at position 3869 of SEQ ID NO: 1884524
aauguaagacauggaguua

SEQ ID NO: 2272301 - RNA, 19 nt, Artificial Sequence
  Description of Artificial Sequence: Synthetic oligonucleotide
  Antisense strand to SEQ ID NO: 2272300
uaacuccaugucuuacauu

SEQ ID NO: 2272302 - RNA, 19 nt, Artificial Sequence
  Description of Artificial Sequence: Synthetic oligonucleotide
  Sense strand starting at position 195 of SEQ ID NO: 1884525
ucagacuucccuuagacgu

SEQ ID NO: 2272303 - RNA, 19 nt, Artificial Sequence
  Description of Artificial Sequence: Synthetic oligonucleotide
  Antisense strand to SEQ ID NO: 2272302
acgucuaagggaagucuga

SEQ ID NO: 2272304 - RNA, 19 nt, Artificial Sequence
  Description of Artificial Sequence: Synthetic oligonucleotide
  Sense strand starting at position 259 of SEQ ID NO: 1884525
uggugcuuucuguuuguca

SEQ ID NO: 2272305 - RNA, 19 nt, Artificial Sequence
  Description of Artificial Sequence: Synthetic oligonucleotide
  Antisense strand to SEQ ID NO: 2272304
ugacaaacagaaagcacca

SEQ ID NO: 2272306 - RNA, 19 nt, Artificial Sequence
  Description of Artificial Sequence: Synthetic oligonucleotide
  Sense strand starting at position 263 of SEQ ID NO: 1884525
gcuuucuguuugucauuua

SEQ ID NO: 2272307 - RNA, 19 nt, Artificial Sequence
  Description of Artificial Sequence: Synthetic oligonucleotide
  Antisense strand to SEQ ID NO: 2272306
uaaaugacaaacagaaagc

SEQ ID NO: 2272308 - RNA, 19 nt, Artificial Sequence
  Description of Artificial Sequence: Synthetic oligonucleotide
  Sense strand starting at position 266 of SEQ ID NO: 1884525
uucuguuugucauuuaauc

SEQ ID NO: 2272309 - RNA, 19 nt, Artificial Sequence
  Description of Artificial Sequence: Synthetic oligonucleotide
  Antisense strand to SEQ ID NO: 2272308
gauuaaaugacaaacagaa

SEQ ID NO: 2272310 - RNA, 19 nt, Artificial Sequence
  Description of Artificial Sequence: Synthetic oligonucleotide
  Sense strand starting at position 360 of SEQ ID NO: 1884525
ugagaacuagcaugcaaau

SEQ ID NO: 2272311 - RNA, 19 nt, Artificial Sequence
  Description of Artificial Sequence: Synthetic oligonucleotide
  Antisense strand to SEQ ID NO: 2272310
auuugcaugcuaguucuca

SEQ ID NO: 2272312 - RNA, 19 nt, Artificial Sequence
  Description of Artificial Sequence: Synthetic oligonucleotide
  Sense strand starting at position 439 of SEQ ID NO: 1884525
gcagaauagaccuguugau

SEQ ID NO: 2272313 - RNA, 19 nt, Artificial Sequence
  Description of Artificial Sequence: Synthetic oligonucleotide
  Antisense strand to SEQ ID NO: 2272312
aucaacaggucuauucugc

SEQ ID NO: 2272314 - RNA, 19 nt, Artificial Sequence
  Description of Artificial Sequence: Synthetic oligonucleotide
  Sense strand starting at position 522 of SEQ ID NO: 1884525
guauuauugagguagcaga

SEQ ID NO: 2272315 - RNA, 19 nt, Artificial Sequence
  Description of Artificial Sequence: Synthetic oligonucleotide
  Antisense strand to SEQ ID NO: 2272314
ucugcuaccucaauaauac

SEQ ID NO: 2272316 - RNA, 19 nt, Artificial Sequence
  Description of Artificial Sequence: Synthetic oligonucleotide
  Sense strand starting at position 878 of SEQ ID NO: 1884525
agaagaagugugcaccuaa

SEQ ID NO: 2272317 - RNA, 19 nt, Artificial Sequence
  Description of Artificial Sequence: Synthetic oligonucleotide
  Antisense strand to SEQ ID NO: 2272316
uuaggugcacacuucuucu

SEQ ID NO: 2272318 - RNA, 19 nt, Artificial Sequence
  Description of Artificial Sequence: Synthetic oligonucleotide
  Sense strand starting at position 1327 of SEQ ID NO: 1884525
cauggaaugcugcauggaa

SEQ ID NO: 2272319 - RNA, 19 nt, Artificial Sequence
  Description of Artificial Sequence: Synthetic oligonucleotide
  Antisense strand to SEQ ID NO: 2272318
uuccaugcagcauuccaug

SEQ ID NO: 2272320 - RNA, 19 nt, Artificial Sequence
  Description of Artificial Sequence: Synthetic oligonucleotide
  Sense strand starting at position 1329 of SEQ ID NO: 1884525
uggaaugcugcauggaaua

SEQ ID NO: 2272321 - RNA, 19 nt, Artificial Sequence
  Description of Artificial Sequence: Synthetic oligonucleotide
  Antisense strand to SEQ ID NO: 2272320
uauuccaugcagcauucca

SEQ ID NO: 2272322 - RNA, 19 nt, Artificial Sequence
  Description of Artificial Sequence: Synthetic oligonucleotide
  Sense strand starting at position 1399 of SEQ ID NO: 1884525
aaaugaaacgcugagcuaa

SEQ ID NO: 2272323 - RNA, 19 nt, Artificial Sequence
  Description of Artificial Sequence: Synthetic oligonucleotide
  Antisense strand to SEQ ID NO: 2272322
uuagcucagcguuucauuu

SEQ ID NO: 2272324 - RNA, 19 nt, Artificial Sequence
  Description of Artificial Sequence: Synthetic oligonucleotide
  Sense strand starting at position 1472 of SEQ ID NO: 1884525
cuuuaagugccagacuaua

SEQ ID NO: 2272325 - RNA, 19 nt, Artificial Sequence
  Description of Artificial Sequence: Synthetic oligonucleotide
  Antisense strand to SEQ ID NO: 2272324
uauagucuggcacuuaaag

SEQ ID NO: 2272326 - RNA, 19 nt, Artificial Sequence
  Description of Artificial Sequence: Synthetic oligonucleotide
  Sense strand starting at position 1563 of SEQ ID NO: 1884525
ugaguaaugcuucagguag

SEQ ID NO: 2272327 - RNA, 19 nt, Artificial Sequence
  Description of Artificial Sequence: Synthetic oligonucleotide
  Antisense strand to SEQ ID NO: 2272326
cuaccugaagcauuacuca

SEQ ID NO: 2272328 - RNA, 19 nt, Artificial Sequence
  Description of Artificial Sequence: Synthetic oligonucleotide
  Sense strand starting at position 1666 of SEQ ID NO: 1884525
gcauccauuugggaaucaa

SEQ ID NO: 2272329 - RNA, 19 nt, Artificial Sequence
  Description of Artificial Sequence: Synthetic oligonucleotide
  Antisense strand to SEQ ID NO: 2272328
uugauucccaaauggaugc

SEQ ID NO: 2272330 - RNA, 19 nt, Artificial Sequence
  Description of Artificial Sequence: Synthetic oligonucleotide
  Sense strand starting at position 1679 of SEQ ID NO: 1884525
aaucaaagaguugggucua

SEQ ID NO: 2272331 - RNA, 19 nt, Artificial Sequence
  Description of Artificial Sequence: Synthetic oligonucleotide
  Antisense strand to SEQ ID NO: 2272330
uagacccaacucuuugauu

SEQ ID NO: 2272332 - RNA, 19 nt, Artificial Sequence
  Description of Artificial Sequence: Synthetic oligonucleotide
  Sense strand starting at position 1684 of SEQ ID NO: 1884525
aagaguugggucuaucuuc

SEQ ID NO: 2272333 - RNA, 19 nt, Artificial Sequence
  Description of Artificial Sequence: Synthetic oligonucleotide
  Antisense strand to SEQ ID NO: 2272332
gaagauagacccaacucuu

SEQ ID NO: 2272334 - RNA, 19 nt, Artificial Sequence
  Description of Artificial Sequence: Synthetic oligonucleotide
  Sense strand starting at position 2171 of SEQ ID NO: 1884525
aggaguagaauccgaucau

SEQ ID NO: 2272335 - RNA, 19 nt, Artificial Sequence
  Description of Artificial Sequence: Synthetic oligonucleotide
  Antisense strand to SEQ ID NO: 2272334
augaucggauucuacuccu

SEQ ID NO: 2272336 - RNA, 19 nt, Artificial Sequence
  Description of Artificial Sequence: Synthetic oligonucleotide
  Sense strand starting at position 2175 of SEQ ID NO: 1884525
guagaauccgaucaugagu

SEQ ID NO: 2272337 - RNA, 19 nt, Artificial Sequence
  Description of Artificial Sequence: Synthetic oligonucleotide
  Antisense strand to SEQ ID NO: 2272336
acucaugaucggauucuac

SEQ ID NO: 2272338 - RNA, 19 nt, Artificial Sequence
  Description of Artificial Sequence: Synthetic oligonucleotide
  Sense strand starting at position 2200 of SEQ ID NO: 1884525
guauacaaagcuggagaau

SEQ ID NO: 2272339 - RNA, 19 nt, Artificial Sequence
  Description of Artificial Sequence: Synthetic oligonucleotide
  Antisense strand to SEQ ID NO: 2272338
auucuccagcuuuguauac

SEQ ID NO: 2272340 - RNA, 19 nt, Artificial Sequence
  Description of Artificial Sequence: Synthetic oligonucleotide
  Sense strand starting at position 2209 of SEQ ID NO: 1884525
gcuggagaauuccugauac

SEQ ID NO: 2272341 - RNA, 19 nt, Artificial Sequence
  Description of Artificial Sequence: Synthetic oligonucleotide
  Antisense strand to SEQ ID NO: 2272340
guaucaggaauucuccagc

SEQ ID NO: 2272342 - RNA, 19 nt, Artificial Sequence
  Description of Artificial Sequence: Synthetic oligonucleotide
  Sense strand starting at position 2219 of SEQ ID NO: 1884525
uccugauacugguuacaga

SEQ ID NO: 2272343 - RNA, 19 nt, Artificial Sequence
  Description of Artificial Sequence: Synthetic oligonucleotide
  Antisense strand to SEQ ID NO: 2272342
ucuguaaccaguaucagga

SEQ ID NO: 2272344 - RNA, 19 nt, Artificial Sequence
  Description of Artificial Sequence: Synthetic oligonucleotide
  Sense strand starting at position 2468 of SEQ ID NO: 1884525
cacuuauaagggugcauga

SEQ ID NO: 2272345 - RNA, 19 nt, Artificial Sequence
  Description of Artificial Sequence: Synthetic oligonucleotide
  Antisense strand to SEQ ID NO: 2272344
ucaugcacccuuauaagug

SEQ ID NO: 2272346 - RNA, 19 nt, Artificial Sequence
  Description of Artificial Sequence: Synthetic oligonucleotide
  Sense strand starting at position 2479 of SEQ ID NO: 1884525
gugcaugacagugauuaua

SEQ ID NO: 2272347 - RNA, 19 nt, Artificial Sequence
  Description of Artificial Sequence: Synthetic oligonucleotide
  Antisense strand to SEQ ID NO: 2272346
uauaaucacugucaugcac

SEQ ID NO: 2272348 - RNA, 19 nt, Artificial Sequence
  Description of Artificial Sequence: Synthetic oligonucleotide
  Sense strand starting at position 2650 of SEQ ID NO: 1884525
aggacugucuucuccaaug

SEQ ID NO: 2272349 - RNA, 19 nt, Artificial Sequence
  Description of Artificial Sequence: Synthetic oligonucleotide
  Antisense strand to SEQ ID NO: 2272348
cauuggagaagacaguccu

SEQ ID NO: 2272350 - RNA, 19 nt, Artificial Sequence
  Description of Artificial Sequence: Synthetic oligonucleotide
  Sense strand starting at position 2748 of SEQ ID NO: 1884525
uaugaugacugcucccaga

SEQ ID NO: 2272351 - RNA, 19 nt, Artificial Sequence
  Description of Artificial Sequence: Synthetic oligonucleotide
  Antisense strand to SEQ ID NO: 2272350
ucugggagcagucaucaua

SEQ ID NO: 2272352 - RNA, 19 nt, Artificial Sequence
  Description of Artificial Sequence: Synthetic oligonucleotide
  Sense strand starting at position 2775 of SEQ ID NO: 1884525
ucuaaacuaugguuuggaa

SEQ ID NO: 2272353 - RNA, 19 nt, Artificial Sequence
  Description of Artificial Sequence: Synthetic oligonucleotide
  Antisense strand to SEQ ID NO: 2272352
uuccaaaccauaguuuaga

SEQ ID NO: 2272354 - RNA, 19 nt, Artificial Sequence
  Description of Artificial Sequence: Synthetic oligonucleotide
  Sense strand starting at position 2839 of SEQ ID NO: 1884525
gggaguuuccugggaagca

SEQ ID NO: 2272355 - RNA, 19 nt, Artificial Sequence
  Description of Artificial Sequence: Synthetic oligonucleotide
  Antisense strand to SEQ ID NO: 2272354
ugcuucccaggaaacuccc

SEQ ID NO: 2272356 - RNA, 19 nt, Artificial Sequence
  Description of Artificial Sequence: Synthetic oligonucleotide
  Sense strand starting at position 2907 of SEQ ID NO: 1884525
gguagaaguagccacagau

SEQ ID NO: 2272357 - RNA, 19 nt, Artificial Sequence
  Description of Artificial Sequence: Synthetic oligonucleotide
  Antisense strand to SEQ ID NO: 2272356
aucuguggcuacuucuacc

SEQ ID NO: 2272358 - RNA, 19 nt, Artificial Sequence
  Description of Artificial Sequence: Synthetic oligonucleotide
  Sense strand starting at position 3025 of SEQ ID NO: 1884525
uugaucucagaguguugga

SEQ ID NO: 2272359 - RNA, 19 nt, Artificial Sequence
  Description of Artificial Sequence: Synthetic oligonucleotide
  Antisense strand to SEQ ID NO: 2272358
uccaacacucugagaucaa

SEQ ID NO: 2272360 - RNA, 19 nt, Artificial Sequence
  Description of Artificial Sequence: Synthetic oligonucleotide
  Sense strand starting at position 3066 of SEQ ID NO: 1884525
gagggagauaucuagccgu

SEQ ID NO: 2272361 - RNA, 19 nt, Artificial Sequence
  Description of Artificial Sequence: Synthetic oligonucleotide
  Antisense strand to SEQ ID NO: 2272360
acggcuagauaucucccuc

SEQ ID NO: 2272362 - RNA, 19 nt, Artificial Sequence
  Description of Artificial Sequence: Synthetic oligonucleotide
  Sense strand starting at position 3109 of SEQ ID NO: 1884525
guaagagaauggucaauua

SEQ ID NO: 2272363 - RNA, 19 nt, Artificial Sequence
  Description of Artificial Sequence: Synthetic oligonucleotide
  Antisense strand to SEQ ID NO: 2272362
uaauugaccauucucuuac

SEQ ID NO: 2272364 - RNA, 19 nt, Artificial Sequence
  Description of Artificial Sequence: Synthetic oligonucleotide
  Sense strand starting at position 3183 of SEQ ID NO: 1884525
cuauaaucuccacaguugu

SEQ ID NO: 2272365 - RNA, 19 nt, Artificial Sequence
  Description of Artificial Sequence: Synthetic oligonucleotide
  Antisense strand to SEQ ID NO: 2272364
acaacuguggagauuauag

SEQ ID NO: 2272366 - RNA, 19 nt, Artificial Sequence
  Description of Artificial Sequence: Synthetic oligonucleotide
  Sense strand starting at position 3289 of SEQ ID NO: 1884525
guacuucuucccugaacag

SEQ ID NO: 2272367 - RNA, 19 nt, Artificial Sequence
  Description of Artificial Sequence: Synthetic oligonucleotide
  Antisense strand to SEQ ID NO: 2272366
cuguucagggaagaaguac

SEQ ID NO: 2272368 - RNA, 19 nt, Artificial Sequence
  Description of Artificial Sequence: Synthetic oligonucleotide
  Sense strand starting at position 3319 of SEQ ID NO: 1884525
gugaauacacagugaauaa

SEQ ID NO: 2272369 - RNA, 19 nt, Artificial Sequence
  Description of Artificial Sequence: Synthetic oligonucleotide
  Antisense strand to SEQ ID NO: 2272368
uuauucacuguguauucac

SEQ ID NO: 2272370 - RNA, 19 nt, Artificial Sequence
  Description of Artificial Sequence: Synthetic oligonucleotide
  Sense strand starting at position 3370 of SEQ ID NO: 1884525
agaccucaguucucuugaa

SEQ ID NO: 2272371 - RNA, 19 nt, Artificial Sequence
  Description of Artificial Sequence: Synthetic oligonucleotide
  Antisense strand to SEQ ID NO: 2272370
uucaagagaacugaggucu

SEQ ID NO: 2272372 - RNA, 19 nt, Artificial Sequence
  Description of Artificial Sequence: Synthetic oligonucleotide
  Sense strand starting at position 3374 of SEQ ID NO: 1884525
cucaguucucuugaauaug

SEQ ID NO: 2272373 - RNA, 19 nt, Artificial Sequence
  Description of Artificial Sequence: Synthetic oligonucleotide
  Antisense strand to SEQ ID NO: 2272372
cauauucaagagaacugag

SEQ ID NO: 2272374 - RNA, 19 nt, Artificial Sequence
  Description of Artificial Sequence: Synthetic oligonucleotide
  Sense strand starting at position 3464 of SEQ ID NO: 1884525
ggaauugacacaggcacau

SEQ ID NO: 2272375 - RNA, 19 nt, Artificial Sequence
  Description of Artificial Sequence: Synthetic oligonucleotide
  Antisense strand to SEQ ID NO: 2272374
augugccugugucaauucc

SEQ ID NO: 2272376 - RNA, 19 nt, Artificial Sequence
  Description of Artificial Sequence: Synthetic oligonucleotide
  Sense strand starting at position 3719 of SEQ ID NO: 1884525
uuccaugaacccuggaguu

SEQ ID NO: 2272377 - RNA, 19 nt, Artificial Sequence
  Description of Artificial Sequence: Synthetic oligonucleotide
  Antisense strand to SEQ ID NO: 2272376
aacuccaggguucauggaa

SEQ ID NO: 2272378 - RNA, 19 nt, Artificial Sequence
  Description of Artificial Sequence: Synthetic oligonucleotide
  Sense strand starting at position 3747 of SEQ ID NO: 1884525
gaggcuuuccuugagguac

SEQ ID NO: 2272379 - RNA, 19 nt, Artificial Sequence
  Description of Artificial Sequence: Synthetic oligonucleotide
  Antisense strand to SEQ ID NO: 2272378
guaccucaaggaaagccuc

SEQ ID NO: 2272380 - RNA, 19 nt, Artificial Sequence
  Description of Artificial Sequence: Synthetic oligonucleotide
  Sense strand starting at position 3898 of SEQ ID NO: 1884525
ccaaguguucuuuacaaau

SEQ ID NO: 2272381 - RNA, 19 nt, Artificial Sequence
  Description of Artificial Sequence: Synthetic oligonucleotide
  Antisense strand to SEQ ID NO: 2272380
auuuguaaagaacacuugg

SEQ ID NO: 2272382 - RNA, 19 nt, Artificial Sequence
  Description of Artificial Sequence: Synthetic oligonucleotide
  Sense strand starting at position 105 of SEQ ID NO: 1884526
gagugcuuucuggaugagu

SEQ ID NO: 2272383 - RNA, 19 nt, Artificial Sequence
  Description of Artificial Sequence: Synthetic oligonucleotide
  Antisense strand to SEQ ID NO: 2272382
acucauccagaaagcacuc

SEQ ID NO: 2272384 - RNA, 19 nt, Artificial Sequence
  Description of Artificial Sequence: Synthetic oligonucleotide
  Sense strand starting at position 108 of SEQ ID NO: 1884526
ugcuuucuggaugaguaag

SEQ ID NO: 2272385 - RNA, 19 nt, Artificial Sequence
  Description of Artificial Sequence: Synthetic oligonucleotide
  Antisense strand to SEQ ID NO: 2272384
cuuacucauccagaaagca

SEQ ID NO: 2272386 - RNA, 19 nt, Artificial Sequence
  Description of Artificial Sequence: Synthetic oligonucleotide
  Sense strand starting at position 1077 of SEQ ID NO: 1884526
cuguauugauacuuagaag

SEQ ID NO: 2272387 - RNA, 19 nt, Artificial Sequence
  Description of Artificial Sequence: Synthetic oligonucleotide
  Antisense strand to SEQ ID NO: 2272386
cuucuaaguaucaauacag

SEQ ID NO: 2272388 - RNA, 19 nt, Artificial Sequence
  Description of Artificial Sequence: Synthetic oligonucleotide
  Sense strand starting at position 1690 of SEQ ID NO: 1884526
ggcugagguguccaggaua

SEQ ID NO: 2272389 - RNA, 19 nt, Artificial Sequence
  Description of Artificial Sequence: Synthetic oligonucleotide
  Antisense strand to SEQ ID NO: 2272388
uauccuggacaccucagcc

SEQ ID NO: 2272390 - RNA, 19 nt, Artificial Sequence
  Description of Artificial Sequence: Synthetic oligonucleotide
  Sense strand starting at position 1693 of SEQ ID NO: 1884526
ugagguguccaggauacuc

SEQ ID NO: 2272391 - RNA, 19 nt, Artificial Sequence
  Description of Artificial Sequence: Synthetic oligonucleotide
  Antisense strand to SEQ ID NO: 2272390
gaguauccuggacaccuca

SEQ ID NO: 2272392 - RNA, 19 nt, Artificial Sequence
  Description of Artificial Sequence: Synthetic oligonucleotide
  Sense strand starting at position 1701 of SEQ ID NO: 1884526
ccaggauacucuguccacu

SEQ ID NO: 2272393 - RNA, 19 nt, Artificial Sequence
  Description of Artificial Sequence: Synthetic oligonucleotide
  Antisense strand to SEQ ID NO: 2272392
aguggacagaguauccugg

SEQ ID NO: 2272394 - RNA, 19 nt, Artificial Sequence
  Description of Artificial Sequence: Synthetic oligonucleotide
  Sense strand starting at position 1862 of SEQ ID NO: 1884526
uucuuucugcuccagagaa

SEQ ID NO: 2272395 - RNA, 19 nt, Artificial Sequence
  Description of Artificial Sequence: Synthetic oligonucleotide
  Antisense strand to SEQ ID NO: 2272394
uucucuggagcagaaagaa

SEQ ID NO: 2272396 - RNA, 19 nt, Artificial Sequence
  Description of Artificial Sequence: Synthetic oligonucleotide
  Sense strand starting at position 1864 of SEQ ID NO: 1884526
cuuucugcuccagagaaga

SEQ ID NO: 2272397 - RNA, 19 nt, Artificial Sequence
  Description of Artificial Sequence: Synthetic oligonucleotide
  Antisense strand to SEQ ID NO: 2272396
ucuucucuggagcagaaag

SEQ ID NO: 2272398 - RNA, 19 nt, Artificial Sequence
  Description of Artificial Sequence: Synthetic oligonucleotide
  Sense strand starting at position 2008 of SEQ ID NO: 1884526
agcaaugggacuugggaua

SEQ ID NO: 2272399 - RNA, 19 nt, Artificial Sequence
  Description of Artificial Sequence: Synthetic oligonucleotide
  Antisense strand to SEQ ID NO: 2272398
uaucccaagucccauugcu

SEQ ID NO: 2272400 - RNA, 19 nt, Artificial Sequence
  Description of Artificial Sequence: Synthetic oligonucleotide
  Sense strand starting at position 2039 of SEQ ID NO: 1884526
caauucguuccagaugaau

SEQ ID NO: 2272401 - RNA, 19 nt, Artificial Sequence
  Description of Artificial Sequence: Synthetic oligonucleotide
  Antisense strand to SEQ ID NO: 2272400
auucaucuggaacgaauug

SEQ ID NO: 2272402 - RNA, 19 nt, Artificial Sequence
  Description of Artificial Sequence: Synthetic oligonucleotide
  Sense strand starting at position 2042 of SEQ ID NO: 1884526
uucguuccagaugaaucua

SEQ ID NO: 2272403 - RNA, 19 nt, Artificial Sequence
  Description of Artificial Sequence: Synthetic oligonucleotide
  Antisense strand to SEQ ID NO: 2272402
uagauucaucuggaacgaa

SEQ ID NO: 2272404 - RNA, 19 nt, Artificial Sequence
  Description of Artificial Sequence: Synthetic oligonucleotide
  Sense strand starting at position 2432 of SEQ ID NO: 1884526
cugcucugugaacauacau

SEQ ID NO: 2272405 - RNA, 19 nt, Artificial Sequence
  Description of Artificial Sequence: Synthetic oligonucleotide
  Antisense strand to SEQ ID NO: 2272404
auguauguucacagagcag

SEQ ID NO: 2272406 - RNA, 19 nt, Artificial Sequence
  Description of Artificial Sequence: Synthetic oligonucleotide
  Sense strand starting at position 2441 of SEQ ID NO: 1884526
gaacauacauucgcaggua

SEQ ID NO: 2272407 - RNA, 19 nt, Artificial Sequence
  Description of Artificial Sequence: Synthetic oligonucleotide
  Antisense strand to SEQ ID NO: 2272406
uaccugcgaauguauguuc

SEQ ID NO: 2272408 - RNA, 19 nt, Artificial Sequence
  Description of Artificial Sequence: Synthetic oligonucleotide
  Sense strand starting at position 2468 of SEQ ID NO: 1884526
ggaugaugagaauguguca

SEQ ID NO: 2272409 - RNA, 19 nt, Artificial Sequence
  Description of Artificial Sequence: Synthetic oligonucleotide
  Antisense strand to SEQ ID NO: 2272408
ugacacauucucaucaucc

SEQ ID NO: 2272410 - RNA, 19 nt, Artificial Sequence
  Description of Artificial Sequence: Synthetic oligonucleotide
  Sense strand starting at position 2471 of SEQ ID NO: 1884526
ugaugagaaugugucaaua

SEQ ID NO: 2272411 - RNA, 19 nt, Artificial Sequence
  Description of Artificial Sequence: Synthetic oligonucleotide
  Antisense strand to SEQ ID NO: 2272410
uauugacacauucucauca

SEQ ID NO: 2272412 - RNA, 19 nt, Artificial Sequence
  Description of Artificial Sequence: Synthetic oligonucleotide
  Sense strand starting at position 2577 of SEQ ID NO: 1884526
gggccaugagcuuaugaac

SEQ ID NO: 2272413 - RNA, 19 nt, Artificial Sequence
  Description of Artificial Sequence: Synthetic oligonucleotide
  Antisense strand to SEQ ID NO: 2272412
guucauaagcucauggccc

SEQ ID NO: 2272414 - RNA, 19 nt, Artificial Sequence
  Description of Artificial Sequence: Synthetic oligonucleotide
  Sense strand starting at position 2599 of SEQ ID NO: 1884526
gucuuaguugcauaagaaa

SEQ ID NO: 2272415 - RNA, 19 nt, Artificial Sequence
  Description of Artificial Sequence: Synthetic oligonucleotide
  Antisense strand to SEQ ID NO: 2272414
uuucuuaugcaacuaagac

SEQ ID NO: 2272416 - RNA, 19 nt, Artificial Sequence
  Description of Artificial Sequence: Synthetic oligonucleotide
  Sense strand starting at position 2870 of SEQ ID NO: 1884526
guuggauggacucauguau

SEQ ID NO: 2272417 - RNA, 19 nt, Artificial Sequence
  Description of Artificial Sequence: Synthetic oligonucleotide
  Antisense strand to SEQ ID NO: 2272416
auacaugaguccauccaac

SEQ ID NO: 2272418 - RNA, 19 nt, Artificial Sequence
  Description of Artificial Sequence: Synthetic oligonucleotide
  Sense strand starting at position 2986 of SEQ ID NO: 1884526
agaagaacaucuguaugua

SEQ ID NO: 2272419 - RNA, 19 nt, Artificial Sequence
  Description of Artificial Sequence: Synthetic oligonucleotide
  Antisense strand to SEQ ID NO: 2272418
uacauacagauguucuucu

SEQ ID NO: 2272420 - RNA, 19 nt, Artificial Sequence
  Description of Artificial Sequence: Synthetic oligonucleotide
  Sense strand starting at position 3082 of SEQ ID NO: 1884526
aagcaugugguacaaauau

SEQ ID NO: 2272421 - RNA, 19 nt, Artificial Sequence
  Description of Artificial Sequence: Synthetic oligonucleotide
  Antisense strand to SEQ ID NO: 2272420
auauuuguaccacaugcuu

SEQ ID NO: 2272422 - RNA, 19 nt, Artificial Sequence
  Description of Artificial Sequence: Synthetic oligonucleotide
  Sense strand starting at position 3113 of SEQ ID NO: 1884526
augggugcugauuauauau

SEQ ID NO: 2272423 - RNA, 19 nt, Artificial Sequence
  Description of Artificial Sequence: Synthetic oligonucleotide
  Antisense strand to SEQ ID NO: 2272422
auauauaaucagcacccau

SEQ ID NO: 2272424 - RNA, 19 nt, Artificial Sequence
  Description of Artificial Sequence: Synthetic oligonucleotide
  Sense strand starting at position 3147 of SEQ ID NO: 1884526
uguguuguaccugugcaua

SEQ ID NO: 2272425 - RNA, 19 nt, Artificial Sequence
  Description of Artificial Sequence: Synthetic oligonucleotide
  Antisense strand to SEQ ID NO: 2272424
uaugcacagguacaacaca

SEQ ID NO: 2272426 - RNA, 19 nt, Artificial Sequence
  Description of Artificial Sequence: Synthetic oligonucleotide
  Sense strand starting at position 3160 of SEQ ID NO: 1884526
ugcauauuggcugaucauc

SEQ ID NO: 2272427 - RNA, 19 nt, Artificial Sequence
  Description of Artificial Sequence: Synthetic oligonucleotide
  Antisense strand to SEQ ID NO: 2272426
gaugaucagccaauaugca

SEQ ID NO: 2272428 - RNA, 19 nt, Artificial Sequence
  Description of Artificial Sequence: Synthetic oligonucleotide
  Sense strand starting at position 3244 of SEQ ID NO: 1884526
gauggaugaauggguguau

SEQ ID NO: 2272429 - RNA, 19 nt, Artificial Sequence
  Description of Artificial Sequence: Synthetic oligonucleotide
  Antisense strand to SEQ ID NO: 2272428
auacacccauucauccauc

SEQ ID NO: 2272430 - RNA, 19 nt, Artificial Sequence
  Description of Artificial Sequence: Synthetic oligonucleotide
  Sense strand starting at position 3245 of SEQ ID NO: 1884526
auggaugaauggguguaua

SEQ ID NO: 2272431 - RNA, 19 nt, Artificial Sequence
  Description of Artificial Sequence: Synthetic oligonucleotide
  Antisense strand to SEQ ID NO: 2272430
uauacacccauucauccau

SEQ ID NO: 2272432 - RNA, 19 nt, Artificial Sequence
  Description of Artificial Sequence: Synthetic oligonucleotide
  Sense strand starting at position 3255 of SEQ ID NO: 1884526
ggguguauaaauggguaaa

SEQ ID NO: 2272433 - RNA, 19 nt, Artificial Sequence
  Description of Artificial Sequence: Synthetic oligonucleotide
  Antisense strand to SEQ ID NO: 2272432
uuuacccauuuauacaccc

SEQ ID NO: 2272434 - RNA, 19 nt, Artificial Sequence
  Description of Artificial Sequence: Synthetic oligonucleotide
  Sense strand starting at position 3256 of SEQ ID NO: 1884526
gguguauaaauggguaaau

SEQ ID NO: 2272435 - RNA, 19 nt, Artificial Sequence
  Description of Artificial Sequence: Synthetic oligonucleotide
  Antisense strand to SEQ ID NO: 2272434
auuuacccauuuauacacc

SEQ ID NO: 2272436 - RNA, 19 nt, Artificial Sequence
  Description of Artificial Sequence: Synthetic oligonucleotide
  Sense strand starting at position 3257 of SEQ ID NO: 1884526
guguauaaauggguaaaug

SEQ ID NO: 2272437 - RNA, 19 nt, Artificial Sequence
  Description of Artificial Sequence: Synthetic oligonucleotide
  Antisense strand to SEQ ID NO: 2272436
cauuuacccauuuauacac

SEQ ID NO: 2272438 - RNA, 19 nt, Artificial Sequence
  Description of Artificial Sequence: Synthetic oligonucleotide
  Sense strand starting at position 3305 of SEQ ID NO: 1884526
gaauuauguauggguggau

SEQ ID NO: 2272439 - RNA, 19 nt, Artificial Sequence
  Description of Artificial Sequence: Synthetic oligonucleotide
  Antisense strand to SEQ ID NO: 2272438
auccacccauacauaauuc

SEQ ID NO: 2272440 - RNA, 19 nt, Artificial Sequence
  Description of Artificial Sequence: Synthetic oligonucleotide
  Sense strand starting at position 3308 of SEQ ID NO: 1884526
uuauguauggguggaugau

SEQ ID NO: 2272441 - RNA, 19 nt, Artificial Sequence
  Description of Artificial Sequence: Synthetic oligonucleotide
  Antisense strand to SEQ ID NO: 2272440
aucauccacccauacauaa

SEQ ID NO: 2272442 - RNA, 19 nt, Artificial Sequence
  Description of Artificial Sequence: Synthetic oligonucleotide
  Sense strand starting at position 3309 of SEQ ID NO: 1884526
uauguauggguggaugauu

SEQ ID NO: 2272443 - RNA, 19 nt, Artificial Sequence
  Description of Artificial Sequence: Synthetic oligonucleotide
  Antisense strand to SEQ ID NO: 2272442
aaucauccacccauacaua

SEQ ID NO: 2272444 - RNA, 19 nt, Artificial Sequence
  Description of Artificial Sequence: Synthetic oligonucleotide
  Sense strand starting at position 3425 of SEQ ID NO: 1884526
gauggauacguggguggau

SEQ ID NO: 2272445 - RNA, 19 nt, Artificial Sequence
  Description of Artificial Sequence: Synthetic oligonucleotide
  Antisense strand to SEQ ID NO: 2272444
auccacccacguauccauc

SEQ ID NO: 2272446 - RNA, 19 nt, Artificial Sequence
  Description of Artificial Sequence: Synthetic oligonucleotide
  Sense strand starting at position 3426 of SEQ ID NO: 1884526
auggauacguggguggaua

SEQ ID NO: 2272447 - RNA, 19 nt, Artificial Sequence
  Description of Artificial Sequence: Synthetic oligonucleotide
  Antisense strand to SEQ ID NO: 2272446
uauccacccacguauccau

SEQ ID NO: 2272448 - RNA, 19 nt, Artificial Sequence
  Description of Artificial Sequence: Synthetic oligonucleotide
  Sense strand starting at position 3427 of SEQ ID NO: 1884526
uggauacguggguggauau

SEQ ID NO: 2272449 - RNA, 19 nt, Artificial Sequence
  Description of Artificial Sequence: Synthetic oligonucleotide
  Antisense strand to SEQ ID NO: 2272448
auauccacccacguaucca

SEQ ID NO: 2272450 - RNA, 19 nt, Artificial Sequence
  Description of Artificial Sequence: Synthetic oligonucleotide
  Sense strand starting at position 3428 of SEQ ID NO: 1884526
ggauacguggguggauaua

SEQ ID NO: 2272451 - RNA, 19 nt, Artificial Sequence
  Description of Artificial Sequence: Synthetic oligonucleotide
  Antisense strand to SEQ ID NO: 2272450
uauauccacccacguaucc

SEQ ID NO: 2272452 - RNA, 19 nt, Artificial Sequence
  Description of Artificial Sequence: Synthetic oligonucleotide
  Sense strand starting at position 3494 of SEQ ID NO: 1884526
ugaauccgugcugaguaaa

SEQ ID NO: 2272453 - RNA, 19 nt, Artificial Sequence
  Description of Artificial Sequence: Synthetic oligonucleotide
  Antisense strand to SEQ ID NO: 2272452
uuuacucagcacggauuca

SEQ ID NO: 2272454 - RNA, 19 nt, Artificial Sequence
  Description of Artificial Sequence: Synthetic oligonucleotide
  Sense strand starting at position 3497 of SEQ ID NO: 1884526
auccgugcugaguaaacua

SEQ ID NO: 2272455 - RNA, 19 nt, Artificial Sequence
  Description of Artificial Sequence: Synthetic oligonucleotide
  Antisense strand to SEQ ID NO: 2272454
uaguuuacucagcacggau

SEQ ID NO: 2272456 - RNA, 19 nt, Artificial Sequence
  Description of Artificial Sequence: Synthetic oligonucleotide
  Sense strand starting at position 3524 of SEQ ID NO: 1884526
acggaugugugaguagaca

SEQ ID NO: 2272457 - RNA, 19 nt, Artificial Sequence
  Description of Artificial Sequence: Synthetic oligonucleotide
  Antisense strand to SEQ ID NO: 2272456
ugucuacucacacauccgu

SEQ ID NO: 2272458 - RNA, 19 nt, Artificial Sequence
  Description of Artificial Sequence: Synthetic oligonucleotide
  Sense strand starting at position 3625 of SEQ ID NO: 1884526
acuucuuuccaugaggcuu

SEQ ID NO: 2272459 - RNA, 19 nt, Artificial Sequence
  Description of Artificial Sequence: Synthetic oligonucleotide
  Antisense strand to SEQ ID NO: 2272458
aagccucauggaaagaagu

SEQ ID NO: 2272460 - RNA, 19 nt, Artificial Sequence
  Description of Artificial Sequence: Synthetic oligonucleotide
  Sense strand starting at position 3677 of SEQ ID NO: 1884526
uuuccaugaggcuaucaua

SEQ ID NO: 2272461 - RNA, 19 nt, Artificial Sequence
  Description of Artificial Sequence: Synthetic oligonucleotide
  Antisense strand to SEQ ID NO: 2272460
uaugauagccucauggaaa

SEQ ID NO: 2272462 - RNA, 19 nt, Artificial Sequence
  Description of Artificial Sequence: Synthetic oligonucleotide
  Sense strand starting at position 3 of SEQ ID NO: 1884527
guugcagugaauuaugaua

SEQ ID NO: 2272463 - RNA, 19 nt, Artificial Sequence
  Description of Artificial Sequence: Synthetic oligonucleotide
  Antisense strand to SEQ ID NO: 2272462
uaucauaauucacugcaac

SEQ ID NO: 2272464 - RNA, 19 nt, Artificial Sequence
  Description of Artificial Sequence: Synthetic oligonucleotide
  Sense strand starting at position 189 of SEQ ID NO: 1884527
agaggagcugguugaagau

SEQ ID NO: 2272465 - RNA, 19 nt, Artificial Sequence
  Description of Artificial Sequence: Synthetic oligonucleotide
  Antisense strand to SEQ ID NO: 2272464
aucuucaaccagcuccucu

SEQ ID NO: 2272466 - RNA, 19 nt, Artificial Sequence
  Description of Artificial Sequence: Synthetic oligonucleotide
  Sense strand starting at position 195 of SEQ ID NO: 1884527
gcugguugaagauacuaca

SEQ ID NO: 2272467 - RNA, 19 nt, Artificial Sequence
  Description of Artificial Sequence: Synthetic oligonucleotide
  Antisense strand to SEQ ID NO: 2272466
uguaguaucuucaaccagc

SEQ ID NO: 2272468 - RNA, 19 nt, Artificial Sequence
  Description of Artificial Sequence: Synthetic oligonucleotide
  Sense strand starting at position 326 of SEQ ID NO: 1884527
cagguagaaaguuggauau

SEQ ID NO: 2272469 - RNA, 19 nt, Artificial Sequence
  Description of Artificial Sequence: Synthetic oligonucleotide
  Antisense strand to SEQ ID NO: 2272468
auauccaacuuucuaccug

SEQ ID NO: 2272470 - RNA, 19 nt, Artificial Sequence
  Description of Artificial Sequence: Synthetic oligonucleotide
  Sense strand starting at position 330 of SEQ ID NO: 1884527
uagaaaguuggauaugugu

SEQ ID NO: 2272471 - RNA, 19 nt, Artificial Sequence
  Description of Artificial Sequence: Synthetic oligonucleotide
  Antisense strand to SEQ ID NO: 2272470
acacauauccaacuuucua

SEQ ID NO: 2272472 - RNA, 19 nt, Artificial Sequence
  Description of Artificial Sequence: Synthetic oligonucleotide
  Sense strand starting at position 336 of SEQ ID NO: 1884527
guuggauauguguaucuaa

SEQ ID NO: 2272473 - RNA, 19 nt, Artificial Sequence
  Description of Artificial Sequence: Synthetic oligonucleotide
  Antisense strand to SEQ ID NO: 2272472
uuagauacacauauccaac

SEQ ID NO: 2272474 - RNA, 19 nt, Artificial Sequence
  Description of Artificial Sequence: Synthetic oligonucleotide
  Sense strand starting at position 339 of SEQ ID NO: 1884527
ggauauguguaucuaaagg

SEQ ID NO: 2272475 - RNA, 19 nt, Artificial Sequence
  Description of Artificial Sequence: Synthetic oligonucleotide
  Antisense strand to SEQ ID NO: 2272474
ccuuuagauacacauaucc

SEQ ID NO: 2272476 - RNA, 19 nt, Artificial Sequence
  Description of Artificial Sequence: Synthetic oligonucleotide
  Sense strand starting at position 408 of SEQ ID NO: 1884527
agaugauaucuugggccau

SEQ ID NO: 2272477 - RNA, 19 nt, Artificial Sequence
  Description of Artificial Sequence: Synthetic oligonucleotide
  Antisense strand to SEQ ID NO: 2272476
auggcccaagauaucaucu

SEQ ID NO: 2272478 - RNA, 19 nt, Artificial Sequence
  Description of Artificial Sequence: Synthetic oligonucleotide
  Sense strand starting at position 410 of SEQ ID NO: 1884527
augauaucuugggccauga

SEQ ID NO: 2272479 - RNA, 19 nt, Artificial Sequence
  Description of Artificial Sequence: Synthetic oligonucleotide
  Antisense strand to SEQ ID NO: 2272478
ucauggcccaagauaucau

SEQ ID NO: 2272480 - RNA, 19 nt, Artificial Sequence
  Description of Artificial Sequence: Synthetic oligonucleotide
  Sense strand starting at position 488 of SEQ ID NO: 1884527
gcaauauguagacauuggu

SEQ ID NO: 2272481 - RNA, 19 nt, Artificial Sequence
  Description of Artificial Sequence: Synthetic oligonucleotide
  Antisense strand to SEQ ID NO: 2272480
accaaugucuacauauugc

SEQ ID NO: 2272482 - RNA, 19 nt, Artificial Sequence
  Description of Artificial Sequence: Synthetic oligonucleotide
  Sense strand starting at position 491 of SEQ ID NO: 1884527
auauguagacauugguaca

SEQ ID NO: 2272483 - RNA, 19 nt, Artificial Sequence
  Description of Artificial Sequence: Synthetic oligonucleotide
  Antisense strand to SEQ ID NO: 2272482
uguaccaaugucuacauau

SEQ ID NO: 2272484 - RNA, 19 nt, Artificial Sequence
  Description of Artificial Sequence: Synthetic oligonucleotide
  Sense strand starting at position 594 of SEQ ID NO: 1884527
aggaguggccacugggaua

SEQ ID NO: 2272485 - RNA, 19 nt, Artificial Sequence
  Description of Artificial Sequence: Synthetic oligonucleotide
  Antisense strand to SEQ ID NO: 2272484
uaucccaguggccacuccu

SEQ ID NO: 2272486 - RNA, 19 nt, Artificial Sequence
  Description of Artificial Sequence: Synthetic oligonucleotide
  Sense strand starting at position 644 of SEQ ID NO: 1884527
guauaaauuguccauugga

SEQ ID NO: 2272487 - RNA, 19 nt, Artificial Sequence
  Description of Artificial Sequence: Synthetic oligonucleotide
  Antisense strand to SEQ ID NO: 2272486
uccaauggacaauuuauac

SEQ ID NO: 2272488 - RNA, 19 nt, Artificial Sequence
  Description of Artificial Sequence: Synthetic oligonucleotide
  Sense strand starting at position 681 of SEQ ID NO: 1884527
guugguaaccuugacacaa

SEQ ID NO: 2272489 - RNA, 19 nt, Artificial Sequence
  Description of Artificial Sequence: Synthetic oligonucleotide
  Antisense strand to SEQ ID NO: 2272488
uugugucaagguuaccaac

SEQ ID NO: 2272490 - RNA, 19 nt, Artificial Sequence
  Description of Artificial Sequence: Synthetic oligonucleotide
  Sense strand starting at position 699 of SEQ ID NO: 1884527
agaaguuugggugaagugu

SEQ ID NO: 2272491 - RNA, 19 nt, Artificial Sequence
  Description of Artificial Sequence: Synthetic oligonucleotide
  Antisense strand to SEQ ID NO: 2272490
acacuucacccaaacuucu

SEQ ID NO: 2272492 - RNA, 19 nt, Artificial Sequence
  Description of Artificial Sequence: Synthetic oligonucleotide
  Sense strand starting at position 759 of SEQ ID NO: 1884527
aggcuuaaaccauggaaca

SEQ ID NO: 2272493 - RNA, 19 nt, Artificial Sequence
  Description of Artificial Sequence: Synthetic oligonucleotide
  Antisense strand to SEQ ID NO: 2272492
uguuccaugguuuaagccu

SEQ ID NO: 2272494 - RNA, 19 nt, Artificial Sequence
  Description of Artificial Sequence: Synthetic oligonucleotide
  Sense strand starting at position 812 of SEQ ID NO: 1884527
ugaagcgaugcagagaaau

SEQ ID NO: 2272495 - RNA, 19 nt, Artificial Sequence
  Description of Artificial Sequence: Synthetic oligonucleotide
  Antisense strand to SEQ ID NO: 2272494
auuucucugcaucgcuuca

SEQ ID NO: 2272496 - RNA, 19 nt, Artificial Sequence
  Description of Artificial Sequence: Synthetic oligonucleotide
  Sense strand starting at position 876 of SEQ ID NO: 1884527
ggcuuaagggaaugucaau

SEQ ID NO: 2272497 - RNA, 19 nt, Artificial Sequence
  Description of Artificial Sequence: Synthetic oligonucleotide
  Antisense strand to SEQ ID NO: 2272496
auugacauucccuuaagcc

SEQ ID NO: 2272498 - RNA, 19 nt, Artificial Sequence
  Description of Artificial Sequence: Synthetic oligonucleotide
  Sense strand starting at position 930 of SEQ ID NO: 1884527
gaggguaggauugguaauu

SEQ ID NO: 2272499 - RNA, 19 nt, Artificial Sequence
  Description of Artificial Sequence: Synthetic oligonucleotide
  Antisense strand to SEQ ID NO: 2272498
aauuaccaauccuacccuc

SEQ ID NO: 2272500 - RNA, 19 nt, Artificial Sequence
  Description of Artificial Sequence: Synthetic oligonucleotide
  Sense strand starting at position 1008 of SEQ ID NO: 1884527
ucuagaacuccaggaguau

SEQ ID NO: 2272501 - RNA, 19 nt, Artificial Sequence
  Description of Artificial Sequence: Synthetic oligonucleotide
  Antisense strand to SEQ ID NO: 2272500
auacuccuggaguucuaga

SEQ ID NO: 2272502 - RNA, 19 nt, Artificial Sequence
  Description of Artificial Sequence: Synthetic oligonucleotide
  Sense strand starting at position 1332 of SEQ ID NO: 1884527
uucucaguuugugugauuu

SEQ ID NO: 2272503 - RNA, 19 nt, Artificial Sequence
  Description of Artificial Sequence: Synthetic oligonucleotide
  Antisense strand to SEQ ID NO: 2272502
aaaucacacaaacugagaa

SEQ ID NO: 2272504 - RNA, 19 nt, Artificial Sequence
  Description of Artificial Sequence: Synthetic oligonucleotide
  Sense strand starting at position 1384 of SEQ ID NO: 1884527
agguaauggguugaguaca

SEQ ID NO: 2272505 - RNA, 19 nt, Artificial Sequence
  Description of Artificial Sequence: Synthetic oligonucleotide
  Antisense strand to SEQ ID NO: 2272504
uguacucaacccauuaccu

SEQ ID NO: 2272506 - RNA, 19 nt, Artificial Sequence
  Description of Artificial Sequence: Synthetic oligonucleotide
  Sense strand starting at position 1417 of SEQ ID NO: 1884527
uugccaagugaguaugaca

SEQ ID NO: 2272507 - RNA, 19 nt, Artificial Sequence
  Description of Artificial Sequence: Synthetic oligonucleotide
  Antisense strand to SEQ ID NO: 2272506
ugucauacucacuuggcaa

SEQ ID NO: 2272508 - RNA, 19 nt, Artificial Sequence
  Description of Artificial Sequence: Synthetic oligonucleotide
  Sense strand starting at position 1804 of SEQ ID NO: 1884527
gggcuaucaucaccuagaa

SEQ ID NO: 2272509 - RNA, 19 nt, Artificial Sequence
  Description of Artificial Sequence: Synthetic oligonucleotide
  Antisense strand to SEQ ID NO: 2272508
uucuaggugaugauagccc

SEQ ID NO: 2272510 - RNA, 19 nt, Artificial Sequence
  Description of Artificial Sequence: Synthetic oligonucleotide
  Sense strand starting at position 1863 of SEQ ID NO: 1884527
caaacuaguggcuagaguu

SEQ ID NO: 2272511 - RNA, 19 nt, Artificial Sequence
  Description of Artificial Sequence: Synthetic oligonucleotide
  Antisense strand to SEQ ID NO: 2272510
aacucuagccacuaguuug

SEQ ID NO: 2272512 - RNA, 19 nt, Artificial Sequence
  Description of Artificial Sequence: Synthetic oligonucleotide
  Sense strand starting at position 1978 of SEQ ID NO: 1884527
uguaacaugauuggucaga

SEQ ID NO: 2272513 - RNA, 19 nt, Artificial Sequence
  Description of Artificial Sequence: Synthetic oligonucleotide
  Antisense strand to SEQ ID NO: 2272512
ucugaccaaucauguuaca

SEQ ID NO: 2272514 - RNA, 19 nt, Artificial Sequence
  Description of Artificial Sequence: Synthetic oligonucleotide
  Sense strand starting at position 1979 of SEQ ID NO: 1884527
guaacaugauuggucagaa

SEQ ID NO: 2272515 - RNA, 19 nt, Artificial Sequence
  Description of Artificial Sequence: Synthetic oligonucleotide
  Antisense strand to SEQ ID NO: 2272514
uucugaccaaucauguuac

SEQ ID NO: 2272516 - RNA, 19 nt, Artificial Sequence
  Description of Artificial Sequence: Synthetic oligonucleotide
  Sense strand starting at position 1980 of SEQ ID NO: 1884527
uaacaugauuggucagaac

SEQ ID NO: 2272517 - RNA, 19 nt, Artificial Sequence
  Description of Artificial Sequence: Synthetic oligonucleotide
  Antisense strand to SEQ ID NO: 2272516
guucugaccaaucauguua

SEQ ID NO: 2272518 - RNA, 19 nt, Artificial Sequence
  Description of Artificial Sequence: Synthetic oligonucleotide
  Sense strand starting at position 2024 of SEQ ID NO: 1884527
acuaauaggcuugaucagu

SEQ ID NO: 2272519 - RNA, 19 nt, Artificial Sequence
  Description of Artificial Sequence: Synthetic oligonucleotide
  Antisense strand to SEQ ID NO: 2272518
acugaucaagccuauuagu

SEQ ID NO: 2272520 - RNA, 19 nt, Artificial Sequence
  Description of Artificial Sequence: Synthetic oligonucleotide
  Sense strand starting at position 2117 of SEQ ID NO: 1884527
gaagaaggguuggcaucua

SEQ ID NO: 2272521 - RNA, 19 nt, Artificial Sequence
  Description of Artificial Sequence: Synthetic oligonucleotide
  Antisense strand to SEQ ID NO: 2272520
uagaugccaacccuucuuc

SEQ ID NO: 2272522 - RNA, 19 nt, Artificial Sequence
  Description of Artificial Sequence: Synthetic oligonucleotide
  Sense strand starting at position 2155 of SEQ ID NO: 1884527
ccaucaugucauuauagca

SEQ ID NO: 2272523 - RNA, 19 nt, Artificial Sequence
  Description of Artificial Sequence: Synthetic oligonucleotide
  Antisense strand to SEQ ID NO: 2272522
ugcuauaaugacaugaugg

SEQ ID NO: 2272524 - RNA, 19 nt, Artificial Sequence
  Description of Artificial Sequence: Synthetic oligonucleotide
  Sense strand starting at position 2218 of SEQ ID NO: 1884527
caggauuccugguuaaaug

SEQ ID NO: 2272525 - RNA, 19 nt, Artificial Sequence
  Description of Artificial Sequence: Synthetic oligonucleotide
  Antisense strand to SEQ ID NO: 2272524
cauuuaaccaggaauccug

SEQ ID NO: 2272526 - RNA, 19 nt, Artificial Sequence
  Description of Artificial Sequence: Synthetic oligonucleotide
  Sense strand starting at position 2769 of SEQ ID NO: 1884527
augacauguggccaugaca

SEQ ID NO: 2272527 - RNA, 19 nt, Artificial Sequence
  Description of Artificial Sequence: Synthetic oligonucleotide
  Antisense strand to SEQ ID NO: 2272526
ugucauggccacaugucau

SEQ ID NO: 2272528 - RNA, 19 nt, Artificial Sequence
  Description of Artificial Sequence: Synthetic oligonucleotide
  Sense strand starting at position 3352 of SEQ ID NO: 1884527
caugaaagauucuuggucu

SEQ ID NO: 2272529 - RNA, 19 nt, Artificial Sequence
  Description of Artificial Sequence: Synthetic oligonucleotide
  Antisense strand to SEQ ID NO: 2272528
agaccaagaaucuuucaug

SEQ ID NO: 2272530 - RNA, 19 nt, Artificial Sequence
  Description of Artificial Sequence: Synthetic oligonucleotide
  Sense strand starting at position 3355 of SEQ ID NO: 1884527
gaaagauucuuggucucug

SEQ ID NO: 2272531 - RNA, 19 nt, Artificial Sequence
  Description of Artificial Sequence: Synthetic oligonucleotide
  Antisense strand to SEQ ID NO: 2272530
cagagaccaagaaucuuuc

SEQ ID NO: 2272532 - RNA, 19 nt, Artificial Sequence
  Description of Artificial Sequence: Synthetic oligonucleotide
  Sense strand starting at position 3593 of SEQ ID NO: 1884527
ucuccaagauuagugauga

SEQ ID NO: 2272533 - RNA, 19 nt, Artificial Sequence
  Description of Artificial Sequence: Synthetic oligonucleotide
  Antisense strand to SEQ ID NO: 2272532
ucaucacuaaucuuggaga

SEQ ID NO: 2272534 - RNA, 19 nt, Artificial Sequence
  Description of Artificial Sequence: Synthetic oligonucleotide
  Sense strand starting at position 3644 of SEQ ID NO: 1884527
aggcgauaaccauggaaac

SEQ ID NO: 2272535 - RNA, 19 nt, Artificial Sequence
  Description of Artificial Sequence: Synthetic oligonucleotide
  Antisense strand to SEQ ID NO: 2272534
guuuccaugguuaucgccu

SEQ ID NO: 2272536 - RNA, 19 nt, Artificial Sequence
  Description of Artificial Sequence: Synthetic oligonucleotide
  Sense strand starting at position 3645 of SEQ ID NO: 1884527
ggcgauaaccauggaaaca

SEQ ID NO: 2272537 - RNA, 19 nt, Artificial Sequence
  Description of Artificial Sequence: Synthetic oligonucleotide
  Antisense strand to SEQ ID NO: 2272536
uguuuccaugguuaucgcc

SEQ ID NO: 2272538 - RNA, 19 nt, Artificial Sequence
  Description of Artificial Sequence: Synthetic oligonucleotide
  Sense strand starting at position 3731 of SEQ ID NO: 1884527
ggauuaguccaauguacaa

SEQ ID NO: 2272539 - RNA, 19 nt, Artificial Sequence
  Description of Artificial Sequence: Synthetic oligonucleotide
  Antisense strand to SEQ ID NO: 2272538
uuguacauuggacuaaucc

SEQ ID NO: 2272540 - RNA, 19 nt, Artificial Sequence
  Description of Artificial Sequence: Synthetic oligonucleotide
  Sense strand starting at position 3841 of SEQ ID NO: 1884527
agcaaagucauggagccaa

SEQ ID NO: 2272541 - RNA, 19 nt, Artificial Sequence
  Description of Artificial Sequence: Synthetic oligonucleotide
  Antisense strand to SEQ ID NO: 2272540
uuggcuccaugacuuugcu

SEQ ID NO: 2272542 - RNA, 19 nt, Artificial Sequence
  Description of Artificial Sequence: Synthetic oligonucleotide
  Sense strand starting at position 377 of SEQ ID NO: 1884528
guacacuuccagugaaauu

SEQ ID NO: 2272543 - RNA, 19 nt, Artificial Sequence
  Description of Artificial Sequence: Synthetic oligonucleotide
  Antisense strand to SEQ ID NO: 2272542
aauuucacuggaaguguac

SEQ ID NO: 2272544 - RNA, 19 nt, Artificial Sequence
  Description of Artificial Sequence: Synthetic oligonucleotide
  Sense strand starting at position 616 of SEQ ID NO: 1884528
gagaaaugauaguuuauuc

SEQ ID NO: 2272545 - RNA, 19 nt, Artificial Sequence
  Description of Artificial Sequence: Synthetic oligonucleotide
  Antisense strand to SEQ ID NO: 2272544
gaauaaacuaucauuucuc

SEQ ID NO: 2272546 - RNA, 19 nt, Artificial Sequence
  Description of Artificial Sequence: Synthetic oligonucleotide
  Sense strand starting at position 644 of SEQ ID NO: 1884528
ugcuaugacaguugguuaa

SEQ ID NO: 2272547 - RNA, 19 nt, Artificial Sequence
  Description of Artificial Sequence: Synthetic oligonucleotide
  Antisense strand to SEQ ID NO: 2272546
uuaaccaacugucauagca

SEQ ID NO: 2272548 - RNA, 19 nt, Artificial Sequence
  Description of Artificial Sequence: Synthetic oligonucleotide
  Sense strand starting at position 773 of SEQ ID NO: 1884528
guauuaauguagccuaaau

SEQ ID NO: 2272549 - RNA, 19 nt, Artificial Sequence
  Description of Artificial Sequence: Synthetic oligonucleotide
  Antisense strand to SEQ ID NO: 2272548
auuuaggcuacauuaauac

SEQ ID NO: 2272550 - RNA, 19 nt, Artificial Sequence
  Description of Artificial Sequence: Synthetic oligonucleotide
  Sense strand starting at position 775 of SEQ ID NO: 1884528
auuaauguagccuaaauga

SEQ ID NO: 2272551 - RNA, 19 nt, Artificial Sequence
  Description of Artificial Sequence: Synthetic oligonucleotide
  Antisense strand to SEQ ID NO: 2272550
ucauuuaggcuacauuaau

SEQ ID NO: 2272552 - RNA, 19 nt, Artificial Sequence
  Description of Artificial Sequence: Synthetic oligonucleotide
  Sense strand starting at position 1234 of SEQ ID NO: 1884528
guggaauaaacgcagcaua

SEQ ID NO: 2272553 - RNA, 19 nt, Artificial Sequence
  Description of Artificial Sequence: Synthetic oligonucleotide
  Antisense strand to SEQ ID NO: 2272552
uaugcugcguuuauuccac

SEQ ID NO: 2272554 - RNA, 19 nt, Artificial Sequence
  Description of Artificial Sequence: Synthetic oligonucleotide
  Sense strand starting at position 1254 of SEQ ID NO: 1884528
aagugaaacuacucugugu

SEQ ID NO: 2272555 - RNA, 19 nt, Artificial Sequence
  Description of Artificial Sequence: Synthetic oligonucleotide
  Antisense strand to SEQ ID NO: 2272554
acacagaguaguuucacuu

SEQ ID NO: 2272556 - RNA, 19 nt, Artificial Sequence
  Description of Artificial Sequence: Synthetic oligonucleotide
  Sense strand starting at position 1671 of SEQ ID NO: 1884528
gaagguguuauugacagca

SEQ ID NO: 2272557 - RNA, 19 nt, Artificial Sequence
  Description of Artificial Sequence: Synthetic oligonucleotide
  Antisense strand to SEQ ID NO: 2272556
ugcugucaauaacaccuuc

SEQ ID NO: 2272558 - RNA, 19 nt, Artificial Sequence
  Description of Artificial Sequence: Synthetic oligonucleotide
  Sense strand starting at position 1676 of SEQ ID NO: 1884528
uguuauugacagcaccaua

SEQ ID NO: 2272559 - RNA, 19 nt, Artificial Sequence
  Description of Artificial Sequence: Synthetic oligonucleotide
  Antisense strand to SEQ ID NO: 2272558
uauggugcugucaauaaca

SEQ ID NO: 2272560 - RNA, 19 nt, Artificial Sequence
  Description of Artificial Sequence: Synthetic oligonucleotide
  Sense strand starting at position 1836 of SEQ ID NO: 1884528
gggugaauuuacgucuagu

SEQ ID NO: 2272561 - RNA, 19 nt, Artificial Sequence
  Description of Artificial Sequence: Synthetic oligonucleotide
  Antisense strand to SEQ ID NO: 2272560
acuagacguaaauucaccc

SEQ ID NO: 2272562 - RNA, 19 nt, Artificial Sequence
  Description of Artificial Sequence: Synthetic oligonucleotide
  Sense strand starting at position 1846 of SEQ ID NO: 1884528
acgucuaguauuuauguuu

SEQ ID NO: 2272563 - RNA, 19 nt, Artificial Sequence
  Description of Artificial Sequence: Synthetic oligonucleotide
  Antisense strand to SEQ ID NO: 2272562
aaacauaaauacuagacgu

SEQ ID NO: 2272564 - RNA, 19 nt, Artificial Sequence
  Description of Artificial Sequence: Synthetic oligonucleotide
  Sense strand starting at position 1852 of SEQ ID NO: 1884528
aguauuuauguuugagcca

SEQ ID NO: 2272565 - RNA, 19 nt, Artificial Sequence
  Description of Artificial Sequence: Synthetic oligonucleotide
  Antisense strand to SEQ ID NO: 2272564
uggcucaaacauaaauacu

SEQ ID NO: 2272566 - RNA, 19 nt, Artificial Sequence
  Description of Artificial Sequence: Synthetic oligonucleotide
  Sense strand starting at position 1865 of SEQ ID NO: 1884528
gagccaggugguuaucuuu

SEQ ID NO: 2272567 - RNA, 19 nt, Artificial Sequence
  Description of Artificial Sequence: Synthetic oligonucleotide
  Antisense strand to SEQ ID NO: 2272566
aaagauaaccaccuggcuc

SEQ ID NO: 2272568 - RNA, 19 nt, Artificial Sequence
  Description of Artificial Sequence: Synthetic oligonucleotide
  Sense strand starting at position 1868 of SEQ ID NO: 1884528
ccaggugguuaucuuuaag

SEQ ID NO: 2272569 - RNA, 19 nt, Artificial Sequence
  Description of Artificial Sequence: Synthetic oligonucleotide
  Antisense strand to SEQ ID NO: 2272568
cuuaaagauaaccaccugg

SEQ ID NO: 2272570 - RNA, 19 nt, Artificial Sequence
  Description of Artificial Sequence: Synthetic oligonucleotide
  Sense strand starting at position 1871 of SEQ ID NO: 1884528
ggugguuaucuuuaaguua

SEQ ID NO: 2272571 - RNA, 19 nt, Artificial Sequence
  Description of Artificial Sequence: Synthetic oligonucleotide
  Antisense strand to SEQ ID NO: 2272570
uaacuuaaagauaaccacc

SEQ ID NO: 2272572 - RNA, 19 nt, Artificial Sequence
  Description of Artificial Sequence: Synthetic oligonucleotide
  Sense strand starting at position 1874 of SEQ ID NO: 1884528
gguuaucuuuaaguuacau

SEQ ID NO: 2272573 - RNA, 19 nt, Artificial Sequence
  Description of Artificial Sequence: Synthetic oligonucleotide
  Antisense strand to SEQ ID NO: 2272572
auguaacuuaaagauaacc

SEQ ID NO: 2272574 - RNA, 19 nt, Artificial Sequence
  Description of Artificial Sequence: Synthetic oligonucleotide
  Sense strand starting at position 1925 of SEQ ID NO: 1884528
agcucccacugcuuugaaa

SEQ ID NO: 2272575 - RNA, 19 nt, Artificial Sequence
  Description of Artificial Sequence: Synthetic oligonucleotide
  Antisense strand to SEQ ID NO: 2272574
uuucaaagcagugggagcu

SEQ ID NO: 2272576 - RNA, 19 nt, Artificial Sequence
  Description of Artificial Sequence: Synthetic oligonucleotide
  Sense strand starting at position 2120 of SEQ ID NO: 1884528
uguaauuugugaccugguu

SEQ ID NO: 2272577 - RNA, 19 nt, Artificial Sequence
  Description of Artificial Sequence: Synthetic oligonucleotide
  Antisense strand to SEQ ID NO: 2272576
aaccaggucacaaauuaca

SEQ ID NO: 2272578 - RNA, 19 nt, Artificial Sequence
  Description of Artificial Sequence: Synthetic oligonucleotide
  Sense strand starting at position 2128 of SEQ ID NO: 1884528
gugaccugguuguugaaca

SEQ ID NO: 2272579 - RNA, 19 nt, Artificial Sequence
  Description of Artificial Sequence: Synthetic oligonucleotide
  Antisense strand to SEQ ID NO: 2272578
uguucaacaaccaggucac

SEQ ID NO: 2272580 - RNA, 19 nt, Artificial Sequence
  Description of Artificial Sequence: Synthetic oligonucleotide
  Sense strand starting at position 2181 of SEQ ID NO: 1884528
cagcucugaugaguuagua

SEQ ID NO: 2272581 - RNA, 19 nt, Artificial Sequence
  Description of Artificial Sequence: Synthetic oligonucleotide
  Antisense strand to SEQ ID NO: 2272580
uacuaacucaucagagcug

SEQ ID NO: 2272582 - RNA, 19 nt, Artificial Sequence
  Description of Artificial Sequence: Synthetic oligonucleotide
  Sense strand starting at position 2185 of SEQ ID NO: 1884528
ucugaugaguuaguacaaa

SEQ ID NO: 2272583 - RNA, 19 nt, Artificial Sequence
  Description of Artificial Sequence: Synthetic oligonucleotide
  Antisense strand to SEQ ID NO: 2272582
uuuguacuaacucaucaga

SEQ ID NO: 2272584 - RNA, 19 nt, Artificial Sequence
  Description of Artificial Sequence: Synthetic oligonucleotide
  Sense strand starting at position 2247 of SEQ ID NO: 1884528
ucuuuaggguucccucaau

SEQ ID NO: 2272585 - RNA, 19 nt, Artificial Sequence
  Description of Artificial Sequence: Synthetic oligonucleotide
  Antisense strand to SEQ ID NO: 2272584
auugagggaacccuaaaga

SEQ ID NO: 2272586 - RNA, 19 nt, Artificial Sequence
  Description of Artificial Sequence: Synthetic oligonucleotide
  Sense strand starting at position 2286 of SEQ ID NO: 1884528
uugaaagcgauauauagua

SEQ ID NO: 2272587 - RNA, 19 nt, Artificial Sequence
  Description of Artificial Sequence: Synthetic oligonucleotide
  Antisense strand to SEQ ID NO: 2272586
uacuauauaucgcuuucaa

SEQ ID NO: 2272588 - RNA, 19 nt, Artificial Sequence
  Description of Artificial Sequence: Synthetic oligonucleotide
  Sense strand starting at position 2337 of SEQ ID NO: 1884528
cugauacaugcauggaaug

SEQ ID NO: 2272589 - RNA, 19 nt, Artificial Sequence
  Description of Artificial Sequence: Synthetic oligonucleotide
  Antisense strand to SEQ ID NO: 2272588
cauuccaugcauguaucag

SEQ ID NO: 2272590 - RNA, 19 nt, Artificial Sequence
  Description of Artificial Sequence: Synthetic oligonucleotide
  Sense strand starting at position 2592 of SEQ ID NO: 1884528
ugauaaguaucguucuauu

SEQ ID NO: 2272591 - RNA, 19 nt, Artificial Sequence
  Description of Artificial Sequence: Synthetic oligonucleotide
  Antisense strand to SEQ ID NO: 2272590
aauagaacgauacuuauca

SEQ ID NO: 2272592 - RNA, 19 nt, Artificial Sequence
  Description of Artificial Sequence: Synthetic oligonucleotide
  Sense strand starting at position 2628 of SEQ ID NO: 1884528
gugcuuuaccacuaaguuu

SEQ ID NO: 2272593 - RNA, 19 nt, Artificial Sequence
  Description of Artificial Sequence: Synthetic oligonucleotide
  Antisense strand to SEQ ID NO: 2272592
aaacuuagugguaaagcac

SEQ ID NO: 2272594 - RNA, 19 nt, Artificial Sequence
  Description of Artificial Sequence: Synthetic oligonucleotide
  Sense strand starting at position 2738 of SEQ ID NO: 1884528
ccagucuagaggugauaaa

SEQ ID NO: 2272595 - RNA, 19 nt, Artificial Sequence
  Description of Artificial Sequence: Synthetic oligonucleotide
  Antisense strand to SEQ ID NO: 2272594
uuuaucaccucuagacugg

SEQ ID NO: 2272596 - RNA, 19 nt, Artificial Sequence
  Description of Artificial Sequence: Synthetic oligonucleotide
  Sense strand starting at position 2828 of SEQ ID NO: 1884528
augguauucuugcuugaca

SEQ ID NO: 2272597 - RNA, 19 nt, Artificial Sequence
  Description of Artificial Sequence: Synthetic oligonucleotide
  Antisense strand to SEQ ID NO: 2272596
ugucaagcaagaauaccau

SEQ ID NO: 2272598 - RNA, 19 nt, Artificial Sequence
  Description of Artificial Sequence: Synthetic oligonucleotide
  Sense strand starting at position 3014 of SEQ ID NO: 1884528
ugauaaugugccugggaga

SEQ ID NO: 2272599 - RNA, 19 nt, Artificial Sequence
  Description of Artificial Sequence: Synthetic oligonucleotide
  Antisense strand to SEQ ID NO: 2272598
ucucccaggcacauuauca

SEQ ID NO: 2272600 - RNA, 19 nt, Artificial Sequence
  Description of Artificial Sequence: Synthetic oligonucleotide
  Sense strand starting at position 3015 of SEQ ID NO: 1884528
gauaaugugccugggagaa

SEQ ID NO: 2272601 - RNA, 19 nt, Artificial Sequence
  Description of Artificial Sequence: Synthetic oligonucleotide
  Antisense strand to SEQ ID NO: 2272600
uucucccaggcacauuauc

SEQ ID NO: 2272602 - RNA, 19 nt, Artificial Sequence
  Description of Artificial Sequence: Synthetic oligonucleotide
  Sense strand starting at position 3166 of SEQ ID NO: 1884528
auaggcuuucuaugacauc

SEQ ID NO: 2272603 - RNA, 19 nt, Artificial Sequence
  Description of Artificial Sequence: Synthetic oligonucleotide
  Antisense strand to SEQ ID NO: 2272602
gaugucauagaaagccuau

SEQ ID NO: 2272604 - RNA, 19 nt, Artificial Sequence
  Description of Artificial Sequence: Synthetic oligonucleotide
  Sense strand starting at position 3572 of SEQ ID NO: 1884528
ucauaaaccuuuguuggaa

SEQ ID NO: 2272605 - RNA, 19 nt, Artificial Sequence
  Description of Artificial Sequence: Synthetic oligonucleotide
  Antisense strand to SEQ ID NO: 2272604
uuccaacaaagguuuauga

SEQ ID NO: 2272606 - RNA, 19 nt, Artificial Sequence
  Description of Artificial Sequence: Synthetic oligonucleotide
  Sense strand starting at position 3588 of SEQ ID NO: 1884528
gaaucuguugcugaagaac

SEQ ID NO: 2272607 - RNA, 19 nt, Artificial Sequence
  Description of Artificial Sequence: Synthetic oligonucleotide
  Antisense strand to SEQ ID NO: 2272606
guucuucagcaacagauuc

SEQ ID NO: 2272608 - RNA, 19 nt, Artificial Sequence
  Description of Artificial Sequence: Synthetic oligonucleotide
  Sense strand starting at position 3591 of SEQ ID NO: 1884528
ucuguugcugaagaacuau

SEQ ID NO: 2272609 - RNA, 19 nt, Artificial Sequence
  Description of Artificial Sequence: Synthetic oligonucleotide
  Antisense strand to SEQ ID NO: 2272608
auaguucuucagcaacaga

SEQ ID NO: 2272610 - RNA, 19 nt, Artificial Sequence
  Description of Artificial Sequence: Synthetic oligonucleotide
  Sense strand starting at position 3756 of SEQ ID NO: 1884528
ucuauaguauugcuugauu

SEQ ID NO: 2272611 - RNA, 19 nt, Artificial Sequence
  Description of Artificial Sequence: Synthetic oligonucleotide
  Antisense strand to SEQ ID NO: 2272610
aaucaagcaauacuauaga

SEQ ID NO: 2272612 - RNA, 19 nt, Artificial Sequence
  Description of Artificial Sequence: Synthetic oligonucleotide
  Sense strand starting at position 3759 of SEQ ID NO: 1884528
auaguauugcuugauuaag

SEQ ID NO: 2272613 - RNA, 19 nt, Artificial Sequence
  Description of Artificial Sequence: Synthetic oligonucleotide
  Antisense strand to SEQ ID NO: 2272612
cuuaaucaagcaauacuau

SEQ ID NO: 2272614 - RNA, 19 nt, Artificial Sequence
  Description of Artificial Sequence: Synthetic oligonucleotide
  Sense strand starting at position 3761 of SEQ ID NO: 1884528
aguauugcuugauuaaggu

SEQ ID NO: 2272615 - RNA, 19 nt, Artificial Sequence
  Description of Artificial Sequence: Synthetic oligonucleotide
  Antisense strand to SEQ ID NO: 2272614
accuuaaucaagcaauacu

SEQ ID NO: 2272616 - RNA, 19 nt, Artificial Sequence
  Description of Artificial Sequence: Synthetic oligonucleotide
  Sense strand starting at position 3797 of SEQ ID NO: 1884528
gggugaguacagcagugua

SEQ ID NO: 2272617 - RNA, 19 nt, Artificial Sequence
  Description of Artificial Sequence: Synthetic oligonucleotide
  Antisense strand to SEQ ID NO: 2272616
uacacugcuguacucaccc

SEQ ID NO: 2272618 - RNA, 19 nt, Artificial Sequence
  Description of Artificial Sequence: Synthetic oligonucleotide
  Sense strand starting at position 3830 of SEQ ID NO: 1884528
guucuuuggcuguaaucag

SEQ ID NO: 2272619 - RNA, 19 nt, Artificial Sequence
  Description of Artificial Sequence: Synthetic oligonucleotide
  Antisense strand to SEQ ID NO: 2272618
cugauuacagccaaagaac

SEQ ID NO: 2272620 - RNA, 19 nt, Artificial Sequence
  Description of Artificial Sequence: Synthetic oligonucleotide
  Sense strand starting at position 3899 of SEQ ID NO: 1884528
ggaguauguggugaggcuu

SEQ ID NO: 2272621 - RNA, 19 nt, Artificial Sequence
  Description of Artificial Sequence: Synthetic oligonucleotide
  Antisense strand to SEQ ID NO: 2272620
aagccucaccacauacucc

SEQ ID NO: 2272622 - RNA, 19 nt, Artificial Sequence
  Description of Artificial Sequence: Synthetic oligonucleotide
  Sense strand starting at position 22 of SEQ ID NO: 1884529
aucacucugcgagauggaa

SEQ ID NO: 2272623 - RNA, 19 nt, Artificial Sequence
  Description of Artificial Sequence: Synthetic oligonucleotide
  Antisense strand to SEQ ID NO: 2272622
uuccaucucgcagagugau

SEQ ID NO: 2272624 - RNA, 19 nt, Artificial Sequence
  Description of Artificial Sequence: Synthetic oligonucleotide
  Sense strand starting at position 55 of SEQ ID NO: 1884529
gugagugagucaccagaga

SEQ ID NO: 2272625 - RNA, 19 nt, Artificial Sequence
  Description of Artificial Sequence: Synthetic oligonucleotide
  Antisense strand to SEQ ID NO: 2272624
ucucuggugacucacucac

SEQ ID NO: 2272626 - RNA, 19 nt, Artificial Sequence
  Description of Artificial Sequence: Synthetic oligonucleotide
  Sense strand starting at position 132 of SEQ ID NO: 1884529
ugagaucucuuguccauag

SEQ ID NO: 2272627 - RNA, 19 nt, Artificial Sequence
  Description of Artificial Sequence: Synthetic oligonucleotide
  Antisense strand to SEQ ID NO: 2272626
cuauggacaagagaucuca

SEQ ID NO: 2272628 - RNA, 19 nt, Artificial Sequence
  Description of Artificial Sequence: Synthetic oligonucleotide
  Sense strand starting at position 315 of SEQ ID NO: 1884529
cuggcuauucuuggaaaca

SEQ ID NO: 2272629 - RNA, 19 nt, Artificial Sequence
  Description of Artificial Sequence: Synthetic oligonucleotide
  Antisense strand to SEQ ID NO: 2272628
uguuuccaagaauagccag

SEQ ID NO: 2272630 - RNA, 19 nt, Artificial Sequence
  Description of Artificial Sequence: Synthetic oligonucleotide
  Sense strand starting at position 451 of SEQ ID NO: 1884529
ucuugacagcaguauuaau

SEQ ID NO: 2272631 - RNA, 19 nt, Artificial Sequence
  Description of Artificial Sequence: Synthetic oligonucleotide
  Antisense strand to SEQ ID NO: 2272630
auuaauacugcugucaaga

SEQ ID NO: 2272632 - RNA, 19 nt, Artificial Sequence
  Description of Artificial Sequence: Synthetic oligonucleotide
  Sense strand starting at position 1160 of SEQ ID NO: 1884529
agaauagccuucccugaac

SEQ ID NO: 2272633 - RNA, 19 nt, Artificial Sequence
  Description of Artificial Sequence: Synthetic oligonucleotide
  Antisense strand to SEQ ID NO: 2272632
guucagggaaggcuauucu

SEQ ID NO: 2272634 - RNA, 19 nt, Artificial Sequence
  Description of Artificial Sequence: Synthetic oligonucleotide
  Sense strand starting at position 1180 of SEQ ID NO: 1884529
cucugagcucaucaagacu

SEQ ID NO: 2272635 - RNA, 19 nt, Artificial Sequence
  Description of Artificial Sequence: Synthetic oligonucleotide
  Antisense strand to SEQ ID NO: 2272634
agucuugaugagcucagag

SEQ ID NO: 2272636 - RNA, 19 nt, Artificial Sequence
  Description of Artificial Sequence: Synthetic oligonucleotide
  Sense strand starting at position 1213 of SEQ ID NO: 1884529
ucccauagagucugauaug

SEQ ID NO: 2272637 - RNA, 19 nt, Artificial Sequence
  Description of Artificial Sequence: Synthetic oligonucleotide
  Antisense strand to SEQ ID NO: 2272636
cauaucagacucuauggga

SEQ ID NO: 2272638 - RNA, 19 nt, Artificial Sequence
  Description of Artificial Sequence: Synthetic oligonucleotide
  Sense strand starting at position 1298 of SEQ ID NO: 1884529
cugagaugcccugggaaau

SEQ ID NO: 2272639 - RNA, 19 nt, Artificial Sequence
  Description of Artificial Sequence: Synthetic oligonucleotide
  Antisense strand to SEQ ID NO: 2272638
auuucccagggcaucucag

SEQ ID NO: 2272640 - RNA, 19 nt, Artificial Sequence
  Description of Artificial Sequence: Synthetic oligonucleotide
  Sense strand starting at position 1299 of SEQ ID NO: 1884529
ugagaugcccugggaaauu

SEQ ID NO: 2272641 - RNA, 19 nt, Artificial Sequence
  Description of Artificial Sequence: Synthetic oligonucleotide
  Antisense strand to SEQ ID NO: 2272640
aauuucccagggcaucuca

SEQ ID NO: 2272642 - RNA, 19 nt, Artificial Sequence
  Description of Artificial Sequence: Synthetic oligonucleotide
  Sense strand starting at position 1311 of SEQ ID NO: 1884529
ggaaauugggcaggugaga

SEQ ID NO: 2272643 - RNA, 19 nt, Artificial Sequence
  Description of Artificial Sequence: Synthetic oligonucleotide
  Antisense strand to SEQ ID NO: 2272642
ucucaccugcccaauuucc

SEQ ID NO: 2272644 - RNA, 19 nt, Artificial Sequence
  Description of Artificial Sequence: Synthetic oligonucleotide
  Sense strand starting at position 1533 of SEQ ID NO: 1884529
cagagugacggccauaaca

SEQ ID NO: 2272645 - RNA, 19 nt, Artificial Sequence
  Description of Artificial Sequence: Synthetic oligonucleotide
  Antisense strand to SEQ ID NO: 2272644
uguuauggccgucacucug

SEQ ID NO: 2272646 - RNA, 19 nt, Artificial Sequence
  Description of Artificial Sequence: Synthetic oligonucleotide
  Sense strand starting at position 1588 of SEQ ID NO: 1884529
aggacuguuagccaguuaa

SEQ ID NO: 2272647 - RNA, 19 nt, Artificial Sequence
  Description of Artificial Sequence: Synthetic oligonucleotide
  Antisense strand to SEQ ID NO: 2272646
uuaacuggcuaacaguccu

SEQ ID NO: 2272648 - RNA, 19 nt, Artificial Sequence
  Description of Artificial Sequence: Synthetic oligonucleotide
  Sense strand starting at position 1622 of SEQ ID NO: 1884529
uggaguaacaguugaagag

SEQ ID NO: 2272649 - RNA, 19 nt, Artificial Sequence
  Description of Artificial Sequence: Synthetic oligonucleotide
  Antisense strand to SEQ ID NO: 2272648
cucuucaacuguuacucca

SEQ ID NO: 2272650 - RNA, 19 nt, Artificial Sequence
  Description of Artificial Sequence: Synthetic oligonucleotide
  Sense strand starting at position 1689 of SEQ ID NO: 1884529
ccggaugggucuuccaaga

SEQ ID NO: 2272651 - RNA, 19 nt, Artificial Sequence
  Description of Artificial Sequence: Synthetic oligonucleotide
  Antisense strand to SEQ ID NO: 2272650
ucuuggaagacccauccgg

SEQ ID NO: 2272652 - RNA, 19 nt, Artificial Sequence
  Description of Artificial Sequence: Synthetic oligonucleotide
  Sense strand starting at position 1822 of SEQ ID NO: 1884529
agaacugauugcucccuga

SEQ ID NO: 2272653 - RNA, 19 nt, Artificial Sequence
  Description of Artificial Sequence: Synthetic oligonucleotide
  Antisense strand to SEQ ID NO: 2272652
ucagggagcaaucaguucu

SEQ ID NO: 2272654 - RNA, 19 nt, Artificial Sequence
  Description of Artificial Sequence: Synthetic oligonucleotide
  Sense strand starting at position 2013 of SEQ ID NO: 1884529
augggauccuuagucuauu

SEQ ID NO: 2272655 - RNA, 19 nt, Artificial Sequence
  Description of Artificial Sequence: Synthetic oligonucleotide
  Antisense strand to SEQ ID NO: 2272654
aauagacuaaggaucccau

SEQ ID NO: 2272656 - RNA, 19 nt, Artificial Sequence
  Description of Artificial Sequence: Synthetic oligonucleotide
  Sense strand starting at position 2016 of SEQ ID NO: 1884529
ggauccuuagucuauuguu

SEQ ID NO: 2272657 - RNA, 19 nt, Artificial Sequence
  Description of Artificial Sequence: Synthetic oligonucleotide
  Antisense strand to SEQ ID NO: 2272656
aacaauagacuaaggaucc

SEQ ID NO: 2272658 - RNA, 19 nt, Artificial Sequence
  Description of Artificial Sequence: Synthetic oligonucleotide
  Sense strand starting at position 2106 of SEQ ID NO: 1884529
augaaaucccggcaacuaa

SEQ ID NO: 2272659 - RNA, 19 nt, Artificial Sequence
  Description of Artificial Sequence: Synthetic oligonucleotide
  Antisense strand to SEQ ID NO: 2272658
uuaguugccgggauuucau

SEQ ID NO: 2272660 - RNA, 19 nt, Artificial Sequence
  Description of Artificial Sequence: Synthetic oligonucleotide
  Sense strand starting at position 2285 of SEQ ID NO: 1884529
cucuuuaggaguugaagaa

SEQ ID NO: 2272661 - RNA, 19 nt, Artificial Sequence
  Description of Artificial Sequence: Synthetic oligonucleotide
  Antisense strand to SEQ ID NO: 2272660
uucuucaacuccuaaagag

SEQ ID NO: 2272662 - RNA, 19 nt, Artificial Sequence
  Description of Artificial Sequence: Synthetic oligonucleotide
  Sense strand starting at position 2316 of SEQ ID NO: 1884529
aggcuucucuauuugcaca

SEQ ID NO: 2272663 - RNA, 19 nt, Artificial Sequence
  Description of Artificial Sequence: Synthetic oligonucleotide
  Antisense strand to SEQ ID NO: 2272662
ugugcaaauagagaagccu

SEQ ID NO: 2272664 - RNA, 19 nt, Artificial Sequence
  Description of Artificial Sequence: Synthetic oligonucleotide
  Sense strand starting at position 2471 of SEQ ID NO: 1884529
gucugagaccaacaguguu

SEQ ID NO: 2272665 - RNA, 19 nt, Artificial Sequence
  Description of Artificial Sequence: Synthetic oligonucleotide
  Antisense strand to SEQ ID NO: 2272664
aacacuguuggucucagac

SEQ ID NO: 2272666 - RNA, 19 nt, Artificial Sequence
  Description of Artificial Sequence: Synthetic oligonucleotide
  Sense strand starting at position 2502 of SEQ ID NO: 1884529
augguauccuuagcagaga

SEQ ID NO: 2272667 - RNA, 19 nt, Artificial Sequence
  Description of Artificial Sequence: Synthetic oligonucleotide
  Antisense strand to SEQ ID NO: 2272666
ucucugcuaaggauaccau

SEQ ID NO: 2272668 - RNA, 19 nt, Artificial Sequence
  Description of Artificial Sequence: Synthetic oligonucleotide
  Sense strand starting at position 2505 of SEQ ID NO: 1884529
guauccuuagcagagaaau

SEQ ID NO: 2272669 - RNA, 19 nt, Artificial Sequence
  Description of Artificial Sequence: Synthetic oligonucleotide
  Antisense strand to SEQ ID NO: 2272668
auuucucugcuaaggauac

SEQ ID NO: 2272670 - RNA, 19 nt, Artificial Sequence
  Description of Artificial Sequence: Synthetic oligonucleotide
  Sense strand starting at position 2554 of SEQ ID NO: 1884529
ucucuuuaaguagaagagu

SEQ ID NO: 2272671 - RNA, 19 nt, Artificial Sequence
  Description of Artificial Sequence: Synthetic oligonucleotide
  Antisense strand to SEQ ID NO: 2272670
acucuucuacuuaaagaga

SEQ ID NO: 2272672 - RNA, 19 nt, Artificial Sequence
  Description of Artificial Sequence: Synthetic oligonucleotide
  Sense strand starting at position 2661 of SEQ ID NO: 1884529
agaugcagaacccguaaau

SEQ ID NO: 2272673 - RNA, 19 nt, Artificial Sequence
  Description of Artificial Sequence: Synthetic oligonucleotide
  Antisense strand to SEQ ID NO: 2272672
auuuacggguucugcaucu

SEQ ID NO: 2272674 - RNA, 19 nt, Artificial Sequence
  Description of Artificial Sequence: Synthetic oligonucleotide
  Sense strand starting at position 2904 of SEQ ID NO: 1884529
gugggacuucuggagguca

SEQ ID NO: 2272675 - RNA, 19 nt, Artificial Sequence
  Description of Artificial Sequence: Synthetic oligonucleotide
  Antisense strand to SEQ ID NO: 2272674
ugaccuccagaagucccac

SEQ ID NO: 2272676 - RNA, 19 nt, Artificial Sequence
  Description of Artificial Sequence: Synthetic oligonucleotide
  Sense strand starting at position 2920 of SEQ ID NO: 1884529
ucaggcaaucaauggagau

SEQ ID NO: 2272677 - RNA, 19 nt, Artificial Sequence
  Description of Artificial Sequence: Synthetic oligonucleotide
  Antisense strand to SEQ ID NO: 2272676
aucuccauugauugccuga

SEQ ID NO: 2272678 - RNA, 19 nt, Artificial Sequence
  Description of Artificial Sequence: Synthetic oligonucleotide
  Sense strand starting at position 2935 of SEQ ID NO: 1884529
agauuuagcucaguuccuu

SEQ ID NO: 2272679 - RNA, 19 nt, Artificial Sequence
  Description of Artificial Sequence: Synthetic oligonucleotide
  Antisense strand to SEQ ID NO: 2272678
aaggaacugagcuaaaucu

SEQ ID NO: 2272680 - RNA, 19 nt, Artificial Sequence
  Description of Artificial Sequence: Synthetic oligonucleotide
  Sense strand starting at position 3085 of SEQ ID NO: 1884529
agcuguuaagaauauguau

SEQ ID NO: 2272681 - RNA, 19 nt, Artificial Sequence
  Description of Artificial Sequence: Synthetic oligonucleotide
  Antisense strand to SEQ ID NO: 2272680
auacauauucuuaacagcu

SEQ ID NO: 2272682 - RNA, 19 nt, Artificial Sequence
  Description of Artificial Sequence: Synthetic oligonucleotide
  Sense strand starting at position 3138 of SEQ ID NO: 1884529
aggcuuugauucuccagga

SEQ ID NO: 2272683 - RNA, 19 nt, Artificial Sequence
  Description of Artificial Sequence: Synthetic oligonucleotide
  Antisense strand to SEQ ID NO: 2272682
uccuggagaaucaaagccu

SEQ ID NO: 2272684 - RNA, 19 nt, Artificial Sequence
  Description of Artificial Sequence: Synthetic oligonucleotide
  Sense strand starting at position 3142 of SEQ ID NO: 1884529
uuugauucuccaggagaau

SEQ ID NO: 2272685 - RNA, 19 nt, Artificial Sequence
  Description of Artificial Sequence: Synthetic oligonucleotide
  Antisense strand to SEQ ID NO: 2272684
auucuccuggagaaucaaa

SEQ ID NO: 2272686 - RNA, 19 nt, Artificial Sequence
  Description of Artificial Sequence: Synthetic oligonucleotide
  Sense strand starting at position 3196 of SEQ ID NO: 1884529
ggccuaaaccuaugagaua

SEQ ID NO: 2272687 - RNA, 19 nt, Artificial Sequence
  Description of Artificial Sequence: Synthetic oligonucleotide
  Antisense strand to SEQ ID NO: 2272686
uaucucauagguuuaggcc

SEQ ID NO: 2272688 - RNA, 19 nt, Artificial Sequence
  Description of Artificial Sequence: Synthetic oligonucleotide
  Sense strand starting at position 3234 of SEQ ID NO: 1884529
gaugguaacaugugaguga

SEQ ID NO: 2272689 - RNA, 19 nt, Artificial Sequence
  Description of Artificial Sequence: Synthetic oligonucleotide
  Antisense strand to SEQ ID NO: 2272688
ucacucacauguuaccauc

SEQ ID NO: 2272690 - RNA, 19 nt, Artificial Sequence
  Description of Artificial Sequence: Synthetic oligonucleotide
  Sense strand starting at position 3262 of SEQ ID NO: 1884529
aguagagaagauuguccaa

SEQ ID NO: 2272691 - RNA, 19 nt, Artificial Sequence
  Description of Artificial Sequence: Synthetic oligonucleotide
  Antisense strand to SEQ ID NO: 2272690
uuggacaaucuucucuacu

SEQ ID NO: 2272692 - RNA, 19 nt, Artificial Sequence
  Description of Artificial Sequence: Synthetic oligonucleotide
  Sense strand starting at position 3274 of SEQ ID NO: 1884529
uguccaaagccuuaugauu

SEQ ID NO: 2272693 - RNA, 19 nt, Artificial Sequence
  Description of Artificial Sequence: Synthetic oligonucleotide
  Antisense strand to SEQ ID NO: 2272692
aaucauaaggcuuuggaca

SEQ ID NO: 2272694 - RNA, 19 nt, Artificial Sequence
  Description of Artificial Sequence: Synthetic oligonucleotide
  Sense strand starting at position 3297 of SEQ ID NO: 1884529
ugcccugugagacauuaag

SEQ ID NO: 2272695 - RNA, 19 nt, Artificial Sequence
  Description of Artificial Sequence: Synthetic oligonucleotide
  Antisense strand to SEQ ID NO: 2272694
cuuaaugucucacagggca

SEQ ID NO: 2272696 - RNA, 19 nt, Artificial Sequence
  Description of Artificial Sequence: Synthetic oligonucleotide
  Sense strand starting at position 3752 of SEQ ID NO: 1884529
acauguaauuguuugagaa

SEQ ID NO: 2272697 - RNA, 19 nt, Artificial Sequence
  Description of Artificial Sequence: Synthetic oligonucleotide
  Antisense strand to SEQ ID NO: 2272696
uucucaaacaauuacaugu

SEQ ID NO: 2272698 - RNA, 19 nt, Artificial Sequence
  Description of Artificial Sequence: Synthetic oligonucleotide
  Sense strand starting at position 3753 of SEQ ID NO: 1884529
cauguaauuguuugagaaa

SEQ ID NO: 2272699 - RNA, 19 nt, Artificial Sequence
  Description of Artificial Sequence: Synthetic oligonucleotide
  Antisense strand to SEQ ID NO: 2272698
uuucucaaacaauuacaug

SEQ ID NO: 2272700 - RNA, 19 nt, Artificial Sequence
  Description of Artificial Sequence: Synthetic oligonucleotide
  Sense strand starting at position 3799 of SEQ ID NO: 1884529
acuuuaacaguguacauga

SEQ ID NO: 2272701 - RNA, 19 nt, Artificial Sequence
  Description of Artificial Sequence: Synthetic oligonucleotide
  Antisense strand to SEQ ID NO: 2272700
ucauguacacuguuaaagu

SEQ ID NO: 2272702 - RNA, 19 nt, Artificial Sequence
  Description of Artificial Sequence: Synthetic oligonucleotide
  Sense strand starting at position 261 of SEQ ID NO: 1884530
uucuuaauccacugaugga

SEQ ID NO: 2272703 - RNA, 19 nt, Artificial Sequence
  Description of Artificial Sequence: Synthetic oligonucleotide
  Antisense strand to SEQ ID NO: 2272702
uccaucaguggauuaagaa

SEQ ID NO: 2272704 - RNA, 19 nt, Artificial Sequence
  Description of Artificial Sequence: Synthetic oligonucleotide
  Sense strand starting at position 297 of SEQ ID NO: 1884530
caucuuggccacugugaau

SEQ ID NO: 2272705 - RNA, 19 nt, Artificial Sequence
  Description of Artificial Sequence: Synthetic oligonucleotide
  Antisense strand to SEQ ID NO: 2272704
auucacaguggccaagaug

SEQ ID NO: 2272706 - RNA, 19 nt, Artificial Sequence
  Description of Artificial Sequence: Synthetic oligonucleotide
  Sense strand starting at position 339 of SEQ ID NO: 1884530
aagguaugacuuugauaca

SEQ ID NO: 2272707 - RNA, 19 nt, Artificial Sequence
  Description of Artificial Sequence: Synthetic oligonucleotide
  Antisense strand to SEQ ID NO: 2272706
uguaucaaagucauaccuu

SEQ ID NO: 2272708 - RNA, 19 nt, Artificial Sequence
  Description of Artificial Sequence: Synthetic oligonucleotide
  Sense strand starting at position 749 of SEQ ID NO: 1884530
aguuguuugaguuccgugu

SEQ ID NO: 2272709 - RNA, 19 nt, Artificial Sequence
  Description of Artificial Sequence: Synthetic oligonucleotide
  Antisense strand to SEQ ID NO: 2272708
acacggaacucaaacaacu

SEQ ID NO: 2272710 - RNA, 19 nt, Artificial Sequence
  Description of Artificial Sequence: Synthetic oligonucleotide
  Sense strand starting at position 750 of SEQ ID NO: 1884530
guuguuugaguuccgugua

SEQ ID NO: 2272711 - RNA, 19 nt, Artificial Sequence
  Description of Artificial Sequence: Synthetic oligonucleotide
  Antisense strand to SEQ ID NO: 2272710
uacacggaacucaaacaac

SEQ ID NO: 2272712 - RNA, 19 nt, Artificial Sequence
  Description of Artificial Sequence: Synthetic oligonucleotide
  Sense strand starting at position 764 of SEQ ID NO: 1884530
guguauauuccguauauua

SEQ ID NO: 2272713 - RNA, 19 nt, Artificial Sequence
  Description of Artificial Sequence: Synthetic oligonucleotide
  Antisense strand to SEQ ID NO: 2272712
uaauauacggaauauacac

SEQ ID NO: 2272714 - RNA, 19 nt, Artificial Sequence
  Description of Artificial Sequence: Synthetic oligonucleotide
  Sense strand starting at position 766 of SEQ ID NO: 1884530
guauauuccguauauuagu

SEQ ID NO: 2272715 - RNA, 19 nt, Artificial Sequence
  Description of Artificial Sequence: Synthetic oligonucleotide
  Antisense strand to SEQ ID NO: 2272714
acuaauauacggaauauac

SEQ ID NO: 2272716 - RNA, 19 nt, Artificial Sequence
  Description of Artificial Sequence: Synthetic oligonucleotide
  Sense strand starting at position 784 of SEQ ID NO: 1884530
ucccuuguugcaugaauaa

SEQ ID NO: 2272717 - RNA, 19 nt, Artificial Sequence
  Description of Artificial Sequence: Synthetic oligonucleotide
  Antisense strand to SEQ ID NO: 2272716
uuauucaugcaacaaggga

SEQ ID NO: 2272718 - RNA, 19 nt, Artificial Sequence
  Description of Artificial Sequence: Synthetic oligonucleotide
  Sense strand starting at position 953 of SEQ ID NO: 1884530
gaccaauguccagaagcau

SEQ ID NO: 2272719 - RNA, 19 nt, Artificial Sequence
  Description of Artificial Sequence: Synthetic oligonucleotide
  Antisense strand to SEQ ID NO: 2272718
augcuucuggacauugguc

SEQ ID NO: 2272720 - RNA, 19 nt, Artificial Sequence
  Description of Artificial Sequence: Synthetic oligonucleotide
  Sense strand starting at position 989 of SEQ ID NO: 1884530
guacuaguucuauagugug

SEQ ID NO: 2272721 - RNA, 19 nt, Artificial Sequence
  Description of Artificial Sequence: Synthetic oligonucleotide
  Antisense strand to SEQ ID NO: 2272720
cacacuauagaacuaguac

SEQ ID NO: 2272722 - RNA, 19 nt, Artificial Sequence
  Description of Artificial Sequence: Synthetic oligonucleotide
  Sense strand starting at position 1286 of SEQ ID NO: 1884530
ccauaauauuggguuuauu

SEQ ID NO: 2272723 - RNA, 19 nt, Artificial Sequence
  Description of Artificial Sequence: Synthetic oligonucleotide
  Antisense strand to SEQ ID NO: 2272722
aauaaacccaauauuaugg

SEQ ID NO: 2272724 - RNA, 19 nt, Artificial Sequence
  Description of Artificial Sequence: Synthetic oligonucleotide
  Sense strand starting at position 1454 of SEQ ID NO: 1884530
guaaauugguuggcuauaa

SEQ ID NO: 2272725 - RNA, 19 nt, Artificial Sequence
  Description of Artificial Sequence: Synthetic oligonucleotide
  Antisense strand to SEQ ID NO: 2272724
uuauagccaaccaauuuac

SEQ ID NO: 2272726 - RNA, 19 nt, Artificial Sequence
  Description of Artificial Sequence: Synthetic oligonucleotide
  Sense strand starting at position 1464 of SEQ ID NO: 1884530
uggcuauaaguacauuauu

SEQ ID NO: 2272727 - RNA, 19 nt, Artificial Sequence
  Description of Artificial Sequence: Synthetic oligonucleotide
  Antisense strand to SEQ ID NO: 2272726
aauaauguacuuauagcca

SEQ ID NO: 2272728 - RNA, 19 nt, Artificial Sequence
  Description of Artificial Sequence: Synthetic oligonucleotide
  Sense strand starting at position 1514 of SEQ ID NO: 1884530
ugugucuguauuugugaca

SEQ ID NO: 2272729 - RNA, 19 nt, Artificial Sequence
  Description of Artificial Sequence: Synthetic oligonucleotide
  Antisense strand to SEQ ID NO: 2272728
ugucacaaauacagacaca

SEQ ID NO: 2272730 - RNA, 19 nt, Artificial Sequence
  Description of Artificial Sequence: Synthetic oligonucleotide
  Sense strand starting at position 1515 of SEQ ID NO: 1884530
gugucuguauuugugacaa

SEQ ID NO: 2272731 - RNA, 19 nt, Artificial Sequence
  Description of Artificial Sequence: Synthetic oligonucleotide
  Antisense strand to SEQ ID NO: 2272730
uugucacaaauacagacac

SEQ ID NO: 2272732 - RNA, 19 nt, Artificial Sequence
  Description of Artificial Sequence: Synthetic oligonucleotide
  Sense strand starting at position 1552 of SEQ ID NO: 1884530
acuaaagucagguagugua

SEQ ID NO: 2272733 - RNA, 19 nt, Artificial Sequence
  Description of Artificial Sequence: Synthetic oligonucleotide
  Antisense strand to SEQ ID NO: 2272732
uacacuaccugacuuuagu

SEQ ID NO: 2272734 - RNA, 19 nt, Artificial Sequence
  Description of Artificial Sequence: Synthetic oligonucleotide
  Sense strand starting at position 1689 of SEQ ID NO: 1884530
auagcaauugcacauggau

SEQ ID NO: 2272735 - RNA, 19 nt, Artificial Sequence
  Description of Artificial Sequence: Synthetic oligonucleotide
  Antisense strand to SEQ ID NO: 2272734
auccaugugcaauugcuau

SEQ ID NO: 2272736 - RNA, 19 nt, Artificial Sequence
  Description of Artificial Sequence: Synthetic oligonucleotide
  Sense strand starting at position 2006 of SEQ ID NO: 1884530
ccgauuguucggccucagu

SEQ ID NO: 2272737 - RNA, 19 nt, Artificial Sequence
  Description of Artificial Sequence: Synthetic oligonucleotide
  Antisense strand to SEQ ID NO: 2272736
acugaggccgaacaaucgg

SEQ ID NO: 2272738 - RNA, 19 nt, Artificial Sequence
  Description of Artificial Sequence: Synthetic oligonucleotide
  Sense strand starting at position 2200 of SEQ ID NO: 1884530
aucucagucucaguuugau

SEQ ID NO: 2272739 - RNA, 19 nt, Artificial Sequence
  Description of Artificial Sequence: Synthetic oligonucleotide
  Antisense strand to SEQ ID NO: 2272738
aucaaacugagacugagau

SEQ ID NO: 2272740 - RNA, 19 nt, Artificial Sequence
  Description of Artificial Sequence: Synthetic oligonucleotide
  Sense strand starting at position 2209 of SEQ ID NO: 1884530
ucaguuugaugaguuauua

SEQ ID NO: 2272741 - RNA, 19 nt, Artificial Sequence
  Description of Artificial Sequence: Synthetic oligonucleotide
  Antisense strand to SEQ ID NO: 2272740
uaauaacucaucaaacuga

SEQ ID NO: 2272742 - RNA, 19 nt, Artificial Sequence
  Description of Artificial Sequence: Synthetic oligonucleotide
  Sense strand starting at position 2219 of SEQ ID NO: 1884530
gaguuauuauuagugucua

SEQ ID NO: 2272743 - RNA, 19 nt, Artificial Sequence
  Description of Artificial Sequence: Synthetic oligonucleotide
  Antisense strand to SEQ ID NO: 2272742
uagacacuaauaauaacuc

SEQ ID NO: 2272744 - RNA, 19 nt, Artificial Sequence
  Description of Artificial Sequence: Synthetic oligonucleotide
  Sense strand starting at position 2258 of SEQ ID NO: 1884530
cucuauaguguauaaacua

SEQ ID NO: 2272745 - RNA, 19 nt, Artificial Sequence
  Description of Artificial Sequence: Synthetic oligonucleotide
  Antisense strand to SEQ ID NO: 2272744
uaguuuauacacuauagag

SEQ ID NO: 2272746 - RNA, 19 nt, Artificial Sequence
  Description of Artificial Sequence: Synthetic oligonucleotide
  Sense strand starting at position 2546 of SEQ ID NO: 1884530
cauagugacuguuugguua

SEQ ID NO: 2272747 - RNA, 19 nt, Artificial Sequence
  Description of Artificial Sequence: Synthetic oligonucleotide
  Antisense strand to SEQ ID NO: 2272746
uaaccaaacagucacuaug

SEQ ID NO: 2272748 - RNA, 19 nt, Artificial Sequence
  Description of Artificial Sequence: Synthetic oligonucleotide
  Sense strand starting at position 2628 of SEQ ID NO: 1884530
caguuacuugcagaucagu

SEQ ID NO: 2272749 - RNA, 19 nt, Artificial Sequence
  Description of Artificial Sequence: Synthetic oligonucleotide
  Antisense strand to SEQ ID NO: 2272748
acugaucugcaaguaacug

SEQ ID NO: 2272750 - RNA, 19 nt, Artificial Sequence
  Description of Artificial Sequence: Synthetic oligonucleotide
  Sense strand starting at position 2633 of SEQ ID NO: 1884530
acuugcagaucaguuugau

SEQ ID NO: 2272751 - RNA, 19 nt, Artificial Sequence
  Description of Artificial Sequence: Synthetic oligonucleotide
  Antisense strand to SEQ ID NO: 2272750
aucaaacugaucugcaagu

SEQ ID NO: 2272752 - RNA, 19 nt, Artificial Sequence
  Description of Artificial Sequence: Synthetic oligonucleotide
  Sense strand starting at position 2636 of SEQ ID NO: 1884530
ugcagaucaguuugaucau

SEQ ID NO: 2272753 - RNA, 19 nt, Artificial Sequence
  Description of Artificial Sequence: Synthetic oligonucleotide
  Antisense strand to SEQ ID NO: 2272752
augaucaaacugaucugca

SEQ ID NO: 2272754 - RNA, 19 nt, Artificial Sequence
  Description of Artificial Sequence: Synthetic oligonucleotide
  Sense strand starting at position 2674 of SEQ ID NO: 1884530
cuuuguuuggguuaaugua

SEQ ID NO: 2272755 - RNA, 19 nt, Artificial Sequence
  Description of Artificial Sequence: Synthetic oligonucleotide
  Antisense strand to SEQ ID NO: 2272754
uacauuaacccaaacaaag

SEQ ID NO: 2272756 - RNA, 19 nt, Artificial Sequence
  Description of Artificial Sequence: Synthetic oligonucleotide
  Sense strand starting at position 2746 of SEQ ID NO: 1884530
ucucaacucuggcuggaua

SEQ ID NO: 2272757 - RNA, 19 nt, Artificial Sequence
  Description of Artificial Sequence: Synthetic oligonucleotide
  Antisense strand to SEQ ID NO: 2272756
uauccagccagaguugaga

SEQ ID NO: 2272758 - RNA, 19 nt, Artificial Sequence
  Description of Artificial Sequence: Synthetic oligonucleotide
  Sense strand starting at position 2748 of SEQ ID NO: 1884530
ucaacucuggcuggauaga

SEQ ID NO: 2272759 - RNA, 19 nt, Artificial Sequence
  Description of Artificial Sequence: Synthetic oligonucleotide
  Antisense strand to SEQ ID NO: 2272758
ucuauccagccagaguuga

SEQ ID NO: 2272760 - RNA, 19 nt, Artificial Sequence
  Description of Artificial Sequence: Synthetic oligonucleotide
  Sense strand starting at position 2757 of SEQ ID NO: 1884530
gcuggauagaguuguaaua

SEQ ID NO: 2272761 - RNA, 19 nt, Artificial Sequence
  Description of Artificial Sequence: Synthetic oligonucleotide
  Antisense strand to SEQ ID NO: 2272760
uauuacaacucuauccagc

SEQ ID NO: 2272762 - RNA, 19 nt, Artificial Sequence
  Description of Artificial Sequence: Synthetic oligonucleotide
  Sense strand starting at position 2850 of SEQ ID NO: 1884530
ugguaaugaucucugcuca

SEQ ID NO: 2272763 - RNA, 19 nt, Artificial Sequence
  Description of Artificial Sequence: Synthetic oligonucleotide
  Antisense strand to SEQ ID NO: 2272762
ugagcagagaucauuacca

SEQ ID NO: 2272764 - RNA, 19 nt, Artificial Sequence
  Description of Artificial Sequence: Synthetic oligonucleotide
  Sense strand starting at position 2851 of SEQ ID NO: 1884530
gguaaugaucucugcucag

SEQ ID NO: 2272765 - RNA, 19 nt, Artificial Sequence
  Description of Artificial Sequence: Synthetic oligonucleotide
  Antisense strand to SEQ ID NO: 2272764
cugagcagagaucauuacc

SEQ ID NO: 2272766 - RNA, 19 nt, Artificial Sequence
  Description of Artificial Sequence: Synthetic oligonucleotide
  Sense strand starting at position 3111 of SEQ ID NO: 1884530
cuguacaagcucuaggaau

SEQ ID NO: 2272767 - RNA, 19 nt, Artificial Sequence
  Description of Artificial Sequence: Synthetic oligonucleotide
  Antisense strand to SEQ ID NO: 2272766
auuccuagagcuuguacag

SEQ ID NO: 2272768 - RNA, 19 nt, Artificial Sequence
  Description of Artificial Sequence: Synthetic oligonucleotide
  Sense strand starting at position 3140 of SEQ ID NO: 1884530
auagcucuacuguagauau

SEQ ID NO: 2272769 - RNA, 19 nt, Artificial Sequence
  Description of Artificial Sequence: Synthetic oligonucleotide
  Antisense strand to SEQ ID NO: 2272768
auaucuacaguagagcuau

SEQ ID NO: 2272770 - RNA, 19 nt, Artificial Sequence
  Description of Artificial Sequence: Synthetic oligonucleotide
  Sense strand starting at position 3337 of SEQ ID NO: 1884530
ccguuaguccuugaauacu

SEQ ID NO: 2272771 - RNA, 19 nt, Artificial Sequence
  Description of Artificial Sequence: Synthetic oligonucleotide
  Antisense strand to SEQ ID NO: 2272770
aguauucaaggacuaacgg

SEQ ID NO: 2272772 - RNA, 19 nt, Artificial Sequence
  Description of Artificial Sequence: Synthetic oligonucleotide
  Sense strand starting at position 3410 of SEQ ID NO: 1884530
gacuuagaauuagcuguuu

SEQ ID NO: 2272773 - RNA, 19 nt, Artificial Sequence
  Description of Artificial Sequence: Synthetic oligonucleotide
  Antisense strand to SEQ ID NO: 2272772
aaacagcuaauucuaaguc

SEQ ID NO: 2272774 - RNA, 19 nt, Artificial Sequence
  Description of Artificial Sequence: Synthetic oligonucleotide
  Sense strand starting at position 3419 of SEQ ID NO: 1884530
uuagcuguuucuccaagaa

SEQ ID NO: 2272775 - RNA, 19 nt, Artificial Sequence
  Description of Artificial Sequence: Synthetic oligonucleotide
  Antisense strand to SEQ ID NO: 2272774
uucuuggagaaacagcuaa

SEQ ID NO: 2272776 - RNA, 19 nt, Artificial Sequence
  Description of Artificial Sequence: Synthetic oligonucleotide
  Sense strand starting at position 3537 of SEQ ID NO: 1884530
uguuguuagagcuagggau

SEQ ID NO: 2272777 - RNA, 19 nt, Artificial Sequence
  Description of Artificial Sequence: Synthetic oligonucleotide
  Antisense strand to SEQ ID NO: 2272776
aucccuagcucuaacaaca

SEQ ID NO: 2272778 - RNA, 19 nt, Artificial Sequence
  Description of Artificial Sequence: Synthetic oligonucleotide
  Sense strand starting at position 3539 of SEQ ID NO: 1884530
uuguuagagcuagggauaa

SEQ ID NO: 2272779 - RNA, 19 nt, Artificial Sequence
  Description of Artificial Sequence: Synthetic oligonucleotide
  Antisense strand to SEQ ID NO: 2272778
uuaucccuagcucuaacaa

SEQ ID NO: 2272780 - RNA, 19 nt, Artificial Sequence
  Description of Artificial Sequence: Synthetic oligonucleotide
  Sense strand starting at position 3659 of SEQ ID NO: 1884530
gcuagaaugcagugacuau

SEQ ID NO: 2272781 - RNA, 19 nt, Artificial Sequence
  Description of Artificial Sequence: Synthetic oligonucleotide
  Antisense strand to SEQ ID NO: 2272780
auagucacugcauucuagc

SEQ ID NO: 2272782 - RNA, 19 nt, Artificial Sequence
  Description of Artificial Sequence: Synthetic oligonucleotide
  Sense strand starting at position 1243 of SEQ ID NO: 1884531
cuaggacuguggcucaaua

SEQ ID NO: 2272783 - RNA, 19 nt, Artificial Sequence
  Description of Artificial Sequence: Synthetic oligonucleotide
  Antisense strand to SEQ ID NO: 2272782
uauugagccacaguccuag

SEQ ID NO: 2272784 - RNA, 19 nt, Artificial Sequence
  Description of Artificial Sequence: Synthetic oligonucleotide
  Sense strand starting at position 1245 of SEQ ID NO: 1884531
aggacuguggcucaauagu

SEQ ID NO: 2272785 - RNA, 19 nt, Artificial Sequence
  Description of Artificial Sequence: Synthetic oligonucleotide
  Antisense strand to SEQ ID NO: 2272784
acuauugagccacaguccu

SEQ ID NO: 2272786 - RNA, 19 nt, Artificial Sequence
  Description of Artificial Sequence: Synthetic oligonucleotide
  Sense strand starting at position 1316 of SEQ ID NO: 1884531
ucuuaagauugggcaccau

SEQ ID NO: 2272787 - RNA, 19 nt, Artificial Sequence
  Description of Artificial Sequence: Synthetic oligonucleotide
  Antisense strand to SEQ ID NO: 2272786
auggugcccaaucuuaaga

SEQ ID NO: 2272788 - RNA, 19 nt, Artificial Sequence
  Description of Artificial Sequence: Synthetic oligonucleotide
  Sense strand starting at position 1369 of SEQ ID NO: 1884531
uuacuaagacuccgacaug

SEQ ID NO: 2272789 - RNA, 19 nt, Artificial Sequence
  Description of Artificial Sequence: Synthetic oligonucleotide
  Antisense strand to SEQ ID NO: 2272788
caugucggagucuuaguaa

SEQ ID NO: 2272790 - RNA, 19 nt, Artificial Sequence
  Description of Artificial Sequence: Synthetic oligonucleotide
  Sense strand starting at position 1378 of SEQ ID NO: 1884531
cuccgacaugaaugacauu

SEQ ID NO: 2272791 - RNA, 19 nt, Artificial Sequence
  Description of Artificial Sequence: Synthetic oligonucleotide
  Antisense strand to SEQ ID NO: 2272790
aaugucauucaugucggag

SEQ ID NO: 2272792 - RNA, 19 nt, Artificial Sequence
  Description of Artificial Sequence: Synthetic oligonucleotide
  Sense strand starting at position 1495 of SEQ ID NO: 1884531
ugagcaaagcuauacaugu

SEQ ID NO: 2272793 - RNA, 19 nt, Artificial Sequence
  Description of Artificial Sequence: Synthetic oligonucleotide
  Antisense strand to SEQ ID NO: 2272792
acauguauagcuuugcuca

SEQ ID NO: 2272794 - RNA, 19 nt, Artificial Sequence
  Description of Artificial Sequence: Synthetic oligonucleotide
  Sense strand starting at position 1552 of SEQ ID NO: 1884531
gcuaacaccuuguugauau

SEQ ID NO: 2272795 - RNA, 19 nt, Artificial Sequence
  Description of Artificial Sequence: Synthetic oligonucleotide
  Antisense strand to SEQ ID NO: 2272794
auaucaacaagguguuagc

SEQ ID NO: 2272796 - RNA, 19 nt, Artificial Sequence
  Description of Artificial Sequence: Synthetic oligonucleotide
  Sense strand starting at position 1621 of SEQ ID NO: 1884531
ggucaaguuauuggaucaa

SEQ ID NO: 2272797 - RNA, 19 nt, Artificial Sequence
  Description of Artificial Sequence: Synthetic oligonucleotide
  Antisense strand to SEQ ID NO: 2272796
uugauccaauaacuugacc

SEQ ID NO: 2272798 - RNA, 19 nt, Artificial Sequence
  Description of Artificial Sequence: Synthetic oligonucleotide
  Sense strand starting at position 1633 of SEQ ID NO: 1884531
ggaucaauuaaacguggua

SEQ ID NO: 2272799 - RNA, 19 nt, Artificial Sequence
  Description of Artificial Sequence: Synthetic oligonucleotide
  Antisense strand to SEQ ID NO: 2272798
uaccacguuuaauugaucc

SEQ ID NO: 2272800 - RNA, 19 nt, Artificial Sequence
  Description of Artificial Sequence: Synthetic oligonucleotide
  Sense strand starting at position 1636 of SEQ ID NO: 1884531
ucaauuaaacgugguaauu

SEQ ID NO: 2272801 - RNA, 19 nt, Artificial Sequence
  Description of Artificial Sequence: Synthetic oligonucleotide
  Antisense strand to SEQ ID NO: 2272800
aauuaccacguuuaauuga

SEQ ID NO: 2272802 - RNA, 19 nt, Artificial Sequence
  Description of Artificial Sequence: Synthetic oligonucleotide
  Sense strand starting at position 1652 of SEQ ID NO: 1884531
auucgcuuugacuggugaa

SEQ ID NO: 2272803 - RNA, 19 nt, Artificial Sequence
  Description of Artificial Sequence: Synthetic oligonucleotide
  Antisense strand to SEQ ID NO: 2272802
uucaccagucaaagcgaau

SEQ ID NO: 2272804 - RNA, 19 nt, Artificial Sequence
  Description of Artificial Sequence: Synthetic oligonucleotide
  Sense strand starting at position 1777 of SEQ ID NO: 1884531
guuugcguuaaugaauuaa

SEQ ID NO: 2272805 - RNA, 19 nt, Artificial Sequence
  Description of Artificial Sequence: Synthetic oligonucleotide
  Antisense strand to SEQ ID NO: 2272804
uuaauucauuaacgcaaac

SEQ ID NO: 2272806 - RNA, 19 nt, Artificial Sequence
  Description of Artificial Sequence: Synthetic oligonucleotide
  Sense strand starting at position 1781 of SEQ ID NO: 1884531
gcguuaaugaauuaaagcu

SEQ ID NO: 2272807 - RNA, 19 nt, Artificial Sequence
  Description of Artificial Sequence: Synthetic oligonucleotide
  Antisense strand to SEQ ID NO: 2272806
agcuuuaauucauuaacgc

SEQ ID NO: 2272808 - RNA, 19 nt, Artificial Sequence
  Description of Artificial Sequence: Synthetic oligonucleotide
  Sense strand starting at position 1806 of SEQ ID NO: 1884531
ggucuucucgucuuguuau

SEQ ID NO: 2272809 - RNA, 19 nt, Artificial Sequence
  Description of Artificial Sequence: Synthetic oligonucleotide
  Antisense strand to SEQ ID NO: 2272808
auaacaagacgagaagacc

SEQ ID NO: 2272810 - RNA, 19 nt, Artificial Sequence
  Description of Artificial Sequence: Synthetic oligonucleotide
  Sense strand starting at position 2007 of SEQ ID NO: 1884531
gagaaugcuagaggugaug

SEQ ID NO: 2272811 - RNA, 19 nt, Artificial Sequence
  Description of Artificial Sequence: Synthetic oligonucleotide
  Antisense strand to SEQ ID NO: 2272810
caucaccucuagcauucuc

SEQ ID NO: 2272812 - RNA, 19 nt, Artificial Sequence
  Description of Artificial Sequence: Synthetic oligonucleotide
  Sense strand starting at position 2009 of SEQ ID NO: 1884531
gaaugcuagaggugauguu

SEQ ID NO: 2272813 - RNA, 19 nt, Artificial Sequence
  Description of Artificial Sequence: Synthetic oligonucleotide
  Antisense strand to SEQ ID NO: 2272812
aacaucaccucuagcauuc

SEQ ID NO: 2272814 - RNA, 19 nt, Artificial Sequence
  Description of Artificial Sequence: Synthetic oligonucleotide
  Sense strand starting at position 2130 of SEQ ID NO: 1884531
cuuguugguugguuauaga

SEQ ID NO: 2272815 - RNA, 19 nt, Artificial Sequence
  Description of Artificial Sequence: Synthetic oligonucleotide
  Antisense strand to SEQ ID NO: 2272814
ucuauaaccaaccaacaag

SEQ ID NO: 2272816 - RNA, 19 nt, Artificial Sequence
  Description of Artificial Sequence: Synthetic oligonucleotide
  Sense strand starting at position 2143 of SEQ ID NO: 1884531
uauagauauugggcuguua

SEQ ID NO: 2272817 - RNA, 19 nt, Artificial Sequence
  Description of Artificial Sequence: Synthetic oligonucleotide
  Antisense strand to SEQ ID NO: 2272816
uaacagcccaauaucuaua

SEQ ID NO: 2272818 - RNA, 19 nt, Artificial Sequence
  Description of Artificial Sequence: Synthetic oligonucleotide
  Sense strand starting at position 2235 of SEQ ID NO: 1884531
uuagcucuucuauagggua

SEQ ID NO: 2272819 - RNA, 19 nt, Artificial Sequence
  Description of Artificial Sequence: Synthetic oligonucleotide
  Antisense strand to SEQ ID NO: 2272818
uacccuauagaagagcuaa

SEQ ID NO: 2272820 - RNA, 19 nt, Artificial Sequence
  Description of Artificial Sequence: Synthetic oligonucleotide
  Sense strand starting at position 2248 of SEQ ID NO: 1884531
aggguaauagauuggucca

SEQ ID NO: 2272821 - RNA, 19 nt, Artificial Sequence
  Description of Artificial Sequence: Synthetic oligonucleotide
  Antisense strand to SEQ ID NO: 2272820
uggaccaaucuauuacccu

SEQ ID NO: 2272822 - RNA, 19 nt, Artificial Sequence
  Description of Artificial Sequence: Synthetic oligonucleotide
  Sense strand starting at position 2249 of SEQ ID NO: 1884531
ggguaauagauugguccaa

SEQ ID NO: 2272823 - RNA, 19 nt, Artificial Sequence
  Description of Artificial Sequence: Synthetic oligonucleotide
  Antisense strand to SEQ ID NO: 2272822
uuggaccaaucuauuaccc

SEQ ID NO: 2272824 - RNA, 19 nt, Artificial Sequence
  Description of Artificial Sequence: Synthetic oligonucleotide
  Sense strand starting at position 2272 of SEQ ID NO: 1884531
gugcaaggaguucaguuau

SEQ ID NO: 2272825 - RNA, 19 nt, Artificial Sequence
  Description of Artificial Sequence: Synthetic oligonucleotide
  Antisense strand to SEQ ID NO: 2272824
auaacugaacuccuugcac

SEQ ID NO: 2272826 - RNA, 19 nt, Artificial Sequence
  Description of Artificial Sequence: Synthetic oligonucleotide
  Sense strand starting at position 2283 of SEQ ID NO: 1884531
ucaguuauguguuugggau

SEQ ID NO: 2272827 - RNA, 19 nt, Artificial Sequence
  Description of Artificial Sequence: Synthetic oligonucleotide
  Antisense strand to SEQ ID NO: 2272826
aucccaaacacauaacuga

SEQ ID NO: 2272828 - RNA, 19 nt, Artificial Sequence
  Description of Artificial Sequence: Synthetic oligonucleotide
  Sense strand starting at position 2284 of SEQ ID NO: 1884531
caguuauguguuugggauu

SEQ ID NO: 2272829 - RNA, 19 nt, Artificial Sequence
  Description of Artificial Sequence: Synthetic oligonucleotide
  Antisense strand to SEQ ID NO: 2272828
aaucccaaacacauaacug

SEQ ID NO: 2272830 - RNA, 19 nt, Artificial Sequence
  Description of Artificial Sequence: Synthetic oligonucleotide
  Sense strand starting at position 2356 of SEQ ID NO: 1884531
aggccuacuguggguauua

SEQ ID NO: 2272831 - RNA, 19 nt, Artificial Sequence
  Description of Artificial Sequence: Synthetic oligonucleotide
  Antisense strand to SEQ ID NO: 2272830
uaauacccacaguaggccu

SEQ ID NO: 2272832 - RNA, 19 nt, Artificial Sequence
  Description of Artificial Sequence: Synthetic oligonucleotide
  Sense strand starting at position 2357 of SEQ ID NO: 1884531
ggccuacuguggguauuaa

SEQ ID NO: 2272833 - RNA, 19 nt, Artificial Sequence
  Description of Artificial Sequence: Synthetic oligonucleotide
  Antisense strand to SEQ ID NO: 2272832
uuaauacccacaguaggcc

SEQ ID NO: 2272834 - RNA, 19 nt, Artificial Sequence
  Description of Artificial Sequence: Synthetic oligonucleotide
  Sense strand starting at position 2358 of SEQ ID NO: 1884531
gccuacuguggguauuaaa

SEQ ID NO: 2272835 - RNA, 19 nt, Artificial Sequence
  Description of Artificial Sequence: Synthetic oligonucleotide
  Antisense strand to SEQ ID NO: 2272834
uuuaauacccacaguaggc

SEQ ID NO: 2272836 - RNA, 19 nt, Artificial Sequence
  Description of Artificial Sequence: Synthetic oligonucleotide
  Sense strand starting at position 2361 of SEQ ID NO: 1884531
uacuguggguauuaaauuu

SEQ ID NO: 2272837 - RNA, 19 nt, Artificial Sequence
  Description of Artificial Sequence: Synthetic oligonucleotide
  Antisense strand to SEQ ID NO: 2272836
aaauuuaauacccacagua

SEQ ID NO: 2272838 - RNA, 19 nt, Artificial Sequence
  Description of Artificial Sequence: Synthetic oligonucleotide
  Sense strand starting at position 2754 of SEQ ID NO: 1884531
uaucuauugcgccgauuua

SEQ ID NO: 2272839 - RNA, 19 nt, Artificial Sequence
  Description of Artificial Sequence: Synthetic oligonucleotide
  Antisense strand to SEQ ID NO: 2272838
uaaaucggcgcaauagaua

SEQ ID NO: 2272840 - RNA, 19 nt, Artificial Sequence
  Description of Artificial Sequence: Synthetic oligonucleotide
  Sense strand starting at position 2800 of SEQ ID NO: 1884531
gguaaaugauuugguuaaa

SEQ ID NO: 2272841 - RNA, 19 nt, Artificial Sequence
  Description of Artificial Sequence: Synthetic oligonucleotide
  Antisense strand to SEQ ID NO: 2272840
uuuaaccaaaucauuuacc

SEQ ID NO: 2272842 - RNA, 19 nt, Artificial Sequence
  Description of Artificial Sequence: Synthetic oligonucleotide
  Sense strand starting at position 2816 of SEQ ID NO: 1884531
aaagcuguucgguaguaag

SEQ ID NO: 2272843 - RNA, 19 nt, Artificial Sequence
  Description of Artificial Sequence: Synthetic oligonucleotide
  Antisense strand to SEQ ID NO: 2272842
cuuacuaccgaacagcuuu

SEQ ID NO: 2272844 - RNA, 19 nt, Artificial Sequence
  Description of Artificial Sequence: Synthetic oligonucleotide
  Sense strand starting at position 2869 of SEQ ID NO: 1884531
cggucaaguugaguugaaa

SEQ ID NO: 2272845 - RNA, 19 nt, Artificial Sequence
  Description of Artificial Sequence: Synthetic oligonucleotide
  Antisense strand to SEQ ID NO: 2272844
uuucaacucaacuugaccg

SEQ ID NO: 2272846 - RNA, 19 nt, Artificial Sequence
  Description of Artificial Sequence: Synthetic oligonucleotide
  Sense strand starting at position 2905 of SEQ ID NO: 1884531
gggugcuuuguguuaagcu

SEQ ID NO: 2272847 - RNA, 19 nt, Artificial Sequence
  Description of Artificial Sequence: Synthetic oligonucleotide
  Antisense strand to SEQ ID NO: 2272846
agcuuaacacaaagcaccc

SEQ ID NO: 2272848 - RNA, 19 nt, Artificial Sequence
  Description of Artificial Sequence: Synthetic oligonucleotide
  Sense strand starting at position 3005 of SEQ ID NO: 1884531
uuaguuaaguguccuuuga

SEQ ID NO: 2272849 - RNA, 19 nt, Artificial Sequence
  Description of Artificial Sequence: Synthetic oligonucleotide
  Antisense strand to SEQ ID NO: 2272848
ucaaaggacacuuaacuaa

SEQ ID NO: 2272850 - RNA, 19 nt, Artificial Sequence
  Description of Artificial Sequence: Synthetic oligonucleotide
  Sense strand starting at position 3007 of SEQ ID NO: 1884531
aguuaaguguccuuugaag

SEQ ID NO: 2272851 - RNA, 19 nt, Artificial Sequence
  Description of Artificial Sequence: Synthetic oligonucleotide
  Antisense strand to SEQ ID NO: 2272850
cuucaaaggacacuuaacu

SEQ ID NO: 2272852 - RNA, 19 nt, Artificial Sequence
  Description of Artificial Sequence: Synthetic oligonucleotide
  Sense strand starting at position 3009 of SEQ ID NO: 1884531
uuaaguguccuuugaagua

SEQ ID NO: 2272853 - RNA, 19 nt, Artificial Sequence
  Description of Artificial Sequence: Synthetic oligonucleotide
  Antisense strand to SEQ ID NO: 2272852
uacuucaaaggacacuuaa

SEQ ID NO: 2272854 - RNA, 19 nt, Artificial Sequence
  Description of Artificial Sequence: Synthetic oligonucleotide
  Sense strand starting at position 3665 of SEQ ID NO: 1884531
guuaguauggcuuaguuaa

SEQ ID NO: 2272855 - RNA, 19 nt, Artificial Sequence
  Description of Artificial Sequence: Synthetic oligonucleotide
  Antisense strand to SEQ ID NO: 2272854
uuaacuaagccauacuaac

SEQ ID NO: 2272856 - RNA, 19 nt, Artificial Sequence
  Description of Artificial Sequence: Synthetic oligonucleotide
  Sense strand starting at position 3667 of SEQ ID NO: 1884531
uaguauggcuuaguuaaac

SEQ ID NO: 2272857 - RNA, 19 nt, Artificial Sequence
  Description of Artificial Sequence: Synthetic oligonucleotide
  Antisense strand to SEQ ID NO: 2272856
guuuaacuaagccauacua

SEQ ID NO: 2272858 - RNA, 19 nt, Artificial Sequence
  Description of Artificial Sequence: Synthetic oligonucleotide
  Sense strand starting at position 3679 of SEQ ID NO: 1884531
guuaaacuuugguuuauug

SEQ ID NO: 2272859 - RNA, 19 nt, Artificial Sequence
  Description of Artificial Sequence: Synthetic oligonucleotide
  Antisense strand to SEQ ID NO: 2272858
caauaaaccaaaguuuaac

SEQ ID NO: 2272860 - RNA, 19 nt, Artificial Sequence
  Description of Artificial Sequence: Synthetic oligonucleotide
  Sense strand starting at position 3897 of SEQ ID NO: 1884531
auaugagcccgucgaaaca

SEQ ID NO: 2272861 - RNA, 19 nt, Artificial Sequence
  Description of Artificial Sequence: Synthetic oligonucleotide
  Antisense strand to SEQ ID NO: 2272860
uguuucgacgggcucauau

SEQ ID NO: 2272862 - RNA, 19 nt, Artificial Sequence
  Description of Artificial Sequence: Synthetic oligonucleotide
  Sense strand starting at position 56 of SEQ ID NO: 1884532
uggcuuucgccaguuagca

SEQ ID NO: 2272863 - RNA, 19 nt, Artificial Sequence
  Description of Artificial Sequence: Synthetic oligonucleotide
  Antisense strand to SEQ ID NO: 2272862
ugcuaacuggcgaaagcca

SEQ ID NO: 2272864 - RNA, 19 nt, Artificial Sequence
  Description of Artificial Sequence: Synthetic oligonucleotide
  Sense strand starting at position 57 of SEQ ID NO: 1884532
ggcuuucgccaguuagcaa

SEQ ID NO: 2272865 - RNA, 19 nt, Artificial Sequence
  Description of Artificial Sequence: Synthetic oligonucleotide
  Antisense strand to SEQ ID NO: 2272864
uugcuaacuggcgaaagcc

SEQ ID NO: 2272866 - RNA, 19 nt, Artificial Sequence
  Description of Artificial Sequence: Synthetic oligonucleotide
  Sense strand starting at position 170 of SEQ ID NO: 1884532
ggugauaauccaugcacac

SEQ ID NO: 2272867 - RNA, 19 nt, Artificial Sequence
  Description of Artificial Sequence: Synthetic oligonucleotide
  Antisense strand to SEQ ID NO: 2272866
gugugcauggauuaucacc

SEQ ID NO: 2272868 - RNA, 19 nt, Artificial Sequence
  Description of Artificial Sequence: Synthetic oligonucleotide
  Sense strand starting at position 311 of SEQ ID NO: 1884532
gcuguaagauacuuuaauu

SEQ ID NO: 2272869 - RNA, 19 nt, Artificial Sequence
  Description of Artificial Sequence: Synthetic oligonucleotide
  Antisense strand to SEQ ID NO: 2272868
aauuaaaguaucuuacagc

SEQ ID NO: 2272870 - RNA, 19 nt, Artificial Sequence
  Description of Artificial Sequence: Synthetic oligonucleotide
  Sense strand starting at position 362 of SEQ ID NO: 1884532
gggagcuguccuuagaaau

SEQ ID NO: 2272871 - RNA, 19 nt, Artificial Sequence
  Description of Artificial Sequence: Synthetic oligonucleotide
  Antisense strand to SEQ ID NO: 2272870
auuucuaaggacagcuccc

SEQ ID NO: 2272872 - RNA, 19 nt, Artificial Sequence
  Description of Artificial Sequence: Synthetic oligonucleotide
  Sense strand starting at position 466 of SEQ ID NO: 1884532
caaugcugugugucugcua

SEQ ID NO: 2272873 - RNA, 19 nt, Artificial Sequence
  Description of Artificial Sequence: Synthetic oligonucleotide
  Antisense strand to SEQ ID NO: 2272872
uagcagacacacagcauug

SEQ ID NO: 2272874 - RNA, 19 nt, Artificial Sequence
  Description of Artificial Sequence: Synthetic oligonucleotide
  Sense strand starting at position 635 of SEQ ID NO: 1884532
agcagcagaucuuugaaau

SEQ ID NO: 2272875 - RNA, 19 nt, Artificial Sequence
  Description of Artificial Sequence: Synthetic oligonucleotide
  Antisense strand to SEQ ID NO: 2272874
auuucaaagaucugcugcu

SEQ ID NO: 2272876 - RNA, 19 nt, Artificial Sequence
  Description of Artificial Sequence: Synthetic oligonucleotide
  Sense strand starting at position 837 of SEQ ID NO: 1884532
augggugauuuguauuucu

SEQ ID NO: 2272877 - RNA, 19 nt, Artificial Sequence
  Description of Artificial Sequence: Synthetic oligonucleotide
  Antisense strand to SEQ ID NO: 2272876
agaaauacaaaucacccau

SEQ ID NO: 2272878 - RNA, 19 nt, Artificial Sequence
  Description of Artificial Sequence: Synthetic oligonucleotide
  Sense strand starting at position 924 of SEQ ID NO: 1884532
agaagcgagugguuucaaa

SEQ ID NO: 2272879 - RNA, 19 nt, Artificial Sequence
  Description of Artificial Sequence: Synthetic oligonucleotide
  Antisense strand to SEQ ID NO: 2272878
uuugaaaccacucgcuucu

SEQ ID NO: 2272880 - RNA, 19 nt, Artificial Sequence
  Description of Artificial Sequence: Synthetic oligonucleotide
  Sense strand starting at position 1135 of SEQ ID NO: 1884532
ggaguaugcuagcuuggaa

SEQ ID NO: 2272881 - RNA, 19 nt, Artificial Sequence
  Description of Artificial Sequence: Synthetic oligonucleotide
  Antisense strand to SEQ ID NO: 2272880
uuccaagcuagcauacucc

SEQ ID NO: 2272882 - RNA, 19 nt, Artificial Sequence
  Description of Artificial Sequence: Synthetic oligonucleotide
  Sense strand starting at position 1205 of SEQ ID NO: 1884532
ggcacuuaggccuggauuu

SEQ ID NO: 2272883 - RNA, 19 nt, Artificial Sequence
  Description of Artificial Sequence: Synthetic oligonucleotide
  Antisense strand to SEQ ID NO: 2272882
aaauccaggccuaagugcc

SEQ ID NO: 2272884 - RNA, 19 nt, Artificial Sequence
  Description of Artificial Sequence: Synthetic oligonucleotide
  Sense strand starting at position 1236 of SEQ ID NO: 1884532
ugccauacacuagauguga

SEQ ID NO: 2272885 - RNA, 19 nt, Artificial Sequence
  Description of Artificial Sequence: Synthetic oligonucleotide
  Antisense strand to SEQ ID NO: 2272884
ucacaucuaguguauggca

SEQ ID NO: 2272886 - RNA, 19 nt, Artificial Sequence
  Description of Artificial Sequence: Synthetic oligonucleotide
  Sense strand starting at position 1253 of SEQ ID NO: 1884532
gagaucuugggccaguuau

SEQ ID NO: 2272887 - RNA, 19 nt, Artificial Sequence
  Description of Artificial Sequence: Synthetic oligonucleotide
  Antisense strand to SEQ ID NO: 2272886
auaacuggcccaagaucuc

SEQ ID NO: 2272888 - RNA, 19 nt, Artificial Sequence
  Description of Artificial Sequence: Synthetic oligonucleotide
  Sense strand starting at position 1295 of SEQ ID NO: 1884532
ccucacucuguaugacuua

SEQ ID NO: 2272889 - RNA, 19 nt, Artificial Sequence
  Description of Artificial Sequence: Synthetic oligonucleotide
  Antisense strand to SEQ ID NO: 2272888
uaagucauacagagugagg

SEQ ID NO: 2272890 - RNA, 19 nt, Artificial Sequence
  Description of Artificial Sequence: Synthetic oligonucleotide
  Sense strand starting at position 1337 of SEQ ID NO: 1884532
ggcucaacugggcaucuau

SEQ ID NO: 2272891 - RNA, 19 nt, Artificial Sequence
  Description of Artificial Sequence: Synthetic oligonucleotide
  Antisense strand to SEQ ID NO: 2272890
auagaugcccaguugagcc

SEQ ID NO: 2272892 - RNA, 19 nt, Artificial Sequence
  Description of Artificial Sequence: Synthetic oligonucleotide
  Sense strand starting at position 1438 of SEQ ID NO: 1884532
cugugauucccuuaccucu

SEQ ID NO: 2272893 - RNA, 19 nt, Artificial Sequence
  Description of Artificial Sequence: Synthetic oligonucleotide
  Antisense strand to SEQ ID NO: 2272892
agagguaagggaaucacag

SEQ ID NO: 2272894 - RNA, 19 nt, Artificial Sequence
  Description of Artificial Sequence: Synthetic oligonucleotide
  Sense strand starting at position 1634 of SEQ ID NO: 1884532
aagggcuuaugugcaaaga

SEQ ID NO: 2272895 - RNA, 19 nt, Artificial Sequence
  Description of Artificial Sequence: Synthetic oligonucleotide
  Antisense strand to SEQ ID NO: 2272894
ucuuugcacauaagcccuu

SEQ ID NO: 2272896 - RNA, 19 nt, Artificial Sequence
  Description of Artificial Sequence: Synthetic oligonucleotide
  Sense strand starting at position 1722 of SEQ ID NO: 1884532
gguagaaucugagcacagu

SEQ ID NO: 2272897 - RNA, 19 nt, Artificial Sequence
  Description of Artificial Sequence: Synthetic oligonucleotide
  Antisense strand to SEQ ID NO: 2272896
acugugcucagauucuacc

SEQ ID NO: 2272898 - RNA, 19 nt, Artificial Sequence
  Description of Artificial Sequence: Synthetic oligonucleotide
  Sense strand starting at position 2094 of SEQ ID NO: 1884532
aaaccagcaucugugagaa

SEQ ID NO: 2272899 - RNA, 19 nt, Artificial Sequence
  Description of Artificial Sequence: Synthetic oligonucleotide
  Antisense strand to SEQ ID NO: 2272898
uucucacagaugcugguuu

SEQ ID NO: 2272900 - RNA, 19 nt, Artificial Sequence
  Description of Artificial Sequence: Synthetic oligonucleotide
  Sense strand starting at position 2132 of SEQ ID NO: 1884532
ccuugaggaauguggacau

SEQ ID NO: 2272901 - RNA, 19 nt, Artificial Sequence
  Description of Artificial Sequence: Synthetic oligonucleotide
  Antisense strand to SEQ ID NO: 2272900
auguccacauuccucaagg

SEQ ID NO: 2272902 - RNA, 19 nt, Artificial Sequence
  Description of Artificial Sequence: Synthetic oligonucleotide
  Sense strand starting at position 2149 of SEQ ID NO: 1884532
augauuaaccucugccagu

SEQ ID NO: 2272903 - RNA, 19 nt, Artificial Sequence
  Description of Artificial Sequence: Synthetic oligonucleotide
  Antisense strand to SEQ ID NO: 2272902
acuggcagagguuaaucau

SEQ ID NO: 2272904 - RNA, 19 nt, Artificial Sequence
  Description of Artificial Sequence: Synthetic oligonucleotide
  Sense strand starting at position 2221 of SEQ ID NO: 1884532
gcagccaacccuugaagau

SEQ ID NO: 2272905 - RNA, 19 nt, Artificial Sequence
  Description of Artificial Sequence: Synthetic oligonucleotide
  Antisense strand to SEQ ID NO: 2272904
aucuucaaggguuggcugc

SEQ ID NO: 2272906 - RNA, 19 nt, Artificial Sequence
  Description of Artificial Sequence: Synthetic oligonucleotide
  Sense strand starting at position 2357 of SEQ ID NO: 1884532
ugcuauuuccucggcagga

SEQ ID NO: 2272907 - RNA, 19 nt, Artificial Sequence
  Description of Artificial Sequence: Synthetic oligonucleotide
  Antisense strand to SEQ ID NO: 2272906
uccugccgaggaaauagca

SEQ ID NO: 2272908 - RNA, 19 nt, Artificial Sequence
  Description of Artificial Sequence: Synthetic oligonucleotide
  Sense strand starting at position 2358 of SEQ ID NO: 1884532
gcuauuuccucggcaggaa

SEQ ID NO: 2272909 - RNA, 19 nt, Artificial Sequence
  Description of Artificial Sequence: Synthetic oligonucleotide
  Antisense strand to SEQ ID NO: 2272908
uuccugccgaggaaauagc

SEQ ID NO: 2272910 - RNA, 19 nt, Artificial Sequence
  Description of Artificial Sequence: Synthetic oligonucleotide
  Sense strand starting at position 2599 of SEQ ID NO: 1884532
ggaccuaugcuccacggua

SEQ ID NO: 2272911 - RNA, 19 nt, Artificial Sequence
  Description of Artificial Sequence: Synthetic oligonucleotide
  Antisense strand to SEQ ID NO: 2272910
uaccguggagcauaggucc

SEQ ID NO: 2272912 - RNA, 19 nt, Artificial Sequence
  Description of Artificial Sequence: Synthetic oligonucleotide
  Sense strand starting at position 2659 of SEQ ID NO: 1884532
ggcacuuaauaggugauca

SEQ ID NO: 2272913 - RNA, 19 nt, Artificial Sequence
  Description of Artificial Sequence: Synthetic oligonucleotide
  Antisense strand to SEQ ID NO: 2272912
ugaucaccuauuaagugcc

SEQ ID NO: 2272914 - RNA, 19 nt, Artificial Sequence
  Description of Artificial Sequence: Synthetic oligonucleotide
  Sense strand starting at position 2781 of SEQ ID NO: 1884532
cugggaagauggcucauua

SEQ ID NO: 2272915 - RNA, 19 nt, Artificial Sequence
  Description of Artificial Sequence: Synthetic oligonucleotide
  Antisense strand to SEQ ID NO: 2272914
uaaugagccaucuucccag

SEQ ID NO: 2272916 - RNA, 19 nt, Artificial Sequence
  Description of Artificial Sequence: Synthetic oligonucleotide
  Sense strand starting at position 2925 of SEQ ID NO: 1884532
gcaccuacugcucaauagu

SEQ ID NO: 2272917 - RNA, 19 nt, Artificial Sequence
  Description of Artificial Sequence: Synthetic oligonucleotide
  Antisense strand to SEQ ID NO: 2272916
acuauugagcaguaggugc

SEQ ID NO: 2272918 - RNA, 19 nt, Artificial Sequence
  Description of Artificial Sequence: Synthetic oligonucleotide
  Sense strand starting at position 3054 of SEQ ID NO: 1884532
ggcuaaucacauugcauau

SEQ ID NO: 2272919 - RNA, 19 nt, Artificial Sequence
  Description of Artificial Sequence: Synthetic oligonucleotide
  Antisense strand to SEQ ID NO: 2272918
auaugcaaugugauuagcc

SEQ ID NO: 2272920 - RNA, 19 nt, Artificial Sequence
  Description of Artificial Sequence: Synthetic oligonucleotide
  Sense strand starting at position 3084 of SEQ ID NO: 1884532
aaguuugggagguaagcau

SEQ ID NO: 2272921 - RNA, 19 nt, Artificial Sequence
  Description of Artificial Sequence: Synthetic oligonucleotide
  Antisense strand to SEQ ID NO: 2272920
augcuuaccucccaaacuu

SEQ ID NO: 2272922 - RNA, 19 nt, Artificial Sequence
  Description of Artificial Sequence: Synthetic oligonucleotide
  Sense strand starting at position 3088 of SEQ ID NO: 1884532
uugggagguaagcaugauu

SEQ ID NO: 2272923 - RNA, 19 nt, Artificial Sequence
  Description of Artificial Sequence: Synthetic oligonucleotide
  Antisense strand to SEQ ID NO: 2272922
aaucaugcuuaccucccaa

SEQ ID NO: 2272924 - RNA, 19 nt, Artificial Sequence
  Description of Artificial Sequence: Synthetic oligonucleotide
  Sense strand starting at position 3136 of SEQ ID NO: 1884532
caggaaugcucaguaacuu

SEQ ID NO: 2272925 - RNA, 19 nt, Artificial Sequence
  Description of Artificial Sequence: Synthetic oligonucleotide
  Antisense strand to SEQ ID NO: 2272924
aaguuacugagcauuccug

SEQ ID NO: 2272926 - RNA, 19 nt, Artificial Sequence
  Description of Artificial Sequence: Synthetic oligonucleotide
  Sense strand starting at position 3137 of SEQ ID NO: 1884532
aggaaugcucaguaacuug

SEQ ID NO: 2272927 - RNA, 19 nt, Artificial Sequence
  Description of Artificial Sequence: Synthetic oligonucleotide
  Antisense strand to SEQ ID NO: 2272926
caaguuacugagcauuccu

SEQ ID NO: 2272928 - RNA, 19 nt, Artificial Sequence
  Description of Artificial Sequence: Synthetic oligonucleotide
  Sense strand starting at position 3290 of SEQ ID NO: 1884532
ccagcucuccagggaaguu

SEQ ID NO: 2272929 - RNA, 19 nt, Artificial Sequence
  Description of Artificial Sequence: Synthetic oligonucleotide
  Antisense strand to SEQ ID NO: 2272928
aacuucccuggagagcugg

SEQ ID NO: 2272930 - RNA, 19 nt, Artificial Sequence
  Description of Artificial Sequence: Synthetic oligonucleotide
  Sense strand starting at position 3381 of SEQ ID NO: 1884532
ucagcaggccaguaaauua

SEQ ID NO: 2272931 - RNA, 19 nt, Artificial Sequence
  Description of Artificial Sequence: Synthetic oligonucleotide
  Antisense strand to SEQ ID NO: 2272930
uaauuuacuggccugcuga

SEQ ID NO: 2272932 - RNA, 19 nt, Artificial Sequence
  Description of Artificial Sequence: Synthetic oligonucleotide
  Sense strand starting at position 3580 of SEQ ID NO: 1884532
gcacuuucuguccaggaga

SEQ ID NO: 2272933 - RNA, 19 nt, Artificial Sequence
  Description of Artificial Sequence: Synthetic oligonucleotide
  Antisense strand to SEQ ID NO: 2272932
ucuccuggacagaaagugc

SEQ ID NO: 2272934 - RNA, 19 nt, Artificial Sequence
  Description of Artificial Sequence: Synthetic oligonucleotide
  Sense strand starting at position 3582 of SEQ ID NO: 1884532
acuuucuguccaggagaag

SEQ ID NO: 2272935 - RNA, 19 nt, Artificial Sequence
  Description of Artificial Sequence: Synthetic oligonucleotide
  Antisense strand to SEQ ID NO: 2272934
cuucuccuggacagaaagu

SEQ ID NO: 2272936 - RNA, 19 nt, Artificial Sequence
  Description of Artificial Sequence: Synthetic oligonucleotide
  Sense strand starting at position 3710 of SEQ ID NO: 1884532
agugaaauggcagauguca

SEQ ID NO: 2272937 - RNA, 19 nt, Artificial Sequence
  Description of Artificial Sequence: Synthetic oligonucleotide
  Antisense strand to SEQ ID NO: 2272936
ugacaucugccauuucacu

SEQ ID NO: 2272938 - RNA, 19 nt, Artificial Sequence
  Description of Artificial Sequence: Synthetic oligonucleotide
  Sense strand starting at position 3771 of SEQ ID NO: 1884532
ucagcuguaccagguaaau

SEQ ID NO: 2272939 - RNA, 19 nt, Artificial Sequence
  Description of Artificial Sequence: Synthetic oligonucleotide
  Antisense strand to SEQ ID NO: 2272938
auuuaccugguacagcuga

SEQ ID NO: 2272940 - RNA, 19 nt, Artificial Sequence
  Description of Artificial Sequence: Synthetic oligonucleotide
  Sense strand starting at position 3849 of SEQ ID NO: 1884532
agucauugaguccauacua

SEQ ID NO: 2272941 - RNA, 19 nt, Artificial Sequence
  Description of Artificial Sequence: Synthetic oligonucleotide
  Antisense strand to SEQ ID NO: 2272940
uaguauggacucaaugacu

SEQ ID NO: 2272942 - RNA, 19 nt, Artificial Sequence
  Description of Artificial Sequence: Synthetic oligonucleotide
  Sense strand starting at position 25 of SEQ ID NO: 1884533
uugugaugaucaguccuuu

SEQ ID NO: 2272943 - RNA, 19 nt, Artificial Sequence
  Description of Artificial Sequence: Synthetic oligonucleotide
  Antisense strand to SEQ ID NO: 2272942
aaaggacugaucaucacaa

SEQ ID NO: 2272944 - RNA, 19 nt, Artificial Sequence
  Description of Artificial Sequence: Synthetic oligonucleotide
  Sense strand starting at position 29 of SEQ ID NO: 1884533
gaugaucaguccuuugcuu

SEQ ID NO: 2272945 - RNA, 19 nt, Artificial Sequence
  Description of Artificial Sequence: Synthetic oligonucleotide
  Antisense strand to SEQ ID NO: 2272944
aagcaaaggacugaucauc

SEQ ID NO: 2272946 - RNA, 19 nt, Artificial Sequence
  Description of Artificial Sequence: Synthetic oligonucleotide
  Sense strand starting at position 290 of SEQ ID NO: 1884533
ucaagugauucgcuggucu

SEQ ID NO: 2272947 - RNA, 19 nt, Artificial Sequence
  Description of Artificial Sequence: Synthetic oligonucleotide
  Antisense strand to SEQ ID NO: 2272946
agaccagcgaaucacuuga

SEQ ID NO: 2272948 - RNA, 19 nt, Artificial Sequence
  Description of Artificial Sequence: Synthetic oligonucleotide
  Sense strand starting at position 541 of SEQ ID NO: 1884533
cugacauauguauguauac

SEQ ID NO: 2272949 - RNA, 19 nt, Artificial Sequence
  Description of Artificial Sequence: Synthetic oligonucleotide
  Antisense strand to SEQ ID NO: 2272948
guauacauacauaugucag

SEQ ID NO: 2272950 - RNA, 19 nt, Artificial Sequence
  Description of Artificial Sequence: Synthetic oligonucleotide
  Sense strand starting at position 548 of SEQ ID NO: 1884533
auguauguauaccuagaca

SEQ ID NO: 2272951 - RNA, 19 nt, Artificial Sequence
  Description of Artificial Sequence: Synthetic oligonucleotide
  Antisense strand to SEQ ID NO: 2272950
ugucuagguauacauacau

SEQ ID NO: 2272952 - RNA, 19 nt, Artificial Sequence
  Description of Artificial Sequence: Synthetic oligonucleotide
  Sense strand starting at position 646 of SEQ ID NO: 1884533
uccuauagguucugcauaa

SEQ ID NO: 2272953 - RNA, 19 nt, Artificial Sequence
  Description of Artificial Sequence: Synthetic oligonucleotide
  Antisense strand to SEQ ID NO: 2272952
uuaugcagaaccuauagga

SEQ ID NO: 2272954 - RNA, 19 nt, Artificial Sequence
  Description of Artificial Sequence: Synthetic oligonucleotide
  Sense strand starting at position 647 of SEQ ID NO: 1884533
ccuauagguucugcauaau

SEQ ID NO: 2272955 - RNA, 19 nt, Artificial Sequence
  Description of Artificial Sequence: Synthetic oligonucleotide
  Antisense strand to SEQ ID NO: 2272954
auuaugcagaaccuauagg

SEQ ID NO: 2272956 - RNA, 19 nt, Artificial Sequence
  Description of Artificial Sequence: Synthetic oligonucleotide
  Sense strand starting at position 650 of SEQ ID NO: 1884533
auagguucugcauaauuau

SEQ ID NO: 2272957 - RNA, 19 nt, Artificial Sequence
  Description of Artificial Sequence: Synthetic oligonucleotide
  Antisense strand to SEQ ID NO: 2272956
auaauuaugcagaaccuau

SEQ ID NO: 2272958 - RNA, 19 nt, Artificial Sequence
  Description of Artificial Sequence: Synthetic oligonucleotide
  Sense strand starting at position 1332 of SEQ ID NO: 1884533
uguaaaugcuauguuaauc

SEQ ID NO: 2272959 - RNA, 19 nt, Artificial Sequence
  Description of Artificial Sequence: Synthetic oligonucleotide
  Antisense strand to SEQ ID NO: 2272958
gauuaacauagcauuuaca

SEQ ID NO: 2272960 - RNA, 19 nt, Artificial Sequence
  Description of Artificial Sequence: Synthetic oligonucleotide
  Sense strand starting at position 1341 of SEQ ID NO: 1884533
uauguuaaucgcuguuaca

SEQ ID NO: 2272961 - RNA, 19 nt, Artificial Sequence
  Description of Artificial Sequence: Synthetic oligonucleotide
  Antisense strand to SEQ ID NO: 2272960
uguaacagcgauuaacaua

SEQ ID NO: 2272962 - RNA, 19 nt, Artificial Sequence
  Description of Artificial Sequence: Synthetic oligonucleotide
  Sense strand starting at position 1348 of SEQ ID NO: 1884533
aucgcuguuacaugguauu

SEQ ID NO: 2272963 - RNA, 19 nt, Artificial Sequence
  Description of Artificial Sequence: Synthetic oligonucleotide
  Antisense strand to SEQ ID NO: 2272962
aauaccauguaacagcgau

SEQ ID NO: 2272964 - RNA, 19 nt, Artificial Sequence
  Description of Artificial Sequence: Synthetic oligonucleotide
  Sense strand starting at position 1490 of SEQ ID NO: 1884533
uacagagagccgcaaguau

SEQ ID NO: 2272965 - RNA, 19 nt, Artificial Sequence
  Description of Artificial Sequence: Synthetic oligonucleotide
  Antisense strand to SEQ ID NO: 2272964
auacuugcggcucucugua

SEQ ID NO: 2272966 - RNA, 19 nt, Artificial Sequence
  Description of Artificial Sequence: Synthetic oligonucleotide
  Sense strand starting at position 1505 of SEQ ID NO: 1884533
guauccaucuucugggacu

SEQ ID NO: 2272967 - RNA, 19 nt, Artificial Sequence
  Description of Artificial Sequence: Synthetic oligonucleotide
  Antisense strand to SEQ ID NO: 2272966
agucccagaagauggauac

SEQ ID NO: 2272968 - RNA, 19 nt, Artificial Sequence
  Description of Artificial Sequence: Synthetic oligonucleotide
  Sense strand starting at position 1507 of SEQ ID NO: 1884533
auccaucuucugggacuga

SEQ ID NO: 2272969 - RNA, 19 nt, Artificial Sequence
  Description of Artificial Sequence: Synthetic oligonucleotide
  Antisense strand to SEQ ID NO: 2272968
ucagucccagaagauggau

SEQ ID NO: 2272970 - RNA, 19 nt, Artificial Sequence
  Description of Artificial Sequence: Synthetic oligonucleotide
  Sense strand starting at position 1534 of SEQ ID NO: 1884533
acucaauaccauggugcaa

SEQ ID NO: 2272971 - RNA, 19 nt, Artificial Sequence
  Description of Artificial Sequence: Synthetic oligonucleotide
  Antisense strand to SEQ ID NO: 2272970
uugcaccaugguauugagu

SEQ ID NO: 2272972 - RNA, 19 nt, Artificial Sequence
  Description of Artificial Sequence: Synthetic oligonucleotide
  Sense strand starting at position 1561 of SEQ ID NO: 1884533
ucaugauauuggugaaccu

SEQ ID NO: 2272973 - RNA, 19 nt, Artificial Sequence
  Description of Artificial Sequence: Synthetic oligonucleotide
  Antisense strand to SEQ ID NO: 2272972
agguucaccaauaucauga

SEQ ID NO: 2272974 - RNA, 19 nt, Artificial Sequence
  Description of Artificial Sequence: Synthetic oligonucleotide
  Sense strand starting at position 1591 of SEQ ID NO: 1884533
gcuugcauugcugaaugau

SEQ ID NO: 2272975 - RNA, 19 nt, Artificial Sequence
  Description of Artificial Sequence: Synthetic oligonucleotide
  Antisense strand to SEQ ID NO: 2272974
aucauucagcaaugcaagc

SEQ ID NO: 2272976 - RNA, 19 nt, Artificial Sequence
  Description of Artificial Sequence: Synthetic oligonucleotide
  Sense strand starting at position 1600 of SEQ ID NO: 1884533
gcugaaugaucuccacccu

SEQ ID NO: 2272977 - RNA, 19 nt, Artificial Sequence
  Description of Artificial Sequence: Synthetic oligonucleotide
  Antisense strand to SEQ ID NO: 2272976
aggguggagaucauucagc

SEQ ID NO: 2272978 - RNA, 19 nt, Artificial Sequence
  Description of Artificial Sequence: Synthetic oligonucleotide
  Sense strand starting at position 1606 of SEQ ID NO: 1884533
ugaucuccacccugugaau

SEQ ID NO: 2272979 - RNA, 19 nt, Artificial Sequence
  Description of Artificial Sequence: Synthetic oligonucleotide
  Antisense strand to SEQ ID NO: 2272978
auucacaggguggagauca

SEQ ID NO: 2272980 - RNA, 19 nt, Artificial Sequence
  Description of Artificial Sequence: Synthetic oligonucleotide
  Sense strand starting at position 1617 of SEQ ID NO: 1884533
cugugaaugugucuacugu

SEQ ID NO: 2272981 - RNA, 19 nt, Artificial Sequence
  Description of Artificial Sequence: Synthetic oligonucleotide
  Antisense strand to SEQ ID NO: 2272980
acaguagacacauucacag

SEQ ID NO: 2272982 - RNA, 19 nt, Artificial Sequence
  Description of Artificial Sequence: Synthetic oligonucleotide
  Sense strand starting at position 1618 of SEQ ID NO: 1884533
ugugaaugugucuacugua

SEQ ID NO: 2272983 - RNA, 19 nt, Artificial Sequence
  Description of Artificial Sequence: Synthetic oligonucleotide
  Antisense strand to SEQ ID NO: 2272982
uacaguagacacauucaca

SEQ ID NO: 2272984 - RNA, 19 nt, Artificial Sequence
  Description of Artificial Sequence: Synthetic oligonucleotide
  Sense strand starting at position 1621 of SEQ ID NO: 1884533
gaaugugucuacuguaauu

SEQ ID NO: 2272985 - RNA, 19 nt, Artificial Sequence
  Description of Artificial Sequence: Synthetic oligonucleotide
  Antisense strand to SEQ ID NO: 2272984
aauuacaguagacacauuc

SEQ ID NO: 2272986 - RNA, 19 nt, Artificial Sequence
  Description of Artificial Sequence: Synthetic oligonucleotide
  Sense strand starting at position 1732 of SEQ ID NO: 1884533
uggcgcacuugucagagaa

SEQ ID NO: 2272987 - RNA, 19 nt, Artificial Sequence
  Description of Artificial Sequence: Synthetic oligonucleotide
  Antisense strand to SEQ ID NO: 2272986
uucucugacaagugcgcca

SEQ ID NO: 2272988 - RNA, 19 nt, Artificial Sequence
  Description of Artificial Sequence: Synthetic oligonucleotide
  Sense strand starting at position 1799 of SEQ ID NO: 1884533
accuccacuucgugagaua

SEQ ID NO: 2272989 - RNA, 19 nt, Artificial Sequence
  Description of Artificial Sequence: Synthetic oligonucleotide
  Antisense strand to SEQ ID NO: 2272988
uaucucacgaaguggaggu

SEQ ID NO: 2272990 - RNA, 19 nt, Artificial Sequence
  Description of Artificial Sequence: Synthetic oligonucleotide
  Sense strand starting at position 1800 of SEQ ID NO: 1884533
ccuccacuucgugagauaa

SEQ ID NO: 2272991 - RNA, 19 nt, Artificial Sequence
  Description of Artificial Sequence: Synthetic oligonucleotide
  Antisense strand to SEQ ID NO: 2272990
uuaucucacgaaguggagg

SEQ ID NO: 2272992 - RNA, 19 nt, Artificial Sequence
  Description of Artificial Sequence: Synthetic oligonucleotide
  Sense strand starting at position 1812 of SEQ ID NO: 1884533
gagauaaggccagauugcu

SEQ ID NO: 2272993 - RNA, 19 nt, Artificial Sequence
  Description of Artificial Sequence: Synthetic oligonucleotide
  Antisense strand to SEQ ID NO: 2272992
agcaaucuggccuuaucuc

SEQ ID NO: 2272994 - RNA, 19 nt, Artificial Sequence
  Description of Artificial Sequence: Synthetic oligonucleotide
  Sense strand starting at position 2033 of SEQ ID NO: 1884533
aucucauuguggucugaau

SEQ ID NO: 2272995 - RNA, 19 nt, Artificial Sequence
  Description of Artificial Sequence: Synthetic oligonucleotide
  Antisense strand to SEQ ID NO: 2272994
auucagaccacaaugagau

SEQ ID NO: 2272996 - RNA, 19 nt, Artificial Sequence
  Description of Artificial Sequence: Synthetic oligonucleotide
  Sense strand starting at position 2076 of SEQ ID NO: 1884533
ggcugagccucccuuagau

SEQ ID NO: 2272997 - RNA, 19 nt, Artificial Sequence
  Description of Artificial Sequence: Synthetic oligonucleotide
  Antisense strand to SEQ ID NO: 2272996
aucuaagggaggcucagcc

SEQ ID NO: 2272998 - RNA, 19 nt, Artificial Sequence
  Description of Artificial Sequence: Synthetic oligonucleotide
  Sense strand starting at position 2085 of SEQ ID NO: 1884533
ucccuuagaugguauuuga

SEQ ID NO: 2272999 - RNA, 19 nt, Artificial Sequence
  Description of Artificial Sequence: Synthetic oligonucleotide
  Antisense strand to SEQ ID NO: 2272998
ucaaauaccaucuaaggga

SEQ ID NO: 2273000 - RNA, 19 nt, Artificial Sequence
  Description of Artificial Sequence: Synthetic oligonucleotide
  Sense strand starting at position 2160 of SEQ ID NO: 1884533
uuuauauuggauugcuuga

SEQ ID NO: 2273001 - RNA, 19 nt, Artificial Sequence
  Description of Artificial Sequence: Synthetic oligonucleotide
  Antisense strand to SEQ ID NO: 2273000
ucaagcaauccaauauaaa

SEQ ID NO: 2273002 - RNA, 19 nt, Artificial Sequence
  Description of Artificial Sequence: Synthetic oligonucleotide
  Sense strand starting at position 2162 of SEQ ID NO: 1884533
uauauuggauugcuugauu

SEQ ID NO: 2273003 - RNA, 19 nt, Artificial Sequence
  Description of Artificial Sequence: Synthetic oligonucleotide
  Antisense strand to SEQ ID NO: 2273002
aaucaagcaauccaauaua

SEQ ID NO: 2273004 - RNA, 19 nt, Artificial Sequence
  Description of Artificial Sequence: Synthetic oligonucleotide
  Sense strand starting at position 2186 of SEQ ID NO: 1884533
uuccuugauuugcaagagu

SEQ ID NO: 2273005 - RNA, 19 nt, Artificial Sequence
  Description of Artificial Sequence: Synthetic oligonucleotide
  Antisense strand to SEQ ID NO: 2273004
acucuugcaaaucaaggaa

SEQ ID NO: 2273006 - RNA, 19 nt, Artificial Sequence
  Description of Artificial Sequence: Synthetic oligonucleotide
  Sense strand starting at position 2246 of SEQ ID NO: 1884533
ggcaucuccaguugugacu

SEQ ID NO: 2273007 - RNA, 19 nt, Artificial Sequence
  Description of Artificial Sequence: Synthetic oligonucleotide
  Antisense strand to SEQ ID NO: 2273006
agucacaacuggagaugcc

SEQ ID NO: 2273008 - RNA, 19 nt, Artificial Sequence
  Description of Artificial Sequence: Synthetic oligonucleotide
  Sense strand starting at position 2329 of SEQ ID NO: 1884533
gccacuuggcauuguuagu

SEQ ID NO: 2273009 - RNA, 19 nt, Artificial Sequence
  Description of Artificial Sequence: Synthetic oligonucleotide
  Antisense strand to SEQ ID NO: 2273008
acuaacaaugccaaguggc

SEQ ID NO: 2273010 - RNA, 19 nt, Artificial Sequence
  Description of Artificial Sequence: Synthetic oligonucleotide
  Sense strand starting at position 2367 of SEQ ID NO: 1884533
cucucagagcccuguuuaa

SEQ ID NO: 2273011 - RNA, 19 nt, Artificial Sequence
  Description of Artificial Sequence: Synthetic oligonucleotide
  Antisense strand to SEQ ID NO: 2273010
uuaaacagggcucugagag

SEQ ID NO: 2273012 - RNA, 19 nt, Artificial Sequence
  Description of Artificial Sequence: Synthetic oligonucleotide
  Sense strand starting at position 2496 of SEQ ID NO: 1884533
uuggguugugggcgaguau

SEQ ID NO: 2273013 - RNA, 19 nt, Artificial Sequence
  Description of Artificial Sequence: Synthetic oligonucleotide
  Antisense strand to SEQ ID NO: 2273012
auacucgcccacaacccaa

SEQ ID NO: 2273014 - RNA, 19 nt, Artificial Sequence
  Description of Artificial Sequence: Synthetic oligonucleotide
  Sense strand starting at position 2507 of SEQ ID NO: 1884533
gcgaguaucccgggacaac

SEQ ID NO: 2273015 - RNA, 19 nt, Artificial Sequence
  Description of Artificial Sequence: Synthetic oligonucleotide
  Antisense strand to SEQ ID NO: 2273014
guugucccgggauacucgc

SEQ ID NO: 2273016 - RNA, 19 nt, Artificial Sequence
  Description of Artificial Sequence: Synthetic oligonucleotide
  Sense strand starting at position 2508 of SEQ ID NO: 1884533
cgaguaucccgggacaacu

SEQ ID NO: 2273017 - RNA, 19 nt, Artificial Sequence
  Description of Artificial Sequence: Synthetic oligonucleotide
  Antisense strand to SEQ ID NO: 2273016
aguugucccgggauacucg

SEQ ID NO: 2273018 - RNA, 19 nt, Artificial Sequence
  Description of Artificial Sequence: Synthetic oligonucleotide
  Sense strand starting at position 2558 of SEQ ID NO: 1884533
ccgucucgguuauuuauca

SEQ ID NO: 2273019 - RNA, 19 nt, Artificial Sequence
  Description of Artificial Sequence: Synthetic oligonucleotide
  Antisense strand to SEQ ID NO: 2273018
ugauaaauaaccgagacgg

SEQ ID NO: 2273020 - RNA, 19 nt, Artificial Sequence
  Description of Artificial Sequence: Synthetic oligonucleotide
  Sense strand starting at position 2956 of SEQ ID NO: 1884533
ucaguuaucucagcuggaa

SEQ ID NO: 2273021 - RNA, 19 nt, Artificial Sequence
  Description of Artificial Sequence: Synthetic oligonucleotide
  Antisense strand to SEQ ID NO: 2273020
uuccagcugagauaacuga

SEQ ID NO: 2273022 - RNA, 19 nt, Artificial Sequence
  Description of Artificial Sequence: Synthetic oligonucleotide
  Sense strand starting at position 2203 of SEQ ID NO: 1884534
gcggucacugcgagccauu

SEQ ID NO: 2273023 - RNA, 19 nt, Artificial Sequence
  Description of Artificial Sequence: Synthetic oligonucleotide
  Antisense strand to SEQ ID NO: 2273022
aauggcucgcagugaccgc

SEQ ID NO: 2273024 - RNA, 19 nt, Artificial Sequence
  Description of Artificial Sequence: Synthetic oligonucleotide
  Sense strand starting at position 2255 of SEQ ID NO: 1884534
gggaucacuucaguguagu

SEQ ID NO: 2273025 - RNA, 19 nt, Artificial Sequence
  Description of Artificial Sequence: Synthetic oligonucleotide
  Antisense strand to SEQ ID NO: 2273024
acuacacugaagugauccc

SEQ ID NO: 2273026 - RNA, 19 nt, Artificial Sequence
  Description of Artificial Sequence: Synthetic oligonucleotide
  Sense strand starting at position 2266 of SEQ ID NO: 1884534
aguguaguaacucgaaaca

SEQ ID NO: 2273027 - RNA, 19 nt, Artificial Sequence
  Description of Artificial Sequence: Synthetic oligonucleotide
  Antisense strand to SEQ ID NO: 2273026
uguuucgaguuacuacacu

SEQ ID NO: 2273028 - RNA, 19 nt, Artificial Sequence
  Description of Artificial Sequence: Synthetic oligonucleotide
  Sense strand starting at position 2350 of SEQ ID NO: 1884534
gccuaauugcccuacagcu

SEQ ID NO: 2273029 - RNA, 19 nt, Artificial Sequence
  Description of Artificial Sequence: Synthetic oligonucleotide
  Antisense strand to SEQ ID NO: 2273028
agcuguagggcaauuaggc

SEQ ID NO: 2273030 - RNA, 19 nt, Artificial Sequence
  Description of Artificial Sequence: Synthetic oligonucleotide
  Sense strand starting at position 2589 of SEQ ID NO: 1884534
gcgggagcuccuggcagaa

SEQ ID NO: 2273031 - RNA, 19 nt, Artificial Sequence
  Description of Artificial Sequence: Synthetic oligonucleotide
  Antisense strand to SEQ ID NO: 2273030
uucugccaggagcucccgc

SEQ ID NO: 2273032 - RNA, 19 nt, Artificial Sequence
  Description of Artificial Sequence: Synthetic oligonucleotide
  Sense strand starting at position 2763 of SEQ ID NO: 1884534
gggucagucugagcugagu

SEQ ID NO: 2273033 - RNA, 19 nt, Artificial Sequence
  Description of Artificial Sequence: Synthetic oligonucleotide
  Antisense strand to SEQ ID NO: 2273032
acucagcucagacugaccc

SEQ ID NO: 2273034 - RNA, 19 nt, Artificial Sequence
  Description of Artificial Sequence: Synthetic oligonucleotide
  Sense strand starting at position 2765 of SEQ ID NO: 1884534
gucagucugagcugaguga

SEQ ID NO: 2273035 - RNA, 19 nt, Artificial Sequence
  Description of Artificial Sequence: Synthetic oligonucleotide
  Antisense strand to SEQ ID NO: 2273034
ucacucagcucagacugac

SEQ ID NO: 2273036 - RNA, 19 nt, Artificial Sequence
  Description of Artificial Sequence: Synthetic oligonucleotide
  Sense strand starting at position 2848 of SEQ ID NO: 1884534
cuguguuccuaaccauaaa

SEQ ID NO: 2273037 - RNA, 19 nt, Artificial Sequence
  Description of Artificial Sequence: Synthetic oligonucleotide
  Antisense strand to SEQ ID NO: 2273036
uuuaugguuaggaacacag

SEQ ID NO: 2273038 - RNA, 19 nt, Artificial Sequence
  Description of Artificial Sequence: Synthetic oligonucleotide
  Sense strand starting at position 2931 of SEQ ID NO: 1884534
cucugauucucuggacaaa

SEQ ID NO: 2273039 - RNA, 19 nt, Artificial Sequence
  Description of Artificial Sequence: Synthetic oligonucleotide
  Antisense strand to SEQ ID NO: 2273038
uuuguccagagaaucagag

SEQ ID NO: 2273040 - RNA, 19 nt, Artificial Sequence
  Description of Artificial Sequence: Synthetic oligonucleotide
  Sense strand starting at position 3109 of SEQ ID NO: 1884534
gcuggugugacccauguaa

SEQ ID NO: 2273041 - RNA, 19 nt, Artificial Sequence
  Description of Artificial Sequence: Synthetic oligonucleotide
  Antisense strand to SEQ ID NO: 2273040
uuacaugggucacaccagc

SEQ ID NO: 2273042 - RNA, 19 nt, Artificial Sequence
  Description of Artificial Sequence: Synthetic oligonucleotide
  Sense strand starting at position 3111 of SEQ ID NO: 1884534
uggugugacccauguaacu

SEQ ID NO: 2273043 - RNA, 19 nt, Artificial Sequence
  Description of Artificial Sequence: Synthetic oligonucleotide
  Antisense strand to SEQ ID NO: 2273042
aguuacaugggucacacca

SEQ ID NO: 2273044 - RNA, 19 nt, Artificial Sequence
  Description of Artificial Sequence: Synthetic oligonucleotide
  Sense strand starting at position 3740 of SEQ ID NO: 1884534
gugaaaugcauagaucgua

SEQ ID NO: 2273045 - RNA, 19 nt, Artificial Sequence
  Description of Artificial Sequence: Synthetic oligonucleotide
  Antisense strand to SEQ ID NO: 2273044
uacgaucuaugcauuucac

SEQ ID NO: 2273046 - RNA, 19 nt, Artificial Sequence
  Description of Artificial Sequence: Synthetic oligonucleotide
  Sense strand starting at position 3743 of SEQ ID NO: 1884534
aaaugcauagaucguaagu

SEQ ID NO: 2273047 - RNA, 19 nt, Artificial Sequence
  Description of Artificial Sequence: Synthetic oligonucleotide
  Antisense strand to SEQ ID NO: 2273046
acuuacgaucuaugcauuu

SEQ ID NO: 2273048 - RNA, 19 nt, Artificial Sequence
  Description of Artificial Sequence: Synthetic oligonucleotide
  Sense strand starting at position 3745 of SEQ ID NO: 1884534
augcauagaucguaagugu

SEQ ID NO: 2273049 - RNA, 19 nt, Artificial Sequence
  Description of Artificial Sequence: Synthetic oligonucleotide
  Antisense strand to SEQ ID NO: 2273048
acacuuacgaucuaugcau

SEQ ID NO: 2273050 - RNA, 19 nt, Artificial Sequence
  Description of Artificial Sequence: Synthetic oligonucleotide
  Sense strand starting at position 3748 of SEQ ID NO: 1884534
cauagaucguaagugucuu

SEQ ID NO: 2273051 - RNA, 19 nt, Artificial Sequence
  Description of Artificial Sequence: Synthetic oligonucleotide
  Antisense strand to SEQ ID NO: 2273050
aagacacuuacgaucuaug

SEQ ID NO: 2273052 - RNA, 19 nt, Artificial Sequence
  Description of Artificial Sequence: Synthetic oligonucleotide
  Sense strand starting at position 3754 of SEQ ID NO: 1884534
ucguaagugucuucuugga

SEQ ID NO: 2273053 - RNA, 19 nt, Artificial Sequence
  Description of Artificial Sequence: Synthetic oligonucleotide
  Antisense strand to SEQ ID NO: 2273052
uccaagaagacacuuacga

SEQ ID NO: 2273054 - RNA, 19 nt, Artificial Sequence
  Description of Artificial Sequence: Synthetic oligonucleotide
  Sense strand starting at position 3756 of SEQ ID NO: 1884534
guaagugucuucuuggaug

SEQ ID NO: 2273055 - RNA, 19 nt, Artificial Sequence
  Description of Artificial Sequence: Synthetic oligonucleotide
  Antisense strand to SEQ ID NO: 2273054
cauccaagaagacacuuac

SEQ ID NO: 2273056 - RNA, 19 nt, Artificial Sequence
  Description of Artificial Sequence: Synthetic oligonucleotide
  Sense strand starting at position 3815 of SEQ ID NO: 1884534
acccaagaguucucucaag

SEQ ID NO: 2273057 - RNA, 19 nt, Artificial Sequence
  Description of Artificial Sequence: Synthetic oligonucleotide
  Antisense strand to SEQ ID NO: 2273056
cuugagagaacucuugggu

SEQ ID NO: 2273058 - RNA, 19 nt, Artificial Sequence
  Description of Artificial Sequence: Synthetic oligonucleotide
  Sense strand starting at position 3877 of SEQ ID NO: 1884534
ugaccucuauccuuaugga

SEQ ID NO: 2273059 - RNA, 19 nt, Artificial Sequence
  Description of Artificial Sequence: Synthetic oligonucleotide
  Antisense strand to SEQ ID NO: 2273058
uccauaaggauagagguca

SEQ ID NO: 2273060 - RNA, 19 nt, Artificial Sequence
  Description of Artificial Sequence: Synthetic oligonucleotide
  Sense strand starting at position 91 of SEQ ID NO: 1884535
aaauaaacguuaugggaga

SEQ ID NO: 2273061 - RNA, 19 nt, Artificial Sequence
  Description of Artificial Sequence: Synthetic oligonucleotide
  Antisense strand to SEQ ID NO: 2273060
ucucccauaacguuuauuu

SEQ ID NO: 2273062 - RNA, 19 nt, Artificial Sequence
  Description of Artificial Sequence: Synthetic oligonucleotide
  Sense strand starting at position 189 of SEQ ID NO: 1884535
ccugacugguccgaggagu

SEQ ID NO: 2273063 - RNA, 19 nt, Artificial Sequence
  Description of Artificial Sequence: Synthetic oligonucleotide
  Antisense strand to SEQ ID NO: 2273062
acuccucggaccagucagg

SEQ ID NO: 2273064 - RNA, 19 nt, Artificial Sequence
  Description of Artificial Sequence: Synthetic oligonucleotide
  Sense strand starting at position 243 of SEQ ID NO: 1884535
ugcccugucuuggacacau

SEQ ID NO: 2273065 - RNA, 19 nt, Artificial Sequence
  Description of Artificial Sequence: Synthetic oligonucleotide
  Antisense strand to SEQ ID NO: 2273064
auguguccaagacagggca

SEQ ID NO: 2273066 - RNA, 19 nt, Artificial Sequence
  Description of Artificial Sequence: Synthetic oligonucleotide
  Sense strand starting at position 269 of SEQ ID NO: 1884535
cacagacaucaguggcuuu

SEQ ID NO: 2273067 - RNA, 19 nt, Artificial Sequence
  Description of Artificial Sequence: Synthetic oligonucleotide
  Antisense strand to SEQ ID NO: 2273066
aaagccacugaugucugug

SEQ ID NO: 2273068 - RNA, 19 nt, Artificial Sequence
  Description of Artificial Sequence: Synthetic oligonucleotide
  Sense strand starting at position 882 of SEQ ID NO: 1884535
gcuggucuucuaggcauau

SEQ ID NO: 2273069 - RNA, 19 nt, Artificial Sequence
  Description of Artificial Sequence: Synthetic oligonucleotide
  Antisense strand to SEQ ID NO: 2273068
auaugccuagaagaccagc

SEQ ID NO: 2273070 - RNA, 19 nt, Artificial Sequence
  Description of Artificial Sequence: Synthetic oligonucleotide
  Sense strand starting at position 884 of SEQ ID NO: 1884535
uggucuucuaggcauaugu

SEQ ID NO: 2273071 - RNA, 19 nt, Artificial Sequence
  Description of Artificial Sequence: Synthetic oligonucleotide
  Antisense strand to SEQ ID NO: 2273070
acauaugccuagaagacca

SEQ ID NO: 2273072 - RNA, 19 nt, Artificial Sequence
  Description of Artificial Sequence: Synthetic oligonucleotide
  Sense strand starting at position 954 of SEQ ID NO: 1884535
gggucaugugggcagguaa

SEQ ID NO: 2273073 - RNA, 19 nt, Artificial Sequence
  Description of Artificial Sequence: Synthetic oligonucleotide
  Antisense strand to SEQ ID NO: 2273072
uuaccugcccacaugaccc

SEQ ID NO: 2273074 - RNA, 19 nt, Artificial Sequence
  Description of Artificial Sequence: Synthetic oligonucleotide
  Sense strand starting at position 993 of SEQ ID NO: 1884535
gagcuuacucagcaucaga

SEQ ID NO: 2273075 - RNA, 19 nt, Artificial Sequence
  Description of Artificial Sequence: Synthetic oligonucleotide
  Antisense strand to SEQ ID NO: 2273074
ucugaugcugaguaagcuc

SEQ ID NO: 2273076 - RNA, 19 nt, Artificial Sequence
  Description of Artificial Sequence: Synthetic oligonucleotide
  Sense strand starting at position 1433 of SEQ ID NO: 1884535
uguccugugccacagaagu

SEQ ID NO: 2273077 - RNA, 19 nt, Artificial Sequence
  Description of Artificial Sequence: Synthetic oligonucleotide
  Antisense strand to SEQ ID NO: 2273076
acuucuguggcacaggaca

SEQ ID NO: 2273078 - RNA, 19 nt, Artificial Sequence
  Description of Artificial Sequence: Synthetic oligonucleotide
  Sense strand starting at position 2039 of SEQ ID NO: 1884535
ccggcauccugacaacagu

SEQ ID NO: 2273079 - RNA, 19 nt, Artificial Sequence
  Description of Artificial Sequence: Synthetic oligonucleotide
  Antisense strand to SEQ ID NO: 2273078
acuguugucaggaugccgg

SEQ ID NO: 2273080 - RNA, 19 nt, Artificial Sequence
  Description of Artificial Sequence: Synthetic oligonucleotide
  Sense strand starting at position 2061 of SEQ ID NO: 1884535
aaaugucugccugguuacu

SEQ ID NO: 2273081 - RNA, 19 nt, Artificial Sequence
  Description of Artificial Sequence: Synthetic oligonucleotide
  Antisense strand to SEQ ID NO: 2273080
aguaaccaggcagacauuu

SEQ ID NO: 2273082 - RNA, 19 nt, Artificial Sequence
  Description of Artificial Sequence: Synthetic oligonucleotide
  Sense strand starting at position 2174 of SEQ ID NO: 1884535
gggauaauaguacgaaccu

SEQ ID NO: 2273083 - RNA, 19 nt, Artificial Sequence
  Description of Artificial Sequence: Synthetic oligonucleotide
  Antisense strand to SEQ ID NO: 2273082
agguucguacuauuauccc

SEQ ID NO: 2273084 - RNA, 19 nt, Artificial Sequence
  Description of Artificial Sequence: Synthetic oligonucleotide
  Sense strand starting at position 2214 of SEQ ID NO: 1884535
aaauaacacguguaaauug

SEQ ID NO: 2273085 - RNA, 19 nt, Artificial Sequence
  Description of Artificial Sequence: Synthetic oligonucleotide
  Antisense strand to SEQ ID NO: 2273084
caauuuacacguguuauuu

SEQ ID NO: 2273086 - RNA, 19 nt, Artificial Sequence
  Description of Artificial Sequence: Synthetic oligonucleotide
  Sense strand starting at position 2221 of SEQ ID NO: 1884535
acguguaaauugcuuaaau

SEQ ID NO: 2273087 - RNA, 19 nt, Artificial Sequence
  Description of Artificial Sequence: Synthetic oligonucleotide
  Antisense strand to SEQ ID NO: 2273086
auuuaagcaauuuacacgu

SEQ ID NO: 2273088 - RNA, 19 nt, Artificial Sequence
  Description of Artificial Sequence: Synthetic oligonucleotide
  Sense strand starting at position 2222 of SEQ ID NO: 1884535
cguguaaauugcuuaaauc

SEQ ID NO: 2273089 - RNA, 19 nt, Artificial Sequence
  Description of Artificial Sequence: Synthetic oligonucleotide
  Antisense strand to SEQ ID NO: 2273088
gauuuaagcaauuuacacg

SEQ ID NO: 2273090 - RNA, 19 nt, Artificial Sequence
  Description of Artificial Sequence: Synthetic oligonucleotide
  Sense strand starting at position 2223 of SEQ ID NO: 1884535
guguaaauugcuuaaaucc

SEQ ID NO: 2273091 - RNA, 19 nt, Artificial Sequence
  Description of Artificial Sequence: Synthetic oligonucleotide
  Antisense strand to SEQ ID NO: 2273090
ggauuuaagcaauuuacac

SEQ ID NO: 2273092 - RNA, 19 nt, Artificial Sequence
  Description of Artificial Sequence: Synthetic oligonucleotide
  Sense strand starting at position 2310 of SEQ ID NO: 1884535
guuucuguacugcgagcua

SEQ ID NO: 2273093 - RNA, 19 nt, Artificial Sequence
  Description of Artificial Sequence: Synthetic oligonucleotide
  Antisense strand to SEQ ID NO: 2273092
uagcucgcaguacagaaac

SEQ ID NO: 2273094 - RNA, 19 nt, Artificial Sequence
  Description of Artificial Sequence: Synthetic oligonucleotide
  Sense strand starting at position 2321 of SEQ ID NO: 1884535
gcgagcuaagcauggauuu

SEQ ID NO: 2273095 - RNA, 19 nt, Artificial Sequence
  Description of Artificial Sequence: Synthetic oligonucleotide
  Antisense strand to SEQ ID NO: 2273094
aaauccaugcuuagcucgc

SEQ ID NO: 2273096 - RNA, 19 nt, Artificial Sequence
  Description of Artificial Sequence: Synthetic oligonucleotide
  Sense strand starting at position 2865 of SEQ ID NO: 1884535
ggcuuagcacaggaaguua

SEQ ID NO: 2273097 - RNA, 19 nt, Artificial Sequence
  Description of Artificial Sequence: Synthetic oligonucleotide
  Antisense strand to SEQ ID NO: 2273096
uaacuuccugugcuaagcc

SEQ ID NO: 2273098 - RNA, 19 nt, Artificial Sequence
  Description of Artificial Sequence: Synthetic oligonucleotide
  Sense strand starting at position 2873 of SEQ ID NO: 1884535
acaggaaguuaucaauagu

SEQ ID NO: 2273099 - RNA, 19 nt, Artificial Sequence
  Description of Artificial Sequence: Synthetic oligonucleotide
  Antisense strand to SEQ ID NO: 2273098
acuauugauaacuuccugu

SEQ ID NO: 2273100 - RNA, 19 nt, Artificial Sequence
  Description of Artificial Sequence: Synthetic oligonucleotide
  Sense strand starting at position 2876 of SEQ ID NO: 1884535
ggaaguuaucaauagugug

SEQ ID NO: 2273101 - RNA, 19 nt, Artificial Sequence
  Description of Artificial Sequence: Synthetic oligonucleotide
  Antisense strand to SEQ ID NO: 2273100
cacacuauugauaacuucc

SEQ ID NO: 2273102 - RNA, 19 nt, Artificial Sequence
  Description of Artificial Sequence: Synthetic oligonucleotide
  Sense strand starting at position 2983 of SEQ ID NO: 1884535
gcgcuuaacuggucccauu

SEQ ID NO: 2273103 - RNA, 19 nt, Artificial Sequence
  Description of Artificial Sequence: Synthetic oligonucleotide
  Antisense strand to SEQ ID NO: 2273102
aaugggaccaguuaagcgc

SEQ ID NO: 2273104 - RNA, 19 nt, Artificial Sequence
  Description of Artificial Sequence: Synthetic oligonucleotide
  Sense strand starting at position 2993 of SEQ ID NO: 1884535
ggucccauucuacauauga

SEQ ID NO: 2273105 - RNA, 19 nt, Artificial Sequence
  Description of Artificial Sequence: Synthetic oligonucleotide
  Antisense strand to SEQ ID NO: 2273104
ucauauguagaaugggacc

SEQ ID NO: 2273106 - RNA, 19 nt, Artificial Sequence
  Description of Artificial Sequence: Synthetic oligonucleotide
  Sense strand starting at position 3393 of SEQ ID NO: 1884535
ggcuaagagacgggagauu

SEQ ID NO: 2273107 - RNA, 19 nt, Artificial Sequence
  Description of Artificial Sequence: Synthetic oligonucleotide
  Antisense strand to SEQ ID NO: 2273106
aaucucccgucucuuagcc

SEQ ID NO: 2273108 - RNA, 19 nt, Artificial Sequence
  Description of Artificial Sequence: Synthetic oligonucleotide
  Sense strand starting at position 3402 of SEQ ID NO: 1884535
acgggagauucuuuccaga

SEQ ID NO: 2273109 - RNA, 19 nt, Artificial Sequence
  Description of Artificial Sequence: Synthetic oligonucleotide
  Antisense strand to SEQ ID NO: 2273108
ucuggaaagaaucucccgu

SEQ ID NO: 2273110 - RNA, 19 nt, Artificial Sequence
  Description of Artificial Sequence: Synthetic oligonucleotide
  Sense strand starting at position 3405 of SEQ ID NO: 1884535
ggagauucuuuccagaagg

SEQ ID NO: 2273111 - RNA, 19 nt, Artificial Sequence
  Description of Artificial Sequence: Synthetic oligonucleotide
  Antisense strand to SEQ ID NO: 2273110
ccuucuggaaagaaucucc

SEQ ID NO: 2273112 - RNA, 19 nt, Artificial Sequence
  Description of Artificial Sequence: Synthetic oligonucleotide
  Sense strand starting at position 44 of SEQ ID NO: 1884536
ugauguaacucuucuauga

SEQ ID NO: 2273113 - RNA, 19 nt, Artificial Sequence
  Description of Artificial Sequence: Synthetic oligonucleotide
  Antisense strand to SEQ ID NO: 2273112
ucauagaagaguuacauca

SEQ ID NO: 2273114 - RNA, 19 nt, Artificial Sequence
  Description of Artificial Sequence: Synthetic oligonucleotide
  Sense strand starting at position 48 of SEQ ID NO: 1884536
guaacucuucuaugauagg

SEQ ID NO: 2273115 - RNA, 19 nt, Artificial Sequence
  Description of Artificial Sequence: Synthetic oligonucleotide
  Antisense strand to SEQ ID NO: 2273114
ccuaucauagaagaguuac

SEQ ID NO: 2273116 - RNA, 19 nt, Artificial Sequence
  Description of Artificial Sequence: Synthetic oligonucleotide
  Sense strand starting at position 218 of SEQ ID NO: 1884536
acaacacuuuauguaagua

SEQ ID NO: 2273117 - RNA, 19 nt, Artificial Sequence
  Description of Artificial Sequence: Synthetic oligonucleotide
  Antisense strand to SEQ ID NO: 2273116
uacuuacauaaaguguugu

SEQ ID NO: 2273118 - RNA, 19 nt, Artificial Sequence
  Description of Artificial Sequence: Synthetic oligonucleotide
  Sense strand starting at position 233 of SEQ ID NO: 1884536
aguacuauccaaugugaau

SEQ ID NO: 2273119 - RNA, 19 nt, Artificial Sequence
  Description of Artificial Sequence: Synthetic oligonucleotide
  Antisense strand to SEQ ID NO: 2273118
auucacauuggauaguacu

SEQ ID NO: 2273120 - RNA, 19 nt, Artificial Sequence
  Description of Artificial Sequence: Synthetic oligonucleotide
  Sense strand starting at position 246 of SEQ ID NO: 1884536
gugaauauaaugugaguua

SEQ ID NO: 2273121 - RNA, 19 nt, Artificial Sequence
  Description of Artificial Sequence: Synthetic oligonucleotide
  Antisense strand to SEQ ID NO: 2273120
uaacucacauuauauucac

SEQ ID NO: 2273122 - RNA, 19 nt, Artificial Sequence
  Description of Artificial Sequence: Synthetic oligonucleotide
  Sense strand starting at position 429 of SEQ ID NO: 1884536
agaaaugcauuguuaagua

SEQ ID NO: 2273123 - RNA, 19 nt, Artificial Sequence
  Description of Artificial Sequence: Synthetic oligonucleotide
  Antisense strand to SEQ ID NO: 2273122
uacuuaacaaugcauuucu

SEQ ID NO: 2273124 - RNA, 19 nt, Artificial Sequence
  Description of Artificial Sequence: Synthetic oligonucleotide
  Sense strand starting at position 496 of SEQ ID NO: 1884536
ugggauagcuuacccuaca

SEQ ID NO: 2273125 - RNA, 19 nt, Artificial Sequence
  Description of Artificial Sequence: Synthetic oligonucleotide
  Antisense strand to SEQ ID NO: 2273124
uguaggguaagcuauccca

SEQ ID NO: 2273126 - RNA, 19 nt, Artificial Sequence
  Description of Artificial Sequence: Synthetic oligonucleotide
  Sense strand starting at position 582 of SEQ ID NO: 1884536
gcaguuguaccacaaugau

SEQ ID NO: 2273127 - RNA, 19 nt, Artificial Sequence
  Description of Artificial Sequence: Synthetic oligonucleotide
  Antisense strand to SEQ ID NO: 2273126
aucauugugguacaacugc

SEQ ID NO: 2273128 - RNA, 19 nt, Artificial Sequence
  Description of Artificial Sequence: Synthetic oligonucleotide
  Sense strand starting at position 585 of SEQ ID NO: 1884536
guuguaccacaaugauaaa

SEQ ID NO: 2273129 - RNA, 19 nt, Artificial Sequence
  Description of Artificial Sequence: Synthetic oligonucleotide
  Antisense strand to SEQ ID NO: 2273128
uuuaucauugugguacaac

SEQ ID NO: 2273130 - RNA, 19 nt, Artificial Sequence
  Description of Artificial Sequence: Synthetic oligonucleotide
  Sense strand starting at position 691 of SEQ ID NO: 1884536
ucaguuguugaccaacagu

SEQ ID NO: 2273131 - RNA, 19 nt, Artificial Sequence
  Description of Artificial Sequence: Synthetic oligonucleotide
  Antisense strand to SEQ ID NO: 2273130
acuguuggucaacaacuga

SEQ ID NO: 2273132 - RNA, 19 nt, Artificial Sequence
  Description of Artificial Sequence: Synthetic oligonucleotide
  Sense strand starting at position 810 of SEQ ID NO: 1884536
ucucaauugggaggaguca

SEQ ID NO: 2273133 - RNA, 19 nt, Artificial Sequence
  Description of Artificial Sequence: Synthetic oligonucleotide
  Antisense strand to SEQ ID NO: 2273132
ugacuccucccaauugaga

SEQ ID NO: 2273134 - RNA, 19 nt, Artificial Sequence
  Description of Artificial Sequence: Synthetic oligonucleotide
  Sense strand starting at position 819 of SEQ ID NO: 1884536
ggaggagucaaaugucaga

SEQ ID NO: 2273135 - RNA, 19 nt, Artificial Sequence
  Description of Artificial Sequence: Synthetic oligonucleotide
  Antisense strand to SEQ ID NO: 2273134
ucugacauuugacuccucc

SEQ ID NO: 2273136 - RNA, 19 nt, Artificial Sequence
  Description of Artificial Sequence: Synthetic oligonucleotide
  Sense strand starting at position 1145 of SEQ ID NO: 1884536
uugaauuacugcucucaga

SEQ ID NO: 2273137 - RNA, 19 nt, Artificial Sequence
  Description of Artificial Sequence: Synthetic oligonucleotide
  Antisense strand to SEQ ID NO: 2273136
ucugagagcaguaauucaa

SEQ ID NO: 2273138 - RNA, 19 nt, Artificial Sequence
  Description of Artificial Sequence: Synthetic oligonucleotide
  Sense strand starting at position 1180 of SEQ ID NO: 1884536
aaguccuauguguaggauu

SEQ ID NO: 2273139 - RNA, 19 nt, Artificial Sequence
  Description of Artificial Sequence: Synthetic oligonucleotide
  Antisense strand to SEQ ID NO: 2273138
aauccuacacauaggacuu

SEQ ID NO: 2273140 - RNA, 19 nt, Artificial Sequence
  Description of Artificial Sequence: Synthetic oligonucleotide
  Sense strand starting at position 1182 of SEQ ID NO: 1884536
guccuauguguaggauuuc

SEQ ID NO: 2273141 - RNA, 19 nt, Artificial Sequence
  Description of Artificial Sequence: Synthetic oligonucleotide
  Antisense strand to SEQ ID NO: 2273140
gaaauccuacacauaggac

SEQ ID NO: 2273142 - RNA, 19 nt, Artificial Sequence
  Description of Artificial Sequence: Synthetic oligonucleotide
  Sense strand starting at position 1234 of SEQ ID NO: 1884536
ugcacagguccaugaagaa

SEQ ID NO: 2273143 - RNA, 19 nt, Artificial Sequence
  Description of Artificial Sequence: Synthetic oligonucleotide
  Antisense strand to SEQ ID NO: 2273142
uucuucauggaccugugca

SEQ ID NO: 2273144 - RNA, 19 nt, Artificial Sequence
  Description of Artificial Sequence: Synthetic oligonucleotide
  Sense strand starting at position 1426 of SEQ ID NO: 1884536
gcaaguggacauugacaca

SEQ ID NO: 2273145 - RNA, 19 nt, Artificial Sequence
  Description of Artificial Sequence: Synthetic oligonucleotide
  Antisense strand to SEQ ID NO: 2273144
ugugucaauguccacuugc

SEQ ID NO: 2273146 - RNA, 19 nt, Artificial Sequence
  Description of Artificial Sequence: Synthetic oligonucleotide
  Sense strand starting at position 1635 of SEQ ID NO: 1884536
ucacucaaucggcaaacau

SEQ ID NO: 2273147 - RNA, 19 nt, Artificial Sequence
  Description of Artificial Sequence: Synthetic oligonucleotide
  Antisense strand to SEQ ID NO: 2273146
auguuugccgauugaguga

SEQ ID NO: 2273148 - RNA, 19 nt, Artificial Sequence
  Description of Artificial Sequence: Synthetic oligonucleotide
  Sense strand starting at position 1745 of SEQ ID NO: 1884536
uagugcagauacucaugaa

SEQ ID NO: 2273149 - RNA, 19 nt, Artificial Sequence
  Description of Artificial Sequence: Synthetic oligonucleotide
  Antisense strand to SEQ ID NO: 2273148
uucaugaguaucugcacua

SEQ ID NO: 2273150 - RNA, 19 nt, Artificial Sequence
  Description of Artificial Sequence: Synthetic oligonucleotide
  Sense strand starting at position 1906 of SEQ ID NO: 1884536
ggguaauuaguuuaguuuc

SEQ ID NO: 2273151 - RNA, 19 nt, Artificial Sequence
  Description of Artificial Sequence: Synthetic oligonucleotide
  Antisense strand to SEQ ID NO: 2273150
gaaacuaaacuaauuaccc

SEQ ID NO: 2273152 - RNA, 19 nt, Artificial Sequence
  Description of Artificial Sequence: Synthetic oligonucleotide
  Sense strand starting at position 1962 of SEQ ID NO: 1884536
cuggucuuuggccagagau

SEQ ID NO: 2273153 - RNA, 19 nt, Artificial Sequence
  Description of Artificial Sequence: Synthetic oligonucleotide
  Antisense strand to SEQ ID NO: 2273152
aucucuggccaaagaccag

SEQ ID NO: 2273154 - RNA, 19 nt, Artificial Sequence
  Description of Artificial Sequence: Synthetic oligonucleotide
  Sense strand starting at position 1981 of SEQ ID NO: 1884536
uugagcauugcagaaacua

SEQ ID NO: 2273155 - RNA, 19 nt, Artificial Sequence
  Description of Artificial Sequence: Synthetic oligonucleotide
  Antisense strand to SEQ ID NO: 2273154
uaguuucugcaaugcucaa

SEQ ID NO: 2273156 - RNA, 19 nt, Artificial Sequence
  Description of Artificial Sequence: Synthetic oligonucleotide
  Sense strand starting at position 2085 of SEQ ID NO: 1884536
uuguguaaugaucauuaca

SEQ ID NO: 2273157 - RNA, 19 nt, Artificial Sequence
  Description of Artificial Sequence: Synthetic oligonucleotide
  Antisense strand to SEQ ID NO: 2273156
uguaaugaucauuacacaa

SEQ ID NO: 2273158 - RNA, 19 nt, Artificial Sequence
  Description of Artificial Sequence: Synthetic oligonucleotide
  Sense strand starting at position 2087 of SEQ ID NO: 1884536
guguaaugaucauuacacu

SEQ ID NO: 2273159 - RNA, 19 nt, Artificial Sequence
  Description of Artificial Sequence: Synthetic oligonucleotide
  Antisense strand to SEQ ID NO: 2273158
aguguaaugaucauuacac

SEQ ID NO: 2273160 - RNA, 19 nt, Artificial Sequence
  Description of Artificial Sequence: Synthetic oligonucleotide
  Sense strand starting at position 2103 of SEQ ID NO: 1884536
acuuaaucagccuaaggua

SEQ ID NO: 2273161 - RNA, 19 nt, Artificial Sequence
  Description of Artificial Sequence: Synthetic oligonucleotide
  Antisense strand to SEQ ID NO: 2273160
uaccuuaggcugauuaagu

SEQ ID NO: 2273162 - RNA, 19 nt, Artificial Sequence
  Description of Artificial Sequence: Synthetic oligonucleotide
  Sense strand starting at position 2470 of SEQ ID NO: 1884536
aggcaauguaauugagacu

SEQ ID NO: 2273163 - RNA, 19 nt, Artificial Sequence
  Description of Artificial Sequence: Synthetic oligonucleotide
  Antisense strand to SEQ ID NO: 2273162
agucucaauuacauugccu

SEQ ID NO: 2273164 - RNA, 19 nt, Artificial Sequence
  Description of Artificial Sequence: Synthetic oligonucleotide
  Sense strand starting at position 2556 of SEQ ID NO: 1884536
uucuacuucugggcaagau

SEQ ID NO: 2273165 - RNA, 19 nt, Artificial Sequence
  Description of Artificial Sequence: Synthetic oligonucleotide
  Antisense strand to SEQ ID NO: 2273164
aucuugcccagaaguagaa

SEQ ID NO: 2273166 - RNA, 19 nt, Artificial Sequence
  Description of Artificial Sequence: Synthetic oligonucleotide
  Sense strand starting at position 2557 of SEQ ID NO: 1884536
ucuacuucugggcaagauu

SEQ ID NO: 2273167 - RNA, 19 nt, Artificial Sequence
  Description of Artificial Sequence: Synthetic oligonucleotide
  Antisense strand to SEQ ID NO: 2273166
aaucuugcccagaaguaga

SEQ ID NO: 2273168 - RNA, 19 nt, Artificial Sequence
  Description of Artificial Sequence: Synthetic oligonucleotide
  Sense strand starting at position 2566 of SEQ ID NO: 1884536
gggcaagauugagcaauaa

SEQ ID NO: 2273169 - RNA, 19 nt, Artificial Sequence
  Description of Artificial Sequence: Synthetic oligonucleotide
  Antisense strand to SEQ ID NO: 2273168
uuauugcucaaucuugccc

SEQ ID NO: 2273170 - RNA, 19 nt, Artificial Sequence
  Description of Artificial Sequence: Synthetic oligonucleotide
  Sense strand starting at position 2576 of SEQ ID NO: 1884536
gagcaauaaggaugaaugu

SEQ ID NO: 2273171 - RNA, 19 nt, Artificial Sequence
  Description of Artificial Sequence: Synthetic oligonucleotide
  Antisense strand to SEQ ID NO: 2273170
acauucauccuuauugcuc

SEQ ID NO: 2273172 - RNA, 19 nt, Artificial Sequence
  Description of Artificial Sequence: Synthetic oligonucleotide
  Sense strand starting at position 2585 of SEQ ID NO: 1884536
ggaugaauguauguuacag

SEQ ID NO: 2273173 - RNA, 19 nt, Artificial Sequence
  Description of Artificial Sequence: Synthetic oligonucleotide
  Antisense strand to SEQ ID NO: 2273172
cuguaacauacauucaucc

SEQ ID NO: 2273174 - RNA, 19 nt, Artificial Sequence
  Description of Artificial Sequence: Synthetic oligonucleotide
  Sense strand starting at position 2765 of SEQ ID NO: 1884536
guuggagaccuuugaauuc

SEQ ID NO: 2273175 - RNA, 19 nt, Artificial Sequence
  Description of Artificial Sequence: Synthetic oligonucleotide
  Antisense strand to SEQ ID NO: 2273174
gaauucaaaggucuccaac

SEQ ID NO: 2273176 - RNA, 19 nt, Artificial Sequence
  Description of Artificial Sequence: Synthetic oligonucleotide
  Sense strand starting at position 2888 of SEQ ID NO: 1884536
agaggagucuccucaaaua

SEQ ID NO: 2273177 - RNA, 19 nt, Artificial Sequence
  Description of Artificial Sequence: Synthetic oligonucleotide
  Antisense strand to SEQ ID NO: 2273176
uauuugaggagacuccucu

SEQ ID NO: 2273178 - RNA, 19 nt, Artificial Sequence
  Description of Artificial Sequence: Synthetic oligonucleotide
  Sense strand starting at position 2945 of SEQ ID NO: 1884536
cuguaucaggccugagaag

SEQ ID NO: 2273179 - RNA, 19 nt, Artificial Sequence
  Description of Artificial Sequence: Synthetic oligonucleotide
  Antisense strand to SEQ ID NO: 2273178
cuucucaggccugauacag

SEQ ID NO: 2273180 - RNA, 19 nt, Artificial Sequence
  Description of Artificial Sequence: Synthetic oligonucleotide
  Sense strand starting at position 2997 of SEQ ID NO: 1884536
gugacuagugcuuaaacag

SEQ ID NO: 2273181 - RNA, 19 nt, Artificial Sequence
  Description of Artificial Sequence: Synthetic oligonucleotide
  Antisense strand to SEQ ID NO: 2273180
cuguuuaagcacuagucac

SEQ ID NO: 2273182 - RNA, 19 nt, Artificial Sequence
  Description of Artificial Sequence: Synthetic oligonucleotide
  Sense strand starting at position 3089 of SEQ ID NO: 1884536
cuugccuuagaaggauaau

SEQ ID NO: 2273183 - RNA, 19 nt, Artificial Sequence
  Description of Artificial Sequence: Synthetic oligonucleotide
  Antisense strand to SEQ ID NO: 2273182
auuauccuucuaaggcaag

SEQ ID NO: 2273184 - RNA, 19 nt, Artificial Sequence
  Description of Artificial Sequence: Synthetic oligonucleotide
  Sense strand starting at position 3125 of SEQ ID NO: 1884536
gcuacacuguucuugauuu

SEQ ID NO: 2273185 - RNA, 19 nt, Artificial Sequence
  Description of Artificial Sequence: Synthetic oligonucleotide
  Antisense strand to SEQ ID NO: 2273184
aaaucaagaacaguguagc

SEQ ID NO: 2273186 - RNA, 19 nt, Artificial Sequence
  Description of Artificial Sequence: Synthetic oligonucleotide
  Sense strand starting at position 3186 of SEQ ID NO: 1884536
ugacuuaagugaguaccaa

SEQ ID NO: 2273187 - RNA, 19 nt, Artificial Sequence
  Description of Artificial Sequence: Synthetic oligonucleotide
  Antisense strand to SEQ ID NO: 2273186
uugguacucacuuaaguca

SEQ ID NO: 2273188 - RNA, 19 nt, Artificial Sequence
  Description of Artificial Sequence: Synthetic oligonucleotide
  Sense strand starting at position 3604 of SEQ ID NO: 1884536
acaggaaaccacugcaauu

SEQ ID NO: 2273189 - RNA, 19 nt, Artificial Sequence
  Description of Artificial Sequence: Synthetic oligonucleotide
  Antisense strand to SEQ ID NO: 2273188
aauugcagugguuuccugu

SEQ ID NO: 2273190 - RNA, 19 nt, Artificial Sequence
  Description of Artificial Sequence: Synthetic oligonucleotide
  Sense strand starting at position 3712 of SEQ ID NO: 1884536
gugagauuggcagaaagcu

SEQ ID NO: 2273191 - RNA, 19 nt, Artificial Sequence
  Description of Artificial Sequence: Synthetic oligonucleotide
  Antisense strand to SEQ ID NO: 2273190
agcuuucugccaaucucac

SEQ ID NO: 2273192 - RNA, 19 nt, Artificial Sequence
  Description of Artificial Sequence: Synthetic oligonucleotide
  Sense strand starting at position 156 of SEQ ID NO: 1884537
caaggaacauccguacagu

SEQ ID NO: 2273193 - RNA, 19 nt, Artificial Sequence
  Description of Artificial Sequence: Synthetic oligonucleotide
  Antisense strand to SEQ ID NO: 2273192
acuguacggauguuccuug

SEQ ID NO: 2273194 - RNA, 19 nt, Artificial Sequence
  Description of Artificial Sequence: Synthetic oligonucleotide
  Sense strand starting at position 157 of SEQ ID NO: 1884537
aaggaacauccguacaguu

SEQ ID NO: 2273195 - RNA, 19 nt, Artificial Sequence
  Description of Artificial Sequence: Synthetic oligonucleotide
  Antisense strand to SEQ ID NO: 2273194
aacuguacggauguuccuu

SEQ ID NO: 2273196 - RNA, 19 nt, Artificial Sequence
  Description of Artificial Sequence: Synthetic oligonucleotide
  Sense strand starting at position 371 of SEQ ID NO: 1884537
uguguuagccaucaacaca

SEQ ID NO: 2273197 - RNA, 19 nt, Artificial Sequence
  Description of Artificial Sequence: Synthetic oligonucleotide
  Antisense strand to SEQ ID NO: 2273196
uguguugauggcuaacaca

SEQ ID NO: 2273198 - RNA, 19 nt, Artificial Sequence
  Description of Artificial Sequence: Synthetic oligonucleotide
  Sense strand starting at position 421 of SEQ ID NO: 1884537
ggcaucuuggauuauuaua

SEQ ID NO: 2273199 - RNA, 19 nt, Artificial Sequence
  Description of Artificial Sequence: Synthetic oligonucleotide
  Antisense strand to SEQ ID NO: 2273198
uauaauaauccaagaugcc

SEQ ID NO: 2273200 - RNA, 19 nt, Artificial Sequence
  Description of Artificial Sequence: Synthetic oligonucleotide
  Sense strand starting at position 437 of SEQ ID NO: 1884537
auagaugucugcuuugaaa

SEQ ID NO: 2273201 - RNA, 19 nt, Artificial Sequence
  Description of Artificial Sequence: Synthetic oligonucleotide
  Antisense strand to SEQ ID NO: 2273200
uuucaaagcagacaucuau

SEQ ID NO: 2273202 - RNA, 19 nt, Artificial Sequence
  Description of Artificial Sequence: Synthetic oligonucleotide
  Sense strand starting at position 460 of SEQ ID NO: 1884537
uuucuagcucagugauuuc

SEQ ID NO: 2273203 - RNA, 19 nt, Artificial Sequence
  Description of Artificial Sequence: Synthetic oligonucleotide
  Antisense strand to SEQ ID NO: 2273202
gaaaucacugagcuagaaa

SEQ ID NO: 2273204 - RNA, 19 nt, Artificial Sequence
  Description of Artificial Sequence: Synthetic oligonucleotide
  Sense strand starting at position 716 of SEQ ID NO: 1884537
uuugaagaucuggguuuaa

SEQ ID NO: 2273205 - RNA, 19 nt, Artificial Sequence
  Description of Artificial Sequence: Synthetic oligonucleotide
  Antisense strand to SEQ ID NO: 2273204
uuaaacccagaucuucaaa

SEQ ID NO: 2273206 - RNA, 19 nt, Artificial Sequence
  Description of Artificial Sequence: Synthetic oligonucleotide
  Sense strand starting at position 1094 of SEQ ID NO: 1884537
uguuguuagcaacaauauc

SEQ ID NO: 2273207 - RNA, 19 nt, Artificial Sequence
  Description of Artificial Sequence: Synthetic oligonucleotide
  Antisense strand to SEQ ID NO: 2273206
gauauuguugcuaacaaca

SEQ ID NO: 2273208 - RNA, 19 nt, Artificial Sequence
  Description of Artificial Sequence: Synthetic oligonucleotide
  Sense strand starting at position 1196 of SEQ ID NO: 1884537
auguuaucuugaucuugau

SEQ ID NO: 2273209 - RNA, 19 nt, Artificial Sequence
  Description of Artificial Sequence: Synthetic oligonucleotide
  Antisense strand to SEQ ID NO: 2273208
aucaagaucaagauaacau

SEQ ID NO: 2273210 - RNA, 19 nt, Artificial Sequence
  Description of Artificial Sequence: Synthetic oligonucleotide
  Sense strand starting at position 1208 of SEQ ID NO: 1884537
ucuugaugggcuggauuaa

SEQ ID NO: 2273211 - RNA, 19 nt, Artificial Sequence
  Description of Artificial Sequence: Synthetic oligonucleotide
  Antisense strand to SEQ ID NO: 2273210
uuaauccagcccaucaaga

SEQ ID NO: 2273212 - RNA, 19 nt, Artificial Sequence
  Description of Artificial Sequence: Synthetic oligonucleotide
  Sense strand starting at position 1229 of SEQ ID NO: 1884537
acaaauuguguuuacuacu

SEQ ID NO: 2273213 - RNA, 19 nt, Artificial Sequence
  Description of Artificial Sequence: Synthetic oligonucleotide
  Antisense strand to SEQ ID NO: 2273212
aguaguaaacacaauuugu

SEQ ID NO: 2273214 - RNA, 19 nt, Artificial Sequence
  Description of Artificial Sequence: Synthetic oligonucleotide
  Sense strand starting at position 1307 of SEQ ID NO: 1884537
caaauuuagugugcuugua

SEQ ID NO: 2273215 - RNA, 19 nt, Artificial Sequence
  Description of Artificial Sequence: Synthetic oligonucleotide
  Antisense strand to SEQ ID NO: 2273214
uacaagcacacuaaauuug

SEQ ID NO: 2273216 - RNA, 19 nt, Artificial Sequence
  Description of Artificial Sequence: Synthetic oligonucleotide
  Sense strand starting at position 1309 of SEQ ID NO: 1884537
aauuuagugugcuuguauu

SEQ ID NO: 2273217 - RNA, 19 nt, Artificial Sequence
  Description of Artificial Sequence: Synthetic oligonucleotide
  Antisense strand to SEQ ID NO: 2273216
aauacaagcacacuaaauu

SEQ ID NO: 2273218 - RNA, 19 nt, Artificial Sequence
  Description of Artificial Sequence: Synthetic oligonucleotide
  Sense strand starting at position 1317 of SEQ ID NO: 1884537
gugcuuguauuuguauuaa

SEQ ID NO: 2273219 - RNA, 19 nt, Artificial Sequence
  Description of Artificial Sequence: Synthetic oligonucleotide
  Antisense strand to SEQ ID NO: 2273218
uuaauacaaauacaagcac

SEQ ID NO: 2273220 - RNA, 19 nt, Artificial Sequence
  Description of Artificial Sequence: Synthetic oligonucleotide
  Sense strand starting at position 1564 of SEQ ID NO: 1884537
ggugucuuuagucaagaga

SEQ ID NO: 2273221 - RNA, 19 nt, Artificial Sequence
  Description of Artificial Sequence: Synthetic oligonucleotide
  Antisense strand to SEQ ID NO: 2273220
ucucuugacuaaagacacc

SEQ ID NO: 2273222 - RNA, 19 nt, Artificial Sequence
  Description of Artificial Sequence: Synthetic oligonucleotide
  Sense strand starting at position 1578 of SEQ ID NO: 1884537
agagauaaucagugauucu

SEQ ID NO: 2273223 - RNA, 19 nt, Artificial Sequence
  Description of Artificial Sequence: Synthetic oligonucleotide
  Antisense strand to SEQ ID NO: 2273222
agaaucacugauuaucucu

SEQ ID NO: 2273224 - RNA, 19 nt, Artificial Sequence
  Description of Artificial Sequence: Synthetic oligonucleotide
  Sense strand starting at position 1643 of SEQ ID NO: 1884537
uagagauguuggguccaua

SEQ ID NO: 2273225 - RNA, 19 nt, Artificial Sequence
  Description of Artificial Sequence: Synthetic oligonucleotide
  Antisense strand to SEQ ID NO: 2273224
uauggacccaacaucucua

SEQ ID NO: 2273226 - RNA, 19 nt, Artificial Sequence
  Description of Artificial Sequence: Synthetic oligonucleotide
  Sense strand starting at position 1786 of SEQ ID NO: 1884537
cucucagaaccaugaguca

SEQ ID NO: 2273227 - RNA, 19 nt, Artificial Sequence
  Description of Artificial Sequence: Synthetic oligonucleotide
  Antisense strand to SEQ ID NO: 2273226
ugacucaugguucugagag

SEQ ID NO: 2273228 - RNA, 19 nt, Artificial Sequence
  Description of Artificial Sequence: Synthetic oligonucleotide
  Sense strand starting at position 1991 of SEQ ID NO: 1884537
ugaccaaauguccagguuu

SEQ ID NO: 2273229 - RNA, 19 nt, Artificial Sequence
  Description of Artificial Sequence: Synthetic oligonucleotide
  Antisense strand to SEQ ID NO: 2273228
aaaccuggacauuugguca

SEQ ID NO: 2273230 - RNA, 19 nt, Artificial Sequence
  Description of Artificial Sequence: Synthetic oligonucleotide
  Sense strand starting at position 1993 of SEQ ID NO: 1884537
accaaauguccagguuuau

SEQ ID NO: 2273231 - RNA, 19 nt, Artificial Sequence
  Description of Artificial Sequence: Synthetic oligonucleotide
  Antisense strand to SEQ ID NO: 2273230
auaaaccuggacauuuggu

SEQ ID NO: 2273232 - RNA, 19 nt, Artificial Sequence
  Description of Artificial Sequence: Synthetic oligonucleotide
  Sense strand starting at position 2137 of SEQ ID NO: 1884537
ucauguggucccuaagaca

SEQ ID NO: 2273233 - RNA, 19 nt, Artificial Sequence
  Description of Artificial Sequence: Synthetic oligonucleotide
  Antisense strand to SEQ ID NO: 2273232
ugucuuagggaccacauga

SEQ ID NO: 2273234 - RNA, 19 nt, Artificial Sequence
  Description of Artificial Sequence: Synthetic oligonucleotide
  Sense strand starting at position 2193 of SEQ ID NO: 1884537
gcaauucuugcuuaauaga

SEQ ID NO: 2273235 - RNA, 19 nt, Artificial Sequence
  Description of Artificial Sequence: Synthetic oligonucleotide
  Antisense strand to SEQ ID NO: 2273234
ucuauuaagcaagaauugc

SEQ ID NO: 2273236 - RNA, 19 nt, Artificial Sequence
  Description of Artificial Sequence: Synthetic oligonucleotide
  Sense strand starting at position 2466 of SEQ ID NO: 1884537
aguguuaacucaucuggga

SEQ ID NO: 2273237 - RNA, 19 nt, Artificial Sequence
  Description of Artificial Sequence: Synthetic oligonucleotide
  Antisense strand to SEQ ID NO: 2273236
ucccagaugaguuaacacu

SEQ ID NO: 2273238 - RNA, 19 nt, Artificial Sequence
  Description of Artificial Sequence: Synthetic oligonucleotide
  Sense strand starting at position 2547 of SEQ ID NO: 1884537
gcccauuagguggaaaucu

SEQ ID NO: 2273239 - RNA, 19 nt, Artificial Sequence
  Description of Artificial Sequence: Synthetic oligonucleotide
  Antisense strand to SEQ ID NO: 2273238
agauuuccaccuaaugggc

SEQ ID NO: 2273240 - RNA, 19 nt, Artificial Sequence
  Description of Artificial Sequence: Synthetic oligonucleotide
  Sense strand starting at position 2555 of SEQ ID NO: 1884537
gguggaaaucuguaacagc

SEQ ID NO: 2273241 - RNA, 19 nt, Artificial Sequence
  Description of Artificial Sequence: Synthetic oligonucleotide
  Antisense strand to SEQ ID NO: 2273240
gcuguuacagauuuccacc

SEQ ID NO: 2273242 - RNA, 19 nt, Artificial Sequence
  Description of Artificial Sequence: Synthetic oligonucleotide
  Sense strand starting at position 2806 of SEQ ID NO: 1884537
agaguucucagaggcaacu

SEQ ID NO: 2273243 - RNA, 19 nt, Artificial Sequence
  Description of Artificial Sequence: Synthetic oligonucleotide
  Antisense strand to SEQ ID NO: 2273242
aguugccucugagaacucu

SEQ ID NO: 2273244 - RNA, 19 nt, Artificial Sequence
  Description of Artificial Sequence: Synthetic oligonucleotide
  Sense strand starting at position 2947 of SEQ ID NO: 1884537
cuuagcagucacuauagga

SEQ ID NO: 2273245 - RNA, 19 nt, Artificial Sequence
  Description of Artificial Sequence: Synthetic oligonucleotide
  Antisense strand to SEQ ID NO: 2273244
uccuauagugacugcuaag

SEQ ID NO: 2273246 - RNA, 19 nt, Artificial Sequence
  Description of Artificial Sequence: Synthetic oligonucleotide
  Sense strand starting at position 2993 of SEQ ID NO: 1884537
ggagguaucagcuaaagug

SEQ ID NO: 2273247 - RNA, 19 nt, Artificial Sequence
  Description of Artificial Sequence: Synthetic oligonucleotide
  Antisense strand to SEQ ID NO: 2273246
cacuuuagcugauaccucc

SEQ ID NO: 2273248 - RNA, 19 nt, Artificial Sequence
  Description of Artificial Sequence: Synthetic oligonucleotide
  Sense strand starting at position 3001 of SEQ ID NO: 1884537
cagcuaaagugauuguaaa

SEQ ID NO: 2273249 - RNA, 19 nt, Artificial Sequence
  Description of Artificial Sequence: Synthetic oligonucleotide
  Antisense strand to SEQ ID NO: 2273248
uuuacaaucacuuuagcug

SEQ ID NO: 2273250 - RNA, 19 nt, Artificial Sequence
  Description of Artificial Sequence: Synthetic oligonucleotide
  Sense strand starting at position 3058 of SEQ ID NO: 1884537
uguguagacccauaagcaa

SEQ ID NO: 2273251 - RNA, 19 nt, Artificial Sequence
  Description of Artificial Sequence: Synthetic oligonucleotide
  Antisense strand to SEQ ID NO: 2273250
uugcuuaugggucuacaca

SEQ ID NO: 2273252 - RNA, 19 nt, Artificial Sequence
  Description of Artificial Sequence: Synthetic oligonucleotide
  Sense strand starting at position 3155 of SEQ ID NO: 1884537
ucaguaguggauugacaua

SEQ ID NO: 2273253 - RNA, 19 nt, Artificial Sequence
  Description of Artificial Sequence: Synthetic oligonucleotide
  Antisense strand to SEQ ID NO: 2273252
uaugucaauccacuacuga

SEQ ID NO: 2273254 - RNA, 19 nt, Artificial Sequence
  Description of Artificial Sequence: Synthetic oligonucleotide
  Sense strand starting at position 3328 of SEQ ID NO: 1884537
gccauauaggacugauaaa

SEQ ID NO: 2273255 - RNA, 19 nt, Artificial Sequence
  Description of Artificial Sequence: Synthetic oligonucleotide
  Antisense strand to SEQ ID NO: 2273254
uuuaucaguccuauauggc

SEQ ID NO: 2273256 - RNA, 19 nt, Artificial Sequence
  Description of Artificial Sequence: Synthetic oligonucleotide
  Sense strand starting at position 3369 of SEQ ID NO: 1884537
acuaguguuccacaacuag

SEQ ID NO: 2273257 - RNA, 19 nt, Artificial Sequence
  Description of Artificial Sequence: Synthetic oligonucleotide
  Antisense strand to SEQ ID NO: 2273256
cuaguuguggaacacuagu

SEQ ID NO: 2273258 - RNA, 19 nt, Artificial Sequence
  Description of Artificial Sequence: Synthetic oligonucleotide
  Sense strand starting at position 3490 of SEQ ID NO: 1884537
agaagauugucaccaacuu

SEQ ID NO: 2273259 - RNA, 19 nt, Artificial Sequence
  Description of Artificial Sequence: Synthetic oligonucleotide
  Antisense strand to SEQ ID NO: 2273258
aaguuggugacaaucuucu

SEQ ID NO: 2273260 - RNA, 19 nt, Artificial Sequence
  Description of Artificial Sequence: Synthetic oligonucleotide
  Sense strand starting at position 3505 of SEQ ID NO: 1884537
acuucugguagaugagaau

SEQ ID NO: 2273261 - RNA, 19 nt, Artificial Sequence
  Description of Artificial Sequence: Synthetic oligonucleotide
  Antisense strand to SEQ ID NO: 2273260
auucucaucuaccagaagu

SEQ ID NO: 2273262 - RNA, 19 nt, Artificial Sequence
  Description of Artificial Sequence: Synthetic oligonucleotide
  Sense strand starting at position 3608 of SEQ ID NO: 1884537
aggugcauccuugaucaca

SEQ ID NO: 2273263 - RNA, 19 nt, Artificial Sequence
  Description of Artificial Sequence: Synthetic oligonucleotide
  Antisense strand to SEQ ID NO: 2273262
ugugaucaaggaugcaccu

SEQ ID NO: 2273264 - RNA, 19 nt, Artificial Sequence
  Description of Artificial Sequence: Synthetic oligonucleotide
  Sense strand starting at position 3645 of SEQ ID NO: 1884537
gggcaaauggaagguuaua

SEQ ID NO: 2273265 - RNA, 19 nt, Artificial Sequence
  Description of Artificial Sequence: Synthetic oligonucleotide
  Antisense strand to SEQ ID NO: 2273264
uauaaccuuccauuugccc

SEQ ID NO: 2273266 - RNA, 19 nt, Artificial Sequence
  Description of Artificial Sequence: Synthetic oligonucleotide
  Sense strand starting at position 3729 of SEQ ID NO: 1884537
agauguuaccacgaucuca

SEQ ID NO: 2273267 - RNA, 19 nt, Artificial Sequence
  Description of Artificial Sequence: Synthetic oligonucleotide
  Antisense strand to SEQ ID NO: 2273266
ugagaucgugguaacaucu

SEQ ID NO: 2273268 - RNA, 19 nt, Artificial Sequence
  Description of Artificial Sequence: Synthetic oligonucleotide
  Sense strand starting at position 3765 of SEQ ID NO: 1884537
gcaaauaagggaugcacua

SEQ ID NO: 2273269 - RNA, 19 nt, Artificial Sequence
  Description of Artificial Sequence: Synthetic oligonucleotide
  Antisense strand to SEQ ID NO: 2273268
uagugcaucccuuauuugc

SEQ ID NO: 2273270 - RNA, 19 nt, Artificial Sequence
  Description of Artificial Sequence: Synthetic oligonucleotide
  Sense strand starting at position 3845 of SEQ ID NO: 1884537
uuuacauagucaguaaaug

SEQ ID NO: 2273271 - RNA, 19 nt, Artificial Sequence
  Description of Artificial Sequence: Synthetic oligonucleotide
  Antisense strand to SEQ ID NO: 2273270
cauuuacugacuauguaaa

SEQ ID NO: 2273272 - RNA, 19 nt, Artificial Sequence
  Description of Artificial Sequence: Synthetic oligonucleotide
  Sense strand starting at position 330 of SEQ ID NO: 1884538
ccuguuugugagcuugcua

SEQ ID NO: 2273273 - RNA, 19 nt, Artificial Sequence
  Description of Artificial Sequence: Synthetic oligonucleotide
  Antisense strand to SEQ ID NO: 2273272
uagcaagcucacaaacagg

SEQ ID NO: 2273274 - RNA, 19 nt, Artificial Sequence
  Description of Artificial Sequence: Synthetic oligonucleotide
  Sense strand starting at position 527 of SEQ ID NO: 1884538
ccaggugucuucggagacu

SEQ ID NO: 2273275 - RNA, 19 nt, Artificial Sequence
  Description of Artificial Sequence: Synthetic oligonucleotide
  Antisense strand to SEQ ID NO: 2273274
agucuccgaagacaccugg

SEQ ID NO: 2273276 - RNA, 19 nt, Artificial Sequence
  Description of Artificial Sequence: Synthetic oligonucleotide
  Sense strand starting at position 529 of SEQ ID NO: 1884538
aggugucuucggagacugu

SEQ ID NO: 2273277 - RNA, 19 nt, Artificial Sequence
  Description of Artificial Sequence: Synthetic oligonucleotide
  Antisense strand to SEQ ID NO: 2273276
acagucuccgaagacaccu

SEQ ID NO: 2273278 - RNA, 19 nt, Artificial Sequence
  Description of Artificial Sequence: Synthetic oligonucleotide
  Sense strand starting at position 619 of SEQ ID NO: 1884538
augggaaaguccugacuca

SEQ ID NO: 2273279 - RNA, 19 nt, Artificial Sequence
  Description of Artificial Sequence: Synthetic oligonucleotide
  Antisense strand to SEQ ID NO: 2273278
ugagucaggacuuucccau

SEQ ID NO: 2273280 - RNA, 19 nt, Artificial Sequence
  Description of Artificial Sequence: Synthetic oligonucleotide
  Sense strand starting at position 630 of SEQ ID NO: 1884538
cugacucauccacgcuuga

SEQ ID NO: 2273281 - RNA, 19 nt, Artificial Sequence
  Description of Artificial Sequence: Synthetic oligonucleotide
  Antisense strand to SEQ ID NO: 2273280
ucaagcguggaugagucag

SEQ ID NO: 2273282 - RNA, 19 nt, Artificial Sequence
  Description of Artificial Sequence: Synthetic oligonucleotide
  Sense strand starting at position 1002 of SEQ ID NO: 1884538
ggauaugugacucaagguc

SEQ ID NO: 2273283 - RNA, 19 nt, Artificial Sequence
  Description of Artificial Sequence: Synthetic oligonucleotide
  Antisense strand to SEQ ID NO: 2273282
gaccuugagucacauaucc

SEQ ID NO: 2273284 - RNA, 19 nt, Artificial Sequence
  Description of Artificial Sequence: Synthetic oligonucleotide
  Sense strand starting at position 1041 of SEQ ID NO: 1884538
accucaguuuccucguuga

SEQ ID NO: 2273285 - RNA, 19 nt, Artificial Sequence
  Description of Artificial Sequence: Synthetic oligonucleotide
  Antisense strand to SEQ ID NO: 2273284
ucaacgaggaaacugaggu

SEQ ID NO: 2273286 - RNA, 19 nt, Artificial Sequence
  Description of Artificial Sequence: Synthetic oligonucleotide
  Sense strand starting at position 1044 of SEQ ID NO: 1884538
ucaguuuccucguugaaau

SEQ ID NO: 2273287 - RNA, 19 nt, Artificial Sequence
  Description of Artificial Sequence: Synthetic oligonucleotide
  Antisense strand to SEQ ID NO: 2273286
auuucaacgaggaaacuga

SEQ ID NO: 2273288 - RNA, 19 nt, Artificial Sequence
  Description of Artificial Sequence: Synthetic oligonucleotide
  Sense strand starting at position 1045 of SEQ ID NO: 1884538
caguuuccucguugaaaug

SEQ ID NO: 2273289 - RNA, 19 nt, Artificial Sequence
  Description of Artificial Sequence: Synthetic oligonucleotide
  Antisense strand to SEQ ID NO: 2273288
cauuucaacgaggaaacug

SEQ ID NO: 2273290 - RNA, 19 nt, Artificial Sequence
  Description of Artificial Sequence: Synthetic oligonucleotide
  Sense strand starting at position 1099 of SEQ ID NO: 1884538
gggagagccugagaugcau

SEQ ID NO: 2273291 - RNA, 19 nt, Artificial Sequence
  Description of Artificial Sequence: Synthetic oligonucleotide
  Antisense strand to SEQ ID NO: 2273290
augcaucucaggcucuccc

SEQ ID NO: 2273292 - RNA, 19 nt, Artificial Sequence
  Description of Artificial Sequence: Synthetic oligonucleotide
  Sense strand starting at position 1175 of SEQ ID NO: 1884538
gcucuucccugguugugau

SEQ ID NO: 2273293 - RNA, 19 nt, Artificial Sequence
  Description of Artificial Sequence: Synthetic oligonucleotide
  Antisense strand to SEQ ID NO: 2273292
aucacaaccagggaagagc

SEQ ID NO: 2273294 - RNA, 19 nt, Artificial Sequence
  Description of Artificial Sequence: Synthetic oligonucleotide
  Sense strand starting at position 1297 of SEQ ID NO: 1884538
caaugugcccuaggguuaa

SEQ ID NO: 2273295 - RNA, 19 nt, Artificial Sequence
  Description of Artificial Sequence: Synthetic oligonucleotide
  Antisense strand to SEQ ID NO: 2273294
uuaacccuagggcacauug

SEQ ID NO: 2273296 - RNA, 19 nt, Artificial Sequence
  Description of Artificial Sequence: Synthetic oligonucleotide
  Sense strand starting at position 1552 of SEQ ID NO: 1884538
gggugaggccucuguguuu

SEQ ID NO: 2273297 - RNA, 19 nt, Artificial Sequence
  Description of Artificial Sequence: Synthetic oligonucleotide
  Antisense strand to SEQ ID NO: 2273296
aaacacagaggccucaccc

SEQ ID NO: 2273298 - RNA, 19 nt, Artificial Sequence
  Description of Artificial Sequence: Synthetic oligonucleotide
  Sense strand starting at position 1557 of SEQ ID NO: 1884538
aggccucuguguuugugua

SEQ ID NO: 2273299 - RNA, 19 nt, Artificial Sequence
  Description of Artificial Sequence: Synthetic oligonucleotide
  Antisense strand to SEQ ID NO: 2273298
uacacaaacacagaggccu

SEQ ID NO: 2273300 - RNA, 19 nt, Artificial Sequence
  Description of Artificial Sequence: Synthetic oligonucleotide
  Sense strand starting at position 1558 of SEQ ID NO: 1884538
ggccucuguguuuguguaa

SEQ ID NO: 2273301 - RNA, 19 nt, Artificial Sequence
  Description of Artificial Sequence: Synthetic oligonucleotide
  Antisense strand to SEQ ID NO: 2273300
uuacacaaacacagaggcc

SEQ ID NO: 2273302 - RNA, 19 nt, Artificial Sequence
  Description of Artificial Sequence: Synthetic oligonucleotide
  Sense strand starting at position 1565 of SEQ ID NO: 1884538
guguuuguguaagucuguu

SEQ ID NO: 2273303 - RNA, 19 nt, Artificial Sequence
  Description of Artificial Sequence: Synthetic oligonucleotide
  Antisense strand to SEQ ID NO: 2273302
aacagacuuacacaaacac

SEQ ID NO: 2273304 - RNA, 19 nt, Artificial Sequence
  Description of Artificial Sequence: Synthetic oligonucleotide
  Sense strand starting at position 1570 of SEQ ID NO: 1884538
uguguaagucuguugcugu

SEQ ID NO: 2273305 - RNA, 19 nt, Artificial Sequence
  Description of Artificial Sequence: Synthetic oligonucleotide
  Antisense strand to SEQ ID NO: 2273304
acagcaacagacuuacaca

SEQ ID NO: 2273306 - RNA, 19 nt, Artificial Sequence
  Description of Artificial Sequence: Synthetic oligonucleotide
  Sense strand starting at position 1571 of SEQ ID NO: 1884538
guguaagucuguugcugua

SEQ ID NO: 2273307 - RNA, 19 nt, Artificial Sequence
  Description of Artificial Sequence: Synthetic oligonucleotide
  Antisense strand to SEQ ID NO: 2273306
uacagcaacagacuuacac

SEQ ID NO: 2273308 - RNA, 19 nt, Artificial Sequence
  Description of Artificial Sequence: Synthetic oligonucleotide
  Sense strand starting at position 1601 of SEQ ID NO: 1884538
gugcguguuucuuugugac

SEQ ID NO: 2273309 - RNA, 19 nt, Artificial Sequence
  Description of Artificial Sequence: Synthetic oligonucleotide
  Antisense strand to SEQ ID NO: 2273308
gucacaaagaaacacgcac

SEQ ID NO: 2273310 - RNA, 19 nt, Artificial Sequence
  Description of Artificial Sequence: Synthetic oligonucleotide
  Sense strand starting at position 1603 of SEQ ID NO: 1884538
gcguguuucuuugugacua

SEQ ID NO: 2273311 - RNA, 19 nt, Artificial Sequence
  Description of Artificial Sequence: Synthetic oligonucleotide
  Antisense strand to SEQ ID NO: 2273310
uagucacaaagaaacacgc

SEQ ID NO: 2273312 - RNA, 19 nt, Artificial Sequence
  Description of Artificial Sequence: Synthetic oligonucleotide
  Sense strand starting at position 1604 of SEQ ID NO: 1884538
cguguuucuuugugacuac

SEQ ID NO: 2273313 - RNA, 19 nt, Artificial Sequence
  Description of Artificial Sequence: Synthetic oligonucleotide
  Antisense strand to SEQ ID NO: 2273312
guagucacaaagaaacacg

SEQ ID NO: 2273314 - RNA, 19 nt, Artificial Sequence
  Description of Artificial Sequence: Synthetic oligonucleotide
  Sense strand starting at position 1827 of SEQ ID NO: 1884538
ccacgugugagcugugagu

SEQ ID NO: 2273315 - RNA, 19 nt, Artificial Sequence
  Description of Artificial Sequence: Synthetic oligonucleotide
  Antisense strand to SEQ ID NO: 2273314
acucacagcucacacgugg

SEQ ID NO: 2273316 - RNA, 19 nt, Artificial Sequence
  Description of Artificial Sequence: Synthetic oligonucleotide
  Sense strand starting at position 2153 of SEQ ID NO: 1884538
cguuacuggucuccagaag

SEQ ID NO: 2273317 - RNA, 19 nt, Artificial Sequence
  Description of Artificial Sequence: Synthetic oligonucleotide
  Antisense strand to SEQ ID NO: 2273316
cuucuggagaccaguaacg

SEQ ID NO: 2273318 - RNA, 19 nt, Artificial Sequence
  Description of Artificial Sequence: Synthetic oligonucleotide
  Sense strand starting at position 2154 of SEQ ID NO: 1884538
guuacuggucuccagaaga

SEQ ID NO: 2273319 - RNA, 19 nt, Artificial Sequence
  Description of Artificial Sequence: Synthetic oligonucleotide
  Antisense strand to SEQ ID NO: 2273318
ucuucuggagaccaguaac

SEQ ID NO: 2273320 - RNA, 19 nt, Artificial Sequence
  Description of Artificial Sequence: Synthetic oligonucleotide
  Sense strand starting at position 2759 of SEQ ID NO: 1884538
gugugggagccaugaggau

SEQ ID NO: 2273321 - RNA, 19 nt, Artificial Sequence
  Description of Artificial Sequence: Synthetic oligonucleotide
  Antisense strand to SEQ ID NO: 2273320
auccucauggcucccacac

SEQ ID NO: 2273322 - RNA, 19 nt, Artificial Sequence
  Description of Artificial Sequence: Synthetic oligonucleotide
  Sense strand starting at position 2768 of SEQ ID NO: 1884538
ccaugaggauccuggcuaa

SEQ ID NO: 2273323 - RNA, 19 nt, Artificial Sequence
  Description of Artificial Sequence: Synthetic oligonucleotide
  Antisense strand to SEQ ID NO: 2273322
uuagccaggauccucaugg

SEQ ID NO: 2273324 - RNA, 19 nt, Artificial Sequence
  Description of Artificial Sequence: Synthetic oligonucleotide
  Sense strand starting at position 2771 of SEQ ID NO: 1884538
ugaggauccuggcuaacaa

SEQ ID NO: 2273325 - RNA, 19 nt, Artificial Sequence
  Description of Artificial Sequence: Synthetic oligonucleotide
  Antisense strand to SEQ ID NO: 2273324
uuguuagccaggauccuca

SEQ ID NO: 2273326 - RNA, 19 nt, Artificial Sequence
  Description of Artificial Sequence: Synthetic oligonucleotide
  Sense strand starting at position 3301 of SEQ ID NO: 1884538
ugaucuuuccagcggcuau

SEQ ID NO: 2273327 - RNA, 19 nt, Artificial Sequence
  Description of Artificial Sequence: Synthetic oligonucleotide
  Antisense strand to SEQ ID NO: 2273326
auagccgcuggaaagauca

SEQ ID NO: 2273328 - RNA, 19 nt, Artificial Sequence
  Description of Artificial Sequence: Synthetic oligonucleotide
  Sense strand starting at position 3305 of SEQ ID NO: 1884538
cuuuccagcggcuauuaau

SEQ ID NO: 2273329 - RNA, 19 nt, Artificial Sequence
  Description of Artificial Sequence: Synthetic oligonucleotide
  Antisense strand to SEQ ID NO: 2273328
auuaauagccgcuggaaag

SEQ ID NO: 2273330 - RNA, 19 nt, Artificial Sequence
  Description of Artificial Sequence: Synthetic oligonucleotide
  Sense strand starting at position 3634 of SEQ ID NO: 1884538
acauaugggaguugagguu

SEQ ID NO: 2273331 - RNA, 19 nt, Artificial Sequence
  Description of Artificial Sequence: Synthetic oligonucleotide
  Antisense strand to SEQ ID NO: 2273330
aaccucaacucccauaugu

SEQ ID NO: 2273332 - RNA, 19 nt, Artificial Sequence
  Description of Artificial Sequence: Synthetic oligonucleotide
  Sense strand starting at position 3650 of SEQ ID NO: 1884538
guuugagaccuuggaagga

SEQ ID NO: 2273333 - RNA, 19 nt, Artificial Sequence
  Description of Artificial Sequence: Synthetic oligonucleotide
  Antisense strand to SEQ ID NO: 2273332
uccuuccaaggucucaaac

SEQ ID NO: 2273334 - RNA, 19 nt, Artificial Sequence
  Description of Artificial Sequence: Synthetic oligonucleotide
  Sense strand starting at position 3676 of SEQ ID NO: 1884538
gacagcagaucuuagaaga

SEQ ID NO: 2273335 - RNA, 19 nt, Artificial Sequence
  Description of Artificial Sequence: Synthetic oligonucleotide
  Antisense strand to SEQ ID NO: 2273334
ucuucuaagaucugcuguc

SEQ ID NO: 2273336 - RNA, 19 nt, Artificial Sequence
  Description of Artificial Sequence: Synthetic oligonucleotide
  Sense strand starting at position 3695 of SEQ ID NO: 1884538
gaggaugcuuaagucugau

SEQ ID NO: 2273337 - RNA, 19 nt, Artificial Sequence
  Description of Artificial Sequence: Synthetic oligonucleotide
  Antisense strand to SEQ ID NO: 2273336
aucagacuuaagcauccuc

SEQ ID NO: 2273338 - RNA, 19 nt, Artificial Sequence
  Description of Artificial Sequence: Synthetic oligonucleotide
  Sense strand starting at position 3698 of SEQ ID NO: 1884538
gaugcuuaagucugauaca

SEQ ID NO: 2273339 - RNA, 19 nt, Artificial Sequence
  Description of Artificial Sequence: Synthetic oligonucleotide
  Antisense strand to SEQ ID NO: 2273338
uguaucagacuuaagcauc

SEQ ID NO: 2273340 - RNA, 19 nt, Artificial Sequence
  Description of Artificial Sequence: Synthetic oligonucleotide
  Sense strand starting at position 3699 of SEQ ID NO: 1884538
augcuuaagucugauacag

SEQ ID NO: 2273341 - RNA, 19 nt, Artificial Sequence
  Description of Artificial Sequence: Synthetic oligonucleotide
  Antisense strand to SEQ ID NO: 2273340
cuguaucagacuuaagcau

SEQ ID NO: 2273342 - RNA, 19 nt, Artificial Sequence
  Description of Artificial Sequence: Synthetic oligonucleotide
  Sense strand starting at position 3701 of SEQ ID NO: 1884538
gcuuaagucugauacagag

SEQ ID NO: 2273343 - RNA, 19 nt, Artificial Sequence
  Description of Artificial Sequence: Synthetic oligonucleotide
  Antisense strand to SEQ ID NO: 2273342
cucuguaucagacuuaagc

SEQ ID NO: 2273344 - RNA, 19 nt, Artificial Sequence
  Description of Artificial Sequence: Synthetic oligonucleotide
  Sense strand starting at position 3770 of SEQ ID NO: 1884538
gugggugaauucugccaac

SEQ ID NO: 2273345 - RNA, 19 nt, Artificial Sequence
  Description of Artificial Sequence: Synthetic oligonucleotide
  Antisense strand to SEQ ID NO: 2273344
guuggcagaauucacccac

SEQ ID NO: 2273346 - RNA, 19 nt, Artificial Sequence
  Description of Artificial Sequence: Synthetic oligonucleotide
  Sense strand starting at position 3773 of SEQ ID NO: 1884538
ggugaauucugccaacucu

SEQ ID NO: 2273347 - RNA, 19 nt, Artificial Sequence
  Description of Artificial Sequence: Synthetic oligonucleotide
  Antisense strand to SEQ ID NO: 2273346
agaguuggcagaauucacc

SEQ ID NO: 2273348 - RNA, 19 nt, Artificial Sequence
  Description of Artificial Sequence: Synthetic oligonucleotide
  Sense strand starting at position 3873 of SEQ ID NO: 1884538
ucagcccuugucugaggaa

SEQ ID NO: 2273349 - RNA, 19 nt, Artificial Sequence
  Description of Artificial Sequence: Synthetic oligonucleotide
  Antisense strand to SEQ ID NO: 2273348
uuccucagacaagggcuga

SEQ ID NO: 2273350 - RNA, 19 nt, Artificial Sequence
  Description of Artificial Sequence: Synthetic oligonucleotide
  Sense strand starting at position 3918 of SEQ ID NO: 1884538
ggugguggucuugagauac

SEQ ID NO: 2273351 - RNA, 19 nt, Artificial Sequence
  Description of Artificial Sequence: Synthetic oligonucleotide
  Antisense strand to SEQ ID NO: 2273350
guaucucaagaccaccacc

SEQ ID NO: 2273352 - RNA, 19 nt, Artificial Sequence
  Description of Artificial Sequence: Synthetic oligonucleotide
  Sense strand starting at position 125 of SEQ ID NO: 1884539
ugaauauuagugcacacau

SEQ ID NO: 2273353 - RNA, 19 nt, Artificial Sequence
  Description of Artificial Sequence: Synthetic oligonucleotide
  Antisense strand to SEQ ID NO: 2273352
augugugcacuaauauuca

SEQ ID NO: 2273354 - RNA, 19 nt, Artificial Sequence
  Description of Artificial Sequence: Synthetic oligonucleotide
  Sense strand starting at position 219 of SEQ ID NO: 1884539
uguuaaacacuuugaguga

SEQ ID NO: 2273355 - RNA, 19 nt, Artificial Sequence
  Description of Artificial Sequence: Synthetic oligonucleotide
  Antisense strand to SEQ ID NO: 2273354
ucacucaaaguguuuaaca

SEQ ID NO: 2273356 - RNA, 19 nt, Artificial Sequence
  Description of Artificial Sequence: Synthetic oligonucleotide
  Sense strand starting at position 230 of SEQ ID NO: 1884539
uugagugaccgccagacua

SEQ ID NO: 2273357 - RNA, 19 nt, Artificial Sequence
  Description of Artificial Sequence: Synthetic oligonucleotide
  Antisense strand to SEQ ID NO: 2273356
uagucuggcggucacucaa

SEQ ID NO: 2273358 - RNA, 19 nt, Artificial Sequence
  Description of Artificial Sequence: Synthetic oligonucleotide
  Sense strand starting at position 232 of SEQ ID NO: 1884539
gagugaccgccagacuauu

SEQ ID NO: 2273359 - RNA, 19 nt, Artificial Sequence
  Description of Artificial Sequence: Synthetic oligonucleotide
  Antisense strand to SEQ ID NO: 2273358
aauagucuggcggucacuc

SEQ ID NO: 2273360 - RNA, 19 nt, Artificial Sequence
  Description of Artificial Sequence: Synthetic oligonucleotide
  Sense strand starting at position 562 of SEQ ID NO: 1884539
acaagucucuugucaaaua

SEQ ID NO: 2273361 - RNA, 19 nt, Artificial Sequence
  Description of Artificial Sequence: Synthetic oligonucleotide
  Antisense strand to SEQ ID NO: 2273360
uauuugacaagagacuugu

SEQ ID NO: 2273362 - RNA, 19 nt, Artificial Sequence
  Description of Artificial Sequence: Synthetic oligonucleotide
  Sense strand starting at position 628 of SEQ ID NO: 1884539
uauugaugguauccuuuga

SEQ ID NO: 2273363 - RNA, 19 nt, Artificial Sequence
  Description of Artificial Sequence: Synthetic oligonucleotide
  Antisense strand to SEQ ID NO: 2273362
ucaaaggauaccaucaaua

SEQ ID NO: 2273364 - RNA, 19 nt, Artificial Sequence
  Description of Artificial Sequence: Synthetic oligonucleotide
  Sense strand starting at position 658 of SEQ ID NO: 1884539
uucuaauuucgaugacguc

SEQ ID NO: 2273365 - RNA, 19 nt, Artificial Sequence
  Description of Artificial Sequence: Synthetic oligonucleotide
  Antisense strand to SEQ ID NO: 2273364
gacgucaucgaaauuagaa

SEQ ID NO: 2273366 - RNA, 19 nt, Artificial Sequence
  Description of Artificial Sequence: Synthetic oligonucleotide
  Sense strand starting at position 856 of SEQ ID NO: 1884539
cucagauacucaguccuca

SEQ ID NO: 2273367 - RNA, 19 nt, Artificial Sequence
  Description of Artificial Sequence: Synthetic oligonucleotide
  Antisense strand to SEQ ID NO: 2273366
ugaggacugaguaucugag

SEQ ID NO: 2273368 - RNA, 19 nt, Artificial Sequence
  Description of Artificial Sequence: Synthetic oligonucleotide
  Sense strand starting at position 1061 of SEQ ID NO: 1884539
ccugcaaauaugggugaua

SEQ ID NO: 2273369 - RNA, 19 nt, Artificial Sequence
  Description of Artificial Sequence: Synthetic oligonucleotide
  Antisense strand to SEQ ID NO: 2273368
uaucacccauauuugcagg

SEQ ID NO: 2273370 - RNA, 19 nt, Artificial Sequence
  Description of Artificial Sequence: Synthetic oligonucleotide
  Sense strand starting at position 1063 of SEQ ID NO: 1884539
ugcaaauaugggugauaga

SEQ ID NO: 2273371 - RNA, 19 nt, Artificial Sequence
  Description of Artificial Sequence: Synthetic oligonucleotide
  Antisense strand to SEQ ID NO: 2273370
ucuaucacccauauuugca

SEQ ID NO: 2273372 - RNA, 19 nt, Artificial Sequence
  Description of Artificial Sequence: Synthetic oligonucleotide
  Sense strand starting at position 1096 of SEQ ID NO: 1884539
guaguuggcguuaggugau

SEQ ID NO: 2273373 - RNA, 19 nt, Artificial Sequence
  Description of Artificial Sequence: Synthetic oligonucleotide
  Antisense strand to SEQ ID NO: 2273372
aucaccuaacgccaacuac

SEQ ID NO: 2273374 - RNA, 19 nt, Artificial Sequence
  Description of Artificial Sequence: Synthetic oligonucleotide
  Sense strand starting at position 1202 of SEQ ID NO: 1884539
uggaucucuuggccugaga

SEQ ID NO: 2273375 - RNA, 19 nt, Artificial Sequence
  Description of Artificial Sequence: Synthetic oligonucleotide
  Antisense strand to SEQ ID NO: 2273374
ucucaggccaagagaucca

SEQ ID NO: 2273376 - RNA, 19 nt, Artificial Sequence
  Description of Artificial Sequence: Synthetic oligonucleotide
  Sense strand starting at position 1504 of SEQ ID NO: 1884539
cucauaagguuuccaugga

SEQ ID NO: 2273377 - RNA, 19 nt, Artificial Sequence
  Description of Artificial Sequence: Synthetic oligonucleotide
  Antisense strand to SEQ ID NO: 2273376
uccauggaaaccuuaugag

SEQ ID NO: 2273378 - RNA, 19 nt, Artificial Sequence
  Description of Artificial Sequence: Synthetic oligonucleotide
  Sense strand starting at position 1656 of SEQ ID NO: 1884539
ugggucugucucuauaaga

SEQ ID NO: 2273379 - RNA, 19 nt, Artificial Sequence
  Description of Artificial Sequence: Synthetic oligonucleotide
  Antisense strand to SEQ ID NO: 2273378
ucuuauagagacagaccca

SEQ ID NO: 2273380 - RNA, 19 nt, Artificial Sequence
  Description of Artificial Sequence: Synthetic oligonucleotide
  Sense strand starting at position 1689 of SEQ ID NO: 1884539
ccagaacuuugucuuagga

SEQ ID NO: 2273381 - RNA, 19 nt, Artificial Sequence
  Description of Artificial Sequence: Synthetic oligonucleotide
  Antisense strand to SEQ ID NO: 2273380
uccuaagacaaaguucugg

SEQ ID NO: 2273382 - RNA, 19 nt, Artificial Sequence
  Description of Artificial Sequence: Synthetic oligonucleotide
  Sense strand starting at position 1966 of SEQ ID NO: 1884539
cugugauaaucaccggaag

SEQ ID NO: 2273383 - RNA, 19 nt, Artificial Sequence
  Description of Artificial Sequence: Synthetic oligonucleotide
  Antisense strand to SEQ ID NO: 2273382
cuuccggugauuaucacag

SEQ ID NO: 2273384 - RNA, 19 nt, Artificial Sequence
  Description of Artificial Sequence: Synthetic oligonucleotide
  Sense strand starting at position 1989 of SEQ ID NO: 1884539
ucccaucucugguugagau

SEQ ID NO: 2273385 - RNA, 19 nt, Artificial Sequence
  Description of Artificial Sequence: Synthetic oligonucleotide
  Antisense strand to SEQ ID NO: 2273384
aucucaaccagagauggga

SEQ ID NO: 2273386 - RNA, 19 nt, Artificial Sequence
  Description of Artificial Sequence: Synthetic oligonucleotide
  Sense strand starting at position 1990 of SEQ ID NO: 1884539
cccaucucugguugagauu

SEQ ID NO: 2273387 - RNA, 19 nt, Artificial Sequence
  Description of Artificial Sequence: Synthetic oligonucleotide
  Antisense strand to SEQ ID NO: 2273386
aaucucaaccagagauggg

SEQ ID NO: 2273388 - RNA, 19 nt, Artificial Sequence
  Description of Artificial Sequence: Synthetic oligonucleotide
  Sense strand starting at position 2009 of SEQ ID NO: 1884539
cuuguaugcccggucuuua

SEQ ID NO: 2273389 - RNA, 19 nt, Artificial Sequence
  Description of Artificial Sequence: Synthetic oligonucleotide
  Antisense strand to SEQ ID NO: 2273388
uaaagaccgggcauacaag

SEQ ID NO: 2273390 - RNA, 19 nt, Artificial Sequence
  Description of Artificial Sequence: Synthetic oligonucleotide
  Sense strand starting at position 2010 of SEQ ID NO: 1884539
uuguaugcccggucuuuau

SEQ ID NO: 2273391 - RNA, 19 nt, Artificial Sequence
  Description of Artificial Sequence: Synthetic oligonucleotide
  Antisense strand to SEQ ID NO: 2273390
auaaagaccgggcauacaa

SEQ ID NO: 2273392 - RNA, 19 nt, Artificial Sequence
  Description of Artificial Sequence: Synthetic oligonucleotide
  Sense strand starting at position 2027 of SEQ ID NO: 1884539
auaugaauggcaggucuua

SEQ ID NO: 2273393 - RNA, 19 nt, Artificial Sequence
  Description of Artificial Sequence: Synthetic oligonucleotide
  Antisense strand to SEQ ID NO: 2273392
uaagaccugccauucauau

SEQ ID NO: 2273394 - RNA, 19 nt, Artificial Sequence
  Description of Artificial Sequence: Synthetic oligonucleotide
  Sense strand starting at position 2104 of SEQ ID NO: 1884539
uaauauauagguugaaggu

SEQ ID NO: 2273395 - RNA, 19 nt, Artificial Sequence
  Description of Artificial Sequence: Synthetic oligonucleotide
  Antisense strand to SEQ ID NO: 2273394
accuucaaccuauauauua

SEQ ID NO: 2273396 - RNA, 19 nt, Artificial Sequence
  Description of Artificial Sequence: Synthetic oligonucleotide
  Sense strand starting at position 2501 of SEQ ID NO: 1884539
cagcucagagccugagaaa

SEQ ID NO: 2273397 - RNA, 19 nt, Artificial Sequence
  Description of Artificial Sequence: Synthetic oligonucleotide
  Antisense strand to SEQ ID NO: 2273396
uuucucaggcucugagcug

SEQ ID NO: 2273398 - RNA, 19 nt, Artificial Sequence
  Description of Artificial Sequence: Synthetic oligonucleotide
  Sense strand starting at position 2701 of SEQ ID NO: 1884539
uuagguuccuaaucacaga

SEQ ID NO: 2273399 - RNA, 19 nt, Artificial Sequence
  Description of Artificial Sequence: Synthetic oligonucleotide
  Antisense strand to SEQ ID NO: 2273398
ucugugauuaggaaccuaa

SEQ ID NO: 2273400 - RNA, 19 nt, Artificial Sequence
  Description of Artificial Sequence: Synthetic oligonucleotide
  Sense strand starting at position 2709 of SEQ ID NO: 1884539
cuaaucacagagugugaau

SEQ ID NO: 2273401 - RNA, 19 nt, Artificial Sequence
  Description of Artificial Sequence: Synthetic oligonucleotide
  Antisense strand to SEQ ID NO: 2273400
auucacacucugugauuag

SEQ ID NO: 2273402 - RNA, 19 nt, Artificial Sequence
  Description of Artificial Sequence: Synthetic oligonucleotide
  Sense strand starting at position 2944 of SEQ ID NO: 1884539
ugagguuuaaacuggcauu

SEQ ID NO: 2273403 - RNA, 19 nt, Artificial Sequence
  Description of Artificial Sequence: Synthetic oligonucleotide
  Antisense strand to SEQ ID NO: 2273402
aaugccaguuuaaaccuca

SEQ ID NO: 2273404 - RNA, 19 nt, Artificial Sequence
  Description of Artificial Sequence: Synthetic oligonucleotide
  Sense strand starting at position 3038 of SEQ ID NO: 1884539
guugcuugauuugcauaua

SEQ ID NO: 2273405 - RNA, 19 nt, Artificial Sequence
  Description of Artificial Sequence: Synthetic oligonucleotide
  Antisense strand to SEQ ID NO: 2273404
uauaugcaaaucaagcaac

SEQ ID NO: 2273406 - RNA, 19 nt, Artificial Sequence
  Description of Artificial Sequence: Synthetic oligonucleotide
  Sense strand starting at position 3051 of SEQ ID NO: 1884539
cauauaggagugugauauu

SEQ ID NO: 2273407 - RNA, 19 nt, Artificial Sequence
  Description of Artificial Sequence: Synthetic oligonucleotide
  Antisense strand to SEQ ID NO: 2273406
aauaucacacuccuauaug

SEQ ID NO: 2273408 - RNA, 19 nt, Artificial Sequence
  Description of Artificial Sequence: Synthetic oligonucleotide
  Sense strand starting at position 3054 of SEQ ID NO: 1884539
auaggagugugauauuuaa

SEQ ID NO: 2273409 - RNA, 19 nt, Artificial Sequence
  Description of Artificial Sequence: Synthetic oligonucleotide
  Antisense strand to SEQ ID NO: 2273408
uuaaauaucacacuccuau

SEQ ID NO: 2273410 - RNA, 19 nt, Artificial Sequence
  Description of Artificial Sequence: Synthetic oligonucleotide
  Sense strand starting at position 3087 of SEQ ID NO: 1884539
ggaugaaugugggugacua

SEQ ID NO: 2273411 - RNA, 19 nt, Artificial Sequence
  Description of Artificial Sequence: Synthetic oligonucleotide
  Antisense strand to SEQ ID NO: 2273410
uagucacccacauucaucc

SEQ ID NO: 2273412 - RNA, 19 nt, Artificial Sequence
  Description of Artificial Sequence: Synthetic oligonucleotide
  Sense strand starting at position 3088 of SEQ ID NO: 1884539
gaugaaugugggugacuau

SEQ ID NO: 2273413 - RNA, 19 nt, Artificial Sequence
  Description of Artificial Sequence: Synthetic oligonucleotide
  Antisense strand to SEQ ID NO: 2273412
auagucacccacauucauc

SEQ ID NO: 2273414 - RNA, 19 nt, Artificial Sequence
  Description of Artificial Sequence: Synthetic oligonucleotide
  Sense strand starting at position 3103 of SEQ ID NO: 1884539
cuauguuaugcguuuguga

SEQ ID NO: 2273415 - RNA, 19 nt, Artificial Sequence
  Description of Artificial Sequence: Synthetic oligonucleotide
  Antisense strand to SEQ ID NO: 2273414
ucacaaacgcauaacauag

SEQ ID NO: 2273416 - RNA, 19 nt, Artificial Sequence
  Description of Artificial Sequence: Synthetic oligonucleotide
  Sense strand starting at position 3134 of SEQ ID NO: 1884539
gaauauaggugaucaugug

SEQ ID NO: 2273417 - RNA, 19 nt, Artificial Sequence
  Description of Artificial Sequence: Synthetic oligonucleotide
  Antisense strand to SEQ ID NO: 2273416
cacaugaucaccuauauuc

SEQ ID NO: 2273418 - RNA, 19 nt, Artificial Sequence
  Description of Artificial Sequence: Synthetic oligonucleotide
  Sense strand starting at position 3240 of SEQ ID NO: 1884539
gguaaaguuaagggauauc

SEQ ID NO: 2273419 - RNA, 19 nt, Artificial Sequence
  Description of Artificial Sequence: Synthetic oligonucleotide
  Antisense strand to SEQ ID NO: 2273418
gauaucccuuaacuuuacc

SEQ ID NO: 2273420 - RNA, 19 nt, Artificial Sequence
  Description of Artificial Sequence: Synthetic oligonucleotide
  Sense strand starting at position 3472 of SEQ ID NO: 1884539
ugguuacacuucucagaag

SEQ ID NO: 2273421 - RNA, 19 nt, Artificial Sequence
  Description of Artificial Sequence: Synthetic oligonucleotide
  Antisense strand to SEQ ID NO: 2273420
cuucugagaaguguaacca

SEQ ID NO: 2273422 - RNA, 19 nt, Artificial Sequence
  Description of Artificial Sequence: Synthetic oligonucleotide
  Sense strand starting at position 3579 of SEQ ID NO: 1884539
cagaguugaauguguaaug

SEQ ID NO: 2273423 - RNA, 19 nt, Artificial Sequence
  Description of Artificial Sequence: Synthetic oligonucleotide
  Antisense strand to SEQ ID NO: 2273422
cauuacacauucaacucug

SEQ ID NO: 2273424 - RNA, 19 nt, Artificial Sequence
  Description of Artificial Sequence: Synthetic oligonucleotide
  Sense strand starting at position 3760 of SEQ ID NO: 1884539
ggaagaaccuaguuuccaa

SEQ ID NO: 2273425 - RNA, 19 nt, Artificial Sequence
  Description of Artificial Sequence: Synthetic oligonucleotide
  Antisense strand to SEQ ID NO: 2273424
uuggaaacuagguucuucc

SEQ ID NO: 2273426 - RNA, 19 nt, Artificial Sequence
  Description of Artificial Sequence: Synthetic oligonucleotide
  Sense strand starting at position 3782 of SEQ ID NO: 1884539
guggcaucuugauuaaaug

SEQ ID NO: 2273427 - RNA, 19 nt, Artificial Sequence
  Description of Artificial Sequence: Synthetic oligonucleotide
  Antisense strand to SEQ ID NO: 2273426
cauuuaaucaagaugccac

SEQ ID NO: 2273428 - RNA, 19 nt, Artificial Sequence
  Description of Artificial Sequence: Synthetic oligonucleotide
  Sense strand starting at position 3811 of SEQ ID NO: 1884539
gggcuauggagcuaaauca

SEQ ID NO: 2273429 - RNA, 19 nt, Artificial Sequence
  Description of Artificial Sequence: Synthetic oligonucleotide
  Antisense strand to SEQ ID NO: 2273428
ugauuuagcuccauagccc

SEQ ID NO: 2273430 - RNA, 19 nt, Artificial Sequence
  Description of Artificial Sequence: Synthetic oligonucleotide
  Sense strand starting at position 3940 of SEQ ID NO: 1884539
ccuugcaagguugauauaa

SEQ ID NO: 2273431 - RNA, 19 nt, Artificial Sequence
  Description of Artificial Sequence: Synthetic oligonucleotide
  Antisense strand to SEQ ID NO: 2273430
uuauaucaaccuugcaagg

SEQ ID NO: 2273432 - RNA, 19 nt, Artificial Sequence
  Description of Artificial Sequence: Synthetic oligonucleotide
  Sense strand starting at position 74 of SEQ ID NO: 1884540
agaccagugucuugggagu

SEQ ID NO: 2273433 - RNA, 19 nt, Artificial Sequence
  Description of Artificial Sequence: Synthetic oligonucleotide
  Antisense strand to SEQ ID NO: 2273432
acucccaagacacuggucu

SEQ ID NO: 2273434 - RNA, 19 nt, Artificial Sequence
  Description of Artificial Sequence: Synthetic oligonucleotide
  Sense strand starting at position 81 of SEQ ID NO: 1884540
ugucuugggaguugggaaa

SEQ ID NO: 2273435 - RNA, 19 nt, Artificial Sequence
  Description of Artificial Sequence: Synthetic oligonucleotide
  Antisense strand to SEQ ID NO: 2273434
uuucccaacucccaagaca

SEQ ID NO: 2273436 - RNA, 19 nt, Artificial Sequence
  Description of Artificial Sequence: Synthetic oligonucleotide
  Sense strand starting at position 166 of SEQ ID NO: 1884540
gcagaaugggucugugaac

SEQ ID NO: 2273437 - RNA, 19 nt, Artificial Sequence
  Description of Artificial Sequence: Synthetic oligonucleotide
  Antisense strand to SEQ ID NO: 2273436
guucacagacccauucugc

SEQ ID NO: 2273438 - RNA, 19 nt, Artificial Sequence
  Description of Artificial Sequence: Synthetic oligonucleotide
  Sense strand starting at position 167 of SEQ ID NO: 1884540
cagaaugggucugugaaca

SEQ ID NO: 2273439 - RNA, 19 nt, Artificial Sequence
  Description of Artificial Sequence: Synthetic oligonucleotide
  Antisense strand to SEQ ID NO: 2273438
uguucacagacccauucug

SEQ ID NO: 2273440 - RNA, 19 nt, Artificial Sequence
  Description of Artificial Sequence: Synthetic oligonucleotide
  Sense strand starting at position 317 of SEQ ID NO: 1884540
gagccuuccugguguuugu

SEQ ID NO: 2273441 - RNA, 19 nt, Artificial Sequence
  Description of Artificial Sequence: Synthetic oligonucleotide
  Antisense strand to SEQ ID NO: 2273440
acaaacaccaggaaggcuc

SEQ ID NO: 2273442 - RNA, 19 nt, Artificial Sequence
  Description of Artificial Sequence: Synthetic oligonucleotide
  Sense strand starting at position 651 of SEQ ID NO: 1884540
gauggaugcugccugauug

SEQ ID NO: 2273443 - RNA, 19 nt, Artificial Sequence
  Description of Artificial Sequence: Synthetic oligonucleotide
  Antisense strand to SEQ ID NO: 2273442
caaucaggcagcauccauc

SEQ ID NO: 2273444 - RNA, 19 nt, Artificial Sequence
  Description of Artificial Sequence: Synthetic oligonucleotide
  Sense strand starting at position 797 of SEQ ID NO: 1884540
ggaagagucuaguaagcuu

SEQ ID NO: 2273445 - RNA, 19 nt, Artificial Sequence
  Description of Artificial Sequence: Synthetic oligonucleotide
  Antisense strand to SEQ ID NO: 2273444
aagcuuacuagacucuucc

SEQ ID NO: 2273446 - RNA, 19 nt, Artificial Sequence
  Description of Artificial Sequence: Synthetic oligonucleotide
  Sense strand starting at position 875 of SEQ ID NO: 1884540
caauauuuguaucagugga

SEQ ID NO: 2273447 - RNA, 19 nt, Artificial Sequence
  Description of Artificial Sequence: Synthetic oligonucleotide
  Antisense strand to SEQ ID NO: 2273446
uccacugauacaaauauug

SEQ ID NO: 2273448 - RNA, 19 nt, Artificial Sequence
  Description of Artificial Sequence: Synthetic oligonucleotide
  Sense strand starting at position 950 of SEQ ID NO: 1884540
cgugguguucaucaggcau

SEQ ID NO: 2273449 - RNA, 19 nt, Artificial Sequence
  Description of Artificial Sequence: Synthetic oligonucleotide
  Antisense strand to SEQ ID NO: 2273448
augccugaugaacaccacg

SEQ ID NO: 2273450 - RNA, 19 nt, Artificial Sequence
  Description of Artificial Sequence: Synthetic oligonucleotide
  Sense strand starting at position 952 of SEQ ID NO: 1884540
ugguguucaucaggcaugu

SEQ ID NO: 2273451 - RNA, 19 nt, Artificial Sequence
  Description of Artificial Sequence: Synthetic oligonucleotide
  Antisense strand to SEQ ID NO: 2273450
acaugccugaugaacacca

SEQ ID NO: 2273452 - RNA, 19 nt, Artificial Sequence
  Description of Artificial Sequence: Synthetic oligonucleotide
  Sense strand starting at position 1282 of SEQ ID NO: 1884540
ugaggucuuggaggcaaau

SEQ ID NO: 2273453 - RNA, 19 nt, Artificial Sequence
  Description of Artificial Sequence: Synthetic oligonucleotide
  Antisense strand to SEQ ID NO: 2273452
auuugccuccaagaccuca

SEQ ID NO: 2273454 - RNA, 19 nt, Artificial Sequence
  Description of Artificial Sequence: Synthetic oligonucleotide
  Sense strand starting at position 1499 of SEQ ID NO: 1884540
gggcauuaauaucguggca

SEQ ID NO: 2273455 - RNA, 19 nt, Artificial Sequence
  Description of Artificial Sequence: Synthetic oligonucleotide
  Antisense strand to SEQ ID NO: 2273454
ugccacgauauuaaugccc

SEQ ID NO: 2273456 - RNA, 19 nt, Artificial Sequence
  Description of Artificial Sequence: Synthetic oligonucleotide
  Sense strand starting at position 1501 of SEQ ID NO: 1884540
gcauuaauaucguggcaag

SEQ ID NO: 2273457 - RNA, 19 nt, Artificial Sequence
  Description of Artificial Sequence: Synthetic oligonucleotide
  Antisense strand to SEQ ID NO: 2273456
cuugccacgauauuaaugc

SEQ ID NO: 2273458 - RNA, 19 nt, Artificial Sequence
  Description of Artificial Sequence: Synthetic oligonucleotide
  Sense strand starting at position 1502 of SEQ ID NO: 1884540
cauuaauaucguggcaaga

SEQ ID NO: 2273459 - RNA, 19 nt, Artificial Sequence
  Description of Artificial Sequence: Synthetic oligonucleotide
  Antisense strand to SEQ ID NO: 2273458
ucuugccacgauauuaaug

SEQ ID NO: 2273460 - RNA, 19 nt, Artificial Sequence
  Description of Artificial Sequence: Synthetic oligonucleotide
  Sense strand starting at position 1504 of SEQ ID NO: 1884540
uuaauaucguggcaagaaa

SEQ ID NO: 2273461 - RNA, 19 nt, Artificial Sequence
  Description of Artificial Sequence: Synthetic oligonucleotide
  Antisense strand to SEQ ID NO: 2273460
uuucuugccacgauauuaa

SEQ ID NO: 2273462 - RNA, 19 nt, Artificial Sequence
  Description of Artificial Sequence: Synthetic oligonucleotide
  Sense strand starting at position 1575 of SEQ ID NO: 1884540
aggaguucacccggauaag

SEQ ID NO: 2273463 - RNA, 19 nt, Artificial Sequence
  Description of Artificial Sequence: Synthetic oligonucleotide
  Antisense strand to SEQ ID NO: 2273462
cuuauccgggugaacuccu

SEQ ID NO: 2273464 - RNA, 19 nt, Artificial Sequence
  Description of Artificial Sequence: Synthetic oligonucleotide
  Sense strand starting at position 1749 of SEQ ID NO: 1884540
cagggaugccauggcugaa

SEQ ID NO: 2273465 - RNA, 19 nt, Artificial Sequence
  Description of Artificial Sequence: Synthetic oligonucleotide
  Antisense strand to SEQ ID NO: 2273464
uucagccauggcaucccug

SEQ ID NO: 2273466 - RNA, 19 nt, Artificial Sequence
  Description of Artificial Sequence: Synthetic oligonucleotide
  Sense strand starting at position 1790 of SEQ ID NO: 1884540
gggcuauuguugaagagag

SEQ ID NO: 2273467 - RNA, 19 nt, Artificial Sequence
  Description of Artificial Sequence: Synthetic oligonucleotide
  Antisense strand to SEQ ID NO: 2273466
cucucuucaacaauagccc

SEQ ID NO: 2273468 - RNA, 19 nt, Artificial Sequence
  Description of Artificial Sequence: Synthetic oligonucleotide
  Sense strand starting at position 1843 of SEQ ID NO: 1884540
cagagugggcccugagaga

SEQ ID NO: 2273469 - RNA, 19 nt, Artificial Sequence
  Description of Artificial Sequence: Synthetic oligonucleotide
  Antisense strand to SEQ ID NO: 2273468
ucucucagggcccacucug

SEQ ID NO: 2273470 - RNA, 19 nt, Artificial Sequence
  Description of Artificial Sequence: Synthetic oligonucleotide
  Sense strand starting at position 1893 of SEQ ID NO: 1884540
ggguaggccuucgagaagu

SEQ ID NO: 2273471 - RNA, 19 nt, Artificial Sequence
  Description of Artificial Sequence: Synthetic oligonucleotide
  Antisense strand to SEQ ID NO: 2273470
acuucucgaaggccuaccc

SEQ ID NO: 2273472 - RNA, 19 nt, Artificial Sequence
  Description of Artificial Sequence: Synthetic oligonucleotide
  Sense strand starting at position 1895 of SEQ ID NO: 1884540
guaggccuucgagaaguca

SEQ ID NO: 2273473 - RNA, 19 nt, Artificial Sequence
  Description of Artificial Sequence: Synthetic oligonucleotide
  Antisense strand to SEQ ID NO: 2273472
ugacuucucgaaggccuac

SEQ ID NO: 2273474 - RNA, 19 nt, Artificial Sequence
  Description of Artificial Sequence: Synthetic oligonucleotide
  Sense strand starting at position 2020 of SEQ ID NO: 1884540
gguucuucuccaggaggga

SEQ ID NO: 2273475 - RNA, 19 nt, Artificial Sequence
  Description of Artificial Sequence: Synthetic oligonucleotide
  Antisense strand to SEQ ID NO: 2273474
ucccuccuggagaagaacc

SEQ ID NO: 2273476 - RNA, 19 nt, Artificial Sequence
  Description of Artificial Sequence: Synthetic oligonucleotide
  Sense strand starting at position 2316 of SEQ ID NO: 1884540
gguuguccucaagggaguu

SEQ ID NO: 2273477 - RNA, 19 nt, Artificial Sequence
  Description of Artificial Sequence: Synthetic oligonucleotide
  Antisense strand to SEQ ID NO: 2273476
aacucccuugaggacaacc

SEQ ID NO: 2273478 - RNA, 19 nt, Artificial Sequence
  Description of Artificial Sequence: Synthetic oligonucleotide
  Sense strand starting at position 2438 of SEQ ID NO: 1884540
ggacgugcgugcucuuuaa

SEQ ID NO: 2273479 - RNA, 19 nt, Artificial Sequence
  Description of Artificial Sequence: Synthetic oligonucleotide
  Antisense strand to SEQ ID NO: 2273478
uuaaagagcacgcacgucc

SEQ ID NO: 2273480 - RNA, 19 nt, Artificial Sequence
  Description of Artificial Sequence: Synthetic oligonucleotide
  Sense strand starting at position 2440 of SEQ ID NO: 1884540
acgugcgugcucuuuaaag

SEQ ID NO: 2273481 - RNA, 19 nt, Artificial Sequence
  Description of Artificial Sequence: Synthetic oligonucleotide
  Antisense strand to SEQ ID NO: 2273480
cuuuaaagagcacgcacgu

SEQ ID NO: 2273482 - RNA, 19 nt, Artificial Sequence
  Description of Artificial Sequence: Synthetic oligonucleotide
  Sense strand starting at position 2442 of SEQ ID NO: 1884540
gugcgugcucuuuaaagaa

SEQ ID NO: 2273483 - RNA, 19 nt, Artificial Sequence
  Description of Artificial Sequence: Synthetic oligonucleotide
  Antisense strand to SEQ ID NO: 2273482
uucuuuaaagagcacgcac

SEQ ID NO: 2273484 - RNA, 19 nt, Artificial Sequence
  Description of Artificial Sequence: Synthetic oligonucleotide
  Sense strand starting at position 2608 of SEQ ID NO: 1884540
cguggcgucuccuuagaga

SEQ ID NO: 2273485 - RNA, 19 nt, Artificial Sequence
  Description of Artificial Sequence: Synthetic oligonucleotide
  Antisense strand to SEQ ID NO: 2273484
ucucuaaggagacgccacg

SEQ ID NO: 2273486 - RNA, 19 nt, Artificial Sequence
  Description of Artificial Sequence: Synthetic oligonucleotide
  Sense strand starting at position 2611 of SEQ ID NO: 1884540
ggcgucuccuuagagaugu

SEQ ID NO: 2273487 - RNA, 19 nt, Artificial Sequence
  Description of Artificial Sequence: Synthetic oligonucleotide
  Antisense strand to SEQ ID NO: 2273486
acaucucuaaggagacgcc

SEQ ID NO: 2273488 - RNA, 19 nt, Artificial Sequence
  Description of Artificial Sequence: Synthetic oligonucleotide
  Sense strand starting at position 2771 of SEQ ID NO: 1884540
gaaccacgucuaugagaca

SEQ ID NO: 2273489 - RNA, 19 nt, Artificial Sequence
  Description of Artificial Sequence: Synthetic oligonucleotide
  Antisense strand to SEQ ID NO: 2273488
ugucucauagacgugguuc

SEQ ID NO: 2273490 - RNA, 19 nt, Artificial Sequence
  Description of Artificial Sequence: Synthetic oligonucleotide
  Sense strand starting at position 2795 of SEQ ID NO: 1884540
ccuggaaucuucuggagaa

SEQ ID NO: 2273491 - RNA, 19 nt, Artificial Sequence
  Description of Artificial Sequence: Synthetic oligonucleotide
  Antisense strand to SEQ ID NO: 2273490
uucuccagaagauuccagg

SEQ ID NO: 2273492 - RNA, 19 nt, Artificial Sequence
  Description of Artificial Sequence: Synthetic oligonucleotide
  Sense strand starting at position 2796 of SEQ ID NO: 1884540
cuggaaucuucuggagaag

SEQ ID NO: 2273493 - RNA, 19 nt, Artificial Sequence
  Description of Artificial Sequence: Synthetic oligonucleotide
  Antisense strand to SEQ ID NO: 2273492
cuucuccagaagauuccag

SEQ ID NO: 2273494 - RNA, 19 nt, Artificial Sequence
  Description of Artificial Sequence: Synthetic oligonucleotide
  Sense strand starting at position 3205 of SEQ ID NO: 1884540
gacgucagcucagcuuaua

SEQ ID NO: 2273495 - RNA, 19 nt, Artificial Sequence
  Description of Artificial Sequence: Synthetic oligonucleotide
  Antisense strand to SEQ ID NO: 2273494
uauaagcugagcugacguc

SEQ ID NO: 2273496 - RNA, 19 nt, Artificial Sequence
  Description of Artificial Sequence: Synthetic oligonucleotide
  Sense strand starting at position 3208 of SEQ ID NO: 1884540
gucagcucagcuuauaaga

SEQ ID NO: 2273497 - RNA, 19 nt, Artificial Sequence
  Description of Artificial Sequence: Synthetic oligonucleotide
  Antisense strand to SEQ ID NO: 2273496
ucuuauaagcugagcugac

SEQ ID NO: 2273498 - RNA, 19 nt, Artificial Sequence
  Description of Artificial Sequence: Synthetic oligonucleotide
  Sense strand starting at position 3352 of SEQ ID NO: 1884540
ggcagaggccaucauggua

SEQ ID NO: 2273499 - RNA, 19 nt, Artificial Sequence
  Description of Artificial Sequence: Synthetic oligonucleotide
  Antisense strand to SEQ ID NO: 2273498
uaccaugauggccucugcc

SEQ ID NO: 2273500 - RNA, 19 nt, Artificial Sequence
  Description of Artificial Sequence: Synthetic oligonucleotide
  Sense strand starting at position 3650 of SEQ ID NO: 1884540
uugaaucuuaacgaucgga

SEQ ID NO: 2273501 - RNA, 19 nt, Artificial Sequence
  Description of Artificial Sequence: Synthetic oligonucleotide
  Antisense strand to SEQ ID NO: 2273500
uccgaucguuaagauucaa

SEQ ID NO: 2273502 - RNA, 19 nt, Artificial Sequence
  Description of Artificial Sequence: Synthetic oligonucleotide
  Sense strand starting at position 3653 of SEQ ID NO: 1884540
aaucuuaacgaucggaaug

SEQ ID NO: 2273503 - RNA, 19 nt, Artificial Sequence
  Description of Artificial Sequence: Synthetic oligonucleotide
  Antisense strand to SEQ ID NO: 2273502
cauuccgaucguuaagauu

SEQ ID NO: 2273504 - RNA, 19 nt, Artificial Sequence
  Description of Artificial Sequence: Synthetic oligonucleotide
  Sense strand starting at position 3654 of SEQ ID NO: 1884540
aucuuaacgaucggaaugu

SEQ ID NO: 2273505 - RNA, 19 nt, Artificial Sequence
  Description of Artificial Sequence: Synthetic oligonucleotide
  Antisense strand to SEQ ID NO: 2273504
acauuccgaucguuaagau

SEQ ID NO: 2273506 - RNA, 19 nt, Artificial Sequence
  Description of Artificial Sequence: Synthetic oligonucleotide
  Sense strand starting at position 3658 of SEQ ID NO: 1884540
uaacgaucggaauguggaa

SEQ ID NO: 2273507 - RNA, 19 nt, Artificial Sequence
  Description of Artificial Sequence: Synthetic oligonucleotide
  Antisense strand to SEQ ID NO: 2273506
uuccacauuccgaucguua

SEQ ID NO: 2273508 - RNA, 19 nt, Artificial Sequence
  Description of Artificial Sequence: Synthetic oligonucleotide
  Sense strand starting at position 3926 of SEQ ID NO: 1884540
gccuguuccucccuuauuu

SEQ ID NO: 2273509 - RNA, 19 nt, Artificial Sequence
  Description of Artificial Sequence: Synthetic oligonucleotide
  Antisense strand to SEQ ID NO: 2273508
aaauaagggaggaacaggc

SEQ ID NO: 2273510 - RNA, 19 nt, Artificial Sequence
  Description of Artificial Sequence: Synthetic oligonucleotide
  Sense strand starting at position 4 of SEQ ID NO: 1884541
gaugauaauuaggucuacu

SEQ ID NO: 2273511 - RNA, 19 nt, Artificial Sequence
  Description of Artificial Sequence: Synthetic oligonucleotide
  Antisense strand to SEQ ID NO: 2273510
aguagaccuaauuaucauc

SEQ ID NO: 2273512 - RNA, 19 nt, Artificial Sequence
  Description of Artificial Sequence: Synthetic oligonucleotide
  Sense strand starting at position 214 of SEQ ID NO: 1884541
accagaccucuuggaacau

SEQ ID NO: 2273513 - RNA, 19 nt, Artificial Sequence
  Description of Artificial Sequence: Synthetic oligonucleotide
  Antisense strand to SEQ ID NO: 2273512
auguuccaagaggucuggu

SEQ ID NO: 2273514 - RNA, 19 nt, Artificial Sequence
  Description of Artificial Sequence: Synthetic oligonucleotide
  Sense strand starting at position 287 of SEQ ID NO: 1884541
uggauccauccaugaaacu

SEQ ID NO: 2273515 - RNA, 19 nt, Artificial Sequence
  Description of Artificial Sequence: Synthetic oligonucleotide
  Antisense strand to SEQ ID NO: 2273514
aguuucauggauggaucca

SEQ ID NO: 2273516 - RNA, 19 nt, Artificial Sequence
  Description of Artificial Sequence: Synthetic oligonucleotide
  Sense strand starting at position 381 of SEQ ID NO: 1884541
acuugcuuaugcucagaaa

SEQ ID NO: 2273517 - RNA, 19 nt, Artificial Sequence
  Description of Artificial Sequence: Synthetic oligonucleotide
  Antisense strand to SEQ ID NO: 2273516
uuucugagcauaagcaagu

SEQ ID NO: 2273518 - RNA, 19 nt, Artificial Sequence
  Description of Artificial Sequence: Synthetic oligonucleotide
  Sense strand starting at position 382 of SEQ ID NO: 1884541
cuugcuuaugcucagaaac

SEQ ID NO: 2273519 - RNA, 19 nt, Artificial Sequence
  Description of Artificial Sequence: Synthetic oligonucleotide
  Antisense strand to SEQ ID NO: 2273518
guuucugagcauaagcaag

SEQ ID NO: 2273520 - RNA, 19 nt, Artificial Sequence
  Description of Artificial Sequence: Synthetic oligonucleotide
  Sense strand starting at position 436 of SEQ ID NO: 1884541
cagcuuugggcagaucaca

SEQ ID NO: 2273521 - RNA, 19 nt, Artificial Sequence
  Description of Artificial Sequence: Synthetic oligonucleotide
  Antisense strand to SEQ ID NO: 2273520
ugugaucugcccaaagcug

SEQ ID NO: 2273522 - RNA, 19 nt, Artificial Sequence
  Description of Artificial Sequence: Synthetic oligonucleotide
  Sense strand starting at position 490 of SEQ ID NO: 1884541
ucucguaagccuuauguaa

SEQ ID NO: 2273523 - RNA, 19 nt, Artificial Sequence
  Description of Artificial Sequence: Synthetic oligonucleotide
  Antisense strand to SEQ ID NO: 2273522
uuacauaaggcuuacgaga

SEQ ID NO: 2273524 - RNA, 19 nt, Artificial Sequence
  Description of Artificial Sequence: Synthetic oligonucleotide
  Sense strand starting at position 521 of SEQ ID NO: 1884541
uuaauagaguuccuugaug

SEQ ID NO: 2273525 - RNA, 19 nt, Artificial Sequence
  Description of Artificial Sequence: Synthetic oligonucleotide
  Antisense strand to SEQ ID NO: 2273524
caucaaggaacucuauuaa

SEQ ID NO: 2273526 - RNA, 19 nt, Artificial Sequence
  Description of Artificial Sequence: Synthetic oligonucleotide
  Sense strand starting at position 964 of SEQ ID NO: 1884541
aaaccuguagcauggaauu

SEQ ID NO: 2273527 - RNA, 19 nt, Artificial Sequence
  Description of Artificial Sequence: Synthetic oligonucleotide
  Antisense strand to SEQ ID NO: 2273526
aauuccaugcuacagguuu

SEQ ID NO: 2273528 - RNA, 19 nt, Artificial Sequence
  Description of Artificial Sequence: Synthetic oligonucleotide
  Sense strand starting at position 1036 of SEQ ID NO: 1884541
uuauaucaugucuauguca

SEQ ID NO: 2273529 - RNA, 19 nt, Artificial Sequence
  Description of Artificial Sequence: Synthetic oligonucleotide
  Antisense strand to SEQ ID NO: 2273528
ugacauagacaugauauaa

SEQ ID NO: 2273530 - RNA, 19 nt, Artificial Sequence
  Description of Artificial Sequence: Synthetic oligonucleotide
  Sense strand starting at position 1038 of SEQ ID NO: 1884541
auaucaugucuaugucaag

SEQ ID NO: 2273531 - RNA, 19 nt, Artificial Sequence
  Description of Artificial Sequence: Synthetic oligonucleotide
  Antisense strand to SEQ ID NO: 2273530
cuugacauagacaugauau

SEQ ID NO: 2273532 - RNA, 19 nt, Artificial Sequence
  Description of Artificial Sequence: Synthetic oligonucleotide
  Sense strand starting at position 1067 of SEQ ID NO: 1884541
uuaacacccuaguuguaaa

SEQ ID NO: 2273533 - RNA, 19 nt, Artificial Sequence
  Description of Artificial Sequence: Synthetic oligonucleotide
  Antisense strand to SEQ ID NO: 2273532
uuuacaacuaggguguuaa

SEQ ID NO: 2273534 - RNA, 19 nt, Artificial Sequence
  Description of Artificial Sequence: Synthetic oligonucleotide
  Sense strand starting at position 1098 of SEQ ID NO: 1884541
uaagaaaccgccuggauau

SEQ ID NO: 2273535 - RNA, 19 nt, Artificial Sequence
  Description of Artificial Sequence: Synthetic oligonucleotide
  Antisense strand to SEQ ID NO: 2273534
auauccaggcgguuucuua

SEQ ID NO: 2273536 - RNA, 19 nt, Artificial Sequence
  Description of Artificial Sequence: Synthetic oligonucleotide
  Sense strand starting at position 1099 of SEQ ID NO: 1884541
aagaaaccgccuggauauu

SEQ ID NO: 2273537 - RNA, 19 nt, Artificial Sequence
  Description of Artificial Sequence: Synthetic oligonucleotide
  Antisense strand to SEQ ID NO: 2273536
aauauccaggcgguuucuu

SEQ ID NO: 2273538 - RNA, 19 nt, Artificial Sequence
  Description of Artificial Sequence: Synthetic oligonucleotide
  Sense strand starting at position 1277 of SEQ ID NO: 1884541
ccaugcugcucaguacuaa

SEQ ID NO: 2273539 - RNA, 19 nt, Artificial Sequence
  Description of Artificial Sequence: Synthetic oligonucleotide
  Antisense strand to SEQ ID NO: 2273538
uuaguacugagcagcaugg

SEQ ID NO: 2273540 - RNA, 19 nt, Artificial Sequence
  Description of Artificial Sequence: Synthetic oligonucleotide
  Sense strand starting at position 1332 of SEQ ID NO: 1884541
gccauucuuccagacaagu

SEQ ID NO: 2273541 - RNA, 19 nt, Artificial Sequence
  Description of Artificial Sequence: Synthetic oligonucleotide
  Antisense strand to SEQ ID NO: 2273540
acuugucuggaagaauggc

SEQ ID NO: 2273542 - RNA, 19 nt, Artificial Sequence
  Description of Artificial Sequence: Synthetic oligonucleotide
  Sense strand starting at position 1448 of SEQ ID NO: 1884541
ugaggaaaguuguucagga

SEQ ID NO: 2273543 - RNA, 19 nt, Artificial Sequence
  Description of Artificial Sequence: Synthetic oligonucleotide
  Antisense strand to SEQ ID NO: 2273542
uccugaacaacuuuccuca

SEQ ID NO: 2273544 - RNA, 19 nt, Artificial Sequence
  Description of Artificial Sequence: Synthetic oligonucleotide
  Sense strand starting at position 1536 of SEQ ID NO: 1884541
augugugaauccuccauga

SEQ ID NO: 2273545 - RNA, 19 nt, Artificial Sequence
  Description of Artificial Sequence: Synthetic oligonucleotide
  Antisense strand to SEQ ID NO: 2273544
ucauggaggauucacacau

SEQ ID NO: 2273546 - RNA, 19 nt, Artificial Sequence
  Description of Artificial Sequence: Synthetic oligonucleotide
  Sense strand starting at position 1538 of SEQ ID NO: 1884541
gugugaauccuccaugaac

SEQ ID NO: 2273547 - RNA, 19 nt, Artificial Sequence
  Description of Artificial Sequence: Synthetic oligonucleotide
  Antisense strand to SEQ ID NO: 2273546
guucauggaggauucacac

SEQ ID NO: 2273548 - RNA, 19 nt, Artificial Sequence
  Description of Artificial Sequence: Synthetic oligonucleotide
  Sense strand starting at position 1540 of SEQ ID NO: 1884541
gugaauccuccaugaaccu

SEQ ID NO: 2273549 - RNA, 19 nt, Artificial Sequence
  Description of Artificial Sequence: Synthetic oligonucleotide
  Antisense strand to SEQ ID NO: 2273548
agguucauggaggauucac

SEQ ID NO: 2273550 - RNA, 19 nt, Artificial Sequence
  Description of Artificial Sequence: Synthetic oligonucleotide
  Sense strand starting at position 1598 of SEQ ID NO: 1884541
ccacucaguccugagccaa

SEQ ID NO: 2273551 - RNA, 19 nt, Artificial Sequence
  Description of Artificial Sequence: Synthetic oligonucleotide
  Antisense strand to SEQ ID NO: 2273550
uuggcucaggacugagugg

SEQ ID NO: 2273552 - RNA, 19 nt, Artificial Sequence
  Description of Artificial Sequence: Synthetic oligonucleotide
  Sense strand starting at position 2520 of SEQ ID NO: 1884541
cggaauaaccggugaagac

SEQ ID NO: 2273553 - RNA, 19 nt, Artificial Sequence
  Description of Artificial Sequence: Synthetic oligonucleotide
  Antisense strand to SEQ ID NO: 2273552
gucuucaccgguuauuccg

SEQ ID NO: 2273554 - RNA, 19 nt, Artificial Sequence
  Description of Artificial Sequence: Synthetic oligonucleotide
  Sense strand starting at position 2692 of SEQ ID NO: 1884541
cccgcaguuacucagguaa

SEQ ID NO: 2273555 - RNA, 19 nt, Artificial Sequence
  Description of Artificial Sequence: Synthetic oligonucleotide
  Antisense strand to SEQ ID NO: 2273554
uuaccugaguaacugcggg

SEQ ID NO: 2273556 - RNA, 19 nt, Artificial Sequence
  Description of Artificial Sequence: Synthetic oligonucleotide
  Sense strand starting at position 2788 of SEQ ID NO: 1884541
ucuagagcugucuaaacag

SEQ ID NO: 2273557 - RNA, 19 nt, Artificial Sequence
  Description of Artificial Sequence: Synthetic oligonucleotide
  Antisense strand to SEQ ID NO: 2273556
cuguuuagacagcucuaga

SEQ ID NO: 2273558 - RNA, 19 nt, Artificial Sequence
  Description of Artificial Sequence: Synthetic oligonucleotide
  Sense strand starting at position 3154 of SEQ ID NO: 1884541
aaaugaugaugccagaaag

SEQ ID NO: 2273559 - RNA, 19 nt, Artificial Sequence
  Description of Artificial Sequence: Synthetic oligonucleotide
  Antisense strand to SEQ ID NO: 2273558
cuuucuggcaucaucauuu

SEQ ID NO: 2273560 - RNA, 19 nt, Artificial Sequence
  Description of Artificial Sequence: Synthetic oligonucleotide
  Sense strand starting at position 3211 of SEQ ID NO: 1884541
cuacacauuccuugagucu

SEQ ID NO: 2273561 - RNA, 19 nt, Artificial Sequence
  Description of Artificial Sequence: Synthetic oligonucleotide
  Antisense strand to SEQ ID NO: 2273560
agacucaaggaauguguag

SEQ ID NO: 2273562 - RNA, 19 nt, Artificial Sequence
  Description of Artificial Sequence: Synthetic oligonucleotide
  Sense strand starting at position 3338 of SEQ ID NO: 1884541
cucucagcccuuuaagguu

SEQ ID NO: 2273563 - RNA, 19 nt, Artificial Sequence
  Description of Artificial Sequence: Synthetic oligonucleotide
  Antisense strand to SEQ ID NO: 2273562
aaccuuaaagggcugagag

SEQ ID NO: 2273564 - RNA, 19 nt, Artificial Sequence
  Description of Artificial Sequence: Synthetic oligonucleotide
  Sense strand starting at position 3421 of SEQ ID NO: 1884541
ggaggugucagcgacuuga

SEQ ID NO: 2273565 - RNA, 19 nt, Artificial Sequence
  Description of Artificial Sequence: Synthetic oligonucleotide
  Antisense strand to SEQ ID NO: 2273564
ucaagucgcugacaccucc

SEQ ID NO: 2273566 - RNA, 19 nt, Artificial Sequence
  Description of Artificial Sequence: Synthetic oligonucleotide
  Sense strand starting at position 3425 of SEQ ID NO: 1884541
gugucagcgacuugagaau

SEQ ID NO: 2273567 - RNA, 19 nt, Artificial Sequence
  Description of Artificial Sequence: Synthetic oligonucleotide
  Antisense strand to SEQ ID NO: 2273566
auucucaagucgcugacac

SEQ ID NO: 2273568 - RNA, 19 nt, Artificial Sequence
  Description of Artificial Sequence: Synthetic oligonucleotide
  Sense strand starting at position 3437 of SEQ ID NO: 1884541
ugagaaugagugcgccaaa

SEQ ID NO: 2273569 - RNA, 19 nt, Artificial Sequence
  Description of Artificial Sequence: Synthetic oligonucleotide
  Antisense strand to SEQ ID NO: 2273568
uuuggcgcacucauucuca

SEQ ID NO: 2273570 - RNA, 19 nt, Artificial Sequence
  Description of Artificial Sequence: Synthetic oligonucleotide
  Sense strand starting at position 3440 of SEQ ID NO: 1884541
gaaugagugcgccaaagaa

SEQ ID NO: 2273571 - RNA, 19 nt, Artificial Sequence
  Description of Artificial Sequence: Synthetic oligonucleotide
  Antisense strand to SEQ ID NO: 2273570
uucuuuggcgcacucauuc

SEQ ID NO: 2273572 - RNA, 19 nt, Artificial Sequence
  Description of Artificial Sequence: Synthetic oligonucleotide
  Sense strand starting at position 3528 of SEQ ID NO: 1884541
gcagaucuugacugaaacc

SEQ ID NO: 2273573 - RNA, 19 nt, Artificial Sequence
  Description of Artificial Sequence: Synthetic oligonucleotide
  Antisense strand to SEQ ID NO: 2273572
gguuucagucaagaucugc

SEQ ID NO: 2273574 - RNA, 19 nt, Artificial Sequence
  Description of Artificial Sequence: Synthetic oligonucleotide
  Sense strand starting at position 3608 of SEQ ID NO: 1884541
ucugacugacagugcuaaa

SEQ ID NO: 2273575 - RNA, 19 nt, Artificial Sequence
  Description of Artificial Sequence: Synthetic oligonucleotide
  Antisense strand to SEQ ID NO: 2273574
uuuagcacugucagucaga

SEQ ID NO: 2273576 - RNA, 19 nt, Artificial Sequence
  Description of Artificial Sequence: Synthetic oligonucleotide
  Sense strand starting at position 3698 of SEQ ID NO: 1884541
ggguuaggccguugauaua

SEQ ID NO: 2273577 - RNA, 19 nt, Artificial Sequence
  Description of Artificial Sequence: Synthetic oligonucleotide
  Antisense strand to SEQ ID NO: 2273576
uauaucaacggccuaaccc

SEQ ID NO: 2273578 - RNA, 19 nt, Artificial Sequence
  Description of Artificial Sequence: Synthetic oligonucleotide
  Sense strand starting at position 3725 of SEQ ID NO: 1884541
uggcuaauguaaccuacua

SEQ ID NO: 2273579 - RNA, 19 nt, Artificial Sequence
  Description of Artificial Sequence: Synthetic oligonucleotide
  Antisense strand to SEQ ID NO: 2273578
uaguagguuacauuagcca

SEQ ID NO: 2273580 - RNA, 19 nt, Artificial Sequence
  Description of Artificial Sequence: Synthetic oligonucleotide
  Sense strand starting at position 3783 of SEQ ID NO: 1884541
uucguuaaguuccuaacca

SEQ ID NO: 2273581 - RNA, 19 nt, Artificial Sequence
  Description of Artificial Sequence: Synthetic oligonucleotide
  Antisense strand to SEQ ID NO: 2273580
ugguuaggaacuuaacgaa

SEQ ID NO: 2273582 - RNA, 19 nt, Artificial Sequence
  Description of Artificial Sequence: Synthetic oligonucleotide
  Sense strand starting at position 3790 of SEQ ID NO: 1884541
aguuccuaaccacgucaaa

SEQ ID NO: 2273583 - RNA, 19 nt, Artificial Sequence
  Description of Artificial Sequence: Synthetic oligonucleotide
  Antisense strand to SEQ ID NO: 2273582
uuugacgugguuaggaacu

SEQ ID NO: 2273584 - RNA, 19 nt, Artificial Sequence
  Description of Artificial Sequence: Synthetic oligonucleotide
  Sense strand starting at position 3839 of SEQ ID NO: 1884541
guugcuucugcaugaaaca

SEQ ID NO: 2273585 - RNA, 19 nt, Artificial Sequence
  Description of Artificial Sequence: Synthetic oligonucleotide
  Antisense strand to SEQ ID NO: 2273584
uguuucaugcagaagcaac

SEQ ID NO: 2273586 - RNA, 19 nt, Artificial Sequence
  Description of Artificial Sequence: Synthetic oligonucleotide
  Sense strand starting at position 3890 of SEQ ID NO: 1884541
gucucuuacucuuccagau

SEQ ID NO: 2273587 - RNA, 19 nt, Artificial Sequence
  Description of Artificial Sequence: Synthetic oligonucleotide
  Antisense strand to SEQ ID NO: 2273586
aucuggaagaguaagagac

SEQ ID NO: 2273588 - RNA, 19 nt, Artificial Sequence
  Description of Artificial Sequence: Synthetic oligonucleotide
  Sense strand starting at position 3913 of SEQ ID NO: 1884541
cucaaugugucuccuuaga

SEQ ID NO: 2273589 - RNA, 19 nt, Artificial Sequence
  Description of Artificial Sequence: Synthetic oligonucleotide
  Antisense strand to SEQ ID NO: 2273588
ucuaaggagacacauugag

SEQ ID NO: 2273590 - RNA, 19 nt, Artificial Sequence
  Description of Artificial Sequence: Synthetic oligonucleotide
  Sense strand starting at position 64 of SEQ ID NO: 1884542
gcucaaaggcuguguuugu

SEQ ID NO: 2273591 - RNA, 19 nt, Artificial Sequence
  Description of Artificial Sequence: Synthetic oligonucleotide
  Antisense strand to SEQ ID NO: 2273590
acaaacacagccuuugagc

SEQ ID NO: 2273592 - RNA, 19 nt, Artificial Sequence
  Description of Artificial Sequence: Synthetic oligonucleotide
  Sense strand starting at position 68 of SEQ ID NO: 1884542
aaaggcuguguuuguguaa

SEQ ID NO: 2273593 - RNA, 19 nt, Artificial Sequence
  Description of Artificial Sequence: Synthetic oligonucleotide
  Antisense strand to SEQ ID NO: 2273592
uuacacaaacacagccuuu

SEQ ID NO: 2273594 - RNA, 19 nt, Artificial Sequence
  Description of Artificial Sequence: Synthetic oligonucleotide
  Sense strand starting at position 197 of SEQ ID NO: 1884542
ugcagugaccugcaacaga

SEQ ID NO: 2273595 - RNA, 19 nt, Artificial Sequence
  Description of Artificial Sequence: Synthetic oligonucleotide
  Antisense strand to SEQ ID NO: 2273594
ucuguugcaggucacugca

SEQ ID NO: 2273596 - RNA, 19 nt, Artificial Sequence
  Description of Artificial Sequence: Synthetic oligonucleotide
  Sense strand starting at position 759 of SEQ ID NO: 1884542
gaaagaagcuucuagguug

SEQ ID NO: 2273597 - RNA, 19 nt, Artificial Sequence
  Description of Artificial Sequence: Synthetic oligonucleotide
  Antisense strand to SEQ ID NO: 2273596
caaccuagaagcuucuuuc

SEQ ID NO: 2273598 - RNA, 19 nt, Artificial Sequence
  Description of Artificial Sequence: Synthetic oligonucleotide
  Sense strand starting at position 804 of SEQ ID NO: 1884542
uuuaguugaccgugguaug

SEQ ID NO: 2273599 - RNA, 19 nt, Artificial Sequence
  Description of Artificial Sequence: Synthetic oligonucleotide
  Antisense strand to SEQ ID NO: 2273598
cauaccacggucaacuaaa

SEQ ID NO: 2273600 - RNA, 19 nt, Artificial Sequence
  Description of Artificial Sequence: Synthetic oligonucleotide
  Sense strand starting at position 1123 of SEQ ID NO: 1884542
ucagaagucaucggcuuac

SEQ ID NO: 2273601 - RNA, 19 nt, Artificial Sequence
  Description of Artificial Sequence: Synthetic oligonucleotide
  Antisense strand to SEQ ID NO: 2273600
guaagccgaugacuucuga

SEQ ID NO: 2273602 - RNA, 19 nt, Artificial Sequence
  Description of Artificial Sequence: Synthetic oligonucleotide
  Sense strand starting at position 1127 of SEQ ID NO: 1884542
aagucaucggcuuacaggu

SEQ ID NO: 2273603 - RNA, 19 nt, Artificial Sequence
  Description of Artificial Sequence: Synthetic oligonucleotide
  Antisense strand to SEQ ID NO: 2273602
accuguaagccgaugacuu

SEQ ID NO: 2273604 - RNA, 19 nt, Artificial Sequence
  Description of Artificial Sequence: Synthetic oligonucleotide
  Sense strand starting at position 1406 of SEQ ID NO: 1884542
ggagaagccucugccauga

SEQ ID NO: 2273605 - RNA, 19 nt, Artificial Sequence
  Description of Artificial Sequence: Synthetic oligonucleotide
  Antisense strand to SEQ ID NO: 2273604
ucauggcagaggcuucucc

SEQ ID NO: 2273606 - RNA, 19 nt, Artificial Sequence
  Description of Artificial Sequence: Synthetic oligonucleotide
  Sense strand starting at position 1543 of SEQ ID NO: 1884542
ccagaaugccuuugcuucu

SEQ ID NO: 2273607 - RNA, 19 nt, Artificial Sequence
  Description of Artificial Sequence: Synthetic oligonucleotide
  Antisense strand to SEQ ID NO: 2273606
agaagcaaaggcauucugg

SEQ ID NO: 2273608 - RNA, 19 nt, Artificial Sequence
  Description of Artificial Sequence: Synthetic oligonucleotide
  Sense strand starting at position 1652 of SEQ ID NO: 1884542
gcccuauacucuccagugu

SEQ ID NO: 2273609 - RNA, 19 nt, Artificial Sequence
  Description of Artificial Sequence: Synthetic oligonucleotide
  Antisense strand to SEQ ID NO: 2273608
acacuggagaguauagggc

SEQ ID NO: 2273610 - RNA, 19 nt, Artificial Sequence
  Description of Artificial Sequence: Synthetic oligonucleotide
  Sense strand starting at position 2068 of SEQ ID NO: 1884542
ucgggcuccuguugagaga

SEQ ID NO: 2273611 - RNA, 19 nt, Artificial Sequence
  Description of Artificial Sequence: Synthetic oligonucleotide
  Antisense strand to SEQ ID NO: 2273610
ucucucaacaggagcccga

SEQ ID NO: 2273612 - RNA, 19 nt, Artificial Sequence
  Description of Artificial Sequence: Synthetic oligonucleotide
  Sense strand starting at position 2069 of SEQ ID NO: 1884542
cgggcuccuguugagagaa

SEQ ID NO: 2273613 - RNA, 19 nt, Artificial Sequence
  Description of Artificial Sequence: Synthetic oligonucleotide
  Antisense strand to SEQ ID NO: 2273612
uucucucaacaggagcccg

SEQ ID NO: 2273614 - RNA, 19 nt, Artificial Sequence
  Description of Artificial Sequence: Synthetic oligonucleotide
  Sense strand starting at position 2980 of SEQ ID NO: 1884542
acaggaagcuugggucaga

SEQ ID NO: 2273615 - RNA, 19 nt, Artificial Sequence
  Description of Artificial Sequence: Synthetic oligonucleotide
  Antisense strand to SEQ ID NO: 2273614
ucugacccaagcuuccugu

SEQ ID NO: 2273616 - RNA, 19 nt, Artificial Sequence
  Description of Artificial Sequence: Synthetic oligonucleotide
  Sense strand starting at position 2981 of SEQ ID NO: 1884542
caggaagcuugggucagau

SEQ ID NO: 2273617 - RNA, 19 nt, Artificial Sequence
  Description of Artificial Sequence: Synthetic oligonucleotide
  Antisense strand to SEQ ID NO: 2273616
aucugacccaagcuuccug

SEQ ID NO: 2273618 - RNA, 19 nt, Artificial Sequence
  Description of Artificial Sequence: Synthetic oligonucleotide
  Sense strand starting at position 3151 of SEQ ID NO: 1884542
gggugacgcuccagucaga

SEQ ID NO: 2273619 - RNA, 19 nt, Artificial Sequence
  Description of Artificial Sequence: Synthetic oligonucleotide
  Antisense strand to SEQ ID NO: 2273618
ucugacuggagcgucaccc

SEQ ID NO: 2273620 - RNA, 19 nt, Artificial Sequence
  Description of Artificial Sequence: Synthetic oligonucleotide
  Sense strand starting at position 3180 of SEQ ID NO: 1884542
aagguaucccgaggcauag

SEQ ID NO: 2273621 - RNA, 19 nt, Artificial Sequence
  Description of Artificial Sequence: Synthetic oligonucleotide
  Antisense strand to SEQ ID NO: 2273620
cuaugccucgggauaccuu

SEQ ID NO: 2273622 - RNA, 19 nt, Artificial Sequence
  Description of Artificial Sequence: Synthetic oligonucleotide
  Sense strand starting at position 3220 of SEQ ID NO: 1884542
gcucucaagccagaggaau

SEQ ID NO: 2273623 - RNA, 19 nt, Artificial Sequence
  Description of Artificial Sequence: Synthetic oligonucleotide
  Antisense strand to SEQ ID NO: 2273622
auuccucuggcuugagagc

SEQ ID NO: 2273624 - RNA, 19 nt, Artificial Sequence
  Description of Artificial Sequence: Synthetic oligonucleotide
  Sense strand starting at position 3785 of SEQ ID NO: 1884542
gucagagaaagcugucugu

SEQ ID NO: 2273625 - RNA, 19 nt, Artificial Sequence
  Description of Artificial Sequence: Synthetic oligonucleotide
  Antisense strand to SEQ ID NO: 2273624
acagacagcuuucucugac

SEQ ID NO: 2273626 - RNA, 19 nt, Artificial Sequence
  Description of Artificial Sequence: Synthetic oligonucleotide
  Sense strand starting at position 3789 of SEQ ID NO: 1884542
gagaaagcugucuguggga

SEQ ID NO: 2273627 - RNA, 19 nt, Artificial Sequence
  Description of Artificial Sequence: Synthetic oligonucleotide
  Antisense strand to SEQ ID NO: 2273626
ucccacagacagcuuucuc

SEQ ID NO: 2273628 - RNA, 19 nt, Artificial Sequence
  Description of Artificial Sequence: Synthetic oligonucleotide
  Sense strand starting at position 3818 of SEQ ID NO: 1884542
gucaccaucugcugacaga

SEQ ID NO: 2273629 - RNA, 19 nt, Artificial Sequence
  Description of Artificial Sequence: Synthetic oligonucleotide
  Antisense strand to SEQ ID NO: 2273628
ucugucagcagauggugac

SEQ ID NO: 2273630 - RNA, 19 nt, Artificial Sequence
  Description of Artificial Sequence: Synthetic oligonucleotide
  Sense strand starting at position 3821 of SEQ ID NO: 1884542
accaucugcugacagagau

SEQ ID NO: 2273631 - RNA, 19 nt, Artificial Sequence
  Description of Artificial Sequence: Synthetic oligonucleotide
  Antisense strand to SEQ ID NO: 2273630
aucucugucagcagauggu

SEQ ID NO: 2273632 - RNA, 19 nt, Artificial Sequence
  Description of Artificial Sequence: Synthetic oligonucleotide
  Sense strand starting at position 3834 of SEQ ID NO: 1884542
agagaucuuuccucaccag

SEQ ID NO: 2273633 - RNA, 19 nt, Artificial Sequence
  Description of Artificial Sequence: Synthetic oligonucleotide
  Antisense strand to SEQ ID NO: 2273632
cuggugaggaaagaucucu

SEQ ID NO: 2273634 - RNA, 19 nt, Artificial Sequence
  Description of Artificial Sequence: Synthetic oligonucleotide
  Sense strand starting at position 327 of SEQ ID NO: 1884543
ccgagcagugcucauucua

SEQ ID NO: 2273635 - RNA, 19 nt, Artificial Sequence
  Description of Artificial Sequence: Synthetic oligonucleotide
  Antisense strand to SEQ ID NO: 2273634
uagaaugagcacugcucgg

SEQ ID NO: 2273636 - RNA, 19 nt, Artificial Sequence
  Description of Artificial Sequence: Synthetic oligonucleotide
  Sense strand starting at position 433 of SEQ ID NO: 1884543
ccagcaggugcucaagagu

SEQ ID NO: 2273637 - RNA, 19 nt, Artificial Sequence
  Description of Artificial Sequence: Synthetic oligonucleotide
  Antisense strand to SEQ ID NO: 2273636
acucuugagcaccugcugg

SEQ ID NO: 2273638 - RNA, 19 nt, Artificial Sequence
  Description of Artificial Sequence: Synthetic oligonucleotide
  Sense strand starting at position 442 of SEQ ID NO: 1884543
gcucaagagucugccacua

SEQ ID NO: 2273639 - RNA, 19 nt, Artificial Sequence
  Description of Artificial Sequence: Synthetic oligonucleotide
  Antisense strand to SEQ ID NO: 2273638
uaguggcagacucuugagc

SEQ ID NO: 2273640 - RNA, 19 nt, Artificial Sequence
  Description of Artificial Sequence: Synthetic oligonucleotide
  Sense strand starting at position 444 of SEQ ID NO: 1884543
ucaagagucugccacuauu

SEQ ID NO: 2273641 - RNA, 19 nt, Artificial Sequence
  Description of Artificial Sequence: Synthetic oligonucleotide
  Antisense strand to SEQ ID NO: 2273640
aauaguggcagacucuuga

SEQ ID NO: 2273642 - RNA, 19 nt, Artificial Sequence
  Description of Artificial Sequence: Synthetic oligonucleotide
  Sense strand starting at position 504 of SEQ ID NO: 1884543
ccacuagcgcgcucucauu

SEQ ID NO: 2273643 - RNA, 19 nt, Artificial Sequence
  Description of Artificial Sequence: Synthetic oligonucleotide
  Antisense strand to SEQ ID NO: 2273642
aaugagagcgcgcuagugg

SEQ ID NO: 2273644 - RNA, 19 nt, Artificial Sequence
  Description of Artificial Sequence: Synthetic oligonucleotide
  Sense strand starting at position 534 of SEQ ID NO: 1884543
caccuuagauaggugucau

SEQ ID NO: 2273645 - RNA, 19 nt, Artificial Sequence
  Description of Artificial Sequence: Synthetic oligonucleotide
  Antisense strand to SEQ ID NO: 2273644
augacaccuaucuaaggug

SEQ ID NO: 2273646 - RNA, 19 nt, Artificial Sequence
  Description of Artificial Sequence: Synthetic oligonucleotide
  Sense strand starting at position 538 of SEQ ID NO: 1884543
uuagauaggugucaucucu

SEQ ID NO: 2273647 - RNA, 19 nt, Artificial Sequence
  Description of Artificial Sequence: Synthetic oligonucleotide
  Antisense strand to SEQ ID NO: 2273646
agagaugacaccuaucuaa

SEQ ID NO: 2273648 - RNA, 19 nt, Artificial Sequence
  Description of Artificial Sequence: Synthetic oligonucleotide
  Sense strand starting at position 582 of SEQ ID NO: 1884543
agagaaaggcuuuggccaa

SEQ ID NO: 2273649 - RNA, 19 nt, Artificial Sequence
  Description of Artificial Sequence: Synthetic oligonucleotide
  Antisense strand to SEQ ID NO: 2273648
uuggccaaagccuuucucu

SEQ ID NO: 2273650 - RNA, 19 nt, Artificial Sequence
  Description of Artificial Sequence: Synthetic oligonucleotide
  Sense strand starting at position 634 of SEQ ID NO: 1884543
cuggaagucugaccauaug

SEQ ID NO: 2273651 - RNA, 19 nt, Artificial Sequence
  Description of Artificial Sequence: Synthetic oligonucleotide
  Antisense strand to SEQ ID NO: 2273650
cauauggucagacuuccag

SEQ ID NO: 2273652 - RNA, 19 nt, Artificial Sequence
  Description of Artificial Sequence: Synthetic oligonucleotide
  Sense strand starting at position 642 of SEQ ID NO: 1884543
cugaccauauggugggaaa

SEQ ID NO: 2273653 - RNA, 19 nt, Artificial Sequence
  Description of Artificial Sequence: Synthetic oligonucleotide
  Antisense strand to SEQ ID NO: 2273652
uuucccaccauauggucag

SEQ ID NO: 2273654 - RNA, 19 nt, Artificial Sequence
  Description of Artificial Sequence: Synthetic oligonucleotide
  Sense strand starting at position 751 of SEQ ID NO: 1884543
gcccuugaucucuacuaga

SEQ ID NO: 2273655 - RNA, 19 nt, Artificial Sequence
  Description of Artificial Sequence: Synthetic oligonucleotide
  Antisense strand to SEQ ID NO: 2273654
ucuaguagagaucaagggc

SEQ ID NO: 2273656 - RNA, 19 nt, Artificial Sequence
  Description of Artificial Sequence: Synthetic oligonucleotide
  Sense strand starting at position 1611 of SEQ ID NO: 1884543
aggugccuuaccugagauu

SEQ ID NO: 2273657 - RNA, 19 nt, Artificial Sequence
  Description of Artificial Sequence: Synthetic oligonucleotide
  Antisense strand to SEQ ID NO: 2273656
aaucucagguaaggcaccu

SEQ ID NO: 2273658 - RNA, 19 nt, Artificial Sequence
  Description of Artificial Sequence: Synthetic oligonucleotide
  Sense strand starting at position 1910 of SEQ ID NO: 1884543
gucaccauugccuguagga

SEQ ID NO: 2273659 - RNA, 19 nt, Artificial Sequence
  Description of Artificial Sequence: Synthetic oligonucleotide
  Antisense strand to SEQ ID NO: 2273658
uccuacaggcaauggugac

SEQ ID NO: 2273660 - RNA, 19 nt, Artificial Sequence
  Description of Artificial Sequence: Synthetic oligonucleotide
  Sense strand starting at position 1912 of SEQ ID NO: 1884543
caccauugccuguaggaga

SEQ ID NO: 2273661 - RNA, 19 nt, Artificial Sequence
  Description of Artificial Sequence: Synthetic oligonucleotide
  Antisense strand to SEQ ID NO: 2273660
ucuccuacaggcaauggug

SEQ ID NO: 2273662 - RNA, 19 nt, Artificial Sequence
  Description of Artificial Sequence: Synthetic oligonucleotide
  Sense strand starting at position 2305 of SEQ ID NO: 1884543
ugucaacagugcuugauga

SEQ ID NO: 2273663 - RNA, 19 nt, Artificial Sequence
  Description of Artificial Sequence: Synthetic oligonucleotide
  Antisense strand to SEQ ID NO: 2273662
ucaucaagcacuguugaca

SEQ ID NO: 2273664 - RNA, 19 nt, Artificial Sequence
  Description of Artificial Sequence: Synthetic oligonucleotide
  Sense strand starting at position 2307 of SEQ ID NO: 1884543
ucaacagugcuugaugacu

SEQ ID NO: 2273665 - RNA, 19 nt, Artificial Sequence
  Description of Artificial Sequence: Synthetic oligonucleotide
  Antisense strand to SEQ ID NO: 2273664
agucaucaagcacuguuga

SEQ ID NO: 2273666 - RNA, 19 nt, Artificial Sequence
  Description of Artificial Sequence: Synthetic oligonucleotide
  Sense strand starting at position 2309 of SEQ ID NO: 1884543
aacagugcuugaugacuaa

SEQ ID NO: 2273667 - RNA, 19 nt, Artificial Sequence
  Description of Artificial Sequence: Synthetic oligonucleotide
  Antisense strand to SEQ ID NO: 2273666
uuagucaucaagcacuguu

SEQ ID NO: 2273668 - RNA, 19 nt, Artificial Sequence
  Description of Artificial Sequence: Synthetic oligonucleotide
  Sense strand starting at position 2389 of SEQ ID NO: 1884543
gggucaucucucgggauuc

SEQ ID NO: 2273669 - RNA, 19 nt, Artificial Sequence
  Description of Artificial Sequence: Synthetic oligonucleotide
  Antisense strand to SEQ ID NO: 2273668
gaaucccgagagaugaccc

SEQ ID NO: 2273670 - RNA, 19 nt, Artificial Sequence
  Description of Artificial Sequence: Synthetic oligonucleotide
  Sense strand starting at position 2390 of SEQ ID NO: 1884543
ggucaucucucgggauuca

SEQ ID NO: 2273671 - RNA, 19 nt, Artificial Sequence
  Description of Artificial Sequence: Synthetic oligonucleotide
  Antisense strand to SEQ ID NO: 2273670
ugaaucccgagagaugacc

SEQ ID NO: 2273672 - RNA, 19 nt, Artificial Sequence
  Description of Artificial Sequence: Synthetic oligonucleotide
  Sense strand starting at position 3084 of SEQ ID NO: 1884543
ugaagugguccugguagag

SEQ ID NO: 2273673 - RNA, 19 nt, Artificial Sequence
  Description of Artificial Sequence: Synthetic oligonucleotide
  Antisense strand to SEQ ID NO: 2273672
cucuaccaggaccacuuca

SEQ ID NO: 2273674 - RNA, 19 nt, Artificial Sequence
  Description of Artificial Sequence: Synthetic oligonucleotide
  Sense strand starting at position 3476 of SEQ ID NO: 1884543
ccaugucucucacagagca

SEQ ID NO: 2273675 - RNA, 19 nt, Artificial Sequence
  Description of Artificial Sequence: Synthetic oligonucleotide
  Antisense strand to SEQ ID NO: 2273674
ugcucugugagagacaugg

SEQ ID NO: 2273676 - RNA, 19 nt, Artificial Sequence
  Description of Artificial Sequence: Synthetic oligonucleotide
  Sense strand starting at position 3601 of SEQ ID NO: 1884543
cacagugcucuucguggaa

SEQ ID NO: 2273677 - RNA, 19 nt, Artificial Sequence
  Description of Artificial Sequence: Synthetic oligonucleotide
  Antisense strand to SEQ ID NO: 2273676
uuccacgaagagcacugug

SEQ ID NO: 2273678 - RNA, 19 nt, Artificial Sequence
  Description of Artificial Sequence: Synthetic oligonucleotide
  Sense strand starting at position 3662 of SEQ ID NO: 1884543
gcacucaccuugcagacau

SEQ ID NO: 2273679 - RNA, 19 nt, Artificial Sequence
  Description of Artificial Sequence: Synthetic oligonucleotide
  Antisense strand to SEQ ID NO: 2273678
augucugcaaggugagugc

SEQ ID NO: 2273680 - RNA, 19 nt, Artificial Sequence
  Description of Artificial Sequence: Synthetic oligonucleotide
  Sense strand starting at position 185 of SEQ ID NO: 1884544
ggcgucaucugccaagaac

SEQ ID NO: 2273681 - RNA, 19 nt, Artificial Sequence
  Description of Artificial Sequence: Synthetic oligonucleotide
  Antisense strand to SEQ ID NO: 2273680
guucuuggcagaugacgcc

SEQ ID NO: 2273682 - RNA, 19 nt, Artificial Sequence
  Description of Artificial Sequence: Synthetic oligonucleotide
  Sense strand starting at position 229 of SEQ ID NO: 1884544
cgcuuuguucaguguagca

SEQ ID NO: 2273683 - RNA, 19 nt, Artificial Sequence
  Description of Artificial Sequence: Synthetic oligonucleotide
  Antisense strand to SEQ ID NO: 2273682
ugcuacacugaacaaagcg

SEQ ID NO: 2273684 - RNA, 19 nt, Artificial Sequence
  Description of Artificial Sequence: Synthetic oligonucleotide
  Sense strand starting at position 272 of SEQ ID NO: 1884544
ugcggugagugcugaguua

SEQ ID NO: 2273685 - RNA, 19 nt, Artificial Sequence
  Description of Artificial Sequence: Synthetic oligonucleotide
  Antisense strand to SEQ ID NO: 2273684
uaacucagcacucaccgca

SEQ ID NO: 2273686 - RNA, 19 nt, Artificial Sequence
  Description of Artificial Sequence: Synthetic oligonucleotide
  Sense strand starting at position 274 of SEQ ID NO: 1884544
cggugagugcugaguuaca

SEQ ID NO: 2273687 - RNA, 19 nt, Artificial Sequence
  Description of Artificial Sequence: Synthetic oligonucleotide
  Antisense strand to SEQ ID NO: 2273686
uguaacucagcacucaccg

SEQ ID NO: 2273688 - RNA, 19 nt, Artificial Sequence
  Description of Artificial Sequence: Synthetic oligonucleotide
  Sense strand starting at position 406 of SEQ ID NO: 1884544
gcuucuuaucucuggguca

SEQ ID NO: 2273689 - RNA, 19 nt, Artificial Sequence
  Description of Artificial Sequence: Synthetic oligonucleotide
  Antisense strand to SEQ ID NO: 2273688
ugacccagagauaagaagc

SEQ ID NO: 2273690 - RNA, 19 nt, Artificial Sequence
  Description of Artificial Sequence: Synthetic oligonucleotide
  Sense strand starting at position 1160 of SEQ ID NO: 1884544
cgguucaagugauuaucgu

SEQ ID NO: 2273691 - RNA, 19 nt, Artificial Sequence
  Description of Artificial Sequence: Synthetic oligonucleotide
  Antisense strand to SEQ ID NO: 2273690
acgauaaucacuugaaccg

SEQ ID NO: 2273692 - RNA, 19 nt, Artificial Sequence
  Description of Artificial Sequence: Synthetic oligonucleotide
  Sense strand starting at position 1187 of SEQ ID NO: 1884544
cuagcaaguagcugagauu

SEQ ID NO: 2273693 - RNA, 19 nt, Artificial Sequence
  Description of Artificial Sequence: Synthetic oligonucleotide
  Antisense strand to SEQ ID NO: 2273692
aaucucagcuacuugcuag

SEQ ID NO: 2273694 - RNA, 19 nt, Artificial Sequence
  Description of Artificial Sequence: Synthetic oligonucleotide
  Sense strand starting at position 1404 of SEQ ID NO: 1884544
agcugugugacucaguuua

SEQ ID NO: 2273695 - RNA, 19 nt, Artificial Sequence
  Description of Artificial Sequence: Synthetic oligonucleotide
  Antisense strand to SEQ ID NO: 2273694
uaaacugagucacacagcu

SEQ ID NO: 2273696 - RNA, 19 nt, Artificial Sequence
  Description of Artificial Sequence: Synthetic oligonucleotide
  Sense strand starting at position 1445 of SEQ ID NO: 1884544
cugcaacaucgccaagaau

SEQ ID NO: 2273697 - RNA, 19 nt, Artificial Sequence
  Description of Artificial Sequence: Synthetic oligonucleotide
  Antisense strand to SEQ ID NO: 2273696
auucuuggcgauguugcag

SEQ ID NO: 2273698 - RNA, 19 nt, Artificial Sequence
  Description of Artificial Sequence: Synthetic oligonucleotide
  Sense strand starting at position 1477 of SEQ ID NO: 1884544
ggugcaauccugugccuua

SEQ ID NO: 2273699 - RNA, 19 nt, Artificial Sequence
  Description of Artificial Sequence: Synthetic oligonucleotide
  Antisense strand to SEQ ID NO: 2273698
uaaggcacaggauugcacc

SEQ ID NO: 2273700 - RNA, 19 nt, Artificial Sequence
  Description of Artificial Sequence: Synthetic oligonucleotide
  Sense strand starting at position 1478 of SEQ ID NO: 1884544
gugcaauccugugccuuaa

SEQ ID NO: 2273701 - RNA, 19 nt, Artificial Sequence
  Description of Artificial Sequence: Synthetic oligonucleotide
  Antisense strand to SEQ ID NO: 2273700
uuaaggcacaggauugcac

SEQ ID NO: 2273702 - RNA, 19 nt, Artificial Sequence
  Description of Artificial Sequence: Synthetic oligonucleotide
  Sense strand starting at position 1480 of SEQ ID NO: 1884544
gcaauccugugccuuaaau

SEQ ID NO: 2273703 - RNA, 19 nt, Artificial Sequence
  Description of Artificial Sequence: Synthetic oligonucleotide
  Antisense strand to SEQ ID NO: 2273702
auuuaaggcacaggauugc

SEQ ID NO: 2273704 - RNA, 19 nt, Artificial Sequence
  Description of Artificial Sequence: Synthetic oligonucleotide
  Sense strand starting at position 1505 of SEQ ID NO: 1884544
cucuccauuugauggauga

SEQ ID NO: 2273705 - RNA, 19 nt, Artificial Sequence
  Description of Artificial Sequence: Synthetic oligonucleotide
  Antisense strand to SEQ ID NO: 2273704
ucauccaucaaauggagag

SEQ ID NO: 2273706 - RNA, 19 nt, Artificial Sequence
  Description of Artificial Sequence: Synthetic oligonucleotide
  Sense strand starting at position 1745 of SEQ ID NO: 1884544
gcucauccuuuagugcuua

SEQ ID NO: 2273707 - RNA, 19 nt, Artificial Sequence
  Description of Artificial Sequence: Synthetic oligonucleotide
  Antisense strand to SEQ ID NO: 2273706
uaagcacuaaaggaugagc

SEQ ID NO: 2273708 - RNA, 19 nt, Artificial Sequence
  Description of Artificial Sequence: Synthetic oligonucleotide
  Sense strand starting at position 1750 of SEQ ID NO: 1884544
uccuuuagugcuuauaaag

SEQ ID NO: 2273709 - RNA, 19 nt, Artificial Sequence
  Description of Artificial Sequence: Synthetic oligonucleotide
  Antisense strand to SEQ ID NO: 2273708
cuuuauaagcacuaaagga

SEQ ID NO: 2273710 - RNA, 19 nt, Artificial Sequence
  Description of Artificial Sequence: Synthetic oligonucleotide
  Sense strand starting at position 1889 of SEQ ID NO: 1884544
gguugugaccaucgugacu

SEQ ID NO: 2273711 - RNA, 19 nt, Artificial Sequence
  Description of Artificial Sequence: Synthetic oligonucleotide
  Antisense strand to SEQ ID NO: 2273710
agucacgauggucacaacc

SEQ ID NO: 2273712 - RNA, 19 nt, Artificial Sequence
  Description of Artificial Sequence: Synthetic oligonucleotide
  Sense strand starting at position 1989 of SEQ ID NO: 1884544
cugggagugcuccagagga

SEQ ID NO: 2273713 - RNA, 19 nt, Artificial Sequence
  Description of Artificial Sequence: Synthetic oligonucleotide
  Antisense strand to SEQ ID NO: 2273712
uccucuggagcacucccag

SEQ ID NO: 2273714 - RNA, 19 nt, Artificial Sequence
  Description of Artificial Sequence: Synthetic oligonucleotide
  Sense strand starting at position 2129 of SEQ ID NO: 1884544
agagcucugaccgagucau

SEQ ID NO: 2273715 - RNA, 19 nt, Artificial Sequence
  Description of Artificial Sequence: Synthetic oligonucleotide
  Antisense strand to SEQ ID NO: 2273714
augacucggucagagcucu

SEQ ID NO: 2273716 - RNA, 19 nt, Artificial Sequence
  Description of Artificial Sequence: Synthetic oligonucleotide
  Sense strand starting at position 2133 of SEQ ID NO: 1884544
cucugaccgagucauauug

SEQ ID NO: 2273717 - RNA, 19 nt, Artificial Sequence
  Description of Artificial Sequence: Synthetic oligonucleotide
  Antisense strand to SEQ ID NO: 2273716
caauaugacucggucagag

SEQ ID NO: 2273718 - RNA, 19 nt, Artificial Sequence
  Description of Artificial Sequence: Synthetic oligonucleotide
  Sense strand starting at position 2135 of SEQ ID NO: 1884544
cugaccgagucauauuguu

SEQ ID NO: 2273719 - RNA, 19 nt, Artificial Sequence
  Description of Artificial Sequence: Synthetic oligonucleotide
  Antisense strand to SEQ ID NO: 2273718
aacaauaugacucggucag

SEQ ID NO: 2273720 - RNA, 19 nt, Artificial Sequence
  Description of Artificial Sequence: Synthetic oligonucleotide
  Sense strand starting at position 2433 of SEQ ID NO: 1884544
gacucugugcucugguaac

SEQ ID NO: 2273721 - RNA, 19 nt, Artificial Sequence
  Description of Artificial Sequence: Synthetic oligonucleotide
  Antisense strand to SEQ ID NO: 2273720
guuaccagagcacagaguc

SEQ ID NO: 2273722 - RNA, 19 nt, Artificial Sequence
  Description of Artificial Sequence: Synthetic oligonucleotide
  Sense strand starting at position 3367 of SEQ ID NO: 1884544
augcuaaccucggcaauga

SEQ ID NO: 2273723 - RNA, 19 nt, Artificial Sequence
  Description of Artificial Sequence: Synthetic oligonucleotide
  Antisense strand to SEQ ID NO: 2273722
ucauugccgagguuagcau

SEQ ID NO: 2273724 - RNA, 19 nt, Artificial Sequence
  Description of Artificial Sequence: Synthetic oligonucleotide
  Sense strand starting at position 3368 of SEQ ID NO: 1884544
ugcuaaccucggcaaugau

SEQ ID NO: 2273725 - RNA, 19 nt, Artificial Sequence
  Description of Artificial Sequence: Synthetic oligonucleotide
  Antisense strand to SEQ ID NO: 2273724
aucauugccgagguuagca

SEQ ID NO: 2273726 - RNA, 19 nt, Artificial Sequence
  Description of Artificial Sequence: Synthetic oligonucleotide
  Sense strand starting at position 3410 of SEQ ID NO: 1884544
gucagucuccaucaccaua

SEQ ID NO: 2273727 - RNA, 19 nt, Artificial Sequence
  Description of Artificial Sequence: Synthetic oligonucleotide
  Antisense strand to SEQ ID NO: 2273726
uauggugauggagacugac

SEQ ID NO: 2273728 - RNA, 19 nt, Artificial Sequence
  Description of Artificial Sequence: Synthetic oligonucleotide
  Sense strand starting at position 3775 of SEQ ID NO: 1884544
gggugugcccaagaaccau

SEQ ID NO: 2273729 - RNA, 19 nt, Artificial Sequence
  Description of Artificial Sequence: Synthetic oligonucleotide
  Antisense strand to SEQ ID NO: 2273728
augguucuugggcacaccc

SEQ ID NO: 2273730 - RNA, 19 nt, Artificial Sequence
  Description of Artificial Sequence: Synthetic oligonucleotide
  Sense strand starting at position 3823 of SEQ ID NO: 1884544
ccaagucuccacugacaug

SEQ ID NO: 2273731 - RNA, 19 nt, Artificial Sequence
  Description of Artificial Sequence: Synthetic oligonucleotide
  Antisense strand to SEQ ID NO: 2273730
caugucaguggagacuugg

SEQ ID NO: 2273732 - RNA, 19 nt, Artificial Sequence
  Description of Artificial Sequence: Synthetic oligonucleotide
  Sense strand starting at position 3970 of SEQ ID NO: 1884544
aguucugccucaccuaaga

SEQ ID NO: 2273733 - RNA, 19 nt, Artificial Sequence
  Description of Artificial Sequence: Synthetic oligonucleotide
  Antisense strand to SEQ ID NO: 2273732
ucuuaggugaggcagaacu

SEQ ID NO: 2273734 - RNA, 19 nt, Artificial Sequence
  Description of Artificial Sequence: Synthetic oligonucleotide
  Sense strand starting at position 265 of SEQ ID NO: 1884545
ugcuuugucccugcuagua

SEQ ID NO: 2273735 - RNA, 19 nt, Artificial Sequence
  Description of Artificial Sequence: Synthetic oligonucleotide
  Antisense strand to SEQ ID NO: 2273734
uacuagcagggacaaagca

SEQ ID NO: 2273736 - RNA, 19 nt, Artificial Sequence
  Description of Artificial Sequence: Synthetic oligonucleotide
  Sense strand starting at position 281 of SEQ ID NO: 1884545
guaggaucuuuguuucucu

SEQ ID NO: 2273737 - RNA, 19 nt, Artificial Sequence
  Description of Artificial Sequence: Synthetic oligonucleotide
  Antisense strand to SEQ ID NO: 2273736
agagaaacaaagauccuac

SEQ ID NO: 2273738 - RNA, 19 nt, Artificial Sequence
  Description of Artificial Sequence: Synthetic oligonucleotide
  Sense strand starting at position 468 of SEQ ID NO: 1884545
uggugugacucuuuccaag

SEQ ID NO: 2273739 - RNA, 19 nt, Artificial Sequence
  Description of Artificial Sequence: Synthetic oligonucleotide
  Antisense strand to SEQ ID NO: 2273738
cuuggaaagagucacacca

SEQ ID NO: 2273740 - RNA, 19 nt, Artificial Sequence
  Description of Artificial Sequence: Synthetic oligonucleotide
  Sense strand starting at position 470 of SEQ ID NO: 1884545
gugugacucuuuccaagug

SEQ ID NO: 2273741 - RNA, 19 nt, Artificial Sequence
  Description of Artificial Sequence: Synthetic oligonucleotide
  Antisense strand to SEQ ID NO: 2273740
cacuuggaaagagucacac

SEQ ID NO: 2273742 - RNA, 19 nt, Artificial Sequence
  Description of Artificial Sequence: Synthetic oligonucleotide
  Sense strand starting at position 501 of SEQ ID NO: 1884545
guugcaggagucuagauca

SEQ ID NO: 2273743 - RNA, 19 nt, Artificial Sequence
  Description of Artificial Sequence: Synthetic oligonucleotide
  Antisense strand to SEQ ID NO: 2273742
ugaucuagacuccugcaac

SEQ ID NO: 2273744 - RNA, 19 nt, Artificial Sequence
  Description of Artificial Sequence: Synthetic oligonucleotide
  Sense strand starting at position 515 of SEQ ID NO: 1884545
gaucaauccugaguuacug

SEQ ID NO: 2273745 - RNA, 19 nt, Artificial Sequence
  Description of Artificial Sequence: Synthetic oligonucleotide
  Antisense strand to SEQ ID NO: 2273744
caguaacucaggauugauc

SEQ ID NO: 2273746 - RNA, 19 nt, Artificial Sequence
  Description of Artificial Sequence: Synthetic oligonucleotide
  Sense strand starting at position 552 of SEQ ID NO: 1884545
ugacuugcugugugaugca

SEQ ID NO: 2273747 - RNA, 19 nt, Artificial Sequence
  Description of Artificial Sequence: Synthetic oligonucleotide
  Antisense strand to SEQ ID NO: 2273746
ugcaucacacagcaaguca

SEQ ID NO: 2273748 - RNA, 19 nt, Artificial Sequence
  Description of Artificial Sequence: Synthetic oligonucleotide
  Sense strand starting at position 640 of SEQ ID NO: 1884545
cccagugcccuguguaaug

SEQ ID NO: 2273749 - RNA, 19 nt, Artificial Sequence
  Description of Artificial Sequence: Synthetic oligonucleotide
  Antisense strand to SEQ ID NO: 2273748
cauuacacagggcacuggg

SEQ ID NO: 2273750 - RNA, 19 nt, Artificial Sequence
  Description of Artificial Sequence: Synthetic oligonucleotide
  Sense strand starting at position 642 of SEQ ID NO: 1884545
cagugcccuguguaaugau

SEQ ID NO: 2273751 - RNA, 19 nt, Artificial Sequence
  Description of Artificial Sequence: Synthetic oligonucleotide
  Antisense strand to SEQ ID NO: 2273750
aucauuacacagggcacug

SEQ ID NO: 2273752 - RNA, 19 nt, Artificial Sequence
  Description of Artificial Sequence: Synthetic oligonucleotide
  Sense strand starting at position 676 of SEQ ID NO: 1884545
gccgcuucucaguuuguca

SEQ ID NO: 2273753 - RNA, 19 nt, Artificial Sequence
  Description of Artificial Sequence: Synthetic oligonucleotide
  Antisense strand to SEQ ID NO: 2273752
ugacaaacugagaagcggc

SEQ ID NO: 2273754 - RNA, 19 nt, Artificial Sequence
  Description of Artificial Sequence: Synthetic oligonucleotide
  Sense strand starting at position 885 of SEQ ID NO: 1884545
gggucaugcuuugccaaag

SEQ ID NO: 2273755 - RNA, 19 nt, Artificial Sequence
  Description of Artificial Sequence: Synthetic oligonucleotide
  Antisense strand to SEQ ID NO: 2273754
cuuuggcaaagcaugaccc

SEQ ID NO: 2273756 - RNA, 19 nt, Artificial Sequence
  Description of Artificial Sequence: Synthetic oligonucleotide
  Sense strand starting at position 896 of SEQ ID NO: 1884545
ugccaaagcuguuuccauu

SEQ ID NO: 2273757 - RNA, 19 nt, Artificial Sequence
  Description of Artificial Sequence: Synthetic oligonucleotide
  Antisense strand to SEQ ID NO: 2273756
aauggaaacagcuuuggca

SEQ ID NO: 2273758 - RNA, 19 nt, Artificial Sequence
  Description of Artificial Sequence: Synthetic oligonucleotide
  Sense strand starting at position 902 of SEQ ID NO: 1884545
agcuguuuccauuguuuga

SEQ ID NO: 2273759 - RNA, 19 nt, Artificial Sequence
  Description of Artificial Sequence: Synthetic oligonucleotide
  Antisense strand to SEQ ID NO: 2273758
ucaaacaauggaaacagcu

SEQ ID NO: 2273760 - RNA, 19 nt, Artificial Sequence
  Description of Artificial Sequence: Synthetic oligonucleotide
  Sense strand starting at position 906 of SEQ ID NO: 1884545
guuuccauuguuugaucuu

SEQ ID NO: 2273761 - RNA, 19 nt, Artificial Sequence
  Description of Artificial Sequence: Synthetic oligonucleotide
  Antisense strand to SEQ ID NO: 2273760
aagaucaaacaauggaaac

SEQ ID NO: 2273762 - RNA, 19 nt, Artificial Sequence
  Description of Artificial Sequence: Synthetic oligonucleotide
  Sense strand starting at position 909 of SEQ ID NO: 1884545
uccauuguuugaucuucca

SEQ ID NO: 2273763 - RNA, 19 nt, Artificial Sequence
  Description of Artificial Sequence: Synthetic oligonucleotide
  Antisense strand to SEQ ID NO: 2273762
uggaagaucaaacaaugga

SEQ ID NO: 2273764 - RNA, 19 nt, Artificial Sequence
  Description of Artificial Sequence: Synthetic oligonucleotide
  Sense strand starting at position 912 of SEQ ID NO: 1884545
auuguuugaucuuccauga

SEQ ID NO: 2273765 - RNA, 19 nt, Artificial Sequence
  Description of Artificial Sequence: Synthetic oligonucleotide
  Antisense strand to SEQ ID NO: 2273764
ucauggaagaucaaacaau

SEQ ID NO: 2273766 - RNA, 19 nt, Artificial Sequence
  Description of Artificial Sequence: Synthetic oligonucleotide
  Sense strand starting at position 916 of SEQ ID NO: 1884545
uuugaucuuccaugagaau

SEQ ID NO: 2273767 - RNA, 19 nt, Artificial Sequence
  Description of Artificial Sequence: Synthetic oligonucleotide
  Antisense strand to SEQ ID NO: 2273766
auucucauggaagaucaaa

SEQ ID NO: 2273768 - RNA, 19 nt, Artificial Sequence
  Description of Artificial Sequence: Synthetic oligonucleotide
  Sense strand starting at position 1097 of SEQ ID NO: 1884545
ugccacaauucucagagga

SEQ ID NO: 2273769 - RNA, 19 nt, Artificial Sequence
  Description of Artificial Sequence: Synthetic oligonucleotide
  Antisense strand to SEQ ID NO: 2273768
uccucugagaauuguggca

SEQ ID NO: 2273770 - RNA, 19 nt, Artificial Sequence
  Description of Artificial Sequence: Synthetic oligonucleotide
  Sense strand starting at position 1099 of SEQ ID NO: 1884545
ccacaauucucagaggaua

SEQ ID NO: 2273771 - RNA, 19 nt, Artificial Sequence
  Description of Artificial Sequence: Synthetic oligonucleotide
  Antisense strand to SEQ ID NO: 2273770
uauccucugagaauugugg

SEQ ID NO: 2273772 - RNA, 19 nt, Artificial Sequence
  Description of Artificial Sequence: Synthetic oligonucleotide
  Sense strand starting at position 1107 of SEQ ID NO: 1884545
cucagaggauagguauuau

SEQ ID NO: 2273773 - RNA, 19 nt, Artificial Sequence
  Description of Artificial Sequence: Synthetic oligonucleotide
  Antisense strand to SEQ ID NO: 2273772
auaauaccuauccucugag

SEQ ID NO: 2273774 - RNA, 19 nt, Artificial Sequence
  Description of Artificial Sequence: Synthetic oligonucleotide
  Sense strand starting at position 1111 of SEQ ID NO: 1884545
gaggauagguauuauuauu

SEQ ID NO: 2273775 - RNA, 19 nt, Artificial Sequence
  Description of Artificial Sequence: Synthetic oligonucleotide
  Antisense strand to SEQ ID NO: 2273774
aauaauaauaccuauccuc

SEQ ID NO: 2273776 - RNA, 19 nt, Artificial Sequence
  Description of Artificial Sequence: Synthetic oligonucleotide
  Sense strand starting at position 1117 of SEQ ID NO: 1884545
agguauuauuauuccagau

SEQ ID NO: 2273777 - RNA, 19 nt, Artificial Sequence
  Description of Artificial Sequence: Synthetic oligonucleotide
  Antisense strand to SEQ ID NO: 2273776
aucuggaauaauaauaccu

SEQ ID NO: 2273778 - RNA, 19 nt, Artificial Sequence
  Description of Artificial Sequence: Synthetic oligonucleotide
  Sense strand starting at position 1119 of SEQ ID NO: 1884545
guauuauuauuccagauga

SEQ ID NO: 2273779 - RNA, 19 nt, Artificial Sequence
  Description of Artificial Sequence: Synthetic oligonucleotide
  Antisense strand to SEQ ID NO: 2273778
ucaucuggaauaauaauac

SEQ ID NO: 2273780 - RNA, 19 nt, Artificial Sequence
  Description of Artificial Sequence: Synthetic oligonucleotide
  Sense strand starting at position 1354 of SEQ ID NO: 1884545
gaaggauaugaaugggcuu

SEQ ID NO: 2273781 - RNA, 19 nt, Artificial Sequence
  Description of Artificial Sequence: Synthetic oligonucleotide
  Antisense strand to SEQ ID NO: 2273780
aagcccauucauauccuuc

SEQ ID NO: 2273782 - RNA, 19 nt, Artificial Sequence
  Description of Artificial Sequence: Synthetic oligonucleotide
  Sense strand starting at position 1609 of SEQ ID NO: 1884545
uguguuuggcucugaguga

SEQ ID NO: 2273783 - RNA, 19 nt, Artificial Sequence
  Description of Artificial Sequence: Synthetic oligonucleotide
  Antisense strand to SEQ ID NO: 2273782
ucacucagagccaaacaca

SEQ ID NO: 2273784 - RNA, 19 nt, Artificial Sequence
  Description of Artificial Sequence: Synthetic oligonucleotide
  Sense strand starting at position 1614 of SEQ ID NO: 1884545
uuggcucugagugaugguu

SEQ ID NO: 2273785 - RNA, 19 nt, Artificial Sequence
  Description of Artificial Sequence: Synthetic oligonucleotide
  Antisense strand to SEQ ID NO: 2273784
aaccaucacucagagccaa

SEQ ID NO: 2273786 - RNA, 19 nt, Artificial Sequence
  Description of Artificial Sequence: Synthetic oligonucleotide
  Sense strand starting at position 1645 of SEQ ID NO: 1884545
ucugcaccucucugaguuu

SEQ ID NO: 2273787 - RNA, 19 nt, Artificial Sequence
  Description of Artificial Sequence: Synthetic oligonucleotide
  Antisense strand to SEQ ID NO: 2273786
aaacucagagaggugcaga

SEQ ID NO: 2273788 - RNA, 19 nt, Artificial Sequence
  Description of Artificial Sequence: Synthetic oligonucleotide
  Sense strand starting at position 1771 of SEQ ID NO: 1884545
gagguuugcugcccuggua

SEQ ID NO: 2273789 - RNA, 19 nt, Artificial Sequence
  Description of Artificial Sequence: Synthetic oligonucleotide
  Antisense strand to SEQ ID NO: 2273788
uaccagggcagcaaaccuc

SEQ ID NO: 2273790 - RNA, 19 nt, Artificial Sequence
  Description of Artificial Sequence: Synthetic oligonucleotide
  Sense strand starting at position 2022 of SEQ ID NO: 1884545
cagugaccugccuagaguu

SEQ ID NO: 2273791 - RNA, 19 nt, Artificial Sequence
  Description of Artificial Sequence: Synthetic oligonucleotide
  Antisense strand to SEQ ID NO: 2273790
aacucuaggcaggucacug

SEQ ID NO: 2273792 - RNA, 19 nt, Artificial Sequence
  Description of Artificial Sequence: Synthetic oligonucleotide
  Sense strand starting at position 2133 of SEQ ID NO: 1884545
ucaggagugugguuuagaa

SEQ ID NO: 2273793 - RNA, 19 nt, Artificial Sequence
  Description of Artificial Sequence: Synthetic oligonucleotide
  Antisense strand to SEQ ID NO: 2273792
uucuaaaccacacuccuga

SEQ ID NO: 2273794 - RNA, 19 nt, Artificial Sequence
  Description of Artificial Sequence: Synthetic oligonucleotide
  Sense strand starting at position 2243 of SEQ ID NO: 1884545
cagcacauuguccaggauu

SEQ ID NO: 2273795 - RNA, 19 nt, Artificial Sequence
  Description of Artificial Sequence: Synthetic oligonucleotide
  Antisense strand to SEQ ID NO: 2273794
aauccuggacaaugugcug

SEQ ID NO: 2273796 - RNA, 19 nt, Artificial Sequence
  Description of Artificial Sequence: Synthetic oligonucleotide
  Sense strand starting at position 2392 of SEQ ID NO: 1884545
ugugaagcaccgugacaaa

SEQ ID NO: 2273797 - RNA, 19 nt, Artificial Sequence
  Description of Artificial Sequence: Synthetic oligonucleotide
  Antisense strand to SEQ ID NO: 2273796
uuugucacggugcuucaca

SEQ ID NO: 2273798 - RNA, 19 nt, Artificial Sequence
  Description of Artificial Sequence: Synthetic oligonucleotide
  Sense strand starting at position 2404 of SEQ ID NO: 1884545
ugacaaauccucgacuccu

SEQ ID NO: 2273799 - RNA, 19 nt, Artificial Sequence
  Description of Artificial Sequence: Synthetic oligonucleotide
  Antisense strand to SEQ ID NO: 2273798
aggagucgaggauuuguca

SEQ ID NO: 2273800 - RNA, 19 nt, Artificial Sequence
  Description of Artificial Sequence: Synthetic oligonucleotide
  Sense strand starting at position 2491 of SEQ ID NO: 1884545
gcaccuuaggguuauccau

SEQ ID NO: 2273801 - RNA, 19 nt, Artificial Sequence
  Description of Artificial Sequence: Synthetic oligonucleotide
  Antisense strand to SEQ ID NO: 2273800
auggauaacccuaaggugc

SEQ ID NO: 2273802 - RNA, 19 nt, Artificial Sequence
  Description of Artificial Sequence: Synthetic oligonucleotide
  Sense strand starting at position 2645 of SEQ ID NO: 1884545
ccuguuaguugcucaucca

SEQ ID NO: 2273803 - RNA, 19 nt, Artificial Sequence
  Description of Artificial Sequence: Synthetic oligonucleotide
  Antisense strand to SEQ ID NO: 2273802
uggaugagcaacuaacagg

SEQ ID NO: 2273804 - RNA, 19 nt, Artificial Sequence
  Description of Artificial Sequence: Synthetic oligonucleotide
  Sense strand starting at position 2648 of SEQ ID NO: 1884545
guuaguugcucauccagag

SEQ ID NO: 2273805 - RNA, 19 nt, Artificial Sequence
  Description of Artificial Sequence: Synthetic oligonucleotide
  Antisense strand to SEQ ID NO: 2273804
cucuggaugagcaacuaac

SEQ ID NO: 2273806 - RNA, 19 nt, Artificial Sequence
  Description of Artificial Sequence: Synthetic oligonucleotide
  Sense strand starting at position 2978 of SEQ ID NO: 1884545
cguugugugcaugcugaga

SEQ ID NO: 2273807 - RNA, 19 nt, Artificial Sequence
  Description of Artificial Sequence: Synthetic oligonucleotide
  Antisense strand to SEQ ID NO: 2273806
ucucagcaugcacacaacg

SEQ ID NO: 2273808 - RNA, 19 nt, Artificial Sequence
  Description of Artificial Sequence: Synthetic oligonucleotide
  Sense strand starting at position 3250 of SEQ ID NO: 1884545
gcugucaucccugcgaguu

SEQ ID NO: 2273809 - RNA, 19 nt, Artificial Sequence
  Description of Artificial Sequence: Synthetic oligonucleotide
  Antisense strand to SEQ ID NO: 2273808
aacucgcagggaugacagc

SEQ ID NO: 2273810 - RNA, 19 nt, Artificial Sequence
  Description of Artificial Sequence: Synthetic oligonucleotide
  Sense strand starting at position 3262 of SEQ ID NO: 1884545
gcgaguuagucucuugauu

SEQ ID NO: 2273811 - RNA, 19 nt, Artificial Sequence
  Description of Artificial Sequence: Synthetic oligonucleotide
  Antisense strand to SEQ ID NO: 2273810
aaucaagagacuaacucgc

SEQ ID NO: 2273812 - RNA, 19 nt, Artificial Sequence
  Description of Artificial Sequence: Synthetic oligonucleotide
  Sense strand starting at position 3267 of SEQ ID NO: 1884545
uuagucucuugauugucau

SEQ ID NO: 2273813 - RNA, 19 nt, Artificial Sequence
  Description of Artificial Sequence: Synthetic oligonucleotide
  Antisense strand to SEQ ID NO: 2273812
augacaaucaagagacuaa

SEQ ID NO: 2273814 - RNA, 19 nt, Artificial Sequence
  Description of Artificial Sequence: Synthetic oligonucleotide
  Sense strand starting at position 34 of SEQ ID NO: 1884546
cugacaguaaucggaacaa

SEQ ID NO: 2273815 - RNA, 19 nt, Artificial Sequence
  Description of Artificial Sequence: Synthetic oligonucleotide
  Antisense strand to SEQ ID NO: 2273814
uuguuccgauuacugucag

SEQ ID NO: 2273816 - RNA, 19 nt, Artificial Sequence
  Description of Artificial Sequence: Synthetic oligonucleotide
  Sense strand starting at position 45 of SEQ ID NO: 1884546
cggaacaacuccuuucuca

SEQ ID NO: 2273817 - RNA, 19 nt, Artificial Sequence
  Description of Artificial Sequence: Synthetic oligonucleotide
  Antisense strand to SEQ ID NO: 2273816
ugagaaaggaguuguuccg

SEQ ID NO: 2273818 - RNA, 19 nt, Artificial Sequence
  Description of Artificial Sequence: Synthetic oligonucleotide
  Sense strand starting at position 104 of SEQ ID NO: 1884546
gaaagaauguauguaagua

SEQ ID NO: 2273819 - RNA, 19 nt, Artificial Sequence
  Description of Artificial Sequence: Synthetic oligonucleotide
  Antisense strand to SEQ ID NO: 2273818
uacuuacauacauucuuuc

SEQ ID NO: 2273820 - RNA, 19 nt, Artificial Sequence
  Description of Artificial Sequence: Synthetic oligonucleotide
  Sense strand starting at position 108 of SEQ ID NO: 1884546
gaauguauguaaguagaca

SEQ ID NO: 2273821 - RNA, 19 nt, Artificial Sequence
  Description of Artificial Sequence: Synthetic oligonucleotide
  Antisense strand to SEQ ID NO: 2273820
ugucuacuuacauacauuc

SEQ ID NO: 2273822 - RNA, 19 nt, Artificial Sequence
  Description of Artificial Sequence: Synthetic oligonucleotide
  Sense strand starting at position 171 of SEQ ID NO: 1884546
ucaagaaauuaagagacau

SEQ ID NO: 2273823 - RNA, 19 nt, Artificial Sequence
  Description of Artificial Sequence: Synthetic oligonucleotide
  Antisense strand to SEQ ID NO: 2273822
augucucuuaauuucuuga

SEQ ID NO: 2273824 - RNA, 19 nt, Artificial Sequence
  Description of Artificial Sequence: Synthetic oligonucleotide
  Sense strand starting at position 191 of SEQ ID NO: 1884546
ucaugaugagcuggaguau

SEQ ID NO: 2273825 - RNA, 19 nt, Artificial Sequence
  Description of Artificial Sequence: Synthetic oligonucleotide
  Antisense strand to SEQ ID NO: 2273824
auacuccagcucaucauga

SEQ ID NO: 2273826 - RNA, 19 nt, Artificial Sequence
  Description of Artificial Sequence: Synthetic oligonucleotide
  Sense strand starting at position 192 of SEQ ID NO: 1884546
caugaugagcuggaguauu

SEQ ID NO: 2273827 - RNA, 19 nt, Artificial Sequence
  Description of Artificial Sequence: Synthetic oligonucleotide
  Antisense strand to SEQ ID NO: 2273826
aauacuccagcucaucaug

SEQ ID NO: 2273828 - RNA, 19 nt, Artificial Sequence
  Description of Artificial Sequence: Synthetic oligonucleotide
  Sense strand starting at position 469 of SEQ ID NO: 1884546
gcuguuauucuguuacagc

SEQ ID NO: 2273829 - RNA, 19 nt, Artificial Sequence
  Description of Artificial Sequence: Synthetic oligonucleotide
  Antisense strand to SEQ ID NO: 2273828
gcuguaacagaauaacagc

SEQ ID NO: 2273830 - RNA, 19 nt, Artificial Sequence
  Description of Artificial Sequence: Synthetic oligonucleotide
  Sense strand starting at position 873 of SEQ ID NO: 1884546
gccauaacuguguacucua

SEQ ID NO: 2273831 - RNA, 19 nt, Artificial Sequence
  Description of Artificial Sequence: Synthetic oligonucleotide
  Antisense strand to SEQ ID NO: 2273830
uagaguacacaguuauggc

SEQ ID NO: 2273832 - RNA, 19 nt, Artificial Sequence
  Description of Artificial Sequence: Synthetic oligonucleotide
  Sense strand starting at position 876 of SEQ ID NO: 1884546
auaacuguguacucuagau

SEQ ID NO: 2273833 - RNA, 19 nt, Artificial Sequence
  Description of Artificial Sequence: Synthetic oligonucleotide
  Antisense strand to SEQ ID NO: 2273832
aucuagaguacacaguuau

SEQ ID NO: 2273834 - RNA, 19 nt, Artificial Sequence
  Description of Artificial Sequence: Synthetic oligonucleotide
  Sense strand starting at position 880 of SEQ ID NO: 1884546
cuguguacucuagauuaaa

SEQ ID NO: 2273835 - RNA, 19 nt, Artificial Sequence
  Description of Artificial Sequence: Synthetic oligonucleotide
  Antisense strand to SEQ ID NO: 2273834
uuuaaucuagaguacacag

SEQ ID NO: 2273836 - RNA, 19 nt, Artificial Sequence
  Description of Artificial Sequence: Synthetic oligonucleotide
  Sense strand starting at position 883 of SEQ ID NO: 1884546
uguacucuagauuaaacgu

SEQ ID NO: 2273837 - RNA, 19 nt, Artificial Sequence
  Description of Artificial Sequence: Synthetic oligonucleotide
  Antisense strand to SEQ ID NO: 2273836
acguuuaaucuagaguaca

SEQ ID NO: 2273838 - RNA, 19 nt, Artificial Sequence
  Description of Artificial Sequence: Synthetic oligonucleotide
  Sense strand starting at position 948 of SEQ ID NO: 1884546
acauauaguguugggucau

SEQ ID NO: 2273839 - RNA, 19 nt, Artificial Sequence
  Description of Artificial Sequence: Synthetic oligonucleotide
  Antisense strand to SEQ ID NO: 2273838
augacccaacacuauaugu

SEQ ID NO: 2273840 - RNA, 19 nt, Artificial Sequence
  Description of Artificial Sequence: Synthetic oligonucleotide
  Sense strand starting at position 954 of SEQ ID NO: 1884546
aguguugggucaucauuaa

SEQ ID NO: 2273841 - RNA, 19 nt, Artificial Sequence
  Description of Artificial Sequence: Synthetic oligonucleotide
  Antisense strand to SEQ ID NO: 2273840
uuaaugaugacccaacacu

SEQ ID NO: 2273842 - RNA, 19 nt, Artificial Sequence
  Description of Artificial Sequence: Synthetic oligonucleotide
  Sense strand starting at position 958 of SEQ ID NO: 1884546
uugggucaucauuaaguca

SEQ ID NO: 2273843 - RNA, 19 nt, Artificial Sequence
  Description of Artificial Sequence: Synthetic oligonucleotide
  Antisense strand to SEQ ID NO: 2273842
ugacuuaaugaugacccaa

SEQ ID NO: 2273844 - RNA, 19 nt, Artificial Sequence
  Description of Artificial Sequence: Synthetic oligonucleotide
  Sense strand starting at position 1032 of SEQ ID NO: 1884546
uguguccugaccuaugaga

SEQ ID NO: 2273845 - RNA, 19 nt, Artificial Sequence
  Description of Artificial Sequence: Synthetic oligonucleotide
  Antisense strand to SEQ ID NO: 2273844
ucucauaggucaggacaca

SEQ ID NO: 2273846 - RNA, 19 nt, Artificial Sequence
  Description of Artificial Sequence: Synthetic oligonucleotide
  Sense strand starting at position 1034 of SEQ ID NO: 1884546
uguccugaccuaugagaau

SEQ ID NO: 2273847 - RNA, 19 nt, Artificial Sequence
  Description of Artificial Sequence: Synthetic oligonucleotide
  Antisense strand to SEQ ID NO: 2273846
auucucauaggucaggaca

SEQ ID NO: 2273848 - RNA, 19 nt, Artificial Sequence
  Description of Artificial Sequence: Synthetic oligonucleotide
  Sense strand starting at position 1043 of SEQ ID NO: 1884546
cuaugagaaucuguuauac

SEQ ID NO: 2273849 - RNA, 19 nt, Artificial Sequence
  Description of Artificial Sequence: Synthetic oligonucleotide
  Antisense strand to SEQ ID NO: 2273848
guauaacagauucucauag

SEQ ID NO: 2273850 - RNA, 19 nt, Artificial Sequence
  Description of Artificial Sequence: Synthetic oligonucleotide
  Sense strand starting at position 1060 of SEQ ID NO: 1884546
acgcauguuuaauuucuau

SEQ ID NO: 2273851 - RNA, 19 nt, Artificial Sequence
  Description of Artificial Sequence: Synthetic oligonucleotide
  Antisense strand to SEQ ID NO: 2273850
auagaaauuaaacaugcgu

SEQ ID NO: 2273852 - RNA, 19 nt, Artificial Sequence
  Description of Artificial Sequence: Synthetic oligonucleotide
  Sense strand starting at position 1189 of SEQ ID NO: 1884546
aaugguggcaggcagaauu

SEQ ID NO: 2273853 - RNA, 19 nt, Artificial Sequence
  Description of Artificial Sequence: Synthetic oligonucleotide
  Antisense strand to SEQ ID NO: 2273852
aauucugccugccaccauu

SEQ ID NO: 2273854 - RNA, 19 nt, Artificial Sequence
  Description of Artificial Sequence: Synthetic oligonucleotide
  Sense strand starting at position 1241 of SEQ ID NO: 1884546
ugugcauuccuugauaauc

SEQ ID NO: 2273855 - RNA, 19 nt, Artificial Sequence
  Description of Artificial Sequence: Synthetic oligonucleotide
  Antisense strand to SEQ ID NO: 2273854
gauuaucaaggaaugcaca

SEQ ID NO: 2273856 - RNA, 19 nt, Artificial Sequence
  Description of Artificial Sequence: Synthetic oligonucleotide
  Sense strand starting at position 1279 of SEQ ID NO: 1884546
cagaccuguguguaugaua

SEQ ID NO: 2273857 - RNA, 19 nt, Artificial Sequence
  Description of Artificial Sequence: Synthetic oligonucleotide
  Antisense strand to SEQ ID NO: 2273856
uaucauacacacaggucug

SEQ ID NO: 2273858 - RNA, 19 nt, Artificial Sequence
  Description of Artificial Sequence: Synthetic oligonucleotide
  Sense strand starting at position 1290 of SEQ ID NO: 1884546
guaugauaccacugcuaug

SEQ ID NO: 2273859 - RNA, 19 nt, Artificial Sequence
  Description of Artificial Sequence: Synthetic oligonucleotide
  Antisense strand to SEQ ID NO: 2273858
cauagcagugguaucauac

SEQ ID NO: 2273860 - RNA, 19 nt, Artificial Sequence
  Description of Artificial Sequence: Synthetic oligonucleotide
  Sense strand starting at position 1386 of SEQ ID NO: 1884546
ccguuucugagucauagag

SEQ ID NO: 2273861 - RNA, 19 nt, Artificial Sequence
  Description of Artificial Sequence: Synthetic oligonucleotide
  Antisense strand to SEQ ID NO: 2273860
cucuaugacucagaaacgg

SEQ ID NO: 2273862 - RNA, 19 nt, Artificial Sequence
  Description of Artificial Sequence: Synthetic oligonucleotide
  Sense strand starting at position 1395 of SEQ ID NO: 1884546
agucauagagauugaaagu

SEQ ID NO: 2273863 - RNA, 19 nt, Artificial Sequence
  Description of Artificial Sequence: Synthetic oligonucleotide
  Antisense strand to SEQ ID NO: 2273862
acuuucaaucucuaugacu

SEQ ID NO: 2273864 - RNA, 19 nt, Artificial Sequence
  Description of Artificial Sequence: Synthetic oligonucleotide
  Sense strand starting at position 1486 of SEQ ID NO: 1884546
acuugagaguggucacuag

SEQ ID NO: 2273865 - RNA, 19 nt, Artificial Sequence
  Description of Artificial Sequence: Synthetic oligonucleotide
  Antisense strand to SEQ ID NO: 2273864
cuagugaccacucucaagu

SEQ ID NO: 2273866 - RNA, 19 nt, Artificial Sequence
  Description of Artificial Sequence: Synthetic oligonucleotide
  Sense strand starting at position 1509 of SEQ ID NO: 1884546
ugagauccaucccuaauug

SEQ ID NO: 2273867 - RNA, 19 nt, Artificial Sequence
  Description of Artificial Sequence: Synthetic oligonucleotide
  Antisense strand to SEQ ID NO: 2273866
caauuagggauggaucuca

SEQ ID NO: 2273868 - RNA, 19 nt, Artificial Sequence
  Description of Artificial Sequence: Synthetic oligonucleotide
  Sense strand starting at position 1776 of SEQ ID NO: 1884546
cccuauccaugaguuacau

SEQ ID NO: 2273869 - RNA, 19 nt, Artificial Sequence
  Description of Artificial Sequence: Synthetic oligonucleotide
  Antisense strand to SEQ ID NO: 2273868
auguaacucauggauaggg

SEQ ID NO: 2273870 - RNA, 19 nt, Artificial Sequence
  Description of Artificial Sequence: Synthetic oligonucleotide
  Sense strand starting at position 2080 of SEQ ID NO: 1884546
gugacuugggaauaguauu

SEQ ID NO: 2273871 - RNA, 19 nt, Artificial Sequence
  Description of Artificial Sequence: Synthetic oligonucleotide
  Antisense strand to SEQ ID NO: 2273870
aauacuauucccaagucac

SEQ ID NO: 2273872 - RNA, 19 nt, Artificial Sequence
  Description of Artificial Sequence: Synthetic oligonucleotide
  Sense strand starting at position 2114 of SEQ ID NO: 1884546
uggcuucuuauagguauga

SEQ ID NO: 2273873 - RNA, 19 nt, Artificial Sequence
  Description of Artificial Sequence: Synthetic oligonucleotide
  Antisense strand to SEQ ID NO: 2273872
ucauaccuauaagaagcca

SEQ ID NO: 2273874 - RNA, 19 nt, Artificial Sequence
  Description of Artificial Sequence: Synthetic oligonucleotide
  Sense strand starting at position 2118 of SEQ ID NO: 1884546
uucuuauagguaugagcca

SEQ ID NO: 2273875 - RNA, 19 nt, Artificial Sequence
  Description of Artificial Sequence: Synthetic oligonucleotide
  Antisense strand to SEQ ID NO: 2273874
uggcucauaccuauaagaa

SEQ ID NO: 2273876 - RNA, 19 nt, Artificial Sequence
  Description of Artificial Sequence: Synthetic oligonucleotide
  Sense strand starting at position 2236 of SEQ ID NO: 1884546
ggaguaauauagcucuguc

SEQ ID NO: 2273877 - RNA, 19 nt, Artificial Sequence
  Description of Artificial Sequence: Synthetic oligonucleotide
  Antisense strand to SEQ ID NO: 2273876
gacagagcuauauuacucc

SEQ ID NO: 2273878 - RNA, 19 nt, Artificial Sequence
  Description of Artificial Sequence: Synthetic oligonucleotide
  Sense strand starting at position 2350 of SEQ ID NO: 1884546
uagcccacucuugaggaua

SEQ ID NO: 2273879 - RNA, 19 nt, Artificial Sequence
  Description of Artificial Sequence: Synthetic oligonucleotide
  Antisense strand to SEQ ID NO: 2273878
uauccucaagagugggcua

SEQ ID NO: 2273880 - RNA, 19 nt, Artificial Sequence
  Description of Artificial Sequence: Synthetic oligonucleotide
  Sense strand starting at position 2361 of SEQ ID NO: 1884546
ugaggauacuuucuugcca

SEQ ID NO: 2273881 - RNA, 19 nt, Artificial Sequence
  Description of Artificial Sequence: Synthetic oligonucleotide
  Antisense strand to SEQ ID NO: 2273880
uggcaagaaaguauccuca

SEQ ID NO: 2273882 - RNA, 19 nt, Artificial Sequence
  Description of Artificial Sequence: Synthetic oligonucleotide
  Sense strand starting at position 2427 of SEQ ID NO: 1884546
ugguuuggagcucauaauc

SEQ ID NO: 2273883 - RNA, 19 nt, Artificial Sequence
  Description of Artificial Sequence: Synthetic oligonucleotide
  Antisense strand to SEQ ID NO: 2273882
gauuaugagcuccaaacca

SEQ ID NO: 2273884 - RNA, 19 nt, Artificial Sequence
  Description of Artificial Sequence: Synthetic oligonucleotide
  Sense strand starting at position 2644 of SEQ ID NO: 1884546
ggguuaaauaaaugugccu

SEQ ID NO: 2273885 - RNA, 19 nt, Artificial Sequence
  Description of Artificial Sequence: Synthetic oligonucleotide
  Antisense strand to SEQ ID NO: 2273884
aggcacauuuauuuaaccc

SEQ ID NO: 2273886 - RNA, 19 nt, Artificial Sequence
  Description of Artificial Sequence: Synthetic oligonucleotide
  Sense strand starting at position 2933 of SEQ ID NO: 1884546
uacuuauaguguuugaagu

SEQ ID NO: 2273887 - RNA, 19 nt, Artificial Sequence
  Description of Artificial Sequence: Synthetic oligonucleotide
  Antisense strand to SEQ ID NO: 2273886
acuucaaacacuauaagua

SEQ ID NO: 2273888 - RNA, 19 nt, Artificial Sequence
  Description of Artificial Sequence: Synthetic oligonucleotide
  Sense strand starting at position 3288 of SEQ ID NO: 1884546
guaacuugccauggcauuu

SEQ ID NO: 2273889 - RNA, 19 nt, Artificial Sequence
  Description of Artificial Sequence: Synthetic oligonucleotide
  Antisense strand to SEQ ID NO: 2273888
aaaugccauggcaaguuac

SEQ ID NO: 2273890 - RNA, 19 nt, Artificial Sequence
  Description of Artificial Sequence: Synthetic oligonucleotide
  Sense strand starting at position 3891 of SEQ ID NO: 1884546
uaaauauggagacgugaug

SEQ ID NO: 2273891 - RNA, 19 nt, Artificial Sequence
  Description of Artificial Sequence: Synthetic oligonucleotide
  Antisense strand to SEQ ID NO: 2273890
caucacgucuccauauuua

SEQ ID NO: 2273892 - RNA, 19 nt, Artificial Sequence
  Description of Artificial Sequence: Synthetic oligonucleotide
  Sense strand starting at position 3927 of SEQ ID NO: 1884546
ggucuuagagcccauuaua

SEQ ID NO: 2273893 - RNA, 19 nt, Artificial Sequence
  Description of Artificial Sequence: Synthetic oligonucleotide
  Antisense strand to SEQ ID NO: 2273892
uauaaugggcucuaagacc

SEQ ID NO: 2273894 - RNA, 19 nt, Artificial Sequence
  Description of Artificial Sequence: Synthetic oligonucleotide
  Sense strand starting at position 28 of SEQ ID NO: 1884547
gaggaauguugagaauaaa

SEQ ID NO: 2273895 - RNA, 19 nt, Artificial Sequence
  Description of Artificial Sequence: Synthetic oligonucleotide
  Antisense strand to SEQ ID NO: 2273894
uuuauucucaacauuccuc

SEQ ID NO: 2273896 - RNA, 19 nt, Artificial Sequence
  Description of Artificial Sequence: Synthetic oligonucleotide
  Sense strand starting at position 124 of SEQ ID NO: 1884547
ggguccugcccucauagaa

SEQ ID NO: 2273897 - RNA, 19 nt, Artificial Sequence
  Description of Artificial Sequence: Synthetic oligonucleotide
  Antisense strand to SEQ ID NO: 2273896
uucuaugagggcaggaccc

SEQ ID NO: 2273898 - RNA, 19 nt, Artificial Sequence
  Description of Artificial Sequence: Synthetic oligonucleotide
  Sense strand starting at position 158 of SEQ ID NO: 1884547
gaaggaaccaggugaugua

SEQ ID NO: 2273899 - RNA, 19 nt, Artificial Sequence
  Description of Artificial Sequence: Synthetic oligonucleotide
  Antisense strand to SEQ ID NO: 2273898
uacaucaccugguuccuuc

SEQ ID NO: 2273900 - RNA, 19 nt, Artificial Sequence
  Description of Artificial Sequence: Synthetic oligonucleotide
  Sense strand starting at position 413 of SEQ ID NO: 1884547
gggugacuucguuauaaga

SEQ ID NO: 2273901 - RNA, 19 nt, Artificial Sequence
  Description of Artificial Sequence: Synthetic oligonucleotide
  Antisense strand to SEQ ID NO: 2273900
ucuuauaacgaagucaccc

SEQ ID NO: 2273902 - RNA, 19 nt, Artificial Sequence
  Description of Artificial Sequence: Synthetic oligonucleotide
  Sense strand starting at position 813 of SEQ ID NO: 1884547
ccaggaggucauugaucuu

SEQ ID NO: 2273903 - RNA, 19 nt, Artificial Sequence
  Description of Artificial Sequence: Synthetic oligonucleotide
  Antisense strand to SEQ ID NO: 2273902
aagaucaaugaccuccugg

SEQ ID NO: 2273904 - RNA, 19 nt, Artificial Sequence
  Description of Artificial Sequence: Synthetic oligonucleotide
  Sense strand starting at position 816 of SEQ ID NO: 1884547
ggaggucauugaucuuaau

SEQ ID NO: 2273905 - RNA, 19 nt, Artificial Sequence
  Description of Artificial Sequence: Synthetic oligonucleotide
  Antisense strand to SEQ ID NO: 2273904
auuaagaucaaugaccucc

SEQ ID NO: 2273906 - RNA, 19 nt, Artificial Sequence
  Description of Artificial Sequence: Synthetic oligonucleotide
  Sense strand starting at position 880 of SEQ ID NO: 1884547
agaauuacugguggauauu

SEQ ID NO: 2273907 - RNA, 19 nt, Artificial Sequence
  Description of Artificial Sequence: Synthetic oligonucleotide
  Antisense strand to SEQ ID NO: 2273906
aauauccaccaguaauucu

SEQ ID NO: 2273908 - RNA, 19 nt, Artificial Sequence
  Description of Artificial Sequence: Synthetic oligonucleotide
  Sense strand starting at position 925 of SEQ ID NO: 1884547
accaacuucugucuugaga

SEQ ID NO: 2273909 - RNA, 19 nt, Artificial Sequence
  Description of Artificial Sequence: Synthetic oligonucleotide
  Antisense strand to SEQ ID NO: 2273908
ucucaagacagaaguuggu

SEQ ID NO: 2273910 - RNA, 19 nt, Artificial Sequence
  Description of Artificial Sequence: Synthetic oligonucleotide
  Sense strand starting at position 958 of SEQ ID NO: 1884547
cugugcaauugaucagaau

SEQ ID NO: 2273911 - RNA, 19 nt, Artificial Sequence
  Description of Artificial Sequence: Synthetic oligonucleotide
  Antisense strand to SEQ ID NO: 2273910
auucugaucaauugcacag

SEQ ID NO: 2273912 - RNA, 19 nt, Artificial Sequence
  Description of Artificial Sequence: Synthetic oligonucleotide
  Sense strand starting at position 959 of SEQ ID NO: 1884547
ugugcaauugaucagaaug

SEQ ID NO: 2273913 - RNA, 19 nt, Artificial Sequence
  Description of Artificial Sequence: Synthetic oligonucleotide
  Antisense strand to SEQ ID NO: 2273912
cauucugaucaauugcaca

SEQ ID NO: 2273914 - RNA, 19 nt, Artificial Sequence
  Description of Artificial Sequence: Synthetic oligonucleotide
  Sense strand starting at position 1357 of SEQ ID NO: 1884547
gaaacuauggcucagguau

SEQ ID NO: 2273915 - RNA, 19 nt, Artificial Sequence
  Description of Artificial Sequence: Synthetic oligonucleotide
  Antisense strand to SEQ ID NO: 2273914
auaccugagccauaguuuc

SEQ ID NO: 2273916 - RNA, 19 nt, Artificial Sequence
  Description of Artificial Sequence: Synthetic oligonucleotide
  Sense strand starting at position 1380 of SEQ ID NO: 1884547
ugaauuuaguguuaggaaa

SEQ ID NO: 2273917 - RNA, 19 nt, Artificial Sequence
  Description of Artificial Sequence: Synthetic oligonucleotide
  Antisense strand to SEQ ID NO: 2273916
uuuccuaacacuaaauuca

SEQ ID NO: 2273918 - RNA, 19 nt, Artificial Sequence
  Description of Artificial Sequence: Synthetic oligonucleotide
  Sense strand starting at position 1407 of SEQ ID NO: 1884547
gugaaagucuuucugggaa

SEQ ID NO: 2273919 - RNA, 19 nt, Artificial Sequence
  Description of Artificial Sequence: Synthetic oligonucleotide
  Antisense strand to SEQ ID NO: 2273918
uucccagaaagacuuucac

SEQ ID NO: 2273920 - RNA, 19 nt, Artificial Sequence
  Description of Artificial Sequence: Synthetic oligonucleotide
  Sense strand starting at position 1452 of SEQ ID NO: 1884547
uuuccugucuuaguaaaca

SEQ ID NO: 2273921 - RNA, 19 nt, Artificial Sequence
  Description of Artificial Sequence: Synthetic oligonucleotide
  Antisense strand to SEQ ID NO: 2273920
uguuuacuaagacaggaaa

SEQ ID NO: 2273922 - RNA, 19 nt, Artificial Sequence
  Description of Artificial Sequence: Synthetic oligonucleotide
  Sense strand starting at position 1476 of SEQ ID NO: 1884547
aaucgauugcuuggucaaa

SEQ ID NO: 2273923 - RNA, 19 nt, Artificial Sequence
  Description of Artificial Sequence: Synthetic oligonucleotide
  Antisense strand to SEQ ID NO: 2273922
uuugaccaagcaaucgauu

SEQ ID NO: 2273924 - RNA, 19 nt, Artificial Sequence
  Description of Artificial Sequence: Synthetic oligonucleotide
  Sense strand starting at position 1478 of SEQ ID NO: 1884547
ucgauugcuuggucaaaga

SEQ ID NO: 2273925 - RNA, 19 nt, Artificial Sequence
  Description of Artificial Sequence: Synthetic oligonucleotide
  Antisense strand to SEQ ID NO: 2273924
ucuuugaccaagcaaucga

SEQ ID NO: 2273926 - RNA, 19 nt, Artificial Sequence
  Description of Artificial Sequence: Synthetic oligonucleotide
  Sense strand starting at position 1591 of SEQ ID NO: 1884547
ggcaaauugcuuuaagucu

SEQ ID NO: 2273927 - RNA, 19 nt, Artificial Sequence
  Description of Artificial Sequence: Synthetic oligonucleotide
  Antisense strand to SEQ ID NO: 2273926
agacuuaaagcaauuugcc

SEQ ID NO: 2273928 - RNA, 19 nt, Artificial Sequence
  Description of Artificial Sequence: Synthetic oligonucleotide
  Sense strand starting at position 1606 of SEQ ID NO: 1884547
gucucuaauuucucaguuu

SEQ ID NO: 2273929 - RNA, 19 nt, Artificial Sequence
  Description of Artificial Sequence: Synthetic oligonucleotide
  Antisense strand to SEQ ID NO: 2273928
aaacugagaaauuagagac

SEQ ID NO: 2273930 - RNA, 19 nt, Artificial Sequence
  Description of Artificial Sequence: Synthetic oligonucleotide
  Sense strand starting at position 1780 of SEQ ID NO: 1884547
gacacagaugagugguguu

SEQ ID NO: 2273931 - RNA, 19 nt, Artificial Sequence
  Description of Artificial Sequence: Synthetic oligonucleotide
  Antisense strand to SEQ ID NO: 2273930
aacaccacucaucuguguc

SEQ ID NO: 2273932 - RNA, 19 nt, Artificial Sequence
  Description of Artificial Sequence: Synthetic oligonucleotide
  Sense strand starting at position 1846 of SEQ ID NO: 1884547
auggcacugccguuaucuu

SEQ ID NO: 2273933 - RNA, 19 nt, Artificial Sequence
  Description of Artificial Sequence: Synthetic oligonucleotide
  Antisense strand to SEQ ID NO: 2273932
aagauaacggcagugccau

SEQ ID NO: 2273934 - RNA, 19 nt, Artificial Sequence
  Description of Artificial Sequence: Synthetic oligonucleotide
  Sense strand starting at position 1920 of SEQ ID NO: 1884547
ccaaauacauagguguuau

SEQ ID NO: 2273935 - RNA, 19 nt, Artificial Sequence
  Description of Artificial Sequence: Synthetic oligonucleotide
  Antisense strand to SEQ ID NO: 2273934
auaacaccuauguauuugg

SEQ ID NO: 2273936 - RNA, 19 nt, Artificial Sequence
  Description of Artificial Sequence: Synthetic oligonucleotide
  Sense strand starting at position 2014 of SEQ ID NO: 1884547
cucccaguuaagugagagu

SEQ ID NO: 2273937 - RNA, 19 nt, Artificial Sequence
  Description of Artificial Sequence: Synthetic oligonucleotide
  Antisense strand to SEQ ID NO: 2273936
acucucacuuaacugggag

SEQ ID NO: 2273938 - RNA, 19 nt, Artificial Sequence
  Description of Artificial Sequence: Synthetic oligonucleotide
  Sense strand starting at position 2104 of SEQ ID NO: 1884547
gcuagugugagcuuuggca

SEQ ID NO: 2273939 - RNA, 19 nt, Artificial Sequence
  Description of Artificial Sequence: Synthetic oligonucleotide
  Antisense strand to SEQ ID NO: 2273938
ugccaaagcucacacuagc

SEQ ID NO: 2273940 - RNA, 19 nt, Artificial Sequence
  Description of Artificial Sequence: Synthetic oligonucleotide
  Sense strand starting at position 2229 of SEQ ID NO: 1884547
agggcaauccaguagguuu

SEQ ID NO: 2273941 - RNA, 19 nt, Artificial Sequence
  Description of Artificial Sequence: Synthetic oligonucleotide
  Antisense strand to SEQ ID NO: 2273940
aaaccuacuggauugcccu

SEQ ID NO: 2273942 - RNA, 19 nt, Artificial Sequence
  Description of Artificial Sequence: Synthetic oligonucleotide
  Sense strand starting at position 2232 of SEQ ID NO: 1884547
gcaauccaguagguuuaua

SEQ ID NO: 2273943 - RNA, 19 nt, Artificial Sequence
  Description of Artificial Sequence: Synthetic oligonucleotide
  Antisense strand to SEQ ID NO: 2273942
uauaaaccuacuggauugc

SEQ ID NO: 2273944 - RNA, 19 nt, Artificial Sequence
  Description of Artificial Sequence: Synthetic oligonucleotide
  Sense strand starting at position 2284 of SEQ ID NO: 1884547
cauauuaugguuuagcuga

SEQ ID NO: 2273945 - RNA, 19 nt, Artificial Sequence
  Description of Artificial Sequence: Synthetic oligonucleotide
  Antisense strand to SEQ ID NO: 2273944
ucagcuaaaccauaauaug

SEQ ID NO: 2273946 - RNA, 19 nt, Artificial Sequence
  Description of Artificial Sequence: Synthetic oligonucleotide
  Sense strand starting at position 2286 of SEQ ID NO: 1884547
uauuaugguuuagcugaaa

SEQ ID NO: 2273947 - RNA, 19 nt, Artificial Sequence
  Description of Artificial Sequence: Synthetic oligonucleotide
  Antisense strand to SEQ ID NO: 2273946
uuucagcuaaaccauaaua

SEQ ID NO: 2273948 - RNA, 19 nt, Artificial Sequence
  Description of Artificial Sequence: Synthetic oligonucleotide
  Sense strand starting at position 2289 of SEQ ID NO: 1884547
uaugguuuagcugaaauaa

SEQ ID NO: 2273949 - RNA, 19 nt, Artificial Sequence
  Description of Artificial Sequence: Synthetic oligonucleotide
  Antisense strand to SEQ ID NO: 2273948
uuauuucagcuaaaccaua

SEQ ID NO: 2273950 - RNA, 19 nt, Artificial Sequence
  Description of Artificial Sequence: Synthetic oligonucleotide
  Sense strand starting at position 2649 of SEQ ID NO: 1884547
ucccauacacuggguuaaa

SEQ ID NO: 2273951 - RNA, 19 nt, Artificial Sequence
  Description of Artificial Sequence: Synthetic oligonucleotide
  Antisense strand to SEQ ID NO: 2273950
uuuaacccaguguauggga

SEQ ID NO: 2273952 - RNA, 19 nt, Artificial Sequence
  Description of Artificial Sequence: Synthetic oligonucleotide
  Sense strand starting at position 2761 of SEQ ID NO: 1884547
aagcaauauuugcuuguga

SEQ ID NO: 2273953 - RNA, 19 nt, Artificial Sequence
  Description of Artificial Sequence: Synthetic oligonucleotide
  Antisense strand to SEQ ID NO: 2273952
ucacaagcaaauauugcuu

SEQ ID NO: 2273954 - RNA, 19 nt, Artificial Sequence
  Description of Artificial Sequence: Synthetic oligonucleotide
  Sense strand starting at position 2763 of SEQ ID NO: 1884547
gcaauauuugcuugugagu

SEQ ID NO: 2273955 - RNA, 19 nt, Artificial Sequence
  Description of Artificial Sequence: Synthetic oligonucleotide
  Antisense strand to SEQ ID NO: 2273954
acucacaagcaaauauugc

SEQ ID NO: 2273956 - RNA, 19 nt, Artificial Sequence
  Description of Artificial Sequence: Synthetic oligonucleotide
  Sense strand starting at position 2804 of SEQ ID NO: 1884547
gaguaauucuguccuggga

SEQ ID NO: 2273957 - RNA, 19 nt, Artificial Sequence
  Description of Artificial Sequence: Synthetic oligonucleotide
  Antisense strand to SEQ ID NO: 2273956
ucccaggacagaauuacuc

SEQ ID NO: 2273958 - RNA, 19 nt, Artificial Sequence
  Description of Artificial Sequence: Synthetic oligonucleotide
  Sense strand starting at position 3048 of SEQ ID NO: 1884547
aagucaaguuugcuaugga

SEQ ID NO: 2273959 - RNA, 19 nt, Artificial Sequence
  Description of Artificial Sequence: Synthetic oligonucleotide
  Antisense strand to SEQ ID NO: 2273958
uccauagcaaacuugacuu

SEQ ID NO: 2273960 - RNA, 19 nt, Artificial Sequence
  Description of Artificial Sequence: Synthetic oligonucleotide
  Sense strand starting at position 3058 of SEQ ID NO: 1884547
ugcuauggauguccagaau

SEQ ID NO: 2273961 - RNA, 19 nt, Artificial Sequence
  Description of Artificial Sequence: Synthetic oligonucleotide
  Antisense strand to SEQ ID NO: 2273960
auucuggacauccauagca

SEQ ID NO: 2273962 - RNA, 19 nt, Artificial Sequence
  Description of Artificial Sequence: Synthetic oligonucleotide
  Sense strand starting at position 3064 of SEQ ID NO: 1884547
ggauguccagaaugccaaa

SEQ ID NO: 2273963 - RNA, 19 nt, Artificial Sequence
  Description of Artificial Sequence: Synthetic oligonucleotide
  Antisense strand to SEQ ID NO: 2273962
uuuggcauucuggacaucc

SEQ ID NO: 2273964 - RNA, 19 nt, Artificial Sequence
  Description of Artificial Sequence: Synthetic oligonucleotide
  Sense strand starting at position 3276 of SEQ ID NO: 1884547
aguuuauuucagugagcga

SEQ ID NO: 2273965 - RNA, 19 nt, Artificial Sequence
  Description of Artificial Sequence: Synthetic oligonucleotide
  Antisense strand to SEQ ID NO: 2273964
ucgcucacugaaauaaacu

SEQ ID NO: 2273966 - RNA, 19 nt, Artificial Sequence
  Description of Artificial Sequence: Synthetic oligonucleotide
  Sense strand starting at position 3292 of SEQ ID NO: 1884547
cgacaaguacuaugaagaa

SEQ ID NO: 2273967 - RNA, 19 nt, Artificial Sequence
  Description of Artificial Sequence: Synthetic oligonucleotide
  Antisense strand to SEQ ID NO: 2273966
uucuucauaguacuugucg

SEQ ID NO: 2273968 - RNA, 19 nt, Artificial Sequence
  Description of Artificial Sequence: Synthetic oligonucleotide
  Sense strand starting at position 3311 of SEQ ID NO: 1884547
aguaaaguugaaugauaug

SEQ ID NO: 2273969 - RNA, 19 nt, Artificial Sequence
  Description of Artificial Sequence: Synthetic oligonucleotide
  Antisense strand to SEQ ID NO: 2273968
cauaucauucaacuuuacu

SEQ ID NO: 2273970 - RNA, 19 nt, Artificial Sequence
  Description of Artificial Sequence: Synthetic oligonucleotide
  Sense strand starting at position 3430 of SEQ ID NO: 1884547
gcaugauccaggcagcaca

SEQ ID NO: 2273971 - RNA, 19 nt, Artificial Sequence
  Description of Artificial Sequence: Synthetic oligonucleotide
  Antisense strand to SEQ ID NO: 2273970
ugugcugccuggaucaugc

SEQ ID NO: 2273972 - RNA, 19 nt, Artificial Sequence
  Description of Artificial Sequence: Synthetic oligonucleotide
  Sense strand starting at position 3472 of SEQ ID NO: 1884547
ugaggacaucuguggcuuu

SEQ ID NO: 2273973 - RNA, 19 nt, Artificial Sequence
  Description of Artificial Sequence: Synthetic oligonucleotide
  Antisense strand to SEQ ID NO: 2273972
aaagccacagauguccuca

SEQ ID NO: 2273974 - RNA, 19 nt, Artificial Sequence
  Description of Artificial Sequence: Synthetic oligonucleotide
  Sense strand starting at position 18 of SEQ ID NO: 1884548
gaggaaauaguacgugaaa

SEQ ID NO: 2273975 - RNA, 19 nt, Artificial Sequence
  Description of Artificial Sequence: Synthetic oligonucleotide
  Antisense strand to SEQ ID NO: 2273974
uuucacguacuauuuccuc

SEQ ID NO: 2273976 - RNA, 19 nt, Artificial Sequence
  Description of Artificial Sequence: Synthetic oligonucleotide
  Sense strand starting at position 184 of SEQ ID NO: 1884548
gugacuuaucuuugggagg

SEQ ID NO: 2273977 - RNA, 19 nt, Artificial Sequence
  Description of Artificial Sequence: Synthetic oligonucleotide
  Antisense strand to SEQ ID NO: 2273976
ccucccaaagauaagucac

SEQ ID NO: 2273978 - RNA, 19 nt, Artificial Sequence
  Description of Artificial Sequence: Synthetic oligonucleotide
  Sense strand starting at position 222 of SEQ ID NO: 1884548
ccuauauauugaguaguca

SEQ ID NO: 2273979 - RNA, 19 nt, Artificial Sequence
  Description of Artificial Sequence: Synthetic oligonucleotide
  Antisense strand to SEQ ID NO: 2273978
ugacuacucaauauauagg

SEQ ID NO: 2273980 - RNA, 19 nt, Artificial Sequence
  Description of Artificial Sequence: Synthetic oligonucleotide
  Sense strand starting at position 223 of SEQ ID NO: 1884548
cuauauauugaguagucag

SEQ ID NO: 2273981 - RNA, 19 nt, Artificial Sequence
  Description of Artificial Sequence: Synthetic oligonucleotide
  Antisense strand to SEQ ID NO: 2273980
cugacuacucaauauauag

SEQ ID NO: 2273982 - RNA, 19 nt, Artificial Sequence
  Description of Artificial Sequence: Synthetic oligonucleotide
  Sense strand starting at position 226 of SEQ ID NO: 1884548
uauauugaguagucaguag

SEQ ID NO: 2273983 - RNA, 19 nt, Artificial Sequence
  Description of Artificial Sequence: Synthetic oligonucleotide
  Antisense strand to SEQ ID NO: 2273982
cuacugacuacucaauaua

SEQ ID NO: 2273984 - RNA, 19 nt, Artificial Sequence
  Description of Artificial Sequence: Synthetic oligonucleotide
  Sense strand starting at position 230 of SEQ ID NO: 1884548
uugaguagucaguagugaa

SEQ ID NO: 2273985 - RNA, 19 nt, Artificial Sequence
  Description of Artificial Sequence: Synthetic oligonucleotide
  Antisense strand to SEQ ID NO: 2273984
uucacuacugacuacucaa

SEQ ID NO: 2273986 - RNA, 19 nt, Artificial Sequence
  Description of Artificial Sequence: Synthetic oligonucleotide
  Sense strand starting at position 318 of SEQ ID NO: 1884548
gugacuucucuggaggguu

SEQ ID NO: 2273987 - RNA, 19 nt, Artificial Sequence
  Description of Artificial Sequence: Synthetic oligonucleotide
  Antisense strand to SEQ ID NO: 2273986
aacccuccagagaagucac

SEQ ID NO: 2273988 - RNA, 19 nt, Artificial Sequence
  Description of Artificial Sequence: Synthetic oligonucleotide
  Sense strand starting at position 326 of SEQ ID NO: 1884548
ucuggaggguucucagaca

SEQ ID NO: 2273989 - RNA, 19 nt, Artificial Sequence
  Description of Artificial Sequence: Synthetic oligonucleotide
  Antisense strand to SEQ ID NO: 2273988
ugucugagaacccuccaga

SEQ ID NO: 2273990 - RNA, 19 nt, Artificial Sequence
  Description of Artificial Sequence: Synthetic oligonucleotide
  Sense strand starting at position 454 of SEQ ID NO: 1884548
gggaguaucucuucccaug

SEQ ID NO: 2273991 - RNA, 19 nt, Artificial Sequence
  Description of Artificial Sequence: Synthetic oligonucleotide
  Antisense strand to SEQ ID NO: 2273990
caugggaagagauacuccc

SEQ ID NO: 2273992 - RNA, 19 nt, Artificial Sequence
  Description of Artificial Sequence: Synthetic oligonucleotide
  Sense strand starting at position 456 of SEQ ID NO: 1884548
gaguaucucuucccaugga

SEQ ID NO: 2273993 - RNA, 19 nt, Artificial Sequence
  Description of Artificial Sequence: Synthetic oligonucleotide
  Antisense strand to SEQ ID NO: 2273992
uccaugggaagagauacuc

SEQ ID NO: 2273994 - RNA, 19 nt, Artificial Sequence
  Description of Artificial Sequence: Synthetic oligonucleotide
  Sense strand starting at position 581 of SEQ ID NO: 1884548
agagaugucaucugggcca

SEQ ID NO: 2273995 - RNA, 19 nt, Artificial Sequence
  Description of Artificial Sequence: Synthetic oligonucleotide
  Antisense strand to SEQ ID NO: 2273994
uggcccagaugacaucucu

SEQ ID NO: 2273996 - RNA, 19 nt, Artificial Sequence
  Description of Artificial Sequence: Synthetic oligonucleotide
  Sense strand starting at position 758 of SEQ ID NO: 1884548
ggaaucaagcagugaaaug

SEQ ID NO: 2273997 - RNA, 19 nt, Artificial Sequence
  Description of Artificial Sequence: Synthetic oligonucleotide
  Antisense strand to SEQ ID NO: 2273996
cauuucacugcuugauucc

SEQ ID NO: 2273998 - RNA, 19 nt, Artificial Sequence
  Description of Artificial Sequence: Synthetic oligonucleotide
  Sense strand starting at position 778 of SEQ ID NO: 1884548
uguacagauuuauaucaug

SEQ ID NO: 2273999 - RNA, 19 nt, Artificial Sequence
  Description of Artificial Sequence: Synthetic oligonucleotide
  Antisense strand to SEQ ID NO: 2273998
caugauauaaaucuguaca

SEQ ID NO: 2274000 - RNA, 19 nt, Artificial Sequence
  Description of Artificial Sequence: Synthetic oligonucleotide
  Sense strand starting at position 781 of SEQ ID NO: 1884548
acagauuuauaucauggua

SEQ ID NO: 2274001 - RNA, 19 nt, Artificial Sequence
  Description of Artificial Sequence: Synthetic oligonucleotide
  Antisense strand to SEQ ID NO: 2274000
uaccaugauauaaaucugu

SEQ ID NO: 2274002 - RNA, 19 nt, Artificial Sequence
  Description of Artificial Sequence: Synthetic oligonucleotide
  Sense strand starting at position 1321 of SEQ ID NO: 1884548
gugauuugugauuggcaca

SEQ ID NO: 2274003 - RNA, 19 nt, Artificial Sequence
  Description of Artificial Sequence: Synthetic oligonucleotide
  Antisense strand to SEQ ID NO: 2274002
ugugccaaucacaaaucac

SEQ ID NO: 2274004 - RNA, 19 nt, Artificial Sequence
  Description of Artificial Sequence: Synthetic oligonucleotide
  Sense strand starting at position 1326 of SEQ ID NO: 1884548
uugugauuggcacaccaau

SEQ ID NO: 2274005 - RNA, 19 nt, Artificial Sequence
  Description of Artificial Sequence: Synthetic oligonucleotide
  Antisense strand to SEQ ID NO: 2274004
auuggugugccaaucacaa

SEQ ID NO: 2274006 - RNA, 19 nt, Artificial Sequence
  Description of Artificial Sequence: Synthetic oligonucleotide
  Sense strand starting at position 1369 of SEQ ID NO: 1884548
guugucaauaucuggauga

SEQ ID NO: 2274007 - RNA, 19 nt, Artificial Sequence
  Description of Artificial Sequence: Synthetic oligonucleotide
  Antisense strand to SEQ ID NO: 2274006
ucauccagauauugacaac

SEQ ID NO: 2274008 - RNA, 19 nt, Artificial Sequence
  Description of Artificial Sequence: Synthetic oligonucleotide
  Sense strand starting at position 1380 of SEQ ID NO: 1884548
cuggaugaaugcuucuaag

SEQ ID NO: 2274009 - RNA, 19 nt, Artificial Sequence
  Description of Artificial Sequence: Synthetic oligonucleotide
  Antisense strand to SEQ ID NO: 2274008
cuuagaagcauucauccag

SEQ ID NO: 2274010 - RNA, 19 nt, Artificial Sequence
  Description of Artificial Sequence: Synthetic oligonucleotide
  Sense strand starting at position 1879 of SEQ ID NO: 1884548
guuucugacccuuaguuga

SEQ ID NO: 2274011 - RNA, 19 nt, Artificial Sequence
  Description of Artificial Sequence: Synthetic oligonucleotide
  Antisense strand to SEQ ID NO: 2274010
ucaacuaagggucagaaac

SEQ ID NO: 2274012 - RNA, 19 nt, Artificial Sequence
  Description of Artificial Sequence: Synthetic oligonucleotide
  Sense strand starting at position 1881 of SEQ ID NO: 1884548
uucugacccuuaguugaau

SEQ ID NO: 2274013 - RNA, 19 nt, Artificial Sequence
  Description of Artificial Sequence: Synthetic oligonucleotide
  Antisense strand to SEQ ID NO: 2274012
auucaacuaagggucagaa

SEQ ID NO: 2274014 - RNA, 19 nt, Artificial Sequence
  Description of Artificial Sequence: Synthetic oligonucleotide
  Sense strand starting at position 1975 of SEQ ID NO: 1884548
acaguauccgucuugcagu

SEQ ID NO: 2274015 - RNA, 19 nt, Artificial Sequence
  Description of Artificial Sequence: Synthetic oligonucleotide
  Antisense strand to SEQ ID NO: 2274014
acugcaagacggauacugu

SEQ ID NO: 2274016 - RNA, 19 nt, Artificial Sequence
  Description of Artificial Sequence: Synthetic oligonucleotide
  Sense strand starting at position 1997 of SEQ ID NO: 1884548
uuuggacuguuaccacaau

SEQ ID NO: 2274017 - RNA, 19 nt, Artificial Sequence
  Description of Artificial Sequence: Synthetic oligonucleotide
  Antisense strand to SEQ ID NO: 2274016
auugugguaacaguccaaa

SEQ ID NO: 2274018 - RNA, 19 nt, Artificial Sequence
  Description of Artificial Sequence: Synthetic oligonucleotide
  Sense strand starting at position 2143 of SEQ ID NO: 1884548
acacaauuccagggccuaa

SEQ ID NO: 2274019 - RNA, 19 nt, Artificial Sequence
  Description of Artificial Sequence: Synthetic oligonucleotide
  Antisense strand to SEQ ID NO: 2274018
uuaggcccuggaauugugu

SEQ ID NO: 2274020 - RNA, 19 nt, Artificial Sequence
  Description of Artificial Sequence: Synthetic oligonucleotide
  Sense strand starting at position 2289 of SEQ ID NO: 1884548
gucuuagaaacauggguuc

SEQ ID NO: 2274021 - RNA, 19 nt, Artificial Sequence
  Description of Artificial Sequence: Synthetic oligonucleotide
  Antisense strand to SEQ ID NO: 2274020
gaacccauguuucuaagac

SEQ ID NO: 2274022 - RNA, 19 nt, Artificial Sequence
  Description of Artificial Sequence: Synthetic oligonucleotide
  Sense strand starting at position 2292 of SEQ ID NO: 1884548
uuagaaacauggguucuua

SEQ ID NO: 2274023 - RNA, 19 nt, Artificial Sequence
  Description of Artificial Sequence: Synthetic oligonucleotide
  Antisense strand to SEQ ID NO: 2274022
uaagaacccauguuucuaa

SEQ ID NO: 2274024 - RNA, 19 nt, Artificial Sequence
  Description of Artificial Sequence: Synthetic oligonucleotide
  Sense strand starting at position 2343 of SEQ ID NO: 1884548
aacagaaucgcagagcauu

SEQ ID NO: 2274025 - RNA, 19 nt, Artificial Sequence
  Description of Artificial Sequence: Synthetic oligonucleotide
  Antisense strand to SEQ ID NO: 2274024
aaugcucugcgauucuguu

SEQ ID NO: 2274026 - RNA, 19 nt, Artificial Sequence
  Description of Artificial Sequence: Synthetic oligonucleotide
  Sense strand starting at position 2666 of SEQ ID NO: 1884548
ggcuuaguucccucgccau

SEQ ID NO: 2274027 - RNA, 19 nt, Artificial Sequence
  Description of Artificial Sequence: Synthetic oligonucleotide
  Antisense strand to SEQ ID NO: 2274026
auggcgagggaacuaagcc

SEQ ID NO: 2274028 - RNA, 19 nt, Artificial Sequence
  Description of Artificial Sequence: Synthetic oligonucleotide
  Sense strand starting at position 2855 of SEQ ID NO: 1884548
ccaacucuccaaggaguga

SEQ ID NO: 2274029 - RNA, 19 nt, Artificial Sequence
  Description of Artificial Sequence: Synthetic oligonucleotide
  Antisense strand to SEQ ID NO: 2274028
ucacuccuuggagaguugg

SEQ ID NO: 2274030 - RNA, 19 nt, Artificial Sequence
  Description of Artificial Sequence: Synthetic oligonucleotide
  Sense strand starting at position 2859 of SEQ ID NO: 1884548
cucuccaaggagugaauaa

SEQ ID NO: 2274031 - RNA, 19 nt, Artificial Sequence
  Description of Artificial Sequence: Synthetic oligonucleotide
  Antisense strand to SEQ ID NO: 2274030
uuauucacuccuuggagag

SEQ ID NO: 2274032 - RNA, 19 nt, Artificial Sequence
  Description of Artificial Sequence: Synthetic oligonucleotide
  Sense strand starting at position 3246 of SEQ ID NO: 1884548
aagugagaugagugcccaa

SEQ ID NO: 2274033 - RNA, 19 nt, Artificial Sequence
  Description of Artificial Sequence: Synthetic oligonucleotide
  Antisense strand to SEQ ID NO: 2274032
uugggcacucaucucacuu

SEQ ID NO: 2274034 - RNA, 19 nt, Artificial Sequence
  Description of Artificial Sequence: Synthetic oligonucleotide
  Sense strand starting at position 3352 of SEQ ID NO: 1884548
uugaacauggcuggugaaa

SEQ ID NO: 2274035 - RNA, 19 nt, Artificial Sequence
  Description of Artificial Sequence: Synthetic oligonucleotide
  Antisense strand to SEQ ID NO: 2274034
uuucaccagccauguucaa

SEQ ID NO: 2274036 - RNA, 19 nt, Artificial Sequence
  Description of Artificial Sequence: Synthetic oligonucleotide
  Sense strand starting at position 3498 of SEQ ID NO: 1884548
cugcauagauacuuuauga

SEQ ID NO: 2274037 - RNA, 19 nt, Artificial Sequence
  Description of Artificial Sequence: Synthetic oligonucleotide
  Antisense strand to SEQ ID NO: 2274036
ucauaaaguaucuaugcag

SEQ ID NO: 2274038 - RNA, 19 nt, Artificial Sequence
  Description of Artificial Sequence: Synthetic oligonucleotide
  Sense strand starting at position 3574 of SEQ ID NO: 1884548
uugagaauuccauguuucu

SEQ ID NO: 2274039 - RNA, 19 nt, Artificial Sequence
  Description of Artificial Sequence: Synthetic oligonucleotide
  Antisense strand to SEQ ID NO: 2274038
agaaacauggaauucucaa

SEQ ID NO: 2274040 - RNA, 19 nt, Artificial Sequence
  Description of Artificial Sequence: Synthetic oligonucleotide
  Sense strand starting at position 3577 of SEQ ID NO: 1884548
agaauuccauguuucuaag

SEQ ID NO: 2274041 - RNA, 19 nt, Artificial Sequence
  Description of Artificial Sequence: Synthetic oligonucleotide
  Antisense strand to SEQ ID NO: 2274040
cuuagaaacauggaauucu

SEQ ID NO: 2274042 - RNA, 19 nt, Artificial Sequence
  Description of Artificial Sequence: Synthetic oligonucleotide
  Sense strand starting at position 3622 of SEQ ID NO: 1884548
cuucuagaauuguccaaug

SEQ ID NO: 2274043 - RNA, 19 nt, Artificial Sequence
  Description of Artificial Sequence: Synthetic oligonucleotide
  Antisense strand to SEQ ID NO: 2274042
cauuggacaauucuagaag

SEQ ID NO: 2274044 - RNA, 19 nt, Artificial Sequence
  Description of Artificial Sequence: Synthetic oligonucleotide
  Sense strand starting at position 3624 of SEQ ID NO: 1884548
ucuagaauuguccaauguu

SEQ ID NO: 2274045 - RNA, 19 nt, Artificial Sequence
  Description of Artificial Sequence: Synthetic oligonucleotide
  Antisense strand to SEQ ID NO: 2274044
aacauuggacaauucuaga

SEQ ID NO: 2274046 - RNA, 19 nt, Artificial Sequence
  Description of Artificial Sequence: Synthetic oligonucleotide
  Sense strand starting at position 3670 of SEQ ID NO: 1884548
auucuaugauucuuggaug

SEQ ID NO: 2274047 - RNA, 19 nt, Artificial Sequence
  Description of Artificial Sequence: Synthetic oligonucleotide
  Antisense strand to SEQ ID NO: 2274046
cauccaagaaucauagaau

SEQ ID NO: 2274048 - RNA, 19 nt, Artificial Sequence
  Description of Artificial Sequence: Synthetic oligonucleotide
  Sense strand starting at position 3764 of SEQ ID NO: 1884548
accaguccugagugacaca

SEQ ID NO: 2274049 - RNA, 19 nt, Artificial Sequence
  Description of Artificial Sequence: Synthetic oligonucleotide
  Antisense strand to SEQ ID NO: 2274048
ugugucacucaggacuggu

SEQ ID NO: 2274050 - RNA, 19 nt, Artificial Sequence
  Description of Artificial Sequence: Synthetic oligonucleotide
  Sense strand starting at position 3784 of SEQ ID NO: 1884548
gugugucaccugaguguga

SEQ ID NO: 2274051 - RNA, 19 nt, Artificial Sequence
  Description of Artificial Sequence: Synthetic oligonucleotide
  Antisense strand to SEQ ID NO: 2274050
ucacacucaggugacacac

SEQ ID NO: 2274052 - RNA, 19 nt, Artificial Sequence
  Description of Artificial Sequence: Synthetic oligonucleotide
  Sense strand starting at position 3797 of SEQ ID NO: 1884548
gugugaaggagguagaguu

SEQ ID NO: 2274053 - RNA, 19 nt, Artificial Sequence
  Description of Artificial Sequence: Synthetic oligonucleotide
  Antisense strand to SEQ ID NO: 2274052
aacucuaccuccuucacac

SEQ ID NO: 2274054 - RNA, 19 nt, Artificial Sequence
  Description of Artificial Sequence: Synthetic oligonucleotide
  Sense strand starting at position 98 of SEQ ID NO: 1884549
ggaugaguugguuaguacu

SEQ ID NO: 2274055 - RNA, 19 nt, Artificial Sequence
  Description of Artificial Sequence: Synthetic oligonucleotide
  Antisense strand to SEQ ID NO: 2274054
aguacuaaccaacucaucc

SEQ ID NO: 2274056 - RNA, 19 nt, Artificial Sequence
  Description of Artificial Sequence: Synthetic oligonucleotide
  Sense strand starting at position 100 of SEQ ID NO: 1884549
augaguugguuaguacuua

SEQ ID NO: 2274057 - RNA, 19 nt, Artificial Sequence
  Description of Artificial Sequence: Synthetic oligonucleotide
  Antisense strand to SEQ ID NO: 2274056
uaaguacuaaccaacucau

SEQ ID NO: 2274058 - RNA, 19 nt, Artificial Sequence
  Description of Artificial Sequence: Synthetic oligonucleotide
  Sense strand starting at position 104 of SEQ ID NO: 1884549
guugguuaguacuuagcaa

SEQ ID NO: 2274059 - RNA, 19 nt, Artificial Sequence
  Description of Artificial Sequence: Synthetic oligonucleotide
  Antisense strand to SEQ ID NO: 2274058
uugcuaaguacuaaccaac

SEQ ID NO: 2274060 - RNA, 19 nt, Artificial Sequence
  Description of Artificial Sequence: Synthetic oligonucleotide
  Sense strand starting at position 115 of SEQ ID NO: 1884549
cuuagcaagccuggaaaua

SEQ ID NO: 2274061 - RNA, 19 nt, Artificial Sequence
  Description of Artificial Sequence: Synthetic oligonucleotide
  Antisense strand to SEQ ID NO: 2274060
uauuuccaggcuugcuaag

SEQ ID NO: 2274062 - RNA, 19 nt, Artificial Sequence
  Description of Artificial Sequence: Synthetic oligonucleotide
  Sense strand starting at position 330 of SEQ ID NO: 1884549
ucuucucaguguuugggaa

SEQ ID NO: 2274063 - RNA, 19 nt, Artificial Sequence
  Description of Artificial Sequence: Synthetic oligonucleotide
  Antisense strand to SEQ ID NO: 2274062
uucccaaacacugagaaga

SEQ ID NO: 2274064 - RNA, 19 nt, Artificial Sequence
  Description of Artificial Sequence: Synthetic oligonucleotide
  Sense strand starting at position 450 of SEQ ID NO: 1884549
ggagacaguuccuccuacu

SEQ ID NO: 2274065 - RNA, 19 nt, Artificial Sequence
  Description of Artificial Sequence: Synthetic oligonucleotide
  Antisense strand to SEQ ID NO: 2274064
aguaggaggaacugucucc

SEQ ID NO: 2274066 - RNA, 19 nt, Artificial Sequence
  Description of Artificial Sequence: Synthetic oligonucleotide
  Sense strand starting at position 528 of SEQ ID NO: 1884549
augcuuugaguuuggagau

SEQ ID NO: 2274067 - RNA, 19 nt, Artificial Sequence
  Description of Artificial Sequence: Synthetic oligonucleotide
  Antisense strand to SEQ ID NO: 2274066
aucuccaaacucaaagcau

SEQ ID NO: 2274068 - RNA, 19 nt, Artificial Sequence
  Description of Artificial Sequence: Synthetic oligonucleotide
  Sense strand starting at position 1022 of SEQ ID NO: 1884549
acagguuauacagagugua

SEQ ID NO: 2274069 - RNA, 19 nt, Artificial Sequence
  Description of Artificial Sequence: Synthetic oligonucleotide
  Antisense strand to SEQ ID NO: 2274068
uacacucuguauaaccugu

SEQ ID NO: 2274070 - RNA, 19 nt, Artificial Sequence
  Description of Artificial Sequence: Synthetic oligonucleotide
  Sense strand starting at position 1025 of SEQ ID NO: 1884549
gguuauacagaguguagaa

SEQ ID NO: 2274071 - RNA, 19 nt, Artificial Sequence
  Description of Artificial Sequence: Synthetic oligonucleotide
  Antisense strand to SEQ ID NO: 2274070
uucuacacucuguauaacc

SEQ ID NO: 2274072 - RNA, 19 nt, Artificial Sequence
  Description of Artificial Sequence: Synthetic oligonucleotide
  Sense strand starting at position 1050 of SEQ ID NO: 1884549
cauauaaggcuuugguaca

SEQ ID NO: 2274073 - RNA, 19 nt, Artificial Sequence
  Description of Artificial Sequence: Synthetic oligonucleotide
  Antisense strand to SEQ ID NO: 2274072
uguaccaaagccuuauaug

SEQ ID NO: 2274074 - RNA, 19 nt, Artificial Sequence
  Description of Artificial Sequence: Synthetic oligonucleotide
  Sense strand starting at position 1160 of SEQ ID NO: 1884549
ugaguuacauaccugaagu

SEQ ID NO: 2274075 - RNA, 19 nt, Artificial Sequence
  Description of Artificial Sequence: Synthetic oligonucleotide
  Antisense strand to SEQ ID NO: 2274074
acuucagguauguaacuca

SEQ ID NO: 2274076 - RNA, 19 nt, Artificial Sequence
  Description of Artificial Sequence: Synthetic oligonucleotide
  Sense strand starting at position 1240 of SEQ ID NO: 1884549
guacaauuuguugguuugu

SEQ ID NO: 2274077 - RNA, 19 nt, Artificial Sequence
  Description of Artificial Sequence: Synthetic oligonucleotide
  Antisense strand to SEQ ID NO: 2274076
acaaaccaacaaauuguac

SEQ ID NO: 2274078 - RNA, 19 nt, Artificial Sequence
  Description of Artificial Sequence: Synthetic oligonucleotide
  Sense strand starting at position 1257 of SEQ ID NO: 1884549
gucuuuaauguugaacaaa

SEQ ID NO: 2274079 - RNA, 19 nt, Artificial Sequence
  Description of Artificial Sequence: Synthetic oligonucleotide
  Antisense strand to SEQ ID NO: 2274078
uuuguucaacauuaaagac

SEQ ID NO: 2274080 - RNA, 19 nt, Artificial Sequence
  Description of Artificial Sequence: Synthetic oligonucleotide
  Sense strand starting at position 1514 of SEQ ID NO: 1884549
uagcgcagugauguuguaa

SEQ ID NO: 2274081 - RNA, 19 nt, Artificial Sequence
  Description of Artificial Sequence: Synthetic oligonucleotide
  Antisense strand to SEQ ID NO: 2274080
uuacaacaucacugcgcua

SEQ ID NO: 2274082 - RNA, 19 nt, Artificial Sequence
  Description of Artificial Sequence: Synthetic oligonucleotide
  Sense strand starting at position 1515 of SEQ ID NO: 1884549
agcgcagugauguuguaau

SEQ ID NO: 2274083 - RNA, 19 nt, Artificial Sequence
  Description of Artificial Sequence: Synthetic oligonucleotide
  Antisense strand to SEQ ID NO: 2274082
auuacaacaucacugcgcu

SEQ ID NO: 2274084 - RNA, 19 nt, Artificial Sequence
  Description of Artificial Sequence: Synthetic oligonucleotide
  Sense strand starting at position 1854 of SEQ ID NO: 1884549
ccaggugugcgaugggaga

SEQ ID NO: 2274085 - RNA, 19 nt, Artificial Sequence
  Description of Artificial Sequence: Synthetic oligonucleotide
  Antisense strand to SEQ ID NO: 2274084
ucucccaucgcacaccugg

SEQ ID NO: 2274086 - RNA, 19 nt, Artificial Sequence
  Description of Artificial Sequence: Synthetic oligonucleotide
  Sense strand starting at position 1856 of SEQ ID NO: 1884549
aggugugcgaugggagaau

SEQ ID NO: 2274087 - RNA, 19 nt, Artificial Sequence
  Description of Artificial Sequence: Synthetic oligonucleotide
  Antisense strand to SEQ ID NO: 2274086
auucucccaucgcacaccu

SEQ ID NO: 2274088 - RNA, 19 nt, Artificial Sequence
  Description of Artificial Sequence: Synthetic oligonucleotide
  Sense strand starting at position 1868 of SEQ ID NO: 1884549
ggagaauucuauccugcau

SEQ ID NO: 2274089 - RNA, 19 nt, Artificial Sequence
  Description of Artificial Sequence: Synthetic oligonucleotide
  Antisense strand to SEQ ID NO: 2274088
augcaggauagaauucucc

SEQ ID NO: 2274090 - RNA, 19 nt, Artificial Sequence
  Description of Artificial Sequence: Synthetic oligonucleotide
  Sense strand starting at position 2306 of SEQ ID NO: 1884549
aguggaucaccaugaacau

SEQ ID NO: 2274091 - RNA, 19 nt, Artificial Sequence
  Description of Artificial Sequence: Synthetic oligonucleotide
  Antisense strand to SEQ ID NO: 2274090
auguucauggugauccacu

SEQ ID NO: 2274092 - RNA, 19 nt, Artificial Sequence
  Description of Artificial Sequence: Synthetic oligonucleotide
  Sense strand starting at position 2471 of SEQ ID NO: 1884549
ucccgacucuugcucuaua

SEQ ID NO: 2274093 - RNA, 19 nt, Artificial Sequence
  Description of Artificial Sequence: Synthetic oligonucleotide
  Antisense strand to SEQ ID NO: 2274092
uauagagcaagagucggga

SEQ ID NO: 2274094 - RNA, 19 nt, Artificial Sequence
  Description of Artificial Sequence: Synthetic oligonucleotide
  Sense strand starting at position 2474 of SEQ ID NO: 1884549
cgacucuugcucuauauag

SEQ ID NO: 2274095 - RNA, 19 nt, Artificial Sequence
  Description of Artificial Sequence: Synthetic oligonucleotide
  Antisense strand to SEQ ID NO: 2274094
cuauauagagcaagagucg

SEQ ID NO: 2274096 - RNA, 19 nt, Artificial Sequence
  Description of Artificial Sequence: Synthetic oligonucleotide
  Sense strand starting at position 2476 of SEQ ID NO: 1884549
acucuugcucuauauagua

SEQ ID NO: 2274097 - RNA, 19 nt, Artificial Sequence
  Description of Artificial Sequence: Synthetic oligonucleotide
  Antisense strand to SEQ ID NO: 2274096
uacuauauagagcaagagu

SEQ ID NO: 2274098 - RNA, 19 nt, Artificial Sequence
  Description of Artificial Sequence: Synthetic oligonucleotide
  Sense strand starting at position 2737 of SEQ ID NO: 1884549
agcugaucucaaugaccuu

SEQ ID NO: 2274099 - RNA, 19 nt, Artificial Sequence
  Description of Artificial Sequence: Synthetic oligonucleotide
  Antisense strand to SEQ ID NO: 2274098
aaggucauugagaucagcu

SEQ ID NO: 2274100 - RNA, 19 nt, Artificial Sequence
  Description of Artificial Sequence: Synthetic oligonucleotide
  Sense strand starting at position 2772 of SEQ ID NO: 1884549
agggcuggcucuucagaga

SEQ ID NO: 2274101 - RNA, 19 nt, Artificial Sequence
  Description of Artificial Sequence: Synthetic oligonucleotide
  Antisense strand to SEQ ID NO: 2274100
ucucugaagagccagcccu

SEQ ID NO: 2274102 - RNA, 19 nt, Artificial Sequence
  Description of Artificial Sequence: Synthetic oligonucleotide
  Sense strand starting at position 3095 of SEQ ID NO: 1884549
guugcauguggccagaagu

SEQ ID NO: 2274103 - RNA, 19 nt, Artificial Sequence
  Description of Artificial Sequence: Synthetic oligonucleotide
  Antisense strand to SEQ ID NO: 2274102
acuucuggccacaugcaac

SEQ ID NO: 2274104 - RNA, 19 nt, Artificial Sequence
  Description of Artificial Sequence: Synthetic oligonucleotide
  Sense strand starting at position 3205 of SEQ ID NO: 1884549
cugggaaggcuucaaggua

SEQ ID NO: 2274105 - RNA, 19 nt, Artificial Sequence
  Description of Artificial Sequence: Synthetic oligonucleotide
  Antisense strand to SEQ ID NO: 2274104
uaccuugaagccuucccag

SEQ ID NO: 2274106 - RNA, 19 nt, Artificial Sequence
  Description of Artificial Sequence: Synthetic oligonucleotide
  Sense strand starting at position 3418 of SEQ ID NO: 1884549
gaguguucucagcaguuaa

SEQ ID NO: 2274107 - RNA, 19 nt, Artificial Sequence
  Description of Artificial Sequence: Synthetic oligonucleotide
  Antisense strand to SEQ ID NO: 2274106
uuaacugcugagaacacuc

SEQ ID NO: 2274108 - RNA, 19 nt, Artificial Sequence
  Description of Artificial Sequence: Synthetic oligonucleotide
  Sense strand starting at position 3430 of SEQ ID NO: 1884549
caguuaauuugaggaccca

SEQ ID NO: 2274109 - RNA, 19 nt, Artificial Sequence
  Description of Artificial Sequence: Synthetic oligonucleotide
  Antisense strand to SEQ ID NO: 2274108
uggguccucaaauuaacug

SEQ ID NO: 2274110 - RNA, 19 nt, Artificial Sequence
  Description of Artificial Sequence: Synthetic oligonucleotide
  Sense strand starting at position 3475 of SEQ ID NO: 1884549
gccucauagguccauguaa

SEQ ID NO: 2274111 - RNA, 19 nt, Artificial Sequence
  Description of Artificial Sequence: Synthetic oligonucleotide
  Antisense strand to SEQ ID NO: 2274110
uuacauggaccuaugaggc

SEQ ID NO: 2274112 - RNA, 19 nt, Artificial Sequence
  Description of Artificial Sequence: Synthetic oligonucleotide
  Sense strand starting at position 3495 of SEQ ID NO: 1884549
gaucaagaguuagacucaa

SEQ ID NO: 2274113 - RNA, 19 nt, Artificial Sequence
  Description of Artificial Sequence: Synthetic oligonucleotide
  Antisense strand to SEQ ID NO: 2274112
uugagucuaacucuugauc

SEQ ID NO: 2274114 - RNA, 19 nt, Artificial Sequence
  Description of Artificial Sequence: Synthetic oligonucleotide
  Sense strand starting at position 3580 of SEQ ID NO: 1884549
gguaucugcuuuccucuaa

SEQ ID NO: 2274115 - RNA, 19 nt, Artificial Sequence
  Description of Artificial Sequence: Synthetic oligonucleotide
  Antisense strand to SEQ ID NO: 2274114
uuagaggaaagcagauacc

SEQ ID NO: 2274116 - RNA, 19 nt, Artificial Sequence
  Description of Artificial Sequence: Synthetic oligonucleotide
  Sense strand starting at position 3584 of SEQ ID NO: 1884549
ucugcuuuccucuaaggac

SEQ ID NO: 2274117 - RNA, 19 nt, Artificial Sequence
  Description of Artificial Sequence: Synthetic oligonucleotide
  Antisense strand to SEQ ID NO: 2274116
guccuuagaggaaagcaga

SEQ ID NO: 2274118 - RNA, 19 nt, Artificial Sequence
  Description of Artificial Sequence: Synthetic oligonucleotide
  Sense strand starting at position 3633 of SEQ ID NO: 1884549
ugccaugucuugguuagga

SEQ ID NO: 2274119 - RNA, 19 nt, Artificial Sequence
  Description of Artificial Sequence: Synthetic oligonucleotide
  Antisense strand to SEQ ID NO: 2274118
uccuaaccaagacauggca

SEQ ID NO: 2274120 - RNA, 19 nt, Artificial Sequence
  Description of Artificial Sequence: Synthetic oligonucleotide
  Sense strand starting at position 3635 of SEQ ID NO: 1884549
ccaugucuugguuaggaaa

SEQ ID NO: 2274121 - RNA, 19 nt, Artificial Sequence
  Description of Artificial Sequence: Synthetic oligonucleotide
  Antisense strand to SEQ ID NO: 2274120
uuuccuaaccaagacaugg

SEQ ID NO: 2274122 - RNA, 19 nt, Artificial Sequence
  Description of Artificial Sequence: Synthetic oligonucleotide
  Sense strand starting at position 3849 of SEQ ID NO: 1884549
augugugaggucuggaauu

SEQ ID NO: 2274123 - RNA, 19 nt, Artificial Sequence
  Description of Artificial Sequence: Synthetic oligonucleotide
  Antisense strand to SEQ ID NO: 2274122
aauuccagaccucacacau

SEQ ID NO: 2274124 - RNA, 19 nt, Artificial Sequence
  Description of Artificial Sequence: Synthetic oligonucleotide
  Sense strand starting at position 3862 of SEQ ID NO: 1884549
ggaauuugcucagagaggu

SEQ ID NO: 2274125 - RNA, 19 nt, Artificial Sequence
  Description of Artificial Sequence: Synthetic oligonucleotide
  Antisense strand to SEQ ID NO: 2274124
accucucugagcaaauucc

SEQ ID NO: 2274126 - RNA, 19 nt, Artificial Sequence
  Description of Artificial Sequence: Synthetic oligonucleotide
  Sense strand starting at position 3868 of SEQ ID NO: 1884549
ugcucagagagguauucuu

SEQ ID NO: 2274127 - RNA, 19 nt, Artificial Sequence
  Description of Artificial Sequence: Synthetic oligonucleotide
  Antisense strand to SEQ ID NO: 2274126
aagaauaccucucugagca

SEQ ID NO: 2274128 - RNA, 19 nt, Artificial Sequence
  Description of Artificial Sequence: Synthetic oligonucleotide
  Sense strand starting at position 3875 of SEQ ID NO: 1884549
agagguauucuucagggca

SEQ ID NO: 2274129 - RNA, 19 nt, Artificial Sequence
  Description of Artificial Sequence: Synthetic oligonucleotide
  Antisense strand to SEQ ID NO: 2274128
ugcccugaagaauaccucu

SEQ ID NO: 2274130 - RNA, 19 nt, Artificial Sequence
  Description of Artificial Sequence: Synthetic oligonucleotide
  Sense strand starting at position 3895 of SEQ ID NO: 1884549
acugcuuccugcucagaua

SEQ ID NO: 2274131 - RNA, 19 nt, Artificial Sequence
  Description of Artificial Sequence: Synthetic oligonucleotide
  Antisense strand to SEQ ID NO: 2274130
uaucugagcaggaagcagu

SEQ ID NO: 2274132 - RNA, 19 nt, Artificial Sequence
  Description of Artificial Sequence: Synthetic oligonucleotide
  Sense strand starting at position 3949 of SEQ ID NO: 1884549
ggguccaguucugccaaua

SEQ ID NO: 2274133 - RNA, 19 nt, Artificial Sequence
  Description of Artificial Sequence: Synthetic oligonucleotide
  Antisense strand to SEQ ID NO: 2274132
uauuggcagaacuggaccc

SEQ ID NO: 2274134 - RNA, 19 nt, Artificial Sequence
  Description of Artificial Sequence: Synthetic oligonucleotide
  Sense strand starting at position 46 of SEQ ID NO: 1884550
cugggaaggcuucaaggua

SEQ ID NO: 2274135 - RNA, 19 nt, Artificial Sequence
  Description of Artificial Sequence: Synthetic oligonucleotide
  Antisense strand to SEQ ID NO: 2274134
uaccuugaagccuucccag

SEQ ID NO: 2274136 - RNA, 19 nt, Artificial Sequence
  Description of Artificial Sequence: Synthetic oligonucleotide
  Sense strand starting at position 259 of SEQ ID NO: 1884550
gaguguucucagcaguuaa

SEQ ID NO: 2274137 - RNA, 19 nt, Artificial Sequence
  Description of Artificial Sequence: Synthetic oligonucleotide
  Antisense strand to SEQ ID NO: 2274136
uuaacugcugagaacacuc

SEQ ID NO: 2274138 - RNA, 19 nt, Artificial Sequence
  Description of Artificial Sequence: Synthetic oligonucleotide
  Sense strand starting at position 271 of SEQ ID NO: 1884550
caguuaauuugaggaccca

SEQ ID NO: 2274139 - RNA, 19 nt, Artificial Sequence
  Description of Artificial Sequence: Synthetic oligonucleotide
  Antisense strand to SEQ ID NO: 2274138
uggguccucaaauuaacug

SEQ ID NO: 2274140 - RNA, 19 nt, Artificial Sequence
  Description of Artificial Sequence: Synthetic oligonucleotide
  Sense strand starting at position 316 of SEQ ID NO: 1884550
gccucauagguccauguaa

SEQ ID NO: 2274141 - RNA, 19 nt, Artificial Sequence
  Description of Artificial Sequence: Synthetic oligonucleotide
  Antisense strand to SEQ ID NO: 2274140
uuacauggaccuaugaggc

SEQ ID NO: 2274142 - RNA, 19 nt, Artificial Sequence
  Description of Artificial Sequence: Synthetic oligonucleotide
  Sense strand starting at position 421 of SEQ ID NO: 1884550
gguaucugcuuuccucuaa

SEQ ID NO: 2274143 - RNA, 19 nt, Artificial Sequence
  Description of Artificial Sequence: Synthetic oligonucleotide
  Antisense strand to SEQ ID NO: 2274142
uuagaggaaagcagauacc

SEQ ID NO: 2274144 - RNA, 19 nt, Artificial Sequence
  Description of Artificial Sequence: Synthetic oligonucleotide
  Sense strand starting at position 425 of SEQ ID NO: 1884550
ucugcuuuccucuaaggac

SEQ ID NO: 2274145 - RNA, 19 nt, Artificial Sequence
  Description of Artificial Sequence: Synthetic oligonucleotide
  Antisense strand to SEQ ID NO: 2274144
guccuuagaggaaagcaga

SEQ ID NO: 2274146 - RNA, 19 nt, Artificial Sequence
  Description of Artificial Sequence: Synthetic oligonucleotide
  Sense strand starting at position 474 of SEQ ID NO: 1884550
ugccaugucuugguuagga

SEQ ID NO: 2274147 - RNA, 19 nt, Artificial Sequence
  Description of Artificial Sequence: Synthetic oligonucleotide
  Antisense strand to SEQ ID NO: 2274146
uccuaaccaagacauggca

SEQ ID NO: 2274148 - RNA, 19 nt, Artificial Sequence
  Description of Artificial Sequence: Synthetic oligonucleotide
  Sense strand starting at position 476 of SEQ ID NO: 1884550
ccaugucuugguuaggaaa

SEQ ID NO: 2274149 - RNA, 19 nt, Artificial Sequence
  Description of Artificial Sequence: Synthetic oligonucleotide
  Antisense strand to SEQ ID NO: 2274148
uuuccuaaccaagacaugg

SEQ ID NO: 2274150 - RNA, 19 nt, Artificial Sequence
  Description of Artificial Sequence: Synthetic oligonucleotide
  Sense strand starting at position 690 of SEQ ID NO: 1884550
augugugaggucuggaauu

SEQ ID NO: 2274151 - RNA, 19 nt, Artificial Sequence
  Description of Artificial Sequence: Synthetic oligonucleotide
  Antisense strand to SEQ ID NO: 2274150
aauuccagaccucacacau

SEQ ID NO: 2274152 - RNA, 19 nt, Artificial Sequence
  Description of Artificial Sequence: Synthetic oligonucleotide
  Sense strand starting at position 703 of SEQ ID NO: 1884550
ggaauuugcucagagaggu

SEQ ID NO: 2274153 - RNA, 19 nt, Artificial Sequence
  Description of Artificial Sequence: Synthetic oligonucleotide
  Antisense strand to SEQ ID NO: 2274152
accucucugagcaaauucc

SEQ ID NO: 2274154 - RNA, 19 nt, Artificial Sequence
  Description of Artificial Sequence: Synthetic oligonucleotide
  Sense strand starting at position 709 of SEQ ID NO: 1884550
ugcucagagagguauucuu

SEQ ID NO: 2274155 - RNA, 19 nt, Artificial Sequence
  Description of Artificial Sequence: Synthetic oligonucleotide
  Antisense strand to SEQ ID NO: 2274154
aagaauaccucucugagca

SEQ ID NO: 2274156 - RNA, 19 nt, Artificial Sequence
  Description of Artificial Sequence: Synthetic oligonucleotide
  Sense strand starting at position 716 of SEQ ID NO: 1884550
agagguauucuucagggca

SEQ ID NO: 2274157 - RNA, 19 nt, Artificial Sequence
  Description of Artificial Sequence: Synthetic oligonucleotide
  Antisense strand to SEQ ID NO: 2274156
ugcccugaagaauaccucu

SEQ ID NO: 2274158 - RNA, 19 nt, Artificial Sequence
  Description of Artificial Sequence: Synthetic oligonucleotide
  Sense strand starting at position 736 of SEQ ID NO: 1884550
acugcuuccugcucagaua

SEQ ID NO: 2274159 - RNA, 19 nt, Artificial Sequence
  Description of Artificial Sequence: Synthetic oligonucleotide
  Antisense strand to SEQ ID NO: 2274158
uaucugagcaggaagcagu

SEQ ID NO: 2274160 - RNA, 19 nt, Artificial Sequence
  Description of Artificial Sequence: Synthetic oligonucleotide
  Sense strand starting at position 790 of SEQ ID NO: 1884550
ggguccaguucugccaaua

SEQ ID NO: 2274161 - RNA, 19 nt, Artificial Sequence
  Description of Artificial Sequence: Synthetic oligonucleotide
  Antisense strand to SEQ ID NO: 2274160
uauuggcagaacuggaccc

SEQ ID NO: 2274162 - RNA, 19 nt, Artificial Sequence
  Description of Artificial Sequence: Synthetic oligonucleotide
  Sense strand starting at position 1019 of SEQ ID NO: 1884550
ucacacuggcucuaagaau

SEQ ID NO: 2274163 - RNA, 19 nt, Artificial Sequence
  Description of Artificial Sequence: Synthetic oligonucleotide
  Antisense strand to SEQ ID NO: 2274162
auucuuagagccaguguga

SEQ ID NO: 2274164 - RNA, 19 nt, Artificial Sequence
  Description of Artificial Sequence: Synthetic oligonucleotide
  Sense strand starting at position 1028 of SEQ ID NO: 1884550
cucuaagaaucugcagcaa

SEQ ID NO: 2274165 - RNA, 19 nt, Artificial Sequence
  Description of Artificial Sequence: Synthetic oligonucleotide
  Antisense strand to SEQ ID NO: 2274164
uugcugcagauucuuagag

SEQ ID NO: 2274166 - RNA, 19 nt, Artificial Sequence
  Description of Artificial Sequence: Synthetic oligonucleotide
  Sense strand starting at position 1056 of SEQ ID NO: 1884550
ggccauguguucuccaaga

SEQ ID NO: 2274167 - RNA, 19 nt, Artificial Sequence
  Description of Artificial Sequence: Synthetic oligonucleotide
  Antisense strand to SEQ ID NO: 2274166
ucuuggagaacacauggcc

SEQ ID NO: 2274168 - RNA, 19 nt, Artificial Sequence
  Description of Artificial Sequence: Synthetic oligonucleotide
  Sense strand starting at position 1058 of SEQ ID NO: 1884550
ccauguguucuccaagacc

SEQ ID NO: 2274169 - RNA, 19 nt, Artificial Sequence
  Description of Artificial Sequence: Synthetic oligonucleotide
  Antisense strand to SEQ ID NO: 2274168
ggucuuggagaacacaugg

SEQ ID NO: 2274170 - RNA, 19 nt, Artificial Sequence
  Description of Artificial Sequence: Synthetic oligonucleotide
  Sense strand starting at position 1061 of SEQ ID NO: 1884550
uguguucuccaagaccaag

SEQ ID NO: 2274171 - RNA, 19 nt, Artificial Sequence
  Description of Artificial Sequence: Synthetic oligonucleotide
  Antisense strand to SEQ ID NO: 2274170
cuuggucuuggagaacaca

SEQ ID NO: 2274172 - RNA, 19 nt, Artificial Sequence
  Description of Artificial Sequence: Synthetic oligonucleotide
  Sense strand starting at position 1377 of SEQ ID NO: 1884550
guucuuuagggcuaucaga

SEQ ID NO: 2274173 - RNA, 19 nt, Artificial Sequence
  Description of Artificial Sequence: Synthetic oligonucleotide
  Antisense strand to SEQ ID NO: 2274172
ucugauagcccuaaagaac

SEQ ID NO: 2274174 - RNA, 19 nt, Artificial Sequence
  Description of Artificial Sequence: Synthetic oligonucleotide
  Sense strand starting at position 1437 of SEQ ID NO: 1884550
gcagguggguuauuuguuu

SEQ ID NO: 2274175 - RNA, 19 nt, Artificial Sequence
  Description of Artificial Sequence: Synthetic oligonucleotide
  Antisense strand to SEQ ID NO: 2274174
aaacaaauaacccaccugc

SEQ ID NO: 2274176 - RNA, 19 nt, Artificial Sequence
  Description of Artificial Sequence: Synthetic oligonucleotide
  Sense strand starting at position 1674 of SEQ ID NO: 1884550
agacuuuaucuagguguuc

SEQ ID NO: 2274177 - RNA, 19 nt, Artificial Sequence
  Description of Artificial Sequence: Synthetic oligonucleotide
  Antisense strand to SEQ ID NO: 2274176
gaacaccuagauaaagucu

SEQ ID NO: 2274178 - RNA, 19 nt, Artificial Sequence
  Description of Artificial Sequence: Synthetic oligonucleotide
  Sense strand starting at position 1675 of SEQ ID NO: 1884550
gacuuuaucuagguguucu

SEQ ID NO: 2274179 - RNA, 19 nt, Artificial Sequence
  Description of Artificial Sequence: Synthetic oligonucleotide
  Antisense strand to SEQ ID NO: 2274178
agaacaccuagauaaaguc

SEQ ID NO: 2274180 - RNA, 19 nt, Artificial Sequence
  Description of Artificial Sequence: Synthetic oligonucleotide
  Sense strand starting at position 1679 of SEQ ID NO: 1884550
uuaucuagguguucuuuau

SEQ ID NO: 2274181 - RNA, 19 nt, Artificial Sequence
  Description of Artificial Sequence: Synthetic oligonucleotide
  Antisense strand to SEQ ID NO: 2274180
auaaagaacaccuagauaa

SEQ ID NO: 2274182 - RNA, 19 nt, Artificial Sequence
  Description of Artificial Sequence: Synthetic oligonucleotide
  Sense strand starting at position 1699 of SEQ ID NO: 1884550
uuuauauaugugugcagag

SEQ ID NO: 2274183 - RNA, 19 nt, Artificial Sequence
  Description of Artificial Sequence: Synthetic oligonucleotide
  Antisense strand to SEQ ID NO: 2274182
cucugcacacauauauaaa

SEQ ID NO: 2274184 - RNA, 19 nt, Artificial Sequence
  Description of Artificial Sequence: Synthetic oligonucleotide
  Sense strand starting at position 1863 of SEQ ID NO: 1884550
agaaccaauucuguagauu

SEQ ID NO: 2274185 - RNA, 19 nt, Artificial Sequence
  Description of Artificial Sequence: Synthetic oligonucleotide
  Antisense strand to SEQ ID NO: 2274184
aaucuacagaauugguucu

SEQ ID NO: 2274186 - RNA, 19 nt, Artificial Sequence
  Description of Artificial Sequence: Synthetic oligonucleotide
  Sense strand starting at position 1956 of SEQ ID NO: 1884550
aacagaaguugucuagcaa

SEQ ID NO: 2274187 - RNA, 19 nt, Artificial Sequence
  Description of Artificial Sequence: Synthetic oligonucleotide
  Antisense strand to SEQ ID NO: 2274186
uugcuagacaacuucuguu

SEQ ID NO: 2274188 - RNA, 19 nt, Artificial Sequence
  Description of Artificial Sequence: Synthetic oligonucleotide
  Sense strand starting at position 1957 of SEQ ID NO: 1884550
acagaaguugucuagcaaa

SEQ ID NO: 2274189 - RNA, 19 nt, Artificial Sequence
  Description of Artificial Sequence: Synthetic oligonucleotide
  Antisense strand to SEQ ID NO: 2274188
uuugcuagacaacuucugu

SEQ ID NO: 2274190 - RNA, 19 nt, Artificial Sequence
  Description of Artificial Sequence: Synthetic oligonucleotide
  Sense strand starting at position 2023 of SEQ ID NO: 1884550
aucagcaugucuguacaaa

SEQ ID NO: 2274191 - RNA, 19 nt, Artificial Sequence
  Description of Artificial Sequence: Synthetic oligonucleotide
  Antisense strand to SEQ ID NO: 2274190
uuuguacagacaugcugau

SEQ ID NO: 2274192 - RNA, 19 nt, Artificial Sequence
  Description of Artificial Sequence: Synthetic oligonucleotide
  Sense strand starting at position 2024 of SEQ ID NO: 1884550
ucagcaugucuguacaaau

SEQ ID NO: 2274193 - RNA, 19 nt, Artificial Sequence
  Description of Artificial Sequence: Synthetic oligonucleotide
  Antisense strand to SEQ ID NO: 2274192
auuuguacagacaugcuga

SEQ ID NO: 2274194 - RNA, 19 nt, Artificial Sequence
  Description of Artificial Sequence: Synthetic oligonucleotide
  Sense strand starting at position 3086 of SEQ ID NO: 1884550
ggcucaucccuccaccaga

SEQ ID NO: 2274195 - RNA, 19 nt, Artificial Sequence
  Description of Artificial Sequence: Synthetic oligonucleotide
  Antisense strand to SEQ ID NO: 2274194
ucugguggagggaugagcc

SEQ ID NO: 2274196 - RNA, 19 nt, Artificial Sequence
  Description of Artificial Sequence: Synthetic oligonucleotide
  Sense strand starting at position 3189 of SEQ ID NO: 1884550
ccucccauggcuuauauga

SEQ ID NO: 2274197 - RNA, 19 nt, Artificial Sequence
  Description of Artificial Sequence: Synthetic oligonucleotide
  Antisense strand to SEQ ID NO: 2274196
ucauauaagccaugggagg

SEQ ID NO: 2274198 - RNA, 19 nt, Artificial Sequence
  Description of Artificial Sequence: Synthetic oligonucleotide
  Sense strand starting at position 3415 of SEQ ID NO: 1884550
gggagaaccugcccuaguu

SEQ ID NO: 2274199 - RNA, 19 nt, Artificial Sequence
  Description of Artificial Sequence: Synthetic oligonucleotide
  Antisense strand to SEQ ID NO: 2274198
aacuagggcagguucuccc

SEQ ID NO: 2274200 - RNA, 19 nt, Artificial Sequence
  Description of Artificial Sequence: Synthetic oligonucleotide
  Sense strand starting at position 3471 of SEQ ID NO: 1884550
guaggauugguggagcaca

SEQ ID NO: 2274201 - RNA, 19 nt, Artificial Sequence
  Description of Artificial Sequence: Synthetic oligonucleotide
  Antisense strand to SEQ ID NO: 2274200
ugugcuccaccaauccuac

SEQ ID NO: 2274202 - RNA, 19 nt, Artificial Sequence
  Description of Artificial Sequence: Synthetic oligonucleotide
  Sense strand starting at position 3552 of SEQ ID NO: 1884550
ugggaauggugacaaccaa

SEQ ID NO: 2274203 - RNA, 19 nt, Artificial Sequence
  Description of Artificial Sequence: Synthetic oligonucleotide
  Antisense strand to SEQ ID NO: 2274202
uugguugucaccauuccca

SEQ ID NO: 2274204 - RNA, 19 nt, Artificial Sequence
  Description of Artificial Sequence: Synthetic oligonucleotide
  Sense strand starting at position 3715 of SEQ ID NO: 1884550
agacaacacccaugugauu

SEQ ID NO: 2274205 - RNA, 19 nt, Artificial Sequence
  Description of Artificial Sequence: Synthetic oligonucleotide
  Antisense strand to SEQ ID NO: 2274204
aaucacauggguguugucu

SEQ ID NO: 2274206 - RNA, 19 nt, Artificial Sequence
  Description of Artificial Sequence: Synthetic oligonucleotide
  Sense strand starting at position 3747 of SEQ ID NO: 1884550
acuguuccaccagaguaua

SEQ ID NO: 2274207 - RNA, 19 nt, Artificial Sequence
  Description of Artificial Sequence: Synthetic oligonucleotide
  Antisense strand to SEQ ID NO: 2274206
uauacucugguggaacagu

SEQ ID NO: 2274208 - RNA, 19 nt, Artificial Sequence
  Description of Artificial Sequence: Synthetic oligonucleotide
  Sense strand starting at position 3797 of SEQ ID NO: 1884550
cuaagaugugagcagccau

SEQ ID NO: 2274209 - RNA, 19 nt, Artificial Sequence
  Description of Artificial Sequence: Synthetic oligonucleotide
  Antisense strand to SEQ ID NO: 2274208
auggcugcucacaucuuag

SEQ ID NO: 2274210 - RNA, 19 nt, Artificial Sequence
  Description of Artificial Sequence: Synthetic oligonucleotide
  Sense strand starting at position 3872 of SEQ ID NO: 1884550
ggaugguggugucuuugga

SEQ ID NO: 2274211 - RNA, 19 nt, Artificial Sequence
  Description of Artificial Sequence: Synthetic oligonucleotide
  Antisense strand to SEQ ID NO: 2274210
uccaaagacaccaccaucc

SEQ ID NO: 2274212 - RNA, 19 nt, Artificial Sequence
  Description of Artificial Sequence: Synthetic oligonucleotide
  Sense strand starting at position 3880 of SEQ ID NO: 1884550
gugucuuuggaccaaauuc

SEQ ID NO: 2274213 - RNA, 19 nt, Artificial Sequence
  Description of Artificial Sequence: Synthetic oligonucleotide
  Antisense strand to SEQ ID NO: 2274212
gaauuugguccaaagacac

SEQ ID NO: 2274214 - RNA, 19 nt, Artificial Sequence
  Description of Artificial Sequence: Synthetic oligonucleotide
  Sense strand starting at position 43 of SEQ ID NO: 1884551
cccucugacugcucuguga

SEQ ID NO: 2274215 - RNA, 19 nt, Artificial Sequence
  Description of Artificial Sequence: Synthetic oligonucleotide
  Antisense strand to SEQ ID NO: 2274214
ucacagagcagucagaggg

SEQ ID NO: 2274216 - RNA, 19 nt, Artificial Sequence
  Description of Artificial Sequence: Synthetic oligonucleotide
  Sense strand starting at position 45 of SEQ ID NO: 1884551
cucugacugcucugugauu

SEQ ID NO: 2274217 - RNA, 19 nt, Artificial Sequence
  Description of Artificial Sequence: Synthetic oligonucleotide
  Antisense strand to SEQ ID NO: 2274216
aaucacagagcagucagag

SEQ ID NO: 2274218 - RNA, 19 nt, Artificial Sequence
  Description of Artificial Sequence: Synthetic oligonucleotide
  Sense strand starting at position 46 of SEQ ID NO: 1884551
ucugacugcucugugauuu

SEQ ID NO: 2274219 - RNA, 19 nt, Artificial Sequence
  Description of Artificial Sequence: Synthetic oligonucleotide
  Antisense strand to SEQ ID NO: 2274218
aaaucacagagcagucaga

SEQ ID NO: 2274220 - RNA, 19 nt, Artificial Sequence
  Description of Artificial Sequence: Synthetic oligonucleotide
  Sense strand starting at position 118 of SEQ ID NO: 1884551
uggccaguuuacccugaaa

SEQ ID NO: 2274221 - RNA, 19 nt, Artificial Sequence
  Description of Artificial Sequence: Synthetic oligonucleotide
  Antisense strand to SEQ ID NO: 2274220
uuucaggguaaacuggcca

SEQ ID NO: 2274222 - RNA, 19 nt, Artificial Sequence
  Description of Artificial Sequence: Synthetic oligonucleotide
  Sense strand starting at position 304 of SEQ ID NO: 1884551
gccaauuguuucucagcca

SEQ ID NO: 2274223 - RNA, 19 nt, Artificial Sequence
  Description of Artificial Sequence: Synthetic oligonucleotide
  Antisense strand to SEQ ID NO: 2274222
uggcugagaaacaauuggc

SEQ ID NO: 2274224 - RNA, 19 nt, Artificial Sequence
  Description of Artificial Sequence: Synthetic oligonucleotide
  Sense strand starting at position 526 of SEQ ID NO: 1884551
guaugugaaggguguuuaa

SEQ ID NO: 2274225 - RNA, 19 nt, Artificial Sequence
  Description of Artificial Sequence: Synthetic oligonucleotide
  Antisense strand to SEQ ID NO: 2274224
uuaaacacccuucacauac

SEQ ID NO: 2274226 - RNA, 19 nt, Artificial Sequence
  Description of Artificial Sequence: Synthetic oligonucleotide
  Sense strand starting at position 536 of SEQ ID NO: 1884551
gguguuuaaagccaaucga

SEQ ID NO: 2274227 - RNA, 19 nt, Artificial Sequence
  Description of Artificial Sequence: Synthetic oligonucleotide
  Antisense strand to SEQ ID NO: 2274226
ucgauuggcuuuaaacacc

SEQ ID NO: 2274228 - RNA, 19 nt, Artificial Sequence
  Description of Artificial Sequence: Synthetic oligonucleotide
  Sense strand starting at position 966 of SEQ ID NO: 1884551
aggugucauauuggaagaa

SEQ ID NO: 2274229 - RNA, 19 nt, Artificial Sequence
  Description of Artificial Sequence: Synthetic oligonucleotide
  Antisense strand to SEQ ID NO: 2274228
uucuuccaauaugacaccu

SEQ ID NO: 2274230 - RNA, 19 nt, Artificial Sequence
  Description of Artificial Sequence: Synthetic oligonucleotide
  Sense strand starting at position 967 of SEQ ID NO: 1884551
ggugucauauuggaagaac

SEQ ID NO: 2274231 - RNA, 19 nt, Artificial Sequence
  Description of Artificial Sequence: Synthetic oligonucleotide
  Antisense strand to SEQ ID NO: 2274230
guucuuccaauaugacacc

SEQ ID NO: 2274232 - RNA, 19 nt, Artificial Sequence
  Description of Artificial Sequence: Synthetic oligonucleotide
  Sense strand starting at position 1097 of SEQ ID NO: 1884551
cccugugacugaucaguga

SEQ ID NO: 2274233 - RNA, 19 nt, Artificial Sequence
  Description of Artificial Sequence: Synthetic oligonucleotide
  Antisense strand to SEQ ID NO: 2274232
ucacugaucagucacaggg

SEQ ID NO: 2274234 - RNA, 19 nt, Artificial Sequence
  Description of Artificial Sequence: Synthetic oligonucleotide
  Sense strand starting at position 1101 of SEQ ID NO: 1884551
gugacugaucagugacuug

SEQ ID NO: 2274235 - RNA, 19 nt, Artificial Sequence
  Description of Artificial Sequence: Synthetic oligonucleotide
  Antisense strand to SEQ ID NO: 2274234
caagucacugaucagucac

SEQ ID NO: 2274236 - RNA, 19 nt, Artificial Sequence
  Description of Artificial Sequence: Synthetic oligonucleotide
  Sense strand starting at position 1106 of SEQ ID NO: 1884551
ugaucagugacuugagcua

SEQ ID NO: 2274237 - RNA, 19 nt, Artificial Sequence
  Description of Artificial Sequence: Synthetic oligonucleotide
  Antisense strand to SEQ ID NO: 2274236
uagcucaagucacugauca

SEQ ID NO: 2274238 - RNA, 19 nt, Artificial Sequence
  Description of Artificial Sequence: Synthetic oligonucleotide
  Sense strand starting at position 1258 of SEQ ID NO: 1884551
gcccuauuucucugucucu

SEQ ID NO: 2274239 - RNA, 19 nt, Artificial Sequence
  Description of Artificial Sequence: Synthetic oligonucleotide
  Antisense strand to SEQ ID NO: 2274238
agagacagagaaauagggc

SEQ ID NO: 2274240 - RNA, 19 nt, Artificial Sequence
  Description of Artificial Sequence: Synthetic oligonucleotide
  Sense strand starting at position 1271 of SEQ ID NO: 1884551
gucucuagagagugggaaa

SEQ ID NO: 2274241 - RNA, 19 nt, Artificial Sequence
  Description of Artificial Sequence: Synthetic oligonucleotide
  Antisense strand to SEQ ID NO: 2274240
uuucccacucucuagagac

SEQ ID NO: 2274242 - RNA, 19 nt, Artificial Sequence
  Description of Artificial Sequence: Synthetic oligonucleotide
  Sense strand starting at position 1825 of SEQ ID NO: 1884551
gacugcugucccugagcuu

SEQ ID NO: 2274243 - RNA, 19 nt, Artificial Sequence
  Description of Artificial Sequence: Synthetic oligonucleotide
  Antisense strand to SEQ ID NO: 2274242
aagcucagggacagcaguc

SEQ ID NO: 2274244 - RNA, 19 nt, Artificial Sequence
  Description of Artificial Sequence: Synthetic oligonucleotide
  Sense strand starting at position 2008 of SEQ ID NO: 1884551
cagcaaugcucagcuggaa

SEQ ID NO: 2274245 - RNA, 19 nt, Artificial Sequence
  Description of Artificial Sequence: Synthetic oligonucleotide
  Antisense strand to SEQ ID NO: 2274244
uuccagcugagcauugcug

SEQ ID NO: 2274246 - RNA, 19 nt, Artificial Sequence
  Description of Artificial Sequence: Synthetic oligonucleotide
  Sense strand starting at position 2167 of SEQ ID NO: 1884551
gaagcuucucccugggcaa

SEQ ID NO: 2274247 - RNA, 19 nt, Artificial Sequence
  Description of Artificial Sequence: Synthetic oligonucleotide
  Antisense strand to SEQ ID NO: 2274246
uugcccagggagaagcuuc

SEQ ID NO: 2274248 - RNA, 19 nt, Artificial Sequence
  Description of Artificial Sequence: Synthetic oligonucleotide
  Sense strand starting at position 2377 of SEQ ID NO: 1884551
aaagaugucacguggugag

SEQ ID NO: 2274249 - RNA, 19 nt, Artificial Sequence
  Description of Artificial Sequence: Synthetic oligonucleotide
  Antisense strand to SEQ ID NO: 2274248
cucaccacgugacaucuuu

SEQ ID NO: 2274250 - RNA, 19 nt, Artificial Sequence
  Description of Artificial Sequence: Synthetic oligonucleotide
  Sense strand starting at position 2389 of SEQ ID NO: 1884551
uggugagugucagguggaa

SEQ ID NO: 2274251 - RNA, 19 nt, Artificial Sequence
  Description of Artificial Sequence: Synthetic oligonucleotide
  Antisense strand to SEQ ID NO: 2274250
uuccaccugacacucacca

SEQ ID NO: 2274252 - RNA, 19 nt, Artificial Sequence
  Description of Artificial Sequence: Synthetic oligonucleotide
  Sense strand starting at position 2391 of SEQ ID NO: 1884551
gugagugucagguggaaua

SEQ ID NO: 2274253 - RNA, 19 nt, Artificial Sequence
  Description of Artificial Sequence: Synthetic oligonucleotide
  Antisense strand to SEQ ID NO: 2274252
uauuccaccugacacucac

SEQ ID NO: 2274254 - RNA, 19 nt, Artificial Sequence
  Description of Artificial Sequence: Synthetic oligonucleotide
  Sense strand starting at position 2594 of SEQ ID NO: 1884551
gcugaagcguccuugaggu

SEQ ID NO: 2274255 - RNA, 19 nt, Artificial Sequence
  Description of Artificial Sequence: Synthetic oligonucleotide
  Antisense strand to SEQ ID NO: 2274254
accucaaggacgcuucagc

SEQ ID NO: 2274256 - RNA, 19 nt, Artificial Sequence
  Description of Artificial Sequence: Synthetic oligonucleotide
  Sense strand starting at position 2689 of SEQ ID NO: 1884551
cugcacuugucuuauugau

SEQ ID NO: 2274257 - RNA, 19 nt, Artificial Sequence
  Description of Artificial Sequence: Synthetic oligonucleotide
  Antisense strand to SEQ ID NO: 2274256
aucaauaagacaagugcag

SEQ ID NO: 2274258 - RNA, 19 nt, Artificial Sequence
  Description of Artificial Sequence: Synthetic oligonucleotide
  Sense strand starting at position 2691 of SEQ ID NO: 1884551
gcacuugucuuauugauuu

SEQ ID NO: 2274259 - RNA, 19 nt, Artificial Sequence
  Description of Artificial Sequence: Synthetic oligonucleotide
  Antisense strand to SEQ ID NO: 2274258
aaaucaauaagacaagugc

SEQ ID NO: 2274260 - RNA, 19 nt, Artificial Sequence
  Description of Artificial Sequence: Synthetic oligonucleotide
  Sense strand starting at position 2759 of SEQ ID NO: 1884551
gcacgucccuugucagaau

SEQ ID NO: 2274261 - RNA, 19 nt, Artificial Sequence
  Description of Artificial Sequence: Synthetic oligonucleotide
  Antisense strand to SEQ ID NO: 2274260
auucugacaagggacgugc

SEQ ID NO: 2274262 - RNA, 19 nt, Artificial Sequence
  Description of Artificial Sequence: Synthetic oligonucleotide
  Sense strand starting at position 2954 of SEQ ID NO: 1884551
ggaggcgugugaugggaaa

SEQ ID NO: 2274263 - RNA, 19 nt, Artificial Sequence
  Description of Artificial Sequence: Synthetic oligonucleotide
  Antisense strand to SEQ ID NO: 2274262
uuucccaucacacgccucc

SEQ ID NO: 2274264 - RNA, 19 nt, Artificial Sequence
  Description of Artificial Sequence: Synthetic oligonucleotide
  Sense strand starting at position 3029 of SEQ ID NO: 1884551
gucaaagucucagagcaag

SEQ ID NO: 2274265 - RNA, 19 nt, Artificial Sequence
  Description of Artificial Sequence: Synthetic oligonucleotide
  Antisense strand to SEQ ID NO: 2274264
cuugcucugagacuuugac

SEQ ID NO: 2274266 - RNA, 19 nt, Artificial Sequence
  Description of Artificial Sequence: Synthetic oligonucleotide
  Sense strand starting at position 3146 of SEQ ID NO: 1884551
ccagcuacuuacugaagua

SEQ ID NO: 2274267 - RNA, 19 nt, Artificial Sequence
  Description of Artificial Sequence: Synthetic oligonucleotide
  Antisense strand to SEQ ID NO: 2274266
uacuucaguaaguagcugg

SEQ ID NO: 2274268 - RNA, 19 nt, Artificial Sequence
  Description of Artificial Sequence: Synthetic oligonucleotide
  Sense strand starting at position 3434 of SEQ ID NO: 1884551
acggcuuuccuauaaacau

SEQ ID NO: 2274269 - RNA, 19 nt, Artificial Sequence
  Description of Artificial Sequence: Synthetic oligonucleotide
  Antisense strand to SEQ ID NO: 2274268
auguuuauaggaaagccgu

SEQ ID NO: 2274270 - RNA, 19 nt, Artificial Sequence
  Description of Artificial Sequence: Synthetic oligonucleotide
  Sense strand starting at position 3479 of SEQ ID NO: 1884551
ggucauaaugccgagguga

SEQ ID NO: 2274271 - RNA, 19 nt, Artificial Sequence
  Description of Artificial Sequence: Synthetic oligonucleotide
  Antisense strand to SEQ ID NO: 2274270
ucaccucggcauuaugacc

SEQ ID NO: 2274272 - RNA, 19 nt, Artificial Sequence
  Description of Artificial Sequence: Synthetic oligonucleotide
  Sense strand starting at position 3505 of SEQ ID NO: 1884551
gggccaugugcagaaugaa

SEQ ID NO: 2274273 - RNA, 19 nt, Artificial Sequence
  Description of Artificial Sequence: Synthetic oligonucleotide
  Antisense strand to SEQ ID NO: 2274272
uucauucugcacauggccc

SEQ ID NO: 2274274 - RNA, 19 nt, Artificial Sequence
  Description of Artificial Sequence: Synthetic oligonucleotide
  Sense strand starting at position 3611 of SEQ ID NO: 1884551
ucauuauugcaggagcuca

SEQ ID NO: 2274275 - RNA, 19 nt, Artificial Sequence
  Description of Artificial Sequence: Synthetic oligonucleotide
  Antisense strand to SEQ ID NO: 2274274
ugagcuccugcaauaauga

SEQ ID NO: 2274276 - RNA, 19 nt, Artificial Sequence
  Description of Artificial Sequence: Synthetic oligonucleotide
  Sense strand starting at position 3672 of SEQ ID NO: 1884551
uggccuccguccuaugaca

SEQ ID NO: 2274277 - RNA, 19 nt, Artificial Sequence
  Description of Artificial Sequence: Synthetic oligonucleotide
  Antisense strand to SEQ ID NO: 2274276
ugucauaggacggaggcca

SEQ ID NO: 2274278 - RNA, 19 nt, Artificial Sequence
  Description of Artificial Sequence: Synthetic oligonucleotide
  Sense strand starting at position 2 of SEQ ID NO: 1884552
auguuuagauauccaaaug

SEQ ID NO: 2274279 - RNA, 19 nt, Artificial Sequence
  Description of Artificial Sequence: Synthetic oligonucleotide
  Antisense strand to SEQ ID NO: 2274278
cauuuggauaucuaaacau

SEQ ID NO: 2274280 - RNA, 19 nt, Artificial Sequence
  Description of Artificial Sequence: Synthetic oligonucleotide
  Sense strand starting at position 209 of SEQ ID NO: 1884552
guuauuaagcaauguauga

SEQ ID NO: 2274281 - RNA, 19 nt, Artificial Sequence
  Description of Artificial Sequence: Synthetic oligonucleotide
  Antisense strand to SEQ ID NO: 2274280
ucauacauugcuuaauaac

SEQ ID NO: 2274282 - RNA, 19 nt, Artificial Sequence
  Description of Artificial Sequence: Synthetic oligonucleotide
  Sense strand starting at position 339 of SEQ ID NO: 1884552
cucugagcuuucccagacu

SEQ ID NO: 2274283 - RNA, 19 nt, Artificial Sequence
  Description of Artificial Sequence: Synthetic oligonucleotide
  Antisense strand to SEQ ID NO: 2274282
agucugggaaagcucagag

SEQ ID NO: 2274284 - RNA, 19 nt, Artificial Sequence
  Description of Artificial Sequence: Synthetic oligonucleotide
  Sense strand starting at position 482 of SEQ ID NO: 1884552
ucugguaagcaguaaaugu

SEQ ID NO: 2274285 - RNA, 19 nt, Artificial Sequence
  Description of Artificial Sequence: Synthetic oligonucleotide
  Antisense strand to SEQ ID NO: 2274284
acauuuacugcuuaccaga

SEQ ID NO: 2274286 - RNA, 19 nt, Artificial Sequence
  Description of Artificial Sequence: Synthetic oligonucleotide
  Sense strand starting at position 522 of SEQ ID NO: 1884552
aagugaagguuaguugacu

SEQ ID NO: 2274287 - RNA, 19 nt, Artificial Sequence
  Description of Artificial Sequence: Synthetic oligonucleotide
  Antisense strand to SEQ ID NO: 2274286
agucaacuaaccuucacuu

SEQ ID NO: 2274288 - RNA, 19 nt, Artificial Sequence
  Description of Artificial Sequence: Synthetic oligonucleotide
  Sense strand starting at position 546 of SEQ ID NO: 1884552
uuuccaugucuugaaagcu

SEQ ID NO: 2274289 - RNA, 19 nt, Artificial Sequence
  Description of Artificial Sequence: Synthetic oligonucleotide
  Antisense strand to SEQ ID NO: 2274288
agcuuucaagacauggaaa

SEQ ID NO: 2274290 - RNA, 19 nt, Artificial Sequence
  Description of Artificial Sequence: Synthetic oligonucleotide
  Sense strand starting at position 560 of SEQ ID NO: 1884552
aagcucuguugauuuggua

SEQ ID NO: 2274291 - RNA, 19 nt, Artificial Sequence
  Description of Artificial Sequence: Synthetic oligonucleotide
  Antisense strand to SEQ ID NO: 2274290
uaccaaaucaacagagcuu

SEQ ID NO: 2274292 - RNA, 19 nt, Artificial Sequence
  Description of Artificial Sequence: Synthetic oligonucleotide
  Sense strand starting at position 849 of SEQ ID NO: 1884552
ggaggcaguguccaggaau

SEQ ID NO: 2274293 - RNA, 19 nt, Artificial Sequence
  Description of Artificial Sequence: Synthetic oligonucleotide
  Antisense strand to SEQ ID NO: 2274292
auuccuggacacugccucc

SEQ ID NO: 2274294 - RNA, 19 nt, Artificial Sequence
  Description of Artificial Sequence: Synthetic oligonucleotide
  Sense strand starting at position 852 of SEQ ID NO: 1884552
ggcaguguccaggaauauu

SEQ ID NO: 2274295 - RNA, 19 nt, Artificial Sequence
  Description of Artificial Sequence: Synthetic oligonucleotide
  Antisense strand to SEQ ID NO: 2274294
aauauuccuggacacugcc

SEQ ID NO: 2274296 - RNA, 19 nt, Artificial Sequence
  Description of Artificial Sequence: Synthetic oligonucleotide
  Sense strand starting at position 902 of SEQ ID NO: 1884552
accacugaucuauggguuu

SEQ ID NO: 2274297 - RNA, 19 nt, Artificial Sequence
  Description of Artificial Sequence: Synthetic oligonucleotide
  Antisense strand to SEQ ID NO: 2274296
aaacccauagaucaguggu

SEQ ID NO: 2274298 - RNA, 19 nt, Artificial Sequence
  Description of Artificial Sequence: Synthetic oligonucleotide
  Sense strand starting at position 905 of SEQ ID NO: 1884552
acugaucuauggguuugaa

SEQ ID NO: 2274299 - RNA, 19 nt, Artificial Sequence
  Description of Artificial Sequence: Synthetic oligonucleotide
  Antisense strand to SEQ ID NO: 2274298
uucaaacccauagaucagu

SEQ ID NO: 2274300 - RNA, 19 nt, Artificial Sequence
  Description of Artificial Sequence: Synthetic oligonucleotide
  Sense strand starting at position 908 of SEQ ID NO: 1884552
gaucuauggguuugaaaua

SEQ ID NO: 2274301 - RNA, 19 nt, Artificial Sequence
  Description of Artificial Sequence: Synthetic oligonucleotide
  Antisense strand to SEQ ID NO: 2274300
uauuucaaacccauagauc

SEQ ID NO: 2274302 - RNA, 19 nt, Artificial Sequence
  Description of Artificial Sequence: Synthetic oligonucleotide
  Sense strand starting at position 1051 of SEQ ID NO: 1884552
gcuauuuaucaugggcuuu

SEQ ID NO: 2274303 - RNA, 19 nt, Artificial Sequence
  Description of Artificial Sequence: Synthetic oligonucleotide
  Antisense strand to SEQ ID NO: 2274302
aaagcccaugauaaauagc

SEQ ID NO: 2274304 - RNA, 19 nt, Artificial Sequence
  Description of Artificial Sequence: Synthetic oligonucleotide
  Sense strand starting at position 1099 of SEQ ID NO: 1884552
auguuacuucucgaaguga

SEQ ID NO: 2274305 - RNA, 19 nt, Artificial Sequence
  Description of Artificial Sequence: Synthetic oligonucleotide
  Antisense strand to SEQ ID NO: 2274304
ucacuucgagaaguaacau

SEQ ID NO: 2274306 - RNA, 19 nt, Artificial Sequence
  Description of Artificial Sequence: Synthetic oligonucleotide
  Sense strand starting at position 1107 of SEQ ID NO: 1884552
ucucgaagugaacaauuau

SEQ ID NO: 2274307 - RNA, 19 nt, Artificial Sequence
  Description of Artificial Sequence: Synthetic oligonucleotide
  Antisense strand to SEQ ID NO: 2274306
auaauuguucacuucgaga

SEQ ID NO: 2274308 - RNA, 19 nt, Artificial Sequence
  Description of Artificial Sequence: Synthetic oligonucleotide
  Sense strand starting at position 1152 of SEQ ID NO: 1884552
ccauaaugcuuagcagaga

SEQ ID NO: 2274309 - RNA, 19 nt, Artificial Sequence
  Description of Artificial Sequence: Synthetic oligonucleotide
  Antisense strand to SEQ ID NO: 2274308
ucucugcuaagcauuaugg

SEQ ID NO: 2274310 - RNA, 19 nt, Artificial Sequence
  Description of Artificial Sequence: Synthetic oligonucleotide
  Sense strand starting at position 1155 of SEQ ID NO: 1884552
uaaugcuuagcagagagua

SEQ ID NO: 2274311 - RNA, 19 nt, Artificial Sequence
  Description of Artificial Sequence: Synthetic oligonucleotide
  Antisense strand to SEQ ID NO: 2274310
uacucucugcuaagcauua

SEQ ID NO: 2274312 - RNA, 19 nt, Artificial Sequence
  Description of Artificial Sequence: Synthetic oligonucleotide
  Sense strand starting at position 1157 of SEQ ID NO: 1884552
augcuuagcagagaguaaa

SEQ ID NO: 2274313 - RNA, 19 nt, Artificial Sequence
  Description of Artificial Sequence: Synthetic oligonucleotide
  Antisense strand to SEQ ID NO: 2274312
uuuacucucugcuaagcau

SEQ ID NO: 2274314 - RNA, 19 nt, Artificial Sequence
  Description of Artificial Sequence: Synthetic oligonucleotide
  Sense strand starting at position 1203 of SEQ ID NO: 1884552
ggugaugguaguggaagau

SEQ ID NO: 2274315 - RNA, 19 nt, Artificial Sequence
  Description of Artificial Sequence: Synthetic oligonucleotide
  Antisense strand to SEQ ID NO: 2274314
aucuuccacuaccaucacc

SEQ ID NO: 2274316 - RNA, 19 nt, Artificial Sequence
  Description of Artificial Sequence: Synthetic oligonucleotide
  Sense strand starting at position 1456 of SEQ ID NO: 1884552
aucugugaaccucaaagca

SEQ ID NO: 2274317 - RNA, 19 nt, Artificial Sequence
  Description of Artificial Sequence: Synthetic oligonucleotide
  Antisense strand to SEQ ID NO: 2274316
ugcuuugagguucacagau

SEQ ID NO: 2274318 - RNA, 19 nt, Artificial Sequence
  Description of Artificial Sequence: Synthetic oligonucleotide
  Sense strand starting at position 1498 of SEQ ID NO: 1884552
cuguacagccaugauguaa

SEQ ID NO: 2274319 - RNA, 19 nt, Artificial Sequence
  Description of Artificial Sequence: Synthetic oligonucleotide
  Antisense strand to SEQ ID NO: 2274318
uuacaucauggcuguacag

SEQ ID NO: 2274320 - RNA, 19 nt, Artificial Sequence
  Description of Artificial Sequence: Synthetic oligonucleotide
  Sense strand starting at position 1550 of SEQ ID NO: 1884552
uagggaaagaguuguaaug

SEQ ID NO: 2274321 - RNA, 19 nt, Artificial Sequence
  Description of Artificial Sequence: Synthetic oligonucleotide
  Antisense strand to SEQ ID NO: 2274320
cauuacaacucuuucccua

SEQ ID NO: 2274322 - RNA, 19 nt, Artificial Sequence
  Description of Artificial Sequence: Synthetic oligonucleotide
  Sense strand starting at position 1678 of SEQ ID NO: 1884552
gugagcuuuccauaggaga

SEQ ID NO: 2274323 - RNA, 19 nt, Artificial Sequence
  Description of Artificial Sequence: Synthetic oligonucleotide
  Antisense strand to SEQ ID NO: 2274322
ucuccuauggaaagcucac

SEQ ID NO: 2274324 - RNA, 19 nt, Artificial Sequence
  Description of Artificial Sequence: Synthetic oligonucleotide
  Sense strand starting at position 1755 of SEQ ID NO: 1884552
ccguauucccauuaccauu

SEQ ID NO: 2274325 - RNA, 19 nt, Artificial Sequence
  Description of Artificial Sequence: Synthetic oligonucleotide
  Antisense strand to SEQ ID NO: 2274324
aaugguaaugggaauacgg

SEQ ID NO: 2274326 - RNA, 19 nt, Artificial Sequence
  Description of Artificial Sequence: Synthetic oligonucleotide
  Sense strand starting at position 1784 of SEQ ID NO: 1884552
ucuugugaugcuuauacau

SEQ ID NO: 2274327 - RNA, 19 nt, Artificial Sequence
  Description of Artificial Sequence: Synthetic oligonucleotide
  Antisense strand to SEQ ID NO: 2274326
auguauaagcaucacaaga

SEQ ID NO: 2274328 - RNA, 19 nt, Artificial Sequence
  Description of Artificial Sequence: Synthetic oligonucleotide
  Sense strand starting at position 1890 of SEQ ID NO: 1884552
uuacuauagcagcagagau

SEQ ID NO: 2274329 - RNA, 19 nt, Artificial Sequence
  Description of Artificial Sequence: Synthetic oligonucleotide
  Antisense strand to SEQ ID NO: 2274328
aucucugcugcuauaguaa

SEQ ID NO: 2274330 - RNA, 19 nt, Artificial Sequence
  Description of Artificial Sequence: Synthetic oligonucleotide
  Sense strand starting at position 1892 of SEQ ID NO: 1884552
acuauagcagcagagauau

SEQ ID NO: 2274331 - RNA, 19 nt, Artificial Sequence
  Description of Artificial Sequence: Synthetic oligonucleotide
  Antisense strand to SEQ ID NO: 2274330
auaucucugcugcuauagu

SEQ ID NO: 2274332 - RNA, 19 nt, Artificial Sequence
  Description of Artificial Sequence: Synthetic oligonucleotide
  Sense strand starting at position 2154 of SEQ ID NO: 1884552
gagggauugaggcgauaga

SEQ ID NO: 2274333 - RNA, 19 nt, Artificial Sequence
  Description of Artificial Sequence: Synthetic oligonucleotide
  Antisense strand to SEQ ID NO: 2274332
ucuaucgccucaaucccuc

SEQ ID NO: 2274334 - RNA, 19 nt, Artificial Sequence
  Description of Artificial Sequence: Synthetic oligonucleotide
  Sense strand starting at position 2228 of SEQ ID NO: 1884552
gucauuccuuguuuaauuu

SEQ ID NO: 2274335 - RNA, 19 nt, Artificial Sequence
  Description of Artificial Sequence: Synthetic oligonucleotide
  Antisense strand to SEQ ID NO: 2274334
aaauuaaacaaggaaugac

SEQ ID NO: 2274336 - RNA, 19 nt, Artificial Sequence
  Description of Artificial Sequence: Synthetic oligonucleotide
  Sense strand starting at position 2299 of SEQ ID NO: 1884552
agggaacuaccucgaggua

SEQ ID NO: 2274337 - RNA, 19 nt, Artificial Sequence
  Description of Artificial Sequence: Synthetic oligonucleotide
  Antisense strand to SEQ ID NO: 2274336
uaccucgagguaguucccu

SEQ ID NO: 2274338 - RNA, 19 nt, Artificial Sequence
  Description of Artificial Sequence: Synthetic oligonucleotide
  Sense strand starting at position 2302 of SEQ ID NO: 1884552
gaacuaccucgagguagau

SEQ ID NO: 2274339 - RNA, 19 nt, Artificial Sequence
  Description of Artificial Sequence: Synthetic oligonucleotide
  Antisense strand to SEQ ID NO: 2274338
aucuaccucgagguaguuc

SEQ ID NO: 2274340 - RNA, 19 nt, Artificial Sequence
  Description of Artificial Sequence: Synthetic oligonucleotide
  Sense strand starting at position 2573 of SEQ ID NO: 1884552
aggagacccuuggcaaauu

SEQ ID NO: 2274341 - RNA, 19 nt, Artificial Sequence
  Description of Artificial Sequence: Synthetic oligonucleotide
  Antisense strand to SEQ ID NO: 2274340
aauuugccaagggucuccu

SEQ ID NO: 2274342 - RNA, 19 nt, Artificial Sequence
  Description of Artificial Sequence: Synthetic oligonucleotide
  Sense strand starting at position 3496 of SEQ ID NO: 1884552
ucaucauuguaaguuauac

SEQ ID NO: 2274343 - RNA, 19 nt, Artificial Sequence
  Description of Artificial Sequence: Synthetic oligonucleotide
  Antisense strand to SEQ ID NO: 2274342
guauaacuuacaaugauga

SEQ ID NO: 2274344 - RNA, 19 nt, Artificial Sequence
  Description of Artificial Sequence: Synthetic oligonucleotide
  Sense strand starting at position 3607 of SEQ ID NO: 1884552
accgcuauccgcuuuaguu

SEQ ID NO: 2274345 - RNA, 19 nt, Artificial Sequence
  Description of Artificial Sequence: Synthetic oligonucleotide
  Antisense strand to SEQ ID NO: 2274344
aacuaaagcggauagcggu

SEQ ID NO: 2274346 - RNA, 19 nt, Artificial Sequence
  Description of Artificial Sequence: Synthetic oligonucleotide
  Sense strand starting at position 3608 of SEQ ID NO: 1884552
ccgcuauccgcuuuaguuc

SEQ ID NO: 2274347 - RNA, 19 nt, Artificial Sequence
  Description of Artificial Sequence: Synthetic oligonucleotide
  Antisense strand to SEQ ID NO: 2274346
gaacuaaagcggauagcgg

SEQ ID NO: 2274348 - RNA, 19 nt, Artificial Sequence
  Description of Artificial Sequence: Synthetic oligonucleotide
  Sense strand starting at position 3634 of SEQ ID NO: 1884552
guguguuuccuccuucugu

SEQ ID NO: 2274349 - RNA, 19 nt, Artificial Sequence
  Description of Artificial Sequence: Synthetic oligonucleotide
  Antisense strand to SEQ ID NO: 2274348
acagaaggaggaaacacac

SEQ ID NO: 2274350 - RNA, 19 nt, Artificial Sequence
  Description of Artificial Sequence: Synthetic oligonucleotide
  Sense strand starting at position 3683 of SEQ ID NO: 1884552
ccugguauugucuaguauc

SEQ ID NO: 2274351 - RNA, 19 nt, Artificial Sequence
  Description of Artificial Sequence: Synthetic oligonucleotide
  Antisense strand to SEQ ID NO: 2274350
gauacuagacaauaccagg

SEQ ID NO: 2274352 - RNA, 19 nt, Artificial Sequence
  Description of Artificial Sequence: Synthetic oligonucleotide
  Sense strand starting at position 3813 of SEQ ID NO: 1884552
cucuuaauacaggauuguu

SEQ ID NO: 2274353 - RNA, 19 nt, Artificial Sequence
  Description of Artificial Sequence: Synthetic oligonucleotide
  Antisense strand to SEQ ID NO: 2274352
aacaauccuguauuaagag

SEQ ID NO: 2274354 - RNA, 19 nt, Artificial Sequence
  Description of Artificial Sequence: Synthetic oligonucleotide
  Sense strand starting at position 3929 of SEQ ID NO: 1884552
ggaugaauuugugacaauc

SEQ ID NO: 2274355 - RNA, 19 nt, Artificial Sequence
  Description of Artificial Sequence: Synthetic oligonucleotide
  Antisense strand to SEQ ID NO: 2274354
gauugucacaaauucaucc

SEQ ID NO: 2274356 - RNA, 19 nt, Artificial Sequence
  Description of Artificial Sequence: Synthetic oligonucleotide
  Sense strand starting at position 3931 of SEQ ID NO: 1884552
augaauuugugacaaucag

SEQ ID NO: 2274357 - RNA, 19 nt, Artificial Sequence
  Description of Artificial Sequence: Synthetic oligonucleotide
  Antisense strand to SEQ ID NO: 2274356
cugauugucacaaauucau

SEQ ID NO: 2274358 - RNA, 19 nt, Artificial Sequence
  Description of Artificial Sequence: Synthetic oligonucleotide
  Sense strand starting at position 165 of SEQ ID NO: 1884553
uuauguauacugcaugaaa

SEQ ID NO: 2274359 - RNA, 19 nt, Artificial Sequence
  Description of Artificial Sequence: Synthetic oligonucleotide
  Antisense strand to SEQ ID NO: 2274358
uuucaugcaguauacauaa

SEQ ID NO: 2274360 - RNA, 19 nt, Artificial Sequence
  Description of Artificial Sequence: Synthetic oligonucleotide
  Sense strand starting at position 225 of SEQ ID NO: 1884553
uguucugugccuuauguga

SEQ ID NO: 2274361 - RNA, 19 nt, Artificial Sequence
  Description of Artificial Sequence: Synthetic oligonucleotide
  Antisense strand to SEQ ID NO: 2274360
ucacauaaggcacagaaca

SEQ ID NO: 2274362 - RNA, 19 nt, Artificial Sequence
  Description of Artificial Sequence: Synthetic oligonucleotide
  Sense strand starting at position 233 of SEQ ID NO: 1884553
gccuuaugugaugggugau

SEQ ID NO: 2274363 - RNA, 19 nt, Artificial Sequence
  Description of Artificial Sequence: Synthetic oligonucleotide
  Antisense strand to SEQ ID NO: 2274362
aucacccaucacauaaggc

SEQ ID NO: 2274364 - RNA, 19 nt, Artificial Sequence
  Description of Artificial Sequence: Synthetic oligonucleotide
  Sense strand starting at position 236 of SEQ ID NO: 1884553
uuaugugaugggugauguu

SEQ ID NO: 2274365 - RNA, 19 nt, Artificial Sequence
  Description of Artificial Sequence: Synthetic oligonucleotide
  Antisense strand to SEQ ID NO: 2274364
aacaucacccaucacauaa

SEQ ID NO: 2274366 - RNA, 19 nt, Artificial Sequence
  Description of Artificial Sequence: Synthetic oligonucleotide
  Sense strand starting at position 637 of SEQ ID NO: 1884553
gguccauucuucccuccau

SEQ ID NO: 2274367 - RNA, 19 nt, Artificial Sequence
  Description of Artificial Sequence: Synthetic oligonucleotide
  Antisense strand to SEQ ID NO: 2274366
auggagggaagaauggacc

SEQ ID NO: 2274368 - RNA, 19 nt, Artificial Sequence
  Description of Artificial Sequence: Synthetic oligonucleotide
  Sense strand starting at position 1163 of SEQ ID NO: 1884553
agcuuugacucagcuaaau

SEQ ID NO: 2274369 - RNA, 19 nt, Artificial Sequence
  Description of Artificial Sequence: Synthetic oligonucleotide
  Antisense strand to SEQ ID NO: 2274368
auuuagcugagucaaagcu

SEQ ID NO: 2274370 - RNA, 19 nt, Artificial Sequence
  Description of Artificial Sequence: Synthetic oligonucleotide
  Sense strand starting at position 1199 of SEQ ID NO: 1884553
ucuggccuuugcucaagua

SEQ ID NO: 2274371 - RNA, 19 nt, Artificial Sequence
  Description of Artificial Sequence: Synthetic oligonucleotide
  Antisense strand to SEQ ID NO: 2274370
uacuugagcaaaggccaga

SEQ ID NO: 2274372 - RNA, 19 nt, Artificial Sequence
  Description of Artificial Sequence: Synthetic oligonucleotide
  Sense strand starting at position 1287 of SEQ ID NO: 1884553
ccucgaaagccucaccuuu

SEQ ID NO: 2274373 - RNA, 19 nt, Artificial Sequence
  Description of Artificial Sequence: Synthetic oligonucleotide
  Antisense strand to SEQ ID NO: 2274372
aaaggugaggcuuucgagg

SEQ ID NO: 2274374 - RNA, 19 nt, Artificial Sequence
  Description of Artificial Sequence: Synthetic oligonucleotide
  Sense strand starting at position 1351 of SEQ ID NO: 1884553
auggauuucuucugaacca

SEQ ID NO: 2274375 - RNA, 19 nt, Artificial Sequence
  Description of Artificial Sequence: Synthetic oligonucleotide
  Antisense strand to SEQ ID NO: 2274374
ugguucagaagaaauccau

SEQ ID NO: 2274376 - RNA, 19 nt, Artificial Sequence
  Description of Artificial Sequence: Synthetic oligonucleotide
  Sense strand starting at position 1352 of SEQ ID NO: 1884553
uggauuucuucugaaccac

SEQ ID NO: 2274377 - RNA, 19 nt, Artificial Sequence
  Description of Artificial Sequence: Synthetic oligonucleotide
  Antisense strand to SEQ ID NO: 2274376
gugguucagaagaaaucca

SEQ ID NO: 2274378 - RNA, 19 nt, Artificial Sequence
  Description of Artificial Sequence: Synthetic oligonucleotide
  Sense strand starting at position 1405 of SEQ ID NO: 1884553
cugcuuugagcauggguau

SEQ ID NO: 2274379 - RNA, 19 nt, Artificial Sequence
  Description of Artificial Sequence: Synthetic oligonucleotide
  Antisense strand to SEQ ID NO: 2274378
auacccaugcucaaagcag

SEQ ID NO: 2274380 - RNA, 19 nt, Artificial Sequence
  Description of Artificial Sequence: Synthetic oligonucleotide
  Sense strand starting at position 1406 of SEQ ID NO: 1884553
ugcuuugagcauggguaua

SEQ ID NO: 2274381 - RNA, 19 nt, Artificial Sequence
  Description of Artificial Sequence: Synthetic oligonucleotide
  Antisense strand to SEQ ID NO: 2274380
uauacccaugcucaaagca

SEQ ID NO: 2274382 - RNA, 19 nt, Artificial Sequence
  Description of Artificial Sequence: Synthetic oligonucleotide
  Sense strand starting at position 1408 of SEQ ID NO: 1884553
cuuugagcauggguauauu

SEQ ID NO: 2274383 - RNA, 19 nt, Artificial Sequence
  Description of Artificial Sequence: Synthetic oligonucleotide
  Antisense strand to SEQ ID NO: 2274382
aauauacccaugcucaaag

SEQ ID NO: 2274384 - RNA, 19 nt, Artificial Sequence
  Description of Artificial Sequence: Synthetic oligonucleotide
  Sense strand starting at position 1425 of SEQ ID NO: 1884553
uugugaaagucuucugcag

SEQ ID NO: 2274385 - RNA, 19 nt, Artificial Sequence
  Description of Artificial Sequence: Synthetic oligonucleotide
  Antisense strand to SEQ ID NO: 2274384
cugcagaagacuuucacaa

SEQ ID NO: 2274386 - RNA, 19 nt, Artificial Sequence
  Description of Artificial Sequence: Synthetic oligonucleotide
  Sense strand starting at position 1474 of SEQ ID NO: 1884553
ggagccuagaacgguaaua

SEQ ID NO: 2274387 - RNA, 19 nt, Artificial Sequence
  Description of Artificial Sequence: Synthetic oligonucleotide
  Antisense strand to SEQ ID NO: 2274386
uauuaccguucuaggcucc

SEQ ID NO: 2274388 - RNA, 19 nt, Artificial Sequence
  Description of Artificial Sequence: Synthetic oligonucleotide
  Sense strand starting at position 1476 of SEQ ID NO: 1884553
agccuagaacgguaauauu

SEQ ID NO: 2274389 - RNA, 19 nt, Artificial Sequence
  Description of Artificial Sequence: Synthetic oligonucleotide
  Antisense strand to SEQ ID NO: 2274388
aauauuaccguucuaggcu

SEQ ID NO: 2274390 - RNA, 19 nt, Artificial Sequence
  Description of Artificial Sequence: Synthetic oligonucleotide
  Sense strand starting at position 1527 of SEQ ID NO: 1884553
ucugucuccuugcugacaa

SEQ ID NO: 2274391 - RNA, 19 nt, Artificial Sequence
  Description of Artificial Sequence: Synthetic oligonucleotide
  Antisense strand to SEQ ID NO: 2274390
uugucagcaaggagacaga

SEQ ID NO: 2274392 - RNA, 19 nt, Artificial Sequence
  Description of Artificial Sequence: Synthetic oligonucleotide
  Sense strand starting at position 1529 of SEQ ID NO: 1884553
ugucuccuugcugacaauu

SEQ ID NO: 2274393 - RNA, 19 nt, Artificial Sequence
  Description of Artificial Sequence: Synthetic oligonucleotide
  Antisense strand to SEQ ID NO: 2274392
aauugucagcaaggagaca

SEQ ID NO: 2274394 - RNA, 19 nt, Artificial Sequence
  Description of Artificial Sequence: Synthetic oligonucleotide
  Sense strand starting at position 1598 of SEQ ID NO: 1884553
agagauguaaauggccaaa

SEQ ID NO: 2274395 - RNA, 19 nt, Artificial Sequence
  Description of Artificial Sequence: Synthetic oligonucleotide
  Antisense strand to SEQ ID NO: 2274394
uuuggccauuuacaucucu

SEQ ID NO: 2274396 - RNA, 19 nt, Artificial Sequence
  Description of Artificial Sequence: Synthetic oligonucleotide
  Sense strand starting at position 1600 of SEQ ID NO: 1884553
agauguaaauggccaaaua

SEQ ID NO: 2274397 - RNA, 19 nt, Artificial Sequence
  Description of Artificial Sequence: Synthetic oligonucleotide
  Antisense strand to SEQ ID NO: 2274396
uauuuggccauuuacaucu

SEQ ID NO: 2274398 - RNA, 19 nt, Artificial Sequence
  Description of Artificial Sequence: Synthetic oligonucleotide
  Sense strand starting at position 1763 of SEQ ID NO: 1884553
aguauuuauucucagggaa

SEQ ID NO: 2274399 - RNA, 19 nt, Artificial Sequence
  Description of Artificial Sequence: Synthetic oligonucleotide
  Antisense strand to SEQ ID NO: 2274398
uucccugagaauaaauacu

SEQ ID NO: 2274400 - RNA, 19 nt, Artificial Sequence
  Description of Artificial Sequence: Synthetic oligonucleotide
  Sense strand starting at position 1781 of SEQ ID NO: 1884553
agagucauuuagcuaguuu

SEQ ID NO: 2274401 - RNA, 19 nt, Artificial Sequence
  Description of Artificial Sequence: Synthetic oligonucleotide
  Antisense strand to SEQ ID NO: 2274400
aaacuagcuaaaugacucu

SEQ ID NO: 2274402 - RNA, 19 nt, Artificial Sequence
  Description of Artificial Sequence: Synthetic oligonucleotide
  Sense strand starting at position 1834 of SEQ ID NO: 1884553
aaguuaagcuuagcaagua

SEQ ID NO: 2274403 - RNA, 19 nt, Artificial Sequence
  Description of Artificial Sequence: Synthetic oligonucleotide
  Antisense strand to SEQ ID NO: 2274402
uacuugcuaagcuuaacuu

SEQ ID NO: 2274404 - RNA, 19 nt, Artificial Sequence
  Description of Artificial Sequence: Synthetic oligonucleotide
  Sense strand starting at position 1853 of SEQ ID NO: 1884553
ccuuguuugcagcacucaa

SEQ ID NO: 2274405 - RNA, 19 nt, Artificial Sequence
  Description of Artificial Sequence: Synthetic oligonucleotide
  Antisense strand to SEQ ID NO: 2274404
uugagugcugcaaacaagg

SEQ ID NO: 2274406 - RNA, 19 nt, Artificial Sequence
  Description of Artificial Sequence: Synthetic oligonucleotide
  Sense strand starting at position 2296 of SEQ ID NO: 1884553
auccuaguuugggcuguaa

SEQ ID NO: 2274407 - RNA, 19 nt, Artificial Sequence
  Description of Artificial Sequence: Synthetic oligonucleotide
  Antisense strand to SEQ ID NO: 2274406
uuacagcccaaacuaggau

SEQ ID NO: 2274408 - RNA, 19 nt, Artificial Sequence
  Description of Artificial Sequence: Synthetic oligonucleotide
  Sense strand starting at position 2298 of SEQ ID NO: 1884553
ccuaguuugggcuguaaca

SEQ ID NO: 2274409 - RNA, 19 nt, Artificial Sequence
  Description of Artificial Sequence: Synthetic oligonucleotide
  Antisense strand to SEQ ID NO: 2274408
uguuacagcccaaacuagg

SEQ ID NO: 2274410 - RNA, 19 nt, Artificial Sequence
  Description of Artificial Sequence: Synthetic oligonucleotide
  Sense strand starting at position 2300 of SEQ ID NO: 1884553
uaguuugggcuguaacacu

SEQ ID NO: 2274411 - RNA, 19 nt, Artificial Sequence
  Description of Artificial Sequence: Synthetic oligonucleotide
  Antisense strand to SEQ ID NO: 2274410
aguguuacagcccaaacua

SEQ ID NO: 2274412 - RNA, 19 nt, Artificial Sequence
  Description of Artificial Sequence: Synthetic oligonucleotide
  Sense strand starting at position 2423 of SEQ ID NO: 1884553
ccaucacuuugacagggaa

SEQ ID NO: 2274413 - RNA, 19 nt, Artificial Sequence
  Description of Artificial Sequence: Synthetic oligonucleotide
  Antisense strand to SEQ ID NO: 2274412
uucccugucaaagugaugg

SEQ ID NO: 2274414 - RNA, 19 nt, Artificial Sequence
  Description of Artificial Sequence: Synthetic oligonucleotide
  Sense strand starting at position 2469 of SEQ ID NO: 1884553
ucacuaaguuuggauuuga

SEQ ID NO: 2274415 - RNA, 19 nt, Artificial Sequence
  Description of Artificial Sequence: Synthetic oligonucleotide
  Antisense strand to SEQ ID NO: 2274414
ucaaauccaaacuuaguga

SEQ ID NO: 2274416 - RNA, 19 nt, Artificial Sequence
  Description of Artificial Sequence: Synthetic oligonucleotide
  Sense strand starting at position 2502 of SEQ ID NO: 1884553
uccuuagaaucuucugagu

SEQ ID NO: 2274417 - RNA, 19 nt, Artificial Sequence
  Description of Artificial Sequence: Synthetic oligonucleotide
  Antisense strand to SEQ ID NO: 2274416
acucagaagauucuaagga

SEQ ID NO: 2274418 - RNA, 19 nt, Artificial Sequence
  Description of Artificial Sequence: Synthetic oligonucleotide
  Sense strand starting at position 3464 of SEQ ID NO: 1884553
gggaucaagucauagaaua

SEQ ID NO: 2274419 - RNA, 19 nt, Artificial Sequence
  Description of Artificial Sequence: Synthetic oligonucleotide
  Antisense strand to SEQ ID NO: 2274418
uauucuaugacuugauccc

SEQ ID NO: 2274420 - RNA, 19 nt, Artificial Sequence
  Description of Artificial Sequence: Synthetic oligonucleotide
  Sense strand starting at position 3506 of SEQ ID NO: 1884553
gguucaugccuguaguggu

SEQ ID NO: 2274421 - RNA, 19 nt, Artificial Sequence
  Description of Artificial Sequence: Synthetic oligonucleotide
  Antisense strand to SEQ ID NO: 2274420
accacuacaggcaugaacc

SEQ ID NO: 2274422 - RNA, 19 nt, Artificial Sequence
  Description of Artificial Sequence: Synthetic oligonucleotide
  Sense strand starting at position 3519 of SEQ ID NO: 1884553
agugguagcuacucaggaa

SEQ ID NO: 2274423 - RNA, 19 nt, Artificial Sequence
  Description of Artificial Sequence: Synthetic oligonucleotide
  Antisense strand to SEQ ID NO: 2274422
uuccugaguagcuaccacu

SEQ ID NO: 2274424 - RNA, 19 nt, Artificial Sequence
  Description of Artificial Sequence: Synthetic oligonucleotide
  Sense strand starting at position 3818 of SEQ ID NO: 1884553
gcucuacugucuuuaagug

SEQ ID NO: 2274425 - RNA, 19 nt, Artificial Sequence
  Description of Artificial Sequence: Synthetic oligonucleotide
  Antisense strand to SEQ ID NO: 2274424
cacuuaaagacaguagagc

SEQ ID NO: 2274426 - RNA, 19 nt, Artificial Sequence
  Description of Artificial Sequence: Synthetic oligonucleotide
  Sense strand starting at position 3822 of SEQ ID NO: 1884553
uacugucuuuaagugguua

SEQ ID NO: 2274427 - RNA, 19 nt, Artificial Sequence
  Description of Artificial Sequence: Synthetic oligonucleotide
  Antisense strand to SEQ ID NO: 2274426
uaaccacuuaaagacagua

SEQ ID NO: 2274428 - RNA, 19 nt, Artificial Sequence
  Description of Artificial Sequence: Synthetic oligonucleotide
  Sense strand starting at position 3824 of SEQ ID NO: 1884553
cugucuuuaagugguuaag

SEQ ID NO: 2274429 - RNA, 19 nt, Artificial Sequence
  Description of Artificial Sequence: Synthetic oligonucleotide
  Antisense strand to SEQ ID NO: 2274428
cuuaaccacuuaaagacag

SEQ ID NO: 2274430 - RNA, 19 nt, Artificial Sequence
  Description of Artificial Sequence: Synthetic oligonucleotide
  Sense strand starting at position 3826 of SEQ ID NO: 1884553
gucuuuaagugguuaagug

SEQ ID NO: 2274431 - RNA, 19 nt, Artificial Sequence
  Description of Artificial Sequence: Synthetic oligonucleotide
  Antisense strand to SEQ ID NO: 2274430
cacuuaaccacuuaaagac

SEQ ID NO: 2274432 - RNA, 19 nt, Artificial Sequence
  Description of Artificial Sequence: Synthetic oligonucleotide
  Sense strand starting at position 3827 of SEQ ID NO: 1884553
ucuuuaagugguuaaguga

SEQ ID NO: 2274433 - RNA, 19 nt, Artificial Sequence
  Description of Artificial Sequence: Synthetic oligonucleotide
  Antisense strand to SEQ ID NO: 2274432
ucacuuaaccacuuaaaga

SEQ ID NO: 2274434 - RNA, 19 nt, Artificial Sequence
  Description of Artificial Sequence: Synthetic oligonucleotide
  Sense strand starting at position 3880 of SEQ ID NO: 1884553
acuggacaaugucaugaga

SEQ ID NO: 2274435 - RNA, 19 nt, Artificial Sequence
  Description of Artificial Sequence: Synthetic oligonucleotide
  Antisense strand to SEQ ID NO: 2274434
ucucaugacauuguccagu

SEQ ID NO: 2274436 - RNA, 19 nt, Artificial Sequence
  Description of Artificial Sequence: Synthetic oligonucleotide
  Sense strand starting at position 3959 of SEQ ID NO: 1884553
cuguaugcucccuaucaag

SEQ ID NO: 2274437 - RNA, 19 nt, Artificial Sequence
  Description of Artificial Sequence: Synthetic oligonucleotide
  Antisense strand to SEQ ID NO: 2274436
cuugauagggagcauacag

SEQ ID NO: 2274438 - RNA, 19 nt, Artificial Sequence
  Description of Artificial Sequence: Synthetic oligonucleotide
  Sense strand starting at position 50 of SEQ ID NO: 1884554
aguaaauuggucuaucauc

SEQ ID NO: 2274439 - RNA, 19 nt, Artificial Sequence
  Description of Artificial Sequence: Synthetic oligonucleotide
  Antisense strand to SEQ ID NO: 2274438
gaugauagaccaauuuacu

SEQ ID NO: 2274440 - RNA, 19 nt, Artificial Sequence
  Description of Artificial Sequence: Synthetic oligonucleotide
  Sense strand starting at position 55 of SEQ ID NO: 1884554
auuggucuaucaucuuaga

SEQ ID NO: 2274441 - RNA, 19 nt, Artificial Sequence
  Description of Artificial Sequence: Synthetic oligonucleotide
  Antisense strand to SEQ ID NO: 2274440
ucuaagaugauagaccaau

SEQ ID NO: 2274442 - RNA, 19 nt, Artificial Sequence
  Description of Artificial Sequence: Synthetic oligonucleotide
  Sense strand starting at position 129 of SEQ ID NO: 1884554
aucugugagccuugagaaa

SEQ ID NO: 2274443 - RNA, 19 nt, Artificial Sequence
  Description of Artificial Sequence: Synthetic oligonucleotide
  Antisense strand to SEQ ID NO: 2274442
uuucucaaggcucacagau

SEQ ID NO: 2274444 - RNA, 19 nt, Artificial Sequence
  Description of Artificial Sequence: Synthetic oligonucleotide
  Sense strand starting at position 164 of SEQ ID NO: 1884554
augguaucucacugaaacu

SEQ ID NO: 2274445 - RNA, 19 nt, Artificial Sequence
  Description of Artificial Sequence: Synthetic oligonucleotide
  Antisense strand to SEQ ID NO: 2274444
aguuucagugagauaccau

SEQ ID NO: 2274446 - RNA, 19 nt, Artificial Sequence
  Description of Artificial Sequence: Synthetic oligonucleotide
  Sense strand starting at position 181 of SEQ ID NO: 1884554
cugagaacuucucucaagg

SEQ ID NO: 2274447 - RNA, 19 nt, Artificial Sequence
  Description of Artificial Sequence: Synthetic oligonucleotide
  Antisense strand to SEQ ID NO: 2274446
ccuugagagaaguucucag

SEQ ID NO: 2274448 - RNA, 19 nt, Artificial Sequence
  Description of Artificial Sequence: Synthetic oligonucleotide
  Sense strand starting at position 198 of SEQ ID NO: 1884554
gguagacucuuucuacaga

SEQ ID NO: 2274449 - RNA, 19 nt, Artificial Sequence
  Description of Artificial Sequence: Synthetic oligonucleotide
  Antisense strand to SEQ ID NO: 2274448
ucuguagaaagagucuacc

SEQ ID NO: 2274450 - RNA, 19 nt, Artificial Sequence
  Description of Artificial Sequence: Synthetic oligonucleotide
  Sense strand starting at position 270 of SEQ ID NO: 1884554
agagauauguucuucucaa

SEQ ID NO: 2274451 - RNA, 19 nt, Artificial Sequence
  Description of Artificial Sequence: Synthetic oligonucleotide
  Antisense strand to SEQ ID NO: 2274450
uugagaagaacauaucucu

SEQ ID NO: 2274452 - RNA, 19 nt, Artificial Sequence
  Description of Artificial Sequence: Synthetic oligonucleotide
  Sense strand starting at position 336 of SEQ ID NO: 1884554
acagcuuauccagaaugcu

SEQ ID NO: 2274453 - RNA, 19 nt, Artificial Sequence
  Description of Artificial Sequence: Synthetic oligonucleotide
  Antisense strand to SEQ ID NO: 2274452
agcauucuggauaagcugu

SEQ ID NO: 2274454 - RNA, 19 nt, Artificial Sequence
  Description of Artificial Sequence: Synthetic oligonucleotide
  Sense strand starting at position 528 of SEQ ID NO: 1884554
gcagguacucaguaagauu

SEQ ID NO: 2274455 - RNA, 19 nt, Artificial Sequence
  Description of Artificial Sequence: Synthetic oligonucleotide
  Antisense strand to SEQ ID NO: 2274454
aaucuuacugaguaccugc

SEQ ID NO: 2274456 - RNA, 19 nt, Artificial Sequence
  Description of Artificial Sequence: Synthetic oligonucleotide
  Sense strand starting at position 639 of SEQ ID NO: 1884554
cguaauuuacugugcuuag

SEQ ID NO: 2274457 - RNA, 19 nt, Artificial Sequence
  Description of Artificial Sequence: Synthetic oligonucleotide
  Antisense strand to SEQ ID NO: 2274456
cuaagcacaguaaauuacg

SEQ ID NO: 2274458 - RNA, 19 nt, Artificial Sequence
  Description of Artificial Sequence: Synthetic oligonucleotide
  Sense strand starting at position 753 of SEQ ID NO: 1884554
agaacuaugugauucccuu

SEQ ID NO: 2274459 - RNA, 19 nt, Artificial Sequence
  Description of Artificial Sequence: Synthetic oligonucleotide
  Antisense strand to SEQ ID NO: 2274458
aagggaaucacauaguucu

SEQ ID NO: 2274460 - RNA, 19 nt, Artificial Sequence
  Description of Artificial Sequence: Synthetic oligonucleotide
  Sense strand starting at position 757 of SEQ ID NO: 1884554
cuaugugauucccuuaaag

SEQ ID NO: 2274461 - RNA, 19 nt, Artificial Sequence
  Description of Artificial Sequence: Synthetic oligonucleotide
  Antisense strand to SEQ ID NO: 2274460
cuuuaagggaaucacauag

SEQ ID NO: 2274462 - RNA, 19 nt, Artificial Sequence
  Description of Artificial Sequence: Synthetic oligonucleotide
  Sense strand starting at position 759 of SEQ ID NO: 1884554
augugauucccuuaaagua

SEQ ID NO: 2274463 - RNA, 19 nt, Artificial Sequence
  Description of Artificial Sequence: Synthetic oligonucleotide
  Antisense strand to SEQ ID NO: 2274462
uacuuuaagggaaucacau

SEQ ID NO: 2274464 - RNA, 19 nt, Artificial Sequence
  Description of Artificial Sequence: Synthetic oligonucleotide
  Sense strand starting at position 785 of SEQ ID NO: 1884554
uuguauuacccagaccauc

SEQ ID NO: 2274465 - RNA, 19 nt, Artificial Sequence
  Description of Artificial Sequence: Synthetic oligonucleotide
  Antisense strand to SEQ ID NO: 2274464
gauggucuggguaauacaa

SEQ ID NO: 2274466 - RNA, 19 nt, Artificial Sequence
  Description of Artificial Sequence: Synthetic oligonucleotide
  Sense strand starting at position 1206 of SEQ ID NO: 1884554
auaaauguuuggucauaac

SEQ ID NO: 2274467 - RNA, 19 nt, Artificial Sequence
  Description of Artificial Sequence: Synthetic oligonucleotide
  Antisense strand to SEQ ID NO: 2274466
guuaugaccaaacauuuau

SEQ ID NO: 2274468 - RNA, 19 nt, Artificial Sequence
  Description of Artificial Sequence: Synthetic oligonucleotide
  Sense strand starting at position 1232 of SEQ ID NO: 1884554
auuggauguccucaauguu

SEQ ID NO: 2274469 - RNA, 19 nt, Artificial Sequence
  Description of Artificial Sequence: Synthetic oligonucleotide
  Antisense strand to SEQ ID NO: 2274468
aacauugaggacauccaau

SEQ ID NO: 2274470 - RNA, 19 nt, Artificial Sequence
  Description of Artificial Sequence: Synthetic oligonucleotide
  Sense strand starting at position 1378 of SEQ ID NO: 1884554
cuauaagagguauguacaa

SEQ ID NO: 2274471 - RNA, 19 nt, Artificial Sequence
  Description of Artificial Sequence: Synthetic oligonucleotide
  Antisense strand to SEQ ID NO: 2274470
uuguacauaccucuuauag

SEQ ID NO: 2274472 - RNA, 19 nt, Artificial Sequence
  Description of Artificial Sequence: Synthetic oligonucleotide
  Sense strand starting at position 1445 of SEQ ID NO: 1884554
aagaaaggcuucuuugaag

SEQ ID NO: 2274473 - RNA, 19 nt, Artificial Sequence
  Description of Artificial Sequence: Synthetic oligonucleotide
  Antisense strand to SEQ ID NO: 2274472
cuucaaagaagccuuucuu

SEQ ID NO: 2274474 - RNA, 19 nt, Artificial Sequence
  Description of Artificial Sequence: Synthetic oligonucleotide
  Sense strand starting at position 1788 of SEQ ID NO: 1884554
agcaauaggccaggaagua

SEQ ID NO: 2274475 - RNA, 19 nt, Artificial Sequence
  Description of Artificial Sequence: Synthetic oligonucleotide
  Antisense strand to SEQ ID NO: 2274474
uacuuccuggccuauugcu

SEQ ID NO: 2274476 - RNA, 19 nt, Artificial Sequence
  Description of Artificial Sequence: Synthetic oligonucleotide
  Sense strand starting at position 1789 of SEQ ID NO: 1884554
gcaauaggccaggaaguau

SEQ ID NO: 2274477 - RNA, 19 nt, Artificial Sequence
  Description of Artificial Sequence: Synthetic oligonucleotide
  Antisense strand to SEQ ID NO: 2274476
auacuuccuggccuauugc

SEQ ID NO: 2274478 - RNA, 19 nt, Artificial Sequence
  Description of Artificial Sequence: Synthetic oligonucleotide
  Sense strand starting at position 1852 of SEQ ID NO: 1884554
ggaacagauuaccuacugu

SEQ ID NO: 2274479 - RNA, 19 nt, Artificial Sequence
  Description of Artificial Sequence: Synthetic oligonucleotide
  Antisense strand to SEQ ID NO: 2274478
acaguagguaaucuguucc

SEQ ID NO: 2274480 - RNA, 19 nt, Artificial Sequence
  Description of Artificial Sequence: Synthetic oligonucleotide
  Sense strand starting at position 1900 of SEQ ID NO: 1884554
cucauaaaucuacgaagca

SEQ ID NO: 2274481 - RNA, 19 nt, Artificial Sequence
  Description of Artificial Sequence: Synthetic oligonucleotide
  Antisense strand to SEQ ID NO: 2274480
ugcuucguagauuuaugag

SEQ ID NO: 2274482 - RNA, 19 nt, Artificial Sequence
  Description of Artificial Sequence: Synthetic oligonucleotide
  Sense strand starting at position 1913 of SEQ ID NO: 1884554
gaagcauuugguuggugca

SEQ ID NO: 2274483 - RNA, 19 nt, Artificial Sequence
  Description of Artificial Sequence: Synthetic oligonucleotide
  Antisense strand to SEQ ID NO: 2274482
ugcaccaaccaaaugcuuc

SEQ ID NO: 2274484 - RNA, 19 nt, Artificial Sequence
  Description of Artificial Sequence: Synthetic oligonucleotide
  Sense strand starting at position 2046 of SEQ ID NO: 1884554
gugguugggccagaaugaa

SEQ ID NO: 2274485 - RNA, 19 nt, Artificial Sequence
  Description of Artificial Sequence: Synthetic oligonucleotide
  Antisense strand to SEQ ID NO: 2274484
uucauucuggcccaaccac

SEQ ID NO: 2274486 - RNA, 19 nt, Artificial Sequence
  Description of Artificial Sequence: Synthetic oligonucleotide
  Sense strand starting at position 2303 of SEQ ID NO: 1884554
gaaggaggucuacguaaag

SEQ ID NO: 2274487 - RNA, 19 nt, Artificial Sequence
  Description of Artificial Sequence: Synthetic oligonucleotide
  Antisense strand to SEQ ID NO: 2274486
cuuuacguagaccuccuuc

SEQ ID NO: 2274488 - RNA, 19 nt, Artificial Sequence
  Description of Artificial Sequence: Synthetic oligonucleotide
  Sense strand starting at position 2338 of SEQ ID NO: 1884554
ucuauugguggucauuaaa

SEQ ID NO: 2274489 - RNA, 19 nt, Artificial Sequence
  Description of Artificial Sequence: Synthetic oligonucleotide
  Antisense strand to SEQ ID NO: 2274488
uuuaaugaccaccaauaga

SEQ ID NO: 2274490 - RNA, 19 nt, Artificial Sequence
  Description of Artificial Sequence: Synthetic oligonucleotide
  Sense strand starting at position 2449 of SEQ ID NO: 1884554
acacgaucuauuggauuga

SEQ ID NO: 2274491 - RNA, 19 nt, Artificial Sequence
  Description of Artificial Sequence: Synthetic oligonucleotide
  Antisense strand to SEQ ID NO: 2274490
ucaauccaauagaucgugu

SEQ ID NO: 2274492 - RNA, 19 nt, Artificial Sequence
  Description of Artificial Sequence: Synthetic oligonucleotide
  Sense strand starting at position 2490 of SEQ ID NO: 1884554
acugguuauggugaaguca

SEQ ID NO: 2274493 - RNA, 19 nt, Artificial Sequence
  Description of Artificial Sequence: Synthetic oligonucleotide
  Antisense strand to SEQ ID NO: 2274492
ugacuucaccauaaccagu

SEQ ID NO: 2274494 - RNA, 19 nt, Artificial Sequence
  Description of Artificial Sequence: Synthetic oligonucleotide
  Sense strand starting at position 2513 of SEQ ID NO: 1884554
cuugguuauagugaacuga

SEQ ID NO: 2274495 - RNA, 19 nt, Artificial Sequence
  Description of Artificial Sequence: Synthetic oligonucleotide
  Antisense strand to SEQ ID NO: 2274494
ucaguucacuauaaccaag

SEQ ID NO: 2274496 - RNA, 19 nt, Artificial Sequence
  Description of Artificial Sequence: Synthetic oligonucleotide
  Sense strand starting at position 2517 of SEQ ID NO: 1884554
guuauagugaacugaagaa

SEQ ID NO: 2274497 - RNA, 19 nt, Artificial Sequence
  Description of Artificial Sequence: Synthetic oligonucleotide
  Antisense strand to SEQ ID NO: 2274496
uucuucaguucacuauaac

SEQ ID NO: 2274498 - RNA, 19 nt, Artificial Sequence
  Description of Artificial Sequence: Synthetic oligonucleotide
  Sense strand starting at position 2746 of SEQ ID NO: 1884554
agauuagaaggauguguua

SEQ ID NO: 2274499 - RNA, 19 nt, Artificial Sequence
  Description of Artificial Sequence: Synthetic oligonucleotide
  Antisense strand to SEQ ID NO: 2274498
uaacacauccuucuaaucu

SEQ ID NO: 2274500 - RNA, 19 nt, Artificial Sequence
  Description of Artificial Sequence: Synthetic oligonucleotide
  Sense strand starting at position 2838 of SEQ ID NO: 1884554
ggcugcaaucuugaugaua

SEQ ID NO: 2274501 - RNA, 19 nt, Artificial Sequence
  Description of Artificial Sequence: Synthetic oligonucleotide
  Antisense strand to SEQ ID NO: 2274500
uaucaucaagauugcagcc

SEQ ID NO: 2274502 - RNA, 19 nt, Artificial Sequence
  Description of Artificial Sequence: Synthetic oligonucleotide
  Sense strand starting at position 3166 of SEQ ID NO: 1884554
ccauguaaacuguacauua

SEQ ID NO: 2274503 - RNA, 19 nt, Artificial Sequence
  Description of Artificial Sequence: Synthetic oligonucleotide
  Antisense strand to SEQ ID NO: 2274502
uaauguacaguuuacaugg

SEQ ID NO: 2274504 - RNA, 19 nt, Artificial Sequence
  Description of Artificial Sequence: Synthetic oligonucleotide
  Sense strand starting at position 3168 of SEQ ID NO: 1884554
auguaaacuguacauuacu

SEQ ID NO: 2274505 - RNA, 19 nt, Artificial Sequence
  Description of Artificial Sequence: Synthetic oligonucleotide
  Antisense strand to SEQ ID NO: 2274504
aguaauguacaguuuacau

SEQ ID NO: 2274506 - RNA, 19 nt, Artificial Sequence
  Description of Artificial Sequence: Synthetic oligonucleotide
  Sense strand starting at position 3263 of SEQ ID NO: 1884554
gugagaauuacccagacgu

SEQ ID NO: 2274507 - RNA, 19 nt, Artificial Sequence
  Description of Artificial Sequence: Synthetic oligonucleotide
  Antisense strand to SEQ ID NO: 2274506
acgucuggguaauucucac

SEQ ID NO: 2274508 - RNA, 19 nt, Artificial Sequence
  Description of Artificial Sequence: Synthetic oligonucleotide
  Sense strand starting at position 3265 of SEQ ID NO: 1884554
gagaauuacccagacguuc

SEQ ID NO: 2274509 - RNA, 19 nt, Artificial Sequence
  Description of Artificial Sequence: Synthetic oligonucleotide
  Antisense strand to SEQ ID NO: 2274508
gaacgucuggguaauucuc

SEQ ID NO: 2274510 - RNA, 19 nt, Artificial Sequence
  Description of Artificial Sequence: Synthetic oligonucleotide
  Sense strand starting at position 3276 of SEQ ID NO: 1884554
agacguucccguucagcau

SEQ ID NO: 2274511 - RNA, 19 nt, Artificial Sequence
  Description of Artificial Sequence: Synthetic oligonucleotide
  Antisense strand to SEQ ID NO: 2274510
augcugaacgggaacgucu

SEQ ID NO: 2274512 - RNA, 19 nt, Artificial Sequence
  Description of Artificial Sequence: Synthetic oligonucleotide
  Sense strand starting at position 3660 of SEQ ID NO: 1884554
ccagaagauuuagggauca

SEQ ID NO: 2274513 - RNA, 19 nt, Artificial Sequence
  Description of Artificial Sequence: Synthetic oligonucleotide
  Antisense strand to SEQ ID NO: 2274512
ugaucccuaaaucuucugg

SEQ ID NO: 2274514 - RNA, 19 nt, Artificial Sequence
  Description of Artificial Sequence: Synthetic oligonucleotide
  Sense strand starting at position 3903 of SEQ ID NO: 1884554
gugcacagugauuagauau

SEQ ID NO: 2274515 - RNA, 19 nt, Artificial Sequence
  Description of Artificial Sequence: Synthetic oligonucleotide
  Antisense strand to SEQ ID NO: 2274514
auaucuaaucacugugcac

SEQ ID NO: 2274516 - RNA, 19 nt, Artificial Sequence
  Description of Artificial Sequence: Synthetic oligonucleotide
  Sense strand starting at position 3910 of SEQ ID NO: 1884554
gugauuagauaucuccaga

SEQ ID NO: 2274517 - RNA, 19 nt, Artificial Sequence
  Description of Artificial Sequence: Synthetic oligonucleotide
  Antisense strand to SEQ ID NO: 2274516
ucuggagauaucuaaucac

SEQ ID NO: 2274518 - RNA, 19 nt, Artificial Sequence
  Description of Artificial Sequence: Synthetic oligonucleotide
  Sense strand starting at position 343 of SEQ ID NO: 1884555
uggagauucgcauaagcau

SEQ ID NO: 2274519 - RNA, 19 nt, Artificial Sequence
  Description of Artificial Sequence: Synthetic oligonucleotide
  Antisense strand to SEQ ID NO: 2274518
augcuuaugcgaaucucca

SEQ ID NO: 2274520 - RNA, 19 nt, Artificial Sequence
  Description of Artificial Sequence: Synthetic oligonucleotide
  Sense strand starting at position 361 of SEQ ID NO: 1884555
uagugaagacucugagacu

SEQ ID NO: 2274521 - RNA, 19 nt, Artificial Sequence
  Description of Artificial Sequence: Synthetic oligonucleotide
  Antisense strand to SEQ ID NO: 2274520
agucucagagucuucacua

SEQ ID NO: 2274522 - RNA, 19 nt, Artificial Sequence
  Description of Artificial Sequence: Synthetic oligonucleotide
  Sense strand starting at position 469 of SEQ ID NO: 1884555
gaugguuauuugcuccuau

SEQ ID NO: 2274523 - RNA, 19 nt, Artificial Sequence
  Description of Artificial Sequence: Synthetic oligonucleotide
  Antisense strand to SEQ ID NO: 2274522
auaggagcaaauaaccauc

SEQ ID NO: 2274524 - RNA, 19 nt, Artificial Sequence
  Description of Artificial Sequence: Synthetic oligonucleotide
  Sense strand starting at position 470 of SEQ ID NO: 1884555
augguuauuugcuccuaug

SEQ ID NO: 2274525 - RNA, 19 nt, Artificial Sequence
  Description of Artificial Sequence: Synthetic oligonucleotide
  Antisense strand to SEQ ID NO: 2274524
cauaggagcaaauaaccau

SEQ ID NO: 2274526 - RNA, 19 nt, Artificial Sequence
  Description of Artificial Sequence: Synthetic oligonucleotide
  Sense strand starting at position 655 of SEQ ID NO: 1884555
uguagccucagggaugaua

SEQ ID NO: 2274527 - RNA, 19 nt, Artificial Sequence
  Description of Artificial Sequence: Synthetic oligonucleotide
  Antisense strand to SEQ ID NO: 2274526
uaucaucccugaggcuaca

SEQ ID NO: 2274528 - RNA, 19 nt, Artificial Sequence
  Description of Artificial Sequence: Synthetic oligonucleotide
  Sense strand starting at position 774 of SEQ ID NO: 1884555
auuagaugagucgaggagu

SEQ ID NO: 2274529 - RNA, 19 nt, Artificial Sequence
  Description of Artificial Sequence: Synthetic oligonucleotide
  Antisense strand to SEQ ID NO: 2274528
acuccucgacucaucuaau

SEQ ID NO: 2274530 - RNA, 19 nt, Artificial Sequence
  Description of Artificial Sequence: Synthetic oligonucleotide
  Sense strand starting at position 799 of SEQ ID NO: 1884555
agguaucugguagggagua

SEQ ID NO: 2274531 - RNA, 19 nt, Artificial Sequence
  Description of Artificial Sequence: Synthetic oligonucleotide
  Antisense strand to SEQ ID NO: 2274530
uacucccuaccagauaccu

SEQ ID NO: 2274532 - RNA, 19 nt, Artificial Sequence
  Description of Artificial Sequence: Synthetic oligonucleotide
  Sense strand starting at position 801 of SEQ ID NO: 1884555
guaucugguagggaguauu

SEQ ID NO: 2274533 - RNA, 19 nt, Artificial Sequence
  Description of Artificial Sequence: Synthetic oligonucleotide
  Antisense strand to SEQ ID NO: 2274532
aauacucccuaccagauac

SEQ ID NO: 2274534 - RNA, 19 nt, Artificial Sequence
  Description of Artificial Sequence: Synthetic oligonucleotide
  Sense strand starting at position 965 of SEQ ID NO: 1884555
auaagaggcuaucuuggaa

SEQ ID NO: 2274535 - RNA, 19 nt, Artificial Sequence
  Description of Artificial Sequence: Synthetic oligonucleotide
  Antisense strand to SEQ ID NO: 2274534
uuccaagauagccucuuau

SEQ ID NO: 2274536 - RNA, 19 nt, Artificial Sequence
  Description of Artificial Sequence: Synthetic oligonucleotide
  Sense strand starting at position 968 of SEQ ID NO: 1884555
agaggcuaucuuggaauau

SEQ ID NO: 2274537 - RNA, 19 nt, Artificial Sequence
  Description of Artificial Sequence: Synthetic oligonucleotide
  Antisense strand to SEQ ID NO: 2274536
auauuccaagauagccucu

SEQ ID NO: 2274538 - RNA, 19 nt, Artificial Sequence
  Description of Artificial Sequence: Synthetic oligonucleotide
  Sense strand starting at position 972 of SEQ ID NO: 1884555
gcuaucuuggaauaucauu

SEQ ID NO: 2274539 - RNA, 19 nt, Artificial Sequence
  Description of Artificial Sequence: Synthetic oligonucleotide
  Antisense strand to SEQ ID NO: 2274538
aaugauauuccaagauagc

SEQ ID NO: 2274540 - RNA, 19 nt, Artificial Sequence
  Description of Artificial Sequence: Synthetic oligonucleotide
  Sense strand starting at position 1059 of SEQ ID NO: 1884555
cauccauauguaugugaag

SEQ ID NO: 2274541 - RNA, 19 nt, Artificial Sequence
  Description of Artificial Sequence: Synthetic oligonucleotide
  Antisense strand to SEQ ID NO: 2274540
cuucacauacauauggaug

SEQ ID NO: 2274542 - RNA, 19 nt, Artificial Sequence
  Description of Artificial Sequence: Synthetic oligonucleotide
  Sense strand starting at position 1061 of SEQ ID NO: 1884555
uccauauguaugugaagga

SEQ ID NO: 2274543 - RNA, 19 nt, Artificial Sequence
  Description of Artificial Sequence: Synthetic oligonucleotide
  Antisense strand to SEQ ID NO: 2274542
uccuucacauacauaugga

SEQ ID NO: 2274544 - RNA, 19 nt, Artificial Sequence
  Description of Artificial Sequence: Synthetic oligonucleotide
  Sense strand starting at position 1065 of SEQ ID NO: 1884555
uauguaugugaaggagaac

SEQ ID NO: 2274545 - RNA, 19 nt, Artificial Sequence
  Description of Artificial Sequence: Synthetic oligonucleotide
  Antisense strand to SEQ ID NO: 2274544
guucuccuucacauacaua

SEQ ID NO: 2274546 - RNA, 19 nt, Artificial Sequence
  Description of Artificial Sequence: Synthetic oligonucleotide
  Sense strand starting at position 1161 of SEQ ID NO: 1884555
gugauaucgcuugauauag

SEQ ID NO: 2274547 - RNA, 19 nt, Artificial Sequence
  Description of Artificial Sequence: Synthetic oligonucleotide
  Antisense strand to SEQ ID NO: 2274546
cuauaucaagcgauaucac

SEQ ID NO: 2274548 - RNA, 19 nt, Artificial Sequence
  Description of Artificial Sequence: Synthetic oligonucleotide
  Sense strand starting at position 1389 of SEQ ID NO: 1884555
gaaagagagucaucucgag

SEQ ID NO: 2274549 - RNA, 19 nt, Artificial Sequence
  Description of Artificial Sequence: Synthetic oligonucleotide
  Antisense strand to SEQ ID NO: 2274548
cucgagaugacucucuuuc

SEQ ID NO: 2274550 - RNA, 19 nt, Artificial Sequence
  Description of Artificial Sequence: Synthetic oligonucleotide
  Sense strand starting at position 1393 of SEQ ID NO: 1884555
gagagucaucucgagguca

SEQ ID NO: 2274551 - RNA, 19 nt, Artificial Sequence
  Description of Artificial Sequence: Synthetic oligonucleotide
  Antisense strand to SEQ ID NO: 2274550
ugaccucgagaugacucuc

SEQ ID NO: 2274552 - RNA, 19 nt, Artificial Sequence
  Description of Artificial Sequence: Synthetic oligonucleotide
  Sense strand starting at position 1401 of SEQ ID NO: 1884555
ucucgaggucaccaauaau

SEQ ID NO: 2274553 - RNA, 19 nt, Artificial Sequence
  Description of Artificial Sequence: Synthetic oligonucleotide
  Antisense strand to SEQ ID NO: 2274552
auuauuggugaccucgaga

SEQ ID NO: 2274554 - RNA, 19 nt, Artificial Sequence
  Description of Artificial Sequence: Synthetic oligonucleotide
  Sense strand starting at position 1534 of SEQ ID NO: 1884555
cucgaucuacaguaggauu

SEQ ID NO: 2274555 - RNA, 19 nt, Artificial Sequence
  Description of Artificial Sequence: Synthetic oligonucleotide
  Antisense strand to SEQ ID NO: 2274554
aauccuacuguagaucgag

SEQ ID NO: 2274556 - RNA, 19 nt, Artificial Sequence
  Description of Artificial Sequence: Synthetic oligonucleotide
  Sense strand starting at position 1608 of SEQ ID NO: 1884555
uuaauuaugagaggcagca

SEQ ID NO: 2274557 - RNA, 19 nt, Artificial Sequence
  Description of Artificial Sequence: Synthetic oligonucleotide
  Antisense strand to SEQ ID NO: 2274556
ugcugccucucauaauuaa

SEQ ID NO: 2274558 - RNA, 19 nt, Artificial Sequence
  Description of Artificial Sequence: Synthetic oligonucleotide
  Sense strand starting at position 1924 of SEQ ID NO: 1884555
caguguuugugggugauuu

SEQ ID NO: 2274559 - RNA, 19 nt, Artificial Sequence
  Description of Artificial Sequence: Synthetic oligonucleotide
  Antisense strand to SEQ ID NO: 2274558
aaaucacccacaaacacug

SEQ ID NO: 2274560 - RNA, 19 nt, Artificial Sequence
  Description of Artificial Sequence: Synthetic oligonucleotide
  Sense strand starting at position 1925 of SEQ ID NO: 1884555
aguguuugugggugauuug

SEQ ID NO: 2274561 - RNA, 19 nt, Artificial Sequence
  Description of Artificial Sequence: Synthetic oligonucleotide
  Antisense strand to SEQ ID NO: 2274560
caaaucacccacaaacacu

SEQ ID NO: 2274562 - RNA, 19 nt, Artificial Sequence
  Description of Artificial Sequence: Synthetic oligonucleotide
  Sense strand starting at position 1928 of SEQ ID NO: 1884555
guuugugggugauuugauc

SEQ ID NO: 2274563 - RNA, 19 nt, Artificial Sequence
  Description of Artificial Sequence: Synthetic oligonucleotide
  Antisense strand to SEQ ID NO: 2274562
gaucaaaucacccacaaac

SEQ ID NO: 2274564 - RNA, 19 nt, Artificial Sequence
  Description of Artificial Sequence: Synthetic oligonucleotide
  Sense strand starting at position 1941 of SEQ ID NO: 1884555
uugaucugguacuccuuaa

SEQ ID NO: 2274565 - RNA, 19 nt, Artificial Sequence
  Description of Artificial Sequence: Synthetic oligonucleotide
  Antisense strand to SEQ ID NO: 2274564
uuaaggaguaccagaucaa

SEQ ID NO: 2274566 - RNA, 19 nt, Artificial Sequence
  Description of Artificial Sequence: Synthetic oligonucleotide
  Sense strand starting at position 2009 of SEQ ID NO: 1884555
cccacaugguucuuacaca

SEQ ID NO: 2274567 - RNA, 19 nt, Artificial Sequence
  Description of Artificial Sequence: Synthetic oligonucleotide
  Antisense strand to SEQ ID NO: 2274566
uguguaagaaccauguggg

SEQ ID NO: 2274568 - RNA, 19 nt, Artificial Sequence
  Description of Artificial Sequence: Synthetic oligonucleotide
  Sense strand starting at position 2103 of SEQ ID NO: 1884555
ccagcucuacaguaagaaa

SEQ ID NO: 2274569 - RNA, 19 nt, Artificial Sequence
  Description of Artificial Sequence: Synthetic oligonucleotide
  Antisense strand to SEQ ID NO: 2274568
uuucuuacuguagagcugg

SEQ ID NO: 2274570 - RNA, 19 nt, Artificial Sequence
  Description of Artificial Sequence: Synthetic oligonucleotide
  Sense strand starting at position 2203 of SEQ ID NO: 1884555
gagacuagauaccugucau

SEQ ID NO: 2274571 - RNA, 19 nt, Artificial Sequence
  Description of Artificial Sequence: Synthetic oligonucleotide
  Antisense strand to SEQ ID NO: 2274570
augacagguaucuagucuc

SEQ ID NO: 2274572 - RNA, 19 nt, Artificial Sequence
  Description of Artificial Sequence: Synthetic oligonucleotide
  Sense strand starting at position 2370 of SEQ ID NO: 1884555
gagagaaacucgcuggaga

SEQ ID NO: 2274573 - RNA, 19 nt, Artificial Sequence
  Description of Artificial Sequence: Synthetic oligonucleotide
  Antisense strand to SEQ ID NO: 2274572
ucuccagcgaguuucucuc

SEQ ID NO: 2274574 - RNA, 19 nt, Artificial Sequence
  Description of Artificial Sequence: Synthetic oligonucleotide
  Sense strand starting at position 2430 of SEQ ID NO: 1884555
uaacaucaagucugaggua

SEQ ID NO: 2274575 - RNA, 19 nt, Artificial Sequence
  Description of Artificial Sequence: Synthetic oligonucleotide
  Antisense strand to SEQ ID NO: 2274574
uaccucagacuugauguua

SEQ ID NO: 2274576 - RNA, 19 nt, Artificial Sequence
  Description of Artificial Sequence: Synthetic oligonucleotide
  Sense strand starting at position 2435 of SEQ ID NO: 1884555
ucaagucugagguagguau

SEQ ID NO: 2274577 - RNA, 19 nt, Artificial Sequence
  Description of Artificial Sequence: Synthetic oligonucleotide
  Antisense strand to SEQ ID NO: 2274576
auaccuaccucagacuuga

SEQ ID NO: 2274578 - RNA, 19 nt, Artificial Sequence
  Description of Artificial Sequence: Synthetic oligonucleotide
  Sense strand starting at position 2437 of SEQ ID NO: 1884555
aagucugagguagguauaa

SEQ ID NO: 2274579 - RNA, 19 nt, Artificial Sequence
  Description of Artificial Sequence: Synthetic oligonucleotide
  Antisense strand to SEQ ID NO: 2274578
uuauaccuaccucagacuu

SEQ ID NO: 2274580 - RNA, 19 nt, Artificial Sequence
  Description of Artificial Sequence: Synthetic oligonucleotide
  Sense strand starting at position 2680 of SEQ ID NO: 1884555
uucugauaggccgacuuau

SEQ ID NO: 2274581 - RNA, 19 nt, Artificial Sequence
  Description of Artificial Sequence: Synthetic oligonucleotide
  Antisense strand to SEQ ID NO: 2274580
auaagucggccuaucagaa

SEQ ID NO: 2274582 - RNA, 19 nt, Artificial Sequence
  Description of Artificial Sequence: Synthetic oligonucleotide
  Sense strand starting at position 2877 of SEQ ID NO: 1884555
ugccauuggccugugucau

SEQ ID NO: 2274583 - RNA, 19 nt, Artificial Sequence
  Description of Artificial Sequence: Synthetic oligonucleotide
  Antisense strand to SEQ ID NO: 2274582
augacacaggccaauggca

SEQ ID NO: 2274584 - RNA, 19 nt, Artificial Sequence
  Description of Artificial Sequence: Synthetic oligonucleotide
  Sense strand starting at position 2885 of SEQ ID NO: 1884555
gccugugucauccagaaag

SEQ ID NO: 2274585 - RNA, 19 nt, Artificial Sequence
  Description of Artificial Sequence: Synthetic oligonucleotide
  Antisense strand to SEQ ID NO: 2274584
cuuucuggaugacacaggc

SEQ ID NO: 2274586 - RNA, 19 nt, Artificial Sequence
  Description of Artificial Sequence: Synthetic oligonucleotide
  Sense strand starting at position 2887 of SEQ ID NO: 1884555
cugugucauccagaaagac

SEQ ID NO: 2274587 - RNA, 19 nt, Artificial Sequence
  Description of Artificial Sequence: Synthetic oligonucleotide
  Antisense strand to SEQ ID NO: 2274586
gucuuucuggaugacacag

SEQ ID NO: 2274588 - RNA, 19 nt, Artificial Sequence
  Description of Artificial Sequence: Synthetic oligonucleotide
  Sense strand starting at position 3076 of SEQ ID NO: 1884555
cgccauuguacagaugaag

SEQ ID NO: 2274589 - RNA, 19 nt, Artificial Sequence
  Description of Artificial Sequence: Synthetic oligonucleotide
  Antisense strand to SEQ ID NO: 2274588
cuucaucuguacaauggcg

SEQ ID NO: 2274590 - RNA, 19 nt, Artificial Sequence
  Description of Artificial Sequence: Synthetic oligonucleotide
  Sense strand starting at position 3510 of SEQ ID NO: 1884555
agaagagucucuuugguug

SEQ ID NO: 2274591 - RNA, 19 nt, Artificial Sequence
  Description of Artificial Sequence: Synthetic oligonucleotide
  Antisense strand to SEQ ID NO: 2274590
caaccaaagagacucuucu

SEQ ID NO: 2274592 - RNA, 19 nt, Artificial Sequence
  Description of Artificial Sequence: Synthetic oligonucleotide
  Sense strand starting at position 3702 of SEQ ID NO: 1884555
ccacuaaccugggugugaa

SEQ ID NO: 2274593 - RNA, 19 nt, Artificial Sequence
  Description of Artificial Sequence: Synthetic oligonucleotide
  Antisense strand to SEQ ID NO: 2274592
uucacacccagguuagugg

SEQ ID NO: 2274594 - RNA, 19 nt, Artificial Sequence
  Description of Artificial Sequence: Synthetic oligonucleotide
  Sense strand starting at position 3718 of SEQ ID NO: 1884555
gaagguucuuucucagaug

SEQ ID NO: 2274595 - RNA, 19 nt, Artificial Sequence
  Description of Artificial Sequence: Synthetic oligonucleotide
  Antisense strand to SEQ ID NO: 2274594
caucugagaaagaaccuuc

SEQ ID NO: 2274596 - RNA, 19 nt, Artificial Sequence
  Description of Artificial Sequence: Synthetic oligonucleotide
  Sense strand starting at position 3763 of SEQ ID NO: 1884555
cugguagaagcuugauuaa

SEQ ID NO: 2274597 - RNA, 19 nt, Artificial Sequence
  Description of Artificial Sequence: Synthetic oligonucleotide
  Antisense strand to SEQ ID NO: 2274596
uuaaucaagcuucuaccag

SEQ ID NO: 2274598 - RNA, 19 nt, Artificial Sequence
  Description of Artificial Sequence: Synthetic oligonucleotide
  Sense strand starting at position 70 of SEQ ID NO: 1884556
gagacacaugcaugacuga

SEQ ID NO: 2274599 - RNA, 19 nt, Artificial Sequence
  Description of Artificial Sequence: Synthetic oligonucleotide
  Antisense strand to SEQ ID NO: 2274598
ucagucaugcaugugucuc

SEQ ID NO: 2274600 - RNA, 19 nt, Artificial Sequence
  Description of Artificial Sequence: Synthetic oligonucleotide
  Sense strand starting at position 197 of SEQ ID NO: 1884556
aggguccuuaugggaaauu

SEQ ID NO: 2274601 - RNA, 19 nt, Artificial Sequence
  Description of Artificial Sequence: Synthetic oligonucleotide
  Antisense strand to SEQ ID NO: 2274600
aauuucccauaaggacccu

SEQ ID NO: 2274602 - RNA, 19 nt, Artificial Sequence
  Description of Artificial Sequence: Synthetic oligonucleotide
  Sense strand starting at position 276 of SEQ ID NO: 1884556
gaagaauucugucuagguu

SEQ ID NO: 2274603 - RNA, 19 nt, Artificial Sequence
  Description of Artificial Sequence: Synthetic oligonucleotide
  Antisense strand to SEQ ID NO: 2274602
aaccuagacagaauucuuc

SEQ ID NO: 2274604 - RNA, 19 nt, Artificial Sequence
  Description of Artificial Sequence: Synthetic oligonucleotide
  Sense strand starting at position 277 of SEQ ID NO: 1884556
aagaauucugucuagguua

SEQ ID NO: 2274605 - RNA, 19 nt, Artificial Sequence
  Description of Artificial Sequence: Synthetic oligonucleotide
  Antisense strand to SEQ ID NO: 2274604
uaaccuagacagaauucuu

SEQ ID NO: 2274606 - RNA, 19 nt, Artificial Sequence
  Description of Artificial Sequence: Synthetic oligonucleotide
  Sense strand starting at position 292 of SEQ ID NO: 1884556
guuaaugcuauugauggua

SEQ ID NO: 2274607 - RNA, 19 nt, Artificial Sequence
  Description of Artificial Sequence: Synthetic oligonucleotide
  Antisense strand to SEQ ID NO: 2274606
uaccaucaauagcauuaac

SEQ ID NO: 2274608 - RNA, 19 nt, Artificial Sequence
  Description of Artificial Sequence: Synthetic oligonucleotide
  Sense strand starting at position 304 of SEQ ID NO: 1884556
gaugguaucaggcaacagu

SEQ ID NO: 2274609 - RNA, 19 nt, Artificial Sequence
  Description of Artificial Sequence: Synthetic oligonucleotide
  Antisense strand to SEQ ID NO: 2274608
acuguugccugauaccauc

SEQ ID NO: 2274610 - RNA, 19 nt, Artificial Sequence
  Description of Artificial Sequence: Synthetic oligonucleotide
  Sense strand starting at position 322 of SEQ ID NO: 1884556
ucgaaccauucuccagaga

SEQ ID NO: 2274611 - RNA, 19 nt, Artificial Sequence
  Description of Artificial Sequence: Synthetic oligonucleotide
  Antisense strand to SEQ ID NO: 2274610
ucucuggagaaugguucga

SEQ ID NO: 2274612 - RNA, 19 nt, Artificial Sequence
  Description of Artificial Sequence: Synthetic oligonucleotide
  Sense strand starting at position 361 of SEQ ID NO: 1884556
aagaguuaggagugacuga

SEQ ID NO: 2274613 - RNA, 19 nt, Artificial Sequence
  Description of Artificial Sequence: Synthetic oligonucleotide
  Antisense strand to SEQ ID NO: 2274612
ucagucacuccuaacucuu

SEQ ID NO: 2274614 - RNA, 19 nt, Artificial Sequence
  Description of Artificial Sequence: Synthetic oligonucleotide
  Sense strand starting at position 435 of SEQ ID NO: 1884556
aaagauggccagggcuaua

SEQ ID NO: 2274615 - RNA, 19 nt, Artificial Sequence
  Description of Artificial Sequence: Synthetic oligonucleotide
  Antisense strand to SEQ ID NO: 2274614
uauagcccuggccaucuuu

SEQ ID NO: 2274616 - RNA, 19 nt, Artificial Sequence
  Description of Artificial Sequence: Synthetic oligonucleotide
  Sense strand starting at position 438 of SEQ ID NO: 1884556
gauggccagggcuauaaau

SEQ ID NO: 2274617 - RNA, 19 nt, Artificial Sequence
  Description of Artificial Sequence: Synthetic oligonucleotide
  Antisense strand to SEQ ID NO: 2274616
auuuauagcccuggccauc

SEQ ID NO: 2274618 - RNA, 19 nt, Artificial Sequence
  Description of Artificial Sequence: Synthetic oligonucleotide
  Sense strand starting at position 451 of SEQ ID NO: 1884556
auaaauguggcacaucaua

SEQ ID NO: 2274619 - RNA, 19 nt, Artificial Sequence
  Description of Artificial Sequence: Synthetic oligonucleotide
  Antisense strand to SEQ ID NO: 2274618
uaugaugugccacauuuau

SEQ ID NO: 2274620 - RNA, 19 nt, Artificial Sequence
  Description of Artificial Sequence: Synthetic oligonucleotide
  Sense strand starting at position 612 of SEQ ID NO: 1884556
uagaaauucucucuugggu

SEQ ID NO: 2274621 - RNA, 19 nt, Artificial Sequence
  Description of Artificial Sequence: Synthetic oligonucleotide
  Antisense strand to SEQ ID NO: 2274620
acccaagagagaauuucua

SEQ ID NO: 2274622 - RNA, 19 nt, Artificial Sequence
  Description of Artificial Sequence: Synthetic oligonucleotide
  Sense strand starting at position 637 of SEQ ID NO: 1884556
cguuccugagaguaaagua

SEQ ID NO: 2274623 - RNA, 19 nt, Artificial Sequence
  Description of Artificial Sequence: Synthetic oligonucleotide
  Antisense strand to SEQ ID NO: 2274622
uacuuuacucucaggaacg

SEQ ID NO: 2274624 - RNA, 19 nt, Artificial Sequence
  Description of Artificial Sequence: Synthetic oligonucleotide
  Sense strand starting at position 713 of SEQ ID NO: 1884556
guguaauaacaguauuaca

SEQ ID NO: 2274625 - RNA, 19 nt, Artificial Sequence
  Description of Artificial Sequence: Synthetic oligonucleotide
  Antisense strand to SEQ ID NO: 2274624
uguaauacuguuauuacac

SEQ ID NO: 2274626 - RNA, 19 nt, Artificial Sequence
  Description of Artificial Sequence: Synthetic oligonucleotide
  Sense strand starting at position 777 of SEQ ID NO: 1884556
auaucauagggcuguagau

SEQ ID NO: 2274627 - RNA, 19 nt, Artificial Sequence
  Description of Artificial Sequence: Synthetic oligonucleotide
  Antisense strand to SEQ ID NO: 2274626
aucuacagcccuaugauau

SEQ ID NO: 2274628 - RNA, 19 nt, Artificial Sequence
  Description of Artificial Sequence: Synthetic oligonucleotide
  Sense strand starting at position 779 of SEQ ID NO: 1884556
aucauagggcuguagauau

SEQ ID NO: 2274629 - RNA, 19 nt, Artificial Sequence
  Description of Artificial Sequence: Synthetic oligonucleotide
  Antisense strand to SEQ ID NO: 2274628
auaucuacagcccuaugau

SEQ ID NO: 2274630 - RNA, 19 nt, Artificial Sequence
  Description of Artificial Sequence: Synthetic oligonucleotide
  Sense strand starting at position 911 of SEQ ID NO: 1884556
cuguuuaggccugaacuua

SEQ ID NO: 2274631 - RNA, 19 nt, Artificial Sequence
  Description of Artificial Sequence: Synthetic oligonucleotide
  Antisense strand to SEQ ID NO: 2274630
uaaguucaggccuaaacag

SEQ ID NO: 2274632 - RNA, 19 nt, Artificial Sequence
  Description of Artificial Sequence: Synthetic oligonucleotide
  Sense strand starting at position 1455 of SEQ ID NO: 1884556
cucugagaauuugggagaa

SEQ ID NO: 2274633 - RNA, 19 nt, Artificial Sequence
  Description of Artificial Sequence: Synthetic oligonucleotide
  Antisense strand to SEQ ID NO: 2274632
uucucccaaauucucagag

SEQ ID NO: 2274634 - RNA, 19 nt, Artificial Sequence
  Description of Artificial Sequence: Synthetic oligonucleotide
  Sense strand starting at position 1457 of SEQ ID NO: 1884556
cugagaauuugggagaacu

SEQ ID NO: 2274635 - RNA, 19 nt, Artificial Sequence
  Description of Artificial Sequence: Synthetic oligonucleotide
  Antisense strand to SEQ ID NO: 2274634
aguucucccaaauucucag

SEQ ID NO: 2274636 - RNA, 19 nt, Artificial Sequence
  Description of Artificial Sequence: Synthetic oligonucleotide
  Sense strand starting at position 1639 of SEQ ID NO: 1884556
aggaauuguccuggacuac

SEQ ID NO: 2274637 - RNA, 19 nt, Artificial Sequence
  Description of Artificial Sequence: Synthetic oligonucleotide
  Antisense strand to SEQ ID NO: 2274636
guaguccaggacaauuccu

SEQ ID NO: 2274638 - RNA, 19 nt, Artificial Sequence
  Description of Artificial Sequence: Synthetic oligonucleotide
  Sense strand starting at position 1894 of SEQ ID NO: 1884556
accuuugguccaugaugaa

SEQ ID NO: 2274639 - RNA, 19 nt, Artificial Sequence
  Description of Artificial Sequence: Synthetic oligonucleotide
  Antisense strand to SEQ ID NO: 2274638
uucaucauggaccaaaggu

SEQ ID NO: 2274640 - RNA, 19 nt, Artificial Sequence
  Description of Artificial Sequence: Synthetic oligonucleotide
  Sense strand starting at position 1998 of SEQ ID NO: 1884556
cuaggaaguugauuaugau

SEQ ID NO: 2274641 - RNA, 19 nt, Artificial Sequence
  Description of Artificial Sequence: Synthetic oligonucleotide
  Antisense strand to SEQ ID NO: 2274640
aucauaaucaacuuccuag

SEQ ID NO: 2274642 - RNA, 19 nt, Artificial Sequence
  Description of Artificial Sequence: Synthetic oligonucleotide
  Sense strand starting at position 2004 of SEQ ID NO: 1884556
aguugauuaugauuguuag

SEQ ID NO: 2274643 - RNA, 19 nt, Artificial Sequence
  Description of Artificial Sequence: Synthetic oligonucleotide
  Antisense strand to SEQ ID NO: 2274642
cuaacaaucauaaucaacu

SEQ ID NO: 2274644 - RNA, 19 nt, Artificial Sequence
  Description of Artificial Sequence: Synthetic oligonucleotide
  Sense strand starting at position 2034 of SEQ ID NO: 1884556
aguugacuuacggacauua

SEQ ID NO: 2274645 - RNA, 19 nt, Artificial Sequence
  Description of Artificial Sequence: Synthetic oligonucleotide
  Antisense strand to SEQ ID NO: 2274644
uaauguccguaagucaacu

SEQ ID NO: 2274646 - RNA, 19 nt, Artificial Sequence
  Description of Artificial Sequence: Synthetic oligonucleotide
  Sense strand starting at position 2054 of SEQ ID NO: 1884556
gguuucuaaguguaaacaa

SEQ ID NO: 2274647 - RNA, 19 nt, Artificial Sequence
  Description of Artificial Sequence: Synthetic oligonucleotide
  Antisense strand to SEQ ID NO: 2274646
uuguuuacacuuagaaacc

SEQ ID NO: 2274648 - RNA, 19 nt, Artificial Sequence
  Description of Artificial Sequence: Synthetic oligonucleotide
  Sense strand starting at position 2133 of SEQ ID NO: 1884556
uggucugacuucuccagaa

SEQ ID NO: 2274649 - RNA, 19 nt, Artificial Sequence
  Description of Artificial Sequence: Synthetic oligonucleotide
  Antisense strand to SEQ ID NO: 2274648
uucuggagaagucagacca

SEQ ID NO: 2274650 - RNA, 19 nt, Artificial Sequence
  Description of Artificial Sequence: Synthetic oligonucleotide
  Sense strand starting at position 2213 of SEQ ID NO: 1884556
ccgagaauccagcauuaag

SEQ ID NO: 2274651 - RNA, 19 nt, Artificial Sequence
  Description of Artificial Sequence: Synthetic oligonucleotide
  Antisense strand to SEQ ID NO: 2274650
cuuaaugcuggauucucgg

SEQ ID NO: 2274652 - RNA, 19 nt, Artificial Sequence
  Description of Artificial Sequence: Synthetic oligonucleotide
  Sense strand starting at position 2230 of SEQ ID NO: 1884556
aggugaugaggccaugcau

SEQ ID NO: 2274653 - RNA, 19 nt, Artificial Sequence
  Description of Artificial Sequence: Synthetic oligonucleotide
  Antisense strand to SEQ ID NO: 2274652
augcauggccucaucaccu

SEQ ID NO: 2274654 - RNA, 19 nt, Artificial Sequence
  Description of Artificial Sequence: Synthetic oligonucleotide
  Sense strand starting at position 2298 of SEQ ID NO: 1884556
ugaaacagcuauccagaca

SEQ ID NO: 2274655 - RNA, 19 nt, Artificial Sequence
  Description of Artificial Sequence: Synthetic oligonucleotide
  Antisense strand to SEQ ID NO: 2274654
ugucuggauagcuguuuca

SEQ ID NO: 2274656 - RNA, 19 nt, Artificial Sequence
  Description of Artificial Sequence: Synthetic oligonucleotide
  Sense strand starting at position 2356 of SEQ ID NO: 1884556
aaagaaauguggguggcau

SEQ ID NO: 2274657 - RNA, 19 nt, Artificial Sequence
  Description of Artificial Sequence: Synthetic oligonucleotide
  Antisense strand to SEQ ID NO: 2274656
augccacccacauuucuuu

SEQ ID NO: 2274658 - RNA, 19 nt, Artificial Sequence
  Description of Artificial Sequence: Synthetic oligonucleotide
  Sense strand starting at position 2357 of SEQ ID NO: 1884556
aagaaauguggguggcaua

SEQ ID NO: 2274659 - RNA, 19 nt, Artificial Sequence
  Description of Artificial Sequence: Synthetic oligonucleotide
  Antisense strand to SEQ ID NO: 2274658
uaugccacccacauuucuu

SEQ ID NO: 2274660 - RNA, 19 nt, Artificial Sequence
  Description of Artificial Sequence: Synthetic oligonucleotide
  Sense strand starting at position 3152 of SEQ ID NO: 1884556
uguaauuucuggcuaguug

SEQ ID NO: 2274661 - RNA, 19 nt, Artificial Sequence
  Description of Artificial Sequence: Synthetic oligonucleotide
  Antisense strand to SEQ ID NO: 2274660
caacuagccagaaauuaca

SEQ ID NO: 2274662 - RNA, 19 nt, Artificial Sequence
  Description of Artificial Sequence: Synthetic oligonucleotide
  Sense strand starting at position 3224 of SEQ ID NO: 1884556
gagugagaaugucuuuauu

SEQ ID NO: 2274663 - RNA, 19 nt, Artificial Sequence
  Description of Artificial Sequence: Synthetic oligonucleotide
  Antisense strand to SEQ ID NO: 2274662
aauaaagacauucucacuc

SEQ ID NO: 2274664 - RNA, 19 nt, Artificial Sequence
  Description of Artificial Sequence: Synthetic oligonucleotide
  Sense strand starting at position 3227 of SEQ ID NO: 1884556
ugagaaugucuuuauuauc

SEQ ID NO: 2274665 - RNA, 19 nt, Artificial Sequence
  Description of Artificial Sequence: Synthetic oligonucleotide
  Antisense strand to SEQ ID NO: 2274664
gauaauaaagacauucuca

SEQ ID NO: 2274666 - RNA, 19 nt, Artificial Sequence
  Description of Artificial Sequence: Synthetic oligonucleotide
  Sense strand starting at position 3329 of SEQ ID NO: 1884556
uggaauacagagugguauu

SEQ ID NO: 2274667 - RNA, 19 nt, Artificial Sequence
  Description of Artificial Sequence: Synthetic oligonucleotide
  Antisense strand to SEQ ID NO: 2274666
aauaccacucuguauucca

SEQ ID NO: 2274668 - RNA, 19 nt, Artificial Sequence
  Description of Artificial Sequence: Synthetic oligonucleotide
  Sense strand starting at position 3407 of SEQ ID NO: 1884556
ccauacuuaucuguggaaa

SEQ ID NO: 2274669 - RNA, 19 nt, Artificial Sequence
  Description of Artificial Sequence: Synthetic oligonucleotide
  Antisense strand to SEQ ID NO: 2274668
uuuccacagauaaguaugg

SEQ ID NO: 2274670 - RNA, 19 nt, Artificial Sequence
  Description of Artificial Sequence: Synthetic oligonucleotide
  Sense strand starting at position 3408 of SEQ ID NO: 1884556
cauacuuaucuguggaaag

SEQ ID NO: 2274671 - RNA, 19 nt, Artificial Sequence
  Description of Artificial Sequence: Synthetic oligonucleotide
  Antisense strand to SEQ ID NO: 2274670
cuuuccacagauaaguaug

SEQ ID NO: 2274672 - RNA, 19 nt, Artificial Sequence
  Description of Artificial Sequence: Synthetic oligonucleotide
  Sense strand starting at position 3697 of SEQ ID NO: 1884556
gaaaucauguugccaauga

SEQ ID NO: 2274673 - RNA, 19 nt, Artificial Sequence
  Description of Artificial Sequence: Synthetic oligonucleotide
  Antisense strand to SEQ ID NO: 2274672
ucauuggcaacaugauuuc

SEQ ID NO: 2274674 - RNA, 19 nt, Artificial Sequence
  Description of Artificial Sequence: Synthetic oligonucleotide
  Sense strand starting at position 3818 of SEQ ID NO: 1884556
gaucaauauggccggacau

SEQ ID NO: 2274675 - RNA, 19 nt, Artificial Sequence
  Description of Artificial Sequence: Synthetic oligonucleotide
  Antisense strand to SEQ ID NO: 2274674
auguccggccauauugauc

SEQ ID NO: 2274676 - RNA, 19 nt, Artificial Sequence
  Description of Artificial Sequence: Synthetic oligonucleotide
  Sense strand starting at position 3857 of SEQ ID NO: 1884556
gucucaggaccucaucgau

SEQ ID NO: 2274677 - RNA, 19 nt, Artificial Sequence
  Description of Artificial Sequence: Synthetic oligonucleotide
  Antisense strand to SEQ ID NO: 2274676
aucgaugagguccugagac

SEQ ID NO: 2274678 - RNA, 19 nt, Artificial Sequence
  Description of Artificial Sequence: Synthetic oligonucleotide
  Sense strand starting at position 15 of SEQ ID NO: 1884557
aggagaauugcuuggucuc

SEQ ID NO: 2274679 - RNA, 19 nt, Artificial Sequence
  Description of Artificial Sequence: Synthetic oligonucleotide
  Antisense strand to SEQ ID NO: 2274678
gagaccaagcaauucuccu

SEQ ID NO: 2274680 - RNA, 19 nt, Artificial Sequence
  Description of Artificial Sequence: Synthetic oligonucleotide
  Sense strand starting at position 16 of SEQ ID NO: 1884557
ggagaauugcuuggucuca

SEQ ID NO: 2274681 - RNA, 19 nt, Artificial Sequence
  Description of Artificial Sequence: Synthetic oligonucleotide
  Antisense strand to SEQ ID NO: 2274680
ugagaccaagcaauucucc

SEQ ID NO: 2274682 - RNA, 19 nt, Artificial Sequence
  Description of Artificial Sequence: Synthetic oligonucleotide
  Sense strand starting at position 17 of SEQ ID NO: 1884557
gagaauugcuuggucucac

SEQ ID NO: 2274683 - RNA, 19 nt, Artificial Sequence
  Description of Artificial Sequence: Synthetic oligonucleotide
  Antisense strand to SEQ ID NO: 2274682
gugagaccaagcaauucuc

SEQ ID NO: 2274684 - RNA, 19 nt, Artificial Sequence
  Description of Artificial Sequence: Synthetic oligonucleotide
  Sense strand starting at position 18 of SEQ ID NO: 1884557
agaauugcuuggucucaca

SEQ ID NO: 2274685 - RNA, 19 nt, Artificial Sequence
  Description of Artificial Sequence: Synthetic oligonucleotide
  Antisense strand to SEQ ID NO: 2274684
ugugagaccaagcaauucu

SEQ ID NO: 2274686 - RNA, 19 nt, Artificial Sequence
  Description of Artificial Sequence: Synthetic oligonucleotide
  Sense strand starting at position 187 of SEQ ID NO: 1884557
ggacuuucuuacucauugu

SEQ ID NO: 2274687 - RNA, 19 nt, Artificial Sequence
  Description of Artificial Sequence: Synthetic oligonucleotide
  Antisense strand to SEQ ID NO: 2274686
acaaugaguaagaaagucc

SEQ ID NO: 2274688 - RNA, 19 nt, Artificial Sequence
  Description of Artificial Sequence: Synthetic oligonucleotide
  Sense strand starting at position 235 of SEQ ID NO: 1884557
gaucaauucccaugggagu

SEQ ID NO: 2274689 - RNA, 19 nt, Artificial Sequence
  Description of Artificial Sequence: Synthetic oligonucleotide
  Antisense strand to SEQ ID NO: 2274688
acucccaugggaauugauc

SEQ ID NO: 2274690 - RNA, 19 nt, Artificial Sequence
  Description of Artificial Sequence: Synthetic oligonucleotide
  Sense strand starting at position 236 of SEQ ID NO: 1884557
aucaauucccaugggaguu

SEQ ID NO: 2274691 - RNA, 19 nt, Artificial Sequence
  Description of Artificial Sequence: Synthetic oligonucleotide
  Antisense strand to SEQ ID NO: 2274690
aacucccaugggaauugau

SEQ ID NO: 2274692 - RNA, 19 nt, Artificial Sequence
  Description of Artificial Sequence: Synthetic oligonucleotide
  Sense strand starting at position 303 of SEQ ID NO: 1884557
ccaacauacuugucaaggu

SEQ ID NO: 2274693 - RNA, 19 nt, Artificial Sequence
  Description of Artificial Sequence: Synthetic oligonucleotide
  Antisense strand to SEQ ID NO: 2274692
accuugacaaguauguugg

SEQ ID NO: 2274694 - RNA, 19 nt, Artificial Sequence
  Description of Artificial Sequence: Synthetic oligonucleotide
  Sense strand starting at position 338 of SEQ ID NO: 1884557
gagggauacucagagauga

SEQ ID NO: 2274695 - RNA, 19 nt, Artificial Sequence
  Description of Artificial Sequence: Synthetic oligonucleotide
  Antisense strand to SEQ ID NO: 2274694
ucaucucugaguaucccuc

SEQ ID NO: 2274696 - RNA, 19 nt, Artificial Sequence
  Description of Artificial Sequence: Synthetic oligonucleotide
  Sense strand starting at position 437 of SEQ ID NO: 1884557
gcagcaggcugaguaaaua

SEQ ID NO: 2274697 - RNA, 19 nt, Artificial Sequence
  Description of Artificial Sequence: Synthetic oligonucleotide
  Antisense strand to SEQ ID NO: 2274696
uauuuacucagccugcugc

SEQ ID NO: 2274698 - RNA, 19 nt, Artificial Sequence
  Description of Artificial Sequence: Synthetic oligonucleotide
  Sense strand starting at position 514 of SEQ ID NO: 1884557
caggcaacuugugugauca

SEQ ID NO: 2274699 - RNA, 19 nt, Artificial Sequence
  Description of Artificial Sequence: Synthetic oligonucleotide
  Antisense strand to SEQ ID NO: 2274698
ugaucacacaaguugccug

SEQ ID NO: 2274700 - RNA, 19 nt, Artificial Sequence
  Description of Artificial Sequence: Synthetic oligonucleotide
  Sense strand starting at position 515 of SEQ ID NO: 1884557
aggcaacuugugugaucau

SEQ ID NO: 2274701 - RNA, 19 nt, Artificial Sequence
  Description of Artificial Sequence: Synthetic oligonucleotide
  Antisense strand to SEQ ID NO: 2274700
augaucacacaaguugccu

SEQ ID NO: 2274702 - RNA, 19 nt, Artificial Sequence
  Description of Artificial Sequence: Synthetic oligonucleotide
  Sense strand starting at position 522 of SEQ ID NO: 1884557
uugugugaucauggccaca

SEQ ID NO: 2274703 - RNA, 19 nt, Artificial Sequence
  Description of Artificial Sequence: Synthetic oligonucleotide
  Antisense strand to SEQ ID NO: 2274702
uguggccaugaucacacaa

SEQ ID NO: 2274704 - RNA, 19 nt, Artificial Sequence
  Description of Artificial Sequence: Synthetic oligonucleotide
  Sense strand starting at position 524 of SEQ ID NO: 1884557
gugugaucauggccacaac

SEQ ID NO: 2274705 - RNA, 19 nt, Artificial Sequence
  Description of Artificial Sequence: Synthetic oligonucleotide
  Antisense strand to SEQ ID NO: 2274704
guuguggccaugaucacac

SEQ ID NO: 2274706 - RNA, 19 nt, Artificial Sequence
  Description of Artificial Sequence: Synthetic oligonucleotide
  Sense strand starting at position 576 of SEQ ID NO: 1884557
gaguaauagcauuggccca

SEQ ID NO: 2274707 - RNA, 19 nt, Artificial Sequence
  Description of Artificial Sequence: Synthetic oligonucleotide
  Antisense strand to SEQ ID NO: 2274706
ugggccaaugcuauuacuc

SEQ ID NO: 2274708 - RNA, 19 nt, Artificial Sequence
  Description of Artificial Sequence: Synthetic oligonucleotide
  Sense strand starting at position 695 of SEQ ID NO: 1884557
ucaugacucuaguccagau

SEQ ID NO: 2274709 - RNA, 19 nt, Artificial Sequence
  Description of Artificial Sequence: Synthetic oligonucleotide
  Antisense strand to SEQ ID NO: 2274708
aucuggacuagagucauga

SEQ ID NO: 2274710 - RNA, 19 nt, Artificial Sequence
  Description of Artificial Sequence: Synthetic oligonucleotide
  Sense strand starting at position 781 of SEQ ID NO: 1884557
gcacacaucucuccagagu

SEQ ID NO: 2274711 - RNA, 19 nt, Artificial Sequence
  Description of Artificial Sequence: Synthetic oligonucleotide
  Antisense strand to SEQ ID NO: 2274710
acucuggagagaugugugc

SEQ ID NO: 2274712 - RNA, 19 nt, Artificial Sequence
  Description of Artificial Sequence: Synthetic oligonucleotide
  Sense strand starting at position 817 of SEQ ID NO: 1884557
cgaggaagguccuuggugu

SEQ ID NO: 2274713 - RNA, 19 nt, Artificial Sequence
  Description of Artificial Sequence: Synthetic oligonucleotide
  Antisense strand to SEQ ID NO: 2274712
acaccaaggaccuuccucg

SEQ ID NO: 2274714 - RNA, 19 nt, Artificial Sequence
  Description of Artificial Sequence: Synthetic oligonucleotide
  Sense strand starting at position 818 of SEQ ID NO: 1884557
gaggaagguccuuggugua

SEQ ID NO: 2274715 - RNA, 19 nt, Artificial Sequence
  Description of Artificial Sequence: Synthetic oligonucleotide
  Antisense strand to SEQ ID NO: 2274714
uacaccaaggaccuuccuc

SEQ ID NO: 2274716 - RNA, 19 nt, Artificial Sequence
  Description of Artificial Sequence: Synthetic oligonucleotide
  Sense strand starting at position 1008 of SEQ ID NO: 1884557
ucuccugaucagcauggau

SEQ ID NO: 2274717 - RNA, 19 nt, Artificial Sequence
  Description of Artificial Sequence: Synthetic oligonucleotide
  Antisense strand to SEQ ID NO: 2274716
auccaugcugaucaggaga

SEQ ID NO: 2274718 - RNA, 19 nt, Artificial Sequence
  Description of Artificial Sequence: Synthetic oligonucleotide
  Sense strand starting at position 1010 of SEQ ID NO: 1884557
uccugaucagcauggaugu

SEQ ID NO: 2274719 - RNA, 19 nt, Artificial Sequence
  Description of Artificial Sequence: Synthetic oligonucleotide
  Antisense strand to SEQ ID NO: 2274718
acauccaugcugaucagga

SEQ ID NO: 2274720 - RNA, 19 nt, Artificial Sequence
  Description of Artificial Sequence: Synthetic oligonucleotide
  Sense strand starting at position 1253 of SEQ ID NO: 1884557
auaaguggccacugcaaga

SEQ ID NO: 2274721 - RNA, 19 nt, Artificial Sequence
  Description of Artificial Sequence: Synthetic oligonucleotide
  Antisense strand to SEQ ID NO: 2274720
ucuugcaguggccacuuau

SEQ ID NO: 2274722 - RNA, 19 nt, Artificial Sequence
  Description of Artificial Sequence: Synthetic oligonucleotide
  Sense strand starting at position 1281 of SEQ ID NO: 1884557
guaggagcuucccuacagu

SEQ ID NO: 2274723 - RNA, 19 nt, Artificial Sequence
  Description of Artificial Sequence: Synthetic oligonucleotide
  Antisense strand to SEQ ID NO: 2274722
acuguagggaagcuccuac

SEQ ID NO: 2274724 - RNA, 19 nt, Artificial Sequence
  Description of Artificial Sequence: Synthetic oligonucleotide
  Sense strand starting at position 1432 of SEQ ID NO: 1884557
ugggcacacucaucuacau

SEQ ID NO: 2274725 - RNA, 19 nt, Artificial Sequence
  Description of Artificial Sequence: Synthetic oligonucleotide
  Antisense strand to SEQ ID NO: 2274724
auguagaugagugugccca

SEQ ID NO: 2274726 - RNA, 19 nt, Artificial Sequence
  Description of Artificial Sequence: Synthetic oligonucleotide
  Sense strand starting at position 1628 of SEQ ID NO: 1884557
ccggacacucuacgugaaa

SEQ ID NO: 2274727 - RNA, 19 nt, Artificial Sequence
  Description of Artificial Sequence: Synthetic oligonucleotide
  Antisense strand to SEQ ID NO: 2274726
uuucacguagaguguccgg

SEQ ID NO: 2274728 - RNA, 19 nt, Artificial Sequence
  Description of Artificial Sequence: Synthetic oligonucleotide
  Sense strand starting at position 1629 of SEQ ID NO: 1884557
cggacacucuacgugaaau

SEQ ID NO: 2274729 - RNA, 19 nt, Artificial Sequence
  Description of Artificial Sequence: Synthetic oligonucleotide
  Antisense strand to SEQ ID NO: 2274728
auuucacguagaguguccg

SEQ ID NO: 2274730 - RNA, 19 nt, Artificial Sequence
  Description of Artificial Sequence: Synthetic oligonucleotide
  Sense strand starting at position 1630 of SEQ ID NO: 1884557
ggacacucuacgugaaauu

SEQ ID NO: 2274731 - RNA, 19 nt, Artificial Sequence
  Description of Artificial Sequence: Synthetic oligonucleotide
  Antisense strand to SEQ ID NO: 2274730
aauuucacguagagugucc

SEQ ID NO: 2274732 - RNA, 19 nt, Artificial Sequence
  Description of Artificial Sequence: Synthetic oligonucleotide
  Sense strand starting at position 1631 of SEQ ID NO: 1884557
gacacucuacgugaaauua

SEQ ID NO: 2274733 - RNA, 19 nt, Artificial Sequence
  Description of Artificial Sequence: Synthetic oligonucleotide
  Antisense strand to SEQ ID NO: 2274732
uaauuucacguagaguguc

SEQ ID NO: 2274734 - RNA, 19 nt, Artificial Sequence
  Description of Artificial Sequence: Synthetic oligonucleotide
  Sense strand starting at position 2223 of SEQ ID NO: 1884557
uagaguauuuaugggaagu

SEQ ID NO: 2274735 - RNA, 19 nt, Artificial Sequence
  Description of Artificial Sequence: Synthetic oligonucleotide
  Antisense strand to SEQ ID NO: 2274734
acuucccauaaauacucua

SEQ ID NO: 2274736 - RNA, 19 nt, Artificial Sequence
  Description of Artificial Sequence: Synthetic oligonucleotide
  Sense strand starting at position 2225 of SEQ ID NO: 1884557
gaguauuuaugggaagucu

SEQ ID NO: 2274737 - RNA, 19 nt, Artificial Sequence
  Description of Artificial Sequence: Synthetic oligonucleotide
  Antisense strand to SEQ ID NO: 2274736
agacuucccauaaauacuc

SEQ ID NO: 2274738 - RNA, 19 nt, Artificial Sequence
  Description of Artificial Sequence: Synthetic oligonucleotide
  Sense strand starting at position 2462 of SEQ ID NO: 1884557
cagaguccucucuggaaac

SEQ ID NO: 2274739 - RNA, 19 nt, Artificial Sequence
  Description of Artificial Sequence: Synthetic oligonucleotide
  Antisense strand to SEQ ID NO: 2274738
guuuccagagaggacucug

SEQ ID NO: 2274740 - RNA, 19 nt, Artificial Sequence
  Description of Artificial Sequence: Synthetic oligonucleotide
  Sense strand starting at position 2479 of SEQ ID NO: 1884557
accaaaguucucugcugaa

SEQ ID NO: 2274741 - RNA, 19 nt, Artificial Sequence
  Description of Artificial Sequence: Synthetic oligonucleotide
  Antisense strand to SEQ ID NO: 2274740
uucagcagagaacuuuggu

SEQ ID NO: 2274742 - RNA, 19 nt, Artificial Sequence
  Description of Artificial Sequence: Synthetic oligonucleotide
  Sense strand starting at position 2521 of SEQ ID NO: 1884557
ggguaauucccagaucgga

SEQ ID NO: 2274743 - RNA, 19 nt, Artificial Sequence
  Description of Artificial Sequence: Synthetic oligonucleotide
  Antisense strand to SEQ ID NO: 2274742
uccgaucugggaauuaccc

SEQ ID NO: 2274744 - RNA, 19 nt, Artificial Sequence
  Description of Artificial Sequence: Synthetic oligonucleotide
  Sense strand starting at position 3531 of SEQ ID NO: 1884557
gcgccuguuccaguguguu

SEQ ID NO: 2274745 - RNA, 19 nt, Artificial Sequence
  Description of Artificial Sequence: Synthetic oligonucleotide
  Antisense strand to SEQ ID NO: 2274744
aacacacuggaacaggcgc

SEQ ID NO: 2274746 - RNA, 19 nt, Artificial Sequence
  Description of Artificial Sequence: Synthetic oligonucleotide
  Sense strand starting at position 3582 of SEQ ID NO: 1884557
acagcccuucuagauugaa

SEQ ID NO: 2274747 - RNA, 19 nt, Artificial Sequence
  Description of Artificial Sequence: Synthetic oligonucleotide
  Antisense strand to SEQ ID NO: 2274746
uucaaucuagaagggcugu

SEQ ID NO: 2274748 - RNA, 19 nt, Artificial Sequence
  Description of Artificial Sequence: Synthetic oligonucleotide
  Sense strand starting at position 3585 of SEQ ID NO: 1884557
gcccuucuagauugaaaua

SEQ ID NO: 2274749 - RNA, 19 nt, Artificial Sequence
  Description of Artificial Sequence: Synthetic oligonucleotide
  Antisense strand to SEQ ID NO: 2274748
uauuucaaucuagaagggc

SEQ ID NO: 2274750 - RNA, 19 nt, Artificial Sequence
  Description of Artificial Sequence: Synthetic oligonucleotide
  Sense strand starting at position 3623 of SEQ ID NO: 1884557
gaaaguguuccguauaguc

SEQ ID NO: 2274751 - RNA, 19 nt, Artificial Sequence
  Description of Artificial Sequence: Synthetic oligonucleotide
  Antisense strand to SEQ ID NO: 2274750
gacuauacggaacacuuuc

SEQ ID NO: 2274752 - RNA, 19 nt, Artificial Sequence
  Description of Artificial Sequence: Synthetic oligonucleotide
  Sense strand starting at position 3733 of SEQ ID NO: 1884557
agcuguuugaauggagaag

SEQ ID NO: 2274753 - RNA, 19 nt, Artificial Sequence
  Description of Artificial Sequence: Synthetic oligonucleotide
  Antisense strand to SEQ ID NO: 2274752
cuucuccauucaaacagcu

SEQ ID NO: 2274754 - RNA, 19 nt, Artificial Sequence
  Description of Artificial Sequence: Synthetic oligonucleotide
  Sense strand starting at position 3890 of SEQ ID NO: 1884557
cuagaaucccugcaagcua

SEQ ID NO: 2274755 - RNA, 19 nt, Artificial Sequence
  Description of Artificial Sequence: Synthetic oligonucleotide
  Antisense strand to SEQ ID NO: 2274754
uagcuugcagggauucuag

SEQ ID NO: 2274756 - RNA, 19 nt, Artificial Sequence
  Description of Artificial Sequence: Synthetic oligonucleotide
  Sense strand starting at position 3905 of SEQ ID NO: 1884557
gcuacuuauguauaucuca

SEQ ID NO: 2274757 - RNA, 19 nt, Artificial Sequence
  Description of Artificial Sequence: Synthetic oligonucleotide
  Antisense strand to SEQ ID NO: 2274756
ugagauauacauaaguagc

SEQ ID NO: 2274758 - RNA, 19 nt, Artificial Sequence
  Description of Artificial Sequence: Synthetic oligonucleotide
  Sense strand starting at position 149 of SEQ ID NO: 1884558
gugguucuucaggaauaag

SEQ ID NO: 2274759 - RNA, 19 nt, Artificial Sequence
  Description of Artificial Sequence: Synthetic oligonucleotide
  Antisense strand to SEQ ID NO: 2274758
cuuauuccugaagaaccac

SEQ ID NO: 2274760 - RNA, 19 nt, Artificial Sequence
  Description of Artificial Sequence: Synthetic oligonucleotide
  Sense strand starting at position 179 of SEQ ID NO: 1884558
caagauaugucacugaguu

SEQ ID NO: 2274761 - RNA, 19 nt, Artificial Sequence
  Description of Artificial Sequence: Synthetic oligonucleotide
  Antisense strand to SEQ ID NO: 2274760
aacucagugacauaucuug

SEQ ID NO: 2274762 - RNA, 19 nt, Artificial Sequence
  Description of Artificial Sequence: Synthetic oligonucleotide
  Sense strand starting at position 180 of SEQ ID NO: 1884558
aagauaugucacugaguuu

SEQ ID NO: 2274763 - RNA, 19 nt, Artificial Sequence
  Description of Artificial Sequence: Synthetic oligonucleotide
  Antisense strand to SEQ ID NO: 2274762
aaacucagugacauaucuu

SEQ ID NO: 2274764 - RNA, 19 nt, Artificial Sequence
  Description of Artificial Sequence: Synthetic oligonucleotide
  Sense strand starting at position 210 of SEQ ID NO: 1884558
ucauauugccauggacacu

SEQ ID NO: 2274765 - RNA, 19 nt, Artificial Sequence
  Description of Artificial Sequence: Synthetic oligonucleotide
  Antisense strand to SEQ ID NO: 2274764
aguguccauggcaauauga

SEQ ID NO: 2274766 - RNA, 19 nt, Artificial Sequence
  Description of Artificial Sequence: Synthetic oligonucleotide
  Sense strand starting at position 231 of SEQ ID NO: 1884558
uuagaagaguuaucugcau

SEQ ID NO: 2274767 - RNA, 19 nt, Artificial Sequence
  Description of Artificial Sequence: Synthetic oligonucleotide
  Antisense strand to SEQ ID NO: 2274766
augcagauaacucuucuaa

SEQ ID NO: 2274768 - RNA, 19 nt, Artificial Sequence
  Description of Artificial Sequence: Synthetic oligonucleotide
  Sense strand starting at position 235 of SEQ ID NO: 1884558
aagaguuaucugcauuaag

SEQ ID NO: 2274769 - RNA, 19 nt, Artificial Sequence
  Description of Artificial Sequence: Synthetic oligonucleotide
  Antisense strand to SEQ ID NO: 2274768
cuuaaugcagauaacucuu

SEQ ID NO: 2274770 - RNA, 19 nt, Artificial Sequence
  Description of Artificial Sequence: Synthetic oligonucleotide
  Sense strand starting at position 381 of SEQ ID NO: 1884558
aaggaaauguguuugcaua

SEQ ID NO: 2274771 - RNA, 19 nt, Artificial Sequence
  Description of Artificial Sequence: Synthetic oligonucleotide
  Antisense strand to SEQ ID NO: 2274770
uaugcaaacacauuuccuu

SEQ ID NO: 2274772 - RNA, 19 nt, Artificial Sequence
  Description of Artificial Sequence: Synthetic oligonucleotide
  Sense strand starting at position 427 of SEQ ID NO: 1884558
gggcacgcucaauaggaua

SEQ ID NO: 2274773 - RNA, 19 nt, Artificial Sequence
  Description of Artificial Sequence: Synthetic oligonucleotide
  Antisense strand to SEQ ID NO: 2274772
uauccuauugagcgugccc

SEQ ID NO: 2274774 - RNA, 19 nt, Artificial Sequence
  Description of Artificial Sequence: Synthetic oligonucleotide
  Sense strand starting at position 462 of SEQ ID NO: 1884558
acaucauuggcaggaauaa

SEQ ID NO: 2274775 - RNA, 19 nt, Artificial Sequence
  Description of Artificial Sequence: Synthetic oligonucleotide
  Antisense strand to SEQ ID NO: 2274774
uuauuccugccaaugaugu

SEQ ID NO: 2274776 - RNA, 19 nt, Artificial Sequence
  Description of Artificial Sequence: Synthetic oligonucleotide
  Sense strand starting at position 483 of SEQ ID NO: 1884558
gacagaaguuguuuauuag

SEQ ID NO: 2274777 - RNA, 19 nt, Artificial Sequence
  Description of Artificial Sequence: Synthetic oligonucleotide
  Antisense strand to SEQ ID NO: 2274776
cuaauaaacaacuucuguc

SEQ ID NO: 2274778 - RNA, 19 nt, Artificial Sequence
  Description of Artificial Sequence: Synthetic oligonucleotide
  Sense strand starting at position 807 of SEQ ID NO: 1884558
ucccuaaugaguugguaga

SEQ ID NO: 2274779 - RNA, 19 nt, Artificial Sequence
  Description of Artificial Sequence: Synthetic oligonucleotide
  Antisense strand to SEQ ID NO: 2274778
ucuaccaacucauuaggga

SEQ ID NO: 2274780 - RNA, 19 nt, Artificial Sequence
  Description of Artificial Sequence: Synthetic oligonucleotide
  Sense strand starting at position 823 of SEQ ID NO: 1884558
agaggucaauucuuugcaa

SEQ ID NO: 2274781 - RNA, 19 nt, Artificial Sequence
  Description of Artificial Sequence: Synthetic oligonucleotide
  Antisense strand to SEQ ID NO: 2274780
uugcaaagaauugaccucu

SEQ ID NO: 2274782 - RNA, 19 nt, Artificial Sequence
  Description of Artificial Sequence: Synthetic oligonucleotide
  Sense strand starting at position 824 of SEQ ID NO: 1884558
gaggucaauucuuugcaaa

SEQ ID NO: 2274783 - RNA, 19 nt, Artificial Sequence
  Description of Artificial Sequence: Synthetic oligonucleotide
  Antisense strand to SEQ ID NO: 2274782
uuugcaaagaauugaccuc

SEQ ID NO: 2274784 - RNA, 19 nt, Artificial Sequence
  Description of Artificial Sequence: Synthetic oligonucleotide
  Sense strand starting at position 897 of SEQ ID NO: 1884558
cuuccuacugaggguaaau

SEQ ID NO: 2274785 - RNA, 19 nt, Artificial Sequence
  Description of Artificial Sequence: Synthetic oligonucleotide
  Antisense strand to SEQ ID NO: 2274784
auuuacccucaguaggaag

SEQ ID NO: 2274786 - RNA, 19 nt, Artificial Sequence
  Description of Artificial Sequence: Synthetic oligonucleotide
  Sense strand starting at position 970 of SEQ ID NO: 1884558
gaggguguacuccgaagaa

SEQ ID NO: 2274787 - RNA, 19 nt, Artificial Sequence
  Description of Artificial Sequence: Synthetic oligonucleotide
  Antisense strand to SEQ ID NO: 2274786
uucuucggaguacacccuc

SEQ ID NO: 2274788 - RNA, 19 nt, Artificial Sequence
  Description of Artificial Sequence: Synthetic oligonucleotide
  Sense strand starting at position 1712 of SEQ ID NO: 1884558
gcuauuaaauggucacaga

SEQ ID NO: 2274789 - RNA, 19 nt, Artificial Sequence
  Description of Artificial Sequence: Synthetic oligonucleotide
  Antisense strand to SEQ ID NO: 2274788
ucugugaccauuuaauagc

SEQ ID NO: 2274790 - RNA, 19 nt, Artificial Sequence
  Description of Artificial Sequence: Synthetic oligonucleotide
  Sense strand starting at position 1833 of SEQ ID NO: 1884558
gggaaaugucuggaucugu

SEQ ID NO: 2274791 - RNA, 19 nt, Artificial Sequence
  Description of Artificial Sequence: Synthetic oligonucleotide
  Antisense strand to SEQ ID NO: 2274790
acagauccagacauuuccc

SEQ ID NO: 2274792 - RNA, 19 nt, Artificial Sequence
  Description of Artificial Sequence: Synthetic oligonucleotide
  Sense strand starting at position 1862 of SEQ ID NO: 1884558
uucugaacugcaugagaac

SEQ ID NO: 2274793 - RNA, 19 nt, Artificial Sequence
  Description of Artificial Sequence: Synthetic oligonucleotide
  Antisense strand to SEQ ID NO: 2274792
guucucaugcaguucagaa

SEQ ID NO: 2274794 - RNA, 19 nt, Artificial Sequence
  Description of Artificial Sequence: Synthetic oligonucleotide
  Sense strand starting at position 1871 of SEQ ID NO: 1884558
gcaugagaacccuggugaa

SEQ ID NO: 2274795 - RNA, 19 nt, Artificial Sequence
  Description of Artificial Sequence: Synthetic oligonucleotide
  Antisense strand to SEQ ID NO: 2274794
uucaccaggguucucaugc

SEQ ID NO: 2274796 - RNA, 19 nt, Artificial Sequence
  Description of Artificial Sequence: Synthetic oligonucleotide
  Sense strand starting at position 2207 of SEQ ID NO: 1884558
agccaaacuuggcuaauaa

SEQ ID NO: 2274797 - RNA, 19 nt, Artificial Sequence
  Description of Artificial Sequence: Synthetic oligonucleotide
  Antisense strand to SEQ ID NO: 2274796
uuauuagccaaguuuggcu

SEQ ID NO: 2274798 - RNA, 19 nt, Artificial Sequence
  Description of Artificial Sequence: Synthetic oligonucleotide
  Sense strand starting at position 2208 of SEQ ID NO: 1884558
gccaaacuuggcuaauaaa

SEQ ID NO: 2274799 - RNA, 19 nt, Artificial Sequence
  Description of Artificial Sequence: Synthetic oligonucleotide
  Antisense strand to SEQ ID NO: 2274798
uuuauuagccaaguuuggc

SEQ ID NO: 2274800 - RNA, 19 nt, Artificial Sequence
  Description of Artificial Sequence: Synthetic oligonucleotide
  Sense strand starting at position 2265 of SEQ ID NO: 1884558
auuacuguuugauccaaug

SEQ ID NO: 2274801 - RNA, 19 nt, Artificial Sequence
  Description of Artificial Sequence: Synthetic oligonucleotide
  Antisense strand to SEQ ID NO: 2274800
cauuggaucaaacaguaau

SEQ ID NO: 2274802 - RNA, 19 nt, Artificial Sequence
  Description of Artificial Sequence: Synthetic oligonucleotide
  Sense strand starting at position 2483 of SEQ ID NO: 1884558
agucgaaacagaugacuuu

SEQ ID NO: 2274803 - RNA, 19 nt, Artificial Sequence
  Description of Artificial Sequence: Synthetic oligonucleotide
  Antisense strand to SEQ ID NO: 2274802
aaagucaucuguuucgacu

SEQ ID NO: 2274804 - RNA, 19 nt, Artificial Sequence
  Description of Artificial Sequence: Synthetic oligonucleotide
  Sense strand starting at position 3025 of SEQ ID NO: 1884558
aguuccuaucaguaccuua

SEQ ID NO: 2274805 - RNA, 19 nt, Artificial Sequence
  Description of Artificial Sequence: Synthetic oligonucleotide
  Antisense strand to SEQ ID NO: 2274804
uaagguacugauaggaacu

SEQ ID NO: 2274806 - RNA, 19 nt, Artificial Sequence
  Description of Artificial Sequence: Synthetic oligonucleotide
  Sense strand starting at position 3039 of SEQ ID NO: 1884558
ccuuaaucagcuuauagag

SEQ ID NO: 2274807 - RNA, 19 nt, Artificial Sequence
  Description of Artificial Sequence: Synthetic oligonucleotide
  Antisense strand to SEQ ID NO: 2274806
cucuauaagcugauuaagg

SEQ ID NO: 2274808 - RNA, 19 nt, Artificial Sequence
  Description of Artificial Sequence: Synthetic oligonucleotide
  Sense strand starting at position 3069 of SEQ ID NO: 1884558
cuaacagaauagcuuguaa

SEQ ID NO: 2274809 - RNA, 19 nt, Artificial Sequence
  Description of Artificial Sequence: Synthetic oligonucleotide
  Antisense strand to SEQ ID NO: 2274808
uuacaagcuauucuguuag

SEQ ID NO: 2274810 - RNA, 19 nt, Artificial Sequence
  Description of Artificial Sequence: Synthetic oligonucleotide
  Sense strand starting at position 3080 of SEQ ID NO: 1884558
gcuuguaauuucuuggcua

SEQ ID NO: 2274811 - RNA, 19 nt, Artificial Sequence
  Description of Artificial Sequence: Synthetic oligonucleotide
  Antisense strand to SEQ ID NO: 2274810
uagccaagaaauuacaagc

SEQ ID NO: 2274812 - RNA, 19 nt, Artificial Sequence
  Description of Artificial Sequence: Synthetic oligonucleotide
  Sense strand starting at position 3204 of SEQ ID NO: 1884558
cuauguccuggugaucaga

SEQ ID NO: 2274813 - RNA, 19 nt, Artificial Sequence
  Description of Artificial Sequence: Synthetic oligonucleotide
  Antisense strand to SEQ ID NO: 2274812
ucugaucaccaggacauag

SEQ ID NO: 2274814 - RNA, 19 nt, Artificial Sequence
  Description of Artificial Sequence: Synthetic oligonucleotide
  Sense strand starting at position 3232 of SEQ ID NO: 1884558
gucccaugaggugaacuau

SEQ ID NO: 2274815 - RNA, 19 nt, Artificial Sequence
  Description of Artificial Sequence: Synthetic oligonucleotide
  Antisense strand to SEQ ID NO: 2274814
auaguucaccucaugggac

SEQ ID NO: 2274816 - RNA, 19 nt, Artificial Sequence
  Description of Artificial Sequence: Synthetic oligonucleotide
  Sense strand starting at position 3347 of SEQ ID NO: 1884558
gcucccuguaguuaggaga

SEQ ID NO: 2274817 - RNA, 19 nt, Artificial Sequence
  Description of Artificial Sequence: Synthetic oligonucleotide
  Antisense strand to SEQ ID NO: 2274816
ucuccuaacuacagggagc

SEQ ID NO: 2274818 - RNA, 19 nt, Artificial Sequence
  Description of Artificial Sequence: Synthetic oligonucleotide
  Sense strand starting at position 3410 of SEQ ID NO: 1884558
caaagaaauccuuguguga

SEQ ID NO: 2274819 - RNA, 19 nt, Artificial Sequence
  Description of Artificial Sequence: Synthetic oligonucleotide
  Antisense strand to SEQ ID NO: 2274818
ucacacaaggauuucuuug

SEQ ID NO: 2274820 - RNA, 19 nt, Artificial Sequence
  Description of Artificial Sequence: Synthetic oligonucleotide
  Sense strand starting at position 3413 of SEQ ID NO: 1884558
agaaauccuugugugauaa

SEQ ID NO: 2274821 - RNA, 19 nt, Artificial Sequence
  Description of Artificial Sequence: Synthetic oligonucleotide
  Antisense strand to SEQ ID NO: 2274820
uuaucacacaaggauuucu

SEQ ID NO: 2274822 - RNA, 19 nt, Artificial Sequence
  Description of Artificial Sequence: Synthetic oligonucleotide
  Sense strand starting at position 3414 of SEQ ID NO: 1884558
gaaauccuugugugauaag

SEQ ID NO: 2274823 - RNA, 19 nt, Artificial Sequence
  Description of Artificial Sequence: Synthetic oligonucleotide
  Antisense strand to SEQ ID NO: 2274822
cuuaucacacaaggauuuc

SEQ ID NO: 2274824 - RNA, 19 nt, Artificial Sequence
  Description of Artificial Sequence: Synthetic oligonucleotide
  Sense strand starting at position 3533 of SEQ ID NO: 1884558
gaguuaacaguaggaacau

SEQ ID NO: 2274825 - RNA, 19 nt, Artificial Sequence
  Description of Artificial Sequence: Synthetic oligonucleotide
  Antisense strand to SEQ ID NO: 2274824
auguuccuacuguuaacuc

SEQ ID NO: 2274826 - RNA, 19 nt, Artificial Sequence
  Description of Artificial Sequence: Synthetic oligonucleotide
  Sense strand starting at position 3714 of SEQ ID NO: 1884558
caaggcaacucaguguaaa

SEQ ID NO: 2274827 - RNA, 19 nt, Artificial Sequence
  Description of Artificial Sequence: Synthetic oligonucleotide
  Antisense strand to SEQ ID NO: 2274826
uuuacacugaguugccuug

SEQ ID NO: 2274828 - RNA, 19 nt, Artificial Sequence
  Description of Artificial Sequence: Synthetic oligonucleotide
  Sense strand starting at position 3715 of SEQ ID NO: 1884558
aaggcaacucaguguaaag

SEQ ID NO: 2274829 - RNA, 19 nt, Artificial Sequence
  Description of Artificial Sequence: Synthetic oligonucleotide
  Antisense strand to SEQ ID NO: 2274828
cuuuacacugaguugccuu

SEQ ID NO: 2274830 - RNA, 19 nt, Artificial Sequence
  Description of Artificial Sequence: Synthetic oligonucleotide
  Sense strand starting at position 3717 of SEQ ID NO: 1884558
ggcaacucaguguaaaggu

SEQ ID NO: 2274831 - RNA, 19 nt, Artificial Sequence
  Description of Artificial Sequence: Synthetic oligonucleotide
  Antisense strand to SEQ ID NO: 2274830
accuuuacacugaguugcc

SEQ ID NO: 2274832 - RNA, 19 nt, Artificial Sequence
  Description of Artificial Sequence: Synthetic oligonucleotide
  Sense strand starting at position 3862 of SEQ ID NO: 1884558
gggaaaugccacugaugca

SEQ ID NO: 2274833 - RNA, 19 nt, Artificial Sequence
  Description of Artificial Sequence: Synthetic oligonucleotide
  Antisense strand to SEQ ID NO: 2274832
ugcaucaguggcauuuccc

SEQ ID NO: 2274834 - RNA, 19 nt, Artificial Sequence
  Description of Artificial Sequence: Synthetic oligonucleotide
  Sense strand starting at position 3958 of SEQ ID NO: 1884558
ccuguuuaaguguaagacu

SEQ ID NO: 2274835 - RNA, 19 nt, Artificial Sequence
  Description of Artificial Sequence: Synthetic oligonucleotide
  Antisense strand to SEQ ID NO: 2274834
agucuuacacuuaaacagg

SEQ ID NO: 2274836 - RNA, 19 nt, Artificial Sequence
  Description of Artificial Sequence: Synthetic oligonucleotide
  Sense strand starting at position 3966 of SEQ ID NO: 1884558
aguguaagacuauauaccu

SEQ ID NO: 2274837 - RNA, 19 nt, Artificial Sequence
  Description of Artificial Sequence: Synthetic oligonucleotide
  Antisense strand to SEQ ID NO: 2274836
agguauauagucuuacacu

SEQ ID NO: 2274838 - RNA, 19 nt, Artificial Sequence
  Description of Artificial Sequence: Synthetic oligonucleotide
  Sense strand starting at position 68 of SEQ ID NO: 1884559
gugcuucaggacuggauua

SEQ ID NO: 2274839 - RNA, 19 nt, Artificial Sequence
  Description of Artificial Sequence: Synthetic oligonucleotide
  Antisense strand to SEQ ID NO: 2274838
uaauccaguccugaagcac

SEQ ID NO: 2274840 - RNA, 19 nt, Artificial Sequence
  Description of Artificial Sequence: Synthetic oligonucleotide
  Sense strand starting at position 95 of SEQ ID NO: 1884559
augauugacuaucugaguu

SEQ ID NO: 2274841 - RNA, 19 nt, Artificial Sequence
  Description of Artificial Sequence: Synthetic oligonucleotide
  Antisense strand to SEQ ID NO: 2274840
aacucagauagucaaucau

SEQ ID NO: 2274842 - RNA, 19 nt, Artificial Sequence
  Description of Artificial Sequence: Synthetic oligonucleotide
  Sense strand starting at position 99 of SEQ ID NO: 1884559
uugacuaucugaguuguca

SEQ ID NO: 2274843 - RNA, 19 nt, Artificial Sequence
  Description of Artificial Sequence: Synthetic oligonucleotide
  Antisense strand to SEQ ID NO: 2274842
ugacaacucagauagucaa

SEQ ID NO: 2274844 - RNA, 19 nt, Artificial Sequence
  Description of Artificial Sequence: Synthetic oligonucleotide
  Sense strand starting at position 120 of SEQ ID NO: 1884559
auggaagaauuagaaagaa

SEQ ID NO: 2274845 - RNA, 19 nt, Artificial Sequence
  Description of Artificial Sequence: Synthetic oligonucleotide
  Antisense strand to SEQ ID NO: 2274844
uucuuucuaauucuuccau

SEQ ID NO: 2274846 - RNA, 19 nt, Artificial Sequence
  Description of Artificial Sequence: Synthetic oligonucleotide
  Sense strand starting at position 145 of SEQ ID NO: 1884559
uccucauugcuagagugga

SEQ ID NO: 2274847 - RNA, 19 nt, Artificial Sequence
  Description of Artificial Sequence: Synthetic oligonucleotide
  Antisense strand to SEQ ID NO: 2274846
uccacucuagcaaugagga

SEQ ID NO: 2274848 - RNA, 19 nt, Artificial Sequence
  Description of Artificial Sequence: Synthetic oligonucleotide
  Sense strand starting at position 149 of SEQ ID NO: 1884559
cauugcuagaguggaaagu

SEQ ID NO: 2274849 - RNA, 19 nt, Artificial Sequence
  Description of Artificial Sequence: Synthetic oligonucleotide
  Antisense strand to SEQ ID NO: 2274848
acuuuccacucuagcaaug

SEQ ID NO: 2274850 - RNA, 19 nt, Artificial Sequence
  Description of Artificial Sequence: Synthetic oligonucleotide
  Sense strand starting at position 159 of SEQ ID NO: 1884559
guggaaaguguuuacaguu

SEQ ID NO: 2274851 - RNA, 19 nt, Artificial Sequence
  Description of Artificial Sequence: Synthetic oligonucleotide
  Antisense strand to SEQ ID NO: 2274850
aacuguaaacacuuuccac

SEQ ID NO: 2274852 - RNA, 19 nt, Artificial Sequence
  Description of Artificial Sequence: Synthetic oligonucleotide
  Sense strand starting at position 321 of SEQ ID NO: 1884559
guacucacacuuggauuaa

SEQ ID NO: 2274853 - RNA, 19 nt, Artificial Sequence
  Description of Artificial Sequence: Synthetic oligonucleotide
  Antisense strand to SEQ ID NO: 2274852
uuaauccaagugugaguac

SEQ ID NO: 2274854 - RNA, 19 nt, Artificial Sequence
  Description of Artificial Sequence: Synthetic oligonucleotide
  Sense strand starting at position 433 of SEQ ID NO: 1884559
gugaguaaggcagaauuga

SEQ ID NO: 2274855 - RNA, 19 nt, Artificial Sequence
  Description of Artificial Sequence: Synthetic oligonucleotide
  Antisense strand to SEQ ID NO: 2274854
ucaauucugccuuacucac

SEQ ID NO: 2274856 - RNA, 19 nt, Artificial Sequence
  Description of Artificial Sequence: Synthetic oligonucleotide
  Sense strand starting at position 475 of SEQ ID NO: 1884559
gguucauuuggacguguaa

SEQ ID NO: 2274857 - RNA, 19 nt, Artificial Sequence
  Description of Artificial Sequence: Synthetic oligonucleotide
  Antisense strand to SEQ ID NO: 2274856
uuacacguccaaaugaacc

SEQ ID NO: 2274858 - RNA, 19 nt, Artificial Sequence
  Description of Artificial Sequence: Synthetic oligonucleotide
  Sense strand starting at position 538 of SEQ ID NO: 1884559
accagaagggucuguucuu

SEQ ID NO: 2274859 - RNA, 19 nt, Artificial Sequence
  Description of Artificial Sequence: Synthetic oligonucleotide
  Antisense strand to SEQ ID NO: 2274858
aagaacagacccuucuggu

SEQ ID NO: 2274860 - RNA, 19 nt, Artificial Sequence
  Description of Artificial Sequence: Synthetic oligonucleotide
  Sense strand starting at position 579 of SEQ ID NO: 1884559
uuucucauaccuuguggaa

SEQ ID NO: 2274861 - RNA, 19 nt, Artificial Sequence
  Description of Artificial Sequence: Synthetic oligonucleotide
  Antisense strand to SEQ ID NO: 2274860
uuccacaagguaugagaaa

SEQ ID NO: 2274862 - RNA, 19 nt, Artificial Sequence
  Description of Artificial Sequence: Synthetic oligonucleotide
  Sense strand starting at position 737 of SEQ ID NO: 1884559
cccgauuugcugugggaaa

SEQ ID NO: 2274863 - RNA, 19 nt, Artificial Sequence
  Description of Artificial Sequence: Synthetic oligonucleotide
  Antisense strand to SEQ ID NO: 2274862
uuucccacagcaaaucggg

SEQ ID NO: 2274864 - RNA, 19 nt, Artificial Sequence
  Description of Artificial Sequence: Synthetic oligonucleotide
  Sense strand starting at position 739 of SEQ ID NO: 1884559
cgauuugcugugggaaauc

SEQ ID NO: 2274865 - RNA, 19 nt, Artificial Sequence
  Description of Artificial Sequence: Synthetic oligonucleotide
  Antisense strand to SEQ ID NO: 2274864
gauuucccacagcaaaucg

SEQ ID NO: 2274866 - RNA, 19 nt, Artificial Sequence
  Description of Artificial Sequence: Synthetic oligonucleotide
  Sense strand starting at position 909 of SEQ ID NO: 1884559
cucugagauugcucaggaa

SEQ ID NO: 2274867 - RNA, 19 nt, Artificial Sequence
  Description of Artificial Sequence: Synthetic oligonucleotide
  Antisense strand to SEQ ID NO: 2274866
uuccugagcaaucucagag

SEQ ID NO: 2274868 - RNA, 19 nt, Artificial Sequence
  Description of Artificial Sequence: Synthetic oligonucleotide
  Sense strand starting at position 974 of SEQ ID NO: 1884559
ugguucuagcuauguauuu

SEQ ID NO: 2274869 - RNA, 19 nt, Artificial Sequence
  Description of Artificial Sequence: Synthetic oligonucleotide
  Antisense strand to SEQ ID NO: 2274868
aaauacauagcuagaacca

SEQ ID NO: 2274870 - RNA, 19 nt, Artificial Sequence
  Description of Artificial Sequence: Synthetic oligonucleotide
  Sense strand starting at position 975 of SEQ ID NO: 1884559
gguucuagcuauguauuua

SEQ ID NO: 2274871 - RNA, 19 nt, Artificial Sequence
  Description of Artificial Sequence: Synthetic oligonucleotide
  Antisense strand to SEQ ID NO: 2274870
uaaauacauagcuagaacc

SEQ ID NO: 2274872 - RNA, 19 nt, Artificial Sequence
  Description of Artificial Sequence: Synthetic oligonucleotide
  Sense strand starting at position 1004 of SEQ ID NO: 1884559
uguacugguugauuuguua

SEQ ID NO: 2274873 - RNA, 19 nt, Artificial Sequence
  Description of Artificial Sequence: Synthetic oligonucleotide
  Antisense strand to SEQ ID NO: 2274872
uaacaaaucaaccaguaca

SEQ ID NO: 2274874 - RNA, 19 nt, Artificial Sequence
  Description of Artificial Sequence: Synthetic oligonucleotide
  Sense strand starting at position 1351 of SEQ ID NO: 1884559
accacugcuggagguaaau

SEQ ID NO: 2274875 - RNA, 19 nt, Artificial Sequence
  Description of Artificial Sequence: Synthetic oligonucleotide
  Antisense strand to SEQ ID NO: 2274874
auuuaccuccagcaguggu

SEQ ID NO: 2274876 - RNA, 19 nt, Artificial Sequence
  Description of Artificial Sequence: Synthetic oligonucleotide
  Sense strand starting at position 1513 of SEQ ID NO: 1884559
ggaguccaauacuccuaaa

SEQ ID NO: 2274877 - RNA, 19 nt, Artificial Sequence
  Description of Artificial Sequence: Synthetic oligonucleotide
  Antisense strand to SEQ ID NO: 2274876
uuuaggaguauuggacucc

SEQ ID NO: 2274878 - RNA, 19 nt, Artificial Sequence
  Description of Artificial Sequence: Synthetic oligonucleotide
  Sense strand starting at position 1615 of SEQ ID NO: 1884559
agucuuugugaaugaauga

SEQ ID NO: 2274879 - RNA, 19 nt, Artificial Sequence
  Description of Artificial Sequence: Synthetic oligonucleotide
  Antisense strand to SEQ ID NO: 2274878
ucauucauucacaaagacu

SEQ ID NO: 2274880 - RNA, 19 nt, Artificial Sequence
  Description of Artificial Sequence: Synthetic oligonucleotide
  Sense strand starting at position 1616 of SEQ ID NO: 1884559
gucuuugugaaugaaugau

SEQ ID NO: 2274881 - RNA, 19 nt, Artificial Sequence
  Description of Artificial Sequence: Synthetic oligonucleotide
  Antisense strand to SEQ ID NO: 2274880
aucauucauucacaaagac

SEQ ID NO: 2274882 - RNA, 19 nt, Artificial Sequence
  Description of Artificial Sequence: Synthetic oligonucleotide
  Sense strand starting at position 1696 of SEQ ID NO: 1884559
ucaagaaugcguggagaau

SEQ ID NO: 2274883 - RNA, 19 nt, Artificial Sequence
  Description of Artificial Sequence: Synthetic oligonucleotide
  Antisense strand to SEQ ID NO: 2274882
auucuccacgcauucuuga

SEQ ID NO: 2274884 - RNA, 19 nt, Artificial Sequence
  Description of Artificial Sequence: Synthetic oligonucleotide
  Sense strand starting at position 1697 of SEQ ID NO: 1884559
caagaaugcguggagaauc

SEQ ID NO: 2274885 - RNA, 19 nt, Artificial Sequence
  Description of Artificial Sequence: Synthetic oligonucleotide
  Antisense strand to SEQ ID NO: 2274884
gauucuccacgcauucuug

SEQ ID NO: 2274886 - RNA, 19 nt, Artificial Sequence
  Description of Artificial Sequence: Synthetic oligonucleotide
  Sense strand starting at position 2846 of SEQ ID NO: 1884559
aggacaucaucgccugacu

SEQ ID NO: 2274887 - RNA, 19 nt, Artificial Sequence
  Description of Artificial Sequence: Synthetic oligonucleotide
  Antisense strand to SEQ ID NO: 2274886
agucaggcgaugauguccu

SEQ ID NO: 2274888 - RNA, 19 nt, Artificial Sequence
  Description of Artificial Sequence: Synthetic oligonucleotide
  Sense strand starting at position 3122 of SEQ ID NO: 1884559
uaccaaagguccguuggaa

SEQ ID NO: 2274889 - RNA, 19 nt, Artificial Sequence
  Description of Artificial Sequence: Synthetic oligonucleotide
  Antisense strand to SEQ ID NO: 2274888
uuccaacggaccuuuggua

SEQ ID NO: 2274890 - RNA, 19 nt, Artificial Sequence
  Description of Artificial Sequence: Synthetic oligonucleotide
  Sense strand starting at position 3290 of SEQ ID NO: 1884559
aagagagucuggccuuaca

SEQ ID NO: 2274891 - RNA, 19 nt, Artificial Sequence
  Description of Artificial Sequence: Synthetic oligonucleotide
  Antisense strand to SEQ ID NO: 2274890
uguaaggccagacucucuu

SEQ ID NO: 2274892 - RNA, 19 nt, Artificial Sequence
  Description of Artificial Sequence: Synthetic oligonucleotide
  Sense strand starting at position 3293 of SEQ ID NO: 1884559
agagucuggccuuacagaa

SEQ ID NO: 2274893 - RNA, 19 nt, Artificial Sequence
  Description of Artificial Sequence: Synthetic oligonucleotide
  Antisense strand to SEQ ID NO: 2274892
uucuguaaggccagacucu

SEQ ID NO: 2274894 - RNA, 19 nt, Artificial Sequence
  Description of Artificial Sequence: Synthetic oligonucleotide
  Sense strand starting at position 3325 of SEQ ID NO: 1884559
uguaguuugagagggaaag

SEQ ID NO: 2274895 - RNA, 19 nt, Artificial Sequence
  Description of Artificial Sequence: Synthetic oligonucleotide
  Antisense strand to SEQ ID NO: 2274894
cuuucccucucaaacuaca

SEQ ID NO: 2274896 - RNA, 19 nt, Artificial Sequence
  Description of Artificial Sequence: Synthetic oligonucleotide
  Sense strand starting at position 3336 of SEQ ID NO: 1884559
agggaaagaugcuuucuuu

SEQ ID NO: 2274897 - RNA, 19 nt, Artificial Sequence
  Description of Artificial Sequence: Synthetic oligonucleotide
  Antisense strand to SEQ ID NO: 2274896
aaagaaagcaucuuucccu

SEQ ID NO: 2274898 - RNA, 19 nt, Artificial Sequence
  Description of Artificial Sequence: Synthetic oligonucleotide
  Sense strand starting at position 3369 of SEQ ID NO: 1884559
gccagcuauccuuagagau

SEQ ID NO: 2274899 - RNA, 19 nt, Artificial Sequence
  Description of Artificial Sequence: Synthetic oligonucleotide
  Antisense strand to SEQ ID NO: 2274898
aucucuaaggauagcuggc

SEQ ID NO: 2274900 - RNA, 19 nt, Artificial Sequence
  Description of Artificial Sequence: Synthetic oligonucleotide
  Sense strand starting at position 3373 of SEQ ID NO: 1884559
gcuauccuuagagaugagu

SEQ ID NO: 2274901 - RNA, 19 nt, Artificial Sequence
  Description of Artificial Sequence: Synthetic oligonucleotide
  Antisense strand to SEQ ID NO: 2274900
acucaucucuaaggauagc

SEQ ID NO: 2274902 - RNA, 19 nt, Artificial Sequence
  Description of Artificial Sequence: Synthetic oligonucleotide
  Sense strand starting at position 3477 of SEQ ID NO: 1884559
uguuguaucugauuaucaa

SEQ ID NO: 2274903 - RNA, 19 nt, Artificial Sequence
  Description of Artificial Sequence: Synthetic oligonucleotide
  Antisense strand to SEQ ID NO: 2274902
uugauaaucagauacaaca

SEQ ID NO: 2274904 - RNA, 19 nt, Artificial Sequence
  Description of Artificial Sequence: Synthetic oligonucleotide
  Sense strand starting at position 3478 of SEQ ID NO: 1884559
guuguaucugauuaucaau

SEQ ID NO: 2274905 - RNA, 19 nt, Artificial Sequence
  Description of Artificial Sequence: Synthetic oligonucleotide
  Antisense strand to SEQ ID NO: 2274904
auugauaaucagauacaac

SEQ ID NO: 2274906 - RNA, 19 nt, Artificial Sequence
  Description of Artificial Sequence: Synthetic oligonucleotide
  Sense strand starting at position 3704 of SEQ ID NO: 1884559
ugcacagaaggcugagauu

SEQ ID NO: 2274907 - RNA, 19 nt, Artificial Sequence
  Description of Artificial Sequence: Synthetic oligonucleotide
  Antisense strand to SEQ ID NO: 2274906
aaucucagccuucugugca

SEQ ID NO: 2274908 - RNA, 19 nt, Artificial Sequence
  Description of Artificial Sequence: Synthetic oligonucleotide
  Sense strand starting at position 3794 of SEQ ID NO: 1884559
ggcacuuaggccuacaauu

SEQ ID NO: 2274909 - RNA, 19 nt, Artificial Sequence
  Description of Artificial Sequence: Synthetic oligonucleotide
  Antisense strand to SEQ ID NO: 2274908
aauuguaggccuaagugcc

SEQ ID NO: 2274910 - RNA, 19 nt, Artificial Sequence
  Description of Artificial Sequence: Synthetic oligonucleotide
  Sense strand starting at position 3813 of SEQ ID NO: 1884559
cagaaaugcuguuucuaug

SEQ ID NO: 2274911 - RNA, 19 nt, Artificial Sequence
  Description of Artificial Sequence: Synthetic oligonucleotide
  Antisense strand to SEQ ID NO: 2274910
cauagaaacagcauuucug

SEQ ID NO: 2274912 - RNA, 19 nt, Artificial Sequence
  Description of Artificial Sequence: Synthetic oligonucleotide
  Sense strand starting at position 3943 of SEQ ID NO: 1884559
auagguccuuuccuuaaga

SEQ ID NO: 2274913 - RNA, 19 nt, Artificial Sequence
  Description of Artificial Sequence: Synthetic oligonucleotide
  Antisense strand to SEQ ID NO: 2274912
ucuuaaggaaaggaccuau

SEQ ID NO: 2274914 - RNA, 19 nt, Artificial Sequence
  Description of Artificial Sequence: Synthetic oligonucleotide
  Sense strand starting at position 3945 of SEQ ID NO: 1884559
agguccuuuccuuaagaac

SEQ ID NO: 2274915 - RNA, 19 nt, Artificial Sequence
  Description of Artificial Sequence: Synthetic oligonucleotide
  Antisense strand to SEQ ID NO: 2274914
guucuuaaggaaaggaccu

SEQ ID NO: 2274916 - RNA, 19 nt, Artificial Sequence
  Description of Artificial Sequence: Synthetic oligonucleotide
  Sense strand starting at position 3956 of SEQ ID NO: 1884559
uuaagaacagcuuguuuau

SEQ ID NO: 2274917 - RNA, 19 nt, Artificial Sequence
  Description of Artificial Sequence: Synthetic oligonucleotide
  Antisense strand to SEQ ID NO: 2274916
auaaacaagcuguucuuaa

SEQ ID NO: 2274918 - RNA, 19 nt, Artificial Sequence
  Description of Artificial Sequence: Synthetic oligonucleotide
  Sense strand starting at position 187 of SEQ ID NO: 1884560
aguccaguggugcaaucaa

SEQ ID NO: 2274919 - RNA, 19 nt, Artificial Sequence
  Description of Artificial Sequence: Synthetic oligonucleotide
  Antisense strand to SEQ ID NO: 2274918
uugauugcaccacuggacu

SEQ ID NO: 2274920 - RNA, 19 nt, Artificial Sequence
  Description of Artificial Sequence: Synthetic oligonucleotide
  Sense strand starting at position 505 of SEQ ID NO: 1884560
cuauuaagggcaggaaauu

SEQ ID NO: 2274921 - RNA, 19 nt, Artificial Sequence
  Description of Artificial Sequence: Synthetic oligonucleotide
  Antisense strand to SEQ ID NO: 2274920
aauuuccugcccuuaauag

SEQ ID NO: 2274922 - RNA, 19 nt, Artificial Sequence
  Description of Artificial Sequence: Synthetic oligonucleotide
  Sense strand starting at position 570 of SEQ ID NO: 1884560
caacuaacaguguagaguu

SEQ ID NO: 2274923 - RNA, 19 nt, Artificial Sequence
  Description of Artificial Sequence: Synthetic oligonucleotide
  Antisense strand to SEQ ID NO: 2274922
aacucuacacuguuaguug

SEQ ID NO: 2274924 - RNA, 19 nt, Artificial Sequence
  Description of Artificial Sequence: Synthetic oligonucleotide
  Sense strand starting at position 577 of SEQ ID NO: 1884560
caguguagaguuuacuauu

SEQ ID NO: 2274925 - RNA, 19 nt, Artificial Sequence
  Description of Artificial Sequence: Synthetic oligonucleotide
  Antisense strand to SEQ ID NO: 2274924
aauaguaaacucuacacug

SEQ ID NO: 2274926 - RNA, 19 nt, Artificial Sequence
  Description of Artificial Sequence: Synthetic oligonucleotide
  Sense strand starting at position 811 of SEQ ID NO: 1884560
guguguaauacacauguau

SEQ ID NO: 2274927 - RNA, 19 nt, Artificial Sequence
  Description of Artificial Sequence: Synthetic oligonucleotide
  Antisense strand to SEQ ID NO: 2274926
auacauguguauuacacac

SEQ ID NO: 2274928 - RNA, 19 nt, Artificial Sequence
  Description of Artificial Sequence: Synthetic oligonucleotide
  Sense strand starting at position 1037 of SEQ ID NO: 1884560
ucuauuagugaacaguaca

SEQ ID NO: 2274929 - RNA, 19 nt, Artificial Sequence
  Description of Artificial Sequence: Synthetic oligonucleotide
  Antisense strand to SEQ ID NO: 2274928
uguacuguucacuaauaga

SEQ ID NO: 2274930 - RNA, 19 nt, Artificial Sequence
  Description of Artificial Sequence: Synthetic oligonucleotide
  Sense strand starting at position 1059 of SEQ ID NO: 1884560
gagaacacaucuguguauu

SEQ ID NO: 2274931 - RNA, 19 nt, Artificial Sequence
  Description of Artificial Sequence: Synthetic oligonucleotide
  Antisense strand to SEQ ID NO: 2274930
aauacacagauguguucuc

SEQ ID NO: 2274932 - RNA, 19 nt, Artificial Sequence
  Description of Artificial Sequence: Synthetic oligonucleotide
  Sense strand starting at position 1060 of SEQ ID NO: 1884560
agaacacaucuguguauuc

SEQ ID NO: 2274933 - RNA, 19 nt, Artificial Sequence
  Description of Artificial Sequence: Synthetic oligonucleotide
  Antisense strand to SEQ ID NO: 2274932
gaauacacagauguguucu

SEQ ID NO: 2274934 - RNA, 19 nt, Artificial Sequence
  Description of Artificial Sequence: Synthetic oligonucleotide
  Sense strand starting at position 1110 of SEQ ID NO: 1884560
gcugauuugccagguuaaa

SEQ ID NO: 2274935 - RNA, 19 nt, Artificial Sequence
  Description of Artificial Sequence: Synthetic oligonucleotide
  Antisense strand to SEQ ID NO: 2274934
uuuaaccuggcaaaucagc

SEQ ID NO: 2274936 - RNA, 19 nt, Artificial Sequence
  Description of Artificial Sequence: Synthetic oligonucleotide
  Sense strand starting at position 1190 of SEQ ID NO: 1884560
cuuaguacccaugagagua

SEQ ID NO: 2274937 - RNA, 19 nt, Artificial Sequence
  Description of Artificial Sequence: Synthetic oligonucleotide
  Antisense strand to SEQ ID NO: 2274936
uacucucauggguacuaag

SEQ ID NO: 2274938 - RNA, 19 nt, Artificial Sequence
  Description of Artificial Sequence: Synthetic oligonucleotide
  Sense strand starting at position 1605 of SEQ ID NO: 1884560
acucucagauuaucgauga

SEQ ID NO: 2274939 - RNA, 19 nt, Artificial Sequence
  Description of Artificial Sequence: Synthetic oligonucleotide
  Antisense strand to SEQ ID NO: 2274938
ucaucgauaaucugagagu

SEQ ID NO: 2274940 - RNA, 19 nt, Artificial Sequence
  Description of Artificial Sequence: Synthetic oligonucleotide
  Sense strand starting at position 1610 of SEQ ID NO: 1884560
cagauuaucgaugaggcca

SEQ ID NO: 2274941 - RNA, 19 nt, Artificial Sequence
  Description of Artificial Sequence: Synthetic oligonucleotide
  Antisense strand to SEQ ID NO: 2274940
uggccucaucgauaaucug

SEQ ID NO: 2274942 - RNA, 19 nt, Artificial Sequence
  Description of Artificial Sequence: Synthetic oligonucleotide
  Sense strand starting at position 1785 of SEQ ID NO: 1884560
uauguugagcaauaauuga

SEQ ID NO: 2274943 - RNA, 19 nt, Artificial Sequence
  Description of Artificial Sequence: Synthetic oligonucleotide
  Antisense strand to SEQ ID NO: 2274942
ucaauuauugcucaacaua

SEQ ID NO: 2274944 - RNA, 19 nt, Artificial Sequence
  Description of Artificial Sequence: Synthetic oligonucleotide
  Sense strand starting at position 1998 of SEQ ID NO: 1884560
uagacaaauaguugggagu

SEQ ID NO: 2274945 - RNA, 19 nt, Artificial Sequence
  Description of Artificial Sequence: Synthetic oligonucleotide
  Antisense strand to SEQ ID NO: 2274944
acucccaacuauuugucua

SEQ ID NO: 2274946 - RNA, 19 nt, Artificial Sequence
  Description of Artificial Sequence: Synthetic oligonucleotide
  Sense strand starting at position 2107 of SEQ ID NO: 1884560
ugucuucuggcuuauugaa

SEQ ID NO: 2274947 - RNA, 19 nt, Artificial Sequence
  Description of Artificial Sequence: Synthetic oligonucleotide
  Antisense strand to SEQ ID NO: 2274946
uucaauaagccagaagaca

SEQ ID NO: 2274948 - RNA, 19 nt, Artificial Sequence
  Description of Artificial Sequence: Synthetic oligonucleotide
  Sense strand starting at position 2109 of SEQ ID NO: 1884560
ucuucuggcuuauugaaau

SEQ ID NO: 2274949 - RNA, 19 nt, Artificial Sequence
  Description of Artificial Sequence: Synthetic oligonucleotide
  Antisense strand to SEQ ID NO: 2274948
auuucaauaagccagaaga

SEQ ID NO: 2274950 - RNA, 19 nt, Artificial Sequence
  Description of Artificial Sequence: Synthetic oligonucleotide
  Sense strand starting at position 2160 of SEQ ID NO: 1884560
uuauguuaugccuaguuga

SEQ ID NO: 2274951 - RNA, 19 nt, Artificial Sequence
  Description of Artificial Sequence: Synthetic oligonucleotide
  Antisense strand to SEQ ID NO: 2274950
ucaacuaggcauaacauaa

SEQ ID NO: 2274952 - RNA, 19 nt, Artificial Sequence
  Description of Artificial Sequence: Synthetic oligonucleotide
  Sense strand starting at position 2204 of SEQ ID NO: 1884560
guuccugacuuucugaauu

SEQ ID NO: 2274953 - RNA, 19 nt, Artificial Sequence
  Description of Artificial Sequence: Synthetic oligonucleotide
  Antisense strand to SEQ ID NO: 2274952
aauucagaaagucaggaac

SEQ ID NO: 2274954 - RNA, 19 nt, Artificial Sequence
  Description of Artificial Sequence: Synthetic oligonucleotide
  Sense strand starting at position 2206 of SEQ ID NO: 1884560
uccugacuuucugaauuug

SEQ ID NO: 2274955 - RNA, 19 nt, Artificial Sequence
  Description of Artificial Sequence: Synthetic oligonucleotide
  Antisense strand to SEQ ID NO: 2274954
caaauucagaaagucagga

SEQ ID NO: 2274956 - RNA, 19 nt, Artificial Sequence
  Description of Artificial Sequence: Synthetic oligonucleotide
  Sense strand starting at position 2577 of SEQ ID NO: 1884560
guauaauuauagucagcca

SEQ ID NO: 2274957 - RNA, 19 nt, Artificial Sequence
  Description of Artificial Sequence: Synthetic oligonucleotide
  Antisense strand to SEQ ID NO: 2274956
uggcugacuauaauuauac

SEQ ID NO: 2274958 - RNA, 19 nt, Artificial Sequence
  Description of Artificial Sequence: Synthetic oligonucleotide
  Sense strand starting at position 2596 of SEQ ID NO: 1884560
uccauauuccauggguucu

SEQ ID NO: 2274959 - RNA, 19 nt, Artificial Sequence
  Description of Artificial Sequence: Synthetic oligonucleotide
  Antisense strand to SEQ ID NO: 2274958
agaacccauggaauaugga

SEQ ID NO: 2274960 - RNA, 19 nt, Artificial Sequence
  Description of Artificial Sequence: Synthetic oligonucleotide
  Sense strand starting at position 2695 of SEQ ID NO: 1884560
uggucauuauucccugaac

SEQ ID NO: 2274961 - RNA, 19 nt, Artificial Sequence
  Description of Artificial Sequence: Synthetic oligonucleotide
  Antisense strand to SEQ ID NO: 2274960
guucagggaauaaugacca

SEQ ID NO: 2274962 - RNA, 19 nt, Artificial Sequence
  Description of Artificial Sequence: Synthetic oligonucleotide
  Sense strand starting at position 2696 of SEQ ID NO: 1884560
ggucauuauucccugaaca

SEQ ID NO: 2274963 - RNA, 19 nt, Artificial Sequence
  Description of Artificial Sequence: Synthetic oligonucleotide
  Antisense strand to SEQ ID NO: 2274962
uguucagggaauaaugacc

SEQ ID NO: 2274964 - RNA, 19 nt, Artificial Sequence
  Description of Artificial Sequence: Synthetic oligonucleotide
  Sense strand starting at position 2949 of SEQ ID NO: 1884560
accacuggaucuguuuaga

SEQ ID NO: 2274965 - RNA, 19 nt, Artificial Sequence
  Description of Artificial Sequence: Synthetic oligonucleotide
  Antisense strand to SEQ ID NO: 2274964
ucuaaacagauccaguggu

SEQ ID NO: 2274966 - RNA, 19 nt, Artificial Sequence
  Description of Artificial Sequence: Synthetic oligonucleotide
  Sense strand starting at position 2985 of SEQ ID NO: 1884560
ggucuuaauuccucauaug

SEQ ID NO: 2274967 - RNA, 19 nt, Artificial Sequence
  Description of Artificial Sequence: Synthetic oligonucleotide
  Antisense strand to SEQ ID NO: 2274966
cauaugaggaauuaagacc

SEQ ID NO: 2274968 - RNA, 19 nt, Artificial Sequence
  Description of Artificial Sequence: Synthetic oligonucleotide
  Sense strand starting at position 3060 of SEQ ID NO: 1884560
ugaugcaucugaucaugau

SEQ ID NO: 2274969 - RNA, 19 nt, Artificial Sequence
  Description of Artificial Sequence: Synthetic oligonucleotide
  Antisense strand to SEQ ID NO: 2274968
aucaugaucagaugcauca

SEQ ID NO: 2274970 - RNA, 19 nt, Artificial Sequence
  Description of Artificial Sequence: Synthetic oligonucleotide
  Sense strand starting at position 3064 of SEQ ID NO: 1884560
gcaucugaucaugauauua

SEQ ID NO: 2274971 - RNA, 19 nt, Artificial Sequence
  Description of Artificial Sequence: Synthetic oligonucleotide
  Antisense strand to SEQ ID NO: 2274970
uaauaucaugaucagaugc

SEQ ID NO: 2274972 - RNA, 19 nt, Artificial Sequence
  Description of Artificial Sequence: Synthetic oligonucleotide
  Sense strand starting at position 3171 of SEQ ID NO: 1884560
gagguaauuugauacuaaa

SEQ ID NO: 2274973 - RNA, 19 nt, Artificial Sequence
  Description of Artificial Sequence: Synthetic oligonucleotide
  Antisense strand to SEQ ID NO: 2274972
uuuaguaucaaauuaccuc

SEQ ID NO: 2274974 - RNA, 19 nt, Artificial Sequence
  Description of Artificial Sequence: Synthetic oligonucleotide
  Sense strand starting at position 3174 of SEQ ID NO: 1884560
guaauuugauacuaaacug

SEQ ID NO: 2274975 - RNA, 19 nt, Artificial Sequence
  Description of Artificial Sequence: Synthetic oligonucleotide
  Antisense strand to SEQ ID NO: 2274974
caguuuaguaucaaauuac

SEQ ID NO: 2274976 - RNA, 19 nt, Artificial Sequence
  Description of Artificial Sequence: Synthetic oligonucleotide
  Sense strand starting at position 3390 of SEQ ID NO: 1884560
gcugaaauugcagaaauua

SEQ ID NO: 2274977 - RNA, 19 nt, Artificial Sequence
  Description of Artificial Sequence: Synthetic oligonucleotide
  Antisense strand to SEQ ID NO: 2274976
uaauuucugcaauuucagc

SEQ ID NO: 2274978 - RNA, 19 nt, Artificial Sequence
  Description of Artificial Sequence: Synthetic oligonucleotide
  Sense strand starting at position 3530 of SEQ ID NO: 1884560
aagaaagguuggucugagu

SEQ ID NO: 2274979 - RNA, 19 nt, Artificial Sequence
  Description of Artificial Sequence: Synthetic oligonucleotide
  Antisense strand to SEQ ID NO: 2274978
acucagaccaaccuuucuu

SEQ ID NO: 2274980 - RNA, 19 nt, Artificial Sequence
  Description of Artificial Sequence: Synthetic oligonucleotide
  Sense strand starting at position 3543 of SEQ ID NO: 1884560
cugaguuaucuccaucuuu

SEQ ID NO: 2274981 - RNA, 19 nt, Artificial Sequence
  Description of Artificial Sequence: Synthetic oligonucleotide
  Antisense strand to SEQ ID NO: 2274980
aaagauggagauaacucag

SEQ ID NO: 2274982 - RNA, 19 nt, Artificial Sequence
  Description of Artificial Sequence: Synthetic oligonucleotide
  Sense strand starting at position 3557 of SEQ ID NO: 1884560
ucuuuauuauuagcagaag

SEQ ID NO: 2274983 - RNA, 19 nt, Artificial Sequence
  Description of Artificial Sequence: Synthetic oligonucleotide
  Antisense strand to SEQ ID NO: 2274982
cuucugcuaauaauaaaga

SEQ ID NO: 2274984 - RNA, 19 nt, Artificial Sequence
  Description of Artificial Sequence: Synthetic oligonucleotide
  Sense strand starting at position 3560 of SEQ ID NO: 1884560
uuauuauuagcagaaguuc

SEQ ID NO: 2274985 - RNA, 19 nt, Artificial Sequence
  Description of Artificial Sequence: Synthetic oligonucleotide
  Antisense strand to SEQ ID NO: 2274984
gaacuucugcuaauaauaa

SEQ ID NO: 2274986 - RNA, 19 nt, Artificial Sequence
  Description of Artificial Sequence: Synthetic oligonucleotide
  Sense strand starting at position 3568 of SEQ ID NO: 1884560
agcagaaguucccuauauu

SEQ ID NO: 2274987 - RNA, 19 nt, Artificial Sequence
  Description of Artificial Sequence: Synthetic oligonucleotide
  Antisense strand to SEQ ID NO: 2274986
aauauagggaacuucugcu

SEQ ID NO: 2274988 - RNA, 19 nt, Artificial Sequence
  Description of Artificial Sequence: Synthetic oligonucleotide
  Sense strand starting at position 3569 of SEQ ID NO: 1884560
gcagaaguucccuauauua

SEQ ID NO: 2274989 - RNA, 19 nt, Artificial Sequence
  Description of Artificial Sequence: Synthetic oligonucleotide
  Antisense strand to SEQ ID NO: 2274988
uaauauagggaacuucugc

SEQ ID NO: 2274990 - RNA, 19 nt, Artificial Sequence
  Description of Artificial Sequence: Synthetic oligonucleotide
  Sense strand starting at position 3697 of SEQ ID NO: 1884560
aguugugaucucuggaaag

SEQ ID NO: 2274991 - RNA, 19 nt, Artificial Sequence
  Description of Artificial Sequence: Synthetic oligonucleotide
  Antisense strand to SEQ ID NO: 2274990
cuuuccagagaucacaacu

SEQ ID NO: 2274992 - RNA, 19 nt, Artificial Sequence
  Description of Artificial Sequence: Synthetic oligonucleotide
  Sense strand starting at position 3699 of SEQ ID NO: 1884560
uugugaucucuggaaagca

SEQ ID NO: 2274993 - RNA, 19 nt, Artificial Sequence
  Description of Artificial Sequence: Synthetic oligonucleotide
  Antisense strand to SEQ ID NO: 2274992
ugcuuuccagagaucacaa

SEQ ID NO: 2274994 - RNA, 19 nt, Artificial Sequence
  Description of Artificial Sequence: Synthetic oligonucleotide
  Sense strand starting at position 3745 of SEQ ID NO: 1884560
auaccuuucgggcaugauu

SEQ ID NO: 2274995 - RNA, 19 nt, Artificial Sequence
  Description of Artificial Sequence: Synthetic oligonucleotide
  Antisense strand to SEQ ID NO: 2274994
aaucaugcccgaaagguau

SEQ ID NO: 2274996 - RNA, 19 nt, Artificial Sequence
  Description of Artificial Sequence: Synthetic oligonucleotide
  Sense strand starting at position 3889 of SEQ ID NO: 1884560
aguauaauugcacagacua

SEQ ID NO: 2274997 - RNA, 19 nt, Artificial Sequence
  Description of Artificial Sequence: Synthetic oligonucleotide
  Antisense strand to SEQ ID NO: 2274996
uagucugugcaauuauacu

SEQ ID NO: 2274998 - RNA, 19 nt, Artificial Sequence
  Description of Artificial Sequence: Synthetic oligonucleotide
  Sense strand starting at position 2 of SEQ ID NO: 1884561
gguucacugggcugguaua

SEQ ID NO: 2274999 - RNA, 19 nt, Artificial Sequence
  Description of Artificial Sequence: Synthetic oligonucleotide
  Antisense strand to SEQ ID NO: 2274998
uauaccagcccagugaacc

SEQ ID NO: 2275000 - RNA, 19 nt, Artificial Sequence
  Description of Artificial Sequence: Synthetic oligonucleotide
  Sense strand starting at position 98 of SEQ ID NO: 1884561
agaacaugcgguuaucaag

SEQ ID NO: 2275001 - RNA, 19 nt, Artificial Sequence
  Description of Artificial Sequence: Synthetic oligonucleotide
  Antisense strand to SEQ ID NO: 2275000
cuugauaaccgcauguucu

SEQ ID NO: 2275002 - RNA, 19 nt, Artificial Sequence
  Description of Artificial Sequence: Synthetic oligonucleotide
  Sense strand starting at position 155 of SEQ ID NO: 1884561
ccggaaauguagcugcaga

SEQ ID NO: 2275003 - RNA, 19 nt, Artificial Sequence
  Description of Artificial Sequence: Synthetic oligonucleotide
  Antisense strand to SEQ ID NO: 2275002
ucugcagcuacauuuccgg

SEQ ID NO: 2275004 - RNA, 19 nt, Artificial Sequence
  Description of Artificial Sequence: Synthetic oligonucleotide
  Sense strand starting at position 160 of SEQ ID NO: 1884561
aauguagcugcagaucaau

SEQ ID NO: 2275005 - RNA, 19 nt, Artificial Sequence
  Description of Artificial Sequence: Synthetic oligonucleotide
  Antisense strand to SEQ ID NO: 2275004
auugaucugcagcuacauu

SEQ ID NO: 2275006 - RNA, 19 nt, Artificial Sequence
  Description of Artificial Sequence: Synthetic oligonucleotide
  Sense strand starting at position 1053 of SEQ ID NO: 1884561
gugagcuauggucaagaca

SEQ ID NO: 2275007 - RNA, 19 nt, Artificial Sequence
  Description of Artificial Sequence: Synthetic oligonucleotide
  Antisense strand to SEQ ID NO: 2275006
ugucuugaccauagcucac

SEQ ID NO: 2275008 - RNA, 19 nt, Artificial Sequence
  Description of Artificial Sequence: Synthetic oligonucleotide
  Sense strand starting at position 1079 of SEQ ID NO: 1884561
ucugguucugaguaaucug

SEQ ID NO: 2275009 - RNA, 19 nt, Artificial Sequence
  Description of Artificial Sequence: Synthetic oligonucleotide
  Antisense strand to SEQ ID NO: 2275008
cagauuacucagaaccaga

SEQ ID NO: 2275010 - RNA, 19 nt, Artificial Sequence
  Description of Artificial Sequence: Synthetic oligonucleotide
  Sense strand starting at position 1082 of SEQ ID NO: 1884561
gguucugaguaaucugagu

SEQ ID NO: 2275011 - RNA, 19 nt, Artificial Sequence
  Description of Artificial Sequence: Synthetic oligonucleotide
  Antisense strand to SEQ ID NO: 2275010
acucagauuacucagaacc

SEQ ID NO: 2275012 - RNA, 19 nt, Artificial Sequence
  Description of Artificial Sequence: Synthetic oligonucleotide
  Sense strand starting at position 1087 of SEQ ID NO: 1884561
ugaguaaucugagucugag

SEQ ID NO: 2275013 - RNA, 19 nt, Artificial Sequence
  Description of Artificial Sequence: Synthetic oligonucleotide
  Antisense strand to SEQ ID NO: 2275012
cucagacucagauuacuca

SEQ ID NO: 2275014 - RNA, 19 nt, Artificial Sequence
  Description of Artificial Sequence: Synthetic oligonucleotide
  Sense strand starting at position 1090 of SEQ ID NO: 1884561
guaaucugagucugaguaa

SEQ ID NO: 2275015 - RNA, 19 nt, Artificial Sequence
  Description of Artificial Sequence: Synthetic oligonucleotide
  Antisense strand to SEQ ID NO: 2275014
uuacucagacucagauuac

SEQ ID NO: 2275016 - RNA, 19 nt, Artificial Sequence
  Description of Artificial Sequence: Synthetic oligonucleotide
  Sense strand starting at position 1103 of SEQ ID NO: 1884561
gaguaaagcgacuguaaua

SEQ ID NO: 2275017 - RNA, 19 nt, Artificial Sequence
  Description of Artificial Sequence: Synthetic oligonucleotide
  Antisense strand to SEQ ID NO: 2275016
uauuacagucgcuuuacuc

SEQ ID NO: 2275018 - RNA, 19 nt, Artificial Sequence
  Description of Artificial Sequence: Synthetic oligonucleotide
  Sense strand starting at position 1172 of SEQ ID NO: 1884561
gugccuagcagggaguauu

SEQ ID NO: 2275019 - RNA, 19 nt, Artificial Sequence
  Description of Artificial Sequence: Synthetic oligonucleotide
  Antisense strand to SEQ ID NO: 2275018
aauacucccugcuaggcac

SEQ ID NO: 2275020 - RNA, 19 nt, Artificial Sequence
  Description of Artificial Sequence: Synthetic oligonucleotide
  Sense strand starting at position 1201 of SEQ ID NO: 1884561
gguauuugcuuccuuccua

SEQ ID NO: 2275021 - RNA, 19 nt, Artificial Sequence
  Description of Artificial Sequence: Synthetic oligonucleotide
  Antisense strand to SEQ ID NO: 2275020
uaggaaggaagcaaauacc

SEQ ID NO: 2275022 - RNA, 19 nt, Artificial Sequence
  Description of Artificial Sequence: Synthetic oligonucleotide
  Sense strand starting at position 1226 of SEQ ID NO: 1884561
uagggaagaugaugagaua

SEQ ID NO: 2275023 - RNA, 19 nt, Artificial Sequence
  Description of Artificial Sequence: Synthetic oligonucleotide
  Antisense strand to SEQ ID NO: 2275022
uaucucaucaucuucccua

SEQ ID NO: 2275024 - RNA, 19 nt, Artificial Sequence
  Description of Artificial Sequence: Synthetic oligonucleotide
  Sense strand starting at position 1229 of SEQ ID NO: 1884561
ggaagaugaugagauaaug

SEQ ID NO: 2275025 - RNA, 19 nt, Artificial Sequence
  Description of Artificial Sequence: Synthetic oligonucleotide
  Antisense strand to SEQ ID NO: 2275024
cauuaucucaucaucuucc

SEQ ID NO: 2275026 - RNA, 19 nt, Artificial Sequence
  Description of Artificial Sequence: Synthetic oligonucleotide
  Sense strand starting at position 1256 of SEQ ID NO: 1884561
gaaagagggcuguaaacgu

SEQ ID NO: 2275027 - RNA, 19 nt, Artificial Sequence
  Description of Artificial Sequence: Synthetic oligonucleotide
  Antisense strand to SEQ ID NO: 2275026
acguuuacagcccucuuuc

SEQ ID NO: 2275028 - RNA, 19 nt, Artificial Sequence
  Description of Artificial Sequence: Synthetic oligonucleotide
  Sense strand starting at position 1271 of SEQ ID NO: 1884561
acguaaagaucuguacaaa

SEQ ID NO: 2275029 - RNA, 19 nt, Artificial Sequence
  Description of Artificial Sequence: Synthetic oligonucleotide
  Antisense strand to SEQ ID NO: 2275028
uuuguacagaucuuuacgu

SEQ ID NO: 2275030 - RNA, 19 nt, Artificial Sequence
  Description of Artificial Sequence: Synthetic oligonucleotide
  Sense strand starting at position 1272 of SEQ ID NO: 1884561
cguaaagaucuguacaaau

SEQ ID NO: 2275031 - RNA, 19 nt, Artificial Sequence
  Description of Artificial Sequence: Synthetic oligonucleotide
  Antisense strand to SEQ ID NO: 2275030
auuuguacagaucuuuacg

SEQ ID NO: 2275032 - RNA, 19 nt, Artificial Sequence
  Description of Artificial Sequence: Synthetic oligonucleotide
  Sense strand starting at position 1444 of SEQ ID NO: 1884561
gccauuuauugagcuucca

SEQ ID NO: 2275033 - RNA, 19 nt, Artificial Sequence
  Description of Artificial Sequence: Synthetic oligonucleotide
  Antisense strand to SEQ ID NO: 2275032
uggaagcucaauaaauggc

SEQ ID NO: 2275034 - RNA, 19 nt, Artificial Sequence
  Description of Artificial Sequence: Synthetic oligonucleotide
  Sense strand starting at position 1474 of SEQ ID NO: 1884561
ucuguuuggcacugagaau

SEQ ID NO: 2275035 - RNA, 19 nt, Artificial Sequence
  Description of Artificial Sequence: Synthetic oligonucleotide
  Antisense strand to SEQ ID NO: 2275034
auucucagugccaaacaga

SEQ ID NO: 2275036 - RNA, 19 nt, Artificial Sequence
  Description of Artificial Sequence: Synthetic oligonucleotide
  Sense strand starting at position 1475 of SEQ ID NO: 1884561
cuguuuggcacugagaaua

SEQ ID NO: 2275037 - RNA, 19 nt, Artificial Sequence
  Description of Artificial Sequence: Synthetic oligonucleotide
  Antisense strand to SEQ ID NO: 2275036
uauucucagugccaaacag

SEQ ID NO: 2275038 - RNA, 19 nt, Artificial Sequence
  Description of Artificial Sequence: Synthetic oligonucleotide
  Sense strand starting at position 1631 of SEQ ID NO: 1884561
ggccaagugccugagaguu

SEQ ID NO: 2275039 - RNA, 19 nt, Artificial Sequence
  Description of Artificial Sequence: Synthetic oligonucleotide
  Antisense strand to SEQ ID NO: 2275038
aacucucaggcacuuggcc

SEQ ID NO: 2275040 - RNA, 19 nt, Artificial Sequence
  Description of Artificial Sequence: Synthetic oligonucleotide
  Sense strand starting at position 1637 of SEQ ID NO: 1884561
gugccugagaguuggaagu

SEQ ID NO: 2275041 - RNA, 19 nt, Artificial Sequence
  Description of Artificial Sequence: Synthetic oligonucleotide
  Antisense strand to SEQ ID NO: 2275040
acuuccaacucucaggcac

SEQ ID NO: 2275042 - RNA, 19 nt, Artificial Sequence
  Description of Artificial Sequence: Synthetic oligonucleotide
  Sense strand starting at position 1696 of SEQ ID NO: 1884561
gcacggguucggcagaaga

SEQ ID NO: 2275043 - RNA, 19 nt, Artificial Sequence
  Description of Artificial Sequence: Synthetic oligonucleotide
  Antisense strand to SEQ ID NO: 2275042
ucuucugccgaacccgugc

SEQ ID NO: 2275044 - RNA, 19 nt, Artificial Sequence
  Description of Artificial Sequence: Synthetic oligonucleotide
  Sense strand starting at position 1789 of SEQ ID NO: 1884561
gccucucgcccuuagaaau

SEQ ID NO: 2275045 - RNA, 19 nt, Artificial Sequence
  Description of Artificial Sequence: Synthetic oligonucleotide
  Antisense strand to SEQ ID NO: 2275044
auuucuaagggcgagaggc

SEQ ID NO: 2275046 - RNA, 19 nt, Artificial Sequence
  Description of Artificial Sequence: Synthetic oligonucleotide
  Sense strand starting at position 1799 of SEQ ID NO: 1884561
cuuagaaaucgcgagcuga

SEQ ID NO: 2275047 - RNA, 19 nt, Artificial Sequence
  Description of Artificial Sequence: Synthetic oligonucleotide
  Antisense strand to SEQ ID NO: 2275046
ucagcucgcgauuucuaag

SEQ ID NO: 2275048 - RNA, 19 nt, Artificial Sequence
  Description of Artificial Sequence: Synthetic oligonucleotide
  Sense strand starting at position 1803 of SEQ ID NO: 1884561
gaaaucgcgagcugagaaa

SEQ ID NO: 2275049 - RNA, 19 nt, Artificial Sequence
  Description of Artificial Sequence: Synthetic oligonucleotide
  Antisense strand to SEQ ID NO: 2275048
uuucucagcucgcgauuuc

SEQ ID NO: 2275050 - RNA, 19 nt, Artificial Sequence
  Description of Artificial Sequence: Synthetic oligonucleotide
  Sense strand starting at position 2918 of SEQ ID NO: 1884561
gagagacaggcaugguaau

SEQ ID NO: 2275051 - RNA, 19 nt, Artificial Sequence
  Description of Artificial Sequence: Synthetic oligonucleotide
  Antisense strand to SEQ ID NO: 2275050
auuaccaugccugucucuc

SEQ ID NO: 2275052 - RNA, 19 nt, Artificial Sequence
  Description of Artificial Sequence: Synthetic oligonucleotide
  Sense strand starting at position 2938 of SEQ ID NO: 1884561
guucuucuucuguagacga

SEQ ID NO: 2275053 - RNA, 19 nt, Artificial Sequence
  Description of Artificial Sequence: Synthetic oligonucleotide
  Antisense strand to SEQ ID NO: 2275052
ucgucuacagaagaagaac

SEQ ID NO: 2275054 - RNA, 19 nt, Artificial Sequence
  Description of Artificial Sequence: Synthetic oligonucleotide
  Sense strand starting at position 2940 of SEQ ID NO: 1884561
ucuucuucuguagacgaga

SEQ ID NO: 2275055 - RNA, 19 nt, Artificial Sequence
  Description of Artificial Sequence: Synthetic oligonucleotide
  Antisense strand to SEQ ID NO: 2275054
ucucgucuacagaagaaga

SEQ ID NO: 2275056 - RNA, 19 nt, Artificial Sequence
  Description of Artificial Sequence: Synthetic oligonucleotide
  Sense strand starting at position 2942 of SEQ ID NO: 1884561
uucuucuguagacgagaaa

SEQ ID NO: 2275057 - RNA, 19 nt, Artificial Sequence
  Description of Artificial Sequence: Synthetic oligonucleotide
  Antisense strand to SEQ ID NO: 2275056
uuucucgucuacagaagaa

SEQ ID NO: 2275058 - RNA, 19 nt, Artificial Sequence
  Description of Artificial Sequence: Synthetic oligonucleotide
  Sense strand starting at position 2980 of SEQ ID NO: 1884561
uaaugucacacggauggua

SEQ ID NO: 2275059 - RNA, 19 nt, Artificial Sequence
  Description of Artificial Sequence: Synthetic oligonucleotide
  Antisense strand to SEQ ID NO: 2275058
uaccauccgugugacauua

SEQ ID NO: 2275060 - RNA, 19 nt, Artificial Sequence
  Description of Artificial Sequence: Synthetic oligonucleotide
  Sense strand starting at position 2982 of SEQ ID NO: 1884561
augucacacggaugguaaa

SEQ ID NO: 2275061 - RNA, 19 nt, Artificial Sequence
  Description of Artificial Sequence: Synthetic oligonucleotide
  Antisense strand to SEQ ID NO: 2275060
uuuaccauccgugugacau

SEQ ID NO: 2275062 - RNA, 19 nt, Artificial Sequence
  Description of Artificial Sequence: Synthetic oligonucleotide
  Sense strand starting at position 3248 of SEQ ID NO: 1884561
augaaagaucgugaugcca

SEQ ID NO: 2275063 - RNA, 19 nt, Artificial Sequence
  Description of Artificial Sequence: Synthetic oligonucleotide
  Antisense strand to SEQ ID NO: 2275062
uggcaucacgaucuuucau

SEQ ID NO: 2275064 - RNA, 19 nt, Artificial Sequence
  Description of Artificial Sequence: Synthetic oligonucleotide
  Sense strand starting at position 3272 of SEQ ID NO: 1884561
aaguguuuggacugaauua

SEQ ID NO: 2275065 - RNA, 19 nt, Artificial Sequence
  Description of Artificial Sequence: Synthetic oligonucleotide
  Antisense strand to SEQ ID NO: 2275064
uaauucaguccaaacacuu

SEQ ID NO: 2275066 - RNA, 19 nt, Artificial Sequence
  Description of Artificial Sequence: Synthetic oligonucleotide
  Sense strand starting at position 3273 of SEQ ID NO: 1884561
aguguuuggacugaauuag

SEQ ID NO: 2275067 - RNA, 19 nt, Artificial Sequence
  Description of Artificial Sequence: Synthetic oligonucleotide
  Antisense strand to SEQ ID NO: 2275066
cuaauucaguccaaacacu

SEQ ID NO: 2275068 - RNA, 19 nt, Artificial Sequence
  Description of Artificial Sequence: Synthetic oligonucleotide
  Sense strand starting at position 3307 of SEQ ID NO: 1884561
agucauugaugcucuagaa

SEQ ID NO: 2275069 - RNA, 19 nt, Artificial Sequence
  Description of Artificial Sequence: Synthetic oligonucleotide
  Antisense strand to SEQ ID NO: 2275068
uucuagagcaucaaugacu

SEQ ID NO: 2275070 - RNA, 19 nt, Artificial Sequence
  Description of Artificial Sequence: Synthetic oligonucleotide
  Sense strand starting at position 3337 of SEQ ID NO: 1884561
aagaaagagugggaacaau

SEQ ID NO: 2275071 - RNA, 19 nt, Artificial Sequence
  Description of Artificial Sequence: Synthetic oligonucleotide
  Antisense strand to SEQ ID NO: 2275070
auuguucccacucuuucuu

SEQ ID NO: 2275072 - RNA, 19 nt, Artificial Sequence
  Description of Artificial Sequence: Synthetic oligonucleotide
  Sense strand starting at position 3569 of SEQ ID NO: 1884561
uagaauauuucuuggagua

SEQ ID NO: 2275073 - RNA, 19 nt, Artificial Sequence
  Description of Artificial Sequence: Synthetic oligonucleotide
  Antisense strand to SEQ ID NO: 2275072
uacuccaagaaauauucua

SEQ ID NO: 2275074 - RNA, 19 nt, Artificial Sequence
  Description of Artificial Sequence: Synthetic oligonucleotide
  Sense strand starting at position 3571 of SEQ ID NO: 1884561
gaauauuucuuggaguauu

SEQ ID NO: 2275075 - RNA, 19 nt, Artificial Sequence
  Description of Artificial Sequence: Synthetic oligonucleotide
  Antisense strand to SEQ ID NO: 2275074
aauacuccaagaaauauuc

SEQ ID NO: 2275076 - RNA, 19 nt, Artificial Sequence
  Description of Artificial Sequence: Synthetic oligonucleotide
  Sense strand starting at position 3971 of SEQ ID NO: 1884561
auucuaagugaaugaaagu

SEQ ID NO: 2275077 - RNA, 19 nt, Artificial Sequence
  Description of Artificial Sequence: Synthetic oligonucleotide
  Antisense strand to SEQ ID NO: 2275076
acuuucauucacuuagaau

SEQ ID NO: 2275078 - RNA, 19 nt, Artificial Sequence
  Description of Artificial Sequence: Synthetic oligonucleotide
  Sense strand starting at position 62 of SEQ ID NO: 1884562
gggccugacucguuaaagg

SEQ ID NO: 2275079 - RNA, 19 nt, Artificial Sequence
  Description of Artificial Sequence: Synthetic oligonucleotide
  Antisense strand to SEQ ID NO: 2275078
ccuuuaacgagucaggccc

SEQ ID NO: 2275080 - RNA, 19 nt, Artificial Sequence
  Description of Artificial Sequence: Synthetic oligonucleotide
  Sense strand starting at position 67 of SEQ ID NO: 1884562
ugacucguuaaaggagauu

SEQ ID NO: 2275081 - RNA, 19 nt, Artificial Sequence
  Description of Artificial Sequence: Synthetic oligonucleotide
  Antisense strand to SEQ ID NO: 2275080
aaucuccuuuaacgaguca

SEQ ID NO: 2275082 - RNA, 19 nt, Artificial Sequence
  Description of Artificial Sequence: Synthetic oligonucleotide
  Sense strand starting at position 70 of SEQ ID NO: 1884562
cucguuaaaggagauuauu

SEQ ID NO: 2275083 - RNA, 19 nt, Artificial Sequence
  Description of Artificial Sequence: Synthetic oligonucleotide
  Antisense strand to SEQ ID NO: 2275082
aauaaucuccuuuaacgag

SEQ ID NO: 2275084 - RNA, 19 nt, Artificial Sequence
  Description of Artificial Sequence: Synthetic oligonucleotide
  Sense strand starting at position 78 of SEQ ID NO: 1884562
aggagauuauuauagugau

SEQ ID NO: 2275085 - RNA, 19 nt, Artificial Sequence
  Description of Artificial Sequence: Synthetic oligonucleotide
  Antisense strand to SEQ ID NO: 2275084
aucacuauaauaaucuccu

SEQ ID NO: 2275086 - RNA, 19 nt, Artificial Sequence
  Description of Artificial Sequence: Synthetic oligonucleotide
  Sense strand starting at position 84 of SEQ ID NO: 1884562
uuauuauagugauuggcag

SEQ ID NO: 2275087 - RNA, 19 nt, Artificial Sequence
  Description of Artificial Sequence: Synthetic oligonucleotide
  Antisense strand to SEQ ID NO: 2275086
cugccaaucacuauaauaa

SEQ ID NO: 2275088 - RNA, 19 nt, Artificial Sequence
  Description of Artificial Sequence: Synthetic oligonucleotide
  Sense strand starting at position 115 of SEQ ID NO: 1884562
gagccuuguggucaggcaa

SEQ ID NO: 2275089 - RNA, 19 nt, Artificial Sequence
  Description of Artificial Sequence: Synthetic oligonucleotide
  Antisense strand to SEQ ID NO: 2275088
uugccugaccacaaggcuc

SEQ ID NO: 2275090 - RNA, 19 nt, Artificial Sequence
  Description of Artificial Sequence: Synthetic oligonucleotide
  Sense strand starting at position 158 of SEQ ID NO: 1884562
aguaucauggcccaugaaa

SEQ ID NO: 2275091 - RNA, 19 nt, Artificial Sequence
  Description of Artificial Sequence: Synthetic oligonucleotide
  Antisense strand to SEQ ID NO: 2275090
uuucaugggccaugauacu

SEQ ID NO: 2275092 - RNA, 19 nt, Artificial Sequence
  Description of Artificial Sequence: Synthetic oligonucleotide
  Sense strand starting at position 517 of SEQ ID NO: 1884562
aggguagcggugaguugau

SEQ ID NO: 2275093 - RNA, 19 nt, Artificial Sequence
  Description of Artificial Sequence: Synthetic oligonucleotide
  Antisense strand to SEQ ID NO: 2275092
aucaacucaccgcuacccu

SEQ ID NO: 2275094 - RNA, 19 nt, Artificial Sequence
  Description of Artificial Sequence: Synthetic oligonucleotide
  Sense strand starting at position 527 of SEQ ID NO: 1884562
ugaguugauccugggaaga

SEQ ID NO: 2275095 - RNA, 19 nt, Artificial Sequence
  Description of Artificial Sequence: Synthetic oligonucleotide
  Antisense strand to SEQ ID NO: 2275094
ucuucccaggaucaacuca

SEQ ID NO: 2275096 - RNA, 19 nt, Artificial Sequence
  Description of Artificial Sequence: Synthetic oligonucleotide
  Sense strand starting at position 529 of SEQ ID NO: 1884562
aguugauccugggaagaag

SEQ ID NO: 2275097 - RNA, 19 nt, Artificial Sequence
  Description of Artificial Sequence: Synthetic oligonucleotide
  Antisense strand to SEQ ID NO: 2275096
cuucuucccaggaucaacu

SEQ ID NO: 2275098 - RNA, 19 nt, Artificial Sequence
  Description of Artificial Sequence: Synthetic oligonucleotide
  Sense strand starting at position 983 of SEQ ID NO: 1884562
augggcugcacucaguaaa

SEQ ID NO: 2275099 - RNA, 19 nt, Artificial Sequence
  Description of Artificial Sequence: Synthetic oligonucleotide
  Antisense strand to SEQ ID NO: 2275098
uuuacugagugcagcccau

SEQ ID NO: 2275100 - RNA, 19 nt, Artificial Sequence
  Description of Artificial Sequence: Synthetic oligonucleotide
  Sense strand starting at position 1292 of SEQ ID NO: 1884562
acaagcuucuguguguaua

SEQ ID NO: 2275101 - RNA, 19 nt, Artificial Sequence
  Description of Artificial Sequence: Synthetic oligonucleotide
  Antisense strand to SEQ ID NO: 2275100
uauacacacagaagcuugu

SEQ ID NO: 2275102 - RNA, 19 nt, Artificial Sequence
  Description of Artificial Sequence: Synthetic oligonucleotide
  Sense strand starting at position 1294 of SEQ ID NO: 1884562
aagcuucuguguguauaca

SEQ ID NO: 2275103 - RNA, 19 nt, Artificial Sequence
  Description of Artificial Sequence: Synthetic oligonucleotide
  Antisense strand to SEQ ID NO: 2275102
uguauacacacagaagcuu

SEQ ID NO: 2275104 - RNA, 19 nt, Artificial Sequence
  Description of Artificial Sequence: Synthetic oligonucleotide
  Sense strand starting at position 1343 of SEQ ID NO: 1884562
agaggacaucucuguguag

SEQ ID NO: 2275105 - RNA, 19 nt, Artificial Sequence
  Description of Artificial Sequence: Synthetic oligonucleotide
  Antisense strand to SEQ ID NO: 2275104
cuacacagagauguccucu

SEQ ID NO: 2275106 - RNA, 19 nt, Artificial Sequence
  Description of Artificial Sequence: Synthetic oligonucleotide
  Sense strand starting at position 1344 of SEQ ID NO: 1884562
gaggacaucucuguguagu

SEQ ID NO: 2275107 - RNA, 19 nt, Artificial Sequence
  Description of Artificial Sequence: Synthetic oligonucleotide
  Antisense strand to SEQ ID NO: 2275106
acuacacagagauguccuc

SEQ ID NO: 2275108 - RNA, 19 nt, Artificial Sequence
  Description of Artificial Sequence: Synthetic oligonucleotide
  Sense strand starting at position 1345 of SEQ ID NO: 1884562
aggacaucucuguguagua

SEQ ID NO: 2275109 - RNA, 19 nt, Artificial Sequence
  Description of Artificial Sequence: Synthetic oligonucleotide
  Antisense strand to SEQ ID NO: 2275108
uacuacacagagauguccu

SEQ ID NO: 2275110 - RNA, 19 nt, Artificial Sequence
  Description of Artificial Sequence: Synthetic oligonucleotide
  Sense strand starting at position 1346 of SEQ ID NO: 1884562
ggacaucucuguguaguag

SEQ ID NO: 2275111 - RNA, 19 nt, Artificial Sequence
  Description of Artificial Sequence: Synthetic oligonucleotide
  Antisense strand to SEQ ID NO: 2275110
cuacuacacagagaugucc

SEQ ID NO: 2275112 - RNA, 19 nt, Artificial Sequence
  Description of Artificial Sequence: Synthetic oligonucleotide
  Sense strand starting at position 1520 of SEQ ID NO: 1884562
uggaaaugguucucugggu

SEQ ID NO: 2275113 - RNA, 19 nt, Artificial Sequence
  Description of Artificial Sequence: Synthetic oligonucleotide
  Antisense strand to SEQ ID NO: 2275112
acccagagaaccauuucca

SEQ ID NO: 2275114 - RNA, 19 nt, Artificial Sequence
  Description of Artificial Sequence: Synthetic oligonucleotide
  Sense strand starting at position 1590 of SEQ ID NO: 1884562
uccauucucugaucuguca

SEQ ID NO: 2275115 - RNA, 19 nt, Artificial Sequence
  Description of Artificial Sequence: Synthetic oligonucleotide
  Antisense strand to SEQ ID NO: 2275114
ugacagaucagagaaugga

SEQ ID NO: 2275116 - RNA, 19 nt, Artificial Sequence
  Description of Artificial Sequence: Synthetic oligonucleotide
  Sense strand starting at position 1622 of SEQ ID NO: 1884562
guggauuccuuccugggaa

SEQ ID NO: 2275117 - RNA, 19 nt, Artificial Sequence
  Description of Artificial Sequence: Synthetic oligonucleotide
  Antisense strand to SEQ ID NO: 2275116
uucccaggaaggaauccac

SEQ ID NO: 2275118 - RNA, 19 nt, Artificial Sequence
  Description of Artificial Sequence: Synthetic oligonucleotide
  Sense strand starting at position 1624 of SEQ ID NO: 1884562
ggauuccuuccugggaacu

SEQ ID NO: 2275119 - RNA, 19 nt, Artificial Sequence
  Description of Artificial Sequence: Synthetic oligonucleotide
  Antisense strand to SEQ ID NO: 2275118
aguucccaggaaggaaucc

SEQ ID NO: 2275120 - RNA, 19 nt, Artificial Sequence
  Description of Artificial Sequence: Synthetic oligonucleotide
  Sense strand starting at position 1641 of SEQ ID NO: 1884562
cugccaucacucgaaauga

SEQ ID NO: 2275121 - RNA, 19 nt, Artificial Sequence
  Description of Artificial Sequence: Synthetic oligonucleotide
  Antisense strand to SEQ ID NO: 2275120
ucauuucgagugauggcag

SEQ ID NO: 2275122 - RNA, 19 nt, Artificial Sequence
  Description of Artificial Sequence: Synthetic oligonucleotide
  Sense strand starting at position 1890 of SEQ ID NO: 1884562
gcuguccucauuugagagu

SEQ ID NO: 2275123 - RNA, 19 nt, Artificial Sequence
  Description of Artificial Sequence: Synthetic oligonucleotide
  Antisense strand to SEQ ID NO: 2275122
acucucaaaugaggacagc

SEQ ID NO: 2275124 - RNA, 19 nt, Artificial Sequence
  Description of Artificial Sequence: Synthetic oligonucleotide
  Sense strand starting at position 2083 of SEQ ID NO: 1884562
ccugaugaaucugagcaga

SEQ ID NO: 2275125 - RNA, 19 nt, Artificial Sequence
  Description of Artificial Sequence: Synthetic oligonucleotide
  Antisense strand to SEQ ID NO: 2275124
ucugcucagauucaucagg

SEQ ID NO: 2275126 - RNA, 19 nt, Artificial Sequence
  Description of Artificial Sequence: Synthetic oligonucleotide
  Sense strand starting at position 2085 of SEQ ID NO: 1884562
ugaugaaucugagcagaau

SEQ ID NO: 2275127 - RNA, 19 nt, Artificial Sequence
  Description of Artificial Sequence: Synthetic oligonucleotide
  Antisense strand to SEQ ID NO: 2275126
auucugcucagauucauca

SEQ ID NO: 2275128 - RNA, 19 nt, Artificial Sequence
  Description of Artificial Sequence: Synthetic oligonucleotide
  Sense strand starting at position 2559 of SEQ ID NO: 1884562
gggugugugcugugggaua

SEQ ID NO: 2275129 - RNA, 19 nt, Artificial Sequence
  Description of Artificial Sequence: Synthetic oligonucleotide
  Antisense strand to SEQ ID NO: 2275128
uaucccacagcacacaccc

SEQ ID NO: 2275130 - RNA, 19 nt, Artificial Sequence
  Description of Artificial Sequence: Synthetic oligonucleotide
  Sense strand starting at position 2629 of SEQ ID NO: 1884562
agccaaugagcagaaguaa

SEQ ID NO: 2275131 - RNA, 19 nt, Artificial Sequence
  Description of Artificial Sequence: Synthetic oligonucleotide
  Antisense strand to SEQ ID NO: 2275130
uuacuucugcucauuggcu

SEQ ID NO: 2275132 - RNA, 19 nt, Artificial Sequence
  Description of Artificial Sequence: Synthetic oligonucleotide
  Sense strand starting at position 2768 of SEQ ID NO: 1884562
gcugccuugagguauagaa

SEQ ID NO: 2275133 - RNA, 19 nt, Artificial Sequence
  Description of Artificial Sequence: Synthetic oligonucleotide
  Antisense strand to SEQ ID NO: 2275132
uucuauaccucaaggcagc

SEQ ID NO: 2275134 - RNA, 19 nt, Artificial Sequence
  Description of Artificial Sequence: Synthetic oligonucleotide
  Sense strand starting at position 2798 of SEQ ID NO: 1884562
caaagauauuugugacugu

SEQ ID NO: 2275135 - RNA, 19 nt, Artificial Sequence
  Description of Artificial Sequence: Synthetic oligonucleotide
  Antisense strand to SEQ ID NO: 2275134
acagucacaaauaucuuug

SEQ ID NO: 2275136 - RNA, 19 nt, Artificial Sequence
  Description of Artificial Sequence: Synthetic oligonucleotide
  Sense strand starting at position 2799 of SEQ ID NO: 1884562
aaagauauuugugacugua

SEQ ID NO: 2275137 - RNA, 19 nt, Artificial Sequence
  Description of Artificial Sequence: Synthetic oligonucleotide
  Antisense strand to SEQ ID NO: 2275136
uacagucacaaauaucuuu

SEQ ID NO: 2275138 - RNA, 19 nt, Artificial Sequence
  Description of Artificial Sequence: Synthetic oligonucleotide
  Sense strand starting at position 2812 of SEQ ID NO: 1884562
acuguagaauucguaacca

SEQ ID NO: 2275139 - RNA, 19 nt, Artificial Sequence
  Description of Artificial Sequence: Synthetic oligonucleotide
  Antisense strand to SEQ ID NO: 2275138
ugguuacgaauucuacagu

SEQ ID NO: 2275140 - RNA, 19 nt, Artificial Sequence
  Description of Artificial Sequence: Synthetic oligonucleotide
  Sense strand starting at position 3196 of SEQ ID NO: 1884562
cgggaauaccaauggguca

SEQ ID NO: 2275141 - RNA, 19 nt, Artificial Sequence
  Description of Artificial Sequence: Synthetic oligonucleotide
  Antisense strand to SEQ ID NO: 2275140
ugacccauugguauucccg

SEQ ID NO: 2275142 - RNA, 19 nt, Artificial Sequence
  Description of Artificial Sequence: Synthetic oligonucleotide
  Sense strand starting at position 3208 of SEQ ID NO: 1884562
ugggucacccugcaucaaa

SEQ ID NO: 2275143 - RNA, 19 nt, Artificial Sequence
  Description of Artificial Sequence: Synthetic oligonucleotide
  Antisense strand to SEQ ID NO: 2275142
uuugaugcagggugaccca

SEQ ID NO: 2275144 - RNA, 19 nt, Artificial Sequence
  Description of Artificial Sequence: Synthetic oligonucleotide
  Sense strand starting at position 3362 of SEQ ID NO: 1884562
ccagauguggaaugugaca

SEQ ID NO: 2275145 - RNA, 19 nt, Artificial Sequence
  Description of Artificial Sequence: Synthetic oligonucleotide
  Antisense strand to SEQ ID NO: 2275144
ugucacauuccacaucugg

SEQ ID NO: 2275146 - RNA, 19 nt, Artificial Sequence
  Description of Artificial Sequence: Synthetic oligonucleotide
  Sense strand starting at position 3364 of SEQ ID NO: 1884562
agauguggaaugugacaga

SEQ ID NO: 2275147 - RNA, 19 nt, Artificial Sequence
  Description of Artificial Sequence: Synthetic oligonucleotide
  Antisense strand to SEQ ID NO: 2275146
ucugucacauuccacaucu

SEQ ID NO: 2275148 - RNA, 19 nt, Artificial Sequence
  Description of Artificial Sequence: Synthetic oligonucleotide
  Sense strand starting at position 3367 of SEQ ID NO: 1884562
uguggaaugugacagagaa

SEQ ID NO: 2275149 - RNA, 19 nt, Artificial Sequence
  Description of Artificial Sequence: Synthetic oligonucleotide
  Antisense strand to SEQ ID NO: 2275148
uucucugucacauuccaca

SEQ ID NO: 2275150 - RNA, 19 nt, Artificial Sequence
  Description of Artificial Sequence: Synthetic oligonucleotide
  Sense strand starting at position 3421 of SEQ ID NO: 1884562
aucauacguuaaucaauga

SEQ ID NO: 2275151 - RNA, 19 nt, Artificial Sequence
  Description of Artificial Sequence: Synthetic oligonucleotide
  Antisense strand to SEQ ID NO: 2275150
ucauugauuaacguaugau

SEQ ID NO: 2275152 - RNA, 19 nt, Artificial Sequence
  Description of Artificial Sequence: Synthetic oligonucleotide
  Sense strand starting at position 3479 of SEQ ID NO: 1884562
aggccacuuccucagauaa

SEQ ID NO: 2275153 - RNA, 19 nt, Artificial Sequence
  Description of Artificial Sequence: Synthetic oligonucleotide
  Antisense strand to SEQ ID NO: 2275152
uuaucugaggaaguggccu

SEQ ID NO: 2275154 - RNA, 19 nt, Artificial Sequence
  Description of Artificial Sequence: Synthetic oligonucleotide
  Sense strand starting at position 3844 of SEQ ID NO: 1884562
ccaccauacucgucugaua

SEQ ID NO: 2275155 - RNA, 19 nt, Artificial Sequence
  Description of Artificial Sequence: Synthetic oligonucleotide
  Antisense strand to SEQ ID NO: 2275154
uaucagacgaguauggugg

SEQ ID NO: 2275156 - RNA, 19 nt, Artificial Sequence
  Description of Artificial Sequence: Synthetic oligonucleotide
  Sense strand starting at position 3846 of SEQ ID NO: 1884562
accauacucgucugauaaa

SEQ ID NO: 2275157 - RNA, 19 nt, Artificial Sequence
  Description of Artificial Sequence: Synthetic oligonucleotide
  Antisense strand to SEQ ID NO: 2275156
uuuaucagacgaguauggu

SEQ ID NO: 2275158 - RNA, 19 nt, Artificial Sequence
  Description of Artificial Sequence: Synthetic oligonucleotide
  Sense strand starting at position 13 of SEQ ID NO: 1884563
auggcagcggcugauaaau

SEQ ID NO: 2275159 - RNA, 19 nt, Artificial Sequence
  Description of Artificial Sequence: Synthetic oligonucleotide
  Antisense strand to SEQ ID NO: 2275158
auuuaucagccgcugccau

SEQ ID NO: 2275160 - RNA, 19 nt, Artificial Sequence
  Description of Artificial Sequence: Synthetic oligonucleotide
  Sense strand starting at position 22 of SEQ ID NO: 1884563
gcugauaaaugcuugugaa

SEQ ID NO: 2275161 - RNA, 19 nt, Artificial Sequence
  Description of Artificial Sequence: Synthetic oligonucleotide
  Antisense strand to SEQ ID NO: 2275160
uucacaagcauuuaucagc

SEQ ID NO: 2275162 - RNA, 19 nt, Artificial Sequence
  Description of Artificial Sequence: Synthetic oligonucleotide
  Sense strand starting at position 23 of SEQ ID NO: 1884563
cugauaaaugcuugugaaa

SEQ ID NO: 2275163 - RNA, 19 nt, Artificial Sequence
  Description of Artificial Sequence: Synthetic oligonucleotide
  Antisense strand to SEQ ID NO: 2275162
uuucacaagcauuuaucag

SEQ ID NO: 2275164 - RNA, 19 nt, Artificial Sequence
  Description of Artificial Sequence: Synthetic oligonucleotide
  Sense strand starting at position 176 of SEQ ID NO: 1884563
ugacaaaccugugucaucu

SEQ ID NO: 2275165 - RNA, 19 nt, Artificial Sequence
  Description of Artificial Sequence: Synthetic oligonucleotide
  Antisense strand to SEQ ID NO: 2275164
agaugacacagguuuguca

SEQ ID NO: 2275166 - RNA, 19 nt, Artificial Sequence
  Description of Artificial Sequence: Synthetic oligonucleotide
  Sense strand starting at position 193 of SEQ ID NO: 1884563
cuggcuuagcauuaaugau

SEQ ID NO: 2275167 - RNA, 19 nt, Artificial Sequence
  Description of Artificial Sequence: Synthetic oligonucleotide
  Antisense strand to SEQ ID NO: 2275166
aucauuaaugcuaagccag

SEQ ID NO: 2275168 - RNA, 19 nt, Artificial Sequence
  Description of Artificial Sequence: Synthetic oligonucleotide
  Sense strand starting at position 247 of SEQ ID NO: 1884563
uugacuaaugcucagcaua

SEQ ID NO: 2275169 - RNA, 19 nt, Artificial Sequence
  Description of Artificial Sequence: Synthetic oligonucleotide
  Antisense strand to SEQ ID NO: 2275168
uaugcugagcauuagucaa

SEQ ID NO: 2275170 - RNA, 19 nt, Artificial Sequence
  Description of Artificial Sequence: Synthetic oligonucleotide
  Sense strand starting at position 293 of SEQ ID NO: 1884563
augguaugugagcaagaca

SEQ ID NO: 2275171 - RNA, 19 nt, Artificial Sequence
  Description of Artificial Sequence: Synthetic oligonucleotide
  Antisense strand to SEQ ID NO: 2275170
ugucuugcucacauaccau

SEQ ID NO: 2275172 - RNA, 19 nt, Artificial Sequence
  Description of Artificial Sequence: Synthetic oligonucleotide
  Sense strand starting at position 410 of SEQ ID NO: 1884563
cccacacaugaaugugaua

SEQ ID NO: 2275173 - RNA, 19 nt, Artificial Sequence
  Description of Artificial Sequence: Synthetic oligonucleotide
  Antisense strand to SEQ ID NO: 2275172
uaucacauucauguguggg

SEQ ID NO: 2275174 - RNA, 19 nt, Artificial Sequence
  Description of Artificial Sequence: Synthetic oligonucleotide
  Sense strand starting at position 438 of SEQ ID NO: 1884563
ccuguaucauggccagaau

SEQ ID NO: 2275175 - RNA, 19 nt, Artificial Sequence
  Description of Artificial Sequence: Synthetic oligonucleotide
  Antisense strand to SEQ ID NO: 2275174
auucuggccaugauacagg

SEQ ID NO: 2275176 - RNA, 19 nt, Artificial Sequence
  Description of Artificial Sequence: Synthetic oligonucleotide
  Sense strand starting at position 439 of SEQ ID NO: 1884563
cuguaucauggccagaaua

SEQ ID NO: 2275177 - RNA, 19 nt, Artificial Sequence
  Description of Artificial Sequence: Synthetic oligonucleotide
  Antisense strand to SEQ ID NO: 2275176
uauucuggccaugauacag

SEQ ID NO: 2275178 - RNA, 19 nt, Artificial Sequence
  Description of Artificial Sequence: Synthetic oligonucleotide
  Sense strand starting at position 441 of SEQ ID NO: 1884563
guaucauggccagaauaca

SEQ ID NO: 2275179 - RNA, 19 nt, Artificial Sequence
  Description of Artificial Sequence: Synthetic oligonucleotide
  Antisense strand to SEQ ID NO: 2275178
uguauucuggccaugauac

SEQ ID NO: 2275180 - RNA, 19 nt, Artificial Sequence
  Description of Artificial Sequence: Synthetic oligonucleotide
  Sense strand starting at position 843 of SEQ ID NO: 1884563
uugauuaucugucucacac

SEQ ID NO: 2275181 - RNA, 19 nt, Artificial Sequence
  Description of Artificial Sequence: Synthetic oligonucleotide
  Antisense strand to SEQ ID NO: 2275180
gugugagacagauaaucaa

SEQ ID NO: 2275182 - RNA, 19 nt, Artificial Sequence
  Description of Artificial Sequence: Synthetic oligonucleotide
  Sense strand starting at position 900 of SEQ ID NO: 1884563
ucaugugaugcuugaaagg

SEQ ID NO: 2275183 - RNA, 19 nt, Artificial Sequence
  Description of Artificial Sequence: Synthetic oligonucleotide
  Antisense strand to SEQ ID NO: 2275182
ccuuucaagcaucacauga

SEQ ID NO: 2275184 - RNA, 19 nt, Artificial Sequence
  Description of Artificial Sequence: Synthetic oligonucleotide
  Sense strand starting at position 946 of SEQ ID NO: 1884563
uggcuuuggccauaauaaa

SEQ ID NO: 2275185 - RNA, 19 nt, Artificial Sequence
  Description of Artificial Sequence: Synthetic oligonucleotide
  Antisense strand to SEQ ID NO: 2275184
uuuauuauggccaaagcca

SEQ ID NO: 2275186 - RNA, 19 nt, Artificial Sequence
  Description of Artificial Sequence: Synthetic oligonucleotide
  Sense strand starting at position 981 of SEQ ID NO: 1884563
uuagaauccuucucugagg

SEQ ID NO: 2275187 - RNA, 19 nt, Artificial Sequence
  Description of Artificial Sequence: Synthetic oligonucleotide
  Antisense strand to SEQ ID NO: 2275186
ccucagagaaggauucuaa

SEQ ID NO: 2275188 - RNA, 19 nt, Artificial Sequence
  Description of Artificial Sequence: Synthetic oligonucleotide
  Sense strand starting at position 983 of SEQ ID NO: 1884563
agaauccuucucugagguu

SEQ ID NO: 2275189 - RNA, 19 nt, Artificial Sequence
  Description of Artificial Sequence: Synthetic oligonucleotide
  Antisense strand to SEQ ID NO: 2275188
aaccucagagaaggauucu

SEQ ID NO: 2275190 - RNA, 19 nt, Artificial Sequence
  Description of Artificial Sequence: Synthetic oligonucleotide
  Sense strand starting at position 1051 of SEQ ID NO: 1884563
gcuauaaagaugugaauga

SEQ ID NO: 2275191 - RNA, 19 nt, Artificial Sequence
  Description of Artificial Sequence: Synthetic oligonucleotide
  Antisense strand to SEQ ID NO: 2275190
ucauucacaucuuuauagc

SEQ ID NO: 2275192 - RNA, 19 nt, Artificial Sequence
  Description of Artificial Sequence: Synthetic oligonucleotide
  Sense strand starting at position 1071 of SEQ ID NO: 1884563
aggcuucgaacauggagaa

SEQ ID NO: 2275193 - RNA, 19 nt, Artificial Sequence
  Description of Artificial Sequence: Synthetic oligonucleotide
  Antisense strand to SEQ ID NO: 2275192
uucuccauguucgaagccu

SEQ ID NO: 2275194 - RNA, 19 nt, Artificial Sequence
  Description of Artificial Sequence: Synthetic oligonucleotide
  Sense strand starting at position 1072 of SEQ ID NO: 1884563
ggcuucgaacauggagaaa

SEQ ID NO: 2275195 - RNA, 19 nt, Artificial Sequence
  Description of Artificial Sequence: Synthetic oligonucleotide
  Antisense strand to SEQ ID NO: 2275194
uuucuccauguucgaagcc

SEQ ID NO: 2275196 - RNA, 19 nt, Artificial Sequence
  Description of Artificial Sequence: Synthetic oligonucleotide
  Sense strand starting at position 1092 of SEQ ID NO: 1884563
auguguuugcaggagggaa

SEQ ID NO: 2275197 - RNA, 19 nt, Artificial Sequence
  Description of Artificial Sequence: Synthetic oligonucleotide
  Antisense strand to SEQ ID NO: 2275196
uucccuccugcaaacacau

SEQ ID NO: 2275198 - RNA, 19 nt, Artificial Sequence
  Description of Artificial Sequence: Synthetic oligonucleotide
  Sense strand starting at position 1183 of SEQ ID NO: 1884563
cuguuaauaugagucaaug

SEQ ID NO: 2275199 - RNA, 19 nt, Artificial Sequence
  Description of Artificial Sequence: Synthetic oligonucleotide
  Antisense strand to SEQ ID NO: 2275198
cauugacucauauuaacag

SEQ ID NO: 2275200 - RNA, 19 nt, Artificial Sequence
  Description of Artificial Sequence: Synthetic oligonucleotide
  Sense strand starting at position 1338 of SEQ ID NO: 1884563
cgagauggguuaucucaca

SEQ ID NO: 2275201 - RNA, 19 nt, Artificial Sequence
  Description of Artificial Sequence: Synthetic oligonucleotide
  Antisense strand to SEQ ID NO: 2275200
ugugagauaacccaucucg

SEQ ID NO: 2275202 - RNA, 19 nt, Artificial Sequence
  Description of Artificial Sequence: Synthetic oligonucleotide
  Sense strand starting at position 1493 of SEQ ID NO: 1884563
agaugugaugacuguucua

SEQ ID NO: 2275203 - RNA, 19 nt, Artificial Sequence
  Description of Artificial Sequence: Synthetic oligonucleotide
  Antisense strand to SEQ ID NO: 2275202
uagaacagucaucacaucu

SEQ ID NO: 2275204 - RNA, 19 nt, Artificial Sequence
  Description of Artificial Sequence: Synthetic oligonucleotide
  Sense strand starting at position 1631 of SEQ ID NO: 1884563
gcugacucccugugacaau

SEQ ID NO: 2275205 - RNA, 19 nt, Artificial Sequence
  Description of Artificial Sequence: Synthetic oligonucleotide
  Antisense strand to SEQ ID NO: 2275204
auugucacagggagucagc

SEQ ID NO: 2275206 - RNA, 19 nt, Artificial Sequence
  Description of Artificial Sequence: Synthetic oligonucleotide
  Sense strand starting at position 1864 of SEQ ID NO: 1884563
cuccuuuaacucugaagag

SEQ ID NO: 2275207 - RNA, 19 nt, Artificial Sequence
  Description of Artificial Sequence: Synthetic oligonucleotide
  Antisense strand to SEQ ID NO: 2275206
cucuucagaguuaaaggag

SEQ ID NO: 2275208 - RNA, 19 nt, Artificial Sequence
  Description of Artificial Sequence: Synthetic oligonucleotide
  Sense strand starting at position 2019 of SEQ ID NO: 1884563
uggagcaugguagguuaua

SEQ ID NO: 2275209 - RNA, 19 nt, Artificial Sequence
  Description of Artificial Sequence: Synthetic oligonucleotide
  Antisense strand to SEQ ID NO: 2275208
uauaaccuaccaugcucca

SEQ ID NO: 2275210 - RNA, 19 nt, Artificial Sequence
  Description of Artificial Sequence: Synthetic oligonucleotide
  Sense strand starting at position 2020 of SEQ ID NO: 1884563
ggagcaugguagguuauaa

SEQ ID NO: 2275211 - RNA, 19 nt, Artificial Sequence
  Description of Artificial Sequence: Synthetic oligonucleotide
  Antisense strand to SEQ ID NO: 2275210
uuauaaccuaccaugcucc

SEQ ID NO: 2275212 - RNA, 19 nt, Artificial Sequence
  Description of Artificial Sequence: Synthetic oligonucleotide
  Sense strand starting at position 2187 of SEQ ID NO: 1884563
cagcauaucccauggugga

SEQ ID NO: 2275213 - RNA, 19 nt, Artificial Sequence
  Description of Artificial Sequence: Synthetic oligonucleotide
  Antisense strand to SEQ ID NO: 2275212
uccaccaugggauaugcug

SEQ ID NO: 2275214 - RNA, 19 nt, Artificial Sequence
  Description of Artificial Sequence: Synthetic oligonucleotide
  Sense strand starting at position 2294 of SEQ ID NO: 1884563
cuggaauuccuaggguucu

SEQ ID NO: 2275215 - RNA, 19 nt, Artificial Sequence
  Description of Artificial Sequence: Synthetic oligonucleotide
  Antisense strand to SEQ ID NO: 2275214
agaacccuaggaauuccag

SEQ ID NO: 2275216 - RNA, 19 nt, Artificial Sequence
  Description of Artificial Sequence: Synthetic oligonucleotide
  Sense strand starting at position 2325 of SEQ ID NO: 1884563
uccugugaggucuaaauac

SEQ ID NO: 2275217 - RNA, 19 nt, Artificial Sequence
  Description of Artificial Sequence: Synthetic oligonucleotide
  Antisense strand to SEQ ID NO: 2275216
guauuuagaccucacagga

SEQ ID NO: 2275218 - RNA, 19 nt, Artificial Sequence
  Description of Artificial Sequence: Synthetic oligonucleotide
  Sense strand starting at position 2470 of SEQ ID NO: 1884563
ucagaaaugucagagaaag

SEQ ID NO: 2275219 - RNA, 19 nt, Artificial Sequence
  Description of Artificial Sequence: Synthetic oligonucleotide
  Antisense strand to SEQ ID NO: 2275218
cuuucucugacauuucuga

SEQ ID NO: 2275220 - RNA, 19 nt, Artificial Sequence
  Description of Artificial Sequence: Synthetic oligonucleotide
  Sense strand starting at position 2518 of SEQ ID NO: 1884563
gcugucuauggccaaauga

SEQ ID NO: 2275221 - RNA, 19 nt, Artificial Sequence
  Description of Artificial Sequence: Synthetic oligonucleotide
  Antisense strand to SEQ ID NO: 2275220
ucauuuggccauagacagc

SEQ ID NO: 2275222 - RNA, 19 nt, Artificial Sequence
  Description of Artificial Sequence: Synthetic oligonucleotide
  Sense strand starting at position 2575 of SEQ ID NO: 1884563
ugugguccuagguagagaa

SEQ ID NO: 2275223 - RNA, 19 nt, Artificial Sequence
  Description of Artificial Sequence: Synthetic oligonucleotide
  Antisense strand to SEQ ID NO: 2275222
uucucuaccuaggaccaca

SEQ ID NO: 2275224 - RNA, 19 nt, Artificial Sequence
  Description of Artificial Sequence: Synthetic oligonucleotide
  Sense strand starting at position 2748 of SEQ ID NO: 1884563
cgaacacaacucuguaacu

SEQ ID NO: 2275225 - RNA, 19 nt, Artificial Sequence
  Description of Artificial Sequence: Synthetic oligonucleotide
  Antisense strand to SEQ ID NO: 2275224
aguuacagaguuguguucg

SEQ ID NO: 2275226 - RNA, 19 nt, Artificial Sequence
  Description of Artificial Sequence: Synthetic oligonucleotide
  Sense strand starting at position 2765 of SEQ ID NO: 1884563
cuaugccucucccugagau

SEQ ID NO: 2275227 - RNA, 19 nt, Artificial Sequence
  Description of Artificial Sequence: Synthetic oligonucleotide
  Antisense strand to SEQ ID NO: 2275226
aucucagggagaggcauag

SEQ ID NO: 2275228 - RNA, 19 nt, Artificial Sequence
  Description of Artificial Sequence: Synthetic oligonucleotide
  Sense strand starting at position 2787 of SEQ ID NO: 1884563
ggucuuaggcccuagaauc

SEQ ID NO: 2275229 - RNA, 19 nt, Artificial Sequence
  Description of Artificial Sequence: Synthetic oligonucleotide
  Antisense strand to SEQ ID NO: 2275228
gauucuagggccuaagacc

SEQ ID NO: 2275230 - RNA, 19 nt, Artificial Sequence
  Description of Artificial Sequence: Synthetic oligonucleotide
  Sense strand starting at position 2810 of SEQ ID NO: 1884563
ggacuaagguugcccucua

SEQ ID NO: 2275231 - RNA, 19 nt, Artificial Sequence
  Description of Artificial Sequence: Synthetic oligonucleotide
  Antisense strand to SEQ ID NO: 2275230
uagagggcaaccuuagucc

SEQ ID NO: 2275232 - RNA, 19 nt, Artificial Sequence
  Description of Artificial Sequence: Synthetic oligonucleotide
  Sense strand starting at position 2936 of SEQ ID NO: 1884563
ccuagaagcugcucaacaa

SEQ ID NO: 2275233 - RNA, 19 nt, Artificial Sequence
  Description of Artificial Sequence: Synthetic oligonucleotide
  Antisense strand to SEQ ID NO: 2275232
uuguugagcagcuucuagg

SEQ ID NO: 2275234 - RNA, 19 nt, Artificial Sequence
  Description of Artificial Sequence: Synthetic oligonucleotide
  Sense strand starting at position 2937 of SEQ ID NO: 1884563
cuagaagcugcucaacaaa

SEQ ID NO: 2275235 - RNA, 19 nt, Artificial Sequence
  Description of Artificial Sequence: Synthetic oligonucleotide
  Antisense strand to SEQ ID NO: 2275234
uuuguugagcagcuucuag

SEQ ID NO: 2275236 - RNA, 19 nt, Artificial Sequence
  Description of Artificial Sequence: Synthetic oligonucleotide
  Sense strand starting at position 3921 of SEQ ID NO: 1884563
ugcaaauagugacuaggaa

SEQ ID NO: 2275237 - RNA, 19 nt, Artificial Sequence
  Description of Artificial Sequence: Synthetic oligonucleotide
  Antisense strand to SEQ ID NO: 2275236
uuccuagucacuauuugca

SEQ ID NO: 2275238 - RNA, 19 nt, Artificial Sequence
  Description of Artificial Sequence: Synthetic oligonucleotide
  Sense strand starting at position 33 of SEQ ID NO: 1884564
acuguauugcaacaaguga

SEQ ID NO: 2275239 - RNA, 19 nt, Artificial Sequence
  Description of Artificial Sequence: Synthetic oligonucleotide
  Antisense strand to SEQ ID NO: 2275238
ucacuuguugcaauacagu

SEQ ID NO: 2275240 - RNA, 19 nt, Artificial Sequence
  Description of Artificial Sequence: Synthetic oligonucleotide
  Sense strand starting at position 420 of SEQ ID NO: 1884564
aaguuuggugcugagaaua

SEQ ID NO: 2275241 - RNA, 19 nt, Artificial Sequence
  Description of Artificial Sequence: Synthetic oligonucleotide
  Antisense strand to SEQ ID NO: 2275240
uauucucagcaccaaacuu

SEQ ID NO: 2275242 - RNA, 19 nt, Artificial Sequence
  Description of Artificial Sequence: Synthetic oligonucleotide
  Sense strand starting at position 466 of SEQ ID NO: 1884564
aauuguguuccugagauga

SEQ ID NO: 2275243 - RNA, 19 nt, Artificial Sequence
  Description of Artificial Sequence: Synthetic oligonucleotide
  Antisense strand to SEQ ID NO: 2275242
ucaucucaggaacacaauu

SEQ ID NO: 2275244 - RNA, 19 nt, Artificial Sequence
  Description of Artificial Sequence: Synthetic oligonucleotide
  Sense strand starting at position 512 of SEQ ID NO: 1884564
auuagugucagggauaugu

SEQ ID NO: 2275245 - RNA, 19 nt, Artificial Sequence
  Description of Artificial Sequence: Synthetic oligonucleotide
  Antisense strand to SEQ ID NO: 2275244
acauaucccugacacuaau

SEQ ID NO: 2275246 - RNA, 19 nt, Artificial Sequence
  Description of Artificial Sequence: Synthetic oligonucleotide
  Sense strand starting at position 642 of SEQ ID NO: 1884564
ccacuauucuggcugaaau

SEQ ID NO: 2275247 - RNA, 19 nt, Artificial Sequence
  Description of Artificial Sequence: Synthetic oligonucleotide
  Antisense strand to SEQ ID NO: 2275246
auuucagccagaauagugg

SEQ ID NO: 2275248 - RNA, 19 nt, Artificial Sequence
  Description of Artificial Sequence: Synthetic oligonucleotide
  Sense strand starting at position 644 of SEQ ID NO: 1884564
acuauucuggcugaaauug

SEQ ID NO: 2275249 - RNA, 19 nt, Artificial Sequence
  Description of Artificial Sequence: Synthetic oligonucleotide
  Antisense strand to SEQ ID NO: 2275248
caauuucagccagaauagu

SEQ ID NO: 2275250 - RNA, 19 nt, Artificial Sequence
  Description of Artificial Sequence: Synthetic oligonucleotide
  Sense strand starting at position 897 of SEQ ID NO: 1884564
uaagaaggucuggguuuga

SEQ ID NO: 2275251 - RNA, 19 nt, Artificial Sequence
  Description of Artificial Sequence: Synthetic oligonucleotide
  Antisense strand to SEQ ID NO: 2275250
ucaaacccagaccuucuua

SEQ ID NO: 2275252 - RNA, 19 nt, Artificial Sequence
  Description of Artificial Sequence: Synthetic oligonucleotide
  Sense strand starting at position 1009 of SEQ ID NO: 1884564
cacuguaggcuggaucaua

SEQ ID NO: 2275253 - RNA, 19 nt, Artificial Sequence
  Description of Artificial Sequence: Synthetic oligonucleotide
  Antisense strand to SEQ ID NO: 2275252
uaugauccagccuacagug

SEQ ID NO: 2275254 - RNA, 19 nt, Artificial Sequence
  Description of Artificial Sequence: Synthetic oligonucleotide
  Sense strand starting at position 1124 of SEQ ID NO: 1884564
ggcuuauuuacaugguggu

SEQ ID NO: 2275255 - RNA, 19 nt, Artificial Sequence
  Description of Artificial Sequence: Synthetic oligonucleotide
  Antisense strand to SEQ ID NO: 2275254
accaccauguaaauaagcc

SEQ ID NO: 2275256 - RNA, 19 nt, Artificial Sequence
  Description of Artificial Sequence: Synthetic oligonucleotide
  Sense strand starting at position 1298 of SEQ ID NO: 1884564
acugguacauggucauaau

SEQ ID NO: 2275257 - RNA, 19 nt, Artificial Sequence
  Description of Artificial Sequence: Synthetic oligonucleotide
  Antisense strand to SEQ ID NO: 2275256
auuaugaccauguaccagu

SEQ ID NO: 2275258 - RNA, 19 nt, Artificial Sequence
  Description of Artificial Sequence: Synthetic oligonucleotide
  Sense strand starting at position 1491 of SEQ ID NO: 1884564
aucagacagucugucaaga

SEQ ID NO: 2275259 - RNA, 19 nt, Artificial Sequence
  Description of Artificial Sequence: Synthetic oligonucleotide
  Antisense strand to SEQ ID NO: 2275258
ucuugacagacugucugau

SEQ ID NO: 2275260 - RNA, 19 nt, Artificial Sequence
  Description of Artificial Sequence: Synthetic oligonucleotide
  Sense strand starting at position 1496 of SEQ ID NO: 1884564
acagucugucaagaaguua

SEQ ID NO: 2275261 - RNA, 19 nt, Artificial Sequence
  Description of Artificial Sequence: Synthetic oligonucleotide
  Antisense strand to SEQ ID NO: 2275260
uaacuucuugacagacugu

SEQ ID NO: 2275262 - RNA, 19 nt, Artificial Sequence
  Description of Artificial Sequence: Synthetic oligonucleotide
  Sense strand starting at position 1801 of SEQ ID NO: 1884564
agaaguaauuaguuauccu

SEQ ID NO: 2275263 - RNA, 19 nt, Artificial Sequence
  Description of Artificial Sequence: Synthetic oligonucleotide
  Antisense strand to SEQ ID NO: 2275262
aggauaacuaauuacuucu

SEQ ID NO: 2275264 - RNA, 19 nt, Artificial Sequence
  Description of Artificial Sequence: Synthetic oligonucleotide
  Sense strand starting at position 1848 of SEQ ID NO: 1884564
augagaauaugggucuugu

SEQ ID NO: 2275265 - RNA, 19 nt, Artificial Sequence
  Description of Artificial Sequence: Synthetic oligonucleotide
  Antisense strand to SEQ ID NO: 2275264
acaagacccauauucucau

SEQ ID NO: 2275266 - RNA, 19 nt, Artificial Sequence
  Description of Artificial Sequence: Synthetic oligonucleotide
  Sense strand starting at position 2124 of SEQ ID NO: 1884564
gcaccauccugacugaauu

SEQ ID NO: 2275267 - RNA, 19 nt, Artificial Sequence
  Description of Artificial Sequence: Synthetic oligonucleotide
  Antisense strand to SEQ ID NO: 2275266
aauucagucaggauggugc

SEQ ID NO: 2275268 - RNA, 19 nt, Artificial Sequence
  Description of Artificial Sequence: Synthetic oligonucleotide
  Sense strand starting at position 2151 of SEQ ID NO: 1884564
uggguuucucagcagauuc

SEQ ID NO: 2275269 - RNA, 19 nt, Artificial Sequence
  Description of Artificial Sequence: Synthetic oligonucleotide
  Antisense strand to SEQ ID NO: 2275268
gaaucugcugagaaaccca

SEQ ID NO: 2275270 - RNA, 19 nt, Artificial Sequence
  Description of Artificial Sequence: Synthetic oligonucleotide
  Sense strand starting at position 2178 of SEQ ID NO: 1884564
agccgauucuauuuggagu

SEQ ID NO: 2275271 - RNA, 19 nt, Artificial Sequence
  Description of Artificial Sequence: Synthetic oligonucleotide
  Antisense strand to SEQ ID NO: 2275270
acuccaaauagaaucggcu

SEQ ID NO: 2275272 - RNA, 19 nt, Artificial Sequence
  Description of Artificial Sequence: Synthetic oligonucleotide
  Sense strand starting at position 2184 of SEQ ID NO: 1884564
uucuauuuggaguguuucu

SEQ ID NO: 2275273 - RNA, 19 nt, Artificial Sequence
  Description of Artificial Sequence: Synthetic oligonucleotide
  Antisense strand to SEQ ID NO: 2275272
agaaacacuccaaauagaa

SEQ ID NO: 2275274 - RNA, 19 nt, Artificial Sequence
  Description of Artificial Sequence: Synthetic oligonucleotide
  Sense strand starting at position 2213 of SEQ ID NO: 1884564
uugauaaccuugucaggaa

SEQ ID NO: 2275275 - RNA, 19 nt, Artificial Sequence
  Description of Artificial Sequence: Synthetic oligonucleotide
  Antisense strand to SEQ ID NO: 2275274
uuccugacaagguuaucaa

SEQ ID NO: 2275276 - RNA, 19 nt, Artificial Sequence
  Description of Artificial Sequence: Synthetic oligonucleotide
  Sense strand starting at position 2229 of SEQ ID NO: 1884564
gaaacaugaccuugguuau

SEQ ID NO: 2275277 - RNA, 19 nt, Artificial Sequence
  Description of Artificial Sequence: Synthetic oligonucleotide
  Antisense strand to SEQ ID NO: 2275276
auaaccaaggucauguuuc

SEQ ID NO: 2275278 - RNA, 19 nt, Artificial Sequence
  Description of Artificial Sequence: Synthetic oligonucleotide
  Sense strand starting at position 2232 of SEQ ID NO: 1884564
acaugaccuugguuaucuu

SEQ ID NO: 2275279 - RNA, 19 nt, Artificial Sequence
  Description of Artificial Sequence: Synthetic oligonucleotide
  Antisense strand to SEQ ID NO: 2275278
aagauaaccaaggucaugu

SEQ ID NO: 2275280 - RNA, 19 nt, Artificial Sequence
  Description of Artificial Sequence: Synthetic oligonucleotide
  Sense strand starting at position 2235 of SEQ ID NO: 1884564
ugaccuugguuaucuuaau

SEQ ID NO: 2275281 - RNA, 19 nt, Artificial Sequence
  Description of Artificial Sequence: Synthetic oligonucleotide
  Antisense strand to SEQ ID NO: 2275280
auuaagauaaccaagguca

SEQ ID NO: 2275282 - RNA, 19 nt, Artificial Sequence
  Description of Artificial Sequence: Synthetic oligonucleotide
  Sense strand starting at position 2773 of SEQ ID NO: 1884564
ccuggcuauccugagaauc

SEQ ID NO: 2275283 - RNA, 19 nt, Artificial Sequence
  Description of Artificial Sequence: Synthetic oligonucleotide
  Antisense strand to SEQ ID NO: 2275282
gauucucaggauagccagg

SEQ ID NO: 2275284 - RNA, 19 nt, Artificial Sequence
  Description of Artificial Sequence: Synthetic oligonucleotide
  Sense strand starting at position 2924 of SEQ ID NO: 1884564
guagcugcucuguucuaca

SEQ ID NO: 2275285 - RNA, 19 nt, Artificial Sequence
  Description of Artificial Sequence: Synthetic oligonucleotide
  Antisense strand to SEQ ID NO: 2275284
uguagaacagagcagcuac

SEQ ID NO: 2275286 - RNA, 19 nt, Artificial Sequence
  Description of Artificial Sequence: Synthetic oligonucleotide
  Sense strand starting at position 2935 of SEQ ID NO: 1884564
guucuacaccgugaucaac

SEQ ID NO: 2275287 - RNA, 19 nt, Artificial Sequence
  Description of Artificial Sequence: Synthetic oligonucleotide
  Antisense strand to SEQ ID NO: 2275286
guugaucacgguguagaac

SEQ ID NO: 2275288 - RNA, 19 nt, Artificial Sequence
  Description of Artificial Sequence: Synthetic oligonucleotide
  Sense strand starting at position 2968 of SEQ ID NO: 1884564
ucucaucuauagccugaga

SEQ ID NO: 2275289 - RNA, 19 nt, Artificial Sequence
  Description of Artificial Sequence: Synthetic oligonucleotide
  Antisense strand to SEQ ID NO: 2275288
ucucaggcuauagaugaga

SEQ ID NO: 2275290 - RNA, 19 nt, Artificial Sequence
  Description of Artificial Sequence: Synthetic oligonucleotide
  Sense strand starting at position 3041 of SEQ ID NO: 1884564
acaugaagguuauucucuu

SEQ ID NO: 2275291 - RNA, 19 nt, Artificial Sequence
  Description of Artificial Sequence: Synthetic oligonucleotide
  Antisense strand to SEQ ID NO: 2275290
aagagaauaaccuucaugu

SEQ ID NO: 2275292 - RNA, 19 nt, Artificial Sequence
  Description of Artificial Sequence: Synthetic oligonucleotide
  Sense strand starting at position 3082 of SEQ ID NO: 1884564
uccagauuauuggcuuaua

SEQ ID NO: 2275293 - RNA, 19 nt, Artificial Sequence
  Description of Artificial Sequence: Synthetic oligonucleotide
  Antisense strand to SEQ ID NO: 2275292
uauaagccaauaaucugga

SEQ ID NO: 2275294 - RNA, 19 nt, Artificial Sequence
  Description of Artificial Sequence: Synthetic oligonucleotide
  Sense strand starting at position 3083 of SEQ ID NO: 1884564
ccagauuauuggcuuauaa

SEQ ID NO: 2275295 - RNA, 19 nt, Artificial Sequence
  Description of Artificial Sequence: Synthetic oligonucleotide
  Antisense strand to SEQ ID NO: 2275294
uuauaagccaauaaucugg

SEQ ID NO: 2275296 - RNA, 19 nt, Artificial Sequence
  Description of Artificial Sequence: Synthetic oligonucleotide
  Sense strand starting at position 3182 of SEQ ID NO: 1884564
cuuguuauucguuuguuau

SEQ ID NO: 2275297 - RNA, 19 nt, Artificial Sequence
  Description of Artificial Sequence: Synthetic oligonucleotide
  Antisense strand to SEQ ID NO: 2275296
auaacaaacgaauaacaag

SEQ ID NO: 2275298 - RNA, 19 nt, Artificial Sequence
  Description of Artificial Sequence: Synthetic oligonucleotide
  Sense strand starting at position 3343 of SEQ ID NO: 1884564
aauaaauuacguggguuaa

SEQ ID NO: 2275299 - RNA, 19 nt, Artificial Sequence
  Description of Artificial Sequence: Synthetic oligonucleotide
  Antisense strand to SEQ ID NO: 2275298
uuaacccacguaauuuauu

SEQ ID NO: 2275300 - RNA, 19 nt, Artificial Sequence
  Description of Artificial Sequence: Synthetic oligonucleotide
  Sense strand starting at position 3344 of SEQ ID NO: 1884564
auaaauuacguggguuaau

SEQ ID NO: 2275301 - RNA, 19 nt, Artificial Sequence
  Description of Artificial Sequence: Synthetic oligonucleotide
  Antisense strand to SEQ ID NO: 2275300
auuaacccacguaauuuau

SEQ ID NO: 2275302 - RNA, 19 nt, Artificial Sequence
  Description of Artificial Sequence: Synthetic oligonucleotide
  Sense strand starting at position 3347 of SEQ ID NO: 1884564
aauuacguggguuaaugaa

SEQ ID NO: 2275303 - RNA, 19 nt, Artificial Sequence
  Description of Artificial Sequence: Synthetic oligonucleotide
  Antisense strand to SEQ ID NO: 2275302
uucauuaacccacguaauu

SEQ ID NO: 2275304 - RNA, 19 nt, Artificial Sequence
  Description of Artificial Sequence: Synthetic oligonucleotide
  Sense strand starting at position 3374 of SEQ ID NO: 1884564
gacuuugaaguuugguaag

SEQ ID NO: 2275305 - RNA, 19 nt, Artificial Sequence
  Description of Artificial Sequence: Synthetic oligonucleotide
  Antisense strand to SEQ ID NO: 2275304
cuuaccaaacuucaaaguc

SEQ ID NO: 2275306 - RNA, 19 nt, Artificial Sequence
  Description of Artificial Sequence: Synthetic oligonucleotide
  Sense strand starting at position 3436 of SEQ ID NO: 1884564
cuggaaauaugcucaagau

SEQ ID NO: 2275307 - RNA, 19 nt, Artificial Sequence
  Description of Artificial Sequence: Synthetic oligonucleotide
  Antisense strand to SEQ ID NO: 2275306
aucuugagcauauuuccag

SEQ ID NO: 2275308 - RNA, 19 nt, Artificial Sequence
  Description of Artificial Sequence: Synthetic oligonucleotide
  Sense strand starting at position 3517 of SEQ ID NO: 1884564
gcauauagggaguaucuuu

SEQ ID NO: 2275309 - RNA, 19 nt, Artificial Sequence
  Description of Artificial Sequence: Synthetic oligonucleotide
  Antisense strand to SEQ ID NO: 2275308
aaagauacucccuauaugc

SEQ ID NO: 2275310 - RNA, 19 nt, Artificial Sequence
  Description of Artificial Sequence: Synthetic oligonucleotide
  Sense strand starting at position 3522 of SEQ ID NO: 1884564
uagggaguaucuuuguaaa

SEQ ID NO: 2275311 - RNA, 19 nt, Artificial Sequence
  Description of Artificial Sequence: Synthetic oligonucleotide
  Antisense strand to SEQ ID NO: 2275310
uuuacaaagauacucccua

SEQ ID NO: 2275312 - RNA, 19 nt, Artificial Sequence
  Description of Artificial Sequence: Synthetic oligonucleotide
  Sense strand starting at position 3560 of SEQ ID NO: 1884564
agagaauauuaggaagaug

SEQ ID NO: 2275313 - RNA, 19 nt, Artificial Sequence
  Description of Artificial Sequence: Synthetic oligonucleotide
  Antisense strand to SEQ ID NO: 2275312
caucuuccuaauauucucu

SEQ ID NO: 2275314 - RNA, 19 nt, Artificial Sequence
  Description of Artificial Sequence: Synthetic oligonucleotide
  Sense strand starting at position 3890 of SEQ ID NO: 1884564
cugguaaacuuguuuagau

SEQ ID NO: 2275315 - RNA, 19 nt, Artificial Sequence
  Description of Artificial Sequence: Synthetic oligonucleotide
  Antisense strand to SEQ ID NO: 2275314
aucuaaacaaguuuaccag

SEQ ID NO: 2275316 - RNA, 19 nt, Artificial Sequence
  Description of Artificial Sequence: Synthetic oligonucleotide
  Sense strand starting at position 3891 of SEQ ID NO: 1884564
ugguaaacuuguuuagauc

SEQ ID NO: 2275317 - RNA, 19 nt, Artificial Sequence
  Description of Artificial Sequence: Synthetic oligonucleotide
  Antisense strand to SEQ ID NO: 2275316
gaucuaaacaaguuuacca

SEQ ID NO: 2275318 - RNA, 19 nt, Artificial Sequence
  Description of Artificial Sequence: Synthetic oligonucleotide
  Sense strand starting at position 256 of SEQ ID NO: 1884565
uugguaauugcugagaauc

SEQ ID NO: 2275319 - RNA, 19 nt, Artificial Sequence
  Description of Artificial Sequence: Synthetic oligonucleotide
  Antisense strand to SEQ ID NO: 2275318
gauucucagcaauuaccaa

SEQ ID NO: 2275320 - RNA, 19 nt, Artificial Sequence
  Description of Artificial Sequence: Synthetic oligonucleotide
  Sense strand starting at position 335 of SEQ ID NO: 1884565
aucucucuucuaugaggga

SEQ ID NO: 2275321 - RNA, 19 nt, Artificial Sequence
  Description of Artificial Sequence: Synthetic oligonucleotide
  Antisense strand to SEQ ID NO: 2275320
ucccucauagaagagagau

SEQ ID NO: 2275322 - RNA, 19 nt, Artificial Sequence
  Description of Artificial Sequence: Synthetic oligonucleotide
  Sense strand starting at position 363 of SEQ ID NO: 1884565
gggagugggauaugguauu

SEQ ID NO: 2275323 - RNA, 19 nt, Artificial Sequence
  Description of Artificial Sequence: Synthetic oligonucleotide
  Antisense strand to SEQ ID NO: 2275322
aauaccauaucccacuccc

SEQ ID NO: 2275324 - RNA, 19 nt, Artificial Sequence
  Description of Artificial Sequence: Synthetic oligonucleotide
  Sense strand starting at position 566 of SEQ ID NO: 1884565
cccucaauucuaggaggau

SEQ ID NO: 2275325 - RNA, 19 nt, Artificial Sequence
  Description of Artificial Sequence: Synthetic oligonucleotide
  Antisense strand to SEQ ID NO: 2275324
auccuccuagaauugaggg

SEQ ID NO: 2275326 - RNA, 19 nt, Artificial Sequence
  Description of Artificial Sequence: Synthetic oligonucleotide
  Sense strand starting at position 981 of SEQ ID NO: 1884565
ggaugaaaccuguguauaa

SEQ ID NO: 2275327 - RNA, 19 nt, Artificial Sequence
  Description of Artificial Sequence: Synthetic oligonucleotide
  Antisense strand to SEQ ID NO: 2275326
uuauacacagguuucaucc

SEQ ID NO: 2275328 - RNA, 19 nt, Artificial Sequence
  Description of Artificial Sequence: Synthetic oligonucleotide
  Sense strand starting at position 982 of SEQ ID NO: 1884565
gaugaaaccuguguauaag

SEQ ID NO: 2275329 - RNA, 19 nt, Artificial Sequence
  Description of Artificial Sequence: Synthetic oligonucleotide
  Antisense strand to SEQ ID NO: 2275328
cuuauacacagguuucauc

SEQ ID NO: 2275330 - RNA, 19 nt, Artificial Sequence
  Description of Artificial Sequence: Synthetic oligonucleotide
  Sense strand starting at position 990 of SEQ ID NO: 1884565
cuguguauaagaugggaua

SEQ ID NO: 2275331 - RNA, 19 nt, Artificial Sequence
  Description of Artificial Sequence: Synthetic oligonucleotide
  Antisense strand to SEQ ID NO: 2275330
uaucccaucuuauacacag

SEQ ID NO: 2275332 - RNA, 19 nt, Artificial Sequence
  Description of Artificial Sequence: Synthetic oligonucleotide
  Sense strand starting at position 992 of SEQ ID NO: 1884565
guguauaagaugggauaca

SEQ ID NO: 2275333 - RNA, 19 nt, Artificial Sequence
  Description of Artificial Sequence: Synthetic oligonucleotide
  Antisense strand to SEQ ID NO: 2275332
uguaucccaucuuauacac

SEQ ID NO: 2275334 - RNA, 19 nt, Artificial Sequence
  Description of Artificial Sequence: Synthetic oligonucleotide
  Sense strand starting at position 1088 of SEQ ID NO: 1884565
augugaaugcuuuaugaga

SEQ ID NO: 2275335 - RNA, 19 nt, Artificial Sequence
  Description of Artificial Sequence: Synthetic oligonucleotide
  Antisense strand to SEQ ID NO: 2275334
ucucauaaagcauucacau

SEQ ID NO: 2275336 - RNA, 19 nt, Artificial Sequence
  Description of Artificial Sequence: Synthetic oligonucleotide
  Sense strand starting at position 1095 of SEQ ID NO: 1884565
ugcuuuaugagaggauuaa

SEQ ID NO: 2275337 - RNA, 19 nt, Artificial Sequence
  Description of Artificial Sequence: Synthetic oligonucleotide
  Antisense strand to SEQ ID NO: 2275336
uuaauccucucauaaagca

SEQ ID NO: 2275338 - RNA, 19 nt, Artificial Sequence
  Description of Artificial Sequence: Synthetic oligonucleotide
  Sense strand starting at position 1248 of SEQ ID NO: 1884565
ggccaacucccugaugaca

SEQ ID NO: 2275339 - RNA, 19 nt, Artificial Sequence
  Description of Artificial Sequence: Synthetic oligonucleotide
  Antisense strand to SEQ ID NO: 2275338
ugucaucagggaguuggcc

SEQ ID NO: 2275340 - RNA, 19 nt, Artificial Sequence
  Description of Artificial Sequence: Synthetic oligonucleotide
  Sense strand starting at position 1312 of SEQ ID NO: 1884565
acucuugauccauggaaac

SEQ ID NO: 2275341 - RNA, 19 nt, Artificial Sequence
  Description of Artificial Sequence: Synthetic oligonucleotide
  Antisense strand to SEQ ID NO: 2275340
guuuccauggaucaagagu

SEQ ID NO: 2275342 - RNA, 19 nt, Artificial Sequence
  Description of Artificial Sequence: Synthetic oligonucleotide
  Sense strand starting at position 1351 of SEQ ID NO: 1884565
cuguguuaagacuauaagu

SEQ ID NO: 2275343 - RNA, 19 nt, Artificial Sequence
  Description of Artificial Sequence: Synthetic oligonucleotide
  Antisense strand to SEQ ID NO: 2275342
acuuauagucuuaacacag

SEQ ID NO: 2275344 - RNA, 19 nt, Artificial Sequence
  Description of Artificial Sequence: Synthetic oligonucleotide
  Sense strand starting at position 1353 of SEQ ID NO: 1884565
guguuaagacuauaaguuu

SEQ ID NO: 2275345 - RNA, 19 nt, Artificial Sequence
  Description of Artificial Sequence: Synthetic oligonucleotide
  Antisense strand to SEQ ID NO: 2275344
aaacuuauagucuuaacac

SEQ ID NO: 2275346 - RNA, 19 nt, Artificial Sequence
  Description of Artificial Sequence: Synthetic oligonucleotide
  Sense strand starting at position 1494 of SEQ ID NO: 1884565
gcagaauuccagcacacuu

SEQ ID NO: 2275347 - RNA, 19 nt, Artificial Sequence
  Description of Artificial Sequence: Synthetic oligonucleotide
  Antisense strand to SEQ ID NO: 2275346
aagugugcuggaauucugc

SEQ ID NO: 2275348 - RNA, 19 nt, Artificial Sequence
  Description of Artificial Sequence: Synthetic oligonucleotide
  Sense strand starting at position 1530 of SEQ ID NO: 1884565
auccguacccuaggagaaa

SEQ ID NO: 2275349 - RNA, 19 nt, Artificial Sequence
  Description of Artificial Sequence: Synthetic oligonucleotide
  Antisense strand to SEQ ID NO: 2275348
uuucuccuaggguacggau

SEQ ID NO: 2275350 - RNA, 19 nt, Artificial Sequence
  Description of Artificial Sequence: Synthetic oligonucleotide
  Sense strand starting at position 1685 of SEQ ID NO: 1884565
ucuugaucugcugaaguag

SEQ ID NO: 2275351 - RNA, 19 nt, Artificial Sequence
  Description of Artificial Sequence: Synthetic oligonucleotide
  Antisense strand to SEQ ID NO: 2275350
cuacuucagcagaucaaga

SEQ ID NO: 2275352 - RNA, 19 nt, Artificial Sequence
  Description of Artificial Sequence: Synthetic oligonucleotide
  Sense strand starting at position 1771 of SEQ ID NO: 1884565
uauugugggcauggaagau

SEQ ID NO: 2275353 - RNA, 19 nt, Artificial Sequence
  Description of Artificial Sequence: Synthetic oligonucleotide
  Antisense strand to SEQ ID NO: 2275352
aucuuccaugcccacaaua

SEQ ID NO: 2275354 - RNA, 19 nt, Artificial Sequence
  Description of Artificial Sequence: Synthetic oligonucleotide
  Sense strand starting at position 1783 of SEQ ID NO: 1884565
ggaagaugaaagugcuuua

SEQ ID NO: 2275355 - RNA, 19 nt, Artificial Sequence
  Description of Artificial Sequence: Synthetic oligonucleotide
  Antisense strand to SEQ ID NO: 2275354
uaaagcacuuucaucuucc

SEQ ID NO: 2275356 - RNA, 19 nt, Artificial Sequence
  Description of Artificial Sequence: Synthetic oligonucleotide
  Sense strand starting at position 1802 of SEQ ID NO: 1884565
aaauguuaggaagguagua

SEQ ID NO: 2275357 - RNA, 19 nt, Artificial Sequence
  Description of Artificial Sequence: Synthetic oligonucleotide
  Antisense strand to SEQ ID NO: 2275356
uacuaccuuccuaacauuu

SEQ ID NO: 2275358 - RNA, 19 nt, Artificial Sequence
  Description of Artificial Sequence: Synthetic oligonucleotide
  Sense strand starting at position 1804 of SEQ ID NO: 1884565
auguuaggaagguaguaua

SEQ ID NO: 2275359 - RNA, 19 nt, Artificial Sequence
  Description of Artificial Sequence: Synthetic oligonucleotide
  Antisense strand to SEQ ID NO: 2275358
uauacuaccuuccuaacau

SEQ ID NO: 2275360 - RNA, 19 nt, Artificial Sequence
  Description of Artificial Sequence: Synthetic oligonucleotide
  Sense strand starting at position 1925 of SEQ ID NO: 1884565
cagggaggucugcauccua

SEQ ID NO: 2275361 - RNA, 19 nt, Artificial Sequence
  Description of Artificial Sequence: Synthetic oligonucleotide
  Antisense strand to SEQ ID NO: 2275360
uaggaugcagaccucccug

SEQ ID NO: 2275362 - RNA, 19 nt, Artificial Sequence
  Description of Artificial Sequence: Synthetic oligonucleotide
  Sense strand starting at position 2051 of SEQ ID NO: 1884565
gcuuauuagcuggaaugag

SEQ ID NO: 2275363 - RNA, 19 nt, Artificial Sequence
  Description of Artificial Sequence: Synthetic oligonucleotide
  Antisense strand to SEQ ID NO: 2275362
cucauuccagcuaauaagc

SEQ ID NO: 2275364 - RNA, 19 nt, Artificial Sequence
  Description of Artificial Sequence: Synthetic oligonucleotide
  Sense strand starting at position 2115 of SEQ ID NO: 1884565
uccuuauaaguggaagcaa

SEQ ID NO: 2275365 - RNA, 19 nt, Artificial Sequence
  Description of Artificial Sequence: Synthetic oligonucleotide
  Antisense strand to SEQ ID NO: 2275364
uugcuuccacuuauaagga

SEQ ID NO: 2275366 - RNA, 19 nt, Artificial Sequence
  Description of Artificial Sequence: Synthetic oligonucleotide
  Sense strand starting at position 2168 of SEQ ID NO: 1884565
gcugcauugcuugauuuga

SEQ ID NO: 2275367 - RNA, 19 nt, Artificial Sequence
  Description of Artificial Sequence: Synthetic oligonucleotide
  Antisense strand to SEQ ID NO: 2275366
ucaaaucaagcaaugcagc

SEQ ID NO: 2275368 - RNA, 19 nt, Artificial Sequence
  Description of Artificial Sequence: Synthetic oligonucleotide
  Sense strand starting at position 2363 of SEQ ID NO: 1884565
cuguauugucuugagacac

SEQ ID NO: 2275369 - RNA, 19 nt, Artificial Sequence
  Description of Artificial Sequence: Synthetic oligonucleotide
  Antisense strand to SEQ ID NO: 2275368
gugucucaagacaauacag

SEQ ID NO: 2275370 - RNA, 19 nt, Artificial Sequence
  Description of Artificial Sequence: Synthetic oligonucleotide
  Sense strand starting at position 2588 of SEQ ID NO: 1884565
cggacugaugcagggauua

SEQ ID NO: 2275371 - RNA, 19 nt, Artificial Sequence
  Description of Artificial Sequence: Synthetic oligonucleotide
  Antisense strand to SEQ ID NO: 2275370
uaaucccugcaucaguccg

SEQ ID NO: 2275372 - RNA, 19 nt, Artificial Sequence
  Description of Artificial Sequence: Synthetic oligonucleotide
  Sense strand starting at position 2600 of SEQ ID NO: 1884565
gggauuaucugguuuaaau

SEQ ID NO: 2275373 - RNA, 19 nt, Artificial Sequence
  Description of Artificial Sequence: Synthetic oligonucleotide
  Antisense strand to SEQ ID NO: 2275372
auuuaaaccagauaauccc

SEQ ID NO: 2275374 - RNA, 19 nt, Artificial Sequence
  Description of Artificial Sequence: Synthetic oligonucleotide
  Sense strand starting at position 2683 of SEQ ID NO: 1884565
gagcucaggauaugaguga

SEQ ID NO: 2275375 - RNA, 19 nt, Artificial Sequence
  Description of Artificial Sequence: Synthetic oligonucleotide
  Antisense strand to SEQ ID NO: 2275374
ucacucauauccugagcuc

SEQ ID NO: 2275376 - RNA, 19 nt, Artificial Sequence
  Description of Artificial Sequence: Synthetic oligonucleotide
  Sense strand starting at position 2687 of SEQ ID NO: 1884565
ucaggauaugagugaggca

SEQ ID NO: 2275377 - RNA, 19 nt, Artificial Sequence
  Description of Artificial Sequence: Synthetic oligonucleotide
  Antisense strand to SEQ ID NO: 2275376
ugccucacucauauccuga

SEQ ID NO: 2275378 - RNA, 19 nt, Artificial Sequence
  Description of Artificial Sequence: Synthetic oligonucleotide
  Sense strand starting at position 2775 of SEQ ID NO: 1884565
gcggccucuguguuucaaa

SEQ ID NO: 2275379 - RNA, 19 nt, Artificial Sequence
  Description of Artificial Sequence: Synthetic oligonucleotide
  Antisense strand to SEQ ID NO: 2275378
uuugaaacacagaggccgc

SEQ ID NO: 2275380 - RNA, 19 nt, Artificial Sequence
  Description of Artificial Sequence: Synthetic oligonucleotide
  Sense strand starting at position 2798 of SEQ ID NO: 1884565
guuguaggcacagaauaua

SEQ ID NO: 2275381 - RNA, 19 nt, Artificial Sequence
  Description of Artificial Sequence: Synthetic oligonucleotide
  Antisense strand to SEQ ID NO: 2275380
uauauucugugccuacaac

SEQ ID NO: 2275382 - RNA, 19 nt, Artificial Sequence
  Description of Artificial Sequence: Synthetic oligonucleotide
  Sense strand starting at position 2896 of SEQ ID NO: 1884565
uuccguaaaggccagauaa

SEQ ID NO: 2275383 - RNA, 19 nt, Artificial Sequence
  Description of Artificial Sequence: Synthetic oligonucleotide
  Antisense strand to SEQ ID NO: 2275382
uuaucuggccuuuacggaa

SEQ ID NO: 2275384 - RNA, 19 nt, Artificial Sequence
  Description of Artificial Sequence: Synthetic oligonucleotide
  Sense strand starting at position 2898 of SEQ ID NO: 1884565
ccguaaaggccagauaaug

SEQ ID NO: 2275385 - RNA, 19 nt, Artificial Sequence
  Description of Artificial Sequence: Synthetic oligonucleotide
  Antisense strand to SEQ ID NO: 2275384
cauuaucuggccuuuacgg

SEQ ID NO: 2275386 - RNA, 19 nt, Artificial Sequence
  Description of Artificial Sequence: Synthetic oligonucleotide
  Sense strand starting at position 3396 of SEQ ID NO: 1884565
ggugguagacucuaacuac

SEQ ID NO: 2275387 - RNA, 19 nt, Artificial Sequence
  Description of Artificial Sequence: Synthetic oligonucleotide
  Antisense strand to SEQ ID NO: 2275386
guaguuagagucuaccacc

SEQ ID NO: 2275388 - RNA, 19 nt, Artificial Sequence
  Description of Artificial Sequence: Synthetic oligonucleotide
  Sense strand starting at position 3399 of SEQ ID NO: 1884565
gguagacucuaacuacuuu

SEQ ID NO: 2275389 - RNA, 19 nt, Artificial Sequence
  Description of Artificial Sequence: Synthetic oligonucleotide
  Antisense strand to SEQ ID NO: 2275388
aaaguaguuagagucuacc

SEQ ID NO: 2275390 - RNA, 19 nt, Artificial Sequence
  Description of Artificial Sequence: Synthetic oligonucleotide
  Sense strand starting at position 3618 of SEQ ID NO: 1884565
agaagagacucauugcuuc

SEQ ID NO: 2275391 - RNA, 19 nt, Artificial Sequence
  Description of Artificial Sequence: Synthetic oligonucleotide
  Antisense strand to SEQ ID NO: 2275390
gaagcaaugagucucuucu

SEQ ID NO: 2275392 - RNA, 19 nt, Artificial Sequence
  Description of Artificial Sequence: Synthetic oligonucleotide
  Sense strand starting at position 3852 of SEQ ID NO: 1884565
cucugagguccugaguaac

SEQ ID NO: 2275393 - RNA, 19 nt, Artificial Sequence
  Description of Artificial Sequence: Synthetic oligonucleotide
  Antisense strand to SEQ ID NO: 2275392
guuacucaggaccucagag

SEQ ID NO: 2275394 - RNA, 19 nt, Artificial Sequence
  Description of Artificial Sequence: Synthetic oligonucleotide
  Sense strand starting at position 3890 of SEQ ID NO: 1884565
cgaaaucagcccuaugaac

SEQ ID NO: 2275395 - RNA, 19 nt, Artificial Sequence
  Description of Artificial Sequence: Synthetic oligonucleotide
  Antisense strand to SEQ ID NO: 2275394
guucauagggcugauuucg

SEQ ID NO: 2275396 - RNA, 19 nt, Artificial Sequence
  Description of Artificial Sequence: Synthetic oligonucleotide
  Sense strand starting at position 3942 of SEQ ID NO: 1884565
gccauuaaagucuaugaau

SEQ ID NO: 2275397 - RNA, 19 nt, Artificial Sequence
  Description of Artificial Sequence: Synthetic oligonucleotide
  Antisense strand to SEQ ID NO: 2275396
auucauagacuuuaauggc

SEQ ID NO: 2275398 - RNA, 19 nt, Artificial Sequence
  Description of Artificial Sequence: Synthetic oligonucleotide
  Sense strand starting at position 205 of SEQ ID NO: 1884566
uccagugcccucugaauaa

SEQ ID NO: 2275399 - RNA, 19 nt, Artificial Sequence
  Description of Artificial Sequence: Synthetic oligonucleotide
  Antisense strand to SEQ ID NO: 2275398
uuauucagagggcacugga

SEQ ID NO: 2275400 - RNA, 19 nt, Artificial Sequence
  Description of Artificial Sequence: Synthetic oligonucleotide
  Sense strand starting at position 209 of SEQ ID NO: 1884566
gugcccucugaauaagaaa

SEQ ID NO: 2275401 - RNA, 19 nt, Artificial Sequence
  Description of Artificial Sequence: Synthetic oligonucleotide
  Antisense strand to SEQ ID NO: 2275400
uuucuuauucagagggcac

SEQ ID NO: 2275402 - RNA, 19 nt, Artificial Sequence
  Description of Artificial Sequence: Synthetic oligonucleotide
  Sense strand starting at position 220 of SEQ ID NO: 1884566
auaagaaauuugugggaug

SEQ ID NO: 2275403 - RNA, 19 nt, Artificial Sequence
  Description of Artificial Sequence: Synthetic oligonucleotide
  Antisense strand to SEQ ID NO: 2275402
caucccacaaauuucuuau

SEQ ID NO: 2275404 - RNA, 19 nt, Artificial Sequence
  Description of Artificial Sequence: Synthetic oligonucleotide
  Sense strand starting at position 221 of SEQ ID NO: 1884566
uaagaaauuugugggauga

SEQ ID NO: 2275405 - RNA, 19 nt, Artificial Sequence
  Description of Artificial Sequence: Synthetic oligonucleotide
  Antisense strand to SEQ ID NO: 2275404
ucaucccacaaauuucuua

SEQ ID NO: 2275406 - RNA, 19 nt, Artificial Sequence
  Description of Artificial Sequence: Synthetic oligonucleotide
  Sense strand starting at position 223 of SEQ ID NO: 1884566
agaaauuugugggaugaaa

SEQ ID NO: 2275407 - RNA, 19 nt, Artificial Sequence
  Description of Artificial Sequence: Synthetic oligonucleotide
  Antisense strand to SEQ ID NO: 2275406
uuucaucccacaaauuucu

SEQ ID NO: 2275408 - RNA, 19 nt, Artificial Sequence
  Description of Artificial Sequence: Synthetic oligonucleotide
  Sense strand starting at position 231 of SEQ ID NO: 1884566
gugggaugaaaguaguauu

SEQ ID NO: 2275409 - RNA, 19 nt, Artificial Sequence
  Description of Artificial Sequence: Synthetic oligonucleotide
  Antisense strand to SEQ ID NO: 2275408
aauacuacuuucaucccac

SEQ ID NO: 2275410 - RNA, 19 nt, Artificial Sequence
  Description of Artificial Sequence: Synthetic oligonucleotide
  Sense strand starting at position 234 of SEQ ID NO: 1884566
ggaugaaaguaguauuuac

SEQ ID NO: 2275411 - RNA, 19 nt, Artificial Sequence
  Description of Artificial Sequence: Synthetic oligonucleotide
  Antisense strand to SEQ ID NO: 2275410
guaaauacuacuuucaucc

SEQ ID NO: 2275412 - RNA, 19 nt, Artificial Sequence
  Description of Artificial Sequence: Synthetic oligonucleotide
  Sense strand starting at position 242 of SEQ ID NO: 1884566
guaguauuuacugagcgcu

SEQ ID NO: 2275413 - RNA, 19 nt, Artificial Sequence
  Description of Artificial Sequence: Synthetic oligonucleotide
  Antisense strand to SEQ ID NO: 2275412
agcgcucaguaaauacuac

SEQ ID NO: 2275414 - RNA, 19 nt, Artificial Sequence
  Description of Artificial Sequence: Synthetic oligonucleotide
  Sense strand starting at position 244 of SEQ ID NO: 1884566
aguauuuacugagcgcuuu

SEQ ID NO: 2275415 - RNA, 19 nt, Artificial Sequence
  Description of Artificial Sequence: Synthetic oligonucleotide
  Antisense strand to SEQ ID NO: 2275414
aaagcgcucaguaaauacu

SEQ ID NO: 2275416 - RNA, 19 nt, Artificial Sequence
  Description of Artificial Sequence: Synthetic oligonucleotide
  Sense strand starting at position 320 of SEQ ID NO: 1884566
uguuauacccaguaaucuu

SEQ ID NO: 2275417 - RNA, 19 nt, Artificial Sequence
  Description of Artificial Sequence: Synthetic oligonucleotide
  Antisense strand to SEQ ID NO: 2275416
aagauuacuggguauaaca

SEQ ID NO: 2275418 - RNA, 19 nt, Artificial Sequence
  Description of Artificial Sequence: Synthetic oligonucleotide
  Sense strand starting at position 328 of SEQ ID NO: 1884566
ccaguaaucuuguuauucc

SEQ ID NO: 2275419 - RNA, 19 nt, Artificial Sequence
  Description of Artificial Sequence: Synthetic oligonucleotide
  Antisense strand to SEQ ID NO: 2275418
ggaauaacaagauuacugg

SEQ ID NO: 2275420 - RNA, 19 nt, Artificial Sequence
  Description of Artificial Sequence: Synthetic oligonucleotide
  Sense strand starting at position 1462 of SEQ ID NO: 1884566
aaguccuucggguaguuua

SEQ ID NO: 2275421 - RNA, 19 nt, Artificial Sequence
  Description of Artificial Sequence: Synthetic oligonucleotide
  Antisense strand to SEQ ID NO: 2275420
uaaacuacccgaaggacuu

SEQ ID NO: 2275422 - RNA, 19 nt, Artificial Sequence
  Description of Artificial Sequence: Synthetic oligonucleotide
  Sense strand starting at position 1475 of SEQ ID NO: 1884566
aguuuagugucaguucuac

SEQ ID NO: 2275423 - RNA, 19 nt, Artificial Sequence
  Description of Artificial Sequence: Synthetic oligonucleotide
  Antisense strand to SEQ ID NO: 2275422
guagaacugacacuaaacu

SEQ ID NO: 2275424 - RNA, 19 nt, Artificial Sequence
  Description of Artificial Sequence: Synthetic oligonucleotide
  Sense strand starting at position 1481 of SEQ ID NO: 1884566
gugucaguucuacaaagua

SEQ ID NO: 2275425 - RNA, 19 nt, Artificial Sequence
  Description of Artificial Sequence: Synthetic oligonucleotide
  Antisense strand to SEQ ID NO: 2275424
uacuuuguagaacugacac

SEQ ID NO: 2275426 - RNA, 19 nt, Artificial Sequence
  Description of Artificial Sequence: Synthetic oligonucleotide
  Sense strand starting at position 1517 of SEQ ID NO: 1884566
accagugaggcucaaucuu

SEQ ID NO: 2275427 - RNA, 19 nt, Artificial Sequence
  Description of Artificial Sequence: Synthetic oligonucleotide
  Antisense strand to SEQ ID NO: 2275426
aagauugagccucacuggu

SEQ ID NO: 2275428 - RNA, 19 nt, Artificial Sequence
  Description of Artificial Sequence: Synthetic oligonucleotide
  Sense strand starting at position 1523 of SEQ ID NO: 1884566
gaggcucaaucuucugaag

SEQ ID NO: 2275429 - RNA, 19 nt, Artificial Sequence
  Description of Artificial Sequence: Synthetic oligonucleotide
  Antisense strand to SEQ ID NO: 2275428
cuucagaagauugagccuc

SEQ ID NO: 2275430 - RNA, 19 nt, Artificial Sequence
  Description of Artificial Sequence: Synthetic oligonucleotide
  Sense strand starting at position 1537 of SEQ ID NO: 1884566
ugaagucuuccagaaggca

SEQ ID NO: 2275431 - RNA, 19 nt, Artificial Sequence
  Description of Artificial Sequence: Synthetic oligonucleotide
  Antisense strand to SEQ ID NO: 2275430
ugccuucuggaagacuuca

SEQ ID NO: 2275432 - RNA, 19 nt, Artificial Sequence
  Description of Artificial Sequence: Synthetic oligonucleotide
  Sense strand starting at position 1651 of SEQ ID NO: 1884566
gguaauauccaaggacuau

SEQ ID NO: 2275433 - RNA, 19 nt, Artificial Sequence
  Description of Artificial Sequence: Synthetic oligonucleotide
  Antisense strand to SEQ ID NO: 2275432
auaguccuuggauauuacc

SEQ ID NO: 2275434 - RNA, 19 nt, Artificial Sequence
  Description of Artificial Sequence: Synthetic oligonucleotide
  Sense strand starting at position 1734 of SEQ ID NO: 1884566
cgcccuuggccuggagaaa

SEQ ID NO: 2275435 - RNA, 19 nt, Artificial Sequence
  Description of Artificial Sequence: Synthetic oligonucleotide
  Antisense strand to SEQ ID NO: 2275434
uuucuccaggccaagggcg

SEQ ID NO: 2275436 - RNA, 19 nt, Artificial Sequence
  Description of Artificial Sequence: Synthetic oligonucleotide
  Sense strand starting at position 1860 of SEQ ID NO: 1884566
cagaccuuaccuugagaug

SEQ ID NO: 2275437 - RNA, 19 nt, Artificial Sequence
  Description of Artificial Sequence: Synthetic oligonucleotide
  Antisense strand to SEQ ID NO: 2275436
caucucaagguaaggucug

SEQ ID NO: 2275438 - RNA, 19 nt, Artificial Sequence
  Description of Artificial Sequence: Synthetic oligonucleotide
  Sense strand starting at position 1865 of SEQ ID NO: 1884566
cuuaccuugagaugaguga

SEQ ID NO: 2275439 - RNA, 19 nt, Artificial Sequence
  Description of Artificial Sequence: Synthetic oligonucleotide
  Antisense strand to SEQ ID NO: 2275438
ucacucaucucaagguaag

SEQ ID NO: 2275440 - RNA, 19 nt, Artificial Sequence
  Description of Artificial Sequence: Synthetic oligonucleotide
  Sense strand starting at position 1911 of SEQ ID NO: 1884566
aguuguuguccugaaggca

SEQ ID NO: 2275441 - RNA, 19 nt, Artificial Sequence
  Description of Artificial Sequence: Synthetic oligonucleotide
  Antisense strand to SEQ ID NO: 2275440
ugccuucaggacaacaacu

SEQ ID NO: 2275442 - RNA, 19 nt, Artificial Sequence
  Description of Artificial Sequence: Synthetic oligonucleotide
  Sense strand starting at position 1944 of SEQ ID NO: 1884566
acaggcagcucuguaagaa

SEQ ID NO: 2275443 - RNA, 19 nt, Artificial Sequence
  Description of Artificial Sequence: Synthetic oligonucleotide
  Antisense strand to SEQ ID NO: 2275442
uucuuacagagcugccugu

SEQ ID NO: 2275444 - RNA, 19 nt, Artificial Sequence
  Description of Artificial Sequence: Synthetic oligonucleotide
  Sense strand starting at position 1972 of SEQ ID NO: 1884566
guaaaugccagcugaaagu

SEQ ID NO: 2275445 - RNA, 19 nt, Artificial Sequence
  Description of Artificial Sequence: Synthetic oligonucleotide
  Antisense strand to SEQ ID NO: 2275444
acuuucagcuggcauuuac

SEQ ID NO: 2275446 - RNA, 19 nt, Artificial Sequence
  Description of Artificial Sequence: Synthetic oligonucleotide
  Sense strand starting at position 2093 of SEQ ID NO: 1884566
accaauggcuucucaaaga

SEQ ID NO: 2275447 - RNA, 19 nt, Artificial Sequence
  Description of Artificial Sequence: Synthetic oligonucleotide
  Antisense strand to SEQ ID NO: 2275446
ucuuugagaagccauuggu

SEQ ID NO: 2275448 - RNA, 19 nt, Artificial Sequence
  Description of Artificial Sequence: Synthetic oligonucleotide
  Sense strand starting at position 2103 of SEQ ID NO: 1884566
ucucaaagauaaggaauau

SEQ ID NO: 2275449 - RNA, 19 nt, Artificial Sequence
  Description of Artificial Sequence: Synthetic oligonucleotide
  Antisense strand to SEQ ID NO: 2275448
auauuccuuaucuuugaga

SEQ ID NO: 2275450 - RNA, 19 nt, Artificial Sequence
  Description of Artificial Sequence: Synthetic oligonucleotide
  Sense strand starting at position 2163 of SEQ ID NO: 1884566
agggaaagauguucauggu

SEQ ID NO: 2275451 - RNA, 19 nt, Artificial Sequence
  Description of Artificial Sequence: Synthetic oligonucleotide
  Antisense strand to SEQ ID NO: 2275450
accaugaacaucuuucccu

SEQ ID NO: 2275452 - RNA, 19 nt, Artificial Sequence
  Description of Artificial Sequence: Synthetic oligonucleotide
  Sense strand starting at position 2171 of SEQ ID NO: 1884566
auguucaugguguaaguaa

SEQ ID NO: 2275453 - RNA, 19 nt, Artificial Sequence
  Description of Artificial Sequence: Synthetic oligonucleotide
  Antisense strand to SEQ ID NO: 2275452
uuacuuacaccaugaacau

SEQ ID NO: 2275454 - RNA, 19 nt, Artificial Sequence
  Description of Artificial Sequence: Synthetic oligonucleotide
  Sense strand starting at position 2193 of SEQ ID NO: 1884566
aacuaaguugcagaacagu

SEQ ID NO: 2275455 - RNA, 19 nt, Artificial Sequence
  Description of Artificial Sequence: Synthetic oligonucleotide
  Antisense strand to SEQ ID NO: 2275454
acuguucugcaacuuaguu

SEQ ID NO: 2275456 - RNA, 19 nt, Artificial Sequence
  Description of Artificial Sequence: Synthetic oligonucleotide
  Sense strand starting at position 2196 of SEQ ID NO: 1884566
uaaguugcagaacaguaua

SEQ ID NO: 2275457 - RNA, 19 nt, Artificial Sequence
  Description of Artificial Sequence: Synthetic oligonucleotide
  Antisense strand to SEQ ID NO: 2275456
uauacuguucugcaacuua

SEQ ID NO: 2275458 - RNA, 19 nt, Artificial Sequence
  Description of Artificial Sequence: Synthetic oligonucleotide
  Sense strand starting at position 2199 of SEQ ID NO: 1884566
guugcagaacaguauauga

SEQ ID NO: 2275459 - RNA, 19 nt, Artificial Sequence
  Description of Artificial Sequence: Synthetic oligonucleotide
  Antisense strand to SEQ ID NO: 2275458
ucauauacuguucugcaac

SEQ ID NO: 2275460 - RNA, 19 nt, Artificial Sequence
  Description of Artificial Sequence: Synthetic oligonucleotide
  Sense strand starting at position 2283 of SEQ ID NO: 1884566
gacuaucagguuuguguuu

SEQ ID NO: 2275461 - RNA, 19 nt, Artificial Sequence
  Description of Artificial Sequence: Synthetic oligonucleotide
  Antisense strand to SEQ ID NO: 2275460
aaacacaaaccugauaguc

SEQ ID NO: 2275462 - RNA, 19 nt, Artificial Sequence
  Description of Artificial Sequence: Synthetic oligonucleotide
  Sense strand starting at position 3308 of SEQ ID NO: 1884566
acagcuugugcccaggaau

SEQ ID NO: 2275463 - RNA, 19 nt, Artificial Sequence
  Description of Artificial Sequence: Synthetic oligonucleotide
  Antisense strand to SEQ ID NO: 2275462
auuccugggcacaagcugu

SEQ ID NO: 2275464 - RNA, 19 nt, Artificial Sequence
  Description of Artificial Sequence: Synthetic oligonucleotide
  Sense strand starting at position 3311 of SEQ ID NO: 1884566
gcuugugcccaggaauuag

SEQ ID NO: 2275465 - RNA, 19 nt, Artificial Sequence
  Description of Artificial Sequence: Synthetic oligonucleotide
  Antisense strand to SEQ ID NO: 2275464
cuaauuccugggcacaagc

SEQ ID NO: 2275466 - RNA, 19 nt, Artificial Sequence
  Description of Artificial Sequence: Synthetic oligonucleotide
  Sense strand starting at position 3519 of SEQ ID NO: 1884566
gguagagaaugcuugcaac

SEQ ID NO: 2275467 - RNA, 19 nt, Artificial Sequence
  Description of Artificial Sequence: Synthetic oligonucleotide
  Antisense strand to SEQ ID NO: 2275466
guugcaagcauucucuacc

SEQ ID NO: 2275468 - RNA, 19 nt, Artificial Sequence
  Description of Artificial Sequence: Synthetic oligonucleotide
  Sense strand starting at position 3600 of SEQ ID NO: 1884566
agcgaaggcucuuuggauc

SEQ ID NO: 2275469 - RNA, 19 nt, Artificial Sequence
  Description of Artificial Sequence: Synthetic oligonucleotide
  Antisense strand to SEQ ID NO: 2275468
gauccaaagagccuucgcu

SEQ ID NO: 2275470 - RNA, 19 nt, Artificial Sequence
  Description of Artificial Sequence: Synthetic oligonucleotide
  Sense strand starting at position 3627 of SEQ ID NO: 1884566
acuggcauuccgcacaaau

SEQ ID NO: 2275471 - RNA, 19 nt, Artificial Sequence
  Description of Artificial Sequence: Synthetic oligonucleotide
  Antisense strand to SEQ ID NO: 2275470
auuugugcggaaugccagu

SEQ ID NO: 2275472 - RNA, 19 nt, Artificial Sequence
  Description of Artificial Sequence: Synthetic oligonucleotide
  Sense strand starting at position 3816 of SEQ ID NO: 1884566
gaaucaauguuuggaagga

SEQ ID NO: 2275473 - RNA, 19 nt, Artificial Sequence
  Description of Artificial Sequence: Synthetic oligonucleotide
  Antisense strand to SEQ ID NO: 2275472
uccuuccaaacauugauuc

SEQ ID NO: 2275474 - RNA, 19 nt, Artificial Sequence
  Description of Artificial Sequence: Synthetic oligonucleotide
  Sense strand starting at position 3817 of SEQ ID NO: 1884566
aaucaauguuuggaaggau

SEQ ID NO: 2275475 - RNA, 19 nt, Artificial Sequence
  Description of Artificial Sequence: Synthetic oligonucleotide
  Antisense strand to SEQ ID NO: 2275474
auccuuccaaacauugauu

SEQ ID NO: 2275476 - RNA, 19 nt, Artificial Sequence
  Description of Artificial Sequence: Synthetic oligonucleotide
  Sense strand starting at position 3820 of SEQ ID NO: 1884566
caauguuuggaaggauuau

SEQ ID NO: 2275477 - RNA, 19 nt, Artificial Sequence
  Description of Artificial Sequence: Synthetic oligonucleotide
  Antisense strand to SEQ ID NO: 2275476
auaauccuuccaaacauug

SEQ ID NO: 2275478 - RNA, 19 nt, Artificial Sequence
  Description of Artificial Sequence: Synthetic oligonucleotide
  Sense strand starting at position 89 of SEQ ID NO: 1884567
cauucucuagguuggauau

SEQ ID NO: 2275479 - RNA, 19 nt, Artificial Sequence
  Description of Artificial Sequence: Synthetic oligonucleotide
  Antisense strand to SEQ ID NO: 2275478
auauccaaccuagagaaug

SEQ ID NO: 2275480 - RNA, 19 nt, Artificial Sequence
  Description of Artificial Sequence: Synthetic oligonucleotide
  Sense strand starting at position 90 of SEQ ID NO: 1884567
auucucuagguuggauaua

SEQ ID NO: 2275481 - RNA, 19 nt, Artificial Sequence
  Description of Artificial Sequence: Synthetic oligonucleotide
  Antisense strand to SEQ ID NO: 2275480
uauauccaaccuagagaau

SEQ ID NO: 2275482 - RNA, 19 nt, Artificial Sequence
  Description of Artificial Sequence: Synthetic oligonucleotide
  Sense strand starting at position 233 of SEQ ID NO: 1884567
uggguccaucaggaaugua

SEQ ID NO: 2275483 - RNA, 19 nt, Artificial Sequence
  Description of Artificial Sequence: Synthetic oligonucleotide
  Antisense strand to SEQ ID NO: 2275482
uacauuccugauggaccca

SEQ ID NO: 2275484 - RNA, 19 nt, Artificial Sequence
  Description of Artificial Sequence: Synthetic oligonucleotide
  Sense strand starting at position 384 of SEQ ID NO: 1884567
gcaguugugagacaaacaa

SEQ ID NO: 2275485 - RNA, 19 nt, Artificial Sequence
  Description of Artificial Sequence: Synthetic oligonucleotide
  Antisense strand to SEQ ID NO: 2275484
uuguuugucucacaacugc

SEQ ID NO: 2275486 - RNA, 19 nt, Artificial Sequence
  Description of Artificial Sequence: Synthetic oligonucleotide
  Sense strand starting at position 468 of SEQ ID NO: 1884567
gguggugaaaccuaaguac

SEQ ID NO: 2275487 - RNA, 19 nt, Artificial Sequence
  Description of Artificial Sequence: Synthetic oligonucleotide
  Antisense strand to SEQ ID NO: 2275486
guacuuagguuucaccacc

SEQ ID NO: 2275488 - RNA, 19 nt, Artificial Sequence
  Description of Artificial Sequence: Synthetic oligonucleotide
  Sense strand starting at position 471 of SEQ ID NO: 1884567
ggugaaaccuaaguacaga

SEQ ID NO: 2275489 - RNA, 19 nt, Artificial Sequence
  Description of Artificial Sequence: Synthetic oligonucleotide
  Antisense strand to SEQ ID NO: 2275488
ucuguacuuagguuucacc

SEQ ID NO: 2275490 - RNA, 19 nt, Artificial Sequence
  Description of Artificial Sequence: Synthetic oligonucleotide
  Sense strand starting at position 666 of SEQ ID NO: 1884567
gugggacuugcuuagagga

SEQ ID NO: 2275491 - RNA, 19 nt, Artificial Sequence
  Description of Artificial Sequence: Synthetic oligonucleotide
  Antisense strand to SEQ ID NO: 2275490
uccucuaagcaagucccac

SEQ ID NO: 2275492 - RNA, 19 nt, Artificial Sequence
  Description of Artificial Sequence: Synthetic oligonucleotide
  Sense strand starting at position 745 of SEQ ID NO: 1884567
aauuauucgcuugacgaag

SEQ ID NO: 2275493 - RNA, 19 nt, Artificial Sequence
  Description of Artificial Sequence: Synthetic oligonucleotide
  Antisense strand to SEQ ID NO: 2275492
cuucgucaagcgaauaauu

SEQ ID NO: 2275494 - RNA, 19 nt, Artificial Sequence
  Description of Artificial Sequence: Synthetic oligonucleotide
  Sense strand starting at position 861 of SEQ ID NO: 1884567
gggcccuuggcucagaaga

SEQ ID NO: 2275495 - RNA, 19 nt, Artificial Sequence
  Description of Artificial Sequence: Synthetic oligonucleotide
  Antisense strand to SEQ ID NO: 2275494
ucuucugagccaagggccc

SEQ ID NO: 2275496 - RNA, 19 nt, Artificial Sequence
  Description of Artificial Sequence: Synthetic oligonucleotide
  Sense strand starting at position 872 of SEQ ID NO: 1884567
ucagaagagcuccaugguu

SEQ ID NO: 2275497 - RNA, 19 nt, Artificial Sequence
  Description of Artificial Sequence: Synthetic oligonucleotide
  Antisense strand to SEQ ID NO: 2275496
aaccauggagcucuucuga

SEQ ID NO: 2275498 - RNA, 19 nt, Artificial Sequence
  Description of Artificial Sequence: Synthetic oligonucleotide
  Sense strand starting at position 955 of SEQ ID NO: 1884567
guaagugaagucuauggga

SEQ ID NO: 2275499 - RNA, 19 nt, Artificial Sequence
  Description of Artificial Sequence: Synthetic oligonucleotide
  Antisense strand to SEQ ID NO: 2275498
ucccauagacuucacuuac

SEQ ID NO: 2275500 - RNA, 19 nt, Artificial Sequence
  Description of Artificial Sequence: Synthetic oligonucleotide
  Sense strand starting at position 957 of SEQ ID NO: 1884567
aagugaagucuaugggaua

SEQ ID NO: 2275501 - RNA, 19 nt, Artificial Sequence
  Description of Artificial Sequence: Synthetic oligonucleotide
  Antisense strand to SEQ ID NO: 2275500
uaucccauagacuucacuu

SEQ ID NO: 2275502 - RNA, 19 nt, Artificial Sequence
  Description of Artificial Sequence: Synthetic oligonucleotide
  Sense strand starting at position 972 of SEQ ID NO: 1884567
gauaauagagaaugugugu

SEQ ID NO: 2275503 - RNA, 19 nt, Artificial Sequence
  Description of Artificial Sequence: Synthetic oligonucleotide
  Antisense strand to SEQ ID NO: 2275502
acacacauucucuauuauc

SEQ ID NO: 2275504 - RNA, 19 nt, Artificial Sequence
  Description of Artificial Sequence: Synthetic oligonucleotide
  Sense strand starting at position 1144 of SEQ ID NO: 1884567
cuguuugaaccagaugcuu

SEQ ID NO: 2275505 - RNA, 19 nt, Artificial Sequence
  Description of Artificial Sequence: Synthetic oligonucleotide
  Antisense strand to SEQ ID NO: 2275504
aagcaucugguucaaacag

SEQ ID NO: 2275506 - RNA, 19 nt, Artificial Sequence
  Description of Artificial Sequence: Synthetic oligonucleotide
  Sense strand starting at position 1224 of SEQ ID NO: 1884567
agcauuucuuacuuauguu

SEQ ID NO: 2275507 - RNA, 19 nt, Artificial Sequence
  Description of Artificial Sequence: Synthetic oligonucleotide
  Antisense strand to SEQ ID NO: 2275506
aacauaaguaagaaaugcu

SEQ ID NO: 2275508 - RNA, 19 nt, Artificial Sequence
  Description of Artificial Sequence: Synthetic oligonucleotide
  Sense strand starting at position 1238 of SEQ ID NO: 1884567
auguuccuucccuguauuu

SEQ ID NO: 2275509 - RNA, 19 nt, Artificial Sequence
  Description of Artificial Sequence: Synthetic oligonucleotide
  Antisense strand to SEQ ID NO: 2275508
aaauacagggaaggaacau

SEQ ID NO: 2275510 - RNA, 19 nt, Artificial Sequence
  Description of Artificial Sequence: Synthetic oligonucleotide
  Sense strand starting at position 1438 of SEQ ID NO: 1884567
ugaaauaccuaugcauaug

SEQ ID NO: 2275511 - RNA, 19 nt, Artificial Sequence
  Description of Artificial Sequence: Synthetic oligonucleotide
  Antisense strand to SEQ ID NO: 2275510
cauaugcauagguauuuca

SEQ ID NO: 2275512 - RNA, 19 nt, Artificial Sequence
  Description of Artificial Sequence: Synthetic oligonucleotide
  Sense strand starting at position 1448 of SEQ ID NO: 1884567
augcauaugcgacauauga

SEQ ID NO: 2275513 - RNA, 19 nt, Artificial Sequence
  Description of Artificial Sequence: Synthetic oligonucleotide
  Antisense strand to SEQ ID NO: 2275512
ucauaugucgcauaugcau

SEQ ID NO: 2275514 - RNA, 19 nt, Artificial Sequence
  Description of Artificial Sequence: Synthetic oligonucleotide
  Sense strand starting at position 1450 of SEQ ID NO: 1884567
gcauaugcgacauaugaaa

SEQ ID NO: 2275515 - RNA, 19 nt, Artificial Sequence
  Description of Artificial Sequence: Synthetic oligonucleotide
  Antisense strand to SEQ ID NO: 2275514
uuucauaugucgcauaugc

SEQ ID NO: 2275516 - RNA, 19 nt, Artificial Sequence
  Description of Artificial Sequence: Synthetic oligonucleotide
  Sense strand starting at position 1452 of SEQ ID NO: 1884567
auaugcgacauaugaaaug

SEQ ID NO: 2275517 - RNA, 19 nt, Artificial Sequence
  Description of Artificial Sequence: Synthetic oligonucleotide
  Antisense strand to SEQ ID NO: 2275516
cauuucauaugucgcauau

SEQ ID NO: 2275518 - RNA, 19 nt, Artificial Sequence
  Description of Artificial Sequence: Synthetic oligonucleotide
  Sense strand starting at position 1457 of SEQ ID NO: 1884567
cgacauaugaaaugugaau

SEQ ID NO: 2275519 - RNA, 19 nt, Artificial Sequence
  Description of Artificial Sequence: Synthetic oligonucleotide
  Antisense strand to SEQ ID NO: 2275518
auucacauuucauaugucg

SEQ ID NO: 2275520 - RNA, 19 nt, Artificial Sequence
  Description of Artificial Sequence: Synthetic oligonucleotide
  Sense strand starting at position 1464 of SEQ ID NO: 1884567
ugaaaugugaauuguguaa

SEQ ID NO: 2275521 - RNA, 19 nt, Artificial Sequence
  Description of Artificial Sequence: Synthetic oligonucleotide
  Antisense strand to SEQ ID NO: 2275520
uuacacaauucacauuuca

SEQ ID NO: 2275522 - RNA, 19 nt, Artificial Sequence
  Description of Artificial Sequence: Synthetic oligonucleotide
  Sense strand starting at position 1503 of SEQ ID NO: 1884567
aguuaaacgcucuuguguu

SEQ ID NO: 2275523 - RNA, 19 nt, Artificial Sequence
  Description of Artificial Sequence: Synthetic oligonucleotide
  Antisense strand to SEQ ID NO: 2275522
aacacaagagcguuuaacu

SEQ ID NO: 2275524 - RNA, 19 nt, Artificial Sequence
  Description of Artificial Sequence: Synthetic oligonucleotide
  Sense strand starting at position 1510 of SEQ ID NO: 1884567
cgcucuuguguuuacauuu

SEQ ID NO: 2275525 - RNA, 19 nt, Artificial Sequence
  Description of Artificial Sequence: Synthetic oligonucleotide
  Antisense strand to SEQ ID NO: 2275524
aaauguaaacacaagagcg

SEQ ID NO: 2275526 - RNA, 19 nt, Artificial Sequence
  Description of Artificial Sequence: Synthetic oligonucleotide
  Sense strand starting at position 1814 of SEQ ID NO: 1884567
gcucauccaaggugaugaa

SEQ ID NO: 2275527 - RNA, 19 nt, Artificial Sequence
  Description of Artificial Sequence: Synthetic oligonucleotide
  Antisense strand to SEQ ID NO: 2275526
uucaucaccuuggaugagc

SEQ ID NO: 2275528 - RNA, 19 nt, Artificial Sequence
  Description of Artificial Sequence: Synthetic oligonucleotide
  Sense strand starting at position 1855 of SEQ ID NO: 1884567
ugccauaaaugaguagaca

SEQ ID NO: 2275529 - RNA, 19 nt, Artificial Sequence
  Description of Artificial Sequence: Synthetic oligonucleotide
  Antisense strand to SEQ ID NO: 2275528
ugucuacucauuuauggca

SEQ ID NO: 2275530 - RNA, 19 nt, Artificial Sequence
  Description of Artificial Sequence: Synthetic oligonucleotide
  Sense strand starting at position 2224 of SEQ ID NO: 1884567
accugagagagguggucuu

SEQ ID NO: 2275531 - RNA, 19 nt, Artificial Sequence
  Description of Artificial Sequence: Synthetic oligonucleotide
  Antisense strand to SEQ ID NO: 2275530
aagaccaccucucucaggu

SEQ ID NO: 2275532 - RNA, 19 nt, Artificial Sequence
  Description of Artificial Sequence: Synthetic oligonucleotide
  Sense strand starting at position 2302 of SEQ ID NO: 1884567
ggaacuuggucccuagaag

SEQ ID NO: 2275533 - RNA, 19 nt, Artificial Sequence
  Description of Artificial Sequence: Synthetic oligonucleotide
  Antisense strand to SEQ ID NO: 2275532
cuucuagggaccaaguucc

SEQ ID NO: 2275534 - RNA, 19 nt, Artificial Sequence
  Description of Artificial Sequence: Synthetic oligonucleotide
  Sense strand starting at position 2369 of SEQ ID NO: 1884567
gagagcagauggcuauaau

SEQ ID NO: 2275535 - RNA, 19 nt, Artificial Sequence
  Description of Artificial Sequence: Synthetic oligonucleotide
  Antisense strand to SEQ ID NO: 2275534
auuauagccaucugcucuc

SEQ ID NO: 2275536 - RNA, 19 nt, Artificial Sequence
  Description of Artificial Sequence: Synthetic oligonucleotide
  Sense strand starting at position 2370 of SEQ ID NO: 1884567
agagcagauggcuauaauu

SEQ ID NO: 2275537 - RNA, 19 nt, Artificial Sequence
  Description of Artificial Sequence: Synthetic oligonucleotide
  Antisense strand to SEQ ID NO: 2275536
aauuauagccaucugcucu

SEQ ID NO: 2275538 - RNA, 19 nt, Artificial Sequence
  Description of Artificial Sequence: Synthetic oligonucleotide
  Sense strand starting at position 2380 of SEQ ID NO: 1884567
gcuauaauuccaggaccag

SEQ ID NO: 2275539 - RNA, 19 nt, Artificial Sequence
  Description of Artificial Sequence: Synthetic oligonucleotide
  Antisense strand to SEQ ID NO: 2275538
cugguccuggaauuauagc

SEQ ID NO: 2275540 - RNA, 19 nt, Artificial Sequence
  Description of Artificial Sequence: Synthetic oligonucleotide
  Sense strand starting at position 2728 of SEQ ID NO: 1884567
ucccauuucuaugucugua

SEQ ID NO: 2275541 - RNA, 19 nt, Artificial Sequence
  Description of Artificial Sequence: Synthetic oligonucleotide
  Antisense strand to SEQ ID NO: 2275540
uacagacauagaaauggga

SEQ ID NO: 2275542 - RNA, 19 nt, Artificial Sequence
  Description of Artificial Sequence: Synthetic oligonucleotide
  Sense strand starting at position 3001 of SEQ ID NO: 1884567
gucauauuuccaggcucau

SEQ ID NO: 2275543 - RNA, 19 nt, Artificial Sequence
  Description of Artificial Sequence: Synthetic oligonucleotide
  Antisense strand to SEQ ID NO: 2275542
augagccuggaaauaugac

SEQ ID NO: 2275544 - RNA, 19 nt, Artificial Sequence
  Description of Artificial Sequence: Synthetic oligonucleotide
  Sense strand starting at position 3142 of SEQ ID NO: 1884567
ucagcuuuccuagaagaug

SEQ ID NO: 2275545 - RNA, 19 nt, Artificial Sequence
  Description of Artificial Sequence: Synthetic oligonucleotide
  Antisense strand to SEQ ID NO: 2275544
caucuucuaggaaagcuga

SEQ ID NO: 2275546 - RNA, 19 nt, Artificial Sequence
  Description of Artificial Sequence: Synthetic oligonucleotide
  Sense strand starting at position 3145 of SEQ ID NO: 1884567
gcuuuccuagaagaugauu

SEQ ID NO: 2275547 - RNA, 19 nt, Artificial Sequence
  Description of Artificial Sequence: Synthetic oligonucleotide
  Antisense strand to SEQ ID NO: 2275546
aaucaucuucuaggaaagc

SEQ ID NO: 2275548 - RNA, 19 nt, Artificial Sequence
  Description of Artificial Sequence: Synthetic oligonucleotide
  Sense strand starting at position 3195 of SEQ ID NO: 1884567
cugagagugcugccugcuu

SEQ ID NO: 2275549 - RNA, 19 nt, Artificial Sequence
  Description of Artificial Sequence: Synthetic oligonucleotide
  Antisense strand to SEQ ID NO: 2275548
aagcaggcagcacucucag

SEQ ID NO: 2275550 - RNA, 19 nt, Artificial Sequence
  Description of Artificial Sequence: Synthetic oligonucleotide
  Sense strand starting at position 3262 of SEQ ID NO: 1884567
ugaugagguuuggccaaca

SEQ ID NO: 2275551 - RNA, 19 nt, Artificial Sequence
  Description of Artificial Sequence: Synthetic oligonucleotide
  Antisense strand to SEQ ID NO: 2275550
uguuggccaaaccucauca

SEQ ID NO: 2275552 - RNA, 19 nt, Artificial Sequence
  Description of Artificial Sequence: Synthetic oligonucleotide
  Sense strand starting at position 3305 of SEQ ID NO: 1884567
aacauaaagcucuggguga

SEQ ID NO: 2275553 - RNA, 19 nt, Artificial Sequence
  Description of Artificial Sequence: Synthetic oligonucleotide
  Antisense strand to SEQ ID NO: 2275552
ucacccagagcuuuauguu

SEQ ID NO: 2275554 - RNA, 19 nt, Artificial Sequence
  Description of Artificial Sequence: Synthetic oligonucleotide
  Sense strand starting at position 3309 of SEQ ID NO: 1884567
uaaagcucugggugaaaga

SEQ ID NO: 2275555 - RNA, 19 nt, Artificial Sequence
  Description of Artificial Sequence: Synthetic oligonucleotide
  Antisense strand to SEQ ID NO: 2275554
ucuuucacccagagcuuua

SEQ ID NO: 2275556 - RNA, 19 nt, Artificial Sequence
  Description of Artificial Sequence: Synthetic oligonucleotide
  Sense strand starting at position 3502 of SEQ ID NO: 1884567
caauaaagcccugguggau

SEQ ID NO: 2275557 - RNA, 19 nt, Artificial Sequence
  Description of Artificial Sequence: Synthetic oligonucleotide
  Antisense strand to SEQ ID NO: 2275556
auccaccagggcuuuauug

SEQ ID NO: 2275558 - RNA, 19 nt, Artificial Sequence
  Description of Artificial Sequence: Synthetic oligonucleotide
  Sense strand starting at position 636 of SEQ ID NO: 1884568
acuuguuguccugaaggag

SEQ ID NO: 2275559 - RNA, 19 nt, Artificial Sequence
  Description of Artificial Sequence: Synthetic oligonucleotide
  Antisense strand to SEQ ID NO: 2275558
cuccuucaggacaacaagu

SEQ ID NO: 2275560 - RNA, 19 nt, Artificial Sequence
  Description of Artificial Sequence: Synthetic oligonucleotide
  Sense strand starting at position 639 of SEQ ID NO: 1884568
uguuguccugaaggagaga

SEQ ID NO: 2275561 - RNA, 19 nt, Artificial Sequence
  Description of Artificial Sequence: Synthetic oligonucleotide
  Antisense strand to SEQ ID NO: 2275560
ucucuccuucaggacaaca

SEQ ID NO: 2275562 - RNA, 19 nt, Artificial Sequence
  Description of Artificial Sequence: Synthetic oligonucleotide
  Sense strand starting at position 1290 of SEQ ID NO: 1884568
cucuaugaccaacguucua

SEQ ID NO: 2275563 - RNA, 19 nt, Artificial Sequence
  Description of Artificial Sequence: Synthetic oligonucleotide
  Antisense strand to SEQ ID NO: 2275562
uagaacguuggucauagag

SEQ ID NO: 2275564 - RNA, 19 nt, Artificial Sequence
  Description of Artificial Sequence: Synthetic oligonucleotide
  Sense strand starting at position 1497 of SEQ ID NO: 1884568
ggcaaccauuucuagaagu

SEQ ID NO: 2275565 - RNA, 19 nt, Artificial Sequence
  Description of Artificial Sequence: Synthetic oligonucleotide
  Antisense strand to SEQ ID NO: 2275564
acuucuagaaaugguugcc

SEQ ID NO: 2275566 - RNA, 19 nt, Artificial Sequence
  Description of Artificial Sequence: Synthetic oligonucleotide
  Sense strand starting at position 1538 of SEQ ID NO: 1884568
cagagagggcaaugucuaa

SEQ ID NO: 2275567 - RNA, 19 nt, Artificial Sequence
  Description of Artificial Sequence: Synthetic oligonucleotide
  Antisense strand to SEQ ID NO: 2275566
uuagacauugcccucucug

SEQ ID NO: 2275568 - RNA, 19 nt, Artificial Sequence
  Description of Artificial Sequence: Synthetic oligonucleotide
  Sense strand starting at position 1588 of SEQ ID NO: 1884568
uggcuaggcucucuaggaa

SEQ ID NO: 2275569 - RNA, 19 nt, Artificial Sequence
  Description of Artificial Sequence: Synthetic oligonucleotide
  Antisense strand to SEQ ID NO: 2275568
uuccuagagagccuagcca

SEQ ID NO: 2275570 - RNA, 19 nt, Artificial Sequence
  Description of Artificial Sequence: Synthetic oligonucleotide
  Sense strand starting at position 1591 of SEQ ID NO: 1884568
cuaggcucucuaggaaaga

SEQ ID NO: 2275571 - RNA, 19 nt, Artificial Sequence
  Description of Artificial Sequence: Synthetic oligonucleotide
  Antisense strand to SEQ ID NO: 2275570
ucuuuccuagagagccuag

SEQ ID NO: 2275572 - RNA, 19 nt, Artificial Sequence
  Description of Artificial Sequence: Synthetic oligonucleotide
  Sense strand starting at position 1592 of SEQ ID NO: 1884568
uaggcucucuaggaaagau

SEQ ID NO: 2275573 - RNA, 19 nt, Artificial Sequence
  Description of Artificial Sequence: Synthetic oligonucleotide
  Antisense strand to SEQ ID NO: 2275572
aucuuuccuagagagccua

SEQ ID NO: 2275574 - RNA, 19 nt, Artificial Sequence
  Description of Artificial Sequence: Synthetic oligonucleotide
  Sense strand starting at position 1664 of SEQ ID NO: 1884568
ccaggaagcucuucuuuag

SEQ ID NO: 2275575 - RNA, 19 nt, Artificial Sequence
  Description of Artificial Sequence: Synthetic oligonucleotide
  Antisense strand to SEQ ID NO: 2275574
cuaaagaagagcuuccugg

SEQ ID NO: 2275576 - RNA, 19 nt, Artificial Sequence
  Description of Artificial Sequence: Synthetic oligonucleotide
  Sense strand starting at position 1667 of SEQ ID NO: 1884568
ggaagcucuucuuuaggua

SEQ ID NO: 2275577 - RNA, 19 nt, Artificial Sequence
  Description of Artificial Sequence: Synthetic oligonucleotide
  Antisense strand to SEQ ID NO: 2275576
uaccuaaagaagagcuucc

SEQ ID NO: 2275578 - RNA, 19 nt, Artificial Sequence
  Description of Artificial Sequence: Synthetic oligonucleotide
  Sense strand starting at position 1740 of SEQ ID NO: 1884568
cugugaaaggugugagcau

SEQ ID NO: 2275579 - RNA, 19 nt, Artificial Sequence
  Description of Artificial Sequence: Synthetic oligonucleotide
  Antisense strand to SEQ ID NO: 2275578
augcucacaccuuucacag

SEQ ID NO: 2275580 - RNA, 19 nt, Artificial Sequence
  Description of Artificial Sequence: Synthetic oligonucleotide
  Sense strand starting at position 1741 of SEQ ID NO: 1884568
ugugaaaggugugagcaua

SEQ ID NO: 2275581 - RNA, 19 nt, Artificial Sequence
  Description of Artificial Sequence: Synthetic oligonucleotide
  Antisense strand to SEQ ID NO: 2275580
uaugcucacaccuuucaca

SEQ ID NO: 2275582 - RNA, 19 nt, Artificial Sequence
  Description of Artificial Sequence: Synthetic oligonucleotide
  Sense strand starting at position 2192 of SEQ ID NO: 1884568
agcgguaaaccuggaaaga

SEQ ID NO: 2275583 - RNA, 19 nt, Artificial Sequence
  Description of Artificial Sequence: Synthetic oligonucleotide
  Antisense strand to SEQ ID NO: 2275582
ucuuuccagguuuaccgcu

SEQ ID NO: 2275584 - RNA, 19 nt, Artificial Sequence
  Description of Artificial Sequence: Synthetic oligonucleotide
  Sense strand starting at position 2211 of SEQ ID NO: 1884568
aaagauagugcccagugau

SEQ ID NO: 2275585 - RNA, 19 nt, Artificial Sequence
  Description of Artificial Sequence: Synthetic oligonucleotide
  Antisense strand to SEQ ID NO: 2275584
aucacugggcacuaucuuu

SEQ ID NO: 2275586 - RNA, 19 nt, Artificial Sequence
  Description of Artificial Sequence: Synthetic oligonucleotide
  Sense strand starting at position 2263 of SEQ ID NO: 1884568
caccuagucugcugugauc

SEQ ID NO: 2275587 - RNA, 19 nt, Artificial Sequence
  Description of Artificial Sequence: Synthetic oligonucleotide
  Antisense strand to SEQ ID NO: 2275586
gaucacagcagacuaggug

SEQ ID NO: 2275588 - RNA, 19 nt, Artificial Sequence
  Description of Artificial Sequence: Synthetic oligonucleotide
  Sense strand starting at position 2270 of SEQ ID NO: 1884568
ucugcugugaucugacgua

SEQ ID NO: 2275589 - RNA, 19 nt, Artificial Sequence
  Description of Artificial Sequence: Synthetic oligonucleotide
  Antisense strand to SEQ ID NO: 2275588
uacgucagaucacagcaga

SEQ ID NO: 2275590 - RNA, 19 nt, Artificial Sequence
  Description of Artificial Sequence: Synthetic oligonucleotide
  Sense strand starting at position 2347 of SEQ ID NO: 1884568
gcccaauggccagaugcua

SEQ ID NO: 2275591 - RNA, 19 nt, Artificial Sequence
  Description of Artificial Sequence: Synthetic oligonucleotide
  Antisense strand to SEQ ID NO: 2275590
uagcaucuggccauugggc

SEQ ID NO: 2275592 - RNA, 19 nt, Artificial Sequence
  Description of Artificial Sequence: Synthetic oligonucleotide
  Sense strand starting at position 2587 of SEQ ID NO: 1884568
uggcuuccuuaucugcaaa

SEQ ID NO: 2275593 - RNA, 19 nt, Artificial Sequence
  Description of Artificial Sequence: Synthetic oligonucleotide
  Antisense strand to SEQ ID NO: 2275592
uuugcagauaaggaagcca

SEQ ID NO: 2275594 - RNA, 19 nt, Artificial Sequence
  Description of Artificial Sequence: Synthetic oligonucleotide
  Sense strand starting at position 2651 of SEQ ID NO: 1884568
gcacuagcauguggugaau

SEQ ID NO: 2275595 - RNA, 19 nt, Artificial Sequence
  Description of Artificial Sequence: Synthetic oligonucleotide
  Antisense strand to SEQ ID NO: 2275594
auucaccacaugcuagugc

SEQ ID NO: 2275596 - RNA, 19 nt, Artificial Sequence
  Description of Artificial Sequence: Synthetic oligonucleotide
  Sense strand starting at position 2653 of SEQ ID NO: 1884568
acuagcauguggugaauau

SEQ ID NO: 2275597 - RNA, 19 nt, Artificial Sequence
  Description of Artificial Sequence: Synthetic oligonucleotide
  Antisense strand to SEQ ID NO: 2275596
auauucaccacaugcuagu

SEQ ID NO: 2275598 - RNA, 19 nt, Artificial Sequence
  Description of Artificial Sequence: Synthetic oligonucleotide
  Sense strand starting at position 2672 of SEQ ID NO: 1884568
ggccuuuagugucacaaac

SEQ ID NO: 2275599 - RNA, 19 nt, Artificial Sequence
  Description of Artificial Sequence: Synthetic oligonucleotide
  Antisense strand to SEQ ID NO: 2275598
guuugugacacuaaaggcc

SEQ ID NO: 2275600 - RNA, 19 nt, Artificial Sequence
  Description of Artificial Sequence: Synthetic oligonucleotide
  Sense strand starting at position 2698 of SEQ ID NO: 1884568
uggcauaagcucugcuacu

SEQ ID NO: 2275601 - RNA, 19 nt, Artificial Sequence
  Description of Artificial Sequence: Synthetic oligonucleotide
  Antisense strand to SEQ ID NO: 2275600
aguagcagagcuuaugcca

SEQ ID NO: 2275602 - RNA, 19 nt, Artificial Sequence
  Description of Artificial Sequence: Synthetic oligonucleotide
  Sense strand starting at position 2699 of SEQ ID NO: 1884568
ggcauaagcucugcuacuu

SEQ ID NO: 2275603 - RNA, 19 nt, Artificial Sequence
  Description of Artificial Sequence: Synthetic oligonucleotide
  Antisense strand to SEQ ID NO: 2275602
aaguagcagagcuuaugcc

SEQ ID NO: 2275604 - RNA, 19 nt, Artificial Sequence
  Description of Artificial Sequence: Synthetic oligonucleotide
  Sense strand starting at position 2723 of SEQ ID NO: 1884568
cuguguggccuuggagaga

SEQ ID NO: 2275605 - RNA, 19 nt, Artificial Sequence
  Description of Artificial Sequence: Synthetic oligonucleotide
  Antisense strand to SEQ ID NO: 2275604
ucucuccaaggccacacag

SEQ ID NO: 2275606 - RNA, 19 nt, Artificial Sequence
  Description of Artificial Sequence: Synthetic oligonucleotide
  Sense strand starting at position 2726 of SEQ ID NO: 1884568
uguggccuuggagagauua

SEQ ID NO: 2275607 - RNA, 19 nt, Artificial Sequence
  Description of Artificial Sequence: Synthetic oligonucleotide
  Antisense strand to SEQ ID NO: 2275606
uaaucucuccaaggccaca

SEQ ID NO: 2275608 - RNA, 19 nt, Artificial Sequence
  Description of Artificial Sequence: Synthetic oligonucleotide
  Sense strand starting at position 2728 of SEQ ID NO: 1884568
uggccuuggagagauuacu

SEQ ID NO: 2275609 - RNA, 19 nt, Artificial Sequence
  Description of Artificial Sequence: Synthetic oligonucleotide
  Antisense strand to SEQ ID NO: 2275608
aguaaucucuccaaggcca

SEQ ID NO: 2275610 - RNA, 19 nt, Artificial Sequence
  Description of Artificial Sequence: Synthetic oligonucleotide
  Sense strand starting at position 2734 of SEQ ID NO: 1884568
uggagagauuacuuaucuu

SEQ ID NO: 2275611 - RNA, 19 nt, Artificial Sequence
  Description of Artificial Sequence: Synthetic oligonucleotide
  Antisense strand to SEQ ID NO: 2275610
aagauaaguaaucucucca

SEQ ID NO: 2275612 - RNA, 19 nt, Artificial Sequence
  Description of Artificial Sequence: Synthetic oligonucleotide
  Sense strand starting at position 2800 of SEQ ID NO: 1884568
cucaaaggccuaugaugau

SEQ ID NO: 2275613 - RNA, 19 nt, Artificial Sequence
  Description of Artificial Sequence: Synthetic oligonucleotide
  Antisense strand to SEQ ID NO: 2275612
aucaucauaggccuuugag

SEQ ID NO: 2275614 - RNA, 19 nt, Artificial Sequence
  Description of Artificial Sequence: Synthetic oligonucleotide
  Sense strand starting at position 2867 of SEQ ID NO: 1884568
guagaagucuuacaugauc

SEQ ID NO: 2275615 - RNA, 19 nt, Artificial Sequence
  Description of Artificial Sequence: Synthetic oligonucleotide
  Antisense strand to SEQ ID NO: 2275614
gaucauguaagacuucuac

SEQ ID NO: 2275616 - RNA, 19 nt, Artificial Sequence
  Description of Artificial Sequence: Synthetic oligonucleotide
  Sense strand starting at position 2921 of SEQ ID NO: 1884568
aggucacagucuuacagau

SEQ ID NO: 2275617 - RNA, 19 nt, Artificial Sequence
  Description of Artificial Sequence: Synthetic oligonucleotide
  Antisense strand to SEQ ID NO: 2275616
aucuguaagacugugaccu

SEQ ID NO: 2275618 - RNA, 19 nt, Artificial Sequence
  Description of Artificial Sequence: Synthetic oligonucleotide
  Sense strand starting at position 2959 of SEQ ID NO: 1884568
ggugaucuuaaauggucaa

SEQ ID NO: 2275619 - RNA, 19 nt, Artificial Sequence
  Description of Artificial Sequence: Synthetic oligonucleotide
  Antisense strand to SEQ ID NO: 2275618
uugaccauuuaagaucacc

SEQ ID NO: 2275620 - RNA, 19 nt, Artificial Sequence
  Description of Artificial Sequence: Synthetic oligonucleotide
  Sense strand starting at position 3156 of SEQ ID NO: 1884568
agugucacugcuggagaga

SEQ ID NO: 2275621 - RNA, 19 nt, Artificial Sequence
  Description of Artificial Sequence: Synthetic oligonucleotide
  Antisense strand to SEQ ID NO: 2275620
ucucuccagcagugacacu

SEQ ID NO: 2275622 - RNA, 19 nt, Artificial Sequence
  Description of Artificial Sequence: Synthetic oligonucleotide
  Sense strand starting at position 3193 of SEQ ID NO: 1884568
ggcaguucuucccaggaca

SEQ ID NO: 2275623 - RNA, 19 nt, Artificial Sequence
  Description of Artificial Sequence: Synthetic oligonucleotide
  Antisense strand to SEQ ID NO: 2275622
uguccugggaagaacugcc

SEQ ID NO: 2275624 - RNA, 19 nt, Artificial Sequence
  Description of Artificial Sequence: Synthetic oligonucleotide
  Sense strand starting at position 3522 of SEQ ID NO: 1884568
uacuguguggcugauggau

SEQ ID NO: 2275625 - RNA, 19 nt, Artificial Sequence
  Description of Artificial Sequence: Synthetic oligonucleotide
  Antisense strand to SEQ ID NO: 2275624
auccaucagccacacagua

SEQ ID NO: 2275626 - RNA, 19 nt, Artificial Sequence
  Description of Artificial Sequence: Synthetic oligonucleotide
  Sense strand starting at position 3534 of SEQ ID NO: 1884568
gauggauuggcaggaggua

SEQ ID NO: 2275627 - RNA, 19 nt, Artificial Sequence
  Description of Artificial Sequence: Synthetic oligonucleotide
  Antisense strand to SEQ ID NO: 2275626
uaccuccugccaauccauc

SEQ ID NO: 2275628 - RNA, 19 nt, Artificial Sequence
  Description of Artificial Sequence: Synthetic oligonucleotide
  Sense strand starting at position 3547 of SEQ ID NO: 1884568
gagguaucagaguggacag

SEQ ID NO: 2275629 - RNA, 19 nt, Artificial Sequence
  Description of Artificial Sequence: Synthetic oligonucleotide
  Antisense strand to SEQ ID NO: 2275628
cuguccacucugauaccuc

SEQ ID NO: 2275630 - RNA, 19 nt, Artificial Sequence
  Description of Artificial Sequence: Synthetic oligonucleotide
  Sense strand starting at position 170 of SEQ ID NO: 1884569
gggcuaaucccugagcaca

SEQ ID NO: 2275631 - RNA, 19 nt, Artificial Sequence
  Description of Artificial Sequence: Synthetic oligonucleotide
  Antisense strand to SEQ ID NO: 2275630
ugugcucagggauuagccc

SEQ ID NO: 2275632 - RNA, 19 nt, Artificial Sequence
  Description of Artificial Sequence: Synthetic oligonucleotide
  Sense strand starting at position 188 of SEQ ID NO: 1884569
aggugcaaucuuugugacu

SEQ ID NO: 2275633 - RNA, 19 nt, Artificial Sequence
  Description of Artificial Sequence: Synthetic oligonucleotide
  Antisense strand to SEQ ID NO: 2275632
agucacaaagauugcaccu

SEQ ID NO: 2275634 - RNA, 19 nt, Artificial Sequence
  Description of Artificial Sequence: Synthetic oligonucleotide
  Sense strand starting at position 189 of SEQ ID NO: 1884569
ggugcaaucuuugugacuc

SEQ ID NO: 2275635 - RNA, 19 nt, Artificial Sequence
  Description of Artificial Sequence: Synthetic oligonucleotide
  Antisense strand to SEQ ID NO: 2275634
gagucacaaagauugcacc

SEQ ID NO: 2275636 - RNA, 19 nt, Artificial Sequence
  Description of Artificial Sequence: Synthetic oligonucleotide
  Sense strand starting at position 447 of SEQ ID NO: 1884569
gaaccaaugugcccuagua

SEQ ID NO: 2275637 - RNA, 19 nt, Artificial Sequence
  Description of Artificial Sequence: Synthetic oligonucleotide
  Antisense strand to SEQ ID NO: 2275636
uacuagggcacauugguuc

SEQ ID NO: 2275638 - RNA, 19 nt, Artificial Sequence
  Description of Artificial Sequence: Synthetic oligonucleotide
  Sense strand starting at position 449 of SEQ ID NO: 1884569
accaaugugcccuaguaag

SEQ ID NO: 2275639 - RNA, 19 nt, Artificial Sequence
  Description of Artificial Sequence: Synthetic oligonucleotide
  Antisense strand to SEQ ID NO: 2275638
cuuacuagggcacauuggu

SEQ ID NO: 2275640 - RNA, 19 nt, Artificial Sequence
  Description of Artificial Sequence: Synthetic oligonucleotide
  Sense strand starting at position 757 of SEQ ID NO: 1884569
cagcgucuuccugaccaaa

SEQ ID NO: 2275641 - RNA, 19 nt, Artificial Sequence
  Description of Artificial Sequence: Synthetic oligonucleotide
  Antisense strand to SEQ ID NO: 2275640
uuuggucaggaagacgcug

SEQ ID NO: 2275642 - RNA, 19 nt, Artificial Sequence
  Description of Artificial Sequence: Synthetic oligonucleotide
  Sense strand starting at position 759 of SEQ ID NO: 1884569
gcgucuuccugaccaaaga

SEQ ID NO: 2275643 - RNA, 19 nt, Artificial Sequence
  Description of Artificial Sequence: Synthetic oligonucleotide
  Antisense strand to SEQ ID NO: 2275642
ucuuuggucaggaagacgc

SEQ ID NO: 2275644 - RNA, 19 nt, Artificial Sequence
  Description of Artificial Sequence: Synthetic oligonucleotide
  Sense strand starting at position 760 of SEQ ID NO: 1884569
cgucuuccugaccaaagaa

SEQ ID NO: 2275645 - RNA, 19 nt, Artificial Sequence
  Description of Artificial Sequence: Synthetic oligonucleotide
  Antisense strand to SEQ ID NO: 2275644
uucuuuggucaggaagacg

SEQ ID NO: 2275646 - RNA, 19 nt, Artificial Sequence
  Description of Artificial Sequence: Synthetic oligonucleotide
  Sense strand starting at position 969 of SEQ ID NO: 1884569
cuccaugaguauucuucua

SEQ ID NO: 2275647 - RNA, 19 nt, Artificial Sequence
  Description of Artificial Sequence: Synthetic oligonucleotide
  Antisense strand to SEQ ID NO: 2275646
uagaagaauacucauggag

SEQ ID NO: 2275648 - RNA, 19 nt, Artificial Sequence
  Description of Artificial Sequence: Synthetic oligonucleotide
  Sense strand starting at position 971 of SEQ ID NO: 1884569
ccaugaguauucuucuaag

SEQ ID NO: 2275649 - RNA, 19 nt, Artificial Sequence
  Description of Artificial Sequence: Synthetic oligonucleotide
  Antisense strand to SEQ ID NO: 2275648
cuuagaagaauacucaugg

SEQ ID NO: 2275650 - RNA, 19 nt, Artificial Sequence
  Description of Artificial Sequence: Synthetic oligonucleotide
  Sense strand starting at position 974 of SEQ ID NO: 1884569
ugaguauucuucuaagagc

SEQ ID NO: 2275651 - RNA, 19 nt, Artificial Sequence
  Description of Artificial Sequence: Synthetic oligonucleotide
  Antisense strand to SEQ ID NO: 2275650
gcucuuagaagaauacuca

SEQ ID NO: 2275652 - RNA, 19 nt, Artificial Sequence
  Description of Artificial Sequence: Synthetic oligonucleotide
  Sense strand starting at position 977 of SEQ ID NO: 1884569
guauucuucuaagagcacu

SEQ ID NO: 2275653 - RNA, 19 nt, Artificial Sequence
  Description of Artificial Sequence: Synthetic oligonucleotide
  Antisense strand to SEQ ID NO: 2275652
agugcucuuagaagaauac

SEQ ID NO: 2275654 - RNA, 19 nt, Artificial Sequence
  Description of Artificial Sequence: Synthetic oligonucleotide
  Sense strand starting at position 988 of SEQ ID NO: 1884569
agagcacuucccugauuag

SEQ ID NO: 2275655 - RNA, 19 nt, Artificial Sequence
  Description of Artificial Sequence: Synthetic oligonucleotide
  Antisense strand to SEQ ID NO: 2275654
cuaaucagggaagugcucu

SEQ ID NO: 2275656 - RNA, 19 nt, Artificial Sequence
  Description of Artificial Sequence: Synthetic oligonucleotide
  Sense strand starting at position 991 of SEQ ID NO: 1884569
gcacuucccugauuaggaa

SEQ ID NO: 2275657 - RNA, 19 nt, Artificial Sequence
  Description of Artificial Sequence: Synthetic oligonucleotide
  Antisense strand to SEQ ID NO: 2275656
uuccuaaucagggaagugc

SEQ ID NO: 2275658 - RNA, 19 nt, Artificial Sequence
  Description of Artificial Sequence: Synthetic oligonucleotide
  Sense strand starting at position 1015 of SEQ ID NO: 1884569
acacauaccuuagggauga

SEQ ID NO: 2275659 - RNA, 19 nt, Artificial Sequence
  Description of Artificial Sequence: Synthetic oligonucleotide
  Antisense strand to SEQ ID NO: 2275658
ucaucccuaagguaugugu

SEQ ID NO: 2275660 - RNA, 19 nt, Artificial Sequence
  Description of Artificial Sequence: Synthetic oligonucleotide
  Sense strand starting at position 1225 of SEQ ID NO: 1884569
cuguccucuccaugucuga

SEQ ID NO: 2275661 - RNA, 19 nt, Artificial Sequence
  Description of Artificial Sequence: Synthetic oligonucleotide
  Antisense strand to SEQ ID NO: 2275660
ucagacauggagaggacag

SEQ ID NO: 2275662 - RNA, 19 nt, Artificial Sequence
  Description of Artificial Sequence: Synthetic oligonucleotide
  Sense strand starting at position 1304 of SEQ ID NO: 1884569
gagacccauccauggguua

SEQ ID NO: 2275663 - RNA, 19 nt, Artificial Sequence
  Description of Artificial Sequence: Synthetic oligonucleotide
  Antisense strand to SEQ ID NO: 2275662
uaacccauggaugggucuc

SEQ ID NO: 2275664 - RNA, 19 nt, Artificial Sequence
  Description of Artificial Sequence: Synthetic oligonucleotide
  Sense strand starting at position 1305 of SEQ ID NO: 1884569
agacccauccauggguuaa

SEQ ID NO: 2275665 - RNA, 19 nt, Artificial Sequence
  Description of Artificial Sequence: Synthetic oligonucleotide
  Antisense strand to SEQ ID NO: 2275664
uuaacccauggaugggucu

SEQ ID NO: 2275666 - RNA, 19 nt, Artificial Sequence
  Description of Artificial Sequence: Synthetic oligonucleotide
  Sense strand starting at position 1317 of SEQ ID NO: 1884569
ggguuaaggucagugcuca

SEQ ID NO: 2275667 - RNA, 19 nt, Artificial Sequence
  Description of Artificial Sequence: Synthetic oligonucleotide
  Antisense strand to SEQ ID NO: 2275666
ugagcacugaccuuaaccc

SEQ ID NO: 2275668 - RNA, 19 nt, Artificial Sequence
  Description of Artificial Sequence: Synthetic oligonucleotide
  Sense strand starting at position 2060 of SEQ ID NO: 1884569
gggagugcugcagagagaa

SEQ ID NO: 2275669 - RNA, 19 nt, Artificial Sequence
  Description of Artificial Sequence: Synthetic oligonucleotide
  Antisense strand to SEQ ID NO: 2275668
uucucucugcagcacuccc

SEQ ID NO: 2275670 - RNA, 19 nt, Artificial Sequence
  Description of Artificial Sequence: Synthetic oligonucleotide
  Sense strand starting at position 290 of SEQ ID NO: 1884570
gagcuaagcccucgacaag

SEQ ID NO: 2275671 - RNA, 19 nt, Artificial Sequence
  Description of Artificial Sequence: Synthetic oligonucleotide
  Antisense strand to SEQ ID NO: 2275670
cuugucgagggcuuagcuc

SEQ ID NO: 2275672 - RNA, 19 nt, Artificial Sequence
  Description of Artificial Sequence: Synthetic oligonucleotide
  Sense strand starting at position 291 of SEQ ID NO: 1884570
agcuaagcccucgacaagu

SEQ ID NO: 2275673 - RNA, 19 nt, Artificial Sequence
  Description of Artificial Sequence: Synthetic oligonucleotide
  Antisense strand to SEQ ID NO: 2275672
acuugucgagggcuuagcu

SEQ ID NO: 2275674 - RNA, 19 nt, Artificial Sequence
  Description of Artificial Sequence: Synthetic oligonucleotide
  Sense strand starting at position 557 of SEQ ID NO: 1884570
gaccacuuguucccagagu

SEQ ID NO: 2275675 - RNA, 19 nt, Artificial Sequence
  Description of Artificial Sequence: Synthetic oligonucleotide
  Antisense strand to SEQ ID NO: 2275674
acucugggaacaagugguc

SEQ ID NO: 2275676 - RNA, 19 nt, Artificial Sequence
  Description of Artificial Sequence: Synthetic oligonucleotide
  Sense strand starting at position 558 of SEQ ID NO: 1884570
accacuuguucccagagua

SEQ ID NO: 2275677 - RNA, 19 nt, Artificial Sequence
  Description of Artificial Sequence: Synthetic oligonucleotide
  Antisense strand to SEQ ID NO: 2275676
uacucugggaacaaguggu

SEQ ID NO: 2275678 - RNA, 19 nt, Artificial Sequence
  Description of Artificial Sequence: Synthetic oligonucleotide
  Sense strand starting at position 1170 of SEQ ID NO: 1884570
ccgaguggcccagagugau

SEQ ID NO: 2275679 - RNA, 19 nt, Artificial Sequence
  Description of Artificial Sequence: Synthetic oligonucleotide
  Antisense strand to SEQ ID NO: 2275678
aucacucugggccacucgg

SEQ ID NO: 2275680 - RNA, 19 nt, Artificial Sequence
  Description of Artificial Sequence: Synthetic oligonucleotide
  Sense strand starting at position 1320 of SEQ ID NO: 1884570
gguggagccacucacaaau

SEQ ID NO: 2275681 - RNA, 19 nt, Artificial Sequence
  Description of Artificial Sequence: Synthetic oligonucleotide
  Antisense strand to SEQ ID NO: 2275680
auuugugaguggcuccacc

SEQ ID NO: 2275682 - RNA, 19 nt, Artificial Sequence
  Description of Artificial Sequence: Synthetic oligonucleotide
  Sense strand starting at position 1985 of SEQ ID NO: 1884570
cacugucauccacgugagu

SEQ ID NO: 2275683 - RNA, 19 nt, Artificial Sequence
  Description of Artificial Sequence: Synthetic oligonucleotide
  Antisense strand to SEQ ID NO: 2275682
acucacguggaugacagug

SEQ ID NO: 2275684 - RNA, 19 nt, Artificial Sequence
  Description of Artificial Sequence: Synthetic oligonucleotide
  Sense strand starting at position 2369 of SEQ ID NO: 1884570
cccuguacuuaccuagagu

SEQ ID NO: 2275685 - RNA, 19 nt, Artificial Sequence
  Description of Artificial Sequence: Synthetic oligonucleotide
  Antisense strand to SEQ ID NO: 2275684
acucuagguaaguacaggg

SEQ ID NO: 2275686 - RNA, 19 nt, Artificial Sequence
  Description of Artificial Sequence: Synthetic oligonucleotide
  Sense strand starting at position 160 of SEQ ID NO: 1884571
guggguaaacguugcagaa

SEQ ID NO: 2275687 - RNA, 19 nt, Artificial Sequence
  Description of Artificial Sequence: Synthetic oligonucleotide
  Antisense strand to SEQ ID NO: 2275686
uucugcaacguuuacccac

SEQ ID NO: 2275688 - RNA, 19 nt, Artificial Sequence
  Description of Artificial Sequence: Synthetic oligonucleotide
  Sense strand starting at position 321 of SEQ ID NO: 1884571
gggauuggucacugccagu

SEQ ID NO: 2275689 - RNA, 19 nt, Artificial Sequence
  Description of Artificial Sequence: Synthetic oligonucleotide
  Antisense strand to SEQ ID NO: 2275688
acuggcagugaccaauccc

SEQ ID NO: 2275690 - RNA, 19 nt, Artificial Sequence
  Description of Artificial Sequence: Synthetic oligonucleotide
  Sense strand starting at position 386 of SEQ ID NO: 1884571
gggaugguguggucccaga

SEQ ID NO: 2275691 - RNA, 19 nt, Artificial Sequence
  Description of Artificial Sequence: Synthetic oligonucleotide
  Antisense strand to SEQ ID NO: 2275690
ucugggaccacaccauccc

SEQ ID NO: 2275692 - RNA, 19 nt, Artificial Sequence
  Description of Artificial Sequence: Synthetic oligonucleotide
  Sense strand starting at position 496 of SEQ ID NO: 1884571
gcuaucuggaccuggaaca

SEQ ID NO: 2275693 - RNA, 19 nt, Artificial Sequence
  Description of Artificial Sequence: Synthetic oligonucleotide
  Antisense strand to SEQ ID NO: 2275692
uguuccagguccagauagc

SEQ ID NO: 2275694 - RNA, 19 nt, Artificial Sequence
  Description of Artificial Sequence: Synthetic oligonucleotide
  Sense strand starting at position 535 of SEQ ID NO: 1884571
gcccuuaagaaguggguau

SEQ ID NO: 2275695 - RNA, 19 nt, Artificial Sequence
  Description of Artificial Sequence: Synthetic oligonucleotide
  Antisense strand to SEQ ID NO: 2275694
auacccacuucuuaagggc

SEQ ID NO: 2275696 - RNA, 19 nt, Artificial Sequence
  Description of Artificial Sequence: Synthetic oligonucleotide
  Sense strand starting at position 536 of SEQ ID NO: 1884571
cccuuaagaaguggguauu

SEQ ID NO: 2275697 - RNA, 19 nt, Artificial Sequence
  Description of Artificial Sequence: Synthetic oligonucleotide
  Antisense strand to SEQ ID NO: 2275696
aauacccacuucuuaaggg

SEQ ID NO: 2275698 - RNA, 19 nt, Artificial Sequence
  Description of Artificial Sequence: Synthetic oligonucleotide
  Sense strand starting at position 658 of SEQ ID NO: 1884571
uggccagcguagucauaga

SEQ ID NO: 2275699 - RNA, 19 nt, Artificial Sequence
  Description of Artificial Sequence: Synthetic oligonucleotide
  Antisense strand to SEQ ID NO: 2275698
ucuaugacuacgcuggcca

SEQ ID NO: 2275700 - RNA, 19 nt, Artificial Sequence
  Description of Artificial Sequence: Synthetic oligonucleotide
  Sense strand starting at position 854 of SEQ ID NO: 1884571
gggagagucaggugaggua

SEQ ID NO: 2275701 - RNA, 19 nt, Artificial Sequence
  Description of Artificial Sequence: Synthetic oligonucleotide
  Antisense strand to SEQ ID NO: 2275700
uaccucaccugacucuccc

SEQ ID NO: 2275702 - RNA, 19 nt, Artificial Sequence
  Description of Artificial Sequence: Synthetic oligonucleotide
  Sense strand starting at position 916 of SEQ ID NO: 1884571
agaggcaauuccugccaca

SEQ ID NO: 2275703 - RNA, 19 nt, Artificial Sequence
  Description of Artificial Sequence: Synthetic oligonucleotide
  Antisense strand to SEQ ID NO: 2275702
uguggcaggaauugccucu

SEQ ID NO: 2275704 - RNA, 19 nt, Artificial Sequence
  Description of Artificial Sequence: Synthetic oligonucleotide
  Sense strand starting at position 968 of SEQ ID NO: 1884571
gugggaaaugcccagcaaa

SEQ ID NO: 2275705 - RNA, 19 nt, Artificial Sequence
  Description of Artificial Sequence: Synthetic oligonucleotide
  Antisense strand to SEQ ID NO: 2275704
uuugcugggcauuucccac

SEQ ID NO: 2275706 - RNA, 19 nt, Artificial Sequence
  Description of Artificial Sequence: Synthetic oligonucleotide
  Sense strand starting at position 971 of SEQ ID NO: 1884571
ggaaaugcccagcaaaucu

SEQ ID NO: 2275707 - RNA, 19 nt, Artificial Sequence
  Description of Artificial Sequence: Synthetic oligonucleotide
  Antisense strand to SEQ ID NO: 2275706
agauuugcugggcauuucc

SEQ ID NO: 2275708 - RNA, 19 nt, Artificial Sequence
  Description of Artificial Sequence: Synthetic oligonucleotide
  Sense strand starting at position 1186 of SEQ ID NO: 1884571
ugcggugccaucucuugua

SEQ ID NO: 2275709 - RNA, 19 nt, Artificial Sequence
  Description of Artificial Sequence: Synthetic oligonucleotide
  Antisense strand to SEQ ID NO: 2275708
uacaagagauggcaccgca

SEQ ID NO: 2275710 - RNA, 19 nt, Artificial Sequence
  Description of Artificial Sequence: Synthetic oligonucleotide
  Sense strand starting at position 1260 of SEQ ID NO: 1884571
ggcugauuguccucugugu

SEQ ID NO: 2275711 - RNA, 19 nt, Artificial Sequence
  Description of Artificial Sequence: Synthetic oligonucleotide
  Antisense strand to SEQ ID NO: 2275710
acacagaggacaaucagcc

SEQ ID NO: 2275712 - RNA, 19 nt, Artificial Sequence
  Description of Artificial Sequence: Synthetic oligonucleotide
  Sense strand starting at position 1262 of SEQ ID NO: 1884571
cugauuguccucugugugu

SEQ ID NO: 2275713 - RNA, 19 nt, Artificial Sequence
  Description of Artificial Sequence: Synthetic oligonucleotide
  Antisense strand to SEQ ID NO: 2275712
acacacagaggacaaucag

SEQ ID NO: 2275714 - RNA, 19 nt, Artificial Sequence
  Description of Artificial Sequence: Synthetic oligonucleotide
  Sense strand starting at position 1526 of SEQ ID NO: 1884571
gguggaguucauggaaccu

SEQ ID NO: 2275715 - RNA, 19 nt, Artificial Sequence
  Description of Artificial Sequence: Synthetic oligonucleotide
  Antisense strand to SEQ ID NO: 2275714
agguuccaugaacuccacc

SEQ ID NO: 2275716 - RNA, 19 nt, Artificial Sequence
  Description of Artificial Sequence: Synthetic oligonucleotide
  Sense strand starting at position 1713 of SEQ ID NO: 1884571
agcagcauauccuugaaga

SEQ ID NO: 2275717 - RNA, 19 nt, Artificial Sequence
  Description of Artificial Sequence: Synthetic oligonucleotide
  Antisense strand to SEQ ID NO: 2275716
ucuucaaggauaugcugcu

SEQ ID NO: 2275718 - RNA, 19 nt, Artificial Sequence
  Description of Artificial Sequence: Synthetic oligonucleotide
  Sense strand starting at position 1714 of SEQ ID NO: 1884571
gcagcauauccuugaagaa

SEQ ID NO: 2275719 - RNA, 19 nt, Artificial Sequence
  Description of Artificial Sequence: Synthetic oligonucleotide
  Antisense strand to SEQ ID NO: 2275718
uucuucaaggauaugcugc

SEQ ID NO: 2275720 - RNA, 19 nt, Artificial Sequence
  Description of Artificial Sequence: Synthetic oligonucleotide
  Sense strand starting at position 1908 of SEQ ID NO: 1884571
caguguuuaccagacacug

SEQ ID NO: 2275721 - RNA, 19 nt, Artificial Sequence
  Description of Artificial Sequence: Synthetic oligonucleotide
  Antisense strand to SEQ ID NO: 2275720
cagugucugguaaacacug

SEQ ID NO: 2275722 - RNA, 19 nt, Artificial Sequence
  Description of Artificial Sequence: Synthetic oligonucleotide
  Sense strand starting at position 2049 of SEQ ID NO: 1884571
ucuggugaggauugaaaug

SEQ ID NO: 2275723 - RNA, 19 nt, Artificial Sequence
  Description of Artificial Sequence: Synthetic oligonucleotide
  Antisense strand to SEQ ID NO: 2275722
cauuucaauccucaccaga

SEQ ID NO: 2275724 - RNA, 19 nt, Artificial Sequence
  Description of Artificial Sequence: Synthetic oligonucleotide
  Sense strand starting at position 2080 of SEQ ID NO: 1884571
aggaaaggaugggagaaau

SEQ ID NO: 2275725 - RNA, 19 nt, Artificial Sequence
  Description of Artificial Sequence: Synthetic oligonucleotide
  Antisense strand to SEQ ID NO: 2275724
auuucucccauccuuuccu

SEQ ID NO: 2275726 - RNA, 19 nt, Artificial Sequence
  Description of Artificial Sequence: Synthetic oligonucleotide
  Sense strand starting at position 2236 of SEQ ID NO: 1884571
aagucaucccagugccuga

SEQ ID NO: 2275727 - RNA, 19 nt, Artificial Sequence
  Description of Artificial Sequence: Synthetic oligonucleotide
  Antisense strand to SEQ ID NO: 2275726
ucaggcacugggaugacuu

SEQ ID NO: 2275728 - RNA, 19 nt, Artificial Sequence
  Description of Artificial Sequence: Synthetic oligonucleotide
  Sense strand starting at position 2289 of SEQ ID NO: 1884571
uugucagguuccuccuuua

SEQ ID NO: 2275729 - RNA, 19 nt, Artificial Sequence
  Description of Artificial Sequence: Synthetic oligonucleotide
  Antisense strand to SEQ ID NO: 2275728
uaaaggaggaaccugacaa

SEQ ID NO: 2275730 - RNA, 19 nt, Artificial Sequence
  Description of Artificial Sequence: Synthetic oligonucleotide
  Sense strand starting at position 2294 of SEQ ID NO: 1884571
agguuccuccuuuaaauga

SEQ ID NO: 2275731 - RNA, 19 nt, Artificial Sequence
  Description of Artificial Sequence: Synthetic oligonucleotide
  Antisense strand to SEQ ID NO: 2275730
ucauuuaaaggaggaaccu

SEQ ID NO: 2275732 - RNA, 19 nt, Artificial Sequence
  Description of Artificial Sequence: Synthetic oligonucleotide
  Sense strand starting at position 2307 of SEQ ID NO: 1884571
aaaugaucaucuggagaga

SEQ ID NO: 2275733 - RNA, 19 nt, Artificial Sequence
  Description of Artificial Sequence: Synthetic oligonucleotide
  Antisense strand to SEQ ID NO: 2275732
ucucuccagaugaucauuu

SEQ ID NO: 2275734 - RNA, 19 nt, Artificial Sequence
  Description of Artificial Sequence: Synthetic oligonucleotide
  Sense strand starting at position 2370 of SEQ ID NO: 1884571
acaagauguucagggagca

SEQ ID NO: 2275735 - RNA, 19 nt, Artificial Sequence
  Description of Artificial Sequence: Synthetic oligonucleotide
  Antisense strand to SEQ ID NO: 2275734
ugcucccugaacaucuugu

SEQ ID NO: 2275736 - RNA, 19 nt, Artificial Sequence
  Description of Artificial Sequence: Synthetic oligonucleotide
  Sense strand starting at position 3081 of SEQ ID NO: 1884571
gucagcugggcuuauugaa

SEQ ID NO: 2275737 - RNA, 19 nt, Artificial Sequence
  Description of Artificial Sequence: Synthetic oligonucleotide
  Antisense strand to SEQ ID NO: 2275736
uucaauaagcccagcugac

SEQ ID NO: 2275738 - RNA, 19 nt, Artificial Sequence
  Description of Artificial Sequence: Synthetic oligonucleotide
  Sense strand starting at position 3088 of SEQ ID NO: 1884571
gggcuuauugaaugaggac

SEQ ID NO: 2275739 - RNA, 19 nt, Artificial Sequence
  Description of Artificial Sequence: Synthetic oligonucleotide
  Antisense strand to SEQ ID NO: 2275738
guccucauucaauaagccc

SEQ ID NO: 2275740 - RNA, 19 nt, Artificial Sequence
  Description of Artificial Sequence: Synthetic oligonucleotide
  Sense strand starting at position 3158 of SEQ ID NO: 1884571
cgacauugccaacauugaa

SEQ ID NO: 2275741 - RNA, 19 nt, Artificial Sequence
  Description of Artificial Sequence: Synthetic oligonucleotide
  Antisense strand to SEQ ID NO: 2275740
uucaauguuggcaaugucg

SEQ ID NO: 2275742 - RNA, 19 nt, Artificial Sequence
  Description of Artificial Sequence: Synthetic oligonucleotide
  Sense strand starting at position 3560 of SEQ ID NO: 1884571
acccaucucuguuguguaa

SEQ ID NO: 2275743 - RNA, 19 nt, Artificial Sequence
  Description of Artificial Sequence: Synthetic oligonucleotide
  Antisense strand to SEQ ID NO: 2275742
uuacacaacagagaugggu

SEQ ID NO: 2275744 - RNA, 19 nt, Artificial Sequence
  Description of Artificial Sequence: Synthetic oligonucleotide
  Sense strand starting at position 3562 of SEQ ID NO: 1884571
ccaucucuguuguguaaac

SEQ ID NO: 2275745 - RNA, 19 nt, Artificial Sequence
  Description of Artificial Sequence: Synthetic oligonucleotide
  Antisense strand to SEQ ID NO: 2275744
guuuacacaacagagaugg

SEQ ID NO: 2275746 - RNA, 19 nt, Artificial Sequence
  Description of Artificial Sequence: Synthetic oligonucleotide
  Sense strand starting at position 3586 of SEQ ID NO: 1884571
acuccauugccucaaagga

SEQ ID NO: 2275747 - RNA, 19 nt, Artificial Sequence
  Description of Artificial Sequence: Synthetic oligonucleotide
  Antisense strand to SEQ ID NO: 2275746
uccuuugaggcaauggagu

SEQ ID NO: 2275748 - RNA, 19 nt, Artificial Sequence
  Description of Artificial Sequence: Synthetic oligonucleotide
  Sense strand starting at position 131 of SEQ ID NO: 1884572
ugugguucaucugugugau

SEQ ID NO: 2275749 - RNA, 19 nt, Artificial Sequence
  Description of Artificial Sequence: Synthetic oligonucleotide
  Antisense strand to SEQ ID NO: 2275748
aucacacagaugaaccaca

SEQ ID NO: 2275750 - RNA, 19 nt, Artificial Sequence
  Description of Artificial Sequence: Synthetic oligonucleotide
  Sense strand starting at position 132 of SEQ ID NO: 1884572
gugguucaucugugugauc

SEQ ID NO: 2275751 - RNA, 19 nt, Artificial Sequence
  Description of Artificial Sequence: Synthetic oligonucleotide
  Antisense strand to SEQ ID NO: 2275750
gaucacacagaugaaccac

SEQ ID NO: 2275752 - RNA, 19 nt, Artificial Sequence
  Description of Artificial Sequence: Synthetic oligonucleotide
  Sense strand starting at position 139 of SEQ ID NO: 1884572
aucugugugauccacacga

SEQ ID NO: 2275753 - RNA, 19 nt, Artificial Sequence
  Description of Artificial Sequence: Synthetic oligonucleotide
  Antisense strand to SEQ ID NO: 2275752
ucguguggaucacacagau

SEQ ID NO: 2275754 - RNA, 19 nt, Artificial Sequence
  Description of Artificial Sequence: Synthetic oligonucleotide
  Sense strand starting at position 143 of SEQ ID NO: 1884572
gugugauccacacgaacca

SEQ ID NO: 2275755 - RNA, 19 nt, Artificial Sequence
  Description of Artificial Sequence: Synthetic oligonucleotide
  Antisense strand to SEQ ID NO: 2275754
ugguucguguggaucacac

SEQ ID NO: 2275756 - RNA, 19 nt, Artificial Sequence
  Description of Artificial Sequence: Synthetic oligonucleotide
  Sense strand starting at position 265 of SEQ ID NO: 1884572
ccuugacuuccuuaucugu

SEQ ID NO: 2275757 - RNA, 19 nt, Artificial Sequence
  Description of Artificial Sequence: Synthetic oligonucleotide
  Antisense strand to SEQ ID NO: 2275756
acagauaaggaagucaagg

SEQ ID NO: 2275758 - RNA, 19 nt, Artificial Sequence
  Description of Artificial Sequence: Synthetic oligonucleotide
  Sense strand starting at position 268 of SEQ ID NO: 1884572
ugacuuccuuaucuguaca

SEQ ID NO: 2275759 - RNA, 19 nt, Artificial Sequence
  Description of Artificial Sequence: Synthetic oligonucleotide
  Antisense strand to SEQ ID NO: 2275758
uguacagauaaggaaguca

SEQ ID NO: 2275760 - RNA, 19 nt, Artificial Sequence
  Description of Artificial Sequence: Synthetic oligonucleotide
  Sense strand starting at position 308 of SEQ ID NO: 1884572
ccuugccaguguuuaaaga

SEQ ID NO: 2275761 - RNA, 19 nt, Artificial Sequence
  Description of Artificial Sequence: Synthetic oligonucleotide
  Antisense strand to SEQ ID NO: 2275760
ucuuuaaacacuggcaagg

SEQ ID NO: 2275762 - RNA, 19 nt, Artificial Sequence
  Description of Artificial Sequence: Synthetic oligonucleotide
  Sense strand starting at position 309 of SEQ ID NO: 1884572
cuugccaguguuuaaagaa

SEQ ID NO: 2275763 - RNA, 19 nt, Artificial Sequence
  Description of Artificial Sequence: Synthetic oligonucleotide
  Antisense strand to SEQ ID NO: 2275762
uucuuuaaacacuggcaag

SEQ ID NO: 2275764 - RNA, 19 nt, Artificial Sequence
  Description of Artificial Sequence: Synthetic oligonucleotide
  Sense strand starting at position 319 of SEQ ID NO: 1884572
uuuaaagaaucugaaugga

SEQ ID NO: 2275765 - RNA, 19 nt, Artificial Sequence
  Description of Artificial Sequence: Synthetic oligonucleotide
  Antisense strand to SEQ ID NO: 2275764
uccauucagauucuuuaaa

SEQ ID NO: 2275766 - RNA, 19 nt, Artificial Sequence
  Description of Artificial Sequence: Synthetic oligonucleotide
  Sense strand starting at position 436 of SEQ ID NO: 1884572
cugccacgcuuguguuuau

SEQ ID NO: 2275767 - RNA, 19 nt, Artificial Sequence
  Description of Artificial Sequence: Synthetic oligonucleotide
  Antisense strand to SEQ ID NO: 2275766
auaaacacaagcguggcag

SEQ ID NO: 2275768 - RNA, 19 nt, Artificial Sequence
  Description of Artificial Sequence: Synthetic oligonucleotide
  Sense strand starting at position 440 of SEQ ID NO: 1884572
cacgcuuguguuuauguga

SEQ ID NO: 2275769 - RNA, 19 nt, Artificial Sequence
  Description of Artificial Sequence: Synthetic oligonucleotide
  Antisense strand to SEQ ID NO: 2275768
ucacauaaacacaagcgug

SEQ ID NO: 2275770 - RNA, 19 nt, Artificial Sequence
  Description of Artificial Sequence: Synthetic oligonucleotide
  Sense strand starting at position 445 of SEQ ID NO: 1884572
uuguguuuaugugauucca

SEQ ID NO: 2275771 - RNA, 19 nt, Artificial Sequence
  Description of Artificial Sequence: Synthetic oligonucleotide
  Antisense strand to SEQ ID NO: 2275770
uggaaucacauaaacacaa

SEQ ID NO: 2275772 - RNA, 19 nt, Artificial Sequence
  Description of Artificial Sequence: Synthetic oligonucleotide
  Sense strand starting at position 453 of SEQ ID NO: 1884572
augugauuccaccagcaag

SEQ ID NO: 2275773 - RNA, 19 nt, Artificial Sequence
  Description of Artificial Sequence: Synthetic oligonucleotide
  Antisense strand to SEQ ID NO: 2275772
cuugcugguggaaucacau

SEQ ID NO: 2275774 - RNA, 19 nt, Artificial Sequence
  Description of Artificial Sequence: Synthetic oligonucleotide
  Sense strand starting at position 783 of SEQ ID NO: 1884572
cugccugauuugccucaga

SEQ ID NO: 2275775 - RNA, 19 nt, Artificial Sequence
  Description of Artificial Sequence: Synthetic oligonucleotide
  Antisense strand to SEQ ID NO: 2275774
ucugaggcaaaucaggcag

SEQ ID NO: 2275776 - RNA, 19 nt, Artificial Sequence
  Description of Artificial Sequence: Synthetic oligonucleotide
  Sense strand starting at position 936 of SEQ ID NO: 1884572
gacacagaugccuggcaga

SEQ ID NO: 2275777 - RNA, 19 nt, Artificial Sequence
  Description of Artificial Sequence: Synthetic oligonucleotide
  Antisense strand to SEQ ID NO: 2275776
ucugccaggcaucuguguc

SEQ ID NO: 2275778 - RNA, 19 nt, Artificial Sequence
  Description of Artificial Sequence: Synthetic oligonucleotide
  Sense strand starting at position 964 of SEQ ID NO: 1884572
gcaacuccuccugggaaga

SEQ ID NO: 2275779 - RNA, 19 nt, Artificial Sequence
  Description of Artificial Sequence: Synthetic oligonucleotide
  Antisense strand to SEQ ID NO: 2275778
ucuucccaggaggaguugc

SEQ ID NO: 2275780 - RNA, 19 nt, Artificial Sequence
  Description of Artificial Sequence: Synthetic oligonucleotide
  Sense strand starting at position 1251 of SEQ ID NO: 1884572
cagcauguacgccagauuu

SEQ ID NO: 2275781 - RNA, 19 nt, Artificial Sequence
  Description of Artificial Sequence: Synthetic oligonucleotide
  Antisense strand to SEQ ID NO: 2275780
aaaucuggcguacaugcug

SEQ ID NO: 2275782 - RNA, 19 nt, Artificial Sequence
  Description of Artificial Sequence: Synthetic oligonucleotide
  Sense strand starting at position 1322 of SEQ ID NO: 1884572
gcaugagaguguucaggag

SEQ ID NO: 2275783 - RNA, 19 nt, Artificial Sequence
  Description of Artificial Sequence: Synthetic oligonucleotide
  Antisense strand to SEQ ID NO: 2275782
cuccugaacacucucaugc

SEQ ID NO: 2275784 - RNA, 19 nt, Artificial Sequence
  Description of Artificial Sequence: Synthetic oligonucleotide
  Sense strand starting at position 1907 of SEQ ID NO: 1884572
aggguagguaucugcguuu

SEQ ID NO: 2275785 - RNA, 19 nt, Artificial Sequence
  Description of Artificial Sequence: Synthetic oligonucleotide
  Antisense strand to SEQ ID NO: 2275784
aaacgcagauaccuacccu

SEQ ID NO: 2275786 - RNA, 19 nt, Artificial Sequence
  Description of Artificial Sequence: Synthetic oligonucleotide
  Sense strand starting at position 1910 of SEQ ID NO: 1884572
guagguaucugcguuucuu

SEQ ID NO: 2275787 - RNA, 19 nt, Artificial Sequence
  Description of Artificial Sequence: Synthetic oligonucleotide
  Antisense strand to SEQ ID NO: 2275786
aagaaacgcagauaccuac

SEQ ID NO: 2275788 - RNA, 19 nt, Artificial Sequence
  Description of Artificial Sequence: Synthetic oligonucleotide
  Sense strand starting at position 1918 of SEQ ID NO: 1884572
cugcguuucuucuugccau

SEQ ID NO: 2275789 - RNA, 19 nt, Artificial Sequence
  Description of Artificial Sequence: Synthetic oligonucleotide
  Antisense strand to SEQ ID NO: 2275788
auggcaagaagaaacgcag

SEQ ID NO: 2275790 - RNA, 19 nt, Artificial Sequence
  Description of Artificial Sequence: Synthetic oligonucleotide
  Sense strand starting at position 1919 of SEQ ID NO: 1884572
ugcguuucuucuugccaua

SEQ ID NO: 2275791 - RNA, 19 nt, Artificial Sequence
  Description of Artificial Sequence: Synthetic oligonucleotide
  Antisense strand to SEQ ID NO: 2275790
uauggcaagaagaaacgca

SEQ ID NO: 2275792 - RNA, 19 nt, Artificial Sequence
  Description of Artificial Sequence: Synthetic oligonucleotide
  Sense strand starting at position 1921 of SEQ ID NO: 1884572
cguuucuucuugccauacu

SEQ ID NO: 2275793 - RNA, 19 nt, Artificial Sequence
  Description of Artificial Sequence: Synthetic oligonucleotide
  Antisense strand to SEQ ID NO: 2275792
aguauggcaagaagaaacg

SEQ ID NO: 2275794 - RNA, 19 nt, Artificial Sequence
  Description of Artificial Sequence: Synthetic oligonucleotide
  Sense strand starting at position 1930 of SEQ ID NO: 1884572
uugccauacuguggagaca

SEQ ID NO: 2275795 - RNA, 19 nt, Artificial Sequence
  Description of Artificial Sequence: Synthetic oligonucleotide
  Antisense strand to SEQ ID NO: 2275794
ugucuccacaguauggcaa

SEQ ID NO: 2275796 - RNA, 19 nt, Artificial Sequence
  Description of Artificial Sequence: Synthetic oligonucleotide
  Sense strand starting at position 2281 of SEQ ID NO: 1884572
cugggucuuuguggaagau

SEQ ID NO: 2275797 - RNA, 19 nt, Artificial Sequence
  Description of Artificial Sequence: Synthetic oligonucleotide
  Antisense strand to SEQ ID NO: 2275796
aucuuccacaaagacccag

SEQ ID NO: 2275798 - RNA, 19 nt, Artificial Sequence
  Description of Artificial Sequence: Synthetic oligonucleotide
  Sense strand starting at position 2283 of SEQ ID NO: 1884572
gggucuuuguggaagaugu

SEQ ID NO: 2275799 - RNA, 19 nt, Artificial Sequence
  Description of Artificial Sequence: Synthetic oligonucleotide
  Antisense strand to SEQ ID NO: 2275798
acaucuuccacaaagaccc

SEQ ID NO: 2275800 - RNA, 19 nt, Artificial Sequence
  Description of Artificial Sequence: Synthetic oligonucleotide
  Sense strand starting at position 2747 of SEQ ID NO: 1884572
gcucguaagugucaugaag

SEQ ID NO: 2275801 - RNA, 19 nt, Artificial Sequence
  Description of Artificial Sequence: Synthetic oligonucleotide
  Antisense strand to SEQ ID NO: 2275800
cuucaugacacuuacgagc

SEQ ID NO: 2275802 - RNA, 19 nt, Artificial Sequence
  Description of Artificial Sequence: Synthetic oligonucleotide
  Sense strand starting at position 2749 of SEQ ID NO: 1884572
ucguaagugucaugaagcu

SEQ ID NO: 2275803 - RNA, 19 nt, Artificial Sequence
  Description of Artificial Sequence: Synthetic oligonucleotide
  Antisense strand to SEQ ID NO: 2275802
agcuucaugacacuuacga

SEQ ID NO: 2275804 - RNA, 19 nt, Artificial Sequence
  Description of Artificial Sequence: Synthetic oligonucleotide
  Sense strand starting at position 2795 of SEQ ID NO: 1884572
cccugugcuugaucggaau

SEQ ID NO: 2275805 - RNA, 19 nt, Artificial Sequence
  Description of Artificial Sequence: Synthetic oligonucleotide
  Antisense strand to SEQ ID NO: 2275804
auuccgaucaagcacaggg

SEQ ID NO: 2275806 - RNA, 19 nt, Artificial Sequence
  Description of Artificial Sequence: Synthetic oligonucleotide
  Sense strand starting at position 2797 of SEQ ID NO: 1884572
cugugcuugaucggaaucu

SEQ ID NO: 2275807 - RNA, 19 nt, Artificial Sequence
  Description of Artificial Sequence: Synthetic oligonucleotide
  Antisense strand to SEQ ID NO: 2275806
agauuccgaucaagcacag

SEQ ID NO: 2275808 - RNA, 19 nt, Artificial Sequence
  Description of Artificial Sequence: Synthetic oligonucleotide
  Sense strand starting at position 2822 of SEQ ID NO: 1884572
gaaggaacuucuuggcuca

SEQ ID NO: 2275809 - RNA, 19 nt, Artificial Sequence
  Description of Artificial Sequence: Synthetic oligonucleotide
  Antisense strand to SEQ ID NO: 2275808
ugagccaagaaguuccuuc

SEQ ID NO: 2275810 - RNA, 19 nt, Artificial Sequence
  Description of Artificial Sequence: Synthetic oligonucleotide
  Sense strand starting at position 2829 of SEQ ID NO: 1884572
cuucuuggcucaucuggaa

SEQ ID NO: 2275811 - RNA, 19 nt, Artificial Sequence
  Description of Artificial Sequence: Synthetic oligonucleotide
  Antisense strand to SEQ ID NO: 2275810
uuccagaugagccaagaag

SEQ ID NO: 2275812 - RNA, 19 nt, Artificial Sequence
  Description of Artificial Sequence: Synthetic oligonucleotide
  Sense strand starting at position 2960 of SEQ ID NO: 1884572
ucacaaugcccagaugcau

SEQ ID NO: 2275813 - RNA, 19 nt, Artificial Sequence
  Description of Artificial Sequence: Synthetic oligonucleotide
  Antisense strand to SEQ ID NO: 2275812
augcaucugggcauuguga

SEQ ID NO: 2275814 - RNA, 19 nt, Artificial Sequence
  Description of Artificial Sequence: Synthetic oligonucleotide
  Sense strand starting at position 2987 of SEQ ID NO: 1884572
acgucuguugggcaguuaa

SEQ ID NO: 2275815 - RNA, 19 nt, Artificial Sequence
  Description of Artificial Sequence: Synthetic oligonucleotide
  Antisense strand to SEQ ID NO: 2275814
uuaacugcccaacagacgu

SEQ ID NO: 2275816 - RNA, 19 nt, Artificial Sequence
  Description of Artificial Sequence: Synthetic oligonucleotide
  Sense strand starting at position 3842 of SEQ ID NO: 1884572
uugagaucuugauggaagg

SEQ ID NO: 2275817 - RNA, 19 nt, Artificial Sequence
  Description of Artificial Sequence: Synthetic oligonucleotide
  Antisense strand to SEQ ID NO: 2275816
ccuuccaucaagaucucaa

SEQ ID NO: 2275818 - RNA, 19 nt, Artificial Sequence
  Description of Artificial Sequence: Synthetic oligonucleotide
  Sense strand starting at position 360 of SEQ ID NO: 1884573
gcaucaugguaacccaaua

SEQ ID NO: 2275819 - RNA, 19 nt, Artificial Sequence
  Description of Artificial Sequence: Synthetic oligonucleotide
  Antisense strand to SEQ ID NO: 2275818
uauuggguuaccaugaugc

SEQ ID NO: 2275820 - RNA, 19 nt, Artificial Sequence
  Description of Artificial Sequence: Synthetic oligonucleotide
  Sense strand starting at position 518 of SEQ ID NO: 1884573
auuaacaacgucugaguua

SEQ ID NO: 2275821 - RNA, 19 nt, Artificial Sequence
  Description of Artificial Sequence: Synthetic oligonucleotide
  Antisense strand to SEQ ID NO: 2275820
uaacucagacguuguuaau

SEQ ID NO: 2275822 - RNA, 19 nt, Artificial Sequence
  Description of Artificial Sequence: Synthetic oligonucleotide
  Sense strand starting at position 521 of SEQ ID NO: 1884573
aacaacgucugaguuacaa

SEQ ID NO: 2275823 - RNA, 19 nt, Artificial Sequence
  Description of Artificial Sequence: Synthetic oligonucleotide
  Antisense strand to SEQ ID NO: 2275822
uuguaacucagacguuguu

SEQ ID NO: 2275824 - RNA, 19 nt, Artificial Sequence
  Description of Artificial Sequence: Synthetic oligonucleotide
  Sense strand starting at position 556 of SEQ ID NO: 1884573
gguuaauuaucaugaccua

SEQ ID NO: 2275825 - RNA, 19 nt, Artificial Sequence
  Description of Artificial Sequence: Synthetic oligonucleotide
  Antisense strand to SEQ ID NO: 2275824
uaggucaugauaauuaacc

SEQ ID NO: 2275826 - RNA, 19 nt, Artificial Sequence
  Description of Artificial Sequence: Synthetic oligonucleotide
  Sense strand starting at position 607 of SEQ ID NO: 1884573
accugcaccugugcuaaau

SEQ ID NO: 2275827 - RNA, 19 nt, Artificial Sequence
  Description of Artificial Sequence: Synthetic oligonucleotide
  Antisense strand to SEQ ID NO: 2275826
auuuagcacaggugcaggu

SEQ ID NO: 2275828 - RNA, 19 nt, Artificial Sequence
  Description of Artificial Sequence: Synthetic oligonucleotide
  Sense strand starting at position 683 of SEQ ID NO: 1884573
gagccuuccuggucuugua

SEQ ID NO: 2275829 - RNA, 19 nt, Artificial Sequence
  Description of Artificial Sequence: Synthetic oligonucleotide
  Antisense strand to SEQ ID NO: 2275828
uacaagaccaggaaggcuc

SEQ ID NO: 2275830 - RNA, 19 nt, Artificial Sequence
  Description of Artificial Sequence: Synthetic oligonucleotide
  Sense strand starting at position 686 of SEQ ID NO: 1884573
ccuuccuggucuuguacaa

SEQ ID NO: 2275831 - RNA, 19 nt, Artificial Sequence
  Description of Artificial Sequence: Synthetic oligonucleotide
  Antisense strand to SEQ ID NO: 2275830
uuguacaagaccaggaagg

SEQ ID NO: 2275832 - RNA, 19 nt, Artificial Sequence
  Description of Artificial Sequence: Synthetic oligonucleotide
  Sense strand starting at position 752 of SEQ ID NO: 1884573
cuauuagugcaaugcuugu

SEQ ID NO: 2275833 - RNA, 19 nt, Artificial Sequence
  Description of Artificial Sequence: Synthetic oligonucleotide
  Antisense strand to SEQ ID NO: 2275832
acaagcauugcacuaauag

SEQ ID NO: 2275834 - RNA, 19 nt, Artificial Sequence
  Description of Artificial Sequence: Synthetic oligonucleotide
  Sense strand starting at position 756 of SEQ ID NO: 1884573
uagugcaaugcuuguaauu

SEQ ID NO: 2275835 - RNA, 19 nt, Artificial Sequence
  Description of Artificial Sequence: Synthetic oligonucleotide
  Antisense strand to SEQ ID NO: 2275834
aauuacaagcauugcacua

SEQ ID NO: 2275836 - RNA, 19 nt, Artificial Sequence
  Description of Artificial Sequence: Synthetic oligonucleotide
  Sense strand starting at position 903 of SEQ ID NO: 1884573
gaugaacggcuuuggaaau

SEQ ID NO: 2275837 - RNA, 19 nt, Artificial Sequence
  Description of Artificial Sequence: Synthetic oligonucleotide
  Antisense strand to SEQ ID NO: 2275836
auuuccaaagccguucauc

SEQ ID NO: 2275838 - RNA, 19 nt, Artificial Sequence
  Description of Artificial Sequence: Synthetic oligonucleotide
  Sense strand starting at position 915 of SEQ ID NO: 1884573
uggaaaugacagggugagu

SEQ ID NO: 2275839 - RNA, 19 nt, Artificial Sequence
  Description of Artificial Sequence: Synthetic oligonucleotide
  Antisense strand to SEQ ID NO: 2275838
acucacccugucauuucca

SEQ ID NO: 2275840 - RNA, 19 nt, Artificial Sequence
  Description of Artificial Sequence: Synthetic oligonucleotide
  Sense strand starting at position 1194 of SEQ ID NO: 1884573
acuuuacucgguuguggaa

SEQ ID NO: 2275841 - RNA, 19 nt, Artificial Sequence
  Description of Artificial Sequence: Synthetic oligonucleotide
  Antisense strand to SEQ ID NO: 2275840
uuccacaaccgaguaaagu

SEQ ID NO: 2275842 - RNA, 19 nt, Artificial Sequence
  Description of Artificial Sequence: Synthetic oligonucleotide
  Sense strand starting at position 1201 of SEQ ID NO: 1884573
ucgguuguggaacaaugaa

SEQ ID NO: 2275843 - RNA, 19 nt, Artificial Sequence
  Description of Artificial Sequence: Synthetic oligonucleotide
  Antisense strand to SEQ ID NO: 2275842
uucauuguuccacaaccga

SEQ ID NO: 2275844 - RNA, 19 nt, Artificial Sequence
  Description of Artificial Sequence: Synthetic oligonucleotide
  Sense strand starting at position 1407 of SEQ ID NO: 1884573
cccuguauuuguucucaga

SEQ ID NO: 2275845 - RNA, 19 nt, Artificial Sequence
  Description of Artificial Sequence: Synthetic oligonucleotide
  Antisense strand to SEQ ID NO: 2275844
ucugagaacaaauacaggg

SEQ ID NO: 2275846 - RNA, 19 nt, Artificial Sequence
  Description of Artificial Sequence: Synthetic oligonucleotide
  Sense strand starting at position 1410 of SEQ ID NO: 1884573
uguauuuguucucagagcu

SEQ ID NO: 2275847 - RNA, 19 nt, Artificial Sequence
  Description of Artificial Sequence: Synthetic oligonucleotide
  Antisense strand to SEQ ID NO: 2275846
agcucugagaacaaauaca

SEQ ID NO: 2275848 - RNA, 19 nt, Artificial Sequence
  Description of Artificial Sequence: Synthetic oligonucleotide
  Sense strand starting at position 1426 of SEQ ID NO: 1884573
gcucucaaauggucaaaug

SEQ ID NO: 2275849 - RNA, 19 nt, Artificial Sequence
  Description of Artificial Sequence: Synthetic oligonucleotide
  Antisense strand to SEQ ID NO: 2275848
cauuugaccauuugagagc

SEQ ID NO: 2275850 - RNA, 19 nt, Artificial Sequence
  Description of Artificial Sequence: Synthetic oligonucleotide
  Sense strand starting at position 1437 of SEQ ID NO: 1884573
gucaaaugagcuugcucaa

SEQ ID NO: 2275851 - RNA, 19 nt, Artificial Sequence
  Description of Artificial Sequence: Synthetic oligonucleotide
  Antisense strand to SEQ ID NO: 2275850
uugagcaagcucauuugac

SEQ ID NO: 2275852 - RNA, 19 nt, Artificial Sequence
  Description of Artificial Sequence: Synthetic oligonucleotide
  Sense strand starting at position 1483 of SEQ ID NO: 1884573
guuccugucuuuguuggaa

SEQ ID NO: 2275853 - RNA, 19 nt, Artificial Sequence
  Description of Artificial Sequence: Synthetic oligonucleotide
  Antisense strand to SEQ ID NO: 2275852
uuccaacaaagacaggaac

SEQ ID NO: 2275854 - RNA, 19 nt, Artificial Sequence
  Description of Artificial Sequence: Synthetic oligonucleotide
  Sense strand starting at position 1485 of SEQ ID NO: 1884573
uccugucuuuguuggaaua

SEQ ID NO: 2275855 - RNA, 19 nt, Artificial Sequence
  Description of Artificial Sequence: Synthetic oligonucleotide
  Antisense strand to SEQ ID NO: 2275854
uauuccaacaaagacagga

SEQ ID NO: 2275856 - RNA, 19 nt, Artificial Sequence
  Description of Artificial Sequence: Synthetic oligonucleotide
  Sense strand starting at position 1525 of SEQ ID NO: 1884573
cuggcuguacuugaaacuu

SEQ ID NO: 2275857 - RNA, 19 nt, Artificial Sequence
  Description of Artificial Sequence: Synthetic oligonucleotide
  Antisense strand to SEQ ID NO: 2275856
aaguuucaaguacagccag

SEQ ID NO: 2275858 - RNA, 19 nt, Artificial Sequence
  Description of Artificial Sequence: Synthetic oligonucleotide
  Sense strand starting at position 1571 of SEQ ID NO: 1884573
uccugauuaucagccagaa

SEQ ID NO: 2275859 - RNA, 19 nt, Artificial Sequence
  Description of Artificial Sequence: Synthetic oligonucleotide
  Antisense strand to SEQ ID NO: 2275858
uucuggcugauaaucagga

SEQ ID NO: 2275860 - RNA, 19 nt, Artificial Sequence
  Description of Artificial Sequence: Synthetic oligonucleotide
  Sense strand starting at position 1591 of SEQ ID NO: 1884573
gcugcuuuauuugcaacua

SEQ ID NO: 2275861 - RNA, 19 nt, Artificial Sequence
  Description of Artificial Sequence: Synthetic oligonucleotide
  Antisense strand to SEQ ID NO: 2275860
uaguugcaaauaaagcagc

SEQ ID NO: 2275862 - RNA, 19 nt, Artificial Sequence
  Description of Artificial Sequence: Synthetic oligonucleotide
  Sense strand starting at position 1913 of SEQ ID NO: 1884573
uagguugggucucugcaaa

SEQ ID NO: 2275863 - RNA, 19 nt, Artificial Sequence
  Description of Artificial Sequence: Synthetic oligonucleotide
  Antisense strand to SEQ ID NO: 2275862
uuugcagagacccaaccua

SEQ ID NO: 2275864 - RNA, 19 nt, Artificial Sequence
  Description of Artificial Sequence: Synthetic oligonucleotide
  Sense strand starting at position 1965 of SEQ ID NO: 1884573
gaacgaauguucugccucu

SEQ ID NO: 2275865 - RNA, 19 nt, Artificial Sequence
  Description of Artificial Sequence: Synthetic oligonucleotide
  Antisense strand to SEQ ID NO: 2275864
agaggcagaacauucguuc

SEQ ID NO: 2275866 - RNA, 19 nt, Artificial Sequence
  Description of Artificial Sequence: Synthetic oligonucleotide
  Sense strand starting at position 2130 of SEQ ID NO: 1884573
aucgcaaaucuauauagua

SEQ ID NO: 2275867 - RNA, 19 nt, Artificial Sequence
  Description of Artificial Sequence: Synthetic oligonucleotide
  Antisense strand to SEQ ID NO: 2275866
uacuauauagauuugcgau

SEQ ID NO: 2275868 - RNA, 19 nt, Artificial Sequence
  Description of Artificial Sequence: Synthetic oligonucleotide
  Sense strand starting at position 2151 of SEQ ID NO: 1884573
acaaauuagucaggguaug

SEQ ID NO: 2275869 - RNA, 19 nt, Artificial Sequence
  Description of Artificial Sequence: Synthetic oligonucleotide
  Antisense strand to SEQ ID NO: 2275868
cauacccugacuaauuugu

SEQ ID NO: 2275870 - RNA, 19 nt, Artificial Sequence
  Description of Artificial Sequence: Synthetic oligonucleotide
  Sense strand starting at position 2152 of SEQ ID NO: 1884573
caaauuagucaggguauga

SEQ ID NO: 2275871 - RNA, 19 nt, Artificial Sequence
  Description of Artificial Sequence: Synthetic oligonucleotide
  Antisense strand to SEQ ID NO: 2275870
ucauacccugacuaauuug

SEQ ID NO: 2275872 - RNA, 19 nt, Artificial Sequence
  Description of Artificial Sequence: Synthetic oligonucleotide
  Sense strand starting at position 2284 of SEQ ID NO: 1884573
gacccugauccuggccaua

SEQ ID NO: 2275873 - RNA, 19 nt, Artificial Sequence
  Description of Artificial Sequence: Synthetic oligonucleotide
  Antisense strand to SEQ ID NO: 2275872
uauggccaggaucaggguc

SEQ ID NO: 2275874 - RNA, 19 nt, Artificial Sequence
  Description of Artificial Sequence: Synthetic oligonucleotide
  Sense strand starting at position 2412 of SEQ ID NO: 1884573
agcgguugguauugggaaa

SEQ ID NO: 2275875 - RNA, 19 nt, Artificial Sequence
  Description of Artificial Sequence: Synthetic oligonucleotide
  Antisense strand to SEQ ID NO: 2275874
uuucccaauaccaaccgcu

SEQ ID NO: 2275876 - RNA, 19 nt, Artificial Sequence
  Description of Artificial Sequence: Synthetic oligonucleotide
  Sense strand starting at position 2517 of SEQ ID NO: 1884573
cagcaagaguccuugcucu

SEQ ID NO: 2275877 - RNA, 19 nt, Artificial Sequence
  Description of Artificial Sequence: Synthetic oligonucleotide
  Antisense strand to SEQ ID NO: 2275876
agagcaaggacucuugcug

SEQ ID NO: 2275878 - RNA, 19 nt, Artificial Sequence
  Description of Artificial Sequence: Synthetic oligonucleotide
  Sense strand starting at position 3382 of SEQ ID NO: 1884573
cuugaacucgcaugcucaa

SEQ ID NO: 2275879 - RNA, 19 nt, Artificial Sequence
  Description of Artificial Sequence: Synthetic oligonucleotide
  Antisense strand to SEQ ID NO: 2275878
uugagcaugcgaguucaag

SEQ ID NO: 2275880 - RNA, 19 nt, Artificial Sequence
  Description of Artificial Sequence: Synthetic oligonucleotide
  Sense strand starting at position 3432 of SEQ ID NO: 1884573
ugggauuacccgugagcca

SEQ ID NO: 2275881 - RNA, 19 nt, Artificial Sequence
  Description of Artificial Sequence: Synthetic oligonucleotide
  Antisense strand to SEQ ID NO: 2275880
uggcucacggguaauccca

SEQ ID NO: 2275882 - RNA, 19 nt, Artificial Sequence
  Description of Artificial Sequence: Synthetic oligonucleotide
  Sense strand starting at position 3510 of SEQ ID NO: 1884573
gauggaugcuuggguccau

SEQ ID NO: 2275883 - RNA, 19 nt, Artificial Sequence
  Description of Artificial Sequence: Synthetic oligonucleotide
  Antisense strand to SEQ ID NO: 2275882
auggacccaagcauccauc

SEQ ID NO: 2275884 - RNA, 19 nt, Artificial Sequence
  Description of Artificial Sequence: Synthetic oligonucleotide
  Sense strand starting at position 3544 of SEQ ID NO: 1884573
aggaguaauaauugucuug

SEQ ID NO: 2275885 - RNA, 19 nt, Artificial Sequence
  Description of Artificial Sequence: Synthetic oligonucleotide
  Antisense strand to SEQ ID NO: 2275884
caagacaauuauuacuccu

SEQ ID NO: 2275886 - RNA, 19 nt, Artificial Sequence
  Description of Artificial Sequence: Synthetic oligonucleotide
  Sense strand starting at position 3546 of SEQ ID NO: 1884573
gaguaauaauugucuugcu

SEQ ID NO: 2275887 - RNA, 19 nt, Artificial Sequence
  Description of Artificial Sequence: Synthetic oligonucleotide
  Antisense strand to SEQ ID NO: 2275886
agcaagacaauuauuacuc

SEQ ID NO: 2275888 - RNA, 19 nt, Artificial Sequence
  Description of Artificial Sequence: Synthetic oligonucleotide
  Sense strand starting at position 3930 of SEQ ID NO: 1884573
gagggcuaucgaggacuuu

SEQ ID NO: 2275889 - RNA, 19 nt, Artificial Sequence
  Description of Artificial Sequence: Synthetic oligonucleotide
  Antisense strand to SEQ ID NO: 2275888
aaaguccucgauagcccuc

SEQ ID NO: 2275890 - RNA, 19 nt, Artificial Sequence
  Description of Artificial Sequence: Synthetic oligonucleotide
  Sense strand starting at position 150 of SEQ ID NO: 1884574
cuggcuucccacugugaca

SEQ ID NO: 2275891 - RNA, 19 nt, Artificial Sequence
  Description of Artificial Sequence: Synthetic oligonucleotide
  Antisense strand to SEQ ID NO: 2275890
ugucacagugggaagccag

SEQ ID NO: 2275892 - RNA, 19 nt, Artificial Sequence
  Description of Artificial Sequence: Synthetic oligonucleotide
  Sense strand starting at position 630 of SEQ ID NO: 1884574
gagcaagguccuuaaagcu

SEQ ID NO: 2275893 - RNA, 19 nt, Artificial Sequence
  Description of Artificial Sequence: Synthetic oligonucleotide
  Antisense strand to SEQ ID NO: 2275892
agcuuuaaggaccuugcuc

SEQ ID NO: 2275894 - RNA, 19 nt, Artificial Sequence
  Description of Artificial Sequence: Synthetic oligonucleotide
  Sense strand starting at position 706 of SEQ ID NO: 1884574
caagauuacuggguauaac

SEQ ID NO: 2275895 - RNA, 19 nt, Artificial Sequence
  Description of Artificial Sequence: Synthetic oligonucleotide
  Antisense strand to SEQ ID NO: 2275894
guuauacccaguaaucuug

SEQ ID NO: 2275896 - RNA, 19 nt, Artificial Sequence
  Description of Artificial Sequence: Synthetic oligonucleotide
  Sense strand starting at position 835 of SEQ ID NO: 1884574
acuggaaaggucgguacuu

SEQ ID NO: 2275897 - RNA, 19 nt, Artificial Sequence
  Description of Artificial Sequence: Synthetic oligonucleotide
  Antisense strand to SEQ ID NO: 2275896
aaguaccgaccuuuccagu

SEQ ID NO: 2275898 - RNA, 19 nt, Artificial Sequence
  Description of Artificial Sequence: Synthetic oligonucleotide
  Sense strand starting at position 836 of SEQ ID NO: 1884574
cuggaaaggucgguacuua

SEQ ID NO: 2275899 - RNA, 19 nt, Artificial Sequence
  Description of Artificial Sequence: Synthetic oligonucleotide
  Antisense strand to SEQ ID NO: 2275898
uaaguaccgaccuuuccag

SEQ ID NO: 2275900 - RNA, 19 nt, Artificial Sequence
  Description of Artificial Sequence: Synthetic oligonucleotide
  Sense strand starting at position 837 of SEQ ID NO: 1884574
uggaaaggucgguacuuag

SEQ ID NO: 2275901 - RNA, 19 nt, Artificial Sequence
  Description of Artificial Sequence: Synthetic oligonucleotide
  Antisense strand to SEQ ID NO: 2275900
cuaaguaccgaccuuucca

SEQ ID NO: 2275902 - RNA, 19 nt, Artificial Sequence
  Description of Artificial Sequence: Synthetic oligonucleotide
  Sense strand starting at position 848 of SEQ ID NO: 1884574
guacuuagaugcccaguga

SEQ ID NO: 2275903 - RNA, 19 nt, Artificial Sequence
  Description of Artificial Sequence: Synthetic oligonucleotide
  Antisense strand to SEQ ID NO: 2275902
ucacugggcaucuaaguac

SEQ ID NO: 2275904 - RNA, 19 nt, Artificial Sequence
  Description of Artificial Sequence: Synthetic oligonucleotide
  Sense strand starting at position 849 of SEQ ID NO: 1884574
uacuuagaugcccagugaa

SEQ ID NO: 2275905 - RNA, 19 nt, Artificial Sequence
  Description of Artificial Sequence: Synthetic oligonucleotide
  Antisense strand to SEQ ID NO: 2275904
uucacugggcaucuaagua

SEQ ID NO: 2275906 - RNA, 19 nt, Artificial Sequence
  Description of Artificial Sequence: Synthetic oligonucleotide
  Sense strand starting at position 1029 of SEQ ID NO: 1884574
guuccuuugaagcagguau

SEQ ID NO: 2275907 - RNA, 19 nt, Artificial Sequence
  Description of Artificial Sequence: Synthetic oligonucleotide
  Antisense strand to SEQ ID NO: 2275906
auaccugcuucaaaggaac

SEQ ID NO: 2275908 - RNA, 19 nt, Artificial Sequence
  Description of Artificial Sequence: Synthetic oligonucleotide
  Sense strand starting at position 1064 of SEQ ID NO: 1884574
gggugaagucccugccaug

SEQ ID NO: 2275909 - RNA, 19 nt, Artificial Sequence
  Description of Artificial Sequence: Synthetic oligonucleotide
  Antisense strand to SEQ ID NO: 2275908
cauggcagggacuucaccc

SEQ ID NO: 2275910 - RNA, 19 nt, Artificial Sequence
  Description of Artificial Sequence: Synthetic oligonucleotide
  Sense strand starting at position 1078 of SEQ ID NO: 1884574
ccaugcuaccucugaaagu

SEQ ID NO: 2275911 - RNA, 19 nt, Artificial Sequence
  Description of Artificial Sequence: Synthetic oligonucleotide
  Antisense strand to SEQ ID NO: 2275910
acuuucagagguagcaugg

SEQ ID NO: 2275912 - RNA, 19 nt, Artificial Sequence
  Description of Artificial Sequence: Synthetic oligonucleotide
  Sense strand starting at position 1108 of SEQ ID NO: 1884574
gcuucuauuuccucuugga

SEQ ID NO: 2275913 - RNA, 19 nt, Artificial Sequence
  Description of Artificial Sequence: Synthetic oligonucleotide
  Antisense strand to SEQ ID NO: 2275912
uccaagaggaaauagaagc

SEQ ID NO: 2275914 - RNA, 19 nt, Artificial Sequence
  Description of Artificial Sequence: Synthetic oligonucleotide
  Sense strand starting at position 1387 of SEQ ID NO: 1884574
ccaaucuuagaauggagua

SEQ ID NO: 2275915 - RNA, 19 nt, Artificial Sequence
  Description of Artificial Sequence: Synthetic oligonucleotide
  Antisense strand to SEQ ID NO: 2275914
uacuccauucuaagauugg

SEQ ID NO: 2275916 - RNA, 19 nt, Artificial Sequence
  Description of Artificial Sequence: Synthetic oligonucleotide
  Sense strand starting at position 1920 of SEQ ID NO: 1884574
caagaagaggucuguagga

SEQ ID NO: 2275917 - RNA, 19 nt, Artificial Sequence
  Description of Artificial Sequence: Synthetic oligonucleotide
  Antisense strand to SEQ ID NO: 2275916
uccuacagaccucuucuug

SEQ ID NO: 2275918 - RNA, 19 nt, Artificial Sequence
  Description of Artificial Sequence: Synthetic oligonucleotide
  Sense strand starting at position 2238 of SEQ ID NO: 1884574
gugagaaagcgugauaguu

SEQ ID NO: 2275919 - RNA, 19 nt, Artificial Sequence
  Description of Artificial Sequence: Synthetic oligonucleotide
  Antisense strand to SEQ ID NO: 2275918
aacuaucacgcuuucucac

SEQ ID NO: 2275920 - RNA, 19 nt, Artificial Sequence
  Description of Artificial Sequence: Synthetic oligonucleotide
  Sense strand starting at position 2251 of SEQ ID NO: 1884574
auaguuuauauccgaggca

SEQ ID NO: 2275921 - RNA, 19 nt, Artificial Sequence
  Description of Artificial Sequence: Synthetic oligonucleotide
  Antisense strand to SEQ ID NO: 2275920
ugccucggauauaaacuau

SEQ ID NO: 2275922 - RNA, 19 nt, Artificial Sequence
  Description of Artificial Sequence: Synthetic oligonucleotide
  Sense strand starting at position 2254 of SEQ ID NO: 1884574
guuuauauccgaggcacac

SEQ ID NO: 2275923 - RNA, 19 nt, Artificial Sequence
  Description of Artificial Sequence: Synthetic oligonucleotide
  Antisense strand to SEQ ID NO: 2275922
gugugccucggauauaaac

SEQ ID NO: 2275924 - RNA, 19 nt, Artificial Sequence
  Description of Artificial Sequence: Synthetic oligonucleotide
  Sense strand starting at position 2289 of SEQ ID NO: 1884574
gugaguugagagcaacuga

SEQ ID NO: 2275925 - RNA, 19 nt, Artificial Sequence
  Description of Artificial Sequence: Synthetic oligonucleotide
  Antisense strand to SEQ ID NO: 2275924
ucaguugcucucaacucac

SEQ ID NO: 2275926 - RNA, 19 nt, Artificial Sequence
  Description of Artificial Sequence: Synthetic oligonucleotide
  Sense strand starting at position 2382 of SEQ ID NO: 1884574
cccauuaccuaauuguagu

SEQ ID NO: 2275927 - RNA, 19 nt, Artificial Sequence
  Description of Artificial Sequence: Synthetic oligonucleotide
  Antisense strand to SEQ ID NO: 2275926
acuacaauuagguaauggg

SEQ ID NO: 2275928 - RNA, 19 nt, Artificial Sequence
  Description of Artificial Sequence: Synthetic oligonucleotide
  Sense strand starting at position 2553 of SEQ ID NO: 1884574
ggaggugaggcucauccua

SEQ ID NO: 2275929 - RNA, 19 nt, Artificial Sequence
  Description of Artificial Sequence: Synthetic oligonucleotide
  Antisense strand to SEQ ID NO: 2275928
uaggaugagccucaccucc

SEQ ID NO: 2275930 - RNA, 19 nt, Artificial Sequence
  Description of Artificial Sequence: Synthetic oligonucleotide
  Sense strand starting at position 2824 of SEQ ID NO: 1884574
ucagguuaaugucucuaga

SEQ ID NO: 2275931 - RNA, 19 nt, Artificial Sequence
  Description of Artificial Sequence: Synthetic oligonucleotide
  Antisense strand to SEQ ID NO: 2275930
ucuagagacauuaaccuga

SEQ ID NO: 2275932 - RNA, 19 nt, Artificial Sequence
  Description of Artificial Sequence: Synthetic oligonucleotide
  Sense strand starting at position 2826 of SEQ ID NO: 1884574
agguuaaugucucuagaua

SEQ ID NO: 2275933 - RNA, 19 nt, Artificial Sequence
  Description of Artificial Sequence: Synthetic oligonucleotide
  Antisense strand to SEQ ID NO: 2275932
uaucuagagacauuaaccu

SEQ ID NO: 2275934 - RNA, 19 nt, Artificial Sequence
  Description of Artificial Sequence: Synthetic oligonucleotide
  Sense strand starting at position 2827 of SEQ ID NO: 1884574
gguuaaugucucuagauac

SEQ ID NO: 2275935 - RNA, 19 nt, Artificial Sequence
  Description of Artificial Sequence: Synthetic oligonucleotide
  Antisense strand to SEQ ID NO: 2275934
guaucuagagacauuaacc

SEQ ID NO: 2275936 - RNA, 19 nt, Artificial Sequence
  Description of Artificial Sequence: Synthetic oligonucleotide
  Sense strand starting at position 2839 of SEQ ID NO: 1884574
uagauacagucucuuggua

SEQ ID NO: 2275937 - RNA, 19 nt, Artificial Sequence
  Description of Artificial Sequence: Synthetic oligonucleotide
  Antisense strand to SEQ ID NO: 2275936
uaccaagagacuguaucua

SEQ ID NO: 2275938 - RNA, 19 nt, Artificial Sequence
  Description of Artificial Sequence: Synthetic oligonucleotide
  Sense strand starting at position 2856 of SEQ ID NO: 1884574
uaggguguuagugauaacu

SEQ ID NO: 2275939 - RNA, 19 nt, Artificial Sequence
  Description of Artificial Sequence: Synthetic oligonucleotide
  Antisense strand to SEQ ID NO: 2275938
aguuaucacuaacacccua

SEQ ID NO: 2275940 - RNA, 19 nt, Artificial Sequence
  Description of Artificial Sequence: Synthetic oligonucleotide
  Sense strand starting at position 2884 of SEQ ID NO: 1884574
uccugcauuccaggaaguu

SEQ ID NO: 2275941 - RNA, 19 nt, Artificial Sequence
  Description of Artificial Sequence: Synthetic oligonucleotide
  Antisense strand to SEQ ID NO: 2275940
aacuuccuggaaugcagga

SEQ ID NO: 2275942 - RNA, 19 nt, Artificial Sequence
  Description of Artificial Sequence: Synthetic oligonucleotide
  Sense strand starting at position 2897 of SEQ ID NO: 1884574
gaaguuauuugugcaccgu

SEQ ID NO: 2275943 - RNA, 19 nt, Artificial Sequence
  Description of Artificial Sequence: Synthetic oligonucleotide
  Antisense strand to SEQ ID NO: 2275942
acggugcacaaauaacuuc

SEQ ID NO: 2275944 - RNA, 19 nt, Artificial Sequence
  Description of Artificial Sequence: Synthetic oligonucleotide
  Sense strand starting at position 2901 of SEQ ID NO: 1884574
uuauuugugcaccgucaau

SEQ ID NO: 2275945 - RNA, 19 nt, Artificial Sequence
  Description of Artificial Sequence: Synthetic oligonucleotide
  Antisense strand to SEQ ID NO: 2275944
auugacggugcacaaauaa

SEQ ID NO: 2275946 - RNA, 19 nt, Artificial Sequence
  Description of Artificial Sequence: Synthetic oligonucleotide
  Sense strand starting at position 2934 of SEQ ID NO: 1884574
cagggauauugauggagag

SEQ ID NO: 2275947 - RNA, 19 nt, Artificial Sequence
  Description of Artificial Sequence: Synthetic oligonucleotide
  Antisense strand to SEQ ID NO: 2275946
cucuccaucaauaucccug

SEQ ID NO: 2275948 - RNA, 19 nt, Artificial Sequence
  Description of Artificial Sequence: Synthetic oligonucleotide
  Sense strand starting at position 3043 of SEQ ID NO: 1884574
aaguuauggucucugugca

SEQ ID NO: 2275949 - RNA, 19 nt, Artificial Sequence
  Description of Artificial Sequence: Synthetic oligonucleotide
  Antisense strand to SEQ ID NO: 2275948
ugcacagagaccauaacuu

SEQ ID NO: 2275950 - RNA, 19 nt, Artificial Sequence
  Description of Artificial Sequence: Synthetic oligonucleotide
  Sense strand starting at position 3047 of SEQ ID NO: 1884574
uauggucucugugcagaaa

SEQ ID NO: 2275951 - RNA, 19 nt, Artificial Sequence
  Description of Artificial Sequence: Synthetic oligonucleotide
  Antisense strand to SEQ ID NO: 2275950
uuucugcacagagaccaua

SEQ ID NO: 2275952 - RNA, 19 nt, Artificial Sequence
  Description of Artificial Sequence: Synthetic oligonucleotide
  Sense strand starting at position 3417 of SEQ ID NO: 1884574
gauggagauucgcucguca

SEQ ID NO: 2275953 - RNA, 19 nt, Artificial Sequence
  Description of Artificial Sequence: Synthetic oligonucleotide
  Antisense strand to SEQ ID NO: 2275952
ugacgagcgaaucuccauc

SEQ ID NO: 2275954 - RNA, 19 nt, Artificial Sequence
  Description of Artificial Sequence: Synthetic oligonucleotide
  Sense strand starting at position 3421 of SEQ ID NO: 1884574
gagauucgcucgucaccca

SEQ ID NO: 2275955 - RNA, 19 nt, Artificial Sequence
  Description of Artificial Sequence: Synthetic oligonucleotide
  Antisense strand to SEQ ID NO: 2275954
ugggugacgagcgaaucuc

SEQ ID NO: 2275956 - RNA, 19 nt, Artificial Sequence
  Description of Artificial Sequence: Synthetic oligonucleotide
  Sense strand starting at position 3800 of SEQ ID NO: 1884574
cgauguaaauuauuggcuu

SEQ ID NO: 2275957 - RNA, 19 nt, Artificial Sequence
  Description of Artificial Sequence: Synthetic oligonucleotide
  Antisense strand to SEQ ID NO: 2275956
aagccaauaauuuacaucg

SEQ ID NO: 2275958 - RNA, 19 nt, Artificial Sequence
  Description of Artificial Sequence: Synthetic oligonucleotide
  Sense strand starting at position 3803 of SEQ ID NO: 1884574
uguaaauuauuggcuucua

SEQ ID NO: 2275959 - RNA, 19 nt, Artificial Sequence
  Description of Artificial Sequence: Synthetic oligonucleotide
  Antisense strand to SEQ ID NO: 2275958
uagaagccaauaauuuaca

SEQ ID NO: 2275960 - RNA, 19 nt, Artificial Sequence
  Description of Artificial Sequence: Synthetic oligonucleotide
  Sense strand starting at position 3804 of SEQ ID NO: 1884574
guaaauuauuggcuucuac

SEQ ID NO: 2275961 - RNA, 19 nt, Artificial Sequence
  Description of Artificial Sequence: Synthetic oligonucleotide
  Antisense strand to SEQ ID NO: 2275960
guagaagccaauaauuuac

SEQ ID NO: 2275962 - RNA, 19 nt, Artificial Sequence
  Description of Artificial Sequence: Synthetic oligonucleotide
  Sense strand starting at position 3814 of SEQ ID NO: 1884574
ggcuucuaccuuuacguca

SEQ ID NO: 2275963 - RNA, 19 nt, Artificial Sequence
  Description of Artificial Sequence: Synthetic oligonucleotide
  Antisense strand to SEQ ID NO: 2275962
ugacguaaagguagaagcc

SEQ ID NO: 2275964 - RNA, 19 nt, Artificial Sequence
  Description of Artificial Sequence: Synthetic oligonucleotide
  Sense strand starting at position 3925 of SEQ ID NO: 1884574
cgacaaagcucagcacaaa

SEQ ID NO: 2275965 - RNA, 19 nt, Artificial Sequence
  Description of Artificial Sequence: Synthetic oligonucleotide
  Antisense strand to SEQ ID NO: 2275964
uuugugcugagcuuugucg

SEQ ID NO: 2275966 - RNA, 19 nt, Artificial Sequence
  Description of Artificial Sequence: Synthetic oligonucleotide
  Sense strand starting at position 3939 of SEQ ID NO: 1884574
acaaauggcuucugauuua

SEQ ID NO: 2275967 - RNA, 19 nt, Artificial Sequence
  Description of Artificial Sequence: Synthetic oligonucleotide
  Antisense strand to SEQ ID NO: 2275966
uaaaucagaagccauuugu

SEQ ID NO: 2275968 - RNA, 19 nt, Artificial Sequence
  Description of Artificial Sequence: Synthetic oligonucleotide
  Sense strand starting at position 3979 of SEQ ID NO: 1884574
acugacuucuguuucggaa

SEQ ID NO: 2275969 - RNA, 19 nt, Artificial Sequence
  Description of Artificial Sequence: Synthetic oligonucleotide
  Antisense strand to SEQ ID NO: 2275968
uuccgaaacagaagucagu

SEQ ID NO: 2275970 - RNA, 19 nt, Artificial Sequence
  Description of Artificial Sequence: Synthetic oligonucleotide
  Sense strand starting at position 162 of SEQ ID NO: 1884575
gccaguucuugcccuggga

SEQ ID NO: 2275971 - RNA, 19 nt, Artificial Sequence
  Description of Artificial Sequence: Synthetic oligonucleotide
  Antisense strand to SEQ ID NO: 2275970
ucccagggcaagaacuggc

SEQ ID NO: 2275972 - RNA, 19 nt, Artificial Sequence
  Description of Artificial Sequence: Synthetic oligonucleotide
  Sense strand starting at position 164 of SEQ ID NO: 1884575
caguucuugcccugggaag

SEQ ID NO: 2275973 - RNA, 19 nt, Artificial Sequence
  Description of Artificial Sequence: Synthetic oligonucleotide
  Antisense strand to SEQ ID NO: 2275972
cuucccagggcaagaacug

SEQ ID NO: 2275974 - RNA, 19 nt, Artificial Sequence
  Description of Artificial Sequence: Synthetic oligonucleotide
  Sense strand starting at position 165 of SEQ ID NO: 1884575
aguucuugcccugggaaga

SEQ ID NO: 2275975 - RNA, 19 nt, Artificial Sequence
  Description of Artificial Sequence: Synthetic oligonucleotide
  Antisense strand to SEQ ID NO: 2275974
ucuucccagggcaagaacu

SEQ ID NO: 2275976 - RNA, 19 nt, Artificial Sequence
  Description of Artificial Sequence: Synthetic oligonucleotide
  Sense strand starting at position 553 of SEQ ID NO: 1884575
ugccgaucggccgugagaa

SEQ ID NO: 2275977 - RNA, 19 nt, Artificial Sequence
  Description of Artificial Sequence: Synthetic oligonucleotide
  Antisense strand to SEQ ID NO: 2275976
uucucacggccgaucggca

SEQ ID NO: 2275978 - RNA, 19 nt, Artificial Sequence
  Description of Artificial Sequence: Synthetic oligonucleotide
  Sense strand starting at position 650 of SEQ ID NO: 1884575
cagguagacgugugacaca

SEQ ID NO: 2275979 - RNA, 19 nt, Artificial Sequence
  Description of Artificial Sequence: Synthetic oligonucleotide
  Antisense strand to SEQ ID NO: 2275978
ugugucacacgucuaccug

SEQ ID NO: 2275980 - RNA, 19 nt, Artificial Sequence
  Description of Artificial Sequence: Synthetic oligonucleotide
  Sense strand starting at position 653 of SEQ ID NO: 1884575
guagacgugugacacagau

SEQ ID NO: 2275981 - RNA, 19 nt, Artificial Sequence
  Description of Artificial Sequence: Synthetic oligonucleotide
  Antisense strand to SEQ ID NO: 2275980
aucugugucacacgucuac

SEQ ID NO: 2275982 - RNA, 19 nt, Artificial Sequence
  Description of Artificial Sequence: Synthetic oligonucleotide
  Sense strand starting at position 659 of SEQ ID NO: 1884575
gugugacacagauguucga

SEQ ID NO: 2275983 - RNA, 19 nt, Artificial Sequence
  Description of Artificial Sequence: Synthetic oligonucleotide
  Antisense strand to SEQ ID NO: 2275982
ucgaacaucugugucacac

SEQ ID NO: 2275984 - RNA, 19 nt, Artificial Sequence
  Description of Artificial Sequence: Synthetic oligonucleotide
  Sense strand starting at position 663 of SEQ ID NO: 1884575
gacacagauguucgaucca

SEQ ID NO: 2275985 - RNA, 19 nt, Artificial Sequence
  Description of Artificial Sequence: Synthetic oligonucleotide
  Antisense strand to SEQ ID NO: 2275984
uggaucgaacaucuguguc

SEQ ID NO: 2275986 - RNA, 19 nt, Artificial Sequence
  Description of Artificial Sequence: Synthetic oligonucleotide
  Sense strand starting at position 941 of SEQ ID NO: 1884575
aggcuaaucucucauugcu

SEQ ID NO: 2275987 - RNA, 19 nt, Artificial Sequence
  Description of Artificial Sequence: Synthetic oligonucleotide
  Antisense strand to SEQ ID NO: 2275986
agcaaugagagauuagccu

SEQ ID NO: 2275988 - RNA, 19 nt, Artificial Sequence
  Description of Artificial Sequence: Synthetic oligonucleotide
  Sense strand starting at position 949 of SEQ ID NO: 1884575
cucucauugcuggacucaa

SEQ ID NO: 2275989 - RNA, 19 nt, Artificial Sequence
  Description of Artificial Sequence: Synthetic oligonucleotide
  Antisense strand to SEQ ID NO: 2275988
uugaguccagcaaugagag

SEQ ID NO: 2275990 - RNA, 19 nt, Artificial Sequence
  Description of Artificial Sequence: Synthetic oligonucleotide
  Sense strand starting at position 1001 of SEQ ID NO: 1884575
ggauuacaggcguaaccua

SEQ ID NO: 2275991 - RNA, 19 nt, Artificial Sequence
  Description of Artificial Sequence: Synthetic oligonucleotide
  Antisense strand to SEQ ID NO: 2275990
uagguuacgccuguaaucc

SEQ ID NO: 2275992 - RNA, 19 nt, Artificial Sequence
  Description of Artificial Sequence: Synthetic oligonucleotide
  Sense strand starting at position 1067 of SEQ ID NO: 1884575
guugcuaucacccgagucu

SEQ ID NO: 2275993 - RNA, 19 nt, Artificial Sequence
  Description of Artificial Sequence: Synthetic oligonucleotide
  Antisense strand to SEQ ID NO: 2275992
agacucgggugauagcaac

SEQ ID NO: 2275994 - RNA, 19 nt, Artificial Sequence
  Description of Artificial Sequence: Synthetic oligonucleotide
  Sense strand starting at position 1068 of SEQ ID NO: 1884575
uugcuaucacccgagucua

SEQ ID NO: 2275995 - RNA, 19 nt, Artificial Sequence
  Description of Artificial Sequence: Synthetic oligonucleotide
  Antisense strand to SEQ ID NO: 2275994
uagacucgggugauagcaa

SEQ ID NO: 2275996 - RNA, 19 nt, Artificial Sequence
  Description of Artificial Sequence: Synthetic oligonucleotide
  Sense strand starting at position 1080 of SEQ ID NO: 1884575
gagucuaugccugaguggu

SEQ ID NO: 2275997 - RNA, 19 nt, Artificial Sequence
  Description of Artificial Sequence: Synthetic oligonucleotide
  Antisense strand to SEQ ID NO: 2275996
accacucaggcauagacuc

SEQ ID NO: 2275998 - RNA, 19 nt, Artificial Sequence
  Description of Artificial Sequence: Synthetic oligonucleotide
  Sense strand starting at position 1088 of SEQ ID NO: 1884575
gccugaguggucuguccaa

SEQ ID NO: 2275999 - RNA, 19 nt, Artificial Sequence
  Description of Artificial Sequence: Synthetic oligonucleotide
  Antisense strand to SEQ ID NO: 2275998
uuggacagaccacucaggc

SEQ ID NO: 2276000 - RNA, 19 nt, Artificial Sequence
  Description of Artificial Sequence: Synthetic oligonucleotide
  Sense strand starting at position 1145 of SEQ ID NO: 1884575
uccuaagaccugggugagu

SEQ ID NO: 2276001 - RNA, 19 nt, Artificial Sequence
  Description of Artificial Sequence: Synthetic oligonucleotide
  Antisense strand to SEQ ID NO: 2276000
acucacccaggucuuagga

SEQ ID NO: 2276002 - RNA, 19 nt, Artificial Sequence
  Description of Artificial Sequence: Synthetic oligonucleotide
  Sense strand starting at position 1915 of SEQ ID NO: 1884575
gcaggacucuccgagagcu

SEQ ID NO: 2276003 - RNA, 19 nt, Artificial Sequence
  Description of Artificial Sequence: Synthetic oligonucleotide
  Antisense strand to SEQ ID NO: 2276002
agcucucggagaguccugc

SEQ ID NO: 2276004 - RNA, 19 nt, Artificial Sequence
  Description of Artificial Sequence: Synthetic oligonucleotide
  Sense strand starting at position 2108 of SEQ ID NO: 1884575
gcagaucgccugugcucau

SEQ ID NO: 2276005 - RNA, 19 nt, Artificial Sequence
  Description of Artificial Sequence: Synthetic oligonucleotide
  Antisense strand to SEQ ID NO: 2276004
augagcacaggcgaucugc

SEQ ID NO: 2276006 - RNA, 19 nt, Artificial Sequence
  Description of Artificial Sequence: Synthetic oligonucleotide
  Sense strand starting at position 2177 of SEQ ID NO: 1884575
gcacguguaccacauuguu

SEQ ID NO: 2276007 - RNA, 19 nt, Artificial Sequence
  Description of Artificial Sequence: Synthetic oligonucleotide
  Antisense strand to SEQ ID NO: 2276006
aacaaugugguacacgugc

SEQ ID NO: 2276008 - RNA, 19 nt, Artificial Sequence
  Description of Artificial Sequence: Synthetic oligonucleotide
  Sense strand starting at position 2513 of SEQ ID NO: 1884575
gcagguuaucuccaucuua

SEQ ID NO: 2276009 - RNA, 19 nt, Artificial Sequence
  Description of Artificial Sequence: Synthetic oligonucleotide
  Antisense strand to SEQ ID NO: 2276008
uaagauggagauaaccugc

SEQ ID NO: 2276010 - RNA, 19 nt, Artificial Sequence
  Description of Artificial Sequence: Synthetic oligonucleotide
  Sense strand starting at position 2901 of SEQ ID NO: 1884575
agacauaaucugcagcaga

SEQ ID NO: 2276011 - RNA, 19 nt, Artificial Sequence
  Description of Artificial Sequence: Synthetic oligonucleotide
  Antisense strand to SEQ ID NO: 2276010
ucugcugcagauuaugucu

SEQ ID NO: 2276012 - RNA, 19 nt, Artificial Sequence
  Description of Artificial Sequence: Synthetic oligonucleotide
  Sense strand starting at position 2977 of SEQ ID NO: 1884575
gaaggauccgguugaucca

SEQ ID NO: 2276013 - RNA, 19 nt, Artificial Sequence
  Description of Artificial Sequence: Synthetic oligonucleotide
  Antisense strand to SEQ ID NO: 2276012
uggaucaaccggauccuuc

SEQ ID NO: 2276014 - RNA, 19 nt, Artificial Sequence
  Description of Artificial Sequence: Synthetic oligonucleotide
  Sense strand starting at position 2986 of SEQ ID NO: 1884575
gguugauccagguguaguc

SEQ ID NO: 2276015 - RNA, 19 nt, Artificial Sequence
  Description of Artificial Sequence: Synthetic oligonucleotide
  Antisense strand to SEQ ID NO: 2276014
gacuacaccuggaucaacc

SEQ ID NO: 2276016 - RNA, 19 nt, Artificial Sequence
  Description of Artificial Sequence: Synthetic oligonucleotide
  Sense strand starting at position 3183 of SEQ ID NO: 1884575
aggcggagucaucgaggau

SEQ ID NO: 2276017 - RNA, 19 nt, Artificial Sequence
  Description of Artificial Sequence: Synthetic oligonucleotide
  Antisense strand to SEQ ID NO: 2276016
auccucgaugacuccgccu

SEQ ID NO: 2276018 - RNA, 19 nt, Artificial Sequence
  Description of Artificial Sequence: Synthetic oligonucleotide
  Sense strand starting at position 3184 of SEQ ID NO: 1884575
ggcggagucaucgaggaug

SEQ ID NO: 2276019 - RNA, 19 nt, Artificial Sequence
  Description of Artificial Sequence: Synthetic oligonucleotide
  Antisense strand to SEQ ID NO: 2276018
cauccucgaugacuccgcc

SEQ ID NO: 2276020 - RNA, 19 nt, Artificial Sequence
  Description of Artificial Sequence: Synthetic oligonucleotide
  Sense strand starting at position 3186 of SEQ ID NO: 1884575
cggagucaucgaggaugaa

SEQ ID NO: 2276021 - RNA, 19 nt, Artificial Sequence
  Description of Artificial Sequence: Synthetic oligonucleotide
  Antisense strand to SEQ ID NO: 2276020
uucauccucgaugacuccg

SEQ ID NO: 2276022 - RNA, 19 nt, Artificial Sequence
  Description of Artificial Sequence: Synthetic oligonucleotide
  Sense strand starting at position 3432 of SEQ ID NO: 1884575
ucaugacaguccugggaag

SEQ ID NO: 2276023 - RNA, 19 nt, Artificial Sequence
  Description of Artificial Sequence: Synthetic oligonucleotide
  Antisense strand to SEQ ID NO: 2276022
cuucccaggacugucauga

SEQ ID NO: 2276024 - RNA, 19 nt, Artificial Sequence
  Description of Artificial Sequence: Synthetic oligonucleotide
  Sense strand starting at position 325 of SEQ ID NO: 1884576
uccagaguccucgagacaa

SEQ ID NO: 2276025 - RNA, 19 nt, Artificial Sequence
  Description of Artificial Sequence: Synthetic oligonucleotide
  Antisense strand to SEQ ID NO: 2276024
uugucucgaggacucugga

SEQ ID NO: 2276026 - RNA, 19 nt, Artificial Sequence
  Description of Artificial Sequence: Synthetic oligonucleotide
  Sense strand starting at position 337 of SEQ ID NO: 1884576
gagacaaauugcuguaaca

SEQ ID NO: 2276027 - RNA, 19 nt, Artificial Sequence
  Description of Artificial Sequence: Synthetic oligonucleotide
  Antisense strand to SEQ ID NO: 2276026
uguuacagcaauuugucuc

SEQ ID NO: 2276028 - RNA, 19 nt, Artificial Sequence
  Description of Artificial Sequence: Synthetic oligonucleotide
  Sense strand starting at position 339 of SEQ ID NO: 1884576
gacaaauugcuguaacagu

SEQ ID NO: 2276029 - RNA, 19 nt, Artificial Sequence
  Description of Artificial Sequence: Synthetic oligonucleotide
  Antisense strand to SEQ ID NO: 2276028
acuguuacagcaauuuguc

SEQ ID NO: 2276030 - RNA, 19 nt, Artificial Sequence
  Description of Artificial Sequence: Synthetic oligonucleotide
  Sense strand starting at position 910 of SEQ ID NO: 1884576
uuccgauggugucuuugau

SEQ ID NO: 2276031 - RNA, 19 nt, Artificial Sequence
  Description of Artificial Sequence: Synthetic oligonucleotide
  Antisense strand to SEQ ID NO: 2276030
aucaaagacaccaucggaa

SEQ ID NO: 2276032 - RNA, 19 nt, Artificial Sequence
  Description of Artificial Sequence: Synthetic oligonucleotide
  Sense strand starting at position 1050 of SEQ ID NO: 1884576
agagccgauuccugaguca

SEQ ID NO: 2276033 - RNA, 19 nt, Artificial Sequence
  Description of Artificial Sequence: Synthetic oligonucleotide
  Antisense strand to SEQ ID NO: 2276032
ugacucaggaaucggcucu

SEQ ID NO: 2276034 - RNA, 19 nt, Artificial Sequence
  Description of Artificial Sequence: Synthetic oligonucleotide
  Sense strand starting at position 1053 of SEQ ID NO: 1884576
gccgauuccugagucaggu

SEQ ID NO: 2276035 - RNA, 19 nt, Artificial Sequence
  Description of Artificial Sequence: Synthetic oligonucleotide
  Antisense strand to SEQ ID NO: 2276034
accugacucaggaaucggc

SEQ ID NO: 2276036 - RNA, 19 nt, Artificial Sequence
  Description of Artificial Sequence: Synthetic oligonucleotide
  Sense strand starting at position 1080 of SEQ ID NO: 1884576
gguuguaaagugcagcaua

SEQ ID NO: 2276037 - RNA, 19 nt, Artificial Sequence
  Description of Artificial Sequence: Synthetic oligonucleotide
  Antisense strand to SEQ ID NO: 2276036
uaugcugcacuuuacaacc

SEQ ID NO: 2276038 - RNA, 19 nt, Artificial Sequence
  Description of Artificial Sequence: Synthetic oligonucleotide
  Sense strand starting at position 1352 of SEQ ID NO: 1884576
uaagguguucuguagaaga

SEQ ID NO: 2276039 - RNA, 19 nt, Artificial Sequence
  Description of Artificial Sequence: Synthetic oligonucleotide
  Antisense strand to SEQ ID NO: 2276038
ucuucuacagaacaccuua

SEQ ID NO: 2276040 - RNA, 19 nt, Artificial Sequence
  Description of Artificial Sequence: Synthetic oligonucleotide
  Sense strand starting at position 1354 of SEQ ID NO: 1884576
agguguucuguagaagaca

SEQ ID NO: 2276041 - RNA, 19 nt, Artificial Sequence
  Description of Artificial Sequence: Synthetic oligonucleotide
  Antisense strand to SEQ ID NO: 2276040
ugucuucuacagaacaccu

SEQ ID NO: 2276042 - RNA, 19 nt, Artificial Sequence
  Description of Artificial Sequence: Synthetic oligonucleotide
  Sense strand starting at position 1618 of SEQ ID NO: 1884576
gggagaacguguugguugu

SEQ ID NO: 2276043 - RNA, 19 nt, Artificial Sequence
  Description of Artificial Sequence: Synthetic oligonucleotide
  Antisense strand to SEQ ID NO: 2276042
acaaccaacacguucuccc

SEQ ID NO: 2276044 - RNA, 19 nt, Artificial Sequence
  Description of Artificial Sequence: Synthetic oligonucleotide
  Sense strand starting at position 2165 of SEQ ID NO: 1884576
ccggcauaggccugagaaa

SEQ ID NO: 2276045 - RNA, 19 nt, Artificial Sequence
  Description of Artificial Sequence: Synthetic oligonucleotide
  Antisense strand to SEQ ID NO: 2276044
uuucucaggccuaugccgg

SEQ ID NO: 2276046 - RNA, 19 nt, Artificial Sequence
  Description of Artificial Sequence: Synthetic oligonucleotide
  Sense strand starting at position 2200 of SEQ ID NO: 1884576
cccugugccugcuacuaaa

SEQ ID NO: 2276047 - RNA, 19 nt, Artificial Sequence
  Description of Artificial Sequence: Synthetic oligonucleotide
  Antisense strand to SEQ ID NO: 2276046
uuuaguagcaggcacaggg

SEQ ID NO: 2276048 - RNA, 19 nt, Artificial Sequence
  Description of Artificial Sequence: Synthetic oligonucleotide
  Sense strand starting at position 2217 of SEQ ID NO: 1884576
aaugaauugcgguggguga

SEQ ID NO: 2276049 - RNA, 19 nt, Artificial Sequence
  Description of Artificial Sequence: Synthetic oligonucleotide
  Antisense strand to SEQ ID NO: 2276048
ucacccaccgcaauucauu

SEQ ID NO: 2276050 - RNA, 19 nt, Artificial Sequence
  Description of Artificial Sequence: Synthetic oligonucleotide
  Sense strand starting at position 2270 of SEQ ID NO: 1884576
cugccaugucccugucuga

SEQ ID NO: 2276051 - RNA, 19 nt, Artificial Sequence
  Description of Artificial Sequence: Synthetic oligonucleotide
  Antisense strand to SEQ ID NO: 2276050
ucagacagggacauggcag

SEQ ID NO: 2276052 - RNA, 19 nt, Artificial Sequence
  Description of Artificial Sequence: Synthetic oligonucleotide
  Sense strand starting at position 2419 of SEQ ID NO: 1884576
ccgagaagaugucaccuuu

SEQ ID NO: 2276053 - RNA, 19 nt, Artificial Sequence
  Description of Artificial Sequence: Synthetic oligonucleotide
  Antisense strand to SEQ ID NO: 2276052
aaaggugacaucuucucgg

SEQ ID NO: 2276054 - RNA, 19 nt, Artificial Sequence
  Description of Artificial Sequence: Synthetic oligonucleotide
  Sense strand starting at position 2425 of SEQ ID NO: 1884576
agaugucaccuuugcuaac

SEQ ID NO: 2276055 - RNA, 19 nt, Artificial Sequence
  Description of Artificial Sequence: Synthetic oligonucleotide
  Antisense strand to SEQ ID NO: 2276054
guuagcaaaggugacaucu

SEQ ID NO: 2276056 - RNA, 19 nt, Artificial Sequence
  Description of Artificial Sequence: Synthetic oligonucleotide
  Sense strand starting at position 2857 of SEQ ID NO: 1884576
cgucaucacuccugccaga

SEQ ID NO: 2276057 - RNA, 19 nt, Artificial Sequence
  Description of Artificial Sequence: Synthetic oligonucleotide
  Antisense strand to SEQ ID NO: 2276056
ucuggcaggagugaugacg

SEQ ID NO: 2276058 - RNA, 19 nt, Artificial Sequence
  Description of Artificial Sequence: Synthetic oligonucleotide
  Sense strand starting at position 3564 of SEQ ID NO: 1884576
gcgguuuccgcaggacaga

SEQ ID NO: 2276059 - RNA, 19 nt, Artificial Sequence
  Description of Artificial Sequence: Synthetic oligonucleotide
  Antisense strand to SEQ ID NO: 2276058
ucuguccugcggaaaccgc

SEQ ID NO: 2276060 - RNA, 19 nt, Artificial Sequence
  Description of Artificial Sequence: Synthetic oligonucleotide
  Sense strand starting at position 3621 of SEQ ID NO: 1884576
ccacuuuccugucugaaga

SEQ ID NO: 2276061 - RNA, 19 nt, Artificial Sequence
  Description of Artificial Sequence: Synthetic oligonucleotide
  Antisense strand to SEQ ID NO: 2276060
ucuucagacaggaaagugg

SEQ ID NO: 2276062 - RNA, 19 nt, Artificial Sequence
  Description of Artificial Sequence: Synthetic oligonucleotide
  Sense strand starting at position 3861 of SEQ ID NO: 1884576
ucaagucucgagugucaaa

SEQ ID NO: 2276063 - RNA, 19 nt, Artificial Sequence
  Description of Artificial Sequence: Synthetic oligonucleotide
  Antisense strand to SEQ ID NO: 2276062
uuugacacucgagacuuga

SEQ ID NO: 2276064 - RNA, 19 nt, Artificial Sequence
  Description of Artificial Sequence: Synthetic oligonucleotide
  Sense strand starting at position 257 of SEQ ID NO: 1884577
uagguugcccaaggguaaa

SEQ ID NO: 2276065 - RNA, 19 nt, Artificial Sequence
  Description of Artificial Sequence: Synthetic oligonucleotide
  Antisense strand to SEQ ID NO: 2276064
uuuacccuugggcaaccua

SEQ ID NO: 2276066 - RNA, 19 nt, Artificial Sequence
  Description of Artificial Sequence: Synthetic oligonucleotide
  Sense strand starting at position 808 of SEQ ID NO: 1884577
gccugaaugugugagccau

SEQ ID NO: 2276067 - RNA, 19 nt, Artificial Sequence
  Description of Artificial Sequence: Synthetic oligonucleotide
  Antisense strand to SEQ ID NO: 2276066
auggcucacacauucaggc

SEQ ID NO: 2276068 - RNA, 19 nt, Artificial Sequence
  Description of Artificial Sequence: Synthetic oligonucleotide
  Sense strand starting at position 812 of SEQ ID NO: 1884577
gaaugugugagccaucaug

SEQ ID NO: 2276069 - RNA, 19 nt, Artificial Sequence
  Description of Artificial Sequence: Synthetic oligonucleotide
  Antisense strand to SEQ ID NO: 2276068
caugauggcucacacauuc

SEQ ID NO: 2276070 - RNA, 19 nt, Artificial Sequence
  Description of Artificial Sequence: Synthetic oligonucleotide
  Sense strand starting at position 880 of SEQ ID NO: 1884577
gggugaugacuuggccaag

SEQ ID NO: 2276071 - RNA, 19 nt, Artificial Sequence
  Description of Artificial Sequence: Synthetic oligonucleotide
  Antisense strand to SEQ ID NO: 2276070
cuuggccaagucaucaccc

SEQ ID NO: 2276072 - RNA, 19 nt, Artificial Sequence
  Description of Artificial Sequence: Synthetic oligonucleotide
  Sense strand starting at position 1078 of SEQ ID NO: 1884577
agguuuacccaaugggacu

SEQ ID NO: 2276073 - RNA, 19 nt, Artificial Sequence
  Description of Artificial Sequence: Synthetic oligonucleotide
  Antisense strand to SEQ ID NO: 2276072
agucccauuggguaaaccu

SEQ ID NO: 2276074 - RNA, 19 nt, Artificial Sequence
  Description of Artificial Sequence: Synthetic oligonucleotide
  Sense strand starting at position 1250 of SEQ ID NO: 1884577
acgugcuugccaugguaau

SEQ ID NO: 2276075 - RNA, 19 nt, Artificial Sequence
  Description of Artificial Sequence: Synthetic oligonucleotide
  Antisense strand to SEQ ID NO: 2276074
auuaccauggcaagcacgu

SEQ ID NO: 2276076 - RNA, 19 nt, Artificial Sequence
  Description of Artificial Sequence: Synthetic oligonucleotide
  Sense strand starting at position 1251 of SEQ ID NO: 1884577
cgugcuugccaugguaauc

SEQ ID NO: 2276077 - RNA, 19 nt, Artificial Sequence
  Description of Artificial Sequence: Synthetic oligonucleotide
  Antisense strand to SEQ ID NO: 2276076
gauuaccauggcaagcacg

SEQ ID NO: 2276078 - RNA, 19 nt, Artificial Sequence
  Description of Artificial Sequence: Synthetic oligonucleotide
  Sense strand starting at position 1691 of SEQ ID NO: 1884577
ccaccagacuagugaagaa

SEQ ID NO: 2276079 - RNA, 19 nt, Artificial Sequence
  Description of Artificial Sequence: Synthetic oligonucleotide
  Antisense strand to SEQ ID NO: 2276078
uucuucacuagucuggugg

SEQ ID NO: 2276080 - RNA, 19 nt, Artificial Sequence
  Description of Artificial Sequence: Synthetic oligonucleotide
  Sense strand starting at position 1937 of SEQ ID NO: 1884577
gggugaguucuggacaccu

SEQ ID NO: 2276081 - RNA, 19 nt, Artificial Sequence
  Description of Artificial Sequence: Synthetic oligonucleotide
  Antisense strand to SEQ ID NO: 2276080
agguguccagaacucaccc

SEQ ID NO: 2276082 - RNA, 19 nt, Artificial Sequence
  Description of Artificial Sequence: Synthetic oligonucleotide
  Sense strand starting at position 2089 of SEQ ID NO: 1884577
ggguguuugugugggaaug

SEQ ID NO: 2276083 - RNA, 19 nt, Artificial Sequence
  Description of Artificial Sequence: Synthetic oligonucleotide
  Antisense strand to SEQ ID NO: 2276082
cauucccacacaaacaccc

SEQ ID NO: 2276084 - RNA, 19 nt, Artificial Sequence
  Description of Artificial Sequence: Synthetic oligonucleotide
  Sense strand starting at position 2098 of SEQ ID NO: 1884577
ugugggaaugcguguaugu

SEQ ID NO: 2276085 - RNA, 19 nt, Artificial Sequence
  Description of Artificial Sequence: Synthetic oligonucleotide
  Antisense strand to SEQ ID NO: 2276084
acauacacgcauucccaca

SEQ ID NO: 2276086 - RNA, 19 nt, Artificial Sequence
  Description of Artificial Sequence: Synthetic oligonucleotide
  Sense strand starting at position 2100 of SEQ ID NO: 1884577
ugggaaugcguguaugugu

SEQ ID NO: 2276087 - RNA, 19 nt, Artificial Sequence
  Description of Artificial Sequence: Synthetic oligonucleotide
  Antisense strand to SEQ ID NO: 2276086
acacauacacgcauuccca

SEQ ID NO: 2276088 - RNA, 19 nt, Artificial Sequence
  Description of Artificial Sequence: Synthetic oligonucleotide
  Sense strand starting at position 2187 of SEQ ID NO: 1884577
ggucgcucauaccauguua

SEQ ID NO: 2276089 - RNA, 19 nt, Artificial Sequence
  Description of Artificial Sequence: Synthetic oligonucleotide
  Antisense strand to SEQ ID NO: 2276088
uaacaugguaugagcgacc

SEQ ID NO: 2276090 - RNA, 19 nt, Artificial Sequence
  Description of Artificial Sequence: Synthetic oligonucleotide
  Sense strand starting at position 2189 of SEQ ID NO: 1884577
ucgcucauaccauguuaga

SEQ ID NO: 2276091 - RNA, 19 nt, Artificial Sequence
  Description of Artificial Sequence: Synthetic oligonucleotide
  Antisense strand to SEQ ID NO: 2276090
ucuaacaugguaugagcga

SEQ ID NO: 2276092 - RNA, 19 nt, Artificial Sequence
  Description of Artificial Sequence: Synthetic oligonucleotide
  Sense strand starting at position 2228 of SEQ ID NO: 1884577
gcucacucguguguaggua

SEQ ID NO: 2276093 - RNA, 19 nt, Artificial Sequence
  Description of Artificial Sequence: Synthetic oligonucleotide
  Antisense strand to SEQ ID NO: 2276092
uaccuacacacgagugagc

SEQ ID NO: 2276094 - RNA, 19 nt, Artificial Sequence
  Description of Artificial Sequence: Synthetic oligonucleotide
  Sense strand starting at position 2243 of SEQ ID NO: 1884577
gguacaggaacuuguugau

SEQ ID NO: 2276095 - RNA, 19 nt, Artificial Sequence
  Description of Artificial Sequence: Synthetic oligonucleotide
  Antisense strand to SEQ ID NO: 2276094
aucaacaaguuccuguacc

SEQ ID NO: 2276096 - RNA, 19 nt, Artificial Sequence
  Description of Artificial Sequence: Synthetic oligonucleotide
  Sense strand starting at position 2249 of SEQ ID NO: 1884577
ggaacuuguugaucuggga

SEQ ID NO: 2276097 - RNA, 19 nt, Artificial Sequence
  Description of Artificial Sequence: Synthetic oligonucleotide
  Antisense strand to SEQ ID NO: 2276096
ucccagaucaacaaguucc

SEQ ID NO: 2276098 - RNA, 19 nt, Artificial Sequence
  Description of Artificial Sequence: Synthetic oligonucleotide
  Sense strand starting at position 2252 of SEQ ID NO: 1884577
acuuguugaucugggagga

SEQ ID NO: 2276099 - RNA, 19 nt, Artificial Sequence
  Description of Artificial Sequence: Synthetic oligonucleotide
  Antisense strand to SEQ ID NO: 2276098
uccucccagaucaacaagu

SEQ ID NO: 2276100 - RNA, 19 nt, Artificial Sequence
  Description of Artificial Sequence: Synthetic oligonucleotide
  Sense strand starting at position 2893 of SEQ ID NO: 1884577
ucaggacuuugcucucgua

SEQ ID NO: 2276101 - RNA, 19 nt, Artificial Sequence
  Description of Artificial Sequence: Synthetic oligonucleotide
  Antisense strand to SEQ ID NO: 2276100
uacgagagcaaaguccuga

SEQ ID NO: 2276102 - RNA, 19 nt, Artificial Sequence
  Description of Artificial Sequence: Synthetic oligonucleotide
  Sense strand starting at position 3324 of SEQ ID NO: 1884577
ggguucgucucuuguaaga

SEQ ID NO: 2276103 - RNA, 19 nt, Artificial Sequence
  Description of Artificial Sequence: Synthetic oligonucleotide
  Antisense strand to SEQ ID NO: 2276102
ucuuacaagagacgaaccc

SEQ ID NO: 2276104 - RNA, 19 nt, Artificial Sequence
  Description of Artificial Sequence: Synthetic oligonucleotide
  Sense strand starting at position 3326 of SEQ ID NO: 1884577
guucgucucuuguaagacu

SEQ ID NO: 2276105 - RNA, 19 nt, Artificial Sequence
  Description of Artificial Sequence: Synthetic oligonucleotide
  Antisense strand to SEQ ID NO: 2276104
agucuuacaagagacgaac

SEQ ID NO: 2276106 - RNA, 19 nt, Artificial Sequence
  Description of Artificial Sequence: Synthetic oligonucleotide
  Sense strand starting at position 3329 of SEQ ID NO: 1884577
cgucucuuguaagacucaa

SEQ ID NO: 2276107 - RNA, 19 nt, Artificial Sequence
  Description of Artificial Sequence: Synthetic oligonucleotide
  Antisense strand to SEQ ID NO: 2276106
uugagucuuacaagagacg

SEQ ID NO: 2276108 - RNA, 19 nt, Artificial Sequence
  Description of Artificial Sequence: Synthetic oligonucleotide
  Sense strand starting at position 3381 of SEQ ID NO: 1884577
cucugcugcuccuggaaau

SEQ ID NO: 2276109 - RNA, 19 nt, Artificial Sequence
  Description of Artificial Sequence: Synthetic oligonucleotide
  Antisense strand to SEQ ID NO: 2276108
auuuccaggagcagcagag

SEQ ID NO: 2276110 - RNA, 19 nt, Artificial Sequence
  Description of Artificial Sequence: Synthetic oligonucleotide
  Sense strand starting at position 3392 of SEQ ID NO: 1884577
cuggaaaugucaggaugcu

SEQ ID NO: 2276111 - RNA, 19 nt, Artificial Sequence
  Description of Artificial Sequence: Synthetic oligonucleotide
  Antisense strand to SEQ ID NO: 2276110
agcauccugacauuuccag

SEQ ID NO: 2276112 - RNA, 19 nt, Artificial Sequence
  Description of Artificial Sequence: Synthetic oligonucleotide
  Sense strand starting at position 3393 of SEQ ID NO: 1884577
uggaaaugucaggaugcuu

SEQ ID NO: 2276113 - RNA, 19 nt, Artificial Sequence
  Description of Artificial Sequence: Synthetic oligonucleotide
  Antisense strand to SEQ ID NO: 2276112
aagcauccugacauuucca

SEQ ID NO: 2276114 - RNA, 19 nt, Artificial Sequence
  Description of Artificial Sequence: Synthetic oligonucleotide
  Sense strand starting at position 3968 of SEQ ID NO: 1884577
ugcauuagucauugcuaca

SEQ ID NO: 2276115 - RNA, 19 nt, Artificial Sequence
  Description of Artificial Sequence: Synthetic oligonucleotide
  Antisense strand to SEQ ID NO: 2276114
uguagcaaugacuaaugca

SEQ ID NO: 2276116 - RNA, 19 nt, Artificial Sequence
  Description of Artificial Sequence: Synthetic oligonucleotide
  Sense strand starting at position 3973 of SEQ ID NO: 1884577
uagucauugcuacacguga

SEQ ID NO: 2276117 - RNA, 19 nt, Artificial Sequence
  Description of Artificial Sequence: Synthetic oligonucleotide
  Antisense strand to SEQ ID NO: 2276116
ucacguguagcaaugacua

SEQ ID NO: 2276118 - RNA, 19 nt, Artificial Sequence
  Description of Artificial Sequence: Synthetic oligonucleotide
  Sense strand starting at position 3975 of SEQ ID NO: 1884577
gucauugcuacacgugaca

SEQ ID NO: 2276119 - RNA, 19 nt, Artificial Sequence
  Description of Artificial Sequence: Synthetic oligonucleotide
  Antisense strand to SEQ ID NO: 2276118
ugucacguguagcaaugac

SEQ ID NO: 2276120 - RNA, 19 nt, Artificial Sequence
  Description of Artificial Sequence: Synthetic oligonucleotide
  Sense strand starting at position 115 of SEQ ID NO: 1884578
gggcuucucagaggcuaaa

SEQ ID NO: 2276121 - RNA, 19 nt, Artificial Sequence
  Description of Artificial Sequence: Synthetic oligonucleotide
  Antisense strand to SEQ ID NO: 2276120
uuuagccucugagaagccc

SEQ ID NO: 2276122 - RNA, 19 nt, Artificial Sequence
  Description of Artificial Sequence: Synthetic oligonucleotide
  Sense strand starting at position 693 of SEQ ID NO: 1884578
cagucuccucaguggaguu

SEQ ID NO: 2276123 - RNA, 19 nt, Artificial Sequence
  Description of Artificial Sequence: Synthetic oligonucleotide
  Antisense strand to SEQ ID NO: 2276122
aacuccacugaggagacug

SEQ ID NO: 2276124 - RNA, 19 nt, Artificial Sequence
  Description of Artificial Sequence: Synthetic oligonucleotide
  Sense strand starting at position 803 of SEQ ID NO: 1884578
cuuggugagccuugcagaa

SEQ ID NO: 2276125 - RNA, 19 nt, Artificial Sequence
  Description of Artificial Sequence: Synthetic oligonucleotide
  Antisense strand to SEQ ID NO: 2276124
uucugcaaggcucaccaag

SEQ ID NO: 2276126 - RNA, 19 nt, Artificial Sequence
  Description of Artificial Sequence: Synthetic oligonucleotide
  Sense strand starting at position 1102 of SEQ ID NO: 1884578
aggcauuauguacauguca

SEQ ID NO: 2276127 - RNA, 19 nt, Artificial Sequence
  Description of Artificial Sequence: Synthetic oligonucleotide
  Antisense strand to SEQ ID NO: 2276126
ugacauguacauaaugccu

SEQ ID NO: 2276128 - RNA, 19 nt, Artificial Sequence
  Description of Artificial Sequence: Synthetic oligonucleotide
  Sense strand starting at position 1245 of SEQ ID NO: 1884578
ugauuauagguguguaucu

SEQ ID NO: 2276129 - RNA, 19 nt, Artificial Sequence
  Description of Artificial Sequence: Synthetic oligonucleotide
  Antisense strand to SEQ ID NO: 2276128
agauacacaccuauaauca

SEQ ID NO: 2276130 - RNA, 19 nt, Artificial Sequence
  Description of Artificial Sequence: Synthetic oligonucleotide
  Sense strand starting at position 1264 of SEQ ID NO: 1884578
ggcaguacacaucacuuau

SEQ ID NO: 2276131 - RNA, 19 nt, Artificial Sequence
  Description of Artificial Sequence: Synthetic oligonucleotide
  Antisense strand to SEQ ID NO: 2276130
auaagugauguguacugcc

SEQ ID NO: 2276132 - RNA, 19 nt, Artificial Sequence
  Description of Artificial Sequence: Synthetic oligonucleotide
  Sense strand starting at position 1359 of SEQ ID NO: 1884578
ccaggauggcuccaaguga

SEQ ID NO: 2276133 - RNA, 19 nt, Artificial Sequence
  Description of Artificial Sequence: Synthetic oligonucleotide
  Antisense strand to SEQ ID NO: 2276132
ucacuuggagccauccugg

SEQ ID NO: 2276134 - RNA, 19 nt, Artificial Sequence
  Description of Artificial Sequence: Synthetic oligonucleotide
  Sense strand starting at position 1421 of SEQ ID NO: 1884578
aucuaagugucaccacauc

SEQ ID NO: 2276135 - RNA, 19 nt, Artificial Sequence
  Description of Artificial Sequence: Synthetic oligonucleotide
  Antisense strand to SEQ ID NO: 2276134
gauguggugacacuuagau

SEQ ID NO: 2276136 - RNA, 19 nt, Artificial Sequence
  Description of Artificial Sequence: Synthetic oligonucleotide
  Sense strand starting at position 1526 of SEQ ID NO: 1884578
ucagcucucgaauaaacau

SEQ ID NO: 2276137 - RNA, 19 nt, Artificial Sequence
  Description of Artificial Sequence: Synthetic oligonucleotide
  Antisense strand to SEQ ID NO: 2276136
auguuuauucgagagcuga

SEQ ID NO: 2276138 - RNA, 19 nt, Artificial Sequence
  Description of Artificial Sequence: Synthetic oligonucleotide
  Sense strand starting at position 1569 of SEQ ID NO: 1884578
cuuucuggagugggaaaua

SEQ ID NO: 2276139 - RNA, 19 nt, Artificial Sequence
  Description of Artificial Sequence: Synthetic oligonucleotide
  Antisense strand to SEQ ID NO: 2276138
uauuucccacuccagaaag

SEQ ID NO: 2276140 - RNA, 19 nt, Artificial Sequence
  Description of Artificial Sequence: Synthetic oligonucleotide
  Sense strand starting at position 1647 of SEQ ID NO: 1884578
ccugaauuggcagguguca

SEQ ID NO: 2276141 - RNA, 19 nt, Artificial Sequence
  Description of Artificial Sequence: Synthetic oligonucleotide
  Antisense strand to SEQ ID NO: 2276140
ugacaccugccaauucagg

SEQ ID NO: 2276142 - RNA, 19 nt, Artificial Sequence
  Description of Artificial Sequence: Synthetic oligonucleotide
  Sense strand starting at position 1649 of SEQ ID NO: 1884578
ugaauuggcaggugucaaa

SEQ ID NO: 2276143 - RNA, 19 nt, Artificial Sequence
  Description of Artificial Sequence: Synthetic oligonucleotide
  Antisense strand to SEQ ID NO: 2276142
uuugacaccugccaauuca

SEQ ID NO: 2276144 - RNA, 19 nt, Artificial Sequence
  Description of Artificial Sequence: Synthetic oligonucleotide
  Sense strand starting at position 1767 of SEQ ID NO: 1884578
cggugagguacugguugau

SEQ ID NO: 2276145 - RNA, 19 nt, Artificial Sequence
  Description of Artificial Sequence: Synthetic oligonucleotide
  Antisense strand to SEQ ID NO: 2276144
aucaaccaguaccucaccg

SEQ ID NO: 2276146 - RNA, 19 nt, Artificial Sequence
  Description of Artificial Sequence: Synthetic oligonucleotide
  Sense strand starting at position 2004 of SEQ ID NO: 1884578
cagagaguggcccagcuua

SEQ ID NO: 2276147 - RNA, 19 nt, Artificial Sequence
  Description of Artificial Sequence: Synthetic oligonucleotide
  Antisense strand to SEQ ID NO: 2276146
uaagcugggccacucucug

SEQ ID NO: 2276148 - RNA, 19 nt, Artificial Sequence
  Description of Artificial Sequence: Synthetic oligonucleotide
  Sense strand starting at position 2209 of SEQ ID NO: 1884578
gaacgaagucagugagugu

SEQ ID NO: 2276149 - RNA, 19 nt, Artificial Sequence
  Description of Artificial Sequence: Synthetic oligonucleotide
  Antisense strand to SEQ ID NO: 2276148
acacucacugacuucguuc

SEQ ID NO: 2276150 - RNA, 19 nt, Artificial Sequence
  Description of Artificial Sequence: Synthetic oligonucleotide
  Sense strand starting at position 2210 of SEQ ID NO: 1884578
aacgaagucagugaguguu

SEQ ID NO: 2276151 - RNA, 19 nt, Artificial Sequence
  Description of Artificial Sequence: Synthetic oligonucleotide
  Antisense strand to SEQ ID NO: 2276150
aacacucacugacuucguu

SEQ ID NO: 2276152 - RNA, 19 nt, Artificial Sequence
  Description of Artificial Sequence: Synthetic oligonucleotide
  Sense strand starting at position 2213 of SEQ ID NO: 1884578
gaagucagugaguguucca

SEQ ID NO: 2276153 - RNA, 19 nt, Artificial Sequence
  Description of Artificial Sequence: Synthetic oligonucleotide
  Antisense strand to SEQ ID NO: 2276152
uggaacacucacugacuuc

SEQ ID NO: 2276154 - RNA, 19 nt, Artificial Sequence
  Description of Artificial Sequence: Synthetic oligonucleotide
  Sense strand starting at position 2474 of SEQ ID NO: 1884578
uauugagagcucuguccua

SEQ ID NO: 2276155 - RNA, 19 nt, Artificial Sequence
  Description of Artificial Sequence: Synthetic oligonucleotide
  Antisense strand to SEQ ID NO: 2276154
uaggacagagcucucaaua

SEQ ID NO: 2276156 - RNA, 19 nt, Artificial Sequence
  Description of Artificial Sequence: Synthetic oligonucleotide
  Sense strand starting at position 2635 of SEQ ID NO: 1884578
gcaaguauccagugguaug

SEQ ID NO: 2276157 - RNA, 19 nt, Artificial Sequence
  Description of Artificial Sequence: Synthetic oligonucleotide
  Antisense strand to SEQ ID NO: 2276156
cauaccacuggauacuugc

SEQ ID NO: 2276158 - RNA, 19 nt, Artificial Sequence
  Description of Artificial Sequence: Synthetic oligonucleotide
  Sense strand starting at position 2988 of SEQ ID NO: 1884578
ccaucucuucucggcagau

SEQ ID NO: 2276159 - RNA, 19 nt, Artificial Sequence
  Description of Artificial Sequence: Synthetic oligonucleotide
  Antisense strand to SEQ ID NO: 2276158
aucugccgagaagagaugg

SEQ ID NO: 2276160 - RNA, 19 nt, Artificial Sequence
  Description of Artificial Sequence: Synthetic oligonucleotide
  Sense strand starting at position 2990 of SEQ ID NO: 1884578
aucucuucucggcagauga

SEQ ID NO: 2276161 - RNA, 19 nt, Artificial Sequence
  Description of Artificial Sequence: Synthetic oligonucleotide
  Antisense strand to SEQ ID NO: 2276160
ucaucugccgagaagagau

SEQ ID NO: 2276162 - RNA, 19 nt, Artificial Sequence
  Description of Artificial Sequence: Synthetic oligonucleotide
  Sense strand starting at position 3170 of SEQ ID NO: 1884578
ggauggcucggcgagacau

SEQ ID NO: 2276163 - RNA, 19 nt, Artificial Sequence
  Description of Artificial Sequence: Synthetic oligonucleotide
  Antisense strand to SEQ ID NO: 2276162
augucucgccgagccaucc

SEQ ID NO: 2276164 - RNA, 19 nt, Artificial Sequence
  Description of Artificial Sequence: Synthetic oligonucleotide
  Sense strand starting at position 3199 of SEQ ID NO: 1884578
gucacagcuuucuugaacu

SEQ ID NO: 2276165 - RNA, 19 nt, Artificial Sequence
  Description of Artificial Sequence: Synthetic oligonucleotide
  Antisense strand to SEQ ID NO: 2276164
aguucaagaaagcugugac

SEQ ID NO: 2276166 - RNA, 19 nt, Artificial Sequence
  Description of Artificial Sequence: Synthetic oligonucleotide
  Sense strand starting at position 3209 of SEQ ID NO: 1884578
ucuugaacugucugaaagg

SEQ ID NO: 2276167 - RNA, 19 nt, Artificial Sequence
  Description of Artificial Sequence: Synthetic oligonucleotide
  Antisense strand to SEQ ID NO: 2276166
ccuuucagacaguucaaga

SEQ ID NO: 2276168 - RNA, 19 nt, Artificial Sequence
  Description of Artificial Sequence: Synthetic oligonucleotide
  Sense strand starting at position 3336 of SEQ ID NO: 1884578
aggugugcaccuugaucau

SEQ ID NO: 2276169 - RNA, 19 nt, Artificial Sequence
  Description of Artificial Sequence: Synthetic oligonucleotide
  Antisense strand to SEQ ID NO: 2276168
augaucaaggugcacaccu

SEQ ID NO: 2276170 - RNA, 19 nt, Artificial Sequence
  Description of Artificial Sequence: Synthetic oligonucleotide
  Sense strand starting at position 3339 of SEQ ID NO: 1884578
ugugcaccuugaucaugau

SEQ ID NO: 2276171 - RNA, 19 nt, Artificial Sequence
  Description of Artificial Sequence: Synthetic oligonucleotide
  Antisense strand to SEQ ID NO: 2276170
aucaugaucaaggugcaca

SEQ ID NO: 2276172 - RNA, 19 nt, Artificial Sequence
  Description of Artificial Sequence: Synthetic oligonucleotide
  Sense strand starting at position 3448 of SEQ ID NO: 1884578
ggaggaugcugguccagau

SEQ ID NO: 2276173 - RNA, 19 nt, Artificial Sequence
  Description of Artificial Sequence: Synthetic oligonucleotide
  Antisense strand to SEQ ID NO: 2276172
aucuggaccagcauccucc

SEQ ID NO: 2276174 - RNA, 19 nt, Artificial Sequence
  Description of Artificial Sequence: Synthetic oligonucleotide
  Sense strand starting at position 3494 of SEQ ID NO: 1884578
guaaacagcucuguguaga

SEQ ID NO: 2276175 - RNA, 19 nt, Artificial Sequence
  Description of Artificial Sequence: Synthetic oligonucleotide
  Antisense strand to SEQ ID NO: 2276174
ucuacacagagcuguuuac

SEQ ID NO: 2276176 - RNA, 19 nt, Artificial Sequence
  Description of Artificial Sequence: Synthetic oligonucleotide
  Sense strand starting at position 3594 of SEQ ID NO: 1884578
gcaccaucgucaucaggau

SEQ ID NO: 2276177 - RNA, 19 nt, Artificial Sequence
  Description of Artificial Sequence: Synthetic oligonucleotide
  Antisense strand to SEQ ID NO: 2276176
auccugaugacgauggugc

SEQ ID NO: 2276178 - RNA, 19 nt, Artificial Sequence
  Description of Artificial Sequence: Synthetic oligonucleotide
  Sense strand starting at position 3600 of SEQ ID NO: 1884578
ucgucaucaggauggcaua

SEQ ID NO: 2276179 - RNA, 19 nt, Artificial Sequence
  Description of Artificial Sequence: Synthetic oligonucleotide
  Antisense strand to SEQ ID NO: 2276178
uaugccauccugaugacga

SEQ ID NO: 2276180 - RNA, 19 nt, Artificial Sequence
  Description of Artificial Sequence: Synthetic oligonucleotide
  Sense strand starting at position 3761 of SEQ ID NO: 1884578
acuuacuagcugugacuuu

SEQ ID NO: 2276181 - RNA, 19 nt, Artificial Sequence
  Description of Artificial Sequence: Synthetic oligonucleotide
  Antisense strand to SEQ ID NO: 2276180
aaagucacagcuaguaagu

SEQ ID NO: 2276182 - RNA, 19 nt, Artificial Sequence
  Description of Artificial Sequence: Synthetic oligonucleotide
  Sense strand starting at position 3786 of SEQ ID NO: 1884578
cucagugaaccucaguuua

SEQ ID NO: 2276183 - RNA, 19 nt, Artificial Sequence
  Description of Artificial Sequence: Synthetic oligonucleotide
  Antisense strand to SEQ ID NO: 2276182
uaaacugagguucacugag

SEQ ID NO: 2276184 - RNA, 19 nt, Artificial Sequence
  Description of Artificial Sequence: Synthetic oligonucleotide
  Sense strand starting at position 3845 of SEQ ID NO: 1884578
aguauugucuugcugaaua

SEQ ID NO: 2276185 - RNA, 19 nt, Artificial Sequence
  Description of Artificial Sequence: Synthetic oligonucleotide
  Antisense strand to SEQ ID NO: 2276184
uauucagcaagacaauacu

SEQ ID NO: 2276186 - RNA, 19 nt, Artificial Sequence
  Description of Artificial Sequence: Synthetic oligonucleotide
  Sense strand starting at position 3847 of SEQ ID NO: 1884578
uauugucuugcugaauaag

SEQ ID NO: 2276187 - RNA, 19 nt, Artificial Sequence
  Description of Artificial Sequence: Synthetic oligonucleotide
  Antisense strand to SEQ ID NO: 2276186
cuuauucagcaagacaaua

SEQ ID NO: 2276188 - RNA, 19 nt, Artificial Sequence
  Description of Artificial Sequence: Synthetic oligonucleotide
  Sense strand starting at position 3850 of SEQ ID NO: 1884578
ugucuugcugaauaagaga

SEQ ID NO: 2276189 - RNA, 19 nt, Artificial Sequence
  Description of Artificial Sequence: Synthetic oligonucleotide
  Antisense strand to SEQ ID NO: 2276188
ucucuuauucagcaagaca

SEQ ID NO: 2276190 - RNA, 19 nt, Artificial Sequence
  Description of Artificial Sequence: Synthetic oligonucleotide
  Sense strand starting at position 3889 of SEQ ID NO: 1884578
uagggccuggugugaaauu

SEQ ID NO: 2276191 - RNA, 19 nt, Artificial Sequence
  Description of Artificial Sequence: Synthetic oligonucleotide
  Antisense strand to SEQ ID NO: 2276190
aauuucacaccaggcccua

SEQ ID NO: 2276192 - RNA, 19 nt, Artificial Sequence
  Description of Artificial Sequence: Synthetic oligonucleotide
  Sense strand starting at position 3925 of SEQ ID NO: 1884578
agcuguugucacugaacac

SEQ ID NO: 2276193 - RNA, 19 nt, Artificial Sequence
  Description of Artificial Sequence: Synthetic oligonucleotide
  Antisense strand to SEQ ID NO: 2276192
guguucagugacaacagcu

SEQ ID NO: 2276194 - RNA, 19 nt, Artificial Sequence
  Description of Artificial Sequence: Synthetic oligonucleotide
  Sense strand starting at position 3967 of SEQ ID NO: 1884578
ccuccaguuguccauggaa

SEQ ID NO: 2276195 - RNA, 19 nt, Artificial Sequence
  Description of Artificial Sequence: Synthetic oligonucleotide
  Antisense strand to SEQ ID NO: 2276194
uuccauggacaacuggagg

SEQ ID NO: 2276196 - RNA, 19 nt, Artificial Sequence
  Description of Artificial Sequence: Synthetic oligonucleotide
  Sense strand starting at position 3969 of SEQ ID NO: 1884578
uccaguuguccauggaacu

SEQ ID NO: 2276197 - RNA, 19 nt, Artificial Sequence
  Description of Artificial Sequence: Synthetic oligonucleotide
  Antisense strand to SEQ ID NO: 2276196
aguuccauggacaacugga

SEQ ID NO: 2276198 - RNA, 19 nt, Artificial Sequence
  Description of Artificial Sequence: Synthetic oligonucleotide
  Sense strand starting at position 3970 of SEQ ID NO: 1884578
ccaguuguccauggaacua

SEQ ID NO: 2276199 - RNA, 19 nt, Artificial Sequence
  Description of Artificial Sequence: Synthetic oligonucleotide
  Antisense strand to SEQ ID NO: 2276198
uaguuccauggacaacugg

SEQ ID NO: 2276200 - RNA, 19 nt, Artificial Sequence
  Description of Artificial Sequence: Synthetic oligonucleotide
  Sense strand starting at position 69 of SEQ ID NO: 1884579
cguggacuuccugcgcaaa

SEQ ID NO: 2276201 - RNA, 19 nt, Artificial Sequence
  Description of Artificial Sequence: Synthetic oligonucleotide
  Antisense strand to SEQ ID NO: 2276200
uuugcgcaggaaguccacg

SEQ ID NO: 2276202 - RNA, 19 nt, Artificial Sequence
  Description of Artificial Sequence: Synthetic oligonucleotide
  Sense strand starting at position 71 of SEQ ID NO: 1884579
uggacuuccugcgcaaaca

SEQ ID NO: 2276203 - RNA, 19 nt, Artificial Sequence
  Description of Artificial Sequence: Synthetic oligonucleotide
  Antisense strand to SEQ ID NO: 2276202
uguuugcgcaggaagucca

SEQ ID NO: 2276204 - RNA, 19 nt, Artificial Sequence
  Description of Artificial Sequence: Synthetic oligonucleotide
  Sense strand starting at position 234 of SEQ ID NO: 1884579
uggguuauuuauugacaca

SEQ ID NO: 2276205 - RNA, 19 nt, Artificial Sequence
  Description of Artificial Sequence: Synthetic oligonucleotide
  Antisense strand to SEQ ID NO: 2276204
ugugucaauaaauaaccca

SEQ ID NO: 2276206 - RNA, 19 nt, Artificial Sequence
  Description of Artificial Sequence: Synthetic oligonucleotide
  Sense strand starting at position 334 of SEQ ID NO: 1884579
ccuauaucuccgugugcuc

SEQ ID NO: 2276207 - RNA, 19 nt, Artificial Sequence
  Description of Artificial Sequence: Synthetic oligonucleotide
  Antisense strand to SEQ ID NO: 2276206
gagcacacggagauauagg

SEQ ID NO: 2276208 - RNA, 19 nt, Artificial Sequence
  Description of Artificial Sequence: Synthetic oligonucleotide
  Sense strand starting at position 344 of SEQ ID NO: 1884579
cgugugcuccucgguguua

SEQ ID NO: 2276209 - RNA, 19 nt, Artificial Sequence
  Description of Artificial Sequence: Synthetic oligonucleotide
  Antisense strand to SEQ ID NO: 2276208
uaacaccgaggagcacacg

SEQ ID NO: 2276210 - RNA, 19 nt, Artificial Sequence
  Description of Artificial Sequence: Synthetic oligonucleotide
  Sense strand starting at position 772 of SEQ ID NO: 1884579
cagcguagcuucucaugga

SEQ ID NO: 2276211 - RNA, 19 nt, Artificial Sequence
  Description of Artificial Sequence: Synthetic oligonucleotide
  Antisense strand to SEQ ID NO: 2276210
uccaugagaagcuacgcug

SEQ ID NO: 2276212 - RNA, 19 nt, Artificial Sequence
  Description of Artificial Sequence: Synthetic oligonucleotide
  Sense strand starting at position 773 of SEQ ID NO: 1884579
agcguagcuucucauggaa

SEQ ID NO: 2276213 - RNA, 19 nt, Artificial Sequence
  Description of Artificial Sequence: Synthetic oligonucleotide
  Antisense strand to SEQ ID NO: 2276212
uuccaugagaagcuacgcu

SEQ ID NO: 2276214 - RNA, 19 nt, Artificial Sequence
  Description of Artificial Sequence: Synthetic oligonucleotide
  Sense strand starting at position 775 of SEQ ID NO: 1884579
cguagcuucucauggaaac

SEQ ID NO: 2276215 - RNA, 19 nt, Artificial Sequence
  Description of Artificial Sequence: Synthetic oligonucleotide
  Antisense strand to SEQ ID NO: 2276214
guuuccaugagaagcuacg

SEQ ID NO: 2276216 - RNA, 19 nt, Artificial Sequence
  Description of Artificial Sequence: Synthetic oligonucleotide
  Sense strand starting at position 958 of SEQ ID NO: 1884579
agagacacuuccuugguga

SEQ ID NO: 2276217 - RNA, 19 nt, Artificial Sequence
  Description of Artificial Sequence: Synthetic oligonucleotide
  Antisense strand to SEQ ID NO: 2276216
ucaccaaggaagugucucu

SEQ ID NO: 2276218 - RNA, 19 nt, Artificial Sequence
  Description of Artificial Sequence: Synthetic oligonucleotide
  Sense strand starting at position 959 of SEQ ID NO: 1884579
gagacacuuccuuggugaa

SEQ ID NO: 2276219 - RNA, 19 nt, Artificial Sequence
  Description of Artificial Sequence: Synthetic oligonucleotide
  Antisense strand to SEQ ID NO: 2276218
uucaccaaggaagugucuc

SEQ ID NO: 2276220 - RNA, 19 nt, Artificial Sequence
  Description of Artificial Sequence: Synthetic oligonucleotide
  Sense strand starting at position 960 of SEQ ID NO: 1884579
agacacuuccuuggugaaa

SEQ ID NO: 2276221 - RNA, 19 nt, Artificial Sequence
  Description of Artificial Sequence: Synthetic oligonucleotide
  Antisense strand to SEQ ID NO: 2276220
uuucaccaaggaagugucu

SEQ ID NO: 2276222 - RNA, 19 nt, Artificial Sequence
  Description of Artificial Sequence: Synthetic oligonucleotide
  Sense strand starting at position 961 of SEQ ID NO: 1884579
gacacuuccuuggugaaag

SEQ ID NO: 2276223 - RNA, 19 nt, Artificial Sequence
  Description of Artificial Sequence: Synthetic oligonucleotide
  Antisense strand to SEQ ID NO: 2276222
cuuucaccaaggaaguguc

SEQ ID NO: 2276224 - RNA, 19 nt, Artificial Sequence
  Description of Artificial Sequence: Synthetic oligonucleotide
  Sense strand starting at position 962 of SEQ ID NO: 1884579
acacuuccuuggugaaaga

SEQ ID NO: 2276225 - RNA, 19 nt, Artificial Sequence
  Description of Artificial Sequence: Synthetic oligonucleotide
  Antisense strand to SEQ ID NO: 2276224
ucuuucaccaaggaagugu

SEQ ID NO: 2276226 - RNA, 19 nt, Artificial Sequence
  Description of Artificial Sequence: Synthetic oligonucleotide
  Sense strand starting at position 975 of SEQ ID NO: 1884579
gaaagagcucaucguaauu

SEQ ID NO: 2276227 - RNA, 19 nt, Artificial Sequence
  Description of Artificial Sequence: Synthetic oligonucleotide
  Antisense strand to SEQ ID NO: 2276226
aauuacgaugagcucuuuc

SEQ ID NO: 2276228 - RNA, 19 nt, Artificial Sequence
  Description of Artificial Sequence: Synthetic oligonucleotide
  Sense strand starting at position 1086 of SEQ ID NO: 1884579
ccaggaaugccaggugaug

SEQ ID NO: 2276229 - RNA, 19 nt, Artificial Sequence
  Description of Artificial Sequence: Synthetic oligonucleotide
  Antisense strand to SEQ ID NO: 2276228
caucaccuggcauuccugg

SEQ ID NO: 2276230 - RNA, 19 nt, Artificial Sequence
  Description of Artificial Sequence: Synthetic oligonucleotide
  Sense strand starting at position 1921 of SEQ ID NO: 1884579
caggcuguuccugggagua

SEQ ID NO: 2276231 - RNA, 19 nt, Artificial Sequence
  Description of Artificial Sequence: Synthetic oligonucleotide
  Antisense strand to SEQ ID NO: 2276230
uacucccaggaacagccug

SEQ ID NO: 2276232 - RNA, 19 nt, Artificial Sequence
  Description of Artificial Sequence: Synthetic oligonucleotide
  Sense strand starting at position 1923 of SEQ ID NO: 1884579
ggcuguuccugggaguaug

SEQ ID NO: 2276233 - RNA, 19 nt, Artificial Sequence
  Description of Artificial Sequence: Synthetic oligonucleotide
  Antisense strand to SEQ ID NO: 2276232
cauacucccaggaacagcc

SEQ ID NO: 2276234 - RNA, 19 nt, Artificial Sequence
  Description of Artificial Sequence: Synthetic oligonucleotide
  Sense strand starting at position 2326 of SEQ ID NO: 1884579
agagcuacuugucacucaa

SEQ ID NO: 2276235 - RNA, 19 nt, Artificial Sequence
  Description of Artificial Sequence: Synthetic oligonucleotide
  Antisense strand to SEQ ID NO: 2276234
uugagugacaaguagcucu

SEQ ID NO: 2276236 - RNA, 19 nt, Artificial Sequence
  Description of Artificial Sequence: Synthetic oligonucleotide
  Sense strand starting at position 2350 of SEQ ID NO: 1884579
aucaaacaucgaugucaca

SEQ ID NO: 2276237 - RNA, 19 nt, Artificial Sequence
  Description of Artificial Sequence: Synthetic oligonucleotide
  Antisense strand to SEQ ID NO: 2276236
ugugacaucgauguuugau

SEQ ID NO: 2276238 - RNA, 19 nt, Artificial Sequence
  Description of Artificial Sequence: Synthetic oligonucleotide
  Sense strand starting at position 2388 of SEQ ID NO: 1884579
ugugccaagugcuaagaau

SEQ ID NO: 2276239 - RNA, 19 nt, Artificial Sequence
  Description of Artificial Sequence: Synthetic oligonucleotide
  Antisense strand to SEQ ID NO: 2276238
auucuuagcacuuggcaca

SEQ ID NO: 2276240 - RNA, 19 nt, Artificial Sequence
  Description of Artificial Sequence: Synthetic oligonucleotide
  Sense strand starting at position 2396 of SEQ ID NO: 1884579
gugcuaagaauagaacagu

SEQ ID NO: 2276241 - RNA, 19 nt, Artificial Sequence
  Description of Artificial Sequence: Synthetic oligonucleotide
  Antisense strand to SEQ ID NO: 2276240
acuguucuauucuuagcac

SEQ ID NO: 2276242 - RNA, 19 nt, Artificial Sequence
  Description of Artificial Sequence: Synthetic oligonucleotide
  Sense strand starting at position 2458 of SEQ ID NO: 1884579
cauggcagguucccuaaau

SEQ ID NO: 2276243 - RNA, 19 nt, Artificial Sequence
  Description of Artificial Sequence: Synthetic oligonucleotide
  Antisense strand to SEQ ID NO: 2276242
auuuagggaaccugccaug

SEQ ID NO: 2276244 - RNA, 19 nt, Artificial Sequence
  Description of Artificial Sequence: Synthetic oligonucleotide
  Sense strand starting at position 2581 of SEQ ID NO: 1884579
ccgguuuccuggaggaggu

SEQ ID NO: 2276245 - RNA, 19 nt, Artificial Sequence
  Description of Artificial Sequence: Synthetic oligonucleotide
  Antisense strand to SEQ ID NO: 2276244
accuccuccaggaaaccgg

SEQ ID NO: 2276246 - RNA, 19 nt, Artificial Sequence
  Description of Artificial Sequence: Synthetic oligonucleotide
  Sense strand starting at position 3164 of SEQ ID NO: 1884579
agcccucucuccuggugaa

SEQ ID NO: 2276247 - RNA, 19 nt, Artificial Sequence
  Description of Artificial Sequence: Synthetic oligonucleotide
  Antisense strand to SEQ ID NO: 2276246
uucaccaggagagagggcu

SEQ ID NO: 2276248 - RNA, 19 nt, Artificial Sequence
  Description of Artificial Sequence: Synthetic oligonucleotide
  Sense strand starting at position 3798 of SEQ ID NO: 1884579
cuaaucucuugcuuggcaa

SEQ ID NO: 2276249 - RNA, 19 nt, Artificial Sequence
  Description of Artificial Sequence: Synthetic oligonucleotide
  Antisense strand to SEQ ID NO: 2276248
uugccaagcaagagauuag

SEQ ID NO: 2276250 - RNA, 19 nt, Artificial Sequence
  Description of Artificial Sequence: Synthetic oligonucleotide
  Sense strand starting at position 3927 of SEQ ID NO: 1884579
gcgggcauuuccugagucu

SEQ ID NO: 2276251 - RNA, 19 nt, Artificial Sequence
  Description of Artificial Sequence: Synthetic oligonucleotide
  Antisense strand to SEQ ID NO: 2276250
agacucaggaaaugcccgc

SEQ ID NO: 2276252 - RNA, 19 nt, Artificial Sequence
  Description of Artificial Sequence: Synthetic oligonucleotide
  Sense strand starting at position 3928 of SEQ ID NO: 1884579
cgggcauuuccugagucuu

SEQ ID NO: 2276253 - RNA, 19 nt, Artificial Sequence
  Description of Artificial Sequence: Synthetic oligonucleotide
  Antisense strand to SEQ ID NO: 2276252
aagacucaggaaaugcccg

SEQ ID NO: 2276254 - RNA, 19 nt, Artificial Sequence
  Description of Artificial Sequence: Synthetic oligonucleotide
  Sense strand starting at position 220 of SEQ ID NO: 1884580
gguccuuacagaggucacu

SEQ ID NO: 2276255 - RNA, 19 nt, Artificial Sequence
  Description of Artificial Sequence: Synthetic oligonucleotide
  Antisense strand to SEQ ID NO: 2276254
agugaccucuguaaggacc

SEQ ID NO: 2276256 - RNA, 19 nt, Artificial Sequence
  Description of Artificial Sequence: Synthetic oligonucleotide
  Sense strand starting at position 226 of SEQ ID NO: 1884580
uacagaggucacuggguua

SEQ ID NO: 2276257 - RNA, 19 nt, Artificial Sequence
  Description of Artificial Sequence: Synthetic oligonucleotide
  Antisense strand to SEQ ID NO: 2276256
uaacccagugaccucugua

SEQ ID NO: 2276258 - RNA, 19 nt, Artificial Sequence
  Description of Artificial Sequence: Synthetic oligonucleotide
  Sense strand starting at position 229 of SEQ ID NO: 1884580
agaggucacuggguuaaga

SEQ ID NO: 2276259 - RNA, 19 nt, Artificial Sequence
  Description of Artificial Sequence: Synthetic oligonucleotide
  Antisense strand to SEQ ID NO: 2276258
ucuuaacccagugaccucu

SEQ ID NO: 2276260 - RNA, 19 nt, Artificial Sequence
  Description of Artificial Sequence: Synthetic oligonucleotide
  Sense strand starting at position 280 of SEQ ID NO: 1884580
gcccgauguccuuaugaaa

SEQ ID NO: 2276261 - RNA, 19 nt, Artificial Sequence
  Description of Artificial Sequence: Synthetic oligonucleotide
  Antisense strand to SEQ ID NO: 2276260
uuucauaaggacaucgggc

SEQ ID NO: 2276262 - RNA, 19 nt, Artificial Sequence
  Description of Artificial Sequence: Synthetic oligonucleotide
  Sense strand starting at position 324 of SEQ ID NO: 1884580
gagaacagugugugaagau

SEQ ID NO: 2276263 - RNA, 19 nt, Artificial Sequence
  Description of Artificial Sequence: Synthetic oligonucleotide
  Antisense strand to SEQ ID NO: 2276262
aucuucacacacuguucuc

SEQ ID NO: 2276264 - RNA, 19 nt, Artificial Sequence
  Description of Artificial Sequence: Synthetic oligonucleotide
  Sense strand starting at position 913 of SEQ ID NO: 1884580
gggacuuggucacaggaca

SEQ ID NO: 2276265 - RNA, 19 nt, Artificial Sequence
  Description of Artificial Sequence: Synthetic oligonucleotide
  Antisense strand to SEQ ID NO: 2276264
uguccugugaccaaguccc

SEQ ID NO: 2276266 - RNA, 19 nt, Artificial Sequence
  Description of Artificial Sequence: Synthetic oligonucleotide
  Sense strand starting at position 1284 of SEQ ID NO: 1884580
gcuugcagucuccaacagu

SEQ ID NO: 2276267 - RNA, 19 nt, Artificial Sequence
  Description of Artificial Sequence: Synthetic oligonucleotide
  Antisense strand to SEQ ID NO: 2276266
acuguuggagacugcaagc

SEQ ID NO: 2276268 - RNA, 19 nt, Artificial Sequence
  Description of Artificial Sequence: Synthetic oligonucleotide
  Sense strand starting at position 1314 of SEQ ID NO: 1884580
ccaacauuccucugagguu

SEQ ID NO: 2276269 - RNA, 19 nt, Artificial Sequence
  Description of Artificial Sequence: Synthetic oligonucleotide
  Antisense strand to SEQ ID NO: 2276268
aaccucagaggaauguugg

SEQ ID NO: 2276270 - RNA, 19 nt, Artificial Sequence
  Description of Artificial Sequence: Synthetic oligonucleotide
  Sense strand starting at position 1323 of SEQ ID NO: 1884580
cucugagguuugcgcuauu

SEQ ID NO: 2276271 - RNA, 19 nt, Artificial Sequence
  Description of Artificial Sequence: Synthetic oligonucleotide
  Antisense strand to SEQ ID NO: 2276270
aauagcgcaaaccucagag

SEQ ID NO: 2276272 - RNA, 19 nt, Artificial Sequence
  Description of Artificial Sequence: Synthetic oligonucleotide
  Sense strand starting at position 1326 of SEQ ID NO: 1884580
ugagguuugcgcuauuauu

SEQ ID NO: 2276273 - RNA, 19 nt, Artificial Sequence
  Description of Artificial Sequence: Synthetic oligonucleotide
  Antisense strand to SEQ ID NO: 2276272
aauaauagcgcaaaccuca

SEQ ID NO: 2276274 - RNA, 19 nt, Artificial Sequence
  Description of Artificial Sequence: Synthetic oligonucleotide
  Sense strand starting at position 1467 of SEQ ID NO: 1884580
gccggcucccuuguaaacu

SEQ ID NO: 2276275 - RNA, 19 nt, Artificial Sequence
  Description of Artificial Sequence: Synthetic oligonucleotide
  Antisense strand to SEQ ID NO: 2276274
aguuuacaagggagccggc

SEQ ID NO: 2276276 - RNA, 19 nt, Artificial Sequence
  Description of Artificial Sequence: Synthetic oligonucleotide
  Sense strand starting at position 1550 of SEQ ID NO: 1884580
ccuugagagugaugggaug

SEQ ID NO: 2276277 - RNA, 19 nt, Artificial Sequence
  Description of Artificial Sequence: Synthetic oligonucleotide
  Antisense strand to SEQ ID NO: 2276276
caucccaucacucucaagg

SEQ ID NO: 2276278 - RNA, 19 nt, Artificial Sequence
  Description of Artificial Sequence: Synthetic oligonucleotide
  Sense strand starting at position 2025 of SEQ ID NO: 1884580
uuggcaauugcuugggaaa

SEQ ID NO: 2276279 - RNA, 19 nt, Artificial Sequence
  Description of Artificial Sequence: Synthetic oligonucleotide
  Antisense strand to SEQ ID NO: 2276278
uuucccaagcaauugccaa

SEQ ID NO: 2276280 - RNA, 19 nt, Artificial Sequence
  Description of Artificial Sequence: Synthetic oligonucleotide
  Sense strand starting at position 2026 of SEQ ID NO: 1884580
uggcaauugcuugggaaag

SEQ ID NO: 2276281 - RNA, 19 nt, Artificial Sequence
  Description of Artificial Sequence: Synthetic oligonucleotide
  Antisense strand to SEQ ID NO: 2276280
cuuucccaagcaauugcca

SEQ ID NO: 2276282 - RNA, 19 nt, Artificial Sequence
  Description of Artificial Sequence: Synthetic oligonucleotide
  Sense strand starting at position 2200 of SEQ ID NO: 1884580
gaaugaggcuucugacuuu

SEQ ID NO: 2276283 - RNA, 19 nt, Artificial Sequence
  Description of Artificial Sequence: Synthetic oligonucleotide
  Antisense strand to SEQ ID NO: 2276282
aaagucagaagccucauuc

SEQ ID NO: 2276284 - RNA, 19 nt, Artificial Sequence
  Description of Artificial Sequence: Synthetic oligonucleotide
  Sense strand starting at position 2203 of SEQ ID NO: 1884580
ugaggcuucugacuuuaaa

SEQ ID NO: 2276285 - RNA, 19 nt, Artificial Sequence
  Description of Artificial Sequence: Synthetic oligonucleotide
  Antisense strand to SEQ ID NO: 2276284
uuuaaagucagaagccuca

SEQ ID NO: 2276286 - RNA, 19 nt, Artificial Sequence
  Description of Artificial Sequence: Synthetic oligonucleotide
  Sense strand starting at position 3026 of SEQ ID NO: 1884580
acgagacucugagucugaa

SEQ ID NO: 2276287 - RNA, 19 nt, Artificial Sequence
  Description of Artificial Sequence: Synthetic oligonucleotide
  Antisense strand to SEQ ID NO: 2276286
uucagacucagagucucgu

SEQ ID NO: 2276288 - RNA, 19 nt, Artificial Sequence
  Description of Artificial Sequence: Synthetic oligonucleotide
  Sense strand starting at position 3120 of SEQ ID NO: 1884580
gcggguguucccagugacu

SEQ ID NO: 2276289 - RNA, 19 nt, Artificial Sequence
  Description of Artificial Sequence: Synthetic oligonucleotide
  Antisense strand to SEQ ID NO: 2276288
agucacugggaacacccgc

SEQ ID NO: 2276290 - RNA, 19 nt, Artificial Sequence
  Description of Artificial Sequence: Synthetic oligonucleotide
  Sense strand starting at position 3122 of SEQ ID NO: 1884580
ggguguucccagugacuca

SEQ ID NO: 2276291 - RNA, 19 nt, Artificial Sequence
  Description of Artificial Sequence: Synthetic oligonucleotide
  Antisense strand to SEQ ID NO: 2276290
ugagucacugggaacaccc

SEQ ID NO: 2276292 - RNA, 19 nt, Artificial Sequence
  Description of Artificial Sequence: Synthetic oligonucleotide
  Sense strand starting at position 3137 of SEQ ID NO: 1884580
cucaccaguccgugaucuu

SEQ ID NO: 2276293 - RNA, 19 nt, Artificial Sequence
  Description of Artificial Sequence: Synthetic oligonucleotide
  Antisense strand to SEQ ID NO: 2276292
aagaucacggacuggugag

SEQ ID NO: 2276294 - RNA, 19 nt, Artificial Sequence
  Description of Artificial Sequence: Synthetic oligonucleotide
  Sense strand starting at position 81 of SEQ ID NO: 1884581
aucugugucgcuucgggau

SEQ ID NO: 2276295 - RNA, 19 nt, Artificial Sequence
  Description of Artificial Sequence: Synthetic oligonucleotide
  Antisense strand to SEQ ID NO: 2276294
aucccgaagcgacacagau

SEQ ID NO: 2276296 - RNA, 19 nt, Artificial Sequence
  Description of Artificial Sequence: Synthetic oligonucleotide
  Sense strand starting at position 105 of SEQ ID NO: 1884581
uggcgcuuccgaccuguaa

SEQ ID NO: 2276297 - RNA, 19 nt, Artificial Sequence
  Description of Artificial Sequence: Synthetic oligonucleotide
  Antisense strand to SEQ ID NO: 2276296
uuacaggucggaagcgcca

SEQ ID NO: 2276298 - RNA, 19 nt, Artificial Sequence
  Description of Artificial Sequence: Synthetic oligonucleotide
  Sense strand starting at position 256 of SEQ ID NO: 1884581
ggcauaaggccucagauga

SEQ ID NO: 2276299 - RNA, 19 nt, Artificial Sequence
  Description of Artificial Sequence: Synthetic oligonucleotide
  Antisense strand to SEQ ID NO: 2276298
ucaucugaggccuuaugcc

SEQ ID NO: 2276300 - RNA, 19 nt, Artificial Sequence
  Description of Artificial Sequence: Synthetic oligonucleotide
  Sense strand starting at position 264 of SEQ ID NO: 1884581
gccucagaugaguauaugu

SEQ ID NO: 2276301 - RNA, 19 nt, Artificial Sequence
  Description of Artificial Sequence: Synthetic oligonucleotide
  Antisense strand to SEQ ID NO: 2276300
acauauacucaucugaggc

SEQ ID NO: 2276302 - RNA, 19 nt, Artificial Sequence
  Description of Artificial Sequence: Synthetic oligonucleotide
  Sense strand starting at position 273 of SEQ ID NO: 1884581
gaguauauguggccucaac

SEQ ID NO: 2276303 - RNA, 19 nt, Artificial Sequence
  Description of Artificial Sequence: Synthetic oligonucleotide
  Antisense strand to SEQ ID NO: 2276302
guugaggccacauauacuc

SEQ ID NO: 2276304 - RNA, 19 nt, Artificial Sequence
  Description of Artificial Sequence: Synthetic oligonucleotide
  Sense strand starting at position 359 of SEQ ID NO: 1884581
ggccauggagccugcuaau

SEQ ID NO: 2276305 - RNA, 19 nt, Artificial Sequence
  Description of Artificial Sequence: Synthetic oligonucleotide
  Antisense strand to SEQ ID NO: 2276304
auuagcaggcuccauggcc

SEQ ID NO: 2276306 - RNA, 19 nt, Artificial Sequence
  Description of Artificial Sequence: Synthetic oligonucleotide
  Sense strand starting at position 635 of SEQ ID NO: 1884581
ggguucagcugucuccaga

SEQ ID NO: 2276307 - RNA, 19 nt, Artificial Sequence
  Description of Artificial Sequence: Synthetic oligonucleotide
  Antisense strand to SEQ ID NO: 2276306
ucuggagacagcugaaccc

SEQ ID NO: 2276308 - RNA, 19 nt, Artificial Sequence
  Description of Artificial Sequence: Synthetic oligonucleotide
  Sense strand starting at position 925 of SEQ ID NO: 1884581
ucggucucugcacagagaa

SEQ ID NO: 2276309 - RNA, 19 nt, Artificial Sequence
  Description of Artificial Sequence: Synthetic oligonucleotide
  Antisense strand to SEQ ID NO: 2276308
uucucugugcagagaccga

SEQ ID NO: 2276310 - RNA, 19 nt, Artificial Sequence
  Description of Artificial Sequence: Synthetic oligonucleotide
  Sense strand starting at position 1233 of SEQ ID NO: 1884581
agagauaacgcauaugugu

SEQ ID NO: 2276311 - RNA, 19 nt, Artificial Sequence
  Description of Artificial Sequence: Synthetic oligonucleotide
  Antisense strand to SEQ ID NO: 2276310
acacauaugcguuaucucu

SEQ ID NO: 2276312 - RNA, 19 nt, Artificial Sequence
  Description of Artificial Sequence: Synthetic oligonucleotide
  Sense strand starting at position 1397 of SEQ ID NO: 1884581
aagaaagcucugcaugaug

SEQ ID NO: 2276313 - RNA, 19 nt, Artificial Sequence
  Description of Artificial Sequence: Synthetic oligonucleotide
  Antisense strand to SEQ ID NO: 2276312
caucaugcagagcuuucuu

SEQ ID NO: 2276314 - RNA, 19 nt, Artificial Sequence
  Description of Artificial Sequence: Synthetic oligonucleotide
  Sense strand starting at position 1399 of SEQ ID NO: 1884581
gaaagcucugcaugaugaa

SEQ ID NO: 2276315 - RNA, 19 nt, Artificial Sequence
  Description of Artificial Sequence: Synthetic oligonucleotide
  Antisense strand to SEQ ID NO: 2276314
uucaucaugcagagcuuuc

SEQ ID NO: 2276316 - RNA, 19 nt, Artificial Sequence
  Description of Artificial Sequence: Synthetic oligonucleotide
  Sense strand starting at position 1545 of SEQ ID NO: 1884581
ccaugaugccaacgaacaa

SEQ ID NO: 2276317 - RNA, 19 nt, Artificial Sequence
  Description of Artificial Sequence: Synthetic oligonucleotide
  Antisense strand to SEQ ID NO: 2276316
uuguucguuggcaucaugg

SEQ ID NO: 2276318 - RNA, 19 nt, Artificial Sequence
  Description of Artificial Sequence: Synthetic oligonucleotide
  Sense strand starting at position 1599 of SEQ ID NO: 1884581
gugacaggguugcuucaua

SEQ ID NO: 2276319 - RNA, 19 nt, Artificial Sequence
  Description of Artificial Sequence: Synthetic oligonucleotide
  Antisense strand to SEQ ID NO: 2276318
uaugaagcaacccugucac

SEQ ID NO: 2276320 - RNA, 19 nt, Artificial Sequence
  Description of Artificial Sequence: Synthetic oligonucleotide
  Sense strand starting at position 1682 of SEQ ID NO: 1884581
uugaguccaggccauaauu

SEQ ID NO: 2276321 - RNA, 19 nt, Artificial Sequence
  Description of Artificial Sequence: Synthetic oligonucleotide
  Antisense strand to SEQ ID NO: 2276320
aauuauggccuggacucaa

SEQ ID NO: 2276322 - RNA, 19 nt, Artificial Sequence
  Description of Artificial Sequence: Synthetic oligonucleotide
  Sense strand starting at position 1708 of SEQ ID NO: 1884581
uggaacauccauugugugu

SEQ ID NO: 2276323 - RNA, 19 nt, Artificial Sequence
  Description of Artificial Sequence: Synthetic oligonucleotide
  Antisense strand to SEQ ID NO: 2276322
acacacaauggauguucca

SEQ ID NO: 2276324 - RNA, 19 nt, Artificial Sequence
  Description of Artificial Sequence: Synthetic oligonucleotide
  Sense strand starting at position 1757 of SEQ ID NO: 1884581
gcaggaguucuugagauac

SEQ ID NO: 2276325 - RNA, 19 nt, Artificial Sequence
  Description of Artificial Sequence: Synthetic oligonucleotide
  Antisense strand to SEQ ID NO: 2276324
guaucucaagaacuccugc

SEQ ID NO: 2276326 - RNA, 19 nt, Artificial Sequence
  Description of Artificial Sequence: Synthetic oligonucleotide
  Sense strand starting at position 1761 of SEQ ID NO: 1884581
gaguucuugagauacagug

SEQ ID NO: 2276327 - RNA, 19 nt, Artificial Sequence
  Description of Artificial Sequence: Synthetic oligonucleotide
  Antisense strand to SEQ ID NO: 2276326
cacuguaucucaagaacuc

SEQ ID NO: 2276328 - RNA, 19 nt, Artificial Sequence
  Description of Artificial Sequence: Synthetic oligonucleotide
  Sense strand starting at position 2418 of SEQ ID NO: 1884581
ggagccuauguguggaaga

SEQ ID NO: 2276329 - RNA, 19 nt, Artificial Sequence
  Description of Artificial Sequence: Synthetic oligonucleotide
  Antisense strand to SEQ ID NO: 2276328
ucuuccacacauaggcucc

SEQ ID NO: 2276330 - RNA, 19 nt, Artificial Sequence
  Description of Artificial Sequence: Synthetic oligonucleotide
  Sense strand starting at position 2420 of SEQ ID NO: 1884581
agccuauguguggaagaag

SEQ ID NO: 2276331 - RNA, 19 nt, Artificial Sequence
  Description of Artificial Sequence: Synthetic oligonucleotide
  Antisense strand to SEQ ID NO: 2276330
cuucuuccacacauaggcu

SEQ ID NO: 2276332 - RNA, 19 nt, Artificial Sequence
  Description of Artificial Sequence: Synthetic oligonucleotide
  Sense strand starting at position 2468 of SEQ ID NO: 1884581
gcagaaugucacggacauc

SEQ ID NO: 2276333 - RNA, 19 nt, Artificial Sequence
  Description of Artificial Sequence: Synthetic oligonucleotide
  Antisense strand to SEQ ID NO: 2276332
gauguccgugacauucugc

SEQ ID NO: 2276334 - RNA, 19 nt, Artificial Sequence
  Description of Artificial Sequence: Synthetic oligonucleotide
  Sense strand starting at position 2471 of SEQ ID NO: 1884581
gaaugucacggacaucgau

SEQ ID NO: 2276335 - RNA, 19 nt, Artificial Sequence
  Description of Artificial Sequence: Synthetic oligonucleotide
  Antisense strand to SEQ ID NO: 2276334
aucgauguccgugacauuc

SEQ ID NO: 2276336 - RNA, 19 nt, Artificial Sequence
  Description of Artificial Sequence: Synthetic oligonucleotide
  Sense strand starting at position 2524 of SEQ ID NO: 1884581
gacccuguccugugaucac

SEQ ID NO: 2276337 - RNA, 19 nt, Artificial Sequence
  Description of Artificial Sequence: Synthetic oligonucleotide
  Antisense strand to SEQ ID NO: 2276336
gugaucacaggacaggguc

SEQ ID NO: 2276338 - RNA, 19 nt, Artificial Sequence
  Description of Artificial Sequence: Synthetic oligonucleotide
  Sense strand starting at position 2533 of SEQ ID NO: 1884581
cugugaucacacugaagca

SEQ ID NO: 2276339 - RNA, 19 nt, Artificial Sequence
  Description of Artificial Sequence: Synthetic oligonucleotide
  Antisense strand to SEQ ID NO: 2276338
ugcuucagugugaucacag

SEQ ID NO: 2276340 - RNA, 19 nt, Artificial Sequence
  Description of Artificial Sequence: Synthetic oligonucleotide
  Sense strand starting at position 2624 of SEQ ID NO: 1884581
ggugccuucccuuagaauu

SEQ ID NO: 2276341 - RNA, 19 nt, Artificial Sequence
  Description of Artificial Sequence: Synthetic oligonucleotide
  Antisense strand to SEQ ID NO: 2276340
aauucuaagggaaggcacc

SEQ ID NO: 2276342 - RNA, 19 nt, Artificial Sequence
  Description of Artificial Sequence: Synthetic oligonucleotide
  Sense strand starting at position 2666 of SEQ ID NO: 1884581
gcuguuggucuagauaaca

SEQ ID NO: 2276343 - RNA, 19 nt, Artificial Sequence
  Description of Artificial Sequence: Synthetic oligonucleotide
  Antisense strand to SEQ ID NO: 2276342
uguuaucuagaccaacagc

SEQ ID NO: 2276344 - RNA, 19 nt, Artificial Sequence
  Description of Artificial Sequence: Synthetic oligonucleotide
  Sense strand starting at position 2753 of SEQ ID NO: 1884581
ggaggaagccagugugagu

SEQ ID NO: 2276345 - RNA, 19 nt, Artificial Sequence
  Description of Artificial Sequence: Synthetic oligonucleotide
  Antisense strand to SEQ ID NO: 2276344
acucacacuggcuuccucc

SEQ ID NO: 2276346 - RNA, 19 nt, Artificial Sequence
  Description of Artificial Sequence: Synthetic oligonucleotide
  Sense strand starting at position 2996 of SEQ ID NO: 1884581
ggacucaccugcuuuguca

SEQ ID NO: 2276347 - RNA, 19 nt, Artificial Sequence
  Description of Artificial Sequence: Synthetic oligonucleotide
  Antisense strand to SEQ ID NO: 2276346
ugacaaagcaggugagucc

SEQ ID NO: 2276348 - RNA, 19 nt, Artificial Sequence
  Description of Artificial Sequence: Synthetic oligonucleotide
  Sense strand starting at position 3240 of SEQ ID NO: 1884581
gcuugaggagacuauguga

SEQ ID NO: 2276349 - RNA, 19 nt, Artificial Sequence
  Description of Artificial Sequence: Synthetic oligonucleotide
  Antisense strand to SEQ ID NO: 2276348
ucacauagucuccucaagc

SEQ ID NO: 2276350 - RNA, 19 nt, Artificial Sequence
  Description of Artificial Sequence: Synthetic oligonucleotide
  Sense strand starting at position 3323 of SEQ ID NO: 1884581
ucuuuacugagagaugugu

SEQ ID NO: 2276351 - RNA, 19 nt, Artificial Sequence
  Description of Artificial Sequence: Synthetic oligonucleotide
  Antisense strand to SEQ ID NO: 2276350
acacaucucucaguaaaga

SEQ ID NO: 2276352 - RNA, 19 nt, Artificial Sequence
  Description of Artificial Sequence: Synthetic oligonucleotide
  Sense strand starting at position 3325 of SEQ ID NO: 1884581
uuuacugagagauguguca

SEQ ID NO: 2276353 - RNA, 19 nt, Artificial Sequence
  Description of Artificial Sequence: Synthetic oligonucleotide
  Antisense strand to SEQ ID NO: 2276352
ugacacaucucucaguaaa

SEQ ID NO: 2276354 - RNA, 19 nt, Artificial Sequence
  Description of Artificial Sequence: Synthetic oligonucleotide
  Sense strand starting at position 3369 of SEQ ID NO: 1884581
cguugccucauggagaaau

SEQ ID NO: 2276355 - RNA, 19 nt, Artificial Sequence
  Description of Artificial Sequence: Synthetic oligonucleotide
  Antisense strand to SEQ ID NO: 2276354
auuucuccaugaggcaacg

SEQ ID NO: 2276356 - RNA, 19 nt, Artificial Sequence
  Description of Artificial Sequence: Synthetic oligonucleotide
  Sense strand starting at position 3391 of SEQ ID NO: 1884581
gguggaauuccugaucgcu

SEQ ID NO: 2276357 - RNA, 19 nt, Artificial Sequence
  Description of Artificial Sequence: Synthetic oligonucleotide
  Antisense strand to SEQ ID NO: 2276356
agcgaucaggaauuccacc

SEQ ID NO: 2276358 - RNA, 19 nt, Artificial Sequence
  Description of Artificial Sequence: Synthetic oligonucleotide
  Sense strand starting at position 3393 of SEQ ID NO: 1884581
uggaauuccugaucgcugu

SEQ ID NO: 2276359 - RNA, 19 nt, Artificial Sequence
  Description of Artificial Sequence: Synthetic oligonucleotide
  Antisense strand to SEQ ID NO: 2276358
acagcgaucaggaauucca

SEQ ID NO: 2276360 - RNA, 19 nt, Artificial Sequence
  Description of Artificial Sequence: Synthetic oligonucleotide
  Sense strand starting at position 3432 of SEQ ID NO: 1884581
guggcauuaacccgaaaca

SEQ ID NO: 2276361 - RNA, 19 nt, Artificial Sequence
  Description of Artificial Sequence: Synthetic oligonucleotide
  Antisense strand to SEQ ID NO: 2276360
uguuucggguuaaugccac

SEQ ID NO: 2276362 - RNA, 19 nt, Artificial Sequence
  Description of Artificial Sequence: Synthetic oligonucleotide
  Sense strand starting at position 3461 of SEQ ID NO: 1884581
ccaguaucaucccuggaau

SEQ ID NO: 2276363 - RNA, 19 nt, Artificial Sequence
  Description of Artificial Sequence: Synthetic oligonucleotide
  Antisense strand to SEQ ID NO: 2276362
auuccagggaugauacugg

SEQ ID NO: 2276364 - RNA, 19 nt, Artificial Sequence
  Description of Artificial Sequence: Synthetic oligonucleotide
  Sense strand starting at position 3463 of SEQ ID NO: 1884581
aguaucaucccuggaauaa

SEQ ID NO: 2276365 - RNA, 19 nt, Artificial Sequence
  Description of Artificial Sequence: Synthetic oligonucleotide
  Antisense strand to SEQ ID NO: 2276364
uuauuccagggaugauacu

SEQ ID NO: 2276366 - RNA, 19 nt, Artificial Sequence
  Description of Artificial Sequence: Synthetic oligonucleotide
  Sense strand starting at position 3667 of SEQ ID NO: 1884581
uuagaauucccaggagccu

SEQ ID NO: 2276367 - RNA, 19 nt, Artificial Sequence
  Description of Artificial Sequence: Synthetic oligonucleotide
  Antisense strand to SEQ ID NO: 2276366
aggcuccugggaauucuaa

SEQ ID NO: 2276368 - RNA, 19 nt, Artificial Sequence
  Description of Artificial Sequence: Synthetic oligonucleotide
  Sense strand starting at position 3698 of SEQ ID NO: 1884581
uuuaguaguucucucuacu

SEQ ID NO: 2276369 - RNA, 19 nt, Artificial Sequence
  Description of Artificial Sequence: Synthetic oligonucleotide
  Antisense strand to SEQ ID NO: 2276368
aguagagagaacuacuaaa

SEQ ID NO: 2276370 - RNA, 19 nt, Artificial Sequence
  Description of Artificial Sequence: Synthetic oligonucleotide
  Sense strand starting at position 3701 of SEQ ID NO: 1884581
aguaguucucucuacuuaa

SEQ ID NO: 2276371 - RNA, 19 nt, Artificial Sequence
  Description of Artificial Sequence: Synthetic oligonucleotide
  Antisense strand to SEQ ID NO: 2276370
uuaaguagagagaacuacu

SEQ ID NO: 2276372 - RNA, 19 nt, Artificial Sequence
  Description of Artificial Sequence: Synthetic oligonucleotide
  Sense strand starting at position 3900 of SEQ ID NO: 1884581
gcaggaaccguccaaacau

SEQ ID NO: 2276373 - RNA, 19 nt, Artificial Sequence
  Description of Artificial Sequence: Synthetic oligonucleotide
  Antisense strand to SEQ ID NO: 2276372
auguuuggacgguuccugc

SEQ ID NO: 2276374 - RNA, 19 nt, Artificial Sequence
  Description of Artificial Sequence: Synthetic oligonucleotide
  Sense strand starting at position 22 of SEQ ID NO: 1884582
gauauucuagccuggucaa

SEQ ID NO: 2276375 - RNA, 19 nt, Artificial Sequence
  Description of Artificial Sequence: Synthetic oligonucleotide
  Antisense strand to SEQ ID NO: 2276374
uugaccaggcuagaauauc

SEQ ID NO: 2276376 - RNA, 19 nt, Artificial Sequence
  Description of Artificial Sequence: Synthetic oligonucleotide
  Sense strand starting at position 29 of SEQ ID NO: 1884582
uagccuggucaacaugaua

SEQ ID NO: 2276377 - RNA, 19 nt, Artificial Sequence
  Description of Artificial Sequence: Synthetic oligonucleotide
  Antisense strand to SEQ ID NO: 2276376
uaucauguugaccaggcua

SEQ ID NO: 2276378 - RNA, 19 nt, Artificial Sequence
  Description of Artificial Sequence: Synthetic oligonucleotide
  Sense strand starting at position 298 of SEQ ID NO: 1884582
augauauucucacccaguu

SEQ ID NO: 2276379 - RNA, 19 nt, Artificial Sequence
  Description of Artificial Sequence: Synthetic oligonucleotide
  Antisense strand to SEQ ID NO: 2276378
aacugggugagaauaucau

SEQ ID NO: 2276380 - RNA, 19 nt, Artificial Sequence
  Description of Artificial Sequence: Synthetic oligonucleotide
  Sense strand starting at position 417 of SEQ ID NO: 1884582
ugaugcuguacguaagaau

SEQ ID NO: 2276381 - RNA, 19 nt, Artificial Sequence
  Description of Artificial Sequence: Synthetic oligonucleotide
  Antisense strand to SEQ ID NO: 2276380
auucuuacguacagcauca

SEQ ID NO: 2276382 - RNA, 19 nt, Artificial Sequence
  Description of Artificial Sequence: Synthetic oligonucleotide
  Sense strand starting at position 442 of SEQ ID NO: 1884582
gcuauaaagguuuacuucu

SEQ ID NO: 2276383 - RNA, 19 nt, Artificial Sequence
  Description of Artificial Sequence: Synthetic oligonucleotide
  Antisense strand to SEQ ID NO: 2276382
agaaguaaaccuuuauagc

SEQ ID NO: 2276384 - RNA, 19 nt, Artificial Sequence
  Description of Artificial Sequence: Synthetic oligonucleotide
  Sense strand starting at position 448 of SEQ ID NO: 1884582
aagguuuacuucuugaagu

SEQ ID NO: 2276385 - RNA, 19 nt, Artificial Sequence
  Description of Artificial Sequence: Synthetic oligonucleotide
  Antisense strand to SEQ ID NO: 2276384
acuucaagaaguaaaccuu

SEQ ID NO: 2276386 - RNA, 19 nt, Artificial Sequence
  Description of Artificial Sequence: Synthetic oligonucleotide
  Sense strand starting at position 450 of SEQ ID NO: 1884582
gguuuacuucuugaaguuc

SEQ ID NO: 2276387 - RNA, 19 nt, Artificial Sequence
  Description of Artificial Sequence: Synthetic oligonucleotide
  Antisense strand to SEQ ID NO: 2276386
gaacuucaagaaguaaacc

SEQ ID NO: 2276388 - RNA, 19 nt, Artificial Sequence
  Description of Artificial Sequence: Synthetic oligonucleotide
  Sense strand starting at position 571 of SEQ ID NO: 1884582
agagaaguaaacugugcuu

SEQ ID NO: 2276389 - RNA, 19 nt, Artificial Sequence
  Description of Artificial Sequence: Synthetic oligonucleotide
  Antisense strand to SEQ ID NO: 2276388
aagcacaguuuacuucucu

SEQ ID NO: 2276390 - RNA, 19 nt, Artificial Sequence
  Description of Artificial Sequence: Synthetic oligonucleotide
  Sense strand starting at position 1056 of SEQ ID NO: 1884582
ugauaucuccucuaagguu

SEQ ID NO: 2276391 - RNA, 19 nt, Artificial Sequence
  Description of Artificial Sequence: Synthetic oligonucleotide
  Antisense strand to SEQ ID NO: 2276390
aaccuuagaggagauauca

SEQ ID NO: 2276392 - RNA, 19 nt, Artificial Sequence
  Description of Artificial Sequence: Synthetic oligonucleotide
  Sense strand starting at position 1094 of SEQ ID NO: 1884582
aucuaauggcaguaauauu

SEQ ID NO: 2276393 - RNA, 19 nt, Artificial Sequence
  Description of Artificial Sequence: Synthetic oligonucleotide
  Antisense strand to SEQ ID NO: 2276392
aauauuacugccauuagau

SEQ ID NO: 2276394 - RNA, 19 nt, Artificial Sequence
  Description of Artificial Sequence: Synthetic oligonucleotide
  Sense strand starting at position 1153 of SEQ ID NO: 1884582
agguucuaacucuguagaa

SEQ ID NO: 2276395 - RNA, 19 nt, Artificial Sequence
  Description of Artificial Sequence: Synthetic oligonucleotide
  Antisense strand to SEQ ID NO: 2276394
uucuacagaguuagaaccu

SEQ ID NO: 2276396 - RNA, 19 nt, Artificial Sequence
  Description of Artificial Sequence: Synthetic oligonucleotide
  Sense strand starting at position 1154 of SEQ ID NO: 1884582
gguucuaacucuguagaau

SEQ ID NO: 2276397 - RNA, 19 nt, Artificial Sequence
  Description of Artificial Sequence: Synthetic oligonucleotide
  Antisense strand to SEQ ID NO: 2276396
auucuacagaguuagaacc

SEQ ID NO: 2276398 - RNA, 19 nt, Artificial Sequence
  Description of Artificial Sequence: Synthetic oligonucleotide
  Sense strand starting at position 1155 of SEQ ID NO: 1884582
guucuaacucuguagaauu

SEQ ID NO: 2276399 - RNA, 19 nt, Artificial Sequence
  Description of Artificial Sequence: Synthetic oligonucleotide
  Antisense strand to SEQ ID NO: 2276398
aauucuacagaguuagaac

SEQ ID NO: 2276400 - RNA, 19 nt, Artificial Sequence
  Description of Artificial Sequence: Synthetic oligonucleotide
  Sense strand starting at position 1274 of SEQ ID NO: 1884582
ggcuuauuauaugucaaau

SEQ ID NO: 2276401 - RNA, 19 nt, Artificial Sequence
  Description of Artificial Sequence: Synthetic oligonucleotide
  Antisense strand to SEQ ID NO: 2276400
auuugacauauaauaagcc

SEQ ID NO: 2276402 - RNA, 19 nt, Artificial Sequence
  Description of Artificial Sequence: Synthetic oligonucleotide
  Sense strand starting at position 1286 of SEQ ID NO: 1884582
gucaaauacuguucuaacu

SEQ ID NO: 2276403 - RNA, 19 nt, Artificial Sequence
  Description of Artificial Sequence: Synthetic oligonucleotide
  Antisense strand to SEQ ID NO: 2276402
aguuagaacaguauuugac

SEQ ID NO: 2276404 - RNA, 19 nt, Artificial Sequence
  Description of Artificial Sequence: Synthetic oligonucleotide
  Sense strand starting at position 1391 of SEQ ID NO: 1884582
uugagaaguuguuuaucca

SEQ ID NO: 2276405 - RNA, 19 nt, Artificial Sequence
  Description of Artificial Sequence: Synthetic oligonucleotide
  Antisense strand to SEQ ID NO: 2276404
uggauaaacaacuucucaa

SEQ ID NO: 2276406 - RNA, 19 nt, Artificial Sequence
  Description of Artificial Sequence: Synthetic oligonucleotide
  Sense strand starting at position 1392 of SEQ ID NO: 1884582
ugagaaguuguuuauccaa

SEQ ID NO: 2276407 - RNA, 19 nt, Artificial Sequence
  Description of Artificial Sequence: Synthetic oligonucleotide
  Antisense strand to SEQ ID NO: 2276406
uuggauaaacaacuucuca

SEQ ID NO: 2276408 - RNA, 19 nt, Artificial Sequence
  Description of Artificial Sequence: Synthetic oligonucleotide
  Sense strand starting at position 1395 of SEQ ID NO: 1884582
gaaguuguuuauccaaggu

SEQ ID NO: 2276409 - RNA, 19 nt, Artificial Sequence
  Description of Artificial Sequence: Synthetic oligonucleotide
  Antisense strand to SEQ ID NO: 2276408
accuuggauaaacaacuuc

SEQ ID NO: 2276410 - RNA, 19 nt, Artificial Sequence
  Description of Artificial Sequence: Synthetic oligonucleotide
  Sense strand starting at position 1444 of SEQ ID NO: 1884582
acuuuaguucuagagccua

SEQ ID NO: 2276411 - RNA, 19 nt, Artificial Sequence
  Description of Artificial Sequence: Synthetic oligonucleotide
  Antisense strand to SEQ ID NO: 2276410
uaggcucuagaacuaaagu

SEQ ID NO: 2276412 - RNA, 19 nt, Artificial Sequence
  Description of Artificial Sequence: Synthetic oligonucleotide
  Sense strand starting at position 1449 of SEQ ID NO: 1884582
aguucuagagccuauacuu

SEQ ID NO: 2276413 - RNA, 19 nt, Artificial Sequence
  Description of Artificial Sequence: Synthetic oligonucleotide
  Antisense strand to SEQ ID NO: 2276412
aaguauaggcucuagaacu

SEQ ID NO: 2276414 - RNA, 19 nt, Artificial Sequence
  Description of Artificial Sequence: Synthetic oligonucleotide
  Sense strand starting at position 1484 of SEQ ID NO: 1884582
aacuuucucugguuaagag

SEQ ID NO: 2276415 - RNA, 19 nt, Artificial Sequence
  Description of Artificial Sequence: Synthetic oligonucleotide
  Antisense strand to SEQ ID NO: 2276414
cucuuaaccagagaaaguu

SEQ ID NO: 2276416 - RNA, 19 nt, Artificial Sequence
  Description of Artificial Sequence: Synthetic oligonucleotide
  Sense strand starting at position 2407 of SEQ ID NO: 1884582
augcaagcaucuguauaaa

SEQ ID NO: 2276417 - RNA, 19 nt, Artificial Sequence
  Description of Artificial Sequence: Synthetic oligonucleotide
  Antisense strand to SEQ ID NO: 2276416
uuuauacagaugcuugcau

SEQ ID NO: 2276418 - RNA, 19 nt, Artificial Sequence
  Description of Artificial Sequence: Synthetic oligonucleotide
  Sense strand starting at position 2463 of SEQ ID NO: 1884582
guucuaaagcauuggagga

SEQ ID NO: 2276419 - RNA, 19 nt, Artificial Sequence
  Description of Artificial Sequence: Synthetic oligonucleotide
  Antisense strand to SEQ ID NO: 2276418
uccuccaaugcuuuagaac

SEQ ID NO: 2276420 - RNA, 19 nt, Artificial Sequence
  Description of Artificial Sequence: Synthetic oligonucleotide
  Sense strand starting at position 2537 of SEQ ID NO: 1884582
uggcuauuucuuugggucu

SEQ ID NO: 2276421 - RNA, 19 nt, Artificial Sequence
  Description of Artificial Sequence: Synthetic oligonucleotide
  Antisense strand to SEQ ID NO: 2276420
agacccaaagaaauagcca

SEQ ID NO: 2276422 - RNA, 19 nt, Artificial Sequence
  Description of Artificial Sequence: Synthetic oligonucleotide
  Sense strand starting at position 2549 of SEQ ID NO: 1884582
ugggucuuauacuccugau

SEQ ID NO: 2276423 - RNA, 19 nt, Artificial Sequence
  Description of Artificial Sequence: Synthetic oligonucleotide
  Antisense strand to SEQ ID NO: 2276422
aucaggaguauaagaccca

SEQ ID NO: 2276424 - RNA, 19 nt, Artificial Sequence
  Description of Artificial Sequence: Synthetic oligonucleotide
  Sense strand starting at position 2553 of SEQ ID NO: 1884582
ucuuauacuccugauucgu

SEQ ID NO: 2276425 - RNA, 19 nt, Artificial Sequence
  Description of Artificial Sequence: Synthetic oligonucleotide
  Antisense strand to SEQ ID NO: 2276424
acgaaucaggaguauaaga

SEQ ID NO: 2276426 - RNA, 19 nt, Artificial Sequence
  Description of Artificial Sequence: Synthetic oligonucleotide
  Sense strand starting at position 2555 of SEQ ID NO: 1884582
uuauacuccugauucguaa

SEQ ID NO: 2276427 - RNA, 19 nt, Artificial Sequence
  Description of Artificial Sequence: Synthetic oligonucleotide
  Antisense strand to SEQ ID NO: 2276426
uuacgaaucaggaguauaa

SEQ ID NO: 2276428 - RNA, 19 nt, Artificial Sequence
  Description of Artificial Sequence: Synthetic oligonucleotide
  Sense strand starting at position 2602 of SEQ ID NO: 1884582
aagugucuugagcaaguaa

SEQ ID NO: 2276429 - RNA, 19 nt, Artificial Sequence
  Description of Artificial Sequence: Synthetic oligonucleotide
  Antisense strand to SEQ ID NO: 2276428
uuacuugcucaagacacuu

SEQ ID NO: 2276430 - RNA, 19 nt, Artificial Sequence
  Description of Artificial Sequence: Synthetic oligonucleotide
  Sense strand starting at position 2706 of SEQ ID NO: 1884582
cagcaaaugcuguggaaag

SEQ ID NO: 2276431 - RNA, 19 nt, Artificial Sequence
  Description of Artificial Sequence: Synthetic oligonucleotide
  Antisense strand to SEQ ID NO: 2276430
cuuuccacagcauuugcug

SEQ ID NO: 2276432 - RNA, 19 nt, Artificial Sequence
  Description of Artificial Sequence: Synthetic oligonucleotide
  Sense strand starting at position 2983 of SEQ ID NO: 1884582
uaaaguaagcacugcagau

SEQ ID NO: 2276433 - RNA, 19 nt, Artificial Sequence
  Description of Artificial Sequence: Synthetic oligonucleotide
  Antisense strand to SEQ ID NO: 2276432
aucugcagugcuuacuuua

SEQ ID NO: 2276434 - RNA, 19 nt, Artificial Sequence
  Description of Artificial Sequence: Synthetic oligonucleotide
  Sense strand starting at position 2987 of SEQ ID NO: 1884582
guaagcacugcagaucaua

SEQ ID NO: 2276435 - RNA, 19 nt, Artificial Sequence
  Description of Artificial Sequence: Synthetic oligonucleotide
  Antisense strand to SEQ ID NO: 2276434
uaugaucugcagugcuuac

SEQ ID NO: 2276436 - RNA, 19 nt, Artificial Sequence
  Description of Artificial Sequence: Synthetic oligonucleotide
  Sense strand starting at position 3035 of SEQ ID NO: 1884582
accaaaguauuugaugaau

SEQ ID NO: 2276437 - RNA, 19 nt, Artificial Sequence
  Description of Artificial Sequence: Synthetic oligonucleotide
  Antisense strand to SEQ ID NO: 2276436
auucaucaaauacuuuggu

SEQ ID NO: 2276438 - RNA, 19 nt, Artificial Sequence
  Description of Artificial Sequence: Synthetic oligonucleotide
  Sense strand starting at position 3089 of SEQ ID NO: 1884582
aggguagauuuguaaagga

SEQ ID NO: 2276439 - RNA, 19 nt, Artificial Sequence
  Description of Artificial Sequence: Synthetic oligonucleotide
  Antisense strand to SEQ ID NO: 2276438
uccuuuacaaaucuacccu

SEQ ID NO: 2276440 - RNA, 19 nt, Artificial Sequence
  Description of Artificial Sequence: Synthetic oligonucleotide
  Sense strand starting at position 3135 of SEQ ID NO: 1884582
cuagaauuacaauggucuu

SEQ ID NO: 2276441 - RNA, 19 nt, Artificial Sequence
  Description of Artificial Sequence: Synthetic oligonucleotide
  Antisense strand to SEQ ID NO: 2276440
aagaccauuguaauucuag

SEQ ID NO: 2276442 - RNA, 19 nt, Artificial Sequence
  Description of Artificial Sequence: Synthetic oligonucleotide
  Sense strand starting at position 3451 of SEQ ID NO: 1884582
cucuuagaaccugguuaau

SEQ ID NO: 2276443 - RNA, 19 nt, Artificial Sequence
  Description of Artificial Sequence: Synthetic oligonucleotide
  Antisense strand to SEQ ID NO: 2276442
auuaaccagguucuaagag

SEQ ID NO: 2276444 - RNA, 19 nt, Artificial Sequence
  Description of Artificial Sequence: Synthetic oligonucleotide
  Sense strand starting at position 3475 of SEQ ID NO: 1884582
uaucaaguacagugaugua

SEQ ID NO: 2276445 - RNA, 19 nt, Artificial Sequence
  Description of Artificial Sequence: Synthetic oligonucleotide
  Antisense strand to SEQ ID NO: 2276444
uacaucacuguacuugaua

SEQ ID NO: 2276446 - RNA, 19 nt, Artificial Sequence
  Description of Artificial Sequence: Synthetic oligonucleotide
  Sense strand starting at position 3637 of SEQ ID NO: 1884582
agcucuagauacucugaca

SEQ ID NO: 2276447 - RNA, 19 nt, Artificial Sequence
  Description of Artificial Sequence: Synthetic oligonucleotide
  Antisense strand to SEQ ID NO: 2276446
ugucagaguaucuagagcu

SEQ ID NO: 2276448 - RNA, 19 nt, Artificial Sequence
  Description of Artificial Sequence: Synthetic oligonucleotide
  Sense strand starting at position 3809 of SEQ ID NO: 1884582
ggugguuuccuuuaccuua

SEQ ID NO: 2276449 - RNA, 19 nt, Artificial Sequence
  Description of Artificial Sequence: Synthetic oligonucleotide
  Antisense strand to SEQ ID NO: 2276448
uaagguaaaggaaaccacc

SEQ ID NO: 2276450 - RNA, 19 nt, Artificial Sequence
  Description of Artificial Sequence: Synthetic oligonucleotide
  Sense strand starting at position 3866 of SEQ ID NO: 1884582
guagguacucaacagguau

SEQ ID NO: 2276451 - RNA, 19 nt, Artificial Sequence
  Description of Artificial Sequence: Synthetic oligonucleotide
  Antisense strand to SEQ ID NO: 2276450
auaccuguugaguaccuac

SEQ ID NO: 2276452 - RNA, 19 nt, Artificial Sequence
  Description of Artificial Sequence: Synthetic oligonucleotide
  Sense strand starting at position 3963 of SEQ ID NO: 1884582
guuguuuaacaucaagaca

SEQ ID NO: 2276453 - RNA, 19 nt, Artificial Sequence
  Description of Artificial Sequence: Synthetic oligonucleotide
  Antisense strand to SEQ ID NO: 2276452
ugucuugauguuaaacaac

SEQ ID NO: 2276454 - RNA, 19 nt, Artificial Sequence
  Description of Artificial Sequence: Synthetic oligonucleotide
  Sense strand starting at position 88 of SEQ ID NO: 1884583
gcuguuggcucugguauga

SEQ ID NO: 2276455 - RNA, 19 nt, Artificial Sequence
  Description of Artificial Sequence: Synthetic oligonucleotide
  Antisense strand to SEQ ID NO: 2276454
ucauaccagagccaacagc

SEQ ID NO: 2276456 - RNA, 19 nt, Artificial Sequence
  Description of Artificial Sequence: Synthetic oligonucleotide
  Sense strand starting at position 150 of SEQ ID NO: 1884583
cuggugugagggugguuaa

SEQ ID NO: 2276457 - RNA, 19 nt, Artificial Sequence
  Description of Artificial Sequence: Synthetic oligonucleotide
  Antisense strand to SEQ ID NO: 2276456
uuaaccacccucacaccag

SEQ ID NO: 2276458 - RNA, 19 nt, Artificial Sequence
  Description of Artificial Sequence: Synthetic oligonucleotide
  Sense strand starting at position 151 of SEQ ID NO: 1884583
uggugugagggugguuaaa

SEQ ID NO: 2276459 - RNA, 19 nt, Artificial Sequence
  Description of Artificial Sequence: Synthetic oligonucleotide
  Antisense strand to SEQ ID NO: 2276458
uuuaaccacccucacacca

SEQ ID NO: 2276460 - RNA, 19 nt, Artificial Sequence
  Description of Artificial Sequence: Synthetic oligonucleotide
  Sense strand starting at position 153 of SEQ ID NO: 1884583
gugugagggugguuaaauu

SEQ ID NO: 2276461 - RNA, 19 nt, Artificial Sequence
  Description of Artificial Sequence: Synthetic oligonucleotide
  Antisense strand to SEQ ID NO: 2276460
aauuuaaccacccucacac

SEQ ID NO: 2276462 - RNA, 19 nt, Artificial Sequence
  Description of Artificial Sequence: Synthetic oligonucleotide
  Sense strand starting at position 402 of SEQ ID NO: 1884583
ucacuugccugcgaggaaa

SEQ ID NO: 2276463 - RNA, 19 nt, Artificial Sequence
  Description of Artificial Sequence: Synthetic oligonucleotide
  Antisense strand to SEQ ID NO: 2276462
uuuccucgcaggcaaguga

SEQ ID NO: 2276464 - RNA, 19 nt, Artificial Sequence
  Description of Artificial Sequence: Synthetic oligonucleotide
  Sense strand starting at position 490 of SEQ ID NO: 1884583
gaguguggcagaugagaca

SEQ ID NO: 2276465 - RNA, 19 nt, Artificial Sequence
  Description of Artificial Sequence: Synthetic oligonucleotide
  Antisense strand to SEQ ID NO: 2276464
ugucucaucugccacacuc

SEQ ID NO: 2276466 - RNA, 19 nt, Artificial Sequence
  Description of Artificial Sequence: Synthetic oligonucleotide
  Sense strand starting at position 523 of SEQ ID NO: 1884583
cguugacguuccaggagau

SEQ ID NO: 2276467 - RNA, 19 nt, Artificial Sequence
  Description of Artificial Sequence: Synthetic oligonucleotide
  Antisense strand to SEQ ID NO: 2276466
aucuccuggaacgucaacg

SEQ ID NO: 2276468 - RNA, 19 nt, Artificial Sequence
  Description of Artificial Sequence: Synthetic oligonucleotide
  Sense strand starting at position 930 of SEQ ID NO: 1884583
uggccugucugggaugaga

SEQ ID NO: 2276469 - RNA, 19 nt, Artificial Sequence
  Description of Artificial Sequence: Synthetic oligonucleotide
  Antisense strand to SEQ ID NO: 2276468
ucucaucccagacaggcca

SEQ ID NO: 2276470 - RNA, 19 nt, Artificial Sequence
  Description of Artificial Sequence: Synthetic oligonucleotide
  Sense strand starting at position 932 of SEQ ID NO: 1884583
gccugucugggaugagaga

SEQ ID NO: 2276471 - RNA, 19 nt, Artificial Sequence
  Description of Artificial Sequence: Synthetic oligonucleotide
  Antisense strand to SEQ ID NO: 2276470
ucucucaucccagacaggc

SEQ ID NO: 2276472 - RNA, 19 nt, Artificial Sequence
  Description of Artificial Sequence: Synthetic oligonucleotide
  Sense strand starting at position 953 of SEQ ID NO: 1884583
ggucagagggucugggaaa

SEQ ID NO: 2276473 - RNA, 19 nt, Artificial Sequence
  Description of Artificial Sequence: Synthetic oligonucleotide
  Antisense strand to SEQ ID NO: 2276472
uuucccagacccucugacc

SEQ ID NO: 2276474 - RNA, 19 nt, Artificial Sequence
  Description of Artificial Sequence: Synthetic oligonucleotide
  Sense strand starting at position 1259 of SEQ ID NO: 1884583
accaguaguuccugugguu

SEQ ID NO: 2276475 - RNA, 19 nt, Artificial Sequence
  Description of Artificial Sequence: Synthetic oligonucleotide
  Antisense strand to SEQ ID NO: 2276474
aaccacaggaacuacuggu

SEQ ID NO: 2276476 - RNA, 19 nt, Artificial Sequence
  Description of Artificial Sequence: Synthetic oligonucleotide
  Sense strand starting at position 1287 of SEQ ID NO: 1884583
gcgauaucaugguguccaa

SEQ ID NO: 2276477 - RNA, 19 nt, Artificial Sequence
  Description of Artificial Sequence: Synthetic oligonucleotide
  Antisense strand to SEQ ID NO: 2276476
uuggacaccaugauaucgc

SEQ ID NO: 2276478 - RNA, 19 nt, Artificial Sequence
  Description of Artificial Sequence: Synthetic oligonucleotide
  Sense strand starting at position 1541 of SEQ ID NO: 1884583
gaggguugccaucagccaa

SEQ ID NO: 2276479 - RNA, 19 nt, Artificial Sequence
  Description of Artificial Sequence: Synthetic oligonucleotide
  Antisense strand to SEQ ID NO: 2276478
uuggcugauggcaacccuc

SEQ ID NO: 2276480 - RNA, 19 nt, Artificial Sequence
  Description of Artificial Sequence: Synthetic oligonucleotide
  Sense strand starting at position 1655 of SEQ ID NO: 1884583
uagcucuuggcccaugagu

SEQ ID NO: 2276481 - RNA, 19 nt, Artificial Sequence
  Description of Artificial Sequence: Synthetic oligonucleotide
  Antisense strand to SEQ ID NO: 2276480
acucaugggccaagagcua

SEQ ID NO: 2276482 - RNA, 19 nt, Artificial Sequence
  Description of Artificial Sequence: Synthetic oligonucleotide
  Sense strand starting at position 1657 of SEQ ID NO: 1884583
gcucuuggcccaugaguca

SEQ ID NO: 2276483 - RNA, 19 nt, Artificial Sequence
  Description of Artificial Sequence: Synthetic oligonucleotide
  Antisense strand to SEQ ID NO: 2276482
ugacucaugggccaagagc

SEQ ID NO: 2276484 - RNA, 19 nt, Artificial Sequence
  Description of Artificial Sequence: Synthetic oligonucleotide
  Sense strand starting at position 1733 of SEQ ID NO: 1884583
agcagagagucagguuagu

SEQ ID NO: 2276485 - RNA, 19 nt, Artificial Sequence
  Description of Artificial Sequence: Synthetic oligonucleotide
  Antisense strand to SEQ ID NO: 2276484
acuaaccugacucucugcu

SEQ ID NO: 2276486 - RNA, 19 nt, Artificial Sequence
  Description of Artificial Sequence: Synthetic oligonucleotide
  Sense strand starting at position 1742 of SEQ ID NO: 1884583
ucagguuaguacucacaga

SEQ ID NO: 2276487 - RNA, 19 nt, Artificial Sequence
  Description of Artificial Sequence: Synthetic oligonucleotide
  Antisense strand to SEQ ID NO: 2276486
ucugugaguacuaaccuga

SEQ ID NO: 2276488 - RNA, 19 nt, Artificial Sequence
  Description of Artificial Sequence: Synthetic oligonucleotide
  Sense strand starting at position 1815 of SEQ ID NO: 1884583
gguaguugagcucacagua

SEQ ID NO: 2276489 - RNA, 19 nt, Artificial Sequence
  Description of Artificial Sequence: Synthetic oligonucleotide
  Antisense strand to SEQ ID NO: 2276488
uacugugagcucaacuacc

SEQ ID NO: 2276490 - RNA, 19 nt, Artificial Sequence
  Description of Artificial Sequence: Synthetic oligonucleotide
  Sense strand starting at position 1872 of SEQ ID NO: 1884583
ucagaauacucugcaaggu

SEQ ID NO: 2276491 - RNA, 19 nt, Artificial Sequence
  Description of Artificial Sequence: Synthetic oligonucleotide
  Antisense strand to SEQ ID NO: 2276490
accuugcagaguauucuga

SEQ ID NO: 2276492 - RNA, 19 nt, Artificial Sequence
  Description of Artificial Sequence: Synthetic oligonucleotide
  Sense strand starting at position 2146 of SEQ ID NO: 1884583
auccaaggaugugugcaaa

SEQ ID NO: 2276493 - RNA, 19 nt, Artificial Sequence
  Description of Artificial Sequence: Synthetic oligonucleotide
  Antisense strand to SEQ ID NO: 2276492
uuugcacacauccuuggau

SEQ ID NO: 2276494 - RNA, 19 nt, Artificial Sequence
  Description of Artificial Sequence: Synthetic oligonucleotide
  Sense strand starting at position 2192 of SEQ ID NO: 1884583
ccgucuagauguccacuaa

SEQ ID NO: 2276495 - RNA, 19 nt, Artificial Sequence
  Description of Artificial Sequence: Synthetic oligonucleotide
  Antisense strand to SEQ ID NO: 2276494
uuaguggacaucuagacgg

SEQ ID NO: 2276496 - RNA, 19 nt, Artificial Sequence
  Description of Artificial Sequence: Synthetic oligonucleotide
  Sense strand starting at position 2193 of SEQ ID NO: 1884583
cgucuagauguccacuaaa

SEQ ID NO: 2276497 - RNA, 19 nt, Artificial Sequence
  Description of Artificial Sequence: Synthetic oligonucleotide
  Antisense strand to SEQ ID NO: 2276496
uuuaguggacaucuagacg

SEQ ID NO: 2276498 - RNA, 19 nt, Artificial Sequence
  Description of Artificial Sequence: Synthetic oligonucleotide
  Sense strand starting at position 2236 of SEQ ID NO: 1884583
ugcuaugcguaguauggaa

SEQ ID NO: 2276499 - RNA, 19 nt, Artificial Sequence
  Description of Artificial Sequence: Synthetic oligonucleotide
  Antisense strand to SEQ ID NO: 2276498
uuccauacuacgcauagca

SEQ ID NO: 2276500 - RNA, 19 nt, Artificial Sequence
  Description of Artificial Sequence: Synthetic oligonucleotide
  Sense strand starting at position 2273 of SEQ ID NO: 1884583
acgaucaguugaucuaaau

SEQ ID NO: 2276501 - RNA, 19 nt, Artificial Sequence
  Description of Artificial Sequence: Synthetic oligonucleotide
  Antisense strand to SEQ ID NO: 2276500
auuuagaucaacugaucgu

SEQ ID NO: 2276502 - RNA, 19 nt, Artificial Sequence
  Description of Artificial Sequence: Synthetic oligonucleotide
  Sense strand starting at position 2361 of SEQ ID NO: 1884583
aggguuucucagcacuacu

SEQ ID NO: 2276503 - RNA, 19 nt, Artificial Sequence
  Description of Artificial Sequence: Synthetic oligonucleotide
  Antisense strand to SEQ ID NO: 2276502
aguagugcugagaaacccu

SEQ ID NO: 2276504 - RNA, 19 nt, Artificial Sequence
  Description of Artificial Sequence: Synthetic oligonucleotide
  Sense strand starting at position 2364 of SEQ ID NO: 1884583
guuucucagcacuacugau

SEQ ID NO: 2276505 - RNA, 19 nt, Artificial Sequence
  Description of Artificial Sequence: Synthetic oligonucleotide
  Antisense strand to SEQ ID NO: 2276504
aucaguagugcugagaaac

SEQ ID NO: 2276506 - RNA, 19 nt, Artificial Sequence
  Description of Artificial Sequence: Synthetic oligonucleotide
  Sense strand starting at position 2702 of SEQ ID NO: 1884583
cacguugauucuuuauugu

SEQ ID NO: 2276507 - RNA, 19 nt, Artificial Sequence
  Description of Artificial Sequence: Synthetic oligonucleotide
  Antisense strand to SEQ ID NO: 2276506
acaauaaagaaucaacgug

SEQ ID NO: 2276508 - RNA, 19 nt, Artificial Sequence
  Description of Artificial Sequence: Synthetic oligonucleotide
  Sense strand starting at position 2724 of SEQ ID NO: 1884583
ggcuguccugugcccuaua

SEQ ID NO: 2276509 - RNA, 19 nt, Artificial Sequence
  Description of Artificial Sequence: Synthetic oligonucleotide
  Antisense strand to SEQ ID NO: 2276508
uauagggcacaggacagcc

SEQ ID NO: 2276510 - RNA, 19 nt, Artificial Sequence
  Description of Artificial Sequence: Synthetic oligonucleotide
  Sense strand starting at position 2727 of SEQ ID NO: 1884583
uguccugugcccuauagga

SEQ ID NO: 2276511 - RNA, 19 nt, Artificial Sequence
  Description of Artificial Sequence: Synthetic oligonucleotide
  Antisense strand to SEQ ID NO: 2276510
uccuauagggcacaggaca

SEQ ID NO: 2276512 - RNA, 19 nt, Artificial Sequence
  Description of Artificial Sequence: Synthetic oligonucleotide
  Sense strand starting at position 2796 of SEQ ID NO: 1884583
cucuaugugugacaaccaa

SEQ ID NO: 2276513 - RNA, 19 nt, Artificial Sequence
  Description of Artificial Sequence: Synthetic oligonucleotide
  Antisense strand to SEQ ID NO: 2276512
uugguugucacacauagag

SEQ ID NO: 2276514 - RNA, 19 nt, Artificial Sequence
  Description of Artificial Sequence: Synthetic oligonucleotide
  Sense strand starting at position 2870 of SEQ ID NO: 1884583
ccugguuaagaaugacuga

SEQ ID NO: 2276515 - RNA, 19 nt, Artificial Sequence
  Description of Artificial Sequence: Synthetic oligonucleotide
  Antisense strand to SEQ ID NO: 2276514
ucagucauucuuaaccagg

SEQ ID NO: 2276516 - RNA, 19 nt, Artificial Sequence
  Description of Artificial Sequence: Synthetic oligonucleotide
  Sense strand starting at position 3020 of SEQ ID NO: 1884583
agaagaaacuucuagauuu

SEQ ID NO: 2276517 - RNA, 19 nt, Artificial Sequence
  Description of Artificial Sequence: Synthetic oligonucleotide
  Antisense strand to SEQ ID NO: 2276516
aaaucuagaaguuucuucu

SEQ ID NO: 2276518 - RNA, 19 nt, Artificial Sequence
  Description of Artificial Sequence: Synthetic oligonucleotide
  Sense strand starting at position 3122 of SEQ ID NO: 1884583
ggcaguuccuguguaguac

SEQ ID NO: 2276519 - RNA, 19 nt, Artificial Sequence
  Description of Artificial Sequence: Synthetic oligonucleotide
  Antisense strand to SEQ ID NO: 2276518
guacuacacaggaacugcc

SEQ ID NO: 2276520 - RNA, 19 nt, Artificial Sequence
  Description of Artificial Sequence: Synthetic oligonucleotide
  Sense strand starting at position 3126 of SEQ ID NO: 1884583
guuccuguguaguaccaua

SEQ ID NO: 2276521 - RNA, 19 nt, Artificial Sequence
  Description of Artificial Sequence: Synthetic oligonucleotide
  Antisense strand to SEQ ID NO: 2276520
uaugguacuacacaggaac

SEQ ID NO: 2276522 - RNA, 19 nt, Artificial Sequence
  Description of Artificial Sequence: Synthetic oligonucleotide
  Sense strand starting at position 3500 of SEQ ID NO: 1884583
cggccauucuuguaccaga

SEQ ID NO: 2276523 - RNA, 19 nt, Artificial Sequence
  Description of Artificial Sequence: Synthetic oligonucleotide
  Antisense strand to SEQ ID NO: 2276522
ucugguacaagaauggccg

SEQ ID NO: 2276524 - RNA, 19 nt, Artificial Sequence
  Description of Artificial Sequence: Synthetic oligonucleotide
  Sense strand starting at position 3503 of SEQ ID NO: 1884583
ccauucuuguaccagauga

SEQ ID NO: 2276525 - RNA, 19 nt, Artificial Sequence
  Description of Artificial Sequence: Synthetic oligonucleotide
  Antisense strand to SEQ ID NO: 2276524
ucaucugguacaagaaugg

SEQ ID NO: 2276526 - RNA, 19 nt, Artificial Sequence
  Description of Artificial Sequence: Synthetic oligonucleotide
  Sense strand starting at position 3505 of SEQ ID NO: 1884583
auucuuguaccagaugacu

SEQ ID NO: 2276527 - RNA, 19 nt, Artificial Sequence
  Description of Artificial Sequence: Synthetic oligonucleotide
  Antisense strand to SEQ ID NO: 2276526
agucaucugguacaagaau

SEQ ID NO: 2276528 - RNA, 19 nt, Artificial Sequence
  Description of Artificial Sequence: Synthetic oligonucleotide
  Sense strand starting at position 711 of SEQ ID NO: 1884584
aagagugaacuguguagaa

SEQ ID NO: 2276529 - RNA, 19 nt, Artificial Sequence
  Description of Artificial Sequence: Synthetic oligonucleotide
  Antisense strand to SEQ ID NO: 2276528
uucuacacaguucacucuu

SEQ ID NO: 2276530 - RNA, 19 nt, Artificial Sequence
  Description of Artificial Sequence: Synthetic oligonucleotide
  Sense strand starting at position 811 of SEQ ID NO: 1884584
gggagagacugcuugagau

SEQ ID NO: 2276531 - RNA, 19 nt, Artificial Sequence
  Description of Artificial Sequence: Synthetic oligonucleotide
  Antisense strand to SEQ ID NO: 2276530
aucucaagcagucucuccc

SEQ ID NO: 2276532 - RNA, 19 nt, Artificial Sequence
  Description of Artificial Sequence: Synthetic oligonucleotide
  Sense strand starting at position 815 of SEQ ID NO: 1884584
gagacugcuugagaugaga

SEQ ID NO: 2276533 - RNA, 19 nt, Artificial Sequence
  Description of Artificial Sequence: Synthetic oligonucleotide
  Antisense strand to SEQ ID NO: 2276532
ucucaucucaagcagucuc

SEQ ID NO: 2276534 - RNA, 19 nt, Artificial Sequence
  Description of Artificial Sequence: Synthetic oligonucleotide
  Sense strand starting at position 989 of SEQ ID NO: 1884584
gcaggugaaggcuacgaua

SEQ ID NO: 2276535 - RNA, 19 nt, Artificial Sequence
  Description of Artificial Sequence: Synthetic oligonucleotide
  Antisense strand to SEQ ID NO: 2276534
uaucguagccuucaccugc

SEQ ID NO: 2276536 - RNA, 19 nt, Artificial Sequence
  Description of Artificial Sequence: Synthetic oligonucleotide
  Sense strand starting at position 1063 of SEQ ID NO: 1884584
ggcagauucugggccuuua

SEQ ID NO: 2276537 - RNA, 19 nt, Artificial Sequence
  Description of Artificial Sequence: Synthetic oligonucleotide
  Antisense strand to SEQ ID NO: 2276536
uaaaggcccagaaucugcc

SEQ ID NO: 2276538 - RNA, 19 nt, Artificial Sequence
  Description of Artificial Sequence: Synthetic oligonucleotide
  Sense strand starting at position 1313 of SEQ ID NO: 1884584
agaggucucccuggagcau

SEQ ID NO: 2276539 - RNA, 19 nt, Artificial Sequence
  Description of Artificial Sequence: Synthetic oligonucleotide
  Antisense strand to SEQ ID NO: 2276538
augcuccagggagaccucu

SEQ ID NO: 2276540 - RNA, 19 nt, Artificial Sequence
  Description of Artificial Sequence: Synthetic oligonucleotide
  Sense strand starting at position 1366 of SEQ ID NO: 1884584
ucagcagaacccugaaaug

SEQ ID NO: 2276541 - RNA, 19 nt, Artificial Sequence
  Description of Artificial Sequence: Synthetic oligonucleotide
  Antisense strand to SEQ ID NO: 2276540
cauuucaggguucugcuga

SEQ ID NO: 2276542 - RNA, 19 nt, Artificial Sequence
  Description of Artificial Sequence: Synthetic oligonucleotide
  Sense strand starting at position 1465 of SEQ ID NO: 1884584
caggaaugguccucccuca

SEQ ID NO: 2276543 - RNA, 19 nt, Artificial Sequence
  Description of Artificial Sequence: Synthetic oligonucleotide
  Antisense strand to SEQ ID NO: 2276542
ugagggaggaccauuccug

SEQ ID NO: 2276544 - RNA, 19 nt, Artificial Sequence
  Description of Artificial Sequence: Synthetic oligonucleotide
  Sense strand starting at position 1522 of SEQ ID NO: 1884584
ugaggacacucuuagugga

SEQ ID NO: 2276545 - RNA, 19 nt, Artificial Sequence
  Description of Artificial Sequence: Synthetic oligonucleotide
  Antisense strand to SEQ ID NO: 2276544
uccacuaagaguguccuca

SEQ ID NO: 2276546 - RNA, 19 nt, Artificial Sequence
  Description of Artificial Sequence: Synthetic oligonucleotide
  Sense strand starting at position 1524 of SEQ ID NO: 1884584
aggacacucuuaguggauu

SEQ ID NO: 2276547 - RNA, 19 nt, Artificial Sequence
  Description of Artificial Sequence: Synthetic oligonucleotide
  Antisense strand to SEQ ID NO: 2276546
aauccacuaagaguguccu

SEQ ID NO: 2276548 - RNA, 19 nt, Artificial Sequence
  Description of Artificial Sequence: Synthetic oligonucleotide
  Sense strand starting at position 1562 of SEQ ID NO: 1884584
ccuugugagcaccgagaaa

SEQ ID NO: 2276549 - RNA, 19 nt, Artificial Sequence
  Description of Artificial Sequence: Synthetic oligonucleotide
  Antisense strand to SEQ ID NO: 2276548
uuucucggugcucacaagg

SEQ ID NO: 2276550 - RNA, 19 nt, Artificial Sequence
  Description of Artificial Sequence: Synthetic oligonucleotide
  Sense strand starting at position 1629 of SEQ ID NO: 1884584
cucaauaacugcuagaaag

SEQ ID NO: 2276551 - RNA, 19 nt, Artificial Sequence
  Description of Artificial Sequence: Synthetic oligonucleotide
  Antisense strand to SEQ ID NO: 2276550
cuuucuagcaguuauugag

SEQ ID NO: 2276552 - RNA, 19 nt, Artificial Sequence
  Description of Artificial Sequence: Synthetic oligonucleotide
  Sense strand starting at position 1645 of SEQ ID NO: 1884584
aagugauggcuggaggcaa

SEQ ID NO: 2276553 - RNA, 19 nt, Artificial Sequence
  Description of Artificial Sequence: Synthetic oligonucleotide
  Antisense strand to SEQ ID NO: 2276552
uugccuccagccaucacuu

SEQ ID NO: 2276554 - RNA, 19 nt, Artificial Sequence
  Description of Artificial Sequence: Synthetic oligonucleotide
  Sense strand starting at position 1646 of SEQ ID NO: 1884584
agugauggcuggaggcaaa

SEQ ID NO: 2276555 - RNA, 19 nt, Artificial Sequence
  Description of Artificial Sequence: Synthetic oligonucleotide
  Antisense strand to SEQ ID NO: 2276554
uuugccuccagccaucacu

SEQ ID NO: 2276556 - RNA, 19 nt, Artificial Sequence
  Description of Artificial Sequence: Synthetic oligonucleotide
  Sense strand starting at position 2026 of SEQ ID NO: 1884584
ugccauugguccuuuauua

SEQ ID NO: 2276557 - RNA, 19 nt, Artificial Sequence
  Description of Artificial Sequence: Synthetic oligonucleotide
  Antisense strand to SEQ ID NO: 2276556
uaauaaaggaccaauggca

SEQ ID NO: 2276558 - RNA, 19 nt, Artificial Sequence
  Description of Artificial Sequence: Synthetic oligonucleotide
  Sense strand starting at position 2210 of SEQ ID NO: 1884584
agacgucagcccugaguca

SEQ ID NO: 2276559 - RNA, 19 nt, Artificial Sequence
  Description of Artificial Sequence: Synthetic oligonucleotide
  Antisense strand to SEQ ID NO: 2276558
ugacucagggcugacgucu

SEQ ID NO: 2276560 - RNA, 19 nt, Artificial Sequence
  Description of Artificial Sequence: Synthetic oligonucleotide
  Sense strand starting at position 2260 of SEQ ID NO: 1884584
ccgugugcggcucugaaau

SEQ ID NO: 2276561 - RNA, 19 nt, Artificial Sequence
  Description of Artificial Sequence: Synthetic oligonucleotide
  Antisense strand to SEQ ID NO: 2276560
auuucagagccgcacacgg

SEQ ID NO: 2276562 - RNA, 19 nt, Artificial Sequence
  Description of Artificial Sequence: Synthetic oligonucleotide
  Sense strand starting at position 2440 of SEQ ID NO: 1884584
cacggucacugcuuugaga

SEQ ID NO: 2276563 - RNA, 19 nt, Artificial Sequence
  Description of Artificial Sequence: Synthetic oligonucleotide
  Antisense strand to SEQ ID NO: 2276562
ucucaaagcagugaccgug

SEQ ID NO: 2276564 - RNA, 19 nt, Artificial Sequence
  Description of Artificial Sequence: Synthetic oligonucleotide
  Sense strand starting at position 2552 of SEQ ID NO: 1884584
cugcccugucucugggaau

SEQ ID NO: 2276565 - RNA, 19 nt, Artificial Sequence
  Description of Artificial Sequence: Synthetic oligonucleotide
  Antisense strand to SEQ ID NO: 2276564
auucccagagacagggcag

SEQ ID NO: 2276566 - RNA, 19 nt, Artificial Sequence
  Description of Artificial Sequence: Synthetic oligonucleotide
  Sense strand starting at position 2788 of SEQ ID NO: 1884584
gacuucugggcucagcaaa

SEQ ID NO: 2276567 - RNA, 19 nt, Artificial Sequence
  Description of Artificial Sequence: Synthetic oligonucleotide
  Antisense strand to SEQ ID NO: 2276566
uuugcugagcccagaaguc

SEQ ID NO: 2276568 - RNA, 19 nt, Artificial Sequence
  Description of Artificial Sequence: Synthetic oligonucleotide
  Sense strand starting at position 3317 of SEQ ID NO: 1884584
ugucaaauguagcuaucaa

SEQ ID NO: 2276569 - RNA, 19 nt, Artificial Sequence
  Description of Artificial Sequence: Synthetic oligonucleotide
  Antisense strand to SEQ ID NO: 2276568
uugauagcuacauuugaca

SEQ ID NO: 2276570 - RNA, 19 nt, Artificial Sequence
  Description of Artificial Sequence: Synthetic oligonucleotide
  Sense strand starting at position 3325 of SEQ ID NO: 1884584
guagcuaucaaauguaguu

SEQ ID NO: 2276571 - RNA, 19 nt, Artificial Sequence
  Description of Artificial Sequence: Synthetic oligonucleotide
  Antisense strand to SEQ ID NO: 2276570
aacuacauuugauagcuac

SEQ ID NO: 2276572 - RNA, 19 nt, Artificial Sequence
  Description of Artificial Sequence: Synthetic oligonucleotide
  Sense strand starting at position 3330 of SEQ ID NO: 1884584
uaucaaauguaguuucguu

SEQ ID NO: 2276573 - RNA, 19 nt, Artificial Sequence
  Description of Artificial Sequence: Synthetic oligonucleotide
  Antisense strand to SEQ ID NO: 2276572
aacgaaacuacauuugaua

SEQ ID NO: 2276574 - RNA, 19 nt, Artificial Sequence
  Description of Artificial Sequence: Synthetic oligonucleotide
  Sense strand starting at position 3337 of SEQ ID NO: 1884584
uguaguuucguucccucau

SEQ ID NO: 2276575 - RNA, 19 nt, Artificial Sequence
  Description of Artificial Sequence: Synthetic oligonucleotide
  Antisense strand to SEQ ID NO: 2276574
augagggaacgaaacuaca

SEQ ID NO: 2276576 - RNA, 19 nt, Artificial Sequence
  Description of Artificial Sequence: Synthetic oligonucleotide
  Sense strand starting at position 3338 of SEQ ID NO: 1884584
guaguuucguucccucauu

SEQ ID NO: 2276577 - RNA, 19 nt, Artificial Sequence
  Description of Artificial Sequence: Synthetic oligonucleotide
  Antisense strand to SEQ ID NO: 2276576
aaugagggaacgaaacuac

SEQ ID NO: 2276578 - RNA, 19 nt, Artificial Sequence
  Description of Artificial Sequence: Synthetic oligonucleotide
  Sense strand starting at position 3378 of SEQ ID NO: 1884584
gguaguaauacacagcgau

SEQ ID NO: 2276579 - RNA, 19 nt, Artificial Sequence
  Description of Artificial Sequence: Synthetic oligonucleotide
  Antisense strand to SEQ ID NO: 2276578
aucgcuguguauuacuacc

SEQ ID NO: 2276580 - RNA, 19 nt, Artificial Sequence
  Description of Artificial Sequence: Synthetic oligonucleotide
  Sense strand starting at position 3382 of SEQ ID NO: 1884584
guaauacacagcgaucaga

SEQ ID NO: 2276581 - RNA, 19 nt, Artificial Sequence
  Description of Artificial Sequence: Synthetic oligonucleotide
  Antisense strand to SEQ ID NO: 2276580
ucugaucgcuguguauuac

SEQ ID NO: 2276582 - RNA, 19 nt, Artificial Sequence
  Description of Artificial Sequence: Synthetic oligonucleotide
  Sense strand starting at position 3390 of SEQ ID NO: 1884584
cagcgaucagaguggaaug

SEQ ID NO: 2276583 - RNA, 19 nt, Artificial Sequence
  Description of Artificial Sequence: Synthetic oligonucleotide
  Antisense strand to SEQ ID NO: 2276582
cauuccacucugaucgcug

SEQ ID NO: 2276584 - RNA, 19 nt, Artificial Sequence
  Description of Artificial Sequence: Synthetic oligonucleotide
  Sense strand starting at position 3408 of SEQ ID NO: 1884584
ggaauuagauucuuugauu

SEQ ID NO: 2276585 - RNA, 19 nt, Artificial Sequence
  Description of Artificial Sequence: Synthetic oligonucleotide
  Antisense strand to SEQ ID NO: 2276584
aaucaaagaaucuaauucc

SEQ ID NO: 2276586 - RNA, 19 nt, Artificial Sequence
  Description of Artificial Sequence: Synthetic oligonucleotide
  Sense strand starting at position 3430 of SEQ ID NO: 1884584
caacaaugauguucuguga

SEQ ID NO: 2276587 - RNA, 19 nt, Artificial Sequence
  Description of Artificial Sequence: Synthetic oligonucleotide
  Antisense strand to SEQ ID NO: 2276586
ucacagaacaucauuguug

SEQ ID NO: 2276588 - RNA, 19 nt, Artificial Sequence
  Description of Artificial Sequence: Synthetic oligonucleotide
  Sense strand starting at position 3433 of SEQ ID NO: 1884584
caaugauguucugugagca

SEQ ID NO: 2276589 - RNA, 19 nt, Artificial Sequence
  Description of Artificial Sequence: Synthetic oligonucleotide
  Antisense strand to SEQ ID NO: 2276588
ugcucacagaacaucauug

SEQ ID NO: 2276590 - RNA, 19 nt, Artificial Sequence
  Description of Artificial Sequence: Synthetic oligonucleotide
  Sense strand starting at position 3434 of SEQ ID NO: 1884584
aaugauguucugugagcau

SEQ ID NO: 2276591 - RNA, 19 nt, Artificial Sequence
  Description of Artificial Sequence: Synthetic oligonucleotide
  Antisense strand to SEQ ID NO: 2276590
augcucacagaacaucauu

SEQ ID NO: 2276592 - RNA, 19 nt, Artificial Sequence
  Description of Artificial Sequence: Synthetic oligonucleotide
  Sense strand starting at position 3443 of SEQ ID NO: 1884584
cugugagcauuccuacaau

SEQ ID NO: 2276593 - RNA, 19 nt, Artificial Sequence
  Description of Artificial Sequence: Synthetic oligonucleotide
  Antisense strand to SEQ ID NO: 2276592
auuguaggaaugcucacag

SEQ ID NO: 2276594 - RNA, 19 nt, Artificial Sequence
  Description of Artificial Sequence: Synthetic oligonucleotide
  Sense strand starting at position 3480 of SEQ ID NO: 1884584
cuuggugucugucugaaau

SEQ ID NO: 2276595 - RNA, 19 nt, Artificial Sequence
  Description of Artificial Sequence: Synthetic oligonucleotide
  Antisense strand to SEQ ID NO: 2276594
auuucagacagacaccaag

SEQ ID NO: 2276596 - RNA, 19 nt, Artificial Sequence
  Description of Artificial Sequence: Synthetic oligonucleotide
  Sense strand starting at position 3516 of SEQ ID NO: 1884584
gaggaauguuucucuagca

SEQ ID NO: 2276597 - RNA, 19 nt, Artificial Sequence
  Description of Artificial Sequence: Synthetic oligonucleotide
  Antisense strand to SEQ ID NO: 2276596
ugcuagagaaacauuccuc

SEQ ID NO: 2276598 - RNA, 19 nt, Artificial Sequence
  Description of Artificial Sequence: Synthetic oligonucleotide
  Sense strand starting at position 3517 of SEQ ID NO: 1884584
aggaauguuucucuagcag

SEQ ID NO: 2276599 - RNA, 19 nt, Artificial Sequence
  Description of Artificial Sequence: Synthetic oligonucleotide
  Antisense strand to SEQ ID NO: 2276598
cugcuagagaaacauuccu

SEQ ID NO: 2276600 - RNA, 19 nt, Artificial Sequence
  Description of Artificial Sequence: Synthetic oligonucleotide
  Sense strand starting at position 3594 of SEQ ID NO: 1884584
aacaguggucgggauguuu

SEQ ID NO: 2276601 - RNA, 19 nt, Artificial Sequence
  Description of Artificial Sequence: Synthetic oligonucleotide
  Antisense strand to SEQ ID NO: 2276600
aaacaucccgaccacuguu

SEQ ID NO: 2276602 - RNA, 19 nt, Artificial Sequence
  Description of Artificial Sequence: Synthetic oligonucleotide
  Sense strand starting at position 3613 of SEQ ID NO: 1884584
uugaaauuugccugcagca

SEQ ID NO: 2276603 - RNA, 19 nt, Artificial Sequence
  Description of Artificial Sequence: Synthetic oligonucleotide
  Antisense strand to SEQ ID NO: 2276602
ugcugcaggcaaauuucaa

SEQ ID NO: 2276604 - RNA, 19 nt, Artificial Sequence
  Description of Artificial Sequence: Synthetic oligonucleotide
  Sense strand starting at position 3630 of SEQ ID NO: 1884584
caagcaguuuccucggaug

SEQ ID NO: 2276605 - RNA, 19 nt, Artificial Sequence
  Description of Artificial Sequence: Synthetic oligonucleotide
  Antisense strand to SEQ ID NO: 2276604
cauccgaggaaacugcuug

SEQ ID NO: 2276606 - RNA, 19 nt, Artificial Sequence
  Description of Artificial Sequence: Synthetic oligonucleotide
  Sense strand starting at position 3694 of SEQ ID NO: 1884584
ggcuauugcagaggaugau

SEQ ID NO: 2276607 - RNA, 19 nt, Artificial Sequence
  Description of Artificial Sequence: Synthetic oligonucleotide
  Antisense strand to SEQ ID NO: 2276606
aucauccucugcaauagcc

SEQ ID NO: 2276608 - RNA, 19 nt, Artificial Sequence
  Description of Artificial Sequence: Synthetic oligonucleotide
  Sense strand starting at position 225 of SEQ ID NO: 1884585
ggagugaguuuguggacgu

SEQ ID NO: 2276609 - RNA, 19 nt, Artificial Sequence
  Description of Artificial Sequence: Synthetic oligonucleotide
  Antisense strand to SEQ ID NO: 2276608
acguccacaaacucacucc

SEQ ID NO: 2276610 - RNA, 19 nt, Artificial Sequence
  Description of Artificial Sequence: Synthetic oligonucleotide
  Sense strand starting at position 226 of SEQ ID NO: 1884585
gagugaguuuguggacgua

SEQ ID NO: 2276611 - RNA, 19 nt, Artificial Sequence
  Description of Artificial Sequence: Synthetic oligonucleotide
  Antisense strand to SEQ ID NO: 2276610
uacguccacaaacucacuc

SEQ ID NO: 2276612 - RNA, 19 nt, Artificial Sequence
  Description of Artificial Sequence: Synthetic oligonucleotide
  Sense strand starting at position 375 of SEQ ID NO: 1884585
auaagaugaucccugagcu

SEQ ID NO: 2276613 - RNA, 19 nt, Artificial Sequence
  Description of Artificial Sequence: Synthetic oligonucleotide
  Antisense strand to SEQ ID NO: 2276612
agcucagggaucaucuuau

SEQ ID NO: 2276614 - RNA, 19 nt, Artificial Sequence
  Description of Artificial Sequence: Synthetic oligonucleotide
  Sense strand starting at position 385 of SEQ ID NO: 1884585
cccugagcucuccgugguu

SEQ ID NO: 2276615 - RNA, 19 nt, Artificial Sequence
  Description of Artificial Sequence: Synthetic oligonucleotide
  Antisense strand to SEQ ID NO: 2276614
aaccacggagagcucaggg

SEQ ID NO: 2276616 - RNA, 19 nt, Artificial Sequence
  Description of Artificial Sequence: Synthetic oligonucleotide
  Sense strand starting at position 388 of SEQ ID NO: 1884585
ugagcucuccgugguucua

SEQ ID NO: 2276617 - RNA, 19 nt, Artificial Sequence
  Description of Artificial Sequence: Synthetic oligonucleotide
  Antisense strand to SEQ ID NO: 2276616
uagaaccacggagagcuca

SEQ ID NO: 2276618 - RNA, 19 nt, Artificial Sequence
  Description of Artificial Sequence: Synthetic oligonucleotide
  Sense strand starting at position 401 of SEQ ID NO: 1884585
guucuagacugcuccaauc

SEQ ID NO: 2276619 - RNA, 19 nt, Artificial Sequence
  Description of Artificial Sequence: Synthetic oligonucleotide
  Antisense strand to SEQ ID NO: 2276618
gauuggagcagucuagaac

SEQ ID NO: 2276620 - RNA, 19 nt, Artificial Sequence
  Description of Artificial Sequence: Synthetic oligonucleotide
  Sense strand starting at position 515 of SEQ ID NO: 1884585
cucugauucuaguuguuuc

SEQ ID NO: 2276621 - RNA, 19 nt, Artificial Sequence
  Description of Artificial Sequence: Synthetic oligonucleotide
  Antisense strand to SEQ ID NO: 2276620
gaaacaacuagaaucagag

SEQ ID NO: 2276622 - RNA, 19 nt, Artificial Sequence
  Description of Artificial Sequence: Synthetic oligonucleotide
  Sense strand starting at position 522 of SEQ ID NO: 1884585
ucuaguuguuuccacauau

SEQ ID NO: 2276623 - RNA, 19 nt, Artificial Sequence
  Description of Artificial Sequence: Synthetic oligonucleotide
  Antisense strand to SEQ ID NO: 2276622
auauguggaaacaacuaga

SEQ ID NO: 2276624 - RNA, 19 nt, Artificial Sequence
  Description of Artificial Sequence: Synthetic oligonucleotide
  Sense strand starting at position 526 of SEQ ID NO: 1884585
guuguuuccacauaugugu

SEQ ID NO: 2276625 - RNA, 19 nt, Artificial Sequence
  Description of Artificial Sequence: Synthetic oligonucleotide
  Antisense strand to SEQ ID NO: 2276624
acacauauguggaaacaac

SEQ ID NO: 2276626 - RNA, 19 nt, Artificial Sequence
  Description of Artificial Sequence: Synthetic oligonucleotide
  Sense strand starting at position 533 of SEQ ID NO: 1884585
ccacauaugugucugugau

SEQ ID NO: 2276627 - RNA, 19 nt, Artificial Sequence
  Description of Artificial Sequence: Synthetic oligonucleotide
  Antisense strand to SEQ ID NO: 2276626
aucacagacacauaugugg

SEQ ID NO: 2276628 - RNA, 19 nt, Artificial Sequence
  Description of Artificial Sequence: Synthetic oligonucleotide
  Sense strand starting at position 535 of SEQ ID NO: 1884585
acauaugugucugugauug

SEQ ID NO: 2276629 - RNA, 19 nt, Artificial Sequence
  Description of Artificial Sequence: Synthetic oligonucleotide
  Antisense strand to SEQ ID NO: 2276628
caaucacagacacauaugu

SEQ ID NO: 2276630 - RNA, 19 nt, Artificial Sequence
  Description of Artificial Sequence: Synthetic oligonucleotide
  Sense strand starting at position 543 of SEQ ID NO: 1884585
gucugugauugggagagau

SEQ ID NO: 2276631 - RNA, 19 nt, Artificial Sequence
  Description of Artificial Sequence: Synthetic oligonucleotide
  Antisense strand to SEQ ID NO: 2276630
aucucucccaaucacagac

SEQ ID NO: 2276632 - RNA, 19 nt, Artificial Sequence
  Description of Artificial Sequence: Synthetic oligonucleotide
  Sense strand starting at position 712 of SEQ ID NO: 1884585
ucucacaaguguccucauu

SEQ ID NO: 2276633 - RNA, 19 nt, Artificial Sequence
  Description of Artificial Sequence: Synthetic oligonucleotide
  Antisense strand to SEQ ID NO: 2276632
aaugaggacacuugugaga

SEQ ID NO: 2276634 - RNA, 19 nt, Artificial Sequence
  Description of Artificial Sequence: Synthetic oligonucleotide
  Sense strand starting at position 916 of SEQ ID NO: 1884585
accucugaccucuguacua

SEQ ID NO: 2276635 - RNA, 19 nt, Artificial Sequence
  Description of Artificial Sequence: Synthetic oligonucleotide
  Antisense strand to SEQ ID NO: 2276634
uaguacagaggucagaggu

SEQ ID NO: 2276636 - RNA, 19 nt, Artificial Sequence
  Description of Artificial Sequence: Synthetic oligonucleotide
  Sense strand starting at position 929 of SEQ ID NO: 1884585
guacuaucuuugcaagugu

SEQ ID NO: 2276637 - RNA, 19 nt, Artificial Sequence
  Description of Artificial Sequence: Synthetic oligonucleotide
  Antisense strand to SEQ ID NO: 2276636
acacuugcaaagauaguac

SEQ ID NO: 2276638 - RNA, 19 nt, Artificial Sequence
  Description of Artificial Sequence: Synthetic oligonucleotide
  Sense strand starting at position 1427 of SEQ ID NO: 1884585
agcaaagagucagacucuu

SEQ ID NO: 2276639 - RNA, 19 nt, Artificial Sequence
  Description of Artificial Sequence: Synthetic oligonucleotide
  Antisense strand to SEQ ID NO: 2276638
aagagucugacucuuugcu

SEQ ID NO: 2276640 - RNA, 19 nt, Artificial Sequence
  Description of Artificial Sequence: Synthetic oligonucleotide
  Sense strand starting at position 1433 of SEQ ID NO: 1884585
gagucagacucuugagcca

SEQ ID NO: 2276641 - RNA, 19 nt, Artificial Sequence
  Description of Artificial Sequence: Synthetic oligonucleotide
  Antisense strand to SEQ ID NO: 2276640
uggcucaagagucugacuc

SEQ ID NO: 2276642 - RNA, 19 nt, Artificial Sequence
  Description of Artificial Sequence: Synthetic oligonucleotide
  Sense strand starting at position 1505 of SEQ ID NO: 1884585
cccagugauguggguguca

SEQ ID NO: 2276643 - RNA, 19 nt, Artificial Sequence
  Description of Artificial Sequence: Synthetic oligonucleotide
  Antisense strand to SEQ ID NO: 2276642
ugacacccacaucacuggg

SEQ ID NO: 2276644 - RNA, 19 nt, Artificial Sequence
  Description of Artificial Sequence: Synthetic oligonucleotide
  Sense strand starting at position 1507 of SEQ ID NO: 1884585
cagugaugugggugucauc

SEQ ID NO: 2276645 - RNA, 19 nt, Artificial Sequence
  Description of Artificial Sequence: Synthetic oligonucleotide
  Antisense strand to SEQ ID NO: 2276644
gaugacacccacaucacug

SEQ ID NO: 2276646 - RNA, 19 nt, Artificial Sequence
  Description of Artificial Sequence: Synthetic oligonucleotide
  Sense strand starting at position 1516 of SEQ ID NO: 1884585
gggugucaucaucaccauu

SEQ ID NO: 2276647 - RNA, 19 nt, Artificial Sequence
  Description of Artificial Sequence: Synthetic oligonucleotide
  Antisense strand to SEQ ID NO: 2276646
aauggugaugaugacaccc

SEQ ID NO: 2276648 - RNA, 19 nt, Artificial Sequence
  Description of Artificial Sequence: Synthetic oligonucleotide
  Sense strand starting at position 1547 of SEQ ID NO: 1884585
aacugaugcucaggguagu

SEQ ID NO: 2276649 - RNA, 19 nt, Artificial Sequence
  Description of Artificial Sequence: Synthetic oligonucleotide
  Antisense strand to SEQ ID NO: 2276648
acuacccugagcaucaguu

SEQ ID NO: 2276650 - RNA, 19 nt, Artificial Sequence
  Description of Artificial Sequence: Synthetic oligonucleotide
  Sense strand starting at position 1558 of SEQ ID NO: 1884585
aggguagugacguaguaac

SEQ ID NO: 2276651 - RNA, 19 nt, Artificial Sequence
  Description of Artificial Sequence: Synthetic oligonucleotide
  Antisense strand to SEQ ID NO: 2276650
guuacuacgucacuacccu

SEQ ID NO: 2276652 - RNA, 19 nt, Artificial Sequence
  Description of Artificial Sequence: Synthetic oligonucleotide
  Sense strand starting at position 1928 of SEQ ID NO: 1884585
gcuugaaucugggcaagga

SEQ ID NO: 2276653 - RNA, 19 nt, Artificial Sequence
  Description of Artificial Sequence: Synthetic oligonucleotide
  Antisense strand to SEQ ID NO: 2276652
uccuugcccagauucaagc

SEQ ID NO: 2276654 - RNA, 19 nt, Artificial Sequence
  Description of Artificial Sequence: Synthetic oligonucleotide
  Sense strand starting at position 2161 of SEQ ID NO: 1884585
aggagaagucccuguucuc

SEQ ID NO: 2276655 - RNA, 19 nt, Artificial Sequence
  Description of Artificial Sequence: Synthetic oligonucleotide
  Antisense strand to SEQ ID NO: 2276654
gagaacagggacuucuccu

SEQ ID NO: 2276656 - RNA, 19 nt, Artificial Sequence
  Description of Artificial Sequence: Synthetic oligonucleotide
  Sense strand starting at position 2251 of SEQ ID NO: 1884585
gagcacaugccugaccaua

SEQ ID NO: 2276657 - RNA, 19 nt, Artificial Sequence
  Description of Artificial Sequence: Synthetic oligonucleotide
  Antisense strand to SEQ ID NO: 2276656
uauggucaggcaugugcuc

SEQ ID NO: 2276658 - RNA, 19 nt, Artificial Sequence
  Description of Artificial Sequence: Synthetic oligonucleotide
  Sense strand starting at position 2253 of SEQ ID NO: 1884585
gcacaugccugaccauaau

SEQ ID NO: 2276659 - RNA, 19 nt, Artificial Sequence
  Description of Artificial Sequence: Synthetic oligonucleotide
  Antisense strand to SEQ ID NO: 2276658
auuauggucaggcaugugc

SEQ ID NO: 2276660 - RNA, 19 nt, Artificial Sequence
  Description of Artificial Sequence: Synthetic oligonucleotide
  Sense strand starting at position 2265 of SEQ ID NO: 1884585
ccauaaucggcccacaaua

SEQ ID NO: 2276661 - RNA, 19 nt, Artificial Sequence
  Description of Artificial Sequence: Synthetic oligonucleotide
  Antisense strand to SEQ ID NO: 2276660
uauugugggccgauuaugg

SEQ ID NO: 2276662 - RNA, 19 nt, Artificial Sequence
  Description of Artificial Sequence: Synthetic oligonucleotide
  Sense strand starting at position 2365 of SEQ ID NO: 1884585
cccucuucugggugcuaga

SEQ ID NO: 2276663 - RNA, 19 nt, Artificial Sequence
  Description of Artificial Sequence: Synthetic oligonucleotide
  Antisense strand to SEQ ID NO: 2276662
ucuagcacccagaagaggg

SEQ ID NO: 2276664 - RNA, 19 nt, Artificial Sequence
  Description of Artificial Sequence: Synthetic oligonucleotide
  Sense strand starting at position 2625 of SEQ ID NO: 1884585
gaacaaauaucuggaggca

SEQ ID NO: 2276665 - RNA, 19 nt, Artificial Sequence
  Description of Artificial Sequence: Synthetic oligonucleotide
  Antisense strand to SEQ ID NO: 2276664
ugccuccagauauuuguuc

SEQ ID NO: 2276666 - RNA, 19 nt, Artificial Sequence
  Description of Artificial Sequence: Synthetic oligonucleotide
  Sense strand starting at position 2660 of SEQ ID NO: 1884585
ucuggaauauuccagaccu

SEQ ID NO: 2276667 - RNA, 19 nt, Artificial Sequence
  Description of Artificial Sequence: Synthetic oligonucleotide
  Antisense strand to SEQ ID NO: 2276666
aggucuggaauauuccaga

SEQ ID NO: 2276668 - RNA, 19 nt, Artificial Sequence
  Description of Artificial Sequence: Synthetic oligonucleotide
  Sense strand starting at position 2693 of SEQ ID NO: 1884585
caaauuaaugggugugcuu

SEQ ID NO: 2276669 - RNA, 19 nt, Artificial Sequence
  Description of Artificial Sequence: Synthetic oligonucleotide
  Antisense strand to SEQ ID NO: 2276668
aagcacacccauuaauuug

SEQ ID NO: 2276670 - RNA, 19 nt, Artificial Sequence
  Description of Artificial Sequence: Synthetic oligonucleotide
  Sense strand starting at position 2951 of SEQ ID NO: 1884585
gaucauucccacuggcuga

SEQ ID NO: 2276671 - RNA, 19 nt, Artificial Sequence
  Description of Artificial Sequence: Synthetic oligonucleotide
  Antisense strand to SEQ ID NO: 2276670
ucagccagugggaaugauc

SEQ ID NO: 2276672 - RNA, 19 nt, Artificial Sequence
  Description of Artificial Sequence: Synthetic oligonucleotide
  Sense strand starting at position 2979 of SEQ ID NO: 1884585
cguucuuucucccaccuua

SEQ ID NO: 2276673 - RNA, 19 nt, Artificial Sequence
  Description of Artificial Sequence: Synthetic oligonucleotide
  Antisense strand to SEQ ID NO: 2276672
uaaggugggagaaagaacg

SEQ ID NO: 2276674 - RNA, 19 nt, Artificial Sequence
  Description of Artificial Sequence: Synthetic oligonucleotide
  Sense strand starting at position 3934 of SEQ ID NO: 1884585
ucuaauugcucaggccaga

SEQ ID NO: 2276675 - RNA, 19 nt, Artificial Sequence
  Description of Artificial Sequence: Synthetic oligonucleotide
  Antisense strand to SEQ ID NO: 2276674
ucuggccugagcaauuaga

SEQ ID NO: 2276676 - RNA, 19 nt, Artificial Sequence
  Description of Artificial Sequence: Synthetic oligonucleotide
  Sense strand starting at position 55 of SEQ ID NO: 1884586
ccaagucuugugugaggga

SEQ ID NO: 2276677 - RNA, 19 nt, Artificial Sequence
  Description of Artificial Sequence: Synthetic oligonucleotide
  Antisense strand to SEQ ID NO: 2276676
ucccucacacaagacuugg

SEQ ID NO: 2276678 - RNA, 19 nt, Artificial Sequence
  Description of Artificial Sequence: Synthetic oligonucleotide
  Sense strand starting at position 64 of SEQ ID NO: 1884586
gugugagggagaugcuuua

SEQ ID NO: 2276679 - RNA, 19 nt, Artificial Sequence
  Description of Artificial Sequence: Synthetic oligonucleotide
  Antisense strand to SEQ ID NO: 2276678
uaaagcaucucccucacac

SEQ ID NO: 2276680 - RNA, 19 nt, Artificial Sequence
  Description of Artificial Sequence: Synthetic oligonucleotide
  Sense strand starting at position 71 of SEQ ID NO: 1884586
ggagaugcuuuaucaacaa

SEQ ID NO: 2276681 - RNA, 19 nt, Artificial Sequence
  Description of Artificial Sequence: Synthetic oligonucleotide
  Antisense strand to SEQ ID NO: 2276680
uuguugauaaagcaucucc

SEQ ID NO: 2276682 - RNA, 19 nt, Artificial Sequence
  Description of Artificial Sequence: Synthetic oligonucleotide
  Sense strand starting at position 106 of SEQ ID NO: 1884586
ccauccuguugggugauau

SEQ ID NO: 2276683 - RNA, 19 nt, Artificial Sequence
  Description of Artificial Sequence: Synthetic oligonucleotide
  Antisense strand to SEQ ID NO: 2276682
auaucacccaacaggaugg

SEQ ID NO: 2276684 - RNA, 19 nt, Artificial Sequence
  Description of Artificial Sequence: Synthetic oligonucleotide
  Sense strand starting at position 107 of SEQ ID NO: 1884586
cauccuguugggugauauu

SEQ ID NO: 2276685 - RNA, 19 nt, Artificial Sequence
  Description of Artificial Sequence: Synthetic oligonucleotide
  Antisense strand to SEQ ID NO: 2276684
aauaucacccaacaggaug

SEQ ID NO: 2276686 - RNA, 19 nt, Artificial Sequence
  Description of Artificial Sequence: Synthetic oligonucleotide
  Sense strand starting at position 451 of SEQ ID NO: 1884586
ggaugcagugcuggacuua

SEQ ID NO: 2276687 - RNA, 19 nt, Artificial Sequence
  Description of Artificial Sequence: Synthetic oligonucleotide
  Antisense strand to SEQ ID NO: 2276686
uaaguccagcacugcaucc

SEQ ID NO: 2276688 - RNA, 19 nt, Artificial Sequence
  Description of Artificial Sequence: Synthetic oligonucleotide
  Sense strand starting at position 452 of SEQ ID NO: 1884586
gaugcagugcuggacuuaa

SEQ ID NO: 2276689 - RNA, 19 nt, Artificial Sequence
  Description of Artificial Sequence: Synthetic oligonucleotide
  Antisense strand to SEQ ID NO: 2276688
uuaaguccagcacugcauc

SEQ ID NO: 2276690 - RNA, 19 nt, Artificial Sequence
  Description of Artificial Sequence: Synthetic oligonucleotide
  Sense strand starting at position 463 of SEQ ID NO: 1884586
ggacuuaagcucugcaauc

SEQ ID NO: 2276691 - RNA, 19 nt, Artificial Sequence
  Description of Artificial Sequence: Synthetic oligonucleotide
  Antisense strand to SEQ ID NO: 2276690
gauugcagagcuuaagucc

SEQ ID NO: 2276692 - RNA, 19 nt, Artificial Sequence
  Description of Artificial Sequence: Synthetic oligonucleotide
  Sense strand starting at position 641 of SEQ ID NO: 1884586
acaauugaaguuugcaauu

SEQ ID NO: 2276693 - RNA, 19 nt, Artificial Sequence
  Description of Artificial Sequence: Synthetic oligonucleotide
  Antisense strand to SEQ ID NO: 2276692
aauugcaaacuucaauugu

SEQ ID NO: 2276694 - RNA, 19 nt, Artificial Sequence
  Description of Artificial Sequence: Synthetic oligonucleotide
  Sense strand starting at position 828 of SEQ ID NO: 1884586
ccaagucagacuugggaca

SEQ ID NO: 2276695 - RNA, 19 nt, Artificial Sequence
  Description of Artificial Sequence: Synthetic oligonucleotide
  Antisense strand to SEQ ID NO: 2276694
ugucccaagucugacuugg

SEQ ID NO: 2276696 - RNA, 19 nt, Artificial Sequence
  Description of Artificial Sequence: Synthetic oligonucleotide
  Sense strand starting at position 862 of SEQ ID NO: 1884586
cagacuuggcccugagaag

SEQ ID NO: 2276697 - RNA, 19 nt, Artificial Sequence
  Description of Artificial Sequence: Synthetic oligonucleotide
  Antisense strand to SEQ ID NO: 2276696
cuucucagggccaagucug

SEQ ID NO: 2276698 - RNA, 19 nt, Artificial Sequence
  Description of Artificial Sequence: Synthetic oligonucleotide
  Sense strand starting at position 876 of SEQ ID NO: 1884586
agaagcucugauugggauu

SEQ ID NO: 2276699 - RNA, 19 nt, Artificial Sequence
  Description of Artificial Sequence: Synthetic oligonucleotide
  Antisense strand to SEQ ID NO: 2276698
aaucccaaucagagcuucu

SEQ ID NO: 2276700 - RNA, 19 nt, Artificial Sequence
  Description of Artificial Sequence: Synthetic oligonucleotide
  Sense strand starting at position 879 of SEQ ID NO: 1884586
agcucugauugggauuuau

SEQ ID NO: 2276701 - RNA, 19 nt, Artificial Sequence
  Description of Artificial Sequence: Synthetic oligonucleotide
  Antisense strand to SEQ ID NO: 2276700
auaaaucccaaucagagcu

SEQ ID NO: 2276702 - RNA, 19 nt, Artificial Sequence
  Description of Artificial Sequence: Synthetic oligonucleotide
  Sense strand starting at position 894 of SEQ ID NO: 1884586
uuauaaggccuaugauuac

SEQ ID NO: 2276703 - RNA, 19 nt, Artificial Sequence
  Description of Artificial Sequence: Synthetic oligonucleotide
  Antisense strand to SEQ ID NO: 2276702
guaaucauaggccuuauaa

SEQ ID NO: 2276704 - RNA, 19 nt, Artificial Sequence
  Description of Artificial Sequence: Synthetic oligonucleotide
  Sense strand starting at position 1025 of SEQ ID NO: 1884586
gguauaacauuugagaauu

SEQ ID NO: 2276705 - RNA, 19 nt, Artificial Sequence
  Description of Artificial Sequence: Synthetic oligonucleotide
  Antisense strand to SEQ ID NO: 2276704
aauucucaaauguuauacc

SEQ ID NO: 2276706 - RNA, 19 nt, Artificial Sequence
  Description of Artificial Sequence: Synthetic oligonucleotide
  Sense strand starting at position 1107 of SEQ ID NO: 1884586
gcauguauugagcaguuau

SEQ ID NO: 2276707 - RNA, 19 nt, Artificial Sequence
  Description of Artificial Sequence: Synthetic oligonucleotide
  Antisense strand to SEQ ID NO: 2276706
auaacugcucaauacaugc

SEQ ID NO: 2276708 - RNA, 19 nt, Artificial Sequence
  Description of Artificial Sequence: Synthetic oligonucleotide
  Sense strand starting at position 1115 of SEQ ID NO: 1884586
ugagcaguuauguaugcaa

SEQ ID NO: 2276709 - RNA, 19 nt, Artificial Sequence
  Description of Artificial Sequence: Synthetic oligonucleotide
  Antisense strand to SEQ ID NO: 2276708
uugcauacauaacugcuca

SEQ ID NO: 2276710 - RNA, 19 nt, Artificial Sequence
  Description of Artificial Sequence: Synthetic oligonucleotide
  Sense strand starting at position 1290 of SEQ ID NO: 1884586
gccucagacucuuugagau

SEQ ID NO: 2276711 - RNA, 19 nt, Artificial Sequence
  Description of Artificial Sequence: Synthetic oligonucleotide
  Antisense strand to SEQ ID NO: 2276710
aucucaaagagucugaggc

SEQ ID NO: 2276712 - RNA, 19 nt, Artificial Sequence
  Description of Artificial Sequence: Synthetic oligonucleotide
  Sense strand starting at position 1416 of SEQ ID NO: 1884586
gcaggagauuuggaaagca

SEQ ID NO: 2276713 - RNA, 19 nt, Artificial Sequence
  Description of Artificial Sequence: Synthetic oligonucleotide
  Antisense strand to SEQ ID NO: 2276712
ugcuuuccaaaucuccugc

SEQ ID NO: 2276714 - RNA, 19 nt, Artificial Sequence
  Description of Artificial Sequence: Synthetic oligonucleotide
  Sense strand starting at position 2080 of SEQ ID NO: 1884586
ucaggaauuuaggaccuua

SEQ ID NO: 2276715 - RNA, 19 nt, Artificial Sequence
  Description of Artificial Sequence: Synthetic oligonucleotide
  Antisense strand to SEQ ID NO: 2276714
uaagguccuaaauuccuga

SEQ ID NO: 2276716 - RNA, 19 nt, Artificial Sequence
  Description of Artificial Sequence: Synthetic oligonucleotide
  Sense strand starting at position 2125 of SEQ ID NO: 1884586
ugaagucaccagugaacuu

SEQ ID NO: 2276717 - RNA, 19 nt, Artificial Sequence
  Description of Artificial Sequence: Synthetic oligonucleotide
  Antisense strand to SEQ ID NO: 2276716
aaguucacuggugacuuca

SEQ ID NO: 2276718 - RNA, 19 nt, Artificial Sequence
  Description of Artificial Sequence: Synthetic oligonucleotide
  Sense strand starting at position 2493 of SEQ ID NO: 1884586
guaggaguguguuucugag

SEQ ID NO: 2276719 - RNA, 19 nt, Artificial Sequence
  Description of Artificial Sequence: Synthetic oligonucleotide
  Antisense strand to SEQ ID NO: 2276718
cucagaaacacacuccuac

SEQ ID NO: 2276720 - RNA, 19 nt, Artificial Sequence
  Description of Artificial Sequence: Synthetic oligonucleotide
  Sense strand starting at position 2495 of SEQ ID NO: 1884586
aggaguguguuucugaggu

SEQ ID NO: 2276721 - RNA, 19 nt, Artificial Sequence
  Description of Artificial Sequence: Synthetic oligonucleotide
  Antisense strand to SEQ ID NO: 2276720
accucagaaacacacuccu

SEQ ID NO: 2276722 - RNA, 19 nt, Artificial Sequence
  Description of Artificial Sequence: Synthetic oligonucleotide
  Sense strand starting at position 2503 of SEQ ID NO: 1884586
guuucugaggucugaucca

SEQ ID NO: 2276723 - RNA, 19 nt, Artificial Sequence
  Description of Artificial Sequence: Synthetic oligonucleotide
  Antisense strand to SEQ ID NO: 2276722
uggaucagaccucagaaac

SEQ ID NO: 2276724 - RNA, 19 nt, Artificial Sequence
  Description of Artificial Sequence: Synthetic oligonucleotide
  Sense strand starting at position 2649 of SEQ ID NO: 1884586
gacuccugaccuugggauu

SEQ ID NO: 2276725 - RNA, 19 nt, Artificial Sequence
  Description of Artificial Sequence: Synthetic oligonucleotide
  Antisense strand to SEQ ID NO: 2276724
aaucccaaggucaggaguc

SEQ ID NO: 2276726 - RNA, 19 nt, Artificial Sequence
  Description of Artificial Sequence: Synthetic oligonucleotide
  Sense strand starting at position 2723 of SEQ ID NO: 1884586
ugucuuucuuugguagaca

SEQ ID NO: 2276727 - RNA, 19 nt, Artificial Sequence
  Description of Artificial Sequence: Synthetic oligonucleotide
  Antisense strand to SEQ ID NO: 2276726
ugucuaccaaagaaagaca

SEQ ID NO: 2276728 - RNA, 19 nt, Artificial Sequence
  Description of Artificial Sequence: Synthetic oligonucleotide
  Sense strand starting at position 2726 of SEQ ID NO: 1884586
cuuucuuugguagacacua

SEQ ID NO: 2276729 - RNA, 19 nt, Artificial Sequence
  Description of Artificial Sequence: Synthetic oligonucleotide
  Antisense strand to SEQ ID NO: 2276728
uagugucuaccaaagaaag

SEQ ID NO: 2276730 - RNA, 19 nt, Artificial Sequence
  Description of Artificial Sequence: Synthetic oligonucleotide
  Sense strand starting at position 2731 of SEQ ID NO: 1884586
uuugguagacacuagcaua

SEQ ID NO: 2276731 - RNA, 19 nt, Artificial Sequence
  Description of Artificial Sequence: Synthetic oligonucleotide
  Antisense strand to SEQ ID NO: 2276730
uaugcuagugucuaccaaa

SEQ ID NO: 2276732 - RNA, 19 nt, Artificial Sequence
  Description of Artificial Sequence: Synthetic oligonucleotide
  Sense strand starting at position 2798 of SEQ ID NO: 1884586
cugagcaauuuccaaagua

SEQ ID NO: 2276733 - RNA, 19 nt, Artificial Sequence
  Description of Artificial Sequence: Synthetic oligonucleotide
  Antisense strand to SEQ ID NO: 2276732
uacuuuggaaauugcucag

SEQ ID NO: 2276734 - RNA, 19 nt, Artificial Sequence
  Description of Artificial Sequence: Synthetic oligonucleotide
  Sense strand starting at position 3032 of SEQ ID NO: 1884586
uggcccuuuagugaaggaa

SEQ ID NO: 2276735 - RNA, 19 nt, Artificial Sequence
  Description of Artificial Sequence: Synthetic oligonucleotide
  Antisense strand to SEQ ID NO: 2276734
uuccuucacuaaagggcca

SEQ ID NO: 2276736 - RNA, 19 nt, Artificial Sequence
  Description of Artificial Sequence: Synthetic oligonucleotide
  Sense strand starting at position 3106 of SEQ ID NO: 1884586
acgauucucccaugcacau

SEQ ID NO: 2276737 - RNA, 19 nt, Artificial Sequence
  Description of Artificial Sequence: Synthetic oligonucleotide
  Antisense strand to SEQ ID NO: 2276736
augugcaugggagaaucgu

SEQ ID NO: 2276738 - RNA, 19 nt, Artificial Sequence
  Description of Artificial Sequence: Synthetic oligonucleotide
  Sense strand starting at position 3134 of SEQ ID NO: 1884586
aaagguugucgccaugacu

SEQ ID NO: 2276739 - RNA, 19 nt, Artificial Sequence
  Description of Artificial Sequence: Synthetic oligonucleotide
  Antisense strand to SEQ ID NO: 2276738
agucauggcgacaaccuuu

SEQ ID NO: 2276740 - RNA, 19 nt, Artificial Sequence
  Description of Artificial Sequence: Synthetic oligonucleotide
  Sense strand starting at position 3137 of SEQ ID NO: 1884586
gguugucgccaugacuaaa

SEQ ID NO: 2276741 - RNA, 19 nt, Artificial Sequence
  Description of Artificial Sequence: Synthetic oligonucleotide
  Antisense strand to SEQ ID NO: 2276740
uuuagucauggcgacaacc

SEQ ID NO: 2276742 - RNA, 19 nt, Artificial Sequence
  Description of Artificial Sequence: Synthetic oligonucleotide
  Sense strand starting at position 3301 of SEQ ID NO: 1884586
cugcgagguagucagagaa

SEQ ID NO: 2276743 - RNA, 19 nt, Artificial Sequence
  Description of Artificial Sequence: Synthetic oligonucleotide
  Antisense strand to SEQ ID NO: 2276742
uucucugacuaccucgcag

SEQ ID NO: 2276744 - RNA, 19 nt, Artificial Sequence
  Description of Artificial Sequence: Synthetic oligonucleotide
  Sense strand starting at position 3313 of SEQ ID NO: 1884586
cagagaaggcacugauagu

SEQ ID NO: 2276745 - RNA, 19 nt, Artificial Sequence
  Description of Artificial Sequence: Synthetic oligonucleotide
  Antisense strand to SEQ ID NO: 2276744
acuaucagugccuucucug

SEQ ID NO: 2276746 - RNA, 19 nt, Artificial Sequence
  Description of Artificial Sequence: Synthetic oligonucleotide
  Sense strand starting at position 3562 of SEQ ID NO: 1884586
ccaguugucuucccucaac

SEQ ID NO: 2276747 - RNA, 19 nt, Artificial Sequence
  Description of Artificial Sequence: Synthetic oligonucleotide
  Antisense strand to SEQ ID NO: 2276746
guugagggaagacaacugg

SEQ ID NO: 2276748 - RNA, 19 nt, Artificial Sequence
  Description of Artificial Sequence: Synthetic oligonucleotide
  Sense strand starting at position 3619 of SEQ ID NO: 1884586
ugaagaaucugagucagua

SEQ ID NO: 2276749 - RNA, 19 nt, Artificial Sequence
  Description of Artificial Sequence: Synthetic oligonucleotide
  Antisense strand to SEQ ID NO: 2276748
uacugacucagauucuuca

SEQ ID NO: 2276750 - RNA, 19 nt, Artificial Sequence
  Description of Artificial Sequence: Synthetic oligonucleotide
  Sense strand starting at position 3798 of SEQ ID NO: 1884586
ggcucaucauguguauuag

SEQ ID NO: 2276751 - RNA, 19 nt, Artificial Sequence
  Description of Artificial Sequence: Synthetic oligonucleotide
  Antisense strand to SEQ ID NO: 2276750
cuaauacacaugaugagcc

SEQ ID NO: 2276752 - RNA, 19 nt, Artificial Sequence
  Description of Artificial Sequence: Synthetic oligonucleotide
  Sense strand starting at position 3827 of SEQ ID NO: 1884586
gucacaugcccagagaaug

SEQ ID NO: 2276753 - RNA, 19 nt, Artificial Sequence
  Description of Artificial Sequence: Synthetic oligonucleotide
  Antisense strand to SEQ ID NO: 2276752
cauucucugggcaugugac

SEQ ID NO: 2276754 - RNA, 19 nt, Artificial Sequence
  Description of Artificial Sequence: Synthetic oligonucleotide
  Sense strand starting at position 3919 of SEQ ID NO: 1884586
agccacauguguuccauuu

SEQ ID NO: 2276755 - RNA, 19 nt, Artificial Sequence
  Description of Artificial Sequence: Synthetic oligonucleotide
  Antisense strand to SEQ ID NO: 2276754
aaauggaacacauguggcu

SEQ ID NO: 2276756 - RNA, 19 nt, Artificial Sequence
  Description of Artificial Sequence: Synthetic oligonucleotide
  Sense strand starting at position 127 of SEQ ID NO: 1884587
cgguucaagugauuaucgu

SEQ ID NO: 2276757 - RNA, 19 nt, Artificial Sequence
  Description of Artificial Sequence: Synthetic oligonucleotide
  Antisense strand to SEQ ID NO: 2276756
acgauaaucacuugaaccg

SEQ ID NO: 2276758 - RNA, 19 nt, Artificial Sequence
  Description of Artificial Sequence: Synthetic oligonucleotide
  Sense strand starting at position 154 of SEQ ID NO: 1884587
cuagcaaguagcugagauu

SEQ ID NO: 2276759 - RNA, 19 nt, Artificial Sequence
  Description of Artificial Sequence: Synthetic oligonucleotide
  Antisense strand to SEQ ID NO: 2276758
aaucucagcuacuugcuag

SEQ ID NO: 2276760 - RNA, 19 nt, Artificial Sequence
  Description of Artificial Sequence: Synthetic oligonucleotide
  Sense strand starting at position 371 of SEQ ID NO: 1884587
agcugugugacucaguuua

SEQ ID NO: 2276761 - RNA, 19 nt, Artificial Sequence
  Description of Artificial Sequence: Synthetic oligonucleotide
  Antisense strand to SEQ ID NO: 2276760
uaaacugagucacacagcu

SEQ ID NO: 2276762 - RNA, 19 nt, Artificial Sequence
  Description of Artificial Sequence: Synthetic oligonucleotide
  Sense strand starting at position 412 of SEQ ID NO: 1884587
cugcaacaucgccaagaau

SEQ ID NO: 2276763 - RNA, 19 nt, Artificial Sequence
  Description of Artificial Sequence: Synthetic oligonucleotide
  Antisense strand to SEQ ID NO: 2276762
auucuuggcgauguugcag

SEQ ID NO: 2276764 - RNA, 19 nt, Artificial Sequence
  Description of Artificial Sequence: Synthetic oligonucleotide
  Sense strand starting at position 444 of SEQ ID NO: 1884587
ggugcaauccugugccuua

SEQ ID NO: 2276765 - RNA, 19 nt, Artificial Sequence
  Description of Artificial Sequence: Synthetic oligonucleotide
  Antisense strand to SEQ ID NO: 2276764
uaaggcacaggauugcacc

SEQ ID NO: 2276766 - RNA, 19 nt, Artificial Sequence
  Description of Artificial Sequence: Synthetic oligonucleotide
  Sense strand starting at position 445 of SEQ ID NO: 1884587
gugcaauccugugccuuaa

SEQ ID NO: 2276767 - RNA, 19 nt, Artificial Sequence
  Description of Artificial Sequence: Synthetic oligonucleotide
  Antisense strand to SEQ ID NO: 2276766
uuaaggcacaggauugcac

SEQ ID NO: 2276768 - RNA, 19 nt, Artificial Sequence
  Description of Artificial Sequence: Synthetic oligonucleotide
  Sense strand starting at position 447 of SEQ ID NO: 1884587
gcaauccugugccuuaaau

SEQ ID NO: 2276769 - RNA, 19 nt, Artificial Sequence
  Description of Artificial Sequence: Synthetic oligonucleotide
  Antisense strand to SEQ ID NO: 2276768
auuuaaggcacaggauugc

SEQ ID NO: 2276770 - RNA, 19 nt, Artificial Sequence
  Description of Artificial Sequence: Synthetic oligonucleotide
  Sense strand starting at position 472 of SEQ ID NO: 1884587
cucuccauuugauggauga

SEQ ID NO: 2276771 - RNA, 19 nt, Artificial Sequence
  Description of Artificial Sequence: Synthetic oligonucleotide
  Antisense strand to SEQ ID NO: 2276770
ucauccaucaaauggagag

SEQ ID NO: 2276772 - RNA, 19 nt, Artificial Sequence
  Description of Artificial Sequence: Synthetic oligonucleotide
  Sense strand starting at position 712 of SEQ ID NO: 1884587
gcucauccuuuagugcuua

SEQ ID NO: 2276773 - RNA, 19 nt, Artificial Sequence
  Description of Artificial Sequence: Synthetic oligonucleotide
  Antisense strand to SEQ ID NO: 2276772
uaagcacuaaaggaugagc

SEQ ID NO: 2276774 - RNA, 19 nt, Artificial Sequence
  Description of Artificial Sequence: Synthetic oligonucleotide
  Sense strand starting at position 717 of SEQ ID NO: 1884587
uccuuuagugcuuauaaag

SEQ ID NO: 2276775 - RNA, 19 nt, Artificial Sequence
  Description of Artificial Sequence: Synthetic oligonucleotide
  Antisense strand to SEQ ID NO: 2276774
cuuuauaagcacuaaagga

SEQ ID NO: 2276776 - RNA, 19 nt, Artificial Sequence
  Description of Artificial Sequence: Synthetic oligonucleotide
  Sense strand starting at position 856 of SEQ ID NO: 1884587
gguugugaccaucgugacu

SEQ ID NO: 2276777 - RNA, 19 nt, Artificial Sequence
  Description of Artificial Sequence: Synthetic oligonucleotide
  Antisense strand to SEQ ID NO: 2276776
agucacgauggucacaacc

SEQ ID NO: 2276778 - RNA, 19 nt, Artificial Sequence
  Description of Artificial Sequence: Synthetic oligonucleotide
  Sense strand starting at position 956 of SEQ ID NO: 1884587
cugggagugcuccagagga

SEQ ID NO: 2276779 - RNA, 19 nt, Artificial Sequence
  Description of Artificial Sequence: Synthetic oligonucleotide
  Antisense strand to SEQ ID NO: 2276778
uccucuggagcacucccag

SEQ ID NO: 2276780 - RNA, 19 nt, Artificial Sequence
  Description of Artificial Sequence: Synthetic oligonucleotide
  Sense strand starting at position 1096 of SEQ ID NO: 1884587
agagcucugaccgagucau

SEQ ID NO: 2276781 - RNA, 19 nt, Artificial Sequence
  Description of Artificial Sequence: Synthetic oligonucleotide
  Antisense strand to SEQ ID NO: 2276780
augacucggucagagcucu

SEQ ID NO: 2276782 - RNA, 19 nt, Artificial Sequence
  Description of Artificial Sequence: Synthetic oligonucleotide
  Sense strand starting at position 1100 of SEQ ID NO: 1884587
cucugaccgagucauauug

SEQ ID NO: 2276783 - RNA, 19 nt, Artificial Sequence
  Description of Artificial Sequence: Synthetic oligonucleotide
  Antisense strand to SEQ ID NO: 2276782
caauaugacucggucagag

SEQ ID NO: 2276784 - RNA, 19 nt, Artificial Sequence
  Description of Artificial Sequence: Synthetic oligonucleotide
  Sense strand starting at position 1102 of SEQ ID NO: 1884587
cugaccgagucauauuguu

SEQ ID NO: 2276785 - RNA, 19 nt, Artificial Sequence
  Description of Artificial Sequence: Synthetic oligonucleotide
  Antisense strand to SEQ ID NO: 2276784
aacaauaugacucggucag

SEQ ID NO: 2276786 - RNA, 19 nt, Artificial Sequence
  Description of Artificial Sequence: Synthetic oligonucleotide
  Sense strand starting at position 1400 of SEQ ID NO: 1884587
gacucugugcucugguaac

SEQ ID NO: 2276787 - RNA, 19 nt, Artificial Sequence
  Description of Artificial Sequence: Synthetic oligonucleotide
  Antisense strand to SEQ ID NO: 2276786
guuaccagagcacagaguc

SEQ ID NO: 2276788 - RNA, 19 nt, Artificial Sequence
  Description of Artificial Sequence: Synthetic oligonucleotide
  Sense strand starting at position 2334 of SEQ ID NO: 1884587
augcuaaccucggcaauga

SEQ ID NO: 2276789 - RNA, 19 nt, Artificial Sequence
  Description of Artificial Sequence: Synthetic oligonucleotide
  Antisense strand to SEQ ID NO: 2276788
ucauugccgagguuagcau

SEQ ID NO: 2276790 - RNA, 19 nt, Artificial Sequence
  Description of Artificial Sequence: Synthetic oligonucleotide
  Sense strand starting at position 2335 of SEQ ID NO: 1884587
ugcuaaccucggcaaugau

SEQ ID NO: 2276791 - RNA, 19 nt, Artificial Sequence
  Description of Artificial Sequence: Synthetic oligonucleotide
  Antisense strand to SEQ ID NO: 2276790
aucauugccgagguuagca

SEQ ID NO: 2276792 - RNA, 19 nt, Artificial Sequence
  Description of Artificial Sequence: Synthetic oligonucleotide
  Sense strand starting at position 2377 of SEQ ID NO: 1884587
gucagucuccaucaccaua

SEQ ID NO: 2276793 - RNA, 19 nt, Artificial Sequence
  Description of Artificial Sequence: Synthetic oligonucleotide
  Antisense strand to SEQ ID NO: 2276792
uauggugauggagacugac

SEQ ID NO: 2276794 - RNA, 19 nt, Artificial Sequence
  Description of Artificial Sequence: Synthetic oligonucleotide
  Sense strand starting at position 2742 of SEQ ID NO: 1884587
gggugugcccaagaaccau

SEQ ID NO: 2276795 - RNA, 19 nt, Artificial Sequence
  Description of Artificial Sequence: Synthetic oligonucleotide
  Antisense strand to SEQ ID NO: 2276794
augguucuugggcacaccc

SEQ ID NO: 2276796 - RNA, 19 nt, Artificial Sequence
  Description of Artificial Sequence: Synthetic oligonucleotide
  Sense strand starting at position 2790 of SEQ ID NO: 1884587
ccaagucuccacugacaug

SEQ ID NO: 2276797 - RNA, 19 nt, Artificial Sequence
  Description of Artificial Sequence: Synthetic oligonucleotide
  Antisense strand to SEQ ID NO: 2276796
caugucaguggagacuugg

SEQ ID NO: 2276798 - RNA, 19 nt, Artificial Sequence
  Description of Artificial Sequence: Synthetic oligonucleotide
  Sense strand starting at position 2937 of SEQ ID NO: 1884587
aguucugccucaccuaaga

SEQ ID NO: 2276799 - RNA, 19 nt, Artificial Sequence
  Description of Artificial Sequence: Synthetic oligonucleotide
  Antisense strand to SEQ ID NO: 2276798
ucuuaggugaggcagaacu

SEQ ID NO: 2276800 - RNA, 19 nt, Artificial Sequence
  Description of Artificial Sequence: Synthetic oligonucleotide
  Sense strand starting at position 3082 of SEQ ID NO: 1884587
gagcgaacuuuguuagcuc

SEQ ID NO: 2276801 - RNA, 19 nt, Artificial Sequence
  Description of Artificial Sequence: Synthetic oligonucleotide
  Antisense strand to SEQ ID NO: 2276800
gagcuaacaaaguucgcuc

SEQ ID NO: 2276802 - RNA, 19 nt, Artificial Sequence
  Description of Artificial Sequence: Synthetic oligonucleotide
  Sense strand starting at position 3191 of SEQ ID NO: 1884587
gacucaguuuguugaguga

SEQ ID NO: 2276803 - RNA, 19 nt, Artificial Sequence
  Description of Artificial Sequence: Synthetic oligonucleotide
  Antisense strand to SEQ ID NO: 2276802
ucacucaacaaacugaguc

SEQ ID NO: 2276804 - RNA, 19 nt, Artificial Sequence
  Description of Artificial Sequence: Synthetic oligonucleotide
  Sense strand starting at position 3516 of SEQ ID NO: 1884587
aagugacuugucggaaguc

SEQ ID NO: 2276805 - RNA, 19 nt, Artificial Sequence
  Description of Artificial Sequence: Synthetic oligonucleotide
  Antisense strand to SEQ ID NO: 2276804
gacuuccgacaagucacuu

SEQ ID NO: 2276806 - RNA, 19 nt, Artificial Sequence
  Description of Artificial Sequence: Synthetic oligonucleotide
  Sense strand starting at position 3517 of SEQ ID NO: 1884587
agugacuugucggaaguca

SEQ ID NO: 2276807 - RNA, 19 nt, Artificial Sequence
  Description of Artificial Sequence: Synthetic oligonucleotide
  Antisense strand to SEQ ID NO: 2276806
ugacuuccgacaagucacu

SEQ ID NO: 2276808 - RNA, 19 nt, Artificial Sequence
  Description of Artificial Sequence: Synthetic oligonucleotide
  Sense strand starting at position 3526 of SEQ ID NO: 1884587
ucggaagucacacgauaag

SEQ ID NO: 2276809 - RNA, 19 nt, Artificial Sequence
  Description of Artificial Sequence: Synthetic oligonucleotide
  Antisense strand to SEQ ID NO: 2276808
cuuaucgugugacuuccga

SEQ ID NO: 2276810 - RNA, 19 nt, Artificial Sequence
  Description of Artificial Sequence: Synthetic oligonucleotide
  Sense strand starting at position 3702 of SEQ ID NO: 1884587
uccgucuucucaccuauga

SEQ ID NO: 2276811 - RNA, 19 nt, Artificial Sequence
  Description of Artificial Sequence: Synthetic oligonucleotide
  Antisense strand to SEQ ID NO: 2276810
ucauaggugagaagacgga

SEQ ID NO: 2276812 - RNA, 19 nt, Artificial Sequence
  Description of Artificial Sequence: Synthetic oligonucleotide
  Sense strand starting at position 3732 of SEQ ID NO: 1884587
ggcgguuggucuugggaau

SEQ ID NO: 2276813 - RNA, 19 nt, Artificial Sequence
  Description of Artificial Sequence: Synthetic oligonucleotide
  Antisense strand to SEQ ID NO: 2276812
auucccaagaccaaccgcc

SEQ ID NO: 2276814 - RNA, 19 nt, Artificial Sequence
  Description of Artificial Sequence: Synthetic oligonucleotide
  Sense strand starting at position 3733 of SEQ ID NO: 1884587
gcgguuggucuugggaauu

SEQ ID NO: 2276815 - RNA, 19 nt, Artificial Sequence
  Description of Artificial Sequence: Synthetic oligonucleotide
  Antisense strand to SEQ ID NO: 2276814
aauucccaagaccaaccgc

SEQ ID NO: 2276816 - RNA, 19 nt, Artificial Sequence
  Description of Artificial Sequence: Synthetic oligonucleotide
  Sense strand starting at position 96 of SEQ ID NO: 1884588
aagaguuauguuugcacau

SEQ ID NO: 2276817 - RNA, 19 nt, Artificial Sequence
  Description of Artificial Sequence: Synthetic oligonucleotide
  Antisense strand to SEQ ID NO: 2276816
augugcaaacauaacucuu

SEQ ID NO: 2276818 - RNA, 19 nt, Artificial Sequence
  Description of Artificial Sequence: Synthetic oligonucleotide
  Sense strand starting at position 97 of SEQ ID NO: 1884588
agaguuauguuugcacaug

SEQ ID NO: 2276819 - RNA, 19 nt, Artificial Sequence
  Description of Artificial Sequence: Synthetic oligonucleotide
  Antisense strand to SEQ ID NO: 2276818
caugugcaaacauaacucu

SEQ ID NO: 2276820 - RNA, 19 nt, Artificial Sequence
  Description of Artificial Sequence: Synthetic oligonucleotide
  Sense strand starting at position 241 of SEQ ID NO: 1884588
caaagaccuggcuaauguu

SEQ ID NO: 2276821 - RNA, 19 nt, Artificial Sequence
  Description of Artificial Sequence: Synthetic oligonucleotide
  Antisense strand to SEQ ID NO: 2276820
aacauuagccaggucuuug

SEQ ID NO: 2276822 - RNA, 19 nt, Artificial Sequence
  Description of Artificial Sequence: Synthetic oligonucleotide
  Sense strand starting at position 247 of SEQ ID NO: 1884588
ccuggcuaauguucuuaaa

SEQ ID NO: 2276823 - RNA, 19 nt, Artificial Sequence
  Description of Artificial Sequence: Synthetic oligonucleotide
  Antisense strand to SEQ ID NO: 2276822
uuuaagaacauuagccagg

SEQ ID NO: 2276824 - RNA, 19 nt, Artificial Sequence
  Description of Artificial Sequence: Synthetic oligonucleotide
  Sense strand starting at position 249 of SEQ ID NO: 1884588
uggcuaauguucuuaaaua

SEQ ID NO: 2276825 - RNA, 19 nt, Artificial Sequence
  Description of Artificial Sequence: Synthetic oligonucleotide
  Antisense strand to SEQ ID NO: 2276824
uauuuaagaacauuagcca

SEQ ID NO: 2276826 - RNA, 19 nt, Artificial Sequence
  Description of Artificial Sequence: Synthetic oligonucleotide
  Sense strand starting at position 837 of SEQ ID NO: 1884588
aaagcuaagucugccauga

SEQ ID NO: 2276827 - RNA, 19 nt, Artificial Sequence
  Description of Artificial Sequence: Synthetic oligonucleotide
  Antisense strand to SEQ ID NO: 2276826
ucauggcagacuuagcuuu

SEQ ID NO: 2276828 - RNA, 19 nt, Artificial Sequence
  Description of Artificial Sequence: Synthetic oligonucleotide
  Sense strand starting at position 907 of SEQ ID NO: 1884588
uuagacagccaucauguuu

SEQ ID NO: 2276829 - RNA, 19 nt, Artificial Sequence
  Description of Artificial Sequence: Synthetic oligonucleotide
  Antisense strand to SEQ ID NO: 2276828
aaacaugauggcugucuaa

SEQ ID NO: 2276830 - RNA, 19 nt, Artificial Sequence
  Description of Artificial Sequence: Synthetic oligonucleotide
  Sense strand starting at position 970 of SEQ ID NO: 1884588
uugcauuucuaggugguca

SEQ ID NO: 2276831 - RNA, 19 nt, Artificial Sequence
  Description of Artificial Sequence: Synthetic oligonucleotide
  Antisense strand to SEQ ID NO: 2276830
ugaccaccuagaaaugcaa

SEQ ID NO: 2276832 - RNA, 19 nt, Artificial Sequence
  Description of Artificial Sequence: Synthetic oligonucleotide
  Sense strand starting at position 971 of SEQ ID NO: 1884588
ugcauuucuagguggucau

SEQ ID NO: 2276833 - RNA, 19 nt, Artificial Sequence
  Description of Artificial Sequence: Synthetic oligonucleotide
  Antisense strand to SEQ ID NO: 2276832
augaccaccuagaaaugca

SEQ ID NO: 2276834 - RNA, 19 nt, Artificial Sequence
  Description of Artificial Sequence: Synthetic oligonucleotide
  Sense strand starting at position 972 of SEQ ID NO: 1884588
gcauuucuagguggucauu

SEQ ID NO: 2276835 - RNA, 19 nt, Artificial Sequence
  Description of Artificial Sequence: Synthetic oligonucleotide
  Antisense strand to SEQ ID NO: 2276834
aaugaccaccuagaaaugc

SEQ ID NO: 2276836 - RNA, 19 nt, Artificial Sequence
  Description of Artificial Sequence: Synthetic oligonucleotide
  Sense strand starting at position 1090 of SEQ ID NO: 1884588
aucucauucuuagcagaag

SEQ ID NO: 2276837 - RNA, 19 nt, Artificial Sequence
  Description of Artificial Sequence: Synthetic oligonucleotide
  Antisense strand to SEQ ID NO: 2276836
cuucugcuaagaaugagau

SEQ ID NO: 2276838 - RNA, 19 nt, Artificial Sequence
  Description of Artificial Sequence: Synthetic oligonucleotide
  Sense strand starting at position 1093 of SEQ ID NO: 1884588
ucauucuuagcagaagcau

SEQ ID NO: 2276839 - RNA, 19 nt, Artificial Sequence
  Description of Artificial Sequence: Synthetic oligonucleotide
  Antisense strand to SEQ ID NO: 2276838
augcuucugcuaagaauga

SEQ ID NO: 2276840 - RNA, 19 nt, Artificial Sequence
  Description of Artificial Sequence: Synthetic oligonucleotide
  Sense strand starting at position 1133 of SEQ ID NO: 1884588
uugcaaggucagugacuua

SEQ ID NO: 2276841 - RNA, 19 nt, Artificial Sequence
  Description of Artificial Sequence: Synthetic oligonucleotide
  Antisense strand to SEQ ID NO: 2276840
uaagucacugaccuugcaa

SEQ ID NO: 2276842 - RNA, 19 nt, Artificial Sequence
  Description of Artificial Sequence: Synthetic oligonucleotide
  Sense strand starting at position 1145 of SEQ ID NO: 1884588
ugacuuaggucagcaucaa

SEQ ID NO: 2276843 - RNA, 19 nt, Artificial Sequence
  Description of Artificial Sequence: Synthetic oligonucleotide
  Antisense strand to SEQ ID NO: 2276842
uugaugcugaccuaaguca

SEQ ID NO: 2276844 - RNA, 19 nt, Artificial Sequence
  Description of Artificial Sequence: Synthetic oligonucleotide
  Sense strand starting at position 1146 of SEQ ID NO: 1884588
gacuuaggucagcaucaaa

SEQ ID NO: 2276845 - RNA, 19 nt, Artificial Sequence
  Description of Artificial Sequence: Synthetic oligonucleotide
  Antisense strand to SEQ ID NO: 2276844
uuugaugcugaccuaaguc

SEQ ID NO: 2276846 - RNA, 19 nt, Artificial Sequence
  Description of Artificial Sequence: Synthetic oligonucleotide
  Sense strand starting at position 1348 of SEQ ID NO: 1884588
ucccuaaauguguaacaga

SEQ ID NO: 2276847 - RNA, 19 nt, Artificial Sequence
  Description of Artificial Sequence: Synthetic oligonucleotide
  Antisense strand to SEQ ID NO: 2276846
ucuguuacacauuuaggga

SEQ ID NO: 2276848 - RNA, 19 nt, Artificial Sequence
  Description of Artificial Sequence: Synthetic oligonucleotide
  Sense strand starting at position 1410 of SEQ ID NO: 1884588
gugcuucuaugacuuggau

SEQ ID NO: 2276849 - RNA, 19 nt, Artificial Sequence
  Description of Artificial Sequence: Synthetic oligonucleotide
  Antisense strand to SEQ ID NO: 2276848
auccaagucauagaagcac

SEQ ID NO: 2276850 - RNA, 19 nt, Artificial Sequence
  Description of Artificial Sequence: Synthetic oligonucleotide
  Sense strand starting at position 1413 of SEQ ID NO: 1884588
cuucuaugacuuggauuaa

SEQ ID NO: 2276851 - RNA, 19 nt, Artificial Sequence
  Description of Artificial Sequence: Synthetic oligonucleotide
  Antisense strand to SEQ ID NO: 2276850
uuaauccaagucauagaag

SEQ ID NO: 2276852 - RNA, 19 nt, Artificial Sequence
  Description of Artificial Sequence: Synthetic oligonucleotide
  Sense strand starting at position 1576 of SEQ ID NO: 1884588
accaaaucuugccuagaug

SEQ ID NO: 2276853 - RNA, 19 nt, Artificial Sequence
  Description of Artificial Sequence: Synthetic oligonucleotide
  Antisense strand to SEQ ID NO: 2276852
caucuaggcaagauuuggu

SEQ ID NO: 2276854 - RNA, 19 nt, Artificial Sequence
  Description of Artificial Sequence: Synthetic oligonucleotide
  Sense strand starting at position 1850 of SEQ ID NO: 1884588
acccauguuccagguaaga

SEQ ID NO: 2276855 - RNA, 19 nt, Artificial Sequence
  Description of Artificial Sequence: Synthetic oligonucleotide
  Antisense strand to SEQ ID NO: 2276854
ucuuaccuggaacaugggu

SEQ ID NO: 2276856 - RNA, 19 nt, Artificial Sequence
  Description of Artificial Sequence: Synthetic oligonucleotide
  Sense strand starting at position 2033 of SEQ ID NO: 1884588
uggguucuugcucaagguu

SEQ ID NO: 2276857 - RNA, 19 nt, Artificial Sequence
  Description of Artificial Sequence: Synthetic oligonucleotide
  Antisense strand to SEQ ID NO: 2276856
aaccuugagcaagaaccca

SEQ ID NO: 2276858 - RNA, 19 nt, Artificial Sequence
  Description of Artificial Sequence: Synthetic oligonucleotide
  Sense strand starting at position 2110 of SEQ ID NO: 1884588
cccugaucaggaggugaga

SEQ ID NO: 2276859 - RNA, 19 nt, Artificial Sequence
  Description of Artificial Sequence: Synthetic oligonucleotide
  Antisense strand to SEQ ID NO: 2276858
ucucaccuccugaucaggg

SEQ ID NO: 2276860 - RNA, 19 nt, Artificial Sequence
  Description of Artificial Sequence: Synthetic oligonucleotide
  Sense strand starting at position 2112 of SEQ ID NO: 1884588
cugaucaggaggugagauu

SEQ ID NO: 2276861 - RNA, 19 nt, Artificial Sequence
  Description of Artificial Sequence: Synthetic oligonucleotide
  Antisense strand to SEQ ID NO: 2276860
aaucucaccuccugaucag

SEQ ID NO: 2276862 - RNA, 19 nt, Artificial Sequence
  Description of Artificial Sequence: Synthetic oligonucleotide
  Sense strand starting at position 2121 of SEQ ID NO: 1884588
aggugagauuccuuacacu

SEQ ID NO: 2276863 - RNA, 19 nt, Artificial Sequence
  Description of Artificial Sequence: Synthetic oligonucleotide
  Antisense strand to SEQ ID NO: 2276862
aguguaaggaaucucaccu

SEQ ID NO: 2276864 - RNA, 19 nt, Artificial Sequence
  Description of Artificial Sequence: Synthetic oligonucleotide
  Sense strand starting at position 2183 of SEQ ID NO: 1884588
gaugauccuggaggucauu

SEQ ID NO: 2276865 - RNA, 19 nt, Artificial Sequence
  Description of Artificial Sequence: Synthetic oligonucleotide
  Antisense strand to SEQ ID NO: 2276864
aaugaccuccaggaucauc

SEQ ID NO: 2276866 - RNA, 19 nt, Artificial Sequence
  Description of Artificial Sequence: Synthetic oligonucleotide
  Sense strand starting at position 2512 of SEQ ID NO: 1884588
uauuuacagugauggauau

SEQ ID NO: 2276867 - RNA, 19 nt, Artificial Sequence
  Description of Artificial Sequence: Synthetic oligonucleotide
  Antisense strand to SEQ ID NO: 2276866
auauccaucacuguaaaua

SEQ ID NO: 2276868 - RNA, 19 nt, Artificial Sequence
  Description of Artificial Sequence: Synthetic oligonucleotide
  Sense strand starting at position 2869 of SEQ ID NO: 1884588
gagacuugccaagguuaua

SEQ ID NO: 2276869 - RNA, 19 nt, Artificial Sequence
  Description of Artificial Sequence: Synthetic oligonucleotide
  Antisense strand to SEQ ID NO: 2276868
uauaaccuuggcaagucuc

SEQ ID NO: 2276870 - RNA, 19 nt, Artificial Sequence
  Description of Artificial Sequence: Synthetic oligonucleotide
  Sense strand starting at position 2938 of SEQ ID NO: 1884588
gaggguucuuucuuggcau

SEQ ID NO: 2276871 - RNA, 19 nt, Artificial Sequence
  Description of Artificial Sequence: Synthetic oligonucleotide
  Antisense strand to SEQ ID NO: 2276870
augccaagaaagaacccuc

SEQ ID NO: 2276872 - RNA, 19 nt, Artificial Sequence
  Description of Artificial Sequence: Synthetic oligonucleotide
  Sense strand starting at position 2975 of SEQ ID NO: 1884588
agagcuuauuucucugguu

SEQ ID NO: 2276873 - RNA, 19 nt, Artificial Sequence
  Description of Artificial Sequence: Synthetic oligonucleotide
  Antisense strand to SEQ ID NO: 2276872
aaccagagaaauaagcucu

SEQ ID NO: 2276874 - RNA, 19 nt, Artificial Sequence
  Description of Artificial Sequence: Synthetic oligonucleotide
  Sense strand starting at position 3027 of SEQ ID NO: 1884588
ccgggauugccacaacugu

SEQ ID NO: 2276875 - RNA, 19 nt, Artificial Sequence
  Description of Artificial Sequence: Synthetic oligonucleotide
  Antisense strand to SEQ ID NO: 2276874
acaguuguggcaaucccgg

SEQ ID NO: 2276876 - RNA, 19 nt, Artificial Sequence
  Description of Artificial Sequence: Synthetic oligonucleotide
  Sense strand starting at position 3119 of SEQ ID NO: 1884588
uaagguacugauugacuga

SEQ ID NO: 2276877 - RNA, 19 nt, Artificial Sequence
  Description of Artificial Sequence: Synthetic oligonucleotide
  Antisense strand to SEQ ID NO: 2276876
ucagucaaucaguaccuua

SEQ ID NO: 2276878 - RNA, 19 nt, Artificial Sequence
  Description of Artificial Sequence: Synthetic oligonucleotide
  Sense strand starting at position 3319 of SEQ ID NO: 1884588
cuaggucgacuugagaauu

SEQ ID NO: 2276879 - RNA, 19 nt, Artificial Sequence
  Description of Artificial Sequence: Synthetic oligonucleotide
  Antisense strand to SEQ ID NO: 2276878
aauucucaagucgaccuag

SEQ ID NO: 2276880 - RNA, 19 nt, Artificial Sequence
  Description of Artificial Sequence: Synthetic oligonucleotide
  Sense strand starting at position 3337 of SEQ ID NO: 1884588
uuucuagaguucccaguaa

SEQ ID NO: 2276881 - RNA, 19 nt, Artificial Sequence
  Description of Artificial Sequence: Synthetic oligonucleotide
  Antisense strand to SEQ ID NO: 2276880
uuacugggaacucuagaaa

SEQ ID NO: 2276882 - RNA, 19 nt, Artificial Sequence
  Description of Artificial Sequence: Synthetic oligonucleotide
  Sense strand starting at position 3341 of SEQ ID NO: 1884588
uagaguucccaguaagcug

SEQ ID NO: 2276883 - RNA, 19 nt, Artificial Sequence
  Description of Artificial Sequence: Synthetic oligonucleotide
  Antisense strand to SEQ ID NO: 2276882
cagcuuacugggaacucua

SEQ ID NO: 2276884 - RNA, 19 nt, Artificial Sequence
  Description of Artificial Sequence: Synthetic oligonucleotide
  Sense strand starting at position 3515 of SEQ ID NO: 1884588
ugaauaaagucauucggca

SEQ ID NO: 2276885 - RNA, 19 nt, Artificial Sequence
  Description of Artificial Sequence: Synthetic oligonucleotide
  Antisense strand to SEQ ID NO: 2276884
ugccgaaugacuuuauuca

SEQ ID NO: 2276886 - RNA, 19 nt, Artificial Sequence
  Description of Artificial Sequence: Synthetic oligonucleotide
  Sense strand starting at position 3520 of SEQ ID NO: 1884588
aaagucauucggcaaaggu

SEQ ID NO: 2276887 - RNA, 19 nt, Artificial Sequence
  Description of Artificial Sequence: Synthetic oligonucleotide
  Antisense strand to SEQ ID NO: 2276886
accuuugccgaaugacuuu

SEQ ID NO: 2276888 - RNA, 19 nt, Artificial Sequence
  Description of Artificial Sequence: Synthetic oligonucleotide
  Sense strand starting at position 3546 of SEQ ID NO: 1884588
gcagucauccuauaccaag

SEQ ID NO: 2276889 - RNA, 19 nt, Artificial Sequence
  Description of Artificial Sequence: Synthetic oligonucleotide
  Antisense strand to SEQ ID NO: 2276888
cuugguauaggaugacugc

SEQ ID NO: 2276890 - RNA, 19 nt, Artificial Sequence
  Description of Artificial Sequence: Synthetic oligonucleotide
  Sense strand starting at position 3794 of SEQ ID NO: 1884588
uggagugacuucucuugag

SEQ ID NO: 2276891 - RNA, 19 nt, Artificial Sequence
  Description of Artificial Sequence: Synthetic oligonucleotide
  Antisense strand to SEQ ID NO: 2276890
cucaagagaagucacucca

SEQ ID NO: 2276892 - RNA, 19 nt, Artificial Sequence
  Description of Artificial Sequence: Synthetic oligonucleotide
  Sense strand starting at position 3800 of SEQ ID NO: 1884588
gacuucucuugagcagguu

SEQ ID NO: 2276893 - RNA, 19 nt, Artificial Sequence
  Description of Artificial Sequence: Synthetic oligonucleotide
  Antisense strand to SEQ ID NO: 2276892
aaccugcucaagagaaguc

SEQ ID NO: 2276894 - RNA, 19 nt, Artificial Sequence
  Description of Artificial Sequence: Synthetic oligonucleotide
  Sense strand starting at position 3837 of SEQ ID NO: 1884588
cuaacuagcuuugugauuu

SEQ ID NO: 2276895 - RNA, 19 nt, Artificial Sequence
  Description of Artificial Sequence: Synthetic oligonucleotide
  Antisense strand to SEQ ID NO: 2276894
aaaucacaaagcuaguuag

SEQ ID NO: 2276896 - RNA, 19 nt, Artificial Sequence
  Description of Artificial Sequence: Synthetic oligonucleotide
  Sense strand starting at position 43 of SEQ ID NO: 1884589
gggucauccucuccaguuu

SEQ ID NO: 2276897 - RNA, 19 nt, Artificial Sequence
  Description of Artificial Sequence: Synthetic oligonucleotide
  Antisense strand to SEQ ID NO: 2276896
aaacuggagaggaugaccc

SEQ ID NO: 2276898 - RNA, 19 nt, Artificial Sequence
  Description of Artificial Sequence: Synthetic oligonucleotide
  Sense strand starting at position 155 of SEQ ID NO: 1884589
gggcuagcccugcagagau

SEQ ID NO: 2276899 - RNA, 19 nt, Artificial Sequence
  Description of Artificial Sequence: Synthetic oligonucleotide
  Antisense strand to SEQ ID NO: 2276898
aucucugcagggcuagccc

SEQ ID NO: 2276900 - RNA, 19 nt, Artificial Sequence
  Description of Artificial Sequence: Synthetic oligonucleotide
  Sense strand starting at position 834 of SEQ ID NO: 1884589
ggugcugggcaucauguaa

SEQ ID NO: 2276901 - RNA, 19 nt, Artificial Sequence
  Description of Artificial Sequence: Synthetic oligonucleotide
  Antisense strand to SEQ ID NO: 2276900
uuacaugaugcccagcacc

SEQ ID NO: 2276902 - RNA, 19 nt, Artificial Sequence
  Description of Artificial Sequence: Synthetic oligonucleotide
  Sense strand starting at position 1100 of SEQ ID NO: 1884589
agggacuucuaccagguaa

SEQ ID NO: 2276903 - RNA, 19 nt, Artificial Sequence
  Description of Artificial Sequence: Synthetic oligonucleotide
  Antisense strand to SEQ ID NO: 2276902
uuaccugguagaagucccu

SEQ ID NO: 2276904 - RNA, 19 nt, Artificial Sequence
  Description of Artificial Sequence: Synthetic oligonucleotide
  Sense strand starting at position 1348 of SEQ ID NO: 1884589
guggcaugugccuugcaga

SEQ ID NO: 2276905 - RNA, 19 nt, Artificial Sequence
  Description of Artificial Sequence: Synthetic oligonucleotide
  Antisense strand to SEQ ID NO: 2276904
ucugcaaggcacaugccac

SEQ ID NO: 2276906 - RNA, 19 nt, Artificial Sequence
  Description of Artificial Sequence: Synthetic oligonucleotide
  Sense strand starting at position 1349 of SEQ ID NO: 1884589
uggcaugugccuugcagaa

SEQ ID NO: 2276907 - RNA, 19 nt, Artificial Sequence
  Description of Artificial Sequence: Synthetic oligonucleotide
  Antisense strand to SEQ ID NO: 2276906
uucugcaaggcacaugcca

SEQ ID NO: 2276908 - RNA, 19 nt, Artificial Sequence
  Description of Artificial Sequence: Synthetic oligonucleotide
  Sense strand starting at position 1351 of SEQ ID NO: 1884589
gcaugugccuugcagaaga

SEQ ID NO: 2276909 - RNA, 19 nt, Artificial Sequence
  Description of Artificial Sequence: Synthetic oligonucleotide
  Antisense strand to SEQ ID NO: 2276908
ucuucugcaaggcacaugc

SEQ ID NO: 2276910 - RNA, 19 nt, Artificial Sequence
  Description of Artificial Sequence: Synthetic oligonucleotide
  Sense strand starting at position 1458 of SEQ ID NO: 1884589
gagcuuuggcgguagagga

SEQ ID NO: 2276911 - RNA, 19 nt, Artificial Sequence
  Description of Artificial Sequence: Synthetic oligonucleotide
  Antisense strand to SEQ ID NO: 2276910
uccucuaccgccaaagcuc

SEQ ID NO: 2276912 - RNA, 19 nt, Artificial Sequence
  Description of Artificial Sequence: Synthetic oligonucleotide
  Sense strand starting at position 1896 of SEQ ID NO: 1884589
gccgguugugcaagggaga

SEQ ID NO: 2276913 - RNA, 19 nt, Artificial Sequence
  Description of Artificial Sequence: Synthetic oligonucleotide
  Antisense strand to SEQ ID NO: 2276912
ucucccuugcacaaccggc

SEQ ID NO: 2276914 - RNA, 19 nt, Artificial Sequence
  Description of Artificial Sequence: Synthetic oligonucleotide
  Sense strand starting at position 1939 of SEQ ID NO: 1884589
gguuguggucugaggucuu

SEQ ID NO: 2276915 - RNA, 19 nt, Artificial Sequence
  Description of Artificial Sequence: Synthetic oligonucleotide
  Antisense strand to SEQ ID NO: 2276914
aagaccucagaccacaacc

SEQ ID NO: 2276916 - RNA, 19 nt, Artificial Sequence
  Description of Artificial Sequence: Synthetic oligonucleotide
  Sense strand starting at position 1946 of SEQ ID NO: 1884589
gucugaggucuugggccau

SEQ ID NO: 2276917 - RNA, 19 nt, Artificial Sequence
  Description of Artificial Sequence: Synthetic oligonucleotide
  Antisense strand to SEQ ID NO: 2276916
auggcccaagaccucagac

SEQ ID NO: 2276918 - RNA, 19 nt, Artificial Sequence
  Description of Artificial Sequence: Synthetic oligonucleotide
  Sense strand starting at position 1950 of SEQ ID NO: 1884589
gaggucuugggccaucagu

SEQ ID NO: 2276919 - RNA, 19 nt, Artificial Sequence
  Description of Artificial Sequence: Synthetic oligonucleotide
  Antisense strand to SEQ ID NO: 2276918
acugauggcccaagaccuc

SEQ ID NO: 2276920 - RNA, 19 nt, Artificial Sequence
  Description of Artificial Sequence: Synthetic oligonucleotide
  Sense strand starting at position 1959 of SEQ ID NO: 1884589
ggccaucagugaugucaca

SEQ ID NO: 2276921 - RNA, 19 nt, Artificial Sequence
  Description of Artificial Sequence: Synthetic oligonucleotide
  Antisense strand to SEQ ID NO: 2276920
ugugacaucacugauggcc

SEQ ID NO: 2276922 - RNA, 19 nt, Artificial Sequence
  Description of Artificial Sequence: Synthetic oligonucleotide
  Sense strand starting at position 2032 of SEQ ID NO: 1884589
ggucgaugugcagaggcau

SEQ ID NO: 2276923 - RNA, 19 nt, Artificial Sequence
  Description of Artificial Sequence: Synthetic oligonucleotide
  Antisense strand to SEQ ID NO: 2276922
augccucugcacaucgacc

SEQ ID NO: 2276924 - RNA, 19 nt, Artificial Sequence
  Description of Artificial Sequence: Synthetic oligonucleotide
  Sense strand starting at position 2033 of SEQ ID NO: 1884589
gucgaugugcagaggcauu

SEQ ID NO: 2276925 - RNA, 19 nt, Artificial Sequence
  Description of Artificial Sequence: Synthetic oligonucleotide
  Antisense strand to SEQ ID NO: 2276924
aaugccucugcacaucgac

SEQ ID NO: 2276926 - RNA, 19 nt, Artificial Sequence
  Description of Artificial Sequence: Synthetic oligonucleotide
  Sense strand starting at position 2050 of SEQ ID NO: 1884589
uuggauaaguuaguccuga

SEQ ID NO: 2276927 - RNA, 19 nt, Artificial Sequence
  Description of Artificial Sequence: Synthetic oligonucleotide
  Antisense strand to SEQ ID NO: 2276926
ucaggacuaacuuauccaa

SEQ ID NO: 2276928 - RNA, 19 nt, Artificial Sequence
  Description of Artificial Sequence: Synthetic oligonucleotide
  Sense strand starting at position 2051 of SEQ ID NO: 1884589
uggauaaguuaguccugac

SEQ ID NO: 2276929 - RNA, 19 nt, Artificial Sequence
  Description of Artificial Sequence: Synthetic oligonucleotide
  Antisense strand to SEQ ID NO: 2276928
gucaggacuaacuuaucca

SEQ ID NO: 2276930 - RNA, 19 nt, Artificial Sequence
  Description of Artificial Sequence: Synthetic oligonucleotide
  Sense strand starting at position 2054 of SEQ ID NO: 1884589
auaaguuaguccugacccu

SEQ ID NO: 2276931 - RNA, 19 nt, Artificial Sequence
  Description of Artificial Sequence: Synthetic oligonucleotide
  Antisense strand to SEQ ID NO: 2276930
agggucaggacuaacuuau

SEQ ID NO: 2276932 - RNA, 19 nt, Artificial Sequence
  Description of Artificial Sequence: Synthetic oligonucleotide
  Sense strand starting at position 2881 of SEQ ID NO: 1884589
gacagucacagguggagaa

SEQ ID NO: 2276933 - RNA, 19 nt, Artificial Sequence
  Description of Artificial Sequence: Synthetic oligonucleotide
  Antisense strand to SEQ ID NO: 2276932
uucuccaccugugacuguc

SEQ ID NO: 2276934 - RNA, 19 nt, Artificial Sequence
  Description of Artificial Sequence: Synthetic oligonucleotide
  Sense strand starting at position 2896 of SEQ ID NO: 1884589
agaaaugggugaggacaaa

SEQ ID NO: 2276935 - RNA, 19 nt, Artificial Sequence
  Description of Artificial Sequence: Synthetic oligonucleotide
  Antisense strand to SEQ ID NO: 2276934
uuuguccucacccauuucu

SEQ ID NO: 2276936 - RNA, 19 nt, Artificial Sequence
  Description of Artificial Sequence: Synthetic oligonucleotide
  Sense strand starting at position 2920 of SEQ ID NO: 1884589
ggagguggcgucugggaaa

SEQ ID NO: 2276937 - RNA, 19 nt, Artificial Sequence
  Description of Artificial Sequence: Synthetic oligonucleotide
  Antisense strand to SEQ ID NO: 2276936
uuucccagacgccaccucc

SEQ ID NO: 2276938 - RNA, 19 nt, Artificial Sequence
  Description of Artificial Sequence: Synthetic oligonucleotide
  Sense strand starting at position 2982 of SEQ ID NO: 1884589
guguaagugaugcagccuu

SEQ ID NO: 2276939 - RNA, 19 nt, Artificial Sequence
  Description of Artificial Sequence: Synthetic oligonucleotide
  Antisense strand to SEQ ID NO: 2276938
aaggcugcaucacuuacac

SEQ ID NO: 2276940 - RNA, 19 nt, Artificial Sequence
  Description of Artificial Sequence: Synthetic oligonucleotide
  Sense strand starting at position 3098 of SEQ ID NO: 1884589
aagagaucuuggugggaag

SEQ ID NO: 2276941 - RNA, 19 nt, Artificial Sequence
  Description of Artificial Sequence: Synthetic oligonucleotide
  Antisense strand to SEQ ID NO: 2276940
cuucccaccaagaucucuu

SEQ ID NO: 2276942 - RNA, 19 nt, Artificial Sequence
  Description of Artificial Sequence: Synthetic oligonucleotide
  Sense strand starting at position 3482 of SEQ ID NO: 1884589
ccuaguggucccuagugau

SEQ ID NO: 2276943 - RNA, 19 nt, Artificial Sequence
  Description of Artificial Sequence: Synthetic oligonucleotide
  Antisense strand to SEQ ID NO: 2276942
aucacuagggaccacuagg

SEQ ID NO: 2276944 - RNA, 19 nt, Artificial Sequence
  Description of Artificial Sequence: Synthetic oligonucleotide
  Sense strand starting at position 3485 of SEQ ID NO: 1884589
aguggucccuagugauucu

SEQ ID NO: 2276945 - RNA, 19 nt, Artificial Sequence
  Description of Artificial Sequence: Synthetic oligonucleotide
  Antisense strand to SEQ ID NO: 2276944
agaaucacuagggaccacu

SEQ ID NO: 2276946 - RNA, 19 nt, Artificial Sequence
  Description of Artificial Sequence: Synthetic oligonucleotide
  Sense strand starting at position 3566 of SEQ ID NO: 1884589
guguggagggcuugucuga

SEQ ID NO: 2276947 - RNA, 19 nt, Artificial Sequence
  Description of Artificial Sequence: Synthetic oligonucleotide
  Antisense strand to SEQ ID NO: 2276946
ucagacaagcccuccacac

SEQ ID NO: 2276948 - RNA, 19 nt, Artificial Sequence
  Description of Artificial Sequence: Synthetic oligonucleotide
  Sense strand starting at position 3750 of SEQ ID NO: 1884589
cuaugcuuuccagcagugu

SEQ ID NO: 2276949 - RNA, 19 nt, Artificial Sequence
  Description of Artificial Sequence: Synthetic oligonucleotide
  Antisense strand to SEQ ID NO: 2276948
acacugcuggaaagcauag

SEQ ID NO: 2276950 - RNA, 19 nt, Artificial Sequence
  Description of Artificial Sequence: Synthetic oligonucleotide
  Sense strand starting at position 3751 of SEQ ID NO: 1884589
uaugcuuuccagcagugua

SEQ ID NO: 2276951 - RNA, 19 nt, Artificial Sequence
  Description of Artificial Sequence: Synthetic oligonucleotide
  Antisense strand to SEQ ID NO: 2276950
uacacugcuggaaagcaua

SEQ ID NO: 2276952 - RNA, 19 nt, Artificial Sequence
  Description of Artificial Sequence: Synthetic oligonucleotide
  Sense strand starting at position 24 of SEQ ID NO: 1884590
auuggugaagccggacaau

SEQ ID NO: 2276953 - RNA, 19 nt, Artificial Sequence
  Description of Artificial Sequence: Synthetic oligonucleotide
  Antisense strand to SEQ ID NO: 2276952
auuguccggcuucaccaau

SEQ ID NO: 2276954 - RNA, 19 nt, Artificial Sequence
  Description of Artificial Sequence: Synthetic oligonucleotide
  Sense strand starting at position 97 of SEQ ID NO: 1884590
ugaaauuccgaauguacuu

SEQ ID NO: 2276955 - RNA, 19 nt, Artificial Sequence
  Description of Artificial Sequence: Synthetic oligonucleotide
  Antisense strand to SEQ ID NO: 2276954
aaguacauucggaauuuca

SEQ ID NO: 2276956 - RNA, 19 nt, Artificial Sequence
  Description of Artificial Sequence: Synthetic oligonucleotide
  Sense strand starting at position 116 of SEQ ID NO: 1884590
auguacuugcuugagauua

SEQ ID NO: 2276957 - RNA, 19 nt, Artificial Sequence
  Description of Artificial Sequence: Synthetic oligonucleotide
  Antisense strand to SEQ ID NO: 2276956
uaaucucaagcaaguacau

SEQ ID NO: 2276958 - RNA, 19 nt, Artificial Sequence
  Description of Artificial Sequence: Synthetic oligonucleotide
  Sense strand starting at position 197 of SEQ ID NO: 1884590
auaucauugugguuagaua

SEQ ID NO: 2276959 - RNA, 19 nt, Artificial Sequence
  Description of Artificial Sequence: Synthetic oligonucleotide
  Antisense strand to SEQ ID NO: 2276958
uaucuaaccacaaugauau

SEQ ID NO: 2276960 - RNA, 19 nt, Artificial Sequence
  Description of Artificial Sequence: Synthetic oligonucleotide
  Sense strand starting at position 205 of SEQ ID NO: 1884590
gugguuagauaauccugga

SEQ ID NO: 2276961 - RNA, 19 nt, Artificial Sequence
  Description of Artificial Sequence: Synthetic oligonucleotide
  Antisense strand to SEQ ID NO: 2276960
uccaggauuaucuaaccac

SEQ ID NO: 2276962 - RNA, 19 nt, Artificial Sequence
  Description of Artificial Sequence: Synthetic oligonucleotide
  Sense strand starting at position 209 of SEQ ID NO: 1884590
uuagauaauccuggaguug

SEQ ID NO: 2276963 - RNA, 19 nt, Artificial Sequence
  Description of Artificial Sequence: Synthetic oligonucleotide
  Antisense strand to SEQ ID NO: 2276962
caacuccaggauuaucuaa

SEQ ID NO: 2276964 - RNA, 19 nt, Artificial Sequence
  Description of Artificial Sequence: Synthetic oligonucleotide
  Sense strand starting at position 260 of SEQ ID NO: 1884590
caggaagagugccucauau

SEQ ID NO: 2276965 - RNA, 19 nt, Artificial Sequence
  Description of Artificial Sequence: Synthetic oligonucleotide
  Antisense strand to SEQ ID NO: 2276964
auaugaggcacucuuccug

SEQ ID NO: 2276966 - RNA, 19 nt, Artificial Sequence
  Description of Artificial Sequence: Synthetic oligonucleotide
  Sense strand starting at position 262 of SEQ ID NO: 1884590
ggaagagugccucauaugu

SEQ ID NO: 2276967 - RNA, 19 nt, Artificial Sequence
  Description of Artificial Sequence: Synthetic oligonucleotide
  Antisense strand to SEQ ID NO: 2276966
acauaugaggcacucuucc

SEQ ID NO: 2276968 - RNA, 19 nt, Artificial Sequence
  Description of Artificial Sequence: Synthetic oligonucleotide
  Sense strand starting at position 339 of SEQ ID NO: 1884590
uuuguuguuguauagacaa

SEQ ID NO: 2276969 - RNA, 19 nt, Artificial Sequence
  Description of Artificial Sequence: Synthetic oligonucleotide
  Antisense strand to SEQ ID NO: 2276968
uugucuauacaacaacaaa

SEQ ID NO: 2276970 - RNA, 19 nt, Artificial Sequence
  Description of Artificial Sequence: Synthetic oligonucleotide
  Sense strand starting at position 377 of SEQ ID NO: 1884590
agugaagucacuugauggu

SEQ ID NO: 2276971 - RNA, 19 nt, Artificial Sequence
  Description of Artificial Sequence: Synthetic oligonucleotide
  Antisense strand to SEQ ID NO: 2276970
accaucaagugacuucacu

SEQ ID NO: 2276972 - RNA, 19 nt, Artificial Sequence
  Description of Artificial Sequence: Synthetic oligonucleotide
  Sense strand starting at position 381 of SEQ ID NO: 1884590
aagucacuugauggucaua

SEQ ID NO: 2276973 - RNA, 19 nt, Artificial Sequence
  Description of Artificial Sequence: Synthetic oligonucleotide
  Antisense strand to SEQ ID NO: 2276972
uaugaccaucaagugacuu

SEQ ID NO: 2276974 - RNA, 19 nt, Artificial Sequence
  Description of Artificial Sequence: Synthetic oligonucleotide
  Sense strand starting at position 383 of SEQ ID NO: 1884590
gucacuugauggucauaua

SEQ ID NO: 2276975 - RNA, 19 nt, Artificial Sequence
  Description of Artificial Sequence: Synthetic oligonucleotide
  Antisense strand to SEQ ID NO: 2276974
uauaugaccaucaagugac

SEQ ID NO: 2276976 - RNA, 19 nt, Artificial Sequence
  Description of Artificial Sequence: Synthetic oligonucleotide
  Sense strand starting at position 399 of SEQ ID NO: 1884590
auaggaaauaugugacagu

SEQ ID NO: 2276977 - RNA, 19 nt, Artificial Sequence
  Description of Artificial Sequence: Synthetic oligonucleotide
  Antisense strand to SEQ ID NO: 2276976
acugucacauauuuccuau

SEQ ID NO: 2276978 - RNA, 19 nt, Artificial Sequence
  Description of Artificial Sequence: Synthetic oligonucleotide
  Sense strand starting at position 431 of SEQ ID NO: 1884590
cuggucugaccucaaaguu

SEQ ID NO: 2276979 - RNA, 19 nt, Artificial Sequence
  Description of Artificial Sequence: Synthetic oligonucleotide
  Antisense strand to SEQ ID NO: 2276978
aacuuugaggucagaccag

SEQ ID NO: 2276980 - RNA, 19 nt, Artificial Sequence
  Description of Artificial Sequence: Synthetic oligonucleotide
  Sense strand starting at position 716 of SEQ ID NO: 1884590
ugaaguaucuuaguuuauc

SEQ ID NO: 2276981 - RNA, 19 nt, Artificial Sequence
  Description of Artificial Sequence: Synthetic oligonucleotide
  Antisense strand to SEQ ID NO: 2276980
gauaaacuaagauacuuca

SEQ ID NO: 2276982 - RNA, 19 nt, Artificial Sequence
  Description of Artificial Sequence: Synthetic oligonucleotide
  Sense strand starting at position 781 of SEQ ID NO: 1884590
auagcucgcagugaauaau

SEQ ID NO: 2276983 - RNA, 19 nt, Artificial Sequence
  Description of Artificial Sequence: Synthetic oligonucleotide
  Antisense strand to SEQ ID NO: 2276982
auuauucacugcgagcuau

SEQ ID NO: 2276984 - RNA, 19 nt, Artificial Sequence
  Description of Artificial Sequence: Synthetic oligonucleotide
  Sense strand starting at position 784 of SEQ ID NO: 1884590
gcucgcagugaauaauuaa

SEQ ID NO: 2276985 - RNA, 19 nt, Artificial Sequence
  Description of Artificial Sequence: Synthetic oligonucleotide
  Antisense strand to SEQ ID NO: 2276984
uuaauuauucacugcgagc

SEQ ID NO: 2276986 - RNA, 19 nt, Artificial Sequence
  Description of Artificial Sequence: Synthetic oligonucleotide
  Sense strand starting at position 935 of SEQ ID NO: 1884590
cuggcaagauacuuugaua

SEQ ID NO: 2276987 - RNA, 19 nt, Artificial Sequence
  Description of Artificial Sequence: Synthetic oligonucleotide
  Antisense strand to SEQ ID NO: 2276986
uaucaaaguaucuugccag

SEQ ID NO: 2276988 - RNA, 19 nt, Artificial Sequence
  Description of Artificial Sequence: Synthetic oligonucleotide
  Sense strand starting at position 997 of SEQ ID NO: 1884590
gaaaguuuauguguuauug

SEQ ID NO: 2276989 - RNA, 19 nt, Artificial Sequence
  Description of Artificial Sequence: Synthetic oligonucleotide
  Antisense strand to SEQ ID NO: 2276988
caauaacacauaaacuuuc

SEQ ID NO: 2276990 - RNA, 19 nt, Artificial Sequence
  Description of Artificial Sequence: Synthetic oligonucleotide
  Sense strand starting at position 1114 of SEQ ID NO: 1884590
ggcuuaguuugacuagaag

SEQ ID NO: 2276991 - RNA, 19 nt, Artificial Sequence
  Description of Artificial Sequence: Synthetic oligonucleotide
  Antisense strand to SEQ ID NO: 2276990
cuucuagucaaacuaagcc

SEQ ID NO: 2276992 - RNA, 19 nt, Artificial Sequence
  Description of Artificial Sequence: Synthetic oligonucleotide
  Sense strand starting at position 1117 of SEQ ID NO: 1884590
uuaguuugacuagaagguu

SEQ ID NO: 2276993 - RNA, 19 nt, Artificial Sequence
  Description of Artificial Sequence: Synthetic oligonucleotide
  Antisense strand to SEQ ID NO: 2276992
aaccuucuagucaaacuaa

SEQ ID NO: 2276994 - RNA, 19 nt, Artificial Sequence
  Description of Artificial Sequence: Synthetic oligonucleotide
  Sense strand starting at position 1120 of SEQ ID NO: 1884590
guuugacuagaagguuaaa

SEQ ID NO: 2276995 - RNA, 19 nt, Artificial Sequence
  Description of Artificial Sequence: Synthetic oligonucleotide
  Antisense strand to SEQ ID NO: 2276994
uuuaaccuucuagucaaac

SEQ ID NO: 2276996 - RNA, 19 nt, Artificial Sequence
  Description of Artificial Sequence: Synthetic oligonucleotide
  Sense strand starting at position 1161 of SEQ ID NO: 1884590
cuguuagucguauaccaaa

SEQ ID NO: 2276997 - RNA, 19 nt, Artificial Sequence
  Description of Artificial Sequence: Synthetic oligonucleotide
  Antisense strand to SEQ ID NO: 2276996
uuugguauacgacuaacag

SEQ ID NO: 2276998 - RNA, 19 nt, Artificial Sequence
  Description of Artificial Sequence: Synthetic oligonucleotide
  Sense strand starting at position 1230 of SEQ ID NO: 1884590
cauuguaaagccuggacau

SEQ ID NO: 2276999 - RNA, 19 nt, Artificial Sequence
  Description of Artificial Sequence: Synthetic oligonucleotide
  Antisense strand to SEQ ID NO: 2276998
auguccaggcuuuacaaug

SEQ ID NO: 2277000 - RNA, 19 nt, Artificial Sequence
  Description of Artificial Sequence: Synthetic oligonucleotide
  Sense strand starting at position 1231 of SEQ ID NO: 1884590
auuguaaagccuggacaua

SEQ ID NO: 2277001 - RNA, 19 nt, Artificial Sequence
  Description of Artificial Sequence: Synthetic oligonucleotide
  Antisense strand to SEQ ID NO: 2277000
uauguccaggcuuuacaau

SEQ ID NO: 2277002 - RNA, 19 nt, Artificial Sequence
  Description of Artificial Sequence: Synthetic oligonucleotide
  Sense strand starting at position 1274 of SEQ ID NO: 1884590
uuuguaucaucugugaaga

SEQ ID NO: 2277003 - RNA, 19 nt, Artificial Sequence
  Description of Artificial Sequence: Synthetic oligonucleotide
  Antisense strand to SEQ ID NO: 2277002
ucuucacagaugauacaaa

SEQ ID NO: 2277004 - RNA, 19 nt, Artificial Sequence
  Description of Artificial Sequence: Synthetic oligonucleotide
  Sense strand starting at position 1275 of SEQ ID NO: 1884590
uuguaucaucugugaagac

SEQ ID NO: 2277005 - RNA, 19 nt, Artificial Sequence
  Description of Artificial Sequence: Synthetic oligonucleotide
  Antisense strand to SEQ ID NO: 2277004
gucuucacagaugauacaa

SEQ ID NO: 2277006 - RNA, 19 nt, Artificial Sequence
  Description of Artificial Sequence: Synthetic oligonucleotide
  Sense strand starting at position 1357 of SEQ ID NO: 1884590
uggauuguguaucuuaaac

SEQ ID NO: 2277007 - RNA, 19 nt, Artificial Sequence
  Description of Artificial Sequence: Synthetic oligonucleotide
  Antisense strand to SEQ ID NO: 2277006
guuuaagauacacaaucca

SEQ ID NO: 2277008 - RNA, 19 nt, Artificial Sequence
  Description of Artificial Sequence: Synthetic oligonucleotide
  Sense strand starting at position 1507 of SEQ ID NO: 1884590
acacucaugcuuuaaggua

SEQ ID NO: 2277009 - RNA, 19 nt, Artificial Sequence
  Description of Artificial Sequence: Synthetic oligonucleotide
  Antisense strand to SEQ ID NO: 2277008
uaccuuaaagcaugagugu

SEQ ID NO: 2277010 - RNA, 19 nt, Artificial Sequence
  Description of Artificial Sequence: Synthetic oligonucleotide
  Sense strand starting at position 1716 of SEQ ID NO: 1884590
uguauaucccuacaacugu

SEQ ID NO: 2277011 - RNA, 19 nt, Artificial Sequence
  Description of Artificial Sequence: Synthetic oligonucleotide
  Antisense strand to SEQ ID NO: 2277010
acaguuguagggauauaca

SEQ ID NO: 2277012 - RNA, 19 nt, Artificial Sequence
  Description of Artificial Sequence: Synthetic oligonucleotide
  Sense strand starting at position 1798 of SEQ ID NO: 1884590
gagaguauauguguacuca

SEQ ID NO: 2277013 - RNA, 19 nt, Artificial Sequence
  Description of Artificial Sequence: Synthetic oligonucleotide
  Antisense strand to SEQ ID NO: 2277012
ugaguacacauauacucuc

SEQ ID NO: 2277014 - RNA, 19 nt, Artificial Sequence
  Description of Artificial Sequence: Synthetic oligonucleotide
  Sense strand starting at position 1912 of SEQ ID NO: 1884590
agauuaugguaagugugau

SEQ ID NO: 2277015 - RNA, 19 nt, Artificial Sequence
  Description of Artificial Sequence: Synthetic oligonucleotide
  Antisense strand to SEQ ID NO: 2277014
aucacacuuaccauaaucu

SEQ ID NO: 2277016 - RNA, 19 nt, Artificial Sequence
  Description of Artificial Sequence: Synthetic oligonucleotide
  Sense strand starting at position 1913 of SEQ ID NO: 1884590
gauuaugguaagugugaug

SEQ ID NO: 2277017 - RNA, 19 nt, Artificial Sequence
  Description of Artificial Sequence: Synthetic oligonucleotide
  Antisense strand to SEQ ID NO: 2277016
caucacacuuaccauaauc

SEQ ID NO: 2277018 - RNA, 19 nt, Artificial Sequence
  Description of Artificial Sequence: Synthetic oligonucleotide
  Sense strand starting at position 2667 of SEQ ID NO: 1884590
gggugaagggcaugaacau

SEQ ID NO: 2277019 - RNA, 19 nt, Artificial Sequence
  Description of Artificial Sequence: Synthetic oligonucleotide
  Antisense strand to SEQ ID NO: 2277018
auguucaugcccuucaccc

SEQ ID NO: 2277020 - RNA, 19 nt, Artificial Sequence
  Description of Artificial Sequence: Synthetic oligonucleotide
  Sense strand starting at position 3552 of SEQ ID NO: 1884590
gauagugccauugggaaag

SEQ ID NO: 2277021 - RNA, 19 nt, Artificial Sequence
  Description of Artificial Sequence: Synthetic oligonucleotide
  Antisense strand to SEQ ID NO: 2277020
cuuucccaauggcacuauc

SEQ ID NO: 2277022 - RNA, 19 nt, Artificial Sequence
  Description of Artificial Sequence: Synthetic oligonucleotide
  Sense strand starting at position 3691 of SEQ ID NO: 1884590
agaugagcuuaccuagcaa

SEQ ID NO: 2277023 - RNA, 19 nt, Artificial Sequence
  Description of Artificial Sequence: Synthetic oligonucleotide
  Antisense strand to SEQ ID NO: 2277022
uugcuagguaagcucaucu

SEQ ID NO: 2277024 - RNA, 19 nt, Artificial Sequence
  Description of Artificial Sequence: Synthetic oligonucleotide
  Sense strand starting at position 3793 of SEQ ID NO: 1884590
gucagaaauaaaugguuga

SEQ ID NO: 2277025 - RNA, 19 nt, Artificial Sequence
  Description of Artificial Sequence: Synthetic oligonucleotide
  Antisense strand to SEQ ID NO: 2277024
ucaaccauuuauuucugac

SEQ ID NO: 2277026 - RNA, 19 nt, Artificial Sequence
  Description of Artificial Sequence: Synthetic oligonucleotide
  Sense strand starting at position 3916 of SEQ ID NO: 1884590
uuugcuauuugcuuauagu

SEQ ID NO: 2277027 - RNA, 19 nt, Artificial Sequence
  Description of Artificial Sequence: Synthetic oligonucleotide
  Antisense strand to SEQ ID NO: 2277026
acuauaagcaaauagcaaa

SEQ ID NO: 2277028 - RNA, 19 nt, Artificial Sequence
  Description of Artificial Sequence: Synthetic oligonucleotide
  Sense strand starting at position 3917 of SEQ ID NO: 1884590
uugcuauuugcuuauaguu

SEQ ID NO: 2277029 - RNA, 19 nt, Artificial Sequence
  Description of Artificial Sequence: Synthetic oligonucleotide
  Antisense strand to SEQ ID NO: 2277028
aacuauaagcaaauagcaa

SEQ ID NO: 2277030 - RNA, 19 nt, Artificial Sequence
  Description of Artificial Sequence: Synthetic oligonucleotide
  Sense strand starting at position 3935 of SEQ ID NO: 1884590
ugcuauguuauggauagaa

SEQ ID NO: 2277031 - RNA, 19 nt, Artificial Sequence
  Description of Artificial Sequence: Synthetic oligonucleotide
  Antisense strand to SEQ ID NO: 2277030
uucuauccauaacauagca

SEQ ID NO: 2277032 - RNA, 19 nt, Artificial Sequence
  Description of Artificial Sequence: Synthetic oligonucleotide
  Sense strand starting at position 280 of SEQ ID NO: 1884591
gaaggauccuugcuccaga

SEQ ID NO: 2277033 - RNA, 19 nt, Artificial Sequence
  Description of Artificial Sequence: Synthetic oligonucleotide
  Antisense strand to SEQ ID NO: 2277032
ucuggagcaaggauccuuc

SEQ ID NO: 2277034 - RNA, 19 nt, Artificial Sequence
  Description of Artificial Sequence: Synthetic oligonucleotide
  Sense strand starting at position 283 of SEQ ID NO: 1884591
ggauccuugcuccagaaua

SEQ ID NO: 2277035 - RNA, 19 nt, Artificial Sequence
  Description of Artificial Sequence: Synthetic oligonucleotide
  Antisense strand to SEQ ID NO: 2277034
uauucuggagcaaggaucc

SEQ ID NO: 2277036 - RNA, 19 nt, Artificial Sequence
  Description of Artificial Sequence: Synthetic oligonucleotide
  Sense strand starting at position 360 of SEQ ID NO: 1884591
aguuuagguucuccuuuga

SEQ ID NO: 2277037 - RNA, 19 nt, Artificial Sequence
  Description of Artificial Sequence: Synthetic oligonucleotide
  Antisense strand to SEQ ID NO: 2277036
ucaaaggagaaccuaaacu

SEQ ID NO: 2277038 - RNA, 19 nt, Artificial Sequence
  Description of Artificial Sequence: Synthetic oligonucleotide
  Sense strand starting at position 373 of SEQ ID NO: 1884591
cuuugagaggcuuauucuu

SEQ ID NO: 2277039 - RNA, 19 nt, Artificial Sequence
  Description of Artificial Sequence: Synthetic oligonucleotide
  Antisense strand to SEQ ID NO: 2277038
aagaauaagccucucaaag

SEQ ID NO: 2277040 - RNA, 19 nt, Artificial Sequence
  Description of Artificial Sequence: Synthetic oligonucleotide
  Sense strand starting at position 375 of SEQ ID NO: 1884591
uugagaggcuuauucuuag

SEQ ID NO: 2277041 - RNA, 19 nt, Artificial Sequence
  Description of Artificial Sequence: Synthetic oligonucleotide
  Antisense strand to SEQ ID NO: 2277040
cuaagaauaagccucucaa

SEQ ID NO: 2277042 - RNA, 19 nt, Artificial Sequence
  Description of Artificial Sequence: Synthetic oligonucleotide
  Sense strand starting at position 378 of SEQ ID NO: 1884591
agaggcuuauucuuaggua

SEQ ID NO: 2277043 - RNA, 19 nt, Artificial Sequence
  Description of Artificial Sequence: Synthetic oligonucleotide
  Antisense strand to SEQ ID NO: 2277042
uaccuaagaauaagccucu

SEQ ID NO: 2277044 - RNA, 19 nt, Artificial Sequence
  Description of Artificial Sequence: Synthetic oligonucleotide
  Sense strand starting at position 399 of SEQ ID NO: 1884591
uguaacuuagugugacaau

SEQ ID NO: 2277045 - RNA, 19 nt, Artificial Sequence
  Description of Artificial Sequence: Synthetic oligonucleotide
  Antisense strand to SEQ ID NO: 2277044
auugucacacuaaguuaca

SEQ ID NO: 2277046 - RNA, 19 nt, Artificial Sequence
  Description of Artificial Sequence: Synthetic oligonucleotide
  Sense strand starting at position 526 of SEQ ID NO: 1884591
gcauuccuacauggaacau

SEQ ID NO: 2277047 - RNA, 19 nt, Artificial Sequence
  Description of Artificial Sequence: Synthetic oligonucleotide
  Antisense strand to SEQ ID NO: 2277046
auguuccauguaggaaugc

SEQ ID NO: 2277048 - RNA, 19 nt, Artificial Sequence
  Description of Artificial Sequence: Synthetic oligonucleotide
  Sense strand starting at position 751 of SEQ ID NO: 1884591
cuggguuccaggugaauug

SEQ ID NO: 2277049 - RNA, 19 nt, Artificial Sequence
  Description of Artificial Sequence: Synthetic oligonucleotide
  Antisense strand to SEQ ID NO: 2277048
caauucaccuggaacccag

SEQ ID NO: 2277050 - RNA, 19 nt, Artificial Sequence
  Description of Artificial Sequence: Synthetic oligonucleotide
  Sense strand starting at position 761 of SEQ ID NO: 1884591
ggugaauugagagacgucu

SEQ ID NO: 2277051 - RNA, 19 nt, Artificial Sequence
  Description of Artificial Sequence: Synthetic oligonucleotide
  Antisense strand to SEQ ID NO: 2277050
agacgucucucaauucacc

SEQ ID NO: 2277052 - RNA, 19 nt, Artificial Sequence
  Description of Artificial Sequence: Synthetic oligonucleotide
  Sense strand starting at position 769 of SEQ ID NO: 1884591
gagagacgucugcauucug

SEQ ID NO: 2277053 - RNA, 19 nt, Artificial Sequence
  Description of Artificial Sequence: Synthetic oligonucleotide
  Antisense strand to SEQ ID NO: 2277052
cagaaugcagacgucucuc

SEQ ID NO: 2277054 - RNA, 19 nt, Artificial Sequence
  Description of Artificial Sequence: Synthetic oligonucleotide
  Sense strand starting at position 809 of SEQ ID NO: 1884591
gccaguggucuggauaauu

SEQ ID NO: 2277055 - RNA, 19 nt, Artificial Sequence
  Description of Artificial Sequence: Synthetic oligonucleotide
  Antisense strand to SEQ ID NO: 2277054
aauuauccagaccacuggc

SEQ ID NO: 2277056 - RNA, 19 nt, Artificial Sequence
  Description of Artificial Sequence: Synthetic oligonucleotide
  Sense strand starting at position 848 of SEQ ID NO: 1884591
gccuucuggcuugagaaag

SEQ ID NO: 2277057 - RNA, 19 nt, Artificial Sequence
  Description of Artificial Sequence: Synthetic oligonucleotide
  Antisense strand to SEQ ID NO: 2277056
cuuucucaagccagaaggc

SEQ ID NO: 2277058 - RNA, 19 nt, Artificial Sequence
  Description of Artificial Sequence: Synthetic oligonucleotide
  Sense strand starting at position 972 of SEQ ID NO: 1884591
gcuguuuggcaagagggau

SEQ ID NO: 2277059 - RNA, 19 nt, Artificial Sequence
  Description of Artificial Sequence: Synthetic oligonucleotide
  Antisense strand to SEQ ID NO: 2277058
aucccucuugccaaacagc

SEQ ID NO: 2277060 - RNA, 19 nt, Artificial Sequence
  Description of Artificial Sequence: Synthetic oligonucleotide
  Sense strand starting at position 1010 of SEQ ID NO: 1884591
ggagcagccuucccuaaau

SEQ ID NO: 2277061 - RNA, 19 nt, Artificial Sequence
  Description of Artificial Sequence: Synthetic oligonucleotide
  Antisense strand to SEQ ID NO: 2277060
auuuagggaaggcugcucc

SEQ ID NO: 2277062 - RNA, 19 nt, Artificial Sequence
  Description of Artificial Sequence: Synthetic oligonucleotide
  Sense strand starting at position 1021 of SEQ ID NO: 1884591
cccuaaaugccuuauguga

SEQ ID NO: 2277063 - RNA, 19 nt, Artificial Sequence
  Description of Artificial Sequence: Synthetic oligonucleotide
  Antisense strand to SEQ ID NO: 2277062
ucacauaaggcauuuaggg

SEQ ID NO: 2277064 - RNA, 19 nt, Artificial Sequence
  Description of Artificial Sequence: Synthetic oligonucleotide
  Sense strand starting at position 1048 of SEQ ID NO: 1884591
ccuugucucccucaguaaa

SEQ ID NO: 2277065 - RNA, 19 nt, Artificial Sequence
  Description of Artificial Sequence: Synthetic oligonucleotide
  Antisense strand to SEQ ID NO: 2277064
uuuacugagggagacaagg

SEQ ID NO: 2277066 - RNA, 19 nt, Artificial Sequence
  Description of Artificial Sequence: Synthetic oligonucleotide
  Sense strand starting at position 1050 of SEQ ID NO: 1884591
uugucucccucaguaaaug

SEQ ID NO: 2277067 - RNA, 19 nt, Artificial Sequence
  Description of Artificial Sequence: Synthetic oligonucleotide
  Antisense strand to SEQ ID NO: 2277066
cauuuacugagggagacaa

SEQ ID NO: 2277068 - RNA, 19 nt, Artificial Sequence
  Description of Artificial Sequence: Synthetic oligonucleotide
  Sense strand starting at position 1051 of SEQ ID NO: 1884591
ugucucccucaguaaaugu

SEQ ID NO: 2277069 - RNA, 19 nt, Artificial Sequence
  Description of Artificial Sequence: Synthetic oligonucleotide
  Antisense strand to SEQ ID NO: 2277068
acauuuacugagggagaca

SEQ ID NO: 2277070 - RNA, 19 nt, Artificial Sequence
  Description of Artificial Sequence: Synthetic oligonucleotide
  Sense strand starting at position 1173 of SEQ ID NO: 1884591
aggaguagguccuugguga

SEQ ID NO: 2277071 - RNA, 19 nt, Artificial Sequence
  Description of Artificial Sequence: Synthetic oligonucleotide
  Antisense strand to SEQ ID NO: 2277070
ucaccaaggaccuacuccu

SEQ ID NO: 2277072 - RNA, 19 nt, Artificial Sequence
  Description of Artificial Sequence: Synthetic oligonucleotide
  Sense strand starting at position 1174 of SEQ ID NO: 1884591
ggaguagguccuuggugaa

SEQ ID NO: 2277073 - RNA, 19 nt, Artificial Sequence
  Description of Artificial Sequence: Synthetic oligonucleotide
  Antisense strand to SEQ ID NO: 2277072
uucaccaaggaccuacucc

SEQ ID NO: 2277074 - RNA, 19 nt, Artificial Sequence
  Description of Artificial Sequence: Synthetic oligonucleotide
  Sense strand starting at position 1212 of SEQ ID NO: 1884591
auccauucugucugaaaga

SEQ ID NO: 2277075 - RNA, 19 nt, Artificial Sequence
  Description of Artificial Sequence: Synthetic oligonucleotide
  Antisense strand to SEQ ID NO: 2277074
ucuuucagacagaauggau

SEQ ID NO: 2277076 - RNA, 19 nt, Artificial Sequence
  Description of Artificial Sequence: Synthetic oligonucleotide
  Sense strand starting at position 1281 of SEQ ID NO: 1884591
auggcucucuuauuagauc

SEQ ID NO: 2277077 - RNA, 19 nt, Artificial Sequence
  Description of Artificial Sequence: Synthetic oligonucleotide
  Antisense strand to SEQ ID NO: 2277076
gaucuaauaagagagccau

SEQ ID NO: 2277078 - RNA, 19 nt, Artificial Sequence
  Description of Artificial Sequence: Synthetic oligonucleotide
  Sense strand starting at position 1521 of SEQ ID NO: 1884591
uggacaucagagcaauguu

SEQ ID NO: 2277079 - RNA, 19 nt, Artificial Sequence
  Description of Artificial Sequence: Synthetic oligonucleotide
  Antisense strand to SEQ ID NO: 2277078
aacauugcucugaugucca

SEQ ID NO: 2277080 - RNA, 19 nt, Artificial Sequence
  Description of Artificial Sequence: Synthetic oligonucleotide
  Sense strand starting at position 1529 of SEQ ID NO: 1884591
agagcaauguugcuaaaug

SEQ ID NO: 2277081 - RNA, 19 nt, Artificial Sequence
  Description of Artificial Sequence: Synthetic oligonucleotide
  Antisense strand to SEQ ID NO: 2277080
cauuuagcaacauugcucu

SEQ ID NO: 2277082 - RNA, 19 nt, Artificial Sequence
  Description of Artificial Sequence: Synthetic oligonucleotide
  Sense strand starting at position 1711 of SEQ ID NO: 1884591
gcuuauagguaacuugaaa

SEQ ID NO: 2277083 - RNA, 19 nt, Artificial Sequence
  Description of Artificial Sequence: Synthetic oligonucleotide
  Antisense strand to SEQ ID NO: 2277082
uuucaaguuaccuauaagc

SEQ ID NO: 2277084 - RNA, 19 nt, Artificial Sequence
  Description of Artificial Sequence: Synthetic oligonucleotide
  Sense strand starting at position 1753 of SEQ ID NO: 1884591
ggucuaagggucuguauug

SEQ ID NO: 2277085 - RNA, 19 nt, Artificial Sequence
  Description of Artificial Sequence: Synthetic oligonucleotide
  Antisense strand to SEQ ID NO: 2277084
caauacagacccuuagacc

SEQ ID NO: 2277086 - RNA, 19 nt, Artificial Sequence
  Description of Artificial Sequence: Synthetic oligonucleotide
  Sense strand starting at position 1759 of SEQ ID NO: 1884591
agggucuguauuggacuaa

SEQ ID NO: 2277087 - RNA, 19 nt, Artificial Sequence
  Description of Artificial Sequence: Synthetic oligonucleotide
  Antisense strand to SEQ ID NO: 2277086
uuaguccaauacagacccu

SEQ ID NO: 2277088 - RNA, 19 nt, Artificial Sequence
  Description of Artificial Sequence: Synthetic oligonucleotide
  Sense strand starting at position 1763 of SEQ ID NO: 1884591
ucuguauuggacuaauucu

SEQ ID NO: 2277089 - RNA, 19 nt, Artificial Sequence
  Description of Artificial Sequence: Synthetic oligonucleotide
  Antisense strand to SEQ ID NO: 2277088
agaauuaguccaauacaga

SEQ ID NO: 2277090 - RNA, 19 nt, Artificial Sequence
  Description of Artificial Sequence: Synthetic oligonucleotide
  Sense strand starting at position 1795 of SEQ ID NO: 1884591
auuggaccucaaugucauu

SEQ ID NO: 2277091 - RNA, 19 nt, Artificial Sequence
  Description of Artificial Sequence: Synthetic oligonucleotide
  Antisense strand to SEQ ID NO: 2277090
aaugacauugagguccaau

SEQ ID NO: 2277092 - RNA, 19 nt, Artificial Sequence
  Description of Artificial Sequence: Synthetic oligonucleotide
  Sense strand starting at position 1821 of SEQ ID NO: 1884591
cucauauuaaugggaguga

SEQ ID NO: 2277093 - RNA, 19 nt, Artificial Sequence
  Description of Artificial Sequence: Synthetic oligonucleotide
  Antisense strand to SEQ ID NO: 2277092
ucacucccauuaauaugag

SEQ ID NO: 2277094 - RNA, 19 nt, Artificial Sequence
  Description of Artificial Sequence: Synthetic oligonucleotide
  Sense strand starting at position 1830 of SEQ ID NO: 1884591
augggagugaaaugucuaa

SEQ ID NO: 2277095 - RNA, 19 nt, Artificial Sequence
  Description of Artificial Sequence: Synthetic oligonucleotide
  Antisense strand to SEQ ID NO: 2277094
uuagacauuucacucccau

SEQ ID NO: 2277096 - RNA, 19 nt, Artificial Sequence
  Description of Artificial Sequence: Synthetic oligonucleotide
  Sense strand starting at position 1867 of SEQ ID NO: 1884591
uccagaguugugggaaucu

SEQ ID NO: 2277097 - RNA, 19 nt, Artificial Sequence
  Description of Artificial Sequence: Synthetic oligonucleotide
  Antisense strand to SEQ ID NO: 2277096
agauucccacaacucugga

SEQ ID NO: 2277098 - RNA, 19 nt, Artificial Sequence
  Description of Artificial Sequence: Synthetic oligonucleotide
  Sense strand starting at position 1922 of SEQ ID NO: 1884591
gcuaguguucauguguucu

SEQ ID NO: 2277099 - RNA, 19 nt, Artificial Sequence
  Description of Artificial Sequence: Synthetic oligonucleotide
  Antisense strand to SEQ ID NO: 2277098
agaacacaugaacacuagc

SEQ ID NO: 2277100 - RNA, 19 nt, Artificial Sequence
  Description of Artificial Sequence: Synthetic oligonucleotide
  Sense strand starting at position 2137 of SEQ ID NO: 1884591
ucuuucucccgugaaacuu

SEQ ID NO: 2277101 - RNA, 19 nt, Artificial Sequence
  Description of Artificial Sequence: Synthetic oligonucleotide
  Antisense strand to SEQ ID NO: 2277100
aaguuucacgggagaaaga

SEQ ID NO: 2277102 - RNA, 19 nt, Artificial Sequence
  Description of Artificial Sequence: Synthetic oligonucleotide
  Sense strand starting at position 2146 of SEQ ID NO: 1884591
cgugaaacuuuacuacuau

SEQ ID NO: 2277103 - RNA, 19 nt, Artificial Sequence
  Description of Artificial Sequence: Synthetic oligonucleotide
  Antisense strand to SEQ ID NO: 2277102
auaguaguaaaguuucacg

SEQ ID NO: 2277104 - RNA, 19 nt, Artificial Sequence
  Description of Artificial Sequence: Synthetic oligonucleotide
  Sense strand starting at position 2174 of SEQ ID NO: 1884591
gaagacagaucucuuugua

SEQ ID NO: 2277105 - RNA, 19 nt, Artificial Sequence
  Description of Artificial Sequence: Synthetic oligonucleotide
  Antisense strand to SEQ ID NO: 2277104
uacaaagagaucugucuuc

SEQ ID NO: 2277106 - RNA, 19 nt, Artificial Sequence
  Description of Artificial Sequence: Synthetic oligonucleotide
  Sense strand starting at position 2178 of SEQ ID NO: 1884591
acagaucucuuuguauucu

SEQ ID NO: 2277107 - RNA, 19 nt, Artificial Sequence
  Description of Artificial Sequence: Synthetic oligonucleotide
  Antisense strand to SEQ ID NO: 2277106
agaauacaaagagaucugu

SEQ ID NO: 2277108 - RNA, 19 nt, Artificial Sequence
  Description of Artificial Sequence: Synthetic oligonucleotide
  Sense strand starting at position 2383 of SEQ ID NO: 1884591
gggaaacucuggcuuagga

SEQ ID NO: 2277109 - RNA, 19 nt, Artificial Sequence
  Description of Artificial Sequence: Synthetic oligonucleotide
  Antisense strand to SEQ ID NO: 2277108
uccuaagccagaguuuccc

SEQ ID NO: 2277110 - RNA, 19 nt, Artificial Sequence
  Description of Artificial Sequence: Synthetic oligonucleotide
  Sense strand starting at position 2433 of SEQ ID NO: 1884591
uguuguucgaguuaaauau

SEQ ID NO: 2277111 - RNA, 19 nt, Artificial Sequence
  Description of Artificial Sequence: Synthetic oligonucleotide
  Antisense strand to SEQ ID NO: 2277110
auauuuaacucgaacaaca

SEQ ID NO: 2277112 - RNA, 19 nt, Artificial Sequence
  Description of Artificial Sequence: Synthetic oligonucleotide
  Sense strand starting at position 754 of SEQ ID NO: 1884592
ugugucuccuguggucaga

SEQ ID NO: 2277113 - RNA, 19 nt, Artificial Sequence
  Description of Artificial Sequence: Synthetic oligonucleotide
  Antisense strand to SEQ ID NO: 2277112
ucugaccacaggagacaca

SEQ ID NO: 2277114 - RNA, 19 nt, Artificial Sequence
  Description of Artificial Sequence: Synthetic oligonucleotide
  Sense strand starting at position 756 of SEQ ID NO: 1884592
ugucuccuguggucagaau

SEQ ID NO: 2277115 - RNA, 19 nt, Artificial Sequence
  Description of Artificial Sequence: Synthetic oligonucleotide
  Antisense strand to SEQ ID NO: 2277114
auucugaccacaggagaca

SEQ ID NO: 2277116 - RNA, 19 nt, Artificial Sequence
  Description of Artificial Sequence: Synthetic oligonucleotide
  Sense strand starting at position 757 of SEQ ID NO: 1884592
gucuccuguggucagaaua

SEQ ID NO: 2277117 - RNA, 19 nt, Artificial Sequence
  Description of Artificial Sequence: Synthetic oligonucleotide
  Antisense strand to SEQ ID NO: 2277116
uauucugaccacaggagac

SEQ ID NO: 2277118 - RNA, 19 nt, Artificial Sequence
  Description of Artificial Sequence: Synthetic oligonucleotide
  Sense strand starting at position 826 of SEQ ID NO: 1884592
cugugcuuccuccaucagu

SEQ ID NO: 2277119 - RNA, 19 nt, Artificial Sequence
  Description of Artificial Sequence: Synthetic oligonucleotide
  Antisense strand to SEQ ID NO: 2277118
acugauggaggaagcacag

SEQ ID NO: 2277120 - RNA, 19 nt, Artificial Sequence
  Description of Artificial Sequence: Synthetic oligonucleotide
  Sense strand starting at position 951 of SEQ ID NO: 1884592
ggcugugccucuucgauca

SEQ ID NO: 2277121 - RNA, 19 nt, Artificial Sequence
  Description of Artificial Sequence: Synthetic oligonucleotide
  Antisense strand to SEQ ID NO: 2277120
ugaucgaagaggcacagcc

SEQ ID NO: 2277122 - RNA, 19 nt, Artificial Sequence
  Description of Artificial Sequence: Synthetic oligonucleotide
  Sense strand starting at position 955 of SEQ ID NO: 1884592
gugccucuucgaucagugu

SEQ ID NO: 2277123 - RNA, 19 nt, Artificial Sequence
  Description of Artificial Sequence: Synthetic oligonucleotide
  Antisense strand to SEQ ID NO: 2277122
acacugaucgaagaggcac

SEQ ID NO: 2277124 - RNA, 19 nt, Artificial Sequence
  Description of Artificial Sequence: Synthetic oligonucleotide
  Sense strand starting at position 956 of SEQ ID NO: 1884592
ugccucuucgaucagugua

SEQ ID NO: 2277125 - RNA, 19 nt, Artificial Sequence
  Description of Artificial Sequence: Synthetic oligonucleotide
  Antisense strand to SEQ ID NO: 2277124
uacacugaucgaagaggca

SEQ ID NO: 2277126 - RNA, 19 nt, Artificial Sequence
  Description of Artificial Sequence: Synthetic oligonucleotide
  Sense strand starting at position 2665 of SEQ ID NO: 1884592
gagucucucugagcuguuu

SEQ ID NO: 2277127 - RNA, 19 nt, Artificial Sequence
  Description of Artificial Sequence: Synthetic oligonucleotide
  Antisense strand to SEQ ID NO: 2277126
aaacagcucagagagacuc

SEQ ID NO: 2277128 - RNA, 19 nt, Artificial Sequence
  Description of Artificial Sequence: Synthetic oligonucleotide
  Sense strand starting at position 3022 of SEQ ID NO: 1884592
gagugcuucugcccucaga

SEQ ID NO: 2277129 - RNA, 19 nt, Artificial Sequence
  Description of Artificial Sequence: Synthetic oligonucleotide
  Antisense strand to SEQ ID NO: 2277128
ucugagggcagaagcacuc

SEQ ID NO: 2277130 - RNA, 19 nt, Artificial Sequence
  Description of Artificial Sequence: Synthetic oligonucleotide
  Sense strand starting at position 3249 of SEQ ID NO: 1884592
cagggcuuauuaucccaga

SEQ ID NO: 2277131 - RNA, 19 nt, Artificial Sequence
  Description of Artificial Sequence: Synthetic oligonucleotide
  Antisense strand to SEQ ID NO: 2277130
ucugggauaauaagcccug

SEQ ID NO: 2277132 - RNA, 19 nt, Artificial Sequence
  Description of Artificial Sequence: Synthetic oligonucleotide
  Sense strand starting at position 3407 of SEQ ID NO: 1884592
cugccagcgcgugaucuaa

SEQ ID NO: 2277133 - RNA, 19 nt, Artificial Sequence
  Description of Artificial Sequence: Synthetic oligonucleotide
  Antisense strand to SEQ ID NO: 2277132
uuagaucacgcgcuggcag

SEQ ID NO: 2277134 - RNA, 19 nt, Artificial Sequence
  Description of Artificial Sequence: Synthetic oligonucleotide
  Sense strand starting at position 3585 of SEQ ID NO: 1884592
uguccugcuccucagaagu

SEQ ID NO: 2277135 - RNA, 19 nt, Artificial Sequence
  Description of Artificial Sequence: Synthetic oligonucleotide
  Antisense strand to SEQ ID NO: 2277134
acuucugaggagcaggaca

SEQ ID NO: 2277136 - RNA, 19 nt, Artificial Sequence
  Description of Artificial Sequence: Synthetic oligonucleotide
  Sense strand starting at position 3656 of SEQ ID NO: 1884592
ccaucauccgggcagauga

SEQ ID NO: 2277137 - RNA, 19 nt, Artificial Sequence
  Description of Artificial Sequence: Synthetic oligonucleotide
  Antisense strand to SEQ ID NO: 2277136
ucaucugcccggaugaugg

SEQ ID NO: 2277138 - RNA, 19 nt, Artificial Sequence
  Description of Artificial Sequence: Synthetic oligonucleotide
  Sense strand starting at position 78 of SEQ ID NO: 1884593
gguggugauuccucuaaga

SEQ ID NO: 2277139 - RNA, 19 nt, Artificial Sequence
  Description of Artificial Sequence: Synthetic oligonucleotide
  Antisense strand to SEQ ID NO: 2277138
ucuuagaggaaucaccacc

SEQ ID NO: 2277140 - RNA, 19 nt, Artificial Sequence
  Description of Artificial Sequence: Synthetic oligonucleotide
  Sense strand starting at position 220 of SEQ ID NO: 1884593
gugugugaugcucagaaga

SEQ ID NO: 2277141 - RNA, 19 nt, Artificial Sequence
  Description of Artificial Sequence: Synthetic oligonucleotide
  Antisense strand to SEQ ID NO: 2277140
ucuucugagcaucacacac

SEQ ID NO: 2277142 - RNA, 19 nt, Artificial Sequence
  Description of Artificial Sequence: Synthetic oligonucleotide
  Sense strand starting at position 236 of SEQ ID NO: 1884593
agaacaucuugggcugaau

SEQ ID NO: 2277143 - RNA, 19 nt, Artificial Sequence
  Description of Artificial Sequence: Synthetic oligonucleotide
  Antisense strand to SEQ ID NO: 2277142
auucagcccaagauguucu

SEQ ID NO: 2277144 - RNA, 19 nt, Artificial Sequence
  Description of Artificial Sequence: Synthetic oligonucleotide
  Sense strand starting at position 239 of SEQ ID NO: 1884593
acaucuugggcugaauacu

SEQ ID NO: 2277145 - RNA, 19 nt, Artificial Sequence
  Description of Artificial Sequence: Synthetic oligonucleotide
  Antisense strand to SEQ ID NO: 2277144
aguauucagcccaagaugu

SEQ ID NO: 2277146 - RNA, 19 nt, Artificial Sequence
  Description of Artificial Sequence: Synthetic oligonucleotide
  Sense strand starting at position 245 of SEQ ID NO: 1884593
ugggcugaauacuuagauu

SEQ ID NO: 2277147 - RNA, 19 nt, Artificial Sequence
  Description of Artificial Sequence: Synthetic oligonucleotide
  Antisense strand to SEQ ID NO: 2277146
aaucuaaguauucagccca

SEQ ID NO: 2277148 - RNA, 19 nt, Artificial Sequence
  Description of Artificial Sequence: Synthetic oligonucleotide
  Sense strand starting at position 333 of SEQ ID NO: 1884593
gaaugaaacguuggccuaa

SEQ ID NO: 2277149 - RNA, 19 nt, Artificial Sequence
  Description of Artificial Sequence: Synthetic oligonucleotide
  Antisense strand to SEQ ID NO: 2277148
uuaggccaacguuucauuc

SEQ ID NO: 2277150 - RNA, 19 nt, Artificial Sequence
  Description of Artificial Sequence: Synthetic oligonucleotide
  Sense strand starting at position 335 of SEQ ID NO: 1884593
augaaacguuggccuaaga

SEQ ID NO: 2277151 - RNA, 19 nt, Artificial Sequence
  Description of Artificial Sequence: Synthetic oligonucleotide
  Antisense strand to SEQ ID NO: 2277150
ucuuaggccaacguuucau

SEQ ID NO: 2277152 - RNA, 19 nt, Artificial Sequence
  Description of Artificial Sequence: Synthetic oligonucleotide
  Sense strand starting at position 537 of SEQ ID NO: 1884593
augccacuagauugacaaa

SEQ ID NO: 2277153 - RNA, 19 nt, Artificial Sequence
  Description of Artificial Sequence: Synthetic oligonucleotide
  Antisense strand to SEQ ID NO: 2277152
uuugucaaucuaguggcau

SEQ ID NO: 2277154 - RNA, 19 nt, Artificial Sequence
  Description of Artificial Sequence: Synthetic oligonucleotide
  Sense strand starting at position 929 of SEQ ID NO: 1884593
ccagaagacuuugauuuau

SEQ ID NO: 2277155 - RNA, 19 nt, Artificial Sequence
  Description of Artificial Sequence: Synthetic oligonucleotide
  Antisense strand to SEQ ID NO: 2277154
auaaaucaaagucuucugg

SEQ ID NO: 2277156 - RNA, 19 nt, Artificial Sequence
  Description of Artificial Sequence: Synthetic oligonucleotide
  Sense strand starting at position 948 of SEQ ID NO: 1884593
ucaguuggugcgaacguaa

SEQ ID NO: 2277157 - RNA, 19 nt, Artificial Sequence
  Description of Artificial Sequence: Synthetic oligonucleotide
  Antisense strand to SEQ ID NO: 2277156
uuacguucgcaccaacuga

SEQ ID NO: 2277158 - RNA, 19 nt, Artificial Sequence
  Description of Artificial Sequence: Synthetic oligonucleotide
  Sense strand starting at position 1188 of SEQ ID NO: 1884593
auacgaguuacugggaaug

SEQ ID NO: 2277159 - RNA, 19 nt, Artificial Sequence
  Description of Artificial Sequence: Synthetic oligonucleotide
  Antisense strand to SEQ ID NO: 2277158
cauucccaguaacucguau

SEQ ID NO: 2277160 - RNA, 19 nt, Artificial Sequence
  Description of Artificial Sequence: Synthetic oligonucleotide
  Sense strand starting at position 1199 of SEQ ID NO: 1884593
ugggaauggacuuguccuu

SEQ ID NO: 2277161 - RNA, 19 nt, Artificial Sequence
  Description of Artificial Sequence: Synthetic oligonucleotide
  Antisense strand to SEQ ID NO: 2277160
aaggacaaguccauuccca

SEQ ID NO: 2277162 - RNA, 19 nt, Artificial Sequence
  Description of Artificial Sequence: Synthetic oligonucleotide
  Sense strand starting at position 1380 of SEQ ID NO: 1884593
uaaggacugcaugaguuua

SEQ ID NO: 2277163 - RNA, 19 nt, Artificial Sequence
  Description of Artificial Sequence: Synthetic oligonucleotide
  Antisense strand to SEQ ID NO: 2277162
uaaacucaugcaguccuua

SEQ ID NO: 2277164 - RNA, 19 nt, Artificial Sequence
  Description of Artificial Sequence: Synthetic oligonucleotide
  Sense strand starting at position 1601 of SEQ ID NO: 1884593
ugugcauuuguauaagcca

SEQ ID NO: 2277165 - RNA, 19 nt, Artificial Sequence
  Description of Artificial Sequence: Synthetic oligonucleotide
  Antisense strand to SEQ ID NO: 2277164
uggcuuauacaaaugcaca

SEQ ID NO: 2277166 - RNA, 19 nt, Artificial Sequence
  Description of Artificial Sequence: Synthetic oligonucleotide
  Sense strand starting at position 1619 of SEQ ID NO: 1884593
accucagauucuuuguaga

SEQ ID NO: 2277167 - RNA, 19 nt, Artificial Sequence
  Description of Artificial Sequence: Synthetic oligonucleotide
  Antisense strand to SEQ ID NO: 2277166
ucuacaaagaaucugaggu

SEQ ID NO: 2277168 - RNA, 19 nt, Artificial Sequence
  Description of Artificial Sequence: Synthetic oligonucleotide
  Sense strand starting at position 1621 of SEQ ID NO: 1884593
cucagauucuuuguagaau

SEQ ID NO: 2277169 - RNA, 19 nt, Artificial Sequence
  Description of Artificial Sequence: Synthetic oligonucleotide
  Antisense strand to SEQ ID NO: 2277168
auucuacaaagaaucugag

SEQ ID NO: 2277170 - RNA, 19 nt, Artificial Sequence
  Description of Artificial Sequence: Synthetic oligonucleotide
  Sense strand starting at position 1717 of SEQ ID NO: 1884593
ucccauuuauggcaggaaa

SEQ ID NO: 2277171 - RNA, 19 nt, Artificial Sequence
  Description of Artificial Sequence: Synthetic oligonucleotide
  Antisense strand to SEQ ID NO: 2277170
uuuccugccauaaauggga

SEQ ID NO: 2277172 - RNA, 19 nt, Artificial Sequence
  Description of Artificial Sequence: Synthetic oligonucleotide
  Sense strand starting at position 1878 of SEQ ID NO: 1884593
ucuggauucucagccagag

SEQ ID NO: 2277173 - RNA, 19 nt, Artificial Sequence
  Description of Artificial Sequence: Synthetic oligonucleotide
  Antisense strand to SEQ ID NO: 2277172
cucuggcugagaauccaga

SEQ ID NO: 2277174 - RNA, 19 nt, Artificial Sequence
  Description of Artificial Sequence: Synthetic oligonucleotide
  Sense strand starting at position 1882 of SEQ ID NO: 1884593
gauucucagccagagucuu

SEQ ID NO: 2277175 - RNA, 19 nt, Artificial Sequence
  Description of Artificial Sequence: Synthetic oligonucleotide
  Antisense strand to SEQ ID NO: 2277174
aagacucuggcugagaauc

SEQ ID NO: 2277176 - RNA, 19 nt, Artificial Sequence
  Description of Artificial Sequence: Synthetic oligonucleotide
  Sense strand starting at position 2066 of SEQ ID NO: 1884593
gugccugucccacagaaua

SEQ ID NO: 2277177 - RNA, 19 nt, Artificial Sequence
  Description of Artificial Sequence: Synthetic oligonucleotide
  Antisense strand to SEQ ID NO: 2277176
uauucugugggacaggcac

SEQ ID NO: 2277178 - RNA, 19 nt, Artificial Sequence
  Description of Artificial Sequence: Synthetic oligonucleotide
  Sense strand starting at position 2109 of SEQ ID NO: 1884593
ugccauauccaaugagaua

SEQ ID NO: 2277179 - RNA, 19 nt, Artificial Sequence
  Description of Artificial Sequence: Synthetic oligonucleotide
  Antisense strand to SEQ ID NO: 2277178
uaucucauuggauauggca

SEQ ID NO: 2277180 - RNA, 19 nt, Artificial Sequence
  Description of Artificial Sequence: Synthetic oligonucleotide
  Sense strand starting at position 2211 of SEQ ID NO: 1884593
aggucaggaucauuaguuu

SEQ ID NO: 2277181 - RNA, 19 nt, Artificial Sequence
  Description of Artificial Sequence: Synthetic oligonucleotide
  Antisense strand to SEQ ID NO: 2277180
aaacuaaugauccugaccu

SEQ ID NO: 2277182 - RNA, 19 nt, Artificial Sequence
  Description of Artificial Sequence: Synthetic oligonucleotide
  Sense strand starting at position 2215 of SEQ ID NO: 1884593
caggaucauuaguuucuga

SEQ ID NO: 2277183 - RNA, 19 nt, Artificial Sequence
  Description of Artificial Sequence: Synthetic oligonucleotide
  Antisense strand to SEQ ID NO: 2277182
ucagaaacuaaugauccug

SEQ ID NO: 2277184 - RNA, 19 nt, Artificial Sequence
  Description of Artificial Sequence: Synthetic oligonucleotide
  Sense strand starting at position 2222 of SEQ ID NO: 1884593
auuaguuucugacucuaua

SEQ ID NO: 2277185 - RNA, 19 nt, Artificial Sequence
  Description of Artificial Sequence: Synthetic oligonucleotide
  Antisense strand to SEQ ID NO: 2277184
uauagagucagaaacuaau

SEQ ID NO: 2277186 - RNA, 19 nt, Artificial Sequence
  Description of Artificial Sequence: Synthetic oligonucleotide
  Sense strand starting at position 2225 of SEQ ID NO: 1884593
aguuucugacucuauauca

SEQ ID NO: 2277187 - RNA, 19 nt, Artificial Sequence
  Description of Artificial Sequence: Synthetic oligonucleotide
  Antisense strand to SEQ ID NO: 2277186
ugauauagagucagaaacu

SEQ ID NO: 2277188 - RNA, 19 nt, Artificial Sequence
  Description of Artificial Sequence: Synthetic oligonucleotide
  Sense strand starting at position 2235 of SEQ ID NO: 1884593
ucuauaucaguguaguaaa

SEQ ID NO: 2277189 - RNA, 19 nt, Artificial Sequence
  Description of Artificial Sequence: Synthetic oligonucleotide
  Antisense strand to SEQ ID NO: 2277188
uuuacuacacugauauaga

SEQ ID NO: 2277190 - RNA, 19 nt, Artificial Sequence
  Description of Artificial Sequence: Synthetic oligonucleotide
  Sense strand starting at position 2397 of SEQ ID NO: 1884593
agaagcuuccauuagccau

SEQ ID NO: 2277191 - RNA, 19 nt, Artificial Sequence
  Description of Artificial Sequence: Synthetic oligonucleotide
  Antisense strand to SEQ ID NO: 2277190
auggcuaauggaagcuucu

SEQ ID NO: 2277192 - RNA, 19 nt, Artificial Sequence
  Description of Artificial Sequence: Synthetic oligonucleotide
  Sense strand starting at position 2451 of SEQ ID NO: 1884593
ggcuaugacccauaagucu

SEQ ID NO: 2277193 - RNA, 19 nt, Artificial Sequence
  Description of Artificial Sequence: Synthetic oligonucleotide
  Antisense strand to SEQ ID NO: 2277192
agacuuaugggucauagcc

SEQ ID NO: 2277194 - RNA, 19 nt, Artificial Sequence
  Description of Artificial Sequence: Synthetic oligonucleotide
  Sense strand starting at position 2486 of SEQ ID NO: 1884593
cacuguuucccaugagaug

SEQ ID NO: 2277195 - RNA, 19 nt, Artificial Sequence
  Description of Artificial Sequence: Synthetic oligonucleotide
  Antisense strand to SEQ ID NO: 2277194
caucucaugggaaacagug

SEQ ID NO: 2277196 - RNA, 19 nt, Artificial Sequence
  Description of Artificial Sequence: Synthetic oligonucleotide
  Sense strand starting at position 2487 of SEQ ID NO: 1884593
acuguuucccaugagaugu

SEQ ID NO: 2277197 - RNA, 19 nt, Artificial Sequence
  Description of Artificial Sequence: Synthetic oligonucleotide
  Antisense strand to SEQ ID NO: 2277196
acaucucaugggaaacagu

SEQ ID NO: 2277198 - RNA, 19 nt, Artificial Sequence
  Description of Artificial Sequence: Synthetic oligonucleotide
  Sense strand starting at position 2495 of SEQ ID NO: 1884593
ccaugagaugucuaccauc

SEQ ID NO: 2277199 - RNA, 19 nt, Artificial Sequence
  Description of Artificial Sequence: Synthetic oligonucleotide
  Antisense strand to SEQ ID NO: 2277198
gaugguagacaucucaugg

SEQ ID NO: 2277200 - RNA, 19 nt, Artificial Sequence
  Description of Artificial Sequence: Synthetic oligonucleotide
  Sense strand starting at position 2509 of SEQ ID NO: 1884593
ccaucagauugccuauaag

SEQ ID NO: 2277201 - RNA, 19 nt, Artificial Sequence
  Description of Artificial Sequence: Synthetic oligonucleotide
  Antisense strand to SEQ ID NO: 2277200
cuuauaggcaaucugaugg

SEQ ID NO: 2277202 - RNA, 19 nt, Artificial Sequence
  Description of Artificial Sequence: Synthetic oligonucleotide
  Sense strand starting at position 2679 of SEQ ID NO: 1884593
gugagauugacgcauucca

SEQ ID NO: 2277203 - RNA, 19 nt, Artificial Sequence
  Description of Artificial Sequence: Synthetic oligonucleotide
  Antisense strand to SEQ ID NO: 2277202
uggaaugcgucaaucucac

SEQ ID NO: 2277204 - RNA, 19 nt, Artificial Sequence
  Description of Artificial Sequence: Synthetic oligonucleotide
  Sense strand starting at position 3224 of SEQ ID NO: 1884593
cuauguaagcaaugaggua

SEQ ID NO: 2277205 - RNA, 19 nt, Artificial Sequence
  Description of Artificial Sequence: Synthetic oligonucleotide
  Antisense strand to SEQ ID NO: 2277204
uaccucauugcuuacauag

SEQ ID NO: 2277206 - RNA, 19 nt, Artificial Sequence
  Description of Artificial Sequence: Synthetic oligonucleotide
  Sense strand starting at position 3251 of SEQ ID NO: 1884593
gcaucuugucuugucgauu

SEQ ID NO: 2277207 - RNA, 19 nt, Artificial Sequence
  Description of Artificial Sequence: Synthetic oligonucleotide
  Antisense strand to SEQ ID NO: 2277206
aaucgacaagacaagaugc

SEQ ID NO: 2277208 - RNA, 19 nt, Artificial Sequence
  Description of Artificial Sequence: Synthetic oligonucleotide
  Sense strand starting at position 3252 of SEQ ID NO: 1884593
caucuugucuugucgauuu

SEQ ID NO: 2277209 - RNA, 19 nt, Artificial Sequence
  Description of Artificial Sequence: Synthetic oligonucleotide
  Antisense strand to SEQ ID NO: 2277208
aaaucgacaagacaagaug

SEQ ID NO: 2277210 - RNA, 19 nt, Artificial Sequence
  Description of Artificial Sequence: Synthetic oligonucleotide
  Sense strand starting at position 3254 of SEQ ID NO: 1884593
ucuugucuugucgauuuga

SEQ ID NO: 2277211 - RNA, 19 nt, Artificial Sequence
  Description of Artificial Sequence: Synthetic oligonucleotide
  Antisense strand to SEQ ID NO: 2277210
ucaaaucgacaagacaaga

SEQ ID NO: 2277212 - RNA, 19 nt, Artificial Sequence
  Description of Artificial Sequence: Synthetic oligonucleotide
  Sense strand starting at position 3273 of SEQ ID NO: 1884593
uagccuaagcauuagagga

SEQ ID NO: 2277213 - RNA, 19 nt, Artificial Sequence
  Description of Artificial Sequence: Synthetic oligonucleotide
  Antisense strand to SEQ ID NO: 2277212
uccucuaaugcuuaggcua

SEQ ID NO: 2277214 - RNA, 19 nt, Artificial Sequence
  Description of Artificial Sequence: Synthetic oligonucleotide
  Sense strand starting at position 3712 of SEQ ID NO: 1884593
ugcuuucuacuugagaagu

SEQ ID NO: 2277215 - RNA, 19 nt, Artificial Sequence
  Description of Artificial Sequence: Synthetic oligonucleotide
  Antisense strand to SEQ ID NO: 2277214
acuucucaaguagaaagca

SEQ ID NO: 2277216 - RNA, 19 nt, Artificial Sequence
  Description of Artificial Sequence: Synthetic oligonucleotide
  Sense strand starting at position 3970 of SEQ ID NO: 1884593
uucuaaguccaauaguaga

SEQ ID NO: 2277217 - RNA, 19 nt, Artificial Sequence
  Description of Artificial Sequence: Synthetic oligonucleotide
  Antisense strand to SEQ ID NO: 2277216
ucuacuauuggacuuagaa

SEQ ID NO: 2277218 - RNA, 19 nt, Artificial Sequence
  Description of Artificial Sequence: Synthetic oligonucleotide
  Sense strand starting at position 40 of SEQ ID NO: 1884594
uaguuuccggaucauaaua

SEQ ID NO: 2277219 - RNA, 19 nt, Artificial Sequence
  Description of Artificial Sequence: Synthetic oligonucleotide
  Antisense strand to SEQ ID NO: 2277218
uauuaugauccggaaacua

SEQ ID NO: 2277220 - RNA, 19 nt, Artificial Sequence
  Description of Artificial Sequence: Synthetic oligonucleotide
  Sense strand starting at position 136 of SEQ ID NO: 1884594
uuauaugucaaggagguuu

SEQ ID NO: 2277221 - RNA, 19 nt, Artificial Sequence
  Description of Artificial Sequence: Synthetic oligonucleotide
  Antisense strand to SEQ ID NO: 2277220
aaaccuccuugacauauaa

SEQ ID NO: 2277222 - RNA, 19 nt, Artificial Sequence
  Description of Artificial Sequence: Synthetic oligonucleotide
  Sense strand starting at position 183 of SEQ ID NO: 1884594
ggcaaacagcucuacucua

SEQ ID NO: 2277223 - RNA, 19 nt, Artificial Sequence
  Description of Artificial Sequence: Synthetic oligonucleotide
  Antisense strand to SEQ ID NO: 2277222
uagaguagagcuguuugcc

SEQ ID NO: 2277224 - RNA, 19 nt, Artificial Sequence
  Description of Artificial Sequence: Synthetic oligonucleotide
  Sense strand starting at position 437 of SEQ ID NO: 1884594
gcuguuugagaauacaauc

SEQ ID NO: 2277225 - RNA, 19 nt, Artificial Sequence
  Description of Artificial Sequence: Synthetic oligonucleotide
  Antisense strand to SEQ ID NO: 2277224
gauuguauucucaaacagc

SEQ ID NO: 2277226 - RNA, 19 nt, Artificial Sequence
  Description of Artificial Sequence: Synthetic oligonucleotide
  Sense strand starting at position 482 of SEQ ID NO: 1884594
ccagucacugaugaguuua

SEQ ID NO: 2277227 - RNA, 19 nt, Artificial Sequence
  Description of Artificial Sequence: Synthetic oligonucleotide
  Antisense strand to SEQ ID NO: 2277226
uaaacucaucagugacugg

SEQ ID NO: 2277228 - RNA, 19 nt, Artificial Sequence
  Description of Artificial Sequence: Synthetic oligonucleotide
  Sense strand starting at position 484 of SEQ ID NO: 1884594
agucacugaugaguuuaau

SEQ ID NO: 2277229 - RNA, 19 nt, Artificial Sequence
  Description of Artificial Sequence: Synthetic oligonucleotide
  Antisense strand to SEQ ID NO: 2277228
auuaaacucaucagugacu

SEQ ID NO: 2277230 - RNA, 19 nt, Artificial Sequence
  Description of Artificial Sequence: Synthetic oligonucleotide
  Sense strand starting at position 487 of SEQ ID NO: 1884594
cacugaugaguuuaaugca

SEQ ID NO: 2277231 - RNA, 19 nt, Artificial Sequence
  Description of Artificial Sequence: Synthetic oligonucleotide
  Antisense strand to SEQ ID NO: 2277230
ugcauuaaacucaucagug

SEQ ID NO: 2277232 - RNA, 19 nt, Artificial Sequence
  Description of Artificial Sequence: Synthetic oligonucleotide
  Sense strand starting at position 575 of SEQ ID NO: 1884594
ugaacuugucccgagacag

SEQ ID NO: 2277233 - RNA, 19 nt, Artificial Sequence
  Description of Artificial Sequence: Synthetic oligonucleotide
  Antisense strand to SEQ ID NO: 2277232
cugucucgggacaaguuca

SEQ ID NO: 2277234 - RNA, 19 nt, Artificial Sequence
  Description of Artificial Sequence: Synthetic oligonucleotide
  Sense strand starting at position 661 of SEQ ID NO: 1884594
auuaauagugugcaaacau

SEQ ID NO: 2277235 - RNA, 19 nt, Artificial Sequence
  Description of Artificial Sequence: Synthetic oligonucleotide
  Antisense strand to SEQ ID NO: 2277234
auguuugcacacuauuaau

SEQ ID NO: 2277236 - RNA, 19 nt, Artificial Sequence
  Description of Artificial Sequence: Synthetic oligonucleotide
  Sense strand starting at position 712 of SEQ ID NO: 1884594
gauguaugugcuguaugcu

SEQ ID NO: 2277237 - RNA, 19 nt, Artificial Sequence
  Description of Artificial Sequence: Synthetic oligonucleotide
  Antisense strand to SEQ ID NO: 2277236
agcauacagcacauacauc

SEQ ID NO: 2277238 - RNA, 19 nt, Artificial Sequence
  Description of Artificial Sequence: Synthetic oligonucleotide
  Sense strand starting at position 729 of SEQ ID NO: 1884594
cuguauuaggugggaggau

SEQ ID NO: 2277239 - RNA, 19 nt, Artificial Sequence
  Description of Artificial Sequence: Synthetic oligonucleotide
  Antisense strand to SEQ ID NO: 2277238
auccucccaccuaauacag

SEQ ID NO: 2277240 - RNA, 19 nt, Artificial Sequence
  Description of Artificial Sequence: Synthetic oligonucleotide
  Sense strand starting at position 877 of SEQ ID NO: 1884594
gaggaaaugccuugaucug

SEQ ID NO: 2277241 - RNA, 19 nt, Artificial Sequence
  Description of Artificial Sequence: Synthetic oligonucleotide
  Antisense strand to SEQ ID NO: 2277240
cagaucaaggcauuuccuc

SEQ ID NO: 2277242 - RNA, 19 nt, Artificial Sequence
  Description of Artificial Sequence: Synthetic oligonucleotide
  Sense strand starting at position 878 of SEQ ID NO: 1884594
aggaaaugccuugaucugu

SEQ ID NO: 2277243 - RNA, 19 nt, Artificial Sequence
  Description of Artificial Sequence: Synthetic oligonucleotide
  Antisense strand to SEQ ID NO: 2277242
acagaucaaggcauuuccu

SEQ ID NO: 2277244 - RNA, 19 nt, Artificial Sequence
  Description of Artificial Sequence: Synthetic oligonucleotide
  Sense strand starting at position 1134 of SEQ ID NO: 1884594
ccugacugcugaucaauca

SEQ ID NO: 2277245 - RNA, 19 nt, Artificial Sequence
  Description of Artificial Sequence: Synthetic oligonucleotide
  Antisense strand to SEQ ID NO: 2277244
ugauugaucagcagucagg

SEQ ID NO: 2277246 - RNA, 19 nt, Artificial Sequence
  Description of Artificial Sequence: Synthetic oligonucleotide
  Sense strand starting at position 1135 of SEQ ID NO: 1884594
cugacugcugaucaaucaa

SEQ ID NO: 2277247 - RNA, 19 nt, Artificial Sequence
  Description of Artificial Sequence: Synthetic oligonucleotide
  Antisense strand to SEQ ID NO: 2277246
uugauugaucagcagucag

SEQ ID NO: 2277248 - RNA, 19 nt, Artificial Sequence
  Description of Artificial Sequence: Synthetic oligonucleotide
  Sense strand starting at position 1193 of SEQ ID NO: 1884594
aucaaauucgauuaaugcu

SEQ ID NO: 2277249 - RNA, 19 nt, Artificial Sequence
  Description of Artificial Sequence: Synthetic oligonucleotide
  Antisense strand to SEQ ID NO: 2277248
agcauuaaucgaauuugau

SEQ ID NO: 2277250 - RNA, 19 nt, Artificial Sequence
  Description of Artificial Sequence: Synthetic oligonucleotide
  Sense strand starting at position 1310 of SEQ ID NO: 1884594
guaucuuaagguuaauucu

SEQ ID NO: 2277251 - RNA, 19 nt, Artificial Sequence
  Description of Artificial Sequence: Synthetic oligonucleotide
  Antisense strand to SEQ ID NO: 2277250
agaauuaaccuuaagauac

SEQ ID NO: 2277252 - RNA, 19 nt, Artificial Sequence
  Description of Artificial Sequence: Synthetic oligonucleotide
  Sense strand starting at position 1319 of SEQ ID NO: 1884594
gguuaauucucacucucag

SEQ ID NO: 2277253 - RNA, 19 nt, Artificial Sequence
  Description of Artificial Sequence: Synthetic oligonucleotide
  Antisense strand to SEQ ID NO: 2277252
cugagagugagaauuaacc

SEQ ID NO: 2277254 - RNA, 19 nt, Artificial Sequence
  Description of Artificial Sequence: Synthetic oligonucleotide
  Sense strand starting at position 1556 of SEQ ID NO: 1884594
uaugaagagccuugaguca

SEQ ID NO: 2277255 - RNA, 19 nt, Artificial Sequence
  Description of Artificial Sequence: Synthetic oligonucleotide
  Antisense strand to SEQ ID NO: 2277254
ugacucaaggcucuucaua

SEQ ID NO: 2277256 - RNA, 19 nt, Artificial Sequence
  Description of Artificial Sequence: Synthetic oligonucleotide
  Sense strand starting at position 1565 of SEQ ID NO: 1884594
ccuugagucagauggaaua

SEQ ID NO: 2277257 - RNA, 19 nt, Artificial Sequence
  Description of Artificial Sequence: Synthetic oligonucleotide
  Antisense strand to SEQ ID NO: 2277256
uauuccaucugacucaagg

SEQ ID NO: 2277258 - RNA, 19 nt, Artificial Sequence
  Description of Artificial Sequence: Synthetic oligonucleotide
  Sense strand starting at position 1616 of SEQ ID NO: 1884594
aaauguuugcguguuaguu

SEQ ID NO: 2277259 - RNA, 19 nt, Artificial Sequence
  Description of Artificial Sequence: Synthetic oligonucleotide
  Antisense strand to SEQ ID NO: 2277258
aacuaacacgcaaacauuu

SEQ ID NO: 2277260 - RNA, 19 nt, Artificial Sequence
  Description of Artificial Sequence: Synthetic oligonucleotide
  Sense strand starting at position 1617 of SEQ ID NO: 1884594
aauguuugcguguuaguuu

SEQ ID NO: 2277261 - RNA, 19 nt, Artificial Sequence
  Description of Artificial Sequence: Synthetic oligonucleotide
  Antisense strand to SEQ ID NO: 2277260
aaacuaacacgcaaacauu

SEQ ID NO: 2277262 - RNA, 19 nt, Artificial Sequence
  Description of Artificial Sequence: Synthetic oligonucleotide
  Sense strand starting at position 1717 of SEQ ID NO: 1884594
caaguaauguacucagaag

SEQ ID NO: 2277263 - RNA, 19 nt, Artificial Sequence
  Description of Artificial Sequence: Synthetic oligonucleotide
  Antisense strand to SEQ ID NO: 2277262
cuucugaguacauuacuug

SEQ ID NO: 2277264 - RNA, 19 nt, Artificial Sequence
  Description of Artificial Sequence: Synthetic oligonucleotide
  Sense strand starting at position 1763 of SEQ ID NO: 1884594
aguaaauguuagucuugaa

SEQ ID NO: 2277265 - RNA, 19 nt, Artificial Sequence
  Description of Artificial Sequence: Synthetic oligonucleotide
  Antisense strand to SEQ ID NO: 2277264
uucaagacuaacauuuacu

SEQ ID NO: 2277266 - RNA, 19 nt, Artificial Sequence
  Description of Artificial Sequence: Synthetic oligonucleotide
  Sense strand starting at position 1770 of SEQ ID NO: 1884594
guuagucuugaagaugaug

SEQ ID NO: 2277267 - RNA, 19 nt, Artificial Sequence
  Description of Artificial Sequence: Synthetic oligonucleotide
  Antisense strand to SEQ ID NO: 2277266
caucaucuucaagacuaac

SEQ ID NO: 2277268 - RNA, 19 nt, Artificial Sequence
  Description of Artificial Sequence: Synthetic oligonucleotide
  Sense strand starting at position 1880 of SEQ ID NO: 1884594
gcuucuuucuauuugugaa

SEQ ID NO: 2277269 - RNA, 19 nt, Artificial Sequence
  Description of Artificial Sequence: Synthetic oligonucleotide
  Antisense strand to SEQ ID NO: 2277268
uucacaaauagaaagaagc

SEQ ID NO: 2277270 - RNA, 19 nt, Artificial Sequence
  Description of Artificial Sequence: Synthetic oligonucleotide
  Sense strand starting at position 2087 of SEQ ID NO: 1884594
acagauuauugauuguacu

SEQ ID NO: 2277271 - RNA, 19 nt, Artificial Sequence
  Description of Artificial Sequence: Synthetic oligonucleotide
  Antisense strand to SEQ ID NO: 2277270
aguacaaucaauaaucugu

SEQ ID NO: 2277272 - RNA, 19 nt, Artificial Sequence
  Description of Artificial Sequence: Synthetic oligonucleotide
  Sense strand starting at position 2093 of SEQ ID NO: 1884594
uauugauuguacucuagga

SEQ ID NO: 2277273 - RNA, 19 nt, Artificial Sequence
  Description of Artificial Sequence: Synthetic oligonucleotide
  Antisense strand to SEQ ID NO: 2277272
uccuagaguacaaucaaua

SEQ ID NO: 2277274 - RNA, 19 nt, Artificial Sequence
  Description of Artificial Sequence: Synthetic oligonucleotide
  Sense strand starting at position 2097 of SEQ ID NO: 1884594
gauuguacucuaggaaacu

SEQ ID NO: 2277275 - RNA, 19 nt, Artificial Sequence
  Description of Artificial Sequence: Synthetic oligonucleotide
  Antisense strand to SEQ ID NO: 2277274
aguuuccuagaguacaauc

SEQ ID NO: 2277276 - RNA, 19 nt, Artificial Sequence
  Description of Artificial Sequence: Synthetic oligonucleotide
  Sense strand starting at position 2108 of SEQ ID NO: 1884594
aggaaacuuuaugucuuau

SEQ ID NO: 2277277 - RNA, 19 nt, Artificial Sequence
  Description of Artificial Sequence: Synthetic oligonucleotide
  Antisense strand to SEQ ID NO: 2277276
auaagacauaaaguuuccu

SEQ ID NO: 2277278 - RNA, 19 nt, Artificial Sequence
  Description of Artificial Sequence: Synthetic oligonucleotide
  Sense strand starting at position 2212 of SEQ ID NO: 1884594
agaggaaagguauguucau

SEQ ID NO: 2277279 - RNA, 19 nt, Artificial Sequence
  Description of Artificial Sequence: Synthetic oligonucleotide
  Antisense strand to SEQ ID NO: 2277278
augaacauaccuuuccucu

SEQ ID NO: 2277280 - RNA, 19 nt, Artificial Sequence
  Description of Artificial Sequence: Synthetic oligonucleotide
  Sense strand starting at position 2288 of SEQ ID NO: 1884594
uuaauauggaugggagguu

SEQ ID NO: 2277281 - RNA, 19 nt, Artificial Sequence
  Description of Artificial Sequence: Synthetic oligonucleotide
  Antisense strand to SEQ ID NO: 2277280
aaccucccauccauauuaa

SEQ ID NO: 2277282 - RNA, 19 nt, Artificial Sequence
  Description of Artificial Sequence: Synthetic oligonucleotide
  Sense strand starting at position 2302 of SEQ ID NO: 1884594
agguuaaaguacuccuuau

SEQ ID NO: 2277283 - RNA, 19 nt, Artificial Sequence
  Description of Artificial Sequence: Synthetic oligonucleotide
  Antisense strand to SEQ ID NO: 2277282
auaaggaguacuuuaaccu

SEQ ID NO: 2277284 - RNA, 19 nt, Artificial Sequence
  Description of Artificial Sequence: Synthetic oligonucleotide
  Sense strand starting at position 2542 of SEQ ID NO: 1884594
ugacuuaauaucggguaga

SEQ ID NO: 2277285 - RNA, 19 nt, Artificial Sequence
  Description of Artificial Sequence: Synthetic oligonucleotide
  Antisense strand to SEQ ID NO: 2277284
ucuacccgauauuaaguca

SEQ ID NO: 2277286 - RNA, 19 nt, Artificial Sequence
  Description of Artificial Sequence: Synthetic oligonucleotide
  Sense strand starting at position 2563 of SEQ ID NO: 1884594
caggguuugucuccacaaa

SEQ ID NO: 2277287 - RNA, 19 nt, Artificial Sequence
  Description of Artificial Sequence: Synthetic oligonucleotide
  Antisense strand to SEQ ID NO: 2277286
uuuguggagacaaacccug

SEQ ID NO: 2277288 - RNA, 19 nt, Artificial Sequence
  Description of Artificial Sequence: Synthetic oligonucleotide
  Sense strand starting at position 2564 of SEQ ID NO: 1884594
aggguuugucuccacaaag

SEQ ID NO: 2277289 - RNA, 19 nt, Artificial Sequence
  Description of Artificial Sequence: Synthetic oligonucleotide
  Antisense strand to SEQ ID NO: 2277288
cuuuguggagacaaacccu

SEQ ID NO: 2277290 - RNA, 19 nt, Artificial Sequence
  Description of Artificial Sequence: Synthetic oligonucleotide
  Sense strand starting at position 2915 of SEQ ID NO: 1884594
uuaaguaugguaugaauga

SEQ ID NO: 2277291 - RNA, 19 nt, Artificial Sequence
  Description of Artificial Sequence: Synthetic oligonucleotide
  Antisense strand to SEQ ID NO: 2277290
ucauucauaccauacuuaa

SEQ ID NO: 2277292 - RNA, 19 nt, Artificial Sequence
  Description of Artificial Sequence: Synthetic oligonucleotide
  Sense strand starting at position 2966 of SEQ ID NO: 1884594
acuauaguuccucagucau

SEQ ID NO: 2277293 - RNA, 19 nt, Artificial Sequence
  Description of Artificial Sequence: Synthetic oligonucleotide
  Antisense strand to SEQ ID NO: 2277292
augacugaggaacuauagu

SEQ ID NO: 2277294 - RNA, 19 nt, Artificial Sequence
  Description of Artificial Sequence: Synthetic oligonucleotide
  Sense strand starting at position 2972 of SEQ ID NO: 1884594
guuccucagucauuuguaa

SEQ ID NO: 2277295 - RNA, 19 nt, Artificial Sequence
  Description of Artificial Sequence: Synthetic oligonucleotide
  Antisense strand to SEQ ID NO: 2277294
uuacaaaugacugaggaac

SEQ ID NO: 2277296 - RNA, 19 nt, Artificial Sequence
  Description of Artificial Sequence: Synthetic oligonucleotide
  Sense strand starting at position 3061 of SEQ ID NO: 1884594
aagccaagcgugcuaguua

SEQ ID NO: 2277297 - RNA, 19 nt, Artificial Sequence
  Description of Artificial Sequence: Synthetic oligonucleotide
  Antisense strand to SEQ ID NO: 2277296
uaacuagcacgcuuggcuu

SEQ ID NO: 2277298 - RNA, 19 nt, Artificial Sequence
  Description of Artificial Sequence: Synthetic oligonucleotide
  Sense strand starting at position 26 of SEQ ID NO: 1884595
agaucuucuacagggugua

SEQ ID NO: 2277299 - RNA, 19 nt, Artificial Sequence
  Description of Artificial Sequence: Synthetic oligonucleotide
  Antisense strand to SEQ ID NO: 2277298
uacacccuguagaagaucu

SEQ ID NO: 2277300 - RNA, 19 nt, Artificial Sequence
  Description of Artificial Sequence: Synthetic oligonucleotide
  Sense strand starting at position 312 of SEQ ID NO: 1884595
cacuaaguggcugagcaau

SEQ ID NO: 2277301 - RNA, 19 nt, Artificial Sequence
  Description of Artificial Sequence: Synthetic oligonucleotide
  Antisense strand to SEQ ID NO: 2277300
auugcucagccacuuagug

SEQ ID NO: 2277302 - RNA, 19 nt, Artificial Sequence
  Description of Artificial Sequence: Synthetic oligonucleotide
  Sense strand starting at position 494 of SEQ ID NO: 1884595
uucuguuugcuuccgcaga

SEQ ID NO: 2277303 - RNA, 19 nt, Artificial Sequence
  Description of Artificial Sequence: Synthetic oligonucleotide
  Antisense strand to SEQ ID NO: 2277302
ucugcggaagcaaacagaa

SEQ ID NO: 2277304 - RNA, 19 nt, Artificial Sequence
  Description of Artificial Sequence: Synthetic oligonucleotide
  Sense strand starting at position 757 of SEQ ID NO: 1884595
agggaaugcuuucuaucau

SEQ ID NO: 2277305 - RNA, 19 nt, Artificial Sequence
  Description of Artificial Sequence: Synthetic oligonucleotide
  Antisense strand to SEQ ID NO: 2277304
augauagaaagcauucccu

SEQ ID NO: 2277306 - RNA, 19 nt, Artificial Sequence
  Description of Artificial Sequence: Synthetic oligonucleotide
  Sense strand starting at position 841 of SEQ ID NO: 1884595
ggcaauaguggugacucua

SEQ ID NO: 2277307 - RNA, 19 nt, Artificial Sequence
  Description of Artificial Sequence: Synthetic oligonucleotide
  Antisense strand to SEQ ID NO: 2277306
uagagucaccacuauugcc

SEQ ID NO: 2277308 - RNA, 19 nt, Artificial Sequence
  Description of Artificial Sequence: Synthetic oligonucleotide
  Sense strand starting at position 881 of SEQ ID NO: 1884595
uuugguauuauugaugagu

SEQ ID NO: 2277309 - RNA, 19 nt, Artificial Sequence
  Description of Artificial Sequence: Synthetic oligonucleotide
  Antisense strand to SEQ ID NO: 2277308
acucaucaauaauaccaaa

SEQ ID NO: 2277310 - RNA, 19 nt, Artificial Sequence
  Description of Artificial Sequence: Synthetic oligonucleotide
  Sense strand starting at position 884 of SEQ ID NO: 1884595
gguauuauugaugaguuuc

SEQ ID NO: 2277311 - RNA, 19 nt, Artificial Sequence
  Description of Artificial Sequence: Synthetic oligonucleotide
  Antisense strand to SEQ ID NO: 2277310
gaaacucaucaauaauacc

SEQ ID NO: 2277312 - RNA, 19 nt, Artificial Sequence
  Description of Artificial Sequence: Synthetic oligonucleotide
  Sense strand starting at position 917 of SEQ ID NO: 1884595
cugugagguauuuguauuc

SEQ ID NO: 2277313 - RNA, 19 nt, Artificial Sequence
  Description of Artificial Sequence: Synthetic oligonucleotide
  Antisense strand to SEQ ID NO: 2277312
gaauacaaauaccucacag

SEQ ID NO: 2277314 - RNA, 19 nt, Artificial Sequence
  Description of Artificial Sequence: Synthetic oligonucleotide
  Sense strand starting at position 963 of SEQ ID NO: 1884595
gucugaauuacguacugag

SEQ ID NO: 2277315 - RNA, 19 nt, Artificial Sequence
  Description of Artificial Sequence: Synthetic oligonucleotide
  Antisense strand to SEQ ID NO: 2277314
cucaguacguaauucagac

SEQ ID NO: 2277316 - RNA, 19 nt, Artificial Sequence
  Description of Artificial Sequence: Synthetic oligonucleotide
  Sense strand starting at position 967 of SEQ ID NO: 1884595
gaauuacguacugagaguu

SEQ ID NO: 2277317 - RNA, 19 nt, Artificial Sequence
  Description of Artificial Sequence: Synthetic oligonucleotide
  Antisense strand to SEQ ID NO: 2277316
aacucucaguacguaauuc

SEQ ID NO: 2277318 - RNA, 19 nt, Artificial Sequence
  Description of Artificial Sequence: Synthetic oligonucleotide
  Sense strand starting at position 973 of SEQ ID NO: 1884595
cguacugagaguugagaca

SEQ ID NO: 2277319 - RNA, 19 nt, Artificial Sequence
  Description of Artificial Sequence: Synthetic oligonucleotide
  Antisense strand to SEQ ID NO: 2277318
ugucucaacucucaguacg

SEQ ID NO: 2277320 - RNA, 19 nt, Artificial Sequence
  Description of Artificial Sequence: Synthetic oligonucleotide
  Sense strand starting at position 1169 of SEQ ID NO: 1884595
ugguaucagaugugaggau

SEQ ID NO: 2277321 - RNA, 19 nt, Artificial Sequence
  Description of Artificial Sequence: Synthetic oligonucleotide
  Antisense strand to SEQ ID NO: 2277320
auccucacaucugauacca

SEQ ID NO: 2277322 - RNA, 19 nt, Artificial Sequence
  Description of Artificial Sequence: Synthetic oligonucleotide
  Sense strand starting at position 1300 of SEQ ID NO: 1884595
cuuagugcuguagaacaaa

SEQ ID NO: 2277323 - RNA, 19 nt, Artificial Sequence
  Description of Artificial Sequence: Synthetic oligonucleotide
  Antisense strand to SEQ ID NO: 2277322
uuuguucuacagcacuaag

SEQ ID NO: 2277324 - RNA, 19 nt, Artificial Sequence
  Description of Artificial Sequence: Synthetic oligonucleotide
  Sense strand starting at position 1359 of SEQ ID NO: 1884595
agacaugagugagcaaagu

SEQ ID NO: 2277325 - RNA, 19 nt, Artificial Sequence
  Description of Artificial Sequence: Synthetic oligonucleotide
  Antisense strand to SEQ ID NO: 2277324
acuuugcucacucaugucu

SEQ ID NO: 2277326 - RNA, 19 nt, Artificial Sequence
  Description of Artificial Sequence: Synthetic oligonucleotide
  Sense strand starting at position 1505 of SEQ ID NO: 1884595
gugcuuagccacguuaaug

SEQ ID NO: 2277327 - RNA, 19 nt, Artificial Sequence
  Description of Artificial Sequence: Synthetic oligonucleotide
  Antisense strand to SEQ ID NO: 2277326
cauuaacguggcuaagcac

SEQ ID NO: 2277328 - RNA, 19 nt, Artificial Sequence
  Description of Artificial Sequence: Synthetic oligonucleotide
  Sense strand starting at position 1934 of SEQ ID NO: 1884595
ggcaaaguauuuguuguaa

SEQ ID NO: 2277329 - RNA, 19 nt, Artificial Sequence
  Description of Artificial Sequence: Synthetic oligonucleotide
  Antisense strand to SEQ ID NO: 2277328
uuacaacaaauacuuugcc

SEQ ID NO: 2277330 - RNA, 19 nt, Artificial Sequence
  Description of Artificial Sequence: Synthetic oligonucleotide
  Sense strand starting at position 1947 of SEQ ID NO: 1884595
uuguaaggauaacuguauu

SEQ ID NO: 2277331 - RNA, 19 nt, Artificial Sequence
  Description of Artificial Sequence: Synthetic oligonucleotide
  Antisense strand to SEQ ID NO: 2277330
aauacaguuauccuuacaa

SEQ ID NO: 2277332 - RNA, 19 nt, Artificial Sequence
  Description of Artificial Sequence: Synthetic oligonucleotide
  Sense strand starting at position 1986 of SEQ ID NO: 1884595
aaacaugaguuagccugaa

SEQ ID NO: 2277333 - RNA, 19 nt, Artificial Sequence
  Description of Artificial Sequence: Synthetic oligonucleotide
  Antisense strand to SEQ ID NO: 2277332
uucaggcuaacucauguuu

SEQ ID NO: 2277334 - RNA, 19 nt, Artificial Sequence
  Description of Artificial Sequence: Synthetic oligonucleotide
  Sense strand starting at position 2076 of SEQ ID NO: 1884595
cuuauagcaucccuggaaa

SEQ ID NO: 2277335 - RNA, 19 nt, Artificial Sequence
  Description of Artificial Sequence: Synthetic oligonucleotide
  Antisense strand to SEQ ID NO: 2277334
uuuccagggaugcuauaag

SEQ ID NO: 2277336 - RNA, 19 nt, Artificial Sequence
  Description of Artificial Sequence: Synthetic oligonucleotide
  Sense strand starting at position 2321 of SEQ ID NO: 1884595
gagcauuaagcucaaguua

SEQ ID NO: 2277337 - RNA, 19 nt, Artificial Sequence
  Description of Artificial Sequence: Synthetic oligonucleotide
  Antisense strand to SEQ ID NO: 2277336
uaacuugagcuuaaugcuc

SEQ ID NO: 2277338 - RNA, 19 nt, Artificial Sequence
  Description of Artificial Sequence: Synthetic oligonucleotide
  Sense strand starting at position 2400 of SEQ ID NO: 1884595
uagauaugguucuuacaug

SEQ ID NO: 2277339 - RNA, 19 nt, Artificial Sequence
  Description of Artificial Sequence: Synthetic oligonucleotide
  Antisense strand to SEQ ID NO: 2277338
cauguaagaaccauaucua

SEQ ID NO: 2277340 - RNA, 19 nt, Artificial Sequence
  Description of Artificial Sequence: Synthetic oligonucleotide
  Sense strand starting at position 2567 of SEQ ID NO: 1884595
accuauguccaugaucuua

SEQ ID NO: 2277341 - RNA, 19 nt, Artificial Sequence
  Description of Artificial Sequence: Synthetic oligonucleotide
  Antisense strand to SEQ ID NO: 2277340
uaagaucauggacauaggu

SEQ ID NO: 2277342 - RNA, 19 nt, Artificial Sequence
  Description of Artificial Sequence: Synthetic oligonucleotide
  Sense strand starting at position 2626 of SEQ ID NO: 1884595
uggaaccucuaguuauuaa

SEQ ID NO: 2277343 - RNA, 19 nt, Artificial Sequence
  Description of Artificial Sequence: Synthetic oligonucleotide
  Antisense strand to SEQ ID NO: 2277342
uuaauaacuagagguucca

SEQ ID NO: 2277344 - RNA, 19 nt, Artificial Sequence
  Description of Artificial Sequence: Synthetic oligonucleotide
  Sense strand starting at position 2786 of SEQ ID NO: 1884595
uggugauuaugagucuaug

SEQ ID NO: 2277345 - RNA, 19 nt, Artificial Sequence
  Description of Artificial Sequence: Synthetic oligonucleotide
  Antisense strand to SEQ ID NO: 2277344
cauagacucauaaucacca

SEQ ID NO: 2277346 - RNA, 19 nt, Artificial Sequence
  Description of Artificial Sequence: Synthetic oligonucleotide
  Sense strand starting at position 2789 of SEQ ID NO: 1884595
ugauuaugagucuaugccu

SEQ ID NO: 2277347 - RNA, 19 nt, Artificial Sequence
  Description of Artificial Sequence: Synthetic oligonucleotide
  Antisense strand to SEQ ID NO: 2277346
aggcauagacucauaauca

SEQ ID NO: 2277348 - RNA, 19 nt, Artificial Sequence
  Description of Artificial Sequence: Synthetic oligonucleotide
  Sense strand starting at position 2811 of SEQ ID NO: 1884595
augauuucgugccuuuaaa

SEQ ID NO: 2277349 - RNA, 19 nt, Artificial Sequence
  Description of Artificial Sequence: Synthetic oligonucleotide
  Antisense strand to SEQ ID NO: 2277348
uuuaaaggcacgaaaucau

SEQ ID NO: 2277350 - RNA, 19 nt, Artificial Sequence
  Description of Artificial Sequence: Synthetic oligonucleotide
  Sense strand starting at position 2901 of SEQ ID NO: 1884595
aaucguggugauuaucuga

SEQ ID NO: 2277351 - RNA, 19 nt, Artificial Sequence
  Description of Artificial Sequence: Synthetic oligonucleotide
  Antisense strand to SEQ ID NO: 2277350
ucagauaaucaccacgauu

SEQ ID NO: 2277352 - RNA, 19 nt, Artificial Sequence
  Description of Artificial Sequence: Synthetic oligonucleotide
  Sense strand starting at position 3060 of SEQ ID NO: 1884595
uugggaugccugggaacau

SEQ ID NO: 2277353 - RNA, 19 nt, Artificial Sequence
  Description of Artificial Sequence: Synthetic oligonucleotide
  Antisense strand to SEQ ID NO: 2277352
auguucccaggcaucccaa

SEQ ID NO: 2277354 - RNA, 19 nt, Artificial Sequence
  Description of Artificial Sequence: Synthetic oligonucleotide
  Sense strand starting at position 3094 of SEQ ID NO: 1884595
gcuugcuuugcuccuggau

SEQ ID NO: 2277355 - RNA, 19 nt, Artificial Sequence
  Description of Artificial Sequence: Synthetic oligonucleotide
  Antisense strand to SEQ ID NO: 2277354
auccaggagcaaagcaagc

SEQ ID NO: 2277356 - RNA, 19 nt, Artificial Sequence
  Description of Artificial Sequence: Synthetic oligonucleotide
  Sense strand starting at position 3117 of SEQ ID NO: 1884595
aggguaaccaccugguauu

SEQ ID NO: 2277357 - RNA, 19 nt, Artificial Sequence
  Description of Artificial Sequence: Synthetic oligonucleotide
  Antisense strand to SEQ ID NO: 2277356
aauaccaggugguuacccu

SEQ ID NO: 2277358 - RNA, 19 nt, Artificial Sequence
  Description of Artificial Sequence: Synthetic oligonucleotide
  Sense strand starting at position 3265 of SEQ ID NO: 1884595
ggccauaagugacuuggaa

SEQ ID NO: 2277359 - RNA, 19 nt, Artificial Sequence
  Description of Artificial Sequence: Synthetic oligonucleotide
  Antisense strand to SEQ ID NO: 2277358
uuccaagucacuuauggcc

SEQ ID NO: 2277360 - RNA, 19 nt, Artificial Sequence
  Description of Artificial Sequence: Synthetic oligonucleotide
  Sense strand starting at position 3267 of SEQ ID NO: 1884595
ccauaagugacuuggaaug

SEQ ID NO: 2277361 - RNA, 19 nt, Artificial Sequence
  Description of Artificial Sequence: Synthetic oligonucleotide
  Antisense strand to SEQ ID NO: 2277360
cauuccaagucacuuaugg

SEQ ID NO: 2277362 - RNA, 19 nt, Artificial Sequence
  Description of Artificial Sequence: Synthetic oligonucleotide
  Sense strand starting at position 3391 of SEQ ID NO: 1884595
gguuaaggugcagauugau

SEQ ID NO: 2277363 - RNA, 19 nt, Artificial Sequence
  Description of Artificial Sequence: Synthetic oligonucleotide
  Antisense strand to SEQ ID NO: 2277362
aucaaucugcaccuuaacc

SEQ ID NO: 2277364 - RNA, 19 nt, Artificial Sequence
  Description of Artificial Sequence: Synthetic oligonucleotide
  Sense strand starting at position 3465 of SEQ ID NO: 1884595
guaaacuuguacuuugaaa

SEQ ID NO: 2277365 - RNA, 19 nt, Artificial Sequence
  Description of Artificial Sequence: Synthetic oligonucleotide
  Antisense strand to SEQ ID NO: 2277364
uuucaaaguacaaguuuac

SEQ ID NO: 2277366 - RNA, 19 nt, Artificial Sequence
  Description of Artificial Sequence: Synthetic oligonucleotide
  Sense strand starting at position 3574 of SEQ ID NO: 1884595
cagccaugaucaguugaac

SEQ ID NO: 2277367 - RNA, 19 nt, Artificial Sequence
  Description of Artificial Sequence: Synthetic oligonucleotide
  Antisense strand to SEQ ID NO: 2277366
guucaacugaucauggcug

SEQ ID NO: 2277368 - RNA, 19 nt, Artificial Sequence
  Description of Artificial Sequence: Synthetic oligonucleotide
  Sense strand starting at position 3670 of SEQ ID NO: 1884595
guaugucaugacuauguca

SEQ ID NO: 2277369 - RNA, 19 nt, Artificial Sequence
  Description of Artificial Sequence: Synthetic oligonucleotide
  Antisense strand to SEQ ID NO: 2277368
ugacauagucaugacauac

SEQ ID NO: 2277370 - RNA, 19 nt, Artificial Sequence
  Description of Artificial Sequence: Synthetic oligonucleotide
  Sense strand starting at position 3672 of SEQ ID NO: 1884595
augucaugacuaugucaga

SEQ ID NO: 2277371 - RNA, 19 nt, Artificial Sequence
  Description of Artificial Sequence: Synthetic oligonucleotide
  Antisense strand to SEQ ID NO: 2277370
ucugacauagucaugacau

SEQ ID NO: 2277372 - RNA, 19 nt, Artificial Sequence
  Description of Artificial Sequence: Synthetic oligonucleotide
  Sense strand starting at position 3696 of SEQ ID NO: 1884595
guguuaacagaaugaauaa

SEQ ID NO: 2277373 - RNA, 19 nt, Artificial Sequence
  Description of Artificial Sequence: Synthetic oligonucleotide
  Antisense strand to SEQ ID NO: 2277372
uuauucauucuguuaacac

SEQ ID NO: 2277374 - RNA, 19 nt, Artificial Sequence
  Description of Artificial Sequence: Synthetic oligonucleotide
  Sense strand starting at position 3858 of SEQ ID NO: 1884595
cuaagagaucuuuguaugg

SEQ ID NO: 2277375 - RNA, 19 nt, Artificial Sequence
  Description of Artificial Sequence: Synthetic oligonucleotide
  Antisense strand to SEQ ID NO: 2277374
ccauacaaagaucucuuag

SEQ ID NO: 2277376 - RNA, 19 nt, Artificial Sequence
  Description of Artificial Sequence: Synthetic oligonucleotide
  Sense strand starting at position 3901 of SEQ ID NO: 1884595
agaguugucucucugaaga

SEQ ID NO: 2277377 - RNA, 19 nt, Artificial Sequence
  Description of Artificial Sequence: Synthetic oligonucleotide
  Antisense strand to SEQ ID NO: 2277376
ucuucagagagacaacucu

SEQ ID NO: 2277378 - RNA, 19 nt, Artificial Sequence
  Description of Artificial Sequence: Synthetic oligonucleotide
  Sense strand starting at position 26 of SEQ ID NO: 1884596
ccuggaaggugucuacuga

SEQ ID NO: 2277379 - RNA, 19 nt, Artificial Sequence
  Description of Artificial Sequence: Synthetic oligonucleotide
  Antisense strand to SEQ ID NO: 2277378
ucaguagacaccuuccagg

SEQ ID NO: 2277380 - RNA, 19 nt, Artificial Sequence
  Description of Artificial Sequence: Synthetic oligonucleotide
  Sense strand starting at position 181 of SEQ ID NO: 1884596
ucacauucuguguaggauc

SEQ ID NO: 2277381 - RNA, 19 nt, Artificial Sequence
  Description of Artificial Sequence: Synthetic oligonucleotide
  Antisense strand to SEQ ID NO: 2277380
gauccuacacagaauguga

SEQ ID NO: 2277382 - RNA, 19 nt, Artificial Sequence
  Description of Artificial Sequence: Synthetic oligonucleotide
  Sense strand starting at position 309 of SEQ ID NO: 1884596
ggaguuauaagguagugcu

SEQ ID NO: 2277383 - RNA, 19 nt, Artificial Sequence
  Description of Artificial Sequence: Synthetic oligonucleotide
  Antisense strand to SEQ ID NO: 2277382
agcacuaccuuauaacucc

SEQ ID NO: 2277384 - RNA, 19 nt, Artificial Sequence
  Description of Artificial Sequence: Synthetic oligonucleotide
  Sense strand starting at position 333 of SEQ ID NO: 1884596
ggcaaugaccagugagaug

SEQ ID NO: 2277385 - RNA, 19 nt, Artificial Sequence
  Description of Artificial Sequence: Synthetic oligonucleotide
  Antisense strand to SEQ ID NO: 2277384
caucucacuggucauugcc

SEQ ID NO: 2277386 - RNA, 19 nt, Artificial Sequence
  Description of Artificial Sequence: Synthetic oligonucleotide
  Sense strand starting at position 344 of SEQ ID NO: 1884596
gugagaugaccucagccau

SEQ ID NO: 2277387 - RNA, 19 nt, Artificial Sequence
  Description of Artificial Sequence: Synthetic oligonucleotide
  Antisense strand to SEQ ID NO: 2277386
auggcugaggucaucucac

SEQ ID NO: 2277388 - RNA, 19 nt, Artificial Sequence
  Description of Artificial Sequence: Synthetic oligonucleotide
  Sense strand starting at position 370 of SEQ ID NO: 1884596
auacaaucuggccaagagu

SEQ ID NO: 2277389 - RNA, 19 nt, Artificial Sequence
  Description of Artificial Sequence: Synthetic oligonucleotide
  Antisense strand to SEQ ID NO: 2277388
acucuuggccagauuguau

SEQ ID NO: 2277390 - RNA, 19 nt, Artificial Sequence
  Description of Artificial Sequence: Synthetic oligonucleotide
  Sense strand starting at position 381 of SEQ ID NO: 1884596
ccaagaguucuaugccaug

SEQ ID NO: 2277391 - RNA, 19 nt, Artificial Sequence
  Description of Artificial Sequence: Synthetic oligonucleotide
  Antisense strand to SEQ ID NO: 2277390
cauggcauagaacucuugg

SEQ ID NO: 2277392 - RNA, 19 nt, Artificial Sequence
  Description of Artificial Sequence: Synthetic oligonucleotide
  Sense strand starting at position 415 of SEQ ID NO: 1884596
cacagagugcuccaagcua

SEQ ID NO: 2277393 - RNA, 19 nt, Artificial Sequence
  Description of Artificial Sequence: Synthetic oligonucleotide
  Antisense strand to SEQ ID NO: 2277392
uagcuuggagcacucugug

SEQ ID NO: 2277394 - RNA, 19 nt, Artificial Sequence
  Description of Artificial Sequence: Synthetic oligonucleotide
  Sense strand starting at position 438 of SEQ ID NO: 1884596
cagcaugaggucugacacu

SEQ ID NO: 2277395 - RNA, 19 nt, Artificial Sequence
  Description of Artificial Sequence: Synthetic oligonucleotide
  Antisense strand to SEQ ID NO: 2277394
agugucagaccucaugcug

SEQ ID NO: 2277396 - RNA, 19 nt, Artificial Sequence
  Description of Artificial Sequence: Synthetic oligonucleotide
  Sense strand starting at position 450 of SEQ ID NO: 1884596
ugacacugugcugaauaua

SEQ ID NO: 2277397 - RNA, 19 nt, Artificial Sequence
  Description of Artificial Sequence: Synthetic oligonucleotide
  Antisense strand to SEQ ID NO: 2277396
uauauucagcacaguguca

SEQ ID NO: 2277398 - RNA, 19 nt, Artificial Sequence
  Description of Artificial Sequence: Synthetic oligonucleotide
  Sense strand starting at position 1019 of SEQ ID NO: 1884596
uuauacauaugagcugaua

SEQ ID NO: 2277399 - RNA, 19 nt, Artificial Sequence
  Description of Artificial Sequence: Synthetic oligonucleotide
  Antisense strand to SEQ ID NO: 2277398
uaucagcucauauguauaa

SEQ ID NO: 2277400 - RNA, 19 nt, Artificial Sequence
  Description of Artificial Sequence: Synthetic oligonucleotide
  Sense strand starting at position 1037 of SEQ ID NO: 1884596
acugaugcauucuucugaa

SEQ ID NO: 2277401 - RNA, 19 nt, Artificial Sequence
  Description of Artificial Sequence: Synthetic oligonucleotide
  Antisense strand to SEQ ID NO: 2277400
uucagaagaaugcaucagu

SEQ ID NO: 2277402 - RNA, 19 nt, Artificial Sequence
  Description of Artificial Sequence: Synthetic oligonucleotide
  Sense strand starting at position 1105 of SEQ ID NO: 1884596
gucuaugcauacguauuua

SEQ ID NO: 2277403 - RNA, 19 nt, Artificial Sequence
  Description of Artificial Sequence: Synthetic oligonucleotide
  Antisense strand to SEQ ID NO: 2277402
uaaauacguaugcauagac

SEQ ID NO: 2277404 - RNA, 19 nt, Artificial Sequence
  Description of Artificial Sequence: Synthetic oligonucleotide
  Sense strand starting at position 1354 of SEQ ID NO: 1884596
cuggaaagccauuaaucga

SEQ ID NO: 2277405 - RNA, 19 nt, Artificial Sequence
  Description of Artificial Sequence: Synthetic oligonucleotide
  Antisense strand to SEQ ID NO: 2277404
ucgauuaauggcuuuccag

SEQ ID NO: 2277406 - RNA, 19 nt, Artificial Sequence
  Description of Artificial Sequence: Synthetic oligonucleotide
  Sense strand starting at position 1575 of SEQ ID NO: 1884596
cucagcuuacauggugaua

SEQ ID NO: 2277407 - RNA, 19 nt, Artificial Sequence
  Description of Artificial Sequence: Synthetic oligonucleotide
  Antisense strand to SEQ ID NO: 2277406
uaucaccauguaagcugag

SEQ ID NO: 2277408 - RNA, 19 nt, Artificial Sequence
  Description of Artificial Sequence: Synthetic oligonucleotide
  Sense strand starting at position 1978 of SEQ ID NO: 1884596
ccgucaaucacaugggauc

SEQ ID NO: 2277409 - RNA, 19 nt, Artificial Sequence
  Description of Artificial Sequence: Synthetic oligonucleotide
  Antisense strand to SEQ ID NO: 2277408
gaucccaugugauugacgg

SEQ ID NO: 2277410 - RNA, 19 nt, Artificial Sequence
  Description of Artificial Sequence: Synthetic oligonucleotide
  Sense strand starting at position 1979 of SEQ ID NO: 1884596
cgucaaucacaugggauca

SEQ ID NO: 2277411 - RNA, 19 nt, Artificial Sequence
  Description of Artificial Sequence: Synthetic oligonucleotide
  Antisense strand to SEQ ID NO: 2277410
ugaucccaugugauugacg

SEQ ID NO: 2277412 - RNA, 19 nt, Artificial Sequence
  Description of Artificial Sequence: Synthetic oligonucleotide
  Sense strand starting at position 2085 of SEQ ID NO: 1884596
gccucagucacaugggaac

SEQ ID NO: 2277413 - RNA, 19 nt, Artificial Sequence
  Description of Artificial Sequence: Synthetic oligonucleotide
  Antisense strand to SEQ ID NO: 2277412
guucccaugugacugaggc

SEQ ID NO: 2277414 - RNA, 19 nt, Artificial Sequence
  Description of Artificial Sequence: Synthetic oligonucleotide
  Sense strand starting at position 2143 of SEQ ID NO: 1884596
ggcucacauggugaucaga

SEQ ID NO: 2277415 - RNA, 19 nt, Artificial Sequence
  Description of Artificial Sequence: Synthetic oligonucleotide
  Antisense strand to SEQ ID NO: 2277414
ucugaucaccaugugagcc

SEQ ID NO: 2277416 - RNA, 19 nt, Artificial Sequence
  Description of Artificial Sequence: Synthetic oligonucleotide
  Sense strand starting at position 2145 of SEQ ID NO: 1884596
cucacauggugaucagagu

SEQ ID NO: 2277417 - RNA, 19 nt, Artificial Sequence
  Description of Artificial Sequence: Synthetic oligonucleotide
  Antisense strand to SEQ ID NO: 2277416
acucugaucaccaugugag

SEQ ID NO: 2277418 - RNA, 19 nt, Artificial Sequence
  Description of Artificial Sequence: Synthetic oligonucleotide
  Sense strand starting at position 2146 of SEQ ID NO: 1884596
ucacauggugaucagaguu

SEQ ID NO: 2277419 - RNA, 19 nt, Artificial Sequence
  Description of Artificial Sequence: Synthetic oligonucleotide
  Antisense strand to SEQ ID NO: 2277418
aacucugaucaccauguga

SEQ ID NO: 2277420 - RNA, 19 nt, Artificial Sequence
  Description of Artificial Sequence: Synthetic oligonucleotide
  Sense strand starting at position 2205 of SEQ ID NO: 1884596
agaucccuugagugaugca

SEQ ID NO: 2277421 - RNA, 19 nt, Artificial Sequence
  Description of Artificial Sequence: Synthetic oligonucleotide
  Antisense strand to SEQ ID NO: 2277420
ugcaucacucaagggaucu

SEQ ID NO: 2277422 - RNA, 19 nt, Artificial Sequence
  Description of Artificial Sequence: Synthetic oligonucleotide
  Sense strand starting at position 2210 of SEQ ID NO: 1884596
ccuugagugaugcagggau

SEQ ID NO: 2277423 - RNA, 19 nt, Artificial Sequence
  Description of Artificial Sequence: Synthetic oligonucleotide
  Antisense strand to SEQ ID NO: 2277422
aucccugcaucacucaagg

SEQ ID NO: 2277424 - RNA, 19 nt, Artificial Sequence
  Description of Artificial Sequence: Synthetic oligonucleotide
  Sense strand starting at position 2271 of SEQ ID NO: 1884596
agaacagucuuucugucua

SEQ ID NO: 2277425 - RNA, 19 nt, Artificial Sequence
  Description of Artificial Sequence: Synthetic oligonucleotide
  Antisense strand to SEQ ID NO: 2277424
uagacagaaagacuguucu

SEQ ID NO: 2277426 - RNA, 19 nt, Artificial Sequence
  Description of Artificial Sequence: Synthetic oligonucleotide
  Sense strand starting at position 2276 of SEQ ID NO: 1884596
agucuuucugucuaucuga

SEQ ID NO: 2277427 - RNA, 19 nt, Artificial Sequence
  Description of Artificial Sequence: Synthetic oligonucleotide
  Antisense strand to SEQ ID NO: 2277426
ucagauagacagaaagacu

SEQ ID NO: 2277428 - RNA, 19 nt, Artificial Sequence
  Description of Artificial Sequence: Synthetic oligonucleotide
  Sense strand starting at position 2757 of SEQ ID NO: 1884596
uuguaauauggauggcaag

SEQ ID NO: 2277429 - RNA, 19 nt, Artificial Sequence
  Description of Artificial Sequence: Synthetic oligonucleotide
  Antisense strand to SEQ ID NO: 2277428
cuugccauccauauuacaa

SEQ ID NO: 2277430 - RNA, 19 nt, Artificial Sequence
  Description of Artificial Sequence: Synthetic oligonucleotide
  Sense strand starting at position 2758 of SEQ ID NO: 1884596
uguaauauggauggcaagu

SEQ ID NO: 2277431 - RNA, 19 nt, Artificial Sequence
  Description of Artificial Sequence: Synthetic oligonucleotide
  Antisense strand to SEQ ID NO: 2277430
acuugccauccauauuaca

SEQ ID NO: 2277432 - RNA, 19 nt, Artificial Sequence
  Description of Artificial Sequence: Synthetic oligonucleotide
  Sense strand starting at position 2767 of SEQ ID NO: 1884596
gauggcaaguuauugaaau

SEQ ID NO: 2277433 - RNA, 19 nt, Artificial Sequence
  Description of Artificial Sequence: Synthetic oligonucleotide
  Antisense strand to SEQ ID NO: 2277432
auuucaauaacuugccauc

SEQ ID NO: 2277434 - RNA, 19 nt, Artificial Sequence
  Description of Artificial Sequence: Synthetic oligonucleotide
  Sense strand starting at position 2801 of SEQ ID NO: 1884596
cuauaaaccggauacaguu

SEQ ID NO: 2277435 - RNA, 19 nt, Artificial Sequence
  Description of Artificial Sequence: Synthetic oligonucleotide
  Antisense strand to SEQ ID NO: 2277434
aacuguauccgguuuauag

SEQ ID NO: 2277436 - RNA, 19 nt, Artificial Sequence
  Description of Artificial Sequence: Synthetic oligonucleotide
  Sense strand starting at position 2819 of SEQ ID NO: 1884596
ucaguccucuuucuggaau

SEQ ID NO: 2277437 - RNA, 19 nt, Artificial Sequence
  Description of Artificial Sequence: Synthetic oligonucleotide
  Antisense strand to SEQ ID NO: 2277436
auuccagaaagaggacuga

SEQ ID NO: 2277438 - RNA, 19 nt, Artificial Sequence
  Description of Artificial Sequence: Synthetic oligonucleotide
  Sense strand starting at position 2822 of SEQ ID NO: 1884596
guccucuuucuggaauaaa

SEQ ID NO: 2277439 - RNA, 19 nt, Artificial Sequence
  Description of Artificial Sequence: Synthetic oligonucleotide
  Antisense strand to SEQ ID NO: 2277438
uuuauuccagaaagaggac

SEQ ID NO: 2277440 - RNA, 19 nt, Artificial Sequence
  Description of Artificial Sequence: Synthetic oligonucleotide
  Sense strand starting at position 2877 of SEQ ID NO: 1884596
ccaucccacugauuguaua

SEQ ID NO: 2277441 - RNA, 19 nt, Artificial Sequence
  Description of Artificial Sequence: Synthetic oligonucleotide
  Antisense strand to SEQ ID NO: 2277440
uauacaaucagugggaugg

SEQ ID NO: 2277442 - RNA, 19 nt, Artificial Sequence
  Description of Artificial Sequence: Synthetic oligonucleotide
  Sense strand starting at position 2941 of SEQ ID NO: 1884596
ggcauacauguguucguuu

SEQ ID NO: 2277443 - RNA, 19 nt, Artificial Sequence
  Description of Artificial Sequence: Synthetic oligonucleotide
  Antisense strand to SEQ ID NO: 2277442
aaacgaacacauguaugcc

SEQ ID NO: 2277444 - RNA, 19 nt, Artificial Sequence
  Description of Artificial Sequence: Synthetic oligonucleotide
  Sense strand starting at position 3026 of SEQ ID NO: 1884596
uuaaaugagucaccugagu

SEQ ID NO: 2277445 - RNA, 19 nt, Artificial Sequence
  Description of Artificial Sequence: Synthetic oligonucleotide
  Antisense strand to SEQ ID NO: 2277444
acucaggugacucauuuaa

SEQ ID NO: 2277446 - RNA, 19 nt, Artificial Sequence
  Description of Artificial Sequence: Synthetic oligonucleotide
  Sense strand starting at position 3453 of SEQ ID NO: 1884596
cauagugguucucuacaug

SEQ ID NO: 2277447 - RNA, 19 nt, Artificial Sequence
  Description of Artificial Sequence: Synthetic oligonucleotide
  Antisense strand to SEQ ID NO: 2277446
cauguagagaaccacuaug

SEQ ID NO: 2277448 - RNA, 19 nt, Artificial Sequence
  Description of Artificial Sequence: Synthetic oligonucleotide
  Sense strand starting at position 3456 of SEQ ID NO: 1884596
agugguucucuacaugagu

SEQ ID NO: 2277449 - RNA, 19 nt, Artificial Sequence
  Description of Artificial Sequence: Synthetic oligonucleotide
  Antisense strand to SEQ ID NO: 2277448
acucauguagagaaccacu

SEQ ID NO: 2277450 - RNA, 19 nt, Artificial Sequence
  Description of Artificial Sequence: Synthetic oligonucleotide
  Sense strand starting at position 3570 of SEQ ID NO: 1884596
agcugugaccagugagaua

SEQ ID NO: 2277451 - RNA, 19 nt, Artificial Sequence
  Description of Artificial Sequence: Synthetic oligonucleotide
  Antisense strand to SEQ ID NO: 2277450
uaucucacuggucacagcu

SEQ ID NO: 2277452 - RNA, 19 nt, Artificial Sequence
  Description of Artificial Sequence: Synthetic oligonucleotide
  Sense strand starting at position 3601 of SEQ ID NO: 1884596
cagugaucugcagauggca

SEQ ID NO: 2277453 - RNA, 19 nt, Artificial Sequence
  Description of Artificial Sequence: Synthetic oligonucleotide
  Antisense strand to SEQ ID NO: 2277452
ugccaucugcagaucacug

SEQ ID NO: 2277454 - RNA, 19 nt, Artificial Sequence
  Description of Artificial Sequence: Synthetic oligonucleotide
  Sense strand starting at position 3803 of SEQ ID NO: 1884596
cuaagagcucacugugaga

SEQ ID NO: 2277455 - RNA, 19 nt, Artificial Sequence
  Description of Artificial Sequence: Synthetic oligonucleotide
  Antisense strand to SEQ ID NO: 2277454
ucucacagugagcucuuag

SEQ ID NO: 2277456 - RNA, 19 nt, Artificial Sequence
  Description of Artificial Sequence: Synthetic oligonucleotide
  Sense strand starting at position 3979 of SEQ ID NO: 1884596
gugagaguuuaucuaauga

SEQ ID NO: 2277457 - RNA, 19 nt, Artificial Sequence
  Description of Artificial Sequence: Synthetic oligonucleotide
  Antisense strand to SEQ ID NO: 2277456
ucauuagauaaacucucac

SEQ ID NO: 2277458 - RNA, 19 nt, Artificial Sequence
  Description of Artificial Sequence: Synthetic oligonucleotide
  Sense strand starting at position 62 of SEQ ID NO: 1884597
aucaacuauuguguaagga

SEQ ID NO: 2277459 - RNA, 19 nt, Artificial Sequence
  Description of Artificial Sequence: Synthetic oligonucleotide
  Antisense strand to SEQ ID NO: 2277458
uccuuacacaauaguugau

SEQ ID NO: 2277460 - RNA, 19 nt, Artificial Sequence
  Description of Artificial Sequence: Synthetic oligonucleotide
  Sense strand starting at position 130 of SEQ ID NO: 1884597
cgggaaagaucuagagagu

SEQ ID NO: 2277461 - RNA, 19 nt, Artificial Sequence
  Description of Artificial Sequence: Synthetic oligonucleotide
  Antisense strand to SEQ ID NO: 2277460
acucucuagaucuuucccg

SEQ ID NO: 2277462 - RNA, 19 nt, Artificial Sequence
  Description of Artificial Sequence: Synthetic oligonucleotide
  Sense strand starting at position 380 of SEQ ID NO: 1884597
uaggauguuugggucuaga

SEQ ID NO: 2277463 - RNA, 19 nt, Artificial Sequence
  Description of Artificial Sequence: Synthetic oligonucleotide
  Antisense strand to SEQ ID NO: 2277462
ucuagacccaaacauccua

SEQ ID NO: 2277464 - RNA, 19 nt, Artificial Sequence
  Description of Artificial Sequence: Synthetic oligonucleotide
  Sense strand starting at position 383 of SEQ ID NO: 1884597
gauguuugggucuagacaa

SEQ ID NO: 2277465 - RNA, 19 nt, Artificial Sequence
  Description of Artificial Sequence: Synthetic oligonucleotide
  Antisense strand to SEQ ID NO: 2277464
uugucuagacccaaacauc

SEQ ID NO: 2277466 - RNA, 19 nt, Artificial Sequence
  Description of Artificial Sequence: Synthetic oligonucleotide
  Sense strand starting at position 397 of SEQ ID NO: 1884597
gacaaaucccagugaaagc

SEQ ID NO: 2277467 - RNA, 19 nt, Artificial Sequence
  Description of Artificial Sequence: Synthetic oligonucleotide
  Antisense strand to SEQ ID NO: 2277466
gcuuucacugggauuuguc

SEQ ID NO: 2277468 - RNA, 19 nt, Artificial Sequence
  Description of Artificial Sequence: Synthetic oligonucleotide
  Sense strand starting at position 483 of SEQ ID NO: 1884597
cuuucuuaacccgagacau

SEQ ID NO: 2277469 - RNA, 19 nt, Artificial Sequence
  Description of Artificial Sequence: Synthetic oligonucleotide
  Antisense strand to SEQ ID NO: 2277468
augucucggguuaagaaag

SEQ ID NO: 2277470 - RNA, 19 nt, Artificial Sequence
  Description of Artificial Sequence: Synthetic oligonucleotide
  Sense strand starting at position 485 of SEQ ID NO: 1884597
uucuuaacccgagacauug

SEQ ID NO: 2277471 - RNA, 19 nt, Artificial Sequence
  Description of Artificial Sequence: Synthetic oligonucleotide
  Antisense strand to SEQ ID NO: 2277470
caaugucucggguuaagaa

SEQ ID NO: 2277472 - RNA, 19 nt, Artificial Sequence
  Description of Artificial Sequence: Synthetic oligonucleotide
  Sense strand starting at position 550 of SEQ ID NO: 1884597
ggaguagaaggcugucuaa

SEQ ID NO: 2277473 - RNA, 19 nt, Artificial Sequence
  Description of Artificial Sequence: Synthetic oligonucleotide
  Antisense strand to SEQ ID NO: 2277472
uuagacagccuucuacucc

SEQ ID NO: 2277474 - RNA, 19 nt, Artificial Sequence
  Description of Artificial Sequence: Synthetic oligonucleotide
  Sense strand starting at position 642 of SEQ ID NO: 1884597
ccuguugaacuguacacaa

SEQ ID NO: 2277475 - RNA, 19 nt, Artificial Sequence
  Description of Artificial Sequence: Synthetic oligonucleotide
  Antisense strand to SEQ ID NO: 2277474
uuguguacaguucaacagg

SEQ ID NO: 2277476 - RNA, 19 nt, Artificial Sequence
  Description of Artificial Sequence: Synthetic oligonucleotide
  Sense strand starting at position 644 of SEQ ID NO: 1884597
uguugaacuguacacaaau

SEQ ID NO: 2277477 - RNA, 19 nt, Artificial Sequence
  Description of Artificial Sequence: Synthetic oligonucleotide
  Antisense strand to SEQ ID NO: 2277476
auuuguguacaguucaaca

SEQ ID NO: 2277478 - RNA, 19 nt, Artificial Sequence
  Description of Artificial Sequence: Synthetic oligonucleotide
  Sense strand starting at position 711 of SEQ ID NO: 1884597
gguagaacauuacucucaa

SEQ ID NO: 2277479 - RNA, 19 nt, Artificial Sequence
  Description of Artificial Sequence: Synthetic oligonucleotide
  Antisense strand to SEQ ID NO: 2277478
uugagaguaauguucuacc

SEQ ID NO: 2277480 - RNA, 19 nt, Artificial Sequence
  Description of Artificial Sequence: Synthetic oligonucleotide
  Sense strand starting at position 712 of SEQ ID NO: 1884597
guagaacauuacucucaag

SEQ ID NO: 2277481 - RNA, 19 nt, Artificial Sequence
  Description of Artificial Sequence: Synthetic oligonucleotide
  Antisense strand to SEQ ID NO: 2277480
cuugagaguaauguucuac

SEQ ID NO: 2277482 - RNA, 19 nt, Artificial Sequence
  Description of Artificial Sequence: Synthetic oligonucleotide
  Sense strand starting at position 735 of SEQ ID NO: 1884597
ggcuucuaacuguacaauu

SEQ ID NO: 2277483 - RNA, 19 nt, Artificial Sequence
  Description of Artificial Sequence: Synthetic oligonucleotide
  Antisense strand to SEQ ID NO: 2277482
aauuguacaguuagaagcc

SEQ ID NO: 2277484 - RNA, 19 nt, Artificial Sequence
  Description of Artificial Sequence: Synthetic oligonucleotide
  Sense strand starting at position 789 of SEQ ID NO: 1884597
ugauguacucagcaaagua

SEQ ID NO: 2277485 - RNA, 19 nt, Artificial Sequence
  Description of Artificial Sequence: Synthetic oligonucleotide
  Antisense strand to SEQ ID NO: 2277484
uacuuugcugaguacauca

SEQ ID NO: 2277486 - RNA, 19 nt, Artificial Sequence
  Description of Artificial Sequence: Synthetic oligonucleotide
  Sense strand starting at position 854 of SEQ ID NO: 1884597
uguuaaagagucugcauuu

SEQ ID NO: 2277487 - RNA, 19 nt, Artificial Sequence
  Description of Artificial Sequence: Synthetic oligonucleotide
  Antisense strand to SEQ ID NO: 2277486
aaaugcagacucuuuaaca

SEQ ID NO: 2277488 - RNA, 19 nt, Artificial Sequence
  Description of Artificial Sequence: Synthetic oligonucleotide
  Sense strand starting at position 904 of SEQ ID NO: 1884597
uggccuaauuaaguaauca

SEQ ID NO: 2277489 - RNA, 19 nt, Artificial Sequence
  Description of Artificial Sequence: Synthetic oligonucleotide
  Antisense strand to SEQ ID NO: 2277488
ugauuacuuaauuaggcca

SEQ ID NO: 2277490 - RNA, 19 nt, Artificial Sequence
  Description of Artificial Sequence: Synthetic oligonucleotide
  Sense strand starting at position 949 of SEQ ID NO: 1884597
agcaccuuugaagggaaau

SEQ ID NO: 2277491 - RNA, 19 nt, Artificial Sequence
  Description of Artificial Sequence: Synthetic oligonucleotide
  Antisense strand to SEQ ID NO: 2277490
auuucccuucaaaggugcu

SEQ ID NO: 2277492 - RNA, 19 nt, Artificial Sequence
  Description of Artificial Sequence: Synthetic oligonucleotide
  Sense strand starting at position 1005 of SEQ ID NO: 1884597
cugugaguuccagagaucu

SEQ ID NO: 2277493 - RNA, 19 nt, Artificial Sequence
  Description of Artificial Sequence: Synthetic oligonucleotide
  Antisense strand to SEQ ID NO: 2277492
agaucucuggaacucacag

SEQ ID NO: 2277494 - RNA, 19 nt, Artificial Sequence
  Description of Artificial Sequence: Synthetic oligonucleotide
  Sense strand starting at position 1049 of SEQ ID NO: 1884597
ggaugaguugcagauucua

SEQ ID NO: 2277495 - RNA, 19 nt, Artificial Sequence
  Description of Artificial Sequence: Synthetic oligonucleotide
  Antisense strand to SEQ ID NO: 2277494
uagaaucugcaacucaucc

SEQ ID NO: 2277496 - RNA, 19 nt, Artificial Sequence
  Description of Artificial Sequence: Synthetic oligonucleotide
  Sense strand starting at position 1108 of SEQ ID NO: 1884597
aucaucacucuguaguaca

SEQ ID NO: 2277497 - RNA, 19 nt, Artificial Sequence
  Description of Artificial Sequence: Synthetic oligonucleotide
  Antisense strand to SEQ ID NO: 2277496
uguacuacagagugaugau

SEQ ID NO: 2277498 - RNA, 19 nt, Artificial Sequence
  Description of Artificial Sequence: Synthetic oligonucleotide
  Sense strand starting at position 1365 of SEQ ID NO: 1884597
uuaguugucccugagaaag

SEQ ID NO: 2277499 - RNA, 19 nt, Artificial Sequence
  Description of Artificial Sequence: Synthetic oligonucleotide
  Antisense strand to SEQ ID NO: 2277498
cuuucucagggacaacuaa

SEQ ID NO: 2277500 - RNA, 19 nt, Artificial Sequence
  Description of Artificial Sequence: Synthetic oligonucleotide
  Sense strand starting at position 1387 of SEQ ID NO: 1884597
ucaggauugguuggacuca

SEQ ID NO: 2277501 - RNA, 19 nt, Artificial Sequence
  Description of Artificial Sequence: Synthetic oligonucleotide
  Antisense strand to SEQ ID NO: 2277500
ugaguccaaccaauccuga

SEQ ID NO: 2277502 - RNA, 19 nt, Artificial Sequence
  Description of Artificial Sequence: Synthetic oligonucleotide
  Sense strand starting at position 1471 of SEQ ID NO: 1884597
ggauuugucgugcacauac

SEQ ID NO: 2277503 - RNA, 19 nt, Artificial Sequence
  Description of Artificial Sequence: Synthetic oligonucleotide
  Antisense strand to SEQ ID NO: 2277502
guaugugcacgacaaaucc

SEQ ID NO: 2277504 - RNA, 19 nt, Artificial Sequence
  Description of Artificial Sequence: Synthetic oligonucleotide
  Sense strand starting at position 1556 of SEQ ID NO: 1884597
uguguuccgugauuaauuu

SEQ ID NO: 2277505 - RNA, 19 nt, Artificial Sequence
  Description of Artificial Sequence: Synthetic oligonucleotide
  Antisense strand to SEQ ID NO: 2277504
aaauuaaucacggaacaca

SEQ ID NO: 2277506 - RNA, 19 nt, Artificial Sequence
  Description of Artificial Sequence: Synthetic oligonucleotide
  Sense strand starting at position 1642 of SEQ ID NO: 1884597
cggcaugcugaaugaauuu

SEQ ID NO: 2277507 - RNA, 19 nt, Artificial Sequence
  Description of Artificial Sequence: Synthetic oligonucleotide
  Antisense strand to SEQ ID NO: 2277506
aaauucauucagcaugccg

SEQ ID NO: 2277508 - RNA, 19 nt, Artificial Sequence
  Description of Artificial Sequence: Synthetic oligonucleotide
  Sense strand starting at position 1723 of SEQ ID NO: 1884597
uuggaauucucauuauagc

SEQ ID NO: 2277509 - RNA, 19 nt, Artificial Sequence
  Description of Artificial Sequence: Synthetic oligonucleotide
  Antisense strand to SEQ ID NO: 2277508
gcuauaaugagaauuccaa

SEQ ID NO: 2277510 - RNA, 19 nt, Artificial Sequence
  Description of Artificial Sequence: Synthetic oligonucleotide
  Sense strand starting at position 1724 of SEQ ID NO: 1884597
uggaauucucauuauagca

SEQ ID NO: 2277511 - RNA, 19 nt, Artificial Sequence
  Description of Artificial Sequence: Synthetic oligonucleotide
  Antisense strand to SEQ ID NO: 2277510
ugcuauaaugagaauucca

SEQ ID NO: 2277512 - RNA, 19 nt, Artificial Sequence
  Description of Artificial Sequence: Synthetic oligonucleotide
  Sense strand starting at position 1759 of SEQ ID NO: 1884597
cguggaguaagugauaaug

SEQ ID NO: 2277513 - RNA, 19 nt, Artificial Sequence
  Description of Artificial Sequence: Synthetic oligonucleotide
  Antisense strand to SEQ ID NO: 2277512
cauuaucacuuacuccacg

SEQ ID NO: 2277514 - RNA, 19 nt, Artificial Sequence
  Description of Artificial Sequence: Synthetic oligonucleotide
  Sense strand starting at position 1970 of SEQ ID NO: 1884597
ccuguaauccaagaagucu

SEQ ID NO: 2277515 - RNA, 19 nt, Artificial Sequence
  Description of Artificial Sequence: Synthetic oligonucleotide
  Antisense strand to SEQ ID NO: 2277514
agacuucuuggauuacagg

SEQ ID NO: 2277516 - RNA, 19 nt, Artificial Sequence
  Description of Artificial Sequence: Synthetic oligonucleotide
  Sense strand starting at position 2059 of SEQ ID NO: 1884597
cugagcugcaaucaagagu

SEQ ID NO: 2277517 - RNA, 19 nt, Artificial Sequence
  Description of Artificial Sequence: Synthetic oligonucleotide
  Antisense strand to SEQ ID NO: 2277516
acucuugauugcagcucag

SEQ ID NO: 2277518 - RNA, 19 nt, Artificial Sequence
  Description of Artificial Sequence: Synthetic oligonucleotide
  Sense strand starting at position 2073 of SEQ ID NO: 1884597
agagucuuucugcaauauc

SEQ ID NO: 2277519 - RNA, 19 nt, Artificial Sequence
  Description of Artificial Sequence: Synthetic oligonucleotide
  Antisense strand to SEQ ID NO: 2277518
gauauugcagaaagacucu

SEQ ID NO: 2277520 - RNA, 19 nt, Artificial Sequence
  Description of Artificial Sequence: Synthetic oligonucleotide
  Sense strand starting at position 2236 of SEQ ID NO: 1884597
cagaauucucuguagggcu

SEQ ID NO: 2277521 - RNA, 19 nt, Artificial Sequence
  Description of Artificial Sequence: Synthetic oligonucleotide
  Antisense strand to SEQ ID NO: 2277520
agcccuacagagaauucug

SEQ ID NO: 2277522 - RNA, 19 nt, Artificial Sequence
  Description of Artificial Sequence: Synthetic oligonucleotide
  Sense strand starting at position 2546 of SEQ ID NO: 1884597
uugacaaugcuuuaacuag

SEQ ID NO: 2277523 - RNA, 19 nt, Artificial Sequence
  Description of Artificial Sequence: Synthetic oligonucleotide
  Antisense strand to SEQ ID NO: 2277522
cuaguuaaagcauugucaa

SEQ ID NO: 2277524 - RNA, 19 nt, Artificial Sequence
  Description of Artificial Sequence: Synthetic oligonucleotide
  Sense strand starting at position 2608 of SEQ ID NO: 1884597
acgggacauuucuacuaac

SEQ ID NO: 2277525 - RNA, 19 nt, Artificial Sequence
  Description of Artificial Sequence: Synthetic oligonucleotide
  Antisense strand to SEQ ID NO: 2277524
guuaguagaaaugucccgu

SEQ ID NO: 2277526 - RNA, 19 nt, Artificial Sequence
  Description of Artificial Sequence: Synthetic oligonucleotide
  Sense strand starting at position 2807 of SEQ ID NO: 1884597
cgaguauggcaugaacauu

SEQ ID NO: 2277527 - RNA, 19 nt, Artificial Sequence
  Description of Artificial Sequence: Synthetic oligonucleotide
  Antisense strand to SEQ ID NO: 2277526
aauguucaugccauacucg

SEQ ID NO: 2277528 - RNA, 19 nt, Artificial Sequence
  Description of Artificial Sequence: Synthetic oligonucleotide
  Sense strand starting at position 2949 of SEQ ID NO: 1884597
uagguauagcugcauauaa

SEQ ID NO: 2277529 - RNA, 19 nt, Artificial Sequence
  Description of Artificial Sequence: Synthetic oligonucleotide
  Antisense strand to SEQ ID NO: 2277528
uuauaugcagcuauaccua

SEQ ID NO: 2277530 - RNA, 19 nt, Artificial Sequence
  Description of Artificial Sequence: Synthetic oligonucleotide
  Sense strand starting at position 2951 of SEQ ID NO: 1884597
gguauagcugcauauaaac

SEQ ID NO: 2277531 - RNA, 19 nt, Artificial Sequence
  Description of Artificial Sequence: Synthetic oligonucleotide
  Antisense strand to SEQ ID NO: 2277530
guuuauaugcagcuauacc

SEQ ID NO: 2277532 - RNA, 19 nt, Artificial Sequence
  Description of Artificial Sequence: Synthetic oligonucleotide
  Sense strand starting at position 3721 of SEQ ID NO: 1884597
cugagauggcugcaggaau

SEQ ID NO: 2277533 - RNA, 19 nt, Artificial Sequence
  Description of Artificial Sequence: Synthetic oligonucleotide
  Antisense strand to SEQ ID NO: 2277532
auuccugcagccaucucag

SEQ ID NO: 2277534 - RNA, 19 nt, Artificial Sequence
  Description of Artificial Sequence: Synthetic oligonucleotide
  Sense strand starting at position 3810 of SEQ ID NO: 1884597
uuuccaguugaauaagcau

SEQ ID NO: 2277535 - RNA, 19 nt, Artificial Sequence
  Description of Artificial Sequence: Synthetic oligonucleotide
  Antisense strand to SEQ ID NO: 2277534
augcuuauucaacuggaaa

SEQ ID NO: 2277536 - RNA, 19 nt, Artificial Sequence
  Description of Artificial Sequence: Synthetic oligonucleotide
  Sense strand starting at position 3894 of SEQ ID NO: 1884597
guuacaugucuccaucuua

SEQ ID NO: 2277537 - RNA, 19 nt, Artificial Sequence
  Description of Artificial Sequence: Synthetic oligonucleotide
  Antisense strand to SEQ ID NO: 2277536
uaagauggagacauguaac

SEQ ID NO: 2277538 - RNA, 19 nt, Artificial Sequence
  Description of Artificial Sequence: Synthetic oligonucleotide
  Sense strand starting at position 36 of SEQ ID NO: 1884598
uuacuaaagucaguagaaa

SEQ ID NO: 2277539 - RNA, 19 nt, Artificial Sequence
  Description of Artificial Sequence: Synthetic oligonucleotide
  Antisense strand to SEQ ID NO: 2277538
uuucuacugacuuuaguaa

SEQ ID NO: 2277540 - RNA, 19 nt, Artificial Sequence
  Description of Artificial Sequence: Synthetic oligonucleotide
  Sense strand starting at position 112 of SEQ ID NO: 1884598
gcucuugggaaucauggau

SEQ ID NO: 2277541 - RNA, 19 nt, Artificial Sequence
  Description of Artificial Sequence: Synthetic oligonucleotide
  Antisense strand to SEQ ID NO: 2277540
auccaugauucccaagagc

SEQ ID NO: 2277542 - RNA, 19 nt, Artificial Sequence
  Description of Artificial Sequence: Synthetic oligonucleotide
  Sense strand starting at position 118 of SEQ ID NO: 1884598
gggaaucauggauguguaa

SEQ ID NO: 2277543 - RNA, 19 nt, Artificial Sequence
  Description of Artificial Sequence: Synthetic oligonucleotide
  Antisense strand to SEQ ID NO: 2277542
uuacacauccaugauuccc

SEQ ID NO: 2277544 - RNA, 19 nt, Artificial Sequence
  Description of Artificial Sequence: Synthetic oligonucleotide
  Sense strand starting at position 272 of SEQ ID NO: 1884598
gcuacagauguuuaauaua

SEQ ID NO: 2277545 - RNA, 19 nt, Artificial Sequence
  Description of Artificial Sequence: Synthetic oligonucleotide
  Antisense strand to SEQ ID NO: 2277544
uauauuaaacaucuguagc

SEQ ID NO: 2277546 - RNA, 19 nt, Artificial Sequence
  Description of Artificial Sequence: Synthetic oligonucleotide
  Sense strand starting at position 362 of SEQ ID NO: 1884598
augacagcaucuucuaaag

SEQ ID NO: 2277547 - RNA, 19 nt, Artificial Sequence
  Description of Artificial Sequence: Synthetic oligonucleotide
  Antisense strand to SEQ ID NO: 2277546
cuuuagaagaugcugucau

SEQ ID NO: 2277548 - RNA, 19 nt, Artificial Sequence
  Description of Artificial Sequence: Synthetic oligonucleotide
  Sense strand starting at position 534 of SEQ ID NO: 1884598
cuaguuauucuugaccucu

SEQ ID NO: 2277549 - RNA, 19 nt, Artificial Sequence
  Description of Artificial Sequence: Synthetic oligonucleotide
  Antisense strand to SEQ ID NO: 2277548
agaggucaagaauaacuag

SEQ ID NO: 2277550 - RNA, 19 nt, Artificial Sequence
  Description of Artificial Sequence: Synthetic oligonucleotide
  Sense strand starting at position 560 of SEQ ID NO: 1884598
augacaaucacugguggua

SEQ ID NO: 2277551 - RNA, 19 nt, Artificial Sequence
  Description of Artificial Sequence: Synthetic oligonucleotide
  Antisense strand to SEQ ID NO: 2277550
uaccaccagugauugucau

SEQ ID NO: 2277552 - RNA, 19 nt, Artificial Sequence
  Description of Artificial Sequence: Synthetic oligonucleotide
  Sense strand starting at position 563 of SEQ ID NO: 1884598
acaaucacuggugguaauu

SEQ ID NO: 2277553 - RNA, 19 nt, Artificial Sequence
  Description of Artificial Sequence: Synthetic oligonucleotide
  Antisense strand to SEQ ID NO: 2277552
aauuaccaccagugauugu

SEQ ID NO: 2277554 - RNA, 19 nt, Artificial Sequence
  Description of Artificial Sequence: Synthetic oligonucleotide
  Sense strand starting at position 640 of SEQ ID NO: 1884598
cuuugagguagcugagaga

SEQ ID NO: 2277555 - RNA, 19 nt, Artificial Sequence
  Description of Artificial Sequence: Synthetic oligonucleotide
  Antisense strand to SEQ ID NO: 2277554
ucucucagcuaccucaaag

SEQ ID NO: 2277556 - RNA, 19 nt, Artificial Sequence
  Description of Artificial Sequence: Synthetic oligonucleotide
  Sense strand starting at position 859 of SEQ ID NO: 1884598
gcugguuuggcugcucaua

SEQ ID NO: 2277557 - RNA, 19 nt, Artificial Sequence
  Description of Artificial Sequence: Synthetic oligonucleotide
  Antisense strand to SEQ ID NO: 2277556
uaugagcagccaaaccagc

SEQ ID NO: 2277558 - RNA, 19 nt, Artificial Sequence
  Description of Artificial Sequence: Synthetic oligonucleotide
  Sense strand starting at position 931 of SEQ ID NO: 1884598
ucaugacauugguuaucac

SEQ ID NO: 2277559 - RNA, 19 nt, Artificial Sequence
  Description of Artificial Sequence: Synthetic oligonucleotide
  Antisense strand to SEQ ID NO: 2277558
gugauaaccaaugucauga

SEQ ID NO: 2277560 - RNA, 19 nt, Artificial Sequence
  Description of Artificial Sequence: Synthetic oligonucleotide
  Sense strand starting at position 934 of SEQ ID NO: 1884598
ugacauugguuaucacuau

SEQ ID NO: 2277561 - RNA, 19 nt, Artificial Sequence
  Description of Artificial Sequence: Synthetic oligonucleotide
  Antisense strand to SEQ ID NO: 2277560
auagugauaaccaauguca

SEQ ID NO: 2277562 - RNA, 19 nt, Artificial Sequence
  Description of Artificial Sequence: Synthetic oligonucleotide
  Sense strand starting at position 940 of SEQ ID NO: 1884598
ugguuaucacuaugaaaug

SEQ ID NO: 2277563 - RNA, 19 nt, Artificial Sequence
  Description of Artificial Sequence: Synthetic oligonucleotide
  Antisense strand to SEQ ID NO: 2277562
cauuucauagugauaacca

SEQ ID NO: 2277564 - RNA, 19 nt, Artificial Sequence
  Description of Artificial Sequence: Synthetic oligonucleotide
  Sense strand starting at position 1040 of SEQ ID NO: 1884598
agagguuggcuagagcaua

SEQ ID NO: 2277565 - RNA, 19 nt, Artificial Sequence
  Description of Artificial Sequence: Synthetic oligonucleotide
  Antisense strand to SEQ ID NO: 2277564
uaugcucuagccaaccucu

SEQ ID NO: 2277566 - RNA, 19 nt, Artificial Sequence
  Description of Artificial Sequence: Synthetic oligonucleotide
  Sense strand starting at position 1144 of SEQ ID NO: 1884598
cuuggaaacuuccuugagu

SEQ ID NO: 2277567 - RNA, 19 nt, Artificial Sequence
  Description of Artificial Sequence: Synthetic oligonucleotide
  Antisense strand to SEQ ID NO: 2277566
acucaaggaaguuuccaag

SEQ ID NO: 2277568 - RNA, 19 nt, Artificial Sequence
  Description of Artificial Sequence: Synthetic oligonucleotide
  Sense strand starting at position 1145 of SEQ ID NO: 1884598
uuggaaacuuccuugagug

SEQ ID NO: 2277569 - RNA, 19 nt, Artificial Sequence
  Description of Artificial Sequence: Synthetic oligonucleotide
  Antisense strand to SEQ ID NO: 2277568
cacucaaggaaguuuccaa

SEQ ID NO: 2277570 - RNA, 19 nt, Artificial Sequence
  Description of Artificial Sequence: Synthetic oligonucleotide
  Sense strand starting at position 1149 of SEQ ID NO: 1884598
aaacuuccuugaguggaga

SEQ ID NO: 2277571 - RNA, 19 nt, Artificial Sequence
  Description of Artificial Sequence: Synthetic oligonucleotide
  Antisense strand to SEQ ID NO: 2277570
ucuccacucaaggaaguuu

SEQ ID NO: 2277572 - RNA, 19 nt, Artificial Sequence
  Description of Artificial Sequence: Synthetic oligonucleotide
  Sense strand starting at position 1198 of SEQ ID NO: 1884598
aagaaagugcaauacaguu

SEQ ID NO: 2277573 - RNA, 19 nt, Artificial Sequence
  Description of Artificial Sequence: Synthetic oligonucleotide
  Antisense strand to SEQ ID NO: 2277572
aacuguauugcacuuucuu

SEQ ID NO: 2277574 - RNA, 19 nt, Artificial Sequence
  Description of Artificial Sequence: Synthetic oligonucleotide
  Sense strand starting at position 1267 of SEQ ID NO: 1884598
ccaugaaacuuuguaguag

SEQ ID NO: 2277575 - RNA, 19 nt, Artificial Sequence
  Description of Artificial Sequence: Synthetic oligonucleotide
  Antisense strand to SEQ ID NO: 2277574
cuacuacaaaguuucaugg

SEQ ID NO: 2277576 - RNA, 19 nt, Artificial Sequence
  Description of Artificial Sequence: Synthetic oligonucleotide
  Sense strand starting at position 1320 of SEQ ID NO: 1884598
uccuuugaccaaugagaua

SEQ ID NO: 2277577 - RNA, 19 nt, Artificial Sequence
  Description of Artificial Sequence: Synthetic oligonucleotide
  Antisense strand to SEQ ID NO: 2277576
uaucucauuggucaaagga

SEQ ID NO: 2277578 - RNA, 19 nt, Artificial Sequence
  Description of Artificial Sequence: Synthetic oligonucleotide
  Sense strand starting at position 1365 of SEQ ID NO: 1884598
uuguaagauccuuaaguca

SEQ ID NO: 2277579 - RNA, 19 nt, Artificial Sequence
  Description of Artificial Sequence: Synthetic oligonucleotide
  Antisense strand to SEQ ID NO: 2277578
ugacuuaaggaucuuacaa

SEQ ID NO: 2277580 - RNA, 19 nt, Artificial Sequence
  Description of Artificial Sequence: Synthetic oligonucleotide
  Sense strand starting at position 1419 of SEQ ID NO: 1884598
ccauaagaaugugcuagaa

SEQ ID NO: 2277581 - RNA, 19 nt, Artificial Sequence
  Description of Artificial Sequence: Synthetic oligonucleotide
  Antisense strand to SEQ ID NO: 2277580
uucuagcacauucuuaugg

SEQ ID NO: 2277582 - RNA, 19 nt, Artificial Sequence
  Description of Artificial Sequence: Synthetic oligonucleotide
  Sense strand starting at position 1593 of SEQ ID NO: 1884598
gcauuuauuguaugccacu

SEQ ID NO: 2277583 - RNA, 19 nt, Artificial Sequence
  Description of Artificial Sequence: Synthetic oligonucleotide
  Antisense strand to SEQ ID NO: 2277582
aguggcauacaauaaaugc

SEQ ID NO: 2277584 - RNA, 19 nt, Artificial Sequence
  Description of Artificial Sequence: Synthetic oligonucleotide
  Sense strand starting at position 1884 of SEQ ID NO: 1884598
gaggaaucaugaucguucu

SEQ ID NO: 2277585 - RNA, 19 nt, Artificial Sequence
  Description of Artificial Sequence: Synthetic oligonucleotide
  Antisense strand to SEQ ID NO: 2277584
agaacgaucaugauuccuc

SEQ ID NO: 2277586 - RNA, 19 nt, Artificial Sequence
  Description of Artificial Sequence: Synthetic oligonucleotide
  Sense strand starting at position 1951 of SEQ ID NO: 1884598
guuaucucccuugauguaa

SEQ ID NO: 2277587 - RNA, 19 nt, Artificial Sequence
  Description of Artificial Sequence: Synthetic oligonucleotide
  Antisense strand to SEQ ID NO: 2277586
uuacaucaagggagauaac

SEQ ID NO: 2277588 - RNA, 19 nt, Artificial Sequence
  Description of Artificial Sequence: Synthetic oligonucleotide
  Sense strand starting at position 2036 of SEQ ID NO: 1884598
uuucuuaagcagggaaauu

SEQ ID NO: 2277589 - RNA, 19 nt, Artificial Sequence
  Description of Artificial Sequence: Synthetic oligonucleotide
  Antisense strand to SEQ ID NO: 2277588
aauuucccugcuuaagaaa

SEQ ID NO: 2277590 - RNA, 19 nt, Artificial Sequence
  Description of Artificial Sequence: Synthetic oligonucleotide
  Sense strand starting at position 2119 of SEQ ID NO: 1884598
uaucaaagagucugaugau

SEQ ID NO: 2277591 - RNA, 19 nt, Artificial Sequence
  Description of Artificial Sequence: Synthetic oligonucleotide
  Antisense strand to SEQ ID NO: 2277590
aucaucagacucuuugaua

SEQ ID NO: 2277592 - RNA, 19 nt, Artificial Sequence
  Description of Artificial Sequence: Synthetic oligonucleotide
  Sense strand starting at position 2189 of SEQ ID NO: 1884598
ggagcaaauacuugggacu

SEQ ID NO: 2277593 - RNA, 19 nt, Artificial Sequence
  Description of Artificial Sequence: Synthetic oligonucleotide
  Antisense strand to SEQ ID NO: 2277592
agucccaaguauuugcucc

SEQ ID NO: 2277594 - RNA, 19 nt, Artificial Sequence
  Description of Artificial Sequence: Synthetic oligonucleotide
  Sense strand starting at position 2205 of SEQ ID NO: 1884598
acuggccuucuugaacuau

SEQ ID NO: 2277595 - RNA, 19 nt, Artificial Sequence
  Description of Artificial Sequence: Synthetic oligonucleotide
  Antisense strand to SEQ ID NO: 2277594
auaguucaagaaggccagu

SEQ ID NO: 2277596 - RNA, 19 nt, Artificial Sequence
  Description of Artificial Sequence: Synthetic oligonucleotide
  Sense strand starting at position 2226 of SEQ ID NO: 1884598
gugcauggaaauuauagua

SEQ ID NO: 2277597 - RNA, 19 nt, Artificial Sequence
  Description of Artificial Sequence: Synthetic oligonucleotide
  Antisense strand to SEQ ID NO: 2277596
uacuauaauuuccaugcac

SEQ ID NO: 2277598 - RNA, 19 nt, Artificial Sequence
  Description of Artificial Sequence: Synthetic oligonucleotide
  Sense strand starting at position 2250 of SEQ ID NO: 1884598
acauaauggugauucugaa

SEQ ID NO: 2277599 - RNA, 19 nt, Artificial Sequence
  Description of Artificial Sequence: Synthetic oligonucleotide
  Antisense strand to SEQ ID NO: 2277598
uucagaaucaccauuaugu

SEQ ID NO: 2277600 - RNA, 19 nt, Artificial Sequence
  Description of Artificial Sequence: Synthetic oligonucleotide
  Sense strand starting at position 2283 of SEQ ID NO: 1884598
cugauaucuguugacgaaa

SEQ ID NO: 2277601 - RNA, 19 nt, Artificial Sequence
  Description of Artificial Sequence: Synthetic oligonucleotide
  Antisense strand to SEQ ID NO: 2277600
uuucgucaacagauaucag

SEQ ID NO: 2277602 - RNA, 19 nt, Artificial Sequence
  Description of Artificial Sequence: Synthetic oligonucleotide
  Sense strand starting at position 3171 of SEQ ID NO: 1884598
aucugagcacacugagaau

SEQ ID NO: 2277603 - RNA, 19 nt, Artificial Sequence
  Description of Artificial Sequence: Synthetic oligonucleotide
  Antisense strand to SEQ ID NO: 2277602
auucucagugugcucagau

SEQ ID NO: 2277604 - RNA, 19 nt, Artificial Sequence
  Description of Artificial Sequence: Synthetic oligonucleotide
  Sense strand starting at position 3182 of SEQ ID NO: 1884598
cugagaaucuuccugauac

SEQ ID NO: 2277605 - RNA, 19 nt, Artificial Sequence
  Description of Artificial Sequence: Synthetic oligonucleotide
  Antisense strand to SEQ ID NO: 2277604
guaucaggaagauucucag

SEQ ID NO: 2277606 - RNA, 19 nt, Artificial Sequence
  Description of Artificial Sequence: Synthetic oligonucleotide
  Sense strand starting at position 3268 of SEQ ID NO: 1884598
uuccacuagccuggagaaa

SEQ ID NO: 2277607 - RNA, 19 nt, Artificial Sequence
  Description of Artificial Sequence: Synthetic oligonucleotide
  Antisense strand to SEQ ID NO: 2277606
uuucuccaggcuaguggaa

SEQ ID NO: 2277608 - RNA, 19 nt, Artificial Sequence
  Description of Artificial Sequence: Synthetic oligonucleotide
  Sense strand starting at position 3323 of SEQ ID NO: 1884598
uuaugcuuugaugagguga

SEQ ID NO: 2277609 - RNA, 19 nt, Artificial Sequence
  Description of Artificial Sequence: Synthetic oligonucleotide
  Antisense strand to SEQ ID NO: 2277608
ucaccucaucaaagcauaa

SEQ ID NO: 2277610 - RNA, 19 nt, Artificial Sequence
  Description of Artificial Sequence: Synthetic oligonucleotide
  Sense strand starting at position 3536 of SEQ ID NO: 1884598
acaucauugcauuauaguu

SEQ ID NO: 2277611 - RNA, 19 nt, Artificial Sequence
  Description of Artificial Sequence: Synthetic oligonucleotide
  Antisense strand to SEQ ID NO: 2277610
aacuauaaugcaaugaugu

SEQ ID NO: 2277612 - RNA, 19 nt, Artificial Sequence
  Description of Artificial Sequence: Synthetic oligonucleotide
  Sense strand starting at position 3743 of SEQ ID NO: 1884598
cuuacaguuaagggaugau

SEQ ID NO: 2277613 - RNA, 19 nt, Artificial Sequence
  Description of Artificial Sequence: Synthetic oligonucleotide
  Antisense strand to SEQ ID NO: 2277612
aucaucccuuaacuguaag

SEQ ID NO: 2277614 - RNA, 19 nt, Artificial Sequence
  Description of Artificial Sequence: Synthetic oligonucleotide
  Sense strand starting at position 3860 of SEQ ID NO: 1884598
aaaucagaguggcugaauu

SEQ ID NO: 2277615 - RNA, 19 nt, Artificial Sequence
  Description of Artificial Sequence: Synthetic oligonucleotide
  Antisense strand to SEQ ID NO: 2277614
aauucagccacucugauuu

SEQ ID NO: 2277616 - RNA, 19 nt, Artificial Sequence
  Description of Artificial Sequence: Synthetic oligonucleotide
  Sense strand starting at position 3905 of SEQ ID NO: 1884598
ccagaucuccuauggaaac

SEQ ID NO: 2277617 - RNA, 19 nt, Artificial Sequence
  Description of Artificial Sequence: Synthetic oligonucleotide
  Antisense strand to SEQ ID NO: 2277616
guuuccauaggagaucugg

SEQ ID NO: 2277618 - RNA, 19 nt, Artificial Sequence
  Description of Artificial Sequence: Synthetic oligonucleotide
  Sense strand starting at position 38 of SEQ ID NO: 1884599
gauuguuaauggguaucaa

SEQ ID NO: 2277619 - RNA, 19 nt, Artificial Sequence
  Description of Artificial Sequence: Synthetic oligonucleotide
  Antisense strand to SEQ ID NO: 2277618
uugauacccauuaacaauc

SEQ ID NO: 2277620 - RNA, 19 nt, Artificial Sequence
  Description of Artificial Sequence: Synthetic oligonucleotide
  Sense strand starting at position 99 of SEQ ID NO: 1884599
guaauuauugcauaacugu

SEQ ID NO: 2277621 - RNA, 19 nt, Artificial Sequence
  Description of Artificial Sequence: Synthetic oligonucleotide
  Antisense strand to SEQ ID NO: 2277620
acaguuaugcaauaauuac

SEQ ID NO: 2277622 - RNA, 19 nt, Artificial Sequence
  Description of Artificial Sequence: Synthetic oligonucleotide
  Sense strand starting at position 102 of SEQ ID NO: 1884599
auuauugcauaacugugaa

SEQ ID NO: 2277623 - RNA, 19 nt, Artificial Sequence
  Description of Artificial Sequence: Synthetic oligonucleotide
  Antisense strand to SEQ ID NO: 2277622
uucacaguuaugcaauaau

SEQ ID NO: 2277624 - RNA, 19 nt, Artificial Sequence
  Description of Artificial Sequence: Synthetic oligonucleotide
  Sense strand starting at position 162 of SEQ ID NO: 1884599
uuguauggcaugugaauaa

SEQ ID NO: 2277625 - RNA, 19 nt, Artificial Sequence
  Description of Artificial Sequence: Synthetic oligonucleotide
  Antisense strand to SEQ ID NO: 2277624
uuauucacaugccauacaa

SEQ ID NO: 2277626 - RNA, 19 nt, Artificial Sequence
  Description of Artificial Sequence: Synthetic oligonucleotide
  Sense strand starting at position 596 of SEQ ID NO: 1884599
aauuauauggucugcugga

SEQ ID NO: 2277627 - RNA, 19 nt, Artificial Sequence
  Description of Artificial Sequence: Synthetic oligonucleotide
  Antisense strand to SEQ ID NO: 2277626
uccagcagaccauauaauu

SEQ ID NO: 2277628 - RNA, 19 nt, Artificial Sequence
  Description of Artificial Sequence: Synthetic oligonucleotide
  Sense strand starting at position 605 of SEQ ID NO: 1884599
gucugcuggacuugacaga

SEQ ID NO: 2277629 - RNA, 19 nt, Artificial Sequence
  Description of Artificial Sequence: Synthetic oligonucleotide
  Antisense strand to SEQ ID NO: 2277628
ucugucaaguccagcagac

SEQ ID NO: 2277630 - RNA, 19 nt, Artificial Sequence
  Description of Artificial Sequence: Synthetic oligonucleotide
  Sense strand starting at position 612 of SEQ ID NO: 1884599
ggacuugacagaugcucuu

SEQ ID NO: 2277631 - RNA, 19 nt, Artificial Sequence
  Description of Artificial Sequence: Synthetic oligonucleotide
  Antisense strand to SEQ ID NO: 2277630
aagagcaucugucaagucc

SEQ ID NO: 2277632 - RNA, 19 nt, Artificial Sequence
  Description of Artificial Sequence: Synthetic oligonucleotide
  Sense strand starting at position 774 of SEQ ID NO: 1884599
guuuauuaggagugacagu

SEQ ID NO: 2277633 - RNA, 19 nt, Artificial Sequence
  Description of Artificial Sequence: Synthetic oligonucleotide
  Antisense strand to SEQ ID NO: 2277632
acugucacuccuaauaaac

SEQ ID NO: 2277634 - RNA, 19 nt, Artificial Sequence
  Description of Artificial Sequence: Synthetic oligonucleotide
  Sense strand starting at position 885 of SEQ ID NO: 1884599
uggcaacaugaauauuagu

SEQ ID NO: 2277635 - RNA, 19 nt, Artificial Sequence
  Description of Artificial Sequence: Synthetic oligonucleotide
  Antisense strand to SEQ ID NO: 2277634
acuaauauucauguugcca

SEQ ID NO: 2277636 - RNA, 19 nt, Artificial Sequence
  Description of Artificial Sequence: Synthetic oligonucleotide
  Sense strand starting at position 1133 of SEQ ID NO: 1884599
gaagguaauuaggcuggau

SEQ ID NO: 2277637 - RNA, 19 nt, Artificial Sequence
  Description of Artificial Sequence: Synthetic oligonucleotide
  Antisense strand to SEQ ID NO: 2277636
auccagccuaauuaccuuc

SEQ ID NO: 2277638 - RNA, 19 nt, Artificial Sequence
  Description of Artificial Sequence: Synthetic oligonucleotide
  Sense strand starting at position 1136 of SEQ ID NO: 1884599
gguaauuaggcuggauuga

SEQ ID NO: 2277639 - RNA, 19 nt, Artificial Sequence
  Description of Artificial Sequence: Synthetic oligonucleotide
  Antisense strand to SEQ ID NO: 2277638
ucaauccagccuaauuacc

SEQ ID NO: 2277640 - RNA, 19 nt, Artificial Sequence
  Description of Artificial Sequence: Synthetic oligonucleotide
  Sense strand starting at position 1201 of SEQ ID NO: 1884599
uuaagaugugaaugucagu

SEQ ID NO: 2277641 - RNA, 19 nt, Artificial Sequence
  Description of Artificial Sequence: Synthetic oligonucleotide
  Antisense strand to SEQ ID NO: 2277640
acugacauucacaucuuaa

SEQ ID NO: 2277642 - RNA, 19 nt, Artificial Sequence
  Description of Artificial Sequence: Synthetic oligonucleotide
  Sense strand starting at position 1218 of SEQ ID NO: 1884599
gugugaauacccuacuucu

SEQ ID NO: 2277643 - RNA, 19 nt, Artificial Sequence
  Description of Artificial Sequence: Synthetic oligonucleotide
  Antisense strand to SEQ ID NO: 2277642
agaaguaggguauucacac

SEQ ID NO: 2277644 - RNA, 19 nt, Artificial Sequence
  Description of Artificial Sequence: Synthetic oligonucleotide
  Sense strand starting at position 1359 of SEQ ID NO: 1884599
cccuucugugacuagcaaa

SEQ ID NO: 2277645 - RNA, 19 nt, Artificial Sequence
  Description of Artificial Sequence: Synthetic oligonucleotide
  Antisense strand to SEQ ID NO: 2277644
uuugcuagucacagaaggg

SEQ ID NO: 2277646 - RNA, 19 nt, Artificial Sequence
  Description of Artificial Sequence: Synthetic oligonucleotide
  Sense strand starting at position 1467 of SEQ ID NO: 1884599
uacugaaugcuagaacugu

SEQ ID NO: 2277647 - RNA, 19 nt, Artificial Sequence
  Description of Artificial Sequence: Synthetic oligonucleotide
  Antisense strand to SEQ ID NO: 2277646
acaguucuagcauucagua

SEQ ID NO: 2277648 - RNA, 19 nt, Artificial Sequence
  Description of Artificial Sequence: Synthetic oligonucleotide
  Sense strand starting at position 1845 of SEQ ID NO: 1884599
agcacucacccuggaagaa

SEQ ID NO: 2277649 - RNA, 19 nt, Artificial Sequence
  Description of Artificial Sequence: Synthetic oligonucleotide
  Antisense strand to SEQ ID NO: 2277648
uucuuccagggugagugcu

SEQ ID NO: 2277650 - RNA, 19 nt, Artificial Sequence
  Description of Artificial Sequence: Synthetic oligonucleotide
  Sense strand starting at position 2154 of SEQ ID NO: 1884599
aggcuacggacuuggaaua

SEQ ID NO: 2277651 - RNA, 19 nt, Artificial Sequence
  Description of Artificial Sequence: Synthetic oligonucleotide
  Antisense strand to SEQ ID NO: 2277650
uauuccaaguccguagccu

SEQ ID NO: 2277652 - RNA, 19 nt, Artificial Sequence
  Description of Artificial Sequence: Synthetic oligonucleotide
  Sense strand starting at position 2264 of SEQ ID NO: 1884599
aguugaagguucucagaau

SEQ ID NO: 2277653 - RNA, 19 nt, Artificial Sequence
  Description of Artificial Sequence: Synthetic oligonucleotide
  Antisense strand to SEQ ID NO: 2277652
auucugagaaccuucaacu

SEQ ID NO: 2277654 - RNA, 19 nt, Artificial Sequence
  Description of Artificial Sequence: Synthetic oligonucleotide
  Sense strand starting at position 2453 of SEQ ID NO: 1884599
uggcaaugaugaucaaauc

SEQ ID NO: 2277655 - RNA, 19 nt, Artificial Sequence
  Description of Artificial Sequence: Synthetic oligonucleotide
  Antisense strand to SEQ ID NO: 2277654
gauuugaucaucauugcca

SEQ ID NO: 2277656 - RNA, 19 nt, Artificial Sequence
  Description of Artificial Sequence: Synthetic oligonucleotide
  Sense strand starting at position 2469 of SEQ ID NO: 1884599
aucauuacagccuguauua

SEQ ID NO: 2277657 - RNA, 19 nt, Artificial Sequence
  Description of Artificial Sequence: Synthetic oligonucleotide
  Antisense strand to SEQ ID NO: 2277656
uaauacaggcuguaaugau

SEQ ID NO: 2277658 - RNA, 19 nt, Artificial Sequence
  Description of Artificial Sequence: Synthetic oligonucleotide
  Sense strand starting at position 2505 of SEQ ID NO: 1884599
ggauuucugugucuuuggu

SEQ ID NO: 2277659 - RNA, 19 nt, Artificial Sequence
  Description of Artificial Sequence: Synthetic oligonucleotide
  Antisense strand to SEQ ID NO: 2277658
accaaagacacagaaaucc

SEQ ID NO: 2277660 - RNA, 19 nt, Artificial Sequence
  Description of Artificial Sequence: Synthetic oligonucleotide
  Sense strand starting at position 2542 of SEQ ID NO: 1884599
auguuaucacaguacuuga

SEQ ID NO: 2277661 - RNA, 19 nt, Artificial Sequence
  Description of Artificial Sequence: Synthetic oligonucleotide
  Antisense strand to SEQ ID NO: 2277660
ucaaguacugugauaacau

SEQ ID NO: 2277662 - RNA, 19 nt, Artificial Sequence
  Description of Artificial Sequence: Synthetic oligonucleotide
  Sense strand starting at position 2551 of SEQ ID NO: 1884599
caguacuugaagugagaug

SEQ ID NO: 2277663 - RNA, 19 nt, Artificial Sequence
  Description of Artificial Sequence: Synthetic oligonucleotide
  Antisense strand to SEQ ID NO: 2277662
caucucacuucaaguacug

SEQ ID NO: 2277664 - RNA, 19 nt, Artificial Sequence
  Description of Artificial Sequence: Synthetic oligonucleotide
  Sense strand starting at position 2562 of SEQ ID NO: 1884599
gugagauggcgucacauac

SEQ ID NO: 2277665 - RNA, 19 nt, Artificial Sequence
  Description of Artificial Sequence: Synthetic oligonucleotide
  Antisense strand to SEQ ID NO: 2277664
guaugugacgccaucucac

SEQ ID NO: 2277666 - RNA, 19 nt, Artificial Sequence
  Description of Artificial Sequence: Synthetic oligonucleotide
  Sense strand starting at position 2630 of SEQ ID NO: 1884599
gccucuucccuggaaauug

SEQ ID NO: 2277667 - RNA, 19 nt, Artificial Sequence
  Description of Artificial Sequence: Synthetic oligonucleotide
  Antisense strand to SEQ ID NO: 2277666
caauuuccagggaagaggc

SEQ ID NO: 2277668 - RNA, 19 nt, Artificial Sequence
  Description of Artificial Sequence: Synthetic oligonucleotide
  Sense strand starting at position 2640 of SEQ ID NO: 1884599
uggaaauugccacauguca

SEQ ID NO: 2277669 - RNA, 19 nt, Artificial Sequence
  Description of Artificial Sequence: Synthetic oligonucleotide
  Antisense strand to SEQ ID NO: 2277668
ugacauguggcaauuucca

SEQ ID NO: 2277670 - RNA, 19 nt, Artificial Sequence
  Description of Artificial Sequence: Synthetic oligonucleotide
  Sense strand starting at position 2889 of SEQ ID NO: 1884599
uguggaaauccguauacuu

SEQ ID NO: 2277671 - RNA, 19 nt, Artificial Sequence
  Description of Artificial Sequence: Synthetic oligonucleotide
  Antisense strand to SEQ ID NO: 2277670
aaguauacggauuuccaca

SEQ ID NO: 2277672 - RNA, 19 nt, Artificial Sequence
  Description of Artificial Sequence: Synthetic oligonucleotide
  Sense strand starting at position 2891 of SEQ ID NO: 1884599
uggaaauccguauacuucu

SEQ ID NO: 2277673 - RNA, 19 nt, Artificial Sequence
  Description of Artificial Sequence: Synthetic oligonucleotide
  Antisense strand to SEQ ID NO: 2277672
agaaguauacggauuucca

SEQ ID NO: 2277674 - RNA, 19 nt, Artificial Sequence
  Description of Artificial Sequence: Synthetic oligonucleotide
  Sense strand starting at position 2949 of SEQ ID NO: 1884599
gcagguugucucuacuaag

SEQ ID NO: 2277675 - RNA, 19 nt, Artificial Sequence
  Description of Artificial Sequence: Synthetic oligonucleotide
  Antisense strand to SEQ ID NO: 2277674
cuuaguagagacaaccugc

SEQ ID NO: 2277676 - RNA, 19 nt, Artificial Sequence
  Description of Artificial Sequence: Synthetic oligonucleotide
  Sense strand starting at position 3018 of SEQ ID NO: 1884599
guagaacuucuagauaugu

SEQ ID NO: 2277677 - RNA, 19 nt, Artificial Sequence
  Description of Artificial Sequence: Synthetic oligonucleotide
  Antisense strand to SEQ ID NO: 2277676
acauaucuagaaguucuac

SEQ ID NO: 2277678 - RNA, 19 nt, Artificial Sequence
  Description of Artificial Sequence: Synthetic oligonucleotide
  Sense strand starting at position 3085 of SEQ ID NO: 1884599
uuacauaguguuuaaagca

SEQ ID NO: 2277679 - RNA, 19 nt, Artificial Sequence
  Description of Artificial Sequence: Synthetic oligonucleotide
  Antisense strand to SEQ ID NO: 2277678
ugcuuuaaacacuauguaa

SEQ ID NO: 2277680 - RNA, 19 nt, Artificial Sequence
  Description of Artificial Sequence: Synthetic oligonucleotide
  Sense strand starting at position 3133 of SEQ ID NO: 1884599
gcucuuuaggaaggagaca

SEQ ID NO: 2277681 - RNA, 19 nt, Artificial Sequence
  Description of Artificial Sequence: Synthetic oligonucleotide
  Antisense strand to SEQ ID NO: 2277680
ugucuccuuccuaaagagc

SEQ ID NO: 2277682 - RNA, 19 nt, Artificial Sequence
  Description of Artificial Sequence: Synthetic oligonucleotide
  Sense strand starting at position 3272 of SEQ ID NO: 1884599
caggacaucuguuugaaga

SEQ ID NO: 2277683 - RNA, 19 nt, Artificial Sequence
  Description of Artificial Sequence: Synthetic oligonucleotide
  Antisense strand to SEQ ID NO: 2277682
ucuucaaacagauguccug

SEQ ID NO: 2277684 - RNA, 19 nt, Artificial Sequence
  Description of Artificial Sequence: Synthetic oligonucleotide
  Sense strand starting at position 3588 of SEQ ID NO: 1884599
ugcaguccagucgauuaaa

SEQ ID NO: 2277685 - RNA, 19 nt, Artificial Sequence
  Description of Artificial Sequence: Synthetic oligonucleotide
  Antisense strand to SEQ ID NO: 2277684
uuuaaucgacuggacugca

SEQ ID NO: 2277686 - RNA, 19 nt, Artificial Sequence
  Description of Artificial Sequence: Synthetic oligonucleotide
  Sense strand starting at position 3624 of SEQ ID NO: 1884599
uguaaagauugaucuugag

SEQ ID NO: 2277687 - RNA, 19 nt, Artificial Sequence
  Description of Artificial Sequence: Synthetic oligonucleotide
  Antisense strand to SEQ ID NO: 2277686
cucaagaucaaucuuuaca

SEQ ID NO: 2277688 - RNA, 19 nt, Artificial Sequence
  Description of Artificial Sequence: Synthetic oligonucleotide
  Sense strand starting at position 3633 of SEQ ID NO: 1884599
ugaucuugagccuaaacuu

SEQ ID NO: 2277689 - RNA, 19 nt, Artificial Sequence
  Description of Artificial Sequence: Synthetic oligonucleotide
  Antisense strand to SEQ ID NO: 2277688
aaguuuaggcucaagauca

SEQ ID NO: 2277690 - RNA, 19 nt, Artificial Sequence
  Description of Artificial Sequence: Synthetic oligonucleotide
  Sense strand starting at position 3797 of SEQ ID NO: 1884599
uugguauuucuuugcucca

SEQ ID NO: 2277691 - RNA, 19 nt, Artificial Sequence
  Description of Artificial Sequence: Synthetic oligonucleotide
  Antisense strand to SEQ ID NO: 2277690
uggagcaaagaaauaccaa

SEQ ID NO: 2277692 - RNA, 19 nt, Artificial Sequence
  Description of Artificial Sequence: Synthetic oligonucleotide
  Sense strand starting at position 3798 of SEQ ID NO: 1884599
ugguauuucuuugcuccau

SEQ ID NO: 2277693 - RNA, 19 nt, Artificial Sequence
  Description of Artificial Sequence: Synthetic oligonucleotide
  Antisense strand to SEQ ID NO: 2277692
auggagcaaagaaauacca

SEQ ID NO: 2277694 - RNA, 19 nt, Artificial Sequence
  Description of Artificial Sequence: Synthetic oligonucleotide
  Sense strand starting at position 3799 of SEQ ID NO: 1884599
gguauuucuuugcuccaua

SEQ ID NO: 2277695 - RNA, 19 nt, Artificial Sequence
  Description of Artificial Sequence: Synthetic oligonucleotide
  Antisense strand to SEQ ID NO: 2277694
uauggagcaaagaaauacc

SEQ ID NO: 2277696 - RNA, 19 nt, Artificial Sequence
  Description of Artificial Sequence: Synthetic oligonucleotide
  Sense strand starting at position 3800 of SEQ ID NO: 1884599
guauuucuuugcuccauac

SEQ ID NO: 2277697 - RNA, 19 nt, Artificial Sequence
  Description of Artificial Sequence: Synthetic oligonucleotide
  Antisense strand to SEQ ID NO: 2277696
guauggagcaaagaaauac

SEQ ID NO: 2277698 - RNA, 19 nt, Artificial Sequence
  Description of Artificial Sequence: Synthetic oligonucleotide
  Sense strand starting at position 238 of SEQ ID NO: 1884600
ucagaauucccucgggcuu

SEQ ID NO: 2277699 - RNA, 19 nt, Artificial Sequence
  Description of Artificial Sequence: Synthetic oligonucleotide
  Antisense strand to SEQ ID NO: 2277698
aagcccgagggaauucuga

SEQ ID NO: 2277700 - RNA, 19 nt, Artificial Sequence
  Description of Artificial Sequence: Synthetic oligonucleotide
  Sense strand starting at position 254 of SEQ ID NO: 1884600
cuuccuggacccugagaaa

SEQ ID NO: 2277701 - RNA, 19 nt, Artificial Sequence
  Description of Artificial Sequence: Synthetic oligonucleotide
  Antisense strand to SEQ ID NO: 2277700
uuucucaggguccaggaag

SEQ ID NO: 2277702 - RNA, 19 nt, Artificial Sequence
  Description of Artificial Sequence: Synthetic oligonucleotide
  Sense strand starting at position 257 of SEQ ID NO: 1884600
ccuggacccugagaaaguu

SEQ ID NO: 2277703 - RNA, 19 nt, Artificial Sequence
  Description of Artificial Sequence: Synthetic oligonucleotide
  Antisense strand to SEQ ID NO: 2277702
aacuuucucaggguccagg

SEQ ID NO: 2277704 - RNA, 19 nt, Artificial Sequence
  Description of Artificial Sequence: Synthetic oligonucleotide
  Sense strand starting at position 573 of SEQ ID NO: 1884600
aagggaauuccugguucca

SEQ ID NO: 2277705 - RNA, 19 nt, Artificial Sequence
  Description of Artificial Sequence: Synthetic oligonucleotide
  Antisense strand to SEQ ID NO: 2277704
uggaaccaggaauucccuu

SEQ ID NO: 2277706 - RNA, 19 nt, Artificial Sequence
  Description of Artificial Sequence: Synthetic oligonucleotide
  Sense strand starting at position 575 of SEQ ID NO: 1884600
gggaauuccugguuccaua

SEQ ID NO: 2277707 - RNA, 19 nt, Artificial Sequence
  Description of Artificial Sequence: Synthetic oligonucleotide
  Antisense strand to SEQ ID NO: 2277706
uauggaaccaggaauuccc

SEQ ID NO: 2277708 - RNA, 19 nt, Artificial Sequence
  Description of Artificial Sequence: Synthetic oligonucleotide
  Sense strand starting at position 871 of SEQ ID NO: 1884600
agcagaaugugagggagau

SEQ ID NO: 2277709 - RNA, 19 nt, Artificial Sequence
  Description of Artificial Sequence: Synthetic oligonucleotide
  Antisense strand to SEQ ID NO: 2277708
aucucccucacauucugcu

SEQ ID NO: 2277710 - RNA, 19 nt, Artificial Sequence
  Description of Artificial Sequence: Synthetic oligonucleotide
  Sense strand starting at position 1108 of SEQ ID NO: 1884600
caucucuuccagcaggaga

SEQ ID NO: 2277711 - RNA, 19 nt, Artificial Sequence
  Description of Artificial Sequence: Synthetic oligonucleotide
  Antisense strand to SEQ ID NO: 2277710
ucuccugcuggaagagaug

SEQ ID NO: 2277712 - RNA, 19 nt, Artificial Sequence
  Description of Artificial Sequence: Synthetic oligonucleotide
  Sense strand starting at position 1396 of SEQ ID NO: 1884600
gcaggcagcucccagaaau

SEQ ID NO: 2277713 - RNA, 19 nt, Artificial Sequence
  Description of Artificial Sequence: Synthetic oligonucleotide
  Antisense strand to SEQ ID NO: 2277712
auuucugggagcugccugc

SEQ ID NO: 2277714 - RNA, 19 nt, Artificial Sequence
  Description of Artificial Sequence: Synthetic oligonucleotide
  Sense strand starting at position 1454 of SEQ ID NO: 1884600
gcugucacucaccggagaa

SEQ ID NO: 2277715 - RNA, 19 nt, Artificial Sequence
  Description of Artificial Sequence: Synthetic oligonucleotide
  Antisense strand to SEQ ID NO: 2277714
uucuccggugagugacagc

SEQ ID NO: 2277716 - RNA, 19 nt, Artificial Sequence
  Description of Artificial Sequence: Synthetic oligonucleotide
  Sense strand starting at position 2199 of SEQ ID NO: 1884600
ggaaacuaguucugucaua

SEQ ID NO: 2277717 - RNA, 19 nt, Artificial Sequence
  Description of Artificial Sequence: Synthetic oligonucleotide
  Antisense strand to SEQ ID NO: 2277716
uaugacagaacuaguuucc

SEQ ID NO: 2277718 - RNA, 19 nt, Artificial Sequence
  Description of Artificial Sequence: Synthetic oligonucleotide
  Sense strand starting at position 2200 of SEQ ID NO: 1884600
gaaacuaguucugucauag

SEQ ID NO: 2277719 - RNA, 19 nt, Artificial Sequence
  Description of Artificial Sequence: Synthetic oligonucleotide
  Antisense strand to SEQ ID NO: 2277718
cuaugacagaacuaguuuc

SEQ ID NO: 2277720 - RNA, 19 nt, Artificial Sequence
  Description of Artificial Sequence: Synthetic oligonucleotide
  Sense strand starting at position 2336 of SEQ ID NO: 1884600
cuuucugugcaugcgugaa

SEQ ID NO: 2277721 - RNA, 19 nt, Artificial Sequence
  Description of Artificial Sequence: Synthetic oligonucleotide
  Antisense strand to SEQ ID NO: 2277720
uucacgcaugcacagaaag

SEQ ID NO: 2277722 - RNA, 19 nt, Artificial Sequence
  Description of Artificial Sequence: Synthetic oligonucleotide
  Sense strand starting at position 2338 of SEQ ID NO: 1884600
uucugugcaugcgugaaau

SEQ ID NO: 2277723 - RNA, 19 nt, Artificial Sequence
  Description of Artificial Sequence: Synthetic oligonucleotide
  Antisense strand to SEQ ID NO: 2277722
auuucacgcaugcacagaa

SEQ ID NO: 2277724 - RNA, 19 nt, Artificial Sequence
  Description of Artificial Sequence: Synthetic oligonucleotide
  Sense strand starting at position 2344 of SEQ ID NO: 1884600
gcaugcgugaaaucgcuuu

SEQ ID NO: 2277725 - RNA, 19 nt, Artificial Sequence
  Description of Artificial Sequence: Synthetic oligonucleotide
  Antisense strand to SEQ ID NO: 2277724
aaagcgauuucacgcaugc

SEQ ID NO: 2277726 - RNA, 19 nt, Artificial Sequence
  Description of Artificial Sequence: Synthetic oligonucleotide
  Sense strand starting at position 2549 of SEQ ID NO: 1884600
ggaugaggcuccugugagu

SEQ ID NO: 2277727 - RNA, 19 nt, Artificial Sequence
  Description of Artificial Sequence: Synthetic oligonucleotide
  Antisense strand to SEQ ID NO: 2277726
acucacaggagccucaucc

SEQ ID NO: 2277728 - RNA, 19 nt, Artificial Sequence
  Description of Artificial Sequence: Synthetic oligonucleotide
  Sense strand starting at position 3451 of SEQ ID NO: 1884600
gggagaagcuuccuccaag

SEQ ID NO: 2277729 - RNA, 19 nt, Artificial Sequence
  Description of Artificial Sequence: Synthetic oligonucleotide
  Antisense strand to SEQ ID NO: 2277728
cuuggaggaagcuucuccc

SEQ ID NO: 2277730 - RNA, 19 nt, Artificial Sequence
  Description of Artificial Sequence: Synthetic oligonucleotide
  Sense strand starting at position 3832 of SEQ ID NO: 1884600
gguaagugguggugacagu

SEQ ID NO: 2277731 - RNA, 19 nt, Artificial Sequence
  Description of Artificial Sequence: Synthetic oligonucleotide
  Antisense strand to SEQ ID NO: 2277730
acugucaccaccacuuacc

SEQ ID NO: 2277732 - RNA, 19 nt, Artificial Sequence
  Description of Artificial Sequence: Synthetic oligonucleotide
  Sense strand starting at position 3904 of SEQ ID NO: 1884600
gaugccuuagcauguuaca

SEQ ID NO: 2277733 - RNA, 19 nt, Artificial Sequence
  Description of Artificial Sequence: Synthetic oligonucleotide
  Antisense strand to SEQ ID NO: 2277732
uguaacaugcuaaggcauc

SEQ ID NO: 2277734 - RNA, 19 nt, Artificial Sequence
  Description of Artificial Sequence: Synthetic oligonucleotide
  Sense strand starting at position 3907 of SEQ ID NO: 1884600
gccuuagcauguuacaaac

SEQ ID NO: 2277735 - RNA, 19 nt, Artificial Sequence
  Description of Artificial Sequence: Synthetic oligonucleotide
  Antisense strand to SEQ ID NO: 2277734
guuuguaacaugcuaaggc

SEQ ID NO: 2277736 - RNA, 19 nt, Artificial Sequence
  Description of Artificial Sequence: Synthetic oligonucleotide
  Sense strand starting at position 394 of SEQ ID NO: 1884601
cucuguuucucugugucua

SEQ ID NO: 2277737 - RNA, 19 nt, Artificial Sequence
  Description of Artificial Sequence: Synthetic oligonucleotide
  Antisense strand to SEQ ID NO: 2277736
uagacacagagaaacagag

SEQ ID NO: 2277738 - RNA, 19 nt, Artificial Sequence
  Description of Artificial Sequence: Synthetic oligonucleotide
  Sense strand starting at position 395 of SEQ ID NO: 1884601
ucuguuucucugugucuau

SEQ ID NO: 2277739 - RNA, 19 nt, Artificial Sequence
  Description of Artificial Sequence: Synthetic oligonucleotide
  Antisense strand to SEQ ID NO: 2277738
auagacacagagaaacaga

SEQ ID NO: 2277740 - RNA, 19 nt, Artificial Sequence
  Description of Artificial Sequence: Synthetic oligonucleotide
  Sense strand starting at position 406 of SEQ ID NO: 1884601
gugucuaucucugucucua

SEQ ID NO: 2277741 - RNA, 19 nt, Artificial Sequence
  Description of Artificial Sequence: Synthetic oligonucleotide
  Antisense strand to SEQ ID NO: 2277740
uagagacagagauagacac

SEQ ID NO: 2277742 - RNA, 19 nt, Artificial Sequence
  Description of Artificial Sequence: Synthetic oligonucleotide
  Sense strand starting at position 464 of SEQ ID NO: 1884601
cucucaaugucugucuaca

SEQ ID NO: 2277743 - RNA, 19 nt, Artificial Sequence
  Description of Artificial Sequence: Synthetic oligonucleotide
  Antisense strand to SEQ ID NO: 2277742
uguagacagacauugagag

SEQ ID NO: 2277744 - RNA, 19 nt, Artificial Sequence
  Description of Artificial Sequence: Synthetic oligonucleotide
  Sense strand starting at position 564 of SEQ ID NO: 1884601
gagccugguccugaugcau

SEQ ID NO: 2277745 - RNA, 19 nt, Artificial Sequence
  Description of Artificial Sequence: Synthetic oligonucleotide
  Antisense strand to SEQ ID NO: 2277744
augcaucaggaccaggcuc

SEQ ID NO: 2277746 - RNA, 19 nt, Artificial Sequence
  Description of Artificial Sequence: Synthetic oligonucleotide
  Sense strand starting at position 577 of SEQ ID NO: 1884601
augcaucucccaggacuaa

SEQ ID NO: 2277747 - RNA, 19 nt, Artificial Sequence
  Description of Artificial Sequence: Synthetic oligonucleotide
  Antisense strand to SEQ ID NO: 2277746
uuaguccugggagaugcau

SEQ ID NO: 2277748 - RNA, 19 nt, Artificial Sequence
  Description of Artificial Sequence: Synthetic oligonucleotide
  Sense strand starting at position 596 of SEQ ID NO: 1884601
gaacaugacccauguggau

SEQ ID NO: 2277749 - RNA, 19 nt, Artificial Sequence
  Description of Artificial Sequence: Synthetic oligonucleotide
  Antisense strand to SEQ ID NO: 2277748
auccacaugggucauguuc

SEQ ID NO: 2277750 - RNA, 19 nt, Artificial Sequence
  Description of Artificial Sequence: Synthetic oligonucleotide
  Sense strand starting at position 1529 of SEQ ID NO: 1884601
cuguucggccucuggagaa

SEQ ID NO: 2277751 - RNA, 19 nt, Artificial Sequence
  Description of Artificial Sequence: Synthetic oligonucleotide
  Antisense strand to SEQ ID NO: 2277750
uucuccagaggccgaacag

SEQ ID NO: 2277752 - RNA, 19 nt, Artificial Sequence
  Description of Artificial Sequence: Synthetic oligonucleotide
  Sense strand starting at position 1551 of SEQ ID NO: 1884601
ucgacaguguggucuucua

SEQ ID NO: 2277753 - RNA, 19 nt, Artificial Sequence
  Description of Artificial Sequence: Synthetic oligonucleotide
  Antisense strand to SEQ ID NO: 2277752
uagaagaccacacugucga

SEQ ID NO: 2277754 - RNA, 19 nt, Artificial Sequence
  Description of Artificial Sequence: Synthetic oligonucleotide
  Sense strand starting at position 2057 of SEQ ID NO: 1884601
guccucuuugucuggguga

SEQ ID NO: 2277755 - RNA, 19 nt, Artificial Sequence
  Description of Artificial Sequence: Synthetic oligonucleotide
  Antisense strand to SEQ ID NO: 2277754
ucacccagacaaagaggac

SEQ ID NO: 2277756 - RNA, 19 nt, Artificial Sequence
  Description of Artificial Sequence: Synthetic oligonucleotide
  Sense strand starting at position 2371 of SEQ ID NO: 1884601
gcccaugggucuccuauaa

SEQ ID NO: 2277757 - RNA, 19 nt, Artificial Sequence
  Description of Artificial Sequence: Synthetic oligonucleotide
  Antisense strand to SEQ ID NO: 2277756
uuauaggagacccaugggc

SEQ ID NO: 2277758 - RNA, 19 nt, Artificial Sequence
  Description of Artificial Sequence: Synthetic oligonucleotide
  Sense strand starting at position 2633 of SEQ ID NO: 1884601
ggagaagccuccugaauag

SEQ ID NO: 2277759 - RNA, 19 nt, Artificial Sequence
  Description of Artificial Sequence: Synthetic oligonucleotide
  Antisense strand to SEQ ID NO: 2277758
cuauucaggaggcuucucc

SEQ ID NO: 2277760 - RNA, 19 nt, Artificial Sequence
  Description of Artificial Sequence: Synthetic oligonucleotide
  Sense strand starting at position 2871 of SEQ ID NO: 1884601
cagaguugagguggaacua

SEQ ID NO: 2277761 - RNA, 19 nt, Artificial Sequence
  Description of Artificial Sequence: Synthetic oligonucleotide
  Antisense strand to SEQ ID NO: 2277760
uaguuccaccucaacucug

SEQ ID NO: 2277762 - RNA, 19 nt, Artificial Sequence
  Description of Artificial Sequence: Synthetic oligonucleotide
  Sense strand starting at position 2991 of SEQ ID NO: 1884601
gccugaugucaccagcaga

SEQ ID NO: 2277763 - RNA, 19 nt, Artificial Sequence
  Description of Artificial Sequence: Synthetic oligonucleotide
  Antisense strand to SEQ ID NO: 2277762
ucugcuggugacaucaggc

SEQ ID NO: 2277764 - RNA, 19 nt, Artificial Sequence
  Description of Artificial Sequence: Synthetic oligonucleotide
  Sense strand starting at position 3235 of SEQ ID NO: 1884601
aguguuugcuuuggagaga

SEQ ID NO: 2277765 - RNA, 19 nt, Artificial Sequence
  Description of Artificial Sequence: Synthetic oligonucleotide
  Antisense strand to SEQ ID NO: 2277764
ucucuccaaagcaaacacu

SEQ ID NO: 2277766 - RNA, 19 nt, Artificial Sequence
  Description of Artificial Sequence: Synthetic oligonucleotide
  Sense strand starting at position 3236 of SEQ ID NO: 1884601
guguuugcuuuggagagag

SEQ ID NO: 2277767 - RNA, 19 nt, Artificial Sequence
  Description of Artificial Sequence: Synthetic oligonucleotide
  Antisense strand to SEQ ID NO: 2277766
cucucuccaaagcaaacac

SEQ ID NO: 2277768 - RNA, 19 nt, Artificial Sequence
  Description of Artificial Sequence: Synthetic oligonucleotide
  Sense strand starting at position 3551 of SEQ ID NO: 1884601
ggauccaaguuuccaaagu

SEQ ID NO: 2277769 - RNA, 19 nt, Artificial Sequence
  Description of Artificial Sequence: Synthetic oligonucleotide
  Antisense strand to SEQ ID NO: 2277768
acuuuggaaacuuggaucc

SEQ ID NO: 2277770 - RNA, 19 nt, Artificial Sequence
  Description of Artificial Sequence: Synthetic oligonucleotide
  Sense strand starting at position 3711 of SEQ ID NO: 1884601
gcacuccaguuauguauuu

SEQ ID NO: 2277771 - RNA, 19 nt, Artificial Sequence
  Description of Artificial Sequence: Synthetic oligonucleotide
  Antisense strand to SEQ ID NO: 2277770
aaauacauaacuggagugc

SEQ ID NO: 2277772 - RNA, 19 nt, Artificial Sequence
  Description of Artificial Sequence: Synthetic oligonucleotide
  Sense strand starting at position 3814 of SEQ ID NO: 1884601
ugcagcugccuuugcauaa

SEQ ID NO: 2277773 - RNA, 19 nt, Artificial Sequence
  Description of Artificial Sequence: Synthetic oligonucleotide
  Antisense strand to SEQ ID NO: 2277772
uuaugcaaaggcagcugca

SEQ ID NO: 2277774 - RNA, 19 nt, Artificial Sequence
  Description of Artificial Sequence: Synthetic oligonucleotide
  Sense strand starting at position 3818 of SEQ ID NO: 1884601
gcugccuuugcauaaaguu

SEQ ID NO: 2277775 - RNA, 19 nt, Artificial Sequence
  Description of Artificial Sequence: Synthetic oligonucleotide
  Antisense strand to SEQ ID NO: 2277774
aacuuuaugcaaaggcagc

SEQ ID NO: 2277776 - RNA, 19 nt, Artificial Sequence
  Description of Artificial Sequence: Synthetic oligonucleotide
  Sense strand starting at position 3874 of SEQ ID NO: 1884601
uauggaaacuuugaagaag

SEQ ID NO: 2277777 - RNA, 19 nt, Artificial Sequence
  Description of Artificial Sequence: Synthetic oligonucleotide
  Antisense strand to SEQ ID NO: 2277776
cuucuucaaaguuuccaua

SEQ ID NO: 2277778 - RNA, 19 nt, Artificial Sequence
  Description of Artificial Sequence: Synthetic oligonucleotide
  Sense strand starting at position 72 of SEQ ID NO: 1884602
acaggugcccaauaagagu

SEQ ID NO: 2277779 - RNA, 19 nt, Artificial Sequence
  Description of Artificial Sequence: Synthetic oligonucleotide
  Antisense strand to SEQ ID NO: 2277778
acucuuauugggcaccugu

SEQ ID NO: 2277780 - RNA, 19 nt, Artificial Sequence
  Description of Artificial Sequence: Synthetic oligonucleotide
  Sense strand starting at position 78 of SEQ ID NO: 1884602
gcccaauaagaguauucca

SEQ ID NO: 2277781 - RNA, 19 nt, Artificial Sequence
  Description of Artificial Sequence: Synthetic oligonucleotide
  Antisense strand to SEQ ID NO: 2277780
uggaauacucuuauugggc

SEQ ID NO: 2277782 - RNA, 19 nt, Artificial Sequence
  Description of Artificial Sequence: Synthetic oligonucleotide
  Sense strand starting at position 83 of SEQ ID NO: 1884602
auaagaguauuccagauca

SEQ ID NO: 2277783 - RNA, 19 nt, Artificial Sequence
  Description of Artificial Sequence: Synthetic oligonucleotide
  Antisense strand to SEQ ID NO: 2277782
ugaucuggaauacucuuau

SEQ ID NO: 2277784 - RNA, 19 nt, Artificial Sequence
  Description of Artificial Sequence: Synthetic oligonucleotide
  Sense strand starting at position 91 of SEQ ID NO: 1884602
auuccagaucaaugaaugu

SEQ ID NO: 2277785 - RNA, 19 nt, Artificial Sequence
  Description of Artificial Sequence: Synthetic oligonucleotide
  Antisense strand to SEQ ID NO: 2277784
acauucauugaucuggaau

SEQ ID NO: 2277786 - RNA, 19 nt, Artificial Sequence
  Description of Artificial Sequence: Synthetic oligonucleotide
  Sense strand starting at position 235 of SEQ ID NO: 1884602
ugcacaugccaggauacuu

SEQ ID NO: 2277787 - RNA, 19 nt, Artificial Sequence
  Description of Artificial Sequence: Synthetic oligonucleotide
  Antisense strand to SEQ ID NO: 2277786
aaguauccuggcaugugca

SEQ ID NO: 2277788 - RNA, 19 nt, Artificial Sequence
  Description of Artificial Sequence: Synthetic oligonucleotide
  Sense strand starting at position 341 of SEQ ID NO: 1884602
augccucauccugagcuuu

SEQ ID NO: 2277789 - RNA, 19 nt, Artificial Sequence
  Description of Artificial Sequence: Synthetic oligonucleotide
  Antisense strand to SEQ ID NO: 2277788
aaagcucaggaugaggcau

SEQ ID NO: 2277790 - RNA, 19 nt, Artificial Sequence
  Description of Artificial Sequence: Synthetic oligonucleotide
  Sense strand starting at position 343 of SEQ ID NO: 1884602
gccucauccugagcuuuga

SEQ ID NO: 2277791 - RNA, 19 nt, Artificial Sequence
  Description of Artificial Sequence: Synthetic oligonucleotide
  Antisense strand to SEQ ID NO: 2277790
ucaaagcucaggaugaggc

SEQ ID NO: 2277792 - RNA, 19 nt, Artificial Sequence
  Description of Artificial Sequence: Synthetic oligonucleotide
  Sense strand starting at position 352 of SEQ ID NO: 1884602
ugagcuuugaugcgggcaa

SEQ ID NO: 2277793 - RNA, 19 nt, Artificial Sequence
  Description of Artificial Sequence: Synthetic oligonucleotide
  Antisense strand to SEQ ID NO: 2277792
uugcccgcaucaaagcuca

SEQ ID NO: 2277794 - RNA, 19 nt, Artificial Sequence
  Description of Artificial Sequence: Synthetic oligonucleotide
  Sense strand starting at position 406 of SEQ ID NO: 1884602
accucuuucccugggagga

SEQ ID NO: 2277795 - RNA, 19 nt, Artificial Sequence
  Description of Artificial Sequence: Synthetic oligonucleotide
  Antisense strand to SEQ ID NO: 2277794
uccucccagggaaagaggu

SEQ ID NO: 2277796 - RNA, 19 nt, Artificial Sequence
  Description of Artificial Sequence: Synthetic oligonucleotide
  Sense strand starting at position 407 of SEQ ID NO: 1884602
ccucuuucccugggaggaa

SEQ ID NO: 2277797 - RNA, 19 nt, Artificial Sequence
  Description of Artificial Sequence: Synthetic oligonucleotide
  Antisense strand to SEQ ID NO: 2277796
uuccucccagggaaagagg

SEQ ID NO: 2277798 - RNA, 19 nt, Artificial Sequence
  Description of Artificial Sequence: Synthetic oligonucleotide
  Sense strand starting at position 586 of SEQ ID NO: 1884602
uccugucaggcuuaacaga

SEQ ID NO: 2277799 - RNA, 19 nt, Artificial Sequence
  Description of Artificial Sequence: Synthetic oligonucleotide
  Antisense strand to SEQ ID NO: 2277798
ucuguuaagccugacagga

SEQ ID NO: 2277800 - RNA, 19 nt, Artificial Sequence
  Description of Artificial Sequence: Synthetic oligonucleotide
  Sense strand starting at position 1086 of SEQ ID NO: 1884602
cccucauucugcucuggaa

SEQ ID NO: 2277801 - RNA, 19 nt, Artificial Sequence
  Description of Artificial Sequence: Synthetic oligonucleotide
  Antisense strand to SEQ ID NO: 2277800
uuccagagcagaaugaggg

SEQ ID NO: 2277802 - RNA, 19 nt, Artificial Sequence
  Description of Artificial Sequence: Synthetic oligonucleotide
  Sense strand starting at position 1194 of SEQ ID NO: 1884602
gaaaguggagcccaguaau

SEQ ID NO: 2277803 - RNA, 19 nt, Artificial Sequence
  Description of Artificial Sequence: Synthetic oligonucleotide
  Antisense strand to SEQ ID NO: 2277802
auuacugggcuccacuuuc

SEQ ID NO: 2277804 - RNA, 19 nt, Artificial Sequence
  Description of Artificial Sequence: Synthetic oligonucleotide
  Sense strand starting at position 1513 of SEQ ID NO: 1884602
ucccaucuguacccagauu

SEQ ID NO: 2277805 - RNA, 19 nt, Artificial Sequence
  Description of Artificial Sequence: Synthetic oligonucleotide
  Antisense strand to SEQ ID NO: 2277804
aaucuggguacagauggga

SEQ ID NO: 2277806 - RNA, 19 nt, Artificial Sequence
  Description of Artificial Sequence: Synthetic oligonucleotide
  Sense strand starting at position 1552 of SEQ ID NO: 1884602
agaagaucguacgcaucuu

SEQ ID NO: 2277807 - RNA, 19 nt, Artificial Sequence
  Description of Artificial Sequence: Synthetic oligonucleotide
  Antisense strand to SEQ ID NO: 2277806
aagaugcguacgaucuucu

SEQ ID NO: 2277808 - RNA, 19 nt, Artificial Sequence
  Description of Artificial Sequence: Synthetic oligonucleotide
  Sense strand starting at position 1572 of SEQ ID NO: 1884602
ccacguuauccucauuaca

SEQ ID NO: 2277809 - RNA, 19 nt, Artificial Sequence
  Description of Artificial Sequence: Synthetic oligonucleotide
  Antisense strand to SEQ ID NO: 2277808
uguaaugaggauaacgugg

SEQ ID NO: 2277810 - RNA, 19 nt, Artificial Sequence
  Description of Artificial Sequence: Synthetic oligonucleotide
  Sense strand starting at position 1623 of SEQ ID NO: 1884602
ggaagacacuuuguaacca

SEQ ID NO: 2277811 - RNA, 19 nt, Artificial Sequence
  Description of Artificial Sequence: Synthetic oligonucleotide
  Antisense strand to SEQ ID NO: 2277810
ugguuacaaagugucuucc

SEQ ID NO: 2277812 - RNA, 19 nt, Artificial Sequence
  Description of Artificial Sequence: Synthetic oligonucleotide
  Sense strand starting at position 1648 of SEQ ID NO: 1884602
ggacauaaagcgugugaga

SEQ ID NO: 2277813 - RNA, 19 nt, Artificial Sequence
  Description of Artificial Sequence: Synthetic oligonucleotide
  Antisense strand to SEQ ID NO: 2277812
ucucacacgcuuuaugucc

SEQ ID NO: 2277814 - RNA, 19 nt, Artificial Sequence
  Description of Artificial Sequence: Synthetic oligonucleotide
  Sense strand starting at position 1650 of SEQ ID NO: 1884602
acauaaagcgugugagaag

SEQ ID NO: 2277815 - RNA, 19 nt, Artificial Sequence
  Description of Artificial Sequence: Synthetic oligonucleotide
  Antisense strand to SEQ ID NO: 2277814
cuucucacacgcuuuaugu

SEQ ID NO: 2277816 - RNA, 19 nt, Artificial Sequence
  Description of Artificial Sequence: Synthetic oligonucleotide
  Sense strand starting at position 1985 of SEQ ID NO: 1884602
ggucaaggguccucacguu

SEQ ID NO: 2277817 - RNA, 19 nt, Artificial Sequence
  Description of Artificial Sequence: Synthetic oligonucleotide
  Antisense strand to SEQ ID NO: 2277816
aacgugaggacccuugacc

SEQ ID NO: 2277818 - RNA, 19 nt, Artificial Sequence
  Description of Artificial Sequence: Synthetic oligonucleotide
  Sense strand starting at position 2047 of SEQ ID NO: 1884602
cccuauugcucgccaacua

SEQ ID NO: 2277819 - RNA, 19 nt, Artificial Sequence
  Description of Artificial Sequence: Synthetic oligonucleotide
  Antisense strand to SEQ ID NO: 2277818
uaguuggcgagcaauaggg

SEQ ID NO: 2277820 - RNA, 19 nt, Artificial Sequence
  Description of Artificial Sequence: Synthetic oligonucleotide
  Sense strand starting at position 2224 of SEQ ID NO: 1884602
uagcauuguggguauggua

SEQ ID NO: 2277821 - RNA, 19 nt, Artificial Sequence
  Description of Artificial Sequence: Synthetic oligonucleotide
  Antisense strand to SEQ ID NO: 2277820
uaccauacccacaaugcua

SEQ ID NO: 2277822 - RNA, 19 nt, Artificial Sequence
  Description of Artificial Sequence: Synthetic oligonucleotide
  Sense strand starting at position 2295 of SEQ ID NO: 1884602
ugcugcacacggugauaau

SEQ ID NO: 2277823 - RNA, 19 nt, Artificial Sequence
  Description of Artificial Sequence: Synthetic oligonucleotide
  Antisense strand to SEQ ID NO: 2277822
auuaucaccgugugcagca

SEQ ID NO: 2277824 - RNA, 19 nt, Artificial Sequence
  Description of Artificial Sequence: Synthetic oligonucleotide
  Sense strand starting at position 2306 of SEQ ID NO: 1884602
gugauaauccuaggguuug

SEQ ID NO: 2277825 - RNA, 19 nt, Artificial Sequence
  Description of Artificial Sequence: Synthetic oligonucleotide
  Antisense strand to SEQ ID NO: 2277824
caaacccuaggauuaucac

SEQ ID NO: 2277826 - RNA, 19 nt, Artificial Sequence
  Description of Artificial Sequence: Synthetic oligonucleotide
  Sense strand starting at position 2334 of SEQ ID NO: 1884602
uggagcuccugauugguaa

SEQ ID NO: 2277827 - RNA, 19 nt, Artificial Sequence
  Description of Artificial Sequence: Synthetic oligonucleotide
  Antisense strand to SEQ ID NO: 2277826
uuaccaaucaggagcucca

SEQ ID NO: 2277828 - RNA, 19 nt, Artificial Sequence
  Description of Artificial Sequence: Synthetic oligonucleotide
  Sense strand starting at position 2335 of SEQ ID NO: 1884602
ggagcuccugauugguaau

SEQ ID NO: 2277829 - RNA, 19 nt, Artificial Sequence
  Description of Artificial Sequence: Synthetic oligonucleotide
  Antisense strand to SEQ ID NO: 2277828
auuaccaaucaggagcucc

SEQ ID NO: 2277830 - RNA, 19 nt, Artificial Sequence
  Description of Artificial Sequence: Synthetic oligonucleotide
  Sense strand starting at position 2394 of SEQ ID NO: 1884602
ggcaguacgguugagugua

SEQ ID NO: 2277831 - RNA, 19 nt, Artificial Sequence
  Description of Artificial Sequence: Synthetic oligonucleotide
  Antisense strand to SEQ ID NO: 2277830
uacacucaaccguacugcc

SEQ ID NO: 2277832 - RNA, 19 nt, Artificial Sequence
  Description of Artificial Sequence: Synthetic oligonucleotide
  Sense strand starting at position 2603 of SEQ ID NO: 1884602
augugaacuuaaucaaguu

SEQ ID NO: 2277833 - RNA, 19 nt, Artificial Sequence
  Description of Artificial Sequence: Synthetic oligonucleotide
  Antisense strand to SEQ ID NO: 2277832
aacuugauuaaguucacau

SEQ ID NO: 2277834 - RNA, 19 nt, Artificial Sequence
  Description of Artificial Sequence: Synthetic oligonucleotide
  Sense strand starting at position 2653 of SEQ ID NO: 1884602
gguauuguaauauguagca

SEQ ID NO: 2277835 - RNA, 19 nt, Artificial Sequence
  Description of Artificial Sequence: Synthetic oligonucleotide
  Antisense strand to SEQ ID NO: 2277834
ugcuacauauuacaauacc

SEQ ID NO: 2277836 - RNA, 19 nt, Artificial Sequence
  Description of Artificial Sequence: Synthetic oligonucleotide
  Sense strand starting at position 2680 of SEQ ID NO: 1884602
uuaggauugcugugaggac

SEQ ID NO: 2277837 - RNA, 19 nt, Artificial Sequence
  Description of Artificial Sequence: Synthetic oligonucleotide
  Antisense strand to SEQ ID NO: 2277836
guccucacagcaauccuaa

SEQ ID NO: 2277838 - RNA, 19 nt, Artificial Sequence
  Description of Artificial Sequence: Synthetic oligonucleotide
  Sense strand starting at position 2694 of SEQ ID NO: 1884602
aggacuaaguuagcaaagu

SEQ ID NO: 2277839 - RNA, 19 nt, Artificial Sequence
  Description of Artificial Sequence: Synthetic oligonucleotide
  Antisense strand to SEQ ID NO: 2277838
acuuugcuaacuuaguccu

SEQ ID NO: 2277840 - RNA, 19 nt, Artificial Sequence
  Description of Artificial Sequence: Synthetic oligonucleotide
  Sense strand starting at position 2735 of SEQ ID NO: 1884602
uagucagcaugugcuauua

SEQ ID NO: 2277841 - RNA, 19 nt, Artificial Sequence
  Description of Artificial Sequence: Synthetic oligonucleotide
  Antisense strand to SEQ ID NO: 2277840
uaauagcacaugcugacua

SEQ ID NO: 2277842 - RNA, 19 nt, Artificial Sequence
  Description of Artificial Sequence: Synthetic oligonucleotide
  Sense strand starting at position 2747 of SEQ ID NO: 1884602
gcuauuauuaaccguacga

SEQ ID NO: 2277843 - RNA, 19 nt, Artificial Sequence
  Description of Artificial Sequence: Synthetic oligonucleotide
  Antisense strand to SEQ ID NO: 2277842
ucguacgguuaauaauagc

SEQ ID NO: 2277844 - RNA, 19 nt, Artificial Sequence
  Description of Artificial Sequence: Synthetic oligonucleotide
  Sense strand starting at position 2749 of SEQ ID NO: 1884602
uauuauuaaccguacgauu

SEQ ID NO: 2277845 - RNA, 19 nt, Artificial Sequence
  Description of Artificial Sequence: Synthetic oligonucleotide
  Antisense strand to SEQ ID NO: 2277844
aaucguacgguuaauaaua

SEQ ID NO: 2277846 - RNA, 19 nt, Artificial Sequence
  Description of Artificial Sequence: Synthetic oligonucleotide
  Sense strand starting at position 2751 of SEQ ID NO: 1884602
uuauuaaccguacgauuaa

SEQ ID NO: 2277847 - RNA, 19 nt, Artificial Sequence
  Description of Artificial Sequence: Synthetic oligonucleotide
  Antisense strand to SEQ ID NO: 2277846
uuaaucguacgguuaauaa

SEQ ID NO: 2277848 - RNA, 19 nt, Artificial Sequence
  Description of Artificial Sequence: Synthetic oligonucleotide
  Sense strand starting at position 2784 of SEQ ID NO: 1884602
uguugugaggcuuaacaga

SEQ ID NO: 2277849 - RNA, 19 nt, Artificial Sequence
  Description of Artificial Sequence: Synthetic oligonucleotide
  Antisense strand to SEQ ID NO: 2277848
ucuguuaagccucacaaca

SEQ ID NO: 2277850 - RNA, 19 nt, Artificial Sequence
  Description of Artificial Sequence: Synthetic oligonucleotide
  Sense strand starting at position 2812 of SEQ ID NO: 1884602
uucgauauaucaucuguga

SEQ ID NO: 2277851 - RNA, 19 nt, Artificial Sequence
  Description of Artificial Sequence: Synthetic oligonucleotide
  Antisense strand to SEQ ID NO: 2277850
ucacagaugauauaucgaa

SEQ ID NO: 2277852 - RNA, 19 nt, Artificial Sequence
  Description of Artificial Sequence: Synthetic oligonucleotide
  Sense strand starting at position 2877 of SEQ ID NO: 1884602
ccuggugaccuuugaauca

SEQ ID NO: 2277853 - RNA, 19 nt, Artificial Sequence
  Description of Artificial Sequence: Synthetic oligonucleotide
  Antisense strand to SEQ ID NO: 2277852
ugauucaaaggucaccagg

SEQ ID NO: 2277854 - RNA, 19 nt, Artificial Sequence
  Description of Artificial Sequence: Synthetic oligonucleotide
  Sense strand starting at position 2969 of SEQ ID NO: 1884602
ucccuaguguguccggaau

SEQ ID NO: 2277855 - RNA, 19 nt, Artificial Sequence
  Description of Artificial Sequence: Synthetic oligonucleotide
  Antisense strand to SEQ ID NO: 2277854
auuccggacacacuaggga

SEQ ID NO: 2277856 - RNA, 19 nt, Artificial Sequence
  Description of Artificial Sequence: Synthetic oligonucleotide
  Sense strand starting at position 3538 of SEQ ID NO: 1884602
ucuccaugucccuacuaga

SEQ ID NO: 2277857 - RNA, 19 nt, Artificial Sequence
  Description of Artificial Sequence: Synthetic oligonucleotide
  Antisense strand to SEQ ID NO: 2277856
ucuaguagggacauggaga

SEQ ID NO: 2277858 - RNA, 19 nt, Artificial Sequence
  Description of Artificial Sequence: Synthetic oligonucleotide
  Sense strand starting at position 129 of SEQ ID NO: 1884603
uaauuaaguuguuggguga

SEQ ID NO: 2277859 - RNA, 19 nt, Artificial Sequence
  Description of Artificial Sequence: Synthetic oligonucleotide
  Antisense strand to SEQ ID NO: 2277858
ucacccaacaacuuaauua

SEQ ID NO: 2277860 - RNA, 19 nt, Artificial Sequence
  Description of Artificial Sequence: Synthetic oligonucleotide
  Sense strand starting at position 130 of SEQ ID NO: 1884603
aauuaaguuguugggugau

SEQ ID NO: 2277861 - RNA, 19 nt, Artificial Sequence
  Description of Artificial Sequence: Synthetic oligonucleotide
  Antisense strand to SEQ ID NO: 2277860
aucacccaacaacuuaauu

SEQ ID NO: 2277862 - RNA, 19 nt, Artificial Sequence
  Description of Artificial Sequence: Synthetic oligonucleotide
  Sense strand starting at position 133 of SEQ ID NO: 1884603
uaaguuguugggugaugga

SEQ ID NO: 2277863 - RNA, 19 nt, Artificial Sequence
  Description of Artificial Sequence: Synthetic oligonucleotide
  Antisense strand to SEQ ID NO: 2277862
uccaucacccaacaacuua

SEQ ID NO: 2277864 - RNA, 19 nt, Artificial Sequence
  Description of Artificial Sequence: Synthetic oligonucleotide
  Sense strand starting at position 378 of SEQ ID NO: 1884603
gcuccuuaucucgaaugcu

SEQ ID NO: 2277865 - RNA, 19 nt, Artificial Sequence
  Description of Artificial Sequence: Synthetic oligonucleotide
  Antisense strand to SEQ ID NO: 2277864
agcauucgagauaaggagc

SEQ ID NO: 2277866 - RNA, 19 nt, Artificial Sequence
  Description of Artificial Sequence: Synthetic oligonucleotide
  Sense strand starting at position 387 of SEQ ID NO: 1884603
cucgaaugcuuccugugaa

SEQ ID NO: 2277867 - RNA, 19 nt, Artificial Sequence
  Description of Artificial Sequence: Synthetic oligonucleotide
  Antisense strand to SEQ ID NO: 2277866
uucacaggaagcauucgag

SEQ ID NO: 2277868 - RNA, 19 nt, Artificial Sequence
  Description of Artificial Sequence: Synthetic oligonucleotide
  Sense strand starting at position 388 of SEQ ID NO: 1884603
ucgaaugcuuccugugaac

SEQ ID NO: 2277869 - RNA, 19 nt, Artificial Sequence
  Description of Artificial Sequence: Synthetic oligonucleotide
  Antisense strand to SEQ ID NO: 2277868
guucacaggaagcauucga

SEQ ID NO: 2277870 - RNA, 19 nt, Artificial Sequence
  Description of Artificial Sequence: Synthetic oligonucleotide
  Sense strand starting at position 390 of SEQ ID NO: 1884603
gaaugcuuccugugaacug

SEQ ID NO: 2277871 - RNA, 19 nt, Artificial Sequence
  Description of Artificial Sequence: Synthetic oligonucleotide
  Antisense strand to SEQ ID NO: 2277870
caguucacaggaagcauuc

SEQ ID NO: 2277872 - RNA, 19 nt, Artificial Sequence
  Description of Artificial Sequence: Synthetic oligonucleotide
  Sense strand starting at position 429 of SEQ ID NO: 1884603
gggagccacucuugaugaa

SEQ ID NO: 2277873 - RNA, 19 nt, Artificial Sequence
  Description of Artificial Sequence: Synthetic oligonucleotide
  Antisense strand to SEQ ID NO: 2277872
uucaucaagaguggcuccc

SEQ ID NO: 2277874 - RNA, 19 nt, Artificial Sequence
  Description of Artificial Sequence: Synthetic oligonucleotide
  Sense strand starting at position 515 of SEQ ID NO: 1884603
ggcucuaggccuggaauga

SEQ ID NO: 2277875 - RNA, 19 nt, Artificial Sequence
  Description of Artificial Sequence: Synthetic oligonucleotide
  Antisense strand to SEQ ID NO: 2277874
ucauuccaggccuagagcc

SEQ ID NO: 2277876 - RNA, 19 nt, Artificial Sequence
  Description of Artificial Sequence: Synthetic oligonucleotide
  Sense strand starting at position 804 of SEQ ID NO: 1884603
gagcuuccuccacguacuu

SEQ ID NO: 2277877 - RNA, 19 nt, Artificial Sequence
  Description of Artificial Sequence: Synthetic oligonucleotide
  Antisense strand to SEQ ID NO: 2277876
aaguacguggaggaagcuc

SEQ ID NO: 2277878 - RNA, 19 nt, Artificial Sequence
  Description of Artificial Sequence: Synthetic oligonucleotide
  Sense strand starting at position 1215 of SEQ ID NO: 1884603
cagggugugucuggagaga

SEQ ID NO: 2277879 - RNA, 19 nt, Artificial Sequence
  Description of Artificial Sequence: Synthetic oligonucleotide
  Antisense strand to SEQ ID NO: 2277878
ucucuccagacacacccug

SEQ ID NO: 2277880 - RNA, 19 nt, Artificial Sequence
  Description of Artificial Sequence: Synthetic oligonucleotide
  Sense strand starting at position 1216 of SEQ ID NO: 1884603
agggugugucuggagagaa

SEQ ID NO: 2277881 - RNA, 19 nt, Artificial Sequence
  Description of Artificial Sequence: Synthetic oligonucleotide
  Antisense strand to SEQ ID NO: 2277880
uucucuccagacacacccu

SEQ ID NO: 2277882 - RNA, 19 nt, Artificial Sequence
  Description of Artificial Sequence: Synthetic oligonucleotide
  Sense strand starting at position 1217 of SEQ ID NO: 1884603
gggugugucuggagagaag

SEQ ID NO: 2277883 - RNA, 19 nt, Artificial Sequence
  Description of Artificial Sequence: Synthetic oligonucleotide
  Antisense strand to SEQ ID NO: 2277882
cuucucuccagacacaccc

SEQ ID NO: 2277884 - RNA, 19 nt, Artificial Sequence
  Description of Artificial Sequence: Synthetic oligonucleotide
  Sense strand starting at position 1849 of SEQ ID NO: 1884603
cguuucucucuagagggaa

SEQ ID NO: 2277885 - RNA, 19 nt, Artificial Sequence
  Description of Artificial Sequence: Synthetic oligonucleotide
  Antisense strand to SEQ ID NO: 2277884
uucccucuagagagaaacg

SEQ ID NO: 2277886 - RNA, 19 nt, Artificial Sequence
  Description of Artificial Sequence: Synthetic oligonucleotide
  Sense strand starting at position 1932 of SEQ ID NO: 1884603
ccgccaugccgggaaguua

SEQ ID NO: 2277887 - RNA, 19 nt, Artificial Sequence
  Description of Artificial Sequence: Synthetic oligonucleotide
  Antisense strand to SEQ ID NO: 2277886
uaacuucccggcauggcgg

SEQ ID NO: 2277888 - RNA, 19 nt, Artificial Sequence
  Description of Artificial Sequence: Synthetic oligonucleotide
  Sense strand starting at position 2097 of SEQ ID NO: 1884603
agacaucacuguugacaca

SEQ ID NO: 2277889 - RNA, 19 nt, Artificial Sequence
  Description of Artificial Sequence: Synthetic oligonucleotide
  Antisense strand to SEQ ID NO: 2277888
ugugucaacagugaugucu

SEQ ID NO: 2277890 - RNA, 19 nt, Artificial Sequence
  Description of Artificial Sequence: Synthetic oligonucleotide
  Sense strand starting at position 2210 of SEQ ID NO: 1884603
ucugaaugcugccugcaua

SEQ ID NO: 2277891 - RNA, 19 nt, Artificial Sequence
  Description of Artificial Sequence: Synthetic oligonucleotide
  Antisense strand to SEQ ID NO: 2277890
uaugcaggcagcauucaga

SEQ ID NO: 2277892 - RNA, 19 nt, Artificial Sequence
  Description of Artificial Sequence: Synthetic oligonucleotide
  Sense strand starting at position 2211 of SEQ ID NO: 1884603
cugaaugcugccugcauaa

SEQ ID NO: 2277893 - RNA, 19 nt, Artificial Sequence
  Description of Artificial Sequence: Synthetic oligonucleotide
  Antisense strand to SEQ ID NO: 2277892
uuaugcaggcagcauucag

SEQ ID NO: 2277894 - RNA, 19 nt, Artificial Sequence
  Description of Artificial Sequence: Synthetic oligonucleotide
  Sense strand starting at position 2486 of SEQ ID NO: 1884603
uuccuccugucgggagaau

SEQ ID NO: 2277895 - RNA, 19 nt, Artificial Sequence
  Description of Artificial Sequence: Synthetic oligonucleotide
  Antisense strand to SEQ ID NO: 2277894
auucucccgacaggaggaa

SEQ ID NO: 2277896 - RNA, 19 nt, Artificial Sequence
  Description of Artificial Sequence: Synthetic oligonucleotide
  Sense strand starting at position 2501 of SEQ ID NO: 1884603
gaauguuccuccugggaga

SEQ ID NO: 2277897 - RNA, 19 nt, Artificial Sequence
  Description of Artificial Sequence: Synthetic oligonucleotide
  Antisense strand to SEQ ID NO: 2277896
ucucccaggaggaacauuc

SEQ ID NO: 2277898 - RNA, 19 nt, Artificial Sequence
  Description of Artificial Sequence: Synthetic oligonucleotide
  Sense strand starting at position 2590 of SEQ ID NO: 1884603
gguccauaugcucagagcu

SEQ ID NO: 2277899 - RNA, 19 nt, Artificial Sequence
  Description of Artificial Sequence: Synthetic oligonucleotide
  Antisense strand to SEQ ID NO: 2277898
agcucugagcauauggacc

SEQ ID NO: 2277900 - RNA, 19 nt, Artificial Sequence
  Description of Artificial Sequence: Synthetic oligonucleotide
  Sense strand starting at position 2600 of SEQ ID NO: 1884603
cucagagcuggcuacauau

SEQ ID NO: 2277901 - RNA, 19 nt, Artificial Sequence
  Description of Artificial Sequence: Synthetic oligonucleotide
  Antisense strand to SEQ ID NO: 2277900
auauguagccagcucugag

SEQ ID NO: 2277902 - RNA, 19 nt, Artificial Sequence
  Description of Artificial Sequence: Synthetic oligonucleotide
  Sense strand starting at position 3162 of SEQ ID NO: 1884603
ccagguguugggugaugga

SEQ ID NO: 2277903 - RNA, 19 nt, Artificial Sequence
  Description of Artificial Sequence: Synthetic oligonucleotide
  Antisense strand to SEQ ID NO: 2277902
uccaucacccaacaccugg

SEQ ID NO: 2277904 - RNA, 19 nt, Artificial Sequence
  Description of Artificial Sequence: Synthetic oligonucleotide
  Sense strand starting at position 3616 of SEQ ID NO: 1884603
gggcuugucaggcaucaca

SEQ ID NO: 2277905 - RNA, 19 nt, Artificial Sequence
  Description of Artificial Sequence: Synthetic oligonucleotide
  Antisense strand to SEQ ID NO: 2277904
ugugaugccugacaagccc

SEQ ID NO: 2277906 - RNA, 19 nt, Artificial Sequence
  Description of Artificial Sequence: Synthetic oligonucleotide
  Sense strand starting at position 3822 of SEQ ID NO: 1884603
ggcucugagugcucagauc

SEQ ID NO: 2277907 - RNA, 19 nt, Artificial Sequence
  Description of Artificial Sequence: Synthetic oligonucleotide
  Antisense strand to SEQ ID NO: 2277906
gaucugagcacucagagcc

SEQ ID NO: 2277908 - RNA, 19 nt, Artificial Sequence
  Description of Artificial Sequence: Synthetic oligonucleotide
  Sense strand starting at position 3940 of SEQ ID NO: 1884603
gagacuucccagggugcau

SEQ ID NO: 2277909 - RNA, 19 nt, Artificial Sequence
  Description of Artificial Sequence: Synthetic oligonucleotide
  Antisense strand to SEQ ID NO: 2277908
augcacccugggaagucuc

SEQ ID NO: 2277910 - RNA, 19 nt, Artificial Sequence
  Description of Artificial Sequence: Synthetic oligonucleotide
  Sense strand starting at position 3978 of SEQ ID NO: 1884603
ucgcuuugucccuguugaa

SEQ ID NO: 2277911 - RNA, 19 nt, Artificial Sequence
  Description of Artificial Sequence: Synthetic oligonucleotide
  Antisense strand to SEQ ID NO: 2277910
uucaacagggacaaagcga

SEQ ID NO: 2277912 - RNA, 19 nt, Artificial Sequence
  Description of Artificial Sequence: Synthetic oligonucleotide
  Sense strand starting at position 265 of SEQ ID NO: 1884604
cgacgagacucucucaaac

SEQ ID NO: 2277913 - RNA, 19 nt, Artificial Sequence
  Description of Artificial Sequence: Synthetic oligonucleotide
  Antisense strand to SEQ ID NO: 2277912
guuugagagagucucgucg

SEQ ID NO: 2277914 - RNA, 19 nt, Artificial Sequence
  Description of Artificial Sequence: Synthetic oligonucleotide
  Sense strand starting at position 777 of SEQ ID NO: 1884604
gcacauagucuauacccau

SEQ ID NO: 2277915 - RNA, 19 nt, Artificial Sequence
  Description of Artificial Sequence: Synthetic oligonucleotide
  Antisense strand to SEQ ID NO: 2277914
auggguauagacuaugugc

SEQ ID NO: 2277916 - RNA, 19 nt, Artificial Sequence
  Description of Artificial Sequence: Synthetic oligonucleotide
  Sense strand starting at position 830 of SEQ ID NO: 1884604
uauuuagguugacauaaga

SEQ ID NO: 2277917 - RNA, 19 nt, Artificial Sequence
  Description of Artificial Sequence: Synthetic oligonucleotide
  Antisense strand to SEQ ID NO: 2277916
ucuuaugucaaccuaaaua

SEQ ID NO: 2277918 - RNA, 19 nt, Artificial Sequence
  Description of Artificial Sequence: Synthetic oligonucleotide
  Sense strand starting at position 843 of SEQ ID NO: 1884604
auaagauagcaccagucuu

SEQ ID NO: 2277919 - RNA, 19 nt, Artificial Sequence
  Description of Artificial Sequence: Synthetic oligonucleotide
  Antisense strand to SEQ ID NO: 2277918
aagacuggugcuaucuuau

SEQ ID NO: 2277920 - RNA, 19 nt, Artificial Sequence
  Description of Artificial Sequence: Synthetic oligonucleotide
  Sense strand starting at position 1049 of SEQ ID NO: 1884604
cagcguggccuuguuugua

SEQ ID NO: 2277921 - RNA, 19 nt, Artificial Sequence
  Description of Artificial Sequence: Synthetic oligonucleotide
  Antisense strand to SEQ ID NO: 2277920
uacaaacaaggccacgcug

SEQ ID NO: 2277922 - RNA, 19 nt, Artificial Sequence
  Description of Artificial Sequence: Synthetic oligonucleotide
  Sense strand starting at position 1104 of SEQ ID NO: 1884604
cacaucugugacgggauau

SEQ ID NO: 2277923 - RNA, 19 nt, Artificial Sequence
  Description of Artificial Sequence: Synthetic oligonucleotide
  Antisense strand to SEQ ID NO: 2277922
auaucccgucacagaugug

SEQ ID NO: 2277924 - RNA, 19 nt, Artificial Sequence
  Description of Artificial Sequence: Synthetic oligonucleotide
  Sense strand starting at position 1105 of SEQ ID NO: 1884604
acaucugugacgggauaua

SEQ ID NO: 2277925 - RNA, 19 nt, Artificial Sequence
  Description of Artificial Sequence: Synthetic oligonucleotide
  Antisense strand to SEQ ID NO: 2277924
uauaucccgucacagaugu

SEQ ID NO: 2277926 - RNA, 19 nt, Artificial Sequence
  Description of Artificial Sequence: Synthetic oligonucleotide
  Sense strand starting at position 1114 of SEQ ID NO: 1884604
acgggauauagugauguuu

SEQ ID NO: 2277927 - RNA, 19 nt, Artificial Sequence
  Description of Artificial Sequence: Synthetic oligonucleotide
  Antisense strand to SEQ ID NO: 2277926
aaacaucacuauaucccgu

SEQ ID NO: 2277928 - RNA, 19 nt, Artificial Sequence
  Description of Artificial Sequence: Synthetic oligonucleotide
  Sense strand starting at position 1123 of SEQ ID NO: 1884604
agugauguuuaaucuuaug

SEQ ID NO: 2277929 - RNA, 19 nt, Artificial Sequence
  Description of Artificial Sequence: Synthetic oligonucleotide
  Antisense strand to SEQ ID NO: 2277928
cauaagauuaaacaucacu

SEQ ID NO: 2277930 - RNA, 19 nt, Artificial Sequence
  Description of Artificial Sequence: Synthetic oligonucleotide
  Sense strand starting at position 1134 of SEQ ID NO: 1884604
aucuuaugauugccuuaag

SEQ ID NO: 2277931 - RNA, 19 nt, Artificial Sequence
  Description of Artificial Sequence: Synthetic oligonucleotide
  Antisense strand to SEQ ID NO: 2277930
cuuaaggcaaucauaagau

SEQ ID NO: 2277932 - RNA, 19 nt, Artificial Sequence
  Description of Artificial Sequence: Synthetic oligonucleotide
  Sense strand starting at position 1135 of SEQ ID NO: 1884604
ucuuaugauugccuuaaga

SEQ ID NO: 2277933 - RNA, 19 nt, Artificial Sequence
  Description of Artificial Sequence: Synthetic oligonucleotide
  Antisense strand to SEQ ID NO: 2277932
ucuuaaggcaaucauaaga

SEQ ID NO: 2277934 - RNA, 19 nt, Artificial Sequence
  Description of Artificial Sequence: Synthetic oligonucleotide
  Sense strand starting at position 1137 of SEQ ID NO: 1884604
uuaugauugccuuaagaau

SEQ ID NO: 2277935 - RNA, 19 nt, Artificial Sequence
  Description of Artificial Sequence: Synthetic oligonucleotide
  Antisense strand to SEQ ID NO: 2277934
auucuuaaggcaaucauaa

SEQ ID NO: 2277936 - RNA, 19 nt, Artificial Sequence
  Description of Artificial Sequence: Synthetic oligonucleotide
  Sense strand starting at position 1613 of SEQ ID NO: 1884604
auauguacacucgggacaa

SEQ ID NO: 2277937 - RNA, 19 nt, Artificial Sequence
  Description of Artificial Sequence: Synthetic oligonucleotide
  Antisense strand to SEQ ID NO: 2277936
uugucccgaguguacauau

SEQ ID NO: 2277938 - RNA, 19 nt, Artificial Sequence
  Description of Artificial Sequence: Synthetic oligonucleotide
  Sense strand starting at position 1624 of SEQ ID NO: 1884604
cgggacaaguucuccugau

SEQ ID NO: 2277939 - RNA, 19 nt, Artificial Sequence
  Description of Artificial Sequence: Synthetic oligonucleotide
  Antisense strand to SEQ ID NO: 2277938
aucaggagaacuugucccg

SEQ ID NO: 2277940 - RNA, 19 nt, Artificial Sequence
  Description of Artificial Sequence: Synthetic oligonucleotide
  Sense strand starting at position 1625 of SEQ ID NO: 1884604
gggacaaguucuccugauc

SEQ ID NO: 2277941 - RNA, 19 nt, Artificial Sequence
  Description of Artificial Sequence: Synthetic oligonucleotide
  Antisense strand to SEQ ID NO: 2277940
gaucaggagaacuuguccc

SEQ ID NO: 2277942 - RNA, 19 nt, Artificial Sequence
  Description of Artificial Sequence: Synthetic oligonucleotide
  Sense strand starting at position 1628 of SEQ ID NO: 1884604
acaaguucuccugaucgaa

SEQ ID NO: 2277943 - RNA, 19 nt, Artificial Sequence
  Description of Artificial Sequence: Synthetic oligonucleotide
  Antisense strand to SEQ ID NO: 2277942
uucgaucaggagaacuugu

SEQ ID NO: 2277944 - RNA, 19 nt, Artificial Sequence
  Description of Artificial Sequence: Synthetic oligonucleotide
  Sense strand starting at position 2512 of SEQ ID NO: 1884604
cgcuuacgagccuuaucuu

SEQ ID NO: 2277945 - RNA, 19 nt, Artificial Sequence
  Description of Artificial Sequence: Synthetic oligonucleotide
  Antisense strand to SEQ ID NO: 2277944
aagauaaggcucguaagcg

SEQ ID NO: 2277946 - RNA, 19 nt, Artificial Sequence
  Description of Artificial Sequence: Synthetic oligonucleotide
  Sense strand starting at position 2647 of SEQ ID NO: 1884604
ccugacuacccuggaagua

SEQ ID NO: 2277947 - RNA, 19 nt, Artificial Sequence
  Description of Artificial Sequence: Synthetic oligonucleotide
  Antisense strand to SEQ ID NO: 2277946
uacuuccaggguagucagg

SEQ ID NO: 2277948 - RNA, 19 nt, Artificial Sequence
  Description of Artificial Sequence: Synthetic oligonucleotide
  Sense strand starting at position 2689 of SEQ ID NO: 1884604
gugagagaggaauguucuu

SEQ ID NO: 2277949 - RNA, 19 nt, Artificial Sequence
  Description of Artificial Sequence: Synthetic oligonucleotide
  Antisense strand to SEQ ID NO: 2277948
aagaacauuccucucucac

SEQ ID NO: 2277950 - RNA, 19 nt, Artificial Sequence
  Description of Artificial Sequence: Synthetic oligonucleotide
  Sense strand starting at position 2695 of SEQ ID NO: 1884604
gaggaauguucuuugaagu

SEQ ID NO: 2277951 - RNA, 19 nt, Artificial Sequence
  Description of Artificial Sequence: Synthetic oligonucleotide
  Antisense strand to SEQ ID NO: 2277950
acuucaaagaacauuccuc

SEQ ID NO: 2277952 - RNA, 19 nt, Artificial Sequence
  Description of Artificial Sequence: Synthetic oligonucleotide
  Sense strand starting at position 2696 of SEQ ID NO: 1884604
aggaauguucuuugaagua

SEQ ID NO: 2277953 - RNA, 19 nt, Artificial Sequence
  Description of Artificial Sequence: Synthetic oligonucleotide
  Antisense strand to SEQ ID NO: 2277952
uacuucaaagaacauuccu

SEQ ID NO: 2277954 - RNA, 19 nt, Artificial Sequence
  Description of Artificial Sequence: Synthetic oligonucleotide
  Sense strand starting at position 2775 of SEQ ID NO: 1884604
guaauagaguacuucucac

SEQ ID NO: 2277955 - RNA, 19 nt, Artificial Sequence
  Description of Artificial Sequence: Synthetic oligonucleotide
  Antisense strand to SEQ ID NO: 2277954
gugagaaguacucuauuac

SEQ ID NO: 2277956 - RNA, 19 nt, Artificial Sequence
  Description of Artificial Sequence: Synthetic oligonucleotide
  Sense strand starting at position 2805 of SEQ ID NO: 1884604
cagagugauucuuccuguu

SEQ ID NO: 2277957 - RNA, 19 nt, Artificial Sequence
  Description of Artificial Sequence: Synthetic oligonucleotide
  Antisense strand to SEQ ID NO: 2277956
aacaggaagaaucacucug

SEQ ID NO: 2277958 - RNA, 19 nt, Artificial Sequence
  Description of Artificial Sequence: Synthetic oligonucleotide
  Sense strand starting at position 2807 of SEQ ID NO: 1884604
gagugauucuuccuguuua

SEQ ID NO: 2277959 - RNA, 19 nt, Artificial Sequence
  Description of Artificial Sequence: Synthetic oligonucleotide
  Antisense strand to SEQ ID NO: 2277958
uaaacaggaagaaucacuc

SEQ ID NO: 2277960 - RNA, 19 nt, Artificial Sequence
  Description of Artificial Sequence: Synthetic oligonucleotide
  Sense strand starting at position 2842 of SEQ ID NO: 1884604
cacagacguccaugggaga

SEQ ID NO: 2277961 - RNA, 19 nt, Artificial Sequence
  Description of Artificial Sequence: Synthetic oligonucleotide
  Antisense strand to SEQ ID NO: 2277960
ucucccauggacgucugug

SEQ ID NO: 2277962 - RNA, 19 nt, Artificial Sequence
  Description of Artificial Sequence: Synthetic oligonucleotide
  Sense strand starting at position 2857 of SEQ ID NO: 1884604
gagacugagccagagugua

SEQ ID NO: 2277963 - RNA, 19 nt, Artificial Sequence
  Description of Artificial Sequence: Synthetic oligonucleotide
  Antisense strand to SEQ ID NO: 2277962
uacacucuggcucagucuc

SEQ ID NO: 2277964 - RNA, 19 nt, Artificial Sequence
  Description of Artificial Sequence: Synthetic oligonucleotide
  Sense strand starting at position 2887 of SEQ ID NO: 1884604
gucacaucacgagauccua

SEQ ID NO: 2277965 - RNA, 19 nt, Artificial Sequence
  Description of Artificial Sequence: Synthetic oligonucleotide
  Antisense strand to SEQ ID NO: 2277964
uaggaucucgugaugugac

SEQ ID NO: 2277966 - RNA, 19 nt, Artificial Sequence
  Description of Artificial Sequence: Synthetic oligonucleotide
  Sense strand starting at position 2897 of SEQ ID NO: 1884604
gagauccuagucugguuau

SEQ ID NO: 2277967 - RNA, 19 nt, Artificial Sequence
  Description of Artificial Sequence: Synthetic oligonucleotide
  Antisense strand to SEQ ID NO: 2277966
auaaccagacuaggaucuc

SEQ ID NO: 2277968 - RNA, 19 nt, Artificial Sequence
  Description of Artificial Sequence: Synthetic oligonucleotide
  Sense strand starting at position 2900 of SEQ ID NO: 1884604
auccuagucugguuaucag

SEQ ID NO: 2277969 - RNA, 19 nt, Artificial Sequence
  Description of Artificial Sequence: Synthetic oligonucleotide
  Antisense strand to SEQ ID NO: 2277968
cugauaaccagacuaggau

SEQ ID NO: 2277970 - RNA, 19 nt, Artificial Sequence
  Description of Artificial Sequence: Synthetic oligonucleotide
  Sense strand starting at position 3011 of SEQ ID NO: 1884604
ggucaaauaucugcaacuu

SEQ ID NO: 2277971 - RNA, 19 nt, Artificial Sequence
  Description of Artificial Sequence: Synthetic oligonucleotide
  Antisense strand to SEQ ID NO: 2277970
aaguugcagauauuugacc

SEQ ID NO: 2277972 - RNA, 19 nt, Artificial Sequence
  Description of Artificial Sequence: Synthetic oligonucleotide
  Sense strand starting at position 3059 of SEQ ID NO: 1884604
ucuuuaaaggcuugaauug

SEQ ID NO: 2277973 - RNA, 19 nt, Artificial Sequence
  Description of Artificial Sequence: Synthetic oligonucleotide
  Antisense strand to SEQ ID NO: 2277972
caauucaagccuuuaaaga

SEQ ID NO: 2277974 - RNA, 19 nt, Artificial Sequence
  Description of Artificial Sequence: Synthetic oligonucleotide
  Sense strand starting at position 3208 of SEQ ID NO: 1884604
gugagaguauuagugguca

SEQ ID NO: 2277975 - RNA, 19 nt, Artificial Sequence
  Description of Artificial Sequence: Synthetic oligonucleotide
  Antisense strand to SEQ ID NO: 2277974
ugaccacuaauacucucac

SEQ ID NO: 2277976 - RNA, 19 nt, Artificial Sequence
  Description of Artificial Sequence: Synthetic oligonucleotide
  Sense strand starting at position 3210 of SEQ ID NO: 1884604
gagaguauuaguggucaug

SEQ ID NO: 2277977 - RNA, 19 nt, Artificial Sequence
  Description of Artificial Sequence: Synthetic oligonucleotide
  Antisense strand to SEQ ID NO: 2277976
caugaccacuaauacucuc

SEQ ID NO: 2277978 - RNA, 19 nt, Artificial Sequence
  Description of Artificial Sequence: Synthetic oligonucleotide
  Sense strand starting at position 3321 of SEQ ID NO: 1884604
agggaugcuagguguggaa

SEQ ID NO: 2277979 - RNA, 19 nt, Artificial Sequence
  Description of Artificial Sequence: Synthetic oligonucleotide
  Antisense strand to SEQ ID NO: 2277978
uuccacaccuagcaucccu

SEQ ID NO: 2277980 - RNA, 19 nt, Artificial Sequence
  Description of Artificial Sequence: Synthetic oligonucleotide
  Sense strand starting at position 3323 of SEQ ID NO: 1884604
ggaugcuagguguggaaga

SEQ ID NO: 2277981 - RNA, 19 nt, Artificial Sequence
  Description of Artificial Sequence: Synthetic oligonucleotide
  Antisense strand to SEQ ID NO: 2277980
ucuuccacaccuagcaucc

SEQ ID NO: 2277982 - RNA, 19 nt, Artificial Sequence
  Description of Artificial Sequence: Synthetic oligonucleotide
  Sense strand starting at position 3344 of SEQ ID NO: 1884604
ggaaccagggccugauuaa

SEQ ID NO: 2277983 - RNA, 19 nt, Artificial Sequence
  Description of Artificial Sequence: Synthetic oligonucleotide
  Antisense strand to SEQ ID NO: 2277982
uuaaucaggcccugguucc

SEQ ID NO: 2277984 - RNA, 19 nt, Artificial Sequence
  Description of Artificial Sequence: Synthetic oligonucleotide
  Sense strand starting at position 3690 of SEQ ID NO: 1884604
agagaaauuuccugugaag

SEQ ID NO: 2277985 - RNA, 19 nt, Artificial Sequence
  Description of Artificial Sequence: Synthetic oligonucleotide
  Antisense strand to SEQ ID NO: 2277984
cuucacaggaaauuucucu

SEQ ID NO: 2277986 - RNA, 19 nt, Artificial Sequence
  Description of Artificial Sequence: Synthetic oligonucleotide
  Sense strand starting at position 3837 of SEQ ID NO: 1884604
uggugagagguuuguuaug

SEQ ID NO: 2277987 - RNA, 19 nt, Artificial Sequence
  Description of Artificial Sequence: Synthetic oligonucleotide
  Antisense strand to SEQ ID NO: 2277986
cauaacaaaccucucacca

SEQ ID NO: 2277988 - RNA, 19 nt, Artificial Sequence
  Description of Artificial Sequence: Synthetic oligonucleotide
  Sense strand starting at position 3839 of SEQ ID NO: 1884604
gugagagguuuguuaugga

SEQ ID NO: 2277989 - RNA, 19 nt, Artificial Sequence
  Description of Artificial Sequence: Synthetic oligonucleotide
  Antisense strand to SEQ ID NO: 2277988
uccauaacaaaccucucac

SEQ ID NO: 2277990 - RNA, 19 nt, Artificial Sequence
  Description of Artificial Sequence: Synthetic oligonucleotide
  Sense strand starting at position 3848 of SEQ ID NO: 1884604
uuguuauggaggcagcaau

SEQ ID NO: 2277991 - RNA, 19 nt, Artificial Sequence
  Description of Artificial Sequence: Synthetic oligonucleotide
  Antisense strand to SEQ ID NO: 2277990
auugcugccuccauaacaa

SEQ ID NO: 2277992 - RNA, 19 nt, Artificial Sequence
  Description of Artificial Sequence: Synthetic oligonucleotide
  Sense strand starting at position 326 of SEQ ID NO: 1884605
cgacgagacucucucaaac

SEQ ID NO: 2277993 - RNA, 19 nt, Artificial Sequence
  Description of Artificial Sequence: Synthetic oligonucleotide
  Antisense strand to SEQ ID NO: 2277992
guuugagagagucucgucg

SEQ ID NO: 2277994 - RNA, 19 nt, Artificial Sequence
  Description of Artificial Sequence: Synthetic oligonucleotide
  Sense strand starting at position 838 of SEQ ID NO: 1884605
gcacauagucuauacccau

SEQ ID NO: 2277995 - RNA, 19 nt, Artificial Sequence
  Description of Artificial Sequence: Synthetic oligonucleotide
  Antisense strand to SEQ ID NO: 2277994
auggguauagacuaugugc

SEQ ID NO: 2277996 - RNA, 19 nt, Artificial Sequence
  Description of Artificial Sequence: Synthetic oligonucleotide
  Sense strand starting at position 891 of SEQ ID NO: 1884605
uauuuagguugacauaaga

SEQ ID NO: 2277997 - RNA, 19 nt, Artificial Sequence
  Description of Artificial Sequence: Synthetic oligonucleotide
  Antisense strand to SEQ ID NO: 2277996
ucuuaugucaaccuaaaua

SEQ ID NO: 2277998 - RNA, 19 nt, Artificial Sequence
  Description of Artificial Sequence: Synthetic oligonucleotide
  Sense strand starting at position 904 of SEQ ID NO: 1884605
auaagauagcaccagucuu

SEQ ID NO: 2277999 - RNA, 19 nt, Artificial Sequence
  Description of Artificial Sequence: Synthetic oligonucleotide
  Antisense strand to SEQ ID NO: 2277998
aagacuggugcuaucuuau

SEQ ID NO: 2278000 - RNA, 19 nt, Artificial Sequence
  Description of Artificial Sequence: Synthetic oligonucleotide
  Sense strand starting at position 1110 of SEQ ID NO: 1884605
cagcguggccuuguuugua

SEQ ID NO: 2278001 - RNA, 19 nt, Artificial Sequence
  Description of Artificial Sequence: Synthetic oligonucleotide
  Antisense strand to SEQ ID NO: 2278000
uacaaacaaggccacgcug

SEQ ID NO: 2278002 - RNA, 19 nt, Artificial Sequence
  Description of Artificial Sequence: Synthetic oligonucleotide
  Sense strand starting at position 1165 of SEQ ID NO: 1884605
cacaucugugacgggauau

SEQ ID NO: 2278003 - RNA, 19 nt, Artificial Sequence
  Description of Artificial Sequence: Synthetic oligonucleotide
  Antisense strand to SEQ ID NO: 2278002
auaucccgucacagaugug

SEQ ID NO: 2278004 - RNA, 19 nt, Artificial Sequence
  Description of Artificial Sequence: Synthetic oligonucleotide
  Sense strand starting at position 1166 of SEQ ID NO: 1884605
acaucugugacgggauaua

SEQ ID NO: 2278005 - RNA, 19 nt, Artificial Sequence
  Description of Artificial Sequence: Synthetic oligonucleotide
  Antisense strand to SEQ ID NO: 2278004
uauaucccgucacagaugu

SEQ ID NO: 2278006 - RNA, 19 nt, Artificial Sequence
  Description of Artificial Sequence: Synthetic oligonucleotide
  Sense strand starting at position 1175 of SEQ ID NO: 1884605
acgggauauagugauguuu

SEQ ID NO: 2278007 - RNA, 19 nt, Artificial Sequence
  Description of Artificial Sequence: Synthetic oligonucleotide
  Antisense strand to SEQ ID NO: 2278006
aaacaucacuauaucccgu

SEQ ID NO: 2278008 - RNA, 19 nt, Artificial Sequence
  Description of Artificial Sequence: Synthetic oligonucleotide
  Sense strand starting at position 1184 of SEQ ID NO: 1884605
agugauguuuaaucuuaug

SEQ ID NO: 2278009 - RNA, 19 nt, Artificial Sequence
  Description of Artificial Sequence: Synthetic oligonucleotide
  Antisense strand to SEQ ID NO: 2278008
cauaagauuaaacaucacu

SEQ ID NO: 2278010 - RNA, 19 nt, Artificial Sequence
  Description of Artificial Sequence: Synthetic oligonucleotide
  Sense strand starting at position 1195 of SEQ ID NO: 1884605
aucuuaugauugccuuaag

SEQ ID NO: 2278011 - RNA, 19 nt, Artificial Sequence
  Description of Artificial Sequence: Synthetic oligonucleotide
  Antisense strand to SEQ ID NO: 2278010
cuuaaggcaaucauaagau

SEQ ID NO: 2278012 - RNA, 19 nt, Artificial Sequence
  Description of Artificial Sequence: Synthetic oligonucleotide
  Sense strand starting at position 1196 of SEQ ID NO: 1884605
ucuuaugauugccuuaaga

SEQ ID NO: 2278013 - RNA, 19 nt, Artificial Sequence
  Description of Artificial Sequence: Synthetic oligonucleotide
  Antisense strand to SEQ ID NO: 2278012
ucuuaaggcaaucauaaga

SEQ ID NO: 2278014 - RNA, 19 nt, Artificial Sequence
  Description of Artificial Sequence: Synthetic oligonucleotide
  Sense strand starting at position 1198 of SEQ ID NO: 1884605
uuaugauugccuuaagaau

SEQ ID NO: 2278015 - RNA, 19 nt, Artificial Sequence
  Description of Artificial Sequence: Synthetic oligonucleotide
  Antisense strand to SEQ ID NO: 2278014
auucuuaaggcaaucauaa

SEQ ID NO: 2278016 - RNA, 19 nt, Artificial Sequence
  Description of Artificial Sequence: Synthetic oligonucleotide
  Sense strand starting at position 1674 of SEQ ID NO: 1884605
auauguacacucgggacaa

SEQ ID NO: 2278017 - RNA, 19 nt, Artificial Sequence
  Description of Artificial Sequence: Synthetic oligonucleotide
  Antisense strand to SEQ ID NO: 2278016
uugucccgaguguacauau

SEQ ID NO: 2278018 - RNA, 19 nt, Artificial Sequence
  Description of Artificial Sequence: Synthetic oligonucleotide
  Sense strand starting at position 1685 of SEQ ID NO: 1884605
cgggacaaguucuccugau

SEQ ID NO: 2278019 - RNA, 19 nt, Artificial Sequence
  Description of Artificial Sequence: Synthetic oligonucleotide
  Antisense strand to SEQ ID NO: 2278018
aucaggagaacuugucccg

SEQ ID NO: 2278020 - RNA, 19 nt, Artificial Sequence
  Description of Artificial Sequence: Synthetic oligonucleotide
  Sense strand starting at position 1686 of SEQ ID NO: 1884605
gggacaaguucuccugauc

SEQ ID NO: 2278021 - RNA, 19 nt, Artificial Sequence
  Description of Artificial Sequence: Synthetic oligonucleotide
  Antisense strand to SEQ ID NO: 2278020
gaucaggagaacuuguccc

SEQ ID NO: 2278022 - RNA, 19 nt, Artificial Sequence
  Description of Artificial Sequence: Synthetic oligonucleotide
  Sense strand starting at position 1689 of SEQ ID NO: 1884605
acaaguucuccugaucgaa

SEQ ID NO: 2278023 - RNA, 19 nt, Artificial Sequence
  Description of Artificial Sequence: Synthetic oligonucleotide
  Antisense strand to SEQ ID NO: 2278022
uucgaucaggagaacuugu

SEQ ID NO: 2278024 - RNA, 19 nt, Artificial Sequence
  Description of Artificial Sequence: Synthetic oligonucleotide
  Sense strand starting at position 2573 of SEQ ID NO: 1884605
cgcuuacgagccuuaucuu

SEQ ID NO: 2278025 - RNA, 19 nt, Artificial Sequence
  Description of Artificial Sequence: Synthetic oligonucleotide
  Antisense strand to SEQ ID NO: 2278024
aagauaaggcucguaagcg

SEQ ID NO: 2278026 - RNA, 19 nt, Artificial Sequence
  Description of Artificial Sequence: Synthetic oligonucleotide
  Sense strand starting at position 2708 of SEQ ID NO: 1884605
ccugacuacccuggaagua

SEQ ID NO: 2278027 - RNA, 19 nt, Artificial Sequence
  Description of Artificial Sequence: Synthetic oligonucleotide
  Antisense strand to SEQ ID NO: 2278026
uacuuccaggguagucagg

SEQ ID NO: 2278028 - RNA, 19 nt, Artificial Sequence
  Description of Artificial Sequence: Synthetic oligonucleotide
  Sense strand starting at position 2750 of SEQ ID NO: 1884605
gugagagaggaauguucuu

SEQ ID NO: 2278029 - RNA, 19 nt, Artificial Sequence
  Description of Artificial Sequence: Synthetic oligonucleotide
  Antisense strand to SEQ ID NO: 2278028
aagaacauuccucucucac

SEQ ID NO: 2278030 - RNA, 19 nt, Artificial Sequence
  Description of Artificial Sequence: Synthetic oligonucleotide
  Sense strand starting at position 2756 of SEQ ID NO: 1884605
gaggaauguucuuugaagu

SEQ ID NO: 2278031 - RNA, 19 nt, Artificial Sequence
  Description of Artificial Sequence: Synthetic oligonucleotide
  Antisense strand to SEQ ID NO: 2278030
acuucaaagaacauuccuc

SEQ ID NO: 2278032 - RNA, 19 nt, Artificial Sequence
  Description of Artificial Sequence: Synthetic oligonucleotide
  Sense strand starting at position 2757 of SEQ ID NO: 1884605
aggaauguucuuugaagua

SEQ ID NO: 2278033 - RNA, 19 nt, Artificial Sequence
  Description of Artificial Sequence: Synthetic oligonucleotide
  Antisense strand to SEQ ID NO: 2278032
uacuucaaagaacauuccu

SEQ ID NO: 2278034 - RNA, 19 nt, Artificial Sequence
  Description of Artificial Sequence: Synthetic oligonucleotide
  Sense strand starting at position 2836 of SEQ ID NO: 1884605
guaauagaguacuucucac

SEQ ID NO: 2278035 - RNA, 19 nt, Artificial Sequence
  Description of Artificial Sequence: Synthetic oligonucleotide
  Antisense strand to SEQ ID NO: 2278034
gugagaaguacucuauuac

SEQ ID NO: 2278036 - RNA, 19 nt, Artificial Sequence
  Description of Artificial Sequence: Synthetic oligonucleotide
  Sense strand starting at position 2866 of SEQ ID NO: 1884605
cagagugauucuuccuguu

SEQ ID NO: 2278037 - RNA, 19 nt, Artificial Sequence
  Description of Artificial Sequence: Synthetic oligonucleotide
  Antisense strand to SEQ ID NO: 2278036
aacaggaagaaucacucug

SEQ ID NO: 2278038 - RNA, 19 nt, Artificial Sequence
  Description of Artificial Sequence: Synthetic oligonucleotide
  Sense strand starting at position 2868 of SEQ ID NO: 1884605
gagugauucuuccuguuua

SEQ ID NO: 2278039 - RNA, 19 nt, Artificial Sequence
  Description of Artificial Sequence: Synthetic oligonucleotide
  Antisense strand to SEQ ID NO: 2278038
uaaacaggaagaaucacuc

SEQ ID NO: 2278040 - RNA, 19 nt, Artificial Sequence
  Description of Artificial Sequence: Synthetic oligonucleotide
  Sense strand starting at position 2903 of SEQ ID NO: 1884605
cacagacguccaugggaga

SEQ ID NO: 2278041 - RNA, 19 nt, Artificial Sequence
  Description of Artificial Sequence: Synthetic oligonucleotide
  Antisense strand to SEQ ID NO: 2278040
ucucccauggacgucugug

SEQ ID NO: 2278042 - RNA, 19 nt, Artificial Sequence
  Description of Artificial Sequence: Synthetic oligonucleotide
  Sense strand starting at position 2918 of SEQ ID NO: 1884605
gagacugagccagagugua

SEQ ID NO: 2278043 - RNA, 19 nt, Artificial Sequence
  Description of Artificial Sequence: Synthetic oligonucleotide
  Antisense strand to SEQ ID NO: 2278042
uacacucuggcucagucuc

SEQ ID NO: 2278044 - RNA, 19 nt, Artificial Sequence
  Description of Artificial Sequence: Synthetic oligonucleotide
  Sense strand starting at position 2948 of SEQ ID NO: 1884605
gucacaucacgagauccua

SEQ ID NO: 2278045 - RNA, 19 nt, Artificial Sequence
  Description of Artificial Sequence: Synthetic oligonucleotide
  Antisense strand to SEQ ID NO: 2278044
uaggaucucgugaugugac

SEQ ID NO: 2278046 - RNA, 19 nt, Artificial Sequence
  Description of Artificial Sequence: Synthetic oligonucleotide
  Sense strand starting at position 2958 of SEQ ID NO: 1884605
gagauccuagucugguuau

SEQ ID NO: 2278047 - RNA, 19 nt, Artificial Sequence
  Description of Artificial Sequence: Synthetic oligonucleotide
  Antisense strand to SEQ ID NO: 2278046
auaaccagacuaggaucuc

SEQ ID NO: 2278048 - RNA, 19 nt, Artificial Sequence
  Description of Artificial Sequence: Synthetic oligonucleotide
  Sense strand starting at position 2961 of SEQ ID NO: 1884605
auccuagucugguuaucag

SEQ ID NO: 2278049 - RNA, 19 nt, Artificial Sequence
  Description of Artificial Sequence: Synthetic oligonucleotide
  Antisense strand to SEQ ID NO: 2278048
cugauaaccagacuaggau

SEQ ID NO: 2278050 - RNA, 19 nt, Artificial Sequence
  Description of Artificial Sequence: Synthetic oligonucleotide
  Sense strand starting at position 3072 of SEQ ID NO: 1884605
ggucaaauaucugcaacuu

SEQ ID NO: 2278051 - RNA, 19 nt, Artificial Sequence
  Description of Artificial Sequence: Synthetic oligonucleotide
  Antisense strand to SEQ ID NO: 2278050
aaguugcagauauuugacc

SEQ ID NO: 2278052 - RNA, 19 nt, Artificial Sequence
  Description of Artificial Sequence: Synthetic oligonucleotide
  Sense strand starting at position 3120 of SEQ ID NO: 1884605
ucuuuaaaggcuugaauug

SEQ ID NO: 2278053 - RNA, 19 nt, Artificial Sequence
  Description of Artificial Sequence: Synthetic oligonucleotide
  Antisense strand to SEQ ID NO: 2278052
caauucaagccuuuaaaga

SEQ ID NO: 2278054 - RNA, 19 nt, Artificial Sequence
  Description of Artificial Sequence: Synthetic oligonucleotide
  Sense strand starting at position 3269 of SEQ ID NO: 1884605
gugagaguauuagugguca

SEQ ID NO: 2278055 - RNA, 19 nt, Artificial Sequence
  Description of Artificial Sequence: Synthetic oligonucleotide
  Antisense strand to SEQ ID NO: 2278054
ugaccacuaauacucucac

SEQ ID NO: 2278056 - RNA, 19 nt, Artificial Sequence
  Description of Artificial Sequence: Synthetic oligonucleotide
  Sense strand starting at position 3271 of SEQ ID NO: 1884605
gagaguauuaguggucaug

SEQ ID NO: 2278057 - RNA, 19 nt, Artificial Sequence
  Description of Artificial Sequence: Synthetic oligonucleotide
  Antisense strand to SEQ ID NO: 2278056
caugaccacuaauacucuc

SEQ ID NO: 2278058 - RNA, 19 nt, Artificial Sequence
  Description of Artificial Sequence: Synthetic oligonucleotide
  Sense strand starting at position 3382 of SEQ ID NO: 1884605
agggaugcuagguguggaa

SEQ ID NO: 2278059 - RNA, 19 nt, Artificial Sequence
  Description of Artificial Sequence: Synthetic oligonucleotide
  Antisense strand to SEQ ID NO: 2278058
uuccacaccuagcaucccu

SEQ ID NO: 2278060 - RNA, 19 nt, Artificial Sequence
  Description of Artificial Sequence: Synthetic oligonucleotide
  Sense strand starting at position 3384 of SEQ ID NO: 1884605
ggaugcuagguguggaaga

SEQ ID NO: 2278061 - RNA, 19 nt, Artificial Sequence
  Description of Artificial Sequence: Synthetic oligonucleotide
  Antisense strand to SEQ ID NO: 2278060
ucuuccacaccuagcaucc

SEQ ID NO: 2278062 - RNA, 19 nt, Artificial Sequence
  Description of Artificial Sequence: Synthetic oligonucleotide
  Sense strand starting at position 3405 of SEQ ID NO: 1884605
ggaaccagggccugauuaa

SEQ ID NO: 2278063 - RNA, 19 nt, Artificial Sequence
  Description of Artificial Sequence: Synthetic oligonucleotide
  Antisense strand to SEQ ID NO: 2278062
uuaaucaggcccugguucc

SEQ ID NO: 2278064 - RNA, 19 nt, Artificial Sequence
  Description of Artificial Sequence: Synthetic oligonucleotide
  Sense strand starting at position 3751 of SEQ ID NO: 1884605
agagaaauuuccugugaag

SEQ ID NO: 2278065 - RNA, 19 nt, Artificial Sequence
  Description of Artificial Sequence: Synthetic oligonucleotide
  Antisense strand to SEQ ID NO: 2278064
cuucacaggaaauuucucu

SEQ ID NO: 2278066 - RNA, 19 nt, Artificial Sequence
  Description of Artificial Sequence: Synthetic oligonucleotide
  Sense strand starting at position 3898 of SEQ ID NO: 1884605
uggugagagguuuguuaug

SEQ ID NO: 2278067 - RNA, 19 nt, Artificial Sequence
  Description of Artificial Sequence: Synthetic oligonucleotide
  Antisense strand to SEQ ID NO: 2278066
cauaacaaaccucucacca

SEQ ID NO: 2278068 - RNA, 19 nt, Artificial Sequence
  Description of Artificial Sequence: Synthetic oligonucleotide
  Sense strand starting at position 3900 of SEQ ID NO: 1884605
gugagagguuuguuaugga

SEQ ID NO: 2278069 - RNA, 19 nt, Artificial Sequence
  Description of Artificial Sequence: Synthetic oligonucleotide
  Antisense strand to SEQ ID NO: 2278068
uccauaacaaaccucucac

SEQ ID NO: 2278070 - RNA, 19 nt, Artificial Sequence
  Description of Artificial Sequence: Synthetic oligonucleotide
  Sense strand starting at position 3909 of SEQ ID NO: 1884605
uuguuauggaggcagcaau

SEQ ID NO: 2278071 - RNA, 19 nt, Artificial Sequence
  Description of Artificial Sequence: Synthetic oligonucleotide
  Antisense strand to SEQ ID NO: 2278070
auugcugccuccauaacaa

SEQ ID NO: 2278072 - RNA, 19 nt, Artificial Sequence
  Description of Artificial Sequence: Synthetic oligonucleotide
  Sense strand starting at position 379 of SEQ ID NO: 1884606
guauacaugucuuucucau

SEQ ID NO: 2278073 - RNA, 19 nt, Artificial Sequence
  Description of Artificial Sequence: Synthetic oligonucleotide
  Antisense strand to SEQ ID NO: 2278072
augagaaagacauguauac

SEQ ID NO: 2278074 - RNA, 19 nt, Artificial Sequence
  Description of Artificial Sequence: Synthetic oligonucleotide
  Sense strand starting at position 704 of SEQ ID NO: 1884606
uguuuaauugaaggcaauu

SEQ ID NO: 2278075 - RNA, 19 nt, Artificial Sequence
  Description of Artificial Sequence: Synthetic oligonucleotide
  Antisense strand to SEQ ID NO: 2278074
aauugccuucaauuaaaca

SEQ ID NO: 2278076 - RNA, 19 nt, Artificial Sequence
  Description of Artificial Sequence: Synthetic oligonucleotide
  Sense strand starting at position 752 of SEQ ID NO: 1884606
cccggauuaggcugaacua

SEQ ID NO: 2278077 - RNA, 19 nt, Artificial Sequence
  Description of Artificial Sequence: Synthetic oligonucleotide
  Antisense strand to SEQ ID NO: 2278076
uaguucagccuaauccggg

SEQ ID NO: 2278078 - RNA, 19 nt, Artificial Sequence
  Description of Artificial Sequence: Synthetic oligonucleotide
  Sense strand starting at position 753 of SEQ ID NO: 1884606
ccggauuaggcugaacuau

SEQ ID NO: 2278079 - RNA, 19 nt, Artificial Sequence
  Description of Artificial Sequence: Synthetic oligonucleotide
  Antisense strand to SEQ ID NO: 2278078
auaguucagccuaauccgg

SEQ ID NO: 2278080 - RNA, 19 nt, Artificial Sequence
  Description of Artificial Sequence: Synthetic oligonucleotide
  Sense strand starting at position 769 of SEQ ID NO: 1884606
uauggaaucuuguugaauu

SEQ ID NO: 2278081 - RNA, 19 nt, Artificial Sequence
  Description of Artificial Sequence: Synthetic oligonucleotide
  Antisense strand to SEQ ID NO: 2278080
aauucaacaagauuccaua

SEQ ID NO: 2278082 - RNA, 19 nt, Artificial Sequence
  Description of Artificial Sequence: Synthetic oligonucleotide
  Sense strand starting at position 897 of SEQ ID NO: 1884606
gcuggcugucagggaaaua

SEQ ID NO: 2278083 - RNA, 19 nt, Artificial Sequence
  Description of Artificial Sequence: Synthetic oligonucleotide
  Antisense strand to SEQ ID NO: 2278082
uauuucccugacagccagc

SEQ ID NO: 2278084 - RNA, 19 nt, Artificial Sequence
  Description of Artificial Sequence: Synthetic oligonucleotide
  Sense strand starting at position 934 of SEQ ID NO: 1884606
uggaccuagcgcuaaugaa

SEQ ID NO: 2278085 - RNA, 19 nt, Artificial Sequence
  Description of Artificial Sequence: Synthetic oligonucleotide
  Antisense strand to SEQ ID NO: 2278084
uucauuagcgcuaggucca

SEQ ID NO: 2278086 - RNA, 19 nt, Artificial Sequence
  Description of Artificial Sequence: Synthetic oligonucleotide
  Sense strand starting at position 947 of SEQ ID NO: 1884606
aaugaagucuuaccguacu

SEQ ID NO: 2278087 - RNA, 19 nt, Artificial Sequence
  Description of Artificial Sequence: Synthetic oligonucleotide
  Antisense strand to SEQ ID NO: 2278086
aguacgguaagacuucauu

SEQ ID NO: 2278088 - RNA, 19 nt, Artificial Sequence
  Description of Artificial Sequence: Synthetic oligonucleotide
  Sense strand starting at position 1089 of SEQ ID NO: 1884606
cugugucuuagugaaggua

SEQ ID NO: 2278089 - RNA, 19 nt, Artificial Sequence
  Description of Artificial Sequence: Synthetic oligonucleotide
  Antisense strand to SEQ ID NO: 2278088
uaccuucacuaagacacag

SEQ ID NO: 2278090 - RNA, 19 nt, Artificial Sequence
  Description of Artificial Sequence: Synthetic oligonucleotide
  Sense strand starting at position 1092 of SEQ ID NO: 1884606
ugucuuagugaagguauua

SEQ ID NO: 2278091 - RNA, 19 nt, Artificial Sequence
  Description of Artificial Sequence: Synthetic oligonucleotide
  Antisense strand to SEQ ID NO: 2278090
uaauaccuucacuaagaca

SEQ ID NO: 2278092 - RNA, 19 nt, Artificial Sequence
  Description of Artificial Sequence: Synthetic oligonucleotide
  Sense strand starting at position 1177 of SEQ ID NO: 1884606
cgguuugacauauaguaaa

SEQ ID NO: 2278093 - RNA, 19 nt, Artificial Sequence
  Description of Artificial Sequence: Synthetic oligonucleotide
  Antisense strand to SEQ ID NO: 2278092
uuuacuauaugucaaaccg

SEQ ID NO: 2278094 - RNA, 19 nt, Artificial Sequence
  Description of Artificial Sequence: Synthetic oligonucleotide
  Sense strand starting at position 1248 of SEQ ID NO: 1884606
ucuacaagugacuggugaa

SEQ ID NO: 2278095 - RNA, 19 nt, Artificial Sequence
  Description of Artificial Sequence: Synthetic oligonucleotide
  Antisense strand to SEQ ID NO: 2278094
uucaccagucacuuguaga

SEQ ID NO: 2278096 - RNA, 19 nt, Artificial Sequence
  Description of Artificial Sequence: Synthetic oligonucleotide
  Sense strand starting at position 1362 of SEQ ID NO: 1884606
cuguuuauugucuaggcaa

SEQ ID NO: 2278097 - RNA, 19 nt, Artificial Sequence
  Description of Artificial Sequence: Synthetic oligonucleotide
  Antisense strand to SEQ ID NO: 2278096
uugccuagacaauaaacag

SEQ ID NO: 2278098 - RNA, 19 nt, Artificial Sequence
  Description of Artificial Sequence: Synthetic oligonucleotide
  Sense strand starting at position 1365 of SEQ ID NO: 1884606
uuuauugucuaggcaacuu

SEQ ID NO: 2278099 - RNA, 19 nt, Artificial Sequence
  Description of Artificial Sequence: Synthetic oligonucleotide
  Antisense strand to SEQ ID NO: 2278098
aaguugccuagacaauaaa

SEQ ID NO: 2278100 - RNA, 19 nt, Artificial Sequence
  Description of Artificial Sequence: Synthetic oligonucleotide
  Sense strand starting at position 1404 of SEQ ID NO: 1884606
gagcaaugcccguaaagug

SEQ ID NO: 2278101 - RNA, 19 nt, Artificial Sequence
  Description of Artificial Sequence: Synthetic oligonucleotide
  Antisense strand to SEQ ID NO: 2278100
cacuuuacgggcauugcuc

SEQ ID NO: 2278102 - RNA, 19 nt, Artificial Sequence
  Description of Artificial Sequence: Synthetic oligonucleotide
  Sense strand starting at position 1507 of SEQ ID NO: 1884606
acaugugcucaucaucaua

SEQ ID NO: 2278103 - RNA, 19 nt, Artificial Sequence
  Description of Artificial Sequence: Synthetic oligonucleotide
  Antisense strand to SEQ ID NO: 2278102
uaugaugaugagcacaugu

SEQ ID NO: 2278104 - RNA, 19 nt, Artificial Sequence
  Description of Artificial Sequence: Synthetic oligonucleotide
  Sense strand starting at position 1533 of SEQ ID NO: 1884606
uuuaucaaagcucaggauu

SEQ ID NO: 2278105 - RNA, 19 nt, Artificial Sequence
  Description of Artificial Sequence: Synthetic oligonucleotide
  Antisense strand to SEQ ID NO: 2278104
aauccugagcuuugauaaa

SEQ ID NO: 2278106 - RNA, 19 nt, Artificial Sequence
  Description of Artificial Sequence: Synthetic oligonucleotide
  Sense strand starting at position 1636 of SEQ ID NO: 1884606
caagaugaccuuuguguau

SEQ ID NO: 2278107 - RNA, 19 nt, Artificial Sequence
  Description of Artificial Sequence: Synthetic oligonucleotide
  Antisense strand to SEQ ID NO: 2278106
auacacaaaggucaucuug

SEQ ID NO: 2278108 - RNA, 19 nt, Artificial Sequence
  Description of Artificial Sequence: Synthetic oligonucleotide
  Sense strand starting at position 1639 of SEQ ID NO: 1884606
gaugaccuuuguguaucua

SEQ ID NO: 2278109 - RNA, 19 nt, Artificial Sequence
  Description of Artificial Sequence: Synthetic oligonucleotide
  Antisense strand to SEQ ID NO: 2278108
uagauacacaaaggucauc

SEQ ID NO: 2278110 - RNA, 19 nt, Artificial Sequence
  Description of Artificial Sequence: Synthetic oligonucleotide
  Sense strand starting at position 1640 of SEQ ID NO: 1884606
augaccuuuguguaucuau

SEQ ID NO: 2278111 - RNA, 19 nt, Artificial Sequence
  Description of Artificial Sequence: Synthetic oligonucleotide
  Antisense strand to SEQ ID NO: 2278110
auagauacacaaaggucau

SEQ ID NO: 2278112 - RNA, 19 nt, Artificial Sequence
  Description of Artificial Sequence: Synthetic oligonucleotide
  Sense strand starting at position 1643 of SEQ ID NO: 1884606
accuuuguguaucuaucau

SEQ ID NO: 2278113 - RNA, 19 nt, Artificial Sequence
  Description of Artificial Sequence: Synthetic oligonucleotide
  Antisense strand to SEQ ID NO: 2278112
augauagauacacaaaggu

SEQ ID NO: 2278114 - RNA, 19 nt, Artificial Sequence
  Description of Artificial Sequence: Synthetic oligonucleotide
  Sense strand starting at position 2459 of SEQ ID NO: 1884606
gacuuagcuguugguuaaa

SEQ ID NO: 2278115 - RNA, 19 nt, Artificial Sequence
  Description of Artificial Sequence: Synthetic oligonucleotide
  Antisense strand to SEQ ID NO: 2278114
uuuaaccaacagcuaaguc

SEQ ID NO: 2278116 - RNA, 19 nt, Artificial Sequence
  Description of Artificial Sequence: Synthetic oligonucleotide
  Sense strand starting at position 2462 of SEQ ID NO: 1884606
uuagcuguugguuaaaugu

SEQ ID NO: 2278117 - RNA, 19 nt, Artificial Sequence
  Description of Artificial Sequence: Synthetic oligonucleotide
  Antisense strand to SEQ ID NO: 2278116
acauuuaaccaacagcuaa

SEQ ID NO: 2278118 - RNA, 19 nt, Artificial Sequence
  Description of Artificial Sequence: Synthetic oligonucleotide
  Sense strand starting at position 2676 of SEQ ID NO: 1884606
ggucuuuccuugucaaacu

SEQ ID NO: 2278119 - RNA, 19 nt, Artificial Sequence
  Description of Artificial Sequence: Synthetic oligonucleotide
  Antisense strand to SEQ ID NO: 2278118
aguuugacaaggaaagacc

SEQ ID NO: 2278120 - RNA, 19 nt, Artificial Sequence
  Description of Artificial Sequence: Synthetic oligonucleotide
  Sense strand starting at position 2816 of SEQ ID NO: 1884606
uuugucucggcguuacaaa

SEQ ID NO: 2278121 - RNA, 19 nt, Artificial Sequence
  Description of Artificial Sequence: Synthetic oligonucleotide
  Antisense strand to SEQ ID NO: 2278120
uuuguaacgccgagacaaa

SEQ ID NO: 2278122 - RNA, 19 nt, Artificial Sequence
  Description of Artificial Sequence: Synthetic oligonucleotide
  Sense strand starting at position 2875 of SEQ ID NO: 1884606
ccuuauuaaagguagugua

SEQ ID NO: 2278123 - RNA, 19 nt, Artificial Sequence
  Description of Artificial Sequence: Synthetic oligonucleotide
  Antisense strand to SEQ ID NO: 2278122
uacacuaccuuuaauaagg

SEQ ID NO: 2278124 - RNA, 19 nt, Artificial Sequence
  Description of Artificial Sequence: Synthetic oligonucleotide
  Sense strand starting at position 2913 of SEQ ID NO: 1884606
guccuauuuagcggugcca

SEQ ID NO: 2278125 - RNA, 19 nt, Artificial Sequence
  Description of Artificial Sequence: Synthetic oligonucleotide
  Antisense strand to SEQ ID NO: 2278124
uggcaccgcuaaauaggac

SEQ ID NO: 2278126 - RNA, 19 nt, Artificial Sequence
  Description of Artificial Sequence: Synthetic oligonucleotide
  Sense strand starting at position 3159 of SEQ ID NO: 1884606
aagugaugcuuucugaauu

SEQ ID NO: 2278127 - RNA, 19 nt, Artificial Sequence
  Description of Artificial Sequence: Synthetic oligonucleotide
  Antisense strand to SEQ ID NO: 2278126
aauucagaaagcaucacuu

SEQ ID NO: 2278128 - RNA, 19 nt, Artificial Sequence
  Description of Artificial Sequence: Synthetic oligonucleotide
  Sense strand starting at position 3303 of SEQ ID NO: 1884606
ugaacuuuauauucgaugu

SEQ ID NO: 2278129 - RNA, 19 nt, Artificial Sequence
  Description of Artificial Sequence: Synthetic oligonucleotide
  Antisense strand to SEQ ID NO: 2278128
acaucgaauauaaaguuca

SEQ ID NO: 2278130 - RNA, 19 nt, Artificial Sequence
  Description of Artificial Sequence: Synthetic oligonucleotide
  Sense strand starting at position 3561 of SEQ ID NO: 1884606
ugaucaagaucuuugauuc

SEQ ID NO: 2278131 - RNA, 19 nt, Artificial Sequence
  Description of Artificial Sequence: Synthetic oligonucleotide
  Antisense strand to SEQ ID NO: 2278130
gaaucaaagaucuugauca

SEQ ID NO: 2278132 - RNA, 19 nt, Artificial Sequence
  Description of Artificial Sequence: Synthetic oligonucleotide
  Sense strand starting at position 3603 of SEQ ID NO: 1884606
uagugacucuggccuaauu

SEQ ID NO: 2278133 - RNA, 19 nt, Artificial Sequence
  Description of Artificial Sequence: Synthetic oligonucleotide
  Antisense strand to SEQ ID NO: 2278132
aauuaggccagagucacua

SEQ ID NO: 2278134 - RNA, 19 nt, Artificial Sequence
  Description of Artificial Sequence: Synthetic oligonucleotide
  Sense strand starting at position 3605 of SEQ ID NO: 1884606
gugacucuggccuaauuau

SEQ ID NO: 2278135 - RNA, 19 nt, Artificial Sequence
  Description of Artificial Sequence: Synthetic oligonucleotide
  Antisense strand to SEQ ID NO: 2278134
auaauuaggccagagucac

SEQ ID NO: 2278136 - RNA, 19 nt, Artificial Sequence
  Description of Artificial Sequence: Synthetic oligonucleotide
  Sense strand starting at position 3664 of SEQ ID NO: 1884606
guugauaucuguuuacaga

SEQ ID NO: 2278137 - RNA, 19 nt, Artificial Sequence
  Description of Artificial Sequence: Synthetic oligonucleotide
  Antisense strand to SEQ ID NO: 2278136
ucuguaaacagauaucaac

SEQ ID NO: 2278138 - RNA, 19 nt, Artificial Sequence
  Description of Artificial Sequence: Synthetic oligonucleotide
  Sense strand starting at position 3665 of SEQ ID NO: 1884606
uugauaucuguuuacagau

SEQ ID NO: 2278139 - RNA, 19 nt, Artificial Sequence
  Description of Artificial Sequence: Synthetic oligonucleotide
  Antisense strand to SEQ ID NO: 2278138
aucuguaaacagauaucaa

SEQ ID NO: 2278140 - RNA, 19 nt, Artificial Sequence
  Description of Artificial Sequence: Synthetic oligonucleotide
  Sense strand starting at position 3680 of SEQ ID NO: 1884606
agaucuacaguuugaguaa

SEQ ID NO: 2278141 - RNA, 19 nt, Artificial Sequence
  Description of Artificial Sequence: Synthetic oligonucleotide
  Antisense strand to SEQ ID NO: 2278140
uuacucaaacuguagaucu

SEQ ID NO: 2278142 - RNA, 19 nt, Artificial Sequence
  Description of Artificial Sequence: Synthetic oligonucleotide
  Sense strand starting at position 3683 of SEQ ID NO: 1884606
ucuacaguuugaguaaaca

SEQ ID NO: 2278143 - RNA, 19 nt, Artificial Sequence
  Description of Artificial Sequence: Synthetic oligonucleotide
  Antisense strand to SEQ ID NO: 2278142
uguuuacucaaacuguaga

SEQ ID NO: 2278144 - RNA, 19 nt, Artificial Sequence
  Description of Artificial Sequence: Synthetic oligonucleotide
  Sense strand starting at position 3739 of SEQ ID NO: 1884606
ucaguaguacuugguauuu

SEQ ID NO: 2278145 - RNA, 19 nt, Artificial Sequence
  Description of Artificial Sequence: Synthetic oligonucleotide
  Antisense strand to SEQ ID NO: 2278144
aaauaccaaguacuacuga

SEQ ID NO: 2278146 - RNA, 19 nt, Artificial Sequence
  Description of Artificial Sequence: Synthetic oligonucleotide
  Sense strand starting at position 3748 of SEQ ID NO: 1884606
cuugguauuuauuacugau

SEQ ID NO: 2278147 - RNA, 19 nt, Artificial Sequence
  Description of Artificial Sequence: Synthetic oligonucleotide
  Antisense strand to SEQ ID NO: 2278146
aucaguaauaaauaccaag

SEQ ID NO: 2278148 - RNA, 19 nt, Artificial Sequence
  Description of Artificial Sequence: Synthetic oligonucleotide
  Sense strand starting at position 3766 of SEQ ID NO: 1884606
uguuaaaguugacuugaca

SEQ ID NO: 2278149 - RNA, 19 nt, Artificial Sequence
  Description of Artificial Sequence: Synthetic oligonucleotide
  Antisense strand to SEQ ID NO: 2278148
ugucaagucaacuuuaaca

SEQ ID NO: 2278150 - RNA, 19 nt, Artificial Sequence
  Description of Artificial Sequence: Synthetic oligonucleotide
  Sense strand starting at position 3888 of SEQ ID NO: 1884606
caguacuugucauuuaguc

SEQ ID NO: 2278151 - RNA, 19 nt, Artificial Sequence
  Description of Artificial Sequence: Synthetic oligonucleotide
  Antisense strand to SEQ ID NO: 2278150
gacuaaaugacaaguacug

SEQ ID NO: 2278152 - RNA, 19 nt, Artificial Sequence
  Description of Artificial Sequence: Synthetic oligonucleotide
  Sense strand starting at position 6 of SEQ ID NO: 1884607
cuccaaagcuucuaaucga

SEQ ID NO: 2278153 - RNA, 19 nt, Artificial Sequence
  Description of Artificial Sequence: Synthetic oligonucleotide
  Antisense strand to SEQ ID NO: 2278152
ucgauuagaagcuuuggag

SEQ ID NO: 2278154 - RNA, 19 nt, Artificial Sequence
  Description of Artificial Sequence: Synthetic oligonucleotide
  Sense strand starting at position 13 of SEQ ID NO: 1884607
gcuucuaaucgacaguacu

SEQ ID NO: 2278155 - RNA, 19 nt, Artificial Sequence
  Description of Artificial Sequence: Synthetic oligonucleotide
  Antisense strand to SEQ ID NO: 2278154
aguacugucgauuagaagc

SEQ ID NO: 2278156 - RNA, 19 nt, Artificial Sequence
  Description of Artificial Sequence: Synthetic oligonucleotide
  Sense strand starting at position 181 of SEQ ID NO: 1884607
gguacaugagguuacaagu

SEQ ID NO: 2278157 - RNA, 19 nt, Artificial Sequence
  Description of Artificial Sequence: Synthetic oligonucleotide
  Antisense strand to SEQ ID NO: 2278156
acuuguaaccucauguacc

SEQ ID NO: 2278158 - RNA, 19 nt, Artificial Sequence
  Description of Artificial Sequence: Synthetic oligonucleotide
  Sense strand starting at position 295 of SEQ ID NO: 1884607
ucauucucagauuguuaag

SEQ ID NO: 2278159 - RNA, 19 nt, Artificial Sequence
  Description of Artificial Sequence: Synthetic oligonucleotide
  Antisense strand to SEQ ID NO: 2278158
cuuaacaaucugagaauga

SEQ ID NO: 2278160 - RNA, 19 nt, Artificial Sequence
  Description of Artificial Sequence: Synthetic oligonucleotide
  Sense strand starting at position 298 of SEQ ID NO: 1884607
uucucagauuguuaagaga

SEQ ID NO: 2278161 - RNA, 19 nt, Artificial Sequence
  Description of Artificial Sequence: Synthetic oligonucleotide
  Antisense strand to SEQ ID NO: 2278160
ucucuuaacaaucugagaa

SEQ ID NO: 2278162 - RNA, 19 nt, Artificial Sequence
  Description of Artificial Sequence: Synthetic oligonucleotide
  Sense strand starting at position 398 of SEQ ID NO: 1884607
ucuaucuucccugguguua

SEQ ID NO: 2278163 - RNA, 19 nt, Artificial Sequence
  Description of Artificial Sequence: Synthetic oligonucleotide
  Antisense strand to SEQ ID NO: 2278162
uaacaccagggaagauaga

SEQ ID NO: 2278164 - RNA, 19 nt, Artificial Sequence
  Description of Artificial Sequence: Synthetic oligonucleotide
  Sense strand starting at position 442 of SEQ ID NO: 1884607
uugaguacaugucugacua

SEQ ID NO: 2278165 - RNA, 19 nt, Artificial Sequence
  Description of Artificial Sequence: Synthetic oligonucleotide
  Antisense strand to SEQ ID NO: 2278164
uagucagacauguacucaa

SEQ ID NO: 2278166 - RNA, 19 nt, Artificial Sequence
  Description of Artificial Sequence: Synthetic oligonucleotide
  Sense strand starting at position 443 of SEQ ID NO: 1884607
ugaguacaugucugacuac

SEQ ID NO: 2278167 - RNA, 19 nt, Artificial Sequence
  Description of Artificial Sequence: Synthetic oligonucleotide
  Antisense strand to SEQ ID NO: 2278166
guagucagacauguacuca

SEQ ID NO: 2278168 - RNA, 19 nt, Artificial Sequence
  Description of Artificial Sequence: Synthetic oligonucleotide
  Sense strand starting at position 524 of SEQ ID NO: 1884607
ucgucugucucaccaguau

SEQ ID NO: 2278169 - RNA, 19 nt, Artificial Sequence
  Description of Artificial Sequence: Synthetic oligonucleotide
  Antisense strand to SEQ ID NO: 2278168
auacuggugagacagacga

SEQ ID NO: 2278170 - RNA, 19 nt, Artificial Sequence
  Description of Artificial Sequence: Synthetic oligonucleotide
  Sense strand starting at position 528 of SEQ ID NO: 1884607
cugucucaccaguauccua

SEQ ID NO: 2278171 - RNA, 19 nt, Artificial Sequence
  Description of Artificial Sequence: Synthetic oligonucleotide
  Antisense strand to SEQ ID NO: 2278170
uaggauacuggugagacag

SEQ ID NO: 2278172 - RNA, 19 nt, Artificial Sequence
  Description of Artificial Sequence: Synthetic oligonucleotide
  Sense strand starting at position 638 of SEQ ID NO: 1884607
aaaguuugaugacauagag

SEQ ID NO: 2278173 - RNA, 19 nt, Artificial Sequence
  Description of Artificial Sequence: Synthetic oligonucleotide
  Antisense strand to SEQ ID NO: 2278172
cucuaugucaucaaacuuu

SEQ ID NO: 2278174 - RNA, 19 nt, Artificial Sequence
  Description of Artificial Sequence: Synthetic oligonucleotide
  Sense strand starting at position 665 of SEQ ID NO: 1884607
cugggaugagcuugcauuu

SEQ ID NO: 2278175 - RNA, 19 nt, Artificial Sequence
  Description of Artificial Sequence: Synthetic oligonucleotide
  Antisense strand to SEQ ID NO: 2278174
aaaugcaagcucaucccag

SEQ ID NO: 2278176 - RNA, 19 nt, Artificial Sequence
  Description of Artificial Sequence: Synthetic oligonucleotide
  Sense strand starting at position 733 of SEQ ID NO: 1884607
ggccuaucagcuuguagga

SEQ ID NO: 2278177 - RNA, 19 nt, Artificial Sequence
  Description of Artificial Sequence: Synthetic oligonucleotide
  Antisense strand to SEQ ID NO: 2278176
uccuacaagcugauaggcc

SEQ ID NO: 2278178 - RNA, 19 nt, Artificial Sequence
  Description of Artificial Sequence: Synthetic oligonucleotide
  Sense strand starting at position 735 of SEQ ID NO: 1884607
ccuaucagcuuguaggaau

SEQ ID NO: 2278179 - RNA, 19 nt, Artificial Sequence
  Description of Artificial Sequence: Synthetic oligonucleotide
  Antisense strand to SEQ ID NO: 2278178
auuccuacaagcugauagg

SEQ ID NO: 2278180 - RNA, 19 nt, Artificial Sequence
  Description of Artificial Sequence: Synthetic oligonucleotide
  Sense strand starting at position 789 of SEQ ID NO: 1884607
gcgcaacuucucuggcagu

SEQ ID NO: 2278181 - RNA, 19 nt, Artificial Sequence
  Description of Artificial Sequence: Synthetic oligonucleotide
  Antisense strand to SEQ ID NO: 2278180
acugccagagaaguugcgc

SEQ ID NO: 2278182 - RNA, 19 nt, Artificial Sequence
  Description of Artificial Sequence: Synthetic oligonucleotide
  Sense strand starting at position 908 of SEQ ID NO: 1884607
gggugcauuugugaugaaa

SEQ ID NO: 2278183 - RNA, 19 nt, Artificial Sequence
  Description of Artificial Sequence: Synthetic oligonucleotide
  Antisense strand to SEQ ID NO: 2278182
uuucaucacaaaugcaccc

SEQ ID NO: 2278184 - RNA, 19 nt, Artificial Sequence
  Description of Artificial Sequence: Synthetic oligonucleotide
  Sense strand starting at position 1028 of SEQ ID NO: 1884607
cuccacuuaugguuucuua

SEQ ID NO: 2278185 - RNA, 19 nt, Artificial Sequence
  Description of Artificial Sequence: Synthetic oligonucleotide
  Antisense strand to SEQ ID NO: 2278184
uaagaaaccauaaguggag

SEQ ID NO: 2278186 - RNA, 19 nt, Artificial Sequence
  Description of Artificial Sequence: Synthetic oligonucleotide
  Sense strand starting at position 1152 of SEQ ID NO: 1884607
guacuaauuucucauguaa

SEQ ID NO: 2278187 - RNA, 19 nt, Artificial Sequence
  Description of Artificial Sequence: Synthetic oligonucleotide
  Antisense strand to SEQ ID NO: 2278186
uuacaugagaaauuaguac

SEQ ID NO: 2278188 - RNA, 19 nt, Artificial Sequence
  Description of Artificial Sequence: Synthetic oligonucleotide
  Sense strand starting at position 1154 of SEQ ID NO: 1884607
acuaauuucucauguaagg

SEQ ID NO: 2278189 - RNA, 19 nt, Artificial Sequence
  Description of Artificial Sequence: Synthetic oligonucleotide
  Antisense strand to SEQ ID NO: 2278188
ccuuacaugagaaauuagu

SEQ ID NO: 2278190 - RNA, 19 nt, Artificial Sequence
  Description of Artificial Sequence: Synthetic oligonucleotide
  Sense strand starting at position 1217 of SEQ ID NO: 1884607
cugcauaucucugcagaca

SEQ ID NO: 2278191 - RNA, 19 nt, Artificial Sequence
  Description of Artificial Sequence: Synthetic oligonucleotide
  Antisense strand to SEQ ID NO: 2278190
ugucugcagagauaugcag

SEQ ID NO: 2278192 - RNA, 19 nt, Artificial Sequence
  Description of Artificial Sequence: Synthetic oligonucleotide
  Sense strand starting at position 1218 of SEQ ID NO: 1884607
ugcauaucucugcagacau

SEQ ID NO: 2278193 - RNA, 19 nt, Artificial Sequence
  Description of Artificial Sequence: Synthetic oligonucleotide
  Antisense strand to SEQ ID NO: 2278192
augucugcagagauaugca

SEQ ID NO: 2278194 - RNA, 19 nt, Artificial Sequence
  Description of Artificial Sequence: Synthetic oligonucleotide
  Sense strand starting at position 2052 of SEQ ID NO: 1884607
guagauaacuuugaauuuc

SEQ ID NO: 2278195 - RNA, 19 nt, Artificial Sequence
  Description of Artificial Sequence: Synthetic oligonucleotide
  Antisense strand to SEQ ID NO: 2278194
gaaauucaaaguuaucuac

SEQ ID NO: 2278196 - RNA, 19 nt, Artificial Sequence
  Description of Artificial Sequence: Synthetic oligonucleotide
  Sense strand starting at position 164 of SEQ ID NO: 1884608
ccaauaaagucagcuauug

SEQ ID NO: 2278197 - RNA, 19 nt, Artificial Sequence
  Description of Artificial Sequence: Synthetic oligonucleotide
  Antisense strand to SEQ ID NO: 2278196
caauagcugacuuuauugg

SEQ ID NO: 2278198 - RNA, 19 nt, Artificial Sequence
  Description of Artificial Sequence: Synthetic oligonucleotide
  Sense strand starting at position 176 of SEQ ID NO: 1884608
gcuauugcgauuugccaau

SEQ ID NO: 2278199 - RNA, 19 nt, Artificial Sequence
  Description of Artificial Sequence: Synthetic oligonucleotide
  Antisense strand to SEQ ID NO: 2278198
auuggcaaaucgcaauagc

SEQ ID NO: 2278200 - RNA, 19 nt, Artificial Sequence
  Description of Artificial Sequence: Synthetic oligonucleotide
  Sense strand starting at position 206 of SEQ ID NO: 1884608
gcuagaagaguaugaaauu

SEQ ID NO: 2278201 - RNA, 19 nt, Artificial Sequence
  Description of Artificial Sequence: Synthetic oligonucleotide
  Antisense strand to SEQ ID NO: 2278200
aauuucauacucuucuagc

SEQ ID NO: 2278202 - RNA, 19 nt, Artificial Sequence
  Description of Artificial Sequence: Synthetic oligonucleotide
  Sense strand starting at position 300 of SEQ ID NO: 1884608
ugugguuccggucauuauu

SEQ ID NO: 2278203 - RNA, 19 nt, Artificial Sequence
  Description of Artificial Sequence: Synthetic oligonucleotide
  Antisense strand to SEQ ID NO: 2278202
aauaaugaccggaaccaca

SEQ ID NO: 2278204 - RNA, 19 nt, Artificial Sequence
  Description of Artificial Sequence: Synthetic oligonucleotide
  Sense strand starting at position 342 of SEQ ID NO: 1884608
aguuguagugccuauauuu

SEQ ID NO: 2278205 - RNA, 19 nt, Artificial Sequence
  Description of Artificial Sequence: Synthetic oligonucleotide
  Antisense strand to SEQ ID NO: 2278204
aaauauaggcacuacaacu

SEQ ID NO: 2278206 - RNA, 19 nt, Artificial Sequence
  Description of Artificial Sequence: Synthetic oligonucleotide
  Sense strand starting at position 411 of SEQ ID NO: 1884608
aguuauugcugucugacaa

SEQ ID NO: 2278207 - RNA, 19 nt, Artificial Sequence
  Description of Artificial Sequence: Synthetic oligonucleotide
  Antisense strand to SEQ ID NO: 2278206
uugucagacagcaauaacu

SEQ ID NO: 2278208 - RNA, 19 nt, Artificial Sequence
  Description of Artificial Sequence: Synthetic oligonucleotide
  Sense strand starting at position 412 of SEQ ID NO: 1884608
guuauugcugucugacaau

SEQ ID NO: 2278209 - RNA, 19 nt, Artificial Sequence
  Description of Artificial Sequence: Synthetic oligonucleotide
  Antisense strand to SEQ ID NO: 2278208
auugucagacagcaauaac

SEQ ID NO: 2278210 - RNA, 19 nt, Artificial Sequence
  Description of Artificial Sequence: Synthetic oligonucleotide
  Sense strand starting at position 475 of SEQ ID NO: 1884608
guagccuuaggaugggaua

SEQ ID NO: 2278211 - RNA, 19 nt, Artificial Sequence
  Description of Artificial Sequence: Synthetic oligonucleotide
  Antisense strand to SEQ ID NO: 2278210
uaucccauccuaaggcuac

SEQ ID NO: 2278212 - RNA, 19 nt, Artificial Sequence
  Description of Artificial Sequence: Synthetic oligonucleotide
  Sense strand starting at position 708 of SEQ ID NO: 1884608
ucaaguuguaucgggauau

SEQ ID NO: 2278213 - RNA, 19 nt, Artificial Sequence
  Description of Artificial Sequence: Synthetic oligonucleotide
  Antisense strand to SEQ ID NO: 2278212
auaucccgauacaacuuga

SEQ ID NO: 2278214 - RNA, 19 nt, Artificial Sequence
  Description of Artificial Sequence: Synthetic oligonucleotide
  Sense strand starting at position 712 of SEQ ID NO: 1884608
guuguaucgggauauuauu

SEQ ID NO: 2278215 - RNA, 19 nt, Artificial Sequence
  Description of Artificial Sequence: Synthetic oligonucleotide
  Antisense strand to SEQ ID NO: 2278214
aauaauaucccgauacaac

SEQ ID NO: 2278216 - RNA, 19 nt, Artificial Sequence
  Description of Artificial Sequence: Synthetic oligonucleotide
  Sense strand starting at position 757 of SEQ ID NO: 1884608
uggcuaaaucacuguacuc

SEQ ID NO: 2278217 - RNA, 19 nt, Artificial Sequence
  Description of Artificial Sequence: Synthetic oligonucleotide
  Antisense strand to SEQ ID NO: 2278216
gaguacagugauuuagcca

SEQ ID NO: 2278218 - RNA, 19 nt, Artificial Sequence
  Description of Artificial Sequence: Synthetic oligonucleotide
  Sense strand starting at position 882 of SEQ ID NO: 1884608
uucguaaacggugaaugua

SEQ ID NO: 2278219 - RNA, 19 nt, Artificial Sequence
  Description of Artificial Sequence: Synthetic oligonucleotide
  Antisense strand to SEQ ID NO: 2278218
uacauucaccguuuacgaa

SEQ ID NO: 2278220 - RNA, 19 nt, Artificial Sequence
  Description of Artificial Sequence: Synthetic oligonucleotide
  Sense strand starting at position 1010 of SEQ ID NO: 1884608
cucagagucucccuuccua

SEQ ID NO: 2278221 - RNA, 19 nt, Artificial Sequence
  Description of Artificial Sequence: Synthetic oligonucleotide
  Antisense strand to SEQ ID NO: 2278220
uaggaagggagacucugag

SEQ ID NO: 2278222 - RNA, 19 nt, Artificial Sequence
  Description of Artificial Sequence: Synthetic oligonucleotide
  Sense strand starting at position 1450 of SEQ ID NO: 1884608
ugcaaucuggcagauaaag

SEQ ID NO: 2278223 - RNA, 19 nt, Artificial Sequence
  Description of Artificial Sequence: Synthetic oligonucleotide
  Antisense strand to SEQ ID NO: 2278222
cuuuaucugccagauugca

SEQ ID NO: 2278224 - RNA, 19 nt, Artificial Sequence
  Description of Artificial Sequence: Synthetic oligonucleotide
  Sense strand starting at position 1581 of SEQ ID NO: 1884608
gucuaagguuccuugauca

SEQ ID NO: 2278225 - RNA, 19 nt, Artificial Sequence
  Description of Artificial Sequence: Synthetic oligonucleotide
  Antisense strand to SEQ ID NO: 2278224
ugaucaaggaaccuuagac

SEQ ID NO: 2278226 - RNA, 19 nt, Artificial Sequence
  Description of Artificial Sequence: Synthetic oligonucleotide
  Sense strand starting at position 1667 of SEQ ID NO: 1884608
acugguuagccuuaaguag

SEQ ID NO: 2278227 - RNA, 19 nt, Artificial Sequence
  Description of Artificial Sequence: Synthetic oligonucleotide
  Antisense strand to SEQ ID NO: 2278226
cuacuuaaggcuaaccagu

SEQ ID NO: 2278228 - RNA, 19 nt, Artificial Sequence
  Description of Artificial Sequence: Synthetic oligonucleotide
  Sense strand starting at position 2255 of SEQ ID NO: 1884608
ccucaaaugccacguacau

SEQ ID NO: 2278229 - RNA, 19 nt, Artificial Sequence
  Description of Artificial Sequence: Synthetic oligonucleotide
  Antisense strand to SEQ ID NO: 2278228
auguacguggcauuugagg

SEQ ID NO: 2278230 - RNA, 19 nt, Artificial Sequence
  Description of Artificial Sequence: Synthetic oligonucleotide
  Sense strand starting at position 2267 of SEQ ID NO: 1884608
cguacauaagcuuggauau

SEQ ID NO: 2278231 - RNA, 19 nt, Artificial Sequence
  Description of Artificial Sequence: Synthetic oligonucleotide
  Antisense strand to SEQ ID NO: 2278230
auauccaagcuuauguacg

SEQ ID NO: 2278232 - RNA, 19 nt, Artificial Sequence
  Description of Artificial Sequence: Synthetic oligonucleotide
  Sense strand starting at position 2278 of SEQ ID NO: 1884608
uuggauauguugccaugua

SEQ ID NO: 2278233 - RNA, 19 nt, Artificial Sequence
  Description of Artificial Sequence: Synthetic oligonucleotide
  Antisense strand to SEQ ID NO: 2278232
uacauggcaacauauccaa

SEQ ID NO: 2278234 - RNA, 19 nt, Artificial Sequence
  Description of Artificial Sequence: Synthetic oligonucleotide
  Sense strand starting at position 2347 of SEQ ID NO: 1884608
acccauuacccagguguca

SEQ ID NO: 2278235 - RNA, 19 nt, Artificial Sequence
  Description of Artificial Sequence: Synthetic oligonucleotide
  Antisense strand to SEQ ID NO: 2278234
ugacaccuggguaaugggu

SEQ ID NO: 2278236 - RNA, 19 nt, Artificial Sequence
  Description of Artificial Sequence: Synthetic oligonucleotide
  Sense strand starting at position 2370 of SEQ ID NO: 1884608
augagcuuaccaggaaaca

SEQ ID NO: 2278237 - RNA, 19 nt, Artificial Sequence
  Description of Artificial Sequence: Synthetic oligonucleotide
  Antisense strand to SEQ ID NO: 2278236
uguuuccugguaagcucau

SEQ ID NO: 2278238 - RNA, 19 nt, Artificial Sequence
  Description of Artificial Sequence: Synthetic oligonucleotide
  Sense strand starting at position 2393 of SEQ ID NO: 1884608
agugcugaaucugccagau

SEQ ID NO: 2278239 - RNA, 19 nt, Artificial Sequence
  Description of Artificial Sequence: Synthetic oligonucleotide
  Antisense strand to SEQ ID NO: 2278238
aucuggcagauucagcacu

SEQ ID NO: 2278240 - RNA, 19 nt, Artificial Sequence
  Description of Artificial Sequence: Synthetic oligonucleotide
  Sense strand starting at position 2397 of SEQ ID NO: 1884608
cugaaucugccagauuaua

SEQ ID NO: 2278241 - RNA, 19 nt, Artificial Sequence
  Description of Artificial Sequence: Synthetic oligonucleotide
  Antisense strand to SEQ ID NO: 2278240
uauaaucuggcagauucag

SEQ ID NO: 2278242 - RNA, 19 nt, Artificial Sequence
  Description of Artificial Sequence: Synthetic oligonucleotide
  Sense strand starting at position 2410 of SEQ ID NO: 1884608
auuauacaaugagaucgaa

SEQ ID NO: 2278243 - RNA, 19 nt, Artificial Sequence
  Description of Artificial Sequence: Synthetic oligonucleotide
  Antisense strand to SEQ ID NO: 2278242
uucgaucucauuguauaau

SEQ ID NO: 2278244 - RNA, 19 nt, Artificial Sequence
  Description of Artificial Sequence: Synthetic oligonucleotide
  Sense strand starting at position 2452 of SEQ ID NO: 1884608
ugggugugugaggaguuua

SEQ ID NO: 2278245 - RNA, 19 nt, Artificial Sequence
  Description of Artificial Sequence: Synthetic oligonucleotide
  Antisense strand to SEQ ID NO: 2278244
uaaacuccucacacaccca

SEQ ID NO: 2278246 - RNA, 19 nt, Artificial Sequence
  Description of Artificial Sequence: Synthetic oligonucleotide
  Sense strand starting at position 2457 of SEQ ID NO: 1884608
gugugaggaguuuaccagu

SEQ ID NO: 2278247 - RNA, 19 nt, Artificial Sequence
  Description of Artificial Sequence: Synthetic oligonucleotide
  Antisense strand to SEQ ID NO: 2278246
acugguaaacuccucacac

SEQ ID NO: 2278248 - RNA, 19 nt, Artificial Sequence
  Description of Artificial Sequence: Synthetic oligonucleotide
  Sense strand starting at position 2478 of SEQ ID NO: 1884608
aguguaagggucugagaua

SEQ ID NO: 2278249 - RNA, 19 nt, Artificial Sequence
  Description of Artificial Sequence: Synthetic oligonucleotide
  Antisense strand to SEQ ID NO: 2278248
uaucucagacccuuacacu

SEQ ID NO: 2278250 - RNA, 19 nt, Artificial Sequence
  Description of Artificial Sequence: Synthetic oligonucleotide
  Sense strand starting at position 2493 of SEQ ID NO: 1884608
gauagaagccaggguuuga

SEQ ID NO: 2278251 - RNA, 19 nt, Artificial Sequence
  Description of Artificial Sequence: Synthetic oligonucleotide
  Antisense strand to SEQ ID NO: 2278250
ucaaacccuggcuucuauc

SEQ ID NO: 2278252 - RNA, 19 nt, Artificial Sequence
  Description of Artificial Sequence: Synthetic oligonucleotide
  Sense strand starting at position 2608 of SEQ ID NO: 1884608
uagaguuuggugggaaaca

SEQ ID NO: 2278253 - RNA, 19 nt, Artificial Sequence
  Description of Artificial Sequence: Synthetic oligonucleotide
  Antisense strand to SEQ ID NO: 2278252
uguuucccaccaaacucua

SEQ ID NO: 2278254 - RNA, 19 nt, Artificial Sequence
  Description of Artificial Sequence: Synthetic oligonucleotide
  Sense strand starting at position 2652 of SEQ ID NO: 1884608
cuuacaacgugacuuguua

SEQ ID NO: 2278255 - RNA, 19 nt, Artificial Sequence
  Description of Artificial Sequence: Synthetic oligonucleotide
  Antisense strand to SEQ ID NO: 2278254
uaacaagucacguuguaag

SEQ ID NO: 2278256 - RNA, 19 nt, Artificial Sequence
  Description of Artificial Sequence: Synthetic oligonucleotide
  Sense strand starting at position 2656 of SEQ ID NO: 1884608
caacgugacuuguuauaac

SEQ ID NO: 2278257 - RNA, 19 nt, Artificial Sequence
  Description of Artificial Sequence: Synthetic oligonucleotide
  Antisense strand to SEQ ID NO: 2278256
guuauaacaagucacguug

SEQ ID NO: 2278258 - RNA, 19 nt, Artificial Sequence
  Description of Artificial Sequence: Synthetic oligonucleotide
  Sense strand starting at position 2886 of SEQ ID NO: 1884608
gugugucuucaggaagccu

SEQ ID NO: 2278259 - RNA, 19 nt, Artificial Sequence
  Description of Artificial Sequence: Synthetic oligonucleotide
  Antisense strand to SEQ ID NO: 2278258
aggcuuccugaagacacac

SEQ ID NO: 2278260 - RNA, 19 nt, Artificial Sequence
  Description of Artificial Sequence: Synthetic oligonucleotide
  Sense strand starting at position 2919 of SEQ ID NO: 1884608
uugugauaggucugaccua

SEQ ID NO: 2278261 - RNA, 19 nt, Artificial Sequence
  Description of Artificial Sequence: Synthetic oligonucleotide
  Antisense strand to SEQ ID NO: 2278260
uaggucagaccuaucacaa

SEQ ID NO: 2278262 - RNA, 19 nt, Artificial Sequence
  Description of Artificial Sequence: Synthetic oligonucleotide
  Sense strand starting at position 2931 of SEQ ID NO: 1884608
ugaccuauauuggugaaca

SEQ ID NO: 2278263 - RNA, 19 nt, Artificial Sequence
  Description of Artificial Sequence: Synthetic oligonucleotide
  Antisense strand to SEQ ID NO: 2278262
uguucaccaauauagguca

SEQ ID NO: 2278264 - RNA, 19 nt, Artificial Sequence
  Description of Artificial Sequence: Synthetic oligonucleotide
  Sense strand starting at position 3196 of SEQ ID NO: 1884608
gggauugugcugugacuuc

SEQ ID NO: 2278265 - RNA, 19 nt, Artificial Sequence
  Description of Artificial Sequence: Synthetic oligonucleotide
  Antisense strand to SEQ ID NO: 2278264
gaagucacagcacaauccc

SEQ ID NO: 2278266 - RNA, 19 nt, Artificial Sequence
  Description of Artificial Sequence: Synthetic oligonucleotide
  Sense strand starting at position 3203 of SEQ ID NO: 1884608
ugcugugacuucccaaaua

SEQ ID NO: 2278267 - RNA, 19 nt, Artificial Sequence
  Description of Artificial Sequence: Synthetic oligonucleotide
  Antisense strand to SEQ ID NO: 2278266
uauuugggaagucacagca

SEQ ID NO: 2278268 - RNA, 19 nt, Artificial Sequence
  Description of Artificial Sequence: Synthetic oligonucleotide
  Sense strand starting at position 3265 of SEQ ID NO: 1884608
accugauuauuaguagaca

SEQ ID NO: 2278269 - RNA, 19 nt, Artificial Sequence
  Description of Artificial Sequence: Synthetic oligonucleotide
  Antisense strand to SEQ ID NO: 2278268
ugucuacuaauaaucaggu

SEQ ID NO: 2278270 - RNA, 19 nt, Artificial Sequence
  Description of Artificial Sequence: Synthetic oligonucleotide
  Sense strand starting at position 3625 of SEQ ID NO: 1884608
aagagagaaucagauagua

SEQ ID NO: 2278271 - RNA, 19 nt, Artificial Sequence
  Description of Artificial Sequence: Synthetic oligonucleotide
  Antisense strand to SEQ ID NO: 2278270
uacuaucugauucucucuu

SEQ ID NO: 2278272 - RNA, 19 nt, Artificial Sequence
  Description of Artificial Sequence: Synthetic oligonucleotide
  Sense strand starting at position 3722 of SEQ ID NO: 1884608
ggcaauauauacccaaaug

SEQ ID NO: 2278273 - RNA, 19 nt, Artificial Sequence
  Description of Artificial Sequence: Synthetic oligonucleotide
  Antisense strand to SEQ ID NO: 2278272
cauuuggguauauauugcc

SEQ ID NO: 2278274 - RNA, 19 nt, Artificial Sequence
  Description of Artificial Sequence: Synthetic oligonucleotide
  Sense strand starting at position 3766 of SEQ ID NO: 1884608
uuauuuaugccugggugca

SEQ ID NO: 2278275 - RNA, 19 nt, Artificial Sequence
  Description of Artificial Sequence: Synthetic oligonucleotide
  Antisense strand to SEQ ID NO: 2278274
ugcacccaggcauaaauaa

SEQ ID NO: 2278276 - RNA, 19 nt, Artificial Sequence
  Description of Artificial Sequence: Synthetic oligonucleotide
  Sense strand starting at position 23 of SEQ ID NO: 1884609
uuccuaaaucguuaaggua

SEQ ID NO: 2278277 - RNA, 19 nt, Artificial Sequence
  Description of Artificial Sequence: Synthetic oligonucleotide
  Antisense strand to SEQ ID NO: 2278276
uaccuuaacgauuuaggaa

SEQ ID NO: 2278278 - RNA, 19 nt, Artificial Sequence
  Description of Artificial Sequence: Synthetic oligonucleotide
  Sense strand starting at position 85 of SEQ ID NO: 1884609
uuuggugaauuugauagau

SEQ ID NO: 2278279 - RNA, 19 nt, Artificial Sequence
  Description of Artificial Sequence: Synthetic oligonucleotide
  Antisense strand to SEQ ID NO: 2278278
aucuaucaaauucaccaaa

SEQ ID NO: 2278280 - RNA, 19 nt, Artificial Sequence
  Description of Artificial Sequence: Synthetic oligonucleotide
  Sense strand starting at position 87 of SEQ ID NO: 1884609
uggugaauuugauagauaa

SEQ ID NO: 2278281 - RNA, 19 nt, Artificial Sequence
  Description of Artificial Sequence: Synthetic oligonucleotide
  Antisense strand to SEQ ID NO: 2278280
uuaucuaucaaauucacca

SEQ ID NO: 2278282 - RNA, 19 nt, Artificial Sequence
  Description of Artificial Sequence: Synthetic oligonucleotide
  Sense strand starting at position 254 of SEQ ID NO: 1884609
ggaacaaguuacccuuuga

SEQ ID NO: 2278283 - RNA, 19 nt, Artificial Sequence
  Description of Artificial Sequence: Synthetic oligonucleotide
  Antisense strand to SEQ ID NO: 2278282
ucaaaggguaacuuguucc

SEQ ID NO: 2278284 - RNA, 19 nt, Artificial Sequence
  Description of Artificial Sequence: Synthetic oligonucleotide
  Sense strand starting at position 286 of SEQ ID NO: 1884609
cugucaucacuggaaguau

SEQ ID NO: 2278285 - RNA, 19 nt, Artificial Sequence
  Description of Artificial Sequence: Synthetic oligonucleotide
  Antisense strand to SEQ ID NO: 2278284
auacuuccagugaugacag

SEQ ID NO: 2278286 - RNA, 19 nt, Artificial Sequence
  Description of Artificial Sequence: Synthetic oligonucleotide
  Sense strand starting at position 294 of SEQ ID NO: 1884609
acuggaaguauguaagcau

SEQ ID NO: 2278287 - RNA, 19 nt, Artificial Sequence
  Description of Artificial Sequence: Synthetic oligonucleotide
  Antisense strand to SEQ ID NO: 2278286
augcuuacauacuuccagu

SEQ ID NO: 2278288 - RNA, 19 nt, Artificial Sequence
  Description of Artificial Sequence: Synthetic oligonucleotide
  Sense strand starting at position 395 of SEQ ID NO: 1884609
uguaguaaggauugauuga

SEQ ID NO: 2278289 - RNA, 19 nt, Artificial Sequence
  Description of Artificial Sequence: Synthetic oligonucleotide
  Antisense strand to SEQ ID NO: 2278288
ucaaucaauccuuacuaca

SEQ ID NO: 2278290 - RNA, 19 nt, Artificial Sequence
  Description of Artificial Sequence: Synthetic oligonucleotide
  Sense strand starting at position 409 of SEQ ID NO: 1884609
auugauugauugucuuuac

SEQ ID NO: 2278291 - RNA, 19 nt, Artificial Sequence
  Description of Artificial Sequence: Synthetic oligonucleotide
  Antisense strand to SEQ ID NO: 2278290
guaaagacaaucaaucaau

SEQ ID NO: 2278292 - RNA, 19 nt, Artificial Sequence
  Description of Artificial Sequence: Synthetic oligonucleotide
  Sense strand starting at position 410 of SEQ ID NO: 1884609
uugauugauugucuuuaca

SEQ ID NO: 2278293 - RNA, 19 nt, Artificial Sequence
  Description of Artificial Sequence: Synthetic oligonucleotide
  Antisense strand to SEQ ID NO: 2278292
uguaaagacaaucaaucaa

SEQ ID NO: 2278294 - RNA, 19 nt, Artificial Sequence
  Description of Artificial Sequence: Synthetic oligonucleotide
  Sense strand starting at position 508 of SEQ ID NO: 1884609
gucagaaauacauaguagu

SEQ ID NO: 2278295 - RNA, 19 nt, Artificial Sequence
  Description of Artificial Sequence: Synthetic oligonucleotide
  Antisense strand to SEQ ID NO: 2278294
acuacuauguauuucugac

SEQ ID NO: 2278296 - RNA, 19 nt, Artificial Sequence
  Description of Artificial Sequence: Synthetic oligonucleotide
  Sense strand starting at position 537 of SEQ ID NO: 1884609
gugagauacuuacucaaca

SEQ ID NO: 2278297 - RNA, 19 nt, Artificial Sequence
  Description of Artificial Sequence: Synthetic oligonucleotide
  Antisense strand to SEQ ID NO: 2278296
uguugaguaaguaucucac

SEQ ID NO: 2278298 - RNA, 19 nt, Artificial Sequence
  Description of Artificial Sequence: Synthetic oligonucleotide
  Sense strand starting at position 577 of SEQ ID NO: 1884609
gagccuuugcauuacuaga

SEQ ID NO: 2278299 - RNA, 19 nt, Artificial Sequence
  Description of Artificial Sequence: Synthetic oligonucleotide
  Antisense strand to SEQ ID NO: 2278298
ucuaguaaugcaaaggcuc

SEQ ID NO: 2278300 - RNA, 19 nt, Artificial Sequence
  Description of Artificial Sequence: Synthetic oligonucleotide
  Sense strand starting at position 668 of SEQ ID NO: 1884609
gcauuuaugucauuccuug

SEQ ID NO: 2278301 - RNA, 19 nt, Artificial Sequence
  Description of Artificial Sequence: Synthetic oligonucleotide
  Antisense strand to SEQ ID NO: 2278300
caaggaaugacauaaaugc

SEQ ID NO: 2278302 - RNA, 19 nt, Artificial Sequence
  Description of Artificial Sequence: Synthetic oligonucleotide
  Sense strand starting at position 808 of SEQ ID NO: 1884609
gcaagauuuccauguaugu

SEQ ID NO: 2278303 - RNA, 19 nt, Artificial Sequence
  Description of Artificial Sequence: Synthetic oligonucleotide
  Antisense strand to SEQ ID NO: 2278302
acauacauggaaaucuugc

SEQ ID NO: 2278304 - RNA, 19 nt, Artificial Sequence
  Description of Artificial Sequence: Synthetic oligonucleotide
  Sense strand starting at position 817 of SEQ ID NO: 1884609
ccauguaugucacuggaua

SEQ ID NO: 2278305 - RNA, 19 nt, Artificial Sequence
  Description of Artificial Sequence: Synthetic oligonucleotide
  Antisense strand to SEQ ID NO: 2278304
uauccagugacauacaugg

SEQ ID NO: 2278306 - RNA, 19 nt, Artificial Sequence
  Description of Artificial Sequence: Synthetic oligonucleotide
  Sense strand starting at position 818 of SEQ ID NO: 1884609
cauguaugucacuggauaa

SEQ ID NO: 2278307 - RNA, 19 nt, Artificial Sequence
  Description of Artificial Sequence: Synthetic oligonucleotide
  Antisense strand to SEQ ID NO: 2278306
uuauccagugacauacaug

SEQ ID NO: 2278308 - RNA, 19 nt, Artificial Sequence
  Description of Artificial Sequence: Synthetic oligonucleotide
  Sense strand starting at position 819 of SEQ ID NO: 1884609
auguaugucacuggauaag

SEQ ID NO: 2278309 - RNA, 19 nt, Artificial Sequence
  Description of Artificial Sequence: Synthetic oligonucleotide
  Antisense strand to SEQ ID NO: 2278308
cuuauccagugacauacau

SEQ ID NO: 2278310 - RNA, 19 nt, Artificial Sequence
  Description of Artificial Sequence: Synthetic oligonucleotide
  Sense strand starting at position 880 of SEQ ID NO: 1884609
uucuauuguggauaaaucu

SEQ ID NO: 2278311 - RNA, 19 nt, Artificial Sequence
  Description of Artificial Sequence: Synthetic oligonucleotide
  Antisense strand to SEQ ID NO: 2278310
agauuuauccacaauagaa

SEQ ID NO: 2278312 - RNA, 19 nt, Artificial Sequence
  Description of Artificial Sequence: Synthetic oligonucleotide
  Sense strand starting at position 960 of SEQ ID NO: 1884609
gugcucagaggucaagaaa

SEQ ID NO: 2278313 - RNA, 19 nt, Artificial Sequence
  Description of Artificial Sequence: Synthetic oligonucleotide
  Antisense strand to SEQ ID NO: 2278312
uuucuugaccucugagcac

SEQ ID NO: 2278314 - RNA, 19 nt, Artificial Sequence
  Description of Artificial Sequence: Synthetic oligonucleotide
  Sense strand starting at position 1007 of SEQ ID NO: 1884609
aacugugugccugcuuuau

SEQ ID NO: 2278315 - RNA, 19 nt, Artificial Sequence
  Description of Artificial Sequence: Synthetic oligonucleotide
  Antisense strand to SEQ ID NO: 2278314
auaaagcaggcacacaguu

SEQ ID NO: 2278316 - RNA, 19 nt, Artificial Sequence
  Description of Artificial Sequence: Synthetic oligonucleotide
  Sense strand starting at position 1231 of SEQ ID NO: 1884609
gccugugaugcacuagugu

SEQ ID NO: 2278317 - RNA, 19 nt, Artificial Sequence
  Description of Artificial Sequence: Synthetic oligonucleotide
  Antisense strand to SEQ ID NO: 2278316
acacuagugcaucacaggc

SEQ ID NO: 2278318 - RNA, 19 nt, Artificial Sequence
  Description of Artificial Sequence: Synthetic oligonucleotide
  Sense strand starting at position 1268 of SEQ ID NO: 1884609
ugaccuuucccugaaguac

SEQ ID NO: 2278319 - RNA, 19 nt, Artificial Sequence
  Description of Artificial Sequence: Synthetic oligonucleotide
  Antisense strand to SEQ ID NO: 2278318
guacuucagggaaagguca

SEQ ID NO: 2278320 - RNA, 19 nt, Artificial Sequence
  Description of Artificial Sequence: Synthetic oligonucleotide
  Sense strand starting at position 1959 of SEQ ID NO: 1884609
aggaaucccaaaugucgaa

SEQ ID NO: 2278321 - RNA, 19 nt, Artificial Sequence
  Description of Artificial Sequence: Synthetic oligonucleotide
  Antisense strand to SEQ ID NO: 2278320
uucgacauuugggauuccu

SEQ ID NO: 2278322 - RNA, 19 nt, Artificial Sequence
  Description of Artificial Sequence: Synthetic oligonucleotide
  Sense strand starting at position 1966 of SEQ ID NO: 1884609
ccaaaugucgaauagccuu

SEQ ID NO: 2278323 - RNA, 19 nt, Artificial Sequence
  Description of Artificial Sequence: Synthetic oligonucleotide
  Antisense strand to SEQ ID NO: 2278322
aaggcuauucgacauuugg

SEQ ID NO: 2278324 - RNA, 19 nt, Artificial Sequence
  Description of Artificial Sequence: Synthetic oligonucleotide
  Sense strand starting at position 2373 of SEQ ID NO: 1884609
ccuggauuucucugcagca

SEQ ID NO: 2278325 - RNA, 19 nt, Artificial Sequence
  Description of Artificial Sequence: Synthetic oligonucleotide
  Antisense strand to SEQ ID NO: 2278324
ugcugcagagaaauccagg

SEQ ID NO: 2278326 - RNA, 19 nt, Artificial Sequence
  Description of Artificial Sequence: Synthetic oligonucleotide
  Sense strand starting at position 2382 of SEQ ID NO: 1884609
cucugcagcagggauaaau

SEQ ID NO: 2278327 - RNA, 19 nt, Artificial Sequence
  Description of Artificial Sequence: Synthetic oligonucleotide
  Antisense strand to SEQ ID NO: 2278326
auuuaucccugcugcagag

SEQ ID NO: 2278328 - RNA, 19 nt, Artificial Sequence
  Description of Artificial Sequence: Synthetic oligonucleotide
  Sense strand starting at position 2391 of SEQ ID NO: 1884609
agggauaaauguguccagu

SEQ ID NO: 2278329 - RNA, 19 nt, Artificial Sequence
  Description of Artificial Sequence: Synthetic oligonucleotide
  Antisense strand to SEQ ID NO: 2278328
acuggacacauuuaucccu

SEQ ID NO: 2278330 - RNA, 19 nt, Artificial Sequence
  Description of Artificial Sequence: Synthetic oligonucleotide
  Sense strand starting at position 2394 of SEQ ID NO: 1884609
gauaaauguguccaguuuc

SEQ ID NO: 2278331 - RNA, 19 nt, Artificial Sequence
  Description of Artificial Sequence: Synthetic oligonucleotide
  Antisense strand to SEQ ID NO: 2278330
gaaacuggacacauuuauc

SEQ ID NO: 2278332 - RNA, 19 nt, Artificial Sequence
  Description of Artificial Sequence: Synthetic oligonucleotide
  Sense strand starting at position 3050 of SEQ ID NO: 1884609
ugaaguuuggcucauuaug

SEQ ID NO: 2278333 - RNA, 19 nt, Artificial Sequence
  Description of Artificial Sequence: Synthetic oligonucleotide
  Antisense strand to SEQ ID NO: 2278332
cauaaugagccaaacuuca

SEQ ID NO: 2278334 - RNA, 19 nt, Artificial Sequence
  Description of Artificial Sequence: Synthetic oligonucleotide
  Sense strand starting at position 3094 of SEQ ID NO: 1884609
gcccauuuccugcgaugau

SEQ ID NO: 2278335 - RNA, 19 nt, Artificial Sequence
  Description of Artificial Sequence: Synthetic oligonucleotide
  Antisense strand to SEQ ID NO: 2278334
aucaucgcaggaaaugggc

SEQ ID NO: 2278336 - RNA, 19 nt, Artificial Sequence
  Description of Artificial Sequence: Synthetic oligonucleotide
  Sense strand starting at position 3122 of SEQ ID NO: 1884609
gaauguguagaguauuaag

SEQ ID NO: 2278337 - RNA, 19 nt, Artificial Sequence
  Description of Artificial Sequence: Synthetic oligonucleotide
  Antisense strand to SEQ ID NO: 2278336
cuuaauacucuacacauuc

SEQ ID NO: 2278338 - RNA, 19 nt, Artificial Sequence
  Description of Artificial Sequence: Synthetic oligonucleotide
  Sense strand starting at position 3178 of SEQ ID NO: 1884609
guaggugggccucagagau

SEQ ID NO: 2278339 - RNA, 19 nt, Artificial Sequence
  Description of Artificial Sequence: Synthetic oligonucleotide
  Antisense strand to SEQ ID NO: 2278338
aucucugaggcccaccuac

SEQ ID NO: 2278340 - RNA, 19 nt, Artificial Sequence
  Description of Artificial Sequence: Synthetic oligonucleotide
  Sense strand starting at position 3194 of SEQ ID NO: 1884609
gauggauacuguccuuaau

SEQ ID NO: 2278341 - RNA, 19 nt, Artificial Sequence
  Description of Artificial Sequence: Synthetic oligonucleotide
  Antisense strand to SEQ ID NO: 2278340
auuaaggacaguauccauc

SEQ ID NO: 2278342 - RNA, 19 nt, Artificial Sequence
  Description of Artificial Sequence: Synthetic oligonucleotide
  Sense strand starting at position 3222 of SEQ ID NO: 1884609
gagugaugaccuggccaaa

SEQ ID NO: 2278343 - RNA, 19 nt, Artificial Sequence
  Description of Artificial Sequence: Synthetic oligonucleotide
  Antisense strand to SEQ ID NO: 2278342
uuuggccaggucaucacuc

SEQ ID NO: 2278344 - RNA, 19 nt, Artificial Sequence
  Description of Artificial Sequence: Synthetic oligonucleotide
  Sense strand starting at position 3348 of SEQ ID NO: 1884609
accguuggucuuuagaaau

SEQ ID NO: 2278345 - RNA, 19 nt, Artificial Sequence
  Description of Artificial Sequence: Synthetic oligonucleotide
  Antisense strand to SEQ ID NO: 2278344
auuucuaaagaccaacggu

SEQ ID NO: 2278346 - RNA, 19 nt, Artificial Sequence
  Description of Artificial Sequence: Synthetic oligonucleotide
  Sense strand starting at position 3542 of SEQ ID NO: 1884609
auuugaagucauugccagu

SEQ ID NO: 2278347 - RNA, 19 nt, Artificial Sequence
  Description of Artificial Sequence: Synthetic oligonucleotide
  Antisense strand to SEQ ID NO: 2278346
acuggcaaugacuucaaau

SEQ ID NO: 2278348 - RNA, 19 nt, Artificial Sequence
  Description of Artificial Sequence: Synthetic oligonucleotide
  Sense strand starting at position 3622 of SEQ ID NO: 1884609
agccguguuggugcagaga

SEQ ID NO: 2278349 - RNA, 19 nt, Artificial Sequence
  Description of Artificial Sequence: Synthetic oligonucleotide
  Antisense strand to SEQ ID NO: 2278348
ucucugcaccaacacggcu

SEQ ID NO: 2278350 - RNA, 19 nt, Artificial Sequence
  Description of Artificial Sequence: Synthetic oligonucleotide
  Sense strand starting at position 3702 of SEQ ID NO: 1884609
ugcuuugaaucuguggaaa

SEQ ID NO: 2278351 - RNA, 19 nt, Artificial Sequence
  Description of Artificial Sequence: Synthetic oligonucleotide
  Antisense strand to SEQ ID NO: 2278350
uuuccacagauucaaagca

SEQ ID NO: 2278352 - RNA, 19 nt, Artificial Sequence
  Description of Artificial Sequence: Synthetic oligonucleotide
  Sense strand starting at position 3937 of SEQ ID NO: 1884609
uucugugugcugcucugaa

SEQ ID NO: 2278353 - RNA, 19 nt, Artificial Sequence
  Description of Artificial Sequence: Synthetic oligonucleotide
  Antisense strand to SEQ ID NO: 2278352
uucagagcagcacacagaa

SEQ ID NO: 2278354 - RNA, 19 nt, Artificial Sequence
  Description of Artificial Sequence: Synthetic oligonucleotide
  Sense strand starting at position 3939 of SEQ ID NO: 1884609
cugugugcugcucugaagu

SEQ ID NO: 2278355 - RNA, 19 nt, Artificial Sequence
  Description of Artificial Sequence: Synthetic oligonucleotide
  Antisense strand to SEQ ID NO: 2278354
acuucagagcagcacacag

SEQ ID NO: 2278356 - RNA, 19 nt, Artificial Sequence
  Description of Artificial Sequence: Synthetic oligonucleotide
  Sense strand starting at position 70 of SEQ ID NO: 1884610
acuugccuuccucaaggau

SEQ ID NO: 2278357 - RNA, 19 nt, Artificial Sequence
  Description of Artificial Sequence: Synthetic oligonucleotide
  Antisense strand to SEQ ID NO: 2278356
auccuugaggaaggcaagu

SEQ ID NO: 2278358 - RNA, 19 nt, Artificial Sequence
  Description of Artificial Sequence: Synthetic oligonucleotide
  Sense strand starting at position 268 of SEQ ID NO: 1884610
ggagugguccagggagcau

SEQ ID NO: 2278359 - RNA, 19 nt, Artificial Sequence
  Description of Artificial Sequence: Synthetic oligonucleotide
  Antisense strand to SEQ ID NO: 2278358
augcucccuggaccacucc

SEQ ID NO: 2278360 - RNA, 19 nt, Artificial Sequence
  Description of Artificial Sequence: Synthetic oligonucleotide
  Sense strand starting at position 684 of SEQ ID NO: 1884610
gagaacaugcucuguccaa

SEQ ID NO: 2278361 - RNA, 19 nt, Artificial Sequence
  Description of Artificial Sequence: Synthetic oligonucleotide
  Antisense strand to SEQ ID NO: 2278360
uuggacagagcauguucuc

SEQ ID NO: 2278362 - RNA, 19 nt, Artificial Sequence
  Description of Artificial Sequence: Synthetic oligonucleotide
  Sense strand starting at position 691 of SEQ ID NO: 1884610
ugcucuguccaagcuguua

SEQ ID NO: 2278363 - RNA, 19 nt, Artificial Sequence
  Description of Artificial Sequence: Synthetic oligonucleotide
  Antisense strand to SEQ ID NO: 2278362
uaacagcuuggacagagca

SEQ ID NO: 2278364 - RNA, 19 nt, Artificial Sequence
  Description of Artificial Sequence: Synthetic oligonucleotide
  Sense strand starting at position 836 of SEQ ID NO: 1884610
caguuauuauuauugggaa

SEQ ID NO: 2278365 - RNA, 19 nt, Artificial Sequence
  Description of Artificial Sequence: Synthetic oligonucleotide
  Antisense strand to SEQ ID NO: 2278364
uucccaauaauaauaacug

SEQ ID NO: 2278366 - RNA, 19 nt, Artificial Sequence
  Description of Artificial Sequence: Synthetic oligonucleotide
  Sense strand starting at position 850 of SEQ ID NO: 1884610
gggaauaaugauggcuguu

SEQ ID NO: 2278367 - RNA, 19 nt, Artificial Sequence
  Description of Artificial Sequence: Synthetic oligonucleotide
  Antisense strand to SEQ ID NO: 2278366
aacagccaucauuauuccc

SEQ ID NO: 2278368 - RNA, 19 nt, Artificial Sequence
  Description of Artificial Sequence: Synthetic oligonucleotide
  Sense strand starting at position 852 of SEQ ID NO: 1884610
gaauaaugauggcuguuga

SEQ ID NO: 2278369 - RNA, 19 nt, Artificial Sequence
  Description of Artificial Sequence: Synthetic oligonucleotide
  Antisense strand to SEQ ID NO: 2278368
ucaacagccaucauuauuc

SEQ ID NO: 2278370 - RNA, 19 nt, Artificial Sequence
  Description of Artificial Sequence: Synthetic oligonucleotide
  Sense strand starting at position 853 of SEQ ID NO: 1884610
aauaaugauggcuguugau

SEQ ID NO: 2278371 - RNA, 19 nt, Artificial Sequence
  Description of Artificial Sequence: Synthetic oligonucleotide
  Antisense strand to SEQ ID NO: 2278370
aucaacagccaucauuauu

SEQ ID NO: 2278372 - RNA, 19 nt, Artificial Sequence
  Description of Artificial Sequence: Synthetic oligonucleotide
  Sense strand starting at position 937 of SEQ ID NO: 1884610
cucauuaucucacuggguu

SEQ ID NO: 2278373 - RNA, 19 nt, Artificial Sequence
  Description of Artificial Sequence: Synthetic oligonucleotide
  Antisense strand to SEQ ID NO: 2278372
aacccagugagauaaugag

SEQ ID NO: 2278374 - RNA, 19 nt, Artificial Sequence
  Description of Artificial Sequence: Synthetic oligonucleotide
  Sense strand starting at position 949 of SEQ ID NO: 1884610
cuggguucucauuggagaa

SEQ ID NO: 2278375 - RNA, 19 nt, Artificial Sequence
  Description of Artificial Sequence: Synthetic oligonucleotide
  Antisense strand to SEQ ID NO: 2278374
uucuccaaugagaacccag

SEQ ID NO: 2278376 - RNA, 19 nt, Artificial Sequence
  Description of Artificial Sequence: Synthetic oligonucleotide
  Sense strand starting at position 950 of SEQ ID NO: 1884610
uggguucucauuggagaau

SEQ ID NO: 2278377 - RNA, 19 nt, Artificial Sequence
  Description of Artificial Sequence: Synthetic oligonucleotide
  Antisense strand to SEQ ID NO: 2278376
auucuccaaugagaaccca

SEQ ID NO: 2278378 - RNA, 19 nt, Artificial Sequence
  Description of Artificial Sequence: Synthetic oligonucleotide
  Sense strand starting at position 1367 of SEQ ID NO: 1884610
gaugucaugucaucauuga

SEQ ID NO: 2278379 - RNA, 19 nt, Artificial Sequence
  Description of Artificial Sequence: Synthetic oligonucleotide
  Antisense strand to SEQ ID NO: 2278378
ucaaugaugacaugacauc

SEQ ID NO: 2278380 - RNA, 19 nt, Artificial Sequence
  Description of Artificial Sequence: Synthetic oligonucleotide
  Sense strand starting at position 1368 of SEQ ID NO: 1884610
augucaugucaucauugau

SEQ ID NO: 2278381 - RNA, 19 nt, Artificial Sequence
  Description of Artificial Sequence: Synthetic oligonucleotide
  Antisense strand to SEQ ID NO: 2278380
aucaaugaugacaugacau

SEQ ID NO: 2278382 - RNA, 19 nt, Artificial Sequence
  Description of Artificial Sequence: Synthetic oligonucleotide
  Sense strand starting at position 1619 of SEQ ID NO: 1884610
auugcaagagcuugaucaa

SEQ ID NO: 2278383 - RNA, 19 nt, Artificial Sequence
  Description of Artificial Sequence: Synthetic oligonucleotide
  Antisense strand to SEQ ID NO: 2278382
uugaucaagcucuugcaau

SEQ ID NO: 2278384 - RNA, 19 nt, Artificial Sequence
  Description of Artificial Sequence: Synthetic oligonucleotide
  Sense strand starting at position 1620 of SEQ ID NO: 1884610
uugcaagagcuugaucaag

SEQ ID NO: 2278385 - RNA, 19 nt, Artificial Sequence
  Description of Artificial Sequence: Synthetic oligonucleotide
  Antisense strand to SEQ ID NO: 2278384
cuugaucaagcucuugcaa

SEQ ID NO: 2278386 - RNA, 19 nt, Artificial Sequence
  Description of Artificial Sequence: Synthetic oligonucleotide
  Sense strand starting at position 1813 of SEQ ID NO: 1884610
ggccucucuguuuauaaug

SEQ ID NO: 2278387 - RNA, 19 nt, Artificial Sequence
  Description of Artificial Sequence: Synthetic oligonucleotide
  Antisense strand to SEQ ID NO: 2278386
cauuauaaacagagaggcc

SEQ ID NO: 2278388 - RNA, 19 nt, Artificial Sequence
  Description of Artificial Sequence: Synthetic oligonucleotide
  Sense strand starting at position 1862 of SEQ ID NO: 1884610
cuggucuuccuuuaagauu

SEQ ID NO: 2278389 - RNA, 19 nt, Artificial Sequence
  Description of Artificial Sequence: Synthetic oligonucleotide
  Antisense strand to SEQ ID NO: 2278388
aaucuuaaaggaagaccag

SEQ ID NO: 2278390 - RNA, 19 nt, Artificial Sequence
  Description of Artificial Sequence: Synthetic oligonucleotide
  Sense strand starting at position 1876 of SEQ ID NO: 1884610
agauuuagcccagguguuu

SEQ ID NO: 2278391 - RNA, 19 nt, Artificial Sequence
  Description of Artificial Sequence: Synthetic oligonucleotide
  Antisense strand to SEQ ID NO: 2278390
aaacaccugggcuaaaucu

SEQ ID NO: 2278392 - RNA, 19 nt, Artificial Sequence
  Description of Artificial Sequence: Synthetic oligonucleotide
  Sense strand starting at position 1991 of SEQ ID NO: 1884610
accuguauuuguccuguuu

SEQ ID NO: 2278393 - RNA, 19 nt, Artificial Sequence
  Description of Artificial Sequence: Synthetic oligonucleotide
  Antisense strand to SEQ ID NO: 2278392
aaacaggacaaauacaggu

SEQ ID NO: 2278394 - RNA, 19 nt, Artificial Sequence
  Description of Artificial Sequence: Synthetic oligonucleotide
  Sense strand starting at position 2751 of SEQ ID NO: 1884610
cuaggcuuucuacaauugu

SEQ ID NO: 2278395 - RNA, 19 nt, Artificial Sequence
  Description of Artificial Sequence: Synthetic oligonucleotide
  Antisense strand to SEQ ID NO: 2278394
acaauuguagaaagccuag

SEQ ID NO: 2278396 - RNA, 19 nt, Artificial Sequence
  Description of Artificial Sequence: Synthetic oligonucleotide
  Sense strand starting at position 2835 of SEQ ID NO: 1884610
ggcauauaagaucaguguu

SEQ ID NO: 2278397 - RNA, 19 nt, Artificial Sequence
  Description of Artificial Sequence: Synthetic oligonucleotide
  Antisense strand to SEQ ID NO: 2278396
aacacugaucuuauaugcc

SEQ ID NO: 2278398 - RNA, 19 nt, Artificial Sequence
  Description of Artificial Sequence: Synthetic oligonucleotide
  Sense strand starting at position 2838 of SEQ ID NO: 1884610
auauaagaucaguguugug

SEQ ID NO: 2278399 - RNA, 19 nt, Artificial Sequence
  Description of Artificial Sequence: Synthetic oligonucleotide
  Antisense strand to SEQ ID NO: 2278398
cacaacacugaucuuauau

SEQ ID NO: 2278400 - RNA, 19 nt, Artificial Sequence
  Description of Artificial Sequence: Synthetic oligonucleotide
  Sense strand starting at position 2845 of SEQ ID NO: 1884610
aucaguguuguguaaacac

SEQ ID NO: 2278401 - RNA, 19 nt, Artificial Sequence
  Description of Artificial Sequence: Synthetic oligonucleotide
  Antisense strand to SEQ ID NO: 2278400
guguuuacacaacacugau

SEQ ID NO: 2278402 - RNA, 19 nt, Artificial Sequence
  Description of Artificial Sequence: Synthetic oligonucleotide
  Sense strand starting at position 2999 of SEQ ID NO: 1884610
aguugucugggucauaaau

SEQ ID NO: 2278403 - RNA, 19 nt, Artificial Sequence
  Description of Artificial Sequence: Synthetic oligonucleotide
  Antisense strand to SEQ ID NO: 2278402
auuuaugacccagacaacu

SEQ ID NO: 2278404 - RNA, 19 nt, Artificial Sequence
  Description of Artificial Sequence: Synthetic oligonucleotide
  Sense strand starting at position 3036 of SEQ ID NO: 1884610
uguccuaagccauagcaga

SEQ ID NO: 2278405 - RNA, 19 nt, Artificial Sequence
  Description of Artificial Sequence: Synthetic oligonucleotide
  Antisense strand to SEQ ID NO: 2278404
ucugcuauggcuuaggaca

SEQ ID NO: 2278406 - RNA, 19 nt, Artificial Sequence
  Description of Artificial Sequence: Synthetic oligonucleotide
  Sense strand starting at position 3101 of SEQ ID NO: 1884610
caaccugugucauugacag

SEQ ID NO: 2278407 - RNA, 19 nt, Artificial Sequence
  Description of Artificial Sequence: Synthetic oligonucleotide
  Antisense strand to SEQ ID NO: 2278406
cugucaaugacacagguug

SEQ ID NO: 2278408 - RNA, 19 nt, Artificial Sequence
  Description of Artificial Sequence: Synthetic oligonucleotide
  Sense strand starting at position 3143 of SEQ ID NO: 1884610
ggugcacugauuugcccaa

SEQ ID NO: 2278409 - RNA, 19 nt, Artificial Sequence
  Description of Artificial Sequence: Synthetic oligonucleotide
  Antisense strand to SEQ ID NO: 2278408
uugggcaaaucagugcacc

SEQ ID NO: 2278410 - RNA, 19 nt, Artificial Sequence
  Description of Artificial Sequence: Synthetic oligonucleotide
  Sense strand starting at position 3242 of SEQ ID NO: 1884610
aucagaaaugcucaggcuu

SEQ ID NO: 2278411 - RNA, 19 nt, Artificial Sequence
  Description of Artificial Sequence: Synthetic oligonucleotide
  Antisense strand to SEQ ID NO: 2278410
aagccugagcauuucugau

SEQ ID NO: 2278412 - RNA, 19 nt, Artificial Sequence
  Description of Artificial Sequence: Synthetic oligonucleotide
  Sense strand starting at position 3289 of SEQ ID NO: 1884610
gaaugaauuucuuaagugg

SEQ ID NO: 2278413 - RNA, 19 nt, Artificial Sequence
  Description of Artificial Sequence: Synthetic oligonucleotide
  Antisense strand to SEQ ID NO: 2278412
ccacuuaagaaauucauuc

SEQ ID NO: 2278414 - RNA, 19 nt, Artificial Sequence
  Description of Artificial Sequence: Synthetic oligonucleotide
  Sense strand starting at position 3334 of SEQ ID NO: 1884610
caccaaacuuggucugagu

SEQ ID NO: 2278415 - RNA, 19 nt, Artificial Sequence
  Description of Artificial Sequence: Synthetic oligonucleotide
  Antisense strand to SEQ ID NO: 2278414
acucagaccaaguuuggug

SEQ ID NO: 2278416 - RNA, 19 nt, Artificial Sequence
  Description of Artificial Sequence: Synthetic oligonucleotide
  Sense strand starting at position 3336 of SEQ ID NO: 1884610
ccaaacuuggucugaguga

SEQ ID NO: 2278417 - RNA, 19 nt, Artificial Sequence
  Description of Artificial Sequence: Synthetic oligonucleotide
  Antisense strand to SEQ ID NO: 2278416
ucacucagaccaaguuugg

SEQ ID NO: 2278418 - RNA, 19 nt, Artificial Sequence
  Description of Artificial Sequence: Synthetic oligonucleotide
  Sense strand starting at position 3341 of SEQ ID NO: 1884610
cuuggucugagugaaauag

SEQ ID NO: 2278419 - RNA, 19 nt, Artificial Sequence
  Description of Artificial Sequence: Synthetic oligonucleotide
  Antisense strand to SEQ ID NO: 2278418
cuauuucacucagaccaag

SEQ ID NO: 2278420 - RNA, 19 nt, Artificial Sequence
  Description of Artificial Sequence: Synthetic oligonucleotide
  Sense strand starting at position 3402 of SEQ ID NO: 1884610
guuagugauguggaaacca

SEQ ID NO: 2278421 - RNA, 19 nt, Artificial Sequence
  Description of Artificial Sequence: Synthetic oligonucleotide
  Antisense strand to SEQ ID NO: 2278420
ugguuuccacaucacuaac

SEQ ID NO: 2278422 - RNA, 19 nt, Artificial Sequence
  Description of Artificial Sequence: Synthetic oligonucleotide
  Sense strand starting at position 3526 of SEQ ID NO: 1884610
cgagaaccugcccaucuuu

SEQ ID NO: 2278423 - RNA, 19 nt, Artificial Sequence
  Description of Artificial Sequence: Synthetic oligonucleotide
  Antisense strand to SEQ ID NO: 2278422
aaagaugggcagguucucg

SEQ ID NO: 2278424 - RNA, 19 nt, Artificial Sequence
  Description of Artificial Sequence: Synthetic oligonucleotide
  Sense strand starting at position 3595 of SEQ ID NO: 1884610
auagucuuguucccacaga

SEQ ID NO: 2278425 - RNA, 19 nt, Artificial Sequence
  Description of Artificial Sequence: Synthetic oligonucleotide
  Antisense strand to SEQ ID NO: 2278424
ucugugggaacaagacuau

SEQ ID NO: 2278426 - RNA, 19 nt, Artificial Sequence
  Description of Artificial Sequence: Synthetic oligonucleotide
  Sense strand starting at position 3631 of SEQ ID NO: 1884610
uaccuaucacaucguggaa

SEQ ID NO: 2278427 - RNA, 19 nt, Artificial Sequence
  Description of Artificial Sequence: Synthetic oligonucleotide
  Antisense strand to SEQ ID NO: 2278426
uuccacgaugugauaggua

SEQ ID NO: 2278428 - RNA, 19 nt, Artificial Sequence
  Description of Artificial Sequence: Synthetic oligonucleotide
  Sense strand starting at position 3717 of SEQ ID NO: 1884610
ccucccuuccuuugaggaa

SEQ ID NO: 2278429 - RNA, 19 nt, Artificial Sequence
  Description of Artificial Sequence: Synthetic oligonucleotide
  Antisense strand to SEQ ID NO: 2278428
uuccucaaaggaagggagg

SEQ ID NO: 2278430 - RNA, 19 nt, Artificial Sequence
  Description of Artificial Sequence: Synthetic oligonucleotide
  Sense strand starting at position 3721 of SEQ ID NO: 1884610
ccuuccuuugaggaaguuu

SEQ ID NO: 2278431 - RNA, 19 nt, Artificial Sequence
  Description of Artificial Sequence: Synthetic oligonucleotide
  Antisense strand to SEQ ID NO: 2278430
aaacuuccucaaaggaagg

SEQ ID NO: 2278432 - RNA, 19 nt, Artificial Sequence
  Description of Artificial Sequence: Synthetic oligonucleotide
  Sense strand starting at position 3730 of SEQ ID NO: 1884610
gaggaaguuuaaccuuucu

SEQ ID NO: 2278433 - RNA, 19 nt, Artificial Sequence
  Description of Artificial Sequence: Synthetic oligonucleotide
  Antisense strand to SEQ ID NO: 2278432
agaaagguuaaacuuccuc

SEQ ID NO: 2278434 - RNA, 19 nt, Artificial Sequence
  Description of Artificial Sequence: Synthetic oligonucleotide
  Sense strand starting at position 3792 of SEQ ID NO: 1884610
ugagauugguaguucagaa

SEQ ID NO: 2278435 - RNA, 19 nt, Artificial Sequence
  Description of Artificial Sequence: Synthetic oligonucleotide
  Antisense strand to SEQ ID NO: 2278434
uucugaacuaccaaucuca

SEQ ID NO: 2278436 - RNA, 19 nt, Artificial Sequence
  Description of Artificial Sequence: Synthetic oligonucleotide
  Sense strand starting at position 69 of SEQ ID NO: 1884611
guggaauucuucucucaug

SEQ ID NO: 2278437 - RNA, 19 nt, Artificial Sequence
  Description of Artificial Sequence: Synthetic oligonucleotide
  Antisense strand to SEQ ID NO: 2278436
caugagagaagaauuccac

SEQ ID NO: 2278438 - RNA, 19 nt, Artificial Sequence
  Description of Artificial Sequence: Synthetic oligonucleotide
  Sense strand starting at position 216 of SEQ ID NO: 1884611
ucacuuaguccugaguuua

SEQ ID NO: 2278439 - RNA, 19 nt, Artificial Sequence
  Description of Artificial Sequence: Synthetic oligonucleotide
  Antisense strand to SEQ ID NO: 2278438
uaaacucaggacuaaguga

SEQ ID NO: 2278440 - RNA, 19 nt, Artificial Sequence
  Description of Artificial Sequence: Synthetic oligonucleotide
  Sense strand starting at position 249 of SEQ ID NO: 1884611
gggagagauucauuggguc

SEQ ID NO: 2278441 - RNA, 19 nt, Artificial Sequence
  Description of Artificial Sequence: Synthetic oligonucleotide
  Antisense strand to SEQ ID NO: 2278440
gacccaaugaaucucuccc

SEQ ID NO: 2278442 - RNA, 19 nt, Artificial Sequence
  Description of Artificial Sequence: Synthetic oligonucleotide
  Sense strand starting at position 427 of SEQ ID NO: 1884611
gcaguuggacaguagagaa

SEQ ID NO: 2278443 - RNA, 19 nt, Artificial Sequence
  Description of Artificial Sequence: Synthetic oligonucleotide
  Antisense strand to SEQ ID NO: 2278442
uucucuacuguccaacugc

SEQ ID NO: 2278444 - RNA, 19 nt, Artificial Sequence
  Description of Artificial Sequence: Synthetic oligonucleotide
  Sense strand starting at position 560 of SEQ ID NO: 1884611
cuagcuucucuagaagaua

SEQ ID NO: 2278445 - RNA, 19 nt, Artificial Sequence
  Description of Artificial Sequence: Synthetic oligonucleotide
  Antisense strand to SEQ ID NO: 2278444
uaucuucuagagaagcuag

SEQ ID NO: 2278446 - RNA, 19 nt, Artificial Sequence
  Description of Artificial Sequence: Synthetic oligonucleotide
  Sense strand starting at position 706 of SEQ ID NO: 1884611
gauggcuauuaugucacaa

SEQ ID NO: 2278447 - RNA, 19 nt, Artificial Sequence
  Description of Artificial Sequence: Synthetic oligonucleotide
  Antisense strand to SEQ ID NO: 2278446
uugugacauaauagccauc

SEQ ID NO: 2278448 - RNA, 19 nt, Artificial Sequence
  Description of Artificial Sequence: Synthetic oligonucleotide
  Sense strand starting at position 817 of SEQ ID NO: 1884611
gaagcaguccauggagaga

SEQ ID NO: 2278449 - RNA, 19 nt, Artificial Sequence
  Description of Artificial Sequence: Synthetic oligonucleotide
  Antisense strand to SEQ ID NO: 2278448
ucucuccauggacugcuuc

SEQ ID NO: 2278450 - RNA, 19 nt, Artificial Sequence
  Description of Artificial Sequence: Synthetic oligonucleotide
  Sense strand starting at position 1069 of SEQ ID NO: 1884611
ggacuuguagccgaucuga

SEQ ID NO: 2278451 - RNA, 19 nt, Artificial Sequence
  Description of Artificial Sequence: Synthetic oligonucleotide
  Antisense strand to SEQ ID NO: 2278450
ucagaucggcuacaagucc

SEQ ID NO: 2278452 - RNA, 19 nt, Artificial Sequence
  Description of Artificial Sequence: Synthetic oligonucleotide
  Sense strand starting at position 1141 of SEQ ID NO: 1884611
gagugaguggcagaauguu

SEQ ID NO: 2278453 - RNA, 19 nt, Artificial Sequence
  Description of Artificial Sequence: Synthetic oligonucleotide
  Antisense strand to SEQ ID NO: 2278452
aacauucugccacucacuc

SEQ ID NO: 2278454 - RNA, 19 nt, Artificial Sequence
  Description of Artificial Sequence: Synthetic oligonucleotide
  Sense strand starting at position 1187 of SEQ ID NO: 1884611
ugagaaggcucaucagauu

SEQ ID NO: 2278455 - RNA, 19 nt, Artificial Sequence
  Description of Artificial Sequence: Synthetic oligonucleotide
  Antisense strand to SEQ ID NO: 2278454
aaucugaugagccuucuca

SEQ ID NO: 2278456 - RNA, 19 nt, Artificial Sequence
  Description of Artificial Sequence: Synthetic oligonucleotide
  Sense strand starting at position 1262 of SEQ ID NO: 1884611
uguccucaacugugaaaug

SEQ ID NO: 2278457 - RNA, 19 nt, Artificial Sequence
  Description of Artificial Sequence: Synthetic oligonucleotide
  Antisense strand to SEQ ID NO: 2278456
cauuucacaguugaggaca

SEQ ID NO: 2278458 - RNA, 19 nt, Artificial Sequence
  Description of Artificial Sequence: Synthetic oligonucleotide
  Sense strand starting at position 1282 of SEQ ID NO: 1884611
ggcugaucauaccuaucua

SEQ ID NO: 2278459 - RNA, 19 nt, Artificial Sequence
  Description of Artificial Sequence: Synthetic oligonucleotide
  Antisense strand to SEQ ID NO: 2278458
uagauagguaugaucagcc

SEQ ID NO: 2278460 - RNA, 19 nt, Artificial Sequence
  Description of Artificial Sequence: Synthetic oligonucleotide
  Sense strand starting at position 1394 of SEQ ID NO: 1884611
ggaguucugacucaguucu

SEQ ID NO: 2278461 - RNA, 19 nt, Artificial Sequence
  Description of Artificial Sequence: Synthetic oligonucleotide
  Antisense strand to SEQ ID NO: 2278460
agaacugagucagaacucc

SEQ ID NO: 2278462 - RNA, 19 nt, Artificial Sequence
  Description of Artificial Sequence: Synthetic oligonucleotide
  Sense strand starting at position 1430 of SEQ ID NO: 1884611
uggauuuccugaggaaagg

SEQ ID NO: 2278463 - RNA, 19 nt, Artificial Sequence
  Description of Artificial Sequence: Synthetic oligonucleotide
  Antisense strand to SEQ ID NO: 2278462
ccuuuccucaggaaaucca

SEQ ID NO: 2278464 - RNA, 19 nt, Artificial Sequence
  Description of Artificial Sequence: Synthetic oligonucleotide
  Sense strand starting at position 1441 of SEQ ID NO: 1884611
aggaaaggccauugaguuu

SEQ ID NO: 2278465 - RNA, 19 nt, Artificial Sequence
  Description of Artificial Sequence: Synthetic oligonucleotide
  Antisense strand to SEQ ID NO: 2278464
aaacucaauggccuuuccu

SEQ ID NO: 2278466 - RNA, 19 nt, Artificial Sequence
  Description of Artificial Sequence: Synthetic oligonucleotide
  Sense strand starting at position 1673 of SEQ ID NO: 1884611
gggccagcagaguauugaa

SEQ ID NO: 2278467 - RNA, 19 nt, Artificial Sequence
  Description of Artificial Sequence: Synthetic oligonucleotide
  Antisense strand to SEQ ID NO: 2278466
uucaauacucugcuggccc

SEQ ID NO: 2278468 - RNA, 19 nt, Artificial Sequence
  Description of Artificial Sequence: Synthetic oligonucleotide
  Sense strand starting at position 1891 of SEQ ID NO: 1884611
ggauguuggagcugauuga

SEQ ID NO: 2278469 - RNA, 19 nt, Artificial Sequence
  Description of Artificial Sequence: Synthetic oligonucleotide
  Antisense strand to SEQ ID NO: 2278468
ucaaucagcuccaacaucc

SEQ ID NO: 2278470 - RNA, 19 nt, Artificial Sequence
  Description of Artificial Sequence: Synthetic oligonucleotide
  Sense strand starting at position 1892 of SEQ ID NO: 1884611
gauguuggagcugauugaa

SEQ ID NO: 2278471 - RNA, 19 nt, Artificial Sequence
  Description of Artificial Sequence: Synthetic oligonucleotide
  Antisense strand to SEQ ID NO: 2278470
uucaaucagcuccaacauc

SEQ ID NO: 2278472 - RNA, 19 nt, Artificial Sequence
  Description of Artificial Sequence: Synthetic oligonucleotide
  Sense strand starting at position 1983 of SEQ ID NO: 1884611
ggaaucuguauguauguau

SEQ ID NO: 2278473 - RNA, 19 nt, Artificial Sequence
  Description of Artificial Sequence: Synthetic oligonucleotide
  Antisense strand to SEQ ID NO: 2278472
auacauacauacagauucc

SEQ ID NO: 2278474 - RNA, 19 nt, Artificial Sequence
  Description of Artificial Sequence: Synthetic oligonucleotide
  Sense strand starting at position 2019 of SEQ ID NO: 1884611
gguucuaguaguuacagga

SEQ ID NO: 2278475 - RNA, 19 nt, Artificial Sequence
  Description of Artificial Sequence: Synthetic oligonucleotide
  Antisense strand to SEQ ID NO: 2278474
uccuguaacuacuagaacc

SEQ ID NO: 2278476 - RNA, 19 nt, Artificial Sequence
  Description of Artificial Sequence: Synthetic oligonucleotide
  Sense strand starting at position 2084 of SEQ ID NO: 1884611
caaagaauuguaugguaau

SEQ ID NO: 2278477 - RNA, 19 nt, Artificial Sequence
  Description of Artificial Sequence: Synthetic oligonucleotide
  Antisense strand to SEQ ID NO: 2278476
auuaccauacaauucuuug

SEQ ID NO: 2278478 - RNA, 19 nt, Artificial Sequence
  Description of Artificial Sequence: Synthetic oligonucleotide
  Sense strand starting at position 2115 of SEQ ID NO: 1884611
gagaguccuccugggacaa

SEQ ID NO: 2278479 - RNA, 19 nt, Artificial Sequence
  Description of Artificial Sequence: Synthetic oligonucleotide
  Antisense strand to SEQ ID NO: 2278478
uugucccaggaggacucuc

SEQ ID NO: 2278480 - RNA, 19 nt, Artificial Sequence
  Description of Artificial Sequence: Synthetic oligonucleotide
  Sense strand starting at position 2224 of SEQ ID NO: 1884611
uuugaugagaaguggcuaa

SEQ ID NO: 2278481 - RNA, 19 nt, Artificial Sequence
  Description of Artificial Sequence: Synthetic oligonucleotide
  Antisense strand to SEQ ID NO: 2278480
uuagccacuucucaucaaa

SEQ ID NO: 2278482 - RNA, 19 nt, Artificial Sequence
  Description of Artificial Sequence: Synthetic oligonucleotide
  Sense strand starting at position 2420 of SEQ ID NO: 1884611
caguuucuggagcauuaua

SEQ ID NO: 2278483 - RNA, 19 nt, Artificial Sequence
  Description of Artificial Sequence: Synthetic oligonucleotide
  Antisense strand to SEQ ID NO: 2278482
uauaaugcuccagaaacug

SEQ ID NO: 2278484 - RNA, 19 nt, Artificial Sequence
  Description of Artificial Sequence: Synthetic oligonucleotide
  Sense strand starting at position 2446 of SEQ ID NO: 1884611
acuacaugguuucuaugau

SEQ ID NO: 2278485 - RNA, 19 nt, Artificial Sequence
  Description of Artificial Sequence: Synthetic oligonucleotide
  Antisense strand to SEQ ID NO: 2278484
aucauagaaaccauguagu

SEQ ID NO: 2278486 - RNA, 19 nt, Artificial Sequence
  Description of Artificial Sequence: Synthetic oligonucleotide
  Sense strand starting at position 2456 of SEQ ID NO: 1884611
uucuaugaugccgaugaua

SEQ ID NO: 2278487 - RNA, 19 nt, Artificial Sequence
  Description of Artificial Sequence: Synthetic oligonucleotide
  Antisense strand to SEQ ID NO: 2278486
uaucaucggcaucauagaa

SEQ ID NO: 2278488 - RNA, 19 nt, Artificial Sequence
  Description of Artificial Sequence: Synthetic oligonucleotide
  Sense strand starting at position 2533 of SEQ ID NO: 1884611
ccuauaugucccuauguug

SEQ ID NO: 2278489 - RNA, 19 nt, Artificial Sequence
  Description of Artificial Sequence: Synthetic oligonucleotide
  Antisense strand to SEQ ID NO: 2278488
caacauagggacauauagg

SEQ ID NO: 2278490 - RNA, 19 nt, Artificial Sequence
  Description of Artificial Sequence: Synthetic oligonucleotide
  Sense strand starting at position 2762 of SEQ ID NO: 1884611
auacgugaagccuaagaga

SEQ ID NO: 2278491 - RNA, 19 nt, Artificial Sequence
  Description of Artificial Sequence: Synthetic oligonucleotide
  Antisense strand to SEQ ID NO: 2278490
ucucuuaggcuucacguau

SEQ ID NO: 2278492 - RNA, 19 nt, Artificial Sequence
  Description of Artificial Sequence: Synthetic oligonucleotide
  Sense strand starting at position 2807 of SEQ ID NO: 1884611
cugaaagguugguccuuga

SEQ ID NO: 2278493 - RNA, 19 nt, Artificial Sequence
  Description of Artificial Sequence: Synthetic oligonucleotide
  Antisense strand to SEQ ID NO: 2278492
ucaaggaccaaccuuucag

SEQ ID NO: 2278494 - RNA, 19 nt, Artificial Sequence
  Description of Artificial Sequence: Synthetic oligonucleotide
  Sense strand starting at position 2810 of SEQ ID NO: 1884611
aaagguugguccuugauga

SEQ ID NO: 2278495 - RNA, 19 nt, Artificial Sequence
  Description of Artificial Sequence: Synthetic oligonucleotide
  Antisense strand to SEQ ID NO: 2278494
ucaucaaggaccaaccuuu

SEQ ID NO: 2278496 - RNA, 19 nt, Artificial Sequence
  Description of Artificial Sequence: Synthetic oligonucleotide
  Sense strand starting at position 2811 of SEQ ID NO: 1884611
aagguugguccuugaugaa

SEQ ID NO: 2278497 - RNA, 19 nt, Artificial Sequence
  Description of Artificial Sequence: Synthetic oligonucleotide
  Antisense strand to SEQ ID NO: 2278496
uucaucaaggaccaaccuu

SEQ ID NO: 2278498 - RNA, 19 nt, Artificial Sequence
  Description of Artificial Sequence: Synthetic oligonucleotide
  Sense strand starting at position 2981 of SEQ ID NO: 1884611
uacugauuccucuggaguu

SEQ ID NO: 2278499 - RNA, 19 nt, Artificial Sequence
  Description of Artificial Sequence: Synthetic oligonucleotide
  Antisense strand to SEQ ID NO: 2278498
aacuccagaggaaucagua

SEQ ID NO: 2278500 - RNA, 19 nt, Artificial Sequence
  Description of Artificial Sequence: Synthetic oligonucleotide
  Sense strand starting at position 3016 of SEQ ID NO: 1884611
ugaccugauccauggguca

SEQ ID NO: 2278501 - RNA, 19 nt, Artificial Sequence
  Description of Artificial Sequence: Synthetic oligonucleotide
  Antisense strand to SEQ ID NO: 2278500
ugacccauggaucagguca

SEQ ID NO: 2278502 - RNA, 19 nt, Artificial Sequence
  Description of Artificial Sequence: Synthetic oligonucleotide
  Sense strand starting at position 3018 of SEQ ID NO: 1884611
accugauccaugggucaga

SEQ ID NO: 2278503 - RNA, 19 nt, Artificial Sequence
  Description of Artificial Sequence: Synthetic oligonucleotide
  Antisense strand to SEQ ID NO: 2278502
ucugacccauggaucaggu

SEQ ID NO: 2278504 - RNA, 19 nt, Artificial Sequence
  Description of Artificial Sequence: Synthetic oligonucleotide
  Sense strand starting at position 3019 of SEQ ID NO: 1884611
ccugauccaugggucagaa

SEQ ID NO: 2278505 - RNA, 19 nt, Artificial Sequence
  Description of Artificial Sequence: Synthetic oligonucleotide
  Antisense strand to SEQ ID NO: 2278504
uucugacccauggaucagg

SEQ ID NO: 2278506 - RNA, 19 nt, Artificial Sequence
  Description of Artificial Sequence: Synthetic oligonucleotide
  Sense strand starting at position 3189 of SEQ ID NO: 1884611
ugcuaauccuauuugguua

SEQ ID NO: 2278507 - RNA, 19 nt, Artificial Sequence
  Description of Artificial Sequence: Synthetic oligonucleotide
  Antisense strand to SEQ ID NO: 2278506
uaaccaaauaggauuagca

SEQ ID NO: 2278508 - RNA, 19 nt, Artificial Sequence
  Description of Artificial Sequence: Synthetic oligonucleotide
  Sense strand starting at position 3202 of SEQ ID NO: 1884611
ugguuauuuaaguguggca

SEQ ID NO: 2278509 - RNA, 19 nt, Artificial Sequence
  Description of Artificial Sequence: Synthetic oligonucleotide
  Antisense strand to SEQ ID NO: 2278508
ugccacacuuaaauaacca

SEQ ID NO: 2278510 - RNA, 19 nt, Artificial Sequence
  Description of Artificial Sequence: Synthetic oligonucleotide
  Sense strand starting at position 3537 of SEQ ID NO: 1884611
cccaaaugccuguaacagu

SEQ ID NO: 2278511 - RNA, 19 nt, Artificial Sequence
  Description of Artificial Sequence: Synthetic oligonucleotide
  Antisense strand to SEQ ID NO: 2278510
acuguuacaggcauuuggg

SEQ ID NO: 2278512 - RNA, 19 nt, Artificial Sequence
  Description of Artificial Sequence: Synthetic oligonucleotide
  Sense strand starting at position 3731 of SEQ ID NO: 1884611
uuacauaacuggguaguuu

SEQ ID NO: 2278513 - RNA, 19 nt, Artificial Sequence
  Description of Artificial Sequence: Synthetic oligonucleotide
  Antisense strand to SEQ ID NO: 2278512
aaacuacccaguuauguaa

SEQ ID NO: 2278514 - RNA, 19 nt, Artificial Sequence
  Description of Artificial Sequence: Synthetic oligonucleotide
  Sense strand starting at position 3735 of SEQ ID NO: 1884611
auaacuggguaguuugaga

SEQ ID NO: 2278515 - RNA, 19 nt, Artificial Sequence
  Description of Artificial Sequence: Synthetic oligonucleotide
  Antisense strand to SEQ ID NO: 2278514
ucucaaacuacccaguuau

SEQ ID NO: 2278516 - RNA, 19 nt, Artificial Sequence
  Description of Artificial Sequence: Synthetic oligonucleotide
  Sense strand starting at position 115 of SEQ ID NO: 1884612
agaccugcuuggcugagaa

SEQ ID NO: 2278517 - RNA, 19 nt, Artificial Sequence
  Description of Artificial Sequence: Synthetic oligonucleotide
  Antisense strand to SEQ ID NO: 2278516
uucucagccaagcaggucu

SEQ ID NO: 2278518 - RNA, 19 nt, Artificial Sequence
  Description of Artificial Sequence: Synthetic oligonucleotide
  Sense strand starting at position 117 of SEQ ID NO: 1884612
accugcuuggcugagaaau

SEQ ID NO: 2278519 - RNA, 19 nt, Artificial Sequence
  Description of Artificial Sequence: Synthetic oligonucleotide
  Antisense strand to SEQ ID NO: 2278518
auuucucagccaagcaggu

SEQ ID NO: 2278520 - RNA, 19 nt, Artificial Sequence
  Description of Artificial Sequence: Synthetic oligonucleotide
  Sense strand starting at position 127 of SEQ ID NO: 1884612
cugagaaaugccugaccuc

SEQ ID NO: 2278521 - RNA, 19 nt, Artificial Sequence
  Description of Artificial Sequence: Synthetic oligonucleotide
  Antisense strand to SEQ ID NO: 2278520
gaggucaggcauuucucag

SEQ ID NO: 2278522 - RNA, 19 nt, Artificial Sequence
  Description of Artificial Sequence: Synthetic oligonucleotide
  Sense strand starting at position 144 of SEQ ID NO: 1884612
ucaggcauuucugguucua

SEQ ID NO: 2278523 - RNA, 19 nt, Artificial Sequence
  Description of Artificial Sequence: Synthetic oligonucleotide
  Antisense strand to SEQ ID NO: 2278522
uagaaccagaaaugccuga

SEQ ID NO: 2278524 - RNA, 19 nt, Artificial Sequence
  Description of Artificial Sequence: Synthetic oligonucleotide
  Sense strand starting at position 146 of SEQ ID NO: 1884612
aggcauuucugguucuauu

SEQ ID NO: 2278525 - RNA, 19 nt, Artificial Sequence
  Description of Artificial Sequence: Synthetic oligonucleotide
  Antisense strand to SEQ ID NO: 2278524
aauagaaccagaaaugccu

SEQ ID NO: 2278526 - RNA, 19 nt, Artificial Sequence
  Description of Artificial Sequence: Synthetic oligonucleotide
  Sense strand starting at position 157 of SEQ ID NO: 1884612
guucuauuucgguggcugu

SEQ ID NO: 2278527 - RNA, 19 nt, Artificial Sequence
  Description of Artificial Sequence: Synthetic oligonucleotide
  Antisense strand to SEQ ID NO: 2278526
acagccaccgaaauagaac

SEQ ID NO: 2278528 - RNA, 19 nt, Artificial Sequence
  Description of Artificial Sequence: Synthetic oligonucleotide
  Sense strand starting at position 280 of SEQ ID NO: 1884612
cacugaaaggcuuagcaga

SEQ ID NO: 2278529 - RNA, 19 nt, Artificial Sequence
  Description of Artificial Sequence: Synthetic oligonucleotide
  Antisense strand to SEQ ID NO: 2278528
ucugcuaagccuuucagug

SEQ ID NO: 2278530 - RNA, 19 nt, Artificial Sequence
  Description of Artificial Sequence: Synthetic oligonucleotide
  Sense strand starting at position 293 of SEQ ID NO: 1884612
agcagagucugcuuaggau

SEQ ID NO: 2278531 - RNA, 19 nt, Artificial Sequence
  Description of Artificial Sequence: Synthetic oligonucleotide
  Antisense strand to SEQ ID NO: 2278530
auccuaagcagacucugcu

SEQ ID NO: 2278532 - RNA, 19 nt, Artificial Sequence
  Description of Artificial Sequence: Synthetic oligonucleotide
  Sense strand starting at position 429 of SEQ ID NO: 1884612
accaguugugguuguaaug

SEQ ID NO: 2278533 - RNA, 19 nt, Artificial Sequence
  Description of Artificial Sequence: Synthetic oligonucleotide
  Antisense strand to SEQ ID NO: 2278532
cauuacaaccacaacuggu

SEQ ID NO: 2278534 - RNA, 19 nt, Artificial Sequence
  Description of Artificial Sequence: Synthetic oligonucleotide
  Sense strand starting at position 463 of SEQ ID NO: 1884612
aggaucuuaugggcuuaaa

SEQ ID NO: 2278535 - RNA, 19 nt, Artificial Sequence
  Description of Artificial Sequence: Synthetic oligonucleotide
  Antisense strand to SEQ ID NO: 2278534
uuuaagcccauaagauccu

SEQ ID NO: 2278536 - RNA, 19 nt, Artificial Sequence
  Description of Artificial Sequence: Synthetic oligonucleotide
  Sense strand starting at position 544 of SEQ ID NO: 1884612
cauucugaguacucgugau

SEQ ID NO: 2278537 - RNA, 19 nt, Artificial Sequence
  Description of Artificial Sequence: Synthetic oligonucleotide
  Antisense strand to SEQ ID NO: 2278536
aucacgaguacucagaaug

SEQ ID NO: 2278538 - RNA, 19 nt, Artificial Sequence
  Description of Artificial Sequence: Synthetic oligonucleotide
  Sense strand starting at position 552 of SEQ ID NO: 1884612
guacucgugaucugccuua

SEQ ID NO: 2278539 - RNA, 19 nt, Artificial Sequence
  Description of Artificial Sequence: Synthetic oligonucleotide
  Antisense strand to SEQ ID NO: 2278538
uaaggcagaucacgaguac

SEQ ID NO: 2278540 - RNA, 19 nt, Artificial Sequence
  Description of Artificial Sequence: Synthetic oligonucleotide
  Sense strand starting at position 557 of SEQ ID NO: 1884612
cgugaucugccuuauucgu

SEQ ID NO: 2278541 - RNA, 19 nt, Artificial Sequence
  Description of Artificial Sequence: Synthetic oligonucleotide
  Antisense strand to SEQ ID NO: 2278540
acgaauaaggcagaucacg

SEQ ID NO: 2278542 - RNA, 19 nt, Artificial Sequence
  Description of Artificial Sequence: Synthetic oligonucleotide
  Sense strand starting at position 559 of SEQ ID NO: 1884612
ugaucugccuuauucguga

SEQ ID NO: 2278543 - RNA, 19 nt, Artificial Sequence
  Description of Artificial Sequence: Synthetic oligonucleotide
  Antisense strand to SEQ ID NO: 2278542
ucacgaauaaggcagauca

SEQ ID NO: 2278544 - RNA, 19 nt, Artificial Sequence
  Description of Artificial Sequence: Synthetic oligonucleotide
  Sense strand starting at position 861 of SEQ ID NO: 1884612
gugugcuuccucucagcau

SEQ ID NO: 2278545 - RNA, 19 nt, Artificial Sequence
  Description of Artificial Sequence: Synthetic oligonucleotide
  Antisense strand to SEQ ID NO: 2278544
augcugagaggaagcacac

SEQ ID NO: 2278546 - RNA, 19 nt, Artificial Sequence
  Description of Artificial Sequence: Synthetic oligonucleotide
  Sense strand starting at position 1339 of SEQ ID NO: 1884612
gcuagcaauuugucuucua

SEQ ID NO: 2278547 - RNA, 19 nt, Artificial Sequence
  Description of Artificial Sequence: Synthetic oligonucleotide
  Antisense strand to SEQ ID NO: 2278546
uagaagacaaauugcuagc

SEQ ID NO: 2278548 - RNA, 19 nt, Artificial Sequence
  Description of Artificial Sequence: Synthetic oligonucleotide
  Sense strand starting at position 1342 of SEQ ID NO: 1884612
agcaauuugucuucuagug

SEQ ID NO: 2278549 - RNA, 19 nt, Artificial Sequence
  Description of Artificial Sequence: Synthetic oligonucleotide
  Antisense strand to SEQ ID NO: 2278548
cacuagaagacaaauugcu

SEQ ID NO: 2278550 - RNA, 19 nt, Artificial Sequence
  Description of Artificial Sequence: Synthetic oligonucleotide
  Sense strand starting at position 1356 of SEQ ID NO: 1884612
uaguguccuggcuaaccaa

SEQ ID NO: 2278551 - RNA, 19 nt, Artificial Sequence
  Description of Artificial Sequence: Synthetic oligonucleotide
  Antisense strand to SEQ ID NO: 2278550
uugguuagccaggacacua

SEQ ID NO: 2278552 - RNA, 19 nt, Artificial Sequence
  Description of Artificial Sequence: Synthetic oligonucleotide
  Sense strand starting at position 1710 of SEQ ID NO: 1884612
cccagauauugaccuugca

SEQ ID NO: 2278553 - RNA, 19 nt, Artificial Sequence
  Description of Artificial Sequence: Synthetic oligonucleotide
  Antisense strand to SEQ ID NO: 2278552
ugcaaggucaauaucuggg

SEQ ID NO: 2278554 - RNA, 19 nt, Artificial Sequence
  Description of Artificial Sequence: Synthetic oligonucleotide
  Sense strand starting at position 1713 of SEQ ID NO: 1884612
agauauugaccuugcaaag

SEQ ID NO: 2278555 - RNA, 19 nt, Artificial Sequence
  Description of Artificial Sequence: Synthetic oligonucleotide
  Antisense strand to SEQ ID NO: 2278554
cuuugcaaggucaauaucu

SEQ ID NO: 2278556 - RNA, 19 nt, Artificial Sequence
  Description of Artificial Sequence: Synthetic oligonucleotide
  Sense strand starting at position 1912 of SEQ ID NO: 1884612
cuguguccuccuuguuaga

SEQ ID NO: 2278557 - RNA, 19 nt, Artificial Sequence
  Description of Artificial Sequence: Synthetic oligonucleotide
  Antisense strand to SEQ ID NO: 2278556
ucuaacaaggaggacacag

SEQ ID NO: 2278558 - RNA, 19 nt, Artificial Sequence
  Description of Artificial Sequence: Synthetic oligonucleotide
  Sense strand starting at position 1914 of SEQ ID NO: 1884612
guguccuccuuguuagaug

SEQ ID NO: 2278559 - RNA, 19 nt, Artificial Sequence
  Description of Artificial Sequence: Synthetic oligonucleotide
  Antisense strand to SEQ ID NO: 2278558
caucuaacaaggaggacac

SEQ ID NO: 2278560 - RNA, 19 nt, Artificial Sequence
  Description of Artificial Sequence: Synthetic oligonucleotide
  Sense strand starting at position 2041 of SEQ ID NO: 1884612
ggcuaauuaggccauguua

SEQ ID NO: 2278561 - RNA, 19 nt, Artificial Sequence
  Description of Artificial Sequence: Synthetic oligonucleotide
  Antisense strand to SEQ ID NO: 2278560
uaacauggccuaauuagcc

SEQ ID NO: 2278562 - RNA, 19 nt, Artificial Sequence
  Description of Artificial Sequence: Synthetic oligonucleotide
  Sense strand starting at position 2043 of SEQ ID NO: 1884612
cuaauuaggccauguuaau

SEQ ID NO: 2278563 - RNA, 19 nt, Artificial Sequence
  Description of Artificial Sequence: Synthetic oligonucleotide
  Antisense strand to SEQ ID NO: 2278562
auuaacauggccuaauuag

SEQ ID NO: 2278564 - RNA, 19 nt, Artificial Sequence
  Description of Artificial Sequence: Synthetic oligonucleotide
  Sense strand starting at position 2049 of SEQ ID NO: 1884612
aggccauguuaauuauguu

SEQ ID NO: 2278565 - RNA, 19 nt, Artificial Sequence
  Description of Artificial Sequence: Synthetic oligonucleotide
  Antisense strand to SEQ ID NO: 2278564
aacauaauuaacauggccu

SEQ ID NO: 2278566 - RNA, 19 nt, Artificial Sequence
  Description of Artificial Sequence: Synthetic oligonucleotide
  Sense strand starting at position 2122 of SEQ ID NO: 1884612
ucaggccacugaugagaau

SEQ ID NO: 2278567 - RNA, 19 nt, Artificial Sequence
  Description of Artificial Sequence: Synthetic oligonucleotide
  Antisense strand to SEQ ID NO: 2278566
auucucaucaguggccuga

SEQ ID NO: 2278568 - RNA, 19 nt, Artificial Sequence
  Description of Artificial Sequence: Synthetic oligonucleotide
  Sense strand starting at position 2244 of SEQ ID NO: 1884612
cacugaugugcaggaagaa

SEQ ID NO: 2278569 - RNA, 19 nt, Artificial Sequence
  Description of Artificial Sequence: Synthetic oligonucleotide
  Antisense strand to SEQ ID NO: 2278568
uucuuccugcacaucagug

SEQ ID NO: 2278570 - RNA, 19 nt, Artificial Sequence
  Description of Artificial Sequence: Synthetic oligonucleotide
  Sense strand starting at position 2373 of SEQ ID NO: 1884612
ugcuucuccugcucuuaga

SEQ ID NO: 2278571 - RNA, 19 nt, Artificial Sequence
  Description of Artificial Sequence: Synthetic oligonucleotide
  Antisense strand to SEQ ID NO: 2278570
ucuaagagcaggagaagca

SEQ ID NO: 2278572 - RNA, 19 nt, Artificial Sequence
  Description of Artificial Sequence: Synthetic oligonucleotide
  Sense strand starting at position 2473 of SEQ ID NO: 1884612
guuuguaagugucuugcca

SEQ ID NO: 2278573 - RNA, 19 nt, Artificial Sequence
  Description of Artificial Sequence: Synthetic oligonucleotide
  Antisense strand to SEQ ID NO: 2278572
uggcaagacacuuacaaac

SEQ ID NO: 2278574 - RNA, 19 nt, Artificial Sequence
  Description of Artificial Sequence: Synthetic oligonucleotide
  Sense strand starting at position 2554 of SEQ ID NO: 1884612
cucccuuuccuggaacuga

SEQ ID NO: 2278575 - RNA, 19 nt, Artificial Sequence
  Description of Artificial Sequence: Synthetic oligonucleotide
  Antisense strand to SEQ ID NO: 2278574
ucaguuccaggaaagggag

SEQ ID NO: 2278576 - RNA, 19 nt, Artificial Sequence
  Description of Artificial Sequence: Synthetic oligonucleotide
  Sense strand starting at position 2883 of SEQ ID NO: 1884612
gcaagaguggguugcaaag

SEQ ID NO: 2278577 - RNA, 19 nt, Artificial Sequence
  Description of Artificial Sequence: Synthetic oligonucleotide
  Antisense strand to SEQ ID NO: 2278576
cuuugcaacccacucuugc

SEQ ID NO: 2278578 - RNA, 19 nt, Artificial Sequence
  Description of Artificial Sequence: Synthetic oligonucleotide
  Sense strand starting at position 3054 of SEQ ID NO: 1884612
ucaacuuagggcuggaaga

SEQ ID NO: 2278579 - RNA, 19 nt, Artificial Sequence
  Description of Artificial Sequence: Synthetic oligonucleotide
  Antisense strand to SEQ ID NO: 2278578
ucuuccagcccuaaguuga

SEQ ID NO: 2278580 - RNA, 19 nt, Artificial Sequence
  Description of Artificial Sequence: Synthetic oligonucleotide
  Sense strand starting at position 3071 of SEQ ID NO: 1884612
gaggaaaggacucguucuu

SEQ ID NO: 2278581 - RNA, 19 nt, Artificial Sequence
  Description of Artificial Sequence: Synthetic oligonucleotide
  Antisense strand to SEQ ID NO: 2278580
aagaacgaguccuuuccuc

SEQ ID NO: 2278582 - RNA, 19 nt, Artificial Sequence
  Description of Artificial Sequence: Synthetic oligonucleotide
  Sense strand starting at position 3077 of SEQ ID NO: 1884612
aggacucguucuucugacu

SEQ ID NO: 2278583 - RNA, 19 nt, Artificial Sequence
  Description of Artificial Sequence: Synthetic oligonucleotide
  Antisense strand to SEQ ID NO: 2278582
agucagaagaacgaguccu

SEQ ID NO: 2278584 - RNA, 19 nt, Artificial Sequence
  Description of Artificial Sequence: Synthetic oligonucleotide
  Sense strand starting at position 3090 of SEQ ID NO: 1884612
cugacucagugcuucucaa

SEQ ID NO: 2278585 - RNA, 19 nt, Artificial Sequence
  Description of Artificial Sequence: Synthetic oligonucleotide
  Antisense strand to SEQ ID NO: 2278584
uugagaagcacugagucag

SEQ ID NO: 2278586 - RNA, 19 nt, Artificial Sequence
  Description of Artificial Sequence: Synthetic oligonucleotide
  Sense strand starting at position 3152 of SEQ ID NO: 1884612
cuguguccggaccaauuaa

SEQ ID NO: 2278587 - RNA, 19 nt, Artificial Sequence
  Description of Artificial Sequence: Synthetic oligonucleotide
  Antisense strand to SEQ ID NO: 2278586
uuaauugguccggacacag

SEQ ID NO: 2278588 - RNA, 19 nt, Artificial Sequence
  Description of Artificial Sequence: Synthetic oligonucleotide
  Sense strand starting at position 3172 of SEQ ID NO: 1884612
ucaggauuuccgcgaacac

SEQ ID NO: 2278589 - RNA, 19 nt, Artificial Sequence
  Description of Artificial Sequence: Synthetic oligonucleotide
  Antisense strand to SEQ ID NO: 2278588
guguucgcggaaauccuga

SEQ ID NO: 2278590 - RNA, 19 nt, Artificial Sequence
  Description of Artificial Sequence: Synthetic oligonucleotide
  Sense strand starting at position 3251 of SEQ ID NO: 1884612
gggugcugucacuggagaa

SEQ ID NO: 2278591 - RNA, 19 nt, Artificial Sequence
  Description of Artificial Sequence: Synthetic oligonucleotide
  Antisense strand to SEQ ID NO: 2278590
uucuccagugacagcaccc

SEQ ID NO: 2278592 - RNA, 19 nt, Artificial Sequence
  Description of Artificial Sequence: Synthetic oligonucleotide
  Sense strand starting at position 3252 of SEQ ID NO: 1884612
ggugcugucacuggagaac

SEQ ID NO: 2278593 - RNA, 19 nt, Artificial Sequence
  Description of Artificial Sequence: Synthetic oligonucleotide
  Antisense strand to SEQ ID NO: 2278592
guucuccagugacagcacc

SEQ ID NO: 2278594 - RNA, 19 nt, Artificial Sequence
  Description of Artificial Sequence: Synthetic oligonucleotide
  Sense strand starting at position 3350 of SEQ ID NO: 1884612
uccugauucucugcaggaa

SEQ ID NO: 2278595 - RNA, 19 nt, Artificial Sequence
  Description of Artificial Sequence: Synthetic oligonucleotide
  Antisense strand to SEQ ID NO: 2278594
uuccugcagagaaucagga

SEQ ID NO: 2278596 - RNA, 19 nt, Artificial Sequence
  Description of Artificial Sequence: Synthetic oligonucleotide
  Sense strand starting at position 2182 of SEQ ID NO: 1884613
cccgcuucucuuuaacagu

SEQ ID NO: 2278597 - RNA, 19 nt, Artificial Sequence
  Description of Artificial Sequence: Synthetic oligonucleotide
  Antisense strand to SEQ ID NO: 2278596
acuguuaaagagaagcggg

SEQ ID NO: 2278598 - RNA, 19 nt, Artificial Sequence
  Description of Artificial Sequence: Synthetic oligonucleotide
  Sense strand starting at position 2242 of SEQ ID NO: 1884613
aggcgaaugccaugaggaa

SEQ ID NO: 2278599 - RNA, 19 nt, Artificial Sequence
  Description of Artificial Sequence: Synthetic oligonucleotide
  Antisense strand to SEQ ID NO: 2278598
uuccucauggcauucgccu

SEQ ID NO: 2278600 - RNA, 19 nt, Artificial Sequence
  Description of Artificial Sequence: Synthetic oligonucleotide
  Sense strand starting at position 2633 of SEQ ID NO: 1884613
cgguuucucuggccaggaa

SEQ ID NO: 2278601 - RNA, 19 nt, Artificial Sequence
  Description of Artificial Sequence: Synthetic oligonucleotide
  Antisense strand to SEQ ID NO: 2278600
uuccuggccagagaaaccg

SEQ ID NO: 2278602 - RNA, 19 nt, Artificial Sequence
  Description of Artificial Sequence: Synthetic oligonucleotide
  Sense strand starting at position 2634 of SEQ ID NO: 1884613
gguuucucuggccaggaaa

SEQ ID NO: 2278603 - RNA, 19 nt, Artificial Sequence
  Description of Artificial Sequence: Synthetic oligonucleotide
  Antisense strand to SEQ ID NO: 2278602
uuuccuggccagagaaacc

SEQ ID NO: 2278604 - RNA, 19 nt, Artificial Sequence
  Description of Artificial Sequence: Synthetic oligonucleotide
  Sense strand starting at position 2774 of SEQ ID NO: 1884613
ggacguguuuccugagaau

SEQ ID NO: 2278605 - RNA, 19 nt, Artificial Sequence
  Description of Artificial Sequence: Synthetic oligonucleotide
  Antisense strand to SEQ ID NO: 2278604
auucucaggaaacacgucc

SEQ ID NO: 2278606 - RNA, 19 nt, Artificial Sequence
  Description of Artificial Sequence: Synthetic oligonucleotide
  Sense strand starting at position 2823 of SEQ ID NO: 1884613
aaguguguucaggauggau

SEQ ID NO: 2278607 - RNA, 19 nt, Artificial Sequence
  Description of Artificial Sequence: Synthetic oligonucleotide
  Antisense strand to SEQ ID NO: 2278606
auccauccugaacacacuu

SEQ ID NO: 2278608 - RNA, 19 nt, Artificial Sequence
  Description of Artificial Sequence: Synthetic oligonucleotide
  Sense strand starting at position 2825 of SEQ ID NO: 1884613
guguguucaggauggauua

SEQ ID NO: 2278609 - RNA, 19 nt, Artificial Sequence
  Description of Artificial Sequence: Synthetic oligonucleotide
  Antisense strand to SEQ ID NO: 2278608
uaauccauccugaacacac

SEQ ID NO: 2278610 - RNA, 19 nt, Artificial Sequence
  Description of Artificial Sequence: Synthetic oligonucleotide
  Sense strand starting at position 2826 of SEQ ID NO: 1884613
uguguucaggauggauuaa

SEQ ID NO: 2278611 - RNA, 19 nt, Artificial Sequence
  Description of Artificial Sequence: Synthetic oligonucleotide
  Antisense strand to SEQ ID NO: 2278610
uuaauccauccugaacaca

SEQ ID NO: 2278612 - RNA, 19 nt, Artificial Sequence
  Description of Artificial Sequence: Synthetic oligonucleotide
  Sense strand starting at position 2877 of SEQ ID NO: 1884613
ccaagauauugugcggaaa

SEQ ID NO: 2278613 - RNA, 19 nt, Artificial Sequence
  Description of Artificial Sequence: Synthetic oligonucleotide
  Antisense strand to SEQ ID NO: 2278612
uuuccgcacaauaucuugg

SEQ ID NO: 2278614 - RNA, 19 nt, Artificial Sequence
  Description of Artificial Sequence: Synthetic oligonucleotide
  Sense strand starting at position 2878 of SEQ ID NO: 1884613
caagauauugugcggaaag

SEQ ID NO: 2278615 - RNA, 19 nt, Artificial Sequence
  Description of Artificial Sequence: Synthetic oligonucleotide
  Antisense strand to SEQ ID NO: 2278614
cuuuccgcacaauaucuug

SEQ ID NO: 2278616 - RNA, 19 nt, Artificial Sequence
  Description of Artificial Sequence: Synthetic oligonucleotide
  Sense strand starting at position 2880 of SEQ ID NO: 1884613
agauauugugcggaaagca

SEQ ID NO: 2278617 - RNA, 19 nt, Artificial Sequence
  Description of Artificial Sequence: Synthetic oligonucleotide
  Antisense strand to SEQ ID NO: 2278616
ugcuuuccgcacaauaucu

SEQ ID NO: 2278618 - RNA, 19 nt, Artificial Sequence
  Description of Artificial Sequence: Synthetic oligonucleotide
  Sense strand starting at position 2888 of SEQ ID NO: 1884613
ugcggaaagcaguaucuga

SEQ ID NO: 2278619 - RNA, 19 nt, Artificial Sequence
  Description of Artificial Sequence: Synthetic oligonucleotide
  Antisense strand to SEQ ID NO: 2278618
ucagauacugcuuuccgca

SEQ ID NO: 2278620 - RNA, 19 nt, Artificial Sequence
  Description of Artificial Sequence: Synthetic oligonucleotide
  Sense strand starting at position 3025 of SEQ ID NO: 1884613
cuggcucuucuggaagcaa

SEQ ID NO: 2278621 - RNA, 19 nt, Artificial Sequence
  Description of Artificial Sequence: Synthetic oligonucleotide
  Antisense strand to SEQ ID NO: 2278620
uugcuuccagaagagccag

SEQ ID NO: 2278622 - RNA, 19 nt, Artificial Sequence
  Description of Artificial Sequence: Synthetic oligonucleotide
  Sense strand starting at position 3244 of SEQ ID NO: 1884613
ggaaccucucccugguuaa

SEQ ID NO: 2278623 - RNA, 19 nt, Artificial Sequence
  Description of Artificial Sequence: Synthetic oligonucleotide
  Antisense strand to SEQ ID NO: 2278622
uuaaccagggagagguucc

SEQ ID NO: 2278624 - RNA, 19 nt, Artificial Sequence
  Description of Artificial Sequence: Synthetic oligonucleotide
  Sense strand starting at position 3331 of SEQ ID NO: 1884613
agacauuucgccugcgucu

SEQ ID NO: 2278625 - RNA, 19 nt, Artificial Sequence
  Description of Artificial Sequence: Synthetic oligonucleotide
  Antisense strand to SEQ ID NO: 2278624
agacgcaggcgaaaugucu

SEQ ID NO: 2278626 - RNA, 19 nt, Artificial Sequence
  Description of Artificial Sequence: Synthetic oligonucleotide
  Sense strand starting at position 3417 of SEQ ID NO: 1884613
gugacugugugucaucuga

SEQ ID NO: 2278627 - RNA, 19 nt, Artificial Sequence
  Description of Artificial Sequence: Synthetic oligonucleotide
  Antisense strand to SEQ ID NO: 2278626
ucagaugacacacagucac

SEQ ID NO: 2278628 - RNA, 19 nt, Artificial Sequence
  Description of Artificial Sequence: Synthetic oligonucleotide
  Sense strand starting at position 3421 of SEQ ID NO: 1884613
cugugugucaucugaccuu

SEQ ID NO: 2278629 - RNA, 19 nt, Artificial Sequence
  Description of Artificial Sequence: Synthetic oligonucleotide
  Antisense strand to SEQ ID NO: 2278628
aaggucagaugacacacag

SEQ ID NO: 2278630 - RNA, 19 nt, Artificial Sequence
  Description of Artificial Sequence: Synthetic oligonucleotide
  Sense strand starting at position 3609 of SEQ ID NO: 1884613
cugaaagaaccguguggaa

SEQ ID NO: 2278631 - RNA, 19 nt, Artificial Sequence
  Description of Artificial Sequence: Synthetic oligonucleotide
  Antisense strand to SEQ ID NO: 2278630
uuccacacgguucuuucag

SEQ ID NO: 2278632 - RNA, 19 nt, Artificial Sequence
  Description of Artificial Sequence: Synthetic oligonucleotide
  Sense strand starting at position 3611 of SEQ ID NO: 1884613
gaaagaaccguguggaaag

SEQ ID NO: 2278633 - RNA, 19 nt, Artificial Sequence
  Description of Artificial Sequence: Synthetic oligonucleotide
  Antisense strand to SEQ ID NO: 2278632
cuuuccacacgguucuuuc

SEQ ID NO: 2278634 - RNA, 19 nt, Artificial Sequence
  Description of Artificial Sequence: Synthetic oligonucleotide
  Sense strand starting at position 3625 of SEQ ID NO: 1884613
gaaagagggaauugucugu

SEQ ID NO: 2278635 - RNA, 19 nt, Artificial Sequence
  Description of Artificial Sequence: Synthetic oligonucleotide
  Antisense strand to SEQ ID NO: 2278634
acagacaauucccucuuuc

SEQ ID NO: 2278636 - RNA, 19 nt, Artificial Sequence
  Description of Artificial Sequence: Synthetic oligonucleotide
  Sense strand starting at position 3629 of SEQ ID NO: 1884613
gagggaauugucugucaaa

SEQ ID NO: 2278637 - RNA, 19 nt, Artificial Sequence
  Description of Artificial Sequence: Synthetic oligonucleotide
  Antisense strand to SEQ ID NO: 2278636
uuugacagacaauucccuc

SEQ ID NO: 2278638 - RNA, 19 nt, Artificial Sequence
  Description of Artificial Sequence: Synthetic oligonucleotide
  Sense strand starting at position 3720 of SEQ ID NO: 1884613
uggagucagccagaccuuu

SEQ ID NO: 2278639 - RNA, 19 nt, Artificial Sequence
  Description of Artificial Sequence: Synthetic oligonucleotide
  Antisense strand to SEQ ID NO: 2278638
aaaggucuggcugacucca

SEQ ID NO: 2278640 - RNA, 19 nt, Artificial Sequence
  Description of Artificial Sequence: Synthetic oligonucleotide
  Sense strand starting at position 3798 of SEQ ID NO: 1884613
cccaguugaugucuuaacu

SEQ ID NO: 2278641 - RNA, 19 nt, Artificial Sequence
  Description of Artificial Sequence: Synthetic oligonucleotide
  Antisense strand to SEQ ID NO: 2278640
aguuaagacaucaacuggg

SEQ ID NO: 2278642 - RNA, 19 nt, Artificial Sequence
  Description of Artificial Sequence: Synthetic oligonucleotide
  Sense strand starting at position 3879 of SEQ ID NO: 1884613
gaaacaaacuaugguagau

SEQ ID NO: 2278643 - RNA, 19 nt, Artificial Sequence
  Description of Artificial Sequence: Synthetic oligonucleotide
  Antisense strand to SEQ ID NO: 2278642
aucuaccauaguuuguuuc

SEQ ID NO: 2278644 - RNA, 19 nt, Artificial Sequence
  Description of Artificial Sequence: Synthetic oligonucleotide
  Sense strand starting at position 386 of SEQ ID NO: 1884614
acuggaauaucaucagcca

SEQ ID NO: 2278645 - RNA, 19 nt, Artificial Sequence
  Description of Artificial Sequence: Synthetic oligonucleotide
  Antisense strand to SEQ ID NO: 2278644
uggcugaugauauuccagu

SEQ ID NO: 2278646 - RNA, 19 nt, Artificial Sequence
  Description of Artificial Sequence: Synthetic oligonucleotide
  Sense strand starting at position 389 of SEQ ID NO: 1884614
ggaauaucaucagccacua

SEQ ID NO: 2278647 - RNA, 19 nt, Artificial Sequence
  Description of Artificial Sequence: Synthetic oligonucleotide
  Antisense strand to SEQ ID NO: 2278646
uaguggcugaugauauucc

SEQ ID NO: 2278648 - RNA, 19 nt, Artificial Sequence
  Description of Artificial Sequence: Synthetic oligonucleotide
  Sense strand starting at position 495 of SEQ ID NO: 1884614
gcagaaauccucuggauaa

SEQ ID NO: 2278649 - RNA, 19 nt, Artificial Sequence
  Description of Artificial Sequence: Synthetic oligonucleotide
  Antisense strand to SEQ ID NO: 2278648
uuauccagaggauuucugc

SEQ ID NO: 2278650 - RNA, 19 nt, Artificial Sequence
  Description of Artificial Sequence: Synthetic oligonucleotide
  Sense strand starting at position 678 of SEQ ID NO: 1884614
agcagauauuaccuuuggu

SEQ ID NO: 2278651 - RNA, 19 nt, Artificial Sequence
  Description of Artificial Sequence: Synthetic oligonucleotide
  Antisense strand to SEQ ID NO: 2278650
accaaagguaauaucugcu

SEQ ID NO: 2278652 - RNA, 19 nt, Artificial Sequence
  Description of Artificial Sequence: Synthetic oligonucleotide
  Sense strand starting at position 681 of SEQ ID NO: 1884614
agauauuaccuuugguucu

SEQ ID NO: 2278653 - RNA, 19 nt, Artificial Sequence
  Description of Artificial Sequence: Synthetic oligonucleotide
  Antisense strand to SEQ ID NO: 2278652
agaaccaaagguaauaucu

SEQ ID NO: 2278654 - RNA, 19 nt, Artificial Sequence
  Description of Artificial Sequence: Synthetic oligonucleotide
  Sense strand starting at position 693 of SEQ ID NO: 1884614
ugguucuugagagagucaa

SEQ ID NO: 2278655 - RNA, 19 nt, Artificial Sequence
  Description of Artificial Sequence: Synthetic oligonucleotide
  Antisense strand to SEQ ID NO: 2278654
uugacucucucaagaacca

SEQ ID NO: 2278656 - RNA, 19 nt, Artificial Sequence
  Description of Artificial Sequence: Synthetic oligonucleotide
  Sense strand starting at position 721 of SEQ ID NO: 1884614
cuuguacaaguguaaauga

SEQ ID NO: 2278657 - RNA, 19 nt, Artificial Sequence
  Description of Artificial Sequence: Synthetic oligonucleotide
  Antisense strand to SEQ ID NO: 2278656
ucauuuacacuuguacaag

SEQ ID NO: 2278658 - RNA, 19 nt, Artificial Sequence
  Description of Artificial Sequence: Synthetic oligonucleotide
  Sense strand starting at position 803 of SEQ ID NO: 1884614
uucuuuaaugaauggaacu

SEQ ID NO: 2278659 - RNA, 19 nt, Artificial Sequence
  Description of Artificial Sequence: Synthetic oligonucleotide
  Antisense strand to SEQ ID NO: 2278658
aguuccauucauuaaagaa

SEQ ID NO: 2278660 - RNA, 19 nt, Artificial Sequence
  Description of Artificial Sequence: Synthetic oligonucleotide
  Sense strand starting at position 821 of SEQ ID NO: 1884614
ugaccaaaccuguagcaau

SEQ ID NO: 2278661 - RNA, 19 nt, Artificial Sequence
  Description of Artificial Sequence: Synthetic oligonucleotide
  Antisense strand to SEQ ID NO: 2278660
auugcuacagguuugguca

SEQ ID NO: 2278662 - RNA, 19 nt, Artificial Sequence
  Description of Artificial Sequence: Synthetic oligonucleotide
  Sense strand starting at position 833 of SEQ ID NO: 1884614
uagcaaugucugccagugu

SEQ ID NO: 2278663 - RNA, 19 nt, Artificial Sequence
  Description of Artificial Sequence: Synthetic oligonucleotide
  Antisense strand to SEQ ID NO: 2278662
acacuggcagacauugcua

SEQ ID NO: 2278664 - RNA, 19 nt, Artificial Sequence
  Description of Artificial Sequence: Synthetic oligonucleotide
  Sense strand starting at position 895 of SEQ ID NO: 1884614
ccaacaucugguggaggua

SEQ ID NO: 2278665 - RNA, 19 nt, Artificial Sequence
  Description of Artificial Sequence: Synthetic oligonucleotide
  Antisense strand to SEQ ID NO: 2278664
uaccuccaccagauguugg

SEQ ID NO: 2278666 - RNA, 19 nt, Artificial Sequence
  Description of Artificial Sequence: Synthetic oligonucleotide
  Sense strand starting at position 932 of SEQ ID NO: 1884614
guuauacagcaagaagguu

SEQ ID NO: 2278667 - RNA, 19 nt, Artificial Sequence
  Description of Artificial Sequence: Synthetic oligonucleotide
  Antisense strand to SEQ ID NO: 2278666
aaccuucuugcuguauaac

SEQ ID NO: 2278668 - RNA, 19 nt, Artificial Sequence
  Description of Artificial Sequence: Synthetic oligonucleotide
  Sense strand starting at position 1058 of SEQ ID NO: 1884614
acagguaaauucuucgaca

SEQ ID NO: 2278669 - RNA, 19 nt, Artificial Sequence
  Description of Artificial Sequence: Synthetic oligonucleotide
  Antisense strand to SEQ ID NO: 2278668
ugucgaagaauuuaccugu

SEQ ID NO: 2278670 - RNA, 19 nt, Artificial Sequence
  Description of Artificial Sequence: Synthetic oligonucleotide
  Sense strand starting at position 1059 of SEQ ID NO: 1884614
cagguaaauucuucgacac

SEQ ID NO: 2278671 - RNA, 19 nt, Artificial Sequence
  Description of Artificial Sequence: Synthetic oligonucleotide
  Antisense strand to SEQ ID NO: 2278670
gugucgaagaauuuaccug

SEQ ID NO: 2278672 - RNA, 19 nt, Artificial Sequence
  Description of Artificial Sequence: Synthetic oligonucleotide
  Sense strand starting at position 1060 of SEQ ID NO: 1884614
agguaaauucuucgacaca

SEQ ID NO: 2278673 - RNA, 19 nt, Artificial Sequence
  Description of Artificial Sequence: Synthetic oligonucleotide
  Antisense strand to SEQ ID NO: 2278672
ugugucgaagaauuuaccu

SEQ ID NO: 2278674 - RNA, 19 nt, Artificial Sequence
  Description of Artificial Sequence: Synthetic oligonucleotide
  Sense strand starting at position 1194 of SEQ ID NO: 1884614
cuaagcauuuggguugcaa

SEQ ID NO: 2278675 - RNA, 19 nt, Artificial Sequence
  Description of Artificial Sequence: Synthetic oligonucleotide
  Antisense strand to SEQ ID NO: 2278674
uugcaacccaaaugcuuag

SEQ ID NO: 2278676 - RNA, 19 nt, Artificial Sequence
  Description of Artificial Sequence: Synthetic oligonucleotide
  Sense strand starting at position 1209 of SEQ ID NO: 1884614
gcaaauagguuuccuaaau

SEQ ID NO: 2278677 - RNA, 19 nt, Artificial Sequence
  Description of Artificial Sequence: Synthetic oligonucleotide
  Antisense strand to SEQ ID NO: 2278676
auuuaggaaaccuauuugc

SEQ ID NO: 2278678 - RNA, 19 nt, Artificial Sequence
  Description of Artificial Sequence: Synthetic oligonucleotide
  Sense strand starting at position 1402 of SEQ ID NO: 1884614
ucccaucaaugugcagaaa

SEQ ID NO: 2278679 - RNA, 19 nt, Artificial Sequence
  Description of Artificial Sequence: Synthetic oligonucleotide
  Antisense strand to SEQ ID NO: 2278678
uuucugcacauugauggga

SEQ ID NO: 2278680 - RNA, 19 nt, Artificial Sequence
  Description of Artificial Sequence: Synthetic oligonucleotide
  Sense strand starting at position 1473 of SEQ ID NO: 1884614
uguuaucuccagcauaaag

SEQ ID NO: 2278681 - RNA, 19 nt, Artificial Sequence
  Description of Artificial Sequence: Synthetic oligonucleotide
  Antisense strand to SEQ ID NO: 2278680
cuuuaugcuggagauaaca

SEQ ID NO: 2278682 - RNA, 19 nt, Artificial Sequence
  Description of Artificial Sequence: Synthetic oligonucleotide
  Sense strand starting at position 1499 of SEQ ID NO: 1884614
aguugagaauguucgaauu

SEQ ID NO: 2278683 - RNA, 19 nt, Artificial Sequence
  Description of Artificial Sequence: Synthetic oligonucleotide
  Antisense strand to SEQ ID NO: 2278682
aauucgaacauucucaacu

SEQ ID NO: 2278684 - RNA, 19 nt, Artificial Sequence
  Description of Artificial Sequence: Synthetic oligonucleotide
  Sense strand starting at position 1554 of SEQ ID NO: 1884614
acgcucagagaaugaauca

SEQ ID NO: 2278685 - RNA, 19 nt, Artificial Sequence
  Description of Artificial Sequence: Synthetic oligonucleotide
  Antisense strand to SEQ ID NO: 2278684
ugauucauucucugagcgu

SEQ ID NO: 2278686 - RNA, 19 nt, Artificial Sequence
  Description of Artificial Sequence: Synthetic oligonucleotide
  Sense strand starting at position 2251 of SEQ ID NO: 1884614
cucaaagagccuugguaac

SEQ ID NO: 2278687 - RNA, 19 nt, Artificial Sequence
  Description of Artificial Sequence: Synthetic oligonucleotide
  Antisense strand to SEQ ID NO: 2278686
guuaccaaggcucuuugag

SEQ ID NO: 2278688 - RNA, 19 nt, Artificial Sequence
  Description of Artificial Sequence: Synthetic oligonucleotide
  Sense strand starting at position 2473 of SEQ ID NO: 1884614
gggaauuaaugguuaaagc

SEQ ID NO: 2278689 - RNA, 19 nt, Artificial Sequence
  Description of Artificial Sequence: Synthetic oligonucleotide
  Antisense strand to SEQ ID NO: 2278688
gcuuuaaccauuaauuccc

SEQ ID NO: 2278690 - RNA, 19 nt, Artificial Sequence
  Description of Artificial Sequence: Synthetic oligonucleotide
  Sense strand starting at position 2481 of SEQ ID NO: 1884614
augguuaaagcugauguaa

SEQ ID NO: 2278691 - RNA, 19 nt, Artificial Sequence
  Description of Artificial Sequence: Synthetic oligonucleotide
  Antisense strand to SEQ ID NO: 2278690
uuacaucagcuuuaaccau

SEQ ID NO: 2278692 - RNA, 19 nt, Artificial Sequence
  Description of Artificial Sequence: Synthetic oligonucleotide
  Sense strand starting at position 2520 of SEQ ID NO: 1884614
gguucacucuauucgggaa

SEQ ID NO: 2278693 - RNA, 19 nt, Artificial Sequence
  Description of Artificial Sequence: Synthetic oligonucleotide
  Antisense strand to SEQ ID NO: 2278692
uucccgaauagagugaacc

SEQ ID NO: 2278694 - RNA, 19 nt, Artificial Sequence
  Description of Artificial Sequence: Synthetic oligonucleotide
  Sense strand starting at position 2594 of SEQ ID NO: 1884614
guaccagagguccagugaa

SEQ ID NO: 2278695 - RNA, 19 nt, Artificial Sequence
  Description of Artificial Sequence: Synthetic oligonucleotide
  Antisense strand to SEQ ID NO: 2278694
uucacuggaccucugguac

SEQ ID NO: 2278696 - RNA, 19 nt, Artificial Sequence
  Description of Artificial Sequence: Synthetic oligonucleotide
  Sense strand starting at position 2733 of SEQ ID NO: 1884614
ccaauaaagguuuguuaaa

SEQ ID NO: 2278697 - RNA, 19 nt, Artificial Sequence
  Description of Artificial Sequence: Synthetic oligonucleotide
  Antisense strand to SEQ ID NO: 2278696
uuuaacaaaccuuuauugg

SEQ ID NO: 2278698 - RNA, 19 nt, Artificial Sequence
  Description of Artificial Sequence: Synthetic oligonucleotide
  Sense strand starting at position 2946 of SEQ ID NO: 1884614
acugauuaaugauugcagu

SEQ ID NO: 2278699 - RNA, 19 nt, Artificial Sequence
  Description of Artificial Sequence: Synthetic oligonucleotide
  Antisense strand to SEQ ID NO: 2278698
acugcaaucauuaaucagu

SEQ ID NO: 2278700 - RNA, 19 nt, Artificial Sequence
  Description of Artificial Sequence: Synthetic oligonucleotide
  Sense strand starting at position 2993 of SEQ ID NO: 1884614
auaucaagucccuguuaga

SEQ ID NO: 2278701 - RNA, 19 nt, Artificial Sequence
  Description of Artificial Sequence: Synthetic oligonucleotide
  Antisense strand to SEQ ID NO: 2278700
ucuaacagggacuugauau

SEQ ID NO: 2278702 - RNA, 19 nt, Artificial Sequence
  Description of Artificial Sequence: Synthetic oligonucleotide
  Sense strand starting at position 3064 of SEQ ID NO: 1884614
ccagaaagcuguccuaaau

SEQ ID NO: 2278703 - RNA, 19 nt, Artificial Sequence
  Description of Artificial Sequence: Synthetic oligonucleotide
  Antisense strand to SEQ ID NO: 2278702
auuuaggacagcuuucugg

SEQ ID NO: 2278704 - RNA, 19 nt, Artificial Sequence
  Description of Artificial Sequence: Synthetic oligonucleotide
  Sense strand starting at position 3096 of SEQ ID NO: 1884614
gagagcauauuguuuauaa

SEQ ID NO: 2278705 - RNA, 19 nt, Artificial Sequence
  Description of Artificial Sequence: Synthetic oligonucleotide
  Antisense strand to SEQ ID NO: 2278704
uuauaaacaauaugcucuc

SEQ ID NO: 2278706 - RNA, 19 nt, Artificial Sequence
  Description of Artificial Sequence: Synthetic oligonucleotide
  Sense strand starting at position 3125 of SEQ ID NO: 1884614
guucuuucugaccauguga

SEQ ID NO: 2278707 - RNA, 19 nt, Artificial Sequence
  Description of Artificial Sequence: Synthetic oligonucleotide
  Antisense strand to SEQ ID NO: 2278706
ucacauggucagaaagaac

SEQ ID NO: 2278708 - RNA, 19 nt, Artificial Sequence
  Description of Artificial Sequence: Synthetic oligonucleotide
  Sense strand starting at position 3204 of SEQ ID NO: 1884614
agucaaauucugggaugca

SEQ ID NO: 2278709 - RNA, 19 nt, Artificial Sequence
  Description of Artificial Sequence: Synthetic oligonucleotide
  Antisense strand to SEQ ID NO: 2278708
ugcaucccagaauuugacu

SEQ ID NO: 2278710 - RNA, 19 nt, Artificial Sequence
  Description of Artificial Sequence: Synthetic oligonucleotide
  Sense strand starting at position 3261 of SEQ ID NO: 1884614
ggagguucauuggcagaau

SEQ ID NO: 2278711 - RNA, 19 nt, Artificial Sequence
  Description of Artificial Sequence: Synthetic oligonucleotide
  Antisense strand to SEQ ID NO: 2278710
auucugccaaugaaccucc

SEQ ID NO: 2278712 - RNA, 19 nt, Artificial Sequence
  Description of Artificial Sequence: Synthetic oligonucleotide
  Sense strand starting at position 3274 of SEQ ID NO: 1884614
cagaauagguucuugucau

SEQ ID NO: 2278713 - RNA, 19 nt, Artificial Sequence
  Description of Artificial Sequence: Synthetic oligonucleotide
  Antisense strand to SEQ ID NO: 2278712
augacaagaaccuauucug

SEQ ID NO: 2278714 - RNA, 19 nt, Artificial Sequence
  Description of Artificial Sequence: Synthetic oligonucleotide
  Sense strand starting at position 3281 of SEQ ID NO: 1884614
gguucuugucaugaguuga

SEQ ID NO: 2278715 - RNA, 19 nt, Artificial Sequence
  Description of Artificial Sequence: Synthetic oligonucleotide
  Antisense strand to SEQ ID NO: 2278714
ucaacucaugacaagaacc

SEQ ID NO: 2278716 - RNA, 19 nt, Artificial Sequence
  Description of Artificial Sequence: Synthetic oligonucleotide
  Sense strand starting at position 3285 of SEQ ID NO: 1884614
cuugucaugaguugagaag

SEQ ID NO: 2278717 - RNA, 19 nt, Artificial Sequence
  Description of Artificial Sequence: Synthetic oligonucleotide
  Antisense strand to SEQ ID NO: 2278716
cuucucaacucaugacaag

SEQ ID NO: 2278718 - RNA, 19 nt, Artificial Sequence
  Description of Artificial Sequence: Synthetic oligonucleotide
  Sense strand starting at position 3294 of SEQ ID NO: 1884614
aguugagaagcgugaaaca

SEQ ID NO: 2278719 - RNA, 19 nt, Artificial Sequence
  Description of Artificial Sequence: Synthetic oligonucleotide
  Antisense strand to SEQ ID NO: 2278718
uguuucacgcuucucaacu

SEQ ID NO: 2278720 - RNA, 19 nt, Artificial Sequence
  Description of Artificial Sequence: Synthetic oligonucleotide
  Sense strand starting at position 3502 of SEQ ID NO: 1884614
gcguguuagcacucucacu

SEQ ID NO: 2278721 - RNA, 19 nt, Artificial Sequence
  Description of Artificial Sequence: Synthetic oligonucleotide
  Antisense strand to SEQ ID NO: 2278720
agugagagugcuaacacgc

SEQ ID NO: 2278722 - RNA, 19 nt, Artificial Sequence
  Description of Artificial Sequence: Synthetic oligonucleotide
  Sense strand starting at position 3879 of SEQ ID NO: 1884614
agguaaugaaacuggguuu

SEQ ID NO: 2278723 - RNA, 19 nt, Artificial Sequence
  Description of Artificial Sequence: Synthetic oligonucleotide
  Antisense strand to SEQ ID NO: 2278722
aaacccaguuucauuaccu

SEQ ID NO: 2278724 - RNA, 19 nt, Artificial Sequence
  Description of Artificial Sequence: Synthetic oligonucleotide
  Sense strand starting at position 96 of SEQ ID NO: 1884615
uauaauaucgacugugaag

SEQ ID NO: 2278725 - RNA, 19 nt, Artificial Sequence
  Description of Artificial Sequence: Synthetic oligonucleotide
  Antisense strand to SEQ ID NO: 2278724
cuucacagucgauauuaua

SEQ ID NO: 2278726 - RNA, 19 nt, Artificial Sequence
  Description of Artificial Sequence: Synthetic oligonucleotide
  Sense strand starting at position 147 of SEQ ID NO: 1884615
ggaugcauucuguaaauug

SEQ ID NO: 2278727 - RNA, 19 nt, Artificial Sequence
  Description of Artificial Sequence: Synthetic oligonucleotide
  Antisense strand to SEQ ID NO: 2278726
caauuuacagaaugcaucc

SEQ ID NO: 2278728 - RNA, 19 nt, Artificial Sequence
  Description of Artificial Sequence: Synthetic oligonucleotide
  Sense strand starting at position 168 of SEQ ID NO: 1884615
cuccacuguguggauauua

SEQ ID NO: 2278729 - RNA, 19 nt, Artificial Sequence
  Description of Artificial Sequence: Synthetic oligonucleotide
  Antisense strand to SEQ ID NO: 2278728
uaauauccacacaguggag

SEQ ID NO: 2278730 - RNA, 19 nt, Artificial Sequence
  Description of Artificial Sequence: Synthetic oligonucleotide
  Sense strand starting at position 370 of SEQ ID NO: 1884615
ucaugaugcagccaggaua

SEQ ID NO: 2278731 - RNA, 19 nt, Artificial Sequence
  Description of Artificial Sequence: Synthetic oligonucleotide
  Antisense strand to SEQ ID NO: 2278730
uauccuggcugcaucauga

SEQ ID NO: 2278732 - RNA, 19 nt, Artificial Sequence
  Description of Artificial Sequence: Synthetic oligonucleotide
  Sense strand starting at position 463 of SEQ ID NO: 1884615
uggagugagacucaucugu

SEQ ID NO: 2278733 - RNA, 19 nt, Artificial Sequence
  Description of Artificial Sequence: Synthetic oligonucleotide
  Antisense strand to SEQ ID NO: 2278732
acagaugagucucacucca

SEQ ID NO: 2278734 - RNA, 19 nt, Artificial Sequence
  Description of Artificial Sequence: Synthetic oligonucleotide
  Sense strand starting at position 465 of SEQ ID NO: 1884615
gagugagacucaucuguca

SEQ ID NO: 2278735 - RNA, 19 nt, Artificial Sequence
  Description of Artificial Sequence: Synthetic oligonucleotide
  Antisense strand to SEQ ID NO: 2278734
ugacagaugagucucacuc

SEQ ID NO: 2278736 - RNA, 19 nt, Artificial Sequence
  Description of Artificial Sequence: Synthetic oligonucleotide
  Sense strand starting at position 467 of SEQ ID NO: 1884615
gugagacucaucugucaag

SEQ ID NO: 2278737 - RNA, 19 nt, Artificial Sequence
  Description of Artificial Sequence: Synthetic oligonucleotide
  Antisense strand to SEQ ID NO: 2278736
cuugacagaugagucucac

SEQ ID NO: 2278738 - RNA, 19 nt, Artificial Sequence
  Description of Artificial Sequence: Synthetic oligonucleotide
  Sense strand starting at position 514 of SEQ ID NO: 1884615
agcgacuggcaguaaauau

SEQ ID NO: 2278739 - RNA, 19 nt, Artificial Sequence
  Description of Artificial Sequence: Synthetic oligonucleotide
  Antisense strand to SEQ ID NO: 2278738
auauuuacugccagucgcu

SEQ ID NO: 2278740 - RNA, 19 nt, Artificial Sequence
  Description of Artificial Sequence: Synthetic oligonucleotide
  Sense strand starting at position 524 of SEQ ID NO: 1884615
aguaaauauggccagagca

SEQ ID NO: 2278741 - RNA, 19 nt, Artificial Sequence
  Description of Artificial Sequence: Synthetic oligonucleotide
  Antisense strand to SEQ ID NO: 2278740
ugcucuggccauauuuacu

SEQ ID NO: 2278742 - RNA, 19 nt, Artificial Sequence
  Description of Artificial Sequence: Synthetic oligonucleotide
  Sense strand starting at position 551 of SEQ ID NO: 1884615
gaagauugauguccuaccu

SEQ ID NO: 2278743 - RNA, 19 nt, Artificial Sequence
  Description of Artificial Sequence: Synthetic oligonucleotide
  Antisense strand to SEQ ID NO: 2278742
agguaggacaucaaucuuc

SEQ ID NO: 2278744 - RNA, 19 nt, Artificial Sequence
  Description of Artificial Sequence: Synthetic oligonucleotide
  Sense strand starting at position 802 of SEQ ID NO: 1884615
ggcugugacagugagagua

SEQ ID NO: 2278745 - RNA, 19 nt, Artificial Sequence
  Description of Artificial Sequence: Synthetic oligonucleotide
  Antisense strand to SEQ ID NO: 2278744
uacucucacugucacagcc

SEQ ID NO: 2278746 - RNA, 19 nt, Artificial Sequence
  Description of Artificial Sequence: Synthetic oligonucleotide
  Sense strand starting at position 818 of SEQ ID NO: 1884615
guagcagugccaucucagu

SEQ ID NO: 2278747 - RNA, 19 nt, Artificial Sequence
  Description of Artificial Sequence: Synthetic oligonucleotide
  Antisense strand to SEQ ID NO: 2278746
acugagauggcacugcuac

SEQ ID NO: 2278748 - RNA, 19 nt, Artificial Sequence
  Description of Artificial Sequence: Synthetic oligonucleotide
  Sense strand starting at position 907 of SEQ ID NO: 1884615
ucaagaugugcaugacaau

SEQ ID NO: 2278749 - RNA, 19 nt, Artificial Sequence
  Description of Artificial Sequence: Synthetic oligonucleotide
  Antisense strand to SEQ ID NO: 2278748
auugucaugcacaucuuga

SEQ ID NO: 2278750 - RNA, 19 nt, Artificial Sequence
  Description of Artificial Sequence: Synthetic oligonucleotide
  Sense strand starting at position 908 of SEQ ID NO: 1884615
caagaugugcaugacaauu

SEQ ID NO: 2278751 - RNA, 19 nt, Artificial Sequence
  Description of Artificial Sequence: Synthetic oligonucleotide
  Antisense strand to SEQ ID NO: 2278750
aauugucaugcacaucuug

SEQ ID NO: 2278752 - RNA, 19 nt, Artificial Sequence
  Description of Artificial Sequence: Synthetic oligonucleotide
  Sense strand starting at position 1566 of SEQ ID NO: 1884615
caaugugacaguuggagga

SEQ ID NO: 2278753 - RNA, 19 nt, Artificial Sequence
  Description of Artificial Sequence: Synthetic oligonucleotide
  Antisense strand to SEQ ID NO: 2278752
uccuccaacugucacauug

SEQ ID NO: 2278754 - RNA, 19 nt, Artificial Sequence
  Description of Artificial Sequence: Synthetic oligonucleotide
  Sense strand starting at position 1607 of SEQ ID NO: 1884615
guuguuaugggcugauuua

SEQ ID NO: 2278755 - RNA, 19 nt, Artificial Sequence
  Description of Artificial Sequence: Synthetic oligonucleotide
  Antisense strand to SEQ ID NO: 2278754
uaaaucagcccauaacaac

SEQ ID NO: 2278756 - RNA, 19 nt, Artificial Sequence
  Description of Artificial Sequence: Synthetic oligonucleotide
  Sense strand starting at position 1801 of SEQ ID NO: 1884615
gaagcagggucccuaagua

SEQ ID NO: 2278757 - RNA, 19 nt, Artificial Sequence
  Description of Artificial Sequence: Synthetic oligonucleotide
  Antisense strand to SEQ ID NO: 2278756
uacuuagggacccugcuuc

SEQ ID NO: 2278758 - RNA, 19 nt, Artificial Sequence
  Description of Artificial Sequence: Synthetic oligonucleotide
  Sense strand starting at position 2018 of SEQ ID NO: 1884615
ccaaauuuguaagacaaug

SEQ ID NO: 2278759 - RNA, 19 nt, Artificial Sequence
  Description of Artificial Sequence: Synthetic oligonucleotide
  Antisense strand to SEQ ID NO: 2278758
cauugucuuacaaauuugg

SEQ ID NO: 2278760 - RNA, 19 nt, Artificial Sequence
  Description of Artificial Sequence: Synthetic oligonucleotide
  Sense strand starting at position 2161 of SEQ ID NO: 1884615
gcgccagcucuuucccaua

SEQ ID NO: 2278761 - RNA, 19 nt, Artificial Sequence
  Description of Artificial Sequence: Synthetic oligonucleotide
  Antisense strand to SEQ ID NO: 2278760
uaugggaaagagcuggcgc

SEQ ID NO: 2278762 - RNA, 19 nt, Artificial Sequence
  Description of Artificial Sequence: Synthetic oligonucleotide
  Sense strand starting at position 2244 of SEQ ID NO: 1884615
cugggacaguccuuuggaa

SEQ ID NO: 2278763 - RNA, 19 nt, Artificial Sequence
  Description of Artificial Sequence: Synthetic oligonucleotide
  Antisense strand to SEQ ID NO: 2278762
uuccaaaggacugucccag

SEQ ID NO: 2278764 - RNA, 19 nt, Artificial Sequence
  Description of Artificial Sequence: Synthetic oligonucleotide
  Sense strand starting at position 2246 of SEQ ID NO: 1884615
gggacaguccuuuggaagu

SEQ ID NO: 2278765 - RNA, 19 nt, Artificial Sequence
  Description of Artificial Sequence: Synthetic oligonucleotide
  Antisense strand to SEQ ID NO: 2278764
acuuccaaaggacuguccc

SEQ ID NO: 2278766 - RNA, 19 nt, Artificial Sequence
  Description of Artificial Sequence: Synthetic oligonucleotide
  Sense strand starting at position 2580 of SEQ ID NO: 1884615
cccugagccuaacuuagaa

SEQ ID NO: 2278767 - RNA, 19 nt, Artificial Sequence
  Description of Artificial Sequence: Synthetic oligonucleotide
  Antisense strand to SEQ ID NO: 2278766
uucuaaguuaggcucaggg

SEQ ID NO: 2278768 - RNA, 19 nt, Artificial Sequence
  Description of Artificial Sequence: Synthetic oligonucleotide
  Sense strand starting at position 2641 of SEQ ID NO: 1884615
gagagaacuggaugcuucu

SEQ ID NO: 2278769 - RNA, 19 nt, Artificial Sequence
  Description of Artificial Sequence: Synthetic oligonucleotide
  Antisense strand to SEQ ID NO: 2278768
agaagcauccaguucucuc

SEQ ID NO: 2278770 - RNA, 19 nt, Artificial Sequence
  Description of Artificial Sequence: Synthetic oligonucleotide
  Sense strand starting at position 2680 of SEQ ID NO: 1884615
ggaauauaaccaugaugca

SEQ ID NO: 2278771 - RNA, 19 nt, Artificial Sequence
  Description of Artificial Sequence: Synthetic oligonucleotide
  Antisense strand to SEQ ID NO: 2278770
ugcaucaugguuauauucc

SEQ ID NO: 2278772 - RNA, 19 nt, Artificial Sequence
  Description of Artificial Sequence: Synthetic oligonucleotide
  Sense strand starting at position 2847 of SEQ ID NO: 1884615
gcacuagaacaaugaaucu

SEQ ID NO: 2278773 - RNA, 19 nt, Artificial Sequence
  Description of Artificial Sequence: Synthetic oligonucleotide
  Antisense strand to SEQ ID NO: 2278772
agauucauuguucuagugc

SEQ ID NO: 2278774 - RNA, 19 nt, Artificial Sequence
  Description of Artificial Sequence: Synthetic oligonucleotide
  Sense strand starting at position 2913 of SEQ ID NO: 1884615
aacuauugggcuggcuaaa

SEQ ID NO: 2278775 - RNA, 19 nt, Artificial Sequence
  Description of Artificial Sequence: Synthetic oligonucleotide
  Antisense strand to SEQ ID NO: 2278774
uuuagccagcccaauaguu

SEQ ID NO: 2278776 - RNA, 19 nt, Artificial Sequence
  Description of Artificial Sequence: Synthetic oligonucleotide
  Sense strand starting at position 2924 of SEQ ID NO: 1884615
uggcuaaaguagguuauga

SEQ ID NO: 2278777 - RNA, 19 nt, Artificial Sequence
  Description of Artificial Sequence: Synthetic oligonucleotide
  Antisense strand to SEQ ID NO: 2278776
ucauaaccuacuuuagcca

SEQ ID NO: 2278778 - RNA, 19 nt, Artificial Sequence
  Description of Artificial Sequence: Synthetic oligonucleotide
  Sense strand starting at position 2926 of SEQ ID NO: 1884615
gcuaaaguagguuaugauu

SEQ ID NO: 2278779 - RNA, 19 nt, Artificial Sequence
  Description of Artificial Sequence: Synthetic oligonucleotide
  Antisense strand to SEQ ID NO: 2278778
aaucauaaccuacuuuagc

SEQ ID NO: 2278780 - RNA, 19 nt, Artificial Sequence
  Description of Artificial Sequence: Synthetic oligonucleotide
  Sense strand starting at position 3073 of SEQ ID NO: 1884615
gguggaucacgauguuaag

SEQ ID NO: 2278781 - RNA, 19 nt, Artificial Sequence
  Description of Artificial Sequence: Synthetic oligonucleotide
  Antisense strand to SEQ ID NO: 2278780
cuuaacaucgugauccacc

SEQ ID NO: 2278782 - RNA, 19 nt, Artificial Sequence
  Description of Artificial Sequence: Synthetic oligonucleotide
  Sense strand starting at position 3387 of SEQ ID NO: 1884615
ugauaaaguuguuuaaccu

SEQ ID NO: 2278783 - RNA, 19 nt, Artificial Sequence
  Description of Artificial Sequence: Synthetic oligonucleotide
  Antisense strand to SEQ ID NO: 2278782
agguuaaacaacuuuauca

SEQ ID NO: 2278784 - RNA, 19 nt, Artificial Sequence
  Description of Artificial Sequence: Synthetic oligonucleotide
  Sense strand starting at position 3388 of SEQ ID NO: 1884615
gauaaaguuguuuaaccug

SEQ ID NO: 2278785 - RNA, 19 nt, Artificial Sequence
  Description of Artificial Sequence: Synthetic oligonucleotide
  Antisense strand to SEQ ID NO: 2278784
cagguuaaacaacuuuauc

SEQ ID NO: 2278786 - RNA, 19 nt, Artificial Sequence
  Description of Artificial Sequence: Synthetic oligonucleotide
  Sense strand starting at position 3395 of SEQ ID NO: 1884615
uuguuuaaccuguaucuau

SEQ ID NO: 2278787 - RNA, 19 nt, Artificial Sequence
  Description of Artificial Sequence: Synthetic oligonucleotide
  Antisense strand to SEQ ID NO: 2278786
auagauacagguuaaacaa

SEQ ID NO: 2278788 - RNA, 19 nt, Artificial Sequence
  Description of Artificial Sequence: Synthetic oligonucleotide
  Sense strand starting at position 3528 of SEQ ID NO: 1884615
agauuauguuucucucuua

SEQ ID NO: 2278789 - RNA, 19 nt, Artificial Sequence
  Description of Artificial Sequence: Synthetic oligonucleotide
  Antisense strand to SEQ ID NO: 2278788
uaagagagaaacauaaucu

SEQ ID NO: 2278790 - RNA, 19 nt, Artificial Sequence
  Description of Artificial Sequence: Synthetic oligonucleotide
  Sense strand starting at position 3675 of SEQ ID NO: 1884615
auuaaucugguuggaauua

SEQ ID NO: 2278791 - RNA, 19 nt, Artificial Sequence
  Description of Artificial Sequence: Synthetic oligonucleotide
  Antisense strand to SEQ ID NO: 2278790
uaauuccaaccagauuaau

SEQ ID NO: 2278792 - RNA, 19 nt, Artificial Sequence
  Description of Artificial Sequence: Synthetic oligonucleotide
  Sense strand starting at position 3684 of SEQ ID NO: 1884615
guuggaauuaaugauguuu

SEQ ID NO: 2278793 - RNA, 19 nt, Artificial Sequence
  Description of Artificial Sequence: Synthetic oligonucleotide
  Antisense strand to SEQ ID NO: 2278792
aaacaucauuaauuccaac

SEQ ID NO: 2278794 - RNA, 19 nt, Artificial Sequence
  Description of Artificial Sequence: Synthetic oligonucleotide
  Sense strand starting at position 3705 of SEQ ID NO: 1884615
cuguuugggcaaugagaua

SEQ ID NO: 2278795 - RNA, 19 nt, Artificial Sequence
  Description of Artificial Sequence: Synthetic oligonucleotide
  Antisense strand to SEQ ID NO: 2278794
uaucucauugcccaaacag

SEQ ID NO: 2278796 - RNA, 19 nt, Artificial Sequence
  Description of Artificial Sequence: Synthetic oligonucleotide
  Sense strand starting at position 3770 of SEQ ID NO: 1884615
cguauuucuguucagaguu

SEQ ID NO: 2278797 - RNA, 19 nt, Artificial Sequence
  Description of Artificial Sequence: Synthetic oligonucleotide
  Antisense strand to SEQ ID NO: 2278796
aacucugaacagaaauacg

SEQ ID NO: 2278798 - RNA, 19 nt, Artificial Sequence
  Description of Artificial Sequence: Synthetic oligonucleotide
  Sense strand starting at position 3825 of SEQ ID NO: 1884615
gggacugucaucugaaagc

SEQ ID NO: 2278799 - RNA, 19 nt, Artificial Sequence
  Description of Artificial Sequence: Synthetic oligonucleotide
  Antisense strand to SEQ ID NO: 2278798
gcuuucagaugacaguccc

SEQ ID NO: 2278800 - RNA, 19 nt, Artificial Sequence
  Description of Artificial Sequence: Synthetic oligonucleotide
  Sense strand starting at position 3842 of SEQ ID NO: 1884615
gcuccuaaugaucagcauu

SEQ ID NO: 2278801 - RNA, 19 nt, Artificial Sequence
  Description of Artificial Sequence: Synthetic oligonucleotide
  Antisense strand to SEQ ID NO: 2278800
aaugcugaucauuaggagc

SEQ ID NO: 2278802 - RNA, 19 nt, Artificial Sequence
  Description of Artificial Sequence: Synthetic oligonucleotide
  Sense strand starting at position 3960 of SEQ ID NO: 1884615
ccuaaagagcucuagcuca

SEQ ID NO: 2278803 - RNA, 19 nt, Artificial Sequence
  Description of Artificial Sequence: Synthetic oligonucleotide
  Antisense strand to SEQ ID NO: 2278802
ugagcuagagcucuuuagg

SEQ ID NO: 2278804 - RNA, 19 nt, Artificial Sequence
  Description of Artificial Sequence: Synthetic oligonucleotide
  Sense strand starting at position 19 of SEQ ID NO: 1884616
gggcuuugcccucauccua

SEQ ID NO: 2278805 - RNA, 19 nt, Artificial Sequence
  Description of Artificial Sequence: Synthetic oligonucleotide
  Antisense strand to SEQ ID NO: 2278804
uaggaugagggcaaagccc

SEQ ID NO: 2278806 - RNA, 19 nt, Artificial Sequence
  Description of Artificial Sequence: Synthetic oligonucleotide
  Sense strand starting at position 81 of SEQ ID NO: 1884616
uuccauguuccacauguaa

SEQ ID NO: 2278807 - RNA, 19 nt, Artificial Sequence
  Description of Artificial Sequence: Synthetic oligonucleotide
  Antisense strand to SEQ ID NO: 2278806
uuacauguggaacauggaa

SEQ ID NO: 2278808 - RNA, 19 nt, Artificial Sequence
  Description of Artificial Sequence: Synthetic oligonucleotide
  Sense strand starting at position 130 of SEQ ID NO: 1884616
cagguaagaucuuuaagcu

SEQ ID NO: 2278809 - RNA, 19 nt, Artificial Sequence
  Description of Artificial Sequence: Synthetic oligonucleotide
  Antisense strand to SEQ ID NO: 2278808
agcuuaaagaucuuaccug

SEQ ID NO: 2278810 - RNA, 19 nt, Artificial Sequence
  Description of Artificial Sequence: Synthetic oligonucleotide
  Sense strand starting at position 131 of SEQ ID NO: 1884616
agguaagaucuuuaagcuu

SEQ ID NO: 2278811 - RNA, 19 nt, Artificial Sequence
  Description of Artificial Sequence: Synthetic oligonucleotide
  Antisense strand to SEQ ID NO: 2278810
aagcuuaaagaucuuaccu

SEQ ID NO: 2278812 - RNA, 19 nt, Artificial Sequence
  Description of Artificial Sequence: Synthetic oligonucleotide
  Sense strand starting at position 198 of SEQ ID NO: 1884616
uuagucaucccuugcuaga

SEQ ID NO: 2278813 - RNA, 19 nt, Artificial Sequence
  Description of Artificial Sequence: Synthetic oligonucleotide
  Antisense strand to SEQ ID NO: 2278812
ucuagcaagggaugacuaa

SEQ ID NO: 2278814 - RNA, 19 nt, Artificial Sequence
  Description of Artificial Sequence: Synthetic oligonucleotide
  Sense strand starting at position 200 of SEQ ID NO: 1884616
agucaucccuugcuagaac

SEQ ID NO: 2278815 - RNA, 19 nt, Artificial Sequence
  Description of Artificial Sequence: Synthetic oligonucleotide
  Antisense strand to SEQ ID NO: 2278814
guucuagcaagggaugacu

SEQ ID NO: 2278816 - RNA, 19 nt, Artificial Sequence
  Description of Artificial Sequence: Synthetic oligonucleotide
  Sense strand starting at position 263 of SEQ ID NO: 1884616
ugugguucuuccucuaaag

SEQ ID NO: 2278817 - RNA, 19 nt, Artificial Sequence
  Description of Artificial Sequence: Synthetic oligonucleotide
  Antisense strand to SEQ ID NO: 2278816
cuuuagaggaagaaccaca

SEQ ID NO: 2278818 - RNA, 19 nt, Artificial Sequence
  Description of Artificial Sequence: Synthetic oligonucleotide
  Sense strand starting at position 265 of SEQ ID NO: 1884616
ugguucuuccucuaaagaa

SEQ ID NO: 2278819 - RNA, 19 nt, Artificial Sequence
  Description of Artificial Sequence: Synthetic oligonucleotide
  Antisense strand to SEQ ID NO: 2278818
uucuuuagaggaagaacca

SEQ ID NO: 2278820 - RNA, 19 nt, Artificial Sequence
  Description of Artificial Sequence: Synthetic oligonucleotide
  Sense strand starting at position 323 of SEQ ID NO: 1884616
cccaucugugcugacagaa

SEQ ID NO: 2278821 - RNA, 19 nt, Artificial Sequence
  Description of Artificial Sequence: Synthetic oligonucleotide
  Antisense strand to SEQ ID NO: 2278820
uucugucagcacagauggg

SEQ ID NO: 2278822 - RNA, 19 nt, Artificial Sequence
  Description of Artificial Sequence: Synthetic oligonucleotide
  Sense strand starting at position 348 of SEQ ID NO: 1884616
cuuacaugauccucauguu

SEQ ID NO: 2278823 - RNA, 19 nt, Artificial Sequence
  Description of Artificial Sequence: Synthetic oligonucleotide
  Antisense strand to SEQ ID NO: 2278822
aacaugaggaucauguaag

SEQ ID NO: 2278824 - RNA, 19 nt, Artificial Sequence
  Description of Artificial Sequence: Synthetic oligonucleotide
  Sense strand starting at position 434 of SEQ ID NO: 1884616
ccauuaaagcuuuaacgac

SEQ ID NO: 2278825 - RNA, 19 nt, Artificial Sequence
  Description of Artificial Sequence: Synthetic oligonucleotide
  Antisense strand to SEQ ID NO: 2278824
gucguuaaagcuuuaaugg

SEQ ID NO: 2278826 - RNA, 19 nt, Artificial Sequence
  Description of Artificial Sequence: Synthetic oligonucleotide
  Sense strand starting at position 441 of SEQ ID NO: 1884616
agcuuuaacgaccagacaa

SEQ ID NO: 2278827 - RNA, 19 nt, Artificial Sequence
  Description of Artificial Sequence: Synthetic oligonucleotide
  Antisense strand to SEQ ID NO: 2278826
uugucuggucguuaaagcu

SEQ ID NO: 2278828 - RNA, 19 nt, Artificial Sequence
  Description of Artificial Sequence: Synthetic oligonucleotide
  Sense strand starting at position 555 of SEQ ID NO: 1884616
gugccauuccaguaaagag

SEQ ID NO: 2278829 - RNA, 19 nt, Artificial Sequence
  Description of Artificial Sequence: Synthetic oligonucleotide
  Antisense strand to SEQ ID NO: 2278828
cucuuuacuggaauggcac

SEQ ID NO: 2278830 - RNA, 19 nt, Artificial Sequence
  Description of Artificial Sequence: Synthetic oligonucleotide
  Sense strand starting at position 696 of SEQ ID NO: 1884616
cugccuagccauuaggaua

SEQ ID NO: 2278831 - RNA, 19 nt, Artificial Sequence
  Description of Artificial Sequence: Synthetic oligonucleotide
  Antisense strand to SEQ ID NO: 2278830
uauccuaauggcuaggcag

SEQ ID NO: 2278832 - RNA, 19 nt, Artificial Sequence
  Description of Artificial Sequence: Synthetic oligonucleotide
  Sense strand starting at position 727 of SEQ ID NO: 1884616
agucucucguuaucuagaa

SEQ ID NO: 2278833 - RNA, 19 nt, Artificial Sequence
  Description of Artificial Sequence: Synthetic oligonucleotide
  Antisense strand to SEQ ID NO: 2278832
uucuagauaacgagagacu

SEQ ID NO: 2278834 - RNA, 19 nt, Artificial Sequence
  Description of Artificial Sequence: Synthetic oligonucleotide
  Sense strand starting at position 728 of SEQ ID NO: 1884616
gucucucguuaucuagaag

SEQ ID NO: 2278835 - RNA, 19 nt, Artificial Sequence
  Description of Artificial Sequence: Synthetic oligonucleotide
  Antisense strand to SEQ ID NO: 2278834
cuucuagauaacgagagac

SEQ ID NO: 2278836 - RNA, 19 nt, Artificial Sequence
  Description of Artificial Sequence: Synthetic oligonucleotide
  Sense strand starting at position 1214 of SEQ ID NO: 1884616
gcguguaugaaacauguua

SEQ ID NO: 2278837 - RNA, 19 nt, Artificial Sequence
  Description of Artificial Sequence: Synthetic oligonucleotide
  Antisense strand to SEQ ID NO: 2278836
uaacauguuucauacacgc

SEQ ID NO: 2278838 - RNA, 19 nt, Artificial Sequence
  Description of Artificial Sequence: Synthetic oligonucleotide
  Sense strand starting at position 1216 of SEQ ID NO: 1884616
guguaugaaacauguuauc

SEQ ID NO: 2278839 - RNA, 19 nt, Artificial Sequence
  Description of Artificial Sequence: Synthetic oligonucleotide
  Antisense strand to SEQ ID NO: 2278838
gauaacauguuucauacac

SEQ ID NO: 2278840 - RNA, 19 nt, Artificial Sequence
  Description of Artificial Sequence: Synthetic oligonucleotide
  Sense strand starting at position 1221 of SEQ ID NO: 1884616
ugaaacauguuaucuguga

SEQ ID NO: 2278841 - RNA, 19 nt, Artificial Sequence
  Description of Artificial Sequence: Synthetic oligonucleotide
  Antisense strand to SEQ ID NO: 2278840
ucacagauaacauguuuca

SEQ ID NO: 2278842 - RNA, 19 nt, Artificial Sequence
  Description of Artificial Sequence: Synthetic oligonucleotide
  Sense strand starting at position 1222 of SEQ ID NO: 1884616
gaaacauguuaucugugag

SEQ ID NO: 2278843 - RNA, 19 nt, Artificial Sequence
  Description of Artificial Sequence: Synthetic oligonucleotide
  Antisense strand to SEQ ID NO: 2278842
cucacagauaacauguuuc

SEQ ID NO: 2278844 - RNA, 19 nt, Artificial Sequence
  Description of Artificial Sequence: Synthetic oligonucleotide
  Sense strand starting at position 1225 of SEQ ID NO: 1884616
acauguuaucugugagagu

SEQ ID NO: 2278845 - RNA, 19 nt, Artificial Sequence
  Description of Artificial Sequence: Synthetic oligonucleotide
  Antisense strand to SEQ ID NO: 2278844
acucucacagauaacaugu

SEQ ID NO: 2278846 - RNA, 19 nt, Artificial Sequence
  Description of Artificial Sequence: Synthetic oligonucleotide
  Sense strand starting at position 1236 of SEQ ID NO: 1884616
gugagaguccauggaugaa

SEQ ID NO: 2278847 - RNA, 19 nt, Artificial Sequence
  Description of Artificial Sequence: Synthetic oligonucleotide
  Antisense strand to SEQ ID NO: 2278846
uucauccauggacucucac

SEQ ID NO: 2278848 - RNA, 19 nt, Artificial Sequence
  Description of Artificial Sequence: Synthetic oligonucleotide
  Sense strand starting at position 1342 of SEQ ID NO: 1884616
cagguaaggucauuguuua

SEQ ID NO: 2278849 - RNA, 19 nt, Artificial Sequence
  Description of Artificial Sequence: Synthetic oligonucleotide
  Antisense strand to SEQ ID NO: 2278848
uaaacaaugaccuuaccug

SEQ ID NO: 2278850 - RNA, 19 nt, Artificial Sequence
  Description of Artificial Sequence: Synthetic oligonucleotide
  Sense strand starting at position 1343 of SEQ ID NO: 1884616
agguaaggucauuguuuac

SEQ ID NO: 2278851 - RNA, 19 nt, Artificial Sequence
  Description of Artificial Sequence: Synthetic oligonucleotide
  Antisense strand to SEQ ID NO: 2278850
guaaacaaugaccuuaccu

SEQ ID NO: 2278852 - RNA, 19 nt, Artificial Sequence
  Description of Artificial Sequence: Synthetic oligonucleotide
  Sense strand starting at position 1542 of SEQ ID NO: 1884616
aguauaacaggugguuaga

SEQ ID NO: 2278853 - RNA, 19 nt, Artificial Sequence
  Description of Artificial Sequence: Synthetic oligonucleotide
  Antisense strand to SEQ ID NO: 2278852
ucuaaccaccuguuauacu

SEQ ID NO: 2278854 - RNA, 19 nt, Artificial Sequence
  Description of Artificial Sequence: Synthetic oligonucleotide
  Sense strand starting at position 2606 of SEQ ID NO: 1884616
agggauaggcguugagaua

SEQ ID NO: 2278855 - RNA, 19 nt, Artificial Sequence
  Description of Artificial Sequence: Synthetic oligonucleotide
  Antisense strand to SEQ ID NO: 2278854
uaucucaacgccuaucccu

SEQ ID NO: 2278856 - RNA, 19 nt, Artificial Sequence
  Description of Artificial Sequence: Synthetic oligonucleotide
  Sense strand starting at position 2607 of SEQ ID NO: 1884616
gggauaggcguugagauau

SEQ ID NO: 2278857 - RNA, 19 nt, Artificial Sequence
  Description of Artificial Sequence: Synthetic oligonucleotide
  Antisense strand to SEQ ID NO: 2278856
auaucucaacgccuauccc

SEQ ID NO: 2278858 - RNA, 19 nt, Artificial Sequence
  Description of Artificial Sequence: Synthetic oligonucleotide
  Sense strand starting at position 2930 of SEQ ID NO: 1884616
gagcgauaccuccaucuca

SEQ ID NO: 2278859 - RNA, 19 nt, Artificial Sequence
  Description of Artificial Sequence: Synthetic oligonucleotide
  Antisense strand to SEQ ID NO: 2278858
ugagauggagguaucgcuc

SEQ ID NO: 2278860 - RNA, 19 nt, Artificial Sequence
  Description of Artificial Sequence: Synthetic oligonucleotide
  Sense strand starting at position 3046 of SEQ ID NO: 1884616
caggcauaaccugggagau

SEQ ID NO: 2278861 - RNA, 19 nt, Artificial Sequence
  Description of Artificial Sequence: Synthetic oligonucleotide
  Antisense strand to SEQ ID NO: 2278860
aucucccagguuaugccug

SEQ ID NO: 2278862 - RNA, 19 nt, Artificial Sequence
  Description of Artificial Sequence: Synthetic oligonucleotide
  Sense strand starting at position 3047 of SEQ ID NO: 1884616
aggcauaaccugggagauc

SEQ ID NO: 2278863 - RNA, 19 nt, Artificial Sequence
  Description of Artificial Sequence: Synthetic oligonucleotide
  Antisense strand to SEQ ID NO: 2278862
gaucucccagguuaugccu

SEQ ID NO: 2278864 - RNA, 19 nt, Artificial Sequence
  Description of Artificial Sequence: Synthetic oligonucleotide
  Sense strand starting at position 3107 of SEQ ID NO: 1884616
cugagacccucuuccaaga

SEQ ID NO: 2278865 - RNA, 19 nt, Artificial Sequence
  Description of Artificial Sequence: Synthetic oligonucleotide
  Antisense strand to SEQ ID NO: 2278864
ucuuggaagagggucucag

SEQ ID NO: 2278866 - RNA, 19 nt, Artificial Sequence
  Description of Artificial Sequence: Synthetic oligonucleotide
  Sense strand starting at position 3122 of SEQ ID NO: 1884616
aagacaugcgguuagcauu

SEQ ID NO: 2278867 - RNA, 19 nt, Artificial Sequence
  Description of Artificial Sequence: Synthetic oligonucleotide
  Antisense strand to SEQ ID NO: 2278866
aaugcuaaccgcaugucuu

SEQ ID NO: 2278868 - RNA, 19 nt, Artificial Sequence
  Description of Artificial Sequence: Synthetic oligonucleotide
  Sense strand starting at position 3128 of SEQ ID NO: 1884616
ugcgguuagcauuagauug

SEQ ID NO: 2278869 - RNA, 19 nt, Artificial Sequence
  Description of Artificial Sequence: Synthetic oligonucleotide
  Antisense strand to SEQ ID NO: 2278868
caaucuaaugcuaaccgca

SEQ ID NO: 2278870 - RNA, 19 nt, Artificial Sequence
  Description of Artificial Sequence: Synthetic oligonucleotide
  Sense strand starting at position 3133 of SEQ ID NO: 1884616
uuagcauuagauugaguaa

SEQ ID NO: 2278871 - RNA, 19 nt, Artificial Sequence
  Description of Artificial Sequence: Synthetic oligonucleotide
  Antisense strand to SEQ ID NO: 2278870
uuacucaaucuaaugcuaa

SEQ ID NO: 2278872 - RNA, 19 nt, Artificial Sequence
  Description of Artificial Sequence: Synthetic oligonucleotide
  Sense strand starting at position 3136 of SEQ ID NO: 1884616
gcauuagauugaguaaauc

SEQ ID NO: 2278873 - RNA, 19 nt, Artificial Sequence
  Description of Artificial Sequence: Synthetic oligonucleotide
  Antisense strand to SEQ ID NO: 2278872
gauuuacucaaucuaaugc

SEQ ID NO: 2278874 - RNA, 19 nt, Artificial Sequence
  Description of Artificial Sequence: Synthetic oligonucleotide
  Sense strand starting at position 3146 of SEQ ID NO: 1884616
gaguaaaucgcagucgcua

SEQ ID NO: 2278875 - RNA, 19 nt, Artificial Sequence
  Description of Artificial Sequence: Synthetic oligonucleotide
  Antisense strand to SEQ ID NO: 2278874
uagcgacugcgauuuacuc

SEQ ID NO: 2278876 - RNA, 19 nt, Artificial Sequence
  Description of Artificial Sequence: Synthetic oligonucleotide
  Sense strand starting at position 3159 of SEQ ID NO: 1884616
ucgcuacccuaauucuaga

SEQ ID NO: 2278877 - RNA, 19 nt, Artificial Sequence
  Description of Artificial Sequence: Synthetic oligonucleotide
  Antisense strand to SEQ ID NO: 2278876
ucuagaauuaggguagcga

SEQ ID NO: 2278878 - RNA, 19 nt, Artificial Sequence
  Description of Artificial Sequence: Synthetic oligonucleotide
  Sense strand starting at position 3217 of SEQ ID NO: 1884616
uucuucuuccaaggaguaa

SEQ ID NO: 2278879 - RNA, 19 nt, Artificial Sequence
  Description of Artificial Sequence: Synthetic oligonucleotide
  Antisense strand to SEQ ID NO: 2278878
uuacuccuuggaagaagaa

SEQ ID NO: 2278880 - RNA, 19 nt, Artificial Sequence
  Description of Artificial Sequence: Synthetic oligonucleotide
  Sense strand starting at position 3329 of SEQ ID NO: 1884616
uuuaguacucacgacagau

SEQ ID NO: 2278881 - RNA, 19 nt, Artificial Sequence
  Description of Artificial Sequence: Synthetic oligonucleotide
  Antisense strand to SEQ ID NO: 2278880
aucugucgugaguacuaaa

SEQ ID NO: 2278882 - RNA, 19 nt, Artificial Sequence
  Description of Artificial Sequence: Synthetic oligonucleotide
  Sense strand starting at position 3406 of SEQ ID NO: 1884616
agcucugugagucaaggau

SEQ ID NO: 2278883 - RNA, 19 nt, Artificial Sequence
  Description of Artificial Sequence: Synthetic oligonucleotide
  Antisense strand to SEQ ID NO: 2278882
auccuugacucacagagcu

SEQ ID NO: 2278884 - RNA, 19 nt, Artificial Sequence
  Description of Artificial Sequence: Synthetic oligonucleotide
  Sense strand starting at position 70 of SEQ ID NO: 1884617
accaauaagcucugguaua

SEQ ID NO: 2278885 - RNA, 19 nt, Artificial Sequence
  Description of Artificial Sequence: Synthetic oligonucleotide
  Antisense strand to SEQ ID NO: 2278884
uauaccagagcuuauuggu

SEQ ID NO: 2278886 - RNA, 19 nt, Artificial Sequence
  Description of Artificial Sequence: Synthetic oligonucleotide
  Sense strand starting at position 290 of SEQ ID NO: 1884617
acgggagaaugcuugaacu

SEQ ID NO: 2278887 - RNA, 19 nt, Artificial Sequence
  Description of Artificial Sequence: Synthetic oligonucleotide
  Antisense strand to SEQ ID NO: 2278886
aguucaagcauucucccgu

SEQ ID NO: 2278888 - RNA, 19 nt, Artificial Sequence
  Description of Artificial Sequence: Synthetic oligonucleotide
  Sense strand starting at position 420 of SEQ ID NO: 1884617
acuccaagacuccgauauu

SEQ ID NO: 2278889 - RNA, 19 nt, Artificial Sequence
  Description of Artificial Sequence: Synthetic oligonucleotide
  Antisense strand to SEQ ID NO: 2278888
aauaucggagucuuggagu

SEQ ID NO: 2278890 - RNA, 19 nt, Artificial Sequence
  Description of Artificial Sequence: Synthetic oligonucleotide
  Sense strand starting at position 421 of SEQ ID NO: 1884617
cuccaagacuccgauauuu

SEQ ID NO: 2278891 - RNA, 19 nt, Artificial Sequence
  Description of Artificial Sequence: Synthetic oligonucleotide
  Antisense strand to SEQ ID NO: 2278890
aaauaucggagucuuggag

SEQ ID NO: 2278892 - RNA, 19 nt, Artificial Sequence
  Description of Artificial Sequence: Synthetic oligonucleotide
  Sense strand starting at position 446 of SEQ ID NO: 1884617
ucaccuuucccuggaauag

SEQ ID NO: 2278893 - RNA, 19 nt, Artificial Sequence
  Description of Artificial Sequence: Synthetic oligonucleotide
  Antisense strand to SEQ ID NO: 2278892
cuauuccagggaaagguga

SEQ ID NO: 2278894 - RNA, 19 nt, Artificial Sequence
  Description of Artificial Sequence: Synthetic oligonucleotide
  Sense strand starting at position 585 of SEQ ID NO: 1884617
agaacaacaucuggagaua

SEQ ID NO: 2278895 - RNA, 19 nt, Artificial Sequence
  Description of Artificial Sequence: Synthetic oligonucleotide
  Antisense strand to SEQ ID NO: 2278894
uaucuccagauguuguucu

SEQ ID NO: 2278896 - RNA, 19 nt, Artificial Sequence
  Description of Artificial Sequence: Synthetic oligonucleotide
  Sense strand starting at position 1010 of SEQ ID NO: 1884617
ucuauugauccucagaagu

SEQ ID NO: 2278897 - RNA, 19 nt, Artificial Sequence
  Description of Artificial Sequence: Synthetic oligonucleotide
  Antisense strand to SEQ ID NO: 2278896
acuucugaggaucaauaga

SEQ ID NO: 2278898 - RNA, 19 nt, Artificial Sequence
  Description of Artificial Sequence: Synthetic oligonucleotide
  Sense strand starting at position 1081 of SEQ ID NO: 1884617
gaaccugaggcugggaaau

SEQ ID NO: 2278899 - RNA, 19 nt, Artificial Sequence
  Description of Artificial Sequence: Synthetic oligonucleotide
  Antisense strand to SEQ ID NO: 2278898
auuucccagccucagguuc

SEQ ID NO: 2278900 - RNA, 19 nt, Artificial Sequence
  Description of Artificial Sequence: Synthetic oligonucleotide
  Sense strand starting at position 1219 of SEQ ID NO: 1884617
ugaagaguggcauguguuu

SEQ ID NO: 2278901 - RNA, 19 nt, Artificial Sequence
  Description of Artificial Sequence: Synthetic oligonucleotide
  Antisense strand to SEQ ID NO: 2278900
aaacacaugccacucuuca

SEQ ID NO: 2278902 - RNA, 19 nt, Artificial Sequence
  Description of Artificial Sequence: Synthetic oligonucleotide
  Sense strand starting at position 1225 of SEQ ID NO: 1884617
guggcauguguuuagagca

SEQ ID NO: 2278903 - RNA, 19 nt, Artificial Sequence
  Description of Artificial Sequence: Synthetic oligonucleotide
  Antisense strand to SEQ ID NO: 2278902
ugcucuaaacacaugccac

SEQ ID NO: 2278904 - RNA, 19 nt, Artificial Sequence
  Description of Artificial Sequence: Synthetic oligonucleotide
  Sense strand starting at position 2376 of SEQ ID NO: 1884617
ccauucuucugcucaugga

SEQ ID NO: 2278905 - RNA, 19 nt, Artificial Sequence
  Description of Artificial Sequence: Synthetic oligonucleotide
  Antisense strand to SEQ ID NO: 2278904
uccaugagcagaagaaugg

SEQ ID NO: 2278906 - RNA, 19 nt, Artificial Sequence
  Description of Artificial Sequence: Synthetic oligonucleotide
  Sense strand starting at position 2461 of SEQ ID NO: 1884617
cucuuugagucagcacuga

SEQ ID NO: 2278907 - RNA, 19 nt, Artificial Sequence
  Description of Artificial Sequence: Synthetic oligonucleotide
  Antisense strand to SEQ ID NO: 2278906
ucagugcugacucaaagag

SEQ ID NO: 2278908 - RNA, 19 nt, Artificial Sequence
  Description of Artificial Sequence: Synthetic oligonucleotide
  Sense strand starting at position 2465 of SEQ ID NO: 1884617
uugagucagcacugaaauu

SEQ ID NO: 2278909 - RNA, 19 nt, Artificial Sequence
  Description of Artificial Sequence: Synthetic oligonucleotide
  Antisense strand to SEQ ID NO: 2278908
aauuucagugcugacucaa

SEQ ID NO: 2278910 - RNA, 19 nt, Artificial Sequence
  Description of Artificial Sequence: Synthetic oligonucleotide
  Sense strand starting at position 2537 of SEQ ID NO: 1884617
ccugguugucaagaguaca

SEQ ID NO: 2278911 - RNA, 19 nt, Artificial Sequence
  Description of Artificial Sequence: Synthetic oligonucleotide
  Antisense strand to SEQ ID NO: 2278910
uguacucuugacaaccagg

SEQ ID NO: 2278912 - RNA, 19 nt, Artificial Sequence
  Description of Artificial Sequence: Synthetic oligonucleotide
  Sense strand starting at position 2549 of SEQ ID NO: 1884617
gaguacagccucuagucua

SEQ ID NO: 2278913 - RNA, 19 nt, Artificial Sequence
  Description of Artificial Sequence: Synthetic oligonucleotide
  Antisense strand to SEQ ID NO: 2278912
uagacuagaggcuguacuc

SEQ ID NO: 2278914 - RNA, 19 nt, Artificial Sequence
  Description of Artificial Sequence: Synthetic oligonucleotide
  Sense strand starting at position 2556 of SEQ ID NO: 1884617
gccucuagucuagguucua

SEQ ID NO: 2278915 - RNA, 19 nt, Artificial Sequence
  Description of Artificial Sequence: Synthetic oligonucleotide
  Antisense strand to SEQ ID NO: 2278914
uagaaccuagacuagaggc

SEQ ID NO: 2278916 - RNA, 19 nt, Artificial Sequence
  Description of Artificial Sequence: Synthetic oligonucleotide
  Sense strand starting at position 2557 of SEQ ID NO: 1884617
ccucuagucuagguucuaa

SEQ ID NO: 2278917 - RNA, 19 nt, Artificial Sequence
  Description of Artificial Sequence: Synthetic oligonucleotide
  Antisense strand to SEQ ID NO: 2278916
uuagaaccuagacuagagg

SEQ ID NO: 2278918 - RNA, 19 nt, Artificial Sequence
  Description of Artificial Sequence: Synthetic oligonucleotide
  Sense strand starting at position 2569 of SEQ ID NO: 1884617
guucuaauuccugggcuga

SEQ ID NO: 2278919 - RNA, 19 nt, Artificial Sequence
  Description of Artificial Sequence: Synthetic oligonucleotide
  Antisense strand to SEQ ID NO: 2278918
ucagcccaggaauuagaac

SEQ ID NO: 2278920 - RNA, 19 nt, Artificial Sequence
  Description of Artificial Sequence: Synthetic oligonucleotide
  Sense strand starting at position 2570 of SEQ ID NO: 1884617
uucuaauuccugggcugau

SEQ ID NO: 2278921 - RNA, 19 nt, Artificial Sequence
  Description of Artificial Sequence: Synthetic oligonucleotide
  Antisense strand to SEQ ID NO: 2278920
aucagcccaggaauuagaa

SEQ ID NO: 2278922 - RNA, 19 nt, Artificial Sequence
  Description of Artificial Sequence: Synthetic oligonucleotide
  Sense strand starting at position 2571 of SEQ ID NO: 1884617
ucuaauuccugggcugauu

SEQ ID NO: 2278923 - RNA, 19 nt, Artificial Sequence
  Description of Artificial Sequence: Synthetic oligonucleotide
  Antisense strand to SEQ ID NO: 2278922
aaucagcccaggaauuaga

SEQ ID NO: 2278924 - RNA, 19 nt, Artificial Sequence
  Description of Artificial Sequence: Synthetic oligonucleotide
  Sense strand starting at position 2595 of SEQ ID NO: 1884617
agaguaugaccucggauaa

SEQ ID NO: 2278925 - RNA, 19 nt, Artificial Sequence
  Description of Artificial Sequence: Synthetic oligonucleotide
  Antisense strand to SEQ ID NO: 2278924
uuauccgaggucauacucu

SEQ ID NO: 2278926 - RNA, 19 nt, Artificial Sequence
  Description of Artificial Sequence: Synthetic oligonucleotide
  Sense strand starting at position 2596 of SEQ ID NO: 1884617
gaguaugaccucggauaac

SEQ ID NO: 2278927 - RNA, 19 nt, Artificial Sequence
  Description of Artificial Sequence: Synthetic oligonucleotide
  Antisense strand to SEQ ID NO: 2278926
guuauccgaggucauacuc

SEQ ID NO: 2278928 - RNA, 19 nt, Artificial Sequence
  Description of Artificial Sequence: Synthetic oligonucleotide
  Sense strand starting at position 2740 of SEQ ID NO: 1884617
ucauuaauacuaugaagug

SEQ ID NO: 2278929 - RNA, 19 nt, Artificial Sequence
  Description of Artificial Sequence: Synthetic oligonucleotide
  Antisense strand to SEQ ID NO: 2278928
cacuucauaguauuaauga

SEQ ID NO: 2278930 - RNA, 19 nt, Artificial Sequence
  Description of Artificial Sequence: Synthetic oligonucleotide
  Sense strand starting at position 2756 of SEQ ID NO: 1884617
gugagcuugcugggaaaug

SEQ ID NO: 2278931 - RNA, 19 nt, Artificial Sequence
  Description of Artificial Sequence: Synthetic oligonucleotide
  Antisense strand to SEQ ID NO: 2278930
cauuucccagcaagcucac

SEQ ID NO: 2278932 - RNA, 19 nt, Artificial Sequence
  Description of Artificial Sequence: Synthetic oligonucleotide
  Sense strand starting at position 2766 of SEQ ID NO: 1884617
ugggaaaugucucaggaug

SEQ ID NO: 2278933 - RNA, 19 nt, Artificial Sequence
  Description of Artificial Sequence: Synthetic oligonucleotide
  Antisense strand to SEQ ID NO: 2278932
cauccugagacauuuccca

SEQ ID NO: 2278934 - RNA, 19 nt, Artificial Sequence
  Description of Artificial Sequence: Synthetic oligonucleotide
  Sense strand starting at position 2872 of SEQ ID NO: 1884617
ccaccugggucccauauuu

SEQ ID NO: 2278935 - RNA, 19 nt, Artificial Sequence
  Description of Artificial Sequence: Synthetic oligonucleotide
  Antisense strand to SEQ ID NO: 2278934
aaauaugggacccaggugg

SEQ ID NO: 2278936 - RNA, 19 nt, Artificial Sequence
  Description of Artificial Sequence: Synthetic oligonucleotide
  Sense strand starting at position 3016 of SEQ ID NO: 1884617
acuuacuuguuguuaguau

SEQ ID NO: 2278937 - RNA, 19 nt, Artificial Sequence
  Description of Artificial Sequence: Synthetic oligonucleotide
  Antisense strand to SEQ ID NO: 2278936
auacuaacaacaaguaagu

SEQ ID NO: 2278938 - RNA, 19 nt, Artificial Sequence
  Description of Artificial Sequence: Synthetic oligonucleotide
  Sense strand starting at position 3025 of SEQ ID NO: 1884617
uuguuaguaucauuagcau

SEQ ID NO: 2278939 - RNA, 19 nt, Artificial Sequence
  Description of Artificial Sequence: Synthetic oligonucleotide
  Antisense strand to SEQ ID NO: 2278938
augcuaaugauacuaacaa

SEQ ID NO: 2278940 - RNA, 19 nt, Artificial Sequence
  Description of Artificial Sequence: Synthetic oligonucleotide
  Sense strand starting at position 3071 of SEQ ID NO: 1884617
guuaaacuacuguaaaugu

SEQ ID NO: 2278941 - RNA, 19 nt, Artificial Sequence
  Description of Artificial Sequence: Synthetic oligonucleotide
  Antisense strand to SEQ ID NO: 2278940
acauuuacaguaguuuaac

SEQ ID NO: 2278942 - RNA, 19 nt, Artificial Sequence
  Description of Artificial Sequence: Synthetic oligonucleotide
  Sense strand starting at position 3274 of SEQ ID NO: 1884617
cugaguagagcccgaggua

SEQ ID NO: 2278943 - RNA, 19 nt, Artificial Sequence
  Description of Artificial Sequence: Synthetic oligonucleotide
  Antisense strand to SEQ ID NO: 2278942
uaccucgggcucuacucag

SEQ ID NO: 2278944 - RNA, 19 nt, Artificial Sequence
  Description of Artificial Sequence: Synthetic oligonucleotide
  Sense strand starting at position 3287 of SEQ ID NO: 1884617
gagguagaaucuucuccuu

SEQ ID NO: 2278945 - RNA, 19 nt, Artificial Sequence
  Description of Artificial Sequence: Synthetic oligonucleotide
  Antisense strand to SEQ ID NO: 2278944
aaggagaagauucuaccuc

SEQ ID NO: 2278946 - RNA, 19 nt, Artificial Sequence
  Description of Artificial Sequence: Synthetic oligonucleotide
  Sense strand starting at position 3289 of SEQ ID NO: 1884617
gguagaaucuucuccuuua

SEQ ID NO: 2278947 - RNA, 19 nt, Artificial Sequence
  Description of Artificial Sequence: Synthetic oligonucleotide
  Antisense strand to SEQ ID NO: 2278946
uaaaggagaagauucuacc

SEQ ID NO: 2278948 - RNA, 19 nt, Artificial Sequence
  Description of Artificial Sequence: Synthetic oligonucleotide
  Sense strand starting at position 3428 of SEQ ID NO: 1884617
auuguagguucuuucucaa

SEQ ID NO: 2278949 - RNA, 19 nt, Artificial Sequence
  Description of Artificial Sequence: Synthetic oligonucleotide
  Antisense strand to SEQ ID NO: 2278948
uugagaaagaaccuacaau

SEQ ID NO: 2278950 - RNA, 19 nt, Artificial Sequence
  Description of Artificial Sequence: Synthetic oligonucleotide
  Sense strand starting at position 3460 of SEQ ID NO: 1884617
ucauaucauuucuggagaa

SEQ ID NO: 2278951 - RNA, 19 nt, Artificial Sequence
  Description of Artificial Sequence: Synthetic oligonucleotide
  Antisense strand to SEQ ID NO: 2278950
uucuccagaaaugauauga

SEQ ID NO: 2278952 - RNA, 19 nt, Artificial Sequence
  Description of Artificial Sequence: Synthetic oligonucleotide
  Sense strand starting at position 3472 of SEQ ID NO: 1884617
uggagaauucccugccuaa

SEQ ID NO: 2278953 - RNA, 19 nt, Artificial Sequence
  Description of Artificial Sequence: Synthetic oligonucleotide
  Antisense strand to SEQ ID NO: 2278952
uuaggcagggaauucucca

SEQ ID NO: 2278954 - RNA, 19 nt, Artificial Sequence
  Description of Artificial Sequence: Synthetic oligonucleotide
  Sense strand starting at position 3593 of SEQ ID NO: 1884617
agucuaaacugguuuaauu

SEQ ID NO: 2278955 - RNA, 19 nt, Artificial Sequence
  Description of Artificial Sequence: Synthetic oligonucleotide
  Antisense strand to SEQ ID NO: 2278954
aauuaaaccaguuuagacu

SEQ ID NO: 2278956 - RNA, 19 nt, Artificial Sequence
  Description of Artificial Sequence: Synthetic oligonucleotide
  Sense strand starting at position 3604 of SEQ ID NO: 1884617
guuuaauuguuacuggaca

SEQ ID NO: 2278957 - RNA, 19 nt, Artificial Sequence
  Description of Artificial Sequence: Synthetic oligonucleotide
  Antisense strand to SEQ ID NO: 2278956
uguccaguaacaauuaaac

SEQ ID NO: 2278958 - RNA, 19 nt, Artificial Sequence
  Description of Artificial Sequence: Synthetic oligonucleotide
  Sense strand starting at position 3923 of SEQ ID NO: 1884617
agacuuagcuagcucuauu

SEQ ID NO: 2278959 - RNA, 19 nt, Artificial Sequence
  Description of Artificial Sequence: Synthetic oligonucleotide
  Antisense strand to SEQ ID NO: 2278958
aauagagcuagcuaagucu

SEQ ID NO: 2278960 - RNA, 19 nt, Artificial Sequence
  Description of Artificial Sequence: Synthetic oligonucleotide
  Sense strand starting at position 3974 of SEQ ID NO: 1884617
uuaagauaaguuuggcaag

SEQ ID NO: 2278961 - RNA, 19 nt, Artificial Sequence
  Description of Artificial Sequence: Synthetic oligonucleotide
  Antisense strand to SEQ ID NO: 2278960
cuugccaaacuuaucuuaa

SEQ ID NO: 2278962 - RNA, 19 nt, Artificial Sequence
  Description of Artificial Sequence: Synthetic oligonucleotide
  Sense strand starting at position 3976 of SEQ ID NO: 1884617
aagauaaguuuggcaagau

SEQ ID NO: 2278963 - RNA, 19 nt, Artificial Sequence
  Description of Artificial Sequence: Synthetic oligonucleotide
  Antisense strand to SEQ ID NO: 2278962
aucuugccaaacuuaucuu

SEQ ID NO: 2278964 - RNA, 19 nt, Artificial Sequence
  Description of Artificial Sequence: Synthetic oligonucleotide
  Sense strand starting at position 212 of SEQ ID NO: 1884618
uauugcagugauuaagagu

SEQ ID NO: 2278965 - RNA, 19 nt, Artificial Sequence
  Description of Artificial Sequence: Synthetic oligonucleotide
  Antisense strand to SEQ ID NO: 2278964
acucuuaaucacugcaaua

SEQ ID NO: 2278966 - RNA, 19 nt, Artificial Sequence
  Description of Artificial Sequence: Synthetic oligonucleotide
  Sense strand starting at position 227 of SEQ ID NO: 1884618
gaguaugggcucuggaauu

SEQ ID NO: 2278967 - RNA, 19 nt, Artificial Sequence
  Description of Artificial Sequence: Synthetic oligonucleotide
  Antisense strand to SEQ ID NO: 2278966
aauuccagagcccauacuc

SEQ ID NO: 2278968 - RNA, 19 nt, Artificial Sequence
  Description of Artificial Sequence: Synthetic oligonucleotide
  Sense strand starting at position 238 of SEQ ID NO: 1884618
cuggaauuagacugucuaa

SEQ ID NO: 2278969 - RNA, 19 nt, Artificial Sequence
  Description of Artificial Sequence: Synthetic oligonucleotide
  Antisense strand to SEQ ID NO: 2278968
uuagacagucuaauuccag

SEQ ID NO: 2278970 - RNA, 19 nt, Artificial Sequence
  Description of Artificial Sequence: Synthetic oligonucleotide
  Sense strand starting at position 254 of SEQ ID NO: 1884618
uaauccuggcuguaauaug

SEQ ID NO: 2278971 - RNA, 19 nt, Artificial Sequence
  Description of Artificial Sequence: Synthetic oligonucleotide
  Antisense strand to SEQ ID NO: 2278970
cauauuacagccaggauua

SEQ ID NO: 2278972 - RNA, 19 nt, Artificial Sequence
  Description of Artificial Sequence: Synthetic oligonucleotide
  Sense strand starting at position 353 of SEQ ID NO: 1884618
uaauaucugcgcuaaagga

SEQ ID NO: 2278973 - RNA, 19 nt, Artificial Sequence
  Description of Artificial Sequence: Synthetic oligonucleotide
  Antisense strand to SEQ ID NO: 2278972
uccuuuagcgcagauauua

SEQ ID NO: 2278974 - RNA, 19 nt, Artificial Sequence
  Description of Artificial Sequence: Synthetic oligonucleotide
  Sense strand starting at position 368 of SEQ ID NO: 1884618
aggacuauuguguggaauc

SEQ ID NO: 2278975 - RNA, 19 nt, Artificial Sequence
  Description of Artificial Sequence: Synthetic oligonucleotide
  Antisense strand to SEQ ID NO: 2278974
gauuccacacaauaguccu

SEQ ID NO: 2278976 - RNA, 19 nt, Artificial Sequence
  Description of Artificial Sequence: Synthetic oligonucleotide
  Sense strand starting at position 378 of SEQ ID NO: 1884618
uguggaauccgaugguaaa

SEQ ID NO: 2278977 - RNA, 19 nt, Artificial Sequence
  Description of Artificial Sequence: Synthetic oligonucleotide
  Antisense strand to SEQ ID NO: 2278976
uuuaccaucggauuccaca

SEQ ID NO: 2278978 - RNA, 19 nt, Artificial Sequence
  Description of Artificial Sequence: Synthetic oligonucleotide
  Sense strand starting at position 699 of SEQ ID NO: 1884618
caaaucucuuggucugaag

SEQ ID NO: 2278979 - RNA, 19 nt, Artificial Sequence
  Description of Artificial Sequence: Synthetic oligonucleotide
  Antisense strand to SEQ ID NO: 2278978
cuucagaccaagagauuug

SEQ ID NO: 2278980 - RNA, 19 nt, Artificial Sequence
  Description of Artificial Sequence: Synthetic oligonucleotide
  Sense strand starting at position 855 of SEQ ID NO: 1884618
gcugauagaguguaagaac

SEQ ID NO: 2278981 - RNA, 19 nt, Artificial Sequence
  Description of Artificial Sequence: Synthetic oligonucleotide
  Antisense strand to SEQ ID NO: 2278980
guucuuacacucuaucagc

SEQ ID NO: 2278982 - RNA, 19 nt, Artificial Sequence
  Description of Artificial Sequence: Synthetic oligonucleotide
  Sense strand starting at position 1009 of SEQ ID NO: 1884618
auuuguaucuauccagugu

SEQ ID NO: 2278983 - RNA, 19 nt, Artificial Sequence
  Description of Artificial Sequence: Synthetic oligonucleotide
  Antisense strand to SEQ ID NO: 2278982
acacuggauagauacaaau

SEQ ID NO: 2278984 - RNA, 19 nt, Artificial Sequence
  Description of Artificial Sequence: Synthetic oligonucleotide
  Sense strand starting at position 1033 of SEQ ID NO: 1884618
gucacuuccucauuuguuu

SEQ ID NO: 2278985 - RNA, 19 nt, Artificial Sequence
  Description of Artificial Sequence: Synthetic oligonucleotide
  Antisense strand to SEQ ID NO: 2278984
aaacaaaugaggaagugac

SEQ ID NO: 2278986 - RNA, 19 nt, Artificial Sequence
  Description of Artificial Sequence: Synthetic oligonucleotide
  Sense strand starting at position 1208 of SEQ ID NO: 1884618
ggcugaugaguuuacucuu

SEQ ID NO: 2278987 - RNA, 19 nt, Artificial Sequence
  Description of Artificial Sequence: Synthetic oligonucleotide
  Antisense strand to SEQ ID NO: 2278986
aagaguaaacucaucagcc

SEQ ID NO: 2278988 - RNA, 19 nt, Artificial Sequence
  Description of Artificial Sequence: Synthetic oligonucleotide
  Sense strand starting at position 1211 of SEQ ID NO: 1884618
ugaugaguuuacucuuuaa

SEQ ID NO: 2278989 - RNA, 19 nt, Artificial Sequence
  Description of Artificial Sequence: Synthetic oligonucleotide
  Antisense strand to SEQ ID NO: 2278988
uuaaagaguaaacucauca

SEQ ID NO: 2278990 - RNA, 19 nt, Artificial Sequence
  Description of Artificial Sequence: Synthetic oligonucleotide
  Sense strand starting at position 1214 of SEQ ID NO: 1884618
ugaguuuacucuuuaauga

SEQ ID NO: 2278991 - RNA, 19 nt, Artificial Sequence
  Description of Artificial Sequence: Synthetic oligonucleotide
  Antisense strand to SEQ ID NO: 2278990
ucauuaaagaguaaacuca

SEQ ID NO: 2278992 - RNA, 19 nt, Artificial Sequence
  Description of Artificial Sequence: Synthetic oligonucleotide
  Sense strand starting at position 1274 of SEQ ID NO: 1884618
gcucuaagagguuauggca

SEQ ID NO: 2278993 - RNA, 19 nt, Artificial Sequence
  Description of Artificial Sequence: Synthetic oligonucleotide
  Antisense strand to SEQ ID NO: 2278992
ugccauaaccucuuagagc

SEQ ID NO: 2278994 - RNA, 19 nt, Artificial Sequence
  Description of Artificial Sequence: Synthetic oligonucleotide
  Sense strand starting at position 1290 of SEQ ID NO: 1884618
gcaagagaauuauccacua

SEQ ID NO: 2278995 - RNA, 19 nt, Artificial Sequence
  Description of Artificial Sequence: Synthetic oligonucleotide
  Antisense strand to SEQ ID NO: 2278994
uaguggauaauucucuugc

SEQ ID NO: 2278996 - RNA, 19 nt, Artificial Sequence
  Description of Artificial Sequence: Synthetic oligonucleotide
  Sense strand starting at position 1531 of SEQ ID NO: 1884618
ucauaugacccucagguuu

SEQ ID NO: 2278997 - RNA, 19 nt, Artificial Sequence
  Description of Artificial Sequence: Synthetic oligonucleotide
  Antisense strand to SEQ ID NO: 2278996
aaaccugagggucauauga

SEQ ID NO: 2278998 - RNA, 19 nt, Artificial Sequence
  Description of Artificial Sequence: Synthetic oligonucleotide
  Sense strand starting at position 2279 of SEQ ID NO: 1884618
ugugcuagcagcucuaagu

SEQ ID NO: 2278999 - RNA, 19 nt, Artificial Sequence
  Description of Artificial Sequence: Synthetic oligonucleotide
  Antisense strand to SEQ ID NO: 2278998
acuuagagcugcuagcaca

SEQ ID NO: 2279000 - RNA, 19 nt, Artificial Sequence
  Description of Artificial Sequence: Synthetic oligonucleotide
  Sense strand starting at position 2280 of SEQ ID NO: 1884618
gugcuagcagcucuaaguu

SEQ ID NO: 2279001 - RNA, 19 nt, Artificial Sequence
  Description of Artificial Sequence: Synthetic oligonucleotide
  Antisense strand to SEQ ID NO: 2279000
aacuuagagcugcuagcac

SEQ ID NO: 2279002 - RNA, 19 nt, Artificial Sequence
  Description of Artificial Sequence: Synthetic oligonucleotide
  Sense strand starting at position 2351 of SEQ ID NO: 1884618
aguacugagucucugacau

SEQ ID NO: 2279003 - RNA, 19 nt, Artificial Sequence
  Description of Artificial Sequence: Synthetic oligonucleotide
  Antisense strand to SEQ ID NO: 2279002
augucagagacucaguacu

SEQ ID NO: 2279004 - RNA, 19 nt, Artificial Sequence
  Description of Artificial Sequence: Synthetic oligonucleotide
  Sense strand starting at position 2448 of SEQ ID NO: 1884618
guuucuuagguuuacacuu

SEQ ID NO: 2279005 - RNA, 19 nt, Artificial Sequence
  Description of Artificial Sequence: Synthetic oligonucleotide
  Antisense strand to SEQ ID NO: 2279004
aaguguaaaccuaagaaac

SEQ ID NO: 2279006 - RNA, 19 nt, Artificial Sequence
  Description of Artificial Sequence: Synthetic oligonucleotide
  Sense strand starting at position 2475 of SEQ ID NO: 1884618
cgaugaaacucugauuuaa

SEQ ID NO: 2279007 - RNA, 19 nt, Artificial Sequence
  Description of Artificial Sequence: Synthetic oligonucleotide
  Antisense strand to SEQ ID NO: 2279006
uuaaaucagaguuucaucg

SEQ ID NO: 2279008 - RNA, 19 nt, Artificial Sequence
  Description of Artificial Sequence: Synthetic oligonucleotide
  Sense strand starting at position 2598 of SEQ ID NO: 1884618
guggguuuaccugacacau

SEQ ID NO: 2279009 - RNA, 19 nt, Artificial Sequence
  Description of Artificial Sequence: Synthetic oligonucleotide
  Antisense strand to SEQ ID NO: 2279008
augugucagguaaacccac

SEQ ID NO: 2279010 - RNA, 19 nt, Artificial Sequence
  Description of Artificial Sequence: Synthetic oligonucleotide
  Sense strand starting at position 2609 of SEQ ID NO: 1884618
ugacacauuugugugcaua

SEQ ID NO: 2279011 - RNA, 19 nt, Artificial Sequence
  Description of Artificial Sequence: Synthetic oligonucleotide
  Antisense strand to SEQ ID NO: 2279010
uaugcacacaaauguguca

SEQ ID NO: 2279012 - RNA, 19 nt, Artificial Sequence
  Description of Artificial Sequence: Synthetic oligonucleotide
  Sense strand starting at position 2610 of SEQ ID NO: 1884618
gacacauuugugugcauau

SEQ ID NO: 2279013 - RNA, 19 nt, Artificial Sequence
  Description of Artificial Sequence: Synthetic oligonucleotide
  Antisense strand to SEQ ID NO: 2279012
auaugcacacaaauguguc

SEQ ID NO: 2279014 - RNA, 19 nt, Artificial Sequence
  Description of Artificial Sequence: Synthetic oligonucleotide
  Sense strand starting at position 2611 of SEQ ID NO: 1884618
acacauuugugugcauaug

SEQ ID NO: 2279015 - RNA, 19 nt, Artificial Sequence
  Description of Artificial Sequence: Synthetic oligonucleotide
  Antisense strand to SEQ ID NO: 2279014
cauaugcacacaaaugugu

SEQ ID NO: 2279016 - RNA, 19 nt, Artificial Sequence
  Description of Artificial Sequence: Synthetic oligonucleotide
  Sense strand starting at position 2682 of SEQ ID NO: 1884618
cuagaaguacaugguuaau

SEQ ID NO: 2279017 - RNA, 19 nt, Artificial Sequence
  Description of Artificial Sequence: Synthetic oligonucleotide
  Antisense strand to SEQ ID NO: 2279016
auuaaccauguacuucuag

SEQ ID NO: 2279018 - RNA, 19 nt, Artificial Sequence
  Description of Artificial Sequence: Synthetic oligonucleotide
  Sense strand starting at position 2702 of SEQ ID NO: 1884618
gaaggcauccuugaaugca

SEQ ID NO: 2279019 - RNA, 19 nt, Artificial Sequence
  Description of Artificial Sequence: Synthetic oligonucleotide
  Antisense strand to SEQ ID NO: 2279018
ugcauucaaggaugccuuc

SEQ ID NO: 2279020 - RNA, 19 nt, Artificial Sequence
  Description of Artificial Sequence: Synthetic oligonucleotide
  Sense strand starting at position 2724 of SEQ ID NO: 1884618
aaggaucuagucugagauc

SEQ ID NO: 2279021 - RNA, 19 nt, Artificial Sequence
  Description of Artificial Sequence: Synthetic oligonucleotide
  Antisense strand to SEQ ID NO: 2279020
gaucucagacuagauccuu

SEQ ID NO: 2279022 - RNA, 19 nt, Artificial Sequence
  Description of Artificial Sequence: Synthetic oligonucleotide
  Sense strand starting at position 2781 of SEQ ID NO: 1884618
agugccuuuguacauaaua

SEQ ID NO: 2279023 - RNA, 19 nt, Artificial Sequence
  Description of Artificial Sequence: Synthetic oligonucleotide
  Antisense strand to SEQ ID NO: 2279022
uauuauguacaaaggcacu

SEQ ID NO: 2279024 - RNA, 19 nt, Artificial Sequence
  Description of Artificial Sequence: Synthetic oligonucleotide
  Sense strand starting at position 2797 of SEQ ID NO: 1884618
auagcucuucugcaggaaa

SEQ ID NO: 2279025 - RNA, 19 nt, Artificial Sequence
  Description of Artificial Sequence: Synthetic oligonucleotide
  Antisense strand to SEQ ID NO: 2279024
uuuccugcagaagagcuau

SEQ ID NO: 2279026 - RNA, 19 nt, Artificial Sequence
  Description of Artificial Sequence: Synthetic oligonucleotide
  Sense strand starting at position 3183 of SEQ ID NO: 1884618
gcuacaagggacuguauaa

SEQ ID NO: 2279027 - RNA, 19 nt, Artificial Sequence
  Description of Artificial Sequence: Synthetic oligonucleotide
  Antisense strand to SEQ ID NO: 2279026
uuauacagucccuuguagc

SEQ ID NO: 2279028 - RNA, 19 nt, Artificial Sequence
  Description of Artificial Sequence: Synthetic oligonucleotide
  Sense strand starting at position 3196 of SEQ ID NO: 1884618
guauaaagucgguaagauu

SEQ ID NO: 2279029 - RNA, 19 nt, Artificial Sequence
  Description of Artificial Sequence: Synthetic oligonucleotide
  Antisense strand to SEQ ID NO: 2279028
aaucuuaccgacuuuauac

SEQ ID NO: 2279030 - RNA, 19 nt, Artificial Sequence
  Description of Artificial Sequence: Synthetic oligonucleotide
  Sense strand starting at position 3254 of SEQ ID NO: 1884618
aucucuaucugcuuagaga

SEQ ID NO: 2279031 - RNA, 19 nt, Artificial Sequence
  Description of Artificial Sequence: Synthetic oligonucleotide
  Antisense strand to SEQ ID NO: 2279030
ucucuaagcagauagagau

SEQ ID NO: 2279032 - RNA, 19 nt, Artificial Sequence
  Description of Artificial Sequence: Synthetic oligonucleotide
  Sense strand starting at position 3255 of SEQ ID NO: 1884618
ucucuaucugcuuagagau

SEQ ID NO: 2279033 - RNA, 19 nt, Artificial Sequence
  Description of Artificial Sequence: Synthetic oligonucleotide
  Antisense strand to SEQ ID NO: 2279032
aucucuaagcagauagaga

SEQ ID NO: 2279034 - RNA, 19 nt, Artificial Sequence
  Description of Artificial Sequence: Synthetic oligonucleotide
  Sense strand starting at position 3568 of SEQ ID NO: 1884618
agagacagcccuuaucacu

SEQ ID NO: 2279035 - RNA, 19 nt, Artificial Sequence
  Description of Artificial Sequence: Synthetic oligonucleotide
  Antisense strand to SEQ ID NO: 2279034
agugauaagggcugucucu

SEQ ID NO: 2279036 - RNA, 19 nt, Artificial Sequence
  Description of Artificial Sequence: Synthetic oligonucleotide
  Sense strand starting at position 3653 of SEQ ID NO: 1884618
auuggaaauuggguguaau

SEQ ID NO: 2279037 - RNA, 19 nt, Artificial Sequence
  Description of Artificial Sequence: Synthetic oligonucleotide
  Antisense strand to SEQ ID NO: 2279036
auuacacccaauuuccaau

SEQ ID NO: 2279038 - RNA, 19 nt, Artificial Sequence
  Description of Artificial Sequence: Synthetic oligonucleotide
  Sense strand starting at position 3654 of SEQ ID NO: 1884618
uuggaaauuggguguaauu

SEQ ID NO: 2279039 - RNA, 19 nt, Artificial Sequence
  Description of Artificial Sequence: Synthetic oligonucleotide
  Antisense strand to SEQ ID NO: 2279038
aauuacacccaauuuccaa

SEQ ID NO: 2279040 - RNA, 19 nt, Artificial Sequence
  Description of Artificial Sequence: Synthetic oligonucleotide
  Sense strand starting at position 3772 of SEQ ID NO: 1884618
gccauuagucuuccucguu

SEQ ID NO: 2279041 - RNA, 19 nt, Artificial Sequence
  Description of Artificial Sequence: Synthetic oligonucleotide
  Antisense strand to SEQ ID NO: 2279040
aacgaggaagacuaauggc

SEQ ID NO: 2279042 - RNA, 19 nt, Artificial Sequence
  Description of Artificial Sequence: Synthetic oligonucleotide
  Sense strand starting at position 3911 of SEQ ID NO: 1884618
aaacguaugguuugaauga

SEQ ID NO: 2279043 - RNA, 19 nt, Artificial Sequence
  Description of Artificial Sequence: Synthetic oligonucleotide
  Antisense strand to SEQ ID NO: 2279042
ucauucaaaccauacguuu

SEQ ID NO: 2279044 - RNA, 19 nt, Artificial Sequence
  Description of Artificial Sequence: Synthetic oligonucleotide
  Sense strand starting at position 42 of SEQ ID NO: 1884619
ugagcaggucacuaucaau

SEQ ID NO: 2279045 - RNA, 19 nt, Artificial Sequence
  Description of Artificial Sequence: Synthetic oligonucleotide
  Antisense strand to SEQ ID NO: 2279044
auugauagugaccugcuca

SEQ ID NO: 2279046 - RNA, 19 nt, Artificial Sequence
  Description of Artificial Sequence: Synthetic oligonucleotide
  Sense strand starting at position 64 of SEQ ID NO: 1884619
guauaagcucuugaguuuc

SEQ ID NO: 2279047 - RNA, 19 nt, Artificial Sequence
  Description of Artificial Sequence: Synthetic oligonucleotide
  Antisense strand to SEQ ID NO: 2279046
gaaacucaagagcuuauac

SEQ ID NO: 2279048 - RNA, 19 nt, Artificial Sequence
  Description of Artificial Sequence: Synthetic oligonucleotide
  Sense strand starting at position 111 of SEQ ID NO: 1884619
auauaucuccugcauguau

SEQ ID NO: 2279049 - RNA, 19 nt, Artificial Sequence
  Description of Artificial Sequence: Synthetic oligonucleotide
  Antisense strand to SEQ ID NO: 2279048
auacaugcaggagauauau

SEQ ID NO: 2279050 - RNA, 19 nt, Artificial Sequence
  Description of Artificial Sequence: Synthetic oligonucleotide
  Sense strand starting at position 191 of SEQ ID NO: 1884619
uacacaucuguguauguuu

SEQ ID NO: 2279051 - RNA, 19 nt, Artificial Sequence
  Description of Artificial Sequence: Synthetic oligonucleotide
  Antisense strand to SEQ ID NO: 2279050
aaacauacacagaugugua

SEQ ID NO: 2279052 - RNA, 19 nt, Artificial Sequence
  Description of Artificial Sequence: Synthetic oligonucleotide
  Sense strand starting at position 302 of SEQ ID NO: 1884619
uaauucucauuguugggaa

SEQ ID NO: 2279053 - RNA, 19 nt, Artificial Sequence
  Description of Artificial Sequence: Synthetic oligonucleotide
  Antisense strand to SEQ ID NO: 2279052
uucccaacaaugagaauua

SEQ ID NO: 2279054 - RNA, 19 nt, Artificial Sequence
  Description of Artificial Sequence: Synthetic oligonucleotide
  Sense strand starting at position 304 of SEQ ID NO: 1884619
auucucauuguugggaauu

SEQ ID NO: 2279055 - RNA, 19 nt, Artificial Sequence
  Description of Artificial Sequence: Synthetic oligonucleotide
  Antisense strand to SEQ ID NO: 2279054
aauucccaacaaugagaau

SEQ ID NO: 2279056 - RNA, 19 nt, Artificial Sequence
  Description of Artificial Sequence: Synthetic oligonucleotide
  Sense strand starting at position 335 of SEQ ID NO: 1884619
guaugaauucuggguaaau

SEQ ID NO: 2279057 - RNA, 19 nt, Artificial Sequence
  Description of Artificial Sequence: Synthetic oligonucleotide
  Antisense strand to SEQ ID NO: 2279056
auuuacccagaauucauac

SEQ ID NO: 2279058 - RNA, 19 nt, Artificial Sequence
  Description of Artificial Sequence: Synthetic oligonucleotide
  Sense strand starting at position 336 of SEQ ID NO: 1884619
uaugaauucuggguaaaug

SEQ ID NO: 2279059 - RNA, 19 nt, Artificial Sequence
  Description of Artificial Sequence: Synthetic oligonucleotide
  Antisense strand to SEQ ID NO: 2279058
cauuuacccagaauucaua

SEQ ID NO: 2279060 - RNA, 19 nt, Artificial Sequence
  Description of Artificial Sequence: Synthetic oligonucleotide
  Sense strand starting at position 405 of SEQ ID NO: 1884619
guacacuugcaagaaggua

SEQ ID NO: 2279061 - RNA, 19 nt, Artificial Sequence
  Description of Artificial Sequence: Synthetic oligonucleotide
  Antisense strand to SEQ ID NO: 2279060
uaccuucuugcaaguguac

SEQ ID NO: 2279062 - RNA, 19 nt, Artificial Sequence
  Description of Artificial Sequence: Synthetic oligonucleotide
  Sense strand starting at position 479 of SEQ ID NO: 1884619
uucugacuccugcacugau

SEQ ID NO: 2279063 - RNA, 19 nt, Artificial Sequence
  Description of Artificial Sequence: Synthetic oligonucleotide
  Antisense strand to SEQ ID NO: 2279062
aucagugcaggagucagaa

SEQ ID NO: 2279064 - RNA, 19 nt, Artificial Sequence
  Description of Artificial Sequence: Synthetic oligonucleotide
  Sense strand starting at position 498 of SEQ ID NO: 1884619
uuccuaauuugucagggaa

SEQ ID NO: 2279065 - RNA, 19 nt, Artificial Sequence
  Description of Artificial Sequence: Synthetic oligonucleotide
  Antisense strand to SEQ ID NO: 2279064
uucccugacaaauuaggaa

SEQ ID NO: 2279066 - RNA, 19 nt, Artificial Sequence
  Description of Artificial Sequence: Synthetic oligonucleotide
  Sense strand starting at position 550 of SEQ ID NO: 1884619
cccaauauccgugaagauu

SEQ ID NO: 2279067 - RNA, 19 nt, Artificial Sequence
  Description of Artificial Sequence: Synthetic oligonucleotide
  Antisense strand to SEQ ID NO: 2279066
aaucuucacggauauuggg

SEQ ID NO: 2279068 - RNA, 19 nt, Artificial Sequence
  Description of Artificial Sequence: Synthetic oligonucleotide
  Sense strand starting at position 652 of SEQ ID NO: 1884619
caaauagauuggcuguaga

SEQ ID NO: 2279069 - RNA, 19 nt, Artificial Sequence
  Description of Artificial Sequence: Synthetic oligonucleotide
  Antisense strand to SEQ ID NO: 2279068
ucuacagccaaucuauuug

SEQ ID NO: 2279070 - RNA, 19 nt, Artificial Sequence
  Description of Artificial Sequence: Synthetic oligonucleotide
  Sense strand starting at position 893 of SEQ ID NO: 1884619
ggauuagaaguuuguuuau

SEQ ID NO: 2279071 - RNA, 19 nt, Artificial Sequence
  Description of Artificial Sequence: Synthetic oligonucleotide
  Antisense strand to SEQ ID NO: 2279070
auaaacaaacuucuaaucc

SEQ ID NO: 2279072 - RNA, 19 nt, Artificial Sequence
  Description of Artificial Sequence: Synthetic oligonucleotide
  Sense strand starting at position 968 of SEQ ID NO: 1884619
augcauuucugucuuauag

SEQ ID NO: 2279073 - RNA, 19 nt, Artificial Sequence
  Description of Artificial Sequence: Synthetic oligonucleotide
  Antisense strand to SEQ ID NO: 2279072
cuauaagacagaaaugcau

SEQ ID NO: 2279074 - RNA, 19 nt, Artificial Sequence
  Description of Artificial Sequence: Synthetic oligonucleotide
  Sense strand starting at position 2003 of SEQ ID NO: 1884619
gcuagcauagauuaaauau

SEQ ID NO: 2279075 - RNA, 19 nt, Artificial Sequence
  Description of Artificial Sequence: Synthetic oligonucleotide
  Antisense strand to SEQ ID NO: 2279074
auauuuaaucuaugcuagc

SEQ ID NO: 2279076 - RNA, 19 nt, Artificial Sequence
  Description of Artificial Sequence: Synthetic oligonucleotide
  Sense strand starting at position 2140 of SEQ ID NO: 1884619
auguacuuucugugacaug

SEQ ID NO: 2279077 - RNA, 19 nt, Artificial Sequence
  Description of Artificial Sequence: Synthetic oligonucleotide
  Antisense strand to SEQ ID NO: 2279076
caugucacagaaaguacau

SEQ ID NO: 2279078 - RNA, 19 nt, Artificial Sequence
  Description of Artificial Sequence: Synthetic oligonucleotide
  Sense strand starting at position 2152 of SEQ ID NO: 1884619
ugacaugauugacuucuau

SEQ ID NO: 2279079 - RNA, 19 nt, Artificial Sequence
  Description of Artificial Sequence: Synthetic oligonucleotide
  Antisense strand to SEQ ID NO: 2279078
auagaagucaaucauguca

SEQ ID NO: 2279080 - RNA, 19 nt, Artificial Sequence
  Description of Artificial Sequence: Synthetic oligonucleotide
  Sense strand starting at position 2206 of SEQ ID NO: 1884619
ucaucuacaguuuguacaa

SEQ ID NO: 2279081 - RNA, 19 nt, Artificial Sequence
  Description of Artificial Sequence: Synthetic oligonucleotide
  Antisense strand to SEQ ID NO: 2279080
uuguacaaacuguagauga

SEQ ID NO: 2279082 - RNA, 19 nt, Artificial Sequence
  Description of Artificial Sequence: Synthetic oligonucleotide
  Sense strand starting at position 2255 of SEQ ID NO: 1884619
gguacaaacugauuggcaa

SEQ ID NO: 2279083 - RNA, 19 nt, Artificial Sequence
  Description of Artificial Sequence: Synthetic oligonucleotide
  Antisense strand to SEQ ID NO: 2279082
uugccaaucaguuuguacc

SEQ ID NO: 2279084 - RNA, 19 nt, Artificial Sequence
  Description of Artificial Sequence: Synthetic oligonucleotide
  Sense strand starting at position 2256 of SEQ ID NO: 1884619
guacaaacugauuggcaau

SEQ ID NO: 2279085 - RNA, 19 nt, Artificial Sequence
  Description of Artificial Sequence: Synthetic oligonucleotide
  Antisense strand to SEQ ID NO: 2279084
auugccaaucaguuuguac

SEQ ID NO: 2279086 - RNA, 19 nt, Artificial Sequence
  Description of Artificial Sequence: Synthetic oligonucleotide
  Sense strand starting at position 2498 of SEQ ID NO: 1884619
caugacucauggcuaugua

SEQ ID NO: 2279087 - RNA, 19 nt, Artificial Sequence
  Description of Artificial Sequence: Synthetic oligonucleotide
  Antisense strand to SEQ ID NO: 2279086
uacauagccaugagucaug

SEQ ID NO: 2279088 - RNA, 19 nt, Artificial Sequence
  Description of Artificial Sequence: Synthetic oligonucleotide
  Sense strand starting at position 2501 of SEQ ID NO: 1884619
gacucauggcuauguagaa

SEQ ID NO: 2279089 - RNA, 19 nt, Artificial Sequence
  Description of Artificial Sequence: Synthetic oligonucleotide
  Antisense strand to SEQ ID NO: 2279088
uucuacauagccaugaguc

SEQ ID NO: 2279090 - RNA, 19 nt, Artificial Sequence
  Description of Artificial Sequence: Synthetic oligonucleotide
  Sense strand starting at position 2549 of SEQ ID NO: 1884619
ugugccaaaugaucuuauu

SEQ ID NO: 2279091 - RNA, 19 nt, Artificial Sequence
  Description of Artificial Sequence: Synthetic oligonucleotide
  Antisense strand to SEQ ID NO: 2279090
aauaagaucauuuggcaca

SEQ ID NO: 2279092 - RNA, 19 nt, Artificial Sequence
  Description of Artificial Sequence: Synthetic oligonucleotide
  Sense strand starting at position 2581 of SEQ ID NO: 1884619
ccaaucuguuauccaguua

SEQ ID NO: 2279093 - RNA, 19 nt, Artificial Sequence
  Description of Artificial Sequence: Synthetic oligonucleotide
  Antisense strand to SEQ ID NO: 2279092
uaacuggauaacagauugg

SEQ ID NO: 2279094 - RNA, 19 nt, Artificial Sequence
  Description of Artificial Sequence: Synthetic oligonucleotide
  Sense strand starting at position 2617 of SEQ ID NO: 1884619
gcuuacaauuugucuccga

SEQ ID NO: 2279095 - RNA, 19 nt, Artificial Sequence
  Description of Artificial Sequence: Synthetic oligonucleotide
  Antisense strand to SEQ ID NO: 2279094
ucggagacaaauuguaagc

SEQ ID NO: 2279096 - RNA, 19 nt, Artificial Sequence
  Description of Artificial Sequence: Synthetic oligonucleotide
  Sense strand starting at position 2637 of SEQ ID NO: 1884619
acaaguaacucagugugaa

SEQ ID NO: 2279097 - RNA, 19 nt, Artificial Sequence
  Description of Artificial Sequence: Synthetic oligonucleotide
  Antisense strand to SEQ ID NO: 2279096
uucacacugaguuacuugu

SEQ ID NO: 2279098 - RNA, 19 nt, Artificial Sequence
  Description of Artificial Sequence: Synthetic oligonucleotide
  Sense strand starting at position 2638 of SEQ ID NO: 1884619
caaguaacucagugugaaa

SEQ ID NO: 2279099 - RNA, 19 nt, Artificial Sequence
  Description of Artificial Sequence: Synthetic oligonucleotide
  Antisense strand to SEQ ID NO: 2279098
uuucacacugaguuacuug

SEQ ID NO: 2279100 - RNA, 19 nt, Artificial Sequence
  Description of Artificial Sequence: Synthetic oligonucleotide
  Sense strand starting at position 2719 of SEQ ID NO: 1884619
cuugacaagcauugcagau

SEQ ID NO: 2279101 - RNA, 19 nt, Artificial Sequence
  Description of Artificial Sequence: Synthetic oligonucleotide
  Antisense strand to SEQ ID NO: 2279100
aucugcaaugcuugucaag

SEQ ID NO: 2279102 - RNA, 19 nt, Artificial Sequence
  Description of Artificial Sequence: Synthetic oligonucleotide
  Sense strand starting at position 2856 of SEQ ID NO: 1884619
acagguguaaaguagcaua

SEQ ID NO: 2279103 - RNA, 19 nt, Artificial Sequence
  Description of Artificial Sequence: Synthetic oligonucleotide
  Antisense strand to SEQ ID NO: 2279102
uaugcuacuuuacaccugu

SEQ ID NO: 2279104 - RNA, 19 nt, Artificial Sequence
  Description of Artificial Sequence: Synthetic oligonucleotide
  Sense strand starting at position 2861 of SEQ ID NO: 1884619
uguaaaguagcauaccauu

SEQ ID NO: 2279105 - RNA, 19 nt, Artificial Sequence
  Description of Artificial Sequence: Synthetic oligonucleotide
  Antisense strand to SEQ ID NO: 2279104
aaugguaugcuacuuuaca

SEQ ID NO: 2279106 - RNA, 19 nt, Artificial Sequence
  Description of Artificial Sequence: Synthetic oligonucleotide
  Sense strand starting at position 2927 of SEQ ID NO: 1884619
ggaauucuauuguucugua

SEQ ID NO: 2279107 - RNA, 19 nt, Artificial Sequence
  Description of Artificial Sequence: Synthetic oligonucleotide
  Antisense strand to SEQ ID NO: 2279106
uacagaacaauagaauucc

SEQ ID NO: 2279108 - RNA, 19 nt, Artificial Sequence
  Description of Artificial Sequence: Synthetic oligonucleotide
  Sense strand starting at position 2941 of SEQ ID NO: 1884619
cuguaauuugccuguuccu

SEQ ID NO: 2279109 - RNA, 19 nt, Artificial Sequence
  Description of Artificial Sequence: Synthetic oligonucleotide
  Antisense strand to SEQ ID NO: 2279108
aggaacaggcaaauuacag

SEQ ID NO: 2279110 - RNA, 19 nt, Artificial Sequence
  Description of Artificial Sequence: Synthetic oligonucleotide
  Sense strand starting at position 3011 of SEQ ID NO: 1884619
cuuaucaguugacuugaca

SEQ ID NO: 2279111 - RNA, 19 nt, Artificial Sequence
  Description of Artificial Sequence: Synthetic oligonucleotide
  Antisense strand to SEQ ID NO: 2279110
ugucaagucaacugauaag

SEQ ID NO: 2279112 - RNA, 19 nt, Artificial Sequence
  Description of Artificial Sequence: Synthetic oligonucleotide
  Sense strand starting at position 3190 of SEQ ID NO: 1884619
uuucccuguggauacaaau

SEQ ID NO: 2279113 - RNA, 19 nt, Artificial Sequence
  Description of Artificial Sequence: Synthetic oligonucleotide
  Antisense strand to SEQ ID NO: 2279112
auuuguauccacagggaaa

SEQ ID NO: 2279114 - RNA, 19 nt, Artificial Sequence
  Description of Artificial Sequence: Synthetic oligonucleotide
  Sense strand starting at position 3468 of SEQ ID NO: 1884619
guugaauaccuaugacuua

SEQ ID NO: 2279115 - RNA, 19 nt, Artificial Sequence
  Description of Artificial Sequence: Synthetic oligonucleotide
  Antisense strand to SEQ ID NO: 2279114
uaagucauagguauucaac

SEQ ID NO: 2279116 - RNA, 19 nt, Artificial Sequence
  Description of Artificial Sequence: Synthetic oligonucleotide
  Sense strand starting at position 3608 of SEQ ID NO: 1884619
uuuacucacguuggaaauu

SEQ ID NO: 2279117 - RNA, 19 nt, Artificial Sequence
  Description of Artificial Sequence: Synthetic oligonucleotide
  Antisense strand to SEQ ID NO: 2279116
aauuuccaacgugaguaaa

SEQ ID NO: 2279118 - RNA, 19 nt, Artificial Sequence
  Description of Artificial Sequence: Synthetic oligonucleotide
  Sense strand starting at position 3825 of SEQ ID NO: 1884619
acucacuaguaaucaggua

SEQ ID NO: 2279119 - RNA, 19 nt, Artificial Sequence
  Description of Artificial Sequence: Synthetic oligonucleotide
  Antisense strand to SEQ ID NO: 2279118
uaccugauuacuagugagu

SEQ ID NO: 2279120 - RNA, 19 nt, Artificial Sequence
  Description of Artificial Sequence: Synthetic oligonucleotide
  Sense strand starting at position 3963 of SEQ ID NO: 1884619
uacagucauguuggaaaca

SEQ ID NO: 2279121 - RNA, 19 nt, Artificial Sequence
  Description of Artificial Sequence: Synthetic oligonucleotide
  Antisense strand to SEQ ID NO: 2279120
uguuuccaacaugacugua

SEQ ID NO: 2279122 - RNA, 19 nt, Artificial Sequence
  Description of Artificial Sequence: Synthetic oligonucleotide
  Sense strand starting at position 3975 of SEQ ID NO: 1884619
ggaaacaaauuuggaaaua

SEQ ID NO: 2279123 - RNA, 19 nt, Artificial Sequence
  Description of Artificial Sequence: Synthetic oligonucleotide
  Antisense strand to SEQ ID NO: 2279122
uauuuccaaauuuguuucc

SEQ ID NO: 2279124 - RNA, 19 nt, Artificial Sequence
  Description of Artificial Sequence: Synthetic oligonucleotide
  Sense strand starting at position 864 of SEQ ID NO: 1884620
uuauuuaaagcaugcagua

SEQ ID NO: 2279125 - RNA, 19 nt, Artificial Sequence
  Description of Artificial Sequence: Synthetic oligonucleotide
  Antisense strand to SEQ ID NO: 2279124
uacugcaugcuuuaaauaa

SEQ ID NO: 2279126 - RNA, 19 nt, Artificial Sequence
  Description of Artificial Sequence: Synthetic oligonucleotide
  Sense strand starting at position 912 of SEQ ID NO: 1884620
uuuguaagcuggucuugaa

SEQ ID NO: 2279127 - RNA, 19 nt, Artificial Sequence
  Description of Artificial Sequence: Synthetic oligonucleotide
  Antisense strand to SEQ ID NO: 2279126
uucaagaccagcuuacaaa

SEQ ID NO: 2279128 - RNA, 19 nt, Artificial Sequence
  Description of Artificial Sequence: Synthetic oligonucleotide
  Sense strand starting at position 916 of SEQ ID NO: 1884620
uaagcuggucuugaaacuu

SEQ ID NO: 2279129 - RNA, 19 nt, Artificial Sequence
  Description of Artificial Sequence: Synthetic oligonucleotide
  Antisense strand to SEQ ID NO: 2279128
aaguuucaagaccagcuua

SEQ ID NO: 2279130 - RNA, 19 nt, Artificial Sequence
  Description of Artificial Sequence: Synthetic oligonucleotide
  Sense strand starting at position 1060 of SEQ ID NO: 1884620
uguacccagcuuuguuaaa

SEQ ID NO: 2279131 - RNA, 19 nt, Artificial Sequence
  Description of Artificial Sequence: Synthetic oligonucleotide
  Antisense strand to SEQ ID NO: 2279130
uuuaacaaagcuggguaca

SEQ ID NO: 2279132 - RNA, 19 nt, Artificial Sequence
  Description of Artificial Sequence: Synthetic oligonucleotide
  Sense strand starting at position 1061 of SEQ ID NO: 1884620
guacccagcuuuguuaaau

SEQ ID NO: 2279133 - RNA, 19 nt, Artificial Sequence
  Description of Artificial Sequence: Synthetic oligonucleotide
  Antisense strand to SEQ ID NO: 2279132
auuuaacaaagcuggguac

SEQ ID NO: 2279134 - RNA, 19 nt, Artificial Sequence
  Description of Artificial Sequence: Synthetic oligonucleotide
  Sense strand starting at position 1179 of SEQ ID NO: 1884620
aggacacaguuauugacau

SEQ ID NO: 2279135 - RNA, 19 nt, Artificial Sequence
  Description of Artificial Sequence: Synthetic oligonucleotide
  Antisense strand to SEQ ID NO: 2279134
augucaauaacuguguccu

SEQ ID NO: 2279136 - RNA, 19 nt, Artificial Sequence
  Description of Artificial Sequence: Synthetic oligonucleotide
  Sense strand starting at position 1191 of SEQ ID NO: 1884620
uugacauucuagcuuguaa

SEQ ID NO: 2279137 - RNA, 19 nt, Artificial Sequence
  Description of Artificial Sequence: Synthetic oligonucleotide
  Antisense strand to SEQ ID NO: 2279136
uuacaagcuagaaugucaa

SEQ ID NO: 2279138 - RNA, 19 nt, Artificial Sequence
  Description of Artificial Sequence: Synthetic oligonucleotide
  Sense strand starting at position 1193 of SEQ ID NO: 1884620
gacauucuagcuuguaagu

SEQ ID NO: 2279139 - RNA, 19 nt, Artificial Sequence
  Description of Artificial Sequence: Synthetic oligonucleotide
  Antisense strand to SEQ ID NO: 2279138
acuuacaagcuagaauguc

SEQ ID NO: 2279140 - RNA, 19 nt, Artificial Sequence
  Description of Artificial Sequence: Synthetic oligonucleotide
  Sense strand starting at position 1198 of SEQ ID NO: 1884620
ucuagcuuguaagucaauu

SEQ ID NO: 2279141 - RNA, 19 nt, Artificial Sequence
  Description of Artificial Sequence: Synthetic oligonucleotide
  Antisense strand to SEQ ID NO: 2279140
aauugacuuacaagcuaga

SEQ ID NO: 2279142 - RNA, 19 nt, Artificial Sequence
  Description of Artificial Sequence: Synthetic oligonucleotide
  Sense strand starting at position 1254 of SEQ ID NO: 1884620
uuaaauaagugacccagua

SEQ ID NO: 2279143 - RNA, 19 nt, Artificial Sequence
  Description of Artificial Sequence: Synthetic oligonucleotide
  Antisense strand to SEQ ID NO: 2279142
uacugggucacuuauuuaa

SEQ ID NO: 2279144 - RNA, 19 nt, Artificial Sequence
  Description of Artificial Sequence: Synthetic oligonucleotide
  Sense strand starting at position 1264 of SEQ ID NO: 1884620
gacccaguacuuuggucau

SEQ ID NO: 2279145 - RNA, 19 nt, Artificial Sequence
  Description of Artificial Sequence: Synthetic oligonucleotide
  Antisense strand to SEQ ID NO: 2279144
augaccaaaguacuggguc

SEQ ID NO: 2279146 - RNA, 19 nt, Artificial Sequence
  Description of Artificial Sequence: Synthetic oligonucleotide
  Sense strand starting at position 1266 of SEQ ID NO: 1884620
cccaguacuuuggucauua

SEQ ID NO: 2279147 - RNA, 19 nt, Artificial Sequence
  Description of Artificial Sequence: Synthetic oligonucleotide
  Antisense strand to SEQ ID NO: 2279146
uaaugaccaaaguacuggg

SEQ ID NO: 2279148 - RNA, 19 nt, Artificial Sequence
  Description of Artificial Sequence: Synthetic oligonucleotide
  Sense strand starting at position 1267 of SEQ ID NO: 1884620
ccaguacuuuggucauuaa

SEQ ID NO: 2279149 - RNA, 19 nt, Artificial Sequence
  Description of Artificial Sequence: Synthetic oligonucleotide
  Antisense strand to SEQ ID NO: 2279148
uuaaugaccaaaguacugg

SEQ ID NO: 2279150 - RNA, 19 nt, Artificial Sequence
  Description of Artificial Sequence: Synthetic oligonucleotide
  Sense strand starting at position 1388 of SEQ ID NO: 1884620
caguaugcugcguuccauu

SEQ ID NO: 2279151 - RNA, 19 nt, Artificial Sequence
  Description of Artificial Sequence: Synthetic oligonucleotide
  Antisense strand to SEQ ID NO: 2279150
aauggaacgcagcauacug

SEQ ID NO: 2279152 - RNA, 19 nt, Artificial Sequence
  Description of Artificial Sequence: Synthetic oligonucleotide
  Sense strand starting at position 1390 of SEQ ID NO: 1884620
guaugcugcguuccauuaa

SEQ ID NO: 2279153 - RNA, 19 nt, Artificial Sequence
  Description of Artificial Sequence: Synthetic oligonucleotide
  Antisense strand to SEQ ID NO: 2279152
uuaauggaacgcagcauac

SEQ ID NO: 2279154 - RNA, 19 nt, Artificial Sequence
  Description of Artificial Sequence: Synthetic oligonucleotide
  Sense strand starting at position 2109 of SEQ ID NO: 1884620
gcaucuugggcccaauaga

SEQ ID NO: 2279155 - RNA, 19 nt, Artificial Sequence
  Description of Artificial Sequence: Synthetic oligonucleotide
  Antisense strand to SEQ ID NO: 2279154
ucuauugggcccaagaugc

SEQ ID NO: 2279156 - RNA, 19 nt, Artificial Sequence
  Description of Artificial Sequence: Synthetic oligonucleotide
  Sense strand starting at position 2126 of SEQ ID NO: 1884620
gaagaugaguaacacagau

SEQ ID NO: 2279157 - RNA, 19 nt, Artificial Sequence
  Description of Artificial Sequence: Synthetic oligonucleotide
  Antisense strand to SEQ ID NO: 2279156
aucuguguuacucaucuuc

SEQ ID NO: 2279158 - RNA, 19 nt, Artificial Sequence
  Description of Artificial Sequence: Synthetic oligonucleotide
  Sense strand starting at position 2145 of SEQ ID NO: 1884620
caaugaaugccaggugacu

SEQ ID NO: 2279159 - RNA, 19 nt, Artificial Sequence
  Description of Artificial Sequence: Synthetic oligonucleotide
  Antisense strand to SEQ ID NO: 2279158
agucaccuggcauucauug

SEQ ID NO: 2279160 - RNA, 19 nt, Artificial Sequence
  Description of Artificial Sequence: Synthetic oligonucleotide
  Sense strand starting at position 2202 of SEQ ID NO: 1884620
cucugaucagcaggaucau

SEQ ID NO: 2279161 - RNA, 19 nt, Artificial Sequence
  Description of Artificial Sequence: Synthetic oligonucleotide
  Antisense strand to SEQ ID NO: 2279160
augauccugcugaucagag

SEQ ID NO: 2279162 - RNA, 19 nt, Artificial Sequence
  Description of Artificial Sequence: Synthetic oligonucleotide
  Sense strand starting at position 2244 of SEQ ID NO: 1884620
ugagauaaaugacaaggaa

SEQ ID NO: 2279163 - RNA, 19 nt, Artificial Sequence
  Description of Artificial Sequence: Synthetic oligonucleotide
  Antisense strand to SEQ ID NO: 2279162
uuccuugucauuuaucuca

SEQ ID NO: 2279164 - RNA, 19 nt, Artificial Sequence
  Description of Artificial Sequence: Synthetic oligonucleotide
  Sense strand starting at position 2317 of SEQ ID NO: 1884620
aaauucggucacuguggua

SEQ ID NO: 2279165 - RNA, 19 nt, Artificial Sequence
  Description of Artificial Sequence: Synthetic oligonucleotide
  Antisense strand to SEQ ID NO: 2279164
uaccacagugaccgaauuu

SEQ ID NO: 2279166 - RNA, 19 nt, Artificial Sequence
  Description of Artificial Sequence: Synthetic oligonucleotide
  Sense strand starting at position 2421 of SEQ ID NO: 1884620
guugcauuaccauacgaaa

SEQ ID NO: 2279167 - RNA, 19 nt, Artificial Sequence
  Description of Artificial Sequence: Synthetic oligonucleotide
  Antisense strand to SEQ ID NO: 2279166
uuucguaugguaaugcaac

SEQ ID NO: 2279168 - RNA, 19 nt, Artificial Sequence
  Description of Artificial Sequence: Synthetic oligonucleotide
  Sense strand starting at position 2465 of SEQ ID NO: 1884620
auaguuaaaggcugucauu

SEQ ID NO: 2279169 - RNA, 19 nt, Artificial Sequence
  Description of Artificial Sequence: Synthetic oligonucleotide
  Antisense strand to SEQ ID NO: 2279168
aaugacagccuuuaacuau

SEQ ID NO: 2279170 - RNA, 19 nt, Artificial Sequence
  Description of Artificial Sequence: Synthetic oligonucleotide
  Sense strand starting at position 2471 of SEQ ID NO: 1884620
aaaggcugucauuagcuau

SEQ ID NO: 2279171 - RNA, 19 nt, Artificial Sequence
  Description of Artificial Sequence: Synthetic oligonucleotide
  Antisense strand to SEQ ID NO: 2279170
auagcuaaugacagccuuu

SEQ ID NO: 2279172 - RNA, 19 nt, Artificial Sequence
  Description of Artificial Sequence: Synthetic oligonucleotide
  Sense strand starting at position 2475 of SEQ ID NO: 1884620
gcugucauuagcuauggga

SEQ ID NO: 2279173 - RNA, 19 nt, Artificial Sequence
  Description of Artificial Sequence: Synthetic oligonucleotide
  Antisense strand to SEQ ID NO: 2279172
ucccauagcuaaugacagc

SEQ ID NO: 2279174 - RNA, 19 nt, Artificial Sequence
  Description of Artificial Sequence: Synthetic oligonucleotide
  Sense strand starting at position 2477 of SEQ ID NO: 1884620
ugucauuagcuaugggacu

SEQ ID NO: 2279175 - RNA, 19 nt, Artificial Sequence
  Description of Artificial Sequence: Synthetic oligonucleotide
  Antisense strand to SEQ ID NO: 2279174
agucccauagcuaaugaca

SEQ ID NO: 2279176 - RNA, 19 nt, Artificial Sequence
  Description of Artificial Sequence: Synthetic oligonucleotide
  Sense strand starting at position 2488 of SEQ ID NO: 1884620
augggacuuuauucugcua

SEQ ID NO: 2279177 - RNA, 19 nt, Artificial Sequence
  Description of Artificial Sequence: Synthetic oligonucleotide
  Antisense strand to SEQ ID NO: 2279176
uagcagaauaaagucccau

SEQ ID NO: 2279178 - RNA, 19 nt, Artificial Sequence
  Description of Artificial Sequence: Synthetic oligonucleotide
  Sense strand starting at position 2675 of SEQ ID NO: 1884620
uggguaugacaaugacauu

SEQ ID NO: 2279179 - RNA, 19 nt, Artificial Sequence
  Description of Artificial Sequence: Synthetic oligonucleotide
  Antisense strand to SEQ ID NO: 2279178
aaugucauugucauaccca

SEQ ID NO: 2279180 - RNA, 19 nt, Artificial Sequence
  Description of Artificial Sequence: Synthetic oligonucleotide
  Sense strand starting at position 2686 of SEQ ID NO: 1884620
augacauugucuuuguucu

SEQ ID NO: 2279181 - RNA, 19 nt, Artificial Sequence
  Description of Artificial Sequence: Synthetic oligonucleotide
  Antisense strand to SEQ ID NO: 2279180
agaacaaagacaaugucau

SEQ ID NO: 2279182 - RNA, 19 nt, Artificial Sequence
  Description of Artificial Sequence: Synthetic oligonucleotide
  Sense strand starting at position 2770 of SEQ ID NO: 1884620
ugcagagugcuguaggagu

SEQ ID NO: 2279183 - RNA, 19 nt, Artificial Sequence
  Description of Artificial Sequence: Synthetic oligonucleotide
  Antisense strand to SEQ ID NO: 2279182
acuccuacagcacucugca

SEQ ID NO: 2279184 - RNA, 19 nt, Artificial Sequence
  Description of Artificial Sequence: Synthetic oligonucleotide
  Sense strand starting at position 2977 of SEQ ID NO: 1884620
acauguaaguaacuaguua

SEQ ID NO: 2279185 - RNA, 19 nt, Artificial Sequence
  Description of Artificial Sequence: Synthetic oligonucleotide
  Antisense strand to SEQ ID NO: 2279184
uaacuaguuacuuacaugu

SEQ ID NO: 2279186 - RNA, 19 nt, Artificial Sequence
  Description of Artificial Sequence: Synthetic oligonucleotide
  Sense strand starting at position 2981 of SEQ ID NO: 1884620
guaaguaacuaguuacaau

SEQ ID NO: 2279187 - RNA, 19 nt, Artificial Sequence
  Description of Artificial Sequence: Synthetic oligonucleotide
  Antisense strand to SEQ ID NO: 2279186
auuguaacuaguuacuuac

SEQ ID NO: 2279188 - RNA, 19 nt, Artificial Sequence
  Description of Artificial Sequence: Synthetic oligonucleotide
  Sense strand starting at position 3006 of SEQ ID NO: 1884620
uggguaaugcucugaaaga

SEQ ID NO: 2279189 - RNA, 19 nt, Artificial Sequence
  Description of Artificial Sequence: Synthetic oligonucleotide
  Antisense strand to SEQ ID NO: 2279188
ucuuucagagcauuaccca

SEQ ID NO: 2279190 - RNA, 19 nt, Artificial Sequence
  Description of Artificial Sequence: Synthetic oligonucleotide
  Sense strand starting at position 3024 of SEQ ID NO: 1884620
agaggaaucuccuaacuca

SEQ ID NO: 2279191 - RNA, 19 nt, Artificial Sequence
  Description of Artificial Sequence: Synthetic oligonucleotide
  Antisense strand to SEQ ID NO: 2279190
ugaguuaggagauuccucu

SEQ ID NO: 2279192 - RNA, 19 nt, Artificial Sequence
  Description of Artificial Sequence: Synthetic oligonucleotide
  Sense strand starting at position 3130 of SEQ ID NO: 1884620
auauauccacuuggugaaa

SEQ ID NO: 2279193 - RNA, 19 nt, Artificial Sequence
  Description of Artificial Sequence: Synthetic oligonucleotide
  Antisense strand to SEQ ID NO: 2279192
uuucaccaaguggauauau

SEQ ID NO: 2279194 - RNA, 19 nt, Artificial Sequence
  Description of Artificial Sequence: Synthetic oligonucleotide
  Sense strand starting at position 3225 of SEQ ID NO: 1884620
uguuaacaguuccuuuagu

SEQ ID NO: 2279195 - RNA, 19 nt, Artificial Sequence
  Description of Artificial Sequence: Synthetic oligonucleotide
  Antisense strand to SEQ ID NO: 2279194
acuaaaggaacuguuaaca

SEQ ID NO: 2279196 - RNA, 19 nt, Artificial Sequence
  Description of Artificial Sequence: Synthetic oligonucleotide
  Sense strand starting at position 3226 of SEQ ID NO: 1884620
guuaacaguuccuuuagua

SEQ ID NO: 2279197 - RNA, 19 nt, Artificial Sequence
  Description of Artificial Sequence: Synthetic oligonucleotide
  Antisense strand to SEQ ID NO: 2279196
uacuaaaggaacuguuaac

SEQ ID NO: 2279198 - RNA, 19 nt, Artificial Sequence
  Description of Artificial Sequence: Synthetic oligonucleotide
  Sense strand starting at position 3248 of SEQ ID NO: 1884620
uucuaagaaugcuuaggua

SEQ ID NO: 2279199 - RNA, 19 nt, Artificial Sequence
  Description of Artificial Sequence: Synthetic oligonucleotide
  Antisense strand to SEQ ID NO: 2279198
uaccuaagcauucuuagaa

SEQ ID NO: 2279200 - RNA, 19 nt, Artificial Sequence
  Description of Artificial Sequence: Synthetic oligonucleotide
  Sense strand starting at position 3735 of SEQ ID NO: 1884620
cgcucauaugucuaagcau

SEQ ID NO: 2279201 - RNA, 19 nt, Artificial Sequence
  Description of Artificial Sequence: Synthetic oligonucleotide
  Antisense strand to SEQ ID NO: 2279200
augcuuagacauaugagcg

SEQ ID NO: 2279202 - RNA, 19 nt, Artificial Sequence
  Description of Artificial Sequence: Synthetic oligonucleotide
  Sense strand starting at position 3966 of SEQ ID NO: 1884620
gaggcucaagccugagaau

SEQ ID NO: 2279203 - RNA, 19 nt, Artificial Sequence
  Description of Artificial Sequence: Synthetic oligonucleotide
  Antisense strand to SEQ ID NO: 2279202
auucucaggcuugagccuc

SEQ ID NO: 2279204 - RNA, 19 nt, Artificial Sequence
  Description of Artificial Sequence: Synthetic oligonucleotide
  Sense strand starting at position 218 of SEQ ID NO: 1884621
uguguacgccugcugugau

SEQ ID NO: 2279205 - RNA, 19 nt, Artificial Sequence
  Description of Artificial Sequence: Synthetic oligonucleotide
  Antisense strand to SEQ ID NO: 2279204
aucacagcaggcguacaca

SEQ ID NO: 2279206 - RNA, 19 nt, Artificial Sequence
  Description of Artificial Sequence: Synthetic oligonucleotide
  Sense strand starting at position 219 of SEQ ID NO: 1884621
guguacgccugcugugaua

SEQ ID NO: 2279207 - RNA, 19 nt, Artificial Sequence
  Description of Artificial Sequence: Synthetic oligonucleotide
  Antisense strand to SEQ ID NO: 2279206
uaucacagcaggcguacac

SEQ ID NO: 2279208 - RNA, 19 nt, Artificial Sequence
  Description of Artificial Sequence: Synthetic oligonucleotide
  Sense strand starting at position 221 of SEQ ID NO: 1884621
guacgccugcugugauauu

SEQ ID NO: 2279209 - RNA, 19 nt, Artificial Sequence
  Description of Artificial Sequence: Synthetic oligonucleotide
  Antisense strand to SEQ ID NO: 2279208
aauaucacagcaggcguac

SEQ ID NO: 2279210 - RNA, 19 nt, Artificial Sequence
  Description of Artificial Sequence: Synthetic oligonucleotide
  Sense strand starting at position 222 of SEQ ID NO: 1884621
uacgccugcugugauauua

SEQ ID NO: 2279211 - RNA, 19 nt, Artificial Sequence
  Description of Artificial Sequence: Synthetic oligonucleotide
  Antisense strand to SEQ ID NO: 2279210
uaauaucacagcaggcgua

SEQ ID NO: 2279212 - RNA, 19 nt, Artificial Sequence
  Description of Artificial Sequence: Synthetic oligonucleotide
  Sense strand starting at position 333 of SEQ ID NO: 1884621
gggagauguuuccuugaau

SEQ ID NO: 2279213 - RNA, 19 nt, Artificial Sequence
  Description of Artificial Sequence: Synthetic oligonucleotide
  Antisense strand to SEQ ID NO: 2279212
auucaaggaaacaucuccc

SEQ ID NO: 2279214 - RNA, 19 nt, Artificial Sequence
  Description of Artificial Sequence: Synthetic oligonucleotide
  Sense strand starting at position 571 of SEQ ID NO: 1884621
cugauaucacagugcaugu

SEQ ID NO: 2279215 - RNA, 19 nt, Artificial Sequence
  Description of Artificial Sequence: Synthetic oligonucleotide
  Antisense strand to SEQ ID NO: 2279214
acaugcacugugauaucag

SEQ ID NO: 2279216 - RNA, 19 nt, Artificial Sequence
  Description of Artificial Sequence: Synthetic oligonucleotide
  Sense strand starting at position 798 of SEQ ID NO: 1884621
ggguguucacccugugaug

SEQ ID NO: 2279217 - RNA, 19 nt, Artificial Sequence
  Description of Artificial Sequence: Synthetic oligonucleotide
  Antisense strand to SEQ ID NO: 2279216
caucacagggugaacaccc

SEQ ID NO: 2279218 - RNA, 19 nt, Artificial Sequence
  Description of Artificial Sequence: Synthetic oligonucleotide
  Sense strand starting at position 812 of SEQ ID NO: 1884621
ugaugucauucuuauuuga

SEQ ID NO: 2279219 - RNA, 19 nt, Artificial Sequence
  Description of Artificial Sequence: Synthetic oligonucleotide
  Antisense strand to SEQ ID NO: 2279218
ucaaauaagaaugacauca

SEQ ID NO: 2279220 - RNA, 19 nt, Artificial Sequence
  Description of Artificial Sequence: Synthetic oligonucleotide
  Sense strand starting at position 975 of SEQ ID NO: 1884621
gggugaccaccauguacau

SEQ ID NO: 2279221 - RNA, 19 nt, Artificial Sequence
  Description of Artificial Sequence: Synthetic oligonucleotide
  Antisense strand to SEQ ID NO: 2279220
auguacaugguggucaccc

SEQ ID NO: 2279222 - RNA, 19 nt, Artificial Sequence
  Description of Artificial Sequence: Synthetic oligonucleotide
  Sense strand starting at position 1216 of SEQ ID NO: 1884621
gggaaauacugauguuccu

SEQ ID NO: 2279223 - RNA, 19 nt, Artificial Sequence
  Description of Artificial Sequence: Synthetic oligonucleotide
  Antisense strand to SEQ ID NO: 2279222
aggaacaucaguauuuccc

SEQ ID NO: 2279224 - RNA, 19 nt, Artificial Sequence
  Description of Artificial Sequence: Synthetic oligonucleotide
  Sense strand starting at position 1223 of SEQ ID NO: 1884621
acugauguuccuggugaag

SEQ ID NO: 2279225 - RNA, 19 nt, Artificial Sequence
  Description of Artificial Sequence: Synthetic oligonucleotide
  Antisense strand to SEQ ID NO: 2279224
cuucaccaggaacaucagu

SEQ ID NO: 2279226 - RNA, 19 nt, Artificial Sequence
  Description of Artificial Sequence: Synthetic oligonucleotide
  Sense strand starting at position 1410 of SEQ ID NO: 1884621
acggguuaaagauggcuga

SEQ ID NO: 2279227 - RNA, 19 nt, Artificial Sequence
  Description of Artificial Sequence: Synthetic oligonucleotide
  Antisense strand to SEQ ID NO: 2279226
ucagccaucuuuaacccgu

SEQ ID NO: 2279228 - RNA, 19 nt, Artificial Sequence
  Description of Artificial Sequence: Synthetic oligonucleotide
  Sense strand starting at position 1411 of SEQ ID NO: 1884621
cggguuaaagauggcugaa

SEQ ID NO: 2279229 - RNA, 19 nt, Artificial Sequence
  Description of Artificial Sequence: Synthetic oligonucleotide
  Antisense strand to SEQ ID NO: 2279228
uucagccaucuuuaacccg

SEQ ID NO: 2279230 - RNA, 19 nt, Artificial Sequence
  Description of Artificial Sequence: Synthetic oligonucleotide
  Sense strand starting at position 1413 of SEQ ID NO: 1884621
gguuaaagauggcugaaca

SEQ ID NO: 2279231 - RNA, 19 nt, Artificial Sequence
  Description of Artificial Sequence: Synthetic oligonucleotide
  Antisense strand to SEQ ID NO: 2279230
uguucagccaucuuuaacc

SEQ ID NO: 2279232 - RNA, 19 nt, Artificial Sequence
  Description of Artificial Sequence: Synthetic oligonucleotide
  Sense strand starting at position 1414 of SEQ ID NO: 1884621
guuaaagauggcugaacaa

SEQ ID NO: 2279233 - RNA, 19 nt, Artificial Sequence
  Description of Artificial Sequence: Synthetic oligonucleotide
  Antisense strand to SEQ ID NO: 2279232
uuguucagccaucuuuaac

SEQ ID NO: 2279234 - RNA, 19 nt, Artificial Sequence
  Description of Artificial Sequence: Synthetic oligonucleotide
  Sense strand starting at position 1485 of SEQ ID NO: 1884621
gcaugucucucuuccauac

SEQ ID NO: 2279235 - RNA, 19 nt, Artificial Sequence
  Description of Artificial Sequence: Synthetic oligonucleotide
  Antisense strand to SEQ ID NO: 2279234
guauggaagagagacaugc

SEQ ID NO: 2279236 - RNA, 19 nt, Artificial Sequence
  Description of Artificial Sequence: Synthetic oligonucleotide
  Sense strand starting at position 1687 of SEQ ID NO: 1884621
ccaggaugaugaguagguu

SEQ ID NO: 2279237 - RNA, 19 nt, Artificial Sequence
  Description of Artificial Sequence: Synthetic oligonucleotide
  Antisense strand to SEQ ID NO: 2279236
aaccuacucaucauccugg

SEQ ID NO: 2279238 - RNA, 19 nt, Artificial Sequence
  Description of Artificial Sequence: Synthetic oligonucleotide
  Sense strand starting at position 1815 of SEQ ID NO: 1884621
cucugugggucuguaucau

SEQ ID NO: 2279239 - RNA, 19 nt, Artificial Sequence
  Description of Artificial Sequence: Synthetic oligonucleotide
  Antisense strand to SEQ ID NO: 2279238
augauacagacccacagag

SEQ ID NO: 2279240 - RNA, 19 nt, Artificial Sequence
  Description of Artificial Sequence: Synthetic oligonucleotide
  Sense strand starting at position 1824 of SEQ ID NO: 1884621
ucuguaucauuuggauaca

SEQ ID NO: 2279241 - RNA, 19 nt, Artificial Sequence
  Description of Artificial Sequence: Synthetic oligonucleotide
  Antisense strand to SEQ ID NO: 2279240
uguauccaaaugauacaga

SEQ ID NO: 2279242 - RNA, 19 nt, Artificial Sequence
  Description of Artificial Sequence: Synthetic oligonucleotide
  Sense strand starting at position 1825 of SEQ ID NO: 1884621
cuguaucauuuggauacaa

SEQ ID NO: 2279243 - RNA, 19 nt, Artificial Sequence
  Description of Artificial Sequence: Synthetic oligonucleotide
  Antisense strand to SEQ ID NO: 2279242
uuguauccaaaugauacag

SEQ ID NO: 2279244 - RNA, 19 nt, Artificial Sequence
  Description of Artificial Sequence: Synthetic oligonucleotide
  Sense strand starting at position 1935 of SEQ ID NO: 1884621
ccaguaauguuugcagguu

SEQ ID NO: 2279245 - RNA, 19 nt, Artificial Sequence
  Description of Artificial Sequence: Synthetic oligonucleotide
  Antisense strand to SEQ ID NO: 2279244
aaccugcaaacauuacugg

SEQ ID NO: 2279246 - RNA, 19 nt, Artificial Sequence
  Description of Artificial Sequence: Synthetic oligonucleotide
  Sense strand starting at position 1936 of SEQ ID NO: 1884621
caguaauguuugcagguuu

SEQ ID NO: 2279247 - RNA, 19 nt, Artificial Sequence
  Description of Artificial Sequence: Synthetic oligonucleotide
  Antisense strand to SEQ ID NO: 2279246
aaaccugcaaacauuacug

SEQ ID NO: 2279248 - RNA, 19 nt, Artificial Sequence
  Description of Artificial Sequence: Synthetic oligonucleotide
  Sense strand starting at position 1996 of SEQ ID NO: 1884621
gcucaauugccuuauagug

SEQ ID NO: 2279249 - RNA, 19 nt, Artificial Sequence
  Description of Artificial Sequence: Synthetic oligonucleotide
  Antisense strand to SEQ ID NO: 2279248
cacuauaaggcaauugagc

SEQ ID NO: 2279250 - RNA, 19 nt, Artificial Sequence
  Description of Artificial Sequence: Synthetic oligonucleotide
  Sense strand starting at position 2024 of SEQ ID NO: 1884621
ucgauugcuguguuauucu

SEQ ID NO: 2279251 - RNA, 19 nt, Artificial Sequence
  Description of Artificial Sequence: Synthetic oligonucleotide
  Antisense strand to SEQ ID NO: 2279250
agaauaacacagcaaucga

SEQ ID NO: 2279252 - RNA, 19 nt, Artificial Sequence
  Description of Artificial Sequence: Synthetic oligonucleotide
  Sense strand starting at position 2033 of SEQ ID NO: 1884621
guguuauucuccucuugcu

SEQ ID NO: 2279253 - RNA, 19 nt, Artificial Sequence
  Description of Artificial Sequence: Synthetic oligonucleotide
  Antisense strand to SEQ ID NO: 2279252
agcaagaggagaauaacac

SEQ ID NO: 2279254 - RNA, 19 nt, Artificial Sequence
  Description of Artificial Sequence: Synthetic oligonucleotide
  Sense strand starting at position 2080 of SEQ ID NO: 1884621
ucgagaacguuccaagaac

SEQ ID NO: 2279255 - RNA, 19 nt, Artificial Sequence
  Description of Artificial Sequence: Synthetic oligonucleotide
  Antisense strand to SEQ ID NO: 2279254
guucuuggaacguucucga

SEQ ID NO: 2279256 - RNA, 19 nt, Artificial Sequence
  Description of Artificial Sequence: Synthetic oligonucleotide
  Sense strand starting at position 2284 of SEQ ID NO: 1884621
uuguaaacacuguguaaca

SEQ ID NO: 2279257 - RNA, 19 nt, Artificial Sequence
  Description of Artificial Sequence: Synthetic oligonucleotide
  Antisense strand to SEQ ID NO: 2279256
uguuacacaguguuuacaa

SEQ ID NO: 2279258 - RNA, 19 nt, Artificial Sequence
  Description of Artificial Sequence: Synthetic oligonucleotide
  Sense strand starting at position 2519 of SEQ ID NO: 1884621
cagaaaguuuggccggaua

SEQ ID NO: 2279259 - RNA, 19 nt, Artificial Sequence
  Description of Artificial Sequence: Synthetic oligonucleotide
  Antisense strand to SEQ ID NO: 2279258
uauccggccaaacuuucug

SEQ ID NO: 2279260 - RNA, 19 nt, Artificial Sequence
  Description of Artificial Sequence: Synthetic oligonucleotide
  Sense strand starting at position 2521 of SEQ ID NO: 1884621
gaaaguuuggccggauaug

SEQ ID NO: 2279261 - RNA, 19 nt, Artificial Sequence
  Description of Artificial Sequence: Synthetic oligonucleotide
  Antisense strand to SEQ ID NO: 2279260
cauauccggccaaacuuuc

SEQ ID NO: 2279262 - RNA, 19 nt, Artificial Sequence
  Description of Artificial Sequence: Synthetic oligonucleotide
  Sense strand starting at position 2839 of SEQ ID NO: 1884621
aagucaaagucaugcugau

SEQ ID NO: 2279263 - RNA, 19 nt, Artificial Sequence
  Description of Artificial Sequence: Synthetic oligonucleotide
  Antisense strand to SEQ ID NO: 2279262
aucagcaugacuuugacuu

SEQ ID NO: 2279264 - RNA, 19 nt, Artificial Sequence
  Description of Artificial Sequence: Synthetic oligonucleotide
  Sense strand starting at position 2843 of SEQ ID NO: 1884621
caaagucaugcugaugaca

SEQ ID NO: 2279265 - RNA, 19 nt, Artificial Sequence
  Description of Artificial Sequence: Synthetic oligonucleotide
  Antisense strand to SEQ ID NO: 2279264
ugucaucagcaugacuuug

SEQ ID NO: 2279266 - RNA, 19 nt, Artificial Sequence
  Description of Artificial Sequence: Synthetic oligonucleotide
  Sense strand starting at position 2981 of SEQ ID NO: 1884621
cccuguuccucucacagua

SEQ ID NO: 2279267 - RNA, 19 nt, Artificial Sequence
  Description of Artificial Sequence: Synthetic oligonucleotide
  Antisense strand to SEQ ID NO: 2279266
uacugugagaggaacaggg

SEQ ID NO: 2279268 - RNA, 19 nt, Artificial Sequence
  Description of Artificial Sequence: Synthetic oligonucleotide
  Sense strand starting at position 3186 of SEQ ID NO: 1884621
cgccuacgaucggcuuaau

SEQ ID NO: 2279269 - RNA, 19 nt, Artificial Sequence
  Description of Artificial Sequence: Synthetic oligonucleotide
  Antisense strand to SEQ ID NO: 2279268
auuaagccgaucguaggcg

SEQ ID NO: 2279270 - RNA, 19 nt, Artificial Sequence
  Description of Artificial Sequence: Synthetic oligonucleotide
  Sense strand starting at position 3189 of SEQ ID NO: 1884621
cuacgaucggcuuaaucau

SEQ ID NO: 2279271 - RNA, 19 nt, Artificial Sequence
  Description of Artificial Sequence: Synthetic oligonucleotide
  Antisense strand to SEQ ID NO: 2279270
augauuaagccgaucguag

SEQ ID NO: 2279272 - RNA, 19 nt, Artificial Sequence
  Description of Artificial Sequence: Synthetic oligonucleotide
  Sense strand starting at position 3232 of SEQ ID NO: 1884621
gaaaucaagucaggugaga

SEQ ID NO: 2279273 - RNA, 19 nt, Artificial Sequence
  Description of Artificial Sequence: Synthetic oligonucleotide
  Antisense strand to SEQ ID NO: 2279272
ucucaccugacuugauuuc

SEQ ID NO: 2279274 - RNA, 19 nt, Artificial Sequence
  Description of Artificial Sequence: Synthetic oligonucleotide
  Sense strand starting at position 3234 of SEQ ID NO: 1884621
aaucaagucaggugagagu

SEQ ID NO: 2279275 - RNA, 19 nt, Artificial Sequence
  Description of Artificial Sequence: Synthetic oligonucleotide
  Antisense strand to SEQ ID NO: 2279274
acucucaccugacuugauu

SEQ ID NO: 2279276 - RNA, 19 nt, Artificial Sequence
  Description of Artificial Sequence: Synthetic oligonucleotide
  Sense strand starting at position 3976 of SEQ ID NO: 1884621
agcucuggucuacaaggaa

SEQ ID NO: 2279277 - RNA, 19 nt, Artificial Sequence
  Description of Artificial Sequence: Synthetic oligonucleotide
  Antisense strand to SEQ ID NO: 2279276
uuccuuguagaccagagcu

SEQ ID NO: 2279278 - RNA, 19 nt, Artificial Sequence
  Description of Artificial Sequence: Synthetic oligonucleotide
  Sense strand starting at position 44 of SEQ ID NO: 1884622
ggguguacaaaguguacaa

SEQ ID NO: 2279279 - RNA, 19 nt, Artificial Sequence
  Description of Artificial Sequence: Synthetic oligonucleotide
  Antisense strand to SEQ ID NO: 2279278
uuguacacuuuguacaccc

SEQ ID NO: 2279280 - RNA, 19 nt, Artificial Sequence
  Description of Artificial Sequence: Synthetic oligonucleotide
  Sense strand starting at position 73 of SEQ ID NO: 1884622
aaguguacaccuugugaug

SEQ ID NO: 2279281 - RNA, 19 nt, Artificial Sequence
  Description of Artificial Sequence: Synthetic oligonucleotide
  Antisense strand to SEQ ID NO: 2279280
caucacaagguguacacuu

SEQ ID NO: 2279282 - RNA, 19 nt, Artificial Sequence
  Description of Artificial Sequence: Synthetic oligonucleotide
  Sense strand starting at position 84 of SEQ ID NO: 1884622
uugugauguuaucuguaau

SEQ ID NO: 2279283 - RNA, 19 nt, Artificial Sequence
  Description of Artificial Sequence: Synthetic oligonucleotide
  Antisense strand to SEQ ID NO: 2279282
auuacagauaacaucacaa

SEQ ID NO: 2279284 - RNA, 19 nt, Artificial Sequence
  Description of Artificial Sequence: Synthetic oligonucleotide
  Sense strand starting at position 85 of SEQ ID NO: 1884622
ugugauguuaucuguaaua

SEQ ID NO: 2279285 - RNA, 19 nt, Artificial Sequence
  Description of Artificial Sequence: Synthetic oligonucleotide
  Antisense strand to SEQ ID NO: 2279284
uauuacagauaacaucaca

SEQ ID NO: 2279286 - RNA, 19 nt, Artificial Sequence
  Description of Artificial Sequence: Synthetic oligonucleotide
  Sense strand starting at position 87 of SEQ ID NO: 1884622
ugauguuaucuguaauauc

SEQ ID NO: 2279287 - RNA, 19 nt, Artificial Sequence
  Description of Artificial Sequence: Synthetic oligonucleotide
  Antisense strand to SEQ ID NO: 2279286
gauauuacagauaacauca

SEQ ID NO: 2279288 - RNA, 19 nt, Artificial Sequence
  Description of Artificial Sequence: Synthetic oligonucleotide
  Sense strand starting at position 90 of SEQ ID NO: 1884622
uguuaucuguaauauccua

SEQ ID NO: 2279289 - RNA, 19 nt, Artificial Sequence
  Description of Artificial Sequence: Synthetic oligonucleotide
  Antisense strand to SEQ ID NO: 2279288
uaggauauuacagauaaca

SEQ ID NO: 2279290 - RNA, 19 nt, Artificial Sequence
  Description of Artificial Sequence: Synthetic oligonucleotide
  Sense strand starting at position 95 of SEQ ID NO: 1884622
ucuguaauauccuagaagg

SEQ ID NO: 2279291 - RNA, 19 nt, Artificial Sequence
  Description of Artificial Sequence: Synthetic oligonucleotide
  Antisense strand to SEQ ID NO: 2279290
ccuucuaggauauuacaga

SEQ ID NO: 2279292 - RNA, 19 nt, Artificial Sequence
  Description of Artificial Sequence: Synthetic oligonucleotide
  Sense strand starting at position 158 of SEQ ID NO: 1884622
uuuguaaucucauagggag

SEQ ID NO: 2279293 - RNA, 19 nt, Artificial Sequence
  Description of Artificial Sequence: Synthetic oligonucleotide
  Antisense strand to SEQ ID NO: 2279292
cucccuaugagauuacaaa

SEQ ID NO: 2279294 - RNA, 19 nt, Artificial Sequence
  Description of Artificial Sequence: Synthetic oligonucleotide
  Sense strand starting at position 160 of SEQ ID NO: 1884622
uguaaucucauagggagau

SEQ ID NO: 2279295 - RNA, 19 nt, Artificial Sequence
  Description of Artificial Sequence: Synthetic oligonucleotide
  Antisense strand to SEQ ID NO: 2279294
aucucccuaugagauuaca

SEQ ID NO: 2279296 - RNA, 19 nt, Artificial Sequence
  Description of Artificial Sequence: Synthetic oligonucleotide
  Sense strand starting at position 161 of SEQ ID NO: 1884622
guaaucucauagggagaua

SEQ ID NO: 2279297 - RNA, 19 nt, Artificial Sequence
  Description of Artificial Sequence: Synthetic oligonucleotide
  Antisense strand to SEQ ID NO: 2279296
uaucucccuaugagauuac

SEQ ID NO: 2279298 - RNA, 19 nt, Artificial Sequence
  Description of Artificial Sequence: Synthetic oligonucleotide
  Sense strand starting at position 212 of SEQ ID NO: 1884622
uggcguauacccugugaua

SEQ ID NO: 2279299 - RNA, 19 nt, Artificial Sequence
  Description of Artificial Sequence: Synthetic oligonucleotide
  Antisense strand to SEQ ID NO: 2279298
uaucacaggguauacgcca

SEQ ID NO: 2279300 - RNA, 19 nt, Artificial Sequence
  Description of Artificial Sequence: Synthetic oligonucleotide
  Sense strand starting at position 214 of SEQ ID NO: 1884622
gcguauacccugugauauu

SEQ ID NO: 2279301 - RNA, 19 nt, Artificial Sequence
  Description of Artificial Sequence: Synthetic oligonucleotide
  Antisense strand to SEQ ID NO: 2279300
aauaucacaggguauacgc

SEQ ID NO: 2279302 - RNA, 19 nt, Artificial Sequence
  Description of Artificial Sequence: Synthetic oligonucleotide
  Sense strand starting at position 215 of SEQ ID NO: 1884622
cguauacccugugauauua

SEQ ID NO: 2279303 - RNA, 19 nt, Artificial Sequence
  Description of Artificial Sequence: Synthetic oligonucleotide
  Antisense strand to SEQ ID NO: 2279302
uaauaucacaggguauacg

SEQ ID NO: 2279304 - RNA, 19 nt, Artificial Sequence
  Description of Artificial Sequence: Synthetic oligonucleotide
  Sense strand starting at position 310 of SEQ ID NO: 1884622
ucuuaauauccaggguaaa

SEQ ID NO: 2279305 - RNA, 19 nt, Artificial Sequence
  Description of Artificial Sequence: Synthetic oligonucleotide
  Antisense strand to SEQ ID NO: 2279304
uuuacccuggauauuaaga

SEQ ID NO: 2279306 - RNA, 19 nt, Artificial Sequence
  Description of Artificial Sequence: Synthetic oligonucleotide
  Sense strand starting at position 311 of SEQ ID NO: 1884622
cuuaauauccaggguaaau

SEQ ID NO: 2279307 - RNA, 19 nt, Artificial Sequence
  Description of Artificial Sequence: Synthetic oligonucleotide
  Antisense strand to SEQ ID NO: 2279306
auuuacccuggauauuaag

SEQ ID NO: 2279308 - RNA, 19 nt, Artificial Sequence
  Description of Artificial Sequence: Synthetic oligonucleotide
  Sense strand starting at position 323 of SEQ ID NO: 1884622
gguaaauauuacuccuagu

SEQ ID NO: 2279309 - RNA, 19 nt, Artificial Sequence
  Description of Artificial Sequence: Synthetic oligonucleotide
  Antisense strand to SEQ ID NO: 2279308
acuaggaguaauauuuacc

SEQ ID NO: 2279310 - RNA, 19 nt, Artificial Sequence
  Description of Artificial Sequence: Synthetic oligonucleotide
  Sense strand starting at position 334 of SEQ ID NO: 1884622
cuccuaguaucacagugua

SEQ ID NO: 2279311 - RNA, 19 nt, Artificial Sequence
  Description of Artificial Sequence: Synthetic oligonucleotide
  Antisense strand to SEQ ID NO: 2279310
uacacugugauacuaggag

SEQ ID NO: 2279312 - RNA, 19 nt, Artificial Sequence
  Description of Artificial Sequence: Synthetic oligonucleotide
  Sense strand starting at position 425 of SEQ ID NO: 1884622
uguguacacucugugauag

SEQ ID NO: 2279313 - RNA, 19 nt, Artificial Sequence
  Description of Artificial Sequence: Synthetic oligonucleotide
  Antisense strand to SEQ ID NO: 2279312
cuaucacagaguguacaca

SEQ ID NO: 2279314 - RNA, 19 nt, Artificial Sequence
  Description of Artificial Sequence: Synthetic oligonucleotide
  Sense strand starting at position 426 of SEQ ID NO: 1884622
guguacacucugugauagu

SEQ ID NO: 2279315 - RNA, 19 nt, Artificial Sequence
  Description of Artificial Sequence: Synthetic oligonucleotide
  Antisense strand to SEQ ID NO: 2279314
acuaucacagaguguacac

SEQ ID NO: 2279316 - RNA, 19 nt, Artificial Sequence
  Description of Artificial Sequence: Synthetic oligonucleotide
  Sense strand starting at position 427 of SEQ ID NO: 1884622
uguacacucugugauagua

SEQ ID NO: 2279317 - RNA, 19 nt, Artificial Sequence
  Description of Artificial Sequence: Synthetic oligonucleotide
  Antisense strand to SEQ ID NO: 2279316
uacuaucacagaguguaca

SEQ ID NO: 2279318 - RNA, 19 nt, Artificial Sequence
  Description of Artificial Sequence: Synthetic oligonucleotide
  Sense strand starting at position 2081 of SEQ ID NO: 1884622
ucaagaauguuccgagaac

SEQ ID NO: 2279319 - RNA, 19 nt, Artificial Sequence
  Description of Artificial Sequence: Synthetic oligonucleotide
  Antisense strand to SEQ ID NO: 2279318
guucucggaacauucuuga

SEQ ID NO: 2279320 - RNA, 19 nt, Artificial Sequence
  Description of Artificial Sequence: Synthetic oligonucleotide
  Sense strand starting at position 2082 of SEQ ID NO: 1884622
caagaauguuccgagaacc

SEQ ID NO: 2279321 - RNA, 19 nt, Artificial Sequence
  Description of Artificial Sequence: Synthetic oligonucleotide
  Antisense strand to SEQ ID NO: 2279320
gguucucggaacauucuug

SEQ ID NO: 2279322 - RNA, 19 nt, Artificial Sequence
  Description of Artificial Sequence: Synthetic oligonucleotide
  Sense strand starting at position 2248 of SEQ ID NO: 1884622
ggucccaguuuggacagau

SEQ ID NO: 2279323 - RNA, 19 nt, Artificial Sequence
  Description of Artificial Sequence: Synthetic oligonucleotide
  Antisense strand to SEQ ID NO: 2279322
aucuguccaaacugggacc

SEQ ID NO: 2279324 - RNA, 19 nt, Artificial Sequence
  Description of Artificial Sequence: Synthetic oligonucleotide
  Sense strand starting at position 131 of SEQ ID NO: 1884623
uauguacaagugugagaua

SEQ ID NO: 2279325 - RNA, 19 nt, Artificial Sequence
  Description of Artificial Sequence: Synthetic oligonucleotide
  Antisense strand to SEQ ID NO: 2279324
uaucucacacuuguacaua

SEQ ID NO: 2279326 - RNA, 19 nt, Artificial Sequence
  Description of Artificial Sequence: Synthetic oligonucleotide
  Sense strand starting at position 240 of SEQ ID NO: 1884623
uugcaucauguuuaggaca

SEQ ID NO: 2279327 - RNA, 19 nt, Artificial Sequence
  Description of Artificial Sequence: Synthetic oligonucleotide
  Antisense strand to SEQ ID NO: 2279326
uguccuaaacaugaugcaa

SEQ ID NO: 2279328 - RNA, 19 nt, Artificial Sequence
  Description of Artificial Sequence: Synthetic oligonucleotide
  Sense strand starting at position 245 of SEQ ID NO: 1884623
ucauguuuaggacaaugca

SEQ ID NO: 2279329 - RNA, 19 nt, Artificial Sequence
  Description of Artificial Sequence: Synthetic oligonucleotide
  Antisense strand to SEQ ID NO: 2279328
ugcauuguccuaaacauga

SEQ ID NO: 2279330 - RNA, 19 nt, Artificial Sequence
  Description of Artificial Sequence: Synthetic oligonucleotide
  Sense strand starting at position 416 of SEQ ID NO: 1884623
cggaaugucagguaaugag

SEQ ID NO: 2279331 - RNA, 19 nt, Artificial Sequence
  Description of Artificial Sequence: Synthetic oligonucleotide
  Antisense strand to SEQ ID NO: 2279330
cucauuaccugacauuccg

SEQ ID NO: 2279332 - RNA, 19 nt, Artificial Sequence
  Description of Artificial Sequence: Synthetic oligonucleotide
  Sense strand starting at position 604 of SEQ ID NO: 1884623
acaguauguccugacuuaa

SEQ ID NO: 2279333 - RNA, 19 nt, Artificial Sequence
  Description of Artificial Sequence: Synthetic oligonucleotide
  Antisense strand to SEQ ID NO: 2279332
uuaagucaggacauacugu

SEQ ID NO: 2279334 - RNA, 19 nt, Artificial Sequence
  Description of Artificial Sequence: Synthetic oligonucleotide
  Sense strand starting at position 617 of SEQ ID NO: 1884623
acuuaacaucuuggaaagu

SEQ ID NO: 2279335 - RNA, 19 nt, Artificial Sequence
  Description of Artificial Sequence: Synthetic oligonucleotide
  Antisense strand to SEQ ID NO: 2279334
acuuuccaagauguuaagu

SEQ ID NO: 2279336 - RNA, 19 nt, Artificial Sequence
  Description of Artificial Sequence: Synthetic oligonucleotide
  Sense strand starting at position 626 of SEQ ID NO: 1884623
cuuggaaagucucuuggaa

SEQ ID NO: 2279337 - RNA, 19 nt, Artificial Sequence
  Description of Artificial Sequence: Synthetic oligonucleotide
  Antisense strand to SEQ ID NO: 2279336
uuccaagagacuuuccaag

SEQ ID NO: 2279338 - RNA, 19 nt, Artificial Sequence
  Description of Artificial Sequence: Synthetic oligonucleotide
  Sense strand starting at position 671 of SEQ ID NO: 1884623
uagugaaaccaagguauuc

SEQ ID NO: 2279339 - RNA, 19 nt, Artificial Sequence
  Description of Artificial Sequence: Synthetic oligonucleotide
  Antisense strand to SEQ ID NO: 2279338
gaauaccuugguuucacua

SEQ ID NO: 2279340 - RNA, 19 nt, Artificial Sequence
  Description of Artificial Sequence: Synthetic oligonucleotide
  Sense strand starting at position 717 of SEQ ID NO: 1884623
uagacaaaccauugguguu

SEQ ID NO: 2279341 - RNA, 19 nt, Artificial Sequence
  Description of Artificial Sequence: Synthetic oligonucleotide
  Antisense strand to SEQ ID NO: 2279340
aacaccaaugguuugucua

SEQ ID NO: 2279342 - RNA, 19 nt, Artificial Sequence
  Description of Artificial Sequence: Synthetic oligonucleotide
  Sense strand starting at position 838 of SEQ ID NO: 1884623
ccuggaguacaggguuauu

SEQ ID NO: 2279343 - RNA, 19 nt, Artificial Sequence
  Description of Artificial Sequence: Synthetic oligonucleotide
  Antisense strand to SEQ ID NO: 2279342
aauaacccuguacuccagg

SEQ ID NO: 2279344 - RNA, 19 nt, Artificial Sequence
  Description of Artificial Sequence: Synthetic oligonucleotide
  Sense strand starting at position 877 of SEQ ID NO: 1884623
cgcccagauauagaggauu

SEQ ID NO: 2279345 - RNA, 19 nt, Artificial Sequence
  Description of Artificial Sequence: Synthetic oligonucleotide
  Antisense strand to SEQ ID NO: 2279344
aauccucuauaucugggcg

SEQ ID NO: 2279346 - RNA, 19 nt, Artificial Sequence
  Description of Artificial Sequence: Synthetic oligonucleotide
  Sense strand starting at position 897 of SEQ ID NO: 1884623
agucaugauguuuaugcua

SEQ ID NO: 2279347 - RNA, 19 nt, Artificial Sequence
  Description of Artificial Sequence: Synthetic oligonucleotide
  Antisense strand to SEQ ID NO: 2279346
uagcauaaacaucaugacu

SEQ ID NO: 2279348 - RNA, 19 nt, Artificial Sequence
  Description of Artificial Sequence: Synthetic oligonucleotide
  Sense strand starting at position 1233 of SEQ ID NO: 1884623
cacuccauuccugggagau

SEQ ID NO: 2279349 - RNA, 19 nt, Artificial Sequence
  Description of Artificial Sequence: Synthetic oligonucleotide
  Antisense strand to SEQ ID NO: 2279348
aucucccaggaauggagug

SEQ ID NO: 2279350 - RNA, 19 nt, Artificial Sequence
  Description of Artificial Sequence: Synthetic oligonucleotide
  Sense strand starting at position 1234 of SEQ ID NO: 1884623
acuccauuccugggagaug

SEQ ID NO: 2279351 - RNA, 19 nt, Artificial Sequence
  Description of Artificial Sequence: Synthetic oligonucleotide
  Antisense strand to SEQ ID NO: 2279350
caucucccaggaauggagu

SEQ ID NO: 2279352 - RNA, 19 nt, Artificial Sequence
  Description of Artificial Sequence: Synthetic oligonucleotide
  Sense strand starting at position 1350 of SEQ ID NO: 1884623
cccaucugacgauggaauu

SEQ ID NO: 2279353 - RNA, 19 nt, Artificial Sequence
  Description of Artificial Sequence: Synthetic oligonucleotide
  Antisense strand to SEQ ID NO: 2279352
aauuccaucgucagauggg

SEQ ID NO: 2279354 - RNA, 19 nt, Artificial Sequence
  Description of Artificial Sequence: Synthetic oligonucleotide
  Sense strand starting at position 1496 of SEQ ID NO: 1884623
gaaguugagaugggucaca

SEQ ID NO: 2279355 - RNA, 19 nt, Artificial Sequence
  Description of Artificial Sequence: Synthetic oligonucleotide
  Antisense strand to SEQ ID NO: 2279354
ugugacccaucucaacuuc

SEQ ID NO: 2279356 - RNA, 19 nt, Artificial Sequence
  Description of Artificial Sequence: Synthetic oligonucleotide
  Sense strand starting at position 1549 of SEQ ID NO: 1884623
aggugaguuguguaacaca

SEQ ID NO: 2279357 - RNA, 19 nt, Artificial Sequence
  Description of Artificial Sequence: Synthetic oligonucleotide
  Antisense strand to SEQ ID NO: 2279356
uguguuacacaacucaccu

SEQ ID NO: 2279358 - RNA, 19 nt, Artificial Sequence
  Description of Artificial Sequence: Synthetic oligonucleotide
  Sense strand starting at position 2073 of SEQ ID NO: 1884623
ccaauaucuaagggagugu

SEQ ID NO: 2279359 - RNA, 19 nt, Artificial Sequence
  Description of Artificial Sequence: Synthetic oligonucleotide
  Antisense strand to SEQ ID NO: 2279358
acacucccuuagauauugg

SEQ ID NO: 2279360 - RNA, 19 nt, Artificial Sequence
  Description of Artificial Sequence: Synthetic oligonucleotide
  Sense strand starting at position 2257 of SEQ ID NO: 1884623
guucuuaauaucuaggugu

SEQ ID NO: 2279361 - RNA, 19 nt, Artificial Sequence
  Description of Artificial Sequence: Synthetic oligonucleotide
  Antisense strand to SEQ ID NO: 2279360
acaccuagauauuaagaac

SEQ ID NO: 2279362 - RNA, 19 nt, Artificial Sequence
  Description of Artificial Sequence: Synthetic oligonucleotide
  Sense strand starting at position 2259 of SEQ ID NO: 1884623
ucuuaauaucuagguguag

SEQ ID NO: 2279363 - RNA, 19 nt, Artificial Sequence
  Description of Artificial Sequence: Synthetic oligonucleotide
  Antisense strand to SEQ ID NO: 2279362
cuacaccuagauauuaaga

SEQ ID NO: 2279364 - RNA, 19 nt, Artificial Sequence
  Description of Artificial Sequence: Synthetic oligonucleotide
  Sense strand starting at position 2260 of SEQ ID NO: 1884623
cuuaauaucuagguguaga

SEQ ID NO: 2279365 - RNA, 19 nt, Artificial Sequence
  Description of Artificial Sequence: Synthetic oligonucleotide
  Antisense strand to SEQ ID NO: 2279364
ucuacaccuagauauuaag

SEQ ID NO: 2279366 - RNA, 19 nt, Artificial Sequence
  Description of Artificial Sequence: Synthetic oligonucleotide
  Sense strand starting at position 2261 of SEQ ID NO: 1884623
uuaauaucuagguguagag

SEQ ID NO: 2279367 - RNA, 19 nt, Artificial Sequence
  Description of Artificial Sequence: Synthetic oligonucleotide
  Antisense strand to SEQ ID NO: 2279366
cucuacaccuagauauuaa

SEQ ID NO: 2279368 - RNA, 19 nt, Artificial Sequence
  Description of Artificial Sequence: Synthetic oligonucleotide
  Sense strand starting at position 2295 of SEQ ID NO: 1884623
ccaauaucgcacggaauuu

SEQ ID NO: 2279369 - RNA, 19 nt, Artificial Sequence
  Description of Artificial Sequence: Synthetic oligonucleotide
  Antisense strand to SEQ ID NO: 2279368
aaauuccgugcgauauugg

SEQ ID NO: 2279370 - RNA, 19 nt, Artificial Sequence
  Description of Artificial Sequence: Synthetic oligonucleotide
  Sense strand starting at position 2390 of SEQ ID NO: 1884623
acaucacuccugugagauu

SEQ ID NO: 2279371 - RNA, 19 nt, Artificial Sequence
  Description of Artificial Sequence: Synthetic oligonucleotide
  Antisense strand to SEQ ID NO: 2279370
aaucucacaggagugaugu

SEQ ID NO: 2279372 - RNA, 19 nt, Artificial Sequence
  Description of Artificial Sequence: Synthetic oligonucleotide
  Sense strand starting at position 2401 of SEQ ID NO: 1884623
gugagauugucccuaauau

SEQ ID NO: 2279373 - RNA, 19 nt, Artificial Sequence
  Description of Artificial Sequence: Synthetic oligonucleotide
  Antisense strand to SEQ ID NO: 2279372
auauuagggacaaucucac

SEQ ID NO: 2279374 - RNA, 19 nt, Artificial Sequence
  Description of Artificial Sequence: Synthetic oligonucleotide
  Sense strand starting at position 2402 of SEQ ID NO: 1884623
ugagauugucccuaauauc

SEQ ID NO: 2279375 - RNA, 19 nt, Artificial Sequence
  Description of Artificial Sequence: Synthetic oligonucleotide
  Antisense strand to SEQ ID NO: 2279374
gauauuagggacaaucuca

SEQ ID NO: 2279376 - RNA, 19 nt, Artificial Sequence
  Description of Artificial Sequence: Synthetic oligonucleotide
  Sense strand starting at position 2584 of SEQ ID NO: 1884623
ggaagauguuaaucccaau

SEQ ID NO: 2279377 - RNA, 19 nt, Artificial Sequence
  Description of Artificial Sequence: Synthetic oligonucleotide
  Antisense strand to SEQ ID NO: 2279376
auugggauuaacaucuucc

SEQ ID NO: 2279378 - RNA, 19 nt, Artificial Sequence
  Description of Artificial Sequence: Synthetic oligonucleotide
  Sense strand starting at position 2783 of SEQ ID NO: 1884623
uguuccuaauaucuagagu

SEQ ID NO: 2279379 - RNA, 19 nt, Artificial Sequence
  Description of Artificial Sequence: Synthetic oligonucleotide
  Antisense strand to SEQ ID NO: 2279378
acucuagauauuaggaaca

SEQ ID NO: 2279380 - RNA, 19 nt, Artificial Sequence
  Description of Artificial Sequence: Synthetic oligonucleotide
  Sense strand starting at position 2852 of SEQ ID NO: 1884623
auaauauuguuccuaguac

SEQ ID NO: 2279381 - RNA, 19 nt, Artificial Sequence
  Description of Artificial Sequence: Synthetic oligonucleotide
  Antisense strand to SEQ ID NO: 2279380
guacuaggaacaauauuau

SEQ ID NO: 2279382 - RNA, 19 nt, Artificial Sequence
  Description of Artificial Sequence: Synthetic oligonucleotide
  Sense strand starting at position 3103 of SEQ ID NO: 1884623
gugauauuacaccaaaugu

SEQ ID NO: 2279383 - RNA, 19 nt, Artificial Sequence
  Description of Artificial Sequence: Synthetic oligonucleotide
  Antisense strand to SEQ ID NO: 2279382
acauuugguguaauaucac

SEQ ID NO: 2279384 - RNA, 19 nt, Artificial Sequence
  Description of Artificial Sequence: Synthetic oligonucleotide
  Sense strand starting at position 3177 of SEQ ID NO: 1884623
ggaugauauugcucccuau

SEQ ID NO: 2279385 - RNA, 19 nt, Artificial Sequence
  Description of Artificial Sequence: Synthetic oligonucleotide
  Antisense strand to SEQ ID NO: 2279384
auagggagcaauaucaucc

SEQ ID NO: 2279386 - RNA, 19 nt, Artificial Sequence
  Description of Artificial Sequence: Synthetic oligonucleotide
  Sense strand starting at position 3287 of SEQ ID NO: 1884623
cucuucuugugauuuaguu

SEQ ID NO: 2279387 - RNA, 19 nt, Artificial Sequence
  Description of Artificial Sequence: Synthetic oligonucleotide
  Antisense strand to SEQ ID NO: 2279386
aacuaaaucacaagaagag

SEQ ID NO: 2279388 - RNA, 19 nt, Artificial Sequence
  Description of Artificial Sequence: Synthetic oligonucleotide
  Sense strand starting at position 3310 of SEQ ID NO: 1884623
ugauaucucaggugaggag

SEQ ID NO: 2279389 - RNA, 19 nt, Artificial Sequence
  Description of Artificial Sequence: Synthetic oligonucleotide
  Antisense strand to SEQ ID NO: 2279388
cuccucaccugagauauca

SEQ ID NO: 2279390 - RNA, 19 nt, Artificial Sequence
  Description of Artificial Sequence: Synthetic oligonucleotide
  Sense strand starting at position 3363 of SEQ ID NO: 1884623
acacacuuccugugauauu

SEQ ID NO: 2279391 - RNA, 19 nt, Artificial Sequence
  Description of Artificial Sequence: Synthetic oligonucleotide
  Antisense strand to SEQ ID NO: 2279390
aauaucacaggaagugugu

SEQ ID NO: 2279392 - RNA, 19 nt, Artificial Sequence
  Description of Artificial Sequence: Synthetic oligonucleotide
  Sense strand starting at position 3420 of SEQ ID NO: 1884623
ccaauauugcagggagagu

SEQ ID NO: 2279393 - RNA, 19 nt, Artificial Sequence
  Description of Artificial Sequence: Synthetic oligonucleotide
  Antisense strand to SEQ ID NO: 2279392
acucucccugcaauauugg

SEQ ID NO: 2279394 - RNA, 19 nt, Artificial Sequence
  Description of Artificial Sequence: Synthetic oligonucleotide
  Sense strand starting at position 3495 of SEQ ID NO: 1884623
cccaauaucguagaaagug

SEQ ID NO: 2279395 - RNA, 19 nt, Artificial Sequence
  Description of Artificial Sequence: Synthetic oligonucleotide
  Antisense strand to SEQ ID NO: 2279394
cacuuucuacgauauuggg

SEQ ID NO: 2279396 - RNA, 19 nt, Artificial Sequence
  Description of Artificial Sequence: Synthetic oligonucleotide
  Sense strand starting at position 3693 of SEQ ID NO: 1884623
cuaguauccagagggcaaa

SEQ ID NO: 2279397 - RNA, 19 nt, Artificial Sequence
  Description of Artificial Sequence: Synthetic oligonucleotide
  Antisense strand to SEQ ID NO: 2279396
uuugcccucuggauacuag

SEQ ID NO: 2279398 - RNA, 19 nt, Artificial Sequence
  Description of Artificial Sequence: Synthetic oligonucleotide
  Sense strand starting at position 3772 of SEQ ID NO: 1884623
gggagagaaugauauaacu

SEQ ID NO: 2279399 - RNA, 19 nt, Artificial Sequence
  Description of Artificial Sequence: Synthetic oligonucleotide
  Antisense strand to SEQ ID NO: 2279398
aguuauaucauucucuccc

SEQ ID NO: 2279400 - RNA, 19 nt, Artificial Sequence
  Description of Artificial Sequence: Synthetic oligonucleotide
  Sense strand starting at position 3885 of SEQ ID NO: 1884623
ggacaccuccagugugaua

SEQ ID NO: 2279401 - RNA, 19 nt, Artificial Sequence
  Description of Artificial Sequence: Synthetic oligonucleotide
  Antisense strand to SEQ ID NO: 2279400
uaucacacuggaggugucc

SEQ ID NO: 2279402 - RNA, 19 nt, Artificial Sequence
  Description of Artificial Sequence: Synthetic oligonucleotide
  Sense strand starting at position 3978 of SEQ ID NO: 1884623
uuguuacuauuaucaagga

SEQ ID NO: 2279403 - RNA, 19 nt, Artificial Sequence
  Description of Artificial Sequence: Synthetic oligonucleotide
  Antisense strand to SEQ ID NO: 2279402
uccuugauaauaguaacaa

SEQ ID NO: 2279404 - RNA, 19 nt, Artificial Sequence
  Description of Artificial Sequence: Synthetic oligonucleotide
  Sense strand starting at position 21 of SEQ ID NO: 1884624
uuguuaaauggaugacaca

SEQ ID NO: 2279405 - RNA, 19 nt, Artificial Sequence
  Description of Artificial Sequence: Synthetic oligonucleotide
  Antisense strand to SEQ ID NO: 2279404
ugugucauccauuuaacaa

SEQ ID NO: 2279406 - RNA, 19 nt, Artificial Sequence
  Description of Artificial Sequence: Synthetic oligonucleotide
  Sense strand starting at position 52 of SEQ ID NO: 1884624
uucugaagcucagggauau

SEQ ID NO: 2279407 - RNA, 19 nt, Artificial Sequence
  Description of Artificial Sequence: Synthetic oligonucleotide
  Antisense strand to SEQ ID NO: 2279406
auaucccugagcuucagaa

SEQ ID NO: 2279408 - RNA, 19 nt, Artificial Sequence
  Description of Artificial Sequence: Synthetic oligonucleotide
  Sense strand starting at position 53 of SEQ ID NO: 1884624
ucugaagcucagggauauu

SEQ ID NO: 2279409 - RNA, 19 nt, Artificial Sequence
  Description of Artificial Sequence: Synthetic oligonucleotide
  Antisense strand to SEQ ID NO: 2279408
aauaucccugagcuucaga

SEQ ID NO: 2279410 - RNA, 19 nt, Artificial Sequence
  Description of Artificial Sequence: Synthetic oligonucleotide
  Sense strand starting at position 525 of SEQ ID NO: 1884624
uccgcuuucugacacgaga

SEQ ID NO: 2279411 - RNA, 19 nt, Artificial Sequence
  Description of Artificial Sequence: Synthetic oligonucleotide
  Antisense strand to SEQ ID NO: 2279410
ucucgugucagaaagcgga

SEQ ID NO: 2279412 - RNA, 19 nt, Artificial Sequence
  Description of Artificial Sequence: Synthetic oligonucleotide
  Sense strand starting at position 527 of SEQ ID NO: 1884624
cgcuuucugacacgagaaa

SEQ ID NO: 2279413 - RNA, 19 nt, Artificial Sequence
  Description of Artificial Sequence: Synthetic oligonucleotide
  Antisense strand to SEQ ID NO: 2279412
uuucucgugucagaaagcg

SEQ ID NO: 2279414 - RNA, 19 nt, Artificial Sequence
  Description of Artificial Sequence: Synthetic oligonucleotide
  Sense strand starting at position 528 of SEQ ID NO: 1884624
gcuuucugacacgagaaau

SEQ ID NO: 2279415 - RNA, 19 nt, Artificial Sequence
  Description of Artificial Sequence: Synthetic oligonucleotide
  Antisense strand to SEQ ID NO: 2279414
auuucucgugucagaaagc

SEQ ID NO: 2279416 - RNA, 19 nt, Artificial Sequence
  Description of Artificial Sequence: Synthetic oligonucleotide
  Sense strand starting at position 636 of SEQ ID NO: 1884624
uuaccuacuuuguauuuga

SEQ ID NO: 2279417 - RNA, 19 nt, Artificial Sequence
  Description of Artificial Sequence: Synthetic oligonucleotide
  Antisense strand to SEQ ID NO: 2279416
ucaaauacaaaguagguaa

SEQ ID NO: 2279418 - RNA, 19 nt, Artificial Sequence
  Description of Artificial Sequence: Synthetic oligonucleotide
  Sense strand starting at position 670 of SEQ ID NO: 1884624
ccugaaguguaucuugaag

SEQ ID NO: 2279419 - RNA, 19 nt, Artificial Sequence
  Description of Artificial Sequence: Synthetic oligonucleotide
  Antisense strand to SEQ ID NO: 2279418
cuucaagauacacuucagg

SEQ ID NO: 2279420 - RNA, 19 nt, Artificial Sequence
  Description of Artificial Sequence: Synthetic oligonucleotide
  Sense strand starting at position 672 of SEQ ID NO: 1884624
ugaaguguaucuugaagca

SEQ ID NO: 2279421 - RNA, 19 nt, Artificial Sequence
  Description of Artificial Sequence: Synthetic oligonucleotide
  Antisense strand to SEQ ID NO: 2279420
ugcuucaagauacacuuca

SEQ ID NO: 2279422 - RNA, 19 nt, Artificial Sequence
  Description of Artificial Sequence: Synthetic oligonucleotide
  Sense strand starting at position 684 of SEQ ID NO: 1884624
ugaagcauguugccuauga

SEQ ID NO: 2279423 - RNA, 19 nt, Artificial Sequence
  Description of Artificial Sequence: Synthetic oligonucleotide
  Antisense strand to SEQ ID NO: 2279422
ucauaggcaacaugcuuca

SEQ ID NO: 2279424 - RNA, 19 nt, Artificial Sequence
  Description of Artificial Sequence: Synthetic oligonucleotide
  Sense strand starting at position 685 of SEQ ID NO: 1884624
gaagcauguugccuaugaa

SEQ ID NO: 2279425 - RNA, 19 nt, Artificial Sequence
  Description of Artificial Sequence: Synthetic oligonucleotide
  Antisense strand to SEQ ID NO: 2279424
uucauaggcaacaugcuuc

SEQ ID NO: 2279426 - RNA, 19 nt, Artificial Sequence
  Description of Artificial Sequence: Synthetic oligonucleotide
  Sense strand starting at position 686 of SEQ ID NO: 1884624
aagcauguugccuaugaau

SEQ ID NO: 2279427 - RNA, 19 nt, Artificial Sequence
  Description of Artificial Sequence: Synthetic oligonucleotide
  Antisense strand to SEQ ID NO: 2279426
auucauaggcaacaugcuu

SEQ ID NO: 2279428 - RNA, 19 nt, Artificial Sequence
  Description of Artificial Sequence: Synthetic oligonucleotide
  Sense strand starting at position 688 of SEQ ID NO: 1884624
gcauguugccuaugaauua

SEQ ID NO: 2279429 - RNA, 19 nt, Artificial Sequence
  Description of Artificial Sequence: Synthetic oligonucleotide
  Antisense strand to SEQ ID NO: 2279428
uaauucauaggcaacaugc

SEQ ID NO: 2279430 - RNA, 19 nt, Artificial Sequence
  Description of Artificial Sequence: Synthetic oligonucleotide
  Sense strand starting at position 827 of SEQ ID NO: 1884624
ucacauugugcacauuagu

SEQ ID NO: 2279431 - RNA, 19 nt, Artificial Sequence
  Description of Artificial Sequence: Synthetic oligonucleotide
  Antisense strand to SEQ ID NO: 2279430
acuaaugugcacaauguga

SEQ ID NO: 2279432 - RNA, 19 nt, Artificial Sequence
  Description of Artificial Sequence: Synthetic oligonucleotide
  Sense strand starting at position 967 of SEQ ID NO: 1884624
ggauauagguaauccuuga

SEQ ID NO: 2279433 - RNA, 19 nt, Artificial Sequence
  Description of Artificial Sequence: Synthetic oligonucleotide
  Antisense strand to SEQ ID NO: 2279432
ucaaggauuaccuauaucc

SEQ ID NO: 2279434 - RNA, 19 nt, Artificial Sequence
  Description of Artificial Sequence: Synthetic oligonucleotide
  Sense strand starting at position 971 of SEQ ID NO: 1884624
auagguaauccuugaaucu

SEQ ID NO: 2279435 - RNA, 19 nt, Artificial Sequence
  Description of Artificial Sequence: Synthetic oligonucleotide
  Antisense strand to SEQ ID NO: 2279434
agauucaaggauuaccuau

SEQ ID NO: 2279436 - RNA, 19 nt, Artificial Sequence
  Description of Artificial Sequence: Synthetic oligonucleotide
  Sense strand starting at position 1072 of SEQ ID NO: 1884624
ggccuuaucuaauuacuga

SEQ ID NO: 2279437 - RNA, 19 nt, Artificial Sequence
  Description of Artificial Sequence: Synthetic oligonucleotide
  Antisense strand to SEQ ID NO: 2279436
ucaguaauuagauaaggcc

SEQ ID NO: 2279438 - RNA, 19 nt, Artificial Sequence
  Description of Artificial Sequence: Synthetic oligonucleotide
  Sense strand starting at position 1079 of SEQ ID NO: 1884624
ucuaauuacugaugaagaa

SEQ ID NO: 2279439 - RNA, 19 nt, Artificial Sequence
  Description of Artificial Sequence: Synthetic oligonucleotide
  Antisense strand to SEQ ID NO: 2279438
uucuucaucaguaauuaga

SEQ ID NO: 2279440 - RNA, 19 nt, Artificial Sequence
  Description of Artificial Sequence: Synthetic oligonucleotide
  Sense strand starting at position 1169 of SEQ ID NO: 1884624
auugguugauagcugcaaa

SEQ ID NO: 2279441 - RNA, 19 nt, Artificial Sequence
  Description of Artificial Sequence: Synthetic oligonucleotide
  Antisense strand to SEQ ID NO: 2279440
uuugcagcuaucaaccaau

SEQ ID NO: 2279442 - RNA, 19 nt, Artificial Sequence
  Description of Artificial Sequence: Synthetic oligonucleotide
  Sense strand starting at position 1170 of SEQ ID NO: 1884624
uugguugauagcugcaaau

SEQ ID NO: 2279443 - RNA, 19 nt, Artificial Sequence
  Description of Artificial Sequence: Synthetic oligonucleotide
  Antisense strand to SEQ ID NO: 2279442
auuugcagcuaucaaccaa

SEQ ID NO: 2279444 - RNA, 19 nt, Artificial Sequence
  Description of Artificial Sequence: Synthetic oligonucleotide
  Sense strand starting at position 1190 of SEQ ID NO: 1884624
uugagaaugugguaacaau

SEQ ID NO: 2279445 - RNA, 19 nt, Artificial Sequence
  Description of Artificial Sequence: Synthetic oligonucleotide
  Antisense strand to SEQ ID NO: 2279444
auuguuaccacauucucaa

SEQ ID NO: 2279446 - RNA, 19 nt, Artificial Sequence
  Description of Artificial Sequence: Synthetic oligonucleotide
  Sense strand starting at position 1436 of SEQ ID NO: 1884624
gcaggaauuguuugaacca

SEQ ID NO: 2279447 - RNA, 19 nt, Artificial Sequence
  Description of Artificial Sequence: Synthetic oligonucleotide
  Antisense strand to SEQ ID NO: 2279446
ugguucaaacaauuccugc

SEQ ID NO: 2279448 - RNA, 19 nt, Artificial Sequence
  Description of Artificial Sequence: Synthetic oligonucleotide
  Sense strand starting at position 1570 of SEQ ID NO: 1884624
uagagauaguugcauaaca

SEQ ID NO: 2279449 - RNA, 19 nt, Artificial Sequence
  Description of Artificial Sequence: Synthetic oligonucleotide
  Antisense strand to SEQ ID NO: 2279448
uguuaugcaacuaucucua

SEQ ID NO: 2279450 - RNA, 19 nt, Artificial Sequence
  Description of Artificial Sequence: Synthetic oligonucleotide
  Sense strand starting at position 1605 of SEQ ID NO: 1884624
gucuuuauaagagaggguu

SEQ ID NO: 2279451 - RNA, 19 nt, Artificial Sequence
  Description of Artificial Sequence: Synthetic oligonucleotide
  Antisense strand to SEQ ID NO: 2279450
aacccucucuuauaaagac

SEQ ID NO: 2279452 - RNA, 19 nt, Artificial Sequence
  Description of Artificial Sequence: Synthetic oligonucleotide
  Sense strand starting at position 1683 of SEQ ID NO: 1884624
uuagcaguuucuuaaugcu

SEQ ID NO: 2279453 - RNA, 19 nt, Artificial Sequence
  Description of Artificial Sequence: Synthetic oligonucleotide
  Antisense strand to SEQ ID NO: 2279452
agcauuaagaaacugcuaa

SEQ ID NO: 2279454 - RNA, 19 nt, Artificial Sequence
  Description of Artificial Sequence: Synthetic oligonucleotide
  Sense strand starting at position 1767 of SEQ ID NO: 1884624
ugcauugaacaauaugcaa

SEQ ID NO: 2279455 - RNA, 19 nt, Artificial Sequence
  Description of Artificial Sequence: Synthetic oligonucleotide
  Antisense strand to SEQ ID NO: 2279454
uugcauauuguucaaugca

SEQ ID NO: 2279456 - RNA, 19 nt, Artificial Sequence
  Description of Artificial Sequence: Synthetic oligonucleotide
  Sense strand starting at position 1809 of SEQ ID NO: 1884624
ucugaugaaucagguaaac

SEQ ID NO: 2279457 - RNA, 19 nt, Artificial Sequence
  Description of Artificial Sequence: Synthetic oligonucleotide
  Antisense strand to SEQ ID NO: 2279456
guuuaccugauucaucaga

SEQ ID NO: 2279458 - RNA, 19 nt, Artificial Sequence
  Description of Artificial Sequence: Synthetic oligonucleotide
  Sense strand starting at position 2612 of SEQ ID NO: 1884624
gaacaaagcuggugacuuu

SEQ ID NO: 2279459 - RNA, 19 nt, Artificial Sequence
  Description of Artificial Sequence: Synthetic oligonucleotide
  Antisense strand to SEQ ID NO: 2279458
aaagucaccagcuuuguuc

SEQ ID NO: 2279460 - RNA, 19 nt, Artificial Sequence
  Description of Artificial Sequence: Synthetic oligonucleotide
  Sense strand starting at position 45 of SEQ ID NO: 1884625
uaaguauugcuuuagggac

SEQ ID NO: 2279461 - RNA, 19 nt, Artificial Sequence
  Description of Artificial Sequence: Synthetic oligonucleotide
  Antisense strand to SEQ ID NO: 2279460
gucccuaaagcaauacuua

SEQ ID NO: 2279462 - RNA, 19 nt, Artificial Sequence
  Description of Artificial Sequence: Synthetic oligonucleotide
  Sense strand starting at position 69 of SEQ ID NO: 1884625
gguuguugagaggguuuaa

SEQ ID NO: 2279463 - RNA, 19 nt, Artificial Sequence
  Description of Artificial Sequence: Synthetic oligonucleotide
  Antisense strand to SEQ ID NO: 2279462
uuaaacccucucaacaacc

SEQ ID NO: 2279464 - RNA, 19 nt, Artificial Sequence
  Description of Artificial Sequence: Synthetic oligonucleotide
  Sense strand starting at position 106 of SEQ ID NO: 1884625
guuaacaaguuaucauauc

SEQ ID NO: 2279465 - RNA, 19 nt, Artificial Sequence
  Description of Artificial Sequence: Synthetic oligonucleotide
  Antisense strand to SEQ ID NO: 2279464
gauaugauaacuuguuaac

SEQ ID NO: 2279466 - RNA, 19 nt, Artificial Sequence
  Description of Artificial Sequence: Synthetic oligonucleotide
  Sense strand starting at position 118 of SEQ ID NO: 1884625
ucauaucugcauugggauu

SEQ ID NO: 2279467 - RNA, 19 nt, Artificial Sequence
  Description of Artificial Sequence: Synthetic oligonucleotide
  Antisense strand to SEQ ID NO: 2279466
aaucccaaugcagauauga

SEQ ID NO: 2279468 - RNA, 19 nt, Artificial Sequence
  Description of Artificial Sequence: Synthetic oligonucleotide
  Sense strand starting at position 165 of SEQ ID NO: 1884625
agcauagaauaggucagaa

SEQ ID NO: 2279469 - RNA, 19 nt, Artificial Sequence
  Description of Artificial Sequence: Synthetic oligonucleotide
  Antisense strand to SEQ ID NO: 2279468
uucugaccuauucuaugcu

SEQ ID NO: 2279470 - RNA, 19 nt, Artificial Sequence
  Description of Artificial Sequence: Synthetic oligonucleotide
  Sense strand starting at position 281 of SEQ ID NO: 1884625
guagcucuucgagagauaa

SEQ ID NO: 2279471 - RNA, 19 nt, Artificial Sequence
  Description of Artificial Sequence: Synthetic oligonucleotide
  Antisense strand to SEQ ID NO: 2279470
uuaucucucgaagagcuac

SEQ ID NO: 2279472 - RNA, 19 nt, Artificial Sequence
  Description of Artificial Sequence: Synthetic oligonucleotide
  Sense strand starting at position 283 of SEQ ID NO: 1884625
agcucuucgagagauaaau

SEQ ID NO: 2279473 - RNA, 19 nt, Artificial Sequence
  Description of Artificial Sequence: Synthetic oligonucleotide
  Antisense strand to SEQ ID NO: 2279472
auuuaucucucgaagagcu

SEQ ID NO: 2279474 - RNA, 19 nt, Artificial Sequence
  Description of Artificial Sequence: Synthetic oligonucleotide
  Sense strand starting at position 504 of SEQ ID NO: 1884625
ugcaaagcagaugauauau

SEQ ID NO: 2279475 - RNA, 19 nt, Artificial Sequence
  Description of Artificial Sequence: Synthetic oligonucleotide
  Antisense strand to SEQ ID NO: 2279474
auauaucaucugcuuugca

SEQ ID NO: 2279476 - RNA, 19 nt, Artificial Sequence
  Description of Artificial Sequence: Synthetic oligonucleotide
  Sense strand starting at position 548 of SEQ ID NO: 1884625
acggauauguaacuuauau

SEQ ID NO: 2279477 - RNA, 19 nt, Artificial Sequence
  Description of Artificial Sequence: Synthetic oligonucleotide
  Antisense strand to SEQ ID NO: 2279476
auauaaguuacauauccgu

SEQ ID NO: 2279478 - RNA, 19 nt, Artificial Sequence
  Description of Artificial Sequence: Synthetic oligonucleotide
  Sense strand starting at position 576 of SEQ ID NO: 1884625
uugauuauguugcuaaaga

SEQ ID NO: 2279479 - RNA, 19 nt, Artificial Sequence
  Description of Artificial Sequence: Synthetic oligonucleotide
  Antisense strand to SEQ ID NO: 2279478
ucuuuagcaacauaaucaa

SEQ ID NO: 2279480 - RNA, 19 nt, Artificial Sequence
  Description of Artificial Sequence: Synthetic oligonucleotide
  Sense strand starting at position 640 of SEQ ID NO: 1884625
aagagauugcugcaggcua

SEQ ID NO: 2279481 - RNA, 19 nt, Artificial Sequence
  Description of Artificial Sequence: Synthetic oligonucleotide
  Antisense strand to SEQ ID NO: 2279480
uagccugcagcaaucucuu

SEQ ID NO: 2279482 - RNA, 19 nt, Artificial Sequence
  Description of Artificial Sequence: Synthetic oligonucleotide
  Sense strand starting at position 814 of SEQ ID NO: 1884625
gcuggcauuaaugagucua

SEQ ID NO: 2279483 - RNA, 19 nt, Artificial Sequence
  Description of Artificial Sequence: Synthetic oligonucleotide
  Antisense strand to SEQ ID NO: 2279482
uagacucauuaaugccagc

SEQ ID NO: 2279484 - RNA, 19 nt, Artificial Sequence
  Description of Artificial Sequence: Synthetic oligonucleotide
  Sense strand starting at position 2130 of SEQ ID NO: 1884625
guaaguaaaguuuaccuca

SEQ ID NO: 2279485 - RNA, 19 nt, Artificial Sequence
  Description of Artificial Sequence: Synthetic oligonucleotide
  Antisense strand to SEQ ID NO: 2279484
ugagguaaacuuuacuuac

SEQ ID NO: 2279486 - RNA, 19 nt, Artificial Sequence
  Description of Artificial Sequence: Synthetic oligonucleotide
  Sense strand starting at position 2133 of SEQ ID NO: 1884625
aguaaaguuuaccucaaau

SEQ ID NO: 2279487 - RNA, 19 nt, Artificial Sequence
  Description of Artificial Sequence: Synthetic oligonucleotide
  Antisense strand to SEQ ID NO: 2279486
auuugagguaaacuuuacu

SEQ ID NO: 2279488 - RNA, 19 nt, Artificial Sequence
  Description of Artificial Sequence: Synthetic oligonucleotide
  Sense strand starting at position 2368 of SEQ ID NO: 1884625
cuugccuaaggaugguaaa

SEQ ID NO: 2279489 - RNA, 19 nt, Artificial Sequence
  Description of Artificial Sequence: Synthetic oligonucleotide
  Antisense strand to SEQ ID NO: 2279488
uuuaccauccuuaggcaag

SEQ ID NO: 2279490 - RNA, 19 nt, Artificial Sequence
  Description of Artificial Sequence: Synthetic oligonucleotide
  Sense strand starting at position 2427 of SEQ ID NO: 1884625
agauauuacugucagauuu

SEQ ID NO: 2279491 - RNA, 19 nt, Artificial Sequence
  Description of Artificial Sequence: Synthetic oligonucleotide
  Antisense strand to SEQ ID NO: 2279490
aaaucugacaguaauaucu

SEQ ID NO: 2279492 - RNA, 19 nt, Artificial Sequence
  Description of Artificial Sequence: Synthetic oligonucleotide
  Sense strand starting at position 2612 of SEQ ID NO: 1884625
cugccauuauuugagggaa

SEQ ID NO: 2279493 - RNA, 19 nt, Artificial Sequence
  Description of Artificial Sequence: Synthetic oligonucleotide
  Antisense strand to SEQ ID NO: 2279492
uucccucaaauaauggcag

SEQ ID NO: 2279494 - RNA, 19 nt, Artificial Sequence
  Description of Artificial Sequence: Synthetic oligonucleotide
  Sense strand starting at position 2646 of SEQ ID NO: 1884625
guuaaauggacaggccuua

SEQ ID NO: 2279495 - RNA, 19 nt, Artificial Sequence
  Description of Artificial Sequence: Synthetic oligonucleotide
  Antisense strand to SEQ ID NO: 2279494
uaaggccuguccauuuaac

SEQ ID NO: 2279496 - RNA, 19 nt, Artificial Sequence
  Description of Artificial Sequence: Synthetic oligonucleotide
  Sense strand starting at position 2705 of SEQ ID NO: 1884625
acuaaugauacccguggau

SEQ ID NO: 2279497 - RNA, 19 nt, Artificial Sequence
  Description of Artificial Sequence: Synthetic oligonucleotide
  Antisense strand to SEQ ID NO: 2279496
auccacggguaucauuagu

SEQ ID NO: 2279498 - RNA, 19 nt, Artificial Sequence
  Description of Artificial Sequence: Synthetic oligonucleotide
  Sense strand starting at position 2707 of SEQ ID NO: 1884625
uaaugauacccguggauaa

SEQ ID NO: 2279499 - RNA, 19 nt, Artificial Sequence
  Description of Artificial Sequence: Synthetic oligonucleotide
  Antisense strand to SEQ ID NO: 2279498
uuauccacggguaucauua

SEQ ID NO: 2279500 - RNA, 19 nt, Artificial Sequence
  Description of Artificial Sequence: Synthetic oligonucleotide
  Sense strand starting at position 2708 of SEQ ID NO: 1884625
aaugauacccguggauaag

SEQ ID NO: 2279501 - RNA, 19 nt, Artificial Sequence
  Description of Artificial Sequence: Synthetic oligonucleotide
  Antisense strand to SEQ ID NO: 2279500
cuuauccacggguaucauu

SEQ ID NO: 2279502 - RNA, 19 nt, Artificial Sequence
  Description of Artificial Sequence: Synthetic oligonucleotide
  Sense strand starting at position 2709 of SEQ ID NO: 1884625
augauacccguggauaagu

SEQ ID NO: 2279503 - RNA, 19 nt, Artificial Sequence
  Description of Artificial Sequence: Synthetic oligonucleotide
  Antisense strand to SEQ ID NO: 2279502
acuuauccacggguaucau

SEQ ID NO: 2279504 - RNA, 19 nt, Artificial Sequence
  Description of Artificial Sequence: Synthetic oligonucleotide
  Sense strand starting at position 2711 of SEQ ID NO: 1884625
gauacccguggauaaguua

SEQ ID NO: 2279505 - RNA, 19 nt, Artificial Sequence
  Description of Artificial Sequence: Synthetic oligonucleotide
  Antisense strand to SEQ ID NO: 2279504
uaacuuauccacggguauc

SEQ ID NO: 2279506 - RNA, 19 nt, Artificial Sequence
  Description of Artificial Sequence: Synthetic oligonucleotide
  Sense strand starting at position 2714 of SEQ ID NO: 1884625
acccguggauaaguuaaau

SEQ ID NO: 2279507 - RNA, 19 nt, Artificial Sequence
  Description of Artificial Sequence: Synthetic oligonucleotide
  Antisense strand to SEQ ID NO: 2279506
auuuaacuuauccacgggu

SEQ ID NO: 2279508 - RNA, 19 nt, Artificial Sequence
  Description of Artificial Sequence: Synthetic oligonucleotide
  Sense strand starting at position 2742 of SEQ ID NO: 1884625
gugucuugacuccaaaucu

SEQ ID NO: 2279509 - RNA, 19 nt, Artificial Sequence
  Description of Artificial Sequence: Synthetic oligonucleotide
  Antisense strand to SEQ ID NO: 2279508
agauuuggagucaagacac

SEQ ID NO: 2279510 - RNA, 19 nt, Artificial Sequence
  Description of Artificial Sequence: Synthetic oligonucleotide
  Sense strand starting at position 2801 of SEQ ID NO: 1884625
uuggcagacuuauuaauca

SEQ ID NO: 2279511 - RNA, 19 nt, Artificial Sequence
  Description of Artificial Sequence: Synthetic oligonucleotide
  Antisense strand to SEQ ID NO: 2279510
ugauuaauaagucugccaa

SEQ ID NO: 2279512 - RNA, 19 nt, Artificial Sequence
  Description of Artificial Sequence: Synthetic oligonucleotide
  Sense strand starting at position 2828 of SEQ ID NO: 1884625
gcaagaucaucauuguauu

SEQ ID NO: 2279513 - RNA, 19 nt, Artificial Sequence
  Description of Artificial Sequence: Synthetic oligonucleotide
  Antisense strand to SEQ ID NO: 2279512
aauacaaugaugaucuugc

SEQ ID NO: 2279514 - RNA, 19 nt, Artificial Sequence
  Description of Artificial Sequence: Synthetic oligonucleotide
  Sense strand starting at position 2980 of SEQ ID NO: 1884625
ggcauacauuuagaauaua

SEQ ID NO: 2279515 - RNA, 19 nt, Artificial Sequence
  Description of Artificial Sequence: Synthetic oligonucleotide
  Antisense strand to SEQ ID NO: 2279514
uauauucuaaauguaugcc

SEQ ID NO: 2279516 - RNA, 19 nt, Artificial Sequence
  Description of Artificial Sequence: Synthetic oligonucleotide
  Sense strand starting at position 3075 of SEQ ID NO: 1884625
uuccaaauggcuuagaguu

SEQ ID NO: 2279517 - RNA, 19 nt, Artificial Sequence
  Description of Artificial Sequence: Synthetic oligonucleotide
  Antisense strand to SEQ ID NO: 2279516
aacucuaagccauuuggaa

SEQ ID NO: 2279518 - RNA, 19 nt, Artificial Sequence
  Description of Artificial Sequence: Synthetic oligonucleotide
  Sense strand starting at position 3521 of SEQ ID NO: 1884625
auguaugaauaguccuuaa

SEQ ID NO: 2279519 - RNA, 19 nt, Artificial Sequence
  Description of Artificial Sequence: Synthetic oligonucleotide
  Antisense strand to SEQ ID NO: 2279518
uuaaggacuauucauacau

SEQ ID NO: 2279520 - RNA, 19 nt, Artificial Sequence
  Description of Artificial Sequence: Synthetic oligonucleotide
  Sense strand starting at position 3525 of SEQ ID NO: 1884625
augaauaguccuuaaguau

SEQ ID NO: 2279521 - RNA, 19 nt, Artificial Sequence
  Description of Artificial Sequence: Synthetic oligonucleotide
  Antisense strand to SEQ ID NO: 2279520
auacuuaaggacuauucau

SEQ ID NO: 2279522 - RNA, 19 nt, Artificial Sequence
  Description of Artificial Sequence: Synthetic oligonucleotide
  Sense strand starting at position 3613 of SEQ ID NO: 1884625
ccuguauuggaauggguua

SEQ ID NO: 2279523 - RNA, 19 nt, Artificial Sequence
  Description of Artificial Sequence: Synthetic oligonucleotide
  Antisense strand to SEQ ID NO: 2279522
uaacccauuccaauacagg

SEQ ID NO: 2279524 - RNA, 19 nt, Artificial Sequence
  Description of Artificial Sequence: Synthetic oligonucleotide
  Sense strand starting at position 3615 of SEQ ID NO: 1884625
uguauuggaauggguuaaa

SEQ ID NO: 2279525 - RNA, 19 nt, Artificial Sequence
  Description of Artificial Sequence: Synthetic oligonucleotide
  Antisense strand to SEQ ID NO: 2279524
uuuaacccauuccaauaca

SEQ ID NO: 2279526 - RNA, 19 nt, Artificial Sequence
  Description of Artificial Sequence: Synthetic oligonucleotide
  Sense strand starting at position 3650 of SEQ ID NO: 1884625
auaccaaauguugguguga

SEQ ID NO: 2279527 - RNA, 19 nt, Artificial Sequence
  Description of Artificial Sequence: Synthetic oligonucleotide
  Antisense strand to SEQ ID NO: 2279526
ucacaccaacauuugguau

SEQ ID NO: 2279528 - RNA, 19 nt, Artificial Sequence
  Description of Artificial Sequence: Synthetic oligonucleotide
  Sense strand starting at position 3651 of SEQ ID NO: 1884625
uaccaaauguuggugugaa

SEQ ID NO: 2279529 - RNA, 19 nt, Artificial Sequence
  Description of Artificial Sequence: Synthetic oligonucleotide
  Antisense strand to SEQ ID NO: 2279528
uucacaccaacauuuggua

SEQ ID NO: 2279530 - RNA, 19 nt, Artificial Sequence
  Description of Artificial Sequence: Synthetic oligonucleotide
  Sense strand starting at position 3663 of SEQ ID NO: 1884625
gugugaaguaacuggacuu

SEQ ID NO: 2279531 - RNA, 19 nt, Artificial Sequence
  Description of Artificial Sequence: Synthetic oligonucleotide
  Antisense strand to SEQ ID NO: 2279530
aaguccaguuacuucacac

SEQ ID NO: 2279532 - RNA, 19 nt, Artificial Sequence
  Description of Artificial Sequence: Synthetic oligonucleotide
  Sense strand starting at position 3664 of SEQ ID NO: 1884625
ugugaaguaacuggacuua

SEQ ID NO: 2279533 - RNA, 19 nt, Artificial Sequence
  Description of Artificial Sequence: Synthetic oligonucleotide
  Antisense strand to SEQ ID NO: 2279532
uaaguccaguuacuucaca

SEQ ID NO: 2279534 - RNA, 19 nt, Artificial Sequence
  Description of Artificial Sequence: Synthetic oligonucleotide
  Sense strand starting at position 3754 of SEQ ID NO: 1884625
acagacacugugcaauaua

SEQ ID NO: 2279535 - RNA, 19 nt, Artificial Sequence
  Description of Artificial Sequence: Synthetic oligonucleotide
  Antisense strand to SEQ ID NO: 2279534
uauauugcacagugucugu

SEQ ID NO: 2279536 - RNA, 19 nt, Artificial Sequence
  Description of Artificial Sequence: Synthetic oligonucleotide
  Sense strand starting at position 3811 of SEQ ID NO: 1884625
aacguuugucuacaugaag

SEQ ID NO: 2279537 - RNA, 19 nt, Artificial Sequence
  Description of Artificial Sequence: Synthetic oligonucleotide
  Antisense strand to SEQ ID NO: 2279536
cuucauguagacaaacguu

SEQ ID NO: 2279538 - RNA, 19 nt, Artificial Sequence
  Description of Artificial Sequence: Synthetic oligonucleotide
  Sense strand starting at position 3814 of SEQ ID NO: 1884625
guuugucuacaugaagauu

SEQ ID NO: 2279539 - RNA, 19 nt, Artificial Sequence
  Description of Artificial Sequence: Synthetic oligonucleotide
  Antisense strand to SEQ ID NO: 2279538
aaucuucauguagacaaac

SEQ ID NO: 2279540 - RNA, 19 nt, Artificial Sequence
  Description of Artificial Sequence: Synthetic oligonucleotide
  Sense strand starting at position 28 of SEQ ID NO: 1884626
cguggucucuugcagaaag

SEQ ID NO: 2279541 - RNA, 19 nt, Artificial Sequence
  Description of Artificial Sequence: Synthetic oligonucleotide
  Antisense strand to SEQ ID NO: 2279540
cuuucugcaagagaccacg

SEQ ID NO: 2279542 - RNA, 19 nt, Artificial Sequence
  Description of Artificial Sequence: Synthetic oligonucleotide
  Sense strand starting at position 30 of SEQ ID NO: 1884626
uggucucuugcagaaagua

SEQ ID NO: 2279543 - RNA, 19 nt, Artificial Sequence
  Description of Artificial Sequence: Synthetic oligonucleotide
  Antisense strand to SEQ ID NO: 2279542
uacuuucugcaagagacca

SEQ ID NO: 2279544 - RNA, 19 nt, Artificial Sequence
  Description of Artificial Sequence: Synthetic oligonucleotide
  Sense strand starting at position 76 of SEQ ID NO: 1884626
aggagagcuuccuaugagc

SEQ ID NO: 2279545 - RNA, 19 nt, Artificial Sequence
  Description of Artificial Sequence: Synthetic oligonucleotide
  Antisense strand to SEQ ID NO: 2279544
gcucauaggaagcucuccu

SEQ ID NO: 2279546 - RNA, 19 nt, Artificial Sequence
  Description of Artificial Sequence: Synthetic oligonucleotide
  Sense strand starting at position 78 of SEQ ID NO: 1884626
gagagcuuccuaugagccu

SEQ ID NO: 2279547 - RNA, 19 nt, Artificial Sequence
  Description of Artificial Sequence: Synthetic oligonucleotide
  Antisense strand to SEQ ID NO: 2279546
aggcucauaggaagcucuc

SEQ ID NO: 2279548 - RNA, 19 nt, Artificial Sequence
  Description of Artificial Sequence: Synthetic oligonucleotide
  Sense strand starting at position 125 of SEQ ID NO: 1884626
ucuugcggucguggauauu

SEQ ID NO: 2279549 - RNA, 19 nt, Artificial Sequence
  Description of Artificial Sequence: Synthetic oligonucleotide
  Antisense strand to SEQ ID NO: 2279548
aauauccacgaccgcaaga

SEQ ID NO: 2279550 - RNA, 19 nt, Artificial Sequence
  Description of Artificial Sequence: Synthetic oligonucleotide
  Sense strand starting at position 134 of SEQ ID NO: 1884626
cguggauauuguuaauggu

SEQ ID NO: 2279551 - RNA, 19 nt, Artificial Sequence
  Description of Artificial Sequence: Synthetic oligonucleotide
  Antisense strand to SEQ ID NO: 2279550
accauuaacaauauccacg

SEQ ID NO: 2279552 - RNA, 19 nt, Artificial Sequence
  Description of Artificial Sequence: Synthetic oligonucleotide
  Sense strand starting at position 187 of SEQ ID NO: 1884626
ggugaagcaaucugcucaa

SEQ ID NO: 2279553 - RNA, 19 nt, Artificial Sequence
  Description of Artificial Sequence: Synthetic oligonucleotide
  Antisense strand to SEQ ID NO: 2279552
uugagcagauugcuucacc

SEQ ID NO: 2279554 - RNA, 19 nt, Artificial Sequence
  Description of Artificial Sequence: Synthetic oligonucleotide
  Sense strand starting at position 190 of SEQ ID NO: 1884626
gaagcaaucugcucaaggu

SEQ ID NO: 2279555 - RNA, 19 nt, Artificial Sequence
  Description of Artificial Sequence: Synthetic oligonucleotide
  Antisense strand to SEQ ID NO: 2279554
accuugagcagauugcuuc

SEQ ID NO: 2279556 - RNA, 19 nt, Artificial Sequence
  Description of Artificial Sequence: Synthetic oligonucleotide
  Sense strand starting at position 361 of SEQ ID NO: 1884626
caguacgugcucuaggauu

SEQ ID NO: 2279557 - RNA, 19 nt, Artificial Sequence
  Description of Artificial Sequence: Synthetic oligonucleotide
  Antisense strand to SEQ ID NO: 2279556
aauccuagagcacguacug

SEQ ID NO: 2279558 - RNA, 19 nt, Artificial Sequence
  Description of Artificial Sequence: Synthetic oligonucleotide
  Sense strand starting at position 363 of SEQ ID NO: 1884626
guacgugcucuaggauuau

SEQ ID NO: 2279559 - RNA, 19 nt, Artificial Sequence
  Description of Artificial Sequence: Synthetic oligonucleotide
  Antisense strand to SEQ ID NO: 2279558
auaauccuagagcacguac

SEQ ID NO: 2279560 - RNA, 19 nt, Artificial Sequence
  Description of Artificial Sequence: Synthetic oligonucleotide
  Sense strand starting at position 528 of SEQ ID NO: 1884626
ucaaguguucggugagaau

SEQ ID NO: 2279561 - RNA, 19 nt, Artificial Sequence
  Description of Artificial Sequence: Synthetic oligonucleotide
  Antisense strand to SEQ ID NO: 2279560
auucucaccgaacacuuga

SEQ ID NO: 2279562 - RNA, 19 nt, Artificial Sequence
  Description of Artificial Sequence: Synthetic oligonucleotide
  Sense strand starting at position 555 of SEQ ID NO: 1884626
ugggcugaaugacuuuaaa

SEQ ID NO: 2279563 - RNA, 19 nt, Artificial Sequence
  Description of Artificial Sequence: Synthetic oligonucleotide
  Antisense strand to SEQ ID NO: 2279562
uuuaaagucauucagccca

SEQ ID NO: 2279564 - RNA, 19 nt, Artificial Sequence
  Description of Artificial Sequence: Synthetic oligonucleotide
  Sense strand starting at position 558 of SEQ ID NO: 1884626
gcugaaugacuuuaaaggu

SEQ ID NO: 2279565 - RNA, 19 nt, Artificial Sequence
  Description of Artificial Sequence: Synthetic oligonucleotide
  Antisense strand to SEQ ID NO: 2279564
accuuuaaagucauucagc

SEQ ID NO: 2279566 - RNA, 19 nt, Artificial Sequence
  Description of Artificial Sequence: Synthetic oligonucleotide
  Sense strand starting at position 697 of SEQ ID NO: 1884626
ccaacucauaggcgggaaa

SEQ ID NO: 2279567 - RNA, 19 nt, Artificial Sequence
  Description of Artificial Sequence: Synthetic oligonucleotide
  Antisense strand to SEQ ID NO: 2279566
uuucccgccuaugaguugg

SEQ ID NO: 2279568 - RNA, 19 nt, Artificial Sequence
  Description of Artificial Sequence: Synthetic oligonucleotide
  Sense strand starting at position 2062 of SEQ ID NO: 1884626
aagaaagggucucgcuaug

SEQ ID NO: 2279569 - RNA, 19 nt, Artificial Sequence
  Description of Artificial Sequence: Synthetic oligonucleotide
  Antisense strand to SEQ ID NO: 2279568
cauagcgagacccuuucuu

SEQ ID NO: 2279570 - RNA, 19 nt, Artificial Sequence
  Description of Artificial Sequence: Synthetic oligonucleotide
  Sense strand starting at position 2074 of SEQ ID NO: 1884626
cgcuauguugcauagggua

SEQ ID NO: 2279571 - RNA, 19 nt, Artificial Sequence
  Description of Artificial Sequence: Synthetic oligonucleotide
  Antisense strand to SEQ ID NO: 2279570
uacccuaugcaacauagcg

SEQ ID NO: 2279572 - RNA, 19 nt, Artificial Sequence
  Description of Artificial Sequence: Synthetic oligonucleotide
  Sense strand starting at position 2170 of SEQ ID NO: 1884626
aaagcagggucuuuauaaa

SEQ ID NO: 2279573 - RNA, 19 nt, Artificial Sequence
  Description of Artificial Sequence: Synthetic oligonucleotide
  Antisense strand to SEQ ID NO: 2279572
uuuauaaagacccugcuuu

SEQ ID NO: 2279574 - RNA, 19 nt, Artificial Sequence
  Description of Artificial Sequence: Synthetic oligonucleotide
  Sense strand starting at position 2213 of SEQ ID NO: 1884626
aauaaugguugccaagagu

SEQ ID NO: 2279575 - RNA, 19 nt, Artificial Sequence
  Description of Artificial Sequence: Synthetic oligonucleotide
  Antisense strand to SEQ ID NO: 2279574
acucuuggcaaccauuauu

SEQ ID NO: 2279576 - RNA, 19 nt, Artificial Sequence
  Description of Artificial Sequence: Synthetic oligonucleotide
  Sense strand starting at position 2216 of SEQ ID NO: 1884626
aaugguugccaagagucaa

SEQ ID NO: 2279577 - RNA, 19 nt, Artificial Sequence
  Description of Artificial Sequence: Synthetic oligonucleotide
  Antisense strand to SEQ ID NO: 2279576
uugacucuuggcaaccauu

SEQ ID NO: 2279578 - RNA, 19 nt, Artificial Sequence
  Description of Artificial Sequence: Synthetic oligonucleotide
  Sense strand starting at position 2253 of SEQ ID NO: 1884626
aguggauguggcugugaaa

SEQ ID NO: 2279579 - RNA, 19 nt, Artificial Sequence
  Description of Artificial Sequence: Synthetic oligonucleotide
  Antisense strand to SEQ ID NO: 2279578
uuucacagccacauccacu

SEQ ID NO: 2279580 - RNA, 19 nt, Artificial Sequence
  Description of Artificial Sequence: Synthetic oligonucleotide
  Sense strand starting at position 2276 of SEQ ID NO: 1884626
aagucuggauucuugugaa

SEQ ID NO: 2279581 - RNA, 19 nt, Artificial Sequence
  Description of Artificial Sequence: Synthetic oligonucleotide
  Antisense strand to SEQ ID NO: 2279580
uucacaagaauccagacuu

SEQ ID NO: 2279582 - RNA, 19 nt, Artificial Sequence
  Description of Artificial Sequence: Synthetic oligonucleotide
  Sense strand starting at position 2279 of SEQ ID NO: 1884626
ucuggauucuugugaaggu

SEQ ID NO: 2279583 - RNA, 19 nt, Artificial Sequence
  Description of Artificial Sequence: Synthetic oligonucleotide
  Antisense strand to SEQ ID NO: 2279582
accuucacaagaauccaga

SEQ ID NO: 2279584 - RNA, 19 nt, Artificial Sequence
  Description of Artificial Sequence: Synthetic oligonucleotide
  Sense strand starting at position 2710 of SEQ ID NO: 1884626
gcgcccggccucuuuauaa

SEQ ID NO: 2279585 - RNA, 19 nt, Artificial Sequence
  Description of Artificial Sequence: Synthetic oligonucleotide
  Antisense strand to SEQ ID NO: 2279584
uuauaaagaggccgggcgc

SEQ ID NO: 2279586 - RNA, 19 nt, Artificial Sequence
  Description of Artificial Sequence: Synthetic oligonucleotide
  Sense strand starting at position 2730 of SEQ ID NO: 1884626
uucuuuaaguucccuguga

SEQ ID NO: 2279587 - RNA, 19 nt, Artificial Sequence
  Description of Artificial Sequence: Synthetic oligonucleotide
  Antisense strand to SEQ ID NO: 2279586
ucacagggaacuuaaagaa

SEQ ID NO: 2279588 - RNA, 19 nt, Artificial Sequence
  Description of Artificial Sequence: Synthetic oligonucleotide
  Sense strand starting at position 2731 of SEQ ID NO: 1884626
ucuuuaaguucccugugaa

SEQ ID NO: 2279589 - RNA, 19 nt, Artificial Sequence
  Description of Artificial Sequence: Synthetic oligonucleotide
  Antisense strand to SEQ ID NO: 2279588
uucacagggaacuuaaaga

SEQ ID NO: 2279590 - RNA, 19 nt, Artificial Sequence
  Description of Artificial Sequence: Synthetic oligonucleotide
  Sense strand starting at position 2732 of SEQ ID NO: 1884626
cuuuaaguucccugugaau

SEQ ID NO: 2279591 - RNA, 19 nt, Artificial Sequence
  Description of Artificial Sequence: Synthetic oligonucleotide
  Antisense strand to SEQ ID NO: 2279590
auucacagggaacuuaaag

SEQ ID NO: 2279592 - RNA, 19 nt, Artificial Sequence
  Description of Artificial Sequence: Synthetic oligonucleotide
  Sense strand starting at position 2734 of SEQ ID NO: 1884626
uuaaguucccugugaauua

SEQ ID NO: 2279593 - RNA, 19 nt, Artificial Sequence
  Description of Artificial Sequence: Synthetic oligonucleotide
  Antisense strand to SEQ ID NO: 2279592
uaauucacagggaacuuaa

SEQ ID NO: 2279594 - RNA, 19 nt, Artificial Sequence
  Description of Artificial Sequence: Synthetic oligonucleotide
  Sense strand starting at position 2792 of SEQ ID NO: 1884626
agaguuucucucugaccau

SEQ ID NO: 2279595 - RNA, 19 nt, Artificial Sequence
  Description of Artificial Sequence: Synthetic oligonucleotide
  Antisense strand to SEQ ID NO: 2279594
auggucagagagaaacucu

SEQ ID NO: 2279596 - RNA, 19 nt, Artificial Sequence
  Description of Artificial Sequence: Synthetic oligonucleotide
  Sense strand starting at position 3060 of SEQ ID NO: 1884626
cgcccagccacguuuaauu

SEQ ID NO: 2279597 - RNA, 19 nt, Artificial Sequence
  Description of Artificial Sequence: Synthetic oligonucleotide
  Antisense strand to SEQ ID NO: 2279596
aauuaaacguggcugggcg

SEQ ID NO: 2279598 - RNA, 19 nt, Artificial Sequence
  Description of Artificial Sequence: Synthetic oligonucleotide
  Sense strand starting at position 3354 of SEQ ID NO: 1884626
gggauuaaggcauguagca

SEQ ID NO: 2279599 - RNA, 19 nt, Artificial Sequence
  Description of Artificial Sequence: Synthetic oligonucleotide
  Antisense strand to SEQ ID NO: 2279598
ugcuacaugccuuaauccc

SEQ ID NO: 2279600 - RNA, 19 nt, Artificial Sequence
  Description of Artificial Sequence: Synthetic oligonucleotide
  Sense strand starting at position 3538 of SEQ ID NO: 1884626
augguuuauuuggugguua

SEQ ID NO: 2279601 - RNA, 19 nt, Artificial Sequence
  Description of Artificial Sequence: Synthetic oligonucleotide
  Antisense strand to SEQ ID NO: 2279600
uaaccaccaaauaaaccau

SEQ ID NO: 2279602 - RNA, 19 nt, Artificial Sequence
  Description of Artificial Sequence: Synthetic oligonucleotide
  Sense strand starting at position 3539 of SEQ ID NO: 1884626
ugguuuauuuggugguuaa

SEQ ID NO: 2279603 - RNA, 19 nt, Artificial Sequence
  Description of Artificial Sequence: Synthetic oligonucleotide
  Antisense strand to SEQ ID NO: 2279602
uuaaccaccaaauaaacca

SEQ ID NO: 2279604 - RNA, 19 nt, Artificial Sequence
  Description of Artificial Sequence: Synthetic oligonucleotide
  Sense strand starting at position 3540 of SEQ ID NO: 1884626
gguuuauuuggugguuaau

SEQ ID NO: 2279605 - RNA, 19 nt, Artificial Sequence
  Description of Artificial Sequence: Synthetic oligonucleotide
  Antisense strand to SEQ ID NO: 2279604
auuaaccaccaaauaaacc

SEQ ID NO: 2279606 - RNA, 19 nt, Artificial Sequence
  Description of Artificial Sequence: Synthetic oligonucleotide
  Sense strand starting at position 3553 of SEQ ID NO: 1884626
guuaauaacuguucucuug

SEQ ID NO: 2279607 - RNA, 19 nt, Artificial Sequence
  Description of Artificial Sequence: Synthetic oligonucleotide
  Antisense strand to SEQ ID NO: 2279606
caagagaacaguuauuaac

SEQ ID NO: 2279608 - RNA, 19 nt, Artificial Sequence
  Description of Artificial Sequence: Synthetic oligonucleotide
  Sense strand starting at position 3816 of SEQ ID NO: 1884626
uccucuagucugugcgaca

SEQ ID NO: 2279609 - RNA, 19 nt, Artificial Sequence
  Description of Artificial Sequence: Synthetic oligonucleotide
  Antisense strand to SEQ ID NO: 2279608
ugucgcacagacuagagga

SEQ ID NO: 2279610 - RNA, 19 nt, Artificial Sequence
  Description of Artificial Sequence: Synthetic oligonucleotide
  Sense strand starting at position 3819 of SEQ ID NO: 1884626
ucuagucugugcgacagaa

SEQ ID NO: 2279611 - RNA, 19 nt, Artificial Sequence
  Description of Artificial Sequence: Synthetic oligonucleotide
  Antisense strand to SEQ ID NO: 2279610
uucugucgcacagacuaga

SEQ ID NO: 2279612 - RNA, 19 nt, Artificial Sequence
  Description of Artificial Sequence: Synthetic oligonucleotide
  Sense strand starting at position 3875 of SEQ ID NO: 1884626
guaaauaacuguucucuua

SEQ ID NO: 2279613 - RNA, 19 nt, Artificial Sequence
  Description of Artificial Sequence: Synthetic oligonucleotide
  Antisense strand to SEQ ID NO: 2279612
uaagagaacaguuauuuac

SEQ ID NO: 2279614 - RNA, 19 nt, Artificial Sequence
  Description of Artificial Sequence: Synthetic oligonucleotide
  Sense strand starting at position 3900 of SEQ ID NO: 1884626
uuccaucuguccuguuaau

SEQ ID NO: 2279615 - RNA, 19 nt, Artificial Sequence
  Description of Artificial Sequence: Synthetic oligonucleotide
  Antisense strand to SEQ ID NO: 2279614
auuaacaggacagauggaa

SEQ ID NO: 2279616 - RNA, 19 nt, Artificial Sequence
  Description of Artificial Sequence: Synthetic oligonucleotide
  Sense strand starting at position 3936 of SEQ ID NO: 1884626
uugguucucuauccugaau

SEQ ID NO: 2279617 - RNA, 19 nt, Artificial Sequence
  Description of Artificial Sequence: Synthetic oligonucleotide
  Antisense strand to SEQ ID NO: 2279616
auucaggauagagaaccaa

SEQ ID NO: 2279618 - RNA, 19 nt, Artificial Sequence
  Description of Artificial Sequence: Synthetic oligonucleotide
  Sense strand starting at position 3938 of SEQ ID NO: 1884626
gguucucuauccugaauca

SEQ ID NO: 2279619 - RNA, 19 nt, Artificial Sequence
  Description of Artificial Sequence: Synthetic oligonucleotide
  Antisense strand to SEQ ID NO: 2279618
ugauucaggauagagaacc

SEQ ID NO: 2279620 - RNA, 19 nt, Artificial Sequence
  Description of Artificial Sequence: Synthetic oligonucleotide
  Sense strand starting at position 168 of SEQ ID NO: 1884627
gaacuuggaccgugguaaa

SEQ ID NO: 2279621 - RNA, 19 nt, Artificial Sequence
  Description of Artificial Sequence: Synthetic oligonucleotide
  Antisense strand to SEQ ID NO: 2279620
uuuaccacgguccaaguuc

SEQ ID NO: 2279622 - RNA, 19 nt, Artificial Sequence
  Description of Artificial Sequence: Synthetic oligonucleotide
  Sense strand starting at position 255 of SEQ ID NO: 1884627
aacagaucauguguugauu

SEQ ID NO: 2279623 - RNA, 19 nt, Artificial Sequence
  Description of Artificial Sequence: Synthetic oligonucleotide
  Antisense strand to SEQ ID NO: 2279622
aaucaacacaugaucuguu

SEQ ID NO: 2279624 - RNA, 19 nt, Artificial Sequence
  Description of Artificial Sequence: Synthetic oligonucleotide
  Sense strand starting at position 285 of SEQ ID NO: 1884627
caaagaaauuccguugguu

SEQ ID NO: 2279625 - RNA, 19 nt, Artificial Sequence
  Description of Artificial Sequence: Synthetic oligonucleotide
  Antisense strand to SEQ ID NO: 2279624
aaccaacggaauuucuuug

SEQ ID NO: 2279626 - RNA, 19 nt, Artificial Sequence
  Description of Artificial Sequence: Synthetic oligonucleotide
  Sense strand starting at position 287 of SEQ ID NO: 1884627
aagaaauuccguugguuga

SEQ ID NO: 2279627 - RNA, 19 nt, Artificial Sequence
  Description of Artificial Sequence: Synthetic oligonucleotide
  Antisense strand to SEQ ID NO: 2279626
ucaaccaacggaauuucuu

SEQ ID NO: 2279628 - RNA, 19 nt, Artificial Sequence
  Description of Artificial Sequence: Synthetic oligonucleotide
  Sense strand starting at position 288 of SEQ ID NO: 1884627
agaaauuccguugguugaa

SEQ ID NO: 2279629 - RNA, 19 nt, Artificial Sequence
  Description of Artificial Sequence: Synthetic oligonucleotide
  Antisense strand to SEQ ID NO: 2279628
uucaaccaacggaauuucu

SEQ ID NO: 2279630 - RNA, 19 nt, Artificial Sequence
  Description of Artificial Sequence: Synthetic oligonucleotide
  Sense strand starting at position 289 of SEQ ID NO: 1884627
gaaauuccguugguugaaa

SEQ ID NO: 2279631 - RNA, 19 nt, Artificial Sequence
  Description of Artificial Sequence: Synthetic oligonucleotide
  Antisense strand to SEQ ID NO: 2279630
uuucaaccaacggaauuuc

SEQ ID NO: 2279632 - RNA, 19 nt, Artificial Sequence
  Description of Artificial Sequence: Synthetic oligonucleotide
  Sense strand starting at position 290 of SEQ ID NO: 1884627
aaauuccguugguugaaau

SEQ ID NO: 2279633 - RNA, 19 nt, Artificial Sequence
  Description of Artificial Sequence: Synthetic oligonucleotide
  Antisense strand to SEQ ID NO: 2279632
auuucaaccaacggaauuu

SEQ ID NO: 2279634 - RNA, 19 nt, Artificial Sequence
  Description of Artificial Sequence: Synthetic oligonucleotide
  Sense strand starting at position 300 of SEQ ID NO: 1884627
gguugaaaucauugacuuc

SEQ ID NO: 2279635 - RNA, 19 nt, Artificial Sequence
  Description of Artificial Sequence: Synthetic oligonucleotide
  Antisense strand to SEQ ID NO: 2279634
gaagucaaugauuucaacc

SEQ ID NO: 2279636 - RNA, 19 nt, Artificial Sequence
  Description of Artificial Sequence: Synthetic oligonucleotide
  Sense strand starting at position 509 of SEQ ID NO: 1884627
ggaguccaaucucaaggau

SEQ ID NO: 2279637 - RNA, 19 nt, Artificial Sequence
  Description of Artificial Sequence: Synthetic oligonucleotide
  Antisense strand to SEQ ID NO: 2279636
auccuugagauuggacucc

SEQ ID NO: 2279638 - RNA, 19 nt, Artificial Sequence
  Description of Artificial Sequence: Synthetic oligonucleotide
  Sense strand starting at position 512 of SEQ ID NO: 1884627
guccaaucucaaggaugaa

SEQ ID NO: 2279639 - RNA, 19 nt, Artificial Sequence
  Description of Artificial Sequence: Synthetic oligonucleotide
  Antisense strand to SEQ ID NO: 2279638
uucauccuugagauuggac

SEQ ID NO: 2279640 - RNA, 19 nt, Artificial Sequence
  Description of Artificial Sequence: Synthetic oligonucleotide
  Sense strand starting at position 561 of SEQ ID NO: 1884627
gagagaauccuguggguca

SEQ ID NO: 2279641 - RNA, 19 nt, Artificial Sequence
  Description of Artificial Sequence: Synthetic oligonucleotide
  Antisense strand to SEQ ID NO: 2279640
ugacccacaggauucucuc

SEQ ID NO: 2279642 - RNA, 19 nt, Artificial Sequence
  Description of Artificial Sequence: Synthetic oligonucleotide
  Sense strand starting at position 563 of SEQ ID NO: 1884627
gagaauccugugggucaag

SEQ ID NO: 2279643 - RNA, 19 nt, Artificial Sequence
  Description of Artificial Sequence: Synthetic oligonucleotide
  Antisense strand to SEQ ID NO: 2279642
cuugacccacaggauucuc

SEQ ID NO: 2279644 - RNA, 19 nt, Artificial Sequence
  Description of Artificial Sequence: Synthetic oligonucleotide
  Sense strand starting at position 566 of SEQ ID NO: 1884627
aauccugugggucaaguaa

SEQ ID NO: 2279645 - RNA, 19 nt, Artificial Sequence
  Description of Artificial Sequence: Synthetic oligonucleotide
  Antisense strand to SEQ ID NO: 2279644
uuacuugacccacaggauu

SEQ ID NO: 2279646 - RNA, 19 nt, Artificial Sequence
  Description of Artificial Sequence: Synthetic oligonucleotide
  Sense strand starting at position 811 of SEQ ID NO: 1884627
ccucacagauuccugguaa

SEQ ID NO: 2279647 - RNA, 19 nt, Artificial Sequence
  Description of Artificial Sequence: Synthetic oligonucleotide
  Antisense strand to SEQ ID NO: 2279646
uuaccaggaaucugugagg

SEQ ID NO: 2279648 - RNA, 19 nt, Artificial Sequence
  Description of Artificial Sequence: Synthetic oligonucleotide
  Sense strand starting at position 826 of SEQ ID NO: 1884627
guaaguugugaccagcuaa

SEQ ID NO: 2279649 - RNA, 19 nt, Artificial Sequence
  Description of Artificial Sequence: Synthetic oligonucleotide
  Antisense strand to SEQ ID NO: 2279648
uuagcuggucacaacuuac

SEQ ID NO: 2279650 - RNA, 19 nt, Artificial Sequence
  Description of Artificial Sequence: Synthetic oligonucleotide
  Sense strand starting at position 875 of SEQ ID NO: 1884627
ggaaugugggaguguuuga

SEQ ID NO: 2279651 - RNA, 19 nt, Artificial Sequence
  Description of Artificial Sequence: Synthetic oligonucleotide
  Antisense strand to SEQ ID NO: 2279650
ucaaacacucccacauucc

SEQ ID NO: 2279652 - RNA, 19 nt, Artificial Sequence
  Description of Artificial Sequence: Synthetic oligonucleotide
  Sense strand starting at position 882 of SEQ ID NO: 1884627
gggaguguuugaguucuga

SEQ ID NO: 2279653 - RNA, 19 nt, Artificial Sequence
  Description of Artificial Sequence: Synthetic oligonucleotide
  Antisense strand to SEQ ID NO: 2279652
ucagaacucaaacacuccc

SEQ ID NO: 2279654 - RNA, 19 nt, Artificial Sequence
  Description of Artificial Sequence: Synthetic oligonucleotide
  Sense strand starting at position 906 of SEQ ID NO: 1884627
cugccagguuccucugaga

SEQ ID NO: 2279655 - RNA, 19 nt, Artificial Sequence
  Description of Artificial Sequence: Synthetic oligonucleotide
  Antisense strand to SEQ ID NO: 2279654
ucucagaggaaccuggcag

SEQ ID NO: 2279656 - RNA, 19 nt, Artificial Sequence
  Description of Artificial Sequence: Synthetic oligonucleotide
  Sense strand starting at position 1046 of SEQ ID NO: 1884627
ggcagaauucuagagcuuc

SEQ ID NO: 2279657 - RNA, 19 nt, Artificial Sequence
  Description of Artificial Sequence: Synthetic oligonucleotide
  Antisense strand to SEQ ID NO: 2279656
gaagcucuagaauucugcc

SEQ ID NO: 2279658 - RNA, 19 nt, Artificial Sequence
  Description of Artificial Sequence: Synthetic oligonucleotide
  Sense strand starting at position 1203 of SEQ ID NO: 1884627
uuccuuuguuaugucaaua

SEQ ID NO: 2279659 - RNA, 19 nt, Artificial Sequence
  Description of Artificial Sequence: Synthetic oligonucleotide
  Antisense strand to SEQ ID NO: 2279658
uauugacauaacaaaggaa

SEQ ID NO: 2279660 - RNA, 19 nt, Artificial Sequence
  Description of Artificial Sequence: Synthetic oligonucleotide
  Sense strand starting at position 1208 of SEQ ID NO: 1884627
uuguuaugucaauauugac

SEQ ID NO: 2279661 - RNA, 19 nt, Artificial Sequence
  Description of Artificial Sequence: Synthetic oligonucleotide
  Antisense strand to SEQ ID NO: 2279660
gucaauauugacauaacaa

SEQ ID NO: 2279662 - RNA, 19 nt, Artificial Sequence
  Description of Artificial Sequence: Synthetic oligonucleotide
  Sense strand starting at position 1216 of SEQ ID NO: 1884627
ucaauauugacuuggagug

SEQ ID NO: 2279663 - RNA, 19 nt, Artificial Sequence
  Description of Artificial Sequence: Synthetic oligonucleotide
  Antisense strand to SEQ ID NO: 2279662
cacuccaagucaauauuga

SEQ ID NO: 2279664 - RNA, 19 nt, Artificial Sequence
  Description of Artificial Sequence: Synthetic oligonucleotide
  Sense strand starting at position 1217 of SEQ ID NO: 1884627
caauauugacuuggaguga

SEQ ID NO: 2279665 - RNA, 19 nt, Artificial Sequence
  Description of Artificial Sequence: Synthetic oligonucleotide
  Antisense strand to SEQ ID NO: 2279664
ucacuccaagucaauauug

SEQ ID NO: 2279666 - RNA, 19 nt, Artificial Sequence
  Description of Artificial Sequence: Synthetic oligonucleotide
  Sense strand starting at position 1238 of SEQ ID NO: 1884627
gggaguaaugcugguuccu

SEQ ID NO: 2279667 - RNA, 19 nt, Artificial Sequence
  Description of Artificial Sequence: Synthetic oligonucleotide
  Antisense strand to SEQ ID NO: 2279666
aggaaccagcauuacuccc

SEQ ID NO: 2279668 - RNA, 19 nt, Artificial Sequence
  Description of Artificial Sequence: Synthetic oligonucleotide
  Sense strand starting at position 1240 of SEQ ID NO: 1884627
gaguaaugcugguuccuug

SEQ ID NO: 2279669 - RNA, 19 nt, Artificial Sequence
  Description of Artificial Sequence: Synthetic oligonucleotide
  Antisense strand to SEQ ID NO: 2279668
caaggaaccagcauuacuc

SEQ ID NO: 2279670 - RNA, 19 nt, Artificial Sequence
  Description of Artificial Sequence: Synthetic oligonucleotide
  Sense strand starting at position 1371 of SEQ ID NO: 1884627
gagugaaaucuccaggcca

SEQ ID NO: 2279671 - RNA, 19 nt, Artificial Sequence
  Description of Artificial Sequence: Synthetic oligonucleotide
  Antisense strand to SEQ ID NO: 2279670
uggccuggagauuucacuc

SEQ ID NO: 2279672 - RNA, 19 nt, Artificial Sequence
  Description of Artificial Sequence: Synthetic oligonucleotide
  Sense strand starting at position 1737 of SEQ ID NO: 1884627
augguuacccuguagucau

SEQ ID NO: 2279673 - RNA, 19 nt, Artificial Sequence
  Description of Artificial Sequence: Synthetic oligonucleotide
  Antisense strand to SEQ ID NO: 2279672
augacuacaggguaaccau

SEQ ID NO: 2279674 - RNA, 19 nt, Artificial Sequence
  Description of Artificial Sequence: Synthetic oligonucleotide
  Sense strand starting at position 1779 of SEQ ID NO: 1884627
aggagauguuugcugugcu

SEQ ID NO: 2279675 - RNA, 19 nt, Artificial Sequence
  Description of Artificial Sequence: Synthetic oligonucleotide
  Antisense strand to SEQ ID NO: 2279674
agcacagcaaacaucuccu

SEQ ID NO: 2279676 - RNA, 19 nt, Artificial Sequence
  Description of Artificial Sequence: Synthetic oligonucleotide
  Sense strand starting at position 1972 of SEQ ID NO: 1884627
gaugauuugucucagaaag

SEQ ID NO: 2279677 - RNA, 19 nt, Artificial Sequence
  Description of Artificial Sequence: Synthetic oligonucleotide
  Antisense strand to SEQ ID NO: 2279676
cuuucugagacaaaucauc

SEQ ID NO: 2279678 - RNA, 19 nt, Artificial Sequence
  Description of Artificial Sequence: Synthetic oligonucleotide
  Sense strand starting at position 1974 of SEQ ID NO: 1884627
ugauuugucucagaaagaa

SEQ ID NO: 2279679 - RNA, 19 nt, Artificial Sequence
  Description of Artificial Sequence: Synthetic oligonucleotide
  Antisense strand to SEQ ID NO: 2279678
uucuuucugagacaaauca

SEQ ID NO: 2279680 - RNA, 19 nt, Artificial Sequence
  Description of Artificial Sequence: Synthetic oligonucleotide
  Sense strand starting at position 2065 of SEQ ID NO: 1884627
uuuguaucaucggccauuu

SEQ ID NO: 2279681 - RNA, 19 nt, Artificial Sequence
  Description of Artificial Sequence: Synthetic oligonucleotide
  Antisense strand to SEQ ID NO: 2279680
aaauggccgaugauacaaa

SEQ ID NO: 2279682 - RNA, 19 nt, Artificial Sequence
  Description of Artificial Sequence: Synthetic oligonucleotide
  Sense strand starting at position 2083 of SEQ ID NO: 1884627
ucaacaaguccuggaugga

SEQ ID NO: 2279683 - RNA, 19 nt, Artificial Sequence
  Description of Artificial Sequence: Synthetic oligonucleotide
  Antisense strand to SEQ ID NO: 2279682
uccauccaggacuuguuga

SEQ ID NO: 2279684 - RNA, 19 nt, Artificial Sequence
  Description of Artificial Sequence: Synthetic oligonucleotide
  Sense strand starting at position 2209 of SEQ ID NO: 1884627
uuuaacuucuuuguggaua

SEQ ID NO: 2279685 - RNA, 19 nt, Artificial Sequence
  Description of Artificial Sequence: Synthetic oligonucleotide
  Antisense strand to SEQ ID NO: 2279684
uauccacaaagaaguuaaa

SEQ ID NO: 2279686 - RNA, 19 nt, Artificial Sequence
  Description of Artificial Sequence: Synthetic oligonucleotide
  Sense strand starting at position 2313 of SEQ ID NO: 1884627
gagacuggcccaugcguua

SEQ ID NO: 2279687 - RNA, 19 nt, Artificial Sequence
  Description of Artificial Sequence: Synthetic oligonucleotide
  Antisense strand to SEQ ID NO: 2279686
uaacgcaugggccagucuc

SEQ ID NO: 2279688 - RNA, 19 nt, Artificial Sequence
  Description of Artificial Sequence: Synthetic oligonucleotide
  Sense strand starting at position 2880 of SEQ ID NO: 1884627
gcuaguuuggccuugccau

SEQ ID NO: 2279689 - RNA, 19 nt, Artificial Sequence
  Description of Artificial Sequence: Synthetic oligonucleotide
  Antisense strand to SEQ ID NO: 2279688
auggcaaggccaaacuagc

SEQ ID NO: 2279690 - RNA, 19 nt, Artificial Sequence
  Description of Artificial Sequence: Synthetic oligonucleotide
  Sense strand starting at position 2914 of SEQ ID NO: 1884627
gcgggugaugaguagucau

SEQ ID NO: 2279691 - RNA, 19 nt, Artificial Sequence
  Description of Artificial Sequence: Synthetic oligonucleotide
  Antisense strand to SEQ ID NO: 2279690
augacuacucaucacccgc

SEQ ID NO: 2279692 - RNA, 19 nt, Artificial Sequence
  Description of Artificial Sequence: Synthetic oligonucleotide
  Sense strand starting at position 2939 of SEQ ID NO: 1884627
accgccuugccggaaacau

SEQ ID NO: 2279693 - RNA, 19 nt, Artificial Sequence
  Description of Artificial Sequence: Synthetic oligonucleotide
  Antisense strand to SEQ ID NO: 2279692
auguuuccggcaaggcggu

SEQ ID NO: 2279694 - RNA, 19 nt, Artificial Sequence
  Description of Artificial Sequence: Synthetic oligonucleotide
  Sense strand starting at position 2954 of SEQ ID NO: 1884627
acaucuaauuagggacaga

SEQ ID NO: 2279695 - RNA, 19 nt, Artificial Sequence
  Description of Artificial Sequence: Synthetic oligonucleotide
  Antisense strand to SEQ ID NO: 2279694
ucugucccuaauuagaugu

SEQ ID NO: 2279696 - RNA, 19 nt, Artificial Sequence
  Description of Artificial Sequence: Synthetic oligonucleotide
  Sense strand starting at position 3690 of SEQ ID NO: 1884627
acgacuugagccugacacu

SEQ ID NO: 2279697 - RNA, 19 nt, Artificial Sequence
  Description of Artificial Sequence: Synthetic oligonucleotide
  Antisense strand to SEQ ID NO: 2279696
agugucaggcucaagucgu

SEQ ID NO: 2279698 - RNA, 19 nt, Artificial Sequence
  Description of Artificial Sequence: Synthetic oligonucleotide
  Sense strand starting at position 3980 of SEQ ID NO: 1884627
cccuguccuccugggagaa

SEQ ID NO: 2279699 - RNA, 19 nt, Artificial Sequence
  Description of Artificial Sequence: Synthetic oligonucleotide
  Antisense strand to SEQ ID NO: 2279698
uucucccaggaggacaggg

SEQ ID NO: 2279700 - RNA, 19 nt, Artificial Sequence
  Description of Artificial Sequence: Synthetic oligonucleotide
  Sense strand starting at position 171 of SEQ ID NO: 1884628
uuaacaagaucucucgcaa

SEQ ID NO: 2279701 - RNA, 19 nt, Artificial Sequence
  Description of Artificial Sequence: Synthetic oligonucleotide
  Antisense strand to SEQ ID NO: 2279700
uugcgagagaucuuguuaa

SEQ ID NO: 2279702 - RNA, 19 nt, Artificial Sequence
  Description of Artificial Sequence: Synthetic oligonucleotide
  Sense strand starting at position 402 of SEQ ID NO: 1884628
gucuuugcucaaugauaag

SEQ ID NO: 2279703 - RNA, 19 nt, Artificial Sequence
  Description of Artificial Sequence: Synthetic oligonucleotide
  Antisense strand to SEQ ID NO: 2279702
cuuaucauugagcaaagac

SEQ ID NO: 2279704 - RNA, 19 nt, Artificial Sequence
  Description of Artificial Sequence: Synthetic oligonucleotide
  Sense strand starting at position 583 of SEQ ID NO: 1884628
ggacacugcuaagucgaua

SEQ ID NO: 2279705 - RNA, 19 nt, Artificial Sequence
  Description of Artificial Sequence: Synthetic oligonucleotide
  Antisense strand to SEQ ID NO: 2279704
uaucgacuuagcagugucc

SEQ ID NO: 2279706 - RNA, 19 nt, Artificial Sequence
  Description of Artificial Sequence: Synthetic oligonucleotide
  Sense strand starting at position 586 of SEQ ID NO: 1884628
cacugcuaagucgauacau

SEQ ID NO: 2279707 - RNA, 19 nt, Artificial Sequence
  Description of Artificial Sequence: Synthetic oligonucleotide
  Antisense strand to SEQ ID NO: 2279706
auguaucgacuuagcagug

SEQ ID NO: 2279708 - RNA, 19 nt, Artificial Sequence
  Description of Artificial Sequence: Synthetic oligonucleotide
  Sense strand starting at position 588 of SEQ ID NO: 1884628
cugcuaagucgauacauga

SEQ ID NO: 2279709 - RNA, 19 nt, Artificial Sequence
  Description of Artificial Sequence: Synthetic oligonucleotide
  Antisense strand to SEQ ID NO: 2279708
ucauguaucgacuuagcag

SEQ ID NO: 2279710 - RNA, 19 nt, Artificial Sequence
  Description of Artificial Sequence: Synthetic oligonucleotide
  Sense strand starting at position 830 of SEQ ID NO: 1884628
gcuucuacauguguaaaga

SEQ ID NO: 2279711 - RNA, 19 nt, Artificial Sequence
  Description of Artificial Sequence: Synthetic oligonucleotide
  Antisense strand to SEQ ID NO: 2279710
ucuuuacacauguagaagc

SEQ ID NO: 2279712 - RNA, 19 nt, Artificial Sequence
  Description of Artificial Sequence: Synthetic oligonucleotide
  Sense strand starting at position 831 of SEQ ID NO: 1884628
cuucuacauguguaaagag

SEQ ID NO: 2279713 - RNA, 19 nt, Artificial Sequence
  Description of Artificial Sequence: Synthetic oligonucleotide
  Antisense strand to SEQ ID NO: 2279712
cucuuuacacauguagaag

SEQ ID NO: 2279714 - RNA, 19 nt, Artificial Sequence
  Description of Artificial Sequence: Synthetic oligonucleotide
  Sense strand starting at position 1055 of SEQ ID NO: 1884628
acaguuacucagcaucauu

SEQ ID NO: 2279715 - RNA, 19 nt, Artificial Sequence
  Description of Artificial Sequence: Synthetic oligonucleotide
  Antisense strand to SEQ ID NO: 2279714
aaugaugcugaguaacugu

SEQ ID NO: 2279716 - RNA, 19 nt, Artificial Sequence
  Description of Artificial Sequence: Synthetic oligonucleotide
  Sense strand starting at position 1084 of SEQ ID NO: 1884628
guaugauauccacaguguc

SEQ ID NO: 2279717 - RNA, 19 nt, Artificial Sequence
  Description of Artificial Sequence: Synthetic oligonucleotide
  Antisense strand to SEQ ID NO: 2279716
gacacuguggauaucauac

SEQ ID NO: 2279718 - RNA, 19 nt, Artificial Sequence
  Description of Artificial Sequence: Synthetic oligonucleotide
  Sense strand starting at position 1145 of SEQ ID NO: 1884628
ggaagacugucaccugacu

SEQ ID NO: 2279719 - RNA, 19 nt, Artificial Sequence
  Description of Artificial Sequence: Synthetic oligonucleotide
  Antisense strand to SEQ ID NO: 2279718
agucaggugacagucuucc

SEQ ID NO: 2279720 - RNA, 19 nt, Artificial Sequence
  Description of Artificial Sequence: Synthetic oligonucleotide
  Sense strand starting at position 2267 of SEQ ID NO: 1884628
cagggugagcgaugaauuc

SEQ ID NO: 2279721 - RNA, 19 nt, Artificial Sequence
  Description of Artificial Sequence: Synthetic oligonucleotide
  Antisense strand to SEQ ID NO: 2279720
gaauucaucgcucacccug

SEQ ID NO: 2279722 - RNA, 19 nt, Artificial Sequence
  Description of Artificial Sequence: Synthetic oligonucleotide
  Sense strand starting at position 2362 of SEQ ID NO: 1884628
guaccauggagugggaaua

SEQ ID NO: 2279723 - RNA, 19 nt, Artificial Sequence
  Description of Artificial Sequence: Synthetic oligonucleotide
  Antisense strand to SEQ ID NO: 2279722
uauucccacuccaugguac

SEQ ID NO: 2279724 - RNA, 19 nt, Artificial Sequence
  Description of Artificial Sequence: Synthetic oligonucleotide
  Sense strand starting at position 2403 of SEQ ID NO: 1884628
cagggacguccagaagagu

SEQ ID NO: 2279725 - RNA, 19 nt, Artificial Sequence
  Description of Artificial Sequence: Synthetic oligonucleotide
  Antisense strand to SEQ ID NO: 2279724
acucuucuggacgucccug

SEQ ID NO: 2279726 - RNA, 19 nt, Artificial Sequence
  Description of Artificial Sequence: Synthetic oligonucleotide
  Sense strand starting at position 2414 of SEQ ID NO: 1884628
agaagagucaauuaugcgu

SEQ ID NO: 2279727 - RNA, 19 nt, Artificial Sequence
  Description of Artificial Sequence: Synthetic oligonucleotide
  Antisense strand to SEQ ID NO: 2279726
acgcauaauugacucuucu

SEQ ID NO: 2279728 - RNA, 19 nt, Artificial Sequence
  Description of Artificial Sequence: Synthetic oligonucleotide
  Sense strand starting at position 2622 of SEQ ID NO: 1884628
agagucacuuaagcaaaua

SEQ ID NO: 2279729 - RNA, 19 nt, Artificial Sequence
  Description of Artificial Sequence: Synthetic oligonucleotide
  Antisense strand to SEQ ID NO: 2279728
uauuugcuuaagugacucu

SEQ ID NO: 2279730 - RNA, 19 nt, Artificial Sequence
  Description of Artificial Sequence: Synthetic oligonucleotide
  Sense strand starting at position 2845 of SEQ ID NO: 1884628
gucagaguaacugaggguu

SEQ ID NO: 2279731 - RNA, 19 nt, Artificial Sequence
  Description of Artificial Sequence: Synthetic oligonucleotide
  Antisense strand to SEQ ID NO: 2279730
aacccucaguuacucugac

SEQ ID NO: 2279732 - RNA, 19 nt, Artificial Sequence
  Description of Artificial Sequence: Synthetic oligonucleotide
  Sense strand starting at position 2996 of SEQ ID NO: 1884628
gcuuuccuggcagaaggua

SEQ ID NO: 2279733 - RNA, 19 nt, Artificial Sequence
  Description of Artificial Sequence: Synthetic oligonucleotide
  Antisense strand to SEQ ID NO: 2279732
uaccuucugccaggaaagc

SEQ ID NO: 2279734 - RNA, 19 nt, Artificial Sequence
  Description of Artificial Sequence: Synthetic oligonucleotide
  Sense strand starting at position 3074 of SEQ ID NO: 1884628
uuucuugugcuugaaacua

SEQ ID NO: 2279735 - RNA, 19 nt, Artificial Sequence
  Description of Artificial Sequence: Synthetic oligonucleotide
  Antisense strand to SEQ ID NO: 2279734
uaguuucaagcacaagaaa

SEQ ID NO: 2279736 - RNA, 19 nt, Artificial Sequence
  Description of Artificial Sequence: Synthetic oligonucleotide
  Sense strand starting at position 3136 of SEQ ID NO: 1884628
gugcuuguccucuaugaaa

SEQ ID NO: 2279737 - RNA, 19 nt, Artificial Sequence
  Description of Artificial Sequence: Synthetic oligonucleotide
  Antisense strand to SEQ ID NO: 2279736
uuucauagaggacaagcac

SEQ ID NO: 2279738 - RNA, 19 nt, Artificial Sequence
  Description of Artificial Sequence: Synthetic oligonucleotide
  Sense strand starting at position 3280 of SEQ ID NO: 1884628
cucauuuaaucgcugucca

SEQ ID NO: 2279739 - RNA, 19 nt, Artificial Sequence
  Description of Artificial Sequence: Synthetic oligonucleotide
  Antisense strand to SEQ ID NO: 2279738
uggacagcgauuaaaugag

SEQ ID NO: 2279740 - RNA, 19 nt, Artificial Sequence
  Description of Artificial Sequence: Synthetic oligonucleotide
  Sense strand starting at position 3287 of SEQ ID NO: 1884628
aaucgcuguccagaguauu

SEQ ID NO: 2279741 - RNA, 19 nt, Artificial Sequence
  Description of Artificial Sequence: Synthetic oligonucleotide
  Antisense strand to SEQ ID NO: 2279740
aauacucuggacagcgauu

SEQ ID NO: 2279742 - RNA, 19 nt, Artificial Sequence
  Description of Artificial Sequence: Synthetic oligonucleotide
  Sense strand starting at position 3385 of SEQ ID NO: 1884628
ccacuuuaccgaugagaag

SEQ ID NO: 2279743 - RNA, 19 nt, Artificial Sequence
  Description of Artificial Sequence: Synthetic oligonucleotide
  Antisense strand to SEQ ID NO: 2279742
cuucucaucgguaaagugg

SEQ ID NO: 2279744 - RNA, 19 nt, Artificial Sequence
  Description of Artificial Sequence: Synthetic oligonucleotide
  Sense strand starting at position 3422 of SEQ ID NO: 1884628
ucauuaaccuacucagugu

SEQ ID NO: 2279745 - RNA, 19 nt, Artificial Sequence
  Description of Artificial Sequence: Synthetic oligonucleotide
  Antisense strand to SEQ ID NO: 2279744
acacugaguagguuaauga

SEQ ID NO: 2279746 - RNA, 19 nt, Artificial Sequence
  Description of Artificial Sequence: Synthetic oligonucleotide
  Sense strand starting at position 3425 of SEQ ID NO: 1884628
uuaaccuacucaguguuaa

SEQ ID NO: 2279747 - RNA, 19 nt, Artificial Sequence
  Description of Artificial Sequence: Synthetic oligonucleotide
  Antisense strand to SEQ ID NO: 2279746
uuaacacugaguagguuaa

SEQ ID NO: 2279748 - RNA, 19 nt, Artificial Sequence
  Description of Artificial Sequence: Synthetic oligonucleotide
  Sense strand starting at position 3509 of SEQ ID NO: 1884628
guuuguggcauuugccaau

SEQ ID NO: 2279749 - RNA, 19 nt, Artificial Sequence
  Description of Artificial Sequence: Synthetic oligonucleotide
  Antisense strand to SEQ ID NO: 2279748
auuggcaaaugccacaaac

SEQ ID NO: 2279750 - RNA, 19 nt, Artificial Sequence
  Description of Artificial Sequence: Synthetic oligonucleotide
  Sense strand starting at position 3533 of SEQ ID NO: 1884628
uggugucaauucucccaca

SEQ ID NO: 2279751 - RNA, 19 nt, Artificial Sequence
  Description of Artificial Sequence: Synthetic oligonucleotide
  Antisense strand to SEQ ID NO: 2279750
ugugggagaauugacacca

SEQ ID NO: 2279752 - RNA, 19 nt, Artificial Sequence
  Description of Artificial Sequence: Synthetic oligonucleotide
  Sense strand starting at position 3582 of SEQ ID NO: 1884628
cacugacugugguuggaua

SEQ ID NO: 2279753 - RNA, 19 nt, Artificial Sequence
  Description of Artificial Sequence: Synthetic oligonucleotide
  Antisense strand to SEQ ID NO: 2279752
uauccaaccacagucagug

SEQ ID NO: 2279754 - RNA, 19 nt, Artificial Sequence
  Description of Artificial Sequence: Synthetic oligonucleotide
  Sense strand starting at position 3583 of SEQ ID NO: 1884628
acugacugugguuggauaa

SEQ ID NO: 2279755 - RNA, 19 nt, Artificial Sequence
  Description of Artificial Sequence: Synthetic oligonucleotide
  Antisense strand to SEQ ID NO: 2279754
uuauccaaccacagucagu

SEQ ID NO: 2279756 - RNA, 19 nt, Artificial Sequence
  Description of Artificial Sequence: Synthetic oligonucleotide
  Sense strand starting at position 3584 of SEQ ID NO: 1884628
cugacugugguuggauaaa

SEQ ID NO: 2279757 - RNA, 19 nt, Artificial Sequence
  Description of Artificial Sequence: Synthetic oligonucleotide
  Antisense strand to SEQ ID NO: 2279756
uuuauccaaccacagucag

SEQ ID NO: 2279758 - RNA, 19 nt, Artificial Sequence
  Description of Artificial Sequence: Synthetic oligonucleotide
  Sense strand starting at position 3650 of SEQ ID NO: 1884628
acugcuuguguagacauga

SEQ ID NO: 2279759 - RNA, 19 nt, Artificial Sequence
  Description of Artificial Sequence: Synthetic oligonucleotide
  Antisense strand to SEQ ID NO: 2279758
ucaugucuacacaagcagu

SEQ ID NO: 2279760 - RNA, 19 nt, Artificial Sequence
  Description of Artificial Sequence: Synthetic oligonucleotide
  Sense strand starting at position 3655 of SEQ ID NO: 1884628
uuguguagacaugagaugu

SEQ ID NO: 2279761 - RNA, 19 nt, Artificial Sequence
  Description of Artificial Sequence: Synthetic oligonucleotide
  Antisense strand to SEQ ID NO: 2279760
acaucucaugucuacacaa

SEQ ID NO: 2279762 - RNA, 19 nt, Artificial Sequence
  Description of Artificial Sequence: Synthetic oligonucleotide
  Sense strand starting at position 3659 of SEQ ID NO: 1884628
guagacaugagauguaaca

SEQ ID NO: 2279763 - RNA, 19 nt, Artificial Sequence
  Description of Artificial Sequence: Synthetic oligonucleotide
  Antisense strand to SEQ ID NO: 2279762
uguuacaucucaugucuac

SEQ ID NO: 2279764 - RNA, 19 nt, Artificial Sequence
  Description of Artificial Sequence: Synthetic oligonucleotide
  Sense strand starting at position 3692 of SEQ ID NO: 1884628
cgaagaaggacuuguugca

SEQ ID NO: 2279765 - RNA, 19 nt, Artificial Sequence
  Description of Artificial Sequence: Synthetic oligonucleotide
  Antisense strand to SEQ ID NO: 2279764
ugcaacaaguccuucuucg

SEQ ID NO: 2279766 - RNA, 19 nt, Artificial Sequence
  Description of Artificial Sequence: Synthetic oligonucleotide
  Sense strand starting at position 3733 of SEQ ID NO: 1884628
aagaguauccaguggucag

SEQ ID NO: 2279767 - RNA, 19 nt, Artificial Sequence
  Description of Artificial Sequence: Synthetic oligonucleotide
  Antisense strand to SEQ ID NO: 2279766
cugaccacuggauacucuu

SEQ ID NO: 2279768 - RNA, 19 nt, Artificial Sequence
  Description of Artificial Sequence: Synthetic oligonucleotide
  Sense strand starting at position 3760 of SEQ ID NO: 1884628
gggucuguccuauagcaga

SEQ ID NO: 2279769 - RNA, 19 nt, Artificial Sequence
  Description of Artificial Sequence: Synthetic oligonucleotide
  Antisense strand to SEQ ID NO: 2279768
ucugcuauaggacagaccc

SEQ ID NO: 2279770 - RNA, 19 nt, Artificial Sequence
  Description of Artificial Sequence: Synthetic oligonucleotide
  Sense strand starting at position 3780 of SEQ ID NO: 1884628
agcagucucgcuuagggaa

SEQ ID NO: 2279771 - RNA, 19 nt, Artificial Sequence
  Description of Artificial Sequence: Synthetic oligonucleotide
  Antisense strand to SEQ ID NO: 2279770
uucccuaagcgagacugcu

SEQ ID NO: 2279772 - RNA, 19 nt, Artificial Sequence
  Description of Artificial Sequence: Synthetic oligonucleotide
  Sense strand starting at position 3816 of SEQ ID NO: 1884628
gcccuaauccagcaaugga

SEQ ID NO: 2279773 - RNA, 19 nt, Artificial Sequence
  Description of Artificial Sequence: Synthetic oligonucleotide
  Antisense strand to SEQ ID NO: 2279772
uccauugcuggauuagggc

SEQ ID NO: 2279774 - RNA, 19 nt, Artificial Sequence
  Description of Artificial Sequence: Synthetic oligonucleotide
  Sense strand starting at position 3878 of SEQ ID NO: 1884628
agacaauucuuacaggaaa

SEQ ID NO: 2279775 - RNA, 19 nt, Artificial Sequence
  Description of Artificial Sequence: Synthetic oligonucleotide
  Antisense strand to SEQ ID NO: 2279774
uuuccuguaagaauugucu

SEQ ID NO: 2279776 - RNA, 19 nt, Artificial Sequence
  Description of Artificial Sequence: Synthetic oligonucleotide
  Sense strand starting at position 3923 of SEQ ID NO: 1884628
ugaucaaggcuuugucaag

SEQ ID NO: 2279777 - RNA, 19 nt, Artificial Sequence
  Description of Artificial Sequence: Synthetic oligonucleotide
  Antisense strand to SEQ ID NO: 2279776
cuugacaaagccuugauca

SEQ ID NO: 2279778 - RNA, 19 nt, Artificial Sequence
  Description of Artificial Sequence: Synthetic oligonucleotide
  Sense strand starting at position 3972 of SEQ ID NO: 1884628
gcuuccuuucccuuucgua

SEQ ID NO: 2279779 - RNA, 19 nt, Artificial Sequence
  Description of Artificial Sequence: Synthetic oligonucleotide
  Antisense strand to SEQ ID NO: 2279778
uacgaaagggaaaggaagc

SEQ ID NO: 2279780 - RNA, 19 nt, Artificial Sequence
  Description of Artificial Sequence: Synthetic oligonucleotide
  Sense strand starting at position 47 of SEQ ID NO: 1884629
ggcacaugccuauaagcuu

SEQ ID NO: 2279781 - RNA, 19 nt, Artificial Sequence
  Description of Artificial Sequence: Synthetic oligonucleotide
  Antisense strand to SEQ ID NO: 2279780
aagcuuauaggcaugugcc

SEQ ID NO: 2279782 - RNA, 19 nt, Artificial Sequence
  Description of Artificial Sequence: Synthetic oligonucleotide
  Sense strand starting at position 253 of SEQ ID NO: 1884629
gaagcuuuguuguccauua

SEQ ID NO: 2279783 - RNA, 19 nt, Artificial Sequence
  Description of Artificial Sequence: Synthetic oligonucleotide
  Antisense strand to SEQ ID NO: 2279782
uaauggacaacaaagcuuc

SEQ ID NO: 2279784 - RNA, 19 nt, Artificial Sequence
  Description of Artificial Sequence: Synthetic oligonucleotide
  Sense strand starting at position 255 of SEQ ID NO: 1884629
agcuuuguuguccauuaaa

SEQ ID NO: 2279785 - RNA, 19 nt, Artificial Sequence
  Description of Artificial Sequence: Synthetic oligonucleotide
  Antisense strand to SEQ ID NO: 2279784
uuuaauggacaacaaagcu

SEQ ID NO: 2279786 - RNA, 19 nt, Artificial Sequence
  Description of Artificial Sequence: Synthetic oligonucleotide
  Sense strand starting at position 263 of SEQ ID NO: 1884629
uguccauuaaagugaguuc

SEQ ID NO: 2279787 - RNA, 19 nt, Artificial Sequence
  Description of Artificial Sequence: Synthetic oligonucleotide
  Antisense strand to SEQ ID NO: 2279786
gaacucacuuuaauggaca

SEQ ID NO: 2279788 - RNA, 19 nt, Artificial Sequence
  Description of Artificial Sequence: Synthetic oligonucleotide
  Sense strand starting at position 266 of SEQ ID NO: 1884629
ccauuaaagugaguucucu

SEQ ID NO: 2279789 - RNA, 19 nt, Artificial Sequence
  Description of Artificial Sequence: Synthetic oligonucleotide
  Antisense strand to SEQ ID NO: 2279788
agagaacucacuuuaaugg

SEQ ID NO: 2279790 - RNA, 19 nt, Artificial Sequence
  Description of Artificial Sequence: Synthetic oligonucleotide
  Sense strand starting at position 270 of SEQ ID NO: 1884629
uaaagugaguucucuggga

SEQ ID NO: 2279791 - RNA, 19 nt, Artificial Sequence
  Description of Artificial Sequence: Synthetic oligonucleotide
  Antisense strand to SEQ ID NO: 2279790
ucccagagaacucacuuua

SEQ ID NO: 2279792 - RNA, 19 nt, Artificial Sequence
  Description of Artificial Sequence: Synthetic oligonucleotide
  Sense strand starting at position 272 of SEQ ID NO: 1884629
aagugaguucucugggaag

SEQ ID NO: 2279793 - RNA, 19 nt, Artificial Sequence
  Description of Artificial Sequence: Synthetic oligonucleotide
  Antisense strand to SEQ ID NO: 2279792
cuucccagagaacucacuu

SEQ ID NO: 2279794 - RNA, 19 nt, Artificial Sequence
  Description of Artificial Sequence: Synthetic oligonucleotide
  Sense strand starting at position 274 of SEQ ID NO: 1884629
gugaguucucugggaagac

SEQ ID NO: 2279795 - RNA, 19 nt, Artificial Sequence
  Description of Artificial Sequence: Synthetic oligonucleotide
  Antisense strand to SEQ ID NO: 2279794
gucuucccagagaacucac

SEQ ID NO: 2279796 - RNA, 19 nt, Artificial Sequence
  Description of Artificial Sequence: Synthetic oligonucleotide
  Sense strand starting at position 385 of SEQ ID NO: 1884629
agcauagugcaauguauuu

SEQ ID NO: 2279797 - RNA, 19 nt, Artificial Sequence
  Description of Artificial Sequence: Synthetic oligonucleotide
  Antisense strand to SEQ ID NO: 2279796
aaauacauugcacuaugcu

SEQ ID NO: 2279798 - RNA, 19 nt, Artificial Sequence
  Description of Artificial Sequence: Synthetic oligonucleotide
  Sense strand starting at position 397 of SEQ ID NO: 1884629
uguauuuaaugagaaacca

SEQ ID NO: 2279799 - RNA, 19 nt, Artificial Sequence
  Description of Artificial Sequence: Synthetic oligonucleotide
  Antisense strand to SEQ ID NO: 2279798
ugguuucucauuaaauaca

SEQ ID NO: 2279800 - RNA, 19 nt, Artificial Sequence
  Description of Artificial Sequence: Synthetic oligonucleotide
  Sense strand starting at position 422 of SEQ ID NO: 1884629
acaacaaagcguuauaacu

SEQ ID NO: 2279801 - RNA, 19 nt, Artificial Sequence
  Description of Artificial Sequence: Synthetic oligonucleotide
  Antisense strand to SEQ ID NO: 2279800
aguuauaacgcuuuguugu

SEQ ID NO: 2279802 - RNA, 19 nt, Artificial Sequence
  Description of Artificial Sequence: Synthetic oligonucleotide
  Sense strand starting at position 432 of SEQ ID NO: 1884629
guuauaacuucuccagcug

SEQ ID NO: 2279803 - RNA, 19 nt, Artificial Sequence
  Description of Artificial Sequence: Synthetic oligonucleotide
  Antisense strand to SEQ ID NO: 2279802
cagcuggagaaguuauaac

SEQ ID NO: 2279804 - RNA, 19 nt, Artificial Sequence
  Description of Artificial Sequence: Synthetic oligonucleotide
  Sense strand starting at position 558 of SEQ ID NO: 1884629
agggaguggguaugguuau

SEQ ID NO: 2279805 - RNA, 19 nt, Artificial Sequence
  Description of Artificial Sequence: Synthetic oligonucleotide
  Antisense strand to SEQ ID NO: 2279804
auaaccauacccacucccu

SEQ ID NO: 2279806 - RNA, 19 nt, Artificial Sequence
  Description of Artificial Sequence: Synthetic oligonucleotide
  Sense strand starting at position 564 of SEQ ID NO: 1884629
uggguaugguuauucugaa

SEQ ID NO: 2279807 - RNA, 19 nt, Artificial Sequence
  Description of Artificial Sequence: Synthetic oligonucleotide
  Antisense strand to SEQ ID NO: 2279806
uucagaauaaccauaccca

SEQ ID NO: 2279808 - RNA, 19 nt, Artificial Sequence
  Description of Artificial Sequence: Synthetic oligonucleotide
  Sense strand starting at position 565 of SEQ ID NO: 1884629
ggguaugguuauucugaag

SEQ ID NO: 2279809 - RNA, 19 nt, Artificial Sequence
  Description of Artificial Sequence: Synthetic oligonucleotide
  Antisense strand to SEQ ID NO: 2279808
cuucagaauaaccauaccc

SEQ ID NO: 2279810 - RNA, 19 nt, Artificial Sequence
  Description of Artificial Sequence: Synthetic oligonucleotide
  Sense strand starting at position 716 of SEQ ID NO: 1884629
ggaggcaaccuuuauguca

SEQ ID NO: 2279811 - RNA, 19 nt, Artificial Sequence
  Description of Artificial Sequence: Synthetic oligonucleotide
  Antisense strand to SEQ ID NO: 2279810
ugacauaaagguugccucc

SEQ ID NO: 2279812 - RNA, 19 nt, Artificial Sequence
  Description of Artificial Sequence: Synthetic oligonucleotide
  Sense strand starting at position 719 of SEQ ID NO: 1884629
ggcaaccuuuaugucagaa

SEQ ID NO: 2279813 - RNA, 19 nt, Artificial Sequence
  Description of Artificial Sequence: Synthetic oligonucleotide
  Antisense strand to SEQ ID NO: 2279812
uucugacauaaagguugcc

SEQ ID NO: 2279814 - RNA, 19 nt, Artificial Sequence
  Description of Artificial Sequence: Synthetic oligonucleotide
  Sense strand starting at position 904 of SEQ ID NO: 1884629
uuccuuucucuacggguaa

SEQ ID NO: 2279815 - RNA, 19 nt, Artificial Sequence
  Description of Artificial Sequence: Synthetic oligonucleotide
  Antisense strand to SEQ ID NO: 2279814
uuacccguagagaaaggaa

SEQ ID NO: 2279816 - RNA, 19 nt, Artificial Sequence
  Description of Artificial Sequence: Synthetic oligonucleotide
  Sense strand starting at position 915 of SEQ ID NO: 1884629
acggguaagcucuacaaag

SEQ ID NO: 2279817 - RNA, 19 nt, Artificial Sequence
  Description of Artificial Sequence: Synthetic oligonucleotide
  Antisense strand to SEQ ID NO: 2279816
cuuuguagagcuuacccgu

SEQ ID NO: 2279818 - RNA, 19 nt, Artificial Sequence
  Description of Artificial Sequence: Synthetic oligonucleotide
  Sense strand starting at position 936 of SEQ ID NO: 1884629
gcgaaagcuccgaguguua

SEQ ID NO: 2279819 - RNA, 19 nt, Artificial Sequence
  Description of Artificial Sequence: Synthetic oligonucleotide
  Antisense strand to SEQ ID NO: 2279818
uaacacucggagcuuucgc

SEQ ID NO: 2279820 - RNA, 19 nt, Artificial Sequence
  Description of Artificial Sequence: Synthetic oligonucleotide
  Sense strand starting at position 945 of SEQ ID NO: 1884629
ccgaguguuaguucuuguu

SEQ ID NO: 2279821 - RNA, 19 nt, Artificial Sequence
  Description of Artificial Sequence: Synthetic oligonucleotide
  Antisense strand to SEQ ID NO: 2279820
aacaagaacuaacacucgg

SEQ ID NO: 2279822 - RNA, 19 nt, Artificial Sequence
  Description of Artificial Sequence: Synthetic oligonucleotide
  Sense strand starting at position 949 of SEQ ID NO: 1884629
guguuaguucuuguuugug

SEQ ID NO: 2279823 - RNA, 19 nt, Artificial Sequence
  Description of Artificial Sequence: Synthetic oligonucleotide
  Antisense strand to SEQ ID NO: 2279822
cacaaacaagaacuaacac

SEQ ID NO: 2279824 - RNA, 19 nt, Artificial Sequence
  Description of Artificial Sequence: Synthetic oligonucleotide
  Sense strand starting at position 958 of SEQ ID NO: 1884629
cuuguuuguguauaaauuc

SEQ ID NO: 2279825 - RNA, 19 nt, Artificial Sequence
  Description of Artificial Sequence: Synthetic oligonucleotide
  Antisense strand to SEQ ID NO: 2279824
gaauuuauacacaaacaag

SEQ ID NO: 2279826 - RNA, 19 nt, Artificial Sequence
  Description of Artificial Sequence: Synthetic oligonucleotide
  Sense strand starting at position 990 of SEQ ID NO: 1884629
uggccugcgagcuaugaaa

SEQ ID NO: 2279827 - RNA, 19 nt, Artificial Sequence
  Description of Artificial Sequence: Synthetic oligonucleotide
  Antisense strand to SEQ ID NO: 2279826
uuucauagcucgcaggcca

SEQ ID NO: 2279828 - RNA, 19 nt, Artificial Sequence
  Description of Artificial Sequence: Synthetic oligonucleotide
  Sense strand starting at position 1127 of SEQ ID NO: 1884629
gguuuaucuagcuggcuga

SEQ ID NO: 2279829 - RNA, 19 nt, Artificial Sequence
  Description of Artificial Sequence: Synthetic oligonucleotide
  Antisense strand to SEQ ID NO: 2279828
ucagccagcuagauaaacc

SEQ ID NO: 2279830 - RNA, 19 nt, Artificial Sequence
  Description of Artificial Sequence: Synthetic oligonucleotide
  Sense strand starting at position 1392 of SEQ ID NO: 1884629
agagaagagugagaaguua

SEQ ID NO: 2279831 - RNA, 19 nt, Artificial Sequence
  Description of Artificial Sequence: Synthetic oligonucleotide
  Antisense strand to SEQ ID NO: 2279830
uaacuucucacucuucucu

SEQ ID NO: 2279832 - RNA, 19 nt, Artificial Sequence
  Description of Artificial Sequence: Synthetic oligonucleotide
  Sense strand starting at position 1610 of SEQ ID NO: 1884629
gccagcuuucgguauggaa

SEQ ID NO: 2279833 - RNA, 19 nt, Artificial Sequence
  Description of Artificial Sequence: Synthetic oligonucleotide
  Antisense strand to SEQ ID NO: 2279832
uuccauaccgaaagcuggc

SEQ ID NO: 2279834 - RNA, 19 nt, Artificial Sequence
  Description of Artificial Sequence: Synthetic oligonucleotide
  Sense strand starting at position 1612 of SEQ ID NO: 1884629
cagcuuucgguauggaaua

SEQ ID NO: 2279835 - RNA, 19 nt, Artificial Sequence
  Description of Artificial Sequence: Synthetic oligonucleotide
  Antisense strand to SEQ ID NO: 2279834
uauuccauaccgaaagcug

SEQ ID NO: 2279836 - RNA, 19 nt, Artificial Sequence
  Description of Artificial Sequence: Synthetic oligonucleotide
  Sense strand starting at position 1855 of SEQ ID NO: 1884629
ggaugcacucacugaagua

SEQ ID NO: 2279837 - RNA, 19 nt, Artificial Sequence
  Description of Artificial Sequence: Synthetic oligonucleotide
  Antisense strand to SEQ ID NO: 2279836
uacuucagugagugcaucc

SEQ ID NO: 2279838 - RNA, 19 nt, Artificial Sequence
  Description of Artificial Sequence: Synthetic oligonucleotide
  Sense strand starting at position 2151 of SEQ ID NO: 1884629
ugcuuuguucucgcgguua

SEQ ID NO: 2279839 - RNA, 19 nt, Artificial Sequence
  Description of Artificial Sequence: Synthetic oligonucleotide
  Antisense strand to SEQ ID NO: 2279838
uaaccgcgagaacaaagca

SEQ ID NO: 2279840 - RNA, 19 nt, Artificial Sequence
  Description of Artificial Sequence: Synthetic oligonucleotide
  Sense strand starting at position 2401 of SEQ ID NO: 1884629
ggcaguaccugacauuuau

SEQ ID NO: 2279841 - RNA, 19 nt, Artificial Sequence
  Description of Artificial Sequence: Synthetic oligonucleotide
  Antisense strand to SEQ ID NO: 2279840
auaaaugucagguacugcc

SEQ ID NO: 2279842 - RNA, 19 nt, Artificial Sequence
  Description of Artificial Sequence: Synthetic oligonucleotide
  Sense strand starting at position 2411 of SEQ ID NO: 1884629
gacauuuauuaguggaauu

SEQ ID NO: 2279843 - RNA, 19 nt, Artificial Sequence
  Description of Artificial Sequence: Synthetic oligonucleotide
  Antisense strand to SEQ ID NO: 2279842
aauuccacuaauaaauguc

SEQ ID NO: 2279844 - RNA, 19 nt, Artificial Sequence
  Description of Artificial Sequence: Synthetic oligonucleotide
  Sense strand starting at position 2467 of SEQ ID NO: 1884629
gccuguaaaggugauacau

SEQ ID NO: 2279845 - RNA, 19 nt, Artificial Sequence
  Description of Artificial Sequence: Synthetic oligonucleotide
  Antisense strand to SEQ ID NO: 2279844
auguaucaccuuuacaggc

SEQ ID NO: 2279846 - RNA, 19 nt, Artificial Sequence
  Description of Artificial Sequence: Synthetic oligonucleotide
  Sense strand starting at position 2616 of SEQ ID NO: 1884629
gggcaagagaugugcucaa

SEQ ID NO: 2279847 - RNA, 19 nt, Artificial Sequence
  Description of Artificial Sequence: Synthetic oligonucleotide
  Antisense strand to SEQ ID NO: 2279846
uugagcacaucucuugccc

SEQ ID NO: 2279848 - RNA, 19 nt, Artificial Sequence
  Description of Artificial Sequence: Synthetic oligonucleotide
  Sense strand starting at position 2620 of SEQ ID NO: 1884629
aagagaugugcucaagcuu

SEQ ID NO: 2279849 - RNA, 19 nt, Artificial Sequence
  Description of Artificial Sequence: Synthetic oligonucleotide
  Antisense strand to SEQ ID NO: 2279848
aagcuugagcacaucucuu

SEQ ID NO: 2279850 - RNA, 19 nt, Artificial Sequence
  Description of Artificial Sequence: Synthetic oligonucleotide
  Sense strand starting at position 2693 of SEQ ID NO: 1884629
cagcucuaugcuggugaau

SEQ ID NO: 2279851 - RNA, 19 nt, Artificial Sequence
  Description of Artificial Sequence: Synthetic oligonucleotide
  Antisense strand to SEQ ID NO: 2279850
auucaccagcauagagcug

SEQ ID NO: 2279852 - RNA, 19 nt, Artificial Sequence
  Description of Artificial Sequence: Synthetic oligonucleotide
  Sense strand starting at position 2773 of SEQ ID NO: 1884629
accuguuaagaauacugua

SEQ ID NO: 2279853 - RNA, 19 nt, Artificial Sequence
  Description of Artificial Sequence: Synthetic oligonucleotide
  Antisense strand to SEQ ID NO: 2279852
uacaguauucuuaacaggu

SEQ ID NO: 2279854 - RNA, 19 nt, Artificial Sequence
  Description of Artificial Sequence: Synthetic oligonucleotide
  Sense strand starting at position 2810 of SEQ ID NO: 1884629
augucaagauaugucaagu

SEQ ID NO: 2279855 - RNA, 19 nt, Artificial Sequence
  Description of Artificial Sequence: Synthetic oligonucleotide
  Antisense strand to SEQ ID NO: 2279854
acuugacauaucuugacau

SEQ ID NO: 2279856 - RNA, 19 nt, Artificial Sequence
  Description of Artificial Sequence: Synthetic oligonucleotide
  Sense strand starting at position 2944 of SEQ ID NO: 1884629
ucauuuacauuccguauuu

SEQ ID NO: 2279857 - RNA, 19 nt, Artificial Sequence
  Description of Artificial Sequence: Synthetic oligonucleotide
  Antisense strand to SEQ ID NO: 2279856
aaauacggaauguaaauga

SEQ ID NO: 2279858 - RNA, 19 nt, Artificial Sequence
  Description of Artificial Sequence: Synthetic oligonucleotide
  Sense strand starting at position 2953 of SEQ ID NO: 1884629
uuccguauuucuccuaaug

SEQ ID NO: 2279859 - RNA, 19 nt, Artificial Sequence
  Description of Artificial Sequence: Synthetic oligonucleotide
  Antisense strand to SEQ ID NO: 2279858
cauuaggagaaauacggaa

SEQ ID NO: 2279860 - RNA, 19 nt, Artificial Sequence
  Description of Artificial Sequence: Synthetic oligonucleotide
  Sense strand starting at position 2020 of SEQ ID NO: 1884630
acgucugucggguuuguaa

SEQ ID NO: 2279861 - RNA, 19 nt, Artificial Sequence
  Description of Artificial Sequence: Synthetic oligonucleotide
  Antisense strand to SEQ ID NO: 2279860
uuacaaacccgacagacgu

SEQ ID NO: 2279862 - RNA, 19 nt, Artificial Sequence
  Description of Artificial Sequence: Synthetic oligonucleotide
  Sense strand starting at position 2022 of SEQ ID NO: 1884630
gucugucggguuuguaaug

SEQ ID NO: 2279863 - RNA, 19 nt, Artificial Sequence
  Description of Artificial Sequence: Synthetic oligonucleotide
  Antisense strand to SEQ ID NO: 2279862
cauuacaaacccgacagac

SEQ ID NO: 2279864 - RNA, 19 nt, Artificial Sequence
  Description of Artificial Sequence: Synthetic oligonucleotide
  Sense strand starting at position 2027 of SEQ ID NO: 1884630
ucggguuuguaauguaauu

SEQ ID NO: 2279865 - RNA, 19 nt, Artificial Sequence
  Description of Artificial Sequence: Synthetic oligonucleotide
  Antisense strand to SEQ ID NO: 2279864
aauuacauuacaaacccga

SEQ ID NO: 2279866 - RNA, 19 nt, Artificial Sequence
  Description of Artificial Sequence: Synthetic oligonucleotide
  Sense strand starting at position 2097 of SEQ ID NO: 1884630
aagcauaauuaagggaaga

SEQ ID NO: 2279867 - RNA, 19 nt, Artificial Sequence
  Description of Artificial Sequence: Synthetic oligonucleotide
  Antisense strand to SEQ ID NO: 2279866
ucuucccuuaauuaugcuu

SEQ ID NO: 2279868 - RNA, 19 nt, Artificial Sequence
  Description of Artificial Sequence: Synthetic oligonucleotide
  Sense strand starting at position 2532 of SEQ ID NO: 1884630
gccugagagcucugaagca

SEQ ID NO: 2279869 - RNA, 19 nt, Artificial Sequence
  Description of Artificial Sequence: Synthetic oligonucleotide
  Antisense strand to SEQ ID NO: 2279868
ugcuucagagcucucaggc

SEQ ID NO: 2279870 - RNA, 19 nt, Artificial Sequence
  Description of Artificial Sequence: Synthetic oligonucleotide
  Sense strand starting at position 2784 of SEQ ID NO: 1884630
cagcuauucucucggcuuu

SEQ ID NO: 2279871 - RNA, 19 nt, Artificial Sequence
  Description of Artificial Sequence: Synthetic oligonucleotide
  Antisense strand to SEQ ID NO: 2279870
aaagccgagagaauagcug

SEQ ID NO: 2279872 - RNA, 19 nt, Artificial Sequence
  Description of Artificial Sequence: Synthetic oligonucleotide
  Sense strand starting at position 2921 of SEQ ID NO: 1884630
agccaagauuucugcauua

SEQ ID NO: 2279873 - RNA, 19 nt, Artificial Sequence
  Description of Artificial Sequence: Synthetic oligonucleotide
  Antisense strand to SEQ ID NO: 2279872
uaaugcagaaaucuuggcu

SEQ ID NO: 2279874 - RNA, 19 nt, Artificial Sequence
  Description of Artificial Sequence: Synthetic oligonucleotide
  Sense strand starting at position 2976 of SEQ ID NO: 1884630
gaagucggauaauggaaau

SEQ ID NO: 2279875 - RNA, 19 nt, Artificial Sequence
  Description of Artificial Sequence: Synthetic oligonucleotide
  Antisense strand to SEQ ID NO: 2279874
auuuccauuauccgacuuc

SEQ ID NO: 2279876 - RNA, 19 nt, Artificial Sequence
  Description of Artificial Sequence: Synthetic oligonucleotide
  Sense strand starting at position 3018 of SEQ ID NO: 1884630
augucauuaugugacuguu

SEQ ID NO: 2279877 - RNA, 19 nt, Artificial Sequence
  Description of Artificial Sequence: Synthetic oligonucleotide
  Antisense strand to SEQ ID NO: 2279876
aacagucacauaaugacau

SEQ ID NO: 2279878 - RNA, 19 nt, Artificial Sequence
  Description of Artificial Sequence: Synthetic oligonucleotide
  Sense strand starting at position 3054 of SEQ ID NO: 1884630
agcaaugaauuguaaucau

SEQ ID NO: 2279879 - RNA, 19 nt, Artificial Sequence
  Description of Artificial Sequence: Synthetic oligonucleotide
  Antisense strand to SEQ ID NO: 2279878
augauuacaauucauugcu

SEQ ID NO: 2279880 - RNA, 19 nt, Artificial Sequence
  Description of Artificial Sequence: Synthetic oligonucleotide
  Sense strand starting at position 3101 of SEQ ID NO: 1884630
ggacacaaguugucaagga

SEQ ID NO: 2279881 - RNA, 19 nt, Artificial Sequence
  Description of Artificial Sequence: Synthetic oligonucleotide
  Antisense strand to SEQ ID NO: 2279880
uccuugacaacuugugucc

SEQ ID NO: 2279882 - RNA, 19 nt, Artificial Sequence
  Description of Artificial Sequence: Synthetic oligonucleotide
  Sense strand starting at position 3102 of SEQ ID NO: 1884630
gacacaaguugucaaggau

SEQ ID NO: 2279883 - RNA, 19 nt, Artificial Sequence
  Description of Artificial Sequence: Synthetic oligonucleotide
  Antisense strand to SEQ ID NO: 2279882
auccuugacaacuuguguc

SEQ ID NO: 2279884 - RNA, 19 nt, Artificial Sequence
  Description of Artificial Sequence: Synthetic oligonucleotide
  Sense strand starting at position 3105 of SEQ ID NO: 1884630
acaaguugucaaggauaaa

SEQ ID NO: 2279885 - RNA, 19 nt, Artificial Sequence
  Description of Artificial Sequence: Synthetic oligonucleotide
  Antisense strand to SEQ ID NO: 2279884
uuuauccuugacaacuugu

SEQ ID NO: 2279886 - RNA, 19 nt, Artificial Sequence
  Description of Artificial Sequence: Synthetic oligonucleotide
  Sense strand starting at position 3177 of SEQ ID NO: 1884630
acucuugcugccugauuua

SEQ ID NO: 2279887 - RNA, 19 nt, Artificial Sequence
  Description of Artificial Sequence: Synthetic oligonucleotide
  Antisense strand to SEQ ID NO: 2279886
uaaaucaggcagcaagagu

SEQ ID NO: 2279888 - RNA, 19 nt, Artificial Sequence
  Description of Artificial Sequence: Synthetic oligonucleotide
  Sense strand starting at position 3180 of SEQ ID NO: 1884630
cuugcugccugauuuaguu

SEQ ID NO: 2279889 - RNA, 19 nt, Artificial Sequence
  Description of Artificial Sequence: Synthetic oligonucleotide
  Antisense strand to SEQ ID NO: 2279888
aacuaaaucaggcagcaag

SEQ ID NO: 2279890 - RNA, 19 nt, Artificial Sequence
  Description of Artificial Sequence: Synthetic oligonucleotide
  Sense strand starting at position 3218 of SEQ ID NO: 1884630
cucagauucucuugcagag

SEQ ID NO: 2279891 - RNA, 19 nt, Artificial Sequence
  Description of Artificial Sequence: Synthetic oligonucleotide
  Antisense strand to SEQ ID NO: 2279890
cucugcaagagaaucugag

SEQ ID NO: 2279892 - RNA, 19 nt, Artificial Sequence
  Description of Artificial Sequence: Synthetic oligonucleotide
  Sense strand starting at position 3484 of SEQ ID NO: 1884630
cagcgcugcgcgucagaaa

SEQ ID NO: 2279893 - RNA, 19 nt, Artificial Sequence
  Description of Artificial Sequence: Synthetic oligonucleotide
  Antisense strand to SEQ ID NO: 2279892
uuucugacgcgcagcgcug

SEQ ID NO: 2279894 - RNA, 19 nt, Artificial Sequence
  Description of Artificial Sequence: Synthetic oligonucleotide
  Sense strand starting at position 3597 of SEQ ID NO: 1884630
ugccguccuuuguugaaau

SEQ ID NO: 2279895 - RNA, 19 nt, Artificial Sequence
  Description of Artificial Sequence: Synthetic oligonucleotide
  Antisense strand to SEQ ID NO: 2279894
auuucaacaaaggacggca

SEQ ID NO: 2279896 - RNA, 19 nt, Artificial Sequence
  Description of Artificial Sequence: Synthetic oligonucleotide
  Sense strand starting at position 3598 of SEQ ID NO: 1884630
gccguccuuuguugaaauu

SEQ ID NO: 2279897 - RNA, 19 nt, Artificial Sequence
  Description of Artificial Sequence: Synthetic oligonucleotide
  Antisense strand to SEQ ID NO: 2279896
aauuucaacaaaggacggc

SEQ ID NO: 2279898 - RNA, 19 nt, Artificial Sequence
  Description of Artificial Sequence: Synthetic oligonucleotide
  Sense strand starting at position 3599 of SEQ ID NO: 1884630
ccguccuuuguugaaauua

SEQ ID NO: 2279899 - RNA, 19 nt, Artificial Sequence
  Description of Artificial Sequence: Synthetic oligonucleotide
  Antisense strand to SEQ ID NO: 2279898
uaauuucaacaaaggacgg

SEQ ID NO: 2279900 - RNA, 19 nt, Artificial Sequence
  Description of Artificial Sequence: Synthetic oligonucleotide
  Sense strand starting at position 3676 of SEQ ID NO: 1884630
ugugguguccuugaaguau

SEQ ID NO: 2279901 - RNA, 19 nt, Artificial Sequence
  Description of Artificial Sequence: Synthetic oligonucleotide
  Antisense strand to SEQ ID NO: 2279900
auacuucaaggacaccaca

SEQ ID NO: 2279902 - RNA, 19 nt, Artificial Sequence
  Description of Artificial Sequence: Synthetic oligonucleotide
  Sense strand starting at position 3764 of SEQ ID NO: 1884630
ggcuccuauuuggacuaau

SEQ ID NO: 2279903 - RNA, 19 nt, Artificial Sequence
  Description of Artificial Sequence: Synthetic oligonucleotide
  Antisense strand to SEQ ID NO: 2279902
auuaguccaaauaggagcc

SEQ ID NO: 2279904 - RNA, 19 nt, Artificial Sequence
  Description of Artificial Sequence: Synthetic oligonucleotide
  Sense strand starting at position 3773 of SEQ ID NO: 1884630
uuggacuaaucccgaucuu

SEQ ID NO: 2279905 - RNA, 19 nt, Artificial Sequence
  Description of Artificial Sequence: Synthetic oligonucleotide
  Antisense strand to SEQ ID NO: 2279904
aagaucgggauuaguccaa

SEQ ID NO: 2279906 - RNA, 19 nt, Artificial Sequence
  Description of Artificial Sequence: Synthetic oligonucleotide
  Sense strand starting at position 3774 of SEQ ID NO: 1884630
uggacuaaucccgaucuuu

SEQ ID NO: 2279907 - RNA, 19 nt, Artificial Sequence
  Description of Artificial Sequence: Synthetic oligonucleotide
  Antisense strand to SEQ ID NO: 2279906
aaagaucgggauuagucca

SEQ ID NO: 2279908 - RNA, 19 nt, Artificial Sequence
  Description of Artificial Sequence: Synthetic oligonucleotide
  Sense strand starting at position 3821 of SEQ ID NO: 1884630
uauacucauuugggaggaa

SEQ ID NO: 2279909 - RNA, 19 nt, Artificial Sequence
  Description of Artificial Sequence: Synthetic oligonucleotide
  Antisense strand to SEQ ID NO: 2279908
uuccucccaaaugaguaua

SEQ ID NO: 2279910 - RNA, 19 nt, Artificial Sequence
  Description of Artificial Sequence: Synthetic oligonucleotide
  Sense strand starting at position 3925 of SEQ ID NO: 1884630
ccgggagcugccgauauua

SEQ ID NO: 2279911 - RNA, 19 nt, Artificial Sequence
  Description of Artificial Sequence: Synthetic oligonucleotide
  Antisense strand to SEQ ID NO: 2279910
uaauaucggcagcucccgg

SEQ ID NO: 2279912 - RNA, 19 nt, Artificial Sequence
  Description of Artificial Sequence: Synthetic oligonucleotide
  Sense strand starting at position 3927 of SEQ ID NO: 1884630
gggagcugccgauauuaua

SEQ ID NO: 2279913 - RNA, 19 nt, Artificial Sequence
  Description of Artificial Sequence: Synthetic oligonucleotide
  Antisense strand to SEQ ID NO: 2279912
uauaauaucggcagcuccc

SEQ ID NO: 2279914 - RNA, 19 nt, Artificial Sequence
  Description of Artificial Sequence: Synthetic oligonucleotide
  Sense strand starting at position 722 of SEQ ID NO: 1884631
uucucuuucugaggugcua

SEQ ID NO: 2279915 - RNA, 19 nt, Artificial Sequence
  Description of Artificial Sequence: Synthetic oligonucleotide
  Antisense strand to SEQ ID NO: 2279914
uagcaccucagaaagagaa

SEQ ID NO: 2279916 - RNA, 19 nt, Artificial Sequence
  Description of Artificial Sequence: Synthetic oligonucleotide
  Sense strand starting at position 1176 of SEQ ID NO: 1884631
aaccaaggcuguuaucaga

SEQ ID NO: 2279917 - RNA, 19 nt, Artificial Sequence
  Description of Artificial Sequence: Synthetic oligonucleotide
  Antisense strand to SEQ ID NO: 2279916
ucugauaacagccuugguu

SEQ ID NO: 2279918 - RNA, 19 nt, Artificial Sequence
  Description of Artificial Sequence: Synthetic oligonucleotide
  Sense strand starting at position 1183 of SEQ ID NO: 1884631
gcuguuaucagagggagac

SEQ ID NO: 2279919 - RNA, 19 nt, Artificial Sequence
  Description of Artificial Sequence: Synthetic oligonucleotide
  Antisense strand to SEQ ID NO: 2279918
gucucccucugauaacagc

SEQ ID NO: 2279920 - RNA, 19 nt, Artificial Sequence
  Description of Artificial Sequence: Synthetic oligonucleotide
  Sense strand starting at position 1201 of SEQ ID NO: 1884631
ccgagugagugguuaccaa

SEQ ID NO: 2279921 - RNA, 19 nt, Artificial Sequence
  Description of Artificial Sequence: Synthetic oligonucleotide
  Antisense strand to SEQ ID NO: 2279920
uugguaaccacucacucgg

SEQ ID NO: 2279922 - RNA, 19 nt, Artificial Sequence
  Description of Artificial Sequence: Synthetic oligonucleotide
  Sense strand starting at position 1208 of SEQ ID NO: 1884631
agugguuaccaaggagauc

SEQ ID NO: 2279923 - RNA, 19 nt, Artificial Sequence
  Description of Artificial Sequence: Synthetic oligonucleotide
  Antisense strand to SEQ ID NO: 2279922
gaucuccuugguaaccacu

SEQ ID NO: 2279924 - RNA, 19 nt, Artificial Sequence
  Description of Artificial Sequence: Synthetic oligonucleotide
  Sense strand starting at position 1453 of SEQ ID NO: 1884631
cuucgcugccuccaauuau

SEQ ID NO: 2279925 - RNA, 19 nt, Artificial Sequence
  Description of Artificial Sequence: Synthetic oligonucleotide
  Antisense strand to SEQ ID NO: 2279924
auaauuggaggcagcgaag

SEQ ID NO: 2279926 - RNA, 19 nt, Artificial Sequence
  Description of Artificial Sequence: Synthetic oligonucleotide
  Sense strand starting at position 1495 of SEQ ID NO: 1884631
guggcacuuacagaguuaa

SEQ ID NO: 2279927 - RNA, 19 nt, Artificial Sequence
  Description of Artificial Sequence: Synthetic oligonucleotide
  Antisense strand to SEQ ID NO: 2279926
uuaacucuguaagugccac

SEQ ID NO: 2279928 - RNA, 19 nt, Artificial Sequence
  Description of Artificial Sequence: Synthetic oligonucleotide
  Sense strand starting at position 1527 of SEQ ID NO: 1884631
ugcagaucuacugggcaaa

SEQ ID NO: 2279929 - RNA, 19 nt, Artificial Sequence
  Description of Artificial Sequence: Synthetic oligonucleotide
  Antisense strand to SEQ ID NO: 2279928
uuugcccaguagaucugca

SEQ ID NO: 2279930 - RNA, 19 nt, Artificial Sequence
  Description of Artificial Sequence: Synthetic oligonucleotide
  Sense strand starting at position 1529 of SEQ ID NO: 1884631
cagaucuacugggcaaaga

SEQ ID NO: 2279931 - RNA, 19 nt, Artificial Sequence
  Description of Artificial Sequence: Synthetic oligonucleotide
  Antisense strand to SEQ ID NO: 2279930
ucuuugcccaguagaucug

SEQ ID NO: 2279932 - RNA, 19 nt, Artificial Sequence
  Description of Artificial Sequence: Synthetic oligonucleotide
  Sense strand starting at position 1559 of SEQ ID NO: 1884631
ggaggagagucacauucuu

SEQ ID NO: 2279933 - RNA, 19 nt, Artificial Sequence
  Description of Artificial Sequence: Synthetic oligonucleotide
  Antisense strand to SEQ ID NO: 2279932
aagaaugugacucuccucc

SEQ ID NO: 2279934 - RNA, 19 nt, Artificial Sequence
  Description of Artificial Sequence: Synthetic oligonucleotide
  Sense strand starting at position 1589 of SEQ ID NO: 1884631
ugccucuuccauuggcaua

SEQ ID NO: 2279935 - RNA, 19 nt, Artificial Sequence
  Description of Artificial Sequence: Synthetic oligonucleotide
  Antisense strand to SEQ ID NO: 2279934
uaugccaauggaagaggca

SEQ ID NO: 2279936 - RNA, 19 nt, Artificial Sequence
  Description of Artificial Sequence: Synthetic oligonucleotide
  Sense strand starting at position 1734 of SEQ ID NO: 1884631
ccaaguccuuggcacauaa

SEQ ID NO: 2279937 - RNA, 19 nt, Artificial Sequence
  Description of Artificial Sequence: Synthetic oligonucleotide
  Antisense strand to SEQ ID NO: 2279936
uuaugugccaaggacuugg

SEQ ID NO: 2279938 - RNA, 19 nt, Artificial Sequence
  Description of Artificial Sequence: Synthetic oligonucleotide
  Sense strand starting at position 1745 of SEQ ID NO: 1884631
gcacauaaaucugagcaua

SEQ ID NO: 2279939 - RNA, 19 nt, Artificial Sequence
  Description of Artificial Sequence: Synthetic oligonucleotide
  Antisense strand to SEQ ID NO: 2279938
uaugcucagauuuaugugc

SEQ ID NO: 2279940 - RNA, 19 nt, Artificial Sequence
  Description of Artificial Sequence: Synthetic oligonucleotide
  Sense strand starting at position 1925 of SEQ ID NO: 1884631
gaggauuucuccuggccuc

SEQ ID NO: 2279941 - RNA, 19 nt, Artificial Sequence
  Description of Artificial Sequence: Synthetic oligonucleotide
  Antisense strand to SEQ ID NO: 2279940
gaggccaggagaaauccuc

SEQ ID NO: 2279942 - RNA, 19 nt, Artificial Sequence
  Description of Artificial Sequence: Synthetic oligonucleotide
  Sense strand starting at position 2413 of SEQ ID NO: 1884631
cgcugagagucuuauccuc

SEQ ID NO: 2279943 - RNA, 19 nt, Artificial Sequence
  Description of Artificial Sequence: Synthetic oligonucleotide
  Antisense strand to SEQ ID NO: 2279942
gaggauaagacucucagcg

SEQ ID NO: 2279944 - RNA, 19 nt, Artificial Sequence
  Description of Artificial Sequence: Synthetic oligonucleotide
  Sense strand starting at position 2418 of SEQ ID NO: 1884631
agagucuuauccucuggaa

SEQ ID NO: 2279945 - RNA, 19 nt, Artificial Sequence
  Description of Artificial Sequence: Synthetic oligonucleotide
  Antisense strand to SEQ ID NO: 2279944
uuccagaggauaagacucu

SEQ ID NO: 2279946 - RNA, 19 nt, Artificial Sequence
  Description of Artificial Sequence: Synthetic oligonucleotide
  Sense strand starting at position 2443 of SEQ ID NO: 1884631
guggguuccuccugaaucu

SEQ ID NO: 2279947 - RNA, 19 nt, Artificial Sequence
  Description of Artificial Sequence: Synthetic oligonucleotide
  Antisense strand to SEQ ID NO: 2279946
agauucaggaggaacccac

SEQ ID NO: 2279948 - RNA, 19 nt, Artificial Sequence
  Description of Artificial Sequence: Synthetic oligonucleotide
  Sense strand starting at position 2444 of SEQ ID NO: 1884631
uggguuccuccugaaucua

SEQ ID NO: 2279949 - RNA, 19 nt, Artificial Sequence
  Description of Artificial Sequence: Synthetic oligonucleotide
  Antisense strand to SEQ ID NO: 2279948
uagauucaggaggaaccca

SEQ ID NO: 2279950 - RNA, 19 nt, Artificial Sequence
  Description of Artificial Sequence: Synthetic oligonucleotide
  Sense strand starting at position 2490 of SEQ ID NO: 1884631
cccugaaucugacccaguu

SEQ ID NO: 2279951 - RNA, 19 nt, Artificial Sequence
  Description of Artificial Sequence: Synthetic oligonucleotide
  Antisense strand to SEQ ID NO: 2279950
aacugggucagauucaggg

SEQ ID NO: 2279952 - RNA, 19 nt, Artificial Sequence
  Description of Artificial Sequence: Synthetic oligonucleotide
  Sense strand starting at position 2529 of SEQ ID NO: 1884631
gcagauugcuggucacuaa

SEQ ID NO: 2279953 - RNA, 19 nt, Artificial Sequence
  Description of Artificial Sequence: Synthetic oligonucleotide
  Antisense strand to SEQ ID NO: 2279952
uuagugaccagcaaucugc

SEQ ID NO: 2279954 - RNA, 19 nt, Artificial Sequence
  Description of Artificial Sequence: Synthetic oligonucleotide
  Sense strand starting at position 2530 of SEQ ID NO: 1884631
cagauugcuggucacuaac

SEQ ID NO: 2279955 - RNA, 19 nt, Artificial Sequence
  Description of Artificial Sequence: Synthetic oligonucleotide
  Antisense strand to SEQ ID NO: 2279954
guuagugaccagcaaucug

SEQ ID NO: 2279956 - RNA, 19 nt, Artificial Sequence
  Description of Artificial Sequence: Synthetic oligonucleotide
  Sense strand starting at position 2578 of SEQ ID NO: 1884631
gugauaauucuauggccca

SEQ ID NO: 2279957 - RNA, 19 nt, Artificial Sequence
  Description of Artificial Sequence: Synthetic oligonucleotide
  Antisense strand to SEQ ID NO: 2279956
ugggccauagaauuaucac

SEQ ID NO: 2279958 - RNA, 19 nt, Artificial Sequence
  Description of Artificial Sequence: Synthetic oligonucleotide
  Sense strand starting at position 2579 of SEQ ID NO: 1884631
ugauaauucuauggcccau

SEQ ID NO: 2279959 - RNA, 19 nt, Artificial Sequence
  Description of Artificial Sequence: Synthetic oligonucleotide
  Antisense strand to SEQ ID NO: 2279958
augggccauagaauuauca

SEQ ID NO: 2279960 - RNA, 19 nt, Artificial Sequence
  Description of Artificial Sequence: Synthetic oligonucleotide
  Sense strand starting at position 2648 of SEQ ID NO: 1884631
ccauaacucccucguguca

SEQ ID NO: 2279961 - RNA, 19 nt, Artificial Sequence
  Description of Artificial Sequence: Synthetic oligonucleotide
  Antisense strand to SEQ ID NO: 2279960
ugacacgagggaguuaugg

SEQ ID NO: 2279962 - RNA, 19 nt, Artificial Sequence
  Description of Artificial Sequence: Synthetic oligonucleotide
  Sense strand starting at position 3087 of SEQ ID NO: 1884631
gaggucuauccaugucggu

SEQ ID NO: 2279963 - RNA, 19 nt, Artificial Sequence
  Description of Artificial Sequence: Synthetic oligonucleotide
  Antisense strand to SEQ ID NO: 2279962
accgacauggauagaccuc

SEQ ID NO: 2279964 - RNA, 19 nt, Artificial Sequence
  Description of Artificial Sequence: Synthetic oligonucleotide
  Sense strand starting at position 3235 of SEQ ID NO: 1884631
uuauuagcagcgugagacu

SEQ ID NO: 2279965 - RNA, 19 nt, Artificial Sequence
  Description of Artificial Sequence: Synthetic oligonucleotide
  Antisense strand to SEQ ID NO: 2279964
agucucacgcugcuaauaa

SEQ ID NO: 2279966 - RNA, 19 nt, Artificial Sequence
  Description of Artificial Sequence: Synthetic oligonucleotide
  Sense strand starting at position 3351 of SEQ ID NO: 1884631
cuugcaauagaucaugguu

SEQ ID NO: 2279967 - RNA, 19 nt, Artificial Sequence
  Description of Artificial Sequence: Synthetic oligonucleotide
  Antisense strand to SEQ ID NO: 2279966
aaccaugaucuauugcaag

SEQ ID NO: 2279968 - RNA, 19 nt, Artificial Sequence
  Description of Artificial Sequence: Synthetic oligonucleotide
  Sense strand starting at position 3354 of SEQ ID NO: 1884631
gcaauagaucaugguuggu

SEQ ID NO: 2279969 - RNA, 19 nt, Artificial Sequence
  Description of Artificial Sequence: Synthetic oligonucleotide
  Antisense strand to SEQ ID NO: 2279968
accaaccaugaucuauugc

SEQ ID NO: 2279970 - RNA, 19 nt, Artificial Sequence
  Description of Artificial Sequence: Synthetic oligonucleotide
  Sense strand starting at position 3359 of SEQ ID NO: 1884631
agaucaugguugguaguuu

SEQ ID NO: 2279971 - RNA, 19 nt, Artificial Sequence
  Description of Artificial Sequence: Synthetic oligonucleotide
  Antisense strand to SEQ ID NO: 2279970
aaacuaccaaccaugaucu

SEQ ID NO: 2279972 - RNA, 19 nt, Artificial Sequence
  Description of Artificial Sequence: Synthetic oligonucleotide
  Sense strand starting at position 3360 of SEQ ID NO: 1884631
gaucaugguugguaguuua

SEQ ID NO: 2279973 - RNA, 19 nt, Artificial Sequence
  Description of Artificial Sequence: Synthetic oligonucleotide
  Antisense strand to SEQ ID NO: 2279972
uaaacuaccaaccaugauc

SEQ ID NO: 2279974 - RNA, 19 nt, Artificial Sequence
  Description of Artificial Sequence: Synthetic oligonucleotide
  Sense strand starting at position 3368 of SEQ ID NO: 1884631
uugguaguuuaaccagaaa

SEQ ID NO: 2279975 - RNA, 19 nt, Artificial Sequence
  Description of Artificial Sequence: Synthetic oligonucleotide
  Antisense strand to SEQ ID NO: 2279974
uuucugguuaaacuaccaa

SEQ ID NO: 2279976 - RNA, 19 nt, Artificial Sequence
  Description of Artificial Sequence: Synthetic oligonucleotide
  Sense strand starting at position 151 of SEQ ID NO: 1884635
gcaggaaucugcucaggau

SEQ ID NO: 2279977 - RNA, 19 nt, Artificial Sequence
  Description of Artificial Sequence: Synthetic oligonucleotide
  Antisense strand to SEQ ID NO: 2279976
auccugagcagauuccugc

SEQ ID NO: 2279978 - RNA, 19 nt, Artificial Sequence
  Description of Artificial Sequence: Synthetic oligonucleotide
  Sense strand starting at position 200 of SEQ ID NO: 1884635
cgaagaguuacacacugca

SEQ ID NO: 2279979 - RNA, 19 nt, Artificial Sequence
  Description of Artificial Sequence: Synthetic oligonucleotide
  Antisense strand to SEQ ID NO: 2279978
ugcaguguguaacucuucg

SEQ ID NO: 2279980 - RNA, 19 nt, Artificial Sequence
  Description of Artificial Sequence: Synthetic oligonucleotide
  Sense strand starting at position 248 of SEQ ID NO: 1884635
ugugucugaacuugagaaa

SEQ ID NO: 2279981 - RNA, 19 nt, Artificial Sequence
  Description of Artificial Sequence: Synthetic oligonucleotide
  Antisense strand to SEQ ID NO: 2279980
uuucucaaguucagacaca

SEQ ID NO: 2279982 - RNA, 19 nt, Artificial Sequence
  Description of Artificial Sequence: Synthetic oligonucleotide
  Sense strand starting at position 251 of SEQ ID NO: 1884635
gucugaacuugagaaaggu

SEQ ID NO: 2279983 - RNA, 19 nt, Artificial Sequence
  Description of Artificial Sequence: Synthetic oligonucleotide
  Antisense strand to SEQ ID NO: 2279982
accuuucucaaguucagac

SEQ ID NO: 2279984 - RNA, 19 nt, Artificial Sequence
  Description of Artificial Sequence: Synthetic oligonucleotide
  Sense strand starting at position 520 of SEQ ID NO: 1884635
auacccuucugggcucaaa

SEQ ID NO: 2279985 - RNA, 19 nt, Artificial Sequence
  Description of Artificial Sequence: Synthetic oligonucleotide
  Antisense strand to SEQ ID NO: 2279984
uuugagcccagaaggguau

SEQ ID NO: 2279986 - RNA, 19 nt, Artificial Sequence
  Description of Artificial Sequence: Synthetic oligonucleotide
  Sense strand starting at position 532 of SEQ ID NO: 1884635
gcucaaagaccuugucaaa

SEQ ID NO: 2279987 - RNA, 19 nt, Artificial Sequence
  Description of Artificial Sequence: Synthetic oligonucleotide
  Antisense strand to SEQ ID NO: 2279986
uuugacaaggucuuugagc

SEQ ID NO: 2279988 - RNA, 19 nt, Artificial Sequence
  Description of Artificial Sequence: Synthetic oligonucleotide
  Sense strand starting at position 725 of SEQ ID NO: 1884635
gcuccaauugcucaaguuc

SEQ ID NO: 2279989 - RNA, 19 nt, Artificial Sequence
  Description of Artificial Sequence: Synthetic oligonucleotide
  Antisense strand to SEQ ID NO: 2279988
gaacuugagcaauuggagc

SEQ ID NO: 2279990 - RNA, 19 nt, Artificial Sequence
  Description of Artificial Sequence: Synthetic oligonucleotide
  Sense strand starting at position 824 of SEQ ID NO: 1884635
ccuggaucaucccuaaaug

SEQ ID NO: 2279991 - RNA, 19 nt, Artificial Sequence
  Description of Artificial Sequence: Synthetic oligonucleotide
  Antisense strand to SEQ ID NO: 2279990
cauuuagggaugauccagg

SEQ ID NO: 2279992 - RNA, 19 nt, Artificial Sequence
  Description of Artificial Sequence: Synthetic oligonucleotide
  Sense strand starting at position 1031 of SEQ ID NO: 1884635
ugcccaaaucaggaguuga

SEQ ID NO: 2279993 - RNA, 19 nt, Artificial Sequence
  Description of Artificial Sequence: Synthetic oligonucleotide
  Antisense strand to SEQ ID NO: 2279992
ucaacuccugauuugggca

SEQ ID NO: 2279994 - RNA, 19 nt, Artificial Sequence
  Description of Artificial Sequence: Synthetic oligonucleotide
  Sense strand starting at position 1044 of SEQ ID NO: 1884635
aguugaugaggagguucaa

SEQ ID NO: 2279995 - RNA, 19 nt, Artificial Sequence
  Description of Artificial Sequence: Synthetic oligonucleotide
  Antisense strand to SEQ ID NO: 2279994
uugaaccuccucaucaacu

SEQ ID NO: 2279996 - RNA, 19 nt, Artificial Sequence
  Description of Artificial Sequence: Synthetic oligonucleotide
  Sense strand starting at position 1073 of SEQ ID NO: 1884635
auuccaauucuuggaggua

SEQ ID NO: 2279997 - RNA, 19 nt, Artificial Sequence
  Description of Artificial Sequence: Synthetic oligonucleotide
  Antisense strand to SEQ ID NO: 2279996
uaccuccaagaauuggaau

SEQ ID NO: 2279998 - RNA, 19 nt, Artificial Sequence
  Description of Artificial Sequence: Synthetic oligonucleotide
  Sense strand starting at position 1074 of SEQ ID NO: 1884635
uuccaauucuuggagguau

SEQ ID NO: 2279999 - RNA, 19 nt, Artificial Sequence
  Description of Artificial Sequence: Synthetic oligonucleotide
  Antisense strand to SEQ ID NO: 2279998
auaccuccaagaauuggaa

SEQ ID NO: 2280000 - RNA, 19 nt, Artificial Sequence
  Description of Artificial Sequence: Synthetic oligonucleotide
  Sense strand starting at position 1143 of SEQ ID NO: 1884635
cuagaucuguuuccacagu

SEQ ID NO: 2280001 - RNA, 19 nt, Artificial Sequence
  Description of Artificial Sequence: Synthetic oligonucleotide
  Antisense strand to SEQ ID NO: 2280000
acuguggaaacagaucuag

SEQ ID NO: 2280002 - RNA, 19 nt, Artificial Sequence
  Description of Artificial Sequence: Synthetic oligonucleotide
  Sense strand starting at position 1159 of SEQ ID NO: 1884635
aguucugcaacaugggaau

SEQ ID NO: 2280003 - RNA, 19 nt, Artificial Sequence
  Description of Artificial Sequence: Synthetic oligonucleotide
  Antisense strand to SEQ ID NO: 2280002
auucccauguugcagaacu

SEQ ID NO: 2280004 - RNA, 19 nt, Artificial Sequence
  Description of Artificial Sequence: Synthetic oligonucleotide
  Sense strand starting at position 1170 of SEQ ID NO: 1884635
augggaaucacaugguuua

SEQ ID NO: 2280005 - RNA, 19 nt, Artificial Sequence
  Description of Artificial Sequence: Synthetic oligonucleotide
  Antisense strand to SEQ ID NO: 2280004
uaaaccaugugauucccau

SEQ ID NO: 2280006 - RNA, 19 nt, Artificial Sequence
  Description of Artificial Sequence: Synthetic oligonucleotide
  Sense strand starting at position 1173 of SEQ ID NO: 1884635
ggaaucacaugguuuagau

SEQ ID NO: 2280007 - RNA, 19 nt, Artificial Sequence
  Description of Artificial Sequence: Synthetic oligonucleotide
  Antisense strand to SEQ ID NO: 2280006
aucuaaaccaugugauucc

SEQ ID NO: 2280008 - RNA, 19 nt, Artificial Sequence
  Description of Artificial Sequence: Synthetic oligonucleotide
  Sense strand starting at position 1182 of SEQ ID NO: 1884635
ugguuuagauuaccucuaa

SEQ ID NO: 2280009 - RNA, 19 nt, Artificial Sequence
  Description of Artificial Sequence: Synthetic oligonucleotide
  Antisense strand to SEQ ID NO: 2280008
uuagagguaaucuaaacca

SEQ ID NO: 2280010 - RNA, 19 nt, Artificial Sequence
  Description of Artificial Sequence: Synthetic oligonucleotide
  Sense strand starting at position 1183 of SEQ ID NO: 1884635
gguuuagauuaccucuaag

SEQ ID NO: 2280011 - RNA, 19 nt, Artificial Sequence
  Description of Artificial Sequence: Synthetic oligonucleotide
  Antisense strand to SEQ ID NO: 2280010
cuuagagguaaucuaaacc

SEQ ID NO: 2280012 - RNA, 19 nt, Artificial Sequence
  Description of Artificial Sequence: Synthetic oligonucleotide
  Sense strand starting at position 1186 of SEQ ID NO: 1884635
uuagauuaccucuaagguc

SEQ ID NO: 2280013 - RNA, 19 nt, Artificial Sequence
  Description of Artificial Sequence: Synthetic oligonucleotide
  Antisense strand to SEQ ID NO: 2280012
gaccuuagagguaaucuaa

SEQ ID NO: 2280014 - RNA, 19 nt, Artificial Sequence
  Description of Artificial Sequence: Synthetic oligonucleotide
  Sense strand starting at position 1266 of SEQ ID NO: 1884635
ugcagauaguucuacauuc

SEQ ID NO: 2280015 - RNA, 19 nt, Artificial Sequence
  Description of Artificial Sequence: Synthetic oligonucleotide
  Antisense strand to SEQ ID NO: 2280014
gaauguagaacuaucugca

SEQ ID NO: 2280016 - RNA, 19 nt, Artificial Sequence
  Description of Artificial Sequence: Synthetic oligonucleotide
  Sense strand starting at position 1290 of SEQ ID NO: 1884635
agguacuacuuagcugaaa

SEQ ID NO: 2280017 - RNA, 19 nt, Artificial Sequence
  Description of Artificial Sequence: Synthetic oligonucleotide
  Antisense strand to SEQ ID NO: 2280016
uuucagcuaaguaguaccu

SEQ ID NO: 2280018 - RNA, 19 nt, Artificial Sequence
  Description of Artificial Sequence: Synthetic oligonucleotide
  Sense strand starting at position 1333 of SEQ ID NO: 1884635
gcuccaaagucccuagaga

SEQ ID NO: 2280019 - RNA, 19 nt, Artificial Sequence
  Description of Artificial Sequence: Synthetic oligonucleotide
  Antisense strand to SEQ ID NO: 2280018
ucucuagggacuuuggagc

SEQ ID NO: 2280020 - RNA, 19 nt, Artificial Sequence
  Description of Artificial Sequence: Synthetic oligonucleotide
  Sense strand starting at position 1410 of SEQ ID NO: 1884635
ccugcucuguacuugauau

SEQ ID NO: 2280021 - RNA, 19 nt, Artificial Sequence
  Description of Artificial Sequence: Synthetic oligonucleotide
  Antisense strand to SEQ ID NO: 2280020
auaucaaguacagagcagg

SEQ ID NO: 2280022 - RNA, 19 nt, Artificial Sequence
  Description of Artificial Sequence: Synthetic oligonucleotide
  Sense strand starting at position 1414 of SEQ ID NO: 1884635
cucuguacuugauauacau

SEQ ID NO: 2280023 - RNA, 19 nt, Artificial Sequence
  Description of Artificial Sequence: Synthetic oligonucleotide
  Antisense strand to SEQ ID NO: 2280022
auguauaucaaguacagag

SEQ ID NO: 2280024 - RNA, 19 nt, Artificial Sequence
  Description of Artificial Sequence: Synthetic oligonucleotide
  Sense strand starting at position 1423 of SEQ ID NO: 1884635
ugauauacauugucucuuu

SEQ ID NO: 2280025 - RNA, 19 nt, Artificial Sequence
  Description of Artificial Sequence: Synthetic oligonucleotide
  Antisense strand to SEQ ID NO: 2280024
aaagagacaauguauauca

SEQ ID NO: 2280026 - RNA, 19 nt, Artificial Sequence
  Description of Artificial Sequence: Synthetic oligonucleotide
  Sense strand starting at position 1449 of SEQ ID NO: 1884635
accauaauucuaugaggua

SEQ ID NO: 2280027 - RNA, 19 nt, Artificial Sequence
  Description of Artificial Sequence: Synthetic oligonucleotide
  Antisense strand to SEQ ID NO: 2280026
uaccucauagaauuauggu

SEQ ID NO: 2280028 - RNA, 19 nt, Artificial Sequence
  Description of Artificial Sequence: Synthetic oligonucleotide
  Sense strand starting at position 1450 of SEQ ID NO: 1884635
ccauaauucuaugagguag

SEQ ID NO: 2280029 - RNA, 19 nt, Artificial Sequence
  Description of Artificial Sequence: Synthetic oligonucleotide
  Antisense strand to SEQ ID NO: 2280028
cuaccucauagaauuaugg

SEQ ID NO: 2280030 - RNA, 19 nt, Artificial Sequence
  Description of Artificial Sequence: Synthetic oligonucleotide
  Sense strand starting at position 1468 of SEQ ID NO: 1884635
ggugcuacagccuguauau

SEQ ID NO: 2280031 - RNA, 19 nt, Artificial Sequence
  Description of Artificial Sequence: Synthetic oligonucleotide
  Antisense strand to SEQ ID NO: 2280030
auauacaggcuguagcacc

SEQ ID NO: 2280032 - RNA, 19 nt, Artificial Sequence
  Description of Artificial Sequence: Synthetic oligonucleotide
  Sense strand starting at position 1470 of SEQ ID NO: 1884635
ugcuacagccuguauauuu

SEQ ID NO: 2280033 - RNA, 19 nt, Artificial Sequence
  Description of Artificial Sequence: Synthetic oligonucleotide
  Antisense strand to SEQ ID NO: 2280032
aaauauacaggcuguagca

SEQ ID NO: 2280034 - RNA, 19 nt, Artificial Sequence
  Description of Artificial Sequence: Synthetic oligonucleotide
  Sense strand starting at position 1734 of SEQ ID NO: 1884635
gcagcaguuccugggaaac

SEQ ID NO: 2280035 - RNA, 19 nt, Artificial Sequence
  Description of Artificial Sequence: Synthetic oligonucleotide
  Antisense strand to SEQ ID NO: 2280034
guuucccaggaacugcugc

SEQ ID NO: 2280036 - RNA, 19 nt, Artificial Sequence
  Description of Artificial Sequence: Synthetic oligonucleotide
  Sense strand starting at position 2137 of SEQ ID NO: 1884635
acuaauuucggcugcguga

SEQ ID NO: 2280037 - RNA, 19 nt, Artificial Sequence
  Description of Artificial Sequence: Synthetic oligonucleotide
  Antisense strand to SEQ ID NO: 2280036
ucacgcagccgaaauuagu

SEQ ID NO: 2280038 - RNA, 19 nt, Artificial Sequence
  Description of Artificial Sequence: Synthetic oligonucleotide
  Sense strand starting at position 2162 of SEQ ID NO: 1884635
ccggaagagcucuggauac

SEQ ID NO: 2280039 - RNA, 19 nt, Artificial Sequence
  Description of Artificial Sequence: Synthetic oligonucleotide
  Antisense strand to SEQ ID NO: 2280038
guauccagagcucuuccgg

SEQ ID NO: 2280040 - RNA, 19 nt, Artificial Sequence
  Description of Artificial Sequence: Synthetic oligonucleotide
  Sense strand starting at position 2176 of SEQ ID NO: 1884635
gauaccugaguuugagcau

SEQ ID NO: 2280041 - RNA, 19 nt, Artificial Sequence
  Description of Artificial Sequence: Synthetic oligonucleotide
  Antisense strand to SEQ ID NO: 2280040
augcucaaacucagguauc

SEQ ID NO: 2280042 - RNA, 19 nt, Artificial Sequence
  Description of Artificial Sequence: Synthetic oligonucleotide
  Sense strand starting at position 2179 of SEQ ID NO: 1884635
accugaguuugagcauguu

SEQ ID NO: 2280043 - RNA, 19 nt, Artificial Sequence
  Description of Artificial Sequence: Synthetic oligonucleotide
  Antisense strand to SEQ ID NO: 2280042
aacaugcucaaacucaggu

SEQ ID NO: 2280044 - RNA, 19 nt, Artificial Sequence
  Description of Artificial Sequence: Synthetic oligonucleotide
  Sense strand starting at position 2182 of SEQ ID NO: 1884635
ugaguuugagcauguugga

SEQ ID NO: 2280045 - RNA, 19 nt, Artificial Sequence
  Description of Artificial Sequence: Synthetic oligonucleotide
  Antisense strand to SEQ ID NO: 2280044
uccaacaugcucaaacuca

SEQ ID NO: 2280046 - RNA, 19 nt, Artificial Sequence
  Description of Artificial Sequence: Synthetic oligonucleotide
  Sense strand starting at position 2236 of SEQ ID NO: 1884635
ccaucuaccuguugaaaga

SEQ ID NO: 2280047 - RNA, 19 nt, Artificial Sequence
  Description of Artificial Sequence: Synthetic oligonucleotide
  Antisense strand to SEQ ID NO: 2280046
ucuuucaacagguagaugg

SEQ ID NO: 2280048 - RNA, 19 nt, Artificial Sequence
  Description of Artificial Sequence: Synthetic oligonucleotide
  Sense strand starting at position 3788 of SEQ ID NO: 1884635
gccaguagauacuauuuaa

SEQ ID NO: 2280049 - RNA, 19 nt, Artificial Sequence
  Description of Artificial Sequence: Synthetic oligonucleotide
  Antisense strand to SEQ ID NO: 2280048
uuaaauaguaucuacuggc

SEQ ID NO: 2280050 - RNA, 19 nt, Artificial Sequence
  Description of Artificial Sequence: Synthetic oligonucleotide
  Sense strand starting at position 3883 of SEQ ID NO: 1884635
caagucugguaccugagau

SEQ ID NO: 2280051 - RNA, 19 nt, Artificial Sequence
  Description of Artificial Sequence: Synthetic oligonucleotide
  Antisense strand to SEQ ID NO: 2280050
aucucagguaccagacuug

SEQ ID NO: 2280052 - RNA, 19 nt, Artificial Sequence
  Description of Artificial Sequence: Synthetic oligonucleotide
  Sense strand starting at position 3936 of SEQ ID NO: 1884635
cuuagcauuuguugauuaa

SEQ ID NO: 2280053 - RNA, 19 nt, Artificial Sequence
  Description of Artificial Sequence: Synthetic oligonucleotide
  Antisense strand to SEQ ID NO: 2280052
uuaaucaacaaaugcuaag

SEQ ID NO: 2280054 - RNA, 19 nt, Artificial Sequence
  Description of Artificial Sequence: Synthetic oligonucleotide
  Sense strand starting at position 3948 of SEQ ID NO: 1884635
ugauuaauuugccagagcu

SEQ ID NO: 2280055 - RNA, 19 nt, Artificial Sequence
  Description of Artificial Sequence: Synthetic oligonucleotide
  Antisense strand to SEQ ID NO: 2280054
agcucuggcaaauuaauca

SEQ ID NO: 2280056 - RNA, 19 nt, Artificial Sequence
  Description of Artificial Sequence: Synthetic oligonucleotide
  Sense strand starting at position 26 of SEQ ID NO: 1884633
guggcaugacuguaaucac

SEQ ID NO: 2280057 - RNA, 19 nt, Artificial Sequence
  Description of Artificial Sequence: Synthetic oligonucleotide
  Antisense strand to SEQ ID NO: 2280056
gugauuacagucaugccac

SEQ ID NO: 2280058 - RNA, 19 nt, Artificial Sequence
  Description of Artificial Sequence: Synthetic oligonucleotide
  Sense strand starting at position 131 of SEQ ID NO: 1884633
acaccuggccuugguuaau

SEQ ID NO: 2280059 - RNA, 19 nt, Artificial Sequence
  Description of Artificial Sequence: Synthetic oligonucleotide
  Antisense strand to SEQ ID NO: 2280058
auuaaccaaggccaggugu

SEQ ID NO: 2280060 - RNA, 19 nt, Artificial Sequence
  Description of Artificial Sequence: Synthetic oligonucleotide
  Sense strand starting at position 333 of SEQ ID NO: 1884633
cccagauggcuuuaaacuc

SEQ ID NO: 2280061 - RNA, 19 nt, Artificial Sequence
  Description of Artificial Sequence: Synthetic oligonucleotide
  Antisense strand to SEQ ID NO: 2280060
gaguuuaaagccaucuggg

SEQ ID NO: 2280062 - RNA, 19 nt, Artificial Sequence
  Description of Artificial Sequence: Synthetic oligonucleotide
  Sense strand starting at position 404 of SEQ ID NO: 1884633
ggaguagugguggagguuu

SEQ ID NO: 2280063 - RNA, 19 nt, Artificial Sequence
  Description of Artificial Sequence: Synthetic oligonucleotide
  Antisense strand to SEQ ID NO: 2280062
aaaccuccaccacuacucc

SEQ ID NO: 2280064 - RNA, 19 nt, Artificial Sequence
  Description of Artificial Sequence: Synthetic oligonucleotide
  Sense strand starting at position 525 of SEQ ID NO: 1884633
ccgagaagcagcugggauu

SEQ ID NO: 2280065 - RNA, 19 nt, Artificial Sequence
  Description of Artificial Sequence: Synthetic oligonucleotide
  Antisense strand to SEQ ID NO: 2280064
aaucccagcugcuucucgg

SEQ ID NO: 2280066 - RNA, 19 nt, Artificial Sequence
  Description of Artificial Sequence: Synthetic oligonucleotide
  Sense strand starting at position 701 of SEQ ID NO: 1884633
gccaguauacgcuuugcuu

SEQ ID NO: 2280067 - RNA, 19 nt, Artificial Sequence
  Description of Artificial Sequence: Synthetic oligonucleotide
  Antisense strand to SEQ ID NO: 2280066
aagcaaagcguauacuggc

SEQ ID NO: 2280068 - RNA, 19 nt, Artificial Sequence
  Description of Artificial Sequence: Synthetic oligonucleotide
  Sense strand starting at position 702 of SEQ ID NO: 1884633
ccaguauacgcuuugcuuu

SEQ ID NO: 2280069 - RNA, 19 nt, Artificial Sequence
  Description of Artificial Sequence: Synthetic oligonucleotide
  Antisense strand to SEQ ID NO: 2280068
aaagcaaagcguauacugg

SEQ ID NO: 2280070 - RNA, 19 nt, Artificial Sequence
  Description of Artificial Sequence: Synthetic oligonucleotide
  Sense strand starting at position 728 of SEQ ID NO: 1884633
caguuccugcuaugagacu

SEQ ID NO: 2280071 - RNA, 19 nt, Artificial Sequence
  Description of Artificial Sequence: Synthetic oligonucleotide
  Antisense strand to SEQ ID NO: 2280070
agucucauagcaggaacug

SEQ ID NO: 2280072 - RNA, 19 nt, Artificial Sequence
  Description of Artificial Sequence: Synthetic oligonucleotide
  Sense strand starting at position 739 of SEQ ID NO: 1884633
augagacucucagucacua

SEQ ID NO: 2280073 - RNA, 19 nt, Artificial Sequence
  Description of Artificial Sequence: Synthetic oligonucleotide
  Antisense strand to SEQ ID NO: 2280072
uagugacugagagucucau

SEQ ID NO: 2280074 - RNA, 19 nt, Artificial Sequence
  Description of Artificial Sequence: Synthetic oligonucleotide
  Sense strand starting at position 760 of SEQ ID NO: 1884633
caggucuaguuucuagaaa

SEQ ID NO: 2280075 - RNA, 19 nt, Artificial Sequence
  Description of Artificial Sequence: Synthetic oligonucleotide
  Antisense strand to SEQ ID NO: 2280074
uuucuagaaacuagaccug

SEQ ID NO: 2280076 - RNA, 19 nt, Artificial Sequence
  Description of Artificial Sequence: Synthetic oligonucleotide
  Sense strand starting at position 870 of SEQ ID NO: 1884633
gaggguaaauaauaggaua

SEQ ID NO: 2280077 - RNA, 19 nt, Artificial Sequence
  Description of Artificial Sequence: Synthetic oligonucleotide
  Antisense strand to SEQ ID NO: 2280076
uauccuauuauuuacccuc

SEQ ID NO: 2280078 - RNA, 19 nt, Artificial Sequence
  Description of Artificial Sequence: Synthetic oligonucleotide
  Sense strand starting at position 873 of SEQ ID NO: 1884633
gguaaauaauaggauacaa

SEQ ID NO: 2280079 - RNA, 19 nt, Artificial Sequence
  Description of Artificial Sequence: Synthetic oligonucleotide
  Antisense strand to SEQ ID NO: 2280078
uuguauccuauuauuuacc

SEQ ID NO: 2280080 - RNA, 19 nt, Artificial Sequence
  Description of Artificial Sequence: Synthetic oligonucleotide
  Sense strand starting at position 940 of SEQ ID NO: 1884633
ugugaaagcuuggcaaaug

SEQ ID NO: 2280081 - RNA, 19 nt, Artificial Sequence
  Description of Artificial Sequence: Synthetic oligonucleotide
  Antisense strand to SEQ ID NO: 2280080
cauuugccaagcuuucaca

SEQ ID NO: 2280082 - RNA, 19 nt, Artificial Sequence
  Description of Artificial Sequence: Synthetic oligonucleotide
  Sense strand starting at position 952 of SEQ ID NO: 1884633
gcaaauguaucacugagaa

SEQ ID NO: 2280083 - RNA, 19 nt, Artificial Sequence
  Description of Artificial Sequence: Synthetic oligonucleotide
  Antisense strand to SEQ ID NO: 2280082
uucucagugauacauuugc

SEQ ID NO: 2280084 - RNA, 19 nt, Artificial Sequence
  Description of Artificial Sequence: Synthetic oligonucleotide
  Sense strand starting at position 964 of SEQ ID NO: 1884633
cugagaagaugggaacauu

SEQ ID NO: 2280085 - RNA, 19 nt, Artificial Sequence
  Description of Artificial Sequence: Synthetic oligonucleotide
  Antisense strand to SEQ ID NO: 2280084
aauguucccaucuucucag

SEQ ID NO: 2280086 - RNA, 19 nt, Artificial Sequence
  Description of Artificial Sequence: Synthetic oligonucleotide
  Sense strand starting at position 987 of SEQ ID NO: 1884633
auacccguccuuuaagaau

SEQ ID NO: 2280087 - RNA, 19 nt, Artificial Sequence
  Description of Artificial Sequence: Synthetic oligonucleotide
  Antisense strand to SEQ ID NO: 2280086
auucuuaaaggacggguau

SEQ ID NO: 2280088 - RNA, 19 nt, Artificial Sequence
  Description of Artificial Sequence: Synthetic oligonucleotide
  Sense strand starting at position 1798 of SEQ ID NO: 1884633
agaauagggucaggauuua

SEQ ID NO: 2280089 - RNA, 19 nt, Artificial Sequence
  Description of Artificial Sequence: Synthetic oligonucleotide
  Antisense strand to SEQ ID NO: 2280088
uaaauccugacccuauucu

SEQ ID NO: 2280090 - RNA, 19 nt, Artificial Sequence
  Description of Artificial Sequence: Synthetic oligonucleotide
  Sense strand starting at position 1823 of SEQ ID NO: 1884633
ugaagaagccucgggcaaa

SEQ ID NO: 2280091 - RNA, 19 nt, Artificial Sequence
  Description of Artificial Sequence: Synthetic oligonucleotide
  Antisense strand to SEQ ID NO: 2280090
uuugcccgaggcuucuuca

SEQ ID NO: 2280092 - RNA, 19 nt, Artificial Sequence
  Description of Artificial Sequence: Synthetic oligonucleotide
  Sense strand starting at position 1834 of SEQ ID NO: 1884633
cgggcaaacucuuuggaca

SEQ ID NO: 2280093 - RNA, 19 nt, Artificial Sequence
  Description of Artificial Sequence: Synthetic oligonucleotide
  Antisense strand to SEQ ID NO: 2280092
uguccaaagaguuugcccg

SEQ ID NO: 2280094 - RNA, 19 nt, Artificial Sequence
  Description of Artificial Sequence: Synthetic oligonucleotide
  Sense strand starting at position 1835 of SEQ ID NO: 1884633
gggcaaacucuuuggacag

SEQ ID NO: 2280095 - RNA, 19 nt, Artificial Sequence
  Description of Artificial Sequence: Synthetic oligonucleotide
  Antisense strand to SEQ ID NO: 2280094
cuguccaaagaguuugccc

SEQ ID NO: 2280096 - RNA, 19 nt, Artificial Sequence
  Description of Artificial Sequence: Synthetic oligonucleotide
  Sense strand starting at position 2680 of SEQ ID NO: 1884633
caccuucuggccugagaga

SEQ ID NO: 2280097 - RNA, 19 nt, Artificial Sequence
  Description of Artificial Sequence: Synthetic oligonucleotide
  Antisense strand to SEQ ID NO: 2280096
ucucucaggccagaaggug

SEQ ID NO: 2280098 - RNA, 19 nt, Artificial Sequence
  Description of Artificial Sequence: Synthetic oligonucleotide
  Sense strand starting at position 2964 of SEQ ID NO: 1884633
uuggcuucuccauaaggga

SEQ ID NO: 2280099 - RNA, 19 nt, Artificial Sequence
  Description of Artificial Sequence: Synthetic oligonucleotide
  Antisense strand to SEQ ID NO: 2280098
ucccuuauggagaagccaa

SEQ ID NO: 2280100 - RNA, 19 nt, Artificial Sequence
  Description of Artificial Sequence: Synthetic oligonucleotide
  Sense strand starting at position 3033 of SEQ ID NO: 1884633
gauaauaucugagaauagg

SEQ ID NO: 2280101 - RNA, 19 nt, Artificial Sequence
  Description of Artificial Sequence: Synthetic oligonucleotide
  Antisense strand to SEQ ID NO: 2280100
ccuauucucagauauuauc

SEQ ID NO: 2280102 - RNA, 19 nt, Artificial Sequence
  Description of Artificial Sequence: Synthetic oligonucleotide
  Sense strand starting at position 3122 of SEQ ID NO: 1884633
cagauugaguuucuggauu

SEQ ID NO: 2280103 - RNA, 19 nt, Artificial Sequence
  Description of Artificial Sequence: Synthetic oligonucleotide
  Antisense strand to SEQ ID NO: 2280102
aauccagaaacucaaucug

SEQ ID NO: 2280104 - RNA, 19 nt, Artificial Sequence
  Description of Artificial Sequence: Synthetic oligonucleotide
  Sense strand starting at position 3133 of SEQ ID NO: 1884633
ucuggauuacuauagccau

SEQ ID NO: 2280105 - RNA, 19 nt, Artificial Sequence
  Description of Artificial Sequence: Synthetic oligonucleotide
  Antisense strand to SEQ ID NO: 2280104
auggcuauaguaauccaga

SEQ ID NO: 2280106 - RNA, 19 nt, Artificial Sequence
  Description of Artificial Sequence: Synthetic oligonucleotide
  Sense strand starting at position 3136 of SEQ ID NO: 1884633
ggauuacuauagccauaag

SEQ ID NO: 2280107 - RNA, 19 nt, Artificial Sequence
  Description of Artificial Sequence: Synthetic oligonucleotide
  Antisense strand to SEQ ID NO: 2280106
cuuauggcuauaguaaucc

SEQ ID NO: 2280108 - RNA, 19 nt, Artificial Sequence
  Description of Artificial Sequence: Synthetic oligonucleotide
  Sense strand starting at position 3223 of SEQ ID NO: 1884633
cggaguaacaggcaggauu

SEQ ID NO: 2280109 - RNA, 19 nt, Artificial Sequence
  Description of Artificial Sequence: Synthetic oligonucleotide
  Antisense strand to SEQ ID NO: 2280108
aauccugccuguuacuccg

SEQ ID NO: 2280110 - RNA, 19 nt, Artificial Sequence
  Description of Artificial Sequence: Synthetic oligonucleotide
  Sense strand starting at position 3236 of SEQ ID NO: 1884633
aggauuagccaaugccaga

SEQ ID NO: 2280111 - RNA, 19 nt, Artificial Sequence
  Description of Artificial Sequence: Synthetic oligonucleotide
  Antisense strand to SEQ ID NO: 2280110
ucuggcauuggcuaauccu

SEQ ID NO: 2280112 - RNA, 19 nt, Artificial Sequence
  Description of Artificial Sequence: Synthetic oligonucleotide
  Sense strand starting at position 3432 of SEQ ID NO: 1884633
ggaagcuucguuaguggua

SEQ ID NO: 2280113 - RNA, 19 nt, Artificial Sequence
  Description of Artificial Sequence: Synthetic oligonucleotide
  Antisense strand to SEQ ID NO: 2280112
uaccacuaacgaagcuucc

SEQ ID NO: 2280114 - RNA, 19 nt, Artificial Sequence
  Description of Artificial Sequence: Synthetic oligonucleotide
  Sense strand starting at position 3505 of SEQ ID NO: 1884633
uuguuauguaucggaaaca

SEQ ID NO: 2280115 - RNA, 19 nt, Artificial Sequence
  Description of Artificial Sequence: Synthetic oligonucleotide
  Antisense strand to SEQ ID NO: 2280114
uguuuccgauacauaacaa

SEQ ID NO: 2280116 - RNA, 19 nt, Artificial Sequence
  Description of Artificial Sequence: Synthetic oligonucleotide
  Sense strand starting at position 3515 of SEQ ID NO: 1884633
ucggaaacaaaucgguaaa

SEQ ID NO: 2280117 - RNA, 19 nt, Artificial Sequence
  Description of Artificial Sequence: Synthetic oligonucleotide
  Antisense strand to SEQ ID NO: 2280116
uuuaccgauuuguuuccga

SEQ ID NO: 2280118 - RNA, 19 nt, Artificial Sequence
  Description of Artificial Sequence: Synthetic oligonucleotide
  Sense strand starting at position 3596 of SEQ ID NO: 1884633
cucggagucaguuagggau

SEQ ID NO: 2280119 - RNA, 19 nt, Artificial Sequence
  Description of Artificial Sequence: Synthetic oligonucleotide
  Antisense strand to SEQ ID NO: 2280118
aucccuaacugacuccgag

SEQ ID NO: 2280120 - RNA, 19 nt, Artificial Sequence
  Description of Artificial Sequence: Synthetic oligonucleotide
  Sense strand starting at position 3609 of SEQ ID NO: 1884633
agggauuuauaacaguacu

SEQ ID NO: 2280121 - RNA, 19 nt, Artificial Sequence
  Description of Artificial Sequence: Synthetic oligonucleotide
  Antisense strand to SEQ ID NO: 2280120
aguacuguuauaaaucccu

SEQ ID NO: 2280122 - RNA, 19 nt, Artificial Sequence
  Description of Artificial Sequence: Synthetic oligonucleotide
  Sense strand starting at position 3640 of SEQ ID NO: 1884633
aggaaauauugauaagacu

SEQ ID NO: 2280123 - RNA, 19 nt, Artificial Sequence
  Description of Artificial Sequence: Synthetic oligonucleotide
  Antisense strand to SEQ ID NO: 2280122
agucuuaucaauauuuccu

SEQ ID NO: 2280124 - RNA, 19 nt, Artificial Sequence
  Description of Artificial Sequence: Synthetic oligonucleotide
  Sense strand starting at position 3670 of SEQ ID NO: 1884633
guaggaguccguuuguagu

SEQ ID NO: 2280125 - RNA, 19 nt, Artificial Sequence
  Description of Artificial Sequence: Synthetic oligonucleotide
  Antisense strand to SEQ ID NO: 2280124
acuacaaacggacuccuac

SEQ ID NO: 2280126 - RNA, 19 nt, Artificial Sequence
  Description of Artificial Sequence: Synthetic oligonucleotide
  Sense strand starting at position 3820 of SEQ ID NO: 1884633
cagugaucauucccuguga

SEQ ID NO: 2280127 - RNA, 19 nt, Artificial Sequence
  Description of Artificial Sequence: Synthetic oligonucleotide
  Antisense strand to SEQ ID NO: 2280126
ucacagggaaugaucacug

SEQ ID NO: 2280128 - RNA, 19 nt, Artificial Sequence
  Description of Artificial Sequence: Synthetic oligonucleotide
  Sense strand starting at position 3862 of SEQ ID NO: 1884633
acucgaguuaacuggguua

SEQ ID NO: 2280129 - RNA, 19 nt, Artificial Sequence
  Description of Artificial Sequence: Synthetic oligonucleotide
  Antisense strand to SEQ ID NO: 2280128
uaacccaguuaacucgagu

SEQ ID NO: 2280130 - RNA, 19 nt, Artificial Sequence
  Description of Artificial Sequence: Synthetic oligonucleotide
  Sense strand starting at position 3864 of SEQ ID NO: 1884633
ucgaguuaacuggguuaca

SEQ ID NO: 2280131 - RNA, 19 nt, Artificial Sequence
  Description of Artificial Sequence: Synthetic oligonucleotide
  Antisense strand to SEQ ID NO: 2280130
uguaacccaguuaacucga

SEQ ID NO: 2280132 - RNA, 19 nt, Artificial Sequence
  Description of Artificial Sequence: Synthetic oligonucleotide
  Sense strand starting at position 3865 of SEQ ID NO: 1884633
cgaguuaacuggguuacag

SEQ ID NO: 2280133 - RNA, 19 nt, Artificial Sequence
  Description of Artificial Sequence: Synthetic oligonucleotide
  Antisense strand to SEQ ID NO: 2280132
cuguaacccaguuaacucg

SEQ ID NO: 2280134 - RNA, 19 nt, Artificial Sequence
  Description of Artificial Sequence: Synthetic oligonucleotide
  Sense strand starting at position 3867 of SEQ ID NO: 1884633
aguuaacuggguuacagua

SEQ ID NO: 2280135 - RNA, 19 nt, Artificial Sequence
  Description of Artificial Sequence: Synthetic oligonucleotide
  Antisense strand to SEQ ID NO: 2280134
uacuguaacccaguuaacu

SEQ ID NO: 2280136 - RNA, 19 nt, Artificial Sequence
  Description of Artificial Sequence: Synthetic oligonucleotide
  Sense strand starting at position 6 of SEQ ID NO: 1884634
gcucaaagaccuugucaaa

SEQ ID NO: 2280137 - RNA, 19 nt, Artificial Sequence
  Description of Artificial Sequence: Synthetic oligonucleotide
  Antisense strand to SEQ ID NO: 2280136
uuugacaaggucuuugagc

SEQ ID NO: 2280138 - RNA, 19 nt, Artificial Sequence
  Description of Artificial Sequence: Synthetic oligonucleotide
  Sense strand starting at position 199 of SEQ ID NO: 1884634
gcuccaauugcucaaguuc

SEQ ID NO: 2280139 - RNA, 19 nt, Artificial Sequence
  Description of Artificial Sequence: Synthetic oligonucleotide
  Antisense strand to SEQ ID NO: 2280138
gaacuugagcaauuggagc

SEQ ID NO: 2280140 - RNA, 19 nt, Artificial Sequence
  Description of Artificial Sequence: Synthetic oligonucleotide
  Sense strand starting at position 298 of SEQ ID NO: 1884634
ccuggaucaucccuaaaug

SEQ ID NO: 2280141 - RNA, 19 nt, Artificial Sequence
  Description of Artificial Sequence: Synthetic oligonucleotide
  Antisense strand to SEQ ID NO: 2280140
cauuuagggaugauccagg

SEQ ID NO: 2280142 - RNA, 19 nt, Artificial Sequence
  Description of Artificial Sequence: Synthetic oligonucleotide
  Sense strand starting at position 505 of SEQ ID NO: 1884634
ugcccaaaucaggaguuga

SEQ ID NO: 2280143 - RNA, 19 nt, Artificial Sequence
  Description of Artificial Sequence: Synthetic oligonucleotide
  Antisense strand to SEQ ID NO: 2280142
ucaacuccugauuugggca

SEQ ID NO: 2280144 - RNA, 19 nt, Artificial Sequence
  Description of Artificial Sequence: Synthetic oligonucleotide
  Sense strand starting at position 518 of SEQ ID NO: 1884634
aguugaugaggagguucaa

SEQ ID NO: 2280145 - RNA, 19 nt, Artificial Sequence
  Description of Artificial Sequence: Synthetic oligonucleotide
  Antisense strand to SEQ ID NO: 2280144
uugaaccuccucaucaacu

SEQ ID NO: 2280146 - RNA, 19 nt, Artificial Sequence
  Description of Artificial Sequence: Synthetic oligonucleotide
  Sense strand starting at position 547 of SEQ ID NO: 1884634
auuccaauucuuggaggua

SEQ ID NO: 2280147 - RNA, 19 nt, Artificial Sequence
  Description of Artificial Sequence: Synthetic oligonucleotide
  Antisense strand to SEQ ID NO: 2280146
uaccuccaagaauuggaau

SEQ ID NO: 2280148 - RNA, 19 nt, Artificial Sequence
  Description of Artificial Sequence: Synthetic oligonucleotide
  Sense strand starting at position 617 of SEQ ID NO: 1884634
cuagaucuguuuccacagu

SEQ ID NO: 2280149 - RNA, 19 nt, Artificial Sequence
  Description of Artificial Sequence: Synthetic oligonucleotide
  Antisense strand to SEQ ID NO: 2280148
acuguggaaacagaucuag

SEQ ID NO: 2280150 - RNA, 19 nt, Artificial Sequence
  Description of Artificial Sequence: Synthetic oligonucleotide
  Sense strand starting at position 633 of SEQ ID NO: 1884634
aguucugcaacaugggaau

SEQ ID NO: 2280151 - RNA, 19 nt, Artificial Sequence
  Description of Artificial Sequence: Synthetic oligonucleotide
  Antisense strand to SEQ ID NO: 2280150
auucccauguugcagaacu

SEQ ID NO: 2280152 - RNA, 19 nt, Artificial Sequence
  Description of Artificial Sequence: Synthetic oligonucleotide
  Sense strand starting at position 644 of SEQ ID NO: 1884634
augggaaucacaugguuua

SEQ ID NO: 2280153 - RNA, 19 nt, Artificial Sequence
  Description of Artificial Sequence: Synthetic oligonucleotide
  Antisense strand to SEQ ID NO: 2280152
uaaaccaugugauucccau

SEQ ID NO: 2280154 - RNA, 19 nt, Artificial Sequence
  Description of Artificial Sequence: Synthetic oligonucleotide
  Sense strand starting at position 647 of SEQ ID NO: 1884634
ggaaucacaugguuuagau

SEQ ID NO: 2280155 - RNA, 19 nt, Artificial Sequence
  Description of Artificial Sequence: Synthetic oligonucleotide
  Antisense strand to SEQ ID NO: 2280154
aucuaaaccaugugauucc

SEQ ID NO: 2280156 - RNA, 19 nt, Artificial Sequence
  Description of Artificial Sequence: Synthetic oligonucleotide
  Sense strand starting at position 656 of SEQ ID NO: 1884634
ugguuuagauuaccucuaa

SEQ ID NO: 2280157 - RNA, 19 nt, Artificial Sequence
  Description of Artificial Sequence: Synthetic oligonucleotide
  Antisense strand to SEQ ID NO: 2280156
uuagagguaaucuaaacca

SEQ ID NO: 2280158 - RNA, 19 nt, Artificial Sequence
  Description of Artificial Sequence: Synthetic oligonucleotide
  Sense strand starting at position 657 of SEQ ID NO: 1884634
gguuuagauuaccucuaag

SEQ ID NO: 2280159 - RNA, 19 nt, Artificial Sequence
  Description of Artificial Sequence: Synthetic oligonucleotide
  Antisense strand to SEQ ID NO: 2280158
cuuagagguaaucuaaacc

SEQ ID NO: 2280160 - RNA, 19 nt, Artificial Sequence
  Description of Artificial Sequence: Synthetic oligonucleotide
  Sense strand starting at position 660 of SEQ ID NO: 1884634
uuagauuaccucuaagguc

SEQ ID NO: 2280161 - RNA, 19 nt, Artificial Sequence
  Description of Artificial Sequence: Synthetic oligonucleotide
  Antisense strand to SEQ ID NO: 2280160
gaccuuagagguaaucuaa

SEQ ID NO: 2280162 - RNA, 19 nt, Artificial Sequence
  Description of Artificial Sequence: Synthetic oligonucleotide
  Sense strand starting at position 764 of SEQ ID NO: 1884634
agguacuacuuagcugaaa

SEQ ID NO: 2280163 - RNA, 19 nt, Artificial Sequence
  Description of Artificial Sequence: Synthetic oligonucleotide
  Antisense strand to SEQ ID NO: 2280162
uuucagcuaaguaguaccu

SEQ ID NO: 2280164 - RNA, 19 nt, Artificial Sequence
  Description of Artificial Sequence: Synthetic oligonucleotide
  Sense strand starting at position 807 of SEQ ID NO: 1884634
gcuccaaagucccuagaga

SEQ ID NO: 2280165 - RNA, 19 nt, Artificial Sequence
  Description of Artificial Sequence: Synthetic oligonucleotide
  Antisense strand to SEQ ID NO: 2280164
ucucuagggacuuuggagc

SEQ ID NO: 2280166 - RNA, 19 nt, Artificial Sequence
  Description of Artificial Sequence: Synthetic oligonucleotide
  Sense strand starting at position 884 of SEQ ID NO: 1884634
ccugcucuguacuugauau

SEQ ID NO: 2280167 - RNA, 19 nt, Artificial Sequence
  Description of Artificial Sequence: Synthetic oligonucleotide
  Antisense strand to SEQ ID NO: 2280166
auaucaaguacagagcagg

SEQ ID NO: 2280168 - RNA, 19 nt, Artificial Sequence
  Description of Artificial Sequence: Synthetic oligonucleotide
  Sense strand starting at position 897 of SEQ ID NO: 1884634
ugauauacauugucucuuu

SEQ ID NO: 2280169 - RNA, 19 nt, Artificial Sequence
  Description of Artificial Sequence: Synthetic oligonucleotide
  Antisense strand to SEQ ID NO: 2280168
aaagagacaauguauauca

SEQ ID NO: 2280170 - RNA, 19 nt, Artificial Sequence
  Description of Artificial Sequence: Synthetic oligonucleotide
  Sense strand starting at position 923 of SEQ ID NO: 1884634
accauaauucuaugaggua

SEQ ID NO: 2280171 - RNA, 19 nt, Artificial Sequence
  Description of Artificial Sequence: Synthetic oligonucleotide
  Antisense strand to SEQ ID NO: 2280170
uaccucauagaauuauggu

SEQ ID NO: 2280172 - RNA, 19 nt, Artificial Sequence
  Description of Artificial Sequence: Synthetic oligonucleotide
  Sense strand starting at position 944 of SEQ ID NO: 1884634
ugcuacagccuguauauuu

SEQ ID NO: 2280173 - RNA, 19 nt, Artificial Sequence
  Description of Artificial Sequence: Synthetic oligonucleotide
  Antisense strand to SEQ ID NO: 2280172
aaauauacaggcuguagca

SEQ ID NO: 2280174 - RNA, 19 nt, Artificial Sequence
  Description of Artificial Sequence: Synthetic oligonucleotide
  Sense strand starting at position 1208 of SEQ ID NO: 1884634
gcagcaguuccugggaaac

SEQ ID NO: 2280175 - RNA, 19 nt, Artificial Sequence
  Description of Artificial Sequence: Synthetic oligonucleotide
  Antisense strand to SEQ ID NO: 2280174
guuucccaggaacugcugc

SEQ ID NO: 2280176 - RNA, 19 nt, Artificial Sequence
  Description of Artificial Sequence: Synthetic oligonucleotide
  Sense strand starting at position 1611 of SEQ ID NO: 1884634
acuaauuucggcugcguga

SEQ ID NO: 2280177 - RNA, 19 nt, Artificial Sequence
  Description of Artificial Sequence: Synthetic oligonucleotide
  Antisense strand to SEQ ID NO: 2280176
ucacgcagccgaaauuagu

SEQ ID NO: 2280178 - RNA, 19 nt, Artificial Sequence
  Description of Artificial Sequence: Synthetic oligonucleotide
  Sense strand starting at position 1636 of SEQ ID NO: 1884634
ccggaagagcucuggauac

SEQ ID NO: 2280179 - RNA, 19 nt, Artificial Sequence
  Description of Artificial Sequence: Synthetic oligonucleotide
  Antisense strand to SEQ ID NO: 2280178
guauccagagcucuuccgg

SEQ ID NO: 2280180 - RNA, 19 nt, Artificial Sequence
  Description of Artificial Sequence: Synthetic oligonucleotide
  Sense strand starting at position 1650 of SEQ ID NO: 1884634
gauaccugaguuugagcau

SEQ ID NO: 2280181 - RNA, 19 nt, Artificial Sequence
  Description of Artificial Sequence: Synthetic oligonucleotide
  Antisense strand to SEQ ID NO: 2280180
augcucaaacucagguauc

SEQ ID NO: 2280182 - RNA, 19 nt, Artificial Sequence
  Description of Artificial Sequence: Synthetic oligonucleotide
  Sense strand starting at position 1653 of SEQ ID NO: 1884634
accugaguuugagcauguu

SEQ ID NO: 2280183 - RNA, 19 nt, Artificial Sequence
  Description of Artificial Sequence: Synthetic oligonucleotide
  Antisense strand to SEQ ID NO: 2280182
aacaugcucaaacucaggu

SEQ ID NO: 2280184 - RNA, 19 nt, Artificial Sequence
  Description of Artificial Sequence: Synthetic oligonucleotide
  Sense strand starting at position 1656 of SEQ ID NO: 1884634
ugaguuugagcauguugga

SEQ ID NO: 2280185 - RNA, 19 nt, Artificial Sequence
  Description of Artificial Sequence: Synthetic oligonucleotide
  Antisense strand to SEQ ID NO: 2280184
uccaacaugcucaaacuca

SEQ ID NO: 2280186 - RNA, 19 nt, Artificial Sequence
  Description of Artificial Sequence: Synthetic oligonucleotide
  Sense strand starting at position 3262 of SEQ ID NO: 1884634
gccaguagauacuauuuaa

SEQ ID NO: 2280187 - RNA, 19 nt, Artificial Sequence
  Description of Artificial Sequence: Synthetic oligonucleotide
  Antisense strand to SEQ ID NO: 2280186
uuaaauaguaucuacuggc

SEQ ID NO: 2280188 - RNA, 19 nt, Artificial Sequence
  Description of Artificial Sequence: Synthetic oligonucleotide
  Sense strand starting at position 3357 of SEQ ID NO: 1884634
caagucugguaccugagau

SEQ ID NO: 2280189 - RNA, 19 nt, Artificial Sequence
  Description of Artificial Sequence: Synthetic oligonucleotide
  Antisense strand to SEQ ID NO: 2280188
aucucagguaccagacuug

SEQ ID NO: 2280190 - RNA, 19 nt, Artificial Sequence
  Description of Artificial Sequence: Synthetic oligonucleotide
  Sense strand starting at position 3422 of SEQ ID NO: 1884634
ugauuaauuugccagagcu

SEQ ID NO: 2280191 - RNA, 19 nt, Artificial Sequence
  Description of Artificial Sequence: Synthetic oligonucleotide
  Antisense strand to SEQ ID NO: 2280190
agcucuggcaaauuaauca

SEQ ID NO: 2280192 - RNA, 19 nt, Artificial Sequence
  Description of Artificial Sequence: Synthetic oligonucleotide
  Sense strand starting at position 3555 of SEQ ID NO: 1884634
uccgaagucuggagaaggu

SEQ ID NO: 2280193 - RNA, 19 nt, Artificial Sequence
  Description of Artificial Sequence: Synthetic oligonucleotide
  Antisense strand to SEQ ID NO: 2280192
accuucuccagacuucgga

SEQ ID NO: 2280194 - RNA, 19 nt, Artificial Sequence
  Description of Artificial Sequence: Synthetic oligonucleotide
  Sense strand starting at position 3581 of SEQ ID NO: 1884634
cagagugucuuguucuaaa

SEQ ID NO: 2280195 - RNA, 19 nt, Artificial Sequence
  Description of Artificial Sequence: Synthetic oligonucleotide
  Antisense strand to SEQ ID NO: 2280194
uuuagaacaagacacucug

SEQ ID NO: 2280196 - RNA, 19 nt, Artificial Sequence
  Description of Artificial Sequence: Synthetic oligonucleotide
  Sense strand starting at position 3739 of SEQ ID NO: 1884634
augucauccucuuugucua

SEQ ID NO: 2280197 - RNA, 19 nt, Artificial Sequence
  Description of Artificial Sequence: Synthetic oligonucleotide
  Antisense strand to SEQ ID NO: 2280196
uagacaaagaggaugacau

SEQ ID NO: 2280198 - RNA, 19 nt, Artificial Sequence
  Description of Artificial Sequence: Synthetic oligonucleotide
  Sense strand starting at position 3769 of SEQ ID NO: 1884634
gggugucugcuccuggcua

SEQ ID NO: 2280199 - RNA, 19 nt, Artificial Sequence
  Description of Artificial Sequence: Synthetic oligonucleotide
  Antisense strand to SEQ ID NO: 2280198
uagccaggagcagacaccc

SEQ ID NO: 2280200 - RNA, 19 nt, Artificial Sequence
  Description of Artificial Sequence: Synthetic oligonucleotide
  Sense strand starting at position 3782 of SEQ ID NO: 1884634
uggcuauuguucccuaucu

SEQ ID NO: 2280201 - RNA, 19 nt, Artificial Sequence
  Description of Artificial Sequence: Synthetic oligonucleotide
  Antisense strand to SEQ ID NO: 2280200
agauagggaacaauagcca

SEQ ID NO: 2280202 - RNA, 19 nt, Artificial Sequence
  Description of Artificial Sequence: Synthetic oligonucleotide
  Sense strand starting at position 3783 of SEQ ID NO: 1884634
ggcuauuguucccuaucuu

SEQ ID NO: 2280203 - RNA, 19 nt, Artificial Sequence
  Description of Artificial Sequence: Synthetic oligonucleotide
  Antisense strand to SEQ ID NO: 2280202
aagauagggaacaauagcc

SEQ ID NO: 2280204 - RNA, 19 nt, Artificial Sequence
  Description of Artificial Sequence: Synthetic oligonucleotide
  Sense strand starting at position 3784 of SEQ ID NO: 1884634
gcuauuguucccuaucuug

SEQ ID NO: 2280205 - RNA, 19 nt, Artificial Sequence
  Description of Artificial Sequence: Synthetic oligonucleotide
  Antisense strand to SEQ ID NO: 2280204
caagauagggaacaauagc

SEQ ID NO: 2280206 - RNA, 19 nt, Artificial Sequence
  Description of Artificial Sequence: Synthetic oligonucleotide
  Sense strand starting at position 3920 of SEQ ID NO: 1884634
uuaauucucuggugauuug

SEQ ID NO: 2280207 - RNA, 19 nt, Artificial Sequence
  Description of Artificial Sequence: Synthetic oligonucleotide
  Antisense strand to SEQ ID NO: 2280206
caaaucaccagagaauuaa

SEQ ID NO: 2280208 - RNA, 19 nt, Artificial Sequence
  Description of Artificial Sequence: Synthetic oligonucleotide
  Sense strand starting at position 3927 of SEQ ID NO: 1884634
ucuggugauuugggaaaua

SEQ ID NO: 2280209 - RNA, 19 nt, Artificial Sequence
  Description of Artificial Sequence: Synthetic oligonucleotide
  Antisense strand to SEQ ID NO: 2280208
uauuucccaaaucaccaga

SEQ ID NO: 2280210 - RNA, 19 nt, Artificial Sequence
  Description of Artificial Sequence: Synthetic oligonucleotide
  Sense strand starting at position 3936 of SEQ ID NO: 1884634
uugggaaauaugggcaauu

SEQ ID NO: 2280211 - RNA, 19 nt, Artificial Sequence
  Description of Artificial Sequence: Synthetic oligonucleotide
  Antisense strand to SEQ ID NO: 2280210
aauugcccauauuucccaa

SEQ ID NO: 2280212 - RNA, 19 nt, Artificial Sequence
  Description of Artificial Sequence: Synthetic oligonucleotide
  Sense strand starting at position 3945 of SEQ ID NO: 1884634
augggcaauucuccauaua

SEQ ID NO: 2280213 - RNA, 19 nt, Artificial Sequence
  Description of Artificial Sequence: Synthetic oligonucleotide
  Antisense strand to SEQ ID NO: 2280212
uauauggagaauugcccau

SEQ ID NO: 2280214 - RNA, 19 nt, Artificial Sequence
  Description of Artificial Sequence: Synthetic oligonucleotide
  Sense strand starting at position 3946 of SEQ ID NO: 1884634
ugggcaauucuccauauag

SEQ ID NO: 2280215 - RNA, 19 nt, Artificial Sequence
  Description of Artificial Sequence: Synthetic oligonucleotide
  Antisense strand to SEQ ID NO: 2280214
cuauauggagaauugccca

SEQ ID NO: 2280216 - RNA, 19 nt, Artificial Sequence
  Description of Artificial Sequence: Synthetic oligonucleotide
  Sense strand starting at position 193 of SEQ ID NO: 1884632
cccagauggcuuuaaacuc

SEQ ID NO: 2280217 - RNA, 19 nt, Artificial Sequence
  Description of Artificial Sequence: Synthetic oligonucleotide
  Antisense strand to SEQ ID NO: 2280216
gaguuuaaagccaucuggg

SEQ ID NO: 2280218 - RNA, 19 nt, Artificial Sequence
  Description of Artificial Sequence: Synthetic oligonucleotide
  Sense strand starting at position 264 of SEQ ID NO: 1884632
ggaguagugguggagguuu

SEQ ID NO: 2280219 - RNA, 19 nt, Artificial Sequence
  Description of Artificial Sequence: Synthetic oligonucleotide
  Antisense strand to SEQ ID NO: 2280218
aaaccuccaccacuacucc

SEQ ID NO: 2280220 - RNA, 19 nt, Artificial Sequence
  Description of Artificial Sequence: Synthetic oligonucleotide
  Sense strand starting at position 561 of SEQ ID NO: 1884632
gccaguauacgcuuugcuu

SEQ ID NO: 2280221 - RNA, 19 nt, Artificial Sequence
  Description of Artificial Sequence: Synthetic oligonucleotide
  Antisense strand to SEQ ID NO: 2280220
aagcaaagcguauacuggc

SEQ ID NO: 2280222 - RNA, 19 nt, Artificial Sequence
  Description of Artificial Sequence: Synthetic oligonucleotide
  Sense strand starting at position 562 of SEQ ID NO: 1884632
ccaguauacgcuuugcuuu

SEQ ID NO: 2280223 - RNA, 19 nt, Artificial Sequence
  Description of Artificial Sequence: Synthetic oligonucleotide
  Antisense strand to SEQ ID NO: 2280222
aaagcaaagcguauacugg

SEQ ID NO: 2280224 - RNA, 19 nt, Artificial Sequence
  Description of Artificial Sequence: Synthetic oligonucleotide
  Sense strand starting at position 599 of SEQ ID NO: 1884632
augagacucucagucacua

SEQ ID NO: 2280225 - RNA, 19 nt, Artificial Sequence
  Description of Artificial Sequence: Synthetic oligonucleotide
  Antisense strand to SEQ ID NO: 2280224
uagugacugagagucucau

SEQ ID NO: 2280226 - RNA, 19 nt, Artificial Sequence
  Description of Artificial Sequence: Synthetic oligonucleotide
  Sense strand starting at position 620 of SEQ ID NO: 1884632
caggucuaguuucuagaaa

SEQ ID NO: 2280227 - RNA, 19 nt, Artificial Sequence
  Description of Artificial Sequence: Synthetic oligonucleotide
  Antisense strand to SEQ ID NO: 2280226
uuucuagaaacuagaccug

SEQ ID NO: 2280228 - RNA, 19 nt, Artificial Sequence
  Description of Artificial Sequence: Synthetic oligonucleotide
  Sense strand starting at position 730 of SEQ ID NO: 1884632
gaggguaaauaauaggaua

SEQ ID NO: 2280229 - RNA, 19 nt, Artificial Sequence
  Description of Artificial Sequence: Synthetic oligonucleotide
  Antisense strand to SEQ ID NO: 2280228
uauccuauuauuuacccuc

SEQ ID NO: 2280230 - RNA, 19 nt, Artificial Sequence
  Description of Artificial Sequence: Synthetic oligonucleotide
  Sense strand starting at position 800 of SEQ ID NO: 1884632
ugugaaagcuuggcaaaug

SEQ ID NO: 2280231 - RNA, 19 nt, Artificial Sequence
  Description of Artificial Sequence: Synthetic oligonucleotide
  Antisense strand to SEQ ID NO: 2280230
cauuugccaagcuuucaca

SEQ ID NO: 2280232 - RNA, 19 nt, Artificial Sequence
  Description of Artificial Sequence: Synthetic oligonucleotide
  Sense strand starting at position 812 of SEQ ID NO: 1884632
gcaaauguaucacugagaa

SEQ ID NO: 2280233 - RNA, 19 nt, Artificial Sequence
  Description of Artificial Sequence: Synthetic oligonucleotide
  Antisense strand to SEQ ID NO: 2280232
uucucagugauacauuugc

SEQ ID NO: 2280234 - RNA, 19 nt, Artificial Sequence
  Description of Artificial Sequence: Synthetic oligonucleotide
  Sense strand starting at position 847 of SEQ ID NO: 1884632
auacccguccuuuaagaau

SEQ ID NO: 2280235 - RNA, 19 nt, Artificial Sequence
  Description of Artificial Sequence: Synthetic oligonucleotide
  Antisense strand to SEQ ID NO: 2280234
auucuuaaaggacggguau

SEQ ID NO: 2280236 - RNA, 19 nt, Artificial Sequence
  Description of Artificial Sequence: Synthetic oligonucleotide
  Sense strand starting at position 1658 of SEQ ID NO: 1884632
agaauagggucaggauuua

SEQ ID NO: 2280237 - RNA, 19 nt, Artificial Sequence
  Description of Artificial Sequence: Synthetic oligonucleotide
  Antisense strand to SEQ ID NO: 2280236
uaaauccugacccuauucu

SEQ ID NO: 2280238 - RNA, 19 nt, Artificial Sequence
  Description of Artificial Sequence: Synthetic oligonucleotide
  Sense strand starting at position 1683 of SEQ ID NO: 1884632
ugaagaagccucgggcaaa

SEQ ID NO: 2280239 - RNA, 19 nt, Artificial Sequence
  Description of Artificial Sequence: Synthetic oligonucleotide
  Antisense strand to SEQ ID NO: 2280238
uuugcccgaggcuucuuca

SEQ ID NO: 2280240 - RNA, 19 nt, Artificial Sequence
  Description of Artificial Sequence: Synthetic oligonucleotide
  Sense strand starting at position 1694 of SEQ ID NO: 1884632
cgggcaaacucuuuggaca

SEQ ID NO: 2280241 - RNA, 19 nt, Artificial Sequence
  Description of Artificial Sequence: Synthetic oligonucleotide
  Antisense strand to SEQ ID NO: 2280240
uguccaaagaguuugcccg

SEQ ID NO: 2280242 - RNA, 19 nt, Artificial Sequence
  Description of Artificial Sequence: Synthetic oligonucleotide
  Sense strand starting at position 1695 of SEQ ID NO: 1884632
gggcaaacucuuuggacag

SEQ ID NO: 2280243 - RNA, 19 nt, Artificial Sequence
  Description of Artificial Sequence: Synthetic oligonucleotide
  Antisense strand to SEQ ID NO: 2280242
cuguccaaagaguuugccc

SEQ ID NO: 2280244 - RNA, 19 nt, Artificial Sequence
  Description of Artificial Sequence: Synthetic oligonucleotide
  Sense strand starting at position 2540 of SEQ ID NO: 1884632
caccuucuggccugagaga

SEQ ID NO: 2280245 - RNA, 19 nt, Artificial Sequence
  Description of Artificial Sequence: Synthetic oligonucleotide
  Antisense strand to SEQ ID NO: 2280244
ucucucaggccagaaggug

SEQ ID NO: 2280246 - RNA, 19 nt, Artificial Sequence
  Description of Artificial Sequence: Synthetic oligonucleotide
  Sense strand starting at position 2824 of SEQ ID NO: 1884632
uuggcuucuccauaaggga

SEQ ID NO: 2280247 - RNA, 19 nt, Artificial Sequence
  Description of Artificial Sequence: Synthetic oligonucleotide
  Antisense strand to SEQ ID NO: 2280246
ucccuuauggagaagccaa

SEQ ID NO: 2280248 - RNA, 19 nt, Artificial Sequence
  Description of Artificial Sequence: Synthetic oligonucleotide
  Sense strand starting at position 2893 of SEQ ID NO: 1884632
gauaauaucugagaauagg

SEQ ID NO: 2280249 - RNA, 19 nt, Artificial Sequence
  Description of Artificial Sequence: Synthetic oligonucleotide
  Antisense strand to SEQ ID NO: 2280248
ccuauucucagauauuauc

SEQ ID NO: 2280250 - RNA, 19 nt, Artificial Sequence
  Description of Artificial Sequence: Synthetic oligonucleotide
  Sense strand starting at position 2982 of SEQ ID NO: 1884632
cagauugaguuucuggauu

SEQ ID NO: 2280251 - RNA, 19 nt, Artificial Sequence
  Description of Artificial Sequence: Synthetic oligonucleotide
  Antisense strand to SEQ ID NO: 2280250
aauccagaaacucaaucug

SEQ ID NO: 2280252 - RNA, 19 nt, Artificial Sequence
  Description of Artificial Sequence: Synthetic oligonucleotide
  Sense strand starting at position 2993 of SEQ ID NO: 1884632
ucuggauuacuauagccau

SEQ ID NO: 2280253 - RNA, 19 nt, Artificial Sequence
  Description of Artificial Sequence: Synthetic oligonucleotide
  Antisense strand to SEQ ID NO: 2280252
auggcuauaguaauccaga

SEQ ID NO: 2280254 - RNA, 19 nt, Artificial Sequence
  Description of Artificial Sequence: Synthetic oligonucleotide
  Sense strand starting at position 2996 of SEQ ID NO: 1884632
ggauuacuauagccauaag

SEQ ID NO: 2280255 - RNA, 19 nt, Artificial Sequence
  Description of Artificial Sequence: Synthetic oligonucleotide
  Antisense strand to SEQ ID NO: 2280254
cuuauggcuauaguaaucc

SEQ ID NO: 2280256 - RNA, 19 nt, Artificial Sequence
  Description of Artificial Sequence: Synthetic oligonucleotide
  Sense strand starting at position 3083 of SEQ ID NO: 1884632
cggaguaacaggcaggauu

SEQ ID NO: 2280257 - RNA, 19 nt, Artificial Sequence
  Description of Artificial Sequence: Synthetic oligonucleotide
  Antisense strand to SEQ ID NO: 2280256
aauccugccuguuacuccg

SEQ ID NO: 2280258 - RNA, 19 nt, Artificial Sequence
  Description of Artificial Sequence: Synthetic oligonucleotide
  Sense strand starting at position 3096 of SEQ ID NO: 1884632
aggauuagccaaugccaga

SEQ ID NO: 2280259 - RNA, 19 nt, Artificial Sequence
  Description of Artificial Sequence: Synthetic oligonucleotide
  Antisense strand to SEQ ID NO: 2280258
ucuggcauuggcuaauccu

SEQ ID NO: 2280260 - RNA, 19 nt, Artificial Sequence
  Description of Artificial Sequence: Synthetic oligonucleotide
  Sense strand starting at position 3292 of SEQ ID NO: 1884632
ggaagcuucguuaguggua

SEQ ID NO: 2280261 - RNA, 19 nt, Artificial Sequence
  Description of Artificial Sequence: Synthetic oligonucleotide
  Antisense strand to SEQ ID NO: 2280260
uaccacuaacgaagcuucc

SEQ ID NO: 2280262 - RNA, 19 nt, Artificial Sequence
  Description of Artificial Sequence: Synthetic oligonucleotide
  Sense strand starting at position 3365 of SEQ ID NO: 1884632
uuguuauguaucggaaaca

SEQ ID NO: 2280263 - RNA, 19 nt, Artificial Sequence
  Description of Artificial Sequence: Synthetic oligonucleotide
  Antisense strand to SEQ ID NO: 2280262
uguuuccgauacauaacaa

SEQ ID NO: 2280264 - RNA, 19 nt, Artificial Sequence
  Description of Artificial Sequence: Synthetic oligonucleotide
  Sense strand starting at position 3375 of SEQ ID NO: 1884632
ucggaaacaaaucgguaaa

SEQ ID NO: 2280265 - RNA, 19 nt, Artificial Sequence
  Description of Artificial Sequence: Synthetic oligonucleotide
  Antisense strand to SEQ ID NO: 2280264
uuuaccgauuuguuuccga

SEQ ID NO: 2280266 - RNA, 19 nt, Artificial Sequence
  Description of Artificial Sequence: Synthetic oligonucleotide
  Sense strand starting at position 3456 of SEQ ID NO: 1884632
cucggagucaguuagggau

SEQ ID NO: 2280267 - RNA, 19 nt, Artificial Sequence
  Description of Artificial Sequence: Synthetic oligonucleotide
  Antisense strand to SEQ ID NO: 2280266
aucccuaacugacuccgag

SEQ ID NO: 2280268 - RNA, 19 nt, Artificial Sequence
  Description of Artificial Sequence: Synthetic oligonucleotide
  Sense strand starting at position 3469 of SEQ ID NO: 1884632
agggauuuauaacaguacu

SEQ ID NO: 2280269 - RNA, 19 nt, Artificial Sequence
  Description of Artificial Sequence: Synthetic oligonucleotide
  Antisense strand to SEQ ID NO: 2280268
aguacuguuauaaaucccu

SEQ ID NO: 2280270 - RNA, 19 nt, Artificial Sequence
  Description of Artificial Sequence: Synthetic oligonucleotide
  Sense strand starting at position 3500 of SEQ ID NO: 1884632
aggaaauauugauaagacu

SEQ ID NO: 2280271 - RNA, 19 nt, Artificial Sequence
  Description of Artificial Sequence: Synthetic oligonucleotide
  Antisense strand to SEQ ID NO: 2280270
agucuuaucaauauuuccu

SEQ ID NO: 2280272 - RNA, 19 nt, Artificial Sequence
  Description of Artificial Sequence: Synthetic oligonucleotide
  Sense strand starting at position 3530 of SEQ ID NO: 1884632
guaggaguccguuuguagu

SEQ ID NO: 2280273 - RNA, 19 nt, Artificial Sequence
  Description of Artificial Sequence: Synthetic oligonucleotide
  Antisense strand to SEQ ID NO: 2280272
acuacaaacggacuccuac

SEQ ID NO: 2280274 - RNA, 19 nt, Artificial Sequence
  Description of Artificial Sequence: Synthetic oligonucleotide
  Sense strand starting at position 3680 of SEQ ID NO: 1884632
cagugaucauucccuguga

SEQ ID NO: 2280275 - RNA, 19 nt, Artificial Sequence
  Description of Artificial Sequence: Synthetic oligonucleotide
  Antisense strand to SEQ ID NO: 2280274
ucacagggaaugaucacug

SEQ ID NO: 2280276 - RNA, 19 nt, Artificial Sequence
  Description of Artificial Sequence: Synthetic oligonucleotide
  Sense strand starting at position 3722 of SEQ ID NO: 1884632
acucgaguuaacuggguua

SEQ ID NO: 2280277 - RNA, 19 nt, Artificial Sequence
  Description of Artificial Sequence: Synthetic oligonucleotide
  Antisense strand to SEQ ID NO: 2280276
uaacccaguuaacucgagu

SEQ ID NO: 2280278 - RNA, 19 nt, Artificial Sequence
  Description of Artificial Sequence: Synthetic oligonucleotide
  Sense strand starting at position 3724 of SEQ ID NO: 1884632
ucgaguuaacuggguuaca

SEQ ID NO: 2280279 - RNA, 19 nt, Artificial Sequence
  Description of Artificial Sequence: Synthetic oligonucleotide
  Antisense strand to SEQ ID NO: 2280278
uguaacccaguuaacucga

SEQ ID NO: 2280280 - RNA, 19 nt, Artificial Sequence
  Description of Artificial Sequence: Synthetic oligonucleotide
  Sense strand starting at position 3725 of SEQ ID NO: 1884632
cgaguuaacuggguuacag

SEQ ID NO: 2280281 - RNA, 19 nt, Artificial Sequence
  Description of Artificial Sequence: Synthetic oligonucleotide
  Antisense strand to SEQ ID NO: 2280280
cuguaacccaguuaacucg

SEQ ID NO: 2280282 - RNA, 19 nt, Artificial Sequence
  Description of Artificial Sequence: Synthetic oligonucleotide
  Sense strand starting at position 3727 of SEQ ID NO: 1884632
aguuaacuggguuacagua

SEQ ID NO: 2280283 - RNA, 19 nt, Artificial Sequence
  Description of Artificial Sequence: Synthetic oligonucleotide
  Antisense strand to SEQ ID NO: 2280282
uacuguaacccaguuaacu

SEQ ID NO: 2280284 - RNA, 19 nt, Artificial Sequence
  Description of Artificial Sequence: Synthetic oligonucleotide
  Sense strand starting at position 3878 of SEQ ID NO: 1884632
acacuugguucuguacaca

SEQ ID NO: 2280285 - RNA, 19 nt, Artificial Sequence
  Description of Artificial Sequence: Synthetic oligonucleotide
  Antisense strand to SEQ ID NO: 2280284
uguguacagaaccaagugu

SEQ ID NO: 2280286 - RNA, 19 nt, Artificial Sequence
  Description of Artificial Sequence: Synthetic oligonucleotide
  Sense strand starting at position 3888 of SEQ ID NO: 1884632
cuguacacaucaguaagau

SEQ ID NO: 2280287 - RNA, 19 nt, Artificial Sequence
  Description of Artificial Sequence: Synthetic oligonucleotide
  Antisense strand to SEQ ID NO: 2280286
aucuuacugauguguacag

SEQ ID NO: 2280288 - RNA, 19 nt, Artificial Sequence
  Description of Artificial Sequence: Synthetic oligonucleotide
  Sense strand starting at position 3889 of SEQ ID NO: 1884632
uguacacaucaguaagauu

SEQ ID NO: 2280289 - RNA, 19 nt, Artificial Sequence
  Description of Artificial Sequence: Synthetic oligonucleotide
  Antisense strand to SEQ ID NO: 2280288
aaucuuacugauguguaca

SEQ ID NO: 2280290 - RNA, 19 nt, Artificial Sequence
  Description of Artificial Sequence: Synthetic oligonucleotide
  Sense strand starting at position 3897 of SEQ ID NO: 1884632
ucaguaagauuguuacuuu

SEQ ID NO: 2280291 - RNA, 19 nt, Artificial Sequence
  Description of Artificial Sequence: Synthetic oligonucleotide
  Antisense strand to SEQ ID NO: 2280290
aaaguaacaaucuuacuga

SEQ ID NO: 2280292 - RNA, 19 nt, Artificial Sequence
  Description of Artificial Sequence: Synthetic oligonucleotide
  Sense strand starting at position 3913 of SEQ ID NO: 1884632
uuuguucuuguauagauga

SEQ ID NO: 2280293 - RNA, 19 nt, Artificial Sequence
  Description of Artificial Sequence: Synthetic oligonucleotide
  Antisense strand to SEQ ID NO: 2280292
ucaucuauacaagaacaaa

SEQ ID NO: 2280294 - RNA, 19 nt, Artificial Sequence
  Description of Artificial Sequence: Synthetic oligonucleotide
  Sense strand starting at position 3963 of SEQ ID NO: 1884632
agagaaccguagucuaaau

SEQ ID NO: 2280295 - RNA, 19 nt, Artificial Sequence
  Description of Artificial Sequence: Synthetic oligonucleotide
  Antisense strand to SEQ ID NO: 2280294
auuuagacuacgguucucu

SEQ ID NO: 2280296 - RNA, 19 nt, Artificial Sequence
  Description of Artificial Sequence: Synthetic oligonucleotide
  Sense strand starting at position 369 of SEQ ID NO: 1884636
accucagguaguugagaua

SEQ ID NO: 2280297 - RNA, 19 nt, Artificial Sequence
  Description of Artificial Sequence: Synthetic oligonucleotide
  Antisense strand to SEQ ID NO: 2280296
uaucucaacuaccugaggu

SEQ ID NO: 2280298 - RNA, 19 nt, Artificial Sequence
  Description of Artificial Sequence: Synthetic oligonucleotide
  Sense strand starting at position 864 of SEQ ID NO: 1884636
gcuggaagucgcuauagag

SEQ ID NO: 2280299 - RNA, 19 nt, Artificial Sequence
  Description of Artificial Sequence: Synthetic oligonucleotide
  Antisense strand to SEQ ID NO: 2280298
cucuauagcgacuuccagc

SEQ ID NO: 2280300 - RNA, 19 nt, Artificial Sequence
  Description of Artificial Sequence: Synthetic oligonucleotide
  Sense strand starting at position 1056 of SEQ ID NO: 1884636
cugccaauaaggcgugauu

SEQ ID NO: 2280301 - RNA, 19 nt, Artificial Sequence
  Description of Artificial Sequence: Synthetic oligonucleotide
  Antisense strand to SEQ ID NO: 2280300
aaucacgccuuauuggcag

SEQ ID NO: 2280302 - RNA, 19 nt, Artificial Sequence
  Description of Artificial Sequence: Synthetic oligonucleotide
  Sense strand starting at position 1058 of SEQ ID NO: 1884636
gccaauaaggcgugauuga

SEQ ID NO: 2280303 - RNA, 19 nt, Artificial Sequence
  Description of Artificial Sequence: Synthetic oligonucleotide
  Antisense strand to SEQ ID NO: 2280302
ucaaucacgccuuauuggc

SEQ ID NO: 2280304 - RNA, 19 nt, Artificial Sequence
  Description of Artificial Sequence: Synthetic oligonucleotide
  Sense strand starting at position 1059 of SEQ ID NO: 1884636
ccaauaaggcgugauugag

SEQ ID NO: 2280305 - RNA, 19 nt, Artificial Sequence
  Description of Artificial Sequence: Synthetic oligonucleotide
  Antisense strand to SEQ ID NO: 2280304
cucaaucacgccuuauugg

SEQ ID NO: 2280306 - RNA, 19 nt, Artificial Sequence
  Description of Artificial Sequence: Synthetic oligonucleotide
  Sense strand starting at position 1479 of SEQ ID NO: 1884636
cggagcugucuccaaccuu

SEQ ID NO: 2280307 - RNA, 19 nt, Artificial Sequence
  Description of Artificial Sequence: Synthetic oligonucleotide
  Antisense strand to SEQ ID NO: 2280306
aagguuggagacagcuccg

SEQ ID NO: 2280308 - RNA, 19 nt, Artificial Sequence
  Description of Artificial Sequence: Synthetic oligonucleotide
  Sense strand starting at position 1550 of SEQ ID NO: 1884636
gccgguggaucuucgggaa

SEQ ID NO: 2280309 - RNA, 19 nt, Artificial Sequence
  Description of Artificial Sequence: Synthetic oligonucleotide
  Antisense strand to SEQ ID NO: 2280308
uucccgaagauccaccggc

SEQ ID NO: 2280310 - RNA, 19 nt, Artificial Sequence
  Description of Artificial Sequence: Synthetic oligonucleotide
  Sense strand starting at position 1850 of SEQ ID NO: 1884636
auagguauggccgaaacuu

SEQ ID NO: 2280311 - RNA, 19 nt, Artificial Sequence
  Description of Artificial Sequence: Synthetic oligonucleotide
  Antisense strand to SEQ ID NO: 2280310
aaguuucggccauaccuau

SEQ ID NO: 2280312 - RNA, 19 nt, Artificial Sequence
  Description of Artificial Sequence: Synthetic oligonucleotide
  Sense strand starting at position 2815 of SEQ ID NO: 1884636
cccaauuaccgguaggauc

SEQ ID NO: 2280313 - RNA, 19 nt, Artificial Sequence
  Description of Artificial Sequence: Synthetic oligonucleotide
  Antisense strand to SEQ ID NO: 2280312
gauccuaccgguaauuggg

SEQ ID NO: 2280314 - RNA, 19 nt, Artificial Sequence
  Description of Artificial Sequence: Synthetic oligonucleotide
  Sense strand starting at position 2822 of SEQ ID NO: 1884636
accgguaggaucugaaacu

SEQ ID NO: 2280315 - RNA, 19 nt, Artificial Sequence
  Description of Artificial Sequence: Synthetic oligonucleotide
  Antisense strand to SEQ ID NO: 2280314
aguuucagauccuaccggu

SEQ ID NO: 2280316 - RNA, 19 nt, Artificial Sequence
  Description of Artificial Sequence: Synthetic oligonucleotide
  Sense strand starting at position 2861 of SEQ ID NO: 1884636
cguuauucugaaugcuacu

SEQ ID NO: 2280317 - RNA, 19 nt, Artificial Sequence
  Description of Artificial Sequence: Synthetic oligonucleotide
  Antisense strand to SEQ ID NO: 2280316
aguagcauucagaauaacg

SEQ ID NO: 2280318 - RNA, 19 nt, Artificial Sequence
  Description of Artificial Sequence: Synthetic oligonucleotide
  Sense strand starting at position 2884 of SEQ ID NO: 1884636
auagcagguucuuugggau

SEQ ID NO: 2280319 - RNA, 19 nt, Artificial Sequence
  Description of Artificial Sequence: Synthetic oligonucleotide
  Antisense strand to SEQ ID NO: 2280318
aucccaaagaaccugcuau

SEQ ID NO: 2280320 - RNA, 19 nt, Artificial Sequence
  Description of Artificial Sequence: Synthetic oligonucleotide
  Sense strand starting at position 2949 of SEQ ID NO: 1884636
ugcccuaucuaauuggaaa

SEQ ID NO: 2280321 - RNA, 19 nt, Artificial Sequence
  Description of Artificial Sequence: Synthetic oligonucleotide
  Antisense strand to SEQ ID NO: 2280320
uuuccaauuagauagggca

SEQ ID NO: 2280322 - RNA, 19 nt, Artificial Sequence
  Description of Artificial Sequence: Synthetic oligonucleotide
  Sense strand starting at position 2969 of SEQ ID NO: 1884636
augaauagauucuaucaga

SEQ ID NO: 2280323 - RNA, 19 nt, Artificial Sequence
  Description of Artificial Sequence: Synthetic oligonucleotide
  Antisense strand to SEQ ID NO: 2280322
ucugauagaaucuauucau

SEQ ID NO: 2280324 - RNA, 19 nt, Artificial Sequence
  Description of Artificial Sequence: Synthetic oligonucleotide
  Sense strand starting at position 2974 of SEQ ID NO: 1884636
uagauucuaucagaaguag

SEQ ID NO: 2280325 - RNA, 19 nt, Artificial Sequence
  Description of Artificial Sequence: Synthetic oligonucleotide
  Antisense strand to SEQ ID NO: 2280324
cuacuucugauagaaucua

SEQ ID NO: 2280326 - RNA, 19 nt, Artificial Sequence
  Description of Artificial Sequence: Synthetic oligonucleotide
  Sense strand starting at position 3146 of SEQ ID NO: 1884636
caaguuucuccugcugcga

SEQ ID NO: 2280327 - RNA, 19 nt, Artificial Sequence
  Description of Artificial Sequence: Synthetic oligonucleotide
  Antisense strand to SEQ ID NO: 2280326
ucgcagcaggagaaacuug

SEQ ID NO: 2280328 - RNA, 19 nt, Artificial Sequence
  Description of Artificial Sequence: Synthetic oligonucleotide
  Sense strand starting at position 3186 of SEQ ID NO: 1884636
gaguauccucagcgugaca

SEQ ID NO: 2280329 - RNA, 19 nt, Artificial Sequence
  Description of Artificial Sequence: Synthetic oligonucleotide
  Antisense strand to SEQ ID NO: 2280328
ugucacgcugaggauacuc

SEQ ID NO: 2280330 - RNA, 19 nt, Artificial Sequence
  Description of Artificial Sequence: Synthetic oligonucleotide
  Sense strand starting at position 3188 of SEQ ID NO: 1884636
guauccucagcgugacaaa

SEQ ID NO: 2280331 - RNA, 19 nt, Artificial Sequence
  Description of Artificial Sequence: Synthetic oligonucleotide
  Antisense strand to SEQ ID NO: 2280330
uuugucacgcugaggauac

SEQ ID NO: 2280332 - RNA, 19 nt, Artificial Sequence
  Description of Artificial Sequence: Synthetic oligonucleotide
  Sense strand starting at position 3227 of SEQ ID NO: 1884636
gguaacaccucuguaucua

SEQ ID NO: 2280333 - RNA, 19 nt, Artificial Sequence
  Description of Artificial Sequence: Synthetic oligonucleotide
  Antisense strand to SEQ ID NO: 2280332
uagauacagagguguuacc

SEQ ID NO: 2280334 - RNA, 19 nt, Artificial Sequence
  Description of Artificial Sequence: Synthetic oligonucleotide
  Sense strand starting at position 3228 of SEQ ID NO: 1884636
guaacaccucuguaucuau

SEQ ID NO: 2280335 - RNA, 19 nt, Artificial Sequence
  Description of Artificial Sequence: Synthetic oligonucleotide
  Antisense strand to SEQ ID NO: 2280334
auagauacagagguguuac

SEQ ID NO: 2280336 - RNA, 19 nt, Artificial Sequence
  Description of Artificial Sequence: Synthetic oligonucleotide
  Sense strand starting at position 3231 of SEQ ID NO: 1884636
acaccucuguaucuaugau

SEQ ID NO: 2280337 - RNA, 19 nt, Artificial Sequence
  Description of Artificial Sequence: Synthetic oligonucleotide
  Antisense strand to SEQ ID NO: 2280336
aucauagauacagaggugu

SEQ ID NO: 2280338 - RNA, 19 nt, Artificial Sequence
  Description of Artificial Sequence: Synthetic oligonucleotide
  Sense strand starting at position 3238 of SEQ ID NO: 1884636
uguaucuaugauggaaguu

SEQ ID NO: 2280339 - RNA, 19 nt, Artificial Sequence
  Description of Artificial Sequence: Synthetic oligonucleotide
  Antisense strand to SEQ ID NO: 2280338
aacuuccaucauagauaca

SEQ ID NO: 2280340 - RNA, 19 nt, Artificial Sequence
  Description of Artificial Sequence: Synthetic oligonucleotide
  Sense strand starting at position 3239 of SEQ ID NO: 1884636
guaucuaugauggaaguuu

SEQ ID NO: 2280341 - RNA, 19 nt, Artificial Sequence
  Description of Artificial Sequence: Synthetic oligonucleotide
  Antisense strand to SEQ ID NO: 2280340
aaacuuccaucauagauac

SEQ ID NO: 2280342 - RNA, 19 nt, Artificial Sequence
  Description of Artificial Sequence: Synthetic oligonucleotide
  Sense strand starting at position 3276 of SEQ ID NO: 1884636
uucgauuugucuuaaggaa

SEQ ID NO: 2280343 - RNA, 19 nt, Artificial Sequence
  Description of Artificial Sequence: Synthetic oligonucleotide
  Antisense strand to SEQ ID NO: 2280342
uuccuuaagacaaaucgaa

SEQ ID NO: 2280344 - RNA, 19 nt, Artificial Sequence
  Description of Artificial Sequence: Synthetic oligonucleotide
  Sense strand starting at position 3288 of SEQ ID NO: 1884636
uaaggaauguguuccaauu

SEQ ID NO: 2280345 - RNA, 19 nt, Artificial Sequence
  Description of Artificial Sequence: Synthetic oligonucleotide
  Antisense strand to SEQ ID NO: 2280344
aauuggaacacauuccuua

SEQ ID NO: 2280346 - RNA, 19 nt, Artificial Sequence
  Description of Artificial Sequence: Synthetic oligonucleotide
  Sense strand starting at position 3324 of SEQ ID NO: 1884636
uaaggaaaguuuccuuuag

SEQ ID NO: 2280347 - RNA, 19 nt, Artificial Sequence
  Description of Artificial Sequence: Synthetic oligonucleotide
  Antisense strand to SEQ ID NO: 2280346
cuaaaggaaacuuuccuua

SEQ ID NO: 2280348 - RNA, 19 nt, Artificial Sequence
  Description of Artificial Sequence: Synthetic oligonucleotide
  Sense strand starting at position 3326 of SEQ ID NO: 1884636
aggaaaguuuccuuuagcu

SEQ ID NO: 2280349 - RNA, 19 nt, Artificial Sequence
  Description of Artificial Sequence: Synthetic oligonucleotide
  Antisense strand to SEQ ID NO: 2280348
agcuaaaggaaacuuuccu

SEQ ID NO: 2280350 - RNA, 19 nt, Artificial Sequence
  Description of Artificial Sequence: Synthetic oligonucleotide
  Sense strand starting at position 3346 of SEQ ID NO: 1884636
cagcuuauacagugugcua

SEQ ID NO: 2280351 - RNA, 19 nt, Artificial Sequence
  Description of Artificial Sequence: Synthetic oligonucleotide
  Antisense strand to SEQ ID NO: 2280350
uagcacacuguauaagcug

SEQ ID NO: 2280352 - RNA, 19 nt, Artificial Sequence
  Description of Artificial Sequence: Synthetic oligonucleotide
  Sense strand starting at position 3380 of SEQ ID NO: 1884636
aguagagauguugaacagu

SEQ ID NO: 2280353 - RNA, 19 nt, Artificial Sequence
  Description of Artificial Sequence: Synthetic oligonucleotide
  Antisense strand to SEQ ID NO: 2280352
acuguucaacaucucuacu

SEQ ID NO: 2280354 - RNA, 19 nt, Artificial Sequence
  Description of Artificial Sequence: Synthetic oligonucleotide
  Sense strand starting at position 3430 of SEQ ID NO: 1884636
aguaauuaucuuugagcuu

SEQ ID NO: 2280355 - RNA, 19 nt, Artificial Sequence
  Description of Artificial Sequence: Synthetic oligonucleotide
  Antisense strand to SEQ ID NO: 2280354
aagcucaaagauaauuacu

SEQ ID NO: 2280356 - RNA, 19 nt, Artificial Sequence
  Description of Artificial Sequence: Synthetic oligonucleotide
  Sense strand starting at position 3492 of SEQ ID NO: 1884636
ggaagaauauugcaauaua

SEQ ID NO: 2280357 - RNA, 19 nt, Artificial Sequence
  Description of Artificial Sequence: Synthetic oligonucleotide
  Antisense strand to SEQ ID NO: 2280356
uauauugcaauauucuucc

SEQ ID NO: 2280358 - RNA, 19 nt, Artificial Sequence
  Description of Artificial Sequence: Synthetic oligonucleotide
  Sense strand starting at position 3754 of SEQ ID NO: 1884636
gggcuauaugagugagaaa

SEQ ID NO: 2280359 - RNA, 19 nt, Artificial Sequence
  Description of Artificial Sequence: Synthetic oligonucleotide
  Antisense strand to SEQ ID NO: 2280358
uuucucacucauauagccc

SEQ ID NO: 2280360 - RNA, 19 nt, Artificial Sequence
  Description of Artificial Sequence: Synthetic oligonucleotide
  Sense strand starting at position 3757 of SEQ ID NO: 1884636
cuauaugagugagaaacaa

SEQ ID NO: 2280361 - RNA, 19 nt, Artificial Sequence
  Description of Artificial Sequence: Synthetic oligonucleotide
  Antisense strand to SEQ ID NO: 2280360
uuguuucucacucauauag

SEQ ID NO: 2280362 - RNA, 19 nt, Artificial Sequence
  Description of Artificial Sequence: Synthetic oligonucleotide
  Sense strand starting at position 3780 of SEQ ID NO: 1884636
uuaucauguuagguuacua

SEQ ID NO: 2280363 - RNA, 19 nt, Artificial Sequence
  Description of Artificial Sequence: Synthetic oligonucleotide
  Antisense strand to SEQ ID NO: 2280362
uaguaaccuaacaugauaa

SEQ ID NO: 2280364 - RNA, 19 nt, Artificial Sequence
  Description of Artificial Sequence: Synthetic oligonucleotide
  Sense strand starting at position 3802 of SEQ ID NO: 1884636
uuuggaguugguuguucua

SEQ ID NO: 2280365 - RNA, 19 nt, Artificial Sequence
  Description of Artificial Sequence: Synthetic oligonucleotide
  Antisense strand to SEQ ID NO: 2280364
uagaacaaccaacuccaaa

SEQ ID NO: 2280366 - RNA, 19 nt, Artificial Sequence
  Description of Artificial Sequence: Synthetic oligonucleotide
  Sense strand starting at position 3804 of SEQ ID NO: 1884636
uggaguugguuguucuagu

SEQ ID NO: 2280367 - RNA, 19 nt, Artificial Sequence
  Description of Artificial Sequence: Synthetic oligonucleotide
  Antisense strand to SEQ ID NO: 2280366
acuagaacaaccaacucca

SEQ ID NO: 2280368 - RNA, 19 nt, Artificial Sequence
  Description of Artificial Sequence: Synthetic oligonucleotide
  Sense strand starting at position 3805 of SEQ ID NO: 1884636
ggaguugguuguucuagua

SEQ ID NO: 2280369 - RNA, 19 nt, Artificial Sequence
  Description of Artificial Sequence: Synthetic oligonucleotide
  Antisense strand to SEQ ID NO: 2280368
uacuagaacaaccaacucc

SEQ ID NO: 2280370 - RNA, 19 nt, Artificial Sequence
  Description of Artificial Sequence: Synthetic oligonucleotide
  Sense strand starting at position 3821 of SEQ ID NO: 1884636
guaaauaguuuacucugau

SEQ ID NO: 2280371 - RNA, 19 nt, Artificial Sequence
  Description of Artificial Sequence: Synthetic oligonucleotide
  Antisense strand to SEQ ID NO: 2280370
aucagaguaaacuauuuac

SEQ ID NO: 2280372 - RNA, 19 nt, Artificial Sequence
  Description of Artificial Sequence: Synthetic oligonucleotide
  Sense strand starting at position 3852 of SEQ ID NO: 1884636
uguggaaguuaggcagaua

SEQ ID NO: 2280373 - RNA, 19 nt, Artificial Sequence
  Description of Artificial Sequence: Synthetic oligonucleotide
  Antisense strand to SEQ ID NO: 2280372
uaucugccuaacuuccaca

SEQ ID NO: 2280374 - RNA, 19 nt, Artificial Sequence
  Description of Artificial Sequence: Synthetic oligonucleotide
  Sense strand starting at position 3880 of SEQ ID NO: 1884636
uaaagagaauucugggaag

SEQ ID NO: 2280375 - RNA, 19 nt, Artificial Sequence
  Description of Artificial Sequence: Synthetic oligonucleotide
  Antisense strand to SEQ ID NO: 2280374
cuucccagaauucucuuua

SEQ ID NO: 2280376 - RNA, 19 nt, Artificial Sequence
  Description of Artificial Sequence: Synthetic oligonucleotide
  Sense strand starting at position 72 of SEQ ID NO: 1884637
aucauaguauuugaagacu

SEQ ID NO: 2280377 - RNA, 19 nt, Artificial Sequence
  Description of Artificial Sequence: Synthetic oligonucleotide
  Antisense strand to SEQ ID NO: 2280376
agucuucaaauacuaugau

SEQ ID NO: 2280378 - RNA, 19 nt, Artificial Sequence
  Description of Artificial Sequence: Synthetic oligonucleotide
  Sense strand starting at position 110 of SEQ ID NO: 1884637
ggcaauggaucucccauau

SEQ ID NO: 2280379 - RNA, 19 nt, Artificial Sequence
  Description of Artificial Sequence: Synthetic oligonucleotide
  Antisense strand to SEQ ID NO: 2280378
auaugggagauccauugcc

SEQ ID NO: 2280380 - RNA, 19 nt, Artificial Sequence
  Description of Artificial Sequence: Synthetic oligonucleotide
  Sense strand starting at position 132 of SEQ ID NO: 1884637
gaaaguguugggcauugau

SEQ ID NO: 2280381 - RNA, 19 nt, Artificial Sequence
  Description of Artificial Sequence: Synthetic oligonucleotide
  Antisense strand to SEQ ID NO: 2280380
aucaaugcccaacacuuuc

SEQ ID NO: 2280382 - RNA, 19 nt, Artificial Sequence
  Description of Artificial Sequence: Synthetic oligonucleotide
  Sense strand starting at position 172 of SEQ ID NO: 1884637
gugugacagguguaaauca

SEQ ID NO: 2280383 - RNA, 19 nt, Artificial Sequence
  Description of Artificial Sequence: Synthetic oligonucleotide
  Antisense strand to SEQ ID NO: 2280382
ugauuuacaccugucacac

SEQ ID NO: 2280384 - RNA, 19 nt, Artificial Sequence
  Description of Artificial Sequence: Synthetic oligonucleotide
  Sense strand starting at position 177 of SEQ ID NO: 1884637
acagguguaaaucagugau

SEQ ID NO: 2280385 - RNA, 19 nt, Artificial Sequence
  Description of Artificial Sequence: Synthetic oligonucleotide
  Antisense strand to SEQ ID NO: 2280384
aucacugauuuacaccugu

SEQ ID NO: 2280386 - RNA, 19 nt, Artificial Sequence
  Description of Artificial Sequence: Synthetic oligonucleotide
  Sense strand starting at position 427 of SEQ ID NO: 1884637
agccucuggguuggagaau

SEQ ID NO: 2280387 - RNA, 19 nt, Artificial Sequence
  Description of Artificial Sequence: Synthetic oligonucleotide
  Antisense strand to SEQ ID NO: 2280386
auucuccaacccagaggcu

SEQ ID NO: 2280388 - RNA, 19 nt, Artificial Sequence
  Description of Artificial Sequence: Synthetic oligonucleotide
  Sense strand starting at position 524 of SEQ ID NO: 1884637
agcgauuaugcugucagca

SEQ ID NO: 2280389 - RNA, 19 nt, Artificial Sequence
  Description of Artificial Sequence: Synthetic oligonucleotide
  Antisense strand to SEQ ID NO: 2280388
ugcugacagcauaaucgcu

SEQ ID NO: 2280390 - RNA, 19 nt, Artificial Sequence
  Description of Artificial Sequence: Synthetic oligonucleotide
  Sense strand starting at position 525 of SEQ ID NO: 1884637
gcgauuaugcugucagcag

SEQ ID NO: 2280391 - RNA, 19 nt, Artificial Sequence
  Description of Artificial Sequence: Synthetic oligonucleotide
  Antisense strand to SEQ ID NO: 2280390
cugcugacagcauaaucgc

SEQ ID NO: 2280392 - RNA, 19 nt, Artificial Sequence
  Description of Artificial Sequence: Synthetic oligonucleotide
  Sense strand starting at position 546 of SEQ ID NO: 1884637
agagacucugacugcagau

SEQ ID NO: 2280393 - RNA, 19 nt, Artificial Sequence
  Description of Artificial Sequence: Synthetic oligonucleotide
  Antisense strand to SEQ ID NO: 2280392
aucugcagucagagucucu

SEQ ID NO: 2280394 - RNA, 19 nt, Artificial Sequence
  Description of Artificial Sequence: Synthetic oligonucleotide
  Sense strand starting at position 605 of SEQ ID NO: 1884637
gaagguucuaugugaaggu

SEQ ID NO: 2280395 - RNA, 19 nt, Artificial Sequence
  Description of Artificial Sequence: Synthetic oligonucleotide
  Antisense strand to SEQ ID NO: 2280394
accuucacauagaaccuuc

SEQ ID NO: 2280396 - RNA, 19 nt, Artificial Sequence
  Description of Artificial Sequence: Synthetic oligonucleotide
  Sense strand starting at position 609 of SEQ ID NO: 1884637
guucuaugugaaggugaga

SEQ ID NO: 2280397 - RNA, 19 nt, Artificial Sequence
  Description of Artificial Sequence: Synthetic oligonucleotide
  Antisense strand to SEQ ID NO: 2280396
ucucaccuucacauagaac

SEQ ID NO: 2280398 - RNA, 19 nt, Artificial Sequence
  Description of Artificial Sequence: Synthetic oligonucleotide
  Sense strand starting at position 625 of SEQ ID NO: 1884637
agaggauucuaaucugucu

SEQ ID NO: 2280399 - RNA, 19 nt, Artificial Sequence
  Description of Artificial Sequence: Synthetic oligonucleotide
  Antisense strand to SEQ ID NO: 2280398
agacagauuagaauccucu

SEQ ID NO: 2280400 - RNA, 19 nt, Artificial Sequence
  Description of Artificial Sequence: Synthetic oligonucleotide
  Sense strand starting at position 628 of SEQ ID NO: 1884637
ggauucuaaucugucuaua

SEQ ID NO: 2280401 - RNA, 19 nt, Artificial Sequence
  Description of Artificial Sequence: Synthetic oligonucleotide
  Antisense strand to SEQ ID NO: 2280400
uauagacagauuagaaucc

SEQ ID NO: 2280402 - RNA, 19 nt, Artificial Sequence
  Description of Artificial Sequence: Synthetic oligonucleotide
  Sense strand starting at position 661 of SEQ ID NO: 1884637
ugaagaguuucucccacaa

SEQ ID NO: 2280403 - RNA, 19 nt, Artificial Sequence
  Description of Artificial Sequence: Synthetic oligonucleotide
  Antisense strand to SEQ ID NO: 2280402
uugugggagaaacucuuca

SEQ ID NO: 2280404 - RNA, 19 nt, Artificial Sequence
  Description of Artificial Sequence: Synthetic oligonucleotide
  Sense strand starting at position 738 of SEQ ID NO: 1884637
guaucugggaugugauaua

SEQ ID NO: 2280405 - RNA, 19 nt, Artificial Sequence
  Description of Artificial Sequence: Synthetic oligonucleotide
  Antisense strand to SEQ ID NO: 2280404
uauaucacaucccagauac

SEQ ID NO: 2280406 - RNA, 19 nt, Artificial Sequence
  Description of Artificial Sequence: Synthetic oligonucleotide
  Sense strand starting at position 873 of SEQ ID NO: 1884637
ucaacuucuugggucagau

SEQ ID NO: 2280407 - RNA, 19 nt, Artificial Sequence
  Description of Artificial Sequence: Synthetic oligonucleotide
  Antisense strand to SEQ ID NO: 2280406
aucugacccaagaaguuga

SEQ ID NO: 2280408 - RNA, 19 nt, Artificial Sequence
  Description of Artificial Sequence: Synthetic oligonucleotide
  Sense strand starting at position 883 of SEQ ID NO: 1884637
gggucagauucuuuacuga

SEQ ID NO: 2280409 - RNA, 19 nt, Artificial Sequence
  Description of Artificial Sequence: Synthetic oligonucleotide
  Antisense strand to SEQ ID NO: 2280408
ucaguaaagaaucugaccc

SEQ ID NO: 2280410 - RNA, 19 nt, Artificial Sequence
  Description of Artificial Sequence: Synthetic oligonucleotide
  Sense strand starting at position 1158 of SEQ ID NO: 1884637
gugaucucugcugagugaa

SEQ ID NO: 2280411 - RNA, 19 nt, Artificial Sequence
  Description of Artificial Sequence: Synthetic oligonucleotide
  Antisense strand to SEQ ID NO: 2280410
uucacucagcagagaucac

SEQ ID NO: 2280412 - RNA, 19 nt, Artificial Sequence
  Description of Artificial Sequence: Synthetic oligonucleotide
  Sense strand starting at position 1160 of SEQ ID NO: 1884637
gaucucugcugagugaaug

SEQ ID NO: 2280413 - RNA, 19 nt, Artificial Sequence
  Description of Artificial Sequence: Synthetic oligonucleotide
  Antisense strand to SEQ ID NO: 2280412
cauucacucagcagagauc

SEQ ID NO: 2280414 - RNA, 19 nt, Artificial Sequence
  Description of Artificial Sequence: Synthetic oligonucleotide
  Sense strand starting at position 1303 of SEQ ID NO: 1884637
ggucuuucccuuuauauga

SEQ ID NO: 2280415 - RNA, 19 nt, Artificial Sequence
  Description of Artificial Sequence: Synthetic oligonucleotide
  Antisense strand to SEQ ID NO: 2280414
ucauauaaagggaaagacc

SEQ ID NO: 2280416 - RNA, 19 nt, Artificial Sequence
  Description of Artificial Sequence: Synthetic oligonucleotide
  Sense strand starting at position 1344 of SEQ ID NO: 1884637
cugggaacucacugaguuu

SEQ ID NO: 2280417 - RNA, 19 nt, Artificial Sequence
  Description of Artificial Sequence: Synthetic oligonucleotide
  Antisense strand to SEQ ID NO: 2280416
aaacucagugaguucccag

SEQ ID NO: 2280418 - RNA, 19 nt, Artificial Sequence
  Description of Artificial Sequence: Synthetic oligonucleotide
  Sense strand starting at position 1347 of SEQ ID NO: 1884637
ggaacucacugaguuucuu

SEQ ID NO: 2280419 - RNA, 19 nt, Artificial Sequence
  Description of Artificial Sequence: Synthetic oligonucleotide
  Antisense strand to SEQ ID NO: 2280418
aagaaacucagugaguucc

SEQ ID NO: 2280420 - RNA, 19 nt, Artificial Sequence
  Description of Artificial Sequence: Synthetic oligonucleotide
  Sense strand starting at position 1389 of SEQ ID NO: 1884637
auagcaguggcuuagaaca

SEQ ID NO: 2280421 - RNA, 19 nt, Artificial Sequence
  Description of Artificial Sequence: Synthetic oligonucleotide
  Antisense strand to SEQ ID NO: 2280420
uguucuaagccacugcuau

SEQ ID NO: 2280422 - RNA, 19 nt, Artificial Sequence
  Description of Artificial Sequence: Synthetic oligonucleotide
  Sense strand starting at position 1426 of SEQ ID NO: 1884637
aaagaagugcuuuacugac

SEQ ID NO: 2280423 - RNA, 19 nt, Artificial Sequence
  Description of Artificial Sequence: Synthetic oligonucleotide
  Antisense strand to SEQ ID NO: 2280422
gucaguaaagcacuucuuu

SEQ ID NO: 2280424 - RNA, 19 nt, Artificial Sequence
  Description of Artificial Sequence: Synthetic oligonucleotide
  Sense strand starting at position 1428 of SEQ ID NO: 1884637
agaagugcuuuacugacaa

SEQ ID NO: 2280425 - RNA, 19 nt, Artificial Sequence
  Description of Artificial Sequence: Synthetic oligonucleotide
  Antisense strand to SEQ ID NO: 2280424
uugucaguaaagcacuucu

SEQ ID NO: 2280426 - RNA, 19 nt, Artificial Sequence
  Description of Artificial Sequence: Synthetic oligonucleotide
  Sense strand starting at position 1544 of SEQ ID NO: 1884637
accagagugucaucugaac

SEQ ID NO: 2280427 - RNA, 19 nt, Artificial Sequence
  Description of Artificial Sequence: Synthetic oligonucleotide
  Antisense strand to SEQ ID NO: 2280426
guucagaugacacucuggu

SEQ ID NO: 2280428 - RNA, 19 nt, Artificial Sequence
  Description of Artificial Sequence: Synthetic oligonucleotide
  Sense strand starting at position 1550 of SEQ ID NO: 1884637
gugucaucugaacaccuuu

SEQ ID NO: 2280429 - RNA, 19 nt, Artificial Sequence
  Description of Artificial Sequence: Synthetic oligonucleotide
  Antisense strand to SEQ ID NO: 2280428
aaagguguucagaugacac

SEQ ID NO: 2280430 - RNA, 19 nt, Artificial Sequence
  Description of Artificial Sequence: Synthetic oligonucleotide
  Sense strand starting at position 1662 of SEQ ID NO: 1884637
aaggauuucuugcccguuu

SEQ ID NO: 2280431 - RNA, 19 nt, Artificial Sequence
  Description of Artificial Sequence: Synthetic oligonucleotide
  Antisense strand to SEQ ID NO: 2280430
aaacgggcaagaaauccuu

SEQ ID NO: 2280432 - RNA, 19 nt, Artificial Sequence
  Description of Artificial Sequence: Synthetic oligonucleotide
  Sense strand starting at position 1812 of SEQ ID NO: 1884637
gggagggugcuccagaguu

SEQ ID NO: 2280433 - RNA, 19 nt, Artificial Sequence
  Description of Artificial Sequence: Synthetic oligonucleotide
  Antisense strand to SEQ ID NO: 2280432
aacucuggagcacccuccc

SEQ ID NO: 2280434 - RNA, 19 nt, Artificial Sequence
  Description of Artificial Sequence: Synthetic oligonucleotide
  Sense strand starting at position 3151 of SEQ ID NO: 1884637
cccuucuggcucgagaacu

SEQ ID NO: 2280435 - RNA, 19 nt, Artificial Sequence
  Description of Artificial Sequence: Synthetic oligonucleotide
  Antisense strand to SEQ ID NO: 2280434
aguucucgagccagaaggg

SEQ ID NO: 2280436 - RNA, 19 nt, Artificial Sequence
  Description of Artificial Sequence: Synthetic oligonucleotide
  Sense strand starting at position 3243 of SEQ ID NO: 1884637
cgaaucugccgcucaaagu

SEQ ID NO: 2280437 - RNA, 19 nt, Artificial Sequence
  Description of Artificial Sequence: Synthetic oligonucleotide
  Antisense strand to SEQ ID NO: 2280436
acuuugagcggcagauucg

SEQ ID NO: 2280438 - RNA, 19 nt, Artificial Sequence
  Description of Artificial Sequence: Synthetic oligonucleotide
  Sense strand starting at position 3267 of SEQ ID NO: 1884637
uuucuuucggguuaggaga

SEQ ID NO: 2280439 - RNA, 19 nt, Artificial Sequence
  Description of Artificial Sequence: Synthetic oligonucleotide
  Antisense strand to SEQ ID NO: 2280438
ucuccuaacccgaaagaaa

SEQ ID NO: 2280440 - RNA, 19 nt, Artificial Sequence
  Description of Artificial Sequence: Synthetic oligonucleotide
  Sense strand starting at position 3323 of SEQ ID NO: 1884637
gcgaaaugggccguccuuu

SEQ ID NO: 2280441 - RNA, 19 nt, Artificial Sequence
  Description of Artificial Sequence: Synthetic oligonucleotide
  Antisense strand to SEQ ID NO: 2280440
aaaggacggcccauuucgc

SEQ ID NO: 2280442 - RNA, 19 nt, Artificial Sequence
  Description of Artificial Sequence: Synthetic oligonucleotide
  Sense strand starting at position 3385 of SEQ ID NO: 1884637
ggagacucggguugggaau

SEQ ID NO: 2280443 - RNA, 19 nt, Artificial Sequence
  Description of Artificial Sequence: Synthetic oligonucleotide
  Antisense strand to SEQ ID NO: 2280442
auucccaacccgagucucc

SEQ ID NO: 2280444 - RNA, 19 nt, Artificial Sequence
  Description of Artificial Sequence: Synthetic oligonucleotide
  Sense strand starting at position 3448 of SEQ ID NO: 1884637
uuaggaccagucuagaguu

SEQ ID NO: 2280445 - RNA, 19 nt, Artificial Sequence
  Description of Artificial Sequence: Synthetic oligonucleotide
  Antisense strand to SEQ ID NO: 2280444
aacucuagacugguccuaa

SEQ ID NO: 2280446 - RNA, 19 nt, Artificial Sequence
  Description of Artificial Sequence: Synthetic oligonucleotide
  Sense strand starting at position 3460 of SEQ ID NO: 1884637
uagaguucgguuuauagga

SEQ ID NO: 2280447 - RNA, 19 nt, Artificial Sequence
  Description of Artificial Sequence: Synthetic oligonucleotide
  Antisense strand to SEQ ID NO: 2280446
uccuauaaaccgaacucua

SEQ ID NO: 2280448 - RNA, 19 nt, Artificial Sequence
  Description of Artificial Sequence: Synthetic oligonucleotide
  Sense strand starting at position 3477 of SEQ ID NO: 1884637
gauccagacuguuuacgga

SEQ ID NO: 2280449 - RNA, 19 nt, Artificial Sequence
  Description of Artificial Sequence: Synthetic oligonucleotide
  Antisense strand to SEQ ID NO: 2280448
uccguaaacagucuggauc

SEQ ID NO: 2280450 - RNA, 19 nt, Artificial Sequence
  Description of Artificial Sequence: Synthetic oligonucleotide
  Sense strand starting at position 3701 of SEQ ID NO: 1884637
cgaugaaaguaguugaucu

SEQ ID NO: 2280451 - RNA, 19 nt, Artificial Sequence
  Description of Artificial Sequence: Synthetic oligonucleotide
  Antisense strand to SEQ ID NO: 2280450
agaucaacuacuuucaucg

SEQ ID NO: 2280452 - RNA, 19 nt, Artificial Sequence
  Description of Artificial Sequence: Synthetic oligonucleotide
  Sense strand starting at position 3702 of SEQ ID NO: 1884637
gaugaaaguaguugaucug

SEQ ID NO: 2280453 - RNA, 19 nt, Artificial Sequence
  Description of Artificial Sequence: Synthetic oligonucleotide
  Antisense strand to SEQ ID NO: 2280452
cagaucaacuacuuucauc

SEQ ID NO: 2280454 - RNA, 19 nt, Artificial Sequence
  Description of Artificial Sequence: Synthetic oligonucleotide
  Sense strand starting at position 3762 of SEQ ID NO: 1884637
gaaaguguuucuuuaggag

SEQ ID NO: 2280455 - RNA, 19 nt, Artificial Sequence
  Description of Artificial Sequence: Synthetic oligonucleotide
  Antisense strand to SEQ ID NO: 2280454
cuccuaaagaaacacuuuc

SEQ ID NO: 2280456 - RNA, 19 nt, Artificial Sequence
  Description of Artificial Sequence: Synthetic oligonucleotide
  Sense strand starting at position 126 of SEQ ID NO: 1884638
acauguaauuaguuaagac

SEQ ID NO: 2280457 - RNA, 19 nt, Artificial Sequence
  Description of Artificial Sequence: Synthetic oligonucleotide
  Antisense strand to SEQ ID NO: 2280456
gucuuaacuaauuacaugu

SEQ ID NO: 2280458 - RNA, 19 nt, Artificial Sequence
  Description of Artificial Sequence: Synthetic oligonucleotide
  Sense strand starting at position 207 of SEQ ID NO: 1884638
cgugcaaagauacagauau

SEQ ID NO: 2280459 - RNA, 19 nt, Artificial Sequence
  Description of Artificial Sequence: Synthetic oligonucleotide
  Antisense strand to SEQ ID NO: 2280458
auaucuguaucuuugcacg

SEQ ID NO: 2280460 - RNA, 19 nt, Artificial Sequence
  Description of Artificial Sequence: Synthetic oligonucleotide
  Sense strand starting at position 330 of SEQ ID NO: 1884638
aggcuaucuguagaguuaa

SEQ ID NO: 2280461 - RNA, 19 nt, Artificial Sequence
  Description of Artificial Sequence: Synthetic oligonucleotide
  Antisense strand to SEQ ID NO: 2280460
uuaacucuacagauagccu

SEQ ID NO: 2280462 - RNA, 19 nt, Artificial Sequence
  Description of Artificial Sequence: Synthetic oligonucleotide
  Sense strand starting at position 458 of SEQ ID NO: 1884638
auuuguaugucaccuguaa

SEQ ID NO: 2280463 - RNA, 19 nt, Artificial Sequence
  Description of Artificial Sequence: Synthetic oligonucleotide
  Antisense strand to SEQ ID NO: 2280462
uuacaggugacauacaaau

SEQ ID NO: 2280464 - RNA, 19 nt, Artificial Sequence
  Description of Artificial Sequence: Synthetic oligonucleotide
  Sense strand starting at position 462 of SEQ ID NO: 1884638
guaugucaccuguaacaag

SEQ ID NO: 2280465 - RNA, 19 nt, Artificial Sequence
  Description of Artificial Sequence: Synthetic oligonucleotide
  Antisense strand to SEQ ID NO: 2280464
cuuguuacaggugacauac

SEQ ID NO: 2280466 - RNA, 19 nt, Artificial Sequence
  Description of Artificial Sequence: Synthetic oligonucleotide
  Sense strand starting at position 533 of SEQ ID NO: 1884638
gaaggucuguugcuaaaga

SEQ ID NO: 2280467 - RNA, 19 nt, Artificial Sequence
  Description of Artificial Sequence: Synthetic oligonucleotide
  Antisense strand to SEQ ID NO: 2280466
ucuuuagcaacagaccuuc

SEQ ID NO: 2280468 - RNA, 19 nt, Artificial Sequence
  Description of Artificial Sequence: Synthetic oligonucleotide
  Sense strand starting at position 549 of SEQ ID NO: 1884638
agauuccuauucuuagaug

SEQ ID NO: 2280469 - RNA, 19 nt, Artificial Sequence
  Description of Artificial Sequence: Synthetic oligonucleotide
  Antisense strand to SEQ ID NO: 2280468
caucuaagaauaggaaucu

SEQ ID NO: 2280470 - RNA, 19 nt, Artificial Sequence
  Description of Artificial Sequence: Synthetic oligonucleotide
  Sense strand starting at position 563 of SEQ ID NO: 1884638
agaugauuaugccuuacaa

SEQ ID NO: 2280471 - RNA, 19 nt, Artificial Sequence
  Description of Artificial Sequence: Synthetic oligonucleotide
  Antisense strand to SEQ ID NO: 2280470
uuguaaggcauaaucaucu

SEQ ID NO: 2280472 - RNA, 19 nt, Artificial Sequence
  Description of Artificial Sequence: Synthetic oligonucleotide
  Sense strand starting at position 612 of SEQ ID NO: 1884638
agaacuaucuaucugggua

SEQ ID NO: 2280473 - RNA, 19 nt, Artificial Sequence
  Description of Artificial Sequence: Synthetic oligonucleotide
  Antisense strand to SEQ ID NO: 2280472
uacccagauagauaguucu

SEQ ID NO: 2280474 - RNA, 19 nt, Artificial Sequence
  Description of Artificial Sequence: Synthetic oligonucleotide
  Sense strand starting at position 616 of SEQ ID NO: 1884638
cuaucuaucuggguaggca

SEQ ID NO: 2280475 - RNA, 19 nt, Artificial Sequence
  Description of Artificial Sequence: Synthetic oligonucleotide
  Antisense strand to SEQ ID NO: 2280474
ugccuacccagauagauag

SEQ ID NO: 2280476 - RNA, 19 nt, Artificial Sequence
  Description of Artificial Sequence: Synthetic oligonucleotide
  Sense strand starting at position 764 of SEQ ID NO: 1884638
cccuuuccucaugauguuu

SEQ ID NO: 2280477 - RNA, 19 nt, Artificial Sequence
  Description of Artificial Sequence: Synthetic oligonucleotide
  Antisense strand to SEQ ID NO: 2280476
aaacaucaugaggaaaggg

SEQ ID NO: 2280478 - RNA, 19 nt, Artificial Sequence
  Description of Artificial Sequence: Synthetic oligonucleotide
  Sense strand starting at position 825 of SEQ ID NO: 1884638
gaagcuagaugacuuugaa

SEQ ID NO: 2280479 - RNA, 19 nt, Artificial Sequence
  Description of Artificial Sequence: Synthetic oligonucleotide
  Antisense strand to SEQ ID NO: 2280478
uucaaagucaucuagcuuc

SEQ ID NO: 2280480 - RNA, 19 nt, Artificial Sequence
  Description of Artificial Sequence: Synthetic oligonucleotide
  Sense strand starting at position 833 of SEQ ID NO: 1884638
augacuuugaagugugaug

SEQ ID NO: 2280481 - RNA, 19 nt, Artificial Sequence
  Description of Artificial Sequence: Synthetic oligonucleotide
  Antisense strand to SEQ ID NO: 2280480
caucacacuucaaagucau

SEQ ID NO: 2280482 - RNA, 19 nt, Artificial Sequence
  Description of Artificial Sequence: Synthetic oligonucleotide
  Sense strand starting at position 1091 of SEQ ID NO: 1884638
ggcagugugauguagaaga

SEQ ID NO: 2280483 - RNA, 19 nt, Artificial Sequence
  Description of Artificial Sequence: Synthetic oligonucleotide
  Antisense strand to SEQ ID NO: 2280482
ucuucuacaucacacugcc

SEQ ID NO: 2280484 - RNA, 19 nt, Artificial Sequence
  Description of Artificial Sequence: Synthetic oligonucleotide
  Sense strand starting at position 1112 of SEQ ID NO: 1884638
gcauuaguaagaggacaga

SEQ ID NO: 2280485 - RNA, 19 nt, Artificial Sequence
  Description of Artificial Sequence: Synthetic oligonucleotide
  Antisense strand to SEQ ID NO: 2280484
ucuguccucuuacuaaugc

SEQ ID NO: 2280486 - RNA, 19 nt, Artificial Sequence
  Description of Artificial Sequence: Synthetic oligonucleotide
  Sense strand starting at position 1202 of SEQ ID NO: 1884638
uccucaucucgggauacca

SEQ ID NO: 2280487 - RNA, 19 nt, Artificial Sequence
  Description of Artificial Sequence: Synthetic oligonucleotide
  Antisense strand to SEQ ID NO: 2280486
ugguaucccgagaugagga

SEQ ID NO: 2280488 - RNA, 19 nt, Artificial Sequence
  Description of Artificial Sequence: Synthetic oligonucleotide
  Sense strand starting at position 1380 of SEQ ID NO: 1884638
ugcuuaaauuuccaggaag

SEQ ID NO: 2280489 - RNA, 19 nt, Artificial Sequence
  Description of Artificial Sequence: Synthetic oligonucleotide
  Antisense strand to SEQ ID NO: 2280488
cuuccuggaaauuuaagca

SEQ ID NO: 2280490 - RNA, 19 nt, Artificial Sequence
  Description of Artificial Sequence: Synthetic oligonucleotide
  Sense strand starting at position 2015 of SEQ ID NO: 1884638
gggucaaacuagucaggga

SEQ ID NO: 2280491 - RNA, 19 nt, Artificial Sequence
  Description of Artificial Sequence: Synthetic oligonucleotide
  Antisense strand to SEQ ID NO: 2280490
ucccugacuaguuugaccc

SEQ ID NO: 2280492 - RNA, 19 nt, Artificial Sequence
  Description of Artificial Sequence: Synthetic oligonucleotide
  Sense strand starting at position 2217 of SEQ ID NO: 1884638
uagugaauauggucucuca

SEQ ID NO: 2280493 - RNA, 19 nt, Artificial Sequence
  Description of Artificial Sequence: Synthetic oligonucleotide
  Antisense strand to SEQ ID NO: 2280492
ugagagaccauauucacua

SEQ ID NO: 2280494 - RNA, 19 nt, Artificial Sequence
  Description of Artificial Sequence: Synthetic oligonucleotide
  Sense strand starting at position 2220 of SEQ ID NO: 1884638
ugaauauggucucucaaca

SEQ ID NO: 2280495 - RNA, 19 nt, Artificial Sequence
  Description of Artificial Sequence: Synthetic oligonucleotide
  Antisense strand to SEQ ID NO: 2280494
uguugagagaccauauuca

SEQ ID NO: 2280496 - RNA, 19 nt, Artificial Sequence
  Description of Artificial Sequence: Synthetic oligonucleotide
  Sense strand starting at position 2235 of SEQ ID NO: 1884638
aacagaugucauuggguau

SEQ ID NO: 2280497 - RNA, 19 nt, Artificial Sequence
  Description of Artificial Sequence: Synthetic oligonucleotide
  Antisense strand to SEQ ID NO: 2280496
auacccaaugacaucuguu

SEQ ID NO: 2280498 - RNA, 19 nt, Artificial Sequence
  Description of Artificial Sequence: Synthetic oligonucleotide
  Sense strand starting at position 2236 of SEQ ID NO: 1884638
acagaugucauuggguaua

SEQ ID NO: 2280499 - RNA, 19 nt, Artificial Sequence
  Description of Artificial Sequence: Synthetic oligonucleotide
  Antisense strand to SEQ ID NO: 2280498
uauacccaaugacaucugu

SEQ ID NO: 2280500 - RNA, 19 nt, Artificial Sequence
  Description of Artificial Sequence: Synthetic oligonucleotide
  Sense strand starting at position 2238 of SEQ ID NO: 1884638
agaugucauuggguauaau

SEQ ID NO: 2280501 - RNA, 19 nt, Artificial Sequence
  Description of Artificial Sequence: Synthetic oligonucleotide
  Antisense strand to SEQ ID NO: 2280500
auuauacccaaugacaucu

SEQ ID NO: 2280502 - RNA, 19 nt, Artificial Sequence
  Description of Artificial Sequence: Synthetic oligonucleotide
  Sense strand starting at position 2241 of SEQ ID NO: 1884638
ugucauuggguauaauauu

SEQ ID NO: 2280503 - RNA, 19 nt, Artificial Sequence
  Description of Artificial Sequence: Synthetic oligonucleotide
  Antisense strand to SEQ ID NO: 2280502
aauauuauacccaaugaca

SEQ ID NO: 2280504 - RNA, 19 nt, Artificial Sequence
  Description of Artificial Sequence: Synthetic oligonucleotide
  Sense strand starting at position 2281 of SEQ ID NO: 1884638
cgugaugaaacccgggaaa

SEQ ID NO: 2280505 - RNA, 19 nt, Artificial Sequence
  Description of Artificial Sequence: Synthetic oligonucleotide
  Antisense strand to SEQ ID NO: 2280504
uuucccggguuucaucacg

SEQ ID NO: 2280506 - RNA, 19 nt, Artificial Sequence
  Description of Artificial Sequence: Synthetic oligonucleotide
  Sense strand starting at position 2292 of SEQ ID NO: 1884638
ccgggaaagccaggauaaa

SEQ ID NO: 2280507 - RNA, 19 nt, Artificial Sequence
  Description of Artificial Sequence: Synthetic oligonucleotide
  Antisense strand to SEQ ID NO: 2280506
uuuauccuggcuuucccgg

SEQ ID NO: 2280508 - RNA, 19 nt, Artificial Sequence
  Description of Artificial Sequence: Synthetic oligonucleotide
  Sense strand starting at position 2370 of SEQ ID NO: 1884638
cuguuauaaucccucagag

SEQ ID NO: 2280509 - RNA, 19 nt, Artificial Sequence
  Description of Artificial Sequence: Synthetic oligonucleotide
  Antisense strand to SEQ ID NO: 2280508
cucugagggauuauaacag

SEQ ID NO: 2280510 - RNA, 19 nt, Artificial Sequence
  Description of Artificial Sequence: Synthetic oligonucleotide
  Sense strand starting at position 2372 of SEQ ID NO: 1884638
guuauaaucccucagaguu

SEQ ID NO: 2280511 - RNA, 19 nt, Artificial Sequence
  Description of Artificial Sequence: Synthetic oligonucleotide
  Antisense strand to SEQ ID NO: 2280510
aacucugagggauuauaac

SEQ ID NO: 2280512 - RNA, 19 nt, Artificial Sequence
  Description of Artificial Sequence: Synthetic oligonucleotide
  Sense strand starting at position 2434 of SEQ ID NO: 1884638
gaguguuucggauagaagc

SEQ ID NO: 2280513 - RNA, 19 nt, Artificial Sequence
  Description of Artificial Sequence: Synthetic oligonucleotide
  Antisense strand to SEQ ID NO: 2280512
gcuucuauccgaaacacuc

SEQ ID NO: 2280514 - RNA, 19 nt, Artificial Sequence
  Description of Artificial Sequence: Synthetic oligonucleotide
  Sense strand starting at position 2476 of SEQ ID NO: 1884638
ucauuaucucuggauuguu

SEQ ID NO: 2280515 - RNA, 19 nt, Artificial Sequence
  Description of Artificial Sequence: Synthetic oligonucleotide
  Antisense strand to SEQ ID NO: 2280514
aacaauccagagauaauga

SEQ ID NO: 2280516 - RNA, 19 nt, Artificial Sequence
  Description of Artificial Sequence: Synthetic oligonucleotide
  Sense strand starting at position 2533 of SEQ ID NO: 1884638
aaucguugugccuaggaga

SEQ ID NO: 2280517 - RNA, 19 nt, Artificial Sequence
  Description of Artificial Sequence: Synthetic oligonucleotide
  Antisense strand to SEQ ID NO: 2280516
ucuccuaggcacaacgauu

SEQ ID NO: 2280518 - RNA, 19 nt, Artificial Sequence
  Description of Artificial Sequence: Synthetic oligonucleotide
  Sense strand starting at position 2691 of SEQ ID NO: 1884638
ucaguaucgcagguguagu

SEQ ID NO: 2280519 - RNA, 19 nt, Artificial Sequence
  Description of Artificial Sequence: Synthetic oligonucleotide
  Antisense strand to SEQ ID NO: 2280518
acuacaccugcgauacuga

SEQ ID NO: 2280520 - RNA, 19 nt, Artificial Sequence
  Description of Artificial Sequence: Synthetic oligonucleotide
  Sense strand starting at position 2722 of SEQ ID NO: 1884638
gggcucuagagucagacuu

SEQ ID NO: 2280521 - RNA, 19 nt, Artificial Sequence
  Description of Artificial Sequence: Synthetic oligonucleotide
  Antisense strand to SEQ ID NO: 2280520
aagucugacucuagagccc

SEQ ID NO: 2280522 - RNA, 19 nt, Artificial Sequence
  Description of Artificial Sequence: Synthetic oligonucleotide
  Sense strand starting at position 2773 of SEQ ID NO: 1884638
guguaaacuuagguaauuc

SEQ ID NO: 2280523 - RNA, 19 nt, Artificial Sequence
  Description of Artificial Sequence: Synthetic oligonucleotide
  Antisense strand to SEQ ID NO: 2280522
gaauuaccuaaguuuacac

SEQ ID NO: 2280524 - RNA, 19 nt, Artificial Sequence
  Description of Artificial Sequence: Synthetic oligonucleotide
  Sense strand starting at position 2911 of SEQ ID NO: 1884638
auacuauucugaguguuga

SEQ ID NO: 2280525 - RNA, 19 nt, Artificial Sequence
  Description of Artificial Sequence: Synthetic oligonucleotide
  Antisense strand to SEQ ID NO: 2280524
ucaacacucagaauaguau

SEQ ID NO: 2280526 - RNA, 19 nt, Artificial Sequence
  Description of Artificial Sequence: Synthetic oligonucleotide
  Sense strand starting at position 2912 of SEQ ID NO: 1884638
uacuauucugaguguugag

SEQ ID NO: 2280527 - RNA, 19 nt, Artificial Sequence
  Description of Artificial Sequence: Synthetic oligonucleotide
  Antisense strand to SEQ ID NO: 2280526
cucaacacucagaauagua

SEQ ID NO: 2280528 - RNA, 19 nt, Artificial Sequence
  Description of Artificial Sequence: Synthetic oligonucleotide
  Sense strand starting at position 2941 of SEQ ID NO: 1884638
ugcagcuaugagcaauaau

SEQ ID NO: 2280529 - RNA, 19 nt, Artificial Sequence
  Description of Artificial Sequence: Synthetic oligonucleotide
  Antisense strand to SEQ ID NO: 2280528
auuauugcucauagcugca

SEQ ID NO: 2280530 - RNA, 19 nt, Artificial Sequence
  Description of Artificial Sequence: Synthetic oligonucleotide
  Sense strand starting at position 3004 of SEQ ID NO: 1884638
gugaaagauaguggugguu

SEQ ID NO: 2280531 - RNA, 19 nt, Artificial Sequence
  Description of Artificial Sequence: Synthetic oligonucleotide
  Antisense strand to SEQ ID NO: 2280530
aaccaccacuaucuuucac

SEQ ID NO: 2280532 - RNA, 19 nt, Artificial Sequence
  Description of Artificial Sequence: Synthetic oligonucleotide
  Sense strand starting at position 3007 of SEQ ID NO: 1884638
aaagauaguggugguuuaa

SEQ ID NO: 2280533 - RNA, 19 nt, Artificial Sequence
  Description of Artificial Sequence: Synthetic oligonucleotide
  Antisense strand to SEQ ID NO: 2280532
uuaaaccaccacuaucuuu

SEQ ID NO: 2280534 - RNA, 19 nt, Artificial Sequence
  Description of Artificial Sequence: Synthetic oligonucleotide
  Sense strand starting at position 3874 of SEQ ID NO: 1884638
cagugagcacuugaucaug

SEQ ID NO: 2280535 - RNA, 19 nt, Artificial Sequence
  Description of Artificial Sequence: Synthetic oligonucleotide
  Antisense strand to SEQ ID NO: 2280534
caugaucaagugcucacug

SEQ ID NO: 2280536 - RNA, 19 nt, Artificial Sequence
  Description of Artificial Sequence: Synthetic oligonucleotide
  Sense strand starting at position 201 of SEQ ID NO: 1884639
acauguaauuaguuaagac

SEQ ID NO: 2280537 - RNA, 19 nt, Artificial Sequence
  Description of Artificial Sequence: Synthetic oligonucleotide
  Antisense strand to SEQ ID NO: 2280536
gucuuaacuaauuacaugu

SEQ ID NO: 2280538 - RNA, 19 nt, Artificial Sequence
  Description of Artificial Sequence: Synthetic oligonucleotide
  Sense strand starting at position 282 of SEQ ID NO: 1884639
cgugcaaagauacagauau

SEQ ID NO: 2280539 - RNA, 19 nt, Artificial Sequence
  Description of Artificial Sequence: Synthetic oligonucleotide
  Antisense strand to SEQ ID NO: 2280538
auaucuguaucuuugcacg

SEQ ID NO: 2280540 - RNA, 19 nt, Artificial Sequence
  Description of Artificial Sequence: Synthetic oligonucleotide
  Sense strand starting at position 405 of SEQ ID NO: 1884639
aggcuaucuguagaguuaa

SEQ ID NO: 2280541 - RNA, 19 nt, Artificial Sequence
  Description of Artificial Sequence: Synthetic oligonucleotide
  Antisense strand to SEQ ID NO: 2280540
uuaacucuacagauagccu

SEQ ID NO: 2280542 - RNA, 19 nt, Artificial Sequence
  Description of Artificial Sequence: Synthetic oligonucleotide
  Sense strand starting at position 533 of SEQ ID NO: 1884639
auuuguaugucaccuguaa

SEQ ID NO: 2280543 - RNA, 19 nt, Artificial Sequence
  Description of Artificial Sequence: Synthetic oligonucleotide
  Antisense strand to SEQ ID NO: 2280542
uuacaggugacauacaaau

SEQ ID NO: 2280544 - RNA, 19 nt, Artificial Sequence
  Description of Artificial Sequence: Synthetic oligonucleotide
  Sense strand starting at position 537 of SEQ ID NO: 1884639
guaugucaccuguaacaag

SEQ ID NO: 2280545 - RNA, 19 nt, Artificial Sequence
  Description of Artificial Sequence: Synthetic oligonucleotide
  Antisense strand to SEQ ID NO: 2280544
cuuguuacaggugacauac

SEQ ID NO: 2280546 - RNA, 19 nt, Artificial Sequence
  Description of Artificial Sequence: Synthetic oligonucleotide
  Sense strand starting at position 608 of SEQ ID NO: 1884639
gaaggucuguugcuaaaga

SEQ ID NO: 2280547 - RNA, 19 nt, Artificial Sequence
  Description of Artificial Sequence: Synthetic oligonucleotide
  Antisense strand to SEQ ID NO: 2280546
ucuuuagcaacagaccuuc

SEQ ID NO: 2280548 - RNA, 19 nt, Artificial Sequence
  Description of Artificial Sequence: Synthetic oligonucleotide
  Sense strand starting at position 624 of SEQ ID NO: 1884639
agauuccuauucuuagaug

SEQ ID NO: 2280549 - RNA, 19 nt, Artificial Sequence
  Description of Artificial Sequence: Synthetic oligonucleotide
  Antisense strand to SEQ ID NO: 2280548
caucuaagaauaggaaucu

SEQ ID NO: 2280550 - RNA, 19 nt, Artificial Sequence
  Description of Artificial Sequence: Synthetic oligonucleotide
  Sense strand starting at position 638 of SEQ ID NO: 1884639
agaugauuaugccuuacaa

SEQ ID NO: 2280551 - RNA, 19 nt, Artificial Sequence
  Description of Artificial Sequence: Synthetic oligonucleotide
  Antisense strand to SEQ ID NO: 2280550
uuguaaggcauaaucaucu

SEQ ID NO: 2280552 - RNA, 19 nt, Artificial Sequence
  Description of Artificial Sequence: Synthetic oligonucleotide
  Sense strand starting at position 687 of SEQ ID NO: 1884639
agaacuaucuaucugggua

SEQ ID NO: 2280553 - RNA, 19 nt, Artificial Sequence
  Description of Artificial Sequence: Synthetic oligonucleotide
  Antisense strand to SEQ ID NO: 2280552
uacccagauagauaguucu

SEQ ID NO: 2280554 - RNA, 19 nt, Artificial Sequence
  Description of Artificial Sequence: Synthetic oligonucleotide
  Sense strand starting at position 691 of SEQ ID NO: 1884639
cuaucuaucuggguaggca

SEQ ID NO: 2280555 - RNA, 19 nt, Artificial Sequence
  Description of Artificial Sequence: Synthetic oligonucleotide
  Antisense strand to SEQ ID NO: 2280554
ugccuacccagauagauag

SEQ ID NO: 2280556 - RNA, 19 nt, Artificial Sequence
  Description of Artificial Sequence: Synthetic oligonucleotide
  Sense strand starting at position 839 of SEQ ID NO: 1884639
cccuuuccucaugauguuu

SEQ ID NO: 2280557 - RNA, 19 nt, Artificial Sequence
  Description of Artificial Sequence: Synthetic oligonucleotide
  Antisense strand to SEQ ID NO: 2280556
aaacaucaugaggaaaggg

SEQ ID NO: 2280558 - RNA, 19 nt, Artificial Sequence
  Description of Artificial Sequence: Synthetic oligonucleotide
  Sense strand starting at position 900 of SEQ ID NO: 1884639
gaagcuagaugacuuugaa

SEQ ID NO: 2280559 - RNA, 19 nt, Artificial Sequence
  Description of Artificial Sequence: Synthetic oligonucleotide
  Antisense strand to SEQ ID NO: 2280558
uucaaagucaucuagcuuc

SEQ ID NO: 2280560 - RNA, 19 nt, Artificial Sequence
  Description of Artificial Sequence: Synthetic oligonucleotide
  Sense strand starting at position 908 of SEQ ID NO: 1884639
augacuuugaagugugaug

SEQ ID NO: 2280561 - RNA, 19 nt, Artificial Sequence
  Description of Artificial Sequence: Synthetic oligonucleotide
  Antisense strand to SEQ ID NO: 2280560
caucacacuucaaagucau

SEQ ID NO: 2280562 - RNA, 19 nt, Artificial Sequence
  Description of Artificial Sequence: Synthetic oligonucleotide
  Sense strand starting at position 1166 of SEQ ID NO: 1884639
ggcagugugauguagaaga

SEQ ID NO: 2280563 - RNA, 19 nt, Artificial Sequence
  Description of Artificial Sequence: Synthetic oligonucleotide
  Antisense strand to SEQ ID NO: 2280562
ucuucuacaucacacugcc

SEQ ID NO: 2280564 - RNA, 19 nt, Artificial Sequence
  Description of Artificial Sequence: Synthetic oligonucleotide
  Sense strand starting at position 1187 of SEQ ID NO: 1884639
gcauuaguaagaggacaga

SEQ ID NO: 2280565 - RNA, 19 nt, Artificial Sequence
  Description of Artificial Sequence: Synthetic oligonucleotide
  Antisense strand to SEQ ID NO: 2280564
ucuguccucuuacuaaugc

SEQ ID NO: 2280566 - RNA, 19 nt, Artificial Sequence
  Description of Artificial Sequence: Synthetic oligonucleotide
  Sense strand starting at position 1277 of SEQ ID NO: 1884639
uccucaucucgggauacca

SEQ ID NO: 2280567 - RNA, 19 nt, Artificial Sequence
  Description of Artificial Sequence: Synthetic oligonucleotide
  Antisense strand to SEQ ID NO: 2280566
ugguaucccgagaugagga

SEQ ID NO: 2280568 - RNA, 19 nt, Artificial Sequence
  Description of Artificial Sequence: Synthetic oligonucleotide
  Sense strand starting at position 1455 of SEQ ID NO: 1884639
ugcuuaaauuuccaggaag

SEQ ID NO: 2280569 - RNA, 19 nt, Artificial Sequence
  Description of Artificial Sequence: Synthetic oligonucleotide
  Antisense strand to SEQ ID NO: 2280568
cuuccuggaaauuuaagca

SEQ ID NO: 2280570 - RNA, 19 nt, Artificial Sequence
  Description of Artificial Sequence: Synthetic oligonucleotide
  Sense strand starting at position 2090 of SEQ ID NO: 1884639
gggucaaacuagucaggga

SEQ ID NO: 2280571 - RNA, 19 nt, Artificial Sequence
  Description of Artificial Sequence: Synthetic oligonucleotide
  Antisense strand to SEQ ID NO: 2280570
ucccugacuaguuugaccc

SEQ ID NO: 2280572 - RNA, 19 nt, Artificial Sequence
  Description of Artificial Sequence: Synthetic oligonucleotide
  Sense strand starting at position 2292 of SEQ ID NO: 1884639
uagugaauauggucucuca

SEQ ID NO: 2280573 - RNA, 19 nt, Artificial Sequence
  Description of Artificial Sequence: Synthetic oligonucleotide
  Antisense strand to SEQ ID NO: 2280572
ugagagaccauauucacua

SEQ ID NO: 2280574 - RNA, 19 nt, Artificial Sequence
  Description of Artificial Sequence: Synthetic oligonucleotide
  Sense strand starting at position 2295 of SEQ ID NO: 1884639
ugaauauggucucucaaca

SEQ ID NO: 2280575 - RNA, 19 nt, Artificial Sequence
  Description of Artificial Sequence: Synthetic oligonucleotide
  Antisense strand to SEQ ID NO: 2280574
uguugagagaccauauuca

SEQ ID NO: 2280576 - RNA, 19 nt, Artificial Sequence
  Description of Artificial Sequence: Synthetic oligonucleotide
  Sense strand starting at position 2310 of SEQ ID NO: 1884639
aacagaugucauuggguau

SEQ ID NO: 2280577 - RNA, 19 nt, Artificial Sequence
  Description of Artificial Sequence: Synthetic oligonucleotide
  Antisense strand to SEQ ID NO: 2280576
auacccaaugacaucuguu

SEQ ID NO: 2280578 - RNA, 19 nt, Artificial Sequence
  Description of Artificial Sequence: Synthetic oligonucleotide
  Sense strand starting at position 2311 of SEQ ID NO: 1884639
acagaugucauuggguaua

SEQ ID NO: 2280579 - RNA, 19 nt, Artificial Sequence
  Description of Artificial Sequence: Synthetic oligonucleotide
  Antisense strand to SEQ ID NO: 2280578
uauacccaaugacaucugu

SEQ ID NO: 2280580 - RNA, 19 nt, Artificial Sequence
  Description of Artificial Sequence: Synthetic oligonucleotide
  Sense strand starting at position 2313 of SEQ ID NO: 1884639
agaugucauuggguauaau

SEQ ID NO: 2280581 - RNA, 19 nt, Artificial Sequence
  Description of Artificial Sequence: Synthetic oligonucleotide
  Antisense strand to SEQ ID NO: 2280580
auuauacccaaugacaucu

SEQ ID NO: 2280582 - RNA, 19 nt, Artificial Sequence
  Description of Artificial Sequence: Synthetic oligonucleotide
  Sense strand starting at position 2316 of SEQ ID NO: 1884639
ugucauuggguauaauauu

SEQ ID NO: 2280583 - RNA, 19 nt, Artificial Sequence
  Description of Artificial Sequence: Synthetic oligonucleotide
  Antisense strand to SEQ ID NO: 2280582
aauauuauacccaaugaca

SEQ ID NO: 2280584 - RNA, 19 nt, Artificial Sequence
  Description of Artificial Sequence: Synthetic oligonucleotide
  Sense strand starting at position 2356 of SEQ ID NO: 1884639
cgugaugaaacccgggaaa

SEQ ID NO: 2280585 - RNA, 19 nt, Artificial Sequence
  Description of Artificial Sequence: Synthetic oligonucleotide
  Antisense strand to SEQ ID NO: 2280584
uuucccggguuucaucacg

SEQ ID NO: 2280586 - RNA, 19 nt, Artificial Sequence
  Description of Artificial Sequence: Synthetic oligonucleotide
  Sense strand starting at position 2367 of SEQ ID NO: 1884639
ccgggaaagccaggauaaa

SEQ ID NO: 2280587 - RNA, 19 nt, Artificial Sequence
  Description of Artificial Sequence: Synthetic oligonucleotide
  Antisense strand to SEQ ID NO: 2280586
uuuauccuggcuuucccgg

SEQ ID NO: 2280588 - RNA, 19 nt, Artificial Sequence
  Description of Artificial Sequence: Synthetic oligonucleotide
  Sense strand starting at position 2445 of SEQ ID NO: 1884639
cuguuauaaucccucagag

SEQ ID NO: 2280589 - RNA, 19 nt, Artificial Sequence
  Description of Artificial Sequence: Synthetic oligonucleotide
  Antisense strand to SEQ ID NO: 2280588
cucugagggauuauaacag

SEQ ID NO: 2280590 - RNA, 19 nt, Artificial Sequence
  Description of Artificial Sequence: Synthetic oligonucleotide
  Sense strand starting at position 2447 of SEQ ID NO: 1884639
guuauaaucccucagaguu

SEQ ID NO: 2280591 - RNA, 19 nt, Artificial Sequence
  Description of Artificial Sequence: Synthetic oligonucleotide
  Antisense strand to SEQ ID NO: 2280590
aacucugagggauuauaac

SEQ ID NO: 2280592 - RNA, 19 nt, Artificial Sequence
  Description of Artificial Sequence: Synthetic oligonucleotide
  Sense strand starting at position 2509 of SEQ ID NO: 1884639
gaguguuucggauagaagc

SEQ ID NO: 2280593 - RNA, 19 nt, Artificial Sequence
  Description of Artificial Sequence: Synthetic oligonucleotide
  Antisense strand to SEQ ID NO: 2280592
gcuucuauccgaaacacuc

SEQ ID NO: 2280594 - RNA, 19 nt, Artificial Sequence
  Description of Artificial Sequence: Synthetic oligonucleotide
  Sense strand starting at position 2551 of SEQ ID NO: 1884639
ucauuaucucuggauuguu

SEQ ID NO: 2280595 - RNA, 19 nt, Artificial Sequence
  Description of Artificial Sequence: Synthetic oligonucleotide
  Antisense strand to SEQ ID NO: 2280594
aacaauccagagauaauga

SEQ ID NO: 2280596 - RNA, 19 nt, Artificial Sequence
  Description of Artificial Sequence: Synthetic oligonucleotide
  Sense strand starting at position 2608 of SEQ ID NO: 1884639
aaucguugugccuaggaga

SEQ ID NO: 2280597 - RNA, 19 nt, Artificial Sequence
  Description of Artificial Sequence: Synthetic oligonucleotide
  Antisense strand to SEQ ID NO: 2280596
ucuccuaggcacaacgauu

SEQ ID NO: 2280598 - RNA, 19 nt, Artificial Sequence
  Description of Artificial Sequence: Synthetic oligonucleotide
  Sense strand starting at position 2766 of SEQ ID NO: 1884639
ucaguaucgcagguguagu

SEQ ID NO: 2280599 - RNA, 19 nt, Artificial Sequence
  Description of Artificial Sequence: Synthetic oligonucleotide
  Antisense strand to SEQ ID NO: 2280598
acuacaccugcgauacuga

SEQ ID NO: 2280600 - RNA, 19 nt, Artificial Sequence
  Description of Artificial Sequence: Synthetic oligonucleotide
  Sense strand starting at position 2797 of SEQ ID NO: 1884639
gggcucuagagucagacuu

SEQ ID NO: 2280601 - RNA, 19 nt, Artificial Sequence
  Description of Artificial Sequence: Synthetic oligonucleotide
  Antisense strand to SEQ ID NO: 2280600
aagucugacucuagagccc

SEQ ID NO: 2280602 - RNA, 19 nt, Artificial Sequence
  Description of Artificial Sequence: Synthetic oligonucleotide
  Sense strand starting at position 2848 of SEQ ID NO: 1884639
guguaaacuuagguaauuc

SEQ ID NO: 2280603 - RNA, 19 nt, Artificial Sequence
  Description of Artificial Sequence: Synthetic oligonucleotide
  Antisense strand to SEQ ID NO: 2280602
gaauuaccuaaguuuacac

SEQ ID NO: 2280604 - RNA, 19 nt, Artificial Sequence
  Description of Artificial Sequence: Synthetic oligonucleotide
  Sense strand starting at position 2986 of SEQ ID NO: 1884639
auacuauucugaguguuga

SEQ ID NO: 2280605 - RNA, 19 nt, Artificial Sequence
  Description of Artificial Sequence: Synthetic oligonucleotide
  Antisense strand to SEQ ID NO: 2280604
ucaacacucagaauaguau

SEQ ID NO: 2280606 - RNA, 19 nt, Artificial Sequence
  Description of Artificial Sequence: Synthetic oligonucleotide
  Sense strand starting at position 2987 of SEQ ID NO: 1884639
uacuauucugaguguugag

SEQ ID NO: 2280607 - RNA, 19 nt, Artificial Sequence
  Description of Artificial Sequence: Synthetic oligonucleotide
  Antisense strand to SEQ ID NO: 2280606
cucaacacucagaauagua

SEQ ID NO: 2280608 - RNA, 19 nt, Artificial Sequence
  Description of Artificial Sequence: Synthetic oligonucleotide
  Sense strand starting at position 3016 of SEQ ID NO: 1884639
ugcagcuaugagcaauaau

SEQ ID NO: 2280609 - RNA, 19 nt, Artificial Sequence
  Description of Artificial Sequence: Synthetic oligonucleotide
  Antisense strand to SEQ ID NO: 2280608
auuauugcucauagcugca

SEQ ID NO: 2280610 - RNA, 19 nt, Artificial Sequence
  Description of Artificial Sequence: Synthetic oligonucleotide
  Sense strand starting at position 3079 of SEQ ID NO: 1884639
gugaaagauaguggugguu

SEQ ID NO: 2280611 - RNA, 19 nt, Artificial Sequence
  Description of Artificial Sequence: Synthetic oligonucleotide
  Antisense strand to SEQ ID NO: 2280610
aaccaccacuaucuuucac

SEQ ID NO: 2280612 - RNA, 19 nt, Artificial Sequence
  Description of Artificial Sequence: Synthetic oligonucleotide
  Sense strand starting at position 3082 of SEQ ID NO: 1884639
aaagauaguggugguuuaa

SEQ ID NO: 2280613 - RNA, 19 nt, Artificial Sequence
  Description of Artificial Sequence: Synthetic oligonucleotide
  Antisense strand to SEQ ID NO: 2280612
uuaaaccaccacuaucuuu

SEQ ID NO: 2280614 - RNA, 19 nt, Artificial Sequence
  Description of Artificial Sequence: Synthetic oligonucleotide
  Sense strand starting at position 3949 of SEQ ID NO: 1884639
cagugagcacuugaucaug

SEQ ID NO: 2280615 - RNA, 19 nt, Artificial Sequence
  Description of Artificial Sequence: Synthetic oligonucleotide
  Antisense strand to SEQ ID NO: 2280614
caugaucaagugcucacug

SEQ ID NO: 2280616 - RNA, 19 nt, Artificial Sequence
  Description of Artificial Sequence: Synthetic oligonucleotide
  Sense strand starting at position 67 of SEQ ID NO: 1884640
aucaacuguccaugucuga

SEQ ID NO: 2280617 - RNA, 19 nt, Artificial Sequence
  Description of Artificial Sequence: Synthetic oligonucleotide
  Antisense strand to SEQ ID NO: 2280616
ucagacauggacaguugau

SEQ ID NO: 2280618 - RNA, 19 nt, Artificial Sequence
  Description of Artificial Sequence: Synthetic oligonucleotide
  Sense strand starting at position 80 of SEQ ID NO: 1884640
gucugacugugccuaacuu

SEQ ID NO: 2280619 - RNA, 19 nt, Artificial Sequence
  Description of Artificial Sequence: Synthetic oligonucleotide
  Antisense strand to SEQ ID NO: 2280618
aaguuaggcacagucagac

SEQ ID NO: 2280620 - RNA, 19 nt, Artificial Sequence
  Description of Artificial Sequence: Synthetic oligonucleotide
  Sense strand starting at position 233 of SEQ ID NO: 1884640
gcugguuagauggaggagu

SEQ ID NO: 2280621 - RNA, 19 nt, Artificial Sequence
  Description of Artificial Sequence: Synthetic oligonucleotide
  Antisense strand to SEQ ID NO: 2280620
acuccuccaucuaaccagc

SEQ ID NO: 2280622 - RNA, 19 nt, Artificial Sequence
  Description of Artificial Sequence: Synthetic oligonucleotide
  Sense strand starting at position 234 of SEQ ID NO: 1884640
cugguuagauggaggaguu

SEQ ID NO: 2280623 - RNA, 19 nt, Artificial Sequence
  Description of Artificial Sequence: Synthetic oligonucleotide
  Antisense strand to SEQ ID NO: 2280622
aacuccuccaucuaaccag

SEQ ID NO: 2280624 - RNA, 19 nt, Artificial Sequence
  Description of Artificial Sequence: Synthetic oligonucleotide
  Sense strand starting at position 477 of SEQ ID NO: 1884640
cagagaaucaguuguugag

SEQ ID NO: 2280625 - RNA, 19 nt, Artificial Sequence
  Description of Artificial Sequence: Synthetic oligonucleotide
  Antisense strand to SEQ ID NO: 2280624
cucaacaacugauucucug

SEQ ID NO: 2280626 - RNA, 19 nt, Artificial Sequence
  Description of Artificial Sequence: Synthetic oligonucleotide
  Sense strand starting at position 479 of SEQ ID NO: 1884640
gagaaucaguuguugaguc

SEQ ID NO: 2280627 - RNA, 19 nt, Artificial Sequence
  Description of Artificial Sequence: Synthetic oligonucleotide
  Antisense strand to SEQ ID NO: 2280626
gacucaacaacugauucuc

SEQ ID NO: 2280628 - RNA, 19 nt, Artificial Sequence
  Description of Artificial Sequence: Synthetic oligonucleotide
  Sense strand starting at position 532 of SEQ ID NO: 1884640
ugcccauaguccuugggaa

SEQ ID NO: 2280629 - RNA, 19 nt, Artificial Sequence
  Description of Artificial Sequence: Synthetic oligonucleotide
  Antisense strand to SEQ ID NO: 2280628
uucccaaggacuaugggca

SEQ ID NO: 2280630 - RNA, 19 nt, Artificial Sequence
  Description of Artificial Sequence: Synthetic oligonucleotide
  Sense strand starting at position 533 of SEQ ID NO: 1884640
gcccauaguccuugggaaa

SEQ ID NO: 2280631 - RNA, 19 nt, Artificial Sequence
  Description of Artificial Sequence: Synthetic oligonucleotide
  Antisense strand to SEQ ID NO: 2280630
uuucccaaggacuaugggc

SEQ ID NO: 2280632 - RNA, 19 nt, Artificial Sequence
  Description of Artificial Sequence: Synthetic oligonucleotide
  Sense strand starting at position 534 of SEQ ID NO: 1884640
cccauaguccuugggaaac

SEQ ID NO: 2280633 - RNA, 19 nt, Artificial Sequence
  Description of Artificial Sequence: Synthetic oligonucleotide
  Antisense strand to SEQ ID NO: 2280632
guuucccaaggacuauggg

SEQ ID NO: 2280634 - RNA, 19 nt, Artificial Sequence
  Description of Artificial Sequence: Synthetic oligonucleotide
  Sense strand starting at position 565 of SEQ ID NO: 1884640
aauagauaguuccuugggu

SEQ ID NO: 2280635 - RNA, 19 nt, Artificial Sequence
  Description of Artificial Sequence: Synthetic oligonucleotide
  Antisense strand to SEQ ID NO: 2280634
acccaaggaacuaucuauu

SEQ ID NO: 2280636 - RNA, 19 nt, Artificial Sequence
  Description of Artificial Sequence: Synthetic oligonucleotide
  Sense strand starting at position 607 of SEQ ID NO: 1884640
cuagcuuguagagguaaga

SEQ ID NO: 2280637 - RNA, 19 nt, Artificial Sequence
  Description of Artificial Sequence: Synthetic oligonucleotide
  Antisense strand to SEQ ID NO: 2280636
ucuuaccucuacaagcuag

SEQ ID NO: 2280638 - RNA, 19 nt, Artificial Sequence
  Description of Artificial Sequence: Synthetic oligonucleotide
  Sense strand starting at position 623 of SEQ ID NO: 1884640
agaauuauuggccgggugu

SEQ ID NO: 2280639 - RNA, 19 nt, Artificial Sequence
  Description of Artificial Sequence: Synthetic oligonucleotide
  Antisense strand to SEQ ID NO: 2280638
acacccggccaauaauucu

SEQ ID NO: 2280640 - RNA, 19 nt, Artificial Sequence
  Description of Artificial Sequence: Synthetic oligonucleotide
  Sense strand starting at position 1219 of SEQ ID NO: 1884640
gaagaagacucuggagacu

SEQ ID NO: 2280641 - RNA, 19 nt, Artificial Sequence
  Description of Artificial Sequence: Synthetic oligonucleotide
  Antisense strand to SEQ ID NO: 2280640
agucuccagagucuucuuc

SEQ ID NO: 2280642 - RNA, 19 nt, Artificial Sequence
  Description of Artificial Sequence: Synthetic oligonucleotide
  Sense strand starting at position 1252 of SEQ ID NO: 1884640
uagagucugagcuggagaa

SEQ ID NO: 2280643 - RNA, 19 nt, Artificial Sequence
  Description of Artificial Sequence: Synthetic oligonucleotide
  Antisense strand to SEQ ID NO: 2280642
uucuccagcucagacucua

SEQ ID NO: 2280644 - RNA, 19 nt, Artificial Sequence
  Description of Artificial Sequence: Synthetic oligonucleotide
  Sense strand starting at position 1253 of SEQ ID NO: 1884640
agagucugagcuggagaau

SEQ ID NO: 2280645 - RNA, 19 nt, Artificial Sequence
  Description of Artificial Sequence: Synthetic oligonucleotide
  Antisense strand to SEQ ID NO: 2280644
auucuccagcucagacucu

SEQ ID NO: 2280646 - RNA, 19 nt, Artificial Sequence
  Description of Artificial Sequence: Synthetic oligonucleotide
  Sense strand starting at position 1767 of SEQ ID NO: 1884640
ccggguaggaaucagugau

SEQ ID NO: 2280647 - RNA, 19 nt, Artificial Sequence
  Description of Artificial Sequence: Synthetic oligonucleotide
  Antisense strand to SEQ ID NO: 2280646
aucacugauuccuacccgg

SEQ ID NO: 2280648 - RNA, 19 nt, Artificial Sequence
  Description of Artificial Sequence: Synthetic oligonucleotide
  Sense strand starting at position 2295 of SEQ ID NO: 1884640
gccaguuuguaacucccua

SEQ ID NO: 2280649 - RNA, 19 nt, Artificial Sequence
  Description of Artificial Sequence: Synthetic oligonucleotide
  Antisense strand to SEQ ID NO: 2280648
uagggaguuacaaacuggc

SEQ ID NO: 2280650 - RNA, 19 nt, Artificial Sequence
  Description of Artificial Sequence: Synthetic oligonucleotide
  Sense strand starting at position 2299 of SEQ ID NO: 1884640
guuuguaacucccuagagu

SEQ ID NO: 2280651 - RNA, 19 nt, Artificial Sequence
  Description of Artificial Sequence: Synthetic oligonucleotide
  Antisense strand to SEQ ID NO: 2280650
acucuagggaguuacaaac

SEQ ID NO: 2280652 - RNA, 19 nt, Artificial Sequence
  Description of Artificial Sequence: Synthetic oligonucleotide
  Sense strand starting at position 2383 of SEQ ID NO: 1884640
aagagaguuugggcuaauc

SEQ ID NO: 2280653 - RNA, 19 nt, Artificial Sequence
  Description of Artificial Sequence: Synthetic oligonucleotide
  Antisense strand to SEQ ID NO: 2280652
gauuagcccaaacucucuu

SEQ ID NO: 2280654 - RNA, 19 nt, Artificial Sequence
  Description of Artificial Sequence: Synthetic oligonucleotide
  Sense strand starting at position 2385 of SEQ ID NO: 1884640
gagaguuugggcuaaucca

SEQ ID NO: 2280655 - RNA, 19 nt, Artificial Sequence
  Description of Artificial Sequence: Synthetic oligonucleotide
  Antisense strand to SEQ ID NO: 2280654
uggauuagcccaaacucuc

SEQ ID NO: 2280656 - RNA, 19 nt, Artificial Sequence
  Description of Artificial Sequence: Synthetic oligonucleotide
  Sense strand starting at position 2488 of SEQ ID NO: 1884640
cacagucugugcccaaaga

SEQ ID NO: 2280657 - RNA, 19 nt, Artificial Sequence
  Description of Artificial Sequence: Synthetic oligonucleotide
  Antisense strand to SEQ ID NO: 2280656
ucuuugggcacagacugug

SEQ ID NO: 2280658 - RNA, 19 nt, Artificial Sequence
  Description of Artificial Sequence: Synthetic oligonucleotide
  Sense strand starting at position 2513 of SEQ ID NO: 1884640
ccacucuuaguccgaguaa

SEQ ID NO: 2280659 - RNA, 19 nt, Artificial Sequence
  Description of Artificial Sequence: Synthetic oligonucleotide
  Antisense strand to SEQ ID NO: 2280658
uuacucggacuaagagugg

SEQ ID NO: 2280660 - RNA, 19 nt, Artificial Sequence
  Description of Artificial Sequence: Synthetic oligonucleotide
  Sense strand starting at position 2597 of SEQ ID NO: 1884640
auuccauacugaguaggaa

SEQ ID NO: 2280661 - RNA, 19 nt, Artificial Sequence
  Description of Artificial Sequence: Synthetic oligonucleotide
  Antisense strand to SEQ ID NO: 2280660
uuccuacucaguauggaau

SEQ ID NO: 2280662 - RNA, 19 nt, Artificial Sequence
  Description of Artificial Sequence: Synthetic oligonucleotide
  Sense strand starting at position 2702 of SEQ ID NO: 1884640
augugagucugagcagaaa

SEQ ID NO: 2280663 - RNA, 19 nt, Artificial Sequence
  Description of Artificial Sequence: Synthetic oligonucleotide
  Antisense strand to SEQ ID NO: 2280662
uuucugcucagacucacau

SEQ ID NO: 2280664 - RNA, 19 nt, Artificial Sequence
  Description of Artificial Sequence: Synthetic oligonucleotide
  Sense strand starting at position 2777 of SEQ ID NO: 1884640
agcacuuucccacauguua

SEQ ID NO: 2280665 - RNA, 19 nt, Artificial Sequence
  Description of Artificial Sequence: Synthetic oligonucleotide
  Antisense strand to SEQ ID NO: 2280664
uaacaugugggaaagugcu

SEQ ID NO: 2280666 - RNA, 19 nt, Artificial Sequence
  Description of Artificial Sequence: Synthetic oligonucleotide
  Sense strand starting at position 2938 of SEQ ID NO: 1884640
gaugcacaguugucaguga

SEQ ID NO: 2280667 - RNA, 19 nt, Artificial Sequence
  Description of Artificial Sequence: Synthetic oligonucleotide
  Antisense strand to SEQ ID NO: 2280666
ucacugacaacugugcauc

SEQ ID NO: 2280668 - RNA, 19 nt, Artificial Sequence
  Description of Artificial Sequence: Synthetic oligonucleotide
  Sense strand starting at position 2942 of SEQ ID NO: 1884640
cacaguugucagugagagg

SEQ ID NO: 2280669 - RNA, 19 nt, Artificial Sequence
  Description of Artificial Sequence: Synthetic oligonucleotide
  Antisense strand to SEQ ID NO: 2280668
ccucucacugacaacugug

SEQ ID NO: 2280670 - RNA, 19 nt, Artificial Sequence
  Description of Artificial Sequence: Synthetic oligonucleotide
  Sense strand starting at position 2947 of SEQ ID NO: 1884640
uugucagugagaggcuaua

SEQ ID NO: 2280671 - RNA, 19 nt, Artificial Sequence
  Description of Artificial Sequence: Synthetic oligonucleotide
  Antisense strand to SEQ ID NO: 2280670
uauagccucucacugacaa

SEQ ID NO: 2280672 - RNA, 19 nt, Artificial Sequence
  Description of Artificial Sequence: Synthetic oligonucleotide
  Sense strand starting at position 2993 of SEQ ID NO: 1884640
gucagagauugguuaggac

SEQ ID NO: 2280673 - RNA, 19 nt, Artificial Sequence
  Description of Artificial Sequence: Synthetic oligonucleotide
  Antisense strand to SEQ ID NO: 2280672
guccuaaccaaucucugac

SEQ ID NO: 2280674 - RNA, 19 nt, Artificial Sequence
  Description of Artificial Sequence: Synthetic oligonucleotide
  Sense strand starting at position 3015 of SEQ ID NO: 1884640
agggaugauuagcauugga

SEQ ID NO: 2280675 - RNA, 19 nt, Artificial Sequence
  Description of Artificial Sequence: Synthetic oligonucleotide
  Antisense strand to SEQ ID NO: 2280674
uccaaugcuaaucaucccu

SEQ ID NO: 2280676 - RNA, 19 nt, Artificial Sequence
  Description of Artificial Sequence: Synthetic oligonucleotide
  Sense strand starting at position 3049 of SEQ ID NO: 1884640
gguggacugcuguaaacaa

SEQ ID NO: 2280677 - RNA, 19 nt, Artificial Sequence
  Description of Artificial Sequence: Synthetic oligonucleotide
  Antisense strand to SEQ ID NO: 2280676
uuguuuacagcaguccacc

SEQ ID NO: 2280678 - RNA, 19 nt, Artificial Sequence
  Description of Artificial Sequence: Synthetic oligonucleotide
  Sense strand starting at position 3104 of SEQ ID NO: 1884640
gggcuccugucaucacuga

SEQ ID NO: 2280679 - RNA, 19 nt, Artificial Sequence
  Description of Artificial Sequence: Synthetic oligonucleotide
  Antisense strand to SEQ ID NO: 2280678
ucagugaugacaggagccc

SEQ ID NO: 2280680 - RNA, 19 nt, Artificial Sequence
  Description of Artificial Sequence: Synthetic oligonucleotide
  Sense strand starting at position 3108 of SEQ ID NO: 1884640
uccugucaucacugacuca

SEQ ID NO: 2280681 - RNA, 19 nt, Artificial Sequence
  Description of Artificial Sequence: Synthetic oligonucleotide
  Antisense strand to SEQ ID NO: 2280680
ugagucagugaugacagga

SEQ ID NO: 2280682 - RNA, 19 nt, Artificial Sequence
  Description of Artificial Sequence: Synthetic oligonucleotide
  Sense strand starting at position 3251 of SEQ ID NO: 1884640
ucuuccuuccagggauacu

SEQ ID NO: 2280683 - RNA, 19 nt, Artificial Sequence
  Description of Artificial Sequence: Synthetic oligonucleotide
  Antisense strand to SEQ ID NO: 2280682
aguaucccuggaaggaaga

SEQ ID NO: 2280684 - RNA, 19 nt, Artificial Sequence
  Description of Artificial Sequence: Synthetic oligonucleotide
  Sense strand starting at position 3348 of SEQ ID NO: 1884640
gguguucugcacuggaaga

SEQ ID NO: 2280685 - RNA, 19 nt, Artificial Sequence
  Description of Artificial Sequence: Synthetic oligonucleotide
  Antisense strand to SEQ ID NO: 2280684
ucuuccagugcagaacacc

SEQ ID NO: 2280686 - RNA, 19 nt, Artificial Sequence
  Description of Artificial Sequence: Synthetic oligonucleotide
  Sense strand starting at position 3398 of SEQ ID NO: 1884640
ggaggaagcugcucuggaa

SEQ ID NO: 2280687 - RNA, 19 nt, Artificial Sequence
  Description of Artificial Sequence: Synthetic oligonucleotide
  Antisense strand to SEQ ID NO: 2280686
uuccagagcagcuuccucc

SEQ ID NO: 2280688 - RNA, 19 nt, Artificial Sequence
  Description of Artificial Sequence: Synthetic oligonucleotide
  Sense strand starting at position 3402 of SEQ ID NO: 1884640
gaagcugcucuggaaagga

SEQ ID NO: 2280689 - RNA, 19 nt, Artificial Sequence
  Description of Artificial Sequence: Synthetic oligonucleotide
  Antisense strand to SEQ ID NO: 2280688
uccuuuccagagcagcuuc

SEQ ID NO: 2280690 - RNA, 19 nt, Artificial Sequence
  Description of Artificial Sequence: Synthetic oligonucleotide
  Sense strand starting at position 3634 of SEQ ID NO: 1884640
ugcggaguuagugauggaa

SEQ ID NO: 2280691 - RNA, 19 nt, Artificial Sequence
  Description of Artificial Sequence: Synthetic oligonucleotide
  Antisense strand to SEQ ID NO: 2280690
uuccaucacuaacuccgca

SEQ ID NO: 2280692 - RNA, 19 nt, Artificial Sequence
  Description of Artificial Sequence: Synthetic oligonucleotide
  Sense strand starting at position 3637 of SEQ ID NO: 1884640
ggaguuagugauggaagca

SEQ ID NO: 2280693 - RNA, 19 nt, Artificial Sequence
  Description of Artificial Sequence: Synthetic oligonucleotide
  Antisense strand to SEQ ID NO: 2280692
ugcuuccaucacuaacucc

SEQ ID NO: 2280694 - RNA, 19 nt, Artificial Sequence
  Description of Artificial Sequence: Synthetic oligonucleotide
  Sense strand starting at position 3793 of SEQ ID NO: 1884640
ggcuguuuccagaggugug

SEQ ID NO: 2280695 - RNA, 19 nt, Artificial Sequence
  Description of Artificial Sequence: Synthetic oligonucleotide
  Antisense strand to SEQ ID NO: 2280694
cacaccucuggaaacagcc

SEQ ID NO: 2280696 - RNA, 19 nt, Artificial Sequence
  Description of Artificial Sequence: Synthetic oligonucleotide
  Sense strand starting at position 102 of SEQ ID NO: 1884641
guuuaaucccuaggaacuu

SEQ ID NO: 2280697 - RNA, 19 nt, Artificial Sequence
  Description of Artificial Sequence: Synthetic oligonucleotide
  Antisense strand to SEQ ID NO: 2280696
aaguuccuagggauuaaac

SEQ ID NO: 2280698 - RNA, 19 nt, Artificial Sequence
  Description of Artificial Sequence: Synthetic oligonucleotide
  Sense strand starting at position 111 of SEQ ID NO: 1884641
cuaggaacuuuguauuuga

SEQ ID NO: 2280699 - RNA, 19 nt, Artificial Sequence
  Description of Artificial Sequence: Synthetic oligonucleotide
  Antisense strand to SEQ ID NO: 2280698
ucaaauacaaaguuccuag

SEQ ID NO: 2280700 - RNA, 19 nt, Artificial Sequence
  Description of Artificial Sequence: Synthetic oligonucleotide
  Sense strand starting at position 256 of SEQ ID NO: 1884641
cacucauaccuguggaagu

SEQ ID NO: 2280701 - RNA, 19 nt, Artificial Sequence
  Description of Artificial Sequence: Synthetic oligonucleotide
  Antisense strand to SEQ ID NO: 2280700
acuuccacagguaugagug

SEQ ID NO: 2280702 - RNA, 19 nt, Artificial Sequence
  Description of Artificial Sequence: Synthetic oligonucleotide
  Sense strand starting at position 626 of SEQ ID NO: 1884641
gucucauuaugcucagauc

SEQ ID NO: 2280703 - RNA, 19 nt, Artificial Sequence
  Description of Artificial Sequence: Synthetic oligonucleotide
  Antisense strand to SEQ ID NO: 2280702
gaucugagcauaaugagac

SEQ ID NO: 2280704 - RNA, 19 nt, Artificial Sequence
  Description of Artificial Sequence: Synthetic oligonucleotide
  Sense strand starting at position 647 of SEQ ID NO: 1884641
uuaugcuuuguguguaaau

SEQ ID NO: 2280705 - RNA, 19 nt, Artificial Sequence
  Description of Artificial Sequence: Synthetic oligonucleotide
  Antisense strand to SEQ ID NO: 2280704
auuuacacacaaagcauaa

SEQ ID NO: 2280706 - RNA, 19 nt, Artificial Sequence
  Description of Artificial Sequence: Synthetic oligonucleotide
  Sense strand starting at position 648 of SEQ ID NO: 1884641
uaugcuuuguguguaaaua

SEQ ID NO: 2280707 - RNA, 19 nt, Artificial Sequence
  Description of Artificial Sequence: Synthetic oligonucleotide
  Antisense strand to SEQ ID NO: 2280706
uauuuacacacaaagcaua

SEQ ID NO: 2280708 - RNA, 19 nt, Artificial Sequence
  Description of Artificial Sequence: Synthetic oligonucleotide
  Sense strand starting at position 649 of SEQ ID NO: 1884641
augcuuuguguguaaauaa

SEQ ID NO: 2280709 - RNA, 19 nt, Artificial Sequence
  Description of Artificial Sequence: Synthetic oligonucleotide
  Antisense strand to SEQ ID NO: 2280708
uuauuuacacacaaagcau

SEQ ID NO: 2280710 - RNA, 19 nt, Artificial Sequence
  Description of Artificial Sequence: Synthetic oligonucleotide
  Sense strand starting at position 658 of SEQ ID NO: 1884641
guguaaauaagcugggaaa

SEQ ID NO: 2280711 - RNA, 19 nt, Artificial Sequence
  Description of Artificial Sequence: Synthetic oligonucleotide
  Antisense strand to SEQ ID NO: 2280710
uuucccagcuuauuuacac

SEQ ID NO: 2280712 - RNA, 19 nt, Artificial Sequence
  Description of Artificial Sequence: Synthetic oligonucleotide
  Sense strand starting at position 687 of SEQ ID NO: 1884641
ggcaaauauuaagugcaaa

SEQ ID NO: 2280713 - RNA, 19 nt, Artificial Sequence
  Description of Artificial Sequence: Synthetic oligonucleotide
  Antisense strand to SEQ ID NO: 2280712
uuugcacuuaauauuugcc

SEQ ID NO: 2280714 - RNA, 19 nt, Artificial Sequence
  Description of Artificial Sequence: Synthetic oligonucleotide
  Sense strand starting at position 836 of SEQ ID NO: 1884641
aaacaagugugcuucuguu

SEQ ID NO: 2280715 - RNA, 19 nt, Artificial Sequence
  Description of Artificial Sequence: Synthetic oligonucleotide
  Antisense strand to SEQ ID NO: 2280714
aacagaagcacacuuguuu

SEQ ID NO: 2280716 - RNA, 19 nt, Artificial Sequence
  Description of Artificial Sequence: Synthetic oligonucleotide
  Sense strand starting at position 844 of SEQ ID NO: 1884641
gugcuucuguuaccuauuu

SEQ ID NO: 2280717 - RNA, 19 nt, Artificial Sequence
  Description of Artificial Sequence: Synthetic oligonucleotide
  Antisense strand to SEQ ID NO: 2280716
aaauagguaacagaagcac

SEQ ID NO: 2280718 - RNA, 19 nt, Artificial Sequence
  Description of Artificial Sequence: Synthetic oligonucleotide
  Sense strand starting at position 1008 of SEQ ID NO: 1884641
gcaggaaugugugcaguca

SEQ ID NO: 2280719 - RNA, 19 nt, Artificial Sequence
  Description of Artificial Sequence: Synthetic oligonucleotide
  Antisense strand to SEQ ID NO: 2280718
ugacugcacacauuccugc

SEQ ID NO: 2280720 - RNA, 19 nt, Artificial Sequence
  Description of Artificial Sequence: Synthetic oligonucleotide
  Sense strand starting at position 1040 of SEQ ID NO: 1884641
acugacggcucccugaauu

SEQ ID NO: 2280721 - RNA, 19 nt, Artificial Sequence
  Description of Artificial Sequence: Synthetic oligonucleotide
  Antisense strand to SEQ ID NO: 2280720
aauucagggagccgucagu

SEQ ID NO: 2280722 - RNA, 19 nt, Artificial Sequence
  Description of Artificial Sequence: Synthetic oligonucleotide
  Sense strand starting at position 1052 of SEQ ID NO: 1884641
cugaauucuugggcuggau

SEQ ID NO: 2280723 - RNA, 19 nt, Artificial Sequence
  Description of Artificial Sequence: Synthetic oligonucleotide
  Antisense strand to SEQ ID NO: 2280722
auccagcccaagaauucag

SEQ ID NO: 2280724 - RNA, 19 nt, Artificial Sequence
  Description of Artificial Sequence: Synthetic oligonucleotide
  Sense strand starting at position 1086 of SEQ ID NO: 1884641
aggaaccggauucguuaaa

SEQ ID NO: 2280725 - RNA, 19 nt, Artificial Sequence
  Description of Artificial Sequence: Synthetic oligonucleotide
  Antisense strand to SEQ ID NO: 2280724
uuuaacgaauccgguuccu

SEQ ID NO: 2280726 - RNA, 19 nt, Artificial Sequence
  Description of Artificial Sequence: Synthetic oligonucleotide
  Sense strand starting at position 1096 of SEQ ID NO: 1884641
uucguuaaacgcugguaga

SEQ ID NO: 2280727 - RNA, 19 nt, Artificial Sequence
  Description of Artificial Sequence: Synthetic oligonucleotide
  Antisense strand to SEQ ID NO: 2280726
ucuaccagcguuuaacgaa

SEQ ID NO: 2280728 - RNA, 19 nt, Artificial Sequence
  Description of Artificial Sequence: Synthetic oligonucleotide
  Sense strand starting at position 1097 of SEQ ID NO: 1884641
ucguuaaacgcugguagaa

SEQ ID NO: 2280729 - RNA, 19 nt, Artificial Sequence
  Description of Artificial Sequence: Synthetic oligonucleotide
  Antisense strand to SEQ ID NO: 2280728
uucuaccagcguuuaacga

SEQ ID NO: 2280730 - RNA, 19 nt, Artificial Sequence
  Description of Artificial Sequence: Synthetic oligonucleotide
  Sense strand starting at position 1190 of SEQ ID NO: 1884641
ggaaauauagcaggucgau

SEQ ID NO: 2280731 - RNA, 19 nt, Artificial Sequence
  Description of Artificial Sequence: Synthetic oligonucleotide
  Antisense strand to SEQ ID NO: 2280730
aucgaccugcuauauuucc

SEQ ID NO: 2280732 - RNA, 19 nt, Artificial Sequence
  Description of Artificial Sequence: Synthetic oligonucleotide
  Sense strand starting at position 1247 of SEQ ID NO: 1884641
gugagauuacgagagucua

SEQ ID NO: 2280733 - RNA, 19 nt, Artificial Sequence
  Description of Artificial Sequence: Synthetic oligonucleotide
  Antisense strand to SEQ ID NO: 2280732
uagacucucguaaucucac

SEQ ID NO: 2280734 - RNA, 19 nt, Artificial Sequence
  Description of Artificial Sequence: Synthetic oligonucleotide
  Sense strand starting at position 1262 of SEQ ID NO: 1884641
ucuauuaagugucugggau

SEQ ID NO: 2280735 - RNA, 19 nt, Artificial Sequence
  Description of Artificial Sequence: Synthetic oligonucleotide
  Antisense strand to SEQ ID NO: 2280734
aucccagacacuuaauaga

SEQ ID NO: 2280736 - RNA, 19 nt, Artificial Sequence
  Description of Artificial Sequence: Synthetic oligonucleotide
  Sense strand starting at position 1263 of SEQ ID NO: 1884641
cuauuaagugucugggaua

SEQ ID NO: 2280737 - RNA, 19 nt, Artificial Sequence
  Description of Artificial Sequence: Synthetic oligonucleotide
  Antisense strand to SEQ ID NO: 2280736
uaucccagacacuuaauag

SEQ ID NO: 2280738 - RNA, 19 nt, Artificial Sequence
  Description of Artificial Sequence: Synthetic oligonucleotide
  Sense strand starting at position 1266 of SEQ ID NO: 1884641
uuaagugucugggauauaa

SEQ ID NO: 2280739 - RNA, 19 nt, Artificial Sequence
  Description of Artificial Sequence: Synthetic oligonucleotide
  Antisense strand to SEQ ID NO: 2280738
uuauaucccagacacuuaa

SEQ ID NO: 2280740 - RNA, 19 nt, Artificial Sequence
  Description of Artificial Sequence: Synthetic oligonucleotide
  Sense strand starting at position 1317 of SEQ ID NO: 1884641
gagccuuucgggcaguacu

SEQ ID NO: 2280741 - RNA, 19 nt, Artificial Sequence
  Description of Artificial Sequence: Synthetic oligonucleotide
  Antisense strand to SEQ ID NO: 2280740
aguacugcccgaaaggcuc

SEQ ID NO: 2280742 - RNA, 19 nt, Artificial Sequence
  Description of Artificial Sequence: Synthetic oligonucleotide
  Sense strand starting at position 2306 of SEQ ID NO: 1884641
ggccuuugcugagugucua

SEQ ID NO: 2280743 - RNA, 19 nt, Artificial Sequence
  Description of Artificial Sequence: Synthetic oligonucleotide
  Antisense strand to SEQ ID NO: 2280742
uagacacucagcaaaggcc

SEQ ID NO: 2280744 - RNA, 19 nt, Artificial Sequence
  Description of Artificial Sequence: Synthetic oligonucleotide
  Sense strand starting at position 2389 of SEQ ID NO: 1884641
ggauucgcaccuugcagaa

SEQ ID NO: 2280745 - RNA, 19 nt, Artificial Sequence
  Description of Artificial Sequence: Synthetic oligonucleotide
  Antisense strand to SEQ ID NO: 2280744
uucugcaaggugcgaaucc

SEQ ID NO: 2280746 - RNA, 19 nt, Artificial Sequence
  Description of Artificial Sequence: Synthetic oligonucleotide
  Sense strand starting at position 2655 of SEQ ID NO: 1884641
uccgauguaggaugggaaa

SEQ ID NO: 2280747 - RNA, 19 nt, Artificial Sequence
  Description of Artificial Sequence: Synthetic oligonucleotide
  Antisense strand to SEQ ID NO: 2280746
uuucccauccuacaucgga

SEQ ID NO: 2280748 - RNA, 19 nt, Artificial Sequence
  Description of Artificial Sequence: Synthetic oligonucleotide
  Sense strand starting at position 2689 of SEQ ID NO: 1884641
cugcgaggcugcuuuaaga

SEQ ID NO: 2280749 - RNA, 19 nt, Artificial Sequence
  Description of Artificial Sequence: Synthetic oligonucleotide
  Antisense strand to SEQ ID NO: 2280748
ucuuaaagcagccucgcag

SEQ ID NO: 2280750 - RNA, 19 nt, Artificial Sequence
  Description of Artificial Sequence: Synthetic oligonucleotide
  Sense strand starting at position 2705 of SEQ ID NO: 1884641
agacaugaaucagauguga

SEQ ID NO: 2280751 - RNA, 19 nt, Artificial Sequence
  Description of Artificial Sequence: Synthetic oligonucleotide
  Antisense strand to SEQ ID NO: 2280750
ucacaucugauucaugucu

SEQ ID NO: 2280752 - RNA, 19 nt, Artificial Sequence
  Description of Artificial Sequence: Synthetic oligonucleotide
  Sense strand starting at position 2758 of SEQ ID NO: 1884641
gcgcgagucuuggucauuu

SEQ ID NO: 2280753 - RNA, 19 nt, Artificial Sequence
  Description of Artificial Sequence: Synthetic oligonucleotide
  Antisense strand to SEQ ID NO: 2280752
aaaugaccaagacucgcgc

SEQ ID NO: 2280754 - RNA, 19 nt, Artificial Sequence
  Description of Artificial Sequence: Synthetic oligonucleotide
  Sense strand starting at position 2760 of SEQ ID NO: 1884641
gcgagucuuggucauuuca

SEQ ID NO: 2280755 - RNA, 19 nt, Artificial Sequence
  Description of Artificial Sequence: Synthetic oligonucleotide
  Antisense strand to SEQ ID NO: 2280754
ugaaaugaccaagacucgc

SEQ ID NO: 2280756 - RNA, 19 nt, Artificial Sequence
  Description of Artificial Sequence: Synthetic oligonucleotide
  Sense strand starting at position 3124 of SEQ ID NO: 1884641
ucuugugcuagauguugca

SEQ ID NO: 2280757 - RNA, 19 nt, Artificial Sequence
  Description of Artificial Sequence: Synthetic oligonucleotide
  Antisense strand to SEQ ID NO: 2280756
ugcaacaucuagcacaaga

SEQ ID NO: 2280758 - RNA, 19 nt, Artificial Sequence
  Description of Artificial Sequence: Synthetic oligonucleotide
  Sense strand starting at position 3206 of SEQ ID NO: 1884641
ggauuugacucggagcaca

SEQ ID NO: 2280759 - RNA, 19 nt, Artificial Sequence
  Description of Artificial Sequence: Synthetic oligonucleotide
  Antisense strand to SEQ ID NO: 2280758
ugugcuccgagucaaaucc

SEQ ID NO: 2280760 - RNA, 19 nt, Artificial Sequence
  Description of Artificial Sequence: Synthetic oligonucleotide
  Sense strand starting at position 3313 of SEQ ID NO: 1884641
acuaguaagucugagaaga

SEQ ID NO: 2280761 - RNA, 19 nt, Artificial Sequence
  Description of Artificial Sequence: Synthetic oligonucleotide
  Antisense strand to SEQ ID NO: 2280760
ucuucucagacuuacuagu

SEQ ID NO: 2280762 - RNA, 19 nt, Artificial Sequence
  Description of Artificial Sequence: Synthetic oligonucleotide
  Sense strand starting at position 3355 of SEQ ID NO: 1884641
gagaaaugagcccguccaa

SEQ ID NO: 2280763 - RNA, 19 nt, Artificial Sequence
  Description of Artificial Sequence: Synthetic oligonucleotide
  Antisense strand to SEQ ID NO: 2280762
uuggacgggcucauuucuc

SEQ ID NO: 2280764 - RNA, 19 nt, Artificial Sequence
  Description of Artificial Sequence: Synthetic oligonucleotide
  Sense strand starting at position 3371 of SEQ ID NO: 1884641
caaggugaauuccuugauu

SEQ ID NO: 2280765 - RNA, 19 nt, Artificial Sequence
  Description of Artificial Sequence: Synthetic oligonucleotide
  Antisense strand to SEQ ID NO: 2280764
aaucaaggaauucaccuug

SEQ ID NO: 2280766 - RNA, 19 nt, Artificial Sequence
  Description of Artificial Sequence: Synthetic oligonucleotide
  Sense strand starting at position 3373 of SEQ ID NO: 1884641
aggugaauuccuugauucu

SEQ ID NO: 2280767 - RNA, 19 nt, Artificial Sequence
  Description of Artificial Sequence: Synthetic oligonucleotide
  Antisense strand to SEQ ID NO: 2280766
agaaucaaggaauucaccu

SEQ ID NO: 2280768 - RNA, 19 nt, Artificial Sequence
  Description of Artificial Sequence: Synthetic oligonucleotide
  Sense strand starting at position 3374 of SEQ ID NO: 1884641
ggugaauuccuugauucuc

SEQ ID NO: 2280769 - RNA, 19 nt, Artificial Sequence
  Description of Artificial Sequence: Synthetic oligonucleotide
  Antisense strand to SEQ ID NO: 2280768
gagaaucaaggaauucacc

SEQ ID NO: 2280770 - RNA, 19 nt, Artificial Sequence
  Description of Artificial Sequence: Synthetic oligonucleotide
  Sense strand starting at position 3384 of SEQ ID NO: 1884641
uugauucuccauugugagu

SEQ ID NO: 2280771 - RNA, 19 nt, Artificial Sequence
  Description of Artificial Sequence: Synthetic oligonucleotide
  Antisense strand to SEQ ID NO: 2280770
acucacaauggagaaucaa

SEQ ID NO: 2280772 - RNA, 19 nt, Artificial Sequence
  Description of Artificial Sequence: Synthetic oligonucleotide
  Sense strand starting at position 3959 of SEQ ID NO: 1884641
gcaauauaucgagacccau

SEQ ID NO: 2280773 - RNA, 19 nt, Artificial Sequence
  Description of Artificial Sequence: Synthetic oligonucleotide
  Antisense strand to SEQ ID NO: 2280772
augggucucgauauauugc

SEQ ID NO: 2280774 - RNA, 19 nt, Artificial Sequence
  Description of Artificial Sequence: Synthetic oligonucleotide
  Sense strand starting at position 3965 of SEQ ID NO: 1884641
uaucgagacccaugucuau

SEQ ID NO: 2280775 - RNA, 19 nt, Artificial Sequence
  Description of Artificial Sequence: Synthetic oligonucleotide
  Antisense strand to SEQ ID NO: 2280774
auagacaugggucucgaua

SEQ ID NO: 2280776 - RNA, 19 nt, Artificial Sequence
  Description of Artificial Sequence: Synthetic oligonucleotide
  Sense strand starting at position 19 of SEQ ID NO: 1884642
gaauaaagaucuggaggaa

SEQ ID NO: 2280777 - RNA, 19 nt, Artificial Sequence
  Description of Artificial Sequence: Synthetic oligonucleotide
  Antisense strand to SEQ ID NO: 2280776
uuccuccagaucuuuauuc

SEQ ID NO: 2280778 - RNA, 19 nt, Artificial Sequence
  Description of Artificial Sequence: Synthetic oligonucleotide
  Sense strand starting at position 274 of SEQ ID NO: 1884642
aucugcauuccagagcaga

SEQ ID NO: 2280779 - RNA, 19 nt, Artificial Sequence
  Description of Artificial Sequence: Synthetic oligonucleotide
  Antisense strand to SEQ ID NO: 2280778
ucugcucuggaaugcagau

SEQ ID NO: 2280780 - RNA, 19 nt, Artificial Sequence
  Description of Artificial Sequence: Synthetic oligonucleotide
  Sense strand starting at position 346 of SEQ ID NO: 1884642
guugcaguucuauugcauu

SEQ ID NO: 2280781 - RNA, 19 nt, Artificial Sequence
  Description of Artificial Sequence: Synthetic oligonucleotide
  Antisense strand to SEQ ID NO: 2280780
aaugcaauagaacugcaac

SEQ ID NO: 2280782 - RNA, 19 nt, Artificial Sequence
  Description of Artificial Sequence: Synthetic oligonucleotide
  Sense strand starting at position 352 of SEQ ID NO: 1884642
guucuauugcauuggucag

SEQ ID NO: 2280783 - RNA, 19 nt, Artificial Sequence
  Description of Artificial Sequence: Synthetic oligonucleotide
  Antisense strand to SEQ ID NO: 2280782
cugaccaaugcaauagaac

SEQ ID NO: 2280784 - RNA, 19 nt, Artificial Sequence
  Description of Artificial Sequence: Synthetic oligonucleotide
  Sense strand starting at position 354 of SEQ ID NO: 1884642
ucuauugcauuggucagaa

SEQ ID NO: 2280785 - RNA, 19 nt, Artificial Sequence
  Description of Artificial Sequence: Synthetic oligonucleotide
  Antisense strand to SEQ ID NO: 2280784
uucugaccaaugcaauaga

SEQ ID NO: 2280786 - RNA, 19 nt, Artificial Sequence
  Description of Artificial Sequence: Synthetic oligonucleotide
  Sense strand starting at position 356 of SEQ ID NO: 1884642
uauugcauuggucagaacu

SEQ ID NO: 2280787 - RNA, 19 nt, Artificial Sequence
  Description of Artificial Sequence: Synthetic oligonucleotide
  Antisense strand to SEQ ID NO: 2280786
aguucugaccaaugcaaua

SEQ ID NO: 2280788 - RNA, 19 nt, Artificial Sequence
  Description of Artificial Sequence: Synthetic oligonucleotide
  Sense strand starting at position 366 of SEQ ID NO: 1884642
gucagaacuuugucacaua

SEQ ID NO: 2280789 - RNA, 19 nt, Artificial Sequence
  Description of Artificial Sequence: Synthetic oligonucleotide
  Antisense strand to SEQ ID NO: 2280788
uaugugacaaaguucugac

SEQ ID NO: 2280790 - RNA, 19 nt, Artificial Sequence
  Description of Artificial Sequence: Synthetic oligonucleotide
  Sense strand starting at position 384 of SEQ ID NO: 1884642
agugacauguaauugcaga

SEQ ID NO: 2280791 - RNA, 19 nt, Artificial Sequence
  Description of Artificial Sequence: Synthetic oligonucleotide
  Antisense strand to SEQ ID NO: 2280790
ucugcaauuacaugucacu

SEQ ID NO: 2280792 - RNA, 19 nt, Artificial Sequence
  Description of Artificial Sequence: Synthetic oligonucleotide
  Sense strand starting at position 391 of SEQ ID NO: 1884642
uguaauugcagaggagucu

SEQ ID NO: 2280793 - RNA, 19 nt, Artificial Sequence
  Description of Artificial Sequence: Synthetic oligonucleotide
  Antisense strand to SEQ ID NO: 2280792
agacuccucugcaauuaca

SEQ ID NO: 2280794 - RNA, 19 nt, Artificial Sequence
  Description of Artificial Sequence: Synthetic oligonucleotide
  Sense strand starting at position 483 of SEQ ID NO: 1884642
gagaauagaugaugagaga

SEQ ID NO: 2280795 - RNA, 19 nt, Artificial Sequence
  Description of Artificial Sequence: Synthetic oligonucleotide
  Antisense strand to SEQ ID NO: 2280794
ucucucaucaucuauucuc

SEQ ID NO: 2280796 - RNA, 19 nt, Artificial Sequence
  Description of Artificial Sequence: Synthetic oligonucleotide
  Sense strand starting at position 1024 of SEQ ID NO: 1884642
ggcuccagacucuguuuau

SEQ ID NO: 2280797 - RNA, 19 nt, Artificial Sequence
  Description of Artificial Sequence: Synthetic oligonucleotide
  Antisense strand to SEQ ID NO: 2280796
auaaacagagucuggagcc

SEQ ID NO: 2280798 - RNA, 19 nt, Artificial Sequence
  Description of Artificial Sequence: Synthetic oligonucleotide
  Sense strand starting at position 1025 of SEQ ID NO: 1884642
gcuccagacucuguuuauc

SEQ ID NO: 2280799 - RNA, 19 nt, Artificial Sequence
  Description of Artificial Sequence: Synthetic oligonucleotide
  Antisense strand to SEQ ID NO: 2280798
gauaaacagagucuggagc

SEQ ID NO: 2280800 - RNA, 19 nt, Artificial Sequence
  Description of Artificial Sequence: Synthetic oligonucleotide
  Sense strand starting at position 2065 of SEQ ID NO: 1884642
agcucugagccugaugcua

SEQ ID NO: 2280801 - RNA, 19 nt, Artificial Sequence
  Description of Artificial Sequence: Synthetic oligonucleotide
  Antisense strand to SEQ ID NO: 2280800
uagcaucaggcucagagcu

SEQ ID NO: 2280802 - RNA, 19 nt, Artificial Sequence
  Description of Artificial Sequence: Synthetic oligonucleotide
  Sense strand starting at position 2103 of SEQ ID NO: 1884642
augcuuguuuggucacuca

SEQ ID NO: 2280803 - RNA, 19 nt, Artificial Sequence
  Description of Artificial Sequence: Synthetic oligonucleotide
  Antisense strand to SEQ ID NO: 2280802
ugagugaccaaacaagcau

SEQ ID NO: 2280804 - RNA, 19 nt, Artificial Sequence
  Description of Artificial Sequence: Synthetic oligonucleotide
  Sense strand starting at position 2178 of SEQ ID NO: 1884642
ggagguacucaaugaucuu

SEQ ID NO: 2280805 - RNA, 19 nt, Artificial Sequence
  Description of Artificial Sequence: Synthetic oligonucleotide
  Antisense strand to SEQ ID NO: 2280804
aagaucauugaguaccucc

SEQ ID NO: 2280806 - RNA, 19 nt, Artificial Sequence
  Description of Artificial Sequence: Synthetic oligonucleotide
  Sense strand starting at position 2184 of SEQ ID NO: 1884642
acucaaugaucuuugcagu

SEQ ID NO: 2280807 - RNA, 19 nt, Artificial Sequence
  Description of Artificial Sequence: Synthetic oligonucleotide
  Antisense strand to SEQ ID NO: 2280806
acugcaaagaucauugagu

SEQ ID NO: 2280808 - RNA, 19 nt, Artificial Sequence
  Description of Artificial Sequence: Synthetic oligonucleotide
  Sense strand starting at position 2185 of SEQ ID NO: 1884642
cucaaugaucuuugcagua

SEQ ID NO: 2280809 - RNA, 19 nt, Artificial Sequence
  Description of Artificial Sequence: Synthetic oligonucleotide
  Antisense strand to SEQ ID NO: 2280808
uacugcaaagaucauugag

SEQ ID NO: 2280810 - RNA, 19 nt, Artificial Sequence
  Description of Artificial Sequence: Synthetic oligonucleotide
  Sense strand starting at position 2198 of SEQ ID NO: 1884642
gcaguaggcccagaucuuu

SEQ ID NO: 2280811 - RNA, 19 nt, Artificial Sequence
  Description of Artificial Sequence: Synthetic oligonucleotide
  Antisense strand to SEQ ID NO: 2280810
aaagaucugggccuacugc

SEQ ID NO: 2280812 - RNA, 19 nt, Artificial Sequence
  Description of Artificial Sequence: Synthetic oligonucleotide
  Sense strand starting at position 2553 of SEQ ID NO: 1884642
augacaaauugugcucaca

SEQ ID NO: 2280813 - RNA, 19 nt, Artificial Sequence
  Description of Artificial Sequence: Synthetic oligonucleotide
  Antisense strand to SEQ ID NO: 2280812
ugugagcacaauuugucau

SEQ ID NO: 2280814 - RNA, 19 nt, Artificial Sequence
  Description of Artificial Sequence: Synthetic oligonucleotide
  Sense strand starting at position 2555 of SEQ ID NO: 1884642
gacaaauugugcucacaga

SEQ ID NO: 2280815 - RNA, 19 nt, Artificial Sequence
  Description of Artificial Sequence: Synthetic oligonucleotide
  Antisense strand to SEQ ID NO: 2280814
ucugugagcacaauuuguc

SEQ ID NO: 2280816 - RNA, 19 nt, Artificial Sequence
  Description of Artificial Sequence: Synthetic oligonucleotide
  Sense strand starting at position 2556 of SEQ ID NO: 1884642
acaaauugugcucacagau

SEQ ID NO: 2280817 - RNA, 19 nt, Artificial Sequence
  Description of Artificial Sequence: Synthetic oligonucleotide
  Antisense strand to SEQ ID NO: 2280816
aucugugagcacaauuugu

SEQ ID NO: 2280818 - RNA, 19 nt, Artificial Sequence
  Description of Artificial Sequence: Synthetic oligonucleotide
  Sense strand starting at position 2645 of SEQ ID NO: 1884642
gugaguaagcaccggugaa

SEQ ID NO: 2280819 - RNA, 19 nt, Artificial Sequence
  Description of Artificial Sequence: Synthetic oligonucleotide
  Antisense strand to SEQ ID NO: 2280818
uucaccggugcuuacucac

SEQ ID NO: 2280820 - RNA, 19 nt, Artificial Sequence
  Description of Artificial Sequence: Synthetic oligonucleotide
  Sense strand starting at position 2646 of SEQ ID NO: 1884642
ugaguaagcaccggugaaa

SEQ ID NO: 2280821 - RNA, 19 nt, Artificial Sequence
  Description of Artificial Sequence: Synthetic oligonucleotide
  Antisense strand to SEQ ID NO: 2280820
uuucaccggugcuuacuca

SEQ ID NO: 2280822 - RNA, 19 nt, Artificial Sequence
  Description of Artificial Sequence: Synthetic oligonucleotide
  Sense strand starting at position 2699 of SEQ ID NO: 1884642
guggcuugcucaccagaca

SEQ ID NO: 2280823 - RNA, 19 nt, Artificial Sequence
  Description of Artificial Sequence: Synthetic oligonucleotide
  Antisense strand to SEQ ID NO: 2280822
ugucuggugagcaagccac

SEQ ID NO: 2280824 - RNA, 19 nt, Artificial Sequence
  Description of Artificial Sequence: Synthetic oligonucleotide
  Sense strand starting at position 2700 of SEQ ID NO: 1884642
uggcuugcucaccagacaa

SEQ ID NO: 2280825 - RNA, 19 nt, Artificial Sequence
  Description of Artificial Sequence: Synthetic oligonucleotide
  Antisense strand to SEQ ID NO: 2280824
uugucuggugagcaagcca

SEQ ID NO: 2280826 - RNA, 19 nt, Artificial Sequence
  Description of Artificial Sequence: Synthetic oligonucleotide
  Sense strand starting at position 2910 of SEQ ID NO: 1884642
cagcgacaagcuuacgaaa

SEQ ID NO: 2280827 - RNA, 19 nt, Artificial Sequence
  Description of Artificial Sequence: Synthetic oligonucleotide
  Antisense strand to SEQ ID NO: 2280826
uuucguaagcuugucgcug

SEQ ID NO: 2280828 - RNA, 19 nt, Artificial Sequence
  Description of Artificial Sequence: Synthetic oligonucleotide
  Sense strand starting at position 2992 of SEQ ID NO: 1884642
cacggaacccagugguuaa

SEQ ID NO: 2280829 - RNA, 19 nt, Artificial Sequence
  Description of Artificial Sequence: Synthetic oligonucleotide
  Antisense strand to SEQ ID NO: 2280828
uuaaccacuggguuccgug

SEQ ID NO: 2280830 - RNA, 19 nt, Artificial Sequence
  Description of Artificial Sequence: Synthetic oligonucleotide
  Sense strand starting at position 3094 of SEQ ID NO: 1884642
uucuuagucugggcuuaua

SEQ ID NO: 2280831 - RNA, 19 nt, Artificial Sequence
  Description of Artificial Sequence: Synthetic oligonucleotide
  Antisense strand to SEQ ID NO: 2280830
uauaagcccagacuaagaa

SEQ ID NO: 2280832 - RNA, 19 nt, Artificial Sequence
  Description of Artificial Sequence: Synthetic oligonucleotide
  Sense strand starting at position 3097 of SEQ ID NO: 1884642
uuagucugggcuuauacaa

SEQ ID NO: 2280833 - RNA, 19 nt, Artificial Sequence
  Description of Artificial Sequence: Synthetic oligonucleotide
  Antisense strand to SEQ ID NO: 2280832
uuguauaagcccagacuaa

SEQ ID NO: 2280834 - RNA, 19 nt, Artificial Sequence
  Description of Artificial Sequence: Synthetic oligonucleotide
  Sense strand starting at position 3163 of SEQ ID NO: 1884642
gcguacguuauauagauua

SEQ ID NO: 2280835 - RNA, 19 nt, Artificial Sequence
  Description of Artificial Sequence: Synthetic oligonucleotide
  Antisense strand to SEQ ID NO: 2280834
uaaucuauauaacguacgc

SEQ ID NO: 2280836 - RNA, 19 nt, Artificial Sequence
  Description of Artificial Sequence: Synthetic oligonucleotide
  Sense strand starting at position 3267 of SEQ ID NO: 1884642
aggugagauguucacuuga

SEQ ID NO: 2280837 - RNA, 19 nt, Artificial Sequence
  Description of Artificial Sequence: Synthetic oligonucleotide
  Antisense strand to SEQ ID NO: 2280836
ucaagugaacaucucaccu

SEQ ID NO: 2280838 - RNA, 19 nt, Artificial Sequence
  Description of Artificial Sequence: Synthetic oligonucleotide
  Sense strand starting at position 3269 of SEQ ID NO: 1884642
gugagauguucacuugagc

SEQ ID NO: 2280839 - RNA, 19 nt, Artificial Sequence
  Description of Artificial Sequence: Synthetic oligonucleotide
  Antisense strand to SEQ ID NO: 2280838
gcucaagugaacaucucac

SEQ ID NO: 2280840 - RNA, 19 nt, Artificial Sequence
  Description of Artificial Sequence: Synthetic oligonucleotide
  Sense strand starting at position 3447 of SEQ ID NO: 1884642
acaugauugcaccgcuaug

SEQ ID NO: 2280841 - RNA, 19 nt, Artificial Sequence
  Description of Artificial Sequence: Synthetic oligonucleotide
  Antisense strand to SEQ ID NO: 2280840
cauagcggugcaaucaugu

SEQ ID NO: 2280842 - RNA, 19 nt, Artificial Sequence
  Description of Artificial Sequence: Synthetic oligonucleotide
  Sense strand starting at position 3564 of SEQ ID NO: 1884642
gccauauucuugccagaug

SEQ ID NO: 2280843 - RNA, 19 nt, Artificial Sequence
  Description of Artificial Sequence: Synthetic oligonucleotide
  Antisense strand to SEQ ID NO: 2280842
caucuggcaagaauauggc

SEQ ID NO: 2280844 - RNA, 19 nt, Artificial Sequence
  Description of Artificial Sequence: Synthetic oligonucleotide
  Sense strand starting at position 3586 of SEQ ID NO: 1884642
agggaaugacucuggccuu

SEQ ID NO: 2280845 - RNA, 19 nt, Artificial Sequence
  Description of Artificial Sequence: Synthetic oligonucleotide
  Antisense strand to SEQ ID NO: 2280844
aaggccagagucauucccu

SEQ ID NO: 2280846 - RNA, 19 nt, Artificial Sequence
  Description of Artificial Sequence: Synthetic oligonucleotide
  Sense strand starting at position 3814 of SEQ ID NO: 1884642
cuuugaguguuuguuuaga

SEQ ID NO: 2280847 - RNA, 19 nt, Artificial Sequence
  Description of Artificial Sequence: Synthetic oligonucleotide
  Antisense strand to SEQ ID NO: 2280846
ucuaaacaaacacucaaag

SEQ ID NO: 2280848 - RNA, 19 nt, Artificial Sequence
  Description of Artificial Sequence: Synthetic oligonucleotide
  Sense strand starting at position 3823 of SEQ ID NO: 1884642
uuuguuuagaggcauaguu

SEQ ID NO: 2280849 - RNA, 19 nt, Artificial Sequence
  Description of Artificial Sequence: Synthetic oligonucleotide
  Antisense strand to SEQ ID NO: 2280848
aacuaugccucuaaacaaa

SEQ ID NO: 2280850 - RNA, 19 nt, Artificial Sequence
  Description of Artificial Sequence: Synthetic oligonucleotide
  Sense strand starting at position 3831 of SEQ ID NO: 1884642
gaggcauaguuuccuuaaa

SEQ ID NO: 2280851 - RNA, 19 nt, Artificial Sequence
  Description of Artificial Sequence: Synthetic oligonucleotide
  Antisense strand to SEQ ID NO: 2280850
uuuaaggaaacuaugccuc

SEQ ID NO: 2280852 - RNA, 19 nt, Artificial Sequence
  Description of Artificial Sequence: Synthetic oligonucleotide
  Sense strand starting at position 3832 of SEQ ID NO: 1884642
aggcauaguuuccuuaaau

SEQ ID NO: 2280853 - RNA, 19 nt, Artificial Sequence
  Description of Artificial Sequence: Synthetic oligonucleotide
  Antisense strand to SEQ ID NO: 2280852
auuuaaggaaacuaugccu

SEQ ID NO: 2280854 - RNA, 19 nt, Artificial Sequence
  Description of Artificial Sequence: Synthetic oligonucleotide
  Sense strand starting at position 3833 of SEQ ID NO: 1884642
ggcauaguuuccuuaaaug

SEQ ID NO: 2280855 - RNA, 19 nt, Artificial Sequence
  Description of Artificial Sequence: Synthetic oligonucleotide
  Antisense strand to SEQ ID NO: 2280854
cauuuaaggaaacuaugcc

SEQ ID NO: 2280856 - RNA, 19 nt, Artificial Sequence
  Description of Artificial Sequence: Synthetic oligonucleotide
  Sense strand starting at position 67 of SEQ ID NO: 1884643
gugggaguuaggcaugaau

SEQ ID NO: 2280857 - RNA, 19 nt, Artificial Sequence
  Description of Artificial Sequence: Synthetic oligonucleotide
  Antisense strand to SEQ ID NO: 2280856
auucaugccuaacucccac

SEQ ID NO: 2280858 - RNA, 19 nt, Artificial Sequence
  Description of Artificial Sequence: Synthetic oligonucleotide
  Sense strand starting at position 69 of SEQ ID NO: 1884643
gggaguuaggcaugaauaa

SEQ ID NO: 2280859 - RNA, 19 nt, Artificial Sequence
  Description of Artificial Sequence: Synthetic oligonucleotide
  Antisense strand to SEQ ID NO: 2280858
uuauucaugccuaacuccc

SEQ ID NO: 2280860 - RNA, 19 nt, Artificial Sequence
  Description of Artificial Sequence: Synthetic oligonucleotide
  Sense strand starting at position 80 of SEQ ID NO: 1884643
augaauaaugccuggugga

SEQ ID NO: 2280861 - RNA, 19 nt, Artificial Sequence
  Description of Artificial Sequence: Synthetic oligonucleotide
  Antisense strand to SEQ ID NO: 2280860
uccaccaggcauuauucau

SEQ ID NO: 2280862 - RNA, 19 nt, Artificial Sequence
  Description of Artificial Sequence: Synthetic oligonucleotide
  Sense strand starting at position 81 of SEQ ID NO: 1884643
ugaauaaugccugguggau

SEQ ID NO: 2280863 - RNA, 19 nt, Artificial Sequence
  Description of Artificial Sequence: Synthetic oligonucleotide
  Antisense strand to SEQ ID NO: 2280862
auccaccaggcauuauuca

SEQ ID NO: 2280864 - RNA, 19 nt, Artificial Sequence
  Description of Artificial Sequence: Synthetic oligonucleotide
  Sense strand starting at position 109 of SEQ ID NO: 1884643
agggaucuaugagaagagu

SEQ ID NO: 2280865 - RNA, 19 nt, Artificial Sequence
  Description of Artificial Sequence: Synthetic oligonucleotide
  Antisense strand to SEQ ID NO: 2280864
acucuucucauagaucccu

SEQ ID NO: 2280866 - RNA, 19 nt, Artificial Sequence
  Description of Artificial Sequence: Synthetic oligonucleotide
  Sense strand starting at position 132 of SEQ ID NO: 1884643
gggagaaccugagacuauu

SEQ ID NO: 2280867 - RNA, 19 nt, Artificial Sequence
  Description of Artificial Sequence: Synthetic oligonucleotide
  Antisense strand to SEQ ID NO: 2280866
aauagucucagguucuccc

SEQ ID NO: 2280868 - RNA, 19 nt, Artificial Sequence
  Description of Artificial Sequence: Synthetic oligonucleotide
  Sense strand starting at position 186 of SEQ ID NO: 1884643
ugcauuaauggacacuuau

SEQ ID NO: 2280869 - RNA, 19 nt, Artificial Sequence
  Description of Artificial Sequence: Synthetic oligonucleotide
  Antisense strand to SEQ ID NO: 2280868
auaaguguccauuaaugca

SEQ ID NO: 2280870 - RNA, 19 nt, Artificial Sequence
  Description of Artificial Sequence: Synthetic oligonucleotide
  Sense strand starting at position 243 of SEQ ID NO: 1884643
ugaauaagucgucaguguu

SEQ ID NO: 2280871 - RNA, 19 nt, Artificial Sequence
  Description of Artificial Sequence: Synthetic oligonucleotide
  Antisense strand to SEQ ID NO: 2280870
aacacugacgacuuauuca

SEQ ID NO: 2280872 - RNA, 19 nt, Artificial Sequence
  Description of Artificial Sequence: Synthetic oligonucleotide
  Sense strand starting at position 331 of SEQ ID NO: 1884643
aaguuaccgcuugacuuua

SEQ ID NO: 2280873 - RNA, 19 nt, Artificial Sequence
  Description of Artificial Sequence: Synthetic oligonucleotide
  Antisense strand to SEQ ID NO: 2280872
uaaagucaagcgguaacuu

SEQ ID NO: 2280874 - RNA, 19 nt, Artificial Sequence
  Description of Artificial Sequence: Synthetic oligonucleotide
  Sense strand starting at position 494 of SEQ ID NO: 1884643
caugguaggcacgguuaua

SEQ ID NO: 2280875 - RNA, 19 nt, Artificial Sequence
  Description of Artificial Sequence: Synthetic oligonucleotide
  Antisense strand to SEQ ID NO: 2280874
uauaaccgugccuaccaug

SEQ ID NO: 2280876 - RNA, 19 nt, Artificial Sequence
  Description of Artificial Sequence: Synthetic oligonucleotide
  Sense strand starting at position 636 of SEQ ID NO: 1884643
cucacaugaccaugugaug

SEQ ID NO: 2280877 - RNA, 19 nt, Artificial Sequence
  Description of Artificial Sequence: Synthetic oligonucleotide
  Antisense strand to SEQ ID NO: 2280876
caucacauggucaugugag

SEQ ID NO: 2280878 - RNA, 19 nt, Artificial Sequence
  Description of Artificial Sequence: Synthetic oligonucleotide
  Sense strand starting at position 852 of SEQ ID NO: 1884643
uaauuuguauucuggagag

SEQ ID NO: 2280879 - RNA, 19 nt, Artificial Sequence
  Description of Artificial Sequence: Synthetic oligonucleotide
  Antisense strand to SEQ ID NO: 2280878
cucuccagaauacaaauua

SEQ ID NO: 2280880 - RNA, 19 nt, Artificial Sequence
  Description of Artificial Sequence: Synthetic oligonucleotide
  Sense strand starting at position 941 of SEQ ID NO: 1884643
aaguuaacucgugaugaau

SEQ ID NO: 2280881 - RNA, 19 nt, Artificial Sequence
  Description of Artificial Sequence: Synthetic oligonucleotide
  Antisense strand to SEQ ID NO: 2280880
auucaucacgaguuaacuu

SEQ ID NO: 2280882 - RNA, 19 nt, Artificial Sequence
  Description of Artificial Sequence: Synthetic oligonucleotide
  Sense strand starting at position 1008 of SEQ ID NO: 1884643
gacuguagugucuaggguu

SEQ ID NO: 2280883 - RNA, 19 nt, Artificial Sequence
  Description of Artificial Sequence: Synthetic oligonucleotide
  Antisense strand to SEQ ID NO: 2280882
aacccuagacacuacaguc

SEQ ID NO: 2280884 - RNA, 19 nt, Artificial Sequence
  Description of Artificial Sequence: Synthetic oligonucleotide
  Sense strand starting at position 1135 of SEQ ID NO: 1884643
aucacaugcccaggguuaa

SEQ ID NO: 2280885 - RNA, 19 nt, Artificial Sequence
  Description of Artificial Sequence: Synthetic oligonucleotide
  Antisense strand to SEQ ID NO: 2280884
uuaacccugggcaugugau

SEQ ID NO: 2280886 - RNA, 19 nt, Artificial Sequence
  Description of Artificial Sequence: Synthetic oligonucleotide
  Sense strand starting at position 1136 of SEQ ID NO: 1884643
ucacaugcccaggguuaaa

SEQ ID NO: 2280887 - RNA, 19 nt, Artificial Sequence
  Description of Artificial Sequence: Synthetic oligonucleotide
  Antisense strand to SEQ ID NO: 2280886
uuuaacccugggcauguga

SEQ ID NO: 2280888 - RNA, 19 nt, Artificial Sequence
  Description of Artificial Sequence: Synthetic oligonucleotide
  Sense strand starting at position 1170 of SEQ ID NO: 1884643
cuugauggaauccgguaua

SEQ ID NO: 2280889 - RNA, 19 nt, Artificial Sequence
  Description of Artificial Sequence: Synthetic oligonucleotide
  Antisense strand to SEQ ID NO: 2280888
uauaccggauuccaucaag

SEQ ID NO: 2280890 - RNA, 19 nt, Artificial Sequence
  Description of Artificial Sequence: Synthetic oligonucleotide
  Sense strand starting at position 1173 of SEQ ID NO: 1884643
gauggaauccgguauaugc

SEQ ID NO: 2280891 - RNA, 19 nt, Artificial Sequence
  Description of Artificial Sequence: Synthetic oligonucleotide
  Antisense strand to SEQ ID NO: 2280890
gcauauaccggauuccauc

SEQ ID NO: 2280892 - RNA, 19 nt, Artificial Sequence
  Description of Artificial Sequence: Synthetic oligonucleotide
  Sense strand starting at position 1348 of SEQ ID NO: 1884643
ccguuucaugggugacacu

SEQ ID NO: 2280893 - RNA, 19 nt, Artificial Sequence
  Description of Artificial Sequence: Synthetic oligonucleotide
  Antisense strand to SEQ ID NO: 2280892
agugucacccaugaaacgg

SEQ ID NO: 2280894 - RNA, 19 nt, Artificial Sequence
  Description of Artificial Sequence: Synthetic oligonucleotide
  Sense strand starting at position 2187 of SEQ ID NO: 1884643
cugggcaaauuugaagaau

SEQ ID NO: 2280895 - RNA, 19 nt, Artificial Sequence
  Description of Artificial Sequence: Synthetic oligonucleotide
  Antisense strand to SEQ ID NO: 2280894
auucuucaaauuugcccag

SEQ ID NO: 2280896 - RNA, 19 nt, Artificial Sequence
  Description of Artificial Sequence: Synthetic oligonucleotide
  Sense strand starting at position 2485 of SEQ ID NO: 1884643
ggccuacuucccugaauca

SEQ ID NO: 2280897 - RNA, 19 nt, Artificial Sequence
  Description of Artificial Sequence: Synthetic oligonucleotide
  Antisense strand to SEQ ID NO: 2280896
ugauucagggaaguaggcc

SEQ ID NO: 2280898 - RNA, 19 nt, Artificial Sequence
  Description of Artificial Sequence: Synthetic oligonucleotide
  Sense strand starting at position 2584 of SEQ ID NO: 1884643
uggagaccuugccauuuaa

SEQ ID NO: 2280899 - RNA, 19 nt, Artificial Sequence
  Description of Artificial Sequence: Synthetic oligonucleotide
  Antisense strand to SEQ ID NO: 2280898
uuaaauggcaaggucucca

SEQ ID NO: 2280900 - RNA, 19 nt, Artificial Sequence
  Description of Artificial Sequence: Synthetic oligonucleotide
  Sense strand starting at position 2612 of SEQ ID NO: 1884643
guuagagccuuccuauuua

SEQ ID NO: 2280901 - RNA, 19 nt, Artificial Sequence
  Description of Artificial Sequence: Synthetic oligonucleotide
  Antisense strand to SEQ ID NO: 2280900
uaaauaggaaggcucuaac

SEQ ID NO: 2280902 - RNA, 19 nt, Artificial Sequence
  Description of Artificial Sequence: Synthetic oligonucleotide
  Sense strand starting at position 2620 of SEQ ID NO: 1884643
cuuccuauuuaguauagau

SEQ ID NO: 2280903 - RNA, 19 nt, Artificial Sequence
  Description of Artificial Sequence: Synthetic oligonucleotide
  Antisense strand to SEQ ID NO: 2280902
aucuauacuaaauaggaag

SEQ ID NO: 2280904 - RNA, 19 nt, Artificial Sequence
  Description of Artificial Sequence: Synthetic oligonucleotide
  Sense strand starting at position 2629 of SEQ ID NO: 1884643
uaguauagauuacugugua

SEQ ID NO: 2280905 - RNA, 19 nt, Artificial Sequence
  Description of Artificial Sequence: Synthetic oligonucleotide
  Antisense strand to SEQ ID NO: 2280904
uacacaguaaucuauacua

SEQ ID NO: 2280906 - RNA, 19 nt, Artificial Sequence
  Description of Artificial Sequence: Synthetic oligonucleotide
  Sense strand starting at position 2632 of SEQ ID NO: 1884643
uauagauuacuguguauug

SEQ ID NO: 2280907 - RNA, 19 nt, Artificial Sequence
  Description of Artificial Sequence: Synthetic oligonucleotide
  Antisense strand to SEQ ID NO: 2280906
caauacacaguaaucuaua

SEQ ID NO: 2280908 - RNA, 19 nt, Artificial Sequence
  Description of Artificial Sequence: Synthetic oligonucleotide
  Sense strand starting at position 2633 of SEQ ID NO: 1884643
auagauuacuguguauuga

SEQ ID NO: 2280909 - RNA, 19 nt, Artificial Sequence
  Description of Artificial Sequence: Synthetic oligonucleotide
  Antisense strand to SEQ ID NO: 2280908
ucaauacacaguaaucuau

SEQ ID NO: 2280910 - RNA, 19 nt, Artificial Sequence
  Description of Artificial Sequence: Synthetic oligonucleotide
  Sense strand starting at position 2634 of SEQ ID NO: 1884643
uagauuacuguguauugag

SEQ ID NO: 2280911 - RNA, 19 nt, Artificial Sequence
  Description of Artificial Sequence: Synthetic oligonucleotide
  Antisense strand to SEQ ID NO: 2280910
cucaauacacaguaaucua

SEQ ID NO: 2280912 - RNA, 19 nt, Artificial Sequence
  Description of Artificial Sequence: Synthetic oligonucleotide
  Sense strand starting at position 2680 of SEQ ID NO: 1884643
ggccauuguggugaagaag

SEQ ID NO: 2280913 - RNA, 19 nt, Artificial Sequence
  Description of Artificial Sequence: Synthetic oligonucleotide
  Antisense strand to SEQ ID NO: 2280912
cuucuucaccacaauggcc

SEQ ID NO: 2280914 - RNA, 19 nt, Artificial Sequence
  Description of Artificial Sequence: Synthetic oligonucleotide
  Sense strand starting at position 2776 of SEQ ID NO: 1884643
acugaaugguaggacaaga

SEQ ID NO: 2280915 - RNA, 19 nt, Artificial Sequence
  Description of Artificial Sequence: Synthetic oligonucleotide
  Antisense strand to SEQ ID NO: 2280914
ucuuguccuaccauucagu

SEQ ID NO: 2280916 - RNA, 19 nt, Artificial Sequence
  Description of Artificial Sequence: Synthetic oligonucleotide
  Sense strand starting at position 2899 of SEQ ID NO: 1884643
uguuacugauaugccuaau

SEQ ID NO: 2280917 - RNA, 19 nt, Artificial Sequence
  Description of Artificial Sequence: Synthetic oligonucleotide
  Antisense strand to SEQ ID NO: 2280916
auuaggcauaucaguaaca

SEQ ID NO: 2280918 - RNA, 19 nt, Artificial Sequence
  Description of Artificial Sequence: Synthetic oligonucleotide
  Sense strand starting at position 3129 of SEQ ID NO: 1884643
ccugguauuucuuaaauag

SEQ ID NO: 2280919 - RNA, 19 nt, Artificial Sequence
  Description of Artificial Sequence: Synthetic oligonucleotide
  Antisense strand to SEQ ID NO: 2280918
cuauuuaagaaauaccagg

SEQ ID NO: 2280920 - RNA, 19 nt, Artificial Sequence
  Description of Artificial Sequence: Synthetic oligonucleotide
  Sense strand starting at position 3648 of SEQ ID NO: 1884643
uaacguuuccuggacuacu

SEQ ID NO: 2280921 - RNA, 19 nt, Artificial Sequence
  Description of Artificial Sequence: Synthetic oligonucleotide
  Antisense strand to SEQ ID NO: 2280920
aguaguccaggaaacguua

SEQ ID NO: 2280922 - RNA, 19 nt, Artificial Sequence
  Description of Artificial Sequence: Synthetic oligonucleotide
  Sense strand starting at position 3816 of SEQ ID NO: 1884643
accauaugucauugcaaug

SEQ ID NO: 2280923 - RNA, 19 nt, Artificial Sequence
  Description of Artificial Sequence: Synthetic oligonucleotide
  Antisense strand to SEQ ID NO: 2280922
cauugcaaugacauauggu

SEQ ID NO: 2280924 - RNA, 19 nt, Artificial Sequence
  Description of Artificial Sequence: Synthetic oligonucleotide
  Sense strand starting at position 3821 of SEQ ID NO: 1884643
augucauugcaauggguuu

SEQ ID NO: 2280925 - RNA, 19 nt, Artificial Sequence
  Description of Artificial Sequence: Synthetic oligonucleotide
  Antisense strand to SEQ ID NO: 2280924
aaacccauugcaaugacau

SEQ ID NO: 2280926 - RNA, 19 nt, Artificial Sequence
  Description of Artificial Sequence: Synthetic oligonucleotide
  Sense strand starting at position 3835 of SEQ ID NO: 1884643
gguuucucuugacucuaau

SEQ ID NO: 2280927 - RNA, 19 nt, Artificial Sequence
  Description of Artificial Sequence: Synthetic oligonucleotide
  Antisense strand to SEQ ID NO: 2280926
auuagagucaagagaaacc

SEQ ID NO: 2280928 - RNA, 19 nt, Artificial Sequence
  Description of Artificial Sequence: Synthetic oligonucleotide
  Sense strand starting at position 3958 of SEQ ID NO: 1884643
caguacuuggcaugagaug

SEQ ID NO: 2280929 - RNA, 19 nt, Artificial Sequence
  Description of Artificial Sequence: Synthetic oligonucleotide
  Antisense strand to SEQ ID NO: 2280928
caucucaugccaaguacug

SEQ ID NO: 2280930 - RNA, 19 nt, Artificial Sequence
  Description of Artificial Sequence: Synthetic oligonucleotide
  Sense strand starting at position 3967 of SEQ ID NO: 1884643
gcaugagauggucauccca

SEQ ID NO: 2280931 - RNA, 19 nt, Artificial Sequence
  Description of Artificial Sequence: Synthetic oligonucleotide
  Antisense strand to SEQ ID NO: 2280930
ugggaugaccaucucaugc

SEQ ID NO: 2280932 - RNA, 19 nt, Artificial Sequence
  Description of Artificial Sequence: Synthetic oligonucleotide
  Sense strand starting at position 3969 of SEQ ID NO: 1884643
augagauggucaucccaau

SEQ ID NO: 2280933 - RNA, 19 nt, Artificial Sequence
  Description of Artificial Sequence: Synthetic oligonucleotide
  Antisense strand to SEQ ID NO: 2280932
auugggaugaccaucucau

SEQ ID NO: 2280934 - RNA, 19 nt, Artificial Sequence
  Description of Artificial Sequence: Synthetic oligonucleotide
  Sense strand starting at position 3975 of SEQ ID NO: 1884643
uggucaucccaaugaucca

SEQ ID NO: 2280935 - RNA, 19 nt, Artificial Sequence
  Description of Artificial Sequence: Synthetic oligonucleotide
  Antisense strand to SEQ ID NO: 2280934
uggaucauugggaugacca

SEQ ID NO: 2280936 - RNA, 19 nt, Artificial Sequence
  Description of Artificial Sequence: Synthetic oligonucleotide
  Sense strand starting at position 28 of SEQ ID NO: 1884644
gaagguuucugaguaaucu

SEQ ID NO: 2280937 - RNA, 19 nt, Artificial Sequence
  Description of Artificial Sequence: Synthetic oligonucleotide
  Antisense strand to SEQ ID NO: 2280936
agauuacucagaaaccuuc

SEQ ID NO: 2280938 - RNA, 19 nt, Artificial Sequence
  Description of Artificial Sequence: Synthetic oligonucleotide
  Sense strand starting at position 29 of SEQ ID NO: 1884644
aagguuucugaguaaucug

SEQ ID NO: 2280939 - RNA, 19 nt, Artificial Sequence
  Description of Artificial Sequence: Synthetic oligonucleotide
  Antisense strand to SEQ ID NO: 2280938
cagauuacucagaaaccuu

SEQ ID NO: 2280940 - RNA, 19 nt, Artificial Sequence
  Description of Artificial Sequence: Synthetic oligonucleotide
  Sense strand starting at position 89 of SEQ ID NO: 1884644
cugacaaggcuauggcuua

SEQ ID NO: 2280941 - RNA, 19 nt, Artificial Sequence
  Description of Artificial Sequence: Synthetic oligonucleotide
  Antisense strand to SEQ ID NO: 2280940
uaagccauagccuugucag

SEQ ID NO: 2280942 - RNA, 19 nt, Artificial Sequence
  Description of Artificial Sequence: Synthetic oligonucleotide
  Sense strand starting at position 196 of SEQ ID NO: 1884644
gauugaagagcuugaaauu

SEQ ID NO: 2280943 - RNA, 19 nt, Artificial Sequence
  Description of Artificial Sequence: Synthetic oligonucleotide
  Antisense strand to SEQ ID NO: 2280942
aauuucaagcucuucaauc

SEQ ID NO: 2280944 - RNA, 19 nt, Artificial Sequence
  Description of Artificial Sequence: Synthetic oligonucleotide
  Sense strand starting at position 208 of SEQ ID NO: 1884644
ugaaauuaagccuaagugu

SEQ ID NO: 2280945 - RNA, 19 nt, Artificial Sequence
  Description of Artificial Sequence: Synthetic oligonucleotide
  Antisense strand to SEQ ID NO: 2280944
acacuuaggcuuaauuuca

SEQ ID NO: 2280946 - RNA, 19 nt, Artificial Sequence
  Description of Artificial Sequence: Synthetic oligonucleotide
  Sense strand starting at position 257 of SEQ ID NO: 1884644
aguuaaaucgaagguuaga

SEQ ID NO: 2280947 - RNA, 19 nt, Artificial Sequence
  Description of Artificial Sequence: Synthetic oligonucleotide
  Antisense strand to SEQ ID NO: 2280946
ucuaaccuucgauuuaacu

SEQ ID NO: 2280948 - RNA, 19 nt, Artificial Sequence
  Description of Artificial Sequence: Synthetic oligonucleotide
  Sense strand starting at position 894 of SEQ ID NO: 1884644
auccaugaccgauguuacu

SEQ ID NO: 2280949 - RNA, 19 nt, Artificial Sequence
  Description of Artificial Sequence: Synthetic oligonucleotide
  Antisense strand to SEQ ID NO: 2280948
aguaacaucggucauggau

SEQ ID NO: 2280950 - RNA, 19 nt, Artificial Sequence
  Description of Artificial Sequence: Synthetic oligonucleotide
  Sense strand starting at position 900 of SEQ ID NO: 1884644
gaccgauguuacucuggaa

SEQ ID NO: 2280951 - RNA, 19 nt, Artificial Sequence
  Description of Artificial Sequence: Synthetic oligonucleotide
  Antisense strand to SEQ ID NO: 2280950
uuccagaguaacaucgguc

SEQ ID NO: 2280952 - RNA, 19 nt, Artificial Sequence
  Description of Artificial Sequence: Synthetic oligonucleotide
  Sense strand starting at position 917 of SEQ ID NO: 1884644
aaucuauugccagacguca

SEQ ID NO: 2280953 - RNA, 19 nt, Artificial Sequence
  Description of Artificial Sequence: Synthetic oligonucleotide
  Antisense strand to SEQ ID NO: 2280952
ugacgucuggcaauagauu

SEQ ID NO: 2280954 - RNA, 19 nt, Artificial Sequence
  Description of Artificial Sequence: Synthetic oligonucleotide
  Sense strand starting at position 1433 of SEQ ID NO: 1884644
uguuaaucauuccuguaug

SEQ ID NO: 2280955 - RNA, 19 nt, Artificial Sequence
  Description of Artificial Sequence: Synthetic oligonucleotide
  Antisense strand to SEQ ID NO: 2280954
cauacaggaaugauuaaca

SEQ ID NO: 2280956 - RNA, 19 nt, Artificial Sequence
  Description of Artificial Sequence: Synthetic oligonucleotide
  Sense strand starting at position 1517 of SEQ ID NO: 1884644
aaaugcauuucggaggacu

SEQ ID NO: 2280957 - RNA, 19 nt, Artificial Sequence
  Description of Artificial Sequence: Synthetic oligonucleotide
  Antisense strand to SEQ ID NO: 2280956
aguccuccgaaaugcauuu

SEQ ID NO: 2280958 - RNA, 19 nt, Artificial Sequence
  Description of Artificial Sequence: Synthetic oligonucleotide
  Sense strand starting at position 2068 of SEQ ID NO: 1884644
acguaagaagacuacaguu

SEQ ID NO: 2280959 - RNA, 19 nt, Artificial Sequence
  Description of Artificial Sequence: Synthetic oligonucleotide
  Antisense strand to SEQ ID NO: 2280958
aacuguagucuucuuacgu

SEQ ID NO: 2280960 - RNA, 19 nt, Artificial Sequence
  Description of Artificial Sequence: Synthetic oligonucleotide
  Sense strand starting at position 2413 of SEQ ID NO: 1884644
guuauuccucccgcuuagu

SEQ ID NO: 2280961 - RNA, 19 nt, Artificial Sequence
  Description of Artificial Sequence: Synthetic oligonucleotide
  Antisense strand to SEQ ID NO: 2280960
acuaagcgggaggaauaac

SEQ ID NO: 2280962 - RNA, 19 nt, Artificial Sequence
  Description of Artificial Sequence: Synthetic oligonucleotide
  Sense strand starting at position 2791 of SEQ ID NO: 1884644
gucgcacuacuuuagaaca

SEQ ID NO: 2280963 - RNA, 19 nt, Artificial Sequence
  Description of Artificial Sequence: Synthetic oligonucleotide
  Antisense strand to SEQ ID NO: 2280962
uguucuaaaguagugcgac

SEQ ID NO: 2280964 - RNA, 19 nt, Artificial Sequence
  Description of Artificial Sequence: Synthetic oligonucleotide
  Sense strand starting at position 2847 of SEQ ID NO: 1884644
uuaagaugaacgugcuuaa

SEQ ID NO: 2280965 - RNA, 19 nt, Artificial Sequence
  Description of Artificial Sequence: Synthetic oligonucleotide
  Antisense strand to SEQ ID NO: 2280964
uuaagcacguucaucuuaa

SEQ ID NO: 2280966 - RNA, 19 nt, Artificial Sequence
  Description of Artificial Sequence: Synthetic oligonucleotide
  Sense strand starting at position 2851 of SEQ ID NO: 1884644
gaugaacgugcuuaaguuu

SEQ ID NO: 2280967 - RNA, 19 nt, Artificial Sequence
  Description of Artificial Sequence: Synthetic oligonucleotide
  Antisense strand to SEQ ID NO: 2280966
aaacuuaagcacguucauc

SEQ ID NO: 2280968 - RNA, 19 nt, Artificial Sequence
  Description of Artificial Sequence: Synthetic oligonucleotide
  Sense strand starting at position 2888 of SEQ ID NO: 1884644
guguguaugucuauguggu

SEQ ID NO: 2280969 - RNA, 19 nt, Artificial Sequence
  Description of Artificial Sequence: Synthetic oligonucleotide
  Antisense strand to SEQ ID NO: 2280968
accacauagacauacacac

SEQ ID NO: 2280970 - RNA, 19 nt, Artificial Sequence
  Description of Artificial Sequence: Synthetic oligonucleotide
  Sense strand starting at position 2932 of SEQ ID NO: 1884644
aggugacaguguccuuuaa

SEQ ID NO: 2280971 - RNA, 19 nt, Artificial Sequence
  Description of Artificial Sequence: Synthetic oligonucleotide
  Antisense strand to SEQ ID NO: 2280970
uuaaaggacacugucaccu

SEQ ID NO: 2280972 - RNA, 19 nt, Artificial Sequence
  Description of Artificial Sequence: Synthetic oligonucleotide
  Sense strand starting at position 2934 of SEQ ID NO: 1884644
gugacaguguccuuuaaug

SEQ ID NO: 2280973 - RNA, 19 nt, Artificial Sequence
  Description of Artificial Sequence: Synthetic oligonucleotide
  Antisense strand to SEQ ID NO: 2280972
cauuaaaggacacugucac

SEQ ID NO: 2280974 - RNA, 19 nt, Artificial Sequence
  Description of Artificial Sequence: Synthetic oligonucleotide
  Sense strand starting at position 2936 of SEQ ID NO: 1884644
gacaguguccuuuaauggu

SEQ ID NO: 2280975 - RNA, 19 nt, Artificial Sequence
  Description of Artificial Sequence: Synthetic oligonucleotide
  Antisense strand to SEQ ID NO: 2280974
accauuaaaggacacuguc

SEQ ID NO: 2280976 - RNA, 19 nt, Artificial Sequence
  Description of Artificial Sequence: Synthetic oligonucleotide
  Sense strand starting at position 3080 of SEQ ID NO: 1884644
agccgacagauuugugcuu

SEQ ID NO: 2280977 - RNA, 19 nt, Artificial Sequence
  Description of Artificial Sequence: Synthetic oligonucleotide
  Antisense strand to SEQ ID NO: 2280976
aagcacaaaucugucggcu

SEQ ID NO: 2280978 - RNA, 19 nt, Artificial Sequence
  Description of Artificial Sequence: Synthetic oligonucleotide
  Sense strand starting at position 3086 of SEQ ID NO: 1884644
cagauuugugcuugugugu

SEQ ID NO: 2280979 - RNA, 19 nt, Artificial Sequence
  Description of Artificial Sequence: Synthetic oligonucleotide
  Antisense strand to SEQ ID NO: 2280978
acacacaagcacaaaucug

SEQ ID NO: 2280980 - RNA, 19 nt, Artificial Sequence
  Description of Artificial Sequence: Synthetic oligonucleotide
  Sense strand starting at position 3188 of SEQ ID NO: 1884644
caaauaacgguuugaagag

SEQ ID NO: 2280981 - RNA, 19 nt, Artificial Sequence
  Description of Artificial Sequence: Synthetic oligonucleotide
  Antisense strand to SEQ ID NO: 2280980
cucuucaaaccguuauuug

SEQ ID NO: 2280982 - RNA, 19 nt, Artificial Sequence
  Description of Artificial Sequence: Synthetic oligonucleotide
  Sense strand starting at position 3194 of SEQ ID NO: 1884644
acgguuugaagagaucgau

SEQ ID NO: 2280983 - RNA, 19 nt, Artificial Sequence
  Description of Artificial Sequence: Synthetic oligonucleotide
  Antisense strand to SEQ ID NO: 2280982
aucgaucucuucaaaccgu

SEQ ID NO: 2280984 - RNA, 19 nt, Artificial Sequence
  Description of Artificial Sequence: Synthetic oligonucleotide
  Sense strand starting at position 3197 of SEQ ID NO: 1884644
guuugaagagaucgauuag

SEQ ID NO: 2280985 - RNA, 19 nt, Artificial Sequence
  Description of Artificial Sequence: Synthetic oligonucleotide
  Antisense strand to SEQ ID NO: 2280984
cuaaucgaucucuucaaac

SEQ ID NO: 2280986 - RNA, 19 nt, Artificial Sequence
  Description of Artificial Sequence: Synthetic oligonucleotide
  Sense strand starting at position 3381 of SEQ ID NO: 1884644
cuuacaugaugcucuugua

SEQ ID NO: 2280987 - RNA, 19 nt, Artificial Sequence
  Description of Artificial Sequence: Synthetic oligonucleotide
  Antisense strand to SEQ ID NO: 2280986
uacaagagcaucauguaag

SEQ ID NO: 2280988 - RNA, 19 nt, Artificial Sequence
  Description of Artificial Sequence: Synthetic oligonucleotide
  Sense strand starting at position 3419 of SEQ ID NO: 1884644
gggcaauagauauguuacu

SEQ ID NO: 2280989 - RNA, 19 nt, Artificial Sequence
  Description of Artificial Sequence: Synthetic oligonucleotide
  Antisense strand to SEQ ID NO: 2280988
aguaacauaucuauugccc

SEQ ID NO: 2280990 - RNA, 19 nt, Artificial Sequence
  Description of Artificial Sequence: Synthetic oligonucleotide
  Sense strand starting at position 3420 of SEQ ID NO: 1884644
ggcaauagauauguuacuu

SEQ ID NO: 2280991 - RNA, 19 nt, Artificial Sequence
  Description of Artificial Sequence: Synthetic oligonucleotide
  Antisense strand to SEQ ID NO: 2280990
aaguaacauaucuauugcc

SEQ ID NO: 2280992 - RNA, 19 nt, Artificial Sequence
  Description of Artificial Sequence: Synthetic oligonucleotide
  Sense strand starting at position 3425 of SEQ ID NO: 1884644
uagauauguuacuuugaga

SEQ ID NO: 2280993 - RNA, 19 nt, Artificial Sequence
  Description of Artificial Sequence: Synthetic oligonucleotide
  Antisense strand to SEQ ID NO: 2280992
ucucaaaguaacauaucua

SEQ ID NO: 2280994 - RNA, 19 nt, Artificial Sequence
  Description of Artificial Sequence: Synthetic oligonucleotide
  Sense strand starting at position 3476 of SEQ ID NO: 1884644
ccagucuuggcugagagau

SEQ ID NO: 2280995 - RNA, 19 nt, Artificial Sequence
  Description of Artificial Sequence: Synthetic oligonucleotide
  Antisense strand to SEQ ID NO: 2280994
aucucucagccaagacugg

SEQ ID NO: 2280996 - RNA, 19 nt, Artificial Sequence
  Description of Artificial Sequence: Synthetic oligonucleotide
  Sense strand starting at position 3564 of SEQ ID NO: 1884644
augccagaguauuugcuua

SEQ ID NO: 2280997 - RNA, 19 nt, Artificial Sequence
  Description of Artificial Sequence: Synthetic oligonucleotide
  Antisense strand to SEQ ID NO: 2280996
uaagcaaauacucuggcau

SEQ ID NO: 2280998 - RNA, 19 nt, Artificial Sequence
  Description of Artificial Sequence: Synthetic oligonucleotide
  Sense strand starting at position 3566 of SEQ ID NO: 1884644
gccagaguauuugcuuaac

SEQ ID NO: 2280999 - RNA, 19 nt, Artificial Sequence
  Description of Artificial Sequence: Synthetic oligonucleotide
  Antisense strand to SEQ ID NO: 2280998
guuaagcaaauacucuggc

SEQ ID NO: 2281000 - RNA, 19 nt, Artificial Sequence
  Description of Artificial Sequence: Synthetic oligonucleotide
  Sense strand starting at position 3575 of SEQ ID NO: 1884644
uuugcuuaacucuagaaug

SEQ ID NO: 2281001 - RNA, 19 nt, Artificial Sequence
  Description of Artificial Sequence: Synthetic oligonucleotide
  Antisense strand to SEQ ID NO: 2281000
cauucuagaguuaagcaaa

SEQ ID NO: 2281002 - RNA, 19 nt, Artificial Sequence
  Description of Artificial Sequence: Synthetic oligonucleotide
  Sense strand starting at position 3577 of SEQ ID NO: 1884644
ugcuuaacucuagaaugcu

SEQ ID NO: 2281003 - RNA, 19 nt, Artificial Sequence
  Description of Artificial Sequence: Synthetic oligonucleotide
  Antisense strand to SEQ ID NO: 2281002
agcauucuagaguuaagca

SEQ ID NO: 2281004 - RNA, 19 nt, Artificial Sequence
  Description of Artificial Sequence: Synthetic oligonucleotide
  Sense strand starting at position 3612 of SEQ ID NO: 1884644
gagucagacaugggcgaaa

SEQ ID NO: 2281005 - RNA, 19 nt, Artificial Sequence
  Description of Artificial Sequence: Synthetic oligonucleotide
  Antisense strand to SEQ ID NO: 2281004
uuucgcccaugucugacuc

SEQ ID NO: 2281006 - RNA, 19 nt, Artificial Sequence
  Description of Artificial Sequence: Synthetic oligonucleotide
  Sense strand starting at position 3614 of SEQ ID NO: 1884644
gucagacaugggcgaaauu

SEQ ID NO: 2281007 - RNA, 19 nt, Artificial Sequence
  Description of Artificial Sequence: Synthetic oligonucleotide
  Antisense strand to SEQ ID NO: 2281006
aauuucgcccaugucugac

SEQ ID NO: 2281008 - RNA, 19 nt, Artificial Sequence
  Description of Artificial Sequence: Synthetic oligonucleotide
  Sense strand starting at position 3640 of SEQ ID NO: 1884644
ggcugucuucugcugcuaa

SEQ ID NO: 2281009 - RNA, 19 nt, Artificial Sequence
  Description of Artificial Sequence: Synthetic oligonucleotide
  Antisense strand to SEQ ID NO: 2281008
uuagcagcagaagacagcc

SEQ ID NO: 2281010 - RNA, 19 nt, Artificial Sequence
  Description of Artificial Sequence: Synthetic oligonucleotide
  Sense strand starting at position 3685 of SEQ ID NO: 1884644
auccuuaggucuccaaagu

SEQ ID NO: 2281011 - RNA, 19 nt, Artificial Sequence
  Description of Artificial Sequence: Synthetic oligonucleotide
  Antisense strand to SEQ ID NO: 2281010
acuuuggagaccuaaggau

SEQ ID NO: 2281012 - RNA, 19 nt, Artificial Sequence
  Description of Artificial Sequence: Synthetic oligonucleotide
  Sense strand starting at position 3686 of SEQ ID NO: 1884644
uccuuaggucuccaaaguu

SEQ ID NO: 2281013 - RNA, 19 nt, Artificial Sequence
  Description of Artificial Sequence: Synthetic oligonucleotide
  Antisense strand to SEQ ID NO: 2281012
aacuuuggagaccuaagga

SEQ ID NO: 2281014 - RNA, 19 nt, Artificial Sequence
  Description of Artificial Sequence: Synthetic oligonucleotide
  Sense strand starting at position 3769 of SEQ ID NO: 1884644
ggcuuuguaguagagugau

SEQ ID NO: 2281015 - RNA, 19 nt, Artificial Sequence
  Description of Artificial Sequence: Synthetic oligonucleotide
  Antisense strand to SEQ ID NO: 2281014
aucacucuacuacaaagcc

SEQ ID NO: 2281016 - RNA, 19 nt, Artificial Sequence
  Description of Artificial Sequence: Synthetic oligonucleotide
  Sense strand starting at position 82 of SEQ ID NO: 1884645
caguauugguagcuuaaua

SEQ ID NO: 2281017 - RNA, 19 nt, Artificial Sequence
  Description of Artificial Sequence: Synthetic oligonucleotide
  Antisense strand to SEQ ID NO: 2281016
uauuaagcuaccaauacug

SEQ ID NO: 2281018 - RNA, 19 nt, Artificial Sequence
  Description of Artificial Sequence: Synthetic oligonucleotide
  Sense strand starting at position 109 of SEQ ID NO: 1884645
guauuuauugacugcccau

SEQ ID NO: 2281019 - RNA, 19 nt, Artificial Sequence
  Description of Artificial Sequence: Synthetic oligonucleotide
  Antisense strand to SEQ ID NO: 2281018
augggcagucaauaaauac

SEQ ID NO: 2281020 - RNA, 19 nt, Artificial Sequence
  Description of Artificial Sequence: Synthetic oligonucleotide
  Sense strand starting at position 250 of SEQ ID NO: 1884645
uauagugaugccuaucaug

SEQ ID NO: 2281021 - RNA, 19 nt, Artificial Sequence
  Description of Artificial Sequence: Synthetic oligonucleotide
  Antisense strand to SEQ ID NO: 2281020
caugauaggcaucacuaua

SEQ ID NO: 2281022 - RNA, 19 nt, Artificial Sequence
  Description of Artificial Sequence: Synthetic oligonucleotide
  Sense strand starting at position 475 of SEQ ID NO: 1884645
uugaguucucaagggaaca

SEQ ID NO: 2281023 - RNA, 19 nt, Artificial Sequence
  Description of Artificial Sequence: Synthetic oligonucleotide
  Antisense strand to SEQ ID NO: 2281022
uguucccuugagaacucaa

SEQ ID NO: 2281024 - RNA, 19 nt, Artificial Sequence
  Description of Artificial Sequence: Synthetic oligonucleotide
  Sense strand starting at position 487 of SEQ ID NO: 1884645
gggaacaacccaugucuaa

SEQ ID NO: 2281025 - RNA, 19 nt, Artificial Sequence
  Description of Artificial Sequence: Synthetic oligonucleotide
  Antisense strand to SEQ ID NO: 2281024
uuagacauggguuguuccc

SEQ ID NO: 2281026 - RNA, 19 nt, Artificial Sequence
  Description of Artificial Sequence: Synthetic oligonucleotide
  Sense strand starting at position 669 of SEQ ID NO: 1884645
aguagacaauaucauuaga

SEQ ID NO: 2281027 - RNA, 19 nt, Artificial Sequence
  Description of Artificial Sequence: Synthetic oligonucleotide
  Antisense strand to SEQ ID NO: 2281026
ucuaaugauauugucuacu

SEQ ID NO: 2281028 - RNA, 19 nt, Artificial Sequence
  Description of Artificial Sequence: Synthetic oligonucleotide
  Sense strand starting at position 777 of SEQ ID NO: 1884645
ccaaguggauagucuuaca

SEQ ID NO: 2281029 - RNA, 19 nt, Artificial Sequence
  Description of Artificial Sequence: Synthetic oligonucleotide
  Antisense strand to SEQ ID NO: 2281028
uguaagacuauccacuugg

SEQ ID NO: 2281030 - RNA, 19 nt, Artificial Sequence
  Description of Artificial Sequence: Synthetic oligonucleotide
  Sense strand starting at position 788 of SEQ ID NO: 1884645
gucuuacaagcauaaagau

SEQ ID NO: 2281031 - RNA, 19 nt, Artificial Sequence
  Description of Artificial Sequence: Synthetic oligonucleotide
  Antisense strand to SEQ ID NO: 2281030
aucuuuaugcuuguaagac

SEQ ID NO: 2281032 - RNA, 19 nt, Artificial Sequence
  Description of Artificial Sequence: Synthetic oligonucleotide
  Sense strand starting at position 797 of SEQ ID NO: 1884645
gcauaaagauuaucaggca

SEQ ID NO: 2281033 - RNA, 19 nt, Artificial Sequence
  Description of Artificial Sequence: Synthetic oligonucleotide
  Antisense strand to SEQ ID NO: 2281032
ugccugauaaucuuuaugc

SEQ ID NO: 2281034 - RNA, 19 nt, Artificial Sequence
  Description of Artificial Sequence: Synthetic oligonucleotide
  Sense strand starting at position 868 of SEQ ID NO: 1884645
gugcuuugcauuuauagug

SEQ ID NO: 2281035 - RNA, 19 nt, Artificial Sequence
  Description of Artificial Sequence: Synthetic oligonucleotide
  Antisense strand to SEQ ID NO: 2281034
cacuauaaaugcaaagcac

SEQ ID NO: 2281036 - RNA, 19 nt, Artificial Sequence
  Description of Artificial Sequence: Synthetic oligonucleotide
  Sense strand starting at position 875 of SEQ ID NO: 1884645
gcauuuauaguguguauga

SEQ ID NO: 2281037 - RNA, 19 nt, Artificial Sequence
  Description of Artificial Sequence: Synthetic oligonucleotide
  Antisense strand to SEQ ID NO: 2281036
ucauacacacuauaaaugc

SEQ ID NO: 2281038 - RNA, 19 nt, Artificial Sequence
  Description of Artificial Sequence: Synthetic oligonucleotide
  Sense strand starting at position 885 of SEQ ID NO: 1884645
uguguaugaugcucaagag

SEQ ID NO: 2281039 - RNA, 19 nt, Artificial Sequence
  Description of Artificial Sequence: Synthetic oligonucleotide
  Antisense strand to SEQ ID NO: 2281038
cucuugagcaucauacaca

SEQ ID NO: 2281040 - RNA, 19 nt, Artificial Sequence
  Description of Artificial Sequence: Synthetic oligonucleotide
  Sense strand starting at position 886 of SEQ ID NO: 1884645
guguaugaugcucaagaga

SEQ ID NO: 2281041 - RNA, 19 nt, Artificial Sequence
  Description of Artificial Sequence: Synthetic oligonucleotide
  Antisense strand to SEQ ID NO: 2281040
ucucuugagcaucauacac

SEQ ID NO: 2281042 - RNA, 19 nt, Artificial Sequence
  Description of Artificial Sequence: Synthetic oligonucleotide
  Sense strand starting at position 915 of SEQ ID NO: 1884645
agucaaugugcauaaagca

SEQ ID NO: 2281043 - RNA, 19 nt, Artificial Sequence
  Description of Artificial Sequence: Synthetic oligonucleotide
  Antisense strand to SEQ ID NO: 2281042
ugcuuuaugcacauugacu

SEQ ID NO: 2281044 - RNA, 19 nt, Artificial Sequence
  Description of Artificial Sequence: Synthetic oligonucleotide
  Sense strand starting at position 956 of SEQ ID NO: 1884645
aaaggagcuguccagcaau

SEQ ID NO: 2281045 - RNA, 19 nt, Artificial Sequence
  Description of Artificial Sequence: Synthetic oligonucleotide
  Antisense strand to SEQ ID NO: 2281044
auugcuggacagcuccuuu

SEQ ID NO: 2281046 - RNA, 19 nt, Artificial Sequence
  Description of Artificial Sequence: Synthetic oligonucleotide
  Sense strand starting at position 959 of SEQ ID NO: 1884645
ggagcuguccagcaaucaa

SEQ ID NO: 2281047 - RNA, 19 nt, Artificial Sequence
  Description of Artificial Sequence: Synthetic oligonucleotide
  Antisense strand to SEQ ID NO: 2281046
uugauugcuggacagcucc

SEQ ID NO: 2281048 - RNA, 19 nt, Artificial Sequence
  Description of Artificial Sequence: Synthetic oligonucleotide
  Sense strand starting at position 1377 of SEQ ID NO: 1884645
uaagguuugcuguaccaau

SEQ ID NO: 2281049 - RNA, 19 nt, Artificial Sequence
  Description of Artificial Sequence: Synthetic oligonucleotide
  Antisense strand to SEQ ID NO: 2281048
auugguacagcaaaccuua

SEQ ID NO: 2281050 - RNA, 19 nt, Artificial Sequence
  Description of Artificial Sequence: Synthetic oligonucleotide
  Sense strand starting at position 1402 of SEQ ID NO: 1884645
ugccuugauuucguaccaa

SEQ ID NO: 2281051 - RNA, 19 nt, Artificial Sequence
  Description of Artificial Sequence: Synthetic oligonucleotide
  Antisense strand to SEQ ID NO: 2281050
uugguacgaaaucaaggca

SEQ ID NO: 2281052 - RNA, 19 nt, Artificial Sequence
  Description of Artificial Sequence: Synthetic oligonucleotide
  Sense strand starting at position 1500 of SEQ ID NO: 1884645
uggugacgagaugaguuaa

SEQ ID NO: 2281053 - RNA, 19 nt, Artificial Sequence
  Description of Artificial Sequence: Synthetic oligonucleotide
  Antisense strand to SEQ ID NO: 2281052
uuaacucaucucgucacca

SEQ ID NO: 2281054 - RNA, 19 nt, Artificial Sequence
  Description of Artificial Sequence: Synthetic oligonucleotide
  Sense strand starting at position 1702 of SEQ ID NO: 1884645
ccagucaguuugguggaua

SEQ ID NO: 2281055 - RNA, 19 nt, Artificial Sequence
  Description of Artificial Sequence: Synthetic oligonucleotide
  Antisense strand to SEQ ID NO: 2281054
uauccaccaaacugacugg

SEQ ID NO: 2281056 - RNA, 19 nt, Artificial Sequence
  Description of Artificial Sequence: Synthetic oligonucleotide
  Sense strand starting at position 2125 of SEQ ID NO: 1884645
ugguuacccgucgcuguaa

SEQ ID NO: 2281057 - RNA, 19 nt, Artificial Sequence
  Description of Artificial Sequence: Synthetic oligonucleotide
  Antisense strand to SEQ ID NO: 2281056
uuacagcgacggguaacca

SEQ ID NO: 2281058 - RNA, 19 nt, Artificial Sequence
  Description of Artificial Sequence: Synthetic oligonucleotide
  Sense strand starting at position 2212 of SEQ ID NO: 1884645
cugaguccugugcauucua

SEQ ID NO: 2281059 - RNA, 19 nt, Artificial Sequence
  Description of Artificial Sequence: Synthetic oligonucleotide
  Antisense strand to SEQ ID NO: 2281058
uagaaugcacaggacucag

SEQ ID NO: 2281060 - RNA, 19 nt, Artificial Sequence
  Description of Artificial Sequence: Synthetic oligonucleotide
  Sense strand starting at position 2782 of SEQ ID NO: 1884645
guauuagacccucaacuug

SEQ ID NO: 2281061 - RNA, 19 nt, Artificial Sequence
  Description of Artificial Sequence: Synthetic oligonucleotide
  Antisense strand to SEQ ID NO: 2281060
caaguugagggucuaauac

SEQ ID NO: 2281062 - RNA, 19 nt, Artificial Sequence
  Description of Artificial Sequence: Synthetic oligonucleotide
  Sense strand starting at position 2825 of SEQ ID NO: 1884645
auggauucccuuuguagga

SEQ ID NO: 2281063 - RNA, 19 nt, Artificial Sequence
  Description of Artificial Sequence: Synthetic oligonucleotide
  Antisense strand to SEQ ID NO: 2281062
uccuacaaagggaauccau

SEQ ID NO: 2281064 - RNA, 19 nt, Artificial Sequence
  Description of Artificial Sequence: Synthetic oligonucleotide
  Sense strand starting at position 2891 of SEQ ID NO: 1884645
cgagcagucuucucaacug

SEQ ID NO: 2281065 - RNA, 19 nt, Artificial Sequence
  Description of Artificial Sequence: Synthetic oligonucleotide
  Antisense strand to SEQ ID NO: 2281064
caguugagaagacugcucg

SEQ ID NO: 2281066 - RNA, 19 nt, Artificial Sequence
  Description of Artificial Sequence: Synthetic oligonucleotide
  Sense strand starting at position 2944 of SEQ ID NO: 1884645
aggugaaauugaguuagcu

SEQ ID NO: 2281067 - RNA, 19 nt, Artificial Sequence
  Description of Artificial Sequence: Synthetic oligonucleotide
  Antisense strand to SEQ ID NO: 2281066
agcuaacucaauuucaccu

SEQ ID NO: 2281068 - RNA, 19 nt, Artificial Sequence
  Description of Artificial Sequence: Synthetic oligonucleotide
  Sense strand starting at position 2946 of SEQ ID NO: 1884645
gugaaauugaguuagcugu

SEQ ID NO: 2281069 - RNA, 19 nt, Artificial Sequence
  Description of Artificial Sequence: Synthetic oligonucleotide
  Antisense strand to SEQ ID NO: 2281068
acagcuaacucaauuucac

SEQ ID NO: 2281070 - RNA, 19 nt, Artificial Sequence
  Description of Artificial Sequence: Synthetic oligonucleotide
  Sense strand starting at position 3004 of SEQ ID NO: 1884645
uuagaaagguauuccggaa

SEQ ID NO: 2281071 - RNA, 19 nt, Artificial Sequence
  Description of Artificial Sequence: Synthetic oligonucleotide
  Antisense strand to SEQ ID NO: 2281070
uuccggaauaccuuucuaa

SEQ ID NO: 2281072 - RNA, 19 nt, Artificial Sequence
  Description of Artificial Sequence: Synthetic oligonucleotide
  Sense strand starting at position 3042 of SEQ ID NO: 1884645
aaggcaaaucuggaagcuu

SEQ ID NO: 2281073 - RNA, 19 nt, Artificial Sequence
  Description of Artificial Sequence: Synthetic oligonucleotide
  Antisense strand to SEQ ID NO: 2281072
aagcuuccagauuugccuu

SEQ ID NO: 2281074 - RNA, 19 nt, Artificial Sequence
  Description of Artificial Sequence: Synthetic oligonucleotide
  Sense strand starting at position 3122 of SEQ ID NO: 1884645
acacgaagugcacaaauau

SEQ ID NO: 2281075 - RNA, 19 nt, Artificial Sequence
  Description of Artificial Sequence: Synthetic oligonucleotide
  Antisense strand to SEQ ID NO: 2281074
auauuugugcacuucgugu

SEQ ID NO: 2281076 - RNA, 19 nt, Artificial Sequence
  Description of Artificial Sequence: Synthetic oligonucleotide
  Sense strand starting at position 3216 of SEQ ID NO: 1884645
uuugcuuuccugggacagu

SEQ ID NO: 2281077 - RNA, 19 nt, Artificial Sequence
  Description of Artificial Sequence: Synthetic oligonucleotide
  Antisense strand to SEQ ID NO: 2281076
acugucccaggaaagcaaa

SEQ ID NO: 2281078 - RNA, 19 nt, Artificial Sequence
  Description of Artificial Sequence: Synthetic oligonucleotide
  Sense strand starting at position 3306 of SEQ ID NO: 1884645
gcagaugagaaaugucaau

SEQ ID NO: 2281079 - RNA, 19 nt, Artificial Sequence
  Description of Artificial Sequence: Synthetic oligonucleotide
  Antisense strand to SEQ ID NO: 2281078
auugacauuucucaucugc

SEQ ID NO: 2281080 - RNA, 19 nt, Artificial Sequence
  Description of Artificial Sequence: Synthetic oligonucleotide
  Sense strand starting at position 3540 of SEQ ID NO: 1884645
aaguuaaaugccuguggac

SEQ ID NO: 2281081 - RNA, 19 nt, Artificial Sequence
  Description of Artificial Sequence: Synthetic oligonucleotide
  Antisense strand to SEQ ID NO: 2281080
guccacaggcauuuaacuu

SEQ ID NO: 2281082 - RNA, 19 nt, Artificial Sequence
  Description of Artificial Sequence: Synthetic oligonucleotide
  Sense strand starting at position 3542 of SEQ ID NO: 1884645
guuaaaugccuguggacug

SEQ ID NO: 2281083 - RNA, 19 nt, Artificial Sequence
  Description of Artificial Sequence: Synthetic oligonucleotide
  Antisense strand to SEQ ID NO: 2281082
caguccacaggcauuuaac

SEQ ID NO: 2281084 - RNA, 19 nt, Artificial Sequence
  Description of Artificial Sequence: Synthetic oligonucleotide
  Sense strand starting at position 3564 of SEQ ID NO: 1884645
gccuguaaggagugaacua

SEQ ID NO: 2281085 - RNA, 19 nt, Artificial Sequence
  Description of Artificial Sequence: Synthetic oligonucleotide
  Antisense strand to SEQ ID NO: 2281084
uaguucacuccuuacaggc

SEQ ID NO: 2281086 - RNA, 19 nt, Artificial Sequence
  Description of Artificial Sequence: Synthetic oligonucleotide
  Sense strand starting at position 3603 of SEQ ID NO: 1884645
gcucuuaagaauuggaggu

SEQ ID NO: 2281087 - RNA, 19 nt, Artificial Sequence
  Description of Artificial Sequence: Synthetic oligonucleotide
  Antisense strand to SEQ ID NO: 2281086
accuccaauucuuaagagc

SEQ ID NO: 2281088 - RNA, 19 nt, Artificial Sequence
  Description of Artificial Sequence: Synthetic oligonucleotide
  Sense strand starting at position 3619 of SEQ ID NO: 1884645
gguacuggguuccuuuaaa

SEQ ID NO: 2281089 - RNA, 19 nt, Artificial Sequence
  Description of Artificial Sequence: Synthetic oligonucleotide
  Antisense strand to SEQ ID NO: 2281088
uuuaaaggaacccaguacc

SEQ ID NO: 2281090 - RNA, 19 nt, Artificial Sequence
  Description of Artificial Sequence: Synthetic oligonucleotide
  Sense strand starting at position 3664 of SEQ ID NO: 1884645
gaaggauuggcuggaaauc

SEQ ID NO: 2281091 - RNA, 19 nt, Artificial Sequence
  Description of Artificial Sequence: Synthetic oligonucleotide
  Antisense strand to SEQ ID NO: 2281090
gauuuccagccaauccuuc

SEQ ID NO: 2281092 - RNA, 19 nt, Artificial Sequence
  Description of Artificial Sequence: Synthetic oligonucleotide
  Sense strand starting at position 3933 of SEQ ID NO: 1884645
agcuaugauugugugaaac

SEQ ID NO: 2281093 - RNA, 19 nt, Artificial Sequence
  Description of Artificial Sequence: Synthetic oligonucleotide
  Antisense strand to SEQ ID NO: 2281092
guuucacacaaucauagcu

SEQ ID NO: 2281094 - RNA, 19 nt, Artificial Sequence
  Description of Artificial Sequence: Synthetic oligonucleotide
  Sense strand starting at position 3976 of SEQ ID NO: 1884645
ugauaauaaugccugaaug

SEQ ID NO: 2281095 - RNA, 19 nt, Artificial Sequence
  Description of Artificial Sequence: Synthetic oligonucleotide
  Antisense strand to SEQ ID NO: 2281094
cauucaggcauuauuauca

SEQ ID NO: 2281096 - RNA, 19 nt, Artificial Sequence
  Description of Artificial Sequence: Synthetic oligonucleotide
  Sense strand starting at position 75 of SEQ ID NO: 1884646
agccaacuguaaucacaga

SEQ ID NO: 2281097 - RNA, 19 nt, Artificial Sequence
  Description of Artificial Sequence: Synthetic oligonucleotide
  Antisense strand to SEQ ID NO: 2281096
ucugugauuacaguuggcu

SEQ ID NO: 2281098 - RNA, 19 nt, Artificial Sequence
  Description of Artificial Sequence: Synthetic oligonucleotide
  Sense strand starting at position 169 of SEQ ID NO: 1884646
accuguagucucuagugau
